United States Patent Application Publication US 2015/0232836 A1 - sequence listing, part 28

SEQ ID NO: 1045443 - DNA, 15 bp, Homo sapiens
agggactttgggcag

SEQ ID NO: 1045444 - DNA, 15 bp, Homo sapiens
gagggactttgggca

SEQ ID NO: 1045445 - DNA, 15 bp, Homo sapiens
ggagggactttgggc

SEQ ID NO: 1045446 - DNA, 15 bp, Homo sapiens
aggagggactttggg

SEQ ID NO: 1045447 - DNA, 15 bp, Homo sapiens
gaggagggactttgg

SEQ ID NO: 1045448 - DNA, 15 bp, Homo sapiens
tgaggagggactttg

SEQ ID NO: 1045449 - DNA, 15 bp, Homo sapiens
gtgaggagggacttt

SEQ ID NO: 1045450 - DNA, 15 bp, Homo sapiens
ggtgaggagggactt

SEQ ID NO: 1045451 - DNA, 15 bp, Homo sapiens
gggtgaggagggact

SEQ ID NO: 1045452 - DNA, 15 bp, Homo sapiens
tgggtgaggagggac

SEQ ID NO: 1045453 - DNA, 15 bp, Homo sapiens
ctgggtgaggaggga

SEQ ID NO: 1045454 - DNA, 15 bp, Homo sapiens
cctgggtgaggaggg

SEQ ID NO: 1045455 - DNA, 15 bp, Homo sapiens
acctgggtgaggagg

SEQ ID NO: 1045456 - DNA, 15 bp, Homo sapiens
tacctgggtgaggag

SEQ ID NO: 1045457 - DNA, 15 bp, Homo sapiens
ttacctgggtgagga

SEQ ID NO: 1045458 - DNA, 15 bp, Homo sapiens
gttacctgggtgagg

SEQ ID NO: 1045459 - DNA, 15 bp, Homo sapiens
ggttacctgggtgag

SEQ ID NO: 1045460 - DNA, 15 bp, Homo sapiens
aggttacctgggtga

SEQ ID NO: 1045461 - DNA, 15 bp, Homo sapiens
caggttacctgggtg

SEQ ID NO: 1045462 - DNA, 15 bp, Homo sapiens
gcaggttacctgggt

SEQ ID NO: 1045463 - DNA, 15 bp, Homo sapiens
tgcaggttacctggg

SEQ ID NO: 1045464 - DNA, 15 bp, Homo sapiens
ttgcaggttacctgg

SEQ ID NO: 1045465 - DNA, 15 bp, Homo sapiens
tttgcaggttacctg

SEQ ID NO: 1045466 - DNA, 15 bp, Homo sapiens
gtttgcaggttacct

SEQ ID NO: 1045467 - DNA, 15 bp, Homo sapiens
tgtttgcaggttacc

SEQ ID NO: 1045468 - DNA, 15 bp, Homo sapiens
gtgtttgcaggttac

SEQ ID NO: 1045469 - DNA, 15 bp, Homo sapiens
ggtgtttgcaggtta

SEQ ID NO: 1045470 - DNA, 15 bp, Homo sapiens
gggtgtttgcaggtt

SEQ ID NO: 1045471 - DNA, 15 bp, Homo sapiens
tgggtgtttgcaggt

SEQ ID NO: 1045472 - DNA, 15 bp, Homo sapiens
atgggtgtttgcagg

SEQ ID NO: 1045473 - DNA, 15 bp, Homo sapiens
gatgggtgtttgcag

SEQ ID NO: 1045474 - DNA, 15 bp, Homo sapiens
agatgggtgtttgca

SEQ ID NO: 1045475 - DNA, 15 bp, Homo sapiens
cagatgggtgtttgc

SEQ ID NO: 1045476 - DNA, 15 bp, Homo sapiens
ccagatgggtgtttg

SEQ ID NO: 1045477 - DNA, 15 bp, Homo sapiens
accagatgggtgttt

SEQ ID NO: 1045478 - DNA, 15 bp, Homo sapiens
aaccagatgggtgtt

SEQ ID NO: 1045479 - DNA, 15 bp, Homo sapiens
aaaccagatgggtgt

SEQ ID NO: 1045480 - DNA, 15 bp, Homo sapiens
caaaccagatgggtg

SEQ ID NO: 1045481 - DNA, 15 bp, Homo sapiens
gcaaaccagatgggt

SEQ ID NO: 1045482 - DNA, 15 bp, Homo sapiens
tgcaaaccagatggg

SEQ ID NO: 1045483 - DNA, 15 bp, Homo sapiens
atgcaaaccagatgg

SEQ ID NO: 1045484 - DNA, 15 bp, Homo sapiens
tatgcaaaccagatg

SEQ ID NO: 1045485 - DNA, 15 bp, Homo sapiens
ttatgcaaaccagat

SEQ ID NO: 1045486 - DNA, 15 bp, Homo sapiens
cttatgcaaaccaga

SEQ ID NO: 1045487 - DNA, 15 bp, Homo sapiens
ccttatgcaaaccag

SEQ ID NO: 1045488 - DNA, 15 bp, Homo sapiens
cccttatgcaaacca

SEQ ID NO: 1045489 - DNA, 15 bp, Homo sapiens
gcccttatgcaaacc

SEQ ID NO: 1045490 - DNA, 15 bp, Homo sapiens
tgcccttatgcaaac

SEQ ID NO: 1045491 - DNA, 15 bp, Homo sapiens
ttgcccttatgcaaa

SEQ ID NO: 1045492 - DNA, 15 bp, Homo sapiens
tttgcccttatgcaa

SEQ ID NO: 1045493 - DNA, 15 bp, Homo sapiens
gtttgcccttatgca

SEQ ID NO: 1045494 - DNA, 15 bp, Homo sapiens
ggtttgcccttatgc

SEQ ID NO: 1045495 - DNA, 15 bp, Homo sapiens
aggtttgcccttatg

SEQ ID NO: 1045496 - DNA, 15 bp, Homo sapiens
caggtttgcccttat

SEQ ID NO: 1045497 - DNA, 15 bp, Homo sapiens
gcaggtttgccctta

SEQ ID NO: 1045498 - DNA, 15 bp, Homo sapiens
ggcaggtttgccctt

SEQ ID NO: 1045499 - DNA, 15 bp, Homo sapiens
gggcaggtttgccct

SEQ ID NO: 1045500 - DNA, 15 bp, Homo sapiens
ggggcaggtttgccc

SEQ ID NO: 1045501 - DNA, 15 bp, Homo sapiens
gggggcaggtttgcc

SEQ ID NO: 1045502 - DNA, 15 bp, Homo sapiens
agggggcaggtttgc

SEQ ID NO: 1045503 - DNA, 15 bp, Homo sapiens
cagggggcaggtttg

SEQ ID NO: 1045504 - DNA, 15 bp, Homo sapiens
ccagggggcaggttt

SEQ ID NO: 1045505 - DNA, 15 bp, Homo sapiens
tccagggggcaggtt

SEQ ID NO: 1045506 - DNA, 15 bp, Homo sapiens
ctccagggggcaggt

SEQ ID NO: 1045507 - DNA, 15 bp, Homo sapiens
actccagggggcagg

SEQ ID NO: 1045508 - DNA, 15 bp, Homo sapiens
cactccagggggcag

SEQ ID NO: 1045509 - DNA, 15 bp, Homo sapiens
acactccagggggca

SEQ ID NO: 1045510 - DNA, 15 bp, Homo sapiens
cacactccagggggc

SEQ ID NO: 1045511 - DNA, 15 bp, Homo sapiens
tcacactccaggggg

SEQ ID NO: 1045512 - DNA, 15 bp, Homo sapiens
ctcacactccagggg

SEQ ID NO: 1045513 - DNA, 15 bp, Homo sapiens
actcacactccaggg

SEQ ID NO: 1045514 - DNA, 15 bp, Homo sapiens
gactcacactccagg

SEQ ID NO: 1045515 - DNA, 15 bp, Homo sapiens
tgactcacactccag

SEQ ID NO: 1045516 - DNA, 15 bp, Homo sapiens
ttgactcacactcca

SEQ ID NO: 1045517 - DNA, 15 bp, Homo sapiens
tttgactcacactcc

SEQ ID NO: 1045518 - DNA, 15 bp, Homo sapiens
gtttgactcacactc

SEQ ID NO: 1045519 - DNA, 15 bp, Homo sapiens
tgtttgactcacact

SEQ ID NO: 1045520 - DNA, 15 bp, Homo sapiens
ctgtttgactcacac

SEQ ID NO: 1045521 - DNA, 15 bp, Homo sapiens
cctgtttgactcaca

SEQ ID NO: 1045522 - DNA, 15 bp, Homo sapiens
tcctgtttgactcac

SEQ ID NO: 1045523 - DNA, 15 bp, Homo sapiens
ttcctgtttgactca

SEQ ID NO: 1045524 - DNA, 15 bp, Homo sapiens
gttcctgtttgactc

SEQ ID NO: 1045525 - DNA, 15 bp, Homo sapiens
agttcctgtttgact

SEQ ID NO: 1045526 - DNA, 15 bp, Homo sapiens
aagttcctgtttgac

SEQ ID NO: 1045527 - DNA, 15 bp, Homo sapiens
gaagttcctgtttga

SEQ ID NO: 1045528 - DNA, 15 bp, Homo sapiens
ggaagttcctgtttg

SEQ ID NO: 1045529 - DNA, 15 bp, Homo sapiens
tggaagttcctgttt

SEQ ID NO: 1045530 - DNA, 15 bp, Homo sapiens
ctggaagttcctgtt

SEQ ID NO: 1045531 - DNA, 15 bp, Homo sapiens
tctggaagttcctgt

SEQ ID NO: 1045532 - DNA, 15 bp, Homo sapiens
gtctggaagttcctg

SEQ ID NO: 1045533 - DNA, 15 bp, Homo sapiens
tgtctggaagttcct

SEQ ID NO: 1045534 - DNA, 15 bp, Homo sapiens
ttgtctggaagttcc

SEQ ID NO: 1045535 - DNA, 15 bp, Homo sapiens
cttgtctggaagttc

SEQ ID NO: 1045536 - DNA, 15 bp, Homo sapiens
gcttgtctggaagtt

SEQ ID NO: 1045537 - DNA, 15 bp, Homo sapiens
agcttgtctggaagt

SEQ ID NO: 1045538 - DNA, 15 bp, Homo sapiens
cagcttgtctggaag

SEQ ID NO: 1045539 - DNA, 15 bp, Homo sapiens
acagcttgtctggaa

SEQ ID NO: 1045540 - DNA, 15 bp, Homo sapiens
gacagcttgtctgga

SEQ ID NO: 1045541 - DNA, 15 bp, Homo sapiens
ggacagcttgtctgg

SEQ ID NO: 1045542 - DNA, 15 bp, Homo sapiens
aggacagcttgtctg

SEQ ID NO: 1045543 - DNA, 15 bp, Homo sapiens
caggacagcttgtct

SEQ ID NO: 1045544 - DNA, 15 bp, Homo sapiens
ccaggacagcttgtc

SEQ ID NO: 1045545 - DNA, 15 bp, Homo sapiens
cccaggacagcttgt

SEQ ID NO: 1045546 - DNA, 15 bp, Homo sapiens
ccccaggacagcttg

SEQ ID NO: 1045547 - DNA, 15 bp, Homo sapiens
gccccaggacagctt

SEQ ID NO: 1045548 - DNA, 15 bp, Homo sapiens
tgccccaggacagct

SEQ ID NO: 1045549 - DNA, 15 bp, Homo sapiens
ctgccccaggacagc

SEQ ID NO: 1045550 - DNA, 15 bp, Homo sapiens
gctgccccaggacag

SEQ ID NO: 1045551 - DNA, 15 bp, Homo sapiens
ggctgccccaggaca

SEQ ID NO: 1045552 - DNA, 15 bp, Homo sapiens
gggctgccccaggac

SEQ ID NO: 1045553 - DNA, 15 bp, Homo sapiens
agggctgccccagga

SEQ ID NO: 1045554 - DNA, 15 bp, Homo sapiens
cagggctgccccagg

SEQ ID NO: 1045555 - DNA, 15 bp, Homo sapiens
ccagggctgccccag

SEQ ID NO: 1045556 - DNA, 15 bp, Homo sapiens
cccagggctgcccca

SEQ ID NO: 1045557 - DNA, 15 bp, Homo sapiens
gcccagggctgcccc

SEQ ID NO: 1045558 - DNA, 15 bp, Homo sapiens
ggcccagggctgccc

SEQ ID NO: 1045559 - DNA, 15 bp, Homo sapiens
tggcccagggctgcc

SEQ ID NO: 1045560 - DNA, 15 bp, Homo sapiens
gtggcccagggctgc

SEQ ID NO: 1045561 - DNA, 15 bp, Homo sapiens
ggtggcccagggctg

SEQ ID NO: 1045562 - DNA, 15 bp, Homo sapiens
aggtggcccagggct

SEQ ID NO: 1045563 - DNA, 15 bp, Homo sapiens
aaggtggcccagggc

SEQ ID NO: 1045564 - DNA, 15 bp, Homo sapiens
caaggtggcccaggg

SEQ ID NO: 1045565 - DNA, 15 bp, Homo sapiens
gcaaggtggcccagg

SEQ ID NO: 1045566 - DNA, 15 bp, Homo sapiens
ggcaaggtggcccag

SEQ ID NO: 1045567 - DNA, 15 bp, Homo sapiens
tggcaaggtggccca

SEQ ID NO: 1045568 - DNA, 15 bp, Homo sapiens
ctggcaaggtggccc

SEQ ID NO: 1045569 - DNA, 15 bp, Homo sapiens
gctggcaaggtggcc

SEQ ID NO: 1045570 - DNA, 15 bp, Homo sapiens
agctggcaaggtggc

SEQ ID NO: 1045571 - DNA, 15 bp, Homo sapiens
gagctggcaaggtgg

SEQ ID NO: 1045572 - DNA, 15 bp, Homo sapiens
tgagctggcaaggtg

SEQ ID NO: 1045573 - DNA, 15 bp, Homo sapiens
ttgagctggcaaggt

SEQ ID NO: 1045574 - DNA, 15 bp, Homo sapiens
tttgagctggcaagg

SEQ ID NO: 1045575 - DNA, 15 bp, Homo sapiens
ctttgagctggcaag

SEQ ID NO: 1045576 - DNA, 15 bp, Homo sapiens
gctttgagctggcaa

SEQ ID NO: 1045577 - DNA, 15 bp, Homo sapiens
tgctttgagctggca

SEQ ID NO: 1045578 - DNA, 15 bp, Homo sapiens
ttgctttgagctggc

SEQ ID NO: 1045579 - DNA, 15 bp, Homo sapiens
cttgctttgagctgg

SEQ ID NO: 1045580 - DNA, 15 bp, Homo sapiens
tcttgctttgagctg

SEQ ID NO: 1045581 - DNA, 15 bp, Homo sapiens
ctcttgctttgagct

SEQ ID NO: 1045582 - DNA, 15 bp, Homo sapiens
actcttgctttgagc

SEQ ID NO: 1045583 - DNA, 15 bp, Homo sapiens
cactcttgctttgag

SEQ ID NO: 1045584 - DNA, 15 bp, Homo sapiens
acactcttgctttga

SEQ ID NO: 1045585 - DNA, 15 bp, Homo sapiens
gacactcttgctttg

SEQ ID NO: 1045586 - DNA, 15 bp, Homo sapiens
tgacactcttgcttt

SEQ ID NO: 1045587 - DNA, 15 bp, Homo sapiens
gtgacactcttgctt

SEQ ID NO: 1045588 - DNA, 15 bp, Homo sapiens
agtgacactcttgct

SEQ ID NO: 1045589 - DNA, 15 bp, Homo sapiens
aagtgacactcttgc

SEQ ID NO: 1045590 - DNA, 15 bp, Homo sapiens
caagtgacactcttg

SEQ ID NO: 1045591 - DNA, 15 bp, Homo sapiens
gcaagtgacactctt

SEQ ID NO: 1045592 - DNA, 15 bp, Homo sapiens
agcaagtgacactct

SEQ ID NO: 1045593 - DNA, 15 bp, Homo sapiens
aagcaagtgacactc

SEQ ID NO: 1045594 - DNA, 15 bp, Homo sapiens
caagcaagtgacact

SEQ ID NO: 1045595 - DNA, 15 bp, Homo sapiens
ccaagcaagtgacac

SEQ ID NO: 1045596 - DNA, 15 bp, Homo sapiens
cccaagcaagtgaca

SEQ ID NO: 1045597 - DNA, 15 bp, Homo sapiens
acccaagcaagtgac

SEQ ID NO: 1045598 - DNA, 15 bp, Homo sapiens
cacccaagcaagtga

SEQ ID NO: 1045599 - DNA, 15 bp, Homo sapiens
tcacccaagcaagtg

SEQ ID NO: 1045600 - DNA, 15 bp, Homo sapiens
ttcacccaagcaagt

SEQ ID NO: 1045601 - DNA, 15 bp, Homo sapiens
cttcacccaagcaag

SEQ ID NO: 1045602 - DNA, 15 bp, Homo sapiens
tcttcacccaagcaa

SEQ ID NO: 1045603 - DNA, 15 bp, Homo sapiens
ctcttcacccaagca

SEQ ID NO: 1045604 - DNA, 15 bp, Homo sapiens
actcttcacccaagc

SEQ ID NO: 1045605 - DNA, 15 bp, Homo sapiens
cactcttcacccaag

SEQ ID NO: 1045606 - DNA, 15 bp, Homo sapiens
tcactcttcacccaa

SEQ ID NO: 1045607 - DNA, 15 bp, Homo sapiens
gtcactcttcaccca

SEQ ID NO: 1045608 - DNA, 15 bp, Homo sapiens
tgtcactcttcaccc

SEQ ID NO: 1045609 - DNA, 15 bp, Homo sapiens
gtgtcactcttcacc

SEQ ID NO: 1045610 - DNA, 15 bp, Homo sapiens
agtgtcactcttcac

SEQ ID NO: 1045611 - DNA, 15 bp, Homo sapiens
cagtgtcactcttca

SEQ ID NO: 1045612 - DNA, 15 bp, Homo sapiens
ccagtgtcactcttc

SEQ ID NO: 1045613 - DNA, 15 bp, Homo sapiens
cccagtgtcactctt

SEQ ID NO: 1045614 - DNA, 15 bp, Homo sapiens
gcccagtgtcactct

SEQ ID NO: 1045615 - DNA, 15 bp, Homo sapiens
agcccagtgtcactc

SEQ ID NO: 1045616 - DNA, 15 bp, Homo sapiens
aagcccagtgtcact

SEQ ID NO: 1045617 - DNA, 15 bp, Homo sapiens
aaagcccagtgtcac

SEQ ID NO: 1045618 - DNA, 15 bp, Homo sapiens
gaaagcccagtgtca

SEQ ID NO: 1045619 - DNA, 15 bp, Homo sapiens
agaaagcccagtgtc

SEQ ID NO: 1045620 - DNA, 15 bp, Homo sapiens
cagaaagcccagtgt

SEQ ID NO: 1045621 - DNA, 15 bp, Homo sapiens
acagaaagcccagtg

SEQ ID NO: 1045622 - DNA, 15 bp, Homo sapiens
gacagaaagcccagt

SEQ ID NO: 1045623 - DNA, 15 bp, Homo sapiens
agacagaaagcccag

SEQ ID NO: 1045624 - DNA, 15 bp, Homo sapiens
gagacagaaagccca

SEQ ID NO: 1045625 - DNA, 15 bp, Homo sapiens
agagacagaaagccc

SEQ ID NO: 1045626 - DNA, 15 bp, Homo sapiens
aagagacagaaagcc

SEQ ID NO: 1045627 - DNA, 15 bp, Homo sapiens
gaagagacagaaagc

SEQ ID NO: 1045628 - DNA, 15 bp, Homo sapiens
agaagagacagaaag

SEQ ID NO: 1045629 - DNA, 15 bp, Homo sapiens
gagaagagacagaaa

SEQ ID NO: 1045630 - DNA, 15 bp, Homo sapiens
agagaagagacagaa

SEQ ID NO: 1045631 - DNA, 15 bp, Homo sapiens
ccagagaagagacag

SEQ ID NO: 1045632 - DNA, 15 bp, Homo sapiens
gccagagaagagaca

SEQ ID NO: 1045633 - DNA, 15 bp, Homo sapiens
ggccagagaagagac

SEQ ID NO: 1045634 - DNA, 15 bp, Homo sapiens
gggccagagaagaga

SEQ ID NO: 1045635 - DNA, 15 bp, Homo sapiens
agggccagagaagag

SEQ ID NO: 1045636 - DNA, 15 bp, Homo sapiens
cagggccagagaaga

SEQ ID NO: 1045637 - DNA, 15 bp, Homo sapiens
gcagggccagagaag

SEQ ID NO: 1045638 - DNA, 15 bp, Homo sapiens
tgcagggccagagaa

SEQ ID NO: 1045639 - DNA, 15 bp, Homo sapiens
ctgcagggccagaga

SEQ ID NO: 1045640 - DNA, 15 bp, Homo sapiens
cctgcagggccagag

SEQ ID NO: 1045641 - DNA, 15 bp, Homo sapiens
tcctgcagggccaga

SEQ ID NO: 1045642 - DNA, 15 bp, Homo sapiens
ctcctgcagggccag

SEQ ID NO: 1045643 - DNA, 15 bp, Homo sapiens
cctcctgcagggcca

SEQ ID NO: 1045644 - DNA, 15 bp, Homo sapiens
gcctcctgcagggcc

SEQ ID NO: 1045645 - DNA, 15 bp, Homo sapiens
agcctcctgcagggc

SEQ ID NO: 1045646 - DNA, 15 bp, Homo sapiens
gagcctcctgcaggg

SEQ ID NO: 1045647 - DNA, 15 bp, Homo sapiens
agagcctcctgcagg

SEQ ID NO: 1045648 - DNA, 15 bp, Homo sapiens
cagagcctcctgcag

SEQ ID NO: 1045649 - DNA, 15 bp, Homo sapiens
acagagcctcctgca

SEQ ID NO: 1045650 - DNA, 15 bp, Homo sapiens
gacagagcctcctgc

SEQ ID NO: 1045651 - DNA, 15 bp, Homo sapiens
cgacagagcctcctg

SEQ ID NO: 1045652 - DNA, 15 bp, Homo sapiens
ccgacagagcctcct

SEQ ID NO: 1045653 - DNA, 15 bp, Homo sapiens
accgacagagcctcc

SEQ ID NO: 1045654 - DNA, 15 bp, Homo sapiens
caccgacagagcctc

SEQ ID NO: 1045655 - DNA, 15 bp, Homo sapiens
ccaccgacagagcct

SEQ ID NO: 1045656 - DNA, 15 bp, Homo sapiens
accaccgacagagcc

SEQ ID NO: 1045657 - DNA, 15 bp, Homo sapiens
caccaccgacagagc

SEQ ID NO: 1045658 - DNA, 15 bp, Homo sapiens
tcaccaccgacagag

SEQ ID NO: 1045659 - DNA, 15 bp, Homo sapiens
ctcaccaccgacaga

SEQ ID NO: 1045660 - DNA, 15 bp, Homo sapiens
gctcaccaccgacag

SEQ ID NO: 1045661 - DNA, 15 bp, Homo sapiens
cgctcaccaccgaca

SEQ ID NO: 1045662 - DNA, 15 bp, Homo sapiens
tcgctcaccaccgac

SEQ ID NO: 1045663 - DNA, 15 bp, Homo sapiens
gtcgctcaccaccga

SEQ ID NO: 1045664 - DNA, 15 bp, Homo sapiens
cgtcgctcaccaccg

SEQ ID NO: 1045665 - DNA, 15 bp, Homo sapiens
tcgtcgctcaccacc

SEQ ID NO: 1045666 - DNA, 15 bp, Homo sapiens
gtcgtcgctcaccac

SEQ ID NO: 1045667 - DNA, 15 bp, Homo sapiens
ggtcgtcgctcacca

SEQ ID NO: 1045668 - DNA, 15 bp, Homo sapiens
tggtcgtcgctcacc

SEQ ID NO: 1045669 - DNA, 15 bp, Homo sapiens
ctggtcgtcgctcac

SEQ ID NO: 1045670 - DNA, 15 bp, Homo sapiens
actggtcgtcgctca

SEQ ID NO: 1045671 - DNA, 15 bp, Homo sapiens
gactggtcgtcgctc

SEQ ID NO: 1045672 - DNA, 15 bp, Homo sapiens
ggactggtcgtcgct

SEQ ID NO: 1045673 - DNA, 15 bp, Homo sapiens
gggactggtcgtcgc

SEQ ID NO: 1045674 - DNA, 15 bp, Homo sapiens
agggactggtcgtcg

SEQ ID NO: 1045675 - DNA, 15 bp, Homo sapiens
gagggactggtcgtc

SEQ ID NO: 1045676 - DNA, 15 bp, Homo sapiens
agagggactggtcgt

SEQ ID NO: 1045677 - DNA, 15 bp, Homo sapiens
aagagggactggtcg

SEQ ID NO: 1045678 - DNA, 15 bp, Homo sapiens
aaagagggactggtc

SEQ ID NO: 1045679 - DNA, 15 bp, Homo sapiens
caaagagggactggt

SEQ ID NO: 1045680 - DNA, 15 bp, Homo sapiens
tcaaagagggactgg

SEQ ID NO: 1045681 - DNA, 15 bp, Homo sapiens
gtcaaagagggactg

SEQ ID NO: 1045682 - DNA, 15 bp, Homo sapiens
agtcaaagagggact

SEQ ID NO: 1045683 - DNA, 15 bp, Homo sapiens
gagtcaaagagggac

SEQ ID NO: 1045684 - DNA, 15 bp, Homo sapiens
tgagtcaaagaggga

SEQ ID NO: 1045685 - DNA, 15 bp, Homo sapiens
ctgagtcaaagaggg

SEQ ID NO: 1045686 - DNA, 15 bp, Homo sapiens
gctgagtcaaagagg

SEQ ID NO: 1045687 - DNA, 15 bp, Homo sapiens
cgctgagtcaaagag

SEQ ID NO: 1045688 - DNA, 15 bp, Homo sapiens
acgctgagtcaaaga

SEQ ID NO: 1045689 - DNA, 15 bp, Homo sapiens
tacgctgagtcaaag

SEQ ID NO: 1045690 - DNA, 15 bp, Homo sapiens
gtacgctgagtcaaa

SEQ ID NO: 1045691 - DNA, 15 bp, Homo sapiens
cgtacgctgagtcaa

SEQ ID NO: 1045692 - DNA, 15 bp, Homo sapiens
ccgtacgctgagtca

SEQ ID NO: 1045693 - DNA, 15 bp, Homo sapiens
tccgtacgctgagtc

SEQ ID NO: 1045694 - DNA, 15 bp, Homo sapiens
ctccgtacgctgagt

SEQ ID NO: 1045695 - DNA, 15 bp, Homo sapiens
gctccgtacgctgag

SEQ ID NO: 1045696 - DNA, 15 bp, Homo sapiens
cgctccgtacgctga

SEQ ID NO: 1045697 - DNA, 15 bp, Homo sapiens
ccgctccgtacgctg

SEQ ID NO: 1045698 - DNA, 15 bp, Homo sapiens
gccgctccgtacgct

SEQ ID NO: 1045699 - DNA, 15 bp, Homo sapiens
tgccgctccgtacgc

SEQ ID NO: 1045700 - DNA, 15 bp, Homo sapiens
ctgccgctccgtacg

SEQ ID NO: 1045701 - DNA, 15 bp, Homo sapiens
gctgccgctccgtac

SEQ ID NO: 1045702 - DNA, 15 bp, Homo sapiens
ggctgccgctccgta

SEQ ID NO: 1045703 - DNA, 15 bp, Homo sapiens
gggctgccgctccgt

SEQ ID NO: 1045704 - DNA, 15 bp, Homo sapiens
tgggctgccgctccg

SEQ ID NO: 1045705 - DNA, 15 bp, Homo sapiens
atgggctgccgctcc

SEQ ID NO: 1045706 - DNA, 15 bp, Homo sapiens
gatgggctgccgctc

SEQ ID NO: 1045707 - DNA, 15 bp, Homo sapiens
agatgggctgccgct

SEQ ID NO: 1045708 - DNA, 15 bp, Homo sapiens
gagatgggctgccgc

SEQ ID NO: 1045709 - DNA, 15 bp, Homo sapiens
ggagatgggctgccg

SEQ ID NO: 1045710 - DNA, 15 bp, Homo sapiens
gggagatgggctgcc

SEQ ID NO: 1045711 - DNA, 15 bp, Homo sapiens
ggggagatgggctgc

SEQ ID NO: 1045712 - DNA, 15 bp, Homo sapiens
tggggagatgggctg

SEQ ID NO: 1045713 - DNA, 15 bp, Homo sapiens
ttggggagatgggct

SEQ ID NO: 1045714 - DNA, 15 bp, Homo sapiens
cttggggagatgggc

SEQ ID NO: 1045715 - DNA, 15 bp, Homo sapiens
ccttggggagatggg

SEQ ID NO: 1045716 - DNA, 15 bp, Homo sapiens
gccttggggagatgg

SEQ ID NO: 1045717 - DNA, 15 bp, Homo sapiens
ggccttggggagatg

SEQ ID NO: 1045718 - DNA, 15 bp, Homo sapiens
cggccttggggagat

SEQ ID NO: 1045719 - DNA, 15 bp, Homo sapiens
tcggccttggggaga

SEQ ID NO: 1045720 - DNA, 15 bp, Homo sapiens
gtcggccttggggag

SEQ ID NO: 1045721 - DNA, 15 bp, Homo sapiens
tgtcggccttgggga

SEQ ID NO: 1045722 - DNA, 15 bp, Homo sapiens
atgtcggccttgggg

SEQ ID NO: 1045723 - DNA, 15 bp, Homo sapiens
catgtcggccttggg

SEQ ID NO: 1045724 - DNA, 15 bp, Homo sapiens
tcatgtcggccttgg

SEQ ID NO: 1045725 - DNA, 15 bp, Homo sapiens
gtcatgtcggccttg

SEQ ID NO: 1045726 - DNA, 15 bp, Homo sapiens
agtcatgtcggcctt

SEQ ID NO: 1045727 - DNA, 15 bp, Homo sapiens
cagtcatgtcggcct

SEQ ID NO: 1045728 - DNA, 15 bp, Homo sapiens
gcagtcatgtcggcc

SEQ ID NO: 1045729 - DNA, 15 bp, Homo sapiens
ggcagtcatgtcggc

SEQ ID NO: 1045730 - DNA, 15 bp, Homo sapiens
aggcagtcatgtcgg

SEQ ID NO: 1045731 - DNA, 15 bp, Homo sapiens
gaggcagtcatgtcg

SEQ ID NO: 1045732 - DNA, 15 bp, Homo sapiens
cgaggcagtcatgtc

SEQ ID NO: 1045733 - DNA, 15 bp, Homo sapiens
ccgaggcagtcatgt

SEQ ID NO: 1045734 - DNA, 15 bp, Homo sapiens
cccgaggcagtcatg

SEQ ID NO: 1045735 - DNA, 15 bp, Homo sapiens
ccccgaggcagtcat

SEQ ID NO: 1045736 - DNA, 15 bp, Homo sapiens
tccccgaggcagtca

SEQ ID NO: 1045737 - DNA, 15 bp, Homo sapiens
ctccccgaggcagtc

SEQ ID NO: 1045738 - DNA, 15 bp, Homo sapiens
actccccgaggcagt

SEQ ID NO: 1045739 - DNA, 15 bp, Homo sapiens
gactccccgaggcag

SEQ ID NO: 1045740 - DNA, 15 bp, Homo sapiens
ggactccccgaggca

SEQ ID NO: 1045741 - DNA, 15 bp, Homo sapiens
aggactccccgaggc

SEQ ID NO: 1045742 - DNA, 15 bp, Homo sapiens
caggactccccgagg

SEQ ID NO: 1045743 - DNA, 15 bp, Homo sapiens
tcaggactccccgag

SEQ ID NO: 1045744 - DNA, 15 bp, Homo sapiens
gtcaggactccccga

SEQ ID NO: 1045745 - DNA, 15 bp, Homo sapiens
agtcaggactccccg

SEQ ID NO: 1045746 - DNA, 15 bp, Homo sapiens
tagtcaggactcccc

SEQ ID NO: 1045747 - DNA, 15 bp, Homo sapiens
gtagtcaggactccc

SEQ ID NO: 1045748 - DNA, 15 bp, Homo sapiens
cgtagtcaggactcc

SEQ ID NO: 1045749 - DNA, 15 bp, Homo sapiens
ccgtagtcaggactc

SEQ ID NO: 1045750 - DNA, 15 bp, Homo sapiens
cccgtagtcaggact

SEQ ID NO: 1045751 - DNA, 15 bp, Homo sapiens
gcccgtagtcaggac

SEQ ID NO: 1045752 - DNA, 15 bp, Homo sapiens
tgcccgtagtcagga

SEQ ID NO: 1045753 - DNA, 15 bp, Homo sapiens
ctgcccgtagtcagg

SEQ ID NO: 1045754 - DNA, 15 bp, Homo sapiens
gctgcccgtagtcag

SEQ ID NO: 1045755 - DNA, 15 bp, Homo sapiens
ggctgcccgtagtca

SEQ ID NO: 1045756 - DNA, 15 bp, Homo sapiens
gggctgcccgtagtc

SEQ ID NO: 1045757 - DNA, 15 bp, Homo sapiens
ggggctgcccgtagt

SEQ ID NO: 1045758 - DNA, 15 bp, Homo sapiens
tggggctgcccgtag

SEQ ID NO: 1045759 - DNA, 15 bp, Homo sapiens
gtggggctgcccgta

SEQ ID NO: 1045760 - DNA, 15 bp, Homo sapiens
tgtggggctgcccgt

SEQ ID NO: 1045761 - DNA, 15 bp, Homo sapiens
ttgtggggctgcccg

SEQ ID NO: 1045762 - DNA, 15 bp, Homo sapiens
cttgtggggctgccc

SEQ ID NO: 1045763 - DNA, 15 bp, Homo sapiens
tcttgtggggctgcc

SEQ ID NO: 1045764 - DNA, 15 bp, Homo sapiens
atcttgtggggctgc

SEQ ID NO: 1045765 - DNA, 15 bp, Homo sapiens
gatcttgtggggctg

SEQ ID NO: 1045766 - DNA, 15 bp, Homo sapiens
tgatcttgtggggct

SEQ ID NO: 1045767 - DNA, 15 bp, Homo sapiens
ttgatcttgtggggc

SEQ ID NO: 1045768 - DNA, 15 bp, Homo sapiens
gttgatcttgtgggg

SEQ ID NO: 1045769 - DNA, 15 bp, Homo sapiens
ggttgatcttgtggg

SEQ ID NO: 1045770 - DNA, 15 bp, Homo sapiens
gggttgatcttgtgg

SEQ ID NO: 1045771 - DNA, 15 bp, Homo sapiens
ggggttgatcttgtg

SEQ ID NO: 1045772 - DNA, 15 bp, Homo sapiens
gggggttgatcttgt

SEQ ID NO: 1045773 - DNA, 15 bp, Homo sapiens
agggggttgatcttg

SEQ ID NO: 1045774 - DNA, 15 bp, Homo sapiens
gagggggttgatctt

SEQ ID NO: 1045775 - DNA, 15 bp, Homo sapiens
ggagggggttgatct

SEQ ID NO: 1045776 - DNA, 15 bp, Homo sapiens
gggagggggttgatc

SEQ ID NO: 1045777 - DNA, 15 bp, Homo sapiens
tgggagggggttgat

SEQ ID NO: 1045778 - DNA, 15 bp, Homo sapiens
gtgggagggggttga

SEQ ID NO: 1045779 - DNA, 15 bp, Homo sapiens
ggtgggagggggttg

SEQ ID NO: 1045780 - DNA, 15 bp, Homo sapiens
tggtgggagggggtt

SEQ ID NO: 1045781 - DNA, 15 bp, Homo sapiens
gtggtgggagggggt

SEQ ID NO: 1045782 - DNA, 15 bp, Homo sapiens
tgtggtgggaggggg

SEQ ID NO: 1045783 - DNA, 15 bp, Homo sapiens
ctgtggtgggagggg

SEQ ID NO: 1045784 - DNA, 15 bp, Homo sapiens
gctgtggtgggaggg

SEQ ID NO: 1045785 - DNA, 15 bp, Homo sapiens
tgctgtggtgggagg

SEQ ID NO: 1045786 - DNA, 15 bp, Homo sapiens
ctgctgtggtgggag

SEQ ID NO: 1045787 - DNA, 15 bp, Homo sapiens
cctgctgtggtggga

SEQ ID NO: 1045788 - DNA, 15 bp, Homo sapiens
tcctgctgtggtggg

SEQ ID NO: 1045789 - DNA, 15 bp, Homo sapiens
ctcctgctgtggtgg

SEQ ID NO: 1045790 - DNA, 15 bp, Homo sapiens
actcctgctgtggtg

SEQ ID NO: 1045791 - DNA, 15 bp, Homo sapiens
cactcctgctgtggt

SEQ ID NO: 1045792 - DNA, 15 bp, Homo sapiens
ccactcctgctgtgg

SEQ ID NO: 1045793 - DNA, 15 bp, Homo sapiens
tccactcctgctgtg

SEQ ID NO: 1045794 - DNA, 15 bp, Homo sapiens
atccactcctgctgt

SEQ ID NO: 1045795 - DNA, 15 bp, Homo sapiens
gatccactcctgctg

SEQ ID NO: 1045796 - DNA, 15 bp, Homo sapiens
tgatccactcctgct

SEQ ID NO: 1045797 - DNA, 15 bp, Homo sapiens
ttgatccactcctgc

SEQ ID NO: 1045798 - DNA, 15 bp, Homo sapiens
attgatccactcctg

SEQ ID NO: 1045799 - DNA, 15 bp, Homo sapiens
gattgatccactcct

SEQ ID NO: 1045800 - DNA, 15 bp, Homo sapiens
tgattgatccactcc

SEQ ID NO: 1045801 - DNA, 15 bp, Homo sapiens
ctgattgatccactc

SEQ ID NO: 1045802 - DNA, 15 bp, Homo sapiens
gctgattgatccact

SEQ ID NO: 1045803 - DNA, 15 bp, Homo sapiens
ggctgattgatccac

SEQ ID NO: 1045804 - DNA, 15 bp, Homo sapiens
tggctgattgatcca

SEQ ID NO: 1045805 - DNA, 15 bp, Homo sapiens
ctggctgattgatcc

SEQ ID NO: 1045806 - DNA, 15 bp, Homo sapiens
actggctgattgatc

SEQ ID NO: 1045807 - DNA, 15 bp, Homo sapiens
cactggctgattgat

SEQ ID NO: 1045808 - DNA, 15 bp, Homo sapiens
tcactggctgattga

SEQ ID NO: 1045809 - DNA, 15 bp, Homo sapiens
ctcactggctgattg

SEQ ID NO: 1045810 - DNA, 15 bp, Homo sapiens
cctcactggctgatt

SEQ ID NO: 1045811 - DNA, 15 bp, Homo sapiens
ccctcactggctgat

SEQ ID NO: 1045812 - DNA, 15 bp, Homo sapiens
accctcactggctga

SEQ ID NO: 1045813 - DNA, 15 bp, Homo sapiens
gaccctcactggctg

SEQ ID NO: 1045814 - DNA, 15 bp, Homo sapiens
tgaccctcactggct

SEQ ID NO: 1045815 - DNA, 15 bp, Homo sapiens
ttgaccctcactggc

SEQ ID NO: 1045816 - DNA, 15 bp, Homo sapiens
gttgaccctcactgg

SEQ ID NO: 1045817 - DNA, 15 bp, Homo sapiens
cgttgaccctcactg

SEQ ID NO: 1045818 - DNA, 15 bp, Homo sapiens
acgttgaccctcact

SEQ ID NO: 1045819 - DNA, 15 bp, Homo sapiens
gacgttgaccctcac

SEQ ID NO: 1045820 - DNA, 15 bp, Homo sapiens
tgacgttgaccctca

SEQ ID NO: 1045821 - DNA, 15 bp, Homo sapiens
ttgacgttgaccctc

SEQ ID NO: 1045822 - DNA, 15 bp, Homo sapiens
cttgacgttgaccct

SEQ ID NO: 1045823 - DNA, 15 bp, Homo sapiens
gcttgacgttgaccc

SEQ ID NO: 1045824 - DNA, 15 bp, Homo sapiens
cgcttgacgttgacc

SEQ ID NO: 1045825 - DNA, 15 bp, Homo sapiens
ccgcttgacgttgac

SEQ ID NO: 1045826 - DNA, 15 bp, Homo sapiens
cccgcttgacgttga

SEQ ID NO: 1045827 - DNA, 15 bp, Homo sapiens
tcccgcttgacgttg

SEQ ID NO: 1045828 - DNA, 15 bp, Homo sapiens
ctcccgcttgacgtt

SEQ ID NO: 1045829 - DNA, 15 bp, Homo sapiens
actcccgcttgacgt

SEQ ID NO: 1045830 - DNA, 15 bp, Homo sapiens
tactcccgcttgacg

SEQ ID NO: 1045831 - DNA, 15 bp, Homo sapiens
atactcccgcttgac

SEQ ID NO: 1045832 - DNA, 15 bp, Homo sapiens
catactcccgcttga

SEQ ID NO: 1045833 - DNA, 15 bp, Homo sapiens
tcatactcccgcttg

SEQ ID NO: 1045834 - DNA, 15 bp, Homo sapiens
gtcatactcccgctt

SEQ ID NO: 1045835 - DNA, 15 bp, Homo sapiens
ggtcatactcccgct

SEQ ID NO: 1045836 - DNA, 15 bp, Homo sapiens
tggtcatactcccgc

SEQ ID NO: 1045837 - DNA, 15 bp, Homo sapiens
gtggtcatactcccg

SEQ ID NO: 1045838 - DNA, 15 bp, Homo sapiens
tgtggtcatactccc

SEQ ID NO: 1045839 - DNA, 15 bp, Homo sapiens
atgtggtcatactcc

SEQ ID NO: 1045840 - DNA, 15 bp, Homo sapiens
catgtggtcatactc

SEQ ID NO: 1045841 - DNA, 15 bp, Homo sapiens
tcatgtggtcatact

SEQ ID NO: 1045842 - DNA, 15 bp, Homo sapiens
ttcatgtggtcatac

SEQ ID NO: 1045843 - DNA, 15 bp, Homo sapiens
attcatgtggtcata

SEQ ID NO: 1045844 - DNA, 15 bp, Homo sapiens
cattcatgtggtcat

SEQ ID NO: 1045845 - DNA, 15 bp, Homo sapiens
ccattcatgtggtca

SEQ ID NO: 1045846 - DNA, 15 bp, Homo sapiens
tccattcatgtggtc

SEQ ID NO: 1045847 - DNA, 15 bp, Homo sapiens
atccattcatgtggt

SEQ ID NO: 1045848 - DNA, 15 bp, Homo sapiens
gatccattcatgtgg

SEQ ID NO: 1045849 - DNA, 15 bp, Homo sapiens
ggatccattcatgtg

SEQ ID NO: 1045850 - DNA, 15 bp, Homo sapiens
tggatccattcatgt

SEQ ID NO: 1045851 - DNA, 15 bp, Homo sapiens
ctggatccattcatg

SEQ ID NO: 1045852 - DNA, 15 bp, Homo sapiens
cctggatccattcat

SEQ ID NO: 1045853 - DNA, 15 bp, Homo sapiens
acctggatccattca

SEQ ID NO: 1045854 - DNA, 15 bp, Homo sapiens
tacctggatccattc

SEQ ID NO: 1045855 - DNA, 15 bp, Homo sapiens
ttacctggatccatt

SEQ ID NO: 1045856 - DNA, 15 bp, Homo sapiens
cttacctggatccat

SEQ ID NO: 1045857 - DNA, 15 bp, Homo sapiens
gcttacctggatcca

SEQ ID NO: 1045858 - DNA, 15 bp, Homo sapiens
agcttacctggatcc

SEQ ID NO: 1045859 - DNA, 15 bp, Homo sapiens
gagcttacctggatc

SEQ ID NO: 1045860 - DNA, 15 bp, Homo sapiens
tgagcttacctggat

SEQ ID NO: 1045861 - DNA, 15 bp, Homo sapiens
gtgagcttacctgga

SEQ ID NO: 1045862 - DNA, 15 bp, Homo sapiens
ggtgagcttacctgg

SEQ ID NO: 1045863 - DNA, 15 bp, Homo sapiens
tggtgagcttacctg

SEQ ID NO: 1045864 - DNA, 15 bp, Homo sapiens
ctggtgagcttacct

SEQ ID NO: 1045865 - DNA, 15 bp, Homo sapiens
cctggtgagcttacc

SEQ ID NO: 1045866 - DNA, 15 bp, Homo sapiens
gcctggtgagcttac

SEQ ID NO: 1045867 - DNA, 15 bp, Homo sapiens
ggcctggtgagctta

SEQ ID NO: 1045868 - DNA, 15 bp, Homo sapiens
aggcctggtgagctt

SEQ ID NO: 1045869 - DNA, 15 bp, Homo sapiens
caggcctggtgagct

SEQ ID NO: 1045870 - DNA, 15 bp, Homo sapiens
acaggcctggtgagc

SEQ ID NO: 1045871 - DNA, 15 bp, Homo sapiens
cacaggcctggtgag

SEQ ID NO: 1045872 - DNA, 15 bp, Homo sapiens
gcacaggcctggtga

SEQ ID NO: 1045873 - DNA, 15 bp, Homo sapiens
tgcacaggcctggtg

SEQ ID NO: 1045874 - DNA, 15 bp, Homo sapiens
ctgcacaggcctggt

SEQ ID NO: 1045875 - DNA, 15 bp, Homo sapiens
cctgcacaggcctgg

SEQ ID NO: 1045876 - DNA, 15 bp, Homo sapiens
tcctgcacaggcctg

SEQ ID NO: 1045877 - DNA, 15 bp, Homo sapiens
atcctgcacaggcct

SEQ ID NO: 1045878 - DNA, 15 bp, Homo sapiens
aatcctgcacaggcc

SEQ ID NO: 1045879 - DNA, 15 bp, Homo sapiens
caatcctgcacaggc

SEQ ID NO: 1045880 - DNA, 15 bp, Homo sapiens
ccaatcctgcacagg

SEQ ID NO: 1045881 - DNA, 15 bp, Homo sapiens
cccaatcctgcacag

SEQ ID NO: 1045882 - DNA, 15 bp, Homo sapiens
ccccaatcctgcaca

SEQ ID NO: 1045883 - DNA, 15 bp, Homo sapiens
cccccaatcctgcac

SEQ ID NO: 1045884 - DNA, 15 bp, Homo sapiens
tcccccaatcctgca

SEQ ID NO: 1045885 - DNA, 15 bp, Homo sapiens
ttcccccaatcctgc

SEQ ID NO: 1045886 - DNA, 15 bp, Homo sapiens
cttcccccaatcctg

SEQ ID NO: 1045887 - DNA, 15 bp, Homo sapiens
ccttcccccaatcct

SEQ ID NO: 1045888 - DNA, 15 bp, Homo sapiens
gccttcccccaatcc

SEQ ID NO: 1045889 - DNA, 15 bp, Homo sapiens
tgccttcccccaatc

SEQ ID NO: 1045890 - DNA, 15 bp, Homo sapiens
gtgccttcccccaat

SEQ ID NO: 1045891 - DNA, 15 bp, Homo sapiens
tgtgccttcccccaa

SEQ ID NO: 1045892 - DNA, 15 bp, Homo sapiens
ttgtgccttccccca

SEQ ID NO: 1045893 - DNA, 15 bp, Homo sapiens
tttgtgccttccccc

SEQ ID NO: 1045894 - DNA, 15 bp, Homo sapiens
ctttgtgccttcccc

SEQ ID NO: 1045895 - DNA, 15 bp, Homo sapiens
actttgtgccttccc

SEQ ID NO: 1045896 - DNA, 15 bp, Homo sapiens
gactttgtgccttcc

SEQ ID NO: 1045897 - DNA, 15 bp, Homo sapiens
cgactttgtgccttc

SEQ ID NO: 1045898 - DNA, 15 bp, Homo sapiens
gcgactttgtgcctt

SEQ ID NO: 1045899 - DNA, 15 bp, Homo sapiens
ggcgactttgtgcct

SEQ ID NO: 1045900 - DNA, 15 bp, Homo sapiens
tggcgactttgtgcc

SEQ ID NO: 1045901 - DNA, 15 bp, Homo sapiens
ctggcgactttgtgc

SEQ ID NO: 1045902 - DNA, 15 bp, Homo sapiens
tctggcgactttgtg

SEQ ID NO: 1045903 - DNA, 15 bp, Homo sapiens
atctggcgactttgt

SEQ ID NO: 1045904 - DNA, 15 bp, Homo sapiens
gatctggcgactttg

SEQ ID NO: 1045905 - DNA, 15 bp, Homo sapiens
agatctggcgacttt

SEQ ID NO: 1045906 - DNA, 15 bp, Homo sapiens
cagatctggcgactt

SEQ ID NO: 1045907 - DNA, 15 bp, Homo sapiens
gcagatctggcgact

SEQ ID NO: 1045908 - DNA, 15 bp, Homo sapiens
tgcagatctggcgac

SEQ ID NO: 1045909 - DNA, 15 bp, Homo sapiens
ctgcagatctggcga

SEQ ID NO: 1045910 - DNA, 15 bp, Homo sapiens
gctgcagatctggcg

SEQ ID NO: 1045911 - DNA, 15 bp, Homo sapiens
tgctgcagatctggc

SEQ ID NO: 1045912 - DNA, 15 bp, Homo sapiens
ttgctgcagatctgg

SEQ ID NO: 1045913 - DNA, 15 bp, Homo sapiens
cttgctgcagatctg

SEQ ID NO: 1045914 - DNA, 15 bp, Homo sapiens
acttgctgcagatct

SEQ ID NO: 1045915 - DNA, 15 bp, Homo sapiens
cacttgctgcagatc

SEQ ID NO: 1045916 - DNA, 15 bp, Homo sapiens
ccacttgctgcagat

SEQ ID NO: 1045917 - DNA, 15 bp, Homo sapiens
gccacttgctgcaga

SEQ ID NO: 1045918 - DNA, 15 bp, Homo sapiens
agccacttgctgcag

SEQ ID NO: 1045919 - DNA, 15 bp, Homo sapiens
aagccacttgctgca

SEQ ID NO: 1045920 - DNA, 15 bp, Homo sapiens
gaagccacttgctgc

SEQ ID NO: 1045921 - DNA, 15 bp, Homo sapiens
agaagccacttgctg

SEQ ID NO: 1045922 - DNA, 15 bp, Homo sapiens
cagaagccacttgct

SEQ ID NO: 1045923 - DNA, 15 bp, Homo sapiens
ccagaagccacttgc

SEQ ID NO: 1045924 - DNA, 15 bp, Homo sapiens
gccagaagccacttg

SEQ ID NO: 1045925 - DNA, 15 bp, Homo sapiens
tgccagaagccactt

SEQ ID NO: 1045926 - DNA, 15 bp, Homo sapiens
gtgccagaagccact

SEQ ID NO: 1045927 - DNA, 15 bp, Homo sapiens
agtgccagaagccac

SEQ ID NO: 1045928 - DNA, 15 bp, Homo sapiens
aagtgccagaagcca

SEQ ID NO: 1045929 - DNA, 15 bp, Homo sapiens
taagtgccagaagcc

SEQ ID NO: 1045930 - DNA, 15 bp, Homo sapiens
ttaagtgccagaagc

SEQ ID NO: 1045931 - DNA, 15 bp, Homo sapiens
cttaagtgccagaag

SEQ ID NO: 1045932 - DNA, 15 bp, Homo sapiens
ccttaagtgccagaa

SEQ ID NO: 1045933 - DNA, 15 bp, Homo sapiens
accttaagtgccaga

SEQ ID NO: 1045934 - DNA, 15 bp, Homo sapiens
aaccttaagtgccag

SEQ ID NO: 1045935 - DNA, 15 bp, Homo sapiens
aaaccttaagtgcca

SEQ ID NO: 1045936 - DNA, 15 bp, Homo sapiens
aaaaccttaagtgcc

SEQ ID NO: 1045937 - DNA, 15 bp, Homo sapiens
aaaaaccttaagtgc

SEQ ID NO: 1045938 - DNA, 15 bp, Homo sapiens
caaaaaccttaagtg

SEQ ID NO: 1045939 - DNA, 15 bp, Homo sapiens
gcaaaaaccttaagt

SEQ ID NO: 1045940 - DNA, 15 bp, Homo sapiens
tgcaaaaaccttaag

SEQ ID NO: 1045941 - DNA, 15 bp, Homo sapiens
ctgcaaaaaccttaa

SEQ ID NO: 1045942 - DNA, 15 bp, Homo sapiens
gctgcaaaaacctta

SEQ ID NO: 1045943 - DNA, 15 bp, Homo sapiens
tgctgcaaaaacctt

SEQ ID NO: 1045944 - DNA, 15 bp, Homo sapiens
ctgctgcaaaaacct

SEQ ID NO: 1045945 - DNA, 15 bp, Homo sapiens
tctgctgcaaaaacc

SEQ ID NO: 1045946 - DNA, 15 bp, Homo sapiens
atctgctgcaaaaac

SEQ ID NO: 1045947 - DNA, 15 bp, Homo sapiens
catctgctgcaaaaa

SEQ ID NO: 1045948 - DNA, 15 bp, Homo sapiens
ccatctgctgcaaaa

SEQ ID NO: 1045949 - DNA, 15 bp, Homo sapiens
cccatctgctgcaaa

SEQ ID NO: 1045950 - DNA, 15 bp, Homo sapiens
ccccatctgctgcaa

SEQ ID NO: 1045951 - DNA, 15 bp, Homo sapiens
gccccatctgctgca

SEQ ID NO: 1045952 - DNA, 15 bp, Homo sapiens
agccccatctgctgc

SEQ ID NO: 1045953 - DNA, 15 bp, Homo sapiens
gagccccatctgctg

SEQ ID NO: 1045954 - DNA, 15 bp, Homo sapiens
agagccccatctgct

SEQ ID NO: 1045955 - DNA, 15 bp, Homo sapiens
tagagccccatctgc

SEQ ID NO: 1045956 - DNA, 15 bp, Homo sapiens
ctagagccccatctg

SEQ ID NO: 1045957 - DNA, 15 bp, Homo sapiens
tctagagccccatct

SEQ ID NO: 1045958 - DNA, 15 bp, Homo sapiens
ctctagagccccatc

SEQ ID NO: 1045959 - DNA, 15 bp, Homo sapiens
gctctagagccccat

SEQ ID NO: 1045960 - DNA, 15 bp, Homo sapiens
agctctagagcccca

SEQ ID NO: 1045961 - DNA, 15 bp, Homo sapiens
cagctctagagcccc

SEQ ID NO: 1045962 - DNA, 15 bp, Homo sapiens
ccagctctagagccc

SEQ ID NO: 1045963 - DNA, 15 bp, Homo sapiens
cccagctctagagcc

SEQ ID NO: 1045964 - DNA, 15 bp, Homo sapiens
gcccagctctagagc

SEQ ID NO: 1045965 - DNA, 15 bp, Homo sapiens
ggcccagctctagag

SEQ ID NO: 1045966 - DNA, 15 bp, Homo sapiens
tggcccagctctaga

SEQ ID NO: 1045967 - DNA, 15 bp, Homo sapiens
ctggcccagctctag

SEQ ID NO: 1045968 - DNA, 15 bp, Homo sapiens
cctggcccagctcta

SEQ ID NO: 1045969 - DNA, 15 bp, Homo sapiens
tcctggcccagctct

SEQ ID NO: 1045970 - DNA, 15 bp, Homo sapiens
ttcctggcccagctc

SEQ ID NO: 1045971 - DNA, 15 bp, Homo sapiens
cttcctggcccagct

SEQ ID NO: 1045972 - DNA, 15 bp, Homo sapiens
gcttcctggcccagc

SEQ ID NO: 1045973 - DNA, 15 bp, Homo sapiens
ggcttcctggcccag

SEQ ID NO: 1045974 - DNA, 15 bp, Homo sapiens
aggcttcctggccca

SEQ ID NO: 1045975 - DNA, 15 bp, Homo sapiens
caggcttcctggccc

SEQ ID NO: 1045976 - DNA, 15 bp, Homo sapiens
acaggcttcctggcc

SEQ ID NO: 1045977 - DNA, 15 bp, Homo sapiens
cacaggcttcctggc

SEQ ID NO: 1045978 - DNA, 15 bp, Homo sapiens
acacaggcttcctgg

SEQ ID NO: 1045979 - DNA, 15 bp, Homo sapiens
gacacaggcttcctg

SEQ ID NO: 1045980 - DNA, 15 bp, Homo sapiens
tgacacaggcttcct

SEQ ID NO: 1045981 - DNA, 15 bp, Homo sapiens
ctgacacaggcttcc

SEQ ID NO: 1045982 - DNA, 15 bp, Homo sapiens
actgacacaggcttc

SEQ ID NO: 1045983 - DNA, 15 bp, Homo sapiens
gactgacacaggctt

SEQ ID NO: 1045984 - DNA, 15 bp, Homo sapiens
ggactgacacaggct

SEQ ID NO: 1045985 - DNA, 15 bp, Homo sapiens
gggactgacacaggc

SEQ ID NO: 1045986 - DNA, 15 bp, Homo sapiens
agggactgacacagg

SEQ ID NO: 1045987 - DNA, 15 bp, Homo sapiens
tagggactgacacag

SEQ ID NO: 1045988 - DNA, 15 bp, Homo sapiens
ctagggactgacaca

SEQ ID NO: 1045989 - DNA, 15 bp, Homo sapiens
tctagggactgacac

SEQ ID NO: 1045990 - DNA, 15 bp, Homo sapiens
ctctagggactgaca

SEQ ID NO: 1045991 - DNA, 15 bp, Homo sapiens
tctctagggactgac

SEQ ID NO: 1045992 - DNA, 15 bp, Homo sapiens
ctctctagggactga

SEQ ID NO: 1045993 - DNA, 15 bp, Homo sapiens
gctctctagggactg

SEQ ID NO: 1045994 - DNA, 15 bp, Homo sapiens
agctctctagggact

SEQ ID NO: 1045995 - DNA, 15 bp, Homo sapiens
tagctctctagggac

SEQ ID NO: 1045996 - DNA, 15 bp, Homo sapiens
ttagctctctaggga

SEQ ID NO: 1045997 - DNA, 15 bp, Homo sapiens
cttagctctctaggg

SEQ ID NO: 1045998 - DNA, 15 bp, Homo sapiens
ccttagctctctagg

SEQ ID NO: 1045999 - DNA, 15 bp, Homo sapiens
gccttagctctctag

SEQ ID NO: 1046000 - DNA, 15 bp, Homo sapiens
tgccttagctctcta

SEQ ID NO: 1046001 - DNA, 15 bp, Homo sapiens
ctgccttagctctct

SEQ ID NO: 1046002 - DNA, 15 bp, Homo sapiens
tctgccttagctctc

SEQ ID NO: 1046003 - DNA, 15 bp, Homo sapiens
ctctgccttagctct

SEQ ID NO: 1046004 - DNA, 15 bp, Homo sapiens
tctctgccttagctc

SEQ ID NO: 1046005 - DNA, 15 bp, Homo sapiens
ctctctgccttagct

SEQ ID NO: 1046006 - DNA, 15 bp, Homo sapiens
cctctctgccttagc

SEQ ID NO: 1046007 - DNA, 15 bp, Homo sapiens
ccctctctgccttag

SEQ ID NO: 1046008 - DNA, 15 bp, Homo sapiens
gccctctctgcctta

SEQ ID NO: 1046009 - DNA, 15 bp, Homo sapiens
ggccctctctgcctt

SEQ ID NO: 1046010 - DNA, 15 bp, Homo sapiens
tggccctctctgcct

SEQ ID NO: 1046011 - DNA, 15 bp, Homo sapiens
gtggccctctctgcc

SEQ ID NO: 1046012 - DNA, 15 bp, Homo sapiens
tgtggccctctctgc

SEQ ID NO: 1046013 - DNA, 15 bp, Homo sapiens
ctgtggccctctctg

SEQ ID NO: 1046014 - DNA, 15 bp, Homo sapiens
tctgtggccctctct

SEQ ID NO: 1046015 - DNA, 15 bp, Homo sapiens
gtctgtggccctctc

SEQ ID NO: 1046016 - DNA, 15 bp, Homo sapiens
agtctgtggccctct

SEQ ID NO: 1046017 - DNA, 15 bp, Homo sapiens
cagtctgtggccctc

SEQ ID NO: 1046018 - DNA, 15 bp, Homo sapiens
tcagtctgtggccct

SEQ ID NO: 1046019 - DNA, 15 bp, Homo sapiens
atcagtctgtggccc

SEQ ID NO: 1046020 - DNA, 15 bp, Homo sapiens
catcagtctgtggcc

SEQ ID NO: 1046021 - DNA, 15 bp, Homo sapiens
tcatcagtctgtggc

SEQ ID NO: 1046022 - DNA, 15 bp, Homo sapiens
atcatcagtctgtgg

SEQ ID NO: 1046023 - DNA, 15 bp, Homo sapiens
catcatcagtctgtg

SEQ ID NO: 1046024 - DNA, 15 bp, Homo sapiens
ccatcatcagtctgt

SEQ ID NO: 1046025 - DNA, 15 bp, Homo sapiens
cccatcatcagtctg

SEQ ID NO: 1046026 - DNA, 15 bp, Homo sapiens
ccccatcatcagtct

SEQ ID NO: 1046027 - DNA, 15 bp, Homo sapiens
accccatcatcagtc

SEQ ID NO: 1046028 - DNA, 15 bp, Homo sapiens
caccccatcatcagt

SEQ ID NO: 1046029 - DNA, 15 bp, Homo sapiens
ccaccccatcatcag

SEQ ID NO: 1046030 - DNA, 15 bp, Homo sapiens
tccaccccatcatca

SEQ ID NO: 1046031 - DNA, 15 bp, Homo sapiens
ctccaccccatcatc

SEQ ID NO: 1046032 - DNA, 15 bp, Homo sapiens
actccaccccatcat

SEQ ID NO: 1046033 - DNA, 15 bp, Homo sapiens
tactccaccccatca

SEQ ID NO: 1046034 - DNA, 15 bp, Homo sapiens
ctactccaccccatc

SEQ ID NO: 1046035 - DNA, 15 bp, Homo sapiens
cctactccaccccat

SEQ ID NO: 1046036 - DNA, 15 bp, Homo sapiens
ccctactccacccca

SEQ ID NO: 1046037 - DNA, 15 bp, Homo sapiens
gccctactccacccc

SEQ ID NO: 1046038 - DNA, 15 bp, Homo sapiens
agccctactccaccc

SEQ ID NO: 1046039 - DNA, 15 bp, Homo sapiens
tagccctactccacc

SEQ ID NO: 1046040 - DNA, 15 bp, Homo sapiens
ctagccctactccac

SEQ ID NO: 1046041 - DNA, 15 bp, Homo sapiens
cctagccctactcca

SEQ ID NO: 1046042 - DNA, 15 bp, Homo sapiens
tcctagccctactcc

SEQ ID NO: 1046043 - DNA, 15 bp, Homo sapiens
ttcctagccctactc

SEQ ID NO: 1046044 - DNA, 15 bp, Homo sapiens
cttcctagccctact

SEQ ID NO: 1046045 - DNA, 15 bp, Homo sapiens
gcttcctagccctac

SEQ ID NO: 1046046 - DNA, 15 bp, Homo sapiens
ggcttcctagcccta

SEQ ID NO: 1046047 - DNA, 15 bp, Homo sapiens
gggcttcctagccct

SEQ ID NO: 1046048 - DNA, 15 bp, Homo sapiens
ggggcttcctagccc

SEQ ID NO: 1046049 - DNA, 15 bp, Homo sapiens
gggggcttcctagcc

SEQ ID NO: 1046050 - DNA, 15 bp, Homo sapiens
ggggggcttcctagc

SEQ ID NO: 1046051 - DNA, 15 bp, Homo sapiens
aggggggcttcctag

SEQ ID NO: 1046052 - DNA, 15 bp, Homo sapiens
caggggggcttccta

SEQ ID NO: 1046053 - DNA, 15 bp, Homo sapiens
gcaggggggcttcct

SEQ ID NO: 1046054 - DNA, 15 bp, Homo sapiens
ggcaggggggcttcc

SEQ ID NO: 1046055 - DNA, 15 bp, Homo sapiens
aggcaggggggcttc

SEQ ID NO: 1046056 - DNA, 15 bp, Homo sapiens
gaggcaggggggctt

SEQ ID NO: 1046057 - DNA, 15 bp, Homo sapiens
agaggcaggggggct

SEQ ID NO: 1046058 - DNA, 15 bp, Homo sapiens
gagaggcaggggggc

SEQ ID NO: 1046059 - DNA, 15 bp, Homo sapiens
agagaggcagggggg

SEQ ID NO: 1046060 - DNA, 15 bp, Homo sapiens
cagagaggcaggggg

SEQ ID NO: 1046061 - DNA, 15 bp, Homo sapiens
ccagagaggcagggg

SEQ ID NO: 1046062 - DNA, 15 bp, Homo sapiens
cccagagaggcaggg

SEQ ID NO: 1046063 - DNA, 15 bp, Homo sapiens
ccccagagaggcagg

SEQ ID NO: 1046064 - DNA, 15 bp, Homo sapiens
gccccagagaggcag

SEQ ID NO: 1046065 - DNA, 15 bp, Homo sapiens
ggccccagagaggca

SEQ ID NO: 1046066 - DNA, 15 bp, Homo sapiens
gggccccagagaggc

SEQ ID NO: 1046067 - DNA, 15 bp, Homo sapiens
tgggccccagagagg

SEQ ID NO: 1046068 - DNA, 15 bp, Homo sapiens
gtgggccccagagag

SEQ ID NO: 1046069 - DNA, 15 bp, Homo sapiens
cgtgggccccagaga

SEQ ID NO: 1046070 - DNA, 15 bp, Homo sapiens
tcgtgggccccagag

SEQ ID NO: 1046071 - DNA, 15 bp, Homo sapiens
ttcgtgggccccaga

SEQ ID NO: 1046072 - DNA, 15 bp, Homo sapiens
cttcgtgggccccag

SEQ ID NO: 1046073 - DNA, 15 bp, Homo sapiens
gcttcgtgggcccca

SEQ ID NO: 1046074 - DNA, 15 bp, Homo sapiens
ggcttcgtgggcccc

SEQ ID NO: 1046075 - DNA, 15 bp, Homo sapiens
gggcttcgtgggccc

SEQ ID NO: 1046076 - DNA, 15 bp, Homo sapiens
agggcttcgtgggcc

SEQ ID NO: 1046077 - DNA, 15 bp, Homo sapiens
gagggcttcgtgggc

SEQ ID NO: 1046078 - DNA, 15 bp, Homo sapiens
tgagggcttcgtggg

SEQ ID NO: 1046079 - DNA, 15 bp, Homo sapiens
ctgagggcttcgtgg

SEQ ID NO: 1046080 - DNA, 15 bp, Homo sapiens
tctgagggcttcgtg

SEQ ID NO: 1046081 - DNA, 15 bp, Homo sapiens
ctctgagggcttcgt

SEQ ID NO: 1046082 - DNA, 15 bp, Homo sapiens
cctctgagggcttcg

SEQ ID NO: 1046083 - DNA, 15 bp, Homo sapiens
gcctctgagggcttc

SEQ ID NO: 1046084 - DNA, 15 bp, Homo sapiens
ggcctctgagggctt

SEQ ID NO: 1046085 - DNA, 15 bp, Homo sapiens
tggcctctgagggct

SEQ ID NO: 1046086 - DNA, 15 bp, Homo sapiens
ctggcctctgagggc

SEQ ID NO: 1046087 - DNA, 15 bp, Homo sapiens
cctggcctctgaggg

SEQ ID NO: 1046088 - DNA, 15 bp, Homo sapiens
acctggcctctgagg

SEQ ID NO: 1046089 - DNA, 15 bp, Homo sapiens
tacctggcctctgag

SEQ ID NO: 1046090 - DNA, 15 bp, Homo sapiens
ctacctggcctctga

SEQ ID NO: 1046091 - DNA, 15 bp, Homo sapiens
cctacctggcctctg

SEQ ID NO: 1046092 - DNA, 15 bp, Homo sapiens
tcctacctggcctct

SEQ ID NO: 1046093 - DNA, 15 bp, Homo sapiens
ctcctacctggcctc

SEQ ID NO: 1046094 - DNA, 15 bp, Homo sapiens
actcctacctggcct

SEQ ID NO: 1046095 - DNA, 15 bp, Homo sapiens
gactcctacctggcc

SEQ ID NO: 1046096 - DNA, 15 bp, Homo sapiens
tgactcctacctggc

SEQ ID NO: 1046097 - DNA, 15 bp, Homo sapiens
ctgactcctacctgg

SEQ ID NO: 1046098 - DNA, 15 bp, Homo sapiens
cctgactcctacctg

SEQ ID NO: 1046099 - DNA, 15 bp, Homo sapiens
gcctgactcctacct

SEQ ID NO: 1046100 - DNA, 15 bp, Homo sapiens
ggcctgactcctacc

SEQ ID NO: 1046101 - DNA, 15 bp, Homo sapiens
gggcctgactcctac

SEQ ID NO: 1046102 - DNA, 15 bp, Homo sapiens
ggggcctgactccta

SEQ ID NO: 1046103 - DNA, 15 bp, Homo sapiens
tggggcctgactcct

SEQ ID NO: 1046104 - DNA, 15 bp, Homo sapiens
ttggggcctgactcc

SEQ ID NO: 1046105 - DNA, 15 bp, Homo sapiens
cttggggcctgactc

SEQ ID NO: 1046106 - DNA, 15 bp, Homo sapiens
gcttggggcctgact

SEQ ID NO: 1046107 - DNA, 15 bp, Homo sapiens
cgcttggggcctgac

SEQ ID NO: 1046108 - DNA, 15 bp, Homo sapiens
gcgcttggggcctga

SEQ ID NO: 1046109 - DNA, 15 bp, Homo sapiens
ggcgcttggggcctg

SEQ ID NO: 1046110 - DNA, 15 bp, Homo sapiens
aggcgcttggggcct

SEQ ID NO: 1046111 - DNA, 15 bp, Homo sapiens
taggcgcttggggcc

SEQ ID NO: 1046112 - DNA, 15 bp, Homo sapiens
ataggcgcttggggc

SEQ ID NO: 1046113 - DNA, 15 bp, Homo sapiens
cataggcgcttgggg

SEQ ID NO: 1046114 - DNA, 15 bp, Homo sapiens
gcataggcgcttggg

SEQ ID NO: 1046115 - DNA, 15 bp, Homo sapiens
tgcataggcgcttgg

SEQ ID NO: 1046116 - DNA, 15 bp, Homo sapiens
ctgcataggcgcttg

SEQ ID NO: 1046117 - DNA, 15 bp, Homo sapiens
tctgcataggcgctt

SEQ ID NO: 1046118 - DNA, 15 bp, Homo sapiens
gtctgcataggcgct

SEQ ID NO: 1046119 - DNA, 15 bp, Homo sapiens
tgtctgcataggcgc

SEQ ID NO: 1046120 - DNA, 15 bp, Homo sapiens
gtgtctgcataggcg

SEQ ID NO: 1046121 - DNA, 15 bp, Homo sapiens
agtgtctgcataggc

SEQ ID NO: 1046122 - DNA, 15 bp, Homo sapiens
gagtgtctgcatagg

SEQ ID NO: 1046123 - DNA, 15 bp, Homo sapiens
cgagtgtctgcatag

SEQ ID NO: 1046124 - DNA, 15 bp, Homo sapiens
acgagtgtctgcata

SEQ ID NO: 1046125 - DNA, 15 bp, Homo sapiens
cacgagtgtctgcat

SEQ ID NO: 1046126 - DNA, 15 bp, Homo sapiens
ccacgagtgtctgca

SEQ ID NO: 1046127 - DNA, 15 bp, Homo sapiens
tccacgagtgtctgc

SEQ ID NO: 1046128 - DNA, 15 bp, Homo sapiens
ttccacgagtgtctg

SEQ ID NO: 1046129 - DNA, 15 bp, Homo sapiens
gttccacgagtgtct

SEQ ID NO: 1046130 - DNA, 15 bp, Homo sapiens
tgttccacgagtgtc

SEQ ID NO: 1046131 - DNA, 15 bp, Homo sapiens
gtgttccacgagtgt

SEQ ID NO: 1046132 - DNA, 15 bp, Homo sapiens
agtgttccacgagtg

SEQ ID NO: 1046133 - DNA, 15 bp, Homo sapiens
aagtgttccacgagt

SEQ ID NO: 1046134 - DNA, 15 bp, Homo sapiens
taagtgttccacgag

SEQ ID NO: 1046135 - DNA, 15 bp, Homo sapiens
ataagtgttccacga

SEQ ID NO: 1046136 - DNA, 15 bp, Homo sapiens
aataagtgttccacg

SEQ ID NO: 1046137 - DNA, 15 bp, Homo sapiens
aaataagtgttccac

SEQ ID NO: 1046138 - DNA, 15 bp, Homo sapiens
gaaataagtgttcca

SEQ ID NO: 1046139 - DNA, 15 bp, Homo sapiens
agaaataagtgttcc

SEQ ID NO: 1046140 - DNA, 15 bp, Homo sapiens
aagaaataagtgttc

SEQ ID NO: 1046141 - DNA, 15 bp, Homo sapiens
caagaaataagtgtt

SEQ ID NO: 1046142 - DNA, 15 bp, Homo sapiens
acaagaaataagtgt

SEQ ID NO: 1046143 - DNA, 15 bp, Homo sapiens
aacaagaaataagtg

SEQ ID NO: 1046144 - DNA, 15 bp, Homo sapiens
taacaagaaataagt

SEQ ID NO: 1046145 - DNA, 15 bp, Homo sapiens
ttaacaagaaataag

SEQ ID NO: 1046146 - DNA, 15 bp, Homo sapiens
attaacaagaaataa

SEQ ID NO: 1046147 - DNA, 15 bp, Homo sapiens
gattaacaagaaata

SEQ ID NO: 1046148 - DNA, 15 bp, Homo sapiens
ggattaacaagaaat

SEQ ID NO: 1046149 - DNA, 15 bp, Homo sapiens
gggattaacaagaaa

SEQ ID NO: 1046150 - DNA, 15 bp, Homo sapiens
tgggattaacaagaa

SEQ ID NO: 1046151 - DNA, 15 bp, Homo sapiens
ctgggattaacaaga

SEQ ID NO: 1046152 - DNA, 15 bp, Homo sapiens
cctgggattaacaag

SEQ ID NO: 1046153 - DNA, 15 bp, Homo sapiens
gcctgggattaacaa

SEQ ID NO: 1046154 - DNA, 15 bp, Homo sapiens
ggcctgggattaaca

SEQ ID NO: 1046155 - DNA, 15 bp, Homo sapiens
gggcctgggattaac

SEQ ID NO: 1046156 - DNA, 15 bp, Homo sapiens
tgggcctgggattaa

SEQ ID NO: 1046157 - DNA, 15 bp, Homo sapiens
ctgggcctgggatta

SEQ ID NO: 1046158 - DNA, 15 bp, Homo sapiens
cctgggcctgggatt

SEQ ID NO: 1046159 - DNA, 15 bp, Homo sapiens
acctgggcctgggat

SEQ ID NO: 1046160 - DNA, 15 bp, Homo sapiens
gacctgggcctggga

SEQ ID NO: 1046161 - DNA, 15 bp, Homo sapiens
actggacctgggcct

SEQ ID NO: 1046162 - DNA, 15 bp, Homo sapiens
gactggacctgggcc

SEQ ID NO: 1046163 - DNA, 15 bp, Homo sapiens
ggactggacctgggc

SEQ ID NO: 1046164 - DNA, 15 bp, Homo sapiens
aggactggacctggg

SEQ ID NO: 1046165 - DNA, 15 bp, Homo sapiens
caggactggacctgg

SEQ ID NO: 1046166 - DNA, 15 bp, Homo sapiens
acaggactggacctg

SEQ ID NO: 1046167 - DNA, 15 bp, Homo sapiens
aacaggactggacct

SEQ ID NO: 1046168 - DNA, 15 bp, Homo sapiens
caacaggactggacc

SEQ ID NO: 1046169 - DNA, 15 bp, Homo sapiens
ccaacaggactggac

SEQ ID NO: 1046170 - DNA, 15 bp, Homo sapiens
cccaacaggactgga

SEQ ID NO: 1046171 - DNA, 15 bp, Homo sapiens
ccccaacaggactgg

SEQ ID NO: 1046172 - DNA, 15 bp, Homo sapiens
tccccaacaggactg

SEQ ID NO: 1046173 - DNA, 15 bp, Homo sapiens
gtccccaacaggact

SEQ ID NO: 1046174 - DNA, 15 bp, Homo sapiens
tgtccccaacaggac

SEQ ID NO: 1046175 - DNA, 15 bp, Homo sapiens
ctgtccccaacagga

SEQ ID NO: 1046176 - DNA, 15 bp, Homo sapiens
gctgtccccaacagg

SEQ ID NO: 1046177 - DNA, 15 bp, Homo sapiens
agctgtccccaacag

SEQ ID NO: 1046178 - DNA, 15 bp, Homo sapiens
aagctgtccccaaca

SEQ ID NO: 1046179 - DNA, 15 bp, Homo sapiens
taagctgtccccaac

SEQ ID NO: 1046180 - DNA, 15 bp, Homo sapiens
ctaagctgtccccaa

SEQ ID NO: 1046181 - DNA, 15 bp, Homo sapiens
gctaagctgtcccca

SEQ ID NO: 1046182 - DNA, 15 bp, Homo sapiens
tgctaagctgtcccc

SEQ ID NO: 1046183 - DNA, 15 bp, Homo sapiens
ttgctaagctgtccc

SEQ ID NO: 1046184 - DNA, 15 bp, Homo sapiens
attgctaagctgtcc

SEQ ID NO: 1046185 - DNA, 15 bp, Homo sapiens
tattgctaagctgtc

SEQ ID NO: 1046186 - DNA, 15 bp, Homo sapiens
ttattgctaagctgt

SEQ ID NO: 1046187 - DNA, 15 bp, Homo sapiens
cttattgctaagctg

SEQ ID NO: 1046188 - DNA, 15 bp, Homo sapiens
gcttattgctaagct

SEQ ID NO: 1046189 - DNA, 15 bp, Homo sapiens
agcttattgctaagc

SEQ ID NO: 1046190 - DNA, 15 bp, Homo sapiens
tagcttattgctaag

SEQ ID NO: 1046191 - DNA, 15 bp, Homo sapiens
gtagcttattgctaa

SEQ ID NO: 1046192 - DNA, 15 bp, Homo sapiens
agtagcttattgcta

SEQ ID NO: 1046193 - DNA, 15 bp, Homo sapiens
gagtagcttattgct

SEQ ID NO: 1046194 - DNA, 15 bp, Homo sapiens
agagtagcttattgc

SEQ ID NO: 1046195 - DNA, 15 bp, Homo sapiens
aagagtagcttattg

SEQ ID NO: 1046196 - DNA, 15 bp, Homo sapiens
gaagagtagcttatt

SEQ ID NO: 1046197 - DNA, 15 bp, Homo sapiens
ggaagagtagcttat

SEQ ID NO: 1046198 - DNA, 15 bp, Homo sapiens
gggaagagtagctta

SEQ ID NO: 1046199 - DNA, 15 bp, Homo sapiens
agggaagagtagctt

SEQ ID NO: 1046200 - DNA, 15 bp, Homo sapiens
cagggaagagtagct

SEQ ID NO: 1046201 - DNA, 15 bp, Homo sapiens
gacagggaagagtag

SEQ ID NO: 1046202 - DNA, 15 bp, Homo sapiens
ggacagggaagagta

SEQ ID NO: 1046203 - DNA, 15 bp, Homo sapiens
aggacagggaagagt

SEQ ID NO: 1046204 - DNA, 15 bp, Homo sapiens
caggacagggaagag

SEQ ID NO: 1046205 - DNA, 15 bp, Homo sapiens
acaggacagggaaga

SEQ ID NO: 1046206 - DNA, 15 bp, Homo sapiens
aacaggacagggaag

SEQ ID NO: 1046207 - DNA, 15 bp, Homo sapiens
caacaggacagggaa

SEQ ID NO: 1046208 - DNA, 15 bp, Homo sapiens
tcaacaggacaggga

SEQ ID NO: 1046209 - DNA, 15 bp, Homo sapiens
ttcaacaggacaggg

SEQ ID NO: 1046210 - DNA, 15 bp, Homo sapiens
cttcaacaggacagg

SEQ ID NO: 1046211 - DNA, 15 bp, Homo sapiens
tcttcaacaggacag

SEQ ID NO: 1046212 - DNA, 15 bp, Homo sapiens
atcttcaacaggaca

SEQ ID NO: 1046213 - DNA, 15 bp, Homo sapiens
tatcttcaacaggac

SEQ ID NO: 1046214 - DNA, 15 bp, Homo sapiens
gtatcttcaacagga

SEQ ID NO: 1046215 - DNA, 15 bp, Homo sapiens
agtatcttcaacagg

SEQ ID NO: 1046216 - DNA, 15 bp, Homo sapiens
aagtatcttcaacag

SEQ ID NO: 1046217 - DNA, 15 bp, Homo sapiens
taagtatcttcaaca

SEQ ID NO: 1046218 - DNA, 15 bp, Homo sapiens
ttaagtatcttcaac

SEQ ID NO: 1046219 - DNA, 15 bp, Homo sapiens
gttaagtatcttcaa

SEQ ID NO: 1046220 - DNA, 15 bp, Homo sapiens
ggttaagtatcttca

SEQ ID NO: 1046221 - DNA, 15 bp, Homo sapiens
gggttaagtatcttc

SEQ ID NO: 1046222 - DNA, 15 bp, Homo sapiens
ggggttaagtatctt

SEQ ID NO: 1046223 - DNA, 15 bp, Homo sapiens
aggggttaagtatct

SEQ ID NO: 1046224 - DNA, 15 bp, Homo sapiens
gaggggttaagtatc

SEQ ID NO: 1046225 - DNA, 15 bp, Homo sapiens
agaggggttaagtat

SEQ ID NO: 1046226 - DNA, 15 bp, Homo sapiens
cagaggggttaagta

SEQ ID NO: 1046227 - DNA, 15 bp, Homo sapiens
ccagaggggttaagt

SEQ ID NO: 1046228 - DNA, 15 bp, Homo sapiens
cccagaggggttaag

SEQ ID NO: 1046229 - DNA, 15 bp, Homo sapiens
gcccagaggggttaa

SEQ ID NO: 1046230 - DNA, 15 bp, Homo sapiens
tgcccagaggggtta

SEQ ID NO: 1046231 - DNA, 15 bp, Homo sapiens
ctgcccagaggggtt

SEQ ID NO: 1046232 - DNA, 15 bp, Homo sapiens
cctgcccagaggggt

SEQ ID NO: 1046233 - DNA, 15 bp, Homo sapiens
acctgcccagagggg

SEQ ID NO: 1046234 - DNA, 15 bp, Homo sapiens
gacctgcccagaggg

SEQ ID NO: 1046235 - DNA, 15 bp, Homo sapiens
agacctgcccagagg

SEQ ID NO: 1046236 - DNA, 15 bp, Homo sapiens
gagacctgcccagag

SEQ ID NO: 1046237 - DNA, 15 bp, Homo sapiens
tgagacctgcccaga

SEQ ID NO: 1046238 - DNA, 15 bp, Homo sapiens
ctgagacctgcccag

SEQ ID NO: 1046239 - DNA, 15 bp, Homo sapiens
gctgagacctgccca

SEQ ID NO: 1046240 - DNA, 15 bp, Homo sapiens
tgctgagacctgccc

SEQ ID NO: 1046241 - DNA, 15 bp, Homo sapiens
ctgctgagacctgcc

SEQ ID NO: 1046242 - DNA, 15 bp, Homo sapiens
tctgctgagacctgc

SEQ ID NO: 1046243 - DNA, 15 bp, Homo sapiens
ctctgctgagacctg

SEQ ID NO: 1046244 - DNA, 15 bp, Homo sapiens
gctctgctgagacct

SEQ ID NO: 1046245 - DNA, 15 bp, Homo sapiens
tgctctgctgagacc

SEQ ID NO: 1046246 - DNA, 15 bp, Homo sapiens
ttgctctgctgagac

SEQ ID NO: 1046247 - DNA, 15 bp, Homo sapiens
tttgctctgctgaga

SEQ ID NO: 1046248 - DNA, 15 bp, Homo sapiens
ctttgctctgctgag

SEQ ID NO: 1046249 - DNA, 15 bp, Homo sapiens
cctttgctctgctga

SEQ ID NO: 1046250 - DNA, 15 bp, Homo sapiens
acctttgctctgctg

SEQ ID NO: 1046251 - DNA, 15 bp, Homo sapiens
cacctttgctctgct

SEQ ID NO: 1046252 - DNA, 15 bp, Homo sapiens
tcacctttgctctgc

SEQ ID NO: 1046253 - DNA, 15 bp, Homo sapiens
gtcacctttgctctg

SEQ ID NO: 1046254 - DNA, 15 bp, Homo sapiens
ggtcacctttgctct

SEQ ID NO: 1046255 - DNA, 15 bp, Homo sapiens
tggtcacctttgctc

SEQ ID NO: 1046256 - DNA, 15 bp, Homo sapiens
ttggtcacctttgct

SEQ ID NO: 1046257 - DNA, 15 bp, Homo sapiens
tttggtcacctttgc

SEQ ID NO: 1046258 - DNA, 15 bp, Homo sapiens
gtttggtcacctttg

SEQ ID NO: 1046259 - DNA, 15 bp, Homo sapiens
ggtttggtcaccttt

SEQ ID NO: 1046260 - DNA, 15 bp, Homo sapiens
tggtttggtcacctt

SEQ ID NO: 1046261 - DNA, 15 bp, Homo sapiens
atggtttggtcacct

SEQ ID NO: 1046262 - DNA, 15 bp, Homo sapiens
aatggtttggtcacc

SEQ ID NO: 1046263 - DNA, 15 bp, Homo sapiens
gaatggtttggtcac

SEQ ID NO: 1046264 - DNA, 15 bp, Homo sapiens
agaatggtttggtca

SEQ ID NO: 1046265 - DNA, 15 bp, Homo sapiens
aagaatggtttggtc

SEQ ID NO: 1046266 - DNA, 15 bp, Homo sapiens
aaagaatggtttggt

SEQ ID NO: 1046267 - DNA, 15 bp, Homo sapiens
taaagaatggtttgg

SEQ ID NO: 1046268 - DNA, 15 bp, Homo sapiens
ctaaagaatggtttg

SEQ ID NO: 1046269 - DNA, 15 bp, Homo sapiens
actaaagaatggttt

SEQ ID NO: 1046270 - DNA, 15 bp, Homo sapiens
tactaaagaatggtt

SEQ ID NO: 1046271 - DNA, 15 bp, Homo sapiens
ttactaaagaatggt

SEQ ID NO: 1046272 - DNA, 15 bp, Homo sapiens
cttactaaagaatgg

SEQ ID NO: 1046273 - DNA, 15 bp, Homo sapiens
tcttactaaagaatg

SEQ ID NO: 1046274 - DNA, 15 bp, Homo sapiens
ctcttactaaagaat

SEQ ID NO: 1046275 - DNA, 15 bp, Homo sapiens
actcttactaaagaa

SEQ ID NO: 1046276 - DNA, 15 bp, Homo sapiens
cactcttactaaaga

SEQ ID NO: 1046277 - DNA, 15 bp, Homo sapiens
ccactcttactaaag

SEQ ID NO: 1046278 - DNA, 15 bp, Homo sapiens
tccactcttactaaa

SEQ ID NO: 1046279 - DNA, 15 bp, Homo sapiens
ctccactcttactaa

SEQ ID NO: 1046280 - DNA, 15 bp, Homo sapiens
tctccactcttacta

SEQ ID NO: 1046281 - DNA, 15 bp, Homo sapiens
ttctccactcttact

SEQ ID NO: 1046282 - DNA, 15 bp, Homo sapiens
cttctccactcttac

SEQ ID NO: 1046283 - DNA, 15 bp, Homo sapiens
ccttctccactctta

SEQ ID NO: 1046284 - DNA, 15 bp, Homo sapiens
cccttctccactctt

SEQ ID NO: 1046285 - DNA, 15 bp, Homo sapiens
tcccttctccactct

SEQ ID NO: 1046286 - DNA, 15 bp, Homo sapiens
atcccttctccactc

SEQ ID NO: 1046287 - DNA, 15 bp, Homo sapiens
catcccttctccact

SEQ ID NO: 1046288 - DNA, 15 bp, Homo sapiens
tcatcccttctccac

SEQ ID NO: 1046289 - DNA, 15 bp, Homo sapiens
ctcatcccttctcca

SEQ ID NO: 1046290 - DNA, 15 bp, Homo sapiens
cctcatcccttctcc

SEQ ID NO: 1046291 - DNA, 15 bp, Homo sapiens
tcctcatcccttctc

SEQ ID NO: 1046292 - DNA, 15 bp, Homo sapiens
ttcctcatcccttct

SEQ ID NO: 1046293 - DNA, 15 bp, Homo sapiens
cttcctcatcccttc

SEQ ID NO: 1046294 - DNA, 15 bp, Homo sapiens
ccttcctcatccctt

SEQ ID NO: 1046295 - DNA, 15 bp, Homo sapiens
accttcctcatccct

SEQ ID NO: 1046296 - DNA, 15 bp, Homo sapiens
caccttcctcatccc

SEQ ID NO: 1046297 - DNA, 15 bp, Homo sapiens
acaccttcctcatcc

SEQ ID NO: 1046298 - DNA, 15 bp, Homo sapiens
gacaccttcctcatc

SEQ ID NO: 1046299 - DNA, 15 bp, Homo sapiens
agacaccttcctcat

SEQ ID NO: 1046300 - DNA, 15 bp, Homo sapiens
tagacaccttcctca

SEQ ID NO: 1046301 - DNA, 15 bp, Homo sapiens
gtagacaccttcctc

SEQ ID NO: 1046302 - DNA, 15 bp, Homo sapiens
ggtagacaccttcct

SEQ ID NO: 1046303 - DNA, 15 bp, Homo sapiens
aggtagacaccttcc

SEQ ID NO: 1046304 - DNA, 15 bp, Homo sapiens
aaggtagacaccttc

SEQ ID NO: 1046305 - DNA, 15 bp, Homo sapiens
gaaggtagacacctt

SEQ ID NO: 1046306 - DNA, 15 bp, Homo sapiens
ggaaggtagacacct

SEQ ID NO: 1046307 - DNA, 15 bp, Homo sapiens
aggaaggtagacacc

SEQ ID NO: 1046308 - DNA, 15 bp, Homo sapiens
caggaaggtagacac

SEQ ID NO: 1046309 - DNA, 15 bp, Homo sapiens
acaggaaggtagaca

SEQ ID NO: 1046310 - DNA, 15 bp, Homo sapiens
cacaggaaggtagac

SEQ ID NO: 1046311 - DNA, 15 bp, Homo sapiens
ccacaggaaggtaga

SEQ ID NO: 1046312 - DNA, 15 bp, Homo sapiens
cccacaggaaggtag

SEQ ID NO: 1046313 - DNA, 15 bp, Homo sapiens
ccccacaggaaggta

SEQ ID NO: 1046314 - DNA, 15 bp, Homo sapiens
cccccacaggaaggt

SEQ ID NO: 1046315 - DNA, 15 bp, Homo sapiens
gcccccacaggaagg

SEQ ID NO: 1046316 - DNA, 15 bp, Homo sapiens
agcccccacaggaag

SEQ ID NO: 1046317 - DNA, 15 bp, Homo sapiens
gagcccccacaggaa

SEQ ID NO: 1046318 - DNA, 15 bp, Homo sapiens
tgagcccccacagga

SEQ ID NO: 1046319 - DNA, 15 bp, Homo sapiens
gtgagcccccacagg

SEQ ID NO: 1046320 - DNA, 15 bp, Homo sapiens
agtgagcccccacag

SEQ ID NO: 1046321 - DNA, 15 bp, Homo sapiens
cagtgagcccccaca

SEQ ID NO: 1046322 - DNA, 15 bp, Homo sapiens
acagtgagcccccac

SEQ ID NO: 1046323 - DNA, 15 bp, Homo sapiens
cacagtgagccccca

SEQ ID NO: 1046324 - DNA, 15 bp, Homo sapiens
acacagtgagccccc

SEQ ID NO: 1046325 - DNA, 15 bp, Homo sapiens
gacacagtgagcccc

SEQ ID NO: 1046326 - DNA, 15 bp, Homo sapiens
agacacagtgagccc

SEQ ID NO: 1046327 - DNA, 15 bp, Homo sapiens
cagacacagtgagcc

SEQ ID NO: 1046328 - DNA, 15 bp, Homo sapiens
ccagacacagtgagc

SEQ ID NO: 1046329 - DNA, 15 bp, Homo sapiens
cccagacacagtgag

SEQ ID NO: 1046330 - DNA, 15 bp, Homo sapiens
tcccagacacagtga

SEQ ID NO: 1046331 - DNA, 15 bp, Homo sapiens
ctcccagacacagtg

SEQ ID NO: 1046332 - DNA, 15 bp, Homo sapiens
cctcccagacacagt

SEQ ID NO: 1046333 - DNA, 15 bp, Homo sapiens
ccctcccagacacag

SEQ ID NO: 1046334 - DNA, 15 bp, Homo sapiens
cccctcccagacaca

SEQ ID NO: 1046335 - DNA, 15 bp, Homo sapiens
ccccctcccagacac

SEQ ID NO: 1046336 - DNA, 15 bp, Homo sapiens
gccccctcccagaca

SEQ ID NO: 1046337 - DNA, 15 bp, Homo sapiens
tgccccctcccagac

SEQ ID NO: 1046338 - DNA, 15 bp, Homo sapiens
ctgccccctcccaga

SEQ ID NO: 1046339 - DNA, 15 bp, Homo sapiens
tgcctgccccctccc

SEQ ID NO: 1046340 - DNA, 15 bp, Homo sapiens
gtgcctgccccctcc

SEQ ID NO: 1046341 - DNA, 15 bp, Homo sapiens
ggtgcctgccccctc

SEQ ID NO: 1046342 - DNA, 15 bp, Homo sapiens
aggtgcctgccccct

SEQ ID NO: 1046343 - DNA, 15 bp, Homo sapiens
caggtgcctgccccc

SEQ ID NO: 1046344 - DNA, 15 bp, Homo sapiens
ccaggtgcctgcccc

SEQ ID NO: 1046345 - DNA, 15 bp, Homo sapiens
tccaggtgcctgccc

SEQ ID NO: 1046346 - DNA, 15 bp, Homo sapiens
ttccaggtgcctgcc

SEQ ID NO: 1046347 - DNA, 15 bp, Homo sapiens
cttccaggtgcctgc

SEQ ID NO: 1046348 - DNA, 15 bp, Homo sapiens
ccttccaggtgcctg

SEQ ID NO: 1046349 - DNA, 15 bp, Homo sapiens
gccttccaggtgcct

SEQ ID NO: 1046350 - DNA, 15 bp, Homo sapiens
cgccttccaggtgcc

SEQ ID NO: 1046351 - DNA, 15 bp, Homo sapiens
acgccttccaggtgc

SEQ ID NO: 1046352 - DNA, 15 bp, Homo sapiens
cacgccttccaggtg

SEQ ID NO: 1046353 - DNA, 15 bp, Homo sapiens
gcacgccttccaggt

SEQ ID NO: 1046354 - DNA, 15 bp, Homo sapiens
tgcacgccttccagg

SEQ ID NO: 1046355 - DNA, 15 bp, Homo sapiens
atgcacgccttccag

SEQ ID NO: 1046356 - DNA, 15 bp, Homo sapiens
catgcacgccttcca

SEQ ID NO: 1046357 - DNA, 15 bp, Homo sapiens
tcatgcacgccttcc

SEQ ID NO: 1046358 - DNA, 15 bp, Homo sapiens
ttcatgcacgccttc

SEQ ID NO: 1046359 - DNA, 15 bp, Homo sapiens
cttcatgcacgcctt

SEQ ID NO: 1046360 - DNA, 15 bp, Homo sapiens
acttcatgcacgcct

SEQ ID NO: 1046361 - DNA, 15 bp, Homo sapiens
cacttcatgcacgcc

SEQ ID NO: 1046362 - DNA, 15 bp, Homo sapiens
ccacttcatgcacgc

SEQ ID NO: 1046363 - DNA, 15 bp, Homo sapiens
cccacttcatgcacg

SEQ ID NO: 1046364 - DNA, 15 bp, Homo sapiens
acccacttcatgcac

SEQ ID NO: 1046365 - DNA, 15 bp, Homo sapiens
tacccacttcatgca

SEQ ID NO: 1046366 - DNA, 15 bp, Homo sapiens
gtacccacttcatgc

SEQ ID NO: 1046367 - DNA, 15 bp, Homo sapiens
tgtacccacttcatg

SEQ ID NO: 1046368 - DNA, 15 bp, Homo sapiens
ttgtacccacttcat

SEQ ID NO: 1046369 - DNA, 15 bp, Homo sapiens
attgtacccacttca

SEQ ID NO: 1046370 - DNA, 15 bp, Homo sapiens
tattgtacccacttc

SEQ ID NO: 1046371 - DNA, 15 bp, Homo sapiens
gtattgtacccactt

SEQ ID NO: 1046372 - DNA, 15 bp, Homo sapiens
agtattgtacccact

SEQ ID NO: 1046373 - DNA, 15 bp, Homo sapiens
cagtattgtacccac

SEQ ID NO: 1046374 - DNA, 15 bp, Homo sapiens
ccagtattgtaccca

SEQ ID NO: 1046375 - DNA, 15 bp, Homo sapiens
cccagtattgtaccc

SEQ ID NO: 1046376 - DNA, 15 bp, Homo sapiens
acccagtattgtacc

SEQ ID NO: 1046377 - DNA, 15 bp, Homo sapiens
gacccagtattgtac

SEQ ID NO: 1046378 - DNA, 15 bp, Homo sapiens
tgacccagtattgta

SEQ ID NO: 1046379 - DNA, 15 bp, Homo sapiens
ctgacccagtattgt

SEQ ID NO: 1046380 - DNA, 15 bp, Homo sapiens
actgacccagtattg

SEQ ID NO: 1046381 - DNA, 15 bp, Homo sapiens
aactgacccagtatt

SEQ ID NO: 1046382 - DNA, 15 bp, Homo sapiens
gaactgacccagtat

SEQ ID NO: 1046383 - DNA, 15 bp, Homo sapiens
cgaactgacccagta

SEQ ID NO: 1046384 - DNA, 15 bp, Homo sapiens
ccgaactgacccagt

SEQ ID NO: 1046385 - DNA, 15 bp, Homo sapiens
cccgaactgacccag

SEQ ID NO: 1046386 - DNA, 15 bp, Homo sapiens
gcccgaactgaccca

SEQ ID NO: 1046387 - DNA, 15 bp, Homo sapiens
agcccgaactgaccc

SEQ ID NO: 1046388 - DNA, 15 bp, Homo sapiens
aagcccgaactgacc

SEQ ID NO: 1046389 - DNA, 15 bp, Homo sapiens
aaagcccgaactgac

SEQ ID NO: 1046390 - DNA, 15 bp, Homo sapiens
caaagcccgaactga

SEQ ID NO: 1046391 - DNA, 15 bp, Homo sapiens
gcaaagcccgaactg

SEQ ID NO: 1046392 - DNA, 15 bp, Homo sapiens
agcaaagcccgaact

SEQ ID NO: 1046393 - DNA, 15 bp, Homo sapiens
aagcaaagcccgaac

SEQ ID NO: 1046394 - DNA, 15 bp, Homo sapiens
caagcaaagcccgaa

SEQ ID NO: 1046395 - DNA, 15 bp, Homo sapiens
acaagcaaagcccga

SEQ ID NO: 1046396 - DNA, 15 bp, Homo sapiens
tacaagcaaagcccg

SEQ ID NO: 1046397 - DNA, 15 bp, Homo sapiens
ctacaagcaaagccc

SEQ ID NO: 1046398 - DNA, 15 bp, Homo sapiens
tctacaagcaaagcc

SEQ ID NO: 1046399 - DNA, 15 bp, Homo sapiens
ttctacaagcaaagc

SEQ ID NO: 1046400 - DNA, 15 bp, Homo sapiens
tttctacaagcaaag

SEQ ID NO: 1046401 - DNA, 15 bp, Homo sapiens
atttctacaagcaaa

SEQ ID NO: 1046402 - DNA, 15 bp, Homo sapiens
catttctacaagcaa

SEQ ID NO: 1046403 - DNA, 15 bp, Homo sapiens
ccatttctacaagca

SEQ ID NO: 1046404 - DNA, 15 bp, Homo sapiens
tccatttctacaagc

SEQ ID NO: 1046405 - DNA, 15 bp, Homo sapiens
ctccatttctacaag

SEQ ID NO: 1046406 - DNA, 15 bp, Homo sapiens
tctccatttctacaa

SEQ ID NO: 1046407 - DNA, 15 bp, Homo sapiens
gtctccatttctaca

SEQ ID NO: 1046408 - DNA, 15 bp, Homo sapiens
tgtctccatttctac

SEQ ID NO: 1046409 - DNA, 15 bp, Homo sapiens
ctgtctccatttcta

SEQ ID NO: 1046410 - DNA, 15 bp, Homo sapiens
cctgtctccatttct

SEQ ID NO: 1046411 - DNA, 15 bp, Homo sapiens
tcctgtctccatttc

SEQ ID NO: 1046412 - DNA, 15 bp, Homo sapiens
ctcctgtctccattt

SEQ ID NO: 1046413 - DNA, 15 bp, Homo sapiens
cctcctgtctccatt

SEQ ID NO: 1046414 - DNA, 15 bp, Homo sapiens
ccctcctgtctccat

SEQ ID NO: 1046415 - DNA, 15 bp, Homo sapiens
accctcctgtctcca

SEQ ID NO: 1046416 - DNA, 15 bp, Homo sapiens
gaccctcctgtctcc

SEQ ID NO: 1046417 - DNA, 15 bp, Homo sapiens
ggaccctcctgtctc

SEQ ID NO: 1046418 - DNA, 15 bp, Homo sapiens
tggaccctcctgtct

SEQ ID NO: 1046419 - DNA, 15 bp, Homo sapiens
ctggaccctcctgtc

SEQ ID NO: 1046420 - DNA, 15 bp, Homo sapiens
cctggaccctcctgt

SEQ ID NO: 1046421 - DNA, 15 bp, Homo sapiens
ccctggaccctcctg

SEQ ID NO: 1046422 - DNA, 15 bp, Homo sapiens
tccctggaccctcct

SEQ ID NO: 1046423 - DNA, 15 bp, Homo sapiens
ctccctggaccctcc

SEQ ID NO: 1046424 - DNA, 15 bp, Homo sapiens
tctccctggaccctc

SEQ ID NO: 1046425 - DNA, 15 bp, Homo sapiens
ctctccctggaccct

SEQ ID NO: 1046426 - DNA, 15 bp, Homo sapiens
tctctccctggaccc

SEQ ID NO: 1046427 - DNA, 15 bp, Homo sapiens
ttctctccctggacc

SEQ ID NO: 1046428 - DNA, 15 bp, Homo sapiens
tttctctccctggac

SEQ ID NO: 1046429 - DNA, 15 bp, Homo sapiens
ttttctctccctgga

SEQ ID NO: 1046430 - DNA, 15 bp, Homo sapiens
attttctctccctgg

SEQ ID NO: 1046431 - DNA, 15 bp, Homo sapiens
gattttctctccctg

SEQ ID NO: 1046432 - DNA, 15 bp, Homo sapiens
tgattttctctccct

SEQ ID NO: 1046433 - DNA, 15 bp, Homo sapiens
gtgattttctctccc

SEQ ID NO: 1046434 - DNA, 15 bp, Homo sapiens
tgtgattttctctcc

SEQ ID NO: 1046435 - DNA, 15 bp, Homo sapiens
ctgtgattttctctc

SEQ ID NO: 1046436 - DNA, 15 bp, Homo sapiens
cctgtgattttctct

SEQ ID NO: 1046437 - DNA, 15 bp, Homo sapiens
ccctgtgattttctc

SEQ ID NO: 1046438 - DNA, 15 bp, Homo sapiens
accctgtgattttct

SEQ ID NO: 1046439 - DNA, 15 bp, Homo sapiens
gaccctgtgattttc

SEQ ID NO: 1046440 - DNA, 15 bp, Homo sapiens
tgaccctgtgatttt

SEQ ID NO: 1046441 - DNA, 15 bp, Homo sapiens
atgaccctgtgattt

SEQ ID NO: 1046442 - DNA, 15 bp, Homo sapiens
catgaccctgtgatt

SEQ ID NO: 1046443 - DNA, 15 bp, Homo sapiens
ccatgaccctgtgat

SEQ ID NO: 1046444 - DNA, 15 bp, Homo sapiens
tccatgaccctgtga

SEQ ID NO: 1046445 - DNA, 15 bp, Homo sapiens
ttccatgaccctgtg

SEQ ID NO: 1046446 - DNA, 15 bp, Homo sapiens
cttccatgaccctgt

SEQ ID NO: 1046447 - DNA, 15 bp, Homo sapiens
tcttccatgaccctg

SEQ ID NO: 1046448 - DNA, 15 bp, Homo sapiens
ctcttccatgaccct

SEQ ID NO: 1046449 - DNA, 15 bp, Homo sapiens
cctcttccatgaccc

SEQ ID NO: 1046450 - DNA, 15 bp, Homo sapiens
tcctcttccatgacc

SEQ ID NO: 1046451 - DNA, 15 bp, Homo sapiens
gtcctcttccatgac

SEQ ID NO: 1046452 - DNA, 15 bp, Homo sapiens
tgtcctcttccatga

SEQ ID NO: 1046453 - DNA, 15 bp, Homo sapiens
ctgtcctcttccatg

SEQ ID NO: 1046454 - DNA, 15 bp, Homo sapiens
actgtcctcttccat

SEQ ID NO: 1046455 - DNA, 15 bp, Homo sapiens
cactgtcctcttcca

SEQ ID NO: 1046456 - DNA, 15 bp, Homo sapiens
ccactgtcctcttcc

SEQ ID NO: 1046457 - DNA, 15 bp, Homo sapiens
tccactgtcctcttc

SEQ ID NO: 1046458 - DNA, 15 bp, Homo sapiens
gtccactgtcctctt

SEQ ID NO: 1046459 - DNA, 15 bp, Homo sapiens
tgtccactgtcctct

SEQ ID NO: 1046460 - DNA, 15 bp, Homo sapiens
ctgtccactgtcctc

SEQ ID NO: 1046461 - DNA, 15 bp, Homo sapiens
cctgtccactgtcct

SEQ ID NO: 1046462 - DNA, 15 bp, Homo sapiens
gcctgtccactgtcc

SEQ ID NO: 1046463 - DNA, 15 bp, Homo sapiens
cgcctgtccactgtc

SEQ ID NO: 1046464 - DNA, 15 bp, Homo sapiens
ccgcctgtccactgt

SEQ ID NO: 1046465 - DNA, 15 bp, Homo sapiens
gccgcctgtccactg

SEQ ID NO: 1046466 - DNA, 15 bp, Homo sapiens
ggccgcctgtccact

SEQ ID NO: 1046467 - DNA, 15 bp, Homo sapiens
aggccgcctgtccac

SEQ ID NO: 1046468 - DNA, 15 bp, Homo sapiens
gaggccgcctgtcca

SEQ ID NO: 1046469 - DNA, 15 bp, Homo sapiens
tgaggccgcctgtcc

SEQ ID NO: 1046470 - DNA, 15 bp, Homo sapiens
ctgaggccgcctgtc

SEQ ID NO: 1046471 - DNA, 15 bp, Homo sapiens
actgaggccgcctgt

SEQ ID NO: 1046472 - DNA, 15 bp, Homo sapiens
aactgaggccgcctg

SEQ ID NO: 1046473 - DNA, 15 bp, Homo sapiens
aaactgaggccgcct

SEQ ID NO: 1046474 - DNA, 15 bp, Homo sapiens
aaaactgaggccgcc

SEQ ID NO: 1046475 - DNA, 15 bp, Homo sapiens
caaaactgaggccgc

SEQ ID NO: 1046476 - DNA, 15 bp, Homo sapiens
gcaaaactgaggccg

SEQ ID NO: 1046477 - DNA, 15 bp, Homo sapiens
cgcaaaactgaggcc

SEQ ID NO: 1046478 - DNA, 15 bp, Homo sapiens
acgcaaaactgaggc

SEQ ID NO: 1046479 - DNA, 15 bp, Homo sapiens
gacgcaaaactgagg

SEQ ID NO: 1046480 - DNA, 15 bp, Homo sapiens
ggacgcaaaactgag

SEQ ID NO: 1046481 - DNA, 15 bp, Homo sapiens
aggacgcaaaactga

SEQ ID NO: 1046482 - DNA, 15 bp, Homo sapiens
caggacgcaaaactg

SEQ ID NO: 1046483 - DNA, 15 bp, Homo sapiens
gcaggacgcaaaact

SEQ ID NO: 1046484 - DNA, 15 bp, Homo sapiens
ggcaggacgcaaaac

SEQ ID NO: 1046485 - DNA, 15 bp, Homo sapiens
aggcaggacgcaaaa

SEQ ID NO: 1046486 - DNA, 15 bp, Homo sapiens
gaggcaggacgcaaa

SEQ ID NO: 1046487 - DNA, 15 bp, Homo sapiens
agaggcaggacgcaa

SEQ ID NO: 1046488 - DNA, 15 bp, Homo sapiens
cagaggcaggacgca

SEQ ID NO: 1046489 - DNA, 15 bp, Homo sapiens
gcagaggcaggacgc

SEQ ID NO: 1046490 - DNA, 15 bp, Homo sapiens
ggcagaggcaggacg

SEQ ID NO: 1046491 - DNA, 15 bp, Homo sapiens
gggcagaggcaggac

SEQ ID NO: 1046492 - DNA, 15 bp, Homo sapiens
ggggcagaggcagga

SEQ ID NO: 1046493 - DNA, 15 bp, Homo sapiens
aggggcagaggcagg

SEQ ID NO: 1046494 - DNA, 15 bp, Homo sapiens
aaggggcagaggcag

SEQ ID NO: 1046495 - DNA, 15 bp, Homo sapiens
caaggggcagaggca

SEQ ID NO: 1046496 - DNA, 15 bp, Homo sapiens
ccaaggggcagaggc

SEQ ID NO: 1046497 - DNA, 15 bp, Homo sapiens
cccaaggggcagagg

SEQ ID NO: 1046498 - DNA, 15 bp, Homo sapiens
gcccaaggggcagag

SEQ ID NO: 1046499 - DNA, 15 bp, Homo sapiens
tgcccaaggggcaga

SEQ ID NO: 1046500 - DNA, 15 bp, Homo sapiens
ttgcccaaggggcag

SEQ ID NO: 1046501 - DNA, 15 bp, Homo sapiens
cttgcccaaggggca

SEQ ID NO: 1046502 - DNA, 15 bp, Homo sapiens
acttgcccaaggggc

SEQ ID NO: 1046503 - DNA, 15 bp, Homo sapiens
gacttgcccaagggg

SEQ ID NO: 1046504 - DNA, 15 bp, Homo sapiens
tgacttgcccaaggg

SEQ ID NO: 1046505 - DNA, 15 bp, Homo sapiens
atgacttgcccaagg

SEQ ID NO: 1046506 - DNA, 15 bp, Homo sapiens
gatgacttgcccaag

SEQ ID NO: 1046507 - DNA, 15 bp, Homo sapiens
cgatgacttgcccaa

SEQ ID NO: 1046508 - DNA, 15 bp, Homo sapiens
tcgatgacttgccca

SEQ ID NO: 1046509 - DNA, 15 bp, Homo sapiens
ttcgatgacttgccc

SEQ ID NO: 1046510 - DNA, 15 bp, Homo sapiens
tttcgatgacttgcc

SEQ ID NO: 1046511 - DNA, 15 bp, Homo sapiens
gtttcgatgacttgc

SEQ ID NO: 1046512 - DNA, 15 bp, Homo sapiens
ggtttcgatgacttg

SEQ ID NO: 1046513 - DNA, 15 bp, Homo sapiens
gggtttcgatgactt

SEQ ID NO: 1046514 - DNA, 15 bp, Homo sapiens
ggggtttcgatgact

SEQ ID NO: 1046515 - DNA, 15 bp, Homo sapiens
aggggtttcgatgac

SEQ ID NO: 1046516 - DNA, 15 bp, Homo sapiens
gaggggtttcgatga

SEQ ID NO: 1046517 - DNA, 15 bp, Homo sapiens
tgaggggtttcgatg

SEQ ID NO: 1046518 - DNA, 15 bp, Homo sapiens
ctgaggggtttcgat

SEQ ID NO: 1046519 - DNA, 15 bp, Homo sapiens
tctgaggggtttcga

SEQ ID NO: 1046520 - DNA, 15 bp, Homo sapiens
ctctgaggggtttcg

SEQ ID NO: 1046521 - DNA, 15 bp, Homo sapiens
gctctgaggggtttc

SEQ ID NO: 1046522 - DNA, 15 bp, Homo sapiens
tgctctgaggggttt

SEQ ID NO: 1046523 - DNA, 15 bp, Homo sapiens
gtgctctgaggggtt

SEQ ID NO: 1046524 - DNA, 15 bp, Homo sapiens
ggtgctctgaggggt

SEQ ID NO: 1046525 - DNA, 15 bp, Homo sapiens
tggtgctctgagggg

SEQ ID NO: 1046526 - DNA, 15 bp, Homo sapiens
ctggtgctctgaggg

SEQ ID NO: 1046527 - DNA, 15 bp, Homo sapiens
gctggtgctctgagg

SEQ ID NO: 1046528 - DNA, 15 bp, Homo sapiens
agctggtgctctgag

SEQ ID NO: 1046529 - DNA, 15 bp, Homo sapiens
aagctggtgctctga

SEQ ID NO: 1046530 - DNA, 15 bp, Homo sapiens
aaagctggtgctctg

SEQ ID NO: 1046531 - DNA, 15 bp, Homo sapiens
gaaagctggtgctct

SEQ ID NO: 1046532 - DNA, 15 bp, Homo sapiens
agaaagctggtgctc

SEQ ID NO: 1046533 - DNA, 15 bp, Homo sapiens
gagaaagctggtgct

SEQ ID NO: 1046534 - DNA, 15 bp, Homo sapiens
ggagaaagctggtgc

SEQ ID NO: 1046535 - DNA, 15 bp, Homo sapiens
gggagaaagctggtg

SEQ ID NO: 1046536 - DNA, 15 bp, Homo sapiens
agggagaaagctggt

SEQ ID NO: 1046537 - DNA, 15 bp, Homo sapiens
aagggagaaagctgg

SEQ ID NO: 1046538 - DNA, 15 bp, Homo sapiens
gaagggagaaagctg

SEQ ID NO: 1046539 - DNA, 15 bp, Homo sapiens
agaagggagaaagct

SEQ ID NO: 1046540 - DNA, 15 bp, Homo sapiens
gagaagggagaaagc

SEQ ID NO: 1046541 - DNA, 15 bp, Homo sapiens
tgagaagggagaaag

SEQ ID NO: 1046542 - DNA, 15 bp, Homo sapiens
ttgagaagggagaaa

SEQ ID NO: 1046543 - DNA, 15 bp, Homo sapiens
tttgagaagggagaa

SEQ ID NO: 1046544 - DNA, 15 bp, Homo sapiens
gtttgagaagggaga

SEQ ID NO: 1046545 - DNA, 15 bp, Homo sapiens
tgtttgagaagggag

SEQ ID NO: 1046546 - DNA, 15 bp, Homo sapiens
ctgtttgagaaggga

SEQ ID NO: 1046547 - DNA, 15 bp, Homo sapiens
cctgtttgagaaggg

SEQ ID NO: 1046548 - DNA, 15 bp, Homo sapiens
tcctgtttgagaagg

SEQ ID NO: 1046549 - DNA, 15 bp, Homo sapiens
gtcctgtttgagaag

SEQ ID NO: 1046550 - DNA, 15 bp, Homo sapiens
agtcctgtttgagaa

SEQ ID NO: 1046551 - DNA, 15 bp, Homo sapiens
cagtcctgtttgaga

SEQ ID NO: 1046552 - DNA, 15 bp, Homo sapiens
ccagtcctgtttgag

SEQ ID NO: 1046553 - DNA, 15 bp, Homo sapiens
cccagtcctgtttga

SEQ ID NO: 1046554 - DNA, 15 bp, Homo sapiens
tcccagtcctgtttg

SEQ ID NO: 1046555 - DNA, 15 bp, Homo sapiens
atcccagtcctgttt

SEQ ID NO: 1046556 - DNA, 15 bp, Homo sapiens
tatcccagtcctgtt

SEQ ID NO: 1046557 - DNA, 15 bp, Homo sapiens
atatcccagtcctgt

SEQ ID NO: 1046558 - DNA, 15 bp, Homo sapiens
aatatcccagtcctg

SEQ ID NO: 1046559 - DNA, 15 bp, Homo sapiens
gaatatcccagtcct

SEQ ID NO: 1046560 - DNA, 15 bp, Homo sapiens
tgaatatcccagtcc

SEQ ID NO: 1046561 - DNA, 15 bp, Homo sapiens
gtgaatatcccagtc

SEQ ID NO: 1046562 - DNA, 15 bp, Homo sapiens
agtgaatatcccagt

SEQ ID NO: 1046563 - DNA, 15 bp, Homo sapiens
aagtgaatatcccag

SEQ ID NO: 1046564 - DNA, 15 bp, Homo sapiens
gaagtgaatatccca

SEQ ID NO: 1046565 - DNA, 15 bp, Homo sapiens
ggaagtgaatatccc

SEQ ID NO: 1046566 - DNA, 15 bp, Homo sapiens
aggaagtgaatatcc

SEQ ID NO: 1046567 - DNA, 15 bp, Homo sapiens
aaggaagtgaatatc

SEQ ID NO: 1046568 - DNA, 15 bp, Homo sapiens
taaggaagtgaatat

SEQ ID NO: 1046569 - DNA, 15 bp, Homo sapiens
ataaggaagtgaata

SEQ ID NO: 1046570 - DNA, 15 bp, Homo sapiens
cataaggaagtgaat

SEQ ID NO: 1046571 - DNA, 15 bp, Homo sapiens
ccataaggaagtgaa

SEQ ID NO: 1046572 - DNA, 15 bp, Homo sapiens
accataaggaagtga

SEQ ID NO: 1046573 - DNA, 15 bp, Homo sapiens
gaccataaggaagtg

SEQ ID NO: 1046574 - DNA, 15 bp, Homo sapiens
ggaccataaggaagt

SEQ ID NO: 1046575 - DNA, 15 bp, Homo sapiens
aggaccataaggaag

SEQ ID NO: 1046576 - DNA, 15 bp, Homo sapiens
aaggaccataaggaa

SEQ ID NO: 1046577 - DNA, 15 bp, Homo sapiens
taaggaccataagga

SEQ ID NO: 1046578 - DNA, 15 bp, Homo sapiens
gtaaggaccataagg

SEQ ID NO: 1046579 - DNA, 15 bp, Homo sapiens
agtaaggaccataag

SEQ ID NO: 1046580 - DNA, 15 bp, Homo sapiens
gagtaaggaccataa

SEQ ID NO: 1046581 - DNA, 15 bp, Homo sapiens
agagtaaggaccata

SEQ ID NO: 1046582 - DNA, 15 bp, Homo sapiens
tagagtaaggaccat

SEQ ID NO: 1046583 - DNA, 15 bp, Homo sapiens
ctagagtaaggacca

SEQ ID NO: 1046584 - DNA, 15 bp, Homo sapiens
gctagagtaaggacc

SEQ ID NO: 1046585 - DNA, 15 bp, Homo sapiens
cgctagagtaaggac

SEQ ID NO: 1046586 - DNA, 15 bp, Homo sapiens
acgctagagtaagga

SEQ ID NO: 1046587 - DNA, 15 bp, Homo sapiens
aacgctagagtaagg

SEQ ID NO: 1046588 - DNA, 15 bp, Homo sapiens
taacgctagagtaag

SEQ ID NO: 1046589 - DNA, 15 bp, Homo sapiens
gtaacgctagagtaa

SEQ ID NO: 1046590 - DNA, 15 bp, Homo sapiens
agtaacgctagagta

SEQ ID NO: 1046591 - DNA, 15 bp, Homo sapiens
gagtaacgctagagt

SEQ ID NO: 1046592 - DNA, 15 bp, Homo sapiens
agagtaacgctagag

SEQ ID NO: 1046593 - DNA, 15 bp, Homo sapiens
cagagtaacgctaga

SEQ ID NO: 1046594 - DNA, 15 bp, Homo sapiens
tcagagtaacgctag

SEQ ID NO: 1046595 - DNA, 15 bp, Homo sapiens
atcagagtaacgcta

SEQ ID NO: 1046596 - DNA, 15 bp, Homo sapiens
catcagagtaacgct

SEQ ID NO: 1046597 - DNA, 15 bp, Homo sapiens
gcatcagagtaacgc

SEQ ID NO: 1046598 - DNA, 15 bp, Homo sapiens
ggcatcagagtaacg

SEQ ID NO: 1046599 - DNA, 15 bp, Homo sapiens
aggcatcagagtaac

SEQ ID NO: 1046600 - DNA, 15 bp, Homo sapiens
gaggcatcagagtaa

SEQ ID NO: 1046601 - DNA, 15 bp, Homo sapiens
tgaggcatcagagta

SEQ ID NO: 1046602 - DNA, 15 bp, Homo sapiens
ctgaggcatcagagt

SEQ ID NO: 1046603 - DNA, 15 bp, Homo sapiens
cctgaggcatcagag

SEQ ID NO: 1046604 - DNA, 15 bp, Homo sapiens
ccctgaggcatcaga

SEQ ID NO: 1046605 - DNA, 15 bp, Homo sapiens
tccctgaggcatcag

SEQ ID NO: 1046606 - DNA, 15 bp, Homo sapiens
ttccctgaggcatca

SEQ ID NO: 1046607 - DNA, 15 bp, Homo sapiens
tttccctgaggcatc

SEQ ID NO: 1046608 - DNA, 15 bp, Homo sapiens
ctttccctgaggcat

SEQ ID NO: 1046609 - DNA, 15 bp, Homo sapiens
cctttccctgaggca

SEQ ID NO: 1046610 - DNA, 15 bp, Homo sapiens
tcctttccctgaggc

SEQ ID NO: 1046611 - DNA, 15 bp, Homo sapiens
gtcctttccctgagg

SEQ ID NO: 1046612 - DNA, 15 bp, Homo sapiens
ggtcctttccctgag

SEQ ID NO: 1046613 - DNA, 15 bp, Homo sapiens
aggtcctttccctga

SEQ ID NO: 1046614 - DNA, 15 bp, Homo sapiens
caggtcctttccctg

SEQ ID NO: 1046615 - DNA, 15 bp, Homo sapiens
ccaggtcctttccct

SEQ ID NO: 1046616 - DNA, 15 bp, Homo sapiens
cccaggtcctttccc

SEQ ID NO: 1046617 - DNA, 15 bp, Homo sapiens
tcccaggtcctttcc

SEQ ID NO: 1046618 - DNA, 15 bp, Homo sapiens
atcccaggtcctttc

SEQ ID NO: 1046619 - DNA, 15 bp, Homo sapiens
catcccaggtccttt

SEQ ID NO: 1046620 - DNA, 15 bp, Homo sapiens
ccatcccaggtcctt

SEQ ID NO: 1046621 - DNA, 15 bp, Homo sapiens
accatcccaggtcct

SEQ ID NO: 1046622 - DNA, 15 bp, Homo sapiens
caccatcccaggtcc

SEQ ID NO: 1046623 - DNA, 15 bp, Homo sapiens
gcaccatcccaggtc

SEQ ID NO: 1046624 - DNA, 15 bp, Homo sapiens
ggcaccatcccaggt

SEQ ID NO: 1046625 - DNA, 15 bp, Homo sapiens
aggcaccatcccagg

SEQ ID NO: 1046626 - DNA, 15 bp, Homo sapiens
caggcaccatcccag

SEQ ID NO: 1046627 - DNA, 15 bp, Homo sapiens
tcaggcaccatccca

SEQ ID NO: 1046628 - DNA, 15 bp, Homo sapiens
ctcaggcaccatccc

SEQ ID NO: 1046629 - DNA, 15 bp, Homo sapiens
tctcaggcaccatcc

SEQ ID NO: 1046630 - DNA, 15 bp, Homo sapiens
gtctcaggcaccatc

SEQ ID NO: 1046631 - DNA, 15 bp, Homo sapiens
cgtctcaggcaccat

SEQ ID NO: 1046632 - DNA, 15 bp, Homo sapiens
gcgtctcaggcacca

SEQ ID NO: 1046633 - DNA, 15 bp, Homo sapiens
cgcgtctcaggcacc

SEQ ID NO: 1046634 - DNA, 15 bp, Homo sapiens
acgcgtctcaggcac

SEQ ID NO: 1046635 - DNA, 15 bp, Homo sapiens
aacgcgtctcaggca

SEQ ID NO: 1046636 - DNA, 15 bp, Homo sapiens
taacgcgtctcaggc

SEQ ID NO: 1046637 - DNA, 15 bp, Homo sapiens
ctaacgcgtctcagg

SEQ ID NO: 1046638 - DNA, 15 bp, Homo sapiens
cctaacgcgtctcag

SEQ ID NO: 1046639 - DNA, 15 bp, Homo sapiens
tcctaacgcgtctca

SEQ ID NO: 1046640 - DNA, 15 bp, Homo sapiens
ttcctaacgcgtctc

SEQ ID NO: 1046641 - DNA, 15 bp, Homo sapiens
tttcctaacgcgtct

SEQ ID NO: 1046642 - DNA, 15 bp, Homo sapiens
ctttcctaacgcgtc

SEQ ID NO: 1046643 - DNA, 15 bp, Homo sapiens
actttcctaacgcgt

SEQ ID NO: 1046644 - DNA, 15 bp, Homo sapiens
cactttcctaacgcg

SEQ ID NO: 1046645 - DNA, 15 bp, Homo sapiens
gcactttcctaacgc

SEQ ID NO: 1046646 - DNA, 15 bp, Homo sapiens
agcactttcctaacg

SEQ ID NO: 1046647 - DNA, 15 bp, Homo sapiens
gagcactttcctaac

SEQ ID NO: 1046648 - DNA, 15 bp, Homo sapiens
agagcactttcctaa

SEQ ID NO: 1046649 - DNA, 15 bp, Homo sapiens
tagagcactttccta

SEQ ID NO: 1046650 - DNA, 15 bp, Homo sapiens
atagagcactttcct

SEQ ID NO: 1046651 - DNA, 15 bp, Homo sapiens
tatagagcactttcc

SEQ ID NO: 1046652 - DNA, 15 bp, Homo sapiens
ctatagagcactttc

SEQ ID NO: 1046653 - DNA, 15 bp, Homo sapiens
actatagagcacttt

SEQ ID NO: 1046654 - DNA, 15 bp, Homo sapiens
cactatagagcactt

SEQ ID NO: 1046655 - DNA, 15 bp, Homo sapiens
tcactatagagcact

SEQ ID NO: 1046656 - DNA, 15 bp, Homo sapiens
gtcactatagagcac

SEQ ID NO: 1046657 - DNA, 15 bp, Homo sapiens
tgtcactatagagca

SEQ ID NO: 1046658 - DNA, 15 bp, Homo sapiens
ctgtcactatagagc

SEQ ID NO: 1046659 - DNA, 15 bp, Homo sapiens
actgtcactatagag

SEQ ID NO: 1046660 - DNA, 15 bp, Homo sapiens
cactgtcactataga

SEQ ID NO: 1046661 - DNA, 15 bp, Homo sapiens
tcactgtcactatag

SEQ ID NO: 1046662 - DNA, 15 bp, Homo sapiens
atcactgtcactata

SEQ ID NO: 1046663 - DNA, 15 bp, Homo sapiens
aatcactgtcactat

SEQ ID NO: 1046664 - DNA, 15 bp, Homo sapiens
caatcactgtcacta

SEQ ID NO: 1046665 - DNA, 15 bp, Homo sapiens
acaatcactgtcact

SEQ ID NO: 1046666 - DNA, 15 bp, Homo sapiens
aacaatcactgtcac

SEQ ID NO: 1046667 - DNA, 15 bp, Homo sapiens
taacaatcactgtca

SEQ ID NO: 1046668 - DNA, 15 bp, Homo sapiens
ataacaatcactgtc

SEQ ID NO: 1046669 - DNA, 15 bp, Homo sapiens
cataacaatcactgt

SEQ ID NO: 1046670 - DNA, 15 bp, Homo sapiens
tcataacaatcactg

SEQ ID NO: 1046671 - DNA, 15 bp, Homo sapiens
ctcataacaatcact

SEQ ID NO: 1046672 - DNA, 15 bp, Homo sapiens
gctcataacaatcac

SEQ ID NO: 1046673 - DNA, 15 bp, Homo sapiens
tgctcataacaatca

SEQ ID NO: 1046674 - DNA, 15 bp, Homo sapiens
ttgctcataacaatc

SEQ ID NO: 1046675 - DNA, 15 bp, Homo sapiens
tttgctcataacaat

SEQ ID NO: 1046676 - DNA, 15 bp, Homo sapiens
ctttgctcataacaa

SEQ ID NO: 1046677 - DNA, 15 bp, Homo sapiens
tctttgctcataaca

SEQ ID NO: 1046678 - DNA, 15 bp, Homo sapiens
gtctttgctcataac

SEQ ID NO: 1046679 - DNA, 15 bp, Homo sapiens
agtctttgctcataa

SEQ ID NO: 1046680 - DNA, 15 bp, Homo sapiens
caagtctttgctcat

SEQ ID NO: 1046681 - DNA, 15 bp, Homo sapiens
tcaagtctttgctca

SEQ ID NO: 1046682 - DNA, 15 bp, Homo sapiens
ttcaagtctttgctc

SEQ ID NO: 1046683 - DNA, 15 bp, Homo sapiens
tttcaagtctttgct

SEQ ID NO: 1046684 - DNA, 15 bp, Homo sapiens
ctttcaagtctttgc

SEQ ID NO: 1046685 - DNA, 15 bp, Homo sapiens
tctttcaagtctttg

SEQ ID NO: 1046686 - DNA, 15 bp, Homo sapiens
gtctttcaagtcttt

SEQ ID NO: 1046687 - DNA, 15 bp, Homo sapiens
tgtctttcaagtctt

SEQ ID NO: 1046688 - DNA, 15 bp, Homo sapiens
ctgtctttcaagtct

SEQ ID NO: 1046689 - DNA, 15 bp, Homo sapiens
tctgtctttcaagtc

SEQ ID NO: 1046690 - DNA, 15 bp, Homo sapiens
ctctgtctttcaagt

SEQ ID NO: 1046691 - DNA, 15 bp, Homo sapiens
tctctgtctttcaag

SEQ ID NO: 1046692 - DNA, 15 bp, Homo sapiens
ttctctgtctttcaa

SEQ ID NO: 1046693 - DNA, 15 bp, Homo sapiens
gttctctgtctttca

SEQ ID NO: 1046694 - DNA, 15 bp, Homo sapiens
tgttctctgtctttc

SEQ ID NO: 1046695 - DNA, 15 bp, Homo sapiens
atgttctctgtcttt

SEQ ID NO: 1046696 - DNA, 15 bp, Homo sapiens
gatgttctctgtctt

SEQ ID NO: 1046697 - DNA, 15 bp, Homo sapiens
tgatgttctctgtct

SEQ ID NO: 1046698 - DNA, 15 bp, Homo sapiens
ctgatgttctctgtc

SEQ ID NO: 1046699 - DNA, 15 bp, Homo sapiens
actgatgttctctgt

SEQ ID NO: 1046700 - DNA, 15 bp, Homo sapiens
gactgatgttctctg

SEQ ID NO: 1046701 - DNA, 15 bp, Homo sapiens
agactgatgttctct

SEQ ID NO: 1046702 - DNA, 15 bp, Homo sapiens
aagactgatgttctc

SEQ ID NO: 1046703 - DNA, 15 bp, Homo sapiens
taagactgatgttct

SEQ ID NO: 1046704 - DNA, 15 bp, Homo sapiens
ataagactgatgttc

SEQ ID NO: 1046705 - DNA, 15 bp, Homo sapiens
aataagactgatgtt

SEQ ID NO: 1046706 - DNA, 15 bp, Homo sapiens
gaataagactgatgt

SEQ ID NO: 1046707 - DNA, 15 bp, Homo sapiens
tgaataagactgatg

SEQ ID NO: 1046708 - DNA, 15 bp, Homo sapiens
gtgaataagactgat

SEQ ID NO: 1046709 - DNA, 15 bp, Homo sapiens
tgtgaataagactga

SEQ ID NO: 1046710 - DNA, 15 bp, Homo sapiens
ttgtgaataagactg

SEQ ID NO: 1046711 - DNA, 15 bp, Homo sapiens
tttgtgaataagact

SEQ ID NO: 1046712 - DNA, 15 bp, Homo sapiens
ttttgtgaataagac

SEQ ID NO: 1046713 - DNA, 15 bp, Homo sapiens
attttgtgaataaga

SEQ ID NO: 1046714 - DNA, 15 bp, Homo sapiens
tattttgtgaataag

SEQ ID NO: 1046715 - DNA, 15 bp, Homo sapiens
atattttgtgaataa

SEQ ID NO: 1046716 - DNA, 15 bp, Homo sapiens
gatattttgtgaata

SEQ ID NO: 1046717 - DNA, 15 bp, Homo sapiens
tgatattttgtgaat

SEQ ID NO: 1046718 - DNA, 15 bp, Homo sapiens
ctgatattttgtgaa

SEQ ID NO: 1046719 - DNA, 15 bp, Homo sapiens
tctgatattttgtga

SEQ ID NO: 1046720 - DNA, 15 bp, Homo sapiens
atctgatattttgtg

SEQ ID NO: 1046721 - DNA, 15 bp, Homo sapiens
tatctgatattttgt

SEQ ID NO: 1046722 - DNA, 15 bp, Homo sapiens
ttatctgatattttg

SEQ ID NO: 1046723 - DNA, 15 bp, Homo sapiens
attatctgatatttt

SEQ ID NO: 1046724 - DNA, 15 bp, Homo sapiens
gattatctgatattt

SEQ ID NO: 1046725 - DNA, 15 bp, Homo sapiens
agattatctgatatt

SEQ ID NO: 1046726 - DNA, 15 bp, Homo sapiens
tagattatctgatat

SEQ ID NO: 1046727 - DNA, 15 bp, Homo sapiens
gtagattatctgata

SEQ ID NO: 1046728 - DNA, 15 bp, Homo sapiens
agtagattatctgat

SEQ ID NO: 1046729 - DNA, 15 bp, Homo sapiens
cagtagattatctga

SEQ ID NO: 1046730 - DNA, 15 bp, Homo sapiens
ccagtagattatctg

SEQ ID NO: 1046731 - DNA, 15 bp, Homo sapiens
cccagtagattatct

SEQ ID NO: 1046732 - DNA, 15 bp, Homo sapiens
gcccagtagattatc

SEQ ID NO: 1046733 - DNA, 15 bp, Homo sapiens
ggcccagtagattat

SEQ ID NO: 1046734 - DNA, 15 bp, Homo sapiens
tggcccagtagatta

SEQ ID NO: 1046735 - DNA, 15 bp, Homo sapiens
ttggcccagtagatt

SEQ ID NO: 1046736 - DNA, 15 bp, Homo sapiens
tttggcccagtagat

SEQ ID NO: 1046737 - DNA, 15 bp, Homo sapiens
ctttggcccagtaga

SEQ ID NO: 1046738 - DNA, 15 bp, Homo sapiens
cctttggcccagtag

SEQ ID NO: 1046739 - DNA, 15 bp, Homo sapiens
gcctttggcccagta

SEQ ID NO: 1046740 - DNA, 15 bp, Homo sapiens
tgcctttggcccagt

SEQ ID NO: 1046741 - DNA, 15 bp, Homo sapiens
gtgcctttggcccag

SEQ ID NO: 1046742 - DNA, 15 bp, Homo sapiens
tgtgcctttggccca

SEQ ID NO: 1046743 - DNA, 15 bp, Homo sapiens
ttgtgcctttggccc

SEQ ID NO: 1046744 - DNA, 15 bp, Homo sapiens
tttgtgcctttggcc

SEQ ID NO: 1046745 - DNA, 15 bp, Homo sapiens
ctttgtgcctttggc

SEQ ID NO: 1046746 - DNA, 15 bp, Homo sapiens
tctttgtgcctttgg

SEQ ID NO: 1046747 - DNA, 15 bp, Homo sapiens
ctctttgtgcctttg

SEQ ID NO: 1046748 - DNA, 15 bp, Homo sapiens
tctctttgtgccttt

SEQ ID NO: 1046749 - DNA, 15 bp, Homo sapiens
atctctttgtgcctt

SEQ ID NO: 1046750 - DNA, 15 bp, Homo sapiens
catctctttgtgcct

SEQ ID NO: 1046751 - DNA, 15 bp, Homo sapiens
tcatctctttgtgcc

SEQ ID NO: 1046752 - DNA, 15 bp, Homo sapiens
ttcatctctttgtgc

SEQ ID NO: 1046753 - DNA, 15 bp, Homo sapiens
tttcatctctttgtg

SEQ ID NO: 1046754 - DNA, 15 bp, Homo sapiens
ttttcatctctttgt

SEQ ID NO: 1046755 - DNA, 15 bp, Homo sapiens
attttcatctctttg

SEQ ID NO: 1046756 - DNA, 15 bp, Homo sapiens
tattttcatctcttt

SEQ ID NO: 1046757 - DNA, 15 bp, Homo sapiens
ttattttcatctctt

SEQ ID NO: 1046758 - DNA, 15 bp, Homo sapiens
tttattttcatctct

SEQ ID NO: 1046759 - DNA, 15 bp, Homo sapiens
ttttattttcatctc

SEQ ID NO: 1046760 - DNA, 15 bp, Homo sapiens
tttttattttcatct

SEQ ID NO: 1046761 - DNA, 15 bp, Homo sapiens
ctttttattttcatc

SEQ ID NO: 1046762 - DNA, 15 bp, Homo sapiens
gctttttattttcat

SEQ ID NO: 1046763 - DNA, 15 bp, Homo sapiens
tgctttttattttca

SEQ ID NO: 1046764 - DNA, 15 bp, Homo sapiens
ttgctttttattttc

SEQ ID NO: 1046765 - DNA, 15 bp, Homo sapiens
gttgctttttatttt

SEQ ID NO: 1046766 - DNA, 15 bp, Homo sapiens
tgttgctttttattt

SEQ ID NO: 1046767 - DNA, 15 bp, Homo sapiens
ctgttgctttttatt

SEQ ID NO: 1046768 - DNA, 15 bp, Homo sapiens
tctgttgctttttat

SEQ ID NO: 1046769 - DNA, 15 bp, Homo sapiens
ctctgttgcttttta

SEQ ID NO: 1046770 - DNA, 15 bp, Homo sapiens
cctctgttgcttttt

SEQ ID NO: 1046771 - DNA, 15 bp, Homo sapiens
ccctctgttgctttt

SEQ ID NO: 1046772 - DNA, 15 bp, Homo sapiens
gccctctgttgcttt

SEQ ID NO: 1046773 - DNA, 15 bp, Homo sapiens
ggccctctgttgctt

SEQ ID NO: 1046774 - DNA, 15 bp, Homo sapiens
gggccctctgttgct

SEQ ID NO: 1046775 - DNA, 15 bp, Homo sapiens
agggccctctgttgc

SEQ ID NO: 1046776 - DNA, 15 bp, Homo sapiens
cagggccctctgttg

SEQ ID NO: 1046777 - DNA, 15 bp, Homo sapiens
tcagggccctctgtt

SEQ ID NO: 1046778 - DNA, 15 bp, Homo sapiens
ttcagggccctctgt

SEQ ID NO: 1046779 - DNA, 15 bp, Homo sapiens
attcagggccctctg

SEQ ID NO: 1046780 - DNA, 15 bp, Homo sapiens
cattcagggccctct

SEQ ID NO: 1046781 - DNA, 15 bp, Homo sapiens
ccattcagggccctc

SEQ ID NO: 1046782 - DNA, 15 bp, Homo sapiens
gccattcagggccct

SEQ ID NO: 1046783 - DNA, 15 bp, Homo sapiens
tgccattcagggccc

SEQ ID NO: 1046784 - DNA, 15 bp, Homo sapiens
ctgccattcagggcc

SEQ ID NO: 1046785 - DNA, 15 bp, Homo sapiens
cctgccattcagggc

SEQ ID NO: 1046786 - DNA, 15 bp, Homo sapiens
gcctgccattcaggg

SEQ ID NO: 1046787 - DNA, 15 bp, Homo sapiens
agcctgccattcagg

SEQ ID NO: 1046788 - DNA, 15 bp, Homo sapiens
cagcctgccattcag

SEQ ID NO: 1046789 - DNA, 15 bp, Homo sapiens
tcagcctgccattca

SEQ ID NO: 1046790 - DNA, 15 bp, Homo sapiens
ttcagcctgccattc

SEQ ID NO: 1046791 - DNA, 15 bp, Homo sapiens
tttcagcctgccatt

SEQ ID NO: 1046792 - DNA, 15 bp, Homo sapiens
ttttcagcctgccat

SEQ ID NO: 1046793 - DNA, 15 bp, Homo sapiens
gttttcagcctgcca

SEQ ID NO: 1046794 - DNA, 15 bp, Homo sapiens
tgttttcagcctgcc

SEQ ID NO: 1046795 - DNA, 15 bp, Homo sapiens
atgttttcagcctgc

SEQ ID NO: 1046796 - DNA, 15 bp, Homo sapiens
catgttttcagcctg

SEQ ID NO: 1046797 - DNA, 15 bp, Homo sapiens
acatgttttcagcct

SEQ ID NO: 1046798 - DNA, 15 bp, Homo sapiens
cacatgttttcagcc

SEQ ID NO: 1046799 - DNA, 15 bp, Homo sapiens
gcacatgttttcagc

SEQ ID NO: 1046800 - DNA, 15 bp, Homo sapiens
ggcacatgttttcag

SEQ ID NO: 1046801 - DNA, 15 bp, Homo sapiens
tggcacatgttttca

SEQ ID NO: 1046802 - DNA, 15 bp, Homo sapiens
atggcacatgttttc

SEQ ID NO: 1046803 - DNA, 15 bp, Homo sapiens
aatggcacatgtttt

SEQ ID NO: 1046804 - DNA, 15 bp, Homo sapiens
aaatggcacatgttt

SEQ ID NO: 1046805 - DNA, 15 bp, Homo sapiens
taaatggcacatgtt

SEQ ID NO: 1046806 - DNA, 15 bp, Homo sapiens
ataaatggcacatgt

SEQ ID NO: 1046807 - DNA, 15 bp, Homo sapiens
aataaatggcacatg

SEQ ID NO: 1046808 - DNA, 15 bp, Homo sapiens
gaataaatggcacat

SEQ ID NO: 1046809 - DNA, 15 bp, Homo sapiens
ggaataaatggcaca

SEQ ID NO: 1046810 - DNA, 15 bp, Homo sapiens
tggaataaatggcac

SEQ ID NO: 1046811 - DNA, 15 bp, Homo sapiens
gtggaataaatggca

SEQ ID NO: 1046812 - DNA, 15 bp, Homo sapiens
tgtggaataaatggc

SEQ ID NO: 1046813 - DNA, 15 bp, Homo sapiens
ctgtggaataaatgg

SEQ ID NO: 1046814 - DNA, 15 bp, Homo sapiens
gctgtggaataaatg

SEQ ID NO: 1046815 - DNA, 15 bp, Homo sapiens
ggctgtggaataaat

SEQ ID NO: 1046816 - DNA, 15 bp, Homo sapiens
tggctgtggaataaa

SEQ ID NO: 1046817 - DNA, 15 bp, Homo sapiens
ctggctgtggaataa

SEQ ID NO: 1046818 - DNA, 15 bp, Homo sapiens
tctggctgtggaata

SEQ ID NO: 1046819 - DNA, 15 bp, Homo sapiens
ctctggctgtggaat

SEQ ID NO: 1046820 - DNA, 15 bp, Homo sapiens
cctctggctgtggaa

SEQ ID NO: 1046821 - DNA, 15 bp, Homo sapiens
gcctctggctgtgga

SEQ ID NO: 1046822 - DNA, 15 bp, Homo sapiens
agcctctggctgtgg

SEQ ID NO: 1046823 - DNA, 15 bp, Homo sapiens
cagcctctggctgtg

SEQ ID NO: 1046824 - DNA, 15 bp, Homo sapiens
tcagcctctggctgt

SEQ ID NO: 1046825 - DNA, 15 bp, Homo sapiens
gtcagcctctggctg

SEQ ID NO: 1046826 - DNA, 15 bp, Homo sapiens
agtcagcctctggct

SEQ ID NO: 1046827 - DNA, 15 bp, Homo sapiens
aagtcagcctctggc

SEQ ID NO: 1046828 - DNA, 15 bp, Homo sapiens
aaagtcagcctctgg

SEQ ID NO: 1046829 - DNA, 15 bp, Homo sapiens
caaagtcagcctctg

SEQ ID NO: 1046830 - DNA, 15 bp, Homo sapiens
tcaaagtcagcctct

SEQ ID NO: 1046831 - DNA, 15 bp, Homo sapiens
ctcaaagtcagcctc

SEQ ID NO: 1046832 - DNA, 15 bp, Homo sapiens
gctcaaagtcagcct

SEQ ID NO: 1046833 - DNA, 15 bp, Homo sapiens
tgctcaaagtcagcc

SEQ ID NO: 1046834 - DNA, 15 bp, Homo sapiens
gtgctcaaagtcagc

SEQ ID NO: 1046835 - DNA, 15 bp, Homo sapiens
ggtgctcaaagtcag

SEQ ID NO: 1046836 - DNA, 15 bp, Homo sapiens
cggtgctcaaagtca

SEQ ID NO: 1046837 - DNA, 15 bp, Homo sapiens
tcggtgctcaaagtc

SEQ ID NO: 1046838 - DNA, 15 bp, Homo sapiens
atcggtgctcaaagt

SEQ ID NO: 1046839 - DNA, 15 bp, Homo sapiens
catcggtgctcaaag

SEQ ID NO: 1046840 - DNA, 15 bp, Homo sapiens
acatcggtgctcaaa

SEQ ID NO: 1046841 - DNA, 15 bp, Homo sapiens
cacatcggtgctcaa

SEQ ID NO: 1046842 - DNA, 15 bp, Homo sapiens
tcacatcggtgctca

SEQ ID NO: 1046843 - DNA, 15 bp, Homo sapiens
gtcacatcggtgctc

SEQ ID NO: 1046844 - DNA, 15 bp, Homo sapiens
tgtcacatcggtgct

SEQ ID NO: 1046845 - DNA, 15 bp, Homo sapiens
atgtcacatcggtgc

SEQ ID NO: 1046846 - DNA, 15 bp, Homo sapiens
aatgtcacatcggtg

SEQ ID NO: 1046847 - DNA, 15 bp, Homo sapiens
aaatgtcacatcggt

SEQ ID NO: 1046848 - DNA, 15 bp, Homo sapiens
taaatgtcacatcgg

SEQ ID NO: 1046849 - DNA, 15 bp, Homo sapiens
ttaaatgtcacatcg

SEQ ID NO: 1046850 - DNA, 15 bp, Homo sapiens
gttaaatgtcacatc

SEQ ID NO: 1046851 - DNA, 15 bp, Homo sapiens
ggttaaatgtcacat

SEQ ID NO: 1046852 - DNA, 15 bp, Homo sapiens
gggttaaatgtcaca

SEQ ID NO: 1046853 - DNA, 15 bp, Homo sapiens
tgggttaaatgtcac

SEQ ID NO: 1046854 - DNA, 15 bp, Homo sapiens
ctgggttaaatgtca

SEQ ID NO: 1046855 - DNA, 15 bp, Homo sapiens
tctgggttaaatgtc

SEQ ID NO: 1046856 - DNA, 15 bp, Homo sapiens
ctctgggttaaatgt

SEQ ID NO: 1046857 - DNA, 15 bp, Homo sapiens
cctctgggttaaatg

SEQ ID NO: 1046858 - DNA, 15 bp, Homo sapiens
gcctctgggttaaat

SEQ ID NO: 1046859 - DNA, 15 bp, Homo sapiens
agcctctgggttaaa

SEQ ID NO: 1046860 - DNA, 15 bp, Homo sapiens
cagcctctgggttaa

SEQ ID NO: 1046861 - DNA, 15 bp, Homo sapiens
tcagcctctgggtta

SEQ ID NO: 1046862 - DNA, 15 bp, Homo sapiens
gtcagcctctgggtt

SEQ ID NO: 1046863 - DNA, 15 bp, Homo sapiens
agtcagcctctgggt

SEQ ID NO: 1046864 - DNA, 15 bp, Homo sapiens
aagtcagcctctggg

SEQ ID NO: 1046865 - DNA, 15 bp, Homo sapiens
tgtgctcaaagtcag

SEQ ID NO: 1046866 - DNA, 15 bp, Homo sapiens
ctgtgctcaaagtca

SEQ ID NO: 1046867 - DNA, 15 bp, Homo sapiens
tctgtgctcaaagtc

SEQ ID NO: 1046868 - DNA, 15 bp, Homo sapiens
gtctgtgctcaaagt

SEQ ID NO: 1046869 - DNA, 15 bp, Homo sapiens
cgtctgtgctcaaag

SEQ ID NO: 1046870 - DNA, 15 bp, Homo sapiens
acgtctgtgctcaaa

SEQ ID NO: 1046871 - DNA, 15 bp, Homo sapiens
cacgtctgtgctcaa

SEQ ID NO: 1046872 - DNA, 15 bp, Homo sapiens
tcacgtctgtgctca

SEQ ID NO: 1046873 - DNA, 15 bp, Homo sapiens
gtcacgtctgtgctc

SEQ ID NO: 1046874 - DNA, 15 bp, Homo sapiens
tgtcacgtctgtgct

SEQ ID NO: 1046875 - DNA, 15 bp, Homo sapiens
atgtcacgtctgtgc

SEQ ID NO: 1046876 - DNA, 15 bp, Homo sapiens
aatgtcacgtctgtg

SEQ ID NO: 1046877 - DNA, 15 bp, Homo sapiens
aaatgtcacgtctgt

SEQ ID NO: 1046878 - DNA, 15 bp, Homo sapiens
taaatgtcacgtctg

SEQ ID NO: 1046879 - DNA, 15 bp, Homo sapiens
ttaaatgtcacgtct

SEQ ID NO: 1046880 - DNA, 15 bp, Homo sapiens
gttaaatgtcacgtc

SEQ ID NO: 1046881 - DNA, 15 bp, Homo sapiens
ggttaaatgtcacgt

SEQ ID NO: 1046882 - DNA, 15 bp, Homo sapiens
aggttaaatgtcacg

SEQ ID NO: 1046883 - DNA, 15 bp, Homo sapiens
gaggttaaatgtcac

SEQ ID NO: 1046884 - DNA, 15 bp, Homo sapiens
tgaggttaaatgtca

SEQ ID NO: 1046885 - DNA, 15 bp, Homo sapiens
atgaggttaaatgtc

SEQ ID NO: 1046886 - DNA, 15 bp, Homo sapiens
gatgaggttaaatgt

SEQ ID NO: 1046887 - DNA, 15 bp, Homo sapiens
tgatgaggttaaatg

SEQ ID NO: 1046888 - DNA, 15 bp, Homo sapiens
ctgatgaggttaaat

SEQ ID NO: 1046889 - DNA, 15 bp, Homo sapiens
tctgatgaggttaaa

SEQ ID NO: 1046890 - DNA, 15 bp, Homo sapiens
ctctgatgaggttaa

SEQ ID NO: 1046891 - DNA, 15 bp, Homo sapiens
gctctgatgaggtta

SEQ ID NO: 1046892 - DNA, 15 bp, Homo sapiens
tgctctgatgaggtt

SEQ ID NO: 1046893 - DNA, 15 bp, Homo sapiens
ctgctctgatgaggt

SEQ ID NO: 1046894 - DNA, 15 bp, Homo sapiens
actgctctgatgagg

SEQ ID NO: 1046895 - DNA, 15 bp, Homo sapiens
cactgctctgatgag

SEQ ID NO: 1046896 - DNA, 15 bp, Homo sapiens
tcactgctctgatga

SEQ ID NO: 1046897 - DNA, 15 bp, Homo sapiens
gtcactgctctgatg

SEQ ID NO: 1046898 - DNA, 15 bp, Homo sapiens
agtcactgctctgat

SEQ ID NO: 1046899 - DNA, 15 bp, Homo sapiens
aagtcactgctctga

SEQ ID NO: 1046900 - DNA, 15 bp, Homo sapiens
taagtcactgctctg

SEQ ID NO: 1046901 - DNA, 15 bp, Homo sapiens
ttaagtcactgctct

SEQ ID NO: 1046902 - DNA, 15 bp, Homo sapiens
cttaagtcactgctc

SEQ ID NO: 1046903 - DNA, 15 bp, Homo sapiens
tcttaagtcactgct

SEQ ID NO: 1046904 - DNA, 15 bp, Homo sapiens
gtcttaagtcactgc

SEQ ID NO: 1046905 - DNA, 15 bp, Homo sapiens
agtcttaagtcactg

SEQ ID NO: 1046906 - DNA, 15 bp, Homo sapiens
tagtcttaagtcact

SEQ ID NO: 1046907 - DNA, 15 bp, Homo sapiens
ctagtcttaagtcac

SEQ ID NO: 1046908 - DNA, 15 bp, Homo sapiens
gctagtcttaagtca

SEQ ID NO: 1046909 - DNA, 15 bp, Homo sapiens
cgctagtcttaagtc

SEQ ID NO: 1046910 - DNA, 15 bp, Homo sapiens
tcgctagtcttaagt

SEQ ID NO: 1046911 - DNA, 15 bp, Homo sapiens
ctcgctagtcttaag

SEQ ID NO: 1046912 - DNA, 15 bp, Homo sapiens
gctcgctagtcttaa

SEQ ID NO: 1046913 - DNA, 15 bp, Homo sapiens
agctcgctagtctta

SEQ ID NO: 1046914 - DNA, 15 bp, Homo sapiens
cagctcgctagtctt

SEQ ID NO: 1046915 - DNA, 15 bp, Homo sapiens
tcagctcgctagtct

SEQ ID NO: 1046916 - DNA, 15 bp, Homo sapiens
gtcagctcgctagtc

SEQ ID NO: 1046917 - DNA, 15 bp, Homo sapiens
tgtcagctcgctagt

SEQ ID NO: 1046918 - DNA, 15 bp, Homo sapiens
ctgtcagctcgctag

SEQ ID NO: 1046919 - DNA, 15 bp, Homo sapiens
actgtcagctcgcta

SEQ ID NO: 1046920 - DNA, 15 bp, Homo sapiens
gactgtcagctcgct

SEQ ID NO: 1046921 - DNA, 15 bp, Homo sapiens
ggactgtcagctcgc

SEQ ID NO: 1046922 - DNA, 15 bp, Homo sapiens
aggactgtcagctcg

SEQ ID NO: 1046923 - DNA, 15 bp, Homo sapiens
aaggactgtcagctc

SEQ ID NO: 1046924 - DNA, 15 bp, Homo sapiens
caaggactgtcagct

SEQ ID NO: 1046925 - DNA, 15 bp, Homo sapiens
gcaaggactgtcagc

SEQ ID NO: 1046926 - DNA, 15 bp, Homo sapiens
cgcaaggactgtcag

SEQ ID NO: 1046927 - DNA, 15 bp, Homo sapiens
gcgcaaggactgtca

SEQ ID NO: 1046928 - DNA, 15 bp, Homo sapiens
tgcgcaaggactgtc

SEQ ID NO: 1046929 - DNA, 15 bp, Homo sapiens
gtgcgcaaggactgt

SEQ ID NO: 1046930 - DNA, 15 bp, Homo sapiens
tgtgcgcaaggactg

SEQ ID NO: 1046931 - DNA, 15 bp, Homo sapiens
ctgtgcgcaaggact

SEQ ID NO: 1046932 - DNA, 15 bp, Homo sapiens
tctgtgcgcaaggac

SEQ ID NO: 1046933 - DNA, 15 bp, Homo sapiens
gtctgtgcgcaagga

SEQ ID NO: 1046934 - DNA, 15 bp, Homo sapiens
cgtctgtgcgcaagg

SEQ ID NO: 1046935 - DNA, 15 bp, Homo sapiens
ccgtctgtgcgcaag

SEQ ID NO: 1046936 - DNA, 15 bp, Homo sapiens
accgtctgtgcgcaa

SEQ ID NO: 1046937 - DNA, 15 bp, Homo sapiens
taccgtctgtgcgca

SEQ ID NO: 1046938 - DNA, 15 bp, Homo sapiens
ctaccgtctgtgcgc

SEQ ID NO: 1046939 - DNA, 15 bp, Homo sapiens
cctaccgtctgtgcg

SEQ ID NO: 1046940 - DNA, 15 bp, Homo sapiens
tcctaccgtctgtgc

SEQ ID NO: 1046941 - DNA, 15 bp, Homo sapiens
atcctaccgtctgtg

SEQ ID NO: 1046942 - DNA, 15 bp, Homo sapiens
catcctaccgtctgt

SEQ ID NO: 1046943 - DNA, 15 bp, Homo sapiens
ccatcctaccgtctg

SEQ ID NO: 1046944 - DNA, 15 bp, Homo sapiens
cccatcctaccgtct

SEQ ID NO: 1046945 - DNA, 15 bp, Homo sapiens
tcccatcctaccgtc

SEQ ID NO: 1046946 - DNA, 15 bp, Homo sapiens
ctcccatcctaccgt

SEQ ID NO: 1046947 - DNA, 15 bp, Homo sapiens
tctcccatcctaccg

SEQ ID NO: 1046948 - DNA, 15 bp, Homo sapiens
ctctcccatcctacc

SEQ ID NO: 1046949 - DNA, 15 bp, Homo sapiens
actctcccatcctac

SEQ ID NO: 1046950 - DNA, 15 bp, Homo sapiens
gactctcccatccta

SEQ ID NO: 1046951 - DNA, 15 bp, Homo sapiens
tgactctcccatcct

SEQ ID NO: 1046952 - DNA, 15 bp, Homo sapiens
ctgactctcccatcc

SEQ ID NO: 1046953 - DNA, 15 bp, Homo sapiens
tctgactctcccatc

SEQ ID NO: 1046954 - DNA, 15 bp, Homo sapiens
ttctgactctcccat

SEQ ID NO: 1046955 - DNA, 15 bp, Homo sapiens
tttctgactctccca

SEQ ID NO: 1046956 - DNA, 15 bp, Homo sapiens
ctttctgactctccc

SEQ ID NO: 1046957 - DNA, 15 bp, Homo sapiens
tctttctgactctcc

SEQ ID NO: 1046958 - DNA, 15 bp, Homo sapiens
gtctttctgactctc

SEQ ID NO: 1046959 - DNA, 15 bp, Homo sapiens
tgtctttctgactct

SEQ ID NO: 1046960 - DNA, 15 bp, Homo sapiens
ttgtctttctgactc

SEQ ID NO: 1046961 - DNA, 15 bp, Homo sapiens
cttgtctttctgact

SEQ ID NO: 1046962 - DNA, 15 bp, Homo sapiens
acttgtctttctgac

SEQ ID NO: 1046963 - DNA, 15 bp, Homo sapiens
cacttgtctttctga

SEQ ID NO: 1046964 - DNA, 15 bp, Homo sapiens
tcacttgtctttctg

SEQ ID NO: 1046965 - DNA, 15 bp, Homo sapiens
ttcacttgtctttct

SEQ ID NO: 1046966 - DNA, 15 bp, Homo sapiens
cttcacttgtctttc

SEQ ID NO: 1046967 - DNA, 15 bp, Homo sapiens
tcttcacttgtcttt

SEQ ID NO: 1046968 - DNA, 15 bp, Homo sapiens
ttcttcacttgtctt

SEQ ID NO: 1046969 - DNA, 15 bp, Homo sapiens
cttcttcacttgtct

SEQ ID NO: 1046970 - DNA, 15 bp, Homo sapiens
acttcttcacttgtc

SEQ ID NO: 1046971 - DNA, 15 bp, Homo sapiens
aacttcttcacttgt

SEQ ID NO: 1046972 - DNA, 15 bp, Homo sapiens
taacttcttcacttg

SEQ ID NO: 1046973 - DNA, 15 bp, Homo sapiens
ctaacttcttcactt

SEQ ID NO: 1046974 - DNA, 15 bp, Homo sapiens
actaacttcttcact

SEQ ID NO: 1046975 - DNA, 15 bp, Homo sapiens
tactaacttcttcac

SEQ ID NO: 1046976 - DNA, 15 bp, Homo sapiens
ttactaacttcttca

SEQ ID NO: 1046977 - DNA, 15 bp, Homo sapiens
tttactaacttcttc

SEQ ID NO: 1046978 - DNA, 15 bp, Homo sapiens
ttttactaacttctt

SEQ ID NO: 1046979 - DNA, 15 bp, Homo sapiens
attttactaacttct

SEQ ID NO: 1046980 - DNA, 15 bp, Homo sapiens
tattttactaacttc

SEQ ID NO: 1046981 - DNA, 15 bp, Homo sapiens
atattttactaactt

SEQ ID NO: 1046982 - DNA, 15 bp, Homo sapiens
gatattttactaact

SEQ ID NO: 1046983 - DNA, 15 bp, Homo sapiens
ggatattttactaac

SEQ ID NO: 1046984 - DNA, 15 bp, Homo sapiens
gggatattttactaa

SEQ ID NO: 1046985 - DNA, 15 bp, Homo sapiens
tgggatattttacta

SEQ ID NO: 1046986 - DNA, 15 bp, Homo sapiens
ctgggatattttact

SEQ ID NO: 1046987 - DNA, 15 bp, Homo sapiens
tctgggatattttac

SEQ ID NO: 1046988 - DNA, 15 bp, Homo sapiens
atctgggatatttta

SEQ ID NO: 1046989 - DNA, 15 bp, Homo sapiens
tatctgggatatttt

SEQ ID NO: 1046990 - DNA, 15 bp, Homo sapiens
ctatctgggatattt

SEQ ID NO: 1046991 - DNA, 15 bp, Homo sapiens
cctatctgggatatt

SEQ ID NO: 1046992 - DNA, 15 bp, Homo sapiens
tcctatctgggatat

SEQ ID NO: 1046993 - DNA, 15 bp, Homo sapiens
ttcctatctgggata

SEQ ID NO: 1046994 - DNA, 15 bp, Homo sapiens
tttcctatctgggat

SEQ ID NO: 1046995 - DNA, 15 bp, Homo sapiens
atttcctatctggga

SEQ ID NO: 1046996 - DNA, 15 bp, Homo sapiens
tatttcctatctggg

SEQ ID NO: 1046997 - DNA, 15 bp, Homo sapiens
ttatttcctatctgg

SEQ ID NO: 1046998 - DNA, 15 bp, Homo sapiens
attatttcctatctg

SEQ ID NO: 1046999 - DNA, 15 bp, Homo sapiens
cattatttcctatct

SEQ ID NO: 1047000 - DNA, 15 bp, Homo sapiens
tcattatttcctatc

SEQ ID NO: 1047001 - DNA, 15 bp, Homo sapiens
ttcattatttcctat

SEQ ID NO: 1047002 - DNA, 15 bp, Homo sapiens
cttcattatttccta

SEQ ID NO: 1047003 - DNA, 15 bp, Homo sapiens
acttcattatttcct

SEQ ID NO: 1047004 - DNA, 15 bp, Homo sapiens
aacttcattatttcc

SEQ ID NO: 1047005 - DNA, 15 bp, Homo sapiens
gaacttcattatttc

SEQ ID NO: 1047006 - DNA, 15 bp, Homo sapiens
cgaacttcattattt

SEQ ID NO: 1047007 - DNA, 15 bp, Homo sapiens
ccgaacttcattatt

SEQ ID NO: 1047008 - DNA, 15 bp, Homo sapiens
tccgaacttcattat

SEQ ID NO: 1047009 - DNA, 15 bp, Homo sapiens
ttccgaacttcatta

SEQ ID NO: 1047010 - DNA, 15 bp, Homo sapiens
gttccgaacttcatt

SEQ ID NO: 1047011 - DNA, 15 bp, Homo sapiens
agttccgaacttcat

SEQ ID NO: 1047012 - DNA, 15 bp, Homo sapiens
tagttccgaacttca

SEQ ID NO: 1047013 - DNA, 15 bp, Homo sapiens
ttagttccgaacttc

SEQ ID NO: 1047014 - DNA, 15 bp, Homo sapiens
cttagttccgaactt

SEQ ID NO: 1047015 - DNA, 15 bp, Homo sapiens
acttagttccgaact

SEQ ID NO: 1047016 - DNA, 15 bp, Homo sapiens
cacttagttccgaac

SEQ ID NO: 1047017 - DNA, 15 bp, Homo sapiens
tcacttagttccgaa

SEQ ID NO: 1047018 - DNA, 15 bp, Homo sapiens
atcacttagttccga

SEQ ID NO: 1047019 - DNA, 15 bp, Homo sapiens
catcacttagttccg

SEQ ID NO: 1047020 - DNA, 15 bp, Homo sapiens
tcatcacttagttcc

SEQ ID NO: 1047021 - DNA, 15 bp, Homo sapiens
atcatcacttagttc

SEQ ID NO: 1047022 - DNA, 15 bp, Homo sapiens
tatcatcacttagtt

SEQ ID NO: 1047023 - DNA, 15 bp, Homo sapiens
ctatcatcacttagt

SEQ ID NO: 1047024 - DNA, 15 bp, Homo sapiens
actatcatcacttag

SEQ ID NO: 1047025 - DNA, 15 bp, Homo sapiens
cactatcatcactta

SEQ ID NO: 1047026 - DNA, 15 bp, Homo sapiens
tcactatcatcactt

SEQ ID NO: 1047027 - DNA, 15 bp, Homo sapiens
atcactatcatcact

SEQ ID NO: 1047028 - DNA, 15 bp, Homo sapiens
aatcactatcatcac

SEQ ID NO: 1047029 - DNA, 15 bp, Homo sapiens
aaatcactatcatca

SEQ ID NO: 1047030 - DNA, 15 bp, Homo sapiens
aaaatcactatcatc

SEQ ID NO: 1047031 - DNA, 15 bp, Homo sapiens
caaaatcactatcat

SEQ ID NO: 1047032 - DNA, 15 bp, Homo sapiens
ccaaaatcactatca

SEQ ID NO: 1047033 - DNA, 15 bp, Homo sapiens
tccaaaatcactatc

SEQ ID NO: 1047034 - DNA, 15 bp, Homo sapiens
ttccaaaatcactat

SEQ ID NO: 1047035 - DNA, 15 bp, Homo sapiens
tttccaaaatcacta

SEQ ID NO: 1047036 - DNA, 15 bp, Homo sapiens
ctttccaaaatcact

SEQ ID NO: 1047037 - DNA, 15 bp, Homo sapiens
actttccaaaatcac

SEQ ID NO: 1047038 - DNA, 15 bp, Homo sapiens
cactttccaaaatca

SEQ ID NO: 1047039 - DNA, 15 bp, Homo sapiens
tcactttccaaaatc

SEQ ID NO: 1047040 - DNA, 15 bp, Homo sapiens
ttcactttccaaaat

SEQ ID NO: 1047041 - DNA, 15 bp, Homo sapiens
tttcactttccaaaa

SEQ ID NO: 1047042 - DNA, 15 bp, Homo sapiens
ttttcactttccaaa

SEQ ID NO: 1047043 - DNA, 15 bp, Homo sapiens
cttttcactttccaa

SEQ ID NO: 1047044 - DNA, 15 bp, Homo sapiens
ccttttcactttcca

SEQ ID NO: 1047045 - DNA, 15 bp, Homo sapiens
tccttttcactttcc

SEQ ID NO: 1047046 - DNA, 15 bp, Homo sapiens
gtccttttcactttc

SEQ ID NO: 1047047 - DNA, 15 bp, Homo sapiens
tgtccttttcacttt

SEQ ID NO: 1047048 - DNA, 15 bp, Homo sapiens
ctgtccttttcactt

SEQ ID NO: 1047049 - DNA, 15 bp, Homo sapiens
tctgtccttttcact

SEQ ID NO: 1047050 - DNA, 15 bp, Homo sapiens
atctgtccttttcac

SEQ ID NO: 1047051 - DNA, 15 bp, Homo sapiens
tatctgtccttttca

SEQ ID NO: 1047052 - DNA, 15 bp, Homo sapiens
gtatctgtccttttc

SEQ ID NO: 1047053 - DNA, 15 bp, Homo sapiens
tgtatctgtcctttt

SEQ ID NO: 1047054 - DNA, 15 bp, Homo sapiens
atgtatctgtccttt

SEQ ID NO: 1047055 - DNA, 15 bp, Homo sapiens
tatgtatctgtcctt

SEQ ID NO: 1047056 - DNA, 15 bp, Homo sapiens
ttatgtatctgtcct

SEQ ID NO: 1047057 - DNA, 15 bp, Homo sapiens
cttatgtatctgtcc

SEQ ID NO: 1047058 - DNA, 15 bp, Homo sapiens
ccttatgtatctgtc

SEQ ID NO: 1047059 - DNA, 15 bp, Homo sapiens
cccttatgtatctgt

SEQ ID NO: 1047060 - DNA, 15 bp, Homo sapiens
gcccttatgtatctg

SEQ ID NO: 1047061 - DNA, 15 bp, Homo sapiens
cgcccttatgtatct

SEQ ID NO: 1047062 - DNA, 15 bp, Homo sapiens
tcgcccttatgtatc

SEQ ID NO: 1047063 - DNA, 15 bp, Homo sapiens
atcgcccttatgtat

SEQ ID NO: 1047064 - DNA, 15 bp, Homo sapiens
tatcgcccttatgta

SEQ ID NO: 1047065 - DNA, 15 bp, Homo sapiens
ctatcgcccttatgt

SEQ ID NO: 1047066 - DNA, 15 bp, Homo sapiens
gctatcgcccttatg

SEQ ID NO: 1047067 - DNA, 15 bp, Homo sapiens
tgctatcgcccttat

SEQ ID NO: 1047068 - DNA, 15 bp, Homo sapiens
ttgctatcgccctta

SEQ ID NO: 1047069 - DNA, 15 bp, Homo sapiens
tttgctatcgccctt

SEQ ID NO: 1047070 - DNA, 15 bp, Homo sapiens
ctttgctatcgccct

SEQ ID NO: 1047071 - DNA, 15 bp, Homo sapiens
tctttgctatcgccc

SEQ ID NO: 1047072 - DNA, 15 bp, Homo sapiens
ctctttgctatcgcc

SEQ ID NO: 1047073 - DNA, 15 bp, Homo sapiens
tctctttgctatcgc

SEQ ID NO: 1047074 - DNA, 15 bp, Homo sapiens
atctctttgctatcg

SEQ ID NO: 1047075 - DNA, 15 bp, Homo sapiens
catctctttgctatc

SEQ ID NO: 1047076 - DNA, 15 bp, Homo sapiens
tcatctctttgctat

SEQ ID NO: 1047077 - DNA, 15 bp, Homo sapiens
atcatctctttgcta

SEQ ID NO: 1047078 - DNA, 15 bp, Homo sapiens
aatcatctctttgct

SEQ ID NO: 1047079 - DNA, 15 bp, Homo sapiens
taatcatctctttgc

SEQ ID NO: 1047080 - DNA, 15 bp, Homo sapiens
ttaatcatctctttg

SEQ ID NO: 1047081 - DNA, 15 bp, Homo sapiens
gttaatcatctcttt

SEQ ID NO: 1047082 - DNA, 15 bp, Homo sapiens
tgttaatcatctctt

SEQ ID NO: 1047083 - DNA, 15 bp, Homo sapiens
ctgttaatcatctct

SEQ ID NO: 1047084 - DNA, 15 bp, Homo sapiens
cctgttaatcatctc

SEQ ID NO: 1047085 - DNA, 15 bp, Homo sapiens
ccctgttaatcatct

SEQ ID NO: 1047086 - DNA, 15 bp, Homo sapiens
gccctgttaatcatc

SEQ ID NO: 1047087 - DNA, 15 bp, Homo sapiens
agccctgttaatcat

SEQ ID NO: 1047088 - DNA, 15 bp, Homo sapiens
aagccctgttaatca

SEQ ID NO: 1047089 - DNA, 15 bp, Homo sapiens
taagccctgttaatc

SEQ ID NO: 1047090 - DNA, 15 bp, Homo sapiens
ctaagccctgttaat

SEQ ID NO: 1047091 - DNA, 15 bp, Homo sapiens
cctaagccctgttaa

SEQ ID NO: 1047092 - DNA, 15 bp, Homo sapiens
acctaagccctgtta

SEQ ID NO: 1047093 - DNA, 15 bp, Homo sapiens
cacctaagccctgtt

SEQ ID NO: 1047094 - DNA, 15 bp, Homo sapiens
tcacctaagccctgt

SEQ ID NO: 1047095 - DNA, 15 bp, Homo sapiens
ctcacctaagccctg

SEQ ID NO: 1047096 - DNA, 15 bp, Homo sapiens
actcacctaagccct

SEQ ID NO: 1047097 - DNA, 15 bp, Homo sapiens
tactcacctaagccc

SEQ ID NO: 1047098 - DNA, 15 bp, Homo sapiens
ttactcacctaagcc

SEQ ID NO: 1047099 - DNA, 15 bp, Homo sapiens
tttactcacctaagc

SEQ ID NO: 1047100 - DNA, 15 bp, Homo sapiens
ctttactcacctaag

SEQ ID NO: 1047101 - DNA, 15 bp, Homo sapiens
actttactcacctaa

SEQ ID NO: 1047102 - DNA, 15 bp, Homo sapiens
cactttactcaccta

SEQ ID NO: 1047103 - DNA, 15 bp, Homo sapiens
acactttactcacct

SEQ ID NO: 1047104 - DNA, 15 bp, Homo sapiens
cacactttactcacc

SEQ ID NO: 1047105 - DNA, 15 bp, Homo sapiens
tcacactttactcac

SEQ ID NO: 1047106 - DNA, 15 bp, Homo sapiens
ttcacactttactca

SEQ ID NO: 1047107 - DNA, 15 bp, Homo sapiens
attcacactttactc

SEQ ID NO: 1047108 - DNA, 15 bp, Homo sapiens
cattcacactttact

SEQ ID NO: 1047109 - DNA, 15 bp, Homo sapiens
tcattcacactttac

SEQ ID NO: 1047110 - DNA, 15 bp, Homo sapiens
ttcattcacacttta

SEQ ID NO: 1047111 - DNA, 15 bp, Homo sapiens
cttcattcacacttt

SEQ ID NO: 1047112 - DNA, 15 bp, Homo sapiens
ccttcattcacactt

SEQ ID NO: 1047113 - DNA, 15 bp, Homo sapiens
cccttcattcacact

SEQ ID NO: 1047114 - DNA, 15 bp, Homo sapiens
ccccttcattcacac

SEQ ID NO: 1047115 - DNA, 15 bp, Homo sapiens
cccccttcattcaca

SEQ ID NO: 1047116 - DNA, 15 bp, Homo sapiens
acccccttcattcac

SEQ ID NO: 1047117 - DNA, 15 bp, Homo sapiens
cacccccttcattca

SEQ ID NO: 1047118 - DNA, 15 bp, Homo sapiens
gcacccccttcattc

SEQ ID NO: 1047119 - DNA, 15 bp, Homo sapiens
tgcacccccttcatt

SEQ ID NO: 1047120 - DNA, 15 bp, Homo sapiens
atgcacccccttcat

SEQ ID NO: 1047121 - DNA, 15 bp, Homo sapiens
catgcacccccttca

SEQ ID NO: 1047122 - DNA, 15 bp, Homo sapiens
tcatgcacccccttc

SEQ ID NO: 1047123 - DNA, 15 bp, Homo sapiens
gtcatgcaccccctt

SEQ ID NO: 1047124 - DNA, 15 bp, Homo sapiens
tgtcatgcaccccct

SEQ ID NO: 1047125 - DNA, 15 bp, Homo sapiens
ctgtcatgcaccccc

SEQ ID NO: 1047126 - DNA, 15 bp, Homo sapiens
cctgtcatgcacccc

SEQ ID NO: 1047127 - DNA, 15 bp, Homo sapiens
tcctgtcatgcaccc

SEQ ID NO: 1047128 - DNA, 15 bp, Homo sapiens
ttcctgtcatgcacc

SEQ ID NO: 1047129 - DNA, 15 bp, Homo sapiens
tttcctgtcatgcac

SEQ ID NO: 1047130 - DNA, 15 bp, Homo sapiens
ctttcctgtcatgca

SEQ ID NO: 1047131 - DNA, 15 bp, Homo sapiens
tctttcctgtcatgc

SEQ ID NO: 1047132 - DNA, 15 bp, Homo sapiens
ttctttcctgtcatg

SEQ ID NO: 1047133 - DNA, 15 bp, Homo sapiens
attctttcctgtcat

SEQ ID NO: 1047134 - DNA, 15 bp, Homo sapiens
gattctttcctgtca

SEQ ID NO: 1047135 - DNA, 15 bp, Homo sapiens
tgattctttcctgtc

SEQ ID NO: 1047136 - DNA, 15 bp, Homo sapiens
ttgattctttcctgt

SEQ ID NO: 1047137 - DNA, 15 bp, Homo sapiens
tttgattctttcctg

SEQ ID NO: 1047138 - DNA, 15 bp, Homo sapiens
ctttgattctttcct

SEQ ID NO: 1047139 - DNA, 15 bp, Homo sapiens
cctttgattctttcc

SEQ ID NO: 1047140 - DNA, 15 bp, Homo sapiens
gcctttgattctttc

SEQ ID NO: 1047141 - DNA, 15 bp, Homo sapiens
cgcctttgattcttt

SEQ ID NO: 1047142 - DNA, 15 bp, Homo sapiens
tcgcctttgattctt

SEQ ID NO: 1047143 - DNA, 15 bp, Homo sapiens
gtcgcctttgattct

SEQ ID NO: 1047144 - DNA, 15 bp, Homo sapiens
agtcgcctttgattc

SEQ ID NO: 1047145 - DNA, 15 bp, Homo sapiens
tagtcgcctttgatt

SEQ ID NO: 1047146 - DNA, 15 bp, Homo sapiens
ttagtcgcctttgat

SEQ ID NO: 1047147 - DNA, 15 bp, Homo sapiens
tttagtcgcctttga

SEQ ID NO: 1047148 - DNA, 15 bp, Homo sapiens
ctttagtcgcctttg

SEQ ID NO: 1047149 - DNA, 15 bp, Homo sapiens
gctttagtcgccttt

SEQ ID NO: 1047150 - DNA, 15 bp, Homo sapiens
ggctttagtcgcctt

SEQ ID NO: 1047151 - DNA, 15 bp, Homo sapiens
aggctttagtcgcct

SEQ ID NO: 1047152 - DNA, 15 bp, Homo sapiens
caggctttagtcgcc

SEQ ID NO: 1047153 - DNA, 15 bp, Homo sapiens
gcaggctttagtcgc

SEQ ID NO: 1047154 - DNA, 15 bp, Homo sapiens
tgcaggctttagtcg

SEQ ID NO: 1047155 - DNA, 15 bp, Homo sapiens
gtgcaggctttagtc

SEQ ID NO: 1047156 - DNA, 15 bp, Homo sapiens
tgtgcaggctttagt

SEQ ID NO: 1047157 - DNA, 15 bp, Homo sapiens
atgtgcaggctttag

SEQ ID NO: 1047158 - DNA, 15 bp, Homo sapiens
aatgtgcaggcttta

SEQ ID NO: 1047159 - DNA, 15 bp, Homo sapiens
aaatgtgcaggcttt

SEQ ID NO: 1047160 - DNA, 15 bp, Homo sapiens
aaaatgtgcaggctt

SEQ ID NO: 1047161 - DNA, 15 bp, Homo sapiens
taaaatgtgcaggct

SEQ ID NO: 1047162 - DNA, 15 bp, Homo sapiens
ttaaaatgtgcaggc

SEQ ID NO: 1047163 - DNA, 15 bp, Homo sapiens
tttaaaatgtgcagg

SEQ ID NO: 1047164 - DNA, 15 bp, Homo sapiens
ctttaaaatgtgcag

SEQ ID NO: 1047165 - DNA, 15 bp, Homo sapiens
cctttaaaatgtgca

SEQ ID NO: 1047166 - DNA, 15 bp, Homo sapiens
gcctttaaaatgtgc

SEQ ID NO: 1047167 - DNA, 15 bp, Homo sapiens
agcctttaaaatgtg

SEQ ID NO: 1047168 - DNA, 15 bp, Homo sapiens
cagcctttaaaatgt

SEQ ID NO: 1047169 - DNA, 15 bp, Homo sapiens
ccagcctttaaaatg

SEQ ID NO: 1047170 - DNA, 15 bp, Homo sapiens
accagcctttaaaat

SEQ ID NO: 1047171 - DNA, 15 bp, Homo sapiens
caccagcctttaaaa

SEQ ID NO: 1047172 - DNA, 15 bp, Homo sapiens
gcaccagcctttaaa

SEQ ID NO: 1047173 - DNA, 15 bp, Homo sapiens
agcaccagcctttaa

SEQ ID NO: 1047174 - DNA, 15 bp, Homo sapiens
cagcaccagccttta

SEQ ID NO: 1047175 - DNA, 15 bp, Homo sapiens
acagcaccagccttt

SEQ ID NO: 1047176 - DNA, 15 bp, Homo sapiens
cacagcaccagcctt

SEQ ID NO: 1047177 - DNA, 15 bp, Homo sapiens
tcacagcaccagcct

SEQ ID NO: 1047178 - DNA, 15 bp, Homo sapiens
ctcacagcaccagcc

SEQ ID NO: 1047179 - DNA, 15 bp, Homo sapiens
gctcacagcaccagc

SEQ ID NO: 1047180 - DNA, 15 bp, Homo sapiens
tgctcacagcaccag

SEQ ID NO: 1047181 - DNA, 15 bp, Homo sapiens
ctgctcacagcacca

SEQ ID NO: 1047182 - DNA, 15 bp, Homo sapiens
gctgctcacagcacc

SEQ ID NO: 1047183 - DNA, 15 bp, Homo sapiens
ggctgctcacagcac

SEQ ID NO: 1047184 - DNA, 15 bp, Homo sapiens
cggctgctcacagca

SEQ ID NO: 1047185 - DNA, 15 bp, Homo sapiens
gcggctgctcacagc

SEQ ID NO: 1047186 - DNA, 15 bp, Homo sapiens
tgcggctgctcacag

SEQ ID NO: 1047187 - DNA, 15 bp, Homo sapiens
ctgcggctgctcaca

SEQ ID NO: 1047188 - DNA, 15 bp, Homo sapiens
tctgcggctgctcac

SEQ ID NO: 1047189 - DNA, 15 bp, Homo sapiens
ttctgcggctgctca

SEQ ID NO: 1047190 - DNA, 15 bp, Homo sapiens
tttctgcggctgctc

SEQ ID NO: 1047191 - DNA, 15 bp, Homo sapiens
ctttctgcggctgct

SEQ ID NO: 1047192 - DNA, 15 bp, Homo sapiens
cctttctgcggctgc

SEQ ID NO: 1047193 - DNA, 15 bp, Homo sapiens
acctttctgcggctg

SEQ ID NO: 1047194 - DNA, 15 bp, Homo sapiens
cacctttctgcggct

SEQ ID NO: 1047195 - DNA, 15 bp, Homo sapiens
ccacctttctgcggc

SEQ ID NO: 1047196 - DNA, 15 bp, Homo sapiens
gccacctttctgcgg

SEQ ID NO: 1047197 - DNA, 15 bp, Homo sapiens
tgccacctttctgcg

SEQ ID NO: 1047198 - DNA, 15 bp, Homo sapiens
gtgccacctttctgc

SEQ ID NO: 1047199 - DNA, 15 bp, Homo sapiens
tgtgccacctttctg

SEQ ID NO: 1047200 - DNA, 15 bp, Homo sapiens
ctgtgccacctttct

SEQ ID NO: 1047201 - DNA, 15 bp, Homo sapiens
cctgtgccacctttc

SEQ ID NO: 1047202 - DNA, 15 bp, Homo sapiens
tcctgtgccaccttt

SEQ ID NO: 1047203 - DNA, 15 bp, Homo sapiens
ttcctgtgccacctt

SEQ ID NO: 1047204 - DNA, 15 bp, Homo sapiens
tttcctgtgccacct

SEQ ID NO: 1047205 - DNA, 15 bp, Homo sapiens
atttcctgtgccacc

SEQ ID NO: 1047206 - DNA, 15 bp, Homo sapiens
catttcctgtgccac

SEQ ID NO: 1047207 - DNA, 15 bp, Homo sapiens
gcatttcctgtgcca

SEQ ID NO: 1047208 - DNA, 15 bp, Homo sapiens
agcatttcctgtgcc

SEQ ID NO: 1047209 - DNA, 15 bp, Homo sapiens
aagcatttcctgtgc

SEQ ID NO: 1047210 - DNA, 15 bp, Homo sapiens
aaagcatttcctgtg

SEQ ID NO: 1047211 - DNA, 15 bp, Homo sapiens
taaagcatttcctgt

SEQ ID NO: 1047212 - DNA, 15 bp, Homo sapiens
ctaaagcatttcctg

SEQ ID NO: 1047213 - DNA, 15 bp, Homo sapiens
cctaaagcatttcct

SEQ ID NO: 1047214 - DNA, 15 bp, Homo sapiens
tcctaaagcatttcc

SEQ ID NO: 1047215 - DNA, 15 bp, Homo sapiens
atcctaaagcatttc

SEQ ID NO: 1047216 - DNA, 15 bp, Homo sapiens
catcctaaagcattt

SEQ ID NO: 1047217 - DNA, 15 bp, Homo sapiens
ccatcctaaagcatt

SEQ ID NO: 1047218 - DNA, 15 bp, Homo sapiens
cccatcctaaagcat

SEQ ID NO: 1047219 - DNA, 15 bp, Homo sapiens
tcccatcctaaagca

SEQ ID NO: 1047220 - DNA, 15 bp, Homo sapiens
atcccatcctaaagc

SEQ ID NO: 1047221 - DNA, 15 bp, Homo sapiens
catcccatcctaaag

SEQ ID NO: 1047222 - DNA, 15 bp, Homo sapiens
acatcccatcctaaa

SEQ ID NO: 1047223 - DNA, 15 bp, Homo sapiens
gacatcccatcctaa

SEQ ID NO: 1047224 - DNA, 15 bp, Homo sapiens
tgacatcccatccta

SEQ ID NO: 1047225 - DNA, 15 bp, Homo sapiens
ctgacatcccatcct

SEQ ID NO: 1047226 - DNA, 15 bp, Homo sapiens
actgacatcccatcc

SEQ ID NO: 1047227 - DNA, 15 bp, Homo sapiens
cactgacatcccatc

SEQ ID NO: 1047228 - DNA, 15 bp, Homo sapiens
acactgacatcccat

SEQ ID NO: 1047229 - DNA, 15 bp, Homo sapiens
aacactgacatccca

SEQ ID NO: 1047230 - DNA, 15 bp, Homo sapiens
gaacactgacatccc

SEQ ID NO: 1047231 - DNA, 15 bp, Homo sapiens
agaacactgacatcc

SEQ ID NO: 1047232 - DNA, 15 bp, Homo sapiens
gagaacactgacatc

SEQ ID NO: 1047233 - DNA, 15 bp, Homo sapiens
agagaacactgacat

SEQ ID NO: 1047234 - DNA, 15 bp, Homo sapiens
aagagaacactgaca

SEQ ID NO: 1047235 - DNA, 15 bp, Homo sapiens
aaagagaacactgac

SEQ ID NO: 1047236 - DNA, 15 bp, Homo sapiens
caaagagaacactga

SEQ ID NO: 1047237 - DNA, 15 bp, Homo sapiens
tcaaagagaacactg

SEQ ID NO: 1047238 - DNA, 15 bp, Homo sapiens
ctcaaagagaacact

SEQ ID NO: 1047239 - DNA, 15 bp, Homo sapiens
tctcaaagagaacac

SEQ ID NO: 1047240 - DNA, 15 bp, Homo sapiens
atctcaaagagaaca

SEQ ID NO: 1047241 - DNA, 15 bp, Homo sapiens
aatctcaaagagaac

SEQ ID NO: 1047242 - DNA, 15 bp, Homo sapiens
gaatctcaaagagaa

SEQ ID NO: 1047243 - DNA, 15 bp, Homo sapiens
ggaatctcaaagaga

SEQ ID NO: 1047244 - DNA, 15 bp, Homo sapiens
aggaatctcaaagag

SEQ ID NO: 1047245 - DNA, 15 bp, Homo sapiens
aaggaatctcaaaga

SEQ ID NO: 1047246 - DNA, 15 bp, Homo sapiens
caaggaatctcaaag

SEQ ID NO: 1047247 - DNA, 15 bp, Homo sapiens
acaaggaatctcaaa

SEQ ID NO: 1047248 - DNA, 15 bp, Homo sapiens
cacaaggaatctcaa

SEQ ID NO: 1047249 - DNA, 15 bp, Homo sapiens
tcacaaggaatctca

SEQ ID NO: 1047250 - DNA, 15 bp, Homo sapiens
ctcacaaggaatctc

SEQ ID NO: 1047251 - DNA, 15 bp, Homo sapiens
gctcacaaggaatct

SEQ ID NO: 1047252 - DNA, 15 bp, Homo sapiens
tgctcacaaggaatc

SEQ ID NO: 1047253 - DNA, 15 bp, Homo sapiens
ttgctcacaaggaat

SEQ ID NO: 1047254 - DNA, 15 bp, Homo sapiens
attgctcacaaggaa

SEQ ID NO: 1047255 - DNA, 15 bp, Homo sapiens
cattgctcacaagga

SEQ ID NO: 1047256 - DNA, 15 bp, Homo sapiens
ccattgctcacaagg

SEQ ID NO: 1047257 - DNA, 15 bp, Homo sapiens
cccattgctcacaag

SEQ ID NO: 1047258 - DNA, 15 bp, Homo sapiens
acccattgctcacaa

SEQ ID NO: 1047259 - DNA, 15 bp, Homo sapiens
tacccattgctcaca

SEQ ID NO: 1047260 - DNA, 15 bp, Homo sapiens
ctacccattgctcac

SEQ ID NO: 1047261 - DNA, 15 bp, Homo sapiens
tctacccattgctca

SEQ ID NO: 1047262 - DNA, 15 bp, Homo sapiens
ttctacccattgctc

SEQ ID NO: 1047263 - DNA, 15 bp, Homo sapiens
gttctacccattgct

SEQ ID NO: 1047264 - DNA, 15 bp, Homo sapiens
tgttctacccattgc

SEQ ID NO: 1047265 - DNA, 15 bp, Homo sapiens
atgttctacccattg

SEQ ID NO: 1047266 - DNA, 15 bp, Homo sapiens
gatgttctacccatt

SEQ ID NO: 1047267 - DNA, 15 bp, Homo sapiens
ggatgttctacccat

SEQ ID NO: 1047268 - DNA, 15 bp, Homo sapiens
tggatgttctaccca

SEQ ID NO: 1047269 - DNA, 15 bp, Homo sapiens
ctggatgttctaccc

SEQ ID NO: 1047270 - DNA, 15 bp, Homo sapiens
tctggatgttctacc

SEQ ID NO: 1047271 - DNA, 15 bp, Homo sapiens
atctggatgttctac

SEQ ID NO: 1047272 - DNA, 15 bp, Homo sapiens
tatctggatgttcta

SEQ ID NO: 1047273 - DNA, 15 bp, Homo sapiens
ttatctggatgttct

SEQ ID NO: 1047274 - DNA, 15 bp, Homo sapiens
tttatctggatgttc

SEQ ID NO: 1047275 - DNA, 15 bp, Homo sapiens
ttttatctggatgtt

SEQ ID NO: 1047276 - DNA, 15 bp, Homo sapiens
tttttatctggatgt

SEQ ID NO: 1047277 - DNA, 15 bp, Homo sapiens
gtttttatctggatg

SEQ ID NO: 1047278 - DNA, 15 bp, Homo sapiens
cgtttttatctggat

SEQ ID NO: 1047279 - DNA, 15 bp, Homo sapiens
acgtttttatctgga

SEQ ID NO: 1047280 - DNA, 15 bp, Homo sapiens
gacgtttttatctgg

SEQ ID NO: 1047281 - DNA, 15 bp, Homo sapiens
agacgtttttatctg

SEQ ID NO: 1047282 - DNA, 15 bp, Homo sapiens
tagacgtttttatct

SEQ ID NO: 1047283 - DNA, 15 bp, Homo sapiens
gtagacgtttttatc

SEQ ID NO: 1047284 - DNA, 15 bp, Homo sapiens
agtagacgtttttat

SEQ ID NO: 1047285 - DNA, 15 bp, Homo sapiens
tagtagacgttttta

SEQ ID NO: 1047286 - DNA, 15 bp, Homo sapiens
ctagtagacgttttt

SEQ ID NO: 1047287 - DNA, 15 bp, Homo sapiens
cctagtagacgtttt

SEQ ID NO: 1047288 - DNA, 15 bp, Homo sapiens
gcctagtagacgttt

SEQ ID NO: 1047289 - DNA, 15 bp, Homo sapiens
agcctagtagacgtt

SEQ ID NO: 1047290 - DNA, 15 bp, Homo sapiens
aagcctagtagacgt

SEQ ID NO: 1047291 - DNA, 15 bp, Homo sapiens
aaagcctagtagacg

SEQ ID NO: 1047292 - DNA, 15 bp, Homo sapiens
caaagcctagtagac

SEQ ID NO: 1047293 - DNA, 15 bp, Homo sapiens
ccaaagcctagtaga

SEQ ID NO: 1047294 - DNA, 15 bp, Homo sapiens
cccaaagcctagtag

SEQ ID NO: 1047295 - DNA, 15 bp, Homo sapiens
tcccaaagcctagta

SEQ ID NO: 1047296 - DNA, 15 bp, Homo sapiens
ttcccaaagcctagt

SEQ ID NO: 1047297 - DNA, 15 bp, Homo sapiens
gttcccaaagcctag

SEQ ID NO: 1047298 - DNA, 15 bp, Homo sapiens
agttcccaaagccta

SEQ ID NO: 1047299 - DNA, 15 bp, Homo sapiens
cagttcccaaagcct

SEQ ID NO: 1047300 - DNA, 15 bp, Homo sapiens
tcagttcccaaagcc

SEQ ID NO: 1047301 - DNA, 15 bp, Homo sapiens
ttcagttcccaaagc

SEQ ID NO: 1047302 - DNA, 15 bp, Homo sapiens
cttcagttcccaaag

SEQ ID NO: 1047303 - DNA, 15 bp, Homo sapiens
gcttcagttcccaaa

SEQ ID NO: 1047304 - DNA, 15 bp, Homo sapiens
agcttcagttcccaa

SEQ ID NO: 1047305 - DNA, 15 bp, Homo sapiens
tgagcttcagttccc

SEQ ID NO: 1047306 - DNA, 15 bp, Homo sapiens
ctgagcttcagttcc

SEQ ID NO: 1047307 - DNA, 15 bp, Homo sapiens
tctgagcttcagttc

SEQ ID NO: 1047308 - DNA, 15 bp, Homo sapiens
atctgagcttcagtt

SEQ ID NO: 1047309 - DNA, 15 bp, Homo sapiens
tatctgagcttcagt

SEQ ID NO: 1047310 - DNA, 15 bp, Homo sapiens
ttatctgagcttcag

SEQ ID NO: 1047311 - DNA, 15 bp, Homo sapiens
attatctgagcttca

SEQ ID NO: 1047312 - DNA, 15 bp, Homo sapiens
gattatctgagcttc

SEQ ID NO: 1047313 - DNA, 15 bp, Homo sapiens
agattatctgagctt

SEQ ID NO: 1047314 - DNA, 15 bp, Homo sapiens
aagattatctgagct

SEQ ID NO: 1047315 - DNA, 15 bp, Homo sapiens
aaagattatctgagc

SEQ ID NO: 1047316 - DNA, 15 bp, Homo sapiens
gaaagattatctgag

SEQ ID NO: 1047317 - DNA, 15 bp, Homo sapiens
tgaaagattatctga

SEQ ID NO: 1047318 - DNA, 15 bp, Homo sapiens
ctgaaagattatctg

SEQ ID NO: 1047319 - DNA, 15 bp, Homo sapiens
cctgaaagattatct

SEQ ID NO: 1047320 - DNA, 15 bp, Homo sapiens
gcctgaaagattatc

SEQ ID NO: 1047321 - DNA, 15 bp, Homo sapiens
ggcctgaaagattat

SEQ ID NO: 1047322 - DNA, 15 bp, Homo sapiens
aggcctgaaagatta

SEQ ID NO: 1047323 - DNA, 15 bp, Homo sapiens
caggcctgaaagatt

SEQ ID NO: 1047324 - DNA, 15 bp, Homo sapiens
ccaggcctgaaagat

SEQ ID NO: 1047325 - DNA, 15 bp, Homo sapiens
tccaggcctgaaaga

SEQ ID NO: 1047326 - DNA, 15 bp, Homo sapiens
ttccaggcctgaaag

SEQ ID NO: 1047327 - DNA, 15 bp, Homo sapiens
attccaggcctgaaa

SEQ ID NO: 1047328 - DNA, 15 bp, Homo sapiens
aattccaggcctgaa

SEQ ID NO: 1047329 - DNA, 15 bp, Homo sapiens
aaattccaggcctga

SEQ ID NO: 1047330 - DNA, 15 bp, Homo sapiens
taaattccaggcctg

SEQ ID NO: 1047331 - DNA, 15 bp, Homo sapiens
gtaaattccaggcct

SEQ ID NO: 1047332 - DNA, 15 bp, Homo sapiens
cgtaaattccaggcc

SEQ ID NO: 1047333 - DNA, 15 bp, Homo sapiens
acgtaaattccaggc

SEQ ID NO: 1047334 - DNA, 15 bp, Homo sapiens
aacgtaaattccagg

SEQ ID NO: 1047335 - DNA, 15 bp, Homo sapiens
aaacgtaaattccag

SEQ ID NO: 1047336 - DNA, 15 bp, Homo sapiens
caaacgtaaattcca

SEQ ID NO: 1047337 - DNA, 15 bp, Homo sapiens
ccaaacgtaaattcc

SEQ ID NO: 1047338 - DNA, 15 bp, Homo sapiens
cccaaacgtaaattc

SEQ ID NO: 1047339 - DNA, 15 bp, Homo sapiens
gcccaaacgtaaatt

SEQ ID NO: 1047340 - DNA, 15 bp, Homo sapiens
tgcccaaacgtaaat

SEQ ID NO: 1047341 - DNA, 15 bp, Homo sapiens
atgcccaaacgtaaa

SEQ ID NO: 1047342 - DNA, 15 bp, Homo sapiens
gatgcccaaacgtaa

SEQ ID NO: 1047343 - DNA, 15 bp, Homo sapiens
tgatgcccaaacgta

SEQ ID NO: 1047344 - DNA, 15 bp, Homo sapiens
atgatgcccaaacgt

SEQ ID NO: 1047345 - DNA, 15 bp, Homo sapiens
gatgatgcccaaacg

SEQ ID NO: 1047346 - DNA, 15 bp, Homo sapiens
agatgatgcccaaac

SEQ ID NO: 1047347 - DNA, 15 bp, Homo sapiens
gagatgatgcccaaa

SEQ ID NO: 1047348 - DNA, 15 bp, Homo sapiens
agagatgatgcccaa

SEQ ID NO: 1047349 - DNA, 15 bp, Homo sapiens
tagagatgatgccca

SEQ ID NO: 1047350 - DNA, 15 bp, Homo sapiens
ttagagatgatgccc

SEQ ID NO: 1047351 - DNA, 15 bp, Homo sapiens
cttagagatgatgcc

SEQ ID NO: 1047352 - DNA, 15 bp, Homo sapiens
ccttagagatgatgc

SEQ ID NO: 1047353 - DNA, 15 bp, Homo sapiens
tccttagagatgatg

SEQ ID NO: 1047354 - DNA, 15 bp, Homo sapiens
ctccttagagatgat

SEQ ID NO: 1047355 - DNA, 15 bp, Homo sapiens
actccttagagatga

SEQ ID NO: 1047356 - DNA, 15 bp, Homo sapiens
gactccttagagatg

SEQ ID NO: 1047357 - DNA, 15 bp, Homo sapiens
agactccttagagat

SEQ ID NO: 1047358 - DNA, 15 bp, Homo sapiens
cagactccttagaga

SEQ ID NO: 1047359 - DNA, 15 bp, Homo sapiens
tcagactccttagag

SEQ ID NO: 1047360 - DNA, 15 bp, Homo sapiens
ttcagactccttaga

SEQ ID NO: 1047361 - DNA, 15 bp, Homo sapiens
gttcagactccttag

SEQ ID NO: 1047362 - DNA, 15 bp, Homo sapiens
agttcagactcctta

SEQ ID NO: 1047363 - DNA, 15 bp, Homo sapiens
cagttcagactcctt

SEQ ID NO: 1047364 - DNA, 15 bp, Homo sapiens
acagttcagactcct

SEQ ID NO: 1047365 - DNA, 15 bp, Homo sapiens
cacagttcagactcc

SEQ ID NO: 1047366 - DNA, 15 bp, Homo sapiens
tcacagttcagactc

SEQ ID NO: 1047367 - DNA, 15 bp, Homo sapiens
ttcacagttcagact

SEQ ID NO: 1047368 - DNA, 15 bp, Homo sapiens
tttcacagttcagac

SEQ ID NO: 1047369 - DNA, 15 bp, Homo sapiens
ctttcacagttcaga

SEQ ID NO: 1047370 - DNA, 15 bp, Homo sapiens
actttcacagttcag

SEQ ID NO: 1047371 - DNA, 15 bp, Homo sapiens
cactttcacagttca

SEQ ID NO: 1047372 - DNA, 15 bp, Homo sapiens
ccactttcacagttc

SEQ ID NO: 1047373 - DNA, 15 bp, Homo sapiens
tccactttcacagtt

SEQ ID NO: 1047374 - DNA, 15 bp, Homo sapiens
atccactttcacagt

SEQ ID NO: 1047375 - DNA, 15 bp, Homo sapiens
catccactttcacag

SEQ ID NO: 1047376 - DNA, 15 bp, Homo sapiens
tcatccactttcaca

SEQ ID NO: 1047377 - DNA, 15 bp, Homo sapiens
ctcatccactttcac

SEQ ID NO: 1047378 - DNA, 15 bp, Homo sapiens
cctcatccactttca

SEQ ID NO: 1047379 - DNA, 15 bp, Homo sapiens
acctcatccactttc

SEQ ID NO: 1047380 - DNA, 15 bp, Homo sapiens
gacctcatccacttt

SEQ ID NO: 1047381 - DNA, 15 bp, Homo sapiens
tgacctcatccactt

SEQ ID NO: 1047382 - DNA, 15 bp, Homo sapiens
gtgacctcatccact

SEQ ID NO: 1047383 - DNA, 15 bp, Homo sapiens
ggtgacctcatccac

SEQ ID NO: 1047384 - DNA, 15 bp, Homo sapiens
cggtgacctcatcca

SEQ ID NO: 1047385 - DNA, 15 bp, Homo sapiens
tcggtgacctcatcc

SEQ ID NO: 1047386 - DNA, 15 bp, Homo sapiens
ctcggtgacctcatc

SEQ ID NO: 1047387 - DNA, 15 bp, Homo sapiens
cctcggtgacctcat

SEQ ID NO: 1047388 - DNA, 15 bp, Homo sapiens
tcctcggtgacctca

SEQ ID NO: 1047389 - DNA, 15 bp, Homo sapiens
ttcctcggtgacctc

SEQ ID NO: 1047390 - DNA, 15 bp, Homo sapiens
tttcctcggtgacct

SEQ ID NO: 1047391 - DNA, 15 bp, Homo sapiens
gtttcctcggtgacc

SEQ ID NO: 1047392 - DNA, 15 bp, Homo sapiens
agtttcctcggtgac

SEQ ID NO: 1047393 - DNA, 15 bp, Homo sapiens
tagtttcctcggtga

SEQ ID NO: 1047394 - DNA, 15 bp, Homo sapiens
ctagtttcctcggtg

SEQ ID NO: 1047395 - DNA, 15 bp, Homo sapiens
actagtttcctcggt

SEQ ID NO: 1047396 - DNA, 15 bp, Homo sapiens
gactagtttcctcgg

SEQ ID NO: 1047397 - DNA, 15 bp, Homo sapiens
agactagtttcctcg

SEQ ID NO: 1047398 - DNA, 15 bp, Homo sapiens
tagactagtttcctc

SEQ ID NO: 1047399 - DNA, 15 bp, Homo sapiens
ctagactagtttcct

SEQ ID NO: 1047400 - DNA, 15 bp, Homo sapiens
tctagactagtttcc

SEQ ID NO: 1047401 - DNA, 15 bp, Homo sapiens
atctagactagtttc

SEQ ID NO: 1047402 - DNA, 15 bp, Homo sapiens
aatctagactagttt

SEQ ID NO: 1047403 - DNA, 15 bp, Homo sapiens
caatctagactagtt

SEQ ID NO: 1047404 - DNA, 15 bp, Homo sapiens
tcaatctagactagt

SEQ ID NO: 1047405 - DNA, 15 bp, Homo sapiens
ttcaatctagactag

SEQ ID NO: 1047406 - DNA, 15 bp, Homo sapiens
cttcaatctagacta

SEQ ID NO: 1047407 - DNA, 15 bp, Homo sapiens
tcttcaatctagact

SEQ ID NO: 1047408 - DNA, 15 bp, Homo sapiens
ctcttcaatctagac

SEQ ID NO: 1047409 - DNA, 15 bp, Homo sapiens
tctcttcaatctaga

SEQ ID NO: 1047410 - DNA, 15 bp, Homo sapiens
ctctcttcaatctag

SEQ ID NO: 1047411 - DNA, 15 bp, Homo sapiens
tctctcttcaatcta

SEQ ID NO: 1047412 - DNA, 15 bp, Homo sapiens
ctctctcttcaatct

SEQ ID NO: 1047413 - DNA, 15 bp, Homo sapiens
tctctctcttcaatc

SEQ ID NO: 1047414 - DNA, 15 bp, Homo sapiens
ttctctctcttcaat

SEQ ID NO: 1047415 - DNA, 15 bp, Homo sapiens
cttctctctcttcaa

SEQ ID NO: 1047416 - DNA, 15 bp, Homo sapiens
ccttctctctcttca

SEQ ID NO: 1047417 - DNA, 15 bp, Homo sapiens
cccttctctctcttc

SEQ ID NO: 1047418 - DNA, 15 bp, Homo sapiens
tcccttctctctctt

SEQ ID NO: 1047419 - DNA, 15 bp, Homo sapiens
ttcccttctctctct

SEQ ID NO: 1047420 - DNA, 15 bp, Homo sapiens
attcccttctctctc

SEQ ID NO: 1047421 - DNA, 15 bp, Homo sapiens
cattcccttctctct

SEQ ID NO: 1047422 - DNA, 15 bp, Homo sapiens
tcattcccttctctc

SEQ ID NO: 1047423 - DNA, 15 bp, Homo sapiens
ctcattcccttctct

SEQ ID NO: 1047424 - DNA, 15 bp, Homo sapiens
tgctcattcccttct

SEQ ID NO: 1047425 - DNA, 15 bp, Homo sapiens
atgctcattcccttc

SEQ ID NO: 1047426 - DNA, 15 bp, Homo sapiens
catgctcattccctt

SEQ ID NO: 1047427 - DNA, 15 bp, Homo sapiens
ccatgctcattccct

SEQ ID NO: 1047428 - DNA, 15 bp, Homo sapiens
accatgctcattccc

SEQ ID NO: 1047429 - DNA, 15 bp, Homo sapiens
aaccatgctcattcc

SEQ ID NO: 1047430 - DNA, 15 bp, Homo sapiens
caaccatgctcattc

SEQ ID NO: 1047431 - DNA, 15 bp, Homo sapiens
ccaaccatgctcatt

SEQ ID NO: 1047432 - DNA, 15 bp, Homo sapiens
cccaaccatgctcat

SEQ ID NO: 1047433 - DNA, 15 bp, Homo sapiens
tcccaaccatgctca

SEQ ID NO: 1047434 - DNA, 15 bp, Homo sapiens
ctcccaaccatgctc

SEQ ID NO: 1047435 - DNA, 15 bp, Homo sapiens
cctcccaaccatgct

SEQ ID NO: 1047436 - DNA, 15 bp, Homo sapiens
ccctcccaaccatgc

SEQ ID NO: 1047437 - DNA, 15 bp, Homo sapiens
tccctcccaaccatg

SEQ ID NO: 1047438 - DNA, 15 bp, Homo sapiens
ctccctcccaaccat

SEQ ID NO: 1047439 - DNA, 15 bp, Homo sapiens
tctccctcccaacca

SEQ ID NO: 1047440 - DNA, 15 bp, Homo sapiens
ttctccctcccaacc

SEQ ID NO: 1047441 - DNA, 15 bp, Homo sapiens
gttctccctcccaac

SEQ ID NO: 1047442 - DNA, 15 bp, Homo sapiens
agttctccctcccaa

SEQ ID NO: 1047443 - DNA, 15 bp, Homo sapiens
gagttctccctccca

SEQ ID NO: 1047444 - DNA, 15 bp, Homo sapiens
ggagttctccctccc

SEQ ID NO: 1047445 - DNA, 15 bp, Homo sapiens
aggagttctccctcc

SEQ ID NO: 1047446 - DNA, 15 bp, Homo sapiens
gaggagttctccctc

SEQ ID NO: 1047447 - DNA, 15 bp, Homo sapiens
ggaggagttctccct

SEQ ID NO: 1047448 - DNA, 15 bp, Homo sapiens
tggaggagttctccc

SEQ ID NO: 1047449 - DNA, 15 bp, Homo sapiens
ctggaggagttctcc

SEQ ID NO: 1047450 - DNA, 15 bp, Homo sapiens
tctggaggagttctc

SEQ ID NO: 1047451 - DNA, 15 bp, Homo sapiens
ctctggaggagttct

SEQ ID NO: 1047452 - DNA, 15 bp, Homo sapiens
gctctggaggagttc

SEQ ID NO: 1047453 - DNA, 15 bp, Homo sapiens
tgctctggaggagtt

SEQ ID NO: 1047454 - DNA, 15 bp, Homo sapiens
ctgctctggaggagt

SEQ ID NO: 1047455 - DNA, 15 bp, Homo sapiens
gctgctctggaggag

SEQ ID NO: 1047456 - DNA, 15 bp, Homo sapiens
agctgctctggagga

SEQ ID NO: 1047457 - DNA, 15 bp, Homo sapiens
gagctgctctggagg

SEQ ID NO: 1047458 - DNA, 15 bp, Homo sapiens
tgagctgctctggag

SEQ ID NO: 1047459 - DNA, 15 bp, Homo sapiens
atgagctgctctgga

SEQ ID NO: 1047460 - DNA, 15 bp, Homo sapiens
catgagctgctctgg

SEQ ID NO: 1047461 - DNA, 15 bp, Homo sapiens
ccatgagctgctctg

SEQ ID NO: 1047462 - DNA, 15 bp, Homo sapiens
gccatgagctgctct

SEQ ID NO: 1047463 - DNA, 15 bp, Homo sapiens
ggccatgagctgctc

SEQ ID NO: 1047464 - DNA, 15 bp, Homo sapiens
aggccatgagctgct

SEQ ID NO: 1047465 - DNA, 15 bp, Homo sapiens
gaggccatgagctgc

SEQ ID NO: 1047466 - DNA, 15 bp, Homo sapiens
tgaggccatgagctg

SEQ ID NO: 1047467 - DNA, 15 bp, Homo sapiens
ctgaggccatgagct

SEQ ID NO: 1047468 - DNA, 15 bp, Homo sapiens
tctgaggccatgagc

SEQ ID NO: 1047469 - DNA, 15 bp, Homo sapiens
gtctgaggccatgag

SEQ ID NO: 1047470 - DNA, 15 bp, Homo sapiens
ggtctgaggccatga

SEQ ID NO: 1047471 - DNA, 15 bp, Homo sapiens
aggtctgaggccatg

SEQ ID NO: 1047472 - DNA, 15 bp, Homo sapiens
caggtctgaggccat

SEQ ID NO: 1047473 - DNA, 15 bp, Homo sapiens
gcaggtctgaggcca

SEQ ID NO: 1047474 - DNA, 15 bp, Homo sapiens
ggcaggtctgaggcc

SEQ ID NO: 1047475 - DNA, 15 bp, Homo sapiens
aggcaggtctgaggc

SEQ ID NO: 1047476 - DNA, 15 bp, Homo sapiens
caggcaggtctgagg

SEQ ID NO: 1047477 - DNA, 15 bp, Homo sapiens
acaggcaggtctgag

SEQ ID NO: 1047478 - DNA, 15 bp, Homo sapiens
cacaggcaggtctga

SEQ ID NO: 1047479 - DNA, 15 bp, Homo sapiens
ccacaggcaggtctg

SEQ ID NO: 1047480 - DNA, 15 bp, Homo sapiens
cccacaggcaggtct

SEQ ID NO: 1047481 - DNA, 15 bp, Homo sapiens
tcccacaggcaggtc

SEQ ID NO: 1047482 - DNA, 15 bp, Homo sapiens
ttcccacaggcaggt

SEQ ID NO: 1047483 - DNA, 15 bp, Homo sapiens
gttcccacaggcagg

SEQ ID NO: 1047484 - DNA, 15 bp, Homo sapiens
agttcccacaggcag

SEQ ID NO: 1047485 - DNA, 15 bp, Homo sapiens
cagttcccacaggca

SEQ ID NO: 1047486 - DNA, 15 bp, Homo sapiens
gcagttcccacaggc

SEQ ID NO: 1047487 - DNA, 15 bp, Homo sapiens
ggcagttcccacagg

SEQ ID NO: 1047488 - DNA, 15 bp, Homo sapiens
tggcagttcccacag

SEQ ID NO: 1047489 - DNA, 15 bp, Homo sapiens
ctggcagttcccaca

SEQ ID NO: 1047490 - DNA, 15 bp, Homo sapiens
cctggcagttcccac

SEQ ID NO: 1047491 - DNA, 15 bp, Homo sapiens
gcctggcagttccca

SEQ ID NO: 1047492 - DNA, 15 bp, Homo sapiens
ggcctggcagttccc

SEQ ID NO: 1047493 - DNA, 15 bp, Homo sapiens
aggcctggcagttcc

SEQ ID NO: 1047494 - DNA, 15 bp, Homo sapiens
taggcctggcagttc

SEQ ID NO: 1047495 - DNA, 15 bp, Homo sapiens
gtaggcctggcagtt

SEQ ID NO: 1047496 - DNA, 15 bp, Homo sapiens
ggtaggcctggcagt

SEQ ID NO: 1047497 - DNA, 15 bp, Homo sapiens
tggtaggcctggcag

SEQ ID NO: 1047498 - DNA, 15 bp, Homo sapiens
gtggtaggcctggca

SEQ ID NO: 1047499 - DNA, 15 bp, Homo sapiens
tgtggtaggcctggc

SEQ ID NO: 1047500 - DNA, 15 bp, Homo sapiens
atgtggtaggcctgg

SEQ ID NO: 1047501 - DNA, 15 bp, Homo sapiens
aatgtggtaggcctg

SEQ ID NO: 1047502 - DNA, 15 bp, Homo sapiens
aaatgtggtaggcct

SEQ ID NO: 1047503 - DNA, 15 bp, Homo sapiens
gaaatgtggtaggcc

SEQ ID NO: 1047504 - DNA, 15 bp, Homo sapiens
tgaaatgtggtaggc

SEQ ID NO: 1047505 - DNA, 15 bp, Homo sapiens
ttgaaatgtggtagg

SEQ ID NO: 1047506 - DNA, 15 bp, Homo sapiens
gttgaaatgtggtag

SEQ ID NO: 1047507 - DNA, 15 bp, Homo sapiens
ggttgaaatgtggta

SEQ ID NO: 1047508 - DNA, 15 bp, Homo sapiens
gggttgaaatgtggt

SEQ ID NO: 1047509 - DNA, 15 bp, Homo sapiens
agggttgaaatgtgg

SEQ ID NO: 1047510 - DNA, 15 bp, Homo sapiens
tagggttgaaatgtg

SEQ ID NO: 1047511 - DNA, 15 bp, Homo sapiens
gtagggttgaaatgt

SEQ ID NO: 1047512 - DNA, 15 bp, Homo sapiens
agtagggttgaaatg

SEQ ID NO: 1047513 - DNA, 15 bp, Homo sapiens
tagtagggttgaaat

SEQ ID NO: 1047514 - DNA, 15 bp, Homo sapiens
ttagtagggttgaaa

SEQ ID NO: 1047515 - DNA, 15 bp, Homo sapiens
gttagtagggttgaa

SEQ ID NO: 1047516 - DNA, 15 bp, Homo sapiens
ggttagtagggttga

SEQ ID NO: 1047517 - DNA, 15 bp, Homo sapiens
tggttagtagggttg

SEQ ID NO: 1047518 - DNA, 15 bp, Homo sapiens
ttggttagtagggtt

SEQ ID NO: 1047519 - DNA, 15 bp, Homo sapiens
tttggttagtagggt

SEQ ID NO: 1047520 - DNA, 15 bp, Homo sapiens
ttttggttagtaggg

SEQ ID NO: 1047521 - DNA, 15 bp, Homo sapiens
gttttggttagtagg

SEQ ID NO: 1047522 - DNA, 15 bp, Homo sapiens
ggttttggttagtag

SEQ ID NO: 1047523 - DNA, 15 bp, Homo sapiens
tggttttggttagta

SEQ ID NO: 1047524 - DNA, 15 bp, Homo sapiens
ctggttttggttagt

SEQ ID NO: 1047525 - DNA, 15 bp, Homo sapiens
actggttttggttag

SEQ ID NO: 1047526 - DNA, 15 bp, Homo sapiens
cactggttttggtta

SEQ ID NO: 1047527 - DNA, 15 bp, Homo sapiens
tcactggttttggtt

SEQ ID NO: 1047528 - DNA, 15 bp, Homo sapiens
gtcactggttttggt

SEQ ID NO: 1047529 - DNA, 15 bp, Homo sapiens
agtcactggttttgg

SEQ ID NO: 1047530 - DNA, 15 bp, Homo sapiens
cagtcactggttttg

SEQ ID NO: 1047531 - DNA, 15 bp, Homo sapiens
ccagtcactggtttt

SEQ ID NO: 1047532 - DNA, 15 bp, Homo sapiens
cccagtcactggttt

SEQ ID NO: 1047533 - DNA, 15 bp, Homo sapiens
tcccagtcactggtt

SEQ ID NO: 1047534 - DNA, 15 bp, Homo sapiens
atcccagtcactggt

SEQ ID NO: 1047535 - DNA, 15 bp, Homo sapiens
gatcccagtcactgg

SEQ ID NO: 1047536 - DNA, 15 bp, Homo sapiens
agatcccagtcactg

SEQ ID NO: 1047537 - DNA, 15 bp, Homo sapiens
gagatcccagtcact

SEQ ID NO: 1047538 - DNA, 15 bp, Homo sapiens
tgagatcccagtcac

SEQ ID NO: 1047539 - DNA, 15 bp, Homo sapiens
gctgagatcccagtc

SEQ ID NO: 1047540 - DNA, 15 bp, Homo sapiens
ggctgagatcccagt

SEQ ID NO: 1047541 - DNA, 15 bp, Homo sapiens
tggctgagatcccag

SEQ ID NO: 1047542 - DNA, 15 bp, Homo sapiens
gtggctgagatccca

SEQ ID NO: 1047543 - DNA, 15 bp, Homo sapiens
ggtggctgagatccc

SEQ ID NO: 1047544 - DNA, 15 bp, Homo sapiens
aggtggctgagatcc

SEQ ID NO: 1047545 - DNA, 15 bp, Homo sapiens
aaggtggctgagatc

SEQ ID NO: 1047546 - DNA, 15 bp, Homo sapiens
aaaggtggctgagat

SEQ ID NO: 1047547 - DNA, 15 bp, Homo sapiens
gaaaggtggctgaga

SEQ ID NO: 1047548 - DNA, 15 bp, Homo sapiens
ggaaaggtggctgag

SEQ ID NO: 1047549 - DNA, 15 bp, Homo sapiens
tggaaaggtggctga

SEQ ID NO: 1047550 - DNA, 15 bp, Homo sapiens
ctggaaaggtggctg

SEQ ID NO: 1047551 - DNA, 15 bp, Homo sapiens
tctggaaaggtggct

SEQ ID NO: 1047552 - DNA, 15 bp, Homo sapiens
atctggaaaggtggc

SEQ ID NO: 1047553 - DNA, 15 bp, Homo sapiens
gatctggaaaggtgg

SEQ ID NO: 1047554 - DNA, 15 bp, Homo sapiens
ggatctggaaaggtg

SEQ ID NO: 1047555 - DNA, 15 bp, Homo sapiens
gggatctggaaaggt

SEQ ID NO: 1047556 - DNA, 15 bp, Homo sapiens
tgggatctggaaagg

SEQ ID NO: 1047557 - DNA, 15 bp, Homo sapiens
ctgggatctggaaag

SEQ ID NO: 1047558 - DNA, 15 bp, Homo sapiens
cctgggatctggaaa

SEQ ID NO: 1047559 - DNA, 15 bp, Homo sapiens
tcctgggatctggaa

SEQ ID NO: 1047560 - DNA, 15 bp, Homo sapiens
atcctgggatctgga

SEQ ID NO: 1047561 - DNA, 15 bp, Homo sapiens
aatcctgggatctgg

SEQ ID NO: 1047562 - DNA, 15 bp, Homo sapiens
aaatcctgggatctg

SEQ ID NO: 1047563 - DNA, 15 bp, Homo sapiens
gaaatcctgggatct

SEQ ID NO: 1047564 - DNA, 15 bp, Homo sapiens
tgaaatcctgggatc

SEQ ID NO: 1047565 - DNA, 15 bp, Homo sapiens
ctgaaatcctgggat

SEQ ID NO: 1047566 - DNA, 15 bp, Homo sapiens
cctgaaatcctggga

SEQ ID NO: 1047567 - DNA, 15 bp, Homo sapiens
tcctgaaatcctggg

SEQ ID NO: 1047568 - DNA, 15 bp, Homo sapiens
ttcctgaaatcctgg

SEQ ID NO: 1047569 - DNA, 15 bp, Homo sapiens
cttcctgaaatcctg

SEQ ID NO: 1047570 - DNA, 15 bp, Homo sapiens
ccttcctgaaatcct

SEQ ID NO: 1047571 - DNA, 15 bp, Homo sapiens
gccttcctgaaatcc

SEQ ID NO: 1047572 - DNA, 15 bp, Homo sapiens
agccttcctgaaatc

SEQ ID NO: 1047573 - DNA, 15 bp, Homo sapiens
gagccttcctgaaat

SEQ ID NO: 1047574 - DNA, 15 bp, Homo sapiens
tgagccttcctgaaa

SEQ ID NO: 1047575 - DNA, 15 bp, Homo sapiens
ctgagccttcctgaa

SEQ ID NO: 1047576 - DNA, 15 bp, Homo sapiens
tctgagccttcctga

SEQ ID NO: 1047577 - DNA, 15 bp, Homo sapiens
ctctgagccttcctg

SEQ ID NO: 1047578 - DNA, 15 bp, Homo sapiens
cctctgagccttcct

SEQ ID NO: 1047579 - DNA, 15 bp, Homo sapiens
acctctgagccttcc

SEQ ID NO: 1047580 - DNA, 15 bp, Homo sapiens
aacctctgagccttc

SEQ ID NO: 1047581 - DNA, 15 bp, Homo sapiens
gaacctctgagcctt

SEQ ID NO: 1047582 - DNA, 15 bp, Homo sapiens
agaacctctgagcct

SEQ ID NO: 1047583 - DNA, 15 bp, Homo sapiens
cagaacctctgagcc

SEQ ID NO: 1047584 - DNA, 15 bp, Homo sapiens
tcagaacctctgagc

SEQ ID NO: 1047585 - DNA, 15 bp, Homo sapiens
ctcagaacctctgag

SEQ ID NO: 1047586 - DNA, 15 bp, Homo sapiens
gctcagaacctctga

SEQ ID NO: 1047587 - DNA, 15 bp, Homo sapiens
ggctcagaacctctg

SEQ ID NO: 1047588 - DNA, 15 bp, Homo sapiens
aggctcagaacctct

SEQ ID NO: 1047589 - DNA, 15 bp, Homo sapiens
caggctcagaacctc

SEQ ID NO: 1047590 - DNA, 15 bp, Homo sapiens
gcaggctcagaacct

SEQ ID NO: 1047591 - DNA, 15 bp, Homo sapiens
tgcaggctcagaacc

SEQ ID NO: 1047592 - DNA, 15 bp, Homo sapiens
ctgcaggctcagaac

SEQ ID NO: 1047593 - DNA, 15 bp, Homo sapiens
gctgcaggctcagaa

SEQ ID NO: 1047594 - DNA, 15 bp, Homo sapiens
ggctgcaggctcaga

SEQ ID NO: 1047595 - DNA, 15 bp, Homo sapiens
gggctgcaggctcag

SEQ ID NO: 1047596 - DNA, 15 bp, Homo sapiens
ggggctgcaggctca

SEQ ID NO: 1047597 - DNA, 15 bp, Homo sapiens
aggggctgcaggctc

SEQ ID NO: 1047598 - DNA, 15 bp, Homo sapiens
gaggggctgcaggct

SEQ ID NO: 1047599 - DNA, 15 bp, Homo sapiens
tgaggggctgcaggc

SEQ ID NO: 1047600 - DNA, 15 bp, Homo sapiens
ctgaggggctgcagg

SEQ ID NO: 1047601 - DNA, 15 bp, Homo sapiens
tctgaggggctgcag

SEQ ID NO: 1047602 - DNA, 15 bp, Homo sapiens
atctgaggggctgca

SEQ ID NO: 1047603 - DNA, 15 bp, Homo sapiens
catctgaggggctgc

SEQ ID NO: 1047604 - DNA, 15 bp, Homo sapiens
tcatctgaggggctg

SEQ ID NO: 1047605 - DNA, 15 bp, Homo sapiens
ttcatctgaggggct

SEQ ID NO: 1047606 - DNA, 15 bp, Homo sapiens
attcatctgaggggc

SEQ ID NO: 1047607 - DNA, 15 bp, Homo sapiens
gattcatctgagggg

SEQ ID NO: 1047608 - DNA, 15 bp, Homo sapiens
agattcatctgaggg

SEQ ID NO: 1047609 - DNA, 15 bp, Homo sapiens
gagattcatctgagg

SEQ ID NO: 1047610 - DNA, 15 bp, Homo sapiens
agagattcatctgag

SEQ ID NO: 1047611 - DNA, 15 bp, Homo sapiens
gagagattcatctga

SEQ ID NO: 1047612 - DNA, 15 bp, Homo sapiens
agagagattcatctg

SEQ ID NO: 1047613 - DNA, 15 bp, Homo sapiens
gagagagattcatct

SEQ ID NO: 1047614 - DNA, 15 bp, Homo sapiens
ggagagagattcatc

SEQ ID NO: 1047615 - DNA, 15 bp, Homo sapiens
tggagagagattcat

SEQ ID NO: 1047616 - DNA, 15 bp, Homo sapiens
ctggagagagattca

SEQ ID NO: 1047617 - DNA, 15 bp, Homo sapiens
tctggagagagattc

SEQ ID NO: 1047618 - DNA, 15 bp, Homo sapiens
atctggagagagatt

SEQ ID NO: 1047619 - DNA, 15 bp, Homo sapiens
catctggagagagat

SEQ ID NO: 1047620 - DNA, 15 bp, Homo sapiens
acatctggagagaga

SEQ ID NO: 1047621 - DNA, 15 bp, Homo sapiens
tacatctggagagag

SEQ ID NO: 1047622 - DNA, 15 bp, Homo sapiens
ttacatctggagaga

SEQ ID NO: 1047623 - DNA, 15 bp, Homo sapiens
attacatctggagag

SEQ ID NO: 1047624 - DNA, 15 bp, Homo sapiens
aattacatctggaga

SEQ ID NO: 1047625 - DNA, 15 bp, Homo sapiens
gaattacatctggag

SEQ ID NO: 1047626 - DNA, 15 bp, Homo sapiens
agaattacatctgga

SEQ ID NO: 1047627 - DNA, 15 bp, Homo sapiens
cagaattacatctgg

SEQ ID NO: 1047628 - DNA, 15 bp, Homo sapiens
tcagaattacatctg

SEQ ID NO: 1047629 - DNA, 15 bp, Homo sapiens
atcagaattacatct

SEQ ID NO: 1047630 - DNA, 15 bp, Homo sapiens
catcagaattacatc

SEQ ID NO: 1047631 - DNA, 15 bp, Homo sapiens
ccatcagaattacat

SEQ ID NO: 1047632 - DNA, 15 bp, Homo sapiens
accatcagaattaca

SEQ ID NO: 1047633 - DNA, 15 bp, Homo sapiens
caccatcagaattac

SEQ ID NO: 1047634 - DNA, 15 bp, Homo sapiens
gcaccatcagaatta

SEQ ID NO: 1047635 - DNA, 15 bp, Homo sapiens
ggcaccatcagaatt

SEQ ID NO: 1047636 - DNA, 15 bp, Homo sapiens
cggcaccatcagaat

SEQ ID NO: 1047637 - DNA, 15 bp, Homo sapiens
ccggcaccatcagaa

SEQ ID NO: 1047638 - DNA, 15 bp, Homo sapiens
tccggcaccatcaga

SEQ ID NO: 1047639 - DNA, 15 bp, Homo sapiens
ctccggcaccatcag

SEQ ID NO: 1047640 - DNA, 15 bp, Homo sapiens
gctccggcaccatca

SEQ ID NO: 1047641 - DNA, 15 bp, Homo sapiens
agctccggcaccatc

SEQ ID NO: 1047642 - DNA, 15 bp, Homo sapiens
gagctccggcaccat

SEQ ID NO: 1047643 - DNA, 15 bp, Homo sapiens
ggagctccggcacca

SEQ ID NO: 1047644 - DNA, 15 bp, Homo sapiens
aggagctccggcacc

SEQ ID NO: 1047645 - DNA, 15 bp, Homo sapiens
taggagctccggcac

SEQ ID NO: 1047646 - DNA, 15 bp, Homo sapiens
ttaggagctccggca

SEQ ID NO: 1047647 - DNA, 15 bp, Homo sapiens
gttaggagctccggc

SEQ ID NO: 1047648 - DNA, 15 bp, Homo sapiens
tgttaggagctccgg

SEQ ID NO: 1047649 - DNA, 15 bp, Homo sapiens
ctgttaggagctccg

SEQ ID NO: 1047650 - DNA, 15 bp, Homo sapiens
actgttaggagctcc

SEQ ID NO: 1047651 - DNA, 15 bp, Homo sapiens
gactgttaggagctc

SEQ ID NO: 1047652 - DNA, 15 bp, Homo sapiens
cgactgttaggagct

SEQ ID NO: 1047653 - DNA, 15 bp, Homo sapiens
tcgactgttaggagc

SEQ ID NO: 1047654 - DNA, 15 bp, Homo sapiens
ttcgactgttaggag

SEQ ID NO: 1047655 - DNA, 15 bp, Homo sapiens
cttcgactgttagga

SEQ ID NO: 1047656 - DNA, 15 bp, Homo sapiens
ccttcgactgttagg

SEQ ID NO: 1047657 - DNA, 15 bp, Homo sapiens
tccttcgactgttag

SEQ ID NO: 1047658 - DNA, 15 bp, Homo sapiens
gtccttcgactgtta

SEQ ID NO: 1047659 - DNA, 15 bp, Homo sapiens
tgtccttcgactgtt

SEQ ID NO: 1047660 - DNA, 15 bp, Homo sapiens
atgtccttcgactgt

SEQ ID NO: 1047661 - DNA, 15 bp, Homo sapiens
catgtccttcgactg

SEQ ID NO: 1047662 - DNA, 15 bp, Homo sapiens
ccatgtccttcgact

SEQ ID NO: 1047663 - DNA, 15 bp, Homo sapiens
accatgtccttcgac

SEQ ID NO: 1047664 - DNA, 15 bp, Homo sapiens
caccatgtccttcga

SEQ ID NO: 1047665 - DNA, 15 bp, Homo sapiens
acaccatgtccttcg

SEQ ID NO: 1047666 - DNA, 15 bp, Homo sapiens
cacaccatgtccttc

SEQ ID NO: 1047667 - DNA, 15 bp, Homo sapiens
acacaccatgtcctt

SEQ ID NO: 1047668 - DNA, 15 bp, Homo sapiens
aacacaccatgtcct

SEQ ID NO: 1047669 - DNA, 15 bp, Homo sapiens
caacacaccatgtcc

SEQ ID NO: 1047670 - DNA, 15 bp, Homo sapiens
tcaacacaccatgtc

SEQ ID NO: 1047671 - DNA, 15 bp, Homo sapiens
ttcaacacaccatgt

SEQ ID NO: 1047672 - DNA, 15 bp, Homo sapiens
gttcaacacaccatg

SEQ ID NO: 1047673 - DNA, 15 bp, Homo sapiens
cgttcaacacaccat

SEQ ID NO: 1047674 - DNA, 15 bp, Homo sapiens
acgttcaacacacca

SEQ ID NO: 1047675 - DNA, 15 bp, Homo sapiens
aacgttcaacacacc

SEQ ID NO: 1047676 - DNA, 15 bp, Homo sapiens
aaacgttcaacacac

SEQ ID NO: 1047677 - DNA, 15 bp, Homo sapiens
aaaacgttcaacaca

SEQ ID NO: 1047678 - DNA, 15 bp, Homo sapiens
gaaaacgttcaacac

SEQ ID NO: 1047679 - DNA, 15 bp, Homo sapiens
ggaaaacgttcaaca

SEQ ID NO: 1047680 - DNA, 15 bp, Homo sapiens
gggaaaacgttcaac

SEQ ID NO: 1047681 - DNA, 15 bp, Homo sapiens
tgggaaaacgttcaa

SEQ ID NO: 1047682 - DNA, 15 bp, Homo sapiens
atgggaaaacgttca

SEQ ID NO: 1047683 - DNA, 15 bp, Homo sapiens
tatgggaaaacgttc

SEQ ID NO: 1047684 - DNA, 15 bp, Homo sapiens
atatgggaaaacgtt

SEQ ID NO: 1047685 - DNA, 15 bp, Homo sapiens
aatatgggaaaacgt

SEQ ID NO: 1047686 - DNA, 15 bp, Homo sapiens
taatatgggaaaacg

SEQ ID NO: 1047687 - DNA, 15 bp, Homo sapiens
ataatatgggaaaac

SEQ ID NO: 1047688 - DNA, 15 bp, Homo sapiens
gataatatgggaaaa

SEQ ID NO: 1047689 - DNA, 15 bp, Homo sapiens
agataatatgggaaa

SEQ ID NO: 1047690 - DNA, 15 bp, Homo sapiens
aagataatatgggaa

SEQ ID NO: 1047691 - DNA, 15 bp, Homo sapiens
taagataatatggga

SEQ ID NO: 1047692 - DNA, 15 bp, Homo sapiens
gtaagataatatggg

SEQ ID NO: 1047693 - DNA, 15 bp, Homo sapiens
ggtaagataatatgg

SEQ ID NO: 1047694 - DNA, 15 bp, Homo sapiens
tggtaagataatatg

SEQ ID NO: 1047695 - DNA, 15 bp, Homo sapiens
gtggtaagataatat

SEQ ID NO: 1047696 - DNA, 15 bp, Homo sapiens
agtggtaagataata

SEQ ID NO: 1047697 - DNA, 15 bp, Homo sapiens
aagtggtaagataat

SEQ ID NO: 1047698 - DNA, 15 bp, Homo sapiens
caagtggtaagataa

SEQ ID NO: 1047699 - DNA, 15 bp, Homo sapiens
acaagtggtaagata

SEQ ID NO: 1047700 - DNA, 15 bp, Homo sapiens
aacaagtggtaagat

SEQ ID NO: 1047701 - DNA, 15 bp, Homo sapiens
gaacaagtggtaaga

SEQ ID NO: 1047702 - DNA, 15 bp, Homo sapiens
ggaacaagtggtaag

SEQ ID NO: 1047703 - DNA, 15 bp, Homo sapiens
aggaacaagtggtaa

SEQ ID NO: 1047704 - DNA, 15 bp, Homo sapiens
gaggaacaagtggta

SEQ ID NO: 1047705 - DNA, 15 bp, Homo sapiens
tgaggaacaagtggt

SEQ ID NO: 1047706 - DNA, 15 bp, Homo sapiens
gtgaggaacaagtgg

SEQ ID NO: 1047707 - DNA, 15 bp, Homo sapiens
ggtgaggaacaagtg

SEQ ID NO: 1047708 - DNA, 15 bp, Homo sapiens
tggtgaggaacaagt

SEQ ID NO: 1047709 - DNA, 15 bp, Homo sapiens
gtggtgaggaacaag

SEQ ID NO: 1047710 - DNA, 15 bp, Homo sapiens
agtggtgaggaacaa

SEQ ID NO: 1047711 - DNA, 15 bp, Homo sapiens
tagtggtgaggaaca

SEQ ID NO: 1047712 - DNA, 15 bp, Homo sapiens
atagtggtgaggaac

SEQ ID NO: 1047713 - DNA, 15 bp, Homo sapiens
tatagtggtgaggaa

SEQ ID NO: 1047714 - DNA, 15 bp, Homo sapiens
gtatagtggtgagga

SEQ ID NO: 1047715 - DNA, 15 bp, Homo sapiens
agtatagtggtgagg

SEQ ID NO: 1047716 - DNA, 15 bp, Homo sapiens
tagtatagtggtgag

SEQ ID NO: 1047717 - DNA, 15 bp, Homo sapiens
ttagtatagtggtga

SEQ ID NO: 1047718 - DNA, 15 bp, Homo sapiens
cttagtatagtggtg

SEQ ID NO: 1047719 - DNA, 15 bp, Homo sapiens
tcttagtatagtggt

SEQ ID NO: 1047720 - DNA, 15 bp, Homo sapiens
ttcttagtatagtgg

SEQ ID NO: 1047721 - DNA, 15 bp, Homo sapiens
cttcttagtatagtg

SEQ ID NO: 1047722 - DNA, 15 bp, Homo sapiens
acttcttagtatagt

SEQ ID NO: 1047723 - DNA, 15 bp, Homo sapiens
tacttcttagtatag

SEQ ID NO: 1047724 - DNA, 15 bp, Homo sapiens
ctacttcttagtata

SEQ ID NO: 1047725 - DNA, 15 bp, Homo sapiens
actacttcttagtat

SEQ ID NO: 1047726 - DNA, 15 bp, Homo sapiens
aactacttcttagta

SEQ ID NO: 1047727 - DNA, 15 bp, Homo sapiens
taactacttcttagt

SEQ ID NO: 1047728 - DNA, 15 bp, Homo sapiens
gtaactacttcttag

SEQ ID NO: 1047729 - DNA, 15 bp, Homo sapiens
agtaactacttctta

SEQ ID NO: 1047730 - DNA, 15 bp, Homo sapiens
cagtaactacttctt

SEQ ID NO: 1047731 - DNA, 15 bp, Homo sapiens
acagtaactacttct

SEQ ID NO: 1047732 - DNA, 15 bp, Homo sapiens
tacagtaactacttc

SEQ ID NO: 1047733 - DNA, 15 bp, Homo sapiens
ttacagtaactactt

SEQ ID NO: 1047734 - DNA, 15 bp, Homo sapiens
gttacagtaactact

SEQ ID NO: 1047735 - DNA, 15 bp, Homo sapiens
agttacagtaactac

SEQ ID NO: 1047736 - DNA, 15 bp, Homo sapiens
aagttacagtaacta

SEQ ID NO: 1047737 - DNA, 15 bp, Homo sapiens
gaagttacagtaact

SEQ ID NO: 1047738 - DNA, 15 bp, Homo sapiens
tgaagttacagtaac

SEQ ID NO: 1047739 - DNA, 15 bp, Homo sapiens
gtgaagttacagtaa

SEQ ID NO: 1047740 - DNA, 15 bp, Homo sapiens
agtgaagttacagta

SEQ ID NO: 1047741 - DNA, 15 bp, Homo sapiens
cagtgaagttacagt

SEQ ID NO: 1047742 - DNA, 15 bp, Homo sapiens
acagtgaagttacag

SEQ ID NO: 1047743 - DNA, 15 bp, Homo sapiens
aacagtgaagttaca

SEQ ID NO: 1047744 - DNA, 15 bp, Homo sapiens
taacagtgaagttac

SEQ ID NO: 1047745 - DNA, 15 bp, Homo sapiens
gtaacagtgaagtta

SEQ ID NO: 1047746 - DNA, 15 bp, Homo sapiens
tgtaacagtgaagtt

SEQ ID NO: 1047747 - DNA, 15 bp, Homo sapiens
gtgtaacagtgaagt

SEQ ID NO: 1047748 - DNA, 15 bp, Homo sapiens
tgtgtaacagtgaag

SEQ ID NO: 1047749 - DNA, 15 bp, Homo sapiens
ctgtgtaacagtgaa

SEQ ID NO: 1047750 - DNA, 15 bp, Homo sapiens
cctgtgtaacagtga

SEQ ID NO: 1047751 - DNA, 15 bp, Homo sapiens
tcctgtgtaacagtg

SEQ ID NO: 1047752 - DNA, 15 bp, Homo sapiens
ttcctgtgtaacagt

SEQ ID NO: 1047753 - DNA, 15 bp, Homo sapiens
cttcctgtgtaacag

SEQ ID NO: 1047754 - DNA, 15 bp, Homo sapiens
ccttcctgtgtaaca

SEQ ID NO: 1047755 - DNA, 15 bp, Homo sapiens
gccttcctgtgtaac

SEQ ID NO: 1047756 - DNA, 15 bp, Homo sapiens
tgccttcctgtgtaa

SEQ ID NO: 1047757 - DNA, 15 bp, Homo sapiens
ttgccttcctgtgta

SEQ ID NO: 1047758 - DNA, 15 bp, Homo sapiens
cttgccttcctgtgt

SEQ ID NO: 1047759 - DNA, 15 bp, Homo sapiens
gcttgccttcctgtg

SEQ ID NO: 1047760 - DNA, 15 bp, Homo sapiens
tgcttgccttcctgt

SEQ ID NO: 1047761 - DNA, 15 bp, Homo sapiens
ctgcttgccttcctg

SEQ ID NO: 1047762 - DNA, 15 bp, Homo sapiens
cctgcttgccttcct

SEQ ID NO: 1047763 - DNA, 15 bp, Homo sapiens
ccctgcttgccttcc

SEQ ID NO: 1047764 - DNA, 15 bp, Homo sapiens
gccctgcttgccttc

SEQ ID NO: 1047765 - DNA, 15 bp, Homo sapiens
agccctgcttgcctt

SEQ ID NO: 1047766 - DNA, 15 bp, Homo sapiens
aagccctgcttgcct

SEQ ID NO: 1047767 - DNA, 15 bp, Homo sapiens
aaagccctgcttgcc

SEQ ID NO: 1047768 - DNA, 15 bp, Homo sapiens
gaaagccctgcttgc

SEQ ID NO: 1047769 - DNA, 15 bp, Homo sapiens
tgaaagccctgcttg

SEQ ID NO: 1047770 - DNA, 15 bp, Homo sapiens
ctgaaagccctgctt

SEQ ID NO: 1047771 - DNA, 15 bp, Homo sapiens
cctgaaagccctgct

SEQ ID NO: 1047772 - DNA, 15 bp, Homo sapiens
ccctgaaagccctgc

SEQ ID NO: 1047773 - DNA, 15 bp, Homo sapiens
cccctgaaagccctg

SEQ ID NO: 1047774 - DNA, 15 bp, Homo sapiens
tcccctgaaagccct

SEQ ID NO: 1047775 - DNA, 15 bp, Homo sapiens
gtcccctgaaagccc

SEQ ID NO: 1047776 - DNA, 15 bp, Homo sapiens
tgtcccctgaaagcc

SEQ ID NO: 1047777 - DNA, 15 bp, Homo sapiens
ctgtcccctgaaagc

SEQ ID NO: 1047778 - DNA, 15 bp, Homo sapiens
actgtcccctgaaag

SEQ ID NO: 1047779 - DNA, 15 bp, Homo sapiens
cactgtcccctgaaa

SEQ ID NO: 1047780 - DNA, 15 bp, Homo sapiens
gcactgtcccctgaa

SEQ ID NO: 1047781 - DNA, 15 bp, Homo sapiens
agcactgtcccctga

SEQ ID NO: 1047782 - DNA, 15 bp, Homo sapiens
aagcactgtcccctg

SEQ ID NO: 1047783 - DNA, 15 bp, Homo sapiens
aaagcactgtcccct

SEQ ID NO: 1047784 - DNA, 15 bp, Homo sapiens
caaagcactgtcccc

SEQ ID NO: 1047785 - DNA, 15 bp, Homo sapiens
acaaagcactgtccc

SEQ ID NO: 1047786 - DNA, 15 bp, Homo sapiens
gacaaagcactgtcc

SEQ ID NO: 1047787 - DNA, 15 bp, Homo sapiens
agacaaagcactgtc

SEQ ID NO: 1047788 - DNA, 15 bp, Homo sapiens
tagacaaagcactgt

SEQ ID NO: 1047789 - DNA, 15 bp, Homo sapiens
ttagacaaagcactg

SEQ ID NO: 1047790 - DNA, 15 bp, Homo sapiens
cttagacaaagcact

SEQ ID NO: 1047791 - DNA, 15 bp, Homo sapiens
ccttagacaaagcac

SEQ ID NO: 1047792 - DNA, 15 bp, Homo sapiens
tccttagacaaagca

SEQ ID NO: 1047793 - DNA, 15 bp, Homo sapiens
atccttagacaaagc

SEQ ID NO: 1047794 - DNA, 15 bp, Homo sapiens
aatccttagacaaag

SEQ ID NO: 1047795 - DNA, 15 bp, Homo sapiens
aaatccttagacaaa

SEQ ID NO: 1047796 - DNA, 15 bp, Homo sapiens
taaatccttagacaa

SEQ ID NO: 1047797 - DNA, 15 bp, Homo sapiens
ttaaatccttagaca

SEQ ID NO: 1047798 - DNA, 15 bp, Homo sapiens
tttaaatccttagac

SEQ ID NO: 1047799 - DNA, 15 bp, Homo sapiens
ctttaaatccttaga

SEQ ID NO: 1047800 - DNA, 15 bp, Homo sapiens
cctttaaatccttag

SEQ ID NO: 1047801 - DNA, 15 bp, Homo sapiens
tcctttaaatcctta

SEQ ID NO: 1047802 - DNA, 15 bp, Homo sapiens
ctcctttaaatcctt

SEQ ID NO: 1047803 - DNA, 15 bp, Homo sapiens
cctcctttaaatcct

SEQ ID NO: 1047804 - DNA, 15 bp, Homo sapiens
gcctcctttaaatcc

SEQ ID NO: 1047805 - DNA, 15 bp, Homo sapiens
tgcctcctttaaatc

SEQ ID NO: 1047806 - DNA, 15 bp, Homo sapiens
ttgcctcctttaaat

SEQ ID NO: 1047807 - DNA, 15 bp, Homo sapiens
tttgcctcctttaaa

SEQ ID NO: 1047808 - DNA, 15 bp, Homo sapiens
ctttgcctcctttaa

SEQ ID NO: 1047809 - DNA, 15 bp, Homo sapiens
actttgcctccttta

SEQ ID NO: 1047810 - DNA, 15 bp, Homo sapiens
aactttgcctccttt

SEQ ID NO: 1047811 - DNA, 15 bp, Homo sapiens
caactttgcctcctt

SEQ ID NO: 1047812 - DNA, 15 bp, Homo sapiens
ccaactttgcctcct

SEQ ID NO: 1047813 - DNA, 15 bp, Homo sapiens
tccaactttgcctcc

SEQ ID NO: 1047814 - DNA, 15 bp, Homo sapiens
ctccaactttgcctc

SEQ ID NO: 1047815 - DNA, 15 bp, Homo sapiens
gctccaactttgcct

SEQ ID NO: 1047816 - DNA, 15 bp, Homo sapiens
ggctccaactttgcc

SEQ ID NO: 1047817 - DNA, 15 bp, Homo sapiens
gggctccaactttgc

SEQ ID NO: 1047818 - DNA, 15 bp, Homo sapiens
cgggctccaactttg

SEQ ID NO: 1047819 - DNA, 15 bp, Homo sapiens
tcgggctccaacttt

SEQ ID NO: 1047820 - DNA, 15 bp, Homo sapiens
ttcgggctccaactt

SEQ ID NO: 1047821 - DNA, 15 bp, Homo sapiens
gttcgggctccaact

SEQ ID NO: 1047822 - DNA, 15 bp, Homo sapiens
ggttcgggctccaac

SEQ ID NO: 1047823 - DNA, 15 bp, Homo sapiens
gggttcgggctccaa

SEQ ID NO: 1047824 - DNA, 15 bp, Homo sapiens
tgggttcgggctcca

SEQ ID NO: 1047825 - DNA, 15 bp, Homo sapiens
ctgggttcgggctcc

SEQ ID NO: 1047826 - DNA, 15 bp, Homo sapiens
cctgggttcgggctc

SEQ ID NO: 1047827 - DNA, 15 bp, Homo sapiens
gcctgggttcgggct

SEQ ID NO: 1047828 - DNA, 15 bp, Homo sapiens
cgcctgggttcgggc

SEQ ID NO: 1047829 - DNA, 15 bp, Homo sapiens
acgcctgggttcggg

SEQ ID NO: 1047830 - DNA, 15 bp, Homo sapiens
aacgcctgggttcgg

SEQ ID NO: 1047831 - DNA, 15 bp, Homo sapiens
aaacgcctgggttcg

SEQ ID NO: 1047832 - DNA, 15 bp, Homo sapiens
caaacgcctgggttc

SEQ ID NO: 1047833 - DNA, 15 bp, Homo sapiens
ccaaacgcctgggtt

SEQ ID NO: 1047834 - DNA, 15 bp, Homo sapiens
accaaacgcctgggt

SEQ ID NO: 1047835 - DNA, 15 bp, Homo sapiens
aaccaaacgcctggg

SEQ ID NO: 1047836 - DNA, 15 bp, Homo sapiens
gaaccaaacgcctgg

SEQ ID NO: 1047837 - DNA, 15 bp, Homo sapiens
ggaaccaaacgcctg

SEQ ID NO: 1047838 - DNA, 15 bp, Homo sapiens
tggaaccaaacgcct

SEQ ID NO: 1047839 - DNA, 15 bp, Homo sapiens
ctggaaccaaacgcc

SEQ ID NO: 1047840 - DNA, 15 bp, Homo sapiens
gctggaaccaaacgc

SEQ ID NO: 1047841 - DNA, 15 bp, Homo sapiens
ggctggaaccaaacg

SEQ ID NO: 1047842 - DNA, 15 bp, Homo sapiens
gggctggaaccaaac

SEQ ID NO: 1047843 - DNA, 15 bp, Homo sapiens
ggggctggaaccaaa

SEQ ID NO: 1047844 - DNA, 15 bp, Homo sapiens
tggggctggaaccaa

SEQ ID NO: 1047845 - DNA, 15 bp, Homo sapiens
gtggggctggaacca

SEQ ID NO: 1047846 - DNA, 15 bp, Homo sapiens
cgtggggctggaacc

SEQ ID NO: 1047847 - DNA, 15 bp, Homo sapiens
acgtggggctggaac

SEQ ID NO: 1047848 - DNA, 15 bp, Homo sapiens
cacgtggggctggaa

SEQ ID NO: 1047849 - DNA, 15 bp, Homo sapiens
gcacgtggggctgga

SEQ ID NO: 1047850 - DNA, 15 bp, Homo sapiens
ggcacgtggggctgg

SEQ ID NO: 1047851 - DNA, 15 bp, Homo sapiens
tggcacgtggggctg

SEQ ID NO: 1047852 - DNA, 15 bp, Homo sapiens
atggcacgtggggct

SEQ ID NO: 1047853 - DNA, 15 bp, Homo sapiens
gatggcacgtggggc

SEQ ID NO: 1047854 - DNA, 15 bp, Homo sapiens
agatggcacgtgggg

SEQ ID NO: 1047855 - DNA, 15 bp, Homo sapiens
cagatggcacgtggg

SEQ ID NO: 1047856 - DNA, 15 bp, Homo sapiens
acagatggcacgtgg

SEQ ID NO: 1047857 - DNA, 15 bp, Homo sapiens
aacagatggcacgtg

SEQ ID NO: 1047858 - DNA, 15 bp, Homo sapiens
taacagatggcacgt

SEQ ID NO: 1047859 - DNA, 15 bp, Homo sapiens
ctaacagatggcacg

SEQ ID NO: 1047860 - DNA, 15 bp, Homo sapiens
cctaacagatggcac

SEQ ID NO: 1047861 - DNA, 15 bp, Homo sapiens
gcctaacagatggca

SEQ ID NO: 1047862 - DNA, 15 bp, Homo sapiens
tgcctaacagatggc

SEQ ID NO: 1047863 - DNA, 15 bp, Homo sapiens
gtgcctaacagatgg

SEQ ID NO: 1047864 - DNA, 15 bp, Homo sapiens
ggtgcctaacagatg

SEQ ID NO: 1047865 - DNA, 15 bp, Homo sapiens
aggtgcctaacagat

SEQ ID NO: 1047866 - DNA, 15 bp, Homo sapiens
aaggtgcctaacaga

SEQ ID NO: 1047867 - DNA, 15 bp, Homo sapiens
aaaggtgcctaacag

SEQ ID NO: 1047868 - DNA, 15 bp, Homo sapiens
gaaaggtgcctaaca

SEQ ID NO: 1047869 - DNA, 15 bp, Homo sapiens
agaaaggtgcctaac

SEQ ID NO: 1047870 - DNA, 15 bp, Homo sapiens
cagaaaggtgcctaa

SEQ ID NO: 1047871 - DNA, 15 bp, Homo sapiens
gcagaaaggtgccta

SEQ ID NO: 1047872 - DNA, 15 bp, Homo sapiens
agcagaaaggtgcct

SEQ ID NO: 1047873 - DNA, 15 bp, Homo sapiens
gagcagaaaggtgcc

SEQ ID NO: 1047874 - DNA, 15 bp, Homo sapiens
ggagcagaaaggtgc

SEQ ID NO: 1047875 - DNA, 15 bp, Homo sapiens
gggagcagaaaggtg

SEQ ID NO: 1047876 - DNA, 15 bp, Homo sapiens
agggagcagaaaggt

SEQ ID NO: 1047877 - DNA, 15 bp, Homo sapiens
gagggagcagaaagg

SEQ ID NO: 1047878 - DNA, 15 bp, Homo sapiens
agagggagcagaaag

SEQ ID NO: 1047879 - DNA, 15 bp, Homo sapiens
cagagggagcagaaa

SEQ ID NO: 1047880 - DNA, 15 bp, Homo sapiens
gcagagggagcagaa

SEQ ID NO: 1047881 - DNA, 15 bp, Homo sapiens
agcagagggagcaga

SEQ ID NO: 1047882 - DNA, 15 bp, Homo sapiens
aagcagagggagcag

SEQ ID NO: 1047883 - DNA, 15 bp, Homo sapiens
caagcagagggagca

SEQ ID NO: 1047884 - DNA, 15 bp, Homo sapiens
acaagcagagggagc

SEQ ID NO: 1047885 - DNA, 15 bp, Homo sapiens
cacaagcagagggag

SEQ ID NO: 1047886 - DNA, 15 bp, Homo sapiens
acacaagcagaggga

SEQ ID NO: 1047887 - DNA, 15 bp, Homo sapiens
cacacaagcagaggg

SEQ ID NO: 1047888 - DNA, 15 bp, Homo sapiens
acacacaagcagagg

SEQ ID NO: 1047889 - DNA, 15 bp, Homo sapiens
gacacacaagcagag

SEQ ID NO: 1047890 - DNA, 15 bp, Homo sapiens
tgacacacaagcaga

SEQ ID NO: 1047891 - DNA, 15 bp, Homo sapiens
atgacacacaagcag

SEQ ID NO: 1047892 - DNA, 15 bp, Homo sapiens
catgacacacaagca

SEQ ID NO: 1047893 - DNA, 15 bp, Homo sapiens
gcatgacacacaagc

SEQ ID NO: 1047894 - DNA, 15 bp, Homo sapiens
agcatgacacacaag

SEQ ID NO: 1047895 - DNA, 15 bp, Homo sapiens
aagcatgacacacaa

SEQ ID NO: 1047896 - DNA, 15 bp, Homo sapiens
aaagcatgacacaca

SEQ ID NO: 1047897 - DNA, 15 bp, Homo sapiens
aaaagcatgacacac

SEQ ID NO: 1047898 - DNA, 15 bp, Homo sapiens
caaaagcatgacaca

SEQ ID NO: 1047899 - DNA, 15 bp, Homo sapiens
gcaaaagcatgacac

SEQ ID NO: 1047900 - DNA, 15 bp, Homo sapiens
tgcaaaagcatgaca

SEQ ID NO: 1047901 - DNA, 15 bp, Homo sapiens
gtgcaaaagcatgac

SEQ ID NO: 1047902 - DNA, 15 bp, Homo sapiens
ggtgcaaaagcatga

SEQ ID NO: 1047903 - DNA, 15 bp, Homo sapiens
tggtgcaaaagcatg

SEQ ID NO: 1047904 - DNA, 15 bp, Homo sapiens
gtggtgcaaaagcat

SEQ ID NO: 1047905 - DNA, 15 bp, Homo sapiens
ggtggtgcaaaagca

SEQ ID NO: 1047906 - DNA, 15 bp, Homo sapiens
tggtggtgcaaaagc

SEQ ID NO: 1047907 - DNA, 15 bp, Homo sapiens
gtggtggtgcaaaag

SEQ ID NO: 1047908 - DNA, 15 bp, Homo sapiens
ggtggtggtgcaaaa

SEQ ID NO: 1047909 - DNA, 15 bp, Homo sapiens
aggtggtggtgcaaa

SEQ ID NO: 1047910 - DNA, 15 bp, Homo sapiens
gaggtggtggtgcaa

SEQ ID NO: 1047911 - DNA, 15 bp, Homo sapiens
tgaggtggtggtgca

SEQ ID NO: 1047912 - DNA, 15 bp, Homo sapiens
atgaggtggtggtgc

SEQ ID NO: 1047913 - DNA, 15 bp, Homo sapiens
aatgaggtggtggtg

SEQ ID NO: 1047914 - DNA, 15 bp, Homo sapiens
gaatgaggtggtggt

SEQ ID NO: 1047915 - DNA, 15 bp, Homo sapiens
ggaatgaggtggtgg

SEQ ID NO: 1047916 - DNA, 15 bp, Homo sapiens
aggaatgaggtggtg

SEQ ID NO: 1047917 - DNA, 15 bp, Homo sapiens
caggaatgaggtggt

SEQ ID NO: 1047918 - DNA, 15 bp, Homo sapiens
gcaggaatgaggtgg

SEQ ID NO: 1047919 - DNA, 15 bp, Homo sapiens
ggcaggaatgaggtg

SEQ ID NO: 1047920 - DNA, 15 bp, Homo sapiens
tggcaggaatgaggt

SEQ ID NO: 1047921 - DNA, 15 bp, Homo sapiens
ttggcaggaatgagg

SEQ ID NO: 1047922 - DNA, 15 bp, Homo sapiens
gttggcaggaatgag

SEQ ID NO: 1047923 - DNA, 15 bp, Homo sapiens
cgttggcaggaatga

SEQ ID NO: 1047924 - DNA, 15 bp, Homo sapiens
gcgttggcaggaatg

SEQ ID NO: 1047925 - DNA, 15 bp, Homo sapiens
ggcgttggcaggaat

SEQ ID NO: 1047926 - DNA, 15 bp, Homo sapiens
gggcgttggcaggaa

SEQ ID NO: 1047927 - DNA, 15 bp, Homo sapiens
tgggcgttggcagga

SEQ ID NO: 1047928 - DNA, 15 bp, Homo sapiens
gtgggcgttggcagg

SEQ ID NO: 1047929 - DNA, 15 bp, Homo sapiens
ggtgggcgttggcag

SEQ ID NO: 1047930 - DNA, 15 bp, Homo sapiens
aggtgggcgttggca

SEQ ID NO: 1047931 - DNA, 15 bp, Homo sapiens
caggtgggcgttggc

SEQ ID NO: 1047932 - DNA, 15 bp, Homo sapiens
ccaggtgggcgttgg

SEQ ID NO: 1047933 - DNA, 15 bp, Homo sapiens
accaggtgggcgttg

SEQ ID NO: 1047934 - DNA, 15 bp, Homo sapiens
caccaggtgggcgtt

SEQ ID NO: 1047935 - DNA, 15 bp, Homo sapiens
tcaccaggtgggcgt

SEQ ID NO: 1047936 - DNA, 15 bp, Homo sapiens
ctcaccaggtgggcg

SEQ ID NO: 1047937 - DNA, 15 bp, Homo sapiens
cctcaccaggtgggc

SEQ ID NO: 1047938 - DNA, 15 bp, Homo sapiens
tcctcaccaggtggg

SEQ ID NO: 1047939 - DNA, 15 bp, Homo sapiens
ctcctcaccaggtgg

SEQ ID NO: 1047940 - DNA, 15 bp, Homo sapiens
cctcctcaccaggtg

SEQ ID NO: 1047941 - DNA, 15 bp, Homo sapiens
gcctcctcaccaggt

SEQ ID NO: 1047942 - DNA, 15 bp, Homo sapiens
ggcctcctcaccagg

SEQ ID NO: 1047943 - DNA, 15 bp, Homo sapiens
aggcctcctcaccag

SEQ ID NO: 1047944 - DNA, 15 bp, Homo sapiens
taggcctcctcacca

SEQ ID NO: 1047945 - DNA, 15 bp, Homo sapiens
ataggcctcctcacc

SEQ ID NO: 1047946 - DNA, 15 bp, Homo sapiens
aataggcctcctcac

SEQ ID NO: 1047947 - DNA, 15 bp, Homo sapiens
gaataggcctcctca

SEQ ID NO: 1047948 - DNA, 15 bp, Homo sapiens
agaataggcctcctc

SEQ ID NO: 1047949 - DNA, 15 bp, Homo sapiens
tagaataggcctcct

SEQ ID NO: 1047950 - DNA, 15 bp, Homo sapiens
gtagaataggcctcc

SEQ ID NO: 1047951 - DNA, 15 bp, Homo sapiens
cgtagaataggcctc

SEQ ID NO: 1047952 - DNA, 15 bp, Homo sapiens
tcgtagaataggcct

SEQ ID NO: 1047953 - DNA, 15 bp, Homo sapiens
atcgtagaataggcc

SEQ ID NO: 1047954 - DNA, 15 bp, Homo sapiens
catcgtagaataggc

SEQ ID NO: 1047955 - DNA, 15 bp, Homo sapiens
gcatcgtagaatagg

SEQ ID NO: 1047956 - DNA, 15 bp, Homo sapiens
ggcatcgtagaatag

SEQ ID NO: 1047957 - DNA, 15 bp, Homo sapiens
aggcatcgtagaata

SEQ ID NO: 1047958 - DNA, 15 bp, Homo sapiens
gaggcatcgtagaat

SEQ ID NO: 1047959 - DNA, 15 bp, Homo sapiens
ggaggcatcgtagaa

SEQ ID NO: 1047960 - DNA, 15 bp, Homo sapiens
aggaggcatcgtaga

SEQ ID NO: 1047961 - DNA, 15 bp, Homo sapiens
taggaggcatcgtag

SEQ ID NO: 1047962 - DNA, 15 bp, Homo sapiens
ttaggaggcatcgta

SEQ ID NO: 1047963 - DNA, 15 bp, Homo sapiens
tttaggaggcatcgt

SEQ ID NO: 1047964 - DNA, 15 bp, Homo sapiens
atttaggaggcatcg

SEQ ID NO: 1047965 - DNA, 15 bp, Homo sapiens
catttaggaggcatc

SEQ ID NO: 1047966 - DNA, 15 bp, Homo sapiens
ccatttaggaggcat

SEQ ID NO: 1047967 - DNA, 15 bp, Homo sapiens
cccatttaggaggca

SEQ ID NO: 1047968 - DNA, 15 bp, Homo sapiens
ccccatttaggaggc

SEQ ID NO: 1047969 - DNA, 15 bp, Homo sapiens
gccccatttaggagg

SEQ ID NO: 1047970 - DNA, 15 bp, Homo sapiens
ggccccatttaggag

SEQ ID NO: 1047971 - DNA, 15 bp, Homo sapiens
gggccccatttagga

SEQ ID NO: 1047972 - DNA, 15 bp, Homo sapiens
agggccccatttagg

SEQ ID NO: 1047973 - DNA, 15 bp, Homo sapiens
aagggccccatttag

SEQ ID NO: 1047974 - DNA, 15 bp, Homo sapiens
gaagggccccattta

SEQ ID NO: 1047975 - DNA, 15 bp, Homo sapiens
agaagggccccattt

SEQ ID NO: 1047976 - DNA, 15 bp, Homo sapiens
gagaagggccccatt

SEQ ID NO: 1047977 - DNA, 15 bp, Homo sapiens
ggagaagggccccat

SEQ ID NO: 1047978 - DNA, 15 bp, Homo sapiens
tggagaagggcccca

SEQ ID NO: 1047979 - DNA, 15 bp, Homo sapiens
ttggagaagggcccc

SEQ ID NO: 1047980 - DNA, 15 bp, Homo sapiens
cttggagaagggccc

SEQ ID NO: 1047981 - DNA, 15 bp, Homo sapiens
ccttggagaagggcc

SEQ ID NO: 1047982 - DNA, 15 bp, Homo sapiens
tccttggagaagggc

SEQ ID NO: 1047983 - DNA, 15 bp, Homo sapiens
ctccttggagaaggg

SEQ ID NO: 1047984 - DNA, 15 bp, Homo sapiens
gctccttggagaagg

SEQ ID NO: 1047985 - DNA, 15 bp, Homo sapiens
agctccttggagaag

SEQ ID NO: 1047986 - DNA, 15 bp, Homo sapiens
gagctccttggagaa

SEQ ID NO: 1047987 - DNA, 15 bp, Homo sapiens
ggagctccttggaga

SEQ ID NO: 1047988 - DNA, 15 bp, Homo sapiens
gggagctccttggag

SEQ ID NO: 1047989 - DNA, 15 bp, Homo sapiens
tgggagctccttgga

SEQ ID NO: 1047990 - DNA, 15 bp, Homo sapiens
ttgggagctccttgg

SEQ ID NO: 1047991 - DNA, 15 bp, Homo sapiens
attgggagctccttg

SEQ ID NO: 1047992 - DNA, 15 bp, Homo sapiens
cattgggagctcctt

SEQ ID NO: 1047993 - DNA, 15 bp, Homo sapiens
gcattgggagctcct

SEQ ID NO: 1047994 - DNA, 15 bp, Homo sapiens
agcattgggagctcc

SEQ ID NO: 1047995 - DNA, 15 bp, Homo sapiens
aagcattgggagctc

SEQ ID NO: 1047996 - DNA, 15 bp, Homo sapiens
caagcattgggagct

SEQ ID NO: 1047997 - DNA, 15 bp, Homo sapiens
acaagcattgggagc

SEQ ID NO: 1047998 - DNA, 15 bp, Homo sapiens
aacaagcattgggag

SEQ ID NO: 1047999 - DNA, 15 bp, Homo sapiens
caacaagcattggga

SEQ ID NO: 1048000 - DNA, 15 bp, Homo sapiens
tcaacaagcattggg

SEQ ID NO: 1048001 - DNA, 15 bp, Homo sapiens
ttcaacaagcattgg

SEQ ID NO: 1048002 - DNA, 15 bp, Homo sapiens
cttcaacaagcattg

SEQ ID NO: 1048003 - DNA, 15 bp, Homo sapiens
tcttcaacaagcatt

SEQ ID NO: 1048004 - DNA, 15 bp, Homo sapiens
atcttcaacaagcat

SEQ ID NO: 1048005 - DNA, 15 bp, Homo sapiens
gatcttcaacaagca

SEQ ID NO: 1048006 - DNA, 15 bp, Homo sapiens
ggatcttcaacaagc

SEQ ID NO: 1048007 - DNA, 15 bp, Homo sapiens
tggatcttcaacaag

SEQ ID NO: 1048008 - DNA, 15 bp, Homo sapiens
ctggatcttcaacaa

SEQ ID NO: 1048009 - DNA, 15 bp, Homo sapiens
tctggatcttcaaca

SEQ ID NO: 1048010 - DNA, 15 bp, Homo sapiens
atctggatcttcaac

SEQ ID NO: 1048011 - DNA, 15 bp, Homo sapiens
gatctggatcttcaa

SEQ ID NO: 1048012 - DNA, 15 bp, Homo sapiens
ggatctggatcttca

SEQ ID NO: 1048013 - DNA, 15 bp, Homo sapiens
gggatctggatcttc

SEQ ID NO: 1048014 - DNA, 15 bp, Homo sapiens
tgggatctggatctt

SEQ ID NO: 1048015 - DNA, 15 bp, Homo sapiens
gtgggatctggatct

SEQ ID NO: 1048016 - DNA, 15 bp, Homo sapiens
agtgggatctggatc

SEQ ID NO: 1048017 - DNA, 15 bp, Homo sapiens
cagtgggatctggat

SEQ ID NO: 1048018 - DNA, 15 bp, Homo sapiens
ccagtgggatctgga

SEQ ID NO: 1048019 - DNA, 15 bp, Homo sapiens
accagtgggatctgg

SEQ ID NO: 1048020 - DNA, 15 bp, Homo sapiens
caccagtgggatctg

SEQ ID NO: 1048021 - DNA, 15 bp, Homo sapiens
ccaccagtgggatct

SEQ ID NO: 1048022 - DNA, 15 bp, Homo sapiens
tccaccagtgggatc

SEQ ID NO: 1048023 - DNA, 15 bp, Homo sapiens
ctccaccagtgggat

SEQ ID NO: 1048024 - DNA, 15 bp, Homo sapiens
tctccaccagtggga

SEQ ID NO: 1048025 - DNA, 15 bp, Homo sapiens
atctccaccagtggg

SEQ ID NO: 1048026 - DNA, 15 bp, Homo sapiens
aatctccaccagtgg

SEQ ID NO: 1048027 - DNA, 15 bp, Homo sapiens
gaatctccaccagtg

SEQ ID NO: 1048028 - DNA, 15 bp, Homo sapiens
ggaatctccaccagt

SEQ ID NO: 1048029 - DNA, 15 bp, Homo sapiens
aggaatctccaccag

SEQ ID NO: 1048030 - DNA, 15 bp, Homo sapiens
aaggaatctccacca

SEQ ID NO: 1048031 - DNA, 15 bp, Homo sapiens
aaaggaatctccacc

SEQ ID NO: 1048032 - DNA, 15 bp, Homo sapiens
aaaaggaatctccac

SEQ ID NO: 1048033 - DNA, 15 bp, Homo sapiens
aaaaaggaatctcca

SEQ ID NO: 1048034 - DNA, 15 bp, Homo sapiens
aaaaaaggaatctcc

SEQ ID NO: 1048035 - DNA, 15 bp, Homo sapiens
aaaaaaaggaatctc

SEQ ID NO: 1048036 - DNA, 15 bp, Homo sapiens
aaaaaaaaggaatct

SEQ ID NO: 1048037 - DNA, 15 bp, Homo sapiens
aaaaaaaaaggaatc

SEQ ID NO: 1048038 - DNA, 15 bp, Homo sapiens
ctgtaccactgcact

SEQ ID NO: 1048039 - DNA, 15 bp, Homo sapiens
actgtaccactgcac

SEQ ID NO: 1048040 - DNA, 15 bp, Homo sapiens
gactgtaccactgca

SEQ ID NO: 1048041 - DNA, 15 bp, Homo sapiens
agactgtaccactgc

SEQ ID NO: 1048042 - DNA, 15 bp, Homo sapiens
aagactgtaccactg

SEQ ID NO: 1048043 - DNA, 15 bp, Homo sapiens
caagactgtaccact

SEQ ID NO: 1048044 - DNA, 15 bp, Homo sapiens
ccaagactgtaccac

SEQ ID NO: 1048045 - DNA, 15 bp, Homo sapiens
gccaagactgtacca

SEQ ID NO: 1048046 - DNA, 15 bp, Homo sapiens
agccaagactgtacc

SEQ ID NO: 1048047 - DNA, 15 bp, Homo sapiens
gagccaagactgtac

SEQ ID NO: 1048048 - DNA, 15 bp, Homo sapiens
tgagccaagactgta

SEQ ID NO: 1048049 - DNA, 15 bp, Homo sapiens
agaggttgtagtgag

SEQ ID NO: 1048050 - DNA, 15 bp, Homo sapiens
cagaggttgtagtga

SEQ ID NO: 1048051 - DNA, 15 bp, Homo sapiens
gcagaggttgtagtg

SEQ ID NO: 1048052 - DNA, 15 bp, Homo sapiens
atactcaggaggctg

SEQ ID NO: 1048053 - DNA, 15 bp, Homo sapiens
gatactcaggaggct

SEQ ID NO: 1048054 - DNA, 15 bp, Homo sapiens
agatactcaggaggc

SEQ ID NO: 1048055 - DNA, 15 bp, Homo sapiens
cagatactcaggagg

SEQ ID NO: 1048056 - DNA, 15 bp, Homo sapiens
ccagatactcaggag

SEQ ID NO: 1048057 - DNA, 15 bp, Homo sapiens
cccagatactcagga

SEQ ID NO: 1048058 - DNA, 15 bp, Homo sapiens
tcccagatactcagg

SEQ ID NO: 1048059 - DNA, 15 bp, Homo sapiens
atcccagatactcag

SEQ ID NO: 1048060 - DNA, 15 bp, Homo sapiens
aatcccagatactca

SEQ ID NO: 1048061 - DNA, 15 bp, Homo sapiens
taatcccagatactc

SEQ ID NO: 1048062 - DNA, 15 bp, Homo sapiens
gtaatcccagatact

SEQ ID NO: 1048063 - DNA, 15 bp, Homo sapiens
tgtaatcccagatac

SEQ ID NO: 1048064 - DNA, 15 bp, Homo sapiens
ttgtaatcccagata

SEQ ID NO: 1048065 - DNA, 15 bp, Homo sapiens
cttgtaatcccagat

SEQ ID NO: 1048066 - DNA, 15 bp, Homo sapiens
gcttgtaatcccaga

SEQ ID NO: 1048067 - DNA, 15 bp, Homo sapiens
gtgcttgtaatccca

SEQ ID NO: 1048068 - DNA, 15 bp, Homo sapiens
tgtgcttgtaatccc

SEQ ID NO: 1048069 - DNA, 15 bp, Homo sapiens
atgtgcttgtaatcc

SEQ ID NO: 1048070 - DNA, 15 bp, Homo sapiens
catgtgcttgtaatc

SEQ ID NO: 1048071 - DNA, 15 bp, Homo sapiens
ccatgtgcttgtaat

SEQ ID NO: 1048072 - DNA, 15 bp, Homo sapiens
gccatgtgcttgtaa

SEQ ID NO: 1048073 - DNA, 15 bp, Homo sapiens
tgccatgtgcttgta

SEQ ID NO: 1048074 - DNA, 15 bp, Homo sapiens
gtgccatgtgcttgt

SEQ ID NO: 1048075 - DNA, 15 bp, Homo sapiens
ggtgccatgtgcttg

SEQ ID NO: 1048076 - DNA, 15 bp, Homo sapiens
tggtgccatgtgctt

SEQ ID NO: 1048077 - DNA, 15 bp, Homo sapiens
gtggtgccatgtgct

SEQ ID NO: 1048078 - DNA, 15 bp, Homo sapiens
tgtggtgccatgtgc

SEQ ID NO: 1048079 - DNA, 15 bp, Homo sapiens
gtgtggtgccatgtg

SEQ ID NO: 1048080 - DNA, 15 bp, Homo sapiens
ggtgtggtgccatgt

SEQ ID NO: 1048081 - DNA, 15 bp, Homo sapiens
ttatttctattgcac

SEQ ID NO: 1048082 - DNA, 15 bp, Homo sapiens
gttatttctattgca

SEQ ID NO: 1048083 - DNA, 15 bp, Homo sapiens
agttatttctattgc

SEQ ID NO: 1048084 - DNA, 15 bp, Homo sapiens
gagttatttctattg

SEQ ID NO: 1048085 - DNA, 15 bp, Homo sapiens
tgagttatttctatt

SEQ ID NO: 1048086 - DNA, 15 bp, Homo sapiens
gtgagttatttctat

SEQ ID NO: 1048087 - DNA, 15 bp, Homo sapiens
agtgagttatttcta

SEQ ID NO: 1048088 - DNA, 15 bp, Homo sapiens
cagtgagttatttct

SEQ ID NO: 1048089 - DNA, 15 bp, Homo sapiens
tcagtgagttatttc

SEQ ID NO: 1048090 - DNA, 15 bp, Homo sapiens
ctcagtgagttattt

SEQ ID NO: 1048091 - DNA, 15 bp, Homo sapiens
tctcagtgagttatt

SEQ ID NO: 1048092 - DNA, 15 bp, Homo sapiens
ttctcagtgagttat

SEQ ID NO: 1048093 - DNA, 15 bp, Homo sapiens
tttctcagtgagtta

SEQ ID NO: 1048094 - DNA, 15 bp, Homo sapiens
ctttctcagtgagtt

SEQ ID NO: 1048095 - DNA, 15 bp, Homo sapiens
gctttctcagtgagt

SEQ ID NO: 1048096 - DNA, 15 bp, Homo sapiens
tgctttctcagtgag

SEQ ID NO: 1048097 - DNA, 15 bp, Homo sapiens
atgctttctcagtga

SEQ ID NO: 1048098 - DNA, 15 bp, Homo sapiens
aatgctttctcagtg

SEQ ID NO: 1048099 - DNA, 15 bp, Homo sapiens
aaatgctttctcagt

SEQ ID NO: 1048100 - DNA, 15 bp, Homo sapiens
caaatgctttctcag

SEQ ID NO: 1048101 - DNA, 15 bp, Homo sapiens
gcaaatgctttctca

SEQ ID NO: 1048102 - DNA, 15 bp, Homo sapiens
agcaaatgctttctc

SEQ ID NO: 1048103 - DNA, 15 bp, Homo sapiens
cagcaaatgctttct

SEQ ID NO: 1048104 - DNA, 15 bp, Homo sapiens
gcagcaaatgctttc

SEQ ID NO: 1048105 - DNA, 15 bp, Homo sapiens
agcagcaaatgcttt

SEQ ID NO: 1048106 - DNA, 15 bp, Homo sapiens
gagcagcaaatgctt

SEQ ID NO: 1048107 - DNA, 15 bp, Homo sapiens
tgagcagcaaatgct

SEQ ID NO: 1048108 - DNA, 15 bp, Homo sapiens
gtgagcagcaaatgc

SEQ ID NO: 1048109 - DNA, 15 bp, Homo sapiens
ggtgagcagcaaatg

SEQ ID NO: 1048110 - DNA, 15 bp, Homo sapiens
aggtgagcagcaaat

SEQ ID NO: 1048111 - DNA, 15 bp, Homo sapiens
gaggtgagcagcaaa

SEQ ID NO: 1048112 - DNA, 15 bp, Homo sapiens
ggaggtgagcagcaa

SEQ ID NO: 1048113 - DNA, 15 bp, Homo sapiens
aggaggtgagcagca

SEQ ID NO: 1048114 - DNA, 15 bp, Homo sapiens
caggaggtgagcagc

SEQ ID NO: 1048115 - DNA, 15 bp, Homo sapiens
acaggaggtgagcag

SEQ ID NO: 1048116 - DNA, 15 bp, Homo sapiens
tacaggaggtgagca

SEQ ID NO: 1048117 - DNA, 15 bp, Homo sapiens
ttacaggaggtgagc

SEQ ID NO: 1048118 - DNA, 15 bp, Homo sapiens
cttacaggaggtgag

SEQ ID NO: 1048119 - DNA, 15 bp, Homo sapiens
tcttacaggaggtga

SEQ ID NO: 1048120 - DNA, 15 bp, Homo sapiens
ttcttacaggaggtg

SEQ ID NO: 1048121 - DNA, 15 bp, Homo sapiens
attcttacaggaggt

SEQ ID NO: 1048122 - DNA, 15 bp, Homo sapiens
tattcttacaggagg

SEQ ID NO: 1048123 - DNA, 15 bp, Homo sapiens
gtattcttacaggag

SEQ ID NO: 1048124 - DNA, 15 bp, Homo sapiens
agtattcttacagga

SEQ ID NO: 1048125 - DNA, 15 bp, Homo sapiens
tagtattcttacagg

SEQ ID NO: 1048126 - DNA, 15 bp, Homo sapiens
ctagtattcttacag

SEQ ID NO: 1048127 - DNA, 15 bp, Homo sapiens
cctagtattcttaca

SEQ ID NO: 1048128 - DNA, 15 bp, Homo sapiens
ccctagtattcttac

SEQ ID NO: 1048129 - DNA, 15 bp, Homo sapiens
accctagtattctta

SEQ ID NO: 1048130 - DNA, 15 bp, Homo sapiens
aaccctagtattctt

SEQ ID NO: 1048131 - DNA, 15 bp, Homo sapiens
taaccctagtattct

SEQ ID NO: 1048132 - DNA, 15 bp, Homo sapiens
ttaaccctagtattc

SEQ ID NO: 1048133 - DNA, 15 bp, Homo sapiens
tttaaccctagtatt

SEQ ID NO: 1048134 - DNA, 15 bp, Homo sapiens
gtttaaccctagtat

SEQ ID NO: 1048135 - DNA, 15 bp, Homo sapiens
tgtttaaccctagta

SEQ ID NO: 1048136 - DNA, 15 bp, Homo sapiens
ttgtttaaccctagt

SEQ ID NO: 1048137 - DNA, 15 bp, Homo sapiens
tttgtttaaccctag

SEQ ID NO: 1048138 - DNA, 15 bp, Homo sapiens
ctttgtttaacccta

SEQ ID NO: 1048139 - DNA, 15 bp, Homo sapiens
tctttgtttaaccct

SEQ ID NO: 1048140 - DNA, 15 bp, Homo sapiens
ttctttgtttaaccc

SEQ ID NO: 1048141 - DNA, 15 bp, Homo sapiens
tttctttgtttaacc

SEQ ID NO: 1048142 - DNA, 15 bp, Homo sapiens
ctttctttgtttaac

SEQ ID NO: 1048143 - DNA, 15 bp, Homo sapiens
actttctttgtttaa

SEQ ID NO: 1048144 - DNA, 15 bp, Homo sapiens
cactttctttgttta

SEQ ID NO: 1048145 - DNA, 15 bp, Homo sapiens
tcactttctttgttt

SEQ ID NO: 1048146 - DNA, 15 bp, Homo sapiens
atcactttctttgtt

SEQ ID NO: 1048147 - DNA, 15 bp, Homo sapiens
catcactttctttgt

SEQ ID NO: 1048148 - DNA, 15 bp, Homo sapiens
tcatcactttctttg

SEQ ID NO: 1048149 - DNA, 15 bp, Homo sapiens
gtcatcactttcttt

SEQ ID NO: 1048150 - DNA, 15 bp, Homo sapiens
agtcatcactttctt

SEQ ID NO: 1048151 - DNA, 15 bp, Homo sapiens
tagtcatcactttct

SEQ ID NO: 1048152 - DNA, 15 bp, Homo sapiens
atagtcatcactttc

SEQ ID NO: 1048153 - DNA, 15 bp, Homo sapiens
gatagtcatcacttt

SEQ ID NO: 1048154 - DNA, 15 bp, Homo sapiens
ggatagtcatcactt

SEQ ID NO: 1048155 - DNA, 15 bp, Homo sapiens
aggatagtcatcact

SEQ ID NO: 1048156 - DNA, 15 bp, Homo sapiens
gaggatagtcatcac

SEQ ID NO: 1048157 - DNA, 15 bp, Homo sapiens
agaggatagtcatca

SEQ ID NO: 1048158 - DNA, 15 bp, Homo sapiens
gagaggatagtcatc

SEQ ID NO: 1048159 - DNA, 15 bp, Homo sapiens
tgagaggatagtcat

SEQ ID NO: 1048160 - DNA, 15 bp, Homo sapiens
ttgagaggatagtca

SEQ ID NO: 1048161 - DNA, 15 bp, Homo sapiens
cttgagaggatagtc

SEQ ID NO: 1048162 - DNA, 15 bp, Homo sapiens
tcttgagaggatagt

SEQ ID NO: 1048163 - DNA, 15 bp, Homo sapiens
ttcttgagaggatag

SEQ ID NO: 1048164 - DNA, 15 bp, Homo sapiens
gttcttgagaggata

SEQ ID NO: 1048165 - DNA, 15 bp, Homo sapiens
agttcttgagaggat

SEQ ID NO: 1048166 - DNA, 15 bp, Homo sapiens
gagttcttgagagga

SEQ ID NO: 1048167 - DNA, 15 bp, Homo sapiens
tgagttcttgagagg

SEQ ID NO: 1048168 - DNA, 15 bp, Homo sapiens
ctgagttcttgagag

SEQ ID NO: 1048169 - DNA, 15 bp, Homo sapiens
gctgagttcttgaga

SEQ ID NO: 1048170 - DNA, 15 bp, Homo sapiens
tgctgagttcttgag

SEQ ID NO: 1048171 - DNA, 15 bp, Homo sapiens
ctgctgagttcttga

SEQ ID NO: 1048172 - DNA, 15 bp, Homo sapiens
actgctgagttcttg

SEQ ID NO: 1048173 - DNA, 15 bp, Homo sapiens
gactgctgagttctt

SEQ ID NO: 1048174 - DNA, 15 bp, Homo sapiens
tgactgctgagttct

SEQ ID NO: 1048175 - DNA, 15 bp, Homo sapiens
ctgactgctgagttc

SEQ ID NO: 1048176 - DNA, 15 bp, Homo sapiens
cctgactgctgagtt

SEQ ID NO: 1048177 - DNA, 15 bp, Homo sapiens
ccctgactgctgagt

SEQ ID NO: 1048178 - DNA, 15 bp, Homo sapiens
cccctgactgctgag

SEQ ID NO: 1048179 - DNA, 15 bp, Homo sapiens
ccccctgactgctga

SEQ ID NO: 1048180 - DNA, 15 bp, Homo sapiens
gccccctgactgctg

SEQ ID NO: 1048181 - DNA, 15 bp, Homo sapiens
cgccccctgactgct

SEQ ID NO: 1048182 - DNA, 15 bp, Homo sapiens
gcgccccctgactgc

SEQ ID NO: 1048183 - DNA, 15 bp, Homo sapiens
tgcgccccctgactg

SEQ ID NO: 1048184 - DNA, 15 bp, Homo sapiens
ctgcgccccctgact

SEQ ID NO: 1048185 - DNA, 15 bp, Homo sapiens
cctgcgccccctgac

SEQ ID NO: 1048186 - DNA, 15 bp, Homo sapiens
gcctgcgccccctga

SEQ ID NO: 1048187 - DNA, 15 bp, Homo sapiens
ggcctgcgccccctg

SEQ ID NO: 1048188 - DNA, 15 bp, Homo sapiens
tggcctgcgccccct

SEQ ID NO: 1048189 - DNA, 15 bp, Homo sapiens
ttggcctgcgccccc

SEQ ID NO: 1048190 - DNA, 15 bp, Homo sapiens
cttggcctgcgcccc

SEQ ID NO: 1048191 - DNA, 15 bp, Homo sapiens
gcttggcctgcgccc

SEQ ID NO: 1048192 - DNA, 15 bp, Homo sapiens
agcttggcctgcgcc

SEQ ID NO: 1048193 - DNA, 15 bp, Homo sapiens
cagcttggcctgcgc

SEQ ID NO: 1048194 - DNA, 15 bp, Homo sapiens
tcagcttggcctgcg

SEQ ID NO: 1048195 - DNA, 15 bp, Homo sapiens
ctcagcttggcctgc

SEQ ID NO: 1048196 - DNA, 15 bp, Homo sapiens
tctcagcttggcctg

SEQ ID NO: 1048197 - DNA, 15 bp, Homo sapiens
ttctcagcttggcct

SEQ ID NO: 1048198 - DNA, 15 bp, Homo sapiens
attctcagcttggcc

SEQ ID NO: 1048199 - DNA, 15 bp, Homo sapiens
gattctcagcttggc

SEQ ID NO: 1048200 - DNA, 15 bp, Homo sapiens
tgattctcagcttgg

SEQ ID NO: 1048201 - DNA, 15 bp, Homo sapiens
ctgattctcagcttg

SEQ ID NO: 1048202 - DNA, 15 bp, Homo sapiens
tctgattctcagctt

SEQ ID NO: 1048203 - DNA, 15 bp, Homo sapiens
gtctgattctcagct

SEQ ID NO: 1048204 - DNA, 15 bp, Homo sapiens
tgtctgattctcagc

SEQ ID NO: 1048205 - DNA, 15 bp, Homo sapiens
ctgtctgattctcag

SEQ ID NO: 1048206 - DNA, 15 bp, Homo sapiens
actgtctgattctca

SEQ ID NO: 1048207 - DNA, 15 bp, Homo sapiens
cactgtctgattctc

SEQ ID NO: 1048208 - DNA, 15 bp, Homo sapiens
acactgtctgattct

SEQ ID NO: 1048209 - DNA, 15 bp, Homo sapiens
cacactgtctgattc

SEQ ID NO: 1048210 - DNA, 15 bp, Homo sapiens
tcacactgtctgatt

SEQ ID NO: 1048211 - DNA, 15 bp, Homo sapiens
gtcacactgtctgat

SEQ ID NO: 1048212 - DNA, 15 bp, Homo sapiens
tgtcacactgtctga

SEQ ID NO: 1048213 - DNA, 15 bp, Homo sapiens
ttgtcacactgtctg

SEQ ID NO: 1048214 - DNA, 15 bp, Homo sapiens
cttgtcacactgtct

SEQ ID NO: 1048215 - DNA, 15 bp, Homo sapiens
acttgtcacactgtc

SEQ ID NO: 1048216 - DNA, 15 bp, Homo sapiens
gacttgtcacactgt

SEQ ID NO: 1048217 - DNA, 15 bp, Homo sapiens
ggacttgtcacactg

SEQ ID NO: 1048218 - DNA, 15 bp, Homo sapiens
aggacttgtcacact

SEQ ID NO: 1048219 - DNA, 15 bp, Homo sapiens
aaggacttgtcacac

SEQ ID NO: 1048220 - DNA, 15 bp, Homo sapiens
taaggacttgtcaca

SEQ ID NO: 1048221 - DNA, 15 bp, Homo sapiens
ataaggacttgtcac

SEQ ID NO: 1048222 - DNA, 15 bp, Homo sapiens
tataaggacttgtca

SEQ ID NO: 1048223 - DNA, 15 bp, Homo sapiens
ttataaggacttgtc

SEQ ID NO: 1048224 - DNA, 15 bp, Homo sapiens
gttataaggacttgt

SEQ ID NO: 1048225 - DNA, 15 bp, Homo sapiens
ggttataaggacttg

SEQ ID NO: 1048226 - DNA, 15 bp, Homo sapiens
tggttataaggactt

SEQ ID NO: 1048227 - DNA, 15 bp, Homo sapiens
ttggttataaggact

SEQ ID NO: 1048228 - DNA, 15 bp, Homo sapiens
cttggttataaggac

SEQ ID NO: 1048229 - DNA, 15 bp, Homo sapiens
ccttggttataagga

SEQ ID NO: 1048230 - DNA, 15 bp, Homo sapiens
gccttggttataagg

SEQ ID NO: 1048231 - DNA, 15 bp, Homo sapiens
cgccttggttataag

SEQ ID NO: 1048232 - DNA, 15 bp, Homo sapiens
ccgccttggttataa

SEQ ID NO: 1048233 - DNA, 15 bp, Homo sapiens
cccgccttggttata

SEQ ID NO: 1048234 - DNA, 15 bp, Homo sapiens
gcccgccttggttat

SEQ ID NO: 1048235 - DNA, 15 bp, Homo sapiens
tgcccgccttggtta

SEQ ID NO: 1048236 - DNA, 15 bp, Homo sapiens
gtgcccgccttggtt

SEQ ID NO: 1048237 - DNA, 15 bp, Homo sapiens
ggtgcccgccttggt

SEQ ID NO: 1048238 - DNA, 15 bp, Homo sapiens
tggtgcccgccttgg

SEQ ID NO: 1048239 - DNA, 15 bp, Homo sapiens
ttggtgcccgccttg

SEQ ID NO: 1048240 - DNA, 15 bp, Homo sapiens
cttggtgcccgcctt

SEQ ID NO: 1048241 - DNA, 15 bp, Homo sapiens
acttggtgcccgcct

SEQ ID NO: 1048242 - DNA, 15 bp, Homo sapiens
cacttggtgcccgcc

SEQ ID NO: 1048243 - DNA, 15 bp, Homo sapiens
gcacttggtgcccgc

SEQ ID NO: 1048244 - DNA, 15 bp, Homo sapiens
agcacttggtgcccg

SEQ ID NO: 1048245 - DNA, 15 bp, Homo sapiens
cagcacttggtgccc

SEQ ID NO: 1048246 - DNA, 15 bp, Homo sapiens
ccagcacttggtgcc

SEQ ID NO: 1048247 - DNA, 15 bp, Homo sapiens
cccagcacttggtgc

SEQ ID NO: 1048248 - DNA, 15 bp, Homo sapiens
ccccagcacttggtg

SEQ ID NO: 1048249 - DNA, 15 bp, Homo sapiens
cccccagcacttggt

SEQ ID NO: 1048250 - DNA, 15 bp, Homo sapiens
tcccccagcacttgg

SEQ ID NO: 1048251 - DNA, 15 bp, Homo sapiens
gtcccccagcacttg

SEQ ID NO: 1048252 - DNA, 15 bp, Homo sapiens
agtcccccagcactt

SEQ ID NO: 1048253 - DNA, 15 bp, Homo sapiens
cagtcccccagcact

SEQ ID NO: 1048254 - DNA, 15 bp, Homo sapiens
acagtcccccagcac

SEQ ID NO: 1048255 - DNA, 15 bp, Homo sapiens
cacagtcccccagca

SEQ ID NO: 1048256 - DNA, 15 bp, Homo sapiens
ccacagtcccccagc

SEQ ID NO: 1048257 - DNA, 15 bp, Homo sapiens
cccacagtcccccag

SEQ ID NO: 1048258 - DNA, 15 bp, Homo sapiens
ccccacagtccccca

SEQ ID NO: 1048259 - DNA, 15 bp, Homo sapiens
tccccacagtccccc

SEQ ID NO: 1048260 - DNA, 15 bp, Homo sapiens
ttccccacagtcccc

SEQ ID NO: 1048261 - DNA, 15 bp, Homo sapiens
cttccccacagtccc

SEQ ID NO: 1048262 - DNA, 15 bp, Homo sapiens
ccttccccacagtcc

SEQ ID NO: 1048263 - DNA, 15 bp, Homo sapiens
gccttccccacagtc

SEQ ID NO: 1048264 - DNA, 15 bp, Homo sapiens
cgccttccccacagt

SEQ ID NO: 1048265 - DNA, 15 bp, Homo sapiens
acgccttccccacag

SEQ ID NO: 1048266 - DNA, 15 bp, Homo sapiens
cacgccttccccaca

SEQ ID NO: 1048267 - DNA, 15 bp, Homo sapiens
acacgccttccccac

SEQ ID NO: 1048268 - DNA, 15 bp, Homo sapiens
gacacgccttcccca

SEQ ID NO: 1048269 - DNA, 15 bp, Homo sapiens
agacacgccttcccc

SEQ ID NO: 1048270 - DNA, 15 bp, Homo sapiens
cagacacgccttccc

SEQ ID NO: 1048271 - DNA, 15 bp, Homo sapiens
ccagacacgccttcc

SEQ ID NO: 1048272 - DNA, 15 bp, Homo sapiens
cccagacacgccttc

SEQ ID NO: 1048273 - DNA, 15 bp, Homo sapiens
tcccagacacgcctt

SEQ ID NO: 1048274 - DNA, 15 bp, Homo sapiens
ctcccagacacgcct

SEQ ID NO: 1048275 - DNA, 15 bp, Homo sapiens
gctcccagacacgcc

SEQ ID NO: 1048276 - DNA, 15 bp, Homo sapiens
tgctcccagacacgc

SEQ ID NO: 1048277 - DNA, 15 bp, Homo sapiens
atgctcccagacacg

SEQ ID NO: 1048278 - DNA, 15 bp, Homo sapiens
catgctcccagacac

SEQ ID NO: 1048279 - DNA, 15 bp, Homo sapiens
ccatgctcccagaca

SEQ ID NO: 1048280 - DNA, 15 bp, Homo sapiens
tccatgctcccagac

SEQ ID NO: 1048281 - DNA, 15 bp, Homo sapiens
gtccatgctcccaga

SEQ ID NO: 1048282 - DNA, 15 bp, Homo sapiens
agtccatgctcccag

SEQ ID NO: 1048283 - DNA, 15 bp, Homo sapiens
tagtccatgctccca

SEQ ID NO: 1048284 - DNA, 15 bp, Homo sapiens
ctagtccatgctccc

SEQ ID NO: 1048285 - DNA, 15 bp, Homo sapiens
cctagtccatgctcc

SEQ ID NO: 1048286 - DNA, 15 bp, Homo sapiens
acctagtccatgctc

SEQ ID NO: 1048287 - DNA, 15 bp, Homo sapiens
aacctagtccatgct

SEQ ID NO: 1048288 - DNA, 15 bp, Homo sapiens
caacctagtccatgc

SEQ ID NO: 1048289 - DNA, 15 bp, Homo sapiens
gcaacctagtccatg

SEQ ID NO: 1048290 - DNA, 15 bp, Homo sapiens
ggcaacctagtccat

SEQ ID NO: 1048291 - DNA, 15 bp, Homo sapiens
aggcaacctagtcca

SEQ ID NO: 1048292 - DNA, 15 bp, Homo sapiens
caggcaacctagtcc

SEQ ID NO: 1048293 - DNA, 15 bp, Homo sapiens
ccaggcaacctagtc

SEQ ID NO: 1048294 - DNA, 15 bp, Homo sapiens
gccaggcaacctagt

SEQ ID NO: 1048295 - DNA, 15 bp, Homo sapiens
tgccaggcaacctag

SEQ ID NO: 1048296 - DNA, 15 bp, Homo sapiens
ctgccaggcaaccta

SEQ ID NO: 1048297 - DNA, 15 bp, Homo sapiens
actgccaggcaacct

SEQ ID NO: 1048298 - DNA, 15 bp, Homo sapiens
cactgccaggcaacc

SEQ ID NO: 1048299 - DNA, 15 bp, Homo sapiens
tcactgccaggcaac

SEQ ID NO: 1048300 - DNA, 15 bp, Homo sapiens
ctcactgccaggcaa

SEQ ID NO: 1048301 - DNA, 15 bp, Homo sapiens
cctcactgccaggca

SEQ ID NO: 1048302 - DNA, 15 bp, Homo sapiens
gcctcactgccaggc

SEQ ID NO: 1048303 - DNA, 15 bp, Homo sapiens
agcctcactgccagg

SEQ ID NO: 1048304 - DNA, 15 bp, Homo sapiens
tagcctcactgccag

SEQ ID NO: 1048305 - DNA, 15 bp, Homo sapiens
ttagcctcactgcca

SEQ ID NO: 1048306 - DNA, 15 bp, Homo sapiens
tttagcctcactgcc

SEQ ID NO: 1048307 - DNA, 15 bp, Homo sapiens
ttttagcctcactgc

SEQ ID NO: 1048308 - DNA, 15 bp, Homo sapiens
tttttagcctcactg

SEQ ID NO: 1048309 - DNA, 15 bp, Homo sapiens
atttttagcctcact

SEQ ID NO: 1048310 - DNA, 15 bp, Homo sapiens
catttttagcctcac

SEQ ID NO: 1048311 - DNA, 15 bp, Homo sapiens
acatttttagcctca

SEQ ID NO: 1048312 - DNA, 15 bp, Homo sapiens
tacatttttagcctc

SEQ ID NO: 1048313 - DNA, 15 bp, Homo sapiens
ttacatttttagcct

SEQ ID NO: 1048314 - DNA, 15 bp, Homo sapiens
cttacatttttagcc

SEQ ID NO: 1048315 - DNA, 15 bp, Homo sapiens
gcttacatttttagc

SEQ ID NO: 1048316 - DNA, 15 bp, Homo sapiens
agcttacatttttag

SEQ ID NO: 1048317 - DNA, 15 bp, Homo sapiens
cagcttacattttta

SEQ ID NO: 1048318 - DNA, 15 bp, Homo sapiens
gcagcttacattttt

SEQ ID NO: 1048319 - DNA, 15 bp, Homo sapiens
tgcagcttacatttt

SEQ ID NO: 1048320 - DNA, 15 bp, Homo sapiens
ctgcagcttacattt

SEQ ID NO: 1048321 - DNA, 15 bp, Homo sapiens
actgcagcttacatt

SEQ ID NO: 1048322 - DNA, 15 bp, Homo sapiens
gactgcagcttacat

SEQ ID NO: 1048323 - DNA, 15 bp, Homo sapiens
tgactgcagcttaca

SEQ ID NO: 1048324 - DNA, 15 bp, Homo sapiens
ctgactgcagcttac

SEQ ID NO: 1048325 - DNA, 15 bp, Homo sapiens
tctgactgcagctta

SEQ ID NO: 1048326 - DNA, 15 bp, Homo sapiens
gtctgactgcagctt

SEQ ID NO: 1048327 - DNA, 15 bp, Homo sapiens
tgtctgactgcagct

SEQ ID NO: 1048328 - DNA, 15 bp, Homo sapiens
ctgtctgactgcagc

SEQ ID NO: 1048329 - DNA, 15 bp, Homo sapiens
cctgtctgactgcag

SEQ ID NO: 1048330 - DNA, 15 bp, Homo sapiens
ccctgtctgactgca

SEQ ID NO: 1048331 - DNA, 15 bp, Homo sapiens
tccctgtctgactgc

SEQ ID NO: 1048332 - DNA, 15 bp, Homo sapiens
ctccctgtctgactg

SEQ ID NO: 1048333 - DNA, 15 bp, Homo sapiens
cctccctgtctgact

SEQ ID NO: 1048334 - DNA, 15 bp, Homo sapiens
ccctccctgtctgac

SEQ ID NO: 1048335 - DNA, 15 bp, Homo sapiens
gccctccctgtctga

SEQ ID NO: 1048336 - DNA, 15 bp, Homo sapiens
agccctccctgtctg

SEQ ID NO: 1048337 - DNA, 15 bp, Homo sapiens
cagccctccctgtct

SEQ ID NO: 1048338 - DNA, 15 bp, Homo sapiens
gcagccctccctgtc

SEQ ID NO: 1048339 - DNA, 15 bp, Homo sapiens
cgcagccctccctgt

SEQ ID NO: 1048340 - DNA, 15 bp, Homo sapiens
tcgcagccctccctg

SEQ ID NO: 1048341 - DNA, 15 bp, Homo sapiens
atcgcagccctccct

SEQ ID NO: 1048342 - DNA, 15 bp, Homo sapiens
catcgcagccctccc

SEQ ID NO: 1048343 - DNA, 15 bp, Homo sapiens
gcatcgcagccctcc

SEQ ID NO: 1048344 - DNA, 15 bp, Homo sapiens
ggcatcgcagccctc

SEQ ID NO: 1048345 - DNA, 15 bp, Homo sapiens
tggcatcgcagccct

SEQ ID NO: 1048346 - DNA, 15 bp, Homo sapiens
gtggcatcgcagccc

SEQ ID NO: 1048347 - DNA, 15 bp, Homo sapiens
tgtggcatcgcagcc

SEQ ID NO: 1048348 - DNA, 15 bp, Homo sapiens
gtgtggcatcgcagc

SEQ ID NO: 1048349 - DNA, 15 bp, Homo sapiens
tgtgtggcatcgcag

SEQ ID NO: 1048350 - DNA, 15 bp, Homo sapiens
ttgtgtggcatcgca

SEQ ID NO: 1048351 - DNA, 15 bp, Homo sapiens
tttgtgtggcatcgc

SEQ ID NO: 1048352 - DNA, 15 bp, Homo sapiens
ctttgtgtggcatcg

SEQ ID NO: 1048353 - DNA, 15 bp, Homo sapiens
tctttgtgtggcatc

SEQ ID NO: 1048354 - DNA, 15 bp, Homo sapiens
ttctttgtgtggcat

SEQ ID NO: 1048355 - DNA, 15 bp, Homo sapiens
cttctttgtgtggca

SEQ ID NO: 1048356 - DNA, 15 bp, Homo sapiens
gcttctttgtgtggc

SEQ ID NO: 1048357 - DNA, 15 bp, Homo sapiens
agcttctttgtgtgg

SEQ ID NO: 1048358 - DNA, 15 bp, Homo sapiens
gagcttctttgtgtg

SEQ ID NO: 1048359 - DNA, 15 bp, Homo sapiens
tgagcttctttgtgt

SEQ ID NO: 1048360 - DNA, 15 bp, Homo sapiens
ctgagcttctttgtg

SEQ ID NO: 1048361 - DNA, 15 bp, Homo sapiens
tctgagcttctttgt

SEQ ID NO: 1048362 - DNA, 15 bp, Homo sapiens
gtctgagcttctttg

SEQ ID NO: 1048363 - DNA, 15 bp, Homo sapiens
ggtctgagcttcttt

SEQ ID NO: 1048364 - DNA, 15 bp, Homo sapiens
aggtctgagcttctt

SEQ ID NO: 1048365 - DNA, 15 bp, Homo sapiens
aaggtctgagcttct

SEQ ID NO: 1048366 - DNA, 15 bp, Homo sapiens
caaggtctgagcttc

SEQ ID NO: 1048367 - DNA, 15 bp, Homo sapiens
ccaaggtctgagctt

SEQ ID NO: 1048368 - DNA, 15 bp, Homo sapiens
accaaggtctgagct

SEQ ID NO: 1048369 - DNA, 15 bp, Homo sapiens
gaccaaggtctgagc

SEQ ID NO: 1048370 - DNA, 15 bp, Homo sapiens
cagaccaaggtctga

SEQ ID NO: 1048371 - DNA, 15 bp, Homo sapiens
tcagaccaaggtctg

SEQ ID NO: 1048372 - DNA, 15 bp, Homo sapiens
ctcagaccaaggtct

SEQ ID NO: 1048373 - DNA, 15 bp, Homo sapiens
cctcagaccaaggtc

SEQ ID NO: 1048374 - DNA, 15 bp, Homo sapiens
ccctcagaccaaggt

SEQ ID NO: 1048375 - DNA, 15 bp, Homo sapiens
gccctcagaccaagg

SEQ ID NO: 1048376 - DNA, 15 bp, Homo sapiens
tgccctcagaccaag

SEQ ID NO: 1048377 - DNA, 15 bp, Homo sapiens
gtgccctcagaccaa

SEQ ID NO: 1048378 - DNA, 15 bp, Homo sapiens
agtgccctcagacca

SEQ ID NO: 1048379 - DNA, 15 bp, Homo sapiens
cagtgccctcagacc

SEQ ID NO: 1048380 - DNA, 15 bp, Homo sapiens
tcagtgccctcagac

SEQ ID NO: 1048381 - DNA, 15 bp, Homo sapiens
ctcagtgccctcaga

SEQ ID NO: 1048382 - DNA, 15 bp, Homo sapiens
cctcagtgccctcag

SEQ ID NO: 1048383 - DNA, 15 bp, Homo sapiens
gcctcagtgccctca

SEQ ID NO: 1048384 - DNA, 15 bp, Homo sapiens
cgcctcagtgccctc

SEQ ID NO: 1048385 - DNA, 15 bp, Homo sapiens
gcgcctcagtgccct

SEQ ID NO: 1048386 - DNA, 15 bp, Homo sapiens
agcgcctcagtgccc

SEQ ID NO: 1048387 - DNA, 15 bp, Homo sapiens
cagcgcctcagtgcc

SEQ ID NO: 1048388 - DNA, 15 bp, Homo sapiens
gcagcgcctcagtgc

SEQ ID NO: 1048389 - DNA, 15 bp, Homo sapiens
ggcagcgcctcagtg

SEQ ID NO: 1048390 - DNA, 15 bp, Homo sapiens
tggcagcgcctcagt

SEQ ID NO: 1048391 - DNA, 15 bp, Homo sapiens
ctggcagcgcctcag

SEQ ID NO: 1048392 - DNA, 15 bp, Homo sapiens
gctggcagcgcctca

SEQ ID NO: 1048393 - DNA, 15 bp, Homo sapiens
tgctggcagcgcctc

SEQ ID NO: 1048394 - DNA, 15 bp, Homo sapiens
ctgctggcagcgcct

SEQ ID NO: 1048395 - DNA, 15 bp, Homo sapiens
actgctggcagcgcc

SEQ ID NO: 1048396 - DNA, 15 bp, Homo sapiens
aactgctggcagcgc

SEQ ID NO: 1048397 - DNA, 15 bp, Homo sapiens
aaactgctggcagcg

SEQ ID NO: 1048398 - DNA, 15 bp, Homo sapiens
aaaactgctggcagc

SEQ ID NO: 1048399 - DNA, 15 bp, Homo sapiens
aaaaactgctggcag

SEQ ID NO: 1048400 - DNA, 15 bp, Homo sapiens
taaaaactgctggca

SEQ ID NO: 1048401 - DNA, 15 bp, Homo sapiens
gtaaaaactgctggc

SEQ ID NO: 1048402 - DNA, 15 bp, Homo sapiens
cgtaaaaactgctgg

SEQ ID NO: 1048403 - DNA, 15 bp, Homo sapiens
acgtaaaaactgctg

SEQ ID NO: 1048404 - DNA, 15 bp, Homo sapiens
tacgtaaaaactgct

SEQ ID NO: 1048405 - DNA, 15 bp, Homo sapiens
gtacgtaaaaactgc

SEQ ID NO: 1048406 - DNA, 15 bp, Homo sapiens
agtacgtaaaaactg

SEQ ID NO: 1048407 - DNA, 15 bp, Homo sapiens
cagtacgtaaaaact

SEQ ID NO: 1048408 - DNA, 15 bp, Homo sapiens
acagtacgtaaaaac

SEQ ID NO: 1048409 - DNA, 15 bp, Homo sapiens
tacagtacgtaaaaa

SEQ ID NO: 1048410 - DNA, 15 bp, Homo sapiens
ttacagtacgtaaaa

SEQ ID NO: 1048411 - DNA, 15 bp, Homo sapiens
attacagtacgtaaa

SEQ ID NO: 1048412 - DNA, 15 bp, Homo sapiens
aattacagtacgtaa

SEQ ID NO: 1048413 - DNA, 15 bp, Homo sapiens
taattacagtacgta

SEQ ID NO: 1048414 - DNA, 15 bp, Homo sapiens
ataattacagtacgt

SEQ ID NO: 1048415 - DNA, 15 bp, Homo sapiens
tataattacagtacg

SEQ ID NO: 1048416 - DNA, 15 bp, Homo sapiens
ctataattacagtac

SEQ ID NO: 1048417 - DNA, 15 bp, Homo sapiens
cctataattacagta

SEQ ID NO: 1048418 - DNA, 15 bp, Homo sapiens
tcctataattacagt

SEQ ID NO: 1048419 - DNA, 15 bp, Homo sapiens
atcctataattacag

SEQ ID NO: 1048420 - DNA, 15 bp, Homo sapiens
aatcctataattaca

SEQ ID NO: 1048421 - DNA, 15 bp, Homo sapiens
caatcctataattac

SEQ ID NO: 1048422 - DNA, 15 bp, Homo sapiens
ccaatcctataatta

SEQ ID NO: 1048423 - DNA, 15 bp, Homo sapiens
cccaatcctataatt

SEQ ID NO: 1048424 - DNA, 15 bp, Homo sapiens
gcccaatcctataat

SEQ ID NO: 1048425 - DNA, 15 bp, Homo sapiens
agcccaatcctataa

SEQ ID NO: 1048426 - DNA, 15 bp, Homo sapiens
cagcccaatcctata

SEQ ID NO: 1048427 - DNA, 15 bp, Homo sapiens
ccagcccaatcctat

SEQ ID NO: 1048428 - DNA, 15 bp, Homo sapiens
cccagcccaatccta

SEQ ID NO: 1048429 - DNA, 15 bp, Homo sapiens
tcccagcccaatcct

SEQ ID NO: 1048430 - DNA, 15 bp, Homo sapiens
atcccagcccaatcc

SEQ ID NO: 1048431 - DNA, 15 bp, Homo sapiens
aatcccagcccaatc

SEQ ID NO: 1048432 - DNA, 15 bp, Homo sapiens
aaatcccagcccaat

SEQ ID NO: 1048433 - DNA, 15 bp, Homo sapiens
caaatcccagcccaa

SEQ ID NO: 1048434 - DNA, 15 bp, Homo sapiens
tcaaatcccagccca

SEQ ID NO: 1048435 - DNA, 15 bp, Homo sapiens
ttcaaatcccagccc

SEQ ID NO: 1048436 - DNA, 15 bp, Homo sapiens
cttcaaatcccagcc

SEQ ID NO: 1048437 - DNA, 15 bp, Homo sapiens
tcttcaaatcccagc

SEQ ID NO: 1048438 - DNA, 15 bp, Homo sapiens
ttcttcaaatcccag

SEQ ID NO: 1048439 - DNA, 15 bp, Homo sapiens
tttcttcaaatccca

SEQ ID NO: 1048440 - DNA, 15 bp, Homo sapiens
ttttcttcaaatccc

SEQ ID NO: 1048441 - DNA, 15 bp, Homo sapiens
gttttcttcaaatcc

SEQ ID NO: 1048442 - DNA, 15 bp, Homo sapiens
agttttcttcaaatc

SEQ ID NO: 1048443 - DNA, 15 bp, Homo sapiens
gagttttcttcaaat

SEQ ID NO: 1048444 - DNA, 15 bp, Homo sapiens
agagttttcttcaaa

SEQ ID NO: 1048445 - DNA, 15 bp, Homo sapiens
cagagttttcttcaa

SEQ ID NO: 1048446 - DNA, 15 bp, Homo sapiens
ccagagttttcttca

SEQ ID NO: 1048447 - DNA, 15 bp, Homo sapiens
accagagttttcttc

SEQ ID NO: 1048448 - DNA, 15 bp, Homo sapiens
caccagagttttctt

SEQ ID NO: 1048449 - DNA, 15 bp, Homo sapiens
ccaccagagttttct

SEQ ID NO: 1048450 - DNA, 15 bp, Homo sapiens
gccaccagagttttc

SEQ ID NO: 1048451 - DNA, 15 bp, Homo sapiens
tgccaccagagtttt

SEQ ID NO: 1048452 - DNA, 15 bp, Homo sapiens
ctgccaccagagttt

SEQ ID NO: 1048453 - DNA, 15 bp, Homo sapiens
gctgccaccagagtt

SEQ ID NO: 1048454 - DNA, 15 bp, Homo sapiens
tgctgccaccagagt

SEQ ID NO: 1048455 - DNA, 15 bp, Homo sapiens
atgctgccaccagag

SEQ ID NO: 1048456 - DNA, 15 bp, Homo sapiens
catgctgccaccaga

SEQ ID NO: 1048457 - DNA, 15 bp, Homo sapiens
ccatgctgccaccag

SEQ ID NO: 1048458 - DNA, 15 bp, Homo sapiens
tccatgctgccacca

SEQ ID NO: 1048459 - DNA, 15 bp, Homo sapiens
ctccatgctgccacc

SEQ ID NO: 1048460 - DNA, 15 bp, Homo sapiens
cctccatgctgccac

SEQ ID NO: 1048461 - DNA, 15 bp, Homo sapiens
tcctccatgctgcca

SEQ ID NO: 1048462 - DNA, 15 bp, Homo sapiens
atcctccatgctgcc

SEQ ID NO: 1048463 - DNA, 15 bp, Homo sapiens
tatcctccatgctgc

SEQ ID NO: 1048464 - DNA, 15 bp, Homo sapiens
ctatcctccatgctg

SEQ ID NO: 1048465 - DNA, 15 bp, Homo sapiens
tctatcctccatgct

SEQ ID NO: 1048466 - DNA, 15 bp, Homo sapiens
ttctatcctccatgc

SEQ ID NO: 1048467 - DNA, 15 bp, Homo sapiens
tttctatcctccatg

SEQ ID NO: 1048468 - DNA, 15 bp, Homo sapiens
ctttctatcctccat

SEQ ID NO: 1048469 - DNA, 15 bp, Homo sapiens
tctttctatcctcca

SEQ ID NO: 1048470 - DNA, 15 bp, Homo sapiens
ctctttctatcctcc

SEQ ID NO: 1048471 - DNA, 15 bp, Homo sapiens
cctctttctatcctc

SEQ ID NO: 1048472 - DNA, 15 bp, Homo sapiens
ccctctttctatcct

SEQ ID NO: 1048473 - DNA, 15 bp, Homo sapiens
gccctctttctatcc

SEQ ID NO: 1048474 - DNA, 15 bp, Homo sapiens
tgccctctttctatc

SEQ ID NO: 1048475 - DNA, 15 bp, Homo sapiens
atgccctctttctat

SEQ ID NO: 1048476 - DNA, 15 bp, Homo sapiens
gatgccctctttcta

SEQ ID NO: 1048477 - DNA, 15 bp, Homo sapiens
tgatgccctctttct

SEQ ID NO: 1048478 - DNA, 15 bp, Homo sapiens
atgatgccctctttc

SEQ ID NO: 1048479 - DNA, 15 bp, Homo sapiens
gatgatgccctcttt

SEQ ID NO: 1048480 - DNA, 15 bp, Homo sapiens
tgatgatgccctctt

SEQ ID NO: 1048481 - DNA, 15 bp, Homo sapiens
atgatgatgccctct

SEQ ID NO: 1048482 - DNA, 15 bp, Homo sapiens
gatgatgatgccctc

SEQ ID NO: 1048483 - DNA, 15 bp, Homo sapiens
tgatgatgatgccct

SEQ ID NO: 1048484 - DNA, 15 bp, Homo sapiens
atgatgatgatgccc

SEQ ID NO: 1048485 - DNA, 15 bp, Homo sapiens
gatgatgatgatgcc

SEQ ID NO: 1048486 - DNA, 15 bp, Homo sapiens
tgatgatgatgatgc

SEQ ID NO: 1048487 - DNA, 15 bp, Homo sapiens
catgatgatgatgat

SEQ ID NO: 1048488 - DNA, 15 bp, Homo sapiens
tcatgatgatgatga

SEQ ID NO: 1048489 - DNA, 15 bp, Homo sapiens
gtcatgatgatgatg

SEQ ID NO: 1048490 - DNA, 15 bp, Homo sapiens
tgtcatgatgatgat

SEQ ID NO: 1048491 - DNA, 15 bp, Homo sapiens
gtgtcatgatgatga

SEQ ID NO: 1048492 - DNA, 15 bp, Homo sapiens
ggtgtcatgatgatg

SEQ ID NO: 1048493 - DNA, 15 bp, Homo sapiens
tggtgtcatgatgat

SEQ ID NO: 1048494 - DNA, 15 bp, Homo sapiens
ttggtgtcatgatga

SEQ ID NO: 1048495 - DNA, 15 bp, Homo sapiens
cttggtgtcatgatg

SEQ ID NO: 1048496 - DNA, 15 bp, Homo sapiens
acttggtgtcatgat

SEQ ID NO: 1048497 - DNA, 15 bp, Homo sapiens
cacttggtgtcatga

SEQ ID NO: 1048498 - DNA, 15 bp, Homo sapiens
acacttggtgtcatg

SEQ ID NO: 1048499 - DNA, 15 bp, Homo sapiens
cacacttggtgtcat

SEQ ID NO: 1048500 - DNA, 15 bp, Homo sapiens
ccacacttggtgtca

SEQ ID NO: 1048501 - DNA, 15 bp, Homo sapiens
gccacacttggtgtc

SEQ ID NO: 1048502 - DNA, 15 bp, Homo sapiens
ggccacacttggtgt

SEQ ID NO: 1048503 - DNA, 15 bp, Homo sapiens
cggccacacttggtg

SEQ ID NO: 1048504 - DNA, 15 bp, Homo sapiens
ccggccacacttggt

SEQ ID NO: 1048505 - DNA, 15 bp, Homo sapiens
cccggccacacttgg

SEQ ID NO: 1048506 - DNA, 15 bp, Homo sapiens
gcccggccacacttg

SEQ ID NO: 1048507 - DNA, 15 bp, Homo sapiens
tgcccggccacactt

SEQ ID NO: 1048508 - DNA, 15 bp, Homo sapiens
ttgcccggccacact

SEQ ID NO: 1048509 - DNA, 15 bp, Homo sapiens
attgcccggccacac

SEQ ID NO: 1048510 - DNA, 15 bp, Homo sapiens
cattgcccggccaca

SEQ ID NO: 1048511 - DNA, 15 bp, Homo sapiens
ccattgcccggccac

SEQ ID NO: 1048512 - DNA, 15 bp, Homo sapiens
gccattgcccggcca

SEQ ID NO: 1048513 - DNA, 15 bp, Homo sapiens
agccattgcccggcc

SEQ ID NO: 1048514 - DNA, 15 bp, Homo sapiens
gagccattgcccggc

SEQ ID NO: 1048515 - DNA, 15 bp, Homo sapiens
ggagccattgcccgg

SEQ ID NO: 1048516 - DNA, 15 bp, Homo sapiens
tggagccattgcccg

SEQ ID NO: 1048517 - DNA, 15 bp, Homo sapiens
atggagccattgccc

SEQ ID NO: 1048518 - DNA, 15 bp, Homo sapiens
catggagccattgcc

SEQ ID NO: 1048519 - DNA, 15 bp, Homo sapiens
gcatggagccattgc

SEQ ID NO: 1048520 - DNA, 15 bp, Homo sapiens
agcatggagccattg

SEQ ID NO: 1048521 - DNA, 15 bp, Homo sapiens
gagcatggagccatt

SEQ ID NO: 1048522 - DNA, 15 bp, Homo sapiens
tgagcatggagccat

SEQ ID NO: 1048523 - DNA, 15 bp, Homo sapiens
atgagcatggagcca

SEQ ID NO: 1048524 - DNA, 15 bp, Homo sapiens
gatgagcatggagcc

SEQ ID NO: 1048525 - DNA, 15 bp, Homo sapiens
tgatgagcatggagc

SEQ ID NO: 1048526 - DNA, 15 bp, Homo sapiens
atgatgagcatggag

SEQ ID NO: 1048527 - DNA, 15 bp, Homo sapiens
gatgatgagcatgga

SEQ ID NO: 1048528 - DNA, 15 bp, Homo sapiens
cgatgatgagcatgg

SEQ ID NO: 1048529 - DNA, 15 bp, Homo sapiens
ccgatgatgagcatg

SEQ ID NO: 1048530 - DNA, 15 bp, Homo sapiens
tccgatgatgagcat

SEQ ID NO: 1048531 - DNA, 15 bp, Homo sapiens
ctccgatgatgagca

SEQ ID NO: 1048532 - DNA, 15 bp, Homo sapiens
gctccgatgatgagc

SEQ ID NO: 1048533 - DNA, 15 bp, Homo sapiens
ggctccgatgatgag

SEQ ID NO: 1048534 - DNA, 15 bp, Homo sapiens
gggctccgatgatga

SEQ ID NO: 1048535 - DNA, 15 bp, Homo sapiens
agggctccgatgatg

SEQ ID NO: 1048536 - DNA, 15 bp, Homo sapiens
cagggctccgatgat

SEQ ID NO: 1048537 - DNA, 15 bp, Homo sapiens
ccagggctccgatga

SEQ ID NO: 1048538 - DNA, 15 bp, Homo sapiens
cccagggctccgatg

SEQ ID NO: 1048539 - DNA, 15 bp, Homo sapiens
gcccagggctccgat

SEQ ID NO: 1048540 - DNA, 15 bp, Homo sapiens
agcccagggctccga

SEQ ID NO: 1048541 - DNA, 15 bp, Homo sapiens
gagcccagggctccg

SEQ ID NO: 1048542 - DNA, 15 bp, Homo sapiens
tgagcccagggctcc

SEQ ID NO: 1048543 - DNA, 15 bp, Homo sapiens
atgagcccagggctc

SEQ ID NO: 1048544 - DNA, 15 bp, Homo sapiens
catgagcccagggct

SEQ ID NO: 1048545 - DNA, 15 bp, Homo sapiens
tcatgagcccagggc

SEQ ID NO: 1048546 - DNA, 15 bp, Homo sapiens
atcatgagcccaggg

SEQ ID NO: 1048547 - DNA, 15 bp, Homo sapiens
aatcatgagcccagg

SEQ ID NO: 1048548 - DNA, 15 bp, Homo sapiens
gaatcatgagcccag

SEQ ID NO: 1048549 - DNA, 15 bp, Homo sapiens
tgaatcatgagccca

SEQ ID NO: 1048550 - DNA, 15 bp, Homo sapiens
ctgaatcatgagccc

SEQ ID NO: 1048551 - DNA, 15 bp, Homo sapiens
tctgaatcatgagcc

SEQ ID NO: 1048552 - DNA, 15 bp, Homo sapiens
ctctgaatcatgagc

SEQ ID NO: 1048553 - DNA, 15 bp, Homo sapiens
cctctgaatcatgag

SEQ ID NO: 1048554 - DNA, 15 bp, Homo sapiens
gcctctgaatcatga

SEQ ID NO: 1048555 - DNA, 15 bp, Homo sapiens
agcctctgaatcatg

SEQ ID NO: 1048556 - DNA, 15 bp, Homo sapiens
cagcctctgaatcat

SEQ ID NO: 1048557 - DNA, 15 bp, Homo sapiens
tcagcctctgaatca

SEQ ID NO: 1048558 - DNA, 15 bp, Homo sapiens
ctcagcctctgaatc

SEQ ID NO: 1048559 - DNA, 15 bp, Homo sapiens
cctcagcctctgaat

SEQ ID NO: 1048560 - DNA, 15 bp, Homo sapiens
gcctcagcctctgaa

SEQ ID NO: 1048561 - DNA, 15 bp, Homo sapiens
ttgcctcagcctctg

SEQ ID NO: 1048562 - DNA, 15 bp, Homo sapiens
cttgcctcagcctct

SEQ ID NO: 1048563 - DNA, 15 bp, Homo sapiens
gcttgcctcagcctc

SEQ ID NO: 1048564 - DNA, 15 bp, Homo sapiens
agcttgcctcagcct

SEQ ID NO: 1048565 - DNA, 15 bp, Homo sapiens
cagcttgcctcagcc

SEQ ID NO: 1048566 - DNA, 15 bp, Homo sapiens
gcagcttgcctcagc

SEQ ID NO: 1048567 - DNA, 15 bp, Homo sapiens
ggcagcttgcctcag

SEQ ID NO: 1048568 - DNA, 15 bp, Homo sapiens
gggcagcttgcctca

SEQ ID NO: 1048569 - DNA, 15 bp, Homo sapiens
agggcagcttgcctc

SEQ ID NO: 1048570 - DNA, 15 bp, Homo sapiens
cagggcagcttgcct

SEQ ID NO: 1048571 - DNA, 15 bp, Homo sapiens
acagggcagcttgcc

SEQ ID NO: 1048572 - DNA, 15 bp, Homo sapiens
gacagggcagcttgc

SEQ ID NO: 1048573 - DNA, 15 bp, Homo sapiens
tgacagggcagcttg

SEQ ID NO: 1048574 - DNA, 15 bp, Homo sapiens
ctgacagggcagctt

SEQ ID NO: 1048575 - DNA, 15 bp, Homo sapiens
actgacagggcagct

SEQ ID NO: 1048576 - DNA, 15 bp, Homo sapiens
cactgacagggcagc

SEQ ID NO: 1048577 - DNA, 15 bp, Homo sapiens
gcactgacagggcag

SEQ ID NO: 1048578 - DNA, 15 bp, Homo sapiens
agcactgacagggca

SEQ ID NO: 1048579 - DNA, 15 bp, Homo sapiens
cagcactgacagggc

SEQ ID NO: 1048580 - DNA, 15 bp, Homo sapiens
tcagcactgacaggg

SEQ ID NO: 1048581 - DNA, 15 bp, Homo sapiens
gtcagcactgacagg

SEQ ID NO: 1048582 - DNA, 15 bp, Homo sapiens
ggtcagcactgacag

SEQ ID NO: 1048583 - DNA, 15 bp, Homo sapiens
cggtcagcactgaca

SEQ ID NO: 1048584 - DNA, 15 bp, Homo sapiens
gcggtcagcactgac

SEQ ID NO: 1048585 - DNA, 15 bp, Homo sapiens
ggcggtcagcactga

SEQ ID NO: 1048586 - DNA, 15 bp, Homo sapiens
aggcggtcagcactg

SEQ ID NO: 1048587 - DNA, 15 bp, Homo sapiens
gaggcggtcagcact

SEQ ID NO: 1048588 - DNA, 15 bp, Homo sapiens
agaggcggtcagcac

SEQ ID NO: 1048589 - DNA, 15 bp, Homo sapiens
cagaggcggtcagca

SEQ ID NO: 1048590 - DNA, 15 bp, Homo sapiens
ccagaggcggtcagc

SEQ ID NO: 1048591 - DNA, 15 bp, Homo sapiens
cccagaggcggtcag

SEQ ID NO: 1048592 - DNA, 15 bp, Homo sapiens
gcccagaggcggtca

SEQ ID NO: 1048593 - DNA, 15 bp, Homo sapiens
agcccagaggcggtc

SEQ ID NO: 1048594 - DNA, 15 bp, Homo sapiens
aagcccagaggcggt

SEQ ID NO: 1048595 - DNA, 15 bp, Homo sapiens
aaagcccagaggcgg

SEQ ID NO: 1048596 - DNA, 15 bp, Homo sapiens
caaagcccagaggcg

SEQ ID NO: 1048597 - DNA, 15 bp, Homo sapiens
acaaagcccagaggc

SEQ ID NO: 1048598 - DNA, 15 bp, Homo sapiens
gacaaagcccagagg

SEQ ID NO: 1048599 - DNA, 15 bp, Homo sapiens
agacaaagcccagag

SEQ ID NO: 1048600 - DNA, 15 bp, Homo sapiens
gagacaaagcccaga

SEQ ID NO: 1048601 - DNA, 15 bp, Homo sapiens
agagacaaagcccag

SEQ ID NO: 1048602 - DNA, 15 bp, Homo sapiens
aagagacaaagccca

SEQ ID NO: 1048603 - DNA, 15 bp, Homo sapiens
gaagagacaaagccc

SEQ ID NO: 1048604 - DNA, 15 bp, Homo sapiens
agaagagacaaagcc

SEQ ID NO: 1048605 - DNA, 15 bp, Homo sapiens
gagaagagacaaagc

SEQ ID NO: 1048606 - DNA, 15 bp, Homo sapiens
tgagaagagacaaag

SEQ ID NO: 1048607 - DNA, 15 bp, Homo sapiens
gtgagaagagacaaa

SEQ ID NO: 1048608 - DNA, 15 bp, Homo sapiens
agtgagaagagacaa

SEQ ID NO: 1048609 - DNA, 15 bp, Homo sapiens
aagtgagaagagaca

SEQ ID NO: 1048610 - DNA, 15 bp, Homo sapiens
aaagtgagaagagac

SEQ ID NO: 1048611 - DNA, 15 bp, Homo sapiens
taaagtgagaagaga

SEQ ID NO: 1048612 - DNA, 15 bp, Homo sapiens
ctaaagtgagaagag

SEQ ID NO: 1048613 - DNA, 15 bp, Homo sapiens
cctaaagtgagaaga

SEQ ID NO: 1048614 - DNA, 15 bp, Homo sapiens
ccctaaagtgagaag

SEQ ID NO: 1048615 - DNA, 15 bp, Homo sapiens
tccctaaagtgagaa

SEQ ID NO: 1048616 - DNA, 15 bp, Homo sapiens
ctccctaaagtgaga

SEQ ID NO: 1048617 - DNA, 15 bp, Homo sapiens
actccctaaagtgag

SEQ ID NO: 1048618 - DNA, 15 bp, Homo sapiens
gactccctaaagtga

SEQ ID NO: 1048619 - DNA, 15 bp, Homo sapiens
agactccctaaagtg

SEQ ID NO: 1048620 - DNA, 15 bp, Homo sapiens
gagactccctaaagt

SEQ ID NO: 1048621 - DNA, 15 bp, Homo sapiens
ggagactccctaaag

SEQ ID NO: 1048622 - DNA, 15 bp, Homo sapiens
cggagactccctaaa

SEQ ID NO: 1048623 - DNA, 15 bp, Homo sapiens
ccggagactccctaa

SEQ ID NO: 1048624 - DNA, 15 bp, Homo sapiens
accggagactcccta

SEQ ID NO: 1048625 - DNA, 15 bp, Homo sapiens
caccggagactccct

SEQ ID NO: 1048626 - DNA, 15 bp, Homo sapiens
ccaccggagactccc

SEQ ID NO: 1048627 - DNA, 15 bp, Homo sapiens
tccaccggagactcc

SEQ ID NO: 1048628 - DNA, 15 bp, Homo sapiens
gtccaccggagactc

SEQ ID NO: 1048629 - DNA, 15 bp, Homo sapiens
agtccaccggagact

SEQ ID NO: 1048630 - DNA, 15 bp, Homo sapiens
cagtccaccggagac

SEQ ID NO: 1048631 - DNA, 15 bp, Homo sapiens
gcagtccaccggaga

SEQ ID NO: 1048632 - DNA, 15 bp, Homo sapiens
tgcagtccaccggag

SEQ ID NO: 1048633 - DNA, 15 bp, Homo sapiens
ctgcagtccaccgga

SEQ ID NO: 1048634 - DNA, 15 bp, Homo sapiens
gctgcagtccaccgg

SEQ ID NO: 1048635 - DNA, 15 bp, Homo sapiens
cgctgcagtccaccg

SEQ ID NO: 1048636 - DNA, 15 bp, Homo sapiens
acgctgcagtccacc

SEQ ID NO: 1048637 - DNA, 15 bp, Homo sapiens
aacgctgcagtccac

SEQ ID NO: 1048638 - DNA, 15 bp, Homo sapiens
taacgctgcagtcca

SEQ ID NO: 1048639 - DNA, 15 bp, Homo sapiens
ctaacgctgcagtcc

SEQ ID NO: 1048640 - DNA, 15 bp, Homo sapiens
gctaacgctgcagtc

SEQ ID NO: 1048641 - DNA, 15 bp, Homo sapiens
tgctaacgctgcagt

SEQ ID NO: 1048642 - DNA, 15 bp, Homo sapiens
ttgctaacgctgcag

SEQ ID NO: 1048643 - DNA, 15 bp, Homo sapiens
tttgctaacgctgca

SEQ ID NO: 1048644 - DNA, 15 bp, Homo sapiens
atttgctaacgctgc

SEQ ID NO: 1048645 - DNA, 15 bp, Homo sapiens
catttgctaacgctg

SEQ ID NO: 1048646 - DNA, 15 bp, Homo sapiens
gcatttgctaacgct

SEQ ID NO: 1048647 - DNA, 15 bp, Homo sapiens
tgcatttgctaacgc

SEQ ID NO: 1048648 - DNA, 15 bp, Homo sapiens
ctgcatttgctaacg

SEQ ID NO: 1048649 - DNA, 15 bp, Homo sapiens
gctgcatttgctaac

SEQ ID NO: 1048650 - DNA, 15 bp, Homo sapiens
tgctgcatttgctaa

SEQ ID NO: 1048651 - DNA, 15 bp, Homo sapiens
ttgctgcatttgcta

SEQ ID NO: 1048652 - DNA, 15 bp, Homo sapiens
cttgctgcatttgct

SEQ ID NO: 1048653 - DNA, 15 bp, Homo sapiens
gcttgctgcatttgc

SEQ ID NO: 1048654 - DNA, 15 bp, Homo sapiens
agcttgctgcatttg

SEQ ID NO: 1048655 - DNA, 15 bp, Homo sapiens
cagcttgctgcattt

SEQ ID NO: 1048656 - DNA, 15 bp, Homo sapiens
ccagcttgctgcatt

SEQ ID NO: 1048657 - DNA, 15 bp, Homo sapiens
accagcttgctgcat

SEQ ID NO: 1048658 - DNA, 15 bp, Homo sapiens
caccagcttgctgca

SEQ ID NO: 1048659 - DNA, 15 bp, Homo sapiens
ccaccagcttgctgc

SEQ ID NO: 1048660 - DNA, 15 bp, Homo sapiens
cccaccagcttgctg

SEQ ID NO: 1048661 - DNA, 15 bp, Homo sapiens
gcccaccagcttgct

SEQ ID NO: 1048662 - DNA, 15 bp, Homo sapiens
cgcccaccagcttgc

SEQ ID NO: 1048663 - DNA, 15 bp, Homo sapiens
ccgcccaccagcttg

SEQ ID NO: 1048664 - DNA, 15 bp, Homo sapiens
tccgcccaccagctt

SEQ ID NO: 1048665 - DNA, 15 bp, Homo sapiens
ctccgcccaccagct

SEQ ID NO: 1048666 - DNA, 15 bp, Homo sapiens
cctccgcccaccagc

SEQ ID NO: 1048667 - DNA, 15 bp, Homo sapiens
gcctccgcccaccag

SEQ ID NO: 1048668 - DNA, 15 bp, Homo sapiens
cgcctccgcccacca

SEQ ID NO: 1048669 - DNA, 15 bp, Homo sapiens
tcgcctccgcccacc

SEQ ID NO: 1048670 - DNA, 15 bp, Homo sapiens
ctcgcctccgcccac

SEQ ID NO: 1048671 - DNA, 15 bp, Homo sapiens
actcgcctccgccca

SEQ ID NO: 1048672 - DNA, 15 bp, Homo sapiens
gactcgcctccgccc

SEQ ID NO: 1048673 - DNA, 15 bp, Homo sapiens
ggactcgcctccgcc

SEQ ID NO: 1048674 - DNA, 15 bp, Homo sapiens
tggactcgcctccgc

SEQ ID NO: 1048675 - DNA, 15 bp, Homo sapiens
ttggactcgcctccg

SEQ ID NO: 1048676 - DNA, 15 bp, Homo sapiens
gttggactcgcctcc

SEQ ID NO: 1048677 - DNA, 15 bp, Homo sapiens
ggttggactcgcctc

SEQ ID NO: 1048678 - DNA, 15 bp, Homo sapiens
gggttggactcgcct

SEQ ID NO: 1048679 - DNA, 15 bp, Homo sapiens
ggggttggactcgcc

SEQ ID NO: 1048680 - DNA, 15 bp, Homo sapiens
tggggttggactcgc

SEQ ID NO: 1048681 - DNA, 15 bp, Homo sapiens
atggggttggactcg

SEQ ID NO: 1048682 - DNA, 15 bp, Homo sapiens
catggggttggactc

SEQ ID NO: 1048683 - DNA, 15 bp, Homo sapiens
tcatggggttggact

SEQ ID NO: 1048684 - DNA, 15 bp, Homo sapiens
ttcatggggttggac

SEQ ID NO: 1048685 - DNA, 15 bp, Homo sapiens
gttcatggggttgga

SEQ ID NO: 1048686 - DNA, 15 bp, Homo sapiens
agttcatggggttgg

SEQ ID NO: 1048687 - DNA, 15 bp, Homo sapiens
tagttcatggggttg

SEQ ID NO: 1048688 - DNA, 15 bp, Homo sapiens
gtagttcatggggtt

SEQ ID NO: 1048689 - DNA, 15 bp, Homo sapiens
tgtagttcatggggt

SEQ ID NO: 1048690 - DNA, 15 bp, Homo sapiens
ttgtagttcatgggg

SEQ ID NO: 1048691 - DNA, 15 bp, Homo sapiens
gttgtagttcatggg

SEQ ID NO: 1048692 - DNA, 15 bp, Homo sapiens
tgttgtagttcatgg

SEQ ID NO: 1048693 - DNA, 15 bp, Homo sapiens
ctgttgtagttcatg

SEQ ID NO: 1048694 - DNA, 15 bp, Homo sapiens
gctgttgtagttcat

SEQ ID NO: 1048695 - DNA, 15 bp, Homo sapiens
agctgttgtagttca

SEQ ID NO: 1048696 - DNA, 15 bp, Homo sapiens
tagctgttgtagttc

SEQ ID NO: 1048697 - DNA, 15 bp, Homo sapiens
atagctgttgtagtt

SEQ ID NO: 1048698 - DNA, 15 bp, Homo sapiens
tatagctgttgtagt

SEQ ID NO: 1048699 - DNA, 15 bp, Homo sapiens
atatagctgttgtag

SEQ ID NO: 1048700 - DNA, 15 bp, Homo sapiens
catatagctgttgta

SEQ ID NO: 1048701 - DNA, 15 bp, Homo sapiens
ccatatagctgttgt

SEQ ID NO: 1048702 - DNA, 15 bp, Homo sapiens
tccatatagctgttg

SEQ ID NO: 1048703 - DNA, 15 bp, Homo sapiens
gtccatatagctgtt

SEQ ID NO: 1048704 - DNA, 15 bp, Homo sapiens
cgtccatatagctgt

SEQ ID NO: 1048705 - DNA, 15 bp, Homo sapiens
tcgtccatatagctg

SEQ ID NO: 1048706 - DNA, 15 bp, Homo sapiens
ctcgtccatatagct

SEQ ID NO: 1048707 - DNA, 15 bp, Homo sapiens
tctcgtccatatagc

SEQ ID NO: 1048708 - DNA, 15 bp, Homo sapiens
ttctcgtccatatag

SEQ ID NO: 1048709 - DNA, 15 bp, Homo sapiens
cttctcgtccatata

SEQ ID NO: 1048710 - DNA, 15 bp, Homo sapiens
tcttctcgtccatat

SEQ ID NO: 1048711 - DNA, 15 bp, Homo sapiens
ttcttctcgtccata

SEQ ID NO: 1048712 - DNA, 15 bp, Homo sapiens
attcttctcgtccat

SEQ ID NO: 1048713 - DNA, 15 bp, Homo sapiens
cattcttctcgtcca

SEQ ID NO: 1048714 - DNA, 15 bp, Homo sapiens
ccattcttctcgtcc

SEQ ID NO: 1048715 - DNA, 15 bp, Homo sapiens
gccattcttctcgtc

SEQ ID NO: 1048716 - DNA, 15 bp, Homo sapiens
ggccattcttctcgt

SEQ ID NO: 1048717 - DNA, 15 bp, Homo sapiens
gggccattcttctcg

SEQ ID NO: 1048718 - DNA, 15 bp, Homo sapiens
ggggccattcttctc

SEQ ID NO: 1048719 - DNA, 15 bp, Homo sapiens
gggggccattcttct

SEQ ID NO: 1048720 - DNA, 15 bp, Homo sapiens
ggggggccattcttc

SEQ ID NO: 1048721 - DNA, 15 bp, Homo sapiens
aggggggccattctt

SEQ ID NO: 1048722 - DNA, 15 bp, Homo sapiens
gaggggggccattct

SEQ ID NO: 1048723 - DNA, 15 bp, Homo sapiens
ggaggggggccattc

SEQ ID NO: 1048724 - DNA, 15 bp, Homo sapiens
aggaggggggccatt

SEQ ID NO: 1048725 - DNA, 15 bp, Homo sapiens
gaggaggggggccat

SEQ ID NO: 1048726 - DNA, 15 bp, Homo sapiens
ggaggaggggggcca

SEQ ID NO: 1048727 - DNA, 15 bp, Homo sapiens
gggaggaggggggcc

SEQ ID NO: 1048728 - DNA, 15 bp, Homo sapiens
tgggaggaggggggc

SEQ ID NO: 1048729 - DNA, 15 bp, Homo sapiens
ttgggaggagggggg

SEQ ID NO: 1048730 - DNA, 15 bp, Homo sapiens
gttgggaggaggggg

SEQ ID NO: 1048731 - DNA, 15 bp, Homo sapiens
tgttgggaggagggg

SEQ ID NO: 1048732 - DNA, 15 bp, Homo sapiens
atgttgggaggaggg

SEQ ID NO: 1048733 - DNA, 15 bp, Homo sapiens
catgttgggaggagg

SEQ ID NO: 1048734 - DNA, 15 bp, Homo sapiens
tcatgttgggaggag

SEQ ID NO: 1048735 - DNA, 15 bp, Homo sapiens
gtcatgttgggagga

SEQ ID NO: 1048736 - DNA, 15 bp, Homo sapiens
ggtcatgttgggagg

SEQ ID NO: 1048737 - DNA, 15 bp, Homo sapiens
tggtcatgttgggag

SEQ ID NO: 1048738 - DNA, 15 bp, Homo sapiens
gtggtcatgttggga

SEQ ID NO: 1048739 - DNA, 15 bp, Homo sapiens
ggtggtcatgttggg

SEQ ID NO: 1048740 - DNA, 15 bp, Homo sapiens
tggtggtcatgttgg

SEQ ID NO: 1048741 - DNA, 15 bp, Homo sapiens
ttggtggtcatgttg

SEQ ID NO: 1048742 - DNA, 15 bp, Homo sapiens
gttggtggtcatgtt

SEQ ID NO: 1048743 - DNA, 15 bp, Homo sapiens
cgttggtggtcatgt

SEQ ID NO: 1048744 - DNA, 15 bp, Homo sapiens
tcgttggtggtcatg

SEQ ID NO: 1048745 - DNA, 15 bp, Homo sapiens
ctcgttggtggtcat

SEQ ID NO: 1048746 - DNA, 15 bp, Homo sapiens
tctcgttggtggtca

SEQ ID NO: 1048747 - DNA, 15 bp, Homo sapiens
ctctcgttggtggtc

SEQ ID NO: 1048748 - DNA, 15 bp, Homo sapiens
cctctcgttggtggt

SEQ ID NO: 1048749 - DNA, 15 bp, Homo sapiens
tcctctcgttggtgg

SEQ ID NO: 1048750 - DNA, 15 bp, Homo sapiens
ctcctctcgttggtg

SEQ ID NO: 1048751 - DNA, 15 bp, Homo sapiens
tctcctctcgttggt

SEQ ID NO: 1048752 - DNA, 15 bp, Homo sapiens
ctctcctctcgttgg

SEQ ID NO: 1048753 - DNA, 15 bp, Homo sapiens
actctcctctcgttg

SEQ ID NO: 1048754 - DNA, 15 bp, Homo sapiens
gactctcctctcgtt

SEQ ID NO: 1048755 - DNA, 15 bp, Homo sapiens
tgactctcctctcgt

SEQ ID NO: 1048756 - DNA, 15 bp, Homo sapiens
atgactctcctctcg

SEQ ID NO: 1048757 - DNA, 15 bp, Homo sapiens
gatgactctcctctc

SEQ ID NO: 1048758 - DNA, 15 bp, Homo sapiens
cgatgactctcctct

SEQ ID NO: 1048759 - DNA, 15 bp, Homo sapiens
acgatgactctcctc

SEQ ID NO: 1048760 - DNA, 15 bp, Homo sapiens
gacgatgactctcct

SEQ ID NO: 1048761 - DNA, 15 bp, Homo sapiens
ggacgatgactctcc

SEQ ID NO: 1048762 - DNA, 15 bp, Homo sapiens
gggacgatgactctc

SEQ ID NO: 1048763 - DNA, 15 bp, Homo sapiens
ggggacgatgactct

SEQ ID NO: 1048764 - DNA, 15 bp, Homo sapiens
cggggacgatgactc

SEQ ID NO: 1048765 - DNA, 15 bp, Homo sapiens
gcggggacgatgact

SEQ ID NO: 1048766 - DNA, 15 bp, Homo sapiens
tgcggggacgatgac

SEQ ID NO: 1048767 - DNA, 15 bp, Homo sapiens
ctgcggggacgatga

SEQ ID NO: 1048768 - DNA, 15 bp, Homo sapiens
cctgcggggacgatg

SEQ ID NO: 1048769 - DNA, 15 bp, Homo sapiens
acctgcggggacgat

SEQ ID NO: 1048770 - DNA, 15 bp, Homo sapiens
tacctgcggggacga

SEQ ID NO: 1048771 - DNA, 15 bp, Homo sapiens
ttacctgcggggacg

SEQ ID NO: 1048772 - DNA, 15 bp, Homo sapiens
attacctgcggggac

SEQ ID NO: 1048773 - DNA, 15 bp, Homo sapiens
aattacctgcgggga

SEQ ID NO: 1048774 - DNA, 15 bp, Homo sapiens
gaattacctgcgggg

SEQ ID NO: 1048775 - DNA, 15 bp, Homo sapiens
cgaattacctgcggg

SEQ ID NO: 1048776 - DNA, 15 bp, Homo sapiens
tcgaattacctgcgg

SEQ ID NO: 1048777 - DNA, 15 bp, Homo sapiens
ctcgaattacctgcg

SEQ ID NO: 1048778 - DNA, 15 bp, Homo sapiens
tctcgaattacctgc

SEQ ID NO: 1048779 - DNA, 15 bp, Homo sapiens
ttctcgaattacctg

SEQ ID NO: 1048780 - DNA, 15 bp, Homo sapiens
gttctcgaattacct

SEQ ID NO: 1048781 - DNA, 15 bp, Homo sapiens
ggttctcgaattacc

SEQ ID NO: 1048782 - DNA, 15 bp, Homo sapiens
tggttctcgaattac

SEQ ID NO: 1048783 - DNA, 15 bp, Homo sapiens
ctggttctcgaatta

SEQ ID NO: 1048784 - DNA, 15 bp, Homo sapiens
cctggttctcgaatt

SEQ ID NO: 1048785 - DNA, 15 bp, Homo sapiens
gcctggttctcgaat

SEQ ID NO: 1048786 - DNA, 15 bp, Homo sapiens
agcctggttctcgaa

SEQ ID NO: 1048787 - DNA, 15 bp, Homo sapiens
cagcctggttctcga

SEQ ID NO: 1048788 - DNA, 15 bp, Homo sapiens
gcagcctggttctcg

SEQ ID NO: 1048789 - DNA, 15 bp, Homo sapiens
ggcagcctggttctc

SEQ ID NO: 1048790 - DNA, 15 bp, Homo sapiens
aggcagcctggttct

SEQ ID NO: 1048791 - DNA, 15 bp, Homo sapiens
caggcagcctggttc

SEQ ID NO: 1048792 - DNA, 15 bp, Homo sapiens
ccaggcagcctggtt

SEQ ID NO: 1048793 - DNA, 15 bp, Homo sapiens
cccaggcagcctggt

SEQ ID NO: 1048794 - DNA, 15 bp, Homo sapiens
gcccaggcagcctgg

SEQ ID NO: 1048795 - DNA, 15 bp, Homo sapiens
cgcccaggcagcctg

SEQ ID NO: 1048796 - DNA, 15 bp, Homo sapiens
gcgcccaggcagcct

SEQ ID NO: 1048797 - DNA, 15 bp, Homo sapiens
ggcgcccaggcagcc

SEQ ID NO: 1048798 - DNA, 15 bp, Homo sapiens
tggcgcccaggcagc

SEQ ID NO: 1048799 - DNA, 15 bp, Homo sapiens
atggcgcccaggcag

SEQ ID NO: 1048800 - DNA, 15 bp, Homo sapiens
aatggcgcccaggca

SEQ ID NO: 1048801 - DNA, 15 bp, Homo sapiens
gaatggcgcccaggc

SEQ ID NO: 1048802 - DNA, 15 bp, Homo sapiens
tgaatggcgcccagg

SEQ ID NO: 1048803 - DNA, 15 bp, Homo sapiens
gtgaatggcgcccag

SEQ ID NO: 1048804 - DNA, 15 bp, Homo sapiens
agtgaatggcgccca

SEQ ID NO: 1048805 - DNA, 15 bp, Homo sapiens
aagtgaatggcgccc

SEQ ID NO: 1048806 - DNA, 15 bp, Homo sapiens
gaagtgaatggcgcc

SEQ ID NO: 1048807 - DNA, 15 bp, Homo sapiens
ggaagtgaatggcgc

SEQ ID NO: 1048808 - DNA, 15 bp, Homo sapiens
gggaagtgaatggcg

SEQ ID NO: 1048809 - DNA, 15 bp, Homo sapiens
ggggaagtgaatggc

SEQ ID NO: 1048810 - DNA, 15 bp, Homo sapiens
tggggaagtgaatgg

SEQ ID NO: 1048811 - DNA, 15 bp, Homo sapiens
gtggggaagtgaatg

SEQ ID NO: 1048812 - DNA, 15 bp, Homo sapiens
agtggggaagtgaat

SEQ ID NO: 1048813 - DNA, 15 bp, Homo sapiens
gagtggggaagtgaa

SEQ ID NO: 1048814 - DNA, 15 bp, Homo sapiens
agagtggggaagtga

SEQ ID NO: 1048815 - DNA, 15 bp, Homo sapiens
gagagtggggaagtg

SEQ ID NO: 1048816 - DNA, 15 bp, Homo sapiens
agagagtggggaagt

SEQ ID NO: 1048817 - DNA, 15 bp, Homo sapiens
cagagagtggggaag

SEQ ID NO: 1048818 - DNA, 15 bp, Homo sapiens
ccagagagtggggaa

SEQ ID NO: 1048819 - DNA, 15 bp, Homo sapiens
cccagagagtgggga

SEQ ID NO: 1048820 - DNA, 15 bp, Homo sapiens
ccccagagagtgggg

SEQ ID NO: 1048821 - DNA, 15 bp, Homo sapiens
cccccagagagtggg

SEQ ID NO: 1048822 - DNA, 15 bp, Homo sapiens
ccccccagagagtgg

SEQ ID NO: 1048823 - DNA, 15 bp, Homo sapiens
cccccccagagagtg

SEQ ID NO: 1048824 - DNA, 15 bp, Homo sapiens
gcccccccagagagt

SEQ ID NO: 1048825 - DNA, 15 bp, Homo sapiens
tgcccccccagagag

SEQ ID NO: 1048826 - DNA, 15 bp, Homo sapiens
ctgcccccccagaga

SEQ ID NO: 1048827 - DNA, 15 bp, Homo sapiens
cctgcccccccagag

SEQ ID NO: 1048828 - DNA, 15 bp, Homo sapiens
ccctgcccccccaga

SEQ ID NO: 1048829 - DNA, 15 bp, Homo sapiens
tccctgcccccccag

SEQ ID NO: 1048830 - DNA, 15 bp, Homo sapiens
ctccctgccccccca

SEQ ID NO: 1048831 - DNA, 15 bp, Homo sapiens
gctccctgccccccc

SEQ ID NO: 1048832 - DNA, 15 bp, Homo sapiens
tgctccctgcccccc

SEQ ID NO: 1048833 - DNA, 15 bp, Homo sapiens
atgctccctgccccc

SEQ ID NO: 1048834 - DNA, 15 bp, Homo sapiens
gatgctccctgcccc

SEQ ID NO: 1048835 - DNA, 15 bp, Homo sapiens
agatgctccctgccc

SEQ ID NO: 1048836 - DNA, 15 bp, Homo sapiens
tagatgctccctgcc

SEQ ID NO: 1048837 - DNA, 15 bp, Homo sapiens
ttagatgctccctgc

SEQ ID NO: 1048838 - DNA, 15 bp, Homo sapiens
tttagatgctccctg

SEQ ID NO: 1048839 - DNA, 15 bp, Homo sapiens
gtttagatgctccct

SEQ ID NO: 1048840 - DNA, 15 bp, Homo sapiens
ggtttagatgctccc

SEQ ID NO: 1048841 - DNA, 15 bp, Homo sapiens
aggtttagatgctcc

SEQ ID NO: 1048842 - DNA, 15 bp, Homo sapiens
aaggtttagatgctc

SEQ ID NO: 1048843 - DNA, 15 bp, Homo sapiens
aaaggtttagatgct

SEQ ID NO: 1048844 - DNA, 15 bp, Homo sapiens
taaaggtttagatgc

SEQ ID NO: 1048845 - DNA, 15 bp, Homo sapiens
ataaaggtttagatg

SEQ ID NO: 1048846 - DNA, 15 bp, Homo sapiens
gataaaggtttagat

SEQ ID NO: 1048847 - DNA, 15 bp, Homo sapiens
agataaaggtttaga

SEQ ID NO: 1048848 - DNA, 15 bp, Homo sapiens
cagataaaggtttag

SEQ ID NO: 1048849 - DNA, 15 bp, Homo sapiens
tcagataaaggttta

SEQ ID NO: 1048850 - DNA, 15 bp, Homo sapiens
atcagataaaggttt

SEQ ID NO: 1048851 - DNA, 15 bp, Homo sapiens
tatcagataaaggtt

SEQ ID NO: 1048852 - DNA, 15 bp, Homo sapiens
gtatcagataaaggt

SEQ ID NO: 1048853 - DNA, 15 bp, Homo sapiens
agtatcagataaagg

SEQ ID NO: 1048854 - DNA, 15 bp, Homo sapiens
gagtatcagataaag

SEQ ID NO: 1048855 - DNA, 15 bp, Homo sapiens
agagtatcagataaa

SEQ ID NO: 1048856 - DNA, 15 bp, Homo sapiens
tagagtatcagataa

SEQ ID NO: 1048857 - DNA, 15 bp, Homo sapiens
atagagtatcagata

SEQ ID NO: 1048858 - DNA, 15 bp, Homo sapiens
aatagagtatcagat

SEQ ID NO: 1048859 - DNA, 15 bp, Homo sapiens
gaatagagtatcaga

SEQ ID NO: 1048860 - DNA, 15 bp, Homo sapiens
ggaatagagtatcag

SEQ ID NO: 1048861 - DNA, 15 bp, Homo sapiens
gggaatagagtatca

SEQ ID NO: 1048862 - DNA, 15 bp, Homo sapiens
agggaatagagtatc

SEQ ID NO: 1048863 - DNA, 15 bp, Homo sapiens
cagggaatagagtat

SEQ ID NO: 1048864 - DNA, 15 bp, Homo sapiens
cacagggaatagagt

SEQ ID NO: 1048865 - DNA, 15 bp, Homo sapiens
ccacagggaatagag

SEQ ID NO: 1048866 - DNA, 15 bp, Homo sapiens
tccacagggaataga

SEQ ID NO: 1048867 - DNA, 15 bp, Homo sapiens
ttccacagggaatag

SEQ ID NO: 1048868 - DNA, 15 bp, Homo sapiens
attccacagggaata

SEQ ID NO: 1048869 - DNA, 15 bp, Homo sapiens
aattccacagggaat

SEQ ID NO: 1048870 - DNA, 15 bp, Homo sapiens
caattccacagggaa

SEQ ID NO: 1048871 - DNA, 15 bp, Homo sapiens
gcaattccacaggga

SEQ ID NO: 1048872 - DNA, 15 bp, Homo sapiens
tgcaattccacaggg

SEQ ID NO: 1048873 - DNA, 15 bp, Homo sapiens
ttgcaattccacagg

SEQ ID NO: 1048874 - DNA, 15 bp, Homo sapiens
tttgcaattccacag

SEQ ID NO: 1048875 - DNA, 15 bp, Homo sapiens
ttttgcaattccaca

SEQ ID NO: 1048876 - DNA, 15 bp, Homo sapiens
attttgcaattccac

SEQ ID NO: 1048877 - DNA, 15 bp, Homo sapiens
cattttgcaattcca

SEQ ID NO: 1048878 - DNA, 15 bp, Homo sapiens
ccattttgcaattcc

SEQ ID NO: 1048879 - DNA, 15 bp, Homo sapiens
tccattttgcaattc

SEQ ID NO: 1048880 - DNA, 15 bp, Homo sapiens
ctccattttgcaatt

SEQ ID NO: 1048881 - DNA, 15 bp, Homo sapiens
tctccattttgcaat

SEQ ID NO: 1048882 - DNA, 15 bp, Homo sapiens
ttctccattttgcaa

SEQ ID NO: 1048883 - DNA, 15 bp, Homo sapiens
tttctccattttgca

SEQ ID NO: 1048884 - DNA, 15 bp, Homo sapiens
ctttctccattttgc

SEQ ID NO: 1048885 - DNA, 15 bp, Homo sapiens
gctttctccattttg

SEQ ID NO: 1048886 - DNA, 15 bp, Homo sapiens
agctttctccatttt

SEQ ID NO: 1048887 - DNA, 15 bp, Homo sapiens
cagctttctccattt

SEQ ID NO: 1048888 - DNA, 15 bp, Homo sapiens
gcagctttctccatt

SEQ ID NO: 1048889 - DNA, 15 bp, Homo sapiens
tgcagctttctccat

SEQ ID NO: 1048890 - DNA, 15 bp, Homo sapiens
gtgcagctttctcca

SEQ ID NO: 1048891 - DNA, 15 bp, Homo sapiens
cgtgcagctttctcc

SEQ ID NO: 1048892 - DNA, 15 bp, Homo sapiens
gcgtgcagctttctc

SEQ ID NO: 1048893 - DNA, 15 bp, Homo sapiens
ggcgtgcagctttct

SEQ ID NO: 1048894 - DNA, 15 bp, Homo sapiens
tggcgtgcagctttc

SEQ ID NO: 1048895 - DNA, 15 bp, Homo sapiens
ctggcgtgcagcttt

SEQ ID NO: 1048896 - DNA, 15 bp, Homo sapiens
gctggcgtgcagctt

SEQ ID NO: 1048897 - DNA, 15 bp, Homo sapiens
ggctggcgtgcagct

SEQ ID NO: 1048898 - DNA, 15 bp, Homo sapiens
cggctggcgtgcagc

SEQ ID NO: 1048899 - DNA, 15 bp, Homo sapiens
ccggctggcgtgcag

SEQ ID NO: 1048900 - DNA, 15 bp, Homo sapiens
cccggctggcgtgca

SEQ ID NO: 1048901 - DNA, 15 bp, Homo sapiens
tcccggctggcgtgc

SEQ ID NO: 1048902 - DNA, 15 bp, Homo sapiens
ctcccggctggcgtg

SEQ ID NO: 1048903 - DNA, 15 bp, Homo sapiens
actcccggctggcgt

SEQ ID NO: 1048904 - DNA, 15 bp, Homo sapiens
cactcccggctggcg

SEQ ID NO: 1048905 - DNA, 15 bp, Homo sapiens
ccactcccggctggc

SEQ ID NO: 1048906 - DNA, 15 bp, Homo sapiens
accactcccggctgg

SEQ ID NO: 1048907 - DNA, 15 bp, Homo sapiens
caccactcccggctg

SEQ ID NO: 1048908 - DNA, 15 bp, Homo sapiens
ccaccactcccggct

SEQ ID NO: 1048909 - DNA, 15 bp, Homo sapiens
gccaccactcccggc

SEQ ID NO: 1048910 - DNA, 15 bp, Homo sapiens
agccaccactcccgg

SEQ ID NO: 1048911 - DNA, 15 bp, Homo sapiens
gagccaccactcccg

SEQ ID NO: 1048912 - DNA, 15 bp, Homo sapiens
cgagccaccactccc

SEQ ID NO: 1048913 - DNA, 15 bp, Homo sapiens
gcgagccaccactcc

SEQ ID NO: 1048914 - DNA, 15 bp, Homo sapiens
cgcgagccaccactc

SEQ ID NO: 1048915 - DNA, 15 bp, Homo sapiens
gcgcgagccaccact

SEQ ID NO: 1048916 - DNA, 15 bp, Homo sapiens
ggcgcgagccaccac

SEQ ID NO: 1048917 - DNA, 15 bp, Homo sapiens
aggcgcgagccacca

SEQ ID NO: 1048918 - DNA, 15 bp, Homo sapiens
caggcgcgagccacc

SEQ ID NO: 1048919 - DNA, 15 bp, Homo sapiens
acaggcgcgagccac

SEQ ID NO: 1048920 - DNA, 15 bp, Homo sapiens
tacaggcgcgagcca

SEQ ID NO: 1048921 - DNA, 15 bp, Homo sapiens
ttacaggcgcgagcc

SEQ ID NO: 1048922 - DNA, 15 bp, Homo sapiens
attacaggcgcgagc

SEQ ID NO: 1048923 - DNA, 15 bp, Homo sapiens
ggcctctcaaagtgc

SEQ ID NO: 1048924 - DNA, 15 bp, Homo sapiens
tcttggcctctcaaa

SEQ ID NO: 1048925 - DNA, 15 bp, Homo sapiens
gtcttggcctctcaa

SEQ ID NO: 1048926 - DNA, 15 bp, Homo sapiens
cgtcttggcctctca

SEQ ID NO: 1048927 - DNA, 15 bp, Homo sapiens
ccgtcttggcctctc

SEQ ID NO: 1048928 - DNA, 15 bp, Homo sapiens
cccgtcttggcctct

SEQ ID NO: 1048929 - DNA, 15 bp, Homo sapiens
acccgtcttggcctc

SEQ ID NO: 1048930 - DNA, 15 bp, Homo sapiens
cacccgtcttggcct

SEQ ID NO: 1048931 - DNA, 15 bp, Homo sapiens
tcacccgtcttggcc

SEQ ID NO: 1048932 - DNA, 15 bp, Homo sapiens
ttcacccgtcttggc

SEQ ID NO: 1048933 - DNA, 15 bp, Homo sapiens
attcacccgtcttgg

SEQ ID NO: 1048934 - DNA, 15 bp, Homo sapiens
gattcacccgtcttg

SEQ ID NO: 1048935 - DNA, 15 bp, Homo sapiens
tgattcacccgtctt

SEQ ID NO: 1048936 - DNA, 15 bp, Homo sapiens
gtgattcacccgtct

SEQ ID NO: 1048937 - DNA, 15 bp, Homo sapiens
agtgattcacccgtc

SEQ ID NO: 1048938 - DNA, 15 bp, Homo sapiens
aagtgattcacccgt

SEQ ID NO: 1048939 - DNA, 15 bp, Homo sapiens
caagtgattcacccg

SEQ ID NO: 1048940 - DNA, 15 bp, Homo sapiens
acaagtgattcaccc

SEQ ID NO: 1048941 - DNA, 15 bp, Homo sapiens
gacaagtgattcacc

SEQ ID NO: 1048942 - DNA, 15 bp, Homo sapiens
tgacaagtgattcac

SEQ ID NO: 1048943 - DNA, 15 bp, Homo sapiens
ctgacaagtgattca

SEQ ID NO: 1048944 - DNA, 15 bp, Homo sapiens
cctgacaagtgattc

SEQ ID NO: 1048945 - DNA, 15 bp, Homo sapiens
tcctgacaagtgatt

SEQ ID NO: 1048946 - DNA, 15 bp, Homo sapiens
gaactcctgacaagt

SEQ ID NO: 1048947 - DNA, 15 bp, Homo sapiens
tgaactcctgacaag

SEQ ID NO: 1048948 - DNA, 15 bp, Homo sapiens
ttgaactcctgacaa

SEQ ID NO: 1048949 - DNA, 15 bp, Homo sapiens
gctaggctggtcttg

SEQ ID NO: 1048950 - DNA, 15 bp, Homo sapiens
ggctaggctggtctt

SEQ ID NO: 1048951 - DNA, 15 bp, Homo sapiens
tggctaggctggtct

SEQ ID NO: 1048952 - DNA, 15 bp, Homo sapiens
ttggctaggctggtc

SEQ ID NO: 1048953 - DNA, 15 bp, Homo sapiens
gttggctaggctggt

SEQ ID NO: 1048954 - DNA, 15 bp, Homo sapiens
cgttggctaggctgg

SEQ ID NO: 1048955 - DNA, 15 bp, Homo sapiens
acgttggctaggctg

SEQ ID NO: 1048956 - DNA, 15 bp, Homo sapiens
cacgttggctaggct

SEQ ID NO: 1048957 - DNA, 15 bp, Homo sapiens
ccacgttggctaggc

SEQ ID NO: 1048958 - DNA, 15 bp, Homo sapiens
accacgttggctagg

SEQ ID NO: 1048959 - DNA, 15 bp, Homo sapiens
caccacgttggctag

SEQ ID NO: 1048960 - DNA, 15 bp, Homo sapiens
tcaccacgttggcta

SEQ ID NO: 1048961 - DNA, 15 bp, Homo sapiens
ttcaccacgttggct

SEQ ID NO: 1048962 - DNA, 15 bp, Homo sapiens
tttcaccacgttggc

SEQ ID NO: 1048963 - DNA, 15 bp, Homo sapiens
gtttcaccacgttgg

SEQ ID NO: 1048964 - DNA, 15 bp, Homo sapiens
ggtttcaccacgttg

SEQ ID NO: 1048965 - DNA, 15 bp, Homo sapiens
aggtttcaccacgtt

SEQ ID NO: 1048966 - DNA, 15 bp, Homo sapiens
gaggtttcaccacgt

SEQ ID NO: 1048967 - DNA, 15 bp, Homo sapiens
tgaggtttcaccacg

SEQ ID NO: 1048968 - DNA, 15 bp, Homo sapiens
atgaggtttcaccac

SEQ ID NO: 1048969 - DNA, 15 bp, Homo sapiens
tttttttttttagta

SEQ ID NO: 1048970 - DNA, 15 bp, Homo sapiens
ttttttttttttagt

SEQ ID NO: 1048971 - DNA, 15 bp, Homo sapiens
gtatttttttttttt

SEQ ID NO: 1048972 - DNA, 15 bp, Homo sapiens
ttgtatttttttttt

SEQ ID NO: 1048973 - DNA, 15 bp, Homo sapiens
tttgtattttttttt

SEQ ID NO: 1048974 - DNA, 15 bp, Homo sapiens
ttttgtatttttttt

SEQ ID NO: 1048975 - DNA, 15 bp, Homo sapiens
tttttgtattttttt

SEQ ID NO: 1048976 - DNA, 15 bp, Homo sapiens
taccacacctggcta

SEQ ID NO: 1048977 - DNA, 15 bp, Homo sapiens
ctaccacacctggct

SEQ ID NO: 1048978 - DNA, 15 bp, Homo sapiens
actaccacacctggc

SEQ ID NO: 1048979 - DNA, 15 bp, Homo sapiens
cactaccacacctgg

SEQ ID NO: 1048980 - DNA, 15 bp, Homo sapiens
ccactaccacacctg

SEQ ID NO: 1048981 - DNA, 15 bp, Homo sapiens
tccactaccacacct

SEQ ID NO: 1048982 - DNA, 15 bp, Homo sapiens
gtccactaccacacc

SEQ ID NO: 1048983 - DNA, 15 bp, Homo sapiens
cgtccactaccacac

SEQ ID NO: 1048984 - DNA, 15 bp, Homo sapiens
gcgtccactaccaca

SEQ ID NO: 1048985 - DNA, 15 bp, Homo sapiens
agcgtccactaccac

SEQ ID NO: 1048986 - DNA, 15 bp, Homo sapiens
aagcgtccactacca

SEQ ID NO: 1048987 - DNA, 15 bp, Homo sapiens
taagcgtccactacc

SEQ ID NO: 1048988 - DNA, 15 bp, Homo sapiens
ataagcgtccactac

SEQ ID NO: 1048989 - DNA, 15 bp, Homo sapiens
tataagcgtccacta

SEQ ID NO: 1048990 - DNA, 15 bp, Homo sapiens
atataagcgtccact

SEQ ID NO: 1048991 - DNA, 15 bp, Homo sapiens
aatataagcgtccac

SEQ ID NO: 1048992 - DNA, 15 bp, Homo sapiens
gaatataagcgtcca

SEQ ID NO: 1048993 - DNA, 15 bp, Homo sapiens
ggaatataagcgtcc

SEQ ID NO: 1048994 - DNA, 15 bp, Homo sapiens
gggaatataagcgtc

SEQ ID NO: 1048995 - DNA, 15 bp, Homo sapiens
tgggaatataagcgt

SEQ ID NO: 1048996 - DNA, 15 bp, Homo sapiens
ctgggaatataagcg

SEQ ID NO: 1048997 - DNA, 15 bp, Homo sapiens
gctgggaatataagc

SEQ ID NO: 1048998 - DNA, 15 bp, Homo sapiens
agctgggaatataag

SEQ ID NO: 1048999 - DNA, 15 bp, Homo sapiens
tagctgggaatataa

SEQ ID NO: 1049000 - DNA, 15 bp, Homo sapiens
gtagctgggaatata

SEQ ID NO: 1049001 - DNA, 15 bp, Homo sapiens
agtagctgggaatat

SEQ ID NO: 1049002 - DNA, 15 bp, Homo sapiens
gccccctgagtagct

SEQ ID NO: 1049003 - DNA, 15 bp, Homo sapiens
agccccctgagtagc

SEQ ID NO: 1049004 - DNA, 15 bp, Homo sapiens
cagccccctgagtag

SEQ ID NO: 1049005 - DNA, 15 bp, Homo sapiens
tcagccccctgagta

SEQ ID NO: 1049006 - DNA, 15 bp, Homo sapiens
ttcagccccctgagt

SEQ ID NO: 1049007 - DNA, 15 bp, Homo sapiens
cttcagccccctgag

SEQ ID NO: 1049008 - DNA, 15 bp, Homo sapiens
gcttcagccccctga

SEQ ID NO: 1049009 - DNA, 15 bp, Homo sapiens
tgcttcagccccctg

SEQ ID NO: 1049010 - DNA, 15 bp, Homo sapiens
ctgcttcagccccct

SEQ ID NO: 1049011 - DNA, 15 bp, Homo sapiens
cctgcttcagccccc

SEQ ID NO: 1049012 - DNA, 15 bp, Homo sapiens
tcctgcttcagcccc

SEQ ID NO: 1049013 - DNA, 15 bp, Homo sapiens
ctcctgcttcagccc

SEQ ID NO: 1049014 - DNA, 15 bp, Homo sapiens
gtctcctgcttcagc

SEQ ID NO: 1049015 - DNA, 15 bp, Homo sapiens
agtctcctgcttcag

SEQ ID NO: 1049016 - DNA, 15 bp, Homo sapiens
gagtctcctgcttca

SEQ ID NO: 1049017 - DNA, 15 bp, Homo sapiens
cgagtctcctgcttc

SEQ ID NO: 1049018 - DNA, 15 bp, Homo sapiens
gcgagtctcctgctt

SEQ ID NO: 1049019 - DNA, 15 bp, Homo sapiens
agcgagtctcctgct

SEQ ID NO: 1049020 - DNA, 15 bp, Homo sapiens
aagcgagtctcctgc

SEQ ID NO: 1049021 - DNA, 15 bp, Homo sapiens
aaagcgagtctcctg

SEQ ID NO: 1049022 - DNA, 15 bp, Homo sapiens
taaagcgagtctcct

SEQ ID NO: 1049023 - DNA, 15 bp, Homo sapiens
ttaaagcgagtctcc

SEQ ID NO: 1049024 - DNA, 15 bp, Homo sapiens
gttaaagcgagtctc

SEQ ID NO: 1049025 - DNA, 15 bp, Homo sapiens
ggttaaagcgagtct

SEQ ID NO: 1049026 - DNA, 15 bp, Homo sapiens
cggttaaagcgagtc

SEQ ID NO: 1049027 - DNA, 15 bp, Homo sapiens
ccggttaaagcgagt

SEQ ID NO: 1049028 - DNA, 15 bp, Homo sapiens
cccggttaaagcgag

SEQ ID NO: 1049029 - DNA, 15 bp, Homo sapiens
tcccggttaaagcga

SEQ ID NO: 1049030 - DNA, 15 bp, Homo sapiens
ttcccggttaaagcg

SEQ ID NO: 1049031 - DNA, 15 bp, Homo sapiens
cttcccggttaaagc

SEQ ID NO: 1049032 - DNA, 15 bp, Homo sapiens
ccttcccggttaaag

SEQ ID NO: 1049033 - DNA, 15 bp, Homo sapiens
gccttcccggttaaa

SEQ ID NO: 1049034 - DNA, 15 bp, Homo sapiens
cgccttcccggttaa

SEQ ID NO: 1049035 - DNA, 15 bp, Homo sapiens
ccgccttcccggtta

SEQ ID NO: 1049036 - DNA, 15 bp, Homo sapiens
tccgccttcccggtt

SEQ ID NO: 1049037 - DNA, 15 bp, Homo sapiens
ctccgccttcccggt

SEQ ID NO: 1049038 - DNA, 15 bp, Homo sapiens
cctccgccttcccgg

SEQ ID NO: 1049039 - DNA, 15 bp, Homo sapiens
acctccgccttcccg

SEQ ID NO: 1049040 - DNA, 15 bp, Homo sapiens
aacctccgccttccc

SEQ ID NO: 1049041 - DNA, 15 bp, Homo sapiens
caacctccgccttcc

SEQ ID NO: 1049042 - DNA, 15 bp, Homo sapiens
tgcaacctccgcctt

SEQ ID NO: 1049043 - DNA, 15 bp, Homo sapiens
cctgcaacctccgcc

SEQ ID NO: 1049044 - DNA, 15 bp, Homo sapiens
ccctgcaacctccgc

SEQ ID NO: 1049045 - DNA, 15 bp, Homo sapiens
tccctgcaacctccg

SEQ ID NO: 1049046 - DNA, 15 bp, Homo sapiens
ctccctgcaacctcc

SEQ ID NO: 1049047 - DNA, 15 bp, Homo sapiens
gctccctgcaacctc

SEQ ID NO: 1049048 - DNA, 15 bp, Homo sapiens
ggctccctgcaacct

SEQ ID NO: 1049049 - DNA, 15 bp, Homo sapiens
tggctccctgcaacc

SEQ ID NO: 1049050 - DNA, 15 bp, Homo sapiens
ttggctccctgcaac

SEQ ID NO: 1049051 - DNA, 15 bp, Homo sapiens
cttggctccctgcaa

SEQ ID NO: 1049052 - DNA, 15 bp, Homo sapiens
tcttggctccctgca

SEQ ID NO: 1049053 - DNA, 15 bp, Homo sapiens
atcttggctccctgc

SEQ ID NO: 1049054 - DNA, 15 bp, Homo sapiens
gatcttggctccctg

SEQ ID NO: 1049055 - DNA, 15 bp, Homo sapiens
tgatcttggctccct

SEQ ID NO: 1049056 - DNA, 15 bp, Homo sapiens
gtgatcttggctccc

SEQ ID NO: 1049057 - DNA, 15 bp, Homo sapiens
tgtgatcttggctcc

SEQ ID NO: 1049058 - DNA, 15 bp, Homo sapiens
atcacccaggctgga

SEQ ID NO: 1049059 - DNA, 15 bp, Homo sapiens
catcacccaggctgg

SEQ ID NO: 1049060 - DNA, 15 bp, Homo sapiens
ccatcacccaggctg

SEQ ID NO: 1049061 - DNA, 15 bp, Homo sapiens
tccatcacccaggct

SEQ ID NO: 1049062 - DNA, 15 bp, Homo sapiens
ttccatcacccaggc

SEQ ID NO: 1049063 - DNA, 15 bp, Homo sapiens
attccatcacccagg

SEQ ID NO: 1049064 - DNA, 15 bp, Homo sapiens
cattccatcacccag

SEQ ID NO: 1049065 - DNA, 15 bp, Homo sapiens
tcattccatcaccca

SEQ ID NO: 1049066 - DNA, 15 bp, Homo sapiens
ctcattccatcaccc

SEQ ID NO: 1049067 - DNA, 15 bp, Homo sapiens
tctcattccatcacc

SEQ ID NO: 1049068 - DNA, 15 bp, Homo sapiens
gtctcattccatcac

SEQ ID NO: 1049069 - DNA, 15 bp, Homo sapiens
agtctcattccatca

SEQ ID NO: 1049070 - DNA, 15 bp, Homo sapiens
gagtctcattccatc

SEQ ID NO: 1049071 - DNA, 15 bp, Homo sapiens
agagtctcattccat

SEQ ID NO: 1049072 - DNA, 15 bp, Homo sapiens
cagagtctcattcca

SEQ ID NO: 1049073 - DNA, 15 bp, Homo sapiens
acagagtctcattcc

SEQ ID NO: 1049074 - DNA, 15 bp, Homo sapiens
gcagctttttttttt

SEQ ID NO: 1049075 - DNA, 15 bp, Homo sapiens
tgcagcttttttttt

SEQ ID NO: 1049076 - DNA, 15 bp, Homo sapiens
gtgcagctttttttt

SEQ ID NO: 1049077 - DNA, 15 bp, Homo sapiens
tgtgcagcttttttt

SEQ ID NO: 1049078 - DNA, 15 bp, Homo sapiens
atgtgcagctttttt

SEQ ID NO: 1049079 - DNA, 15 bp, Homo sapiens
aatgtgcagcttttt

SEQ ID NO: 1049080 - DNA, 15 bp, Homo sapiens
aaatgtgcagctttt

SEQ ID NO: 1049081 - DNA, 15 bp, Homo sapiens
aaaatgtgcagcttt

SEQ ID NO: 1049082 - DNA, 15 bp, Homo sapiens
taaaatgtgcagctt

SEQ ID NO: 1049083 - DNA, 15 bp, Homo sapiens
gtaaaatgtgcagct

SEQ ID NO: 1049084 - DNA, 15 bp, Homo sapiens
ggtaaaatgtgcagc

SEQ ID NO: 1049085 - DNA, 15 bp, Homo sapiens
aggtaaaatgtgcag

SEQ ID NO: 1049086 - DNA, 15 bp, Homo sapiens
caggtaaaatgtgca

SEQ ID NO: 1049087 - DNA, 15 bp, Homo sapiens
tcaggtaaaatgtgc

SEQ ID NO: 1049088 - DNA, 15 bp, Homo sapiens
gtcaggtaaaatgtg

SEQ ID NO: 1049089 - DNA, 15 bp, Homo sapiens
agtcaggtaaaatgt

SEQ ID NO: 1049090 - DNA, 15 bp, Homo sapiens
aagtcaggtaaaatg

SEQ ID NO: 1049091 - DNA, 15 bp, Homo sapiens
gaagtcaggtaaaat

SEQ ID NO: 1049092 - DNA, 15 bp, Homo sapiens
ggaagtcaggtaaaa

SEQ ID NO: 1049093 - DNA, 15 bp, Homo sapiens
aggaagtcaggtaaa

SEQ ID NO: 1049094 - DNA, 15 bp, Homo sapiens
taggaagtcaggtaa

SEQ ID NO: 1049095 - DNA, 15 bp, Homo sapiens
ctaggaagtcaggta

SEQ ID NO: 1049096 - DNA, 15 bp, Homo sapiens
gctaggaagtcaggt

SEQ ID NO: 1049097 - DNA, 15 bp, Homo sapiens
agctaggaagtcagg

SEQ ID NO: 1049098 - DNA, 15 bp, Homo sapiens
cagctaggaagtcag

SEQ ID NO: 1049099 - DNA, 15 bp, Homo sapiens
gcagctaggaagtca

SEQ ID NO: 1049100 - DNA, 15 bp, Homo sapiens
ggcagctaggaagtc

SEQ ID NO: 1049101 - DNA, 15 bp, Homo sapiens
gggcagctaggaagt

SEQ ID NO: 1049102 - DNA, 15 bp, Homo sapiens
agggcagctaggaag

SEQ ID NO: 1049103 - DNA, 15 bp, Homo sapiens
aagggcagctaggaa

SEQ ID NO: 1049104 - DNA, 15 bp, Homo sapiens
aaagggcagctagga

SEQ ID NO: 1049105 - DNA, 15 bp, Homo sapiens
taaagggcagctagg

SEQ ID NO: 1049106 - DNA, 15 bp, Homo sapiens
ttaaagggcagctag

SEQ ID NO: 1049107 - DNA, 15 bp, Homo sapiens
cttaaagggcagcta

SEQ ID NO: 1049108 - DNA, 15 bp, Homo sapiens
ccttaaagggcagct

SEQ ID NO: 1049109 - DNA, 15 bp, Homo sapiens
gccttaaagggcagc

SEQ ID NO: 1049110 - DNA, 15 bp, Homo sapiens
tgccttaaagggcag

SEQ ID NO: 1049111 - DNA, 15 bp, Homo sapiens
ctgccttaaagggca

SEQ ID NO: 1049112 - DNA, 15 bp, Homo sapiens
actgccttaaagggc

SEQ ID NO: 1049113 - DNA, 15 bp, Homo sapiens
tactgccttaaaggg

SEQ ID NO: 1049114 - DNA, 15 bp, Homo sapiens
atactgccttaaagg

SEQ ID NO: 1049115 - DNA, 15 bp, Homo sapiens
gatactgccttaaag

SEQ ID NO: 1049116 - DNA, 15 bp, Homo sapiens
ggatactgccttaaa

SEQ ID NO: 1049117 - DNA, 15 bp, Homo sapiens
gggatactgccttaa

SEQ ID NO: 1049118 - DNA, 15 bp, Homo sapiens
tgggatactgcctta

SEQ ID NO: 1049119 - DNA, 15 bp, Homo sapiens
ctgggatactgcctt

SEQ ID NO: 1049120 - DNA, 15 bp, Homo sapiens
tctgggatactgcct

SEQ ID NO: 1049121 - DNA, 15 bp, Homo sapiens
atctgggatactgcc

SEQ ID NO: 1049122 - DNA, 15 bp, Homo sapiens
catctgggatactgc

SEQ ID NO: 1049123 - DNA, 15 bp, Homo sapiens
acatctgggatactg

SEQ ID NO: 1049124 - DNA, 15 bp, Homo sapiens
gacatctgggatact

SEQ ID NO: 1049125 - DNA, 15 bp, Homo sapiens
tgacatctgggatac

SEQ ID NO: 1049126 - DNA, 15 bp, Homo sapiens
gtgacatctgggata

SEQ ID NO: 1049127 - DNA, 15 bp, Homo sapiens
ggtgacatctgggat

SEQ ID NO: 1049128 - DNA, 15 bp, Homo sapiens
aggtgacatctggga

SEQ ID NO: 1049129 - DNA, 15 bp, Homo sapiens
caggtgacatctggg

SEQ ID NO: 1049130 - DNA, 15 bp, Homo sapiens
tcaggtgacatctgg

SEQ ID NO: 1049131 - DNA, 15 bp, Homo sapiens
atcaggtgacatctg

SEQ ID NO: 1049132 - DNA, 15 bp, Homo sapiens
catcaggtgacatct

SEQ ID NO: 1049133 - DNA, 15 bp, Homo sapiens
acatcaggtgacatc

SEQ ID NO: 1049134 - DNA, 15 bp, Homo sapiens
cacatcaggtgacat

SEQ ID NO: 1049135 - DNA, 15 bp, Homo sapiens
acacatcaggtgaca

SEQ ID NO: 1049136 - DNA, 15 bp, Homo sapiens
cacacatcaggtgac

SEQ ID NO: 1049137 - DNA, 15 bp, Homo sapiens
ccacacatcaggtga

SEQ ID NO: 1049138 - DNA, 15 bp, Homo sapiens
cccacacatcaggtg

SEQ ID NO: 1049139 - DNA, 15 bp, Homo sapiens
acccacacatcaggt

SEQ ID NO: 1049140 - DNA, 15 bp, Homo sapiens
cacccacacatcagg

SEQ ID NO: 1049141 - DNA, 15 bp, Homo sapiens
gcacccacacatcag

SEQ ID NO: 1049142 - DNA, 15 bp, Homo sapiens
agcacccacacatca

SEQ ID NO: 1049143 - DNA, 15 bp, Homo sapiens
tagcacccacacatc

SEQ ID NO: 1049144 - DNA, 15 bp, Homo sapiens
ctagcacccacacat

SEQ ID NO: 1049145 - DNA, 15 bp, Homo sapiens
tctagcacccacaca

SEQ ID NO: 1049146 - DNA, 15 bp, Homo sapiens
ttctagcacccacac

SEQ ID NO: 1049147 - DNA, 15 bp, Homo sapiens
cttctagcacccaca

SEQ ID NO: 1049148 - DNA, 15 bp, Homo sapiens
gcttctagcacccac

SEQ ID NO: 1049149 - DNA, 15 bp, Homo sapiens
ggcttctagcaccca

SEQ ID NO: 1049150 - DNA, 15 bp, Homo sapiens
gggcttctagcaccc

SEQ ID NO: 1049151 - DNA, 15 bp, Homo sapiens
ggggcttctagcacc

SEQ ID NO: 1049152 - DNA, 15 bp, Homo sapiens
tggggcttctagcac

SEQ ID NO: 1049153 - DNA, 15 bp, Homo sapiens
gtggggcttctagca

SEQ ID NO: 1049154 - DNA, 15 bp, Homo sapiens
ggtggggcttctagc

SEQ ID NO: 1049155 - DNA, 15 bp, Homo sapiens
gggtggggcttctag

SEQ ID NO: 1049156 - DNA, 15 bp, Homo sapiens
agggtggggcttcta

SEQ ID NO: 1049157 - DNA, 15 bp, Homo sapiens
aagggtggggcttct

SEQ ID NO: 1049158 - DNA, 15 bp, Homo sapiens
taagggtggggcttc

SEQ ID NO: 1049159 - DNA, 15 bp, Homo sapiens
ttaagggtggggctt

SEQ ID NO: 1049160 - DNA, 15 bp, Homo sapiens
tttaagggtggggct

SEQ ID NO: 1049161 - DNA, 15 bp, Homo sapiens
gtttaagggtggggc

SEQ ID NO: 1049162 - DNA, 15 bp, Homo sapiens
tgtttaagggtgggg

SEQ ID NO: 1049163 - DNA, 15 bp, Homo sapiens
ctgtttaagggtggg

SEQ ID NO: 1049164 - DNA, 15 bp, Homo sapiens
tctgtttaagggtgg

SEQ ID NO: 1049165 - DNA, 15 bp, Homo sapiens
gtctgtttaagggtg

SEQ ID NO: 1049166 - DNA, 15 bp, Homo sapiens
ggtctgtttaagggt

SEQ ID NO: 1049167 - DNA, 15 bp, Homo sapiens
tggtctgtttaaggg

SEQ ID NO: 1049168 - DNA, 15 bp, Homo sapiens
gtggtctgtttaagg

SEQ ID NO: 1049169 - DNA, 15 bp, Homo sapiens
tgtggtctgtttaag

SEQ ID NO: 1049170 - DNA, 15 bp, Homo sapiens
atgtggtctgtttaa

SEQ ID NO: 1049171 - DNA, 15 bp, Homo sapiens
gatgtggtctgttta

SEQ ID NO: 1049172 - DNA, 15 bp, Homo sapiens
tgatgtggtctgttt

SEQ ID NO: 1049173 - DNA, 15 bp, Homo sapiens
gtgatgtggtctgtt

SEQ ID NO: 1049174 - DNA, 15 bp, Homo sapiens
tgtgatgtggtctgt

SEQ ID NO: 1049175 - DNA, 15 bp, Homo sapiens
ctgtgatgtggtctg

SEQ ID NO: 1049176 - DNA, 15 bp, Homo sapiens
tctgtgatgtggtct

SEQ ID NO: 1049177 - DNA, 15 bp, Homo sapiens
gtctgtgatgtggtc

SEQ ID NO: 1049178 - DNA, 15 bp, Homo sapiens
agtctgtgatgtggt

SEQ ID NO: 1049179 - DNA, 15 bp, Homo sapiens
gagtctgtgatgtgg

SEQ ID NO: 1049180 - DNA, 15 bp, Homo sapiens
agagtctgtgatgtg

SEQ ID NO: 1049181 - DNA, 15 bp, Homo sapiens
tagagtctgtgatgt

SEQ ID NO: 1049182 - DNA, 15 bp, Homo sapiens
gtagagtctgtgatg

SEQ ID NO: 1049183 - DNA, 15 bp, Homo sapiens
tgtagagtctgtgat

SEQ ID NO: 1049184 - DNA, 15 bp, Homo sapiens
atgtagagtctgtga

SEQ ID NO: 1049185 - DNA, 15 bp, Homo sapiens
gatgtagagtctgtg

SEQ ID NO: 1049186 - DNA, 15 bp, Homo sapiens
tgatgtagagtctgt

SEQ ID NO: 1049187 - DNA, 15 bp, Homo sapiens
ttgatgtagagtctg

SEQ ID NO: 1049188 - DNA, 15 bp, Homo sapiens
attgatgtagagtct

SEQ ID NO: 1049189 - DNA, 15 bp, Homo sapiens
cattgatgtagagtc

SEQ ID NO: 1049190 - DNA, 15 bp, Homo sapiens
ccattgatgtagagt

SEQ ID NO: 1049191 - DNA, 15 bp, Homo sapiens
gccattgatgtagag

SEQ ID NO: 1049192 - DNA, 15 bp, Homo sapiens
ggccattgatgtaga

SEQ ID NO: 1049193 - DNA, 15 bp, Homo sapiens
aggccattgatgtag

SEQ ID NO: 1049194 - DNA, 15 bp, Homo sapiens
caggccattgatgta

SEQ ID NO: 1049195 - DNA, 15 bp, Homo sapiens
ccaggccattgatgt

SEQ ID NO: 1049196 - DNA, 15 bp, Homo sapiens
accaggccattgatg

SEQ ID NO: 1049197 - DNA, 15 bp, Homo sapiens
gaccaggccattgat

SEQ ID NO: 1049198 - DNA, 15 bp, Homo sapiens
ggaccaggccattga

SEQ ID NO: 1049199 - DNA, 15 bp, Homo sapiens
aggaccaggccattg

SEQ ID NO: 1049200 - DNA, 15 bp, Homo sapiens
gaggaccaggccatt

SEQ ID NO: 1049201 - DNA, 15 bp, Homo sapiens
tgaggaccaggccat

SEQ ID NO: 1049202 - DNA, 15 bp, Homo sapiens
ttgaggaccaggcca

SEQ ID NO: 1049203 - DNA, 15 bp, Homo sapiens
cttgaggaccaggcc

SEQ ID NO: 1049204 - DNA, 15 bp, Homo sapiens
ccttgaggaccaggc

SEQ ID NO: 1049205 - DNA, 15 bp, Homo sapiens
tccttgaggaccagg

SEQ ID NO: 1049206 - DNA, 15 bp, Homo sapiens
gtccttgaggaccag

SEQ ID NO: 1049207 - DNA, 15 bp, Homo sapiens
cgtccttgaggacca

SEQ ID NO: 1049208 - DNA, 15 bp, Homo sapiens
ccgtccttgaggacc

SEQ ID NO: 1049209 - DNA, 15 bp, Homo sapiens
cccgtccttgaggac

SEQ ID NO: 1049210 - DNA, 15 bp, Homo sapiens
gcccgtccttgagga

SEQ ID NO: 1049211 - DNA, 15 bp, Homo sapiens
agcccgtccttgagg

SEQ ID NO: 1049212 - DNA, 15 bp, Homo sapiens
cagcccgtccttgag

SEQ ID NO: 1049213 - DNA, 15 bp, Homo sapiens
gcagcccgtccttga

SEQ ID NO: 1049214 - DNA, 15 bp, Homo sapiens
agcagcccgtccttg

SEQ ID NO: 1049215 - DNA, 15 bp, Homo sapiens
gagcagcccgtcctt

SEQ ID NO: 1049216 - DNA, 15 bp, Homo sapiens
tgagcagcccgtcct

SEQ ID NO: 1049217 - DNA, 15 bp, Homo sapiens
ctgagcagcccgtcc

SEQ ID NO: 1049218 - DNA, 15 bp, Homo sapiens
tctgagcagcccgtc

SEQ ID NO: 1049219 - DNA, 15 bp, Homo sapiens
ctctgagcagcccgt

SEQ ID NO: 1049220 - DNA, 15 bp, Homo sapiens
tctctgagcagcccg

SEQ ID NO: 1049221 - DNA, 15 bp, Homo sapiens
ctctctgagcagccc

SEQ ID NO: 1049222 - DNA, 15 bp, Homo sapiens
gctctctgagcagcc

SEQ ID NO: 1049223 - DNA, 15 bp, Homo sapiens
tgctctctgagcagc

SEQ ID NO: 1049224 - DNA, 15 bp, Homo sapiens
ctgctctctgagcag

SEQ ID NO: 1049225 - DNA, 15 bp, Homo sapiens
tctgctctctgagca

SEQ ID NO: 1049226 - DNA, 15 bp, Homo sapiens
ctctgctctctgagc

SEQ ID NO: 1049227 - DNA, 15 bp, Homo sapiens
cctctgctctctgag

SEQ ID NO: 1049228 - DNA, 15 bp, Homo sapiens
gcctctgctctctga

SEQ ID NO: 1049229 - DNA, 15 bp, Homo sapiens
tgcctctgctctctg

SEQ ID NO: 1049230 - DNA, 15 bp, Homo sapiens
ttgcctctgctctct

SEQ ID NO: 1049231 - DNA, 15 bp, Homo sapiens
cttgcctctgctctc

SEQ ID NO: 1049232 - DNA, 15 bp, Homo sapiens
ccttgcctctgctct

SEQ ID NO: 1049233 - DNA, 15 bp, Homo sapiens
gccttgcctctgctc

SEQ ID NO: 1049234 - DNA, 15 bp, Homo sapiens
ggccttgcctctgct

SEQ ID NO: 1049235 - DNA, 15 bp, Homo sapiens
cggccttgcctctgc

SEQ ID NO: 1049236 - DNA, 15 bp, Homo sapiens
gcggccttgcctctg

SEQ ID NO: 1049237 - DNA, 15 bp, Homo sapiens
ggcggccttgcctct

SEQ ID NO: 1049238 - DNA, 15 bp, Homo sapiens
aggcggccttgcctc

SEQ ID NO: 1049239 - DNA, 15 bp, Homo sapiens
gaggcggccttgcct

SEQ ID NO: 1049240 - DNA, 15 bp, Homo sapiens
ggaggcggccttgcc

SEQ ID NO: 1049241 - DNA, 15 bp, Homo sapiens
tggaggcggccttgc

SEQ ID NO: 1049242 - DNA, 15 bp, Homo sapiens
gtggaggcggccttg

SEQ ID NO: 1049243 - DNA, 15 bp, Homo sapiens
ggtggaggcggcctt

SEQ ID NO: 1049244 - DNA, 15 bp, Homo sapiens
gggtggaggcggcct

SEQ ID NO: 1049245 - DNA, 15 bp, Homo sapiens
tgggtggaggcggcc

SEQ ID NO: 1049246 - DNA, 15 bp, Homo sapiens
ttgggtggaggcggc

SEQ ID NO: 1049247 - DNA, 15 bp, Homo sapiens
tttgggtggaggcgg

SEQ ID NO: 1049248 - DNA, 15 bp, Homo sapiens
ttttgggtggaggcg

SEQ ID NO: 1049249 - DNA, 15 bp, Homo sapiens
cttttgggtggaggc

SEQ ID NO: 1049250 - DNA, 15 bp, Homo sapiens
ccttttgggtggagg

SEQ ID NO: 1049251 - DNA, 15 bp, Homo sapiens
tccttttgggtggag

SEQ ID NO: 1049252 - DNA, 15 bp, Homo sapiens
ttccttttgggtgga

SEQ ID NO: 1049253 - DNA, 15 bp, Homo sapiens
attccttttgggtgg

SEQ ID NO: 1049254 - DNA, 15 bp, Homo sapiens
gattccttttgggtg

SEQ ID NO: 1049255 - DNA, 15 bp, Homo sapiens
ggattccttttgggt

SEQ ID NO: 1049256 - DNA, 15 bp, Homo sapiens
gggattccttttggg

SEQ ID NO: 1049257 - DNA, 15 bp, Homo sapiens
cgggattccttttgg

SEQ ID NO: 1049258 - DNA, 15 bp, Homo sapiens
acgggattccttttg

SEQ ID NO: 1049259 - DNA, 15 bp, Homo sapiens
cacgggattcctttt

SEQ ID NO: 1049260 - DNA, 15 bp, Homo sapiens
tcacgggattccttt

SEQ ID NO: 1049261 - DNA, 15 bp, Homo sapiens
ctcacgggattcctt

SEQ ID NO: 1049262 - DNA, 15 bp, Homo sapiens
gctcacgggattcct

SEQ ID NO: 1049263 - DNA, 15 bp, Homo sapiens
agctcacgggattcc

SEQ ID NO: 1049264 - DNA, 15 bp, Homo sapiens
gagctcacgggattc

SEQ ID NO: 1049265 - DNA, 15 bp, Homo sapiens
agagctcacgggatt

SEQ ID NO: 1049266 - DNA, 15 bp, Homo sapiens
cagagctcacgggat

SEQ ID NO: 1049267 - DNA, 15 bp, Homo sapiens
ccagagctcacggga

SEQ ID NO: 1049268 - DNA, 15 bp, Homo sapiens
tccagagctcacggg

SEQ ID NO: 1049269 - DNA, 15 bp, Homo sapiens
atccagagctcacgg

SEQ ID NO: 1049270 - DNA, 15 bp, Homo sapiens
catccagagctcacg

SEQ ID NO: 1049271 - DNA, 15 bp, Homo sapiens
acatccagagctcac

SEQ ID NO: 1049272 - DNA, 15 bp, Homo sapiens
cacatccagagctca

SEQ ID NO: 1049273 - DNA, 15 bp, Homo sapiens
ccacatccagagctc

SEQ ID NO: 1049274 - DNA, 15 bp, Homo sapiens
cccacatccagagct

SEQ ID NO: 1049275 - DNA, 15 bp, Homo sapiens
gcccacatccagagc

SEQ ID NO: 1049276 - DNA, 15 bp, Homo sapiens
tgcccacatccagag

SEQ ID NO: 1049277 - DNA, 15 bp, Homo sapiens
atgcccacatccaga

SEQ ID NO: 1049278 - DNA, 15 bp, Homo sapiens
gatgcccacatccag

SEQ ID NO: 1049279 - DNA, 15 bp, Homo sapiens
ggatgcccacatcca

SEQ ID NO: 1049280 - DNA, 15 bp, Homo sapiens
gggatgcccacatcc

SEQ ID NO: 1049281 - DNA, 15 bp, Homo sapiens
agggatgcccacatc

SEQ ID NO: 1049282 - DNA, 15 bp, Homo sapiens
cagggatgcccacat

SEQ ID NO: 1049283 - DNA, 15 bp, Homo sapiens
gcagggatgcccaca

SEQ ID NO: 1049284 - DNA, 15 bp, Homo sapiens
ggcagggatgcccac

SEQ ID NO: 1049285 - DNA, 15 bp, Homo sapiens
aggcagggatgccca

SEQ ID NO: 1049286 - DNA, 15 bp, Homo sapiens
caggcagggatgccc

SEQ ID NO: 1049287 - DNA, 15 bp, Homo sapiens
acaggcagggatgcc

SEQ ID NO: 1049288 - DNA, 15 bp, Homo sapiens
cacaggcagggatgc

SEQ ID NO: 1049289 - DNA, 15 bp, Homo sapiens
tcacaggcagggatg

SEQ ID NO: 1049290 - DNA, 15 bp, Homo sapiens
ctcacaggcagggat

SEQ ID NO: 1049291 - DNA, 15 bp, Homo sapiens
cctcacaggcaggga

SEQ ID NO: 1049292 - DNA, 15 bp, Homo sapiens
tcctcacaggcaggg

SEQ ID NO: 1049293 - DNA, 15 bp, Homo sapiens
ctcctcacaggcagg

SEQ ID NO: 1049294 - DNA, 15 bp, Homo sapiens
cctcctcacaggcag

SEQ ID NO: 1049295 - DNA, 15 bp, Homo sapiens
tcctcctcacaggca

SEQ ID NO: 1049296 - DNA, 15 bp, Homo sapiens
ctcctcctcacaggc

SEQ ID NO: 1049297 - DNA, 15 bp, Homo sapiens
cctcctcctcacagg

SEQ ID NO: 1049298 - DNA, 15 bp, Homo sapiens
acctcctcctcacag

SEQ ID NO: 1049299 - DNA, 15 bp, Homo sapiens
gacctcctcctcaca

SEQ ID NO: 1049300 - DNA, 15 bp, Homo sapiens
tgacctcctcctcac

SEQ ID NO: 1049301 - DNA, 15 bp, Homo sapiens
ctgacctcctcctca

SEQ ID NO: 1049302 - DNA, 15 bp, Homo sapiens
gctgacctcctcctc

SEQ ID NO: 1049303 - DNA, 15 bp, Homo sapiens
agctgacctcctcct

SEQ ID NO: 1049304 - DNA, 15 bp, Homo sapiens
cagctgacctcctcc

SEQ ID NO: 1049305 - DNA, 15 bp, Homo sapiens
gcagctgacctcctc

SEQ ID NO: 1049306 - DNA, 15 bp, Homo sapiens
tgcagctgacctcct

SEQ ID NO: 1049307 - DNA, 15 bp, Homo sapiens
ctgcagctgacctcc

SEQ ID NO: 1049308 - DNA, 15 bp, Homo sapiens
tctgcagctgacctc

SEQ ID NO: 1049309 - DNA, 15 bp, Homo sapiens
ctctgcagctgacct

SEQ ID NO: 1049310 - DNA, 15 bp, Homo sapiens
cctctgcagctgacc

SEQ ID NO: 1049311 - DNA, 15 bp, Homo sapiens
gcctctgcagctgac

SEQ ID NO: 1049312 - DNA, 15 bp, Homo sapiens
ggcctctgcagctga

SEQ ID NO: 1049313 - DNA, 15 bp, Homo sapiens
tggcctctgcagctg

SEQ ID NO: 1049314 - DNA, 15 bp, Homo sapiens
ctggcctctgcagct

SEQ ID NO: 1049315 - DNA, 15 bp, Homo sapiens
actggcctctgcagc

SEQ ID NO: 1049316 - DNA, 15 bp, Homo sapiens
gactggcctctgcag

SEQ ID NO: 1049317 - DNA, 15 bp, Homo sapiens
ggactggcctctgca

SEQ ID NO: 1049318 - DNA, 15 bp, Homo sapiens
aggactggcctctgc

SEQ ID NO: 1049319 - DNA, 15 bp, Homo sapiens
aaggactggcctctg

SEQ ID NO: 1049320 - DNA, 15 bp, Homo sapiens
gaaggactggcctct

SEQ ID NO: 1049321 - DNA, 15 bp, Homo sapiens
ggaaggactggcctc

SEQ ID NO: 1049322 - DNA, 15 bp, Homo sapiens
gggaaggactggcct

SEQ ID NO: 1049323 - DNA, 15 bp, Homo sapiens
agggaaggactggcc

SEQ ID NO: 1049324 - DNA, 15 bp, Homo sapiens
gagggaaggactggc

SEQ ID NO: 1049325 - DNA, 15 bp, Homo sapiens
tggagggaaggactg

SEQ ID NO: 1049326 - DNA, 15 bp, Homo sapiens
ctggagggaaggact

SEQ ID NO: 1049327 - DNA, 15 bp, Homo sapiens
cctggagggaaggac

SEQ ID NO: 1049328 - DNA, 15 bp, Homo sapiens
gcctggagggaagga

SEQ ID NO: 1049329 - DNA, 15 bp, Homo sapiens
agcctggagggaagg

SEQ ID NO: 1049330 - DNA, 15 bp, Homo sapiens
gagcctggagggaag

SEQ ID NO: 1049331 - DNA, 15 bp, Homo sapiens
cgagcctggagggaa

SEQ ID NO: 1049332 - DNA, 15 bp, Homo sapiens
acgagcctggaggga

SEQ ID NO: 1049333 - DNA, 15 bp, Homo sapiens
tacgagcctggaggg

SEQ ID NO: 1049334 - DNA, 15 bp, Homo sapiens
gtacgagcctggagg

SEQ ID NO: 1049335 - DNA, 15 bp, Homo sapiens
agtacgagcctggag

SEQ ID NO: 1049336 - DNA, 15 bp, Homo sapiens
aagtacgagcctgga

SEQ ID NO: 1049337 - DNA, 15 bp, Homo sapiens
gaagtacgagcctgg

SEQ ID NO: 1049338 - DNA, 15 bp, Homo sapiens
ggaagtacgagcctg

SEQ ID NO: 1049339 - DNA, 15 bp, Homo sapiens
gggaagtacgagcct

SEQ ID NO: 1049340 - DNA, 15 bp, Homo sapiens
cgggaagtacgagcc

SEQ ID NO: 1049341 - DNA, 15 bp, Homo sapiens
ccgggaagtacgagc

SEQ ID NO: 1049342 - DNA, 15 bp, Homo sapiens
gccgggaagtacgag

SEQ ID NO: 1049343 - DNA, 15 bp, Homo sapiens
tgccgggaagtacga

SEQ ID NO: 1049344 - DNA, 15 bp, Homo sapiens
atgccgggaagtacg

SEQ ID NO: 1049345 - DNA, 15 bp, Homo sapiens
gatgccgggaagtac

SEQ ID NO: 1049346 - DNA, 15 bp, Homo sapiens
agatgccgggaagta

SEQ ID NO: 1049347 - DNA, 15 bp, Homo sapiens
tagatgccgggaagt

SEQ ID NO: 1049348 - DNA, 15 bp, Homo sapiens
gtagatgccgggaag

SEQ ID NO: 1049349 - DNA, 15 bp, Homo sapiens
ggtagatgccgggaa

SEQ ID NO: 1049350 - DNA, 15 bp, Homo sapiens
tggtagatgccggga

SEQ ID NO: 1049351 - DNA, 15 bp, Homo sapiens
ctggtagatgccggg

SEQ ID NO: 1049352 - DNA, 15 bp, Homo sapiens
cctggtagatgccgg

SEQ ID NO: 1049353 - DNA, 15 bp, Homo sapiens
acctggtagatgccg

SEQ ID NO: 1049354 - DNA, 15 bp, Homo sapiens
aacctggtagatgcc

SEQ ID NO: 1049355 - DNA, 15 bp, Homo sapiens
gaacctggtagatgc

SEQ ID NO: 1049356 - DNA, 15 bp, Homo sapiens
ggaacctggtagatg

SEQ ID NO: 1049357 - DNA, 15 bp, Homo sapiens
tggaacctggtagat

SEQ ID NO: 1049358 - DNA, 15 bp, Homo sapiens
gtggaacctggtaga

SEQ ID NO: 1049359 - DNA, 15 bp, Homo sapiens
ggtggaacctggtag

SEQ ID NO: 1049360 - DNA, 15 bp, Homo sapiens
aggtggaacctggta

SEQ ID NO: 1049361 - DNA, 15 bp, Homo sapiens
aaggtggaacctggt

SEQ ID NO: 1049362 - DNA, 15 bp, Homo sapiens
aaaggtggaacctgg

SEQ ID NO: 1049363 - DNA, 15 bp, Homo sapiens
gaaaggtggaacctg

SEQ ID NO: 1049364 - DNA, 15 bp, Homo sapiens
ggaaaggtggaacct

SEQ ID NO: 1049365 - DNA, 15 bp, Homo sapiens
tggaaaggtggaacc

SEQ ID NO: 1049366 - DNA, 15 bp, Homo sapiens
ttggaaaggtggaac

SEQ ID NO: 1049367 - DNA, 15 bp, Homo sapiens
tttggaaaggtggaa

SEQ ID NO: 1049368 - DNA, 15 bp, Homo sapiens
ttttggaaaggtgga

SEQ ID NO: 1049369 - DNA, 15 bp, Homo sapiens
attttggaaaggtgg

SEQ ID NO: 1049370 - DNA, 15 bp, Homo sapiens
aattttggaaaggtg

SEQ ID NO: 1049371 - DNA, 15 bp, Homo sapiens
taattttggaaaggt

SEQ ID NO: 1049372 - DNA, 15 bp, Homo sapiens
gtaattttggaaagg

SEQ ID NO: 1049373 - DNA, 15 bp, Homo sapiens
tgtaattttggaaag

SEQ ID NO: 1049374 - DNA, 15 bp, Homo sapiens
ctgtaattttggaaa

SEQ ID NO: 1049375 - DNA, 15 bp, Homo sapiens
gctgtaattttggaa

SEQ ID NO: 1049376 - DNA, 15 bp, Homo sapiens
ggctgtaattttgga

SEQ ID NO: 1049377 - DNA, 15 bp, Homo sapiens
tggctgtaattttgg

SEQ ID NO: 1049378 - DNA, 15 bp, Homo sapiens
ctggctgtaattttg

SEQ ID NO: 1049379 - DNA, 15 bp, Homo sapiens
gctggctgtaatttt

SEQ ID NO: 1049380 - DNA, 15 bp, Homo sapiens
agctggctgtaattt

SEQ ID NO: 1049381 - DNA, 15 bp, Homo sapiens
gagctggctgtaatt

SEQ ID NO: 1049382 - DNA, 15 bp, Homo sapiens
agagctggctgtaat

SEQ ID NO: 1049383 - DNA, 15 bp, Homo sapiens
aagagctggctgtaa

SEQ ID NO: 1049384 - DNA, 15 bp, Homo sapiens
aaagagctggctgta

SEQ ID NO: 1049385 - DNA, 15 bp, Homo sapiens
gaaagagctggctgt

SEQ ID NO: 1049386 - DNA, 15 bp, Homo sapiens
tgaaagagctggctg

SEQ ID NO: 1049387 - DNA, 15 bp, Homo sapiens
ctgaaagagctggct

SEQ ID NO: 1049388 - DNA, 15 bp, Homo sapiens
actgaaagagctggc

SEQ ID NO: 1049389 - DNA, 15 bp, Homo sapiens
aactgaaagagctgg

SEQ ID NO: 1049390 - DNA, 15 bp, Homo sapiens
aaactgaaagagctg

SEQ ID NO: 1049391 - DNA, 15 bp, Homo sapiens
aaaactgaaagagct

SEQ ID NO: 1049392 - DNA, 15 bp, Homo sapiens
taaaactgaaagagc

SEQ ID NO: 1049393 - DNA, 15 bp, Homo sapiens
ttaaaactgaaagag

SEQ ID NO: 1049394 - DNA, 15 bp, Homo sapiens
tttaaaactgaaaga

SEQ ID NO: 1049395 - DNA, 15 bp, Homo sapiens
attttaaaactgaaa

SEQ ID NO: 1049396 - DNA, 15 bp, Homo sapiens
tattttaaaactgaa

SEQ ID NO: 1049397 - DNA, 15 bp, Homo sapiens
ctattttaaaactga

SEQ ID NO: 1049398 - DNA, 15 bp, Homo sapiens
tctattttaaaactg

SEQ ID NO: 1049399 - DNA, 15 bp, Homo sapiens
ttctattttaaaact

SEQ ID NO: 1049400 - DNA, 15 bp, Homo sapiens
tttctattttaaaac

SEQ ID NO: 1049401 - DNA, 15 bp, Homo sapiens
ctttctattttaaaa

SEQ ID NO: 1049402 - DNA, 15 bp, Homo sapiens
tctttctattttaaa

SEQ ID NO: 1049403 - DNA, 15 bp, Homo sapiens
ttctttctattttaa

SEQ ID NO: 1049404 - DNA, 15 bp, Homo sapiens
gttctttctatttta

SEQ ID NO: 1049405 - DNA, 15 bp, Homo sapiens
agttctttctatttt

SEQ ID NO: 1049406 - DNA, 15 bp, Homo sapiens
tagttctttctattt

SEQ ID NO: 1049407 - DNA, 15 bp, Homo sapiens
atagttctttctatt

SEQ ID NO: 1049408 - DNA, 15 bp, Homo sapiens
tatagttctttctat

SEQ ID NO: 1049409 - DNA, 15 bp, Homo sapiens
atatagttctttcta

SEQ ID NO: 1049410 - DNA, 15 bp, Homo sapiens
aatatagttctttct

SEQ ID NO: 1049411 - DNA, 15 bp, Homo sapiens
aaatatagttctttc

SEQ ID NO: 1049412 - DNA, 15 bp, Homo sapiens
taaatatagttcttt

SEQ ID NO: 1049413 - DNA, 15 bp, Homo sapiens
ttaaatatagttctt

SEQ ID NO: 1049414 - DNA, 15 bp, Homo sapiens
gttaaatatagttct

SEQ ID NO: 1049415 - DNA, 15 bp, Homo sapiens
agttaaatatagttc

SEQ ID NO: 1049416 - DNA, 15 bp, Homo sapiens
tagttaaatatagtt

SEQ ID NO: 1049417 - DNA, 15 bp, Homo sapiens
ttagttaaatatagt

SEQ ID NO: 1049418 - DNA, 15 bp, Homo sapiens
attagttaaatatag

SEQ ID NO: 1049419 - DNA, 15 bp, Homo sapiens
cattagttaaatata

SEQ ID NO: 1049420 - DNA, 15 bp, Homo sapiens
ccattagttaaatat

SEQ ID NO: 1049421 - DNA, 15 bp, Homo sapiens
tccattagttaaata

SEQ ID NO: 1049422 - DNA, 15 bp, Homo sapiens
ctccattagttaaat

SEQ ID NO: 1049423 - DNA, 15 bp, Homo sapiens
actccattagttaaa

SEQ ID NO: 1049424 - DNA, 15 bp, Homo sapiens
cactccattagttaa

SEQ ID NO: 1049425 - DNA, 15 bp, Homo sapiens
gcactccattagtta

SEQ ID NO: 1049426 - DNA, 15 bp, Homo sapiens
ggcactccattagtt

SEQ ID NO: 1049427 - DNA, 15 bp, Homo sapiens
aggcactccattagt

SEQ ID NO: 1049428 - DNA, 15 bp, Homo sapiens
aaggcactccattag

SEQ ID NO: 1049429 - DNA, 15 bp, Homo sapiens
taaggcactccatta

SEQ ID NO: 1049430 - DNA, 15 bp, Homo sapiens
ttaaggcactccatt

SEQ ID NO: 1049431 - DNA, 15 bp, Homo sapiens
gttaaggcactccat

SEQ ID NO: 1049432 - DNA, 15 bp, Homo sapiens
tgttaaggcactcca

SEQ ID NO: 1049433 - DNA, 15 bp, Homo sapiens
atgttaaggcactcc

SEQ ID NO: 1049434 - DNA, 15 bp, Homo sapiens
catgttaaggcactc

SEQ ID NO: 1049435 - DNA, 15 bp, Homo sapiens
acatgttaaggcact

SEQ ID NO: 1049436 - DNA, 15 bp, Homo sapiens
cacatgttaaggcac

SEQ ID NO: 1049437 - DNA, 15 bp, Homo sapiens
acacatgttaaggca

SEQ ID NO: 1049438 - DNA, 15 bp, Homo sapiens
cacacatgttaaggc

SEQ ID NO: 1049439 - DNA, 15 bp, Homo sapiens
gcacacatgttaagg

SEQ ID NO: 1049440 - DNA, 15 bp, Homo sapiens
ggcacacatgttaag

SEQ ID NO: 1049441 - DNA, 15 bp, Homo sapiens
tggcacacatgttaa

SEQ ID NO: 1049442 - DNA, 15 bp, Homo sapiens
gtggcacacatgtta

SEQ ID NO: 1049443 - DNA, 15 bp, Homo sapiens
tgtggcacacatgtt

SEQ ID NO: 1049444 - DNA, 15 bp, Homo sapiens
ttgtggcacacatgt

SEQ ID NO: 1049445 - DNA, 15 bp, Homo sapiens
cttgtggcacacatg

SEQ ID NO: 1049446 - DNA, 15 bp, Homo sapiens
acttgtggcacacat

SEQ ID NO: 1049447 - DNA, 15 bp, Homo sapiens
aacttgtggcacaca

SEQ ID NO: 1049448 - DNA, 15 bp, Homo sapiens
taacttgtggcacac

SEQ ID NO: 1049449 - DNA, 15 bp, Homo sapiens
ataacttgtggcaca

SEQ ID NO: 1049450 - DNA, 15 bp, Homo sapiens
cataacttgtggcac

SEQ ID NO: 1049451 - DNA, 15 bp, Homo sapiens
acataacttgtggca

SEQ ID NO: 1049452 - DNA, 15 bp, Homo sapiens
gacataacttgtggc

SEQ ID NO: 1049453 - DNA, 15 bp, Homo sapiens
tgacataacttgtgg

SEQ ID NO: 1049454 - DNA, 15 bp, Homo sapiens
atgacataacttgtg

SEQ ID NO: 1049455 - DNA, 15 bp, Homo sapiens
aatgacataacttgt

SEQ ID NO: 1049456 - DNA, 15 bp, Homo sapiens
taatgacataacttg

SEQ ID NO: 1049457 - DNA, 15 bp, Homo sapiens
ctaatgacataactt

SEQ ID NO: 1049458 - DNA, 15 bp, Homo sapiens
cctaatgacataact

SEQ ID NO: 1049459 - DNA, 15 bp, Homo sapiens
acctaatgacataac

SEQ ID NO: 1049460 - DNA, 15 bp, Homo sapiens
tacctaatgacataa

SEQ ID NO: 1049461 - DNA, 15 bp, Homo sapiens
ttacctaatgacata

SEQ ID NO: 1049462 - DNA, 15 bp, Homo sapiens
tttacctaatgacat

SEQ ID NO: 1049463 - DNA, 15 bp, Homo sapiens
ttttacctaatgaca

SEQ ID NO: 1049464 - DNA, 15 bp, Homo sapiens
tttttacctaatgac

SEQ ID NO: 1049465 - DNA, 15 bp, Homo sapiens
atttttacctaatga

SEQ ID NO: 1049466 - DNA, 15 bp, Homo sapiens
tatttttacctaatg

SEQ ID NO: 1049467 - DNA, 15 bp, Homo sapiens
ctatttttacctaat

SEQ ID NO: 1049468 - DNA, 15 bp, Homo sapiens
gctatttttacctaa

SEQ ID NO: 1049469 - DNA, 15 bp, Homo sapiens
ggctatttttaccta

SEQ ID NO: 1049470 - DNA, 15 bp, Homo sapiens
aggctatttttacct

SEQ ID NO: 1049471 - DNA, 15 bp, Homo sapiens
gaggctatttttacc

SEQ ID NO: 1049472 - DNA, 15 bp, Homo sapiens
agaggctatttttac

SEQ ID NO: 1049473 - DNA, 15 bp, Homo sapiens
aagaggctattttta

SEQ ID NO: 1049474 - DNA, 15 bp, Homo sapiens
aaagaggctattttt

SEQ ID NO: 1049475 - DNA, 15 bp, Homo sapiens
aaaagaggctatttt

SEQ ID NO: 1049476 - DNA, 15 bp, Homo sapiens
aaaaagaggctattt

SEQ ID NO: 1049477 - DNA, 15 bp, Homo sapiens
gaaaaagaggctatt

SEQ ID NO: 1049478 - DNA, 15 bp, Homo sapiens
ggaaaaagaggctat

SEQ ID NO: 1049479 - DNA, 15 bp, Homo sapiens
aggaaaaagaggcta

SEQ ID NO: 1049480 - DNA, 15 bp, Homo sapiens
taggaaaaagaggct

SEQ ID NO: 1049481 - DNA, 15 bp, Homo sapiens
ctaggaaaaagaggc

SEQ ID NO: 1049482 - DNA, 15 bp, Homo sapiens
cctaggaaaaagagg

SEQ ID NO: 1049483 - DNA, 15 bp, Homo sapiens
acctaggaaaaagag

SEQ ID NO: 1049484 - DNA, 15 bp, Homo sapiens
cacctaggaaaaaga

SEQ ID NO: 1049485 - DNA, 15 bp, Homo sapiens
acacctaggaaaaag

SEQ ID NO: 1049486 - DNA, 15 bp, Homo sapiens
aacacctaggaaaaa

SEQ ID NO: 1049487 - DNA, 15 bp, Homo sapiens
caacacctaggaaaa

SEQ ID NO: 1049488 - DNA, 15 bp, Homo sapiens
ccaacacctaggaaa

SEQ ID NO: 1049489 - DNA, 15 bp, Homo sapiens
accaacacctaggaa

SEQ ID NO: 1049490 - DNA, 15 bp, Homo sapiens
caccaacacctagga

SEQ ID NO: 1049491 - DNA, 15 bp, Homo sapiens
gcaccaacacctagg

SEQ ID NO: 1049492 - DNA, 15 bp, Homo sapiens
agcaccaacacctag

SEQ ID NO: 1049493 - DNA, 15 bp, Homo sapiens
cagcaccaacaccta

SEQ ID NO: 1049494 - DNA, 15 bp, Homo sapiens
acagcaccaacacct

SEQ ID NO: 1049495 - DNA, 15 bp, Homo sapiens
aacagcaccaacacc

SEQ ID NO: 1049496 - DNA, 15 bp, Homo sapiens
caacagcaccaacac

SEQ ID NO: 1049497 - DNA, 15 bp, Homo sapiens
ccaacagcaccaaca

SEQ ID NO: 1049498 - DNA, 15 bp, Homo sapiens
accaacagcaccaac

SEQ ID NO: 1049499 - DNA, 15 bp, Homo sapiens
gaccaacagcaccaa

SEQ ID NO: 1049500 - DNA, 15 bp, Homo sapiens
ggaccaacagcacca

SEQ ID NO: 1049501 - DNA, 15 bp, Homo sapiens
gggaccaacagcacc

SEQ ID NO: 1049502 - DNA, 15 bp, Homo sapiens
tgggaccaacagcac

SEQ ID NO: 1049503 - DNA, 15 bp, Homo sapiens
ctgggaccaacagca

SEQ ID NO: 1049504 - DNA, 15 bp, Homo sapiens
tctgggaccaacagc

SEQ ID NO: 1049505 - DNA, 15 bp, Homo sapiens
ttctgggaccaacag

SEQ ID NO: 1049506 - DNA, 15 bp, Homo sapiens
tttctgggaccaaca

SEQ ID NO: 1049507 - DNA, 15 bp, Homo sapiens
ttttctgggaccaac

SEQ ID NO: 1049508 - DNA, 15 bp, Homo sapiens
attttctgggaccaa

SEQ ID NO: 1049509 - DNA, 15 bp, Homo sapiens
tattttctgggacca

SEQ ID NO: 1049510 - DNA, 15 bp, Homo sapiens
ttattttctgggacc

SEQ ID NO: 1049511 - DNA, 15 bp, Homo sapiens
tttattttctgggac

SEQ ID NO: 1049512 - DNA, 15 bp, Homo sapiens
ttttattttctggga

SEQ ID NO: 1049513 - DNA, 15 bp, Homo sapiens
attttattttctggg

SEQ ID NO: 1049514 - DNA, 15 bp, Homo sapiens
gattttattttctgg

SEQ ID NO: 1049515 - DNA, 15 bp, Homo sapiens
tgattttattttctg

SEQ ID NO: 1049516 - DNA, 15 bp, Homo sapiens
atgattttattttct

SEQ ID NO: 1049517 - DNA, 15 bp, Homo sapiens
gatgattttattttc

SEQ ID NO: 1049518 - DNA, 15 bp, Homo sapiens
cgatgattttatttt

SEQ ID NO: 1049519 - DNA, 15 bp, Homo sapiens
acgatgattttattt

SEQ ID NO: 1049520 - DNA, 15 bp, Homo sapiens
aacgatgattttatt

SEQ ID NO: 1049521 - DNA, 15 bp, Homo sapiens
gaacgatgattttat

SEQ ID NO: 1049522 - DNA, 15 bp, Homo sapiens
tgaacgatgatttta

SEQ ID NO: 1049523 - DNA, 15 bp, Homo sapiens
ctgaacgatgatttt

SEQ ID NO: 1049524 - DNA, 15 bp, Homo sapiens
actgaacgatgattt

SEQ ID NO: 1049525 - DNA, 15 bp, Homo sapiens
gactgaacgatgatt

SEQ ID NO: 1049526 - DNA, 15 bp, Homo sapiens
ggactgaacgatgat

SEQ ID NO: 1049527 - DNA, 15 bp, Homo sapiens
aggactgaacgatga

SEQ ID NO: 1049528 - DNA, 15 bp, Homo sapiens
aaggactgaacgatg

SEQ ID NO: 1049529 - DNA, 15 bp, Homo sapiens
gaaggactgaacgat

SEQ ID NO: 1049530 - DNA, 15 bp, Homo sapiens
tgaaggactgaacga

SEQ ID NO: 1049531 - DNA, 15 bp, Homo sapiens
ctgaaggactgaacg

SEQ ID NO: 1049532 - DNA, 15 bp, Homo sapiens
actgaaggactgaac

SEQ ID NO: 1049533 - DNA, 15 bp, Homo sapiens
gactgaaggactgaa

SEQ ID NO: 1049534 - DNA, 15 bp, Homo sapiens
ggactgaaggactga

SEQ ID NO: 1049535 - DNA, 15 bp, Homo sapiens
tggactgaaggactg

SEQ ID NO: 1049536 - DNA, 15 bp, Homo sapiens
atggactgaaggact

SEQ ID NO: 1049537 - DNA, 15 bp, Homo sapiens
aatggactgaaggac

SEQ ID NO: 1049538 - DNA, 15 bp, Homo sapiens
caatggactgaagga

SEQ ID NO: 1049539 - DNA, 15 bp, Homo sapiens
ccaatggactgaagg

SEQ ID NO: 1049540 - DNA, 15 bp, Homo sapiens
gccaatggactgaag

SEQ ID NO: 1049541 - DNA, 15 bp, Homo sapiens
agccaatggactgaa

SEQ ID NO: 1049542 - DNA, 15 bp, Homo sapiens
cagccaatggactga

SEQ ID NO: 1049543 - DNA, 15 bp, Homo sapiens
ccagccaatggactg

SEQ ID NO: 1049544 - DNA, 15 bp, Homo sapiens
tccagccaatggact

SEQ ID NO: 1049545 - DNA, 15 bp, Homo sapiens
gtccagccaatggac

SEQ ID NO: 1049546 - DNA, 15 bp, Homo sapiens
tgtccagccaatgga

SEQ ID NO: 1049547 - DNA, 15 bp, Homo sapiens
gtgtccagccaatgg

SEQ ID NO: 1049548 - DNA, 15 bp, Homo sapiens
agtgtccagccaatg

SEQ ID NO: 1049549 - DNA, 15 bp, Homo sapiens
gagtgtccagccaat

SEQ ID NO: 1049550 - DNA, 15 bp, Homo sapiens
ggagtgtccagccaa

SEQ ID NO: 1049551 - DNA, 15 bp, Homo sapiens
tggagtgtccagcca

SEQ ID NO: 1049552 - DNA, 15 bp, Homo sapiens
gtggagtgtccagcc

SEQ ID NO: 1049553 - DNA, 15 bp, Homo sapiens
ggtggagtgtccagc

SEQ ID NO: 1049554 - DNA, 15 bp, Homo sapiens
gggtggagtgtccag

SEQ ID NO: 1049555 - DNA, 15 bp, Homo sapiens
ggggtggagtgtcca

SEQ ID NO: 1049556 - DNA, 15 bp, Homo sapiens
tggggtggagtgtcc

SEQ ID NO: 1049557 - DNA, 15 bp, Homo sapiens
ctggggtggagtgtc

SEQ ID NO: 1049558 - DNA, 15 bp, Homo sapiens
gctggggtggagtgt

SEQ ID NO: 1049559 - DNA, 15 bp, Homo sapiens
agctggggtggagtg

SEQ ID NO: 1049560 - DNA, 15 bp, Homo sapiens
tagctggggtggagt

SEQ ID NO: 1049561 - DNA, 15 bp, Homo sapiens
ctagctggggtggag

SEQ ID NO: 1049562 - DNA, 15 bp, Homo sapiens
gctagctggggtgga

SEQ ID NO: 1049563 - DNA, 15 bp, Homo sapiens
tgctagctggggtgg

SEQ ID NO: 1049564 - DNA, 15 bp, Homo sapiens
gtgctagctggggtg

SEQ ID NO: 1049565 - DNA, 15 bp, Homo sapiens
ggtgctagctggggt

SEQ ID NO: 1049566 - DNA, 15 bp, Homo sapiens
tggtgctagctgggg

SEQ ID NO: 1049567 - DNA, 15 bp, Homo sapiens
ctggtgctagctggg

SEQ ID NO: 1049568 - DNA, 15 bp, Homo sapiens
gctggtgctagctgg

SEQ ID NO: 1049569 - DNA, 15 bp, Homo sapiens
tgctggtgctagctg

SEQ ID NO: 1049570 - DNA, 15 bp, Homo sapiens
ttgctggtgctagct

SEQ ID NO: 1049571 - DNA, 15 bp, Homo sapiens
cttgctggtgctagc

SEQ ID NO: 1049572 - DNA, 15 bp, Homo sapiens
gcttgctggtgctag

SEQ ID NO: 1049573 - DNA, 15 bp, Homo sapiens
agcttgctggtgcta

SEQ ID NO: 1049574 - DNA, 15 bp, Homo sapiens
gagcttgctggtgct

SEQ ID NO: 1049575 - DNA, 15 bp, Homo sapiens
tgagcttgctggtgc

SEQ ID NO: 1049576 - DNA, 15 bp, Homo sapiens
ctgagcttgctggtg

SEQ ID NO: 1049577 - DNA, 15 bp, Homo sapiens
gctgagcttgctggt

SEQ ID NO: 1049578 - DNA, 15 bp, Homo sapiens
agctgagcttgctgg

SEQ ID NO: 1049579 - DNA, 15 bp, Homo sapiens
cagctgagcttgctg

SEQ ID NO: 1049580 - DNA, 15 bp, Homo sapiens
gcagctgagcttgct

SEQ ID NO: 1049581 - DNA, 15 bp, Homo sapiens
ggcagctgagcttgc

SEQ ID NO: 1049582 - DNA, 15 bp, Homo sapiens
aggcagctgagcttg

SEQ ID NO: 1049583 - DNA, 15 bp, Homo sapiens
caggcagctgagctt

SEQ ID NO: 1049584 - DNA, 15 bp, Homo sapiens
gcaggcagctgagct

SEQ ID NO: 1049585 - DNA, 15 bp, Homo sapiens
tgcaggcagctgagc

SEQ ID NO: 1049586 - DNA, 15 bp, Homo sapiens
gtgcaggcagctgag

SEQ ID NO: 1049587 - DNA, 15 bp, Homo sapiens
tgtgcaggcagctga

SEQ ID NO: 1049588 - DNA, 15 bp, Homo sapiens
ttgtgcaggcagctg

SEQ ID NO: 1049589 - DNA, 15 bp, Homo sapiens
cttgtgcaggcagct

SEQ ID NO: 1049590 - DNA, 15 bp, Homo sapiens
tcttgtgcaggcagc

SEQ ID NO: 1049591 - DNA, 15 bp, Homo sapiens
ttcttgtgcaggcag

SEQ ID NO: 1049592 - DNA, 15 bp, Homo sapiens
cttcttgtgcaggca

SEQ ID NO: 1049593 - DNA, 15 bp, Homo sapiens
ccttcttgtgcaggc

SEQ ID NO: 1049594 - DNA, 15 bp, Homo sapiens
cccttcttgtgcagg

SEQ ID NO: 1049595 - DNA, 15 bp, Homo sapiens
acccttcttgtgcag

SEQ ID NO: 1049596 - DNA, 15 bp, Homo sapiens
cacccttcttgtgca

SEQ ID NO: 1049597 - DNA, 15 bp, Homo sapiens
acacccttcttgtgc

SEQ ID NO: 1049598 - DNA, 15 bp, Homo sapiens
aacacccttcttgtg

SEQ ID NO: 1049599 - DNA, 15 bp, Homo sapiens
aaacacccttcttgt

SEQ ID NO: 1049600 - DNA, 15 bp, Homo sapiens
taaacacccttcttg

SEQ ID NO: 1049601 - DNA, 15 bp, Homo sapiens
gtaaacacccttctt

SEQ ID NO: 1049602 - DNA, 15 bp, Homo sapiens
tgtaaacacccttct

SEQ ID NO: 1049603 - DNA, 15 bp, Homo sapiens
ttgtaaacacccttc

SEQ ID NO: 1049604 - DNA, 15 bp, Homo sapiens
tttgtaaacaccctt

SEQ ID NO: 1049605 - DNA, 15 bp, Homo sapiens
gtttgtaaacaccct

SEQ ID NO: 1049606 - DNA, 15 bp, Homo sapiens
agtttgtaaacaccc

SEQ ID NO: 1049607 - DNA, 15 bp, Homo sapiens
cagtttgtaaacacc

SEQ ID NO: 1049608 - DNA, 15 bp, Homo sapiens
gcagtttgtaaacac

SEQ ID NO: 1049609 - DNA, 15 bp, Homo sapiens
ggcagtttgtaaaca

SEQ ID NO: 1049610 - DNA, 15 bp, Homo sapiens
tggcagtttgtaaac

SEQ ID NO: 1049611 - DNA, 15 bp, Homo sapiens
gtggcagtttgtaaa

SEQ ID NO: 1049612 - DNA, 15 bp, Homo sapiens
cgtggcagtttgtaa

SEQ ID NO: 1049613 - DNA, 15 bp, Homo sapiens
acgtggcagtttgta

SEQ ID NO: 1049614 - DNA, 15 bp, Homo sapiens
cacgtggcagtttgt

SEQ ID NO: 1049615 - DNA, 15 bp, Homo sapiens
acacgtggcagtttg

SEQ ID NO: 1049616 - DNA, 15 bp, Homo sapiens
tacacgtggcagttt

SEQ ID NO: 1049617 - DNA, 15 bp, Homo sapiens
ctacacgtggcagtt

SEQ ID NO: 1049618 - DNA, 15 bp, Homo sapiens
tctacacgtggcagt

SEQ ID NO: 1049619 - DNA, 15 bp, Homo sapiens
ttctacacgtggcag

SEQ ID NO: 1049620 - DNA, 15 bp, Homo sapiens
gttctacacgtggca

SEQ ID NO: 1049621 - DNA, 15 bp, Homo sapiens
agttctacacgtggc

SEQ ID NO: 1049622 - DNA, 15 bp, Homo sapiens
cagttctacacgtgg

SEQ ID NO: 1049623 - DNA, 15 bp, Homo sapiens
ccagttctacacgtg

SEQ ID NO: 1049624 - DNA, 15 bp, Homo sapiens
accagttctacacgt

SEQ ID NO: 1049625 - DNA, 15 bp, Homo sapiens
caccagttctacacg

SEQ ID NO: 1049626 - DNA, 15 bp, Homo sapiens
gcaccagttctacac

SEQ ID NO: 1049627 - DNA, 15 bp, Homo sapiens
ggcaccagttctaca

SEQ ID NO: 1049628 - DNA, 15 bp, Homo sapiens
tggcaccagttctac

SEQ ID NO: 1049629 - DNA, 15 bp, Homo sapiens
ctggcaccagttcta

SEQ ID NO: 1049630 - DNA, 15 bp, Homo sapiens
cctggcaccagttct

SEQ ID NO: 1049631 - DNA, 15 bp, Homo sapiens
acctggcaccagttc

SEQ ID NO: 1049632 - DNA, 15 bp, Homo sapiens
tacctggcaccagtt

SEQ ID NO: 1049633 - DNA, 15 bp, Homo sapiens
ctacctggcaccagt

SEQ ID NO: 1049634 - DNA, 15 bp, Homo sapiens
tctacctggcaccag

SEQ ID NO: 1049635 - DNA, 15 bp, Homo sapiens
ttctacctggcacca

SEQ ID NO: 1049636 - DNA, 15 bp, Homo sapiens
cttctacctggcacc

SEQ ID NO: 1049637 - DNA, 15 bp, Homo sapiens
ccttctacctggcac

SEQ ID NO: 1049638 - DNA, 15 bp, Homo sapiens
cccttctacctggca

SEQ ID NO: 1049639 - DNA, 15 bp, Homo sapiens
ccccttctacctggc

SEQ ID NO: 1049640 - DNA, 15 bp, Homo sapiens
gccccttctacctgg

SEQ ID NO: 1049641 - DNA, 15 bp, Homo sapiens
tgccccttctacctg

SEQ ID NO: 1049642 - DNA, 15 bp, Homo sapiens
ttgccccttctacct

SEQ ID NO: 1049643 - DNA, 15 bp, Homo sapiens
cttgccccttctacc

SEQ ID NO: 1049644 - DNA, 15 bp, Homo sapiens
ccttgccccttctac

SEQ ID NO: 1049645 - DNA, 15 bp, Homo sapiens
tccttgccccttcta

SEQ ID NO: 1049646 - DNA, 15 bp, Homo sapiens
atccttgccccttct

SEQ ID NO: 1049647 - DNA, 15 bp, Homo sapiens
catccttgccccttc

SEQ ID NO: 1049648 - DNA, 15 bp, Homo sapiens
acatccttgcccctt

SEQ ID NO: 1049649 - DNA, 15 bp, Homo sapiens
gacatccttgcccct

SEQ ID NO: 1049650 - DNA, 15 bp, Homo sapiens
ggacatccttgcccc

SEQ ID NO: 1049651 - DNA, 15 bp, Homo sapiens
tggacatccttgccc

SEQ ID NO: 1049652 - DNA, 15 bp, Homo sapiens
ttggacatccttgcc

SEQ ID NO: 1049653 - DNA, 15 bp, Homo sapiens
tttggacatccttgc

SEQ ID NO: 1049654 - DNA, 15 bp, Homo sapiens
atttggacatccttg

SEQ ID NO: 1049655 - DNA, 15 bp, Homo sapiens
gatttggacatcctt

SEQ ID NO: 1049656 - DNA, 15 bp, Homo sapiens
agatttggacatcct

SEQ ID NO: 1049657 - DNA, 15 bp, Homo sapiens
aagatttggacatcc

SEQ ID NO: 1049658 - DNA, 15 bp, Homo sapiens
taagatttggacatc

SEQ ID NO: 1049659 - DNA, 15 bp, Homo sapiens
ttaagatttggacat

SEQ ID NO: 1049660 - DNA, 15 bp, Homo sapiens
cttaagatttggaca

SEQ ID NO: 1049661 - DNA, 15 bp, Homo sapiens
gcttaagatttggac

SEQ ID NO: 1049662 - DNA, 15 bp, Homo sapiens
tgcttaagatttgga

SEQ ID NO: 1049663 - DNA, 15 bp, Homo sapiens
ttgcttaagatttgg

SEQ ID NO: 1049664 - DNA, 15 bp, Homo sapiens
tttgcttaagatttg

SEQ ID NO: 1049665 - DNA, 15 bp, Homo sapiens
ctttgcttaagattt

SEQ ID NO: 1049666 - DNA, 15 bp, Homo sapiens
actttgcttaagatt

SEQ ID NO: 1049667 - DNA, 15 bp, Homo sapiens
cactttgcttaagat

SEQ ID NO: 1049668 - DNA, 15 bp, Homo sapiens
tcactttgcttaaga

SEQ ID NO: 1049669 - DNA, 15 bp, Homo sapiens
atcactttgcttaag

SEQ ID NO: 1049670 - DNA, 15 bp, Homo sapiens
aatcactttgcttaa

SEQ ID NO: 1049671 - DNA, 15 bp, Homo sapiens
taatcactttgctta

SEQ ID NO: 1049672 - DNA, 15 bp, Homo sapiens
gtaatcactttgctt

SEQ ID NO: 1049673 - DNA, 15 bp, Homo sapiens
tgtaatcactttgct

SEQ ID NO: 1049674 - DNA, 15 bp, Homo sapiens
ctgtaatcactttgc

SEQ ID NO: 1049675 - DNA, 15 bp, Homo sapiens
cctgtaatcactttg

SEQ ID NO: 1049676 - DNA, 15 bp, Homo sapiens
ccctgtaatcacttt

SEQ ID NO: 1049677 - DNA, 15 bp, Homo sapiens
gccctgtaatcactt

SEQ ID NO: 1049678 - DNA, 15 bp, Homo sapiens
tgccctgtaatcact

SEQ ID NO: 1049679 - DNA, 15 bp, Homo sapiens
ctgccctgtaatcac

SEQ ID NO: 1049680 - DNA, 15 bp, Homo sapiens
cctgccctgtaatca

SEQ ID NO: 1049681 - DNA, 15 bp, Homo sapiens
ccctgccctgtaatc

SEQ ID NO: 1049682 - DNA, 15 bp, Homo sapiens
tccctgccctgtaat

SEQ ID NO: 1049683 - DNA, 15 bp, Homo sapiens
atccctgccctgtaa

SEQ ID NO: 1049684 - DNA, 15 bp, Homo sapiens
aatccctgccctgta

SEQ ID NO: 1049685 - DNA, 15 bp, Homo sapiens
taatccctgccctgt

SEQ ID NO: 1049686 - DNA, 15 bp, Homo sapiens
ttaatccctgccctg

SEQ ID NO: 1049687 - DNA, 15 bp, Homo sapiens
tttaatccctgccct

SEQ ID NO: 1049688 - DNA, 15 bp, Homo sapiens
gtttaatccctgccc

SEQ ID NO: 1049689 - DNA, 15 bp, Homo sapiens
ggtttaatccctgcc

SEQ ID NO: 1049690 - DNA, 15 bp, Homo sapiens
aggtttaatccctgc

SEQ ID NO: 1049691 - DNA, 15 bp, Homo sapiens
caggtttaatccctg

SEQ ID NO: 1049692 - DNA, 15 bp, Homo sapiens
tcaggtttaatccct

SEQ ID NO: 1049693 - DNA, 15 bp, Homo sapiens
atcaggtttaatccc

SEQ ID NO: 1049694 - DNA, 15 bp, Homo sapiens
gatcaggtttaatcc

SEQ ID NO: 1049695 - DNA, 15 bp, Homo sapiens
agatcaggtttaatc

SEQ ID NO: 1049696 - DNA, 15 bp, Homo sapiens
aagatcaggtttaat

SEQ ID NO: 1049697 - DNA, 15 bp, Homo sapiens
taagatcaggtttaa

SEQ ID NO: 1049698 - DNA, 15 bp, Homo sapiens
gtaagatcaggttta

SEQ ID NO: 1049699 - DNA, 15 bp, Homo sapiens
ggtaagatcaggttt

SEQ ID NO: 1049700 - DNA, 15 bp, Homo sapiens
tggtaagatcaggtt

SEQ ID NO: 1049701 - DNA, 15 bp, Homo sapiens
ttggtaagatcaggt

SEQ ID NO: 1049702 - DNA, 15 bp, Homo sapiens
tttggtaagatcagg

SEQ ID NO: 1049703 - DNA, 15 bp, Homo sapiens
ttttggtaagatcag

SEQ ID NO: 1049704 - DNA, 15 bp, Homo sapiens
attttggtaagatca

SEQ ID NO: 1049705 - DNA, 15 bp, Homo sapiens
tattttggtaagatc

SEQ ID NO: 1049706 - DNA, 15 bp, Homo sapiens
ttattttggtaagat

SEQ ID NO: 1049707 - DNA, 15 bp, Homo sapiens
gttattttggtaaga

SEQ ID NO: 1049708 - DNA, 15 bp, Homo sapiens
agttattttggtaag

SEQ ID NO: 1049709 - DNA, 15 bp, Homo sapiens
aagttattttggtaa

SEQ ID NO: 1049710 - DNA, 15 bp, Homo sapiens
aaagttattttggta

SEQ ID NO: 1049711 - DNA, 15 bp, Homo sapiens
taaagttattttggt

SEQ ID NO: 1049712 - DNA, 15 bp, Homo sapiens
gtaaagttattttgg

SEQ ID NO: 1049713 - DNA, 15 bp, Homo sapiens
ggtaaagttattttg

SEQ ID NO: 1049714 - DNA, 15 bp, Homo sapiens
tggtaaagttatttt

SEQ ID NO: 1049715 - DNA, 15 bp, Homo sapiens
ctggtaaagttattt

SEQ ID NO: 1049716 - DNA, 15 bp, Homo sapiens
tctggtaaagttatt

SEQ ID NO: 1049717 - DNA, 15 bp, Homo sapiens
ctctggtaaagttat

SEQ ID NO: 1049718 - DNA, 15 bp, Homo sapiens
tctctggtaaagtta

SEQ ID NO: 1049719 - DNA, 15 bp, Homo sapiens
ctctctggtaaagtt

SEQ ID NO: 1049720 - DNA, 15 bp, Homo sapiens
cctctctggtaaagt

SEQ ID NO: 1049721 - DNA, 15 bp, Homo sapiens
gcctctctggtaaag

SEQ ID NO: 1049722 - DNA, 15 bp, Homo sapiens
tgcctctctggtaaa

SEQ ID NO: 1049723 - DNA, 15 bp, Homo sapiens
ttgcctctctggtaa

SEQ ID NO: 1049724 - DNA, 15 bp, Homo sapiens
tttgcctctctggta

SEQ ID NO: 1049725 - DNA, 15 bp, Homo sapiens
ttttgcctctctggt

SEQ ID NO: 1049726 - DNA, 15 bp, Homo sapiens
gttttgcctctctgg

SEQ ID NO: 1049727 - DNA, 15 bp, Homo sapiens
agttttgcctctctg

SEQ ID NO: 1049728 - DNA, 15 bp, Homo sapiens
gagttttgcctctct

SEQ ID NO: 1049729 - DNA, 15 bp, Homo sapiens
ggagttttgcctctc

SEQ ID NO: 1049730 - DNA, 15 bp, Homo sapiens
aggagttttgcctct

SEQ ID NO: 1049731 - DNA, 15 bp, Homo sapiens
aaggagttttgcctc

SEQ ID NO: 1049732 - DNA, 15 bp, Homo sapiens
gaaggagttttgcct

SEQ ID NO: 1049733 - DNA, 15 bp, Homo sapiens
ggaaggagttttgcc

SEQ ID NO: 1049734 - DNA, 15 bp, Homo sapiens
tggaaggagttttgc

SEQ ID NO: 1049735 - DNA, 15 bp, Homo sapiens
atggaaggagttttg

SEQ ID NO: 1049736 - DNA, 15 bp, Homo sapiens
aatggaaggagtttt

SEQ ID NO: 1049737 - DNA, 15 bp, Homo sapiens
aaatggaaggagttt

SEQ ID NO: 1049738 - DNA, 15 bp, Homo sapiens
caaatggaaggagtt

SEQ ID NO: 1049739 - DNA, 15 bp, Homo sapiens
acaaatggaaggagt

SEQ ID NO: 1049740 - DNA, 15 bp, Homo sapiens
tacaaatggaaggag

SEQ ID NO: 1049741 - DNA, 15 bp, Homo sapiens
ttacaaatggaagga

SEQ ID NO: 1049742 - DNA, 15 bp, Homo sapiens
tttacaaatggaagg

SEQ ID NO: 1049743 - DNA, 15 bp, Homo sapiens
ttttacaaatggaag

SEQ ID NO: 1049744 - DNA, 15 bp, Homo sapiens
cttttacaaatggaa

SEQ ID NO: 1049745 - DNA, 15 bp, Homo sapiens
gcttttacaaatgga

SEQ ID NO: 1049746 - DNA, 15 bp, Homo sapiens
tgcttttacaaatgg

SEQ ID NO: 1049747 - DNA, 15 bp, Homo sapiens
atgcttttacaaatg

SEQ ID NO: 1049748 - DNA, 15 bp, Homo sapiens
tatgcttttacaaat

SEQ ID NO: 1049749 - DNA, 15 bp, Homo sapiens
ttatgcttttacaaa

SEQ ID NO: 1049750 - DNA, 15 bp, Homo sapiens
tttatgcttttacaa

SEQ ID NO: 1049751 - DNA, 15 bp, Homo sapiens
atttatgcttttaca

SEQ ID NO: 1049752 - DNA, 15 bp, Homo sapiens
catttatgcttttac

SEQ ID NO: 1049753 - DNA, 15 bp, Homo sapiens
acatttatgctttta

SEQ ID NO: 1049754 - DNA, 15 bp, Homo sapiens
tacatttatgctttt

SEQ ID NO: 1049755 - DNA, 15 bp, Homo sapiens
ctacatttatgcttt

SEQ ID NO: 1049756 - DNA, 15 bp, Homo sapiens
actacatttatgctt

SEQ ID NO: 1049757 - DNA, 15 bp, Homo sapiens
aactacatttatgct

SEQ ID NO: 1049758 - DNA, 15 bp, Homo sapiens
caactacatttatgc

SEQ ID NO: 1049759 - DNA, 15 bp, Homo sapiens
gcaactacatttatg

SEQ ID NO: 1049760 - DNA, 15 bp, Homo sapiens
ggcaactacatttat

SEQ ID NO: 1049761 - DNA, 15 bp, Homo sapiens
aggcaactacattta

SEQ ID NO: 1049762 - DNA, 15 bp, Homo sapiens
gaggcaactacattt

SEQ ID NO: 1049763 - DNA, 15 bp, Homo sapiens
agaggcaactacatt

SEQ ID NO: 1049764 - DNA, 15 bp, Homo sapiens
cagaggcaactacat

SEQ ID NO: 1049765 - DNA, 15 bp, Homo sapiens
tcagaggcaactaca

SEQ ID NO: 1049766 - DNA, 15 bp, Homo sapiens
ttcagaggcaactac

SEQ ID NO: 1049767 - DNA, 15 bp, Homo sapiens
acttcagaggcaact

SEQ ID NO: 1049768 - DNA, 15 bp, Homo sapiens
gacttcagaggcaac

SEQ ID NO: 1049769 - DNA, 15 bp, Homo sapiens
tgacttcagaggcaa

SEQ ID NO: 1049770 - DNA, 15 bp, Homo sapiens
ttgacttcagaggca

SEQ ID NO: 1049771 - DNA, 15 bp, Homo sapiens
tttgacttcagaggc

SEQ ID NO: 1049772 - DNA, 15 bp, Homo sapiens
ttttgacttcagagg

SEQ ID NO: 1049773 - DNA, 15 bp, Homo sapiens
cttttgacttcagag

SEQ ID NO: 1049774 - DNA, 15 bp, Homo sapiens
ccttttgacttcaga

SEQ ID NO: 1049775 - DNA, 15 bp, Homo sapiens
accttttgacttcag

SEQ ID NO: 1049776 - DNA, 15 bp, Homo sapiens
aaccttttgacttca

SEQ ID NO: 1049777 - DNA, 15 bp, Homo sapiens
taaccttttgacttc

SEQ ID NO: 1049778 - DNA, 15 bp, Homo sapiens
ctaaccttttgactt

SEQ ID NO: 1049779 - DNA, 15 bp, Homo sapiens
tctaaccttttgact

SEQ ID NO: 1049780 - DNA, 15 bp, Homo sapiens
gtctaaccttttgac

SEQ ID NO: 1049781 - DNA, 15 bp, Homo sapiens
tgtctaaccttttga

SEQ ID NO: 1049782 - DNA, 15 bp, Homo sapiens
atgtctaaccttttg

SEQ ID NO: 1049783 - DNA, 15 bp, Homo sapiens
gatgtctaacctttt

SEQ ID NO: 1049784 - DNA, 15 bp, Homo sapiens
agatgtctaaccttt

SEQ ID NO: 1049785 - DNA, 15 bp, Homo sapiens
gagatgtctaacctt

SEQ ID NO: 1049786 - DNA, 15 bp, Homo sapiens
agagatgtctaacct

SEQ ID NO: 1049787 - DNA, 15 bp, Homo sapiens
aagagatgtctaacc

SEQ ID NO: 1049788 - DNA, 15 bp, Homo sapiens
aaagagatgtctaac

SEQ ID NO: 1049789 - DNA, 15 bp, Homo sapiens
caaagagatgtctaa

SEQ ID NO: 1049790 - DNA, 15 bp, Homo sapiens
tcaaagagatgtcta

SEQ ID NO: 1049791 - DNA, 15 bp, Homo sapiens
ctcaaagagatgtct

SEQ ID NO: 1049792 - DNA, 15 bp, Homo sapiens
cctcaaagagatgtc

SEQ ID NO: 1049793 - DNA, 15 bp, Homo sapiens
acctcaaagagatgt

SEQ ID NO: 1049794 - DNA, 15 bp, Homo sapiens
tacctcaaagagatg

SEQ ID NO: 1049795 - DNA, 15 bp, Homo sapiens
ctacctcaaagagat

SEQ ID NO: 1049796 - DNA, 15 bp, Homo sapiens
actacctcaaagaga

SEQ ID NO: 1049797 - DNA, 15 bp, Homo sapiens
gactacctcaaagag

SEQ ID NO: 1049798 - DNA, 15 bp, Homo sapiens
ggactacctcaaaga

SEQ ID NO: 1049799 - DNA, 15 bp, Homo sapiens
cggactacctcaaag

SEQ ID NO: 1049800 - DNA, 15 bp, Homo sapiens
tcggactacctcaaa

SEQ ID NO: 1049801 - DNA, 15 bp, Homo sapiens
ttcggactacctcaa

SEQ ID NO: 1049802 - DNA, 15 bp, Homo sapiens
cttcggactacctca

SEQ ID NO: 1049803 - DNA, 15 bp, Homo sapiens
ccttcggactacctc

SEQ ID NO: 1049804 - DNA, 15 bp, Homo sapiens
gccttcggactacct

SEQ ID NO: 1049805 - DNA, 15 bp, Homo sapiens
tgccttcggactacc

SEQ ID NO: 1049806 - DNA, 15 bp, Homo sapiens
atgccttcggactac

SEQ ID NO: 1049807 - DNA, 15 bp, Homo sapiens
gatgccttcggacta

SEQ ID NO: 1049808 - DNA, 15 bp, Homo sapiens
agatgccttcggact

SEQ ID NO: 1049809 - DNA, 15 bp, Homo sapiens
cagatgccttcggac

SEQ ID NO: 1049810 - DNA, 15 bp, Homo sapiens
gcagatgccttcgga

SEQ ID NO: 1049811 - DNA, 15 bp, Homo sapiens
agcagatgccttcgg

SEQ ID NO: 1049812 - DNA, 15 bp, Homo sapiens
aagcagatgccttcg

SEQ ID NO: 1049813 - DNA, 15 bp, Homo sapiens
caagcagatgccttc

SEQ ID NO: 1049814 - DNA, 15 bp, Homo sapiens
acaagcagatgcctt

SEQ ID NO: 1049815 - DNA, 15 bp, Homo sapiens
tacaagcagatgcct

SEQ ID NO: 1049816 - DNA, 15 bp, Homo sapiens
ctacaagcagatgcc

SEQ ID NO: 1049817 - DNA, 15 bp, Homo sapiens
cctacaagcagatgc

SEQ ID NO: 1049818 - DNA, 15 bp, Homo sapiens
acctacaagcagatg

SEQ ID NO: 1049819 - DNA, 15 bp, Homo sapiens
gacctacaagcagat

SEQ ID NO: 1049820 - DNA, 15 bp, Homo sapiens
agacctacaagcaga

SEQ ID NO: 1049821 - DNA, 15 bp, Homo sapiens
tagacctacaagcag

SEQ ID NO: 1049822 - DNA, 15 bp, Homo sapiens
ttagacctacaagca

SEQ ID NO: 1049823 - DNA, 15 bp, Homo sapiens
tttagacctacaagc

SEQ ID NO: 1049824 - DNA, 15 bp, Homo sapiens
ctttagacctacaag

SEQ ID NO: 1049825 - DNA, 15 bp, Homo sapiens
cctttagacctacaa

SEQ ID NO: 1049826 - DNA, 15 bp, Homo sapiens
gcctttagacctaca

SEQ ID NO: 1049827 - DNA, 15 bp, Homo sapiens
tgcctttagacctac

SEQ ID NO: 1049828 - DNA, 15 bp, Homo sapiens
ctgcctttagaccta

SEQ ID NO: 1049829 - DNA, 15 bp, Homo sapiens
tctgcctttagacct

SEQ ID NO: 1049830 - DNA, 15 bp, Homo sapiens
ttctgcctttagacc

SEQ ID NO: 1049831 - DNA, 15 bp, Homo sapiens
tttctgcctttagac

SEQ ID NO: 1049832 - DNA, 15 bp, Homo sapiens
atttctgcctttaga

SEQ ID NO: 1049833 - DNA, 15 bp, Homo sapiens
catttctgcctttag

SEQ ID NO: 1049834 - DNA, 15 bp, Homo sapiens
acatttctgccttta

SEQ ID NO: 1049835 - DNA, 15 bp, Homo sapiens
aacatttctgccttt

SEQ ID NO: 1049836 - DNA, 15 bp, Homo sapiens
taacatttctgcctt

SEQ ID NO: 1049837 - DNA, 15 bp, Homo sapiens
ttaacatttctgcct

SEQ ID NO: 1049838 - DNA, 15 bp, Homo sapiens
cttaacatttctgcc

SEQ ID NO: 1049839 - DNA, 15 bp, Homo sapiens
ccttaacatttctgc

SEQ ID NO: 1049840 - DNA, 15 bp, Homo sapiens
cccttaacatttctg

SEQ ID NO: 1049841 - DNA, 15 bp, Homo sapiens
gcccttaacatttct

SEQ ID NO: 1049842 - DNA, 15 bp, Homo sapiens
agcccttaacatttc

SEQ ID NO: 1049843 - DNA, 15 bp, Homo sapiens
cagcccttaacattt

SEQ ID NO: 1049844 - DNA, 15 bp, Homo sapiens
gcagcccttaacatt

SEQ ID NO: 1049845 - DNA, 15 bp, Homo sapiens
ggcagcccttaacat

SEQ ID NO: 1049846 - DNA, 15 bp, Homo sapiens
aggcagcccttaaca

SEQ ID NO: 1049847 - DNA, 15 bp, Homo sapiens
gaggcagcccttaac

SEQ ID NO: 1049848 - DNA, 15 bp, Homo sapiens
ggaggcagcccttaa

SEQ ID NO: 1049849 - DNA, 15 bp, Homo sapiens
aggaggcagccctta

SEQ ID NO: 1049850 - DNA, 15 bp, Homo sapiens
caggaggcagccctt

SEQ ID NO: 1049851 - DNA, 15 bp, Homo sapiens
gcaggaggcagccct

SEQ ID NO: 1049852 - DNA, 15 bp, Homo sapiens
ggcaggaggcagccc

SEQ ID NO: 1049853 - DNA, 15 bp, Homo sapiens
aggcaggaggcagcc

SEQ ID NO: 1049854 - DNA, 15 bp, Homo sapiens
aaggcaggaggcagc

SEQ ID NO: 1049855 - DNA, 15 bp, Homo sapiens
caaggcaggaggcag

SEQ ID NO: 1049856 - DNA, 15 bp, Homo sapiens
ccaaggcaggaggca

SEQ ID NO: 1049857 - DNA, 15 bp, Homo sapiens
gccaaggcaggaggc

SEQ ID NO: 1049858 - DNA, 15 bp, Homo sapiens
gggccaaggcaggag

SEQ ID NO: 1049859 - DNA, 15 bp, Homo sapiens
cgggccaaggcagga

SEQ ID NO: 1049860 - DNA, 15 bp, Homo sapiens
acgggccaaggcagg

SEQ ID NO: 1049861 - DNA, 15 bp, Homo sapiens
cacgggccaaggcag

SEQ ID NO: 1049862 - DNA, 15 bp, Homo sapiens
ccacgggccaaggca

SEQ ID NO: 1049863 - DNA, 15 bp, Homo sapiens
accacgggccaaggc

SEQ ID NO: 1049864 - DNA, 15 bp, Homo sapiens
caccacgggccaagg

SEQ ID NO: 1049865 - DNA, 15 bp, Homo sapiens
acaccacgggccaag

SEQ ID NO: 1049866 - DNA, 15 bp, Homo sapiens
aacaccacgggccaa

SEQ ID NO: 1049867 - DNA, 15 bp, Homo sapiens
aaacaccacgggcca

SEQ ID NO: 1049868 - DNA, 15 bp, Homo sapiens
caaacaccacgggcc

SEQ ID NO: 1049869 - DNA, 15 bp, Homo sapiens
acaaacaccacgggc

SEQ ID NO: 1049870 - DNA, 15 bp, Homo sapiens
aacaaacaccacggg

SEQ ID NO: 1049871 - DNA, 15 bp, Homo sapiens
aaacaaacaccacgg

SEQ ID NO: 1049872 - DNA, 15 bp, Homo sapiens
aaaacaaacaccacg

SEQ ID NO: 1049873 - DNA, 15 bp, Homo sapiens
gaaaacaaacaccac

SEQ ID NO: 1049874 - DNA, 15 bp, Homo sapiens
ggaaaacaaacacca

SEQ ID NO: 1049875 - DNA, 15 bp, Homo sapiens
gggaaaacaaacacc

SEQ ID NO: 1049876 - DNA, 15 bp, Homo sapiens
agggaaaacaaacac

SEQ ID NO: 1049877 - DNA, 15 bp, Homo sapiens
cagggaaaacaaaca

SEQ ID NO: 1049878 - DNA, 15 bp, Homo sapiens
ccagggaaaacaaac

SEQ ID NO: 1049879 - DNA, 15 bp, Homo sapiens
cccagggaaaacaaa

SEQ ID NO: 1049880 - DNA, 15 bp, Homo sapiens
tcccagggaaaacaa

SEQ ID NO: 1049881 - DNA, 15 bp, Homo sapiens
ttcccagggaaaaca

SEQ ID NO: 1049882 - DNA, 15 bp, Homo sapiens
cttcccagggaaaac

SEQ ID NO: 1049883 - DNA, 15 bp, Homo sapiens
gcttcccagggaaaa

SEQ ID NO: 1049884 - DNA, 15 bp, Homo sapiens
agcttcccagggaaa

SEQ ID NO: 1049885 - DNA, 15 bp, Homo sapiens
cagcttcccagggaa

SEQ ID NO: 1049886 - DNA, 15 bp, Homo sapiens
gcagcttcccaggga

SEQ ID NO: 1049887 - DNA, 15 bp, Homo sapiens
tgcagcttcccaggg

SEQ ID NO: 1049888 - DNA, 15 bp, Homo sapiens
atgcagcttcccagg

SEQ ID NO: 1049889 - DNA, 15 bp, Homo sapiens
gatgcagcttcccag

SEQ ID NO: 1049890 - DNA, 15 bp, Homo sapiens
agatgcagcttccca

SEQ ID NO: 1049891 - DNA, 15 bp, Homo sapiens
gagatgcagcttccc

SEQ ID NO: 1049892 - DNA, 15 bp, Homo sapiens
tgagatgcagcttcc

SEQ ID NO: 1049893 - DNA, 15 bp, Homo sapiens
gtgagatgcagcttc

SEQ ID NO: 1049894 - DNA, 15 bp, Homo sapiens
ggtgagatgcagctt

SEQ ID NO: 1049895 - DNA, 15 bp, Homo sapiens
tggtgagatgcagct

SEQ ID NO: 1049896 - DNA, 15 bp, Homo sapiens
atggtgagatgcagc

SEQ ID NO: 1049897 - DNA, 15 bp, Homo sapiens
tatggtgagatgcag

SEQ ID NO: 1049898 - DNA, 15 bp, Homo sapiens
atatggtgagatgca

SEQ ID NO: 1049899 - DNA, 15 bp, Homo sapiens
gatatggtgagatgc

SEQ ID NO: 1049900 - DNA, 15 bp, Homo sapiens
ggatatggtgagatg

SEQ ID NO: 1049901 - DNA, 15 bp, Homo sapiens
gggatatggtgagat

SEQ ID NO: 1049902 - DNA, 15 bp, Homo sapiens
agggatatggtgaga

SEQ ID NO: 1049903 - DNA, 15 bp, Homo sapiens
cagggatatggtgag

SEQ ID NO: 1049904 - DNA, 15 bp, Homo sapiens
ccagggatatggtga

SEQ ID NO: 1049905 - DNA, 15 bp, Homo sapiens
tccagggatatggtg

SEQ ID NO: 1049906 - DNA, 15 bp, Homo sapiens
atccagggatatggt

SEQ ID NO: 1049907 - DNA, 15 bp, Homo sapiens
aatccagggatatgg

SEQ ID NO: 1049908 - DNA, 15 bp, Homo sapiens
taatccagggatatg

SEQ ID NO: 1049909 - DNA, 15 bp, Homo sapiens
gtaatccagggatat

SEQ ID NO: 1049910 - DNA, 15 bp, Homo sapiens
tgtaatccagggata

SEQ ID NO: 1049911 - DNA, 15 bp, Homo sapiens
ctgtaatccagggat

SEQ ID NO: 1049912 - DNA, 15 bp, Homo sapiens
gctgtaatccaggga

SEQ ID NO: 1049913 - DNA, 15 bp, Homo sapiens
agctgtaatccaggg

SEQ ID NO: 1049914 - DNA, 15 bp, Homo sapiens
cagctgtaatccagg

SEQ ID NO: 1049915 - DNA, 15 bp, Homo sapiens
gcagctgtaatccag

SEQ ID NO: 1049916 - DNA, 15 bp, Homo sapiens
ggcagctgtaatcca

SEQ ID NO: 1049917 - DNA, 15 bp, Homo sapiens
aggcagctgtaatcc

SEQ ID NO: 1049918 - DNA, 15 bp, Homo sapiens
gaggcagctgtaatc

SEQ ID NO: 1049919 - DNA, 15 bp, Homo sapiens
ggaggcagctgtaat

SEQ ID NO: 1049920 - DNA, 15 bp, Homo sapiens
gggaggcagctgtaa

SEQ ID NO: 1049921 - DNA, 15 bp, Homo sapiens
agggaggcagctgta

SEQ ID NO: 1049922 - DNA, 15 bp, Homo sapiens
cagggaggcagctgt

SEQ ID NO: 1049923 - DNA, 15 bp, Homo sapiens
acagggaggcagctg

SEQ ID NO: 1049924 - DNA, 15 bp, Homo sapiens
cacagggaggcagct

SEQ ID NO: 1049925 - DNA, 15 bp, Homo sapiens
gcacagggaggcagc

SEQ ID NO: 1049926 - DNA, 15 bp, Homo sapiens
agcacagggaggcag

SEQ ID NO: 1049927 - DNA, 15 bp, Homo sapiens
gagcacagggaggca

SEQ ID NO: 1049928 - DNA, 15 bp, Homo sapiens
agagcacagggaggc

SEQ ID NO: 1049929 - DNA, 15 bp, Homo sapiens
cagagcacagggagg

SEQ ID NO: 1049930 - DNA, 15 bp, Homo sapiens
ccagagcacagggag

SEQ ID NO: 1049931 - DNA, 15 bp, Homo sapiens
cccagagcacaggga

SEQ ID NO: 1049932 - DNA, 15 bp, Homo sapiens
gcccagagcacaggg

SEQ ID NO: 1049933 - DNA, 15 bp, Homo sapiens
ggcccagagcacagg

SEQ ID NO: 1049934 - DNA, 15 bp, Homo sapiens
tggcccagagcacag

SEQ ID NO: 1049935 - DNA, 15 bp, Homo sapiens
ttggcccagagcaca

SEQ ID NO: 1049936 - DNA, 15 bp, Homo sapiens
tttggcccagagcac

SEQ ID NO: 1049937 - DNA, 15 bp, Homo sapiens
atttggcccagagca

SEQ ID NO: 1049938 - DNA, 15 bp, Homo sapiens
aatttggcccagagc

SEQ ID NO: 1049939 - DNA, 15 bp, Homo sapiens
gaatttggcccagag

SEQ ID NO: 1049940 - DNA, 15 bp, Homo sapiens
tgaatttggcccaga

SEQ ID NO: 1049941 - DNA, 15 bp, Homo sapiens
ttgaatttggcccag

SEQ ID NO: 1049942 - DNA, 15 bp, Homo sapiens
cttgaatttggccca

SEQ ID NO: 1049943 - DNA, 15 bp, Homo sapiens
tcttgaatttggccc

SEQ ID NO: 1049944 - DNA, 15 bp, Homo sapiens
ttcttgaatttggcc

SEQ ID NO: 1049945 - DNA, 15 bp, Homo sapiens
cttcttgaatttggc

SEQ ID NO: 1049946 - DNA, 15 bp, Homo sapiens
ccttcttgaatttgg

SEQ ID NO: 1049947 - DNA, 15 bp, Homo sapiens
accttcttgaatttg

SEQ ID NO: 1049948 - DNA, 15 bp, Homo sapiens
caccttcttgaattt

SEQ ID NO: 1049949 - DNA, 15 bp, Homo sapiens
acaccttcttgaatt

SEQ ID NO: 1049950 - DNA, 15 bp, Homo sapiens
cacaccttcttgaat

SEQ ID NO: 1049951 - DNA, 15 bp, Homo sapiens
tcacaccttcttgaa

SEQ ID NO: 1049952 - DNA, 15 bp, Homo sapiens
ctcacaccttcttga

SEQ ID NO: 1049953 - DNA, 15 bp, Homo sapiens
gctcacaccttcttg

SEQ ID NO: 1049954 - DNA, 15 bp, Homo sapiens
tgctcacaccttctt

SEQ ID NO: 1049955 - DNA, 15 bp, Homo sapiens
ttgctcacaccttct

SEQ ID NO: 1049956 - DNA, 15 bp, Homo sapiens
cttgctcacaccttc

SEQ ID NO: 1049957 - DNA, 15 bp, Homo sapiens
tcttgctcacacctt

SEQ ID NO: 1049958 - DNA, 15 bp, Homo sapiens
ctcttgctcacacct

SEQ ID NO: 1049959 - DNA, 15 bp, Homo sapiens
actcttgctcacacc

SEQ ID NO: 1049960 - DNA, 15 bp, Homo sapiens
cactcttgctcacac

SEQ ID NO: 1049961 - DNA, 15 bp, Homo sapiens
tcactcttgctcaca

SEQ ID NO: 1049962 - DNA, 15 bp, Homo sapiens
ctcactcttgctcac

SEQ ID NO: 1049963 - DNA, 15 bp, Homo sapiens
cctcactcttgctca

SEQ ID NO: 1049964 - DNA, 15 bp, Homo sapiens
gcctcactcttgctc

SEQ ID NO: 1049965 - DNA, 15 bp, Homo sapiens
tgcctcactcttgct

SEQ ID NO: 1049966 - DNA, 15 bp, Homo sapiens
ctgcctcactcttgc

SEQ ID NO: 1049967 - DNA, 15 bp, Homo sapiens
gctgcctcactcttg

SEQ ID NO: 1049968 - DNA, 15 bp, Homo sapiens
tgctgcctcactctt

SEQ ID NO: 1049969 - DNA, 15 bp, Homo sapiens
ctgctgcctcactct

SEQ ID NO: 1049970 - DNA, 15 bp, Homo sapiens
tctgctgcctcactc

SEQ ID NO: 1049971 - DNA, 15 bp, Homo sapiens
gtctgctgcctcact

SEQ ID NO: 1049972 - DNA, 15 bp, Homo sapiens
cgtctgctgcctcac

SEQ ID NO: 1049973 - DNA, 15 bp, Homo sapiens
ccgtctgctgcctca

SEQ ID NO: 1049974 - DNA, 15 bp, Homo sapiens
cccgtctgctgcctc

SEQ ID NO: 1049975 - DNA, 15 bp, Homo sapiens
acccgtctgctgcct

SEQ ID NO: 1049976 - DNA, 15 bp, Homo sapiens
cacccgtctgctgcc

SEQ ID NO: 1049977 - DNA, 15 bp, Homo sapiens
ccacccgtctgctgc

SEQ ID NO: 1049978 - DNA, 15 bp, Homo sapiens
cccacccgtctgctg

SEQ ID NO: 1049979 - DNA, 15 bp, Homo sapiens
ccccacccgtctgct

SEQ ID NO: 1049980 - DNA, 15 bp, Homo sapiens
gccccacccgtctgc

SEQ ID NO: 1049981 - DNA, 15 bp, Homo sapiens
agccccacccgtctg

SEQ ID NO: 1049982 - DNA, 15 bp, Homo sapiens
aagccccacccgtct

SEQ ID NO: 1049983 - DNA, 15 bp, Homo sapiens
caagccccacccgtc

SEQ ID NO: 1049984 - DNA, 15 bp, Homo sapiens
acaagccccacccgt

SEQ ID NO: 1049985 - DNA, 15 bp, Homo sapiens
tacaagccccacccg

SEQ ID NO: 1049986 - DNA, 15 bp, Homo sapiens
ctacaagccccaccc

SEQ ID NO: 1049987 - DNA, 15 bp, Homo sapiens
tctacaagccccacc

SEQ ID NO: 1049988 - DNA, 15 bp, Homo sapiens
ttctacaagccccac

SEQ ID NO: 1049989 - DNA, 15 bp, Homo sapiens
tttctacaagcccca

SEQ ID NO: 1049990 - DNA, 15 bp, Homo sapiens
atttctacaagcccc

SEQ ID NO: 1049991 - DNA, 15 bp, Homo sapiens
aatttctacaagccc

SEQ ID NO: 1049992 - DNA, 15 bp, Homo sapiens
aaatttctacaagcc

SEQ ID NO: 1049993 - DNA, 15 bp, Homo sapiens
gaaatttctacaagc

SEQ ID NO: 1049994 - DNA, 15 bp, Homo sapiens
agaaatttctacaag

SEQ ID NO: 1049995 - DNA, 15 bp, Homo sapiens
gagaaatttctacaa

SEQ ID NO: 1049996 - DNA, 15 bp, Homo sapiens
agagaaatttctaca

SEQ ID NO: 1049997 - DNA, 15 bp, Homo sapiens
cagagaaatttctac

SEQ ID NO: 1049998 - DNA, 15 bp, Homo sapiens
acagagaaatttcta

SEQ ID NO: 1049999 - DNA, 15 bp, Homo sapiens
tacagagaaatttct

SEQ ID NO: 1050000 - DNA, 15 bp, Homo sapiens
gtacagagaaatttc

SEQ ID NO: 1050001 - DNA, 15 bp, Homo sapiens
ggtacagagaaattt

SEQ ID NO: 1050002 - DNA, 15 bp, Homo sapiens
gggtacagagaaatt

SEQ ID NO: 1050003 - DNA, 15 bp, Homo sapiens
agggtacagagaaat

SEQ ID NO: 1050004 - DNA, 15 bp, Homo sapiens
aagggtacagagaaa

SEQ ID NO: 1050005 - DNA, 15 bp, Homo sapiens
aaagggtacagagaa

SEQ ID NO: 1050006 - DNA, 15 bp, Homo sapiens
taaagggtacagaga

SEQ ID NO: 1050007 - DNA, 15 bp, Homo sapiens
ctaaagggtacagag

SEQ ID NO: 1050008 - DNA, 15 bp, Homo sapiens
cctaaagggtacaga

SEQ ID NO: 1050009 - DNA, 15 bp, Homo sapiens
tcctaaagggtacag

SEQ ID NO: 1050010 - DNA, 15 bp, Homo sapiens
gtcctaaagggtaca

SEQ ID NO: 1050011 - DNA, 15 bp, Homo sapiens
agtcctaaagggtac

SEQ ID NO: 1050012 - DNA, 15 bp, Homo sapiens
aagtcctaaagggta

SEQ ID NO: 1050013 - DNA, 15 bp, Homo sapiens
taagtcctaaagggt

SEQ ID NO: 1050014 - DNA, 15 bp, Homo sapiens
ctaagtcctaaaggg

SEQ ID NO: 1050015 - DNA, 15 bp, Homo sapiens
tctaagtcctaaagg

SEQ ID NO: 1050016 - DNA, 15 bp, Homo sapiens
ttctaagtcctaaag

SEQ ID NO: 1050017 - DNA, 15 bp, Homo sapiens
tttctaagtcctaaa

SEQ ID NO: 1050018 - DNA, 15 bp, Homo sapiens
atttctaagtcctaa

SEQ ID NO: 1050019 - DNA, 15 bp, Homo sapiens
catttctaagtccta

SEQ ID NO: 1050020 - DNA, 15 bp, Homo sapiens
tcatttctaagtcct

SEQ ID NO: 1050021 - DNA, 15 bp, Homo sapiens
gtcatttctaagtcc

SEQ ID NO: 1050022 - DNA, 15 bp, Homo sapiens
agtcatttctaagtc

SEQ ID NO: 1050023 - DNA, 15 bp, Homo sapiens
gagtcatttctaagt

SEQ ID NO: 1050024 - DNA, 15 bp, Homo sapiens
ggagtcatttctaag

SEQ ID NO: 1050025 - DNA, 15 bp, Homo sapiens
aggagtcatttctaa

SEQ ID NO: 1050026 - DNA, 15 bp, Homo sapiens
taggagtcatttcta

SEQ ID NO: 1050027 - DNA, 15 bp, Homo sapiens
ttaggagtcatttct

SEQ ID NO: 1050028 - DNA, 15 bp, Homo sapiens
tttaggagtcatttc

SEQ ID NO: 1050029 - DNA, 15 bp, Homo sapiens
ctttaggagtcattt

SEQ ID NO: 1050030 - DNA, 15 bp, Homo sapiens
gctttaggagtcatt

SEQ ID NO: 1050031 - DNA, 15 bp, Homo sapiens
tgctttaggagtcat

SEQ ID NO: 1050032 - DNA, 15 bp, Homo sapiens
ttgctttaggagtca

SEQ ID NO: 1050033 - DNA, 15 bp, Homo sapiens
attgctttaggagtc

SEQ ID NO: 1050034 - DNA, 15 bp, Homo sapiens
aattgctttaggagt

SEQ ID NO: 1050035 - DNA, 15 bp, Homo sapiens
gaattgctttaggag

SEQ ID NO: 1050036 - DNA, 15 bp, Homo sapiens
agaattgctttagga

SEQ ID NO: 1050037 - DNA, 15 bp, Homo sapiens
tagaattgctttagg

SEQ ID NO: 1050038 - DNA, 15 bp, Homo sapiens
ttagaattgctttag

SEQ ID NO: 1050039 - DNA, 15 bp, Homo sapiens
cttagaattgcttta

SEQ ID NO: 1050040 - DNA, 15 bp, Homo sapiens
acttagaattgcttt

SEQ ID NO: 1050041 - DNA, 15 bp, Homo sapiens
aacttagaattgctt

SEQ ID NO: 1050042 - DNA, 15 bp, Homo sapiens
aaacttagaattgct

SEQ ID NO: 1050043 - DNA, 15 bp, Homo sapiens
caaacttagaattgc

SEQ ID NO: 1050044 - DNA, 15 bp, Homo sapiens
gcaaacttagaattg

SEQ ID NO: 1050045 - DNA, 15 bp, Homo sapiens
agcaaacttagaatt

SEQ ID NO: 1050046 - DNA, 15 bp, Homo sapiens
gagcaaacttagaat

SEQ ID NO: 1050047 - DNA, 15 bp, Homo sapiens
agagcaaacttagaa

SEQ ID NO: 1050048 - DNA, 15 bp, Homo sapiens
aagagcaaacttaga

SEQ ID NO: 1050049 - DNA, 15 bp, Homo sapiens
gaagagcaaacttag

SEQ ID NO: 1050050 - DNA, 15 bp, Homo sapiens
ggaagagcaaactta

SEQ ID NO: 1050051 - DNA, 15 bp, Homo sapiens
tggaagagcaaactt

SEQ ID NO: 1050052 - DNA, 15 bp, Homo sapiens
gtggaagagcaaact

SEQ ID NO: 1050053 - DNA, 15 bp, Homo sapiens
tgtggaagagcaaac

SEQ ID NO: 1050054 - DNA, 15 bp, Homo sapiens
ttgtggaagagcaaa

SEQ ID NO: 1050055 - DNA, 15 bp, Homo sapiens
cttgtggaagagcaa

SEQ ID NO: 1050056 - DNA, 15 bp, Homo sapiens
gcttgtggaagagca

SEQ ID NO: 1050057 - DNA, 15 bp, Homo sapiens
tgcttgtggaagagc

SEQ ID NO: 1050058 - DNA, 15 bp, Homo sapiens
atgcttgtggaagag

SEQ ID NO: 1050059 - DNA, 15 bp, Homo sapiens
gatgcttgtggaaga

SEQ ID NO: 1050060 - DNA, 15 bp, Homo sapiens
agatgcttgtggaag

SEQ ID NO: 1050061 - DNA, 15 bp, Homo sapiens
cagatgcttgtggaa

SEQ ID NO: 1050062 - DNA, 15 bp, Homo sapiens
tcagatgcttgtgga

SEQ ID NO: 1050063 - DNA, 15 bp, Homo sapiens
gtcagatgcttgtgg

SEQ ID NO: 1050064 - DNA, 15 bp, Homo sapiens
ggtcagatgcttgtg

SEQ ID NO: 1050065 - DNA, 15 bp, Homo sapiens
aggtcagatgcttgt

SEQ ID NO: 1050066 - DNA, 15 bp, Homo sapiens
taggtcagatgcttg

SEQ ID NO: 1050067 - DNA, 15 bp, Homo sapiens
ttaggtcagatgctt

SEQ ID NO: 1050068 - DNA, 15 bp, Homo sapiens
gttaggtcagatgct

SEQ ID NO: 1050069 - DNA, 15 bp, Homo sapiens
tgttaggtcagatgc

SEQ ID NO: 1050070 - DNA, 15 bp, Homo sapiens
ttgttaggtcagatg

SEQ ID NO: 1050071 - DNA, 15 bp, Homo sapiens
tttgttaggtcagat

SEQ ID NO: 1050072 - DNA, 15 bp, Homo sapiens
ctttgttaggtcaga

SEQ ID NO: 1050073 - DNA, 15 bp, Homo sapiens
cctttgttaggtcag

SEQ ID NO: 1050074 - DNA, 15 bp, Homo sapiens
tcctttgttaggtca

SEQ ID NO: 1050075 - DNA, 15 bp, Homo sapiens
ttcctttgttaggtc

SEQ ID NO: 1050076 - DNA, 15 bp, Homo sapiens
cttcctttgttaggt

SEQ ID NO: 1050077 - DNA, 15 bp, Homo sapiens
tcttcctttgttagg

SEQ ID NO: 1050078 - DNA, 15 bp, Homo sapiens
ctcttcctttgttag

SEQ ID NO: 1050079 - DNA, 15 bp, Homo sapiens
cctcttcctttgtta

SEQ ID NO: 1050080 - DNA, 15 bp, Homo sapiens
tcctcttcctttgtt

SEQ ID NO: 1050081 - DNA, 15 bp, Homo sapiens
ttcctcttcctttgt

SEQ ID NO: 1050082 - DNA, 15 bp, Homo sapiens
cttcctcttcctttg

SEQ ID NO: 1050083 - DNA, 15 bp, Homo sapiens
tcttcctcttccttt

SEQ ID NO: 1050084 - DNA, 15 bp, Homo sapiens
ttcttcctcttcctt

SEQ ID NO: 1050085 - DNA, 15 bp, Homo sapiens
attcttcctcttcct

SEQ ID NO: 1050086 - DNA, 15 bp, Homo sapiens
gattcttcctcttcc

SEQ ID NO: 1050087 - DNA, 15 bp, Homo sapiens
tgattcttcctcttc

SEQ ID NO: 1050088 - DNA, 15 bp, Homo sapiens
gtgattcttcctctt

SEQ ID NO: 1050089 - DNA, 15 bp, Homo sapiens
agtgattcttcctct

SEQ ID NO: 1050090 - DNA, 15 bp, Homo sapiens
aagtgattcttcctc

SEQ ID NO: 1050091 - DNA, 15 bp, Homo sapiens
gaagtgattcttcct

SEQ ID NO: 1050092 - DNA, 15 bp, Homo sapiens
ggaagtgattcttcc

SEQ ID NO: 1050093 - DNA, 15 bp, Homo sapiens
tggaagtgattcttc

SEQ ID NO: 1050094 - DNA, 15 bp, Homo sapiens
atggaagtgattctt

SEQ ID NO: 1050095 - DNA, 15 bp, Homo sapiens
aatggaagtgattct

SEQ ID NO: 1050096 - DNA, 15 bp, Homo sapiens
aaatggaagtgattc

SEQ ID NO: 1050097 - DNA, 15 bp, Homo sapiens
taaatggaagtgatt

SEQ ID NO: 1050098 - DNA, 15 bp, Homo sapiens
ataaatggaagtgat

SEQ ID NO: 1050099 - DNA, 15 bp, Homo sapiens
aataaatggaagtga

SEQ ID NO: 1050100 - DNA, 15 bp, Homo sapiens
caataaatggaagtg

SEQ ID NO: 1050101 - DNA, 15 bp, Homo sapiens
tcaataaatggaagt

SEQ ID NO: 1050102 - DNA, 15 bp, Homo sapiens
ctcaataaatggaag

SEQ ID NO: 1050103 - DNA, 15 bp, Homo sapiens
actcaataaatggaa

SEQ ID NO: 1050104 - DNA, 15 bp, Homo sapiens
cactcaataaatgga

SEQ ID NO: 1050105 - DNA, 15 bp, Homo sapiens
gcactcaataaatgg

SEQ ID NO: 1050106 - DNA, 15 bp, Homo sapiens
agcactcaataaatg

SEQ ID NO: 1050107 - DNA, 15 bp, Homo sapiens
aaagcactcaataaa

SEQ ID NO: 1050108 - DNA, 15 bp, Homo sapiens
gaaagcactcaataa

SEQ ID NO: 1050109 - DNA, 15 bp, Homo sapiens
agaaagcactcaata

SEQ ID NO: 1050110 - DNA, 15 bp, Homo sapiens
tagaaagcactcaat

SEQ ID NO: 1050111 - DNA, 15 bp, Homo sapiens
ctagaaagcactcaa

SEQ ID NO: 1050112 - DNA, 15 bp, Homo sapiens
cctagaaagcactca

SEQ ID NO: 1050113 - DNA, 15 bp, Homo sapiens
acctagaaagcactc

SEQ ID NO: 1050114 - DNA, 15 bp, Homo sapiens
cacctagaaagcact

SEQ ID NO: 1050115 - DNA, 15 bp, Homo sapiens
gcacctagaaagcac

SEQ ID NO: 1050116 - DNA, 15 bp, Homo sapiens
ggcacctagaaagca

SEQ ID NO: 1050117 - DNA, 15 bp, Homo sapiens
tggcacctagaaagc

SEQ ID NO: 1050118 - DNA, 15 bp, Homo sapiens
ggtgcctggcaccta

SEQ ID NO: 1050119 - DNA, 15 bp, Homo sapiens
tggtgcctggcacct

SEQ ID NO: 1050120 - DNA, 15 bp, Homo sapiens
gtggtgcctggcacc

SEQ ID NO: 1050121 - DNA, 15 bp, Homo sapiens
cgtggtgcctggcac

SEQ ID NO: 1050122 - DNA, 15 bp, Homo sapiens
acgtggtgcctggca

SEQ ID NO: 1050123 - DNA, 15 bp, Homo sapiens
tacgtggtgcctggc

SEQ ID NO: 1050124 - DNA, 15 bp, Homo sapiens
ttacgtggtgcctgg

SEQ ID NO: 1050125 - DNA, 15 bp, Homo sapiens
tttacgtggtgcctg

SEQ ID NO: 1050126 - DNA, 15 bp, Homo sapiens
atttacgtggtgcct

SEQ ID NO: 1050127 - DNA, 15 bp, Homo sapiens
aatttacgtggtgcc

SEQ ID NO: 1050128 - DNA, 15 bp, Homo sapiens
caatttacgtggtgc

SEQ ID NO: 1050129 - DNA, 15 bp, Homo sapiens
gcaatttacgtggtg

SEQ ID NO: 1050130 - DNA, 15 bp, Homo sapiens
agcaatttacgtggt

SEQ ID NO: 1050131 - DNA, 15 bp, Homo sapiens
aagcaatttacgtgg

SEQ ID NO: 1050132 - DNA, 15 bp, Homo sapiens
aaagcaatttacgtg

SEQ ID NO: 1050133 - DNA, 15 bp, Homo sapiens
taaagcaatttacgt

SEQ ID NO: 1050134 - DNA, 15 bp, Homo sapiens
ataaagcaatttacg

SEQ ID NO: 1050135 - DNA, 15 bp, Homo sapiens
gataaagcaatttac

SEQ ID NO: 1050136 - DNA, 15 bp, Homo sapiens
agataaagcaattta

SEQ ID NO: 1050137 - DNA, 15 bp, Homo sapiens
gagataaagcaattt

SEQ ID NO: 1050138 - DNA, 15 bp, Homo sapiens
ggagataaagcaatt

SEQ ID NO: 1050139 - DNA, 15 bp, Homo sapiens
tggagataaagcaat

SEQ ID NO: 1050140 - DNA, 15 bp, Homo sapiens
atggagataaagcaa

SEQ ID NO: 1050141 - DNA, 15 bp, Homo sapiens
catggagataaagca

SEQ ID NO: 1050142 - DNA, 15 bp, Homo sapiens
ccatggagataaagc

SEQ ID NO: 1050143 - DNA, 15 bp, Homo sapiens
gccatggagataaag

SEQ ID NO: 1050144 - DNA, 15 bp, Homo sapiens
tgccatggagataaa

SEQ ID NO: 1050145 - DNA, 15 bp, Homo sapiens
atgccatggagataa

SEQ ID NO: 1050146 - DNA, 15 bp, Homo sapiens
aatgccatggagata

SEQ ID NO: 1050147 - DNA, 15 bp, Homo sapiens
taatgccatggagat

SEQ ID NO: 1050148 - DNA, 15 bp, Homo sapiens
gtaatgccatggaga

SEQ ID NO: 1050149 - DNA, 15 bp, Homo sapiens
agtaatgccatggag

SEQ ID NO: 1050150 - DNA, 15 bp, Homo sapiens
aagtaatgccatgga

SEQ ID NO: 1050151 - DNA, 15 bp, Homo sapiens
taagtaatgccatgg

SEQ ID NO: 1050152 - DNA, 15 bp, Homo sapiens
ttaagtaatgccatg

SEQ ID NO: 1050153 - DNA, 15 bp, Homo sapiens
tttaagtaatgccat

SEQ ID NO: 1050154 - DNA, 15 bp, Homo sapiens
ttttaagtaatgcca

SEQ ID NO: 1050155 - DNA, 15 bp, Homo sapiens
gttttaagtaatgcc

SEQ ID NO: 1050156 - DNA, 15 bp, Homo sapiens
tgttttaagtaatgc

SEQ ID NO: 1050157 - DNA, 15 bp, Homo sapiens
gtgttttaagtaatg

SEQ ID NO: 1050158 - DNA, 15 bp, Homo sapiens
aggtgttttaagtaa

SEQ ID NO: 1050159 - DNA, 15 bp, Homo sapiens
caggtgttttaagta

SEQ ID NO: 1050160 - DNA, 15 bp, Homo sapiens
acaggtgttttaagt

SEQ ID NO: 1050161 - DNA, 15 bp, Homo sapiens
gacaggtgttttaag

SEQ ID NO: 1050162 - DNA, 15 bp, Homo sapiens
tgacaggtgttttaa

SEQ ID NO: 1050163 - DNA, 15 bp, Homo sapiens
gtgacaggtgtttta

SEQ ID NO: 1050164 - DNA, 15 bp, Homo sapiens
tgtgacaggtgtttt

SEQ ID NO: 1050165 - DNA, 15 bp, Homo sapiens
ctgtgacaggtgttt

SEQ ID NO: 1050166 - DNA, 15 bp, Homo sapiens
cctgtgacaggtgtt

SEQ ID NO: 1050167 - DNA, 15 bp, Homo sapiens
tcctgtgacaggtgt

SEQ ID NO: 1050168 - DNA, 15 bp, Homo sapiens
ctcctgtgacaggtg

SEQ ID NO: 1050169 - DNA, 15 bp, Homo sapiens
tctcctgtgacaggt

SEQ ID NO: 1050170 - DNA, 15 bp, Homo sapiens
gtctcctgtgacagg

SEQ ID NO: 1050171 - DNA, 15 bp, Homo sapiens
ggtctcctgtgacag

SEQ ID NO: 1050172 - DNA, 15 bp, Homo sapiens
tggtctcctgtgaca

SEQ ID NO: 1050173 - DNA, 15 bp, Homo sapiens
ctggtctcctgtgac

SEQ ID NO: 1050174 - DNA, 15 bp, Homo sapiens
gctggtctcctgtga

SEQ ID NO: 1050175 - DNA, 15 bp, Homo sapiens
agctggtctcctgtg

SEQ ID NO: 1050176 - DNA, 15 bp, Homo sapiens
tagctggtctcctgt

SEQ ID NO: 1050177 - DNA, 15 bp, Homo sapiens
ctagctggtctcctg

SEQ ID NO: 1050178 - DNA, 15 bp, Homo sapiens
actagctggtctcct

SEQ ID NO: 1050179 - DNA, 15 bp, Homo sapiens
tactagctggtctcc

SEQ ID NO: 1050180 - DNA, 15 bp, Homo sapiens
ttactagctggtctc

SEQ ID NO: 1050181 - DNA, 15 bp, Homo sapiens
attactagctggtct

SEQ ID NO: 1050182 - DNA, 15 bp, Homo sapiens
cattactagctggtc

SEQ ID NO: 1050183 - DNA, 15 bp, Homo sapiens
acattactagctggt

SEQ ID NO: 1050184 - DNA, 15 bp, Homo sapiens
aacattactagctgg

SEQ ID NO: 1050185 - DNA, 15 bp, Homo sapiens
aaacattactagctg

SEQ ID NO: 1050186 - DNA, 15 bp, Homo sapiens
taaacattactagct

SEQ ID NO: 1050187 - DNA, 15 bp, Homo sapiens
ctaaacattactagc

SEQ ID NO: 1050188 - DNA, 15 bp, Homo sapiens
gctaaacattactag

SEQ ID NO: 1050189 - DNA, 15 bp, Homo sapiens
ggctaaacattacta

SEQ ID NO: 1050190 - DNA, 15 bp, Homo sapiens
gggctaaacattact

SEQ ID NO: 1050191 - DNA, 15 bp, Homo sapiens
tgggctaaacattac

SEQ ID NO: 1050192 - DNA, 15 bp, Homo sapiens
ctgggctaaacatta

SEQ ID NO: 1050193 - DNA, 15 bp, Homo sapiens
cctgggctaaacatt

SEQ ID NO: 1050194 - DNA, 15 bp, Homo sapiens
acctgggctaaacat

SEQ ID NO: 1050195 - DNA, 15 bp, Homo sapiens
cacctgggctaaaca

SEQ ID NO: 1050196 - DNA, 15 bp, Homo sapiens
acacctgggctaaac

SEQ ID NO: 1050197 - DNA, 15 bp, Homo sapiens
tacacctgggctaaa

SEQ ID NO: 1050198 - DNA, 15 bp, Homo sapiens
atacacctgggctaa

SEQ ID NO: 1050199 - DNA, 15 bp, Homo sapiens
gatacacctgggcta

SEQ ID NO: 1050200 - DNA, 15 bp, Homo sapiens
cgatacacctgggct

SEQ ID NO: 1050201 - DNA, 15 bp, Homo sapiens
acgatacacctgggc

SEQ ID NO: 1050202 - DNA, 15 bp, Homo sapiens
gacgatacacctggg

SEQ ID NO: 1050203 - DNA, 15 bp, Homo sapiens
agacgatacacctgg

SEQ ID NO: 1050204 - DNA, 15 bp, Homo sapiens
gagacgatacacctg

SEQ ID NO: 1050205 - DNA, 15 bp, Homo sapiens
ggagacgatacacct

SEQ ID NO: 1050206 - DNA, 15 bp, Homo sapiens
gggagacgatacacc

SEQ ID NO: 1050207 - DNA, 15 bp, Homo sapiens
agggagacgatacac

SEQ ID NO: 1050208 - DNA, 15 bp, Homo sapiens
gagggagacgataca

SEQ ID NO: 1050209 - DNA, 15 bp, Homo sapiens
ggagggagacgatac

SEQ ID NO: 1050210 - DNA, 15 bp, Homo sapiens
aggagggagacgata

SEQ ID NO: 1050211 - DNA, 15 bp, Homo sapiens
gaggagggagacgat

SEQ ID NO: 1050212 - DNA, 15 bp, Homo sapiens
tgaggagggagacga

SEQ ID NO: 1050213 - DNA, 15 bp, Homo sapiens
gtgaggagggagacg

SEQ ID NO: 1050214 - DNA, 15 bp, Homo sapiens
agtgaggagggagac

SEQ ID NO: 1050215 - DNA, 15 bp, Homo sapiens
cagtgaggagggaga

SEQ ID NO: 1050216 - DNA, 15 bp, Homo sapiens
tcagtgaggagggag

SEQ ID NO: 1050217 - DNA, 15 bp, Homo sapiens
ttcagtgaggaggga

SEQ ID NO: 1050218 - DNA, 15 bp, Homo sapiens
tttcagtgaggaggg

SEQ ID NO: 1050219 - DNA, 15 bp, Homo sapiens
ctttcagtgaggagg

SEQ ID NO: 1050220 - DNA, 15 bp, Homo sapiens
gctttcagtgaggag

SEQ ID NO: 1050221 - DNA, 15 bp, Homo sapiens
tgctttcagtgagga

SEQ ID NO: 1050222 - DNA, 15 bp, Homo sapiens
ctgctttcagtgagg

SEQ ID NO: 1050223 - DNA, 15 bp, Homo sapiens
tctgctttcagtgag

SEQ ID NO: 1050224 - DNA, 15 bp, Homo sapiens
gtctgctttcagtga

SEQ ID NO: 1050225 - DNA, 15 bp, Homo sapiens
tgtctgctttcagtg

SEQ ID NO: 1050226 - DNA, 15 bp, Homo sapiens
ttgtctgctttcagt

SEQ ID NO: 1050227 - DNA, 15 bp, Homo sapiens
attgtctgctttcag

SEQ ID NO: 1050228 - DNA, 15 bp, Homo sapiens
cattgtctgctttca

SEQ ID NO: 1050229 - DNA, 15 bp, Homo sapiens
tcattgtctgctttc

SEQ ID NO: 1050230 - DNA, 15 bp, Homo sapiens
ttcattgtctgcttt

SEQ ID NO: 1050231 - DNA, 15 bp, Homo sapiens
tttcattgtctgctt

SEQ ID NO: 1050232 - DNA, 15 bp, Homo sapiens
gtttcattgtctgct

SEQ ID NO: 1050233 - DNA, 15 bp, Homo sapiens
agtttcattgtctgc

SEQ ID NO: 1050234 - DNA, 15 bp, Homo sapiens
cagtttcattgtctg

SEQ ID NO: 1050235 - DNA, 15 bp, Homo sapiens
acagtttcattgtct

SEQ ID NO: 1050236 - DNA, 15 bp, Homo sapiens
tacagtttcattgtc

SEQ ID NO: 1050237 - DNA, 15 bp, Homo sapiens
atacagtttcattgt

SEQ ID NO: 1050238 - DNA, 15 bp, Homo sapiens
aatacagtttcattg

SEQ ID NO: 1050239 - DNA, 15 bp, Homo sapiens
taatacagtttcatt

SEQ ID NO: 1050240 - DNA, 15 bp, Homo sapiens
ctaatacagtttcat

SEQ ID NO: 1050241 - DNA, 15 bp, Homo sapiens
tctaatacagtttca

SEQ ID NO: 1050242 - DNA, 15 bp, Homo sapiens
ttctaatacagtttc

SEQ ID NO: 1050243 - DNA, 15 bp, Homo sapiens
gttctaatacagttt

SEQ ID NO: 1050244 - DNA, 15 bp, Homo sapiens
agttctaatacagtt

SEQ ID NO: 1050245 - DNA, 15 bp, Homo sapiens
cagttctaatacagt

SEQ ID NO: 1050246 - DNA, 15 bp, Homo sapiens
tcagttctaatacag

SEQ ID NO: 1050247 - DNA, 15 bp, Homo sapiens
gtcagttctaataca

SEQ ID NO: 1050248 - DNA, 15 bp, Homo sapiens
tgtcagttctaatac

SEQ ID NO: 1050249 - DNA, 15 bp, Homo sapiens
ctgtcagttctaata

SEQ ID NO: 1050250 - DNA, 15 bp, Homo sapiens
cctgtcagttctaat

SEQ ID NO: 1050251 - DNA, 15 bp, Homo sapiens
acctgtcagttctaa

SEQ ID NO: 1050252 - DNA, 15 bp, Homo sapiens
cacctgtcagttcta

SEQ ID NO: 1050253 - DNA, 15 bp, Homo sapiens
ccacctgtcagttct

SEQ ID NO: 1050254 - DNA, 15 bp, Homo sapiens
cccacctgtcagttc

SEQ ID NO: 1050255 - DNA, 15 bp, Homo sapiens
tcccacctgtcagtt

SEQ ID NO: 1050256 - DNA, 15 bp, Homo sapiens
ttcccacctgtcagt

SEQ ID NO: 1050257 - DNA, 15 bp, Homo sapiens
attcccacctgtcag

SEQ ID NO: 1050258 - DNA, 15 bp, Homo sapiens
gattcccacctgtca

SEQ ID NO: 1050259 - DNA, 15 bp, Homo sapiens
agattcccacctgtc

SEQ ID NO: 1050260 - DNA, 15 bp, Homo sapiens
gagattcccacctgt

SEQ ID NO: 1050261 - DNA, 15 bp, Homo sapiens
agagattcccacctg

SEQ ID NO: 1050262 - DNA, 15 bp, Homo sapiens
aagagattcccacct

SEQ ID NO: 1050263 - DNA, 15 bp, Homo sapiens
aaagagattcccacc

SEQ ID NO: 1050264 - DNA, 15 bp, Homo sapiens
caaagagattcccac

SEQ ID NO: 1050265 - DNA, 15 bp, Homo sapiens
acaaagagattccca

SEQ ID NO: 1050266 - DNA, 15 bp, Homo sapiens
tacaaagagattccc

SEQ ID NO: 1050267 - DNA, 15 bp, Homo sapiens
gtacaaagagattcc

SEQ ID NO: 1050268 - DNA, 15 bp, Homo sapiens
tgtacaaagagattc

SEQ ID NO: 1050269 - DNA, 15 bp, Homo sapiens
ctgtacaaagagatt

SEQ ID NO: 1050270 - DNA, 15 bp, Homo sapiens
gctgtacaaagagat

SEQ ID NO: 1050271 - DNA, 15 bp, Homo sapiens
ggctgtacaaagaga

SEQ ID NO: 1050272 - DNA, 15 bp, Homo sapiens
gggctgtacaaagag

SEQ ID NO: 1050273 - DNA, 15 bp, Homo sapiens
tgggctgtacaaaga

SEQ ID NO: 1050274 - DNA, 15 bp, Homo sapiens
ttgggctgtacaaag

SEQ ID NO: 1050275 - DNA, 15 bp, Homo sapiens
tttgggctgtacaaa

SEQ ID NO: 1050276 - DNA, 15 bp, Homo sapiens
ctttgggctgtacaa

SEQ ID NO: 1050277 - DNA, 15 bp, Homo sapiens
gctttgggctgtaca

SEQ ID NO: 1050278 - DNA, 15 bp, Homo sapiens
tgctttgggctgtac

SEQ ID NO: 1050279 - DNA, 15 bp, Homo sapiens
ttgctttgggctgta

SEQ ID NO: 1050280 - DNA, 15 bp, Homo sapiens
tttgctttgggctgt

SEQ ID NO: 1050281 - DNA, 15 bp, Homo sapiens
ctttgctttgggctg

SEQ ID NO: 1050282 - DNA, 15 bp, Homo sapiens
gctttgctttgggct

SEQ ID NO: 1050283 - DNA, 15 bp, Homo sapiens
agctttgctttgggc

SEQ ID NO: 1050284 - DNA, 15 bp, Homo sapiens
cagctttgctttggg

SEQ ID NO: 1050285 - DNA, 15 bp, Homo sapiens
tcagctttgctttgg

SEQ ID NO: 1050286 - DNA, 15 bp, Homo sapiens
ctcagctttgctttg

SEQ ID NO: 1050287 - DNA, 15 bp, Homo sapiens
gctcagctttgcttt

SEQ ID NO: 1050288 - DNA, 15 bp, Homo sapiens
ggctcagctttgctt

SEQ ID NO: 1050289 - DNA, 15 bp, Homo sapiens
aggctcagctttgct

SEQ ID NO: 1050290 - DNA, 15 bp, Homo sapiens
gaggctcagctttgc

SEQ ID NO: 1050291 - DNA, 15 bp, Homo sapiens
tgaggctcagctttg

SEQ ID NO: 1050292 - DNA, 15 bp, Homo sapiens
gtgaggctcagcttt

SEQ ID NO: 1050293 - DNA, 15 bp, Homo sapiens
agtgaggctcagctt

SEQ ID NO: 1050294 - DNA, 15 bp, Homo sapiens
cagtgaggctcagct

SEQ ID NO: 1050295 - DNA, 15 bp, Homo sapiens
ccagtgaggctcagc

SEQ ID NO: 1050296 - DNA, 15 bp, Homo sapiens
cccagtgaggctcag

SEQ ID NO: 1050297 - DNA, 15 bp, Homo sapiens
acccagtgaggctca

SEQ ID NO: 1050298 - DNA, 15 bp, Homo sapiens
gacccagtgaggctc

SEQ ID NO: 1050299 - DNA, 15 bp, Homo sapiens
agacccagtgaggct

SEQ ID NO: 1050300 - DNA, 15 bp, Homo sapiens
aagacccagtgaggc

SEQ ID NO: 1050301 - DNA, 15 bp, Homo sapiens
gaagacccagtgagg

SEQ ID NO: 1050302 - DNA, 15 bp, Homo sapiens
tgaagacccagtgag

SEQ ID NO: 1050303 - DNA, 15 bp, Homo sapiens
gtgaagacccagtga

SEQ ID NO: 1050304 - DNA, 15 bp, Homo sapiens
agtgaagacccagtg

SEQ ID NO: 1050305 - DNA, 15 bp, Homo sapiens
gagtgaagacccagt

SEQ ID NO: 1050306 - DNA, 15 bp, Homo sapiens
tgagtgaagacccag

SEQ ID NO: 1050307 - DNA, 15 bp, Homo sapiens
ttgagtgaagaccca

SEQ ID NO: 1050308 - DNA, 15 bp, Homo sapiens
tttgagtgaagaccc

SEQ ID NO: 1050309 - DNA, 15 bp, Homo sapiens
atttgagtgaagacc

SEQ ID NO: 1050310 - DNA, 15 bp, Homo sapiens
catttgagtgaagac

SEQ ID NO: 1050311 - DNA, 15 bp, Homo sapiens
ccatttgagtgaaga

SEQ ID NO: 1050312 - DNA, 15 bp, Homo sapiens
accatttgagtgaag

SEQ ID NO: 1050313 - DNA, 15 bp, Homo sapiens
aaccatttgagtgaa

SEQ ID NO: 1050314 - DNA, 15 bp, Homo sapiens
aaaccatttgagtga

SEQ ID NO: 1050315 - DNA, 15 bp, Homo sapiens
gaaaccatttgagtg

SEQ ID NO: 1050316 - DNA, 15 bp, Homo sapiens
tgaaaccatttgagt

SEQ ID NO: 1050317 - DNA, 15 bp, Homo sapiens
ttgaaaccatttgag

SEQ ID NO: 1050318 - DNA, 15 bp, Homo sapiens
tttgaaaccatttga

SEQ ID NO: 1050319 - DNA, 15 bp, Homo sapiens
gtttgaaaccatttg

SEQ ID NO: 1050320 - DNA, 15 bp, Homo sapiens
agtttgaaaccattt

SEQ ID NO: 1050321 - DNA, 15 bp, Homo sapiens
gagtttgaaaccatt

SEQ ID NO: 1050322 - DNA, 15 bp, Homo sapiens
ggagtttgaaaccat

SEQ ID NO: 1050323 - DNA, 15 bp, Homo sapiens
gggagtttgaaacca

SEQ ID NO: 1050324 - DNA, 15 bp, Homo sapiens
ggggagtttgaaacc

SEQ ID NO: 1050325 - DNA, 15 bp, Homo sapiens
aggggagtttgaaac

SEQ ID NO: 1050326 - DNA, 15 bp, Homo sapiens
caggggagtttgaaa

SEQ ID NO: 1050327 - DNA, 15 bp, Homo sapiens
gcaggggagtttgaa

SEQ ID NO: 1050328 - DNA, 15 bp, Homo sapiens
agcaggggagtttga

SEQ ID NO: 1050329 - DNA, 15 bp, Homo sapiens
aagcaggggagtttg

SEQ ID NO: 1050330 - DNA, 15 bp, Homo sapiens
gaagcaggggagttt

SEQ ID NO: 1050331 - DNA, 15 bp, Homo sapiens
tgaagcaggggagtt

SEQ ID NO: 1050332 - DNA, 15 bp, Homo sapiens
ctgaagcaggggagt

SEQ ID NO: 1050333 - DNA, 15 bp, Homo sapiens
actgaagcaggggag

SEQ ID NO: 1050334 - DNA, 15 bp, Homo sapiens
gactgaagcagggga

SEQ ID NO: 1050335 - DNA, 15 bp, Homo sapiens
tgactgaagcagggg

SEQ ID NO: 1050336 - DNA, 15 bp, Homo sapiens
ttgactgaagcaggg

SEQ ID NO: 1050337 - DNA, 15 bp, Homo sapiens
tttgactgaagcagg

SEQ ID NO: 1050338 - DNA, 15 bp, Homo sapiens
gtttgactgaagcag

SEQ ID NO: 1050339 - DNA, 15 bp, Homo sapiens
tgtttgactgaagca

SEQ ID NO: 1050340 - DNA, 15 bp, Homo sapiens
ctgtttgactgaagc

SEQ ID NO: 1050341 - DNA, 15 bp, Homo sapiens
gctgtttgactgaag

SEQ ID NO: 1050342 - DNA, 15 bp, Homo sapiens
agctgtttgactgaa

SEQ ID NO: 1050343 - DNA, 15 bp, Homo sapiens
gagctgtttgactga

SEQ ID NO: 1050344 - DNA, 15 bp, Homo sapiens
ggagctgtttgactg

SEQ ID NO: 1050345 - DNA, 15 bp, Homo sapiens
gggagctgtttgact

SEQ ID NO: 1050346 - DNA, 15 bp, Homo sapiens
tgggagctgtttgac

SEQ ID NO: 1050347 - DNA, 15 bp, Homo sapiens
ctgggagctgtttga

SEQ ID NO: 1050348 - DNA, 15 bp, Homo sapiens
gctgggagctgtttg

SEQ ID NO: 1050349 - DNA, 15 bp, Homo sapiens
ggctgggagctgttt

SEQ ID NO: 1050350 - DNA, 15 bp, Homo sapiens
aggctgggagctgtt

SEQ ID NO: 1050351 - DNA, 15 bp, Homo sapiens
caggctgggagctgt

SEQ ID NO: 1050352 - DNA, 15 bp, Homo sapiens
ccaggctgggagctg

SEQ ID NO: 1050353 - DNA, 15 bp, Homo sapiens
cccaggctgggagct

SEQ ID NO: 1050354 - DNA, 15 bp, Homo sapiens
tcccaggctgggagc

SEQ ID NO: 1050355 - DNA, 15 bp, Homo sapiens
ctcccaggctgggag

SEQ ID NO: 1050356 - DNA, 15 bp, Homo sapiens
cctcccaggctggga

SEQ ID NO: 1050357 - DNA, 15 bp, Homo sapiens
ccctcccaggctggg

SEQ ID NO: 1050358 - DNA, 15 bp, Homo sapiens
ttccctcccaggctg

SEQ ID NO: 1050359 - DNA, 15 bp, Homo sapiens
tttccctcccaggct

SEQ ID NO: 1050360 - DNA, 15 bp, Homo sapiens
ctttccctcccaggc

SEQ ID NO: 1050361 - DNA, 15 bp, Homo sapiens
gctttccctcccagg

SEQ ID NO: 1050362 - DNA, 15 bp, Homo sapiens
agctttccctcccag

SEQ ID NO: 1050363 - DNA, 15 bp, Homo sapiens
aagctttccctccca

SEQ ID NO: 1050364 - DNA, 15 bp, Homo sapiens
caagctttccctccc

SEQ ID NO: 1050365 - DNA, 15 bp, Homo sapiens
gcaagctttccctcc

SEQ ID NO: 1050366 - DNA, 15 bp, Homo sapiens
agcaagctttccctc

SEQ ID NO: 1050367 - DNA, 15 bp, Homo sapiens
cagcaagctttccct

SEQ ID NO: 1050368 - DNA, 15 bp, Homo sapiens
ccagcaagctttccc

SEQ ID NO: 1050369 - DNA, 15 bp, Homo sapiens
tccagcaagctttcc

SEQ ID NO: 1050370 - DNA, 15 bp, Homo sapiens
gtccagcaagctttc

SEQ ID NO: 1050371 - DNA, 15 bp, Homo sapiens
agtccagcaagcttt

SEQ ID NO: 1050372 - DNA, 15 bp, Homo sapiens
cagtccagcaagctt

SEQ ID NO: 1050373 - DNA, 15 bp, Homo sapiens
tcagtccagcaagct

SEQ ID NO: 1050374 - DNA, 15 bp, Homo sapiens
ttcagtccagcaagc

SEQ ID NO: 1050375 - DNA, 15 bp, Homo sapiens
cttcagtccagcaag

SEQ ID NO: 1050376 - DNA, 15 bp, Homo sapiens
ccttcagtccagcaa

SEQ ID NO: 1050377 - DNA, 15 bp, Homo sapiens
cccttcagtccagca

SEQ ID NO: 1050378 - DNA, 15 bp, Homo sapiens
acccttcagtccagc

SEQ ID NO: 1050379 - DNA, 15 bp, Homo sapiens
aacccttcagtccag

SEQ ID NO: 1050380 - DNA, 15 bp, Homo sapiens
aaacccttcagtcca

SEQ ID NO: 1050381 - DNA, 15 bp, Homo sapiens
caaacccttcagtcc

SEQ ID NO: 1050382 - DNA, 15 bp, Homo sapiens
ccaaacccttcagtc

SEQ ID NO: 1050383 - DNA, 15 bp, Homo sapiens
cccaaacccttcagt

SEQ ID NO: 1050384 - DNA, 15 bp, Homo sapiens
ccccaaacccttcag

SEQ ID NO: 1050385 - DNA, 15 bp, Homo sapiens
tccccaaacccttca

SEQ ID NO: 1050386 - DNA, 15 bp, Homo sapiens
atccccaaacccttc

SEQ ID NO: 1050387 - DNA, 15 bp, Homo sapiens
gatccccaaaccctt

SEQ ID NO: 1050388 - DNA, 15 bp, Homo sapiens
agatccccaaaccct

SEQ ID NO: 1050389 - DNA, 15 bp, Homo sapiens
cagatccccaaaccc

SEQ ID NO: 1050390 - DNA, 15 bp, Homo sapiens
tcagatccccaaacc

SEQ ID NO: 1050391 - DNA, 15 bp, Homo sapiens
ctcagatccccaaac

SEQ ID NO: 1050392 - DNA, 15 bp, Homo sapiens
tctcagatccccaaa

SEQ ID NO: 1050393 - DNA, 15 bp, Homo sapiens
atctcagatccccaa

SEQ ID NO: 1050394 - DNA, 15 bp, Homo sapiens
aatctcagatcccca

SEQ ID NO: 1050395 - DNA, 15 bp, Homo sapiens
caatctcagatcccc

SEQ ID NO: 1050396 - DNA, 15 bp, Homo sapiens
acaatctcagatccc

SEQ ID NO: 1050397 - DNA, 15 bp, Homo sapiens
gacaatctcagatcc

SEQ ID NO: 1050398 - DNA, 15 bp, Homo sapiens
agacaatctcagatc

SEQ ID NO: 1050399 - DNA, 15 bp, Homo sapiens
aagacaatctcagat

SEQ ID NO: 1050400 - DNA, 15 bp, Homo sapiens
aaagacaatctcaga

SEQ ID NO: 1050401 - DNA, 15 bp, Homo sapiens
caaagacaatctcag

SEQ ID NO: 1050402 - DNA, 15 bp, Homo sapiens
tcaaagacaatctca

SEQ ID NO: 1050403 - DNA, 15 bp, Homo sapiens
ttcaaagacaatctc

SEQ ID NO: 1050404 - DNA, 15 bp, Homo sapiens
gttcaaagacaatct

SEQ ID NO: 1050405 - DNA, 15 bp, Homo sapiens
ggttcaaagacaatc

SEQ ID NO: 1050406 - DNA, 15 bp, Homo sapiens
tggttcaaagacaat

SEQ ID NO: 1050407 - DNA, 15 bp, Homo sapiens
ttggttcaaagacaa

SEQ ID NO: 1050408 - DNA, 15 bp, Homo sapiens
gttggttcaaagaca

SEQ ID NO: 1050409 - DNA, 15 bp, Homo sapiens
ggttggttcaaagac

SEQ ID NO: 1050410 - DNA, 15 bp, Homo sapiens
aggttggttcaaaga

SEQ ID NO: 1050411 - DNA, 15 bp, Homo sapiens
aaggttggttcaaag

SEQ ID NO: 1050412 - DNA, 15 bp, Homo sapiens
aaaggttggttcaaa

SEQ ID NO: 1050413 - DNA, 15 bp, Homo sapiens
caaaggttggttcaa

SEQ ID NO: 1050414 - DNA, 15 bp, Homo sapiens
ccaaaggttggttca

SEQ ID NO: 1050415 - DNA, 15 bp, Homo sapiens
gccaaaggttggttc

SEQ ID NO: 1050416 - DNA, 15 bp, Homo sapiens
tgccaaaggttggtt

SEQ ID NO: 1050417 - DNA, 15 bp, Homo sapiens
gtgccaaaggttggt

SEQ ID NO: 1050418 - DNA, 15 bp, Homo sapiens
ggtgccaaaggttgg

SEQ ID NO: 1050419 - DNA, 15 bp, Homo sapiens
tggtgccaaaggttg

SEQ ID NO: 1050420 - DNA, 15 bp, Homo sapiens
atggtgccaaaggtt

SEQ ID NO: 1050421 - DNA, 15 bp, Homo sapiens
gatggtgccaaaggt

SEQ ID NO: 1050422 - DNA, 15 bp, Homo sapiens
agatggtgccaaagg

SEQ ID NO: 1050423 - DNA, 15 bp, Homo sapiens
gagatggtgccaaag

SEQ ID NO: 1050424 - DNA, 15 bp, Homo sapiens
tgagatggtgccaaa

SEQ ID NO: 1050425 - DNA, 15 bp, Homo sapiens
atgagatggtgccaa

SEQ ID NO: 1050426 - DNA, 15 bp, Homo sapiens
aatgagatggtgcca

SEQ ID NO: 1050427 - DNA, 15 bp, Homo sapiens
aaatgagatggtgcc

SEQ ID NO: 1050428 - DNA, 15 bp, Homo sapiens
aaaatgagatggtgc

SEQ ID NO: 1050429 - DNA, 15 bp, Homo sapiens
caaaatgagatggtg

SEQ ID NO: 1050430 - DNA, 15 bp, Homo sapiens
ccaaaatgagatggt

SEQ ID NO: 1050431 - DNA, 15 bp, Homo sapiens
accaaaatgagatgg

SEQ ID NO: 1050432 - DNA, 15 bp, Homo sapiens
gaccaaaatgagatg

SEQ ID NO: 1050433 - DNA, 15 bp, Homo sapiens
cgaccaaaatgagat

SEQ ID NO: 1050434 - DNA, 15 bp, Homo sapiens
acgaccaaaatgaga

SEQ ID NO: 1050435 - DNA, 15 bp, Homo sapiens
gacgaccaaaatgag

SEQ ID NO: 1050436 - DNA, 15 bp, Homo sapiens
tgacgaccaaaatga

SEQ ID NO: 1050437 - DNA, 15 bp, Homo sapiens
atgacgaccaaaatg

SEQ ID NO: 1050438 - DNA, 15 bp, Homo sapiens
aatgacgaccaaaat

SEQ ID NO: 1050439 - DNA, 15 bp, Homo sapiens
aaatgacgaccaaaa

SEQ ID NO: 1050440 - DNA, 15 bp, Homo sapiens
aaaatgacgaccaaa

SEQ ID NO: 1050441 - DNA, 15 bp, Homo sapiens
caaaatgacgaccaa

SEQ ID NO: 1050442 - DNA, 15 bp, Homo sapiens
ccaaaatgacgacca

SEQ ID NO: 1050443 - DNA, 15 bp, Homo sapiens
cccaaaatgacgacc

SEQ ID NO: 1050444 - DNA, 15 bp, Homo sapiens
ccccaaaatgacgac

SEQ ID NO: 1050445 - DNA, 15 bp, Homo sapiens
tccccaaaatgacga

SEQ ID NO: 1050446 - DNA, 15 bp, Homo sapiens
ttccccaaaatgacg

SEQ ID NO: 1050447 - DNA, 15 bp, Homo sapiens
cttccccaaaatgac

SEQ ID NO: 1050448 - DNA, 15 bp, Homo sapiens
ccttccccaaaatga

SEQ ID NO: 1050449 - DNA, 15 bp, Homo sapiens
tccttccccaaaatg

SEQ ID NO: 1050450 - DNA, 15 bp, Homo sapiens
ttccttccccaaaat

SEQ ID NO: 1050451 - DNA, 15 bp, Homo sapiens
attccttccccaaaa

SEQ ID NO: 1050452 - DNA, 15 bp, Homo sapiens
gattccttccccaaa

SEQ ID NO: 1050453 - DNA, 15 bp, Homo sapiens
agattccttccccaa

SEQ ID NO: 1050454 - DNA, 15 bp, Homo sapiens
aagattccttcccca

SEQ ID NO: 1050455 - DNA, 15 bp, Homo sapiens
caagattccttcccc

SEQ ID NO: 1050456 - DNA, 15 bp, Homo sapiens
ccaagattccttccc

SEQ ID NO: 1050457 - DNA, 15 bp, Homo sapiens
tccaagattccttcc

SEQ ID NO: 1050458 - DNA, 15 bp, Homo sapiens
ttccaagattccttc

SEQ ID NO: 1050459 - DNA, 15 bp, Homo sapiens
tttccaagattcctt

SEQ ID NO: 1050460 - DNA, 15 bp, Homo sapiens
atttccaagattcct

SEQ ID NO: 1050461 - DNA, 15 bp, Homo sapiens
catttccaagattcc

SEQ ID NO: 1050462 - DNA, 15 bp, Homo sapiens
ccatttccaagattc

SEQ ID NO: 1050463 - DNA, 15 bp, Homo sapiens
cccatttccaagatt

SEQ ID NO: 1050464 - DNA, 15 bp, Homo sapiens
gcccatttccaagat

SEQ ID NO: 1050465 - DNA, 15 bp, Homo sapiens
tgcccatttccaaga

SEQ ID NO: 1050466 - DNA, 15 bp, Homo sapiens
ctgcccatttccaag

SEQ ID NO: 1050467 - DNA, 15 bp, Homo sapiens
tctgcccatttccaa

SEQ ID NO: 1050468 - DNA, 15 bp, Homo sapiens
ttctgcccatttcca

SEQ ID NO: 1050469 - DNA, 15 bp, Homo sapiens
cttctgcccatttcc

SEQ ID NO: 1050470 - DNA, 15 bp, Homo sapiens
acttctgcccatttc

SEQ ID NO: 1050471 - DNA, 15 bp, Homo sapiens
cacttctgcccattt

SEQ ID NO: 1050472 - DNA, 15 bp, Homo sapiens
ccacttctgcccatt

SEQ ID NO: 1050473 - DNA, 15 bp, Homo sapiens
gccacttctgcccat

SEQ ID NO: 1050474 - DNA, 15 bp, Homo sapiens
ggccacttctgccca

SEQ ID NO: 1050475 - DNA, 15 bp, Homo sapiens
tggccacttctgccc

SEQ ID NO: 1050476 - DNA, 15 bp, Homo sapiens
ctggccacttctgcc

SEQ ID NO: 1050477 - DNA, 15 bp, Homo sapiens
tctggccacttctgc

SEQ ID NO: 1050478 - DNA, 15 bp, Homo sapiens
gtctggccacttctg

SEQ ID NO: 1050479 - DNA, 15 bp, Homo sapiens
agtctggccacttct

SEQ ID NO: 1050480 - DNA, 15 bp, Homo sapiens
cagtctggccacttc

SEQ ID NO: 1050481 - DNA, 15 bp, Homo sapiens
gcagtctggccactt

SEQ ID NO: 1050482 - DNA, 15 bp, Homo sapiens
agcagtctggccact

SEQ ID NO: 1050483 - DNA, 15 bp, Homo sapiens
tagcagtctggccac

SEQ ID NO: 1050484 - DNA, 15 bp, Homo sapiens
atagcagtctggcca

SEQ ID NO: 1050485 - DNA, 15 bp, Homo sapiens
catagcagtctggcc

SEQ ID NO: 1050486 - DNA, 15 bp, Homo sapiens
acatagcagtctggc

SEQ ID NO: 1050487 - DNA, 15 bp, Homo sapiens
gacatagcagtctgg

SEQ ID NO: 1050488 - DNA, 15 bp, Homo sapiens
cgacatagcagtctg

SEQ ID NO: 1050489 - DNA, 15 bp, Homo sapiens
tcgacatagcagtct

SEQ ID NO: 1050490 - DNA, 15 bp, Homo sapiens
gtcgacatagcagtc

SEQ ID NO: 1050491 - DNA, 15 bp, Homo sapiens
ggtcgacatagcagt

SEQ ID NO: 1050492 - DNA, 15 bp, Homo sapiens
gggtcgacatagcag

SEQ ID NO: 1050493 - DNA, 15 bp, Homo sapiens
agggtcgacatagca

SEQ ID NO: 1050494 - DNA, 15 bp, Homo sapiens
gagggtcgacatagc

SEQ ID NO: 1050495 - DNA, 15 bp, Homo sapiens
ggagggtcgacatag

SEQ ID NO: 1050496 - DNA, 15 bp, Homo sapiens
tggagggtcgacata

SEQ ID NO: 1050497 - DNA, 15 bp, Homo sapiens
ttggagggtcgacat

SEQ ID NO: 1050498 - DNA, 15 bp, Homo sapiens
tttggagggtcgaca

SEQ ID NO: 1050499 - DNA, 15 bp, Homo sapiens
gtttggagggtcgac

SEQ ID NO: 1050500 - DNA, 15 bp, Homo sapiens
agtttggagggtcga

SEQ ID NO: 1050501 - DNA, 15 bp, Homo sapiens
aagtttggagggtcg

SEQ ID NO: 1050502 - DNA, 15 bp, Homo sapiens
aaagtttggagggtc

SEQ ID NO: 1050503 - DNA, 15 bp, Homo sapiens
gaaagtttggagggt

SEQ ID NO: 1050504 - DNA, 15 bp, Homo sapiens
agaaagtttggaggg

SEQ ID NO: 1050505 - DNA, 15 bp, Homo sapiens
aagaaagtttggagg

SEQ ID NO: 1050506 - DNA, 15 bp, Homo sapiens
aaagaaagtttggag

SEQ ID NO: 1050507 - DNA, 15 bp, Homo sapiens
caaagaaagtttgga

SEQ ID NO: 1050508 - DNA, 15 bp, Homo sapiens
tcaaagaaagtttgg

SEQ ID NO: 1050509 - DNA, 15 bp, Homo sapiens
atcaaagaaagtttg

SEQ ID NO: 1050510 - DNA, 15 bp, Homo sapiens
gatcaaagaaagttt

SEQ ID NO: 1050511 - DNA, 15 bp, Homo sapiens
tgatcaaagaaagtt

SEQ ID NO: 1050512 - DNA, 15 bp, Homo sapiens
ctgatcaaagaaagt

SEQ ID NO: 1050513 - DNA, 15 bp, Homo sapiens
actgatcaaagaaag

SEQ ID NO: 1050514 - DNA, 15 bp, Homo sapiens
cactgatcaaagaaa

SEQ ID NO: 1050515 - DNA, 15 bp, Homo sapiens
acactgatcaaagaa

SEQ ID NO: 1050516 - DNA, 15 bp, Homo sapiens
aacactgatcaaaga

SEQ ID NO: 1050517 - DNA, 15 bp, Homo sapiens
caacactgatcaaag

SEQ ID NO: 1050518 - DNA, 15 bp, Homo sapiens
tcaacactgatcaaa

SEQ ID NO: 1050519 - DNA, 15 bp, Homo sapiens
ttcaacactgatcaa

SEQ ID NO: 1050520 - DNA, 15 bp, Homo sapiens
tttcaacactgatca

SEQ ID NO: 1050521 - DNA, 15 bp, Homo sapiens
atttcaacactgatc

SEQ ID NO: 1050522 - DNA, 15 bp, Homo sapiens
catttcaacactgat

SEQ ID NO: 1050523 - DNA, 15 bp, Homo sapiens
gcatttcaacactga

SEQ ID NO: 1050524 - DNA, 15 bp, Homo sapiens
agcatttcaacactg

SEQ ID NO: 1050525 - DNA, 15 bp, Homo sapiens
aagcatttcaacact

SEQ ID NO: 1050526 - DNA, 15 bp, Homo sapiens
aaagcatttcaacac

SEQ ID NO: 1050527 - DNA, 15 bp, Homo sapiens
gaaagcatttcaaca

SEQ ID NO: 1050528 - DNA, 15 bp, Homo sapiens
tgaaagcatttcaac

SEQ ID NO: 1050529 - DNA, 15 bp, Homo sapiens
ttgaaagcatttcaa

SEQ ID NO: 1050530 - DNA, 15 bp, Homo sapiens
tttgaaagcatttca

SEQ ID NO: 1050531 - DNA, 15 bp, Homo sapiens
ttttgaaagcatttc

SEQ ID NO: 1050532 - DNA, 15 bp, Homo sapiens
cttttgaaagcattt

SEQ ID NO: 1050533 - DNA, 15 bp, Homo sapiens
ccttttgaaagcatt

SEQ ID NO: 1050534 - DNA, 15 bp, Homo sapiens
tccttttgaaagcat

SEQ ID NO: 1050535 - DNA, 15 bp, Homo sapiens
ttccttttgaaagca

SEQ ID NO: 1050536 - DNA, 15 bp, Homo sapiens
attccttttgaaagc

SEQ ID NO: 1050537 - DNA, 15 bp, Homo sapiens
tattccttttgaaag

SEQ ID NO: 1050538 - DNA, 15 bp, Homo sapiens
ctattccttttgaaa

SEQ ID NO: 1050539 - DNA, 15 bp, Homo sapiens
gctattccttttgaa

SEQ ID NO: 1050540 - DNA, 15 bp, Homo sapiens
tgctattccttttga

SEQ ID NO: 1050541 - DNA, 15 bp, Homo sapiens
ttgctattccttttg

SEQ ID NO: 1050542 - DNA, 15 bp, Homo sapiens
tttgctattcctttt

SEQ ID NO: 1050543 - DNA, 15 bp, Homo sapiens
ttttgctattccttt

SEQ ID NO: 1050544 - DNA, 15 bp, Homo sapiens
gttttgctattcctt

SEQ ID NO: 1050545 - DNA, 15 bp, Homo sapiens
tgttttgctattcct

SEQ ID NO: 1050546 - DNA, 15 bp, Homo sapiens
atgttttgctattcc

SEQ ID NO: 1050547 - DNA, 15 bp, Homo sapiens
gatgttttgctattc

SEQ ID NO: 1050548 - DNA, 15 bp, Homo sapiens
tgatgttttgctatt

SEQ ID NO: 1050549 - DNA, 15 bp, Homo sapiens
ctgatgttttgctat

SEQ ID NO: 1050550 - DNA, 15 bp, Homo sapiens
cctgatgttttgcta

SEQ ID NO: 1050551 - DNA, 15 bp, Homo sapiens
gcctgatgttttgct

SEQ ID NO: 1050552 - DNA, 15 bp, Homo sapiens
agcctgatgttttgc

SEQ ID NO: 1050553 - DNA, 15 bp, Homo sapiens
aagcctgatgttttg

SEQ ID NO: 1050554 - DNA, 15 bp, Homo sapiens
caagcctgatgtttt

SEQ ID NO: 1050555 - DNA, 15 bp, Homo sapiens
ccaagcctgatgttt

SEQ ID NO: 1050556 - DNA, 15 bp, Homo sapiens
gccaagcctgatgtt

SEQ ID NO: 1050557 - DNA, 15 bp, Homo sapiens
agccaagcctgatgt

SEQ ID NO: 1050558 - DNA, 15 bp, Homo sapiens
cagccaagcctgatg

SEQ ID NO: 1050559 - DNA, 15 bp, Homo sapiens
tcagccaagcctgat

SEQ ID NO: 1050560 - DNA, 15 bp, Homo sapiens
ctcagccaagcctga

SEQ ID NO: 1050561 - DNA, 15 bp, Homo sapiens
gctcagccaagcctg

SEQ ID NO: 1050562 - DNA, 15 bp, Homo sapiens
ggctcagccaagcct

SEQ ID NO: 1050563 - DNA, 15 bp, Homo sapiens
tggctcagccaagcc

SEQ ID NO: 1050564 - DNA, 15 bp, Homo sapiens
ttggctcagccaagc

SEQ ID NO: 1050565 - DNA, 15 bp, Homo sapiens
cttggctcagccaag

SEQ ID NO: 1050566 - DNA, 15 bp, Homo sapiens
acttggctcagccaa

SEQ ID NO: 1050567 - DNA, 15 bp, Homo sapiens
aacttggctcagcca

SEQ ID NO: 1050568 - DNA, 15 bp, Homo sapiens
taacttggctcagcc

SEQ ID NO: 1050569 - DNA, 15 bp, Homo sapiens
gtaacttggctcagc

SEQ ID NO: 1050570 - DNA, 15 bp, Homo sapiens
ggtaacttggctcag

SEQ ID NO: 1050571 - DNA, 15 bp, Homo sapiens
aggtaacttggctca

SEQ ID NO: 1050572 - DNA, 15 bp, Homo sapiens
taggtaacttggctc

SEQ ID NO: 1050573 - DNA, 15 bp, Homo sapiens
ataggtaacttggct

SEQ ID NO: 1050574 - DNA, 15 bp, Homo sapiens
tataggtaacttggc

SEQ ID NO: 1050575 - DNA, 15 bp, Homo sapiens
ctataggtaacttgg

SEQ ID NO: 1050576 - DNA, 15 bp, Homo sapiens
gctataggtaacttg

SEQ ID NO: 1050577 - DNA, 15 bp, Homo sapiens
cgctataggtaactt

SEQ ID NO: 1050578 - DNA, 15 bp, Homo sapiens
gcgctataggtaact

SEQ ID NO: 1050579 - DNA, 15 bp, Homo sapiens
agcgctataggtaac

SEQ ID NO: 1050580 - DNA, 15 bp, Homo sapiens
cagcgctataggtaa

SEQ ID NO: 1050581 - DNA, 15 bp, Homo sapiens
ccagcgctataggta

SEQ ID NO: 1050582 - DNA, 15 bp, Homo sapiens
accagcgctataggt

SEQ ID NO: 1050583 - DNA, 15 bp, Homo sapiens
caccagcgctatagg

SEQ ID NO: 1050584 - DNA, 15 bp, Homo sapiens
ccaccagcgctatag

SEQ ID NO: 1050585 - DNA, 15 bp, Homo sapiens
accaccagcgctata

SEQ ID NO: 1050586 - DNA, 15 bp, Homo sapiens
caccaccagcgctat

SEQ ID NO: 1050587 - DNA, 15 bp, Homo sapiens
tcaccaccagcgcta

SEQ ID NO: 1050588 - DNA, 15 bp, Homo sapiens
ttcaccaccagcgct

SEQ ID NO: 1050589 - DNA, 15 bp, Homo sapiens
tttcaccaccagcgc

SEQ ID NO: 1050590 - DNA, 15 bp, Homo sapiens
ttttcaccaccagcg

SEQ ID NO: 1050591 - DNA, 15 bp, Homo sapiens
attttcaccaccagc

SEQ ID NO: 1050592 - DNA, 15 bp, Homo sapiens
tattttcaccaccag

SEQ ID NO: 1050593 - DNA, 15 bp, Homo sapiens
ttattttcaccacca

SEQ ID NO: 1050594 - DNA, 15 bp, Homo sapiens
tttattttcaccacc

SEQ ID NO: 1050595 - DNA, 15 bp, Homo sapiens
ttttattttcaccac

SEQ ID NO: 1050596 - DNA, 15 bp, Homo sapiens
gttttattttcacca

SEQ ID NO: 1050597 - DNA, 15 bp, Homo sapiens
tgttttattttcacc

SEQ ID NO: 1050598 - DNA, 15 bp, Homo sapiens
ttgttttattttcac

SEQ ID NO: 1050599 - DNA, 15 bp, Homo sapiens
tttgttttattttca

SEQ ID NO: 1050600 - DNA, 15 bp, Homo sapiens
aatttgttttatttt

SEQ ID NO: 1050601 - DNA, 15 bp, Homo sapiens
gaatttgttttattt

SEQ ID NO: 1050602 - DNA, 15 bp, Homo sapiens
tgaatttgttttatt

SEQ ID NO: 1050603 - DNA, 15 bp, Homo sapiens
catgaatttgtttta

SEQ ID NO: 1050604 - DNA, 15 bp, Homo sapiens
acatgaatttgtttt

SEQ ID NO: 1050605 - DNA, 15 bp, Homo sapiens
gacatgaatttgttt

SEQ ID NO: 1050606 - DNA, 15 bp, Homo sapiens
tgacatgaatttgtt

SEQ ID NO: 1050607 - DNA, 15 bp, Homo sapiens
ttgacatgaatttgt

SEQ ID NO: 1050608 - DNA, 15 bp, Homo sapiens
tttgacatgaatttg

SEQ ID NO: 1050609 - DNA, 15 bp, Homo sapiens
atttgacatgaattt

SEQ ID NO: 1050610 - DNA, 15 bp, Homo sapiens
catttgacatgaatt

SEQ ID NO: 1050611 - DNA, 15 bp, Homo sapiens
tcatttgacatgaat

SEQ ID NO: 1050612 - DNA, 15 bp, Homo sapiens
atcatttgacatgaa

SEQ ID NO: 1050613 - DNA, 15 bp, Homo sapiens
aatcatttgacatga

SEQ ID NO: 1050614 - DNA, 15 bp, Homo sapiens
aaatcatttgacatg

SEQ ID NO: 1050615 - DNA, 15 bp, Homo sapiens
aaaatcatttgacat

SEQ ID NO: 1050616 - DNA, 15 bp, Homo sapiens
gaaaatcatttgaca

SEQ ID NO: 1050617 - DNA, 15 bp, Homo sapiens
tgaaaatcatttgac

SEQ ID NO: 1050618 - DNA, 15 bp, Homo sapiens
ttgaaaatcatttga

SEQ ID NO: 1050619 - DNA, 15 bp, Homo sapiens
tttgaaaatcatttg

SEQ ID NO: 1050620 - DNA, 15 bp, Homo sapiens
ctttgaaaatcattt

SEQ ID NO: 1050621 - DNA, 15 bp, Homo sapiens
gctttgaaaatcatt

SEQ ID NO: 1050622 - DNA, 15 bp, Homo sapiens
tgctttgaaaatcat

SEQ ID NO: 1050623 - DNA, 15 bp, Homo sapiens
gtgctttgaaaatca

SEQ ID NO: 1050624 - DNA, 15 bp, Homo sapiens
agtgctttgaaaatc

SEQ ID NO: 1050625 - DNA, 15 bp, Homo sapiens
aagtgctttgaaaat

SEQ ID NO: 1050626 - DNA, 15 bp, Homo sapiens
aaagtgctttgaaaa

SEQ ID NO: 1050627 - DNA, 15 bp, Homo sapiens
gaaagtgctttgaaa

SEQ ID NO: 1050628 - DNA, 15 bp, Homo sapiens
tgaaagtgctttgaa

SEQ ID NO: 1050629 - DNA, 15 bp, Homo sapiens
ctgaaagtgctttga

SEQ ID NO: 1050630 - DNA, 15 bp, Homo sapiens
cctgaaagtgctttg

SEQ ID NO: 1050631 - DNA, 15 bp, Homo sapiens
gcctgaaagtgcttt

SEQ ID NO: 1050632 - DNA, 15 bp, Homo sapiens
agcctgaaagtgctt

SEQ ID NO: 1050633 - DNA, 15 bp, Homo sapiens
tagcctgaaagtgct

SEQ ID NO: 1050634 - DNA, 15 bp, Homo sapiens
atagcctgaaagtgc

SEQ ID NO: 1050635 - DNA, 15 bp, Homo sapiens
catagcctgaaagtg

SEQ ID NO: 1050636 - DNA, 15 bp, Homo sapiens
ccatagcctgaaagt

SEQ ID NO: 1050637 - DNA, 15 bp, Homo sapiens
tccatagcctgaaag

SEQ ID NO: 1050638 - DNA, 15 bp, Homo sapiens
atccatagcctgaaa

SEQ ID NO: 1050639 - DNA, 15 bp, Homo sapiens
aatccatagcctgaa

SEQ ID NO: 1050640 - DNA, 15 bp, Homo sapiens
aaatccatagcctga

SEQ ID NO: 1050641 - DNA, 15 bp, Homo sapiens
taaatccatagcctg

SEQ ID NO: 1050642 - DNA, 15 bp, Homo sapiens
gtaaatccatagcct

SEQ ID NO: 1050643 - DNA, 15 bp, Homo sapiens
agtaaatccatagcc

SEQ ID NO: 1050644 - DNA, 15 bp, Homo sapiens
aagtaaatccatagc

SEQ ID NO: 1050645 - DNA, 15 bp, Homo sapiens
gaagtaaatccatag

SEQ ID NO: 1050646 - DNA, 15 bp, Homo sapiens
tgaagtaaatccata

SEQ ID NO: 1050647 - DNA, 15 bp, Homo sapiens
atgaagtaaatccat

SEQ ID NO: 1050648 - DNA, 15 bp, Homo sapiens
aatgaagtaaatcca

SEQ ID NO: 1050649 - DNA, 15 bp, Homo sapiens
taatgaagtaaatcc

SEQ ID NO: 1050650 - DNA, 15 bp, Homo sapiens
ataatgaagtaaatc

SEQ ID NO: 1050651 - DNA, 15 bp, Homo sapiens
aataatgaagtaaat

SEQ ID NO: 1050652 - DNA, 15 bp, Homo sapiens
aaataatgaagtaaa

SEQ ID NO: 1050653 - DNA, 15 bp, Homo sapiens
aaaataatgaagtaa

SEQ ID NO: 1050654 - DNA, 15 bp, Homo sapiens
taaaataatgaagta

SEQ ID NO: 1050655 - DNA, 15 bp, Homo sapiens
ctaaaataatgaagt

SEQ ID NO: 1050656 - DNA, 15 bp, Homo sapiens
gctaaaataatgaag

SEQ ID NO: 1050657 - DNA, 15 bp, Homo sapiens
agctaaaataatgaa

SEQ ID NO: 1050658 - DNA, 15 bp, Homo sapiens
gagctaaaataatga

SEQ ID NO: 1050659 - DNA, 15 bp, Homo sapiens
ggagctaaaataatg

SEQ ID NO: 1050660 - DNA, 15 bp, Homo sapiens
cggagctaaaataat

SEQ ID NO: 1050661 - DNA, 15 bp, Homo sapiens
ccggagctaaaataa

SEQ ID NO: 1050662 - DNA, 15 bp, Homo sapiens
gccggagctaaaata

SEQ ID NO: 1050663 - DNA, 15 bp, Homo sapiens
agccggagctaaaat

SEQ ID NO: 1050664 - DNA, 15 bp, Homo sapiens
tagccggagctaaaa

SEQ ID NO: 1050665 - DNA, 15 bp, Homo sapiens
ctagccggagctaaa

SEQ ID NO: 1050666 - DNA, 15 bp, Homo sapiens
tctagccggagctaa

SEQ ID NO: 1050667 - DNA, 15 bp, Homo sapiens
atctagccggagcta

SEQ ID NO: 1050668 - DNA, 15 bp, Homo sapiens
gatctagccggagct

SEQ ID NO: 1050669 - DNA, 15 bp, Homo sapiens
agatctagccggagc

SEQ ID NO: 1050670 - DNA, 15 bp, Homo sapiens
aagatctagccggag

SEQ ID NO: 1050671 - DNA, 15 bp, Homo sapiens
aaagatctagccgga

SEQ ID NO: 1050672 - DNA, 15 bp, Homo sapiens
aaaagatctagccgg

SEQ ID NO: 1050673 - DNA, 15 bp, Homo sapiens
taaaagatctagccg

SEQ ID NO: 1050674 - DNA, 15 bp, Homo sapiens
ctaaaagatctagcc

SEQ ID NO: 1050675 - DNA, 15 bp, Homo sapiens
cctaaaagatctagc

SEQ ID NO: 1050676 - DNA, 15 bp, Homo sapiens
acctaaaagatctag

SEQ ID NO: 1050677 - DNA, 15 bp, Homo sapiens
gacctaaaagatcta

SEQ ID NO: 1050678 - DNA, 15 bp, Homo sapiens
ggacctaaaagatct

SEQ ID NO: 1050679 - DNA, 15 bp, Homo sapiens
aggacctaaaagatc

SEQ ID NO: 1050680 - DNA, 15 bp, Homo sapiens
gaggacctaaaagat

SEQ ID NO: 1050681 - DNA, 15 bp, Homo sapiens
tgaggacctaaaaga

SEQ ID NO: 1050682 - DNA, 15 bp, Homo sapiens
gtgaggacctaaaag

SEQ ID NO: 1050683 - DNA, 15 bp, Homo sapiens
tgtgaggacctaaaa

SEQ ID NO: 1050684 - DNA, 15 bp, Homo sapiens
gtgtgaggacctaaa

SEQ ID NO: 1050685 - DNA, 15 bp, Homo sapiens
tgtgtgaggacctaa

SEQ ID NO: 1050686 - DNA, 15 bp, Homo sapiens
atgtgtgaggaccta

SEQ ID NO: 1050687 - DNA, 15 bp, Homo sapiens
aatgtgtgaggacct

SEQ ID NO: 1050688 - DNA, 15 bp, Homo sapiens
aaatgtgtgaggacc

SEQ ID NO: 1050689 - DNA, 15 bp, Homo sapiens
aaaatgtgtgaggac

SEQ ID NO: 1050690 - DNA, 15 bp, Homo sapiens
caaaatgtgtgagga

SEQ ID NO: 1050691 - DNA, 15 bp, Homo sapiens
ccaaaatgtgtgagg

SEQ ID NO: 1050692 - DNA, 15 bp, Homo sapiens
gccaaaatgtgtgag

SEQ ID NO: 1050693 - DNA, 15 bp, Homo sapiens
agccaaaatgtgtga

SEQ ID NO: 1050694 - DNA, 15 bp, Homo sapiens
aagccaaaatgtgtg

SEQ ID NO: 1050695 - DNA, 15 bp, Homo sapiens
gaagccaaaatgtgt

SEQ ID NO: 1050696 - DNA, 15 bp, Homo sapiens
ggaagccaaaatgtg

SEQ ID NO: 1050697 - DNA, 15 bp, Homo sapiens
aggaagccaaaatgt

SEQ ID NO: 1050698 - DNA, 15 bp, Homo sapiens
gaggaagccaaaatg

SEQ ID NO: 1050699 - DNA, 15 bp, Homo sapiens
ggaggaagccaaaat

SEQ ID NO: 1050700 - DNA, 15 bp, Homo sapiens
tggaggaagccaaaa

SEQ ID NO: 1050701 - DNA, 15 bp, Homo sapiens
ctggaggaagccaaa

SEQ ID NO: 1050702 - DNA, 15 bp, Homo sapiens
cctggaggaagccaa

SEQ ID NO: 1050703 - DNA, 15 bp, Homo sapiens
gcctggaggaagcca

SEQ ID NO: 1050704 - DNA, 15 bp, Homo sapiens
ggcctggaggaagcc

SEQ ID NO: 1050705 - DNA, 15 bp, Homo sapiens
tggcctggaggaagc

SEQ ID NO: 1050706 - DNA, 15 bp, Homo sapiens
ctggcctggaggaag

SEQ ID NO: 1050707 - DNA, 15 bp, Homo sapiens
cctggcctggaggaa

SEQ ID NO: 1050708 - DNA, 15 bp, Homo sapiens
gcctggcctggagga

SEQ ID NO: 1050709 - DNA, 15 bp, Homo sapiens
agcctggcctggagg

SEQ ID NO: 1050710 - DNA, 15 bp, Homo sapiens
cagcctggcctggag

SEQ ID NO: 1050711 - DNA, 15 bp, Homo sapiens
acagcctggcctgga

SEQ ID NO: 1050712 - DNA, 15 bp, Homo sapiens
cacagcctggcctgg

SEQ ID NO: 1050713 - DNA, 15 bp, Homo sapiens
ccacagcctggcctg

SEQ ID NO: 1050714 - DNA, 15 bp, Homo sapiens
tccacagcctggcct

SEQ ID NO: 1050715 - DNA, 15 bp, Homo sapiens
atccacagcctggcc

SEQ ID NO: 1050716 - DNA, 15 bp, Homo sapiens
tatccacagcctggc

SEQ ID NO: 1050717 - DNA, 15 bp, Homo sapiens
atatccacagcctgg

SEQ ID NO: 1050718 - DNA, 15 bp, Homo sapiens
catatccacagcctg

SEQ ID NO: 1050719 - DNA, 15 bp, Homo sapiens
tcatatccacagcct

SEQ ID NO: 1050720 - DNA, 15 bp, Homo sapiens
ctcatatccacagcc

SEQ ID NO: 1050721 - DNA, 15 bp, Homo sapiens
cctcatatccacagc

SEQ ID NO: 1050722 - DNA, 15 bp, Homo sapiens
ccctcatatccacag

SEQ ID NO: 1050723 - DNA, 15 bp, Homo sapiens
cccctcatatccaca

SEQ ID NO: 1050724 - DNA, 15 bp, Homo sapiens
tcccctcatatccac

SEQ ID NO: 1050725 - DNA, 15 bp, Homo sapiens
ttcccctcatatcca

SEQ ID NO: 1050726 - DNA, 15 bp, Homo sapiens
cttcccctcatatcc

SEQ ID NO: 1050727 - DNA, 15 bp, Homo sapiens
acttcccctcatatc

SEQ ID NO: 1050728 - DNA, 15 bp, Homo sapiens
gacttcccctcatat

SEQ ID NO: 1050729 - DNA, 15 bp, Homo sapiens
agacttcccctcata

SEQ ID NO: 1050730 - DNA, 15 bp, Homo sapiens
gagacttcccctcat

SEQ ID NO: 1050731 - DNA, 15 bp, Homo sapiens
tgagacttcccctca

SEQ ID NO: 1050732 - DNA, 15 bp, Homo sapiens
atgagacttcccctc

SEQ ID NO: 1050733 - DNA, 15 bp, Homo sapiens
aatgagacttcccct

SEQ ID NO: 1050734 - DNA, 15 bp, Homo sapiens
aaatgagacttcccc

SEQ ID NO: 1050735 - DNA, 15 bp, Homo sapiens
caaatgagacttccc

SEQ ID NO: 1050736 - DNA, 15 bp, Homo sapiens
ccaaatgagacttcc

SEQ ID NO: 1050737 - DNA, 15 bp, Homo sapiens
cccaaatgagacttc

SEQ ID NO: 1050738 - DNA, 15 bp, Homo sapiens
gcccaaatgagactt

SEQ ID NO: 1050739 - DNA, 15 bp, Homo sapiens
tgcccaaatgagact

SEQ ID NO: 1050740 - DNA, 15 bp, Homo sapiens
ttgcccaaatgagac

SEQ ID NO: 1050741 - DNA, 15 bp, Homo sapiens
cttgcccaaatgaga

SEQ ID NO: 1050742 - DNA, 15 bp, Homo sapiens
acttgcccaaatgag

SEQ ID NO: 1050743 - DNA, 15 bp, Homo sapiens
gacttgcccaaatga

SEQ ID NO: 1050744 - DNA, 15 bp, Homo sapiens
ggacttgcccaaatg

SEQ ID NO: 1050745 - DNA, 15 bp, Homo sapiens
tggacttgcccaaat

SEQ ID NO: 1050746 - DNA, 15 bp, Homo sapiens
gtggacttgcccaaa

SEQ ID NO: 1050747 - DNA, 15 bp, Homo sapiens
tgtggacttgcccaa

SEQ ID NO: 1050748 - DNA, 15 bp, Homo sapiens
ttgtggacttgccca

SEQ ID NO: 1050749 - DNA, 15 bp, Homo sapiens
tttgtggacttgccc

SEQ ID NO: 1050750 - DNA, 15 bp, Homo sapiens
atttgtggacttgcc

SEQ ID NO: 1050751 - DNA, 15 bp, Homo sapiens
gatttgtggacttgc

SEQ ID NO: 1050752 - DNA, 15 bp, Homo sapiens
tgatttgtggacttg

SEQ ID NO: 1050753 - DNA, 15 bp, Homo sapiens
ttgatttgtggactt

SEQ ID NO: 1050754 - DNA, 15 bp, Homo sapiens
cttgatttgtggact

SEQ ID NO: 1050755 - DNA, 15 bp, Homo sapiens
ccttgatttgtggac

SEQ ID NO: 1050756 - DNA, 15 bp, Homo sapiens
gccttgatttgtgga

SEQ ID NO: 1050757 - DNA, 15 bp, Homo sapiens
tgccttgatttgtgg

SEQ ID NO: 1050758 - DNA, 15 bp, Homo sapiens
ttgccttgatttgtg

SEQ ID NO: 1050759 - DNA, 15 bp, Homo sapiens
attgccttgatttgt

SEQ ID NO: 1050760 - DNA, 15 bp, Homo sapiens
tattgccttgatttg

SEQ ID NO: 1050761 - DNA, 15 bp, Homo sapiens
ttattgccttgattt

SEQ ID NO: 1050762 - DNA, 15 bp, Homo sapiens
tttattgccttgatt

SEQ ID NO: 1050763 - DNA, 15 bp, Homo sapiens
ttttattgccttgat

SEQ ID NO: 1050764 - DNA, 15 bp, Homo sapiens
attttattgccttga

SEQ ID NO: 1050765 - DNA, 15 bp, Homo sapiens
tattttattgccttg

SEQ ID NO: 1050766 - DNA, 15 bp, Homo sapiens
atattttattgcctt

SEQ ID NO: 1050767 - DNA, 15 bp, Homo sapiens
aatattttattgcct

SEQ ID NO: 1050768 - DNA, 15 bp, Homo sapiens
taatattttattgcc

SEQ ID NO: 1050769 - DNA, 15 bp, Homo sapiens
ctaatattttattgc

SEQ ID NO: 1050770 - DNA, 15 bp, Homo sapiens
actaatattttattg

SEQ ID NO: 1050771 - DNA, 15 bp, Homo sapiens
cactaatattttatt

SEQ ID NO: 1050772 - DNA, 15 bp, Homo sapiens
ccactaatattttat

SEQ ID NO: 1050773 - DNA, 15 bp, Homo sapiens
tccactaatatttta

SEQ ID NO: 1050774 - DNA, 15 bp, Homo sapiens
ttccactaatatttt

SEQ ID NO: 1050775 - DNA, 15 bp, Homo sapiens
attccactaatattt

SEQ ID NO: 1050776 - DNA, 15 bp, Homo sapiens
tattccactaatatt

SEQ ID NO: 1050777 - DNA, 15 bp, Homo sapiens
ttattccactaatat

SEQ ID NO: 1050778 - DNA, 15 bp, Homo sapiens
gttattccactaata

SEQ ID NO: 1050779 - DNA, 15 bp, Homo sapiens
ggttattccactaat

SEQ ID NO: 1050780 - DNA, 15 bp, Homo sapiens
cggttattccactaa

SEQ ID NO: 1050781 - DNA, 15 bp, Homo sapiens
tcggttattccacta

SEQ ID NO: 1050782 - DNA, 15 bp, Homo sapiens
atcggttattccact

SEQ ID NO: 1050783 - DNA, 15 bp, Homo sapiens
aatcggttattccac

SEQ ID NO: 1050784 - DNA, 15 bp, Homo sapiens
caatcggttattcca

SEQ ID NO: 1050785 - DNA, 15 bp, Homo sapiens
tcaatcggttattcc

SEQ ID NO: 1050786 - DNA, 15 bp, Homo sapiens
ttcaatcggttattc

SEQ ID NO: 1050787 - DNA, 15 bp, Homo sapiens
attcaatcggttatt

SEQ ID NO: 1050788 - DNA, 15 bp, Homo sapiens
aattcaatcggttat

SEQ ID NO: 1050789 - DNA, 15 bp, Homo sapiens
aaattcaatcggtta

SEQ ID NO: 1050790 - DNA, 15 bp, Homo sapiens
taaattcaatcggtt

SEQ ID NO: 1050791 - DNA, 15 bp, Homo sapiens
ataaattcaatcggt

SEQ ID NO: 1050792 - DNA, 15 bp, Homo sapiens
cataaattcaatcgg

SEQ ID NO: 1050793 - DNA, 15 bp, Homo sapiens
tcataaattcaatcg

SEQ ID NO: 1050794 - DNA, 15 bp, Homo sapiens
atcataaattcaatc

SEQ ID NO: 1050795 - DNA, 15 bp, Homo sapiens
catcataaattcaat

SEQ ID NO: 1050796 - DNA, 15 bp, Homo sapiens
ccatcataaattcaa

SEQ ID NO: 1050797 - DNA, 15 bp, Homo sapiens
cccatcataaattca

SEQ ID NO: 1050798 - DNA, 15 bp, Homo sapiens
tcccatcataaattc

SEQ ID NO: 1050799 - DNA, 15 bp, Homo sapiens
atcccatcataaatt

SEQ ID NO: 1050800 - DNA, 15 bp, Homo sapiens
aatcccatcataaat

SEQ ID NO: 1050801 - DNA, 15 bp, Homo sapiens
aaatcccatcataaa

SEQ ID NO: 1050802 - DNA, 15 bp, Homo sapiens
taaatcccatcataa

SEQ ID NO: 1050803 - DNA, 15 bp, Homo sapiens
ttaaatcccatcata

SEQ ID NO: 1050804 - DNA, 15 bp, Homo sapiens
tttaaatcccatcat

SEQ ID NO: 1050805 - DNA, 15 bp, Homo sapiens
ctttaaatcccatca

SEQ ID NO: 1050806 - DNA, 15 bp, Homo sapiens
tctttaaatcccatc

SEQ ID NO: 1050807 - DNA, 15 bp, Homo sapiens
gtctttaaatcccat

SEQ ID NO: 1050808 - DNA, 15 bp, Homo sapiens
tgtctttaaatccca

SEQ ID NO: 1050809 - DNA, 15 bp, Homo sapiens
ttgtctttaaatccc

SEQ ID NO: 1050810 - DNA, 15 bp, Homo sapiens
cttgtctttaaatcc

SEQ ID NO: 1050811 - DNA, 15 bp, Homo sapiens
acttgtctttaaatc

SEQ ID NO: 1050812 - DNA, 15 bp, Homo sapiens
tacttgtctttaaat

SEQ ID NO: 1050813 - DNA, 15 bp, Homo sapiens
atacttgtctttaaa

SEQ ID NO: 1050814 - DNA, 15 bp, Homo sapiens
tatacttgtctttaa

SEQ ID NO: 1050815 - DNA, 15 bp, Homo sapiens
ttatacttgtcttta

SEQ ID NO: 1050816 - DNA, 15 bp, Homo sapiens
tttatacttgtcttt

SEQ ID NO: 1050817 - DNA, 15 bp, Homo sapiens
atttatacttgtctt

SEQ ID NO: 1050818 - DNA, 15 bp, Homo sapiens
catttatacttgtct

SEQ ID NO: 1050819 - DNA, 15 bp, Homo sapiens
acatttatacttgtc

SEQ ID NO: 1050820 - DNA, 15 bp, Homo sapiens
cacatttatacttgt

SEQ ID NO: 1050821 - DNA, 15 bp, Homo sapiens
ccacatttatacttg

SEQ ID NO: 1050822 - DNA, 15 bp, Homo sapiens
cccacatttatactt

SEQ ID NO: 1050823 - DNA, 15 bp, Homo sapiens
gcccacatttatact

SEQ ID NO: 1050824 - DNA, 15 bp, Homo sapiens
ggcccacatttatac

SEQ ID NO: 1050825 - DNA, 15 bp, Homo sapiens
gggcccacatttata

SEQ ID NO: 1050826 - DNA, 15 bp, Homo sapiens
agggcccacatttat

SEQ ID NO: 1050827 - DNA, 15 bp, Homo sapiens
tagggcccacattta

SEQ ID NO: 1050828 - DNA, 15 bp, Homo sapiens
ctagggcccacattt

SEQ ID NO: 1050829 - DNA, 15 bp, Homo sapiens
actagggcccacatt

SEQ ID NO: 1050830 - DNA, 15 bp, Homo sapiens
aactagggcccacat

SEQ ID NO: 1050831 - DNA, 15 bp, Homo sapiens
taactagggcccaca

SEQ ID NO: 1050832 - DNA, 15 bp, Homo sapiens
ttaactagggcccac

SEQ ID NO: 1050833 - DNA, 15 bp, Homo sapiens
attaactagggccca

SEQ ID NO: 1050834 - DNA, 15 bp, Homo sapiens
gattaactagggccc

SEQ ID NO: 1050835 - DNA, 15 bp, Homo sapiens
tgattaactagggcc

SEQ ID NO: 1050836 - DNA, 15 bp, Homo sapiens
gtgattaactagggc

SEQ ID NO: 1050837 - DNA, 15 bp, Homo sapiens
agtgattaactaggg

SEQ ID NO: 1050838 - DNA, 15 bp, Homo sapiens
tagtgattaactagg

SEQ ID NO: 1050839 - DNA, 15 bp, Homo sapiens
ctagtgattaactag

SEQ ID NO: 1050840 - DNA, 15 bp, Homo sapiens
gctagtgattaacta

SEQ ID NO: 1050841 - DNA, 15 bp, Homo sapiens
agctagtgattaact

SEQ ID NO: 1050842 - DNA, 15 bp, Homo sapiens
gagctagtgattaac

SEQ ID NO: 1050843 - DNA, 15 bp, Homo sapiens
ggagctagtgattaa

SEQ ID NO: 1050844 - DNA, 15 bp, Homo sapiens
tggagctagtgatta

SEQ ID NO: 1050845 - DNA, 15 bp, Homo sapiens
atggagctagtgatt

SEQ ID NO: 1050846 - DNA, 15 bp, Homo sapiens
catggagctagtgat

SEQ ID NO: 1050847 - DNA, 15 bp, Homo sapiens
acatggagctagtga

SEQ ID NO: 1050848 - DNA, 15 bp, Homo sapiens
aacatggagctagtg

SEQ ID NO: 1050849 - DNA, 15 bp, Homo sapiens
gaacatggagctagt

SEQ ID NO: 1050850 - DNA, 15 bp, Homo sapiens
tgaacatggagctag

SEQ ID NO: 1050851 - DNA, 15 bp, Homo sapiens
ctgaacatggagcta

SEQ ID NO: 1050852 - DNA, 15 bp, Homo sapiens
tctgaacatggagct

SEQ ID NO: 1050853 - DNA, 15 bp, Homo sapiens
atctgaacatggagc

SEQ ID NO: 1050854 - DNA, 15 bp, Homo sapiens
catctgaacatggag

SEQ ID NO: 1050855 - DNA, 15 bp, Homo sapiens
ccatctgaacatgga

SEQ ID NO: 1050856 - DNA, 15 bp, Homo sapiens
cccatctgaacatgg

SEQ ID NO: 1050857 - DNA, 15 bp, Homo sapiens
tcccatctgaacatg

SEQ ID NO: 1050858 - DNA, 15 bp, Homo sapiens
ttcccatctgaacat

SEQ ID NO: 1050859 - DNA, 15 bp, Homo sapiens
cttcccatctgaaca

SEQ ID NO: 1050860 - DNA, 15 bp, Homo sapiens
tcttcccatctgaac

SEQ ID NO: 1050861 - DNA, 15 bp, Homo sapiens
ttcttcccatctgaa

SEQ ID NO: 1050862 - DNA, 15 bp, Homo sapiens
tttcttcccatctga

SEQ ID NO: 1050863 - DNA, 15 bp, Homo sapiens
gtttcttcccatctg

SEQ ID NO: 1050864 - DNA, 15 bp, Homo sapiens
agtttcttcccatct

SEQ ID NO: 1050865 - DNA, 15 bp, Homo sapiens
tagtttcttcccatc

SEQ ID NO: 1050866 - DNA, 15 bp, Homo sapiens
ctagtttcttcccat

SEQ ID NO: 1050867 - DNA, 15 bp, Homo sapiens
cctagtttcttccca

SEQ ID NO: 1050868 - DNA, 15 bp, Homo sapiens
tcctagtttcttccc

SEQ ID NO: 1050869 - DNA, 15 bp, Homo sapiens
gtcctagtttcttcc

SEQ ID NO: 1050870 - DNA, 15 bp, Homo sapiens
agtcctagtttcttc

SEQ ID NO: 1050871 - DNA, 15 bp, Homo sapiens
tagtcctagtttctt

SEQ ID NO: 1050872 - DNA, 15 bp, Homo sapiens
ttagtcctagtttct

SEQ ID NO: 1050873 - DNA, 15 bp, Homo sapiens
tttagtcctagtttc

SEQ ID NO: 1050874 - DNA, 15 bp, Homo sapiens
atttagtcctagttt

SEQ ID NO: 1050875 - DNA, 15 bp, Homo sapiens
gatttagtcctagtt

SEQ ID NO: 1050876 - DNA, 15 bp, Homo sapiens
tgatttagtcctagt

SEQ ID NO: 1050877 - DNA, 15 bp, Homo sapiens
atgatttagtcctag

SEQ ID NO: 1050878 - DNA, 15 bp, Homo sapiens
gatgatttagtccta

SEQ ID NO: 1050879 - DNA, 15 bp, Homo sapiens
ggatgatttagtcct

SEQ ID NO: 1050880 - DNA, 15 bp, Homo sapiens
tggatgatttagtcc

SEQ ID NO: 1050881 - DNA, 15 bp, Homo sapiens
ctggatgatttagtc

SEQ ID NO: 1050882 - DNA, 15 bp, Homo sapiens
cctggatgatttagt

SEQ ID NO: 1050883 - DNA, 15 bp, Homo sapiens
tcctggatgatttag

SEQ ID NO: 1050884 - DNA, 15 bp, Homo sapiens
ttcctggatgattta

SEQ ID NO: 1050885 - DNA, 15 bp, Homo sapiens
tttcctggatgattt

SEQ ID NO: 1050886 - DNA, 15 bp, Homo sapiens
atttcctggatgatt

SEQ ID NO: 1050887 - DNA, 15 bp, Homo sapiens
catttcctggatgat

SEQ ID NO: 1050888 - DNA, 15 bp, Homo sapiens
gcatttcctggatga

SEQ ID NO: 1050889 - DNA, 15 bp, Homo sapiens
tgcatttcctggatg

SEQ ID NO: 1050890 - DNA, 15 bp, Homo sapiens
atgcatttcctggat

SEQ ID NO: 1050891 - DNA, 15 bp, Homo sapiens
aatgcatttcctgga

SEQ ID NO: 1050892 - DNA, 15 bp, Homo sapiens
aaatgcatttcctgg

SEQ ID NO: 1050893 - DNA, 15 bp, Homo sapiens
caaatgcatttcctg

SEQ ID NO: 1050894 - DNA, 15 bp, Homo sapiens
ccaaatgcatttcct

SEQ ID NO: 1050895 - DNA, 15 bp, Homo sapiens
tccaaatgcatttcc

SEQ ID NO: 1050896 - DNA, 15 bp, Homo sapiens
ttccaaatgcatttc

SEQ ID NO: 1050897 - DNA, 15 bp, Homo sapiens
cttccaaatgcattt

SEQ ID NO: 1050898 - DNA, 15 bp, Homo sapiens
tcttccaaatgcatt

SEQ ID NO: 1050899 - DNA, 15 bp, Homo sapiens
ctcttccaaatgcat

SEQ ID NO: 1050900 - DNA, 15 bp, Homo sapiens
actcttccaaatgca

SEQ ID NO: 1050901 - DNA, 15 bp, Homo sapiens
aactcttccaaatgc

SEQ ID NO: 1050902 - DNA, 15 bp, Homo sapiens
aaactcttccaaatg

SEQ ID NO: 1050903 - DNA, 15 bp, Homo sapiens
taaactcttccaaat

SEQ ID NO: 1050904 - DNA, 15 bp, Homo sapiens
ctaaactcttccaaa

SEQ ID NO: 1050905 - DNA, 15 bp, Homo sapiens
gctaaactcttccaa

SEQ ID NO: 1050906 - DNA, 15 bp, Homo sapiens
tgctaaactcttcca

SEQ ID NO: 1050907 - DNA, 15 bp, Homo sapiens
atgctaaactcttcc

SEQ ID NO: 1050908 - DNA, 15 bp, Homo sapiens
catgctaaactcttc

SEQ ID NO: 1050909 - DNA, 15 bp, Homo sapiens
tcatgctaaactctt

SEQ ID NO: 1050910 - DNA, 15 bp, Homo sapiens
atcatgctaaactct

SEQ ID NO: 1050911 - DNA, 15 bp, Homo sapiens
gatcatgctaaactc

SEQ ID NO: 1050912 - DNA, 15 bp, Homo sapiens
ggatcatgctaaact

SEQ ID NO: 1050913 - DNA, 15 bp, Homo sapiens
tggatcatgctaaac

SEQ ID NO: 1050914 - DNA, 15 bp, Homo sapiens
ctggatcatgctaaa

SEQ ID NO: 1050915 - DNA, 15 bp, Homo sapiens
tctggatcatgctaa

SEQ ID NO: 1050916 - DNA, 15 bp, Homo sapiens
ctctggatcatgcta

SEQ ID NO: 1050917 - DNA, 15 bp, Homo sapiens
actctggatcatgct

SEQ ID NO: 1050918 - DNA, 15 bp, Homo sapiens
aactctggatcatgc

SEQ ID NO: 1050919 - DNA, 15 bp, Homo sapiens
caactctggatcatg

SEQ ID NO: 1050920 - DNA, 15 bp, Homo sapiens
tcaactctggatcat

SEQ ID NO: 1050921 - DNA, 15 bp, Homo sapiens
ttcaactctggatca

SEQ ID NO: 1050922 - DNA, 15 bp, Homo sapiens
cttcaactctggatc

SEQ ID NO: 1050923 - DNA, 15 bp, Homo sapiens
tcttcaactctggat

SEQ ID NO: 1050924 - DNA, 15 bp, Homo sapiens
atcttcaactctgga

SEQ ID NO: 1050925 - DNA, 15 bp, Homo sapiens
aatcttcaactctgg

SEQ ID NO: 1050926 - DNA, 15 bp, Homo sapiens
aaatcttcaactctg

SEQ ID NO: 1050927 - DNA, 15 bp, Homo sapiens
taaatcttcaactct

SEQ ID NO: 1050928 - DNA, 15 bp, Homo sapiens
ataaatcttcaactc

SEQ ID NO: 1050929 - DNA, 15 bp, Homo sapiens
tataaatcttcaact

SEQ ID NO: 1050930 - DNA, 15 bp, Homo sapiens
ttataaatcttcaac

SEQ ID NO: 1050931 - DNA, 15 bp, Homo sapiens
attataaatcttcaa

SEQ ID NO: 1050932 - DNA, 15 bp, Homo sapiens
aattataaatcttca

SEQ ID NO: 1050933 - DNA, 15 bp, Homo sapiens
gaattataaatcttc

SEQ ID NO: 1050934 - DNA, 15 bp, Homo sapiens
tgaattataaatctt

SEQ ID NO: 1050935 - DNA, 15 bp, Homo sapiens
atgaattataaatct

SEQ ID NO: 1050936 - DNA, 15 bp, Homo sapiens
aatgaattataaatc

SEQ ID NO: 1050937 - DNA, 15 bp, Homo sapiens
caatgaattataaat

SEQ ID NO: 1050938 - DNA, 15 bp, Homo sapiens
acaatgaattataaa

SEQ ID NO: 1050939 - DNA, 15 bp, Homo sapiens
cacaatgaattataa

SEQ ID NO: 1050940 - DNA, 15 bp, Homo sapiens
gcacaatgaattata

SEQ ID NO: 1050941 - DNA, 15 bp, Homo sapiens
agcacaatgaattat

SEQ ID NO: 1050942 - DNA, 15 bp, Homo sapiens
cagcacaatgaatta

SEQ ID NO: 1050943 - DNA, 15 bp, Homo sapiens
acagcacaatgaatt

SEQ ID NO: 1050944 - DNA, 15 bp, Homo sapiens
tacagcacaatgaat

SEQ ID NO: 1050945 - DNA, 15 bp, Homo sapiens
ctacagcacaatgaa

SEQ ID NO: 1050946 - DNA, 15 bp, Homo sapiens
tctacagcacaatga

SEQ ID NO: 1050947 - DNA, 15 bp, Homo sapiens
ctctacagcacaatg

SEQ ID NO: 1050948 - DNA, 15 bp, Homo sapiens
cctctacagcacaat

SEQ ID NO: 1050949 - DNA, 15 bp, Homo sapiens
ccctctacagcacaa

SEQ ID NO: 1050950 - DNA, 15 bp, Homo sapiens
tccctctacagcaca

SEQ ID NO: 1050951 - DNA, 15 bp, Homo sapiens
ctccctctacagcac

SEQ ID NO: 1050952 - DNA, 15 bp, Homo sapiens
tctccctctacagca

SEQ ID NO: 1050953 - DNA, 15 bp, Homo sapiens
ctctccctctacagc

SEQ ID NO: 1050954 - DNA, 15 bp, Homo sapiens
actctccctctacag

SEQ ID NO: 1050955 - DNA, 15 bp, Homo sapiens
tactctccctctaca

SEQ ID NO: 1050956 - DNA, 15 bp, Homo sapiens
ttactctccctctac

SEQ ID NO: 1050957 - DNA, 15 bp, Homo sapiens
attactctccctcta

SEQ ID NO: 1050958 - DNA, 15 bp, Homo sapiens
tattactctccctct

SEQ ID NO: 1050959 - DNA, 15 bp, Homo sapiens
ttattactctccctc

SEQ ID NO: 1050960 - DNA, 15 bp, Homo sapiens
attattactctccct

SEQ ID NO: 1050961 - DNA, 15 bp, Homo sapiens
tattattactctccc

SEQ ID NO: 1050962 - DNA, 15 bp, Homo sapiens
atattattactctcc

SEQ ID NO: 1050963 - DNA, 15 bp, Homo sapiens
aatattattactctc

SEQ ID NO: 1050964 - DNA, 15 bp, Homo sapiens
caatattattactct

SEQ ID NO: 1050965 - DNA, 15 bp, Homo sapiens
acaatattattactc

SEQ ID NO: 1050966 - DNA, 15 bp, Homo sapiens
aacaatattattact

SEQ ID NO: 1050967 - DNA, 15 bp, Homo sapiens
caacaatattattac

SEQ ID NO: 1050968 - DNA, 15 bp, Homo sapiens
gcaacaatattatta

SEQ ID NO: 1050969 - DNA, 15 bp, Homo sapiens
tgcaacaatattatt

SEQ ID NO: 1050970 - DNA, 15 bp, Homo sapiens
ctgcaacaatattat

SEQ ID NO: 1050971 - DNA, 15 bp, Homo sapiens
tctgcaacaatatta

SEQ ID NO: 1050972 - DNA, 15 bp, Homo sapiens
ctctgcaacaatatt

SEQ ID NO: 1050973 - DNA, 15 bp, Homo sapiens
gctctgcaacaatat

SEQ ID NO: 1050974 - DNA, 15 bp, Homo sapiens
ggctctgcaacaata

SEQ ID NO: 1050975 - DNA, 15 bp, Homo sapiens
gggctctgcaacaat

SEQ ID NO: 1050976 - DNA, 15 bp, Homo sapiens
tgggctctgcaacaa

SEQ ID NO: 1050977 - DNA, 15 bp, Homo sapiens
ttgggctctgcaaca

SEQ ID NO: 1050978 - DNA, 15 bp, Homo sapiens
tttgggctctgcaac

SEQ ID NO: 1050979 - DNA, 15 bp, Homo sapiens
ctttgggctctgcaa

SEQ ID NO: 1050980 - DNA, 15 bp, Homo sapiens
gctttgggctctgca

SEQ ID NO: 1050981 - DNA, 15 bp, Homo sapiens
tgctttgggctctgc

SEQ ID NO: 1050982 - DNA, 15 bp, Homo sapiens
ttgctttgggctctg

SEQ ID NO: 1050983 - DNA, 15 bp, Homo sapiens
cttgctttgggctct

SEQ ID NO: 1050984 - DNA, 15 bp, Homo sapiens
ccttgctttgggctc

SEQ ID NO: 1050985 - DNA, 15 bp, Homo sapiens
cccttgctttgggct

SEQ ID NO: 1050986 - DNA, 15 bp, Homo sapiens
tcccttgctttgggc

SEQ ID NO: 1050987 - DNA, 15 bp, Homo sapiens
ctcccttgctttggg

SEQ ID NO: 1050988 - DNA, 15 bp, Homo sapiens
cctcccttgctttgg

SEQ ID NO: 1050989 - DNA, 15 bp, Homo sapiens
tcctcccttgctttg

SEQ ID NO: 1050990 - DNA, 15 bp, Homo sapiens
ttcctcccttgcttt

SEQ ID NO: 1050991 - DNA, 15 bp, Homo sapiens
tttcctcccttgctt

SEQ ID NO: 1050992 - DNA, 15 bp, Homo sapiens
atttcctcccttgct

SEQ ID NO: 1050993 - DNA, 15 bp, Homo sapiens
tatttcctcccttgc

SEQ ID NO: 1050994 - DNA, 15 bp, Homo sapiens
ttatttcctcccttg

SEQ ID NO: 1050995 - DNA, 15 bp, Homo sapiens
attatttcctccctt

SEQ ID NO: 1050996 - DNA, 15 bp, Homo sapiens
tattatttcctccct

SEQ ID NO: 1050997 - DNA, 15 bp, Homo sapiens
ttattatttcctccc

SEQ ID NO: 1050998 - DNA, 15 bp, Homo sapiens
tttattatttcctcc

SEQ ID NO: 1050999 - DNA, 15 bp, Homo sapiens
ttttattatttcctc

SEQ ID NO: 1051000 - DNA, 15 bp, Homo sapiens
attttattatttcct

SEQ ID NO: 1051001 - DNA, 15 bp, Homo sapiens
tattttattatttcc

SEQ ID NO: 1051002 - DNA, 15 bp, Homo sapiens
ttattttattatttc

SEQ ID NO: 1051003 - DNA, 15 bp, Homo sapiens
tttattttattattt

SEQ ID NO: 1051004 - DNA, 15 bp, Homo sapiens
atttattttattatt

SEQ ID NO: 1051005 - DNA, 15 bp, Homo sapiens
tatttattttattat

SEQ ID NO: 1051006 - DNA, 15 bp, Homo sapiens
ttatttattttatta

SEQ ID NO: 1051007 - DNA, 15 bp, Homo sapiens
tttatttattttatt

SEQ ID NO: 1051008 - DNA, 15 bp, Homo sapiens
ttttatttattttat

SEQ ID NO: 1051009 - DNA, 15 bp, Homo sapiens
attttatttatttta

SEQ ID NO: 1051010 - DNA, 15 bp, Homo sapiens
tattttatttatttt

SEQ ID NO: 1051011 - DNA, 15 bp, Homo sapiens
atattttatttattt

SEQ ID NO: 1051012 - DNA, 15 bp, Homo sapiens
tatattttatttatt

SEQ ID NO: 1051013 - DNA, 15 bp, Homo sapiens
atatattttatttat

SEQ ID NO: 1051014 - DNA, 15 bp, Homo sapiens
catatattttattta

SEQ ID NO: 1051015 - DNA, 15 bp, Homo sapiens
ccatatattttattt

SEQ ID NO: 1051016 - DNA, 15 bp, Homo sapiens
accatatattttatt

SEQ ID NO: 1051017 - DNA, 15 bp, Homo sapiens
caccatatattttat

SEQ ID NO: 1051018 - DNA, 15 bp, Homo sapiens
acaccatatatttta

SEQ ID NO: 1051019 - DNA, 15 bp, Homo sapiens
tacaccatatatttt

SEQ ID NO: 1051020 - DNA, 15 bp, Homo sapiens
ttacaccatatattt

SEQ ID NO: 1051021 - DNA, 15 bp, Homo sapiens
tttacaccatatatt

SEQ ID NO: 1051022 - DNA, 15 bp, Homo sapiens
ttttacaccatatat

SEQ ID NO: 1051023 - DNA, 15 bp, Homo sapiens
attttacaccatata

SEQ ID NO: 1051024 - DNA, 15 bp, Homo sapiens
aattttacaccatat

SEQ ID NO: 1051025 - DNA, 15 bp, Homo sapiens
caattttacaccata

SEQ ID NO: 1051026 - DNA, 15 bp, Homo sapiens
tcaattttacaccat

SEQ ID NO: 1051027 - DNA, 15 bp, Homo sapiens
ttcaattttacacca

SEQ ID NO: 1051028 - DNA, 15 bp, Homo sapiens
attcaattttacacc

SEQ ID NO: 1051029 - DNA, 15 bp, Homo sapiens
aattcaattttacac

SEQ ID NO: 1051030 - DNA, 15 bp, Homo sapiens
aaattcaattttaca

SEQ ID NO: 1051031 - DNA, 15 bp, Homo sapiens
caaattcaattttac

SEQ ID NO: 1051032 - DNA, 15 bp, Homo sapiens
tcaaattcaatttta

SEQ ID NO: 1051033 - DNA, 15 bp, Homo sapiens
ctcaaattcaatttt

SEQ ID NO: 1051034 - DNA, 15 bp, Homo sapiens
cctcaaattcaattt

SEQ ID NO: 1051035 - DNA, 15 bp, Homo sapiens
gcctcaaattcaatt

SEQ ID NO: 1051036 - DNA, 15 bp, Homo sapiens
ggcctcaaattcaat

SEQ ID NO: 1051037 - DNA, 15 bp, Homo sapiens
aggcctcaaattcaa

SEQ ID NO: 1051038 - DNA, 15 bp, Homo sapiens
aaggcctcaaattca

SEQ ID NO: 1051039 - DNA, 15 bp, Homo sapiens
caaggcctcaaattc

SEQ ID NO: 1051040 - DNA, 15 bp, Homo sapiens
ccaaggcctcaaatt

SEQ ID NO: 1051041 - DNA, 15 bp, Homo sapiens
tccaaggcctcaaat

SEQ ID NO: 1051042 - DNA, 15 bp, Homo sapiens
atccaaggcctcaaa

SEQ ID NO: 1051043 - DNA, 15 bp, Homo sapiens
tatccaaggcctcaa

SEQ ID NO: 1051044 - DNA, 15 bp, Homo sapiens
gtatccaaggcctca

SEQ ID NO: 1051045 - DNA, 15 bp, Homo sapiens
agtatccaaggcctc

SEQ ID NO: 1051046 - DNA, 15 bp, Homo sapiens
tagtatccaaggcct

SEQ ID NO: 1051047 - DNA, 15 bp, Homo sapiens
ttagtatccaaggcc

SEQ ID NO: 1051048 - DNA, 15 bp, Homo sapiens
tttagtatccaaggc

SEQ ID NO: 1051049 - DNA, 15 bp, Homo sapiens
ttttagtatccaagg

SEQ ID NO: 1051050 - DNA, 15 bp, Homo sapiens
cttttagtatccaag

SEQ ID NO: 1051051 - DNA, 15 bp, Homo sapiens
acttttagtatccaa

SEQ ID NO: 1051052 - DNA, 15 bp, Homo sapiens
cacttttagtatcca

SEQ ID NO: 1051053 - DNA, 15 bp, Homo sapiens
tcacttttagtatcc

SEQ ID NO: 1051054 - DNA, 15 bp, Homo sapiens
ctcacttttagtatc

SEQ ID NO: 1051055 - DNA, 15 bp, Homo sapiens
cctcacttttagtat

SEQ ID NO: 1051056 - DNA, 15 bp, Homo sapiens
tcctcacttttagta

SEQ ID NO: 1051057 - DNA, 15 bp, Homo sapiens
ttcctcacttttagt

SEQ ID NO: 1051058 - DNA, 15 bp, Homo sapiens
gttcctcacttttag

SEQ ID NO: 1051059 - DNA, 15 bp, Homo sapiens
agttcctcactttta

SEQ ID NO: 1051060 - DNA, 15 bp, Homo sapiens
cagttcctcactttt

SEQ ID NO: 1051061 - DNA, 15 bp, Homo sapiens
ccagttcctcacttt

SEQ ID NO: 1051062 - DNA, 15 bp, Homo sapiens
cccagttcctcactt

SEQ ID NO: 1051063 - DNA, 15 bp, Homo sapiens
tcccagttcctcact

SEQ ID NO: 1051064 - DNA, 15 bp, Homo sapiens
ctcccagttcctcac

SEQ ID NO: 1051065 - DNA, 15 bp, Homo sapiens
tctcccagttcctca

SEQ ID NO: 1051066 - DNA, 15 bp, Homo sapiens
ttctcccagttcctc

SEQ ID NO: 1051067 - DNA, 15 bp, Homo sapiens
cttctcccagttcct

SEQ ID NO: 1051068 - DNA, 15 bp, Homo sapiens
acttctcccagttcc

SEQ ID NO: 1051069 - DNA, 15 bp, Homo sapiens
cacttctcccagttc

SEQ ID NO: 1051070 - DNA, 15 bp, Homo sapiens
tcacttctcccagtt

SEQ ID NO: 1051071 - DNA, 15 bp, Homo sapiens
ttcacttctcccagt

SEQ ID NO: 1051072 - DNA, 15 bp, Homo sapiens
cttcacttctcccag

SEQ ID NO: 1051073 - DNA, 15 bp, Homo sapiens
tcttcacttctccca

SEQ ID NO: 1051074 - DNA, 15 bp, Homo sapiens
ttcttcacttctccc

SEQ ID NO: 1051075 - DNA, 15 bp, Homo sapiens
attcttcacttctcc

SEQ ID NO: 1051076 - DNA, 15 bp, Homo sapiens
cattcttcacttctc

SEQ ID NO: 1051077 - DNA, 15 bp, Homo sapiens
tcattcttcacttct

SEQ ID NO: 1051078 - DNA, 15 bp, Homo sapiens
ttcattcttcacttc

SEQ ID NO: 1051079 - DNA, 15 bp, Homo sapiens
tttcattcttcactt

SEQ ID NO: 1051080 - DNA, 15 bp, Homo sapiens
atttcattcttcact

SEQ ID NO: 1051081 - DNA, 15 bp, Homo sapiens
tatttcattcttcac

SEQ ID NO: 1051082 - DNA, 15 bp, Homo sapiens
ttatttcattcttca

SEQ ID NO: 1051083 - DNA, 15 bp, Homo sapiens
attatttcattcttc

SEQ ID NO: 1051084 - DNA, 15 bp, Homo sapiens
tattatttcattctt

SEQ ID NO: 1051085 - DNA, 15 bp, Homo sapiens
atattatttcattct

SEQ ID NO: 1051086 - DNA, 15 bp, Homo sapiens
catattatttcattc

SEQ ID NO: 1051087 - DNA, 15 bp, Homo sapiens
gcatattatttcatt

SEQ ID NO: 1051088 - DNA, 15 bp, Homo sapiens
agcatattatttcat

SEQ ID NO: 1051089 - DNA, 15 bp, Homo sapiens
tagcatattatttca

SEQ ID NO: 1051090 - DNA, 15 bp, Homo sapiens
gtagcatattatttc

SEQ ID NO: 1051091 - DNA, 15 bp, Homo sapiens
tgtagcatattattt

SEQ ID NO: 1051092 - DNA, 15 bp, Homo sapiens
atgtagcatattatt

SEQ ID NO: 1051093 - DNA, 15 bp, Homo sapiens
tatgtagcatattat

SEQ ID NO: 1051094 - DNA, 15 bp, Homo sapiens
ttatgtagcatatta

SEQ ID NO: 1051095 - DNA, 15 bp, Homo sapiens
attatgtagcatatt

SEQ ID NO: 1051096 - DNA, 15 bp, Homo sapiens
gattatgtagcatat

SEQ ID NO: 1051097 - DNA, 15 bp, Homo sapiens
ggattatgtagcata

SEQ ID NO: 1051098 - DNA, 15 bp, Homo sapiens
tggattatgtagcat

SEQ ID NO: 1051099 - DNA, 15 bp, Homo sapiens
ttggattatgtagca

SEQ ID NO: 1051100 - DNA, 15 bp, Homo sapiens
gttggattatgtagc

SEQ ID NO: 1051101 - DNA, 15 bp, Homo sapiens
agttggattatgtag

SEQ ID NO: 1051102 - DNA, 15 bp, Homo sapiens
gagttggattatgta

SEQ ID NO: 1051103 - DNA, 15 bp, Homo sapiens
agagttggattatgt

SEQ ID NO: 1051104 - DNA, 15 bp, Homo sapiens
gagagttggattatg

SEQ ID NO: 1051105 - DNA, 15 bp, Homo sapiens
ggagagttggattat

SEQ ID NO: 1051106 - DNA, 15 bp, Homo sapiens
gggagagttggatta

SEQ ID NO: 1051107 - DNA, 15 bp, Homo sapiens
cgggagagttggatt

SEQ ID NO: 1051108 - DNA, 15 bp, Homo sapiens
tcgggagagttggat

SEQ ID NO: 1051109 - DNA, 15 bp, Homo sapiens
ctcgggagagttgga

SEQ ID NO: 1051110 - DNA, 15 bp, Homo sapiens
cctcgggagagttgg

SEQ ID NO: 1051111 - DNA, 15 bp, Homo sapiens
tcctcgggagagttg

SEQ ID NO: 1051112 - DNA, 15 bp, Homo sapiens
atcctcgggagagtt

SEQ ID NO: 1051113 - DNA, 15 bp, Homo sapiens
tatcctcgggagagt

SEQ ID NO: 1051114 - DNA, 15 bp, Homo sapiens
atatcctcgggagag

SEQ ID NO: 1051115 - DNA, 15 bp, Homo sapiens
catatcctcgggaga

SEQ ID NO: 1051116 - DNA, 15 bp, Homo sapiens
acatatcctcgggag

SEQ ID NO: 1051117 - DNA, 15 bp, Homo sapiens
aacatatcctcggga

SEQ ID NO: 1051118 - DNA, 15 bp, Homo sapiens
aaacatatcctcggg

SEQ ID NO: 1051119 - DNA, 15 bp, Homo sapiens
gaaacatatcctcgg

SEQ ID NO: 1051120 - DNA, 15 bp, Homo sapiens
agaaacatatcctcg

SEQ ID NO: 1051121 - DNA, 15 bp, Homo sapiens
gagaaacatatcctc

SEQ ID NO: 1051122 - DNA, 15 bp, Homo sapiens
agagaaacatatcct

SEQ ID NO: 1051123 - DNA, 15 bp, Homo sapiens
tagagaaacatatcc

SEQ ID NO: 1051124 - DNA, 15 bp, Homo sapiens
ctagagaaacatatc

SEQ ID NO: 1051125 - DNA, 15 bp, Homo sapiens
tctagagaaacatat

SEQ ID NO: 1051126 - DNA, 15 bp, Homo sapiens
ttctagagaaacata

SEQ ID NO: 1051127 - DNA, 15 bp, Homo sapiens
attctagagaaacat

SEQ ID NO: 1051128 - DNA, 15 bp, Homo sapiens
aattctagagaaaca

SEQ ID NO: 1051129 - DNA, 15 bp, Homo sapiens
gaattctagagaaac

SEQ ID NO: 1051130 - DNA, 15 bp, Homo sapiens
agaattctagagaaa

SEQ ID NO: 1051131 - DNA, 15 bp, Homo sapiens
cagaattctagagaa

SEQ ID NO: 1051132 - DNA, 15 bp, Homo sapiens
tcagaattctagaga

SEQ ID NO: 1051133 - DNA, 15 bp, Homo sapiens
ttcagaattctagag

SEQ ID NO: 1051134 - DNA, 15 bp, Homo sapiens
tttcagaattctaga

SEQ ID NO: 1051135 - DNA, 15 bp, Homo sapiens
ttttcagaattctag

SEQ ID NO: 1051136 - DNA, 15 bp, Homo sapiens
cttttcagaattcta

SEQ ID NO: 1051137 - DNA, 15 bp, Homo sapiens
ccttttcagaattct

SEQ ID NO: 1051138 - DNA, 15 bp, Homo sapiens
accttttcagaattc

SEQ ID NO: 1051139 - DNA, 15 bp, Homo sapiens
caccttttcagaatt

SEQ ID NO: 1051140 - DNA, 15 bp, Homo sapiens
gcaccttttcagaat

SEQ ID NO: 1051141 - DNA, 15 bp, Homo sapiens
tgcaccttttcagaa

SEQ ID NO: 1051142 - DNA, 15 bp, Homo sapiens
ttgcaccttttcaga

SEQ ID NO: 1051143 - DNA, 15 bp, Homo sapiens
tttgcaccttttcag

SEQ ID NO: 1051144 - DNA, 15 bp, Homo sapiens
ttttgcaccttttca

SEQ ID NO: 1051145 - DNA, 15 bp, Homo sapiens
attttgcaccttttc

SEQ ID NO: 1051146 - DNA, 15 bp, Homo sapiens
aattttgcacctttt

SEQ ID NO: 1051147 - DNA, 15 bp, Homo sapiens
taattttgcaccttt

SEQ ID NO: 1051148 - DNA, 15 bp, Homo sapiens
ataattttgcacctt

SEQ ID NO: 1051149 - DNA, 15 bp, Homo sapiens
aataattttgcacct

SEQ ID NO: 1051150 - DNA, 15 bp, Homo sapiens
aaataattttgcacc

SEQ ID NO: 1051151 - DNA, 15 bp, Homo sapiens
gaaataattttgcac

SEQ ID NO: 1051152 - DNA, 15 bp, Homo sapiens
ggaaataattttgca

SEQ ID NO: 1051153 - DNA, 15 bp, Homo sapiens
tggaaataattttgc

SEQ ID NO: 1051154 - DNA, 15 bp, Homo sapiens
atggaaataattttg

SEQ ID NO: 1051155 - DNA, 15 bp, Homo sapiens
aatggaaataatttt

SEQ ID NO: 1051156 - DNA, 15 bp, Homo sapiens
aaatggaaataattt

SEQ ID NO: 1051157 - DNA, 15 bp, Homo sapiens
caaatggaaataatt

SEQ ID NO: 1051158 - DNA, 15 bp, Homo sapiens
gcaaatggaaataat

SEQ ID NO: 1051159 - DNA, 15 bp, Homo sapiens
ggcaaatggaaataa

SEQ ID NO: 1051160 - DNA, 15 bp, Homo sapiens
tggcaaatggaaata

SEQ ID NO: 1051161 - DNA, 15 bp, Homo sapiens
ttggcaaatggaaat

SEQ ID NO: 1051162 - DNA, 15 bp, Homo sapiens
attggcaaatggaaa

SEQ ID NO: 1051163 - DNA, 15 bp, Homo sapiens
cattggcaaatggaa

SEQ ID NO: 1051164 - DNA, 15 bp, Homo sapiens
tcattggcaaatgga

SEQ ID NO: 1051165 - DNA, 15 bp, Homo sapiens
atcattggcaaatgg

SEQ ID NO: 1051166 - DNA, 15 bp, Homo sapiens
gatcattggcaaatg

SEQ ID NO: 1051167 - DNA, 15 bp, Homo sapiens
ggatcattggcaaat

SEQ ID NO: 1051168 - DNA, 15 bp, Homo sapiens
tggatcattggcaaa

SEQ ID NO: 1051169 - DNA, 15 bp, Homo sapiens
atggatcattggcaa

SEQ ID NO: 1051170 - DNA, 15 bp, Homo sapiens
catggatcattggca

SEQ ID NO: 1051171 - DNA, 15 bp, Homo sapiens
gcatggatcattggc

SEQ ID NO: 1051172 - DNA, 15 bp, Homo sapiens
ggcatggatcattgg

SEQ ID NO: 1051173 - DNA, 15 bp, Homo sapiens
aggcatggatcattg

SEQ ID NO: 1051174 - DNA, 15 bp, Homo sapiens
taggcatggatcatt

SEQ ID NO: 1051175 - DNA, 15 bp, Homo sapiens
ttaggcatggatcat

SEQ ID NO: 1051176 - DNA, 15 bp, Homo sapiens
attaggcatggatca

SEQ ID NO: 1051177 - DNA, 15 bp, Homo sapiens
aattaggcatggatc

SEQ ID NO: 1051178 - DNA, 15 bp, Homo sapiens
caattaggcatggat

SEQ ID NO: 1051179 - DNA, 15 bp, Homo sapiens
gcaattaggcatgga

SEQ ID NO: 1051180 - DNA, 15 bp, Homo sapiens
agcaattaggcatgg

SEQ ID NO: 1051181 - DNA, 15 bp, Homo sapiens
aagcaattaggcatg

SEQ ID NO: 1051182 - DNA, 15 bp, Homo sapiens
gaagcaattaggcat

SEQ ID NO: 1051183 - DNA, 15 bp, Homo sapiens
agaagcaattaggca

SEQ ID NO: 1051184 - DNA, 15 bp, Homo sapiens
cagaagcaattaggc

SEQ ID NO: 1051185 - DNA, 15 bp, Homo sapiens
ccagaagcaattagg

SEQ ID NO: 1051186 - DNA, 15 bp, Homo sapiens
tccagaagcaattag

SEQ ID NO: 1051187 - DNA, 15 bp, Homo sapiens
ctccagaagcaatta

SEQ ID NO: 1051188 - DNA, 15 bp, Homo sapiens
tctccagaagcaatt

SEQ ID NO: 1051189 - DNA, 15 bp, Homo sapiens
ctctccagaagcaat

SEQ ID NO: 1051190 - DNA, 15 bp, Homo sapiens
actctccagaagcaa

SEQ ID NO: 1051191 - DNA, 15 bp, Homo sapiens
tactctccagaagca

SEQ ID NO: 1051192 - DNA, 15 bp, Homo sapiens
ttactctccagaagc

SEQ ID NO: 1051193 - DNA, 15 bp, Homo sapiens
tttactctccagaag

SEQ ID NO: 1051194 - DNA, 15 bp, Homo sapiens
ttttactctccagaa

SEQ ID NO: 1051195 - DNA, 15 bp, Homo sapiens
cttttactctccaga

SEQ ID NO: 1051196 - DNA, 15 bp, Homo sapiens
tcttttactctccag

SEQ ID NO: 1051197 - DNA, 15 bp, Homo sapiens
ctcttttactctcca

SEQ ID NO: 1051198 - DNA, 15 bp, Homo sapiens
gctcttttactctcc

SEQ ID NO: 1051199 - DNA, 15 bp, Homo sapiens
tgctcttttactctc

SEQ ID NO: 1051200 - DNA, 15 bp, Homo sapiens
ttgctcttttactct

SEQ ID NO: 1051201 - DNA, 15 bp, Homo sapiens
cttgctcttttactc

SEQ ID NO: 1051202 - DNA, 15 bp, Homo sapiens
tcttgctcttttact

SEQ ID NO: 1051203 - DNA, 15 bp, Homo sapiens
ttcttgctcttttac

SEQ ID NO: 1051204 - DNA, 15 bp, Homo sapiens
tttcttgctctttta

SEQ ID NO: 1051205 - DNA, 15 bp, Homo sapiens
atttcttgctctttt

SEQ ID NO: 1051206 - DNA, 15 bp, Homo sapiens
catttcttgctcttt

SEQ ID NO: 1051207 - DNA, 15 bp, Homo sapiens
acatttcttgctctt

SEQ ID NO: 1051208 - DNA, 15 bp, Homo sapiens
tacatttcttgctct

SEQ ID NO: 1051209 - DNA, 15 bp, Homo sapiens
atacatttcttgctc

SEQ ID NO: 1051210 - DNA, 15 bp, Homo sapiens
gatacatttcttgct

SEQ ID NO: 1051211 - DNA, 15 bp, Homo sapiens
agatacatttcttgc

SEQ ID NO: 1051212 - DNA, 15 bp, Homo sapiens
cagatacatttcttg

SEQ ID NO: 1051213 - DNA, 15 bp, Homo sapiens
tcagatacatttctt

SEQ ID NO: 1051214 - DNA, 15 bp, Homo sapiens
ctcagatacatttct

SEQ ID NO: 1051215 - DNA, 15 bp, Homo sapiens
tctcagatacatttc

SEQ ID NO: 1051216 - DNA, 15 bp, Homo sapiens
ctctcagatacattt

SEQ ID NO: 1051217 - DNA, 15 bp, Homo sapiens
tctctcagatacatt

SEQ ID NO: 1051218 - DNA, 15 bp, Homo sapiens
ctctctcagatacat

SEQ ID NO: 1051219 - DNA, 15 bp, Homo sapiens
tctctctcagataca

SEQ ID NO: 1051220 - DNA, 15 bp, Homo sapiens
ctctctctcagatac

SEQ ID NO: 1051221 - DNA, 15 bp, Homo sapiens
tctctctctcagata

SEQ ID NO: 1051222 - DNA, 15 bp, Homo sapiens
cctctctctctctca

SEQ ID NO: 1051223 - DNA, 15 bp, Homo sapiens
tcctctctctctctc

SEQ ID NO: 1051224 - DNA, 15 bp, Homo sapiens
ttcctctctctctct

SEQ ID NO: 1051225 - DNA, 15 bp, Homo sapiens
cttcctctctctctc

SEQ ID NO: 1051226 - DNA, 15 bp, Homo sapiens
tcttcctctctctct

SEQ ID NO: 1051227 - DNA, 15 bp, Homo sapiens
gtcttcctctctctc

SEQ ID NO: 1051228 - DNA, 15 bp, Homo sapiens
tgtcttcctctctct

SEQ ID NO: 1051229 - DNA, 15 bp, Homo sapiens
atgtcttcctctctc

SEQ ID NO: 1051230 - DNA, 15 bp, Homo sapiens
tatgtcttcctctct

SEQ ID NO: 1051231 - DNA, 15 bp, Homo sapiens
gtatgtcttcctctc

SEQ ID NO: 1051232 - DNA, 15 bp, Homo sapiens
agtatgtcttcctct

SEQ ID NO: 1051233 - DNA, 15 bp, Homo sapiens
aagtatgtcttcctc

SEQ ID NO: 1051234 - DNA, 15 bp, Homo sapiens
caagtatgtcttcct

SEQ ID NO: 1051235 - DNA, 15 bp, Homo sapiens
acaagtatgtcttcc

SEQ ID NO: 1051236 - DNA, 15 bp, Homo sapiens
tacaagtatgtcttc

SEQ ID NO: 1051237 - DNA, 15 bp, Homo sapiens
gtacaagtatgtctt

SEQ ID NO: 1051238 - DNA, 15 bp, Homo sapiens
tgtacaagtatgtct

SEQ ID NO: 1051239 - DNA, 15 bp, Homo sapiens
ttgtacaagtatgtc

SEQ ID NO: 1051240 - DNA, 15 bp, Homo sapiens
attgtacaagtatgt

SEQ ID NO: 1051241 - DNA, 15 bp, Homo sapiens
cattgtacaagtatg

SEQ ID NO: 1051242 - DNA, 15 bp, Homo sapiens
tcattgtacaagtat

SEQ ID NO: 1051243 - DNA, 15 bp, Homo sapiens
gtcattgtacaagta

SEQ ID NO: 1051244 - DNA, 15 bp, Homo sapiens
tgtcattgtacaagt

SEQ ID NO: 1051245 - DNA, 15 bp, Homo sapiens
gtgtcattgtacaag

SEQ ID NO: 1051246 - DNA, 15 bp, Homo sapiens
agtgtcattgtacaa

SEQ ID NO: 1051247 - DNA, 15 bp, Homo sapiens
aagtgtcattgtaca

SEQ ID NO: 1051248 - DNA, 15 bp, Homo sapiens
aaagtgtcattgtac

SEQ ID NO: 1051249 - DNA, 15 bp, Homo sapiens
taaagtgtcattgta

SEQ ID NO: 1051250 - DNA, 15 bp, Homo sapiens
ctaaagtgtcattgt

SEQ ID NO: 1051251 - DNA, 15 bp, Homo sapiens
tctaaagtgtcattg

SEQ ID NO: 1051252 - DNA, 15 bp, Homo sapiens
ctctaaagtgtcatt

SEQ ID NO: 1051253 - DNA, 15 bp, Homo sapiens
cctctaaagtgtcat

SEQ ID NO: 1051254 - DNA, 15 bp, Homo sapiens
tcctctaaagtgtca

SEQ ID NO: 1051255 - DNA, 15 bp, Homo sapiens
ctcctctaaagtgtc

SEQ ID NO: 1051256 - DNA, 15 bp, Homo sapiens
gctcctctaaagtgt

SEQ ID NO: 1051257 - DNA, 15 bp, Homo sapiens
agctcctctaaagtg

SEQ ID NO: 1051258 - DNA, 15 bp, Homo sapiens
gagctcctctaaagt

SEQ ID NO: 1051259 - DNA, 15 bp, Homo sapiens
ggagctcctctaaag

SEQ ID NO: 1051260 - DNA, 15 bp, Homo sapiens
cggagctcctctaaa

SEQ ID NO: 1051261 - DNA, 15 bp, Homo sapiens
gcggagctcctctaa

SEQ ID NO: 1051262 - DNA, 15 bp, Homo sapiens
agcggagctcctcta

SEQ ID NO: 1051263 - DNA, 15 bp, Homo sapiens
aagcggagctcctct

SEQ ID NO: 1051264 - DNA, 15 bp, Homo sapiens
aaagcggagctcctc

SEQ ID NO: 1051265 - DNA, 15 bp, Homo sapiens
gaaagcggagctcct

SEQ ID NO: 1051266 - DNA, 15 bp, Homo sapiens
agaaagcggagctcc

SEQ ID NO: 1051267 - DNA, 15 bp, Homo sapiens
cagaaagcggagctc

SEQ ID NO: 1051268 - DNA, 15 bp, Homo sapiens
ccagaaagcggagct

SEQ ID NO: 1051269 - DNA, 15 bp, Homo sapiens
gccagaaagcggagc

SEQ ID NO: 1051270 - DNA, 15 bp, Homo sapiens
agccagaaagcggag

SEQ ID NO: 1051271 - DNA, 15 bp, Homo sapiens
aagccagaaagcgga

SEQ ID NO: 1051272 - DNA, 15 bp, Homo sapiens
gaagccagaaagcgg

SEQ ID NO: 1051273 - DNA, 15 bp, Homo sapiens
tgaagccagaaagcg

SEQ ID NO: 1051274 - DNA, 15 bp, Homo sapiens
ctgaagccagaaagc

SEQ ID NO: 1051275 - DNA, 15 bp, Homo sapiens
tctgaagccagaaag

SEQ ID NO: 1051276 - DNA, 15 bp, Homo sapiens
ctctgaagccagaaa

SEQ ID NO: 1051277 - DNA, 15 bp, Homo sapiens
gctctgaagccagaa

SEQ ID NO: 1051278 - DNA, 15 bp, Homo sapiens
tgctctgaagccaga

SEQ ID NO: 1051279 - DNA, 15 bp, Homo sapiens
ctgctctgaagccag

SEQ ID NO: 1051280 - DNA, 15 bp, Homo sapiens
actgctctgaagcca

SEQ ID NO: 1051281 - DNA, 15 bp, Homo sapiens
cactgctctgaagcc

SEQ ID NO: 1051282 - DNA, 15 bp, Homo sapiens
acactgctctgaagc

SEQ ID NO: 1051283 - DNA, 15 bp, Homo sapiens
tacactgctctgaag

SEQ ID NO: 1051284 - DNA, 15 bp, Homo sapiens
ttacactgctctgaa

SEQ ID NO: 1051285 - DNA, 15 bp, Homo sapiens
gttacactgctctga

SEQ ID NO: 1051286 - DNA, 15 bp, Homo sapiens
agttacactgctctg

SEQ ID NO: 1051287 - DNA, 15 bp, Homo sapiens
gagttacactgctct

SEQ ID NO: 1051288 - DNA, 15 bp, Homo sapiens
tgagttacactgctc

SEQ ID NO: 1051289 - DNA, 15 bp, Homo sapiens
gtgagttacactgct

SEQ ID NO: 1051290 - DNA, 15 bp, Homo sapiens
tgtgagttacactgc

SEQ ID NO: 1051291 - DNA, 15 bp, Homo sapiens
ctgtgagttacactg

SEQ ID NO: 1051292 - DNA, 15 bp, Homo sapiens
cctgtgagttacact

SEQ ID NO: 1051293 - DNA, 15 bp, Homo sapiens
acctgtgagttacac

SEQ ID NO: 1051294 - DNA, 15 bp, Homo sapiens
cacctgtgagttaca

SEQ ID NO: 1051295 - DNA, 15 bp, Homo sapiens
tcacctgtgagttac

SEQ ID NO: 1051296 - DNA, 15 bp, Homo sapiens
ctcacctgtgagtta

SEQ ID NO: 1051297 - DNA, 15 bp, Homo sapiens
cctcacctgtgagtt

SEQ ID NO: 1051298 - DNA, 15 bp, Homo sapiens
acctcacctgtgagt

SEQ ID NO: 1051299 - DNA, 15 bp, Homo sapiens
tacctcacctgtgag

SEQ ID NO: 1051300 - DNA, 15 bp, Homo sapiens
ttacctcacctgtga

SEQ ID NO: 1051301 - DNA, 15 bp, Homo sapiens
tttacctcacctgtg

SEQ ID NO: 1051302 - DNA, 15 bp, Homo sapiens
ctttacctcacctgt

SEQ ID NO: 1051303 - DNA, 15 bp, Homo sapiens
gctttacctcacctg

SEQ ID NO: 1051304 - DNA, 15 bp, Homo sapiens
tgctttacctcacct

SEQ ID NO: 1051305 - DNA, 15 bp, Homo sapiens
ctgctttacctcacc

SEQ ID NO: 1051306 - DNA, 15 bp, Homo sapiens
cctgctttacctcac

SEQ ID NO: 1051307 - DNA, 15 bp, Homo sapiens
tcctgctttacctca

SEQ ID NO: 1051308 - DNA, 15 bp, Homo sapiens
atcctgctttacctc

SEQ ID NO: 1051309 - DNA, 15 bp, Homo sapiens
catcctgctttacct

SEQ ID NO: 1051310 - DNA, 15 bp, Homo sapiens
ccatcctgctttacc

SEQ ID NO: 1051311 - DNA, 15 bp, Homo sapiens
accatcctgctttac

SEQ ID NO: 1051312 - DNA, 15 bp, Homo sapiens
caccatcctgcttta

SEQ ID NO: 1051313 - DNA, 15 bp, Homo sapiens
tcaccatcctgcttt

SEQ ID NO: 1051314 - DNA, 15 bp, Homo sapiens
ctcaccatcctgctt

SEQ ID NO: 1051315 - DNA, 15 bp, Homo sapiens
tctcaccatcctgct

SEQ ID NO: 1051316 - DNA, 15 bp, Homo sapiens
ttctcaccatcctgc

SEQ ID NO: 1051317 - DNA, 15 bp, Homo sapiens
cttctcaccatcctg

SEQ ID NO: 1051318 - DNA, 15 bp, Homo sapiens
tcttctcaccatcct

SEQ ID NO: 1051319 - DNA, 15 bp, Homo sapiens
ctcttctcaccatcc

SEQ ID NO: 1051320 - DNA, 15 bp, Homo sapiens
cctcttctcaccatc

SEQ ID NO: 1051321 - DNA, 15 bp, Homo sapiens
tcctcttctcaccat

SEQ ID NO: 1051322 - DNA, 15 bp, Homo sapiens
ttcctcttctcacca

SEQ ID NO: 1051323 - DNA, 15 bp, Homo sapiens
tttcctcttctcacc

SEQ ID NO: 1051324 - DNA, 15 bp, Homo sapiens
ctttcctcttctcac

SEQ ID NO: 1051325 - DNA, 15 bp, Homo sapiens
cctttcctcttctca

SEQ ID NO: 1051326 - DNA, 15 bp, Homo sapiens
ccctttcctcttctc

SEQ ID NO: 1051327 - DNA, 15 bp, Homo sapiens
cccctttcctcttct

SEQ ID NO: 1051328 - DNA, 15 bp, Homo sapiens
gcccctttcctcttc

SEQ ID NO: 1051329 - DNA, 15 bp, Homo sapiens
agcccctttcctctt

SEQ ID NO: 1051330 - DNA, 15 bp, Homo sapiens
aagcccctttcctct

SEQ ID NO: 1051331 - DNA, 15 bp, Homo sapiens
aaagcccctttcctc

SEQ ID NO: 1051332 - DNA, 15 bp, Homo sapiens
caaagcccctttcct

SEQ ID NO: 1051333 - DNA, 15 bp, Homo sapiens
ccaaagcccctttcc

SEQ ID NO: 1051334 - DNA, 15 bp, Homo sapiens
cccaaagcccctttc

SEQ ID NO: 1051335 - DNA, 15 bp, Homo sapiens
ccccaaagccccttt

SEQ ID NO: 1051336 - DNA, 15 bp, Homo sapiens
cccccaaagcccctt

SEQ ID NO: 1051337 - DNA, 15 bp, Homo sapiens
tcccccaaagcccct

SEQ ID NO: 1051338 - DNA, 15 bp, Homo sapiens
ttcccccaaagcccc

SEQ ID NO: 1051339 - DNA, 15 bp, Homo sapiens
gttcccccaaagccc

SEQ ID NO: 1051340 - DNA, 15 bp, Homo sapiens
ggttcccccaaagcc

SEQ ID NO: 1051341 - DNA, 15 bp, Homo sapiens
gggttcccccaaagc

SEQ ID NO: 1051342 - DNA, 15 bp, Homo sapiens
tgggttcccccaaag

SEQ ID NO: 1051343 - DNA, 15 bp, Homo sapiens
gtgggttcccccaaa

SEQ ID NO: 1051344 - DNA, 15 bp, Homo sapiens
ggtgggttcccccaa

SEQ ID NO: 1051345 - DNA, 15 bp, Homo sapiens
aggtgggttccccca

SEQ ID NO: 1051346 - DNA, 15 bp, Homo sapiens
gaggtgggttccccc

SEQ ID NO: 1051347 - DNA, 15 bp, Homo sapiens
agaggtgggttcccc

SEQ ID NO: 1051348 - DNA, 15 bp, Homo sapiens
aagaggtgggttccc

SEQ ID NO: 1051349 - DNA, 15 bp, Homo sapiens
gaagaggtgggttcc

SEQ ID NO: 1051350 - DNA, 15 bp, Homo sapiens
tgaagaggtgggttc

SEQ ID NO: 1051351 - DNA, 15 bp, Homo sapiens
ctgaagaggtgggtt

SEQ ID NO: 1051352 - DNA, 15 bp, Homo sapiens
gctgaagaggtgggt

SEQ ID NO: 1051353 - DNA, 15 bp, Homo sapiens
agctgaagaggtggg

SEQ ID NO: 1051354 - DNA, 15 bp, Homo sapiens
aagctgaagaggtgg

SEQ ID NO: 1051355 - DNA, 15 bp, Homo sapiens
taagctgaagaggtg

SEQ ID NO: 1051356 - DNA, 15 bp, Homo sapiens
ctaagctgaagaggt

SEQ ID NO: 1051357 - DNA, 15 bp, Homo sapiens
actaagctgaagagg

SEQ ID NO: 1051358 - DNA, 15 bp, Homo sapiens
cactaagctgaagag

SEQ ID NO: 1051359 - DNA, 15 bp, Homo sapiens
tcactaagctgaaga

SEQ ID NO: 1051360 - DNA, 15 bp, Homo sapiens
ttcactaagctgaag

SEQ ID NO: 1051361 - DNA, 15 bp, Homo sapiens
cttcactaagctgaa

SEQ ID NO: 1051362 - DNA, 15 bp, Homo sapiens
acttcactaagctga

SEQ ID NO: 1051363 - DNA, 15 bp, Homo sapiens
gacttcactaagctg

SEQ ID NO: 1051364 - DNA, 15 bp, Homo sapiens
ggacttcactaagct

SEQ ID NO: 1051365 - DNA, 15 bp, Homo sapiens
aggacttcactaagc

SEQ ID NO: 1051366 - DNA, 15 bp, Homo sapiens
taggacttcactaag

SEQ ID NO: 1051367 - DNA, 15 bp, Homo sapiens
ataggacttcactaa

SEQ ID NO: 1051368 - DNA, 15 bp, Homo sapiens
tataggacttcacta

SEQ ID NO: 1051369 - DNA, 15 bp, Homo sapiens
ttataggacttcact

SEQ ID NO: 1051370 - DNA, 15 bp, Homo sapiens
attataggacttcac

SEQ ID NO: 1051371 - DNA, 15 bp, Homo sapiens
cattataggacttca

SEQ ID NO: 1051372 - DNA, 15 bp, Homo sapiens
ccattataggacttc

SEQ ID NO: 1051373 - DNA, 15 bp, Homo sapiens
accattataggactt

SEQ ID NO: 1051374 - DNA, 15 bp, Homo sapiens
aaccattataggact

SEQ ID NO: 1051375 - DNA, 15 bp, Homo sapiens
aaaccattataggac

SEQ ID NO: 1051376 - DNA, 15 bp, Homo sapiens
gaaaccattatagga

SEQ ID NO: 1051377 - DNA, 15 bp, Homo sapiens
agaaaccattatagg

SEQ ID NO: 1051378 - DNA, 15 bp, Homo sapiens
tagaaaccattatag

SEQ ID NO: 1051379 - DNA, 15 bp, Homo sapiens
atagaaaccattata

SEQ ID NO: 1051380 - DNA, 15 bp, Homo sapiens
aatagaaaccattat

SEQ ID NO: 1051381 - DNA, 15 bp, Homo sapiens
caatagaaaccatta

SEQ ID NO: 1051382 - DNA, 15 bp, Homo sapiens
ccaatagaaaccatt

SEQ ID NO: 1051383 - DNA, 15 bp, Homo sapiens
tccaatagaaaccat

SEQ ID NO: 1051384 - DNA, 15 bp, Homo sapiens
ttccaatagaaacca

SEQ ID NO: 1051385 - DNA, 15 bp, Homo sapiens
gttccaatagaaacc

SEQ ID NO: 1051386 - DNA, 15 bp, Homo sapiens
ggttccaatagaaac

SEQ ID NO: 1051387 - DNA, 15 bp, Homo sapiens
gggttccaatagaaa

SEQ ID NO: 1051388 - DNA, 15 bp, Homo sapiens
ggggttccaatagaa

SEQ ID NO: 1051389 - DNA, 15 bp, Homo sapiens
tggggttccaataga

SEQ ID NO: 1051390 - DNA, 15 bp, Homo sapiens
ctggggttccaatag

SEQ ID NO: 1051391 - DNA, 15 bp, Homo sapiens
gctggggttccaata

SEQ ID NO: 1051392 - DNA, 15 bp, Homo sapiens
ggctggggttccaat

SEQ ID NO: 1051393 - DNA, 15 bp, Homo sapiens
gggctggggttccaa

SEQ ID NO: 1051394 - DNA, 15 bp, Homo sapiens
tgggctggggttcca

SEQ ID NO: 1051395 - DNA, 15 bp, Homo sapiens
ctgggctggggttcc

SEQ ID NO: 1051396 - DNA, 15 bp, Homo sapiens
tctgggctggggttc

SEQ ID NO: 1051397 - DNA, 15 bp, Homo sapiens
atctgggctggggtt

SEQ ID NO: 1051398 - DNA, 15 bp, Homo sapiens
tatctgggctggggt

SEQ ID NO: 1051399 - DNA, 15 bp, Homo sapiens
gtatctgggctgggg

SEQ ID NO: 1051400 - DNA, 15 bp, Homo sapiens
agtatctgggctggg

SEQ ID NO: 1051401 - DNA, 15 bp, Homo sapiens
aagtatctgggctgg

SEQ ID NO: 1051402 - DNA, 15 bp, Homo sapiens
taagtatctgggctg

SEQ ID NO: 1051403 - DNA, 15 bp, Homo sapiens
gtaagtatctgggct

SEQ ID NO: 1051404 - DNA, 15 bp, Homo sapiens
ggtaagtatctgggc

SEQ ID NO: 1051405 - DNA, 15 bp, Homo sapiens
tggtaagtatctggg

SEQ ID NO: 1051406 - DNA, 15 bp, Homo sapiens
ctggtaagtatctgg

SEQ ID NO: 1051407 - DNA, 15 bp, Homo sapiens
gctggtaagtatctg

SEQ ID NO: 1051408 - DNA, 15 bp, Homo sapiens
cgctggtaagtatct

SEQ ID NO: 1051409 - DNA, 15 bp, Homo sapiens
tcgctggtaagtatc

SEQ ID NO: 1051410 - DNA, 15 bp, Homo sapiens
atcgctggtaagtat

SEQ ID NO: 1051411 - DNA, 15 bp, Homo sapiens
catcgctggtaagta

SEQ ID NO: 1051412 - DNA, 15 bp, Homo sapiens
ccatcgctggtaagt

SEQ ID NO: 1051413 - DNA, 15 bp, Homo sapiens
cccatcgctggtaag

SEQ ID NO: 1051414 - DNA, 15 bp, Homo sapiens
ccccatcgctggtaa

SEQ ID NO: 1051415 - DNA, 15 bp, Homo sapiens
gccccatcgctggta

SEQ ID NO: 1051416 - DNA, 15 bp, Homo sapiens
agccccatcgctggt

SEQ ID NO: 1051417 - DNA, 15 bp, Homo sapiens
aagccccatcgctgg

SEQ ID NO: 1051418 - DNA, 15 bp, Homo sapiens
aaagccccatcgctg

SEQ ID NO: 1051419 - DNA, 15 bp, Homo sapiens
caaagccccatcgct

SEQ ID NO: 1051420 - DNA, 15 bp, Homo sapiens
ccaaagccccatcgc

SEQ ID NO: 1051421 - DNA, 15 bp, Homo sapiens
cccaaagccccatcg

SEQ ID NO: 1051422 - DNA, 15 bp, Homo sapiens
gcccaaagccccatc

SEQ ID NO: 1051423 - DNA, 15 bp, Homo sapiens
tgcccaaagccccat

SEQ ID NO: 1051424 - DNA, 15 bp, Homo sapiens
ttgcccaaagcccca

SEQ ID NO: 1051425 - DNA, 15 bp, Homo sapiens
tttgcccaaagcccc

SEQ ID NO: 1051426 - DNA, 15 bp, Homo sapiens
ctttgcccaaagccc

SEQ ID NO: 1051427 - DNA, 15 bp, Homo sapiens
cctttgcccaaagcc

SEQ ID NO: 1051428 - DNA, 15 bp, Homo sapiens
tcctttgcccaaagc

SEQ ID NO: 1051429 - DNA, 15 bp, Homo sapiens
gtcctttgcccaaag

SEQ ID NO: 1051430 - DNA, 15 bp, Homo sapiens
agtcctttgcccaaa

SEQ ID NO: 1051431 - DNA, 15 bp, Homo sapiens
aagtcctttgcccaa

SEQ ID NO: 1051432 - DNA, 15 bp, Homo sapiens
taagtcctttgccca

SEQ ID NO: 1051433 - DNA, 15 bp, Homo sapiens
ttaagtcctttgccc

SEQ ID NO: 1051434 - DNA, 15 bp, Homo sapiens
gttaagtcctttgcc

SEQ ID NO: 1051435 - DNA, 15 bp, Homo sapiens
ggttaagtcctttgc

SEQ ID NO: 1051436 - DNA, 15 bp, Homo sapiens
aggttaagtcctttg

SEQ ID NO: 1051437 - DNA, 15 bp, Homo sapiens
aaggttaagtccttt

SEQ ID NO: 1051438 - DNA, 15 bp, Homo sapiens
aaaggttaagtcctt

SEQ ID NO: 1051439 - DNA, 15 bp, Homo sapiens
aaaaggttaagtcct

SEQ ID NO: 1051440 - DNA, 15 bp, Homo sapiens
taaaaggttaagtcc

SEQ ID NO: 1051441 - DNA, 15 bp, Homo sapiens
ttaaaaggttaagtc

SEQ ID NO: 1051442 - DNA, 15 bp, Homo sapiens
cttaaaaggttaagt

SEQ ID NO: 1051443 - DNA, 15 bp, Homo sapiens
tcttaaaaggttaag

SEQ ID NO: 1051444 - DNA, 15 bp, Homo sapiens
gtcttaaaaggttaa

SEQ ID NO: 1051445 - DNA, 15 bp, Homo sapiens
agtcttaaaaggtta

SEQ ID NO: 1051446 - DNA, 15 bp, Homo sapiens
gagtcttaaaaggtt

SEQ ID NO: 1051447 - DNA, 15 bp, Homo sapiens
ggagtcttaaaaggt

SEQ ID NO: 1051448 - DNA, 15 bp, Homo sapiens
tggagtcttaaaagg

SEQ ID NO: 1051449 - DNA, 15 bp, Homo sapiens
atggagtcttaaaag

SEQ ID NO: 1051450 - DNA, 15 bp, Homo sapiens
aatggagtcttaaaa

SEQ ID NO: 1051451 - DNA, 15 bp, Homo sapiens
aaatggagtcttaaa

SEQ ID NO: 1051452 - DNA, 15 bp, Homo sapiens
aaaatggagtcttaa

SEQ ID NO: 1051453 - DNA, 15 bp, Homo sapiens
caaaatggagtctta

SEQ ID NO: 1051454 - DNA, 15 bp, Homo sapiens
gcaaaatggagtctt

SEQ ID NO: 1051455 - DNA, 15 bp, Homo sapiens
tgcaaaatggagtct

SEQ ID NO: 1051456 - DNA, 15 bp, Homo sapiens
atgcaaaatggagtc

SEQ ID NO: 1051457 - DNA, 15 bp, Homo sapiens
gatgcaaaatggagt

SEQ ID NO: 1051458 - DNA, 15 bp, Homo sapiens
agatgcaaaatggag

SEQ ID NO: 1051459 - DNA, 15 bp, Homo sapiens
cagatgcaaaatgga

SEQ ID NO: 1051460 - DNA, 15 bp, Homo sapiens
acagatgcaaaatgg

SEQ ID NO: 1051461 - DNA, 15 bp, Homo sapiens
tacagatgcaaaatg

SEQ ID NO: 1051462 - DNA, 15 bp, Homo sapiens
ttacagatgcaaaat

SEQ ID NO: 1051463 - DNA, 15 bp, Homo sapiens
tttacagatgcaaaa

SEQ ID NO: 1051464 - DNA, 15 bp, Homo sapiens
ttttacagatgcaaa

SEQ ID NO: 1051465 - DNA, 15 bp, Homo sapiens
attttacagatgcaa

SEQ ID NO: 1051466 - DNA, 15 bp, Homo sapiens
tccccattttacaga

SEQ ID NO: 1051467 - DNA, 15 bp, Homo sapiens
atccccattttacag

SEQ ID NO: 1051468 - DNA, 15 bp, Homo sapiens
tatccccattttaca

SEQ ID NO: 1051469 - DNA, 15 bp, Homo sapiens
atatccccattttac

SEQ ID NO: 1051470 - DNA, 15 bp, Homo sapiens
aatatccccatttta

SEQ ID NO: 1051471 - DNA, 15 bp, Homo sapiens
taatatccccatttt

SEQ ID NO: 1051472 - DNA, 15 bp, Homo sapiens
ttaatatccccattt

SEQ ID NO: 1051473 - DNA, 15 bp, Homo sapiens
tttaatatccccatt

SEQ ID NO: 1051474 - DNA, 15 bp, Homo sapiens
ttttaatatccccat

SEQ ID NO: 1051475 - DNA, 15 bp, Homo sapiens
cttttaatatcccca

SEQ ID NO: 1051476 - DNA, 15 bp, Homo sapiens
tcttttaatatcccc

SEQ ID NO: 1051477 - DNA, 15 bp, Homo sapiens
atcttttaatatccc

SEQ ID NO: 1051478 - DNA, 15 bp, Homo sapiens
aatcttttaatatcc

SEQ ID NO: 1051479 - DNA, 15 bp, Homo sapiens
aaatcttttaatatc

SEQ ID NO: 1051480 - DNA, 15 bp, Homo sapiens
gaaatcttttaatat

SEQ ID NO: 1051481 - DNA, 15 bp, Homo sapiens
ggaaatcttttaata

SEQ ID NO: 1051482 - DNA, 15 bp, Homo sapiens
aggaaatcttttaat

SEQ ID NO: 1051483 - DNA, 15 bp, Homo sapiens
aaggaaatcttttaa

SEQ ID NO: 1051484 - DNA, 15 bp, Homo sapiens
caaggaaatctttta

SEQ ID NO: 1051485 - DNA, 15 bp, Homo sapiens
ccaaggaaatctttt

SEQ ID NO: 1051486 - DNA, 15 bp, Homo sapiens
accaaggaaatcttt

SEQ ID NO: 1051487 - DNA, 15 bp, Homo sapiens
taccaaggaaatctt

SEQ ID NO: 1051488 - DNA, 15 bp, Homo sapiens
ttaccaaggaaatct

SEQ ID NO: 1051489 - DNA, 15 bp, Homo sapiens
cttaccaaggaaatc

SEQ ID NO: 1051490 - DNA, 15 bp, Homo sapiens
acttaccaaggaaat

SEQ ID NO: 1051491 - DNA, 15 bp, Homo sapiens
tacttaccaaggaaa

SEQ ID NO: 1051492 - DNA, 15 bp, Homo sapiens
ttacttaccaaggaa

SEQ ID NO: 1051493 - DNA, 15 bp, Homo sapiens
tttacttaccaagga

SEQ ID NO: 1051494 - DNA, 15 bp, Homo sapiens
ttttacttaccaagg

SEQ ID NO: 1051495 - DNA, 15 bp, Homo sapiens
tttttacttaccaag

SEQ ID NO: 1051496 - DNA, 15 bp, Homo sapiens
atttttacttaccaa

SEQ ID NO: 1051497 - DNA, 15 bp, Homo sapiens
tatttttacttacca

SEQ ID NO: 1051498 - DNA, 15 bp, Homo sapiens
ctatttttacttacc

SEQ ID NO: 1051499 - DNA, 15 bp, Homo sapiens
cctatttttacttac

SEQ ID NO: 1051500 - DNA, 15 bp, Homo sapiens
ccctatttttactta

SEQ ID NO: 1051501 - DNA, 15 bp, Homo sapiens
gccctatttttactt

SEQ ID NO: 1051502 - DNA, 15 bp, Homo sapiens
agccctatttttact

SEQ ID NO: 1051503 - DNA, 15 bp, Homo sapiens
gagccctatttttac

SEQ ID NO: 1051504 - DNA, 15 bp, Homo sapiens
cgagccctattttta

SEQ ID NO: 1051505 - DNA, 15 bp, Homo sapiens
gcgagccctattttt

SEQ ID NO: 1051506 - DNA, 15 bp, Homo sapiens
cgcgagccctatttt

SEQ ID NO: 1051507 - DNA, 15 bp, Homo sapiens
ccgcgagccctattt

SEQ ID NO: 1051508 - DNA, 15 bp, Homo sapiens
tccgcgagccctatt

SEQ ID NO: 1051509 - DNA, 15 bp, Homo sapiens
ctccgcgagccctat

SEQ ID NO: 1051510 - DNA, 15 bp, Homo sapiens
gctccgcgagcccta

SEQ ID NO: 1051511 - DNA, 15 bp, Homo sapiens
tgctccgcgagccct

SEQ ID NO: 1051512 - DNA, 15 bp, Homo sapiens
ctgctccgcgagccc

SEQ ID NO: 1051513 - DNA, 15 bp, Homo sapiens
cctgctccgcgagcc

SEQ ID NO: 1051514 - DNA, 15 bp, Homo sapiens
acctgctccgcgagc

SEQ ID NO: 1051515 - DNA, 15 bp, Homo sapiens
cacctgctccgcgag

SEQ ID NO: 1051516 - DNA, 15 bp, Homo sapiens
ccacctgctccgcga

SEQ ID NO: 1051517 - DNA, 15 bp, Homo sapiens
gccacctgctccgcg

SEQ ID NO: 1051518 - DNA, 15 bp, Homo sapiens
tgccacctgctccgc

SEQ ID NO: 1051519 - DNA, 15 bp, Homo sapiens
gtgccacctgctccg

SEQ ID NO: 1051520 - DNA, 15 bp, Homo sapiens
tgtgccacctgctcc

SEQ ID NO: 1051521 - DNA, 15 bp, Homo sapiens
atgtgccacctgctc

SEQ ID NO: 1051522 - DNA, 15 bp, Homo sapiens
tatgtgccacctgct

SEQ ID NO: 1051523 - DNA, 15 bp, Homo sapiens
ctatgtgccacctgc

SEQ ID NO: 1051524 - DNA, 15 bp, Homo sapiens
gctatgtgccacctg

SEQ ID NO: 1051525 - DNA, 15 bp, Homo sapiens
tgctatgtgccacct

SEQ ID NO: 1051526 - DNA, 15 bp, Homo sapiens
gtgctatgtgccacc

SEQ ID NO: 1051527 - DNA, 15 bp, Homo sapiens
ggtgctatgtgccac

SEQ ID NO: 1051528 - DNA, 15 bp, Homo sapiens
gggtgctatgtgcca

SEQ ID NO: 1051529 - DNA, 15 bp, Homo sapiens
tgggtgctatgtgcc

SEQ ID NO: 1051530 - DNA, 15 bp, Homo sapiens
gtgggtgctatgtgc

SEQ ID NO: 1051531 - DNA, 15 bp, Homo sapiens
ggtgggtgctatgtg

SEQ ID NO: 1051532 - DNA, 15 bp, Homo sapiens
tggtgggtgctatgt

SEQ ID NO: 1051533 - DNA, 15 bp, Homo sapiens
atggtgggtgctatg

SEQ ID NO: 1051534 - DNA, 15 bp, Homo sapiens
gatggtgggtgctat

SEQ ID NO: 1051535 - DNA, 15 bp, Homo sapiens
agatggtgggtgcta

SEQ ID NO: 1051536 - DNA, 15 bp, Homo sapiens
cagatggtgggtgct

SEQ ID NO: 1051537 - DNA, 15 bp, Homo sapiens
tcagatggtgggtgc

SEQ ID NO: 1051538 - DNA, 15 bp, Homo sapiens
ctcagatggtgggtg

SEQ ID NO: 1051539 - DNA, 15 bp, Homo sapiens
gctcagatggtgggt

SEQ ID NO: 1051540 - DNA, 15 bp, Homo sapiens
ggctcagatggtggg

SEQ ID NO: 1051541 - DNA, 15 bp, Homo sapiens
cggctcagatggtgg

SEQ ID NO: 1051542 - DNA, 15 bp, Homo sapiens
acggctcagatggtg

SEQ ID NO: 1051543 - DNA, 15 bp, Homo sapiens
gacggctcagatggt

SEQ ID NO: 1051544 - DNA, 15 bp, Homo sapiens
tgacggctcagatgg

SEQ ID NO: 1051545 - DNA, 15 bp, Homo sapiens
gtgacggctcagatg

SEQ ID NO: 1051546 - DNA, 15 bp, Homo sapiens
agtgacggctcagat

SEQ ID NO: 1051547 - DNA, 15 bp, Homo sapiens
cagtgacggctcaga

SEQ ID NO: 1051548 - DNA, 15 bp, Homo sapiens
gcagtgacggctcag

SEQ ID NO: 1051549 - DNA, 15 bp, Homo sapiens
agcagtgacggctca

SEQ ID NO: 1051550 - DNA, 15 bp, Homo sapiens
gagcagtgacggctc

SEQ ID NO: 1051551 - DNA, 15 bp, Homo sapiens
tgagcagtgacggct

SEQ ID NO: 1051552 - DNA, 15 bp, Homo sapiens
gtgagcagtgacggc

SEQ ID NO: 1051553 - DNA, 15 bp, Homo sapiens
tgtgagcagtgacgg

SEQ ID NO: 1051554 - DNA, 15 bp, Homo sapiens
ctgtgagcagtgacg

SEQ ID NO: 1051555 - DNA, 15 bp, Homo sapiens
cctgtgagcagtgac

SEQ ID NO: 1051556 - DNA, 15 bp, Homo sapiens
ccctgtgagcagtga

SEQ ID NO: 1051557 - DNA, 15 bp, Homo sapiens
gccctgtgagcagtg

SEQ ID NO: 1051558 - DNA, 15 bp, Homo sapiens
tgccctgtgagcagt

SEQ ID NO: 1051559 - DNA, 15 bp, Homo sapiens
atgccctgtgagcag

SEQ ID NO: 1051560 - DNA, 15 bp, Homo sapiens
aatgccctgtgagca

SEQ ID NO: 1051561 - DNA, 15 bp, Homo sapiens
taatgccctgtgagc

SEQ ID NO: 1051562 - DNA, 15 bp, Homo sapiens
ctaatgccctgtgag

SEQ ID NO: 1051563 - DNA, 15 bp, Homo sapiens
cctaatgccctgtga

SEQ ID NO: 1051564 - DNA, 15 bp, Homo sapiens
acctaatgccctgtg

SEQ ID NO: 1051565 - DNA, 15 bp, Homo sapiens
aacctaatgccctgt

SEQ ID NO: 1051566 - DNA, 15 bp, Homo sapiens
caacctaatgccctg

SEQ ID NO: 1051567 - DNA, 15 bp, Homo sapiens
acaacctaatgccct

SEQ ID NO: 1051568 - DNA, 15 bp, Homo sapiens
aacaacctaatgccc

SEQ ID NO: 1051569 - DNA, 15 bp, Homo sapiens
caacaacctaatgcc

SEQ ID NO: 1051570 - DNA, 15 bp, Homo sapiens
ccaacaacctaatgc

SEQ ID NO: 1051571 - DNA, 15 bp, Homo sapiens
tccaacaacctaatg

SEQ ID NO: 1051572 - DNA, 15 bp, Homo sapiens
ttccaacaacctaat

SEQ ID NO: 1051573 - DNA, 15 bp, Homo sapiens
attccaacaacctaa

SEQ ID NO: 1051574 - DNA, 15 bp, Homo sapiens
cattccaacaaccta

SEQ ID NO: 1051575 - DNA, 15 bp, Homo sapiens
tcattccaacaacct

SEQ ID NO: 1051576 - DNA, 15 bp, Homo sapiens
gtcattccaacaacc

SEQ ID NO: 1051577 - DNA, 15 bp, Homo sapiens
tgtcattccaacaac

SEQ ID NO: 1051578 - DNA, 15 bp, Homo sapiens
atgtcattccaacaa

SEQ ID NO: 1051579 - DNA, 15 bp, Homo sapiens
aatgtcattccaaca

SEQ ID NO: 1051580 - DNA, 15 bp, Homo sapiens
gaatgtcattccaac

SEQ ID NO: 1051581 - DNA, 15 bp, Homo sapiens
tgaatgtcattccaa

SEQ ID NO: 1051582 - DNA, 15 bp, Homo sapiens
ctgaatgtcattcca

SEQ ID NO: 1051583 - DNA, 15 bp, Homo sapiens
gctgaatgtcattcc

SEQ ID NO: 1051584 - DNA, 15 bp, Homo sapiens
tgctgaatgtcattc

SEQ ID NO: 1051585 - DNA, 15 bp, Homo sapiens
ctgctgaatgtcatt

SEQ ID NO: 1051586 - DNA, 15 bp, Homo sapiens
gctgctgaatgtcat

SEQ ID NO: 1051587 - DNA, 15 bp, Homo sapiens
tgctgctgaatgtca

SEQ ID NO: 1051588 - DNA, 15 bp, Homo sapiens
ctgctgctgaatgtc

SEQ ID NO: 1051589 - DNA, 15 bp, Homo sapiens
cctgctgctgaatgt

SEQ ID NO: 1051590 - DNA, 15 bp, Homo sapiens
gcctgctgctgaatg

SEQ ID NO: 1051591 - DNA, 15 bp, Homo sapiens
agcctgctgctgaat

SEQ ID NO: 1051592 - DNA, 15 bp, Homo sapiens
cagcctgctgctgaa

SEQ ID NO: 1051593 - DNA, 15 bp, Homo sapiens
acagcctgctgctga

SEQ ID NO: 1051594 - DNA, 15 bp, Homo sapiens
cacagcctgctgctg

SEQ ID NO: 1051595 - DNA, 15 bp, Homo sapiens
tcacagcctgctgct

SEQ ID NO: 1051596 - DNA, 15 bp, Homo sapiens
gtcacagcctgctgc

SEQ ID NO: 1051597 - DNA, 15 bp, Homo sapiens
ggtcacagcctgctg

SEQ ID NO: 1051598 - DNA, 15 bp, Homo sapiens
aggtcacagcctgct

SEQ ID NO: 1051599 - DNA, 15 bp, Homo sapiens
caggtcacagcctgc

SEQ ID NO: 1051600 - DNA, 15 bp, Homo sapiens
acaggtcacagcctg

SEQ ID NO: 1051601 - DNA, 15 bp, Homo sapiens
cacaggtcacagcct

SEQ ID NO: 1051602 - DNA, 15 bp, Homo sapiens
tcacaggtcacagcc

SEQ ID NO: 1051603 - DNA, 15 bp, Homo sapiens
ttcacaggtcacagc

SEQ ID NO: 1051604 - DNA, 15 bp, Homo sapiens
gttcacaggtcacag

SEQ ID NO: 1051605 - DNA, 15 bp, Homo sapiens
ggttcacaggtcaca

SEQ ID NO: 1051606 - DNA, 15 bp, Homo sapiens
gggttcacaggtcac

SEQ ID NO: 1051607 - DNA, 15 bp, Homo sapiens
tgggttcacaggtca

SEQ ID NO: 1051608 - DNA, 15 bp, Homo sapiens
ttgggttcacaggtc

SEQ ID NO: 1051609 - DNA, 15 bp, Homo sapiens
tttgggttcacaggt

SEQ ID NO: 1051610 - DNA, 15 bp, Homo sapiens
gtttgggttcacagg

SEQ ID NO: 1051611 - DNA, 15 bp, Homo sapiens
agtttgggttcacag

SEQ ID NO: 1051612 - DNA, 15 bp, Homo sapiens
gagtttgggttcaca

SEQ ID NO: 1051613 - DNA, 15 bp, Homo sapiens
agagtttgggttcac

SEQ ID NO: 1051614 - DNA, 15 bp, Homo sapiens
gagagtttgggttca

SEQ ID NO: 1051615 - DNA, 15 bp, Homo sapiens
ggagagtttgggttc

SEQ ID NO: 1051616 - DNA, 15 bp, Homo sapiens
aggagagtttgggtt

SEQ ID NO: 1051617 - DNA, 15 bp, Homo sapiens
taggagagtttgggt

SEQ ID NO: 1051618 - DNA, 15 bp, Homo sapiens
ttaggagagtttggg

SEQ ID NO: 1051619 - DNA, 15 bp, Homo sapiens
gttaggagagtttgg

SEQ ID NO: 1051620 - DNA, 15 bp, Homo sapiens
agttaggagagtttg

SEQ ID NO: 1051621 - DNA, 15 bp, Homo sapiens
gagttaggagagttt

SEQ ID NO: 1051622 - DNA, 15 bp, Homo sapiens
ggagttaggagagtt

SEQ ID NO: 1051623 - DNA, 15 bp, Homo sapiens
aggagttaggagagt

SEQ ID NO: 1051624 - DNA, 15 bp, Homo sapiens
gaggagttaggagag

SEQ ID NO: 1051625 - DNA, 15 bp, Homo sapiens
ggaggagttaggaga

SEQ ID NO: 1051626 - DNA, 15 bp, Homo sapiens
gggaggagttaggag

SEQ ID NO: 1051627 - DNA, 15 bp, Homo sapiens
ggggaggagttagga

SEQ ID NO: 1051628 - DNA, 15 bp, Homo sapiens
aggggaggagttagg

SEQ ID NO: 1051629 - DNA, 15 bp, Homo sapiens
aaggggaggagttag

SEQ ID NO: 1051630 - DNA, 15 bp, Homo sapiens
aaaggggaggagtta

SEQ ID NO: 1051631 - DNA, 15 bp, Homo sapiens
caaaggggaggagtt

SEQ ID NO: 1051632 - DNA, 15 bp, Homo sapiens
gcaaaggggaggagt

SEQ ID NO: 1051633 - DNA, 15 bp, Homo sapiens
ggcaaaggggaggag

SEQ ID NO: 1051634 - DNA, 15 bp, Homo sapiens
tggcaaaggggagga

SEQ ID NO: 1051635 - DNA, 15 bp, Homo sapiens
ctggcaaaggggagg

SEQ ID NO: 1051636 - DNA, 15 bp, Homo sapiens
gctggcaaaggggag

SEQ ID NO: 1051637 - DNA, 15 bp, Homo sapiens
agctggcaaagggga

SEQ ID NO: 1051638 - DNA, 15 bp, Homo sapiens
ggagctggcaaaggg

SEQ ID NO: 1051639 - DNA, 15 bp, Homo sapiens
aggagctggcaaagg

SEQ ID NO: 1051640 - DNA, 15 bp, Homo sapiens
gaggagctggcaaag

SEQ ID NO: 1051641 - DNA, 15 bp, Homo sapiens
ggaggagctggcaaa

SEQ ID NO: 1051642 - DNA, 15 bp, Homo sapiens
tggaggagctggcaa

SEQ ID NO: 1051643 - DNA, 15 bp, Homo sapiens
gtggaggagctggca

SEQ ID NO: 1051644 - DNA, 15 bp, Homo sapiens
ggtggaggagctggc

SEQ ID NO: 1051645 - DNA, 15 bp, Homo sapiens
aggtggaggagctgg

SEQ ID NO: 1051646 - DNA, 15 bp, Homo sapiens
aaggtggaggagctg

SEQ ID NO: 1051647 - DNA, 15 bp, Homo sapiens
gaaggtggaggagct

SEQ ID NO: 1051648 - DNA, 15 bp, Homo sapiens
tgaaggtggaggagc

SEQ ID NO: 1051649 - DNA, 15 bp, Homo sapiens
ctgaaggtggaggag

SEQ ID NO: 1051650 - DNA, 15 bp, Homo sapiens
gctgaaggtggagga

SEQ ID NO: 1051651 - DNA, 15 bp, Homo sapiens
tgctgaaggtggagg

SEQ ID NO: 1051652 - DNA, 15 bp, Homo sapiens
gtgctgaaggtggag

SEQ ID NO: 1051653 - DNA, 15 bp, Homo sapiens
tgtgctgaaggtgga

SEQ ID NO: 1051654 - DNA, 15 bp, Homo sapiens
ttgtgctgaaggtgg

SEQ ID NO: 1051655 - DNA, 15 bp, Homo sapiens
gttgtgctgaaggtg

SEQ ID NO: 1051656 - DNA, 15 bp, Homo sapiens
tgttgtgctgaaggt

SEQ ID NO: 1051657 - DNA, 15 bp, Homo sapiens
gtgttgtgctgaagg

SEQ ID NO: 1051658 - DNA, 15 bp, Homo sapiens
tgtgttgtgctgaag

SEQ ID NO: 1051659 - DNA, 15 bp, Homo sapiens
ctgtgttgtgctgaa

SEQ ID NO: 1051660 - DNA, 15 bp, Homo sapiens
gctgtgttgtgctga

SEQ ID NO: 1051661 - DNA, 15 bp, Homo sapiens
tgctgtgttgtgctg

SEQ ID NO: 1051662 - DNA, 15 bp, Homo sapiens
ctgctgtgttgtgct

SEQ ID NO: 1051663 - DNA, 15 bp, Homo sapiens
gctgctgtgttgtgc

SEQ ID NO: 1051664 - DNA, 15 bp, Homo sapiens
ggctgctgtgttgtg

SEQ ID NO: 1051665 - DNA, 15 bp, Homo sapiens
tggctgctgtgttgt

SEQ ID NO: 1051666 - DNA, 15 bp, Homo sapiens
gtggctgctgtgttg

SEQ ID NO: 1051667 - DNA, 15 bp, Homo sapiens
agtggctgctgtgtt

SEQ ID NO: 1051668 - DNA, 15 bp, Homo sapiens
gagtggctgctgtgt

SEQ ID NO: 1051669 - DNA, 15 bp, Homo sapiens
agagtggctgctgtg

SEQ ID NO: 1051670 - DNA, 15 bp, Homo sapiens
gagagtggctgctgt

SEQ ID NO: 1051671 - DNA, 15 bp, Homo sapiens
cgagagtggctgctg

SEQ ID NO: 1051672 - DNA, 15 bp, Homo sapiens
acgagagtggctgct

SEQ ID NO: 1051673 - DNA, 15 bp, Homo sapiens
cacgagagtggctgc

SEQ ID NO: 1051674 - DNA, 15 bp, Homo sapiens
gcacgagagtggctg

SEQ ID NO: 1051675 - DNA, 15 bp, Homo sapiens
tgcacgagagtggct

SEQ ID NO: 1051676 - DNA, 15 bp, Homo sapiens
atgcacgagagtggc

SEQ ID NO: 1051677 - DNA, 15 bp, Homo sapiens
catgcacgagagtgg

SEQ ID NO: 1051678 - DNA, 15 bp, Homo sapiens
ccatgcacgagagtg

SEQ ID NO: 1051679 - DNA, 15 bp, Homo sapiens
cccatgcacgagagt

SEQ ID NO: 1051680 - DNA, 15 bp, Homo sapiens
gcccatgcacgagag

SEQ ID NO: 1051681 - DNA, 15 bp, Homo sapiens
tgcccatgcacgaga

SEQ ID NO: 1051682 - DNA, 15 bp, Homo sapiens
ctgcccatgcacgag

SEQ ID NO: 1051683 - DNA, 15 bp, Homo sapiens
cctgcccatgcacga

SEQ ID NO: 1051684 - DNA, 15 bp, Homo sapiens
ccctgcccatgcacg

SEQ ID NO: 1051685 - DNA, 15 bp, Homo sapiens
gccctgcccatgcac

SEQ ID NO: 1051686 - DNA, 15 bp, Homo sapiens
ggccctgcccatgca

SEQ ID NO: 1051687 - DNA, 15 bp, Homo sapiens
aggccctgcccatgc

SEQ ID NO: 1051688 - DNA, 15 bp, Homo sapiens
caggccctgcccatg

SEQ ID NO: 1051689 - DNA, 15 bp, Homo sapiens
ccaggccctgcccat

SEQ ID NO: 1051690 - DNA, 15 bp, Homo sapiens
cccaggccctgccca

SEQ ID NO: 1051691 - DNA, 15 bp, Homo sapiens
gcccaggccctgccc

SEQ ID NO: 1051692 - DNA, 15 bp, Homo sapiens
tgcccaggccctgcc

SEQ ID NO: 1051693 - DNA, 15 bp, Homo sapiens
gtgcccaggccctgc

SEQ ID NO: 1051694 - DNA, 15 bp, Homo sapiens
agtgcccaggccctg

SEQ ID NO: 1051695 - DNA, 15 bp, Homo sapiens
aagtgcccaggccct

SEQ ID NO: 1051696 - DNA, 15 bp, Homo sapiens
aaagtgcccaggccc

SEQ ID NO: 1051697 - DNA, 15 bp, Homo sapiens
taaagtgcccaggcc

SEQ ID NO: 1051698 - DNA, 15 bp, Homo sapiens
gtaaagtgcccaggc

SEQ ID NO: 1051699 - DNA, 15 bp, Homo sapiens
tgtaaagtgcccagg

SEQ ID NO: 1051700 - DNA, 15 bp, Homo sapiens
ttgtaaagtgcccag

SEQ ID NO: 1051701 - DNA, 15 bp, Homo sapiens
tttgtaaagtgccca

SEQ ID NO: 1051702 - DNA, 15 bp, Homo sapiens
ctttgtaaagtgccc

SEQ ID NO: 1051703 - DNA, 15 bp, Homo sapiens
gctttgtaaagtgcc

SEQ ID NO: 1051704 - DNA, 15 bp, Homo sapiens
tgctttgtaaagtgc

SEQ ID NO: 1051705 - DNA, 15 bp, Homo sapiens
ctgctttgtaaagtg

SEQ ID NO: 1051706 - DNA, 15 bp, Homo sapiens
tctgctttgtaaagt

SEQ ID NO: 1051707 - DNA, 15 bp, Homo sapiens
gtctgctttgtaaag

SEQ ID NO: 1051708 - DNA, 15 bp, Homo sapiens
agtctgctttgtaaa

SEQ ID NO: 1051709 - DNA, 15 bp, Homo sapiens
tagtctgctttgtaa

SEQ ID NO: 1051710 - DNA, 15 bp, Homo sapiens
gtagtctgctttgta

SEQ ID NO: 1051711 - DNA, 15 bp, Homo sapiens
agtagtctgctttgt

SEQ ID NO: 1051712 - DNA, 15 bp, Homo sapiens
gagtagtctgctttg

SEQ ID NO: 1051713 - DNA, 15 bp, Homo sapiens
cgagtagtctgcttt

SEQ ID NO: 1051714 - DNA, 15 bp, Homo sapiens
ccgagtagtctgctt

SEQ ID NO: 1051715 - DNA, 15 bp, Homo sapiens
cccgagtagtctgct

SEQ ID NO: 1051716 - DNA, 15 bp, Homo sapiens
gcccgagtagtctgc

SEQ ID NO: 1051717 - DNA, 15 bp, Homo sapiens
ggcccgagtagtctg

SEQ ID NO: 1051718 - DNA, 15 bp, Homo sapiens
gggcccgagtagtct

SEQ ID NO: 1051719 - DNA, 15 bp, Homo sapiens
agggcccgagtagtc

SEQ ID NO: 1051720 - DNA, 15 bp, Homo sapiens
cagggcccgagtagt

SEQ ID NO: 1051721 - DNA, 15 bp, Homo sapiens
gcagggcccgagtag

SEQ ID NO: 1051722 - DNA, 15 bp, Homo sapiens
ggcagggcccgagta

SEQ ID NO: 1051723 - DNA, 15 bp, Homo sapiens
tggcagggcccgagt

SEQ ID NO: 1051724 - DNA, 15 bp, Homo sapiens
gtggcagggcccgag

SEQ ID NO: 1051725 - DNA, 15 bp, Homo sapiens
ggtggcagggcccga

SEQ ID NO: 1051726 - DNA, 15 bp, Homo sapiens
gggtggcagggcccg

SEQ ID NO: 1051727 - DNA, 15 bp, Homo sapiens
tgggtggcagggccc

SEQ ID NO: 1051728 - DNA, 15 bp, Homo sapiens
ctgggtggcagggcc

SEQ ID NO: 1051729 - DNA, 15 bp, Homo sapiens
tctgggtggcagggc

SEQ ID NO: 1051730 - DNA, 15 bp, Homo sapiens
atctgggtggcaggg

SEQ ID NO: 1051731 - DNA, 15 bp, Homo sapiens
aatctgggtggcagg

SEQ ID NO: 1051732 - DNA, 15 bp, Homo sapiens
gaatctgggtggcag

SEQ ID NO: 1051733 - DNA, 15 bp, Homo sapiens
agaatctgggtggca

SEQ ID NO: 1051734 - DNA, 15 bp, Homo sapiens
gagaatctgggtggc

SEQ ID NO: 1051735 - DNA, 15 bp, Homo sapiens
tgagaatctgggtgg

SEQ ID NO: 1051736 - DNA, 15 bp, Homo sapiens
gtgagaatctgggtg

SEQ ID NO: 1051737 - DNA, 15 bp, Homo sapiens
tgtgagaatctgggt

SEQ ID NO: 1051738 - DNA, 15 bp, Homo sapiens
gtgtgagaatctggg

SEQ ID NO: 1051739 - DNA, 15 bp, Homo sapiens
tgtgtgagaatctgg

SEQ ID NO: 1051740 - DNA, 15 bp, Homo sapiens
atgtgtgagaatctg

SEQ ID NO: 1051741 - DNA, 15 bp, Homo sapiens
tatgtgtgagaatct

SEQ ID NO: 1051742 - DNA, 15 bp, Homo sapiens
ttatgtgtgagaatc

SEQ ID NO: 1051743 - DNA, 15 bp, Homo sapiens
tttatgtgtgagaat

SEQ ID NO: 1051744 - DNA, 15 bp, Homo sapiens
ttttatgtgtgagaa

SEQ ID NO: 1051745 - DNA, 15 bp, Homo sapiens
tttttatgtgtgaga

SEQ ID NO: 1051746 - DNA, 15 bp, Homo sapiens
gtttttatgtgtgag

SEQ ID NO: 1051747 - DNA, 15 bp, Homo sapiens
ggtttttatgtgtga

SEQ ID NO: 1051748 - DNA, 15 bp, Homo sapiens
tggtttttatgtgtg

SEQ ID NO: 1051749 - DNA, 15 bp, Homo sapiens
ttggtttttatgtgt

SEQ ID NO: 1051750 - DNA, 15 bp, Homo sapiens
cttggtttttatgtg

SEQ ID NO: 1051751 - DNA, 15 bp, Homo sapiens
ccttggtttttatgt

SEQ ID NO: 1051752 - DNA, 15 bp, Homo sapiens
accttggtttttatg

SEQ ID NO: 1051753 - DNA, 15 bp, Homo sapiens
caccttggtttttat

SEQ ID NO: 1051754 - DNA, 15 bp, Homo sapiens
ccaccttggttttta

SEQ ID NO: 1051755 - DNA, 15 bp, Homo sapiens
tccaccttggttttt

SEQ ID NO: 1051756 - DNA, 15 bp, Homo sapiens
ttccaccttggtttt

SEQ ID NO: 1051757 - DNA, 15 bp, Homo sapiens
attccaccttggttt

SEQ ID NO: 1051758 - DNA, 15 bp, Homo sapiens
cattccaccttggtt

SEQ ID NO: 1051759 - DNA, 15 bp, Homo sapiens
ccattccaccttggt

SEQ ID NO: 1051760 - DNA, 15 bp, Homo sapiens
tccattccaccttgg

SEQ ID NO: 1051761 - DNA, 15 bp, Homo sapiens
ctccattccaccttg

SEQ ID NO: 1051762 - DNA, 15 bp, Homo sapiens
tctccattccacctt

SEQ ID NO: 1051763 - DNA, 15 bp, Homo sapiens
ctctccattccacct

SEQ ID NO: 1051764 - DNA, 15 bp, Homo sapiens
actctccattccacc

SEQ ID NO: 1051765 - DNA, 15 bp, Homo sapiens
gactctccattccac

SEQ ID NO: 1051766 - DNA, 15 bp, Homo sapiens
ggactctccattcca

SEQ ID NO: 1051767 - DNA, 15 bp, Homo sapiens
tggactctccattcc

SEQ ID NO: 1051768 - DNA, 15 bp, Homo sapiens
ttggactctccattc

SEQ ID NO: 1051769 - DNA, 15 bp, Homo sapiens
cttggactctccatt

SEQ ID NO: 1051770 - DNA, 15 bp, Homo sapiens
ccttggactctccat

SEQ ID NO: 1051771 - DNA, 15 bp, Homo sapiens
tccttggactctcca

SEQ ID NO: 1051772 - DNA, 15 bp, Homo sapiens
gtccttggactctcc

SEQ ID NO: 1051773 - DNA, 15 bp, Homo sapiens
tgtccttggactctc

SEQ ID NO: 1051774 - DNA, 15 bp, Homo sapiens
ctgtccttggactct

SEQ ID NO: 1051775 - DNA, 15 bp, Homo sapiens
actgtccttggactc

SEQ ID NO: 1051776 - DNA, 15 bp, Homo sapiens
aactgtccttggact

SEQ ID NO: 1051777 - DNA, 15 bp, Homo sapiens
caactgtccttggac

SEQ ID NO: 1051778 - DNA, 15 bp, Homo sapiens
ccaactgtccttgga

SEQ ID NO: 1051779 - DNA, 15 bp, Homo sapiens
accaactgtccttgg

SEQ ID NO: 1051780 - DNA, 15 bp, Homo sapiens
caccaactgtccttg

SEQ ID NO: 1051781 - DNA, 15 bp, Homo sapiens
ccaccaactgtcctt

SEQ ID NO: 1051782 - DNA, 15 bp, Homo sapiens
tccaccaactgtcct

SEQ ID NO: 1051783 - DNA, 15 bp, Homo sapiens
atccaccaactgtcc

SEQ ID NO: 1051784 - DNA, 15 bp, Homo sapiens
catccaccaactgtc

SEQ ID NO: 1051785 - DNA, 15 bp, Homo sapiens
gcatccaccaactgt

SEQ ID NO: 1051786 - DNA, 15 bp, Homo sapiens
agcatccaccaactg

SEQ ID NO: 1051787 - DNA, 15 bp, Homo sapiens
aagcatccaccaact

SEQ ID NO: 1051788 - DNA, 15 bp, Homo sapiens
caagcatccaccaac

SEQ ID NO: 1051789 - DNA, 15 bp, Homo sapiens
acaagcatccaccaa

SEQ ID NO: 1051790 - DNA, 15 bp, Homo sapiens
cacaagcatccacca

SEQ ID NO: 1051791 - DNA, 15 bp, Homo sapiens
acacaagcatccacc

SEQ ID NO: 1051792 - DNA, 15 bp, Homo sapiens
tacacaagcatccac

SEQ ID NO: 1051793 - DNA, 15 bp, Homo sapiens
ttacacaagcatcca

SEQ ID NO: 1051794 - DNA, 15 bp, Homo sapiens
tttacacaagcatcc

SEQ ID NO: 1051795 - DNA, 15 bp, Homo sapiens
ttttacacaagcatc

SEQ ID NO: 1051796 - DNA, 15 bp, Homo sapiens
cttttacacaagcat

SEQ ID NO: 1051797 - DNA, 15 bp, Homo sapiens
acttttacacaagca

SEQ ID NO: 1051798 - DNA, 15 bp, Homo sapiens
cacttttacacaagc

SEQ ID NO: 1051799 - DNA, 15 bp, Homo sapiens
gcacttttacacaag

SEQ ID NO: 1051800 - DNA, 15 bp, Homo sapiens
agcacttttacacaa

SEQ ID NO: 1051801 - DNA, 15 bp, Homo sapiens
cagcacttttacaca

SEQ ID NO: 1051802 - DNA, 15 bp, Homo sapiens
ccagcacttttacac

SEQ ID NO: 1051803 - DNA, 15 bp, Homo sapiens
cccagcacttttaca

SEQ ID NO: 1051804 - DNA, 15 bp, Homo sapiens
tcccagcacttttac

SEQ ID NO: 1051805 - DNA, 15 bp, Homo sapiens
ttcccagcactttta

SEQ ID NO: 1051806 - DNA, 15 bp, Homo sapiens
tttcccagcactttt

SEQ ID NO: 1051807 - DNA, 15 bp, Homo sapiens
gtttcccagcacttt

SEQ ID NO: 1051808 - DNA, 15 bp, Homo sapiens
agtttcccagcactt

SEQ ID NO: 1051809 - DNA, 15 bp, Homo sapiens
aagtttcccagcact

SEQ ID NO: 1051810 - DNA, 15 bp, Homo sapiens
caagtttcccagcac

SEQ ID NO: 1051811 - DNA, 15 bp, Homo sapiens
gcaagtttcccagca

SEQ ID NO: 1051812 - DNA, 15 bp, Homo sapiens
ggcaagtttcccagc

SEQ ID NO: 1051813 - DNA, 15 bp, Homo sapiens
aggcaagtttcccag

SEQ ID NO: 1051814 - DNA, 15 bp, Homo sapiens
gaggcaagtttccca

SEQ ID NO: 1051815 - DNA, 15 bp, Homo sapiens
agaggcaagtttccc

SEQ ID NO: 1051816 - DNA, 15 bp, Homo sapiens
cagaggcaagtttcc

SEQ ID NO: 1051817 - DNA, 15 bp, Homo sapiens
ccagaggcaagtttc

SEQ ID NO: 1051818 - DNA, 15 bp, Homo sapiens
gccagaggcaagttt

SEQ ID NO: 1051819 - DNA, 15 bp, Homo sapiens
agccagaggcaagtt

SEQ ID NO: 1051820 - DNA, 15 bp, Homo sapiens
cagccagaggcaagt

SEQ ID NO: 1051821 - DNA, 15 bp, Homo sapiens
gcagccagaggcaag

SEQ ID NO: 1051822 - DNA, 15 bp, Homo sapiens
ggcagccagaggcaa

SEQ ID NO: 1051823 - DNA, 15 bp, Homo sapiens
gggcagccagaggca

SEQ ID NO: 1051824 - DNA, 15 bp, Homo sapiens
tgggcagccagaggc

SEQ ID NO: 1051825 - DNA, 15 bp, Homo sapiens
ctgggcagccagagg

SEQ ID NO: 1051826 - DNA, 15 bp, Homo sapiens
gctgggcagccagag

SEQ ID NO: 1051827 - DNA, 15 bp, Homo sapiens
agctgggcagccaga

SEQ ID NO: 1051828 - DNA, 15 bp, Homo sapiens
cagctgggcagccag

SEQ ID NO: 1051829 - DNA, 15 bp, Homo sapiens
acagctgggcagcca

SEQ ID NO: 1051830 - DNA, 15 bp, Homo sapiens
cacagctgggcagcc

SEQ ID NO: 1051831 - DNA, 15 bp, Homo sapiens
tcacagctgggcagc

SEQ ID NO: 1051832 - DNA, 15 bp, Homo sapiens
ttcacagctgggcag

SEQ ID NO: 1051833 - DNA, 15 bp, Homo sapiens
cttcacagctgggca

SEQ ID NO: 1051834 - DNA, 15 bp, Homo sapiens
gcttcacagctgggc

SEQ ID NO: 1051835 - DNA, 15 bp, Homo sapiens
cgcttcacagctggg

SEQ ID NO: 1051836 - DNA, 15 bp, Homo sapiens
acgcttcacagctgg

SEQ ID NO: 1051837 - DNA, 15 bp, Homo sapiens
cacgcttcacagctg

SEQ ID NO: 1051838 - DNA, 15 bp, Homo sapiens
tcacgcttcacagct

SEQ ID NO: 1051839 - DNA, 15 bp, Homo sapiens
ctcacgcttcacagc

SEQ ID NO: 1051840 - DNA, 15 bp, Homo sapiens
gctcacgcttcacag

SEQ ID NO: 1051841 - DNA, 15 bp, Homo sapiens
ggctcacgcttcaca

SEQ ID NO: 1051842 - DNA, 15 bp, Homo sapiens
aggctcacgcttcac

SEQ ID NO: 1051843 - DNA, 15 bp, Homo sapiens
aaggctcacgcttca

SEQ ID NO: 1051844 - DNA, 15 bp, Homo sapiens
caaggctcacgcttc

SEQ ID NO: 1051845 - DNA, 15 bp, Homo sapiens
gcaaggctcacgctt

SEQ ID NO: 1051846 - DNA, 15 bp, Homo sapiens
agcaaggctcacgct

SEQ ID NO: 1051847 - DNA, 15 bp, Homo sapiens
aagcaaggctcacgc

SEQ ID NO: 1051848 - DNA, 15 bp, Homo sapiens
gaagcaaggctcacg

SEQ ID NO: 1051849 - DNA, 15 bp, Homo sapiens
agaagcaaggctcac

SEQ ID NO: 1051850 - DNA, 15 bp, Homo sapiens
aagaagcaaggctca

SEQ ID NO: 1051851 - DNA, 15 bp, Homo sapiens
caagaagcaaggctc

SEQ ID NO: 1051852 - DNA, 15 bp, Homo sapiens
gcaagaagcaaggct

SEQ ID NO: 1051853 - DNA, 15 bp, Homo sapiens
ggcaagaagcaaggc

SEQ ID NO: 1051854 - DNA, 15 bp, Homo sapiens
gggcaagaagcaagg

SEQ ID NO: 1051855 - DNA, 15 bp, Homo sapiens
ggggcaagaagcaag

SEQ ID NO: 1051856 - DNA, 15 bp, Homo sapiens
tggggcaagaagcaa

SEQ ID NO: 1051857 - DNA, 15 bp, Homo sapiens
gtggggcaagaagca

SEQ ID NO: 1051858 - DNA, 15 bp, Homo sapiens
tgtggggcaagaagc

SEQ ID NO: 1051859 - DNA, 15 bp, Homo sapiens
atgtggggcaagaag

SEQ ID NO: 1051860 - DNA, 15 bp, Homo sapiens
gatgtggggcaagaa

SEQ ID NO: 1051861 - DNA, 15 bp, Homo sapiens
ggatgtggggcaaga

SEQ ID NO: 1051862 - DNA, 15 bp, Homo sapiens
tggatgtggggcaag

SEQ ID NO: 1051863 - DNA, 15 bp, Homo sapiens
gtggatgtggggcaa

SEQ ID NO: 1051864 - DNA, 15 bp, Homo sapiens
agtggatgtggggca

SEQ ID NO: 1051865 - DNA, 15 bp, Homo sapiens
gagtggatgtggggc

SEQ ID NO: 1051866 - DNA, 15 bp, Homo sapiens
ggagtggatgtgggg

SEQ ID NO: 1051867 - DNA, 15 bp, Homo sapiens
aggagtggatgtggg

SEQ ID NO: 1051868 - DNA, 15 bp, Homo sapiens
taggagtggatgtgg

SEQ ID NO: 1051869 - DNA, 15 bp, Homo sapiens
ctaggagtggatgtg

SEQ ID NO: 1051870 - DNA, 15 bp, Homo sapiens
actaggagtggatgt

SEQ ID NO: 1051871 - DNA, 15 bp, Homo sapiens
gactaggagtggatg

SEQ ID NO: 1051872 - DNA, 15 bp, Homo sapiens
tgactaggagtggat

SEQ ID NO: 1051873 - DNA, 15 bp, Homo sapiens
atgactaggagtgga

SEQ ID NO: 1051874 - DNA, 15 bp, Homo sapiens
aatgactaggagtgg

SEQ ID NO: 1051875 - DNA, 15 bp, Homo sapiens
gaatgactaggagtg

SEQ ID NO: 1051876 - DNA, 15 bp, Homo sapiens
tgaatgactaggagt

SEQ ID NO: 1051877 - DNA, 15 bp, Homo sapiens
ttgaatgactaggag

SEQ ID NO: 1051878 - DNA, 15 bp, Homo sapiens
attgaatgactagga

SEQ ID NO: 1051879 - DNA, 15 bp, Homo sapiens
gattgaatgactagg

SEQ ID NO: 1051880 - DNA, 15 bp, Homo sapiens
ggattgaatgactag

SEQ ID NO: 1051881 - DNA, 15 bp, Homo sapiens
aggattgaatgacta

SEQ ID NO: 1051882 - DNA, 15 bp, Homo sapiens
caggattgaatgact

SEQ ID NO: 1051883 - DNA, 15 bp, Homo sapiens
ccaggattgaatgac

SEQ ID NO: 1051884 - DNA, 15 bp, Homo sapiens
accaggattgaatga

SEQ ID NO: 1051885 - DNA, 15 bp, Homo sapiens
aaccaggattgaatg

SEQ ID NO: 1051886 - DNA, 15 bp, Homo sapiens
gaaccaggattgaat

SEQ ID NO: 1051887 - DNA, 15 bp, Homo sapiens
ggaaccaggattgaa

SEQ ID NO: 1051888 - DNA, 15 bp, Homo sapiens
gggaaccaggattga

SEQ ID NO: 1051889 - DNA, 15 bp, Homo sapiens
agggaaccaggattg

SEQ ID NO: 1051890 - DNA, 15 bp, Homo sapiens
cagggaaccaggatt

SEQ ID NO: 1051891 - DNA, 15 bp, Homo sapiens
gcagggaaccaggat

SEQ ID NO: 1051892 - DNA, 15 bp, Homo sapiens
agcagggaaccagga

SEQ ID NO: 1051893 - DNA, 15 bp, Homo sapiens
aagcagggaaccagg

SEQ ID NO: 1051894 - DNA, 15 bp, Homo sapiens
aaagcagggaaccag

SEQ ID NO: 1051895 - DNA, 15 bp, Homo sapiens
caaagcagggaacca

SEQ ID NO: 1051896 - DNA, 15 bp, Homo sapiens
gcaaagcagggaacc

SEQ ID NO: 1051897 - DNA, 15 bp, Homo sapiens
ggcaaagcagggaac

SEQ ID NO: 1051898 - DNA, 15 bp, Homo sapiens
tggcaaagcagggaa

SEQ ID NO: 1051899 - DNA, 15 bp, Homo sapiens
ctggcaaagcaggga

SEQ ID NO: 1051900 - DNA, 15 bp, Homo sapiens
cctggcaaagcaggg

SEQ ID NO: 1051901 - DNA, 15 bp, Homo sapiens
tcctggcaaagcagg

SEQ ID NO: 1051902 - DNA, 15 bp, Homo sapiens
ctcctggcaaagcag

SEQ ID NO: 1051903 - DNA, 15 bp, Homo sapiens
gctcctggcaaagca

SEQ ID NO: 1051904 - DNA, 15 bp, Homo sapiens
ggctcctggcaaagc

SEQ ID NO: 1051905 - DNA, 15 bp, Homo sapiens
aggctcctggcaaag

SEQ ID NO: 1051906 - DNA, 15 bp, Homo sapiens
aaggctcctggcaaa

SEQ ID NO: 1051907 - DNA, 15 bp, Homo sapiens
gaaggctcctggcaa

SEQ ID NO: 1051908 - DNA, 15 bp, Homo sapiens
tgaaggctcctggca

SEQ ID NO: 1051909 - DNA, 15 bp, Homo sapiens
gtgaaggctcctggc

SEQ ID NO: 1051910 - DNA, 15 bp, Homo sapiens
tgtgaaggctcctgg

SEQ ID NO: 1051911 - DNA, 15 bp, Homo sapiens
ctgtgaaggctcctg

SEQ ID NO: 1051912 - DNA, 15 bp, Homo sapiens
tctgtgaaggctcct

SEQ ID NO: 1051913 - DNA, 15 bp, Homo sapiens
gtctgtgaaggctcc

SEQ ID NO: 1051914 - DNA, 15 bp, Homo sapiens
cgtctgtgaaggctc

SEQ ID NO: 1051915 - DNA, 15 bp, Homo sapiens
gcgtctgtgaaggct

SEQ ID NO: 1051916 - DNA, 15 bp, Homo sapiens
agcgtctgtgaaggc

SEQ ID NO: 1051917 - DNA, 15 bp, Homo sapiens
cagcgtctgtgaagg

SEQ ID NO: 1051918 - DNA, 15 bp, Homo sapiens
acagcgtctgtgaag

SEQ ID NO: 1051919 - DNA, 15 bp, Homo sapiens
tacagcgtctgtgaa

SEQ ID NO: 1051920 - DNA, 15 bp, Homo sapiens
ctacagcgtctgtga

SEQ ID NO: 1051921 - DNA, 15 bp, Homo sapiens
tctacagcgtctgtg

SEQ ID NO: 1051922 - DNA, 15 bp, Homo sapiens
ttctacagcgtctgt

SEQ ID NO: 1051923 - DNA, 15 bp, Homo sapiens
attctacagcgtctg

SEQ ID NO: 1051924 - DNA, 15 bp, Homo sapiens
cattctacagcgtct

SEQ ID NO: 1051925 - DNA, 15 bp, Homo sapiens
tcattctacagcgtc

SEQ ID NO: 1051926 - DNA, 15 bp, Homo sapiens
ctcattctacagcgt

SEQ ID NO: 1051927 - DNA, 15 bp, Homo sapiens
tctcattctacagcg

SEQ ID NO: 1051928 - DNA, 15 bp, Homo sapiens
ctctcattctacagc

SEQ ID NO: 1051929 - DNA, 15 bp, Homo sapiens
cctctcattctacag

SEQ ID NO: 1051930 - DNA, 15 bp, Homo sapiens
ccctctcattctaca

SEQ ID NO: 1051931 - DNA, 15 bp, Homo sapiens
accctctcattctac

SEQ ID NO: 1051932 - DNA, 15 bp, Homo sapiens
caccctctcattcta

SEQ ID NO: 1051933 - DNA, 15 bp, Homo sapiens
tcaccctctcattct

SEQ ID NO: 1051934 - DNA, 15 bp, Homo sapiens
ctcaccctctcattc

SEQ ID NO: 1051935 - DNA, 15 bp, Homo sapiens
actcaccctctcatt

SEQ ID NO: 1051936 - DNA, 15 bp, Homo sapiens
aactcaccctctcat

SEQ ID NO: 1051937 - DNA, 15 bp, Homo sapiens
caactcaccctctca

SEQ ID NO: 1051938 - DNA, 15 bp, Homo sapiens
gcaactcaccctctc

SEQ ID NO: 1051939 - DNA, 15 bp, Homo sapiens
agcaactcaccctct

SEQ ID NO: 1051940 - DNA, 15 bp, Homo sapiens
aagcaactcaccctc

SEQ ID NO: 1051941 - DNA, 15 bp, Homo sapiens
caagcaactcaccct

SEQ ID NO: 1051942 - DNA, 15 bp, Homo sapiens
tcaagcaactcaccc

SEQ ID NO: 1051943 - DNA, 15 bp, Homo sapiens
ctcaagcaactcacc

SEQ ID NO: 1051944 - DNA, 15 bp, Homo sapiens
cctcaagcaactcac

SEQ ID NO: 1051945 - DNA, 15 bp, Homo sapiens
ccctcaagcaactca

SEQ ID NO: 1051946 - DNA, 15 bp, Homo sapiens
cccctcaagcaactc

SEQ ID NO: 1051947 - DNA, 15 bp, Homo sapiens
acccctcaagcaact

SEQ ID NO: 1051948 - DNA, 15 bp, Homo sapiens
tacccctcaagcaac

SEQ ID NO: 1051949 - DNA, 15 bp, Homo sapiens
ctacccctcaagcaa

SEQ ID NO: 1051950 - DNA, 15 bp, Homo sapiens
gctacccctcaagca

SEQ ID NO: 1051951 - DNA, 15 bp, Homo sapiens
tgctacccctcaagc

SEQ ID NO: 1051952 - DNA, 15 bp, Homo sapiens
gtgctacccctcaag

SEQ ID NO: 1051953 - DNA, 15 bp, Homo sapiens
tgtgctacccctcaa

SEQ ID NO: 1051954 - DNA, 15 bp, Homo sapiens
ctgtgctacccctca

SEQ ID NO: 1051955 - DNA, 15 bp, Homo sapiens
tctgtgctacccctc

SEQ ID NO: 1051956 - DNA, 15 bp, Homo sapiens
atctgtgctacccct

SEQ ID NO: 1051957 - DNA, 15 bp, Homo sapiens
tatctgtgctacccc

SEQ ID NO: 1051958 - DNA, 15 bp, Homo sapiens
atatctgtgctaccc

SEQ ID NO: 1051959 - DNA, 15 bp, Homo sapiens
aatatctgtgctacc

SEQ ID NO: 1051960 - DNA, 15 bp, Homo sapiens
gaatatctgtgctac

SEQ ID NO: 1051961 - DNA, 15 bp, Homo sapiens
ggaatatctgtgcta

SEQ ID NO: 1051962 - DNA, 15 bp, Homo sapiens
aggaatatctgtgct

SEQ ID NO: 1051963 - DNA, 15 bp, Homo sapiens
caggaatatctgtgc

SEQ ID NO: 1051964 - DNA, 15 bp, Homo sapiens
gcaggaatatctgtg

SEQ ID NO: 1051965 - DNA, 15 bp, Homo sapiens
ggcaggaatatctgt

SEQ ID NO: 1051966 - DNA, 15 bp, Homo sapiens
aggcaggaatatctg

SEQ ID NO: 1051967 - DNA, 15 bp, Homo sapiens
taggcaggaatatct

SEQ ID NO: 1051968 - DNA, 15 bp, Homo sapiens
ttaggcaggaatatc

SEQ ID NO: 1051969 - DNA, 15 bp, Homo sapiens
attaggcaggaatat

SEQ ID NO: 1051970 - DNA, 15 bp, Homo sapiens
tattaggcaggaata

SEQ ID NO: 1051971 - DNA, 15 bp, Homo sapiens
ttattaggcaggaat

SEQ ID NO: 1051972 - DNA, 15 bp, Homo sapiens
tttattaggcaggaa

SEQ ID NO: 1051973 - DNA, 15 bp, Homo sapiens
atttattaggcagga

SEQ ID NO: 1051974 - DNA, 15 bp, Homo sapiens
tatttattaggcagg

SEQ ID NO: 1051975 - DNA, 15 bp, Homo sapiens
atatttattaggcag

SEQ ID NO: 1051976 - DNA, 15 bp, Homo sapiens
catatttattaggca

SEQ ID NO: 1051977 - DNA, 15 bp, Homo sapiens
acatatttattaggc

SEQ ID NO: 1051978 - DNA, 15 bp, Homo sapiens
aacatatttattagg

SEQ ID NO: 1051979 - DNA, 15 bp, Homo sapiens
taacatatttattag

SEQ ID NO: 1051980 - DNA, 15 bp, Homo sapiens
ttaacatatttatta

SEQ ID NO: 1051981 - DNA, 15 bp, Homo sapiens
tttaacatatttatt

SEQ ID NO: 1051982 - DNA, 15 bp, Homo sapiens
atttaacatatttat

SEQ ID NO: 1051983 - DNA, 15 bp, Homo sapiens
gatttaacatattta

SEQ ID NO: 1051984 - DNA, 15 bp, Homo sapiens
tgatttaacatattt

SEQ ID NO: 1051985 - DNA, 15 bp, Homo sapiens
ttgatttaacatatt

SEQ ID NO: 1051986 - DNA, 15 bp, Homo sapiens
tttgatttaacatat

SEQ ID NO: 1051987 - DNA, 15 bp, Homo sapiens
gtttgatttaacata

SEQ ID NO: 1051988 - DNA, 15 bp, Homo sapiens
tgtttgatttaacat

SEQ ID NO: 1051989 - DNA, 15 bp, Homo sapiens
ctgtttgatttaaca

SEQ ID NO: 1051990 - DNA, 15 bp, Homo sapiens
cctgtttgatttaac

SEQ ID NO: 1051991 - DNA, 15 bp, Homo sapiens
gcctgtttgatttaa

SEQ ID NO: 1051992 - DNA, 15 bp, Homo sapiens
agcctgtttgattta

SEQ ID NO: 1051993 - DNA, 15 bp, Homo sapiens
gagcctgtttgattt

SEQ ID NO: 1051994 - DNA, 15 bp, Homo sapiens
tgagcctgtttgatt

SEQ ID NO: 1051995 - DNA, 15 bp, Homo sapiens
atgagcctgtttgat

SEQ ID NO: 1051996 - DNA, 15 bp, Homo sapiens
aatgagcctgtttga

SEQ ID NO: 1051997 - DNA, 15 bp, Homo sapiens
taatgagcctgtttg

SEQ ID NO: 1051998 - DNA, 15 bp, Homo sapiens
ctaatgagcctgttt

SEQ ID NO: 1051999 - DNA, 15 bp, Homo sapiens
tctaatgagcctgtt

SEQ ID NO: 1052000 - DNA, 15 bp, Homo sapiens
ttctaatgagcctgt

SEQ ID NO: 1052001 - DNA, 15 bp, Homo sapiens
cttctaatgagcctg

SEQ ID NO: 1052002 - DNA, 15 bp, Homo sapiens
gcttctaatgagcct

SEQ ID NO: 1052003 - DNA, 15 bp, Homo sapiens
ggcttctaatgagcc

SEQ ID NO: 1052004 - DNA, 15 bp, Homo sapiens
cggcttctaatgagc

SEQ ID NO: 1052005 - DNA, 15 bp, Homo sapiens
ccggcttctaatgag

SEQ ID NO: 1052006 - DNA, 15 bp, Homo sapiens
tccggcttctaatga

SEQ ID NO: 1052007 - DNA, 15 bp, Homo sapiens
ctccggcttctaatg

SEQ ID NO: 1052008 - DNA, 15 bp, Homo sapiens
cctccggcttctaat

SEQ ID NO: 1052009 - DNA, 15 bp, Homo sapiens
gcctccggcttctaa

SEQ ID NO: 1052010 - DNA, 15 bp, Homo sapiens
agcctccggcttcta

SEQ ID NO: 1052011 - DNA, 15 bp, Homo sapiens
tagcctccggcttct

SEQ ID NO: 1052012 - DNA, 15 bp, Homo sapiens
ttagcctccggcttc

SEQ ID NO: 1052013 - DNA, 15 bp, Homo sapiens
attagcctccggctt

SEQ ID NO: 1052014 - DNA, 15 bp, Homo sapiens
cattagcctccggct

SEQ ID NO: 1052015 - DNA, 15 bp, Homo sapiens
ccattagcctccggc

SEQ ID NO: 1052016 - DNA, 15 bp, Homo sapiens
gccattagcctccgg

SEQ ID NO: 1052017 - DNA, 15 bp, Homo sapiens
ggccattagcctccg

SEQ ID NO: 1052018 - DNA, 15 bp, Homo sapiens
cggccattagcctcc

SEQ ID NO: 1052019 - DNA, 15 bp, Homo sapiens
tcggccattagcctc

SEQ ID NO: 1052020 - DNA, 15 bp, Homo sapiens
gtcggccattagcct

SEQ ID NO: 1052021 - DNA, 15 bp, Homo sapiens
agtcggccattagcc

SEQ ID NO: 1052022 - DNA, 15 bp, Homo sapiens
aagtcggccattagc

SEQ ID NO: 1052023 - DNA, 15 bp, Homo sapiens
taagtcggccattag

SEQ ID NO: 1052024 - DNA, 15 bp, Homo sapiens
gtaagtcggccatta

SEQ ID NO: 1052025 - DNA, 15 bp, Homo sapiens
tgtaagtcggccatt

SEQ ID NO: 1052026 - DNA, 15 bp, Homo sapiens
ttgtaagtcggccat

SEQ ID NO: 1052027 - DNA, 15 bp, Homo sapiens
attgtaagtcggcca

SEQ ID NO: 1052028 - DNA, 15 bp, Homo sapiens
tattgtaagtcggcc

SEQ ID NO: 1052029 - DNA, 15 bp, Homo sapiens
ttattgtaagtcggc

SEQ ID NO: 1052030 - DNA, 15 bp, Homo sapiens
tttattgtaagtcgg

SEQ ID NO: 1052031 - DNA, 15 bp, Homo sapiens
ttttattgtaagtcg

SEQ ID NO: 1052032 - DNA, 15 bp, Homo sapiens
attttattgtaagtc

SEQ ID NO: 1052033 - DNA, 15 bp, Homo sapiens
cattttattgtaagt

SEQ ID NO: 1052034 - DNA, 15 bp, Homo sapiens
gcattttattgtaag

SEQ ID NO: 1052035 - DNA, 15 bp, Homo sapiens
ggcattttattgtaa

SEQ ID NO: 1052036 - DNA, 15 bp, Homo sapiens
cggcattttattgta

SEQ ID NO: 1052037 - DNA, 15 bp, Homo sapiens
tcggcattttattgt

SEQ ID NO: 1052038 - DNA, 15 bp, Homo sapiens
ctcggcattttattg

SEQ ID NO: 1052039 - DNA, 15 bp, Homo sapiens
actcggcattttatt

SEQ ID NO: 1052040 - DNA, 15 bp, Homo sapiens
gactcggcattttat

SEQ ID NO: 1052041 - DNA, 15 bp, Homo sapiens
agactcggcatttta

SEQ ID NO: 1052042 - DNA, 15 bp, Homo sapiens
gagactcggcatttt

SEQ ID NO: 1052043 - DNA, 15 bp, Homo sapiens
agagactcggcattt

SEQ ID NO: 1052044 - DNA, 15 bp, Homo sapiens
gagagactcggcatt

SEQ ID NO: 1052045 - DNA, 15 bp, Homo sapiens
ggagagactcggcat

SEQ ID NO: 1052046 - DNA, 15 bp, Homo sapiens
aggagagactcggca

SEQ ID NO: 1052047 - DNA, 15 bp, Homo sapiens
gaggagagactcggc

SEQ ID NO: 1052048 - DNA, 15 bp, Homo sapiens
ggaggagagactcgg

SEQ ID NO: 1052049 - DNA, 15 bp, Homo sapiens
gggaggagagactcg

SEQ ID NO: 1052050 - DNA, 15 bp, Homo sapiens
ggggaggagagactc

SEQ ID NO: 1052051 - DNA, 15 bp, Homo sapiens
gggggaggagagact

SEQ ID NO: 1052052 - DNA, 15 bp, Homo sapiens
tgggggaggagagac

SEQ ID NO: 1052053 - DNA, 15 bp, Homo sapiens
ctgggggaggagaga

SEQ ID NO: 1052054 - DNA, 15 bp, Homo sapiens
cctgggggaggagag

SEQ ID NO: 1052055 - DNA, 15 bp, Homo sapiens
tcctgggggaggaga

SEQ ID NO: 1052056 - DNA, 15 bp, Homo sapiens
ttcctgggggaggag

SEQ ID NO: 1052057 - DNA, 15 bp, Homo sapiens
cttcctgggggagga

SEQ ID NO: 1052058 - DNA, 15 bp, Homo sapiens
acttcctgggggagg

SEQ ID NO: 1052059 - DNA, 15 bp, Homo sapiens
gacttcctgggggag

SEQ ID NO: 1052060 - DNA, 15 bp, Homo sapiens
agacttcctggggga

SEQ ID NO: 1052061 - DNA, 15 bp, Homo sapiens
aagacttcctggggg

SEQ ID NO: 1052062 - DNA, 15 bp, Homo sapiens
gaagacttcctgggg

SEQ ID NO: 1052063 - DNA, 15 bp, Homo sapiens
ggaagacttcctggg

SEQ ID NO: 1052064 - DNA, 15 bp, Homo sapiens
aggaagacttcctgg

SEQ ID NO: 1052065 - DNA, 15 bp, Homo sapiens
aaggaagacttcctg

SEQ ID NO: 1052066 - DNA, 15 bp, Homo sapiens
caaggaagacttcct

SEQ ID NO: 1052067 - DNA, 15 bp, Homo sapiens
tcaaggaagacttcc

SEQ ID NO: 1052068 - DNA, 15 bp, Homo sapiens
gtcaaggaagacttc

SEQ ID NO: 1052069 - DNA, 15 bp, Homo sapiens
agtcaaggaagactt

SEQ ID NO: 1052070 - DNA, 15 bp, Homo sapiens
gagtcaaggaagact

SEQ ID NO: 1052071 - DNA, 15 bp, Homo sapiens
agagtcaaggaagac

SEQ ID NO: 1052072 - DNA, 15 bp, Homo sapiens
gagagtcaaggaaga

SEQ ID NO: 1052073 - DNA, 15 bp, Homo sapiens
ggagagtcaaggaag

SEQ ID NO: 1052074 - DNA, 15 bp, Homo sapiens
tggagagtcaaggaa

SEQ ID NO: 1052075 - DNA, 15 bp, Homo sapiens
ttggagagtcaagga

SEQ ID NO: 1052076 - DNA, 15 bp, Homo sapiens
tttggagagtcaagg

SEQ ID NO: 1052077 - DNA, 15 bp, Homo sapiens
atttggagagtcaag

SEQ ID NO: 1052078 - DNA, 15 bp, Homo sapiens
aatttggagagtcaa

SEQ ID NO: 1052079 - DNA, 15 bp, Homo sapiens
aaatttggagagtca

SEQ ID NO: 1052080 - DNA, 15 bp, Homo sapiens
aaaatttggagagtc

SEQ ID NO: 1052081 - DNA, 15 bp, Homo sapiens
gaaaatttggagagt

SEQ ID NO: 1052082 - DNA, 15 bp, Homo sapiens
tgaaaatttggagag

SEQ ID NO: 1052083 - DNA, 15 bp, Homo sapiens
gtgaaaatttggaga

SEQ ID NO: 1052084 - DNA, 15 bp, Homo sapiens
agtgaaaatttggag

SEQ ID NO: 1052085 - DNA, 15 bp, Homo sapiens
tagtgaaaatttgga

SEQ ID NO: 1052086 - DNA, 15 bp, Homo sapiens
atagtgaaaatttgg

SEQ ID NO: 1052087 - DNA, 15 bp, Homo sapiens
aatagtgaaaatttg

SEQ ID NO: 1052088 - DNA, 15 bp, Homo sapiens
gaatagtgaaaattt

SEQ ID NO: 1052089 - DNA, 15 bp, Homo sapiens
ggaatagtgaaaatt

SEQ ID NO: 1052090 - DNA, 15 bp, Homo sapiens
gggaatagtgaaaat

SEQ ID NO: 1052091 - DNA, 15 bp, Homo sapiens
agggaatagtgaaaa

SEQ ID NO: 1052092 - DNA, 15 bp, Homo sapiens
aagggaatagtgaaa

SEQ ID NO: 1052093 - DNA, 15 bp, Homo sapiens
gaagggaatagtgaa

SEQ ID NO: 1052094 - DNA, 15 bp, Homo sapiens
ggaagggaatagtga

SEQ ID NO: 1052095 - DNA, 15 bp, Homo sapiens
tggaagggaatagtg

SEQ ID NO: 1052096 - DNA, 15 bp, Homo sapiens
gtggaagggaatagt

SEQ ID NO: 1052097 - DNA, 15 bp, Homo sapiens
agtggaagggaatag

SEQ ID NO: 1052098 - DNA, 15 bp, Homo sapiens
aagtggaagggaata

SEQ ID NO: 1052099 - DNA, 15 bp, Homo sapiens
taagtggaagggaat

SEQ ID NO: 1052100 - DNA, 15 bp, Homo sapiens
ataagtggaagggaa

SEQ ID NO: 1052101 - DNA, 15 bp, Homo sapiens
cataagtggaaggga

SEQ ID NO: 1052102 - DNA, 15 bp, Homo sapiens
tcataagtggaaggg

SEQ ID NO: 1052103 - DNA, 15 bp, Homo sapiens
ctcataagtggaagg

SEQ ID NO: 1052104 - DNA, 15 bp, Homo sapiens
actcataagtggaag

SEQ ID NO: 1052105 - DNA, 15 bp, Homo sapiens
gactcataagtggaa

SEQ ID NO: 1052106 - DNA, 15 bp, Homo sapiens
ggactcataagtgga

SEQ ID NO: 1052107 - DNA, 15 bp, Homo sapiens
aggactcataagtgg

SEQ ID NO: 1052108 - DNA, 15 bp, Homo sapiens
gaggactcataagtg

SEQ ID NO: 1052109 - DNA, 15 bp, Homo sapiens
cgaggactcataagt

SEQ ID NO: 1052110 - DNA, 15 bp, Homo sapiens
tcgaggactcataag

SEQ ID NO: 1052111 - DNA, 15 bp, Homo sapiens
ttcgaggactcataa

SEQ ID NO: 1052112 - DNA, 15 bp, Homo sapiens
gttcgaggactcata

SEQ ID NO: 1052113 - DNA, 15 bp, Homo sapiens
ggttcgaggactcat

SEQ ID NO: 1052114 - DNA, 15 bp, Homo sapiens
tggttcgaggactca

SEQ ID NO: 1052115 - DNA, 15 bp, Homo sapiens
gtggttcgaggactc

SEQ ID NO: 1052116 - DNA, 15 bp, Homo sapiens
ggtggttcgaggact

SEQ ID NO: 1052117 - DNA, 15 bp, Homo sapiens
cggtggttcgaggac

SEQ ID NO: 1052118 - DNA, 15 bp, Homo sapiens
gcggtggttcgagga

SEQ ID NO: 1052119 - DNA, 15 bp, Homo sapiens
ggcggtggttcgagg

SEQ ID NO: 1052120 - DNA, 15 bp, Homo sapiens
tggcggtggttcgag

SEQ ID NO: 1052121 - DNA, 15 bp, Homo sapiens
gtggcggtggttcga

SEQ ID NO: 1052122 - DNA, 15 bp, Homo sapiens
tgtggcggtggttcg

SEQ ID NO: 1052123 - DNA, 15 bp, Homo sapiens
gtgtggcggtggttc

SEQ ID NO: 1052124 - DNA, 15 bp, Homo sapiens
tgtgtggcggtggtt

SEQ ID NO: 1052125 - DNA, 15 bp, Homo sapiens
ctgtgtggcggtggt

SEQ ID NO: 1052126 - DNA, 15 bp, Homo sapiens
actgtgtggcggtgg

SEQ ID NO: 1052127 - DNA, 15 bp, Homo sapiens
gactgtgtggcggtg

SEQ ID NO: 1052128 - DNA, 15 bp, Homo sapiens
ggactgtgtggcggt

SEQ ID NO: 1052129 - DNA, 15 bp, Homo sapiens
tggactgtgtggcgg

SEQ ID NO: 1052130 - DNA, 15 bp, Homo sapiens
atggactgtgtggcg

SEQ ID NO: 1052131 - DNA, 15 bp, Homo sapiens
aatggactgtgtggc

SEQ ID NO: 1052132 - DNA, 15 bp, Homo sapiens
caatggactgtgtgg

SEQ ID NO: 1052133 - DNA, 15 bp, Homo sapiens
gcaatggactgtgtg

SEQ ID NO: 1052134 - DNA, 15 bp, Homo sapiens
agcaatggactgtgt

SEQ ID NO: 1052135 - DNA, 15 bp, Homo sapiens
aagcaatggactgtg

SEQ ID NO: 1052136 - DNA, 15 bp, Homo sapiens
taagcaatggactgt

SEQ ID NO: 1052137 - DNA, 15 bp, Homo sapiens
ctaagcaatggactg

SEQ ID NO: 1052138 - DNA, 15 bp, Homo sapiens
actaagcaatggact

SEQ ID NO: 1052139 - DNA, 15 bp, Homo sapiens
tactaagcaatggac

SEQ ID NO: 1052140 - DNA, 15 bp, Homo sapiens
ctactaagcaatgga

SEQ ID NO: 1052141 - DNA, 15 bp, Homo sapiens
actactaagcaatgg

SEQ ID NO: 1052142 - DNA, 15 bp, Homo sapiens
cactactaagcaatg

SEQ ID NO: 1052143 - DNA, 15 bp, Homo sapiens
ccactactaagcaat

SEQ ID NO: 1052144 - DNA, 15 bp, Homo sapiens
accactactaagcaa

SEQ ID NO: 1052145 - DNA, 15 bp, Homo sapiens
caccactactaagca

SEQ ID NO: 1052146 - DNA, 15 bp, Homo sapiens
acaccactactaagc

SEQ ID NO: 1052147 - DNA, 15 bp, Homo sapiens
cacaccactactaag

SEQ ID NO: 1052148 - DNA, 15 bp, Homo sapiens
gcacaccactactaa

SEQ ID NO: 1052149 - DNA, 15 bp, Homo sapiens
agcacaccactacta

SEQ ID NO: 1052150 - DNA, 15 bp, Homo sapiens
aagcacaccactact

SEQ ID NO: 1052151 - DNA, 15 bp, Homo sapiens
caagcacaccactac

SEQ ID NO: 1052152 - DNA, 15 bp, Homo sapiens
gcaagcacaccacta

SEQ ID NO: 1052153 - DNA, 15 bp, Homo sapiens
ggcaagcacaccact

SEQ ID NO: 1052154 - DNA, 15 bp, Homo sapiens
aggcaagcacaccac

SEQ ID NO: 1052155 - DNA, 15 bp, Homo sapiens
taggcaagcacacca

SEQ ID NO: 1052156 - DNA, 15 bp, Homo sapiens
gtaggcaagcacacc

SEQ ID NO: 1052157 - DNA, 15 bp, Homo sapiens
ggtaggcaagcacac

SEQ ID NO: 1052158 - DNA, 15 bp, Homo sapiens
aggtaggcaagcaca

SEQ ID NO: 1052159 - DNA, 15 bp, Homo sapiens
caggtaggcaagcac

SEQ ID NO: 1052160 - DNA, 15 bp, Homo sapiens
acaggtaggcaagca

SEQ ID NO: 1052161 - DNA, 15 bp, Homo sapiens
aacaggtaggcaagc

SEQ ID NO: 1052162 - DNA, 15 bp, Homo sapiens
aaacaggtaggcaag

SEQ ID NO: 1052163 - DNA, 15 bp, Homo sapiens
gaaacaggtaggcaa

SEQ ID NO: 1052164 - DNA, 15 bp, Homo sapiens
tgaaacaggtaggca

SEQ ID NO: 1052165 - DNA, 15 bp, Homo sapiens
atgaaacaggtaggc

SEQ ID NO: 1052166 - DNA, 15 bp, Homo sapiens
catgaaacaggtagg

SEQ ID NO: 1052167 - DNA, 15 bp, Homo sapiens
ccatgaaacaggtag

SEQ ID NO: 1052168 - DNA, 15 bp, Homo sapiens
cccatgaaacaggta

SEQ ID NO: 1052169 - DNA, 15 bp, Homo sapiens
tcccatgaaacaggt

SEQ ID NO: 1052170 - DNA, 15 bp, Homo sapiens
ttcccatgaaacagg

SEQ ID NO: 1052171 - DNA, 15 bp, Homo sapiens
attcccatgaaacag

SEQ ID NO: 1052172 - DNA, 15 bp, Homo sapiens
cattcccatgaaaca

SEQ ID NO: 1052173 - DNA, 15 bp, Homo sapiens
tcattcccatgaaac

SEQ ID NO: 1052174 - DNA, 15 bp, Homo sapiens
ctcattcccatgaaa

SEQ ID NO: 1052175 - DNA, 15 bp, Homo sapiens
actcattcccatgaa

SEQ ID NO: 1052176 - DNA, 15 bp, Homo sapiens
tactcattcccatga

SEQ ID NO: 1052177 - DNA, 15 bp, Homo sapiens
atactcattcccatg

SEQ ID NO: 1052178 - DNA, 15 bp, Homo sapiens
aatactcattcccat

SEQ ID NO: 1052179 - DNA, 15 bp, Homo sapiens
aaatactcattccca

SEQ ID NO: 1052180 - DNA, 15 bp, Homo sapiens
gaaatactcattccc

SEQ ID NO: 1052181 - DNA, 15 bp, Homo sapiens
agaaatactcattcc

SEQ ID NO: 1052182 - DNA, 15 bp, Homo sapiens
aagaaatactcattc

SEQ ID NO: 1052183 - DNA, 15 bp, Homo sapiens
caagaaatactcatt

SEQ ID NO: 1052184 - DNA, 15 bp, Homo sapiens
tcaagaaatactcat

SEQ ID NO: 1052185 - DNA, 15 bp, Homo sapiens
ttcaagaaatactca

SEQ ID NO: 1052186 - DNA, 15 bp, Homo sapiens
cttcaagaaatactc

SEQ ID NO: 1052187 - DNA, 15 bp, Homo sapiens
ccttcaagaaatact

SEQ ID NO: 1052188 - DNA, 15 bp, Homo sapiens
gccttcaagaaatac

SEQ ID NO: 1052189 - DNA, 15 bp, Homo sapiens
tgccttcaagaaata

SEQ ID NO: 1052190 - DNA, 15 bp, Homo sapiens
ttgccttcaagaaat

SEQ ID NO: 1052191 - DNA, 15 bp, Homo sapiens
cttgccttcaagaaa

SEQ ID NO: 1052192 - DNA, 15 bp, Homo sapiens
gcttgccttcaagaa

SEQ ID NO: 1052193 - DNA, 15 bp, Homo sapiens
cgcttgccttcaaga

SEQ ID NO: 1052194 - DNA, 15 bp, Homo sapiens
acgcttgccttcaag

SEQ ID NO: 1052195 - DNA, 15 bp, Homo sapiens
gacgcttgccttcaa

SEQ ID NO: 1052196 - DNA, 15 bp, Homo sapiens
tgacgcttgccttca

SEQ ID NO: 1052197 - DNA, 15 bp, Homo sapiens
atgacgcttgccttc

SEQ ID NO: 1052198 - DNA, 15 bp, Homo sapiens
catgacgcttgcctt

SEQ ID NO: 1052199 - DNA, 15 bp, Homo sapiens
acatgacgcttgcct

SEQ ID NO: 1052200 - DNA, 15 bp, Homo sapiens
tacatgacgcttgcc

SEQ ID NO: 1052201 - DNA, 15 bp, Homo sapiens
ttacatgacgcttgc

SEQ ID NO: 1052202 - DNA, 15 bp, Homo sapiens
attacatgacgcttg

SEQ ID NO: 1052203 - DNA, 15 bp, Homo sapiens
aattacatgacgctt

SEQ ID NO: 1052204 - DNA, 15 bp, Homo sapiens
aaattacatgacgct

SEQ ID NO: 1052205 - DNA, 15 bp, Homo sapiens
aaaattacatgacgc

SEQ ID NO: 1052206 - DNA, 15 bp, Homo sapiens
gaaaattacatgacg

SEQ ID NO: 1052207 - DNA, 15 bp, Homo sapiens
agaaaattacatgac

SEQ ID NO: 1052208 - DNA, 15 bp, Homo sapiens
aagaaaattacatga

SEQ ID NO: 1052209 - DNA, 15 bp, Homo sapiens
gaagaaaattacatg

SEQ ID NO: 1052210 - DNA, 15 bp, Homo sapiens
agaagaaaattacat

SEQ ID NO: 1052211 - DNA, 15 bp, Homo sapiens
tagaagaaaattaca

SEQ ID NO: 1052212 - DNA, 15 bp, Homo sapiens
atagaagaaaattac

SEQ ID NO: 1052213 - DNA, 15 bp, Homo sapiens
catagaagaaaatta

SEQ ID NO: 1052214 - DNA, 15 bp, Homo sapiens
tcatagaagaaaatt

SEQ ID NO: 1052215 - DNA, 15 bp, Homo sapiens
atcatagaagaaaat

SEQ ID NO: 1052216 - DNA, 15 bp, Homo sapiens
tatcatagaagaaaa

SEQ ID NO: 1052217 - DNA, 15 bp, Homo sapiens
ttatcatagaagaaa

SEQ ID NO: 1052218 - DNA, 15 bp, Homo sapiens
cttatcatagaagaa

SEQ ID NO: 1052219 - DNA, 15 bp, Homo sapiens
ccttatcatagaaga

SEQ ID NO: 1052220 - DNA, 15 bp, Homo sapiens
tccttatcatagaag

SEQ ID NO: 1052221 - DNA, 15 bp, Homo sapiens
atccttatcatagaa

SEQ ID NO: 1052222 - DNA, 15 bp, Homo sapiens
tatccttatcataga

SEQ ID NO: 1052223 - DNA, 15 bp, Homo sapiens
atatccttatcatag

SEQ ID NO: 1052224 - DNA, 15 bp, Homo sapiens
aatatccttatcata

SEQ ID NO: 1052225 - DNA, 15 bp, Homo sapiens
aaatatccttatcat

SEQ ID NO: 1052226 - DNA, 15 bp, Homo sapiens
taaatatccttatca

SEQ ID NO: 1052227 - DNA, 15 bp, Homo sapiens
ttaaatatccttatc

SEQ ID NO: 1052228 - DNA, 15 bp, Homo sapiens
cttaaatatccttat

SEQ ID NO: 1052229 - DNA, 15 bp, Homo sapiens
ccttaaatatcctta

SEQ ID NO: 1052230 - DNA, 15 bp, Homo sapiens
accttaaatatcctt

SEQ ID NO: 1052231 - DNA, 15 bp, Homo sapiens
caccttaaatatcct

SEQ ID NO: 1052232 - DNA, 15 bp, Homo sapiens
acaccttaaatatcc

SEQ ID NO: 1052233 - DNA, 15 bp, Homo sapiens
aacaccttaaatatc

SEQ ID NO: 1052234 - DNA, 15 bp, Homo sapiens
aaacaccttaaatat

SEQ ID NO: 1052235 - DNA, 15 bp, Homo sapiens
taaacaccttaaata

SEQ ID NO: 1052236 - DNA, 15 bp, Homo sapiens
ataaacaccttaaat

SEQ ID NO: 1052237 - DNA, 15 bp, Homo sapiens
aataaacaccttaaa

SEQ ID NO: 1052238 - DNA, 15 bp, Homo sapiens
caataaacaccttaa

SEQ ID NO: 1052239 - DNA, 15 bp, Homo sapiens
ccaataaacacctta

SEQ ID NO: 1052240 - DNA, 15 bp, Homo sapiens
tccaataaacacctt

SEQ ID NO: 1052241 - DNA, 15 bp, Homo sapiens
gtccaataaacacct

SEQ ID NO: 1052242 - DNA, 15 bp, Homo sapiens
ggtccaataaacacc

SEQ ID NO: 1052243 - DNA, 15 bp, Homo sapiens
gggtccaataaacac

SEQ ID NO: 1052244 - DNA, 15 bp, Homo sapiens
tgggtccaataaaca

SEQ ID NO: 1052245 - DNA, 15 bp, Homo sapiens
gtgggtccaataaac

SEQ ID NO: 1052246 - DNA, 15 bp, Homo sapiens
agtgggtccaataaa

SEQ ID NO: 1052247 - DNA, 15 bp, Homo sapiens
tagtgggtccaataa

SEQ ID NO: 1052248 - DNA, 15 bp, Homo sapiens
ttagtgggtccaata

SEQ ID NO: 1052249 - DNA, 15 bp, Homo sapiens
gttagtgggtccaat

SEQ ID NO: 1052250 - DNA, 15 bp, Homo sapiens
ggttagtgggtccaa

SEQ ID NO: 1052251 - DNA, 15 bp, Homo sapiens
tggttagtgggtcca

SEQ ID NO: 1052252 - DNA, 15 bp, Homo sapiens
atggttagtgggtcc

SEQ ID NO: 1052253 - DNA, 15 bp, Homo sapiens
aatggttagtgggtc

SEQ ID NO: 1052254 - DNA, 15 bp, Homo sapiens
caatggttagtgggt

SEQ ID NO: 1052255 - DNA, 15 bp, Homo sapiens
ccaatggttagtggg

SEQ ID NO: 1052256 - DNA, 15 bp, Homo sapiens
accaatggttagtgg

SEQ ID NO: 1052257 - DNA, 15 bp, Homo sapiens
aaccaatggttagtg

SEQ ID NO: 1052258 - DNA, 15 bp, Homo sapiens
caaccaatggttagt

SEQ ID NO: 1052259 - DNA, 15 bp, Homo sapiens
gcaaccaatggttag

SEQ ID NO: 1052260 - DNA, 15 bp, Homo sapiens
ggcaaccaatggtta

SEQ ID NO: 1052261 - DNA, 15 bp, Homo sapiens
tggcaaccaatggtt

SEQ ID NO: 1052262 - DNA, 15 bp, Homo sapiens
ttggcaaccaatggt

SEQ ID NO: 1052263 - DNA, 15 bp, Homo sapiens
cttggcaaccaatgg

SEQ ID NO: 1052264 - DNA, 15 bp, Homo sapiens
acttggcaaccaatg

SEQ ID NO: 1052265 - DNA, 15 bp, Homo sapiens
cacttggcaaccaat

SEQ ID NO: 1052266 - DNA, 15 bp, Homo sapiens
tcacttggcaaccaa

SEQ ID NO: 1052267 - DNA, 15 bp, Homo sapiens
ttcacttggcaacca

SEQ ID NO: 1052268 - DNA, 15 bp, Homo sapiens
cttcacttggcaacc

SEQ ID NO: 1052269 - DNA, 15 bp, Homo sapiens
tcttcacttggcaac

SEQ ID NO: 1052270 - DNA, 15 bp, Homo sapiens
ctcttcacttggcaa

SEQ ID NO: 1052271 - DNA, 15 bp, Homo sapiens
tctcttcacttggca

SEQ ID NO: 1052272 - DNA, 15 bp, Homo sapiens
atctcttcacttggc

SEQ ID NO: 1052273 - DNA, 15 bp, Homo sapiens
catctcttcacttgg

SEQ ID NO: 1052274 - DNA, 15 bp, Homo sapiens
ccatctcttcacttg

SEQ ID NO: 1052275 - DNA, 15 bp, Homo sapiens
cccatctcttcactt

SEQ ID NO: 1052276 - DNA, 15 bp, Homo sapiens
gcccatctcttcact

SEQ ID NO: 1052277 - DNA, 15 bp, Homo sapiens
agcccatctcttcac

SEQ ID NO: 1052278 - DNA, 15 bp, Homo sapiens
aagcccatctcttca

SEQ ID NO: 1052279 - DNA, 15 bp, Homo sapiens
gaagcccatctcttc

SEQ ID NO: 1052280 - DNA, 15 bp, Homo sapiens
tgaagcccatctctt

SEQ ID NO: 1052281 - DNA, 15 bp, Homo sapiens
ctgaagcccatctct

SEQ ID NO: 1052282 - DNA, 15 bp, Homo sapiens
tctgaagcccatctc

SEQ ID NO: 1052283 - DNA, 15 bp, Homo sapiens
gtctgaagcccatct

SEQ ID NO: 1052284 - DNA, 15 bp, Homo sapiens
agtctgaagcccatc

SEQ ID NO: 1052285 - DNA, 15 bp, Homo sapiens
cagtctgaagcccat

SEQ ID NO: 1052286 - DNA, 15 bp, Homo sapiens
acagtctgaagccca

SEQ ID NO: 1052287 - DNA, 15 bp, Homo sapiens
cacagtctgaagccc

SEQ ID NO: 1052288 - DNA, 15 bp, Homo sapiens
tcacagtctgaagcc

SEQ ID NO: 1052289 - DNA, 15 bp, Homo sapiens
atcacagtctgaagc

SEQ ID NO: 1052290 - DNA, 15 bp, Homo sapiens
catcacagtctgaag

SEQ ID NO: 1052291 - DNA, 15 bp, Homo sapiens
tcatcacagtctgaa

SEQ ID NO: 1052292 - DNA, 15 bp, Homo sapiens
ctcatcacagtctga

SEQ ID NO: 1052293 - DNA, 15 bp, Homo sapiens
actcatcacagtctg

SEQ ID NO: 1052294 - DNA, 15 bp, Homo sapiens
cactcatcacagtct

SEQ ID NO: 1052295 - DNA, 15 bp, Homo sapiens
tcactcatcacagtc

SEQ ID NO: 1052296 - DNA, 15 bp, Homo sapiens
atcactcatcacagt

SEQ ID NO: 1052297 - DNA, 15 bp, Homo sapiens
tatcactcatcacag

SEQ ID NO: 1052298 - DNA, 15 bp, Homo sapiens
ttatcactcatcaca

SEQ ID NO: 1052299 - DNA, 15 bp, Homo sapiens
tttatcactcatcac

SEQ ID NO: 1052300 - DNA, 15 bp, Homo sapiens
ttttatcactcatca

SEQ ID NO: 1052301 - DNA, 15 bp, Homo sapiens
cttttatcactcatc

SEQ ID NO: 1052302 - DNA, 15 bp, Homo sapiens
tcttttatcactcat

SEQ ID NO: 1052303 - DNA, 15 bp, Homo sapiens
ctcttttatcactca

SEQ ID NO: 1052304 - DNA, 15 bp, Homo sapiens
actcttttatcactc

SEQ ID NO: 1052305 - DNA, 15 bp, Homo sapiens
aactcttttatcact

SEQ ID NO: 1052306 - DNA, 15 bp, Homo sapiens
gaactcttttatcac

SEQ ID NO: 1052307 - DNA, 15 bp, Homo sapiens
agaactcttttatca

SEQ ID NO: 1052308 - DNA, 15 bp, Homo sapiens
cagaactcttttatc

SEQ ID NO: 1052309 - DNA, 15 bp, Homo sapiens
gcagaactcttttat

SEQ ID NO: 1052310 - DNA, 15 bp, Homo sapiens
ggcagaactctttta

SEQ ID NO: 1052311 - DNA, 15 bp, Homo sapiens
aggcagaactctttt

SEQ ID NO: 1052312 - DNA, 15 bp, Homo sapiens
taggcagaactcttt

SEQ ID NO: 1052313 - DNA, 15 bp, Homo sapiens
gtaggcagaactctt

SEQ ID NO: 1052314 - DNA, 15 bp, Homo sapiens
agtaggcagaactct

SEQ ID NO: 1052315 - DNA, 15 bp, Homo sapiens
cagtaggcagaactc

SEQ ID NO: 1052316 - DNA, 15 bp, Homo sapiens
acagtaggcagaact

SEQ ID NO: 1052317 - DNA, 15 bp, Homo sapiens
cacagtaggcagaac

SEQ ID NO: 1052318 - DNA, 15 bp, Homo sapiens
ccacagtaggcagaa

SEQ ID NO: 1052319 - DNA, 15 bp, Homo sapiens
tccacagtaggcaga

SEQ ID NO: 1052320 - DNA, 15 bp, Homo sapiens
ttccacagtaggcag

SEQ ID NO: 1052321 - DNA, 15 bp, Homo sapiens
gttccacagtaggca

SEQ ID NO: 1052322 - DNA, 15 bp, Homo sapiens
ggttccacagtaggc

SEQ ID NO: 1052323 - DNA, 15 bp, Homo sapiens
aggttccacagtagg

SEQ ID NO: 1052324 - DNA, 15 bp, Homo sapiens
caggttccacagtag

SEQ ID NO: 1052325 - DNA, 15 bp, Homo sapiens
gcaggttccacagta

SEQ ID NO: 1052326 - DNA, 15 bp, Homo sapiens
agcaggttccacagt

SEQ ID NO: 1052327 - DNA, 15 bp, Homo sapiens
cagcaggttccacag

SEQ ID NO: 1052328 - DNA, 15 bp, Homo sapiens
ccagcaggttccaca

SEQ ID NO: 1052329 - DNA, 15 bp, Homo sapiens
tccagcaggttccac

SEQ ID NO: 1052330 - DNA, 15 bp, Homo sapiens
ttccagcaggttcca

SEQ ID NO: 1052331 - DNA, 15 bp, Homo sapiens
gttccagcaggttcc

SEQ ID NO: 1052332 - DNA, 15 bp, Homo sapiens
agttccagcaggttc

SEQ ID NO: 1052333 - DNA, 15 bp, Homo sapiens
gagttccagcaggtt

SEQ ID NO: 1052334 - DNA, 15 bp, Homo sapiens
tgagttccagcaggt

SEQ ID NO: 1052335 - DNA, 15 bp, Homo sapiens
atgagttccagcagg

SEQ ID NO: 1052336 - DNA, 15 bp, Homo sapiens
gatgagttccagcag

SEQ ID NO: 1052337 - DNA, 15 bp, Homo sapiens
tgatgagttccagca

SEQ ID NO: 1052338 - DNA, 15 bp, Homo sapiens
gtgatgagttccagc

SEQ ID NO: 1052339 - DNA, 15 bp, Homo sapiens
agtgatgagttccag

SEQ ID NO: 1052340 - DNA, 15 bp, Homo sapiens
aagtgatgagttcca

SEQ ID NO: 1052341 - DNA, 15 bp, Homo sapiens
caagtgatgagttcc

SEQ ID NO: 1052342 - DNA, 15 bp, Homo sapiens
acaagtgatgagttc

SEQ ID NO: 1052343 - DNA, 15 bp, Homo sapiens
cacaagtgatgagtt

SEQ ID NO: 1052344 - DNA, 15 bp, Homo sapiens
gcacaagtgatgagt

SEQ ID NO: 1052345 - DNA, 15 bp, Homo sapiens
agcacaagtgatgag

SEQ ID NO: 1052346 - DNA, 15 bp, Homo sapiens
cagcacaagtgatga

SEQ ID NO: 1052347 - DNA, 15 bp, Homo sapiens
tcagcacaagtgatg

SEQ ID NO: 1052348 - DNA, 15 bp, Homo sapiens
ttcagcacaagtgat

SEQ ID NO: 1052349 - DNA, 15 bp, Homo sapiens
tttcagcacaagtga

SEQ ID NO: 1052350 - DNA, 15 bp, Homo sapiens
ctttcagcacaagtg

SEQ ID NO: 1052351 - DNA, 15 bp, Homo sapiens
actttcagcacaagt

SEQ ID NO: 1052352 - DNA, 15 bp, Homo sapiens
cactttcagcacaag

SEQ ID NO: 1052353 - DNA, 15 bp, Homo sapiens
gcactttcagcacaa

SEQ ID NO: 1052354 - DNA, 15 bp, Homo sapiens
tgcactttcagcaca

SEQ ID NO: 1052355 - DNA, 15 bp, Homo sapiens
ttgcactttcagcac

SEQ ID NO: 1052356 - DNA, 15 bp, Homo sapiens
gttgcactttcagca

SEQ ID NO: 1052357 - DNA, 15 bp, Homo sapiens
tgttgcactttcagc

SEQ ID NO: 1052358 - DNA, 15 bp, Homo sapiens
atgttgcactttcag

SEQ ID NO: 1052359 - DNA, 15 bp, Homo sapiens
gatgttgcactttca

SEQ ID NO: 1052360 - DNA, 15 bp, Homo sapiens
ggatgttgcactttc

SEQ ID NO: 1052361 - DNA, 15 bp, Homo sapiens
gggatgttgcacttt

SEQ ID NO: 1052362 - DNA, 15 bp, Homo sapiens
ggggatgttgcactt

SEQ ID NO: 1052363 - DNA, 15 bp, Homo sapiens
tggggatgttgcact

SEQ ID NO: 1052364 - DNA, 15 bp, Homo sapiens
gtggggatgttgcac

SEQ ID NO: 1052365 - DNA, 15 bp, Homo sapiens
ggtggggatgttgca

SEQ ID NO: 1052366 - DNA, 15 bp, Homo sapiens
tggtggggatgttgc

SEQ ID NO: 1052367 - DNA, 15 bp, Homo sapiens
gtggtggggatgttg

SEQ ID NO: 1052368 - DNA, 15 bp, Homo sapiens
tgtggtggggatgtt

SEQ ID NO: 1052369 - DNA, 15 bp, Homo sapiens
gtgtggtggggatgt

SEQ ID NO: 1052370 - DNA, 15 bp, Homo sapiens
tgtgtggtggggatg

SEQ ID NO: 1052371 - DNA, 15 bp, Homo sapiens
gtgtgtggtggggat

SEQ ID NO: 1052372 - DNA, 15 bp, Homo sapiens
tgtgtgtggtgggga

SEQ ID NO: 1052373 - DNA, 15 bp, Homo sapiens
gtgtgtgtggtgggg

SEQ ID NO: 1052374 - DNA, 15 bp, Homo sapiens
tgtgtgtgtggtggg

SEQ ID NO: 1052375 - DNA, 15 bp, Homo sapiens
gtgtgtgtgtggtgg

SEQ ID NO: 1052376 - DNA, 15 bp, Homo sapiens
tgtgtgtgtgtggtg

SEQ ID NO: 1052377 - DNA, 15 bp, Homo sapiens
gtgtgtgtgtgtggt

SEQ ID NO: 1052378 - DNA, 15 bp, Homo sapiens
tgtgtgtgtgtgtgg

SEQ ID NO: 1052379 - DNA, 15 bp, Homo sapiens
agtgtgtgtatgtgt

SEQ ID NO: 1052380 - DNA, 15 bp, Homo sapiens
cagtgtgtgtatgtg

SEQ ID NO: 1052381 - DNA, 15 bp, Homo sapiens
tcagtgtgtgtatgt

SEQ ID NO: 1052382 - DNA, 15 bp, Homo sapiens
ctcagtgtgtgtatg

SEQ ID NO: 1052383 - DNA, 15 bp, Homo sapiens
tctcagtgtgtgtat

SEQ ID NO: 1052384 - DNA, 15 bp, Homo sapiens
ttctcagtgtgtgta

SEQ ID NO: 1052385 - DNA, 15 bp, Homo sapiens
cttctcagtgtgtgt

SEQ ID NO: 1052386 - DNA, 15 bp, Homo sapiens
ccttctcagtgtgtg

SEQ ID NO: 1052387 - DNA, 15 bp, Homo sapiens
tccttctcagtgtgt

SEQ ID NO: 1052388 - DNA, 15 bp, Homo sapiens
ctccttctcagtgtg

SEQ ID NO: 1052389 - DNA, 15 bp, Homo sapiens
cctccttctcagtgt

SEQ ID NO: 1052390 - DNA, 15 bp, Homo sapiens
tcctccttctcagtg

SEQ ID NO: 1052391 - DNA, 15 bp, Homo sapiens
ctcctccttctcagt

SEQ ID NO: 1052392 - DNA, 15 bp, Homo sapiens
cctcctccttctcag

SEQ ID NO: 1052393 - DNA, 15 bp, Homo sapiens
tcctcctccttctca

SEQ ID NO: 1052394 - DNA, 15 bp, Homo sapiens
ctcctcctccttctc

SEQ ID NO: 1052395 - DNA, 15 bp, Homo sapiens
cctcctcctccttct

SEQ ID NO: 1052396 - DNA, 15 bp, Homo sapiens
acctcctcctccttc

SEQ ID NO: 1052397 - DNA, 15 bp, Homo sapiens
tacctcctcctcctt

SEQ ID NO: 1052398 - DNA, 15 bp, Homo sapiens
atacctcctcctcct

SEQ ID NO: 1052399 - DNA, 15 bp, Homo sapiens
catacctcctcctcc

SEQ ID NO: 1052400 - DNA, 15 bp, Homo sapiens
tcatacctcctcctc

SEQ ID NO: 1052401 - DNA, 15 bp, Homo sapiens
ctcatacctcctcct

SEQ ID NO: 1052402 - DNA, 15 bp, Homo sapiens
actcatacctcctcc

SEQ ID NO: 1052403 - DNA, 15 bp, Homo sapiens
cactcatacctcctc

SEQ ID NO: 1052404 - DNA, 15 bp, Homo sapiens
acactcatacctcct

SEQ ID NO: 1052405 - DNA, 15 bp, Homo sapiens
gacactcatacctcc

SEQ ID NO: 1052406 - DNA, 15 bp, Homo sapiens
ggacactcatacctc

SEQ ID NO: 1052407 - DNA, 15 bp, Homo sapiens
aggacactcatacct

SEQ ID NO: 1052408 - DNA, 15 bp, Homo sapiens
taggacactcatacc

SEQ ID NO: 1052409 - DNA, 15 bp, Homo sapiens
gtaggacactcatac

SEQ ID NO: 1052410 - DNA, 15 bp, Homo sapiens
ggtaggacactcata

SEQ ID NO: 1052411 - DNA, 15 bp, Homo sapiens
tggtaggacactcat

SEQ ID NO: 1052412 - DNA, 15 bp, Homo sapiens
atggtaggacactca

SEQ ID NO: 1052413 - DNA, 15 bp, Homo sapiens
tatggtaggacactc

SEQ ID NO: 1052414 - DNA, 15 bp, Homo sapiens
ctatggtaggacact

SEQ ID NO: 1052415 - DNA, 15 bp, Homo sapiens
tctatggtaggacac

SEQ ID NO: 1052416 - DNA, 15 bp, Homo sapiens
ctctatggtaggaca

SEQ ID NO: 1052417 - DNA, 15 bp, Homo sapiens
tctctatggtaggac

SEQ ID NO: 1052418 - DNA, 15 bp, Homo sapiens
atctctatggtagga

SEQ ID NO: 1052419 - DNA, 15 bp, Homo sapiens
catctctatggtagg

SEQ ID NO: 1052420 - DNA, 15 bp, Homo sapiens
ccatctctatggtag

SEQ ID NO: 1052421 - DNA, 15 bp, Homo sapiens
gccatctctatggta

SEQ ID NO: 1052422 - DNA, 15 bp, Homo sapiens
ggccatctctatggt

SEQ ID NO: 1052423 - DNA, 15 bp, Homo sapiens
aggccatctctatgg

SEQ ID NO: 1052424 - DNA, 15 bp, Homo sapiens
gaggccatctctatg

SEQ ID NO: 1052425 - DNA, 15 bp, Homo sapiens
tgaggccatctctat

SEQ ID NO: 1052426 - DNA, 15 bp, Homo sapiens
ctgaggccatctcta

SEQ ID NO: 1052427 - DNA, 15 bp, Homo sapiens
actgaggccatctct

SEQ ID NO: 1052428 - DNA, 15 bp, Homo sapiens
cactgaggccatctc

SEQ ID NO: 1052429 - DNA, 15 bp, Homo sapiens
ccactgaggccatct

SEQ ID NO: 1052430 - DNA, 15 bp, Homo sapiens
accactgaggccatc

SEQ ID NO: 1052431 - DNA, 15 bp, Homo sapiens
aaccactgaggccat

SEQ ID NO: 1052432 - DNA, 15 bp, Homo sapiens
taaccactgaggcca

SEQ ID NO: 1052433 - DNA, 15 bp, Homo sapiens
gtaaccactgaggcc

SEQ ID NO: 1052434 - DNA, 15 bp, Homo sapiens
ggtaaccactgaggc

SEQ ID NO: 1052435 - DNA, 15 bp, Homo sapiens
aggtaaccactgagg

SEQ ID NO: 1052436 - DNA, 15 bp, Homo sapiens
aaggtaaccactgag

SEQ ID NO: 1052437 - DNA, 15 bp, Homo sapiens
taaggtaaccactga

SEQ ID NO: 1052438 - DNA, 15 bp, Homo sapiens
gtaaggtaaccactg

SEQ ID NO: 1052439 - DNA, 15 bp, Homo sapiens
ggtaaggtaaccact

SEQ ID NO: 1052440 - DNA, 15 bp, Homo sapiens
aggtaaggtaaccac

SEQ ID NO: 1052441 - DNA, 15 bp, Homo sapiens
caggtaaggtaacca

SEQ ID NO: 1052442 - DNA, 15 bp, Homo sapiens
acaggtaaggtaacc

SEQ ID NO: 1052443 - DNA, 15 bp, Homo sapiens
cacaggtaaggtaac

SEQ ID NO: 1052444 - DNA, 15 bp, Homo sapiens
acacaggtaaggtaa

SEQ ID NO: 1052445 - DNA, 15 bp, Homo sapiens
aacacaggtaaggta

SEQ ID NO: 1052446 - DNA, 15 bp, Homo sapiens
gaacacaggtaaggt

SEQ ID NO: 1052447 - DNA, 15 bp, Homo sapiens
tgaacacaggtaagg

SEQ ID NO: 1052448 - DNA, 15 bp, Homo sapiens
gtgaacacaggtaag

SEQ ID NO: 1052449 - DNA, 15 bp, Homo sapiens
agtgaacacaggtaa

SEQ ID NO: 1052450 - DNA, 15 bp, Homo sapiens
gagtgaacacaggta

SEQ ID NO: 1052451 - DNA, 15 bp, Homo sapiens
tgagtgaacacaggt

SEQ ID NO: 1052452 - DNA, 15 bp, Homo sapiens
ttgagtgaacacagg

SEQ ID NO: 1052453 - DNA, 15 bp, Homo sapiens
cttgagtgaacacag

SEQ ID NO: 1052454 - DNA, 15 bp, Homo sapiens
tcttgagtgaacaca

SEQ ID NO: 1052455 - DNA, 15 bp, Homo sapiens
ctcttgagtgaacac

SEQ ID NO: 1052456 - DNA, 15 bp, Homo sapiens
gctcttgagtgaaca

SEQ ID NO: 1052457 - DNA, 15 bp, Homo sapiens
agctcttgagtgaac

SEQ ID NO: 1052458 - DNA, 15 bp, Homo sapiens
tagctcttgagtgaa

SEQ ID NO: 1052459 - DNA, 15 bp, Homo sapiens
ttagctcttgagtga

SEQ ID NO: 1052460 - DNA, 15 bp, Homo sapiens
tttagctcttgagtg

SEQ ID NO: 1052461 - DNA, 15 bp, Homo sapiens
ttttagctcttgagt

SEQ ID NO: 1052462 - DNA, 15 bp, Homo sapiens
attttagctcttgag

SEQ ID NO: 1052463 - DNA, 15 bp, Homo sapiens
cattttagctcttga

SEQ ID NO: 1052464 - DNA, 15 bp, Homo sapiens
acattttagctcttg

SEQ ID NO: 1052465 - DNA, 15 bp, Homo sapiens
gaacattttagctct

SEQ ID NO: 1052466 - DNA, 15 bp, Homo sapiens
agaacattttagctc

SEQ ID NO: 1052467 - DNA, 15 bp, Homo sapiens
gagaacattttagct

SEQ ID NO: 1052468 - DNA, 15 bp, Homo sapiens
ggagaacattttagc

SEQ ID NO: 1052469 - DNA, 15 bp, Homo sapiens
gggagaacattttag

SEQ ID NO: 1052470 - DNA, 15 bp, Homo sapiens
ggggagaacatttta

SEQ ID NO: 1052471 - DNA, 15 bp, Homo sapiens
tggggagaacatttt

SEQ ID NO: 1052472 - DNA, 15 bp, Homo sapiens
ttggggagaacattt

SEQ ID NO: 1052473 - DNA, 15 bp, Homo sapiens
gttggggagaacatt

SEQ ID NO: 1052474 - DNA, 15 bp, Homo sapiens
cgttggggagaacat

SEQ ID NO: 1052475 - DNA, 15 bp, Homo sapiens
acgttggggagaaca

SEQ ID NO: 1052476 - DNA, 15 bp, Homo sapiens
gacgttggggagaac

SEQ ID NO: 1052477 - DNA, 15 bp, Homo sapiens
tgacgttggggagaa

SEQ ID NO: 1052478 - DNA, 15 bp, Homo sapiens
atgacgttggggaga

SEQ ID NO: 1052479 - DNA, 15 bp, Homo sapiens
gatgacgttggggag

SEQ ID NO: 1052480 - DNA, 15 bp, Homo sapiens
agatgacgttgggga

SEQ ID NO: 1052481 - DNA, 15 bp, Homo sapiens
gagatgacgttgggg

SEQ ID NO: 1052482 - DNA, 15 bp, Homo sapiens
agagatgacgttggg

SEQ ID NO: 1052483 - DNA, 15 bp, Homo sapiens
gagagatgacgttgg

SEQ ID NO: 1052484 - DNA, 15 bp, Homo sapiens
tgagagatgacgttg

SEQ ID NO: 1052485 - DNA, 15 bp, Homo sapiens
atgagagatgacgtt

SEQ ID NO: 1052486 - DNA, 15 bp, Homo sapiens
gatgagagatgacgt

SEQ ID NO: 1052487 - DNA, 15 bp, Homo sapiens
agatgagagatgacg

SEQ ID NO: 1052488 - DNA, 15 bp, Homo sapiens
aagatgagagatgac

SEQ ID NO: 1052489 - DNA, 15 bp, Homo sapiens
aaagatgagagatga

SEQ ID NO: 1052490 - DNA, 15 bp, Homo sapiens
caaagatgagagatg

SEQ ID NO: 1052491 - DNA, 15 bp, Homo sapiens
ccaaagatgagagat

SEQ ID NO: 1052492 - DNA, 15 bp, Homo sapiens
cccaaagatgagaga

SEQ ID NO: 1052493 - DNA, 15 bp, Homo sapiens
acccaaagatgagag

SEQ ID NO: 1052494 - DNA, 15 bp, Homo sapiens
tacccaaagatgaga

SEQ ID NO: 1052495 - DNA, 15 bp, Homo sapiens
atacccaaagatgag

SEQ ID NO: 1052496 - DNA, 15 bp, Homo sapiens
aatacccaaagatga

SEQ ID NO: 1052497 - DNA, 15 bp, Homo sapiens
aaatacccaaagatg

SEQ ID NO: 1052498 - DNA, 15 bp, Homo sapiens
taaatacccaaagat

SEQ ID NO: 1052499 - DNA, 15 bp, Homo sapiens
ttaaatacccaaaga

SEQ ID NO: 1052500 - DNA, 15 bp, Homo sapiens
tttaaatacccaaag

SEQ ID NO: 1052501 - DNA, 15 bp, Homo sapiens
atttaaatacccaaa

SEQ ID NO: 1052502 - DNA, 15 bp, Homo sapiens
tatttaaatacccaa

SEQ ID NO: 1052503 - DNA, 15 bp, Homo sapiens
atatttaaataccca

SEQ ID NO: 1052504 - DNA, 15 bp, Homo sapiens
gatatttaaataccc

SEQ ID NO: 1052505 - DNA, 15 bp, Homo sapiens
agatatttaaatacc

SEQ ID NO: 1052506 - DNA, 15 bp, Homo sapiens
tagatatttaaatac

SEQ ID NO: 1052507 - DNA, 15 bp, Homo sapiens
tttagatatttaaat

SEQ ID NO: 1052508 - DNA, 15 bp, Homo sapiens
ttttagatatttaaa

SEQ ID NO: 1052509 - DNA, 15 bp, Homo sapiens
attttagatatttaa

SEQ ID NO: 1052510 - DNA, 15 bp, Homo sapiens
tattttagatattta

SEQ ID NO: 1052511 - DNA, 15 bp, Homo sapiens
atattttagatattt

SEQ ID NO: 1052512 - DNA, 15 bp, Homo sapiens
catattttagatatt

SEQ ID NO: 1052513 - DNA, 15 bp, Homo sapiens
acatattttagatat

SEQ ID NO: 1052514 - DNA, 15 bp, Homo sapiens
aacatattttagata

SEQ ID NO: 1052515 - DNA, 15 bp, Homo sapiens
aaacatattttagat

SEQ ID NO: 1052516 - DNA, 15 bp, Homo sapiens
aaaacatattttaga

SEQ ID NO: 1052517 - DNA, 15 bp, Homo sapiens
caaaacatattttag

SEQ ID NO: 1052518 - DNA, 15 bp, Homo sapiens
ccaaaacatatttta

SEQ ID NO: 1052519 - DNA, 15 bp, Homo sapiens
cccaaaacatatttt

SEQ ID NO: 1052520 - DNA, 15 bp, Homo sapiens
ccccaaaacatattt

SEQ ID NO: 1052521 - DNA, 15 bp, Homo sapiens
tccccaaaacatatt

SEQ ID NO: 1052522 - DNA, 15 bp, Homo sapiens
atccccaaaacatat

SEQ ID NO: 1052523 - DNA, 15 bp, Homo sapiens
catccccaaaacata

SEQ ID NO: 1052524 - DNA, 15 bp, Homo sapiens
gcatccccaaaacat

SEQ ID NO: 1052525 - DNA, 15 bp, Homo sapiens
ggcatccccaaaaca

SEQ ID NO: 1052526 - DNA, 15 bp, Homo sapiens
gggcatccccaaaac

SEQ ID NO: 1052527 - DNA, 15 bp, Homo sapiens
agggcatccccaaaa

SEQ ID NO: 1052528 - DNA, 15 bp, Homo sapiens
cagggcatccccaaa

SEQ ID NO: 1052529 - DNA, 15 bp, Homo sapiens
ccagggcatccccaa

SEQ ID NO: 1052530 - DNA, 15 bp, Homo sapiens
accagggcatcccca

SEQ ID NO: 1052531 - DNA, 15 bp, Homo sapiens
taccagggcatcccc

SEQ ID NO: 1052532 - DNA, 15 bp, Homo sapiens
ctaccagggcatccc

SEQ ID NO: 1052533 - DNA, 15 bp, Homo sapiens
tctaccagggcatcc

SEQ ID NO: 1052534 - DNA, 15 bp, Homo sapiens
ttctaccagggcatc

SEQ ID NO: 1052535 - DNA, 15 bp, Homo sapiens
tttctaccagggcat

SEQ ID NO: 1052536 - DNA, 15 bp, Homo sapiens
atttctaccagggca

SEQ ID NO: 1052537 - DNA, 15 bp, Homo sapiens
aatttctaccagggc

SEQ ID NO: 1052538 - DNA, 15 bp, Homo sapiens
aaatttctaccaggg

SEQ ID NO: 1052539 - DNA, 15 bp, Homo sapiens
gaaatttctaccagg

SEQ ID NO: 1052540 - DNA, 15 bp, Homo sapiens
agaaatttctaccag

SEQ ID NO: 1052541 - DNA, 15 bp, Homo sapiens
tagaaatttctacca

SEQ ID NO: 1052542 - DNA, 15 bp, Homo sapiens
gtagaaatttctacc

SEQ ID NO: 1052543 - DNA, 15 bp, Homo sapiens
tgtagaaatttctac

SEQ ID NO: 1052544 - DNA, 15 bp, Homo sapiens
gtgtagaaatttcta

SEQ ID NO: 1052545 - DNA, 15 bp, Homo sapiens
tgtgtagaaatttct

SEQ ID NO: 1052546 - DNA, 15 bp, Homo sapiens
ctgtgtagaaatttc

SEQ ID NO: 1052547 - DNA, 15 bp, Homo sapiens
gctgtgtagaaattt

SEQ ID NO: 1052548 - DNA, 15 bp, Homo sapiens
agctgtgtagaaatt

SEQ ID NO: 1052549 - DNA, 15 bp, Homo sapiens
cagctgtgtagaaat

SEQ ID NO: 1052550 - DNA, 15 bp, Homo sapiens
acagctgtgtagaaa

SEQ ID NO: 1052551 - DNA, 15 bp, Homo sapiens
cacagctgtgtagaa

SEQ ID NO: 1052552 - DNA, 15 bp, Homo sapiens
gcacagctgtgtaga

SEQ ID NO: 1052553 - DNA, 15 bp, Homo sapiens
agcacagctgtgtag

SEQ ID NO: 1052554 - DNA, 15 bp, Homo sapiens
gagcacagctgtgta

SEQ ID NO: 1052555 - DNA, 15 bp, Homo sapiens
tgagcacagctgtgt

SEQ ID NO: 1052556 - DNA, 15 bp, Homo sapiens
ttgagcacagctgtg

SEQ ID NO: 1052557 - DNA, 15 bp, Homo sapiens
tttgagcacagctgt

SEQ ID NO: 1052558 - DNA, 15 bp, Homo sapiens
ttttgagcacagctg

SEQ ID NO: 1052559 - DNA, 15 bp, Homo sapiens
cttttgagcacagct

SEQ ID NO: 1052560 - DNA, 15 bp, Homo sapiens
ccttttgagcacagc

SEQ ID NO: 1052561 - DNA, 15 bp, Homo sapiens
tccttttgagcacag

SEQ ID NO: 1052562 - DNA, 15 bp, Homo sapiens
ctccttttgagcaca

SEQ ID NO: 1052563 - DNA, 15 bp, Homo sapiens
tctccttttgagcac

SEQ ID NO: 1052564 - DNA, 15 bp, Homo sapiens
ttctccttttgagca

SEQ ID NO: 1052565 - DNA, 15 bp, Homo sapiens
tttctccttttgagc

SEQ ID NO: 1052566 - DNA, 15 bp, Homo sapiens
ttttctccttttgag

SEQ ID NO: 1052567 - DNA, 15 bp, Homo sapiens
tttttctccttttga

SEQ ID NO: 1052568 - DNA, 15 bp, Homo sapiens
atttttctccttttg

SEQ ID NO: 1052569 - DNA, 15 bp, Homo sapiens
gatttttctcctttt

SEQ ID NO: 1052570 - DNA, 15 bp, Homo sapiens
agatttttctccttt

SEQ ID NO: 1052571 - DNA, 15 bp, Homo sapiens
tagatttttctcctt

SEQ ID NO: 1052572 - DNA, 15 bp, Homo sapiens
ctagatttttctcct

SEQ ID NO: 1052573 - DNA, 15 bp, Homo sapiens
actagatttttctcc

SEQ ID NO: 1052574 - DNA, 15 bp, Homo sapiens
aactagatttttctc

SEQ ID NO: 1052575 - DNA, 15 bp, Homo sapiens
aaactagatttttct

SEQ ID NO: 1052576 - DNA, 15 bp, Homo sapiens
caaactagatttttc

SEQ ID NO: 1052577 - DNA, 15 bp, Homo sapiens
ccaaactagattttt

SEQ ID NO: 1052578 - DNA, 15 bp, Homo sapiens
cccaaactagatttt

SEQ ID NO: 1052579 - DNA, 15 bp, Homo sapiens
acccaaactagattt

SEQ ID NO: 1052580 - DNA, 15 bp, Homo sapiens
aacccaaactagatt

SEQ ID NO: 1052581 - DNA, 15 bp, Homo sapiens
aaacccaaactagat

SEQ ID NO: 1052582 - DNA, 15 bp, Homo sapiens
gaaacccaaactaga

SEQ ID NO: 1052583 - DNA, 15 bp, Homo sapiens
agaaacccaaactag

SEQ ID NO: 1052584 - DNA, 15 bp, Homo sapiens
cagaaacccaaacta

SEQ ID NO: 1052585 - DNA, 15 bp, Homo sapiens
acagaaacccaaact

SEQ ID NO: 1052586 - DNA, 15 bp, Homo sapiens
aacagaaacccaaac

SEQ ID NO: 1052587 - DNA, 15 bp, Homo sapiens
gaacagaaacccaaa

SEQ ID NO: 1052588 - DNA, 15 bp, Homo sapiens
tgaacagaaacccaa

SEQ ID NO: 1052589 - DNA, 15 bp, Homo sapiens
ttgaacagaaaccca

SEQ ID NO: 1052590 - DNA, 15 bp, Homo sapiens
cttgaacagaaaccc

SEQ ID NO: 1052591 - DNA, 15 bp, Homo sapiens
tcttgaacagaaacc

SEQ ID NO: 1052592 - DNA, 15 bp, Homo sapiens
gtcttgaacagaaac

SEQ ID NO: 1052593 - DNA, 15 bp, Homo sapiens
agtcttgaacagaaa

SEQ ID NO: 1052594 - DNA, 15 bp, Homo sapiens
tagtcttgaacagaa

SEQ ID NO: 1052595 - DNA, 15 bp, Homo sapiens
ttagtcttgaacaga

SEQ ID NO: 1052596 - DNA, 15 bp, Homo sapiens
gttagtcttgaacag

SEQ ID NO: 1052597 - DNA, 15 bp, Homo sapiens
tgttagtcttgaaca

SEQ ID NO: 1052598 - DNA, 15 bp, Homo sapiens
gtgttagtcttgaac

SEQ ID NO: 1052599 - DNA, 15 bp, Homo sapiens
ggtgttagtcttgaa

SEQ ID NO: 1052600 - DNA, 15 bp, Homo sapiens
cggtgttagtcttga

SEQ ID NO: 1052601 - DNA, 15 bp, Homo sapiens
gcggtgttagtcttg

SEQ ID NO: 1052602 - DNA, 15 bp, Homo sapiens
agcggtgttagtctt

SEQ ID NO: 1052603 - DNA, 15 bp, Homo sapiens
cagcggtgttagtct

SEQ ID NO: 1052604 - DNA, 15 bp, Homo sapiens
ccagcggtgttagtc

SEQ ID NO: 1052605 - DNA, 15 bp, Homo sapiens
cccagcggtgttagt

SEQ ID NO: 1052606 - DNA, 15 bp, Homo sapiens
acccagcggtgttag

SEQ ID NO: 1052607 - DNA, 15 bp, Homo sapiens
aacccagcggtgtta

SEQ ID NO: 1052608 - DNA, 15 bp, Homo sapiens
aaacccagcggtgtt

SEQ ID NO: 1052609 - DNA, 15 bp, Homo sapiens
aaaacccagcggtgt

SEQ ID NO: 1052610 - DNA, 15 bp, Homo sapiens
aaaaacccagcggtg

SEQ ID NO: 1052611 - DNA, 15 bp, Homo sapiens
gaaaaacccagcggt

SEQ ID NO: 1052612 - DNA, 15 bp, Homo sapiens
tgaaaaacccagcgg

SEQ ID NO: 1052613 - DNA, 15 bp, Homo sapiens
ttgaaaaacccagcg

SEQ ID NO: 1052614 - DNA, 15 bp, Homo sapiens
gttgaaaaacccagc

SEQ ID NO: 1052615 - DNA, 15 bp, Homo sapiens
agttgaaaaacccag

SEQ ID NO: 1052616 - DNA, 15 bp, Homo sapiens
cagttgaaaaaccca

SEQ ID NO: 1052617 - DNA, 15 bp, Homo sapiens
gcagttgaaaaaccc

SEQ ID NO: 1052618 - DNA, 15 bp, Homo sapiens
tgcagttgaaaaacc

SEQ ID NO: 1052619 - DNA, 15 bp, Homo sapiens
gtgcagttgaaaaac

SEQ ID NO: 1052620 - DNA, 15 bp, Homo sapiens
tgtgcagttgaaaaa

SEQ ID NO: 1052621 - DNA, 15 bp, Homo sapiens
ctgtgcagttgaaaa

SEQ ID NO: 1052622 - DNA, 15 bp, Homo sapiens
tctgtgcagttgaaa

SEQ ID NO: 1052623 - DNA, 15 bp, Homo sapiens
atctgtgcagttgaa

SEQ ID NO: 1052624 - DNA, 15 bp, Homo sapiens
catctgtgcagttga

SEQ ID NO: 1052625 - DNA, 15 bp, Homo sapiens
ccatctgtgcagttg

SEQ ID NO: 1052626 - DNA, 15 bp, Homo sapiens
tccatctgtgcagtt

SEQ ID NO: 1052627 - DNA, 15 bp, Homo sapiens
ttccatctgtgcagt

SEQ ID NO: 1052628 - DNA, 15 bp, Homo sapiens
attccatctgtgcag

SEQ ID NO: 1052629 - DNA, 15 bp, Homo sapiens
aattccatctgtgca

SEQ ID NO: 1052630 - DNA, 15 bp, Homo sapiens
caattccatctgtgc

SEQ ID NO: 1052631 - DNA, 15 bp, Homo sapiens
gcaattccatctgtg

SEQ ID NO: 1052632 - DNA, 15 bp, Homo sapiens
tgcaattccatctgt

SEQ ID NO: 1052633 - DNA, 15 bp, Homo sapiens
ctgcaattccatctg

SEQ ID NO: 1052634 - DNA, 15 bp, Homo sapiens
actgcaattccatct

SEQ ID NO: 1052635 - DNA, 15 bp, Homo sapiens
tactgcaattccatc

SEQ ID NO: 1052636 - DNA, 15 bp, Homo sapiens
ttactgcaattccat

SEQ ID NO: 1052637 - DNA, 15 bp, Homo sapiens
tttactgcaattcca

SEQ ID NO: 1052638 - DNA, 15 bp, Homo sapiens
ttttactgcaattcc

SEQ ID NO: 1052639 - DNA, 15 bp, Homo sapiens
cttttactgcaattc

SEQ ID NO: 1052640 - DNA, 15 bp, Homo sapiens
acttttactgcaatt

SEQ ID NO: 1052641 - DNA, 15 bp, Homo sapiens
gacttttactgcaat

SEQ ID NO: 1052642 - DNA, 15 bp, Homo sapiens
agacttttactgcaa

SEQ ID NO: 1052643 - DNA, 15 bp, Homo sapiens
gagacttttactgca

SEQ ID NO: 1052644 - DNA, 15 bp, Homo sapiens
agagacttttactgc

SEQ ID NO: 1052645 - DNA, 15 bp, Homo sapiens
gagagacttttactg

SEQ ID NO: 1052646 - DNA, 15 bp, Homo sapiens
agagagacttttact

SEQ ID NO: 1052647 - DNA, 15 bp, Homo sapiens
cagagagacttttac

SEQ ID NO: 1052648 - DNA, 15 bp, Homo sapiens
acagagagactttta

SEQ ID NO: 1052649 - DNA, 15 bp, Homo sapiens
aacagagagactttt

SEQ ID NO: 1052650 - DNA, 15 bp, Homo sapiens
aaacagagagacttt

SEQ ID NO: 1052651 - DNA, 15 bp, Homo sapiens
gaaacagagagactt

SEQ ID NO: 1052652 - DNA, 15 bp, Homo sapiens
agaaacagagagact

SEQ ID NO: 1052653 - DNA, 15 bp, Homo sapiens
aagaaacagagagac

SEQ ID NO: 1052654 - DNA, 15 bp, Homo sapiens
aaagaaacagagaga

SEQ ID NO: 1052655 - DNA, 15 bp, Homo sapiens
aaaagaaacagagag

SEQ ID NO: 1052656 - DNA, 15 bp, Homo sapiens
gaaaagaaacagaga

SEQ ID NO: 1052657 - DNA, 15 bp, Homo sapiens
agaaaagaaacagag

SEQ ID NO: 1052658 - DNA, 15 bp, Homo sapiens
tagaaaagaaacaga

SEQ ID NO: 1052659 - DNA, 15 bp, Homo sapiens
gtagaaaagaaacag

SEQ ID NO: 1052660 - DNA, 15 bp, Homo sapiens
tgtagaaaagaaaca

SEQ ID NO: 1052661 - DNA, 15 bp, Homo sapiens
ctgtagaaaagaaac

SEQ ID NO: 1052662 - DNA, 15 bp, Homo sapiens
gctgtagaaaagaaa

SEQ ID NO: 1052663 - DNA, 15 bp, Homo sapiens
ggctgtagaaaagaa

SEQ ID NO: 1052664 - DNA, 15 bp, Homo sapiens
tggctgtagaaaaga

SEQ ID NO: 1052665 - DNA, 15 bp, Homo sapiens
atggctgtagaaaag

SEQ ID NO: 1052666 - DNA, 15 bp, Homo sapiens
gatggctgtagaaaa

SEQ ID NO: 1052667 - DNA, 15 bp, Homo sapiens
agatggctgtagaaa

SEQ ID NO: 1052668 - DNA, 15 bp, Homo sapiens
cagatggctgtagaa

SEQ ID NO: 1052669 - DNA, 15 bp, Homo sapiens
tcagatggctgtaga

SEQ ID NO: 1052670 - DNA, 15 bp, Homo sapiens
ctcagatggctgtag

SEQ ID NO: 1052671 - DNA, 15 bp, Homo sapiens
cctcagatggctgta

SEQ ID NO: 1052672 - DNA, 15 bp, Homo sapiens
ccctcagatggctgt

SEQ ID NO: 1052673 - DNA, 15 bp, Homo sapiens
tccctcagatggctg

SEQ ID NO: 1052674 - DNA, 15 bp, Homo sapiens
atccctcagatggct

SEQ ID NO: 1052675 - DNA, 15 bp, Homo sapiens
gatccctcagatggc

SEQ ID NO: 1052676 - DNA, 15 bp, Homo sapiens
ggatccctcagatgg

SEQ ID NO: 1052677 - DNA, 15 bp, Homo sapiens
cggatccctcagatg

SEQ ID NO: 1052678 - DNA, 15 bp, Homo sapiens
acggatccctcagat

SEQ ID NO: 1052679 - DNA, 15 bp, Homo sapiens
cacggatccctcaga

SEQ ID NO: 1052680 - DNA, 15 bp, Homo sapiens
acacggatccctcag

SEQ ID NO: 1052681 - DNA, 15 bp, Homo sapiens
aacacggatccctca

SEQ ID NO: 1052682 - DNA, 15 bp, Homo sapiens
gaacacggatccctc

SEQ ID NO: 1052683 - DNA, 15 bp, Homo sapiens
agaacacggatccct

SEQ ID NO: 1052684 - DNA, 15 bp, Homo sapiens
aagaacacggatccc

SEQ ID NO: 1052685 - DNA, 15 bp, Homo sapiens
aaagaacacggatcc

SEQ ID NO: 1052686 - DNA, 15 bp, Homo sapiens
gaaagaacacggatc

SEQ ID NO: 1052687 - DNA, 15 bp, Homo sapiens
tgaaagaacacggat

SEQ ID NO: 1052688 - DNA, 15 bp, Homo sapiens
atgaaagaacacgga

SEQ ID NO: 1052689 - DNA, 15 bp, Homo sapiens
catgaaagaacacgg

SEQ ID NO: 1052690 - DNA, 15 bp, Homo sapiens
tcatgaaagaacacg

SEQ ID NO: 1052691 - DNA, 15 bp, Homo sapiens
ttcatgaaagaacac

SEQ ID NO: 1052692 - DNA, 15 bp, Homo sapiens
tttcatgaaagaaca

SEQ ID NO: 1052693 - DNA, 15 bp, Homo sapiens
atttcatgaaagaac

SEQ ID NO: 1052694 - DNA, 15 bp, Homo sapiens
gatttcatgaaagaa

SEQ ID NO: 1052695 - DNA, 15 bp, Homo sapiens
tgatttcatgaaaga

SEQ ID NO: 1052696 - DNA, 15 bp, Homo sapiens
atgatttcatgaaag

SEQ ID NO: 1052697 - DNA, 15 bp, Homo sapiens
aatgatttcatgaaa

SEQ ID NO: 1052698 - DNA, 15 bp, Homo sapiens
taatgatttcatgaa

SEQ ID NO: 1052699 - DNA, 15 bp, Homo sapiens
ttaatgatttcatga

SEQ ID NO: 1052700 - DNA, 15 bp, Homo sapiens
attaatgatttcatg

SEQ ID NO: 1052701 - DNA, 15 bp, Homo sapiens
tattaatgatttcat

SEQ ID NO: 1052702 - DNA, 15 bp, Homo sapiens
atattaatgatttca

SEQ ID NO: 1052703 - DNA, 15 bp, Homo sapiens
aatattaatgatttc

SEQ ID NO: 1052704 - DNA, 15 bp, Homo sapiens
gaatattaatgattt

SEQ ID NO: 1052705 - DNA, 15 bp, Homo sapiens
agaatattaatgatt

SEQ ID NO: 1052706 - DNA, 15 bp, Homo sapiens
aagaatattaatgat

SEQ ID NO: 1052707 - DNA, 15 bp, Homo sapiens
taagaatattaatga

SEQ ID NO: 1052708 - DNA, 15 bp, Homo sapiens
ttaagaatattaatg

SEQ ID NO: 1052709 - DNA, 15 bp, Homo sapiens
tttaagaatattaat

SEQ ID NO: 1052710 - DNA, 15 bp, Homo sapiens
ttttaagaatattaa

SEQ ID NO: 1052711 - DNA, 15 bp, Homo sapiens
attttaagaatatta

SEQ ID NO: 1052712 - DNA, 15 bp, Homo sapiens
tattttaagaatatt

SEQ ID NO: 1052713 - DNA, 15 bp, Homo sapiens
gtattttaagaatat

SEQ ID NO: 1052714 - DNA, 15 bp, Homo sapiens
tgtattttaagaata

SEQ ID NO: 1052715 - DNA, 15 bp, Homo sapiens
ctgtattttaagaat

SEQ ID NO: 1052716 - DNA, 15 bp, Homo sapiens
tctgtattttaagaa

SEQ ID NO: 1052717 - DNA, 15 bp, Homo sapiens
atctgtattttaaga

SEQ ID NO: 1052718 - DNA, 15 bp, Homo sapiens
catctgtattttaag

SEQ ID NO: 1052719 - DNA, 15 bp, Homo sapiens
ccatctgtattttaa

SEQ ID NO: 1052720 - DNA, 15 bp, Homo sapiens
accatctgtatttta

SEQ ID NO: 1052721 - DNA, 15 bp, Homo sapiens
aaccatctgtatttt

SEQ ID NO: 1052722 - DNA, 15 bp, Homo sapiens
gaaccatctgtattt

SEQ ID NO: 1052723 - DNA, 15 bp, Homo sapiens
ggaaccatctgtatt

SEQ ID NO: 1052724 - DNA, 15 bp, Homo sapiens
gggaaccatctgtat

SEQ ID NO: 1052725 - DNA, 15 bp, Homo sapiens
cgggaaccatctgta

SEQ ID NO: 1052726 - DNA, 15 bp, Homo sapiens
acgggaaccatctgt

SEQ ID NO: 1052727 - DNA, 15 bp, Homo sapiens
aacgggaaccatctg

SEQ ID NO: 1052728 - DNA, 15 bp, Homo sapiens
aaacgggaaccatct

SEQ ID NO: 1052729 - DNA, 15 bp, Homo sapiens
gaaacgggaaccatc

SEQ ID NO: 1052730 - DNA, 15 bp, Homo sapiens
ggaaacgggaaccat

SEQ ID NO: 1052731 - DNA, 15 bp, Homo sapiens
tggaaacgggaacca

SEQ ID NO: 1052732 - DNA, 15 bp, Homo sapiens
ctggaaacgggaacc

SEQ ID NO: 1052733 - DNA, 15 bp, Homo sapiens
tctggaaacgggaac

SEQ ID NO: 1052734 - DNA, 15 bp, Homo sapiens
ctctggaaacgggaa

SEQ ID NO: 1052735 - DNA, 15 bp, Homo sapiens
tctctggaaacggga

SEQ ID NO: 1052736 - DNA, 15 bp, Homo sapiens
gtctctggaaacggg

SEQ ID NO: 1052737 - DNA, 15 bp, Homo sapiens
tgtctctggaaacgg

SEQ ID NO: 1052738 - DNA, 15 bp, Homo sapiens
atgtctctggaaacg

SEQ ID NO: 1052739 - DNA, 15 bp, Homo sapiens
aatgtctctggaaac

SEQ ID NO: 1052740 - DNA, 15 bp, Homo sapiens
caatgtctctggaaa

SEQ ID NO: 1052741 - DNA, 15 bp, Homo sapiens
ccaatgtctctggaa

SEQ ID NO: 1052742 - DNA, 15 bp, Homo sapiens
accaatgtctctgga

SEQ ID NO: 1052743 - DNA, 15 bp, Homo sapiens
gaccaatgtctctgg

SEQ ID NO: 1052744 - DNA, 15 bp, Homo sapiens
ggaccaatgtctctg

SEQ ID NO: 1052745 - DNA, 15 bp, Homo sapiens
gggaccaatgtctct

SEQ ID NO: 1052746 - DNA, 15 bp, Homo sapiens
cgggaccaatgtctc

SEQ ID NO: 1052747 - DNA, 15 bp, Homo sapiens
ccgggaccaatgtct

SEQ ID NO: 1052748 - DNA, 15 bp, Homo sapiens
cccgggaccaatgtc

SEQ ID NO: 1052749 - DNA, 15 bp, Homo sapiens
ccccgggaccaatgt

SEQ ID NO: 1052750 - DNA, 15 bp, Homo sapiens
accccgggaccaatg

SEQ ID NO: 1052751 - DNA, 15 bp, Homo sapiens
gaccccgggaccaat

SEQ ID NO: 1052752 - DNA, 15 bp, Homo sapiens
agaccccgggaccaa

SEQ ID NO: 1052753 - DNA, 15 bp, Homo sapiens
cagaccccgggacca

SEQ ID NO: 1052754 - DNA, 15 bp, Homo sapiens
acagaccccgggacc

SEQ ID NO: 1052755 - DNA, 15 bp, Homo sapiens
cacagaccccgggac

SEQ ID NO: 1052756 - DNA, 15 bp, Homo sapiens
tcacagaccccggga

SEQ ID NO: 1052757 - DNA, 15 bp, Homo sapiens
ttcacagaccccggg

SEQ ID NO: 1052758 - DNA, 15 bp, Homo sapiens
tttcacagaccccgg

SEQ ID NO: 1052759 - DNA, 15 bp, Homo sapiens
atttcacagaccccg

SEQ ID NO: 1052760 - DNA, 15 bp, Homo sapiens
aatttcacagacccc

SEQ ID NO: 1052761 - DNA, 15 bp, Homo sapiens
caatttcacagaccc

SEQ ID NO: 1052762 - DNA, 15 bp, Homo sapiens
acaatttcacagacc

SEQ ID NO: 1052763 - DNA, 15 bp, Homo sapiens
cacaatttcacagac

SEQ ID NO: 1052764 - DNA, 15 bp, Homo sapiens
acacaatttcacaga

SEQ ID NO: 1052765 - DNA, 15 bp, Homo sapiens
aacacaatttcacag

SEQ ID NO: 1052766 - DNA, 15 bp, Homo sapiens
aaacacaatttcaca

SEQ ID NO: 1052767 - DNA, 15 bp, Homo sapiens
taaacacaatttcac

SEQ ID NO: 1052768 - DNA, 15 bp, Homo sapiens
ataaacacaatttca

SEQ ID NO: 1052769 - DNA, 15 bp, Homo sapiens
aataaacacaatttc

SEQ ID NO: 1052770 - DNA, 15 bp, Homo sapiens
aaataaacacaattt

SEQ ID NO: 1052771 - DNA, 15 bp, Homo sapiens
aaaataaacacaatt

SEQ ID NO: 1052772 - DNA, 15 bp, Homo sapiens
gaaaataaacacaat

SEQ ID NO: 1052773 - DNA, 15 bp, Homo sapiens
tgaaaataaacacaa

SEQ ID NO: 1052774 - DNA, 15 bp, Homo sapiens
atgaaaataaacaca

SEQ ID NO: 1052775 - DNA, 15 bp, Homo sapiens
aatgaaaataaacac

SEQ ID NO: 1052776 - DNA, 15 bp, Homo sapiens
aaatgaaaataaaca

SEQ ID NO: 1052777 - DNA, 15 bp, Homo sapiens
aaaatgaaaataaac

SEQ ID NO: 1052778 - DNA, 15 bp, Homo sapiens
caaaatgaaaataaa

SEQ ID NO: 1052779 - DNA, 15 bp, Homo sapiens
tcaaaatgaaaataa

SEQ ID NO: 1052780 - DNA, 15 bp, Homo sapiens
atcaaaatgaaaata

SEQ ID NO: 1052781 - DNA, 15 bp, Homo sapiens
catcaaaatgaaaat

SEQ ID NO: 1052782 - DNA, 15 bp, Homo sapiens
gcatcaaaatgaaaa

SEQ ID NO: 1052783 - DNA, 15 bp, Homo sapiens
ggcatcaaaatgaaa

SEQ ID NO: 1052784 - DNA, 15 bp, Homo sapiens
tggcatcaaaatgaa

SEQ ID NO: 1052785 - DNA, 15 bp, Homo sapiens
gtggcatcaaaatga

SEQ ID NO: 1052786 - DNA, 15 bp, Homo sapiens
ggtggcatcaaaatg

SEQ ID NO: 1052787 - DNA, 15 bp, Homo sapiens
tggtggcatcaaaat

SEQ ID NO: 1052788 - DNA, 15 bp, Homo sapiens
atggtggcatcaaaa

SEQ ID NO: 1052789 - DNA, 15 bp, Homo sapiens
aatggtggcatcaaa

SEQ ID NO: 1052790 - DNA, 15 bp, Homo sapiens
aaatggtggcatcaa

SEQ ID NO: 1052791 - DNA, 15 bp, Homo sapiens
gaaatggtggcatca

SEQ ID NO: 1052792 - DNA, 15 bp, Homo sapiens
agaaatggtggcatc

SEQ ID NO: 1052793 - DNA, 15 bp, Homo sapiens
gagaaatggtggcat

SEQ ID NO: 1052794 - DNA, 15 bp, Homo sapiens
tgagaaatggtggca

SEQ ID NO: 1052795 - DNA, 15 bp, Homo sapiens
ctgagaaatggtggc

SEQ ID NO: 1052796 - DNA, 15 bp, Homo sapiens
cctgagaaatggtgg

SEQ ID NO: 1052797 - DNA, 15 bp, Homo sapiens
gcctgagaaatggtg

SEQ ID NO: 1052798 - DNA, 15 bp, Homo sapiens
tgcctgagaaatggt

SEQ ID NO: 1052799 - DNA, 15 bp, Homo sapiens
ttgcctgagaaatgg

SEQ ID NO: 1052800 - DNA, 15 bp, Homo sapiens
tttgcctgagaaatg

SEQ ID NO: 1052801 - DNA, 15 bp, Homo sapiens
ctttgcctgagaaat

SEQ ID NO: 1052802 - DNA, 15 bp, Homo sapiens
cctttgcctgagaaa

SEQ ID NO: 1052803 - DNA, 15 bp, Homo sapiens
acctttgcctgagaa

SEQ ID NO: 1052804 - DNA, 15 bp, Homo sapiens
aacctttgcctgaga

SEQ ID NO: 1052805 - DNA, 15 bp, Homo sapiens
gaacctttgcctgag

SEQ ID NO: 1052806 - DNA, 15 bp, Homo sapiens
ggaacctttgcctga

SEQ ID NO: 1052807 - DNA, 15 bp, Homo sapiens
tggaacctttgcctg

SEQ ID NO: 1052808 - DNA, 15 bp, Homo sapiens
ttggaacctttgcct

SEQ ID NO: 1052809 - DNA, 15 bp, Homo sapiens
gttggaacctttgcc

SEQ ID NO: 1052810 - DNA, 15 bp, Homo sapiens
agttggaacctttgc

SEQ ID NO: 1052811 - DNA, 15 bp, Homo sapiens
cagttggaacctttg

SEQ ID NO: 1052812 - DNA, 15 bp, Homo sapiens
gcagttggaaccttt

SEQ ID NO: 1052813 - DNA, 15 bp, Homo sapiens
agcagttggaacctt

SEQ ID NO: 1052814 - DNA, 15 bp, Homo sapiens
gagcagttggaacct

SEQ ID NO: 1052815 - DNA, 15 bp, Homo sapiens
agagcagttggaacc

SEQ ID NO: 1052816 - DNA, 15 bp, Homo sapiens
gagagcagttggaac

SEQ ID NO: 1052817 - DNA, 15 bp, Homo sapiens
ggagagcagttggaa

SEQ ID NO: 1052818 - DNA, 15 bp, Homo sapiens
tggagagcagttgga

SEQ ID NO: 1052819 - DNA, 15 bp, Homo sapiens
ttggagagcagttgg

SEQ ID NO: 1052820 - DNA, 15 bp, Homo sapiens
tttggagagcagttg

SEQ ID NO: 1052821 - DNA, 15 bp, Homo sapiens
ttttggagagcagtt

SEQ ID NO: 1052822 - DNA, 15 bp, Homo sapiens
gttttggagagcagt

SEQ ID NO: 1052823 - DNA, 15 bp, Homo sapiens
agttttggagagcag

SEQ ID NO: 1052824 - DNA, 15 bp, Homo sapiens
aagttttggagagca

SEQ ID NO: 1052825 - DNA, 15 bp, Homo sapiens
aaagttttggagagc

SEQ ID NO: 1052826 - DNA, 15 bp, Homo sapiens
taaagttttggagag

SEQ ID NO: 1052827 - DNA, 15 bp, Homo sapiens
ttaaagttttggaga

SEQ ID NO: 1052828 - DNA, 15 bp, Homo sapiens
tttaaagttttggag

SEQ ID NO: 1052829 - DNA, 15 bp, Homo sapiens
ctttaaagttttgga

SEQ ID NO: 1052830 - DNA, 15 bp, Homo sapiens
tctttaaagttttgg

SEQ ID NO: 1052831 - DNA, 15 bp, Homo sapiens
ctctttaaagttttg

SEQ ID NO: 1052832 - DNA, 15 bp, Homo sapiens
actctttaaagtttt

SEQ ID NO: 1052833 - DNA, 15 bp, Homo sapiens
cactctttaaagttt

SEQ ID NO: 1052834 - DNA, 15 bp, Homo sapiens
gcactctttaaagtt

SEQ ID NO: 1052835 - DNA, 15 bp, Homo sapiens
agcactctttaaagt

SEQ ID NO: 1052836 - DNA, 15 bp, Homo sapiens
gagcactctttaaag

SEQ ID NO: 1052837 - DNA, 15 bp, Homo sapiens
agagcactctttaaa

SEQ ID NO: 1052838 - DNA, 15 bp, Homo sapiens
cagagcactctttaa

SEQ ID NO: 1052839 - DNA, 15 bp, Homo sapiens
acagagcactcttta

SEQ ID NO: 1052840 - DNA, 15 bp, Homo sapiens
gacagagcactcttt

SEQ ID NO: 1052841 - DNA, 15 bp, Homo sapiens
tgacagagcactctt

SEQ ID NO: 1052842 - DNA, 15 bp, Homo sapiens
ctgacagagcactct

SEQ ID NO: 1052843 - DNA, 15 bp, Homo sapiens
cctgacagagcactc

SEQ ID NO: 1052844 - DNA, 15 bp, Homo sapiens
tcctgacagagcact

SEQ ID NO: 1052845 - DNA, 15 bp, Homo sapiens
atcctgacagagcac

SEQ ID NO: 1052846 - DNA, 15 bp, Homo sapiens
tatcctgacagagca

SEQ ID NO: 1052847 - DNA, 15 bp, Homo sapiens
gtatcctgacagagc

SEQ ID NO: 1052848 - DNA, 15 bp, Homo sapiens
cgtatcctgacagag

SEQ ID NO: 1052849 - DNA, 15 bp, Homo sapiens
acgtatcctgacaga

SEQ ID NO: 1052850 - DNA, 15 bp, Homo sapiens
tacgtatcctgacag

SEQ ID NO: 1052851 - DNA, 15 bp, Homo sapiens
ctacgtatcctgaca

SEQ ID NO: 1052852 - DNA, 15 bp, Homo sapiens
actacgtatcctgac

SEQ ID NO: 1052853 - DNA, 15 bp, Homo sapiens
cactacgtatcctga

SEQ ID NO: 1052854 - DNA, 15 bp, Homo sapiens
tcactacgtatcctg

SEQ ID NO: 1052855 - DNA, 15 bp, Homo sapiens
ctcactacgtatcct

SEQ ID NO: 1052856 - DNA, 15 bp, Homo sapiens
cctcactacgtatcc

SEQ ID NO: 1052857 - DNA, 15 bp, Homo sapiens
gcctcactacgtatc

SEQ ID NO: 1052858 - DNA, 15 bp, Homo sapiens
tgcctcactacgtat

SEQ ID NO: 1052859 - DNA, 15 bp, Homo sapiens
ctgcctcactacgta

SEQ ID NO: 1052860 - DNA, 15 bp, Homo sapiens
gctgcctcactacgt

SEQ ID NO: 1052861 - DNA, 15 bp, Homo sapiens
agctgcctcactacg

SEQ ID NO: 1052862 - DNA, 15 bp, Homo sapiens
tagctgcctcactac

SEQ ID NO: 1052863 - DNA, 15 bp, Homo sapiens
ttagctgcctcacta

SEQ ID NO: 1052864 - DNA, 15 bp, Homo sapiens
cttagctgcctcact

SEQ ID NO: 1052865 - DNA, 15 bp, Homo sapiens
gcttagctgcctcac

SEQ ID NO: 1052866 - DNA, 15 bp, Homo sapiens
tgcttagctgcctca

SEQ ID NO: 1052867 - DNA, 15 bp, Homo sapiens
gtgcttagctgcctc

SEQ ID NO: 1052868 - DNA, 15 bp, Homo sapiens
ggtgcttagctgcct

SEQ ID NO: 1052869 - DNA, 15 bp, Homo sapiens
aggtgcttagctgcc

SEQ ID NO: 1052870 - DNA, 15 bp, Homo sapiens
gaggtgcttagctgc

SEQ ID NO: 1052871 - DNA, 15 bp, Homo sapiens
ggaggtgcttagctg

SEQ ID NO: 1052872 - DNA, 15 bp, Homo sapiens
gggaggtgcttagct

SEQ ID NO: 1052873 - DNA, 15 bp, Homo sapiens
agggaggtgcttagc

SEQ ID NO: 1052874 - DNA, 15 bp, Homo sapiens
cagggaggtgcttag

SEQ ID NO: 1052875 - DNA, 15 bp, Homo sapiens
ccagggaggtgctta

SEQ ID NO: 1052876 - DNA, 15 bp, Homo sapiens
tccagggaggtgctt

SEQ ID NO: 1052877 - DNA, 15 bp, Homo sapiens
ctccagggaggtgct

SEQ ID NO: 1052878 - DNA, 15 bp, Homo sapiens
actccagggaggtgc

SEQ ID NO: 1052879 - DNA, 15 bp, Homo sapiens
cactccagggaggtg

SEQ ID NO: 1052880 - DNA, 15 bp, Homo sapiens
gcactccagggaggt

SEQ ID NO: 1052881 - DNA, 15 bp, Homo sapiens
tagcactccagggag

SEQ ID NO: 1052882 - DNA, 15 bp, Homo sapiens
ttagcactccaggga

SEQ ID NO: 1052883 - DNA, 15 bp, Homo sapiens
cttagcactccaggg

SEQ ID NO: 1052884 - DNA, 15 bp, Homo sapiens
acttagcactccagg

SEQ ID NO: 1052885 - DNA, 15 bp, Homo sapiens
cacttagcactccag

SEQ ID NO: 1052886 - DNA, 15 bp, Homo sapiens
ccacttagcactcca

SEQ ID NO: 1052887 - DNA, 15 bp, Homo sapiens
accacttagcactcc

SEQ ID NO: 1052888 - DNA, 15 bp, Homo sapiens
aaccacttagcactc

SEQ ID NO: 1052889 - DNA, 15 bp, Homo sapiens
gaaccacttagcact

SEQ ID NO: 1052890 - DNA, 15 bp, Homo sapiens
tgaaccacttagcac

SEQ ID NO: 1052891 - DNA, 15 bp, Homo sapiens
ctgaaccacttagca

SEQ ID NO: 1052892 - DNA, 15 bp, Homo sapiens
cctgaaccacttagc

SEQ ID NO: 1052893 - DNA, 15 bp, Homo sapiens
gcctgaaccacttag

SEQ ID NO: 1052894 - DNA, 15 bp, Homo sapiens
tgcctgaaccactta

SEQ ID NO: 1052895 - DNA, 15 bp, Homo sapiens
ctgcctgaaccactt

SEQ ID NO: 1052896 - DNA, 15 bp, Homo sapiens
gctgcctgaaccact

SEQ ID NO: 1052897 - DNA, 15 bp, Homo sapiens
cgctgcctgaaccac

SEQ ID NO: 1052898 - DNA, 15 bp, Homo sapiens
gcgctgcctgaacca

SEQ ID NO: 1052899 - DNA, 15 bp, Homo sapiens
ggcgctgcctgaacc

SEQ ID NO: 1052900 - DNA, 15 bp, Homo sapiens
tggcgctgcctgaac

SEQ ID NO: 1052901 - DNA, 15 bp, Homo sapiens
ctggcgctgcctgaa

SEQ ID NO: 1052902 - DNA, 15 bp, Homo sapiens
tctggcgctgcctga

SEQ ID NO: 1052903 - DNA, 15 bp, Homo sapiens
atctggcgctgcctg

SEQ ID NO: 1052904 - DNA, 15 bp, Homo sapiens
catctggcgctgcct

SEQ ID NO: 1052905 - DNA, 15 bp, Homo sapiens
gcatctggcgctgcc

SEQ ID NO: 1052906 - DNA, 15 bp, Homo sapiens
ggcatctggcgctgc

SEQ ID NO: 1052907 - DNA, 15 bp, Homo sapiens
tggcatctggcgctg

SEQ ID NO: 1052908 - DNA, 15 bp, Homo sapiens
atggcatctggcgct

SEQ ID NO: 1052909 - DNA, 15 bp, Homo sapiens
catggcatctggcgc

SEQ ID NO: 1052910 - DNA, 15 bp, Homo sapiens
ccatggcatctggcg

SEQ ID NO: 1052911 - DNA, 15 bp, Homo sapiens
tccatggcatctggc

SEQ ID NO: 1052912 - DNA, 15 bp, Homo sapiens
ctccatggcatctgg

SEQ ID NO: 1052913 - DNA, 15 bp, Homo sapiens
gctccatggcatctg

SEQ ID NO: 1052914 - DNA, 15 bp, Homo sapiens
ggctccatggcatct

SEQ ID NO: 1052915 - DNA, 15 bp, Homo sapiens
aggctccatggcatc

SEQ ID NO: 1052916 - DNA, 15 bp, Homo sapiens
caggctccatggcat

SEQ ID NO: 1052917 - DNA, 15 bp, Homo sapiens
tcaggctccatggca

SEQ ID NO: 1052918 - DNA, 15 bp, Homo sapiens
atcaggctccatggc

SEQ ID NO: 1052919 - DNA, 15 bp, Homo sapiens
catcaggctccatgg

SEQ ID NO: 1052920 - DNA, 15 bp, Homo sapiens
tcatcaggctccatg

SEQ ID NO: 1052921 - DNA, 15 bp, Homo sapiens
ctcatcaggctccat

SEQ ID NO: 1052922 - DNA, 15 bp, Homo sapiens
actcatcaggctcca

SEQ ID NO: 1052923 - DNA, 15 bp, Homo sapiens
cactcatcaggctcc

SEQ ID NO: 1052924 - DNA, 15 bp, Homo sapiens
acactcatcaggctc

SEQ ID NO: 1052925 - DNA, 15 bp, Homo sapiens
aacactcatcaggct

SEQ ID NO: 1052926 - DNA, 15 bp, Homo sapiens
gaacactcatcaggc

SEQ ID NO: 1052927 - DNA, 15 bp, Homo sapiens
agaacactcatcagg

SEQ ID NO: 1052928 - DNA, 15 bp, Homo sapiens
tagaacactcatcag

SEQ ID NO: 1052929 - DNA, 15 bp, Homo sapiens
ctagaacactcatca

SEQ ID NO: 1052930 - DNA, 15 bp, Homo sapiens
cctagaacactcatc

SEQ ID NO: 1052931 - DNA, 15 bp, Homo sapiens
ccctagaacactcat

SEQ ID NO: 1052932 - DNA, 15 bp, Homo sapiens
cccctagaacactca

SEQ ID NO: 1052933 - DNA, 15 bp, Homo sapiens
tcccctagaacactc

SEQ ID NO: 1052934 - DNA, 15 bp, Homo sapiens
ttcccctagaacact

SEQ ID NO: 1052935 - DNA, 15 bp, Homo sapiens
gttcccctagaacac

SEQ ID NO: 1052936 - DNA, 15 bp, Homo sapiens
ggttcccctagaaca

SEQ ID NO: 1052937 - DNA, 15 bp, Homo sapiens
tggttcccctagaac

SEQ ID NO: 1052938 - DNA, 15 bp, Homo sapiens
atggttcccctagaa

SEQ ID NO: 1052939 - DNA, 15 bp, Homo sapiens
catggttcccctaga

SEQ ID NO: 1052940 - DNA, 15 bp, Homo sapiens
acatggttcccctag

SEQ ID NO: 1052941 - DNA, 15 bp, Homo sapiens
cacatggttccccta

SEQ ID NO: 1052942 - DNA, 15 bp, Homo sapiens
ccacatggttcccct

SEQ ID NO: 1052943 - DNA, 15 bp, Homo sapiens
tccacatggttcccc

SEQ ID NO: 1052944 - DNA, 15 bp, Homo sapiens
ttccacatggttccc

SEQ ID NO: 1052945 - DNA, 15 bp, Homo sapiens
cttccacatggttcc

SEQ ID NO: 1052946 - DNA, 15 bp, Homo sapiens
ccttccacatggttc

SEQ ID NO: 1052947 - DNA, 15 bp, Homo sapiens
cccttccacatggtt

SEQ ID NO: 1052948 - DNA, 15 bp, Homo sapiens
tcccttccacatggt

SEQ ID NO: 1052949 - DNA, 15 bp, Homo sapiens
ctcccttccacatgg

SEQ ID NO: 1052950 - DNA, 15 bp, Homo sapiens
gctcccttccacatg

SEQ ID NO: 1052951 - DNA, 15 bp, Homo sapiens
agctcccttccacat

SEQ ID NO: 1052952 - DNA, 15 bp, Homo sapiens
gagctcccttccaca

SEQ ID NO: 1052953 - DNA, 15 bp, Homo sapiens
agagctcccttccac

SEQ ID NO: 1052954 - DNA, 15 bp, Homo sapiens
gagagctcccttcca

SEQ ID NO: 1052955 - DNA, 15 bp, Homo sapiens
ggagagctcccttcc

SEQ ID NO: 1052956 - DNA, 15 bp, Homo sapiens
gggagagctcccttc

SEQ ID NO: 1052957 - DNA, 15 bp, Homo sapiens
tgggagagctccctt

SEQ ID NO: 1052958 - DNA, 15 bp, Homo sapiens
ctgggagagctccct

SEQ ID NO: 1052959 - DNA, 15 bp, Homo sapiens
tctgggagagctccc

SEQ ID NO: 1052960 - DNA, 15 bp, Homo sapiens
ctctgggagagctcc

SEQ ID NO: 1052961 - DNA, 15 bp, Homo sapiens
tctctgggagagctc

SEQ ID NO: 1052962 - DNA, 15 bp, Homo sapiens
ctctctgggagagct

SEQ ID NO: 1052963 - DNA, 15 bp, Homo sapiens
tctctctgggagagc

SEQ ID NO: 1052964 - DNA, 15 bp, Homo sapiens
ttctctctgggagag

SEQ ID NO: 1052965 - DNA, 15 bp, Homo sapiens
tttctctctgggaga

SEQ ID NO: 1052966 - DNA, 15 bp, Homo sapiens
ctttctctctgggag

SEQ ID NO: 1052967 - DNA, 15 bp, Homo sapiens
tctttctctctggga

SEQ ID NO: 1052968 - DNA, 15 bp, Homo sapiens
ctctttctctctggg

SEQ ID NO: 1052969 - DNA, 15 bp, Homo sapiens
tctctttctctctgg

SEQ ID NO: 1052970 - DNA, 15 bp, Homo sapiens
ttctctttctctctg

SEQ ID NO: 1052971 - DNA, 15 bp, Homo sapiens
cttctctttctctct

SEQ ID NO: 1052972 - DNA, 15 bp, Homo sapiens
ccttctctttctctc

SEQ ID NO: 1052973 - DNA, 15 bp, Homo sapiens
cccttctctttctct

SEQ ID NO: 1052974 - DNA, 15 bp, Homo sapiens
tcccttctctttctc

SEQ ID NO: 1052975 - DNA, 15 bp, Homo sapiens
ttcccttctctttct

SEQ ID NO: 1052976 - DNA, 15 bp, Homo sapiens
tttcccttctctttc

SEQ ID NO: 1052977 - DNA, 15 bp, Homo sapiens
ctttcccttctcttt

SEQ ID NO: 1052978 - DNA, 15 bp, Homo sapiens
tctttcccttctctt

SEQ ID NO: 1052979 - DNA, 15 bp, Homo sapiens
ttctttcccttctct

SEQ ID NO: 1052980 - DNA, 15 bp, Homo sapiens
tttctttcccttctc

SEQ ID NO: 1052981 - DNA, 15 bp, Homo sapiens
ctttctttcccttct

SEQ ID NO: 1052982 - DNA, 15 bp, Homo sapiens
tctttctttcccttc

SEQ ID NO: 1052983 - DNA, 15 bp, Homo sapiens
ctctttctttccctt

SEQ ID NO: 1052984 - DNA, 15 bp, Homo sapiens
cctctttctttccct

SEQ ID NO: 1052985 - DNA, 15 bp, Homo sapiens
ccctctttctttccc

SEQ ID NO: 1052986 - DNA, 15 bp, Homo sapiens
gtccctctttctttc

SEQ ID NO: 1052987 - DNA, 15 bp, Homo sapiens
tgtccctctttcttt

SEQ ID NO: 1052988 - DNA, 15 bp, Homo sapiens
ttgtccctctttctt

SEQ ID NO: 1052989 - DNA, 15 bp, Homo sapiens
cttgtccctctttct

SEQ ID NO: 1052990 - DNA, 15 bp, Homo sapiens
ccttgtccctctttc

SEQ ID NO: 1052991 - DNA, 15 bp, Homo sapiens
cccttgtccctcttt

SEQ ID NO: 1052992 - DNA, 15 bp, Homo sapiens
ccccttgtccctctt

SEQ ID NO: 1052993 - DNA, 15 bp, Homo sapiens
accccttgtccctct

SEQ ID NO: 1052994 - DNA, 15 bp, Homo sapiens
caccccttgtccctc

SEQ ID NO: 1052995 - DNA, 15 bp, Homo sapiens
tcaccccttgtccct

SEQ ID NO: 1052996 - DNA, 15 bp, Homo sapiens
ctcaccccttgtccc

SEQ ID NO: 1052997 - DNA, 15 bp, Homo sapiens
cctcaccccttgtcc

SEQ ID NO: 1052998 - DNA, 15 bp, Homo sapiens
ccctcaccccttgtc

SEQ ID NO: 1052999 - DNA, 15 bp, Homo sapiens
tccctcaccccttgt

SEQ ID NO: 1053000 - DNA, 15 bp, Homo sapiens
ctccctcaccccttg

SEQ ID NO: 1053001 - DNA, 15 bp, Homo sapiens
cctccctcacccctt

SEQ ID NO: 1053002 - DNA, 15 bp, Homo sapiens
gcctccctcacccct

SEQ ID NO: 1053003 - DNA, 15 bp, Homo sapiens
agcctccctcacccc

SEQ ID NO: 1053004 - DNA, 15 bp, Homo sapiens
cagcctccctcaccc

SEQ ID NO: 1053005 - DNA, 15 bp, Homo sapiens
gcagcctccctcacc

SEQ ID NO: 1053006 - DNA, 15 bp, Homo sapiens
ggcagcctccctcac

SEQ ID NO: 1053007 - DNA, 15 bp, Homo sapiens
aggcagcctccctca

SEQ ID NO: 1053008 - DNA, 15 bp, Homo sapiens
taggcagcctccctc

SEQ ID NO: 1053009 - DNA, 15 bp, Homo sapiens
ctaggcagcctccct

SEQ ID NO: 1053010 - DNA, 15 bp, Homo sapiens
cctaggcagcctccc

SEQ ID NO: 1053011 - DNA, 15 bp, Homo sapiens
gcctaggcagcctcc

SEQ ID NO: 1053012 - DNA, 15 bp, Homo sapiens
agcctaggcagcctc

SEQ ID NO: 1053013 - DNA, 15 bp, Homo sapiens
gagcctaggcagcct

SEQ ID NO: 1053014 - DNA, 15 bp, Homo sapiens
agagcctaggcagcc

SEQ ID NO: 1053015 - DNA, 15 bp, Homo sapiens
gagagcctaggcagc

SEQ ID NO: 1053016 - DNA, 15 bp, Homo sapiens
tgagagcctaggcag

SEQ ID NO: 1053017 - DNA, 15 bp, Homo sapiens
ctgagagcctaggca

SEQ ID NO: 1053018 - DNA, 15 bp, Homo sapiens
cctgagagcctaggc

SEQ ID NO: 1053019 - DNA, 15 bp, Homo sapiens
ccctgagagcctagg

SEQ ID NO: 1053020 - DNA, 15 bp, Homo sapiens
tccctgagagcctag

SEQ ID NO: 1053021 - DNA, 15 bp, Homo sapiens
ctccctgagagccta

SEQ ID NO: 1053022 - DNA, 15 bp, Homo sapiens
gctccctgagagcct

SEQ ID NO: 1053023 - DNA, 15 bp, Homo sapiens
ggctccctgagagcc

SEQ ID NO: 1053024 - DNA, 15 bp, Homo sapiens
aggctccctgagagc

SEQ ID NO: 1053025 - DNA, 15 bp, Homo sapiens
gaggctccctgagag

SEQ ID NO: 1053026 - DNA, 15 bp, Homo sapiens
agaggctccctgaga

SEQ ID NO: 1053027 - DNA, 15 bp, Homo sapiens
tagaggctccctgag

SEQ ID NO: 1053028 - DNA, 15 bp, Homo sapiens
gtagaggctccctga

SEQ ID NO: 1053029 - DNA, 15 bp, Homo sapiens
ggtagaggctccctg

SEQ ID NO: 1053030 - DNA, 15 bp, Homo sapiens
aggtagaggctccct

SEQ ID NO: 1053031 - DNA, 15 bp, Homo sapiens
aaggtagaggctccc

SEQ ID NO: 1053032 - DNA, 15 bp, Homo sapiens
gaaggtagaggctcc

SEQ ID NO: 1053033 - DNA, 15 bp, Homo sapiens
ggaaggtagaggctc

SEQ ID NO: 1053034 - DNA, 15 bp, Homo sapiens
aggaaggtagaggct

SEQ ID NO: 1053035 - DNA, 15 bp, Homo sapiens
caggaaggtagaggc

SEQ ID NO: 1053036 - DNA, 15 bp, Homo sapiens
gcaggaaggtagagg

SEQ ID NO: 1053037 - DNA, 15 bp, Homo sapiens
tgcaggaaggtagag

SEQ ID NO: 1053038 - DNA, 15 bp, Homo sapiens
ctgcaggaaggtaga

SEQ ID NO: 1053039 - DNA, 15 bp, Homo sapiens
actgcaggaaggtag

SEQ ID NO: 1053040 - DNA, 15 bp, Homo sapiens
gactgcaggaaggta

SEQ ID NO: 1053041 - DNA, 15 bp, Homo sapiens
ggactgcaggaaggt

SEQ ID NO: 1053042 - DNA, 15 bp, Homo sapiens
aggactgcaggaagg

SEQ ID NO: 1053043 - DNA, 15 bp, Homo sapiens
aaggactgcaggaag

SEQ ID NO: 1053044 - DNA, 15 bp, Homo sapiens
caaggactgcaggaa

SEQ ID NO: 1053045 - DNA, 15 bp, Homo sapiens
gcaaggactgcagga

SEQ ID NO: 1053046 - DNA, 15 bp, Homo sapiens
agcaaggactgcagg

SEQ ID NO: 1053047 - DNA, 15 bp, Homo sapiens
tagcaaggactgcag

SEQ ID NO: 1053048 - DNA, 15 bp, Homo sapiens
ttagcaaggactgca

SEQ ID NO: 1053049 - DNA, 15 bp, Homo sapiens
gttagcaaggactgc

SEQ ID NO: 1053050 - DNA, 15 bp, Homo sapiens
tgttagcaaggactg

SEQ ID NO: 1053051 - DNA, 15 bp, Homo sapiens
ttgttagcaaggact

SEQ ID NO: 1053052 - DNA, 15 bp, Homo sapiens
gttgttagcaaggac

SEQ ID NO: 1053053 - DNA, 15 bp, Homo sapiens
cgttgttagcaagga

SEQ ID NO: 1053054 - DNA, 15 bp, Homo sapiens
acgttgttagcaagg

SEQ ID NO: 1053055 - DNA, 15 bp, Homo sapiens
gacgttgttagcaag

SEQ ID NO: 1053056 - DNA, 15 bp, Homo sapiens
agacgttgttagcaa

SEQ ID NO: 1053057 - DNA, 15 bp, Homo sapiens
aagacgttgttagca

SEQ ID NO: 1053058 - DNA, 15 bp, Homo sapiens
gaagacgttgttagc

SEQ ID NO: 1053059 - DNA, 15 bp, Homo sapiens
agaagacgttgttag

SEQ ID NO: 1053060 - DNA, 15 bp, Homo sapiens
gagaagacgttgtta

SEQ ID NO: 1053061 - DNA, 15 bp, Homo sapiens
ggagaagacgttgtt

SEQ ID NO: 1053062 - DNA, 15 bp, Homo sapiens
aggagaagacgttgt

SEQ ID NO: 1053063 - DNA, 15 bp, Homo sapiens
gaggagaagacgttg

SEQ ID NO: 1053064 - DNA, 15 bp, Homo sapiens
agaggagaagacgtt

SEQ ID NO: 1053065 - DNA, 15 bp, Homo sapiens
cagaggagaagacgt

SEQ ID NO: 1053066 - DNA, 15 bp, Homo sapiens
gcagaggagaagacg

SEQ ID NO: 1053067 - DNA, 15 bp, Homo sapiens
tgcagaggagaagac

SEQ ID NO: 1053068 - DNA, 15 bp, Homo sapiens
ctgcagaggagaaga

SEQ ID NO: 1053069 - DNA, 15 bp, Homo sapiens
tctgcagaggagaag

SEQ ID NO: 1053070 - DNA, 15 bp, Homo sapiens
gtctgcagaggagaa

SEQ ID NO: 1053071 - DNA, 15 bp, Homo sapiens
ggtctgcagaggaga

SEQ ID NO: 1053072 - DNA, 15 bp, Homo sapiens
gggtctgcagaggag

SEQ ID NO: 1053073 - DNA, 15 bp, Homo sapiens
ggggtctgcagagga

SEQ ID NO: 1053074 - DNA, 15 bp, Homo sapiens
tggggtctgcagagg

SEQ ID NO: 1053075 - DNA, 15 bp, Homo sapiens
gtggggtctgcagag

SEQ ID NO: 1053076 - DNA, 15 bp, Homo sapiens
tgtggggtctgcaga

SEQ ID NO: 1053077 - DNA, 15 bp, Homo sapiens
gtgtggggtctgcag

SEQ ID NO: 1053078 - DNA, 15 bp, Homo sapiens
agtgtggggtctgca

SEQ ID NO: 1053079 - DNA, 15 bp, Homo sapiens
cagtgtggggtctgc

SEQ ID NO: 1053080 - DNA, 15 bp, Homo sapiens
acagtgtggggtctg

SEQ ID NO: 1053081 - DNA, 15 bp, Homo sapiens
cacagtgtggggtct

SEQ ID NO: 1053082 - DNA, 15 bp, Homo sapiens
ccacagtgtggggtc

SEQ ID NO: 1053083 - DNA, 15 bp, Homo sapiens
tccacagtgtggggt

SEQ ID NO: 1053084 - DNA, 15 bp, Homo sapiens
gtccacagtgtgggg

SEQ ID NO: 1053085 - DNA, 15 bp, Homo sapiens
tgtccacagtgtggg

SEQ ID NO: 1053086 - DNA, 15 bp, Homo sapiens
gtgtccacagtgtgg

SEQ ID NO: 1053087 - DNA, 15 bp, Homo sapiens
tgtgtccacagtgtg

SEQ ID NO: 1053088 - DNA, 15 bp, Homo sapiens
ctgtgtccacagtgt

SEQ ID NO: 1053089 - DNA, 15 bp, Homo sapiens
cctgtgtccacagtg

SEQ ID NO: 1053090 - DNA, 15 bp, Homo sapiens
tcctgtgtccacagt

SEQ ID NO: 1053091 - DNA, 15 bp, Homo sapiens
ctcctgtgtccacag

SEQ ID NO: 1053092 - DNA, 15 bp, Homo sapiens
gctcctgtgtccaca

SEQ ID NO: 1053093 - DNA, 15 bp, Homo sapiens
tgctcctgtgtccac

SEQ ID NO: 1053094 - DNA, 15 bp, Homo sapiens
atgctcctgtgtcca

SEQ ID NO: 1053095 - DNA, 15 bp, Homo sapiens
catgctcctgtgtcc

SEQ ID NO: 1053096 - DNA, 15 bp, Homo sapiens
acatgctcctgtgtc

SEQ ID NO: 1053097 - DNA, 15 bp, Homo sapiens
cacatgctcctgtgt

SEQ ID NO: 1053098 - DNA, 15 bp, Homo sapiens
tcacatgctcctgtg

SEQ ID NO: 1053099 - DNA, 15 bp, Homo sapiens
ctcacatgctcctgt

SEQ ID NO: 1053100 - DNA, 15 bp, Homo sapiens
cctcacatgctcctg

SEQ ID NO: 1053101 - DNA, 15 bp, Homo sapiens
gcctcacatgctcct

SEQ ID NO: 1053102 - DNA, 15 bp, Homo sapiens
tgcctcacatgctcc

SEQ ID NO: 1053103 - DNA, 15 bp, Homo sapiens
ttgcctcacatgctc

SEQ ID NO: 1053104 - DNA, 15 bp, Homo sapiens
attgcctcacatgct

SEQ ID NO: 1053105 - DNA, 15 bp, Homo sapiens
cattgcctcacatgc

SEQ ID NO: 1053106 - DNA, 15 bp, Homo sapiens
ccattgcctcacatg

SEQ ID NO: 1053107 - DNA, 15 bp, Homo sapiens
gccattgcctcacat

SEQ ID NO: 1053108 - DNA, 15 bp, Homo sapiens
agccattgcctcaca

SEQ ID NO: 1053109 - DNA, 15 bp, Homo sapiens
cagccattgcctcac

SEQ ID NO: 1053110 - DNA, 15 bp, Homo sapiens
ccagccattgcctca

SEQ ID NO: 1053111 - DNA, 15 bp, Homo sapiens
tccagccattgcctc

SEQ ID NO: 1053112 - DNA, 15 bp, Homo sapiens
ctccagccattgcct

SEQ ID NO: 1053113 - DNA, 15 bp, Homo sapiens
actccagccattgcc

SEQ ID NO: 1053114 - DNA, 15 bp, Homo sapiens
cactccagccattgc

SEQ ID NO: 1053115 - DNA, 15 bp, Homo sapiens
ccactccagccattg

SEQ ID NO: 1053116 - DNA, 15 bp, Homo sapiens
cccactccagccatt

SEQ ID NO: 1053117 - DNA, 15 bp, Homo sapiens
gcccactccagccat

SEQ ID NO: 1053118 - DNA, 15 bp, Homo sapiens
ggcccactccagcca

SEQ ID NO: 1053119 - DNA, 15 bp, Homo sapiens
tggcccactccagcc

SEQ ID NO: 1053120 - DNA, 15 bp, Homo sapiens
atggcccactccagc

SEQ ID NO: 1053121 - DNA, 15 bp, Homo sapiens
tatggcccactccag

SEQ ID NO: 1053122 - DNA, 15 bp, Homo sapiens
ttatggcccactcca

SEQ ID NO: 1053123 - DNA, 15 bp, Homo sapiens
tttatggcccactcc

SEQ ID NO: 1053124 - DNA, 15 bp, Homo sapiens
ctttatggcccactc

SEQ ID NO: 1053125 - DNA, 15 bp, Homo sapiens
cctttatggcccact

SEQ ID NO: 1053126 - DNA, 15 bp, Homo sapiens
tcctttatggcccac

SEQ ID NO: 1053127 - DNA, 15 bp, Homo sapiens
ctcctttatggccca

SEQ ID NO: 1053128 - DNA, 15 bp, Homo sapiens
actcctttatggccc

SEQ ID NO: 1053129 - DNA, 15 bp, Homo sapiens
tactcctttatggcc

SEQ ID NO: 1053130 - DNA, 15 bp, Homo sapiens
gtactcctttatggc

SEQ ID NO: 1053131 - DNA, 15 bp, Homo sapiens
tgtactcctttatgg

SEQ ID NO: 1053132 - DNA, 15 bp, Homo sapiens
ctgtactcctttatg

SEQ ID NO: 1053133 - DNA, 15 bp, Homo sapiens
gctgtactcctttat

SEQ ID NO: 1053134 - DNA, 15 bp, Homo sapiens
agctgtactccttta

SEQ ID NO: 1053135 - DNA, 15 bp, Homo sapiens
aagctgtactccttt

SEQ ID NO: 1053136 - DNA, 15 bp, Homo sapiens
caagctgtactcctt

SEQ ID NO: 1053137 - DNA, 15 bp, Homo sapiens
tcaagctgtactcct

SEQ ID NO: 1053138 - DNA, 15 bp, Homo sapiens
atcaagctgtactcc

SEQ ID NO: 1053139 - DNA, 15 bp, Homo sapiens
catcaagctgtactc

SEQ ID NO: 1053140 - DNA, 15 bp, Homo sapiens
ccatcaagctgtact

SEQ ID NO: 1053141 - DNA, 15 bp, Homo sapiens
tccatcaagctgtac

SEQ ID NO: 1053142 - DNA, 15 bp, Homo sapiens
ctccatcaagctgta

SEQ ID NO: 1053143 - DNA, 15 bp, Homo sapiens
tctccatcaagctgt

SEQ ID NO: 1053144 - DNA, 15 bp, Homo sapiens
atctccatcaagctg

SEQ ID NO: 1053145 - DNA, 15 bp, Homo sapiens
gatctccatcaagct

SEQ ID NO: 1053146 - DNA, 15 bp, Homo sapiens
cgatctccatcaagc

SEQ ID NO: 1053147 - DNA, 15 bp, Homo sapiens
tcgatctccatcaag

SEQ ID NO: 1053148 - DNA, 15 bp, Homo sapiens
gtcgatctccatcaa

SEQ ID NO: 1053149 - DNA, 15 bp, Homo sapiens
tgtcgatctccatca

SEQ ID NO: 1053150 - DNA, 15 bp, Homo sapiens
gtgtcgatctccatc

SEQ ID NO: 1053151 - DNA, 15 bp, Homo sapiens
tgtgtcgatctccat

SEQ ID NO: 1053152 - DNA, 15 bp, Homo sapiens
atgtgtcgatctcca

SEQ ID NO: 1053153 - DNA, 15 bp, Homo sapiens
gatgtgtcgatctcc

SEQ ID NO: 1053154 - DNA, 15 bp, Homo sapiens
ggatgtgtcgatctc

SEQ ID NO: 1053155 - DNA, 15 bp, Homo sapiens
aggatgtgtcgatct

SEQ ID NO: 1053156 - DNA, 15 bp, Homo sapiens
aaggatgtgtcgatc

SEQ ID NO: 1053157 - DNA, 15 bp, Homo sapiens
aaaggatgtgtcgat

SEQ ID NO: 1053158 - DNA, 15 bp, Homo sapiens
aaaaggatgtgtcga

SEQ ID NO: 1053159 - DNA, 15 bp, Homo sapiens
aaaaaggatgtgtcg

SEQ ID NO: 1053160 - DNA, 15 bp, Homo sapiens
gaaaaaggatgtgtc

SEQ ID NO: 1053161 - DNA, 15 bp, Homo sapiens
ggaaaaaggatgtgt

SEQ ID NO: 1053162 - DNA, 15 bp, Homo sapiens
tggaaaaaggatgtg

SEQ ID NO: 1053163 - DNA, 15 bp, Homo sapiens
ctggaaaaaggatgt

SEQ ID NO: 1053164 - DNA, 15 bp, Homo sapiens
tctggaaaaaggatg

SEQ ID NO: 1053165 - DNA, 15 bp, Homo sapiens
ttctggaaaaaggat

SEQ ID NO: 1053166 - DNA, 15 bp, Homo sapiens
gttctggaaaaagga

SEQ ID NO: 1053167 - DNA, 15 bp, Homo sapiens
tgttctggaaaaagg

SEQ ID NO: 1053168 - DNA, 15 bp, Homo sapiens
atgttctggaaaaag

SEQ ID NO: 1053169 - DNA, 15 bp, Homo sapiens
catgttctggaaaaa

SEQ ID NO: 1053170 - DNA, 15 bp, Homo sapiens
ccatgttctggaaaa

SEQ ID NO: 1053171 - DNA, 15 bp, Homo sapiens
tccatgttctggaaa

SEQ ID NO: 1053172 - DNA, 15 bp, Homo sapiens
atccatgttctggaa

SEQ ID NO: 1053173 - DNA, 15 bp, Homo sapiens
catccatgttctgga

SEQ ID NO: 1053174 - DNA, 15 bp, Homo sapiens
ccatccatgttctgg

SEQ ID NO: 1053175 - DNA, 15 bp, Homo sapiens
gccatccatgttctg

SEQ ID NO: 1053176 - DNA, 15 bp, Homo sapiens
tgccatccatgttct

SEQ ID NO: 1053177 - DNA, 15 bp, Homo sapiens
ttgccatccatgttc

SEQ ID NO: 1053178 - DNA, 15 bp, Homo sapiens
cttgccatccatgtt

SEQ ID NO: 1053179 - DNA, 15 bp, Homo sapiens
ccttgccatccatgt

SEQ ID NO: 1053180 - DNA, 15 bp, Homo sapiens
tccttgccatccatg

SEQ ID NO: 1053181 - DNA, 15 bp, Homo sapiens
ttccttgccatccat

SEQ ID NO: 1053182 - DNA, 15 bp, Homo sapiens
gttccttgccatcca

SEQ ID NO: 1053183 - DNA, 15 bp, Homo sapiens
agttccttgccatcc

SEQ ID NO: 1053184 - DNA, 15 bp, Homo sapiens
cagttccttgccatc

SEQ ID NO: 1053185 - DNA, 15 bp, Homo sapiens
acagttccttgccat

SEQ ID NO: 1053186 - DNA, 15 bp, Homo sapiens
cacagttccttgcca

SEQ ID NO: 1053187 - DNA, 15 bp, Homo sapiens
acacagttccttgcc

SEQ ID NO: 1053188 - DNA, 15 bp, Homo sapiens
tacacagttccttgc

SEQ ID NO: 1053189 - DNA, 15 bp, Homo sapiens
ttacacagttccttg

SEQ ID NO: 1053190 - DNA, 15 bp, Homo sapiens
tttacacagttcctt

SEQ ID NO: 1053191 - DNA, 15 bp, Homo sapiens
ttttacacagttcct

SEQ ID NO: 1053192 - DNA, 15 bp, Homo sapiens
attttacacagttcc

SEQ ID NO: 1053193 - DNA, 15 bp, Homo sapiens
cattttacacagttc

SEQ ID NO: 1053194 - DNA, 15 bp, Homo sapiens
tcattttacacagtt

SEQ ID NO: 1053195 - DNA, 15 bp, Homo sapiens
ttcattttacacagt

SEQ ID NO: 1053196 - DNA, 15 bp, Homo sapiens
gttcattttacacag

SEQ ID NO: 1053197 - DNA, 15 bp, Homo sapiens
tgttcattttacaca

SEQ ID NO: 1053198 - DNA, 15 bp, Homo sapiens
ttgttcattttacac

SEQ ID NO: 1053199 - DNA, 15 bp, Homo sapiens
cttgttcattttaca

SEQ ID NO: 1053200 - DNA, 15 bp, Homo sapiens
ccttgttcattttac

SEQ ID NO: 1053201 - DNA, 15 bp, Homo sapiens
tccttgttcatttta

SEQ ID NO: 1053202 - DNA, 15 bp, Homo sapiens
ctccttgttcatttt

SEQ ID NO: 1053203 - DNA, 15 bp, Homo sapiens
cctccttgttcattt

SEQ ID NO: 1053204 - DNA, 15 bp, Homo sapiens
tcctccttgttcatt

SEQ ID NO: 1053205 - DNA, 15 bp, Homo sapiens
gtcctccttgttcat

SEQ ID NO: 1053206 - DNA, 15 bp, Homo sapiens
agtcctccttgttca

SEQ ID NO: 1053207 - DNA, 15 bp, Homo sapiens
ggaagtcctccttgt

SEQ ID NO: 1053208 - DNA, 15 bp, Homo sapiens
aggaagtcctccttg

SEQ ID NO: 1053209 - DNA, 15 bp, Homo sapiens
gaggaagtcctcctt

SEQ ID NO: 1053210 - DNA, 15 bp, Homo sapiens
ggaggaagtcctcct

SEQ ID NO: 1053211 - DNA, 15 bp, Homo sapiens
cggaggaagtcctcc

SEQ ID NO: 1053212 - DNA, 15 bp, Homo sapiens
gcggaggaagtcctc

SEQ ID NO: 1053213 - DNA, 15 bp, Homo sapiens
cgcggaggaagtcct

SEQ ID NO: 1053214 - DNA, 15 bp, Homo sapiens
gcgcggaggaagtcc

SEQ ID NO: 1053215 - DNA, 15 bp, Homo sapiens
ggcgcggaggaagtc

SEQ ID NO: 1053216 - DNA, 15 bp, Homo sapiens
tggcgcggaggaagt

SEQ ID NO: 1053217 - DNA, 15 bp, Homo sapiens
gtggcgcggaggaag

SEQ ID NO: 1053218 - DNA, 15 bp, Homo sapiens
ggtggcgcggaggaa

SEQ ID NO: 1053219 - DNA, 15 bp, Homo sapiens
tggtggcgcggagga

SEQ ID NO: 1053220 - DNA, 15 bp, Homo sapiens
gtggtggcgcggagg

SEQ ID NO: 1053221 - DNA, 15 bp, Homo sapiens
ggtggtggcgcggag

SEQ ID NO: 1053222 - DNA, 15 bp, Homo sapiens
gggtggtggcgcgga

SEQ ID NO: 1053223 - DNA, 15 bp, Homo sapiens
agggtggtggcgcgg

SEQ ID NO: 1053224 - DNA, 15 bp, Homo sapiens
gagggtggtggcgcg

SEQ ID NO: 1053225 - DNA, 15 bp, Homo sapiens
agagggtggtggcgc

SEQ ID NO: 1053226 - DNA, 15 bp, Homo sapiens
tagagggtggtggcg

SEQ ID NO: 1053227 - DNA, 15 bp, Homo sapiens
gtagagggtggtggc

SEQ ID NO: 1053228 - DNA, 15 bp, Homo sapiens
tgtagagggtggtgg

SEQ ID NO: 1053229 - DNA, 15 bp, Homo sapiens
ttgtagagggtggtg

SEQ ID NO: 1053230 - DNA, 15 bp, Homo sapiens
gttgtagagggtggt

SEQ ID NO: 1053231 - DNA, 15 bp, Homo sapiens
tgttgtagagggtgg

SEQ ID NO: 1053232 - DNA, 15 bp, Homo sapiens
gtgttgtagagggtg

SEQ ID NO: 1053233 - DNA, 15 bp, Homo sapiens
cgtgttgtagagggt

SEQ ID NO: 1053234 - DNA, 15 bp, Homo sapiens
ccgtgttgtagaggg

SEQ ID NO: 1053235 - DNA, 15 bp, Homo sapiens
tccgtgttgtagagg

SEQ ID NO: 1053236 - DNA, 15 bp, Homo sapiens
ttccgtgttgtagag

SEQ ID NO: 1053237 - DNA, 15 bp, Homo sapiens
cttccgtgttgtaga

SEQ ID NO: 1053238 - DNA, 15 bp, Homo sapiens
acttccgtgttgtag

SEQ ID NO: 1053239 - DNA, 15 bp, Homo sapiens
cacttccgtgttgta

SEQ ID NO: 1053240 - DNA, 15 bp, Homo sapiens
gcacttccgtgttgt

SEQ ID NO: 1053241 - DNA, 15 bp, Homo sapiens
agcacttccgtgttg

SEQ ID NO: 1053242 - DNA, 15 bp, Homo sapiens
cagcacttccgtgtt

SEQ ID NO: 1053243 - DNA, 15 bp, Homo sapiens
acagcacttccgtgt

SEQ ID NO: 1053244 - DNA, 15 bp, Homo sapiens
aacagcacttccgtg

SEQ ID NO: 1053245 - DNA, 15 bp, Homo sapiens
caacagcacttccgt

SEQ ID NO: 1053246 - DNA, 15 bp, Homo sapiens
acaacagcacttccg

SEQ ID NO: 1053247 - DNA, 15 bp, Homo sapiens
gacaacagcacttcc

SEQ ID NO: 1053248 - DNA, 15 bp, Homo sapiens
tgacaacagcacttc

SEQ ID NO: 1053249 - DNA, 15 bp, Homo sapiens
gtgacaacagcactt

SEQ ID NO: 1053250 - DNA, 15 bp, Homo sapiens
tgtgacaacagcact

SEQ ID NO: 1053251 - DNA, 15 bp, Homo sapiens
gtgtgacaacagcac

SEQ ID NO: 1053252 - DNA, 15 bp, Homo sapiens
ggtgtgacaacagca

SEQ ID NO: 1053253 - DNA, 15 bp, Homo sapiens
aggtgtgacaacagc

SEQ ID NO: 1053254 - DNA, 15 bp, Homo sapiens
gaggtgtgacaacag

SEQ ID NO: 1053255 - DNA, 15 bp, Homo sapiens
tgaggtgtgacaaca

SEQ ID NO: 1053256 - DNA, 15 bp, Homo sapiens
ctgaggtgtgacaac

SEQ ID NO: 1053257 - DNA, 15 bp, Homo sapiens
actgaggtgtgacaa

SEQ ID NO: 1053258 - DNA, 15 bp, Homo sapiens
aactgaggtgtgaca

SEQ ID NO: 1053259 - DNA, 15 bp, Homo sapiens
taactgaggtgtgac

SEQ ID NO: 1053260 - DNA, 15 bp, Homo sapiens
gtaactgaggtgtga

SEQ ID NO: 1053261 - DNA, 15 bp, Homo sapiens
ggtaactgaggtgtg

SEQ ID NO: 1053262 - DNA, 15 bp, Homo sapiens
aggtaactgaggtgt

SEQ ID NO: 1053263 - DNA, 15 bp, Homo sapiens
gaggtaactgaggtg

SEQ ID NO: 1053264 - DNA, 15 bp, Homo sapiens
tgaggtaactgaggt

SEQ ID NO: 1053265 - DNA, 15 bp, Homo sapiens
ctgaggtaactgagg

SEQ ID NO: 1053266 - DNA, 15 bp, Homo sapiens
cctgaggtaactgag

SEQ ID NO: 1053267 - DNA, 15 bp, Homo sapiens
ccctgaggtaactga

SEQ ID NO: 1053268 - DNA, 15 bp, Homo sapiens
tccctgaggtaactg

SEQ ID NO: 1053269 - DNA, 15 bp, Homo sapiens
ttccctgaggtaact

SEQ ID NO: 1053270 - DNA, 15 bp, Homo sapiens
tttccctgaggtaac

SEQ ID NO: 1053271 - DNA, 15 bp, Homo sapiens
ctttccctgaggtaa

SEQ ID NO: 1053272 - DNA, 15 bp, Homo sapiens
actttccctgaggta

SEQ ID NO: 1053273 - DNA, 15 bp, Homo sapiens
tactttccctgaggt

SEQ ID NO: 1053274 - DNA, 15 bp, Homo sapiens
ttactttccctgagg

SEQ ID NO: 1053275 - DNA, 15 bp, Homo sapiens
cttactttccctgag

SEQ ID NO: 1053276 - DNA, 15 bp, Homo sapiens
acttactttccctga

SEQ ID NO: 1053277 - DNA, 15 bp, Homo sapiens
cacttactttccctg

SEQ ID NO: 1053278 - DNA, 15 bp, Homo sapiens
gcacttactttccct

SEQ ID NO: 1053279 - DNA, 15 bp, Homo sapiens
ggcacttactttccc

SEQ ID NO: 1053280 - DNA, 15 bp, Homo sapiens
cggcacttactttcc

SEQ ID NO: 1053281 - DNA, 15 bp, Homo sapiens
gcggcacttactttc

SEQ ID NO: 1053282 - DNA, 15 bp, Homo sapiens
ggcggcacttacttt

SEQ ID NO: 1053283 - DNA, 15 bp, Homo sapiens
gggcggcacttactt

SEQ ID NO: 1053284 - DNA, 15 bp, Homo sapiens
tgggcggcacttact

SEQ ID NO: 1053285 - DNA, 15 bp, Homo sapiens
ttgggcggcacttac

SEQ ID NO: 1053286 - DNA, 15 bp, Homo sapiens
cttgggcggcactta

SEQ ID NO: 1053287 - DNA, 15 bp, Homo sapiens
acttgggcggcactt

SEQ ID NO: 1053288 - DNA, 15 bp, Homo sapiens
tacttgggcggcact

SEQ ID NO: 1053289 - DNA, 15 bp, Homo sapiens
gtacttgggcggcac

SEQ ID NO: 1053290 - DNA, 15 bp, Homo sapiens
ggtacttgggcggca

SEQ ID NO: 1053291 - DNA, 15 bp, Homo sapiens
gggtacttgggcggc

SEQ ID NO: 1053292 - DNA, 15 bp, Homo sapiens
tgggtacttgggcgg

SEQ ID NO: 1053293 - DNA, 15 bp, Homo sapiens
ctgggtacttgggcg

SEQ ID NO: 1053294 - DNA, 15 bp, Homo sapiens
cctgggtacttgggc

SEQ ID NO: 1053295 - DNA, 15 bp, Homo sapiens
ccctgggtacttggg

SEQ ID NO: 1053296 - DNA, 15 bp, Homo sapiens
gccctgggtacttgg

SEQ ID NO: 1053297 - DNA, 15 bp, Homo sapiens
agccctgggtacttg

SEQ ID NO: 1053298 - DNA, 15 bp, Homo sapiens
cagccctgggtactt

SEQ ID NO: 1053299 - DNA, 15 bp, Homo sapiens
ccagccctgggtact

SEQ ID NO: 1053300 - DNA, 15 bp, Homo sapiens
cccagccctgggtac

SEQ ID NO: 1053301 - DNA, 15 bp, Homo sapiens
tcccagccctgggta

SEQ ID NO: 1053302 - DNA, 15 bp, Homo sapiens
ctcccagccctgggt

SEQ ID NO: 1053303 - DNA, 15 bp, Homo sapiens
cctcccagccctggg

SEQ ID NO: 1053304 - DNA, 15 bp, Homo sapiens
tcctcccagccctgg

SEQ ID NO: 1053305 - DNA, 15 bp, Homo sapiens
ttcctcccagccctg

SEQ ID NO: 1053306 - DNA, 15 bp, Homo sapiens
cttcctcccagccct

SEQ ID NO: 1053307 - DNA, 15 bp, Homo sapiens
gcttcctcccagccc

SEQ ID NO: 1053308 - DNA, 15 bp, Homo sapiens
agcttcctcccagcc

SEQ ID NO: 1053309 - DNA, 15 bp, Homo sapiens
aagcttcctcccagc

SEQ ID NO: 1053310 - DNA, 15 bp, Homo sapiens
caagcttcctcccag

SEQ ID NO: 1053311 - DNA, 15 bp, Homo sapiens
ccaagcttcctccca

SEQ ID NO: 1053312 - DNA, 15 bp, Homo sapiens
gccaagcttcctccc

SEQ ID NO: 1053313 - DNA, 15 bp, Homo sapiens
tgccaagcttcctcc

SEQ ID NO: 1053314 - DNA, 15 bp, Homo sapiens
atgccaagcttcctc

SEQ ID NO: 1053315 - DNA, 15 bp, Homo sapiens
catgccaagcttcct

SEQ ID NO: 1053316 - DNA, 15 bp, Homo sapiens
ccatgccaagcttcc

SEQ ID NO: 1053317 - DNA, 15 bp, Homo sapiens
tccatgccaagcttc

SEQ ID NO: 1053318 - DNA, 15 bp, Homo sapiens
ctccatgccaagctt

SEQ ID NO: 1053319 - DNA, 15 bp, Homo sapiens
gctccatgccaagct

SEQ ID NO: 1053320 - DNA, 15 bp, Homo sapiens
ggctccatgccaagc

SEQ ID NO: 1053321 - DNA, 15 bp, Homo sapiens
tggctccatgccaag

SEQ ID NO: 1053322 - DNA, 15 bp, Homo sapiens
ttggctccatgccaa

SEQ ID NO: 1053323 - DNA, 15 bp, Homo sapiens
gttggctccatgcca

SEQ ID NO: 1053324 - DNA, 15 bp, Homo sapiens
ggttggctccatgcc

SEQ ID NO: 1053325 - DNA, 15 bp, Homo sapiens
gggttggctccatgc

SEQ ID NO: 1053326 - DNA, 15 bp, Homo sapiens
tgggttggctccatg

SEQ ID NO: 1053327 - DNA, 15 bp, Homo sapiens
ctgggttggctccat

SEQ ID NO: 1053328 - DNA, 15 bp, Homo sapiens
cctgggttggctcca

SEQ ID NO: 1053329 - DNA, 15 bp, Homo sapiens
ccctgggttggctcc

SEQ ID NO: 1053330 - DNA, 15 bp, Homo sapiens
tccctgggttggctc

SEQ ID NO: 1053331 - DNA, 15 bp, Homo sapiens
ctccctgggttggct

SEQ ID NO: 1053332 - DNA, 15 bp, Homo sapiens
tctccctgggttggc

SEQ ID NO: 1053333 - DNA, 15 bp, Homo sapiens
ctctccctgggttgg

SEQ ID NO: 1053334 - DNA, 15 bp, Homo sapiens
cctctccctgggttg

SEQ ID NO: 1053335 - DNA, 15 bp, Homo sapiens
tcctctccctgggtt

SEQ ID NO: 1053336 - DNA, 15 bp, Homo sapiens
ttcctctccctgggt

SEQ ID NO: 1053337 - DNA, 15 bp, Homo sapiens
cttcctctccctggg

SEQ ID NO: 1053338 - DNA, 15 bp, Homo sapiens
acttcctctccctgg

SEQ ID NO: 1053339 - DNA, 15 bp, Homo sapiens
gacttcctctccctg

SEQ ID NO: 1053340 - DNA, 15 bp, Homo sapiens
tgacttcctctccct

SEQ ID NO: 1053341 - DNA, 15 bp, Homo sapiens
ctgacttcctctccc

SEQ ID NO: 1053342 - DNA, 15 bp, Homo sapiens
actgacttcctctcc

SEQ ID NO: 1053343 - DNA, 15 bp, Homo sapiens
cactgacttcctctc

SEQ ID NO: 1053344 - DNA, 15 bp, Homo sapiens
gcactgacttcctct

SEQ ID NO: 1053345 - DNA, 15 bp, Homo sapiens
agcactgacttcctc

SEQ ID NO: 1053346 - DNA, 15 bp, Homo sapiens
cagcactgacttcct

SEQ ID NO: 1053347 - DNA, 15 bp, Homo sapiens
gcagcactgacttcc

SEQ ID NO: 1053348 - DNA, 15 bp, Homo sapiens
ggcagcactgacttc

SEQ ID NO: 1053349 - DNA, 15 bp, Homo sapiens
gggcagcactgactt

SEQ ID NO: 1053350 - DNA, 15 bp, Homo sapiens
cgggcagcactgact

SEQ ID NO: 1053351 - DNA, 15 bp, Homo sapiens
acgggcagcactgac

SEQ ID NO: 1053352 - DNA, 15 bp, Homo sapiens
aacgggcagcactga

SEQ ID NO: 1053353 - DNA, 15 bp, Homo sapiens
gaacgggcagcactg

SEQ ID NO: 1053354 - DNA, 15 bp, Homo sapiens
cgaacgggcagcact

SEQ ID NO: 1053355 - DNA, 15 bp, Homo sapiens
acgaacgggcagcac

SEQ ID NO: 1053356 - DNA, 15 bp, Homo sapiens
cacgaacgggcagca

SEQ ID NO: 1053357 - DNA, 15 bp, Homo sapiens
acacgaacgggcagc

SEQ ID NO: 1053358 - DNA, 15 bp, Homo sapiens
aacacgaacgggcag

SEQ ID NO: 1053359 - DNA, 15 bp, Homo sapiens
caacacgaacgggca

SEQ ID NO: 1053360 - DNA, 15 bp, Homo sapiens
ccaacacgaacgggc

SEQ ID NO: 1053361 - DNA, 15 bp, Homo sapiens
cccaacacgaacggg

SEQ ID NO: 1053362 - DNA, 15 bp, Homo sapiens
gcccaacacgaacgg

SEQ ID NO: 1053363 - DNA, 15 bp, Homo sapiens
tgcccaacacgaacg

SEQ ID NO: 1053364 - DNA, 15 bp, Homo sapiens
ctgcccaacacgaac

SEQ ID NO: 1053365 - DNA, 15 bp, Homo sapiens
tctgcccaacacgaa

SEQ ID NO: 1053366 - DNA, 15 bp, Homo sapiens
atctgcccaacacga

SEQ ID NO: 1053367 - DNA, 15 bp, Homo sapiens
catctgcccaacacg

SEQ ID NO: 1053368 - DNA, 15 bp, Homo sapiens
gcatctgcccaacac

SEQ ID NO: 1053369 - DNA, 15 bp, Homo sapiens
ggcatctgcccaaca

SEQ ID NO: 1053370 - DNA, 15 bp, Homo sapiens
cggcatctgcccaac

SEQ ID NO: 1053371 - DNA, 15 bp, Homo sapiens
gcggcatctgcccaa

SEQ ID NO: 1053372 - DNA, 15 bp, Homo sapiens
ggcggcatctgccca

SEQ ID NO: 1053373 - DNA, 15 bp, Homo sapiens
cggcggcatctgccc

SEQ ID NO: 1053374 - DNA, 15 bp, Homo sapiens
ccggcggcatctgcc

SEQ ID NO: 1053375 - DNA, 15 bp, Homo sapiens
tccggcggcatctgc

SEQ ID NO: 1053376 - DNA, 15 bp, Homo sapiens
ctccggcggcatctg

SEQ ID NO: 1053377 - DNA, 15 bp, Homo sapiens
gctccggcggcatct

SEQ ID NO: 1053378 - DNA, 15 bp, Homo sapiens
tgctccggcggcatc

SEQ ID NO: 1053379 - DNA, 15 bp, Homo sapiens
ctgctccggcggcat

SEQ ID NO: 1053380 - DNA, 15 bp, Homo sapiens
gctgctccggcggca

SEQ ID NO: 1053381 - DNA, 15 bp, Homo sapiens
tgctgctccggcggc

SEQ ID NO: 1053382 - DNA, 15 bp, Homo sapiens
atgctgctccggcgg

SEQ ID NO: 1053383 - DNA, 15 bp, Homo sapiens
gatgctgctccggcg

SEQ ID NO: 1053384 - DNA, 15 bp, Homo sapiens
cgatgctgctccggc

SEQ ID NO: 1053385 - DNA, 15 bp, Homo sapiens
acgatgctgctccgg

SEQ ID NO: 1053386 - DNA, 15 bp, Homo sapiens
cacgatgctgctccg

SEQ ID NO: 1053387 - DNA, 15 bp, Homo sapiens
ccacgatgctgctcc

SEQ ID NO: 1053388 - DNA, 15 bp, Homo sapiens
cccacgatgctgctc

SEQ ID NO: 1053389 - DNA, 15 bp, Homo sapiens
ccccacgatgctgct

SEQ ID NO: 1053390 - DNA, 15 bp, Homo sapiens
gccccacgatgctgc

SEQ ID NO: 1053391 - DNA, 15 bp, Homo sapiens
ggccccacgatgctg

SEQ ID NO: 1053392 - DNA, 15 bp, Homo sapiens
aggccccacgatgct

SEQ ID NO: 1053393 - DNA, 15 bp, Homo sapiens
caggccccacgatgc

SEQ ID NO: 1053394 - DNA, 15 bp, Homo sapiens
acaggccccacgatg

SEQ ID NO: 1053395 - DNA, 15 bp, Homo sapiens
tacaggccccacgat

SEQ ID NO: 1053396 - DNA, 15 bp, Homo sapiens
ctacaggccccacga

SEQ ID NO: 1053397 - DNA, 15 bp, Homo sapiens
actacaggccccacg

SEQ ID NO: 1053398 - DNA, 15 bp, Homo sapiens
cactacaggccccac

SEQ ID NO: 1053399 - DNA, 15 bp, Homo sapiens
acactacaggcccca

SEQ ID NO: 1053400 - DNA, 15 bp, Homo sapiens
aacactacaggcccc

SEQ ID NO: 1053401 - DNA, 15 bp, Homo sapiens
caacactacaggccc

SEQ ID NO: 1053402 - DNA, 15 bp, Homo sapiens
gcaacactacaggcc

SEQ ID NO: 1053403 - DNA, 15 bp, Homo sapiens
ggcaacactacaggc

SEQ ID NO: 1053404 - DNA, 15 bp, Homo sapiens
tggcaacactacagg

SEQ ID NO: 1053405 - DNA, 15 bp, Homo sapiens
ttggcaacactacag

SEQ ID NO: 1053406 - DNA, 15 bp, Homo sapiens
cttggcaacactaca

SEQ ID NO: 1053407 - DNA, 15 bp, Homo sapiens
ccttggcaacactac

SEQ ID NO: 1053408 - DNA, 15 bp, Homo sapiens
accttggcaacacta

SEQ ID NO: 1053409 - DNA, 15 bp, Homo sapiens
gaccttggcaacact

SEQ ID NO: 1053410 - DNA, 15 bp, Homo sapiens
tgaccttggcaacac

SEQ ID NO: 1053411 - DNA, 15 bp, Homo sapiens
gtgaccttggcaaca

SEQ ID NO: 1053412 - DNA, 15 bp, Homo sapiens
cgtgaccttggcaac

SEQ ID NO: 1053413 - DNA, 15 bp, Homo sapiens
acgtgaccttggcaa

SEQ ID NO: 1053414 - DNA, 15 bp, Homo sapiens
cacgtgaccttggca

SEQ ID NO: 1053415 - DNA, 15 bp, Homo sapiens
ccacgtgaccttggc

SEQ ID NO: 1053416 - DNA, 15 bp, Homo sapiens
cccacgtgaccttgg

SEQ ID NO: 1053417 - DNA, 15 bp, Homo sapiens
gcccacgtgaccttg

SEQ ID NO: 1053418 - DNA, 15 bp, Homo sapiens
agcccacgtgacctt

SEQ ID NO: 1053419 - DNA, 15 bp, Homo sapiens
gagcccacgtgacct

SEQ ID NO: 1053420 - DNA, 15 bp, Homo sapiens
ggagcccacgtgacc

SEQ ID NO: 1053421 - DNA, 15 bp, Homo sapiens
aggagcccacgtgac

SEQ ID NO: 1053422 - DNA, 15 bp, Homo sapiens
taggagcccacgtga

SEQ ID NO: 1053423 - DNA, 15 bp, Homo sapiens
gtaggagcccacgtg

SEQ ID NO: 1053424 - DNA, 15 bp, Homo sapiens
tgtaggagcccacgt

SEQ ID NO: 1053425 - DNA, 15 bp, Homo sapiens
ctgtaggagcccacg

SEQ ID NO: 1053426 - DNA, 15 bp, Homo sapiens
tctgtaggagcccac

SEQ ID NO: 1053427 - DNA, 15 bp, Homo sapiens
gtctgtaggagccca

SEQ ID NO: 1053428 - DNA, 15 bp, Homo sapiens
ggtctgtaggagccc

SEQ ID NO: 1053429 - DNA, 15 bp, Homo sapiens
gggtctgtaggagcc

SEQ ID NO: 1053430 - DNA, 15 bp, Homo sapiens
agggtctgtaggagc

SEQ ID NO: 1053431 - DNA, 15 bp, Homo sapiens
cagggtctgtaggag

SEQ ID NO: 1053432 - DNA, 15 bp, Homo sapiens
acagggtctgtagga

SEQ ID NO: 1053433 - DNA, 15 bp, Homo sapiens
cacagggtctgtagg

SEQ ID NO: 1053434 - DNA, 15 bp, Homo sapiens
tcacagggtctgtag

SEQ ID NO: 1053435 - DNA, 15 bp, Homo sapiens
ctcacagggtctgta

SEQ ID NO: 1053436 - DNA, 15 bp, Homo sapiens
cctcacagggtctgt

SEQ ID NO: 1053437 - DNA, 15 bp, Homo sapiens
ccctcacagggtctg

SEQ ID NO: 1053438 - DNA, 15 bp, Homo sapiens
cccctcacagggtct

SEQ ID NO: 1053439 - DNA, 15 bp, Homo sapiens
gcccctcacagggtc

SEQ ID NO: 1053440 - DNA, 15 bp, Homo sapiens
tgcccctcacagggt

SEQ ID NO: 1053441 - DNA, 15 bp, Homo sapiens
ctgcccctcacaggg

SEQ ID NO: 1053442 - DNA, 15 bp, Homo sapiens
tctgcccctcacagg

SEQ ID NO: 1053443 - DNA, 15 bp, Homo sapiens
gtctgcccctcacag

SEQ ID NO: 1053444 - DNA, 15 bp, Homo sapiens
ggtctgcccctcaca

SEQ ID NO: 1053445 - DNA, 15 bp, Homo sapiens
gggtctgcccctcac

SEQ ID NO: 1053446 - DNA, 15 bp, Homo sapiens
tgggtctgcccctca

SEQ ID NO: 1053447 - DNA, 15 bp, Homo sapiens
ttgggtctgcccctc

SEQ ID NO: 1053448 - DNA, 15 bp, Homo sapiens
attgggtctgcccct

SEQ ID NO: 1053449 - DNA, 15 bp, Homo sapiens
gattgggtctgcccc

SEQ ID NO: 1053450 - DNA, 15 bp, Homo sapiens
ggattgggtctgccc

SEQ ID NO: 1053451 - DNA, 15 bp, Homo sapiens
aggattgggtctgcc

SEQ ID NO: 1053452 - DNA, 15 bp, Homo sapiens
caggattgggtctgc

SEQ ID NO: 1053453 - DNA, 15 bp, Homo sapiens
tcaggattgggtctg

SEQ ID NO: 1053454 - DNA, 15 bp, Homo sapiens
ttcaggattgggtct

SEQ ID NO: 1053455 - DNA, 15 bp, Homo sapiens
cttcaggattgggtc

SEQ ID NO: 1053456 - DNA, 15 bp, Homo sapiens
acttcaggattgggt

SEQ ID NO: 1053457 - DNA, 15 bp, Homo sapiens
cacttcaggattggg

SEQ ID NO: 1053458 - DNA, 15 bp, Homo sapiens
acacttcaggattgg

SEQ ID NO: 1053459 - DNA, 15 bp, Homo sapiens
gacacttcaggattg

SEQ ID NO: 1053460 - DNA, 15 bp, Homo sapiens
tgacacttcaggatt

SEQ ID NO: 1053461 - DNA, 15 bp, Homo sapiens
ttgacacttcaggat

SEQ ID NO: 1053462 - DNA, 15 bp, Homo sapiens
tttgacacttcagga

SEQ ID NO: 1053463 - DNA, 15 bp, Homo sapiens
ctttgacacttcagg

SEQ ID NO: 1053464 - DNA, 15 bp, Homo sapiens
cctttgacacttcag

SEQ ID NO: 1053465 - DNA, 15 bp, Homo sapiens
tcctttgacacttca

SEQ ID NO: 1053466 - DNA, 15 bp, Homo sapiens
ttcctttgacacttc

SEQ ID NO: 1053467 - DNA, 15 bp, Homo sapiens
cttcctttgacactt

SEQ ID NO: 1053468 - DNA, 15 bp, Homo sapiens
acttcctttgacact

SEQ ID NO: 1053469 - DNA, 15 bp, Homo sapiens
tacttcctttgacac

SEQ ID NO: 1053470 - DNA, 15 bp, Homo sapiens
ttacttcctttgaca

SEQ ID NO: 1053471 - DNA, 15 bp, Homo sapiens
cttacttcctttgac

SEQ ID NO: 1053472 - DNA, 15 bp, Homo sapiens
tcttacttcctttga

SEQ ID NO: 1053473 - DNA, 15 bp, Homo sapiens
gtcttacttcctttg

SEQ ID NO: 1053474 - DNA, 15 bp, Homo sapiens
cgtcttacttccttt

SEQ ID NO: 1053475 - DNA, 15 bp, Homo sapiens
tcgtcttacttcctt

SEQ ID NO: 1053476 - DNA, 15 bp, Homo sapiens
ctcgtcttacttcct

SEQ ID NO: 1053477 - DNA, 15 bp, Homo sapiens
tctcgtcttacttcc

SEQ ID NO: 1053478 - DNA, 15 bp, Homo sapiens
ttctcgtcttacttc

SEQ ID NO: 1053479 - DNA, 15 bp, Homo sapiens
tttctcgtcttactt

SEQ ID NO: 1053480 - DNA, 15 bp, Homo sapiens
atttctcgtcttact

SEQ ID NO: 1053481 - DNA, 15 bp, Homo sapiens
catttctcgtcttac

SEQ ID NO: 1053482 - DNA, 15 bp, Homo sapiens
ccatttctcgtctta

SEQ ID NO: 1053483 - DNA, 15 bp, Homo sapiens
tccatttctcgtctt

SEQ ID NO: 1053484 - DNA, 15 bp, Homo sapiens
ctccatttctcgtct

SEQ ID NO: 1053485 - DNA, 15 bp, Homo sapiens
tctccatttctcgtc

SEQ ID NO: 1053486 - DNA, 15 bp, Homo sapiens
ttctccatttctcgt

SEQ ID NO: 1053487 - DNA, 15 bp, Homo sapiens
tttctccatttctcg

SEQ ID NO: 1053488 - DNA, 15 bp, Homo sapiens
ttttctccatttctc

SEQ ID NO: 1053489 - DNA, 15 bp, Homo sapiens
cttttctccatttct

SEQ ID NO: 1053490 - DNA, 15 bp, Homo sapiens
acttttctccatttc

SEQ ID NO: 1053491 - DNA, 15 bp, Homo sapiens
tacttttctccattt

SEQ ID NO: 1053492 - DNA, 15 bp, Homo sapiens
ctacttttctccatt

SEQ ID NO: 1053493 - DNA, 15 bp, Homo sapiens
tctacttttctccat

SEQ ID NO: 1053494 - DNA, 15 bp, Homo sapiens
ctctacttttctcca

SEQ ID NO: 1053495 - DNA, 15 bp, Homo sapiens
tctctacttttctcc

SEQ ID NO: 1053496 - DNA, 15 bp, Homo sapiens
ctctctacttttctc

SEQ ID NO: 1053497 - DNA, 15 bp, Homo sapiens
gctctctacttttct

SEQ ID NO: 1053498 - DNA, 15 bp, Homo sapiens
agctctctacttttc

SEQ ID NO: 1053499 - DNA, 15 bp, Homo sapiens
cagctctctactttt

SEQ ID NO: 1053500 - DNA, 15 bp, Homo sapiens
acagctctctacttt

SEQ ID NO: 1053501 - DNA, 15 bp, Homo sapiens
cacagctctctactt

SEQ ID NO: 1053502 - DNA, 15 bp, Homo sapiens
tcacagctctctact

SEQ ID NO: 1053503 - DNA, 15 bp, Homo sapiens
gtcacagctctctac

SEQ ID NO: 1053504 - DNA, 15 bp, Homo sapiens
ggtcacagctctcta

SEQ ID NO: 1053505 - DNA, 15 bp, Homo sapiens
aggtcacagctctct

SEQ ID NO: 1053506 - DNA, 15 bp, Homo sapiens
caggtcacagctctc

SEQ ID NO: 1053507 - DNA, 15 bp, Homo sapiens
ccaggtcacagctct

SEQ ID NO: 1053508 - DNA, 15 bp, Homo sapiens
tccaggtcacagctc

SEQ ID NO: 1053509 - DNA, 15 bp, Homo sapiens
ctccaggtcacagct

SEQ ID NO: 1053510 - DNA, 15 bp, Homo sapiens
cctccaggtcacagc

SEQ ID NO: 1053511 - DNA, 15 bp, Homo sapiens
ccctccaggtcacag

SEQ ID NO: 1053512 - DNA, 15 bp, Homo sapiens
cccctccaggtcaca

SEQ ID NO: 1053513 - DNA, 15 bp, Homo sapiens
acccctccaggtcac

SEQ ID NO: 1053514 - DNA, 15 bp, Homo sapiens
gacccctccaggtca

SEQ ID NO: 1053515 - DNA, 15 bp, Homo sapiens
agacccctccaggtc

SEQ ID NO: 1053516 - DNA, 15 bp, Homo sapiens
cagacccctccaggt

SEQ ID NO: 1053517 - DNA, 15 bp, Homo sapiens
ccagacccctccagg

SEQ ID NO: 1053518 - DNA, 15 bp, Homo sapiens
gccagacccctccag

SEQ ID NO: 1053519 - DNA, 15 bp, Homo sapiens
tgccagacccctcca

SEQ ID NO: 1053520 - DNA, 15 bp, Homo sapiens
ctgccagacccctcc

SEQ ID NO: 1053521 - DNA, 15 bp, Homo sapiens
tctgccagacccctc

SEQ ID NO: 1053522 - DNA, 15 bp, Homo sapiens
ctctgccagacccct

SEQ ID NO: 1053523 - DNA, 15 bp, Homo sapiens
cctctgccagacccc

SEQ ID NO: 1053524 - DNA, 15 bp, Homo sapiens
gcctctgccagaccc

SEQ ID NO: 1053525 - DNA, 15 bp, Homo sapiens
agcctctgccagacc

SEQ ID NO: 1053526 - DNA, 15 bp, Homo sapiens
cagcctctgccagac

SEQ ID NO: 1053527 - DNA, 15 bp, Homo sapiens
ccagcctctgccaga

SEQ ID NO: 1053528 - DNA, 15 bp, Homo sapiens
accagcctctgccag

SEQ ID NO: 1053529 - DNA, 15 bp, Homo sapiens
aaccagcctctgcca

SEQ ID NO: 1053530 - DNA, 15 bp, Homo sapiens
taaccagcctctgcc

SEQ ID NO: 1053531 - DNA, 15 bp, Homo sapiens
gtaaccagcctctgc

SEQ ID NO: 1053532 - DNA, 15 bp, Homo sapiens
tgtaaccagcctctg

SEQ ID NO: 1053533 - DNA, 15 bp, Homo sapiens
gtgtaaccagcctct

SEQ ID NO: 1053534 - DNA, 15 bp, Homo sapiens
agtgtaaccagcctc

SEQ ID NO: 1053535 - DNA, 15 bp, Homo sapiens
gagtgtaaccagcct

SEQ ID NO: 1053536 - DNA, 15 bp, Homo sapiens
agagtgtaaccagcc

SEQ ID NO: 1053537 - DNA, 15 bp, Homo sapiens
aagagtgtaaccagc

SEQ ID NO: 1053538 - DNA, 15 bp, Homo sapiens
gaagagtgtaaccag

SEQ ID NO: 1053539 - DNA, 15 bp, Homo sapiens
ggaagagtgtaacca

SEQ ID NO: 1053540 - DNA, 15 bp, Homo sapiens
gggaagagtgtaacc

SEQ ID NO: 1053541 - DNA, 15 bp, Homo sapiens
tgggaagagtgtaac

SEQ ID NO: 1053542 - DNA, 15 bp, Homo sapiens
atgggaagagtgtaa

SEQ ID NO: 1053543 - DNA, 15 bp, Homo sapiens
catgggaagagtgta

SEQ ID NO: 1053544 - DNA, 15 bp, Homo sapiens
tcatgggaagagtgt

SEQ ID NO: 1053545 - DNA, 15 bp, Homo sapiens
ctcatgggaagagtg

SEQ ID NO: 1053546 - DNA, 15 bp, Homo sapiens
tctcatgggaagagt

SEQ ID NO: 1053547 - DNA, 15 bp, Homo sapiens
gtctcatgggaagag

SEQ ID NO: 1053548 - DNA, 15 bp, Homo sapiens
ggtctcatgggaaga

SEQ ID NO: 1053549 - DNA, 15 bp, Homo sapiens
cggtctcatgggaag

SEQ ID NO: 1053550 - DNA, 15 bp, Homo sapiens
gcggtctcatgggaa

SEQ ID NO: 1053551 - DNA, 15 bp, Homo sapiens
ggcggtctcatggga

SEQ ID NO: 1053552 - DNA, 15 bp, Homo sapiens
aggcggtctcatggg

SEQ ID NO: 1053553 - DNA, 15 bp, Homo sapiens
aaggcggtctcatgg

SEQ ID NO: 1053554 - DNA, 15 bp, Homo sapiens
aaaggcggtctcatg

SEQ ID NO: 1053555 - DNA, 15 bp, Homo sapiens
gaaaggcggtctcat

SEQ ID NO: 1053556 - DNA, 15 bp, Homo sapiens
ggaaaggcggtctca

SEQ ID NO: 1053557 - DNA, 15 bp, Homo sapiens
tggaaaggcggtctc

SEQ ID NO: 1053558 - DNA, 15 bp, Homo sapiens
ctggaaaggcggtct

SEQ ID NO: 1053559 - DNA, 15 bp, Homo sapiens
tctggaaaggcggtc

SEQ ID NO: 1053560 - DNA, 15 bp, Homo sapiens
ttctggaaaggcggt

SEQ ID NO: 1053561 - DNA, 15 bp, Homo sapiens
tttctggaaaggcgg

SEQ ID NO: 1053562 - DNA, 15 bp, Homo sapiens
gtttctggaaaggcg

SEQ ID NO: 1053563 - DNA, 15 bp, Homo sapiens
agtttctggaaaggc

SEQ ID NO: 1053564 - DNA, 15 bp, Homo sapiens
tagtttctggaaagg

SEQ ID NO: 1053565 - DNA, 15 bp, Homo sapiens
atagtttctggaaag

SEQ ID NO: 1053566 - DNA, 15 bp, Homo sapiens
aatagtttctggaaa

SEQ ID NO: 1053567 - DNA, 15 bp, Homo sapiens
gaatagtttctggaa

SEQ ID NO: 1053568 - DNA, 15 bp, Homo sapiens
ggaatagtttctgga

SEQ ID NO: 1053569 - DNA, 15 bp, Homo sapiens
tggaatagtttctgg

SEQ ID NO: 1053570 - DNA, 15 bp, Homo sapiens
ttggaatagtttctg

SEQ ID NO: 1053571 - DNA, 15 bp, Homo sapiens
attggaatagtttct

SEQ ID NO: 1053572 - DNA, 15 bp, Homo sapiens
aattggaatagtttc

SEQ ID NO: 1053573 - DNA, 15 bp, Homo sapiens
aaattggaatagttt

SEQ ID NO: 1053574 - DNA, 15 bp, Homo sapiens
caaattggaatagtt

SEQ ID NO: 1053575 - DNA, 15 bp, Homo sapiens
tcaaattggaatagt

SEQ ID NO: 1053576 - DNA, 15 bp, Homo sapiens
ttcaaattggaatag

SEQ ID NO: 1053577 - DNA, 15 bp, Homo sapiens
tttcaaattggaata

SEQ ID NO: 1053578 - DNA, 15 bp, Homo sapiens
ttttcaaattggaat

SEQ ID NO: 1053579 - DNA, 15 bp, Homo sapiens
attttcaaattggaa

SEQ ID NO: 1053580 - DNA, 15 bp, Homo sapiens
tattttcaaattgga

SEQ ID NO: 1053581 - DNA, 15 bp, Homo sapiens
ctattttcaaattgg

SEQ ID NO: 1053582 - DNA, 15 bp, Homo sapiens
tctattttcaaattg

SEQ ID NO: 1053583 - DNA, 15 bp, Homo sapiens
atctattttcaaatt

SEQ ID NO: 1053584 - DNA, 15 bp, Homo sapiens
tatctattttcaaat

SEQ ID NO: 1053585 - DNA, 15 bp, Homo sapiens
ctatctattttcaaa

SEQ ID NO: 1053586 - DNA, 15 bp, Homo sapiens
tctatctattttcaa

SEQ ID NO: 1053587 - DNA, 15 bp, Homo sapiens
ctctatctattttca

SEQ ID NO: 1053588 - DNA, 15 bp, Homo sapiens
tctctatctattttc

SEQ ID NO: 1053589 - DNA, 15 bp, Homo sapiens
atctctatctatttt

SEQ ID NO: 1053590 - DNA, 15 bp, Homo sapiens
catctctatctattt

SEQ ID NO: 1053591 - DNA, 15 bp, Homo sapiens
ccatctctatctatt

SEQ ID NO: 1053592 - DNA, 15 bp, Homo sapiens
cccatctctatctat

SEQ ID NO: 1053593 - DNA, 15 bp, Homo sapiens
acccatctctatcta

SEQ ID NO: 1053594 - DNA, 15 bp, Homo sapiens
cacccatctctatct

SEQ ID NO: 1053595 - DNA, 15 bp, Homo sapiens
ccacccatctctatc

SEQ ID NO: 1053596 - DNA, 15 bp, Homo sapiens
accacccatctctat

SEQ ID NO: 1053597 - DNA, 15 bp, Homo sapiens
caccacccatctcta

SEQ ID NO: 1053598 - DNA, 15 bp, Homo sapiens
gcaccacccatctct

SEQ ID NO: 1053599 - DNA, 15 bp, Homo sapiens
ggcaccacccatctc

SEQ ID NO: 1053600 - DNA, 15 bp, Homo sapiens
gggcaccacccatct

SEQ ID NO: 1053601 - DNA, 15 bp, Homo sapiens
agggcaccacccatc

SEQ ID NO: 1053602 - DNA, 15 bp, Homo sapiens
cagggcaccacccat

SEQ ID NO: 1053603 - DNA, 15 bp, Homo sapiens
ccagggcaccaccca

SEQ ID NO: 1053604 - DNA, 15 bp, Homo sapiens
gccagggcaccaccc

SEQ ID NO: 1053605 - DNA, 15 bp, Homo sapiens
agccagggcaccacc

SEQ ID NO: 1053606 - DNA, 15 bp, Homo sapiens
cagccagggcaccac

SEQ ID NO: 1053607 - DNA, 15 bp, Homo sapiens
ccagccagggcacca

SEQ ID NO: 1053608 - DNA, 15 bp, Homo sapiens
accagccagggcacc

SEQ ID NO: 1053609 - DNA, 15 bp, Homo sapiens
caccagccagggcac

SEQ ID NO: 1053610 - DNA, 15 bp, Homo sapiens
acaccagccagggca

SEQ ID NO: 1053611 - DNA, 15 bp, Homo sapiens
aacaccagccagggc

SEQ ID NO: 1053612 - DNA, 15 bp, Homo sapiens
aaacaccagccaggg

SEQ ID NO: 1053613 - DNA, 15 bp, Homo sapiens
aaaacaccagccagg

SEQ ID NO: 1053614 - DNA, 15 bp, Homo sapiens
gaaaacaccagccag

SEQ ID NO: 1053615 - DNA, 15 bp, Homo sapiens
ggaaaacaccagcca

SEQ ID NO: 1053616 - DNA, 15 bp, Homo sapiens
aggaaaacaccagcc

SEQ ID NO: 1053617 - DNA, 15 bp, Homo sapiens
taggaaaacaccagc

SEQ ID NO: 1053618 - DNA, 15 bp, Homo sapiens
ttaggaaaacaccag

SEQ ID NO: 1053619 - DNA, 15 bp, Homo sapiens
cttaggaaaacacca

SEQ ID NO: 1053620 - DNA, 15 bp, Homo sapiens
acttaggaaaacacc

SEQ ID NO: 1053621 - DNA, 15 bp, Homo sapiens
cacttaggaaaacac

SEQ ID NO: 1053622 - DNA, 15 bp, Homo sapiens
tcacttaggaaaaca

SEQ ID NO: 1053623 - DNA, 15 bp, Homo sapiens
atcacttaggaaaac

SEQ ID NO: 1053624 - DNA, 15 bp, Homo sapiens
ataatcacttaggaa

SEQ ID NO: 1053625 - DNA, 15 bp, Homo sapiens
aataatcacttagga

SEQ ID NO: 1053626 - DNA, 15 bp, Homo sapiens
aaataatcacttagg

SEQ ID NO: 1053627 - DNA, 15 bp, Homo sapiens
taaataatcacttag

SEQ ID NO: 1053628 - DNA, 15 bp, Homo sapiens
ttaaataatcactta

SEQ ID NO: 1053629 - DNA, 15 bp, Homo sapiens
tttaaataatcactt

SEQ ID NO: 1053630 - DNA, 15 bp, Homo sapiens
ttttaaataatcact

SEQ ID NO: 1053631 - DNA, 15 bp, Homo sapiens
attttaaataatcac

SEQ ID NO: 1053632 - DNA, 15 bp, Homo sapiens
aattttaaataatca

SEQ ID NO: 1053633 - DNA, 15 bp, Homo sapiens
gaattttaaataatc

SEQ ID NO: 1053634 - DNA, 15 bp, Homo sapiens
ggaattttaaataat

SEQ ID NO: 1053635 - DNA, 15 bp, Homo sapiens
aggaattttaaataa

SEQ ID NO: 1053636 - DNA, 15 bp, Homo sapiens
gaggaattttaaata

SEQ ID NO: 1053637 - DNA, 15 bp, Homo sapiens
ggaggaattttaaat

SEQ ID NO: 1053638 - DNA, 15 bp, Homo sapiens
tggaggaattttaaa

SEQ ID NO: 1053639 - DNA, 15 bp, Homo sapiens
ctggaggaattttaa

SEQ ID NO: 1053640 - DNA, 15 bp, Homo sapiens
cctggaggaatttta

SEQ ID NO: 1053641 - DNA, 15 bp, Homo sapiens
tcctggaggaatttt

SEQ ID NO: 1053642 - DNA, 15 bp, Homo sapiens
ttcctggaggaattt

SEQ ID NO: 1053643 - DNA, 15 bp, Homo sapiens
tttcctggaggaatt

SEQ ID NO: 1053644 - DNA, 15 bp, Homo sapiens
gtttcctggaggaat

SEQ ID NO: 1053645 - DNA, 15 bp, Homo sapiens
agtttcctggaggaa

SEQ ID NO: 1053646 - DNA, 15 bp, Homo sapiens
gagtttcctggagga

SEQ ID NO: 1053647 - DNA, 15 bp, Homo sapiens
agagtttcctggagg

SEQ ID NO: 1053648 - DNA, 15 bp, Homo sapiens
tagagtttcctggag

SEQ ID NO: 1053649 - DNA, 15 bp, Homo sapiens
ctagagtttcctgga

SEQ ID NO: 1053650 - DNA, 15 bp, Homo sapiens
tctagagtttcctgg

SEQ ID NO: 1053651 - DNA, 15 bp, Homo sapiens
atctagagtttcctg

SEQ ID NO: 1053652 - DNA, 15 bp, Homo sapiens
aatctagagtttcct

SEQ ID NO: 1053653 - DNA, 15 bp, Homo sapiens
gaatctagagtttcc

SEQ ID NO: 1053654 - DNA, 15 bp, Homo sapiens
tgaatctagagtttc

SEQ ID NO: 1053655 - DNA, 15 bp, Homo sapiens
ttgaatctagagttt

SEQ ID NO: 1053656 - DNA, 15 bp, Homo sapiens
cttgaatctagagtt

SEQ ID NO: 1053657 - DNA, 15 bp, Homo sapiens
ccttgaatctagagt

SEQ ID NO: 1053658 - DNA, 15 bp, Homo sapiens
gccttgaatctagag

SEQ ID NO: 1053659 - DNA, 15 bp, Homo sapiens
agccttgaatctaga

SEQ ID NO: 1053660 - DNA, 15 bp, Homo sapiens
aagccttgaatctag

SEQ ID NO: 1053661 - DNA, 15 bp, Homo sapiens
aaagccttgaatcta

SEQ ID NO: 1053662 - DNA, 15 bp, Homo sapiens
aaaagccttgaatct

SEQ ID NO: 1053663 - DNA, 15 bp, Homo sapiens
caaaagccttgaatc

SEQ ID NO: 1053664 - DNA, 15 bp, Homo sapiens
ccaaaagccttgaat

SEQ ID NO: 1053665 - DNA, 15 bp, Homo sapiens
tccaaaagccttgaa

SEQ ID NO: 1053666 - DNA, 15 bp, Homo sapiens
atccaaaagccttga

SEQ ID NO: 1053667 - DNA, 15 bp, Homo sapiens
aatccaaaagccttg

SEQ ID NO: 1053668 - DNA, 15 bp, Homo sapiens
aaatccaaaagcctt

SEQ ID NO: 1053669 - DNA, 15 bp, Homo sapiens
taaatccaaaagcct

SEQ ID NO: 1053670 - DNA, 15 bp, Homo sapiens
ttaaatccaaaagcc

SEQ ID NO: 1053671 - DNA, 15 bp, Homo sapiens
cttaaatccaaaagc

SEQ ID NO: 1053672 - DNA, 15 bp, Homo sapiens
ccttaaatccaaaag

SEQ ID NO: 1053673 - DNA, 15 bp, Homo sapiens
accttaaatccaaaa

SEQ ID NO: 1053674 - DNA, 15 bp, Homo sapiens
caccttaaatccaaa

SEQ ID NO: 1053675 - DNA, 15 bp, Homo sapiens
acaccttaaatccaa

SEQ ID NO: 1053676 - DNA, 15 bp, Homo sapiens
aacaccttaaatcca

SEQ ID NO: 1053677 - DNA, 15 bp, Homo sapiens
caacaccttaaatcc

SEQ ID NO: 1053678 - DNA, 15 bp, Homo sapiens
tcaacaccttaaatc

SEQ ID NO: 1053679 - DNA, 15 bp, Homo sapiens
ttcaacaccttaaat

SEQ ID NO: 1053680 - DNA, 15 bp, Homo sapiens
tttcaacaccttaaa

SEQ ID NO: 1053681 - DNA, 15 bp, Homo sapiens
ttttcaacaccttaa

SEQ ID NO: 1053682 - DNA, 15 bp, Homo sapiens
attttcaacacctta

SEQ ID NO: 1053683 - DNA, 15 bp, Homo sapiens
tattttcaacacctt

SEQ ID NO: 1053684 - DNA, 15 bp, Homo sapiens
ttattttcaacacct

SEQ ID NO: 1053685 - DNA, 15 bp, Homo sapiens
attattttcaacacc

SEQ ID NO: 1053686 - DNA, 15 bp, Homo sapiens
aattattttcaacac

SEQ ID NO: 1053687 - DNA, 15 bp, Homo sapiens
aaattattttcaaca

SEQ ID NO: 1053688 - DNA, 15 bp, Homo sapiens
taaattattttcaac

SEQ ID NO: 1053689 - DNA, 15 bp, Homo sapiens
gtaaattattttcaa

SEQ ID NO: 1053690 - DNA, 15 bp, Homo sapiens
tgtaaattattttca

SEQ ID NO: 1053691 - DNA, 15 bp, Homo sapiens
atgtaaattattttc

SEQ ID NO: 1053692 - DNA, 15 bp, Homo sapiens
tatgtaaattatttt

SEQ ID NO: 1053693 - DNA, 15 bp, Homo sapiens
atatgtaaattattt

SEQ ID NO: 1053694 - DNA, 15 bp, Homo sapiens
aatatgtaaattatt

SEQ ID NO: 1053695 - DNA, 15 bp, Homo sapiens
taatatgtaaattat

SEQ ID NO: 1053696 - DNA, 15 bp, Homo sapiens
ctaatatgtaaatta

SEQ ID NO: 1053697 - DNA, 15 bp, Homo sapiens
gctaatatgtaaatt

SEQ ID NO: 1053698 - DNA, 15 bp, Homo sapiens
aagctaatatgtaaa

SEQ ID NO: 1053699 - DNA, 15 bp, Homo sapiens
gaagctaatatgtaa

SEQ ID NO: 1053700 - DNA, 15 bp, Homo sapiens
ggaagctaatatgta

SEQ ID NO: 1053701 - DNA, 15 bp, Homo sapiens
aggaagctaatatgt

SEQ ID NO: 1053702 - DNA, 15 bp, Homo sapiens
gaggaagctaatatg

SEQ ID NO: 1053703 - DNA, 15 bp, Homo sapiens
agaggaagctaatat

SEQ ID NO: 1053704 - DNA, 15 bp, Homo sapiens
aagaggaagctaata

SEQ ID NO: 1053705 - DNA, 15 bp, Homo sapiens
taagaggaagctaat

SEQ ID NO: 1053706 - DNA, 15 bp, Homo sapiens
ttaagaggaagctaa

SEQ ID NO: 1053707 - DNA, 15 bp, Homo sapiens
attaagaggaagcta

SEQ ID NO: 1053708 - DNA, 15 bp, Homo sapiens
gattaagaggaagct

SEQ ID NO: 1053709 - DNA, 15 bp, Homo sapiens
agattaagaggaagc

SEQ ID NO: 1053710 - DNA, 15 bp, Homo sapiens
aagattaagaggaag

SEQ ID NO: 1053711 - DNA, 15 bp, Homo sapiens
caagattaagaggaa

SEQ ID NO: 1053712 - DNA, 15 bp, Homo sapiens
ccaagattaagagga

SEQ ID NO: 1053713 - DNA, 15 bp, Homo sapiens
cccaagattaagagg

SEQ ID NO: 1053714 - DNA, 15 bp, Homo sapiens
tcccaagattaagag

SEQ ID NO: 1053715 - DNA, 15 bp, Homo sapiens
atcccaagattaaga

SEQ ID NO: 1053716 - DNA, 15 bp, Homo sapiens
tatcccaagattaag

SEQ ID NO: 1053717 - DNA, 15 bp, Homo sapiens
gtatcccaagattaa

SEQ ID NO: 1053718 - DNA, 15 bp, Homo sapiens
agtatcccaagatta

SEQ ID NO: 1053719 - DNA, 15 bp, Homo sapiens
gagtatcccaagatt

SEQ ID NO: 1053720 - DNA, 15 bp, Homo sapiens
agagtatcccaagat

SEQ ID NO: 1053721 - DNA, 15 bp, Homo sapiens
cagagtatcccaaga

SEQ ID NO: 1053722 - DNA, 15 bp, Homo sapiens
ccagagtatcccaag

SEQ ID NO: 1053723 - DNA, 15 bp, Homo sapiens
gccagagtatcccaa

SEQ ID NO: 1053724 - DNA, 15 bp, Homo sapiens
tgccagagtatccca

SEQ ID NO: 1053725 - DNA, 15 bp, Homo sapiens
gtgccagagtatccc

SEQ ID NO: 1053726 - DNA, 15 bp, Homo sapiens
tgtgccagagtatcc

SEQ ID NO: 1053727 - DNA, 15 bp, Homo sapiens
gtgtgccagagtatc

SEQ ID NO: 1053728 - DNA, 15 bp, Homo sapiens
ggtgtgccagagtat

SEQ ID NO: 1053729 - DNA, 15 bp, Homo sapiens
gggtgtgccagagta

SEQ ID NO: 1053730 - DNA, 15 bp, Homo sapiens
agggtgtgccagagt

SEQ ID NO: 1053731 - DNA, 15 bp, Homo sapiens
tagggtgtgccagag

SEQ ID NO: 1053732 - DNA, 15 bp, Homo sapiens
ttagggtgtgccaga

SEQ ID NO: 1053733 - DNA, 15 bp, Homo sapiens
gttagggtgtgccag

SEQ ID NO: 1053734 - DNA, 15 bp, Homo sapiens
ggttagggtgtgcca

SEQ ID NO: 1053735 - DNA, 15 bp, Homo sapiens
gggttagggtgtgcc

SEQ ID NO: 1053736 - DNA, 15 bp, Homo sapiens
ggggttagggtgtgc

SEQ ID NO: 1053737 - DNA, 15 bp, Homo sapiens
tggggttagggtgtg

SEQ ID NO: 1053738 - DNA, 15 bp, Homo sapiens
atggggttagggtgt

SEQ ID NO: 1053739 - DNA, 15 bp, Homo sapiens
aatggggttagggtg

SEQ ID NO: 1053740 - DNA, 15 bp, Homo sapiens
aaatggggttagggt

SEQ ID NO: 1053741 - DNA, 15 bp, Homo sapiens
caaatggggttaggg

SEQ ID NO: 1053742 - DNA, 15 bp, Homo sapiens
tcaaatggggttagg

SEQ ID NO: 1053743 - DNA, 15 bp, Homo sapiens
gtcaaatggggttag

SEQ ID NO: 1053744 - DNA, 15 bp, Homo sapiens
tgtcaaatggggtta

SEQ ID NO: 1053745 - DNA, 15 bp, Homo sapiens
ctgtcaaatggggtt

SEQ ID NO: 1053746 - DNA, 15 bp, Homo sapiens
cctgtcaaatggggt

SEQ ID NO: 1053747 - DNA, 15 bp, Homo sapiens
ccctgtcaaatgggg

SEQ ID NO: 1053748 - DNA, 15 bp, Homo sapiens
gccctgtcaaatggg

SEQ ID NO: 1053749 - DNA, 15 bp, Homo sapiens
agccctgtcaaatgg

SEQ ID NO: 1053750 - DNA, 15 bp, Homo sapiens
cagccctgtcaaatg

SEQ ID NO: 1053751 - DNA, 15 bp, Homo sapiens
gcagccctgtcaaat

SEQ ID NO: 1053752 - DNA, 15 bp, Homo sapiens
agcagccctgtcaaa

SEQ ID NO: 1053753 - DNA, 15 bp, Homo sapiens
tagcagccctgtcaa

SEQ ID NO: 1053754 - DNA, 15 bp, Homo sapiens
atagcagccctgtca

SEQ ID NO: 1053755 - DNA, 15 bp, Homo sapiens
gatagcagccctgtc

SEQ ID NO: 1053756 - DNA, 15 bp, Homo sapiens
agatagcagccctgt

SEQ ID NO: 1053757 - DNA, 15 bp, Homo sapiens
cagatagcagccctg

SEQ ID NO: 1053758 - DNA, 15 bp, Homo sapiens
gcagatagcagccct

SEQ ID NO: 1053759 - DNA, 15 bp, Homo sapiens
tgcagatagcagccc

SEQ ID NO: 1053760 - DNA, 15 bp, Homo sapiens
gtgcagatagcagcc

SEQ ID NO: 1053761 - DNA, 15 bp, Homo sapiens
tgtgcagatagcagc

SEQ ID NO: 1053762 - DNA, 15 bp, Homo sapiens
gtgtgcagatagcag

SEQ ID NO: 1053763 - DNA, 15 bp, Homo sapiens
agtgtgcagatagca

SEQ ID NO: 1053764 - DNA, 15 bp, Homo sapiens
aagtgtgcagatagc

SEQ ID NO: 1053765 - DNA, 15 bp, Homo sapiens
gaagtgtgcagatag

SEQ ID NO: 1053766 - DNA, 15 bp, Homo sapiens
ggaagtgtgcagata

SEQ ID NO: 1053767 - DNA, 15 bp, Homo sapiens
aggaagtgtgcagat

SEQ ID NO: 1053768 - DNA, 15 bp, Homo sapiens
aaggaagtgtgcaga

SEQ ID NO: 1053769 - DNA, 15 bp, Homo sapiens
caaggaagtgtgcag

SEQ ID NO: 1053770 - DNA, 15 bp, Homo sapiens
tcaaggaagtgtgca

SEQ ID NO: 1053771 - DNA, 15 bp, Homo sapiens
atcaaggaagtgtgc

SEQ ID NO: 1053772 - DNA, 15 bp, Homo sapiens
tatcaaggaagtgtg

SEQ ID NO: 1053773 - DNA, 15 bp, Homo sapiens
ttatcaaggaagtgt

SEQ ID NO: 1053774 - DNA, 15 bp, Homo sapiens
cttatcaaggaagtg

SEQ ID NO: 1053775 - DNA, 15 bp, Homo sapiens
ccttatcaaggaagt

SEQ ID NO: 1053776 - DNA, 15 bp, Homo sapiens
tccttatcaaggaag

SEQ ID NO: 1053777 - DNA, 15 bp, Homo sapiens
ttccttatcaaggaa

SEQ ID NO: 1053778 - DNA, 15 bp, Homo sapiens
cttccttatcaagga

SEQ ID NO: 1053779 - DNA, 15 bp, Homo sapiens
tcttccttatcaagg

SEQ ID NO: 1053780 - DNA, 15 bp, Homo sapiens
ctcttccttatcaag

SEQ ID NO: 1053781 - DNA, 15 bp, Homo sapiens
gctcttccttatcaa

SEQ ID NO: 1053782 - DNA, 15 bp, Homo sapiens
tgctcttccttatca

SEQ ID NO: 1053783 - DNA, 15 bp, Homo sapiens
ctgctcttccttatc

SEQ ID NO: 1053784 - DNA, 15 bp, Homo sapiens
gctgctcttccttat

SEQ ID NO: 1053785 - DNA, 15 bp, Homo sapiens
ggctgctcttcctta

SEQ ID NO: 1053786 - DNA, 15 bp, Homo sapiens
tggctgctcttcctt

SEQ ID NO: 1053787 - DNA, 15 bp, Homo sapiens
ttggctgctcttcct

SEQ ID NO: 1053788 - DNA, 15 bp, Homo sapiens
tttggctgctcttcc

SEQ ID NO: 1053789 - DNA, 15 bp, Homo sapiens
ctttggctgctcttc

SEQ ID NO: 1053790 - DNA, 15 bp, Homo sapiens
cctttggctgctctt

SEQ ID NO: 1053791 - DNA, 15 bp, Homo sapiens
acctttggctgctct

SEQ ID NO: 1053792 - DNA, 15 bp, Homo sapiens
cacctttggctgctc

SEQ ID NO: 1053793 - DNA, 15 bp, Homo sapiens
gcacctttggctgct

SEQ ID NO: 1053794 - DNA, 15 bp, Homo sapiens
tgcacctttggctgc

SEQ ID NO: 1053795 - DNA, 15 bp, Homo sapiens
ctgcacctttggctg

SEQ ID NO: 1053796 - DNA, 15 bp, Homo sapiens
cctgcacctttggct

SEQ ID NO: 1053797 - DNA, 15 bp, Homo sapiens
acctgcacctttggc

SEQ ID NO: 1053798 - DNA, 15 bp, Homo sapiens
cacctgcacctttgg

SEQ ID NO: 1053799 - DNA, 15 bp, Homo sapiens
acacctgcacctttg

SEQ ID NO: 1053800 - DNA, 15 bp, Homo sapiens
cacacctgcaccttt

SEQ ID NO: 1053801 - DNA, 15 bp, Homo sapiens
acacacctgcacctt

SEQ ID NO: 1053802 - DNA, 15 bp, Homo sapiens
aacacacctgcacct

SEQ ID NO: 1053803 - DNA, 15 bp, Homo sapiens
taacacacctgcacc

SEQ ID NO: 1053804 - DNA, 15 bp, Homo sapiens
ctaacacacctgcac

SEQ ID NO: 1053805 - DNA, 15 bp, Homo sapiens
cctaacacacctgca

SEQ ID NO: 1053806 - DNA, 15 bp, Homo sapiens
tcctaacacacctgc

SEQ ID NO: 1053807 - DNA, 15 bp, Homo sapiens
atcctaacacacctg

SEQ ID NO: 1053808 - DNA, 15 bp, Homo sapiens
gatcctaacacacct

SEQ ID NO: 1053809 - DNA, 15 bp, Homo sapiens
ggatcctaacacacc

SEQ ID NO: 1053810 - DNA, 15 bp, Homo sapiens
tggatcctaacacac

SEQ ID NO: 1053811 - DNA, 15 bp, Homo sapiens
atggatcctaacaca

SEQ ID NO: 1053812 - DNA, 15 bp, Homo sapiens
aatggatcctaacac

SEQ ID NO: 1053813 - DNA, 15 bp, Homo sapiens
caatggatcctaaca

SEQ ID NO: 1053814 - DNA, 15 bp, Homo sapiens
ccaatggatcctaac

SEQ ID NO: 1053815 - DNA, 15 bp, Homo sapiens
tccaatggatcctaa

SEQ ID NO: 1053816 - DNA, 15 bp, Homo sapiens
ctccaatggatccta

SEQ ID NO: 1053817 - DNA, 15 bp, Homo sapiens
cctccaatggatcct

SEQ ID NO: 1053818 - DNA, 15 bp, Homo sapiens
gcctccaatggatcc

SEQ ID NO: 1053819 - DNA, 15 bp, Homo sapiens
agcctccaatggatc

SEQ ID NO: 1053820 - DNA, 15 bp, Homo sapiens
aagcctccaatggat

SEQ ID NO: 1053821 - DNA, 15 bp, Homo sapiens
aaagcctccaatgga

SEQ ID NO: 1053822 - DNA, 15 bp, Homo sapiens
gaaagcctccaatgg

SEQ ID NO: 1053823 - DNA, 15 bp, Homo sapiens
agaaagcctccaatg

SEQ ID NO: 1053824 - DNA, 15 bp, Homo sapiens
aagaaagcctccaat

SEQ ID NO: 1053825 - DNA, 15 bp, Homo sapiens
gaagaaagcctccaa

SEQ ID NO: 1053826 - DNA, 15 bp, Homo sapiens
agaagaaagcctcca

SEQ ID NO: 1053827 - DNA, 15 bp, Homo sapiens
cagaagaaagcctcc

SEQ ID NO: 1053828 - DNA, 15 bp, Homo sapiens
ccagaagaaagcctc

SEQ ID NO: 1053829 - DNA, 15 bp, Homo sapiens
accagaagaaagcct

SEQ ID NO: 1053830 - DNA, 15 bp, Homo sapiens
taccagaagaaagcc

SEQ ID NO: 1053831 - DNA, 15 bp, Homo sapiens
gtaccagaagaaagc

SEQ ID NO: 1053832 - DNA, 15 bp, Homo sapiens
tgtaccagaagaaag

SEQ ID NO: 1053833 - DNA, 15 bp, Homo sapiens
ctgtaccagaagaaa

SEQ ID NO: 1053834 - DNA, 15 bp, Homo sapiens
gctgtaccagaagaa

SEQ ID NO: 1053835 - DNA, 15 bp, Homo sapiens
ggctgtaccagaaga

SEQ ID NO: 1053836 - DNA, 15 bp, Homo sapiens
tggctgtaccagaag

SEQ ID NO: 1053837 - DNA, 15 bp, Homo sapiens
ttggctgtaccagaa

SEQ ID NO: 1053838 - DNA, 15 bp, Homo sapiens
cttggctgtaccaga

SEQ ID NO: 1053839 - DNA, 15 bp, Homo sapiens
tcttggctgtaccag

SEQ ID NO: 1053840 - DNA, 15 bp, Homo sapiens
ttcttggctgtacca

SEQ ID NO: 1053841 - DNA, 15 bp, Homo sapiens
tttcttggctgtacc

SEQ ID NO: 1053842 - DNA, 15 bp, Homo sapiens
ttttcttggctgtac

SEQ ID NO: 1053843 - DNA, 15 bp, Homo sapiens
cttttcttggctgta

SEQ ID NO: 1053844 - DNA, 15 bp, Homo sapiens
ccttttcttggctgt

SEQ ID NO: 1053845 - DNA, 15 bp, Homo sapiens
tccttttcttggctg

SEQ ID NO: 1053846 - DNA, 15 bp, Homo sapiens
ttccttttcttggct

SEQ ID NO: 1053847 - DNA, 15 bp, Homo sapiens
tttccttttcttggc

SEQ ID NO: 1053848 - DNA, 15 bp, Homo sapiens
ttttccttttcttgg

SEQ ID NO: 1053849 - DNA, 15 bp, Homo sapiens
cttttccttttcttg

SEQ ID NO: 1053850 - DNA, 15 bp, Homo sapiens
tcttttccttttctt

SEQ ID NO: 1053851 - DNA, 15 bp, Homo sapiens
ctcttttccttttct

SEQ ID NO: 1053852 - DNA, 15 bp, Homo sapiens
gctcttttccttttc

SEQ ID NO: 1053853 - DNA, 15 bp, Homo sapiens
agctcttttcctttt

SEQ ID NO: 1053854 - DNA, 15 bp, Homo sapiens
aagctcttttccttt

SEQ ID NO: 1053855 - DNA, 15 bp, Homo sapiens
aaagctcttttcctt

SEQ ID NO: 1053856 - DNA, 15 bp, Homo sapiens
caaagctcttttcct

SEQ ID NO: 1053857 - DNA, 15 bp, Homo sapiens
ccaaagctcttttcc

SEQ ID NO: 1053858 - DNA, 15 bp, Homo sapiens
tccaaagctcttttc

SEQ ID NO: 1053859 - DNA, 15 bp, Homo sapiens
ttccaaagctctttt

SEQ ID NO: 1053860 - DNA, 15 bp, Homo sapiens
tttccaaagctcttt

SEQ ID NO: 1053861 - DNA, 15 bp, Homo sapiens
ctttccaaagctctt

SEQ ID NO: 1053862 - DNA, 15 bp, Homo sapiens
cctttccaaagctct

SEQ ID NO: 1053863 - DNA, 15 bp, Homo sapiens
ccctttccaaagctc

SEQ ID NO: 1053864 - DNA, 15 bp, Homo sapiens
gccctttccaaagct

SEQ ID NO: 1053865 - DNA, 15 bp, Homo sapiens
cgccctttccaaagc

SEQ ID NO: 1053866 - DNA, 15 bp, Homo sapiens
tcgccctttccaaag

SEQ ID NO: 1053867 - DNA, 15 bp, Homo sapiens
ctcgccctttccaaa

SEQ ID NO: 1053868 - DNA, 15 bp, Homo sapiens
gctcgccctttccaa

SEQ ID NO: 1053869 - DNA, 15 bp, Homo sapiens
agctcgccctttcca

SEQ ID NO: 1053870 - DNA, 15 bp, Homo sapiens
aagctcgccctttcc

SEQ ID NO: 1053871 - DNA, 15 bp, Homo sapiens
taagctcgccctttc

SEQ ID NO: 1053872 - DNA, 15 bp, Homo sapiens
ttaagctcgcccttt

SEQ ID NO: 1053873 - DNA, 15 bp, Homo sapiens
cttaagctcgccctt

SEQ ID NO: 1053874 - DNA, 15 bp, Homo sapiens
tcttaagctcgccct

SEQ ID NO: 1053875 - DNA, 15 bp, Homo sapiens
ttcttaagctcgccc

SEQ ID NO: 1053876 - DNA, 15 bp, Homo sapiens
tttcttaagctcgcc

SEQ ID NO: 1053877 - DNA, 15 bp, Homo sapiens
ctttcttaagctcgc

SEQ ID NO: 1053878 - DNA, 15 bp, Homo sapiens
tctttcttaagctcg

SEQ ID NO: 1053879 - DNA, 15 bp, Homo sapiens
ttctttcttaagctc

SEQ ID NO: 1053880 - DNA, 15 bp, Homo sapiens
tttctttcttaagct

SEQ ID NO: 1053881 - DNA, 15 bp, Homo sapiens
ctttctttcttaagc

SEQ ID NO: 1053882 - DNA, 15 bp, Homo sapiens
gctttctttcttaag

SEQ ID NO: 1053883 - DNA, 15 bp, Homo sapiens
tgctttctttcttaa

SEQ ID NO: 1053884 - DNA, 15 bp, Homo sapiens
ctgctttctttctta

SEQ ID NO: 1053885 - DNA, 15 bp, Homo sapiens
cctgctttctttctt

SEQ ID NO: 1053886 - DNA, 15 bp, Homo sapiens
gcctgctttctttct

SEQ ID NO: 1053887 - DNA, 15 bp, Homo sapiens
tgcctgctttctttc

SEQ ID NO: 1053888 - DNA, 15 bp, Homo sapiens
ctgcctgctttcttt

SEQ ID NO: 1053889 - DNA, 15 bp, Homo sapiens
actgcctgctttctt

SEQ ID NO: 1053890 - DNA, 15 bp, Homo sapiens
aactgcctgctttct

SEQ ID NO: 1053891 - DNA, 15 bp, Homo sapiens
caactgcctgctttc

SEQ ID NO: 1053892 - DNA, 15 bp, Homo sapiens
acaactgcctgcttt

SEQ ID NO: 1053893 - DNA, 15 bp, Homo sapiens
gacaactgcctgctt

SEQ ID NO: 1053894 - DNA, 15 bp, Homo sapiens
ggacaactgcctgct

SEQ ID NO: 1053895 - DNA, 15 bp, Homo sapiens
tggacaactgcctgc

SEQ ID NO: 1053896 - DNA, 15 bp, Homo sapiens
ttggacaactgcctg

SEQ ID NO: 1053897 - DNA, 15 bp, Homo sapiens
cttggacaactgcct

SEQ ID NO: 1053898 - DNA, 15 bp, Homo sapiens
tcttggacaactgcc

SEQ ID NO: 1053899 - DNA, 15 bp, Homo sapiens
ctcttggacaactgc

SEQ ID NO: 1053900 - DNA, 15 bp, Homo sapiens
tctcttggacaactg

SEQ ID NO: 1053901 - DNA, 15 bp, Homo sapiens
atctcttggacaact

SEQ ID NO: 1053902 - DNA, 15 bp, Homo sapiens
aatctcttggacaac

SEQ ID NO: 1053903 - DNA, 15 bp, Homo sapiens
aaatctcttggacaa

SEQ ID NO: 1053904 - DNA, 15 bp, Homo sapiens
taaatctcttggaca

SEQ ID NO: 1053905 - DNA, 15 bp, Homo sapiens
ataaatctcttggac

SEQ ID NO: 1053906 - DNA, 15 bp, Homo sapiens
gataaatctcttgga

SEQ ID NO: 1053907 - DNA, 15 bp, Homo sapiens
agataaatctcttgg

SEQ ID NO: 1053908 - DNA, 15 bp, Homo sapiens
tagataaatctcttg

SEQ ID NO: 1053909 - DNA, 15 bp, Homo sapiens
ctagataaatctctt

SEQ ID NO: 1053910 - DNA, 15 bp, Homo sapiens
actagataaatctct

SEQ ID NO: 1053911 - DNA, 15 bp, Homo sapiens
tactagataaatctc

SEQ ID NO: 1053912 - DNA, 15 bp, Homo sapiens
atactagataaatct

SEQ ID NO: 1053913 - DNA, 15 bp, Homo sapiens
catactagataaatc

SEQ ID NO: 1053914 - DNA, 15 bp, Homo sapiens
tcatactagataaat

SEQ ID NO: 1053915 - DNA, 15 bp, Homo sapiens
ctcatactagataaa

SEQ ID NO: 1053916 - DNA, 15 bp, Homo sapiens
cctcatactagataa

SEQ ID NO: 1053917 - DNA, 15 bp, Homo sapiens
acctcatactagata

SEQ ID NO: 1053918 - DNA, 15 bp, Homo sapiens
tacctcatactagat

SEQ ID NO: 1053919 - DNA, 15 bp, Homo sapiens
gtacctcatactaga

SEQ ID NO: 1053920 - DNA, 15 bp, Homo sapiens
agtacctcatactag

SEQ ID NO: 1053921 - DNA, 15 bp, Homo sapiens
gagtacctcatacta

SEQ ID NO: 1053922 - DNA, 15 bp, Homo sapiens
agagtacctcatact

SEQ ID NO: 1053923 - DNA, 15 bp, Homo sapiens
tagagtacctcatac

SEQ ID NO: 1053924 - DNA, 15 bp, Homo sapiens
ctagagtacctcata

SEQ ID NO: 1053925 - DNA, 15 bp, Homo sapiens
gctagagtacctcat

SEQ ID NO: 1053926 - DNA, 15 bp, Homo sapiens
tgctagagtacctca

SEQ ID NO: 1053927 - DNA, 15 bp, Homo sapiens
gtgctagagtacctc

SEQ ID NO: 1053928 - DNA, 15 bp, Homo sapiens
ggtgctagagtacct

SEQ ID NO: 1053929 - DNA, 15 bp, Homo sapiens
tggtgctagagtacc

SEQ ID NO: 1053930 - DNA, 15 bp, Homo sapiens
ttggtgctagagtac

SEQ ID NO: 1053931 - DNA, 15 bp, Homo sapiens
cttggtgctagagta

SEQ ID NO: 1053932 - DNA, 15 bp, Homo sapiens
gcttggtgctagagt

SEQ ID NO: 1053933 - DNA, 15 bp, Homo sapiens
cgcttggtgctagag

SEQ ID NO: 1053934 - DNA, 15 bp, Homo sapiens
gcgcttggtgctaga

SEQ ID NO: 1053935 - DNA, 15 bp, Homo sapiens
ggcgcttggtgctag

SEQ ID NO: 1053936 - DNA, 15 bp, Homo sapiens
gggcgcttggtgcta

SEQ ID NO: 1053937 - DNA, 15 bp, Homo sapiens
tgggcgcttggtgct

SEQ ID NO: 1053938 - DNA, 15 bp, Homo sapiens
atgggcgcttggtgc

SEQ ID NO: 1053939 - DNA, 15 bp, Homo sapiens
gatgggcgcttggtg

SEQ ID NO: 1053940 - DNA, 15 bp, Homo sapiens
tgatgggcgcttggt

SEQ ID NO: 1053941 - DNA, 15 bp, Homo sapiens
ctgatgggcgcttgg

SEQ ID NO: 1053942 - DNA, 15 bp, Homo sapiens
actgatgggcgcttg

SEQ ID NO: 1053943 - DNA, 15 bp, Homo sapiens
gactgatgggcgctt

SEQ ID NO: 1053944 - DNA, 15 bp, Homo sapiens
agactgatgggcgct

SEQ ID NO: 1053945 - DNA, 15 bp, Homo sapiens
cagactgatgggcgc

SEQ ID NO: 1053946 - DNA, 15 bp, Homo sapiens
tcagactgatgggcg

SEQ ID NO: 1053947 - DNA, 15 bp, Homo sapiens
atcagactgatgggc

SEQ ID NO: 1053948 - DNA, 15 bp, Homo sapiens
tatcagactgatggg

SEQ ID NO: 1053949 - DNA, 15 bp, Homo sapiens
atatcagactgatgg

SEQ ID NO: 1053950 - DNA, 15 bp, Homo sapiens
catatcagactgatg

SEQ ID NO: 1053951 - DNA, 15 bp, Homo sapiens
tcatatcagactgat

SEQ ID NO: 1053952 - DNA, 15 bp, Homo sapiens
ttcatatcagactga

SEQ ID NO: 1053953 - DNA, 15 bp, Homo sapiens
attcatatcagactg

SEQ ID NO: 1053954 - DNA, 15 bp, Homo sapiens
aattcatatcagact

SEQ ID NO: 1053955 - DNA, 15 bp, Homo sapiens
aaattcatatcagac

SEQ ID NO: 1053956 - DNA, 15 bp, Homo sapiens
gaaattcatatcaga

SEQ ID NO: 1053957 - DNA, 15 bp, Homo sapiens
tgaaattcatatcag

SEQ ID NO: 1053958 - DNA, 15 bp, Homo sapiens
atgaaattcatatca

SEQ ID NO: 1053959 - DNA, 15 bp, Homo sapiens
aatgaaattcatatc

SEQ ID NO: 1053960 - DNA, 15 bp, Homo sapiens
aaatgaaattcatat

SEQ ID NO: 1053961 - DNA, 15 bp, Homo sapiens
caaatgaaattcata

SEQ ID NO: 1053962 - DNA, 15 bp, Homo sapiens
tcaaatgaaattcat

SEQ ID NO: 1053963 - DNA, 15 bp, Homo sapiens
atcaaatgaaattca

SEQ ID NO: 1053964 - DNA, 15 bp, Homo sapiens
tatcaaatgaaattc

SEQ ID NO: 1053965 - DNA, 15 bp, Homo sapiens
atatcaaatgaaatt

SEQ ID NO: 1053966 - DNA, 15 bp, Homo sapiens
catatcaaatgaaat

SEQ ID NO: 1053967 - DNA, 15 bp, Homo sapiens
tcatatcaaatgaaa

SEQ ID NO: 1053968 - DNA, 15 bp, Homo sapiens
ttcatatcaaatgaa

SEQ ID NO: 1053969 - DNA, 15 bp, Homo sapiens
tttcatatcaaatga

SEQ ID NO: 1053970 - DNA, 15 bp, Homo sapiens
atttcatatcaaatg

SEQ ID NO: 1053971 - DNA, 15 bp, Homo sapiens
tatttcatatcaaat

SEQ ID NO: 1053972 - DNA, 15 bp, Homo sapiens
atatttcatatcaaa

SEQ ID NO: 1053973 - DNA, 15 bp, Homo sapiens
tatatttcatatcaa

SEQ ID NO: 1053974 - DNA, 15 bp, Homo sapiens
gtatatttcatatca

SEQ ID NO: 1053975 - DNA, 15 bp, Homo sapiens
tgtatatttcatatc

SEQ ID NO: 1053976 - DNA, 15 bp, Homo sapiens
gtgtatatttcatat

SEQ ID NO: 1053977 - DNA, 15 bp, Homo sapiens
tgtgtatatttcata

SEQ ID NO: 1053978 - DNA, 15 bp, Homo sapiens
ctgtgtatatttcat

SEQ ID NO: 1053979 - DNA, 15 bp, Homo sapiens
tctgtgtatatttca

SEQ ID NO: 1053980 - DNA, 15 bp, Homo sapiens
ctctgtgtatatttc

SEQ ID NO: 1053981 - DNA, 15 bp, Homo sapiens
gctctgtgtatattt

SEQ ID NO: 1053982 - DNA, 15 bp, Homo sapiens
tgctctgtgtatatt

SEQ ID NO: 1053983 - DNA, 15 bp, Homo sapiens
ctgctctgtgtatat

SEQ ID NO: 1053984 - DNA, 15 bp, Homo sapiens
tctgctctgtgtata

SEQ ID NO: 1053985 - DNA, 15 bp, Homo sapiens
ttctgctctgtgtat

SEQ ID NO: 1053986 - DNA, 15 bp, Homo sapiens
cttctgctctgtgta

SEQ ID NO: 1053987 - DNA, 15 bp, Homo sapiens
tcttctgctctgtgt

SEQ ID NO: 1053988 - DNA, 15 bp, Homo sapiens
ttcttctgctctgtg

SEQ ID NO: 1053989 - DNA, 15 bp, Homo sapiens
attcttctgctctgt

SEQ ID NO: 1053990 - DNA, 15 bp, Homo sapiens
cattcttctgctctg

SEQ ID NO: 1053991 - DNA, 15 bp, Homo sapiens
ccattcttctgctct

SEQ ID NO: 1053992 - DNA, 15 bp, Homo sapiens
tccattcttctgctc

SEQ ID NO: 1053993 - DNA, 15 bp, Homo sapiens
ttccattcttctgct

SEQ ID NO: 1053994 - DNA, 15 bp, Homo sapiens
attccattcttctgc

SEQ ID NO: 1053995 - DNA, 15 bp, Homo sapiens
aattccattcttctg

SEQ ID NO: 1053996 - DNA, 15 bp, Homo sapiens
taattccattcttct

SEQ ID NO: 1053997 - DNA, 15 bp, Homo sapiens
ataattccattcttc

SEQ ID NO: 1053998 - DNA, 15 bp, Homo sapiens
aataattccattctt

SEQ ID NO: 1053999 - DNA, 15 bp, Homo sapiens
aaataattccattct

SEQ ID NO: 1054000 - DNA, 15 bp, Homo sapiens
aaaataattccattc

SEQ ID NO: 1054001 - DNA, 15 bp, Homo sapiens
taaaataattccatt

SEQ ID NO: 1054002 - DNA, 15 bp, Homo sapiens
ctaaaataattccat

SEQ ID NO: 1054003 - DNA, 15 bp, Homo sapiens
gactaaaataattcc

SEQ ID NO: 1054004 - DNA, 15 bp, Homo sapiens
ggactaaaataattc

SEQ ID NO: 1054005 - DNA, 15 bp, Homo sapiens
aggactaaaataatt

SEQ ID NO: 1054006 - DNA, 15 bp, Homo sapiens
caggactaaaataat

SEQ ID NO: 1054007 - DNA, 15 bp, Homo sapiens
gcaggactaaaataa

SEQ ID NO: 1054008 - DNA, 15 bp, Homo sapiens
agcaggactaaaata

SEQ ID NO: 1054009 - DNA, 15 bp, Homo sapiens
cagcaggactaaaat

SEQ ID NO: 1054010 - DNA, 15 bp, Homo sapiens
ccagcaggactaaaa

SEQ ID NO: 1054011 - DNA, 15 bp, Homo sapiens
accagcaggactaaa

SEQ ID NO: 1054012 - DNA, 15 bp, Homo sapiens
taccagcaggactaa

SEQ ID NO: 1054013 - DNA, 15 bp, Homo sapiens
ttaccagcaggacta

SEQ ID NO: 1054014 - DNA, 15 bp, Homo sapiens
gttaccagcaggact

SEQ ID NO: 1054015 - DNA, 15 bp, Homo sapiens
ggttaccagcaggac

SEQ ID NO: 1054016 - DNA, 15 bp, Homo sapiens
aggttaccagcagga

SEQ ID NO: 1054017 - DNA, 15 bp, Homo sapiens
gaggttaccagcagg

SEQ ID NO: 1054018 - DNA, 15 bp, Homo sapiens
tgaggttaccagcag

SEQ ID NO: 1054019 - DNA, 15 bp, Homo sapiens
ctgaggttaccagca

SEQ ID NO: 1054020 - DNA, 15 bp, Homo sapiens
gctgaggttaccagc

SEQ ID NO: 1054021 - DNA, 15 bp, Homo sapiens
ggctgaggttaccag

SEQ ID NO: 1054022 - DNA, 15 bp, Homo sapiens
aggctgaggttacca

SEQ ID NO: 1054023 - DNA, 15 bp, Homo sapiens
caggctgaggttacc

SEQ ID NO: 1054024 - DNA, 15 bp, Homo sapiens
tcaggctgaggttac

SEQ ID NO: 1054025 - DNA, 15 bp, Homo sapiens
ctcaggctgaggtta

SEQ ID NO: 1054026 - DNA, 15 bp, Homo sapiens
actcaggctgaggtt

SEQ ID NO: 1054027 - DNA, 15 bp, Homo sapiens
cactcaggctgaggt

SEQ ID NO: 1054028 - DNA, 15 bp, Homo sapiens
gcactcaggctgagg

SEQ ID NO: 1054029 - DNA, 15 bp, Homo sapiens
ggcactcaggctgag

SEQ ID NO: 1054030 - DNA, 15 bp, Homo sapiens
gggcactcaggctga

SEQ ID NO: 1054031 - DNA, 15 bp, Homo sapiens
agggcactcaggctg

SEQ ID NO: 1054032 - DNA, 15 bp, Homo sapiens
cagggcactcaggct

SEQ ID NO: 1054033 - DNA, 15 bp, Homo sapiens
gcagggcactcaggc

SEQ ID NO: 1054034 - DNA, 15 bp, Homo sapiens
agcagggcactcagg

SEQ ID NO: 1054035 - DNA, 15 bp, Homo sapiens
cagcagggcactcag

SEQ ID NO: 1054036 - DNA, 15 bp, Homo sapiens
ccagcagggcactca

SEQ ID NO: 1054037 - DNA, 15 bp, Homo sapiens
cccagcagggcactc

SEQ ID NO: 1054038 - DNA, 15 bp, Homo sapiens
tcccagcagggcact

SEQ ID NO: 1054039 - DNA, 15 bp, Homo sapiens
ttcccagcagggcac

SEQ ID NO: 1054040 - DNA, 15 bp, Homo sapiens
attcccagcagggca

SEQ ID NO: 1054041 - DNA, 15 bp, Homo sapiens
gattcccagcagggc

SEQ ID NO: 1054042 - DNA, 15 bp, Homo sapiens
ggattcccagcaggg

SEQ ID NO: 1054043 - DNA, 15 bp, Homo sapiens
tggattcccagcagg

SEQ ID NO: 1054044 - DNA, 15 bp, Homo sapiens
ctggattcccagcag

SEQ ID NO: 1054045 - DNA, 15 bp, Homo sapiens
cctggattcccagca

SEQ ID NO: 1054046 - DNA, 15 bp, Homo sapiens
gcctggattcccagc

SEQ ID NO: 1054047 - DNA, 15 bp, Homo sapiens
ggcctggattcccag

SEQ ID NO: 1054048 - DNA, 15 bp, Homo sapiens
tggcctggattccca

SEQ ID NO: 1054049 - DNA, 15 bp, Homo sapiens
ctggcctggattccc

SEQ ID NO: 1054050 - DNA, 15 bp, Homo sapiens
cctggcctggattcc

SEQ ID NO: 1054051 - DNA, 15 bp, Homo sapiens
acctggcctggattc

SEQ ID NO: 1054052 - DNA, 15 bp, Homo sapiens
cacctggcctggatt

SEQ ID NO: 1054053 - DNA, 15 bp, Homo sapiens
ccacctggcctggat

SEQ ID NO: 1054054 - DNA, 15 bp, Homo sapiens
accacctggcctgga

SEQ ID NO: 1054055 - DNA, 15 bp, Homo sapiens
taccacctggcctgg

SEQ ID NO: 1054056 - DNA, 15 bp, Homo sapiens
ataccacctggcctg

SEQ ID NO: 1054057 - DNA, 15 bp, Homo sapiens
tataccacctggcct

SEQ ID NO: 1054058 - DNA, 15 bp, Homo sapiens
atataccacctggcc

SEQ ID NO: 1054059 - DNA, 15 bp, Homo sapiens
gatataccacctggc

SEQ ID NO: 1054060 - DNA, 15 bp, Homo sapiens
tgatataccacctgg

SEQ ID NO: 1054061 - DNA, 15 bp, Homo sapiens
ttgatataccacctg

SEQ ID NO: 1054062 - DNA, 15 bp, Homo sapiens
attgatataccacct

SEQ ID NO: 1054063 - DNA, 15 bp, Homo sapiens
tattgatataccacc

SEQ ID NO: 1054064 - DNA, 15 bp, Homo sapiens
atattgatataccac

SEQ ID NO: 1054065 - DNA, 15 bp, Homo sapiens
gatattgatatacca

SEQ ID NO: 1054066 - DNA, 15 bp, Homo sapiens
tgatattgatatacc

SEQ ID NO: 1054067 - DNA, 15 bp, Homo sapiens
ctgatattgatatac

SEQ ID NO: 1054068 - DNA, 15 bp, Homo sapiens
actgatattgatata

SEQ ID NO: 1054069 - DNA, 15 bp, Homo sapiens
cactgatattgatat

SEQ ID NO: 1054070 - DNA, 15 bp, Homo sapiens
gcactgatattgata

SEQ ID NO: 1054071 - DNA, 15 bp, Homo sapiens
agcactgatattgat

SEQ ID NO: 1054072 - DNA, 15 bp, Homo sapiens
tagcactgatattga

SEQ ID NO: 1054073 - DNA, 15 bp, Homo sapiens
gtagcactgatattg

SEQ ID NO: 1054074 - DNA, 15 bp, Homo sapiens
ggtagcactgatatt

SEQ ID NO: 1054075 - DNA, 15 bp, Homo sapiens
gggtagcactgatat

SEQ ID NO: 1054076 - DNA, 15 bp, Homo sapiens
ggggtagcactgata

SEQ ID NO: 1054077 - DNA, 15 bp, Homo sapiens
aggggtagcactgat

SEQ ID NO: 1054078 - DNA, 15 bp, Homo sapiens
taggggtagcactga

SEQ ID NO: 1054079 - DNA, 15 bp, Homo sapiens
ttaggggtagcactg

SEQ ID NO: 1054080 - DNA, 15 bp, Homo sapiens
cttaggggtagcact

SEQ ID NO: 1054081 - DNA, 15 bp, Homo sapiens
acttaggggtagcac

SEQ ID NO: 1054082 - DNA, 15 bp, Homo sapiens
tacttaggggtagca

SEQ ID NO: 1054083 - DNA, 15 bp, Homo sapiens
atacttaggggtagc

SEQ ID NO: 1054084 - DNA, 15 bp, Homo sapiens
catacttaggggtag

SEQ ID NO: 1054085 - DNA, 15 bp, Homo sapiens
ccatacttaggggta

SEQ ID NO: 1054086 - DNA, 15 bp, Homo sapiens
tccatacttaggggt

SEQ ID NO: 1054087 - DNA, 15 bp, Homo sapiens
ttccatacttagggg

SEQ ID NO: 1054088 - DNA, 15 bp, Homo sapiens
cttccatacttaggg

SEQ ID NO: 1054089 - DNA, 15 bp, Homo sapiens
ccttccatacttagg

SEQ ID NO: 1054090 - DNA, 15 bp, Homo sapiens
tccttccatacttag

SEQ ID NO: 1054091 - DNA, 15 bp, Homo sapiens
atccttccatactta

SEQ ID NO: 1054092 - DNA, 15 bp, Homo sapiens
aatccttccatactt

SEQ ID NO: 1054093 - DNA, 15 bp, Homo sapiens
caatccttccatact

SEQ ID NO: 1054094 - DNA, 15 bp, Homo sapiens
acaatccttccatac

SEQ ID NO: 1054095 - DNA, 15 bp, Homo sapiens
gacaatccttccata

SEQ ID NO: 1054096 - DNA, 15 bp, Homo sapiens
ggacaatccttccat

SEQ ID NO: 1054097 - DNA, 15 bp, Homo sapiens
aggacaatccttcca

SEQ ID NO: 1054098 - DNA, 15 bp, Homo sapiens
caggacaatccttcc

SEQ ID NO: 1054099 - DNA, 15 bp, Homo sapiens
ccaggacaatccttc

SEQ ID NO: 1054100 - DNA, 15 bp, Homo sapiens
cccaggacaatcctt

SEQ ID NO: 1054101 - DNA, 15 bp, Homo sapiens
ccccaggacaatcct

SEQ ID NO: 1054102 - DNA, 15 bp, Homo sapiens
gccccaggacaatcc

SEQ ID NO: 1054103 - DNA, 15 bp, Homo sapiens
ggccccaggacaatc

SEQ ID NO: 1054104 - DNA, 15 bp, Homo sapiens
aggccccaggacaat

SEQ ID NO: 1054105 - DNA, 15 bp, Homo sapiens
caggccccaggacaa

SEQ ID NO: 1054106 - DNA, 15 bp, Homo sapiens
tcaggccccaggaca

SEQ ID NO: 1054107 - DNA, 15 bp, Homo sapiens
ttcaggccccaggac

SEQ ID NO: 1054108 - DNA, 15 bp, Homo sapiens
tttcaggccccagga

SEQ ID NO: 1054109 - DNA, 15 bp, Homo sapiens
ttttcaggccccagg

SEQ ID NO: 1054110 - DNA, 15 bp, Homo sapiens
cttttcaggccccag

SEQ ID NO: 1054111 - DNA, 15 bp, Homo sapiens
tcttttcaggcccca

SEQ ID NO: 1054112 - DNA, 15 bp, Homo sapiens
atcttttcaggcccc

SEQ ID NO: 1054113 - DNA, 15 bp, Homo sapiens
catcttttcaggccc

SEQ ID NO: 1054114 - DNA, 15 bp, Homo sapiens
ccatcttttcaggcc

SEQ ID NO: 1054115 - DNA, 15 bp, Homo sapiens
accatcttttcaggc

SEQ ID NO: 1054116 - DNA, 15 bp, Homo sapiens
caccatcttttcagg

SEQ ID NO: 1054117 - DNA, 15 bp, Homo sapiens
gcaccatcttttcag

SEQ ID NO: 1054118 - DNA, 15 bp, Homo sapiens
agcaccatcttttca

SEQ ID NO: 1054119 - DNA, 15 bp, Homo sapiens
tagcaccatcttttc

SEQ ID NO: 1054120 - DNA, 15 bp, Homo sapiens
ctagcaccatctttt

SEQ ID NO: 1054121 - DNA, 15 bp, Homo sapiens
cctagcaccatcttt

SEQ ID NO: 1054122 - DNA, 15 bp, Homo sapiens
tcctagcaccatctt

SEQ ID NO: 1054123 - DNA, 15 bp, Homo sapiens
atcctagcaccatct

SEQ ID NO: 1054124 - DNA, 15 bp, Homo sapiens
gatcctagcaccatc

SEQ ID NO: 1054125 - DNA, 15 bp, Homo sapiens
tgatcctagcaccat

SEQ ID NO: 1054126 - DNA, 15 bp, Homo sapiens
gtgatcctagcacca

SEQ ID NO: 1054127 - DNA, 15 bp, Homo sapiens
tgtgatcctagcacc

SEQ ID NO: 1054128 - DNA, 15 bp, Homo sapiens
ctgtgatcctagcac

SEQ ID NO: 1054129 - DNA, 15 bp, Homo sapiens
cctgtgatcctagca

SEQ ID NO: 1054130 - DNA, 15 bp, Homo sapiens
tcctgtgatcctagc

SEQ ID NO: 1054131 - DNA, 15 bp, Homo sapiens
ttcctgtgatcctag

SEQ ID NO: 1054132 - DNA, 15 bp, Homo sapiens
gttcctgtgatccta

SEQ ID NO: 1054133 - DNA, 15 bp, Homo sapiens
tgttcctgtgatcct

SEQ ID NO: 1054134 - DNA, 15 bp, Homo sapiens
gtgttcctgtgatcc

SEQ ID NO: 1054135 - DNA, 15 bp, Homo sapiens
tgtgttcctgtgatc

SEQ ID NO: 1054136 - DNA, 15 bp, Homo sapiens
ctgtgttcctgtgat

SEQ ID NO: 1054137 - DNA, 15 bp, Homo sapiens
cctgtgttcctgtga

SEQ ID NO: 1054138 - DNA, 15 bp, Homo sapiens
acctgtgttcctgtg

SEQ ID NO: 1054139 - DNA, 15 bp, Homo sapiens
aacctgtgttcctgt

SEQ ID NO: 1054140 - DNA, 15 bp, Homo sapiens
aaacctgtgttcctg

SEQ ID NO: 1054141 - DNA, 15 bp, Homo sapiens
caaacctgtgttcct

SEQ ID NO: 1054142 - DNA, 15 bp, Homo sapiens
ccaaacctgtgttcc

SEQ ID NO: 1054143 - DNA, 15 bp, Homo sapiens
cccaaacctgtgttc

SEQ ID NO: 1054144 - DNA, 15 bp, Homo sapiens
gcccaaacctgtgtt

SEQ ID NO: 1054145 - DNA, 15 bp, Homo sapiens
agcccaaacctgtgt

SEQ ID NO: 1054146 - DNA, 15 bp, Homo sapiens
gagcccaaacctgtg

SEQ ID NO: 1054147 - DNA, 15 bp, Homo sapiens
tgagcccaaacctgt

SEQ ID NO: 1054148 - DNA, 15 bp, Homo sapiens
gtgagcccaaacctg

SEQ ID NO: 1054149 - DNA, 15 bp, Homo sapiens
tgtgagcccaaacct

SEQ ID NO: 1054150 - DNA, 15 bp, Homo sapiens
gtgtgagcccaaacc

SEQ ID NO: 1054151 - DNA, 15 bp, Homo sapiens
agtgtgagcccaaac

SEQ ID NO: 1054152 - DNA, 15 bp, Homo sapiens
tagtgtgagcccaaa

SEQ ID NO: 1054153 - DNA, 15 bp, Homo sapiens
gtagtgtgagcccaa

SEQ ID NO: 1054154 - DNA, 15 bp, Homo sapiens
cgtagtgtgagccca

SEQ ID NO: 1054155 - DNA, 15 bp, Homo sapiens
acgtagtgtgagccc

SEQ ID NO: 1054156 - DNA, 15 bp, Homo sapiens
tacgtagtgtgagcc

SEQ ID NO: 1054157 - DNA, 15 bp, Homo sapiens
ttacgtagtgtgagc

SEQ ID NO: 1054158 - DNA, 15 bp, Homo sapiens
cttacgtagtgtgag

SEQ ID NO: 1054159 - DNA, 15 bp, Homo sapiens
tcttacgtagtgtga

SEQ ID NO: 1054160 - DNA, 15 bp, Homo sapiens
ctcttacgtagtgtg

SEQ ID NO: 1054161 - DNA, 15 bp, Homo sapiens
gctcttacgtagtgt

SEQ ID NO: 1054162 - DNA, 15 bp, Homo sapiens
tgctcttacgtagtg

SEQ ID NO: 1054163 - DNA, 15 bp, Homo sapiens
atgctcttacgtagt

SEQ ID NO: 1054164 - DNA, 15 bp, Homo sapiens
aatgctcttacgtag

SEQ ID NO: 1054165 - DNA, 15 bp, Homo sapiens
gaatgctcttacgta

SEQ ID NO: 1054166 - DNA, 15 bp, Homo sapiens
agaatgctcttacgt

SEQ ID NO: 1054167 - DNA, 15 bp, Homo sapiens
tagaatgctcttacg

SEQ ID NO: 1054168 - DNA, 15 bp, Homo sapiens
ctagaatgctcttac

SEQ ID NO: 1054169 - DNA, 15 bp, Homo sapiens
gctagaatgctctta

SEQ ID NO: 1054170 - DNA, 15 bp, Homo sapiens
tgctagaatgctctt

SEQ ID NO: 1054171 - DNA, 15 bp, Homo sapiens
ctgctagaatgctct

SEQ ID NO: 1054172 - DNA, 15 bp, Homo sapiens
gctgctagaatgctc

SEQ ID NO: 1054173 - DNA, 15 bp, Homo sapiens
ggctgctagaatgct

SEQ ID NO: 1054174 - DNA, 15 bp, Homo sapiens
gggctgctagaatgc

SEQ ID NO: 1054175 - DNA, 15 bp, Homo sapiens
agggctgctagaatg

SEQ ID NO: 1054176 - DNA, 15 bp, Homo sapiens
cagggctgctagaat

SEQ ID NO: 1054177 - DNA, 15 bp, Homo sapiens
acagggctgctagaa

SEQ ID NO: 1054178 - DNA, 15 bp, Homo sapiens
cacagggctgctaga

SEQ ID NO: 1054179 - DNA, 15 bp, Homo sapiens
gcacagggctgctag

SEQ ID NO: 1054180 - DNA, 15 bp, Homo sapiens
tgcacagggctgcta

SEQ ID NO: 1054181 - DNA, 15 bp, Homo sapiens
ttgcacagggctgct

SEQ ID NO: 1054182 - DNA, 15 bp, Homo sapiens
tttgcacagggctgc

SEQ ID NO: 1054183 - DNA, 15 bp, Homo sapiens
ctttgcacagggctg

SEQ ID NO: 1054184 - DNA, 15 bp, Homo sapiens
tctttgcacagggct

SEQ ID NO: 1054185 - DNA, 15 bp, Homo sapiens
gtctttgcacagggc

SEQ ID NO: 1054186 - DNA, 15 bp, Homo sapiens
tgtctttgcacaggg

SEQ ID NO: 1054187 - DNA, 15 bp, Homo sapiens
ctgtctttgcacagg

SEQ ID NO: 1054188 - DNA, 15 bp, Homo sapiens
cctgtctttgcacag

SEQ ID NO: 1054189 - DNA, 15 bp, Homo sapiens
ccctgtctttgcaca

SEQ ID NO: 1054190 - DNA, 15 bp, Homo sapiens
gccctgtctttgcac

SEQ ID NO: 1054191 - DNA, 15 bp, Homo sapiens
tgccctgtctttgca

SEQ ID NO: 1054192 - DNA, 15 bp, Homo sapiens
ctgccctgtctttgc

SEQ ID NO: 1054193 - DNA, 15 bp, Homo sapiens
gctgccctgtctttg

SEQ ID NO: 1054194 - DNA, 15 bp, Homo sapiens
ggctgccctgtcttt

SEQ ID NO: 1054195 - DNA, 15 bp, Homo sapiens
aggctgccctgtctt

SEQ ID NO: 1054196 - DNA, 15 bp, Homo sapiens
aaggctgccctgtct

SEQ ID NO: 1054197 - DNA, 15 bp, Homo sapiens
caaggctgccctgtc

SEQ ID NO: 1054198 - DNA, 15 bp, Homo sapiens
tcaaggctgccctgt

SEQ ID NO: 1054199 - DNA, 15 bp, Homo sapiens
ctcaaggctgccctg

SEQ ID NO: 1054200 - DNA, 15 bp, Homo sapiens
tctcaaggctgccct

SEQ ID NO: 1054201 - DNA, 15 bp, Homo sapiens
atctcaaggctgccc

SEQ ID NO: 1054202 - DNA, 15 bp, Homo sapiens
catctcaaggctgcc

SEQ ID NO: 1054203 - DNA, 15 bp, Homo sapiens
gcatctcaaggctgc

SEQ ID NO: 1054204 - DNA, 15 bp, Homo sapiens
agcatctcaaggctg

SEQ ID NO: 1054205 - DNA, 15 bp, Homo sapiens
tagcatctcaaggct

SEQ ID NO: 1054206 - DNA, 15 bp, Homo sapiens
atagcatctcaaggc

SEQ ID NO: 1054207 - DNA, 15 bp, Homo sapiens
aatagcatctcaagg

SEQ ID NO: 1054208 - DNA, 15 bp, Homo sapiens
aaatagcatctcaag

SEQ ID NO: 1054209 - DNA, 15 bp, Homo sapiens
caaatagcatctcaa

SEQ ID NO: 1054210 - DNA, 15 bp, Homo sapiens
acaaatagcatctca

SEQ ID NO: 1054211 - DNA, 15 bp, Homo sapiens
aacaaatagcatctc

SEQ ID NO: 1054212 - DNA, 15 bp, Homo sapiens
caacaaatagcatct

SEQ ID NO: 1054213 - DNA, 15 bp, Homo sapiens
acaacaaatagcatc

SEQ ID NO: 1054214 - DNA, 15 bp, Homo sapiens
cacaacaaatagcat

SEQ ID NO: 1054215 - DNA, 15 bp, Homo sapiens
tcacaacaaatagca

SEQ ID NO: 1054216 - DNA, 15 bp, Homo sapiens
ttcacaacaaatagc

SEQ ID NO: 1054217 - DNA, 15 bp, Homo sapiens
attcacaacaaatag

SEQ ID NO: 1054218 - DNA, 15 bp, Homo sapiens
cattcacaacaaata

SEQ ID NO: 1054219 - DNA, 15 bp, Homo sapiens
ccattcacaacaaat

SEQ ID NO: 1054220 - DNA, 15 bp, Homo sapiens
gccattcacaacaaa

SEQ ID NO: 1054221 - DNA, 15 bp, Homo sapiens
ggccattcacaacaa

SEQ ID NO: 1054222 - DNA, 15 bp, Homo sapiens
tggccattcacaaca

SEQ ID NO: 1054223 - DNA, 15 bp, Homo sapiens
ttggccattcacaac

SEQ ID NO: 1054224 - DNA, 15 bp, Homo sapiens
cttggccattcacaa

SEQ ID NO: 1054225 - DNA, 15 bp, Homo sapiens
ccttggccattcaca

SEQ ID NO: 1054226 - DNA, 15 bp, Homo sapiens
gccttggccattcac

SEQ ID NO: 1054227 - DNA, 15 bp, Homo sapiens
tgccttggccattca

SEQ ID NO: 1054228 - DNA, 15 bp, Homo sapiens
ctgccttggccattc

SEQ ID NO: 1054229 - DNA, 15 bp, Homo sapiens
gctgccttggccatt

SEQ ID NO: 1054230 - DNA, 15 bp, Homo sapiens
agctgccttggccat

SEQ ID NO: 1054231 - DNA, 15 bp, Homo sapiens
cagctgccttggcca

SEQ ID NO: 1054232 - DNA, 15 bp, Homo sapiens
gcagctgccttggcc

SEQ ID NO: 1054233 - DNA, 15 bp, Homo sapiens
cgcagctgccttggc

SEQ ID NO: 1054234 - DNA, 15 bp, Homo sapiens
tcgcagctgccttgg

SEQ ID NO: 1054235 - DNA, 15 bp, Homo sapiens
ctcgcagctgccttg

SEQ ID NO: 1054236 - DNA, 15 bp, Homo sapiens
actcgcagctgcctt

SEQ ID NO: 1054237 - DNA, 15 bp, Homo sapiens
gactcgcagctgcct

SEQ ID NO: 1054238 - DNA, 15 bp, Homo sapiens
agactcgcagctgcc

SEQ ID NO: 1054239 - DNA, 15 bp, Homo sapiens
aagactcgcagctgc

SEQ ID NO: 1054240 - DNA, 15 bp, Homo sapiens
caagactcgcagctg

SEQ ID NO: 1054241 - DNA, 15 bp, Homo sapiens
gcaagactcgcagct

SEQ ID NO: 1054242 - DNA, 15 bp, Homo sapiens
tgcaagactcgcagc

SEQ ID NO: 1054243 - DNA, 15 bp, Homo sapiens
ctgcaagactcgcag

SEQ ID NO: 1054244 - DNA, 15 bp, Homo sapiens
cctgcaagactcgca

SEQ ID NO: 1054245 - DNA, 15 bp, Homo sapiens
tcctgcaagactcgc

SEQ ID NO: 1054246 - DNA, 15 bp, Homo sapiens
ctcctgcaagactcg

SEQ ID NO: 1054247 - DNA, 15 bp, Homo sapiens
actcctgcaagactc

SEQ ID NO: 1054248 - DNA, 15 bp, Homo sapiens
aactcctgcaagact

SEQ ID NO: 1054249 - DNA, 15 bp, Homo sapiens
aaactcctgcaagac

SEQ ID NO: 1054250 - DNA, 15 bp, Homo sapiens
taaactcctgcaaga

SEQ ID NO: 1054251 - DNA, 15 bp, Homo sapiens
ctaaactcctgcaag

SEQ ID NO: 1054252 - DNA, 15 bp, Homo sapiens
gctaaactcctgcaa

SEQ ID NO: 1054253 - DNA, 15 bp, Homo sapiens
agctaaactcctgca

SEQ ID NO: 1054254 - DNA, 15 bp, Homo sapiens
aagctaaactcctgc

SEQ ID NO: 1054255 - DNA, 15 bp, Homo sapiens
aaagctaaactcctg

SEQ ID NO: 1054256 - DNA, 15 bp, Homo sapiens
caaagctaaactcct

SEQ ID NO: 1054257 - DNA, 15 bp, Homo sapiens
ccaaagctaaactcc

SEQ ID NO: 1054258 - DNA, 15 bp, Homo sapiens
cccaaagctaaactc

SEQ ID NO: 1054259 - DNA, 15 bp, Homo sapiens
gcccaaagctaaact

SEQ ID NO: 1054260 - DNA, 15 bp, Homo sapiens
tgcccaaagctaaac

SEQ ID NO: 1054261 - DNA, 15 bp, Homo sapiens
ctgcccaaagctaaa

SEQ ID NO: 1054262 - DNA, 15 bp, Homo sapiens
cctgcccaaagctaa

SEQ ID NO: 1054263 - DNA, 15 bp, Homo sapiens
ccctgcccaaagcta

SEQ ID NO: 1054264 - DNA, 15 bp, Homo sapiens
cccctgcccaaagct

SEQ ID NO: 1054265 - DNA, 15 bp, Homo sapiens
gcccctgcccaaagc

SEQ ID NO: 1054266 - DNA, 15 bp, Homo sapiens
agcccctgcccaaag

SEQ ID NO: 1054267 - DNA, 15 bp, Homo sapiens
aagcccctgcccaaa

SEQ ID NO: 1054268 - DNA, 15 bp, Homo sapiens
caagcccctgcccaa

SEQ ID NO: 1054269 - DNA, 15 bp, Homo sapiens
tcaagcccctgccca

SEQ ID NO: 1054270 - DNA, 15 bp, Homo sapiens
atcaagcccctgccc

SEQ ID NO: 1054271 - DNA, 15 bp, Homo sapiens
catcaagcccctgcc

SEQ ID NO: 1054272 - DNA, 15 bp, Homo sapiens
tcatcaagcccctgc

SEQ ID NO: 1054273 - DNA, 15 bp, Homo sapiens
atcatcaagcccctg

SEQ ID NO: 1054274 - DNA, 15 bp, Homo sapiens
aatcatcaagcccct

SEQ ID NO: 1054275 - DNA, 15 bp, Homo sapiens
aaatcatcaagcccc

SEQ ID NO: 1054276 - DNA, 15 bp, Homo sapiens
aaaatcatcaagccc

SEQ ID NO: 1054277 - DNA, 15 bp, Homo sapiens
taaaatcatcaagcc

SEQ ID NO: 1054278 - DNA, 15 bp, Homo sapiens
ttaaaatcatcaagc

SEQ ID NO: 1054279 - DNA, 15 bp, Homo sapiens
cttaaaatcatcaag

SEQ ID NO: 1054280 - DNA, 15 bp, Homo sapiens
gcttaaaatcatcaa

SEQ ID NO: 1054281 - DNA, 15 bp, Homo sapiens
ggcttaaaatcatca

SEQ ID NO: 1054282 - DNA, 15 bp, Homo sapiens
gggcttaaaatcatc

SEQ ID NO: 1054283 - DNA, 15 bp, Homo sapiens
ggggcttaaaatcat

SEQ ID NO: 1054284 - DNA, 15 bp, Homo sapiens
gggggcttaaaatca

SEQ ID NO: 1054285 - DNA, 15 bp, Homo sapiens
agggggcttaaaatc

SEQ ID NO: 1054286 - DNA, 15 bp, Homo sapiens
aagggggcttaaaat

SEQ ID NO: 1054287 - DNA, 15 bp, Homo sapiens
gaagggggcttaaaa

SEQ ID NO: 1054288 - DNA, 15 bp, Homo sapiens
cgaagggggcttaaa

SEQ ID NO: 1054289 - DNA, 15 bp, Homo sapiens
gcgaagggggcttaa

SEQ ID NO: 1054290 - DNA, 15 bp, Homo sapiens
tgcgaagggggctta

SEQ ID NO: 1054291 - DNA, 15 bp, Homo sapiens
ttgcgaagggggctt

SEQ ID NO: 1054292 - DNA, 15 bp, Homo sapiens
cttgcgaagggggct

SEQ ID NO: 1054293 - DNA, 15 bp, Homo sapiens
acttgcgaagggggc

SEQ ID NO: 1054294 - DNA, 15 bp, Homo sapiens
aacttgcgaaggggg

SEQ ID NO: 1054295 - DNA, 15 bp, Homo sapiens
gaacttgcgaagggg

SEQ ID NO: 1054296 - DNA, 15 bp, Homo sapiens
tgaacttgcgaaggg

SEQ ID NO: 1054297 - DNA, 15 bp, Homo sapiens
ctgaacttgcgaagg

SEQ ID NO: 1054298 - DNA, 15 bp, Homo sapiens
tctgaacttgcgaag

SEQ ID NO: 1054299 - DNA, 15 bp, Homo sapiens
atctgaacttgcgaa

SEQ ID NO: 1054300 - DNA, 15 bp, Homo sapiens
gatctgaacttgcga

SEQ ID NO: 1054301 - DNA, 15 bp, Homo sapiens
ggatctgaacttgcg

SEQ ID NO: 1054302 - DNA, 15 bp, Homo sapiens
aggatctgaacttgc

SEQ ID NO: 1054303 - DNA, 15 bp, Homo sapiens
aaggatctgaacttg

SEQ ID NO: 1054304 - DNA, 15 bp, Homo sapiens
taaggatctgaactt

SEQ ID NO: 1054305 - DNA, 15 bp, Homo sapiens
ctaaggatctgaact

SEQ ID NO: 1054306 - DNA, 15 bp, Homo sapiens
tctaaggatctgaac

SEQ ID NO: 1054307 - DNA, 15 bp, Homo sapiens
gtctaaggatctgaa

SEQ ID NO: 1054308 - DNA, 15 bp, Homo sapiens
tgtctaaggatctga

SEQ ID NO: 1054309 - DNA, 15 bp, Homo sapiens
ctgtctaaggatctg

SEQ ID NO: 1054310 - DNA, 15 bp, Homo sapiens
gctgtctaaggatct

SEQ ID NO: 1054311 - DNA, 15 bp, Homo sapiens
tgctgtctaaggatc

SEQ ID NO: 1054312 - DNA, 15 bp, Homo sapiens
ttgctgtctaaggat

SEQ ID NO: 1054313 - DNA, 15 bp, Homo sapiens
gttgctgtctaagga

SEQ ID NO: 1054314 - DNA, 15 bp, Homo sapiens
agttgctgtctaagg

SEQ ID NO: 1054315 - DNA, 15 bp, Homo sapiens
gagttgctgtctaag

SEQ ID NO: 1054316 - DNA, 15 bp, Homo sapiens
agagttgctgtctaa

SEQ ID NO: 1054317 - DNA, 15 bp, Homo sapiens
cagagttgctgtcta

SEQ ID NO: 1054318 - DNA, 15 bp, Homo sapiens
ccagagttgctgtct

SEQ ID NO: 1054319 - DNA, 15 bp, Homo sapiens
cccagagttgctgtc

SEQ ID NO: 1054320 - DNA, 15 bp, Homo sapiens
tcccagagttgctgt

SEQ ID NO: 1054321 - DNA, 15 bp, Homo sapiens
gtcccagagttgctg

SEQ ID NO: 1054322 - DNA, 15 bp, Homo sapiens
ggtcccagagttgct

SEQ ID NO: 1054323 - DNA, 15 bp, Homo sapiens
aggtcccagagttgc

SEQ ID NO: 1054324 - DNA, 15 bp, Homo sapiens
caggtcccagagttg

SEQ ID NO: 1054325 - DNA, 15 bp, Homo sapiens
gcaggtcccagagtt

SEQ ID NO: 1054326 - DNA, 15 bp, Homo sapiens
agcaggtcccagagt

SEQ ID NO: 1054327 - DNA, 15 bp, Homo sapiens
aagcaggtcccagag

SEQ ID NO: 1054328 - DNA, 15 bp, Homo sapiens
aaagcaggtcccaga

SEQ ID NO: 1054329 - DNA, 15 bp, Homo sapiens
aaaagcaggtcccag

SEQ ID NO: 1054330 - DNA, 15 bp, Homo sapiens
gaaaagcaggtccca

SEQ ID NO: 1054331 - DNA, 15 bp, Homo sapiens
ggaaaagcaggtccc

SEQ ID NO: 1054332 - DNA, 15 bp, Homo sapiens
aggaaaagcaggtcc

SEQ ID NO: 1054333 - DNA, 15 bp, Homo sapiens
caggaaaagcaggtc

SEQ ID NO: 1054334 - DNA, 15 bp, Homo sapiens
ccaggaaaagcaggt

SEQ ID NO: 1054335 - DNA, 15 bp, Homo sapiens
tccaggaaaagcagg

SEQ ID NO: 1054336 - DNA, 15 bp, Homo sapiens
gtccaggaaaagcag

SEQ ID NO: 1054337 - DNA, 15 bp, Homo sapiens
agtccaggaaaagca

SEQ ID NO: 1054338 - DNA, 15 bp, Homo sapiens
cagtccaggaaaagc

SEQ ID NO: 1054339 - DNA, 15 bp, Homo sapiens
ccagtccaggaaaag

SEQ ID NO: 1054340 - DNA, 15 bp, Homo sapiens
gccagtccaggaaaa

SEQ ID NO: 1054341 - DNA, 15 bp, Homo sapiens
agccagtccaggaaa

SEQ ID NO: 1054342 - DNA, 15 bp, Homo sapiens
cagccagtccaggaa

SEQ ID NO: 1054343 - DNA, 15 bp, Homo sapiens
ccagccagtccagga

SEQ ID NO: 1054344 - DNA, 15 bp, Homo sapiens
gccagccagtccagg

SEQ ID NO: 1054345 - DNA, 15 bp, Homo sapiens
agccagccagtccag

SEQ ID NO: 1054346 - DNA, 15 bp, Homo sapiens
gagccagccagtcca

SEQ ID NO: 1054347 - DNA, 15 bp, Homo sapiens
agagccagccagtcc

SEQ ID NO: 1054348 - DNA, 15 bp, Homo sapiens
cagagccagccagtc

SEQ ID NO: 1054349 - DNA, 15 bp, Homo sapiens
ccagagccagccagt

SEQ ID NO: 1054350 - DNA, 15 bp, Homo sapiens
cccagagccagccag

SEQ ID NO: 1054351 - DNA, 15 bp, Homo sapiens
acccagagccagcca

SEQ ID NO: 1054352 - DNA, 15 bp, Homo sapiens
aacccagagccagcc

SEQ ID NO: 1054353 - DNA, 15 bp, Homo sapiens
caacccagagccagc

SEQ ID NO: 1054354 - DNA, 15 bp, Homo sapiens
ccaacccagagccag

SEQ ID NO: 1054355 - DNA, 15 bp, Homo sapiens
accaacccagagcca

SEQ ID NO: 1054356 - DNA, 15 bp, Homo sapiens
caccaacccagagcc

SEQ ID NO: 1054357 - DNA, 15 bp, Homo sapiens
tcaccaacccagagc

SEQ ID NO: 1054358 - DNA, 15 bp, Homo sapiens
ctcaccaacccagag

SEQ ID NO: 1054359 - DNA, 15 bp, Homo sapiens
gctcaccaacccaga

SEQ ID NO: 1054360 - DNA, 15 bp, Homo sapiens
agctcaccaacccag

SEQ ID NO: 1054361 - DNA, 15 bp, Homo sapiens
gagctcaccaaccca

SEQ ID NO: 1054362 - DNA, 15 bp, Homo sapiens
agagctcaccaaccc

SEQ ID NO: 1054363 - DNA, 15 bp, Homo sapiens
cagagctcaccaacc

SEQ ID NO: 1054364 - DNA, 15 bp, Homo sapiens
acagagctcaccaac

SEQ ID NO: 1054365 - DNA, 15 bp, Homo sapiens
aacagagctcaccaa

SEQ ID NO: 1054366 - DNA, 15 bp, Homo sapiens
aaacagagctcacca

SEQ ID NO: 1054367 - DNA, 15 bp, Homo sapiens
caaacagagctcacc

SEQ ID NO: 1054368 - DNA, 15 bp, Homo sapiens
gcaaacagagctcac

SEQ ID NO: 1054369 - DNA, 15 bp, Homo sapiens
agcaaacagagctca

SEQ ID NO: 1054370 - DNA, 15 bp, Homo sapiens
gagcaaacagagctc

SEQ ID NO: 1054371 - DNA, 15 bp, Homo sapiens
cgagcaaacagagct

SEQ ID NO: 1054372 - DNA, 15 bp, Homo sapiens
gcgagcaaacagagc

SEQ ID NO: 1054373 - DNA, 15 bp, Homo sapiens
ggcgagcaaacagag

SEQ ID NO: 1054374 - DNA, 15 bp, Homo sapiens
tggcgagcaaacaga

SEQ ID NO: 1054375 - DNA, 15 bp, Homo sapiens
atggcgagcaaacag

SEQ ID NO: 1054376 - DNA, 15 bp, Homo sapiens
gatggcgagcaaaca

SEQ ID NO: 1054377 - DNA, 15 bp, Homo sapiens
cgatggcgagcaaac

SEQ ID NO: 1054378 - DNA, 15 bp, Homo sapiens
acgatggcgagcaaa

SEQ ID NO: 1054379 - DNA, 15 bp, Homo sapiens
aacgatggcgagcaa

SEQ ID NO: 1054380 - DNA, 15 bp, Homo sapiens
gaacgatggcgagca

SEQ ID NO: 1054381 - DNA, 15 bp, Homo sapiens
agaacgatggcgagc

SEQ ID NO: 1054382 - DNA, 15 bp, Homo sapiens
cagaacgatggcgag

SEQ ID NO: 1054383 - DNA, 15 bp, Homo sapiens
acagaacgatggcga

SEQ ID NO: 1054384 - DNA, 15 bp, Homo sapiens
cacagaacgatggcg

SEQ ID NO: 1054385 - DNA, 15 bp, Homo sapiens
ccacagaacgatggc

SEQ ID NO: 1054386 - DNA, 15 bp, Homo sapiens
tccacagaacgatgg

SEQ ID NO: 1054387 - DNA, 15 bp, Homo sapiens
gtccacagaacgatg

SEQ ID NO: 1054388 - DNA, 15 bp, Homo sapiens
ggtccacagaacgat

SEQ ID NO: 1054389 - DNA, 15 bp, Homo sapiens
aggtccacagaacga

SEQ ID NO: 1054390 - DNA, 15 bp, Homo sapiens
aaggtccacagaacg

SEQ ID NO: 1054391 - DNA, 15 bp, Homo sapiens
aaaggtccacagaac

SEQ ID NO: 1054392 - DNA, 15 bp, Homo sapiens
taaaggtccacagaa

SEQ ID NO: 1054393 - DNA, 15 bp, Homo sapiens
ttaaaggtccacaga

SEQ ID NO: 1054394 - DNA, 15 bp, Homo sapiens
gttaaaggtccacag

SEQ ID NO: 1054395 - DNA, 15 bp, Homo sapiens
agttaaaggtccaca

SEQ ID NO: 1054396 - DNA, 15 bp, Homo sapiens
gagttaaaggtccac

SEQ ID NO: 1054397 - DNA, 15 bp, Homo sapiens
ggagttaaaggtcca

SEQ ID NO: 1054398 - DNA, 15 bp, Homo sapiens
gggagttaaaggtcc

SEQ ID NO: 1054399 - DNA, 15 bp, Homo sapiens
ggggagttaaaggtc

SEQ ID NO: 1054400 - DNA, 15 bp, Homo sapiens
tggggagttaaaggt

SEQ ID NO: 1054401 - DNA, 15 bp, Homo sapiens
atggggagttaaagg

SEQ ID NO: 1054402 - DNA, 15 bp, Homo sapiens
gatggggagttaaag

SEQ ID NO: 1054403 - DNA, 15 bp, Homo sapiens
agatggggagttaaa

SEQ ID NO: 1054404 - DNA, 15 bp, Homo sapiens
aagatggggagttaa

SEQ ID NO: 1054405 - DNA, 15 bp, Homo sapiens
aaagatggggagtta

SEQ ID NO: 1054406 - DNA, 15 bp, Homo sapiens
caaagatggggagtt

SEQ ID NO: 1054407 - DNA, 15 bp, Homo sapiens
ccaaagatggggagt

SEQ ID NO: 1054408 - DNA, 15 bp, Homo sapiens
tccaaagatggggag

SEQ ID NO: 1054409 - DNA, 15 bp, Homo sapiens
ttccaaagatgggga

SEQ ID NO: 1054410 - DNA, 15 bp, Homo sapiens
attccaaagatgggg

SEQ ID NO: 1054411 - DNA, 15 bp, Homo sapiens
gattccaaagatggg

SEQ ID NO: 1054412 - DNA, 15 bp, Homo sapiens
ggattccaaagatgg

SEQ ID NO: 1054413 - DNA, 15 bp, Homo sapiens
tggattccaaagatg

SEQ ID NO: 1054414 - DNA, 15 bp, Homo sapiens
gtggattccaaagat

SEQ ID NO: 1054415 - DNA, 15 bp, Homo sapiens
agtggattccaaaga

SEQ ID NO: 1054416 - DNA, 15 bp, Homo sapiens
cagtggattccaaag

SEQ ID NO: 1054417 - DNA, 15 bp, Homo sapiens
acagtggattccaaa

SEQ ID NO: 1054418 - DNA, 15 bp, Homo sapiens
gacagtggattccaa

SEQ ID NO: 1054419 - DNA, 15 bp, Homo sapiens
ggacagtggattcca

SEQ ID NO: 1054420 - DNA, 15 bp, Homo sapiens
gggacagtggattcc

SEQ ID NO: 1054421 - DNA, 15 bp, Homo sapiens
agggacagtggattc

SEQ ID NO: 1054422 - DNA, 15 bp, Homo sapiens
aagggacagtggatt

SEQ ID NO: 1054423 - DNA, 15 bp, Homo sapiens
gaagggacagtggat

SEQ ID NO: 1054424 - DNA, 15 bp, Homo sapiens
tgaagggacagtgga

SEQ ID NO: 1054425 - DNA, 15 bp, Homo sapiens
ctgaagggacagtgg

SEQ ID NO: 1054426 - DNA, 15 bp, Homo sapiens
gctgaagggacagtg

SEQ ID NO: 1054427 - DNA, 15 bp, Homo sapiens
cgctgaagggacagt

SEQ ID NO: 1054428 - DNA, 15 bp, Homo sapiens
tcgctgaagggacag

SEQ ID NO: 1054429 - DNA, 15 bp, Homo sapiens
gtcgctgaagggaca

SEQ ID NO: 1054430 - DNA, 15 bp, Homo sapiens
tgtcgctgaagggac

SEQ ID NO: 1054431 - DNA, 15 bp, Homo sapiens
ctgtcgctgaaggga

SEQ ID NO: 1054432 - DNA, 15 bp, Homo sapiens
actgtcgctgaaggg

SEQ ID NO: 1054433 - DNA, 15 bp, Homo sapiens
cactgtcgctgaagg

SEQ ID NO: 1054434 - DNA, 15 bp, Homo sapiens
acactgtcgctgaag

SEQ ID NO: 1054435 - DNA, 15 bp, Homo sapiens
aacactgtcgctgaa

SEQ ID NO: 1054436 - DNA, 15 bp, Homo sapiens
gaacactgtcgctga

SEQ ID NO: 1054437 - DNA, 15 bp, Homo sapiens
ggaacactgtcgctg

SEQ ID NO: 1054438 - DNA, 15 bp, Homo sapiens
aggaacactgtcgct

SEQ ID NO: 1054439 - DNA, 15 bp, Homo sapiens
gaggaacactgtcgc

SEQ ID NO: 1054440 - DNA, 15 bp, Homo sapiens
tgaggaacactgtcg

SEQ ID NO: 1054441 - DNA, 15 bp, Homo sapiens
atgaggaacactgtc

SEQ ID NO: 1054442 - DNA, 15 bp, Homo sapiens
catgaggaacactgt

SEQ ID NO: 1054443 - DNA, 15 bp, Homo sapiens
ccatgaggaacactg

SEQ ID NO: 1054444 - DNA, 15 bp, Homo sapiens
cccatgaggaacact

SEQ ID NO: 1054445 - DNA, 15 bp, Homo sapiens
ccccatgaggaacac

SEQ ID NO: 1054446 - DNA, 15 bp, Homo sapiens
gccccatgaggaaca

SEQ ID NO: 1054447 - DNA, 15 bp, Homo sapiens
tgccccatgaggaac

SEQ ID NO: 1054448 - DNA, 15 bp, Homo sapiens
ctgccccatgaggaa

SEQ ID NO: 1054449 - DNA, 15 bp, Homo sapiens
cctgccccatgagga

SEQ ID NO: 1054450 - DNA, 15 bp, Homo sapiens
ccctgccccatgagg

SEQ ID NO: 1054451 - DNA, 15 bp, Homo sapiens
cccctgccccatgag

SEQ ID NO: 1054452 - DNA, 15 bp, Homo sapiens
gcccctgccccatga

SEQ ID NO: 1054453 - DNA, 15 bp, Homo sapiens
tgcccctgccccatg

SEQ ID NO: 1054454 - DNA, 15 bp, Homo sapiens
ttgcccctgccccat

SEQ ID NO: 1054455 - DNA, 15 bp, Homo sapiens
gttgcccctgcccca

SEQ ID NO: 1054456 - DNA, 15 bp, Homo sapiens
tgttgcccctgcccc

SEQ ID NO: 1054457 - DNA, 15 bp, Homo sapiens
gtgttgcccctgccc

SEQ ID NO: 1054458 - DNA, 15 bp, Homo sapiens
cgtgttgcccctgcc

SEQ ID NO: 1054459 - DNA, 15 bp, Homo sapiens
acgtgttgcccctgc

SEQ ID NO: 1054460 - DNA, 15 bp, Homo sapiens
cacgtgttgcccctg

SEQ ID NO: 1054461 - DNA, 15 bp, Homo sapiens
gcacgtgttgcccct

SEQ ID NO: 1054462 - DNA, 15 bp, Homo sapiens
agcacgtgttgcccc

SEQ ID NO: 1054463 - DNA, 15 bp, Homo sapiens
cagcacgtgttgccc

SEQ ID NO: 1054464 - DNA, 15 bp, Homo sapiens
ccagcacgtgttgcc

SEQ ID NO: 1054465 - DNA, 15 bp, Homo sapiens
gccagcacgtgttgc

SEQ ID NO: 1054466 - DNA, 15 bp, Homo sapiens
agccagcacgtgttg

SEQ ID NO: 1054467 - DNA, 15 bp, Homo sapiens
cagccagcacgtgtt

SEQ ID NO: 1054468 - DNA, 15 bp, Homo sapiens
ccagccagcacgtgt

SEQ ID NO: 1054469 - DNA, 15 bp, Homo sapiens
tccagccagcacgtg

SEQ ID NO: 1054470 - DNA, 15 bp, Homo sapiens
ctccagccagcacgt

SEQ ID NO: 1054471 - DNA, 15 bp, Homo sapiens
tctccagccagcacg

SEQ ID NO: 1054472 - DNA, 15 bp, Homo sapiens
ttctccagccagcac

SEQ ID NO: 1054473 - DNA, 15 bp, Homo sapiens
tttctccagccagca

SEQ ID NO: 1054474 - DNA, 15 bp, Homo sapiens
atttctccagccagc

SEQ ID NO: 1054475 - DNA, 15 bp, Homo sapiens
catttctccagccag

SEQ ID NO: 1054476 - DNA, 15 bp, Homo sapiens
tcatttctccagcca

SEQ ID NO: 1054477 - DNA, 15 bp, Homo sapiens
ttcatttctccagcc

SEQ ID NO: 1054478 - DNA, 15 bp, Homo sapiens
tttcatttctccagc

SEQ ID NO: 1054479 - DNA, 15 bp, Homo sapiens
ttttcatttctccag

SEQ ID NO: 1054480 - DNA, 15 bp, Homo sapiens
tttttcatttctcca

SEQ ID NO: 1054481 - DNA, 15 bp, Homo sapiens
atttttcatttctcc

SEQ ID NO: 1054482 - DNA, 15 bp, Homo sapiens
gatttttcatttctc

SEQ ID NO: 1054483 - DNA, 15 bp, Homo sapiens
tgatttttcatttct

SEQ ID NO: 1054484 - DNA, 15 bp, Homo sapiens
ttgatttttcatttc

SEQ ID NO: 1054485 - DNA, 15 bp, Homo sapiens
tttgatttttcattt

SEQ ID NO: 1054486 - DNA, 15 bp, Homo sapiens
ttttgatttttcatt

SEQ ID NO: 1054487 - DNA, 15 bp, Homo sapiens
tttttgatttttcat

SEQ ID NO: 1054488 - DNA, 15 bp, Homo sapiens
ttttttgatttttca

SEQ ID NO: 1054489 - DNA, 15 bp, Homo sapiens
gttttttgatttttc

SEQ ID NO: 1054490 - DNA, 15 bp, Homo sapiens
agttttttgattttt

SEQ ID NO: 1054491 - DNA, 15 bp, Homo sapiens
cagttttttgatttt

SEQ ID NO: 1054492 - DNA, 15 bp, Homo sapiens
ccagttttttgattt

SEQ ID NO: 1054493 - DNA, 15 bp, Homo sapiens
gccagttttttgatt

SEQ ID NO: 1054494 - DNA, 15 bp, Homo sapiens
agccagttttttgat

SEQ ID NO: 1054495 - DNA, 15 bp, Homo sapiens
aagccagttttttga

SEQ ID NO: 1054496 - DNA, 15 bp, Homo sapiens
aaagccagttttttg

SEQ ID NO: 1054497 - DNA, 15 bp, Homo sapiens
caaagccagtttttt

SEQ ID NO: 1054498 - DNA, 15 bp, Homo sapiens
ccaaagccagttttt

SEQ ID NO: 1054499 - DNA, 15 bp, Homo sapiens
gccaaagccagtttt

SEQ ID NO: 1054500 - DNA, 15 bp, Homo sapiens
tgccaaagccagttt

SEQ ID NO: 1054501 - DNA, 15 bp, Homo sapiens
ctgccaaagccagtt

SEQ ID NO: 1054502 - DNA, 15 bp, Homo sapiens
actgccaaagccagt

SEQ ID NO: 1054503 - DNA, 15 bp, Homo sapiens
aactgccaaagccag

SEQ ID NO: 1054504 - DNA, 15 bp, Homo sapiens
aaactgccaaagcca

SEQ ID NO: 1054505 - DNA, 15 bp, Homo sapiens
gaaactgccaaagcc

SEQ ID NO: 1054506 - DNA, 15 bp, Homo sapiens
ggaaactgccaaagc

SEQ ID NO: 1054507 - DNA, 15 bp, Homo sapiens
tggaaactgccaaag

SEQ ID NO: 1054508 - DNA, 15 bp, Homo sapiens
gtggaaactgccaaa

SEQ ID NO: 1054509 - DNA, 15 bp, Homo sapiens
agtggaaactgccaa

SEQ ID NO: 1054510 - DNA, 15 bp, Homo sapiens
cagtggaaactgcca

SEQ ID NO: 1054511 - DNA, 15 bp, Homo sapiens
ccagtggaaactgcc

SEQ ID NO: 1054512 - DNA, 15 bp, Homo sapiens
accagtggaaactgc

SEQ ID NO: 1054513 - DNA, 15 bp, Homo sapiens
caccagtggaaactg

SEQ ID NO: 1054514 - DNA, 15 bp, Homo sapiens
gcaccagtggaaact

SEQ ID NO: 1054515 - DNA, 15 bp, Homo sapiens
ggcaccagtggaaac

SEQ ID NO: 1054516 - DNA, 15 bp, Homo sapiens
aggcaccagtggaaa

SEQ ID NO: 1054517 - DNA, 15 bp, Homo sapiens
gaggcaccagtggaa

SEQ ID NO: 1054518 - DNA, 15 bp, Homo sapiens
agaggcaccagtgga

SEQ ID NO: 1054519 - DNA, 15 bp, Homo sapiens
cagaggcaccagtgg

SEQ ID NO: 1054520 - DNA, 15 bp, Homo sapiens
acagaggcaccagtg

SEQ ID NO: 1054521 - DNA, 15 bp, Homo sapiens
cacagaggcaccagt

SEQ ID NO: 1054522 - DNA, 15 bp, Homo sapiens
gcacagaggcaccag

SEQ ID NO: 1054523 - DNA, 15 bp, Homo sapiens
agcacagaggcacca

SEQ ID NO: 1054524 - DNA, 15 bp, Homo sapiens
gagcacagaggcacc

SEQ ID NO: 1054525 - DNA, 15 bp, Homo sapiens
agagcacagaggcac

SEQ ID NO: 1054526 - DNA, 15 bp, Homo sapiens
gagagcacagaggca

SEQ ID NO: 1054527 - DNA, 15 bp, Homo sapiens
agagagcacagaggc

SEQ ID NO: 1054528 - DNA, 15 bp, Homo sapiens
cagagagcacagagg

SEQ ID NO: 1054529 - DNA, 15 bp, Homo sapiens
ccagagagcacagag

SEQ ID NO: 1054530 - DNA, 15 bp, Homo sapiens
accagagagcacaga

SEQ ID NO: 1054531 - DNA, 15 bp, Homo sapiens
gaccagagagcacag

SEQ ID NO: 1054532 - DNA, 15 bp, Homo sapiens
tgaccagagagcaca

SEQ ID NO: 1054533 - DNA, 15 bp, Homo sapiens
gtgaccagagagcac

SEQ ID NO: 1054534 - DNA, 15 bp, Homo sapiens
ggtgaccagagagca

SEQ ID NO: 1054535 - DNA, 15 bp, Homo sapiens
aggtgaccagagagc

SEQ ID NO: 1054536 - DNA, 15 bp, Homo sapiens
aaggtgaccagagag

SEQ ID NO: 1054537 - DNA, 15 bp, Homo sapiens
aaaggtgaccagaga

SEQ ID NO: 1054538 - DNA, 15 bp, Homo sapiens
gaaaggtgaccagag

SEQ ID NO: 1054539 - DNA, 15 bp, Homo sapiens
ggaaaggtgaccaga

SEQ ID NO: 1054540 - DNA, 15 bp, Homo sapiens
cggaaaggtgaccag

SEQ ID NO: 1054541 - DNA, 15 bp, Homo sapiens
tcggaaaggtgacca

SEQ ID NO: 1054542 - DNA, 15 bp, Homo sapiens
ctcggaaaggtgacc

SEQ ID NO: 1054543 - DNA, 15 bp, Homo sapiens
cctcggaaaggtgac

SEQ ID NO: 1054544 - DNA, 15 bp, Homo sapiens
gcctcggaaaggtga

SEQ ID NO: 1054545 - DNA, 15 bp, Homo sapiens
cgcctcggaaaggtg

SEQ ID NO: 1054546 - DNA, 15 bp, Homo sapiens
acgcctcggaaaggt

SEQ ID NO: 1054547 - DNA, 15 bp, Homo sapiens
gacgcctcggaaagg

SEQ ID NO: 1054548 - DNA, 15 bp, Homo sapiens
agacgcctcggaaag

SEQ ID NO: 1054549 - DNA, 15 bp, Homo sapiens
cagacgcctcggaaa

SEQ ID NO: 1054550 - DNA, 15 bp, Homo sapiens
ccagacgcctcggaa

SEQ ID NO: 1054551 - DNA, 15 bp, Homo sapiens
accagacgcctcgga

SEQ ID NO: 1054552 - DNA, 15 bp, Homo sapiens
taccagacgcctcgg

SEQ ID NO: 1054553 - DNA, 15 bp, Homo sapiens
ttaccagacgcctcg

SEQ ID NO: 1054554 - DNA, 15 bp, Homo sapiens
gttaccagacgcctc

SEQ ID NO: 1054555 - DNA, 15 bp, Homo sapiens
agttaccagacgcct

SEQ ID NO: 1054556 - DNA, 15 bp, Homo sapiens
tagttaccagacgcc

SEQ ID NO: 1054557 - DNA, 15 bp, Homo sapiens
ctagttaccagacgc

SEQ ID NO: 1054558 - DNA, 15 bp, Homo sapiens
actagttaccagacg

SEQ ID NO: 1054559 - DNA, 15 bp, Homo sapiens
cactagttaccagac

SEQ ID NO: 1054560 - DNA, 15 bp, Homo sapiens
gcactagttaccaga

SEQ ID NO: 1054561 - DNA, 15 bp, Homo sapiens
cgcactagttaccag

SEQ ID NO: 1054562 - DNA, 15 bp, Homo sapiens
tcgcactagttacca

SEQ ID NO: 1054563 - DNA, 15 bp, Homo sapiens
ctcgcactagttacc

SEQ ID NO: 1054564 - DNA, 15 bp, Homo sapiens
tctcgcactagttac

SEQ ID NO: 1054565 - DNA, 15 bp, Homo sapiens
ttctcgcactagtta

SEQ ID NO: 1054566 - DNA, 15 bp, Homo sapiens
tttctcgcactagtt

SEQ ID NO: 1054567 - DNA, 15 bp, Homo sapiens
ctttctcgcactagt

SEQ ID NO: 1054568 - DNA, 15 bp, Homo sapiens
actttctcgcactag

SEQ ID NO: 1054569 - DNA, 15 bp, Homo sapiens
tactttctcgcacta

SEQ ID NO: 1054570 - DNA, 15 bp, Homo sapiens
ctactttctcgcact

SEQ ID NO: 1054571 - DNA, 15 bp, Homo sapiens
tctactttctcgcac

SEQ ID NO: 1054572 - DNA, 15 bp, Homo sapiens
atctactttctcgca

SEQ ID NO: 1054573 - DNA, 15 bp, Homo sapiens
catctactttctcgc

SEQ ID NO: 1054574 - DNA, 15 bp, Homo sapiens
tcatctactttctcg

SEQ ID NO: 1054575 - DNA, 15 bp, Homo sapiens
atcatctactttctc

SEQ ID NO: 1054576 - DNA, 15 bp, Homo sapiens
catcatctactttct

SEQ ID NO: 1054577 - DNA, 15 bp, Homo sapiens
gcatcatctactttc

SEQ ID NO: 1054578 - DNA, 15 bp, Homo sapiens
tgcatcatctacttt

SEQ ID NO: 1054579 - DNA, 15 bp, Homo sapiens
ctgcatcatctactt

SEQ ID NO: 1054580 - DNA, 15 bp, Homo sapiens
actgcatcatctact

SEQ ID NO: 1054581 - DNA, 15 bp, Homo sapiens
tactgcatcatctac

SEQ ID NO: 1054582 - DNA, 15 bp, Homo sapiens
atactgcatcatcta

SEQ ID NO: 1054583 - DNA, 15 bp, Homo sapiens
aatactgcatcatct

SEQ ID NO: 1054584 - DNA, 15 bp, Homo sapiens
aaatactgcatcatc

SEQ ID NO: 1054585 - DNA, 15 bp, Homo sapiens
caaatactgcatcat

SEQ ID NO: 1054586 - DNA, 15 bp, Homo sapiens
acaaatactgcatca

SEQ ID NO: 1054587 - DNA, 15 bp, Homo sapiens
aacaaatactgcatc

SEQ ID NO: 1054588 - DNA, 15 bp, Homo sapiens
taacaaatactgcat

SEQ ID NO: 1054589 - DNA, 15 bp, Homo sapiens
ctaacaaatactgca

SEQ ID NO: 1054590 - DNA, 15 bp, Homo sapiens
gctaacaaatactgc

SEQ ID NO: 1054591 - DNA, 15 bp, Homo sapiens
agctaacaaatactg

SEQ ID NO: 1054592 - DNA, 15 bp, Homo sapiens
gagctaacaaatact

SEQ ID NO: 1054593 - DNA, 15 bp, Homo sapiens
ggagctaacaaatac

SEQ ID NO: 1054594 - DNA, 15 bp, Homo sapiens
cggagctaacaaata

SEQ ID NO: 1054595 - DNA, 15 bp, Homo sapiens
ccggagctaacaaat

SEQ ID NO: 1054596 - DNA, 15 bp, Homo sapiens
tccggagctaacaaa

SEQ ID NO: 1054597 - DNA, 15 bp, Homo sapiens
ctccggagctaacaa

SEQ ID NO: 1054598 - DNA, 15 bp, Homo sapiens
gctccggagctaaca

SEQ ID NO: 1054599 - DNA, 15 bp, Homo sapiens
tgctccggagctaac

SEQ ID NO: 1054600 - DNA, 15 bp, Homo sapiens
ttgctccggagctaa

SEQ ID NO: 1054601 - DNA, 15 bp, Homo sapiens
attgctccggagcta

SEQ ID NO: 1054602 - DNA, 15 bp, Homo sapiens
aattgctccggagct

SEQ ID NO: 1054603 - DNA, 15 bp, Homo sapiens
taattgctccggagc

SEQ ID NO: 1054604 - DNA, 15 bp, Homo sapiens
gtaattgctccggag

SEQ ID NO: 1054605 - DNA, 15 bp, Homo sapiens
ggtaattgctccgga

SEQ ID NO: 1054606 - DNA, 15 bp, Homo sapiens
aggtaattgctccgg

SEQ ID NO: 1054607 - DNA, 15 bp, Homo sapiens
gaggtaattgctccg

SEQ ID NO: 1054608 - DNA, 15 bp, Homo sapiens
tgaggtaattgctcc

SEQ ID NO: 1054609 - DNA, 15 bp, Homo sapiens
atgaggtaattgctc

SEQ ID NO: 1054610 - DNA, 15 bp, Homo sapiens
catgaggtaattgct

SEQ ID NO: 1054611 - DNA, 15 bp, Homo sapiens
acatgaggtaattgc

SEQ ID NO: 1054612 - DNA, 15 bp, Homo sapiens
gacatgaggtaattg

SEQ ID NO: 1054613 - DNA, 15 bp, Homo sapiens
agacatgaggtaatt

SEQ ID NO: 1054614 - DNA, 15 bp, Homo sapiens
cagacatgaggtaat

SEQ ID NO: 1054615 - DNA, 15 bp, Homo sapiens
tcagacatgaggtaa

SEQ ID NO: 1054616 - DNA, 15 bp, Homo sapiens
ctcagacatgaggta

SEQ ID NO: 1054617 - DNA, 15 bp, Homo sapiens
actcagacatgaggt

SEQ ID NO: 1054618 - DNA, 15 bp, Homo sapiens
gactcagacatgagg

SEQ ID NO: 1054619 - DNA, 15 bp, Homo sapiens
agactcagacatgag

SEQ ID NO: 1054620 - DNA, 15 bp, Homo sapiens
aagactcagacatga

SEQ ID NO: 1054621 - DNA, 15 bp, Homo sapiens
caagactcagacatg

SEQ ID NO: 1054622 - DNA, 15 bp, Homo sapiens
gcaagactcagacat

SEQ ID NO: 1054623 - DNA, 15 bp, Homo sapiens
agcaagactcagaca

SEQ ID NO: 1054624 - DNA, 15 bp, Homo sapiens
cagcaagactcagac

SEQ ID NO: 1054625 - DNA, 15 bp, Homo sapiens
gcagcaagactcaga

SEQ ID NO: 1054626 - DNA, 15 bp, Homo sapiens
tgcagcaagactcag

SEQ ID NO: 1054627 - DNA, 15 bp, Homo sapiens
ttgcagcaagactca

SEQ ID NO: 1054628 - DNA, 15 bp, Homo sapiens
gttgcagcaagactc

SEQ ID NO: 1054629 - DNA, 15 bp, Homo sapiens
tgttgcagcaagact

SEQ ID NO: 1054630 - DNA, 15 bp, Homo sapiens
atgttgcagcaagac

SEQ ID NO: 1054631 - DNA, 15 bp, Homo sapiens
catgttgcagcaaga

SEQ ID NO: 1054632 - DNA, 15 bp, Homo sapiens
tcatgttgcagcaag

SEQ ID NO: 1054633 - DNA, 15 bp, Homo sapiens
ctcatgttgcagcaa

SEQ ID NO: 1054634 - DNA, 15 bp, Homo sapiens
cctcatgttgcagca

SEQ ID NO: 1054635 - DNA, 15 bp, Homo sapiens
acctcatgttgcagc

SEQ ID NO: 1054636 - DNA, 15 bp, Homo sapiens
gacctcatgttgcag

SEQ ID NO: 1054637 - DNA, 15 bp, Homo sapiens
tgacctcatgttgca

SEQ ID NO: 1054638 - DNA, 15 bp, Homo sapiens
ctgacctcatgttgc

SEQ ID NO: 1054639 - DNA, 15 bp, Homo sapiens
gctgacctcatgttg

SEQ ID NO: 1054640 - DNA, 15 bp, Homo sapiens
ggctgacctcatgtt

SEQ ID NO: 1054641 - DNA, 15 bp, Homo sapiens
gggctgacctcatgt

SEQ ID NO: 1054642 - DNA, 15 bp, Homo sapiens
tgggctgacctcatg

SEQ ID NO: 1054643 - DNA, 15 bp, Homo sapiens
ttgggctgacctcat

SEQ ID NO: 1054644 - DNA, 15 bp, Homo sapiens
cttgggctgacctca

SEQ ID NO: 1054645 - DNA, 15 bp, Homo sapiens
tcttgggctgacctc

SEQ ID NO: 1054646 - DNA, 15 bp, Homo sapiens
ttcttgggctgacct

SEQ ID NO: 1054647 - DNA, 15 bp, Homo sapiens
tttcttgggctgacc

SEQ ID NO: 1054648 - DNA, 15 bp, Homo sapiens
gtttcttgggctgac

SEQ ID NO: 1054649 - DNA, 15 bp, Homo sapiens
tgtttcttgggctga

SEQ ID NO: 1054650 - DNA, 15 bp, Homo sapiens
ttgtttcttgggctg

SEQ ID NO: 1054651 - DNA, 15 bp, Homo sapiens
attgtttcttgggct

SEQ ID NO: 1054652 - DNA, 15 bp, Homo sapiens
aattgtttcttgggc

SEQ ID NO: 1054653 - DNA, 15 bp, Homo sapiens
aaattgtttcttggg

SEQ ID NO: 1054654 - DNA, 15 bp, Homo sapiens
gaaattgtttcttgg

SEQ ID NO: 1054655 - DNA, 15 bp, Homo sapiens
tgaaattgtttcttg

SEQ ID NO: 1054656 - DNA, 15 bp, Homo sapiens
ttgaaattgtttctt

SEQ ID NO: 1054657 - DNA, 15 bp, Homo sapiens
tttgaaattgtttct

SEQ ID NO: 1054658 - DNA, 15 bp, Homo sapiens
ttttgaaattgtttc

SEQ ID NO: 1054659 - DNA, 15 bp, Homo sapiens
tttttgaaattgttt

SEQ ID NO: 1054660 - DNA, 15 bp, Homo sapiens
ttttttgaaattgtt

SEQ ID NO: 1054661 - DNA, 15 bp, Homo sapiens
cttttttgaaattgt

SEQ ID NO: 1054662 - DNA, 15 bp, Homo sapiens
cccttttttgaaatt

SEQ ID NO: 1054663 - DNA, 15 bp, Homo sapiens
ccccttttttgaaat

SEQ ID NO: 1054664 - DNA, 15 bp, Homo sapiens
tccccttttttgaaa

SEQ ID NO: 1054665 - DNA, 15 bp, Homo sapiens
gtccccttttttgaa

SEQ ID NO: 1054666 - DNA, 15 bp, Homo sapiens
tgtccccttttttga

SEQ ID NO: 1054667 - DNA, 15 bp, Homo sapiens
ttgtccccttttttg

SEQ ID NO: 1054668 - DNA, 15 bp, Homo sapiens
attgtcccctttttt

SEQ ID NO: 1054669 - DNA, 15 bp, Homo sapiens
aattgtccccttttt

SEQ ID NO: 1054670 - DNA, 15 bp, Homo sapiens
aaattgtcccctttt

SEQ ID NO: 1054671 - DNA, 15 bp, Homo sapiens
aaaattgtccccttt

SEQ ID NO: 1054672 - DNA, 15 bp, Homo sapiens
gaaaattgtcccctt

SEQ ID NO: 1054673 - DNA, 15 bp, Homo sapiens
ggaaaattgtcccct

SEQ ID NO: 1054674 - DNA, 15 bp, Homo sapiens
tggaaaattgtcccc

SEQ ID NO: 1054675 - DNA, 15 bp, Homo sapiens
gtggaaaattgtccc

SEQ ID NO: 1054676 - DNA, 15 bp, Homo sapiens
ggtggaaaattgtcc

SEQ ID NO: 1054677 - DNA, 15 bp, Homo sapiens
gggtggaaaattgtc

SEQ ID NO: 1054678 - DNA, 15 bp, Homo sapiens
tgggtggaaaattgt

SEQ ID NO: 1054679 - DNA, 15 bp, Homo sapiens
ctgggtggaaaattg

SEQ ID NO: 1054680 - DNA, 15 bp, Homo sapiens
actgggtggaaaatt

SEQ ID NO: 1054681 - DNA, 15 bp, Homo sapiens
aaactgggtggaaaa

SEQ ID NO: 1054682 - DNA, 15 bp, Homo sapiens
aaaactgggtggaaa

SEQ ID NO: 1054683 - DNA, 15 bp, Homo sapiens
aaaaactgggtggaa

SEQ ID NO: 1054684 - DNA, 15 bp, Homo sapiens
gaaaaactgggtgga

SEQ ID NO: 1054685 - DNA, 15 bp, Homo sapiens
tgaaaaactgggtgg

SEQ ID NO: 1054686 - DNA, 15 bp, Homo sapiens
ctgaaaaactgggtg

SEQ ID NO: 1054687 - DNA, 15 bp, Homo sapiens
tctgaaaaactgggt

SEQ ID NO: 1054688 - DNA, 15 bp, Homo sapiens
ctctgaaaaactggg

SEQ ID NO: 1054689 - DNA, 15 bp, Homo sapiens
gctctgaaaaactgg

SEQ ID NO: 1054690 - DNA, 15 bp, Homo sapiens
agctctgaaaaactg

SEQ ID NO: 1054691 - DNA, 15 bp, Homo sapiens
aagctctgaaaaact

SEQ ID NO: 1054692 - DNA, 15 bp, Homo sapiens
aaagctctgaaaaac

SEQ ID NO: 1054693 - DNA, 15 bp, Homo sapiens
caaagctctgaaaaa

SEQ ID NO: 1054694 - DNA, 15 bp, Homo sapiens
ccaaagctctgaaaa

SEQ ID NO: 1054695 - DNA, 15 bp, Homo sapiens
tccaaagctctgaaa

SEQ ID NO: 1054696 - DNA, 15 bp, Homo sapiens
atccaaagctctgaa

SEQ ID NO: 1054697 - DNA, 15 bp, Homo sapiens
tatccaaagctctga

SEQ ID NO: 1054698 - DNA, 15 bp, Homo sapiens
ttatccaaagctctg

SEQ ID NO: 1054699 - DNA, 15 bp, Homo sapiens
attatccaaagctct

SEQ ID NO: 1054700 - DNA, 15 bp, Homo sapiens
aattatccaaagctc

SEQ ID NO: 1054701 - DNA, 15 bp, Homo sapiens
taattatccaaagct

SEQ ID NO: 1054702 - DNA, 15 bp, Homo sapiens
ctaattatccaaagc

SEQ ID NO: 1054703 - DNA, 15 bp, Homo sapiens
gctaattatccaaag

SEQ ID NO: 1054704 - DNA, 15 bp, Homo sapiens
tgctaattatccaaa

SEQ ID NO: 1054705 - DNA, 15 bp, Homo sapiens
gtgctaattatccaa

SEQ ID NO: 1054706 - DNA, 15 bp, Homo sapiens
gaaagtgctaattat

SEQ ID NO: 1054707 - DNA, 15 bp, Homo sapiens
agaaagtgctaatta

SEQ ID NO: 1054708 - DNA, 15 bp, Homo sapiens
tagaaagtgctaatt

SEQ ID NO: 1054709 - DNA, 15 bp, Homo sapiens
ttagaaagtgctaat

SEQ ID NO: 1054710 - DNA, 15 bp, Homo sapiens
attagaaagtgctaa

SEQ ID NO: 1054711 - DNA, 15 bp, Homo sapiens
aattagaaagtgcta

SEQ ID NO: 1054712 - DNA, 15 bp, Homo sapiens
gaattagaaagtgct

SEQ ID NO: 1054713 - DNA, 15 bp, Homo sapiens
tgaattagaaagtgc

SEQ ID NO: 1054714 - DNA, 15 bp, Homo sapiens
atgaattagaaagtg

SEQ ID NO: 1054715 - DNA, 15 bp, Homo sapiens
tatgaattagaaagt

SEQ ID NO: 1054716 - DNA, 15 bp, Homo sapiens
atatgaattagaaag

SEQ ID NO: 1054717 - DNA, 15 bp, Homo sapiens
aatatgaattagaaa

SEQ ID NO: 1054718 - DNA, 15 bp, Homo sapiens
aaatatgaattagaa

SEQ ID NO: 1054719 - DNA, 15 bp, Homo sapiens
aaaatatgaattaga

SEQ ID NO: 1054720 - DNA, 15 bp, Homo sapiens
gaaaatatgaattag

SEQ ID NO: 1054721 - DNA, 15 bp, Homo sapiens
tgaaaatatgaatta

SEQ ID NO: 1054722 - DNA, 15 bp, Homo sapiens
ctgaaaatatgaatt

SEQ ID NO: 1054723 - DNA, 15 bp, Homo sapiens
gctgaaaatatgaat

SEQ ID NO: 1054724 - DNA, 15 bp, Homo sapiens
taaaagctgaaaata

SEQ ID NO: 1054725 - DNA, 15 bp, Homo sapiens
ttaaaagctgaaaat

SEQ ID NO: 1054726 - DNA, 15 bp, Homo sapiens
gttaaaagctgaaaa

SEQ ID NO: 1054727 - DNA, 15 bp, Homo sapiens
agttaaaagctgaaa

SEQ ID NO: 1054728 - DNA, 15 bp, Homo sapiens
cagttaaaagctgaa

SEQ ID NO: 1054729 - DNA, 15 bp, Homo sapiens
acagttaaaagctga

SEQ ID NO: 1054730 - DNA, 15 bp, Homo sapiens
aacagttaaaagctg

SEQ ID NO: 1054731 - DNA, 15 bp, Homo sapiens
aaacagttaaaagct

SEQ ID NO: 1054732 - DNA, 15 bp, Homo sapiens
caaacagttaaaagc

SEQ ID NO: 1054733 - DNA, 15 bp, Homo sapiens
acaaacagttaaaag

SEQ ID NO: 1054734 - DNA, 15 bp, Homo sapiens
cacaaacagttaaaa

SEQ ID NO: 1054735 - DNA, 15 bp, Homo sapiens
ccacaaacagttaaa

SEQ ID NO: 1054736 - DNA, 15 bp, Homo sapiens
tccacaaacagttaa

SEQ ID NO: 1054737 - DNA, 15 bp, Homo sapiens
ttccacaaacagtta

SEQ ID NO: 1054738 - DNA, 15 bp, Homo sapiens
attccacaaacagtt

SEQ ID NO: 1054739 - DNA, 15 bp, Homo sapiens
aattccacaaacagt

SEQ ID NO: 1054740 - DNA, 15 bp, Homo sapiens
aaattccacaaacag

SEQ ID NO: 1054741 - DNA, 15 bp, Homo sapiens
aaaattccacaaaca

SEQ ID NO: 1054742 - DNA, 15 bp, Homo sapiens
taaaattccacaaac

SEQ ID NO: 1054743 - DNA, 15 bp, Homo sapiens
ttaaaattccacaaa

SEQ ID NO: 1054744 - DNA, 15 bp, Homo sapiens
tttaaaattccacaa

SEQ ID NO: 1054745 - DNA, 15 bp, Homo sapiens
ttttaaaattccaca

SEQ ID NO: 1054746 - DNA, 15 bp, Homo sapiens
tttttaaaattccac

SEQ ID NO: 1054747 - DNA, 15 bp, Homo sapiens
ttttttaaaattcca

SEQ ID NO: 1054748 - DNA, 15 bp, Homo sapiens
attttttaaaattcc

SEQ ID NO: 1054749 - DNA, 15 bp, Homo sapiens
tattttttaaaattc

SEQ ID NO: 1054750 - DNA, 15 bp, Homo sapiens
ttattttttaaaatt

SEQ ID NO: 1054751 - DNA, 15 bp, Homo sapiens
cttattttttaaaat

SEQ ID NO: 1054752 - DNA, 15 bp, Homo sapiens
ccttattttttaaaa

SEQ ID NO: 1054753 - DNA, 15 bp, Homo sapiens
tccttattttttaaa

SEQ ID NO: 1054754 - DNA, 15 bp, Homo sapiens
atccttattttttaa

SEQ ID NO: 1054755 - DNA, 15 bp, Homo sapiens
gatccttatttttta

SEQ ID NO: 1054756 - DNA, 15 bp, Homo sapiens
agatccttatttttt

SEQ ID NO: 1054757 - DNA, 15 bp, Homo sapiens
aagatccttattttt

SEQ ID NO: 1054758 - DNA, 15 bp, Homo sapiens
aaagatccttatttt

SEQ ID NO: 1054759 - DNA, 15 bp, Homo sapiens
caaagatccttattt

SEQ ID NO: 1054760 - DNA, 15 bp, Homo sapiens
tcaaagatccttatt

SEQ ID NO: 1054761 - DNA, 15 bp, Homo sapiens
ttcaaagatccttat

SEQ ID NO: 1054762 - DNA, 15 bp, Homo sapiens
gttcaaagatcctta

SEQ ID NO: 1054763 - DNA, 15 bp, Homo sapiens
tgttcaaagatcctt

SEQ ID NO: 1054764 - DNA, 15 bp, Homo sapiens
ctgttcaaagatcct

SEQ ID NO: 1054765 - DNA, 15 bp, Homo sapiens
tctgttcaaagatcc

SEQ ID NO: 1054766 - DNA, 15 bp, Homo sapiens
ctctgttcaaagatc

SEQ ID NO: 1054767 - DNA, 15 bp, Homo sapiens
actctgttcaaagat

SEQ ID NO: 1054768 - DNA, 15 bp, Homo sapiens
gactctgttcaaaga

SEQ ID NO: 1054769 - DNA, 15 bp, Homo sapiens
ggactctgttcaaag

SEQ ID NO: 1054770 - DNA, 15 bp, Homo sapiens
aggactctgttcaaa

SEQ ID NO: 1054771 - DNA, 15 bp, Homo sapiens
caggactctgttcaa

SEQ ID NO: 1054772 - DNA, 15 bp, Homo sapiens
gcaggactctgttca

SEQ ID NO: 1054773 - DNA, 15 bp, Homo sapiens
tgcaggactctgttc

SEQ ID NO: 1054774 - DNA, 15 bp, Homo sapiens
ctgcaggactctgtt

SEQ ID NO: 1054775 - DNA, 15 bp, Homo sapiens
actgcaggactctgt

SEQ ID NO: 1054776 - DNA, 15 bp, Homo sapiens
cactgcaggactctg

SEQ ID NO: 1054777 - DNA, 15 bp, Homo sapiens
tcactgcaggactct

SEQ ID NO: 1054778 - DNA, 15 bp, Homo sapiens
atcactgcaggactc

SEQ ID NO: 1054779 - DNA, 15 bp, Homo sapiens
gatcactgcaggact

SEQ ID NO: 1054780 - DNA, 15 bp, Homo sapiens
agatcactgcaggac

SEQ ID NO: 1054781 - DNA, 15 bp, Homo sapiens
tagatcactgcagga

SEQ ID NO: 1054782 - DNA, 15 bp, Homo sapiens
ctagatcactgcagg

SEQ ID NO: 1054783 - DNA, 15 bp, Homo sapiens
cctagatcactgcag

SEQ ID NO: 1054784 - DNA, 15 bp, Homo sapiens
gcctagatcactgca

SEQ ID NO: 1054785 - DNA, 15 bp, Homo sapiens
tgcctagatcactgc

SEQ ID NO: 1054786 - DNA, 15 bp, Homo sapiens
ctgcctagatcactg

SEQ ID NO: 1054787 - DNA, 15 bp, Homo sapiens
cctgcctagatcact

SEQ ID NO: 1054788 - DNA, 15 bp, Homo sapiens
gcctgcctagatcac

SEQ ID NO: 1054789 - DNA, 15 bp, Homo sapiens
ggcctgcctagatca

SEQ ID NO: 1054790 - DNA, 15 bp, Homo sapiens
tggcctgcctagatc

SEQ ID NO: 1054791 - DNA, 15 bp, Homo sapiens
ctggcctgcctagat

SEQ ID NO: 1054792 - DNA, 15 bp, Homo sapiens
cctggcctgcctaga

SEQ ID NO: 1054793 - DNA, 15 bp, Homo sapiens
ccctggcctgcctag

SEQ ID NO: 1054794 - DNA, 15 bp, Homo sapiens
accctggcctgccta

SEQ ID NO: 1054795 - DNA, 15 bp, Homo sapiens
caccctggcctgcct

SEQ ID NO: 1054796 - DNA, 15 bp, Homo sapiens
ccaccctggcctgcc

SEQ ID NO: 1054797 - DNA, 15 bp, Homo sapiens
cccaccctggcctgc

SEQ ID NO: 1054798 - DNA, 15 bp, Homo sapiens
acccaccctggcctg

SEQ ID NO: 1054799 - DNA, 15 bp, Homo sapiens
cacccaccctggcct

SEQ ID NO: 1054800 - DNA, 15 bp, Homo sapiens
acacacccaccctgg

SEQ ID NO: 1054801 - DNA, 15 bp, Homo sapiens
cacacacccaccctg

SEQ ID NO: 1054802 - DNA, 15 bp, Homo sapiens
ccacacacccaccct

SEQ ID NO: 1054803 - DNA, 15 bp, Homo sapiens
tccacacacccaccc

SEQ ID NO: 1054804 - DNA, 15 bp, Homo sapiens
ctccacacacccacc

SEQ ID NO: 1054805 - DNA, 15 bp, Homo sapiens
cctccacacacccac

SEQ ID NO: 1054806 - DNA, 15 bp, Homo sapiens
acctccacacaccca

SEQ ID NO: 1054807 - DNA, 15 bp, Homo sapiens
aacctccacacaccc

SEQ ID NO: 1054808 - DNA, 15 bp, Homo sapiens
taacctccacacacc

SEQ ID NO: 1054809 - DNA, 15 bp, Homo sapiens
ctaacctccacacac

SEQ ID NO: 1054810 - DNA, 15 bp, Homo sapiens
gctaacctccacaca

SEQ ID NO: 1054811 - DNA, 15 bp, Homo sapiens
tgctaacctccacac

SEQ ID NO: 1054812 - DNA, 15 bp, Homo sapiens
atgctaacctccaca

SEQ ID NO: 1054813 - DNA, 15 bp, Homo sapiens
catgctaacctccac

SEQ ID NO: 1054814 - DNA, 15 bp, Homo sapiens
tcatgctaacctcca

SEQ ID NO: 1054815 - DNA, 15 bp, Homo sapiens
ctcatgctaacctcc

SEQ ID NO: 1054816 - DNA, 15 bp, Homo sapiens
tctcatgctaacctc

SEQ ID NO: 1054817 - DNA, 15 bp, Homo sapiens
ttctcatgctaacct

SEQ ID NO: 1054818 - DNA, 15 bp, Homo sapiens
cttctcatgctaacc

SEQ ID NO: 1054819 - DNA, 15 bp, Homo sapiens
ccttctcatgctaac

SEQ ID NO: 1054820 - DNA, 15 bp, Homo sapiens
tccttctcatgctaa

SEQ ID NO: 1054821 - DNA, 15 bp, Homo sapiens
ctccttctcatgcta

SEQ ID NO: 1054822 - DNA, 15 bp, Homo sapiens
tctccttctcatgct

SEQ ID NO: 1054823 - DNA, 15 bp, Homo sapiens
ctctccttctcatgc

SEQ ID NO: 1054824 - DNA, 15 bp, Homo sapiens
tctctccttctcatg

SEQ ID NO: 1054825 - DNA, 15 bp, Homo sapiens
gtctctccttctcat

SEQ ID NO: 1054826 - DNA, 15 bp, Homo sapiens
ggtctctccttctca

SEQ ID NO: 1054827 - DNA, 15 bp, Homo sapiens
tggtctctccttctc

SEQ ID NO: 1054828 - DNA, 15 bp, Homo sapiens
ctggtctctccttct

SEQ ID NO: 1054829 - DNA, 15 bp, Homo sapiens
gctggtctctccttc

SEQ ID NO: 1054830 - DNA, 15 bp, Homo sapiens
tgctggtctctcctt

SEQ ID NO: 1054831 - DNA, 15 bp, Homo sapiens
ttgctggtctctcct

SEQ ID NO: 1054832 - DNA, 15 bp, Homo sapiens
tttgctggtctctcc

SEQ ID NO: 1054833 - DNA, 15 bp, Homo sapiens
ctttgctggtctctc

SEQ ID NO: 1054834 - DNA, 15 bp, Homo sapiens
gctttgctggtctct

SEQ ID NO: 1054835 - DNA, 15 bp, Homo sapiens
tgctttgctggtctc

SEQ ID NO: 1054836 - DNA, 15 bp, Homo sapiens
ttgctttgctggtct

SEQ ID NO: 1054837 - DNA, 15 bp, Homo sapiens
gttgctttgctggtc

SEQ ID NO: 1054838 - DNA, 15 bp, Homo sapiens
ggttgctttgctggt

SEQ ID NO: 1054839 - DNA, 15 bp, Homo sapiens
aggttgctttgctgg

SEQ ID NO: 1054840 - DNA, 15 bp, Homo sapiens
caggttgctttgctg

SEQ ID NO: 1054841 - DNA, 15 bp, Homo sapiens
tcaggttgctttgct

SEQ ID NO: 1054842 - DNA, 15 bp, Homo sapiens
atcaggttgctttgc

SEQ ID NO: 1054843 - DNA, 15 bp, Homo sapiens
aatcaggttgctttg

SEQ ID NO: 1054844 - DNA, 15 bp, Homo sapiens
gaatcaggttgcttt

SEQ ID NO: 1054845 - DNA, 15 bp, Homo sapiens
ggaatcaggttgctt

SEQ ID NO: 1054846 - DNA, 15 bp, Homo sapiens
tggaatcaggttgct

SEQ ID NO: 1054847 - DNA, 15 bp, Homo sapiens
ctggaatcaggttgc

SEQ ID NO: 1054848 - DNA, 15 bp, Homo sapiens
gctggaatcaggttg

SEQ ID NO: 1054849 - DNA, 15 bp, Homo sapiens
tgctggaatcaggtt

SEQ ID NO: 1054850 - DNA, 15 bp, Homo sapiens
ctgctggaatcaggt

SEQ ID NO: 1054851 - DNA, 15 bp, Homo sapiens
cctgctggaatcagg

SEQ ID NO: 1054852 - DNA, 15 bp, Homo sapiens
tcctgctggaatcag

SEQ ID NO: 1054853 - DNA, 15 bp, Homo sapiens
ctcctgctggaatca

SEQ ID NO: 1054854 - DNA, 15 bp, Homo sapiens
actcctgctggaatc

SEQ ID NO: 1054855 - DNA, 15 bp, Homo sapiens
aactcctgctggaat

SEQ ID NO: 1054856 - DNA, 15 bp, Homo sapiens
aaactcctgctggaa

SEQ ID NO: 1054857 - DNA, 15 bp, Homo sapiens
caaactcctgctgga

SEQ ID NO: 1054858 - DNA, 15 bp, Homo sapiens
gcaaactcctgctgg

SEQ ID NO: 1054859 - DNA, 15 bp, Homo sapiens
tgcaaactcctgctg

SEQ ID NO: 1054860 - DNA, 15 bp, Homo sapiens
ctgcaaactcctgct

SEQ ID NO: 1054861 - DNA, 15 bp, Homo sapiens
cctgcaaactcctgc

SEQ ID NO: 1054862 - DNA, 15 bp, Homo sapiens
tcctgcaaactcctg

SEQ ID NO: 1054863 - DNA, 15 bp, Homo sapiens
ttcctgcaaactcct

SEQ ID NO: 1054864 - DNA, 15 bp, Homo sapiens
gttcctgcaaactcc

SEQ ID NO: 1054865 - DNA, 15 bp, Homo sapiens
ggttcctgcaaactc

SEQ ID NO: 1054866 - DNA, 15 bp, Homo sapiens
gggttcctgcaaact

SEQ ID NO: 1054867 - DNA, 15 bp, Homo sapiens
agggttcctgcaaac

SEQ ID NO: 1054868 - DNA, 15 bp, Homo sapiens
tagggttcctgcaaa

SEQ ID NO: 1054869 - DNA, 15 bp, Homo sapiens
ttagggttcctgcaa

SEQ ID NO: 1054870 - DNA, 15 bp, Homo sapiens
cttagggttcctgca

SEQ ID NO: 1054871 - DNA, 15 bp, Homo sapiens
gcttagggttcctgc

SEQ ID NO: 1054872 - DNA, 15 bp, Homo sapiens
ggcttagggttcctg

SEQ ID NO: 1054873 - DNA, 15 bp, Homo sapiens
gggcttagggttcct

SEQ ID NO: 1054874 - DNA, 15 bp, Homo sapiens
agggcttagggttcc

SEQ ID NO: 1054875 - DNA, 15 bp, Homo sapiens
aagggcttagggttc

SEQ ID NO: 1054876 - DNA, 15 bp, Homo sapiens
aaagggcttagggtt

SEQ ID NO: 1054877 - DNA, 15 bp, Homo sapiens
gaaagggcttagggt

SEQ ID NO: 1054878 - DNA, 15 bp, Homo sapiens
ggaaagggcttaggg

SEQ ID NO: 1054879 - DNA, 15 bp, Homo sapiens
aggaaagggcttagg

SEQ ID NO: 1054880 - DNA, 15 bp, Homo sapiens
aaggaaagggcttag

SEQ ID NO: 1054881 - DNA, 15 bp, Homo sapiens
gaaggaaagggctta

SEQ ID NO: 1054882 - DNA, 15 bp, Homo sapiens
tgaaggaaagggctt

SEQ ID NO: 1054883 - DNA, 15 bp, Homo sapiens
atgaaggaaagggct

SEQ ID NO: 1054884 - DNA, 15 bp, Homo sapiens
aatgaaggaaagggc

SEQ ID NO: 1054885 - DNA, 15 bp, Homo sapiens
aaatgaaggaaaggg

SEQ ID NO: 1054886 - DNA, 15 bp, Homo sapiens
caaatgaaggaaagg

SEQ ID NO: 1054887 - DNA, 15 bp, Homo sapiens
gcaaatgaaggaaag

SEQ ID NO: 1054888 - DNA, 15 bp, Homo sapiens
ggcaaatgaaggaaa

SEQ ID NO: 1054889 - DNA, 15 bp, Homo sapiens
tggcaaatgaaggaa

SEQ ID NO: 1054890 - DNA, 15 bp, Homo sapiens
ctggcaaatgaagga

SEQ ID NO: 1054891 - DNA, 15 bp, Homo sapiens
cctggcaaatgaagg

SEQ ID NO: 1054892 - DNA, 15 bp, Homo sapiens
tcctggcaaatgaag

SEQ ID NO: 1054893 - DNA, 15 bp, Homo sapiens
ctcctggcaaatgaa

SEQ ID NO: 1054894 - DNA, 15 bp, Homo sapiens
actcctggcaaatga

SEQ ID NO: 1054895 - DNA, 15 bp, Homo sapiens
tactcctggcaaatg

SEQ ID NO: 1054896 - DNA, 15 bp, Homo sapiens
ctactcctggcaaat

SEQ ID NO: 1054897 - DNA, 15 bp, Homo sapiens
tctactcctggcaaa

SEQ ID NO: 1054898 - DNA, 15 bp, Homo sapiens
ctctactcctggcaa

SEQ ID NO: 1054899 - DNA, 15 bp, Homo sapiens
tctctactcctggca

SEQ ID NO: 1054900 - DNA, 15 bp, Homo sapiens
ctctctactcctggc

SEQ ID NO: 1054901 - DNA, 15 bp, Homo sapiens
cctctctactcctgg

SEQ ID NO: 1054902 - DNA, 15 bp, Homo sapiens
tcctctctactcctg

SEQ ID NO: 1054903 - DNA, 15 bp, Homo sapiens
gtcctctctactcct

SEQ ID NO: 1054904 - DNA, 15 bp, Homo sapiens
tgtcctctctactcc

SEQ ID NO: 1054905 - DNA, 15 bp, Homo sapiens
ttgtcctctctactc

SEQ ID NO: 1054906 - DNA, 15 bp, Homo sapiens
gttgtcctctctact

SEQ ID NO: 1054907 - DNA, 15 bp, Homo sapiens
tgttgtcctctctac

SEQ ID NO: 1054908 - DNA, 15 bp, Homo sapiens
ctgttgtcctctcta

SEQ ID NO: 1054909 - DNA, 15 bp, Homo sapiens
actgttgtcctctct

SEQ ID NO: 1054910 - DNA, 15 bp, Homo sapiens
tactgttgtcctctc

SEQ ID NO: 1054911 - DNA, 15 bp, Homo sapiens
ctactgttgtcctct

SEQ ID NO: 1054912 - DNA, 15 bp, Homo sapiens
gctactgttgtcctc

SEQ ID NO: 1054913 - DNA, 15 bp, Homo sapiens
tgctactgttgtcct

SEQ ID NO: 1054914 - DNA, 15 bp, Homo sapiens
atgctactgttgtcc

SEQ ID NO: 1054915 - DNA, 15 bp, Homo sapiens
tatgctactgttgtc

SEQ ID NO: 1054916 - DNA, 15 bp, Homo sapiens
ctatgctactgttgt

SEQ ID NO: 1054917 - DNA, 15 bp, Homo sapiens
tctatgctactgttg

SEQ ID NO: 1054918 - DNA, 15 bp, Homo sapiens
gtctatgctactgtt

SEQ ID NO: 1054919 - DNA, 15 bp, Homo sapiens
tgtctatgctactgt

SEQ ID NO: 1054920 - DNA, 15 bp, Homo sapiens
ctgtctatgctactg

SEQ ID NO: 1054921 - DNA, 15 bp, Homo sapiens
gctgtctatgctact

SEQ ID NO: 1054922 - DNA, 15 bp, Homo sapiens
tgctgtctatgctac

SEQ ID NO: 1054923 - DNA, 15 bp, Homo sapiens
atgctgtctatgcta

SEQ ID NO: 1054924 - DNA, 15 bp, Homo sapiens
catgctgtctatgct

SEQ ID NO: 1054925 - DNA, 15 bp, Homo sapiens
gcatgctgtctatgc

SEQ ID NO: 1054926 - DNA, 15 bp, Homo sapiens
agcatgctgtctatg

SEQ ID NO: 1054927 - DNA, 15 bp, Homo sapiens
gagcatgctgtctat

SEQ ID NO: 1054928 - DNA, 15 bp, Homo sapiens
agagcatgctgtcta

SEQ ID NO: 1054929 - DNA, 15 bp, Homo sapiens
cagagcatgctgtct

SEQ ID NO: 1054930 - DNA, 15 bp, Homo sapiens
tcagagcatgctgtc

SEQ ID NO: 1054931 - DNA, 15 bp, Homo sapiens
ttcagagcatgctgt

SEQ ID NO: 1054932 - DNA, 15 bp, Homo sapiens
gttcagagcatgctg

SEQ ID NO: 1054933 - DNA, 15 bp, Homo sapiens
agttcagagcatgct

SEQ ID NO: 1054934 - DNA, 15 bp, Homo sapiens
cagttcagagcatgc

SEQ ID NO: 1054935 - DNA, 15 bp, Homo sapiens
acagttcagagcatg

SEQ ID NO: 1054936 - DNA, 15 bp, Homo sapiens
aacagttcagagcat

SEQ ID NO: 1054937 - DNA, 15 bp, Homo sapiens
taacagttcagagca

SEQ ID NO: 1054938 - DNA, 15 bp, Homo sapiens
ctaacagttcagagc

SEQ ID NO: 1054939 - DNA, 15 bp, Homo sapiens
actaacagttcagag

SEQ ID NO: 1054940 - DNA, 15 bp, Homo sapiens
aactaacagttcaga

SEQ ID NO: 1054941 - DNA, 15 bp, Homo sapiens
taactaacagttcag

SEQ ID NO: 1054942 - DNA, 15 bp, Homo sapiens
ttaactaacagttca

SEQ ID NO: 1054943 - DNA, 15 bp, Homo sapiens
tttaactaacagttc

SEQ ID NO: 1054944 - DNA, 15 bp, Homo sapiens
ctttaactaacagtt

SEQ ID NO: 1054945 - DNA, 15 bp, Homo sapiens
cctttaactaacagt

SEQ ID NO: 1054946 - DNA, 15 bp, Homo sapiens
ccctttaactaacag

SEQ ID NO: 1054947 - DNA, 15 bp, Homo sapiens
gccctttaactaaca

SEQ ID NO: 1054948 - DNA, 15 bp, Homo sapiens
ggccctttaactaac

SEQ ID NO: 1054949 - DNA, 15 bp, Homo sapiens
gggccctttaactaa

SEQ ID NO: 1054950 - DNA, 15 bp, Homo sapiens
tgggccctttaacta

SEQ ID NO: 1054951 - DNA, 15 bp, Homo sapiens
ctgggccctttaact

SEQ ID NO: 1054952 - DNA, 15 bp, Homo sapiens
actgggccctttaac

SEQ ID NO: 1054953 - DNA, 15 bp, Homo sapiens
cactgggccctttaa

SEQ ID NO: 1054954 - DNA, 15 bp, Homo sapiens
gcactgggcccttta

SEQ ID NO: 1054955 - DNA, 15 bp, Homo sapiens
agcactgggcccttt

SEQ ID NO: 1054956 - DNA, 15 bp, Homo sapiens
aagcactgggccctt

SEQ ID NO: 1054957 - DNA, 15 bp, Homo sapiens
gaagcactgggccct

SEQ ID NO: 1054958 - DNA, 15 bp, Homo sapiens
cgaagcactgggccc

SEQ ID NO: 1054959 - DNA, 15 bp, Homo sapiens
tcgaagcactgggcc

SEQ ID NO: 1054960 - DNA, 15 bp, Homo sapiens
ctcgaagcactgggc

SEQ ID NO: 1054961 - DNA, 15 bp, Homo sapiens
tctcgaagcactggg

SEQ ID NO: 1054962 - DNA, 15 bp, Homo sapiens
gtctcgaagcactgg

SEQ ID NO: 1054963 - DNA, 15 bp, Homo sapiens
agtctcgaagcactg

SEQ ID NO: 1054964 - DNA, 15 bp, Homo sapiens
gagtctcgaagcact

SEQ ID NO: 1054965 - DNA, 15 bp, Homo sapiens
agagtctcgaagcac

SEQ ID NO: 1054966 - DNA, 15 bp, Homo sapiens
aagagtctcgaagca

SEQ ID NO: 1054967 - DNA, 15 bp, Homo sapiens
gaagagtctcgaagc

SEQ ID NO: 1054968 - DNA, 15 bp, Homo sapiens
cgaagagtctcgaag

SEQ ID NO: 1054969 - DNA, 15 bp, Homo sapiens
ccgaagagtctcgaa

SEQ ID NO: 1054970 - DNA, 15 bp, Homo sapiens
gccgaagagtctcga

SEQ ID NO: 1054971 - DNA, 15 bp, Homo sapiens
cgccgaagagtctcg

SEQ ID NO: 1054972 - DNA, 15 bp, Homo sapiens
ccgccgaagagtctc

SEQ ID NO: 1054973 - DNA, 15 bp, Homo sapiens
tccgccgaagagtct

SEQ ID NO: 1054974 - DNA, 15 bp, Homo sapiens
atccgccgaagagtc

SEQ ID NO: 1054975 - DNA, 15 bp, Homo sapiens
catccgccgaagagt

SEQ ID NO: 1054976 - DNA, 15 bp, Homo sapiens
gcatccgccgaagag

SEQ ID NO: 1054977 - DNA, 15 bp, Homo sapiens
ggcatccgccgaaga

SEQ ID NO: 1054978 - DNA, 15 bp, Homo sapiens
gggcatccgccgaag

SEQ ID NO: 1054979 - DNA, 15 bp, Homo sapiens
agggcatccgccgaa

SEQ ID NO: 1054980 - DNA, 15 bp, Homo sapiens
aagggcatccgccga

SEQ ID NO: 1054981 - DNA, 15 bp, Homo sapiens
caagggcatccgccg

SEQ ID NO: 1054982 - DNA, 15 bp, Homo sapiens
acaagggcatccgcc

SEQ ID NO: 1054983 - DNA, 15 bp, Homo sapiens
aacaagggcatccgc

SEQ ID NO: 1054984 - DNA, 15 bp, Homo sapiens
caacaagggcatccg

SEQ ID NO: 1054985 - DNA, 15 bp, Homo sapiens
ccaacaagggcatcc

SEQ ID NO: 1054986 - DNA, 15 bp, Homo sapiens
cccaacaagggcatc

SEQ ID NO: 1054987 - DNA, 15 bp, Homo sapiens
tcccaacaagggcat

SEQ ID NO: 1054988 - DNA, 15 bp, Homo sapiens
ctcccaacaagggca

SEQ ID NO: 1054989 - DNA, 15 bp, Homo sapiens
tctcccaacaagggc

SEQ ID NO: 1054990 - DNA, 15 bp, Homo sapiens
ttctcccaacaaggg

SEQ ID NO: 1054991 - DNA, 15 bp, Homo sapiens
attctcccaacaagg

SEQ ID NO: 1054992 - DNA, 15 bp, Homo sapiens
cattctcccaacaag

SEQ ID NO: 1054993 - DNA, 15 bp, Homo sapiens
acattctcccaacaa

SEQ ID NO: 1054994 - DNA, 15 bp, Homo sapiens
aacattctcccaaca

SEQ ID NO: 1054995 - DNA, 15 bp, Homo sapiens
gaacattctcccaac

SEQ ID NO: 1054996 - DNA, 15 bp, Homo sapiens
tgaacattctcccaa

SEQ ID NO: 1054997 - DNA, 15 bp, Homo sapiens
ttgaacattctccca

SEQ ID NO: 1054998 - DNA, 15 bp, Homo sapiens
cttgaacattctccc

SEQ ID NO: 1054999 - DNA, 15 bp, Homo sapiens
ccttgaacattctcc

SEQ ID NO: 1055000 - DNA, 15 bp, Homo sapiens
gccttgaacattctc

SEQ ID NO: 1055001 - DNA, 15 bp, Homo sapiens
tgccttgaacattct

SEQ ID NO: 1055002 - DNA, 15 bp, Homo sapiens
atgccttgaacattc

SEQ ID NO: 1055003 - DNA, 15 bp, Homo sapiens
aatgccttgaacatt

SEQ ID NO: 1055004 - DNA, 15 bp, Homo sapiens
gaatgccttgaacat

SEQ ID NO: 1055005 - DNA, 15 bp, Homo sapiens
agaatgccttgaaca

SEQ ID NO: 1055006 - DNA, 15 bp, Homo sapiens
gagaatgccttgaac

SEQ ID NO: 1055007 - DNA, 15 bp, Homo sapiens
agagaatgccttgaa

SEQ ID NO: 1055008 - DNA, 15 bp, Homo sapiens
gagagaatgccttga

SEQ ID NO: 1055009 - DNA, 15 bp, Homo sapiens
ggagagaatgccttg

SEQ ID NO: 1055010 - DNA, 15 bp, Homo sapiens
tggagagaatgcctt

SEQ ID NO: 1055011 - DNA, 15 bp, Homo sapiens
atggagagaatgcct

SEQ ID NO: 1055012 - DNA, 15 bp, Homo sapiens
catggagagaatgcc

SEQ ID NO: 1055013 - DNA, 15 bp, Homo sapiens
acatggagagaatgc

SEQ ID NO: 1055014 - DNA, 15 bp, Homo sapiens
cacatggagagaatg

SEQ ID NO: 1055015 - DNA, 15 bp, Homo sapiens
ccacatggagagaat

SEQ ID NO: 1055016 - DNA, 15 bp, Homo sapiens
cccacatggagagaa

SEQ ID NO: 1055017 - DNA, 15 bp, Homo sapiens
ccccacatggagaga

SEQ ID NO: 1055018 - DNA, 15 bp, Homo sapiens
tccccacatggagag

SEQ ID NO: 1055019 - DNA, 15 bp, Homo sapiens
ttccccacatggaga

SEQ ID NO: 1055020 - DNA, 15 bp, Homo sapiens
tttccccacatggag

SEQ ID NO: 1055021 - DNA, 15 bp, Homo sapiens
ctttccccacatgga

SEQ ID NO: 1055022 - DNA, 15 bp, Homo sapiens
gctttccccacatgg

SEQ ID NO: 1055023 - DNA, 15 bp, Homo sapiens
ggctttccccacatg

SEQ ID NO: 1055024 - DNA, 15 bp, Homo sapiens
gggctttccccacat

SEQ ID NO: 1055025 - DNA, 15 bp, Homo sapiens
tgggctttccccaca

SEQ ID NO: 1055026 - DNA, 15 bp, Homo sapiens
atgggctttccccac

SEQ ID NO: 1055027 - DNA, 15 bp, Homo sapiens
aatgggctttcccca

SEQ ID NO: 1055028 - DNA, 15 bp, Homo sapiens
gaatgggctttcccc

SEQ ID NO: 1055029 - DNA, 15 bp, Homo sapiens
tgaatgggctttccc

SEQ ID NO: 1055030 - DNA, 15 bp, Homo sapiens
atgaatgggctttcc

SEQ ID NO: 1055031 - DNA, 15 bp, Homo sapiens
catgaatgggctttc

SEQ ID NO: 1055032 - DNA, 15 bp, Homo sapiens
gcatgaatgggcttt

SEQ ID NO: 1055033 - DNA, 15 bp, Homo sapiens
ggcatgaatgggctt

SEQ ID NO: 1055034 - DNA, 15 bp, Homo sapiens
tggcatgaatgggct

SEQ ID NO: 1055035 - DNA, 15 bp, Homo sapiens
atggcatgaatgggc

SEQ ID NO: 1055036 - DNA, 15 bp, Homo sapiens
tatggcatgaatggg

SEQ ID NO: 1055037 - DNA, 15 bp, Homo sapiens
atatggcatgaatgg

SEQ ID NO: 1055038 - DNA, 15 bp, Homo sapiens
catatggcatgaatg

SEQ ID NO: 1055039 - DNA, 15 bp, Homo sapiens
tcatatggcatgaat

SEQ ID NO: 1055040 - DNA, 15 bp, Homo sapiens
gtcatatggcatgaa

SEQ ID NO: 1055041 - DNA, 15 bp, Homo sapiens
ggtcatatggcatga

SEQ ID NO: 1055042 - DNA, 15 bp, Homo sapiens
gggtcatatggcatg

SEQ ID NO: 1055043 - DNA, 15 bp, Homo sapiens
ggggtcatatggcat

SEQ ID NO: 1055044 - DNA, 15 bp, Homo sapiens
cggggtcatatggca

SEQ ID NO: 1055045 - DNA, 15 bp, Homo sapiens
ccggggtcatatggc

SEQ ID NO: 1055046 - DNA, 15 bp, Homo sapiens
cccggggtcatatgg

SEQ ID NO: 1055047 - DNA, 15 bp, Homo sapiens
ccccggggtcatatg

SEQ ID NO: 1055048 - DNA, 15 bp, Homo sapiens
gccccggggtcatat

SEQ ID NO: 1055049 - DNA, 15 bp, Homo sapiens
ggccccggggtcata

SEQ ID NO: 1055050 - DNA, 15 bp, Homo sapiens
gggccccggggtcat

SEQ ID NO: 1055051 - DNA, 15 bp, Homo sapiens
agggccccggggtca

SEQ ID NO: 1055052 - DNA, 15 bp, Homo sapiens
tagggccccggggtc

SEQ ID NO: 1055053 - DNA, 15 bp, Homo sapiens
ttagggccccggggt

SEQ ID NO: 1055054 - DNA, 15 bp, Homo sapiens
gttagggccccgggg

SEQ ID NO: 1055055 - DNA, 15 bp, Homo sapiens
ggttagggccccggg

SEQ ID NO: 1055056 - DNA, 15 bp, Homo sapiens
tggttagggccccgg

SEQ ID NO: 1055057 - DNA, 15 bp, Homo sapiens
ctggttagggccccg

SEQ ID NO: 1055058 - DNA, 15 bp, Homo sapiens
actggttagggcccc

SEQ ID NO: 1055059 - DNA, 15 bp, Homo sapiens
gactggttagggccc

SEQ ID NO: 1055060 - DNA, 15 bp, Homo sapiens
ggactggttagggcc

SEQ ID NO: 1055061 - DNA, 15 bp, Homo sapiens
tggactggttagggc

SEQ ID NO: 1055062 - DNA, 15 bp, Homo sapiens
atggactggttaggg

SEQ ID NO: 1055063 - DNA, 15 bp, Homo sapiens
tatggactggttagg

SEQ ID NO: 1055064 - DNA, 15 bp, Homo sapiens
ttatggactggttag

SEQ ID NO: 1055065 - DNA, 15 bp, Homo sapiens
tttatggactggtta

SEQ ID NO: 1055066 - DNA, 15 bp, Homo sapiens
gtttatggactggtt

SEQ ID NO: 1055067 - DNA, 15 bp, Homo sapiens
tgtttatggactggt

SEQ ID NO: 1055068 - DNA, 15 bp, Homo sapiens
ctgtttatggactgg

SEQ ID NO: 1055069 - DNA, 15 bp, Homo sapiens
gctgtttatggactg

SEQ ID NO: 1055070 - DNA, 15 bp, Homo sapiens
ggctgtttatggact

SEQ ID NO: 1055071 - DNA, 15 bp, Homo sapiens
gggctgtttatggac

SEQ ID NO: 1055072 - DNA, 15 bp, Homo sapiens
tgggctgtttatgga

SEQ ID NO: 1055073 - DNA, 15 bp, Homo sapiens
ttgggctgtttatgg

SEQ ID NO: 1055074 - DNA, 15 bp, Homo sapiens
cttgggctgtttatg

SEQ ID NO: 1055075 - DNA, 15 bp, Homo sapiens
ccttgggctgtttat

SEQ ID NO: 1055076 - DNA, 15 bp, Homo sapiens
accttgggctgttta

SEQ ID NO: 1055077 - DNA, 15 bp, Homo sapiens
gaccttgggctgttt

SEQ ID NO: 1055078 - DNA, 15 bp, Homo sapiens
ggaccttgggctgtt

SEQ ID NO: 1055079 - DNA, 15 bp, Homo sapiens
gggaccttgggctgt

SEQ ID NO: 1055080 - DNA, 15 bp, Homo sapiens
ggggaccttgggctg

SEQ ID NO: 1055081 - DNA, 15 bp, Homo sapiens
aggggaccttgggct

SEQ ID NO: 1055082 - DNA, 15 bp, Homo sapiens
taggggaccttgggc

SEQ ID NO: 1055083 - DNA, 15 bp, Homo sapiens
ctaggggaccttggg

SEQ ID NO: 1055084 - DNA, 15 bp, Homo sapiens
actaggggaccttgg

SEQ ID NO: 1055085 - DNA, 15 bp, Homo sapiens
tactaggggaccttg

SEQ ID NO: 1055086 - DNA, 15 bp, Homo sapiens
gtactaggggacctt

SEQ ID NO: 1055087 - DNA, 15 bp, Homo sapiens
agtactaggggacct

SEQ ID NO: 1055088 - DNA, 15 bp, Homo sapiens
aagtactaggggacc

SEQ ID NO: 1055089 - DNA, 15 bp, Homo sapiens
gaagtactaggggac

SEQ ID NO: 1055090 - DNA, 15 bp, Homo sapiens
ggaagtactagggga

SEQ ID NO: 1055091 - DNA, 15 bp, Homo sapiens
aggaagtactagggg

SEQ ID NO: 1055092 - DNA, 15 bp, Homo sapiens
caggaagtactaggg

SEQ ID NO: 1055093 - DNA, 15 bp, Homo sapiens
gcaggaagtactagg

SEQ ID NO: 1055094 - DNA, 15 bp, Homo sapiens
ggcaggaagtactag

SEQ ID NO: 1055095 - DNA, 15 bp, Homo sapiens
tggcaggaagtacta

SEQ ID NO: 1055096 - DNA, 15 bp, Homo sapiens
gtggcaggaagtact

SEQ ID NO: 1055097 - DNA, 15 bp, Homo sapiens
ggtggcaggaagtac

SEQ ID NO: 1055098 - DNA, 15 bp, Homo sapiens
cggtggcaggaagta

SEQ ID NO: 1055099 - DNA, 15 bp, Homo sapiens
tcggtggcaggaagt

SEQ ID NO: 1055100 - DNA, 15 bp, Homo sapiens
ttcggtggcaggaag

SEQ ID NO: 1055101 - DNA, 15 bp, Homo sapiens
gttcggtggcaggaa

SEQ ID NO: 1055102 - DNA, 15 bp, Homo sapiens
tgttcggtggcagga

SEQ ID NO: 1055103 - DNA, 15 bp, Homo sapiens
ttgttcggtggcagg

SEQ ID NO: 1055104 - DNA, 15 bp, Homo sapiens
attgttcggtggcag

SEQ ID NO: 1055105 - DNA, 15 bp, Homo sapiens
cattgttcggtggca

SEQ ID NO: 1055106 - DNA, 15 bp, Homo sapiens
ccattgttcggtggc

SEQ ID NO: 1055107 - DNA, 15 bp, Homo sapiens
cccattgttcggtgg

SEQ ID NO: 1055108 - DNA, 15 bp, Homo sapiens
tcccattgttcggtg

SEQ ID NO: 1055109 - DNA, 15 bp, Homo sapiens
ttcccattgttcggt

SEQ ID NO: 1055110 - DNA, 15 bp, Homo sapiens
gttcccattgttcgg

SEQ ID NO: 1055111 - DNA, 15 bp, Homo sapiens
tgttcccattgttcg

SEQ ID NO: 1055112 - DNA, 15 bp, Homo sapiens
gtgttcccattgttc

SEQ ID NO: 1055113 - DNA, 15 bp, Homo sapiens
ctgtgttcccattgt

SEQ ID NO: 1055114 - DNA, 15 bp, Homo sapiens
tctgtgttcccattg

SEQ ID NO: 1055115 - DNA, 15 bp, Homo sapiens
atctgtgttcccatt

SEQ ID NO: 1055116 - DNA, 15 bp, Homo sapiens
catctgtgttcccat

SEQ ID NO: 1055117 - DNA, 15 bp, Homo sapiens
gcatctgtgttccca

SEQ ID NO: 1055118 - DNA, 15 bp, Homo sapiens
agcatctgtgttccc

SEQ ID NO: 1055119 - DNA, 15 bp, Homo sapiens
cagcatctgtgttcc

SEQ ID NO: 1055120 - DNA, 15 bp, Homo sapiens
tcagcatctgtgttc

SEQ ID NO: 1055121 - DNA, 15 bp, Homo sapiens
ttcagcatctgtgtt

SEQ ID NO: 1055122 - DNA, 15 bp, Homo sapiens
cttcagcatctgtgt

SEQ ID NO: 1055123 - DNA, 15 bp, Homo sapiens
acttcagcatctgtg

SEQ ID NO: 1055124 - DNA, 15 bp, Homo sapiens
cacttcagcatctgt

SEQ ID NO: 1055125 - DNA, 15 bp, Homo sapiens
tcacttcagcatctg

SEQ ID NO: 1055126 - DNA, 15 bp, Homo sapiens
ctcacttcagcatct

SEQ ID NO: 1055127 - DNA, 15 bp, Homo sapiens
tctcacttcagcatc

SEQ ID NO: 1055128 - DNA, 15 bp, Homo sapiens
gtctcacttcagcat

SEQ ID NO: 1055129 - DNA, 15 bp, Homo sapiens
tgtctcacttcagca

SEQ ID NO: 1055130 - DNA, 15 bp, Homo sapiens
ttgtctcacttcagc

SEQ ID NO: 1055131 - DNA, 15 bp, Homo sapiens
tttgtctcacttcag

SEQ ID NO: 1055132 - DNA, 15 bp, Homo sapiens
atttgtctcacttca

SEQ ID NO: 1055133 - DNA, 15 bp, Homo sapiens
catttgtctcacttc

SEQ ID NO: 1055134 - DNA, 15 bp, Homo sapiens
gcatttgtctcactt

SEQ ID NO: 1055135 - DNA, 15 bp, Homo sapiens
ggcatttgtctcact

SEQ ID NO: 1055136 - DNA, 15 bp, Homo sapiens
aggcatttgtctcac

SEQ ID NO: 1055137 - DNA, 15 bp, Homo sapiens
caggcatttgtctca

SEQ ID NO: 1055138 - DNA, 15 bp, Homo sapiens
tcaggcatttgtctc

SEQ ID NO: 1055139 - DNA, 15 bp, Homo sapiens
ctcaggcatttgtct

SEQ ID NO: 1055140 - DNA, 15 bp, Homo sapiens
tctcaggcatttgtc

SEQ ID NO: 1055141 - DNA, 15 bp, Homo sapiens
ttctcaggcatttgt

SEQ ID NO: 1055142 - DNA, 15 bp, Homo sapiens
cttctcaggcatttg

SEQ ID NO: 1055143 - DNA, 15 bp, Homo sapiens
ccttctcaggcattt

SEQ ID NO: 1055144 - DNA, 15 bp, Homo sapiens
accttctcaggcatt

SEQ ID NO: 1055145 - DNA, 15 bp, Homo sapiens
caccttctcaggcat

SEQ ID NO: 1055146 - DNA, 15 bp, Homo sapiens
ccaccttctcaggca

SEQ ID NO: 1055147 - DNA, 15 bp, Homo sapiens
accaccttctcaggc

SEQ ID NO: 1055148 - DNA, 15 bp, Homo sapiens
gaccaccttctcagg

SEQ ID NO: 1055149 - DNA, 15 bp, Homo sapiens
tgaccaccttctcag

SEQ ID NO: 1055150 - DNA, 15 bp, Homo sapiens
gtgaccaccttctca

SEQ ID NO: 1055151 - DNA, 15 bp, Homo sapiens
agtgaccaccttctc

SEQ ID NO: 1055152 - DNA, 15 bp, Homo sapiens
cagtgaccaccttct

SEQ ID NO: 1055153 - DNA, 15 bp, Homo sapiens
ccagtgaccaccttc

SEQ ID NO: 1055154 - DNA, 15 bp, Homo sapiens
accagtgaccacctt

SEQ ID NO: 1055155 - DNA, 15 bp, Homo sapiens
gaccagtgaccacct

SEQ ID NO: 1055156 - DNA, 15 bp, Homo sapiens
cgaccagtgaccacc

SEQ ID NO: 1055157 - DNA, 15 bp, Homo sapiens
gcgaccagtgaccac

SEQ ID NO: 1055158 - DNA, 15 bp, Homo sapiens
ggcgaccagtgacca

SEQ ID NO: 1055159 - DNA, 15 bp, Homo sapiens
tggcgaccagtgacc

SEQ ID NO: 1055160 - DNA, 15 bp, Homo sapiens
ctggcgaccagtgac

SEQ ID NO: 1055161 - DNA, 15 bp, Homo sapiens
actggcgaccagtga

SEQ ID NO: 1055162 - DNA, 15 bp, Homo sapiens
tactggcgaccagtg

SEQ ID NO: 1055163 - DNA, 15 bp, Homo sapiens
ctactggcgaccagt

SEQ ID NO: 1055164 - DNA, 15 bp, Homo sapiens
tctactggcgaccag

SEQ ID NO: 1055165 - DNA, 15 bp, Homo sapiens
ctctactggcgacca

SEQ ID NO: 1055166 - DNA, 15 bp, Homo sapiens
tctctactggcgacc

SEQ ID NO: 1055167 - DNA, 15 bp, Homo sapiens
ctctctactggcgac

SEQ ID NO: 1055168 - DNA, 15 bp, Homo sapiens
tctctctactggcga

SEQ ID NO: 1055169 - DNA, 15 bp, Homo sapiens
gtctctctactggcg

SEQ ID NO: 1055170 - DNA, 15 bp, Homo sapiens
ggtctctctactggc

SEQ ID NO: 1055171 - DNA, 15 bp, Homo sapiens
aggtctctctactgg

SEQ ID NO: 1055172 - DNA, 15 bp, Homo sapiens
aaggtctctctactg

SEQ ID NO: 1055173 - DNA, 15 bp, Homo sapiens
gaaggtctctctact

SEQ ID NO: 1055174 - DNA, 15 bp, Homo sapiens
agaaggtctctctac

SEQ ID NO: 1055175 - DNA, 15 bp, Homo sapiens
tagaaggtctctcta

SEQ ID NO: 1055176 - DNA, 15 bp, Homo sapiens
atagaaggtctctct

SEQ ID NO: 1055177 - DNA, 15 bp, Homo sapiens
aatagaaggtctctc

SEQ ID NO: 1055178 - DNA, 15 bp, Homo sapiens
caatagaaggtctct

SEQ ID NO: 1055179 - DNA, 15 bp, Homo sapiens
ccaatagaaggtctc

SEQ ID NO: 1055180 - DNA, 15 bp, Homo sapiens
tccaatagaaggtct

SEQ ID NO: 1055181 - DNA, 15 bp, Homo sapiens
ctccaatagaaggtc

SEQ ID NO: 1055182 - DNA, 15 bp, Homo sapiens
tctccaatagaaggt

SEQ ID NO: 1055183 - DNA, 15 bp, Homo sapiens
ttctccaatagaagg

SEQ ID NO: 1055184 - DNA, 15 bp, Homo sapiens
cttctccaatagaag

SEQ ID NO: 1055185 - DNA, 15 bp, Homo sapiens
tcttctccaatagaa

SEQ ID NO: 1055186 - DNA, 15 bp, Homo sapiens
ctcttctccaataga

SEQ ID NO: 1055187 - DNA, 15 bp, Homo sapiens
gctcttctccaatag

SEQ ID NO: 1055188 - DNA, 15 bp, Homo sapiens
tgctcttctccaata

SEQ ID NO: 1055189 - DNA, 15 bp, Homo sapiens
ctgctcttctccaat

SEQ ID NO: 1055190 - DNA, 15 bp, Homo sapiens
tctgctcttctccaa

SEQ ID NO: 1055191 - DNA, 15 bp, Homo sapiens
atctgctcttctcca

SEQ ID NO: 1055192 - DNA, 15 bp, Homo sapiens
tatctgctcttctcc

SEQ ID NO: 1055193 - DNA, 15 bp, Homo sapiens
ttatctgctcttctc

SEQ ID NO: 1055194 - DNA, 15 bp, Homo sapiens
gttatctgctcttct

SEQ ID NO: 1055195 - DNA, 15 bp, Homo sapiens
tgttatctgctcttc

SEQ ID NO: 1055196 - DNA, 15 bp, Homo sapiens
ttgttatctgctctt

SEQ ID NO: 1055197 - DNA, 15 bp, Homo sapiens
cttgttatctgctct

SEQ ID NO: 1055198 - DNA, 15 bp, Homo sapiens
ccttgttatctgctc

SEQ ID NO: 1055199 - DNA, 15 bp, Homo sapiens
accttgttatctgct

SEQ ID NO: 1055200 - DNA, 15 bp, Homo sapiens
aaccttgttatctgc

SEQ ID NO: 1055201 - DNA, 15 bp, Homo sapiens
caaccttgttatctg

SEQ ID NO: 1055202 - DNA, 15 bp, Homo sapiens
tcaaccttgttatct

SEQ ID NO: 1055203 - DNA, 15 bp, Homo sapiens
ttcaaccttgttatc

SEQ ID NO: 1055204 - DNA, 15 bp, Homo sapiens
cttcaaccttgttat

SEQ ID NO: 1055205 - DNA, 15 bp, Homo sapiens
acttcaaccttgtta

SEQ ID NO: 1055206 - DNA, 15 bp, Homo sapiens
cacttcaaccttgtt

SEQ ID NO: 1055207 - DNA, 15 bp, Homo sapiens
ccacttcaaccttgt

SEQ ID NO: 1055208 - DNA, 15 bp, Homo sapiens
tccacttcaaccttg

SEQ ID NO: 1055209 - DNA, 15 bp, Homo sapiens
ctccacttcaacctt

SEQ ID NO: 1055210 - DNA, 15 bp, Homo sapiens
cctccacttcaacct

SEQ ID NO: 1055211 - DNA, 15 bp, Homo sapiens
acctccacttcaacc

SEQ ID NO: 1055212 - DNA, 15 bp, Homo sapiens
cacctccacttcaac

SEQ ID NO: 1055213 - DNA, 15 bp, Homo sapiens
gcacctccacttcaa

SEQ ID NO: 1055214 - DNA, 15 bp, Homo sapiens
tgcacctccacttca

SEQ ID NO: 1055215 - DNA, 15 bp, Homo sapiens
ctgcacctccacttc

SEQ ID NO: 1055216 - DNA, 15 bp, Homo sapiens
tctgcacctccactt

SEQ ID NO: 1055217 - DNA, 15 bp, Homo sapiens
ctctgcacctccact

SEQ ID NO: 1055218 - DNA, 15 bp, Homo sapiens
cctctgcacctccac

SEQ ID NO: 1055219 - DNA, 15 bp, Homo sapiens
tcctctgcacctcca

SEQ ID NO: 1055220 - DNA, 15 bp, Homo sapiens
atcctctgcacctcc

SEQ ID NO: 1055221 - DNA, 15 bp, Homo sapiens
catcctctgcacctc

SEQ ID NO: 1055222 - DNA, 15 bp, Homo sapiens
ccatcctctgcacct

SEQ ID NO: 1055223 - DNA, 15 bp, Homo sapiens
gccatcctctgcacc

SEQ ID NO: 1055224 - DNA, 15 bp, Homo sapiens
tgccatcctctgcac

SEQ ID NO: 1055225 - DNA, 15 bp, Homo sapiens
atgccatcctctgca

SEQ ID NO: 1055226 - DNA, 15 bp, Homo sapiens
aatgccatcctctgc

SEQ ID NO: 1055227 - DNA, 15 bp, Homo sapiens
aaatgccatcctctg

SEQ ID NO: 1055228 - DNA, 15 bp, Homo sapiens
aaaatgccatcctct

SEQ ID NO: 1055229 - DNA, 15 bp, Homo sapiens
caaaatgccatcctc

SEQ ID NO: 1055230 - DNA, 15 bp, Homo sapiens
ccaaaatgccatcct

SEQ ID NO: 1055231 - DNA, 15 bp, Homo sapiens
cccaaaatgccatcc

SEQ ID NO: 1055232 - DNA, 15 bp, Homo sapiens
ccccaaaatgccatc

SEQ ID NO: 1055233 - DNA, 15 bp, Homo sapiens
cccccaaaatgccat

SEQ ID NO: 1055234 - DNA, 15 bp, Homo sapiens
ccccccaaaatgcca

SEQ ID NO: 1055235 - DNA, 15 bp, Homo sapiens
accccccaaaatgcc

SEQ ID NO: 1055236 - DNA, 15 bp, Homo sapiens
taccccccaaaatgc

SEQ ID NO: 1055237 - DNA, 15 bp, Homo sapiens
ataccccccaaaatg

SEQ ID NO: 1055238 - DNA, 15 bp, Homo sapiens
tataccccccaaaat

SEQ ID NO: 1055239 - DNA, 15 bp, Homo sapiens
ctataccccccaaaa

SEQ ID NO: 1055240 - DNA, 15 bp, Homo sapiens
gctataccccccaaa

SEQ ID NO: 1055241 - DNA, 15 bp, Homo sapiens
tgctataccccccaa

SEQ ID NO: 1055242 - DNA, 15 bp, Homo sapiens
atgctatacccccca

SEQ ID NO: 1055243 - DNA, 15 bp, Homo sapiens
catgctatacccccc

SEQ ID NO: 1055244 - DNA, 15 bp, Homo sapiens
ccatgctataccccc

SEQ ID NO: 1055245 - DNA, 15 bp, Homo sapiens
gccatgctatacccc

SEQ ID NO: 1055246 - DNA, 15 bp, Homo sapiens
tgccatgctataccc

SEQ ID NO: 1055247 - DNA, 15 bp, Homo sapiens
ttgccatgctatacc

SEQ ID NO: 1055248 - DNA, 15 bp, Homo sapiens
cttgccatgctatac

SEQ ID NO: 1055249 - DNA, 15 bp, Homo sapiens
tcttgccatgctata

SEQ ID NO: 1055250 - DNA, 15 bp, Homo sapiens
ttcttgccatgctat

SEQ ID NO: 1055251 - DNA, 15 bp, Homo sapiens
tttcttgccatgcta

SEQ ID NO: 1055252 - DNA, 15 bp, Homo sapiens
ttttcttgccatgct

SEQ ID NO: 1055253 - DNA, 15 bp, Homo sapiens
tttttcttgccatgc

SEQ ID NO: 1055254 - DNA, 15 bp, Homo sapiens
ctttttcttgccatg

SEQ ID NO: 1055255 - DNA, 15 bp, Homo sapiens
gctttttcttgccat

SEQ ID NO: 1055256 - DNA, 15 bp, Homo sapiens
tgctttttcttgcca

SEQ ID NO: 1055257 - DNA, 15 bp, Homo sapiens
ttgctttttcttgcc

SEQ ID NO: 1055258 - DNA, 15 bp, Homo sapiens
tttgctttttcttgc

SEQ ID NO: 1055259 - DNA, 15 bp, Homo sapiens
atttgctttttcttg

SEQ ID NO: 1055260 - DNA, 15 bp, Homo sapiens
aatttgctttttctt

SEQ ID NO: 1055261 - DNA, 15 bp, Homo sapiens
caatttgctttttct

SEQ ID NO: 1055262 - DNA, 15 bp, Homo sapiens
gcaatttgctttttc

SEQ ID NO: 1055263 - DNA, 15 bp, Homo sapiens
agcaatttgcttttt

SEQ ID NO: 1055264 - DNA, 15 bp, Homo sapiens
aagcaatttgctttt

SEQ ID NO: 1055265 - DNA, 15 bp, Homo sapiens
gaagcaatttgcttt

SEQ ID NO: 1055266 - DNA, 15 bp, Homo sapiens
agaagcaatttgctt

SEQ ID NO: 1055267 - DNA, 15 bp, Homo sapiens
aagaagcaatttgct

SEQ ID NO: 1055268 - DNA, 15 bp, Homo sapiens
aaagaagcaatttgc

SEQ ID NO: 1055269 - DNA, 15 bp, Homo sapiens
gaaagaagcaatttg

SEQ ID NO: 1055270 - DNA, 15 bp, Homo sapiens
agaaagaagcaattt

SEQ ID NO: 1055271 - DNA, 15 bp, Homo sapiens
aagaaagaagcaatt

SEQ ID NO: 1055272 - DNA, 15 bp, Homo sapiens
aaagaaagaagcaat

SEQ ID NO: 1055273 - DNA, 15 bp, Homo sapiens
aaaagaaagaagcaa

SEQ ID NO: 1055274 - DNA, 15 bp, Homo sapiens
aaaaagaaagaagca

SEQ ID NO: 1055275 - DNA, 15 bp, Homo sapiens
taaaaagaaagaagc

SEQ ID NO: 1055276 - DNA, 15 bp, Homo sapiens
ttaaaaagaaagaag

SEQ ID NO: 1055277 - DNA, 15 bp, Homo sapiens
cttaaaaagaaagaa

SEQ ID NO: 1055278 - DNA, 15 bp, Homo sapiens
tcttaaaaagaaaga

SEQ ID NO: 1055279 - DNA, 15 bp, Homo sapiens
ttcttaaaaagaaag

SEQ ID NO: 1055280 - DNA, 15 bp, Homo sapiens
attcttaaaaagaaa

SEQ ID NO: 1055281 - DNA, 15 bp, Homo sapiens
tattcttaaaaagaa

SEQ ID NO: 1055282 - DNA, 15 bp, Homo sapiens
atattcttaaaaaga

SEQ ID NO: 1055283 - DNA, 15 bp, Homo sapiens
aatattcttaaaaag

SEQ ID NO: 1055284 - DNA, 15 bp, Homo sapiens
aaatattcttaaaaa

SEQ ID NO: 1055285 - DNA, 15 bp, Homo sapiens
taaatattcttaaaa

SEQ ID NO: 1055286 - DNA, 15 bp, Homo sapiens
ataaatattcttaaa

SEQ ID NO: 1055287 - DNA, 15 bp, Homo sapiens
tataaatattcttaa

SEQ ID NO: 1055288 - DNA, 15 bp, Homo sapiens
ctataaatattctta

SEQ ID NO: 1055289 - DNA, 15 bp, Homo sapiens
tctataaatattctt

SEQ ID NO: 1055290 - DNA, 15 bp, Homo sapiens
gtctataaatattct

SEQ ID NO: 1055291 - DNA, 15 bp, Homo sapiens
tgtctataaatattc

SEQ ID NO: 1055292 - DNA, 15 bp, Homo sapiens
ctgtctataaatatt

SEQ ID NO: 1055293 - DNA, 15 bp, Homo sapiens
tctgtctataaatat

SEQ ID NO: 1055294 - DNA, 15 bp, Homo sapiens
ttctgtctataaata

SEQ ID NO: 1055295 - DNA, 15 bp, Homo sapiens
tttctgtctataaat

SEQ ID NO: 1055296 - DNA, 15 bp, Homo sapiens
ctttctgtctataaa

SEQ ID NO: 1055297 - DNA, 15 bp, Homo sapiens
actttctgtctataa

SEQ ID NO: 1055298 - DNA, 15 bp, Homo sapiens
cactttctgtctata

SEQ ID NO: 1055299 - DNA, 15 bp, Homo sapiens
gcactttctgtctat

SEQ ID NO: 1055300 - DNA, 15 bp, Homo sapiens
ggcactttctgtcta

SEQ ID NO: 1055301 - DNA, 15 bp, Homo sapiens
gggcactttctgtct

SEQ ID NO: 1055302 - DNA, 15 bp, Homo sapiens
ggggcactttctgtc

SEQ ID NO: 1055303 - DNA, 15 bp, Homo sapiens
gggggcactttctgt

SEQ ID NO: 1055304 - DNA, 15 bp, Homo sapiens
tgggggcactttctg

SEQ ID NO: 1055305 - DNA, 15 bp, Homo sapiens
ttgggggcactttct

SEQ ID NO: 1055306 - DNA, 15 bp, Homo sapiens
tttgggggcactttc

SEQ ID NO: 1055307 - DNA, 15 bp, Homo sapiens
atttgggggcacttt

SEQ ID NO: 1055308 - DNA, 15 bp, Homo sapiens
gatttgggggcactt

SEQ ID NO: 1055309 - DNA, 15 bp, Homo sapiens
tgatttgggggcact

SEQ ID NO: 1055310 - DNA, 15 bp, Homo sapiens
ttgatttgggggcac

SEQ ID NO: 1055311 - DNA, 15 bp, Homo sapiens
attgatttgggggca

SEQ ID NO: 1055312 - DNA, 15 bp, Homo sapiens
tattgatttgggggc

SEQ ID NO: 1055313 - DNA, 15 bp, Homo sapiens
ttattgatttggggg

SEQ ID NO: 1055314 - DNA, 15 bp, Homo sapiens
tttattgatttgggg

SEQ ID NO: 1055315 - DNA, 15 bp, Homo sapiens
ttttattgatttggg

SEQ ID NO: 1055316 - DNA, 15 bp, Homo sapiens
tttttattgatttgg

SEQ ID NO: 1055317 - DNA, 15 bp, Homo sapiens
atttttattgatttg

SEQ ID NO: 1055318 - DNA, 15 bp, Homo sapiens
tatttttattgattt

SEQ ID NO: 1055319 - DNA, 15 bp, Homo sapiens
atatttttattgatt

SEQ ID NO: 1055320 - DNA, 15 bp, Homo sapiens
aatatttttattgat

SEQ ID NO: 1055321 - DNA, 15 bp, Homo sapiens
taatatttttattga

SEQ ID NO: 1055322 - DNA, 15 bp, Homo sapiens
ctaatatttttattg

SEQ ID NO: 1055323 - DNA, 15 bp, Homo sapiens
cctaatatttttatt

SEQ ID NO: 1055324 - DNA, 15 bp, Homo sapiens
acctaatatttttat

SEQ ID NO: 1055325 - DNA, 15 bp, Homo sapiens
aacctaatattttta

SEQ ID NO: 1055326 - DNA, 15 bp, Homo sapiens
aaacctaatattttt

SEQ ID NO: 1055327 - DNA, 15 bp, Homo sapiens
gaaacctaatatttt

SEQ ID NO: 1055328 - DNA, 15 bp, Homo sapiens
ggaaacctaatattt

SEQ ID NO: 1055329 - DNA, 15 bp, Homo sapiens
gggaaacctaatatt

SEQ ID NO: 1055330 - DNA, 15 bp, Homo sapiens
tgggaaacctaatat

SEQ ID NO: 1055331 - DNA, 15 bp, Homo sapiens
ttgggaaacctaata

SEQ ID NO: 1055332 - DNA, 15 bp, Homo sapiens
tttgggaaacctaat

SEQ ID NO: 1055333 - DNA, 15 bp, Homo sapiens
ttttgggaaacctaa

SEQ ID NO: 1055334 - DNA, 15 bp, Homo sapiens
cttttgggaaaccta

SEQ ID NO: 1055335 - DNA, 15 bp, Homo sapiens
ccttttgggaaacct

SEQ ID NO: 1055336 - DNA, 15 bp, Homo sapiens
cccttttgggaaacc

SEQ ID NO: 1055337 - DNA, 15 bp, Homo sapiens
tcccttttgggaaac

SEQ ID NO: 1055338 - DNA, 15 bp, Homo sapiens
gtcccttttgggaaa

SEQ ID NO: 1055339 - DNA, 15 bp, Homo sapiens
agtcccttttgggaa

SEQ ID NO: 1055340 - DNA, 15 bp, Homo sapiens
aagtcccttttggga

SEQ ID NO: 1055341 - DNA, 15 bp, Homo sapiens
taagtcccttttggg

SEQ ID NO: 1055342 - DNA, 15 bp, Homo sapiens
ataagtcccttttgg

SEQ ID NO: 1055343 - DNA, 15 bp, Homo sapiens
aataagtcccttttg

SEQ ID NO: 1055344 - DNA, 15 bp, Homo sapiens
taataagtccctttt

SEQ ID NO: 1055345 - DNA, 15 bp, Homo sapiens
ctaataagtcccttt

SEQ ID NO: 1055346 - DNA, 15 bp, Homo sapiens
actaataagtccctt

SEQ ID NO: 1055347 - DNA, 15 bp, Homo sapiens
cactaataagtccct

SEQ ID NO: 1055348 - DNA, 15 bp, Homo sapiens
ccactaataagtccc

SEQ ID NO: 1055349 - DNA, 15 bp, Homo sapiens
tccactaataagtcc

SEQ ID NO: 1055350 - DNA, 15 bp, Homo sapiens
ctccactaataagtc

SEQ ID NO: 1055351 - DNA, 15 bp, Homo sapiens
gctccactaataagt

SEQ ID NO: 1055352 - DNA, 15 bp, Homo sapiens
tgctccactaataag

SEQ ID NO: 1055353 - DNA, 15 bp, Homo sapiens
atgctccactaataa

SEQ ID NO: 1055354 - DNA, 15 bp, Homo sapiens
tatgctccactaata

SEQ ID NO: 1055355 - DNA, 15 bp, Homo sapiens
atatgctccactaat

SEQ ID NO: 1055356 - DNA, 15 bp, Homo sapiens
aatatgctccactaa

SEQ ID NO: 1055357 - DNA, 15 bp, Homo sapiens
aaatatgctccacta

SEQ ID NO: 1055358 - DNA, 15 bp, Homo sapiens
gaaatatgctccact

SEQ ID NO: 1055359 - DNA, 15 bp, Homo sapiens
ggaaatatgctccac

SEQ ID NO: 1055360 - DNA, 15 bp, Homo sapiens
tggaaatatgctcca

SEQ ID NO: 1055361 - DNA, 15 bp, Homo sapiens
ctggaaatatgctcc

SEQ ID NO: 1055362 - DNA, 15 bp, Homo sapiens
tctggaaatatgctc

SEQ ID NO: 1055363 - DNA, 15 bp, Homo sapiens
ctctggaaatatgct

SEQ ID NO: 1055364 - DNA, 15 bp, Homo sapiens
actctggaaatatgc

SEQ ID NO: 1055365 - DNA, 15 bp, Homo sapiens
cactctggaaatatg

SEQ ID NO: 1055366 - DNA, 15 bp, Homo sapiens
ccactctggaaatat

SEQ ID NO: 1055367 - DNA, 15 bp, Homo sapiens
tccactctggaaata

SEQ ID NO: 1055368 - DNA, 15 bp, Homo sapiens
ctccactctggaaat

SEQ ID NO: 1055369 - DNA, 15 bp, Homo sapiens
tctccactctggaaa

SEQ ID NO: 1055370 - DNA, 15 bp, Homo sapiens
ctctccactctggaa

SEQ ID NO: 1055371 - DNA, 15 bp, Homo sapiens
cctctccactctgga

SEQ ID NO: 1055372 - DNA, 15 bp, Homo sapiens
tcctctccactctgg

SEQ ID NO: 1055373 - DNA, 15 bp, Homo sapiens
ctcctctccactctg

SEQ ID NO: 1055374 - DNA, 15 bp, Homo sapiens
cctcctctccactct

SEQ ID NO: 1055375 - DNA, 15 bp, Homo sapiens
acctcctctccactc

SEQ ID NO: 1055376 - DNA, 15 bp, Homo sapiens
cacctcctctccact

SEQ ID NO: 1055377 - DNA, 15 bp, Homo sapiens
ccacctcctctccac

SEQ ID NO: 1055378 - DNA, 15 bp, Homo sapiens
tccacctcctctcca

SEQ ID NO: 1055379 - DNA, 15 bp, Homo sapiens
ttccacctcctctcc

SEQ ID NO: 1055380 - DNA, 15 bp, Homo sapiens
attccacctcctctc

SEQ ID NO: 1055381 - DNA, 15 bp, Homo sapiens
gattccacctcctct

SEQ ID NO: 1055382 - DNA, 15 bp, Homo sapiens
ggattccacctcctc

SEQ ID NO: 1055383 - DNA, 15 bp, Homo sapiens
tggattccacctcct

SEQ ID NO: 1055384 - DNA, 15 bp, Homo sapiens
ctggattccacctcc

SEQ ID NO: 1055385 - DNA, 15 bp, Homo sapiens
gctggattccacctc

SEQ ID NO: 1055386 - DNA, 15 bp, Homo sapiens
agctggattccacct

SEQ ID NO: 1055387 - DNA, 15 bp, Homo sapiens
aagctggattccacc

SEQ ID NO: 1055388 - DNA, 15 bp, Homo sapiens
caagctggattccac

SEQ ID NO: 1055389 - DNA, 15 bp, Homo sapiens
acaagctggattcca

SEQ ID NO: 1055390 - DNA, 15 bp, Homo sapiens
tacaagctggattcc

SEQ ID NO: 1055391 - DNA, 15 bp, Homo sapiens
atacaagctggattc

SEQ ID NO: 1055392 - DNA, 15 bp, Homo sapiens
tatacaagctggatt

SEQ ID NO: 1055393 - DNA, 15 bp, Homo sapiens
gtatacaagctggat

SEQ ID NO: 1055394 - DNA, 15 bp, Homo sapiens
agtatacaagctgga

SEQ ID NO: 1055395 - DNA, 15 bp, Homo sapiens
cagtatacaagctgg

SEQ ID NO: 1055396 - DNA, 15 bp, Homo sapiens
tcagtatacaagctg

SEQ ID NO: 1055397 - DNA, 15 bp, Homo sapiens
ttcagtatacaagct

SEQ ID NO: 1055398 - DNA, 15 bp, Homo sapiens
cttcagtatacaagc

SEQ ID NO: 1055399 - DNA, 15 bp, Homo sapiens
tcttcagtatacaag

SEQ ID NO: 1055400 - DNA, 15 bp, Homo sapiens
gtcttcagtatacaa

SEQ ID NO: 1055401 - DNA, 15 bp, Homo sapiens
tgtcttcagtataca

SEQ ID NO: 1055402 - DNA, 15 bp, Homo sapiens
atgtcttcagtatac

SEQ ID NO: 1055403 - DNA, 15 bp, Homo sapiens
aatgtcttcagtata

SEQ ID NO: 1055404 - DNA, 15 bp, Homo sapiens
aaatgtcttcagtat

SEQ ID NO: 1055405 - DNA, 15 bp, Homo sapiens
caaatgtcttcagta

SEQ ID NO: 1055406 - DNA, 15 bp, Homo sapiens
tcaaatgtcttcagt

SEQ ID NO: 1055407 - DNA, 15 bp, Homo sapiens
ttcaaatgtcttcag

SEQ ID NO: 1055408 - DNA, 15 bp, Homo sapiens
cattttcaaatgtct

SEQ ID NO: 1055409 - DNA, 15 bp, Homo sapiens
gcattttcaaatgtc

SEQ ID NO: 1055410 - DNA, 15 bp, Homo sapiens
tgcattttcaaatgt

SEQ ID NO: 1055411 - DNA, 15 bp, Homo sapiens
ctgcattttcaaatg

SEQ ID NO: 1055412 - DNA, 15 bp, Homo sapiens
cctgcattttcaaat

SEQ ID NO: 1055413 - DNA, 15 bp, Homo sapiens
ccctgcattttcaaa

SEQ ID NO: 1055414 - DNA, 15 bp, Homo sapiens
gccctgcattttcaa

SEQ ID NO: 1055415 - DNA, 15 bp, Homo sapiens
tgccctgcattttca

SEQ ID NO: 1055416 - DNA, 15 bp, Homo sapiens
ctgccctgcattttc

SEQ ID NO: 1055417 - DNA, 15 bp, Homo sapiens
tctgccctgcatttt

SEQ ID NO: 1055418 - DNA, 15 bp, Homo sapiens
atctgccctgcattt

SEQ ID NO: 1055419 - DNA, 15 bp, Homo sapiens
tatctgccctgcatt

SEQ ID NO: 1055420 - DNA, 15 bp, Homo sapiens
atatctgccctgcat

SEQ ID NO: 1055421 - DNA, 15 bp, Homo sapiens
gatatctgccctgca

SEQ ID NO: 1055422 - DNA, 15 bp, Homo sapiens
ggatatctgccctgc

SEQ ID NO: 1055423 - DNA, 15 bp, Homo sapiens
tggatatctgccctg

SEQ ID NO: 1055424 - DNA, 15 bp, Homo sapiens
ctggatatctgccct

SEQ ID NO: 1055425 - DNA, 15 bp, Homo sapiens
tctggatatctgccc

SEQ ID NO: 1055426 - DNA, 15 bp, Homo sapiens
ctctggatatctgcc

SEQ ID NO: 1055427 - DNA, 15 bp, Homo sapiens
actctggatatctgc

SEQ ID NO: 1055428 - DNA, 15 bp, Homo sapiens
cactctggatatctg

SEQ ID NO: 1055429 - DNA, 15 bp, Homo sapiens
ccactctggatatct

SEQ ID NO: 1055430 - DNA, 15 bp, Homo sapiens
tccactctggatatc

SEQ ID NO: 1055431 - DNA, 15 bp, Homo sapiens
ctccactctggatat

SEQ ID NO: 1055432 - DNA, 15 bp, Homo sapiens
cctccactctggata

SEQ ID NO: 1055433 - DNA, 15 bp, Homo sapiens
tcctccactctggat

SEQ ID NO: 1055434 - DNA, 15 bp, Homo sapiens
atcctccactctgga

SEQ ID NO: 1055435 - DNA, 15 bp, Homo sapiens
catcctccactctgg

SEQ ID NO: 1055436 - DNA, 15 bp, Homo sapiens
ccatcctccactctg

SEQ ID NO: 1055437 - DNA, 15 bp, Homo sapiens
accatcctccactct

SEQ ID NO: 1055438 - DNA, 15 bp, Homo sapiens
caccatcctccactc

SEQ ID NO: 1055439 - DNA, 15 bp, Homo sapiens
ccaccatcctccact

SEQ ID NO: 1055440 - DNA, 15 bp, Homo sapiens
gccaccatcctccac

SEQ ID NO: 1055441 - DNA, 15 bp, Homo sapiens
cgccaccatcctcca

SEQ ID NO: 1055442 - DNA, 15 bp, Homo sapiens
tcgccaccatcctcc

SEQ ID NO: 1055443 - DNA, 15 bp, Homo sapiens
ttcgccaccatcctc

SEQ ID NO: 1055444 - DNA, 15 bp, Homo sapiens
gttcgccaccatcct

SEQ ID NO: 1055445 - DNA, 15 bp, Homo sapiens
tgttcgccaccatcc

SEQ ID NO: 1055446 - DNA, 15 bp, Homo sapiens
ctgttcgccaccatc

SEQ ID NO: 1055447 - DNA, 15 bp, Homo sapiens
actgttcgccaccat

SEQ ID NO: 1055448 - DNA, 15 bp, Homo sapiens
tactgttcgccacca

SEQ ID NO: 1055449 - DNA, 15 bp, Homo sapiens
ctactgttcgccacc

SEQ ID NO: 1055450 - DNA, 15 bp, Homo sapiens
actactgttcgccac

SEQ ID NO: 1055451 - DNA, 15 bp, Homo sapiens
tactactgttcgcca

SEQ ID NO: 1055452 - DNA, 15 bp, Homo sapiens
gtactactgttcgcc

SEQ ID NO: 1055453 - DNA, 15 bp, Homo sapiens
tgtactactgttcgc

SEQ ID NO: 1055454 - DNA, 15 bp, Homo sapiens
atgtactactgttcg

SEQ ID NO: 1055455 - DNA, 15 bp, Homo sapiens
gatgtactactgttc

SEQ ID NO: 1055456 - DNA, 15 bp, Homo sapiens
ggatgtactactgtt

SEQ ID NO: 1055457 - DNA, 15 bp, Homo sapiens
tggatgtactactgt

SEQ ID NO: 1055458 - DNA, 15 bp, Homo sapiens
gtggatgtactactg

SEQ ID NO: 1055459 - DNA, 15 bp, Homo sapiens
tgtggatgtactact

SEQ ID NO: 1055460 - DNA, 15 bp, Homo sapiens
ttgtggatgtactac

SEQ ID NO: 1055461 - DNA, 15 bp, Homo sapiens
cttgtggatgtacta

SEQ ID NO: 1055462 - DNA, 15 bp, Homo sapiens
tcttgtggatgtact

SEQ ID NO: 1055463 - DNA, 15 bp, Homo sapiens
atcttgtggatgtac

SEQ ID NO: 1055464 - DNA, 15 bp, Homo sapiens
catcttgtggatgta

SEQ ID NO: 1055465 - DNA, 15 bp, Homo sapiens
ccatcttgtggatgt

SEQ ID NO: 1055466 - DNA, 15 bp, Homo sapiens
cccatcttgtggatg

SEQ ID NO: 1055467 - DNA, 15 bp, Homo sapiens
tcccatcttgtggat

SEQ ID NO: 1055468 - DNA, 15 bp, Homo sapiens
ttcccatcttgtgga

SEQ ID NO: 1055469 - DNA, 15 bp, Homo sapiens
cttcccatcttgtgg

SEQ ID NO: 1055470 - DNA, 15 bp, Homo sapiens
acttcccatcttgtg

SEQ ID NO: 1055471 - DNA, 15 bp, Homo sapiens
tacttcccatcttgt

SEQ ID NO: 1055472 - DNA, 15 bp, Homo sapiens
ctacttcccatcttg

SEQ ID NO: 1055473 - DNA, 15 bp, Homo sapiens
actacttcccatctt

SEQ ID NO: 1055474 - DNA, 15 bp, Homo sapiens
aactacttcccatct

SEQ ID NO: 1055475 - DNA, 15 bp, Homo sapiens
caactacttcccatc

SEQ ID NO: 1055476 - DNA, 15 bp, Homo sapiens
acaactacttcccat

SEQ ID NO: 1055477 - DNA, 15 bp, Homo sapiens
aacaactacttccca

SEQ ID NO: 1055478 - DNA, 15 bp, Homo sapiens
gaacaactacttccc

SEQ ID NO: 1055479 - DNA, 15 bp, Homo sapiens
agaacaactacttcc

SEQ ID NO: 1055480 - DNA, 15 bp, Homo sapiens
cagaacaactacttc

SEQ ID NO: 1055481 - DNA, 15 bp, Homo sapiens
gcagaacaactactt

SEQ ID NO: 1055482 - DNA, 15 bp, Homo sapiens
ggcagaacaactact

SEQ ID NO: 1055483 - DNA, 15 bp, Homo sapiens
tggcagaacaactac

SEQ ID NO: 1055484 - DNA, 15 bp, Homo sapiens
atggcagaacaacta

SEQ ID NO: 1055485 - DNA, 15 bp, Homo sapiens
aatggcagaacaact

SEQ ID NO: 1055486 - DNA, 15 bp, Homo sapiens
caatggcagaacaac

SEQ ID NO: 1055487 - DNA, 15 bp, Homo sapiens
tcaatggcagaacaa

SEQ ID NO: 1055488 - DNA, 15 bp, Homo sapiens
ttcaatggcagaaca

SEQ ID NO: 1055489 - DNA, 15 bp, Homo sapiens
tttcaatggcagaac

SEQ ID NO: 1055490 - DNA, 15 bp, Homo sapiens
atttcaatggcagaa

SEQ ID NO: 1055491 - DNA, 15 bp, Homo sapiens
catttcaatggcaga

SEQ ID NO: 1055492 - DNA, 15 bp, Homo sapiens
tcatttcaatggcag

SEQ ID NO: 1055493 - DNA, 15 bp, Homo sapiens
atcatttcaatggca

SEQ ID NO: 1055494 - DNA, 15 bp, Homo sapiens
aatcatttcaatggc

SEQ ID NO: 1055495 - DNA, 15 bp, Homo sapiens
taatcatttcaatgg

SEQ ID NO: 1055496 - DNA, 15 bp, Homo sapiens
ataatcatttcaatg

SEQ ID NO: 1055497 - DNA, 15 bp, Homo sapiens
aataatcatttcaat

SEQ ID NO: 1055498 - DNA, 15 bp, Homo sapiens
caataatcatttcaa

SEQ ID NO: 1055499 - DNA, 15 bp, Homo sapiens
ccaataatcatttca

SEQ ID NO: 1055500 - DNA, 15 bp, Homo sapiens
cccaataatcatttc

SEQ ID NO: 1055501 - DNA, 15 bp, Homo sapiens
tcccaataatcattt

SEQ ID NO: 1055502 - DNA, 15 bp, Homo sapiens
ttcccaataatcatt

SEQ ID NO: 1055503 - DNA, 15 bp, Homo sapiens
tttcccaataatcat

SEQ ID NO: 1055504 - DNA, 15 bp, Homo sapiens
gtttcccaataatca

SEQ ID NO: 1055505 - DNA, 15 bp, Homo sapiens
tgtttcccaataatc

SEQ ID NO: 1055506 - DNA, 15 bp, Homo sapiens
gtgtttcccaataat

SEQ ID NO: 1055507 - DNA, 15 bp, Homo sapiens
ggtgtttcccaataa

SEQ ID NO: 1055508 - DNA, 15 bp, Homo sapiens
tggtgtttcccaata

SEQ ID NO: 1055509 - DNA, 15 bp, Homo sapiens
atggtgtttcccaat

SEQ ID NO: 1055510 - DNA, 15 bp, Homo sapiens
catggtgtttcccaa

SEQ ID NO: 1055511 - DNA, 15 bp, Homo sapiens
tcatggtgtttccca

SEQ ID NO: 1055512 - DNA, 15 bp, Homo sapiens
ctcatggtgtttccc

SEQ ID NO: 1055513 - DNA, 15 bp, Homo sapiens
tctcatggtgtttcc

SEQ ID NO: 1055514 - DNA, 15 bp, Homo sapiens
ttctcatggtgtttc

SEQ ID NO: 1055515 - DNA, 15 bp, Homo sapiens
cttctcatggtgttt

SEQ ID NO: 1055516 - DNA, 15 bp, Homo sapiens
acttctcatggtgtt

SEQ ID NO: 1055517 - DNA, 15 bp, Homo sapiens
cacttctcatggtgt

SEQ ID NO: 1055518 - DNA, 15 bp, Homo sapiens
gcacttctcatggtg

SEQ ID NO: 1055519 - DNA, 15 bp, Homo sapiens
agcacttctcatggt

SEQ ID NO: 1055520 - DNA, 15 bp, Homo sapiens
aagcacttctcatgg

SEQ ID NO: 1055521 - DNA, 15 bp, Homo sapiens
taagcacttctcatg

SEQ ID NO: 1055522 - DNA, 15 bp, Homo sapiens
ctaagcacttctcat

SEQ ID NO: 1055523 - DNA, 15 bp, Homo sapiens
cctaagcacttctca

SEQ ID NO: 1055524 - DNA, 15 bp, Homo sapiens
tcctaagcacttctc

SEQ ID NO: 1055525 - DNA, 15 bp, Homo sapiens
atcctaagcacttct

SEQ ID NO: 1055526 - DNA, 15 bp, Homo sapiens
tatcctaagcacttc

SEQ ID NO: 1055527 - DNA, 15 bp, Homo sapiens
gtatcctaagcactt

SEQ ID NO: 1055528 - DNA, 15 bp, Homo sapiens
tgtatcctaagcact

SEQ ID NO: 1055529 - DNA, 15 bp, Homo sapiens
ttgtatcctaagcac

SEQ ID NO: 1055530 - DNA, 15 bp, Homo sapiens
attgtatcctaagca

SEQ ID NO: 1055531 - DNA, 15 bp, Homo sapiens
cattgtatcctaagc

SEQ ID NO: 1055532 - DNA, 15 bp, Homo sapiens
acattgtatcctaag

SEQ ID NO: 1055533 - DNA, 15 bp, Homo sapiens
aacattgtatcctaa

SEQ ID NO: 1055534 - DNA, 15 bp, Homo sapiens
caacattgtatccta

SEQ ID NO: 1055535 - DNA, 15 bp, Homo sapiens
ccaacattgtatcct

SEQ ID NO: 1055536 - DNA, 15 bp, Homo sapiens
cccaacattgtatcc

SEQ ID NO: 1055537 - DNA, 15 bp, Homo sapiens
acccaacattgtatc

SEQ ID NO: 1055538 - DNA, 15 bp, Homo sapiens
cacccaacattgtat

SEQ ID NO: 1055539 - DNA, 15 bp, Homo sapiens
ccacccaacattgta

SEQ ID NO: 1055540 - DNA, 15 bp, Homo sapiens
tccacccaacattgt

SEQ ID NO: 1055541 - DNA, 15 bp, Homo sapiens
ttccacccaacattg

SEQ ID NO: 1055542 - DNA, 15 bp, Homo sapiens
tttccacccaacatt

SEQ ID NO: 1055543 - DNA, 15 bp, Homo sapiens
ttttccacccaacat

SEQ ID NO: 1055544 - DNA, 15 bp, Homo sapiens
cttttccacccaaca

SEQ ID NO: 1055545 - DNA, 15 bp, Homo sapiens
gcttttccacccaac

SEQ ID NO: 1055546 - DNA, 15 bp, Homo sapiens
agcttttccacccaa

SEQ ID NO: 1055547 - DNA, 15 bp, Homo sapiens
gagcttttccaccca

SEQ ID NO: 1055548 - DNA, 15 bp, Homo sapiens
tgagcttttccaccc

SEQ ID NO: 1055549 - DNA, 15 bp, Homo sapiens
atgagcttttccacc

SEQ ID NO: 1055550 - DNA, 15 bp, Homo sapiens
aatgagcttttccac

SEQ ID NO: 1055551 - DNA, 15 bp, Homo sapiens
taatgagcttttcca

SEQ ID NO: 1055552 - DNA, 15 bp, Homo sapiens
ataatgagcttttcc

SEQ ID NO: 1055553 - DNA, 15 bp, Homo sapiens
tataatgagcttttc

SEQ ID NO: 1055554 - DNA, 15 bp, Homo sapiens
ttataatgagctttt

SEQ ID NO: 1055555 - DNA, 15 bp, Homo sapiens
tttataatgagcttt

SEQ ID NO: 1055556 - DNA, 15 bp, Homo sapiens
ctttataatgagctt

SEQ ID NO: 1055557 - DNA, 15 bp, Homo sapiens
actttataatgagct

SEQ ID NO: 1055558 - DNA, 15 bp, Homo sapiens
cactttataatgagc

SEQ ID NO: 1055559 - DNA, 15 bp, Homo sapiens
ccactttataatgag

SEQ ID NO: 1055560 - DNA, 15 bp, Homo sapiens
accactttataatga

SEQ ID NO: 1055561 - DNA, 15 bp, Homo sapiens
gaccactttataatg

SEQ ID NO: 1055562 - DNA, 15 bp, Homo sapiens
agaccactttataat

SEQ ID NO: 1055563 - DNA, 15 bp, Homo sapiens
cagaccactttataa

SEQ ID NO: 1055564 - DNA, 15 bp, Homo sapiens
acagaccactttata

SEQ ID NO: 1055565 - DNA, 15 bp, Homo sapiens
cacagaccactttat

SEQ ID NO: 1055566 - DNA, 15 bp, Homo sapiens
gcacagaccacttta

SEQ ID NO: 1055567 - DNA, 15 bp, Homo sapiens
tgcacagaccacttt

SEQ ID NO: 1055568 - DNA, 15 bp, Homo sapiens
gtgcacagaccactt

SEQ ID NO: 1055569 - DNA, 15 bp, Homo sapiens
agtgcacagaccact

SEQ ID NO: 1055570 - DNA, 15 bp, Homo sapiens
cagtgcacagaccac

SEQ ID NO: 1055571 - DNA, 15 bp, Homo sapiens
tcagtgcacagacca

SEQ ID NO: 1055572 - DNA, 15 bp, Homo sapiens
atcagtgcacagacc

SEQ ID NO: 1055573 - DNA, 15 bp, Homo sapiens
tatcagtgcacagac

SEQ ID NO: 1055574 - DNA, 15 bp, Homo sapiens
ctatcagtgcacaga

SEQ ID NO: 1055575 - DNA, 15 bp, Homo sapiens
tctatcagtgcacag

SEQ ID NO: 1055576 - DNA, 15 bp, Homo sapiens
ttctatcagtgcaca

SEQ ID NO: 1055577 - DNA, 15 bp, Homo sapiens
tttctatcagtgcac

SEQ ID NO: 1055578 - DNA, 15 bp, Homo sapiens
ttttctatcagtgca

SEQ ID NO: 1055579 - DNA, 15 bp, Homo sapiens
tttttctatcagtgc

SEQ ID NO: 1055580 - DNA, 15 bp, Homo sapiens
gtttttctatcagtg

SEQ ID NO: 1055581 - DNA, 15 bp, Homo sapiens
ggtttttctatcagt

SEQ ID NO: 1055582 - DNA, 15 bp, Homo sapiens
tggtttttctatcag

SEQ ID NO: 1055583 - DNA, 15 bp, Homo sapiens
atggtttttctatca

SEQ ID NO: 1055584 - DNA, 15 bp, Homo sapiens
catggtttttctatc

SEQ ID NO: 1055585 - DNA, 15 bp, Homo sapiens
acatggtttttctat

SEQ ID NO: 1055586 - DNA, 15 bp, Homo sapiens
gacatggtttttcta

SEQ ID NO: 1055587 - DNA, 15 bp, Homo sapiens
agacatggtttttct

SEQ ID NO: 1055588 - DNA, 15 bp, Homo sapiens
cagacatggtttttc

SEQ ID NO: 1055589 - DNA, 15 bp, Homo sapiens
gcagacatggttttt

SEQ ID NO: 1055590 - DNA, 15 bp, Homo sapiens
ggcagacatggtttt

SEQ ID NO: 1055591 - DNA, 15 bp, Homo sapiens
aggcagacatggttt

SEQ ID NO: 1055592 - DNA, 15 bp, Homo sapiens
caggcagacatggtt

SEQ ID NO: 1055593 - DNA, 15 bp, Homo sapiens
gcaggcagacatggt

SEQ ID NO: 1055594 - DNA, 15 bp, Homo sapiens
cgcaggcagacatgg

SEQ ID NO: 1055595 - DNA, 15 bp, Homo sapiens
tcgcaggcagacatg

SEQ ID NO: 1055596 - DNA, 15 bp, Homo sapiens
ttcgcaggcagacat

SEQ ID NO: 1055597 - DNA, 15 bp, Homo sapiens
tttcgcaggcagaca

SEQ ID NO: 1055598 - DNA, 15 bp, Homo sapiens
ctttcgcaggcagac

SEQ ID NO: 1055599 - DNA, 15 bp, Homo sapiens
gctttcgcaggcaga

SEQ ID NO: 1055600 - DNA, 15 bp, Homo sapiens
tgctttcgcaggcag

SEQ ID NO: 1055601 - DNA, 15 bp, Homo sapiens
ttgctttcgcaggca

SEQ ID NO: 1055602 - DNA, 15 bp, Homo sapiens
tttgctttcgcaggc

SEQ ID NO: 1055603 - DNA, 15 bp, Homo sapiens
ttttgctttcgcagg

SEQ ID NO: 1055604 - DNA, 15 bp, Homo sapiens
tttttgctttcgcag

SEQ ID NO: 1055605 - DNA, 15 bp, Homo sapiens
ttttttgctttcgca

SEQ ID NO: 1055606 - DNA, 15 bp, Homo sapiens
attttttgctttcgc

SEQ ID NO: 1055607 - DNA, 15 bp, Homo sapiens
aattttttgctttcg

SEQ ID NO: 1055608 - DNA, 15 bp, Homo sapiens
taattttttgctttc

SEQ ID NO: 1055609 - DNA, 15 bp, Homo sapiens
ttaattttttgcttt

SEQ ID NO: 1055610 - DNA, 15 bp, Homo sapiens
tttaattttttgctt

SEQ ID NO: 1055611 - DNA, 15 bp, Homo sapiens
ttttaattttttgct

SEQ ID NO: 1055612 - DNA, 15 bp, Homo sapiens
attttaattttttgc

SEQ ID NO: 1055613 - DNA, 15 bp, Homo sapiens
attattttaattttt

SEQ ID NO: 1055614 - DNA, 15 bp, Homo sapiens
gattattttaatttt

SEQ ID NO: 1055615 - DNA, 15 bp, Homo sapiens
cgattattttaattt

SEQ ID NO: 1055616 - DNA, 15 bp, Homo sapiens
acgattattttaatt

SEQ ID NO: 1055617 - DNA, 15 bp, Homo sapiens
cacgattattttaat

SEQ ID NO: 1055618 - DNA, 15 bp, Homo sapiens
acacgattattttaa

SEQ ID NO: 1055619 - DNA, 15 bp, Homo sapiens
aacacgattatttta

SEQ ID NO: 1055620 - DNA, 15 bp, Homo sapiens
taacacgattatttt

SEQ ID NO: 1055621 - DNA, 15 bp, Homo sapiens
ttaacacgattattt

SEQ ID NO: 1055622 - DNA, 15 bp, Homo sapiens
tttaacacgattatt

SEQ ID NO: 1055623 - DNA, 15 bp, Homo sapiens
atttaacacgattat

SEQ ID NO: 1055624 - DNA, 15 bp, Homo sapiens
aatttaacacgatta

SEQ ID NO: 1055625 - DNA, 15 bp, Homo sapiens
taatttaacacgatt

SEQ ID NO: 1055626 - DNA, 15 bp, Homo sapiens
ttaatttaacacgat

SEQ ID NO: 1055627 - DNA, 15 bp, Homo sapiens
tttaatttaacacga

SEQ ID NO: 1055628 - DNA, 15 bp, Homo sapiens
ttttaatttaacacg

SEQ ID NO: 1055629 - DNA, 15 bp, Homo sapiens
tttttaatttaacac

SEQ ID NO: 1055630 - DNA, 15 bp, Homo sapiens
ttttttaatttaaca

SEQ ID NO: 1055631 - DNA, 15 bp, Homo sapiens
aagtttttttttttt

SEQ ID NO: 1055632 - DNA, 15 bp, Homo sapiens
caagttttttttttt

SEQ ID NO: 1055633 - DNA, 15 bp, Homo sapiens
gcaagtttttttttt

SEQ ID NO: 1055634 - DNA, 15 bp, Homo sapiens
ggcaagttttttttt

SEQ ID NO: 1055635 - DNA, 15 bp, Homo sapiens
gggcaagtttttttt

SEQ ID NO: 1055636 - DNA, 15 bp, Homo sapiens
ggggcaagttttttt

SEQ ID NO: 1055637 - DNA, 15 bp, Homo sapiens
tggggcaagtttttt

SEQ ID NO: 1055638 - DNA, 15 bp, Homo sapiens
ttggggcaagttttt

SEQ ID NO: 1055639 - DNA, 15 bp, Homo sapiens
gttggggcaagtttt

SEQ ID NO: 1055640 - DNA, 15 bp, Homo sapiens
tgttggggcaagttt

SEQ ID NO: 1055641 - DNA, 15 bp, Homo sapiens
atgttggggcaagtt

SEQ ID NO: 1055642 - DNA, 15 bp, Homo sapiens
catgttggggcaagt

SEQ ID NO: 1055643 - DNA, 15 bp, Homo sapiens
ccatgttggggcaag

SEQ ID NO: 1055644 - DNA, 15 bp, Homo sapiens
accatgttggggcaa

SEQ ID NO: 1055645 - DNA, 15 bp, Homo sapiens
taccatgttggggca

SEQ ID NO: 1055646 - DNA, 15 bp, Homo sapiens
ataccatgttggggc

SEQ ID NO: 1055647 - DNA, 15 bp, Homo sapiens
aataccatgttgggg

SEQ ID NO: 1055648 - DNA, 15 bp, Homo sapiens
caataccatgttggg

SEQ ID NO: 1055649 - DNA, 15 bp, Homo sapiens
tcaataccatgttgg

SEQ ID NO: 1055650 - DNA, 15 bp, Homo sapiens
ttcaataccatgttg

SEQ ID NO: 1055651 - DNA, 15 bp, Homo sapiens
tttcaataccatgtt

SEQ ID NO: 1055652 - DNA, 15 bp, Homo sapiens
atttcaataccatgt

SEQ ID NO: 1055653 - DNA, 15 bp, Homo sapiens
tatttcaataccatg

SEQ ID NO: 1055654 - DNA, 15 bp, Homo sapiens
atatttcaataccat

SEQ ID NO: 1055655 - DNA, 15 bp, Homo sapiens
gatatttcaatacca

SEQ ID NO: 1055656 - DNA, 15 bp, Homo sapiens
ggatatttcaatacc

SEQ ID NO: 1055657 - DNA, 15 bp, Homo sapiens
aggatatttcaatac

SEQ ID NO: 1055658 - DNA, 15 bp, Homo sapiens
aaggatatttcaata

SEQ ID NO: 1055659 - DNA, 15 bp, Homo sapiens
aaaggatatttcaat

SEQ ID NO: 1055660 - DNA, 15 bp, Homo sapiens
aaaaggatatttcaa

SEQ ID NO: 1055661 - DNA, 15 bp, Homo sapiens
caaaaggatatttca

SEQ ID NO: 1055662 - DNA, 15 bp, Homo sapiens
tcaaaaggatatttc

SEQ ID NO: 1055663 - DNA, 15 bp, Homo sapiens
ctcaaaaggatattt

SEQ ID NO: 1055664 - DNA, 15 bp, Homo sapiens
cctcaaaaggatatt

SEQ ID NO: 1055665 - DNA, 15 bp, Homo sapiens
tcctcaaaaggatat

SEQ ID NO: 1055666 - DNA, 15 bp, Homo sapiens
ttcctcaaaaggata

SEQ ID NO: 1055667 - DNA, 15 bp, Homo sapiens
gttcctcaaaaggat

SEQ ID NO: 1055668 - DNA, 15 bp, Homo sapiens
ggttcctcaaaagga

SEQ ID NO: 1055669 - DNA, 15 bp, Homo sapiens
aggttcctcaaaagg

SEQ ID NO: 1055670 - DNA, 15 bp, Homo sapiens
taggttcctcaaaag

SEQ ID NO: 1055671 - DNA, 15 bp, Homo sapiens
ctaggttcctcaaaa

SEQ ID NO: 1055672 - DNA, 15 bp, Homo sapiens
tctaggttcctcaaa

SEQ ID NO: 1055673 - DNA, 15 bp, Homo sapiens
gtctaggttcctcaa

SEQ ID NO: 1055674 - DNA, 15 bp, Homo sapiens
agtctaggttcctca

SEQ ID NO: 1055675 - DNA, 15 bp, Homo sapiens
aagtctaggttcctc

SEQ ID NO: 1055676 - DNA, 15 bp, Homo sapiens
taagtctaggttcct

SEQ ID NO: 1055677 - DNA, 15 bp, Homo sapiens
ttaagtctaggttcc

SEQ ID NO: 1055678 - DNA, 15 bp, Homo sapiens
tttaagtctaggttc

SEQ ID NO: 1055679 - DNA, 15 bp, Homo sapiens
ttttaagtctaggtt

SEQ ID NO: 1055680 - DNA, 15 bp, Homo sapiens
attttaagtctaggt

SEQ ID NO: 1055681 - DNA, 15 bp, Homo sapiens
cattttaagtctagg

SEQ ID NO: 1055682 - DNA, 15 bp, Homo sapiens
tcattttaagtctag

SEQ ID NO: 1055683 - DNA, 15 bp, Homo sapiens
atcattttaagtcta

SEQ ID NO: 1055684 - DNA, 15 bp, Homo sapiens
gatcattttaagtct

SEQ ID NO: 1055685 - DNA, 15 bp, Homo sapiens
ggatcattttaagtc

SEQ ID NO: 1055686 - DNA, 15 bp, Homo sapiens
tggatcattttaagt

SEQ ID NO: 1055687 - DNA, 15 bp, Homo sapiens
gtggatcattttaag

SEQ ID NO: 1055688 - DNA, 15 bp, Homo sapiens
agtggatcattttaa

SEQ ID NO: 1055689 - DNA, 15 bp, Homo sapiens
cagtggatcatttta

SEQ ID NO: 1055690 - DNA, 15 bp, Homo sapiens
acagtggatcatttt

SEQ ID NO: 1055691 - DNA, 15 bp, Homo sapiens
gacagtggatcattt

SEQ ID NO: 1055692 - DNA, 15 bp, Homo sapiens
tgacagtggatcatt

SEQ ID NO: 1055693 - DNA, 15 bp, Homo sapiens
ctgacagtggatcat

SEQ ID NO: 1055694 - DNA, 15 bp, Homo sapiens
cctgacagtggatca

SEQ ID NO: 1055695 - DNA, 15 bp, Homo sapiens
gcctgacagtggatc

SEQ ID NO: 1055696 - DNA, 15 bp, Homo sapiens
tgcctgacagtggat

SEQ ID NO: 1055697 - DNA, 15 bp, Homo sapiens
ttgcctgacagtgga

SEQ ID NO: 1055698 - DNA, 15 bp, Homo sapiens
tttgcctgacagtgg

SEQ ID NO: 1055699 - DNA, 15 bp, Homo sapiens
ttttgcctgacagtg

SEQ ID NO: 1055700 - DNA, 15 bp, Homo sapiens
cttttgcctgacagt

SEQ ID NO: 1055701 - DNA, 15 bp, Homo sapiens
ccttttgcctgacag

SEQ ID NO: 1055702 - DNA, 15 bp, Homo sapiens
gccttttgcctgaca

SEQ ID NO: 1055703 - DNA, 15 bp, Homo sapiens
agccttttgcctgac

SEQ ID NO: 1055704 - DNA, 15 bp, Homo sapiens
aagccttttgcctga

SEQ ID NO: 1055705 - DNA, 15 bp, Homo sapiens
aaagccttttgcctg

SEQ ID NO: 1055706 - DNA, 15 bp, Homo sapiens
aaaagccttttgcct

SEQ ID NO: 1055707 - DNA, 15 bp, Homo sapiens
taaaagccttttgcc

SEQ ID NO: 1055708 - DNA, 15 bp, Homo sapiens
ctaaaagccttttgc

SEQ ID NO: 1055709 - DNA, 15 bp, Homo sapiens
tctaaaagccttttg

SEQ ID NO: 1055710 - DNA, 15 bp, Homo sapiens
atctaaaagcctttt

SEQ ID NO: 1055711 - DNA, 15 bp, Homo sapiens
aatctaaaagccttt

SEQ ID NO: 1055712 - DNA, 15 bp, Homo sapiens
gaatctaaaagcctt

SEQ ID NO: 1055713 - DNA, 15 bp, Homo sapiens
tgaatctaaaagcct

SEQ ID NO: 1055714 - DNA, 15 bp, Homo sapiens
atgaatctaaaagcc

SEQ ID NO: 1055715 - DNA, 15 bp, Homo sapiens
catgaatctaaaagc

SEQ ID NO: 1055716 - DNA, 15 bp, Homo sapiens
gcatgaatctaaaag

SEQ ID NO: 1055717 - DNA, 15 bp, Homo sapiens
agcatgaatctaaaa

SEQ ID NO: 1055718 - DNA, 15 bp, Homo sapiens
cagcatgaatctaaa

SEQ ID NO: 1055719 - DNA, 15 bp, Homo sapiens
gcagcatgaatctaa

SEQ ID NO: 1055720 - DNA, 15 bp, Homo sapiens
agcagcatgaatcta

SEQ ID NO: 1055721 - DNA, 15 bp, Homo sapiens
aagcagcatgaatct

SEQ ID NO: 1055722 - DNA, 15 bp, Homo sapiens
aaagcagcatgaatc

SEQ ID NO: 1055723 - DNA, 15 bp, Homo sapiens
aaaagcagcatgaat

SEQ ID NO: 1055724 - DNA, 15 bp, Homo sapiens
aaaaagcagcatgaa

SEQ ID NO: 1055725 - DNA, 15 bp, Homo sapiens
taaaaagcagcatga

SEQ ID NO: 1055726 - DNA, 15 bp, Homo sapiens
ttaaaaagcagcatg

SEQ ID NO: 1055727 - DNA, 15 bp, Homo sapiens
attaaaaagcagcat

SEQ ID NO: 1055728 - DNA, 15 bp, Homo sapiens
aattaaaaagcagca

SEQ ID NO: 1055729 - DNA, 15 bp, Homo sapiens
caattaaaaagcagc

SEQ ID NO: 1055730 - DNA, 15 bp, Homo sapiens
ccaattaaaaagcag

SEQ ID NO: 1055731 - DNA, 15 bp, Homo sapiens
accaattaaaaagca

SEQ ID NO: 1055732 - DNA, 15 bp, Homo sapiens
caccaattaaaaagc

SEQ ID NO: 1055733 - DNA, 15 bp, Homo sapiens
acaccaattaaaaag

SEQ ID NO: 1055734 - DNA, 15 bp, Homo sapiens
gacaccaattaaaaa

SEQ ID NO: 1055735 - DNA, 15 bp, Homo sapiens
agacaccaattaaaa

SEQ ID NO: 1055736 - DNA, 15 bp, Homo sapiens
tagacaccaattaaa

SEQ ID NO: 1055737 - DNA, 15 bp, Homo sapiens
gtagacaccaattaa

SEQ ID NO: 1055738 - DNA, 15 bp, Homo sapiens
ggtagacaccaatta

SEQ ID NO: 1055739 - DNA, 15 bp, Homo sapiens
aggtagacaccaatt

SEQ ID NO: 1055740 - DNA, 15 bp, Homo sapiens
aaggtagacaccaat

SEQ ID NO: 1055741 - DNA, 15 bp, Homo sapiens
caaggtagacaccaa

SEQ ID NO: 1055742 - DNA, 15 bp, Homo sapiens
ccaaggtagacacca

SEQ ID NO: 1055743 - DNA, 15 bp, Homo sapiens
cccaaggtagacacc

SEQ ID NO: 1055744 - DNA, 15 bp, Homo sapiens
ccccaaggtagacac

SEQ ID NO: 1055745 - DNA, 15 bp, Homo sapiens
accccaaggtagaca

SEQ ID NO: 1055746 - DNA, 15 bp, Homo sapiens
aaccccaaggtagac

SEQ ID NO: 1055747 - DNA, 15 bp, Homo sapiens
gaaccccaaggtaga

SEQ ID NO: 1055748 - DNA, 15 bp, Homo sapiens
ggaaccccaaggtag

SEQ ID NO: 1055749 - DNA, 15 bp, Homo sapiens
tggaaccccaaggta

SEQ ID NO: 1055750 - DNA, 15 bp, Homo sapiens
ctggaaccccaaggt

SEQ ID NO: 1055751 - DNA, 15 bp, Homo sapiens
gctggaaccccaagg

SEQ ID NO: 1055752 - DNA, 15 bp, Homo sapiens
ggctggaaccccaag

SEQ ID NO: 1055753 - DNA, 15 bp, Homo sapiens
aggctggaaccccaa

SEQ ID NO: 1055754 - DNA, 15 bp, Homo sapiens
aaggctggaacccca

SEQ ID NO: 1055755 - DNA, 15 bp, Homo sapiens
caaggctggaacccc

SEQ ID NO: 1055756 - DNA, 15 bp, Homo sapiens
ccaaggctggaaccc

SEQ ID NO: 1055757 - DNA, 15 bp, Homo sapiens
cccaaggctggaacc

SEQ ID NO: 1055758 - DNA, 15 bp, Homo sapiens
ccccaaggctggaac

SEQ ID NO: 1055759 - DNA, 15 bp, Homo sapiens
tccccaaggctggaa

SEQ ID NO: 1055760 - DNA, 15 bp, Homo sapiens
gtccccaaggctgga

SEQ ID NO: 1055761 - DNA, 15 bp, Homo sapiens
ggtccccaaggctgg

SEQ ID NO: 1055762 - DNA, 15 bp, Homo sapiens
gggtccccaaggctg

SEQ ID NO: 1055763 - DNA, 15 bp, Homo sapiens
agggtccccaaggct

SEQ ID NO: 1055764 - DNA, 15 bp, Homo sapiens
gagggtccccaaggc

SEQ ID NO: 1055765 - DNA, 15 bp, Homo sapiens
agagggtccccaagg

SEQ ID NO: 1055766 - DNA, 15 bp, Homo sapiens
tagagggtccccaag

SEQ ID NO: 1055767 - DNA, 15 bp, Homo sapiens
ctagagggtccccaa

SEQ ID NO: 1055768 - DNA, 15 bp, Homo sapiens
actagagggtcccca

SEQ ID NO: 1055769 - DNA, 15 bp, Homo sapiens
cactagagggtcccc

SEQ ID NO: 1055770 - DNA, 15 bp, Homo sapiens
acactagagggtccc

SEQ ID NO: 1055771 - DNA, 15 bp, Homo sapiens
cacactagagggtcc

SEQ ID NO: 1055772 - DNA, 15 bp, Homo sapiens
tcacactagagggtc

SEQ ID NO: 1055773 - DNA, 15 bp, Homo sapiens
ctcacactagagggt

SEQ ID NO: 1055774 - DNA, 15 bp, Homo sapiens
cctcacactagaggg

SEQ ID NO: 1055775 - DNA, 15 bp, Homo sapiens
acctcacactagagg

SEQ ID NO: 1055776 - DNA, 15 bp, Homo sapiens
cacctcacactagag

SEQ ID NO: 1055777 - DNA, 15 bp, Homo sapiens
ccacctcacactaga

SEQ ID NO: 1055778 - DNA, 15 bp, Homo sapiens
accacctcacactag

SEQ ID NO: 1055779 - DNA, 15 bp, Homo sapiens
caccacctcacacta

SEQ ID NO: 1055780 - DNA, 15 bp, Homo sapiens
ccaccacctcacact

SEQ ID NO: 1055781 - DNA, 15 bp, Homo sapiens
gccaccacctcacac

SEQ ID NO: 1055782 - DNA, 15 bp, Homo sapiens
agccaccacctcaca

SEQ ID NO: 1055783 - DNA, 15 bp, Homo sapiens
cagccaccacctcac

SEQ ID NO: 1055784 - DNA, 15 bp, Homo sapiens
ccagccaccacctca

SEQ ID NO: 1055785 - DNA, 15 bp, Homo sapiens
gccagccaccacctc

SEQ ID NO: 1055786 - DNA, 15 bp, Homo sapiens
agccagccaccacct

SEQ ID NO: 1055787 - DNA, 15 bp, Homo sapiens
cagccagccaccacc

SEQ ID NO: 1055788 - DNA, 15 bp, Homo sapiens
gcagccagccaccac

SEQ ID NO: 1055789 - DNA, 15 bp, Homo sapiens
agcagccagccacca

SEQ ID NO: 1055790 - DNA, 15 bp, Homo sapiens
tagcagccagccacc

SEQ ID NO: 1055791 - DNA, 15 bp, Homo sapiens
ttagcagccagccac

SEQ ID NO: 1055792 - DNA, 15 bp, Homo sapiens
cttagcagccagcca

SEQ ID NO: 1055793 - DNA, 15 bp, Homo sapiens
gcttagcagccagcc

SEQ ID NO: 1055794 - DNA, 15 bp, Homo sapiens
cgcttagcagccagc

SEQ ID NO: 1055795 - DNA, 15 bp, Homo sapiens
gcgcttagcagccag

SEQ ID NO: 1055796 - DNA, 15 bp, Homo sapiens
ggcgcttagcagcca

SEQ ID NO: 1055797 - DNA, 15 bp, Homo sapiens
aggcgcttagcagcc

SEQ ID NO: 1055798 - DNA, 15 bp, Homo sapiens
caggcgcttagcagc

SEQ ID NO: 1055799 - DNA, 15 bp, Homo sapiens
gcaggcgcttagcag

SEQ ID NO: 1055800 - DNA, 15 bp, Homo sapiens
tgcaggcgcttagca

SEQ ID NO: 1055801 - DNA, 15 bp, Homo sapiens
ctgcaggcgcttagc

SEQ ID NO: 1055802 - DNA, 15 bp, Homo sapiens
cctgcaggcgcttag

SEQ ID NO: 1055803 - DNA, 15 bp, Homo sapiens
tcctgcaggcgctta

SEQ ID NO: 1055804 - DNA, 15 bp, Homo sapiens
ctcctgcaggcgctt

SEQ ID NO: 1055805 - DNA, 15 bp, Homo sapiens
cctcctgcaggcgct

SEQ ID NO: 1055806 - DNA, 15 bp, Homo sapiens
gcctcctgcaggcgc

SEQ ID NO: 1055807 - DNA, 15 bp, Homo sapiens
ggcctcctgcaggcg

SEQ ID NO: 1055808 - DNA, 15 bp, Homo sapiens
tggcctcctgcaggc

SEQ ID NO: 1055809 - DNA, 15 bp, Homo sapiens
atggcctcctgcagg

SEQ ID NO: 1055810 - DNA, 15 bp, Homo sapiens
catggcctcctgcag

SEQ ID NO: 1055811 - DNA, 15 bp, Homo sapiens
ccatggcctcctgca

SEQ ID NO: 1055812 - DNA, 15 bp, Homo sapiens
cccatggcctcctgc

SEQ ID NO: 1055813 - DNA, 15 bp, Homo sapiens
gcccatggcctcctg

SEQ ID NO: 1055814 - DNA, 15 bp, Homo sapiens
agcccatggcctcct

SEQ ID NO: 1055815 - DNA, 15 bp, Homo sapiens
cagcccatggcctcc

SEQ ID NO: 1055816 - DNA, 15 bp, Homo sapiens
ccagcccatggcctc

SEQ ID NO: 1055817 - DNA, 15 bp, Homo sapiens
gccagcccatggcct

SEQ ID NO: 1055818 - DNA, 15 bp, Homo sapiens
cgccagcccatggcc

SEQ ID NO: 1055819 - DNA, 15 bp, Homo sapiens
tcgccagcccatggc

SEQ ID NO: 1055820 - DNA, 15 bp, Homo sapiens
atcgccagcccatgg

SEQ ID NO: 1055821 - DNA, 15 bp, Homo sapiens
gatcgccagcccatg

SEQ ID NO: 1055822 - DNA, 15 bp, Homo sapiens
cgatcgccagcccat

SEQ ID NO: 1055823 - DNA, 15 bp, Homo sapiens
acgatcgccagccca

SEQ ID NO: 1055824 - DNA, 15 bp, Homo sapiens
cacgatcgccagccc

SEQ ID NO: 1055825 - DNA, 15 bp, Homo sapiens
acacgatcgccagcc

SEQ ID NO: 1055826 - DNA, 15 bp, Homo sapiens
gacacgatcgccagc

SEQ ID NO: 1055827 - DNA, 15 bp, Homo sapiens
agacacgatcgccag

SEQ ID NO: 1055828 - DNA, 15 bp, Homo sapiens
cagacacgatcgcca

SEQ ID NO: 1055829 - DNA, 15 bp, Homo sapiens
gcagacacgatcgcc

SEQ ID NO: 1055830 - DNA, 15 bp, Homo sapiens
agcagacacgatcgc

SEQ ID NO: 1055831 - DNA, 15 bp, Homo sapiens
gagcagacacgatcg

SEQ ID NO: 1055832 - DNA, 15 bp, Homo sapiens
agagcagacacgatc

SEQ ID NO: 1055833 - DNA, 15 bp, Homo sapiens
cagagcagacacgat

SEQ ID NO: 1055834 - DNA, 15 bp, Homo sapiens
acagagcagacacga

SEQ ID NO: 1055835 - DNA, 15 bp, Homo sapiens
aacagagcagacacg

SEQ ID NO: 1055836 - DNA, 15 bp, Homo sapiens
aaacagagcagacac

SEQ ID NO: 1055837 - DNA, 15 bp, Homo sapiens
gaaacagagcagaca

SEQ ID NO: 1055838 - DNA, 15 bp, Homo sapiens
agaaacagagcagac

SEQ ID NO: 1055839 - DNA, 15 bp, Homo sapiens
cagaaacagagcaga

SEQ ID NO: 1055840 - DNA, 15 bp, Homo sapiens
gcagaaacagagcag

SEQ ID NO: 1055841 - DNA, 15 bp, Homo sapiens
agcagaaacagagca

SEQ ID NO: 1055842 - DNA, 15 bp, Homo sapiens
gagcagaaacagagc

SEQ ID NO: 1055843 - DNA, 15 bp, Homo sapiens
agagcagaaacagag

SEQ ID NO: 1055844 - DNA, 15 bp, Homo sapiens
cagagcagaaacaga

SEQ ID NO: 1055845 - DNA, 15 bp, Homo sapiens
ccagagcagaaacag

SEQ ID NO: 1055846 - DNA, 15 bp, Homo sapiens
tccagagcagaaaca

SEQ ID NO: 1055847 - DNA, 15 bp, Homo sapiens
atccagagcagaaac

SEQ ID NO: 1055848 - DNA, 15 bp, Homo sapiens
aatccagagcagaaa

SEQ ID NO: 1055849 - DNA, 15 bp, Homo sapiens
caatccagagcagaa

SEQ ID NO: 1055850 - DNA, 15 bp, Homo sapiens
gcaatccagagcaga

SEQ ID NO: 1055851 - DNA, 15 bp, Homo sapiens
agcaatccagagcag

SEQ ID NO: 1055852 - DNA, 15 bp, Homo sapiens
cagcaatccagagca

SEQ ID NO: 1055853 - DNA, 15 bp, Homo sapiens
ccagcaatccagagc

SEQ ID NO: 1055854 - DNA, 15 bp, Homo sapiens
cccagcaatccagag

SEQ ID NO: 1055855 - DNA, 15 bp, Homo sapiens
tcccagcaatccaga

SEQ ID NO: 1055856 - DNA, 15 bp, Homo sapiens
ttcccagcaatccag

SEQ ID NO: 1055857 - DNA, 15 bp, Homo sapiens
gttcccagcaatcca

SEQ ID NO: 1055858 - DNA, 15 bp, Homo sapiens
agttcccagcaatcc

SEQ ID NO: 1055859 - DNA, 15 bp, Homo sapiens
gagttcccagcaatc

SEQ ID NO: 1055860 - DNA, 15 bp, Homo sapiens
ggagttcccagcaat

SEQ ID NO: 1055861 - DNA, 15 bp, Homo sapiens
gggagttcccagcaa

SEQ ID NO: 1055862 - DNA, 15 bp, Homo sapiens
ggggagttcccagca

SEQ ID NO: 1055863 - DNA, 15 bp, Homo sapiens
gggggagttcccagc

SEQ ID NO: 1055864 - DNA, 15 bp, Homo sapiens
cgggggagttcccag

SEQ ID NO: 1055865 - DNA, 15 bp, Homo sapiens
acgggggagttccca

SEQ ID NO: 1055866 - DNA, 15 bp, Homo sapiens
cacgggggagttccc

SEQ ID NO: 1055867 - DNA, 15 bp, Homo sapiens
tcacgggggagttcc

SEQ ID NO: 1055868 - DNA, 15 bp, Homo sapiens
gtcacgggggagttc

SEQ ID NO: 1055869 - DNA, 15 bp, Homo sapiens
tgtcacgggggagtt

SEQ ID NO: 1055870 - DNA, 15 bp, Homo sapiens
ttgtcacgggggagt

SEQ ID NO: 1055871 - DNA, 15 bp, Homo sapiens
gttgtcacgggggag

SEQ ID NO: 1055872 - DNA, 15 bp, Homo sapiens
ggttgtcacggggga

SEQ ID NO: 1055873 - DNA, 15 bp, Homo sapiens
tggttgtcacggggg

SEQ ID NO: 1055874 - DNA, 15 bp, Homo sapiens
ctggttgtcacgggg

SEQ ID NO: 1055875 - DNA, 15 bp, Homo sapiens
gctggttgtcacggg

SEQ ID NO: 1055876 - DNA, 15 bp, Homo sapiens
tgctggttgtcacgg

SEQ ID NO: 1055877 - DNA, 15 bp, Homo sapiens
gtgctggttgtcacg

SEQ ID NO: 1055878 - DNA, 15 bp, Homo sapiens
agtgctggttgtcac

SEQ ID NO: 1055879 - DNA, 15 bp, Homo sapiens
aagtgctggttgtca

SEQ ID NO: 1055880 - DNA, 15 bp, Homo sapiens
aaagtgctggttgtc

SEQ ID NO: 1055881 - DNA, 15 bp, Homo sapiens
taaagtgctggttgt

SEQ ID NO: 1055882 - DNA, 15 bp, Homo sapiens
ttaaagtgctggttg

SEQ ID NO: 1055883 - DNA, 15 bp, Homo sapiens
tttaaagtgctggtt

SEQ ID NO: 1055884 - DNA, 15 bp, Homo sapiens
gtttaaagtgctggt

SEQ ID NO: 1055885 - DNA, 15 bp, Homo sapiens
cgtttaaagtgctgg

SEQ ID NO: 1055886 - DNA, 15 bp, Homo sapiens
gcgtttaaagtgctg

SEQ ID NO: 1055887 - DNA, 15 bp, Homo sapiens
agcgtttaaagtgct

SEQ ID NO: 1055888 - DNA, 15 bp, Homo sapiens
aagcgtttaaagtgc

SEQ ID NO: 1055889 - DNA, 15 bp, Homo sapiens
aaagcgtttaaagtg

SEQ ID NO: 1055890 - DNA, 15 bp, Homo sapiens
aaaagcgtttaaagt

SEQ ID NO: 1055891 - DNA, 15 bp, Homo sapiens
taaaagcgtttaaag

SEQ ID NO: 1055892 - DNA, 15 bp, Homo sapiens
ttaaaagcgtttaaa

SEQ ID NO: 1055893 - DNA, 15 bp, Homo sapiens
tttaaaagcgtttaa

SEQ ID NO: 1055894 - DNA, 15 bp, Homo sapiens
ctttaaaagcgttta

SEQ ID NO: 1055895 - DNA, 15 bp, Homo sapiens
gctttaaaagcgttt

SEQ ID NO: 1055896 - DNA, 15 bp, Homo sapiens
ggctttaaaagcgtt

SEQ ID NO: 1055897 - DNA, 15 bp, Homo sapiens
aggctttaaaagcgt

SEQ ID NO: 1055898 - DNA, 15 bp, Homo sapiens
aaggctttaaaagcg

SEQ ID NO: 1055899 - DNA, 15 bp, Homo sapiens
gaaggctttaaaagc

SEQ ID NO: 1055900 - DNA, 15 bp, Homo sapiens
tgaaggctttaaaag

SEQ ID NO: 1055901 - DNA, 15 bp, Homo sapiens
ttgaaggctttaaaa

SEQ ID NO: 1055902 - DNA, 15 bp, Homo sapiens
tttgaaggctttaaa

SEQ ID NO: 1055903 - DNA, 15 bp, Homo sapiens
gtttgaaggctttaa

SEQ ID NO: 1055904 - DNA, 15 bp, Homo sapiens
tgtttgaaggcttta

SEQ ID NO: 1055905 - DNA, 15 bp, Homo sapiens
gtgtttgaaggcttt

SEQ ID NO: 1055906 - DNA, 15 bp, Homo sapiens
agtgtttgaaggctt

SEQ ID NO: 1055907 - DNA, 15 bp, Homo sapiens
aagtgtttgaaggct

SEQ ID NO: 1055908 - DNA, 15 bp, Homo sapiens
aaagtgtttgaaggc

SEQ ID NO: 1055909 - DNA, 15 bp, Homo sapiens
taaagtgtttgaagg

SEQ ID NO: 1055910 - DNA, 15 bp, Homo sapiens
ataaagtgtttgaag

SEQ ID NO: 1055911 - DNA, 15 bp, Homo sapiens
aataaagtgtttgaa

SEQ ID NO: 1055912 - DNA, 15 bp, Homo sapiens
caataaagtgtttga

SEQ ID NO: 1055913 - DNA, 15 bp, Homo sapiens
acaataaagtgtttg

SEQ ID NO: 1055914 - DNA, 15 bp, Homo sapiens
aacaataaagtgttt

SEQ ID NO: 1055915 - DNA, 15 bp, Homo sapiens
aaacaataaagtgtt

SEQ ID NO: 1055916 - DNA, 15 bp, Homo sapiens
aaaacaataaagtgt

SEQ ID NO: 1055917 - DNA, 15 bp, Homo sapiens
aaaaacaataaagtg

SEQ ID NO: 1055918 - DNA, 15 bp, Homo sapiens
ggaaaaacaataaag

SEQ ID NO: 1055919 - DNA, 15 bp, Homo sapiens
tggaaaaacaataaa

SEQ ID NO: 1055920 - DNA, 15 bp, Homo sapiens
ctggaaaaacaataa

SEQ ID NO: 1055921 - DNA, 15 bp, Homo sapiens
tctggaaaaacaata

SEQ ID NO: 1055922 - DNA, 15 bp, Homo sapiens
gtctggaaaaacaat

SEQ ID NO: 1055923 - DNA, 15 bp, Homo sapiens
agtctggaaaaacaa

SEQ ID NO: 1055924 - DNA, 15 bp, Homo sapiens
cagtctggaaaaaca

SEQ ID NO: 1055925 - DNA, 15 bp, Homo sapiens
tcagtctggaaaaac

SEQ ID NO: 1055926 - DNA, 15 bp, Homo sapiens
gtcagtctggaaaaa

SEQ ID NO: 1055927 - DNA, 15 bp, Homo sapiens
agtcagtctggaaaa

SEQ ID NO: 1055928 - DNA, 15 bp, Homo sapiens
aagtcagtctggaaa

SEQ ID NO: 1055929 - DNA, 15 bp, Homo sapiens
gaagtcagtctggaa

SEQ ID NO: 1055930 - DNA, 15 bp, Homo sapiens
ggaagtcagtctgga

SEQ ID NO: 1055931 - DNA, 15 bp, Homo sapiens
tggaagtcagtctgg

SEQ ID NO: 1055932 - DNA, 15 bp, Homo sapiens
ctggaagtcagtctg

SEQ ID NO: 1055933 - DNA, 15 bp, Homo sapiens
actggaagtcagtct

SEQ ID NO: 1055934 - DNA, 15 bp, Homo sapiens
cactggaagtcagtc

SEQ ID NO: 1055935 - DNA, 15 bp, Homo sapiens
ccactggaagtcagt

SEQ ID NO: 1055936 - DNA, 15 bp, Homo sapiens
tccactggaagtcag

SEQ ID NO: 1055937 - DNA, 15 bp, Homo sapiens
atccactggaagtca

SEQ ID NO: 1055938 - DNA, 15 bp, Homo sapiens
catccactggaagtc

SEQ ID NO: 1055939 - DNA, 15 bp, Homo sapiens
acatccactggaagt

SEQ ID NO: 1055940 - DNA, 15 bp, Homo sapiens
aacatccactggaag

SEQ ID NO: 1055941 - DNA, 15 bp, Homo sapiens
gaacatccactggaa

SEQ ID NO: 1055942 - DNA, 15 bp, Homo sapiens
agaacatccactgga

SEQ ID NO: 1055943 - DNA, 15 bp, Homo sapiens
cagaacatccactgg

SEQ ID NO: 1055944 - DNA, 15 bp, Homo sapiens
acagaacatccactg

SEQ ID NO: 1055945 - DNA, 15 bp, Homo sapiens
cacagaacatccact

SEQ ID NO: 1055946 - DNA, 15 bp, Homo sapiens
gcacagaacatccac

SEQ ID NO: 1055947 - DNA, 15 bp, Homo sapiens
agcacagaacatcca

SEQ ID NO: 1055948 - DNA, 15 bp, Homo sapiens
aagcacagaacatcc

SEQ ID NO: 1055949 - DNA, 15 bp, Homo sapiens
taagcacagaacatc

SEQ ID NO: 1055950 - DNA, 15 bp, Homo sapiens
ctaagcacagaacat

SEQ ID NO: 1055951 - DNA, 15 bp, Homo sapiens
cctaagcacagaaca

SEQ ID NO: 1055952 - DNA, 15 bp, Homo sapiens
tcctaagcacagaac

SEQ ID NO: 1055953 - DNA, 15 bp, Homo sapiens
ctcctaagcacagaa

SEQ ID NO: 1055954 - DNA, 15 bp, Homo sapiens
cctcctaagcacaga

SEQ ID NO: 1055955 - DNA, 15 bp, Homo sapiens
tcctcctaagcacag

SEQ ID NO: 1055956 - DNA, 15 bp, Homo sapiens
ttcctcctaagcaca

SEQ ID NO: 1055957 - DNA, 15 bp, Homo sapiens
cttcctcctaagcac

SEQ ID NO: 1055958 - DNA, 15 bp, Homo sapiens
ccttcctcctaagca

SEQ ID NO: 1055959 - DNA, 15 bp, Homo sapiens
gccttcctcctaagc

SEQ ID NO: 1055960 - DNA, 15 bp, Homo sapiens
ggccttcctcctaag

SEQ ID NO: 1055961 - DNA, 15 bp, Homo sapiens
tggccttcctcctaa

SEQ ID NO: 1055962 - DNA, 15 bp, Homo sapiens
ctggccttcctccta

SEQ ID NO: 1055963 - DNA, 15 bp, Homo sapiens
actggccttcctcct

SEQ ID NO: 1055964 - DNA, 15 bp, Homo sapiens
cactggccttcctcc

SEQ ID NO: 1055965 - DNA, 15 bp, Homo sapiens
cacacagccagagag

SEQ ID NO: 1055966 - DNA, 15 bp, Homo sapiens
tcacacagccagaga

SEQ ID NO: 1055967 - DNA, 15 bp, Homo sapiens
atcacacagccagag

SEQ ID NO: 1055968 - DNA, 15 bp, Homo sapiens
gatcacacagccaga

SEQ ID NO: 1055969 - DNA, 15 bp, Homo sapiens
ggatcacacagccag

SEQ ID NO: 1055970 - DNA, 15 bp, Homo sapiens
aggatcacacagcca

SEQ ID NO: 1055971 - DNA, 15 bp, Homo sapiens
caggatcacacagcc

SEQ ID NO: 1055972 - DNA, 15 bp, Homo sapiens
ccaggatcacacagc

SEQ ID NO: 1055973 - DNA, 15 bp, Homo sapiens
cccaggatcacacag

SEQ ID NO: 1055974 - DNA, 15 bp, Homo sapiens
tcccaggatcacaca

SEQ ID NO: 1055975 - DNA, 15 bp, Homo sapiens
ttcccaggatcacac

SEQ ID NO: 1055976 - DNA, 15 bp, Homo sapiens
tttcccaggatcaca

SEQ ID NO: 1055977 - DNA, 15 bp, Homo sapiens
ttttcccaggatcac

SEQ ID NO: 1055978 - DNA, 15 bp, Homo sapiens
attttcccaggatca

SEQ ID NO: 1055979 - DNA, 15 bp, Homo sapiens
cattttcccaggatc

SEQ ID NO: 1055980 - DNA, 15 bp, Homo sapiens
tcattttcccaggat

SEQ ID NO: 1055981 - DNA, 15 bp, Homo sapiens
atcattttcccagga

SEQ ID NO: 1055982 - DNA, 15 bp, Homo sapiens
tatcattttcccagg

SEQ ID NO: 1055983 - DNA, 15 bp, Homo sapiens
atatcattttcccag

SEQ ID NO: 1055984 - DNA, 15 bp, Homo sapiens
catatcattttccca

SEQ ID NO: 1055985 - DNA, 15 bp, Homo sapiens
tcatatcattttccc

SEQ ID NO: 1055986 - DNA, 15 bp, Homo sapiens
gtcatatcattttcc

SEQ ID NO: 1055987 - DNA, 15 bp, Homo sapiens
agtcatatcattttc

SEQ ID NO: 1055988 - DNA, 15 bp, Homo sapiens
aagtcatatcatttt

SEQ ID NO: 1055989 - DNA, 15 bp, Homo sapiens
gaagtcatatcattt

SEQ ID NO: 1055990 - DNA, 15 bp, Homo sapiens
cgaagtcatatcatt

SEQ ID NO: 1055991 - DNA, 15 bp, Homo sapiens
gcgaagtcatatcat

SEQ ID NO: 1055992 - DNA, 15 bp, Homo sapiens
agcgaagtcatatca

SEQ ID NO: 1055993 - DNA, 15 bp, Homo sapiens
cagcgaagtcatatc

SEQ ID NO: 1055994 - DNA, 15 bp, Homo sapiens
tcagcgaagtcatat

SEQ ID NO: 1055995 - DNA, 15 bp, Homo sapiens
ctcagcgaagtcata

SEQ ID NO: 1055996 - DNA, 15 bp, Homo sapiens
actcagcgaagtcat

SEQ ID NO: 1055997 - DNA, 15 bp, Homo sapiens
cactcagcgaagtca

SEQ ID NO: 1055998 - DNA, 15 bp, Homo sapiens
acactcagcgaagtc

SEQ ID NO: 1055999 - DNA, 15 bp, Homo sapiens
aacactcagcgaagt

SEQ ID NO: 1056000 - DNA, 15 bp, Homo sapiens
caacactcagcgaag

SEQ ID NO: 1056001 - DNA, 15 bp, Homo sapiens
gcaacactcagcgaa

SEQ ID NO: 1056002 - DNA, 15 bp, Homo sapiens
agcaacactcagcga

SEQ ID NO: 1056003 - DNA, 15 bp, Homo sapiens
gagcaacactcagcg

SEQ ID NO: 1056004 - DNA, 15 bp, Homo sapiens
ggagcaacactcagc

SEQ ID NO: 1056005 - DNA, 15 bp, Homo sapiens
aggagcaacactcag

SEQ ID NO: 1056006 - DNA, 15 bp, Homo sapiens
aaggagcaacactca

SEQ ID NO: 1056007 - DNA, 15 bp, Homo sapiens
aaaggagcaacactc

SEQ ID NO: 1056008 - DNA, 15 bp, Homo sapiens
gaaaggagcaacact

SEQ ID NO: 1056009 - DNA, 15 bp, Homo sapiens
tgaaaggagcaacac

SEQ ID NO: 1056010 - DNA, 15 bp, Homo sapiens
atgaaaggagcaaca

SEQ ID NO: 1056011 - DNA, 15 bp, Homo sapiens
gatgaaaggagcaac

SEQ ID NO: 1056012 - DNA, 15 bp, Homo sapiens
agatgaaaggagcaa

SEQ ID NO: 1056013 - DNA, 15 bp, Homo sapiens
cagatgaaaggagca

SEQ ID NO: 1056014 - DNA, 15 bp, Homo sapiens
acagatgaaaggagc

SEQ ID NO: 1056015 - DNA, 15 bp, Homo sapiens
tacagatgaaaggag

SEQ ID NO: 1056016 - DNA, 15 bp, Homo sapiens
ttacagatgaaagga

SEQ ID NO: 1056017 - DNA, 15 bp, Homo sapiens
tttacagatgaaagg

SEQ ID NO: 1056018 - DNA, 15 bp, Homo sapiens
ttttacagatgaaag

SEQ ID NO: 1056019 - DNA, 15 bp, Homo sapiens
tttttacagatgaaa

SEQ ID NO: 1056020 - DNA, 15 bp, Homo sapiens
ctttttacagatgaa

SEQ ID NO: 1056021 - DNA, 15 bp, Homo sapiens
cctttttacagatga

SEQ ID NO: 1056022 - DNA, 15 bp, Homo sapiens
tcctttttacagatg

SEQ ID NO: 1056023 - DNA, 15 bp, Homo sapiens
ttcctttttacagat

SEQ ID NO: 1056024 - DNA, 15 bp, Homo sapiens
attcctttttacaga

SEQ ID NO: 1056025 - DNA, 15 bp, Homo sapiens
tattcctttttacag

SEQ ID NO: 1056026 - DNA, 15 bp, Homo sapiens
ttattcctttttaca

SEQ ID NO: 1056027 - DNA, 15 bp, Homo sapiens
cttattcctttttac

SEQ ID NO: 1056028 - DNA, 15 bp, Homo sapiens
ccttattccttttta

SEQ ID NO: 1056029 - DNA, 15 bp, Homo sapiens
cccttattccttttt

SEQ ID NO: 1056030 - DNA, 15 bp, Homo sapiens
tcccttattcctttt

SEQ ID NO: 1056031 - DNA, 15 bp, Homo sapiens
ttcccttattccttt

SEQ ID NO: 1056032 - DNA, 15 bp, Homo sapiens
attcccttattcctt

SEQ ID NO: 1056033 - DNA, 15 bp, Homo sapiens
cattcccttattcct

SEQ ID NO: 1056034 - DNA, 15 bp, Homo sapiens
gcattcccttattcc

SEQ ID NO: 1056035 - DNA, 15 bp, Homo sapiens
agcattcccttattc

SEQ ID NO: 1056036 - DNA, 15 bp, Homo sapiens
cagcattcccttatt

SEQ ID NO: 1056037 - DNA, 15 bp, Homo sapiens
ccagcattcccttat

SEQ ID NO: 1056038 - DNA, 15 bp, Homo sapiens
gccagcattccctta

SEQ ID NO: 1056039 - DNA, 15 bp, Homo sapiens
agccagcattccctt

SEQ ID NO: 1056040 - DNA, 15 bp, Homo sapiens
gagccagcattccct

SEQ ID NO: 1056041 - DNA, 15 bp, Homo sapiens
agagccagcattccc

SEQ ID NO: 1056042 - DNA, 15 bp, Homo sapiens
cagagccagcattcc

SEQ ID NO: 1056043 - DNA, 15 bp, Homo sapiens
acagagccagcattc

SEQ ID NO: 1056044 - DNA, 15 bp, Homo sapiens
tacagagccagcatt

SEQ ID NO: 1056045 - DNA, 15 bp, Homo sapiens
atacagagccagcat

SEQ ID NO: 1056046 - DNA, 15 bp, Homo sapiens
catacagagccagca

SEQ ID NO: 1056047 - DNA, 15 bp, Homo sapiens
ccatacagagccagc

SEQ ID NO: 1056048 - DNA, 15 bp, Homo sapiens
gccatacagagccag

SEQ ID NO: 1056049 - DNA, 15 bp, Homo sapiens
agccatacagagcca

SEQ ID NO: 1056050 - DNA, 15 bp, Homo sapiens
aagccatacagagcc

SEQ ID NO: 1056051 - DNA, 15 bp, Homo sapiens
taagccatacagagc

SEQ ID NO: 1056052 - DNA, 15 bp, Homo sapiens
ataagccatacagag

SEQ ID NO: 1056053 - DNA, 15 bp, Homo sapiens
cataagccatacaga

SEQ ID NO: 1056054 - DNA, 15 bp, Homo sapiens
gcataagccatacag

SEQ ID NO: 1056055 - DNA, 15 bp, Homo sapiens
tgcataagccataca

SEQ ID NO: 1056056 - DNA, 15 bp, Homo sapiens
ttgcataagccatac

SEQ ID NO: 1056057 - DNA, 15 bp, Homo sapiens
cttgcataagccata

SEQ ID NO: 1056058 - DNA, 15 bp, Homo sapiens
ccttgcataagccat

SEQ ID NO: 1056059 - DNA, 15 bp, Homo sapiens
tccttgcataagcca

SEQ ID NO: 1056060 - DNA, 15 bp, Homo sapiens
atccttgcataagcc

SEQ ID NO: 1056061 - DNA, 15 bp, Homo sapiens
aatccttgcataagc

SEQ ID NO: 1056062 - DNA, 15 bp, Homo sapiens
taatccttgcataag

SEQ ID NO: 1056063 - DNA, 15 bp, Homo sapiens
ttaatccttgcataa

SEQ ID NO: 1056064 - DNA, 15 bp, Homo sapiens
cttaatccttgcata

SEQ ID NO: 1056065 - DNA, 15 bp, Homo sapiens
acttaatccttgcat

SEQ ID NO: 1056066 - DNA, 15 bp, Homo sapiens
cacttaatccttgca

SEQ ID NO: 1056067 - DNA, 15 bp, Homo sapiens
tcacttaatccttgc

SEQ ID NO: 1056068 - DNA, 15 bp, Homo sapiens
ctcacttaatccttg

SEQ ID NO: 1056069 - DNA, 15 bp, Homo sapiens
tctcacttaatcctt

SEQ ID NO: 1056070 - DNA, 15 bp, Homo sapiens
ttctcacttaatcct

SEQ ID NO: 1056071 - DNA, 15 bp, Homo sapiens
tttctcacttaatcc

SEQ ID NO: 1056072 - DNA, 15 bp, Homo sapiens
ttttctcacttaatc

SEQ ID NO: 1056073 - DNA, 15 bp, Homo sapiens
attttctcacttaat

SEQ ID NO: 1056074 - DNA, 15 bp, Homo sapiens
tattttctcacttaa

SEQ ID NO: 1056075 - DNA, 15 bp, Homo sapiens
ctattttctcactta

SEQ ID NO: 1056076 - DNA, 15 bp, Homo sapiens
tctattttctcactt

SEQ ID NO: 1056077 - DNA, 15 bp, Homo sapiens
atctattttctcact

SEQ ID NO: 1056078 - DNA, 15 bp, Homo sapiens
catctattttctcac

SEQ ID NO: 1056079 - DNA, 15 bp, Homo sapiens
ccatctattttctca

SEQ ID NO: 1056080 - DNA, 15 bp, Homo sapiens
tccatctattttctc

SEQ ID NO: 1056081 - DNA, 15 bp, Homo sapiens
ttccatctattttct

SEQ ID NO: 1056082 - DNA, 15 bp, Homo sapiens
tttccatctattttc

SEQ ID NO: 1056083 - DNA, 15 bp, Homo sapiens
ctttccatctatttt

SEQ ID NO: 1056084 - DNA, 15 bp, Homo sapiens
gctttccatctattt

SEQ ID NO: 1056085 - DNA, 15 bp, Homo sapiens
cgctttccatctatt

SEQ ID NO: 1056086 - DNA, 15 bp, Homo sapiens
acgctttccatctat

SEQ ID NO: 1056087 - DNA, 15 bp, Homo sapiens
gacgctttccatcta

SEQ ID NO: 1056088 - DNA, 15 bp, Homo sapiens
agacgctttccatct

SEQ ID NO: 1056089 - DNA, 15 bp, Homo sapiens
cagacgctttccatc

SEQ ID NO: 1056090 - DNA, 15 bp, Homo sapiens
ccagacgctttccat

SEQ ID NO: 1056091 - DNA, 15 bp, Homo sapiens
gccagacgctttcca

SEQ ID NO: 1056092 - DNA, 15 bp, Homo sapiens
tgccagacgctttcc

SEQ ID NO: 1056093 - DNA, 15 bp, Homo sapiens
gtgccagacgctttc

SEQ ID NO: 1056094 - DNA, 15 bp, Homo sapiens
tgtgccagacgcttt

SEQ ID NO: 1056095 - DNA, 15 bp, Homo sapiens
gtgtgccagacgctt

SEQ ID NO: 1056096 - DNA, 15 bp, Homo sapiens
ggtgtgccagacgct

SEQ ID NO: 1056097 - DNA, 15 bp, Homo sapiens
cggtgtgccagacgc

SEQ ID NO: 1056098 - DNA, 15 bp, Homo sapiens
acggtgtgccagacg

SEQ ID NO: 1056099 - DNA, 15 bp, Homo sapiens
cacggtgtgccagac

SEQ ID NO: 1056100 - DNA, 15 bp, Homo sapiens
gcacggtgtgccaga

SEQ ID NO: 1056101 - DNA, 15 bp, Homo sapiens
tgcacggtgtgccag

SEQ ID NO: 1056102 - DNA, 15 bp, Homo sapiens
atgcacggtgtgcca

SEQ ID NO: 1056103 - DNA, 15 bp, Homo sapiens
catgcacggtgtgcc

SEQ ID NO: 1056104 - DNA, 15 bp, Homo sapiens
acatgcacggtgtgc

SEQ ID NO: 1056105 - DNA, 15 bp, Homo sapiens
aacatgcacggtgtg

SEQ ID NO: 1056106 - DNA, 15 bp, Homo sapiens
gaacatgcacggtgt

SEQ ID NO: 1056107 - DNA, 15 bp, Homo sapiens
tgaacatgcacggtg

SEQ ID NO: 1056108 - DNA, 15 bp, Homo sapiens
ctgaacatgcacggt

SEQ ID NO: 1056109 - DNA, 15 bp, Homo sapiens
cctgaacatgcacgg

SEQ ID NO: 1056110 - DNA, 15 bp, Homo sapiens
ccctgaacatgcacg

SEQ ID NO: 1056111 - DNA, 15 bp, Homo sapiens
tccctgaacatgcac

SEQ ID NO: 1056112 - DNA, 15 bp, Homo sapiens
ctccctgaacatgca

SEQ ID NO: 1056113 - DNA, 15 bp, Homo sapiens
gctccctgaacatgc

SEQ ID NO: 1056114 - DNA, 15 bp, Homo sapiens
tgctccctgaacatg

SEQ ID NO: 1056115 - DNA, 15 bp, Homo sapiens
gtgctccctgaacat

SEQ ID NO: 1056116 - DNA, 15 bp, Homo sapiens
agtgctccctgaaca

SEQ ID NO: 1056117 - DNA, 15 bp, Homo sapiens
cagtgctccctgaac

SEQ ID NO: 1056118 - DNA, 15 bp, Homo sapiens
gcagtgctccctgaa

SEQ ID NO: 1056119 - DNA, 15 bp, Homo sapiens
cgcagtgctccctga

SEQ ID NO: 1056120 - DNA, 15 bp, Homo sapiens
acgcagtgctccctg

SEQ ID NO: 1056121 - DNA, 15 bp, Homo sapiens
gacgcagtgctccct

SEQ ID NO: 1056122 - DNA, 15 bp, Homo sapiens
ggacgcagtgctccc

SEQ ID NO: 1056123 - DNA, 15 bp, Homo sapiens
gggacgcagtgctcc

SEQ ID NO: 1056124 - DNA, 15 bp, Homo sapiens
ggggacgcagtgctc

SEQ ID NO: 1056125 - DNA, 15 bp, Homo sapiens
tggggacgcagtgct

SEQ ID NO: 1056126 - DNA, 15 bp, Homo sapiens
gtggggacgcagtgc

SEQ ID NO: 1056127 - DNA, 15 bp, Homo sapiens
ggtggggacgcagtg

SEQ ID NO: 1056128 - DNA, 15 bp, Homo sapiens
tggtggggacgcagt

SEQ ID NO: 1056129 - DNA, 15 bp, Homo sapiens
gtggtggggacgcag

SEQ ID NO: 1056130 - DNA, 15 bp, Homo sapiens
ggtggtggggacgca

SEQ ID NO: 1056131 - DNA, 15 bp, Homo sapiens
tggtggtggggacgc

SEQ ID NO: 1056132 - DNA, 15 bp, Homo sapiens
gtggtggtggggacg

SEQ ID NO: 1056133 - DNA, 15 bp, Homo sapiens
ggtggtggtggggac

SEQ ID NO: 1056134 - DNA, 15 bp, Homo sapiens
aggtggtggtgggga

SEQ ID NO: 1056135 - DNA, 15 bp, Homo sapiens
aaggtggtggtgggg

SEQ ID NO: 1056136 - DNA, 15 bp, Homo sapiens
gaaggtggtggtggg

SEQ ID NO: 1056137 - DNA, 15 bp, Homo sapiens
tgaaggtggtggtgg

SEQ ID NO: 1056138 - DNA, 15 bp, Homo sapiens
atgaaggtggtggtg

SEQ ID NO: 1056139 - DNA, 15 bp, Homo sapiens
gatgaaggtggtggt

SEQ ID NO: 1056140 - DNA, 15 bp, Homo sapiens
tgatgaaggtggtgg

SEQ ID NO: 1056141 - DNA, 15 bp, Homo sapiens
atgatgaaggtggtg

SEQ ID NO: 1056142 - DNA, 15 bp, Homo sapiens
catgatgaaggtggt

SEQ ID NO: 1056143 - DNA, 15 bp, Homo sapiens
ccatgatgaaggtgg

SEQ ID NO: 1056144 - DNA, 15 bp, Homo sapiens
gccatgatgaaggtg

SEQ ID NO: 1056145 - DNA, 15 bp, Homo sapiens
ggccatgatgaaggt

SEQ ID NO: 1056146 - DNA, 15 bp, Homo sapiens
aggccatgatgaagg

SEQ ID NO: 1056147 - DNA, 15 bp, Homo sapiens
caggccatgatgaag

SEQ ID NO: 1056148 - DNA, 15 bp, Homo sapiens
acaggccatgatgaa

SEQ ID NO: 1056149 - DNA, 15 bp, Homo sapiens
aacaggccatgatga

SEQ ID NO: 1056150 - DNA, 15 bp, Homo sapiens
aaacaggccatgatg

SEQ ID NO: 1056151 - DNA, 15 bp, Homo sapiens
taaacaggccatgat

SEQ ID NO: 1056152 - DNA, 15 bp, Homo sapiens
gtaaacaggccatga

SEQ ID NO: 1056153 - DNA, 15 bp, Homo sapiens
ggtaaacaggccatg

SEQ ID NO: 1056154 - DNA, 15 bp, Homo sapiens
gggtaaacaggccat

SEQ ID NO: 1056155 - DNA, 15 bp, Homo sapiens
agggtaaacaggcca

SEQ ID NO: 1056156 - DNA, 15 bp, Homo sapiens
cagggtaaacaggcc

SEQ ID NO: 1056157 - DNA, 15 bp, Homo sapiens
tcagggtaaacaggc

SEQ ID NO: 1056158 - DNA, 15 bp, Homo sapiens
atcagggtaaacagg

SEQ ID NO: 1056159 - DNA, 15 bp, Homo sapiens
catcagggtaaacag

SEQ ID NO: 1056160 - DNA, 15 bp, Homo sapiens
acatcagggtaaaca

SEQ ID NO: 1056161 - DNA, 15 bp, Homo sapiens
cacatcagggtaaac

SEQ ID NO: 1056162 - DNA, 15 bp, Homo sapiens
gcacatcagggtaaa

SEQ ID NO: 1056163 - DNA, 15 bp, Homo sapiens
agcacatcagggtaa

SEQ ID NO: 1056164 - DNA, 15 bp, Homo sapiens
cagcacatcagggta

SEQ ID NO: 1056165 - DNA, 15 bp, Homo sapiens
ccagcacatcagggt

SEQ ID NO: 1056166 - DNA, 15 bp, Homo sapiens
gccagcacatcaggg

SEQ ID NO: 1056167 - DNA, 15 bp, Homo sapiens
tgccagcacatcagg

SEQ ID NO: 1056168 - DNA, 15 bp, Homo sapiens
atgccagcacatcag

SEQ ID NO: 1056169 - DNA, 15 bp, Homo sapiens
gatgccagcacatca

SEQ ID NO: 1056170 - DNA, 15 bp, Homo sapiens
cgatgccagcacatc

SEQ ID NO: 1056171 - DNA, 15 bp, Homo sapiens
ccgatgccagcacat

SEQ ID NO: 1056172 - DNA, 15 bp, Homo sapiens
cccgatgccagcaca

SEQ ID NO: 1056173 - DNA, 15 bp, Homo sapiens
tcccgatgccagcac

SEQ ID NO: 1056174 - DNA, 15 bp, Homo sapiens
ttcccgatgccagca

SEQ ID NO: 1056175 - DNA, 15 bp, Homo sapiens
cttcccgatgccagc

SEQ ID NO: 1056176 - DNA, 15 bp, Homo sapiens
ccttcccgatgccag

SEQ ID NO: 1056177 - DNA, 15 bp, Homo sapiens
accttcccgatgcca

SEQ ID NO: 1056178 - DNA, 15 bp, Homo sapiens
caccttcccgatgcc

SEQ ID NO: 1056179 - DNA, 15 bp, Homo sapiens
ccaccttcccgatgc

SEQ ID NO: 1056180 - DNA, 15 bp, Homo sapiens
cccaccttcccgatg

SEQ ID NO: 1056181 - DNA, 15 bp, Homo sapiens
ccccaccttcccgat

SEQ ID NO: 1056182 - DNA, 15 bp, Homo sapiens
cccccaccttcccga

SEQ ID NO: 1056183 - DNA, 15 bp, Homo sapiens
tcccccaccttcccg

SEQ ID NO: 1056184 - DNA, 15 bp, Homo sapiens
ctcccccaccttccc

SEQ ID NO: 1056185 - DNA, 15 bp, Homo sapiens
gctcccccaccttcc

SEQ ID NO: 1056186 - DNA, 15 bp, Homo sapiens
agctcccccaccttc

SEQ ID NO: 1056187 - DNA, 15 bp, Homo sapiens
gagctcccccacctt

SEQ ID NO: 1056188 - DNA, 15 bp, Homo sapiens
tgagctcccccacct

SEQ ID NO: 1056189 - DNA, 15 bp, Homo sapiens
ctgagctcccccacc

SEQ ID NO: 1056190 - DNA, 15 bp, Homo sapiens
gctgagctcccccac

SEQ ID NO: 1056191 - DNA, 15 bp, Homo sapiens
tgctgagctccccca

SEQ ID NO: 1056192 - DNA, 15 bp, Homo sapiens
ctgctgagctccccc

SEQ ID NO: 1056193 - DNA, 15 bp, Homo sapiens
gctgctgagctcccc

SEQ ID NO: 1056194 - DNA, 15 bp, Homo sapiens
tgctgctgagctccc

SEQ ID NO: 1056195 - DNA, 15 bp, Homo sapiens
gtgctgctgagctcc

SEQ ID NO: 1056196 - DNA, 15 bp, Homo sapiens
tgtgctgctgagctc

SEQ ID NO: 1056197 - DNA, 15 bp, Homo sapiens
ctgtgctgctgagct

SEQ ID NO: 1056198 - DNA, 15 bp, Homo sapiens
cctgtgctgctgagc

SEQ ID NO: 1056199 - DNA, 15 bp, Homo sapiens
gcctgtgctgctgag

SEQ ID NO: 1056200 - DNA, 15 bp, Homo sapiens
ggcctgtgctgctga

SEQ ID NO: 1056201 - DNA, 15 bp, Homo sapiens
aggcctgtgctgctg

SEQ ID NO: 1056202 - DNA, 15 bp, Homo sapiens
caggcctgtgctgct

SEQ ID NO: 1056203 - DNA, 15 bp, Homo sapiens
acaggcctgtgctgc

SEQ ID NO: 1056204 - DNA, 15 bp, Homo sapiens
cacaggcctgtgctg

SEQ ID NO: 1056205 - DNA, 15 bp, Homo sapiens
ccacaggcctgtgct

SEQ ID NO: 1056206 - DNA, 15 bp, Homo sapiens
gccacaggcctgtgc

SEQ ID NO: 1056207 - DNA, 15 bp, Homo sapiens
tgccacaggcctgtg

SEQ ID NO: 1056208 - DNA, 15 bp, Homo sapiens
ctgccacaggcctgt

SEQ ID NO: 1056209 - DNA, 15 bp, Homo sapiens
cctgccacaggcctg

SEQ ID NO: 1056210 - DNA, 15 bp, Homo sapiens
ccctgccacaggcct

SEQ ID NO: 1056211 - DNA, 15 bp, Homo sapiens
accctgccacaggcc

SEQ ID NO: 1056212 - DNA, 15 bp, Homo sapiens
gaccctgccacaggc

SEQ ID NO: 1056213 - DNA, 15 bp, Homo sapiens
tgaccctgccacagg

SEQ ID NO: 1056214 - DNA, 15 bp, Homo sapiens
ctgaccctgccacag

SEQ ID NO: 1056215 - DNA, 15 bp, Homo sapiens
cctgaccctgccaca

SEQ ID NO: 1056216 - DNA, 15 bp, Homo sapiens
gcctgaccctgccac

SEQ ID NO: 1056217 - DNA, 15 bp, Homo sapiens
ggcctgaccctgcca

SEQ ID NO: 1056218 - DNA, 15 bp, Homo sapiens
tggcctgaccctgcc

SEQ ID NO: 1056219 - DNA, 15 bp, Homo sapiens
ctggcctgaccctgc

SEQ ID NO: 1056220 - DNA, 15 bp, Homo sapiens
tctggcctgaccctg

SEQ ID NO: 1056221 - DNA, 15 bp, Homo sapiens
ttctggcctgaccct

SEQ ID NO: 1056222 - DNA, 15 bp, Homo sapiens
tttctggcctgaccc

SEQ ID NO: 1056223 - DNA, 15 bp, Homo sapiens
ctttctggcctgacc

SEQ ID NO: 1056224 - DNA, 15 bp, Homo sapiens
tctttctggcctgac

SEQ ID NO: 1056225 - DNA, 15 bp, Homo sapiens
ctctttctggcctga

SEQ ID NO: 1056226 - DNA, 15 bp, Homo sapiens
gctctttctggcctg

SEQ ID NO: 1056227 - DNA, 15 bp, Homo sapiens
ggctctttctggcct

SEQ ID NO: 1056228 - DNA, 15 bp, Homo sapiens
aggctctttctggcc

SEQ ID NO: 1056229 - DNA, 15 bp, Homo sapiens
gaggctctttctggc

SEQ ID NO: 1056230 - DNA, 15 bp, Homo sapiens
tgaggctctttctgg

SEQ ID NO: 1056231 - DNA, 15 bp, Homo sapiens
ttgaggctctttctg

SEQ ID NO: 1056232 - DNA, 15 bp, Homo sapiens
cttgaggctctttct

SEQ ID NO: 1056233 - DNA, 15 bp, Homo sapiens
ccttgaggctctttc

SEQ ID NO: 1056234 - DNA, 15 bp, Homo sapiens
gccttgaggctcttt

SEQ ID NO: 1056235 - DNA, 15 bp, Homo sapiens
tgccttgaggctctt

SEQ ID NO: 1056236 - DNA, 15 bp, Homo sapiens
ctgccttgaggctct

SEQ ID NO: 1056237 - DNA, 15 bp, Homo sapiens
cctgccttgaggctc

SEQ ID NO: 1056238 - DNA, 15 bp, Homo sapiens
tcctgccttgaggct

SEQ ID NO: 1056239 - DNA, 15 bp, Homo sapiens
ctcctgccttgaggc

SEQ ID NO: 1056240 - DNA, 15 bp, Homo sapiens
tctcctgccttgagg

SEQ ID NO: 1056241 - DNA, 15 bp, Homo sapiens
ttctcctgccttgag

SEQ ID NO: 1056242 - DNA, 15 bp, Homo sapiens
tttctcctgccttga

SEQ ID NO: 1056243 - DNA, 15 bp, Homo sapiens
ctttctcctgccttg

SEQ ID NO: 1056244 - DNA, 15 bp, Homo sapiens
gctttctcctgcctt

SEQ ID NO: 1056245 - DNA, 15 bp, Homo sapiens
tgctttctcctgcct

SEQ ID NO: 1056246 - DNA, 15 bp, Homo sapiens
ctgctttctcctgcc

SEQ ID NO: 1056247 - DNA, 15 bp, Homo sapiens
actgctttctcctgc

SEQ ID NO: 1056248 - DNA, 15 bp, Homo sapiens
gactgctttctcctg

SEQ ID NO: 1056249 - DNA, 15 bp, Homo sapiens
ggactgctttctcct

SEQ ID NO: 1056250 - DNA, 15 bp, Homo sapiens
tggactgctttctcc

SEQ ID NO: 1056251 - DNA, 15 bp, Homo sapiens
ttggactgctttctc

SEQ ID NO: 1056252 - DNA, 15 bp, Homo sapiens
tttggactgctttct

SEQ ID NO: 1056253 - DNA, 15 bp, Homo sapiens
ctttggactgctttc

SEQ ID NO: 1056254 - DNA, 15 bp, Homo sapiens
gctttggactgcttt

SEQ ID NO: 1056255 - DNA, 15 bp, Homo sapiens
ggctttggactgctt

SEQ ID NO: 1056256 - DNA, 15 bp, Homo sapiens
tggctttggactgct

SEQ ID NO: 1056257 - DNA, 15 bp, Homo sapiens
gtggctttggactgc

SEQ ID NO: 1056258 - DNA, 15 bp, Homo sapiens
tgtggctttggactg

SEQ ID NO: 1056259 - DNA, 15 bp, Homo sapiens
ctgtggctttggact

SEQ ID NO: 1056260 - DNA, 15 bp, Homo sapiens
tctgtggctttggac

SEQ ID NO: 1056261 - DNA, 15 bp, Homo sapiens
ctctgtggctttgga

SEQ ID NO: 1056262 - DNA, 15 bp, Homo sapiens
tctctgtggctttgg

SEQ ID NO: 1056263 - DNA, 15 bp, Homo sapiens
ctctctgtggctttg

SEQ ID NO: 1056264 - DNA, 15 bp, Homo sapiens
cctctctgtggcttt

SEQ ID NO: 1056265 - DNA, 15 bp, Homo sapiens
ccctctctgtggctt

SEQ ID NO: 1056266 - DNA, 15 bp, Homo sapiens
tccctctctgtggct

SEQ ID NO: 1056267 - DNA, 15 bp, Homo sapiens
ctccctctctgtggc

SEQ ID NO: 1056268 - DNA, 15 bp, Homo sapiens
cctccctctctgtgg

SEQ ID NO: 1056269 - DNA, 15 bp, Homo sapiens
gcctccctctctgtg

SEQ ID NO: 1056270 - DNA, 15 bp, Homo sapiens
ggcctccctctctgt

SEQ ID NO: 1056271 - DNA, 15 bp, Homo sapiens
tggcctccctctctg

SEQ ID NO: 1056272 - DNA, 15 bp, Homo sapiens
ctggcctccctctct

SEQ ID NO: 1056273 - DNA, 15 bp, Homo sapiens
tctggcctccctctc

SEQ ID NO: 1056274 - DNA, 15 bp, Homo sapiens
gtctggcctccctct

SEQ ID NO: 1056275 - DNA, 15 bp, Homo sapiens
agtctggcctccctc

SEQ ID NO: 1056276 - DNA, 15 bp, Homo sapiens
gagtctggcctccct

SEQ ID NO: 1056277 - DNA, 15 bp, Homo sapiens
ggagtctggcctccc

SEQ ID NO: 1056278 - DNA, 15 bp, Homo sapiens
tggagtctggcctcc

SEQ ID NO: 1056279 - DNA, 15 bp, Homo sapiens
ctggagtctggcctc

SEQ ID NO: 1056280 - DNA, 15 bp, Homo sapiens
cctggagtctggcct

SEQ ID NO: 1056281 - DNA, 15 bp, Homo sapiens
tcctggagtctggcc

SEQ ID NO: 1056282 - DNA, 15 bp, Homo sapiens
ctcctggagtctggc

SEQ ID NO: 1056283 - DNA, 15 bp, Homo sapiens
cctcctggagtctgg

SEQ ID NO: 1056284 - DNA, 15 bp, Homo sapiens
tcctcctggagtctg

SEQ ID NO: 1056285 - DNA, 15 bp, Homo sapiens
gtcctcctggagtct

SEQ ID NO: 1056286 - DNA, 15 bp, Homo sapiens
ggtcctcctggagtc

SEQ ID NO: 1056287 - DNA, 15 bp, Homo sapiens
aggtcctcctggagt

SEQ ID NO: 1056288 - DNA, 15 bp, Homo sapiens
caggtcctcctggag

SEQ ID NO: 1056289 - DNA, 15 bp, Homo sapiens
gcaggtcctcctgga

SEQ ID NO: 1056290 - DNA, 15 bp, Homo sapiens
ggcaggtcctcctgg

SEQ ID NO: 1056291 - DNA, 15 bp, Homo sapiens
aggcaggtcctcctg

SEQ ID NO: 1056292 - DNA, 15 bp, Homo sapiens
caggcaggtcctcct

SEQ ID NO: 1056293 - DNA, 15 bp, Homo sapiens
gcaggcaggtcctcc

SEQ ID NO: 1056294 - DNA, 15 bp, Homo sapiens
tgcaggcaggtcctc

SEQ ID NO: 1056295 - DNA, 15 bp, Homo sapiens
atgcaggcaggtcct

SEQ ID NO: 1056296 - DNA, 15 bp, Homo sapiens
gatgcaggcaggtcc

SEQ ID NO: 1056297 - DNA, 15 bp, Homo sapiens
tgatgcaggcaggtc

SEQ ID NO: 1056298 - DNA, 15 bp, Homo sapiens
ctgatgcaggcaggt

SEQ ID NO: 1056299 - DNA, 15 bp, Homo sapiens
tctgatgcaggcagg

SEQ ID NO: 1056300 - DNA, 15 bp, Homo sapiens
ttctgatgcaggcag

SEQ ID NO: 1056301 - DNA, 15 bp, Homo sapiens
gttctgatgcaggca

SEQ ID NO: 1056302 - DNA, 15 bp, Homo sapiens
tgttctgatgcaggc

SEQ ID NO: 1056303 - DNA, 15 bp, Homo sapiens
ttgttctgatgcagg

SEQ ID NO: 1056304 - DNA, 15 bp, Homo sapiens
cttgttctgatgcag

SEQ ID NO: 1056305 - DNA, 15 bp, Homo sapiens
acttgttctgatgca

SEQ ID NO: 1056306 - DNA, 15 bp, Homo sapiens
aacttgttctgatgc

SEQ ID NO: 1056307 - DNA, 15 bp, Homo sapiens
gaacttgttctgatg

SEQ ID NO: 1056308 - DNA, 15 bp, Homo sapiens
ggaacttgttctgat

SEQ ID NO: 1056309 - DNA, 15 bp, Homo sapiens
aggaacttgttctga

SEQ ID NO: 1056310 - DNA, 15 bp, Homo sapiens
aaggaacttgttctg

SEQ ID NO: 1056311 - DNA, 15 bp, Homo sapiens
taaggaacttgttct

SEQ ID NO: 1056312 - DNA, 15 bp, Homo sapiens
ttaaggaacttgttc

SEQ ID NO: 1056313 - DNA, 15 bp, Homo sapiens
cttaaggaacttgtt

SEQ ID NO: 1056314 - DNA, 15 bp, Homo sapiens
tcttaaggaacttgt

SEQ ID NO: 1056315 - DNA, 15 bp, Homo sapiens
ttcttaaggaacttg

SEQ ID NO: 1056316 - DNA, 15 bp, Homo sapiens
tttcttaaggaactt

SEQ ID NO: 1056317 - DNA, 15 bp, Homo sapiens
ttttcttaaggaact

SEQ ID NO: 1056318 - DNA, 15 bp, Homo sapiens
gttttcttaaggaac

SEQ ID NO: 1056319 - DNA, 15 bp, Homo sapiens
tgttttcttaaggaa

SEQ ID NO: 1056320 - DNA, 15 bp, Homo sapiens
ctgttttcttaagga

SEQ ID NO: 1056321 - DNA, 15 bp, Homo sapiens
tctgttttcttaagg

SEQ ID NO: 1056322 - DNA, 15 bp, Homo sapiens
ctctgttttcttaag

SEQ ID NO: 1056323 - DNA, 15 bp, Homo sapiens
gctctgttttcttaa

SEQ ID NO: 1056324 - DNA, 15 bp, Homo sapiens
ggctctgttttctta

SEQ ID NO: 1056325 - DNA, 15 bp, Homo sapiens
aggctctgttttctt

SEQ ID NO: 1056326 - DNA, 15 bp, Homo sapiens
caggctctgttttct

SEQ ID NO: 1056327 - DNA, 15 bp, Homo sapiens
ccaggctctgttttc

SEQ ID NO: 1056328 - DNA, 15 bp, Homo sapiens
cccaggctctgtttt

SEQ ID NO: 1056329 - DNA, 15 bp, Homo sapiens
ccccaggctctgttt

SEQ ID NO: 1056330 - DNA, 15 bp, Homo sapiens
tccccaggctctgtt

SEQ ID NO: 1056331 - DNA, 15 bp, Homo sapiens
gttccccaggctctg

SEQ ID NO: 1056332 - DNA, 15 bp, Homo sapiens
agttccccaggctct

SEQ ID NO: 1056333 - DNA, 15 bp, Homo sapiens
tagttccccaggctc

SEQ ID NO: 1056334 - DNA, 15 bp, Homo sapiens
ttagttccccaggct

SEQ ID NO: 1056335 - DNA, 15 bp, Homo sapiens
attagttccccaggc

SEQ ID NO: 1056336 - DNA, 15 bp, Homo sapiens
cattagttccccagg

SEQ ID NO: 1056337 - DNA, 15 bp, Homo sapiens
tcattagttccccag

SEQ ID NO: 1056338 - DNA, 15 bp, Homo sapiens
ttcattagttcccca

SEQ ID NO: 1056339 - DNA, 15 bp, Homo sapiens
cttcattagttcccc

SEQ ID NO: 1056340 - DNA, 15 bp, Homo sapiens
acttcattagttccc

SEQ ID NO: 1056341 - DNA, 15 bp, Homo sapiens
tacttcattagttcc

SEQ ID NO: 1056342 - DNA, 15 bp, Homo sapiens
ctacttcattagttc

SEQ ID NO: 1056343 - DNA, 15 bp, Homo sapiens
tctacttcattagtt

SEQ ID NO: 1056344 - DNA, 15 bp, Homo sapiens
ttctacttcattagt

SEQ ID NO: 1056345 - DNA, 15 bp, Homo sapiens
tttctacttcattag

SEQ ID NO: 1056346 - DNA, 15 bp, Homo sapiens
atttctacttcatta

SEQ ID NO: 1056347 - DNA, 15 bp, Homo sapiens
gatttctacttcatt

SEQ ID NO: 1056348 - DNA, 15 bp, Homo sapiens
cgatttctacttcat

SEQ ID NO: 1056349 - DNA, 15 bp, Homo sapiens
ccgatttctacttca

SEQ ID NO: 1056350 - DNA, 15 bp, Homo sapiens
tccgatttctacttc

SEQ ID NO: 1056351 - DNA, 15 bp, Homo sapiens
ctccgatttctactt

SEQ ID NO: 1056352 - DNA, 15 bp, Homo sapiens
tctccgatttctact

SEQ ID NO: 1056353 - DNA, 15 bp, Homo sapiens
ttctccgatttctac

SEQ ID NO: 1056354 - DNA, 15 bp, Homo sapiens
cttctccgatttcta

SEQ ID NO: 1056355 - DNA, 15 bp, Homo sapiens
tcttctccgatttct

SEQ ID NO: 1056356 - DNA, 15 bp, Homo sapiens
ctcttctccgatttc

SEQ ID NO: 1056357 - DNA, 15 bp, Homo sapiens
cctcttctccgattt

SEQ ID NO: 1056358 - DNA, 15 bp, Homo sapiens
tcctcttctccgatt

SEQ ID NO: 1056359 - DNA, 15 bp, Homo sapiens
ctcctcttctccgat

SEQ ID NO: 1056360 - DNA, 15 bp, Homo sapiens
cctcctcttctccga

SEQ ID NO: 1056361 - DNA, 15 bp, Homo sapiens
ccctcctcttctccg

SEQ ID NO: 1056362 - DNA, 15 bp, Homo sapiens
tccctcctcttctcc

SEQ ID NO: 1056363 - DNA, 15 bp, Homo sapiens
ttccctcctcttctc

SEQ ID NO: 1056364 - DNA, 15 bp, Homo sapiens
attccctcctcttct

SEQ ID NO: 1056365 - DNA, 15 bp, Homo sapiens
gattccctcctcttc

SEQ ID NO: 1056366 - DNA, 15 bp, Homo sapiens
agattccctcctctt

SEQ ID NO: 1056367 - DNA, 15 bp, Homo sapiens
tagattccctcctct

SEQ ID NO: 1056368 - DNA, 15 bp, Homo sapiens
ctagattccctcctc

SEQ ID NO: 1056369 - DNA, 15 bp, Homo sapiens
cctagattccctcct

SEQ ID NO: 1056370 - DNA, 15 bp, Homo sapiens
acctagattccctcc

SEQ ID NO: 1056371 - DNA, 15 bp, Homo sapiens
gacctagattccctc

SEQ ID NO: 1056372 - DNA, 15 bp, Homo sapiens
ggacctagattccct

SEQ ID NO: 1056373 - DNA, 15 bp, Homo sapiens
gggacctagattccc

SEQ ID NO: 1056374 - DNA, 15 bp, Homo sapiens
agggacctagattcc

SEQ ID NO: 1056375 - DNA, 15 bp, Homo sapiens
aagggacctagattc

SEQ ID NO: 1056376 - DNA, 15 bp, Homo sapiens
caagggacctagatt

SEQ ID NO: 1056377 - DNA, 15 bp, Homo sapiens
ccaagggacctagat

SEQ ID NO: 1056378 - DNA, 15 bp, Homo sapiens
cccaagggacctaga

SEQ ID NO: 1056379 - DNA, 15 bp, Homo sapiens
tcccaagggacctag

SEQ ID NO: 1056380 - DNA, 15 bp, Homo sapiens
ctcccaagggaccta

SEQ ID NO: 1056381 - DNA, 15 bp, Homo sapiens
tctcccaagggacct

SEQ ID NO: 1056382 - DNA, 15 bp, Homo sapiens
ctctcccaagggacc

SEQ ID NO: 1056383 - DNA, 15 bp, Homo sapiens
tctctcccaagggac

SEQ ID NO: 1056384 - DNA, 15 bp, Homo sapiens
ctctctcccaaggga

SEQ ID NO: 1056385 - DNA, 15 bp, Homo sapiens
cctctctcccaaggg

SEQ ID NO: 1056386 - DNA, 15 bp, Homo sapiens
gcctctctcccaagg

SEQ ID NO: 1056387 - DNA, 15 bp, Homo sapiens
ggcctctctcccaag

SEQ ID NO: 1056388 - DNA, 15 bp, Homo sapiens
tggcctctctcccaa

SEQ ID NO: 1056389 - DNA, 15 bp, Homo sapiens
ctggcctctctccca

SEQ ID NO: 1056390 - DNA, 15 bp, Homo sapiens
tctggcctctctccc

SEQ ID NO: 1056391 - DNA, 15 bp, Homo sapiens
atctggcctctctcc

SEQ ID NO: 1056392 - DNA, 15 bp, Homo sapiens
catctggcctctctc

SEQ ID NO: 1056393 - DNA, 15 bp, Homo sapiens
gcatctggcctctct

SEQ ID NO: 1056394 - DNA, 15 bp, Homo sapiens
ggcatctggcctctc

SEQ ID NO: 1056395 - DNA, 15 bp, Homo sapiens
gggcatctggcctct

SEQ ID NO: 1056396 - DNA, 15 bp, Homo sapiens
ggggcatctggcctc

SEQ ID NO: 1056397 - DNA, 15 bp, Homo sapiens
gggggcatctggcct

SEQ ID NO: 1056398 - DNA, 15 bp, Homo sapiens
tgggggcatctggcc

SEQ ID NO: 1056399 - DNA, 15 bp, Homo sapiens
ttgggggcatctggc

SEQ ID NO: 1056400 - DNA, 15 bp, Homo sapiens
gttgggggcatctgg

SEQ ID NO: 1056401 - DNA, 15 bp, Homo sapiens
ggttgggggcatctg

SEQ ID NO: 1056402 - DNA, 15 bp, Homo sapiens
tggttgggggcatct

SEQ ID NO: 1056403 - DNA, 15 bp, Homo sapiens
ctggttgggggcatc

SEQ ID NO: 1056404 - DNA, 15 bp, Homo sapiens
gctggttgggggcat

SEQ ID NO: 1056405 - DNA, 15 bp, Homo sapiens
ggctggttgggggca

SEQ ID NO: 1056406 - DNA, 15 bp, Homo sapiens
gggctggttgggggc

SEQ ID NO: 1056407 - DNA, 15 bp, Homo sapiens
ggggctggttggggg

SEQ ID NO: 1056408 - DNA, 15 bp, Homo sapiens
aggggctggttgggg

SEQ ID NO: 1056409 - DNA, 15 bp, Homo sapiens
gaggggctggttggg

SEQ ID NO: 1056410 - DNA, 15 bp, Homo sapiens
ggaggggctggttgg

SEQ ID NO: 1056411 - DNA, 15 bp, Homo sapiens
aggaggggctggttg

SEQ ID NO: 1056412 - DNA, 15 bp, Homo sapiens
aaggaggggctggtt

SEQ ID NO: 1056413 - DNA, 15 bp, Homo sapiens
caaggaggggctggt

SEQ ID NO: 1056414 - DNA, 15 bp, Homo sapiens
ccaaggaggggctgg

SEQ ID NO: 1056415 - DNA, 15 bp, Homo sapiens
cccaaggaggggctg

SEQ ID NO: 1056416 - DNA, 15 bp, Homo sapiens
ccccaaggaggggct

SEQ ID NO: 1056417 - DNA, 15 bp, Homo sapiens
tccccaaggaggggc

SEQ ID NO: 1056418 - DNA, 15 bp, Homo sapiens
ttccccaaggagggg

SEQ ID NO: 1056419 - DNA, 15 bp, Homo sapiens
cttccccaaggaggg

SEQ ID NO: 1056420 - DNA, 15 bp, Homo sapiens
ccttccccaaggagg

SEQ ID NO: 1056421 - DNA, 15 bp, Homo sapiens
gccttccccaaggag

SEQ ID NO: 1056422 - DNA, 15 bp, Homo sapiens
tgccttccccaagga

SEQ ID NO: 1056423 - DNA, 15 bp, Homo sapiens
ctgccttccccaagg

SEQ ID NO: 1056424 - DNA, 15 bp, Homo sapiens
gctgccttccccaag

SEQ ID NO: 1056425 - DNA, 15 bp, Homo sapiens
ggctgccttccccaa

SEQ ID NO: 1056426 - DNA, 15 bp, Homo sapiens
aggctgccttcccca

SEQ ID NO: 1056427 - DNA, 15 bp, Homo sapiens
gaggctgccttcccc

SEQ ID NO: 1056428 - DNA, 15 bp, Homo sapiens
agaggctgccttccc

SEQ ID NO: 1056429 - DNA, 15 bp, Homo sapiens
gagaggctgccttcc

SEQ ID NO: 1056430 - DNA, 15 bp, Homo sapiens
ggagaggctgccttc

SEQ ID NO: 1056431 - DNA, 15 bp, Homo sapiens
aggagaggctgcctt

SEQ ID NO: 1056432 - DNA, 15 bp, Homo sapiens
aaggagaggctgcct

SEQ ID NO: 1056433 - DNA, 15 bp, Homo sapiens
gaaggagaggctgcc

SEQ ID NO: 1056434 - DNA, 15 bp, Homo sapiens
agaaggagaggctgc

SEQ ID NO: 1056435 - DNA, 15 bp, Homo sapiens
tagaaggagaggctg

SEQ ID NO: 1056436 - DNA, 15 bp, Homo sapiens
ctagaaggagaggct

SEQ ID NO: 1056437 - DNA, 15 bp, Homo sapiens
cctagaaggagaggc

SEQ ID NO: 1056438 - DNA, 15 bp, Homo sapiens
tcctagaaggagagg

SEQ ID NO: 1056439 - DNA, 15 bp, Homo sapiens
ctcctagaaggagag

SEQ ID NO: 1056440 - DNA, 15 bp, Homo sapiens
actcctagaaggaga

SEQ ID NO: 1056441 - DNA, 15 bp, Homo sapiens
cactcctagaaggag

SEQ ID NO: 1056442 - DNA, 15 bp, Homo sapiens
tcactcctagaagga

SEQ ID NO: 1056443 - DNA, 15 bp, Homo sapiens
ttcactcctagaagg

SEQ ID NO: 1056444 - DNA, 15 bp, Homo sapiens
tttcactcctagaag

SEQ ID NO: 1056445 - DNA, 15 bp, Homo sapiens
gtttcactcctagaa

SEQ ID NO: 1056446 - DNA, 15 bp, Homo sapiens
agtttcactcctaga

SEQ ID NO: 1056447 - DNA, 15 bp, Homo sapiens
aagtttcactcctag

SEQ ID NO: 1056448 - DNA, 15 bp, Homo sapiens
caagtttcactccta

SEQ ID NO: 1056449 - DNA, 15 bp, Homo sapiens
tcaagtttcactcct

SEQ ID NO: 1056450 - DNA, 15 bp, Homo sapiens
ttcaagtttcactcc

SEQ ID NO: 1056451 - DNA, 15 bp, Homo sapiens
gttcaagtttcactc

SEQ ID NO: 1056452 - DNA, 15 bp, Homo sapiens
ggttcaagtttcact

SEQ ID NO: 1056453 - DNA, 15 bp, Homo sapiens
tggttcaagtttcac

SEQ ID NO: 1056454 - DNA, 15 bp, Homo sapiens
ttggttcaagtttca

SEQ ID NO: 1056455 - DNA, 15 bp, Homo sapiens
cttggttcaagtttc

SEQ ID NO: 1056456 - DNA, 15 bp, Homo sapiens
tcttggttcaagttt

SEQ ID NO: 1056457 - DNA, 15 bp, Homo sapiens
ttcttggttcaagtt

SEQ ID NO: 1056458 - DNA, 15 bp, Homo sapiens
gttcttggttcaagt

SEQ ID NO: 1056459 - DNA, 15 bp, Homo sapiens
tgttcttggttcaag

SEQ ID NO: 1056460 - DNA, 15 bp, Homo sapiens
ctgttcttggttcaa

SEQ ID NO: 1056461 - DNA, 15 bp, Homo sapiens
actgttcttggttca

SEQ ID NO: 1056462 - DNA, 15 bp, Homo sapiens
gactgttcttggttc

SEQ ID NO: 1056463 - DNA, 15 bp, Homo sapiens
agactgttcttggtt

SEQ ID NO: 1056464 - DNA, 15 bp, Homo sapiens
aagactgttcttggt

SEQ ID NO: 1056465 - DNA, 15 bp, Homo sapiens
aaagactgttcttgg

SEQ ID NO: 1056466 - DNA, 15 bp, Homo sapiens
taaagactgttcttg

SEQ ID NO: 1056467 - DNA, 15 bp, Homo sapiens
ctaaagactgttctt

SEQ ID NO: 1056468 - DNA, 15 bp, Homo sapiens
cctaaagactgttct

SEQ ID NO: 1056469 - DNA, 15 bp, Homo sapiens
ccctaaagactgttc

SEQ ID NO: 1056470 - DNA, 15 bp, Homo sapiens
gccctaaagactgtt

SEQ ID NO: 1056471 - DNA, 15 bp, Homo sapiens
tgccctaaagactgt

SEQ ID NO: 1056472 - DNA, 15 bp, Homo sapiens
ttgccctaaagactg

SEQ ID NO: 1056473 - DNA, 15 bp, Homo sapiens
tttgccctaaagact

SEQ ID NO: 1056474 - DNA, 15 bp, Homo sapiens
ttttgccctaaagac

SEQ ID NO: 1056475 - DNA, 15 bp, Homo sapiens
attttgccctaaaga

SEQ ID NO: 1056476 - DNA, 15 bp, Homo sapiens
gattttgccctaaag

SEQ ID NO: 1056477 - DNA, 15 bp, Homo sapiens
ggattttgccctaaa

SEQ ID NO: 1056478 - DNA, 15 bp, Homo sapiens
aggattttgccctaa

SEQ ID NO: 1056479 - DNA, 15 bp, Homo sapiens
aaggattttgcccta

SEQ ID NO: 1056480 - DNA, 15 bp, Homo sapiens
aaaggattttgccct

SEQ ID NO: 1056481 - DNA, 15 bp, Homo sapiens
aaaaggattttgccc

SEQ ID NO: 1056482 - DNA, 15 bp, Homo sapiens
gaaaaggattttgcc

SEQ ID NO: 1056483 - DNA, 15 bp, Homo sapiens
ggaaaaggattttgc

SEQ ID NO: 1056484 - DNA, 15 bp, Homo sapiens
aggaaaaggattttg

SEQ ID NO: 1056485 - DNA, 15 bp, Homo sapiens
taggaaaaggatttt

SEQ ID NO: 1056486 - DNA, 15 bp, Homo sapiens
ctaggaaaaggattt

SEQ ID NO: 1056487 - DNA, 15 bp, Homo sapiens
cctaggaaaaggatt

SEQ ID NO: 1056488 - DNA, 15 bp, Homo sapiens
acctaggaaaaggat

SEQ ID NO: 1056489 - DNA, 15 bp, Homo sapiens
aacctaggaaaagga

SEQ ID NO: 1056490 - DNA, 15 bp, Homo sapiens
caacctaggaaaagg

SEQ ID NO: 1056491 - DNA, 15 bp, Homo sapiens
gcaacctaggaaaag

SEQ ID NO: 1056492 - DNA, 15 bp, Homo sapiens
ggcaacctaggaaaa

SEQ ID NO: 1056493 - DNA, 15 bp, Homo sapiens
tggcaacctaggaaa

SEQ ID NO: 1056494 - DNA, 15 bp, Homo sapiens
atggcaacctaggaa

SEQ ID NO: 1056495 - DNA, 15 bp, Homo sapiens
catggcaacctagga

SEQ ID NO: 1056496 - DNA, 15 bp, Homo sapiens
tcatggcaacctagg

SEQ ID NO: 1056497 - DNA, 15 bp, Homo sapiens
ttcatggcaacctag

SEQ ID NO: 1056498 - DNA, 15 bp, Homo sapiens
tttcatggcaaccta

SEQ ID NO: 1056499 - DNA, 15 bp, Homo sapiens
atttcatggcaacct

SEQ ID NO: 1056500 - DNA, 15 bp, Homo sapiens
tatttcatggcaacc

SEQ ID NO: 1056501 - DNA, 15 bp, Homo sapiens
atatttcatggcaac

SEQ ID NO: 1056502 - DNA, 15 bp, Homo sapiens
tatatttcatggcaa

SEQ ID NO: 1056503 - DNA, 15 bp, Homo sapiens
gtatatttcatggca

SEQ ID NO: 1056504 - DNA, 15 bp, Homo sapiens
tgtatatttcatggc

SEQ ID NO: 1056505 - DNA, 15 bp, Homo sapiens
atgtatatttcatgg

SEQ ID NO: 1056506 - DNA, 15 bp, Homo sapiens
aatgtatatttcatg

SEQ ID NO: 1056507 - DNA, 15 bp, Homo sapiens
aaatgtatatttcat

SEQ ID NO: 1056508 - DNA, 15 bp, Homo sapiens
gaaatgtatatttca

SEQ ID NO: 1056509 - DNA, 15 bp, Homo sapiens
tgaaatgtatatttc

SEQ ID NO: 1056510 - DNA, 15 bp, Homo sapiens
atgaaatgtatattt

SEQ ID NO: 1056511 - DNA, 15 bp, Homo sapiens
catgaaatgtatatt

SEQ ID NO: 1056512 - DNA, 15 bp, Homo sapiens
gcatgaaatgtatat

SEQ ID NO: 1056513 - DNA, 15 bp, Homo sapiens
tgcatgaaatgtata

SEQ ID NO: 1056514 - DNA, 15 bp, Homo sapiens
ttgcatgaaatgtat

SEQ ID NO: 1056515 - DNA, 15 bp, Homo sapiens
cttgcatgaaatgta

SEQ ID NO: 1056516 - DNA, 15 bp, Homo sapiens
gcttgcatgaaatgt

SEQ ID NO: 1056517 - DNA, 15 bp, Homo sapiens
agcttgcatgaaatg

SEQ ID NO: 1056518 - DNA, 15 bp, Homo sapiens
aagcttgcatgaaat

SEQ ID NO: 1056519 - DNA, 15 bp, Homo sapiens
aaagcttgcatgaaa

SEQ ID NO: 1056520 - DNA, 15 bp, Homo sapiens
caaagcttgcatgaa

SEQ ID NO: 1056521 - DNA, 15 bp, Homo sapiens
ccaaagcttgcatga

SEQ ID NO: 1056522 - DNA, 15 bp, Homo sapiens
tccaaagcttgcatg

SEQ ID NO: 1056523 - DNA, 15 bp, Homo sapiens
ctccaaagcttgcat

SEQ ID NO: 1056524 - DNA, 15 bp, Homo sapiens
tctccaaagcttgca

SEQ ID NO: 1056525 - DNA, 15 bp, Homo sapiens
ctctccaaagcttgc

SEQ ID NO: 1056526 - DNA, 15 bp, Homo sapiens
cctctccaaagcttg

SEQ ID NO: 1056527 - DNA, 15 bp, Homo sapiens
acctctccaaagctt

SEQ ID NO: 1056528 - DNA, 15 bp, Homo sapiens
gacctctccaaagct

SEQ ID NO: 1056529 - DNA, 15 bp, Homo sapiens
tgacctctccaaagc

SEQ ID NO: 1056530 - DNA, 15 bp, Homo sapiens
ttgacctctccaaag

SEQ ID NO: 1056531 - DNA, 15 bp, Homo sapiens
tttgacctctccaaa

SEQ ID NO: 1056532 - DNA, 15 bp, Homo sapiens
atttgacctctccaa

SEQ ID NO: 1056533 - DNA, 15 bp, Homo sapiens
catttgacctctcca

SEQ ID NO: 1056534 - DNA, 15 bp, Homo sapiens
tcatttgacctctcc

SEQ ID NO: 1056535 - DNA, 15 bp, Homo sapiens
gtcatttgacctctc

SEQ ID NO: 1056536 - DNA, 15 bp, Homo sapiens
ggtcatttgacctct

SEQ ID NO: 1056537 - DNA, 15 bp, Homo sapiens
gggtcatttgacctc

SEQ ID NO: 1056538 - DNA, 15 bp, Homo sapiens
agggtcatttgacct

SEQ ID NO: 1056539 - DNA, 15 bp, Homo sapiens
aagggtcatttgacc

SEQ ID NO: 1056540 - DNA, 15 bp, Homo sapiens
aaagggtcatttgac

SEQ ID NO: 1056541 - DNA, 15 bp, Homo sapiens
gaaagggtcatttga

SEQ ID NO: 1056542 - DNA, 15 bp, Homo sapiens
agaaagggtcatttg

SEQ ID NO: 1056543 - DNA, 15 bp, Homo sapiens
gagaaagggtcattt

SEQ ID NO: 1056544 - DNA, 15 bp, Homo sapiens
agagaaagggtcatt

SEQ ID NO: 1056545 - DNA, 15 bp, Homo sapiens
gagagaaagggtcat

SEQ ID NO: 1056546 - DNA, 15 bp, Homo sapiens
tgagagaaagggtca

SEQ ID NO: 1056547 - DNA, 15 bp, Homo sapiens
ctgagagaaagggtc

SEQ ID NO: 1056548 - DNA, 15 bp, Homo sapiens
gctgagagaaagggt

SEQ ID NO: 1056549 - DNA, 15 bp, Homo sapiens
agctgagagaaaggg

SEQ ID NO: 1056550 - DNA, 15 bp, Homo sapiens
aagctgagagaaagg

SEQ ID NO: 1056551 - DNA, 15 bp, Homo sapiens
aaagctgagagaaag

SEQ ID NO: 1056552 - DNA, 15 bp, Homo sapiens
gaaagctgagagaaa

SEQ ID NO: 1056553 - DNA, 15 bp, Homo sapiens
agaaagctgagagaa

SEQ ID NO: 1056554 - DNA, 15 bp, Homo sapiens
cagaaagctgagaga

SEQ ID NO: 1056555 - DNA, 15 bp, Homo sapiens
ccagaaagctgagag

SEQ ID NO: 1056556 - DNA, 15 bp, Homo sapiens
cccagaaagctgaga

SEQ ID NO: 1056557 - DNA, 15 bp, Homo sapiens
tcccagaaagctgag

SEQ ID NO: 1056558 - DNA, 15 bp, Homo sapiens
ctcccagaaagctga

SEQ ID NO: 1056559 - DNA, 15 bp, Homo sapiens
actcccagaaagctg

SEQ ID NO: 1056560 - DNA, 15 bp, Homo sapiens
aactcccagaaagct

SEQ ID NO: 1056561 - DNA, 15 bp, Homo sapiens
aaactcccagaaagc

SEQ ID NO: 1056562 - DNA, 15 bp, Homo sapiens
gaaactcccagaaag

SEQ ID NO: 1056563 - DNA, 15 bp, Homo sapiens
ggaaactcccagaaa

SEQ ID NO: 1056564 - DNA, 15 bp, Homo sapiens
aggaaactcccagaa

SEQ ID NO: 1056565 - DNA, 15 bp, Homo sapiens
caggaaactcccaga

SEQ ID NO: 1056566 - DNA, 15 bp, Homo sapiens
acaggaaactcccag

SEQ ID NO: 1056567 - DNA, 15 bp, Homo sapiens
cacaggaaactccca

SEQ ID NO: 1056568 - DNA, 15 bp, Homo sapiens
ccacaggaaactccc

SEQ ID NO: 1056569 - DNA, 15 bp, Homo sapiens
tccacaggaaactcc

SEQ ID NO: 1056570 - DNA, 15 bp, Homo sapiens
ttccacaggaaactc

SEQ ID NO: 1056571 - DNA, 15 bp, Homo sapiens
attccacaggaaact

SEQ ID NO: 1056572 - DNA, 15 bp, Homo sapiens
aattccacaggaaac

SEQ ID NO: 1056573 - DNA, 15 bp, Homo sapiens
gaattccacaggaaa

SEQ ID NO: 1056574 - DNA, 15 bp, Homo sapiens
tgaattccacaggaa

SEQ ID NO: 1056575 - DNA, 15 bp, Homo sapiens
atgaattccacagga

SEQ ID NO: 1056576 - DNA, 15 bp, Homo sapiens
catgaattccacagg

SEQ ID NO: 1056577 - DNA, 15 bp, Homo sapiens
acatgaattccacag

SEQ ID NO: 1056578 - DNA, 15 bp, Homo sapiens
cacatgaattccaca

SEQ ID NO: 1056579 - DNA, 15 bp, Homo sapiens
acacatgaattccac

SEQ ID NO: 1056580 - DNA, 15 bp, Homo sapiens
cacacatgaattcca

SEQ ID NO: 1056581 - DNA, 15 bp, Homo sapiens
gcacacatgaattcc

SEQ ID NO: 1056582 - DNA, 15 bp, Homo sapiens
ggcacacatgaattc

SEQ ID NO: 1056583 - DNA, 15 bp, Homo sapiens
gggcacacatgaatt

SEQ ID NO: 1056584 - DNA, 15 bp, Homo sapiens
tgggcacacatgaat

SEQ ID NO: 1056585 - DNA, 15 bp, Homo sapiens
ttgggcacacatgaa

SEQ ID NO: 1056586 - DNA, 15 bp, Homo sapiens
tttgggcacacatga

SEQ ID NO: 1056587 - DNA, 15 bp, Homo sapiens
ctttgggcacacatg

SEQ ID NO: 1056588 - DNA, 15 bp, Homo sapiens
tctttgggcacacat

SEQ ID NO: 1056589 - DNA, 15 bp, Homo sapiens
ttctttgggcacaca

SEQ ID NO: 1056590 - DNA, 15 bp, Homo sapiens
cttctttgggcacac

SEQ ID NO: 1056591 - DNA, 15 bp, Homo sapiens
tcttctttgggcaca

SEQ ID NO: 1056592 - DNA, 15 bp, Homo sapiens
ttcttctttgggcac

SEQ ID NO: 1056593 - DNA, 15 bp, Homo sapiens
gttcttctttgggca

SEQ ID NO: 1056594 - DNA, 15 bp, Homo sapiens
agttcttctttgggc

SEQ ID NO: 1056595 - DNA, 15 bp, Homo sapiens
aagttcttctttggg

SEQ ID NO: 1056596 - DNA, 15 bp, Homo sapiens
aaagttcttctttgg

SEQ ID NO: 1056597 - DNA, 15 bp, Homo sapiens
gaaagttcttctttg

SEQ ID NO: 1056598 - DNA, 15 bp, Homo sapiens
tgaaagttcttcttt

SEQ ID NO: 1056599 - DNA, 15 bp, Homo sapiens
gtgaaagttcttctt

SEQ ID NO: 1056600 - DNA, 15 bp, Homo sapiens
ggtgaaagttcttct

SEQ ID NO: 1056601 - DNA, 15 bp, Homo sapiens
tggtgaaagttcttc

SEQ ID NO: 1056602 - DNA, 15 bp, Homo sapiens
ttggtgaaagttctt

SEQ ID NO: 1056603 - DNA, 15 bp, Homo sapiens
attggtgaaagttct

SEQ ID NO: 1056604 - DNA, 15 bp, Homo sapiens
cattggtgaaagttc

SEQ ID NO: 1056605 - DNA, 15 bp, Homo sapiens
ccattggtgaaagtt

SEQ ID NO: 1056606 - DNA, 15 bp, Homo sapiens
cccattggtgaaagt

SEQ ID NO: 1056607 - DNA, 15 bp, Homo sapiens
ccccattggtgaaag

SEQ ID NO: 1056608 - DNA, 15 bp, Homo sapiens
tccccattggtgaaa

SEQ ID NO: 1056609 - DNA, 15 bp, Homo sapiens
ttccccattggtgaa

SEQ ID NO: 1056610 - DNA, 15 bp, Homo sapiens
tttccccattggtga

SEQ ID NO: 1056611 - DNA, 15 bp, Homo sapiens
atttccccattggtg

SEQ ID NO: 1056612 - DNA, 15 bp, Homo sapiens
aatttccccattggt

SEQ ID NO: 1056613 - DNA, 15 bp, Homo sapiens
aaatttccccattgg

SEQ ID NO: 1056614 - DNA, 15 bp, Homo sapiens
taaatttccccattg

SEQ ID NO: 1056615 - DNA, 15 bp, Homo sapiens
ttaaatttccccatt

SEQ ID NO: 1056616 - DNA, 15 bp, Homo sapiens
attaaatttccccat

SEQ ID NO: 1056617 - DNA, 15 bp, Homo sapiens
tattaaatttcccca

SEQ ID NO: 1056618 - DNA, 15 bp, Homo sapiens
ttattaaatttcccc

SEQ ID NO: 1056619 - DNA, 15 bp, Homo sapiens
tttattaaatttccc

SEQ ID NO: 1056620 - DNA, 15 bp, Homo sapiens
atttattaaatttcc

SEQ ID NO: 1056621 - DNA, 15 bp, Homo sapiens
catttattaaatttc

SEQ ID NO: 1056622 - DNA, 15 bp, Homo sapiens
acatttattaaattt

SEQ ID NO: 1056623 - DNA, 15 bp, Homo sapiens
cacatttattaaatt

SEQ ID NO: 1056624 - DNA, 15 bp, Homo sapiens
ccacatttattaaat

SEQ ID NO: 1056625 - DNA, 15 bp, Homo sapiens
accacatttattaaa

SEQ ID NO: 1056626 - DNA, 15 bp, Homo sapiens
aaccacatttattaa

SEQ ID NO: 1056627 - DNA, 15 bp, Homo sapiens
aaaccacatttatta

SEQ ID NO: 1056628 - DNA, 15 bp, Homo sapiens
taaaccacatttatt

SEQ ID NO: 1056629 - DNA, 15 bp, Homo sapiens
ataaaccacatttat

SEQ ID NO: 1056630 - DNA, 15 bp, Homo sapiens
gataaaccacattta

SEQ ID NO: 1056631 - DNA, 15 bp, Homo sapiens
agataaaccacattt

SEQ ID NO: 1056632 - DNA, 15 bp, Homo sapiens
tagataaaccacatt

SEQ ID NO: 1056633 - DNA, 15 bp, Homo sapiens
ttagataaaccacat

SEQ ID NO: 1056634 - DNA, 15 bp, Homo sapiens
cttagataaaccaca

SEQ ID NO: 1056635 - DNA, 15 bp, Homo sapiens
ccttagataaaccac

SEQ ID NO: 1056636 - DNA, 15 bp, Homo sapiens
accttagataaacca

SEQ ID NO: 1056637 - DNA, 15 bp, Homo sapiens
aaccttagataaacc

SEQ ID NO: 1056638 - DNA, 15 bp, Homo sapiens
gaaccttagataaac

SEQ ID NO: 1056639 - DNA, 15 bp, Homo sapiens
cgaaccttagataaa

SEQ ID NO: 1056640 - DNA, 15 bp, Homo sapiens
acgaaccttagataa

SEQ ID NO: 1056641 - DNA, 15 bp, Homo sapiens
cacgaaccttagata

SEQ ID NO: 1056642 - DNA, 15 bp, Homo sapiens
gcacgaaccttagat

SEQ ID NO: 1056643 - DNA, 15 bp, Homo sapiens
agcacgaaccttaga

SEQ ID NO: 1056644 - DNA, 15 bp, Homo sapiens
aagcacgaaccttag

SEQ ID NO: 1056645 - DNA, 15 bp, Homo sapiens
aaagcacgaacctta

SEQ ID NO: 1056646 - DNA, 15 bp, Homo sapiens
gaaagcacgaacctt

SEQ ID NO: 1056647 - DNA, 15 bp, Homo sapiens
cgaaagcacgaacct

SEQ ID NO: 1056648 - DNA, 15 bp, Homo sapiens
ccgaaagcacgaacc

SEQ ID NO: 1056649 - DNA, 15 bp, Homo sapiens
gccgaaagcacgaac

SEQ ID NO: 1056650 - DNA, 15 bp, Homo sapiens
agccgaaagcacgaa

SEQ ID NO: 1056651 - DNA, 15 bp, Homo sapiens
tagccgaaagcacga

SEQ ID NO: 1056652 - DNA, 15 bp, Homo sapiens
gtagccgaaagcacg

SEQ ID NO: 1056653 - DNA, 15 bp, Homo sapiens
tgtagccgaaagcac

SEQ ID NO: 1056654 - DNA, 15 bp, Homo sapiens
atgtagccgaaagca

SEQ ID NO: 1056655 - DNA, 15 bp, Homo sapiens
gatgtagccgaaagc

SEQ ID NO: 1056656 - DNA, 15 bp, Homo sapiens
agatgtagccgaaag

SEQ ID NO: 1056657 - DNA, 15 bp, Homo sapiens
cagatgtagccgaaa

SEQ ID NO: 1056658 - DNA, 15 bp, Homo sapiens
gcagatgtagccgaa

SEQ ID NO: 1056659 - DNA, 15 bp, Homo sapiens
tgcagatgtagccga

SEQ ID NO: 1056660 - DNA, 15 bp, Homo sapiens
gtgcagatgtagccg

SEQ ID NO: 1056661 - DNA, 15 bp, Homo sapiens
agtgcagatgtagcc

SEQ ID NO: 1056662 - DNA, 15 bp, Homo sapiens
tagtgcagatgtagc

SEQ ID NO: 1056663 - DNA, 15 bp, Homo sapiens
ttagtgcagatgtag

SEQ ID NO: 1056664 - DNA, 15 bp, Homo sapiens
attagtgcagatgta

SEQ ID NO: 1056665 - DNA, 15 bp, Homo sapiens
cattagtgcagatgt

SEQ ID NO: 1056666 - DNA, 15 bp, Homo sapiens
tcattagtgcagatg

SEQ ID NO: 1056667 - DNA, 15 bp, Homo sapiens
gtcattagtgcagat

SEQ ID NO: 1056668 - DNA, 15 bp, Homo sapiens
agtcattagtgcaga

SEQ ID NO: 1056669 - DNA, 15 bp, Homo sapiens
gagtcattagtgcag

SEQ ID NO: 1056670 - DNA, 15 bp, Homo sapiens
tgagtcattagtgca

SEQ ID NO: 1056671 - DNA, 15 bp, Homo sapiens
ctgagtcattagtgc

SEQ ID NO: 1056672 - DNA, 15 bp, Homo sapiens
cctgagtcattagtg

SEQ ID NO: 1056673 - DNA, 15 bp, Homo sapiens
gcctgagtcattagt

SEQ ID NO: 1056674 - DNA, 15 bp, Homo sapiens
tgcctgagtcattag

SEQ ID NO: 1056675 - DNA, 15 bp, Homo sapiens
ctgcctgagtcatta

SEQ ID NO: 1056676 - DNA, 15 bp, Homo sapiens
actgcctgagtcatt

SEQ ID NO: 1056677 - DNA, 15 bp, Homo sapiens
aactgcctgagtcat

SEQ ID NO: 1056678 - DNA, 15 bp, Homo sapiens
aaactgcctgagtca

SEQ ID NO: 1056679 - DNA, 15 bp, Homo sapiens
caaactgcctgagtc

SEQ ID NO: 1056680 - DNA, 15 bp, Homo sapiens
gcaaactgcctgagt

SEQ ID NO: 1056681 - DNA, 15 bp, Homo sapiens
agcaaactgcctgag

SEQ ID NO: 1056682 - DNA, 15 bp, Homo sapiens
gagcaaactgcctga

SEQ ID NO: 1056683 - DNA, 15 bp, Homo sapiens
ggagcaaactgcctg

SEQ ID NO: 1056684 - DNA, 15 bp, Homo sapiens
aggagcaaactgcct

SEQ ID NO: 1056685 - DNA, 15 bp, Homo sapiens
gaggagcaaactgcc

SEQ ID NO: 1056686 - DNA, 15 bp, Homo sapiens
cgaggagcaaactgc

SEQ ID NO: 1056687 - DNA, 15 bp, Homo sapiens
ccgaggagcaaactg

SEQ ID NO: 1056688 - DNA, 15 bp, Homo sapiens
tccgaggagcaaact

SEQ ID NO: 1056689 - DNA, 15 bp, Homo sapiens
ctccgaggagcaaac

SEQ ID NO: 1056690 - DNA, 15 bp, Homo sapiens
tctccgaggagcaaa

SEQ ID NO: 1056691 - DNA, 15 bp, Homo sapiens
gtctccgaggagcaa

SEQ ID NO: 1056692 - DNA, 15 bp, Homo sapiens
ggtctccgaggagca

SEQ ID NO: 1056693 - DNA, 15 bp, Homo sapiens
tggtctccgaggagc

SEQ ID NO: 1056694 - DNA, 15 bp, Homo sapiens
atggtctccgaggag

SEQ ID NO: 1056695 - DNA, 15 bp, Homo sapiens
gatggtctccgagga

SEQ ID NO: 1056696 - DNA, 15 bp, Homo sapiens
tgatggtctccgagg

SEQ ID NO: 1056697 - DNA, 15 bp, Homo sapiens
atgatggtctccgag

SEQ ID NO: 1056698 - DNA, 15 bp, Homo sapiens
aatgatggtctccga

SEQ ID NO: 1056699 - DNA, 15 bp, Homo sapiens
aaatgatggtctccg

SEQ ID NO: 1056700 - DNA, 15 bp, Homo sapiens
aaaatgatggtctcc

SEQ ID NO: 1056701 - DNA, 15 bp, Homo sapiens
aaaaatgatggtctc

SEQ ID NO: 1056702 - DNA, 15 bp, Homo sapiens
gaaaaatgatggtct

SEQ ID NO: 1056703 - DNA, 15 bp, Homo sapiens
agaaaaatgatggtc

SEQ ID NO: 1056704 - DNA, 15 bp, Homo sapiens
aagaaaaatgatggt

SEQ ID NO: 1056705 - DNA, 15 bp, Homo sapiens
aaagaaaaatgatgg

SEQ ID NO: 1056706 - DNA, 15 bp, Homo sapiens
taaagaaaaatgatg

SEQ ID NO: 1056707 - DNA, 15 bp, Homo sapiens
ataaagaaaaatgat

SEQ ID NO: 1056708 - DNA, 15 bp, Homo sapiens
aataaagaaaaatga

SEQ ID NO: 1056709 - DNA, 15 bp, Homo sapiens
aaataaagaaaaatg

SEQ ID NO: 1056710 - DNA, 15 bp, Homo sapiens
caaataaagaaaaat

SEQ ID NO: 1056711 - DNA, 15 bp, Homo sapiens
gcaaataaagaaaaa

SEQ ID NO: 1056712 - DNA, 15 bp, Homo sapiens
agcaaataaagaaaa

SEQ ID NO: 1056713 - DNA, 15 bp, Homo sapiens
gagcaaataaagaaa

SEQ ID NO: 1056714 - DNA, 15 bp, Homo sapiens
ggagcaaataaagaa

SEQ ID NO: 1056715 - DNA, 15 bp, Homo sapiens
tggagcaaataaaga

SEQ ID NO: 1056716 - DNA, 15 bp, Homo sapiens
ctggagcaaataaag

SEQ ID NO: 1056717 - DNA, 15 bp, Homo sapiens
gctggagcaaataaa

SEQ ID NO: 1056718 - DNA, 15 bp, Homo sapiens
tgctggagcaaataa

SEQ ID NO: 1056719 - DNA, 15 bp, Homo sapiens
ctgctggagcaaata

SEQ ID NO: 1056720 - DNA, 15 bp, Homo sapiens
actgctggagcaaat

SEQ ID NO: 1056721 - DNA, 15 bp, Homo sapiens
cactgctggagcaaa

SEQ ID NO: 1056722 - DNA, 15 bp, Homo sapiens
tcactgctggagcaa

SEQ ID NO: 1056723 - DNA, 15 bp, Homo sapiens
ctcactgctggagca

SEQ ID NO: 1056724 - DNA, 15 bp, Homo sapiens
cctcactgctggagc

SEQ ID NO: 1056725 - DNA, 15 bp, Homo sapiens
acctcactgctggag

SEQ ID NO: 1056726 - DNA, 15 bp, Homo sapiens
aacctcactgctgga

SEQ ID NO: 1056727 - DNA, 15 bp, Homo sapiens
aaacctcactgctgg

SEQ ID NO: 1056728 - DNA, 15 bp, Homo sapiens
gaaacctcactgctg

SEQ ID NO: 1056729 - DNA, 15 bp, Homo sapiens
tgaaacctcactgct

SEQ ID NO: 1056730 - DNA, 15 bp, Homo sapiens
ctgaaacctcactgc

SEQ ID NO: 1056731 - DNA, 15 bp, Homo sapiens
gctgaaacctcactg

SEQ ID NO: 1056732 - DNA, 15 bp, Homo sapiens
ggctgaaacctcact

SEQ ID NO: 1056733 - DNA, 15 bp, Homo sapiens
aggctgaaacctcac

SEQ ID NO: 1056734 - DNA, 15 bp, Homo sapiens
caggctgaaacctca

SEQ ID NO: 1056735 - DNA, 15 bp, Homo sapiens
tcaggctgaaacctc

SEQ ID NO: 1056736 - DNA, 15 bp, Homo sapiens
ctcaggctgaaacct

SEQ ID NO: 1056737 - DNA, 15 bp, Homo sapiens
cctcaggctgaaacc

SEQ ID NO: 1056738 - DNA, 15 bp, Homo sapiens
ccctcaggctgaaac

SEQ ID NO: 1056739 - DNA, 15 bp, Homo sapiens
tccctcaggctgaaa

SEQ ID NO: 1056740 - DNA, 15 bp, Homo sapiens
ctccctcaggctgaa

SEQ ID NO: 1056741 - DNA, 15 bp, Homo sapiens
tctccctcaggctga

SEQ ID NO: 1056742 - DNA, 15 bp, Homo sapiens
ctctccctcaggctg

SEQ ID NO: 1056743 - DNA, 15 bp, Homo sapiens
tctctccctcaggct

SEQ ID NO: 1056744 - DNA, 15 bp, Homo sapiens
ttctctccctcaggc

SEQ ID NO: 1056745 - DNA, 15 bp, Homo sapiens
gttctctccctcagg

SEQ ID NO: 1056746 - DNA, 15 bp, Homo sapiens
cgttctctccctcag

SEQ ID NO: 1056747 - DNA, 15 bp, Homo sapiens
acgttctctccctca

SEQ ID NO: 1056748 - DNA, 15 bp, Homo sapiens
gacgttctctccctc

SEQ ID NO: 1056749 - DNA, 15 bp, Homo sapiens
tgacgttctctccct

SEQ ID NO: 1056750 - DNA, 15 bp, Homo sapiens
ctgacgttctctccc

SEQ ID NO: 1056751 - DNA, 15 bp, Homo sapiens
cctgacgttctctcc

SEQ ID NO: 1056752 - DNA, 15 bp, Homo sapiens
ccctgacgttctctc

SEQ ID NO: 1056753 - DNA, 15 bp, Homo sapiens
tccctgacgttctct

SEQ ID NO: 1056754 - DNA, 15 bp, Homo sapiens
gtccctgacgttctc

SEQ ID NO: 1056755 - DNA, 15 bp, Homo sapiens
cgtccctgacgttct

SEQ ID NO: 1056756 - DNA, 15 bp, Homo sapiens
ccgtccctgacgttc

SEQ ID NO: 1056757 - DNA, 15 bp, Homo sapiens
tccgtccctgacgtt

SEQ ID NO: 1056758 - DNA, 15 bp, Homo sapiens
ctccgtccctgacgt

SEQ ID NO: 1056759 - DNA, 15 bp, Homo sapiens
tctccgtccctgacg

SEQ ID NO: 1056760 - DNA, 15 bp, Homo sapiens
ctctccgtccctgac

SEQ ID NO: 1056761 - DNA, 15 bp, Homo sapiens
cctctccgtccctga

SEQ ID NO: 1056762 - DNA, 15 bp, Homo sapiens
gcctctccgtccctg

SEQ ID NO: 1056763 - DNA, 15 bp, Homo sapiens
tgcctctccgtccct

SEQ ID NO: 1056764 - DNA, 15 bp, Homo sapiens
ttgcctctccgtccc

SEQ ID NO: 1056765 - DNA, 15 bp, Homo sapiens
cttgcctctccgtcc

SEQ ID NO: 1056766 - DNA, 15 bp, Homo sapiens
gcttgcctctccgtc

SEQ ID NO: 1056767 - DNA, 15 bp, Homo sapiens
tgcttgcctctccgt

SEQ ID NO: 1056768 - DNA, 15 bp, Homo sapiens
atgcttgcctctccg

SEQ ID NO: 1056769 - DNA, 15 bp, Homo sapiens
aatgcttgcctctcc

SEQ ID NO: 1056770 - DNA, 15 bp, Homo sapiens
gaatgcttgcctctc

SEQ ID NO: 1056771 - DNA, 15 bp, Homo sapiens
agaatgcttgcctct

SEQ ID NO: 1056772 - DNA, 15 bp, Homo sapiens
ccaagaatgcttgcc

SEQ ID NO: 1056773 - DNA, 15 bp, Homo sapiens
accaagaatgcttgc

SEQ ID NO: 1056774 - DNA, 15 bp, Homo sapiens
gaccaagaatgcttg

SEQ ID NO: 1056775 - DNA, 15 bp, Homo sapiens
ggaccaagaatgctt

SEQ ID NO: 1056776 - DNA, 15 bp, Homo sapiens
aggaccaagaatgct

SEQ ID NO: 1056777 - DNA, 15 bp, Homo sapiens
taggaccaagaatgc

SEQ ID NO: 1056778 - DNA, 15 bp, Homo sapiens
gtaggaccaagaatg

SEQ ID NO: 1056779 - DNA, 15 bp, Homo sapiens
agtaggaccaagaat

SEQ ID NO: 1056780 - DNA, 15 bp, Homo sapiens
aagtaggaccaagaa

SEQ ID NO: 1056781 - DNA, 15 bp, Homo sapiens
gaagtaggaccaaga

SEQ ID NO: 1056782 - DNA, 15 bp, Homo sapiens
agaagtaggaccaag

SEQ ID NO: 1056783 - DNA, 15 bp, Homo sapiens
cagaagtaggaccaa

SEQ ID NO: 1056784 - DNA, 15 bp, Homo sapiens
ccagaagtaggacca

SEQ ID NO: 1056785 - DNA, 15 bp, Homo sapiens
cccagaagtaggacc

SEQ ID NO: 1056786 - DNA, 15 bp, Homo sapiens
tcccagaagtaggac

SEQ ID NO: 1056787 - DNA, 15 bp, Homo sapiens
atcccagaagtagga

SEQ ID NO: 1056788 - DNA, 15 bp, Homo sapiens
aatcccagaagtagg

SEQ ID NO: 1056789 - DNA, 15 bp, Homo sapiens
aaatcccagaagtag

SEQ ID NO: 1056790 - DNA, 15 bp, Homo sapiens
aaaatcccagaagta

SEQ ID NO: 1056791 - DNA, 15 bp, Homo sapiens
aaaaatcccagaagt

SEQ ID NO: 1056792 - DNA, 15 bp, Homo sapiens
aaaaaatcccagaag

SEQ ID NO: 1056793 - DNA, 15 bp, Homo sapiens
aaaaaaatcccagaa

SEQ ID NO: 1056794 - DNA, 15 bp, Homo sapiens
caaaaaaatcccaga

SEQ ID NO: 1056795 - DNA, 15 bp, Homo sapiens
acaaaaaaatcccag

SEQ ID NO: 1056796 - DNA, 15 bp, Homo sapiens
tacaaaaaaatccca

SEQ ID NO: 1056797 - DNA, 15 bp, Homo sapiens
atacaaaaaaatccc

SEQ ID NO: 1056798 - DNA, 15 bp, Homo sapiens
aatacaaaaaaatcc

SEQ ID NO: 1056799 - DNA, 15 bp, Homo sapiens
gaatacaaaaaaatc

SEQ ID NO: 1056800 - DNA, 15 bp, Homo sapiens
ggaatacaaaaaaat

SEQ ID NO: 1056801 - DNA, 15 bp, Homo sapiens
gggaatacaaaaaaa

SEQ ID NO: 1056802 - DNA, 15 bp, Homo sapiens
agggaatacaaaaaa

SEQ ID NO: 1056803 - DNA, 15 bp, Homo sapiens
gagggaatacaaaaa

SEQ ID NO: 1056804 - DNA, 15 bp, Homo sapiens
ggagggaatacaaaa

SEQ ID NO: 1056805 - DNA, 15 bp, Homo sapiens
cggagggaatacaaa

SEQ ID NO: 1056806 - DNA, 15 bp, Homo sapiens
tcggagggaatacaa

SEQ ID NO: 1056807 - DNA, 15 bp, Homo sapiens
ttcggagggaataca

SEQ ID NO: 1056808 - DNA, 15 bp, Homo sapiens
gttcggagggaatac

SEQ ID NO: 1056809 - DNA, 15 bp, Homo sapiens
tgttcggagggaata

SEQ ID NO: 1056810 - DNA, 15 bp, Homo sapiens
atgttcggagggaat

SEQ ID NO: 1056811 - DNA, 15 bp, Homo sapiens
aatgttcggagggaa

SEQ ID NO: 1056812 - DNA, 15 bp, Homo sapiens
aaatgttcggaggga

SEQ ID NO: 1056813 - DNA, 15 bp, Homo sapiens
caaatgttcggaggg

SEQ ID NO: 1056814 - DNA, 15 bp, Homo sapiens
ccaaatgttcggagg

SEQ ID NO: 1056815 - DNA, 15 bp, Homo sapiens
accaaatgttcggag

SEQ ID NO: 1056816 - DNA, 15 bp, Homo sapiens
aaccaaatgttcgga

SEQ ID NO: 1056817 - DNA, 15 bp, Homo sapiens
gaaccaaatgttcgg

SEQ ID NO: 1056818 - DNA, 15 bp, Homo sapiens
ggaaccaaatgttcg

SEQ ID NO: 1056819 - DNA, 15 bp, Homo sapiens
tggaaccaaatgttc

SEQ ID NO: 1056820 - DNA, 15 bp, Homo sapiens
atggaaccaaatgtt

SEQ ID NO: 1056821 - DNA, 15 bp, Homo sapiens
aatggaaccaaatgt

SEQ ID NO: 1056822 - DNA, 15 bp, Homo sapiens
aaatggaaccaaatg

SEQ ID NO: 1056823 - DNA, 15 bp, Homo sapiens
gaaatggaaccaaat

SEQ ID NO: 1056824 - DNA, 15 bp, Homo sapiens
agaaatggaaccaaa

SEQ ID NO: 1056825 - DNA, 15 bp, Homo sapiens
aagaaatggaaccaa

SEQ ID NO: 1056826 - DNA, 15 bp, Homo sapiens
gaagaaatggaacca

SEQ ID NO: 1056827 - DNA, 15 bp, Homo sapiens
tgaagaaatggaacc

SEQ ID NO: 1056828 - DNA, 15 bp, Homo sapiens
gtgaagaaatggaac

SEQ ID NO: 1056829 - DNA, 15 bp, Homo sapiens
agtgaagaaatggaa

SEQ ID NO: 1056830 - DNA, 15 bp, Homo sapiens
aagtgaagaaatgga

SEQ ID NO: 1056831 - DNA, 15 bp, Homo sapiens
gaagtgaagaaatgg

SEQ ID NO: 1056832 - DNA, 15 bp, Homo sapiens
ggaagtgaagaaatg

SEQ ID NO: 1056833 - DNA, 15 bp, Homo sapiens
aggaagtgaagaaat

SEQ ID NO: 1056834 - DNA, 15 bp, Homo sapiens
aaggaagtgaagaaa

SEQ ID NO: 1056835 - DNA, 15 bp, Homo sapiens
gaaggaagtgaagaa

SEQ ID NO: 1056836 - DNA, 15 bp, Homo sapiens
ggaaggaagtgaaga

SEQ ID NO: 1056837 - DNA, 15 bp, Homo sapiens
tggaaggaagtgaag

SEQ ID NO: 1056838 - DNA, 15 bp, Homo sapiens
ctggaaggaagtgaa

SEQ ID NO: 1056839 - DNA, 15 bp, Homo sapiens
actggaaggaagtga

SEQ ID NO: 1056840 - DNA, 15 bp, Homo sapiens
gactggaaggaagtg

SEQ ID NO: 1056841 - DNA, 15 bp, Homo sapiens
cgactggaaggaagt

SEQ ID NO: 1056842 - DNA, 15 bp, Homo sapiens
acgactggaaggaag

SEQ ID NO: 1056843 - DNA, 15 bp, Homo sapiens
cacgactggaaggaa

SEQ ID NO: 1056844 - DNA, 15 bp, Homo sapiens
gcacgactggaagga

SEQ ID NO: 1056845 - DNA, 15 bp, Homo sapiens
ggcacgactggaagg

SEQ ID NO: 1056846 - DNA, 15 bp, Homo sapiens
cggcacgactggaag

SEQ ID NO: 1056847 - DNA, 15 bp, Homo sapiens
ccggcacgactggaa

SEQ ID NO: 1056848 - DNA, 15 bp, Homo sapiens
tccggcacgactgga

SEQ ID NO: 1056849 - DNA, 15 bp, Homo sapiens
atccggcacgactgg

SEQ ID NO: 1056850 - DNA, 15 bp, Homo sapiens
aatccggcacgactg

SEQ ID NO: 1056851 - DNA, 15 bp, Homo sapiens
taatccggcacgact

SEQ ID NO: 1056852 - DNA, 15 bp, Homo sapiens
ataatccggcacgac

SEQ ID NO: 1056853 - DNA, 15 bp, Homo sapiens
aataatccggcacga

SEQ ID NO: 1056854 - DNA, 15 bp, Homo sapiens
aaataatccggcacg

SEQ ID NO: 1056855 - DNA, 15 bp, Homo sapiens
gaaataatccggcac

SEQ ID NO: 1056856 - DNA, 15 bp, Homo sapiens
agaaataatccggca

SEQ ID NO: 1056857 - DNA, 15 bp, Homo sapiens
aagaaataatccggc

SEQ ID NO: 1056858 - DNA, 15 bp, Homo sapiens
taagaaataatccgg

SEQ ID NO: 1056859 - DNA, 15 bp, Homo sapiens
ataagaaataatccg

SEQ ID NO: 1056860 - DNA, 15 bp, Homo sapiens
aataagaaataatcc

SEQ ID NO: 1056861 - DNA, 15 bp, Homo sapiens
caataagaaataatc

SEQ ID NO: 1056862 - DNA, 15 bp, Homo sapiens
gcaataagaaataat

SEQ ID NO: 1056863 - DNA, 15 bp, Homo sapiens
tgcaataagaaataa

SEQ ID NO: 1056864 - DNA, 15 bp, Homo sapiens
ctgcaataagaaata

SEQ ID NO: 1056865 - DNA, 15 bp, Homo sapiens
gctgcaataagaaat

SEQ ID NO: 1056866 - DNA, 15 bp, Homo sapiens
tgctgcaataagaaa

SEQ ID NO: 1056867 - DNA, 15 bp, Homo sapiens
ctgctgcaataagaa

SEQ ID NO: 1056868 - DNA, 15 bp, Homo sapiens
tctgctgcaataaga

SEQ ID NO: 1056869 - DNA, 15 bp, Homo sapiens
ttctgctgcaataag

SEQ ID NO: 1056870 - DNA, 15 bp, Homo sapiens
gttctgctgcaataa

SEQ ID NO: 1056871 - DNA, 15 bp, Homo sapiens
ggttctgctgcaata

SEQ ID NO: 1056872 - DNA, 15 bp, Homo sapiens
gggttctgctgcaat

SEQ ID NO: 1056873 - DNA, 15 bp, Homo sapiens
tgggttctgctgcaa

SEQ ID NO: 1056874 - DNA, 15 bp, Homo sapiens
atgggttctgctgca

SEQ ID NO: 1056875 - DNA, 15 bp, Homo sapiens
aatgggttctgctgc

SEQ ID NO: 1056876 - DNA, 15 bp, Homo sapiens
gaatgggttctgctg

SEQ ID NO: 1056877 - DNA, 15 bp, Homo sapiens
tgaatgggttctgct

SEQ ID NO: 1056878 - DNA, 15 bp, Homo sapiens
atgaatgggttctgc

SEQ ID NO: 1056879 - DNA, 15 bp, Homo sapiens
tatgaatgggttctg

SEQ ID NO: 1056880 - DNA, 15 bp, Homo sapiens
ttatgaatgggttct

SEQ ID NO: 1056881 - DNA, 15 bp, Homo sapiens
gttatgaatgggttc

SEQ ID NO: 1056882 - DNA, 15 bp, Homo sapiens
agttatgaatgggtt

SEQ ID NO: 1056883 - DNA, 15 bp, Homo sapiens
aagttatgaatgggt

SEQ ID NO: 1056884 - DNA, 15 bp, Homo sapiens
aaagttatgaatggg

SEQ ID NO: 1056885 - DNA, 15 bp, Homo sapiens
taaagttatgaatgg

SEQ ID NO: 1056886 - DNA, 15 bp, Homo sapiens
ttaaagttatgaatg

SEQ ID NO: 1056887 - DNA, 15 bp, Homo sapiens
attaaagttatgaat

SEQ ID NO: 1056888 - DNA, 15 bp, Homo sapiens
gattaaagttatgaa

SEQ ID NO: 1056889 - DNA, 15 bp, Homo sapiens
tgattaaagttatga

SEQ ID NO: 1056890 - DNA, 15 bp, Homo sapiens
ctgattaaagttatg

SEQ ID NO: 1056891 - DNA, 15 bp, Homo sapiens
tctgattaaagttat

SEQ ID NO: 1056892 - DNA, 15 bp, Homo sapiens
ctctgattaaagtta

SEQ ID NO: 1056893 - DNA, 15 bp, Homo sapiens
cctctgattaaagtt

SEQ ID NO: 1056894 - DNA, 15 bp, Homo sapiens
tcctctgattaaagt

SEQ ID NO: 1056895 - DNA, 15 bp, Homo sapiens
gtcctctgattaaag

SEQ ID NO: 1056896 - DNA, 15 bp, Homo sapiens
tgtcctctgattaaa

SEQ ID NO: 1056897 - DNA, 15 bp, Homo sapiens
ctgtcctctgattaa

SEQ ID NO: 1056898 - DNA, 15 bp, Homo sapiens
cctgtcctctgatta

SEQ ID NO: 1056899 - DNA, 15 bp, Homo sapiens
tcctgtcctctgatt

SEQ ID NO: 1056900 - DNA, 15 bp, Homo sapiens
gtcctgtcctctgat

SEQ ID NO: 1056901 - DNA, 15 bp, Homo sapiens
cgtcctgtcctctga

SEQ ID NO: 1056902 - DNA, 15 bp, Homo sapiens
tcgtcctgtcctctg

SEQ ID NO: 1056903 - DNA, 15 bp, Homo sapiens
ttcgtcctgtcctct

SEQ ID NO: 1056904 - DNA, 15 bp, Homo sapiens
attcgtcctgtcctc

SEQ ID NO: 1056905 - DNA, 15 bp, Homo sapiens
cattcgtcctgtcct

SEQ ID NO: 1056906 - DNA, 15 bp, Homo sapiens
acattcgtcctgtcc

SEQ ID NO: 1056907 - DNA, 15 bp, Homo sapiens
aacattcgtcctgtc

SEQ ID NO: 1056908 - DNA, 15 bp, Homo sapiens
gaacattcgtcctgt

SEQ ID NO: 1056909 - DNA, 15 bp, Homo sapiens
tgaacattcgtcctg

SEQ ID NO: 1056910 - DNA, 15 bp, Homo sapiens
ctgaacattcgtcct

SEQ ID NO: 1056911 - DNA, 15 bp, Homo sapiens
actgaacattcgtcc

SEQ ID NO: 1056912 - DNA, 15 bp, Homo sapiens
tactgaacattcgtc

SEQ ID NO: 1056913 - DNA, 15 bp, Homo sapiens
ttactgaacattcgt

SEQ ID NO: 1056914 - DNA, 15 bp, Homo sapiens
tttactgaacattcg

SEQ ID NO: 1056915 - DNA, 15 bp, Homo sapiens
gtttactgaacattc

SEQ ID NO: 1056916 - DNA, 15 bp, Homo sapiens
cgtttactgaacatt

SEQ ID NO: 1056917 - DNA, 15 bp, Homo sapiens
gcgtttactgaacat

SEQ ID NO: 1056918 - DNA, 15 bp, Homo sapiens
tgcgtttactgaaca

SEQ ID NO: 1056919 - DNA, 15 bp, Homo sapiens
atgcgtttactgaac

SEQ ID NO: 1056920 - DNA, 15 bp, Homo sapiens
catgcgtttactgaa

SEQ ID NO: 1056921 - DNA, 15 bp, Homo sapiens
acatgcgtttactga

SEQ ID NO: 1056922 - DNA, 15 bp, Homo sapiens
tacatgcgtttactg

SEQ ID NO: 1056923 - DNA, 15 bp, Homo sapiens
atacatgcgtttact

SEQ ID NO: 1056924 - DNA, 15 bp, Homo sapiens
tatacatgcgtttac

SEQ ID NO: 1056925 - DNA, 15 bp, Homo sapiens
ttatacatgcgttta

SEQ ID NO: 1056926 - DNA, 15 bp, Homo sapiens
tttatacatgcgttt

SEQ ID NO: 1056927 - DNA, 15 bp, Homo sapiens
ctttatacatgcgtt

SEQ ID NO: 1056928 - DNA, 15 bp, Homo sapiens
tctttatacatgcgt

SEQ ID NO: 1056929 - DNA, 15 bp, Homo sapiens
ctctttatacatgcg

SEQ ID NO: 1056930 - DNA, 15 bp, Homo sapiens
tctctttatacatgc

SEQ ID NO: 1056931 - DNA, 15 bp, Homo sapiens
ttctctttatacatg

SEQ ID NO: 1056932 - DNA, 15 bp, Homo sapiens
gttctctttatacat

SEQ ID NO: 1056933 - DNA, 15 bp, Homo sapiens
agttctctttataca

SEQ ID NO: 1056934 - DNA, 15 bp, Homo sapiens
tagttctctttatac

SEQ ID NO: 1056935 - DNA, 15 bp, Homo sapiens
atagttctctttata

SEQ ID NO: 1056936 - DNA, 15 bp, Homo sapiens
aatagttctctttat

SEQ ID NO: 1056937 - DNA, 15 bp, Homo sapiens
caatagttctcttta

SEQ ID NO: 1056938 - DNA, 15 bp, Homo sapiens
acaatagttctcttt

SEQ ID NO: 1056939 - DNA, 15 bp, Homo sapiens
tacaatagttctctt

SEQ ID NO: 1056940 - DNA, 15 bp, Homo sapiens
atacaatagttctct

SEQ ID NO: 1056941 - DNA, 15 bp, Homo sapiens
catacaatagttctc

SEQ ID NO: 1056942 - DNA, 15 bp, Homo sapiens
acatacaatagttct

SEQ ID NO: 1056943 - DNA, 15 bp, Homo sapiens
tacatacaatagttc

SEQ ID NO: 1056944 - DNA, 15 bp, Homo sapiens
ttacatacaatagtt

SEQ ID NO: 1056945 - DNA, 15 bp, Homo sapiens
attacatacaatagt

SEQ ID NO: 1056946 - DNA, 15 bp, Homo sapiens
aattacatacaatag

SEQ ID NO: 1056947 - DNA, 15 bp, Homo sapiens
caattacatacaata

SEQ ID NO: 1056948 - DNA, 15 bp, Homo sapiens
acaattacatacaat

SEQ ID NO: 1056949 - DNA, 15 bp, Homo sapiens
cacaattacatacaa

SEQ ID NO: 1056950 - DNA, 15 bp, Homo sapiens
tcacaattacataca

SEQ ID NO: 1056951 - DNA, 15 bp, Homo sapiens
gtcacaattacatac

SEQ ID NO: 1056952 - DNA, 15 bp, Homo sapiens
tgtcacaattacata

SEQ ID NO: 1056953 - DNA, 15 bp, Homo sapiens
atgtcacaattacat

SEQ ID NO: 1056954 - DNA, 15 bp, Homo sapiens
gatgtcacaattaca

SEQ ID NO: 1056955 - DNA, 15 bp, Homo sapiens
agatgtcacaattac

SEQ ID NO: 1056956 - DNA, 15 bp, Homo sapiens
cagatgtcacaatta

SEQ ID NO: 1056957 - DNA, 15 bp, Homo sapiens
acagatgtcacaatt

SEQ ID NO: 1056958 - DNA, 15 bp, Homo sapiens
cacagatgtcacaat

SEQ ID NO: 1056959 - DNA, 15 bp, Homo sapiens
ccacagatgtcacaa

SEQ ID NO: 1056960 - DNA, 15 bp, Homo sapiens
cccacagatgtcaca

SEQ ID NO: 1056961 - DNA, 15 bp, Homo sapiens
tcccacagatgtcac

SEQ ID NO: 1056962 - DNA, 15 bp, Homo sapiens
ctcccacagatgtca

SEQ ID NO: 1056963 - DNA, 15 bp, Homo sapiens
tctcccacagatgtc

SEQ ID NO: 1056964 - DNA, 15 bp, Homo sapiens
ttctcccacagatgt

SEQ ID NO: 1056965 - DNA, 15 bp, Homo sapiens
tttctcccacagatg

SEQ ID NO: 1056966 - DNA, 15 bp, Homo sapiens
ctttctcccacagat

SEQ ID NO: 1056967 - DNA, 15 bp, Homo sapiens
cctttctcccacaga

SEQ ID NO: 1056968 - DNA, 15 bp, Homo sapiens
tcctttctcccacag

SEQ ID NO: 1056969 - DNA, 15 bp, Homo sapiens
atcctttctcccaca

SEQ ID NO: 1056970 - DNA, 15 bp, Homo sapiens
catcctttctcccac

SEQ ID NO: 1056971 - DNA, 15 bp, Homo sapiens
acatcctttctccca

SEQ ID NO: 1056972 - DNA, 15 bp, Homo sapiens
tacatcctttctccc

SEQ ID NO: 1056973 - DNA, 15 bp, Homo sapiens
ttacatcctttctcc

SEQ ID NO: 1056974 - DNA, 15 bp, Homo sapiens
tttacatcctttctc

SEQ ID NO: 1056975 - DNA, 15 bp, Homo sapiens
ttttacatcctttct

SEQ ID NO: 1056976 - DNA, 15 bp, Homo sapiens
tttttacatcctttc

SEQ ID NO: 1056977 - DNA, 15 bp, Homo sapiens
atttttacatccttt

SEQ ID NO: 1056978 - DNA, 15 bp, Homo sapiens
tatttttacatcctt

SEQ ID NO: 1056979 - DNA, 15 bp, Homo sapiens
ctatttttacatcct

SEQ ID NO: 1056980 - DNA, 15 bp, Homo sapiens
actatttttacatcc

SEQ ID NO: 1056981 - DNA, 15 bp, Homo sapiens
tactatttttacatc

SEQ ID NO: 1056982 - DNA, 15 bp, Homo sapiens
ttactatttttacat

SEQ ID NO: 1056983 - DNA, 15 bp, Homo sapiens
gttactatttttaca

SEQ ID NO: 1056984 - DNA, 15 bp, Homo sapiens
cgttactatttttac

SEQ ID NO: 1056985 - DNA, 15 bp, Homo sapiens
tcgttactattttta

SEQ ID NO: 1056986 - DNA, 15 bp, Homo sapiens
atcgttactattttt

SEQ ID NO: 1056987 - DNA, 15 bp, Homo sapiens
gatcgttactatttt

SEQ ID NO: 1056988 - DNA, 15 bp, Homo sapiens
tgatcgttactattt

SEQ ID NO: 1056989 - DNA, 15 bp, Homo sapiens
atgatcgttactatt

SEQ ID NO: 1056990 - DNA, 15 bp, Homo sapiens
tatgatcgttactat

SEQ ID NO: 1056991 - DNA, 15 bp, Homo sapiens
ctatgatcgttacta

SEQ ID NO: 1056992 - DNA, 15 bp, Homo sapiens
gctatgatcgttact

SEQ ID NO: 1056993 - DNA, 15 bp, Homo sapiens
agctatgatcgttac

SEQ ID NO: 1056994 - DNA, 15 bp, Homo sapiens
tagctatgatcgtta

SEQ ID NO: 1056995 - DNA, 15 bp, Homo sapiens
ctagctatgatcgtt

SEQ ID NO: 1056996 - DNA, 15 bp, Homo sapiens
gctagctatgatcgt

SEQ ID NO: 1056997 - DNA, 15 bp, Homo sapiens
tgctagctatgatcg

SEQ ID NO: 1056998 - DNA, 15 bp, Homo sapiens
atgctagctatgatc

SEQ ID NO: 1056999 - DNA, 15 bp, Homo sapiens
aatgctagctatgat

SEQ ID NO: 1057000 - DNA, 15 bp, Homo sapiens
aaatgctagctatga

SEQ ID NO: 1057001 - DNA, 15 bp, Homo sapiens
taaatgctagctatg

SEQ ID NO: 1057002 - DNA, 15 bp, Homo sapiens
ataaatgctagctat

SEQ ID NO: 1057003 - DNA, 15 bp, Homo sapiens
cataaatgctagcta

SEQ ID NO: 1057004 - DNA, 15 bp, Homo sapiens
ccataaatgctagct

SEQ ID NO: 1057005 - DNA, 15 bp, Homo sapiens
tccataaatgctagc

SEQ ID NO: 1057006 - DNA, 15 bp, Homo sapiens
ttccataaatgctag

SEQ ID NO: 1057007 - DNA, 15 bp, Homo sapiens
gttccataaatgcta

SEQ ID NO: 1057008 - DNA, 15 bp, Homo sapiens
tgttccataaatgct

SEQ ID NO: 1057009 - DNA, 15 bp, Homo sapiens
gtgttccataaatgc

SEQ ID NO: 1057010 - DNA, 15 bp, Homo sapiens
agtgttccataaatg

SEQ ID NO: 1057011 - DNA, 15 bp, Homo sapiens
aagtgttccataaat

SEQ ID NO: 1057012 - DNA, 15 bp, Homo sapiens
taagtgttccataaa

SEQ ID NO: 1057013 - DNA, 15 bp, Homo sapiens
ataagtgttccataa

SEQ ID NO: 1057014 - DNA, 15 bp, Homo sapiens
cataagtgttccata

SEQ ID NO: 1057015 - DNA, 15 bp, Homo sapiens
tcataagtgttccat

SEQ ID NO: 1057016 - DNA, 15 bp, Homo sapiens
ctcataagtgttcca

SEQ ID NO: 1057017 - DNA, 15 bp, Homo sapiens
gctcataagtgttcc

SEQ ID NO: 1057018 - DNA, 15 bp, Homo sapiens
ggctcataagtgttc

SEQ ID NO: 1057019 - DNA, 15 bp, Homo sapiens
tggctcataagtgtt

SEQ ID NO: 1057020 - DNA, 15 bp, Homo sapiens
ttggctcataagtgt

SEQ ID NO: 1057021 - DNA, 15 bp, Homo sapiens
cttggctcataagtg

SEQ ID NO: 1057022 - DNA, 15 bp, Homo sapiens
ccttggctcataagt

SEQ ID NO: 1057023 - DNA, 15 bp, Homo sapiens
accttggctcataag

SEQ ID NO: 1057024 - DNA, 15 bp, Homo sapiens
gaccttggctcataa

SEQ ID NO: 1057025 - DNA, 15 bp, Homo sapiens
ggaccttggctcata

SEQ ID NO: 1057026 - DNA, 15 bp, Homo sapiens
tggaccttggctcat

SEQ ID NO: 1057027 - DNA, 15 bp, Homo sapiens
atggaccttggctca

SEQ ID NO: 1057028 - DNA, 15 bp, Homo sapiens
aatggaccttggctc

SEQ ID NO: 1057029 - DNA, 15 bp, Homo sapiens
gaatggaccttggct

SEQ ID NO: 1057030 - DNA, 15 bp, Homo sapiens
agaatggaccttggc

SEQ ID NO: 1057031 - DNA, 15 bp, Homo sapiens
cagaatggaccttgg

SEQ ID NO: 1057032 - DNA, 15 bp, Homo sapiens
tcagaatggaccttg

SEQ ID NO: 1057033 - DNA, 15 bp, Homo sapiens
ctcagaatggacctt

SEQ ID NO: 1057034 - DNA, 15 bp, Homo sapiens
gctcagaatggacct

SEQ ID NO: 1057035 - DNA, 15 bp, Homo sapiens
tgctcagaatggacc

SEQ ID NO: 1057036 - DNA, 15 bp, Homo sapiens
gtgctcagaatggac

SEQ ID NO: 1057037 - DNA, 15 bp, Homo sapiens
tgtgctcagaatgga

SEQ ID NO: 1057038 - DNA, 15 bp, Homo sapiens
atgtgctcagaatgg

SEQ ID NO: 1057039 - DNA, 15 bp, Homo sapiens
aatgtgctcagaatg

SEQ ID NO: 1057040 - DNA, 15 bp, Homo sapiens
caatgtgctcagaat

SEQ ID NO: 1057041 - DNA, 15 bp, Homo sapiens
gcaatgtgctcagaa

SEQ ID NO: 1057042 - DNA, 15 bp, Homo sapiens
tgcaatgtgctcaga

SEQ ID NO: 1057043 - DNA, 15 bp, Homo sapiens
atgcaatgtgctcag

SEQ ID NO: 1057044 - DNA, 15 bp, Homo sapiens
catgcaatgtgctca

SEQ ID NO: 1057045 - DNA, 15 bp, Homo sapiens
gcatgcaatgtgctc

SEQ ID NO: 1057046 - DNA, 15 bp, Homo sapiens
tgcatgcaatgtgct

SEQ ID NO: 1057047 - DNA, 15 bp, Homo sapiens
atgcatgcaatgtgc

SEQ ID NO: 1057048 - DNA, 15 bp, Homo sapiens
aatgcatgcaatgtg

SEQ ID NO: 1057049 - DNA, 15 bp, Homo sapiens
taatgcatgcaatgt

SEQ ID NO: 1057050 - DNA, 15 bp, Homo sapiens
ataatgcatgcaatg

SEQ ID NO: 1057051 - DNA, 15 bp, Homo sapiens
aataatgcatgcaat

SEQ ID NO: 1057052 - DNA, 15 bp, Homo sapiens
aaataatgcatgcaa

SEQ ID NO: 1057053 - DNA, 15 bp, Homo sapiens
caaataatgcatgca

SEQ ID NO: 1057054 - DNA, 15 bp, Homo sapiens
tcaaataatgcatgc

SEQ ID NO: 1057055 - DNA, 15 bp, Homo sapiens
atcaaataatgcatg

SEQ ID NO: 1057056 - DNA, 15 bp, Homo sapiens
aatcaaataatgcat

SEQ ID NO: 1057057 - DNA, 15 bp, Homo sapiens
aaatcaaataatgca

SEQ ID NO: 1057058 - DNA, 15 bp, Homo sapiens
taaatcaaataatgc

SEQ ID NO: 1057059 - DNA, 15 bp, Homo sapiens
ttaaatcaaataatg

SEQ ID NO: 1057060 - DNA, 15 bp, Homo sapiens
attaaatcaaataat

SEQ ID NO: 1057061 - DNA, 15 bp, Homo sapiens
gattaaatcaaataa

SEQ ID NO: 1057062 - DNA, 15 bp, Homo sapiens
agattaaatcaaata

SEQ ID NO: 1057063 - DNA, 15 bp, Homo sapiens
aagattaaatcaaat

SEQ ID NO: 1057064 - DNA, 15 bp, Homo sapiens
gaagattaaatcaaa

SEQ ID NO: 1057065 - DNA, 15 bp, Homo sapiens
tgaagattaaatcaa

SEQ ID NO: 1057066 - DNA, 15 bp, Homo sapiens
atgaagattaaatca

SEQ ID NO: 1057067 - DNA, 15 bp, Homo sapiens
tatgaagattaaatc

SEQ ID NO: 1057068 - DNA, 15 bp, Homo sapiens
ttatgaagattaaat

SEQ ID NO: 1057069 - DNA, 15 bp, Homo sapiens
attatgaagattaaa

SEQ ID NO: 1057070 - DNA, 15 bp, Homo sapiens
cattatgaagattaa

SEQ ID NO: 1057071 - DNA, 15 bp, Homo sapiens
gcattatgaagatta

SEQ ID NO: 1057072 - DNA, 15 bp, Homo sapiens
ggcattatgaagatt

SEQ ID NO: 1057073 - DNA, 15 bp, Homo sapiens
tggcattatgaagat

SEQ ID NO: 1057074 - DNA, 15 bp, Homo sapiens
atggcattatgaaga

SEQ ID NO: 1057075 - DNA, 15 bp, Homo sapiens
aatggcattatgaag

SEQ ID NO: 1057076 - DNA, 15 bp, Homo sapiens
caatggcattatgaa

SEQ ID NO: 1057077 - DNA, 15 bp, Homo sapiens
tcaatggcattatga

SEQ ID NO: 1057078 - DNA, 15 bp, Homo sapiens
ctcaatggcattatg

SEQ ID NO: 1057079 - DNA, 15 bp, Homo sapiens
actcaatggcattat

SEQ ID NO: 1057080 - DNA, 15 bp, Homo sapiens
cactcaatggcatta

SEQ ID NO: 1057081 - DNA, 15 bp, Homo sapiens
ccactcaatggcatt

SEQ ID NO: 1057082 - DNA, 15 bp, Homo sapiens
accactcaatggcat

SEQ ID NO: 1057083 - DNA, 15 bp, Homo sapiens
caccactcaatggca

SEQ ID NO: 1057084 - DNA, 15 bp, Homo sapiens
acaccactcaatggc

SEQ ID NO: 1057085 - DNA, 15 bp, Homo sapiens
aacaccactcaatgg

SEQ ID NO: 1057086 - DNA, 15 bp, Homo sapiens
taacaccactcaatg

SEQ ID NO: 1057087 - DNA, 15 bp, Homo sapiens
ctaacaccactcaat

SEQ ID NO: 1057088 - DNA, 15 bp, Homo sapiens
gctaacaccactcaa

SEQ ID NO: 1057089 - DNA, 15 bp, Homo sapiens
ggctaacaccactca

SEQ ID NO: 1057090 - DNA, 15 bp, Homo sapiens
gggctaacaccactc

SEQ ID NO: 1057091 - DNA, 15 bp, Homo sapiens
tgggctaacaccact

SEQ ID NO: 1057092 - DNA, 15 bp, Homo sapiens
atgggctaacaccac

SEQ ID NO: 1057093 - DNA, 15 bp, Homo sapiens
aatgggctaacacca

SEQ ID NO: 1057094 - DNA, 15 bp, Homo sapiens
aaatgggctaacacc

SEQ ID NO: 1057095 - DNA, 15 bp, Homo sapiens
aaaatgggctaacac

SEQ ID NO: 1057096 - DNA, 15 bp, Homo sapiens
taaaatgggctaaca

SEQ ID NO: 1057097 - DNA, 15 bp, Homo sapiens
gtaaaatgggctaac

SEQ ID NO: 1057098 - DNA, 15 bp, Homo sapiens
tgtaaaatgggctaa

SEQ ID NO: 1057099 - DNA, 15 bp, Homo sapiens
ctgtaaaatgggcta

SEQ ID NO: 1057100 - DNA, 15 bp, Homo sapiens
tctgtaaaatgggct

SEQ ID NO: 1057101 - DNA, 15 bp, Homo sapiens
atctgtaaaatgggc

SEQ ID NO: 1057102 - DNA, 15 bp, Homo sapiens
gtttctcatctgtaa

SEQ ID NO: 1057103 - DNA, 15 bp, Homo sapiens
agtttctcatctgta

SEQ ID NO: 1057104 - DNA, 15 bp, Homo sapiens
cagtttctcatctgt

SEQ ID NO: 1057105 - DNA, 15 bp, Homo sapiens
agcagtttctcatct

SEQ ID NO: 1057106 - DNA, 15 bp, Homo sapiens
cagcagtttctcatc

SEQ ID NO: 1057107 - DNA, 15 bp, Homo sapiens
ccagcagtttctcat

SEQ ID NO: 1057108 - DNA, 15 bp, Homo sapiens
gccagcagtttctca

SEQ ID NO: 1057109 - DNA, 15 bp, Homo sapiens
agccagcagtttctc

SEQ ID NO: 1057110 - DNA, 15 bp, Homo sapiens
gagccagcagtttct

SEQ ID NO: 1057111 - DNA, 15 bp, Homo sapiens
tgagccagcagtttc

SEQ ID NO: 1057112 - DNA, 15 bp, Homo sapiens
ttgagccagcagttt

SEQ ID NO: 1057113 - DNA, 15 bp, Homo sapiens
tttgagccagcagtt

SEQ ID NO: 1057114 - DNA, 15 bp, Homo sapiens
ctttgagccagcagt

SEQ ID NO: 1057115 - DNA, 15 bp, Homo sapiens
tctttgagccagcag

SEQ ID NO: 1057116 - DNA, 15 bp, Homo sapiens
ctctttgagccagca

SEQ ID NO: 1057117 - DNA, 15 bp, Homo sapiens
tctctttgagccagc

SEQ ID NO: 1057118 - DNA, 15 bp, Homo sapiens
atctctttgagccag

SEQ ID NO: 1057119 - DNA, 15 bp, Homo sapiens
catctctttgagcca

SEQ ID NO: 1057120 - DNA, 15 bp, Homo sapiens
tcatctctttgagcc

SEQ ID NO: 1057121 - DNA, 15 bp, Homo sapiens
ctcatctctttgagc

SEQ ID NO: 1057122 - DNA, 15 bp, Homo sapiens
cctcatctctttgag

SEQ ID NO: 1057123 - DNA, 15 bp, Homo sapiens
ccctcatctctttga

SEQ ID NO: 1057124 - DNA, 15 bp, Homo sapiens
tccctcatctctttg

SEQ ID NO: 1057125 - DNA, 15 bp, Homo sapiens
ttccctcatctcttt

SEQ ID NO: 1057126 - DNA, 15 bp, Homo sapiens
tttccctcatctctt

SEQ ID NO: 1057127 - DNA, 15 bp, Homo sapiens
atttccctcatctct

SEQ ID NO: 1057128 - DNA, 15 bp, Homo sapiens
gatttccctcatctc

SEQ ID NO: 1057129 - DNA, 15 bp, Homo sapiens
tgatttccctcatct

SEQ ID NO: 1057130 - DNA, 15 bp, Homo sapiens
ctgatttccctcatc

SEQ ID NO: 1057131 - DNA, 15 bp, Homo sapiens
actgatttccctcat

SEQ ID NO: 1057132 - DNA, 15 bp, Homo sapiens
cactgatttccctca

SEQ ID NO: 1057133 - DNA, 15 bp, Homo sapiens
ccactgatttccctc

SEQ ID NO: 1057134 - DNA, 15 bp, Homo sapiens
tccactgatttccct

SEQ ID NO: 1057135 - DNA, 15 bp, Homo sapiens
ctccactgatttccc

SEQ ID NO: 1057136 - DNA, 15 bp, Homo sapiens
cctccactgatttcc

SEQ ID NO: 1057137 - DNA, 15 bp, Homo sapiens
ccctccactgatttc

SEQ ID NO: 1057138 - DNA, 15 bp, Homo sapiens
gccctccactgattt

SEQ ID NO: 1057139 - DNA, 15 bp, Homo sapiens
tgccctccactgatt

SEQ ID NO: 1057140 - DNA, 15 bp, Homo sapiens
gtgccctccactgat

SEQ ID NO: 1057141 - DNA, 15 bp, Homo sapiens
tgtgccctccactga

SEQ ID NO: 1057142 - DNA, 15 bp, Homo sapiens
ttgtgccctccactg

SEQ ID NO: 1057143 - DNA, 15 bp, Homo sapiens
tttgtgccctccact

SEQ ID NO: 1057144 - DNA, 15 bp, Homo sapiens
ctttgtgccctccac

SEQ ID NO: 1057145 - DNA, 15 bp, Homo sapiens
gctttgtgccctcca

SEQ ID NO: 1057146 - DNA, 15 bp, Homo sapiens
agctttgtgccctcc

SEQ ID NO: 1057147 - DNA, 15 bp, Homo sapiens
tagctttgtgccctc

SEQ ID NO: 1057148 - DNA, 15 bp, Homo sapiens
ctagctttgtgccct

SEQ ID NO: 1057149 - DNA, 15 bp, Homo sapiens
actagctttgtgccc

SEQ ID NO: 1057150 - DNA, 15 bp, Homo sapiens
gactagctttgtgcc

SEQ ID NO: 1057151 - DNA, 15 bp, Homo sapiens
tgactagctttgtgc

SEQ ID NO: 1057152 - DNA, 15 bp, Homo sapiens
ctgactagctttgtg

SEQ ID NO: 1057153 - DNA, 15 bp, Homo sapiens
actgactagctttgt

SEQ ID NO: 1057154 - DNA, 15 bp, Homo sapiens
cactgactagctttg

SEQ ID NO: 1057155 - DNA, 15 bp, Homo sapiens
tcactgactagcttt

SEQ ID NO: 1057156 - DNA, 15 bp, Homo sapiens
atcactgactagctt

SEQ ID NO: 1057157 - DNA, 15 bp, Homo sapiens
tatcactgactagct

SEQ ID NO: 1057158 - DNA, 15 bp, Homo sapiens
ttatcactgactagc

SEQ ID NO: 1057159 - DNA, 15 bp, Homo sapiens
cttatcactgactag

SEQ ID NO: 1057160 - DNA, 15 bp, Homo sapiens
tcttatcactgacta

SEQ ID NO: 1057161 - DNA, 15 bp, Homo sapiens
ctcttatcactgact

SEQ ID NO: 1057162 - DNA, 15 bp, Homo sapiens
cctcttatcactgac

SEQ ID NO: 1057163 - DNA, 15 bp, Homo sapiens
gcctcttatcactga

SEQ ID NO: 1057164 - DNA, 15 bp, Homo sapiens
tgcctcttatcactg

SEQ ID NO: 1057165 - DNA, 15 bp, Homo sapiens
ctgcctcttatcact

SEQ ID NO: 1057166 - DNA, 15 bp, Homo sapiens
cctgcctcttatcac

SEQ ID NO: 1057167 - DNA, 15 bp, Homo sapiens
acctgcctcttatca

SEQ ID NO: 1057168 - DNA, 15 bp, Homo sapiens
gacctgcctcttatc

SEQ ID NO: 1057169 - DNA, 15 bp, Homo sapiens
agacctgcctcttat

SEQ ID NO: 1057170 - DNA, 15 bp, Homo sapiens
tagacctgcctctta

SEQ ID NO: 1057171 - DNA, 15 bp, Homo sapiens
ttagacctgcctctt

SEQ ID NO: 1057172 - DNA, 15 bp, Homo sapiens
attagacctgcctct

SEQ ID NO: 1057173 - DNA, 15 bp, Homo sapiens
aattagacctgcctc

SEQ ID NO: 1057174 - DNA, 15 bp, Homo sapiens
aaattagacctgcct

SEQ ID NO: 1057175 - DNA, 15 bp, Homo sapiens
aaaattagacctgcc

SEQ ID NO: 1057176 - DNA, 15 bp, Homo sapiens
taaaattagacctgc

SEQ ID NO: 1057177 - DNA, 15 bp, Homo sapiens
ttaaaattagacctg

SEQ ID NO: 1057178 - DNA, 15 bp, Homo sapiens
tttaaaattagacct

SEQ ID NO: 1057179 - DNA, 15 bp, Homo sapiens
ctttaaaattagacc

SEQ ID NO: 1057180 - DNA, 15 bp, Homo sapiens
actttaaaattagac

SEQ ID NO: 1057181 - DNA, 15 bp, Homo sapiens
gactttaaaattaga

SEQ ID NO: 1057182 - DNA, 15 bp, Homo sapiens
agactttaaaattag

SEQ ID NO: 1057183 - DNA, 15 bp, Homo sapiens
gagactttaaaatta

SEQ ID NO: 1057184 - DNA, 15 bp, Homo sapiens
ggagactttaaaatt

SEQ ID NO: 1057185 - DNA, 15 bp, Homo sapiens
aggagactttaaaat

SEQ ID NO: 1057186 - DNA, 15 bp, Homo sapiens
aaggagactttaaaa

SEQ ID NO: 1057187 - DNA, 15 bp, Homo sapiens
aaaggagactttaaa

SEQ ID NO: 1057188 - DNA, 15 bp, Homo sapiens
caaaggagactttaa

SEQ ID NO: 1057189 - DNA, 15 bp, Homo sapiens
gcaaaggagacttta

SEQ ID NO: 1057190 - DNA, 15 bp, Homo sapiens
agcaaaggagacttt

SEQ ID NO: 1057191 - DNA, 15 bp, Homo sapiens
aagcaaaggagactt

SEQ ID NO: 1057192 - DNA, 15 bp, Homo sapiens
taagcaaaggagact

SEQ ID NO: 1057193 - DNA, 15 bp, Homo sapiens
ttaagcaaaggagac

SEQ ID NO: 1057194 - DNA, 15 bp, Homo sapiens
attaagcaaaggaga

SEQ ID NO: 1057195 - DNA, 15 bp, Homo sapiens
tattaagcaaaggag

SEQ ID NO: 1057196 - DNA, 15 bp, Homo sapiens
ttattaagcaaagga

SEQ ID NO: 1057197 - DNA, 15 bp, Homo sapiens
tttattaagcaaagg

SEQ ID NO: 1057198 - DNA, 15 bp, Homo sapiens
gtttattaagcaaag

SEQ ID NO: 1057199 - DNA, 15 bp, Homo sapiens
tgtttattaagcaaa

SEQ ID NO: 1057200 - DNA, 15 bp, Homo sapiens
atgtttattaagcaa

SEQ ID NO: 1057201 - DNA, 15 bp, Homo sapiens
tatgtttattaagca

SEQ ID NO: 1057202 - DNA, 15 bp, Homo sapiens
gtatgtttattaagc

SEQ ID NO: 1057203 - DNA, 15 bp, Homo sapiens
tgtatgtttattaag

SEQ ID NO: 1057204 - DNA, 15 bp, Homo sapiens
ctgtatgtttattaa

SEQ ID NO: 1057205 - DNA, 15 bp, Homo sapiens
actgtatgtttatta

SEQ ID NO: 1057206 - DNA, 15 bp, Homo sapiens
gactgtatgtttatt

SEQ ID NO: 1057207 - DNA, 15 bp, Homo sapiens
cgactgtatgtttat

SEQ ID NO: 1057208 - DNA, 15 bp, Homo sapiens
acgactgtatgttta

SEQ ID NO: 1057209 - DNA, 15 bp, Homo sapiens
cacgactgtatgttt

SEQ ID NO: 1057210 - DNA, 15 bp, Homo sapiens
gcacgactgtatgtt

SEQ ID NO: 1057211 - DNA, 15 bp, Homo sapiens
agcacgactgtatgt

SEQ ID NO: 1057212 - DNA, 15 bp, Homo sapiens
aagcacgactgtatg

SEQ ID NO: 1057213 - DNA, 15 bp, Homo sapiens
aaagcacgactgtat

SEQ ID NO: 1057214 - DNA, 15 bp, Homo sapiens
caaagcacgactgta

SEQ ID NO: 1057215 - DNA, 15 bp, Homo sapiens
gcaaagcacgactgt

SEQ ID NO: 1057216 - DNA, 15 bp, Homo sapiens
agcaaagcacgactg

SEQ ID NO: 1057217 - DNA, 15 bp, Homo sapiens
aagcaaagcacgact

SEQ ID NO: 1057218 - DNA, 15 bp, Homo sapiens
gaagcaaagcacgac

SEQ ID NO: 1057219 - DNA, 15 bp, Homo sapiens
tgaagcaaagcacga

SEQ ID NO: 1057220 - DNA, 15 bp, Homo sapiens
atgaagcaaagcacg

SEQ ID NO: 1057221 - DNA, 15 bp, Homo sapiens
catgaagcaaagcac

SEQ ID NO: 1057222 - DNA, 15 bp, Homo sapiens
tcatgaagcaaagca

SEQ ID NO: 1057223 - DNA, 15 bp, Homo sapiens
atcatgaagcaaagc

SEQ ID NO: 1057224 - DNA, 15 bp, Homo sapiens
catcatgaagcaaag

SEQ ID NO: 1057225 - DNA, 15 bp, Homo sapiens
ccatcatgaagcaaa

SEQ ID NO: 1057226 - DNA, 15 bp, Homo sapiens
cccatcatgaagcaa

SEQ ID NO: 1057227 - DNA, 15 bp, Homo sapiens
ccccatcatgaagca

SEQ ID NO: 1057228 - DNA, 15 bp, Homo sapiens
tccccatcatgaagc

SEQ ID NO: 1057229 - DNA, 15 bp, Homo sapiens
atccccatcatgaag

SEQ ID NO: 1057230 - DNA, 15 bp, Homo sapiens
tatccccatcatgaa

SEQ ID NO: 1057231 - DNA, 15 bp, Homo sapiens
ctatccccatcatga

SEQ ID NO: 1057232 - DNA, 15 bp, Homo sapiens
actatccccatcatg

SEQ ID NO: 1057233 - DNA, 15 bp, Homo sapiens
aactatccccatcat

SEQ ID NO: 1057234 - DNA, 15 bp, Homo sapiens
gaactatccccatca

SEQ ID NO: 1057235 - DNA, 15 bp, Homo sapiens
tgaactatccccatc

SEQ ID NO: 1057236 - DNA, 15 bp, Homo sapiens
atgaactatccccat

SEQ ID NO: 1057237 - DNA, 15 bp, Homo sapiens
gatgaactatcccca

SEQ ID NO: 1057238 - DNA, 15 bp, Homo sapiens
agatgaactatcccc

SEQ ID NO: 1057239 - DNA, 15 bp, Homo sapiens
aagatgaactatccc

SEQ ID NO: 1057240 - DNA, 15 bp, Homo sapiens
gaagatgaactatcc

SEQ ID NO: 1057241 - DNA, 15 bp, Homo sapiens
tgaagatgaactatc

SEQ ID NO: 1057242 - DNA, 15 bp, Homo sapiens
atgaagatgaactat

SEQ ID NO: 1057243 - DNA, 15 bp, Homo sapiens
catgaagatgaacta

SEQ ID NO: 1057244 - DNA, 15 bp, Homo sapiens
acatgaagatgaact

SEQ ID NO: 1057245 - DNA, 15 bp, Homo sapiens
cacatgaagatgaac

SEQ ID NO: 1057246 - DNA, 15 bp, Homo sapiens
tcacatgaagatgaa

SEQ ID NO: 1057247 - DNA, 15 bp, Homo sapiens
ttcacatgaagatga

SEQ ID NO: 1057248 - DNA, 15 bp, Homo sapiens
attcacatgaagatg

SEQ ID NO: 1057249 - DNA, 15 bp, Homo sapiens
tattcacatgaagat

SEQ ID NO: 1057250 - DNA, 15 bp, Homo sapiens
gtattcacatgaaga

SEQ ID NO: 1057251 - DNA, 15 bp, Homo sapiens
ggtattcacatgaag

SEQ ID NO: 1057252 - DNA, 15 bp, Homo sapiens
tggtattcacatgaa

SEQ ID NO: 1057253 - DNA, 15 bp, Homo sapiens
gtggtattcacatga

SEQ ID NO: 1057254 - DNA, 15 bp, Homo sapiens
tgtggtattcacatg

SEQ ID NO: 1057255 - DNA, 15 bp, Homo sapiens
ttgtggtattcacat

SEQ ID NO: 1057256 - DNA, 15 bp, Homo sapiens
tttgtggtattcaca

SEQ ID NO: 1057257 - DNA, 15 bp, Homo sapiens
ttttgtggtattcac

SEQ ID NO: 1057258 - DNA, 15 bp, Homo sapiens
attttgtggtattca

SEQ ID NO: 1057259 - DNA, 15 bp, Homo sapiens
cattttgtggtattc

SEQ ID NO: 1057260 - DNA, 15 bp, Homo sapiens
acattttgtggtatt

SEQ ID NO: 1057261 - DNA, 15 bp, Homo sapiens
tacattttgtggtat

SEQ ID NO: 1057262 - DNA, 15 bp, Homo sapiens
gtacattttgtggta

SEQ ID NO: 1057263 - DNA, 15 bp, Homo sapiens
agtacattttgtggt

SEQ ID NO: 1057264 - DNA, 15 bp, Homo sapiens
aagtacattttgtgg

SEQ ID NO: 1057265 - DNA, 15 bp, Homo sapiens
taagtacattttgtg

SEQ ID NO: 1057266 - DNA, 15 bp, Homo sapiens
gtaagtacattttgt

SEQ ID NO: 1057267 - DNA, 15 bp, Homo sapiens
tgtaagtacattttg

SEQ ID NO: 1057268 - DNA, 15 bp, Homo sapiens
gtgtaagtacatttt

SEQ ID NO: 1057269 - DNA, 15 bp, Homo sapiens
tgtgtaagtacattt

SEQ ID NO: 1057270 - DNA, 15 bp, Homo sapiens
ttgtgtaagtacatt

SEQ ID NO: 1057271 - DNA, 15 bp, Homo sapiens
gggtttgtgtaagta

SEQ ID NO: 1057272 - DNA, 15 bp, Homo sapiens
tgggtttgtgtaagt

SEQ ID NO: 1057273 - DNA, 15 bp, Homo sapiens
gtgggtttgtgtaag

SEQ ID NO: 1057274 - DNA, 15 bp, Homo sapiens
tgtgggtttgtgtaa

SEQ ID NO: 1057275 - DNA, 15 bp, Homo sapiens
atgtgggtttgtgta

SEQ ID NO: 1057276 - DNA, 15 bp, Homo sapiens
tatgtgggtttgtgt

SEQ ID NO: 1057277 - DNA, 15 bp, Homo sapiens
ctatgtgggtttgtg

SEQ ID NO: 1057278 - DNA, 15 bp, Homo sapiens
gctatgtgggtttgt

SEQ ID NO: 1057279 - DNA, 15 bp, Homo sapiens
tgctatgtgggtttg

SEQ ID NO: 1057280 - DNA, 15 bp, Homo sapiens
atgctatgtgggttt

SEQ ID NO: 1057281 - DNA, 15 bp, Homo sapiens
tatgctatgtgggtt

SEQ ID NO: 1057282 - DNA, 15 bp, Homo sapiens
ctatgctatgtgggt

SEQ ID NO: 1057283 - DNA, 15 bp, Homo sapiens
gctatgctatgtggg

SEQ ID NO: 1057284 - DNA, 15 bp, Homo sapiens
ggctatgctatgtgg

SEQ ID NO: 1057285 - DNA, 15 bp, Homo sapiens
aggctatgctatgtg

SEQ ID NO: 1057286 - DNA, 15 bp, Homo sapiens
taggctatgctatgt

SEQ ID NO: 1057287 - DNA, 15 bp, Homo sapiens
gtaggctatgctatg

SEQ ID NO: 1057288 - DNA, 15 bp, Homo sapiens
agtaggctatgctat

SEQ ID NO: 1057289 - DNA, 15 bp, Homo sapiens
tagtaggctatgcta

SEQ ID NO: 1057290 - DNA, 15 bp, Homo sapiens
gtagtaggctatgct

SEQ ID NO: 1057291 - DNA, 15 bp, Homo sapiens
tgtagtaggctatgc

SEQ ID NO: 1057292 - DNA, 15 bp, Homo sapiens
gtgtagtaggctatg

SEQ ID NO: 1057293 - DNA, 15 bp, Homo sapiens
tgtgtagtaggctat

SEQ ID NO: 1057294 - DNA, 15 bp, Homo sapiens
gtgtgtagtaggcta

SEQ ID NO: 1057295 - DNA, 15 bp, Homo sapiens
agtgtgtagtaggct

SEQ ID NO: 1057296 - DNA, 15 bp, Homo sapiens
cagtgtgtagtaggc

SEQ ID NO: 1057297 - DNA, 15 bp, Homo sapiens
tcagtgtgtagtagg

SEQ ID NO: 1057298 - DNA, 15 bp, Homo sapiens
ctcagtgtgtagtag

SEQ ID NO: 1057299 - DNA, 15 bp, Homo sapiens
cctcagtgtgtagta

SEQ ID NO: 1057300 - DNA, 15 bp, Homo sapiens
gcctcagtgtgtagt

SEQ ID NO: 1057301 - DNA, 15 bp, Homo sapiens
agcctcagtgtgtag

SEQ ID NO: 1057302 - DNA, 15 bp, Homo sapiens
cagcctcagtgtgta

SEQ ID NO: 1057303 - DNA, 15 bp, Homo sapiens
acagcctcagtgtgt

SEQ ID NO: 1057304 - DNA, 15 bp, Homo sapiens
tacagcctcagtgtg

SEQ ID NO: 1057305 - DNA, 15 bp, Homo sapiens
atacagcctcagtgt

SEQ ID NO: 1057306 - DNA, 15 bp, Homo sapiens
catacagcctcagtg

SEQ ID NO: 1057307 - DNA, 15 bp, Homo sapiens
gcatacagcctcagt

SEQ ID NO: 1057308 - DNA, 15 bp, Homo sapiens
agcatacagcctcag

SEQ ID NO: 1057309 - DNA, 15 bp, Homo sapiens
tagcatacagcctca

SEQ ID NO: 1057310 - DNA, 15 bp, Homo sapiens
gtagcatacagcctc

SEQ ID NO: 1057311 - DNA, 15 bp, Homo sapiens
tgtagcatacagcct

SEQ ID NO: 1057312 - DNA, 15 bp, Homo sapiens
ctgtagcatacagcc

SEQ ID NO: 1057313 - DNA, 15 bp, Homo sapiens
ggctgtagcatacag

SEQ ID NO: 1057314 - DNA, 15 bp, Homo sapiens
aggctgtagcataca

SEQ ID NO: 1057315 - DNA, 15 bp, Homo sapiens
caggctgtagcatac

SEQ ID NO: 1057316 - DNA, 15 bp, Homo sapiens
acaggctgtagcata

SEQ ID NO: 1057317 - DNA, 15 bp, Homo sapiens
cacaggctgtagcat

SEQ ID NO: 1057318 - DNA, 15 bp, Homo sapiens
ccacaggctgtagca

SEQ ID NO: 1057319 - DNA, 15 bp, Homo sapiens
gccacaggctgtagc

SEQ ID NO: 1057320 - DNA, 15 bp, Homo sapiens
agccacaggctgtag

SEQ ID NO: 1057321 - DNA, 15 bp, Homo sapiens
gagccacaggctgta

SEQ ID NO: 1057322 - DNA, 15 bp, Homo sapiens
ggagccacaggctgt

SEQ ID NO: 1057323 - DNA, 15 bp, Homo sapiens
aggagccacaggctg

SEQ ID NO: 1057324 - DNA, 15 bp, Homo sapiens
taggagccacaggct

SEQ ID NO: 1057325 - DNA, 15 bp, Homo sapiens
ctaggagccacaggc

SEQ ID NO: 1057326 - DNA, 15 bp, Homo sapiens
gctaggagccacagg

SEQ ID NO: 1057327 - DNA, 15 bp, Homo sapiens
agctaggagccacag

SEQ ID NO: 1057328 - DNA, 15 bp, Homo sapiens
aagctaggagccaca

SEQ ID NO: 1057329 - DNA, 15 bp, Homo sapiens
taagctaggagccac

SEQ ID NO: 1057330 - DNA, 15 bp, Homo sapiens
gtaagctaggagcca

SEQ ID NO: 1057331 - DNA, 15 bp, Homo sapiens
agtaagctaggagcc

SEQ ID NO: 1057332 - DNA, 15 bp, Homo sapiens
tagtaagctaggagc

SEQ ID NO: 1057333 - DNA, 15 bp, Homo sapiens
ttagtaagctaggag

SEQ ID NO: 1057334 - DNA, 15 bp, Homo sapiens
cttagtaagctagga

SEQ ID NO: 1057335 - DNA, 15 bp, Homo sapiens
gcttagtaagctagg

SEQ ID NO: 1057336 - DNA, 15 bp, Homo sapiens
agcttagtaagctag

SEQ ID NO: 1057337 - DNA, 15 bp, Homo sapiens
cagcttagtaagcta

SEQ ID NO: 1057338 - DNA, 15 bp, Homo sapiens
acagcttagtaagct

SEQ ID NO: 1057339 - DNA, 15 bp, Homo sapiens
tacagcttagtaagc

SEQ ID NO: 1057340 - DNA, 15 bp, Homo sapiens
atacagcttagtaag

SEQ ID NO: 1057341 - DNA, 15 bp, Homo sapiens
tatacagcttagtaa

SEQ ID NO: 1057342 - DNA, 15 bp, Homo sapiens
ctatacagcttagta

SEQ ID NO: 1057343 - DNA, 15 bp, Homo sapiens
gctatacagcttagt

SEQ ID NO: 1057344 - DNA, 15 bp, Homo sapiens
tgctatacagcttag

SEQ ID NO: 1057345 - DNA, 15 bp, Homo sapiens
atgctatacagctta

SEQ ID NO: 1057346 - DNA, 15 bp, Homo sapiens
catgctatacagctt

SEQ ID NO: 1057347 - DNA, 15 bp, Homo sapiens
acatgctatacagct

SEQ ID NO: 1057348 - DNA, 15 bp, Homo sapiens
aacatgctatacagc

SEQ ID NO: 1057349 - DNA, 15 bp, Homo sapiens
taacatgctatacag

SEQ ID NO: 1057350 - DNA, 15 bp, Homo sapiens
ataacatgctataca

SEQ ID NO: 1057351 - DNA, 15 bp, Homo sapiens
aataacatgctatac

SEQ ID NO: 1057352 - DNA, 15 bp, Homo sapiens
caataacatgctata

SEQ ID NO: 1057353 - DNA, 15 bp, Homo sapiens
acaataacatgctat

SEQ ID NO: 1057354 - DNA, 15 bp, Homo sapiens
tacaataacatgcta

SEQ ID NO: 1057355 - DNA, 15 bp, Homo sapiens
gtacaataacatgct

SEQ ID NO: 1057356 - DNA, 15 bp, Homo sapiens
agtacaataacatgc

SEQ ID NO: 1057357 - DNA, 15 bp, Homo sapiens
cagtacaataacatg

SEQ ID NO: 1057358 - DNA, 15 bp, Homo sapiens
tcagtacaataacat

SEQ ID NO: 1057359 - DNA, 15 bp, Homo sapiens
ttcagtacaataaca

SEQ ID NO: 1057360 - DNA, 15 bp, Homo sapiens
attcagtacaataac

SEQ ID NO: 1057361 - DNA, 15 bp, Homo sapiens
tattcagtacaataa

SEQ ID NO: 1057362 - DNA, 15 bp, Homo sapiens
atattcagtacaata

SEQ ID NO: 1057363 - DNA, 15 bp, Homo sapiens
tatattcagtacaat

SEQ ID NO: 1057364 - DNA, 15 bp, Homo sapiens
ctatattcagtacaa

SEQ ID NO: 1057365 - DNA, 15 bp, Homo sapiens
actatattcagtaca

SEQ ID NO: 1057366 - DNA, 15 bp, Homo sapiens
tactatattcagtac

SEQ ID NO: 1057367 - DNA, 15 bp, Homo sapiens
ctactatattcagta

SEQ ID NO: 1057368 - DNA, 15 bp, Homo sapiens
tctactatattcagt

SEQ ID NO: 1057369 - DNA, 15 bp, Homo sapiens
gtctactatattcag

SEQ ID NO: 1057370 - DNA, 15 bp, Homo sapiens
tgtctactatattca

SEQ ID NO: 1057371 - DNA, 15 bp, Homo sapiens
ttgtctactatattc

SEQ ID NO: 1057372 - DNA, 15 bp, Homo sapiens
gttgtctactatatt

SEQ ID NO: 1057373 - DNA, 15 bp, Homo sapiens
ggttgtctactatat

SEQ ID NO: 1057374 - DNA, 15 bp, Homo sapiens
cggttgtctactata

SEQ ID NO: 1057375 - DNA, 15 bp, Homo sapiens
acggttgtctactat

SEQ ID NO: 1057376 - DNA, 15 bp, Homo sapiens
tacggttgtctacta

SEQ ID NO: 1057377 - DNA, 15 bp, Homo sapiens
ctacggttgtctact

SEQ ID NO: 1057378 - DNA, 15 bp, Homo sapiens
gctacggttgtctac

SEQ ID NO: 1057379 - DNA, 15 bp, Homo sapiens
tgctacggttgtcta

SEQ ID NO: 1057380 - DNA, 15 bp, Homo sapiens
gtgctacggttgtct

SEQ ID NO: 1057381 - DNA, 15 bp, Homo sapiens
tgtgctacggttgtc

SEQ ID NO: 1057382 - DNA, 15 bp, Homo sapiens
ttgtgctacggttgt

SEQ ID NO: 1057383 - DNA, 15 bp, Homo sapiens
attgtgctacggttg

SEQ ID NO: 1057384 - DNA, 15 bp, Homo sapiens
cattgtgctacggtt

SEQ ID NO: 1057385 - DNA, 15 bp, Homo sapiens
ccattgtgctacggt

SEQ ID NO: 1057386 - DNA, 15 bp, Homo sapiens
gccattgtgctacgg

SEQ ID NO: 1057387 - DNA, 15 bp, Homo sapiens
tgccattgtgctacg

SEQ ID NO: 1057388 - DNA, 15 bp, Homo sapiens
ttgccattgtgctac

SEQ ID NO: 1057389 - DNA, 15 bp, Homo sapiens
cttgccattgtgcta

SEQ ID NO: 1057390 - DNA, 15 bp, Homo sapiens
acttgccattgtgct

SEQ ID NO: 1057391 - DNA, 15 bp, Homo sapiens
tacttgccattgtgc

SEQ ID NO: 1057392 - DNA, 15 bp, Homo sapiens
atacttgccattgtg

SEQ ID NO: 1057393 - DNA, 15 bp, Homo sapiens
aatacttgccattgt

SEQ ID NO: 1057394 - DNA, 15 bp, Homo sapiens
aaatacttgccattg

SEQ ID NO: 1057395 - DNA, 15 bp, Homo sapiens
caaatacttgccatt

SEQ ID NO: 1057396 - DNA, 15 bp, Homo sapiens
acaaatacttgccat

SEQ ID NO: 1057397 - DNA, 15 bp, Homo sapiens
cacaaatacttgcca

SEQ ID NO: 1057398 - DNA, 15 bp, Homo sapiens
gcacaaatacttgcc

SEQ ID NO: 1057399 - DNA, 15 bp, Homo sapiens
tgcacaaatacttgc

SEQ ID NO: 1057400 - DNA, 15 bp, Homo sapiens
atgcacaaatacttg

SEQ ID NO: 1057401 - DNA, 15 bp, Homo sapiens
gatgcacaaatactt

SEQ ID NO: 1057402 - DNA, 15 bp, Homo sapiens
agatgcacaaatact

SEQ ID NO: 1057403 - DNA, 15 bp, Homo sapiens
tagatgcacaaatac

SEQ ID NO: 1057404 - DNA, 15 bp, Homo sapiens
ttagatgcacaaata

SEQ ID NO: 1057405 - DNA, 15 bp, Homo sapiens
gttagatgcacaaat

SEQ ID NO: 1057406 - DNA, 15 bp, Homo sapiens
agttagatgcacaaa

SEQ ID NO: 1057407 - DNA, 15 bp, Homo sapiens
aagttagatgcacaa

SEQ ID NO: 1057408 - DNA, 15 bp, Homo sapiens
aaagttagatgcaca

SEQ ID NO: 1057409 - DNA, 15 bp, Homo sapiens
aaaagttagatgcac

SEQ ID NO: 1057410 - DNA, 15 bp, Homo sapiens
taaaagttagatgca

SEQ ID NO: 1057411 - DNA, 15 bp, Homo sapiens
ttaaaagttagatgc

SEQ ID NO: 1057412 - DNA, 15 bp, Homo sapiens
tttaaaagttagatg

SEQ ID NO: 1057413 - DNA, 15 bp, Homo sapiens
ttttaaaagttagat

SEQ ID NO: 1057414 - DNA, 15 bp, Homo sapiens
cttttaaaagttaga

SEQ ID NO: 1057415 - DNA, 15 bp, Homo sapiens
tcttttaaaagttag

SEQ ID NO: 1057416 - DNA, 15 bp, Homo sapiens
atcttttaaaagtta

SEQ ID NO: 1057417 - DNA, 15 bp, Homo sapiens
tatcttttaaaagtt

SEQ ID NO: 1057418 - DNA, 15 bp, Homo sapiens
gtatcttttaaaagt

SEQ ID NO: 1057419 - DNA, 15 bp, Homo sapiens
tgtatcttttaaaag

SEQ ID NO: 1057420 - DNA, 15 bp, Homo sapiens
ctgtatcttttaaaa

SEQ ID NO: 1057421 - DNA, 15 bp, Homo sapiens
actgtatcttttaaa

SEQ ID NO: 1057422 - DNA, 15 bp, Homo sapiens
tactgtatcttttaa

SEQ ID NO: 1057423 - DNA, 15 bp, Homo sapiens
ttactgtatctttta

SEQ ID NO: 1057424 - DNA, 15 bp, Homo sapiens
tttactgtatctttt

SEQ ID NO: 1057425 - DNA, 15 bp, Homo sapiens
ttttactgtatcttt

SEQ ID NO: 1057426 - DNA, 15 bp, Homo sapiens
tttttactgtatctt

SEQ ID NO: 1057427 - DNA, 15 bp, Homo sapiens
atttttactgtatct

SEQ ID NO: 1057428 - DNA, 15 bp, Homo sapiens
tatttttactgtatc

SEQ ID NO: 1057429 - DNA, 15 bp, Homo sapiens
gtatttttactgtat

SEQ ID NO: 1057430 - DNA, 15 bp, Homo sapiens
tgtatttttactgta

SEQ ID NO: 1057431 - DNA, 15 bp, Homo sapiens
gtgtatttttactgt

SEQ ID NO: 1057432 - DNA, 15 bp, Homo sapiens
agtgtatttttactg

SEQ ID NO: 1057433 - DNA, 15 bp, Homo sapiens
tagtgtatttttact

SEQ ID NO: 1057434 - DNA, 15 bp, Homo sapiens
atagtgtatttttac

SEQ ID NO: 1057435 - DNA, 15 bp, Homo sapiens
aatagtgtattttta

SEQ ID NO: 1057436 - DNA, 15 bp, Homo sapiens
taatagtgtattttt

SEQ ID NO: 1057437 - DNA, 15 bp, Homo sapiens
gtaatagtgtatttt

SEQ ID NO: 1057438 - DNA, 15 bp, Homo sapiens
ggtaatagtgtattt

SEQ ID NO: 1057439 - DNA, 15 bp, Homo sapiens
cggtaatagtgtatt

SEQ ID NO: 1057440 - DNA, 15 bp, Homo sapiens
acggtaatagtgtat

SEQ ID NO: 1057441 - DNA, 15 bp, Homo sapiens
aacggtaatagtgta

SEQ ID NO: 1057442 - DNA, 15 bp, Homo sapiens
caacggtaatagtgt

SEQ ID NO: 1057443 - DNA, 15 bp, Homo sapiens
acaacggtaatagtg

SEQ ID NO: 1057444 - DNA, 15 bp, Homo sapiens
gacaacggtaatagt

SEQ ID NO: 1057445 - DNA, 15 bp, Homo sapiens
cgacaacggtaatag

SEQ ID NO: 1057446 - DNA, 15 bp, Homo sapiens
acgacaacggtaata

SEQ ID NO: 1057447 - DNA, 15 bp, Homo sapiens
tacgacaacggtaat

SEQ ID NO: 1057448 - DNA, 15 bp, Homo sapiens
atacgacaacggtaa

SEQ ID NO: 1057449 - DNA, 15 bp, Homo sapiens
tatacgacaacggta

SEQ ID NO: 1057450 - DNA, 15 bp, Homo sapiens
atatacgacaacggt

SEQ ID NO: 1057451 - DNA, 15 bp, Homo sapiens
catatacgacaacgg

SEQ ID NO: 1057452 - DNA, 15 bp, Homo sapiens
acatatacgacaacg

SEQ ID NO: 1057453 - DNA, 15 bp, Homo sapiens
cacatatacgacaac

SEQ ID NO: 1057454 - DNA, 15 bp, Homo sapiens
ccacatatacgacaa

SEQ ID NO: 1057455 - DNA, 15 bp, Homo sapiens
accacatatacgaca

SEQ ID NO: 1057456 - DNA, 15 bp, Homo sapiens
gaccacatatacgac

SEQ ID NO: 1057457 - DNA, 15 bp, Homo sapiens
ggaccacatatacga

SEQ ID NO: 1057458 - DNA, 15 bp, Homo sapiens
tggaccacatatacg

SEQ ID NO: 1057459 - DNA, 15 bp, Homo sapiens
atggaccacatatac

SEQ ID NO: 1057460 - DNA, 15 bp, Homo sapiens
gatggaccacatata

SEQ ID NO: 1057461 - DNA, 15 bp, Homo sapiens
agatggaccacatat

SEQ ID NO: 1057462 - DNA, 15 bp, Homo sapiens
aagatggaccacata

SEQ ID NO: 1057463 - DNA, 15 bp, Homo sapiens
aaagatggaccacat

SEQ ID NO: 1057464 - DNA, 15 bp, Homo sapiens
caaagatggaccaca

SEQ ID NO: 1057465 - DNA, 15 bp, Homo sapiens
gcaaagatggaccac

SEQ ID NO: 1057466 - DNA, 15 bp, Homo sapiens
ggcaaagatggacca

SEQ ID NO: 1057467 - DNA, 15 bp, Homo sapiens
gggcaaagatggacc

SEQ ID NO: 1057468 - DNA, 15 bp, Homo sapiens
tgggcaaagatggac

SEQ ID NO: 1057469 - DNA, 15 bp, Homo sapiens
ttgggcaaagatgga

SEQ ID NO: 1057470 - DNA, 15 bp, Homo sapiens
tttgggcaaagatgg

SEQ ID NO: 1057471 - DNA, 15 bp, Homo sapiens
ttttgggcaaagatg

SEQ ID NO: 1057472 - DNA, 15 bp, Homo sapiens
gttttgggcaaagat

SEQ ID NO: 1057473 - DNA, 15 bp, Homo sapiens
tgttttgggcaaaga

SEQ ID NO: 1057474 - DNA, 15 bp, Homo sapiens
atgttttgggcaaag

SEQ ID NO: 1057475 - DNA, 15 bp, Homo sapiens
gatgttttgggcaaa

SEQ ID NO: 1057476 - DNA, 15 bp, Homo sapiens
tgatgttttgggcaa

SEQ ID NO: 1057477 - DNA, 15 bp, Homo sapiens
atgatgttttgggca

SEQ ID NO: 1057478 - DNA, 15 bp, Homo sapiens
aatgatgttttgggc

SEQ ID NO: 1057479 - DNA, 15 bp, Homo sapiens
aaatgatgttttggg

SEQ ID NO: 1057480 - DNA, 15 bp, Homo sapiens
aaaatgatgttttgg

SEQ ID NO: 1057481 - DNA, 15 bp, Homo sapiens
aaaaatgatgttttg

SEQ ID NO: 1057482 - DNA, 15 bp, Homo sapiens
aaaaaatgatgtttt

SEQ ID NO: 1057483 - DNA, 15 bp, Homo sapiens
caaaaaatgatgttt

SEQ ID NO: 1057484 - DNA, 15 bp, Homo sapiens
ccaaaaaatgatgtt

SEQ ID NO: 1057485 - DNA, 15 bp, Homo sapiens
accaaaaaatgatgt

SEQ ID NO: 1057486 - DNA, 15 bp, Homo sapiens
caccaaaaaatgatg

SEQ ID NO: 1057487 - DNA, 15 bp, Homo sapiens
acaccaaaaaatgat

SEQ ID NO: 1057488 - DNA, 15 bp, Homo sapiens
cacaccaaaaaatga

SEQ ID NO: 1057489 - DNA, 15 bp, Homo sapiens
acacaccaaaaaatg

SEQ ID NO: 1057490 - DNA, 15 bp, Homo sapiens
cacacaccaaaaaat

SEQ ID NO: 1057491 - DNA, 15 bp, Homo sapiens
tcacacaccaaaaaa

SEQ ID NO: 1057492 - DNA, 15 bp, Homo sapiens
gtcacacaccaaaaa

SEQ ID NO: 1057493 - DNA, 15 bp, Homo sapiens
agtcacacaccaaaa

SEQ ID NO: 1057494 - DNA, 15 bp, Homo sapiens
tagtcacacaccaaa

SEQ ID NO: 1057495 - DNA, 15 bp, Homo sapiens
atagtcacacaccaa

SEQ ID NO: 1057496 - DNA, 15 bp, Homo sapiens
aatagtcacacacca

SEQ ID NO: 1057497 - DNA, 15 bp, Homo sapiens
taatagtcacacacc

SEQ ID NO: 1057498 - DNA, 15 bp, Homo sapiens
ttaatagtcacacac

SEQ ID NO: 1057499 - DNA, 15 bp, Homo sapiens
gttaatagtcacaca

SEQ ID NO: 1057500 - DNA, 15 bp, Homo sapiens
tgttaatagtcacac

SEQ ID NO: 1057501 - DNA, 15 bp, Homo sapiens
ctgttaatagtcaca

SEQ ID NO: 1057502 - DNA, 15 bp, Homo sapiens
cctgttaatagtcac

SEQ ID NO: 1057503 - DNA, 15 bp, Homo sapiens
tcctgttaatagtca

SEQ ID NO: 1057504 - DNA, 15 bp, Homo sapiens
ttcctgttaatagtc

SEQ ID NO: 1057505 - DNA, 15 bp, Homo sapiens
gttcctgttaatagt

SEQ ID NO: 1057506 - DNA, 15 bp, Homo sapiens
agttcctgttaatag

SEQ ID NO: 1057507 - DNA, 15 bp, Homo sapiens
aagttcctgttaata

SEQ ID NO: 1057508 - DNA, 15 bp, Homo sapiens
caagttcctgttaat

SEQ ID NO: 1057509 - DNA, 15 bp, Homo sapiens
acaagttcctgttaa

SEQ ID NO: 1057510 - DNA, 15 bp, Homo sapiens
gacaagttcctgtta

SEQ ID NO: 1057511 - DNA, 15 bp, Homo sapiens
ggacaagttcctgtt

SEQ ID NO: 1057512 - DNA, 15 bp, Homo sapiens
gggacaagttcctgt

SEQ ID NO: 1057513 - DNA, 15 bp, Homo sapiens
tgggacaagttcctg

SEQ ID NO: 1057514 - DNA, 15 bp, Homo sapiens
ctgggacaagttcct

SEQ ID NO: 1057515 - DNA, 15 bp, Homo sapiens
gctgggacaagttcc

SEQ ID NO: 1057516 - DNA, 15 bp, Homo sapiens
ggctgggacaagttc

SEQ ID NO: 1057517 - DNA, 15 bp, Homo sapiens
aggctgggacaagtt

SEQ ID NO: 1057518 - DNA, 15 bp, Homo sapiens
aaggctgggacaagt

SEQ ID NO: 1057519 - DNA, 15 bp, Homo sapiens
taaggctgggacaag

SEQ ID NO: 1057520 - DNA, 15 bp, Homo sapiens
gtaaggctgggacaa

SEQ ID NO: 1057521 - DNA, 15 bp, Homo sapiens
agtaaggctgggaca

SEQ ID NO: 1057522 - DNA, 15 bp, Homo sapiens
aagtaaggctgggac

SEQ ID NO: 1057523 - DNA, 15 bp, Homo sapiens
aaagtaaggctggga

SEQ ID NO: 1057524 - DNA, 15 bp, Homo sapiens
caaagtaaggctggg

SEQ ID NO: 1057525 - DNA, 15 bp, Homo sapiens
acaaagtaaggctgg

SEQ ID NO: 1057526 - DNA, 15 bp, Homo sapiens
gacaaagtaaggctg

SEQ ID NO: 1057527 - DNA, 15 bp, Homo sapiens
tgacaaagtaaggct

SEQ ID NO: 1057528 - DNA, 15 bp, Homo sapiens
atgacaaagtaaggc

SEQ ID NO: 1057529 - DNA, 15 bp, Homo sapiens
aatgacaaagtaagg

SEQ ID NO: 1057530 - DNA, 15 bp, Homo sapiens
caatgacaaagtaag

SEQ ID NO: 1057531 - DNA, 15 bp, Homo sapiens
ccaatgacaaagtaa

SEQ ID NO: 1057532 - DNA, 15 bp, Homo sapiens
accaatgacaaagta

SEQ ID NO: 1057533 - DNA, 15 bp, Homo sapiens
taccaatgacaaagt

SEQ ID NO: 1057534 - DNA, 15 bp, Homo sapiens
ataccaatgacaaag

SEQ ID NO: 1057535 - DNA, 15 bp, Homo sapiens
aataccaatgacaaa

SEQ ID NO: 1057536 - DNA, 15 bp, Homo sapiens
gaataccaatgacaa

SEQ ID NO: 1057537 - DNA, 15 bp, Homo sapiens
agaataccaatgaca

SEQ ID NO: 1057538 - DNA, 15 bp, Homo sapiens
aagaataccaatgac

SEQ ID NO: 1057539 - DNA, 15 bp, Homo sapiens
caagaataccaatga

SEQ ID NO: 1057540 - DNA, 15 bp, Homo sapiens
tcaagaataccaatg

SEQ ID NO: 1057541 - DNA, 15 bp, Homo sapiens
ttcaagaataccaat

SEQ ID NO: 1057542 - DNA, 15 bp, Homo sapiens
gttcaagaataccaa

SEQ ID NO: 1057543 - DNA, 15 bp, Homo sapiens
tgttcaagaatacca

SEQ ID NO: 1057544 - DNA, 15 bp, Homo sapiens
atgttcaagaatacc

SEQ ID NO: 1057545 - DNA, 15 bp, Homo sapiens
catgttcaagaatac

SEQ ID NO: 1057546 - DNA, 15 bp, Homo sapiens
ccatgttcaagaata

SEQ ID NO: 1057547 - DNA, 15 bp, Homo sapiens
tccatgttcaagaat

SEQ ID NO: 1057548 - DNA, 15 bp, Homo sapiens
ttccatgttcaagaa

SEQ ID NO: 1057549 - DNA, 15 bp, Homo sapiens
attccatgttcaaga

SEQ ID NO: 1057550 - DNA, 15 bp, Homo sapiens
tattccatgttcaag

SEQ ID NO: 1057551 - DNA, 15 bp, Homo sapiens
ttattccatgttcaa

SEQ ID NO: 1057552 - DNA, 15 bp, Homo sapiens
gttattccatgttca

SEQ ID NO: 1057553 - DNA, 15 bp, Homo sapiens
ggttattccatgttc

SEQ ID NO: 1057554 - DNA, 15 bp, Homo sapiens
tggttattccatgtt

SEQ ID NO: 1057555 - DNA, 15 bp, Homo sapiens
ttggttattccatgt

SEQ ID NO: 1057556 - DNA, 15 bp, Homo sapiens
tttggttattccatg

SEQ ID NO: 1057557 - DNA, 15 bp, Homo sapiens
atttggttattccat

SEQ ID NO: 1057558 - DNA, 15 bp, Homo sapiens
catttggttattcca

SEQ ID NO: 1057559 - DNA, 15 bp, Homo sapiens
acatttggttattcc

SEQ ID NO: 1057560 - DNA, 15 bp, Homo sapiens
tacatttggttattc

SEQ ID NO: 1057561 - DNA, 15 bp, Homo sapiens
ctacatttggttatt

SEQ ID NO: 1057562 - DNA, 15 bp, Homo sapiens
gctacatttggttat

SEQ ID NO: 1057563 - DNA, 15 bp, Homo sapiens
agctacatttggtta

SEQ ID NO: 1057564 - DNA, 15 bp, Homo sapiens
cagctacatttggtt

SEQ ID NO: 1057565 - DNA, 15 bp, Homo sapiens
ccagctacatttggt

SEQ ID NO: 1057566 - DNA, 15 bp, Homo sapiens
gccagctacatttgg

SEQ ID NO: 1057567 - DNA, 15 bp, Homo sapiens
agccagctacatttg

SEQ ID NO: 1057568 - DNA, 15 bp, Homo sapiens
gagccagctacattt

SEQ ID NO: 1057569 - DNA, 15 bp, Homo sapiens
agagccagctacatt

SEQ ID NO: 1057570 - DNA, 15 bp, Homo sapiens
aagagccagctacat

SEQ ID NO: 1057571 - DNA, 15 bp, Homo sapiens
caagagccagctaca

SEQ ID NO: 1057572 - DNA, 15 bp, Homo sapiens
ccaagagccagctac

SEQ ID NO: 1057573 - DNA, 15 bp, Homo sapiens
tccaagagccagcta

SEQ ID NO: 1057574 - DNA, 15 bp, Homo sapiens
atccaagagccagct

SEQ ID NO: 1057575 - DNA, 15 bp, Homo sapiens
catccaagagccagc

SEQ ID NO: 1057576 - DNA, 15 bp, Homo sapiens
acatccaagagccag

SEQ ID NO: 1057577 - DNA, 15 bp, Homo sapiens
aacatccaagagcca

SEQ ID NO: 1057578 - DNA, 15 bp, Homo sapiens
taacatccaagagcc

SEQ ID NO: 1057579 - DNA, 15 bp, Homo sapiens
ataacatccaagagc

SEQ ID NO: 1057580 - DNA, 15 bp, Homo sapiens
tataacatccaagag

SEQ ID NO: 1057581 - DNA, 15 bp, Homo sapiens
atataacatccaaga

SEQ ID NO: 1057582 - DNA, 15 bp, Homo sapiens
aatataacatccaag

SEQ ID NO: 1057583 - DNA, 15 bp, Homo sapiens
gaatataacatccaa

SEQ ID NO: 1057584 - DNA, 15 bp, Homo sapiens
tgaatataacatcca

SEQ ID NO: 1057585 - DNA, 15 bp, Homo sapiens
atgaatataacatcc

SEQ ID NO: 1057586 - DNA, 15 bp, Homo sapiens
catgaatataacatc

SEQ ID NO: 1057587 - DNA, 15 bp, Homo sapiens
acatgaatataacat

SEQ ID NO: 1057588 - DNA, 15 bp, Homo sapiens
cacatgaatataaca

SEQ ID NO: 1057589 - DNA, 15 bp, Homo sapiens
tcacatgaatataac

SEQ ID NO: 1057590 - DNA, 15 bp, Homo sapiens
gtcacatgaatataa

SEQ ID NO: 1057591 - DNA, 15 bp, Homo sapiens
agtcacatgaatata

SEQ ID NO: 1057592 - DNA, 15 bp, Homo sapiens
cagtcacatgaatat

SEQ ID NO: 1057593 - DNA, 15 bp, Homo sapiens
acagtcacatgaata

SEQ ID NO: 1057594 - DNA, 15 bp, Homo sapiens
gacagtcacatgaat

SEQ ID NO: 1057595 - DNA, 15 bp, Homo sapiens
agacagtcacatgaa

SEQ ID NO: 1057596 - DNA, 15 bp, Homo sapiens
gagacagtcacatga

SEQ ID NO: 1057597 - DNA, 15 bp, Homo sapiens
tgagacagtcacatg

SEQ ID NO: 1057598 - DNA, 15 bp, Homo sapiens
atgagacagtcacat

SEQ ID NO: 1057599 - DNA, 15 bp, Homo sapiens
aatgagacagtcaca

SEQ ID NO: 1057600 - DNA, 15 bp, Homo sapiens
aaatgagacagtcac

SEQ ID NO: 1057601 - DNA, 15 bp, Homo sapiens
gaaatgagacagtca

SEQ ID NO: 1057602 - DNA, 15 bp, Homo sapiens
agaaatgagacagtc

SEQ ID NO: 1057603 - DNA, 15 bp, Homo sapiens
tagaaatgagacagt

SEQ ID NO: 1057604 - DNA, 15 bp, Homo sapiens
ttagaaatgagacag

SEQ ID NO: 1057605 - DNA, 15 bp, Homo sapiens
tttagaaatgagaca

SEQ ID NO: 1057606 - DNA, 15 bp, Homo sapiens
ttttagaaatgagac

SEQ ID NO: 1057607 - DNA, 15 bp, Homo sapiens
attttagaaatgaga

SEQ ID NO: 1057608 - DNA, 15 bp, Homo sapiens
cattttagaaatgag

SEQ ID NO: 1057609 - DNA, 15 bp, Homo sapiens
ccattttagaaatga

SEQ ID NO: 1057610 - DNA, 15 bp, Homo sapiens
gccattttagaaatg

SEQ ID NO: 1057611 - DNA, 15 bp, Homo sapiens
tgccattttagaaat

SEQ ID NO: 1057612 - DNA, 15 bp, Homo sapiens
atgccattttagaaa

SEQ ID NO: 1057613 - DNA, 15 bp, Homo sapiens
gatgccattttagaa

SEQ ID NO: 1057614 - DNA, 15 bp, Homo sapiens
ggatgccattttaga

SEQ ID NO: 1057615 - DNA, 15 bp, Homo sapiens
tggatgccattttag

SEQ ID NO: 1057616 - DNA, 15 bp, Homo sapiens
gtggatgccatttta

SEQ ID NO: 1057617 - DNA, 15 bp, Homo sapiens
tgtggatgccatttt

SEQ ID NO: 1057618 - DNA, 15 bp, Homo sapiens
atgtggatgccattt

SEQ ID NO: 1057619 - DNA, 15 bp, Homo sapiens
tatgtggatgccatt

SEQ ID NO: 1057620 - DNA, 15 bp, Homo sapiens
ctatgtggatgccat

SEQ ID NO: 1057621 - DNA, 15 bp, Homo sapiens
gctatgtggatgcca

SEQ ID NO: 1057622 - DNA, 15 bp, Homo sapiens
ggctatgtggatgcc

SEQ ID NO: 1057623 - DNA, 15 bp, Homo sapiens
tggctatgtggatgc

SEQ ID NO: 1057624 - DNA, 15 bp, Homo sapiens
gtggctatgtggatg

SEQ ID NO: 1057625 - DNA, 15 bp, Homo sapiens
tgtggctatgtggat

SEQ ID NO: 1057626 - DNA, 15 bp, Homo sapiens
gtgtggctatgtgga

SEQ ID NO: 1057627 - DNA, 15 bp, Homo sapiens
agtgtggctatgtgg

SEQ ID NO: 1057628 - DNA, 15 bp, Homo sapiens
aagtgtggctatgtg

SEQ ID NO: 1057629 - DNA, 15 bp, Homo sapiens
aaagtgtggctatgt

SEQ ID NO: 1057630 - DNA, 15 bp, Homo sapiens
caaagtgtggctatg

SEQ ID NO: 1057631 - DNA, 15 bp, Homo sapiens
ccaaagtgtggctat

SEQ ID NO: 1057632 - DNA, 15 bp, Homo sapiens
tgccaaagtgtggct

SEQ ID NO: 1057633 - DNA, 15 bp, Homo sapiens
atgccaaagtgtggc

SEQ ID NO: 1057634 - DNA, 15 bp, Homo sapiens
tatgccaaagtgtgg

SEQ ID NO: 1057635 - DNA, 15 bp, Homo sapiens
gtatgccaaagtgtg

SEQ ID NO: 1057636 - DNA, 15 bp, Homo sapiens
tgtatgccaaagtgt

SEQ ID NO: 1057637 - DNA, 15 bp, Homo sapiens
ctgtatgccaaagtg

SEQ ID NO: 1057638 - DNA, 15 bp, Homo sapiens
gctgtatgccaaagt

SEQ ID NO: 1057639 - DNA, 15 bp, Homo sapiens
cgctgtatgccaaag

SEQ ID NO: 1057640 - DNA, 15 bp, Homo sapiens
ccgctgtatgccaaa

SEQ ID NO: 1057641 - DNA, 15 bp, Homo sapiens
cccgctgtatgccaa

SEQ ID NO: 1057642 - DNA, 15 bp, Homo sapiens
gcccgctgtatgcca

SEQ ID NO: 1057643 - DNA, 15 bp, Homo sapiens
agcccgctgtatgcc

SEQ ID NO: 1057644 - DNA, 15 bp, Homo sapiens
gagcccgctgtatgc

SEQ ID NO: 1057645 - DNA, 15 bp, Homo sapiens
tgagcccgctgtatg

SEQ ID NO: 1057646 - DNA, 15 bp, Homo sapiens
ttgagcccgctgtat

SEQ ID NO: 1057647 - DNA, 15 bp, Homo sapiens
attgagcccgctgta

SEQ ID NO: 1057648 - DNA, 15 bp, Homo sapiens
tattgagcccgctgt

SEQ ID NO: 1057649 - DNA, 15 bp, Homo sapiens
gtattgagcccgctg

SEQ ID NO: 1057650 - DNA, 15 bp, Homo sapiens
ggtattgagcccgct

SEQ ID NO: 1057651 - DNA, 15 bp, Homo sapiens
tggtattgagcccgc

SEQ ID NO: 1057652 - DNA, 15 bp, Homo sapiens
gtggtattgagcccg

SEQ ID NO: 1057653 - DNA, 15 bp, Homo sapiens
ggtggtattgagccc

SEQ ID NO: 1057654 - DNA, 15 bp, Homo sapiens
gggtggtattgagcc

SEQ ID NO: 1057655 - DNA, 15 bp, Homo sapiens
ggggtggtattgagc

SEQ ID NO: 1057656 - DNA, 15 bp, Homo sapiens
gggggtggtattgag

SEQ ID NO: 1057657 - DNA, 15 bp, Homo sapiens
cgggggtggtattga

SEQ ID NO: 1057658 - DNA, 15 bp, Homo sapiens
acgggggtggtattg

SEQ ID NO: 1057659 - DNA, 15 bp, Homo sapiens
gacgggggtggtatt

SEQ ID NO: 1057660 - DNA, 15 bp, Homo sapiens
tgacgggggtggtat

SEQ ID NO: 1057661 - DNA, 15 bp, Homo sapiens
atgacgggggtggta

SEQ ID NO: 1057662 - DNA, 15 bp, Homo sapiens
gatgacgggggtggt

SEQ ID NO: 1057663 - DNA, 15 bp, Homo sapiens
ggatgacgggggtgg

SEQ ID NO: 1057664 - DNA, 15 bp, Homo sapiens
gggatgacgggggtg

SEQ ID NO: 1057665 - DNA, 15 bp, Homo sapiens
ggggatgacgggggt

SEQ ID NO: 1057666 - DNA, 15 bp, Homo sapiens
gggggatgacggggg

SEQ ID NO: 1057667 - DNA, 15 bp, Homo sapiens
agggggatgacgggg

SEQ ID NO: 1057668 - DNA, 15 bp, Homo sapiens
gagggggatgacggg

SEQ ID NO: 1057669 - DNA, 15 bp, Homo sapiens
ggagggggatgacgg

SEQ ID NO: 1057670 - DNA, 15 bp, Homo sapiens
aggagggggatgacg

SEQ ID NO: 1057671 - DNA, 15 bp, Homo sapiens
aaggagggggatgac

SEQ ID NO: 1057672 - DNA, 15 bp, Homo sapiens
caaggagggggatga

SEQ ID NO: 1057673 - DNA, 15 bp, Homo sapiens
acaaggagggggatg

SEQ ID NO: 1057674 - DNA, 15 bp, Homo sapiens
aacaaggagggggat

SEQ ID NO: 1057675 - DNA, 15 bp, Homo sapiens
aaacaaggaggggga

SEQ ID NO: 1057676 - DNA, 15 bp, Homo sapiens
aaaacaaggaggggg

SEQ ID NO: 1057677 - DNA, 15 bp, Homo sapiens
gaaaacaaggagggg

SEQ ID NO: 1057678 - DNA, 15 bp, Homo sapiens
tgaaaacaaggaggg

SEQ ID NO: 1057679 - DNA, 15 bp, Homo sapiens
atgaaaacaaggagg

SEQ ID NO: 1057680 - DNA, 15 bp, Homo sapiens
gatgaaaacaaggag

SEQ ID NO: 1057681 - DNA, 15 bp, Homo sapiens
agatgaaaacaagga

SEQ ID NO: 1057682 - DNA, 15 bp, Homo sapiens
cagatgaaaacaagg

SEQ ID NO: 1057683 - DNA, 15 bp, Homo sapiens
ccagatgaaaacaag

SEQ ID NO: 1057684 - DNA, 15 bp, Homo sapiens
tccagatgaaaacaa

SEQ ID NO: 1057685 - DNA, 15 bp, Homo sapiens
ctccagatgaaaaca

SEQ ID NO: 1057686 - DNA, 15 bp, Homo sapiens
gctccagatgaaaac

SEQ ID NO: 1057687 - DNA, 15 bp, Homo sapiens
agctccagatgaaaa

SEQ ID NO: 1057688 - DNA, 15 bp, Homo sapiens
cagctccagatgaaa

SEQ ID NO: 1057689 - DNA, 15 bp, Homo sapiens
gcagctccagatgaa

SEQ ID NO: 1057690 - DNA, 15 bp, Homo sapiens
agcagctccagatga

SEQ ID NO: 1057691 - DNA, 15 bp, Homo sapiens
cagcagctccagatg

SEQ ID NO: 1057692 - DNA, 15 bp, Homo sapiens
gcagcagctccagat

SEQ ID NO: 1057693 - DNA, 15 bp, Homo sapiens
tgcagcagctccaga

SEQ ID NO: 1057694 - DNA, 15 bp, Homo sapiens
ctgcagcagctccag

SEQ ID NO: 1057695 - DNA, 15 bp, Homo sapiens
tctgcagcagctcca

SEQ ID NO: 1057696 - DNA, 15 bp, Homo sapiens
ctctgcagcagctcc

SEQ ID NO: 1057697 - DNA, 15 bp, Homo sapiens
gctctgcagcagctc

SEQ ID NO: 1057698 - DNA, 15 bp, Homo sapiens
agctctgcagcagct

SEQ ID NO: 1057699 - DNA, 15 bp, Homo sapiens
tagctctgcagcagc

SEQ ID NO: 1057700 - DNA, 15 bp, Homo sapiens
ctagctctgcagcag

SEQ ID NO: 1057701 - DNA, 15 bp, Homo sapiens
tctagctctgcagca

SEQ ID NO: 1057702 - DNA, 15 bp, Homo sapiens
ttctagctctgcagc

SEQ ID NO: 1057703 - DNA, 15 bp, Homo sapiens
gttctagctctgcag

SEQ ID NO: 1057704 - DNA, 15 bp, Homo sapiens
agttctagctctgca

SEQ ID NO: 1057705 - DNA, 15 bp, Homo sapiens
tagttctagctctgc

SEQ ID NO: 1057706 - DNA, 15 bp, Homo sapiens
ttagttctagctctg

SEQ ID NO: 1057707 - DNA, 15 bp, Homo sapiens
gttagttctagctct

SEQ ID NO: 1057708 - DNA, 15 bp, Homo sapiens
tgttagttctagctc

SEQ ID NO: 1057709 - DNA, 15 bp, Homo sapiens
ctgttagttctagct

SEQ ID NO: 1057710 - DNA, 15 bp, Homo sapiens
actgttagttctagc

SEQ ID NO: 1057711 - DNA, 15 bp, Homo sapiens
gactgttagttctag

SEQ ID NO: 1057712 - DNA, 15 bp, Homo sapiens
tgactgttagttcta

SEQ ID NO: 1057713 - DNA, 15 bp, Homo sapiens
atgactgttagttct

SEQ ID NO: 1057714 - DNA, 15 bp, Homo sapiens
tatgactgttagttc

SEQ ID NO: 1057715 - DNA, 15 bp, Homo sapiens
atatgactgttagtt

SEQ ID NO: 1057716 - DNA, 15 bp, Homo sapiens
aatatgactgttagt

SEQ ID NO: 1057717 - DNA, 15 bp, Homo sapiens
gaatatgactgttag

SEQ ID NO: 1057718 - DNA, 15 bp, Homo sapiens
agaatatgactgtta

SEQ ID NO: 1057719 - DNA, 15 bp, Homo sapiens
tagaatatgactgtt

SEQ ID NO: 1057720 - DNA, 15 bp, Homo sapiens
ctagaatatgactgt

SEQ ID NO: 1057721 - DNA, 15 bp, Homo sapiens
cctagaatatgactg

SEQ ID NO: 1057722 - DNA, 15 bp, Homo sapiens
gcctagaatatgact

SEQ ID NO: 1057723 - DNA, 15 bp, Homo sapiens
tgcctagaatatgac

SEQ ID NO: 1057724 - DNA, 15 bp, Homo sapiens
ttgcctagaatatga

SEQ ID NO: 1057725 - DNA, 15 bp, Homo sapiens
attgcctagaatatg

SEQ ID NO: 1057726 - DNA, 15 bp, Homo sapiens
aattgcctagaatat

SEQ ID NO: 1057727 - DNA, 15 bp, Homo sapiens
caattgcctagaata

SEQ ID NO: 1057728 - DNA, 15 bp, Homo sapiens
ccaattgcctagaat

SEQ ID NO: 1057729 - DNA, 15 bp, Homo sapiens
tccaattgcctagaa

SEQ ID NO: 1057730 - DNA, 15 bp, Homo sapiens
gtccaattgcctaga

SEQ ID NO: 1057731 - DNA, 15 bp, Homo sapiens
tgtccaattgcctag

SEQ ID NO: 1057732 - DNA, 15 bp, Homo sapiens
ttgtccaattgccta

SEQ ID NO: 1057733 - DNA, 15 bp, Homo sapiens
attgtccaattgcct

SEQ ID NO: 1057734 - DNA, 15 bp, Homo sapiens
aattgtccaattgcc

SEQ ID NO: 1057735 - DNA, 15 bp, Homo sapiens
gaattgtccaattgc

SEQ ID NO: 1057736 - DNA, 15 bp, Homo sapiens
agaattgtccaattg

SEQ ID NO: 1057737 - DNA, 15 bp, Homo sapiens
aagaattgtccaatt

SEQ ID NO: 1057738 - DNA, 15 bp, Homo sapiens
taagaattgtccaat

SEQ ID NO: 1057739 - DNA, 15 bp, Homo sapiens
ataagaattgtccaa

SEQ ID NO: 1057740 - DNA, 15 bp, Homo sapiens
tataagaattgtcca

SEQ ID NO: 1057741 - DNA, 15 bp, Homo sapiens
ttataagaattgtcc

SEQ ID NO: 1057742 - DNA, 15 bp, Homo sapiens
tttataagaattgtc

SEQ ID NO: 1057743 - DNA, 15 bp, Homo sapiens
ttttataagaattgt

SEQ ID NO: 1057744 - DNA, 15 bp, Homo sapiens
attttataagaattg

SEQ ID NO: 1057745 - DNA, 15 bp, Homo sapiens
aattttataagaatt

SEQ ID NO: 1057746 - DNA, 15 bp, Homo sapiens
gaattttataagaat

SEQ ID NO: 1057747 - DNA, 15 bp, Homo sapiens
agaattttataagaa

SEQ ID NO: 1057748 - DNA, 15 bp, Homo sapiens
gagaattttataaga

SEQ ID NO: 1057749 - DNA, 15 bp, Homo sapiens
agagaattttataag

SEQ ID NO: 1057750 - DNA, 15 bp, Homo sapiens
aagagaattttataa

SEQ ID NO: 1057751 - DNA, 15 bp, Homo sapiens
gaagagaattttata

SEQ ID NO: 1057752 - DNA, 15 bp, Homo sapiens
ggaagagaattttat

SEQ ID NO: 1057753 - DNA, 15 bp, Homo sapiens
aggaagagaatttta

SEQ ID NO: 1057754 - DNA, 15 bp, Homo sapiens
gaggaagagaatttt

SEQ ID NO: 1057755 - DNA, 15 bp, Homo sapiens
agaggaagagaattt

SEQ ID NO: 1057756 - DNA, 15 bp, Homo sapiens
cagaggaagagaatt

SEQ ID NO: 1057757 - DNA, 15 bp, Homo sapiens
gcagaggaagagaat

SEQ ID NO: 1057758 - DNA, 15 bp, Homo sapiens
ggcagaggaagagaa

SEQ ID NO: 1057759 - DNA, 15 bp, Homo sapiens
cggcagaggaagaga

SEQ ID NO: 1057760 - DNA, 15 bp, Homo sapiens
ccggcagaggaagag

SEQ ID NO: 1057761 - DNA, 15 bp, Homo sapiens
cccggcagaggaaga

SEQ ID NO: 1057762 - DNA, 15 bp, Homo sapiens
acccggcagaggaag

SEQ ID NO: 1057763 - DNA, 15 bp, Homo sapiens
cacccggcagaggaa

SEQ ID NO: 1057764 - DNA, 15 bp, Homo sapiens
gcacccggcagagga

SEQ ID NO: 1057765 - DNA, 15 bp, Homo sapiens
cgcacccggcagagg

SEQ ID NO: 1057766 - DNA, 15 bp, Homo sapiens
ccgcacccggcagag

SEQ ID NO: 1057767 - DNA, 15 bp, Homo sapiens
accaccgcacccggc

SEQ ID NO: 1057768 - DNA, 15 bp, Homo sapiens
taccaccgcacccgg

SEQ ID NO: 1057769 - DNA, 15 bp, Homo sapiens
ttaccaccgcacccg

SEQ ID NO: 1057770 - DNA, 15 bp, Homo sapiens
attaccaccgcaccc

SEQ ID NO: 1057771 - DNA, 15 bp, Homo sapiens
gattaccaccgcacc

SEQ ID NO: 1057772 - DNA, 15 bp, Homo sapiens
ggattaccaccgcac

SEQ ID NO: 1057773 - DNA, 15 bp, Homo sapiens
gggattaccaccgca

SEQ ID NO: 1057774 - DNA, 15 bp, Homo sapiens
tgggattaccaccgc

SEQ ID NO: 1057775 - DNA, 15 bp, Homo sapiens
ctgggattaccaccg

SEQ ID NO: 1057776 - DNA, 15 bp, Homo sapiens
gctgggattaccacc

SEQ ID NO: 1057777 - DNA, 15 bp, Homo sapiens
tgctgggattaccac

SEQ ID NO: 1057778 - DNA, 15 bp, Homo sapiens
gtgctgggattacca

SEQ ID NO: 1057779 - DNA, 15 bp, Homo sapiens
agtgctgggattacc

SEQ ID NO: 1057780 - DNA, 15 bp, Homo sapiens
tctcaggtgatctgc

SEQ ID NO: 1057781 - DNA, 15 bp, Homo sapiens
gtctcaggtgatctg

SEQ ID NO: 1057782 - DNA, 15 bp, Homo sapiens
ggtctcaggtgatct

SEQ ID NO: 1057783 - DNA, 15 bp, Homo sapiens
tggtctcaggtgatc

SEQ ID NO: 1057784 - DNA, 15 bp, Homo sapiens
ctggtctcaggtgat

SEQ ID NO: 1057785 - DNA, 15 bp, Homo sapiens
gctggtctcaggtga

SEQ ID NO: 1057786 - DNA, 15 bp, Homo sapiens
ggctggtctcaggtg

SEQ ID NO: 1057787 - DNA, 15 bp, Homo sapiens
aggctggtctcaggt

SEQ ID NO: 1057788 - DNA, 15 bp, Homo sapiens
caggctggtctcagg

SEQ ID NO: 1057789 - DNA, 15 bp, Homo sapiens
tcaggctggtctcag

SEQ ID NO: 1057790 - DNA, 15 bp, Homo sapiens
tcggctaattttgta

SEQ ID NO: 1057791 - DNA, 15 bp, Homo sapiens
ctcggctaattttgt

SEQ ID NO: 1057792 - DNA, 15 bp, Homo sapiens
gctcggctaattttg

SEQ ID NO: 1057793 - DNA, 15 bp, Homo sapiens
tgctcggctaatttt

SEQ ID NO: 1057794 - DNA, 15 bp, Homo sapiens
atgctcggctaattt

SEQ ID NO: 1057795 - DNA, 15 bp, Homo sapiens
catgctcggctaatt

SEQ ID NO: 1057796 - DNA, 15 bp, Homo sapiens
ccatgctcggctaat

SEQ ID NO: 1057797 - DNA, 15 bp, Homo sapiens
accatgctcggctaa

SEQ ID NO: 1057798 - DNA, 15 bp, Homo sapiens
caccatgctcggcta

SEQ ID NO: 1057799 - DNA, 15 bp, Homo sapiens
ccaccatgctcggct

SEQ ID NO: 1057800 - DNA, 15 bp, Homo sapiens
gccaccatgctcggc

SEQ ID NO: 1057801 - DNA, 15 bp, Homo sapiens
ttccccagtagctgg

SEQ ID NO: 1057802 - DNA, 15 bp, Homo sapiens
cttccccagtagctg

SEQ ID NO: 1057803 - DNA, 15 bp, Homo sapiens
gcttccccagtagct

SEQ ID NO: 1057804 - DNA, 15 bp, Homo sapiens
agcttccccagtagc

SEQ ID NO: 1057805 - DNA, 15 bp, Homo sapiens
cagcttccccagtag

SEQ ID NO: 1057806 - DNA, 15 bp, Homo sapiens
tcagcttccccagta

SEQ ID NO: 1057807 - DNA, 15 bp, Homo sapiens
ctcagcttccccagt

SEQ ID NO: 1057808 - DNA, 15 bp, Homo sapiens
cctcagcttccccag

SEQ ID NO: 1057809 - DNA, 15 bp, Homo sapiens
gcctcagcttcccca

SEQ ID NO: 1057810 - DNA, 15 bp, Homo sapiens
tgcctcagcttcccc

SEQ ID NO: 1057811 - DNA, 15 bp, Homo sapiens
attcaagtgattctc

SEQ ID NO: 1057812 - DNA, 15 bp, Homo sapiens
gattcaagtgattct

SEQ ID NO: 1057813 - DNA, 15 bp, Homo sapiens
agattcaagtgattc

SEQ ID NO: 1057814 - DNA, 15 bp, Homo sapiens
gcagattcaagtgat

SEQ ID NO: 1057815 - DNA, 15 bp, Homo sapiens
cgcagattcaagtga

SEQ ID NO: 1057816 - DNA, 15 bp, Homo sapiens
tcgcagattcaagtg

SEQ ID NO: 1057817 - DNA, 15 bp, Homo sapiens
ctcgcagattcaagt

SEQ ID NO: 1057818 - DNA, 15 bp, Homo sapiens
cctcgcagattcaag

SEQ ID NO: 1057819 - DNA, 15 bp, Homo sapiens
gcctcgcagattcaa

SEQ ID NO: 1057820 - DNA, 15 bp, Homo sapiens
cgcctcgcagattca

SEQ ID NO: 1057821 - DNA, 15 bp, Homo sapiens
ccgcctcgcagattc

SEQ ID NO: 1057822 - DNA, 15 bp, Homo sapiens
tccgcctcgcagatt

SEQ ID NO: 1057823 - DNA, 15 bp, Homo sapiens
ctccgcctcgcagat

SEQ ID NO: 1057824 - DNA, 15 bp, Homo sapiens
cctccgcctcgcaga

SEQ ID NO: 1057825 - DNA, 15 bp, Homo sapiens
acctccgcctcgcag

SEQ ID NO: 1057826 - DNA, 15 bp, Homo sapiens
aacctccgcctcgca

SEQ ID NO: 1057827 - DNA, 15 bp, Homo sapiens
caacctccgcctcgc

SEQ ID NO: 1057828 - DNA, 15 bp, Homo sapiens
gcaacctccgcctcg

SEQ ID NO: 1057829 - DNA, 15 bp, Homo sapiens
ttcactgcaacctcc

SEQ ID NO: 1057830 - DNA, 15 bp, Homo sapiens
gatctcagttcactg

SEQ ID NO: 1057831 - DNA, 15 bp, Homo sapiens
cgatctcagttcact

SEQ ID NO: 1057832 - DNA, 15 bp, Homo sapiens
gcgatctcagttcac

SEQ ID NO: 1057833 - DNA, 15 bp, Homo sapiens
cgcgatctcagttca

SEQ ID NO: 1057834 - DNA, 15 bp, Homo sapiens
gcgcgatctcagttc

SEQ ID NO: 1057835 - DNA, 15 bp, Homo sapiens
ggcgcgatctcagtt

SEQ ID NO: 1057836 - DNA, 15 bp, Homo sapiens
tggcgcgatctcagt

SEQ ID NO: 1057837 - DNA, 15 bp, Homo sapiens
aacggagtttcgctc

SEQ ID NO: 1057838 - DNA, 15 bp, Homo sapiens
aaacggagtttcgct

SEQ ID NO: 1057839 - DNA, 15 bp, Homo sapiens
gaaacggagtttcgc

SEQ ID NO: 1057840 - DNA, 15 bp, Homo sapiens
tgaaacggagtttcg

SEQ ID NO: 1057841 - DNA, 15 bp, Homo sapiens
ttgaaacggagtttc

SEQ ID NO: 1057842 - DNA, 15 bp, Homo sapiens
tttgaaacggagttt

SEQ ID NO: 1057843 - DNA, 15 bp, Homo sapiens
ttttgaaacggagtt

SEQ ID NO: 1057844 - DNA, 15 bp, Homo sapiens
tttttgaaacggagt

SEQ ID NO: 1057845 - DNA, 15 bp, Homo sapiens
ttttttgaaacggag

SEQ ID NO: 1057846 - DNA, 15 bp, Homo sapiens
tttttttgaaacgga

SEQ ID NO: 1057847 - DNA, 15 bp, Homo sapiens
ttttttttgaaacgg

SEQ ID NO: 1057848 - DNA, 15 bp, Homo sapiens
attttttttgaaacg

SEQ ID NO: 1057849 - DNA, 15 bp, Homo sapiens
tattttttttgaaac

SEQ ID NO: 1057850 - DNA, 15 bp, Homo sapiens
ttattttttttgaaa

SEQ ID NO: 1057851 - DNA, 15 bp, Homo sapiens
tttattttttttgaa

SEQ ID NO: 1057852 - DNA, 15 bp, Homo sapiens
gaatttatttattta

SEQ ID NO: 1057853 - DNA, 15 bp, Homo sapiens
agaatttatttattt

SEQ ID NO: 1057854 - DNA, 15 bp, Homo sapiens
gagaatttatttatt

SEQ ID NO: 1057855 - DNA, 15 bp, Homo sapiens
agagaatttatttat

SEQ ID NO: 1057856 - DNA, 15 bp, Homo sapiens
aagagaatttattta

SEQ ID NO: 1057857 - DNA, 15 bp, Homo sapiens
gaagagaatttattt

SEQ ID NO: 1057858 - DNA, 15 bp, Homo sapiens
ggaagagaatttatt

SEQ ID NO: 1057859 - DNA, 15 bp, Homo sapiens
aggaagagaatttat

SEQ ID NO: 1057860 - DNA, 15 bp, Homo sapiens
gaggaagagaattta

SEQ ID NO: 1057861 - DNA, 15 bp, Homo sapiens
tgaggaagagaattt

SEQ ID NO: 1057862 - DNA, 15 bp, Homo sapiens
atgaggaagagaatt

SEQ ID NO: 1057863 - DNA, 15 bp, Homo sapiens
gatgaggaagagaat

SEQ ID NO: 1057864 - DNA, 15 bp, Homo sapiens
cgatgaggaagagaa

SEQ ID NO: 1057865 - DNA, 15 bp, Homo sapiens
acgatgaggaagaga

SEQ ID NO: 1057866 - DNA, 15 bp, Homo sapiens
gacgatgaggaagag

SEQ ID NO: 1057867 - DNA, 15 bp, Homo sapiens
agacgatgaggaaga

SEQ ID NO: 1057868 - DNA, 15 bp, Homo sapiens
cagacgatgaggaag

SEQ ID NO: 1057869 - DNA, 15 bp, Homo sapiens
ccagacgatgaggaa

SEQ ID NO: 1057870 - DNA, 15 bp, Homo sapiens
gccagacgatgagga

SEQ ID NO: 1057871 - DNA, 15 bp, Homo sapiens
agccagacgatgagg

SEQ ID NO: 1057872 - DNA, 15 bp, Homo sapiens
aagccagacgatgag

SEQ ID NO: 1057873 - DNA, 15 bp, Homo sapiens
caagccagacgatga

SEQ ID NO: 1057874 - DNA, 15 bp, Homo sapiens
ccaagccagacgatg

SEQ ID NO: 1057875 - DNA, 15 bp, Homo sapiens
tccaagccagacgat

SEQ ID NO: 1057876 - DNA, 15 bp, Homo sapiens
atccaagccagacga

SEQ ID NO: 1057877 - DNA, 15 bp, Homo sapiens
tatccaagccagacg

SEQ ID NO: 1057878 - DNA, 15 bp, Homo sapiens
ctatccaagccagac

SEQ ID NO: 1057879 - DNA, 15 bp, Homo sapiens
actatccaagccaga

SEQ ID NO: 1057880 - DNA, 15 bp, Homo sapiens
cactatccaagccag

SEQ ID NO: 1057881 - DNA, 15 bp, Homo sapiens
gcactatccaagcca

SEQ ID NO: 1057882 - DNA, 15 bp, Homo sapiens
tgcactatccaagcc

SEQ ID NO: 1057883 - DNA, 15 bp, Homo sapiens
gtgcactatccaagc

SEQ ID NO: 1057884 - DNA, 15 bp, Homo sapiens
tgtgcactatccaag

SEQ ID NO: 1057885 - DNA, 15 bp, Homo sapiens
gtgtgcactatccaa

SEQ ID NO: 1057886 - DNA, 15 bp, Homo sapiens
tgtgtgcactatcca

SEQ ID NO: 1057887 - DNA, 15 bp, Homo sapiens
atgtgtgcactatcc

SEQ ID NO: 1057888 - DNA, 15 bp, Homo sapiens
aatgtgtgcactatc

SEQ ID NO: 1057889 - DNA, 15 bp, Homo sapiens
aaatgtgtgcactat

SEQ ID NO: 1057890 - DNA, 15 bp, Homo sapiens
aaaatgtgtgcacta

SEQ ID NO: 1057891 - DNA, 15 bp, Homo sapiens
gaaaatgtgtgcact

SEQ ID NO: 1057892 - DNA, 15 bp, Homo sapiens
agaaaatgtgtgcac

SEQ ID NO: 1057893 - DNA, 15 bp, Homo sapiens
gagaaaatgtgtgca

SEQ ID NO: 1057894 - DNA, 15 bp, Homo sapiens
agagaaaatgtgtgc

SEQ ID NO: 1057895 - DNA, 15 bp, Homo sapiens
cagagaaaatgtgtg

SEQ ID NO: 1057896 - DNA, 15 bp, Homo sapiens
tcagagaaaatgtgt

SEQ ID NO: 1057897 - DNA, 15 bp, Homo sapiens
ctcagagaaaatgtg

SEQ ID NO: 1057898 - DNA, 15 bp, Homo sapiens
cctcagagaaaatgt

SEQ ID NO: 1057899 - DNA, 15 bp, Homo sapiens
gcctcagagaaaatg

SEQ ID NO: 1057900 - DNA, 15 bp, Homo sapiens
tgcctcagagaaaat

SEQ ID NO: 1057901 - DNA, 15 bp, Homo sapiens
gtgcctcagagaaaa

SEQ ID NO: 1057902 - DNA, 15 bp, Homo sapiens
tgtgcctcagagaaa

SEQ ID NO: 1057903 - DNA, 15 bp, Homo sapiens
gtgtgcctcagagaa

SEQ ID NO: 1057904 - DNA, 15 bp, Homo sapiens
tgtgtgcctcagaga

SEQ ID NO: 1057905 - DNA, 15 bp, Homo sapiens
ttgtgtgcctcagag

SEQ ID NO: 1057906 - DNA, 15 bp, Homo sapiens
gttgtgtgcctcaga

SEQ ID NO: 1057907 - DNA, 15 bp, Homo sapiens
ggttgtgtgcctcag

SEQ ID NO: 1057908 - DNA, 15 bp, Homo sapiens
tggttgtgtgcctca

SEQ ID NO: 1057909 - DNA, 15 bp, Homo sapiens
ttggttgtgtgcctc

SEQ ID NO: 1057910 - DNA, 15 bp, Homo sapiens
tttggttgtgtgcct

SEQ ID NO: 1057911 - DNA, 15 bp, Homo sapiens
gtttggttgtgtgcc

SEQ ID NO: 1057912 - DNA, 15 bp, Homo sapiens
cgtttggttgtgtgc

SEQ ID NO: 1057913 - DNA, 15 bp, Homo sapiens
gcgtttggttgtgtg

SEQ ID NO: 1057914 - DNA, 15 bp, Homo sapiens
ggcgtttggttgtgt

SEQ ID NO: 1057915 - DNA, 15 bp, Homo sapiens
gggcgtttggttgtg

SEQ ID NO: 1057916 - DNA, 15 bp, Homo sapiens
tgggcgtttggttgt

SEQ ID NO: 1057917 - DNA, 15 bp, Homo sapiens
gtgggcgtttggttg

SEQ ID NO: 1057918 - DNA, 15 bp, Homo sapiens
tgtgggcgtttggtt

SEQ ID NO: 1057919 - DNA, 15 bp, Homo sapiens
ctgtgggcgtttggt

SEQ ID NO: 1057920 - DNA, 15 bp, Homo sapiens
gctgtgggcgtttgg

SEQ ID NO: 1057921 - DNA, 15 bp, Homo sapiens
agctgtgggcgtttg

SEQ ID NO: 1057922 - DNA, 15 bp, Homo sapiens
cagctgtgggcgttt

SEQ ID NO: 1057923 - DNA, 15 bp, Homo sapiens
ccagctgtgggcgtt

SEQ ID NO: 1057924 - DNA, 15 bp, Homo sapiens
cccagctgtgggcgt

SEQ ID NO: 1057925 - DNA, 15 bp, Homo sapiens
acccagctgtgggcg

SEQ ID NO: 1057926 - DNA, 15 bp, Homo sapiens
cacccagctgtgggc

SEQ ID NO: 1057927 - DNA, 15 bp, Homo sapiens
tcacccagctgtggg

SEQ ID NO: 1057928 - DNA, 15 bp, Homo sapiens
ctcacccagctgtgg

SEQ ID NO: 1057929 - DNA, 15 bp, Homo sapiens
cctcacccagctgtg

SEQ ID NO: 1057930 - DNA, 15 bp, Homo sapiens
gcctcacccagctgt

SEQ ID NO: 1057931 - DNA, 15 bp, Homo sapiens
cgcctcacccagctg

SEQ ID NO: 1057932 - DNA, 15 bp, Homo sapiens
ccgcctcacccagct

SEQ ID NO: 1057933 - DNA, 15 bp, Homo sapiens
gccgcctcacccagc

SEQ ID NO: 1057934 - DNA, 15 bp, Homo sapiens
tgccgcctcacccag

SEQ ID NO: 1057935 - DNA, 15 bp, Homo sapiens
ttgccgcctcaccca

SEQ ID NO: 1057936 - DNA, 15 bp, Homo sapiens
gttgccgcctcaccc

SEQ ID NO: 1057937 - DNA, 15 bp, Homo sapiens
agttgccgcctcacc

SEQ ID NO: 1057938 - DNA, 15 bp, Homo sapiens
gagttgccgcctcac

SEQ ID NO: 1057939 - DNA, 15 bp, Homo sapiens
ggagttgccgcctca

SEQ ID NO: 1057940 - DNA, 15 bp, Homo sapiens
tggagttgccgcctc

SEQ ID NO: 1057941 - DNA, 15 bp, Homo sapiens
atggagttgccgcct

SEQ ID NO: 1057942 - DNA, 15 bp, Homo sapiens
aatggagttgccgcc

SEQ ID NO: 1057943 - DNA, 15 bp, Homo sapiens
aaatggagttgccgc

SEQ ID NO: 1057944 - DNA, 15 bp, Homo sapiens
gaaatggagttgccg

SEQ ID NO: 1057945 - DNA, 15 bp, Homo sapiens
cgaaatggagttgcc

SEQ ID NO: 1057946 - DNA, 15 bp, Homo sapiens
ccgaaatggagttgc

SEQ ID NO: 1057947 - DNA, 15 bp, Homo sapiens
gccgaaatggagttg

SEQ ID NO: 1057948 - DNA, 15 bp, Homo sapiens
tgccgaaatggagtt

SEQ ID NO: 1057949 - DNA, 15 bp, Homo sapiens
atgccgaaatggagt

SEQ ID NO: 1057950 - DNA, 15 bp, Homo sapiens
gatgccgaaatggag

SEQ ID NO: 1057951 - DNA, 15 bp, Homo sapiens
ggatgccgaaatgga

SEQ ID NO: 1057952 - DNA, 15 bp, Homo sapiens
gggatgccgaaatgg

SEQ ID NO: 1057953 - DNA, 15 bp, Homo sapiens
agggatgccgaaatg

SEQ ID NO: 1057954 - DNA, 15 bp, Homo sapiens
aagggatgccgaaat

SEQ ID NO: 1057955 - DNA, 15 bp, Homo sapiens
gaagggatgccgaaa

SEQ ID NO: 1057956 - DNA, 15 bp, Homo sapiens
ggaagggatgccgaa

SEQ ID NO: 1057957 - DNA, 15 bp, Homo sapiens
tggaagggatgccga

SEQ ID NO: 1057958 - DNA, 15 bp, Homo sapiens
atggaagggatgccg

SEQ ID NO: 1057959 - DNA, 15 bp, Homo sapiens
catggaagggatgcc

SEQ ID NO: 1057960 - DNA, 15 bp, Homo sapiens
tcatggaagggatgc

SEQ ID NO: 1057961 - DNA, 15 bp, Homo sapiens
gtcatggaagggatg

SEQ ID NO: 1057962 - DNA, 15 bp, Homo sapiens
agtcatggaagggat

SEQ ID NO: 1057963 - DNA, 15 bp, Homo sapiens
cagtcatggaaggga

SEQ ID NO: 1057964 - DNA, 15 bp, Homo sapiens
ccagtcatggaaggg

SEQ ID NO: 1057965 - DNA, 15 bp, Homo sapiens
tccagtcatggaagg

SEQ ID NO: 1057966 - DNA, 15 bp, Homo sapiens
ctccagtcatggaag

SEQ ID NO: 1057967 - DNA, 15 bp, Homo sapiens
tctccagtcatggaa

SEQ ID NO: 1057968 - DNA, 15 bp, Homo sapiens
gtctccagtcatgga

SEQ ID NO: 1057969 - DNA, 15 bp, Homo sapiens
agtctccagtcatgg

SEQ ID NO: 1057970 - DNA, 15 bp, Homo sapiens
tagtctccagtcatg

SEQ ID NO: 1057971 - DNA, 15 bp, Homo sapiens
ttagtctccagtcat

SEQ ID NO: 1057972 - DNA, 15 bp, Homo sapiens
tttagtctccagtca

SEQ ID NO: 1057973 - DNA, 15 bp, Homo sapiens
ttttagtctccagtc

SEQ ID NO: 1057974 - DNA, 15 bp, Homo sapiens
tttttagtctccagt

SEQ ID NO: 1057975 - DNA, 15 bp, Homo sapiens
atttttagtctccag

SEQ ID NO: 1057976 - DNA, 15 bp, Homo sapiens
tatttttagtctcca

SEQ ID NO: 1057977 - DNA, 15 bp, Homo sapiens
ctatttttagtctcc

SEQ ID NO: 1057978 - DNA, 15 bp, Homo sapiens
cctatttttagtctc

SEQ ID NO: 1057979 - DNA, 15 bp, Homo sapiens
ccctatttttagtct

SEQ ID NO: 1057980 - DNA, 15 bp, Homo sapiens
cccctatttttagtc

SEQ ID NO: 1057981 - DNA, 15 bp, Homo sapiens
acccctatttttagt

SEQ ID NO: 1057982 - DNA, 15 bp, Homo sapiens
cacccctatttttag

SEQ ID NO: 1057983 - DNA, 15 bp, Homo sapiens
acacccctattttta

SEQ ID NO: 1057984 - DNA, 15 bp, Homo sapiens
cacacccctattttt

SEQ ID NO: 1057985 - DNA, 15 bp, Homo sapiens
acacacccctatttt

SEQ ID NO: 1057986 - DNA, 15 bp, Homo sapiens
gacacacccctattt

SEQ ID NO: 1057987 - DNA, 15 bp, Homo sapiens
agacacacccctatt

SEQ ID NO: 1057988 - DNA, 15 bp, Homo sapiens
cagacacacccctat

SEQ ID NO: 1057989 - DNA, 15 bp, Homo sapiens
tcagacacaccccta

SEQ ID NO: 1057990 - DNA, 15 bp, Homo sapiens
gtcagacacacccct

SEQ ID NO: 1057991 - DNA, 15 bp, Homo sapiens
tgtcagacacacccc

SEQ ID NO: 1057992 - DNA, 15 bp, Homo sapiens
ctgtcagacacaccc

SEQ ID NO: 1057993 - DNA, 15 bp, Homo sapiens
gctgtcagacacacc

SEQ ID NO: 1057994 - DNA, 15 bp, Homo sapiens
ggctgtcagacacac

SEQ ID NO: 1057995 - DNA, 15 bp, Homo sapiens
gggctgtcagacaca

SEQ ID NO: 1057996 - DNA, 15 bp, Homo sapiens
tgggctgtcagacac

SEQ ID NO: 1057997 - DNA, 15 bp, Homo sapiens
atgggctgtcagaca

SEQ ID NO: 1057998 - DNA, 15 bp, Homo sapiens
aatgggctgtcagac

SEQ ID NO: 1057999 - DNA, 15 bp, Homo sapiens
gaatgggctgtcaga

SEQ ID NO: 1058000 - DNA, 15 bp, Homo sapiens
ggaatgggctgtcag

SEQ ID NO: 1058001 - DNA, 15 bp, Homo sapiens
gggaatgggctgtca

SEQ ID NO: 1058002 - DNA, 15 bp, Homo sapiens
tgggaatgggctgtc

SEQ ID NO: 1058003 - DNA, 15 bp, Homo sapiens
gtgggaatgggctgt

SEQ ID NO: 1058004 - DNA, 15 bp, Homo sapiens
ggtgggaatgggctg

SEQ ID NO: 1058005 - DNA, 15 bp, Homo sapiens
gggtgggaatgggct

SEQ ID NO: 1058006 - DNA, 15 bp, Homo sapiens
ggggtgggaatgggc

SEQ ID NO: 1058007 - DNA, 15 bp, Homo sapiens
aggggtgggaatggg

SEQ ID NO: 1058008 - DNA, 15 bp, Homo sapiens
caggggtgggaatgg

SEQ ID NO: 1058009 - DNA, 15 bp, Homo sapiens
ccaggggtgggaatg

SEQ ID NO: 1058010 - DNA, 15 bp, Homo sapiens
gccaggggtgggaat

SEQ ID NO: 1058011 - DNA, 15 bp, Homo sapiens
tgccaggggtgggaa

SEQ ID NO: 1058012 - DNA, 15 bp, Homo sapiens
gtgccaggggtggga

SEQ ID NO: 1058013 - DNA, 15 bp, Homo sapiens
ggtgccaggggtggg

SEQ ID NO: 1058014 - DNA, 15 bp, Homo sapiens
gggtgccaggggtgg

SEQ ID NO: 1058015 - DNA, 15 bp, Homo sapiens
tgggtgccaggggtg

SEQ ID NO: 1058016 - DNA, 15 bp, Homo sapiens
ttgggtgccaggggt

SEQ ID NO: 1058017 - DNA, 15 bp, Homo sapiens
cttgggtgccagggg

SEQ ID NO: 1058018 - DNA, 15 bp, Homo sapiens
gcttgggtgccaggg

SEQ ID NO: 1058019 - DNA, 15 bp, Homo sapiens
ggcttgggtgccagg

SEQ ID NO: 1058020 - DNA, 15 bp, Homo sapiens
tggcttgggtgccag

SEQ ID NO: 1058021 - DNA, 15 bp, Homo sapiens
ctggcttgggtgcca

SEQ ID NO: 1058022 - DNA, 15 bp, Homo sapiens
actggcttgggtgcc

SEQ ID NO: 1058023 - DNA, 15 bp, Homo sapiens
gactggcttgggtgc

SEQ ID NO: 1058024 - DNA, 15 bp, Homo sapiens
ggactggcttgggtg

SEQ ID NO: 1058025 - DNA, 15 bp, Homo sapiens
tggactggcttgggt

SEQ ID NO: 1058026 - DNA, 15 bp, Homo sapiens
gtggactggcttggg

SEQ ID NO: 1058027 - DNA, 15 bp, Homo sapiens
agtggactggcttgg

SEQ ID NO: 1058028 - DNA, 15 bp, Homo sapiens
gagtggactggcttg

SEQ ID NO: 1058029 - DNA, 15 bp, Homo sapiens
cgagtggactggctt

SEQ ID NO: 1058030 - DNA, 15 bp, Homo sapiens
ccgagtggactggct

SEQ ID NO: 1058031 - DNA, 15 bp, Homo sapiens
gccgagtggactggc

SEQ ID NO: 1058032 - DNA, 15 bp, Homo sapiens
ggccgagtggactgg

SEQ ID NO: 1058033 - DNA, 15 bp, Homo sapiens
tggccgagtggactg

SEQ ID NO: 1058034 - DNA, 15 bp, Homo sapiens
gtggccgagtggact

SEQ ID NO: 1058035 - DNA, 15 bp, Homo sapiens
tgtggccgagtggac

SEQ ID NO: 1058036 - DNA, 15 bp, Homo sapiens
ctgtggccgagtgga

SEQ ID NO: 1058037 - DNA, 15 bp, Homo sapiens
cctgtggccgagtgg

SEQ ID NO: 1058038 - DNA, 15 bp, Homo sapiens
ccctgtggccgagtg

SEQ ID NO: 1058039 - DNA, 15 bp, Homo sapiens
tccctgtggccgagt

SEQ ID NO: 1058040 - DNA, 15 bp, Homo sapiens
ctccctgtggccgag

SEQ ID NO: 1058041 - DNA, 15 bp, Homo sapiens
gctccctgtggccga

SEQ ID NO: 1058042 - DNA, 15 bp, Homo sapiens
cgctccctgtggccg

SEQ ID NO: 1058043 - DNA, 15 bp, Homo sapiens
ccgctccctgtggcc

SEQ ID NO: 1058044 - DNA, 15 bp, Homo sapiens
cccgctccctgtggc

SEQ ID NO: 1058045 - DNA, 15 bp, Homo sapiens
ccccgctccctgtgg

SEQ ID NO: 1058046 - DNA, 15 bp, Homo sapiens
tccccgctccctgtg

SEQ ID NO: 1058047 - DNA, 15 bp, Homo sapiens
ttccccgctccctgt

SEQ ID NO: 1058048 - DNA, 15 bp, Homo sapiens
tttccccgctccctg

SEQ ID NO: 1058049 - DNA, 15 bp, Homo sapiens
ttttccccgctccct

SEQ ID NO: 1058050 - DNA, 15 bp, Homo sapiens
cttttccccgctccc

SEQ ID NO: 1058051 - DNA, 15 bp, Homo sapiens
ccttttccccgctcc

SEQ ID NO: 1058052 - DNA, 15 bp, Homo sapiens
cccttttccccgctc

SEQ ID NO: 1058053 - DNA, 15 bp, Homo sapiens
acccttttccccgct

SEQ ID NO: 1058054 - DNA, 15 bp, Homo sapiens
aacccttttccccgc

SEQ ID NO: 1058055 - DNA, 15 bp, Homo sapiens
caacccttttccccg

SEQ ID NO: 1058056 - DNA, 15 bp, Homo sapiens
acaacccttttcccc

SEQ ID NO: 1058057 - DNA, 15 bp, Homo sapiens
aacaacccttttccc

SEQ ID NO: 1058058 - DNA, 15 bp, Homo sapiens
aaacaacccttttcc

SEQ ID NO: 1058059 - DNA, 15 bp, Homo sapiens
taaacaacccttttc

SEQ ID NO: 1058060 - DNA, 15 bp, Homo sapiens
ctaaacaaccctttt

SEQ ID NO: 1058061 - DNA, 15 bp, Homo sapiens
tctaaacaacccttt

SEQ ID NO: 1058062 - DNA, 15 bp, Homo sapiens
ttctaaacaaccctt

SEQ ID NO: 1058063 - DNA, 15 bp, Homo sapiens
cttctaaacaaccct

SEQ ID NO: 1058064 - DNA, 15 bp, Homo sapiens
tcttctaaacaaccc

SEQ ID NO: 1058065 - DNA, 15 bp, Homo sapiens
ttcttctaaacaacc

SEQ ID NO: 1058066 - DNA, 15 bp, Homo sapiens
attcttctaaacaac

SEQ ID NO: 1058067 - DNA, 15 bp, Homo sapiens
aattcttctaaacaa

SEQ ID NO: 1058068 - DNA, 15 bp, Homo sapiens
aaattcttctaaaca

SEQ ID NO: 1058069 - DNA, 15 bp, Homo sapiens
aaaattcttctaaac

SEQ ID NO: 1058070 - DNA, 15 bp, Homo sapiens
gaaaattcttctaaa

SEQ ID NO: 1058071 - DNA, 15 bp, Homo sapiens
agaaaattcttctaa

SEQ ID NO: 1058072 - DNA, 15 bp, Homo sapiens
aagaaaattcttcta

SEQ ID NO: 1058073 - DNA, 15 bp, Homo sapiens
taagaaaattcttct

SEQ ID NO: 1058074 - DNA, 15 bp, Homo sapiens
ctaagaaaattcttc

SEQ ID NO: 1058075 - DNA, 15 bp, Homo sapiens
gctaagaaaattctt

SEQ ID NO: 1058076 - DNA, 15 bp, Homo sapiens
ggctaagaaaattct

SEQ ID NO: 1058077 - DNA, 15 bp, Homo sapiens
aggctaagaaaattc

SEQ ID NO: 1058078 - DNA, 15 bp, Homo sapiens
gaggctaagaaaatt

SEQ ID NO: 1058079 - DNA, 15 bp, Homo sapiens
cgaggctaagaaaat

SEQ ID NO: 1058080 - DNA, 15 bp, Homo sapiens
tcgaggctaagaaaa

SEQ ID NO: 1058081 - DNA, 15 bp, Homo sapiens
ttcgaggctaagaaa

SEQ ID NO: 1058082 - DNA, 15 bp, Homo sapiens
attcgaggctaagaa

SEQ ID NO: 1058083 - DNA, 15 bp, Homo sapiens
tattcgaggctaaga

SEQ ID NO: 1058084 - DNA, 15 bp, Homo sapiens
gtattcgaggctaag

SEQ ID NO: 1058085 - DNA, 15 bp, Homo sapiens
tgtattcgaggctaa

SEQ ID NO: 1058086 - DNA, 15 bp, Homo sapiens
atgtattcgaggcta

SEQ ID NO: 1058087 - DNA, 15 bp, Homo sapiens
catgtattcgaggct

SEQ ID NO: 1058088 - DNA, 15 bp, Homo sapiens
acatgtattcgaggc

SEQ ID NO: 1058089 - DNA, 15 bp, Homo sapiens
cacatgtattcgagg

SEQ ID NO: 1058090 - DNA, 15 bp, Homo sapiens
acacatgtattcgag

SEQ ID NO: 1058091 - DNA, 15 bp, Homo sapiens
aacacatgtattcga

SEQ ID NO: 1058092 - DNA, 15 bp, Homo sapiens
caacacatgtattcg

SEQ ID NO: 1058093 - DNA, 15 bp, Homo sapiens
tcaacacatgtattc

SEQ ID NO: 1058094 - DNA, 15 bp, Homo sapiens
ctcaacacatgtatt

SEQ ID NO: 1058095 - DNA, 15 bp, Homo sapiens
gctcaacacatgtat

SEQ ID NO: 1058096 - DNA, 15 bp, Homo sapiens
agctcaacacatgta

SEQ ID NO: 1058097 - DNA, 15 bp, Homo sapiens
aagctcaacacatgt

SEQ ID NO: 1058098 - DNA, 15 bp, Homo sapiens
taagctcaacacatg

SEQ ID NO: 1058099 - DNA, 15 bp, Homo sapiens
ataagctcaacacat

SEQ ID NO: 1058100 - DNA, 15 bp, Homo sapiens
cataagctcaacaca

SEQ ID NO: 1058101 - DNA, 15 bp, Homo sapiens
ccataagctcaacac

SEQ ID NO: 1058102 - DNA, 15 bp, Homo sapiens
accataagctcaaca

SEQ ID NO: 1058103 - DNA, 15 bp, Homo sapiens
taccataagctcaac

SEQ ID NO: 1058104 - DNA, 15 bp, Homo sapiens
ataccataagctcaa

SEQ ID NO: 1058105 - DNA, 15 bp, Homo sapiens
cataccataagctca

SEQ ID NO: 1058106 - DNA, 15 bp, Homo sapiens
acataccataagctc

SEQ ID NO: 1058107 - DNA, 15 bp, Homo sapiens
aacataccataagct

SEQ ID NO: 1058108 - DNA, 15 bp, Homo sapiens
aaacataccataagc

SEQ ID NO: 1058109 - DNA, 15 bp, Homo sapiens
aaaacataccataag

SEQ ID NO: 1058110 - DNA, 15 bp, Homo sapiens
taaaacataccataa

SEQ ID NO: 1058111 - DNA, 15 bp, Homo sapiens
ataaaacataccata

SEQ ID NO: 1058112 - DNA, 15 bp, Homo sapiens
tataaaacataccat

SEQ ID NO: 1058113 - DNA, 15 bp, Homo sapiens
ttataaaacatacca

SEQ ID NO: 1058114 - DNA, 15 bp, Homo sapiens
tttataaaacatacc

SEQ ID NO: 1058115 - DNA, 15 bp, Homo sapiens
ttttataaaacatac

SEQ ID NO: 1058116 - DNA, 15 bp, Homo sapiens
cttttataaaacata

SEQ ID NO: 1058117 - DNA, 15 bp, Homo sapiens
gcttttataaaacat

SEQ ID NO: 1058118 - DNA, 15 bp, Homo sapiens
tgcttttataaaaca

SEQ ID NO: 1058119 - DNA, 15 bp, Homo sapiens
ctgcttttataaaac

SEQ ID NO: 1058120 - DNA, 15 bp, Homo sapiens
tctgcttttataaaa

SEQ ID NO: 1058121 - DNA, 15 bp, Homo sapiens
atctgcttttataaa

SEQ ID NO: 1058122 - DNA, 15 bp, Homo sapiens
gatctgcttttataa

SEQ ID NO: 1058123 - DNA, 15 bp, Homo sapiens
ggatctgcttttata

SEQ ID NO: 1058124 - DNA, 15 bp, Homo sapiens
gggatctgcttttat

SEQ ID NO: 1058125 - DNA, 15 bp, Homo sapiens
tgggatctgctttta

SEQ ID NO: 1058126 - DNA, 15 bp, Homo sapiens
ctgggatctgctttt

SEQ ID NO: 1058127 - DNA, 15 bp, Homo sapiens
gctgggatctgcttt

SEQ ID NO: 1058128 - DNA, 15 bp, Homo sapiens
ggctgggatctgctt

SEQ ID NO: 1058129 - DNA, 15 bp, Homo sapiens
gggctgggatctgct

SEQ ID NO: 1058130 - DNA, 15 bp, Homo sapiens
agggctgggatctgc

SEQ ID NO: 1058131 - DNA, 15 bp, Homo sapiens
gagggctgggatctg

SEQ ID NO: 1058132 - DNA, 15 bp, Homo sapiens
cgagggctgggatct

SEQ ID NO: 1058133 - DNA, 15 bp, Homo sapiens
acgagggctgggatc

SEQ ID NO: 1058134 - DNA, 15 bp, Homo sapiens
aacgagggctgggat

SEQ ID NO: 1058135 - DNA, 15 bp, Homo sapiens
aaacgagggctggga

SEQ ID NO: 1058136 - DNA, 15 bp, Homo sapiens
gaaacgagggctggg

SEQ ID NO: 1058137 - DNA, 15 bp, Homo sapiens
tgaaacgagggctgg

SEQ ID NO: 1058138 - DNA, 15 bp, Homo sapiens
ttgaaacgagggctg

SEQ ID NO: 1058139 - DNA, 15 bp, Homo sapiens
cttgaaacgagggct

SEQ ID NO: 1058140 - DNA, 15 bp, Homo sapiens
ccttgaaacgagggc

SEQ ID NO: 1058141 - DNA, 15 bp, Homo sapiens
cccttgaaacgaggg

SEQ ID NO: 1058142 - DNA, 15 bp, Homo sapiens
gcccttgaaacgagg

SEQ ID NO: 1058143 - DNA, 15 bp, Homo sapiens
agcccttgaaacgag

SEQ ID NO: 1058144 - DNA, 15 bp, Homo sapiens
gagcccttgaaacga

SEQ ID NO: 1058145 - DNA, 15 bp, Homo sapiens
agagcccttgaaacg

SEQ ID NO: 1058146 - DNA, 15 bp, Homo sapiens
aagagcccttgaaac

SEQ ID NO: 1058147 - DNA, 15 bp, Homo sapiens
aaagagcccttgaaa

SEQ ID NO: 1058148 - DNA, 15 bp, Homo sapiens
taaagagcccttgaa

SEQ ID NO: 1058149 - DNA, 15 bp, Homo sapiens
ttaaagagcccttga

SEQ ID NO: 1058150 - DNA, 15 bp, Homo sapiens
cttaaagagcccttg

SEQ ID NO: 1058151 - DNA, 15 bp, Homo sapiens
tcttaaagagccctt

SEQ ID NO: 1058152 - DNA, 15 bp, Homo sapiens
atcttaaagagccct

SEQ ID NO: 1058153 - DNA, 15 bp, Homo sapiens
aatcttaaagagccc

SEQ ID NO: 1058154 - DNA, 15 bp, Homo sapiens
aaatcttaaagagcc

SEQ ID NO: 1058155 - DNA, 15 bp, Homo sapiens
gaaatcttaaagagc

SEQ ID NO: 1058156 - DNA, 15 bp, Homo sapiens
ggaaatcttaaagag

SEQ ID NO: 1058157 - DNA, 15 bp, Homo sapiens
aggaaatcttaaaga

SEQ ID NO: 1058158 - DNA, 15 bp, Homo sapiens
aaggaaatcttaaag

SEQ ID NO: 1058159 - DNA, 15 bp, Homo sapiens
taaggaaatcttaaa

SEQ ID NO: 1058160 - DNA, 15 bp, Homo sapiens
ctaaggaaatcttaa

SEQ ID NO: 1058161 - DNA, 15 bp, Homo sapiens
cctaaggaaatctta

SEQ ID NO: 1058162 - DNA, 15 bp, Homo sapiens
tcctaaggaaatctt

SEQ ID NO: 1058163 - DNA, 15 bp, Homo sapiens
ctcctaaggaaatct

SEQ ID NO: 1058164 - DNA, 15 bp, Homo sapiens
tctcctaaggaaatc

SEQ ID NO: 1058165 - DNA, 15 bp, Homo sapiens
ttctcctaaggaaat

SEQ ID NO: 1058166 - DNA, 15 bp, Homo sapiens
attctcctaaggaaa

SEQ ID NO: 1058167 - DNA, 15 bp, Homo sapiens
gattctcctaaggaa

SEQ ID NO: 1058168 - DNA, 15 bp, Homo sapiens
agattctcctaagga

SEQ ID NO: 1058169 - DNA, 15 bp, Homo sapiens
gagattctcctaagg

SEQ ID NO: 1058170 - DNA, 15 bp, Homo sapiens
tgagattctcctaag

SEQ ID NO: 1058171 - DNA, 15 bp, Homo sapiens
ttgagattctcctaa

SEQ ID NO: 1058172 - DNA, 15 bp, Homo sapiens
tttgagattctccta

SEQ ID NO: 1058173 - DNA, 15 bp, Homo sapiens
ctttgagattctcct

SEQ ID NO: 1058174 - DNA, 15 bp, Homo sapiens
tctttgagattctcc

SEQ ID NO: 1058175 - DNA, 15 bp, Homo sapiens
ctctttgagattctc

SEQ ID NO: 1058176 - DNA, 15 bp, Homo sapiens
tctctttgagattct

SEQ ID NO: 1058177 - DNA, 15 bp, Homo sapiens
attctctttgagatt

SEQ ID NO: 1058178 - DNA, 15 bp, Homo sapiens
cattctctttgagat

SEQ ID NO: 1058179 - DNA, 15 bp, Homo sapiens
ccattctctttgaga

SEQ ID NO: 1058180 - DNA, 15 bp, Homo sapiens
gccattctctttgag

SEQ ID NO: 1058181 - DNA, 15 bp, Homo sapiens
tgccattctctttga

SEQ ID NO: 1058182 - DNA, 15 bp, Homo sapiens
ttgccattctctttg

SEQ ID NO: 1058183 - DNA, 15 bp, Homo sapiens
tttgccattctcttt

SEQ ID NO: 1058184 - DNA, 15 bp, Homo sapiens
ttttgccattctctt

SEQ ID NO: 1058185 - DNA, 15 bp, Homo sapiens
tttttgccattctct

SEQ ID NO: 1058186 - DNA, 15 bp, Homo sapiens
atttttgccattctc

SEQ ID NO: 1058187 - DNA, 15 bp, Homo sapiens
catttttgccattct

SEQ ID NO: 1058188 - DNA, 15 bp, Homo sapiens
gcatttttgccattc

SEQ ID NO: 1058189 - DNA, 15 bp, Homo sapiens
ggcatttttgccatt

SEQ ID NO: 1058190 - DNA, 15 bp, Homo sapiens
aggcatttttgccat

SEQ ID NO: 1058191 - DNA, 15 bp, Homo sapiens
taggcatttttgcca

SEQ ID NO: 1058192 - DNA, 15 bp, Homo sapiens
ttaggcatttttgcc

SEQ ID NO: 1058193 - DNA, 15 bp, Homo sapiens
cttaggcatttttgc

SEQ ID NO: 1058194 - DNA, 15 bp, Homo sapiens
acttaggcatttttg

SEQ ID NO: 1058195 - DNA, 15 bp, Homo sapiens
aacttaggcattttt

SEQ ID NO: 1058196 - DNA, 15 bp, Homo sapiens
aaacttaggcatttt

SEQ ID NO: 1058197 - DNA, 15 bp, Homo sapiens
gaaacttaggcattt

SEQ ID NO: 1058198 - DNA, 15 bp, Homo sapiens
tgaaacttaggcatt

SEQ ID NO: 1058199 - DNA, 15 bp, Homo sapiens
gtgaaacttaggcat

SEQ ID NO: 1058200 - DNA, 15 bp, Homo sapiens
tgtgaaacttaggca

SEQ ID NO: 1058201 - DNA, 15 bp, Homo sapiens
ttgtgaaacttaggc

SEQ ID NO: 1058202 - DNA, 15 bp, Homo sapiens
tttgtgaaacttagg

SEQ ID NO: 1058203 - DNA, 15 bp, Homo sapiens
ttttgtgaaacttag

SEQ ID NO: 1058204 - DNA, 15 bp, Homo sapiens
attttgtgaaactta

SEQ ID NO: 1058205 - DNA, 15 bp, Homo sapiens
tattttgtgaaactt

SEQ ID NO: 1058206 - DNA, 15 bp, Homo sapiens
gtattttgtgaaact

SEQ ID NO: 1058207 - DNA, 15 bp, Homo sapiens
tgtattttgtgaaac

SEQ ID NO: 1058208 - DNA, 15 bp, Homo sapiens
ttgtattttgtgaaa

SEQ ID NO: 1058209 - DNA, 15 bp, Homo sapiens
gttgtattttgtgaa

SEQ ID NO: 1058210 - DNA, 15 bp, Homo sapiens
ggttgtattttgtga

SEQ ID NO: 1058211 - DNA, 15 bp, Homo sapiens
aggttgtattttgtg

SEQ ID NO: 1058212 - DNA, 15 bp, Homo sapiens
aaggttgtattttgt

SEQ ID NO: 1058213 - DNA, 15 bp, Homo sapiens
caaggttgtattttg

SEQ ID NO: 1058214 - DNA, 15 bp, Homo sapiens
tcaaggttgtatttt

SEQ ID NO: 1058215 - DNA, 15 bp, Homo sapiens
ttcaaggttgtattt

SEQ ID NO: 1058216 - DNA, 15 bp, Homo sapiens
attcaaggttgtatt

SEQ ID NO: 1058217 - DNA, 15 bp, Homo sapiens
aattcaaggttgtat

SEQ ID NO: 1058218 - DNA, 15 bp, Homo sapiens
gaattcaaggttgta

SEQ ID NO: 1058219 - DNA, 15 bp, Homo sapiens
tgaattcaaggttgt

SEQ ID NO: 1058220 - DNA, 15 bp, Homo sapiens
gtgaattcaaggttg

SEQ ID NO: 1058221 - DNA, 15 bp, Homo sapiens
agtgaattcaaggtt

SEQ ID NO: 1058222 - DNA, 15 bp, Homo sapiens
aagtgaattcaaggt

SEQ ID NO: 1058223 - DNA, 15 bp, Homo sapiens
aaagtgaattcaagg

SEQ ID NO: 1058224 - DNA, 15 bp, Homo sapiens
taaagtgaattcaag

SEQ ID NO: 1058225 - DNA, 15 bp, Homo sapiens
ttaaagtgaattcaa

SEQ ID NO: 1058226 - DNA, 15 bp, Homo sapiens
tttaaagtgaattca

SEQ ID NO: 1058227 - DNA, 15 bp, Homo sapiens
gtttaaagtgaattc

SEQ ID NO: 1058228 - DNA, 15 bp, Homo sapiens
tgtttaaagtgaatt

SEQ ID NO: 1058229 - DNA, 15 bp, Homo sapiens
ttgtttaaagtgaat

SEQ ID NO: 1058230 - DNA, 15 bp, Homo sapiens
tttgtttaaagtgaa

SEQ ID NO: 1058231 - DNA, 15 bp, Homo sapiens
ctttgtttaaagtga

SEQ ID NO: 1058232 - DNA, 15 bp, Homo sapiens
cctttgtttaaagtg

SEQ ID NO: 1058233 - DNA, 15 bp, Homo sapiens
tcctttgtttaaagt

SEQ ID NO: 1058234 - DNA, 15 bp, Homo sapiens
ttcctttgtttaaag

SEQ ID NO: 1058235 - DNA, 15 bp, Homo sapiens
tttcctttgtttaaa

SEQ ID NO: 1058236 - DNA, 15 bp, Homo sapiens
ttttcctttgtttaa

SEQ ID NO: 1058237 - DNA, 15 bp, Homo sapiens
tttttcctttgttta

SEQ ID NO: 1058238 - DNA, 15 bp, Homo sapiens
ctttttcctttgttt

SEQ ID NO: 1058239 - DNA, 15 bp, Homo sapiens
actttttcctttgtt

SEQ ID NO: 1058240 - DNA, 15 bp, Homo sapiens
gactttttcctttgt

SEQ ID NO: 1058241 - DNA, 15 bp, Homo sapiens
agactttttcctttg

SEQ ID NO: 1058242 - DNA, 15 bp, Homo sapiens
tagactttttccttt

SEQ ID NO: 1058243 - DNA, 15 bp, Homo sapiens
ctagactttttcctt

SEQ ID NO: 1058244 - DNA, 15 bp, Homo sapiens
actagactttttcct

SEQ ID NO: 1058245 - DNA, 15 bp, Homo sapiens
aactagactttttcc

SEQ ID NO: 1058246 - DNA, 15 bp, Homo sapiens
aaactagactttttc

SEQ ID NO: 1058247 - DNA, 15 bp, Homo sapiens
aaaactagacttttt

SEQ ID NO: 1058248 - DNA, 15 bp, Homo sapiens
taaaactagactttt

SEQ ID NO: 1058249 - DNA, 15 bp, Homo sapiens
ctaaaactagacttt

SEQ ID NO: 1058250 - DNA, 15 bp, Homo sapiens
cctaaaactagactt

SEQ ID NO: 1058251 - DNA, 15 bp, Homo sapiens
tcctaaaactagact

SEQ ID NO: 1058252 - DNA, 15 bp, Homo sapiens
ttcctaaaactagac

SEQ ID NO: 1058253 - DNA, 15 bp, Homo sapiens
tttcctaaaactaga

SEQ ID NO: 1058254 - DNA, 15 bp, Homo sapiens
ctttcctaaaactag

SEQ ID NO: 1058255 - DNA, 15 bp, Homo sapiens
tctttcctaaaacta

SEQ ID NO: 1058256 - DNA, 15 bp, Homo sapiens
ttctttcctaaaact

SEQ ID NO: 1058257 - DNA, 15 bp, Homo sapiens
cttctttcctaaaac

SEQ ID NO: 1058258 - DNA, 15 bp, Homo sapiens
ccttctttcctaaaa

SEQ ID NO: 1058259 - DNA, 15 bp, Homo sapiens
cccttctttcctaaa

SEQ ID NO: 1058260 - DNA, 15 bp, Homo sapiens
tcccttctttcctaa

SEQ ID NO: 1058261 - DNA, 15 bp, Homo sapiens
ctcccttctttccta

SEQ ID NO: 1058262 - DNA, 15 bp, Homo sapiens
tctcccttctttcct

SEQ ID NO: 1058263 - DNA, 15 bp, Homo sapiens
ttctcccttctttcc

SEQ ID NO: 1058264 - DNA, 15 bp, Homo sapiens
attctcccttctttc

SEQ ID NO: 1058265 - DNA, 15 bp, Homo sapiens
cattctcccttcttt

SEQ ID NO: 1058266 - DNA, 15 bp, Homo sapiens
acattctcccttctt

SEQ ID NO: 1058267 - DNA, 15 bp, Homo sapiens
cacattctcccttct

SEQ ID NO: 1058268 - DNA, 15 bp, Homo sapiens
acacattctcccttc

SEQ ID NO: 1058269 - DNA, 15 bp, Homo sapiens
aacacattctccctt

SEQ ID NO: 1058270 - DNA, 15 bp, Homo sapiens
aaacacattctccct

SEQ ID NO: 1058271 - DNA, 15 bp, Homo sapiens
aaaacacattctccc

SEQ ID NO: 1058272 - DNA, 15 bp, Homo sapiens
taaaacacattctcc

SEQ ID NO: 1058273 - DNA, 15 bp, Homo sapiens
gtaaaacacattctc

SEQ ID NO: 1058274 - DNA, 15 bp, Homo sapiens
tgtaaaacacattct

SEQ ID NO: 1058275 - DNA, 15 bp, Homo sapiens
atgtaaaacacattc

SEQ ID NO: 1058276 - DNA, 15 bp, Homo sapiens
catgtaaaacacatt

SEQ ID NO: 1058277 - DNA, 15 bp, Homo sapiens
acatgtaaaacacat

SEQ ID NO: 1058278 - DNA, 15 bp, Homo sapiens
ttacatgtaaaacac

SEQ ID NO: 1058279 - DNA, 15 bp, Homo sapiens
gttacatgtaaaaca

SEQ ID NO: 1058280 - DNA, 15 bp, Homo sapiens
tgttacatgtaaaac

SEQ ID NO: 1058281 - DNA, 15 bp, Homo sapiens
ttgttacatgtaaaa

SEQ ID NO: 1058282 - DNA, 15 bp, Homo sapiens
gttgttacatgtaaa

SEQ ID NO: 1058283 - DNA, 15 bp, Homo sapiens
tgttgttacatgtaa

SEQ ID NO: 1058284 - DNA, 15 bp, Homo sapiens
ttgttgttacatgta

SEQ ID NO: 1058285 - DNA, 15 bp, Homo sapiens
tttgttgttacatgt

SEQ ID NO: 1058286 - DNA, 15 bp, Homo sapiens
atttgttgttacatg

SEQ ID NO: 1058287 - DNA, 15 bp, Homo sapiens
aatttgttgttacat

SEQ ID NO: 1058288 - DNA, 15 bp, Homo sapiens
caatttgttgttaca

SEQ ID NO: 1058289 - DNA, 15 bp, Homo sapiens
gcaatttgttgttac

SEQ ID NO: 1058290 - DNA, 15 bp, Homo sapiens
agcaatttgttgtta

SEQ ID NO: 1058291 - DNA, 15 bp, Homo sapiens
aagcaatttgttgtt

SEQ ID NO: 1058292 - DNA, 15 bp, Homo sapiens
aaagcaatttgttgt

SEQ ID NO: 1058293 - DNA, 15 bp, Homo sapiens
aaaagcaatttgttg

SEQ ID NO: 1058294 - DNA, 15 bp, Homo sapiens
aaaaagcaatttgtt

SEQ ID NO: 1058295 - DNA, 15 bp, Homo sapiens
gaaaaagcaatttgt

SEQ ID NO: 1058296 - DNA, 15 bp, Homo sapiens
tgaaaaagcaatttg

SEQ ID NO: 1058297 - DNA, 15 bp, Homo sapiens
ttgaaaaagcaattt

SEQ ID NO: 1058298 - DNA, 15 bp, Homo sapiens
tttgaaaaagcaatt

SEQ ID NO: 1058299 - DNA, 15 bp, Homo sapiens
ctttgaaaaagcaat

SEQ ID NO: 1058300 - DNA, 15 bp, Homo sapiens
actttgaaaaagcaa

SEQ ID NO: 1058301 - DNA, 15 bp, Homo sapiens
cactttgaaaaagca

SEQ ID NO: 1058302 - DNA, 15 bp, Homo sapiens
gcactttgaaaaagc

SEQ ID NO: 1058303 - DNA, 15 bp, Homo sapiens
agcactttgaaaaag

SEQ ID NO: 1058304 - DNA, 15 bp, Homo sapiens
cagcactttgaaaaa

SEQ ID NO: 1058305 - DNA, 15 bp, Homo sapiens
ccagcactttgaaaa

SEQ ID NO: 1058306 - DNA, 15 bp, Homo sapiens
cccagcactttgaaa

SEQ ID NO: 1058307 - DNA, 15 bp, Homo sapiens
acccagcactttgaa

SEQ ID NO: 1058308 - DNA, 15 bp, Homo sapiens
tacccagcactttga

SEQ ID NO: 1058309 - DNA, 15 bp, Homo sapiens
gtacccagcactttg

SEQ ID NO: 1058310 - DNA, 15 bp, Homo sapiens
tgtacccagcacttt

SEQ ID NO: 1058311 - DNA, 15 bp, Homo sapiens
ctgtacccagcactt

SEQ ID NO: 1058312 - DNA, 15 bp, Homo sapiens
tctgtacccagcact

SEQ ID NO: 1058313 - DNA, 15 bp, Homo sapiens
ttctgtacccagcac

SEQ ID NO: 1058314 - DNA, 15 bp, Homo sapiens
cttctgtacccagca

SEQ ID NO: 1058315 - DNA, 15 bp, Homo sapiens
tcttctgtacccagc

SEQ ID NO: 1058316 - DNA, 15 bp, Homo sapiens
ctcttctgtacccag

SEQ ID NO: 1058317 - DNA, 15 bp, Homo sapiens
cctcttctgtaccca

SEQ ID NO: 1058318 - DNA, 15 bp, Homo sapiens
acctcttctgtaccc

SEQ ID NO: 1058319 - DNA, 15 bp, Homo sapiens
tacctcttctgtacc

SEQ ID NO: 1058320 - DNA, 15 bp, Homo sapiens
atacctcttctgtac

SEQ ID NO: 1058321 - DNA, 15 bp, Homo sapiens
catacctcttctgta

SEQ ID NO: 1058322 - DNA, 15 bp, Homo sapiens
tcatacctcttctgt

SEQ ID NO: 1058323 - DNA, 15 bp, Homo sapiens
ttcatacctcttctg

SEQ ID NO: 1058324 - DNA, 15 bp, Homo sapiens
attcatacctcttct

SEQ ID NO: 1058325 - DNA, 15 bp, Homo sapiens
aattcatacctcttc

SEQ ID NO: 1058326 - DNA, 15 bp, Homo sapiens
caattcatacctctt

SEQ ID NO: 1058327 - DNA, 15 bp, Homo sapiens
tcaattcatacctct

SEQ ID NO: 1058328 - DNA, 15 bp, Homo sapiens
ttcaattcatacctc

SEQ ID NO: 1058329 - DNA, 15 bp, Homo sapiens
cttcaattcatacct

SEQ ID NO: 1058330 - DNA, 15 bp, Homo sapiens
acttcaattcatacc

SEQ ID NO: 1058331 - DNA, 15 bp, Homo sapiens
aacttcaattcatac

SEQ ID NO: 1058332 - DNA, 15 bp, Homo sapiens
aaacttcaattcata

SEQ ID NO: 1058333 - DNA, 15 bp, Homo sapiens
taaacttcaattcat

SEQ ID NO: 1058334 - DNA, 15 bp, Homo sapiens
ttaaacttcaattca

SEQ ID NO: 1058335 - DNA, 15 bp, Homo sapiens
attaaacttcaattc

SEQ ID NO: 1058336 - DNA, 15 bp, Homo sapiens
aattaaacttcaatt

SEQ ID NO: 1058337 - DNA, 15 bp, Homo sapiens
aaattaaacttcaat

SEQ ID NO: 1058338 - DNA, 15 bp, Homo sapiens
caaattaaacttcaa

SEQ ID NO: 1058339 - DNA, 15 bp, Homo sapiens
tcaaattaaacttca

SEQ ID NO: 1058340 - DNA, 15 bp, Homo sapiens
ttcaaattaaacttc

SEQ ID NO: 1058341 - DNA, 15 bp, Homo sapiens
tttcaaattaaactt

SEQ ID NO: 1058342 - DNA, 15 bp, Homo sapiens
ttttcaaattaaact

SEQ ID NO: 1058343 - DNA, 15 bp, Homo sapiens
cttttcaaattaaac

SEQ ID NO: 1058344 - DNA, 15 bp, Homo sapiens
tcttttcaaattaaa

SEQ ID NO: 1058345 - DNA, 15 bp, Homo sapiens
atcttttcaaattaa

SEQ ID NO: 1058346 - DNA, 15 bp, Homo sapiens
aatcttttcaaatta

SEQ ID NO: 1058347 - DNA, 15 bp, Homo sapiens
caatcttttcaaatt

SEQ ID NO: 1058348 - DNA, 15 bp, Homo sapiens
ccaatcttttcaaat

SEQ ID NO: 1058349 - DNA, 15 bp, Homo sapiens
tccaatcttttcaaa

SEQ ID NO: 1058350 - DNA, 15 bp, Homo sapiens
atccaatcttttcaa

SEQ ID NO: 1058351 - DNA, 15 bp, Homo sapiens
tatccaatcttttca

SEQ ID NO: 1058352 - DNA, 15 bp, Homo sapiens
atatccaatcttttc

SEQ ID NO: 1058353 - DNA, 15 bp, Homo sapiens
gatatccaatctttt

SEQ ID NO: 1058354 - DNA, 15 bp, Homo sapiens
tgatatccaatcttt

SEQ ID NO: 1058355 - DNA, 15 bp, Homo sapiens
ctgatatccaatctt

SEQ ID NO: 1058356 - DNA, 15 bp, Homo sapiens
gctgatatccaatct

SEQ ID NO: 1058357 - DNA, 15 bp, Homo sapiens
tgctgatatccaatc

SEQ ID NO: 1058358 - DNA, 15 bp, Homo sapiens
atgctgatatccaat

SEQ ID NO: 1058359 - DNA, 15 bp, Homo sapiens
aatgctgatatccaa

SEQ ID NO: 1058360 - DNA, 15 bp, Homo sapiens
gaatgctgatatcca

SEQ ID NO: 1058361 - DNA, 15 bp, Homo sapiens
agaatgctgatatcc

SEQ ID NO: 1058362 - DNA, 15 bp, Homo sapiens
cagaatgctgatatc

SEQ ID NO: 1058363 - DNA, 15 bp, Homo sapiens
tcagaatgctgatat

SEQ ID NO: 1058364 - DNA, 15 bp, Homo sapiens
ctcagaatgctgata

SEQ ID NO: 1058365 - DNA, 15 bp, Homo sapiens
tctcagaatgctgat

SEQ ID NO: 1058366 - DNA, 15 bp, Homo sapiens
atctcagaatgctga

SEQ ID NO: 1058367 - DNA, 15 bp, Homo sapiens
aatctcagaatgctg

SEQ ID NO: 1058368 - DNA, 15 bp, Homo sapiens
taatctcagaatgct

SEQ ID NO: 1058369 - DNA, 15 bp, Homo sapiens
gtaatctcagaatgc

SEQ ID NO: 1058370 - DNA, 15 bp, Homo sapiens
tgtaatctcagaatg

SEQ ID NO: 1058371 - DNA, 15 bp, Homo sapiens
ctgtaatctcagaat

SEQ ID NO: 1058372 - DNA, 15 bp, Homo sapiens
tctgtaatctcagaa

SEQ ID NO: 1058373 - DNA, 15 bp, Homo sapiens
ttctgtaatctcaga

SEQ ID NO: 1058374 - DNA, 15 bp, Homo sapiens
tttctgtaatctcag

SEQ ID NO: 1058375 - DNA, 15 bp, Homo sapiens
ttttctgtaatctca

SEQ ID NO: 1058376 - DNA, 15 bp, Homo sapiens
attttctgtaatctc

SEQ ID NO: 1058377 - DNA, 15 bp, Homo sapiens
aattttctgtaatct

SEQ ID NO: 1058378 - DNA, 15 bp, Homo sapiens
gaattttctgtaatc

SEQ ID NO: 1058379 - DNA, 15 bp, Homo sapiens
tgaattttctgtaat

SEQ ID NO: 1058380 - DNA, 15 bp, Homo sapiens
ttgaattttctgtaa

SEQ ID NO: 1058381 - DNA, 15 bp, Homo sapiens
gttgaattttctgta

SEQ ID NO: 1058382 - DNA, 15 bp, Homo sapiens
cgttgaattttctgt

SEQ ID NO: 1058383 - DNA, 15 bp, Homo sapiens
gcgttgaattttctg

SEQ ID NO: 1058384 - DNA, 15 bp, Homo sapiens
cgcgttgaattttct

SEQ ID NO: 1058385 - DNA, 15 bp, Homo sapiens
acgcgttgaattttc

SEQ ID NO: 1058386 - DNA, 15 bp, Homo sapiens
cacgcgttgaatttt

SEQ ID NO: 1058387 - DNA, 15 bp, Homo sapiens
tcacgcgttgaattt

SEQ ID NO: 1058388 - DNA, 15 bp, Homo sapiens
gtcacgcgttgaatt

SEQ ID NO: 1058389 - DNA, 15 bp, Homo sapiens
agtcacgcgttgaat

SEQ ID NO: 1058390 - DNA, 15 bp, Homo sapiens
gagtcacgcgttgaa

SEQ ID NO: 1058391 - DNA, 15 bp, Homo sapiens
ggagtcacgcgttga

SEQ ID NO: 1058392 - DNA, 15 bp, Homo sapiens
aggagtcacgcgttg

SEQ ID NO: 1058393 - DNA, 15 bp, Homo sapiens
gaggagtcacgcgtt

SEQ ID NO: 1058394 - DNA, 15 bp, Homo sapiens
tgaggagtcacgcgt

SEQ ID NO: 1058395 - DNA, 15 bp, Homo sapiens
ctgaggagtcacgcg

SEQ ID NO: 1058396 - DNA, 15 bp, Homo sapiens
cctgaggagtcacgc

SEQ ID NO: 1058397 - DNA, 15 bp, Homo sapiens
acctgaggagtcacg

SEQ ID NO: 1058398 - DNA, 15 bp, Homo sapiens
aacctgaggagtcac

SEQ ID NO: 1058399 - DNA, 15 bp, Homo sapiens
gaacctgaggagtca

SEQ ID NO: 1058400 - DNA, 15 bp, Homo sapiens
tgaacctgaggagtc

SEQ ID NO: 1058401 - DNA, 15 bp, Homo sapiens
ctgaacctgaggagt

SEQ ID NO: 1058402 - DNA, 15 bp, Homo sapiens
actgaacctgaggag

SEQ ID NO: 1058403 - DNA, 15 bp, Homo sapiens
cactgaacctgagga

SEQ ID NO: 1058404 - DNA, 15 bp, Homo sapiens
gcactgaacctgagg

SEQ ID NO: 1058405 - DNA, 15 bp, Homo sapiens
cgcactgaacctgag

SEQ ID NO: 1058406 - DNA, 15 bp, Homo sapiens
acgcactgaacctga

SEQ ID NO: 1058407 - DNA, 15 bp, Homo sapiens
cacgcactgaacctg

SEQ ID NO: 1058408 - DNA, 15 bp, Homo sapiens
gcacgcactgaacct

SEQ ID NO: 1058409 - DNA, 15 bp, Homo sapiens
agcacgcactgaacc

SEQ ID NO: 1058410 - DNA, 15 bp, Homo sapiens
gagcacgcactgaac

SEQ ID NO: 1058411 - DNA, 15 bp, Homo sapiens
agagcacgcactgaa

SEQ ID NO: 1058412 - DNA, 15 bp, Homo sapiens
aagagcacgcactga

SEQ ID NO: 1058413 - DNA, 15 bp, Homo sapiens
taagagcacgcactg

SEQ ID NO: 1058414 - DNA, 15 bp, Homo sapiens
ctaagagcacgcact

SEQ ID NO: 1058415 - DNA, 15 bp, Homo sapiens
tctaagagcacgcac

SEQ ID NO: 1058416 - DNA, 15 bp, Homo sapiens
gtctaagagcacgca

SEQ ID NO: 1058417 - DNA, 15 bp, Homo sapiens
tgtctaagagcacgc

SEQ ID NO: 1058418 - DNA, 15 bp, Homo sapiens
atgtctaagagcacg

SEQ ID NO: 1058419 - DNA, 15 bp, Homo sapiens
tatgtctaagagcac

SEQ ID NO: 1058420 - DNA, 15 bp, Homo sapiens
ctatgtctaagagca

SEQ ID NO: 1058421 - DNA, 15 bp, Homo sapiens
cctatgtctaagagc

SEQ ID NO: 1058422 - DNA, 15 bp, Homo sapiens
acctatgtctaagag

SEQ ID NO: 1058423 - DNA, 15 bp, Homo sapiens
cacctatgtctaaga

SEQ ID NO: 1058424 - DNA, 15 bp, Homo sapiens
tcacctatgtctaag

SEQ ID NO: 1058425 - DNA, 15 bp, Homo sapiens
ttcacctatgtctaa

SEQ ID NO: 1058426 - DNA, 15 bp, Homo sapiens
cttcacctatgtcta

SEQ ID NO: 1058427 - DNA, 15 bp, Homo sapiens
ccttcacctatgtct

SEQ ID NO: 1058428 - DNA, 15 bp, Homo sapiens
cccttcacctatgtc

SEQ ID NO: 1058429 - DNA, 15 bp, Homo sapiens
tcccttcacctatgt

SEQ ID NO: 1058430 - DNA, 15 bp, Homo sapiens
ttcccttcacctatg

SEQ ID NO: 1058431 - DNA, 15 bp, Homo sapiens
cttcccttcacctat

SEQ ID NO: 1058432 - DNA, 15 bp, Homo sapiens
gcttcccttcaccta

SEQ ID NO: 1058433 - DNA, 15 bp, Homo sapiens
tgcttcccttcacct

SEQ ID NO: 1058434 - DNA, 15 bp, Homo sapiens
ttgcttcccttcacc

SEQ ID NO: 1058435 - DNA, 15 bp, Homo sapiens
tttgcttcccttcac

SEQ ID NO: 1058436 - DNA, 15 bp, Homo sapiens
ttttgcttcccttca

SEQ ID NO: 1058437 - DNA, 15 bp, Homo sapiens
cttttgcttcccttc

SEQ ID NO: 1058438 - DNA, 15 bp, Homo sapiens
acttttgcttccctt

SEQ ID NO: 1058439 - DNA, 15 bp, Homo sapiens
aacttttgcttccct

SEQ ID NO: 1058440 - DNA, 15 bp, Homo sapiens
gaacttttgcttccc

SEQ ID NO: 1058441 - DNA, 15 bp, Homo sapiens
ggaacttttgcttcc

SEQ ID NO: 1058442 - DNA, 15 bp, Homo sapiens
aggaacttttgcttc

SEQ ID NO: 1058443 - DNA, 15 bp, Homo sapiens
taggaacttttgctt

SEQ ID NO: 1058444 - DNA, 15 bp, Homo sapiens
ataggaacttttgct

SEQ ID NO: 1058445 - DNA, 15 bp, Homo sapiens
aataggaacttttgc

SEQ ID NO: 1058446 - DNA, 15 bp, Homo sapiens
caataggaacttttg

SEQ ID NO: 1058447 - DNA, 15 bp, Homo sapiens
ccaataggaactttt

SEQ ID NO: 1058448 - DNA, 15 bp, Homo sapiens
tccaataggaacttt

SEQ ID NO: 1058449 - DNA, 15 bp, Homo sapiens
ttccaataggaactt

SEQ ID NO: 1058450 - DNA, 15 bp, Homo sapiens
attccaataggaact

SEQ ID NO: 1058451 - DNA, 15 bp, Homo sapiens
tattccaataggaac

SEQ ID NO: 1058452 - DNA, 15 bp, Homo sapiens
gtattccaataggaa

SEQ ID NO: 1058453 - DNA, 15 bp, Homo sapiens
agtattccaatagga

SEQ ID NO: 1058454 - DNA, 15 bp, Homo sapiens
tagtattccaatagg

SEQ ID NO: 1058455 - DNA, 15 bp, Homo sapiens
gtagtattccaatag

SEQ ID NO: 1058456 - DNA, 15 bp, Homo sapiens
ggtagtattccaata

SEQ ID NO: 1058457 - DNA, 15 bp, Homo sapiens
tggtagtattccaat

SEQ ID NO: 1058458 - DNA, 15 bp, Homo sapiens
gtggtagtattccaa

SEQ ID NO: 1058459 - DNA, 15 bp, Homo sapiens
agtggtagtattcca

SEQ ID NO: 1058460 - DNA, 15 bp, Homo sapiens
gagtggtagtattcc

SEQ ID NO: 1058461 - DNA, 15 bp, Homo sapiens
tgagtggtagtattc

SEQ ID NO: 1058462 - DNA, 15 bp, Homo sapiens
gtgagtggtagtatt

SEQ ID NO: 1058463 - DNA, 15 bp, Homo sapiens
ggtgagtggtagtat

SEQ ID NO: 1058464 - DNA, 15 bp, Homo sapiens
aggtgagtggtagta

SEQ ID NO: 1058465 - DNA, 15 bp, Homo sapiens
gaggtgagtggtagt

SEQ ID NO: 1058466 - DNA, 15 bp, Homo sapiens
ggaggtgagtggtag

SEQ ID NO: 1058467 - DNA, 15 bp, Homo sapiens
aggaggtgagtggta

SEQ ID NO: 1058468 - DNA, 15 bp, Homo sapiens
aaggaggtgagtggt

SEQ ID NO: 1058469 - DNA, 15 bp, Homo sapiens
gaaggaggtgagtgg

SEQ ID NO: 1058470 - DNA, 15 bp, Homo sapiens
ggaaggaggtgagtg

SEQ ID NO: 1058471 - DNA, 15 bp, Homo sapiens
gggaaggaggtgagt

SEQ ID NO: 1058472 - DNA, 15 bp, Homo sapiens
tgggaaggaggtgag

SEQ ID NO: 1058473 - DNA, 15 bp, Homo sapiens
ttgggaaggaggtga

SEQ ID NO: 1058474 - DNA, 15 bp, Homo sapiens
gttgggaaggaggtg

SEQ ID NO: 1058475 - DNA, 15 bp, Homo sapiens
agttgggaaggaggt

SEQ ID NO: 1058476 - DNA, 15 bp, Homo sapiens
gagttgggaaggagg

SEQ ID NO: 1058477 - DNA, 15 bp, Homo sapiens
ggagttgggaaggag

SEQ ID NO: 1058478 - DNA, 15 bp, Homo sapiens
gggagttgggaagga

SEQ ID NO: 1058479 - DNA, 15 bp, Homo sapiens
tgggagttgggaagg

SEQ ID NO: 1058480 - DNA, 15 bp, Homo sapiens
atgggagttgggaag

SEQ ID NO: 1058481 - DNA, 15 bp, Homo sapiens
aatgggagttgggaa

SEQ ID NO: 1058482 - DNA, 15 bp, Homo sapiens
caatgggagttggga

SEQ ID NO: 1058483 - DNA, 15 bp, Homo sapiens
gcaatgggagttggg

SEQ ID NO: 1058484 - DNA, 15 bp, Homo sapiens
ggcaatgggagttgg

SEQ ID NO: 1058485 - DNA, 15 bp, Homo sapiens
gggcaatgggagttg

SEQ ID NO: 1058486 - DNA, 15 bp, Homo sapiens
ggggcaatgggagtt

SEQ ID NO: 1058487 - DNA, 15 bp, Homo sapiens
gggggcaatgggagt

SEQ ID NO: 1058488 - DNA, 15 bp, Homo sapiens
agggggcaatgggag

SEQ ID NO: 1058489 - DNA, 15 bp, Homo sapiens
gagggggcaatggga

SEQ ID NO: 1058490 - DNA, 15 bp, Homo sapiens
ggagggggcaatggg

SEQ ID NO: 1058491 - DNA, 15 bp, Homo sapiens
tggagggggcaatgg

SEQ ID NO: 1058492 - DNA, 15 bp, Homo sapiens
gtggagggggcaatg

SEQ ID NO: 1058493 - DNA, 15 bp, Homo sapiens
ggtggagggggcaat

SEQ ID NO: 1058494 - DNA, 15 bp, Homo sapiens
tggtggagggggcaa

SEQ ID NO: 1058495 - DNA, 15 bp, Homo sapiens
ctggtggagggggca

SEQ ID NO: 1058496 - DNA, 15 bp, Homo sapiens
actggtggagggggc

SEQ ID NO: 1058497 - DNA, 15 bp, Homo sapiens
tactggtggaggggg

SEQ ID NO: 1058498 - DNA, 15 bp, Homo sapiens
ttactggtggagggg

SEQ ID NO: 1058499 - DNA, 15 bp, Homo sapiens
gttactggtggaggg

SEQ ID NO: 1058500 - DNA, 15 bp, Homo sapiens
tgttactggtggagg

SEQ ID NO: 1058501 - DNA, 15 bp, Homo sapiens
atgttactggtggag

SEQ ID NO: 1058502 - DNA, 15 bp, Homo sapiens
tatgttactggtgga

SEQ ID NO: 1058503 - DNA, 15 bp, Homo sapiens
gtatgttactggtgg

SEQ ID NO: 1058504 - DNA, 15 bp, Homo sapiens
ggtatgttactggtg

SEQ ID NO: 1058505 - DNA, 15 bp, Homo sapiens
aggtatgttactggt

SEQ ID NO: 1058506 - DNA, 15 bp, Homo sapiens
caggtatgttactgg

SEQ ID NO: 1058507 - DNA, 15 bp, Homo sapiens
acaggtatgttactg

SEQ ID NO: 1058508 - DNA, 15 bp, Homo sapiens
cacaggtatgttact

SEQ ID NO: 1058509 - DNA, 15 bp, Homo sapiens
acacaggtatgttac

SEQ ID NO: 1058510 - DNA, 15 bp, Homo sapiens
tacacaggtatgtta

SEQ ID NO: 1058511 - DNA, 15 bp, Homo sapiens
gtacacaggtatgtt

SEQ ID NO: 1058512 - DNA, 15 bp, Homo sapiens
ggtacacaggtatgt

SEQ ID NO: 1058513 - DNA, 15 bp, Homo sapiens
aggtacacaggtatg

SEQ ID NO: 1058514 - DNA, 15 bp, Homo sapiens
aaggtacacaggtat

SEQ ID NO: 1058515 - DNA, 15 bp, Homo sapiens
taaggtacacaggta

SEQ ID NO: 1058516 - DNA, 15 bp, Homo sapiens
gtaaggtacacaggt

SEQ ID NO: 1058517 - DNA, 15 bp, Homo sapiens
ggtaaggtacacagg

SEQ ID NO: 1058518 - DNA, 15 bp, Homo sapiens
gggtaaggtacacag

SEQ ID NO: 1058519 - DNA, 15 bp, Homo sapiens
agggtaaggtacaca

SEQ ID NO: 1058520 - DNA, 15 bp, Homo sapiens
gagggtaaggtacac

SEQ ID NO: 1058521 - DNA, 15 bp, Homo sapiens
tgagggtaaggtaca

SEQ ID NO: 1058522 - DNA, 15 bp, Homo sapiens
gtgagggtaaggtac

SEQ ID NO: 1058523 - DNA, 15 bp, Homo sapiens
ggtgagggtaaggta

SEQ ID NO: 1058524 - DNA, 15 bp, Homo sapiens
aggtgagggtaaggt

SEQ ID NO: 1058525 - DNA, 15 bp, Homo sapiens
caggtgagggtaagg

SEQ ID NO: 1058526 - DNA, 15 bp, Homo sapiens
acaggtgagggtaag

SEQ ID NO: 1058527 - DNA, 15 bp, Homo sapiens
cacaggtgagggtaa

SEQ ID NO: 1058528 - DNA, 15 bp, Homo sapiens
tcacaggtgagggta

SEQ ID NO: 1058529 - DNA, 15 bp, Homo sapiens
ttcacaggtgagggt

SEQ ID NO: 1058530 - DNA, 15 bp, Homo sapiens
tttcacaggtgaggg

SEQ ID NO: 1058531 - DNA, 15 bp, Homo sapiens
ctttcacaggtgagg

SEQ ID NO: 1058532 - DNA, 15 bp, Homo sapiens
cctttcacaggtgag

SEQ ID NO: 1058533 - DNA, 15 bp, Homo sapiens
tcctttcacaggtga

SEQ ID NO: 1058534 - DNA, 15 bp, Homo sapiens
gtcctttcacaggtg

SEQ ID NO: 1058535 - DNA, 15 bp, Homo sapiens
ggtcctttcacaggt

SEQ ID NO: 1058536 - DNA, 15 bp, Homo sapiens
gggtcctttcacagg

SEQ ID NO: 1058537 - DNA, 15 bp, Homo sapiens
tgggtcctttcacag

SEQ ID NO: 1058538 - DNA, 15 bp, Homo sapiens
atgggtcctttcaca

SEQ ID NO: 1058539 - DNA, 15 bp, Homo sapiens
tatgggtcctttcac

SEQ ID NO: 1058540 - DNA, 15 bp, Homo sapiens
atatgggtcctttca

SEQ ID NO: 1058541 - DNA, 15 bp, Homo sapiens
catatgggtcctttc

SEQ ID NO: 1058542 - DNA, 15 bp, Homo sapiens
acatatgggtccttt

SEQ ID NO: 1058543 - DNA, 15 bp, Homo sapiens
tacatatgggtcctt

SEQ ID NO: 1058544 - DNA, 15 bp, Homo sapiens
gtacatatgggtcct

SEQ ID NO: 1058545 - DNA, 15 bp, Homo sapiens
tgtacatatgggtcc

SEQ ID NO: 1058546 - DNA, 15 bp, Homo sapiens
atgtacatatgggtc

SEQ ID NO: 1058547 - DNA, 15 bp, Homo sapiens
tatgtacatatgggt

SEQ ID NO: 1058548 - DNA, 15 bp, Homo sapiens
ttatgtacatatggg

SEQ ID NO: 1058549 - DNA, 15 bp, Homo sapiens
tttatgtacatatgg

SEQ ID NO: 1058550 - DNA, 15 bp, Homo sapiens
gtttatgtacatatg

SEQ ID NO: 1058551 - DNA, 15 bp, Homo sapiens
ggtttatgtacatat

SEQ ID NO: 1058552 - DNA, 15 bp, Homo sapiens
gggtttatgtacata

SEQ ID NO: 1058553 - DNA, 15 bp, Homo sapiens
tgggtttatgtacat

SEQ ID NO: 1058554 - DNA, 15 bp, Homo sapiens
ctgggtttatgtaca

SEQ ID NO: 1058555 - DNA, 15 bp, Homo sapiens
tctgggtttatgtac

SEQ ID NO: 1058556 - DNA, 15 bp, Homo sapiens
ttctgggtttatgta

SEQ ID NO: 1058557 - DNA, 15 bp, Homo sapiens
cttctgggtttatgt

SEQ ID NO: 1058558 - DNA, 15 bp, Homo sapiens
tcttctgggtttatg

SEQ ID NO: 1058559 - DNA, 15 bp, Homo sapiens
atcttctgggtttat

SEQ ID NO: 1058560 - DNA, 15 bp, Homo sapiens
tatcttctgggttta

SEQ ID NO: 1058561 - DNA, 15 bp, Homo sapiens
gtatcttctgggttt

SEQ ID NO: 1058562 - DNA, 15 bp, Homo sapiens
ggtatcttctgggtt

SEQ ID NO: 1058563 - DNA, 15 bp, Homo sapiens
tggtatcttctgggt

SEQ ID NO: 1058564 - DNA, 15 bp, Homo sapiens
gtggtatcttctggg

SEQ ID NO: 1058565 - DNA, 15 bp, Homo sapiens
tgtggtatcttctgg

SEQ ID NO: 1058566 - DNA, 15 bp, Homo sapiens
ctgtggtatcttctg

SEQ ID NO: 1058567 - DNA, 15 bp, Homo sapiens
gctgtggtatcttct

SEQ ID NO: 1058568 - DNA, 15 bp, Homo sapiens
tgctgtggtatcttc

SEQ ID NO: 1058569 - DNA, 15 bp, Homo sapiens
ctgctgtggtatctt

SEQ ID NO: 1058570 - DNA, 15 bp, Homo sapiens
cctgctgtggtatct

SEQ ID NO: 1058571 - DNA, 15 bp, Homo sapiens
tcctgctgtggtatc

SEQ ID NO: 1058572 - DNA, 15 bp, Homo sapiens
ttcctgctgtggtat

SEQ ID NO: 1058573 - DNA, 15 bp, Homo sapiens
cttcctgctgtggta

SEQ ID NO: 1058574 - DNA, 15 bp, Homo sapiens
ccttcctgctgtggt

SEQ ID NO: 1058575 - DNA, 15 bp, Homo sapiens
tccttcctgctgtgg

SEQ ID NO: 1058576 - DNA, 15 bp, Homo sapiens
ctccttcctgctgtg

SEQ ID NO: 1058577 - DNA, 15 bp, Homo sapiens
actccttcctgctgt

SEQ ID NO: 1058578 - DNA, 15 bp, Homo sapiens
cactccttcctgctg

SEQ ID NO: 1058579 - DNA, 15 bp, Homo sapiens
tcactccttcctgct

SEQ ID NO: 1058580 - DNA, 15 bp, Homo sapiens
atcactccttcctgc

SEQ ID NO: 1058581 - DNA, 15 bp, Homo sapiens
tatcactccttcctg

SEQ ID NO: 1058582 - DNA, 15 bp, Homo sapiens
gtatcactccttcct

SEQ ID NO: 1058583 - DNA, 15 bp, Homo sapiens
agtatcactccttcc

SEQ ID NO: 1058584 - DNA, 15 bp, Homo sapiens
cagtatcactccttc

SEQ ID NO: 1058585 - DNA, 15 bp, Homo sapiens
ccagtatcactcctt

SEQ ID NO: 1058586 - DNA, 15 bp, Homo sapiens
gccagtatcactcct

SEQ ID NO: 1058587 - DNA, 15 bp, Homo sapiens
agccagtatcactcc

SEQ ID NO: 1058588 - DNA, 15 bp, Homo sapiens
aagccagtatcactc

SEQ ID NO: 1058589 - DNA, 15 bp, Homo sapiens
gaagccagtatcact

SEQ ID NO: 1058590 - DNA, 15 bp, Homo sapiens
agaagccagtatcac

SEQ ID NO: 1058591 - DNA, 15 bp, Homo sapiens
gagaagccagtatca

SEQ ID NO: 1058592 - DNA, 15 bp, Homo sapiens
ggagaagccagtatc

SEQ ID NO: 1058593 - DNA, 15 bp, Homo sapiens
aggagaagccagtat

SEQ ID NO: 1058594 - DNA, 15 bp, Homo sapiens
gaggagaagccagta

SEQ ID NO: 1058595 - DNA, 15 bp, Homo sapiens
ggaggagaagccagt

SEQ ID NO: 1058596 - DNA, 15 bp, Homo sapiens
tggaggagaagccag

SEQ ID NO: 1058597 - DNA, 15 bp, Homo sapiens
ctggaggagaagcca

SEQ ID NO: 1058598 - DNA, 15 bp, Homo sapiens
cctggaggagaagcc

SEQ ID NO: 1058599 - DNA, 15 bp, Homo sapiens
gcctggaggagaagc

SEQ ID NO: 1058600 - DNA, 15 bp, Homo sapiens
ggcctggaggagaag

SEQ ID NO: 1058601 - DNA, 15 bp, Homo sapiens
tggcctggaggagaa

SEQ ID NO: 1058602 - DNA, 15 bp, Homo sapiens
atggcctggaggaga

SEQ ID NO: 1058603 - DNA, 15 bp, Homo sapiens
catggcctggaggag

SEQ ID NO: 1058604 - DNA, 15 bp, Homo sapiens
ccatggcctggagga

SEQ ID NO: 1058605 - DNA, 15 bp, Homo sapiens
gccatggcctggagg

SEQ ID NO: 1058606 - DNA, 15 bp, Homo sapiens
tgccatggcctggag

SEQ ID NO: 1058607 - DNA, 15 bp, Homo sapiens
ttgccatggcctgga

SEQ ID NO: 1058608 - DNA, 15 bp, Homo sapiens
tttgccatggcctgg

SEQ ID NO: 1058609 - DNA, 15 bp, Homo sapiens
ctttgccatggcctg

SEQ ID NO: 1058610 - DNA, 15 bp, Homo sapiens
actttgccatggcct

SEQ ID NO: 1058611 - DNA, 15 bp, Homo sapiens
tactttgccatggcc

SEQ ID NO: 1058612 - DNA, 15 bp, Homo sapiens
gtactttgccatggc

SEQ ID NO: 1058613 - DNA, 15 bp, Homo sapiens
tgtactttgccatgg

SEQ ID NO: 1058614 - DNA, 15 bp, Homo sapiens
ttgtactttgccatg

SEQ ID NO: 1058615 - DNA, 15 bp, Homo sapiens
cttgtactttgccat

SEQ ID NO: 1058616 - DNA, 15 bp, Homo sapiens
gcttgtactttgcca

SEQ ID NO: 1058617 - DNA, 15 bp, Homo sapiens
agcttgtactttgcc

SEQ ID NO: 1058618 - DNA, 15 bp, Homo sapiens
cagcttgtactttgc

SEQ ID NO: 1058619 - DNA, 15 bp, Homo sapiens
gcagcttgtactttg

SEQ ID NO: 1058620 - DNA, 15 bp, Homo sapiens
tgcagcttgtacttt

SEQ ID NO: 1058621 - DNA, 15 bp, Homo sapiens
ctgcagcttgtactt

SEQ ID NO: 1058622 - DNA, 15 bp, Homo sapiens
cctgcagcttgtact

SEQ ID NO: 1058623 - DNA, 15 bp, Homo sapiens
gcctgcagcttgtac

SEQ ID NO: 1058624 - DNA, 15 bp, Homo sapiens
ggcctgcagcttgta

SEQ ID NO: 1058625 - DNA, 15 bp, Homo sapiens
tggcctgcagcttgt

SEQ ID NO: 1058626 - DNA, 15 bp, Homo sapiens
ttggcctgcagcttg

SEQ ID NO: 1058627 - DNA, 15 bp, Homo sapiens
tttggcctgcagctt

SEQ ID NO: 1058628 - DNA, 15 bp, Homo sapiens
atttggcctgcagct

SEQ ID NO: 1058629 - DNA, 15 bp, Homo sapiens
gatttggcctgcagc

SEQ ID NO: 1058630 - DNA, 15 bp, Homo sapiens
agatttggcctgcag

SEQ ID NO: 1058631 - DNA, 15 bp, Homo sapiens
cagatttggcctgca

SEQ ID NO: 1058632 - DNA, 15 bp, Homo sapiens
ccagatttggcctgc

SEQ ID NO: 1058633 - DNA, 15 bp, Homo sapiens
gccagatttggcctg

SEQ ID NO: 1058634 - DNA, 15 bp, Homo sapiens
ggccagatttggcct

SEQ ID NO: 1058635 - DNA, 15 bp, Homo sapiens
tggccagatttggcc

SEQ ID NO: 1058636 - DNA, 15 bp, Homo sapiens
ttggccagatttggc

SEQ ID NO: 1058637 - DNA, 15 bp, Homo sapiens
tttggccagatttgg

SEQ ID NO: 1058638 - DNA, 15 bp, Homo sapiens
ttttggccagatttg

SEQ ID NO: 1058639 - DNA, 15 bp, Homo sapiens
cttttggccagattt

SEQ ID NO: 1058640 - DNA, 15 bp, Homo sapiens
acttttggccagatt

SEQ ID NO: 1058641 - DNA, 15 bp, Homo sapiens
cacttttggccagat

SEQ ID NO: 1058642 - DNA, 15 bp, Homo sapiens
ccacttttggccaga

SEQ ID NO: 1058643 - DNA, 15 bp, Homo sapiens
gccacttttggccag

SEQ ID NO: 1058644 - DNA, 15 bp, Homo sapiens
ggccacttttggcca

SEQ ID NO: 1058645 - DNA, 15 bp, Homo sapiens
gggccacttttggcc

SEQ ID NO: 1058646 - DNA, 15 bp, Homo sapiens
tgggccacttttggc

SEQ ID NO: 1058647 - DNA, 15 bp, Homo sapiens
atgggccacttttgg

SEQ ID NO: 1058648 - DNA, 15 bp, Homo sapiens
catgggccacttttg

SEQ ID NO: 1058649 - DNA, 15 bp, Homo sapiens
ccatgggccactttt

SEQ ID NO: 1058650 - DNA, 15 bp, Homo sapiens
tccatgggccacttt

SEQ ID NO: 1058651 - DNA, 15 bp, Homo sapiens
gtccatgggccactt

SEQ ID NO: 1058652 - DNA, 15 bp, Homo sapiens
tgtccatgggccact

SEQ ID NO: 1058653 - DNA, 15 bp, Homo sapiens
ttgtccatgggccac

SEQ ID NO: 1058654 - DNA, 15 bp, Homo sapiens
tttgtccatgggcca

SEQ ID NO: 1058655 - DNA, 15 bp, Homo sapiens
ctttgtccatgggcc

SEQ ID NO: 1058656 - DNA, 15 bp, Homo sapiens
gctttgtccatgggc

SEQ ID NO: 1058657 - DNA, 15 bp, Homo sapiens
tgctttgtccatggg

SEQ ID NO: 1058658 - DNA, 15 bp, Homo sapiens
ttgctttgtccatgg

SEQ ID NO: 1058659 - DNA, 15 bp, Homo sapiens
tttgctttgtccatg

SEQ ID NO: 1058660 - DNA, 15 bp, Homo sapiens
ttttgctttgtccat

SEQ ID NO: 1058661 - DNA, 15 bp, Homo sapiens
gttttgctttgtcca

SEQ ID NO: 1058662 - DNA, 15 bp, Homo sapiens
tgttttgctttgtcc

SEQ ID NO: 1058663 - DNA, 15 bp, Homo sapiens
ttgttttgctttgtc

SEQ ID NO: 1058664 - DNA, 15 bp, Homo sapiens
tttgttttgctttgt

SEQ ID NO: 1058665 - DNA, 15 bp, Homo sapiens
ttttgttttgctttg

SEQ ID NO: 1058666 - DNA, 15 bp, Homo sapiens
tttttgttttgcttt

SEQ ID NO: 1058667 - DNA, 15 bp, Homo sapiens
gtttttgttttgctt

SEQ ID NO: 1058668 - DNA, 15 bp, Homo sapiens
agtttttgttttgct

SEQ ID NO: 1058669 - DNA, 15 bp, Homo sapiens
tagtttttgttttgc

SEQ ID NO: 1058670 - DNA, 15 bp, Homo sapiens
ttagtttttgttttg

SEQ ID NO: 1058671 - DNA, 15 bp, Homo sapiens
cttagtttttgtttt

SEQ ID NO: 1058672 - DNA, 15 bp, Homo sapiens
tcttagtttttgttt

SEQ ID NO: 1058673 - DNA, 15 bp, Homo sapiens
ttcttagtttttgtt

SEQ ID NO: 1058674 - DNA, 15 bp, Homo sapiens
cttcttagtttttgt

SEQ ID NO: 1058675 - DNA, 15 bp, Homo sapiens
tcttcttagtttttg

SEQ ID NO: 1058676 - DNA, 15 bp, Homo sapiens
gtcttcttagttttt

SEQ ID NO: 1058677 - DNA, 15 bp, Homo sapiens
agtcttcttagtttt

SEQ ID NO: 1058678 - DNA, 15 bp, Homo sapiens
cagtcttcttagttt

SEQ ID NO: 1058679 - DNA, 15 bp, Homo sapiens
acagtcttcttagtt

SEQ ID NO: 1058680 - DNA, 15 bp, Homo sapiens
cacagtcttcttagt

SEQ ID NO: 1058681 - DNA, 15 bp, Homo sapiens
gcacagtcttcttag

SEQ ID NO: 1058682 - DNA, 15 bp, Homo sapiens
tgcacagtcttctta

SEQ ID NO: 1058683 - DNA, 15 bp, Homo sapiens
ttgcacagtcttctt

SEQ ID NO: 1058684 - DNA, 15 bp, Homo sapiens
gttgcacagtcttct

SEQ ID NO: 1058685 - DNA, 15 bp, Homo sapiens
tgttgcacagtcttc

SEQ ID NO: 1058686 - DNA, 15 bp, Homo sapiens
ctgttgcacagtctt

SEQ ID NO: 1058687 - DNA, 15 bp, Homo sapiens
tctgttgcacagtct

SEQ ID NO: 1058688 - DNA, 15 bp, Homo sapiens
ctctgttgcacagtc

SEQ ID NO: 1058689 - DNA, 15 bp, Homo sapiens
tctctgttgcacagt

SEQ ID NO: 1058690 - DNA, 15 bp, Homo sapiens
atctctgttgcacag

SEQ ID NO: 1058691 - DNA, 15 bp, Homo sapiens
aatctctgttgcaca

SEQ ID NO: 1058692 - DNA, 15 bp, Homo sapiens
caatctctgttgcac

SEQ ID NO: 1058693 - DNA, 15 bp, Homo sapiens
acaatctctgttgca

SEQ ID NO: 1058694 - DNA, 15 bp, Homo sapiens
tacaatctctgttgc

SEQ ID NO: 1058695 - DNA, 15 bp, Homo sapiens
ctacaatctctgttg

SEQ ID NO: 1058696 - DNA, 15 bp, Homo sapiens
actacaatctctgtt

SEQ ID NO: 1058697 - DNA, 15 bp, Homo sapiens
aactacaatctctgt

SEQ ID NO: 1058698 - DNA, 15 bp, Homo sapiens
taactacaatctctg

SEQ ID NO: 1058699 - DNA, 15 bp, Homo sapiens
ctaactacaatctct

SEQ ID NO: 1058700 - DNA, 15 bp, Homo sapiens
gctaactacaatctc

SEQ ID NO: 1058701 - DNA, 15 bp, Homo sapiens
ggctaactacaatct

SEQ ID NO: 1058702 - DNA, 15 bp, Homo sapiens
aggctaactacaatc

SEQ ID NO: 1058703 - DNA, 15 bp, Homo sapiens
taggctaactacaat

SEQ ID NO: 1058704 - DNA, 15 bp, Homo sapiens
ataggctaactacaa

SEQ ID NO: 1058705 - DNA, 15 bp, Homo sapiens
cataggctaactaca

SEQ ID NO: 1058706 - DNA, 15 bp, Homo sapiens
tcataggctaactac

SEQ ID NO: 1058707 - DNA, 15 bp, Homo sapiens
ttcataggctaacta

SEQ ID NO: 1058708 - DNA, 15 bp, Homo sapiens
cttcataggctaact

SEQ ID NO: 1058709 - DNA, 15 bp, Homo sapiens
gcttcataggctaac

SEQ ID NO: 1058710 - DNA, 15 bp, Homo sapiens
ggcttcataggctaa

SEQ ID NO: 1058711 - DNA, 15 bp, Homo sapiens
tggcttcataggcta

SEQ ID NO: 1058712 - DNA, 15 bp, Homo sapiens
ttggcttcataggct

SEQ ID NO: 1058713 - DNA, 15 bp, Homo sapiens
tttggcttcataggc

SEQ ID NO: 1058714 - DNA, 15 bp, Homo sapiens
ttttggcttcatagg

SEQ ID NO: 1058715 - DNA, 15 bp, Homo sapiens
attttggcttcatag

SEQ ID NO: 1058716 - DNA, 15 bp, Homo sapiens
tattttggcttcata

SEQ ID NO: 1058717 - DNA, 15 bp, Homo sapiens
atattttggcttcat

SEQ ID NO: 1058718 - DNA, 15 bp, Homo sapiens
aatattttggcttca

SEQ ID NO: 1058719 - DNA, 15 bp, Homo sapiens
aaatattttggcttc

SEQ ID NO: 1058720 - DNA, 15 bp, Homo sapiens
taaatattttggctt

SEQ ID NO: 1058721 - DNA, 15 bp, Homo sapiens
gtaaatattttggct

SEQ ID NO: 1058722 - DNA, 15 bp, Homo sapiens
agtaaatattttggc

SEQ ID NO: 1058723 - DNA, 15 bp, Homo sapiens
tagtaaatattttgg

SEQ ID NO: 1058724 - DNA, 15 bp, Homo sapiens
atagtaaatattttg

SEQ ID NO: 1058725 - DNA, 15 bp, Homo sapiens
gagatagtaaatatt

SEQ ID NO: 1058726 - DNA, 15 bp, Homo sapiens
ggagatagtaaatat

SEQ ID NO: 1058727 - DNA, 15 bp, Homo sapiens
aggagatagtaaata

SEQ ID NO: 1058728 - DNA, 15 bp, Homo sapiens
aaggagatagtaaat

SEQ ID NO: 1058729 - DNA, 15 bp, Homo sapiens
aaaggagatagtaaa

SEQ ID NO: 1058730 - DNA, 15 bp, Homo sapiens
caaaaggagatagta

SEQ ID NO: 1058731 - DNA, 15 bp, Homo sapiens
tcaaaaggagatagt

SEQ ID NO: 1058732 - DNA, 15 bp, Homo sapiens
atcaaaaggagatag

SEQ ID NO: 1058733 - DNA, 15 bp, Homo sapiens
tatcaaaaggagata

SEQ ID NO: 1058734 - DNA, 15 bp, Homo sapiens
ctatcaaaaggagat

SEQ ID NO: 1058735 - DNA, 15 bp, Homo sapiens
tctatcaaaaggaga

SEQ ID NO: 1058736 - DNA, 15 bp, Homo sapiens
ttctatcaaaaggag

SEQ ID NO: 1058737 - DNA, 15 bp, Homo sapiens
cttctatcaaaagga

SEQ ID NO: 1058738 - DNA, 15 bp, Homo sapiens
tcttctatcaaaagg

SEQ ID NO: 1058739 - DNA, 15 bp, Homo sapiens
ttcttctatcaaaag

SEQ ID NO: 1058740 - DNA, 15 bp, Homo sapiens
tttcttctatcaaaa

SEQ ID NO: 1058741 - DNA, 15 bp, Homo sapiens
atttcttctatcaaa

SEQ ID NO: 1058742 - DNA, 15 bp, Homo sapiens
gatttcttctatcaa

SEQ ID NO: 1058743 - DNA, 15 bp, Homo sapiens
agatttcttctatca

SEQ ID NO: 1058744 - DNA, 15 bp, Homo sapiens
cagatttcttctatc

SEQ ID NO: 1058745 - DNA, 15 bp, Homo sapiens
gcagatttcttctat

SEQ ID NO: 1058746 - DNA, 15 bp, Homo sapiens
ggcagatttcttcta

SEQ ID NO: 1058747 - DNA, 15 bp, Homo sapiens
tggcagatttcttct

SEQ ID NO: 1058748 - DNA, 15 bp, Homo sapiens
ttggcagatttcttc

SEQ ID NO: 1058749 - DNA, 15 bp, Homo sapiens
gttggcagatttctt

SEQ ID NO: 1058750 - DNA, 15 bp, Homo sapiens
ggttggcagatttct

SEQ ID NO: 1058751 - DNA, 15 bp, Homo sapiens
aggttggcagatttc

SEQ ID NO: 1058752 - DNA, 15 bp, Homo sapiens
gaggttggcagattt

SEQ ID NO: 1058753 - DNA, 15 bp, Homo sapiens
agaggttggcagatt

SEQ ID NO: 1058754 - DNA, 15 bp, Homo sapiens
cagaggttggcagat

SEQ ID NO: 1058755 - DNA, 15 bp, Homo sapiens
gcagaggttggcaga

SEQ ID NO: 1058756 - DNA, 15 bp, Homo sapiens
agcagaggttggcag

SEQ ID NO: 1058757 - DNA, 15 bp, Homo sapiens
gagcagaggttggca

SEQ ID NO: 1058758 - DNA, 15 bp, Homo sapiens
agagcagaggttggc

SEQ ID NO: 1058759 - DNA, 15 bp, Homo sapiens
tagagcagaggttgg

SEQ ID NO: 1058760 - DNA, 15 bp, Homo sapiens
ctagagcagaggttg

SEQ ID NO: 1058761 - DNA, 15 bp, Homo sapiens
actagagcagaggtt

SEQ ID NO: 1058762 - DNA, 15 bp, Homo sapiens
aactagagcagaggt

SEQ ID NO: 1058763 - DNA, 15 bp, Homo sapiens
gaactagagcagagg

SEQ ID NO: 1058764 - DNA, 15 bp, Homo sapiens
tgaactagagcagag

SEQ ID NO: 1058765 - DNA, 15 bp, Homo sapiens
ttgaactagagcaga

SEQ ID NO: 1058766 - DNA, 15 bp, Homo sapiens
cttgaactagagcag

SEQ ID NO: 1058767 - DNA, 15 bp, Homo sapiens
tcttgaactagagca

SEQ ID NO: 1058768 - DNA, 15 bp, Homo sapiens
ttcttgaactagagc

SEQ ID NO: 1058769 - DNA, 15 bp, Homo sapiens
tttcttgaactagag

SEQ ID NO: 1058770 - DNA, 15 bp, Homo sapiens
ttttcttgaactaga

SEQ ID NO: 1058771 - DNA, 15 bp, Homo sapiens
tttttcttgaactag

SEQ ID NO: 1058772 - DNA, 15 bp, Homo sapiens
ttttttcttgaacta

SEQ ID NO: 1058773 - DNA, 15 bp, Homo sapiens
tttttttcttgaact

SEQ ID NO: 1058774 - DNA, 15 bp, Homo sapiens
ttttttttcttgaac

SEQ ID NO: 1058775 - DNA, 15 bp, Homo sapiens
attttttttcttgaa

SEQ ID NO: 1058776 - DNA, 15 bp, Homo sapiens
gattttttttcttga

SEQ ID NO: 1058777 - DNA, 15 bp, Homo sapiens
tgattttttttcttg

SEQ ID NO: 1058778 - DNA, 15 bp, Homo sapiens
ttgattttttttctt

SEQ ID NO: 1058779 - DNA, 15 bp, Homo sapiens
tttgattttttttct

SEQ ID NO: 1058780 - DNA, 15 bp, Homo sapiens
ttttgattttttttc

SEQ ID NO: 1058781 - DNA, 15 bp, Homo sapiens
attttgatttttttt

SEQ ID NO: 1058782 - DNA, 15 bp, Homo sapiens
gattttgattttttt

SEQ ID NO: 1058783 - DNA, 15 bp, Homo sapiens
agattttgatttttt

SEQ ID NO: 1058784 - DNA, 15 bp, Homo sapiens
tagattttgattttt

SEQ ID NO: 1058785 - DNA, 15 bp, Homo sapiens
ctagattttgatttt

SEQ ID NO: 1058786 - DNA, 15 bp, Homo sapiens
tctagattttgattt

SEQ ID NO: 1058787 - DNA, 15 bp, Homo sapiens
gtctagattttgatt

SEQ ID NO: 1058788 - DNA, 15 bp, Homo sapiens
tgtctagattttgat

SEQ ID NO: 1058789 - DNA, 15 bp, Homo sapiens
atgtctagattttga

SEQ ID NO: 1058790 - DNA, 15 bp, Homo sapiens
catgtctagattttg

SEQ ID NO: 1058791 - DNA, 15 bp, Homo sapiens
acatgtctagatttt

SEQ ID NO: 1058792 - DNA, 15 bp, Homo sapiens
gacatgtctagattt

SEQ ID NO: 1058793 - DNA, 15 bp, Homo sapiens
tgacatgtctagatt

SEQ ID NO: 1058794 - DNA, 15 bp, Homo sapiens
ttgacatgtctagat

SEQ ID NO: 1058795 - DNA, 15 bp, Homo sapiens
cttgacatgtctaga

SEQ ID NO: 1058796 - DNA, 15 bp, Homo sapiens
acttgacatgtctag

SEQ ID NO: 1058797 - DNA, 15 bp, Homo sapiens
gacttgacatgtcta

SEQ ID NO: 1058798 - DNA, 15 bp, Homo sapiens
tgacttgacatgtct

SEQ ID NO: 1058799 - DNA, 15 bp, Homo sapiens
gtgacttgacatgtc

SEQ ID NO: 1058800 - DNA, 15 bp, Homo sapiens
agtgacttgacatgt

SEQ ID NO: 1058801 - DNA, 15 bp, Homo sapiens
gagtgacttgacatg

SEQ ID NO: 1058802 - DNA, 15 bp, Homo sapiens
tgagtgacttgacat

SEQ ID NO: 1058803 - DNA, 15 bp, Homo sapiens
gtgagtgacttgaca

SEQ ID NO: 1058804 - DNA, 15 bp, Homo sapiens
ggtgagtgacttgac

SEQ ID NO: 1058805 - DNA, 15 bp, Homo sapiens
tggtgagtgacttga

SEQ ID NO: 1058806 - DNA, 15 bp, Homo sapiens
ttggtgagtgacttg

SEQ ID NO: 1058807 - DNA, 15 bp, Homo sapiens
gttggtgagtgactt

SEQ ID NO: 1058808 - DNA, 15 bp, Homo sapiens
agttggtgagtgact

SEQ ID NO: 1058809 - DNA, 15 bp, Homo sapiens
cagttggtgagtgac

SEQ ID NO: 1058810 - DNA, 15 bp, Homo sapiens
acagttggtgagtga

SEQ ID NO: 1058811 - DNA, 15 bp, Homo sapiens
gacagttggtgagtg

SEQ ID NO: 1058812 - DNA, 15 bp, Homo sapiens
tgacagttggtgagt

SEQ ID NO: 1058813 - DNA, 15 bp, Homo sapiens
gtgacagttggtgag

SEQ ID NO: 1058814 - DNA, 15 bp, Homo sapiens
tgtgacagttggtga

SEQ ID NO: 1058815 - DNA, 15 bp, Homo sapiens
atgtgacagttggtg

SEQ ID NO: 1058816 - DNA, 15 bp, Homo sapiens
catgtgacagttggt

SEQ ID NO: 1058817 - DNA, 15 bp, Homo sapiens
ccatgtgacagttgg

SEQ ID NO: 1058818 - DNA, 15 bp, Homo sapiens
accatgtgacagttg

SEQ ID NO: 1058819 - DNA, 15 bp, Homo sapiens
caccatgtgacagtt

SEQ ID NO: 1058820 - DNA, 15 bp, Homo sapiens
tcaccatgtgacagt

SEQ ID NO: 1058821 - DNA, 15 bp, Homo sapiens
ctcaccatgtgacag

SEQ ID NO: 1058822 - DNA, 15 bp, Homo sapiens
actcaccatgtgaca

SEQ ID NO: 1058823 - DNA, 15 bp, Homo sapiens
aactcaccatgtgac

SEQ ID NO: 1058824 - DNA, 15 bp, Homo sapiens
taactcaccatgtga

SEQ ID NO: 1058825 - DNA, 15 bp, Homo sapiens
ttaactcaccatgtg

SEQ ID NO: 1058826 - DNA, 15 bp, Homo sapiens
attaactcaccatgt

SEQ ID NO: 1058827 - DNA, 15 bp, Homo sapiens
tattaactcaccatg

SEQ ID NO: 1058828 - DNA, 15 bp, Homo sapiens
ttattaactcaccat

SEQ ID NO: 1058829 - DNA, 15 bp, Homo sapiens
gttattaactcacca

SEQ ID NO: 1058830 - DNA, 15 bp, Homo sapiens
tgttattaactcacc

SEQ ID NO: 1058831 - DNA, 15 bp, Homo sapiens
ttgttattaactcac

SEQ ID NO: 1058832 - DNA, 15 bp, Homo sapiens
gttgttattaactca

SEQ ID NO: 1058833 - DNA, 15 bp, Homo sapiens
agttgttattaactc

SEQ ID NO: 1058834 - DNA, 15 bp, Homo sapiens
cagttgttattaact

SEQ ID NO: 1058835 - DNA, 15 bp, Homo sapiens
ccagttgttattaac

SEQ ID NO: 1058836 - DNA, 15 bp, Homo sapiens
tccagttgttattaa

SEQ ID NO: 1058837 - DNA, 15 bp, Homo sapiens
ttccagttgttatta

SEQ ID NO: 1058838 - DNA, 15 bp, Homo sapiens
attccagttgttatt

SEQ ID NO: 1058839 - DNA, 15 bp, Homo sapiens
tattccagttgttat

SEQ ID NO: 1058840 - DNA, 15 bp, Homo sapiens
ctattccagttgtta

SEQ ID NO: 1058841 - DNA, 15 bp, Homo sapiens
tctattccagttgtt

SEQ ID NO: 1058842 - DNA, 15 bp, Homo sapiens
gtctattccagttgt

SEQ ID NO: 1058843 - DNA, 15 bp, Homo sapiens
ggtctattccagttg

SEQ ID NO: 1058844 - DNA, 15 bp, Homo sapiens
gggtctattccagtt

SEQ ID NO: 1058845 - DNA, 15 bp, Homo sapiens
cgggtctattccagt

SEQ ID NO: 1058846 - DNA, 15 bp, Homo sapiens
ccgggtctattccag

SEQ ID NO: 1058847 - DNA, 15 bp, Homo sapiens
cccgggtctattcca

SEQ ID NO: 1058848 - DNA, 15 bp, Homo sapiens
acccgggtctattcc

SEQ ID NO: 1058849 - DNA, 15 bp, Homo sapiens
aacccgggtctattc

SEQ ID NO: 1058850 - DNA, 15 bp, Homo sapiens
aaacccgggtctatt

SEQ ID NO: 1058851 - DNA, 15 bp, Homo sapiens
taaacccgggtctat

SEQ ID NO: 1058852 - DNA, 15 bp, Homo sapiens
gtaaacccgggtcta

SEQ ID NO: 1058853 - DNA, 15 bp, Homo sapiens
agtaaacccgggtct

SEQ ID NO: 1058854 - DNA, 15 bp, Homo sapiens
cagtaaacccgggtc

SEQ ID NO: 1058855 - DNA, 15 bp, Homo sapiens
tcagtaaacccgggt

SEQ ID NO: 1058856 - DNA, 15 bp, Homo sapiens
atcagtaaacccggg

SEQ ID NO: 1058857 - DNA, 15 bp, Homo sapiens
aatcagtaaacccgg

SEQ ID NO: 1058858 - DNA, 15 bp, Homo sapiens
gaatcagtaaacccg

SEQ ID NO: 1058859 - DNA, 15 bp, Homo sapiens
agaatcagtaaaccc

SEQ ID NO: 1058860 - DNA, 15 bp, Homo sapiens
gagaatcagtaaacc

SEQ ID NO: 1058861 - DNA, 15 bp, Homo sapiens
tgagaatcagtaaac

SEQ ID NO: 1058862 - DNA, 15 bp, Homo sapiens
ttgagaatcagtaaa

SEQ ID NO: 1058863 - DNA, 15 bp, Homo sapiens
attgagaatcagtaa

SEQ ID NO: 1058864 - DNA, 15 bp, Homo sapiens
cattgagaatcagta

SEQ ID NO: 1058865 - DNA, 15 bp, Homo sapiens
gcattgagaatcagt

SEQ ID NO: 1058866 - DNA, 15 bp, Homo sapiens
agcattgagaatcag

SEQ ID NO: 1058867 - DNA, 15 bp, Homo sapiens
cagcattgagaatca

SEQ ID NO: 1058868 - DNA, 15 bp, Homo sapiens
acagcattgagaatc

SEQ ID NO: 1058869 - DNA, 15 bp, Homo sapiens
cacagcattgagaat

SEQ ID NO: 1058870 - DNA, 15 bp, Homo sapiens
acacagcattgagaa

SEQ ID NO: 1058871 - DNA, 15 bp, Homo sapiens
aacacagcattgaga

SEQ ID NO: 1058872 - DNA, 15 bp, Homo sapiens
gaacacagcattgag

SEQ ID NO: 1058873 - DNA, 15 bp, Homo sapiens
ggaacacagcattga

SEQ ID NO: 1058874 - DNA, 15 bp, Homo sapiens
aggaacacagcattg

SEQ ID NO: 1058875 - DNA, 15 bp, Homo sapiens
taggaacacagcatt

SEQ ID NO: 1058876 - DNA, 15 bp, Homo sapiens
ataggaacacagcat

SEQ ID NO: 1058877 - DNA, 15 bp, Homo sapiens
gataggaacacagca

SEQ ID NO: 1058878 - DNA, 15 bp, Homo sapiens
tgataggaacacagc

SEQ ID NO: 1058879 - DNA, 15 bp, Homo sapiens
atgataggaacacag

SEQ ID NO: 1058880 - DNA, 15 bp, Homo sapiens
catgataggaacaca

SEQ ID NO: 1058881 - DNA, 15 bp, Homo sapiens
tcatgataggaacac

SEQ ID NO: 1058882 - DNA, 15 bp, Homo sapiens
atcatgataggaaca

SEQ ID NO: 1058883 - DNA, 15 bp, Homo sapiens
aatcatgataggaac

SEQ ID NO: 1058884 - DNA, 15 bp, Homo sapiens
taatcatgataggaa

SEQ ID NO: 1058885 - DNA, 15 bp, Homo sapiens
ataatcatgatagga

SEQ ID NO: 1058886 - DNA, 15 bp, Homo sapiens
cataatcatgatagg

SEQ ID NO: 1058887 - DNA, 15 bp, Homo sapiens
ccataatcatgatag

SEQ ID NO: 1058888 - DNA, 15 bp, Homo sapiens
gccataatcatgata

SEQ ID NO: 1058889 - DNA, 15 bp, Homo sapiens
tgccataatcatgat

SEQ ID NO: 1058890 - DNA, 15 bp, Homo sapiens
gtgccataatcatga

SEQ ID NO: 1058891 - DNA, 15 bp, Homo sapiens
tgtgccataatcatg

SEQ ID NO: 1058892 - DNA, 15 bp, Homo sapiens
ctgtgccataatcat

SEQ ID NO: 1058893 - DNA, 15 bp, Homo sapiens
tctgtgccataatca

SEQ ID NO: 1058894 - DNA, 15 bp, Homo sapiens
gtctgtgccataatc

SEQ ID NO: 1058895 - DNA, 15 bp, Homo sapiens
ggtctgtgccataat

SEQ ID NO: 1058896 - DNA, 15 bp, Homo sapiens
tggtctgtgccataa

SEQ ID NO: 1058897 - DNA, 15 bp, Homo sapiens
gtggtctgtgccata

SEQ ID NO: 1058898 - DNA, 15 bp, Homo sapiens
tgtggtctgtgccat

SEQ ID NO: 1058899 - DNA, 15 bp, Homo sapiens
ctgtggtctgtgcca

SEQ ID NO: 1058900 - DNA, 15 bp, Homo sapiens
gctgtggtctgtgcc

SEQ ID NO: 1058901 - DNA, 15 bp, Homo sapiens
cgctgtggtctgtgc

SEQ ID NO: 1058902 - DNA, 15 bp, Homo sapiens
gcgctgtggtctgtg

SEQ ID NO: 1058903 - DNA, 15 bp, Homo sapiens
agcgctgtggtctgt

SEQ ID NO: 1058904 - DNA, 15 bp, Homo sapiens
aagcgctgtggtctg

SEQ ID NO: 1058905 - DNA, 15 bp, Homo sapiens
gaagcgctgtggtct

SEQ ID NO: 1058906 - DNA, 15 bp, Homo sapiens
tgaagcgctgtggtc

SEQ ID NO: 1058907 - DNA, 15 bp, Homo sapiens
ctgaagcgctgtggt

SEQ ID NO: 1058908 - DNA, 15 bp, Homo sapiens
tctgaagcgctgtgg

SEQ ID NO: 1058909 - DNA, 15 bp, Homo sapiens
ttctgaagcgctgtg

SEQ ID NO: 1058910 - DNA, 15 bp, Homo sapiens
gttctgaagcgctgt

SEQ ID NO: 1058911 - DNA, 15 bp, Homo sapiens
agttctgaagcgctg

SEQ ID NO: 1058912 - DNA, 15 bp, Homo sapiens
tagttctgaagcgct

SEQ ID NO: 1058913 - DNA, 15 bp, Homo sapiens
atagttctgaagcgc

SEQ ID NO: 1058914 - DNA, 15 bp, Homo sapiens
catagttctgaagcg

SEQ ID NO: 1058915 - DNA, 15 bp, Homo sapiens
tcatagttctgaagc

SEQ ID NO: 1058916 - DNA, 15 bp, Homo sapiens
ttcatagttctgaag

SEQ ID NO: 1058917 - DNA, 15 bp, Homo sapiens
attcatagttctgaa

SEQ ID NO: 1058918 - DNA, 15 bp, Homo sapiens
tattcatagttctga

SEQ ID NO: 1058919 - DNA, 15 bp, Homo sapiens
atattcatagttctg

SEQ ID NO: 1058920 - DNA, 15 bp, Homo sapiens
catattcatagttct

SEQ ID NO: 1058921 - DNA, 15 bp, Homo sapiens
ccatattcatagttc

SEQ ID NO: 1058922 - DNA, 15 bp, Homo sapiens
gccatattcatagtt

SEQ ID NO: 1058923 - DNA, 15 bp, Homo sapiens
tgccatattcatagt

SEQ ID NO: 1058924 - DNA, 15 bp, Homo sapiens
ctgccatattcatag

SEQ ID NO: 1058925 - DNA, 15 bp, Homo sapiens
gctgccatattcata

SEQ ID NO: 1058926 - DNA, 15 bp, Homo sapiens
agctgccatattcat

SEQ ID NO: 1058927 - DNA, 15 bp, Homo sapiens
aagctgccatattca

SEQ ID NO: 1058928 - DNA, 15 bp, Homo sapiens
taagctgccatattc

SEQ ID NO: 1058929 - DNA, 15 bp, Homo sapiens
ctaagctgccatatt

SEQ ID NO: 1058930 - DNA, 15 bp, Homo sapiens
cctaagctgccatat

SEQ ID NO: 1058931 - DNA, 15 bp, Homo sapiens
ccctaagctgccata

SEQ ID NO: 1058932 - DNA, 15 bp, Homo sapiens
cccctaagctgccat

SEQ ID NO: 1058933 - DNA, 15 bp, Homo sapiens
ccccctaagctgcca

SEQ ID NO: 1058934 - DNA, 15 bp, Homo sapiens
gccccctaagctgcc

SEQ ID NO: 1058935 - DNA, 15 bp, Homo sapiens
cgccccctaagctgc

SEQ ID NO: 1058936 - DNA, 15 bp, Homo sapiens
acgccccctaagctg

SEQ ID NO: 1058937 - DNA, 15 bp, Homo sapiens
cacgccccctaagct

SEQ ID NO: 1058938 - DNA, 15 bp, Homo sapiens
ccacgccccctaagc

SEQ ID NO: 1058939 - DNA, 15 bp, Homo sapiens
accacgccccctaag

SEQ ID NO: 1058940 - DNA, 15 bp, Homo sapiens
caccacgccccctaa

SEQ ID NO: 1058941 - DNA, 15 bp, Homo sapiens
acaccacgcccccta

SEQ ID NO: 1058942 - DNA, 15 bp, Homo sapiens
aacaccacgccccct

SEQ ID NO: 1058943 - DNA, 15 bp, Homo sapiens
aaacaccacgccccc

SEQ ID NO: 1058944 - DNA, 15 bp, Homo sapiens
caaacaccacgcccc

SEQ ID NO: 1058945 - DNA, 15 bp, Homo sapiens
acaaacaccacgccc

SEQ ID NO: 1058946 - DNA, 15 bp, Homo sapiens
aacaaacaccacgcc

SEQ ID NO: 1058947 - DNA, 15 bp, Homo sapiens
aaacaaacaccacgc

SEQ ID NO: 1058948 - DNA, 15 bp, Homo sapiens
gaaacaaacaccacg

SEQ ID NO: 1058949 - DNA, 15 bp, Homo sapiens
ggaaacaaacaccac

SEQ ID NO: 1058950 - DNA, 15 bp, Homo sapiens
gggaaacaaacacca

SEQ ID NO: 1058951 - DNA, 15 bp, Homo sapiens
ggggaaacaaacacc

SEQ ID NO: 1058952 - DNA, 15 bp, Homo sapiens
tggggaaacaaacac

SEQ ID NO: 1058953 - DNA, 15 bp, Homo sapiens
ctggggaaacaaaca

SEQ ID NO: 1058954 - DNA, 15 bp, Homo sapiens
tctggggaaacaaac

SEQ ID NO: 1058955 - DNA, 15 bp, Homo sapiens
ctctggggaaacaaa

SEQ ID NO: 1058956 - DNA, 15 bp, Homo sapiens
tctctggggaaacaa

SEQ ID NO: 1058957 - DNA, 15 bp, Homo sapiens
ctctctggggaaaca

SEQ ID NO: 1058958 - DNA, 15 bp, Homo sapiens
gctctctggggaaac

SEQ ID NO: 1058959 - DNA, 15 bp, Homo sapiens
tgctctctggggaaa

SEQ ID NO: 1058960 - DNA, 15 bp, Homo sapiens
atgctctctggggaa

SEQ ID NO: 1058961 - DNA, 15 bp, Homo sapiens
aatgctctctgggga

SEQ ID NO: 1058962 - DNA, 15 bp, Homo sapiens
aaatgctctctgggg

SEQ ID NO: 1058963 - DNA, 15 bp, Homo sapiens
gaaatgctctctggg

SEQ ID NO: 1058964 - DNA, 15 bp, Homo sapiens
tgaaatgctctctgg

SEQ ID NO: 1058965 - DNA, 15 bp, Homo sapiens
atgaaatgctctctg

SEQ ID NO: 1058966 - DNA, 15 bp, Homo sapiens
aatgaaatgctctct

SEQ ID NO: 1058967 - DNA, 15 bp, Homo sapiens
gaatgaaatgctctc

SEQ ID NO: 1058968 - DNA, 15 bp, Homo sapiens
ggaatgaaatgctct

SEQ ID NO: 1058969 - DNA, 15 bp, Homo sapiens
tggaatgaaatgctc

SEQ ID NO: 1058970 - DNA, 15 bp, Homo sapiens
ttggaatgaaatgct

SEQ ID NO: 1058971 - DNA, 15 bp, Homo sapiens
tttggaatgaaatgc

SEQ ID NO: 1058972 - DNA, 15 bp, Homo sapiens
ctttggaatgaaatg

SEQ ID NO: 1058973 - DNA, 15 bp, Homo sapiens
actttggaatgaaat

SEQ ID NO: 1058974 - DNA, 15 bp, Homo sapiens
tactttggaatgaaa

SEQ ID NO: 1058975 - DNA, 15 bp, Homo sapiens
atactttggaatgaa

SEQ ID NO: 1058976 - DNA, 15 bp, Homo sapiens
aatactttggaatga

SEQ ID NO: 1058977 - DNA, 15 bp, Homo sapiens
gaatactttggaatg

SEQ ID NO: 1058978 - DNA, 15 bp, Homo sapiens
agaatactttggaat

SEQ ID NO: 1058979 - DNA, 15 bp, Homo sapiens
cagaatactttggaa

SEQ ID NO: 1058980 - DNA, 15 bp, Homo sapiens
acagaatactttgga

SEQ ID NO: 1058981 - DNA, 15 bp, Homo sapiens
gacagaatactttgg

SEQ ID NO: 1058982 - DNA, 15 bp, Homo sapiens
agacagaatactttg

SEQ ID NO: 1058983 - DNA, 15 bp, Homo sapiens
gagacagaatacttt

SEQ ID NO: 1058984 - DNA, 15 bp, Homo sapiens
agagacagaatactt

SEQ ID NO: 1058985 - DNA, 15 bp, Homo sapiens
aagagacagaatact

SEQ ID NO: 1058986 - DNA, 15 bp, Homo sapiens
gaagagacagaatac

SEQ ID NO: 1058987 - DNA, 15 bp, Homo sapiens
tgaagagacagaata

SEQ ID NO: 1058988 - DNA, 15 bp, Homo sapiens
gtgaagagacagaat

SEQ ID NO: 1058989 - DNA, 15 bp, Homo sapiens
agtgaagagacagaa

SEQ ID NO: 1058990 - DNA, 15 bp, Homo sapiens
gagtgaagagacaga

SEQ ID NO: 1058991 - DNA, 15 bp, Homo sapiens
ggagtgaagagacag

SEQ ID NO: 1058992 - DNA, 15 bp, Homo sapiens
tggagtgaagagaca

SEQ ID NO: 1058993 - DNA, 15 bp, Homo sapiens
atggagtgaagagac

SEQ ID NO: 1058994 - DNA, 15 bp, Homo sapiens
tatggagtgaagaga

SEQ ID NO: 1058995 - DNA, 15 bp, Homo sapiens
ttatggagtgaagag

SEQ ID NO: 1058996 - DNA, 15 bp, Homo sapiens
tttatggagtgaaga

SEQ ID NO: 1058997 - DNA, 15 bp, Homo sapiens
ctttatggagtgaag

SEQ ID NO: 1058998 - DNA, 15 bp, Homo sapiens
gctttatggagtgaa

SEQ ID NO: 1058999 - DNA, 15 bp, Homo sapiens
agctttatggagtga

SEQ ID NO: 1059000 - DNA, 15 bp, Homo sapiens
tagctttatggagtg

SEQ ID NO: 1059001 - DNA, 15 bp, Homo sapiens
atagctttatggagt

SEQ ID NO: 1059002 - DNA, 15 bp, Homo sapiens
aatagctttatggag

SEQ ID NO: 1059003 - DNA, 15 bp, Homo sapiens
taatagctttatgga

SEQ ID NO: 1059004 - DNA, 15 bp, Homo sapiens
gtaatagctttatgg

SEQ ID NO: 1059005 - DNA, 15 bp, Homo sapiens
tgtaatagctttatg

SEQ ID NO: 1059006 - DNA, 15 bp, Homo sapiens
ctgtaatagctttat

SEQ ID NO: 1059007 - DNA, 15 bp, Homo sapiens
cctgtaatagcttta

SEQ ID NO: 1059008 - DNA, 15 bp, Homo sapiens
gcctgtaatagcttt

SEQ ID NO: 1059009 - DNA, 15 bp, Homo sapiens
ggcctgtaatagctt

SEQ ID NO: 1059010 - DNA, 15 bp, Homo sapiens
aggcctgtaatagct

SEQ ID NO: 1059011 - DNA, 15 bp, Homo sapiens
caggcctgtaatagc

SEQ ID NO: 1059012 - DNA, 15 bp, Homo sapiens
acaggcctgtaatag

SEQ ID NO: 1059013 - DNA, 15 bp, Homo sapiens
tacaggcctgtaata

SEQ ID NO: 1059014 - DNA, 15 bp, Homo sapiens
atacaggcctgtaat

SEQ ID NO: 1059015 - DNA, 15 bp, Homo sapiens
catacaggcctgtaa

SEQ ID NO: 1059016 - DNA, 15 bp, Homo sapiens
tcatacaggcctgta

SEQ ID NO: 1059017 - DNA, 15 bp, Homo sapiens
atcatacaggcctgt

SEQ ID NO: 1059018 - DNA, 15 bp, Homo sapiens
aatcatacaggcctg

SEQ ID NO: 1059019 - DNA, 15 bp, Homo sapiens
caatcatacaggcct

SEQ ID NO: 1059020 - DNA, 15 bp, Homo sapiens
acaatcatacaggcc

SEQ ID NO: 1059021 - DNA, 15 bp, Homo sapiens
gacaatcatacaggc

SEQ ID NO: 1059022 - DNA, 15 bp, Homo sapiens
agacaatcatacagg

SEQ ID NO: 1059023 - DNA, 15 bp, Homo sapiens
gagacaatcatacag

SEQ ID NO: 1059024 - DNA, 15 bp, Homo sapiens
ggagacaatcataca

SEQ ID NO: 1059025 - DNA, 15 bp, Homo sapiens
tggagacaatcatac

SEQ ID NO: 1059026 - DNA, 15 bp, Homo sapiens
ttggagacaatcata

SEQ ID NO: 1059027 - DNA, 15 bp, Homo sapiens
gttggagacaatcat

SEQ ID NO: 1059028 - DNA, 15 bp, Homo sapiens
ggttggagacaatca

SEQ ID NO: 1059029 - DNA, 15 bp, Homo sapiens
tggttggagacaatc

SEQ ID NO: 1059030 - DNA, 15 bp, Homo sapiens
ttggttggagacaat

SEQ ID NO: 1059031 - DNA, 15 bp, Homo sapiens
tttggttggagacaa

SEQ ID NO: 1059032 - DNA, 15 bp, Homo sapiens
atttggttggagaca

SEQ ID NO: 1059033 - DNA, 15 bp, Homo sapiens
catttggttggagac

SEQ ID NO: 1059034 - DNA, 15 bp, Homo sapiens
ccatttggttggaga

SEQ ID NO: 1059035 - DNA, 15 bp, Homo sapiens
tccatttggttggag

SEQ ID NO: 1059036 - DNA, 15 bp, Homo sapiens
atccatttggttgga

SEQ ID NO: 1059037 - DNA, 15 bp, Homo sapiens
aatccatttggttgg

SEQ ID NO: 1059038 - DNA, 15 bp, Homo sapiens
gaatccatttggttg

SEQ ID NO: 1059039 - DNA, 15 bp, Homo sapiens
ggaatccatttggtt

SEQ ID NO: 1059040 - DNA, 15 bp, Homo sapiens
tggaatccatttggt

SEQ ID NO: 1059041 - DNA, 15 bp, Homo sapiens
atggaatccatttgg

SEQ ID NO: 1059042 - DNA, 15 bp, Homo sapiens
aatggaatccatttg

SEQ ID NO: 1059043 - DNA, 15 bp, Homo sapiens
gaatggaatccattt

SEQ ID NO: 1059044 - DNA, 15 bp, Homo sapiens
cgaatggaatccatt

SEQ ID NO: 1059045 - DNA, 15 bp, Homo sapiens
gcgaatggaatccat

SEQ ID NO: 1059046 - DNA, 15 bp, Homo sapiens
agcgaatggaatcca

SEQ ID NO: 1059047 - DNA, 15 bp, Homo sapiens
aagcgaatggaatcc

SEQ ID NO: 1059048 - DNA, 15 bp, Homo sapiens
aaagcgaatggaatc

SEQ ID NO: 1059049 - DNA, 15 bp, Homo sapiens
aaaagcgaatggaat

SEQ ID NO: 1059050 - DNA, 15 bp, Homo sapiens
gaaaagcgaatggaa

SEQ ID NO: 1059051 - DNA, 15 bp, Homo sapiens
ggaaaagcgaatgga

SEQ ID NO: 1059052 - DNA, 15 bp, Homo sapiens
aggaaaagcgaatgg

SEQ ID NO: 1059053 - DNA, 15 bp, Homo sapiens
aaggaaaagcgaatg

SEQ ID NO: 1059054 - DNA, 15 bp, Homo sapiens
aaaggaaaagcgaat

SEQ ID NO: 1059055 - DNA, 15 bp, Homo sapiens
gaaaggaaaagcgaa

SEQ ID NO: 1059056 - DNA, 15 bp, Homo sapiens
agaaaggaaaagcga

SEQ ID NO: 1059057 - DNA, 15 bp, Homo sapiens
aagaaaggaaaagcg

SEQ ID NO: 1059058 - DNA, 15 bp, Homo sapiens
gaagaaaggaaaagc

SEQ ID NO: 1059059 - DNA, 15 bp, Homo sapiens
ggaagaaaggaaaag

SEQ ID NO: 1059060 - DNA, 15 bp, Homo sapiens
aggaagaaaggaaaa

SEQ ID NO: 1059061 - DNA, 15 bp, Homo sapiens
taggaagaaaggaaa

SEQ ID NO: 1059062 - DNA, 15 bp, Homo sapiens
ctaggaagaaaggaa

SEQ ID NO: 1059063 - DNA, 15 bp, Homo sapiens
cctaggaagaaagga

SEQ ID NO: 1059064 - DNA, 15 bp, Homo sapiens
tcctaggaagaaagg

SEQ ID NO: 1059065 - DNA, 15 bp, Homo sapiens
ctcctaggaagaaag

SEQ ID NO: 1059066 - DNA, 15 bp, Homo sapiens
actcctaggaagaaa

SEQ ID NO: 1059067 - DNA, 15 bp, Homo sapiens
gactcctaggaagaa

SEQ ID NO: 1059068 - DNA, 15 bp, Homo sapiens
ggactcctaggaaga

SEQ ID NO: 1059069 - DNA, 15 bp, Homo sapiens
aggactcctaggaag

SEQ ID NO: 1059070 - DNA, 15 bp, Homo sapiens
gaggactcctaggaa

SEQ ID NO: 1059071 - DNA, 15 bp, Homo sapiens
agaggactcctagga

SEQ ID NO: 1059072 - DNA, 15 bp, Homo sapiens
cagaggactcctagg

SEQ ID NO: 1059073 - DNA, 15 bp, Homo sapiens
acagaggactcctag

SEQ ID NO: 1059074 - DNA, 15 bp, Homo sapiens
gacagaggactccta

SEQ ID NO: 1059075 - DNA, 15 bp, Homo sapiens
ggacagaggactcct

SEQ ID NO: 1059076 - DNA, 15 bp, Homo sapiens
gggacagaggactcc

SEQ ID NO: 1059077 - DNA, 15 bp, Homo sapiens
agggacagaggactc

SEQ ID NO: 1059078 - DNA, 15 bp, Homo sapiens
gagggacagaggact

SEQ ID NO: 1059079 - DNA, 15 bp, Homo sapiens
agagggacagaggac

SEQ ID NO: 1059080 - DNA, 15 bp, Homo sapiens
aagagggacagagga

SEQ ID NO: 1059081 - DNA, 15 bp, Homo sapiens
gaagagggacagagg

SEQ ID NO: 1059082 - DNA, 15 bp, Homo sapiens
ggaagagggacagag

SEQ ID NO: 1059083 - DNA, 15 bp, Homo sapiens
gggaagagggacaga

SEQ ID NO: 1059084 - DNA, 15 bp, Homo sapiens
ggggaagagggacag

SEQ ID NO: 1059085 - DNA, 15 bp, Homo sapiens
aggggaagagggaca

SEQ ID NO: 1059086 - DNA, 15 bp, Homo sapiens
gaggggaagagggac

SEQ ID NO: 1059087 - DNA, 15 bp, Homo sapiens
agaggggaagaggga

SEQ ID NO: 1059088 - DNA, 15 bp, Homo sapiens
gagaggggaagaggg

SEQ ID NO: 1059089 - DNA, 15 bp, Homo sapiens
ggagaggggaagagg

SEQ ID NO: 1059090 - DNA, 15 bp, Homo sapiens
gggagaggggaagag

SEQ ID NO: 1059091 - DNA, 15 bp, Homo sapiens
ggggagaggggaaga

SEQ ID NO: 1059092 - DNA, 15 bp, Homo sapiens
tggggagaggggaag

SEQ ID NO: 1059093 - DNA, 15 bp, Homo sapiens
atggggagaggggaa

SEQ ID NO: 1059094 - DNA, 15 bp, Homo sapiens
gatggggagagggga

SEQ ID NO: 1059095 - DNA, 15 bp, Homo sapiens
agatggggagagggg

SEQ ID NO: 1059096 - DNA, 15 bp, Homo sapiens
gagatggggagaggg

SEQ ID NO: 1059097 - DNA, 15 bp, Homo sapiens
agagatggggagagg

SEQ ID NO: 1059098 - DNA, 15 bp, Homo sapiens
aagagatggggagag

SEQ ID NO: 1059099 - DNA, 15 bp, Homo sapiens
aaagagatggggaga

SEQ ID NO: 1059100 - DNA, 15 bp, Homo sapiens
gaaagagatggggag

SEQ ID NO: 1059101 - DNA, 15 bp, Homo sapiens
ggaaagagatgggga

SEQ ID NO: 1059102 - DNA, 15 bp, Homo sapiens
gggaaagagatgggg

SEQ ID NO: 1059103 - DNA, 15 bp, Homo sapiens
agggaaagagatggg

SEQ ID NO: 1059104 - DNA, 15 bp, Homo sapiens
aagggaaagagatgg

SEQ ID NO: 1059105 - DNA, 15 bp, Homo sapiens
aaagggaaagagatg

SEQ ID NO: 1059106 - DNA, 15 bp, Homo sapiens
gaaagggaaagagat

SEQ ID NO: 1059107 - DNA, 15 bp, Homo sapiens
agaaagggaaagaga

SEQ ID NO: 1059108 - DNA, 15 bp, Homo sapiens
tagaaagggaaagag

SEQ ID NO: 1059109 - DNA, 15 bp, Homo sapiens
gtagaaagggaaaga

SEQ ID NO: 1059110 - DNA, 15 bp, Homo sapiens
agtagaaagggaaag

SEQ ID NO: 1059111 - DNA, 15 bp, Homo sapiens
gagtagaaagggaaa

SEQ ID NO: 1059112 - DNA, 15 bp, Homo sapiens
ggagtagaaagggaa

SEQ ID NO: 1059113 - DNA, 15 bp, Homo sapiens
gggagtagaaaggga

SEQ ID NO: 1059114 - DNA, 15 bp, Homo sapiens
agggagtagaaaggg

SEQ ID NO: 1059115 - DNA, 15 bp, Homo sapiens
gagggagtagaaagg

SEQ ID NO: 1059116 - DNA, 15 bp, Homo sapiens
ggagggagtagaaag

SEQ ID NO: 1059117 - DNA, 15 bp, Homo sapiens
aggagggagtagaaa

SEQ ID NO: 1059118 - DNA, 15 bp, Homo sapiens
gaggagggagtagaa

SEQ ID NO: 1059119 - DNA, 15 bp, Homo sapiens
tgaggagggagtaga

SEQ ID NO: 1059120 - DNA, 15 bp, Homo sapiens
atgaggagggagtag

SEQ ID NO: 1059121 - DNA, 15 bp, Homo sapiens
catgaggagggagta

SEQ ID NO: 1059122 - DNA, 15 bp, Homo sapiens
acatgaggagggagt

SEQ ID NO: 1059123 - DNA, 15 bp, Homo sapiens
gacatgaggagggag

SEQ ID NO: 1059124 - DNA, 15 bp, Homo sapiens
tgacatgaggaggga

SEQ ID NO: 1059125 - DNA, 15 bp, Homo sapiens
atgacatgaggaggg

SEQ ID NO: 1059126 - DNA, 15 bp, Homo sapiens
gatgacatgaggagg

SEQ ID NO: 1059127 - DNA, 15 bp, Homo sapiens
agatgacatgaggag

SEQ ID NO: 1059128 - DNA, 15 bp, Homo sapiens
gagatgacatgagga

SEQ ID NO: 1059129 - DNA, 15 bp, Homo sapiens
ggagatgacatgagg

SEQ ID NO: 1059130 - DNA, 15 bp, Homo sapiens
aggagatgacatgag

SEQ ID NO: 1059131 - DNA, 15 bp, Homo sapiens
taggagatgacatga

SEQ ID NO: 1059132 - DNA, 15 bp, Homo sapiens
gtaggagatgacatg

SEQ ID NO: 1059133 - DNA, 15 bp, Homo sapiens
agtaggagatgacat

SEQ ID NO: 1059134 - DNA, 15 bp, Homo sapiens
gagtaggagatgaca

SEQ ID NO: 1059135 - DNA, 15 bp, Homo sapiens
agagtaggagatgac

SEQ ID NO: 1059136 - DNA, 15 bp, Homo sapiens
aagagtaggagatga

SEQ ID NO: 1059137 - DNA, 15 bp, Homo sapiens
caagagtaggagatg

SEQ ID NO: 1059138 - DNA, 15 bp, Homo sapiens
tcaagagtaggagat

SEQ ID NO: 1059139 - DNA, 15 bp, Homo sapiens
atcaagagtaggaga

SEQ ID NO: 1059140 - DNA, 15 bp, Homo sapiens
gatcaagagtaggag

SEQ ID NO: 1059141 - DNA, 15 bp, Homo sapiens
agatcaagagtagga

SEQ ID NO: 1059142 - DNA, 15 bp, Homo sapiens
gagatcaagagtagg

SEQ ID NO: 1059143 - DNA, 15 bp, Homo sapiens
tgagatcaagagtag

SEQ ID NO: 1059144 - DNA, 15 bp, Homo sapiens
ctgagatcaagagta

SEQ ID NO: 1059145 - DNA, 15 bp, Homo sapiens
tctgagatcaagagt

SEQ ID NO: 1059146 - DNA, 15 bp, Homo sapiens
ttctgagatcaagag

SEQ ID NO: 1059147 - DNA, 15 bp, Homo sapiens
cttctgagatcaaga

SEQ ID NO: 1059148 - DNA, 15 bp, Homo sapiens
tcttctgagatcaag

SEQ ID NO: 1059149 - DNA, 15 bp, Homo sapiens
ttcttctgagatcaa

SEQ ID NO: 1059150 - DNA, 15 bp, Homo sapiens
gttcttctgagatca

SEQ ID NO: 1059151 - DNA, 15 bp, Homo sapiens
tgttcttctgagatc

SEQ ID NO: 1059152 - DNA, 15 bp, Homo sapiens
atgttcttctgagat

SEQ ID NO: 1059153 - DNA, 15 bp, Homo sapiens
aatgttcttctgaga

SEQ ID NO: 1059154 - DNA, 15 bp, Homo sapiens
aaatgttcttctgag

SEQ ID NO: 1059155 - DNA, 15 bp, Homo sapiens
aaaatgttcttctga

SEQ ID NO: 1059156 - DNA, 15 bp, Homo sapiens
caaaatgttcttctg

SEQ ID NO: 1059157 - DNA, 15 bp, Homo sapiens
ccaaaatgttcttct

SEQ ID NO: 1059158 - DNA, 15 bp, Homo sapiens
accaaaatgttcttc

SEQ ID NO: 1059159 - DNA, 15 bp, Homo sapiens
aaccaaaatgttctt

SEQ ID NO: 1059160 - DNA, 15 bp, Homo sapiens
taaccaaaatgttct

SEQ ID NO: 1059161 - DNA, 15 bp, Homo sapiens
ataaccaaaatgttc

SEQ ID NO: 1059162 - DNA, 15 bp, Homo sapiens
tataaccaaaatgtt

SEQ ID NO: 1059163 - DNA, 15 bp, Homo sapiens
taaaatatgtaacat

SEQ ID NO: 1059164 - DNA, 15 bp, Homo sapiens
gtaaaatatgtaaca

SEQ ID NO: 1059165 - DNA, 15 bp, Homo sapiens
agtaaaatatgtaac

SEQ ID NO: 1059166 - DNA, 15 bp, Homo sapiens
tagtaaaatatgtaa

SEQ ID NO: 1059167 - DNA, 15 bp, Homo sapiens
ttagtaaaatatgta

SEQ ID NO: 1059168 - DNA, 15 bp, Homo sapiens
tttagtaaaatatgt

SEQ ID NO: 1059169 - DNA, 15 bp, Homo sapiens
ttttagtaaaatatg

SEQ ID NO: 1059170 - DNA, 15 bp, Homo sapiens
attttagtaaaatat

SEQ ID NO: 1059171 - DNA, 15 bp, Homo sapiens
aattttagtaaaata

SEQ ID NO: 1059172 - DNA, 15 bp, Homo sapiens
aaattttagtaaaat

SEQ ID NO: 1059173 - DNA, 15 bp, Homo sapiens
aaaattttagtaaaa

SEQ ID NO: 1059174 - DNA, 15 bp, Homo sapiens
caaaattttagtaaa

SEQ ID NO: 1059175 - DNA, 15 bp, Homo sapiens
acaaaattttagtaa

SEQ ID NO: 1059176 - DNA, 15 bp, Homo sapiens
tacaaaattttagta

SEQ ID NO: 1059177 - DNA, 15 bp, Homo sapiens
ttacaaaattttagt

SEQ ID NO: 1059178 - DNA, 15 bp, Homo sapiens
tttacaaaattttag

SEQ ID NO: 1059179 - DNA, 15 bp, Homo sapiens
atttacaaaatttta

SEQ ID NO: 1059180 - DNA, 15 bp, Homo sapiens
catttacaaaatttt

SEQ ID NO: 1059181 - DNA, 15 bp, Homo sapiens
gcatttacaaaattt

SEQ ID NO: 1059182 - DNA, 15 bp, Homo sapiens
tgcatttacaaaatt

SEQ ID NO: 1059183 - DNA, 15 bp, Homo sapiens
ttgcatttacaaaat

SEQ ID NO: 1059184 - DNA, 15 bp, Homo sapiens
tttgcatttacaaaa

SEQ ID NO: 1059185 - DNA, 15 bp, Homo sapiens
ttttgcatttacaaa

SEQ ID NO: 1059186 - DNA, 15 bp, Homo sapiens
tttttgcatttacaa

SEQ ID NO: 1059187 - DNA, 15 bp, Homo sapiens
atttttgcatttaca

SEQ ID NO: 1059188 - DNA, 15 bp, Homo sapiens
aatttttgcatttac

SEQ ID NO: 1059189 - DNA, 15 bp, Homo sapiens
taatttttgcattta

SEQ ID NO: 1059190 - DNA, 15 bp, Homo sapiens
ttaatttttgcattt

SEQ ID NO: 1059191 - DNA, 15 bp, Homo sapiens
tttaatttttgcatt

SEQ ID NO: 1059192 - DNA, 15 bp, Homo sapiens
ttttaatttttgcat

SEQ ID NO: 1059193 - DNA, 15 bp, Homo sapiens
attttaatttttgca

SEQ ID NO: 1059194 - DNA, 15 bp, Homo sapiens
tattttaatttttgc

SEQ ID NO: 1059195 - DNA, 15 bp, Homo sapiens
ttattttaatttttg

SEQ ID NO: 1059196 - DNA, 15 bp, Homo sapiens
ttttttattttaatt

SEQ ID NO: 1059197 - DNA, 15 bp, Homo sapiens
tttttttattttaat

SEQ ID NO: 1059198 - DNA, 15 bp, Homo sapiens
atttttttattttaa

SEQ ID NO: 1059199 - DNA, 15 bp, Homo sapiens
gtatttttttatttt

SEQ ID NO: 1059200 - DNA, 15 bp, Homo sapiens
agtatttttttattt

SEQ ID NO: 1059201 - DNA, 15 bp, Homo sapiens
cagtatttttttatt

SEQ ID NO: 1059202 - DNA, 15 bp, Homo sapiens
tcagtatttttttat

SEQ ID NO: 1059203 - DNA, 15 bp, Homo sapiens
atcagtattttttta

SEQ ID NO: 1059204 - DNA, 15 bp, Homo sapiens
catcagtattttttt

SEQ ID NO: 1059205 - DNA, 15 bp, Homo sapiens
gcatcagtatttttt

SEQ ID NO: 1059206 - DNA, 15 bp, Homo sapiens
ggcatcagtattttt

SEQ ID NO: 1059207 - DNA, 15 bp, Homo sapiens
gggcatcagtatttt

SEQ ID NO: 1059208 - DNA, 15 bp, Homo sapiens
tgggcatcagtattt

SEQ ID NO: 1059209 - DNA, 15 bp, Homo sapiens
ttgggcatcagtatt

SEQ ID NO: 1059210 - DNA, 15 bp, Homo sapiens
cttgggcatcagtat

SEQ ID NO: 1059211 - DNA, 15 bp, Homo sapiens
acttgggcatcagta

SEQ ID NO: 1059212 - DNA, 15 bp, Homo sapiens
cacttgggcatcagt

SEQ ID NO: 1059213 - DNA, 15 bp, Homo sapiens
gcacttgggcatcag

SEQ ID NO: 1059214 - DNA, 15 bp, Homo sapiens
ggcacttgggcatca

SEQ ID NO: 1059215 - DNA, 15 bp, Homo sapiens
tggcacttgggcatc

SEQ ID NO: 1059216 - DNA, 15 bp, Homo sapiens
ttggcacttgggcat

SEQ ID NO: 1059217 - DNA, 15 bp, Homo sapiens
tttggcacttgggca

SEQ ID NO: 1059218 - DNA, 15 bp, Homo sapiens
ttttggcacttgggc

SEQ ID NO: 1059219 - DNA, 15 bp, Homo sapiens
tttttggcacttggg

SEQ ID NO: 1059220 - DNA, 15 bp, Homo sapiens
ttttttggcacttgg

SEQ ID NO: 1059221 - DNA, 15 bp, Homo sapiens
attttttggcacttg

SEQ ID NO: 1059222 - DNA, 15 bp, Homo sapiens
cattttttggcactt

SEQ ID NO: 1059223 - DNA, 15 bp, Homo sapiens
tcattttttggcact

SEQ ID NO: 1059224 - DNA, 15 bp, Homo sapiens
atcattttttggcac

SEQ ID NO: 1059225 - DNA, 15 bp, Homo sapiens
catcattttttggca

SEQ ID NO: 1059226 - DNA, 15 bp, Homo sapiens
gcatcattttttggc

SEQ ID NO: 1059227 - DNA, 15 bp, Homo sapiens
tgcatcattttttgg

SEQ ID NO: 1059228 - DNA, 15 bp, Homo sapiens
atgcatcattttttg

SEQ ID NO: 1059229 - DNA, 15 bp, Homo sapiens
aatgcatcatttttt

SEQ ID NO: 1059230 - DNA, 15 bp, Homo sapiens
taatgcatcattttt

SEQ ID NO: 1059231 - DNA, 15 bp, Homo sapiens
ttaatgcatcatttt

SEQ ID NO: 1059232 - DNA, 15 bp, Homo sapiens
attaatgcatcattt

SEQ ID NO: 1059233 - DNA, 15 bp, Homo sapiens
aattaatgcatcatt

SEQ ID NO: 1059234 - DNA, 15 bp, Homo sapiens
gaattaatgcatcat

SEQ ID NO: 1059235 - DNA, 15 bp, Homo sapiens
tgaattaatgcatca

SEQ ID NO: 1059236 - DNA, 15 bp, Homo sapiens
ctgaattaatgcatc

SEQ ID NO: 1059237 - DNA, 15 bp, Homo sapiens
tctgaattaatgcat

SEQ ID NO: 1059238 - DNA, 15 bp, Homo sapiens
ttctgaattaatgca

SEQ ID NO: 1059239 - DNA, 15 bp, Homo sapiens
gttctgaattaatgc

SEQ ID NO: 1059240 - DNA, 15 bp, Homo sapiens
ggttctgaattaatg

SEQ ID NO: 1059241 - DNA, 15 bp, Homo sapiens
aggttctgaattaat

SEQ ID NO: 1059242 - DNA, 15 bp, Homo sapiens
gaggttctgaattaa

SEQ ID NO: 1059243 - DNA, 15 bp, Homo sapiens
ggaggttctgaatta

SEQ ID NO: 1059244 - DNA, 15 bp, Homo sapiens
tggaggttctgaatt

SEQ ID NO: 1059245 - DNA, 15 bp, Homo sapiens
ttggaggttctgaat

SEQ ID NO: 1059246 - DNA, 15 bp, Homo sapiens
cttggaggttctgaa

SEQ ID NO: 1059247 - DNA, 15 bp, Homo sapiens
ccttggaggttctga

SEQ ID NO: 1059248 - DNA, 15 bp, Homo sapiens
cccttggaggttctg

SEQ ID NO: 1059249 - DNA, 15 bp, Homo sapiens
acccttggaggttct

SEQ ID NO: 1059250 - DNA, 15 bp, Homo sapiens
cacccttggaggttc

SEQ ID NO: 1059251 - DNA, 15 bp, Homo sapiens
tcacccttggaggtt

SEQ ID NO: 1059252 - DNA, 15 bp, Homo sapiens
gtcacccttggaggt

SEQ ID NO: 1059253 - DNA, 15 bp, Homo sapiens
agtcacccttggagg

SEQ ID NO: 1059254 - DNA, 15 bp, Homo sapiens
gagtcacccttggag

SEQ ID NO: 1059255 - DNA, 15 bp, Homo sapiens
ggagtcacccttgga

SEQ ID NO: 1059256 - DNA, 15 bp, Homo sapiens
aggagtcacccttgg

SEQ ID NO: 1059257 - DNA, 15 bp, Homo sapiens
caggagtcacccttg

SEQ ID NO: 1059258 - DNA, 15 bp, Homo sapiens
ccaggagtcaccctt

SEQ ID NO: 1059259 - DNA, 15 bp, Homo sapiens
cccaggagtcaccct

SEQ ID NO: 1059260 - DNA, 15 bp, Homo sapiens
gcccaggagtcaccc

SEQ ID NO: 1059261 - DNA, 15 bp, Homo sapiens
tgcccaggagtcacc

SEQ ID NO: 1059262 - DNA, 15 bp, Homo sapiens
atgcccaggagtcac

SEQ ID NO: 1059263 - DNA, 15 bp, Homo sapiens
aatgcccaggagtca

SEQ ID NO: 1059264 - DNA, 15 bp, Homo sapiens
caatgcccaggagtc

SEQ ID NO: 1059265 - DNA, 15 bp, Homo sapiens
ccaatgcccaggagt

SEQ ID NO: 1059266 - DNA, 15 bp, Homo sapiens
tccaatgcccaggag

SEQ ID NO: 1059267 - DNA, 15 bp, Homo sapiens
ttccaatgcccagga

SEQ ID NO: 1059268 - DNA, 15 bp, Homo sapiens
tttccaatgcccagg

SEQ ID NO: 1059269 - DNA, 15 bp, Homo sapiens
atttccaatgcccag

SEQ ID NO: 1059270 - DNA, 15 bp, Homo sapiens
catttccaatgccca

SEQ ID NO: 1059271 - DNA, 15 bp, Homo sapiens
acatttccaatgccc

SEQ ID NO: 1059272 - DNA, 15 bp, Homo sapiens
aacatttccaatgcc

SEQ ID NO: 1059273 - DNA, 15 bp, Homo sapiens
aaacatttccaatgc

SEQ ID NO: 1059274 - DNA, 15 bp, Homo sapiens
aaaacatttccaatg

SEQ ID NO: 1059275 - DNA, 15 bp, Homo sapiens
taaaacatttccaat

SEQ ID NO: 1059276 - DNA, 15 bp, Homo sapiens
ctaaaacatttccaa

SEQ ID NO: 1059277 - DNA, 15 bp, Homo sapiens
tctaaaacatttcca

SEQ ID NO: 1059278 - DNA, 15 bp, Homo sapiens
ctctaaaacatttcc

SEQ ID NO: 1059279 - DNA, 15 bp, Homo sapiens
gctctaaaacatttc

SEQ ID NO: 1059280 - DNA, 15 bp, Homo sapiens
agctctaaaacattt

SEQ ID NO: 1059281 - DNA, 15 bp, Homo sapiens
gagctctaaaacatt

SEQ ID NO: 1059282 - DNA, 15 bp, Homo sapiens
agagctctaaaacat

SEQ ID NO: 1059283 - DNA, 15 bp, Homo sapiens
gagagctctaaaaca

SEQ ID NO: 1059284 - DNA, 15 bp, Homo sapiens
ggagagctctaaaac

SEQ ID NO: 1059285 - DNA, 15 bp, Homo sapiens
cggagagctctaaaa

SEQ ID NO: 1059286 - DNA, 15 bp, Homo sapiens
ccggagagctctaaa

SEQ ID NO: 1059287 - DNA, 15 bp, Homo sapiens
cccggagagctctaa

SEQ ID NO: 1059288 - DNA, 15 bp, Homo sapiens
acccggagagctcta

SEQ ID NO: 1059289 - DNA, 15 bp, Homo sapiens
aacccggagagctct

SEQ ID NO: 1059290 - DNA, 15 bp, Homo sapiens
taacccggagagctc

SEQ ID NO: 1059291 - DNA, 15 bp, Homo sapiens
ataacccggagagct

SEQ ID NO: 1059292 - DNA, 15 bp, Homo sapiens
aataacccggagagc

SEQ ID NO: 1059293 - DNA, 15 bp, Homo sapiens
gaataacccggagag

SEQ ID NO: 1059294 - DNA, 15 bp, Homo sapiens
tgaataacccggaga

SEQ ID NO: 1059295 - DNA, 15 bp, Homo sapiens
atgaataacccggag

SEQ ID NO: 1059296 - DNA, 15 bp, Homo sapiens
tatgaataacccgga

SEQ ID NO: 1059297 - DNA, 15 bp, Homo sapiens
atatgaataacccgg

SEQ ID NO: 1059298 - DNA, 15 bp, Homo sapiens
tatatgaataacccg

SEQ ID NO: 1059299 - DNA, 15 bp, Homo sapiens
ttatatgaataaccc

SEQ ID NO: 1059300 - DNA, 15 bp, Homo sapiens
cttatatgaataacc

SEQ ID NO: 1059301 - DNA, 15 bp, Homo sapiens
gcttatatgaataac

SEQ ID NO: 1059302 - DNA, 15 bp, Homo sapiens
ggcttatatgaataa

SEQ ID NO: 1059303 - DNA, 15 bp, Homo sapiens
tggcttatatgaata

SEQ ID NO: 1059304 - DNA, 15 bp, Homo sapiens
ttggcttatatgaat

SEQ ID NO: 1059305 - DNA, 15 bp, Homo sapiens
cttggcttatatgaa

SEQ ID NO: 1059306 - DNA, 15 bp, Homo sapiens
gcttggcttatatga

SEQ ID NO: 1059307 - DNA, 15 bp, Homo sapiens
agcttggcttatatg

SEQ ID NO: 1059308 - DNA, 15 bp, Homo sapiens
cagcttggcttatat

SEQ ID NO: 1059309 - DNA, 15 bp, Homo sapiens
gcagcttggcttata

SEQ ID NO: 1059310 - DNA, 15 bp, Homo sapiens
tgcagcttggcttat

SEQ ID NO: 1059311 - DNA, 15 bp, Homo sapiens
ctgcagcttggctta

SEQ ID NO: 1059312 - DNA, 15 bp, Homo sapiens
gctgcagcttggctt

SEQ ID NO: 1059313 - DNA, 15 bp, Homo sapiens
ggctgcagcttggct

SEQ ID NO: 1059314 - DNA, 15 bp, Homo sapiens
tggctgcagcttggc

SEQ ID NO: 1059315 - DNA, 15 bp, Homo sapiens
ttggctgcagcttgg

SEQ ID NO: 1059316 - DNA, 15 bp, Homo sapiens
cttggctgcagcttg

SEQ ID NO: 1059317 - DNA, 15 bp, Homo sapiens
gcttggctgcagctt

SEQ ID NO: 1059318 - DNA, 15 bp, Homo sapiens
agcttggctgcagct

SEQ ID NO: 1059319 - DNA, 15 bp, Homo sapiens
tagcttggctgcagc

SEQ ID NO: 1059320 - DNA, 15 bp, Homo sapiens
ctagcttggctgcag

SEQ ID NO: 1059321 - DNA, 15 bp, Homo sapiens
tctagcttggctgca

SEQ ID NO: 1059322 - DNA, 15 bp, Homo sapiens
ctctagcttggctgc

SEQ ID NO: 1059323 - DNA, 15 bp, Homo sapiens
tctctagcttggctg

SEQ ID NO: 1059324 - DNA, 15 bp, Homo sapiens
ttctctagcttggct

SEQ ID NO: 1059325 - DNA, 15 bp, Homo sapiens
cttctctagcttggc

SEQ ID NO: 1059326 - DNA, 15 bp, Homo sapiens
gcttctctagcttgg

SEQ ID NO: 1059327 - DNA, 15 bp, Homo sapiens
ggcttctctagcttg

SEQ ID NO: 1059328 - DNA, 15 bp, Homo sapiens
aggcttctctagctt

SEQ ID NO: 1059329 - DNA, 15 bp, Homo sapiens
caggcttctctagct

SEQ ID NO: 1059330 - DNA, 15 bp, Homo sapiens
gcaggcttctctagc

SEQ ID NO: 1059331 - DNA, 15 bp, Homo sapiens
agcaggcttctctag

SEQ ID NO: 1059332 - DNA, 15 bp, Homo sapiens
aagcaggcttctcta

SEQ ID NO: 1059333 - DNA, 15 bp, Homo sapiens
aaagcaggcttctct

SEQ ID NO: 1059334 - DNA, 15 bp, Homo sapiens
taaagcaggcttctc

SEQ ID NO: 1059335 - DNA, 15 bp, Homo sapiens
ataaagcaggcttct

SEQ ID NO: 1059336 - DNA, 15 bp, Homo sapiens
tataaagcaggcttc

SEQ ID NO: 1059337 - DNA, 15 bp, Homo sapiens
ctataaagcaggctt

SEQ ID NO: 1059338 - DNA, 15 bp, Homo sapiens
tctataaagcaggct

SEQ ID NO: 1059339 - DNA, 15 bp, Homo sapiens
ttctataaagcaggc

SEQ ID NO: 1059340 - DNA, 15 bp, Homo sapiens
gttctataaagcagg

SEQ ID NO: 1059341 - DNA, 15 bp, Homo sapiens
tgttctataaagcag

SEQ ID NO: 1059342 - DNA, 15 bp, Homo sapiens
ctgttctataaagca

SEQ ID NO: 1059343 - DNA, 15 bp, Homo sapiens
tctgttctataaagc

SEQ ID NO: 1059344 - DNA, 15 bp, Homo sapiens
ctctgttctataaag

SEQ ID NO: 1059345 - DNA, 15 bp, Homo sapiens
tctctgttctataaa

SEQ ID NO: 1059346 - DNA, 15 bp, Homo sapiens
gtctctgttctataa

SEQ ID NO: 1059347 - DNA, 15 bp, Homo sapiens
tgtctctgttctata

SEQ ID NO: 1059348 - DNA, 15 bp, Homo sapiens
ttgtctctgttctat

SEQ ID NO: 1059349 - DNA, 15 bp, Homo sapiens
tttgtctctgttcta

SEQ ID NO: 1059350 - DNA, 15 bp, Homo sapiens
gtttgtctctgttct

SEQ ID NO: 1059351 - DNA, 15 bp, Homo sapiens
agtttgtctctgttc

SEQ ID NO: 1059352 - DNA, 15 bp, Homo sapiens
tagtttgtctctgtt

SEQ ID NO: 1059353 - DNA, 15 bp, Homo sapiens
ctagtttgtctctgt

SEQ ID NO: 1059354 - DNA, 15 bp, Homo sapiens
tctagtttgtctctg

SEQ ID NO: 1059355 - DNA, 15 bp, Homo sapiens
ctctagtttgtctct

SEQ ID NO: 1059356 - DNA, 15 bp, Homo sapiens
tctctagtttgtctc

SEQ ID NO: 1059357 - DNA, 15 bp, Homo sapiens
ctctctagtttgtct

SEQ ID NO: 1059358 - DNA, 15 bp, Homo sapiens
tctctctagtttgtc

SEQ ID NO: 1059359 - DNA, 15 bp, Homo sapiens
ttctctctagtttgt

SEQ ID NO: 1059360 - DNA, 15 bp, Homo sapiens
tttctctctagtttg

SEQ ID NO: 1059361 - DNA, 15 bp, Homo sapiens
atttctctctagttt

SEQ ID NO: 1059362 - DNA, 15 bp, Homo sapiens
catttctctctagtt

SEQ ID NO: 1059363 - DNA, 15 bp, Homo sapiens
tcatttctctctagt

SEQ ID NO: 1059364 - DNA, 15 bp, Homo sapiens
ctcatttctctctag

SEQ ID NO: 1059365 - DNA, 15 bp, Homo sapiens
cctcatttctctcta

SEQ ID NO: 1059366 - DNA, 15 bp, Homo sapiens
gcctcatttctctct

SEQ ID NO: 1059367 - DNA, 15 bp, Homo sapiens
ggcctcatttctctc

SEQ ID NO: 1059368 - DNA, 15 bp, Homo sapiens
gggcctcatttctct

SEQ ID NO: 1059369 - DNA, 15 bp, Homo sapiens
tgggcctcatttctc

SEQ ID NO: 1059370 - DNA, 15 bp, Homo sapiens
atgggcctcatttct

SEQ ID NO: 1059371 - DNA, 15 bp, Homo sapiens
catgggcctcatttc

SEQ ID NO: 1059372 - DNA, 15 bp, Homo sapiens
acatgggcctcattt

SEQ ID NO: 1059373 - DNA, 15 bp, Homo sapiens
aacatgggcctcatt

SEQ ID NO: 1059374 - DNA, 15 bp, Homo sapiens
taacatgggcctcat

SEQ ID NO: 1059375 - DNA, 15 bp, Homo sapiens
ctaacatgggcctca

SEQ ID NO: 1059376 - DNA, 15 bp, Homo sapiens
tctaacatgggcctc

SEQ ID NO: 1059377 - DNA, 15 bp, Homo sapiens
ctctaacatgggcct

SEQ ID NO: 1059378 - DNA, 15 bp, Homo sapiens
gctctaacatgggcc

SEQ ID NO: 1059379 - DNA, 15 bp, Homo sapiens
agctctaacatgggc

SEQ ID NO: 1059380 - DNA, 15 bp, Homo sapiens
tagctctaacatggg

SEQ ID NO: 1059381 - DNA, 15 bp, Homo sapiens
gtagctctaacatgg

SEQ ID NO: 1059382 - DNA, 15 bp, Homo sapiens
agtagctctaacatg

SEQ ID NO: 1059383 - DNA, 15 bp, Homo sapiens
gagtagctctaacat

SEQ ID NO: 1059384 - DNA, 15 bp, Homo sapiens
ggagtagctctaaca

SEQ ID NO: 1059385 - DNA, 15 bp, Homo sapiens
tggagtagctctaac

SEQ ID NO: 1059386 - DNA, 15 bp, Homo sapiens
ctggagtagctctaa

SEQ ID NO: 1059387 - DNA, 15 bp, Homo sapiens
tctggagtagctcta

SEQ ID NO: 1059388 - DNA, 15 bp, Homo sapiens
atctggagtagctct

SEQ ID NO: 1059389 - DNA, 15 bp, Homo sapiens
aatctggagtagctc

SEQ ID NO: 1059390 - DNA, 15 bp, Homo sapiens
aaatctggagtagct

SEQ ID NO: 1059391 - DNA, 15 bp, Homo sapiens
aaaatctggagtagc

SEQ ID NO: 1059392 - DNA, 15 bp, Homo sapiens
gaaaatctggagtag

SEQ ID NO: 1059393 - DNA, 15 bp, Homo sapiens
agaaaatctggagta

SEQ ID NO: 1059394 - DNA, 15 bp, Homo sapiens
aagaaaatctggagt

SEQ ID NO: 1059395 - DNA, 15 bp, Homo sapiens
caagaaaatctggag

SEQ ID NO: 1059396 - DNA, 15 bp, Homo sapiens
ccaagaaaatctgga

SEQ ID NO: 1059397 - DNA, 15 bp, Homo sapiens
tccaagaaaatctgg

SEQ ID NO: 1059398 - DNA, 15 bp, Homo sapiens
ctccaagaaaatctg

SEQ ID NO: 1059399 - DNA, 15 bp, Homo sapiens
gtctccaagaaaatc

SEQ ID NO: 1059400 - DNA, 15 bp, Homo sapiens
tgtctccaagaaaat

SEQ ID NO: 1059401 - DNA, 15 bp, Homo sapiens
gtgtctccaagaaaa

SEQ ID NO: 1059402 - DNA, 15 bp, Homo sapiens
tgtgtctccaagaaa

SEQ ID NO: 1059403 - DNA, 15 bp, Homo sapiens
gtgtgtctccaagaa

SEQ ID NO: 1059404 - DNA, 15 bp, Homo sapiens
agtgtgtctccaaga

SEQ ID NO: 1059405 - DNA, 15 bp, Homo sapiens
cagtgtgtctccaag

SEQ ID NO: 1059406 - DNA, 15 bp, Homo sapiens
ccagtgtgtctccaa

SEQ ID NO: 1059407 - DNA, 15 bp, Homo sapiens
cccagtgtgtctcca

SEQ ID NO: 1059408 - DNA, 15 bp, Homo sapiens
gcccagtgtgtctcc

SEQ ID NO: 1059409 - DNA, 15 bp, Homo sapiens
cgcccagtgtgtctc

SEQ ID NO: 1059410 - DNA, 15 bp, Homo sapiens
ccgcccagtgtgtct

SEQ ID NO: 1059411 - DNA, 15 bp, Homo sapiens
accgcccagtgtgtc

SEQ ID NO: 1059412 - DNA, 15 bp, Homo sapiens
aaccgcccagtgtgt

SEQ ID NO: 1059413 - DNA, 15 bp, Homo sapiens
caaccgcccagtgtg

SEQ ID NO: 1059414 - DNA, 15 bp, Homo sapiens
acaaccgcccagtgt

SEQ ID NO: 1059415 - DNA, 15 bp, Homo sapiens
gacaaccgcccagtg

SEQ ID NO: 1059416 - DNA, 15 bp, Homo sapiens
agacaaccgcccagt

SEQ ID NO: 1059417 - DNA, 15 bp, Homo sapiens
cagacaaccgcccag

SEQ ID NO: 1059418 - DNA, 15 bp, Homo sapiens
ccagacaaccgccca

SEQ ID NO: 1059419 - DNA, 15 bp, Homo sapiens
tccagacaaccgccc

SEQ ID NO: 1059420 - DNA, 15 bp, Homo sapiens
gtccagacaaccgcc

SEQ ID NO: 1059421 - DNA, 15 bp, Homo sapiens
ggtccagacaaccgc

SEQ ID NO: 1059422 - DNA, 15 bp, Homo sapiens
gggtccagacaaccg

SEQ ID NO: 1059423 - DNA, 15 bp, Homo sapiens
tgggtccagacaacc

SEQ ID NO: 1059424 - DNA, 15 bp, Homo sapiens
ctgggtccagacaac

SEQ ID NO: 1059425 - DNA, 15 bp, Homo sapiens
tctgggtccagacaa

SEQ ID NO: 1059426 - DNA, 15 bp, Homo sapiens
atctgggtccagaca

SEQ ID NO: 1059427 - DNA, 15 bp, Homo sapiens
aatctgggtccagac

SEQ ID NO: 1059428 - DNA, 15 bp, Homo sapiens
caatctgggtccaga

SEQ ID NO: 1059429 - DNA, 15 bp, Homo sapiens
acaatctgggtccag

SEQ ID NO: 1059430 - DNA, 15 bp, Homo sapiens
gacaatctgggtcca

SEQ ID NO: 1059431 - DNA, 15 bp, Homo sapiens
ggacaatctgggtcc

SEQ ID NO: 1059432 - DNA, 15 bp, Homo sapiens
aggacaatctgggtc

SEQ ID NO: 1059433 - DNA, 15 bp, Homo sapiens
taggacaatctgggt

SEQ ID NO: 1059434 - DNA, 15 bp, Homo sapiens
ctaggacaatctggg

SEQ ID NO: 1059435 - DNA, 15 bp, Homo sapiens
tctaggacaatctgg

SEQ ID NO: 1059436 - DNA, 15 bp, Homo sapiens
ttctaggacaatctg

SEQ ID NO: 1059437 - DNA, 15 bp, Homo sapiens
tttctaggacaatct

SEQ ID NO: 1059438 - DNA, 15 bp, Homo sapiens
ttttctaggacaatc

SEQ ID NO: 1059439 - DNA, 15 bp, Homo sapiens
cttttctaggacaat

SEQ ID NO: 1059440 - DNA, 15 bp, Homo sapiens
ccttttctaggacaa

SEQ ID NO: 1059441 - DNA, 15 bp, Homo sapiens
tccttttctaggaca

SEQ ID NO: 1059442 - DNA, 15 bp, Homo sapiens
ttccttttctaggac

SEQ ID NO: 1059443 - DNA, 15 bp, Homo sapiens
attccttttctagga

SEQ ID NO: 1059444 - DNA, 15 bp, Homo sapiens
tattccttttctagg

SEQ ID NO: 1059445 - DNA, 15 bp, Homo sapiens
gctattccttttcta

SEQ ID NO: 1059446 - DNA, 15 bp, Homo sapiens
tgctattccttttct

SEQ ID NO: 1059447 - DNA, 15 bp, Homo sapiens
ctgctattccttttc

SEQ ID NO: 1059448 - DNA, 15 bp, Homo sapiens
cctgctattcctttt

SEQ ID NO: 1059449 - DNA, 15 bp, Homo sapiens
gcctgctattccttt

SEQ ID NO: 1059450 - DNA, 15 bp, Homo sapiens
ggcctgctattcctt

SEQ ID NO: 1059451 - DNA, 15 bp, Homo sapiens
gggcctgctattcct

SEQ ID NO: 1059452 - DNA, 15 bp, Homo sapiens
agggcctgctattcc

SEQ ID NO: 1059453 - DNA, 15 bp, Homo sapiens
tagggcctgctattc

SEQ ID NO: 1059454 - DNA, 15 bp, Homo sapiens
gtagggcctgctatt

SEQ ID NO: 1059455 - DNA, 15 bp, Homo sapiens
agtagggcctgctat

SEQ ID NO: 1059456 - DNA, 15 bp, Homo sapiens
cagtagggcctgcta

SEQ ID NO: 1059457 - DNA, 15 bp, Homo sapiens
ccagtagggcctgct

SEQ ID NO: 1059458 - DNA, 15 bp, Homo sapiens
accagtagggcctgc

SEQ ID NO: 1059459 - DNA, 15 bp, Homo sapiens
taccagtagggcctg

SEQ ID NO: 1059460 - DNA, 15 bp, Homo sapiens
ataccagtagggcct

SEQ ID NO: 1059461 - DNA, 15 bp, Homo sapiens
tataccagtagggcc

SEQ ID NO: 1059462 - DNA, 15 bp, Homo sapiens
atataccagtagggc

SEQ ID NO: 1059463 - DNA, 15 bp, Homo sapiens
aatataccagtaggg

SEQ ID NO: 1059464 - DNA, 15 bp, Homo sapiens
caatataccagtagg

SEQ ID NO: 1059465 - DNA, 15 bp, Homo sapiens
tcaatataccagtag

SEQ ID NO: 1059466 - DNA, 15 bp, Homo sapiens
atcaatataccagta

SEQ ID NO: 1059467 - DNA, 15 bp, Homo sapiens
tatcaatataccagt

SEQ ID NO: 1059468 - DNA, 15 bp, Homo sapiens
ttatcaatataccag

SEQ ID NO: 1059469 - DNA, 15 bp, Homo sapiens
tttatcaatatacca

SEQ ID NO: 1059470 - DNA, 15 bp, Homo sapiens
ctttatcaatatacc

SEQ ID NO: 1059471 - DNA, 15 bp, Homo sapiens
cctttatcaatatac

SEQ ID NO: 1059472 - DNA, 15 bp, Homo sapiens
acctttatcaatata

SEQ ID NO: 1059473 - DNA, 15 bp, Homo sapiens
tacctttatcaatat

SEQ ID NO: 1059474 - DNA, 15 bp, Homo sapiens
atacctttatcaata

SEQ ID NO: 1059475 - DNA, 15 bp, Homo sapiens
tatacctttatcaat

SEQ ID NO: 1059476 - DNA, 15 bp, Homo sapiens
ctatacctttatcaa

SEQ ID NO: 1059477 - DNA, 15 bp, Homo sapiens
cctatacctttatca

SEQ ID NO: 1059478 - DNA, 15 bp, Homo sapiens
acctatacctttatc

SEQ ID NO: 1059479 - DNA, 15 bp, Homo sapiens
tacctatacctttat

SEQ ID NO: 1059480 - DNA, 15 bp, Homo sapiens
ttacctataccttta

SEQ ID NO: 1059481 - DNA, 15 bp, Homo sapiens
cttacctataccttt

SEQ ID NO: 1059482 - DNA, 15 bp, Homo sapiens
acttacctatacctt

SEQ ID NO: 1059483 - DNA, 15 bp, Homo sapiens
cacttacctatacct

SEQ ID NO: 1059484 - DNA, 15 bp, Homo sapiens
tcacttacctatacc

SEQ ID NO: 1059485 - DNA, 15 bp, Homo sapiens
ttcacttacctatac

SEQ ID NO: 1059486 - DNA, 15 bp, Homo sapiens
cttcacttacctata

SEQ ID NO: 1059487 - DNA, 15 bp, Homo sapiens
tcttcacttacctat

SEQ ID NO: 1059488 - DNA, 15 bp, Homo sapiens
ctcttcacttaccta

SEQ ID NO: 1059489 - DNA, 15 bp, Homo sapiens
tctcttcacttacct

SEQ ID NO: 1059490 - DNA, 15 bp, Homo sapiens
gtctcttcacttacc

SEQ ID NO: 1059491 - DNA, 15 bp, Homo sapiens
agtctcttcacttac

SEQ ID NO: 1059492 - DNA, 15 bp, Homo sapiens
cagtctcttcactta

SEQ ID NO: 1059493 - DNA, 15 bp, Homo sapiens
acagtctcttcactt

SEQ ID NO: 1059494 - DNA, 15 bp, Homo sapiens
tacagtctcttcact

SEQ ID NO: 1059495 - DNA, 15 bp, Homo sapiens
gtacagtctcttcac

SEQ ID NO: 1059496 - DNA, 15 bp, Homo sapiens
cgtacagtctcttca

SEQ ID NO: 1059497 - DNA, 15 bp, Homo sapiens
tcgtacagtctcttc

SEQ ID NO: 1059498 - DNA, 15 bp, Homo sapiens
atcgtacagtctctt

SEQ ID NO: 1059499 - DNA, 15 bp, Homo sapiens
gatcgtacagtctct

SEQ ID NO: 1059500 - DNA, 15 bp, Homo sapiens
agatcgtacagtctc

SEQ ID NO: 1059501 - DNA, 15 bp, Homo sapiens
aagatcgtacagtct

SEQ ID NO: 1059502 - DNA, 15 bp, Homo sapiens
caagatcgtacagtc

SEQ ID NO: 1059503 - DNA, 15 bp, Homo sapiens
tcaagatcgtacagt

SEQ ID NO: 1059504 - DNA, 15 bp, Homo sapiens
atcaagatcgtacag

SEQ ID NO: 1059505 - DNA, 15 bp, Homo sapiens
aatcaagatcgtaca

SEQ ID NO: 1059506 - DNA, 15 bp, Homo sapiens
taatcaagatcgtac

SEQ ID NO: 1059507 - DNA, 15 bp, Homo sapiens
ctaatcaagatcgta

SEQ ID NO: 1059508 - DNA, 15 bp, Homo sapiens
actaatcaagatcgt

SEQ ID NO: 1059509 - DNA, 15 bp, Homo sapiens
aactaatcaagatcg

SEQ ID NO: 1059510 - DNA, 15 bp, Homo sapiens
aaactaatcaagatc

SEQ ID NO: 1059511 - DNA, 15 bp, Homo sapiens
aaaactaatcaagat

SEQ ID NO: 1059512 - DNA, 15 bp, Homo sapiens
aaaaactaatcaaga

SEQ ID NO: 1059513 - DNA, 15 bp, Homo sapiens
aaaaaactaatcaag

SEQ ID NO: 1059514 - DNA, 15 bp, Homo sapiens
caaaaaactaatcaa

SEQ ID NO: 1059515 - DNA, 15 bp, Homo sapiens
acaaaaaactaatca

SEQ ID NO: 1059516 - DNA, 15 bp, Homo sapiens
gacaaaaaactaatc

SEQ ID NO: 1059517 - DNA, 15 bp, Homo sapiens
tgacaaaaaactaat

SEQ ID NO: 1059518 - DNA, 15 bp, Homo sapiens
atgacaaaaaactaa

SEQ ID NO: 1059519 - DNA, 15 bp, Homo sapiens
aatgacaaaaaacta

SEQ ID NO: 1059520 - DNA, 15 bp, Homo sapiens
caatgacaaaaaact

SEQ ID NO: 1059521 - DNA, 15 bp, Homo sapiens
acaatgacaaaaaac

SEQ ID NO: 1059522 - DNA, 15 bp, Homo sapiens
gacaatgacaaaaaa

SEQ ID NO: 1059523 - DNA, 15 bp, Homo sapiens
tgacaatgacaaaaa

SEQ ID NO: 1059524 - DNA, 15 bp, Homo sapiens
atgacaatgacaaaa

SEQ ID NO: 1059525 - DNA, 15 bp, Homo sapiens
aatgacaatgacaaa

SEQ ID NO: 1059526 - DNA, 15 bp, Homo sapiens
caatgacaatgacaa

SEQ ID NO: 1059527 - DNA, 15 bp, Homo sapiens
tcaatgacaatgaca

SEQ ID NO: 1059528 - DNA, 15 bp, Homo sapiens
atcaatgacaatgac

SEQ ID NO: 1059529 - DNA, 15 bp, Homo sapiens
catcaatgacaatga

SEQ ID NO: 1059530 - DNA, 15 bp, Homo sapiens
tcatcaatgacaatg

SEQ ID NO: 1059531 - DNA, 15 bp, Homo sapiens
gtcatcaatgacaat

SEQ ID NO: 1059532 - DNA, 15 bp, Homo sapiens
agtcatcaatgacaa

SEQ ID NO: 1059533 - DNA, 15 bp, Homo sapiens
cagtcatcaatgaca

SEQ ID NO: 1059534 - DNA, 15 bp, Homo sapiens
tcagtcatcaatgac

SEQ ID NO: 1059535 - DNA, 15 bp, Homo sapiens
atcagtcatcaatga

SEQ ID NO: 1059536 - DNA, 15 bp, Homo sapiens
aatcagtcatcaatg

SEQ ID NO: 1059537 - DNA, 15 bp, Homo sapiens
aaatcagtcatcaat

SEQ ID NO: 1059538 - DNA, 15 bp, Homo sapiens
aaaatcagtcatcaa

SEQ ID NO: 1059539 - DNA, 15 bp, Homo sapiens
taaaatcagtcatca

SEQ ID NO: 1059540 - DNA, 15 bp, Homo sapiens
ataaaatcagtcatc

SEQ ID NO: 1059541 - DNA, 15 bp, Homo sapiens
aataaaatcagtcat

SEQ ID NO: 1059542 - DNA, 15 bp, Homo sapiens
caataaaatcagtca

SEQ ID NO: 1059543 - DNA, 15 bp, Homo sapiens
tcaataaaatcagtc

SEQ ID NO: 1059544 - DNA, 15 bp, Homo sapiens
atcaataaaatcagt

SEQ ID NO: 1059545 - DNA, 15 bp, Homo sapiens
catcaataaaatcag

SEQ ID NO: 1059546 - DNA, 15 bp, Homo sapiens
gcatcaataaaatca

SEQ ID NO: 1059547 - DNA, 15 bp, Homo sapiens
tgcatcaataaaatc

SEQ ID NO: 1059548 - DNA, 15 bp, Homo sapiens
atgcatcaataaaat

SEQ ID NO: 1059549 - DNA, 15 bp, Homo sapiens
catgcatcaataaaa

SEQ ID NO: 1059550 - DNA, 15 bp, Homo sapiens
tcatgcatcaataaa

SEQ ID NO: 1059551 - DNA, 15 bp, Homo sapiens
atcatgcatcaataa

SEQ ID NO: 1059552 - DNA, 15 bp, Homo sapiens
catcatgcatcaata

SEQ ID NO: 1059553 - DNA, 15 bp, Homo sapiens
acatcatgcatcaat

SEQ ID NO: 1059554 - DNA, 15 bp, Homo sapiens
aacatcatgcatcaa

SEQ ID NO: 1059555 - DNA, 15 bp, Homo sapiens
taacatcatgcatca

SEQ ID NO: 1059556 - DNA, 15 bp, Homo sapiens
gtaacatcatgcatc

SEQ ID NO: 1059557 - DNA, 15 bp, Homo sapiens
agtaacatcatgcat

SEQ ID NO: 1059558 - DNA, 15 bp, Homo sapiens
cagtaacatcatgca

SEQ ID NO: 1059559 - DNA, 15 bp, Homo sapiens
tcagtaacatcatgc

SEQ ID NO: 1059560 - DNA, 15 bp, Homo sapiens
atcagtaacatcatg

SEQ ID NO: 1059561 - DNA, 15 bp, Homo sapiens
aatcagtaacatcat

SEQ ID NO: 1059562 - DNA, 15 bp, Homo sapiens
aaatcagtaacatca

SEQ ID NO: 1059563 - DNA, 15 bp, Homo sapiens
taaatcagtaacatc

SEQ ID NO: 1059564 - DNA, 15 bp, Homo sapiens
ctaaatcagtaacat

SEQ ID NO: 1059565 - DNA, 15 bp, Homo sapiens
tctaaatcagtaaca

SEQ ID NO: 1059566 - DNA, 15 bp, Homo sapiens
gtctaaatcagtaac

SEQ ID NO: 1059567 - DNA, 15 bp, Homo sapiens
tgtctaaatcagtaa

SEQ ID NO: 1059568 - DNA, 15 bp, Homo sapiens
ttgtctaaatcagta

SEQ ID NO: 1059569 - DNA, 15 bp, Homo sapiens
gttgtctaaatcagt

SEQ ID NO: 1059570 - DNA, 15 bp, Homo sapiens
agttgtctaaatcag

SEQ ID NO: 1059571 - DNA, 15 bp, Homo sapiens
cagttgtctaaatca

SEQ ID NO: 1059572 - DNA, 15 bp, Homo sapiens
acagttgtctaaatc

SEQ ID NO: 1059573 - DNA, 15 bp, Homo sapiens
tacagttgtctaaat

SEQ ID NO: 1059574 - DNA, 15 bp, Homo sapiens
gtacagttgtctaaa

SEQ ID NO: 1059575 - DNA, 15 bp, Homo sapiens
cgtacagttgtctaa

SEQ ID NO: 1059576 - DNA, 15 bp, Homo sapiens
acgtacagttgtcta

SEQ ID NO: 1059577 - DNA, 15 bp, Homo sapiens
aacgtacagttgtct

SEQ ID NO: 1059578 - DNA, 15 bp, Homo sapiens
gaacgtacagttgtc

SEQ ID NO: 1059579 - DNA, 15 bp, Homo sapiens
cgaacgtacagttgt

SEQ ID NO: 1059580 - DNA, 15 bp, Homo sapiens
acgaacgtacagttg

SEQ ID NO: 1059581 - DNA, 15 bp, Homo sapiens
tacgaacgtacagtt

SEQ ID NO: 1059582 - DNA, 15 bp, Homo sapiens
gtacgaacgtacagt

SEQ ID NO: 1059583 - DNA, 15 bp, Homo sapiens
tgtacgaacgtacag

SEQ ID NO: 1059584 - DNA, 15 bp, Homo sapiens
atgtacgaacgtaca

SEQ ID NO: 1059585 - DNA, 15 bp, Homo sapiens
gatgtacgaacgtac

SEQ ID NO: 1059586 - DNA, 15 bp, Homo sapiens
agatgtacgaacgta

SEQ ID NO: 1059587 - DNA, 15 bp, Homo sapiens
gagatgtacgaacgt

SEQ ID NO: 1059588 - DNA, 15 bp, Homo sapiens
tgagatgtacgaacg

SEQ ID NO: 1059589 - DNA, 15 bp, Homo sapiens
ctgagatgtacgaac

SEQ ID NO: 1059590 - DNA, 15 bp, Homo sapiens
tctgagatgtacgaa

SEQ ID NO: 1059591 - DNA, 15 bp, Homo sapiens
ttctgagatgtacga

SEQ ID NO: 1059592 - DNA, 15 bp, Homo sapiens
tttctgagatgtacg

SEQ ID NO: 1059593 - DNA, 15 bp, Homo sapiens
atttctgagatgtac

SEQ ID NO: 1059594 - DNA, 15 bp, Homo sapiens
aatttctgagatgta

SEQ ID NO: 1059595 - DNA, 15 bp, Homo sapiens
aaatttctgagatgt

SEQ ID NO: 1059596 - DNA, 15 bp, Homo sapiens
gaaatttctgagatg

SEQ ID NO: 1059597 - DNA, 15 bp, Homo sapiens
agaaatttctgagat

SEQ ID NO: 1059598 - DNA, 15 bp, Homo sapiens
aagaaatttctgaga

SEQ ID NO: 1059599 - DNA, 15 bp, Homo sapiens
aaagaaatttctgag

SEQ ID NO: 1059600 - DNA, 15 bp, Homo sapiens
gaaagaaatttctga

SEQ ID NO: 1059601 - DNA, 15 bp, Homo sapiens
agaaagaaatttctg

SEQ ID NO: 1059602 - DNA, 15 bp, Homo sapiens
cagaaagaaatttct

SEQ ID NO: 1059603 - DNA, 15 bp, Homo sapiens
tcagaaagaaatttc

SEQ ID NO: 1059604 - DNA, 15 bp, Homo sapiens
gtcagaaagaaattt

SEQ ID NO: 1059605 - DNA, 15 bp, Homo sapiens
cgtcagaaagaaatt

SEQ ID NO: 1059606 - DNA, 15 bp, Homo sapiens
acgtcagaaagaaat

SEQ ID NO: 1059607 - DNA, 15 bp, Homo sapiens
cacgtcagaaagaaa

SEQ ID NO: 1059608 - DNA, 15 bp, Homo sapiens
acacgtcagaaagaa

SEQ ID NO: 1059609 - DNA, 15 bp, Homo sapiens
gacacgtcagaaaga

SEQ ID NO: 1059610 - DNA, 15 bp, Homo sapiens
ggacacgtcagaaag

SEQ ID NO: 1059611 - DNA, 15 bp, Homo sapiens
aggacacgtcagaaa

SEQ ID NO: 1059612 - DNA, 15 bp, Homo sapiens
gaggacacgtcagaa

SEQ ID NO: 1059613 - DNA, 15 bp, Homo sapiens
tgaggacacgtcaga

SEQ ID NO: 1059614 - DNA, 15 bp, Homo sapiens
atgaggacacgtcag

SEQ ID NO: 1059615 - DNA, 15 bp, Homo sapiens
aatgaggacacgtca

SEQ ID NO: 1059616 - DNA, 15 bp, Homo sapiens
gaatgaggacacgtc

SEQ ID NO: 1059617 - DNA, 15 bp, Homo sapiens
tgaatgaggacacgt

SEQ ID NO: 1059618 - DNA, 15 bp, Homo sapiens
ctgaatgaggacacg

SEQ ID NO: 1059619 - DNA, 15 bp, Homo sapiens
actgaatgaggacac

SEQ ID NO: 1059620 - DNA, 15 bp, Homo sapiens
gactgaatgaggaca

SEQ ID NO: 1059621 - DNA, 15 bp, Homo sapiens
ggactgaatgaggac

SEQ ID NO: 1059622 - DNA, 15 bp, Homo sapiens
aggactgaatgagga

SEQ ID NO: 1059623 - DNA, 15 bp, Homo sapiens
gaggactgaatgagg

SEQ ID NO: 1059624 - DNA, 15 bp, Homo sapiens
agaggactgaatgag

SEQ ID NO: 1059625 - DNA, 15 bp, Homo sapiens
tagaggactgaatga

SEQ ID NO: 1059626 - DNA, 15 bp, Homo sapiens
ttagaggactgaatg

SEQ ID NO: 1059627 - DNA, 15 bp, Homo sapiens
tttagaggactgaat

SEQ ID NO: 1059628 - DNA, 15 bp, Homo sapiens
ttttagaggactgaa

SEQ ID NO: 1059629 - DNA, 15 bp, Homo sapiens
tttttagaggactga

SEQ ID NO: 1059630 - DNA, 15 bp, Homo sapiens
ctttttagaggactg

SEQ ID NO: 1059631 - DNA, 15 bp, Homo sapiens
actttttagaggact

SEQ ID NO: 1059632 - DNA, 15 bp, Homo sapiens
tactttttagaggac

SEQ ID NO: 1059633 - DNA, 15 bp, Homo sapiens
ctactttttagagga

SEQ ID NO: 1059634 - DNA, 15 bp, Homo sapiens
tctactttttagagg

SEQ ID NO: 1059635 - DNA, 15 bp, Homo sapiens
atctactttttagag

SEQ ID NO: 1059636 - DNA, 15 bp, Homo sapiens
tatctactttttaga

SEQ ID NO: 1059637 - DNA, 15 bp, Homo sapiens
atatctactttttag

SEQ ID NO: 1059638 - DNA, 15 bp, Homo sapiens
catatctacttttta

SEQ ID NO: 1059639 - DNA, 15 bp, Homo sapiens
ccatatctacttttt

SEQ ID NO: 1059640 - DNA, 15 bp, Homo sapiens
accatatctactttt

SEQ ID NO: 1059641 - DNA, 15 bp, Homo sapiens
caccatatctacttt

SEQ ID NO: 1059642 - DNA, 15 bp, Homo sapiens
acaccatatctactt

SEQ ID NO: 1059643 - DNA, 15 bp, Homo sapiens
aacaccatatctact

SEQ ID NO: 1059644 - DNA, 15 bp, Homo sapiens
caacaccatatctac

SEQ ID NO: 1059645 - DNA, 15 bp, Homo sapiens
ccaacaccatatcta

SEQ ID NO: 1059646 - DNA, 15 bp, Homo sapiens
accaacaccatatct

SEQ ID NO: 1059647 - DNA, 15 bp, Homo sapiens
taccaacaccatatc

SEQ ID NO: 1059648 - DNA, 15 bp, Homo sapiens
ttaccaacaccatat

SEQ ID NO: 1059649 - DNA, 15 bp, Homo sapiens
gttaccaacaccata

SEQ ID NO: 1059650 - DNA, 15 bp, Homo sapiens
cgttaccaacaccat

SEQ ID NO: 1059651 - DNA, 15 bp, Homo sapiens
acgttaccaacacca

SEQ ID NO: 1059652 - DNA, 15 bp, Homo sapiens
cacgttaccaacacc

SEQ ID NO: 1059653 - DNA, 15 bp, Homo sapiens
tcacgttaccaacac

SEQ ID NO: 1059654 - DNA, 15 bp, Homo sapiens
atcacgttaccaaca

SEQ ID NO: 1059655 - DNA, 15 bp, Homo sapiens
aatcacgttaccaac

SEQ ID NO: 1059656 - DNA, 15 bp, Homo sapiens
aaatcacgttaccaa

SEQ ID NO: 1059657 - DNA, 15 bp, Homo sapiens
aaaatcacgttacca

SEQ ID NO: 1059658 - DNA, 15 bp, Homo sapiens
taaaatcacgttacc

SEQ ID NO: 1059659 - DNA, 15 bp, Homo sapiens
ataaaatcacgttac

SEQ ID NO: 1059660 - DNA, 15 bp, Homo sapiens
tataaaatcacgtta

SEQ ID NO: 1059661 - DNA, 15 bp, Homo sapiens
ctataaaatcacgtt

SEQ ID NO: 1059662 - DNA, 15 bp, Homo sapiens
cctataaaatcacgt

SEQ ID NO: 1059663 - DNA, 15 bp, Homo sapiens
tcctataaaatcacg

SEQ ID NO: 1059664 - DNA, 15 bp, Homo sapiens
ttcctataaaatcac

SEQ ID NO: 1059665 - DNA, 15 bp, Homo sapiens
cttcctataaaatca

SEQ ID NO: 1059666 - DNA, 15 bp, Homo sapiens
ccttcctataaaatc

SEQ ID NO: 1059667 - DNA, 15 bp, Homo sapiens
tccttcctataaaat

SEQ ID NO: 1059668 - DNA, 15 bp, Homo sapiens
atccttcctataaaa

SEQ ID NO: 1059669 - DNA, 15 bp, Homo sapiens
tatccttcctataaa

SEQ ID NO: 1059670 - DNA, 15 bp, Homo sapiens
gtatccttcctataa

SEQ ID NO: 1059671 - DNA, 15 bp, Homo sapiens
agtatccttcctata

SEQ ID NO: 1059672 - DNA, 15 bp, Homo sapiens
cagtatccttcctat

SEQ ID NO: 1059673 - DNA, 15 bp, Homo sapiens
ccagtatccttccta

SEQ ID NO: 1059674 - DNA, 15 bp, Homo sapiens
cccagtatccttcct

SEQ ID NO: 1059675 - DNA, 15 bp, Homo sapiens
ccccagtatccttcc

SEQ ID NO: 1059676 - DNA, 15 bp, Homo sapiens
accccagtatccttc

SEQ ID NO: 1059677 - DNA, 15 bp, Homo sapiens
aaccccagtatcctt

SEQ ID NO: 1059678 - DNA, 15 bp, Homo sapiens
caaccccagtatcct

SEQ ID NO: 1059679 - DNA, 15 bp, Homo sapiens
gcaaccccagtatcc

SEQ ID NO: 1059680 - DNA, 15 bp, Homo sapiens
tgcaaccccagtatc

SEQ ID NO: 1059681 - DNA, 15 bp, Homo sapiens
ctgcaaccccagtat

SEQ ID NO: 1059682 - DNA, 15 bp, Homo sapiens
tctgcaaccccagta

SEQ ID NO: 1059683 - DNA, 15 bp, Homo sapiens
ttctgcaaccccagt

SEQ ID NO: 1059684 - DNA, 15 bp, Homo sapiens
cttctgcaaccccag

SEQ ID NO: 1059685 - DNA, 15 bp, Homo sapiens
acttctgcaacccca

SEQ ID NO: 1059686 - DNA, 15 bp, Homo sapiens
aacttctgcaacccc

SEQ ID NO: 1059687 - DNA, 15 bp, Homo sapiens
taacttctgcaaccc

SEQ ID NO: 1059688 - DNA, 15 bp, Homo sapiens
ttaacttctgcaacc

SEQ ID NO: 1059689 - DNA, 15 bp, Homo sapiens
cttaacttctgcaac

SEQ ID NO: 1059690 - DNA, 15 bp, Homo sapiens
acttaacttctgcaa

SEQ ID NO: 1059691 - DNA, 15 bp, Homo sapiens
cacttaacttctgca

SEQ ID NO: 1059692 - DNA, 15 bp, Homo sapiens
ccacttaacttctgc

SEQ ID NO: 1059693 - DNA, 15 bp, Homo sapiens
gccacttaacttctg

SEQ ID NO: 1059694 - DNA, 15 bp, Homo sapiens
ggccacttaacttct

SEQ ID NO: 1059695 - DNA, 15 bp, Homo sapiens
aggccacttaacttc

SEQ ID NO: 1059696 - DNA, 15 bp, Homo sapiens
aaggccacttaactt

SEQ ID NO: 1059697 - DNA, 15 bp, Homo sapiens
aaaggccacttaact

SEQ ID NO: 1059698 - DNA, 15 bp, Homo sapiens
aaaaggccacttaac

SEQ ID NO: 1059699 - DNA, 15 bp, Homo sapiens
gaaaaggccacttaa

SEQ ID NO: 1059700 - DNA, 15 bp, Homo sapiens
tgaaaaggccactta

SEQ ID NO: 1059701 - DNA, 15 bp, Homo sapiens
ttgaaaaggccactt

SEQ ID NO: 1059702 - DNA, 15 bp, Homo sapiens
cttgaaaaggccact

SEQ ID NO: 1059703 - DNA, 15 bp, Homo sapiens
acttgaaaaggccac

SEQ ID NO: 1059704 - DNA, 15 bp, Homo sapiens
cacttgaaaaggcca

SEQ ID NO: 1059705 - DNA, 15 bp, Homo sapiens
acacttgaaaaggcc

SEQ ID NO: 1059706 - DNA, 15 bp, Homo sapiens
cacacttgaaaaggc

SEQ ID NO: 1059707 - DNA, 15 bp, Homo sapiens
acacacttgaaaagg

SEQ ID NO: 1059708 - DNA, 15 bp, Homo sapiens
tacacacttgaaaag

SEQ ID NO: 1059709 - DNA, 15 bp, Homo sapiens
ttacacacttgaaaa

SEQ ID NO: 1059710 - DNA, 15 bp, Homo sapiens
cttacacacttgaaa

SEQ ID NO: 1059711 - DNA, 15 bp, Homo sapiens
tcttacacacttgaa

SEQ ID NO: 1059712 - DNA, 15 bp, Homo sapiens
ctcttacacacttga

SEQ ID NO: 1059713 - DNA, 15 bp, Homo sapiens
actcttacacacttg

SEQ ID NO: 1059714 - DNA, 15 bp, Homo sapiens
gactcttacacactt

SEQ ID NO: 1059715 - DNA, 15 bp, Homo sapiens
ggactcttacacact

SEQ ID NO: 1059716 - DNA, 15 bp, Homo sapiens
aggactcttacacac

SEQ ID NO: 1059717 - DNA, 15 bp, Homo sapiens
caggactcttacaca

SEQ ID NO: 1059718 - DNA, 15 bp, Homo sapiens
ccaggactcttacac

SEQ ID NO: 1059719 - DNA, 15 bp, Homo sapiens
tccaggactcttaca

SEQ ID NO: 1059720 - DNA, 15 bp, Homo sapiens
ctccaggactcttac

SEQ ID NO: 1059721 - DNA, 15 bp, Homo sapiens
gctccaggactctta

SEQ ID NO: 1059722 - DNA, 15 bp, Homo sapiens
ggctccaggactctt

SEQ ID NO: 1059723 - DNA, 15 bp, Homo sapiens
tggctccaggactct

SEQ ID NO: 1059724 - DNA, 15 bp, Homo sapiens
ctggctccaggactc

SEQ ID NO: 1059725 - DNA, 15 bp, Homo sapiens
cctggctccaggact

SEQ ID NO: 1059726 - DNA, 15 bp, Homo sapiens
ccctggctccaggac

SEQ ID NO: 1059727 - DNA, 15 bp, Homo sapiens
gccctggctccagga

SEQ ID NO: 1059728 - DNA, 15 bp, Homo sapiens
agccctggctccagg

SEQ ID NO: 1059729 - DNA, 15 bp, Homo sapiens
tagccctggctccag

SEQ ID NO: 1059730 - DNA, 15 bp, Homo sapiens
gtagccctggctcca

SEQ ID NO: 1059731 - DNA, 15 bp, Homo sapiens
agtagccctggctcc

SEQ ID NO: 1059732 - DNA, 15 bp, Homo sapiens
cagtagccctggctc

SEQ ID NO: 1059733 - DNA, 15 bp, Homo sapiens
tcagtagccctggct

SEQ ID NO: 1059734 - DNA, 15 bp, Homo sapiens
gtcagtagccctggc

SEQ ID NO: 1059735 - DNA, 15 bp, Homo sapiens
agtcagtagccctgg

SEQ ID NO: 1059736 - DNA, 15 bp, Homo sapiens
aagtcagtagccctg

SEQ ID NO: 1059737 - DNA, 15 bp, Homo sapiens
aaagtcagtagccct

SEQ ID NO: 1059738 - DNA, 15 bp, Homo sapiens
gaaagtcagtagccc

SEQ ID NO: 1059739 - DNA, 15 bp, Homo sapiens
ggaaagtcagtagcc

SEQ ID NO: 1059740 - DNA, 15 bp, Homo sapiens
tggaaagtcagtagc

SEQ ID NO: 1059741 - DNA, 15 bp, Homo sapiens
gtggaaagtcagtag

SEQ ID NO: 1059742 - DNA, 15 bp, Homo sapiens
tgtggaaagtcagta

SEQ ID NO: 1059743 - DNA, 15 bp, Homo sapiens
gtgtggaaagtcagt

SEQ ID NO: 1059744 - DNA, 15 bp, Homo sapiens
ggtgtggaaagtcag

SEQ ID NO: 1059745 - DNA, 15 bp, Homo sapiens
aggtgtggaaagtca

SEQ ID NO: 1059746 - DNA, 15 bp, Homo sapiens
aaggtgtggaaagtc

SEQ ID NO: 1059747 - DNA, 15 bp, Homo sapiens
caaggtgtggaaagt

SEQ ID NO: 1059748 - DNA, 15 bp, Homo sapiens
acaaggtgtggaaag

SEQ ID NO: 1059749 - DNA, 15 bp, Homo sapiens
aacaaggtgtggaaa

SEQ ID NO: 1059750 - DNA, 15 bp, Homo sapiens
gaacaaggtgtggaa

SEQ ID NO: 1059751 - DNA, 15 bp, Homo sapiens
agaacaaggtgtgga

SEQ ID NO: 1059752 - DNA, 15 bp, Homo sapiens
gagaacaaggtgtgg

SEQ ID NO: 1059753 - DNA, 15 bp, Homo sapiens
agagaacaaggtgtg

SEQ ID NO: 1059754 - DNA, 15 bp, Homo sapiens
gagagaacaaggtgt

SEQ ID NO: 1059755 - DNA, 15 bp, Homo sapiens
ggagagaacaaggtg

SEQ ID NO: 1059756 - DNA, 15 bp, Homo sapiens
gggagagaacaaggt

SEQ ID NO: 1059757 - DNA, 15 bp, Homo sapiens
cgggagagaacaagg

SEQ ID NO: 1059758 - DNA, 15 bp, Homo sapiens
acgggagagaacaag

SEQ ID NO: 1059759 - DNA, 15 bp, Homo sapiens
gacgggagagaacaa

SEQ ID NO: 1059760 - DNA, 15 bp, Homo sapiens
ggacgggagagaaca

SEQ ID NO: 1059761 - DNA, 15 bp, Homo sapiens
aggacgggagagaac

SEQ ID NO: 1059762 - DNA, 15 bp, Homo sapiens
gaggacgggagagaa

SEQ ID NO: 1059763 - DNA, 15 bp, Homo sapiens
ggaggacgggagaga

SEQ ID NO: 1059764 - DNA, 15 bp, Homo sapiens
tggaggacgggagag

SEQ ID NO: 1059765 - DNA, 15 bp, Homo sapiens
ctggaggacgggaga

SEQ ID NO: 1059766 - DNA, 15 bp, Homo sapiens
cctggaggacgggag

SEQ ID NO: 1059767 - DNA, 15 bp, Homo sapiens
gcctggaggacggga

SEQ ID NO: 1059768 - DNA, 15 bp, Homo sapiens
agcctggaggacggg

SEQ ID NO: 1059769 - DNA, 15 bp, Homo sapiens
cagcctggaggacgg

SEQ ID NO: 1059770 - DNA, 15 bp, Homo sapiens
gcagcctggaggacg

SEQ ID NO: 1059771 - DNA, 15 bp, Homo sapiens
tgcagcctggaggac

SEQ ID NO: 1059772 - DNA, 15 bp, Homo sapiens
ctgcagcctggagga

SEQ ID NO: 1059773 - DNA, 15 bp, Homo sapiens
tctgcagcctggagg

SEQ ID NO: 1059774 - DNA, 15 bp, Homo sapiens
atctgcagcctggag

SEQ ID NO: 1059775 - DNA, 15 bp, Homo sapiens
catctgcagcctgga

SEQ ID NO: 1059776 - DNA, 15 bp, Homo sapiens
acatctgcagcctgg

SEQ ID NO: 1059777 - DNA, 15 bp, Homo sapiens
cacatctgcagcctg

SEQ ID NO: 1059778 - DNA, 15 bp, Homo sapiens
gcacatctgcagcct

SEQ ID NO: 1059779 - DNA, 15 bp, Homo sapiens
cgcacatctgcagcc

SEQ ID NO: 1059780 - DNA, 15 bp, Homo sapiens
acgcacatctgcagc

SEQ ID NO: 1059781 - DNA, 15 bp, Homo sapiens
cacgcacatctgcag

SEQ ID NO: 1059782 - DNA, 15 bp, Homo sapiens
acacgcacatctgca

SEQ ID NO: 1059783 - DNA, 15 bp, Homo sapiens
cacacgcacatctgc

SEQ ID NO: 1059784 - DNA, 15 bp, Homo sapiens
acacacgcacatctg

SEQ ID NO: 1059785 - DNA, 15 bp, Homo sapiens
gacacacgcacatct

SEQ ID NO: 1059786 - DNA, 15 bp, Homo sapiens
agacacacgcacatc

SEQ ID NO: 1059787 - DNA, 15 bp, Homo sapiens
cagacacacgcacat

SEQ ID NO: 1059788 - DNA, 15 bp, Homo sapiens
gcagacacacgcaca

SEQ ID NO: 1059789 - DNA, 15 bp, Homo sapiens
ggcagacacacgcac

SEQ ID NO: 1059790 - DNA, 15 bp, Homo sapiens
gggcagacacacgca

SEQ ID NO: 1059791 - DNA, 15 bp, Homo sapiens
agggcagacacacgc

SEQ ID NO: 1059792 - DNA, 15 bp, Homo sapiens
cagggcagacacacg

SEQ ID NO: 1059793 - DNA, 15 bp, Homo sapiens
ccagggcagacacac

SEQ ID NO: 1059794 - DNA, 15 bp, Homo sapiens
accagggcagacaca

SEQ ID NO: 1059795 - DNA, 15 bp, Homo sapiens
gaccagggcagacac

SEQ ID NO: 1059796 - DNA, 15 bp, Homo sapiens
ggaccagggcagaca

SEQ ID NO: 1059797 - DNA, 15 bp, Homo sapiens
gggaccagggcagac

SEQ ID NO: 1059798 - DNA, 15 bp, Homo sapiens
tgggaccagggcaga

SEQ ID NO: 1059799 - DNA, 15 bp, Homo sapiens
ctgggaccagggcag

SEQ ID NO: 1059800 - DNA, 15 bp, Homo sapiens
cctgggaccagggca

SEQ ID NO: 1059801 - DNA, 15 bp, Homo sapiens
acctgggaccagggc

SEQ ID NO: 1059802 - DNA, 15 bp, Homo sapiens
gacctgggaccaggg

SEQ ID NO: 1059803 - DNA, 15 bp, Homo sapiens
tgacctgggaccagg

SEQ ID NO: 1059804 - DNA, 15 bp, Homo sapiens
ctgacctgggaccag

SEQ ID NO: 1059805 - DNA, 15 bp, Homo sapiens
tctgacctgggacca

SEQ ID NO: 1059806 - DNA, 15 bp, Homo sapiens
ctctgacctgggacc

SEQ ID NO: 1059807 - DNA, 15 bp, Homo sapiens
gctctgacctgggac

SEQ ID NO: 1059808 - DNA, 15 bp, Homo sapiens
agctctgacctggga

SEQ ID NO: 1059809 - DNA, 15 bp, Homo sapiens
aagctctgacctggg

SEQ ID NO: 1059810 - DNA, 15 bp, Homo sapiens
gaagctctgacctgg

SEQ ID NO: 1059811 - DNA, 15 bp, Homo sapiens
ggaagctctgacctg

SEQ ID NO: 1059812 - DNA, 15 bp, Homo sapiens
gggaagctctgacct

SEQ ID NO: 1059813 - DNA, 15 bp, Homo sapiens
agggaagctctgacc

SEQ ID NO: 1059814 - DNA, 15 bp, Homo sapiens
aagggaagctctgac

SEQ ID NO: 1059815 - DNA, 15 bp, Homo sapiens
aaagggaagctctga

SEQ ID NO: 1059816 - DNA, 15 bp, Homo sapiens
caaagggaagctctg

SEQ ID NO: 1059817 - DNA, 15 bp, Homo sapiens
acaaagggaagctct

SEQ ID NO: 1059818 - DNA, 15 bp, Homo sapiens
aacaaagggaagctc

SEQ ID NO: 1059819 - DNA, 15 bp, Homo sapiens
aaacaaagggaagct

SEQ ID NO: 1059820 - DNA, 15 bp, Homo sapiens
aaaacaaagggaagc

SEQ ID NO: 1059821 - DNA, 15 bp, Homo sapiens
aaaaacaaagggaag

SEQ ID NO: 1059822 - DNA, 15 bp, Homo sapiens
gaaaaacaaagggaa

SEQ ID NO: 1059823 - DNA, 15 bp, Homo sapiens
agaaaaacaaaggga

SEQ ID NO: 1059824 - DNA, 15 bp, Homo sapiens
cagaaaaacaaaggg

SEQ ID NO: 1059825 - DNA, 15 bp, Homo sapiens
ccagaaaaacaaagg

SEQ ID NO: 1059826 - DNA, 15 bp, Homo sapiens
cccagaaaaacaaag

SEQ ID NO: 1059827 - DNA, 15 bp, Homo sapiens
gcccagaaaaacaaa

SEQ ID NO: 1059828 - DNA, 15 bp, Homo sapiens
tgcccagaaaaacaa

SEQ ID NO: 1059829 - DNA, 15 bp, Homo sapiens
ttgcccagaaaaaca

SEQ ID NO: 1059830 - DNA, 15 bp, Homo sapiens
tttgcccagaaaaac

SEQ ID NO: 1059831 - DNA, 15 bp, Homo sapiens
gtttgcccagaaaaa

SEQ ID NO: 1059832 - DNA, 15 bp, Homo sapiens
ggtttgcccagaaaa

SEQ ID NO: 1059833 - DNA, 15 bp, Homo sapiens
gggtttgcccagaaa

SEQ ID NO: 1059834 - DNA, 15 bp, Homo sapiens
agggtttgcccagaa

SEQ ID NO: 1059835 - DNA, 15 bp, Homo sapiens
cagggtttgcccaga

SEQ ID NO: 1059836 - DNA, 15 bp, Homo sapiens
gcagggtttgcccag

SEQ ID NO: 1059837 - DNA, 15 bp, Homo sapiens
ggcagggtttgccca

SEQ ID NO: 1059838 - DNA, 15 bp, Homo sapiens
cggcagggtttgccc

SEQ ID NO: 1059839 - DNA, 15 bp, Homo sapiens
ccggcagggtttgcc

SEQ ID NO: 1059840 - DNA, 15 bp, Homo sapiens
tccggcagggtttgc

SEQ ID NO: 1059841 - DNA, 15 bp, Homo sapiens
ctccggcagggtttg

SEQ ID NO: 1059842 - DNA, 15 bp, Homo sapiens
cctccggcagggttt

SEQ ID NO: 1059843 - DNA, 15 bp, Homo sapiens
gcctccggcagggtt

SEQ ID NO: 1059844 - DNA, 15 bp, Homo sapiens
ggcctccggcagggt

SEQ ID NO: 1059845 - DNA, 15 bp, Homo sapiens
aggcctccggcaggg

SEQ ID NO: 1059846 - DNA, 15 bp, Homo sapiens
aaggcctccggcagg

SEQ ID NO: 1059847 - DNA, 15 bp, Homo sapiens
gaaggcctccggcag

SEQ ID NO: 1059848 - DNA, 15 bp, Homo sapiens
ggaaggcctccggca

SEQ ID NO: 1059849 - DNA, 15 bp, Homo sapiens
gggaaggcctccggc

SEQ ID NO: 1059850 - DNA, 15 bp, Homo sapiens
tgggaaggcctccgg

SEQ ID NO: 1059851 - DNA, 15 bp, Homo sapiens
ctgggaaggcctccg

SEQ ID NO: 1059852 - DNA, 15 bp, Homo sapiens
gctgggaaggcctcc

SEQ ID NO: 1059853 - DNA, 15 bp, Homo sapiens
tgctgggaaggcctc

SEQ ID NO: 1059854 - DNA, 15 bp, Homo sapiens
gtgctgggaaggcct

SEQ ID NO: 1059855 - DNA, 15 bp, Homo sapiens
tgtgctgggaaggcc

SEQ ID NO: 1059856 - DNA, 15 bp, Homo sapiens
gtgtgctgggaaggc

SEQ ID NO: 1059857 - DNA, 15 bp, Homo sapiens
agtgtgctgggaagg

SEQ ID NO: 1059858 - DNA, 15 bp, Homo sapiens
gagtgtgctgggaag

SEQ ID NO: 1059859 - DNA, 15 bp, Homo sapiens
tgagtgtgctgggaa

SEQ ID NO: 1059860 - DNA, 15 bp, Homo sapiens
ctgagtgtgctggga

SEQ ID NO: 1059861 - DNA, 15 bp, Homo sapiens
gctgagtgtgctggg

SEQ ID NO: 1059862 - DNA, 15 bp, Homo sapiens
agctgagtgtgctgg

SEQ ID NO: 1059863 - DNA, 15 bp, Homo sapiens
cagctgagtgtgctg

SEQ ID NO: 1059864 - DNA, 15 bp, Homo sapiens
ccagctgagtgtgct

SEQ ID NO: 1059865 - DNA, 15 bp, Homo sapiens
gccagctgagtgtgc

SEQ ID NO: 1059866 - DNA, 15 bp, Homo sapiens
ggccagctgagtgtg

SEQ ID NO: 1059867 - DNA, 15 bp, Homo sapiens
gggccagctgagtgt

SEQ ID NO: 1059868 - DNA, 15 bp, Homo sapiens
tgggccagctgagtg

SEQ ID NO: 1059869 - DNA, 15 bp, Homo sapiens
ctgggccagctgagt

SEQ ID NO: 1059870 - DNA, 15 bp, Homo sapiens
gctgggccagctgag

SEQ ID NO: 1059871 - DNA, 15 bp, Homo sapiens
tgctgggccagctga

SEQ ID NO: 1059872 - DNA, 15 bp, Homo sapiens
ctgctgggccagctg

SEQ ID NO: 1059873 - DNA, 15 bp, Homo sapiens
actgctgggccagct

SEQ ID NO: 1059874 - DNA, 15 bp, Homo sapiens
cactgctgggccagc

SEQ ID NO: 1059875 - DNA, 15 bp, Homo sapiens
acactgctgggccag

SEQ ID NO: 1059876 - DNA, 15 bp, Homo sapiens
cacactgctgggcca

SEQ ID NO: 1059877 - DNA, 15 bp, Homo sapiens
gcacactgctgggcc

SEQ ID NO: 1059878 - DNA, 15 bp, Homo sapiens
tgcacactgctgggc

SEQ ID NO: 1059879 - DNA, 15 bp, Homo sapiens
ttgcacactgctggg

SEQ ID NO: 1059880 - DNA, 15 bp, Homo sapiens
gttgcacactgctgg

SEQ ID NO: 1059881 - DNA, 15 bp, Homo sapiens
tgttgcacactgctg

SEQ ID NO: 1059882 - DNA, 15 bp, Homo sapiens
ttgttgcacactgct

SEQ ID NO: 1059883 - DNA, 15 bp, Homo sapiens
attgttgcacactgc

SEQ ID NO: 1059884 - DNA, 15 bp, Homo sapiens
gattgttgcacactg

SEQ ID NO: 1059885 - DNA, 15 bp, Homo sapiens
tgattgttgcacact

SEQ ID NO: 1059886 - DNA, 15 bp, Homo sapiens
ctgattgttgcacac

SEQ ID NO: 1059887 - DNA, 15 bp, Homo sapiens
gctgattgttgcaca

SEQ ID NO: 1059888 - DNA, 15 bp, Homo sapiens
tgctgattgttgcac

SEQ ID NO: 1059889 - DNA, 15 bp, Homo sapiens
gtgctgattgttgca

SEQ ID NO: 1059890 - DNA, 15 bp, Homo sapiens
tgtgctgattgttgc

SEQ ID NO: 1059891 - DNA, 15 bp, Homo sapiens
atgtgctgattgttg

SEQ ID NO: 1059892 - DNA, 15 bp, Homo sapiens
gatgtgctgattgtt

SEQ ID NO: 1059893 - DNA, 15 bp, Homo sapiens
agatgtgctgattgt

SEQ ID NO: 1059894 - DNA, 15 bp, Homo sapiens
gagatgtgctgattg

SEQ ID NO: 1059895 - DNA, 15 bp, Homo sapiens
agagatgtgctgatt

SEQ ID NO: 1059896 - DNA, 15 bp, Homo sapiens
aagagatgtgctgat

SEQ ID NO: 1059897 - DNA, 15 bp, Homo sapiens
gaagagatgtgctga

SEQ ID NO: 1059898 - DNA, 15 bp, Homo sapiens
ggaagagatgtgctg

SEQ ID NO: 1059899 - DNA, 15 bp, Homo sapiens
aggaagagatgtgct

SEQ ID NO: 1059900 - DNA, 15 bp, Homo sapiens
gaggaagagatgtgc

SEQ ID NO: 1059901 - DNA, 15 bp, Homo sapiens
tgaggaagagatgtg

SEQ ID NO: 1059902 - DNA, 15 bp, Homo sapiens
ctgaggaagagatgt

SEQ ID NO: 1059903 - DNA, 15 bp, Homo sapiens
tctgaggaagagatg

SEQ ID NO: 1059904 - DNA, 15 bp, Homo sapiens
ctctgaggaagagat

SEQ ID NO: 1059905 - DNA, 15 bp, Homo sapiens
gctctgaggaagaga

SEQ ID NO: 1059906 - DNA, 15 bp, Homo sapiens
agctctgaggaagag

SEQ ID NO: 1059907 - DNA, 15 bp, Homo sapiens
aagctctgaggaaga

SEQ ID NO: 1059908 - DNA, 15 bp, Homo sapiens
gaagctctgaggaag

SEQ ID NO: 1059909 - DNA, 15 bp, Homo sapiens
agaagctctgaggaa

SEQ ID NO: 1059910 - DNA, 15 bp, Homo sapiens
aagaagctctgagga

SEQ ID NO: 1059911 - DNA, 15 bp, Homo sapiens
aaagaagctctgagg

SEQ ID NO: 1059912 - DNA, 15 bp, Homo sapiens
caaagaagctctgag

SEQ ID NO: 1059913 - DNA, 15 bp, Homo sapiens
gcaaagaagctctga

SEQ ID NO: 1059914 - DNA, 15 bp, Homo sapiens
tgcaaagaagctctg

SEQ ID NO: 1059915 - DNA, 15 bp, Homo sapiens
atgcaaagaagctct

SEQ ID NO: 1059916 - DNA, 15 bp, Homo sapiens
catgcaaagaagctc

SEQ ID NO: 1059917 - DNA, 15 bp, Homo sapiens
gcatgcaaagaagct

SEQ ID NO: 1059918 - DNA, 15 bp, Homo sapiens
ggcatgcaaagaagc

SEQ ID NO: 1059919 - DNA, 15 bp, Homo sapiens
aggcatgcaaagaag

SEQ ID NO: 1059920 - DNA, 15 bp, Homo sapiens
taggcatgcaaagaa

SEQ ID NO: 1059921 - DNA, 15 bp, Homo sapiens
ttaggcatgcaaaga

SEQ ID NO: 1059922 - DNA, 15 bp, Homo sapiens
cttaggcatgcaaag

SEQ ID NO: 1059923 - DNA, 15 bp, Homo sapiens
gcttaggcatgcaaa

SEQ ID NO: 1059924 - DNA, 15 bp, Homo sapiens
ggcttaggcatgcaa

SEQ ID NO: 1059925 - DNA, 15 bp, Homo sapiens
gggcttaggcatgca

SEQ ID NO: 1059926 - DNA, 15 bp, Homo sapiens
agggcttaggcatgc

SEQ ID NO: 1059927 - DNA, 15 bp, Homo sapiens
gagggcttaggcatg

SEQ ID NO: 1059928 - DNA, 15 bp, Homo sapiens
tgagggcttaggcat

SEQ ID NO: 1059929 - DNA, 15 bp, Homo sapiens
atgagggcttaggca

SEQ ID NO: 1059930 - DNA, 15 bp, Homo sapiens
aatgagggcttaggc

SEQ ID NO: 1059931 - DNA, 15 bp, Homo sapiens
aaatgagggcttagg

SEQ ID NO: 1059932 - DNA, 15 bp, Homo sapiens
gaaatgagggcttag

SEQ ID NO: 1059933 - DNA, 15 bp, Homo sapiens
ggaaatgagggctta

SEQ ID NO: 1059934 - DNA, 15 bp, Homo sapiens
aggaaatgagggctt

SEQ ID NO: 1059935 - DNA, 15 bp, Homo sapiens
aaggaaatgagggct

SEQ ID NO: 1059936 - DNA, 15 bp, Homo sapiens
taaggaaatgagggc

SEQ ID NO: 1059937 - DNA, 15 bp, Homo sapiens
ctaaggaaatgaggg

SEQ ID NO: 1059938 - DNA, 15 bp, Homo sapiens
actaaggaaatgagg

SEQ ID NO: 1059939 - DNA, 15 bp, Homo sapiens
aactaaggaaatgag

SEQ ID NO: 1059940 - DNA, 15 bp, Homo sapiens
gaactaaggaaatga

SEQ ID NO: 1059941 - DNA, 15 bp, Homo sapiens
ggaactaaggaaatg

SEQ ID NO: 1059942 - DNA, 15 bp, Homo sapiens
aggaactaaggaaat

SEQ ID NO: 1059943 - DNA, 15 bp, Homo sapiens
gaggaactaaggaaa

SEQ ID NO: 1059944 - DNA, 15 bp, Homo sapiens
tgaggaactaaggaa

SEQ ID NO: 1059945 - DNA, 15 bp, Homo sapiens
atgaggaactaagga

SEQ ID NO: 1059946 - DNA, 15 bp, Homo sapiens
catgaggaactaagg

SEQ ID NO: 1059947 - DNA, 15 bp, Homo sapiens
gcatgaggaactaag

SEQ ID NO: 1059948 - DNA, 15 bp, Homo sapiens
agcatgaggaactaa

SEQ ID NO: 1059949 - DNA, 15 bp, Homo sapiens
cagcatgaggaacta

SEQ ID NO: 1059950 - DNA, 15 bp, Homo sapiens
tcagcatgaggaact

SEQ ID NO: 1059951 - DNA, 15 bp, Homo sapiens
ttcagcatgaggaac

SEQ ID NO: 1059952 - DNA, 15 bp, Homo sapiens
attcagcatgaggaa

SEQ ID NO: 1059953 - DNA, 15 bp, Homo sapiens
gattcagcatgagga

SEQ ID NO: 1059954 - DNA, 15 bp, Homo sapiens
agattcagcatgagg

SEQ ID NO: 1059955 - DNA, 15 bp, Homo sapiens
cagattcagcatgag

SEQ ID NO: 1059956 - DNA, 15 bp, Homo sapiens
acagattcagcatga

SEQ ID NO: 1059957 - DNA, 15 bp, Homo sapiens
aacagattcagcatg

SEQ ID NO: 1059958 - DNA, 15 bp, Homo sapiens
aaacagattcagcat

SEQ ID NO: 1059959 - DNA, 15 bp, Homo sapiens
taaacagattcagca

SEQ ID NO: 1059960 - DNA, 15 bp, Homo sapiens
ttaaacagattcagc

SEQ ID NO: 1059961 - DNA, 15 bp, Homo sapiens
tttaaacagattcag

SEQ ID NO: 1059962 - DNA, 15 bp, Homo sapiens
atttaaacagattca

SEQ ID NO: 1059963 - DNA, 15 bp, Homo sapiens
tatttaaacagattc

SEQ ID NO: 1059964 - DNA, 15 bp, Homo sapiens
gtatttaaacagatt

SEQ ID NO: 1059965 - DNA, 15 bp, Homo sapiens
ggtatttaaacagat

SEQ ID NO: 1059966 - DNA, 15 bp, Homo sapiens
aggtatttaaacaga

SEQ ID NO: 1059967 - DNA, 15 bp, Homo sapiens
gaggtatttaaacag

SEQ ID NO: 1059968 - DNA, 15 bp, Homo sapiens
agaggtatttaaaca

SEQ ID NO: 1059969 - DNA, 15 bp, Homo sapiens
cagaggtatttaaac

SEQ ID NO: 1059970 - DNA, 15 bp, Homo sapiens
tcagaggtatttaaa

SEQ ID NO: 1059971 - DNA, 15 bp, Homo sapiens
gtcagaggtatttaa

SEQ ID NO: 1059972 - DNA, 15 bp, Homo sapiens
agtcagaggtattta

SEQ ID NO: 1059973 - DNA, 15 bp, Homo sapiens
aagtcagaggtattt

SEQ ID NO: 1059974 - DNA, 15 bp, Homo sapiens
aaagtcagaggtatt

SEQ ID NO: 1059975 - DNA, 15 bp, Homo sapiens
gaaagtcagaggtat

SEQ ID NO: 1059976 - DNA, 15 bp, Homo sapiens
ggaaagtcagaggta

SEQ ID NO: 1059977 - DNA, 15 bp, Homo sapiens
tggaaagtcagaggt

SEQ ID NO: 1059978 - DNA, 15 bp, Homo sapiens
ttggaaagtcagagg

SEQ ID NO: 1059979 - DNA, 15 bp, Homo sapiens
tttggaaagtcagag

SEQ ID NO: 1059980 - DNA, 15 bp, Homo sapiens
ttttggaaagtcaga

SEQ ID NO: 1059981 - DNA, 15 bp, Homo sapiens
cttttggaaagtcag

SEQ ID NO: 1059982 - DNA, 15 bp, Homo sapiens
tcttttggaaagtca

SEQ ID NO: 1059983 - DNA, 15 bp, Homo sapiens
gtcttttggaaagtc

SEQ ID NO: 1059984 - DNA, 15 bp, Homo sapiens
tgtcttttggaaagt

SEQ ID NO: 1059985 - DNA, 15 bp, Homo sapiens
ctgtcttttggaaag

SEQ ID NO: 1059986 - DNA, 15 bp, Homo sapiens
tctgtcttttggaaa

SEQ ID NO: 1059987 - DNA, 15 bp, Homo sapiens
ctctgtcttttggaa

SEQ ID NO: 1059988 - DNA, 15 bp, Homo sapiens
cctctgtcttttgga

SEQ ID NO: 1059989 - DNA, 15 bp, Homo sapiens
tcctctgtcttttgg

SEQ ID NO: 1059990 - DNA, 15 bp, Homo sapiens
atcctctgtcttttg

SEQ ID NO: 1059991 - DNA, 15 bp, Homo sapiens
tatcctctgtctttt

SEQ ID NO: 1059992 - DNA, 15 bp, Homo sapiens
atatcctctgtcttt

SEQ ID NO: 1059993 - DNA, 15 bp, Homo sapiens
aatatcctctgtctt

SEQ ID NO: 1059994 - DNA, 15 bp, Homo sapiens
caatatcctctgtct

SEQ ID NO: 1059995 - DNA, 15 bp, Homo sapiens
tcaatatcctctgtc

SEQ ID NO: 1059996 - DNA, 15 bp, Homo sapiens
ctcaatatcctctgt

SEQ ID NO: 1059997 - DNA, 15 bp, Homo sapiens
actcaatatcctctg

SEQ ID NO: 1059998 - DNA, 15 bp, Homo sapiens
aactcaatatcctct

SEQ ID NO: 1059999 - DNA, 15 bp, Homo sapiens
gaactcaatatcctc

SEQ ID NO: 1060000 - DNA, 15 bp, Homo sapiens
ggaactcaatatcct

SEQ ID NO: 1060001 - DNA, 15 bp, Homo sapiens
aggaactcaatatcc

SEQ ID NO: 1060002 - DNA, 15 bp, Homo sapiens
aaggaactcaatatc

SEQ ID NO: 1060003 - DNA, 15 bp, Homo sapiens
caaggaactcaatat

SEQ ID NO: 1060004 - DNA, 15 bp, Homo sapiens
acaaggaactcaata

SEQ ID NO: 1060005 - DNA, 15 bp, Homo sapiens
aacaaggaactcaat

SEQ ID NO: 1060006 - DNA, 15 bp, Homo sapiens
aaacaaggaactcaa

SEQ ID NO: 1060007 - DNA, 15 bp, Homo sapiens
taaacaaggaactca

SEQ ID NO: 1060008 - DNA, 15 bp, Homo sapiens
ataaacaaggaactc

SEQ ID NO: 1060009 - DNA, 15 bp, Homo sapiens
aataaacaaggaact

SEQ ID NO: 1060010 - DNA, 15 bp, Homo sapiens
taataaacaaggaac

SEQ ID NO: 1060011 - DNA, 15 bp, Homo sapiens
ttaataaacaaggaa

SEQ ID NO: 1060012 - DNA, 15 bp, Homo sapiens
gttaataaacaagga

SEQ ID NO: 1060013 - DNA, 15 bp, Homo sapiens
agttaataaacaagg

SEQ ID NO: 1060014 - DNA, 15 bp, Homo sapiens
gagttaataaacaag

SEQ ID NO: 1060015 - DNA, 15 bp, Homo sapiens
ggagttaataaacaa

SEQ ID NO: 1060016 - DNA, 15 bp, Homo sapiens
aggagttaataaaca

SEQ ID NO: 1060017 - DNA, 15 bp, Homo sapiens
caggagttaataaac

SEQ ID NO: 1060018 - DNA, 15 bp, Homo sapiens
ccaggagttaataaa

SEQ ID NO: 1060019 - DNA, 15 bp, Homo sapiens
tccaggagttaataa

SEQ ID NO: 1060020 - DNA, 15 bp, Homo sapiens
ttccaggagttaata

SEQ ID NO: 1060021 - DNA, 15 bp, Homo sapiens
gttccaggagttaat

SEQ ID NO: 1060022 - DNA, 15 bp, Homo sapiens
agttccaggagttaa

SEQ ID NO: 1060023 - DNA, 15 bp, Homo sapiens
gagttccaggagtta

SEQ ID NO: 1060024 - DNA, 15 bp, Homo sapiens
tgagttccaggagtt

SEQ ID NO: 1060025 - DNA, 15 bp, Homo sapiens
atgagttccaggagt

SEQ ID NO: 1060026 - DNA, 15 bp, Homo sapiens
gatgagttccaggag

SEQ ID NO: 1060027 - DNA, 15 bp, Homo sapiens
tgatgagttccagga

SEQ ID NO: 1060028 - DNA, 15 bp, Homo sapiens
ttgatgagttccagg

SEQ ID NO: 1060029 - DNA, 15 bp, Homo sapiens
gttgatgagttccag

SEQ ID NO: 1060030 - DNA, 15 bp, Homo sapiens
ggttgatgagttcca

SEQ ID NO: 1060031 - DNA, 15 bp, Homo sapiens
cggttgatgagttcc

SEQ ID NO: 1060032 - DNA, 15 bp, Homo sapiens
ccggttgatgagttc

SEQ ID NO: 1060033 - DNA, 15 bp, Homo sapiens
gccggttgatgagtt

SEQ ID NO: 1060034 - DNA, 15 bp, Homo sapiens
ggccggttgatgagt

SEQ ID NO: 1060035 - DNA, 15 bp, Homo sapiens
tggccggttgatgag

SEQ ID NO: 1060036 - DNA, 15 bp, Homo sapiens
ttggccggttgatga

SEQ ID NO: 1060037 - DNA, 15 bp, Homo sapiens
cttggccggttgatg

SEQ ID NO: 1060038 - DNA, 15 bp, Homo sapiens
ccttggccggttgat

SEQ ID NO: 1060039 - DNA, 15 bp, Homo sapiens
cccttggccggttga

SEQ ID NO: 1060040 - DNA, 15 bp, Homo sapiens
gcccttggccggttg

SEQ ID NO: 1060041 - DNA, 15 bp, Homo sapiens
ggcccttggccggtt

SEQ ID NO: 1060042 - DNA, 15 bp, Homo sapiens
aggcccttggccggt

SEQ ID NO: 1060043 - DNA, 15 bp, Homo sapiens
caggcccttggccgg

SEQ ID NO: 1060044 - DNA, 15 bp, Homo sapiens
acaggcccttggccg

SEQ ID NO: 1060045 - DNA, 15 bp, Homo sapiens
cacaggcccttggcc

SEQ ID NO: 1060046 - DNA, 15 bp, Homo sapiens
ccacaggcccttggc

SEQ ID NO: 1060047 - DNA, 15 bp, Homo sapiens
tccacaggcccttgg

SEQ ID NO: 1060048 - DNA, 15 bp, Homo sapiens
ctccacaggcccttg

SEQ ID NO: 1060049 - DNA, 15 bp, Homo sapiens
gctccacaggccctt

SEQ ID NO: 1060050 - DNA, 15 bp, Homo sapiens
tgctccacaggccct

SEQ ID NO: 1060051 - DNA, 15 bp, Homo sapiens
gtgctccacaggccc

SEQ ID NO: 1060052 - DNA, 15 bp, Homo sapiens
agtgctccacaggcc

SEQ ID NO: 1060053 - DNA, 15 bp, Homo sapiens
cagtgctccacaggc

SEQ ID NO: 1060054 - DNA, 15 bp, Homo sapiens
tcagtgctccacagg

SEQ ID NO: 1060055 - DNA, 15 bp, Homo sapiens
ctcagtgctccacag

SEQ ID NO: 1060056 - DNA, 15 bp, Homo sapiens
gctcagtgctccaca

SEQ ID NO: 1060057 - DNA, 15 bp, Homo sapiens
agctcagtgctccac

SEQ ID NO: 1060058 - DNA, 15 bp, Homo sapiens
aagctcagtgctcca

SEQ ID NO: 1060059 - DNA, 15 bp, Homo sapiens
gaagctcagtgctcc

SEQ ID NO: 1060060 - DNA, 15 bp, Homo sapiens
agaagctcagtgctc

SEQ ID NO: 1060061 - DNA, 15 bp, Homo sapiens
tagaagctcagtgct

SEQ ID NO: 1060062 - DNA, 15 bp, Homo sapiens
ctagaagctcagtgc

SEQ ID NO: 1060063 - DNA, 15 bp, Homo sapiens
gctagaagctcagtg

SEQ ID NO: 1060064 - DNA, 15 bp, Homo sapiens
ggctagaagctcagt

SEQ ID NO: 1060065 - DNA, 15 bp, Homo sapiens
gggctagaagctcag

SEQ ID NO: 1060066 - DNA, 15 bp, Homo sapiens
ggggctagaagctca

SEQ ID NO: 1060067 - DNA, 15 bp, Homo sapiens
tggggctagaagctc

SEQ ID NO: 1060068 - DNA, 15 bp, Homo sapiens
ctggggctagaagct

SEQ ID NO: 1060069 - DNA, 15 bp, Homo sapiens
gctggggctagaagc

SEQ ID NO: 1060070 - DNA, 15 bp, Homo sapiens
ggctggggctagaag

SEQ ID NO: 1060071 - DNA, 15 bp, Homo sapiens
aggctggggctagaa

SEQ ID NO: 1060072 - DNA, 15 bp, Homo sapiens
caggctggggctaga

SEQ ID NO: 1060073 - DNA, 15 bp, Homo sapiens
ccaggctggggctag

SEQ ID NO: 1060074 - DNA, 15 bp, Homo sapiens
tccaggctggggcta

SEQ ID NO: 1060075 - DNA, 15 bp, Homo sapiens
ctccaggctggggct

SEQ ID NO: 1060076 - DNA, 15 bp, Homo sapiens
gctccaggctggggc

SEQ ID NO: 1060077 - DNA, 15 bp, Homo sapiens
ggctccaggctgggg

SEQ ID NO: 1060078 - DNA, 15 bp, Homo sapiens
aggctccaggctggg

SEQ ID NO: 1060079 - DNA, 15 bp, Homo sapiens
aaggctccaggctgg

SEQ ID NO: 1060080 - DNA, 15 bp, Homo sapiens
aaaggctccaggctg

SEQ ID NO: 1060081 - DNA, 15 bp, Homo sapiens
gaaaggctccaggct

SEQ ID NO: 1060082 - DNA, 15 bp, Homo sapiens
tgaaaggctccaggc

SEQ ID NO: 1060083 - DNA, 15 bp, Homo sapiens
ctgaaaggctccagg

SEQ ID NO: 1060084 - DNA, 15 bp, Homo sapiens
cctgaaaggctccag

SEQ ID NO: 1060085 - DNA, 15 bp, Homo sapiens
tcctgaaaggctcca

SEQ ID NO: 1060086 - DNA, 15 bp, Homo sapiens
gtcctgaaaggctcc

SEQ ID NO: 1060087 - DNA, 15 bp, Homo sapiens
agtcctgaaaggctc

SEQ ID NO: 1060088 - DNA, 15 bp, Homo sapiens
cagtcctgaaaggct

SEQ ID NO: 1060089 - DNA, 15 bp, Homo sapiens
gcagtcctgaaaggc

SEQ ID NO: 1060090 - DNA, 15 bp, Homo sapiens
ggcagtcctgaaagg

SEQ ID NO: 1060091 - DNA, 15 bp, Homo sapiens
tggcagtcctgaaag

SEQ ID NO: 1060092 - DNA, 15 bp, Homo sapiens
atggcagtcctgaaa

SEQ ID NO: 1060093 - DNA, 15 bp, Homo sapiens
aatggcagtcctgaa

SEQ ID NO: 1060094 - DNA, 15 bp, Homo sapiens
caatggcagtcctga

SEQ ID NO: 1060095 - DNA, 15 bp, Homo sapiens
tcaatggcagtcctg

SEQ ID NO: 1060096 - DNA, 15 bp, Homo sapiens
ttcaatggcagtcct

SEQ ID NO: 1060097 - DNA, 15 bp, Homo sapiens
gttcaatggcagtcc

SEQ ID NO: 1060098 - DNA, 15 bp, Homo sapiens
tgttcaatggcagtc

SEQ ID NO: 1060099 - DNA, 15 bp, Homo sapiens
gtgttcaatggcagt

SEQ ID NO: 1060100 - DNA, 15 bp, Homo sapiens
cgtgttcaatggcag

SEQ ID NO: 1060101 - DNA, 15 bp, Homo sapiens
ccgtgttcaatggca

SEQ ID NO: 1060102 - DNA, 15 bp, Homo sapiens
tccgtgttcaatggc

SEQ ID NO: 1060103 - DNA, 15 bp, Homo sapiens
ttccgtgttcaatgg

SEQ ID NO: 1060104 - DNA, 15 bp, Homo sapiens
tttccgtgttcaatg

SEQ ID NO: 1060105 - DNA, 15 bp, Homo sapiens
gtttccgtgttcaat

SEQ ID NO: 1060106 - DNA, 15 bp, Homo sapiens
agtttccgtgttcaa

SEQ ID NO: 1060107 - DNA, 15 bp, Homo sapiens
cagtttccgtgttca

SEQ ID NO: 1060108 - DNA, 15 bp, Homo sapiens
tcagtttccgtgttc

SEQ ID NO: 1060109 - DNA, 15 bp, Homo sapiens
ttcagtttccgtgtt

SEQ ID NO: 1060110 - DNA, 15 bp, Homo sapiens
tttcagtttccgtgt

SEQ ID NO: 1060111 - DNA, 15 bp, Homo sapiens
ttttcagtttccgtg

SEQ ID NO: 1060112 - DNA, 15 bp, Homo sapiens
gttttcagtttccgt

SEQ ID NO: 1060113 - DNA, 15 bp, Homo sapiens
ggttttcagtttccg

SEQ ID NO: 1060114 - DNA, 15 bp, Homo sapiens
tggttttcagtttcc

SEQ ID NO: 1060115 - DNA, 15 bp, Homo sapiens
gtggttttcagtttc

SEQ ID NO: 1060116 - DNA, 15 bp, Homo sapiens
tgtggttttcagttt

SEQ ID NO: 1060117 - DNA, 15 bp, Homo sapiens
ctgtggttttcagtt

SEQ ID NO: 1060118 - DNA, 15 bp, Homo sapiens
gctgtggttttcagt

SEQ ID NO: 1060119 - DNA, 15 bp, Homo sapiens
ggctgtggttttcag

SEQ ID NO: 1060120 - DNA, 15 bp, Homo sapiens
gggctgtggttttca

SEQ ID NO: 1060121 - DNA, 15 bp, Homo sapiens
ggggctgtggttttc

SEQ ID NO: 1060122 - DNA, 15 bp, Homo sapiens
tggggctgtggtttt

SEQ ID NO: 1060123 - DNA, 15 bp, Homo sapiens
gtggggctgtggttt

SEQ ID NO: 1060124 - DNA, 15 bp, Homo sapiens
agtggggctgtggtt

SEQ ID NO: 1060125 - DNA, 15 bp, Homo sapiens
cagtggggctgtggt

SEQ ID NO: 1060126 - DNA, 15 bp, Homo sapiens
gcagtggggctgtgg

SEQ ID NO: 1060127 - DNA, 15 bp, Homo sapiens
tgcagtggggctgtg

SEQ ID NO: 1060128 - DNA, 15 bp, Homo sapiens
ttgcagtggggctgt

SEQ ID NO: 1060129 - DNA, 15 bp, Homo sapiens
cttgcagtggggctg

SEQ ID NO: 1060130 - DNA, 15 bp, Homo sapiens
gcttgcagtggggct

SEQ ID NO: 1060131 - DNA, 15 bp, Homo sapiens
cgcttgcagtggggc

SEQ ID NO: 1060132 - DNA, 15 bp, Homo sapiens
ccgcttgcagtgggg

SEQ ID NO: 1060133 - DNA, 15 bp, Homo sapiens
tccgcttgcagtggg

SEQ ID NO: 1060134 - DNA, 15 bp, Homo sapiens
ttccgcttgcagtgg

SEQ ID NO: 1060135 - DNA, 15 bp, Homo sapiens
attccgcttgcagtg

SEQ ID NO: 1060136 - DNA, 15 bp, Homo sapiens
cattccgcttgcagt

SEQ ID NO: 1060137 - DNA, 15 bp, Homo sapiens
ccattccgcttgcag

SEQ ID NO: 1060138 - DNA, 15 bp, Homo sapiens
gccattccgcttgca

SEQ ID NO: 1060139 - DNA, 15 bp, Homo sapiens
ggccattccgcttgc

SEQ ID NO: 1060140 - DNA, 15 bp, Homo sapiens
tggccattccgcttg

SEQ ID NO: 1060141 - DNA, 15 bp, Homo sapiens
atggccattccgctt

SEQ ID NO: 1060142 - DNA, 15 bp, Homo sapiens
gatggccattccgct

SEQ ID NO: 1060143 - DNA, 15 bp, Homo sapiens
agatggccattccgc

SEQ ID NO: 1060144 - DNA, 15 bp, Homo sapiens
gagatggccattccg

SEQ ID NO: 1060145 - DNA, 15 bp, Homo sapiens
ggagatggccattcc

SEQ ID NO: 1060146 - DNA, 15 bp, Homo sapiens
tggagatggccattc

SEQ ID NO: 1060147 - DNA, 15 bp, Homo sapiens
ctggagatggccatt

SEQ ID NO: 1060148 - DNA, 15 bp, Homo sapiens
gctggagatggccat

SEQ ID NO: 1060149 - DNA, 15 bp, Homo sapiens
ggctggagatggcca

SEQ ID NO: 1060150 - DNA, 15 bp, Homo sapiens
tggctggagatggcc

SEQ ID NO: 1060151 - DNA, 15 bp, Homo sapiens
atggctggagatggc

SEQ ID NO: 1060152 - DNA, 15 bp, Homo sapiens
aatggctggagatgg

SEQ ID NO: 1060153 - DNA, 15 bp, Homo sapiens
caatggctggagatg

SEQ ID NO: 1060154 - DNA, 15 bp, Homo sapiens
gcaatggctggagat

SEQ ID NO: 1060155 - DNA, 15 bp, Homo sapiens
ggcaatggctggaga

SEQ ID NO: 1060156 - DNA, 15 bp, Homo sapiens
aggcaatggctggag

SEQ ID NO: 1060157 - DNA, 15 bp, Homo sapiens
aaggcaatggctgga

SEQ ID NO: 1060158 - DNA, 15 bp, Homo sapiens
caaggcaatggctgg

SEQ ID NO: 1060159 - DNA, 15 bp, Homo sapiens
ccaaggcaatggctg

SEQ ID NO: 1060160 - DNA, 15 bp, Homo sapiens
gccaaggcaatggct

SEQ ID NO: 1060161 - DNA, 15 bp, Homo sapiens
agccaaggcaatggc

SEQ ID NO: 1060162 - DNA, 15 bp, Homo sapiens
cagccaaggcaatgg

SEQ ID NO: 1060163 - DNA, 15 bp, Homo sapiens
tcagccaaggcaatg

SEQ ID NO: 1060164 - DNA, 15 bp, Homo sapiens
atcagccaaggcaat

SEQ ID NO: 1060165 - DNA, 15 bp, Homo sapiens
catcagccaaggcaa

SEQ ID NO: 1060166 - DNA, 15 bp, Homo sapiens
ccatcagccaaggca

SEQ ID NO: 1060167 - DNA, 15 bp, Homo sapiens
tccatcagccaaggc

SEQ ID NO: 1060168 - DNA, 15 bp, Homo sapiens
atccatcagccaagg

SEQ ID NO: 1060169 - DNA, 15 bp, Homo sapiens
tatccatcagccaag

SEQ ID NO: 1060170 - DNA, 15 bp, Homo sapiens
ttatccatcagccaa

SEQ ID NO: 1060171 - DNA, 15 bp, Homo sapiens
tttatccatcagcca

SEQ ID NO: 1060172 - DNA, 15 bp, Homo sapiens
ttttatccatcagcc

SEQ ID NO: 1060173 - DNA, 15 bp, Homo sapiens
tttttatccatcagc

SEQ ID NO: 1060174 - DNA, 15 bp, Homo sapiens
ctttttatccatcag

SEQ ID NO: 1060175 - DNA, 15 bp, Homo sapiens
actttttatccatca

SEQ ID NO: 1060176 - DNA, 15 bp, Homo sapiens
gactttttatccatc

SEQ ID NO: 1060177 - DNA, 15 bp, Homo sapiens
agactttttatccat

SEQ ID NO: 1060178 - DNA, 15 bp, Homo sapiens
cagactttttatcca

SEQ ID NO: 1060179 - DNA, 15 bp, Homo sapiens
acagactttttatcc

SEQ ID NO: 1060180 - DNA, 15 bp, Homo sapiens
gacagactttttatc

SEQ ID NO: 1060181 - DNA, 15 bp, Homo sapiens
cgacagactttttat

SEQ ID NO: 1060182 - DNA, 15 bp, Homo sapiens
ccgacagacttttta

SEQ ID NO: 1060183 - DNA, 15 bp, Homo sapiens
gccgacagacttttt

SEQ ID NO: 1060184 - DNA, 15 bp, Homo sapiens
agccgacagactttt

SEQ ID NO: 1060185 - DNA, 15 bp, Homo sapiens
aagccgacagacttt

SEQ ID NO: 1060186 - DNA, 15 bp, Homo sapiens
caagccgacagactt

SEQ ID NO: 1060187 - DNA, 15 bp, Homo sapiens
gcaagccgacagact

SEQ ID NO: 1060188 - DNA, 15 bp, Homo sapiens
tgcaagccgacagac

SEQ ID NO: 1060189 - DNA, 15 bp, Homo sapiens
atgcaagccgacaga

SEQ ID NO: 1060190 - DNA, 15 bp, Homo sapiens
catgcaagccgacag

SEQ ID NO: 1060191 - DNA, 15 bp, Homo sapiens
gcatgcaagccgaca

SEQ ID NO: 1060192 - DNA, 15 bp, Homo sapiens
agcatgcaagccgac

SEQ ID NO: 1060193 - DNA, 15 bp, Homo sapiens
tagcatgcaagccga

SEQ ID NO: 1060194 - DNA, 15 bp, Homo sapiens
ttagcatgcaagccg

SEQ ID NO: 1060195 - DNA, 15 bp, Homo sapiens
cttagcatgcaagcc

SEQ ID NO: 1060196 - DNA, 15 bp, Homo sapiens
acttagcatgcaagc

SEQ ID NO: 1060197 - DNA, 15 bp, Homo sapiens
tacttagcatgcaag

SEQ ID NO: 1060198 - DNA, 15 bp, Homo sapiens
atacttagcatgcaa

SEQ ID NO: 1060199 - DNA, 15 bp, Homo sapiens
catacttagcatgca

SEQ ID NO: 1060200 - DNA, 15 bp, Homo sapiens
ccatacttagcatgc

SEQ ID NO: 1060201 - DNA, 15 bp, Homo sapiens
tccatacttagcatg

SEQ ID NO: 1060202 - DNA, 15 bp, Homo sapiens
ttccatacttagcat

SEQ ID NO: 1060203 - DNA, 15 bp, Homo sapiens
tttccatacttagca

SEQ ID NO: 1060204 - DNA, 15 bp, Homo sapiens
ttttccatacttagc

SEQ ID NO: 1060205 - DNA, 15 bp, Homo sapiens
cttttccatacttag

SEQ ID NO: 1060206 - DNA, 15 bp, Homo sapiens
tcttttccatactta

SEQ ID NO: 1060207 - DNA, 15 bp, Homo sapiens
ctcttttccatactt

SEQ ID NO: 1060208 - DNA, 15 bp, Homo sapiens
tctcttttccatact

SEQ ID NO: 1060209 - DNA, 15 bp, Homo sapiens
ctctcttttccatac

SEQ ID NO: 1060210 - DNA, 15 bp, Homo sapiens
cctctcttttccata

SEQ ID NO: 1060211 - DNA, 15 bp, Homo sapiens
ccctctcttttccat

SEQ ID NO: 1060212 - DNA, 15 bp, Homo sapiens
cccctctcttttcca

SEQ ID NO: 1060213 - DNA, 15 bp, Homo sapiens
tcccctctcttttcc

SEQ ID NO: 1060214 - DNA, 15 bp, Homo sapiens
ctcccctctcttttc

SEQ ID NO: 1060215 - DNA, 15 bp, Homo sapiens
tctcccctctctttt

SEQ ID NO: 1060216 - DNA, 15 bp, Homo sapiens
ttctcccctctcttt

SEQ ID NO: 1060217 - DNA, 15 bp, Homo sapiens
tttctcccctctctt

SEQ ID NO: 1060218 - DNA, 15 bp, Homo sapiens
gtttctcccctctct

SEQ ID NO: 1060219 - DNA, 15 bp, Homo sapiens
agtttctcccctctc

SEQ ID NO: 1060220 - DNA, 15 bp, Homo sapiens
tagtttctcccctct

SEQ ID NO: 1060221 - DNA, 15 bp, Homo sapiens
gtagtttctcccctc

SEQ ID NO: 1060222 - DNA, 15 bp, Homo sapiens
ggtagtttctcccct

SEQ ID NO: 1060223 - DNA, 15 bp, Homo sapiens
aggtagtttctcccc

SEQ ID NO: 1060224 - DNA, 15 bp, Homo sapiens
aaggtagtttctccc

SEQ ID NO: 1060225 - DNA, 15 bp, Homo sapiens
aaaggtagtttctcc

SEQ ID NO: 1060226 - DNA, 15 bp, Homo sapiens
gaaaggtagtttctc

SEQ ID NO: 1060227 - DNA, 15 bp, Homo sapiens
agaaaggtagtttct

SEQ ID NO: 1060228 - DNA, 15 bp, Homo sapiens
cagaaaggtagtttc

SEQ ID NO: 1060229 - DNA, 15 bp, Homo sapiens
acagaaaggtagttt

SEQ ID NO: 1060230 - DNA, 15 bp, Homo sapiens
cacagaaaggtagtt

SEQ ID NO: 1060231 - DNA, 15 bp, Homo sapiens
acacagaaaggtagt

SEQ ID NO: 1060232 - DNA, 15 bp, Homo sapiens
gacacagaaaggtag

SEQ ID NO: 1060233 - DNA, 15 bp, Homo sapiens
ggacacagaaaggta

SEQ ID NO: 1060234 - DNA, 15 bp, Homo sapiens
gggacacagaaaggt

SEQ ID NO: 1060235 - DNA, 15 bp, Homo sapiens
agggacacagaaagg

SEQ ID NO: 1060236 - DNA, 15 bp, Homo sapiens
aagggacacagaaag

SEQ ID NO: 1060237 - DNA, 15 bp, Homo sapiens
taagggacacagaaa

SEQ ID NO: 1060238 - DNA, 15 bp, Homo sapiens
ctaagggacacagaa

SEQ ID NO: 1060239 - DNA, 15 bp, Homo sapiens
tctaagggacacaga

SEQ ID NO: 1060240 - DNA, 15 bp, Homo sapiens
ctctaagggacacag

SEQ ID NO: 1060241 - DNA, 15 bp, Homo sapiens
actctaagggacaca

SEQ ID NO: 1060242 - DNA, 15 bp, Homo sapiens
cactctaagggacac

SEQ ID NO: 1060243 - DNA, 15 bp, Homo sapiens
tcactctaagggaca

SEQ ID NO: 1060244 - DNA, 15 bp, Homo sapiens
ttcactctaagggac

SEQ ID NO: 1060245 - DNA, 15 bp, Homo sapiens
tttcactctaaggga

SEQ ID NO: 1060246 - DNA, 15 bp, Homo sapiens
atttcactctaaggg

SEQ ID NO: 1060247 - DNA, 15 bp, Homo sapiens
catttcactctaagg

SEQ ID NO: 1060248 - DNA, 15 bp, Homo sapiens
gcatttcactctaag

SEQ ID NO: 1060249 - DNA, 15 bp, Homo sapiens
ggcatttcactctaa

SEQ ID NO: 1060250 - DNA, 15 bp, Homo sapiens
aggcatttcactcta

SEQ ID NO: 1060251 - DNA, 15 bp, Homo sapiens
caggcatttcactct

SEQ ID NO: 1060252 - DNA, 15 bp, Homo sapiens
ccaggcatttcactc

SEQ ID NO: 1060253 - DNA, 15 bp, Homo sapiens
gccaggcatttcact

SEQ ID NO: 1060254 - DNA, 15 bp, Homo sapiens
agccaggcatttcac

SEQ ID NO: 1060255 - DNA, 15 bp, Homo sapiens
cagccaggcatttca

SEQ ID NO: 1060256 - DNA, 15 bp, Homo sapiens
ccagccaggcatttc

SEQ ID NO: 1060257 - DNA, 15 bp, Homo sapiens
accagccaggcattt

SEQ ID NO: 1060258 - DNA, 15 bp, Homo sapiens
caccagccaggcatt

SEQ ID NO: 1060259 - DNA, 15 bp, Homo sapiens
gcaccagccaggcat

SEQ ID NO: 1060260 - DNA, 15 bp, Homo sapiens
agcaccagccaggca

SEQ ID NO: 1060261 - DNA, 15 bp, Homo sapiens
cagcaccagccaggc

SEQ ID NO: 1060262 - DNA, 15 bp, Homo sapiens
tcagcaccagccagg

SEQ ID NO: 1060263 - DNA, 15 bp, Homo sapiens
ttcagcaccagccag

SEQ ID NO: 1060264 - DNA, 15 bp, Homo sapiens
cttcagcaccagcca

SEQ ID NO: 1060265 - DNA, 15 bp, Homo sapiens
gcttcagcaccagcc

SEQ ID NO: 1060266 - DNA, 15 bp, Homo sapiens
ggcttcagcaccagc

SEQ ID NO: 1060267 - DNA, 15 bp, Homo sapiens
gggcttcagcaccag

SEQ ID NO: 1060268 - DNA, 15 bp, Homo sapiens
tgggcttcagcacca

SEQ ID NO: 1060269 - DNA, 15 bp, Homo sapiens
atgggcttcagcacc

SEQ ID NO: 1060270 - DNA, 15 bp, Homo sapiens
catgggcttcagcac

SEQ ID NO: 1060271 - DNA, 15 bp, Homo sapiens
acatgggcttcagca

SEQ ID NO: 1060272 - DNA, 15 bp, Homo sapiens
aacatgggcttcagc

SEQ ID NO: 1060273 - DNA, 15 bp, Homo sapiens
taacatgggcttcag

SEQ ID NO: 1060274 - DNA, 15 bp, Homo sapiens
ttaacatgggcttca

SEQ ID NO: 1060275 - DNA, 15 bp, Homo sapiens
gttaacatgggcttc

SEQ ID NO: 1060276 - DNA, 15 bp, Homo sapiens
cgttaacatgggctt

SEQ ID NO: 1060277 - DNA, 15 bp, Homo sapiens
tcgttaacatgggct

SEQ ID NO: 1060278 - DNA, 15 bp, Homo sapiens
ctcgttaacatgggc

SEQ ID NO: 1060279 - DNA, 15 bp, Homo sapiens
tctcgttaacatggg

SEQ ID NO: 1060280 - DNA, 15 bp, Homo sapiens
ctctcgttaacatgg

SEQ ID NO: 1060281 - DNA, 15 bp, Homo sapiens
cctctcgttaacatg

SEQ ID NO: 1060282 - DNA, 15 bp, Homo sapiens
gcctctcgttaacat

SEQ ID NO: 1060283 - DNA, 15 bp, Homo sapiens
agcctctcgttaaca

SEQ ID NO: 1060284 - DNA, 15 bp, Homo sapiens
cagcctctcgttaac

SEQ ID NO: 1060285 - DNA, 15 bp, Homo sapiens
ccagcctctcgttaa

SEQ ID NO: 1060286 - DNA, 15 bp, Homo sapiens
gccagcctctcgtta

SEQ ID NO: 1060287 - DNA, 15 bp, Homo sapiens
agccagcctctcgtt

SEQ ID NO: 1060288 - DNA, 15 bp, Homo sapiens
aagccagcctctcgt

SEQ ID NO: 1060289 - DNA, 15 bp, Homo sapiens
gaagccagcctctcg

SEQ ID NO: 1060290 - DNA, 15 bp, Homo sapiens
agaagccagcctctc

SEQ ID NO: 1060291 - DNA, 15 bp, Homo sapiens
gagaagccagcctct

SEQ ID NO: 1060292 - DNA, 15 bp, Homo sapiens
agagaagccagcctc

SEQ ID NO: 1060293 - DNA, 15 bp, Homo sapiens
gagagaagccagcct

SEQ ID NO: 1060294 - DNA, 15 bp, Homo sapiens
ggagagaagccagcc

SEQ ID NO: 1060295 - DNA, 15 bp, Homo sapiens
tggagagaagccagc

SEQ ID NO: 1060296 - DNA, 15 bp, Homo sapiens
ctggagagaagccag

SEQ ID NO: 1060297 - DNA, 15 bp, Homo sapiens
cctggagagaagcca

SEQ ID NO: 1060298 - DNA, 15 bp, Homo sapiens
tcctggagagaagcc

SEQ ID NO: 1060299 - DNA, 15 bp, Homo sapiens
ctcctggagagaagc

SEQ ID NO: 1060300 - DNA, 15 bp, Homo sapiens
tctcctggagagaag

SEQ ID NO: 1060301 - DNA, 15 bp, Homo sapiens
ctctcctggagagaa

SEQ ID NO: 1060302 - DNA, 15 bp, Homo sapiens
actctcctggagaga

SEQ ID NO: 1060303 - DNA, 15 bp, Homo sapiens
gactctcctggagag

SEQ ID NO: 1060304 - DNA, 15 bp, Homo sapiens
ggactctcctggaga

SEQ ID NO: 1060305 - DNA, 15 bp, Homo sapiens
aggactctcctggag

SEQ ID NO: 1060306 - DNA, 15 bp, Homo sapiens
taggactctcctgga

SEQ ID NO: 1060307 - DNA, 15 bp, Homo sapiens
ctaggactctcctgg

SEQ ID NO: 1060308 - DNA, 15 bp, Homo sapiens
cctaggactctcctg

SEQ ID NO: 1060309 - DNA, 15 bp, Homo sapiens
acctaggactctcct

SEQ ID NO: 1060310 - DNA, 15 bp, Homo sapiens
cacctaggactctcc

SEQ ID NO: 1060311 - DNA, 15 bp, Homo sapiens
ccacctaggactctc

SEQ ID NO: 1060312 - DNA, 15 bp, Homo sapiens
gccacctaggactct

SEQ ID NO: 1060313 - DNA, 15 bp, Homo sapiens
tgccacctaggactc

SEQ ID NO: 1060314 - DNA, 15 bp, Homo sapiens
ctgccacctaggact

SEQ ID NO: 1060315 - DNA, 15 bp, Homo sapiens
cctgccacctaggac

SEQ ID NO: 1060316 - DNA, 15 bp, Homo sapiens
tcctgccacctagga

SEQ ID NO: 1060317 - DNA, 15 bp, Homo sapiens
ctcctgccacctagg

SEQ ID NO: 1060318 - DNA, 15 bp, Homo sapiens
gctcctgccacctag

SEQ ID NO: 1060319 - DNA, 15 bp, Homo sapiens
ggctcctgccaccta

SEQ ID NO: 1060320 - DNA, 15 bp, Homo sapiens
tggctcctgccacct

SEQ ID NO: 1060321 - DNA, 15 bp, Homo sapiens
atggctcctgccacc

SEQ ID NO: 1060322 - DNA, 15 bp, Homo sapiens
catggctcctgccac

SEQ ID NO: 1060323 - DNA, 15 bp, Homo sapiens
gcatggctcctgcca

SEQ ID NO: 1060324 - DNA, 15 bp, Homo sapiens
tgcatggctcctgcc

SEQ ID NO: 1060325 - DNA, 15 bp, Homo sapiens
gtgcatggctcctgc

SEQ ID NO: 1060326 - DNA, 15 bp, Homo sapiens
tgtgcatggctcctg

SEQ ID NO: 1060327 - DNA, 15 bp, Homo sapiens
atgtgcatggctcct

SEQ ID NO: 1060328 - DNA, 15 bp, Homo sapiens
catgtgcatggctcc

SEQ ID NO: 1060329 - DNA, 15 bp, Homo sapiens
ccatgtgcatggctc

SEQ ID NO: 1060330 - DNA, 15 bp, Homo sapiens
accatgtgcatggct

SEQ ID NO: 1060331 - DNA, 15 bp, Homo sapiens
taccatgtgcatggc

SEQ ID NO: 1060332 - DNA, 15 bp, Homo sapiens
ttaccatgtgcatgg

SEQ ID NO: 1060333 - DNA, 15 bp, Homo sapiens
gttaccatgtgcatg

SEQ ID NO: 1060334 - DNA, 15 bp, Homo sapiens
tgttaccatgtgcat

SEQ ID NO: 1060335 - DNA, 15 bp, Homo sapiens
ttgttaccatgtgca

SEQ ID NO: 1060336 - DNA, 15 bp, Homo sapiens
gttgttaccatgtgc

SEQ ID NO: 1060337 - DNA, 15 bp, Homo sapiens
tgttgttaccatgtg

SEQ ID NO: 1060338 - DNA, 15 bp, Homo sapiens
ctgttgttaccatgt

SEQ ID NO: 1060339 - DNA, 15 bp, Homo sapiens
gctgttgttaccatg

SEQ ID NO: 1060340 - DNA, 15 bp, Homo sapiens
tgctgttgttaccat

SEQ ID NO: 1060341 - DNA, 15 bp, Homo sapiens
atgctgttgttacca

SEQ ID NO: 1060342 - DNA, 15 bp, Homo sapiens
aatgctgttgttacc

SEQ ID NO: 1060343 - DNA, 15 bp, Homo sapiens
aaatgctgttgttac

SEQ ID NO: 1060344 - DNA, 15 bp, Homo sapiens
aaaatgctgttgtta

SEQ ID NO: 1060345 - DNA, 15 bp, Homo sapiens
caaaatgctgttgtt

SEQ ID NO: 1060346 - DNA, 15 bp, Homo sapiens
ccaaaatgctgttgt

SEQ ID NO: 1060347 - DNA, 15 bp, Homo sapiens
gccaaaatgctgttg

SEQ ID NO: 1060348 - DNA, 15 bp, Homo sapiens
tgccaaaatgctgtt

SEQ ID NO: 1060349 - DNA, 15 bp, Homo sapiens
ctgccaaaatgctgt

SEQ ID NO: 1060350 - DNA, 15 bp, Homo sapiens
gctgccaaaatgctg

SEQ ID NO: 1060351 - DNA, 15 bp, Homo sapiens
ggctgccaaaatgct

SEQ ID NO: 1060352 - DNA, 15 bp, Homo sapiens
aggctgccaaaatgc

SEQ ID NO: 1060353 - DNA, 15 bp, Homo sapiens
caggctgccaaaatg

SEQ ID NO: 1060354 - DNA, 15 bp, Homo sapiens
ccaggctgccaaaat

SEQ ID NO: 1060355 - DNA, 15 bp, Homo sapiens
accaggctgccaaaa

SEQ ID NO: 1060356 - DNA, 15 bp, Homo sapiens
taccaggctgccaaa

SEQ ID NO: 1060357 - DNA, 15 bp, Homo sapiens
ctaccaggctgccaa

SEQ ID NO: 1060358 - DNA, 15 bp, Homo sapiens
cctaccaggctgcca

SEQ ID NO: 1060359 - DNA, 15 bp, Homo sapiens
ccctaccaggctgcc

SEQ ID NO: 1060360 - DNA, 15 bp, Homo sapiens
accctaccaggctgc

SEQ ID NO: 1060361 - DNA, 15 bp, Homo sapiens
aaccctaccaggctg

SEQ ID NO: 1060362 - DNA, 15 bp, Homo sapiens
aaaccctaccaggct

SEQ ID NO: 1060363 - DNA, 15 bp, Homo sapiens
caaaccctaccaggc

SEQ ID NO: 1060364 - DNA, 15 bp, Homo sapiens
gcaaaccctaccagg

SEQ ID NO: 1060365 - DNA, 15 bp, Homo sapiens
ggcaaaccctaccag

SEQ ID NO: 1060366 - DNA, 15 bp, Homo sapiens
tggcaaaccctacca

SEQ ID NO: 1060367 - DNA, 15 bp, Homo sapiens
ttggcaaaccctacc

SEQ ID NO: 1060368 - DNA, 15 bp, Homo sapiens
cttggcaaaccctac

SEQ ID NO: 1060369 - DNA, 15 bp, Homo sapiens
gcttggcaaacccta

SEQ ID NO: 1060370 - DNA, 15 bp, Homo sapiens
tgcttggcaaaccct

SEQ ID NO: 1060371 - DNA, 15 bp, Homo sapiens
gtgcttggcaaaccc

SEQ ID NO: 1060372 - DNA, 15 bp, Homo sapiens
cgtgcttggcaaacc

SEQ ID NO: 1060373 - DNA, 15 bp, Homo sapiens
acgtgcttggcaaac

SEQ ID NO: 1060374 - DNA, 15 bp, Homo sapiens
aacgtgcttggcaaa

SEQ ID NO: 1060375 - DNA, 15 bp, Homo sapiens
gaacgtgcttggcaa

SEQ ID NO: 1060376 - DNA, 15 bp, Homo sapiens
ggaacgtgcttggca

SEQ ID NO: 1060377 - DNA, 15 bp, Homo sapiens
aggaacgtgcttggc

SEQ ID NO: 1060378 - DNA, 15 bp, Homo sapiens
taggaacgtgcttgg

SEQ ID NO: 1060379 - DNA, 15 bp, Homo sapiens
ataggaacgtgcttg

SEQ ID NO: 1060380 - DNA, 15 bp, Homo sapiens
gataggaacgtgctt

SEQ ID NO: 1060381 - DNA, 15 bp, Homo sapiens
ggataggaacgtgct

SEQ ID NO: 1060382 - DNA, 15 bp, Homo sapiens
tggataggaacgtgc

SEQ ID NO: 1060383 - DNA, 15 bp, Homo sapiens
atggataggaacgtg

SEQ ID NO: 1060384 - DNA, 15 bp, Homo sapiens
aatggataggaacgt

SEQ ID NO: 1060385 - DNA, 15 bp, Homo sapiens
taatggataggaacg

SEQ ID NO: 1060386 - DNA, 15 bp, Homo sapiens
ataatggataggaac

SEQ ID NO: 1060387 - DNA, 15 bp, Homo sapiens
gataatggataggaa

SEQ ID NO: 1060388 - DNA, 15 bp, Homo sapiens
ggataatggatagga

SEQ ID NO: 1060389 - DNA, 15 bp, Homo sapiens
gggataatggatagg

SEQ ID NO: 1060390 - DNA, 15 bp, Homo sapiens
cgggataatggatag

SEQ ID NO: 1060391 - DNA, 15 bp, Homo sapiens
acgggataatggata

SEQ ID NO: 1060392 - DNA, 15 bp, Homo sapiens
aacgggataatggat

SEQ ID NO: 1060393 - DNA, 15 bp, Homo sapiens
aaacgggataatgga

SEQ ID NO: 1060394 - DNA, 15 bp, Homo sapiens
caaacgggataatgg

SEQ ID NO: 1060395 - DNA, 15 bp, Homo sapiens
acaaacgggataatg

SEQ ID NO: 1060396 - DNA, 15 bp, Homo sapiens
cacaaacgggataat

SEQ ID NO: 1060397 - DNA, 15 bp, Homo sapiens
gcacaaacgggataa

SEQ ID NO: 1060398 - DNA, 15 bp, Homo sapiens
ggcacaaacgggata

SEQ ID NO: 1060399 - DNA, 15 bp, Homo sapiens
gggcacaaacgggat

SEQ ID NO: 1060400 - DNA, 15 bp, Homo sapiens
agggcacaaacggga

SEQ ID NO: 1060401 - DNA, 15 bp, Homo sapiens
gagggcacaaacggg

SEQ ID NO: 1060402 - DNA, 15 bp, Homo sapiens
agagggcacaaacgg

SEQ ID NO: 1060403 - DNA, 15 bp, Homo sapiens
cagagggcacaaacg

SEQ ID NO: 1060404 - DNA, 15 bp, Homo sapiens
ccagagggcacaaac

SEQ ID NO: 1060405 - DNA, 15 bp, Homo sapiens
accagagggcacaaa

SEQ ID NO: 1060406 - DNA, 15 bp, Homo sapiens
caccagagggcacaa

SEQ ID NO: 1060407 - DNA, 15 bp, Homo sapiens
gcaccagagggcaca

SEQ ID NO: 1060408 - DNA, 15 bp, Homo sapiens
ggcaccagagggcac

SEQ ID NO: 1060409 - DNA, 15 bp, Homo sapiens
tggcaccagagggca

SEQ ID NO: 1060410 - DNA, 15 bp, Homo sapiens
atggcaccagagggc

SEQ ID NO: 1060411 - DNA, 15 bp, Homo sapiens
gatggcaccagaggg

SEQ ID NO: 1060412 - DNA, 15 bp, Homo sapiens
tgatggcaccagagg

SEQ ID NO: 1060413 - DNA, 15 bp, Homo sapiens
gtgatggcaccagag

SEQ ID NO: 1060414 - DNA, 15 bp, Homo sapiens
ggtgatggcaccaga

SEQ ID NO: 1060415 - DNA, 15 bp, Homo sapiens
tggtgatggcaccag

SEQ ID NO: 1060416 - DNA, 15 bp, Homo sapiens
atggtgatggcacca

SEQ ID NO: 1060417 - DNA, 15 bp, Homo sapiens
catggtgatggcacc

SEQ ID NO: 1060418 - DNA, 15 bp, Homo sapiens
tcatggtgatggcac

SEQ ID NO: 1060419 - DNA, 15 bp, Homo sapiens
ctcatggtgatggca

SEQ ID NO: 1060420 - DNA, 15 bp, Homo sapiens
tctcatggtgatggc

SEQ ID NO: 1060421 - DNA, 15 bp, Homo sapiens
atctcatggtgatgg

SEQ ID NO: 1060422 - DNA, 15 bp, Homo sapiens
catctcatggtgatg

SEQ ID NO: 1060423 - DNA, 15 bp, Homo sapiens
tcatctcatggtgat

SEQ ID NO: 1060424 - DNA, 15 bp, Homo sapiens
ctcatctcatggtga

SEQ ID NO: 1060425 - DNA, 15 bp, Homo sapiens
tctcatctcatggtg

SEQ ID NO: 1060426 - DNA, 15 bp, Homo sapiens
ttctcatctcatggt

SEQ ID NO: 1060427 - DNA, 15 bp, Homo sapiens
cttctcatctcatgg

SEQ ID NO: 1060428 - DNA, 15 bp, Homo sapiens
ccttctcatctcatg

SEQ ID NO: 1060429 - DNA, 15 bp, Homo sapiens
gccttctcatctcat

SEQ ID NO: 1060430 - DNA, 15 bp, Homo sapiens
agccttctcatctca

SEQ ID NO: 1060431 - DNA, 15 bp, Homo sapiens
cagccttctcatctc

SEQ ID NO: 1060432 - DNA, 15 bp, Homo sapiens
ccagccttctcatct

SEQ ID NO: 1060433 - DNA, 15 bp, Homo sapiens
accagccttctcatc

SEQ ID NO: 1060434 - DNA, 15 bp, Homo sapiens
taccagccttctcat

SEQ ID NO: 1060435 - DNA, 15 bp, Homo sapiens
ctaccagccttctca

SEQ ID NO: 1060436 - DNA, 15 bp, Homo sapiens
actaccagccttctc

SEQ ID NO: 1060437 - DNA, 15 bp, Homo sapiens
tactaccagccttct

SEQ ID NO: 1060438 - DNA, 15 bp, Homo sapiens
atactaccagccttc

SEQ ID NO: 1060439 - DNA, 15 bp, Homo sapiens
aatactaccagcctt

SEQ ID NO: 1060440 - DNA, 15 bp, Homo sapiens
taatactaccagcct

SEQ ID NO: 1060441 - DNA, 15 bp, Homo sapiens
ataatactaccagcc

SEQ ID NO: 1060442 - DNA, 15 bp, Homo sapiens
aataatactaccagc

SEQ ID NO: 1060443 - DNA, 15 bp, Homo sapiens
taataatactaccag

SEQ ID NO: 1060444 - DNA, 15 bp, Homo sapiens
ataataatactacca

SEQ ID NO: 1060445 - DNA, 15 bp, Homo sapiens
gataataatactacc

SEQ ID NO: 1060446 - DNA, 15 bp, Homo sapiens
ggataataatactac

SEQ ID NO: 1060447 - DNA, 15 bp, Homo sapiens
gggataataatacta

SEQ ID NO: 1060448 - DNA, 15 bp, Homo sapiens
ggggataataatact

SEQ ID NO: 1060449 - DNA, 15 bp, Homo sapiens
gggggataataatac

SEQ ID NO: 1060450 - DNA, 15 bp, Homo sapiens
agggggataataata

SEQ ID NO: 1060451 - DNA, 15 bp, Homo sapiens
aagggggataataat

SEQ ID NO: 1060452 - DNA, 15 bp, Homo sapiens
gaagggggataataa

SEQ ID NO: 1060453 - DNA, 15 bp, Homo sapiens
agaagggggataata

SEQ ID NO: 1060454 - DNA, 15 bp, Homo sapiens
tagaagggggataat

SEQ ID NO: 1060455 - DNA, 15 bp, Homo sapiens
atagaagggggataa

SEQ ID NO: 1060456 - DNA, 15 bp, Homo sapiens
tatagaagggggata

SEQ ID NO: 1060457 - DNA, 15 bp, Homo sapiens
ctatagaagggggat

SEQ ID NO: 1060458 - DNA, 15 bp, Homo sapiens
tctatagaaggggga

SEQ ID NO: 1060459 - DNA, 15 bp, Homo sapiens
atctatagaaggggg

SEQ ID NO: 1060460 - DNA, 15 bp, Homo sapiens
tatctatagaagggg

SEQ ID NO: 1060461 - DNA, 15 bp, Homo sapiens
ttatctatagaaggg

SEQ ID NO: 1060462 - DNA, 15 bp, Homo sapiens
attatctatagaagg

SEQ ID NO: 1060463 - DNA, 15 bp, Homo sapiens
cattatctatagaag

SEQ ID NO: 1060464 - DNA, 15 bp, Homo sapiens
tcattatctatagaa

SEQ ID NO: 1060465 - DNA, 15 bp, Homo sapiens
ttcattatctataga

SEQ ID NO: 1060466 - DNA, 15 bp, Homo sapiens
tttcattatctatag

SEQ ID NO: 1060467 - DNA, 15 bp, Homo sapiens
ttttcattatctata

SEQ ID NO: 1060468 - DNA, 15 bp, Homo sapiens
gttttcattatctat

SEQ ID NO: 1060469 - DNA, 15 bp, Homo sapiens
tgttttcattatcta

SEQ ID NO: 1060470 - DNA, 15 bp, Homo sapiens
ttgttttcattatct

SEQ ID NO: 1060471 - DNA, 15 bp, Homo sapiens
cttgttttcattatc

SEQ ID NO: 1060472 - DNA, 15 bp, Homo sapiens
ccttgttttcattat

SEQ ID NO: 1060473 - DNA, 15 bp, Homo sapiens
gccttgttttcatta

SEQ ID NO: 1060474 - DNA, 15 bp, Homo sapiens
tgccttgttttcatt

SEQ ID NO: 1060475 - DNA, 15 bp, Homo sapiens
gtgccttgttttcat

SEQ ID NO: 1060476 - DNA, 15 bp, Homo sapiens
tgtgccttgttttca

SEQ ID NO: 1060477 - DNA, 15 bp, Homo sapiens
ctgtgccttgttttc

SEQ ID NO: 1060478 - DNA, 15 bp, Homo sapiens
tctgtgccttgtttt

SEQ ID NO: 1060479 - DNA, 15 bp, Homo sapiens
ctctgtgccttgttt

SEQ ID NO: 1060480 - DNA, 15 bp, Homo sapiens
tctctgtgccttgtt

SEQ ID NO: 1060481 - DNA, 15 bp, Homo sapiens
ctctctgtgccttgt

SEQ ID NO: 1060482 - DNA, 15 bp, Homo sapiens
tctctctgtgccttg

SEQ ID NO: 1060483 - DNA, 15 bp, Homo sapiens
atctctctgtgcctt

SEQ ID NO: 1060484 - DNA, 15 bp, Homo sapiens
aatctctctgtgcct

SEQ ID NO: 1060485 - DNA, 15 bp, Homo sapiens
aaatctctctgtgcc

SEQ ID NO: 1060486 - DNA, 15 bp, Homo sapiens
gaaatctctctgtgc

SEQ ID NO: 1060487 - DNA, 15 bp, Homo sapiens
tgaaatctctctgtg

SEQ ID NO: 1060488 - DNA, 15 bp, Homo sapiens
ctgaaatctctctgt

SEQ ID NO: 1060489 - DNA, 15 bp, Homo sapiens
cctgaaatctctctg

SEQ ID NO: 1060490 - DNA, 15 bp, Homo sapiens
ccctgaaatctctct

SEQ ID NO: 1060491 - DNA, 15 bp, Homo sapiens
accctgaaatctctc

SEQ ID NO: 1060492 - DNA, 15 bp, Homo sapiens
aaccctgaaatctct

SEQ ID NO: 1060493 - DNA, 15 bp, Homo sapiens
gaaccctgaaatctc

SEQ ID NO: 1060494 - DNA, 15 bp, Homo sapiens
ggaaccctgaaatct

SEQ ID NO: 1060495 - DNA, 15 bp, Homo sapiens
aggaaccctgaaatc

SEQ ID NO: 1060496 - DNA, 15 bp, Homo sapiens
aaggaaccctgaaat

SEQ ID NO: 1060497 - DNA, 15 bp, Homo sapiens
taaggaaccctgaaa

SEQ ID NO: 1060498 - DNA, 15 bp, Homo sapiens
ctaaggaaccctgaa

SEQ ID NO: 1060499 - DNA, 15 bp, Homo sapiens
tctaaggaaccctga

SEQ ID NO: 1060500 - DNA, 15 bp, Homo sapiens
ttctaaggaaccctg

SEQ ID NO: 1060501 - DNA, 15 bp, Homo sapiens
cttctaaggaaccct

SEQ ID NO: 1060502 - DNA, 15 bp, Homo sapiens
ccttctaaggaaccc

SEQ ID NO: 1060503 - DNA, 15 bp, Homo sapiens
gccttctaaggaacc

SEQ ID NO: 1060504 - DNA, 15 bp, Homo sapiens
tgccttctaaggaac

SEQ ID NO: 1060505 - DNA, 15 bp, Homo sapiens
gtgccttctaaggaa

SEQ ID NO: 1060506 - DNA, 15 bp, Homo sapiens
ggtgccttctaagga

SEQ ID NO: 1060507 - DNA, 15 bp, Homo sapiens
gggtgccttctaagg

SEQ ID NO: 1060508 - DNA, 15 bp, Homo sapiens
tgggtgccttctaag

SEQ ID NO: 1060509 - DNA, 15 bp, Homo sapiens
ctgggtgccttctaa

SEQ ID NO: 1060510 - DNA, 15 bp, Homo sapiens
cctgggtgccttcta

SEQ ID NO: 1060511 - DNA, 15 bp, Homo sapiens
acctgggtgccttct

SEQ ID NO: 1060512 - DNA, 15 bp, Homo sapiens
gacctgggtgccttc

SEQ ID NO: 1060513 - DNA, 15 bp, Homo sapiens
tgacctgggtgcctt

SEQ ID NO: 1060514 - DNA, 15 bp, Homo sapiens
atgacctgggtgcct

SEQ ID NO: 1060515 - DNA, 15 bp, Homo sapiens
catgacctgggtgcc

SEQ ID NO: 1060516 - DNA, 15 bp, Homo sapiens
tcatgacctgggtgc

SEQ ID NO: 1060517 - DNA, 15 bp, Homo sapiens
ttcatgacctgggtg

SEQ ID NO: 1060518 - DNA, 15 bp, Homo sapiens
cttcatgacctgggt

SEQ ID NO: 1060519 - DNA, 15 bp, Homo sapiens
gcttcatgacctggg

SEQ ID NO: 1060520 - DNA, 15 bp, Homo sapiens
tgcttcatgacctgg

SEQ ID NO: 1060521 - DNA, 15 bp, Homo sapiens
ctgcttcatgacctg

SEQ ID NO: 1060522 - DNA, 15 bp, Homo sapiens
tctgcttcatgacct

SEQ ID NO: 1060523 - DNA, 15 bp, Homo sapiens
ttctgcttcatgacc

SEQ ID NO: 1060524 - DNA, 15 bp, Homo sapiens
gttctgcttcatgac

SEQ ID NO: 1060525 - DNA, 15 bp, Homo sapiens
tgttctgcttcatga

SEQ ID NO: 1060526 - DNA, 15 bp, Homo sapiens
ttgttctgcttcatg

SEQ ID NO: 1060527 - DNA, 15 bp, Homo sapiens
cttgttctgcttcat

SEQ ID NO: 1060528 - DNA, 15 bp, Homo sapiens
tcttgttctgcttca

SEQ ID NO: 1060529 - DNA, 15 bp, Homo sapiens
gtcttgttctgcttc

SEQ ID NO: 1060530 - DNA, 15 bp, Homo sapiens
agtcttgttctgctt

SEQ ID NO: 1060531 - DNA, 15 bp, Homo sapiens
gagtcttgttctgct

SEQ ID NO: 1060532 - DNA, 15 bp, Homo sapiens
tgagtcttgttctgc

SEQ ID NO: 1060533 - DNA, 15 bp, Homo sapiens
ttgagtcttgttctg

SEQ ID NO: 1060534 - DNA, 15 bp, Homo sapiens
cttgagtcttgttct

SEQ ID NO: 1060535 - DNA, 15 bp, Homo sapiens
acttgagtcttgttc

SEQ ID NO: 1060536 - DNA, 15 bp, Homo sapiens
gacttgagtcttgtt

SEQ ID NO: 1060537 - DNA, 15 bp, Homo sapiens
ggacttgagtcttgt

SEQ ID NO: 1060538 - DNA, 15 bp, Homo sapiens
cggacttgagtcttg

SEQ ID NO: 1060539 - DNA, 15 bp, Homo sapiens
ccggacttgagtctt

SEQ ID NO: 1060540 - DNA, 15 bp, Homo sapiens
cccggacttgagtct

SEQ ID NO: 1060541 - DNA, 15 bp, Homo sapiens
gcccggacttgagtc

SEQ ID NO: 1060542 - DNA, 15 bp, Homo sapiens
ggcccggacttgagt

SEQ ID NO: 1060543 - DNA, 15 bp, Homo sapiens
aggcccggacttgag

SEQ ID NO: 1060544 - DNA, 15 bp, Homo sapiens
aaggcccggacttga

SEQ ID NO: 1060545 - DNA, 15 bp, Homo sapiens
aaaggcccggacttg

SEQ ID NO: 1060546 - DNA, 15 bp, Homo sapiens
caaaggcccggactt

SEQ ID NO: 1060547 - DNA, 15 bp, Homo sapiens
ccaaaggcccggact

SEQ ID NO: 1060548 - DNA, 15 bp, Homo sapiens
accaaaggcccggac

SEQ ID NO: 1060549 - DNA, 15 bp, Homo sapiens
caccaaaggcccgga

SEQ ID NO: 1060550 - DNA, 15 bp, Homo sapiens
acaccaaaggcccgg

SEQ ID NO: 1060551 - DNA, 15 bp, Homo sapiens
cacaccaaaggcccg

SEQ ID NO: 1060552 - DNA, 15 bp, Homo sapiens
acacaccaaaggccc

SEQ ID NO: 1060553 - DNA, 15 bp, Homo sapiens
aacacaccaaaggcc

SEQ ID NO: 1060554 - DNA, 15 bp, Homo sapiens
gaacacaccaaaggc

SEQ ID NO: 1060555 - DNA, 15 bp, Homo sapiens
agaacacaccaaagg

SEQ ID NO: 1060556 - DNA, 15 bp, Homo sapiens
cagaacacaccaaag

SEQ ID NO: 1060557 - DNA, 15 bp, Homo sapiens
acagaacacaccaaa

SEQ ID NO: 1060558 - DNA, 15 bp, Homo sapiens
gacagaacacaccaa

SEQ ID NO: 1060559 - DNA, 15 bp, Homo sapiens
ggacagaacacacca

SEQ ID NO: 1060560 - DNA, 15 bp, Homo sapiens
aggacagaacacacc

SEQ ID NO: 1060561 - DNA, 15 bp, Homo sapiens
aaggacagaacacac

SEQ ID NO: 1060562 - DNA, 15 bp, Homo sapiens
gaaggacagaacaca

SEQ ID NO: 1060563 - DNA, 15 bp, Homo sapiens
ggaaggacagaacac

SEQ ID NO: 1060564 - DNA, 15 bp, Homo sapiens
aggaaggacagaaca

SEQ ID NO: 1060565 - DNA, 15 bp, Homo sapiens
gaggaaggacagaac

SEQ ID NO: 1060566 - DNA, 15 bp, Homo sapiens
agaggaaggacagaa

SEQ ID NO: 1060567 - DNA, 15 bp, Homo sapiens
tagaggaaggacaga

SEQ ID NO: 1060568 - DNA, 15 bp, Homo sapiens
ctagaggaaggacag

SEQ ID NO: 1060569 - DNA, 15 bp, Homo sapiens
cctagaggaaggaca

SEQ ID NO: 1060570 - DNA, 15 bp, Homo sapiens
gcctagaggaaggac

SEQ ID NO: 1060571 - DNA, 15 bp, Homo sapiens
agcctagaggaagga

SEQ ID NO: 1060572 - DNA, 15 bp, Homo sapiens
cagcctagaggaagg

SEQ ID NO: 1060573 - DNA, 15 bp, Homo sapiens
gcagcctagaggaag

SEQ ID NO: 1060574 - DNA, 15 bp, Homo sapiens
agcagcctagaggaa

SEQ ID NO: 1060575 - DNA, 15 bp, Homo sapiens
aagcagcctagagga

SEQ ID NO: 1060576 - DNA, 15 bp, Homo sapiens
gaagcagcctagagg

SEQ ID NO: 1060577 - DNA, 15 bp, Homo sapiens
agaagcagcctagag

SEQ ID NO: 1060578 - DNA, 15 bp, Homo sapiens
cagaagcagcctaga

SEQ ID NO: 1060579 - DNA, 15 bp, Homo sapiens
ccagaagcagcctag

SEQ ID NO: 1060580 - DNA, 15 bp, Homo sapiens
tccagaagcagccta

SEQ ID NO: 1060581 - DNA, 15 bp, Homo sapiens
ttccagaagcagcct

SEQ ID NO: 1060582 - DNA, 15 bp, Homo sapiens
attccagaagcagcc

SEQ ID NO: 1060583 - DNA, 15 bp, Homo sapiens
gattccagaagcagc

SEQ ID NO: 1060584 - DNA, 15 bp, Homo sapiens
tgattccagaagcag

SEQ ID NO: 1060585 - DNA, 15 bp, Homo sapiens
atgattccagaagca

SEQ ID NO: 1060586 - DNA, 15 bp, Homo sapiens
aatgattccagaagc

SEQ ID NO: 1060587 - DNA, 15 bp, Homo sapiens
taatgattccagaag

SEQ ID NO: 1060588 - DNA, 15 bp, Homo sapiens
ataatgattccagaa

SEQ ID NO: 1060589 - DNA, 15 bp, Homo sapiens
gataatgattccaga

SEQ ID NO: 1060590 - DNA, 15 bp, Homo sapiens
agataatgattccag

SEQ ID NO: 1060591 - DNA, 15 bp, Homo sapiens
gagataatgattcca

SEQ ID NO: 1060592 - DNA, 15 bp, Homo sapiens
tgagataatgattcc

SEQ ID NO: 1060593 - DNA, 15 bp, Homo sapiens
ctgagataatgattc

SEQ ID NO: 1060594 - DNA, 15 bp, Homo sapiens
gctgagataatgatt

SEQ ID NO: 1060595 - DNA, 15 bp, Homo sapiens
tgctgagataatgat

SEQ ID NO: 1060596 - DNA, 15 bp, Homo sapiens
atgctgagataatga

SEQ ID NO: 1060597 - DNA, 15 bp, Homo sapiens
tatgctgagataatg

SEQ ID NO: 1060598 - DNA, 15 bp, Homo sapiens
gtatgctgagataat

SEQ ID NO: 1060599 - DNA, 15 bp, Homo sapiens
agtatgctgagataa

SEQ ID NO: 1060600 - DNA, 15 bp, Homo sapiens
aagtatgctgagata

SEQ ID NO: 1060601 - DNA, 15 bp, Homo sapiens
caagtatgctgagat

SEQ ID NO: 1060602 - DNA, 15 bp, Homo sapiens
tcaagtatgctgaga

SEQ ID NO: 1060603 - DNA, 15 bp, Homo sapiens
atcaagtatgctgag

SEQ ID NO: 1060604 - DNA, 15 bp, Homo sapiens
aatcaagtatgctga

SEQ ID NO: 1060605 - DNA, 15 bp, Homo sapiens
gaatcaagtatgctg

SEQ ID NO: 1060606 - DNA, 15 bp, Homo sapiens
tgaatcaagtatgct

SEQ ID NO: 1060607 - DNA, 15 bp, Homo sapiens
ttgaatcaagtatgc

SEQ ID NO: 1060608 - DNA, 15 bp, Homo sapiens
cttgaatcaagtatg

SEQ ID NO: 1060609 - DNA, 15 bp, Homo sapiens
gcttgaatcaagtat

SEQ ID NO: 1060610 - DNA, 15 bp, Homo sapiens
tgcttgaatcaagta

SEQ ID NO: 1060611 - DNA, 15 bp, Homo sapiens
atgcttgaatcaagt

SEQ ID NO: 1060612 - DNA, 15 bp, Homo sapiens
gatgcttgaatcaag

SEQ ID NO: 1060613 - DNA, 15 bp, Homo sapiens
agatgcttgaatcaa

SEQ ID NO: 1060614 - DNA, 15 bp, Homo sapiens
cagatgcttgaatca

SEQ ID NO: 1060615 - DNA, 15 bp, Homo sapiens
tcagatgcttgaatc

SEQ ID NO: 1060616 - DNA, 15 bp, Homo sapiens
gtcagatgcttgaat

SEQ ID NO: 1060617 - DNA, 15 bp, Homo sapiens
tgtcagatgcttgaa

SEQ ID NO: 1060618 - DNA, 15 bp, Homo sapiens
ttgtcagatgcttga

SEQ ID NO: 1060619 - DNA, 15 bp, Homo sapiens
gttgtcagatgcttg

SEQ ID NO: 1060620 - DNA, 15 bp, Homo sapiens
tgttgtcagatgctt

SEQ ID NO: 1060621 - DNA, 15 bp, Homo sapiens
atgttgtcagatgct

SEQ ID NO: 1060622 - DNA, 15 bp, Homo sapiens
gatgttgtcagatgc

SEQ ID NO: 1060623 - DNA, 15 bp, Homo sapiens
agatgttgtcagatg

SEQ ID NO: 1060624 - DNA, 15 bp, Homo sapiens
aagatgttgtcagat

SEQ ID NO: 1060625 - DNA, 15 bp, Homo sapiens
taagatgttgtcaga

SEQ ID NO: 1060626 - DNA, 15 bp, Homo sapiens
ttaagatgttgtcag

SEQ ID NO: 1060627 - DNA, 15 bp, Homo sapiens
cttaagatgttgtca

SEQ ID NO: 1060628 - DNA, 15 bp, Homo sapiens
ccttaagatgttgtc

SEQ ID NO: 1060629 - DNA, 15 bp, Homo sapiens
tccttaagatgttgt

SEQ ID NO: 1060630 - DNA, 15 bp, Homo sapiens
atccttaagatgttg

SEQ ID NO: 1060631 - DNA, 15 bp, Homo sapiens
aatccttaagatgtt

SEQ ID NO: 1060632 - DNA, 15 bp, Homo sapiens
gaatccttaagatgt

SEQ ID NO: 1060633 - DNA, 15 bp, Homo sapiens
agaatccttaagatg

SEQ ID NO: 1060634 - DNA, 15 bp, Homo sapiens
aagaatccttaagat

SEQ ID NO: 1060635 - DNA, 15 bp, Homo sapiens
aaagaatccttaaga

SEQ ID NO: 1060636 - DNA, 15 bp, Homo sapiens
taaagaatccttaag

SEQ ID NO: 1060637 - DNA, 15 bp, Homo sapiens
ttaaagaatccttaa

SEQ ID NO: 1060638 - DNA, 15 bp, Homo sapiens
attaaagaatcctta

SEQ ID NO: 1060639 - DNA, 15 bp, Homo sapiens
tattaaagaatcctt

SEQ ID NO: 1060640 - DNA, 15 bp, Homo sapiens
gtattaaagaatcct

SEQ ID NO: 1060641 - DNA, 15 bp, Homo sapiens
agtattaaagaatcc

SEQ ID NO: 1060642 - DNA, 15 bp, Homo sapiens
gagtattaaagaatc

SEQ ID NO: 1060643 - DNA, 15 bp, Homo sapiens
agagtattaaagaat

SEQ ID NO: 1060644 - DNA, 15 bp, Homo sapiens
gagagtattaaagaa

SEQ ID NO: 1060645 - DNA, 15 bp, Homo sapiens
tgagagtattaaaga

SEQ ID NO: 1060646 - DNA, 15 bp, Homo sapiens
ttgagagtattaaag

SEQ ID NO: 1060647 - DNA, 15 bp, Homo sapiens
attgagagtattaaa

SEQ ID NO: 1060648 - DNA, 15 bp, Homo sapiens
aattgagagtattaa

SEQ ID NO: 1060649 - DNA, 15 bp, Homo sapiens
aaattgagagtatta

SEQ ID NO: 1060650 - DNA, 15 bp, Homo sapiens
taaattgagagtatt

SEQ ID NO: 1060651 - DNA, 15 bp, Homo sapiens
gtaaattgagagtat

SEQ ID NO: 1060652 - DNA, 15 bp, Homo sapiens
ggtaaattgagagta

SEQ ID NO: 1060653 - DNA, 15 bp, Homo sapiens
cggtaaattgagagt

SEQ ID NO: 1060654 - DNA, 15 bp, Homo sapiens
tcggtaaattgagag

SEQ ID NO: 1060655 - DNA, 15 bp, Homo sapiens
ttcggtaaattgaga

SEQ ID NO: 1060656 - DNA, 15 bp, Homo sapiens
cttcggtaaattgag

SEQ ID NO: 1060657 - DNA, 15 bp, Homo sapiens
ccttcggtaaattga

SEQ ID NO: 1060658 - DNA, 15 bp, Homo sapiens
accttcggtaaattg

SEQ ID NO: 1060659 - DNA, 15 bp, Homo sapiens
caccttcggtaaatt

SEQ ID NO: 1060660 - DNA, 15 bp, Homo sapiens
ccaccttcggtaaat

SEQ ID NO: 1060661 - DNA, 15 bp, Homo sapiens
cccaccttcggtaaa

SEQ ID NO: 1060662 - DNA, 15 bp, Homo sapiens
gcccaccttcggtaa

SEQ ID NO: 1060663 - DNA, 15 bp, Homo sapiens
tgcccaccttcggta

SEQ ID NO: 1060664 - DNA, 15 bp, Homo sapiens
gtgcccaccttcggt

SEQ ID NO: 1060665 - DNA, 15 bp, Homo sapiens
agtgcccaccttcgg

SEQ ID NO: 1060666 - DNA, 15 bp, Homo sapiens
cagtgcccaccttcg

SEQ ID NO: 1060667 - DNA, 15 bp, Homo sapiens
ccagtgcccaccttc

SEQ ID NO: 1060668 - DNA, 15 bp, Homo sapiens
accagtgcccacctt

SEQ ID NO: 1060669 - DNA, 15 bp, Homo sapiens
gaccagtgcccacct

SEQ ID NO: 1060670 - DNA, 15 bp, Homo sapiens
agaccagtgcccacc

SEQ ID NO: 1060671 - DNA, 15 bp, Homo sapiens
gagaccagtgcccac

SEQ ID NO: 1060672 - DNA, 15 bp, Homo sapiens
ggagaccagtgccca

SEQ ID NO: 1060673 - DNA, 15 bp, Homo sapiens
aggagaccagtgccc

SEQ ID NO: 1060674 - DNA, 15 bp, Homo sapiens
taggagaccagtgcc

SEQ ID NO: 1060675 - DNA, 15 bp, Homo sapiens
ataggagaccagtgc

SEQ ID NO: 1060676 - DNA, 15 bp, Homo sapiens
aataggagaccagtg

SEQ ID NO: 1060677 - DNA, 15 bp, Homo sapiens
aaataggagaccagt

SEQ ID NO: 1060678 - DNA, 15 bp, Homo sapiens
gaaataggagaccag

SEQ ID NO: 1060679 - DNA, 15 bp, Homo sapiens
tgaaataggagacca

SEQ ID NO: 1060680 - DNA, 15 bp, Homo sapiens
ctgaaataggagacc

SEQ ID NO: 1060681 - DNA, 15 bp, Homo sapiens
gctgaaataggagac

SEQ ID NO: 1060682 - DNA, 15 bp, Homo sapiens
tgctgaaataggaga

SEQ ID NO: 1060683 - DNA, 15 bp, Homo sapiens
atgctgaaataggag

SEQ ID NO: 1060684 - DNA, 15 bp, Homo sapiens
aatgctgaaatagga

SEQ ID NO: 1060685 - DNA, 15 bp, Homo sapiens
taatgctgaaatagg

SEQ ID NO: 1060686 - DNA, 15 bp, Homo sapiens
ataatgctgaaatag

SEQ ID NO: 1060687 - DNA, 15 bp, Homo sapiens
tataatgctgaaata

SEQ ID NO: 1060688 - DNA, 15 bp, Homo sapiens
ctataatgctgaaat

SEQ ID NO: 1060689 - DNA, 15 bp, Homo sapiens
gctataatgctgaaa

SEQ ID NO: 1060690 - DNA, 15 bp, Homo sapiens
tgctataatgctgaa

SEQ ID NO: 1060691 - DNA, 15 bp, Homo sapiens
atgctataatgctga

SEQ ID NO: 1060692 - DNA, 15 bp, Homo sapiens
tatgctataatgctg

SEQ ID NO: 1060693 - DNA, 15 bp, Homo sapiens
gtatgctataatgct

SEQ ID NO: 1060694 - DNA, 15 bp, Homo sapiens
agtatgctataatgc

SEQ ID NO: 1060695 - DNA, 15 bp, Homo sapiens
cagtatgctataatg

SEQ ID NO: 1060696 - DNA, 15 bp, Homo sapiens
tcagtatgctataat

SEQ ID NO: 1060697 - DNA, 15 bp, Homo sapiens
atcagtatgctataa

SEQ ID NO: 1060698 - DNA, 15 bp, Homo sapiens
aatcagtatgctata

SEQ ID NO: 1060699 - DNA, 15 bp, Homo sapiens
taatcagtatgctat

SEQ ID NO: 1060700 - DNA, 15 bp, Homo sapiens
ttaatcagtatgcta

SEQ ID NO: 1060701 - DNA, 15 bp, Homo sapiens
tttaatcagtatgct

SEQ ID NO: 1060702 - DNA, 15 bp, Homo sapiens
ttttaatcagtatgc

SEQ ID NO: 1060703 - DNA, 15 bp, Homo sapiens
tttttaatcagtatg

SEQ ID NO: 1060704 - DNA, 15 bp, Homo sapiens
gtttttaatcagtat

SEQ ID NO: 1060705 - DNA, 15 bp, Homo sapiens
agtttttaatcagta

SEQ ID NO: 1060706 - DNA, 15 bp, Homo sapiens
aagtttttaatcagt

SEQ ID NO: 1060707 - DNA, 15 bp, Homo sapiens
caagtttttaatcag

SEQ ID NO: 1060708 - DNA, 15 bp, Homo sapiens
ccaagtttttaatca

SEQ ID NO: 1060709 - DNA, 15 bp, Homo sapiens
cccaagtttttaatc

SEQ ID NO: 1060710 - DNA, 15 bp, Homo sapiens
gcccaagtttttaat

SEQ ID NO: 1060711 - DNA, 15 bp, Homo sapiens
agcccaagtttttaa

SEQ ID NO: 1060712 - DNA, 15 bp, Homo sapiens
gagcccaagttttta

SEQ ID NO: 1060713 - DNA, 15 bp, Homo sapiens
agagcccaagttttt

SEQ ID NO: 1060714 - DNA, 15 bp, Homo sapiens
cagagcccaagtttt

SEQ ID NO: 1060715 - DNA, 15 bp, Homo sapiens
ccagagcccaagttt

SEQ ID NO: 1060716 - DNA, 15 bp, Homo sapiens
tccagagcccaagtt

SEQ ID NO: 1060717 - DNA, 15 bp, Homo sapiens
gtccagagcccaagt

SEQ ID NO: 1060718 - DNA, 15 bp, Homo sapiens
agtccagagcccaag

SEQ ID NO: 1060719 - DNA, 15 bp, Homo sapiens
gagtccagagcccaa

SEQ ID NO: 1060720 - DNA, 15 bp, Homo sapiens
tgagtccagagccca

SEQ ID NO: 1060721 - DNA, 15 bp, Homo sapiens
ctgagtccagagccc

SEQ ID NO: 1060722 - DNA, 15 bp, Homo sapiens
tctgagtccagagcc

SEQ ID NO: 1060723 - DNA, 15 bp, Homo sapiens
gtctgagtccagagc

SEQ ID NO: 1060724 - DNA, 15 bp, Homo sapiens
agtctgagtccagag

SEQ ID NO: 1060725 - DNA, 15 bp, Homo sapiens
cagtctgagtccaga

SEQ ID NO: 1060726 - DNA, 15 bp, Homo sapiens
acagtctgagtccag

SEQ ID NO: 1060727 - DNA, 15 bp, Homo sapiens
cacagtctgagtcca

SEQ ID NO: 1060728 - DNA, 15 bp, Homo sapiens
tcacagtctgagtcc

SEQ ID NO: 1060729 - DNA, 15 bp, Homo sapiens
gtcacagtctgagtc

SEQ ID NO: 1060730 - DNA, 15 bp, Homo sapiens
ggtcacagtctgagt

SEQ ID NO: 1060731 - DNA, 15 bp, Homo sapiens
aggtcacagtctgag

SEQ ID NO: 1060732 - DNA, 15 bp, Homo sapiens
caggtcacagtctga

SEQ ID NO: 1060733 - DNA, 15 bp, Homo sapiens
ccaggtcacagtctg

SEQ ID NO: 1060734 - DNA, 15 bp, Homo sapiens
tccaggtcacagtct

SEQ ID NO: 1060735 - DNA, 15 bp, Homo sapiens
gtccaggtcacagtc

SEQ ID NO: 1060736 - DNA, 15 bp, Homo sapiens
tgtccaggtcacagt

SEQ ID NO: 1060737 - DNA, 15 bp, Homo sapiens
ttgtccaggtcacag

SEQ ID NO: 1060738 - DNA, 15 bp, Homo sapiens
cttgtccaggtcaca

SEQ ID NO: 1060739 - DNA, 15 bp, Homo sapiens
ccttgtccaggtcac

SEQ ID NO: 1060740 - DNA, 15 bp, Homo sapiens
accttgtccaggtca

SEQ ID NO: 1060741 - DNA, 15 bp, Homo sapiens
caccttgtccaggtc

SEQ ID NO: 1060742 - DNA, 15 bp, Homo sapiens
gcaccttgtccaggt

SEQ ID NO: 1060743 - DNA, 15 bp, Homo sapiens
agcaccttgtccagg

SEQ ID NO: 1060744 - DNA, 15 bp, Homo sapiens
aagcaccttgtccag

SEQ ID NO: 1060745 - DNA, 15 bp, Homo sapiens
taagcaccttgtcca

SEQ ID NO: 1060746 - DNA, 15 bp, Homo sapiens
gtaagcaccttgtcc

SEQ ID NO: 1060747 - DNA, 15 bp, Homo sapiens
tgtaagcaccttgtc

SEQ ID NO: 1060748 - DNA, 15 bp, Homo sapiens
atgtaagcaccttgt

SEQ ID NO: 1060749 - DNA, 15 bp, Homo sapiens
aatgtaagcaccttg

SEQ ID NO: 1060750 - DNA, 15 bp, Homo sapiens
aaatgtaagcacctt

SEQ ID NO: 1060751 - DNA, 15 bp, Homo sapiens
aaaatgtaagcacct

SEQ ID NO: 1060752 - DNA, 15 bp, Homo sapiens
aaaaatgtaagcacc

SEQ ID NO: 1060753 - DNA, 15 bp, Homo sapiens
gaaaaatgtaagcac

SEQ ID NO: 1060754 - DNA, 15 bp, Homo sapiens
agaaaaatgtaagca

SEQ ID NO: 1060755 - DNA, 15 bp, Homo sapiens
cagaaaaatgtaagc

SEQ ID NO: 1060756 - DNA, 15 bp, Homo sapiens
gcagaaaaatgtaag

SEQ ID NO: 1060757 - DNA, 15 bp, Homo sapiens
ggcagaaaaatgtaa

SEQ ID NO: 1060758 - DNA, 15 bp, Homo sapiens
aggcagaaaaatgta

SEQ ID NO: 1060759 - DNA, 15 bp, Homo sapiens
gaggcagaaaaatgt

SEQ ID NO: 1060760 - DNA, 15 bp, Homo sapiens
tgaggcagaaaaatg

SEQ ID NO: 1060761 - DNA, 15 bp, Homo sapiens
ctgaggcagaaaaat

SEQ ID NO: 1060762 - DNA, 15 bp, Homo sapiens
actgaggcagaaaaa

SEQ ID NO: 1060763 - DNA, 15 bp, Homo sapiens
aactgaggcagaaaa

SEQ ID NO: 1060764 - DNA, 15 bp, Homo sapiens
aaactgaggcagaaa

SEQ ID NO: 1060765 - DNA, 15 bp, Homo sapiens
aaaactgaggcagaa

SEQ ID NO: 1060766 - DNA, 15 bp, Homo sapiens
gaaaactgaggcaga

SEQ ID NO: 1060767 - DNA, 15 bp, Homo sapiens
agaaaactgaggcag

SEQ ID NO: 1060768 - DNA, 15 bp, Homo sapiens
gagaaaactgaggca

SEQ ID NO: 1060769 - DNA, 15 bp, Homo sapiens
catgagaaaactgag

SEQ ID NO: 1060770 - DNA, 15 bp, Homo sapiens
acatgagaaaactga

SEQ ID NO: 1060771 - DNA, 15 bp, Homo sapiens
tacatgagaaaactg

SEQ ID NO: 1060772 - DNA, 15 bp, Homo sapiens
atacatgagaaaact

SEQ ID NO: 1060773 - DNA, 15 bp, Homo sapiens
tatacatgagaaaac

SEQ ID NO: 1060774 - DNA, 15 bp, Homo sapiens
ttatacatgagaaaa

SEQ ID NO: 1060775 - DNA, 15 bp, Homo sapiens
tttatacatgagaaa

SEQ ID NO: 1060776 - DNA, 15 bp, Homo sapiens
atttatacatgagaa

SEQ ID NO: 1060777 - DNA, 15 bp, Homo sapiens
catttatacatgaga

SEQ ID NO: 1060778 - DNA, 15 bp, Homo sapiens
tcatttatacatgag

SEQ ID NO: 1060779 - DNA, 15 bp, Homo sapiens
ctcatttatacatga

SEQ ID NO: 1060780 - DNA, 15 bp, Homo sapiens
cctcatttatacatg

SEQ ID NO: 1060781 - DNA, 15 bp, Homo sapiens
tcctcatttatacat

SEQ ID NO: 1060782 - DNA, 15 bp, Homo sapiens
atcctcatttataca

SEQ ID NO: 1060783 - DNA, 15 bp, Homo sapiens
tatcctcatttatac

SEQ ID NO: 1060784 - DNA, 15 bp, Homo sapiens
ttatcctcatttata

SEQ ID NO: 1060785 - DNA, 15 bp, Homo sapiens
attatcctcatttat

SEQ ID NO: 1060786 - DNA, 15 bp, Homo sapiens
aattatcctcattta

SEQ ID NO: 1060787 - DNA, 15 bp, Homo sapiens
caattatcctcattt

SEQ ID NO: 1060788 - DNA, 15 bp, Homo sapiens
acaattatcctcatt

SEQ ID NO: 1060789 - DNA, 15 bp, Homo sapiens
tacaattatcctcat

SEQ ID NO: 1060790 - DNA, 15 bp, Homo sapiens
ctacaattatcctca

SEQ ID NO: 1060791 - DNA, 15 bp, Homo sapiens
actacaattatcctc

SEQ ID NO: 1060792 - DNA, 15 bp, Homo sapiens
cactacaattatcct

SEQ ID NO: 1060793 - DNA, 15 bp, Homo sapiens
gcactacaattatcc

SEQ ID NO: 1060794 - DNA, 15 bp, Homo sapiens
ggcactacaattatc

SEQ ID NO: 1060795 - DNA, 15 bp, Homo sapiens
gggcactacaattat

SEQ ID NO: 1060796 - DNA, 15 bp, Homo sapiens
ggggcactacaatta

SEQ ID NO: 1060797 - DNA, 15 bp, Homo sapiens
aggggcactacaatt

SEQ ID NO: 1060798 - DNA, 15 bp, Homo sapiens
aaggggcactacaat

SEQ ID NO: 1060799 - DNA, 15 bp, Homo sapiens
gaaggggcactacaa

SEQ ID NO: 1060800 - DNA, 15 bp, Homo sapiens
tgaaggggcactaca

SEQ ID NO: 1060801 - DNA, 15 bp, Homo sapiens
ctgaaggggcactac

SEQ ID NO: 1060802 - DNA, 15 bp, Homo sapiens
cctgaaggggcacta

SEQ ID NO: 1060803 - DNA, 15 bp, Homo sapiens
ccctgaaggggcact

SEQ ID NO: 1060804 - DNA, 15 bp, Homo sapiens
tccctgaaggggcac

SEQ ID NO: 1060805 - DNA, 15 bp, Homo sapiens
atccctgaaggggca

SEQ ID NO: 1060806 - DNA, 15 bp, Homo sapiens
tatccctgaaggggc

SEQ ID NO: 1060807 - DNA, 15 bp, Homo sapiens
ttatccctgaagggg

SEQ ID NO: 1060808 - DNA, 15 bp, Homo sapiens
attatccctgaaggg

SEQ ID NO: 1060809 - DNA, 15 bp, Homo sapiens
cattatccctgaagg

SEQ ID NO: 1060810 - DNA, 15 bp, Homo sapiens
acattatccctgaag

SEQ ID NO: 1060811 - DNA, 15 bp, Homo sapiens
tacattatccctgaa

SEQ ID NO: 1060812 - DNA, 15 bp, Homo sapiens
ttacattatccctga

SEQ ID NO: 1060813 - DNA, 15 bp, Homo sapiens
tttacattatccctg

SEQ ID NO: 1060814 - DNA, 15 bp, Homo sapiens
ttttacattatccct

SEQ ID NO: 1060815 - DNA, 15 bp, Homo sapiens
gttttacattatccc

SEQ ID NO: 1060816 - DNA, 15 bp, Homo sapiens
agttttacattatcc

SEQ ID NO: 1060817 - DNA, 15 bp, Homo sapiens
gagttttacattatc

SEQ ID NO: 1060818 - DNA, 15 bp, Homo sapiens
tgagttttacattat

SEQ ID NO: 1060819 - DNA, 15 bp, Homo sapiens
atgagttttacatta

SEQ ID NO: 1060820 - DNA, 15 bp, Homo sapiens
tatgagttttacatt

SEQ ID NO: 1060821 - DNA, 15 bp, Homo sapiens
ttatgagttttacat

SEQ ID NO: 1060822 - DNA, 15 bp, Homo sapiens
tttatgagttttaca

SEQ ID NO: 1060823 - DNA, 15 bp, Homo sapiens
atttatgagttttac

SEQ ID NO: 1060824 - DNA, 15 bp, Homo sapiens
gatttatgagtttta

SEQ ID NO: 1060825 - DNA, 15 bp, Homo sapiens
tgatttatgagtttt

SEQ ID NO: 1060826 - DNA, 15 bp, Homo sapiens
ctgatttatgagttt

SEQ ID NO: 1060827 - DNA, 15 bp, Homo sapiens
gctgatttatgagtt

SEQ ID NO: 1060828 - DNA, 15 bp, Homo sapiens
tgctgatttatgagt

SEQ ID NO: 1060829 - DNA, 15 bp, Homo sapiens
gtgctgatttatgag

SEQ ID NO: 1060830 - DNA, 15 bp, Homo sapiens
tgtgctgatttatga

SEQ ID NO: 1060831 - DNA, 15 bp, Homo sapiens
ctgtgctgatttatg

SEQ ID NO: 1060832 - DNA, 15 bp, Homo sapiens
actgtgctgatttat

SEQ ID NO: 1060833 - DNA, 15 bp, Homo sapiens
aactgtgctgattta

SEQ ID NO: 1060834 - DNA, 15 bp, Homo sapiens
aaactgtgctgattt

SEQ ID NO: 1060835 - DNA, 15 bp, Homo sapiens
gaaactgtgctgatt

SEQ ID NO: 1060836 - DNA, 15 bp, Homo sapiens
agaaactgtgctgat

SEQ ID NO: 1060837 - DNA, 15 bp, Homo sapiens
cagaaactgtgctga

SEQ ID NO: 1060838 - DNA, 15 bp, Homo sapiens
tcagaaactgtgctg

SEQ ID NO: 1060839 - DNA, 15 bp, Homo sapiens
gtcagaaactgtgct

SEQ ID NO: 1060840 - DNA, 15 bp, Homo sapiens
tgtcagaaactgtgc

SEQ ID NO: 1060841 - DNA, 15 bp, Homo sapiens
gtgtcagaaactgtg

SEQ ID NO: 1060842 - DNA, 15 bp, Homo sapiens
tgtgtcagaaactgt

SEQ ID NO: 1060843 - DNA, 15 bp, Homo sapiens
gtgtgtcagaaactg

SEQ ID NO: 1060844 - DNA, 15 bp, Homo sapiens
ggtgtgtcagaaact

SEQ ID NO: 1060845 - DNA, 15 bp, Homo sapiens
tggtgtgtcagaaac

SEQ ID NO: 1060846 - DNA, 15 bp, Homo sapiens
ttggtgtgtcagaaa

SEQ ID NO: 1060847 - DNA, 15 bp, Homo sapiens
attggtgtgtcagaa

SEQ ID NO: 1060848 - DNA, 15 bp, Homo sapiens
tattggtgtgtcaga

SEQ ID NO: 1060849 - DNA, 15 bp, Homo sapiens
ttattggtgtgtcag

SEQ ID NO: 1060850 - DNA, 15 bp, Homo sapiens
cttattggtgtgtca

SEQ ID NO: 1060851 - DNA, 15 bp, Homo sapiens
acttattggtgtgtc

SEQ ID NO: 1060852 - DNA, 15 bp, Homo sapiens
cacttattggtgtgt

SEQ ID NO: 1060853 - DNA, 15 bp, Homo sapiens
gcacttattggtgtg

SEQ ID NO: 1060854 - DNA, 15 bp, Homo sapiens
agcacttattggtgt

SEQ ID NO: 1060855 - DNA, 15 bp, Homo sapiens
gagcacttattggtg

SEQ ID NO: 1060856 - DNA, 15 bp, Homo sapiens
tgagcacttattggt

SEQ ID NO: 1060857 - DNA, 15 bp, Homo sapiens
ttgagcacttattgg

SEQ ID NO: 1060858 - DNA, 15 bp, Homo sapiens
attgagcacttattg

SEQ ID NO: 1060859 - DNA, 15 bp, Homo sapiens
tattgagcacttatt

SEQ ID NO: 1060860 - DNA, 15 bp, Homo sapiens
ttattgagcacttat

SEQ ID NO: 1060861 - DNA, 15 bp, Homo sapiens
tttattgagcactta

SEQ ID NO: 1060862 - DNA, 15 bp, Homo sapiens
ttttattgagcactt

SEQ ID NO: 1060863 - DNA, 15 bp, Homo sapiens
cttttattgagcact

SEQ ID NO: 1060864 - DNA, 15 bp, Homo sapiens
acttttattgagcac

SEQ ID NO: 1060865 - DNA, 15 bp, Homo sapiens
aacttttattgagca

SEQ ID NO: 1060866 - DNA, 15 bp, Homo sapiens
taacttttattgagc

SEQ ID NO: 1060867 - DNA, 15 bp, Homo sapiens
ataacttttattgag

SEQ ID NO: 1060868 - DNA, 15 bp, Homo sapiens
tataacttttattga

SEQ ID NO: 1060869 - DNA, 15 bp, Homo sapiens
ttataacttttattg

SEQ ID NO: 1060870 - DNA, 15 bp, Homo sapiens
attataacttttatt

SEQ ID NO: 1060871 - DNA, 15 bp, Homo sapiens
tattataacttttat

SEQ ID NO: 1060872 - DNA, 15 bp, Homo sapiens
ttattataactttta

SEQ ID NO: 1060873 - DNA, 15 bp, Homo sapiens
cttattataactttt

SEQ ID NO: 1060874 - DNA, 15 bp, Homo sapiens
ccttattataacttt

SEQ ID NO: 1060875 - DNA, 15 bp, Homo sapiens
tccttattataactt

SEQ ID NO: 1060876 - DNA, 15 bp, Homo sapiens
atccttattataact

SEQ ID NO: 1060877 - DNA, 15 bp, Homo sapiens
tatccttattataac

SEQ ID NO: 1060878 - DNA, 15 bp, Homo sapiens
ctatccttattataa

SEQ ID NO: 1060879 - DNA, 15 bp, Homo sapiens
actatccttattata

SEQ ID NO: 1060880 - DNA, 15 bp, Homo sapiens
tactatccttattat

SEQ ID NO: 1060881 - DNA, 15 bp, Homo sapiens
ttactatccttatta

SEQ ID NO: 1060882 - DNA, 15 bp, Homo sapiens
tttactatccttatt

SEQ ID NO: 1060883 - DNA, 15 bp, Homo sapiens
atttactatccttat

SEQ ID NO: 1060884 - DNA, 15 bp, Homo sapiens
aatttactatcctta

SEQ ID NO: 1060885 - DNA, 15 bp, Homo sapiens
caatttactatcctt

SEQ ID NO: 1060886 - DNA, 15 bp, Homo sapiens
acaatttactatcct

SEQ ID NO: 1060887 - DNA, 15 bp, Homo sapiens
aacaatttactatcc

SEQ ID NO: 1060888 - DNA, 15 bp, Homo sapiens
taacaatttactatc

SEQ ID NO: 1060889 - DNA, 15 bp, Homo sapiens
ataacaatttactat

SEQ ID NO: 1060890 - DNA, 15 bp, Homo sapiens
aataacaatttacta

SEQ ID NO: 1060891 - DNA, 15 bp, Homo sapiens
gaataacaatttact

SEQ ID NO: 1060892 - DNA, 15 bp, Homo sapiens
agaataacaatttac

SEQ ID NO: 1060893 - DNA, 15 bp, Homo sapiens
tagaataacaattta

SEQ ID NO: 1060894 - DNA, 15 bp, Homo sapiens
ttagaataacaattt

SEQ ID NO: 1060895 - DNA, 15 bp, Homo sapiens
attagaataacaatt

SEQ ID NO: 1060896 - DNA, 15 bp, Homo sapiens
aattagaataacaat

SEQ ID NO: 1060897 - DNA, 15 bp, Homo sapiens
aaattagaataacaa

SEQ ID NO: 1060898 - DNA, 15 bp, Homo sapiens
taaattagaataaca

SEQ ID NO: 1060899 - DNA, 15 bp, Homo sapiens
ataaattagaataac

SEQ ID NO: 1060900 - DNA, 15 bp, Homo sapiens
aataaattagaataa

SEQ ID NO: 1060901 - DNA, 15 bp, Homo sapiens
taataaattagaata

SEQ ID NO: 1060902 - DNA, 15 bp, Homo sapiens
ataataaattagaat

SEQ ID NO: 1060903 - DNA, 15 bp, Homo sapiens
tataataaattagaa

SEQ ID NO: 1060904 - DNA, 15 bp, Homo sapiens
ctataataaattaga

SEQ ID NO: 1060905 - DNA, 15 bp, Homo sapiens
actataataaattag

SEQ ID NO: 1060906 - DNA, 15 bp, Homo sapiens
tactataataaatta

SEQ ID NO: 1060907 - DNA, 15 bp, Homo sapiens
gtactataataaatt

SEQ ID NO: 1060908 - DNA, 15 bp, Homo sapiens
tgtactataataaat

SEQ ID NO: 1060909 - DNA, 15 bp, Homo sapiens
ttgtactataataaa

SEQ ID NO: 1060910 - DNA, 15 bp, Homo sapiens
tttgtactataataa

SEQ ID NO: 1060911 - DNA, 15 bp, Homo sapiens
atttgtactataata

SEQ ID NO: 1060912 - DNA, 15 bp, Homo sapiens
aatttgtactataat

SEQ ID NO: 1060913 - DNA, 15 bp, Homo sapiens
gaatttgtactataa

SEQ ID NO: 1060914 - DNA, 15 bp, Homo sapiens
agaatttgtactata

SEQ ID NO: 1060915 - DNA, 15 bp, Homo sapiens
tagaatttgtactat

SEQ ID NO: 1060916 - DNA, 15 bp, Homo sapiens
ttagaatttgtacta

SEQ ID NO: 1060917 - DNA, 15 bp, Homo sapiens
attagaatttgtact

SEQ ID NO: 1060918 - DNA, 15 bp, Homo sapiens
tattagaatttgtac

SEQ ID NO: 1060919 - DNA, 15 bp, Homo sapiens
ctattagaatttgta

SEQ ID NO: 1060920 - DNA, 15 bp, Homo sapiens
actattagaatttgt

SEQ ID NO: 1060921 - DNA, 15 bp, Homo sapiens
tactattagaatttg

SEQ ID NO: 1060922 - DNA, 15 bp, Homo sapiens
ttactattagaattt

SEQ ID NO: 1060923 - DNA, 15 bp, Homo sapiens
attactattagaatt

SEQ ID NO: 1060924 - DNA, 15 bp, Homo sapiens
aattactattagaat

SEQ ID NO: 1060925 - DNA, 15 bp, Homo sapiens
taattactattagaa

SEQ ID NO: 1060926 - DNA, 15 bp, Homo sapiens
ttaattactattaga

SEQ ID NO: 1060927 - DNA, 15 bp, Homo sapiens
gttaattactattag

SEQ ID NO: 1060928 - DNA, 15 bp, Homo sapiens
tgttaattactatta

SEQ ID NO: 1060929 - DNA, 15 bp, Homo sapiens
atgttaattactatt

SEQ ID NO: 1060930 - DNA, 15 bp, Homo sapiens
aatgttaattactat

SEQ ID NO: 1060931 - DNA, 15 bp, Homo sapiens
taatgttaattacta

SEQ ID NO: 1060932 - DNA, 15 bp, Homo sapiens
ataatgttaattact

SEQ ID NO: 1060933 - DNA, 15 bp, Homo sapiens
aataatgttaattac

SEQ ID NO: 1060934 - DNA, 15 bp, Homo sapiens
taataatgttaatta

SEQ ID NO: 1060935 - DNA, 15 bp, Homo sapiens
ataataatgttaatt

SEQ ID NO: 1060936 - DNA, 15 bp, Homo sapiens
aataataatgttaat

SEQ ID NO: 1060937 - DNA, 15 bp, Homo sapiens
caataataatgttaa

SEQ ID NO: 1060938 - DNA, 15 bp, Homo sapiens
tcaataataatgtta

SEQ ID NO: 1060939 - DNA, 15 bp, Homo sapiens
ttcaataataatgtt

SEQ ID NO: 1060940 - DNA, 15 bp, Homo sapiens
tttcaataataatgt

SEQ ID NO: 1060941 - DNA, 15 bp, Homo sapiens
ctttcaataataatg

SEQ ID NO: 1060942 - DNA, 15 bp, Homo sapiens
gctttcaataataat

SEQ ID NO: 1060943 - DNA, 15 bp, Homo sapiens
agctttcaataataa

SEQ ID NO: 1060944 - DNA, 15 bp, Homo sapiens
tagctttcaataata

SEQ ID NO: 1060945 - DNA, 15 bp, Homo sapiens
ttagctttcaataat

SEQ ID NO: 1060946 - DNA, 15 bp, Homo sapiens
attagctttcaataa

SEQ ID NO: 1060947 - DNA, 15 bp, Homo sapiens
aattagctttcaata

SEQ ID NO: 1060948 - DNA, 15 bp, Homo sapiens
taattagctttcaat

SEQ ID NO: 1060949 - DNA, 15 bp, Homo sapiens
gtaattagctttcaa

SEQ ID NO: 1060950 - DNA, 15 bp, Homo sapiens
tgtaattagctttca

SEQ ID NO: 1060951 - DNA, 15 bp, Homo sapiens
ttgtaattagctttc

SEQ ID NO: 1060952 - DNA, 15 bp, Homo sapiens
attgtaattagcttt

SEQ ID NO: 1060953 - DNA, 15 bp, Homo sapiens
aattgtaattagctt

SEQ ID NO: 1060954 - DNA, 15 bp, Homo sapiens
aaattgtaattagct

SEQ ID NO: 1060955 - DNA, 15 bp, Homo sapiens
aaaattgtaattagc

SEQ ID NO: 1060956 - DNA, 15 bp, Homo sapiens
aaaaattgtaattag

SEQ ID NO: 1060957 - DNA, 15 bp, Homo sapiens
aaaaaattgtaatta

SEQ ID NO: 1060958 - DNA, 15 bp, Homo sapiens
aaaaaaattgtaatt

SEQ ID NO: 1060959 - DNA, 15 bp, Homo sapiens
aaaaaaaattgtaat

SEQ ID NO: 1060960 - DNA, 15 bp, Homo sapiens
aaaaaaaaattgtaa

SEQ ID NO: 1060961 - DNA, 15 bp, Homo sapiens
aaaaaaaaaattgta

SEQ ID NO: 1060962 - DNA, 15 bp, Homo sapiens
cgcactccagcctga

SEQ ID NO: 1060963 - DNA, 15 bp, Homo sapiens
atacaaaaaaaaatt

SEQ ID NO: 1060964 - DNA, 15 bp, Homo sapiens
aatacaaaaaaaaat

SEQ ID NO: 1060965 - DNA, 15 bp, Homo sapiens
cgtggtgaaaccccg

SEQ ID NO: 1060966 - DNA, 15 bp, Homo sapiens
gtcgagaccatcctg

SEQ ID NO: 1060967 - DNA, 15 bp, Homo sapiens
ggtcgagaccatcct

SEQ ID NO: 1060968 - DNA, 15 bp, Homo sapiens
aggtcgagaccatcc

SEQ ID NO: 1060969 - DNA, 15 bp, Homo sapiens
gaggtcgagaccatc

SEQ ID NO: 1060970 - DNA, 15 bp, Homo sapiens
ggaggtcgagaccat

SEQ ID NO: 1060971 - DNA, 15 bp, Homo sapiens
caggaggtcgagacc

SEQ ID NO: 1060972 - DNA, 15 bp, Homo sapiens
tcaggaggtcgagac

SEQ ID NO: 1060973 - DNA, 15 bp, Homo sapiens
gtcaggaggtcgaga

SEQ ID NO: 1060974 - DNA, 15 bp, Homo sapiens
ggtcaggaggtcgag

SEQ ID NO: 1060975 - DNA, 15 bp, Homo sapiens
aggtcaggaggtcga

SEQ ID NO: 1060976 - DNA, 15 bp, Homo sapiens
gaggtcaggaggtcg

SEQ ID NO: 1060977 - DNA, 15 bp, Homo sapiens
tgaggtcaggaggtc

SEQ ID NO: 1060978 - DNA, 15 bp, Homo sapiens
atgaggtcaggaggt

SEQ ID NO: 1060979 - DNA, 15 bp, Homo sapiens
catgaggtcaggagg

SEQ ID NO: 1060980 - DNA, 15 bp, Homo sapiens
cgggcagatcatgag

SEQ ID NO: 1060981 - DNA, 15 bp, Homo sapiens
gcgggcagatcatga

SEQ ID NO: 1060982 - DNA, 15 bp, Homo sapiens
ggcgggcagatcatg

SEQ ID NO: 1060983 - DNA, 15 bp, Homo sapiens
aggcgggcagatcat

SEQ ID NO: 1060984 - DNA, 15 bp, Homo sapiens
cgaggcgggcagatc

SEQ ID NO: 1060985 - DNA, 15 bp, Homo sapiens
ccgaggcgggcagat

SEQ ID NO: 1060986 - DNA, 15 bp, Homo sapiens
gccgaggcgggcaga

SEQ ID NO: 1060987 - DNA, 15 bp, Homo sapiens
ggccgaggcgggcag

SEQ ID NO: 1060988 - DNA, 15 bp, Homo sapiens
aggccgaggcgggca

SEQ ID NO: 1060989 - DNA, 15 bp, Homo sapiens
aggaggccgaggcgg

SEQ ID NO: 1060990 - DNA, 15 bp, Homo sapiens
taggaggccgaggcg

SEQ ID NO: 1060991 - DNA, 15 bp, Homo sapiens
ttaggaggccgaggc

SEQ ID NO: 1060992 - DNA, 15 bp, Homo sapiens
attaggaggccgagg

SEQ ID NO: 1060993 - DNA, 15 bp, Homo sapiens
aattaggaggccgag

SEQ ID NO: 1060994 - DNA, 15 bp, Homo sapiens
taattaggaggccga

SEQ ID NO: 1060995 - DNA, 15 bp, Homo sapiens
gtaattaggaggccg

SEQ ID NO: 1060996 - DNA, 15 bp, Homo sapiens
tgtaattaggaggcc

SEQ ID NO: 1060997 - DNA, 15 bp, Homo sapiens
ctgtaattaggaggc

SEQ ID NO: 1060998 - DNA, 15 bp, Homo sapiens
actgtaattaggagg

SEQ ID NO: 1060999 - DNA, 15 bp, Homo sapiens
tactgtaattaggag

SEQ ID NO: 1061000 - DNA, 15 bp, Homo sapiens
atactgtaattagga

SEQ ID NO: 1061001 - DNA, 15 bp, Homo sapiens
gatactgtaattagg

SEQ ID NO: 1061002 - DNA, 15 bp, Homo sapiens
ggatactgtaattag

SEQ ID NO: 1061003 - DNA, 15 bp, Homo sapiens
gggatactgtaatta

SEQ ID NO: 1061004 - DNA, 15 bp, Homo sapiens
cgggatactgtaatt

SEQ ID NO: 1061005 - DNA, 15 bp, Homo sapiens
gcgggatactgtaat

SEQ ID NO: 1061006 - DNA, 15 bp, Homo sapiens
agcgggatactgtaa

SEQ ID NO: 1061007 - DNA, 15 bp, Homo sapiens
tagcgggatactgta

SEQ ID NO: 1061008 - DNA, 15 bp, Homo sapiens
ttagcgggatactgt

SEQ ID NO: 1061009 - DNA, 15 bp, Homo sapiens
attagcgggatactg

SEQ ID NO: 1061010 - DNA, 15 bp, Homo sapiens
aattagcgggatact

SEQ ID NO: 1061011 - DNA, 15 bp, Homo sapiens
taattagcgggatac

SEQ ID NO: 1061012 - DNA, 15 bp, Homo sapiens
gtaattagcgggata

SEQ ID NO: 1061013 - DNA, 15 bp, Homo sapiens
tgtaattagcgggat

SEQ ID NO: 1061014 - DNA, 15 bp, Homo sapiens
ctgtaattagcggga

SEQ ID NO: 1061015 - DNA, 15 bp, Homo sapiens
actgtaattagcggg

SEQ ID NO: 1061016 - DNA, 15 bp, Homo sapiens
tactgtaattagcgg

SEQ ID NO: 1061017 - DNA, 15 bp, Homo sapiens
atactgtaattagcg

SEQ ID NO: 1061018 - DNA, 15 bp, Homo sapiens
aatactgtaattagc

SEQ ID NO: 1061019 - DNA, 15 bp, Homo sapiens
aaatactgtaattag

SEQ ID NO: 1061020 - DNA, 15 bp, Homo sapiens
aaaatactgtaatta

SEQ ID NO: 1061021 - DNA, 15 bp, Homo sapiens
aaaaatactgtaatt

SEQ ID NO: 1061022 - DNA, 15 bp, Homo sapiens
caaaaatactgtaat

SEQ ID NO: 1061023 - DNA, 15 bp, Homo sapiens
tcaaaaatactgtaa

SEQ ID NO: 1061024 - DNA, 15 bp, Homo sapiens
ctcaaaaatactgta

SEQ ID NO: 1061025 - DNA, 15 bp, Homo sapiens
cctcaaaaatactgt

SEQ ID NO: 1061026 - DNA, 15 bp, Homo sapiens
ccctcaaaaatactg

SEQ ID NO: 1061027 - DNA, 15 bp, Homo sapiens
accctcaaaaatact

SEQ ID NO: 1061028 - DNA, 15 bp, Homo sapiens
aaccctcaaaaatac

SEQ ID NO: 1061029 - DNA, 15 bp, Homo sapiens
aaaccctcaaaaata

SEQ ID NO: 1061030 - DNA, 15 bp, Homo sapiens
taaaccctcaaaaat

SEQ ID NO: 1061031 - DNA, 15 bp, Homo sapiens
gtaaaccctcaaaaa

SEQ ID NO: 1061032 - DNA, 15 bp, Homo sapiens
ggtaaaccctcaaaa

SEQ ID NO: 1061033 - DNA, 15 bp, Homo sapiens
tggtaaaccctcaaa

SEQ ID NO: 1061034 - DNA, 15 bp, Homo sapiens
ctggtaaaccctcaa

SEQ ID NO: 1061035 - DNA, 15 bp, Homo sapiens
tctggtaaaccctca

SEQ ID NO: 1061036 - DNA, 15 bp, Homo sapiens
atctggtaaaccctc

SEQ ID NO: 1061037 - DNA, 15 bp, Homo sapiens
catctggtaaaccct

SEQ ID NO: 1061038 - DNA, 15 bp, Homo sapiens
acatctggtaaaccc

SEQ ID NO: 1061039 - DNA, 15 bp, Homo sapiens
aacatctggtaaacc

SEQ ID NO: 1061040 - DNA, 15 bp, Homo sapiens
taacatctggtaaac

SEQ ID NO: 1061041 - DNA, 15 bp, Homo sapiens
ttaacatctggtaaa

SEQ ID NO: 1061042 - DNA, 15 bp, Homo sapiens
gttaacatctggtaa

SEQ ID NO: 1061043 - DNA, 15 bp, Homo sapiens
tgttaacatctggta

SEQ ID NO: 1061044 - DNA, 15 bp, Homo sapiens
gtgttaacatctggt

SEQ ID NO: 1061045 - DNA, 15 bp, Homo sapiens
ggtgttaacatctgg

SEQ ID NO: 1061046 - DNA, 15 bp, Homo sapiens
cggtgttaacatctg

SEQ ID NO: 1061047 - DNA, 15 bp, Homo sapiens
acggtgttaacatct

SEQ ID NO: 1061048 - DNA, 15 bp, Homo sapiens
tacggtgttaacatc

SEQ ID NO: 1061049 - DNA, 15 bp, Homo sapiens
gtacggtgttaacat

SEQ ID NO: 1061050 - DNA, 15 bp, Homo sapiens
ggtacggtgttaaca

SEQ ID NO: 1061051 - DNA, 15 bp, Homo sapiens
tggtacggtgttaac

SEQ ID NO: 1061052 - DNA, 15 bp, Homo sapiens
ttggtacggtgttaa

SEQ ID NO: 1061053 - DNA, 15 bp, Homo sapiens
cttggtacggtgtta

SEQ ID NO: 1061054 - DNA, 15 bp, Homo sapiens
ccttggtacggtgtt

SEQ ID NO: 1061055 - DNA, 15 bp, Homo sapiens
cccttggtacggtgt

SEQ ID NO: 1061056 - DNA, 15 bp, Homo sapiens
acccttggtacggtg

SEQ ID NO: 1061057 - DNA, 15 bp, Homo sapiens
gacccttggtacggt

SEQ ID NO: 1061058 - DNA, 15 bp, Homo sapiens
cgacccttggtacgg

SEQ ID NO: 1061059 - DNA, 15 bp, Homo sapiens
acgacccttggtacg

SEQ ID NO: 1061060 - DNA, 15 bp, Homo sapiens
cacgacccttggtac

SEQ ID NO: 1061061 - DNA, 15 bp, Homo sapiens
tcacgacccttggta

SEQ ID NO: 1061062 - DNA, 15 bp, Homo sapiens
ttcacgacccttggt

SEQ ID NO: 1061063 - DNA, 15 bp, Homo sapiens
cttcacgacccttgg

SEQ ID NO: 1061064 - DNA, 15 bp, Homo sapiens
ccttcacgacccttg

SEQ ID NO: 1061065 - DNA, 15 bp, Homo sapiens
tccttcacgaccctt

SEQ ID NO: 1061066 - DNA, 15 bp, Homo sapiens
atccttcacgaccct

SEQ ID NO: 1061067 - DNA, 15 bp, Homo sapiens
tatccttcacgaccc

SEQ ID NO: 1061068 - DNA, 15 bp, Homo sapiens
gtatccttcacgacc

SEQ ID NO: 1061069 - DNA, 15 bp, Homo sapiens
agtatccttcacgac

SEQ ID NO: 1061070 - DNA, 15 bp, Homo sapiens
tagtatccttcacga

SEQ ID NO: 1061071 - DNA, 15 bp, Homo sapiens
atagtatccttcacg

SEQ ID NO: 1061072 - DNA, 15 bp, Homo sapiens
tatagtatccttcac

SEQ ID NO: 1061073 - DNA, 15 bp, Homo sapiens
gtatagtatccttca

SEQ ID NO: 1061074 - DNA, 15 bp, Homo sapiens
tgtatagtatccttc

SEQ ID NO: 1061075 - DNA, 15 bp, Homo sapiens
atgtatagtatcctt

SEQ ID NO: 1061076 - DNA, 15 bp, Homo sapiens
tatgtatagtatcct

SEQ ID NO: 1061077 - DNA, 15 bp, Homo sapiens
ctatgtatagtatcc

SEQ ID NO: 1061078 - DNA, 15 bp, Homo sapiens
tctatgtatagtatc

SEQ ID NO: 1061079 - DNA, 15 bp, Homo sapiens
atctatgtatagtat

SEQ ID NO: 1061080 - DNA, 15 bp, Homo sapiens
tatctatgtatagta

SEQ ID NO: 1061081 - DNA, 15 bp, Homo sapiens
ctatctatgtatagt

SEQ ID NO: 1061082 - DNA, 15 bp, Homo sapiens
gctatctatgtatag

SEQ ID NO: 1061083 - DNA, 15 bp, Homo sapiens
ggctatctatgtata

SEQ ID NO: 1061084 - DNA, 15 bp, Homo sapiens
tggctatctatgtat

SEQ ID NO: 1061085 - DNA, 15 bp, Homo sapiens
ttggctatctatgta

SEQ ID NO: 1061086 - DNA, 15 bp, Homo sapiens
cttggctatctatgt

SEQ ID NO: 1061087 - DNA, 15 bp, Homo sapiens
gcttggctatctatg

SEQ ID NO: 1061088 - DNA, 15 bp, Homo sapiens
agcttggctatctat

SEQ ID NO: 1061089 - DNA, 15 bp, Homo sapiens
cagcttggctatcta

SEQ ID NO: 1061090 - DNA, 15 bp, Homo sapiens
gcagcttggctatct

SEQ ID NO: 1061091 - DNA, 15 bp, Homo sapiens
agcagcttggctatc

SEQ ID NO: 1061092 - DNA, 15 bp, Homo sapiens
aagcagcttggctat

SEQ ID NO: 1061093 - DNA, 15 bp, Homo sapiens
aaagcagcttggcta

SEQ ID NO: 1061094 - DNA, 15 bp, Homo sapiens
taaagcagcttggct

SEQ ID NO: 1061095 - DNA, 15 bp, Homo sapiens
ttaaagcagcttggc

SEQ ID NO: 1061096 - DNA, 15 bp, Homo sapiens
tttaaagcagcttgg

SEQ ID NO: 1061097 - DNA, 15 bp, Homo sapiens
ttttaaagcagcttg

SEQ ID NO: 1061098 - DNA, 15 bp, Homo sapiens
gttttaaagcagctt

SEQ ID NO: 1061099 - DNA, 15 bp, Homo sapiens
agttttaaagcagct

SEQ ID NO: 1061100 - DNA, 15 bp, Homo sapiens
aagttttaaagcagc

SEQ ID NO: 1061101 - DNA, 15 bp, Homo sapiens
taagttttaaagcag

SEQ ID NO: 1061102 - DNA, 15 bp, Homo sapiens
ataagttttaaagca

SEQ ID NO: 1061103 - DNA, 15 bp, Homo sapiens
aataagttttaaagc

SEQ ID NO: 1061104 - DNA, 15 bp, Homo sapiens
gaataagttttaaag

SEQ ID NO: 1061105 - DNA, 15 bp, Homo sapiens
cgaataagttttaaa

SEQ ID NO: 1061106 - DNA, 15 bp, Homo sapiens
ccgaataagttttaa

SEQ ID NO: 1061107 - DNA, 15 bp, Homo sapiens
cccgaataagtttta

SEQ ID NO: 1061108 - DNA, 15 bp, Homo sapiens
ccccgaataagtttt

SEQ ID NO: 1061109 - DNA, 15 bp, Homo sapiens
cccccgaataagttt

SEQ ID NO: 1061110 - DNA, 15 bp, Homo sapiens
gcccccgaataagtt

SEQ ID NO: 1061111 - DNA, 15 bp, Homo sapiens
ggcccccgaataagt

SEQ ID NO: 1061112 - DNA, 15 bp, Homo sapiens
cggcccccgaataag

SEQ ID NO: 1061113 - DNA, 15 bp, Homo sapiens
ccggcccccgaataa

SEQ ID NO: 1061114 - DNA, 15 bp, Homo sapiens
cccggcccccgaata

SEQ ID NO: 1061115 - DNA, 15 bp, Homo sapiens
gcccggcccccgaat

SEQ ID NO: 1061116 - DNA, 15 bp, Homo sapiens
tgcccggcccccgaa

SEQ ID NO: 1061117 - DNA, 15 bp, Homo sapiens
atgcccggcccccga

SEQ ID NO: 1061118 - DNA, 15 bp, Homo sapiens
catgcccggcccccg

SEQ ID NO: 1061119 - DNA, 15 bp, Homo sapiens
ccatgcccggccccc

SEQ ID NO: 1061120 - DNA, 15 bp, Homo sapiens
caccatgcccggccc

SEQ ID NO: 1061121 - DNA, 15 bp, Homo sapiens
aaccaccatgcccgg

SEQ ID NO: 1061122 - DNA, 15 bp, Homo sapiens
gaaccaccatgcccg

SEQ ID NO: 1061123 - DNA, 15 bp, Homo sapiens
tgaaccaccatgccc

SEQ ID NO: 1061124 - DNA, 15 bp, Homo sapiens
atgaaccaccatgcc

SEQ ID NO: 1061125 - DNA, 15 bp, Homo sapiens
catgaaccaccatgc

SEQ ID NO: 1061126 - DNA, 15 bp, Homo sapiens
gcatgaaccaccatg

SEQ ID NO: 1061127 - DNA, 15 bp, Homo sapiens
ggcatgaaccaccat

SEQ ID NO: 1061128 - DNA, 15 bp, Homo sapiens
agggattacaggcat

SEQ ID NO: 1061129 - DNA, 15 bp, Homo sapiens
cagggattacaggca

SEQ ID NO: 1061130 - DNA, 15 bp, Homo sapiens
ctcccaaagtgcagg

SEQ ID NO: 1061131 - DNA, 15 bp, Homo sapiens
cctcccaaagtgcag

SEQ ID NO: 1061132 - DNA, 15 bp, Homo sapiens
gcctcccaaagtgca

SEQ ID NO: 1061133 - DNA, 15 bp, Homo sapiens
gtctgcccaccttgg

SEQ ID NO: 1061134 - DNA, 15 bp, Homo sapiens
ggtctgcccaccttg

SEQ ID NO: 1061135 - DNA, 15 bp, Homo sapiens
tggtctgcccacctt

SEQ ID NO: 1061136 - DNA, 15 bp, Homo sapiens
gtggtctgcccacct

SEQ ID NO: 1061137 - DNA, 15 bp, Homo sapiens
ggtggtctgcccacc

SEQ ID NO: 1061138 - DNA, 15 bp, Homo sapiens
aggtggtctgcccac

SEQ ID NO: 1061139 - DNA, 15 bp, Homo sapiens
caggtggtctgccca

SEQ ID NO: 1061140 - DNA, 15 bp, Homo sapiens
tcaggtggtctgccc

SEQ ID NO: 1061141 - DNA, 15 bp, Homo sapiens
ctcaggtggtctgcc

SEQ ID NO: 1061142 - DNA, 15 bp, Homo sapiens
cctcaggtggtctgc

SEQ ID NO: 1061143 - DNA, 15 bp, Homo sapiens
acctcaggtggtctg

SEQ ID NO: 1061144 - DNA, 15 bp, Homo sapiens
gacctcaggtggtct

SEQ ID NO: 1061145 - DNA, 15 bp, Homo sapiens
tctgacctcaggtgg

SEQ ID NO: 1061146 - DNA, 15 bp, Homo sapiens
tgaacttctgacctc

SEQ ID NO: 1061147 - DNA, 15 bp, Homo sapiens
ttgaacttctgacct

SEQ ID NO: 1061148 - DNA, 15 bp, Homo sapiens
cttgaacttctgacc

SEQ ID NO: 1061149 - DNA, 15 bp, Homo sapiens
tcttgaacttctgac

SEQ ID NO: 1061150 - DNA, 15 bp, Homo sapiens
gtcttgaacttctga

SEQ ID NO: 1061151 - DNA, 15 bp, Homo sapiens
ggtcttgaacttctg

SEQ ID NO: 1061152 - DNA, 15 bp, Homo sapiens
tggtcttgaacttct

SEQ ID NO: 1061153 - DNA, 15 bp, Homo sapiens
ctggtcttgaacttc

SEQ ID NO: 1061154 - DNA, 15 bp, Homo sapiens
gctggtcttgaactt

SEQ ID NO: 1061155 - DNA, 15 bp, Homo sapiens
gttggccaagctggt

SEQ ID NO: 1061156 - DNA, 15 bp, Homo sapiens
tgttggccaagctgg

SEQ ID NO: 1061157 - DNA, 15 bp, Homo sapiens
actaattttttattt

SEQ ID NO: 1061158 - DNA, 15 bp, Homo sapiens
gactaattttttatt

SEQ ID NO: 1061159 - DNA, 15 bp, Homo sapiens
tgactaattttttat

SEQ ID NO: 1061160 - DNA, 15 bp, Homo sapiens
ctgactaatttttta

SEQ ID NO: 1061161 - DNA, 15 bp, Homo sapiens
cacctgactaatttt

SEQ ID NO: 1061162 - DNA, 15 bp, Homo sapiens
acacctgactaattt

SEQ ID NO: 1061163 - DNA, 15 bp, Homo sapiens
cacacctgactaatt

SEQ ID NO: 1061164 - DNA, 15 bp, Homo sapiens
ccacacctgactaat

SEQ ID NO: 1061165 - DNA, 15 bp, Homo sapiens
accacacctgactaa

SEQ ID NO: 1061166 - DNA, 15 bp, Homo sapiens
caccacacctgacta

SEQ ID NO: 1061167 - DNA, 15 bp, Homo sapiens
ccaccacacctgact

SEQ ID NO: 1061168 - DNA, 15 bp, Homo sapiens
gccaccacacctgac

SEQ ID NO: 1061169 - DNA, 15 bp, Homo sapiens
tgccaccacacctga

SEQ ID NO: 1061170 - DNA, 15 bp, Homo sapiens
atgccaccacacctg

SEQ ID NO: 1061171 - DNA, 15 bp, Homo sapiens
catgccaccacacct

SEQ ID NO: 1061172 - DNA, 15 bp, Homo sapiens
acatgccaccacacc

SEQ ID NO: 1061173 - DNA, 15 bp, Homo sapiens
cacatgccaccacac

SEQ ID NO: 1061174 - DNA, 15 bp, Homo sapiens
gcacatgccaccaca

SEQ ID NO: 1061175 - DNA, 15 bp, Homo sapiens
ctacaggcacatgcc

SEQ ID NO: 1061176 - DNA, 15 bp, Homo sapiens
actacaggcacatgc

SEQ ID NO: 1061177 - DNA, 15 bp, Homo sapiens
gactacaggcacatg

SEQ ID NO: 1061178 - DNA, 15 bp, Homo sapiens
ggactacaggcacat

SEQ ID NO: 1061179 - DNA, 15 bp, Homo sapiens
ttcagcctcccgggt

SEQ ID NO: 1061180 - DNA, 15 bp, Homo sapiens
cttcagcctcccggg

SEQ ID NO: 1061181 - DNA, 15 bp, Homo sapiens
gcttcagcctcccgg

SEQ ID NO: 1061182 - DNA, 15 bp, Homo sapiens
tgcttcagcctcccg

SEQ ID NO: 1061183 - DNA, 15 bp, Homo sapiens
aattctcctgcttca

SEQ ID NO: 1061184 - DNA, 15 bp, Homo sapiens
caattctcctgcttc

SEQ ID NO: 1061185 - DNA, 15 bp, Homo sapiens
gcaattctcctgctt

SEQ ID NO: 1061186 - DNA, 15 bp, Homo sapiens
agcaattctcctgct

SEQ ID NO: 1061187 - DNA, 15 bp, Homo sapiens
tcgctcactgcaacc

SEQ ID NO: 1061188 - DNA, 15 bp, Homo sapiens
ttcgctcactgcaac

SEQ ID NO: 1061189 - DNA, 15 bp, Homo sapiens
cttcgctcactgcaa

SEQ ID NO: 1061190 - DNA, 15 bp, Homo sapiens
tcttcgctcactgca

SEQ ID NO: 1061191 - DNA, 15 bp, Homo sapiens
atcttcgctcactgc

SEQ ID NO: 1061192 - DNA, 15 bp, Homo sapiens
gatcttcgctcactg

SEQ ID NO: 1061193 - DNA, 15 bp, Homo sapiens
tgatcttcgctcact

SEQ ID NO: 1061194 - DNA, 15 bp, Homo sapiens
gtgatcttcgctcac

SEQ ID NO: 1061195 - DNA, 15 bp, Homo sapiens
tgtgatcttcgctca

SEQ ID NO: 1061196 - DNA, 15 bp, Homo sapiens
gtgtgatcttcgctc

SEQ ID NO: 1061197 - DNA, 15 bp, Homo sapiens
ggtgtgatcttcgct

SEQ ID NO: 1061198 - DNA, 15 bp, Homo sapiens
tggtgtgatcttcgc

SEQ ID NO: 1061199 - DNA, 15 bp, Homo sapiens
gtggtgtgatcttcg

SEQ ID NO: 1061200 - DNA, 15 bp, Homo sapiens
agtggtgtgatcttc

SEQ ID NO: 1061201 - DNA, 15 bp, Homo sapiens
ctttgttttttgaga

SEQ ID NO: 1061202 - DNA, 15 bp, Homo sapiens
gctttgttttttgag

SEQ ID NO: 1061203 - DNA, 15 bp, Homo sapiens
tgctttgttttttga

SEQ ID NO: 1061204 - DNA, 15 bp, Homo sapiens
ttgctttgttttttg

SEQ ID NO: 1061205 - DNA, 15 bp, Homo sapiens
ttttgctttgttttt

SEQ ID NO: 1061206 - DNA, 15 bp, Homo sapiens
tttttgctttgtttt

SEQ ID NO: 1061207 - DNA, 15 bp, Homo sapiens
ttttttgctttgttt

SEQ ID NO: 1061208 - DNA, 15 bp, Homo sapiens
tttttttgctttgtt

SEQ ID NO: 1061209 - DNA, 15 bp, Homo sapiens
gtttttttgctttgt

SEQ ID NO: 1061210 - DNA, 15 bp, Homo sapiens
tgtttttttgctttg

SEQ ID NO: 1061211 - DNA, 15 bp, Homo sapiens
ttgtttttttgcttt

SEQ ID NO: 1061212 - DNA, 15 bp, Homo sapiens
gttgtttttttgctt

SEQ ID NO: 1061213 - DNA, 15 bp, Homo sapiens
agttgtttttttgct

SEQ ID NO: 1061214 - DNA, 15 bp, Homo sapiens
tagttgtttttttgc

SEQ ID NO: 1061215 - DNA, 15 bp, Homo sapiens
atagttgtttttttg

SEQ ID NO: 1061216 - DNA, 15 bp, Homo sapiens
aatagttgttttttt

SEQ ID NO: 1061217 - DNA, 15 bp, Homo sapiens
aaatagttgtttttt

SEQ ID NO: 1061218 - DNA, 15 bp, Homo sapiens
taaatagttgttttt

SEQ ID NO: 1061219 - DNA, 15 bp, Homo sapiens
ctaaatagttgtttt

SEQ ID NO: 1061220 - DNA, 15 bp, Homo sapiens
cctaaatagttgttt

SEQ ID NO: 1061221 - DNA, 15 bp, Homo sapiens
ccctaaatagttgtt

SEQ ID NO: 1061222 - DNA, 15 bp, Homo sapiens
tccctaaatagttgt

SEQ ID NO: 1061223 - DNA, 15 bp, Homo sapiens
ctccctaaatagttg

SEQ ID NO: 1061224 - DNA, 15 bp, Homo sapiens
tctccctaaatagtt

SEQ ID NO: 1061225 - DNA, 15 bp, Homo sapiens
gtctccctaaatagt

SEQ ID NO: 1061226 - DNA, 15 bp, Homo sapiens
tgtctccctaaatag

SEQ ID NO: 1061227 - DNA, 15 bp, Homo sapiens
gtgtctccctaaata

SEQ ID NO: 1061228 - DNA, 15 bp, Homo sapiens
tgtgtctccctaaat

SEQ ID NO: 1061229 - DNA, 15 bp, Homo sapiens
gtgtgtctccctaaa

SEQ ID NO: 1061230 - DNA, 15 bp, Homo sapiens
ggtgtgtctccctaa

SEQ ID NO: 1061231 - DNA, 15 bp, Homo sapiens
aggtgtgtctcccta

SEQ ID NO: 1061232 - DNA, 15 bp, Homo sapiens
taggtgtgtctccct

SEQ ID NO: 1061233 - DNA, 15 bp, Homo sapiens
ctaggtgtgtctccc

SEQ ID NO: 1061234 - DNA, 15 bp, Homo sapiens
cctaggtgtgtctcc

SEQ ID NO: 1061235 - DNA, 15 bp, Homo sapiens
tcctaggtgtgtctc

SEQ ID NO: 1061236 - DNA, 15 bp, Homo sapiens
ttcctaggtgtgtct

SEQ ID NO: 1061237 - DNA, 15 bp, Homo sapiens
tttcctaggtgtgtc

SEQ ID NO: 1061238 - DNA, 15 bp, Homo sapiens
atttcctaggtgtgt

SEQ ID NO: 1061239 - DNA, 15 bp, Homo sapiens
tatttcctaggtgtg

SEQ ID NO: 1061240 - DNA, 15 bp, Homo sapiens
atatttcctaggtgt

SEQ ID NO: 1061241 - DNA, 15 bp, Homo sapiens
catatttcctaggtg

SEQ ID NO: 1061242 - DNA, 15 bp, Homo sapiens
tcatatttcctaggt

SEQ ID NO: 1061243 - DNA, 15 bp, Homo sapiens
ttcatatttcctagg

SEQ ID NO: 1061244 - DNA, 15 bp, Homo sapiens
cttcatatttcctag

SEQ ID NO: 1061245 - DNA, 15 bp, Homo sapiens
ccttcatatttccta

SEQ ID NO: 1061246 - DNA, 15 bp, Homo sapiens
tccttcatatttcct

SEQ ID NO: 1061247 - DNA, 15 bp, Homo sapiens
ttccttcatatttcc

SEQ ID NO: 1061248 - DNA, 15 bp, Homo sapiens
tttccttcatatttc

SEQ ID NO: 1061249 - DNA, 15 bp, Homo sapiens
atttccttcatattt

SEQ ID NO: 1061250 - DNA, 15 bp, Homo sapiens
tatttccttcatatt

SEQ ID NO: 1061251 - DNA, 15 bp, Homo sapiens
atatttccttcatat

SEQ ID NO: 1061252 - DNA, 15 bp, Homo sapiens
tatatttccttcata

SEQ ID NO: 1061253 - DNA, 15 bp, Homo sapiens
ttatatttccttcat

SEQ ID NO: 1061254 - DNA, 15 bp, Homo sapiens
tttatatttccttca

SEQ ID NO: 1061255 - DNA, 15 bp, Homo sapiens
ttttatatttccttc

SEQ ID NO: 1061256 - DNA, 15 bp, Homo sapiens
gttttatatttcctt

SEQ ID NO: 1061257 - DNA, 15 bp, Homo sapiens
agttttatatttcct

SEQ ID NO: 1061258 - DNA, 15 bp, Homo sapiens
cagttttatatttcc

SEQ ID NO: 1061259 - DNA, 15 bp, Homo sapiens
gcagttttatatttc

SEQ ID NO: 1061260 - DNA, 15 bp, Homo sapiens
tgcagttttatattt

SEQ ID NO: 1061261 - DNA, 15 bp, Homo sapiens
atgcagttttatatt

SEQ ID NO: 1061262 - DNA, 15 bp, Homo sapiens
catgcagttttatat

SEQ ID NO: 1061263 - DNA, 15 bp, Homo sapiens
acatgcagttttata

SEQ ID NO: 1061264 - DNA, 15 bp, Homo sapiens
tacatgcagttttat

SEQ ID NO: 1061265 - DNA, 15 bp, Homo sapiens
ttacatgcagtttta

SEQ ID NO: 1061266 - DNA, 15 bp, Homo sapiens
attacatgcagtttt

SEQ ID NO: 1061267 - DNA, 15 bp, Homo sapiens
gattacatgcagttt

SEQ ID NO: 1061268 - DNA, 15 bp, Homo sapiens
cgattacatgcagtt

SEQ ID NO: 1061269 - DNA, 15 bp, Homo sapiens
tcgattacatgcagt

SEQ ID NO: 1061270 - DNA, 15 bp, Homo sapiens
ttcgattacatgcag

SEQ ID NO: 1061271 - DNA, 15 bp, Homo sapiens
tttcgattacatgca

SEQ ID NO: 1061272 - DNA, 15 bp, Homo sapiens
ttttcgattacatgc

SEQ ID NO: 1061273 - DNA, 15 bp, Homo sapiens
tttttcgattacatg

SEQ ID NO: 1061274 - DNA, 15 bp, Homo sapiens
gtttttcgattacat

SEQ ID NO: 1061275 - DNA, 15 bp, Homo sapiens
tgtttttcgattaca

SEQ ID NO: 1061276 - DNA, 15 bp, Homo sapiens
ttgtttttcgattac

SEQ ID NO: 1061277 - DNA, 15 bp, Homo sapiens
gttgtttttcgatta

SEQ ID NO: 1061278 - DNA, 15 bp, Homo sapiens
tgttgtttttcgatt

SEQ ID NO: 1061279 - DNA, 15 bp, Homo sapiens
ttgttgtttttcgat

SEQ ID NO: 1061280 - DNA, 15 bp, Homo sapiens
attgttgtttttcga

SEQ ID NO: 1061281 - DNA, 15 bp, Homo sapiens
cattgttgtttttcg

SEQ ID NO: 1061282 - DNA, 15 bp, Homo sapiens
gcattgttgtttttc

SEQ ID NO: 1061283 - DNA, 15 bp, Homo sapiens
tgcattgttgttttt

SEQ ID NO: 1061284 - DNA, 15 bp, Homo sapiens
atgcattgttgtttt

SEQ ID NO: 1061285 - DNA, 15 bp, Homo sapiens
catgcattgttgttt

SEQ ID NO: 1061286 - DNA, 15 bp, Homo sapiens
gcatgcattgttgtt

SEQ ID NO: 1061287 - DNA, 15 bp, Homo sapiens
agcatgcattgttgt

SEQ ID NO: 1061288 - DNA, 15 bp, Homo sapiens
tagcatgcattgttg

SEQ ID NO: 1061289 - DNA, 15 bp, Homo sapiens
gtagcatgcattgtt

SEQ ID NO: 1061290 - DNA, 15 bp, Homo sapiens
tgtagcatgcattgt

SEQ ID NO: 1061291 - DNA, 15 bp, Homo sapiens
gtgtagcatgcattg

SEQ ID NO: 1061292 - DNA, 15 bp, Homo sapiens
tgtgtagcatgcatt

SEQ ID NO: 1061293 - DNA, 15 bp, Homo sapiens
gtgtgtagcatgcat

SEQ ID NO: 1061294 - DNA, 15 bp, Homo sapiens
tgtgtgtagcatgca

SEQ ID NO: 1061295 - DNA, 15 bp, Homo sapiens
ttgtgtgtagcatgc

SEQ ID NO: 1061296 - DNA, 15 bp, Homo sapiens
cttgtgtgtagcatg

SEQ ID NO: 1061297 - DNA, 15 bp, Homo sapiens
tcttgtgtgtagcat

SEQ ID NO: 1061298 - DNA, 15 bp, Homo sapiens
atcttgtgtgtagca

SEQ ID NO: 1061299 - DNA, 15 bp, Homo sapiens
tatcttgtgtgtagc

SEQ ID NO: 1061300 - DNA, 15 bp, Homo sapiens
atatcttgtgtgtag

SEQ ID NO: 1061301 - DNA, 15 bp, Homo sapiens
aatatcttgtgtgta

SEQ ID NO: 1061302 - DNA, 15 bp, Homo sapiens
aaatatcttgtgtgt

SEQ ID NO: 1061303 - DNA, 15 bp, Homo sapiens
aaaatatcttgtgtg

SEQ ID NO: 1061304 - DNA, 15 bp, Homo sapiens
gaaaatatcttgtgt

SEQ ID NO: 1061305 - DNA, 15 bp, Homo sapiens
agaaaatatcttgtg

SEQ ID NO: 1061306 - DNA, 15 bp, Homo sapiens
cagaaaatatcttgt

SEQ ID NO: 1061307 - DNA, 15 bp, Homo sapiens
tcagaaaatatcttg

SEQ ID NO: 1061308 - DNA, 15 bp, Homo sapiens
ctcagaaaatatctt

SEQ ID NO: 1061309 - DNA, 15 bp, Homo sapiens
actcagaaaatatct

SEQ ID NO: 1061310 - DNA, 15 bp, Homo sapiens
cactcagaaaatatc

SEQ ID NO: 1061311 - DNA, 15 bp, Homo sapiens
acactcagaaaatat

SEQ ID NO: 1061312 - DNA, 15 bp, Homo sapiens
tacactcagaaaata

SEQ ID NO: 1061313 - DNA, 15 bp, Homo sapiens
ttacactcagaaaat

SEQ ID NO: 1061314 - DNA, 15 bp, Homo sapiens
attacactcagaaaa

SEQ ID NO: 1061315 - DNA, 15 bp, Homo sapiens
cattacactcagaaa

SEQ ID NO: 1061316 - DNA, 15 bp, Homo sapiens
tcattacactcagaa

SEQ ID NO: 1061317 - DNA, 15 bp, Homo sapiens
ttcattacactcaga

SEQ ID NO: 1061318 - DNA, 15 bp, Homo sapiens
cttcattacactcag

SEQ ID NO: 1061319 - DNA, 15 bp, Homo sapiens
tcttcattacactca

SEQ ID NO: 1061320 - DNA, 15 bp, Homo sapiens
ctcttcattacactc

SEQ ID NO: 1061321 - DNA, 15 bp, Homo sapiens
tctcttcattacact

SEQ ID NO: 1061322 - DNA, 15 bp, Homo sapiens
atctcttcattacac

SEQ ID NO: 1061323 - DNA, 15 bp, Homo sapiens
catctcttcattaca

SEQ ID NO: 1061324 - DNA, 15 bp, Homo sapiens
ccatctcttcattac

SEQ ID NO: 1061325 - DNA, 15 bp, Homo sapiens
tccatctcttcatta

SEQ ID NO: 1061326 - DNA, 15 bp, Homo sapiens
ttccatctcttcatt

SEQ ID NO: 1061327 - DNA, 15 bp, Homo sapiens
tttccatctcttcat

SEQ ID NO: 1061328 - DNA, 15 bp, Homo sapiens
ttttccatctcttca

SEQ ID NO: 1061329 - DNA, 15 bp, Homo sapiens
attttccatctcttc

SEQ ID NO: 1061330 - DNA, 15 bp, Homo sapiens
gattttccatctctt

SEQ ID NO: 1061331 - DNA, 15 bp, Homo sapiens
tgattttccatctct

SEQ ID NO: 1061332 - DNA, 15 bp, Homo sapiens
atgattttccatctc

SEQ ID NO: 1061333 - DNA, 15 bp, Homo sapiens
aatgattttccatct

SEQ ID NO: 1061334 - DNA, 15 bp, Homo sapiens
taatgattttccatc

SEQ ID NO: 1061335 - DNA, 15 bp, Homo sapiens
ttaatgattttccat

SEQ ID NO: 1061336 - DNA, 15 bp, Homo sapiens
attaatgattttcca

SEQ ID NO: 1061337 - DNA, 15 bp, Homo sapiens
cattaatgattttcc

SEQ ID NO: 1061338 - DNA, 15 bp, Homo sapiens
gcattaatgattttc

SEQ ID NO: 1061339 - DNA, 15 bp, Homo sapiens
agcattaatgatttt

SEQ ID NO: 1061340 - DNA, 15 bp, Homo sapiens
gagcattaatgattt

SEQ ID NO: 1061341 - DNA, 15 bp, Homo sapiens
tgagcattaatgatt

SEQ ID NO: 1061342 - DNA, 15 bp, Homo sapiens
ttgagcattaatgat

SEQ ID NO: 1061343 - DNA, 15 bp, Homo sapiens
cttgagcattaatga

SEQ ID NO: 1061344 - DNA, 15 bp, Homo sapiens
gcttgagcattaatg

SEQ ID NO: 1061345 - DNA, 15 bp, Homo sapiens
agcttgagcattaat

SEQ ID NO: 1061346 - DNA, 15 bp, Homo sapiens
cagcttgagcattaa

SEQ ID NO: 1061347 - DNA, 15 bp, Homo sapiens
tcagcttgagcatta

SEQ ID NO: 1061348 - DNA, 15 bp, Homo sapiens
ttcagcttgagcatt

SEQ ID NO: 1061349 - DNA, 15 bp, Homo sapiens
gttcagcttgagcat

SEQ ID NO: 1061350 - DNA, 15 bp, Homo sapiens
tgttcagcttgagca

SEQ ID NO: 1061351 - DNA, 15 bp, Homo sapiens
atgttcagcttgagc

SEQ ID NO: 1061352 - DNA, 15 bp, Homo sapiens
gatgttcagcttgag

SEQ ID NO: 1061353 - DNA, 15 bp, Homo sapiens
agatgttcagcttga

SEQ ID NO: 1061354 - DNA, 15 bp, Homo sapiens
gagatgttcagcttg

SEQ ID NO: 1061355 - DNA, 15 bp, Homo sapiens
ggagatgttcagctt

SEQ ID NO: 1061356 - DNA, 15 bp, Homo sapiens
aggagatgttcagct

SEQ ID NO: 1061357 - DNA, 15 bp, Homo sapiens
gaggagatgttcagc

SEQ ID NO: 1061358 - DNA, 15 bp, Homo sapiens
ggaggagatgttcag

SEQ ID NO: 1061359 - DNA, 15 bp, Homo sapiens
tggaggagatgttca

SEQ ID NO: 1061360 - DNA, 15 bp, Homo sapiens
ttggaggagatgttc

SEQ ID NO: 1061361 - DNA, 15 bp, Homo sapiens
tttggaggagatgtt

SEQ ID NO: 1061362 - DNA, 15 bp, Homo sapiens
atttggaggagatgt

SEQ ID NO: 1061363 - DNA, 15 bp, Homo sapiens
gatttggaggagatg

SEQ ID NO: 1061364 - DNA, 15 bp, Homo sapiens
ggatttggaggagat

SEQ ID NO: 1061365 - DNA, 15 bp, Homo sapiens
gggatttggaggaga

SEQ ID NO: 1061366 - DNA, 15 bp, Homo sapiens
agggatttggaggag

SEQ ID NO: 1061367 - DNA, 15 bp, Homo sapiens
aagggatttggagga

SEQ ID NO: 1061368 - DNA, 15 bp, Homo sapiens
taagggatttggagg

SEQ ID NO: 1061369 - DNA, 15 bp, Homo sapiens
ataagggatttggag

SEQ ID NO: 1061370 - DNA, 15 bp, Homo sapiens
tataagggatttgga

SEQ ID NO: 1061371 - DNA, 15 bp, Homo sapiens
ctataagggatttgg

SEQ ID NO: 1061372 - DNA, 15 bp, Homo sapiens
tctataagggatttg

SEQ ID NO: 1061373 - DNA, 15 bp, Homo sapiens
ttctataagggattt

SEQ ID NO: 1061374 - DNA, 15 bp, Homo sapiens
gttctataagggatt

SEQ ID NO: 1061375 - DNA, 15 bp, Homo sapiens
tgttctataagggat

SEQ ID NO: 1061376 - DNA, 15 bp, Homo sapiens
ctgttctataaggga

SEQ ID NO: 1061377 - DNA, 15 bp, Homo sapiens
cctgttctataaggg

SEQ ID NO: 1061378 - DNA, 15 bp, Homo sapiens
tcctgttctataagg

SEQ ID NO: 1061379 - DNA, 15 bp, Homo sapiens
ctcctgttctataag

SEQ ID NO: 1061380 - DNA, 15 bp, Homo sapiens
tctcctgttctataa

SEQ ID NO: 1061381 - DNA, 15 bp, Homo sapiens
ctctcctgttctata

SEQ ID NO: 1061382 - DNA, 15 bp, Homo sapiens
tctctcctgttctat

SEQ ID NO: 1061383 - DNA, 15 bp, Homo sapiens
atctctcctgttcta

SEQ ID NO: 1061384 - DNA, 15 bp, Homo sapiens
gatctctcctgttct

SEQ ID NO: 1061385 - DNA, 15 bp, Homo sapiens
agatctctcctgttc

SEQ ID NO: 1061386 - DNA, 15 bp, Homo sapiens
cagatctctcctgtt

SEQ ID NO: 1061387 - DNA, 15 bp, Homo sapiens
tcagatctctcctgt

SEQ ID NO: 1061388 - DNA, 15 bp, Homo sapiens
ctcagatctctcctg

SEQ ID NO: 1061389 - DNA, 15 bp, Homo sapiens
cctcagatctctcct

SEQ ID NO: 1061390 - DNA, 15 bp, Homo sapiens
gcctcagatctctcc

SEQ ID NO: 1061391 - DNA, 15 bp, Homo sapiens
ggcctcagatctctc

SEQ ID NO: 1061392 - DNA, 15 bp, Homo sapiens
tggcctcagatctct

SEQ ID NO: 1061393 - DNA, 15 bp, Homo sapiens
ctggcctcagatctc

SEQ ID NO: 1061394 - DNA, 15 bp, Homo sapiens
tctggcctcagatct

SEQ ID NO: 1061395 - DNA, 15 bp, Homo sapiens
ctctggcctcagatc

SEQ ID NO: 1061396 - DNA, 15 bp, Homo sapiens
tctctggcctcagat

SEQ ID NO: 1061397 - DNA, 15 bp, Homo sapiens
ttctctggcctcaga

SEQ ID NO: 1061398 - DNA, 15 bp, Homo sapiens
cttctctggcctcag

SEQ ID NO: 1061399 - DNA, 15 bp, Homo sapiens
ccttctctggcctca

SEQ ID NO: 1061400 - DNA, 15 bp, Homo sapiens
accttctctggcctc

SEQ ID NO: 1061401 - DNA, 15 bp, Homo sapiens
caccttctctggcct

SEQ ID NO: 1061402 - DNA, 15 bp, Homo sapiens
acaccttctctggcc

SEQ ID NO: 1061403 - DNA, 15 bp, Homo sapiens
cacaccttctctggc

SEQ ID NO: 1061404 - DNA, 15 bp, Homo sapiens
ccacaccttctctgg

SEQ ID NO: 1061405 - DNA, 15 bp, Homo sapiens
tccacaccttctctg

SEQ ID NO: 1061406 - DNA, 15 bp, Homo sapiens
gtccacaccttctct

SEQ ID NO: 1061407 - DNA, 15 bp, Homo sapiens
ggtccacaccttctc

SEQ ID NO: 1061408 - DNA, 15 bp, Homo sapiens
gggtccacaccttct

SEQ ID NO: 1061409 - DNA, 15 bp, Homo sapiens
tgggtccacaccttc

SEQ ID NO: 1061410 - DNA, 15 bp, Homo sapiens
gctgggtccacacct

SEQ ID NO: 1061411 - DNA, 15 bp, Homo sapiens
ggctgggtccacacc

SEQ ID NO: 1061412 - DNA, 15 bp, Homo sapiens
tggctgggtccacac

SEQ ID NO: 1061413 - DNA, 15 bp, Homo sapiens
atggctgggtccaca

SEQ ID NO: 1061414 - DNA, 15 bp, Homo sapiens
catggctgggtccac

SEQ ID NO: 1061415 - DNA, 15 bp, Homo sapiens
ccatggctgggtcca

SEQ ID NO: 1061416 - DNA, 15 bp, Homo sapiens
accatggctgggtcc

SEQ ID NO: 1061417 - DNA, 15 bp, Homo sapiens
gaccatggctgggtc

SEQ ID NO: 1061418 - DNA, 15 bp, Homo sapiens
tgaccatggctgggt

SEQ ID NO: 1061419 - DNA, 15 bp, Homo sapiens
gtgaccatggctggg

SEQ ID NO: 1061420 - DNA, 15 bp, Homo sapiens
tgtgaccatggctgg

SEQ ID NO: 1061421 - DNA, 15 bp, Homo sapiens
gtgtgaccatggctg

SEQ ID NO: 1061422 - DNA, 15 bp, Homo sapiens
ctgtgtgaccatggc

SEQ ID NO: 1061423 - DNA, 15 bp, Homo sapiens
cctgtgtgaccatgg

SEQ ID NO: 1061424 - DNA, 15 bp, Homo sapiens
ccctgtgtgaccatg

SEQ ID NO: 1061425 - DNA, 15 bp, Homo sapiens
tccctgtgtgaccat

SEQ ID NO: 1061426 - DNA, 15 bp, Homo sapiens
ctccctgtgtgacca

SEQ ID NO: 1061427 - DNA, 15 bp, Homo sapiens
actccctgtgtgacc

SEQ ID NO: 1061428 - DNA, 15 bp, Homo sapiens
cactccctgtgtgac

SEQ ID NO: 1061429 - DNA, 15 bp, Homo sapiens
tcactccctgtgtga

SEQ ID NO: 1061430 - DNA, 15 bp, Homo sapiens
ttcactccctgtgtg

SEQ ID NO: 1061431 - DNA, 15 bp, Homo sapiens
cttcactccctgtgt

SEQ ID NO: 1061432 - DNA, 15 bp, Homo sapiens
tcttcactccctgtg

SEQ ID NO: 1061433 - DNA, 15 bp, Homo sapiens
gtcttcactccctgt

SEQ ID NO: 1061434 - DNA, 15 bp, Homo sapiens
tgtcttcactccctg

SEQ ID NO: 1061435 - DNA, 15 bp, Homo sapiens
ttgtcttcactccct

SEQ ID NO: 1061436 - DNA, 15 bp, Homo sapiens
tttgtcttcactccc

SEQ ID NO: 1061437 - DNA, 15 bp, Homo sapiens
atttgtcttcactcc

SEQ ID NO: 1061438 - DNA, 15 bp, Homo sapiens
tatttgtcttcactc

SEQ ID NO: 1061439 - DNA, 15 bp, Homo sapiens
atatttgtcttcact

SEQ ID NO: 1061440 - DNA, 15 bp, Homo sapiens
tatatttgtcttcac

SEQ ID NO: 1061441 - DNA, 15 bp, Homo sapiens
atatatttgtcttca

SEQ ID NO: 1061442 - DNA, 15 bp, Homo sapiens
tatatatttgtcttc

SEQ ID NO: 1061443 - DNA, 15 bp, Homo sapiens
gtatatatttgtctt

SEQ ID NO: 1061444 - DNA, 15 bp, Homo sapiens
tgtatatatttgtct

SEQ ID NO: 1061445 - DNA, 15 bp, Homo sapiens
ttgtatatatttgtc

SEQ ID NO: 1061446 - DNA, 15 bp, Homo sapiens
attgtatatatttgt

SEQ ID NO: 1061447 - DNA, 15 bp, Homo sapiens
aattgtatatatttg

SEQ ID NO: 1061448 - DNA, 15 bp, Homo sapiens
taattgtatatattt

SEQ ID NO: 1061449 - DNA, 15 bp, Homo sapiens
ataattgtatatatt

SEQ ID NO: 1061450 - DNA, 15 bp, Homo sapiens
aataattgtatatat

SEQ ID NO: 1061451 - DNA, 15 bp, Homo sapiens
gaataattgtatata

SEQ ID NO: 1061452 - DNA, 15 bp, Homo sapiens
ggaataattgtatat

SEQ ID NO: 1061453 - DNA, 15 bp, Homo sapiens
aggaataattgtata

SEQ ID NO: 1061454 - DNA, 15 bp, Homo sapiens
taggaataattgtat

SEQ ID NO: 1061455 - DNA, 15 bp, Homo sapiens
ataggaataattgta

SEQ ID NO: 1061456 - DNA, 15 bp, Homo sapiens
cataggaataattgt

SEQ ID NO: 1061457 - DNA, 15 bp, Homo sapiens
acataggaataattg

SEQ ID NO: 1061458 - DNA, 15 bp, Homo sapiens
tacataggaataatt

SEQ ID NO: 1061459 - DNA, 15 bp, Homo sapiens
ctacataggaataat

SEQ ID NO: 1061460 - DNA, 15 bp, Homo sapiens
cctacataggaataa

SEQ ID NO: 1061461 - DNA, 15 bp, Homo sapiens
gcctacataggaata

SEQ ID NO: 1061462 - DNA, 15 bp, Homo sapiens
tgcctacataggaat

SEQ ID NO: 1061463 - DNA, 15 bp, Homo sapiens
ctgcctacataggaa

SEQ ID NO: 1061464 - DNA, 15 bp, Homo sapiens
tctgcctacatagga

SEQ ID NO: 1061465 - DNA, 15 bp, Homo sapiens
atctgcctacatagg

SEQ ID NO: 1061466 - DNA, 15 bp, Homo sapiens
tatctgcctacatag

SEQ ID NO: 1061467 - DNA, 15 bp, Homo sapiens
atatctgcctacata

SEQ ID NO: 1061468 - DNA, 15 bp, Homo sapiens
aatatctgcctacat

SEQ ID NO: 1061469 - DNA, 15 bp, Homo sapiens
taatatctgcctaca

SEQ ID NO: 1061470 - DNA, 15 bp, Homo sapiens
ataatatctgcctac

SEQ ID NO: 1061471 - DNA, 15 bp, Homo sapiens
tataatatctgccta

SEQ ID NO: 1061472 - DNA, 15 bp, Homo sapiens
ctataatatctgcct

SEQ ID NO: 1061473 - DNA, 15 bp, Homo sapiens
tctataatatctgcc

SEQ ID NO: 1061474 - DNA, 15 bp, Homo sapiens
atctataatatctgc

SEQ ID NO: 1061475 - DNA, 15 bp, Homo sapiens
tatctataatatctg

SEQ ID NO: 1061476 - DNA, 15 bp, Homo sapiens
gtatctataatatct

SEQ ID NO: 1061477 - DNA, 15 bp, Homo sapiens
tgtatctataatatc

SEQ ID NO: 1061478 - DNA, 15 bp, Homo sapiens
atgtatctataatat

SEQ ID NO: 1061479 - DNA, 15 bp, Homo sapiens
catgtatctataata

SEQ ID NO: 1061480 - DNA, 15 bp, Homo sapiens
tcatgtatctataat

SEQ ID NO: 1061481 - DNA, 15 bp, Homo sapiens
atcatgtatctataa

SEQ ID NO: 1061482 - DNA, 15 bp, Homo sapiens
tatcatgtatctata

SEQ ID NO: 1061483 - DNA, 15 bp, Homo sapiens
gtatcatgtatctat

SEQ ID NO: 1061484 - DNA, 15 bp, Homo sapiens
ggtatcatgtatcta

SEQ ID NO: 1061485 - DNA, 15 bp, Homo sapiens
aggtatcatgtatct

SEQ ID NO: 1061486 - DNA, 15 bp, Homo sapiens
aaggtatcatgtatc

SEQ ID NO: 1061487 - DNA, 15 bp, Homo sapiens
taaggtatcatgtat

SEQ ID NO: 1061488 - DNA, 15 bp, Homo sapiens
ctaaggtatcatgta

SEQ ID NO: 1061489 - DNA, 15 bp, Homo sapiens
actaaggtatcatgt

SEQ ID NO: 1061490 - DNA, 15 bp, Homo sapiens
gactaaggtatcatg

SEQ ID NO: 1061491 - DNA, 15 bp, Homo sapiens
tgactaaggtatcat

SEQ ID NO: 1061492 - DNA, 15 bp, Homo sapiens
ctgactaaggtatca

SEQ ID NO: 1061493 - DNA, 15 bp, Homo sapiens
cctgactaaggtatc

SEQ ID NO: 1061494 - DNA, 15 bp, Homo sapiens
tcctgactaaggtat

SEQ ID NO: 1061495 - DNA, 15 bp, Homo sapiens
ttcctgactaaggta

SEQ ID NO: 1061496 - DNA, 15 bp, Homo sapiens
attcctgactaaggt

SEQ ID NO: 1061497 - DNA, 15 bp, Homo sapiens
aattcctgactaagg

SEQ ID NO: 1061498 - DNA, 15 bp, Homo sapiens
caattcctgactaag

SEQ ID NO: 1061499 - DNA, 15 bp, Homo sapiens
tcaattcctgactaa

SEQ ID NO: 1061500 - DNA, 15 bp, Homo sapiens
gtcaattcctgacta

SEQ ID NO: 1061501 - DNA, 15 bp, Homo sapiens
ggtcaattcctgact

SEQ ID NO: 1061502 - DNA, 15 bp, Homo sapiens
aggtcaattcctgac

SEQ ID NO: 1061503 - DNA, 15 bp, Homo sapiens
taggtcaattcctga

SEQ ID NO: 1061504 - DNA, 15 bp, Homo sapiens
ttaggtcaattcctg

SEQ ID NO: 1061505 - DNA, 15 bp, Homo sapiens
tttaggtcaattcct

SEQ ID NO: 1061506 - DNA, 15 bp, Homo sapiens
atttaggtcaattcc

SEQ ID NO: 1061507 - DNA, 15 bp, Homo sapiens
aatttaggtcaattc

SEQ ID NO: 1061508 - DNA, 15 bp, Homo sapiens
gaatttaggtcaatt

SEQ ID NO: 1061509 - DNA, 15 bp, Homo sapiens
agaatttaggtcaat

SEQ ID NO: 1061510 - DNA, 15 bp, Homo sapiens
cagaatttaggtcaa

SEQ ID NO: 1061511 - DNA, 15 bp, Homo sapiens
acagaatttaggtca

SEQ ID NO: 1061512 - DNA, 15 bp, Homo sapiens
cacagaatttaggtc

SEQ ID NO: 1061513 - DNA, 15 bp, Homo sapiens
tcacagaatttaggt

SEQ ID NO: 1061514 - DNA, 15 bp, Homo sapiens
atcacagaatttagg

SEQ ID NO: 1061515 - DNA, 15 bp, Homo sapiens
aatcacagaatttag

SEQ ID NO: 1061516 - DNA, 15 bp, Homo sapiens
gaatcacagaattta

SEQ ID NO: 1061517 - DNA, 15 bp, Homo sapiens
tgaatcacagaattt

SEQ ID NO: 1061518 - DNA, 15 bp, Homo sapiens
atgaatcacagaatt

SEQ ID NO: 1061519 - DNA, 15 bp, Homo sapiens
catgaatcacagaat

SEQ ID NO: 1061520 - DNA, 15 bp, Homo sapiens
gcatgaatcacagaa

SEQ ID NO: 1061521 - DNA, 15 bp, Homo sapiens
agcatgaatcacaga

SEQ ID NO: 1061522 - DNA, 15 bp, Homo sapiens
gagcatgaatcacag

SEQ ID NO: 1061523 - DNA, 15 bp, Homo sapiens
agagcatgaatcaca

SEQ ID NO: 1061524 - DNA, 15 bp, Homo sapiens
gagagcatgaatcac

SEQ ID NO: 1061525 - DNA, 15 bp, Homo sapiens
ggagagcatgaatca

SEQ ID NO: 1061526 - DNA, 15 bp, Homo sapiens
aggagagcatgaatc

SEQ ID NO: 1061527 - DNA, 15 bp, Homo sapiens
gaggagagcatgaat

SEQ ID NO: 1061528 - DNA, 15 bp, Homo sapiens
ggaggagagcatgaa

SEQ ID NO: 1061529 - DNA, 15 bp, Homo sapiens
tggaggagagcatga

SEQ ID NO: 1061530 - DNA, 15 bp, Homo sapiens
atggaggagagcatg

SEQ ID NO: 1061531 - DNA, 15 bp, Homo sapiens
aatggaggagagcat

SEQ ID NO: 1061532 - DNA, 15 bp, Homo sapiens
gaatggaggagagca

SEQ ID NO: 1061533 - DNA, 15 bp, Homo sapiens
tgaatggaggagagc

SEQ ID NO: 1061534 - DNA, 15 bp, Homo sapiens
atgaatggaggagag

SEQ ID NO: 1061535 - DNA, 15 bp, Homo sapiens
aatgaatggaggaga

SEQ ID NO: 1061536 - DNA, 15 bp, Homo sapiens
gaatgaatggaggag

SEQ ID NO: 1061537 - DNA, 15 bp, Homo sapiens
tgaatgaatggagga

SEQ ID NO: 1061538 - DNA, 15 bp, Homo sapiens
atgaatgaatggagg

SEQ ID NO: 1061539 - DNA, 15 bp, Homo sapiens
aatgaatgaatggag

SEQ ID NO: 1061540 - DNA, 15 bp, Homo sapiens
aaatgaatgaatgga

SEQ ID NO: 1061541 - DNA, 15 bp, Homo sapiens
gaaatgaatgaatgg

SEQ ID NO: 1061542 - DNA, 15 bp, Homo sapiens
agaaatgaatgaatg

SEQ ID NO: 1061543 - DNA, 15 bp, Homo sapiens
aagaaatgaatgaat

SEQ ID NO: 1061544 - DNA, 15 bp, Homo sapiens
aaagaaatgaatgaa

SEQ ID NO: 1061545 - DNA, 15 bp, Homo sapiens
gaaagaaatgaatga

SEQ ID NO: 1061546 - DNA, 15 bp, Homo sapiens
agaaagaaatgaatg

SEQ ID NO: 1061547 - DNA, 15 bp, Homo sapiens
aagaaagaaatgaat

SEQ ID NO: 1061548 - DNA, 15 bp, Homo sapiens
taagaaagaaatgaa

SEQ ID NO: 1061549 - DNA, 15 bp, Homo sapiens
ataagaaagaaatga

SEQ ID NO: 1061550 - DNA, 15 bp, Homo sapiens
cataagaaagaaatg

SEQ ID NO: 1061551 - DNA, 15 bp, Homo sapiens
ccataagaaagaaat

SEQ ID NO: 1061552 - DNA, 15 bp, Homo sapiens
tccataagaaagaaa

SEQ ID NO: 1061553 - DNA, 15 bp, Homo sapiens
ctccataagaaagaa

SEQ ID NO: 1061554 - DNA, 15 bp, Homo sapiens
tctccataagaaaga

SEQ ID NO: 1061555 - DNA, 15 bp, Homo sapiens
ttctccataagaaag

SEQ ID NO: 1061556 - DNA, 15 bp, Homo sapiens
attctccataagaaa

SEQ ID NO: 1061557 - DNA, 15 bp, Homo sapiens
gattctccataagaa

SEQ ID NO: 1061558 - DNA, 15 bp, Homo sapiens
agattctccataaga

SEQ ID NO: 1061559 - DNA, 15 bp, Homo sapiens
aagattctccataag

SEQ ID NO: 1061560 - DNA, 15 bp, Homo sapiens
gaagattctccataa

SEQ ID NO: 1061561 - DNA, 15 bp, Homo sapiens
agaagattctccata

SEQ ID NO: 1061562 - DNA, 15 bp, Homo sapiens
gagaagattctccat

SEQ ID NO: 1061563 - DNA, 15 bp, Homo sapiens
agagaagattctcca

SEQ ID NO: 1061564 - DNA, 15 bp, Homo sapiens
cagagaagattctcc

SEQ ID NO: 1061565 - DNA, 15 bp, Homo sapiens
gcagagaagattctc

SEQ ID NO: 1061566 - DNA, 15 bp, Homo sapiens
tgcagagaagattct

SEQ ID NO: 1061567 - DNA, 15 bp, Homo sapiens
atgcagagaagattc

SEQ ID NO: 1061568 - DNA, 15 bp, Homo sapiens
tatgcagagaagatt

SEQ ID NO: 1061569 - DNA, 15 bp, Homo sapiens
ctatgcagagaagat

SEQ ID NO: 1061570 - DNA, 15 bp, Homo sapiens
tctatgcagagaaga

SEQ ID NO: 1061571 - DNA, 15 bp, Homo sapiens
ttctatgcagagaag

SEQ ID NO: 1061572 - DNA, 15 bp, Homo sapiens
attctatgcagagaa

SEQ ID NO: 1061573 - DNA, 15 bp, Homo sapiens
tattctatgcagaga

SEQ ID NO: 1061574 - DNA, 15 bp, Homo sapiens
gtattctatgcagag

SEQ ID NO: 1061575 - DNA, 15 bp, Homo sapiens
ggtattctatgcaga

SEQ ID NO: 1061576 - DNA, 15 bp, Homo sapiens
tggtattctatgcag

SEQ ID NO: 1061577 - DNA, 15 bp, Homo sapiens
ctggtattctatgca

SEQ ID NO: 1061578 - DNA, 15 bp, Homo sapiens
cctggtattctatgc

SEQ ID NO: 1061579 - DNA, 15 bp, Homo sapiens
gcctggtattctatg

SEQ ID NO: 1061580 - DNA, 15 bp, Homo sapiens
agcctggtattctat

SEQ ID NO: 1061581 - DNA, 15 bp, Homo sapiens
cagcctggtattcta

SEQ ID NO: 1061582 - DNA, 15 bp, Homo sapiens
tcagcctggtattct

SEQ ID NO: 1061583 - DNA, 15 bp, Homo sapiens
ctcagcctggtattc

SEQ ID NO: 1061584 - DNA, 15 bp, Homo sapiens
gctcagcctggtatt

SEQ ID NO: 1061585 - DNA, 15 bp, Homo sapiens
ggctcagcctggtat

SEQ ID NO: 1061586 - DNA, 15 bp, Homo sapiens
gggctcagcctggta

SEQ ID NO: 1061587 - DNA, 15 bp, Homo sapiens
agggctcagcctggt

SEQ ID NO: 1061588 - DNA, 15 bp, Homo sapiens
tagggctcagcctgg

SEQ ID NO: 1061589 - DNA, 15 bp, Homo sapiens
ttagggctcagcctg

SEQ ID NO: 1061590 - DNA, 15 bp, Homo sapiens
tttagggctcagcct

SEQ ID NO: 1061591 - DNA, 15 bp, Homo sapiens
ttttagggctcagcc

SEQ ID NO: 1061592 - DNA, 15 bp, Homo sapiens
gttttagggctcagc

SEQ ID NO: 1061593 - DNA, 15 bp, Homo sapiens
ggttttagggctcag

SEQ ID NO: 1061594 - DNA, 15 bp, Homo sapiens
tggttttagggctca

SEQ ID NO: 1061595 - DNA, 15 bp, Homo sapiens
atggttttagggctc

SEQ ID NO: 1061596 - DNA, 15 bp, Homo sapiens
catggttttagggct

SEQ ID NO: 1061597 - DNA, 15 bp, Homo sapiens
ccatggttttagggc

SEQ ID NO: 1061598 - DNA, 15 bp, Homo sapiens
accatggttttaggg

SEQ ID NO: 1061599 - DNA, 15 bp, Homo sapiens
caccatggttttagg

SEQ ID NO: 1061600 - DNA, 15 bp, Homo sapiens
tcaccatggttttag

SEQ ID NO: 1061601 - DNA, 15 bp, Homo sapiens
ttcaccatggtttta

SEQ ID NO: 1061602 - DNA, 15 bp, Homo sapiens
gttcaccatggtttt

SEQ ID NO: 1061603 - DNA, 15 bp, Homo sapiens
tgttcaccatggttt

SEQ ID NO: 1061604 - DNA, 15 bp, Homo sapiens
gtgttcaccatggtt

SEQ ID NO: 1061605 - DNA, 15 bp, Homo sapiens
tgtgttcaccatggt

SEQ ID NO: 1061606 - DNA, 15 bp, Homo sapiens
ctgtgttcaccatgg

SEQ ID NO: 1061607 - DNA, 15 bp, Homo sapiens
gctgtgttcaccatg

SEQ ID NO: 1061608 - DNA, 15 bp, Homo sapiens
tgctgtgttcaccat

SEQ ID NO: 1061609 - DNA, 15 bp, Homo sapiens
gtgctgtgttcacca

SEQ ID NO: 1061610 - DNA, 15 bp, Homo sapiens
tgtgctgtgttcacc

SEQ ID NO: 1061611 - DNA, 15 bp, Homo sapiens
gtgtgctgtgttcac

SEQ ID NO: 1061612 - DNA, 15 bp, Homo sapiens
agtgtgctgtgttca

SEQ ID NO: 1061613 - DNA, 15 bp, Homo sapiens
tagtgtgctgtgttc

SEQ ID NO: 1061614 - DNA, 15 bp, Homo sapiens
gtagtgtgctgtgtt

SEQ ID NO: 1061615 - DNA, 15 bp, Homo sapiens
ggtagtgtgctgtgt

SEQ ID NO: 1061616 - DNA, 15 bp, Homo sapiens
aggtagtgtgctgtg

SEQ ID NO: 1061617 - DNA, 15 bp, Homo sapiens
taggtagtgtgctgt

SEQ ID NO: 1061618 - DNA, 15 bp, Homo sapiens
gtaggtagtgtgctg

SEQ ID NO: 1061619 - DNA, 15 bp, Homo sapiens
ggtaggtagtgtgct

SEQ ID NO: 1061620 - DNA, 15 bp, Homo sapiens
gggtaggtagtgtgc

SEQ ID NO: 1061621 - DNA, 15 bp, Homo sapiens
agggtaggtagtgtg

SEQ ID NO: 1061622 - DNA, 15 bp, Homo sapiens
gagggtaggtagtgt

SEQ ID NO: 1061623 - DNA, 15 bp, Homo sapiens
tgagggtaggtagtg

SEQ ID NO: 1061624 - DNA, 15 bp, Homo sapiens
ttgagggtaggtagt

SEQ ID NO: 1061625 - DNA, 15 bp, Homo sapiens
cttgagggtaggtag

SEQ ID NO: 1061626 - DNA, 15 bp, Homo sapiens
gcttgagggtaggta

SEQ ID NO: 1061627 - DNA, 15 bp, Homo sapiens
tgcttgagggtaggt

SEQ ID NO: 1061628 - DNA, 15 bp, Homo sapiens
ctgcttgagggtagg

SEQ ID NO: 1061629 - DNA, 15 bp, Homo sapiens
cctgcttgagggtag

SEQ ID NO: 1061630 - DNA, 15 bp, Homo sapiens
acctgcttgagggta

SEQ ID NO: 1061631 - DNA, 15 bp, Homo sapiens
aacctgcttgagggt

SEQ ID NO: 1061632 - DNA, 15 bp, Homo sapiens
gaacctgcttgaggg

SEQ ID NO: 1061633 - DNA, 15 bp, Homo sapiens
agaacctgcttgagg

SEQ ID NO: 1061634 - DNA, 15 bp, Homo sapiens
tagaacctgcttgag

SEQ ID NO: 1061635 - DNA, 15 bp, Homo sapiens
ctagaacctgcttga

SEQ ID NO: 1061636 - DNA, 15 bp, Homo sapiens
actagaacctgcttg

SEQ ID NO: 1061637 - DNA, 15 bp, Homo sapiens
gactagaacctgctt

SEQ ID NO: 1061638 - DNA, 15 bp, Homo sapiens
tgactagaacctgct

SEQ ID NO: 1061639 - DNA, 15 bp, Homo sapiens
ttgactagaacctgc

SEQ ID NO: 1061640 - DNA, 15 bp, Homo sapiens
tttgactagaacctg

SEQ ID NO: 1061641 - DNA, 15 bp, Homo sapiens
gtttgactagaacct

SEQ ID NO: 1061642 - DNA, 15 bp, Homo sapiens
tgtttgactagaacc

SEQ ID NO: 1061643 - DNA, 15 bp, Homo sapiens
ctgtttgactagaac

SEQ ID NO: 1061644 - DNA, 15 bp, Homo sapiens
tctgtttgactagaa

SEQ ID NO: 1061645 - DNA, 15 bp, Homo sapiens
ctctgtttgactaga

SEQ ID NO: 1061646 - DNA, 15 bp, Homo sapiens
tctctgtttgactag

SEQ ID NO: 1061647 - DNA, 15 bp, Homo sapiens
ctctctgtttgacta

SEQ ID NO: 1061648 - DNA, 15 bp, Homo sapiens
tctctctgtttgact

SEQ ID NO: 1061649 - DNA, 15 bp, Homo sapiens
gtctctctgtttgac

SEQ ID NO: 1061650 - DNA, 15 bp, Homo sapiens
tgtctctctgtttga

SEQ ID NO: 1061651 - DNA, 15 bp, Homo sapiens
ctgtctctctgtttg

SEQ ID NO: 1061652 - DNA, 15 bp, Homo sapiens
tctgtctctctgttt

SEQ ID NO: 1061653 - DNA, 15 bp, Homo sapiens
gtctgtctctctgtt

SEQ ID NO: 1061654 - DNA, 15 bp, Homo sapiens
tgtctgtctctctgt

SEQ ID NO: 1061655 - DNA, 15 bp, Homo sapiens
ctgtctgtctctctg

SEQ ID NO: 1061656 - DNA, 15 bp, Homo sapiens
gctgtctgtctctct

SEQ ID NO: 1061657 - DNA, 15 bp, Homo sapiens
agctgtctgtctctc

SEQ ID NO: 1061658 - DNA, 15 bp, Homo sapiens
tagctgtctgtctct

SEQ ID NO: 1061659 - DNA, 15 bp, Homo sapiens
ttagctgtctgtctc

SEQ ID NO: 1061660 - DNA, 15 bp, Homo sapiens
cttagctgtctgtct

SEQ ID NO: 1061661 - DNA, 15 bp, Homo sapiens
acttagctgtctgtc

SEQ ID NO: 1061662 - DNA, 15 bp, Homo sapiens
tacttagctgtctgt

SEQ ID NO: 1061663 - DNA, 15 bp, Homo sapiens
ttacttagctgtctg

SEQ ID NO: 1061664 - DNA, 15 bp, Homo sapiens
cttacttagctgtct

SEQ ID NO: 1061665 - DNA, 15 bp, Homo sapiens
acttacttagctgtc

SEQ ID NO: 1061666 - DNA, 15 bp, Homo sapiens
tacttacttagctgt

SEQ ID NO: 1061667 - DNA, 15 bp, Homo sapiens
ttacttacttagctg

SEQ ID NO: 1061668 - DNA, 15 bp, Homo sapiens
cttacttacttagct

SEQ ID NO: 1061669 - DNA, 15 bp, Homo sapiens
ccttacttacttagc

SEQ ID NO: 1061670 - DNA, 15 bp, Homo sapiens
tccttacttacttag

SEQ ID NO: 1061671 - DNA, 15 bp, Homo sapiens
ttccttacttactta

SEQ ID NO: 1061672 - DNA, 15 bp, Homo sapiens
gttccttacttactt

SEQ ID NO: 1061673 - DNA, 15 bp, Homo sapiens
agttccttacttact

SEQ ID NO: 1061674 - DNA, 15 bp, Homo sapiens
tagttccttacttac

SEQ ID NO: 1061675 - DNA, 15 bp, Homo sapiens
gtagttccttactta

SEQ ID NO: 1061676 - DNA, 15 bp, Homo sapiens
agtagttccttactt

SEQ ID NO: 1061677 - DNA, 15 bp, Homo sapiens
cagtagttccttact

SEQ ID NO: 1061678 - DNA, 15 bp, Homo sapiens
acagtagttccttac

SEQ ID NO: 1061679 - DNA, 15 bp, Homo sapiens
cacagtagttcctta

SEQ ID NO: 1061680 - DNA, 15 bp, Homo sapiens
gcacagtagttcctt

SEQ ID NO: 1061681 - DNA, 15 bp, Homo sapiens
agcacagtagttcct

SEQ ID NO: 1061682 - DNA, 15 bp, Homo sapiens
aagcacagtagttcc

SEQ ID NO: 1061683 - DNA, 15 bp, Homo sapiens
aaagcacagtagttc

SEQ ID NO: 1061684 - DNA, 15 bp, Homo sapiens
taaagcacagtagtt

SEQ ID NO: 1061685 - DNA, 15 bp, Homo sapiens
ctaaagcacagtagt

SEQ ID NO: 1061686 - DNA, 15 bp, Homo sapiens
tctaaagcacagtag

SEQ ID NO: 1061687 - DNA, 15 bp, Homo sapiens
ctctaaagcacagta

SEQ ID NO: 1061688 - DNA, 15 bp, Homo sapiens
actctaaagcacagt

SEQ ID NO: 1061689 - DNA, 15 bp, Homo sapiens
cactctaaagcacag

SEQ ID NO: 1061690 - DNA, 15 bp, Homo sapiens
tcactctaaagcaca

SEQ ID NO: 1061691 - DNA, 15 bp, Homo sapiens
ctcactctaaagcac

SEQ ID NO: 1061692 - DNA, 15 bp, Homo sapiens
cctcactctaaagca

SEQ ID NO: 1061693 - DNA, 15 bp, Homo sapiens
ccctcactctaaagc

SEQ ID NO: 1061694 - DNA, 15 bp, Homo sapiens
gccctcactctaaag

SEQ ID NO: 1061695 - DNA, 15 bp, Homo sapiens
tgccctcactctaaa

SEQ ID NO: 1061696 - DNA, 15 bp, Homo sapiens
ttgccctcactctaa

SEQ ID NO: 1061697 - DNA, 15 bp, Homo sapiens
attgccctcactcta

SEQ ID NO: 1061698 - DNA, 15 bp, Homo sapiens
cattgccctcactct

SEQ ID NO: 1061699 - DNA, 15 bp, Homo sapiens
gcattgccctcactc

SEQ ID NO: 1061700 - DNA, 15 bp, Homo sapiens
tgcattgccctcact

SEQ ID NO: 1061701 - DNA, 15 bp, Homo sapiens
gtgcattgccctcac

SEQ ID NO: 1061702 - DNA, 15 bp, Homo sapiens
cgtgcattgccctca

SEQ ID NO: 1061703 - DNA, 15 bp, Homo sapiens
acgtgcattgccctc

SEQ ID NO: 1061704 - DNA, 15 bp, Homo sapiens
tacgtgcattgccct

SEQ ID NO: 1061705 - DNA, 15 bp, Homo sapiens
atacgtgcattgccc

SEQ ID NO: 1061706 - DNA, 15 bp, Homo sapiens
tatacgtgcattgcc

SEQ ID NO: 1061707 - DNA, 15 bp, Homo sapiens
atatacgtgcattgc

SEQ ID NO: 1061708 - DNA, 15 bp, Homo sapiens
aatatacgtgcattg

SEQ ID NO: 1061709 - DNA, 15 bp, Homo sapiens
taatatacgtgcatt

SEQ ID NO: 1061710 - DNA, 15 bp, Homo sapiens
gtaatatacgtgcat

SEQ ID NO: 1061711 - DNA, 15 bp, Homo sapiens
ggtaatatacgtgca

SEQ ID NO: 1061712 - DNA, 15 bp, Homo sapiens
tggtaatatacgtgc

SEQ ID NO: 1061713 - DNA, 15 bp, Homo sapiens
gtggtaatatacgtg

SEQ ID NO: 1061714 - DNA, 15 bp, Homo sapiens
cgtggtaatatacgt

SEQ ID NO: 1061715 - DNA, 15 bp, Homo sapiens
acgtggtaatatacg

SEQ ID NO: 1061716 - DNA, 15 bp, Homo sapiens
gacgtggtaatatac

SEQ ID NO: 1061717 - DNA, 15 bp, Homo sapiens
agacgtggtaatata

SEQ ID NO: 1061718 - DNA, 15 bp, Homo sapiens
aagacgtggtaatat

SEQ ID NO: 1061719 - DNA, 15 bp, Homo sapiens
aaagacgtggtaata

SEQ ID NO: 1061720 - DNA, 15 bp, Homo sapiens
gaaagacgtggtaat

SEQ ID NO: 1061721 - DNA, 15 bp, Homo sapiens
tgaaagacgtggtaa

SEQ ID NO: 1061722 - DNA, 15 bp, Homo sapiens
ttgaaagacgtggta

SEQ ID NO: 1061723 - DNA, 15 bp, Homo sapiens
attgaaagacgtggt

SEQ ID NO: 1061724 - DNA, 15 bp, Homo sapiens
aattgaaagacgtgg

SEQ ID NO: 1061725 - DNA, 15 bp, Homo sapiens
aaattgaaagacgtg

SEQ ID NO: 1061726 - DNA, 15 bp, Homo sapiens
aaaattgaaagacgt

SEQ ID NO: 1061727 - DNA, 15 bp, Homo sapiens
gaaaattgaaagacg

SEQ ID NO: 1061728 - DNA, 15 bp, Homo sapiens
ggaaaattgaaagac

SEQ ID NO: 1061729 - DNA, 15 bp, Homo sapiens
gggaaaattgaaaga

SEQ ID NO: 1061730 - DNA, 15 bp, Homo sapiens
ggggaaaattgaaag

SEQ ID NO: 1061731 - DNA, 15 bp, Homo sapiens
aggggaaaattgaaa

SEQ ID NO: 1061732 - DNA, 15 bp, Homo sapiens
caggggaaaattgaa

SEQ ID NO: 1061733 - DNA, 15 bp, Homo sapiens
gcaggggaaaattga

SEQ ID NO: 1061734 - DNA, 15 bp, Homo sapiens
tgcaggggaaaattg

SEQ ID NO: 1061735 - DNA, 15 bp, Homo sapiens
atgcaggggaaaatt

SEQ ID NO: 1061736 - DNA, 15 bp, Homo sapiens
aatgcaggggaaaat

SEQ ID NO: 1061737 - DNA, 15 bp, Homo sapiens
aaatgcaggggaaaa

SEQ ID NO: 1061738 - DNA, 15 bp, Homo sapiens
taaatgcaggggaaa

SEQ ID NO: 1061739 - DNA, 15 bp, Homo sapiens
ctaaatgcaggggaa

SEQ ID NO: 1061740 - DNA, 15 bp, Homo sapiens
gctaaatgcagggga

SEQ ID NO: 1061741 - DNA, 15 bp, Homo sapiens
agctaaatgcagggg

SEQ ID NO: 1061742 - DNA, 15 bp, Homo sapiens
gagctaaatgcaggg

SEQ ID NO: 1061743 - DNA, 15 bp, Homo sapiens
ggagctaaatgcagg

SEQ ID NO: 1061744 - DNA, 15 bp, Homo sapiens
aggagctaaatgcag

SEQ ID NO: 1061745 - DNA, 15 bp, Homo sapiens
caggagctaaatgca

SEQ ID NO: 1061746 - DNA, 15 bp, Homo sapiens
acaggagctaaatgc

SEQ ID NO: 1061747 - DNA, 15 bp, Homo sapiens
cacaggagctaaatg

SEQ ID NO: 1061748 - DNA, 15 bp, Homo sapiens
acacaggagctaaat

SEQ ID NO: 1061749 - DNA, 15 bp, Homo sapiens
cacacaggagctaaa

SEQ ID NO: 1061750 - DNA, 15 bp, Homo sapiens
ccacacaggagctaa

SEQ ID NO: 1061751 - DNA, 15 bp, Homo sapiens
tccacacaggagcta

SEQ ID NO: 1061752 - DNA, 15 bp, Homo sapiens
atccacacaggagct

SEQ ID NO: 1061753 - DNA, 15 bp, Homo sapiens
catccacacaggagc

SEQ ID NO: 1061754 - DNA, 15 bp, Homo sapiens
acatccacacaggag

SEQ ID NO: 1061755 - DNA, 15 bp, Homo sapiens
gacatccacacagga

SEQ ID NO: 1061756 - DNA, 15 bp, Homo sapiens
ggacatccacacagg

SEQ ID NO: 1061757 - DNA, 15 bp, Homo sapiens
aggacatccacacag

SEQ ID NO: 1061758 - DNA, 15 bp, Homo sapiens
aaggacatccacaca

SEQ ID NO: 1061759 - DNA, 15 bp, Homo sapiens
aaaggacatccacac

SEQ ID NO: 1061760 - DNA, 15 bp, Homo sapiens
taaaggacatccaca

SEQ ID NO: 1061761 - DNA, 15 bp, Homo sapiens
ataaaggacatccac

SEQ ID NO: 1061762 - DNA, 15 bp, Homo sapiens
cataaaggacatcca

SEQ ID NO: 1061763 - DNA, 15 bp, Homo sapiens
tcataaaggacatcc

SEQ ID NO: 1061764 - DNA, 15 bp, Homo sapiens
atcataaaggacatc

SEQ ID NO: 1061765 - DNA, 15 bp, Homo sapiens
aatcataaaggacat

SEQ ID NO: 1061766 - DNA, 15 bp, Homo sapiens
aaatcataaaggaca

SEQ ID NO: 1061767 - DNA, 15 bp, Homo sapiens
aaaatcataaaggac

SEQ ID NO: 1061768 - DNA, 15 bp, Homo sapiens
taaaatcataaagga

SEQ ID NO: 1061769 - DNA, 15 bp, Homo sapiens
ctaaaatcataaagg

SEQ ID NO: 1061770 - DNA, 15 bp, Homo sapiens
tctaaaatcataaag

SEQ ID NO: 1061771 - DNA, 15 bp, Homo sapiens
ctctaaaatcataaa

SEQ ID NO: 1061772 - DNA, 15 bp, Homo sapiens
cctctaaaatcataa

SEQ ID NO: 1061773 - DNA, 15 bp, Homo sapiens
acctctaaaatcata

SEQ ID NO: 1061774 - DNA, 15 bp, Homo sapiens
gacctctaaaatcat

SEQ ID NO: 1061775 - DNA, 15 bp, Homo sapiens
tgacctctaaaatca

SEQ ID NO: 1061776 - DNA, 15 bp, Homo sapiens
atgacctctaaaatc

SEQ ID NO: 1061777 - DNA, 15 bp, Homo sapiens
tatgacctctaaaat

SEQ ID NO: 1061778 - DNA, 15 bp, Homo sapiens
ctatgacctctaaaa

SEQ ID NO: 1061779 - DNA, 15 bp, Homo sapiens
actatgacctctaaa

SEQ ID NO: 1061780 - DNA, 15 bp, Homo sapiens
tactatgacctctaa

SEQ ID NO: 1061781 - DNA, 15 bp, Homo sapiens
ttactatgacctcta

SEQ ID NO: 1061782 - DNA, 15 bp, Homo sapiens
tttactatgacctct

SEQ ID NO: 1061783 - DNA, 15 bp, Homo sapiens
ttttactatgacctc

SEQ ID NO: 1061784 - DNA, 15 bp, Homo sapiens
cttttactatgacct

SEQ ID NO: 1061785 - DNA, 15 bp, Homo sapiens
tcttttactatgacc

SEQ ID NO: 1061786 - DNA, 15 bp, Homo sapiens
atcttttactatgac

SEQ ID NO: 1061787 - DNA, 15 bp, Homo sapiens
catcttttactatga

SEQ ID NO: 1061788 - DNA, 15 bp, Homo sapiens
ccatcttttactatg

SEQ ID NO: 1061789 - DNA, 15 bp, Homo sapiens
tccatcttttactat

SEQ ID NO: 1061790 - DNA, 15 bp, Homo sapiens
ctccatcttttacta

SEQ ID NO: 1061791 - DNA, 15 bp, Homo sapiens
cctccatcttttact

SEQ ID NO: 1061792 - DNA, 15 bp, Homo sapiens
gcctccatcttttac

SEQ ID NO: 1061793 - DNA, 15 bp, Homo sapiens
ggcctccatctttta

SEQ ID NO: 1061794 - DNA, 15 bp, Homo sapiens
aggcctccatctttt

SEQ ID NO: 1061795 - DNA, 15 bp, Homo sapiens
gaggcctccatcttt

SEQ ID NO: 1061796 - DNA, 15 bp, Homo sapiens
agaggcctccatctt

SEQ ID NO: 1061797 - DNA, 15 bp, Homo sapiens
tagaggcctccatct

SEQ ID NO: 1061798 - DNA, 15 bp, Homo sapiens
ctagaggcctccatc

SEQ ID NO: 1061799 - DNA, 15 bp, Homo sapiens
gctagaggcctccat

SEQ ID NO: 1061800 - DNA, 15 bp, Homo sapiens
tgctagaggcctcca

SEQ ID NO: 1061801 - DNA, 15 bp, Homo sapiens
ttgctagaggcctcc

SEQ ID NO: 1061802 - DNA, 15 bp, Homo sapiens
cttgctagaggcctc

SEQ ID NO: 1061803 - DNA, 15 bp, Homo sapiens
gcttgctagaggcct

SEQ ID NO: 1061804 - DNA, 15 bp, Homo sapiens
agcttgctagaggcc

SEQ ID NO: 1061805 - DNA, 15 bp, Homo sapiens
cagcttgctagaggc

SEQ ID NO: 1061806 - DNA, 15 bp, Homo sapiens
gcagcttgctagagg

SEQ ID NO: 1061807 - DNA, 15 bp, Homo sapiens
tgcagcttgctagag

SEQ ID NO: 1061808 - DNA, 15 bp, Homo sapiens
ctgcagcttgctaga

SEQ ID NO: 1061809 - DNA, 15 bp, Homo sapiens
gctgcagcttgctag

SEQ ID NO: 1061810 - DNA, 15 bp, Homo sapiens
tgctgcagcttgcta

SEQ ID NO: 1061811 - DNA, 15 bp, Homo sapiens
atgctgcagcttgct

SEQ ID NO: 1061812 - DNA, 15 bp, Homo sapiens
catgctgcagcttgc

SEQ ID NO: 1061813 - DNA, 15 bp, Homo sapiens
ccatgctgcagcttg

SEQ ID NO: 1061814 - DNA, 15 bp, Homo sapiens
gccatgctgcagctt

SEQ ID NO: 1061815 - DNA, 15 bp, Homo sapiens
tgccatgctgcagct

SEQ ID NO: 1061816 - DNA, 15 bp, Homo sapiens
ctgccatgctgcagc

SEQ ID NO: 1061817 - DNA, 15 bp, Homo sapiens
cctgccatgctgcag

SEQ ID NO: 1061818 - DNA, 15 bp, Homo sapiens
ccctgccatgctgca

SEQ ID NO: 1061819 - DNA, 15 bp, Homo sapiens
gccctgccatgctgc

SEQ ID NO: 1061820 - DNA, 15 bp, Homo sapiens
agccctgccatgctg

SEQ ID NO: 1061821 - DNA, 15 bp, Homo sapiens
cagccctgccatgct

SEQ ID NO: 1061822 - DNA, 15 bp, Homo sapiens
ccagccctgccatgc

SEQ ID NO: 1061823 - DNA, 15 bp, Homo sapiens
tccagccctgccatg

SEQ ID NO: 1061824 - DNA, 15 bp, Homo sapiens
ttccagccctgccat

SEQ ID NO: 1061825 - DNA, 15 bp, Homo sapiens
tttccagccctgcca

SEQ ID NO: 1061826 - DNA, 15 bp, Homo sapiens
atttccagccctgcc

SEQ ID NO: 1061827 - DNA, 15 bp, Homo sapiens
tatttccagccctgc

SEQ ID NO: 1061828 - DNA, 15 bp, Homo sapiens
ctatttccagccctg

SEQ ID NO: 1061829 - DNA, 15 bp, Homo sapiens
tctatttccagccct

SEQ ID NO: 1061830 - DNA, 15 bp, Homo sapiens
atctatttccagccc

SEQ ID NO: 1061831 - DNA, 15 bp, Homo sapiens
catctatttccagcc

SEQ ID NO: 1061832 - DNA, 15 bp, Homo sapiens
acatctatttccagc

SEQ ID NO: 1061833 - DNA, 15 bp, Homo sapiens
aacatctatttccag

SEQ ID NO: 1061834 - DNA, 15 bp, Homo sapiens
caacatctatttcca

SEQ ID NO: 1061835 - DNA, 15 bp, Homo sapiens
tcaacatctatttcc

SEQ ID NO: 1061836 - DNA, 15 bp, Homo sapiens
ttcaacatctatttc

SEQ ID NO: 1061837 - DNA, 15 bp, Homo sapiens
cttcaacatctattt

SEQ ID NO: 1061838 - DNA, 15 bp, Homo sapiens
gcttcaacatctatt

SEQ ID NO: 1061839 - DNA, 15 bp, Homo sapiens
tgcttcaacatctat

SEQ ID NO: 1061840 - DNA, 15 bp, Homo sapiens
ttgcttcaacatcta

SEQ ID NO: 1061841 - DNA, 15 bp, Homo sapiens
tttgcttcaacatct

SEQ ID NO: 1061842 - DNA, 15 bp, Homo sapiens
ctttgcttcaacatc

SEQ ID NO: 1061843 - DNA, 15 bp, Homo sapiens
cctttgcttcaacat

SEQ ID NO: 1061844 - DNA, 15 bp, Homo sapiens
ccctttgcttcaaca

SEQ ID NO: 1061845 - DNA, 15 bp, Homo sapiens
tccctttgcttcaac

SEQ ID NO: 1061846 - DNA, 15 bp, Homo sapiens
ttccctttgcttcaa

SEQ ID NO: 1061847 - DNA, 15 bp, Homo sapiens
cttccctttgcttca

SEQ ID NO: 1061848 - DNA, 15 bp, Homo sapiens
ccttccctttgcttc

SEQ ID NO: 1061849 - DNA, 15 bp, Homo sapiens
tccttccctttgctt

SEQ ID NO: 1061850 - DNA, 15 bp, Homo sapiens
ctccttccctttgct

SEQ ID NO: 1061851 - DNA, 15 bp, Homo sapiens
cctccttccctttgc

SEQ ID NO: 1061852 - DNA, 15 bp, Homo sapiens
tcctccttccctttg

SEQ ID NO: 1061853 - DNA, 15 bp, Homo sapiens
ttcctccttcccttt

SEQ ID NO: 1061854 - DNA, 15 bp, Homo sapiens
cttcctccttccctt

SEQ ID NO: 1061855 - DNA, 15 bp, Homo sapiens
gccttcctccttccc

SEQ ID NO: 1061856 - DNA, 15 bp, Homo sapiens
tgccttcctccttcc

SEQ ID NO: 1061857 - DNA, 15 bp, Homo sapiens
gtgccttcctccttc

SEQ ID NO: 1061858 - DNA, 15 bp, Homo sapiens
ggtgccttcctcctt

SEQ ID NO: 1061859 - DNA, 15 bp, Homo sapiens
tggtgccttcctcct

SEQ ID NO: 1061860 - DNA, 15 bp, Homo sapiens
ttggtgccttcctcc

SEQ ID NO: 1061861 - DNA, 15 bp, Homo sapiens
cttggtgccttcctc

SEQ ID NO: 1061862 - DNA, 15 bp, Homo sapiens
ccttggtgccttcct

SEQ ID NO: 1061863 - DNA, 15 bp, Homo sapiens
tccttggtgccttcc

SEQ ID NO: 1061864 - DNA, 15 bp, Homo sapiens
ttccttggtgccttc

SEQ ID NO: 1061865 - DNA, 15 bp, Homo sapiens
tttccttggtgcctt

SEQ ID NO: 1061866 - DNA, 15 bp, Homo sapiens
gtttccttggtgcct

SEQ ID NO: 1061867 - DNA, 15 bp, Homo sapiens
ggtttccttggtgcc

SEQ ID NO: 1061868 - DNA, 15 bp, Homo sapiens
tggtttccttggtgc

SEQ ID NO: 1061869 - DNA, 15 bp, Homo sapiens
ctggtttccttggtg

SEQ ID NO: 1061870 - DNA, 15 bp, Homo sapiens
gctggtttccttggt

SEQ ID NO: 1061871 - DNA, 15 bp, Homo sapiens
cgctggtttccttgg

SEQ ID NO: 1061872 - DNA, 15 bp, Homo sapiens
acgctggtttccttg

SEQ ID NO: 1061873 - DNA, 15 bp, Homo sapiens
cacgctggtttcctt

SEQ ID NO: 1061874 - DNA, 15 bp, Homo sapiens
acacgctggtttcct

SEQ ID NO: 1061875 - DNA, 15 bp, Homo sapiens
aacacgctggtttcc

SEQ ID NO: 1061876 - DNA, 15 bp, Homo sapiens
aaacacgctggtttc

SEQ ID NO: 1061877 - DNA, 15 bp, Homo sapiens
caaacacgctggttt

SEQ ID NO: 1061878 - DNA, 15 bp, Homo sapiens
acaaacacgctggtt

SEQ ID NO: 1061879 - DNA, 15 bp, Homo sapiens
aacaaacacgctggt

SEQ ID NO: 1061880 - DNA, 15 bp, Homo sapiens
caacaaacacgctgg

SEQ ID NO: 1061881 - DNA, 15 bp, Homo sapiens
ccaacaaacacgctg

SEQ ID NO: 1061882 - DNA, 15 bp, Homo sapiens
cccaacaaacacgct

SEQ ID NO: 1061883 - DNA, 15 bp, Homo sapiens
ccccaacaaacacgc

SEQ ID NO: 1061884 - DNA, 15 bp, Homo sapiens
accccaacaaacacg

SEQ ID NO: 1061885 - DNA, 15 bp, Homo sapiens
caccccaacaaacac

SEQ ID NO: 1061886 - DNA, 15 bp, Homo sapiens
ccaccccaacaaaca

SEQ ID NO: 1061887 - DNA, 15 bp, Homo sapiens
cccaccccaacaaac

SEQ ID NO: 1061888 - DNA, 15 bp, Homo sapiens
acccaccccaacaaa

SEQ ID NO: 1061889 - DNA, 15 bp, Homo sapiens
cacccaccccaacaa

SEQ ID NO: 1061890 - DNA, 15 bp, Homo sapiens
acacccaccccaaca

SEQ ID NO: 1061891 - DNA, 15 bp, Homo sapiens
cacacccaccccaac

SEQ ID NO: 1061892 - DNA, 15 bp, Homo sapiens
acacacccaccccaa

SEQ ID NO: 1061893 - DNA, 15 bp, Homo sapiens
cacacacccacccca

SEQ ID NO: 1061894 - DNA, 15 bp, Homo sapiens
tcacacacccacccc

SEQ ID NO: 1061895 - DNA, 15 bp, Homo sapiens
ctcacacacccaccc

SEQ ID NO: 1061896 - DNA, 15 bp, Homo sapiens
actcacacacccacc

SEQ ID NO: 1061897 - DNA, 15 bp, Homo sapiens
aactcacacacccac

SEQ ID NO: 1061898 - DNA, 15 bp, Homo sapiens
aaactcacacaccca

SEQ ID NO: 1061899 - DNA, 15 bp, Homo sapiens
aaaactcacacaccc

SEQ ID NO: 1061900 - DNA, 15 bp, Homo sapiens
gaaaactcacacacc

SEQ ID NO: 1061901 - DNA, 15 bp, Homo sapiens
tgaaaactcacacac

SEQ ID NO: 1061902 - DNA, 15 bp, Homo sapiens
ttgaaaactcacaca

SEQ ID NO: 1061903 - DNA, 15 bp, Homo sapiens
cttgaaaactcacac

SEQ ID NO: 1061904 - DNA, 15 bp, Homo sapiens
acttgaaaactcaca

SEQ ID NO: 1061905 - DNA, 15 bp, Homo sapiens
aacttgaaaactcac

SEQ ID NO: 1061906 - DNA, 15 bp, Homo sapiens
caacttgaaaactca

SEQ ID NO: 1061907 - DNA, 15 bp, Homo sapiens
ccaacttgaaaactc

SEQ ID NO: 1061908 - DNA, 15 bp, Homo sapiens
cccaacttgaaaact

SEQ ID NO: 1061909 - DNA, 15 bp, Homo sapiens
acccaacttgaaaac

SEQ ID NO: 1061910 - DNA, 15 bp, Homo sapiens
aacccaacttgaaaa

SEQ ID NO: 1061911 - DNA, 15 bp, Homo sapiens
aaacccaacttgaaa

SEQ ID NO: 1061912 - DNA, 15 bp, Homo sapiens
aaaacccaacttgaa

SEQ ID NO: 1061913 - DNA, 15 bp, Homo sapiens
caaaacccaacttga

SEQ ID NO: 1061914 - DNA, 15 bp, Homo sapiens
ccaaaacccaacttg

SEQ ID NO: 1061915 - DNA, 15 bp, Homo sapiens
tccaaaacccaactt

SEQ ID NO: 1061916 - DNA, 15 bp, Homo sapiens
ctccaaaacccaact

SEQ ID NO: 1061917 - DNA, 15 bp, Homo sapiens
tctccaaaacccaac

SEQ ID NO: 1061918 - DNA, 15 bp, Homo sapiens
gtctccaaaacccaa

SEQ ID NO: 1061919 - DNA, 15 bp, Homo sapiens
tgtctccaaaaccca

SEQ ID NO: 1061920 - DNA, 15 bp, Homo sapiens
ctgtctccaaaaccc

SEQ ID NO: 1061921 - DNA, 15 bp, Homo sapiens
cctgtctccaaaacc

SEQ ID NO: 1061922 - DNA, 15 bp, Homo sapiens
tcctgtctccaaaac

SEQ ID NO: 1061923 - DNA, 15 bp, Homo sapiens
ctcctgtctccaaaa

SEQ ID NO: 1061924 - DNA, 15 bp, Homo sapiens
gctcctgtctccaaa

SEQ ID NO: 1061925 - DNA, 15 bp, Homo sapiens
ggctcctgtctccaa

SEQ ID NO: 1061926 - DNA, 15 bp, Homo sapiens
gggctcctgtctcca

SEQ ID NO: 1061927 - DNA, 15 bp, Homo sapiens
tgggctcctgtctcc

SEQ ID NO: 1061928 - DNA, 15 bp, Homo sapiens
ctgggctcctgtctc

SEQ ID NO: 1061929 - DNA, 15 bp, Homo sapiens
cctgggctcctgtct

SEQ ID NO: 1061930 - DNA, 15 bp, Homo sapiens
acctgggctcctgtc

SEQ ID NO: 1061931 - DNA, 15 bp, Homo sapiens
cacctgggctcctgt

SEQ ID NO: 1061932 - DNA, 15 bp, Homo sapiens
tcacctgggctcctg

SEQ ID NO: 1061933 - DNA, 15 bp, Homo sapiens
ctcacctgggctcct

SEQ ID NO: 1061934 - DNA, 15 bp, Homo sapiens
gctcacctgggctcc

SEQ ID NO: 1061935 - DNA, 15 bp, Homo sapiens
ggctcacctgggctc

SEQ ID NO: 1061936 - DNA, 15 bp, Homo sapiens
gggctcacctgggct

SEQ ID NO: 1061937 - DNA, 15 bp, Homo sapiens
agggctcacctgggc

SEQ ID NO: 1061938 - DNA, 15 bp, Homo sapiens
aagggctcacctggg

SEQ ID NO: 1061939 - DNA, 15 bp, Homo sapiens
caagggctcacctgg

SEQ ID NO: 1061940 - DNA, 15 bp, Homo sapiens
gcaagggctcacctg

SEQ ID NO: 1061941 - DNA, 15 bp, Homo sapiens
tgcaagggctcacct

SEQ ID NO: 1061942 - DNA, 15 bp, Homo sapiens
ctgcaagggctcacc

SEQ ID NO: 1061943 - DNA, 15 bp, Homo sapiens
cctgcaagggctcac

SEQ ID NO: 1061944 - DNA, 15 bp, Homo sapiens
tcctgcaagggctca

SEQ ID NO: 1061945 - DNA, 15 bp, Homo sapiens
ttcctgcaagggctc

SEQ ID NO: 1061946 - DNA, 15 bp, Homo sapiens
attcctgcaagggct

SEQ ID NO: 1061947 - DNA, 15 bp, Homo sapiens
tattcctgcaagggc

SEQ ID NO: 1061948 - DNA, 15 bp, Homo sapiens
ttattcctgcaaggg

SEQ ID NO: 1061949 - DNA, 15 bp, Homo sapiens
gttattcctgcaagg

SEQ ID NO: 1061950 - DNA, 15 bp, Homo sapiens
agttattcctgcaag

SEQ ID NO: 1061951 - DNA, 15 bp, Homo sapiens
cagttattcctgcaa

SEQ ID NO: 1061952 - DNA, 15 bp, Homo sapiens
tcagttattcctgca

SEQ ID NO: 1061953 - DNA, 15 bp, Homo sapiens
ctcagttattcctgc

SEQ ID NO: 1061954 - DNA, 15 bp, Homo sapiens
cctcagttattcctg

SEQ ID NO: 1061955 - DNA, 15 bp, Homo sapiens
gcctcagttattcct

SEQ ID NO: 1061956 - DNA, 15 bp, Homo sapiens
ggcctcagttattcc

SEQ ID NO: 1061957 - DNA, 15 bp, Homo sapiens
aggcctcagttattc

SEQ ID NO: 1061958 - DNA, 15 bp, Homo sapiens
caggcctcagttatt

SEQ ID NO: 1061959 - DNA, 15 bp, Homo sapiens
ccaggcctcagttat

SEQ ID NO: 1061960 - DNA, 15 bp, Homo sapiens
cccaggcctcagtta

SEQ ID NO: 1061961 - DNA, 15 bp, Homo sapiens
acccaggcctcagtt

SEQ ID NO: 1061962 - DNA, 15 bp, Homo sapiens
cacccaggcctcagt

SEQ ID NO: 1061963 - DNA, 15 bp, Homo sapiens
acacccaggcctcag

SEQ ID NO: 1061964 - DNA, 15 bp, Homo sapiens
aacacccaggcctca

SEQ ID NO: 1061965 - DNA, 15 bp, Homo sapiens
aaacacccaggcctc

SEQ ID NO: 1061966 - DNA, 15 bp, Homo sapiens
caaacacccaggcct

SEQ ID NO: 1061967 - DNA, 15 bp, Homo sapiens
tcaaacacccaggcc

SEQ ID NO: 1061968 - DNA, 15 bp, Homo sapiens
atcaaacacccaggc

SEQ ID NO: 1061969 - DNA, 15 bp, Homo sapiens
catcaaacacccagg

SEQ ID NO: 1061970 - DNA, 15 bp, Homo sapiens
acatcaaacacccag

SEQ ID NO: 1061971 - DNA, 15 bp, Homo sapiens
cacatcaaacaccca

SEQ ID NO: 1061972 - DNA, 15 bp, Homo sapiens
ccacatcaaacaccc

SEQ ID NO: 1061973 - DNA, 15 bp, Homo sapiens
cccacatcaaacacc

SEQ ID NO: 1061974 - DNA, 15 bp, Homo sapiens
acccacatcaaacac

SEQ ID NO: 1061975 - DNA, 15 bp, Homo sapiens
aacccacatcaaaca

SEQ ID NO: 1061976 - DNA, 15 bp, Homo sapiens
aaacccacatcaaac

SEQ ID NO: 1061977 - DNA, 15 bp, Homo sapiens
gaaacccacatcaaa

SEQ ID NO: 1061978 - DNA, 15 bp, Homo sapiens
tgaaacccacatcaa

SEQ ID NO: 1061979 - DNA, 15 bp, Homo sapiens
ctgaaacccacatca

SEQ ID NO: 1061980 - DNA, 15 bp, Homo sapiens
cctgaaacccacatc

SEQ ID NO: 1061981 - DNA, 15 bp, Homo sapiens
tcctgaaacccacat

SEQ ID NO: 1061982 - DNA, 15 bp, Homo sapiens
ttcctgaaacccaca

SEQ ID NO: 1061983 - DNA, 15 bp, Homo sapiens
cttcctgaaacccac

SEQ ID NO: 1061984 - DNA, 15 bp, Homo sapiens
tcttcctgaaaccca

SEQ ID NO: 1061985 - DNA, 15 bp, Homo sapiens
gtcttcctgaaaccc

SEQ ID NO: 1061986 - DNA, 15 bp, Homo sapiens
tgtcttcctgaaacc

SEQ ID NO: 1061987 - DNA, 15 bp, Homo sapiens
gtgtcttcctgaaac

SEQ ID NO: 1061988 - DNA, 15 bp, Homo sapiens
ggtgtcttcctgaaa

SEQ ID NO: 1061989 - DNA, 15 bp, Homo sapiens
gggtgtcttcctgaa

SEQ ID NO: 1061990 - DNA, 15 bp, Homo sapiens
agggtgtcttcctga

SEQ ID NO: 1061991 - DNA, 15 bp, Homo sapiens
cagggtgtcttcctg

SEQ ID NO: 1061992 - DNA, 15 bp, Homo sapiens
ccagggtgtcttcct

SEQ ID NO: 1061993 - DNA, 15 bp, Homo sapiens
cccagggtgtcttcc

SEQ ID NO: 1061994 - DNA, 15 bp, Homo sapiens
ccccagggtgtcttc

SEQ ID NO: 1061995 - DNA, 15 bp, Homo sapiens
accccagggtgtctt

SEQ ID NO: 1061996 - DNA, 15 bp, Homo sapiens
taccccagggtgtct

SEQ ID NO: 1061997 - DNA, 15 bp, Homo sapiens
ctaccccagggtgtc

SEQ ID NO: 1061998 - DNA, 15 bp, Homo sapiens
tctaccccagggtgt

SEQ ID NO: 1061999 - DNA, 15 bp, Homo sapiens
ttctaccccagggtg

SEQ ID NO: 1062000 - DNA, 15 bp, Homo sapiens
gttctaccccagggt

SEQ ID NO: 1062001 - DNA, 15 bp, Homo sapiens
ggttctaccccaggg

SEQ ID NO: 1062002 - DNA, 15 bp, Homo sapiens
aggttctaccccagg

SEQ ID NO: 1062003 - DNA, 15 bp, Homo sapiens
caggttctaccccag

SEQ ID NO: 1062004 - DNA, 15 bp, Homo sapiens
acaggttctacccca

SEQ ID NO: 1062005 - DNA, 15 bp, Homo sapiens
cacaggttctacccc

SEQ ID NO: 1062006 - DNA, 15 bp, Homo sapiens
gcacaggttctaccc

SEQ ID NO: 1062007 - DNA, 15 bp, Homo sapiens
tgcacaggttctacc

SEQ ID NO: 1062008 - DNA, 15 bp, Homo sapiens
gtgcacaggttctac

SEQ ID NO: 1062009 - DNA, 15 bp, Homo sapiens
ggtgcacaggttcta

SEQ ID NO: 1062010 - DNA, 15 bp, Homo sapiens
tggtgcacaggttct

SEQ ID NO: 1062011 - DNA, 15 bp, Homo sapiens
atggtgcacaggttc

SEQ ID NO: 1062012 - DNA, 15 bp, Homo sapiens
catggtgcacaggtt

SEQ ID NO: 1062013 - DNA, 15 bp, Homo sapiens
ccatggtgcacaggt

SEQ ID NO: 1062014 - DNA, 15 bp, Homo sapiens
gccatggtgcacagg

SEQ ID NO: 1062015 - DNA, 15 bp, Homo sapiens
agccatggtgcacag

SEQ ID NO: 1062016 - DNA, 15 bp, Homo sapiens
aagccatggtgcaca

SEQ ID NO: 1062017 - DNA, 15 bp, Homo sapiens
gaagccatggtgcac

SEQ ID NO: 1062018 - DNA, 15 bp, Homo sapiens
ggaagccatggtgca

SEQ ID NO: 1062019 - DNA, 15 bp, Homo sapiens
aggaagccatggtgc

SEQ ID NO: 1062020 - DNA, 15 bp, Homo sapiens
caggaagccatggtg

SEQ ID NO: 1062021 - DNA, 15 bp, Homo sapiens
ccaggaagccatggt

SEQ ID NO: 1062022 - DNA, 15 bp, Homo sapiens
accaggaagccatgg

SEQ ID NO: 1062023 - DNA, 15 bp, Homo sapiens
taccaggaagccatg

SEQ ID NO: 1062024 - DNA, 15 bp, Homo sapiens
gtaccaggaagccat

SEQ ID NO: 1062025 - DNA, 15 bp, Homo sapiens
ggtaccaggaagcca

SEQ ID NO: 1062026 - DNA, 15 bp, Homo sapiens
aggtaccaggaagcc

SEQ ID NO: 1062027 - DNA, 15 bp, Homo sapiens
caggtaccaggaagc

SEQ ID NO: 1062028 - DNA, 15 bp, Homo sapiens
ccaggtaccaggaag

SEQ ID NO: 1062029 - DNA, 15 bp, Homo sapiens
tccaggtaccaggaa

SEQ ID NO: 1062030 - DNA, 15 bp, Homo sapiens
ttccaggtaccagga

SEQ ID NO: 1062031 - DNA, 15 bp, Homo sapiens
tttccaggtaccagg

SEQ ID NO: 1062032 - DNA, 15 bp, Homo sapiens
ttttccaggtaccag

SEQ ID NO: 1062033 - DNA, 15 bp, Homo sapiens
gttttccaggtacca

SEQ ID NO: 1062034 - DNA, 15 bp, Homo sapiens
ggttttccaggtacc

SEQ ID NO: 1062035 - DNA, 15 bp, Homo sapiens
cggttttccaggtac

SEQ ID NO: 1062036 - DNA, 15 bp, Homo sapiens
ccggttttccaggta

SEQ ID NO: 1062037 - DNA, 15 bp, Homo sapiens
cccggttttccaggt

SEQ ID NO: 1062038 - DNA, 15 bp, Homo sapiens
acccggttttccagg

SEQ ID NO: 1062039 - DNA, 15 bp, Homo sapiens
cacccggttttccag

SEQ ID NO: 1062040 - DNA, 15 bp, Homo sapiens
gcacccggttttcca

SEQ ID NO: 1062041 - DNA, 15 bp, Homo sapiens
tgcacccggttttcc

SEQ ID NO: 1062042 - DNA, 15 bp, Homo sapiens
ctgcacccggttttc

SEQ ID NO: 1062043 - DNA, 15 bp, Homo sapiens
actgcacccggtttt

SEQ ID NO: 1062044 - DNA, 15 bp, Homo sapiens
aactgcacccggttt

SEQ ID NO: 1062045 - DNA, 15 bp, Homo sapiens
caactgcacccggtt

SEQ ID NO: 1062046 - DNA, 15 bp, Homo sapiens
ccaactgcacccggt

SEQ ID NO: 1062047 - DNA, 15 bp, Homo sapiens
tccaactgcacccgg

SEQ ID NO: 1062048 - DNA, 15 bp, Homo sapiens
atccaactgcacccg

SEQ ID NO: 1062049 - DNA, 15 bp, Homo sapiens
catccaactgcaccc

SEQ ID NO: 1062050 - DNA, 15 bp, Homo sapiens
acatccaactgcacc

SEQ ID NO: 1062051 - DNA, 15 bp, Homo sapiens
aacatccaactgcac

SEQ ID NO: 1062052 - DNA, 15 bp, Homo sapiens
aaacatccaactgca

SEQ ID NO: 1062053 - DNA, 15 bp, Homo sapiens
gaaacatccaactgc

SEQ ID NO: 1062054 - DNA, 15 bp, Homo sapiens
tgaaacatccaactg

SEQ ID NO: 1062055 - DNA, 15 bp, Homo sapiens
atgaaacatccaact

SEQ ID NO: 1062056 - DNA, 15 bp, Homo sapiens
aatgaaacatccaac

SEQ ID NO: 1062057 - DNA, 15 bp, Homo sapiens
caatgaaacatccaa

SEQ ID NO: 1062058 - DNA, 15 bp, Homo sapiens
acaatgaaacatcca

SEQ ID NO: 1062059 - DNA, 15 bp, Homo sapiens
cacaatgaaacatcc

SEQ ID NO: 1062060 - DNA, 15 bp, Homo sapiens
tcacaatgaaacatc

SEQ ID NO: 1062061 - DNA, 15 bp, Homo sapiens
ctcacaatgaaacat

SEQ ID NO: 1062062 - DNA, 15 bp, Homo sapiens
tctcacaatgaaaca

SEQ ID NO: 1062063 - DNA, 15 bp, Homo sapiens
gtctcacaatgaaac

SEQ ID NO: 1062064 - DNA, 15 bp, Homo sapiens
tgtctcacaatgaaa

SEQ ID NO: 1062065 - DNA, 15 bp, Homo sapiens
ctgtctcacaatgaa

SEQ ID NO: 1062066 - DNA, 15 bp, Homo sapiens
cctgtctcacaatga

SEQ ID NO: 1062067 - DNA, 15 bp, Homo sapiens
tcctgtctcacaatg

SEQ ID NO: 1062068 - DNA, 15 bp, Homo sapiens
ttcctgtctcacaat

SEQ ID NO: 1062069 - DNA, 15 bp, Homo sapiens
cttcctgtctcacaa

SEQ ID NO: 1062070 - DNA, 15 bp, Homo sapiens
gcttcctgtctcaca

SEQ ID NO: 1062071 - DNA, 15 bp, Homo sapiens
agcttcctgtctcac

SEQ ID NO: 1062072 - DNA, 15 bp, Homo sapiens
gagcttcctgtctca

SEQ ID NO: 1062073 - DNA, 15 bp, Homo sapiens
tgagcttcctgtctc

SEQ ID NO: 1062074 - DNA, 15 bp, Homo sapiens
ctgagcttcctgtct

SEQ ID NO: 1062075 - DNA, 15 bp, Homo sapiens
gctgagcttcctgtc

SEQ ID NO: 1062076 - DNA, 15 bp, Homo sapiens
cgctgagcttcctgt

SEQ ID NO: 1062077 - DNA, 15 bp, Homo sapiens
tcgctgagcttcctg

SEQ ID NO: 1062078 - DNA, 15 bp, Homo sapiens
ttcgctgagcttcct

SEQ ID NO: 1062079 - DNA, 15 bp, Homo sapiens
cttcgctgagcttcc

SEQ ID NO: 1062080 - DNA, 15 bp, Homo sapiens
ccttcgctgagcttc

SEQ ID NO: 1062081 - DNA, 15 bp, Homo sapiens
tccttcgctgagctt

SEQ ID NO: 1062082 - DNA, 15 bp, Homo sapiens
ctccttcgctgagct

SEQ ID NO: 1062083 - DNA, 15 bp, Homo sapiens
gctccttcgctgagc

SEQ ID NO: 1062084 - DNA, 15 bp, Homo sapiens
cgctccttcgctgag

SEQ ID NO: 1062085 - DNA, 15 bp, Homo sapiens
ccgctccttcgctga

SEQ ID NO: 1062086 - DNA, 15 bp, Homo sapiens
tccgctccttcgctg

SEQ ID NO: 1062087 - DNA, 15 bp, Homo sapiens
ctccgctccttcgct

SEQ ID NO: 1062088 - DNA, 15 bp, Homo sapiens
tctccgctccttcgc

SEQ ID NO: 1062089 - DNA, 15 bp, Homo sapiens
ctctccgctccttcg

SEQ ID NO: 1062090 - DNA, 15 bp, Homo sapiens
gctctccgctccttc

SEQ ID NO: 1062091 - DNA, 15 bp, Homo sapiens
ggctctccgctcctt

SEQ ID NO: 1062092 - DNA, 15 bp, Homo sapiens
tggctctccgctcct

SEQ ID NO: 1062093 - DNA, 15 bp, Homo sapiens
ctggctctccgctcc

SEQ ID NO: 1062094 - DNA, 15 bp, Homo sapiens
cctggctctccgctc

SEQ ID NO: 1062095 - DNA, 15 bp, Homo sapiens
ccctggctctccgct

SEQ ID NO: 1062096 - DNA, 15 bp, Homo sapiens
tccctggctctccgc

SEQ ID NO: 1062097 - DNA, 15 bp, Homo sapiens
gtccctggctctccg

SEQ ID NO: 1062098 - DNA, 15 bp, Homo sapiens
agtccctggctctcc

SEQ ID NO: 1062099 - DNA, 15 bp, Homo sapiens
aagtccctggctctc

SEQ ID NO: 1062100 - DNA, 15 bp, Homo sapiens
caagtccctggctct

SEQ ID NO: 1062101 - DNA, 15 bp, Homo sapiens
acaagtccctggctc

SEQ ID NO: 1062102 - DNA, 15 bp, Homo sapiens
cacaagtccctggct

SEQ ID NO: 1062103 - DNA, 15 bp, Homo sapiens
acacaagtccctggc

SEQ ID NO: 1062104 - DNA, 15 bp, Homo sapiens
gacacaagtccctgg

SEQ ID NO: 1062105 - DNA, 15 bp, Homo sapiens
tgacacaagtccctg

SEQ ID NO: 1062106 - DNA, 15 bp, Homo sapiens
ttgacacaagtccct

SEQ ID NO: 1062107 - DNA, 15 bp, Homo sapiens
tttgacacaagtccc

SEQ ID NO: 1062108 - DNA, 15 bp, Homo sapiens
ttttgacacaagtcc

SEQ ID NO: 1062109 - DNA, 15 bp, Homo sapiens
attttgacacaagtc

SEQ ID NO: 1062110 - DNA, 15 bp, Homo sapiens
gattttgacacaagt

SEQ ID NO: 1062111 - DNA, 15 bp, Homo sapiens
tgattttgacacaag

SEQ ID NO: 1062112 - DNA, 15 bp, Homo sapiens
atgattttgacacaa

SEQ ID NO: 1062113 - DNA, 15 bp, Homo sapiens
aatgattttgacaca

SEQ ID NO: 1062114 - DNA, 15 bp, Homo sapiens
aaatgattttgacac

SEQ ID NO: 1062115 - DNA, 15 bp, Homo sapiens
caaatgattttgaca

SEQ ID NO: 1062116 - DNA, 15 bp, Homo sapiens
ccaaatgattttgac

SEQ ID NO: 1062117 - DNA, 15 bp, Homo sapiens
gccaaatgattttga

SEQ ID NO: 1062118 - DNA, 15 bp, Homo sapiens
ggccaaatgattttg

SEQ ID NO: 1062119 - DNA, 15 bp, Homo sapiens
cggccaaatgatttt

SEQ ID NO: 1062120 - DNA, 15 bp, Homo sapiens
ccggccaaatgattt

SEQ ID NO: 1062121 - DNA, 15 bp, Homo sapiens
cccggccaaatgatt

SEQ ID NO: 1062122 - DNA, 15 bp, Homo sapiens
ccccggccaaatgat

SEQ ID NO: 1062123 - DNA, 15 bp, Homo sapiens
tccccggccaaatga

SEQ ID NO: 1062124 - DNA, 15 bp, Homo sapiens
ctccccggccaaatg

SEQ ID NO: 1062125 - DNA, 15 bp, Homo sapiens
cctccccggccaaat

SEQ ID NO: 1062126 - DNA, 15 bp, Homo sapiens
ccctccccggccaaa

SEQ ID NO: 1062127 - DNA, 15 bp, Homo sapiens
gccctccccggccaa

SEQ ID NO: 1062128 - DNA, 15 bp, Homo sapiens
cgccctccccggcca

SEQ ID NO: 1062129 - DNA, 15 bp, Homo sapiens
ccgccctccccggcc

SEQ ID NO: 1062130 - DNA, 15 bp, Homo sapiens
tccgccctccccggc

SEQ ID NO: 1062131 - DNA, 15 bp, Homo sapiens
ctccgccctccccgg

SEQ ID NO: 1062132 - DNA, 15 bp, Homo sapiens
actccgccctccccg

SEQ ID NO: 1062133 - DNA, 15 bp, Homo sapiens
tactccgccctcccc

SEQ ID NO: 1062134 - DNA, 15 bp, Homo sapiens
ctactccgccctccc

SEQ ID NO: 1062135 - DNA, 15 bp, Homo sapiens
cctactccgccctcc

SEQ ID NO: 1062136 - DNA, 15 bp, Homo sapiens
acctactccgccctc

SEQ ID NO: 1062137 - DNA, 15 bp, Homo sapiens
cacctactccgccct

SEQ ID NO: 1062138 - DNA, 15 bp, Homo sapiens
ccacctactccgccc

SEQ ID NO: 1062139 - DNA, 15 bp, Homo sapiens
cccacctactccgcc

SEQ ID NO: 1062140 - DNA, 15 bp, Homo sapiens
gcccacctactccgc

SEQ ID NO: 1062141 - DNA, 15 bp, Homo sapiens
tgcccacctactccg

SEQ ID NO: 1062142 - DNA, 15 bp, Homo sapiens
atgcccacctactcc

SEQ ID NO: 1062143 - DNA, 15 bp, Homo sapiens
catgcccacctactc

SEQ ID NO: 1062144 - DNA, 15 bp, Homo sapiens
ccatgcccacctact

SEQ ID NO: 1062145 - DNA, 15 bp, Homo sapiens
tccatgcccacctac

SEQ ID NO: 1062146 - DNA, 15 bp, Homo sapiens
ctccatgcccaccta

SEQ ID NO: 1062147 - DNA, 15 bp, Homo sapiens
gctccatgcccacct

SEQ ID NO: 1062148 - DNA, 15 bp, Homo sapiens
agctccatgcccacc

SEQ ID NO: 1062149 - DNA, 15 bp, Homo sapiens
cagctccatgcccac

SEQ ID NO: 1062150 - DNA, 15 bp, Homo sapiens
tcagctccatgccca

SEQ ID NO: 1062151 - DNA, 15 bp, Homo sapiens
ttcagctccatgccc

SEQ ID NO: 1062152 - DNA, 15 bp, Homo sapiens
tttcagctccatgcc

SEQ ID NO: 1062153 - DNA, 15 bp, Homo sapiens
atttcagctccatgc

SEQ ID NO: 1062154 - DNA, 15 bp, Homo sapiens
tatttcagctccatg

SEQ ID NO: 1062155 - DNA, 15 bp, Homo sapiens
ttatttcagctccat

SEQ ID NO: 1062156 - DNA, 15 bp, Homo sapiens
cttatttcagctcca

SEQ ID NO: 1062157 - DNA, 15 bp, Homo sapiens
tcttatttcagctcc

SEQ ID NO: 1062158 - DNA, 15 bp, Homo sapiens
gtcttatttcagctc

SEQ ID NO: 1062159 - DNA, 15 bp, Homo sapiens
agtcttatttcagct

SEQ ID NO: 1062160 - DNA, 15 bp, Homo sapiens
cagtcttatttcagc

SEQ ID NO: 1062161 - DNA, 15 bp, Homo sapiens
tcagtcttatttcag

SEQ ID NO: 1062162 - DNA, 15 bp, Homo sapiens
gcatgccttatcaga

SEQ ID NO: 1062163 - DNA, 15 bp, Homo sapiens
ggcatgccttatcag

SEQ ID NO: 1062164 - DNA, 15 bp, Homo sapiens
aggcatgccttatca

SEQ ID NO: 1062165 - DNA, 15 bp, Homo sapiens
aaggcatgccttatc

SEQ ID NO: 1062166 - DNA, 15 bp, Homo sapiens
aaaggcatgccttat

SEQ ID NO: 1062167 - DNA, 15 bp, Homo sapiens
taaaggcatgcctta

SEQ ID NO: 1062168 - DNA, 15 bp, Homo sapiens
ttaaaggcatgcctt

SEQ ID NO: 1062169 - DNA, 15 bp, Homo sapiens
gttaaaggcatgcct

SEQ ID NO: 1062170 - DNA, 15 bp, Homo sapiens
ggttaaaggcatgcc

SEQ ID NO: 1062171 - DNA, 15 bp, Homo sapiens
tggttaaaggcatgc

SEQ ID NO: 1062172 - DNA, 15 bp, Homo sapiens
ctggttaaaggcatg

SEQ ID NO: 1062173 - DNA, 15 bp, Homo sapiens
cctggttaaaggcat

SEQ ID NO: 1062174 - DNA, 15 bp, Homo sapiens
gcctggttaaaggca

SEQ ID NO: 1062175 - DNA, 15 bp, Homo sapiens
agcctggttaaaggc

SEQ ID NO: 1062176 - DNA, 15 bp, Homo sapiens
gagcctggttaaagg

SEQ ID NO: 1062177 - DNA, 15 bp, Homo sapiens
ggagcctggttaaag

SEQ ID NO: 1062178 - DNA, 15 bp, Homo sapiens
tggagcctggttaaa

SEQ ID NO: 1062179 - DNA, 15 bp, Homo sapiens
atggagcctggttaa

SEQ ID NO: 1062180 - DNA, 15 bp, Homo sapiens
gatggagcctggtta

SEQ ID NO: 1062181 - DNA, 15 bp, Homo sapiens
tgatggagcctggtt

SEQ ID NO: 1062182 - DNA, 15 bp, Homo sapiens
gtgatggagcctggt

SEQ ID NO: 1062183 - DNA, 15 bp, Homo sapiens
agtgatggagcctgg

SEQ ID NO: 1062184 - DNA, 15 bp, Homo sapiens
gagtgatggagcctg

SEQ ID NO: 1062185 - DNA, 15 bp, Homo sapiens
tgagtgatggagcct

SEQ ID NO: 1062186 - DNA, 15 bp, Homo sapiens
ctgagtgatggagcc

SEQ ID NO: 1062187 - DNA, 15 bp, Homo sapiens
tctgagtgatggagc

SEQ ID NO: 1062188 - DNA, 15 bp, Homo sapiens
ctctgagtgatggag

SEQ ID NO: 1062189 - DNA, 15 bp, Homo sapiens
gctctgagtgatgga

SEQ ID NO: 1062190 - DNA, 15 bp, Homo sapiens
agctctgagtgatgg

SEQ ID NO: 1062191 - DNA, 15 bp, Homo sapiens
tagctctgagtgatg

SEQ ID NO: 1062192 - DNA, 15 bp, Homo sapiens
gtagctctgagtgat

SEQ ID NO: 1062193 - DNA, 15 bp, Homo sapiens
tgtagctctgagtga

SEQ ID NO: 1062194 - DNA, 15 bp, Homo sapiens
ctgtagctctgagtg

SEQ ID NO: 1062195 - DNA, 15 bp, Homo sapiens
cctgtagctctgagt

SEQ ID NO: 1062196 - DNA, 15 bp, Homo sapiens
tcctgtagctctgag

SEQ ID NO: 1062197 - DNA, 15 bp, Homo sapiens
ttcctgtagctctga

SEQ ID NO: 1062198 - DNA, 15 bp, Homo sapiens
tttcctgtagctctg

SEQ ID NO: 1062199 - DNA, 15 bp, Homo sapiens
ttttcctgtagctct

SEQ ID NO: 1062200 - DNA, 15 bp, Homo sapiens
attttcctgtagctc

SEQ ID NO: 1062201 - DNA, 15 bp, Homo sapiens
gattttcctgtagct

SEQ ID NO: 1062202 - DNA, 15 bp, Homo sapiens
ggattttcctgtagc

SEQ ID NO: 1062203 - DNA, 15 bp, Homo sapiens
gggattttcctgtag

SEQ ID NO: 1062204 - DNA, 15 bp, Homo sapiens
tgggattttcctgta

SEQ ID NO: 1062205 - DNA, 15 bp, Homo sapiens
atgggattttcctgt

SEQ ID NO: 1062206 - DNA, 15 bp, Homo sapiens
catgggattttcctg

SEQ ID NO: 1062207 - DNA, 15 bp, Homo sapiens
ccatgggattttcct

SEQ ID NO: 1062208 - DNA, 15 bp, Homo sapiens
accatgggattttcc

SEQ ID NO: 1062209 - DNA, 15 bp, Homo sapiens
gaccatgggattttc

SEQ ID NO: 1062210 - DNA, 15 bp, Homo sapiens
tgaccatgggatttt

SEQ ID NO: 1062211 - DNA, 15 bp, Homo sapiens
atgaccatgggattt

SEQ ID NO: 1062212 - DNA, 15 bp, Homo sapiens
gatgaccatgggatt

SEQ ID NO: 1062213 - DNA, 15 bp, Homo sapiens
ggatgaccatgggat

SEQ ID NO: 1062214 - DNA, 15 bp, Homo sapiens
cggatgaccatggga

SEQ ID NO: 1062215 - DNA, 15 bp, Homo sapiens
gcggatgaccatggg

SEQ ID NO: 1062216 - DNA, 15 bp, Homo sapiens
ggcggatgaccatgg

SEQ ID NO: 1062217 - DNA, 15 bp, Homo sapiens
gggcggatgaccatg

SEQ ID NO: 1062218 - DNA, 15 bp, Homo sapiens
agggcggatgaccat

SEQ ID NO: 1062219 - DNA, 15 bp, Homo sapiens
gagggcggatgacca

SEQ ID NO: 1062220 - DNA, 15 bp, Homo sapiens
agagggcggatgacc

SEQ ID NO: 1062221 - DNA, 15 bp, Homo sapiens
cagagggcggatgac

SEQ ID NO: 1062222 - DNA, 15 bp, Homo sapiens
acagagggcggatga

SEQ ID NO: 1062223 - DNA, 15 bp, Homo sapiens
aacagagggcggatg

SEQ ID NO: 1062224 - DNA, 15 bp, Homo sapiens
caacagagggcggat

SEQ ID NO: 1062225 - DNA, 15 bp, Homo sapiens
ccaacagagggcgga

SEQ ID NO: 1062226 - DNA, 15 bp, Homo sapiens
accaacagagggcgg

SEQ ID NO: 1062227 - DNA, 15 bp, Homo sapiens
caccaacagagggcg

SEQ ID NO: 1062228 - DNA, 15 bp, Homo sapiens
tcaccaacagagggc

SEQ ID NO: 1062229 - DNA, 15 bp, Homo sapiens
gtcaccaacagaggg

SEQ ID NO: 1062230 - DNA, 15 bp, Homo sapiens
tgtcaccaacagagg

SEQ ID NO: 1062231 - DNA, 15 bp, Homo sapiens
ctgtcaccaacagag

SEQ ID NO: 1062232 - DNA, 15 bp, Homo sapiens
cctgtcaccaacaga

SEQ ID NO: 1062233 - DNA, 15 bp, Homo sapiens
ccctgtcaccaacag

SEQ ID NO: 1062234 - DNA, 15 bp, Homo sapiens
tccctgtcaccaaca

SEQ ID NO: 1062235 - DNA, 15 bp, Homo sapiens
ttccctgtcaccaac

SEQ ID NO: 1062236 - DNA, 15 bp, Homo sapiens
attccctgtcaccaa

SEQ ID NO: 1062237 - DNA, 15 bp, Homo sapiens
aattccctgtcacca

SEQ ID NO: 1062238 - DNA, 15 bp, Homo sapiens
gaattccctgtcacc

SEQ ID NO: 1062239 - DNA, 15 bp, Homo sapiens
ggaattccctgtcac

SEQ ID NO: 1062240 - DNA, 15 bp, Homo sapiens
tggaattccctgtca

SEQ ID NO: 1062241 - DNA, 15 bp, Homo sapiens
atggaattccctgtc

SEQ ID NO: 1062242 - DNA, 15 bp, Homo sapiens
gatggaattccctgt

SEQ ID NO: 1062243 - DNA, 15 bp, Homo sapiens
tgatggaattccctg

SEQ ID NO: 1062244 - DNA, 15 bp, Homo sapiens
atgatggaattccct

SEQ ID NO: 1062245 - DNA, 15 bp, Homo sapiens
catgatggaattccc

SEQ ID NO: 1062246 - DNA, 15 bp, Homo sapiens
gcatgatggaattcc

SEQ ID NO: 1062247 - DNA, 15 bp, Homo sapiens
tgcatgatggaattc

SEQ ID NO: 1062248 - DNA, 15 bp, Homo sapiens
atgcatgatggaatt

SEQ ID NO: 1062249 - DNA, 15 bp, Homo sapiens
aatgcatgatggaat

SEQ ID NO: 1062250 - DNA, 15 bp, Homo sapiens
gaatgcatgatggaa

SEQ ID NO: 1062251 - DNA, 15 bp, Homo sapiens
tgaatgcatgatgga

SEQ ID NO: 1062252 - DNA, 15 bp, Homo sapiens
ctgaatgcatgatgg

SEQ ID NO: 1062253 - DNA, 15 bp, Homo sapiens
tctgaatgcatgatg

SEQ ID NO: 1062254 - DNA, 15 bp, Homo sapiens
atctgaatgcatgat

SEQ ID NO: 1062255 - DNA, 15 bp, Homo sapiens
aatctgaatgcatga

SEQ ID NO: 1062256 - DNA, 15 bp, Homo sapiens
aaatctgaatgcatg

SEQ ID NO: 1062257 - DNA, 15 bp, Homo sapiens
aaaatctgaatgcat

SEQ ID NO: 1062258 - DNA, 15 bp, Homo sapiens
aaaaatctgaatgca

SEQ ID NO: 1062259 - DNA, 15 bp, Homo sapiens
caaaaatctgaatgc

SEQ ID NO: 1062260 - DNA, 15 bp, Homo sapiens
gcaaaaatctgaatg

SEQ ID NO: 1062261 - DNA, 15 bp, Homo sapiens
tgcaaaaatctgaat

SEQ ID NO: 1062262 - DNA, 15 bp, Homo sapiens
atgcaaaaatctgaa

SEQ ID NO: 1062263 - DNA, 15 bp, Homo sapiens
catgcaaaaatctga

SEQ ID NO: 1062264 - DNA, 15 bp, Homo sapiens
gcatgcaaaaatctg

SEQ ID NO: 1062265 - DNA, 15 bp, Homo sapiens
ggcatgcaaaaatct

SEQ ID NO: 1062266 - DNA, 15 bp, Homo sapiens
aggcatgcaaaaatc

SEQ ID NO: 1062267 - DNA, 15 bp, Homo sapiens
caggcatgcaaaaat

SEQ ID NO: 1062268 - DNA, 15 bp, Homo sapiens
gcaggcatgcaaaaa

SEQ ID NO: 1062269 - DNA, 15 bp, Homo sapiens
agcaggcatgcaaaa

SEQ ID NO: 1062270 - DNA, 15 bp, Homo sapiens
gagcaggcatgcaaa

SEQ ID NO: 1062271 - DNA, 15 bp, Homo sapiens
agagcaggcatgcaa

SEQ ID NO: 1062272 - DNA, 15 bp, Homo sapiens
cagagcaggcatgca

SEQ ID NO: 1062273 - DNA, 15 bp, Homo sapiens
acagagcaggcatgc

SEQ ID NO: 1062274 - DNA, 15 bp, Homo sapiens
gacagagcaggcatg

SEQ ID NO: 1062275 - DNA, 15 bp, Homo sapiens
ggacagagcaggcat

SEQ ID NO: 1062276 - DNA, 15 bp, Homo sapiens
gggacagagcaggca

SEQ ID NO: 1062277 - DNA, 15 bp, Homo sapiens
agggacagagcaggc

SEQ ID NO: 1062278 - DNA, 15 bp, Homo sapiens
cagggacagagcagg

SEQ ID NO: 1062279 - DNA, 15 bp, Homo sapiens
ccagggacagagcag

SEQ ID NO: 1062280 - DNA, 15 bp, Homo sapiens
tccagggacagagca

SEQ ID NO: 1062281 - DNA, 15 bp, Homo sapiens
ttccagggacagagc

SEQ ID NO: 1062282 - DNA, 15 bp, Homo sapiens
gttccagggacagag

SEQ ID NO: 1062283 - DNA, 15 bp, Homo sapiens
agttccagggacaga

SEQ ID NO: 1062284 - DNA, 15 bp, Homo sapiens
tagttccagggacag

SEQ ID NO: 1062285 - DNA, 15 bp, Homo sapiens
ctagttccagggaca

SEQ ID NO: 1062286 - DNA, 15 bp, Homo sapiens
tctagttccagggac

SEQ ID NO: 1062287 - DNA, 15 bp, Homo sapiens
ttctagttccaggga

SEQ ID NO: 1062288 - DNA, 15 bp, Homo sapiens
attctagttccaggg

SEQ ID NO: 1062289 - DNA, 15 bp, Homo sapiens
tattctagttccagg

SEQ ID NO: 1062290 - DNA, 15 bp, Homo sapiens
ttattctagttccag

SEQ ID NO: 1062291 - DNA, 15 bp, Homo sapiens
cttattctagttcca

SEQ ID NO: 1062292 - DNA, 15 bp, Homo sapiens
tcttattctagttcc

SEQ ID NO: 1062293 - DNA, 15 bp, Homo sapiens
ctcttattctagttc

SEQ ID NO: 1062294 - DNA, 15 bp, Homo sapiens
tctcttattctagtt

SEQ ID NO: 1062295 - DNA, 15 bp, Homo sapiens
ttctcttattctagt

SEQ ID NO: 1062296 - DNA, 15 bp, Homo sapiens
attctcttattctag

SEQ ID NO: 1062297 - DNA, 15 bp, Homo sapiens
tattctcttattcta

SEQ ID NO: 1062298 - DNA, 15 bp, Homo sapiens
ctattctcttattct

SEQ ID NO: 1062299 - DNA, 15 bp, Homo sapiens
cctattctcttattc

SEQ ID NO: 1062300 - DNA, 15 bp, Homo sapiens
ccctattctcttatt

SEQ ID NO: 1062301 - DNA, 15 bp, Homo sapiens
tccctattctcttat

SEQ ID NO: 1062302 - DNA, 15 bp, Homo sapiens
ctccctattctctta

SEQ ID NO: 1062303 - DNA, 15 bp, Homo sapiens
tctccctattctctt

SEQ ID NO: 1062304 - DNA, 15 bp, Homo sapiens
ttctccctattctct

SEQ ID NO: 1062305 - DNA, 15 bp, Homo sapiens
tttctccctattctc

SEQ ID NO: 1062306 - DNA, 15 bp, Homo sapiens
ttttctccctattct

SEQ ID NO: 1062307 - DNA, 15 bp, Homo sapiens
cttttctccctattc

SEQ ID NO: 1062308 - DNA, 15 bp, Homo sapiens
gcttttctccctatt

SEQ ID NO: 1062309 - DNA, 15 bp, Homo sapiens
ggcttttctccctat

SEQ ID NO: 1062310 - DNA, 15 bp, Homo sapiens
cggcttttctcccta

SEQ ID NO: 1062311 - DNA, 15 bp, Homo sapiens
tcggcttttctccct

SEQ ID NO: 1062312 - DNA, 15 bp, Homo sapiens
atcggcttttctccc

SEQ ID NO: 1062313 - DNA, 15 bp, Homo sapiens
tatcggcttttctcc

SEQ ID NO: 1062314 - DNA, 15 bp, Homo sapiens
ttatcggcttttctc

SEQ ID NO: 1062315 - DNA, 15 bp, Homo sapiens
cttatcggcttttct

SEQ ID NO: 1062316 - DNA, 15 bp, Homo sapiens
tcttatcggcttttc

SEQ ID NO: 1062317 - DNA, 15 bp, Homo sapiens
ttcttatcggctttt

SEQ ID NO: 1062318 - DNA, 15 bp, Homo sapiens
cttcttatcggcttt

SEQ ID NO: 1062319 - DNA, 15 bp, Homo sapiens
acttcttatcggctt

SEQ ID NO: 1062320 - DNA, 15 bp, Homo sapiens
gacttcttatcggct

SEQ ID NO: 1062321 - DNA, 15 bp, Homo sapiens
tgacttcttatcggc

SEQ ID NO: 1062322 - DNA, 15 bp, Homo sapiens
ttgacttcttatcgg

SEQ ID NO: 1062323 - DNA, 15 bp, Homo sapiens
gttgacttcttatcg

SEQ ID NO: 1062324 - DNA, 15 bp, Homo sapiens
cgttgacttcttatc

SEQ ID NO: 1062325 - DNA, 15 bp, Homo sapiens
tcgttgacttcttat

SEQ ID NO: 1062326 - DNA, 15 bp, Homo sapiens
atcgttgacttctta

SEQ ID NO: 1062327 - DNA, 15 bp, Homo sapiens
tatcgttgacttctt

SEQ ID NO: 1062328 - DNA, 15 bp, Homo sapiens
ttatcgttgacttct

SEQ ID NO: 1062329 - DNA, 15 bp, Homo sapiens
gttatcgttgacttc

SEQ ID NO: 1062330 - DNA, 15 bp, Homo sapiens
agttatcgttgactt

SEQ ID NO: 1062331 - DNA, 15 bp, Homo sapiens
tagttatcgttgact

SEQ ID NO: 1062332 - DNA, 15 bp, Homo sapiens
atagttatcgttgac

SEQ ID NO: 1062333 - DNA, 15 bp, Homo sapiens
tatagttatcgttga

SEQ ID NO: 1062334 - DNA, 15 bp, Homo sapiens
ctatagttatcgttg

SEQ ID NO: 1062335 - DNA, 15 bp, Homo sapiens
gctatagttatcgtt

SEQ ID NO: 1062336 - DNA, 15 bp, Homo sapiens
ggctatagttatcgt

SEQ ID NO: 1062337 - DNA, 15 bp, Homo sapiens
tggctatagttatcg

SEQ ID NO: 1062338 - DNA, 15 bp, Homo sapiens
atggctatagttatc

SEQ ID NO: 1062339 - DNA, 15 bp, Homo sapiens
catggctatagttat

SEQ ID NO: 1062340 - DNA, 15 bp, Homo sapiens
ccatggctatagtta

SEQ ID NO: 1062341 - DNA, 15 bp, Homo sapiens
gccatggctatagtt

SEQ ID NO: 1062342 - DNA, 15 bp, Homo sapiens
ggccatggctatagt

SEQ ID NO: 1062343 - DNA, 15 bp, Homo sapiens
tggccatggctatag

SEQ ID NO: 1062344 - DNA, 15 bp, Homo sapiens
atggccatggctata

SEQ ID NO: 1062345 - DNA, 15 bp, Homo sapiens
tatggccatggctat

SEQ ID NO: 1062346 - DNA, 15 bp, Homo sapiens
ttatggccatggcta

SEQ ID NO: 1062347 - DNA, 15 bp, Homo sapiens
attatggccatggct

SEQ ID NO: 1062348 - DNA, 15 bp, Homo sapiens
aattatggccatggc

SEQ ID NO: 1062349 - DNA, 15 bp, Homo sapiens
aaattatggccatgg

SEQ ID NO: 1062350 - DNA, 15 bp, Homo sapiens
caaattatggccatg

SEQ ID NO: 1062351 - DNA, 15 bp, Homo sapiens
ccaaattatggccat

SEQ ID NO: 1062352 - DNA, 15 bp, Homo sapiens
cccaaattatggcca

SEQ ID NO: 1062353 - DNA, 15 bp, Homo sapiens
gcccaaattatggcc

SEQ ID NO: 1062354 - DNA, 15 bp, Homo sapiens
agcccaaattatggc

SEQ ID NO: 1062355 - DNA, 15 bp, Homo sapiens
gagcccaaattatgg

SEQ ID NO: 1062356 - DNA, 15 bp, Homo sapiens
ggagcccaaattatg

SEQ ID NO: 1062357 - DNA, 15 bp, Homo sapiens
tggagcccaaattat

SEQ ID NO: 1062358 - DNA, 15 bp, Homo sapiens
ttggagcccaaatta

SEQ ID NO: 1062359 - DNA, 15 bp, Homo sapiens
tttggagcccaaatt

SEQ ID NO: 1062360 - DNA, 15 bp, Homo sapiens
ttttggagcccaaat

SEQ ID NO: 1062361 - DNA, 15 bp, Homo sapiens
cttttggagcccaaa

SEQ ID NO: 1062362 - DNA, 15 bp, Homo sapiens
tcttttggagcccaa

SEQ ID NO: 1062363 - DNA, 15 bp, Homo sapiens
ttcttttggagccca

SEQ ID NO: 1062364 - DNA, 15 bp, Homo sapiens
tttcttttggagccc

SEQ ID NO: 1062365 - DNA, 15 bp, Homo sapiens
atttcttttggagcc

SEQ ID NO: 1062366 - DNA, 15 bp, Homo sapiens
tatttcttttggagc

SEQ ID NO: 1062367 - DNA, 15 bp, Homo sapiens
ttatttcttttggag

SEQ ID NO: 1062368 - DNA, 15 bp, Homo sapiens
attatttcttttgga

SEQ ID NO: 1062369 - DNA, 15 bp, Homo sapiens
aattatttcttttgg

SEQ ID NO: 1062370 - DNA, 15 bp, Homo sapiens
gaattatttcttttg

SEQ ID NO: 1062371 - DNA, 15 bp, Homo sapiens
agaattatttctttt

SEQ ID NO: 1062372 - DNA, 15 bp, Homo sapiens
cagaattatttcttt

SEQ ID NO: 1062373 - DNA, 15 bp, Homo sapiens
tcagaattatttctt

SEQ ID NO: 1062374 - DNA, 15 bp, Homo sapiens
ctcagaattatttct

SEQ ID NO: 1062375 - DNA, 15 bp, Homo sapiens
actcagaattatttc

SEQ ID NO: 1062376 - DNA, 15 bp, Homo sapiens
cactcagaattattt

SEQ ID NO: 1062377 - DNA, 15 bp, Homo sapiens
ccactcagaattatt

SEQ ID NO: 1062378 - DNA, 15 bp, Homo sapiens
accactcagaattat

SEQ ID NO: 1062379 - DNA, 15 bp, Homo sapiens
aaccactcagaatta

SEQ ID NO: 1062380 - DNA, 15 bp, Homo sapiens
taaccactcagaatt

SEQ ID NO: 1062381 - DNA, 15 bp, Homo sapiens
gtaaccactcagaat

SEQ ID NO: 1062382 - DNA, 15 bp, Homo sapiens
ggtaaccactcagaa

SEQ ID NO: 1062383 - DNA, 15 bp, Homo sapiens
tggtaaccactcaga

SEQ ID NO: 1062384 - DNA, 15 bp, Homo sapiens
ctggtaaccactcag

SEQ ID NO: 1062385 - DNA, 15 bp, Homo sapiens
tctggtaaccactca

SEQ ID NO: 1062386 - DNA, 15 bp, Homo sapiens
atctggtaaccactc

SEQ ID NO: 1062387 - DNA, 15 bp, Homo sapiens
tatctggtaaccact

SEQ ID NO: 1062388 - DNA, 15 bp, Homo sapiens
ctatctggtaaccac

SEQ ID NO: 1062389 - DNA, 15 bp, Homo sapiens
gctatctggtaacca

SEQ ID NO: 1062390 - DNA, 15 bp, Homo sapiens
agctatctggtaacc

SEQ ID NO: 1062391 - DNA, 15 bp, Homo sapiens
aagctatctggtaac

SEQ ID NO: 1062392 - DNA, 15 bp, Homo sapiens
aaagctatctggtaa

SEQ ID NO: 1062393 - DNA, 15 bp, Homo sapiens
gaaagctatctggta

SEQ ID NO: 1062394 - DNA, 15 bp, Homo sapiens
tgaaagctatctggt

SEQ ID NO: 1062395 - DNA, 15 bp, Homo sapiens
ctgaaagctatctgg

SEQ ID NO: 1062396 - DNA, 15 bp, Homo sapiens
tctgaaagctatctg

SEQ ID NO: 1062397 - DNA, 15 bp, Homo sapiens
ctctgaaagctatct

SEQ ID NO: 1062398 - DNA, 15 bp, Homo sapiens
tctctgaaagctatc

SEQ ID NO: 1062399 - DNA, 15 bp, Homo sapiens
ctctctgaaagctat

SEQ ID NO: 1062400 - DNA, 15 bp, Homo sapiens
cctctctgaaagcta

SEQ ID NO: 1062401 - DNA, 15 bp, Homo sapiens
ccctctctgaaagct

SEQ ID NO: 1062402 - DNA, 15 bp, Homo sapiens
accctctctgaaagc

SEQ ID NO: 1062403 - DNA, 15 bp, Homo sapiens
aaccctctctgaaag

SEQ ID NO: 1062404 - DNA, 15 bp, Homo sapiens
caaccctctctgaaa

SEQ ID NO: 1062405 - DNA, 15 bp, Homo sapiens
tcaaccctctctgaa

SEQ ID NO: 1062406 - DNA, 15 bp, Homo sapiens
ttcaaccctctctga

SEQ ID NO: 1062407 - DNA, 15 bp, Homo sapiens
cttcaaccctctctg

SEQ ID NO: 1062408 - DNA, 15 bp, Homo sapiens
gcttcaaccctctct

SEQ ID NO: 1062409 - DNA, 15 bp, Homo sapiens
ggcttcaaccctctc

SEQ ID NO: 1062410 - DNA, 15 bp, Homo sapiens
aggcttcaaccctct

SEQ ID NO: 1062411 - DNA, 15 bp, Homo sapiens
aaggcttcaaccctc

SEQ ID NO: 1062412 - DNA, 15 bp, Homo sapiens
gaaggcttcaaccct

SEQ ID NO: 1062413 - DNA, 15 bp, Homo sapiens
tgaaggcttcaaccc

SEQ ID NO: 1062414 - DNA, 15 bp, Homo sapiens
ctgaaggcttcaacc

SEQ ID NO: 1062415 - DNA, 15 bp, Homo sapiens
actgaaggcttcaac

SEQ ID NO: 1062416 - DNA, 15 bp, Homo sapiens
tactgaaggcttcaa

SEQ ID NO: 1062417 - DNA, 15 bp, Homo sapiens
ctactgaaggcttca

SEQ ID NO: 1062418 - DNA, 15 bp, Homo sapiens
tctactgaaggcttc

SEQ ID NO: 1062419 - DNA, 15 bp, Homo sapiens
gtctactgaaggctt

SEQ ID NO: 1062420 - DNA, 15 bp, Homo sapiens
agtctactgaaggct

SEQ ID NO: 1062421 - DNA, 15 bp, Homo sapiens
tagtctactgaaggc

SEQ ID NO: 1062422 - DNA, 15 bp, Homo sapiens
ttagtctactgaagg

SEQ ID NO: 1062423 - DNA, 15 bp, Homo sapiens
attagtctactgaag

SEQ ID NO: 1062424 - DNA, 15 bp, Homo sapiens
cattagtctactgaa

SEQ ID NO: 1062425 - DNA, 15 bp, Homo sapiens
tcattagtctactga

SEQ ID NO: 1062426 - DNA, 15 bp, Homo sapiens
atcattagtctactg

SEQ ID NO: 1062427 - DNA, 15 bp, Homo sapiens
aatcattagtctact

SEQ ID NO: 1062428 - DNA, 15 bp, Homo sapiens
caatcattagtctac

SEQ ID NO: 1062429 - DNA, 15 bp, Homo sapiens
tcaatcattagtcta

SEQ ID NO: 1062430 - DNA, 15 bp, Homo sapiens
ctcaatcattagtct

SEQ ID NO: 1062431 - DNA, 15 bp, Homo sapiens
gctcaatcattagtc

SEQ ID NO: 1062432 - DNA, 15 bp, Homo sapiens
tgctcaatcattagt

SEQ ID NO: 1062433 - DNA, 15 bp, Homo sapiens
ctgctcaatcattag

SEQ ID NO: 1062434 - DNA, 15 bp, Homo sapiens
tctgctcaatcatta

SEQ ID NO: 1062435 - DNA, 15 bp, Homo sapiens
ttctgctcaatcatt

SEQ ID NO: 1062436 - DNA, 15 bp, Homo sapiens
tttctgctcaatcat

SEQ ID NO: 1062437 - DNA, 15 bp, Homo sapiens
ttttctgctcaatca

SEQ ID NO: 1062438 - DNA, 15 bp, Homo sapiens
tttttctgctcaatc

SEQ ID NO: 1062439 - DNA, 15 bp, Homo sapiens
ttttttctgctcaat

SEQ ID NO: 1062440 - DNA, 15 bp, Homo sapiens
tttttttctgctcaa

SEQ ID NO: 1062441 - DNA, 15 bp, Homo sapiens
atttttttctgctca

SEQ ID NO: 1062442 - DNA, 15 bp, Homo sapiens
catttttttctgctc

SEQ ID NO: 1062443 - DNA, 15 bp, Homo sapiens
acatttttttctgct

SEQ ID NO: 1062444 - DNA, 15 bp, Homo sapiens
aacatttttttctgc

SEQ ID NO: 1062445 - DNA, 15 bp, Homo sapiens
aaacatttttttctg

SEQ ID NO: 1062446 - DNA, 15 bp, Homo sapiens
taaacatttttttct

SEQ ID NO: 1062447 - DNA, 15 bp, Homo sapiens
ctaaacatttttttc

SEQ ID NO: 1062448 - DNA, 15 bp, Homo sapiens
tctaaacattttttt

SEQ ID NO: 1062449 - DNA, 15 bp, Homo sapiens
ttctaaacatttttt

SEQ ID NO: 1062450 - DNA, 15 bp, Homo sapiens
tttctaaacattttt

SEQ ID NO: 1062451 - DNA, 15 bp, Homo sapiens
ttttctaaacatttt

SEQ ID NO: 1062452 - DNA, 15 bp, Homo sapiens
gttttctaaacattt

SEQ ID NO: 1062453 - DNA, 15 bp, Homo sapiens
agttttctaaacatt

SEQ ID NO: 1062454 - DNA, 15 bp, Homo sapiens
aagttttctaaacat

SEQ ID NO: 1062455 - DNA, 15 bp, Homo sapiens
caagttttctaaaca

SEQ ID NO: 1062456 - DNA, 15 bp, Homo sapiens
tcaagttttctaaac

SEQ ID NO: 1062457 - DNA, 15 bp, Homo sapiens
ctcaagttttctaaa

SEQ ID NO: 1062458 - DNA, 15 bp, Homo sapiens
tctcaagttttctaa

SEQ ID NO: 1062459 - DNA, 15 bp, Homo sapiens
gtctcaagttttcta

SEQ ID NO: 1062460 - DNA, 15 bp, Homo sapiens
tgtctcaagttttct

SEQ ID NO: 1062461 - DNA, 15 bp, Homo sapiens
ctgtctcaagttttc

SEQ ID NO: 1062462 - DNA, 15 bp, Homo sapiens
tctgtctcaagtttt

SEQ ID NO: 1062463 - DNA, 15 bp, Homo sapiens
atctgtctcaagttt

SEQ ID NO: 1062464 - DNA, 15 bp, Homo sapiens
aatctgtctcaagtt

SEQ ID NO: 1062465 - DNA, 15 bp, Homo sapiens
aaatctgtctcaagt

SEQ ID NO: 1062466 - DNA, 15 bp, Homo sapiens
aaaatctgtctcaag

SEQ ID NO: 1062467 - DNA, 15 bp, Homo sapiens
taaaatctgtctcaa

SEQ ID NO: 1062468 - DNA, 15 bp, Homo sapiens
ataaaatctgtctca

SEQ ID NO: 1062469 - DNA, 15 bp, Homo sapiens
gataaaatctgtctc

SEQ ID NO: 1062470 - DNA, 15 bp, Homo sapiens
ggataaaatctgtct

SEQ ID NO: 1062471 - DNA, 15 bp, Homo sapiens
tggataaaatctgtc

SEQ ID NO: 1062472 - DNA, 15 bp, Homo sapiens
atggataaaatctgt

SEQ ID NO: 1062473 - DNA, 15 bp, Homo sapiens
catggataaaatctg

SEQ ID NO: 1062474 - DNA, 15 bp, Homo sapiens
gcatggataaaatct

SEQ ID NO: 1062475 - DNA, 15 bp, Homo sapiens
tgcatggataaaatc

SEQ ID NO: 1062476 - DNA, 15 bp, Homo sapiens
ctgcatggataaaat

SEQ ID NO: 1062477 - DNA, 15 bp, Homo sapiens
actgcatggataaaa

SEQ ID NO: 1062478 - DNA, 15 bp, Homo sapiens
tactgcatggataaa

SEQ ID NO: 1062479 - DNA, 15 bp, Homo sapiens
ttactgcatggataa

SEQ ID NO: 1062480 - DNA, 15 bp, Homo sapiens
cttactgcatggata

SEQ ID NO: 1062481 - DNA, 15 bp, Homo sapiens
acttactgcatggat

SEQ ID NO: 1062482 - DNA, 15 bp, Homo sapiens
gacttactgcatgga

SEQ ID NO: 1062483 - DNA, 15 bp, Homo sapiens
tgacttactgcatgg

SEQ ID NO: 1062484 - DNA, 15 bp, Homo sapiens
ctgacttactgcatg

SEQ ID NO: 1062485 - DNA, 15 bp, Homo sapiens
tctgacttactgcat

SEQ ID NO: 1062486 - DNA, 15 bp, Homo sapiens
ttctgacttactgca

SEQ ID NO: 1062487 - DNA, 15 bp, Homo sapiens
cttctgacttactgc

SEQ ID NO: 1062488 - DNA, 15 bp, Homo sapiens
acttctgacttactg

SEQ ID NO: 1062489 - DNA, 15 bp, Homo sapiens
gacttctgacttact

SEQ ID NO: 1062490 - DNA, 15 bp, Homo sapiens
tgacttctgacttac

SEQ ID NO: 1062491 - DNA, 15 bp, Homo sapiens
ttgacttctgactta

SEQ ID NO: 1062492 - DNA, 15 bp, Homo sapiens
cttgacttctgactt

SEQ ID NO: 1062493 - DNA, 15 bp, Homo sapiens
acttgacttctgact

SEQ ID NO: 1062494 - DNA, 15 bp, Homo sapiens
gacttgacttctgac

SEQ ID NO: 1062495 - DNA, 15 bp, Homo sapiens
tgacttgacttctga

SEQ ID NO: 1062496 - DNA, 15 bp, Homo sapiens
ctgacttgacttctg

SEQ ID NO: 1062497 - DNA, 15 bp, Homo sapiens
tctgacttgacttct

SEQ ID NO: 1062498 - DNA, 15 bp, Homo sapiens
ttctgacttgacttc

SEQ ID NO: 1062499 - DNA, 15 bp, Homo sapiens
cttctgacttgactt

SEQ ID NO: 1062500 - DNA, 15 bp, Homo sapiens
acttctgacttgact

SEQ ID NO: 1062501 - DNA, 15 bp, Homo sapiens
aacttctgacttgac

SEQ ID NO: 1062502 - DNA, 15 bp, Homo sapiens
gaacttctgacttga

SEQ ID NO: 1062503 - DNA, 15 bp, Homo sapiens
tgaacttctgacttg

SEQ ID NO: 1062504 - DNA, 15 bp, Homo sapiens
ctgaacttctgactt

SEQ ID NO: 1062505 - DNA, 15 bp, Homo sapiens
tctgaacttctgact

SEQ ID NO: 1062506 - DNA, 15 bp, Homo sapiens
atctgaacttctgac

SEQ ID NO: 1062507 - DNA, 15 bp, Homo sapiens
catctgaacttctga

SEQ ID NO: 1062508 - DNA, 15 bp, Homo sapiens
tcatctgaacttctg

SEQ ID NO: 1062509 - DNA, 15 bp, Homo sapiens
gtcatctgaacttct

SEQ ID NO: 1062510 - DNA, 15 bp, Homo sapiens
tgtcatctgaacttc

SEQ ID NO: 1062511 - DNA, 15 bp, Homo sapiens
atgtcatctgaactt

SEQ ID NO: 1062512 - DNA, 15 bp, Homo sapiens
catgtcatctgaact

SEQ ID NO: 1062513 - DNA, 15 bp, Homo sapiens
acatgtcatctgaac

SEQ ID NO: 1062514 - DNA, 15 bp, Homo sapiens
tacatgtcatctgaa

SEQ ID NO: 1062515 - DNA, 15 bp, Homo sapiens
gtacatgtcatctga

SEQ ID NO: 1062516 - DNA, 15 bp, Homo sapiens
cgtacatgtcatctg

SEQ ID NO: 1062517 - DNA, 15 bp, Homo sapiens
tcgtacatgtcatct

SEQ ID NO: 1062518 - DNA, 15 bp, Homo sapiens
atcgtacatgtcatc

SEQ ID NO: 1062519 - DNA, 15 bp, Homo sapiens
aatcgtacatgtcat

SEQ ID NO: 1062520 - DNA, 15 bp, Homo sapiens
gaatcgtacatgtca

SEQ ID NO: 1062521 - DNA, 15 bp, Homo sapiens
ggaatcgtacatgtc

SEQ ID NO: 1062522 - DNA, 15 bp, Homo sapiens
gggaatcgtacatgt

SEQ ID NO: 1062523 - DNA, 15 bp, Homo sapiens
agggaatcgtacatg

SEQ ID NO: 1062524 - DNA, 15 bp, Homo sapiens
cagggaatcgtacat

SEQ ID NO: 1062525 - DNA, 15 bp, Homo sapiens
ccagggaatcgtaca

SEQ ID NO: 1062526 - DNA, 15 bp, Homo sapiens
tccagggaatcgtac

SEQ ID NO: 1062527 - DNA, 15 bp, Homo sapiens
ttccagggaatcgta

SEQ ID NO: 1062528 - DNA, 15 bp, Homo sapiens
attccagggaatcgt

SEQ ID NO: 1062529 - DNA, 15 bp, Homo sapiens
aattccagggaatcg

SEQ ID NO: 1062530 - DNA, 15 bp, Homo sapiens
aaattccagggaatc

SEQ ID NO: 1062531 - DNA, 15 bp, Homo sapiens
taaattccagggaat

SEQ ID NO: 1062532 - DNA, 15 bp, Homo sapiens
ctaaattccagggaa

SEQ ID NO: 1062533 - DNA, 15 bp, Homo sapiens
actaaattccaggga

SEQ ID NO: 1062534 - DNA, 15 bp, Homo sapiens
cactaaattccaggg

SEQ ID NO: 1062535 - DNA, 15 bp, Homo sapiens
tcactaaattccagg

SEQ ID NO: 1062536 - DNA, 15 bp, Homo sapiens
atcactaaattccag

SEQ ID NO: 1062537 - DNA, 15 bp, Homo sapiens
aatcactaaattcca

SEQ ID NO: 1062538 - DNA, 15 bp, Homo sapiens
aaatcactaaattcc

SEQ ID NO: 1062539 - DNA, 15 bp, Homo sapiens
aaaatcactaaattc

SEQ ID NO: 1062540 - DNA, 15 bp, Homo sapiens
aaaaatcactaaatt

SEQ ID NO: 1062541 - DNA, 15 bp, Homo sapiens
aaaaaatcactaaat

SEQ ID NO: 1062542 - DNA, 15 bp, Homo sapiens
caaaaaatcactaaa

SEQ ID NO: 1062543 - DNA, 15 bp, Homo sapiens
acaaaaaatcactaa

SEQ ID NO: 1062544 - DNA, 15 bp, Homo sapiens
aacaaaaaatcacta

SEQ ID NO: 1062545 - DNA, 15 bp, Homo sapiens
aaacaaaaaatcact

SEQ ID NO: 1062546 - DNA, 15 bp, Homo sapiens
caaacaaaaaatcac

SEQ ID NO: 1062547 - DNA, 15 bp, Homo sapiens
tcaaacaaaaaatca

SEQ ID NO: 1062548 - DNA, 15 bp, Homo sapiens
ttcaaacaaaaaatc

SEQ ID NO: 1062549 - DNA, 15 bp, Homo sapiens
attcaaacaaaaaat

SEQ ID NO: 1062550 - DNA, 15 bp, Homo sapiens
cattcaaacaaaaaa

SEQ ID NO: 1062551 - DNA, 15 bp, Homo sapiens
acattcaaacaaaaa

SEQ ID NO: 1062552 - DNA, 15 bp, Homo sapiens
cacattcaaacaaaa

SEQ ID NO: 1062553 - DNA, 15 bp, Homo sapiens
acacattcaaacaaa

SEQ ID NO: 1062554 - DNA, 15 bp, Homo sapiens
aacacattcaaacaa

SEQ ID NO: 1062555 - DNA, 15 bp, Homo sapiens
taacacattcaaaca

SEQ ID NO: 1062556 - DNA, 15 bp, Homo sapiens
gtaacacattcaaac

SEQ ID NO: 1062557 - DNA, 15 bp, Homo sapiens
agtaacacattcaaa

SEQ ID NO: 1062558 - DNA, 15 bp, Homo sapiens
aagtaacacattcaa

SEQ ID NO: 1062559 - DNA, 15 bp, Homo sapiens
gaagtaacacattca

SEQ ID NO: 1062560 - DNA, 15 bp, Homo sapiens
agaagtaacacattc

SEQ ID NO: 1062561 - DNA, 15 bp, Homo sapiens
gagaagtaacacatt

SEQ ID NO: 1062562 - DNA, 15 bp, Homo sapiens
agagaagtaacacat

SEQ ID NO: 1062563 - DNA, 15 bp, Homo sapiens
aagagaagtaacaca

SEQ ID NO: 1062564 - DNA, 15 bp, Homo sapiens
gaagagaagtaacac

SEQ ID NO: 1062565 - DNA, 15 bp, Homo sapiens
agaagagaagtaaca

SEQ ID NO: 1062566 - DNA, 15 bp, Homo sapiens
tagaagagaagtaac

SEQ ID NO: 1062567 - DNA, 15 bp, Homo sapiens
gtagaagagaagtaa

SEQ ID NO: 1062568 - DNA, 15 bp, Homo sapiens
agtagaagagaagta

SEQ ID NO: 1062569 - DNA, 15 bp, Homo sapiens
aagtagaagagaagt

SEQ ID NO: 1062570 - DNA, 15 bp, Homo sapiens
aaagtagaagagaag

SEQ ID NO: 1062571 - DNA, 15 bp, Homo sapiens
gaaagtagaagagaa

SEQ ID NO: 1062572 - DNA, 15 bp, Homo sapiens
agaaagtagaagaga

SEQ ID NO: 1062573 - DNA, 15 bp, Homo sapiens
cagaaagtagaagag

SEQ ID NO: 1062574 - DNA, 15 bp, Homo sapiens
acagaaagtagaaga

SEQ ID NO: 1062575 - DNA, 15 bp, Homo sapiens
aacagaaagtagaag

SEQ ID NO: 1062576 - DNA, 15 bp, Homo sapiens
gaacagaaagtagaa

SEQ ID NO: 1062577 - DNA, 15 bp, Homo sapiens
agaacagaaagtaga

SEQ ID NO: 1062578 - DNA, 15 bp, Homo sapiens
cagaacagaaagtag

SEQ ID NO: 1062579 - DNA, 15 bp, Homo sapiens
gcagaacagaaagta

SEQ ID NO: 1062580 - DNA, 15 bp, Homo sapiens
agcagaacagaaagt

SEQ ID NO: 1062581 - DNA, 15 bp, Homo sapiens
gagcagaacagaaag

SEQ ID NO: 1062582 - DNA, 15 bp, Homo sapiens
ggagcagaacagaaa

SEQ ID NO: 1062583 - DNA, 15 bp, Homo sapiens
gggagcagaacagaa

SEQ ID NO: 1062584 - DNA, 15 bp, Homo sapiens
tgggagcagaacaga

SEQ ID NO: 1062585 - DNA, 15 bp, Homo sapiens
gtgggagcagaacag

SEQ ID NO: 1062586 - DNA, 15 bp, Homo sapiens
agtgggagcagaaca

SEQ ID NO: 1062587 - DNA, 15 bp, Homo sapiens
tagtgggagcagaac

SEQ ID NO: 1062588 - DNA, 15 bp, Homo sapiens
ctagtgggagcagaa

SEQ ID NO: 1062589 - DNA, 15 bp, Homo sapiens
tctagtgggagcaga

SEQ ID NO: 1062590 - DNA, 15 bp, Homo sapiens
ttctagtgggagcag

SEQ ID NO: 1062591 - DNA, 15 bp, Homo sapiens
attctagtgggagca

SEQ ID NO: 1062592 - DNA, 15 bp, Homo sapiens
aattctagtgggagc

SEQ ID NO: 1062593 - DNA, 15 bp, Homo sapiens
taattctagtgggag

SEQ ID NO: 1062594 - DNA, 15 bp, Homo sapiens
ataattctagtggga

SEQ ID NO: 1062595 - DNA, 15 bp, Homo sapiens
gataattctagtggg

SEQ ID NO: 1062596 - DNA, 15 bp, Homo sapiens
agataattctagtgg

SEQ ID NO: 1062597 - DNA, 15 bp, Homo sapiens
gagataattctagtg

SEQ ID NO: 1062598 - DNA, 15 bp, Homo sapiens
ggagataattctagt

SEQ ID NO: 1062599 - DNA, 15 bp, Homo sapiens
aggagataattctag

SEQ ID NO: 1062600 - DNA, 15 bp, Homo sapiens
aaggagataattcta

SEQ ID NO: 1062601 - DNA, 15 bp, Homo sapiens
gaaggagataattct

SEQ ID NO: 1062602 - DNA, 15 bp, Homo sapiens
ggaaggagataattc

SEQ ID NO: 1062603 - DNA, 15 bp, Homo sapiens
gggaaggagataatt

SEQ ID NO: 1062604 - DNA, 15 bp, Homo sapiens
ggggaaggagataat

SEQ ID NO: 1062605 - DNA, 15 bp, Homo sapiens
gggggaaggagataa

SEQ ID NO: 1062606 - DNA, 15 bp, Homo sapiens
tgggggaaggagata

SEQ ID NO: 1062607 - DNA, 15 bp, Homo sapiens
ctgggggaaggagat

SEQ ID NO: 1062608 - DNA, 15 bp, Homo sapiens
cctgggggaaggaga

SEQ ID NO: 1062609 - DNA, 15 bp, Homo sapiens
gcctgggggaaggag

SEQ ID NO: 1062610 - DNA, 15 bp, Homo sapiens
ggcctgggggaagga

SEQ ID NO: 1062611 - DNA, 15 bp, Homo sapiens
gggcctgggggaagg

SEQ ID NO: 1062612 - DNA, 15 bp, Homo sapiens
agggcctgggggaag

SEQ ID NO: 1062613 - DNA, 15 bp, Homo sapiens
gagggcctgggggaa

SEQ ID NO: 1062614 - DNA, 15 bp, Homo sapiens
tgagggcctggggga

SEQ ID NO: 1062615 - DNA, 15 bp, Homo sapiens
ctgagggcctggggg

SEQ ID NO: 1062616 - DNA, 15 bp, Homo sapiens
tctgagggcctgggg

SEQ ID NO: 1062617 - DNA, 15 bp, Homo sapiens
atctgagggcctggg

SEQ ID NO: 1062618 - DNA, 15 bp, Homo sapiens
gatctgagggcctgg

SEQ ID NO: 1062619 - DNA, 15 bp, Homo sapiens
ggatctgagggcctg

SEQ ID NO: 1062620 - DNA, 15 bp, Homo sapiens
tggatctgagggcct

SEQ ID NO: 1062621 - DNA, 15 bp, Homo sapiens
gtggatctgagggcc

SEQ ID NO: 1062622 - DNA, 15 bp, Homo sapiens
ggtggatctgagggc

SEQ ID NO: 1062623 - DNA, 15 bp, Homo sapiens
gggtggatctgaggg

SEQ ID NO: 1062624 - DNA, 15 bp, Homo sapiens
ggggtggatctgagg

SEQ ID NO: 1062625 - DNA, 15 bp, Homo sapiens
tggggtggatctgag

SEQ ID NO: 1062626 - DNA, 15 bp, Homo sapiens
gtggggtggatctga

SEQ ID NO: 1062627 - DNA, 15 bp, Homo sapiens
tgtggggtggatctg

SEQ ID NO: 1062628 - DNA, 15 bp, Homo sapiens
atgtggggtggatct

SEQ ID NO: 1062629 - DNA, 15 bp, Homo sapiens
tatgtggggtggatc

SEQ ID NO: 1062630 - DNA, 15 bp, Homo sapiens
gtatgtggggtggat

SEQ ID NO: 1062631 - DNA, 15 bp, Homo sapiens
ggtatgtggggtgga

SEQ ID NO: 1062632 - DNA, 15 bp, Homo sapiens
tggtatgtggggtgg

SEQ ID NO: 1062633 - DNA, 15 bp, Homo sapiens
gtggtatgtggggtg

SEQ ID NO: 1062634 - DNA, 15 bp, Homo sapiens
tgtggtatgtggggt

SEQ ID NO: 1062635 - DNA, 15 bp, Homo sapiens
ttgtggtatgtgggg

SEQ ID NO: 1062636 - DNA, 15 bp, Homo sapiens
cttgtggtatgtggg

SEQ ID NO: 1062637 - DNA, 15 bp, Homo sapiens
gcttgtggtatgtgg

SEQ ID NO: 1062638 - DNA, 15 bp, Homo sapiens
agcttgtggtatgtg

SEQ ID NO: 1062639 - DNA, 15 bp, Homo sapiens
gagcttgtggtatgt

SEQ ID NO: 1062640 - DNA, 15 bp, Homo sapiens
tgagcttgtggtatg

SEQ ID NO: 1062641 - DNA, 15 bp, Homo sapiens
atgagcttgtggtat

SEQ ID NO: 1062642 - DNA, 15 bp, Homo sapiens
aatgagcttgtggta

SEQ ID NO: 1062643 - DNA, 15 bp, Homo sapiens
gaatgagcttgtggt

SEQ ID NO: 1062644 - DNA, 15 bp, Homo sapiens
agaatgagcttgtgg

SEQ ID NO: 1062645 - DNA, 15 bp, Homo sapiens
aagaatgagcttgtg

SEQ ID NO: 1062646 - DNA, 15 bp, Homo sapiens
gaagaatgagcttgt

SEQ ID NO: 1062647 - DNA, 15 bp, Homo sapiens
tgaagaatgagcttg

SEQ ID NO: 1062648 - DNA, 15 bp, Homo sapiens
gtgaagaatgagctt

SEQ ID NO: 1062649 - DNA, 15 bp, Homo sapiens
ggtgaagaatgagct

SEQ ID NO: 1062650 - DNA, 15 bp, Homo sapiens
tggtgaagaatgagc

SEQ ID NO: 1062651 - DNA, 15 bp, Homo sapiens
gtggtgaagaatgag

SEQ ID NO: 1062652 - DNA, 15 bp, Homo sapiens
tgtggtgaagaatga

SEQ ID NO: 1062653 - DNA, 15 bp, Homo sapiens
gtgtggtgaagaatg

SEQ ID NO: 1062654 - DNA, 15 bp, Homo sapiens
ggtgtggtgaagaat

SEQ ID NO: 1062655 - DNA, 15 bp, Homo sapiens
gggtgtggtgaagaa

SEQ ID NO: 1062656 - DNA, 15 bp, Homo sapiens
agggtgtggtgaaga

SEQ ID NO: 1062657 - DNA, 15 bp, Homo sapiens
cagggtgtggtgaag

SEQ ID NO: 1062658 - DNA, 15 bp, Homo sapiens
acagggtgtggtgaa

SEQ ID NO: 1062659 - DNA, 15 bp, Homo sapiens
aacagggtgtggtga

SEQ ID NO: 1062660 - DNA, 15 bp, Homo sapiens
aaacagggtgtggtg

SEQ ID NO: 1062661 - DNA, 15 bp, Homo sapiens
aaaacagggtgtggt

SEQ ID NO: 1062662 - DNA, 15 bp, Homo sapiens
gaaaacagggtgtgg

SEQ ID NO: 1062663 - DNA, 15 bp, Homo sapiens
agaaaacagggtgtg

SEQ ID NO: 1062664 - DNA, 15 bp, Homo sapiens
tagaaaacagggtgt

SEQ ID NO: 1062665 - DNA, 15 bp, Homo sapiens
ctagaaaacagggtg

SEQ ID NO: 1062666 - DNA, 15 bp, Homo sapiens
gctagaaaacagggt

SEQ ID NO: 1062667 - DNA, 15 bp, Homo sapiens
tgctagaaaacaggg

SEQ ID NO: 1062668 - DNA, 15 bp, Homo sapiens
atgctagaaaacagg

SEQ ID NO: 1062669 - DNA, 15 bp, Homo sapiens
catgctagaaaacag

SEQ ID NO: 1062670 - DNA, 15 bp, Homo sapiens
ccatgctagaaaaca

SEQ ID NO: 1062671 - DNA, 15 bp, Homo sapiens
gccatgctagaaaac

SEQ ID NO: 1062672 - DNA, 15 bp, Homo sapiens
agccatgctagaaaa

SEQ ID NO: 1062673 - DNA, 15 bp, Homo sapiens
cagccatgctagaaa

SEQ ID NO: 1062674 - DNA, 15 bp, Homo sapiens
gcagccatgctagaa

SEQ ID NO: 1062675 - DNA, 15 bp, Homo sapiens
tgcagccatgctaga

SEQ ID NO: 1062676 - DNA, 15 bp, Homo sapiens
ttgcagccatgctag

SEQ ID NO: 1062677 - DNA, 15 bp, Homo sapiens
cttgcagccatgcta

SEQ ID NO: 1062678 - DNA, 15 bp, Homo sapiens
gcttgcagccatgct

SEQ ID NO: 1062679 - DNA, 15 bp, Homo sapiens
cgcttgcagccatgc

SEQ ID NO: 1062680 - DNA, 15 bp, Homo sapiens
gcgcttgcagccatg

SEQ ID NO: 1062681 - DNA, 15 bp, Homo sapiens
tgcgcttgcagccat

SEQ ID NO: 1062682 - DNA, 15 bp, Homo sapiens
ttgcgcttgcagcca

SEQ ID NO: 1062683 - DNA, 15 bp, Homo sapiens
tttgcgcttgcagcc

SEQ ID NO: 1062684 - DNA, 15 bp, Homo sapiens
ttttgcgcttgcagc

SEQ ID NO: 1062685 - DNA, 15 bp, Homo sapiens
gttttgcgcttgcag

SEQ ID NO: 1062686 - DNA, 15 bp, Homo sapiens
ggttttgcgcttgca

SEQ ID NO: 1062687 - DNA, 15 bp, Homo sapiens
aggttttgcgcttgc

SEQ ID NO: 1062688 - DNA, 15 bp, Homo sapiens
gaggttttgcgcttg

SEQ ID NO: 1062689 - DNA, 15 bp, Homo sapiens
ggaggttttgcgctt

SEQ ID NO: 1062690 - DNA, 15 bp, Homo sapiens
gggaggttttgcgct

SEQ ID NO: 1062691 - DNA, 15 bp, Homo sapiens
agggaggttttgcgc

SEQ ID NO: 1062692 - DNA, 15 bp, Homo sapiens
aagggaggttttgcg

SEQ ID NO: 1062693 - DNA, 15 bp, Homo sapiens
taagggaggttttgc

SEQ ID NO: 1062694 - DNA, 15 bp, Homo sapiens
ctaagggaggttttg

SEQ ID NO: 1062695 - DNA, 15 bp, Homo sapiens
actaagggaggtttt

SEQ ID NO: 1062696 - DNA, 15 bp, Homo sapiens
aactaagggaggttt

SEQ ID NO: 1062697 - DNA, 15 bp, Homo sapiens
gaactaagggaggtt

SEQ ID NO: 1062698 - DNA, 15 bp, Homo sapiens
ggaactaagggaggt

SEQ ID NO: 1062699 - DNA, 15 bp, Homo sapiens
gggaactaagggagg

SEQ ID NO: 1062700 - DNA, 15 bp, Homo sapiens
tgggaactaagggag

SEQ ID NO: 1062701 - DNA, 15 bp, Homo sapiens
gtgggaactaaggga

SEQ ID NO: 1062702 - DNA, 15 bp, Homo sapiens
ggtgggaactaaggg

SEQ ID NO: 1062703 - DNA, 15 bp, Homo sapiens
aggtgggaactaagg

SEQ ID NO: 1062704 - DNA, 15 bp, Homo sapiens
caggtgggaactaag

SEQ ID NO: 1062705 - DNA, 15 bp, Homo sapiens
gcaggtgggaactaa

SEQ ID NO: 1062706 - DNA, 15 bp, Homo sapiens
tgcaggtgggaacta

SEQ ID NO: 1062707 - DNA, 15 bp, Homo sapiens
ttgcaggtgggaact

SEQ ID NO: 1062708 - DNA, 15 bp, Homo sapiens
gttgcaggtgggaac

SEQ ID NO: 1062709 - DNA, 15 bp, Homo sapiens
cgttgcaggtgggaa

SEQ ID NO: 1062710 - DNA, 15 bp, Homo sapiens
gcgttgcaggtggga

SEQ ID NO: 1062711 - DNA, 15 bp, Homo sapiens
ggcgttgcaggtggg

SEQ ID NO: 1062712 - DNA, 15 bp, Homo sapiens
tggcgttgcaggtgg

SEQ ID NO: 1062713 - DNA, 15 bp, Homo sapiens
ttggcgttgcaggtg

SEQ ID NO: 1062714 - DNA, 15 bp, Homo sapiens
cttggcgttgcaggt

SEQ ID NO: 1062715 - DNA, 15 bp, Homo sapiens
ccttggcgttgcagg

SEQ ID NO: 1062716 - DNA, 15 bp, Homo sapiens
accttggcgttgcag

SEQ ID NO: 1062717 - DNA, 15 bp, Homo sapiens
gaccttggcgttgca

SEQ ID NO: 1062718 - DNA, 15 bp, Homo sapiens
ggaccttggcgttgc

SEQ ID NO: 1062719 - DNA, 15 bp, Homo sapiens
gggaccttggcgttg

SEQ ID NO: 1062720 - DNA, 15 bp, Homo sapiens
tgggaccttggcgtt

SEQ ID NO: 1062721 - DNA, 15 bp, Homo sapiens
ctgggaccttggcgt

SEQ ID NO: 1062722 - DNA, 15 bp, Homo sapiens
tctgggaccttggcg

SEQ ID NO: 1062723 - DNA, 15 bp, Homo sapiens
ctctgggaccttggc

SEQ ID NO: 1062724 - DNA, 15 bp, Homo sapiens
actctgggaccttgg

SEQ ID NO: 1062725 - DNA, 15 bp, Homo sapiens
aactctgggaccttg

SEQ ID NO: 1062726 - DNA, 15 bp, Homo sapiens
aaactctgggacctt

SEQ ID NO: 1062727 - DNA, 15 bp, Homo sapiens
caaactctgggacct

SEQ ID NO: 1062728 - DNA, 15 bp, Homo sapiens
gcaaactctgggacc

SEQ ID NO: 1062729 - DNA, 15 bp, Homo sapiens
agcaaactctgggac

SEQ ID NO: 1062730 - DNA, 15 bp, Homo sapiens
cagcaaactctggga

SEQ ID NO: 1062731 - DNA, 15 bp, Homo sapiens
tcagcaaactctggg

SEQ ID NO: 1062732 - DNA, 15 bp, Homo sapiens
ctcagcaaactctgg

SEQ ID NO: 1062733 - DNA, 15 bp, Homo sapiens
gctcagcaaactctg

SEQ ID NO: 1062734 - DNA, 15 bp, Homo sapiens
agctcagcaaactct

SEQ ID NO: 1062735 - DNA, 15 bp, Homo sapiens
tagctcagcaaactc

SEQ ID NO: 1062736 - DNA, 15 bp, Homo sapiens
gtagctcagcaaact

SEQ ID NO: 1062737 - DNA, 15 bp, Homo sapiens
ggtagctcagcaaac

SEQ ID NO: 1062738 - DNA, 15 bp, Homo sapiens
tggtagctcagcaaa

SEQ ID NO: 1062739 - DNA, 15 bp, Homo sapiens
atggtagctcagcaa

SEQ ID NO: 1062740 - DNA, 15 bp, Homo sapiens
gatggtagctcagca

SEQ ID NO: 1062741 - DNA, 15 bp, Homo sapiens
tgatggtagctcagc

SEQ ID NO: 1062742 - DNA, 15 bp, Homo sapiens
ctgatggtagctcag

SEQ ID NO: 1062743 - DNA, 15 bp, Homo sapiens
gctgatggtagctca

SEQ ID NO: 1062744 - DNA, 15 bp, Homo sapiens
tgctgatggtagctc

SEQ ID NO: 1062745 - DNA, 15 bp, Homo sapiens
ttgctgatggtagct

SEQ ID NO: 1062746 - DNA, 15 bp, Homo sapiens
cttgctgatggtagc

SEQ ID NO: 1062747 - DNA, 15 bp, Homo sapiens
tcttgctgatggtag

SEQ ID NO: 1062748 - DNA, 15 bp, Homo sapiens
gtcttgctgatggta

SEQ ID NO: 1062749 - DNA, 15 bp, Homo sapiens
ggtcttgctgatggt

SEQ ID NO: 1062750 - DNA, 15 bp, Homo sapiens
aggtcttgctgatgg

SEQ ID NO: 1062751 - DNA, 15 bp, Homo sapiens
aaggtcttgctgatg

SEQ ID NO: 1062752 - DNA, 15 bp, Homo sapiens
caaggtcttgctgat

SEQ ID NO: 1062753 - DNA, 15 bp, Homo sapiens
tcaaggtcttgctga

SEQ ID NO: 1062754 - DNA, 15 bp, Homo sapiens
ttcaaggtcttgctg

SEQ ID NO: 1062755 - DNA, 15 bp, Homo sapiens
gttcaaggtcttgct

SEQ ID NO: 1062756 - DNA, 15 bp, Homo sapiens
tgttcaaggtcttgc

SEQ ID NO: 1062757 - DNA, 15 bp, Homo sapiens
atgttcaaggtcttg

SEQ ID NO: 1062758 - DNA, 15 bp, Homo sapiens
catgttcaaggtctt

SEQ ID NO: 1062759 - DNA, 15 bp, Homo sapiens
gcatgttcaaggtct

SEQ ID NO: 1062760 - DNA, 15 bp, Homo sapiens
ggcatgttcaaggtc

SEQ ID NO: 1062761 - DNA, 15 bp, Homo sapiens
aggcatgttcaaggt

SEQ ID NO: 1062762 - DNA, 15 bp, Homo sapiens
gaggcatgttcaagg

SEQ ID NO: 1062763 - DNA, 15 bp, Homo sapiens
cgaggcatgttcaag

SEQ ID NO: 1062764 - DNA, 15 bp, Homo sapiens
ccgaggcatgttcaa

SEQ ID NO: 1062765 - DNA, 15 bp, Homo sapiens
gccgaggcatgttca

SEQ ID NO: 1062766 - DNA, 15 bp, Homo sapiens
ggccgaggcatgttc

SEQ ID NO: 1062767 - DNA, 15 bp, Homo sapiens
gggccgaggcatgtt

SEQ ID NO: 1062768 - DNA, 15 bp, Homo sapiens
agggccgaggcatgt

SEQ ID NO: 1062769 - DNA, 15 bp, Homo sapiens
gagggccgaggcatg

SEQ ID NO: 1062770 - DNA, 15 bp, Homo sapiens
agagggccgaggcat

SEQ ID NO: 1062771 - DNA, 15 bp, Homo sapiens
gagagggccgaggca

SEQ ID NO: 1062772 - DNA, 15 bp, Homo sapiens
agagagggccgaggc

SEQ ID NO: 1062773 - DNA, 15 bp, Homo sapiens
gagagagggccgagg

SEQ ID NO: 1062774 - DNA, 15 bp, Homo sapiens
ggagagagggccgag

SEQ ID NO: 1062775 - DNA, 15 bp, Homo sapiens
aggagagagggccga

SEQ ID NO: 1062776 - DNA, 15 bp, Homo sapiens
gaggagagagggccg

SEQ ID NO: 1062777 - DNA, 15 bp, Homo sapiens
agaggagagagggcc

SEQ ID NO: 1062778 - DNA, 15 bp, Homo sapiens
gagaggagagagggc

SEQ ID NO: 1062779 - DNA, 15 bp, Homo sapiens
ggagaggagagaggg

SEQ ID NO: 1062780 - DNA, 15 bp, Homo sapiens
gggagaggagagagg

SEQ ID NO: 1062781 - DNA, 15 bp, Homo sapiens
agggagaggagagag

SEQ ID NO: 1062782 - DNA, 15 bp, Homo sapiens
gagggagaggagaga

SEQ ID NO: 1062783 - DNA, 15 bp, Homo sapiens
ggagggagaggagag

SEQ ID NO: 1062784 - DNA, 15 bp, Homo sapiens
tggagggagaggaga

SEQ ID NO: 1062785 - DNA, 15 bp, Homo sapiens
gtggagggagaggag

SEQ ID NO: 1062786 - DNA, 15 bp, Homo sapiens
tgtggagggagagga

SEQ ID NO: 1062787 - DNA, 15 bp, Homo sapiens
atgtggagggagagg

SEQ ID NO: 1062788 - DNA, 15 bp, Homo sapiens
aatgtggagggagag

SEQ ID NO: 1062789 - DNA, 15 bp, Homo sapiens
caatgtggagggaga

SEQ ID NO: 1062790 - DNA, 15 bp, Homo sapiens
gcaatgtggagggag

SEQ ID NO: 1062791 - DNA, 15 bp, Homo sapiens
agcaatgtggaggga

SEQ ID NO: 1062792 - DNA, 15 bp, Homo sapiens
gagcaatgtggaggg

SEQ ID NO: 1062793 - DNA, 15 bp, Homo sapiens
agagcaatgtggagg

SEQ ID NO: 1062794 - DNA, 15 bp, Homo sapiens
tagagcaatgtggag

SEQ ID NO: 1062795 - DNA, 15 bp, Homo sapiens
gtagagcaatgtgga

SEQ ID NO: 1062796 - DNA, 15 bp, Homo sapiens
agtagagcaatgtgg

SEQ ID NO: 1062797 - DNA, 15 bp, Homo sapiens
aagtagagcaatgtg

SEQ ID NO: 1062798 - DNA, 15 bp, Homo sapiens
gaagtagagcaatgt

SEQ ID NO: 1062799 - DNA, 15 bp, Homo sapiens
tgaagtagagcaatg

SEQ ID NO: 1062800 - DNA, 15 bp, Homo sapiens
ctgaagtagagcaat

SEQ ID NO: 1062801 - DNA, 15 bp, Homo sapiens
actgaagtagagcaa

SEQ ID NO: 1062802 - DNA, 15 bp, Homo sapiens
cactgaagtagagca

SEQ ID NO: 1062803 - DNA, 15 bp, Homo sapiens
ccactgaagtagagc

SEQ ID NO: 1062804 - DNA, 15 bp, Homo sapiens
accactgaagtagag

SEQ ID NO: 1062805 - DNA, 15 bp, Homo sapiens
taccactgaagtaga

SEQ ID NO: 1062806 - DNA, 15 bp, Homo sapiens
gtaccactgaagtag

SEQ ID NO: 1062807 - DNA, 15 bp, Homo sapiens
tgtaccactgaagta

SEQ ID NO: 1062808 - DNA, 15 bp, Homo sapiens
ctgtaccactgaagt

SEQ ID NO: 1062809 - DNA, 15 bp, Homo sapiens
gctgtaccactgaag

SEQ ID NO: 1062810 - DNA, 15 bp, Homo sapiens
agctgtaccactgaa

SEQ ID NO: 1062811 - DNA, 15 bp, Homo sapiens
gagctgtaccactga

SEQ ID NO: 1062812 - DNA, 15 bp, Homo sapiens
ggagctgtaccactg

SEQ ID NO: 1062813 - DNA, 15 bp, Homo sapiens
aggagctgtaccact

SEQ ID NO: 1062814 - DNA, 15 bp, Homo sapiens
atgggaggagctgta

SEQ ID NO: 1062815 - DNA, 15 bp, Homo sapiens
catgggaggagctgt

SEQ ID NO: 1062816 - DNA, 15 bp, Homo sapiens
ccatgggaggagctg

SEQ ID NO: 1062817 - DNA, 15 bp, Homo sapiens
gccatgggaggagct

SEQ ID NO: 1062818 - DNA, 15 bp, Homo sapiens
agccatgggaggagc

SEQ ID NO: 1062819 - DNA, 15 bp, Homo sapiens
cagccatgggaggag

SEQ ID NO: 1062820 - DNA, 15 bp, Homo sapiens
acagccatgggagga

SEQ ID NO: 1062821 - DNA, 15 bp, Homo sapiens
gacagccatgggagg

SEQ ID NO: 1062822 - DNA, 15 bp, Homo sapiens
agacagccatgggag

SEQ ID NO: 1062823 - DNA, 15 bp, Homo sapiens
gagacagccatggga

SEQ ID NO: 1062824 - DNA, 15 bp, Homo sapiens
agagacagccatggg

SEQ ID NO: 1062825 - DNA, 15 bp, Homo sapiens
tagagacagccatgg

SEQ ID NO: 1062826 - DNA, 15 bp, Homo sapiens
ctagagacagccatg

SEQ ID NO: 1062827 - DNA, 15 bp, Homo sapiens
tctagagacagccat

SEQ ID NO: 1062828 - DNA, 15 bp, Homo sapiens
gtctagagacagcca

SEQ ID NO: 1062829 - DNA, 15 bp, Homo sapiens
ggtctagagacagcc

SEQ ID NO: 1062830 - DNA, 15 bp, Homo sapiens
aggtctagagacagc

SEQ ID NO: 1062831 - DNA, 15 bp, Homo sapiens
gaggtctagagacag

SEQ ID NO: 1062832 - DNA, 15 bp, Homo sapiens
tgaggtctagagaca

SEQ ID NO: 1062833 - DNA, 15 bp, Homo sapiens
gtgaggtctagagac

SEQ ID NO: 1062834 - DNA, 15 bp, Homo sapiens
ggtgaggtctagaga

SEQ ID NO: 1062835 - DNA, 15 bp, Homo sapiens
aggtgaggtctagag

SEQ ID NO: 1062836 - DNA, 15 bp, Homo sapiens
aaggtgaggtctaga

SEQ ID NO: 1062837 - DNA, 15 bp, Homo sapiens
caaggtgaggtctag

SEQ ID NO: 1062838 - DNA, 15 bp, Homo sapiens
tcaaggtgaggtcta

SEQ ID NO: 1062839 - DNA, 15 bp, Homo sapiens
gtcaaggtgaggtct

SEQ ID NO: 1062840 - DNA, 15 bp, Homo sapiens
tgtcaaggtgaggtc

SEQ ID NO: 1062841 - DNA, 15 bp, Homo sapiens
atgtcaaggtgaggt

SEQ ID NO: 1062842 - DNA, 15 bp, Homo sapiens
gatgtcaaggtgagg

SEQ ID NO: 1062843 - DNA, 15 bp, Homo sapiens
agatgtcaaggtgag

SEQ ID NO: 1062844 - DNA, 15 bp, Homo sapiens
gagatgtcaaggtga

SEQ ID NO: 1062845 - DNA, 15 bp, Homo sapiens
tgagatgtcaaggtg

SEQ ID NO: 1062846 - DNA, 15 bp, Homo sapiens
gtgagatgtcaaggt

SEQ ID NO: 1062847 - DNA, 15 bp, Homo sapiens
ggtgagatgtcaagg

SEQ ID NO: 1062848 - DNA, 15 bp, Homo sapiens
tggtgagatgtcaag

SEQ ID NO: 1062849 - DNA, 15 bp, Homo sapiens
gtggtgagatgtcaa

SEQ ID NO: 1062850 - DNA, 15 bp, Homo sapiens
ggtggtgagatgtca

SEQ ID NO: 1062851 - DNA, 15 bp, Homo sapiens
gggtggtgagatgtc

SEQ ID NO: 1062852 - DNA, 15 bp, Homo sapiens
tgggtggtgagatgt

SEQ ID NO: 1062853 - DNA, 15 bp, Homo sapiens
gtgggtggtgagatg

SEQ ID NO: 1062854 - DNA, 15 bp, Homo sapiens
ggtgggtggtgagat

SEQ ID NO: 1062855 - DNA, 15 bp, Homo sapiens
aggtgggtggtgaga

SEQ ID NO: 1062856 - DNA, 15 bp, Homo sapiens
gaggtgggtggtgag

SEQ ID NO: 1062857 - DNA, 15 bp, Homo sapiens
agaggtgggtggtga

SEQ ID NO: 1062858 - DNA, 15 bp, Homo sapiens
cagaggtgggtggtg

SEQ ID NO: 1062859 - DNA, 15 bp, Homo sapiens
gcagaggtgggtggt

SEQ ID NO: 1062860 - DNA, 15 bp, Homo sapiens
aaggcagaggtgggt

SEQ ID NO: 1062861 - DNA, 15 bp, Homo sapiens
caaggcagaggtggg

SEQ ID NO: 1062862 - DNA, 15 bp, Homo sapiens
acaaggcagaggtgg

SEQ ID NO: 1062863 - DNA, 15 bp, Homo sapiens
aacaaggcagaggtg

SEQ ID NO: 1062864 - DNA, 15 bp, Homo sapiens
gaacaaggcagaggt

SEQ ID NO: 1062865 - DNA, 15 bp, Homo sapiens
ggaacaaggcagagg

SEQ ID NO: 1062866 - DNA, 15 bp, Homo sapiens
aggaacaaggcagag

SEQ ID NO: 1062867 - DNA, 15 bp, Homo sapiens
taggaacaaggcaga

SEQ ID NO: 1062868 - DNA, 15 bp, Homo sapiens
gtaggaacaaggcag

SEQ ID NO: 1062869 - DNA, 15 bp, Homo sapiens
ggtaggaacaaggca

SEQ ID NO: 1062870 - DNA, 15 bp, Homo sapiens
aggtaggaacaaggc

SEQ ID NO: 1062871 - DNA, 15 bp, Homo sapiens
caggtaggaacaagg

SEQ ID NO: 1062872 - DNA, 15 bp, Homo sapiens
tcaggtaggaacaag

SEQ ID NO: 1062873 - DNA, 15 bp, Homo sapiens
atcaggtaggaacaa

SEQ ID NO: 1062874 - DNA, 15 bp, Homo sapiens
catcaggtaggaaca

SEQ ID NO: 1062875 - DNA, 15 bp, Homo sapiens
gcatcaggtaggaac

SEQ ID NO: 1062876 - DNA, 15 bp, Homo sapiens
tgcatcaggtaggaa

SEQ ID NO: 1062877 - DNA, 15 bp, Homo sapiens
gtgcatcaggtagga

SEQ ID NO: 1062878 - DNA, 15 bp, Homo sapiens
agtgcatcaggtagg

SEQ ID NO: 1062879 - DNA, 15 bp, Homo sapiens
gagtgcatcaggtag

SEQ ID NO: 1062880 - DNA, 15 bp, Homo sapiens
agagtgcatcaggta

SEQ ID NO: 1062881 - DNA, 15 bp, Homo sapiens
gagagtgcatcaggt

SEQ ID NO: 1062882 - DNA, 15 bp, Homo sapiens
ggagagtgcatcagg

SEQ ID NO: 1062883 - DNA, 15 bp, Homo sapiens
gggagagtgcatcag

SEQ ID NO: 1062884 - DNA, 15 bp, Homo sapiens
ggggagagtgcatca

SEQ ID NO: 1062885 - DNA, 15 bp, Homo sapiens
aggggagagtgcatc

SEQ ID NO: 1062886 - DNA, 15 bp, Homo sapiens
gaggggagagtgcat

SEQ ID NO: 1062887 - DNA, 15 bp, Homo sapiens
agaggggagagtgca

SEQ ID NO: 1062888 - DNA, 15 bp, Homo sapiens
gagaggggagagtgc

SEQ ID NO: 1062889 - DNA, 15 bp, Homo sapiens
ggagaggggagagtg

SEQ ID NO: 1062890 - DNA, 15 bp, Homo sapiens
tggagaggggagagt

SEQ ID NO: 1062891 - DNA, 15 bp, Homo sapiens
ttggagaggggagag

SEQ ID NO: 1062892 - DNA, 15 bp, Homo sapiens
tttggagaggggaga

SEQ ID NO: 1062893 - DNA, 15 bp, Homo sapiens
ctttggagaggggag

SEQ ID NO: 1062894 - DNA, 15 bp, Homo sapiens
tctttggagagggga

SEQ ID NO: 1062895 - DNA, 15 bp, Homo sapiens
ctctttggagagggg

SEQ ID NO: 1062896 - DNA, 15 bp, Homo sapiens
actctttggagaggg

SEQ ID NO: 1062897 - DNA, 15 bp, Homo sapiens
gactctttggagagg

SEQ ID NO: 1062898 - DNA, 15 bp, Homo sapiens
tgactctttggagag

SEQ ID NO: 1062899 - DNA, 15 bp, Homo sapiens
gtgactctttggaga

SEQ ID NO: 1062900 - DNA, 15 bp, Homo sapiens
ggtgactctttggag

SEQ ID NO: 1062901 - DNA, 15 bp, Homo sapiens
aggtgactctttgga

SEQ ID NO: 1062902 - DNA, 15 bp, Homo sapiens
caggtgactctttgg

SEQ ID NO: 1062903 - DNA, 15 bp, Homo sapiens
ccaggtgactctttg

SEQ ID NO: 1062904 - DNA, 15 bp, Homo sapiens
gccaggtgactcttt

SEQ ID NO: 1062905 - DNA, 15 bp, Homo sapiens
ggccaggtgactctt

SEQ ID NO: 1062906 - DNA, 15 bp, Homo sapiens
gggccaggtgactct

SEQ ID NO: 1062907 - DNA, 15 bp, Homo sapiens
agggccaggtgactc

SEQ ID NO: 1062908 - DNA, 15 bp, Homo sapiens
tagggccaggtgact

SEQ ID NO: 1062909 - DNA, 15 bp, Homo sapiens
ctagggccaggtgac

SEQ ID NO: 1062910 - DNA, 15 bp, Homo sapiens
actagggccaggtga

SEQ ID NO: 1062911 - DNA, 15 bp, Homo sapiens
aactagggccaggtg

SEQ ID NO: 1062912 - DNA, 15 bp, Homo sapiens
gaactagggccaggt

SEQ ID NO: 1062913 - DNA, 15 bp, Homo sapiens
ggaactagggccagg

SEQ ID NO: 1062914 - DNA, 15 bp, Homo sapiens
tggaactagggccag

SEQ ID NO: 1062915 - DNA, 15 bp, Homo sapiens
gtggaactagggcca

SEQ ID NO: 1062916 - DNA, 15 bp, Homo sapiens
agtggaactagggcc

SEQ ID NO: 1062917 - DNA, 15 bp, Homo sapiens
gagtggaactagggc

SEQ ID NO: 1062918 - DNA, 15 bp, Homo sapiens
tgagtggaactaggg

SEQ ID NO: 1062919 - DNA, 15 bp, Homo sapiens
gtgagtggaactagg

SEQ ID NO: 1062920 - DNA, 15 bp, Homo sapiens
ggtgagtggaactag

SEQ ID NO: 1062921 - DNA, 15 bp, Homo sapiens
aggtgagtggaacta

SEQ ID NO: 1062922 - DNA, 15 bp, Homo sapiens
gaggtgagtggaact

SEQ ID NO: 1062923 - DNA, 15 bp, Homo sapiens
agaggtgagtggaac

SEQ ID NO: 1062924 - DNA, 15 bp, Homo sapiens
gagaggtgagtggaa

SEQ ID NO: 1062925 - DNA, 15 bp, Homo sapiens
agagaggtgagtgga

SEQ ID NO: 1062926 - DNA, 15 bp, Homo sapiens
cagagaggtgagtgg

SEQ ID NO: 1062927 - DNA, 15 bp, Homo sapiens
acagagaggtgagtg

SEQ ID NO: 1062928 - DNA, 15 bp, Homo sapiens
gacagagaggtgagt

SEQ ID NO: 1062929 - DNA, 15 bp, Homo sapiens
tgacagagaggtgag

SEQ ID NO: 1062930 - DNA, 15 bp, Homo sapiens
ttgacagagaggtga

SEQ ID NO: 1062931 - DNA, 15 bp, Homo sapiens
gttgacagagaggtg

SEQ ID NO: 1062932 - DNA, 15 bp, Homo sapiens
ggttgacagagaggt

SEQ ID NO: 1062933 - DNA, 15 bp, Homo sapiens
aggttgacagagagg

SEQ ID NO: 1062934 - DNA, 15 bp, Homo sapiens
gaggttgacagagag

SEQ ID NO: 1062935 - DNA, 15 bp, Homo sapiens
ggaggttgacagaga

SEQ ID NO: 1062936 - DNA, 15 bp, Homo sapiens
tggaggttgacagag

SEQ ID NO: 1062937 - DNA, 15 bp, Homo sapiens
ctggaggttgacaga

SEQ ID NO: 1062938 - DNA, 15 bp, Homo sapiens
cctggaggttgacag

SEQ ID NO: 1062939 - DNA, 15 bp, Homo sapiens
tcctggaggttgaca

SEQ ID NO: 1062940 - DNA, 15 bp, Homo sapiens
ttcctggaggttgac

SEQ ID NO: 1062941 - DNA, 15 bp, Homo sapiens
gttcctggaggttga

SEQ ID NO: 1062942 - DNA, 15 bp, Homo sapiens
ggttcctggaggttg

SEQ ID NO: 1062943 - DNA, 15 bp, Homo sapiens
gggttcctggaggtt

SEQ ID NO: 1062944 - DNA, 15 bp, Homo sapiens
agggttcctggaggt

SEQ ID NO: 1062945 - DNA, 15 bp, Homo sapiens
aagggttcctggagg

SEQ ID NO: 1062946 - DNA, 15 bp, Homo sapiens
aaagggttcctggag

SEQ ID NO: 1062947 - DNA, 15 bp, Homo sapiens
taaagggttcctgga

SEQ ID NO: 1062948 - DNA, 15 bp, Homo sapiens
ataaagggttcctgg

SEQ ID NO: 1062949 - DNA, 15 bp, Homo sapiens
cataaagggttcctg

SEQ ID NO: 1062950 - DNA, 15 bp, Homo sapiens
acataaagggttcct

SEQ ID NO: 1062951 - DNA, 15 bp, Homo sapiens
cacataaagggttcc

SEQ ID NO: 1062952 - DNA, 15 bp, Homo sapiens
acacataaagggttc

SEQ ID NO: 1062953 - DNA, 15 bp, Homo sapiens
gacacataaagggtt

SEQ ID NO: 1062954 - DNA, 15 bp, Homo sapiens
ggacacataaagggt

SEQ ID NO: 1062955 - DNA, 15 bp, Homo sapiens
aggacacataaaggg

SEQ ID NO: 1062956 - DNA, 15 bp, Homo sapiens
gaggacacataaagg

SEQ ID NO: 1062957 - DNA, 15 bp, Homo sapiens
ggaggacacataaag

SEQ ID NO: 1062958 - DNA, 15 bp, Homo sapiens
tggaggacacataaa

SEQ ID NO: 1062959 - DNA, 15 bp, Homo sapiens
atggaggacacataa

SEQ ID NO: 1062960 - DNA, 15 bp, Homo sapiens
catggaggacacata

SEQ ID NO: 1062961 - DNA, 15 bp, Homo sapiens
gcatggaggacacat

SEQ ID NO: 1062962 - DNA, 15 bp, Homo sapiens
ggcatggaggacaca

SEQ ID NO: 1062963 - DNA, 15 bp, Homo sapiens
aggcatggaggacac

SEQ ID NO: 1062964 - DNA, 15 bp, Homo sapiens
aaggcatggaggaca

SEQ ID NO: 1062965 - DNA, 15 bp, Homo sapiens
taaggcatggaggac

SEQ ID NO: 1062966 - DNA, 15 bp, Homo sapiens
ctaaggcatggagga

SEQ ID NO: 1062967 - DNA, 15 bp, Homo sapiens
cctaaggcatggagg

SEQ ID NO: 1062968 - DNA, 15 bp, Homo sapiens
gcctaaggcatggag

SEQ ID NO: 1062969 - DNA, 15 bp, Homo sapiens
tgcctaaggcatgga

SEQ ID NO: 1062970 - DNA, 15 bp, Homo sapiens
gtgcctaaggcatgg

SEQ ID NO: 1062971 - DNA, 15 bp, Homo sapiens
tgtgcctaaggcatg

SEQ ID NO: 1062972 - DNA, 15 bp, Homo sapiens
atgtgcctaaggcat

SEQ ID NO: 1062973 - DNA, 15 bp, Homo sapiens
catgtgcctaaggca

SEQ ID NO: 1062974 - DNA, 15 bp, Homo sapiens
tcatgtgcctaaggc

SEQ ID NO: 1062975 - DNA, 15 bp, Homo sapiens
gtcatgtgcctaagg

SEQ ID NO: 1062976 - DNA, 15 bp, Homo sapiens
ggtcatgtgcctaag

SEQ ID NO: 1062977 - DNA, 15 bp, Homo sapiens
gggtcatgtgcctaa

SEQ ID NO: 1062978 - DNA, 15 bp, Homo sapiens
cgggtcatgtgccta

SEQ ID NO: 1062979 - DNA, 15 bp, Homo sapiens
acgggtcatgtgcct

SEQ ID NO: 1062980 - DNA, 15 bp, Homo sapiens
cacgggtcatgtgcc

SEQ ID NO: 1062981 - DNA, 15 bp, Homo sapiens
acacgggtcatgtgc

SEQ ID NO: 1062982 - DNA, 15 bp, Homo sapiens
aacacgggtcatgtg

SEQ ID NO: 1062983 - DNA, 15 bp, Homo sapiens
aaacacgggtcatgt

SEQ ID NO: 1062984 - DNA, 15 bp, Homo sapiens
gaaacacgggtcatg

SEQ ID NO: 1062985 - DNA, 15 bp, Homo sapiens
ggaaacacgggtcat

SEQ ID NO: 1062986 - DNA, 15 bp, Homo sapiens
aggaaacacgggtca

SEQ ID NO: 1062987 - DNA, 15 bp, Homo sapiens
gaggaaacacgggtc

SEQ ID NO: 1062988 - DNA, 15 bp, Homo sapiens
tgaggaaacacgggt

SEQ ID NO: 1062989 - DNA, 15 bp, Homo sapiens
gtgaggaaacacggg

SEQ ID NO: 1062990 - DNA, 15 bp, Homo sapiens
tgtgaggaaacacgg

SEQ ID NO: 1062991 - DNA, 15 bp, Homo sapiens
ttgtgaggaaacacg

SEQ ID NO: 1062992 - DNA, 15 bp, Homo sapiens
attgtgaggaaacac

SEQ ID NO: 1062993 - DNA, 15 bp, Homo sapiens
gattgtgaggaaaca

SEQ ID NO: 1062994 - DNA, 15 bp, Homo sapiens
tgattgtgaggaaac

SEQ ID NO: 1062995 - DNA, 15 bp, Homo sapiens
gtgattgtgaggaaa

SEQ ID NO: 1062996 - DNA, 15 bp, Homo sapiens
tgtgattgtgaggaa

SEQ ID NO: 1062997 - DNA, 15 bp, Homo sapiens
ctgtgattgtgagga

SEQ ID NO: 1062998 - DNA, 15 bp, Homo sapiens
actgtgattgtgagg

SEQ ID NO: 1062999 - DNA, 15 bp, Homo sapiens
aactgtgattgtgag

SEQ ID NO: 1063000 - DNA, 15 bp, Homo sapiens
taactgtgattgtga

SEQ ID NO: 1063001 - DNA, 15 bp, Homo sapiens
gtaactgtgattgtg

SEQ ID NO: 1063002 - DNA, 15 bp, Homo sapiens
ggtaactgtgattgt

SEQ ID NO: 1063003 - DNA, 15 bp, Homo sapiens
gggtaactgtgattg

SEQ ID NO: 1063004 - DNA, 15 bp, Homo sapiens
agggtaactgtgatt

SEQ ID NO: 1063005 - DNA, 15 bp, Homo sapiens
gagggtaactgtgat

SEQ ID NO: 1063006 - DNA, 15 bp, Homo sapiens
agagggtaactgtga

SEQ ID NO: 1063007 - DNA, 15 bp, Homo sapiens
gagagggtaactgtg

SEQ ID NO: 1063008 - DNA, 15 bp, Homo sapiens
tgagagggtaactgt

SEQ ID NO: 1063009 - DNA, 15 bp, Homo sapiens
atgagagggtaactg

SEQ ID NO: 1063010 - DNA, 15 bp, Homo sapiens
tatgagagggtaact

SEQ ID NO: 1063011 - DNA, 15 bp, Homo sapiens
gtatgagagggtaac

SEQ ID NO: 1063012 - DNA, 15 bp, Homo sapiens
agtatgagagggtaa

SEQ ID NO: 1063013 - DNA, 15 bp, Homo sapiens
gagtatgagagggta

SEQ ID NO: 1063014 - DNA, 15 bp, Homo sapiens
tgagtatgagagggt

SEQ ID NO: 1063015 - DNA, 15 bp, Homo sapiens
gtgagtatgagaggg

SEQ ID NO: 1063016 - DNA, 15 bp, Homo sapiens
tgtgagtatgagagg

SEQ ID NO: 1063017 - DNA, 15 bp, Homo sapiens
atgtgagtatgagag

SEQ ID NO: 1063018 - DNA, 15 bp, Homo sapiens
catgtgagtatgaga

SEQ ID NO: 1063019 - DNA, 15 bp, Homo sapiens
gcatgtgagtatgag

SEQ ID NO: 1063020 - DNA, 15 bp, Homo sapiens
tgcatgtgagtatga

SEQ ID NO: 1063021 - DNA, 15 bp, Homo sapiens
ttgcatgtgagtatg

SEQ ID NO: 1063022 - DNA, 15 bp, Homo sapiens
cttgcatgtgagtat

SEQ ID NO: 1063023 - DNA, 15 bp, Homo sapiens
ccttgcatgtgagta

SEQ ID NO: 1063024 - DNA, 15 bp, Homo sapiens
tccttgcatgtgagt

SEQ ID NO: 1063025 - DNA, 15 bp, Homo sapiens
gtccttgcatgtgag

SEQ ID NO: 1063026 - DNA, 15 bp, Homo sapiens
cgtccttgcatgtga

SEQ ID NO: 1063027 - DNA, 15 bp, Homo sapiens
tcgtccttgcatgtg

SEQ ID NO: 1063028 - DNA, 15 bp, Homo sapiens
ctcgtccttgcatgt

SEQ ID NO: 1063029 - DNA, 15 bp, Homo sapiens
cctcgtccttgcatg

SEQ ID NO: 1063030 - DNA, 15 bp, Homo sapiens
tcctcgtccttgcat

SEQ ID NO: 1063031 - DNA, 15 bp, Homo sapiens
ttcctcgtccttgca

SEQ ID NO: 1063032 - DNA, 15 bp, Homo sapiens
gttcctcgtccttgc

SEQ ID NO: 1063033 - DNA, 15 bp, Homo sapiens
agttcctcgtccttg

SEQ ID NO: 1063034 - DNA, 15 bp, Homo sapiens
aagttcctcgtcctt

SEQ ID NO: 1063035 - DNA, 15 bp, Homo sapiens
caagttcctcgtcct

SEQ ID NO: 1063036 - DNA, 15 bp, Homo sapiens
acaagttcctcgtcc

SEQ ID NO: 1063037 - DNA, 15 bp, Homo sapiens
aacaagttcctcgtc

SEQ ID NO: 1063038 - DNA, 15 bp, Homo sapiens
aaacaagttcctcgt

SEQ ID NO: 1063039 - DNA, 15 bp, Homo sapiens
gaaacaagttcctcg

SEQ ID NO: 1063040 - DNA, 15 bp, Homo sapiens
ggaaacaagttcctc

SEQ ID NO: 1063041 - DNA, 15 bp, Homo sapiens
aggaaacaagttcct

SEQ ID NO: 1063042 - DNA, 15 bp, Homo sapiens
taggaaacaagttcc

SEQ ID NO: 1063043 - DNA, 15 bp, Homo sapiens
ataggaaacaagttc

SEQ ID NO: 1063044 - DNA, 15 bp, Homo sapiens
aataggaaacaagtt

SEQ ID NO: 1063045 - DNA, 15 bp, Homo sapiens
taataggaaacaagt

SEQ ID NO: 1063046 - DNA, 15 bp, Homo sapiens
gtaataggaaacaag

SEQ ID NO: 1063047 - DNA, 15 bp, Homo sapiens
agtaataggaaacaa

SEQ ID NO: 1063048 - DNA, 15 bp, Homo sapiens
aagtaataggaaaca

SEQ ID NO: 1063049 - DNA, 15 bp, Homo sapiens
gaagtaataggaaac

SEQ ID NO: 1063050 - DNA, 15 bp, Homo sapiens
tgaagtaataggaaa

SEQ ID NO: 1063051 - DNA, 15 bp, Homo sapiens
gtgaagtaataggaa

SEQ ID NO: 1063052 - DNA, 15 bp, Homo sapiens
tgtgaagtaatagga

SEQ ID NO: 1063053 - DNA, 15 bp, Homo sapiens
gtgtgaagtaatagg

SEQ ID NO: 1063054 - DNA, 15 bp, Homo sapiens
ggtgtgaagtaatag

SEQ ID NO: 1063055 - DNA, 15 bp, Homo sapiens
gggtgtgaagtaata

SEQ ID NO: 1063056 - DNA, 15 bp, Homo sapiens
tgggtgtgaagtaat

SEQ ID NO: 1063057 - DNA, 15 bp, Homo sapiens
gtgggtgtgaagtaa

SEQ ID NO: 1063058 - DNA, 15 bp, Homo sapiens
agtgggtgtgaagta

SEQ ID NO: 1063059 - DNA, 15 bp, Homo sapiens
gagtgggtgtgaagt

SEQ ID NO: 1063060 - DNA, 15 bp, Homo sapiens
ggagtgggtgtgaag

SEQ ID NO: 1063061 - DNA, 15 bp, Homo sapiens
gggagtgggtgtgaa

SEQ ID NO: 1063062 - DNA, 15 bp, Homo sapiens
agggagtgggtgtga

SEQ ID NO: 1063063 - DNA, 15 bp, Homo sapiens
cagggagtgggtgtg

SEQ ID NO: 1063064 - DNA, 15 bp, Homo sapiens
ccagggagtgggtgt

SEQ ID NO: 1063065 - DNA, 15 bp, Homo sapiens
gccagggagtgggtg

SEQ ID NO: 1063066 - DNA, 15 bp, Homo sapiens
ggccagggagtgggt

SEQ ID NO: 1063067 - DNA, 15 bp, Homo sapiens
tggccagggagtggg

SEQ ID NO: 1063068 - DNA, 15 bp, Homo sapiens
atggccagggagtgg

SEQ ID NO: 1063069 - DNA, 15 bp, Homo sapiens
catggccagggagtg

SEQ ID NO: 1063070 - DNA, 15 bp, Homo sapiens
gcatggccagggagt

SEQ ID NO: 1063071 - DNA, 15 bp, Homo sapiens
tgcatggccagggag

SEQ ID NO: 1063072 - DNA, 15 bp, Homo sapiens
gtgcatggccaggga

SEQ ID NO: 1063073 - DNA, 15 bp, Homo sapiens
tgtgcatggccaggg

SEQ ID NO: 1063074 - DNA, 15 bp, Homo sapiens
gtgtgcatggccagg

SEQ ID NO: 1063075 - DNA, 15 bp, Homo sapiens
tgtgtgcatggccag

SEQ ID NO: 1063076 - DNA, 15 bp, Homo sapiens
ttgtgtgcatggcca

SEQ ID NO: 1063077 - DNA, 15 bp, Homo sapiens
attgtgtgcatggcc

SEQ ID NO: 1063078 - DNA, 15 bp, Homo sapiens
tattgtgtgcatggc

SEQ ID NO: 1063079 - DNA, 15 bp, Homo sapiens
gtattgtgtgcatgg

SEQ ID NO: 1063080 - DNA, 15 bp, Homo sapiens
tgtattgtgtgcatg

SEQ ID NO: 1063081 - DNA, 15 bp, Homo sapiens
ctgtattgtgtgcat

SEQ ID NO: 1063082 - DNA, 15 bp, Homo sapiens
actgtattgtgtgca

SEQ ID NO: 1063083 - DNA, 15 bp, Homo sapiens
cactgtattgtgtgc

SEQ ID NO: 1063084 - DNA, 15 bp, Homo sapiens
gcactgtattgtgtg

SEQ ID NO: 1063085 - DNA, 15 bp, Homo sapiens
tgcactgtattgtgt

SEQ ID NO: 1063086 - DNA, 15 bp, Homo sapiens
ctgcactgtattgtg

SEQ ID NO: 1063087 - DNA, 15 bp, Homo sapiens
tctgcactgtattgt

SEQ ID NO: 1063088 - DNA, 15 bp, Homo sapiens
ttctgcactgtattg

SEQ ID NO: 1063089 - DNA, 15 bp, Homo sapiens
cttctgcactgtatt

SEQ ID NO: 1063090 - DNA, 15 bp, Homo sapiens
acttctgcactgtat

SEQ ID NO: 1063091 - DNA, 15 bp, Homo sapiens
aacttctgcactgta

SEQ ID NO: 1063092 - DNA, 15 bp, Homo sapiens
caacttctgcactgt

SEQ ID NO: 1063093 - DNA, 15 bp, Homo sapiens
ccaacttctgcactg

SEQ ID NO: 1063094 - DNA, 15 bp, Homo sapiens
accaacttctgcact

SEQ ID NO: 1063095 - DNA, 15 bp, Homo sapiens
gaccaacttctgcac

SEQ ID NO: 1063096 - DNA, 15 bp, Homo sapiens
ggaccaacttctgca

SEQ ID NO: 1063097 - DNA, 15 bp, Homo sapiens
gggaccaacttctgc

SEQ ID NO: 1063098 - DNA, 15 bp, Homo sapiens
tgggaccaacttctg

SEQ ID NO: 1063099 - DNA, 15 bp, Homo sapiens
ttgggaccaacttct

SEQ ID NO: 1063100 - DNA, 15 bp, Homo sapiens
tttgggaccaacttc

SEQ ID NO: 1063101 - DNA, 15 bp, Homo sapiens
atttgggaccaactt

SEQ ID NO: 1063102 - DNA, 15 bp, Homo sapiens
gatttgggaccaact

SEQ ID NO: 1063103 - DNA, 15 bp, Homo sapiens
agatttgggaccaac

SEQ ID NO: 1063104 - DNA, 15 bp, Homo sapiens
tagatttgggaccaa

SEQ ID NO: 1063105 - DNA, 15 bp, Homo sapiens
atagatttgggacca

SEQ ID NO: 1063106 - DNA, 15 bp, Homo sapiens
aatagatttgggacc

SEQ ID NO: 1063107 - DNA, 15 bp, Homo sapiens
taatagatttgggac

SEQ ID NO: 1063108 - DNA, 15 bp, Homo sapiens
gtaatagatttggga

SEQ ID NO: 1063109 - DNA, 15 bp, Homo sapiens
ggtaatagatttggg

SEQ ID NO: 1063110 - DNA, 15 bp, Homo sapiens
tggtaatagatttgg

SEQ ID NO: 1063111 - DNA, 15 bp, Homo sapiens
ctggtaatagatttg

SEQ ID NO: 1063112 - DNA, 15 bp, Homo sapiens
tctggtaatagattt

SEQ ID NO: 1063113 - DNA, 15 bp, Homo sapiens
ctctggtaatagatt

SEQ ID NO: 1063114 - DNA, 15 bp, Homo sapiens
cctctggtaatagat

SEQ ID NO: 1063115 - DNA, 15 bp, Homo sapiens
gcctctggtaataga

SEQ ID NO: 1063116 - DNA, 15 bp, Homo sapiens
ggcctctggtaatag

SEQ ID NO: 1063117 - DNA, 15 bp, Homo sapiens
aggcctctggtaata

SEQ ID NO: 1063118 - DNA, 15 bp, Homo sapiens
taggcctctggtaat

SEQ ID NO: 1063119 - DNA, 15 bp, Homo sapiens
ttaggcctctggtaa

SEQ ID NO: 1063120 - DNA, 15 bp, Homo sapiens
cttaggcctctggta

SEQ ID NO: 1063121 - DNA, 15 bp, Homo sapiens
gcttaggcctctggt

SEQ ID NO: 1063122 - DNA, 15 bp, Homo sapiens
tgcttaggcctctgg

SEQ ID NO: 1063123 - DNA, 15 bp, Homo sapiens
ctgcttaggcctctg

SEQ ID NO: 1063124 - DNA, 15 bp, Homo sapiens
gctgcttaggcctct

SEQ ID NO: 1063125 - DNA, 15 bp, Homo sapiens
tgctgcttaggcctc

SEQ ID NO: 1063126 - DNA, 15 bp, Homo sapiens
ctgctgcttaggcct

SEQ ID NO: 1063127 - DNA, 15 bp, Homo sapiens
gctgctgcttaggcc

SEQ ID NO: 1063128 - DNA, 15 bp, Homo sapiens
ggctgctgcttaggc

SEQ ID NO: 1063129 - DNA, 15 bp, Homo sapiens
aggctgctgcttagg

SEQ ID NO: 1063130 - DNA, 15 bp, Homo sapiens
gaggctgctgcttag

SEQ ID NO: 1063131 - DNA, 15 bp, Homo sapiens
ggaggctgctgctta

SEQ ID NO: 1063132 - DNA, 15 bp, Homo sapiens
aggaggctgctgctt

SEQ ID NO: 1063133 - DNA, 15 bp, Homo sapiens
gaggaggctgctgct

SEQ ID NO: 1063134 - DNA, 15 bp, Homo sapiens
ggaggaggctgctgc

SEQ ID NO: 1063135 - DNA, 15 bp, Homo sapiens
aggaggaggctgctg

SEQ ID NO: 1063136 - DNA, 15 bp, Homo sapiens
caggaggaggctgct

SEQ ID NO: 1063137 - DNA, 15 bp, Homo sapiens
gcaggaggaggctgc

SEQ ID NO: 1063138 - DNA, 15 bp, Homo sapiens
agcaggaggaggctg

SEQ ID NO: 1063139 - DNA, 15 bp, Homo sapiens
gagcaggaggaggct

SEQ ID NO: 1063140 - DNA, 15 bp, Homo sapiens
tgagcaggaggaggc

SEQ ID NO: 1063141 - DNA, 15 bp, Homo sapiens
ttgagcaggaggagg

SEQ ID NO: 1063142 - DNA, 15 bp, Homo sapiens
tttgagcaggaggag

SEQ ID NO: 1063143 - DNA, 15 bp, Homo sapiens
ctttgagcaggagga

SEQ ID NO: 1063144 - DNA, 15 bp, Homo sapiens
tctttgagcaggagg

SEQ ID NO: 1063145 - DNA, 15 bp, Homo sapiens
ttctttgagcaggag

SEQ ID NO: 1063146 - DNA, 15 bp, Homo sapiens
tttctttgagcagga

SEQ ID NO: 1063147 - DNA, 15 bp, Homo sapiens
ttttctttgagcagg

SEQ ID NO: 1063148 - DNA, 15 bp, Homo sapiens
tttttctttgagcag

SEQ ID NO: 1063149 - DNA, 15 bp, Homo sapiens
atttttctttgagca

SEQ ID NO: 1063150 - DNA, 15 bp, Homo sapiens
catttttctttgagc

SEQ ID NO: 1063151 - DNA, 15 bp, Homo sapiens
acatttttctttgag

SEQ ID NO: 1063152 - DNA, 15 bp, Homo sapiens
aacatttttctttga

SEQ ID NO: 1063153 - DNA, 15 bp, Homo sapiens
gaacatttttctttg

SEQ ID NO: 1063154 - DNA, 15 bp, Homo sapiens
agaacatttttcttt

SEQ ID NO: 1063155 - DNA, 15 bp, Homo sapiens
cagaacatttttctt

SEQ ID NO: 1063156 - DNA, 15 bp, Homo sapiens
gcagaacatttttct

SEQ ID NO: 1063157 - DNA, 15 bp, Homo sapiens
ggcagaacatttttc

SEQ ID NO: 1063158 - DNA, 15 bp, Homo sapiens
cggcagaacattttt

SEQ ID NO: 1063159 - DNA, 15 bp, Homo sapiens
gcggcagaacatttt

SEQ ID NO: 1063160 - DNA, 15 bp, Homo sapiens
agcggcagaacattt

SEQ ID NO: 1063161 - DNA, 15 bp, Homo sapiens
cagcggcagaacatt

SEQ ID NO: 1063162 - DNA, 15 bp, Homo sapiens
gcagcggcagaacat

SEQ ID NO: 1063163 - DNA, 15 bp, Homo sapiens
ggcagcggcagaaca

SEQ ID NO: 1063164 - DNA, 15 bp, Homo sapiens
tggcagcggcagaac

SEQ ID NO: 1063165 - DNA, 15 bp, Homo sapiens
ttggcagcggcagaa

SEQ ID NO: 1063166 - DNA, 15 bp, Homo sapiens
gttggcagcggcaga

SEQ ID NO: 1063167 - DNA, 15 bp, Homo sapiens
tgttggcagcggcag

SEQ ID NO: 1063168 - DNA, 15 bp, Homo sapiens
atgttggcagcggca

SEQ ID NO: 1063169 - DNA, 15 bp, Homo sapiens
aatgttggcagcggc

SEQ ID NO: 1063170 - DNA, 15 bp, Homo sapiens
caatgttggcagcgg

SEQ ID NO: 1063171 - DNA, 15 bp, Homo sapiens
gcaatgttggcagcg

SEQ ID NO: 1063172 - DNA, 15 bp, Homo sapiens
tgcaatgttggcagc

SEQ ID NO: 1063173 - DNA, 15 bp, Homo sapiens
gtgcaatgttggcag

SEQ ID NO: 1063174 - DNA, 15 bp, Homo sapiens
agtgcaatgttggca

SEQ ID NO: 1063175 - DNA, 15 bp, Homo sapiens
aagtgcaatgttggc

SEQ ID NO: 1063176 - DNA, 15 bp, Homo sapiens
gaagtgcaatgttgg

SEQ ID NO: 1063177 - DNA, 15 bp, Homo sapiens
ggaagtgcaatgttg

SEQ ID NO: 1063178 - DNA, 15 bp, Homo sapiens
aggaagtgcaatgtt

SEQ ID NO: 1063179 - DNA, 15 bp, Homo sapiens
gaggaagtgcaatgt

SEQ ID NO: 1063180 - DNA, 15 bp, Homo sapiens
agaggaagtgcaatg

SEQ ID NO: 1063181 - DNA, 15 bp, Homo sapiens
cagaggaagtgcaat

SEQ ID NO: 1063182 - DNA, 15 bp, Homo sapiens
gcagaggaagtgcaa

SEQ ID NO: 1063183 - DNA, 15 bp, Homo sapiens
tgcagaggaagtgca

SEQ ID NO: 1063184 - DNA, 15 bp, Homo sapiens
ttgcagaggaagtgc

SEQ ID NO: 1063185 - DNA, 15 bp, Homo sapiens
cttgcagaggaagtg

SEQ ID NO: 1063186 - DNA, 15 bp, Homo sapiens
tcttgcagaggaagt

SEQ ID NO: 1063187 - DNA, 15 bp, Homo sapiens
gtcttgcagaggaag

SEQ ID NO: 1063188 - DNA, 15 bp, Homo sapiens
tgtcttgcagaggaa

SEQ ID NO: 1063189 - DNA, 15 bp, Homo sapiens
atgtcttgcagagga

SEQ ID NO: 1063190 - DNA, 15 bp, Homo sapiens
gatgtcttgcagagg

SEQ ID NO: 1063191 - DNA, 15 bp, Homo sapiens
agatgtcttgcagag

SEQ ID NO: 1063192 - DNA, 15 bp, Homo sapiens
gagatgtcttgcaga

SEQ ID NO: 1063193 - DNA, 15 bp, Homo sapiens
tgagatgtcttgcag

SEQ ID NO: 1063194 - DNA, 15 bp, Homo sapiens
ctgagatgtcttgca

SEQ ID NO: 1063195 - DNA, 15 bp, Homo sapiens
tctgagatgtcttgc

SEQ ID NO: 1063196 - DNA, 15 bp, Homo sapiens
ttctgagatgtcttg

SEQ ID NO: 1063197 - DNA, 15 bp, Homo sapiens
tttctgagatgtctt

SEQ ID NO: 1063198 - DNA, 15 bp, Homo sapiens
ttttctgagatgtct

SEQ ID NO: 1063199 - DNA, 15 bp, Homo sapiens
attttctgagatgtc

SEQ ID NO: 1063200 - DNA, 15 bp, Homo sapiens
cattttctgagatgt

SEQ ID NO: 1063201 - DNA, 15 bp, Homo sapiens
gcattttctgagatg

SEQ ID NO: 1063202 - DNA, 15 bp, Homo sapiens
ggcattttctgagat

SEQ ID NO: 1063203 - DNA, 15 bp, Homo sapiens
gggcattttctgaga

SEQ ID NO: 1063204 - DNA, 15 bp, Homo sapiens
atgggcattttctga

SEQ ID NO: 1063205 - DNA, 15 bp, Homo sapiens
gatgggcattttctg

SEQ ID NO: 1063206 - DNA, 15 bp, Homo sapiens
tgatgggcattttct

SEQ ID NO: 1063207 - DNA, 15 bp, Homo sapiens
ctgatgggcattttc

SEQ ID NO: 1063208 - DNA, 15 bp, Homo sapiens
tctgatgggcatttt

SEQ ID NO: 1063209 - DNA, 15 bp, Homo sapiens
ctctgatgggcattt

SEQ ID NO: 1063210 - DNA, 15 bp, Homo sapiens
gctctgatgggcatt

SEQ ID NO: 1063211 - DNA, 15 bp, Homo sapiens
ggctctgatgggcat

SEQ ID NO: 1063212 - DNA, 15 bp, Homo sapiens
aggctctgatgggca

SEQ ID NO: 1063213 - DNA, 15 bp, Homo sapiens
aaggctctgatgggc

SEQ ID NO: 1063214 - DNA, 15 bp, Homo sapiens
gaaggctctgatggg

SEQ ID NO: 1063215 - DNA, 15 bp, Homo sapiens
ggaaggctctgatgg

SEQ ID NO: 1063216 - DNA, 15 bp, Homo sapiens
tggaaggctctgatg

SEQ ID NO: 1063217 - DNA, 15 bp, Homo sapiens
gtggaaggctctgat

SEQ ID NO: 1063218 - DNA, 15 bp, Homo sapiens
ggtggaaggctctga

SEQ ID NO: 1063219 - DNA, 15 bp, Homo sapiens
aggtggaaggctctg

SEQ ID NO: 1063220 - DNA, 15 bp, Homo sapiens
gaggtggaaggctct

SEQ ID NO: 1063221 - DNA, 15 bp, Homo sapiens
tgaggtggaaggctc

SEQ ID NO: 1063222 - DNA, 15 bp, Homo sapiens
atgaggtggaaggct

SEQ ID NO: 1063223 - DNA, 15 bp, Homo sapiens
aatgaggtggaaggc

SEQ ID NO: 1063224 - DNA, 15 bp, Homo sapiens
gaatgaggtggaagg

SEQ ID NO: 1063225 - DNA, 15 bp, Homo sapiens
ggaatgaggtggaag

SEQ ID NO: 1063226 - DNA, 15 bp, Homo sapiens
tggaatgaggtggaa

SEQ ID NO: 1063227 - DNA, 15 bp, Homo sapiens
ttggaatgaggtgga

SEQ ID NO: 1063228 - DNA, 15 bp, Homo sapiens
cttggaatgaggtgg

SEQ ID NO: 1063229 - DNA, 15 bp, Homo sapiens
gcttggaatgaggtg

SEQ ID NO: 1063230 - DNA, 15 bp, Homo sapiens
agcttggaatgaggt

SEQ ID NO: 1063231 - DNA, 15 bp, Homo sapiens
aagcttggaatgagg

SEQ ID NO: 1063232 - DNA, 15 bp, Homo sapiens
caagcttggaatgag

SEQ ID NO: 1063233 - DNA, 15 bp, Homo sapiens
gcaagcttggaatga

SEQ ID NO: 1063234 - DNA, 15 bp, Homo sapiens
tgcaagcttggaatg

SEQ ID NO: 1063235 - DNA, 15 bp, Homo sapiens
ttgcaagcttggaat

SEQ ID NO: 1063236 - DNA, 15 bp, Homo sapiens
cttgcaagcttggaa

SEQ ID NO: 1063237 - DNA, 15 bp, Homo sapiens
gcttgcaagcttgga

SEQ ID NO: 1063238 - DNA, 15 bp, Homo sapiens
tgcttgcaagcttgg

SEQ ID NO: 1063239 - DNA, 15 bp, Homo sapiens
ttgcttgcaagcttg

SEQ ID NO: 1063240 - DNA, 15 bp, Homo sapiens
cttgcttgcaagctt

SEQ ID NO: 1063241 - DNA, 15 bp, Homo sapiens
gcttgcttgcaagct

SEQ ID NO: 1063242 - DNA, 15 bp, Homo sapiens
agcttgcttgcaagc

SEQ ID NO: 1063243 - DNA, 15 bp, Homo sapiens
cagcttgcttgcaag

SEQ ID NO: 1063244 - DNA, 15 bp, Homo sapiens
ccagcttgcttgcaa

SEQ ID NO: 1063245 - DNA, 15 bp, Homo sapiens
accagcttgcttgca

SEQ ID NO: 1063246 - DNA, 15 bp, Homo sapiens
gaccagcttgcttgc

SEQ ID NO: 1063247 - DNA, 15 bp, Homo sapiens
agaccagcttgcttg

SEQ ID NO: 1063248 - DNA, 15 bp, Homo sapiens
aagaccagcttgctt

SEQ ID NO: 1063249 - DNA, 15 bp, Homo sapiens
aaagaccagcttgct

SEQ ID NO: 1063250 - DNA, 15 bp, Homo sapiens
gaaagaccagcttgc

SEQ ID NO: 1063251 - DNA, 15 bp, Homo sapiens
tgaaagaccagcttg

SEQ ID NO: 1063252 - DNA, 15 bp, Homo sapiens
atgaaagaccagctt

SEQ ID NO: 1063253 - DNA, 15 bp, Homo sapiens
aatgaaagaccagct

SEQ ID NO: 1063254 - DNA, 15 bp, Homo sapiens
aaatgaaagaccagc

SEQ ID NO: 1063255 - DNA, 15 bp, Homo sapiens
caaatgaaagaccag

SEQ ID NO: 1063256 - DNA, 15 bp, Homo sapiens
acaaatgaaagacca

SEQ ID NO: 1063257 - DNA, 15 bp, Homo sapiens
gacaaatgaaagacc

SEQ ID NO: 1063258 - DNA, 15 bp, Homo sapiens
agacaaatgaaagac

SEQ ID NO: 1063259 - DNA, 15 bp, Homo sapiens
aagacaaatgaaaga

SEQ ID NO: 1063260 - DNA, 15 bp, Homo sapiens
caagacaaatgaaag

SEQ ID NO: 1063261 - DNA, 15 bp, Homo sapiens
acaagacaaatgaaa

SEQ ID NO: 1063262 - DNA, 15 bp, Homo sapiens
aacaagacaaatgaa

SEQ ID NO: 1063263 - DNA, 15 bp, Homo sapiens
aaacaagacaaatga

SEQ ID NO: 1063264 - DNA, 15 bp, Homo sapiens
caaacaagacaaatg

SEQ ID NO: 1063265 - DNA, 15 bp, Homo sapiens
acaaacaagacaaat

SEQ ID NO: 1063266 - DNA, 15 bp, Homo sapiens
aacaaacaagacaaa

SEQ ID NO: 1063267 - DNA, 15 bp, Homo sapiens
aaacaaacaagacaa

SEQ ID NO: 1063268 - DNA, 15 bp, Homo sapiens
aaaacaaacaagaca

SEQ ID NO: 1063269 - DNA, 15 bp, Homo sapiens
aaaaacaaacaagac

SEQ ID NO: 1063270 - DNA, 15 bp, Homo sapiens
taaaaacaaacaaga

SEQ ID NO: 1063271 - DNA, 15 bp, Homo sapiens
ttaaaaacaaacaag

SEQ ID NO: 1063272 - DNA, 15 bp, Homo sapiens
cttaaaaacaaacaa

SEQ ID NO: 1063273 - DNA, 15 bp, Homo sapiens
gcttaaaaacaaaca

SEQ ID NO: 1063274 - DNA, 15 bp, Homo sapiens
tgcttaaaaacaaac

SEQ ID NO: 1063275 - DNA, 15 bp, Homo sapiens
ttgcttaaaaacaaa

SEQ ID NO: 1063276 - DNA, 15 bp, Homo sapiens
cttgcttaaaaacaa

SEQ ID NO: 1063277 - DNA, 15 bp, Homo sapiens
tcttgcttaaaaaca

SEQ ID NO: 1063278 - DNA, 15 bp, Homo sapiens
ttcttgcttaaaaac

SEQ ID NO: 1063279 - DNA, 15 bp, Homo sapiens
cttcttgcttaaaaa

SEQ ID NO: 1063280 - DNA, 15 bp, Homo sapiens
tcttcttgcttaaaa

SEQ ID NO: 1063281 - DNA, 15 bp, Homo sapiens
ttcttcttgcttaaa

SEQ ID NO: 1063282 - DNA, 15 bp, Homo sapiens
attcttcttgcttaa

SEQ ID NO: 1063283 - DNA, 15 bp, Homo sapiens
gattcttcttgctta

SEQ ID NO: 1063284 - DNA, 15 bp, Homo sapiens
ggattcttcttgctt

SEQ ID NO: 1063285 - DNA, 15 bp, Homo sapiens
gggattcttcttgct

SEQ ID NO: 1063286 - DNA, 15 bp, Homo sapiens
agggattcttcttgc

SEQ ID NO: 1063287 - DNA, 15 bp, Homo sapiens
aagggattcttcttg

SEQ ID NO: 1063288 - DNA, 15 bp, Homo sapiens
aaagggattcttctt

SEQ ID NO: 1063289 - DNA, 15 bp, Homo sapiens
taaagggattcttct

SEQ ID NO: 1063290 - DNA, 15 bp, Homo sapiens
ctaaagggattcttc

SEQ ID NO: 1063291 - DNA, 15 bp, Homo sapiens
tctaaagggattctt

SEQ ID NO: 1063292 - DNA, 15 bp, Homo sapiens
ctctaaagggattct

SEQ ID NO: 1063293 - DNA, 15 bp, Homo sapiens
cctctaaagggattc

SEQ ID NO: 1063294 - DNA, 15 bp, Homo sapiens
tcctctaaagggatt

SEQ ID NO: 1063295 - DNA, 15 bp, Homo sapiens
ctcctctaaagggat

SEQ ID NO: 1063296 - DNA, 15 bp, Homo sapiens
cctcctctaaaggga

SEQ ID NO: 1063297 - DNA, 15 bp, Homo sapiens
tcctcctctaaaggg

SEQ ID NO: 1063298 - DNA, 15 bp, Homo sapiens
ttcctcctctaaagg

SEQ ID NO: 1063299 - DNA, 15 bp, Homo sapiens
attcctcctctaaag

SEQ ID NO: 1063300 - DNA, 15 bp, Homo sapiens
aattcctcctctaaa

SEQ ID NO: 1063301 - DNA, 15 bp, Homo sapiens
taattcctcctctaa

SEQ ID NO: 1063302 - DNA, 15 bp, Homo sapiens
ctaattcctcctcta

SEQ ID NO: 1063303 - DNA, 15 bp, Homo sapiens
cctaattcctcctct

SEQ ID NO: 1063304 - DNA, 15 bp, Homo sapiens
tcctaattcctcctc

SEQ ID NO: 1063305 - DNA, 15 bp, Homo sapiens
ttcctaattcctcct

SEQ ID NO: 1063306 - DNA, 15 bp, Homo sapiens
tttcctaattcctcc

SEQ ID NO: 1063307 - DNA, 15 bp, Homo sapiens
ctttcctaattcctc

SEQ ID NO: 1063308 - DNA, 15 bp, Homo sapiens
tctttcctaattcct

SEQ ID NO: 1063309 - DNA, 15 bp, Homo sapiens
ttctttcctaattcc

SEQ ID NO: 1063310 - DNA, 15 bp, Homo sapiens
tttctttcctaattc

SEQ ID NO: 1063311 - DNA, 15 bp, Homo sapiens
ttttctttcctaatt

SEQ ID NO: 1063312 - DNA, 15 bp, Homo sapiens
tttttctttcctaat

SEQ ID NO: 1063313 - DNA, 15 bp, Homo sapiens
ttttttctttcctaa

SEQ ID NO: 1063314 - DNA, 15 bp, Homo sapiens
tttttttctttccta

SEQ ID NO: 1063315 - DNA, 15 bp, Homo sapiens
ttttttttctttcct

SEQ ID NO: 1063316 - DNA, 15 bp, Homo sapiens
cttttttttctttcc

SEQ ID NO: 1063317 - DNA, 15 bp, Homo sapiens
acttttttttctttc

SEQ ID NO: 1063318 - DNA, 15 bp, Homo sapiens
gacttttttttcttt

SEQ ID NO: 1063319 - DNA, 15 bp, Homo sapiens
tgacttttttttctt

SEQ ID NO: 1063320 - DNA, 15 bp, Homo sapiens
ttgacttttttttct

SEQ ID NO: 1063321 - DNA, 15 bp, Homo sapiens
tttgacttttttttc

SEQ ID NO: 1063322 - DNA, 15 bp, Homo sapiens
gtttgactttttttt

SEQ ID NO: 1063323 - DNA, 15 bp, Homo sapiens
tgtttgacttttttt

SEQ ID NO: 1063324 - DNA, 15 bp, Homo sapiens
ctgtttgactttttt

SEQ ID NO: 1063325 - DNA, 15 bp, Homo sapiens
tctgtttgacttttt

SEQ ID NO: 1063326 - DNA, 15 bp, Homo sapiens
ttctgtttgactttt

SEQ ID NO: 1063327 - DNA, 15 bp, Homo sapiens
tttctgtttgacttt

SEQ ID NO: 1063328 - DNA, 15 bp, Homo sapiens
gtttctgtttgactt

SEQ ID NO: 1063329 - DNA, 15 bp, Homo sapiens
tgtttctgtttgact

SEQ ID NO: 1063330 - DNA, 15 bp, Homo sapiens
ctgtttctgtttgac

SEQ ID NO: 1063331 - DNA, 15 bp, Homo sapiens
tctgtttctgtttga

SEQ ID NO: 1063332 - DNA, 15 bp, Homo sapiens
ttctgtttctgtttg

SEQ ID NO: 1063333 - DNA, 15 bp, Homo sapiens
ccttctgtttctgtt

SEQ ID NO: 1063334 - DNA, 15 bp, Homo sapiens
tccttctgtttctgt

SEQ ID NO: 1063335 - DNA, 15 bp, Homo sapiens
ctccttctgtttctg

SEQ ID NO: 1063336 - DNA, 15 bp, Homo sapiens
actccttctgtttct

SEQ ID NO: 1063337 - DNA, 15 bp, Homo sapiens
cactccttctgtttc

SEQ ID NO: 1063338 - DNA, 15 bp, Homo sapiens
ccactccttctgttt

SEQ ID NO: 1063339 - DNA, 15 bp, Homo sapiens
tccactccttctgtt

SEQ ID NO: 1063340 - DNA, 15 bp, Homo sapiens
ctccactccttctgt

SEQ ID NO: 1063341 - DNA, 15 bp, Homo sapiens
cctccactccttctg

SEQ ID NO: 1063342 - DNA, 15 bp, Homo sapiens
acctccactccttct

SEQ ID NO: 1063343 - DNA, 15 bp, Homo sapiens
aacctccactccttc

SEQ ID NO: 1063344 - DNA, 15 bp, Homo sapiens
aaacctccactcctt

SEQ ID NO: 1063345 - DNA, 15 bp, Homo sapiens
caaacctccactcct

SEQ ID NO: 1063346 - DNA, 15 bp, Homo sapiens
acaaacctccactcc

SEQ ID NO: 1063347 - DNA, 15 bp, Homo sapiens
gacaaacctccactc

SEQ ID NO: 1063348 - DNA, 15 bp, Homo sapiens
agacaaacctccact

SEQ ID NO: 1063349 - DNA, 15 bp, Homo sapiens
gagacaaacctccac

SEQ ID NO: 1063350 - DNA, 15 bp, Homo sapiens
agagacaaacctcca

SEQ ID NO: 1063351 - DNA, 15 bp, Homo sapiens
gagagacaaacctcc

SEQ ID NO: 1063352 - DNA, 15 bp, Homo sapiens
agagagacaaacctc

SEQ ID NO: 1063353 - DNA, 15 bp, Homo sapiens
gagagagacaaacct

SEQ ID NO: 1063354 - DNA, 15 bp, Homo sapiens
agagagagacaaacc

SEQ ID NO: 1063355 - DNA, 15 bp, Homo sapiens
aagagagagacaaac

SEQ ID NO: 1063356 - DNA, 15 bp, Homo sapiens
aaagagagagacaaa

SEQ ID NO: 1063357 - DNA, 15 bp, Homo sapiens
aaaagagagagacaa

SEQ ID NO: 1063358 - DNA, 15 bp, Homo sapiens
caaaagagagagaca

SEQ ID NO: 1063359 - DNA, 15 bp, Homo sapiens
acaaaagagagagac

SEQ ID NO: 1063360 - DNA, 15 bp, Homo sapiens
gacaaaagagagaga

SEQ ID NO: 1063361 - DNA, 15 bp, Homo sapiens
ggacaaaagagagag

SEQ ID NO: 1063362 - DNA, 15 bp, Homo sapiens
gggacaaaagagaga

SEQ ID NO: 1063363 - DNA, 15 bp, Homo sapiens
ggggacaaaagagag

SEQ ID NO: 1063364 - DNA, 15 bp, Homo sapiens
aggggacaaaagaga

SEQ ID NO: 1063365 - DNA, 15 bp, Homo sapiens
caggggacaaaagag

SEQ ID NO: 1063366 - DNA, 15 bp, Homo sapiens
gcaggggacaaaaga

SEQ ID NO: 1063367 - DNA, 15 bp, Homo sapiens
ggcaggggacaaaag

SEQ ID NO: 1063368 - DNA, 15 bp, Homo sapiens
aggcaggggacaaaa

SEQ ID NO: 1063369 - DNA, 15 bp, Homo sapiens
aaggcaggggacaaa

SEQ ID NO: 1063370 - DNA, 15 bp, Homo sapiens
caaggcaggggacaa

SEQ ID NO: 1063371 - DNA, 15 bp, Homo sapiens
gcaaggcaggggaca

SEQ ID NO: 1063372 - DNA, 15 bp, Homo sapiens
ggcaaggcaggggac

SEQ ID NO: 1063373 - DNA, 15 bp, Homo sapiens
gggcaaggcagggga

SEQ ID NO: 1063374 - DNA, 15 bp, Homo sapiens
agggcaaggcagggg

SEQ ID NO: 1063375 - DNA, 15 bp, Homo sapiens
aagggcaaggcaggg

SEQ ID NO: 1063376 - DNA, 15 bp, Homo sapiens
gaagggcaaggcagg

SEQ ID NO: 1063377 - DNA, 15 bp, Homo sapiens
ggaagggcaaggcag

SEQ ID NO: 1063378 - DNA, 15 bp, Homo sapiens
aggaagggcaaggca

SEQ ID NO: 1063379 - DNA, 15 bp, Homo sapiens
gaggaagggcaaggc

SEQ ID NO: 1063380 - DNA, 15 bp, Homo sapiens
ggaggaagggcaagg

SEQ ID NO: 1063381 - DNA, 15 bp, Homo sapiens
gggaggaagggcaag

SEQ ID NO: 1063382 - DNA, 15 bp, Homo sapiens
agggaggaagggcaa

SEQ ID NO: 1063383 - DNA, 15 bp, Homo sapiens
tagggaggaagggca

SEQ ID NO: 1063384 - DNA, 15 bp, Homo sapiens
atagggaggaagggc

SEQ ID NO: 1063385 - DNA, 15 bp, Homo sapiens
gatagggaggaaggg

SEQ ID NO: 1063386 - DNA, 15 bp, Homo sapiens
ggatagggaggaagg

SEQ ID NO: 1063387 - DNA, 15 bp, Homo sapiens
gggatagggaggaag

SEQ ID NO: 1063388 - DNA, 15 bp, Homo sapiens
tgggatagggaggaa

SEQ ID NO: 1063389 - DNA, 15 bp, Homo sapiens
atgggatagggagga

SEQ ID NO: 1063390 - DNA, 15 bp, Homo sapiens
gatgggatagggagg

SEQ ID NO: 1063391 - DNA, 15 bp, Homo sapiens
ggatgggatagggag

SEQ ID NO: 1063392 - DNA, 15 bp, Homo sapiens
gggatgggataggga

SEQ ID NO: 1063393 - DNA, 15 bp, Homo sapiens
ggggatgggataggg

SEQ ID NO: 1063394 - DNA, 15 bp, Homo sapiens
gggggatgggatagg

SEQ ID NO: 1063395 - DNA, 15 bp, Homo sapiens
agggggatgggatag

SEQ ID NO: 1063396 - DNA, 15 bp, Homo sapiens
gagggggatgggata

SEQ ID NO: 1063397 - DNA, 15 bp, Homo sapiens
tgagggggatgggat

SEQ ID NO: 1063398 - DNA, 15 bp, Homo sapiens
gtgagggggatggga

SEQ ID NO: 1063399 - DNA, 15 bp, Homo sapiens
agtgagggggatggg

SEQ ID NO: 1063400 - DNA, 15 bp, Homo sapiens
aagtgagggggatgg

SEQ ID NO: 1063401 - DNA, 15 bp, Homo sapiens
aaagtgagggggatg

SEQ ID NO: 1063402 - DNA, 15 bp, Homo sapiens
gaaagtgagggggat

SEQ ID NO: 1063403 - DNA, 15 bp, Homo sapiens
agaaagtgaggggga

SEQ ID NO: 1063404 - DNA, 15 bp, Homo sapiens
acagaaagtgagggg

SEQ ID NO: 1063405 - DNA, 15 bp, Homo sapiens
cacagaaagtgaggg

SEQ ID NO: 1063406 - DNA, 15 bp, Homo sapiens
acacagaaagtgagg

SEQ ID NO: 1063407 - DNA, 15 bp, Homo sapiens
aacacagaaagtgag

SEQ ID NO: 1063408 - DNA, 15 bp, Homo sapiens
caacacagaaagtga

SEQ ID NO: 1063409 - DNA, 15 bp, Homo sapiens
gcaacacagaaagtg

SEQ ID NO: 1063410 - DNA, 15 bp, Homo sapiens
agcaacacagaaagt

SEQ ID NO: 1063411 - DNA, 15 bp, Homo sapiens
aagcaacacagaaag

SEQ ID NO: 1063412 - DNA, 15 bp, Homo sapiens
aaagcaacacagaaa

SEQ ID NO: 1063413 - DNA, 15 bp, Homo sapiens
aaaagcaacacagaa

SEQ ID NO: 1063414 - DNA, 15 bp, Homo sapiens
gaaaagcaacacaga

SEQ ID NO: 1063415 - DNA, 15 bp, Homo sapiens
tgaaaagcaacacag

SEQ ID NO: 1063416 - DNA, 15 bp, Homo sapiens
atgaaaagcaacaca

SEQ ID NO: 1063417 - DNA, 15 bp, Homo sapiens
catgaaaagcaacac

SEQ ID NO: 1063418 - DNA, 15 bp, Homo sapiens
gcatgaaaagcaaca

SEQ ID NO: 1063419 - DNA, 15 bp, Homo sapiens
ggcatgaaaagcaac

SEQ ID NO: 1063420 - DNA, 15 bp, Homo sapiens
tggcatgaaaagcaa

SEQ ID NO: 1063421 - DNA, 15 bp, Homo sapiens
ctggcatgaaaagca

SEQ ID NO: 1063422 - DNA, 15 bp, Homo sapiens
actggcatgaaaagc

SEQ ID NO: 1063423 - DNA, 15 bp, Homo sapiens
aactggcatgaaaag

SEQ ID NO: 1063424 - DNA, 15 bp, Homo sapiens
caactggcatgaaaa

SEQ ID NO: 1063425 - DNA, 15 bp, Homo sapiens
gcaactggcatgaaa

SEQ ID NO: 1063426 - DNA, 15 bp, Homo sapiens
agcaactggcatgaa

SEQ ID NO: 1063427 - DNA, 15 bp, Homo sapiens
tagcaactggcatga

SEQ ID NO: 1063428 - DNA, 15 bp, Homo sapiens
ttagcaactggcatg

SEQ ID NO: 1063429 - DNA, 15 bp, Homo sapiens
tttagcaactggcat

SEQ ID NO: 1063430 - DNA, 15 bp, Homo sapiens
ctttagcaactggca

SEQ ID NO: 1063431 - DNA, 15 bp, Homo sapiens
tctttagcaactggc

SEQ ID NO: 1063432 - DNA, 15 bp, Homo sapiens
gtctttagcaactgg

SEQ ID NO: 1063433 - DNA, 15 bp, Homo sapiens
agtctttagcaactg

SEQ ID NO: 1063434 - DNA, 15 bp, Homo sapiens
cagtctttagcaact

SEQ ID NO: 1063435 - DNA, 15 bp, Homo sapiens
acagtctttagcaac

SEQ ID NO: 1063436 - DNA, 15 bp, Homo sapiens
tacagtctttagcaa

SEQ ID NO: 1063437 - DNA, 15 bp, Homo sapiens
ttacagtctttagca

SEQ ID NO: 1063438 - DNA, 15 bp, Homo sapiens
attacagtctttagc

SEQ ID NO: 1063439 - DNA, 15 bp, Homo sapiens
aattacagtctttag

SEQ ID NO: 1063440 - DNA, 15 bp, Homo sapiens
aaattacagtcttta

SEQ ID NO: 1063441 - DNA, 15 bp, Homo sapiens
aaaattacagtcttt

SEQ ID NO: 1063442 - DNA, 15 bp, Homo sapiens
taaaattacagtctt

SEQ ID NO: 1063443 - DNA, 15 bp, Homo sapiens
ttaaaattacagtct

SEQ ID NO: 1063444 - DNA, 15 bp, Homo sapiens
tttaaaattacagtc

SEQ ID NO: 1063445 - DNA, 15 bp, Homo sapiens
ttttaaaattacagt

SEQ ID NO: 1063446 - DNA, 15 bp, Homo sapiens
gttttaaaattacag

SEQ ID NO: 1063447 - DNA, 15 bp, Homo sapiens
agttttaaaattaca

SEQ ID NO: 1063448 - DNA, 15 bp, Homo sapiens
cagttttaaaattac

SEQ ID NO: 1063449 - DNA, 15 bp, Homo sapiens
tcagttttaaaatta

SEQ ID NO: 1063450 - DNA, 15 bp, Homo sapiens
ttcagttttaaaatt

SEQ ID NO: 1063451 - DNA, 15 bp, Homo sapiens
gttcagttttaaaat

SEQ ID NO: 1063452 - DNA, 15 bp, Homo sapiens
cgttcagttttaaaa

SEQ ID NO: 1063453 - DNA, 15 bp, Homo sapiens
ccgttcagttttaaa

SEQ ID NO: 1063454 - DNA, 15 bp, Homo sapiens
cccgttcagttttaa

SEQ ID NO: 1063455 - DNA, 15 bp, Homo sapiens
gcccgttcagtttta

SEQ ID NO: 1063456 - DNA, 15 bp, Homo sapiens
agcccgttcagtttt

SEQ ID NO: 1063457 - DNA, 15 bp, Homo sapiens
aagcccgttcagttt

SEQ ID NO: 1063458 - DNA, 15 bp, Homo sapiens
aaagcccgttcagtt

SEQ ID NO: 1063459 - DNA, 15 bp, Homo sapiens
aaaagcccgttcagt

SEQ ID NO: 1063460 - DNA, 15 bp, Homo sapiens
gaaaagcccgttcag

SEQ ID NO: 1063461 - DNA, 15 bp, Homo sapiens
ggaaaagcccgttca

SEQ ID NO: 1063462 - DNA, 15 bp, Homo sapiens
tggaaaagcccgttc

SEQ ID NO: 1063463 - DNA, 15 bp, Homo sapiens
ctggaaaagcccgtt

SEQ ID NO: 1063464 - DNA, 15 bp, Homo sapiens
tctggaaaagcccgt

SEQ ID NO: 1063465 - DNA, 15 bp, Homo sapiens
ctctggaaaagcccg

SEQ ID NO: 1063466 - DNA, 15 bp, Homo sapiens
gctctggaaaagccc

SEQ ID NO: 1063467 - DNA, 15 bp, Homo sapiens
ggctctggaaaagcc

SEQ ID NO: 1063468 - DNA, 15 bp, Homo sapiens
aggctctggaaaagc

SEQ ID NO: 1063469 - DNA, 15 bp, Homo sapiens
aaggctctggaaaag

SEQ ID NO: 1063470 - DNA, 15 bp, Homo sapiens
caaggctctggaaaa

SEQ ID NO: 1063471 - DNA, 15 bp, Homo sapiens
tcaaggctctggaaa

SEQ ID NO: 1063472 - DNA, 15 bp, Homo sapiens
ctcaaggctctggaa

SEQ ID NO: 1063473 - DNA, 15 bp, Homo sapiens
cctcaaggctctgga

SEQ ID NO: 1063474 - DNA, 15 bp, Homo sapiens
tcctcaaggctctgg

SEQ ID NO: 1063475 - DNA, 15 bp, Homo sapiens
ttcctcaaggctctg

SEQ ID NO: 1063476 - DNA, 15 bp, Homo sapiens
attcctcaaggctct

SEQ ID NO: 1063477 - DNA, 15 bp, Homo sapiens
cattcctcaaggctc

SEQ ID NO: 1063478 - DNA, 15 bp, Homo sapiens
acattcctcaaggct

SEQ ID NO: 1063479 - DNA, 15 bp, Homo sapiens
cacattcctcaaggc

SEQ ID NO: 1063480 - DNA, 15 bp, Homo sapiens
gcacattcctcaagg

SEQ ID NO: 1063481 - DNA, 15 bp, Homo sapiens
tgcacattcctcaag

SEQ ID NO: 1063482 - DNA, 15 bp, Homo sapiens
atgcacattcctcaa

SEQ ID NO: 1063483 - DNA, 15 bp, Homo sapiens
gatgcacattcctca

SEQ ID NO: 1063484 - DNA, 15 bp, Homo sapiens
agatgcacattcctc

SEQ ID NO: 1063485 - DNA, 15 bp, Homo sapiens
cagatgcacattcct

SEQ ID NO: 1063486 - DNA, 15 bp, Homo sapiens
gcagatgcacattcc

SEQ ID NO: 1063487 - DNA, 15 bp, Homo sapiens
tgcagatgcacattc

SEQ ID NO: 1063488 - DNA, 15 bp, Homo sapiens
gtgcagatgcacatt

SEQ ID NO: 1063489 - DNA, 15 bp, Homo sapiens
cgtgcagatgcacat

SEQ ID NO: 1063490 - DNA, 15 bp, Homo sapiens
acgtgcagatgcaca

SEQ ID NO: 1063491 - DNA, 15 bp, Homo sapiens
cacgtgcagatgcac

SEQ ID NO: 1063492 - DNA, 15 bp, Homo sapiens
ccacgtgcagatgca

SEQ ID NO: 1063493 - DNA, 15 bp, Homo sapiens
tccacgtgcagatgc

SEQ ID NO: 1063494 - DNA, 15 bp, Homo sapiens
atccacgtgcagatg

SEQ ID NO: 1063495 - DNA, 15 bp, Homo sapiens
aatccacgtgcagat

SEQ ID NO: 1063496 - DNA, 15 bp, Homo sapiens
aaatccacgtgcaga

SEQ ID NO: 1063497 - DNA, 15 bp, Homo sapiens
aaaatccacgtgcag

SEQ ID NO: 1063498 - DNA, 15 bp, Homo sapiens
aaaaatccacgtgca

SEQ ID NO: 1063499 - DNA, 15 bp, Homo sapiens
gaaaaatccacgtgc

SEQ ID NO: 1063500 - DNA, 15 bp, Homo sapiens
ggaaaaatccacgtg

SEQ ID NO: 1063501 - DNA, 15 bp, Homo sapiens
tggaaaaatccacgt

SEQ ID NO: 1063502 - DNA, 15 bp, Homo sapiens
gtggaaaaatccacg

SEQ ID NO: 1063503 - DNA, 15 bp, Homo sapiens
tgtggaaaaatccac

SEQ ID NO: 1063504 - DNA, 15 bp, Homo sapiens
ttgtggaaaaatcca

SEQ ID NO: 1063505 - DNA, 15 bp, Homo sapiens
tttgtggaaaaatcc

SEQ ID NO: 1063506 - DNA, 15 bp, Homo sapiens
ttttgtggaaaaatc

SEQ ID NO: 1063507 - DNA, 15 bp, Homo sapiens
tttttgtggaaaaat

SEQ ID NO: 1063508 - DNA, 15 bp, Homo sapiens
ttttttgtggaaaaa

SEQ ID NO: 1063509 - DNA, 15 bp, Homo sapiens
tttttttgtggaaaa

SEQ ID NO: 1063510 - DNA, 15 bp, Homo sapiens
ctttttttgtggaaa

SEQ ID NO: 1063511 - DNA, 15 bp, Homo sapiens
actttttttgtggaa

SEQ ID NO: 1063512 - DNA, 15 bp, Homo sapiens
cactttttttgtgga

SEQ ID NO: 1063513 - DNA, 15 bp, Homo sapiens
acactttttttgtgg

SEQ ID NO: 1063514 - DNA, 15 bp, Homo sapiens
gacactttttttgtg

SEQ ID NO: 1063515 - DNA, 15 bp, Homo sapiens
ggacactttttttgt

SEQ ID NO: 1063516 - DNA, 15 bp, Homo sapiens
gggacactttttttg

SEQ ID NO: 1063517 - DNA, 15 bp, Homo sapiens
agggacacttttttt

SEQ ID NO: 1063518 - DNA, 15 bp, Homo sapiens
cagggacactttttt

SEQ ID NO: 1063519 - DNA, 15 bp, Homo sapiens
acagggacacttttt

SEQ ID NO: 1063520 - DNA, 15 bp, Homo sapiens
gacagggacactttt

SEQ ID NO: 1063521 - DNA, 15 bp, Homo sapiens
agacagggacacttt

SEQ ID NO: 1063522 - DNA, 15 bp, Homo sapiens
aagacagggacactt

SEQ ID NO: 1063523 - DNA, 15 bp, Homo sapiens
aaagacagggacact

SEQ ID NO: 1063524 - DNA, 15 bp, Homo sapiens
aaaagacagggacac

SEQ ID NO: 1063525 - DNA, 15 bp, Homo sapiens
caaaagacagggaca

SEQ ID NO: 1063526 - DNA, 15 bp, Homo sapiens
ccaaaagacagggac

SEQ ID NO: 1063527 - DNA, 15 bp, Homo sapiens
tccaaaagacaggga

SEQ ID NO: 1063528 - DNA, 15 bp, Homo sapiens
atccaaaagacaggg

SEQ ID NO: 1063529 - DNA, 15 bp, Homo sapiens
gatccaaaagacagg

SEQ ID NO: 1063530 - DNA, 15 bp, Homo sapiens
agatccaaaagacag

SEQ ID NO: 1063531 - DNA, 15 bp, Homo sapiens
aagatccaaaagaca

SEQ ID NO: 1063532 - DNA, 15 bp, Homo sapiens
gaagatccaaaagac

SEQ ID NO: 1063533 - DNA, 15 bp, Homo sapiens
agaagatccaaaaga

SEQ ID NO: 1063534 - DNA, 15 bp, Homo sapiens
aagaagatccaaaag

SEQ ID NO: 1063535 - DNA, 15 bp, Homo sapiens
taagaagatccaaaa

SEQ ID NO: 1063536 - DNA, 15 bp, Homo sapiens
ctaagaagatccaaa

SEQ ID NO: 1063537 - DNA, 15 bp, Homo sapiens
gctaagaagatccaa

SEQ ID NO: 1063538 - DNA, 15 bp, Homo sapiens
ggctaagaagatcca

SEQ ID NO: 1063539 - DNA, 15 bp, Homo sapiens
tggctaagaagatcc

SEQ ID NO: 1063540 - DNA, 15 bp, Homo sapiens
ctggctaagaagatc

SEQ ID NO: 1063541 - DNA, 15 bp, Homo sapiens
tctggctaagaagat

SEQ ID NO: 1063542 - DNA, 15 bp, Homo sapiens
ttctggctaagaaga

SEQ ID NO: 1063543 - DNA, 15 bp, Homo sapiens
tttctggctaagaag

SEQ ID NO: 1063544 - DNA, 15 bp, Homo sapiens
gtttctggctaagaa

SEQ ID NO: 1063545 - DNA, 15 bp, Homo sapiens
tgtttctggctaaga

SEQ ID NO: 1063546 - DNA, 15 bp, Homo sapiens
ttgtttctggctaag

SEQ ID NO: 1063547 - DNA, 15 bp, Homo sapiens
attgtttctggctaa

SEQ ID NO: 1063548 - DNA, 15 bp, Homo sapiens
cattgtttctggcta

SEQ ID NO: 1063549 - DNA, 15 bp, Homo sapiens
tcattgtttctggct

SEQ ID NO: 1063550 - DNA, 15 bp, Homo sapiens
ctcattgtttctggc

SEQ ID NO: 1063551 - DNA, 15 bp, Homo sapiens
cctcattgtttctgg

SEQ ID NO: 1063552 - DNA, 15 bp, Homo sapiens
gcctcattgtttctg

SEQ ID NO: 1063553 - DNA, 15 bp, Homo sapiens
ggcctcattgtttct

SEQ ID NO: 1063554 - DNA, 15 bp, Homo sapiens
tggcctcattgtttc

SEQ ID NO: 1063555 - DNA, 15 bp, Homo sapiens
ctggcctcattgttt

SEQ ID NO: 1063556 - DNA, 15 bp, Homo sapiens
cctggcctcattgtt

SEQ ID NO: 1063557 - DNA, 15 bp, Homo sapiens
gcctggcctcattgt

SEQ ID NO: 1063558 - DNA, 15 bp, Homo sapiens
tgcctggcctcattg

SEQ ID NO: 1063559 - DNA, 15 bp, Homo sapiens
ttgcctggcctcatt

SEQ ID NO: 1063560 - DNA, 15 bp, Homo sapiens
attgcctggcctcat

SEQ ID NO: 1063561 - DNA, 15 bp, Homo sapiens
gattgcctggcctca

SEQ ID NO: 1063562 - DNA, 15 bp, Homo sapiens
tgattgcctggcctc

SEQ ID NO: 1063563 - DNA, 15 bp, Homo sapiens
ctgattgcctggcct

SEQ ID NO: 1063564 - DNA, 15 bp, Homo sapiens
tctgattgcctggcc

SEQ ID NO: 1063565 - DNA, 15 bp, Homo sapiens
ctctgattgcctggc

SEQ ID NO: 1063566 - DNA, 15 bp, Homo sapiens
actctgattgcctgg

SEQ ID NO: 1063567 - DNA, 15 bp, Homo sapiens
gactctgattgcctg

SEQ ID NO: 1063568 - DNA, 15 bp, Homo sapiens
ggactctgattgcct

SEQ ID NO: 1063569 - DNA, 15 bp, Homo sapiens
tggactctgattgcc

SEQ ID NO: 1063570 - DNA, 15 bp, Homo sapiens
atggactctgattgc

SEQ ID NO: 1063571 - DNA, 15 bp, Homo sapiens
gatggactctgattg

SEQ ID NO: 1063572 - DNA, 15 bp, Homo sapiens
ggatggactctgatt

SEQ ID NO: 1063573 - DNA, 15 bp, Homo sapiens
cggatggactctgat

SEQ ID NO: 1063574 - DNA, 15 bp, Homo sapiens
acggatggactctga

SEQ ID NO: 1063575 - DNA, 15 bp, Homo sapiens
gacggatggactctg

SEQ ID NO: 1063576 - DNA, 15 bp, Homo sapiens
agacggatggactct

SEQ ID NO: 1063577 - DNA, 15 bp, Homo sapiens
aagacggatggactc

SEQ ID NO: 1063578 - DNA, 15 bp, Homo sapiens
gaagacggatggact

SEQ ID NO: 1063579 - DNA, 15 bp, Homo sapiens
ggaagacggatggac

SEQ ID NO: 1063580 - DNA, 15 bp, Homo sapiens
gggaagacggatgga

SEQ ID NO: 1063581 - DNA, 15 bp, Homo sapiens
tgggaagacggatgg

SEQ ID NO: 1063582 - DNA, 15 bp, Homo sapiens
ttgggaagacggatg

SEQ ID NO: 1063583 - DNA, 15 bp, Homo sapiens
gttgggaagacggat

SEQ ID NO: 1063584 - DNA, 15 bp, Homo sapiens
agttgggaagacgga

SEQ ID NO: 1063585 - DNA, 15 bp, Homo sapiens
gagttgggaagacgg

SEQ ID NO: 1063586 - DNA, 15 bp, Homo sapiens
agagttgggaagacg

SEQ ID NO: 1063587 - DNA, 15 bp, Homo sapiens
aagagttgggaagac

SEQ ID NO: 1063588 - DNA, 15 bp, Homo sapiens
taagagttgggaaga

SEQ ID NO: 1063589 - DNA, 15 bp, Homo sapiens
ataagagttgggaag

SEQ ID NO: 1063590 - DNA, 15 bp, Homo sapiens
aataagagttgggaa

SEQ ID NO: 1063591 - DNA, 15 bp, Homo sapiens
gaataagagttggga

SEQ ID NO: 1063592 - DNA, 15 bp, Homo sapiens
agaataagagttggg

SEQ ID NO: 1063593 - DNA, 15 bp, Homo sapiens
tagaataagagttgg

SEQ ID NO: 1063594 - DNA, 15 bp, Homo sapiens
ttagaataagagttg

SEQ ID NO: 1063595 - DNA, 15 bp, Homo sapiens
attagaataagagtt

SEQ ID NO: 1063596 - DNA, 15 bp, Homo sapiens
aattagaataagagt

SEQ ID NO: 1063597 - DNA, 15 bp, Homo sapiens
aaattagaataagag

SEQ ID NO: 1063598 - DNA, 15 bp, Homo sapiens
caaattagaataaga

SEQ ID NO: 1063599 - DNA, 15 bp, Homo sapiens
acaaattagaataag

SEQ ID NO: 1063600 - DNA, 15 bp, Homo sapiens
aacaaattagaataa

SEQ ID NO: 1063601 - DNA, 15 bp, Homo sapiens
aaacaaattagaata

SEQ ID NO: 1063602 - DNA, 15 bp, Homo sapiens
caaacaaattagaat

SEQ ID NO: 1063603 - DNA, 15 bp, Homo sapiens
tcaaacaaattagaa

SEQ ID NO: 1063604 - DNA, 15 bp, Homo sapiens
ctcaaacaaattaga

SEQ ID NO: 1063605 - DNA, 15 bp, Homo sapiens
tctcaaacaaattag

SEQ ID NO: 1063606 - DNA, 15 bp, Homo sapiens
ctctcaaacaaatta

SEQ ID NO: 1063607 - DNA, 15 bp, Homo sapiens
cctctcaaacaaatt

SEQ ID NO: 1063608 - DNA, 15 bp, Homo sapiens
gcctctcaaacaaat

SEQ ID NO: 1063609 - DNA, 15 bp, Homo sapiens
agcctctcaaacaaa

SEQ ID NO: 1063610 - DNA, 15 bp, Homo sapiens
gagcctctcaaacaa

SEQ ID NO: 1063611 - DNA, 15 bp, Homo sapiens
tgagcctctcaaaca

SEQ ID NO: 1063612 - DNA, 15 bp, Homo sapiens
ctgagcctctcaaac

SEQ ID NO: 1063613 - DNA, 15 bp, Homo sapiens
tctgagcctctcaaa

SEQ ID NO: 1063614 - DNA, 15 bp, Homo sapiens
ttctgagcctctcaa

SEQ ID NO: 1063615 - DNA, 15 bp, Homo sapiens
cttctgagcctctca

SEQ ID NO: 1063616 - DNA, 15 bp, Homo sapiens
ccttctgagcctctc

SEQ ID NO: 1063617 - DNA, 15 bp, Homo sapiens
cccttctgagcctct

SEQ ID NO: 1063618 - DNA, 15 bp, Homo sapiens
ccccttctgagcctc

SEQ ID NO: 1063619 - DNA, 15 bp, Homo sapiens
gccccttctgagcct

SEQ ID NO: 1063620 - DNA, 15 bp, Homo sapiens
agccccttctgagcc

SEQ ID NO: 1063621 - DNA, 15 bp, Homo sapiens
cagccccttctgagc

SEQ ID NO: 1063622 - DNA, 15 bp, Homo sapiens
tcagccccttctgag

SEQ ID NO: 1063623 - DNA, 15 bp, Homo sapiens
ttcagccccttctga

SEQ ID NO: 1063624 - DNA, 15 bp, Homo sapiens
cttcagccccttctg

SEQ ID NO: 1063625 - DNA, 15 bp, Homo sapiens
ccttcagccccttct

SEQ ID NO: 1063626 - DNA, 15 bp, Homo sapiens
cccttcagccccttc

SEQ ID NO: 1063627 - DNA, 15 bp, Homo sapiens
gcccttcagcccctt

SEQ ID NO: 1063628 - DNA, 15 bp, Homo sapiens
tgcccttcagcccct

SEQ ID NO: 1063629 - DNA, 15 bp, Homo sapiens
atgcccttcagcccc

SEQ ID NO: 1063630 - DNA, 15 bp, Homo sapiens
catgcccttcagccc

SEQ ID NO: 1063631 - DNA, 15 bp, Homo sapiens
ccatgcccttcagcc

SEQ ID NO: 1063632 - DNA, 15 bp, Homo sapiens
accatgcccttcagc

SEQ ID NO: 1063633 - DNA, 15 bp, Homo sapiens
aaccatgcccttcag

SEQ ID NO: 1063634 - DNA, 15 bp, Homo sapiens
caaccatgcccttca

SEQ ID NO: 1063635 - DNA, 15 bp, Homo sapiens
acaaccatgcccttc

SEQ ID NO: 1063636 - DNA, 15 bp, Homo sapiens
cacaaccatgccctt

SEQ ID NO: 1063637 - DNA, 15 bp, Homo sapiens
acacaaccatgccct

SEQ ID NO: 1063638 - DNA, 15 bp, Homo sapiens
aacacaaccatgccc

SEQ ID NO: 1063639 - DNA, 15 bp, Homo sapiens
aaacacaaccatgcc

SEQ ID NO: 1063640 - DNA, 15 bp, Homo sapiens
gaaacacaaccatgc

SEQ ID NO: 1063641 - DNA, 15 bp, Homo sapiens
tgaaacacaaccatg

SEQ ID NO: 1063642 - DNA, 15 bp, Homo sapiens
gtgaaacacaaccat

SEQ ID NO: 1063643 - DNA, 15 bp, Homo sapiens
ggtgaaacacaacca

SEQ ID NO: 1063644 - DNA, 15 bp, Homo sapiens
gggtgaaacacaacc

SEQ ID NO: 1063645 - DNA, 15 bp, Homo sapiens
ggggtgaaacacaac

SEQ ID NO: 1063646 - DNA, 15 bp, Homo sapiens
cggggtgaaacacaa

SEQ ID NO: 1063647 - DNA, 15 bp, Homo sapiens
acggggtgaaacaca

SEQ ID NO: 1063648 - DNA, 15 bp, Homo sapiens
gacggggtgaaacac

SEQ ID NO: 1063649 - DNA, 15 bp, Homo sapiens
tgacggggtgaaaca

SEQ ID NO: 1063650 - DNA, 15 bp, Homo sapiens
ctgacggggtgaaac

SEQ ID NO: 1063651 - DNA, 15 bp, Homo sapiens
tctgacggggtgaaa

SEQ ID NO: 1063652 - DNA, 15 bp, Homo sapiens
gtctgacggggtgaa

SEQ ID NO: 1063653 - DNA, 15 bp, Homo sapiens
agtctgacggggtga

SEQ ID NO: 1063654 - DNA, 15 bp, Homo sapiens
gagtctgacggggtg

SEQ ID NO: 1063655 - DNA, 15 bp, Homo sapiens
agagtctgacggggt

SEQ ID NO: 1063656 - DNA, 15 bp, Homo sapiens
cagagtctgacgggg

SEQ ID NO: 1063657 - DNA, 15 bp, Homo sapiens
acagagtctgacggg

SEQ ID NO: 1063658 - DNA, 15 bp, Homo sapiens
aacagagtctgacgg

SEQ ID NO: 1063659 - DNA, 15 bp, Homo sapiens
caacagagtctgacg

SEQ ID NO: 1063660 - DNA, 15 bp, Homo sapiens
acaacagagtctgac

SEQ ID NO: 1063661 - DNA, 15 bp, Homo sapiens
aacaacagagtctga

SEQ ID NO: 1063662 - DNA, 15 bp, Homo sapiens
aaacaacagagtctg

SEQ ID NO: 1063663 - DNA, 15 bp, Homo sapiens
caaacaacagagtct

SEQ ID NO: 1063664 - DNA, 15 bp, Homo sapiens
tcaaacaacagagtc

SEQ ID NO: 1063665 - DNA, 15 bp, Homo sapiens
atcaaacaacagagt

SEQ ID NO: 1063666 - DNA, 15 bp, Homo sapiens
catcaaacaacagag

SEQ ID NO: 1063667 - DNA, 15 bp, Homo sapiens
tcatcaaacaacaga

SEQ ID NO: 1063668 - DNA, 15 bp, Homo sapiens
ctcatcaaacaacag

SEQ ID NO: 1063669 - DNA, 15 bp, Homo sapiens
cctcatcaaacaaca

SEQ ID NO: 1063670 - DNA, 15 bp, Homo sapiens
acctcatcaaacaac

SEQ ID NO: 1063671 - DNA, 15 bp, Homo sapiens
aacctcatcaaacaa

SEQ ID NO: 1063672 - DNA, 15 bp, Homo sapiens
aaacctcatcaaaca

SEQ ID NO: 1063673 - DNA, 15 bp, Homo sapiens
caaacctcatcaaac

SEQ ID NO: 1063674 - DNA, 15 bp, Homo sapiens
acaaacctcatcaaa

SEQ ID NO: 1063675 - DNA, 15 bp, Homo sapiens
cacaaacctcatcaa

SEQ ID NO: 1063676 - DNA, 15 bp, Homo sapiens
gcacaaacctcatca

SEQ ID NO: 1063677 - DNA, 15 bp, Homo sapiens
agcacaaacctcatc

SEQ ID NO: 1063678 - DNA, 15 bp, Homo sapiens
gagcacaaacctcat

SEQ ID NO: 1063679 - DNA, 15 bp, Homo sapiens
ggagcacaaacctca

SEQ ID NO: 1063680 - DNA, 15 bp, Homo sapiens
tggagcacaaacctc

SEQ ID NO: 1063681 - DNA, 15 bp, Homo sapiens
atggagcacaaacct

SEQ ID NO: 1063682 - DNA, 15 bp, Homo sapiens
aatggagcacaaacc

SEQ ID NO: 1063683 - DNA, 15 bp, Homo sapiens
aaatggagcacaaac

SEQ ID NO: 1063684 - DNA, 15 bp, Homo sapiens
caaatggagcacaaa

SEQ ID NO: 1063685 - DNA, 15 bp, Homo sapiens
acaaatggagcacaa

SEQ ID NO: 1063686 - DNA, 15 bp, Homo sapiens
aacaaatggagcaca

SEQ ID NO: 1063687 - DNA, 15 bp, Homo sapiens
gaacaaatggagcac

SEQ ID NO: 1063688 - DNA, 15 bp, Homo sapiens
cgaacaaatggagca

SEQ ID NO: 1063689 - DNA, 15 bp, Homo sapiens
ccgaacaaatggagc

SEQ ID NO: 1063690 - DNA, 15 bp, Homo sapiens
tccgaacaaatggag

SEQ ID NO: 1063691 - DNA, 15 bp, Homo sapiens
atccgaacaaatgga

SEQ ID NO: 1063692 - DNA, 15 bp, Homo sapiens
catccgaacaaatgg

SEQ ID NO: 1063693 - DNA, 15 bp, Homo sapiens
ccatccgaacaaatg

SEQ ID NO: 1063694 - DNA, 15 bp, Homo sapiens
accatccgaacaaat

SEQ ID NO: 1063695 - DNA, 15 bp, Homo sapiens
aaccatccgaacaaa

SEQ ID NO: 1063696 - DNA, 15 bp, Homo sapiens
aaaccatccgaacaa

SEQ ID NO: 1063697 - DNA, 15 bp, Homo sapiens
aaaaccatccgaaca

SEQ ID NO: 1063698 - DNA, 15 bp, Homo sapiens
aaaaaccatccgaac

SEQ ID NO: 1063699 - DNA, 15 bp, Homo sapiens
taaaaaccatccgaa

SEQ ID NO: 1063700 - DNA, 15 bp, Homo sapiens
ataaaaaccatccga

SEQ ID NO: 1063701 - DNA, 15 bp, Homo sapiens
cataaaaaccatccg

SEQ ID NO: 1063702 - DNA, 15 bp, Homo sapiens
ccataaaaaccatcc

SEQ ID NO: 1063703 - DNA, 15 bp, Homo sapiens
accataaaaaccatc

SEQ ID NO: 1063704 - DNA, 15 bp, Homo sapiens
aaccataaaaaccat

SEQ ID NO: 1063705 - DNA, 15 bp, Homo sapiens
aaaccataaaaacca

SEQ ID NO: 1063706 - DNA, 15 bp, Homo sapiens
gaaaccataaaaacc

SEQ ID NO: 1063707 - DNA, 15 bp, Homo sapiens
agaaaccataaaaac

SEQ ID NO: 1063708 - DNA, 15 bp, Homo sapiens
aagaaaccataaaaa

SEQ ID NO: 1063709 - DNA, 15 bp, Homo sapiens
aaagaaaccataaaa

SEQ ID NO: 1063710 - DNA, 15 bp, Homo sapiens
caaagaaaccataaa

SEQ ID NO: 1063711 - DNA, 15 bp, Homo sapiens
acaaagaaaccataa

SEQ ID NO: 1063712 - DNA, 15 bp, Homo sapiens
aacaaagaaaccata

SEQ ID NO: 1063713 - DNA, 15 bp, Homo sapiens
caacaaagaaaccat

SEQ ID NO: 1063714 - DNA, 15 bp, Homo sapiens
acaacaaagaaacca

SEQ ID NO: 1063715 - DNA, 15 bp, Homo sapiens
aacaacaaagaaacc

SEQ ID NO: 1063716 - DNA, 15 bp, Homo sapiens
gaacaacaaagaaac

SEQ ID NO: 1063717 - DNA, 15 bp, Homo sapiens
tgaacaacaaagaaa

SEQ ID NO: 1063718 - DNA, 15 bp, Homo sapiens
atgaacaacaaagaa

SEQ ID NO: 1063719 - DNA, 15 bp, Homo sapiens
catgaacaacaaaga

SEQ ID NO: 1063720 - DNA, 15 bp, Homo sapiens
ccatgaacaacaaag

SEQ ID NO: 1063721 - DNA, 15 bp, Homo sapiens
tccatgaacaacaaa

SEQ ID NO: 1063722 - DNA, 15 bp, Homo sapiens
ttccatgaacaacaa

SEQ ID NO: 1063723 - DNA, 15 bp, Homo sapiens
attccatgaacaaca

SEQ ID NO: 1063724 - DNA, 15 bp, Homo sapiens
tattccatgaacaac

SEQ ID NO: 1063725 - DNA, 15 bp, Homo sapiens
ttattccatgaacaa

SEQ ID NO: 1063726 - DNA, 15 bp, Homo sapiens
gttattccatgaaca

SEQ ID NO: 1063727 - DNA, 15 bp, Homo sapiens
agttattccatgaac

SEQ ID NO: 1063728 - DNA, 15 bp, Homo sapiens
aagttattccatgaa

SEQ ID NO: 1063729 - DNA, 15 bp, Homo sapiens
aaagttattccatga

SEQ ID NO: 1063730 - DNA, 15 bp, Homo sapiens
caaagttattccatg

SEQ ID NO: 1063731 - DNA, 15 bp, Homo sapiens
tcaaagttattccat

SEQ ID NO: 1063732 - DNA, 15 bp, Homo sapiens
ttcaaagttattcca

SEQ ID NO: 1063733 - DNA, 15 bp, Homo sapiens
cttcaaagttattcc

SEQ ID NO: 1063734 - DNA, 15 bp, Homo sapiens
ccttcaaagttattc

SEQ ID NO: 1063735 - DNA, 15 bp, Homo sapiens
accttcaaagttatt

SEQ ID NO: 1063736 - DNA, 15 bp, Homo sapiens
gaccttcaaagttat

SEQ ID NO: 1063737 - DNA, 15 bp, Homo sapiens
tgaccttcaaagtta

SEQ ID NO: 1063738 - DNA, 15 bp, Homo sapiens
atgaccttcaaagtt

SEQ ID NO: 1063739 - DNA, 15 bp, Homo sapiens
tatgaccttcaaagt

SEQ ID NO: 1063740 - DNA, 15 bp, Homo sapiens
ttatgaccttcaaag

SEQ ID NO: 1063741 - DNA, 15 bp, Homo sapiens
attatgaccttcaaa

SEQ ID NO: 1063742 - DNA, 15 bp, Homo sapiens
aattatgaccttcaa

SEQ ID NO: 1063743 - DNA, 15 bp, Homo sapiens
gaattatgaccttca

SEQ ID NO: 1063744 - DNA, 15 bp, Homo sapiens
agaattatgaccttc

SEQ ID NO: 1063745 - DNA, 15 bp, Homo sapiens
cagaattatgacctt

SEQ ID NO: 1063746 - DNA, 15 bp, Homo sapiens
acagaattatgacct

SEQ ID NO: 1063747 - DNA, 15 bp, Homo sapiens
tacagaattatgacc

SEQ ID NO: 1063748 - DNA, 15 bp, Homo sapiens
atacagaattatgac

SEQ ID NO: 1063749 - DNA, 15 bp, Homo sapiens
gatacagaattatga

SEQ ID NO: 1063750 - DNA, 15 bp, Homo sapiens
ggatacagaattatg

SEQ ID NO: 1063751 - DNA, 15 bp, Homo sapiens
aggatacagaattat

SEQ ID NO: 1063752 - DNA, 15 bp, Homo sapiens
gaggatacagaatta

SEQ ID NO: 1063753 - DNA, 15 bp, Homo sapiens
tgaggatacagaatt

SEQ ID NO: 1063754 - DNA, 15 bp, Homo sapiens
ttgaggatacagaat

SEQ ID NO: 1063755 - DNA, 15 bp, Homo sapiens
cttgaggatacagaa

SEQ ID NO: 1063756 - DNA, 15 bp, Homo sapiens
gcttgaggatacaga

SEQ ID NO: 1063757 - DNA, 15 bp, Homo sapiens
agcttgaggatacag

SEQ ID NO: 1063758 - DNA, 15 bp, Homo sapiens
gagcttgaggataca

SEQ ID NO: 1063759 - DNA, 15 bp, Homo sapiens
ggagcttgaggatac

SEQ ID NO: 1063760 - DNA, 15 bp, Homo sapiens
aggagcttgaggata

SEQ ID NO: 1063761 - DNA, 15 bp, Homo sapiens
gaggagcttgaggat

SEQ ID NO: 1063762 - DNA, 15 bp, Homo sapiens
agaggagcttgagga

SEQ ID NO: 1063763 - DNA, 15 bp, Homo sapiens
cagaggagcttgagg

SEQ ID NO: 1063764 - DNA, 15 bp, Homo sapiens
gcagaggagcttgag

SEQ ID NO: 1063765 - DNA, 15 bp, Homo sapiens
agcagaggagcttga

SEQ ID NO: 1063766 - DNA, 15 bp, Homo sapiens
tagcagaggagcttg

SEQ ID NO: 1063767 - DNA, 15 bp, Homo sapiens
atagcagaggagctt

SEQ ID NO: 1063768 - DNA, 15 bp, Homo sapiens
aatagcagaggagct

SEQ ID NO: 1063769 - DNA, 15 bp, Homo sapiens
gaatagcagaggagc

SEQ ID NO: 1063770 - DNA, 15 bp, Homo sapiens
ggaatagcagaggag

SEQ ID NO: 1063771 - DNA, 15 bp, Homo sapiens
aggaatagcagagga

SEQ ID NO: 1063772 - DNA, 15 bp, Homo sapiens
caggaatagcagagg

SEQ ID NO: 1063773 - DNA, 15 bp, Homo sapiens
gcaggaatagcagag

SEQ ID NO: 1063774 - DNA, 15 bp, Homo sapiens
agcaggaatagcaga

SEQ ID NO: 1063775 - DNA, 15 bp, Homo sapiens
gagcaggaatagcag

SEQ ID NO: 1063776 - DNA, 15 bp, Homo sapiens
tgagcaggaatagca

SEQ ID NO: 1063777 - DNA, 15 bp, Homo sapiens
ttgagcaggaatagc

SEQ ID NO: 1063778 - DNA, 15 bp, Homo sapiens
attgagcaggaatag

SEQ ID NO: 1063779 - DNA, 15 bp, Homo sapiens
cattgagcaggaata

SEQ ID NO: 1063780 - DNA, 15 bp, Homo sapiens
acattgagcaggaat

SEQ ID NO: 1063781 - DNA, 15 bp, Homo sapiens
gacattgagcaggaa

SEQ ID NO: 1063782 - DNA, 15 bp, Homo sapiens
agacattgagcagga

SEQ ID NO: 1063783 - DNA, 15 bp, Homo sapiens
gagacattgagcagg

SEQ ID NO: 1063784 - DNA, 15 bp, Homo sapiens
tgagacattgagcag

SEQ ID NO: 1063785 - DNA, 15 bp, Homo sapiens
ttgagacattgagca

SEQ ID NO: 1063786 - DNA, 15 bp, Homo sapiens
attgagacattgagc

SEQ ID NO: 1063787 - DNA, 15 bp, Homo sapiens
cattgagacattgag

SEQ ID NO: 1063788 - DNA, 15 bp, Homo sapiens
ccattgagacattga

SEQ ID NO: 1063789 - DNA, 15 bp, Homo sapiens
cccattgagacattg

SEQ ID NO: 1063790 - DNA, 15 bp, Homo sapiens
tcccattgagacatt

SEQ ID NO: 1063791 - DNA, 15 bp, Homo sapiens
gtcccattgagacat

SEQ ID NO: 1063792 - DNA, 15 bp, Homo sapiens
agtcccattgagaca

SEQ ID NO: 1063793 - DNA, 15 bp, Homo sapiens
gagtcccattgagac

SEQ ID NO: 1063794 - DNA, 15 bp, Homo sapiens
tgagtcccattgaga

SEQ ID NO: 1063795 - DNA, 15 bp, Homo sapiens
atgagtcccattgag

SEQ ID NO: 1063796 - DNA, 15 bp, Homo sapiens
tatgagtcccattga

SEQ ID NO: 1063797 - DNA, 15 bp, Homo sapiens
gtatgagtcccattg

SEQ ID NO: 1063798 - DNA, 15 bp, Homo sapiens
ggtatgagtcccatt

SEQ ID NO: 1063799 - DNA, 15 bp, Homo sapiens
tggtatgagtcccat

SEQ ID NO: 1063800 - DNA, 15 bp, Homo sapiens
ttggtatgagtccca

SEQ ID NO: 1063801 - DNA, 15 bp, Homo sapiens
cttggtatgagtccc

SEQ ID NO: 1063802 - DNA, 15 bp, Homo sapiens
tcttggtatgagtcc

SEQ ID NO: 1063803 - DNA, 15 bp, Homo sapiens
ctcttggtatgagtc

SEQ ID NO: 1063804 - DNA, 15 bp, Homo sapiens
tctcttggtatgagt

SEQ ID NO: 1063805 - DNA, 15 bp, Homo sapiens
ttctcttggtatgag

SEQ ID NO: 1063806 - DNA, 15 bp, Homo sapiens
tttctcttggtatga

SEQ ID NO: 1063807 - DNA, 15 bp, Homo sapiens
ctttctcttggtatg

SEQ ID NO: 1063808 - DNA, 15 bp, Homo sapiens
cctttctcttggtat

SEQ ID NO: 1063809 - DNA, 15 bp, Homo sapiens
ccctttctcttggta

SEQ ID NO: 1063810 - DNA, 15 bp, Homo sapiens
tccctttctcttggt

SEQ ID NO: 1063811 - DNA, 15 bp, Homo sapiens
ttccctttctcttgg

SEQ ID NO: 1063812 - DNA, 15 bp, Homo sapiens
cttccctttctcttg

SEQ ID NO: 1063813 - DNA, 15 bp, Homo sapiens
ccttccctttctctt

SEQ ID NO: 1063814 - DNA, 15 bp, Homo sapiens
tccttccctttctct

SEQ ID NO: 1063815 - DNA, 15 bp, Homo sapiens
ttccttccctttctc

SEQ ID NO: 1063816 - DNA, 15 bp, Homo sapiens
cttccttccctttct

SEQ ID NO: 1063817 - DNA, 15 bp, Homo sapiens
tcttccttccctttc

SEQ ID NO: 1063818 - DNA, 15 bp, Homo sapiens
ttcttccttcccttt

SEQ ID NO: 1063819 - DNA, 15 bp, Homo sapiens
cttcttccttccctt

SEQ ID NO: 1063820 - DNA, 15 bp, Homo sapiens
acttcttccttccct

SEQ ID NO: 1063821 - DNA, 15 bp, Homo sapiens
aacttcttccttccc

SEQ ID NO: 1063822 - DNA, 15 bp, Homo sapiens
aaacttcttccttcc

SEQ ID NO: 1063823 - DNA, 15 bp, Homo sapiens
gaaacttcttccttc

SEQ ID NO: 1063824 - DNA, 15 bp, Homo sapiens
ggaaacttcttcctt

SEQ ID NO: 1063825 - DNA, 15 bp, Homo sapiens
tggaaacttcttcct

SEQ ID NO: 1063826 - DNA, 15 bp, Homo sapiens
ctggaaacttcttcc

SEQ ID NO: 1063827 - DNA, 15 bp, Homo sapiens
gctggaaacttcttc

SEQ ID NO: 1063828 - DNA, 15 bp, Homo sapiens
agctggaaacttctt

SEQ ID NO: 1063829 - DNA, 15 bp, Homo sapiens
tagctggaaacttct

SEQ ID NO: 1063830 - DNA, 15 bp, Homo sapiens
ctagctggaaacttc

SEQ ID NO: 1063831 - DNA, 15 bp, Homo sapiens
actagctggaaactt

SEQ ID NO: 1063832 - DNA, 15 bp, Homo sapiens
aactagctggaaact

SEQ ID NO: 1063833 - DNA, 15 bp, Homo sapiens
taactagctggaaac

SEQ ID NO: 1063834 - DNA, 15 bp, Homo sapiens
ctaactagctggaaa

SEQ ID NO: 1063835 - DNA, 15 bp, Homo sapiens
actaactagctggaa

SEQ ID NO: 1063836 - DNA, 15 bp, Homo sapiens
aactaactagctgga

SEQ ID NO: 1063837 - DNA, 15 bp, Homo sapiens
taactaactagctgg

SEQ ID NO: 1063838 - DNA, 15 bp, Homo sapiens
ttaactaactagctg

SEQ ID NO: 1063839 - DNA, 15 bp, Homo sapiens
cttaactaactagct

SEQ ID NO: 1063840 - DNA, 15 bp, Homo sapiens
gcttaactaactagc

SEQ ID NO: 1063841 - DNA, 15 bp, Homo sapiens
tgcttaactaactag

SEQ ID NO: 1063842 - DNA, 15 bp, Homo sapiens
ttgcttaactaacta

SEQ ID NO: 1063843 - DNA, 15 bp, Homo sapiens
attgcttaactaact

SEQ ID NO: 1063844 - DNA, 15 bp, Homo sapiens
aattgcttaactaac

SEQ ID NO: 1063845 - DNA, 15 bp, Homo sapiens
aaattgcttaactaa

SEQ ID NO: 1063846 - DNA, 15 bp, Homo sapiens
gaaattgcttaacta

SEQ ID NO: 1063847 - DNA, 15 bp, Homo sapiens
agaaattgcttaact

SEQ ID NO: 1063848 - DNA, 15 bp, Homo sapiens
gagaaattgcttaac

SEQ ID NO: 1063849 - DNA, 15 bp, Homo sapiens
tgagaaattgcttaa

SEQ ID NO: 1063850 - DNA, 15 bp, Homo sapiens
ttgagaaattgctta

SEQ ID NO: 1063851 - DNA, 15 bp, Homo sapiens
gttgagaaattgctt

SEQ ID NO: 1063852 - DNA, 15 bp, Homo sapiens
tgttgagaaattgct

SEQ ID NO: 1063853 - DNA, 15 bp, Homo sapiens
gtgttgagaaattgc

SEQ ID NO: 1063854 - DNA, 15 bp, Homo sapiens
tgtgttgagaaattg

SEQ ID NO: 1063855 - DNA, 15 bp, Homo sapiens
atgtgttgagaaatt

SEQ ID NO: 1063856 - DNA, 15 bp, Homo sapiens
aatgtgttgagaaat

SEQ ID NO: 1063857 - DNA, 15 bp, Homo sapiens
aaatgtgttgagaaa

SEQ ID NO: 1063858 - DNA, 15 bp, Homo sapiens
taaatgtgttgagaa

SEQ ID NO: 1063859 - DNA, 15 bp, Homo sapiens
ataaatgtgttgaga

SEQ ID NO: 1063860 - DNA, 15 bp, Homo sapiens
cataaatgtgttgag

SEQ ID NO: 1063861 - DNA, 15 bp, Homo sapiens
ccataaatgtgttga

SEQ ID NO: 1063862 - DNA, 15 bp, Homo sapiens
tccataaatgtgttg

SEQ ID NO: 1063863 - DNA, 15 bp, Homo sapiens
ttccataaatgtgtt

SEQ ID NO: 1063864 - DNA, 15 bp, Homo sapiens
cttccataaatgtgt

SEQ ID NO: 1063865 - DNA, 15 bp, Homo sapiens
gcttccataaatgtg

SEQ ID NO: 1063866 - DNA, 15 bp, Homo sapiens
tgcttccataaatgt

SEQ ID NO: 1063867 - DNA, 15 bp, Homo sapiens
atgcttccataaatg

SEQ ID NO: 1063868 - DNA, 15 bp, Homo sapiens
catgcttccataaat

SEQ ID NO: 1063869 - DNA, 15 bp, Homo sapiens
acatgcttccataaa

SEQ ID NO: 1063870 - DNA, 15 bp, Homo sapiens
cacatgcttccataa

SEQ ID NO: 1063871 - DNA, 15 bp, Homo sapiens
ccacatgcttccata

SEQ ID NO: 1063872 - DNA, 15 bp, Homo sapiens
tccacatgcttccat

SEQ ID NO: 1063873 - DNA, 15 bp, Homo sapiens
ttccacatgcttcca

SEQ ID NO: 1063874 - DNA, 15 bp, Homo sapiens
attccacatgcttcc

SEQ ID NO: 1063875 - DNA, 15 bp, Homo sapiens
gattccacatgcttc

SEQ ID NO: 1063876 - DNA, 15 bp, Homo sapiens
agattccacatgctt

SEQ ID NO: 1063877 - DNA, 15 bp, Homo sapiens
aagattccacatgct

SEQ ID NO: 1063878 - DNA, 15 bp, Homo sapiens
aaagattccacatgc

SEQ ID NO: 1063879 - DNA, 15 bp, Homo sapiens
gaaagattccacatg

SEQ ID NO: 1063880 - DNA, 15 bp, Homo sapiens
tgaaagattccacat

SEQ ID NO: 1063881 - DNA, 15 bp, Homo sapiens
ttgaaagattccaca

SEQ ID NO: 1063882 - DNA, 15 bp, Homo sapiens
cttgaaagattccac

SEQ ID NO: 1063883 - DNA, 15 bp, Homo sapiens
tcttgaaagattcca

SEQ ID NO: 1063884 - DNA, 15 bp, Homo sapiens
ttcttgaaagattcc

SEQ ID NO: 1063885 - DNA, 15 bp, Homo sapiens
tttcttgaaagattc

SEQ ID NO: 1063886 - DNA, 15 bp, Homo sapiens
ctttcttgaaagatt

SEQ ID NO: 1063887 - DNA, 15 bp, Homo sapiens
cctttcttgaaagat

SEQ ID NO: 1063888 - DNA, 15 bp, Homo sapiens
ccctttcttgaaaga

SEQ ID NO: 1063889 - DNA, 15 bp, Homo sapiens
cccctttcttgaaag

SEQ ID NO: 1063890 - DNA, 15 bp, Homo sapiens
acccctttcttgaaa

SEQ ID NO: 1063891 - DNA, 15 bp, Homo sapiens
aacccctttcttgaa

SEQ ID NO: 1063892 - DNA, 15 bp, Homo sapiens
taacccctttcttga

SEQ ID NO: 1063893 - DNA, 15 bp, Homo sapiens
gtaacccctttcttg

SEQ ID NO: 1063894 - DNA, 15 bp, Homo sapiens
cgtaacccctttctt

SEQ ID NO: 1063895 - DNA, 15 bp, Homo sapiens
tcgtaacccctttct

SEQ ID NO: 1063896 - DNA, 15 bp, Homo sapiens
atcgtaacccctttc

SEQ ID NO: 1063897 - DNA, 15 bp, Homo sapiens
gatcgtaaccccttt

SEQ ID NO: 1063898 - DNA, 15 bp, Homo sapiens
tgatcgtaacccctt

SEQ ID NO: 1063899 - DNA, 15 bp, Homo sapiens
gtgatcgtaacccct

SEQ ID NO: 1063900 - DNA, 15 bp, Homo sapiens
tgtgatcgtaacccc

SEQ ID NO: 1063901 - DNA, 15 bp, Homo sapiens
ttgtgatcgtaaccc

SEQ ID NO: 1063902 - DNA, 15 bp, Homo sapiens
tttgtgatcgtaacc

SEQ ID NO: 1063903 - DNA, 15 bp, Homo sapiens
ttttgtgatcgtaac

SEQ ID NO: 1063904 - DNA, 15 bp, Homo sapiens
cttttgtgatcgtaa

SEQ ID NO: 1063905 - DNA, 15 bp, Homo sapiens
acttttgtgatcgta

SEQ ID NO: 1063906 - DNA, 15 bp, Homo sapiens
aacttttgtgatcgt

SEQ ID NO: 1063907 - DNA, 15 bp, Homo sapiens
gaacttttgtgatcg

SEQ ID NO: 1063908 - DNA, 15 bp, Homo sapiens
cgaacttttgtgatc

SEQ ID NO: 1063909 - DNA, 15 bp, Homo sapiens
tcgaacttttgtgat

SEQ ID NO: 1063910 - DNA, 15 bp, Homo sapiens
atcgaacttttgtga

SEQ ID NO: 1063911 - DNA, 15 bp, Homo sapiens
aatcgaacttttgtg

SEQ ID NO: 1063912 - DNA, 15 bp, Homo sapiens
aaatcgaacttttgt

SEQ ID NO: 1063913 - DNA, 15 bp, Homo sapiens
caaatcgaacttttg

SEQ ID NO: 1063914 - DNA, 15 bp, Homo sapiens
tcaaatcgaactttt

SEQ ID NO: 1063915 - DNA, 15 bp, Homo sapiens
ctcaaatcgaacttt

SEQ ID NO: 1063916 - DNA, 15 bp, Homo sapiens
cctcaaatcgaactt

SEQ ID NO: 1063917 - DNA, 15 bp, Homo sapiens
tcctcaaatcgaact

SEQ ID NO: 1063918 - DNA, 15 bp, Homo sapiens
ctcctcaaatcgaac

SEQ ID NO: 1063919 - DNA, 15 bp, Homo sapiens
actcctcaaatcgaa

SEQ ID NO: 1063920 - DNA, 15 bp, Homo sapiens
tactcctcaaatcga

SEQ ID NO: 1063921 - DNA, 15 bp, Homo sapiens
atactcctcaaatcg

SEQ ID NO: 1063922 - DNA, 15 bp, Homo sapiens
aatactcctcaaatc

SEQ ID NO: 1063923 - DNA, 15 bp, Homo sapiens
gaatactcctcaaat

SEQ ID NO: 1063924 - DNA, 15 bp, Homo sapiens
agaatactcctcaaa

SEQ ID NO: 1063925 - DNA, 15 bp, Homo sapiens
gagaatactcctcaa

SEQ ID NO: 1063926 - DNA, 15 bp, Homo sapiens
ggagaatactcctca

SEQ ID NO: 1063927 - DNA, 15 bp, Homo sapiens
tggagaatactcctc

SEQ ID NO: 1063928 - DNA, 15 bp, Homo sapiens
ttggagaatactcct

SEQ ID NO: 1063929 - DNA, 15 bp, Homo sapiens
cttggagaatactcc

SEQ ID NO: 1063930 - DNA, 15 bp, Homo sapiens
tcttggagaatactc

SEQ ID NO: 1063931 - DNA, 15 bp, Homo sapiens
gtcttggagaatact

SEQ ID NO: 1063932 - DNA, 15 bp, Homo sapiens
tgtcttggagaatac

SEQ ID NO: 1063933 - DNA, 15 bp, Homo sapiens
ttgtcttggagaata

SEQ ID NO: 1063934 - DNA, 15 bp, Homo sapiens
gttgtcttggagaat

SEQ ID NO: 1063935 - DNA, 15 bp, Homo sapiens
agttgtcttggagaa

SEQ ID NO: 1063936 - DNA, 15 bp, Homo sapiens
cagttgtcttggaga

SEQ ID NO: 1063937 - DNA, 15 bp, Homo sapiens
tcagttgtcttggag

SEQ ID NO: 1063938 - DNA, 15 bp, Homo sapiens
ctcagttgtcttgga

SEQ ID NO: 1063939 - DNA, 15 bp, Homo sapiens
tctcagttgtcttgg

SEQ ID NO: 1063940 - DNA, 15 bp, Homo sapiens
ttctcagttgtcttg

SEQ ID NO: 1063941 - DNA, 15 bp, Homo sapiens
cttctcagttgtctt

SEQ ID NO: 1063942 - DNA, 15 bp, Homo sapiens
gcttctcagttgtct

SEQ ID NO: 1063943 - DNA, 15 bp, Homo sapiens
tgcttctcagttgtc

SEQ ID NO: 1063944 - DNA, 15 bp, Homo sapiens
ttgcttctcagttgt

SEQ ID NO: 1063945 - DNA, 15 bp, Homo sapiens
cttgcttctcagttg

SEQ ID NO: 1063946 - DNA, 15 bp, Homo sapiens
gcttgcttctcagtt

SEQ ID NO: 1063947 - DNA, 15 bp, Homo sapiens
ggcttgcttctcagt

SEQ ID NO: 1063948 - DNA, 15 bp, Homo sapiens
gggcttgcttctcag

SEQ ID NO: 1063949 - DNA, 15 bp, Homo sapiens
agggcttgcttctca

SEQ ID NO: 1063950 - DNA, 15 bp, Homo sapiens
aagggcttgcttctc

SEQ ID NO: 1063951 - DNA, 15 bp, Homo sapiens
taagggcttgcttct

SEQ ID NO: 1063952 - DNA, 15 bp, Homo sapiens
ctaagggcttgcttc

SEQ ID NO: 1063953 - DNA, 15 bp, Homo sapiens
actaagggcttgctt

SEQ ID NO: 1063954 - DNA, 15 bp, Homo sapiens
gactaagggcttgct

SEQ ID NO: 1063955 - DNA, 15 bp, Homo sapiens
tgactaagggcttgc

SEQ ID NO: 1063956 - DNA, 15 bp, Homo sapiens
atgactaagggcttg

SEQ ID NO: 1063957 - DNA, 15 bp, Homo sapiens
catgactaagggctt

SEQ ID NO: 1063958 - DNA, 15 bp, Homo sapiens
gcatgactaagggct

SEQ ID NO: 1063959 - DNA, 15 bp, Homo sapiens
ggcatgactaagggc

SEQ ID NO: 1063960 - DNA, 15 bp, Homo sapiens
gggcatgactaaggg

SEQ ID NO: 1063961 - DNA, 15 bp, Homo sapiens
tgggcatgactaagg

SEQ ID NO: 1063962 - DNA, 15 bp, Homo sapiens
ctgggcatgactaag

SEQ ID NO: 1063963 - DNA, 15 bp, Homo sapiens
cctgggcatgactaa

SEQ ID NO: 1063964 - DNA, 15 bp, Homo sapiens
acctgggcatgacta

SEQ ID NO: 1063965 - DNA, 15 bp, Homo sapiens
cacctgggcatgact

SEQ ID NO: 1063966 - DNA, 15 bp, Homo sapiens
ccacctgggcatgac

SEQ ID NO: 1063967 - DNA, 15 bp, Homo sapiens
cccacctgggcatga

SEQ ID NO: 1063968 - DNA, 15 bp, Homo sapiens
ccccacctgggcatg

SEQ ID NO: 1063969 - DNA, 15 bp, Homo sapiens
tccccacctgggcat

SEQ ID NO: 1063970 - DNA, 15 bp, Homo sapiens
ctccccacctgggca

SEQ ID NO: 1063971 - DNA, 15 bp, Homo sapiens
gctccccacctgggc

SEQ ID NO: 1063972 - DNA, 15 bp, Homo sapiens
tgctccccacctggg

SEQ ID NO: 1063973 - DNA, 15 bp, Homo sapiens
ctgctccccacctgg

SEQ ID NO: 1063974 - DNA, 15 bp, Homo sapiens
cctgctccccacctg

SEQ ID NO: 1063975 - DNA, 15 bp, Homo sapiens
acctgctccccacct

SEQ ID NO: 1063976 - DNA, 15 bp, Homo sapiens
gacctgctccccacc

SEQ ID NO: 1063977 - DNA, 15 bp, Homo sapiens
agacctgctccccac

SEQ ID NO: 1063978 - DNA, 15 bp, Homo sapiens
gagacctgctcccca

SEQ ID NO: 1063979 - DNA, 15 bp, Homo sapiens
ggagacctgctcccc

SEQ ID NO: 1063980 - DNA, 15 bp, Homo sapiens
tggagacctgctccc

SEQ ID NO: 1063981 - DNA, 15 bp, Homo sapiens
ttggagacctgctcc

SEQ ID NO: 1063982 - DNA, 15 bp, Homo sapiens
gttggagacctgctc

SEQ ID NO: 1063983 - DNA, 15 bp, Homo sapiens
ggttggagacctgct

SEQ ID NO: 1063984 - DNA, 15 bp, Homo sapiens
aggttggagacctgc

SEQ ID NO: 1063985 - DNA, 15 bp, Homo sapiens
gaggttggagacctg

SEQ ID NO: 1063986 - DNA, 15 bp, Homo sapiens
agaggttggagacct

SEQ ID NO: 1063987 - DNA, 15 bp, Homo sapiens
gagaggttggagacc

SEQ ID NO: 1063988 - DNA, 15 bp, Homo sapiens
tgagaggttggagac

SEQ ID NO: 1063989 - DNA, 15 bp, Homo sapiens
atgagaggttggaga

SEQ ID NO: 1063990 - DNA, 15 bp, Homo sapiens
aatgagaggttggag

SEQ ID NO: 1063991 - DNA, 15 bp, Homo sapiens
aaatgagaggttgga

SEQ ID NO: 1063992 - DNA, 15 bp, Homo sapiens
gaaatgagaggttgg

SEQ ID NO: 1063993 - DNA, 15 bp, Homo sapiens
ggaaatgagaggttg

SEQ ID NO: 1063994 - DNA, 15 bp, Homo sapiens
aggaaatgagaggtt

SEQ ID NO: 1063995 - DNA, 15 bp, Homo sapiens
caggaaatgagaggt

SEQ ID NO: 1063996 - DNA, 15 bp, Homo sapiens
tcaggaaatgagagg

SEQ ID NO: 1063997 - DNA, 15 bp, Homo sapiens
atcaggaaatgagag

SEQ ID NO: 1063998 - DNA, 15 bp, Homo sapiens
gatcaggaaatgaga

SEQ ID NO: 1063999 - DNA, 15 bp, Homo sapiens
ggatcaggaaatgag

SEQ ID NO: 1064000 - DNA, 15 bp, Homo sapiens
tggatcaggaaatga

SEQ ID NO: 1064001 - DNA, 15 bp, Homo sapiens
ctggatcaggaaatg

SEQ ID NO: 1064002 - DNA, 15 bp, Homo sapiens
gctggatcaggaaat

SEQ ID NO: 1064003 - DNA, 15 bp, Homo sapiens
ggctggatcaggaaa

SEQ ID NO: 1064004 - DNA, 15 bp, Homo sapiens
gggctggatcaggaa

SEQ ID NO: 1064005 - DNA, 15 bp, Homo sapiens
ggggctggatcagga

SEQ ID NO: 1064006 - DNA, 15 bp, Homo sapiens
aggggctggatcagg

SEQ ID NO: 1064007 - DNA, 15 bp, Homo sapiens
aaggggctggatcag

SEQ ID NO: 1064008 - DNA, 15 bp, Homo sapiens
aaaggggctggatca

SEQ ID NO: 1064009 - DNA, 15 bp, Homo sapiens
gaaaggggctggatc

SEQ ID NO: 1064010 - DNA, 15 bp, Homo sapiens
ggaaaggggctggat

SEQ ID NO: 1064011 - DNA, 15 bp, Homo sapiens
gggaaaggggctgga

SEQ ID NO: 1064012 - DNA, 15 bp, Homo sapiens
tgggaaaggggctgg

SEQ ID NO: 1064013 - DNA, 15 bp, Homo sapiens
ctgggaaaggggctg

SEQ ID NO: 1064014 - DNA, 15 bp, Homo sapiens
gctgggaaaggggct

SEQ ID NO: 1064015 - DNA, 15 bp, Homo sapiens
ggctgggaaaggggc

SEQ ID NO: 1064016 - DNA, 15 bp, Homo sapiens
tggctgggaaagggg

SEQ ID NO: 1064017 - DNA, 15 bp, Homo sapiens
gtggctgggaaaggg

SEQ ID NO: 1064018 - DNA, 15 bp, Homo sapiens
tgtggctgggaaagg

SEQ ID NO: 1064019 - DNA, 15 bp, Homo sapiens
atgtggctgggaaag

SEQ ID NO: 1064020 - DNA, 15 bp, Homo sapiens
aatgtggctgggaaa

SEQ ID NO: 1064021 - DNA, 15 bp, Homo sapiens
aaatgtggctgggaa

SEQ ID NO: 1064022 - DNA, 15 bp, Homo sapiens
gaaatgtggctggga

SEQ ID NO: 1064023 - DNA, 15 bp, Homo sapiens
agaaatgtggctggg

SEQ ID NO: 1064024 - DNA, 15 bp, Homo sapiens
cagaaatgtggctgg

SEQ ID NO: 1064025 - DNA, 15 bp, Homo sapiens
ccagaaatgtggctg

SEQ ID NO: 1064026 - DNA, 15 bp, Homo sapiens
gccagaaatgtggct

SEQ ID NO: 1064027 - DNA, 15 bp, Homo sapiens
ggccagaaatgtggc

SEQ ID NO: 1064028 - DNA, 15 bp, Homo sapiens
aggccagaaatgtgg

SEQ ID NO: 1064029 - DNA, 15 bp, Homo sapiens
gaggccagaaatgtg

SEQ ID NO: 1064030 - DNA, 15 bp, Homo sapiens
agaggccagaaatgt

SEQ ID NO: 1064031 - DNA, 15 bp, Homo sapiens
aagaggccagaaatg

SEQ ID NO: 1064032 - DNA, 15 bp, Homo sapiens
gaagaggccagaaat

SEQ ID NO: 1064033 - DNA, 15 bp, Homo sapiens
ggaagaggccagaaa

SEQ ID NO: 1064034 - DNA, 15 bp, Homo sapiens
gggaagaggccagaa

SEQ ID NO: 1064035 - DNA, 15 bp, Homo sapiens
agggaagaggccaga

SEQ ID NO: 1064036 - DNA, 15 bp, Homo sapiens
aagggaagaggccag

SEQ ID NO: 1064037 - DNA, 15 bp, Homo sapiens
aaagggaagaggcca

SEQ ID NO: 1064038 - DNA, 15 bp, Homo sapiens
gaaagggaagaggcc

SEQ ID NO: 1064039 - DNA, 15 bp, Homo sapiens
agaaagggaagaggc

SEQ ID NO: 1064040 - DNA, 15 bp, Homo sapiens
gagaaagggaagagg

SEQ ID NO: 1064041 - DNA, 15 bp, Homo sapiens
agagaaagggaagag

SEQ ID NO: 1064042 - DNA, 15 bp, Homo sapiens
cagagaaagggaaga

SEQ ID NO: 1064043 - DNA, 15 bp, Homo sapiens
acagagaaagggaag

SEQ ID NO: 1064044 - DNA, 15 bp, Homo sapiens
cacagagaaagggaa

SEQ ID NO: 1064045 - DNA, 15 bp, Homo sapiens
ccacagagaaaggga

SEQ ID NO: 1064046 - DNA, 15 bp, Homo sapiens
accacagagaaaggg

SEQ ID NO: 1064047 - DNA, 15 bp, Homo sapiens
gaccacagagaaagg

SEQ ID NO: 1064048 - DNA, 15 bp, Homo sapiens
tgaccacagagaaag

SEQ ID NO: 1064049 - DNA, 15 bp, Homo sapiens
atgaccacagagaaa

SEQ ID NO: 1064050 - DNA, 15 bp, Homo sapiens
gatgaccacagagaa

SEQ ID NO: 1064051 - DNA, 15 bp, Homo sapiens
tgatgaccacagaga

SEQ ID NO: 1064052 - DNA, 15 bp, Homo sapiens
ctgatgaccacagag

SEQ ID NO: 1064053 - DNA, 15 bp, Homo sapiens
gctgatgaccacaga

SEQ ID NO: 1064054 - DNA, 15 bp, Homo sapiens
ggctgatgaccacag

SEQ ID NO: 1064055 - DNA, 15 bp, Homo sapiens
gggctgatgaccaca

SEQ ID NO: 1064056 - DNA, 15 bp, Homo sapiens
tgggctgatgaccac

SEQ ID NO: 1064057 - DNA, 15 bp, Homo sapiens
ctgggctgatgacca

SEQ ID NO: 1064058 - DNA, 15 bp, Homo sapiens
gctgggctgatgacc

SEQ ID NO: 1064059 - DNA, 15 bp, Homo sapiens
ggctgggctgatgac

SEQ ID NO: 1064060 - DNA, 15 bp, Homo sapiens
gggctgggctgatga

SEQ ID NO: 1064061 - DNA, 15 bp, Homo sapiens
agggctgggctgatg

SEQ ID NO: 1064062 - DNA, 15 bp, Homo sapiens
gagggctgggctgat

SEQ ID NO: 1064063 - DNA, 15 bp, Homo sapiens
agagggctgggctga

SEQ ID NO: 1064064 - DNA, 15 bp, Homo sapiens
gagagggctgggctg

SEQ ID NO: 1064065 - DNA, 15 bp, Homo sapiens
ggagagggctgggct

SEQ ID NO: 1064066 - DNA, 15 bp, Homo sapiens
gtggagagggctggg

SEQ ID NO: 1064067 - DNA, 15 bp, Homo sapiens
agtggagagggctgg

SEQ ID NO: 1064068 - DNA, 15 bp, Homo sapiens
tagtggagagggctg

SEQ ID NO: 1064069 - DNA, 15 bp, Homo sapiens
atagtggagagggct

SEQ ID NO: 1064070 - DNA, 15 bp, Homo sapiens
gatagtggagagggc

SEQ ID NO: 1064071 - DNA, 15 bp, Homo sapiens
tgatagtggagaggg

SEQ ID NO: 1064072 - DNA, 15 bp, Homo sapiens
ttgatagtggagagg

SEQ ID NO: 1064073 - DNA, 15 bp, Homo sapiens
attgatagtggagag

SEQ ID NO: 1064074 - DNA, 15 bp, Homo sapiens
tattgatagtggaga

SEQ ID NO: 1064075 - DNA, 15 bp, Homo sapiens
ctattgatagtggag

SEQ ID NO: 1064076 - DNA, 15 bp, Homo sapiens
tctattgatagtgga

SEQ ID NO: 1064077 - DNA, 15 bp, Homo sapiens
ttctattgatagtgg

SEQ ID NO: 1064078 - DNA, 15 bp, Homo sapiens
tttctattgatagtg

SEQ ID NO: 1064079 - DNA, 15 bp, Homo sapiens
ttttctattgatagt

SEQ ID NO: 1064080 - DNA, 15 bp, Homo sapiens
cttttctattgatag

SEQ ID NO: 1064081 - DNA, 15 bp, Homo sapiens
gcttttctattgata

SEQ ID NO: 1064082 - DNA, 15 bp, Homo sapiens
ggcttttctattgat

SEQ ID NO: 1064083 - DNA, 15 bp, Homo sapiens
gggcttttctattga

SEQ ID NO: 1064084 - DNA, 15 bp, Homo sapiens
cgggcttttctattg

SEQ ID NO: 1064085 - DNA, 15 bp, Homo sapiens
tcgggcttttctatt

SEQ ID NO: 1064086 - DNA, 15 bp, Homo sapiens
ctcgggcttttctat

SEQ ID NO: 1064087 - DNA, 15 bp, Homo sapiens
tctcgggcttttcta

SEQ ID NO: 1064088 - DNA, 15 bp, Homo sapiens
ctctcgggcttttct

SEQ ID NO: 1064089 - DNA, 15 bp, Homo sapiens
gctctcgggcttttc

SEQ ID NO: 1064090 - DNA, 15 bp, Homo sapiens
ggctctcgggctttt

SEQ ID NO: 1064091 - DNA, 15 bp, Homo sapiens
gggctctcgggcttt

SEQ ID NO: 1064092 - DNA, 15 bp, Homo sapiens
agggctctcgggctt

SEQ ID NO: 1064093 - DNA, 15 bp, Homo sapiens
gagggctctcgggct

SEQ ID NO: 1064094 - DNA, 15 bp, Homo sapiens
tgagggctctcgggc

SEQ ID NO: 1064095 - DNA, 15 bp, Homo sapiens
ctgagggctctcggg

SEQ ID NO: 1064096 - DNA, 15 bp, Homo sapiens
tctgagggctctcgg

SEQ ID NO: 1064097 - DNA, 15 bp, Homo sapiens
ctctgagggctctcg

SEQ ID NO: 1064098 - DNA, 15 bp, Homo sapiens
tctctgagggctctc

SEQ ID NO: 1064099 - DNA, 15 bp, Homo sapiens
ctctctgagggctct

SEQ ID NO: 1064100 - DNA, 15 bp, Homo sapiens
gctctctgagggctc

SEQ ID NO: 1064101 - DNA, 15 bp, Homo sapiens
ggctctctgagggct

SEQ ID NO: 1064102 - DNA, 15 bp, Homo sapiens
aggctctctgagggc

SEQ ID NO: 1064103 - DNA, 15 bp, Homo sapiens
caggctctctgaggg

SEQ ID NO: 1064104 - DNA, 15 bp, Homo sapiens
ccaggctctctgagg

SEQ ID NO: 1064105 - DNA, 15 bp, Homo sapiens
tccaggctctctgag

SEQ ID NO: 1064106 - DNA, 15 bp, Homo sapiens
ttccaggctctctga

SEQ ID NO: 1064107 - DNA, 15 bp, Homo sapiens
attccaggctctctg

SEQ ID NO: 1064108 - DNA, 15 bp, Homo sapiens
cattccaggctctct

SEQ ID NO: 1064109 - DNA, 15 bp, Homo sapiens
acattccaggctctc

SEQ ID NO: 1064110 - DNA, 15 bp, Homo sapiens
cacattccaggctct

SEQ ID NO: 1064111 - DNA, 15 bp, Homo sapiens
gcacattccaggctc

SEQ ID NO: 1064112 - DNA, 15 bp, Homo sapiens
agcacattccaggct

SEQ ID NO: 1064113 - DNA, 15 bp, Homo sapiens
gagcacattccaggc

SEQ ID NO: 1064114 - DNA, 15 bp, Homo sapiens
ggagcacattccagg

SEQ ID NO: 1064115 - DNA, 15 bp, Homo sapiens
gggagcacattccag

SEQ ID NO: 1064116 - DNA, 15 bp, Homo sapiens
tgggagcacattcca

SEQ ID NO: 1064117 - DNA, 15 bp, Homo sapiens
gtgggagcacattcc

SEQ ID NO: 1064118 - DNA, 15 bp, Homo sapiens
ggtgggagcacattc

SEQ ID NO: 1064119 - DNA, 15 bp, Homo sapiens
cggtgggagcacatt

SEQ ID NO: 1064120 - DNA, 15 bp, Homo sapiens
gcggtgggagcacat

SEQ ID NO: 1064121 - DNA, 15 bp, Homo sapiens
agcggtgggagcaca

SEQ ID NO: 1064122 - DNA, 15 bp, Homo sapiens
cagcggtgggagcac

SEQ ID NO: 1064123 - DNA, 15 bp, Homo sapiens
acagcggtgggagca

SEQ ID NO: 1064124 - DNA, 15 bp, Homo sapiens
cacagcggtgggagc

SEQ ID NO: 1064125 - DNA, 15 bp, Homo sapiens
tcacagcggtgggag

SEQ ID NO: 1064126 - DNA, 15 bp, Homo sapiens
atcacagcggtggga

SEQ ID NO: 1064127 - DNA, 15 bp, Homo sapiens
catcacagcggtggg

SEQ ID NO: 1064128 - DNA, 15 bp, Homo sapiens
acatcacagcggtgg

SEQ ID NO: 1064129 - DNA, 15 bp, Homo sapiens
gacatcacagcggtg

SEQ ID NO: 1064130 - DNA, 15 bp, Homo sapiens
tgacatcacagcggt

SEQ ID NO: 1064131 - DNA, 15 bp, Homo sapiens
atgacatcacagcgg

SEQ ID NO: 1064132 - DNA, 15 bp, Homo sapiens
gatgacatcacagcg

SEQ ID NO: 1064133 - DNA, 15 bp, Homo sapiens
ggatgacatcacagc

SEQ ID NO: 1064134 - DNA, 15 bp, Homo sapiens
gggatgacatcacag

SEQ ID NO: 1064135 - DNA, 15 bp, Homo sapiens
tgggatgacatcaca

SEQ ID NO: 1064136 - DNA, 15 bp, Homo sapiens
gtgggatgacatcac

SEQ ID NO: 1064137 - DNA, 15 bp, Homo sapiens
tgtgggatgacatca

SEQ ID NO: 1064138 - DNA, 15 bp, Homo sapiens
atgtgggatgacatc

SEQ ID NO: 1064139 - DNA, 15 bp, Homo sapiens
gatgtgggatgacat

SEQ ID NO: 1064140 - DNA, 15 bp, Homo sapiens
tgatgtgggatgaca

SEQ ID NO: 1064141 - DNA, 15 bp, Homo sapiens
atgatgtgggatgac

SEQ ID NO: 1064142 - DNA, 15 bp, Homo sapiens
gatgatgtgggatga

SEQ ID NO: 1064143 - DNA, 15 bp, Homo sapiens
ggatgatgtgggatg

SEQ ID NO: 1064144 - DNA, 15 bp, Homo sapiens
tggatgatgtgggat

SEQ ID NO: 1064145 - DNA, 15 bp, Homo sapiens
atggatgatgtggga

SEQ ID NO: 1064146 - DNA, 15 bp, Homo sapiens
catggatgatgtggg

SEQ ID NO: 1064147 - DNA, 15 bp, Homo sapiens
acatggatgatgtgg

SEQ ID NO: 1064148 - DNA, 15 bp, Homo sapiens
cacatggatgatgtg

SEQ ID NO: 1064149 - DNA, 15 bp, Homo sapiens
gcacatggatgatgt

SEQ ID NO: 1064150 - DNA, 15 bp, Homo sapiens
agcacatggatgatg

SEQ ID NO: 1064151 - DNA, 15 bp, Homo sapiens
cagcacatggatgat

SEQ ID NO: 1064152 - DNA, 15 bp, Homo sapiens
tcagcacatggatga

SEQ ID NO: 1064153 - DNA, 15 bp, Homo sapiens
ttcagcacatggatg

SEQ ID NO: 1064154 - DNA, 15 bp, Homo sapiens
tttcagcacatggat

SEQ ID NO: 1064155 - DNA, 15 bp, Homo sapiens
atttcagcacatgga

SEQ ID NO: 1064156 - DNA, 15 bp, Homo sapiens
gatttcagcacatgg

SEQ ID NO: 1064157 - DNA, 15 bp, Homo sapiens
tgatttcagcacatg

SEQ ID NO: 1064158 - DNA, 15 bp, Homo sapiens
ctgatttcagcacat

SEQ ID NO: 1064159 - DNA, 15 bp, Homo sapiens
cctgatttcagcaca

SEQ ID NO: 1064160 - DNA, 15 bp, Homo sapiens
ccctgatttcagcac

SEQ ID NO: 1064161 - DNA, 15 bp, Homo sapiens
tccctgatttcagca

SEQ ID NO: 1064162 - DNA, 15 bp, Homo sapiens
gtccctgatttcagc

SEQ ID NO: 1064163 - DNA, 15 bp, Homo sapiens
agtccctgatttcag

SEQ ID NO: 1064164 - DNA, 15 bp, Homo sapiens
cagtccctgatttca

SEQ ID NO: 1064165 - DNA, 15 bp, Homo sapiens
ccagtccctgatttc

SEQ ID NO: 1064166 - DNA, 15 bp, Homo sapiens
tccagtccctgattt

SEQ ID NO: 1064167 - DNA, 15 bp, Homo sapiens
ctccagtccctgatt

SEQ ID NO: 1064168 - DNA, 15 bp, Homo sapiens
actccagtccctgat

SEQ ID NO: 1064169 - DNA, 15 bp, Homo sapiens
gactccagtccctga

SEQ ID NO: 1064170 - DNA, 15 bp, Homo sapiens
cgactccagtccctg

SEQ ID NO: 1064171 - DNA, 15 bp, Homo sapiens
ccgactccagtccct

SEQ ID NO: 1064172 - DNA, 15 bp, Homo sapiens
gccgactccagtccc

SEQ ID NO: 1064173 - DNA, 15 bp, Homo sapiens
ggccgactccagtcc

SEQ ID NO: 1064174 - DNA, 15 bp, Homo sapiens
gggccgactccagtc

SEQ ID NO: 1064175 - DNA, 15 bp, Homo sapiens
ggggccgactccagt

SEQ ID NO: 1064176 - DNA, 15 bp, Homo sapiens
gggggccgactccag

SEQ ID NO: 1064177 - DNA, 15 bp, Homo sapiens
tgggggccgactcca

SEQ ID NO: 1064178 - DNA, 15 bp, Homo sapiens
ctgggggccgactcc

SEQ ID NO: 1064179 - DNA, 15 bp, Homo sapiens
cctgggggccgactc

SEQ ID NO: 1064180 - DNA, 15 bp, Homo sapiens
tcctgggggccgact

SEQ ID NO: 1064181 - DNA, 15 bp, Homo sapiens
ttcctgggggccgac

SEQ ID NO: 1064182 - DNA, 15 bp, Homo sapiens
attcctgggggccga

SEQ ID NO: 1064183 - DNA, 15 bp, Homo sapiens
cattcctgggggccg

SEQ ID NO: 1064184 - DNA, 15 bp, Homo sapiens
acattcctgggggcc

SEQ ID NO: 1064185 - DNA, 15 bp, Homo sapiens
gacattcctgggggc

SEQ ID NO: 1064186 - DNA, 15 bp, Homo sapiens
tgacattcctggggg

SEQ ID NO: 1064187 - DNA, 15 bp, Homo sapiens
atgacattcctgggg

SEQ ID NO: 1064188 - DNA, 15 bp, Homo sapiens
catgacattcctggg

SEQ ID NO: 1064189 - DNA, 15 bp, Homo sapiens
ccatgacattcctgg

SEQ ID NO: 1064190 - DNA, 15 bp, Homo sapiens
gccatgacattcctg

SEQ ID NO: 1064191 - DNA, 15 bp, Homo sapiens
ggccatgacattcct

SEQ ID NO: 1064192 - DNA, 15 bp, Homo sapiens
tggccatgacattcc

SEQ ID NO: 1064193 - DNA, 15 bp, Homo sapiens
atggccatgacattc

SEQ ID NO: 1064194 - DNA, 15 bp, Homo sapiens
catggccatgacatt

SEQ ID NO: 1064195 - DNA, 15 bp, Homo sapiens
ccatggccatgacat

SEQ ID NO: 1064196 - DNA, 15 bp, Homo sapiens
cccatggccatgaca

SEQ ID NO: 1064197 - DNA, 15 bp, Homo sapiens
gcccatggccatgac

SEQ ID NO: 1064198 - DNA, 15 bp, Homo sapiens
agcccatggccatga

SEQ ID NO: 1064199 - DNA, 15 bp, Homo sapiens
aagcccatggccatg

SEQ ID NO: 1064200 - DNA, 15 bp, Homo sapiens
aaagcccatggccat

SEQ ID NO: 1064201 - DNA, 15 bp, Homo sapiens
caaagcccatggcca

SEQ ID NO: 1064202 - DNA, 15 bp, Homo sapiens
tcaaagcccatggcc

SEQ ID NO: 1064203 - DNA, 15 bp, Homo sapiens
ctcaaagcccatggc

SEQ ID NO: 1064204 - DNA, 15 bp, Homo sapiens
tctcaaagcccatgg

SEQ ID NO: 1064205 - DNA, 15 bp, Homo sapiens
gtctcaaagcccatg

SEQ ID NO: 1064206 - DNA, 15 bp, Homo sapiens
tgtctcaaagcccat

SEQ ID NO: 1064207 - DNA, 15 bp, Homo sapiens
gtgtctcaaagccca

SEQ ID NO: 1064208 - DNA, 15 bp, Homo sapiens
agtgtctcaaagccc

SEQ ID NO: 1064209 - DNA, 15 bp, Homo sapiens
gagtgtctcaaagcc

SEQ ID NO: 1064210 - DNA, 15 bp, Homo sapiens
agagtgtctcaaagc

SEQ ID NO: 1064211 - DNA, 15 bp, Homo sapiens
aagagtgtctcaaag

SEQ ID NO: 1064212 - DNA, 15 bp, Homo sapiens
gaagagtgtctcaaa

SEQ ID NO: 1064213 - DNA, 15 bp, Homo sapiens
agaagagtgtctcaa

SEQ ID NO: 1064214 - DNA, 15 bp, Homo sapiens
aagaagagtgtctca

SEQ ID NO: 1064215 - DNA, 15 bp, Homo sapiens
taagaagagtgtctc

SEQ ID NO: 1064216 - DNA, 15 bp, Homo sapiens
ataagaagagtgtct

SEQ ID NO: 1064217 - DNA, 15 bp, Homo sapiens
cataagaagagtgtc

SEQ ID NO: 1064218 - DNA, 15 bp, Homo sapiens
ccataagaagagtgt

SEQ ID NO: 1064219 - DNA, 15 bp, Homo sapiens
cccataagaagagtg

SEQ ID NO: 1064220 - DNA, 15 bp, Homo sapiens
gcccataagaagagt

SEQ ID NO: 1064221 - DNA, 15 bp, Homo sapiens
ggcccataagaagag

SEQ ID NO: 1064222 - DNA, 15 bp, Homo sapiens
aggcccataagaaga

SEQ ID NO: 1064223 - DNA, 15 bp, Homo sapiens
aaggcccataagaag

SEQ ID NO: 1064224 - DNA, 15 bp, Homo sapiens
aaaggcccataagaa

SEQ ID NO: 1064225 - DNA, 15 bp, Homo sapiens
gaaaggcccataaga

SEQ ID NO: 1064226 - DNA, 15 bp, Homo sapiens
tgaaaggcccataag

SEQ ID NO: 1064227 - DNA, 15 bp, Homo sapiens
gtgaaaggcccataa

SEQ ID NO: 1064228 - DNA, 15 bp, Homo sapiens
ggtgaaaggcccata

SEQ ID NO: 1064229 - DNA, 15 bp, Homo sapiens
gggtgaaaggcccat

SEQ ID NO: 1064230 - DNA, 15 bp, Homo sapiens
tgggtgaaaggccca

SEQ ID NO: 1064231 - DNA, 15 bp, Homo sapiens
ttgggtgaaaggccc

SEQ ID NO: 1064232 - DNA, 15 bp, Homo sapiens
attgggtgaaaggcc

SEQ ID NO: 1064233 - DNA, 15 bp, Homo sapiens
gattgggtgaaaggc

SEQ ID NO: 1064234 - DNA, 15 bp, Homo sapiens
ggattgggtgaaagg

SEQ ID NO: 1064235 - DNA, 15 bp, Homo sapiens
tggattgggtgaaag

SEQ ID NO: 1064236 - DNA, 15 bp, Homo sapiens
ctggattgggtgaaa

SEQ ID NO: 1064237 - DNA, 15 bp, Homo sapiens
tctggattgggtgaa

SEQ ID NO: 1064238 - DNA, 15 bp, Homo sapiens
gtctggattgggtga

SEQ ID NO: 1064239 - DNA, 15 bp, Homo sapiens
ggtctggattgggtg

SEQ ID NO: 1064240 - DNA, 15 bp, Homo sapiens
aggtctggattgggt

SEQ ID NO: 1064241 - DNA, 15 bp, Homo sapiens
aaggtctggattggg

SEQ ID NO: 1064242 - DNA, 15 bp, Homo sapiens
caaggtctggattgg

SEQ ID NO: 1064243 - DNA, 15 bp, Homo sapiens
gcaaggtctggattg

SEQ ID NO: 1064244 - DNA, 15 bp, Homo sapiens
ggcaaggtctggatt

SEQ ID NO: 1064245 - DNA, 15 bp, Homo sapiens
aggcaaggtctggat

SEQ ID NO: 1064246 - DNA, 15 bp, Homo sapiens
caggcaaggtctgga

SEQ ID NO: 1064247 - DNA, 15 bp, Homo sapiens
gcaggcaaggtctgg

SEQ ID NO: 1064248 - DNA, 15 bp, Homo sapiens
agcaggcaaggtctg

SEQ ID NO: 1064249 - DNA, 15 bp, Homo sapiens
gagcaggcaaggtct

SEQ ID NO: 1064250 - DNA, 15 bp, Homo sapiens
agagcaggcaaggtc

SEQ ID NO: 1064251 - DNA, 15 bp, Homo sapiens
aagagcaggcaaggt

SEQ ID NO: 1064252 - DNA, 15 bp, Homo sapiens
gaagagcaggcaagg

SEQ ID NO: 1064253 - DNA, 15 bp, Homo sapiens
tgaagagcaggcaag

SEQ ID NO: 1064254 - DNA, 15 bp, Homo sapiens
ctgaagagcaggcaa

SEQ ID NO: 1064255 - DNA, 15 bp, Homo sapiens
tctgaagagcaggca

SEQ ID NO: 1064256 - DNA, 15 bp, Homo sapiens
ctctgaagagcaggc

SEQ ID NO: 1064257 - DNA, 15 bp, Homo sapiens
gctctgaagagcagg

SEQ ID NO: 1064258 - DNA, 15 bp, Homo sapiens
agctctgaagagcag

SEQ ID NO: 1064259 - DNA, 15 bp, Homo sapiens
cagctctgaagagca

SEQ ID NO: 1064260 - DNA, 15 bp, Homo sapiens
gcagctctgaagagc

SEQ ID NO: 1064261 - DNA, 15 bp, Homo sapiens
agcagctctgaagag

SEQ ID NO: 1064262 - DNA, 15 bp, Homo sapiens
aagcagctctgaaga

SEQ ID NO: 1064263 - DNA, 15 bp, Homo sapiens
caagcagctctgaag

SEQ ID NO: 1064264 - DNA, 15 bp, Homo sapiens
tcaagcagctctgaa

SEQ ID NO: 1064265 - DNA, 15 bp, Homo sapiens
ttcaagcagctctga

SEQ ID NO: 1064266 - DNA, 15 bp, Homo sapiens
cttcaagcagctctg

SEQ ID NO: 1064267 - DNA, 15 bp, Homo sapiens
ccttcaagcagctct

SEQ ID NO: 1064268 - DNA, 15 bp, Homo sapiens
tccttcaagcagctc

SEQ ID NO: 1064269 - DNA, 15 bp, Homo sapiens
atccttcaagcagct

SEQ ID NO: 1064270 - DNA, 15 bp, Homo sapiens
aatccttcaagcagc

SEQ ID NO: 1064271 - DNA, 15 bp, Homo sapiens
aaatccttcaagcag

SEQ ID NO: 1064272 - DNA, 15 bp, Homo sapiens
aaaatccttcaagca

SEQ ID NO: 1064273 - DNA, 15 bp, Homo sapiens
caaaatccttcaagc

SEQ ID NO: 1064274 - DNA, 15 bp, Homo sapiens
gcaaaatccttcaag

SEQ ID NO: 1064275 - DNA, 15 bp, Homo sapiens
agcaaaatccttcaa

SEQ ID NO: 1064276 - DNA, 15 bp, Homo sapiens
tagcaaaatccttca

SEQ ID NO: 1064277 - DNA, 15 bp, Homo sapiens
gtagcaaaatccttc

SEQ ID NO: 1064278 - DNA, 15 bp, Homo sapiens
tgtagcaaaatcctt

SEQ ID NO: 1064279 - DNA, 15 bp, Homo sapiens
ctgtagcaaaatcct

SEQ ID NO: 1064280 - DNA, 15 bp, Homo sapiens
tctgtagcaaaatcc

SEQ ID NO: 1064281 - DNA, 15 bp, Homo sapiens
ttctgtagcaaaatc

SEQ ID NO: 1064282 - DNA, 15 bp, Homo sapiens
gttctgtagcaaaat

SEQ ID NO: 1064283 - DNA, 15 bp, Homo sapiens
agttctgtagcaaaa

SEQ ID NO: 1064284 - DNA, 15 bp, Homo sapiens
tagttctgtagcaaa

SEQ ID NO: 1064285 - DNA, 15 bp, Homo sapiens
atagttctgtagcaa

SEQ ID NO: 1064286 - DNA, 15 bp, Homo sapiens
catagttctgtagca

SEQ ID NO: 1064287 - DNA, 15 bp, Homo sapiens
ccatagttctgtagc

SEQ ID NO: 1064288 - DNA, 15 bp, Homo sapiens
tccatagttctgtag

SEQ ID NO: 1064289 - DNA, 15 bp, Homo sapiens
gtccatagttctgta

SEQ ID NO: 1064290 - DNA, 15 bp, Homo sapiens
tgtccatagttctgt

SEQ ID NO: 1064291 - DNA, 15 bp, Homo sapiens
atgtccatagttctg

SEQ ID NO: 1064292 - DNA, 15 bp, Homo sapiens
aatgtccatagttct

SEQ ID NO: 1064293 - DNA, 15 bp, Homo sapiens
aaatgtccatagttc

SEQ ID NO: 1064294 - DNA, 15 bp, Homo sapiens
taaatgtccatagtt

SEQ ID NO: 1064295 - DNA, 15 bp, Homo sapiens
ttaaatgtccatagt

SEQ ID NO: 1064296 - DNA, 15 bp, Homo sapiens
cttaaatgtccatag

SEQ ID NO: 1064297 - DNA, 15 bp, Homo sapiens
tcttaaatgtccata

SEQ ID NO: 1064298 - DNA, 15 bp, Homo sapiens
ttcttaaatgtccat

SEQ ID NO: 1064299 - DNA, 15 bp, Homo sapiens
tttcttaaatgtcca

SEQ ID NO: 1064300 - DNA, 15 bp, Homo sapiens
atttcttaaatgtcc

SEQ ID NO: 1064301 - DNA, 15 bp, Homo sapiens
catttcttaaatgtc

SEQ ID NO: 1064302 - DNA, 15 bp, Homo sapiens
acatttcttaaatgt

SEQ ID NO: 1064303 - DNA, 15 bp, Homo sapiens
gacatttcttaaatg

SEQ ID NO: 1064304 - DNA, 15 bp, Homo sapiens
agacatttcttaaat

SEQ ID NO: 1064305 - DNA, 15 bp, Homo sapiens
tagacatttcttaaa

SEQ ID NO: 1064306 - DNA, 15 bp, Homo sapiens
ttagacatttcttaa

SEQ ID NO: 1064307 - DNA, 15 bp, Homo sapiens
gttagacatttctta

SEQ ID NO: 1064308 - DNA, 15 bp, Homo sapiens
ggttagacatttctt

SEQ ID NO: 1064309 - DNA, 15 bp, Homo sapiens
aggttagacatttct

SEQ ID NO: 1064310 - DNA, 15 bp, Homo sapiens
aaggttagacatttc

SEQ ID NO: 1064311 - DNA, 15 bp, Homo sapiens
caaggttagacattt

SEQ ID NO: 1064312 - DNA, 15 bp, Homo sapiens
acaaggttagacatt

SEQ ID NO: 1064313 - DNA, 15 bp, Homo sapiens
cacaaggttagacat

SEQ ID NO: 1064314 - DNA, 15 bp, Homo sapiens
acacaaggttagaca

SEQ ID NO: 1064315 - DNA, 15 bp, Homo sapiens
gacacaaggttagac

SEQ ID NO: 1064316 - DNA, 15 bp, Homo sapiens
tgacacaaggttaga

SEQ ID NO: 1064317 - DNA, 15 bp, Homo sapiens
ctgacacaaggttag

SEQ ID NO: 1064318 - DNA, 15 bp, Homo sapiens
actgacacaaggtta

SEQ ID NO: 1064319 - DNA, 15 bp, Homo sapiens
aactgacacaaggtt

SEQ ID NO: 1064320 - DNA, 15 bp, Homo sapiens
aaactgacacaaggt

SEQ ID NO: 1064321 - DNA, 15 bp, Homo sapiens
taaactgacacaagg

SEQ ID NO: 1064322 - DNA, 15 bp, Homo sapiens
ataaactgacacaag

SEQ ID NO: 1064323 - DNA, 15 bp, Homo sapiens
tataaactgacacaa

SEQ ID NO: 1064324 - DNA, 15 bp, Homo sapiens
atataaactgacaca

SEQ ID NO: 1064325 - DNA, 15 bp, Homo sapiens
aatataaactgacac

SEQ ID NO: 1064326 - DNA, 15 bp, Homo sapiens
aaatataaactgaca

SEQ ID NO: 1064327 - DNA, 15 bp, Homo sapiens
caaatataaactgac

SEQ ID NO: 1064328 - DNA, 15 bp, Homo sapiens
acaaatataaactga

SEQ ID NO: 1064329 - DNA, 15 bp, Homo sapiens
tacaaatataaactg

SEQ ID NO: 1064330 - DNA, 15 bp, Homo sapiens
ctacaaatataaact

SEQ ID NO: 1064331 - DNA, 15 bp, Homo sapiens
tctacaaatataaac

SEQ ID NO: 1064332 - DNA, 15 bp, Homo sapiens
ttctacaaatataaa

SEQ ID NO: 1064333 - DNA, 15 bp, Homo sapiens
gttctacaaatataa

SEQ ID NO: 1064334 - DNA, 15 bp, Homo sapiens
cgttctacaaatata

SEQ ID NO: 1064335 - DNA, 15 bp, Homo sapiens
gcgttctacaaatat

SEQ ID NO: 1064336 - DNA, 15 bp, Homo sapiens
agcgttctacaaata

SEQ ID NO: 1064337 - DNA, 15 bp, Homo sapiens
aagcgttctacaaat

SEQ ID NO: 1064338 - DNA, 15 bp, Homo sapiens
gaagcgttctacaaa

SEQ ID NO: 1064339 - DNA, 15 bp, Homo sapiens
tgaagcgttctacaa

SEQ ID NO: 1064340 - DNA, 15 bp, Homo sapiens
atgaagcgttctaca

SEQ ID NO: 1064341 - DNA, 15 bp, Homo sapiens
tatgaagcgttctac

SEQ ID NO: 1064342 - DNA, 15 bp, Homo sapiens
ttatgaagcgttcta

SEQ ID NO: 1064343 - DNA, 15 bp, Homo sapiens
cttatgaagcgttct

SEQ ID NO: 1064344 - DNA, 15 bp, Homo sapiens
ccttatgaagcgttc

SEQ ID NO: 1064345 - DNA, 15 bp, Homo sapiens
accttatgaagcgtt

SEQ ID NO: 1064346 - DNA, 15 bp, Homo sapiens
caccttatgaagcgt

SEQ ID NO: 1064347 - DNA, 15 bp, Homo sapiens
gcaccttatgaagcg

SEQ ID NO: 1064348 - DNA, 15 bp, Homo sapiens
agcaccttatgaagc

SEQ ID NO: 1064349 - DNA, 15 bp, Homo sapiens
aagcaccttatgaag

SEQ ID NO: 1064350 - DNA, 15 bp, Homo sapiens
aaagcaccttatgaa

SEQ ID NO: 1064351 - DNA, 15 bp, Homo sapiens
aaaagcaccttatga

SEQ ID NO: 1064352 - DNA, 15 bp, Homo sapiens
ggaaaagcaccttat

SEQ ID NO: 1064353 - DNA, 15 bp, Homo sapiens
tggaaaagcacctta

SEQ ID NO: 1064354 - DNA, 15 bp, Homo sapiens
atggaaaagcacctt

SEQ ID NO: 1064355 - DNA, 15 bp, Homo sapiens
tatggaaaagcacct

SEQ ID NO: 1064356 - DNA, 15 bp, Homo sapiens
atatggaaaagcacc

SEQ ID NO: 1064357 - DNA, 15 bp, Homo sapiens
catatggaaaagcac

SEQ ID NO: 1064358 - DNA, 15 bp, Homo sapiens
acatatggaaaagca

SEQ ID NO: 1064359 - DNA, 15 bp, Homo sapiens
aacatatggaaaagc

SEQ ID NO: 1064360 - DNA, 15 bp, Homo sapiens
taacatatggaaaag

SEQ ID NO: 1064361 - DNA, 15 bp, Homo sapiens
ataacatatggaaaa

SEQ ID NO: 1064362 - DNA, 15 bp, Homo sapiens
gataacatatggaaa

SEQ ID NO: 1064363 - DNA, 15 bp, Homo sapiens
agataacatatggaa

SEQ ID NO: 1064364 - DNA, 15 bp, Homo sapiens
gagataacatatgga

SEQ ID NO: 1064365 - DNA, 15 bp, Homo sapiens
tgagataacatatgg

SEQ ID NO: 1064366 - DNA, 15 bp, Homo sapiens
atgagataacatatg

SEQ ID NO: 1064367 - DNA, 15 bp, Homo sapiens
gatgagataacatat

SEQ ID NO: 1064368 - DNA, 15 bp, Homo sapiens
agatgagataacata

SEQ ID NO: 1064369 - DNA, 15 bp, Homo sapiens
cagatgagataacat

SEQ ID NO: 1064370 - DNA, 15 bp, Homo sapiens
tcagatgagataaca

SEQ ID NO: 1064371 - DNA, 15 bp, Homo sapiens
atcagatgagataac

SEQ ID NO: 1064372 - DNA, 15 bp, Homo sapiens
gatcagatgagataa

SEQ ID NO: 1064373 - DNA, 15 bp, Homo sapiens
tgatcagatgagata

SEQ ID NO: 1064374 - DNA, 15 bp, Homo sapiens
atgatcagatgagat

SEQ ID NO: 1064375 - DNA, 15 bp, Homo sapiens
aatgatcagatgaga

SEQ ID NO: 1064376 - DNA, 15 bp, Homo sapiens
aaatgatcagatgag

SEQ ID NO: 1064377 - DNA, 15 bp, Homo sapiens
gaaatgatcagatga

SEQ ID NO: 1064378 - DNA, 15 bp, Homo sapiens
ggaaatgatcagatg

SEQ ID NO: 1064379 - DNA, 15 bp, Homo sapiens
tggaaatgatcagat

SEQ ID NO: 1064380 - DNA, 15 bp, Homo sapiens
gtggaaatgatcaga

SEQ ID NO: 1064381 - DNA, 15 bp, Homo sapiens
tgtggaaatgatcag

SEQ ID NO: 1064382 - DNA, 15 bp, Homo sapiens
ttgtggaaatgatca

SEQ ID NO: 1064383 - DNA, 15 bp, Homo sapiens
gttgtggaaatgatc

SEQ ID NO: 1064384 - DNA, 15 bp, Homo sapiens
ggttgtggaaatgat

SEQ ID NO: 1064385 - DNA, 15 bp, Homo sapiens
gggttgtggaaatga

SEQ ID NO: 1064386 - DNA, 15 bp, Homo sapiens
ggggttgtggaaatg

SEQ ID NO: 1064387 - DNA, 15 bp, Homo sapiens
tggggttgtggaaat

SEQ ID NO: 1064388 - DNA, 15 bp, Homo sapiens
atggggttgtggaaa

SEQ ID NO: 1064389 - DNA, 15 bp, Homo sapiens
tatggggttgtggaa

SEQ ID NO: 1064390 - DNA, 15 bp, Homo sapiens
ttatggggttgtgga

SEQ ID NO: 1064391 - DNA, 15 bp, Homo sapiens
cttatggggttgtgg

SEQ ID NO: 1064392 - DNA, 15 bp, Homo sapiens
ccttatggggttgtg

SEQ ID NO: 1064393 - DNA, 15 bp, Homo sapiens
accttatggggttgt

SEQ ID NO: 1064394 - DNA, 15 bp, Homo sapiens
taccttatggggttg

SEQ ID NO: 1064395 - DNA, 15 bp, Homo sapiens
ctaccttatggggtt

SEQ ID NO: 1064396 - DNA, 15 bp, Homo sapiens
tctaccttatggggt

SEQ ID NO: 1064397 - DNA, 15 bp, Homo sapiens
atctaccttatgggg

SEQ ID NO: 1064398 - DNA, 15 bp, Homo sapiens
tatctaccttatggg

SEQ ID NO: 1064399 - DNA, 15 bp, Homo sapiens
ttatctaccttatgg

SEQ ID NO: 1064400 - DNA, 15 bp, Homo sapiens
tttatctaccttatg

SEQ ID NO: 1064401 - DNA, 15 bp, Homo sapiens
ttttatctaccttat

SEQ ID NO: 1064402 - DNA, 15 bp, Homo sapiens
gttttatctacctta

SEQ ID NO: 1064403 - DNA, 15 bp, Homo sapiens
tgttttatctacctt

SEQ ID NO: 1064404 - DNA, 15 bp, Homo sapiens
atgttttatctacct

SEQ ID NO: 1064405 - DNA, 15 bp, Homo sapiens
tatgttttatctacc

SEQ ID NO: 1064406 - DNA, 15 bp, Homo sapiens
ttatgttttatctac

SEQ ID NO: 1064407 - DNA, 15 bp, Homo sapiens
tttatgttttatcta

SEQ ID NO: 1064408 - DNA, 15 bp, Homo sapiens
atttatgttttatct

SEQ ID NO: 1064409 - DNA, 15 bp, Homo sapiens
aatttatgttttatc

SEQ ID NO: 1064410 - DNA, 15 bp, Homo sapiens
aaatttatgttttat

SEQ ID NO: 1064411 - DNA, 15 bp, Homo sapiens
aaaatttatgtttta

SEQ ID NO: 1064412 - DNA, 15 bp, Homo sapiens
aaaaatttatgtttt

SEQ ID NO: 1064413 - DNA, 15 bp, Homo sapiens
taaaaatttatgttt

SEQ ID NO: 1064414 - DNA, 15 bp, Homo sapiens
ataaaaatttatgtt

SEQ ID NO: 1064415 - DNA, 15 bp, Homo sapiens
aataaaaatttatgt

SEQ ID NO: 1064416 - DNA, 15 bp, Homo sapiens
aaataaaaatttatg

SEQ ID NO: 1064417 - DNA, 15 bp, Homo sapiens
gaaataaaaatttat

SEQ ID NO: 1064418 - DNA, 15 bp, Homo sapiens
ggaaataaaaattta

SEQ ID NO: 1064419 - DNA, 15 bp, Homo sapiens
cggaaataaaaattt

SEQ ID NO: 1064420 - DNA, 15 bp, Homo sapiens
acggaaataaaaatt

SEQ ID NO: 1064421 - DNA, 15 bp, Homo sapiens
tacggaaataaaaat

SEQ ID NO: 1064422 - DNA, 15 bp, Homo sapiens
atacggaaataaaaa

SEQ ID NO: 1064423 - DNA, 15 bp, Homo sapiens
aatacggaaataaaa

SEQ ID NO: 1064424 - DNA, 15 bp, Homo sapiens
taatacggaaataaa

SEQ ID NO: 1064425 - DNA, 15 bp, Homo sapiens
ttaatacggaaataa

SEQ ID NO: 1064426 - DNA, 15 bp, Homo sapiens
tttaatacggaaata

SEQ ID NO: 1064427 - DNA, 15 bp, Homo sapiens
ttttaatacggaaat

SEQ ID NO: 1064428 - DNA, 15 bp, Homo sapiens
attttaatacggaaa

SEQ ID NO: 1064429 - DNA, 15 bp, Homo sapiens
aattttaatacggaa

SEQ ID NO: 1064430 - DNA, 15 bp, Homo sapiens
caattttaatacgga

SEQ ID NO: 1064431 - DNA, 15 bp, Homo sapiens
tcaattttaatacgg

SEQ ID NO: 1064432 - DNA, 15 bp, Homo sapiens
ttcaattttaatacg

SEQ ID NO: 1064433 - DNA, 15 bp, Homo sapiens
cttcaattttaatac

SEQ ID NO: 1064434 - DNA, 15 bp, Homo sapiens
gcttcaattttaata

SEQ ID NO: 1064435 - DNA, 15 bp, Homo sapiens
ggcttcaattttaat

SEQ ID NO: 1064436 - DNA, 15 bp, Homo sapiens
gggcttcaattttaa

SEQ ID NO: 1064437 - DNA, 15 bp, Homo sapiens
tgggcttcaatttta

SEQ ID NO: 1064438 - DNA, 15 bp, Homo sapiens
ctgggcttcaatttt

SEQ ID NO: 1064439 - DNA, 15 bp, Homo sapiens
tctgggcttcaattt

SEQ ID NO: 1064440 - DNA, 15 bp, Homo sapiens
ctctgggcttcaatt

SEQ ID NO: 1064441 - DNA, 15 bp, Homo sapiens
cctctgggcttcaat

SEQ ID NO: 1064442 - DNA, 15 bp, Homo sapiens
tcctctgggcttcaa

SEQ ID NO: 1064443 - DNA, 15 bp, Homo sapiens
ctcctctgggcttca

SEQ ID NO: 1064444 - DNA, 15 bp, Homo sapiens
tctcctctgggcttc

SEQ ID NO: 1064445 - DNA, 15 bp, Homo sapiens
gtctcctctgggctt

SEQ ID NO: 1064446 - DNA, 15 bp, Homo sapiens
agtctcctctgggct

SEQ ID NO: 1064447 - DNA, 15 bp, Homo sapiens
aagtctcctctgggc

SEQ ID NO: 1064448 - DNA, 15 bp, Homo sapiens
aaagtctcctctggg

SEQ ID NO: 1064449 - DNA, 15 bp, Homo sapiens
aaaagtctcctctgg

SEQ ID NO: 1064450 - DNA, 15 bp, Homo sapiens
caaaagtctcctctg

SEQ ID NO: 1064451 - DNA, 15 bp, Homo sapiens
tcaaaagtctcctct

SEQ ID NO: 1064452 - DNA, 15 bp, Homo sapiens
atcaaaagtctcctc

SEQ ID NO: 1064453 - DNA, 15 bp, Homo sapiens
aatcaaaagtctcct

SEQ ID NO: 1064454 - DNA, 15 bp, Homo sapiens
gaatcaaaagtctcc

SEQ ID NO: 1064455 - DNA, 15 bp, Homo sapiens
tgaatcaaaagtctc

SEQ ID NO: 1064456 - DNA, 15 bp, Homo sapiens
atgaatcaaaagtct

SEQ ID NO: 1064457 - DNA, 15 bp, Homo sapiens
gatgaatcaaaagtc

SEQ ID NO: 1064458 - DNA, 15 bp, Homo sapiens
ggatgaatcaaaagt

SEQ ID NO: 1064459 - DNA, 15 bp, Homo sapiens
gggatgaatcaaaag

SEQ ID NO: 1064460 - DNA, 15 bp, Homo sapiens
tgggatgaatcaaaa

SEQ ID NO: 1064461 - DNA, 15 bp, Homo sapiens
ctgggatgaatcaaa

SEQ ID NO: 1064462 - DNA, 15 bp, Homo sapiens
cctgggatgaatcaa

SEQ ID NO: 1064463 - DNA, 15 bp, Homo sapiens
acctgggatgaatca

SEQ ID NO: 1064464 - DNA, 15 bp, Homo sapiens
aacctgggatgaatc

SEQ ID NO: 1064465 - DNA, 15 bp, Homo sapiens
aaacctgggatgaat

SEQ ID NO: 1064466 - DNA, 15 bp, Homo sapiens
gaaacctgggatgaa

SEQ ID NO: 1064467 - DNA, 15 bp, Homo sapiens
tgaaacctgggatga

SEQ ID NO: 1064468 - DNA, 15 bp, Homo sapiens
gtgaaacctgggatg

SEQ ID NO: 1064469 - DNA, 15 bp, Homo sapiens
tgtgaaacctgggat

SEQ ID NO: 1064470 - DNA, 15 bp, Homo sapiens
ttgtgaaacctggga

SEQ ID NO: 1064471 - DNA, 15 bp, Homo sapiens
gttgtgaaacctggg

SEQ ID NO: 1064472 - DNA, 15 bp, Homo sapiens
tgttgtgaaacctgg

SEQ ID NO: 1064473 - DNA, 15 bp, Homo sapiens
ttgttgtgaaacctg

SEQ ID NO: 1064474 - DNA, 15 bp, Homo sapiens
tttgttgtgaaacct

SEQ ID NO: 1064475 - DNA, 15 bp, Homo sapiens
ctttgttgtgaaacc

SEQ ID NO: 1064476 - DNA, 15 bp, Homo sapiens
tctttgttgtgaaac

SEQ ID NO: 1064477 - DNA, 15 bp, Homo sapiens
ctctttgttgtgaaa

SEQ ID NO: 1064478 - DNA, 15 bp, Homo sapiens
actctttgttgtgaa

SEQ ID NO: 1064479 - DNA, 15 bp, Homo sapiens
cactctttgttgtga

SEQ ID NO: 1064480 - DNA, 15 bp, Homo sapiens
acactctttgttgtg

SEQ ID NO: 1064481 - DNA, 15 bp, Homo sapiens
gacactctttgttgt

SEQ ID NO: 1064482 - DNA, 15 bp, Homo sapiens
tgacactctttgttg

SEQ ID NO: 1064483 - DNA, 15 bp, Homo sapiens
ctgacactctttgtt

SEQ ID NO: 1064484 - DNA, 15 bp, Homo sapiens
cctgacactctttgt

SEQ ID NO: 1064485 - DNA, 15 bp, Homo sapiens
tcctgacactctttg

SEQ ID NO: 1064486 - DNA, 15 bp, Homo sapiens
ttcctgacactcttt

SEQ ID NO: 1064487 - DNA, 15 bp, Homo sapiens
cttcctgacactctt

SEQ ID NO: 1064488 - DNA, 15 bp, Homo sapiens
tcttcctgacactct

SEQ ID NO: 1064489 - DNA, 15 bp, Homo sapiens
ctcttcctgacactc

SEQ ID NO: 1064490 - DNA, 15 bp, Homo sapiens
tctcttcctgacact

SEQ ID NO: 1064491 - DNA, 15 bp, Homo sapiens
ttctcttcctgacac

SEQ ID NO: 1064492 - DNA, 15 bp, Homo sapiens
gttctcttcctgaca

SEQ ID NO: 1064493 - DNA, 15 bp, Homo sapiens
agttctcttcctgac

SEQ ID NO: 1064494 - DNA, 15 bp, Homo sapiens
aagttctcttcctga

SEQ ID NO: 1064495 - DNA, 15 bp, Homo sapiens
caagttctcttcctg

SEQ ID NO: 1064496 - DNA, 15 bp, Homo sapiens
tcaagttctcttcct

SEQ ID NO: 1064497 - DNA, 15 bp, Homo sapiens
ttcaagttctcttcc

SEQ ID NO: 1064498 - DNA, 15 bp, Homo sapiens
gttcaagttctcttc

SEQ ID NO: 1064499 - DNA, 15 bp, Homo sapiens
ggttcaagttctctt

SEQ ID NO: 1064500 - DNA, 15 bp, Homo sapiens
tggttcaagttctct

SEQ ID NO: 1064501 - DNA, 15 bp, Homo sapiens
ttggttcaagttctc

SEQ ID NO: 1064502 - DNA, 15 bp, Homo sapiens
attggttcaagttct

SEQ ID NO: 1064503 - DNA, 15 bp, Homo sapiens
gattggttcaagttc

SEQ ID NO: 1064504 - DNA, 15 bp, Homo sapiens
ggattggttcaagtt

SEQ ID NO: 1064505 - DNA, 15 bp, Homo sapiens
aggattggttcaagt

SEQ ID NO: 1064506 - DNA, 15 bp, Homo sapiens
gaggattggttcaag

SEQ ID NO: 1064507 - DNA, 15 bp, Homo sapiens
agaggattggttcaa

SEQ ID NO: 1064508 - DNA, 15 bp, Homo sapiens
cagaggattggttca

SEQ ID NO: 1064509 - DNA, 15 bp, Homo sapiens
tcagaggattggttc

SEQ ID NO: 1064510 - DNA, 15 bp, Homo sapiens
gtcagaggattggtt

SEQ ID NO: 1064511 - DNA, 15 bp, Homo sapiens
agtcagaggattggt

SEQ ID NO: 1064512 - DNA, 15 bp, Homo sapiens
aagtcagaggattgg

SEQ ID NO: 1064513 - DNA, 15 bp, Homo sapiens
gaagtcagaggattg

SEQ ID NO: 1064514 - DNA, 15 bp, Homo sapiens
tgaagtcagaggatt

SEQ ID NO: 1064515 - DNA, 15 bp, Homo sapiens
gtgaagtcagaggat

SEQ ID NO: 1064516 - DNA, 15 bp, Homo sapiens
tgtgaagtcagagga

SEQ ID NO: 1064517 - DNA, 15 bp, Homo sapiens
atgtgaagtcagagg

SEQ ID NO: 1064518 - DNA, 15 bp, Homo sapiens
aatgtgaagtcagag

SEQ ID NO: 1064519 - DNA, 15 bp, Homo sapiens
gaatgtgaagtcaga

SEQ ID NO: 1064520 - DNA, 15 bp, Homo sapiens
tgaatgtgaagtcag

SEQ ID NO: 1064521 - DNA, 15 bp, Homo sapiens
ctgaatgtgaagtca

SEQ ID NO: 1064522 - DNA, 15 bp, Homo sapiens
cctgaatgtgaagtc

SEQ ID NO: 1064523 - DNA, 15 bp, Homo sapiens
ccctgaatgtgaagt

SEQ ID NO: 1064524 - DNA, 15 bp, Homo sapiens
accctgaatgtgaag

SEQ ID NO: 1064525 - DNA, 15 bp, Homo sapiens
aaccctgaatgtgaa

SEQ ID NO: 1064526 - DNA, 15 bp, Homo sapiens
gaaccctgaatgtga

SEQ ID NO: 1064527 - DNA, 15 bp, Homo sapiens
agaaccctgaatgtg

SEQ ID NO: 1064528 - DNA, 15 bp, Homo sapiens
aagaaccctgaatgt

SEQ ID NO: 1064529 - DNA, 15 bp, Homo sapiens
gaagaaccctgaatg

SEQ ID NO: 1064530 - DNA, 15 bp, Homo sapiens
ggaagaaccctgaat

SEQ ID NO: 1064531 - DNA, 15 bp, Homo sapiens
gggaagaaccctgaa

SEQ ID NO: 1064532 - DNA, 15 bp, Homo sapiens
tgggaagaaccctga

SEQ ID NO: 1064533 - DNA, 15 bp, Homo sapiens
atgggaagaaccctg

SEQ ID NO: 1064534 - DNA, 15 bp, Homo sapiens
aatgggaagaaccct

SEQ ID NO: 1064535 - DNA, 15 bp, Homo sapiens
taatgggaagaaccc

SEQ ID NO: 1064536 - DNA, 15 bp, Homo sapiens
gtaatgggaagaacc

SEQ ID NO: 1064537 - DNA, 15 bp, Homo sapiens
agtaatgggaagaac

SEQ ID NO: 1064538 - DNA, 15 bp, Homo sapiens
aagtaatgggaagaa

SEQ ID NO: 1064539 - DNA, 15 bp, Homo sapiens
aaagtaatgggaaga

SEQ ID NO: 1064540 - DNA, 15 bp, Homo sapiens
caaagtaatgggaag

SEQ ID NO: 1064541 - DNA, 15 bp, Homo sapiens
ccaaagtaatgggaa

SEQ ID NO: 1064542 - DNA, 15 bp, Homo sapiens
gccaaagtaatggga

SEQ ID NO: 1064543 - DNA, 15 bp, Homo sapiens
agccaaagtaatggg

SEQ ID NO: 1064544 - DNA, 15 bp, Homo sapiens
gagccaaagtaatgg

SEQ ID NO: 1064545 - DNA, 15 bp, Homo sapiens
ggagccaaagtaatg

SEQ ID NO: 1064546 - DNA, 15 bp, Homo sapiens
gggagccaaagtaat

SEQ ID NO: 1064547 - DNA, 15 bp, Homo sapiens
tgggagccaaagtaa

SEQ ID NO: 1064548 - DNA, 15 bp, Homo sapiens
ctgggagccaaagta

SEQ ID NO: 1064549 - DNA, 15 bp, Homo sapiens
tctgggagccaaagt

SEQ ID NO: 1064550 - DNA, 15 bp, Homo sapiens
atctgggagccaaag

SEQ ID NO: 1064551 - DNA, 15 bp, Homo sapiens
tatctgggagccaaa

SEQ ID NO: 1064552 - DNA, 15 bp, Homo sapiens
ttatctgggagccaa

SEQ ID NO: 1064553 - DNA, 15 bp, Homo sapiens
cttatctgggagcca

SEQ ID NO: 1064554 - DNA, 15 bp, Homo sapiens
tcttatctgggagcc

SEQ ID NO: 1064555 - DNA, 15 bp, Homo sapiens
gtcttatctgggagc

SEQ ID NO: 1064556 - DNA, 15 bp, Homo sapiens
agtcttatctgggag

SEQ ID NO: 1064557 - DNA, 15 bp, Homo sapiens
tagtcttatctggga

SEQ ID NO: 1064558 - DNA, 15 bp, Homo sapiens
gtagtcttatctggg

SEQ ID NO: 1064559 - DNA, 15 bp, Homo sapiens
tgtagtcttatctgg

SEQ ID NO: 1064560 - DNA, 15 bp, Homo sapiens
ttgtagtcttatctg

SEQ ID NO: 1064561 - DNA, 15 bp, Homo sapiens
attgtagtcttatct

SEQ ID NO: 1064562 - DNA, 15 bp, Homo sapiens
gattgtagtcttatc

SEQ ID NO: 1064563 - DNA, 15 bp, Homo sapiens
agattgtagtcttat

SEQ ID NO: 1064564 - DNA, 15 bp, Homo sapiens
aagattgtagtctta

SEQ ID NO: 1064565 - DNA, 15 bp, Homo sapiens
gaagattgtagtctt

SEQ ID NO: 1064566 - DNA, 15 bp, Homo sapiens
agaagattgtagtct

SEQ ID NO: 1064567 - DNA, 15 bp, Homo sapiens
cagaagattgtagtc

SEQ ID NO: 1064568 - DNA, 15 bp, Homo sapiens
tcagaagattgtagt

SEQ ID NO: 1064569 - DNA, 15 bp, Homo sapiens
ttcagaagattgtag

SEQ ID NO: 1064570 - DNA, 15 bp, Homo sapiens
tttcagaagattgta

SEQ ID NO: 1064571 - DNA, 15 bp, Homo sapiens
ctttcagaagattgt

SEQ ID NO: 1064572 - DNA, 15 bp, Homo sapiens
actttcagaagattg

SEQ ID NO: 1064573 - DNA, 15 bp, Homo sapiens
gactttcagaagatt

SEQ ID NO: 1064574 - DNA, 15 bp, Homo sapiens
tgactttcagaagat

SEQ ID NO: 1064575 - DNA, 15 bp, Homo sapiens
ctgactttcagaaga

SEQ ID NO: 1064576 - DNA, 15 bp, Homo sapiens
tctgactttcagaag

SEQ ID NO: 1064577 - DNA, 15 bp, Homo sapiens
ctctgactttcagaa

SEQ ID NO: 1064578 - DNA, 15 bp, Homo sapiens
actctgactttcaga

SEQ ID NO: 1064579 - DNA, 15 bp, Homo sapiens
cactctgactttcag

SEQ ID NO: 1064580 - DNA, 15 bp, Homo sapiens
acactctgactttca

SEQ ID NO: 1064581 - DNA, 15 bp, Homo sapiens
aacactctgactttc

SEQ ID NO: 1064582 - DNA, 15 bp, Homo sapiens
taacactctgacttt

SEQ ID NO: 1064583 - DNA, 15 bp, Homo sapiens
ttaacactctgactt

SEQ ID NO: 1064584 - DNA, 15 bp, Homo sapiens
attaacactctgact

SEQ ID NO: 1064585 - DNA, 15 bp, Homo sapiens
tattaacactctgac

SEQ ID NO: 1064586 - DNA, 15 bp, Homo sapiens
atattaacactctga

SEQ ID NO: 1064587 - DNA, 15 bp, Homo sapiens
aatattaacactctg

SEQ ID NO: 1064588 - DNA, 15 bp, Homo sapiens
gaatattaacactct

SEQ ID NO: 1064589 - DNA, 15 bp, Homo sapiens
ggaatattaacactc

SEQ ID NO: 1064590 - DNA, 15 bp, Homo sapiens
tggaatattaacact

SEQ ID NO: 1064591 - DNA, 15 bp, Homo sapiens
ttggaatattaacac

SEQ ID NO: 1064592 - DNA, 15 bp, Homo sapiens
gttggaatattaaca

SEQ ID NO: 1064593 - DNA, 15 bp, Homo sapiens
ggttggaatattaac

SEQ ID NO: 1064594 - DNA, 15 bp, Homo sapiens
gggttggaatattaa

SEQ ID NO: 1064595 - DNA, 15 bp, Homo sapiens
ggggttggaatatta

SEQ ID NO: 1064596 - DNA, 15 bp, Homo sapiens
tggggttggaatatt

SEQ ID NO: 1064597 - DNA, 15 bp, Homo sapiens
ctggggttggaatat

SEQ ID NO: 1064598 - DNA, 15 bp, Homo sapiens
cctggggttggaata

SEQ ID NO: 1064599 - DNA, 15 bp, Homo sapiens
ccctggggttggaat

SEQ ID NO: 1064600 - DNA, 15 bp, Homo sapiens
cccctggggttggaa

SEQ ID NO: 1064601 - DNA, 15 bp, Homo sapiens
ccccctggggttgga

SEQ ID NO: 1064602 - DNA, 15 bp, Homo sapiens
accccctggggttgg

SEQ ID NO: 1064603 - DNA, 15 bp, Homo sapiens
caccccctggggttg

SEQ ID NO: 1064604 - DNA, 15 bp, Homo sapiens
tcaccccctggggtt

SEQ ID NO: 1064605 - DNA, 15 bp, Homo sapiens
ctcaccccctggggt

SEQ ID NO: 1064606 - DNA, 15 bp, Homo sapiens
actcaccccctgggg

SEQ ID NO: 1064607 - DNA, 15 bp, Homo sapiens
tactcaccccctggg

SEQ ID NO: 1064608 - DNA, 15 bp, Homo sapiens
gtactcaccccctgg

SEQ ID NO: 1064609 - DNA, 15 bp, Homo sapiens
tgtactcaccccctg

SEQ ID NO: 1064610 - DNA, 15 bp, Homo sapiens
gtgtactcaccccct

SEQ ID NO: 1064611 - DNA, 15 bp, Homo sapiens
agtgtactcaccccc

SEQ ID NO: 1064612 - DNA, 15 bp, Homo sapiens
aagtgtactcacccc

SEQ ID NO: 1064613 - DNA, 15 bp, Homo sapiens
gaagtgtactcaccc

SEQ ID NO: 1064614 - DNA, 15 bp, Homo sapiens
ggaagtgtactcacc

SEQ ID NO: 1064615 - DNA, 15 bp, Homo sapiens
tggaagtgtactcac

SEQ ID NO: 1064616 - DNA, 15 bp, Homo sapiens
ctggaagtgtactca

SEQ ID NO: 1064617 - DNA, 15 bp, Homo sapiens
tctggaagtgtactc

SEQ ID NO: 1064618 - DNA, 15 bp, Homo sapiens
ttctggaagtgtact

SEQ ID NO: 1064619 - DNA, 15 bp, Homo sapiens
attctggaagtgtac

SEQ ID NO: 1064620 - DNA, 15 bp, Homo sapiens
aattctggaagtgta

SEQ ID NO: 1064621 - DNA, 15 bp, Homo sapiens
aaattctggaagtgt

SEQ ID NO: 1064622 - DNA, 15 bp, Homo sapiens
taaattctggaagtg

SEQ ID NO: 1064623 - DNA, 15 bp, Homo sapiens
ctaaattctggaagt

SEQ ID NO: 1064624 - DNA, 15 bp, Homo sapiens
cctaaattctggaag

SEQ ID NO: 1064625 - DNA, 15 bp, Homo sapiens
ccctaaattctggaa

SEQ ID NO: 1064626 - DNA, 15 bp, Homo sapiens
tccctaaattctgga

SEQ ID NO: 1064627 - DNA, 15 bp, Homo sapiens
atccctaaattctgg

SEQ ID NO: 1064628 - DNA, 15 bp, Homo sapiens
catccctaaattctg

SEQ ID NO: 1064629 - DNA, 15 bp, Homo sapiens
gcatccctaaattct

SEQ ID NO: 1064630 - DNA, 15 bp, Homo sapiens
agcatccctaaattc

SEQ ID NO: 1064631 - DNA, 15 bp, Homo sapiens
aagcatccctaaatt

SEQ ID NO: 1064632 - DNA, 15 bp, Homo sapiens
aaagcatccctaaat

SEQ ID NO: 1064633 - DNA, 15 bp, Homo sapiens
taaagcatccctaaa

SEQ ID NO: 1064634 - DNA, 15 bp, Homo sapiens
ttaaagcatccctaa

SEQ ID NO: 1064635 - DNA, 15 bp, Homo sapiens
tttaaagcatcccta

SEQ ID NO: 1064636 - DNA, 15 bp, Homo sapiens
ttttaaagcatccct

SEQ ID NO: 1064637 - DNA, 15 bp, Homo sapiens
cttttaaagcatccc

SEQ ID NO: 1064638 - DNA, 15 bp, Homo sapiens
gcttttaaagcatcc

SEQ ID NO: 1064639 - DNA, 15 bp, Homo sapiens
tggcttttaaagcat

SEQ ID NO: 1064640 - DNA, 15 bp, Homo sapiens
atggcttttaaagca

SEQ ID NO: 1064641 - DNA, 15 bp, Homo sapiens
aatggcttttaaagc

SEQ ID NO: 1064642 - DNA, 15 bp, Homo sapiens
caatggcttttaaag

SEQ ID NO: 1064643 - DNA, 15 bp, Homo sapiens
gcaatggcttttaaa

SEQ ID NO: 1064644 - DNA, 15 bp, Homo sapiens
agcaatggcttttaa

SEQ ID NO: 1064645 - DNA, 15 bp, Homo sapiens
cagcaatggctttta

SEQ ID NO: 1064646 - DNA, 15 bp, Homo sapiens
tcagcaatggctttt

SEQ ID NO: 1064647 - DNA, 15 bp, Homo sapiens
ttcagcaatggcttt

SEQ ID NO: 1064648 - DNA, 15 bp, Homo sapiens
attcagcaatggctt

SEQ ID NO: 1064649 - DNA, 15 bp, Homo sapiens
aattcagcaatggct

SEQ ID NO: 1064650 - DNA, 15 bp, Homo sapiens
caattcagcaatggc

SEQ ID NO: 1064651 - DNA, 15 bp, Homo sapiens
tcaattcagcaatgg

SEQ ID NO: 1064652 - DNA, 15 bp, Homo sapiens
ttcaattcagcaatg

SEQ ID NO: 1064653 - DNA, 15 bp, Homo sapiens
attcaattcagcaat

SEQ ID NO: 1064654 - DNA, 15 bp, Homo sapiens
aattcaattcagcaa

SEQ ID NO: 1064655 - DNA, 15 bp, Homo sapiens
aaattcaattcagca

SEQ ID NO: 1064656 - DNA, 15 bp, Homo sapiens
aaaattcaattcagc

SEQ ID NO: 1064657 - DNA, 15 bp, Homo sapiens
taaaattcaattcag

SEQ ID NO: 1064658 - DNA, 15 bp, Homo sapiens
ataaaattcaattca

SEQ ID NO: 1064659 - DNA, 15 bp, Homo sapiens
aataaaattcaattc

SEQ ID NO: 1064660 - DNA, 15 bp, Homo sapiens
aaataaaattcaatt

SEQ ID NO: 1064661 - DNA, 15 bp, Homo sapiens
gaaataaaattcaat

SEQ ID NO: 1064662 - DNA, 15 bp, Homo sapiens
agaaataaaattcaa

SEQ ID NO: 1064663 - DNA, 15 bp, Homo sapiens
gagaaataaaattca

SEQ ID NO: 1064664 - DNA, 15 bp, Homo sapiens
ggagaaataaaattc

SEQ ID NO: 1064665 - DNA, 15 bp, Homo sapiens
aggagaaataaaatt

SEQ ID NO: 1064666 - DNA, 15 bp, Homo sapiens
caggagaaataaaat

SEQ ID NO: 1064667 - DNA, 15 bp, Homo sapiens
tcaggagaaataaaa

SEQ ID NO: 1064668 - DNA, 15 bp, Homo sapiens
atcaggagaaataaa

SEQ ID NO: 1064669 - DNA, 15 bp, Homo sapiens
gatcaggagaaataa

SEQ ID NO: 1064670 - DNA, 15 bp, Homo sapiens
tgatcaggagaaata

SEQ ID NO: 1064671 - DNA, 15 bp, Homo sapiens
gtgatcaggagaaat

SEQ ID NO: 1064672 - DNA, 15 bp, Homo sapiens
agtgatcaggagaaa

SEQ ID NO: 1064673 - DNA, 15 bp, Homo sapiens
tagtgatcaggagaa

SEQ ID NO: 1064674 - DNA, 15 bp, Homo sapiens
gtagtgatcaggaga

SEQ ID NO: 1064675 - DNA, 15 bp, Homo sapiens
tgtagtgatcaggag

SEQ ID NO: 1064676 - DNA, 15 bp, Homo sapiens
ctgtagtgatcagga

SEQ ID NO: 1064677 - DNA, 15 bp, Homo sapiens
tctgtagtgatcagg

SEQ ID NO: 1064678 - DNA, 15 bp, Homo sapiens
atctgtagtgatcag

SEQ ID NO: 1064679 - DNA, 15 bp, Homo sapiens
tatctgtagtgatca

SEQ ID NO: 1064680 - DNA, 15 bp, Homo sapiens
ttatctgtagtgatc

SEQ ID NO: 1064681 - DNA, 15 bp, Homo sapiens
attatctgtagtgat

SEQ ID NO: 1064682 - DNA, 15 bp, Homo sapiens
cattatctgtagtga

SEQ ID NO: 1064683 - DNA, 15 bp, Homo sapiens
gcattatctgtagtg

SEQ ID NO: 1064684 - DNA, 15 bp, Homo sapiens
agcattatctgtagt

SEQ ID NO: 1064685 - DNA, 15 bp, Homo sapiens
gagcattatctgtag

SEQ ID NO: 1064686 - DNA, 15 bp, Homo sapiens
tgagcattatctgta

SEQ ID NO: 1064687 - DNA, 15 bp, Homo sapiens
atgagcattatctgt

SEQ ID NO: 1064688 - DNA, 15 bp, Homo sapiens
catgagcattatctg

SEQ ID NO: 1064689 - DNA, 15 bp, Homo sapiens
gcatgagcattatct

SEQ ID NO: 1064690 - DNA, 15 bp, Homo sapiens
tgcatgagcattatc

SEQ ID NO: 1064691 - DNA, 15 bp, Homo sapiens
ttgcatgagcattat

SEQ ID NO: 1064692 - DNA, 15 bp, Homo sapiens
gttgcatgagcatta

SEQ ID NO: 1064693 - DNA, 15 bp, Homo sapiens
agttgcatgagcatt

SEQ ID NO: 1064694 - DNA, 15 bp, Homo sapiens
aagttgcatgagcat

SEQ ID NO: 1064695 - DNA, 15 bp, Homo sapiens
aaagttgcatgagca

SEQ ID NO: 1064696 - DNA, 15 bp, Homo sapiens
aaaagttgcatgagc

SEQ ID NO: 1064697 - DNA, 15 bp, Homo sapiens
gaaaagttgcatgag

SEQ ID NO: 1064698 - DNA, 15 bp, Homo sapiens
agaaaagttgcatga

SEQ ID NO: 1064699 - DNA, 15 bp, Homo sapiens
cagaaaagttgcatg

SEQ ID NO: 1064700 - DNA, 15 bp, Homo sapiens
tcagaaaagttgcat

SEQ ID NO: 1064701 - DNA, 15 bp, Homo sapiens
ctcagaaaagttgca

SEQ ID NO: 1064702 - DNA, 15 bp, Homo sapiens
tctcagaaaagttgc

SEQ ID NO: 1064703 - DNA, 15 bp, Homo sapiens
ttctcagaaaagttg

SEQ ID NO: 1064704 - DNA, 15 bp, Homo sapiens
cttctcagaaaagtt

SEQ ID NO: 1064705 - DNA, 15 bp, Homo sapiens
gcttctcagaaaagt

SEQ ID NO: 1064706 - DNA, 15 bp, Homo sapiens
tgcttctcagaaaag

SEQ ID NO: 1064707 - DNA, 15 bp, Homo sapiens
ctgcttctcagaaaa

SEQ ID NO: 1064708 - DNA, 15 bp, Homo sapiens
cctgcttctcagaaa

SEQ ID NO: 1064709 - DNA, 15 bp, Homo sapiens
gcctgcttctcagaa

SEQ ID NO: 1064710 - DNA, 15 bp, Homo sapiens
cgcctgcttctcaga

SEQ ID NO: 1064711 - DNA, 15 bp, Homo sapiens
tcgcctgcttctcag

SEQ ID NO: 1064712 - DNA, 15 bp, Homo sapiens
atcgcctgcttctca

SEQ ID NO: 1064713 - DNA, 15 bp, Homo sapiens
catcgcctgcttctc

SEQ ID NO: 1064714 - DNA, 15 bp, Homo sapiens
gcatcgcctgcttct

SEQ ID NO: 1064715 - DNA, 15 bp, Homo sapiens
agcatcgcctgcttc

SEQ ID NO: 1064716 - DNA, 15 bp, Homo sapiens
tagcatcgcctgctt

SEQ ID NO: 1064717 - DNA, 15 bp, Homo sapiens
ttagcatcgcctgct

SEQ ID NO: 1064718 - DNA, 15 bp, Homo sapiens
attagcatcgcctgc

SEQ ID NO: 1064719 - DNA, 15 bp, Homo sapiens
cattagcatcgcctg

SEQ ID NO: 1064720 - DNA, 15 bp, Homo sapiens
acattagcatcgcct

SEQ ID NO: 1064721 - DNA, 15 bp, Homo sapiens
tacattagcatcgcc

SEQ ID NO: 1064722 - DNA, 15 bp, Homo sapiens
gtacattagcatcgc

SEQ ID NO: 1064723 - DNA, 15 bp, Homo sapiens
ggtacattagcatcg

SEQ ID NO: 1064724 - DNA, 15 bp, Homo sapiens
gggtacattagcatc

SEQ ID NO: 1064725 - DNA, 15 bp, Homo sapiens
ggggtacattagcat

SEQ ID NO: 1064726 - DNA, 15 bp, Homo sapiens
aggggtacattagca

SEQ ID NO: 1064727 - DNA, 15 bp, Homo sapiens
taggggtacattagc

SEQ ID NO: 1064728 - DNA, 15 bp, Homo sapiens
ataggggtacattag

SEQ ID NO: 1064729 - DNA, 15 bp, Homo sapiens
aataggggtacatta

SEQ ID NO: 1064730 - DNA, 15 bp, Homo sapiens
aaataggggtacatt

SEQ ID NO: 1064731 - DNA, 15 bp, Homo sapiens
caaataggggtacat

SEQ ID NO: 1064732 - DNA, 15 bp, Homo sapiens
acaaataggggtaca

SEQ ID NO: 1064733 - DNA, 15 bp, Homo sapiens
aacaaataggggtac

SEQ ID NO: 1064734 - DNA, 15 bp, Homo sapiens
taacaaataggggta

SEQ ID NO: 1064735 - DNA, 15 bp, Homo sapiens
ataacaaataggggt

SEQ ID NO: 1064736 - DNA, 15 bp, Homo sapiens
aataacaaatagggg

SEQ ID NO: 1064737 - DNA, 15 bp, Homo sapiens
caataacaaataggg

SEQ ID NO: 1064738 - DNA, 15 bp, Homo sapiens
acaataacaaatagg

SEQ ID NO: 1064739 - DNA, 15 bp, Homo sapiens
aacaataacaaatag

SEQ ID NO: 1064740 - DNA, 15 bp, Homo sapiens
gaacaataacaaata

SEQ ID NO: 1064741 - DNA, 15 bp, Homo sapiens
tgaacaataacaaat

SEQ ID NO: 1064742 - DNA, 15 bp, Homo sapiens
atgaacaataacaaa

SEQ ID NO: 1064743 - DNA, 15 bp, Homo sapiens
aatgaacaataacaa

SEQ ID NO: 1064744 - DNA, 15 bp, Homo sapiens
taatgaacaataaca

SEQ ID NO: 1064745 - DNA, 15 bp, Homo sapiens
ctaatgaacaataac

SEQ ID NO: 1064746 - DNA, 15 bp, Homo sapiens
tctaatgaacaataa

SEQ ID NO: 1064747 - DNA, 15 bp, Homo sapiens
gtctaatgaacaata

SEQ ID NO: 1064748 - DNA, 15 bp, Homo sapiens
ggtctaatgaacaat

SEQ ID NO: 1064749 - DNA, 15 bp, Homo sapiens
gggtctaatgaacaa

SEQ ID NO: 1064750 - DNA, 15 bp, Homo sapiens
agggtctaatgaaca

SEQ ID NO: 1064751 - DNA, 15 bp, Homo sapiens
aagggtctaatgaac

SEQ ID NO: 1064752 - DNA, 15 bp, Homo sapiens
gaagggtctaatgaa

SEQ ID NO: 1064753 - DNA, 15 bp, Homo sapiens
agaagggtctaatga

SEQ ID NO: 1064754 - DNA, 15 bp, Homo sapiens
aagaagggtctaatg

SEQ ID NO: 1064755 - DNA, 15 bp, Homo sapiens
taagaagggtctaat

SEQ ID NO: 1064756 - DNA, 15 bp, Homo sapiens
ataagaagggtctaa

SEQ ID NO: 1064757 - DNA, 15 bp, Homo sapiens
cataagaagggtcta

SEQ ID NO: 1064758 - DNA, 15 bp, Homo sapiens
tcataagaagggtct

SEQ ID NO: 1064759 - DNA, 15 bp, Homo sapiens
gtcataagaagggtc

SEQ ID NO: 1064760 - DNA, 15 bp, Homo sapiens
agtcataagaagggt

SEQ ID NO: 1064761 - DNA, 15 bp, Homo sapiens
gagtcataagaaggg

SEQ ID NO: 1064762 - DNA, 15 bp, Homo sapiens
tgagtcataagaagg

SEQ ID NO: 1064763 - DNA, 15 bp, Homo sapiens
ctgagtcataagaag

SEQ ID NO: 1064764 - DNA, 15 bp, Homo sapiens
actgagtcataagaa

SEQ ID NO: 1064765 - DNA, 15 bp, Homo sapiens
gactgagtcataaga

SEQ ID NO: 1064766 - DNA, 15 bp, Homo sapiens
tgactgagtcataag

SEQ ID NO: 1064767 - DNA, 15 bp, Homo sapiens
ctgactgagtcataa

SEQ ID NO: 1064768 - DNA, 15 bp, Homo sapiens
tctgactgagtcata

SEQ ID NO: 1064769 - DNA, 15 bp, Homo sapiens
ttctgactgagtcat

SEQ ID NO: 1064770 - DNA, 15 bp, Homo sapiens
cttctgactgagtca

SEQ ID NO: 1064771 - DNA, 15 bp, Homo sapiens
tcttctgactgagtc

SEQ ID NO: 1064772 - DNA, 15 bp, Homo sapiens
ctcttctgactgagt

SEQ ID NO: 1064773 - DNA, 15 bp, Homo sapiens
cctcttctgactgag

SEQ ID NO: 1064774 - DNA, 15 bp, Homo sapiens
tcctcttctgactga

SEQ ID NO: 1064775 - DNA, 15 bp, Homo sapiens
ctcctcttctgactg

SEQ ID NO: 1064776 - DNA, 15 bp, Homo sapiens
gctcctcttctgact

SEQ ID NO: 1064777 - DNA, 15 bp, Homo sapiens
agctcctcttctgac

SEQ ID NO: 1064778 - DNA, 15 bp, Homo sapiens
aagctcctcttctga

SEQ ID NO: 1064779 - DNA, 15 bp, Homo sapiens
caagctcctcttctg

SEQ ID NO: 1064780 - DNA, 15 bp, Homo sapiens
ccaagctcctcttct

SEQ ID NO: 1064781 - DNA, 15 bp, Homo sapiens
cccaagctcctcttc

SEQ ID NO: 1064782 - DNA, 15 bp, Homo sapiens
ccccaagctcctctt

SEQ ID NO: 1064783 - DNA, 15 bp, Homo sapiens
gccccaagctcctct

SEQ ID NO: 1064784 - DNA, 15 bp, Homo sapiens
tgccccaagctcctc

SEQ ID NO: 1064785 - DNA, 15 bp, Homo sapiens
ttgccccaagctcct

SEQ ID NO: 1064786 - DNA, 15 bp, Homo sapiens
attgccccaagctcc

SEQ ID NO: 1064787 - DNA, 15 bp, Homo sapiens
tattgccccaagctc

SEQ ID NO: 1064788 - DNA, 15 bp, Homo sapiens
ttattgccccaagct

SEQ ID NO: 1064789 - DNA, 15 bp, Homo sapiens
gttattgccccaagc

SEQ ID NO: 1064790 - DNA, 15 bp, Homo sapiens
tgttattgccccaag

SEQ ID NO: 1064791 - DNA, 15 bp, Homo sapiens
atgttattgccccaa

SEQ ID NO: 1064792 - DNA, 15 bp, Homo sapiens
catgttattgcccca

SEQ ID NO: 1064793 - DNA, 15 bp, Homo sapiens
tcatgttattgcccc

SEQ ID NO: 1064794 - DNA, 15 bp, Homo sapiens
ttcatgttattgccc

SEQ ID NO: 1064795 - DNA, 15 bp, Homo sapiens
attcatgttattgcc

SEQ ID NO: 1064796 - DNA, 15 bp, Homo sapiens
aattcatgttattgc

SEQ ID NO: 1064797 - DNA, 15 bp, Homo sapiens
gaattcatgttattg

SEQ ID NO: 1064798 - DNA, 15 bp, Homo sapiens
agaattcatgttatt

SEQ ID NO: 1064799 - DNA, 15 bp, Homo sapiens
cagaattcatgttat

SEQ ID NO: 1064800 - DNA, 15 bp, Homo sapiens
ccagaattcatgtta

SEQ ID NO: 1064801 - DNA, 15 bp, Homo sapiens
gccagaattcatgtt

SEQ ID NO: 1064802 - DNA, 15 bp, Homo sapiens
ggccagaattcatgt

SEQ ID NO: 1064803 - DNA, 15 bp, Homo sapiens
aggccagaattcatg

SEQ ID NO: 1064804 - DNA, 15 bp, Homo sapiens
gaggccagaattcat

SEQ ID NO: 1064805 - DNA, 15 bp, Homo sapiens
tgaggccagaattca

SEQ ID NO: 1064806 - DNA, 15 bp, Homo sapiens
ttgaggccagaattc

SEQ ID NO: 1064807 - DNA, 15 bp, Homo sapiens
gttgaggccagaatt

SEQ ID NO: 1064808 - DNA, 15 bp, Homo sapiens
tgttgaggccagaat

SEQ ID NO: 1064809 - DNA, 15 bp, Homo sapiens
ttgttgaggccagaa

SEQ ID NO: 1064810 - DNA, 15 bp, Homo sapiens
tttgttgaggccaga

SEQ ID NO: 1064811 - DNA, 15 bp, Homo sapiens
ttttgttgaggccag

SEQ ID NO: 1064812 - DNA, 15 bp, Homo sapiens
cttttgttgaggcca

SEQ ID NO: 1064813 - DNA, 15 bp, Homo sapiens
acttttgttgaggcc

SEQ ID NO: 1064814 - DNA, 15 bp, Homo sapiens
tacttttgttgaggc

SEQ ID NO: 1064815 - DNA, 15 bp, Homo sapiens
ttacttttgttgagg

SEQ ID NO: 1064816 - DNA, 15 bp, Homo sapiens
cttacttttgttgag

SEQ ID NO: 1064817 - DNA, 15 bp, Homo sapiens
acttacttttgttga

SEQ ID NO: 1064818 - DNA, 15 bp, Homo sapiens
tacttacttttgttg

SEQ ID NO: 1064819 - DNA, 15 bp, Homo sapiens
ttacttacttttgtt

SEQ ID NO: 1064820 - DNA, 15 bp, Homo sapiens
tttacttacttttgt

SEQ ID NO: 1064821 - DNA, 15 bp, Homo sapiens
atttacttacttttg

SEQ ID NO: 1064822 - DNA, 15 bp, Homo sapiens
catttacttactttt

SEQ ID NO: 1064823 - DNA, 15 bp, Homo sapiens
acatttacttacttt

SEQ ID NO: 1064824 - DNA, 15 bp, Homo sapiens
aacatttacttactt

SEQ ID NO: 1064825 - DNA, 15 bp, Homo sapiens
aaacatttacttact

SEQ ID NO: 1064826 - DNA, 15 bp, Homo sapiens
aaaacatttacttac

SEQ ID NO: 1064827 - DNA, 15 bp, Homo sapiens
taaaacatttactta

SEQ ID NO: 1064828 - DNA, 15 bp, Homo sapiens
ataaaacatttactt

SEQ ID NO: 1064829 - DNA, 15 bp, Homo sapiens
tataaaacatttact

SEQ ID NO: 1064830 - DNA, 15 bp, Homo sapiens
ctataaaacatttac

SEQ ID NO: 1064831 - DNA, 15 bp, Homo sapiens
actataaaacattta

SEQ ID NO: 1064832 - DNA, 15 bp, Homo sapiens
aactataaaacattt

SEQ ID NO: 1064833 - DNA, 15 bp, Homo sapiens
gaactataaaacatt

SEQ ID NO: 1064834 - DNA, 15 bp, Homo sapiens
agaactataaaacat

SEQ ID NO: 1064835 - DNA, 15 bp, Homo sapiens
aagaactataaaaca

SEQ ID NO: 1064836 - DNA, 15 bp, Homo sapiens
aaagaactataaaac

SEQ ID NO: 1064837 - DNA, 15 bp, Homo sapiens
caaagaactataaaa

SEQ ID NO: 1064838 - DNA, 15 bp, Homo sapiens
ccaaagaactataaa

SEQ ID NO: 1064839 - DNA, 15 bp, Homo sapiens
tccaaagaactataa

SEQ ID NO: 1064840 - DNA, 15 bp, Homo sapiens
ctccaaagaactata

SEQ ID NO: 1064841 - DNA, 15 bp, Homo sapiens
cctccaaagaactat

SEQ ID NO: 1064842 - DNA, 15 bp, Homo sapiens
tcctccaaagaacta

SEQ ID NO: 1064843 - DNA, 15 bp, Homo sapiens
ttcctccaaagaact

SEQ ID NO: 1064844 - DNA, 15 bp, Homo sapiens
tttcctccaaagaac

SEQ ID NO: 1064845 - DNA, 15 bp, Homo sapiens
ctttcctccaaagaa

SEQ ID NO: 1064846 - DNA, 15 bp, Homo sapiens
gctttcctccaaaga

SEQ ID NO: 1064847 - DNA, 15 bp, Homo sapiens
tgctttcctccaaag

SEQ ID NO: 1064848 - DNA, 15 bp, Homo sapiens
atgctttcctccaaa

SEQ ID NO: 1064849 - DNA, 15 bp, Homo sapiens
catgctttcctccaa

SEQ ID NO: 1064850 - DNA, 15 bp, Homo sapiens
acatgctttcctcca

SEQ ID NO: 1064851 - DNA, 15 bp, Homo sapiens
aacatgctttcctcc

SEQ ID NO: 1064852 - DNA, 15 bp, Homo sapiens
aaacatgctttcctc

SEQ ID NO: 1064853 - DNA, 15 bp, Homo sapiens
gaaacatgctttcct

SEQ ID NO: 1064854 - DNA, 15 bp, Homo sapiens
agaaacatgctttcc

SEQ ID NO: 1064855 - DNA, 15 bp, Homo sapiens
cagaaacatgctttc

SEQ ID NO: 1064856 - DNA, 15 bp, Homo sapiens
tcagaaacatgcttt

SEQ ID NO: 1064857 - DNA, 15 bp, Homo sapiens
ctcagaaacatgctt

SEQ ID NO: 1064858 - DNA, 15 bp, Homo sapiens
cctcagaaacatgct

SEQ ID NO: 1064859 - DNA, 15 bp, Homo sapiens
tcctcagaaacatgc

SEQ ID NO: 1064860 - DNA, 15 bp, Homo sapiens
gtcctcagaaacatg

SEQ ID NO: 1064861 - DNA, 15 bp, Homo sapiens
tgtcctcagaaacat

SEQ ID NO: 1064862 - DNA, 15 bp, Homo sapiens
ctgtcctcagaaaca

SEQ ID NO: 1064863 - DNA, 15 bp, Homo sapiens
cctgtcctcagaaac

SEQ ID NO: 1064864 - DNA, 15 bp, Homo sapiens
tcctgtcctcagaaa

SEQ ID NO: 1064865 - DNA, 15 bp, Homo sapiens
atcctgtcctcagaa

SEQ ID NO: 1064866 - DNA, 15 bp, Homo sapiens
aatcctgtcctcaga

SEQ ID NO: 1064867 - DNA, 15 bp, Homo sapiens
caatcctgtcctcag

SEQ ID NO: 1064868 - DNA, 15 bp, Homo sapiens
ccaatcctgtcctca

SEQ ID NO: 1064869 - DNA, 15 bp, Homo sapiens
tccaatcctgtcctc

SEQ ID NO: 1064870 - DNA, 15 bp, Homo sapiens
ctccaatcctgtcct

SEQ ID NO: 1064871 - DNA, 15 bp, Homo sapiens
tctccaatcctgtcc

SEQ ID NO: 1064872 - DNA, 15 bp, Homo sapiens
ttctccaatcctgtc

SEQ ID NO: 1064873 - DNA, 15 bp, Homo sapiens
gttctccaatcctgt

SEQ ID NO: 1064874 - DNA, 15 bp, Homo sapiens
tgttctccaatcctg

SEQ ID NO: 1064875 - DNA, 15 bp, Homo sapiens
ctgttctccaatcct

SEQ ID NO: 1064876 - DNA, 15 bp, Homo sapiens
cctgttctccaatcc

SEQ ID NO: 1064877 - DNA, 15 bp, Homo sapiens
tcctgttctccaatc

SEQ ID NO: 1064878 - DNA, 15 bp, Homo sapiens
atcctgttctccaat

SEQ ID NO: 1064879 - DNA, 15 bp, Homo sapiens
gatcctgttctccaa

SEQ ID NO: 1064880 - DNA, 15 bp, Homo sapiens
tgatcctgttctcca

SEQ ID NO: 1064881 - DNA, 15 bp, Homo sapiens
atgatcctgttctcc

SEQ ID NO: 1064882 - DNA, 15 bp, Homo sapiens
catgatcctgttctc

SEQ ID NO: 1064883 - DNA, 15 bp, Homo sapiens
tcatgatcctgttct

SEQ ID NO: 1064884 - DNA, 15 bp, Homo sapiens
ctcatgatcctgttc

SEQ ID NO: 1064885 - DNA, 15 bp, Homo sapiens
tctcatgatcctgtt

SEQ ID NO: 1064886 - DNA, 15 bp, Homo sapiens
gtctcatgatcctgt

SEQ ID NO: 1064887 - DNA, 15 bp, Homo sapiens
tgtctcatgatcctg

SEQ ID NO: 1064888 - DNA, 15 bp, Homo sapiens
gtgtctcatgatcct

SEQ ID NO: 1064889 - DNA, 15 bp, Homo sapiens
tgtgtctcatgatcc

SEQ ID NO: 1064890 - DNA, 15 bp, Homo sapiens
ctgtgtctcatgatc

SEQ ID NO: 1064891 - DNA, 15 bp, Homo sapiens
cctgtgtctcatgat

SEQ ID NO: 1064892 - DNA, 15 bp, Homo sapiens
tcctgtgtctcatga

SEQ ID NO: 1064893 - DNA, 15 bp, Homo sapiens
ctcctgtgtctcatg

SEQ ID NO: 1064894 - DNA, 15 bp, Homo sapiens
tctcctgtgtctcat

SEQ ID NO: 1064895 - DNA, 15 bp, Homo sapiens
ctctcctgtgtctca

SEQ ID NO: 1064896 - DNA, 15 bp, Homo sapiens
gctctcctgtgtctc

SEQ ID NO: 1064897 - DNA, 15 bp, Homo sapiens
tgctctcctgtgtct

SEQ ID NO: 1064898 - DNA, 15 bp, Homo sapiens
ctgctctcctgtgtc

SEQ ID NO: 1064899 - DNA, 15 bp, Homo sapiens
gctgctctcctgtgt

SEQ ID NO: 1064900 - DNA, 15 bp, Homo sapiens
tgctgctctcctgtg

SEQ ID NO: 1064901 - DNA, 15 bp, Homo sapiens
ttgctgctctcctgt

SEQ ID NO: 1064902 - DNA, 15 bp, Homo sapiens
cttgctgctctcctg

SEQ ID NO: 1064903 - DNA, 15 bp, Homo sapiens
gcttgctgctctcct

SEQ ID NO: 1064904 - DNA, 15 bp, Homo sapiens
tgcttgctgctctcc

SEQ ID NO: 1064905 - DNA, 15 bp, Homo sapiens
atgcttgctgctctc

SEQ ID NO: 1064906 - DNA, 15 bp, Homo sapiens
aatgcttgctgctct

SEQ ID NO: 1064907 - DNA, 15 bp, Homo sapiens
aaatgcttgctgctc

SEQ ID NO: 1064908 - DNA, 15 bp, Homo sapiens
caaatgcttgctgct

SEQ ID NO: 1064909 - DNA, 15 bp, Homo sapiens
acaaatgcttgctgc

SEQ ID NO: 1064910 - DNA, 15 bp, Homo sapiens
aacaaatgcttgctg

SEQ ID NO: 1064911 - DNA, 15 bp, Homo sapiens
aaacaaatgcttgct

SEQ ID NO: 1064912 - DNA, 15 bp, Homo sapiens
gaaacaaatgcttgc

SEQ ID NO: 1064913 - DNA, 15 bp, Homo sapiens
ggaaacaaatgcttg

SEQ ID NO: 1064914 - DNA, 15 bp, Homo sapiens
gggaaacaaatgctt

SEQ ID NO: 1064915 - DNA, 15 bp, Homo sapiens
agggaaacaaatgct

SEQ ID NO: 1064916 - DNA, 15 bp, Homo sapiens
cagggaaacaaatgc

SEQ ID NO: 1064917 - DNA, 15 bp, Homo sapiens
gcagggaaacaaatg

SEQ ID NO: 1064918 - DNA, 15 bp, Homo sapiens
agcagggaaacaaat

SEQ ID NO: 1064919 - DNA, 15 bp, Homo sapiens
aagcagggaaacaaa

SEQ ID NO: 1064920 - DNA, 15 bp, Homo sapiens
aaagcagggaaacaa

SEQ ID NO: 1064921 - DNA, 15 bp, Homo sapiens
aaaagcagggaaaca

SEQ ID NO: 1064922 - DNA, 15 bp, Homo sapiens
aaaaagcagggaaac

SEQ ID NO: 1064923 - DNA, 15 bp, Homo sapiens
caaaaagcagggaaa

SEQ ID NO: 1064924 - DNA, 15 bp, Homo sapiens
tcaaaaagcagggaa

SEQ ID NO: 1064925 - DNA, 15 bp, Homo sapiens
ctcaaaaagcaggga

SEQ ID NO: 1064926 - DNA, 15 bp, Homo sapiens
actcaaaaagcaggg

SEQ ID NO: 1064927 - DNA, 15 bp, Homo sapiens
tactcaaaaagcagg

SEQ ID NO: 1064928 - DNA, 15 bp, Homo sapiens
ctactcaaaaagcag

SEQ ID NO: 1064929 - DNA, 15 bp, Homo sapiens
tctactcaaaaagca

SEQ ID NO: 1064930 - DNA, 15 bp, Homo sapiens
gtctactcaaaaagc

SEQ ID NO: 1064931 - DNA, 15 bp, Homo sapiens
tgtctactcaaaaag

SEQ ID NO: 1064932 - DNA, 15 bp, Homo sapiens
atgtctactcaaaaa

SEQ ID NO: 1064933 - DNA, 15 bp, Homo sapiens
gatgtctactcaaaa

SEQ ID NO: 1064934 - DNA, 15 bp, Homo sapiens
tgatgtctactcaaa

SEQ ID NO: 1064935 - DNA, 15 bp, Homo sapiens
ttgatgtctactcaa

SEQ ID NO: 1064936 - DNA, 15 bp, Homo sapiens
tttgatgtctactca

SEQ ID NO: 1064937 - DNA, 15 bp, Homo sapiens
ttttgatgtctactc

SEQ ID NO: 1064938 - DNA, 15 bp, Homo sapiens
attttgatgtctact

SEQ ID NO: 1064939 - DNA, 15 bp, Homo sapiens
aattttgatgtctac

SEQ ID NO: 1064940 - DNA, 15 bp, Homo sapiens
taattttgatgtcta

SEQ ID NO: 1064941 - DNA, 15 bp, Homo sapiens
ataattttgatgtct

SEQ ID NO: 1064942 - DNA, 15 bp, Homo sapiens
aataattttgatgtc

SEQ ID NO: 1064943 - DNA, 15 bp, Homo sapiens
aaataattttgatgt

SEQ ID NO: 1064944 - DNA, 15 bp, Homo sapiens
caaataattttgatg

SEQ ID NO: 1064945 - DNA, 15 bp, Homo sapiens
gcaaataattttgat

SEQ ID NO: 1064946 - DNA, 15 bp, Homo sapiens
ggcaaataattttga

SEQ ID NO: 1064947 - DNA, 15 bp, Homo sapiens
tggcaaataattttg

SEQ ID NO: 1064948 - DNA, 15 bp, Homo sapiens
ttggcaaataatttt

SEQ ID NO: 1064949 - DNA, 15 bp, Homo sapiens
attggcaaataattt

SEQ ID NO: 1064950 - DNA, 15 bp, Homo sapiens
aattggcaaataatt

SEQ ID NO: 1064951 - DNA, 15 bp, Homo sapiens
aaattggcaaataat

SEQ ID NO: 1064952 - DNA, 15 bp, Homo sapiens
taaattggcaaataa

SEQ ID NO: 1064953 - DNA, 15 bp, Homo sapiens
ctaaattggcaaata

SEQ ID NO: 1064954 - DNA, 15 bp, Homo sapiens
cctaaattggcaaat

SEQ ID NO: 1064955 - DNA, 15 bp, Homo sapiens
ccctaaattggcaaa

SEQ ID NO: 1064956 - DNA, 15 bp, Homo sapiens
gccctaaattggcaa

SEQ ID NO: 1064957 - DNA, 15 bp, Homo sapiens
ggccctaaattggca

SEQ ID NO: 1064958 - DNA, 15 bp, Homo sapiens
aggccctaaattggc

SEQ ID NO: 1064959 - DNA, 15 bp, Homo sapiens
aaggccctaaattgg

SEQ ID NO: 1064960 - DNA, 15 bp, Homo sapiens
aaaggccctaaattg

SEQ ID NO: 1064961 - DNA, 15 bp, Homo sapiens
gaaaggccctaaatt

SEQ ID NO: 1064962 - DNA, 15 bp, Homo sapiens
ggaaaggccctaaat

SEQ ID NO: 1064963 - DNA, 15 bp, Homo sapiens
tggaaaggccctaaa

SEQ ID NO: 1064964 - DNA, 15 bp, Homo sapiens
atggaaaggccctaa

SEQ ID NO: 1064965 - DNA, 15 bp, Homo sapiens
catggaaaggcccta

SEQ ID NO: 1064966 - DNA, 15 bp, Homo sapiens
tcatggaaaggccct

SEQ ID NO: 1064967 - DNA, 15 bp, Homo sapiens
atcatggaaaggccc

SEQ ID NO: 1064968 - DNA, 15 bp, Homo sapiens
tatcatggaaaggcc

SEQ ID NO: 1064969 - DNA, 15 bp, Homo sapiens
gtatcatggaaaggc

SEQ ID NO: 1064970 - DNA, 15 bp, Homo sapiens
ggtatcatggaaagg

SEQ ID NO: 1064971 - DNA, 15 bp, Homo sapiens
tggtatcatggaaag

SEQ ID NO: 1064972 - DNA, 15 bp, Homo sapiens
ctggtatcatggaaa

SEQ ID NO: 1064973 - DNA, 15 bp, Homo sapiens
actggtatcatggaa

SEQ ID NO: 1064974 - DNA, 15 bp, Homo sapiens
gactggtatcatgga

SEQ ID NO: 1064975 - DNA, 15 bp, Homo sapiens
ggactggtatcatgg

SEQ ID NO: 1064976 - DNA, 15 bp, Homo sapiens
aggactggtatcatg

SEQ ID NO: 1064977 - DNA, 15 bp, Homo sapiens
aaggactggtatcat

SEQ ID NO: 1064978 - DNA, 15 bp, Homo sapiens
caaggactggtatca

SEQ ID NO: 1064979 - DNA, 15 bp, Homo sapiens
tcaaggactggtatc

SEQ ID NO: 1064980 - DNA, 15 bp, Homo sapiens
ttcaaggactggtat

SEQ ID NO: 1064981 - DNA, 15 bp, Homo sapiens
tttcaaggactggta

SEQ ID NO: 1064982 - DNA, 15 bp, Homo sapiens
ctttcaaggactggt

SEQ ID NO: 1064983 - DNA, 15 bp, Homo sapiens
tctttcaaggactgg

SEQ ID NO: 1064984 - DNA, 15 bp, Homo sapiens
atctttcaaggactg

SEQ ID NO: 1064985 - DNA, 15 bp, Homo sapiens
catctttcaaggact

SEQ ID NO: 1064986 - DNA, 15 bp, Homo sapiens
tcatctttcaaggac

SEQ ID NO: 1064987 - DNA, 15 bp, Homo sapiens
atcatctttcaagga

SEQ ID NO: 1064988 - DNA, 15 bp, Homo sapiens
tatcatctttcaagg

SEQ ID NO: 1064989 - DNA, 15 bp, Homo sapiens
atatcatctttcaag

SEQ ID NO: 1064990 - DNA, 15 bp, Homo sapiens
catatcatctttcaa

SEQ ID NO: 1064991 - DNA, 15 bp, Homo sapiens
ccatatcatctttca

SEQ ID NO: 1064992 - DNA, 15 bp, Homo sapiens
cccatatcatctttc

SEQ ID NO: 1064993 - DNA, 15 bp, Homo sapiens
tcccatatcatcttt

SEQ ID NO: 1064994 - DNA, 15 bp, Homo sapiens
atcccatatcatctt

SEQ ID NO: 1064995 - DNA, 15 bp, Homo sapiens
aatcccatatcatct

SEQ ID NO: 1064996 - DNA, 15 bp, Homo sapiens
aaatcccatatcatc

SEQ ID NO: 1064997 - DNA, 15 bp, Homo sapiens
aaaatcccatatcat

SEQ ID NO: 1064998 - DNA, 15 bp, Homo sapiens
gaaaatcccatatca

SEQ ID NO: 1064999 - DNA, 15 bp, Homo sapiens
cgaaaatcccatatc

SEQ ID NO: 1065000 - DNA, 15 bp, Homo sapiens
acgaaaatcccatat

SEQ ID NO: 1065001 - DNA, 15 bp, Homo sapiens
aacgaaaatcccata

SEQ ID NO: 1065002 - DNA, 15 bp, Homo sapiens
aaacgaaaatcccat

SEQ ID NO: 1065003 - DNA, 15 bp, Homo sapiens
taaacgaaaatccca

SEQ ID NO: 1065004 - DNA, 15 bp, Homo sapiens
ctaaacgaaaatccc

SEQ ID NO: 1065005 - DNA, 15 bp, Homo sapiens
tctaaacgaaaatcc

SEQ ID NO: 1065006 - DNA, 15 bp, Homo sapiens
atctaaacgaaaatc

SEQ ID NO: 1065007 - DNA, 15 bp, Homo sapiens
aatctaaacgaaaat

SEQ ID NO: 1065008 - DNA, 15 bp, Homo sapiens
aaatctaaacgaaaa

SEQ ID NO: 1065009 - DNA, 15 bp, Homo sapiens
aaaatctaaacgaaa

SEQ ID NO: 1065010 - DNA, 15 bp, Homo sapiens
aaaaatctaaacgaa

SEQ ID NO: 1065011 - DNA, 15 bp, Homo sapiens
caaaaatctaaacga

SEQ ID NO: 1065012 - DNA, 15 bp, Homo sapiens
tcaaaaatctaaacg

SEQ ID NO: 1065013 - DNA, 15 bp, Homo sapiens
ctcaaaaatctaaac

SEQ ID NO: 1065014 - DNA, 15 bp, Homo sapiens
actcaaaaatctaaa

SEQ ID NO: 1065015 - DNA, 15 bp, Homo sapiens
aactcaaaaatctaa

SEQ ID NO: 1065016 - DNA, 15 bp, Homo sapiens
aaactcaaaaatcta

SEQ ID NO: 1065017 - DNA, 15 bp, Homo sapiens
aaaactcaaaaatct

SEQ ID NO: 1065018 - DNA, 15 bp, Homo sapiens
caaaactcaaaaatc

SEQ ID NO: 1065019 - DNA, 15 bp, Homo sapiens
acaaaactcaaaaat

SEQ ID NO: 1065020 - DNA, 15 bp, Homo sapiens
aacaaaactcaaaaa

SEQ ID NO: 1065021 - DNA, 15 bp, Homo sapiens
aaacaaaactcaaaa

SEQ ID NO: 1065022 - DNA, 15 bp, Homo sapiens
aaaacaaaactcaaa

SEQ ID NO: 1065023 - DNA, 15 bp, Homo sapiens
taaaacaaaactcaa

SEQ ID NO: 1065024 - DNA, 15 bp, Homo sapiens
ataaaacaaaactca

SEQ ID NO: 1065025 - DNA, 15 bp, Homo sapiens
aataaaacaaaactc

SEQ ID NO: 1065026 - DNA, 15 bp, Homo sapiens
caataaaacaaaact

SEQ ID NO: 1065027 - DNA, 15 bp, Homo sapiens
gcaataaaacaaaac

SEQ ID NO: 1065028 - DNA, 15 bp, Homo sapiens
cgcaataaaacaaaa

SEQ ID NO: 1065029 - DNA, 15 bp, Homo sapiens
gcgcaataaaacaaa

SEQ ID NO: 1065030 - DNA, 15 bp, Homo sapiens
agcgcaataaaacaa

SEQ ID NO: 1065031 - DNA, 15 bp, Homo sapiens
gagcgcaataaaaca

SEQ ID NO: 1065032 - DNA, 15 bp, Homo sapiens
cgagcgcaataaaac

SEQ ID NO: 1065033 - DNA, 15 bp, Homo sapiens
ccgagcgcaataaaa

SEQ ID NO: 1065034 - DNA, 15 bp, Homo sapiens
accgagcgcaataaa

SEQ ID NO: 1065035 - DNA, 15 bp, Homo sapiens
aaccgagcgcaataa

SEQ ID NO: 1065036 - DNA, 15 bp, Homo sapiens
aaaccgagcgcaata

SEQ ID NO: 1065037 - DNA, 15 bp, Homo sapiens
aaaaccgagcgcaat

SEQ ID NO: 1065038 - DNA, 15 bp, Homo sapiens
taaaaccgagcgcaa

SEQ ID NO: 1065039 - DNA, 15 bp, Homo sapiens
ctaaaaccgagcgca

SEQ ID NO: 1065040 - DNA, 15 bp, Homo sapiens
tctaaaaccgagcgc

SEQ ID NO: 1065041 - DNA, 15 bp, Homo sapiens
ttctaaaaccgagcg

SEQ ID NO: 1065042 - DNA, 15 bp, Homo sapiens
gttctaaaaccgagc

SEQ ID NO: 1065043 - DNA, 15 bp, Homo sapiens
tgttctaaaaccgag

SEQ ID NO: 1065044 - DNA, 15 bp, Homo sapiens
atgttctaaaaccga

SEQ ID NO: 1065045 - DNA, 15 bp, Homo sapiens
catgttctaaaaccg

SEQ ID NO: 1065046 - DNA, 15 bp, Homo sapiens
ccatgttctaaaacc

SEQ ID NO: 1065047 - DNA, 15 bp, Homo sapiens
cccatgttctaaaac

SEQ ID NO: 1065048 - DNA, 15 bp, Homo sapiens
tcccatgttctaaaa

SEQ ID NO: 1065049 - DNA, 15 bp, Homo sapiens
ttcccatgttctaaa

SEQ ID NO: 1065050 - DNA, 15 bp, Homo sapiens
tttcccatgttctaa

SEQ ID NO: 1065051 - DNA, 15 bp, Homo sapiens
atttcccatgttcta

SEQ ID NO: 1065052 - DNA, 15 bp, Homo sapiens
aatttcccatgttct

SEQ ID NO: 1065053 - DNA, 15 bp, Homo sapiens
aaatttcccatgttc

SEQ ID NO: 1065054 - DNA, 15 bp, Homo sapiens
caaatttcccatgtt

SEQ ID NO: 1065055 - DNA, 15 bp, Homo sapiens
tcaaatttcccatgt

SEQ ID NO: 1065056 - DNA, 15 bp, Homo sapiens
ttcaaatttcccatg

SEQ ID NO: 1065057 - DNA, 15 bp, Homo sapiens
cttcaaatttcccat

SEQ ID NO: 1065058 - DNA, 15 bp, Homo sapiens
ccttcaaatttccca

SEQ ID NO: 1065059 - DNA, 15 bp, Homo sapiens
accttcaaatttccc

SEQ ID NO: 1065060 - DNA, 15 bp, Homo sapiens
aaccttcaaatttcc

SEQ ID NO: 1065061 - DNA, 15 bp, Homo sapiens
aaaccttcaaatttc

SEQ ID NO: 1065062 - DNA, 15 bp, Homo sapiens
aaaaccttcaaattt

SEQ ID NO: 1065063 - DNA, 15 bp, Homo sapiens
gaaaaccttcaaatt

SEQ ID NO: 1065064 - DNA, 15 bp, Homo sapiens
agaaaaccttcaaat

SEQ ID NO: 1065065 - DNA, 15 bp, Homo sapiens
aagaaaaccttcaaa

SEQ ID NO: 1065066 - DNA, 15 bp, Homo sapiens
caagaaaaccttcaa

SEQ ID NO: 1065067 - DNA, 15 bp, Homo sapiens
tcaagaaaaccttca

SEQ ID NO: 1065068 - DNA, 15 bp, Homo sapiens
ctcaagaaaaccttc

SEQ ID NO: 1065069 - DNA, 15 bp, Homo sapiens
tctcaagaaaacctt

SEQ ID NO: 1065070 - DNA, 15 bp, Homo sapiens
gtctcaagaaaacct

SEQ ID NO: 1065071 - DNA, 15 bp, Homo sapiens
tgtctcaagaaaacc

SEQ ID NO: 1065072 - DNA, 15 bp, Homo sapiens
ttgtctcaagaaaac

SEQ ID NO: 1065073 - DNA, 15 bp, Homo sapiens
cttgtctcaagaaaa

SEQ ID NO: 1065074 - DNA, 15 bp, Homo sapiens
ccttgtctcaagaaa

SEQ ID NO: 1065075 - DNA, 15 bp, Homo sapiens
accttgtctcaagaa

SEQ ID NO: 1065076 - DNA, 15 bp, Homo sapiens
aaccttgtctcaaga

SEQ ID NO: 1065077 - DNA, 15 bp, Homo sapiens
gaaccttgtctcaag

SEQ ID NO: 1065078 - DNA, 15 bp, Homo sapiens
agaaccttgtctcaa

SEQ ID NO: 1065079 - DNA, 15 bp, Homo sapiens
cagaaccttgtctca

SEQ ID NO: 1065080 - DNA, 15 bp, Homo sapiens
acagaaccttgtctc

SEQ ID NO: 1065081 - DNA, 15 bp, Homo sapiens
tacagaaccttgtct

SEQ ID NO: 1065082 - DNA, 15 bp, Homo sapiens
gtacagaaccttgtc

SEQ ID NO: 1065083 - DNA, 15 bp, Homo sapiens
ggtacagaaccttgt

SEQ ID NO: 1065084 - DNA, 15 bp, Homo sapiens
tggtacagaaccttg

SEQ ID NO: 1065085 - DNA, 15 bp, Homo sapiens
ttggtacagaacctt

SEQ ID NO: 1065086 - DNA, 15 bp, Homo sapiens
attggtacagaacct

SEQ ID NO: 1065087 - DNA, 15 bp, Homo sapiens
cattggtacagaacc

SEQ ID NO: 1065088 - DNA, 15 bp, Homo sapiens
tcattggtacagaac

SEQ ID NO: 1065089 - DNA, 15 bp, Homo sapiens
ttcattggtacagaa

SEQ ID NO: 1065090 - DNA, 15 bp, Homo sapiens
attcattggtacaga

SEQ ID NO: 1065091 - DNA, 15 bp, Homo sapiens
cattcattggtacag

SEQ ID NO: 1065092 - DNA, 15 bp, Homo sapiens
ccattcattggtaca

SEQ ID NO: 1065093 - DNA, 15 bp, Homo sapiens
accattcattggtac

SEQ ID NO: 1065094 - DNA, 15 bp, Homo sapiens
gaccattcattggta

SEQ ID NO: 1065095 - DNA, 15 bp, Homo sapiens
tgaccattcattggt

SEQ ID NO: 1065096 - DNA, 15 bp, Homo sapiens
gtgaccattcattgg

SEQ ID NO: 1065097 - DNA, 15 bp, Homo sapiens
agtgaccattcattg

SEQ ID NO: 1065098 - DNA, 15 bp, Homo sapiens
cagtgaccattcatt

SEQ ID NO: 1065099 - DNA, 15 bp, Homo sapiens
acagtgaccattcat

SEQ ID NO: 1065100 - DNA, 15 bp, Homo sapiens
gacagtgaccattca

SEQ ID NO: 1065101 - DNA, 15 bp, Homo sapiens
tgacagtgaccattc

SEQ ID NO: 1065102 - DNA, 15 bp, Homo sapiens
gtgacagtgaccatt

SEQ ID NO: 1065103 - DNA, 15 bp, Homo sapiens
agtgacagtgaccat

SEQ ID NO: 1065104 - DNA, 15 bp, Homo sapiens
cagtgacagtgacca

SEQ ID NO: 1065105 - DNA, 15 bp, Homo sapiens
ccagtgacagtgacc

SEQ ID NO: 1065106 - DNA, 15 bp, Homo sapiens
cccagtgacagtgac

SEQ ID NO: 1065107 - DNA, 15 bp, Homo sapiens
acccagtgacagtga

SEQ ID NO: 1065108 - DNA, 15 bp, Homo sapiens
aacccagtgacagtg

SEQ ID NO: 1065109 - DNA, 15 bp, Homo sapiens
aaacccagtgacagt

SEQ ID NO: 1065110 - DNA, 15 bp, Homo sapiens
aaaacccagtgacag

SEQ ID NO: 1065111 - DNA, 15 bp, Homo sapiens
caaaacccagtgaca

SEQ ID NO: 1065112 - DNA, 15 bp, Homo sapiens
gcaaaacccagtgac

SEQ ID NO: 1065113 - DNA, 15 bp, Homo sapiens
agcaaaacccagtga

SEQ ID NO: 1065114 - DNA, 15 bp, Homo sapiens
aagcaaaacccagtg

SEQ ID NO: 1065115 - DNA, 15 bp, Homo sapiens
aaagcaaaacccagt

SEQ ID NO: 1065116 - DNA, 15 bp, Homo sapiens
aaaagcaaaacccag

SEQ ID NO: 1065117 - DNA, 15 bp, Homo sapiens
caaaagcaaaaccca

SEQ ID NO: 1065118 - DNA, 15 bp, Homo sapiens
aacaaaagcaaaacc

SEQ ID NO: 1065119 - DNA, 15 bp, Homo sapiens
taacaaaagcaaaac

SEQ ID NO: 1065120 - DNA, 15 bp, Homo sapiens
ataacaaaagcaaaa

SEQ ID NO: 1065121 - DNA, 15 bp, Homo sapiens
aataacaaaagcaaa

SEQ ID NO: 1065122 - DNA, 15 bp, Homo sapiens
aaataacaaaagcaa

SEQ ID NO: 1065123 - DNA, 15 bp, Homo sapiens
taaataacaaaagca

SEQ ID NO: 1065124 - DNA, 15 bp, Homo sapiens
ttaaataacaaaagc

SEQ ID NO: 1065125 - DNA, 15 bp, Homo sapiens
tttaaataacaaaag

SEQ ID NO: 1065126 - DNA, 15 bp, Homo sapiens
atttaaataacaaaa

SEQ ID NO: 1065127 - DNA, 15 bp, Homo sapiens
gatttaaataacaaa

SEQ ID NO: 1065128 - DNA, 15 bp, Homo sapiens
tgatttaaataacaa

SEQ ID NO: 1065129 - DNA, 15 bp, Homo sapiens
ttgatttaaataaca

SEQ ID NO: 1065130 - DNA, 15 bp, Homo sapiens
cttgatttaaataac

SEQ ID NO: 1065131 - DNA, 15 bp, Homo sapiens
tcttgatttaaataa

SEQ ID NO: 1065132 - DNA, 15 bp, Homo sapiens
atcttgatttaaata

SEQ ID NO: 1065133 - DNA, 15 bp, Homo sapiens
tatcttgatttaaat

SEQ ID NO: 1065134 - DNA, 15 bp, Homo sapiens
ttatcttgatttaaa

SEQ ID NO: 1065135 - DNA, 15 bp, Homo sapiens
attatcttgatttaa

SEQ ID NO: 1065136 - DNA, 15 bp, Homo sapiens
cattatcttgattta

SEQ ID NO: 1065137 - DNA, 15 bp, Homo sapiens
tcattatcttgattt

SEQ ID NO: 1065138 - DNA, 15 bp, Homo sapiens
gtcattatcttgatt

SEQ ID NO: 1065139 - DNA, 15 bp, Homo sapiens
agtcattatcttgat

SEQ ID NO: 1065140 - DNA, 15 bp, Homo sapiens
gagtcattatcttga

SEQ ID NO: 1065141 - DNA, 15 bp, Homo sapiens
agagtcattatcttg

SEQ ID NO: 1065142 - DNA, 15 bp, Homo sapiens
gagagtcattatctt

SEQ ID NO: 1065143 - DNA, 15 bp, Homo sapiens
agagagtcattatct

SEQ ID NO: 1065144 - DNA, 15 bp, Homo sapiens
tagagagtcattatc

SEQ ID NO: 1065145 - DNA, 15 bp, Homo sapiens
atagagagtcattat

SEQ ID NO: 1065146 - DNA, 15 bp, Homo sapiens
tatagagagtcatta

SEQ ID NO: 1065147 - DNA, 15 bp, Homo sapiens
ttatagagagtcatt

SEQ ID NO: 1065148 - DNA, 15 bp, Homo sapiens
attatagagagtcat

SEQ ID NO: 1065149 - DNA, 15 bp, Homo sapiens
aattatagagagtca

SEQ ID NO: 1065150 - DNA, 15 bp, Homo sapiens
aaattatagagagtc

SEQ ID NO: 1065151 - DNA, 15 bp, Homo sapiens
aaaattatagagagt

SEQ ID NO: 1065152 - DNA, 15 bp, Homo sapiens
caaaattatagagag

SEQ ID NO: 1065153 - DNA, 15 bp, Homo sapiens
gcaaaattatagaga

SEQ ID NO: 1065154 - DNA, 15 bp, Homo sapiens
agcaaaattatagag

SEQ ID NO: 1065155 - DNA, 15 bp, Homo sapiens
gagcaaaattataga

SEQ ID NO: 1065156 - DNA, 15 bp, Homo sapiens
ggagcaaaattatag

SEQ ID NO: 1065157 - DNA, 15 bp, Homo sapiens
gggagcaaaattata

SEQ ID NO: 1065158 - DNA, 15 bp, Homo sapiens
cgggagcaaaattat

SEQ ID NO: 1065159 - DNA, 15 bp, Homo sapiens
acgggagcaaaatta

SEQ ID NO: 1065160 - DNA, 15 bp, Homo sapiens
tacgggagcaaaatt

SEQ ID NO: 1065161 - DNA, 15 bp, Homo sapiens
ttacgggagcaaaat

SEQ ID NO: 1065162 - DNA, 15 bp, Homo sapiens
gttacgggagcaaaa

SEQ ID NO: 1065163 - DNA, 15 bp, Homo sapiens
agttacgggagcaaa

SEQ ID NO: 1065164 - DNA, 15 bp, Homo sapiens
cagttacgggagcaa

SEQ ID NO: 1065165 - DNA, 15 bp, Homo sapiens
acagttacgggagca

SEQ ID NO: 1065166 - DNA, 15 bp, Homo sapiens
aacagttacgggagc

SEQ ID NO: 1065167 - DNA, 15 bp, Homo sapiens
caacagttacgggag

SEQ ID NO: 1065168 - DNA, 15 bp, Homo sapiens
tcaacagttacggga

SEQ ID NO: 1065169 - DNA, 15 bp, Homo sapiens
ctcaacagttacggg

SEQ ID NO: 1065170 - DNA, 15 bp, Homo sapiens
cctcaacagttacgg

SEQ ID NO: 1065171 - DNA, 15 bp, Homo sapiens
gcctcaacagttacg

SEQ ID NO: 1065172 - DNA, 15 bp, Homo sapiens
agcctcaacagttac

SEQ ID NO: 1065173 - DNA, 15 bp, Homo sapiens
tagcctcaacagtta

SEQ ID NO: 1065174 - DNA, 15 bp, Homo sapiens
ttagcctcaacagtt

SEQ ID NO: 1065175 - DNA, 15 bp, Homo sapiens
cttagcctcaacagt

SEQ ID NO: 1065176 - DNA, 15 bp, Homo sapiens
acttagcctcaacag

SEQ ID NO: 1065177 - DNA, 15 bp, Homo sapiens
gacttagcctcaaca

SEQ ID NO: 1065178 - DNA, 15 bp, Homo sapiens
cgacttagcctcaac

SEQ ID NO: 1065179 - DNA, 15 bp, Homo sapiens
acgacttagcctcaa

SEQ ID NO: 1065180 - DNA, 15 bp, Homo sapiens
tacgacttagcctca

SEQ ID NO: 1065181 - DNA, 15 bp, Homo sapiens
gtacgacttagcctc

SEQ ID NO: 1065182 - DNA, 15 bp, Homo sapiens
ggtacgacttagcct

SEQ ID NO: 1065183 - DNA, 15 bp, Homo sapiens
tggtacgacttagcc

SEQ ID NO: 1065184 - DNA, 15 bp, Homo sapiens
ttggtacgacttagc

SEQ ID NO: 1065185 - DNA, 15 bp, Homo sapiens
attggtacgacttag

SEQ ID NO: 1065186 - DNA, 15 bp, Homo sapiens
aattggtacgactta

SEQ ID NO: 1065187 - DNA, 15 bp, Homo sapiens
aaattggtacgactt

SEQ ID NO: 1065188 - DNA, 15 bp, Homo sapiens
gaaattggtacgact

SEQ ID NO: 1065189 - DNA, 15 bp, Homo sapiens
ggaaattggtacgac

SEQ ID NO: 1065190 - DNA, 15 bp, Homo sapiens
gggaaattggtacga

SEQ ID NO: 1065191 - DNA, 15 bp, Homo sapiens
ggggaaattggtacg

SEQ ID NO: 1065192 - DNA, 15 bp, Homo sapiens
tggggaaattggtac

SEQ ID NO: 1065193 - DNA, 15 bp, Homo sapiens
atggggaaattggta

SEQ ID NO: 1065194 - DNA, 15 bp, Homo sapiens
aatggggaaattggt

SEQ ID NO: 1065195 - DNA, 15 bp, Homo sapiens
gaatggggaaattgg

SEQ ID NO: 1065196 - DNA, 15 bp, Homo sapiens
ggaatggggaaattg

SEQ ID NO: 1065197 - DNA, 15 bp, Homo sapiens
gggaatggggaaatt

SEQ ID NO: 1065198 - DNA, 15 bp, Homo sapiens
ggggaatggggaaat

SEQ ID NO: 1065199 - DNA, 15 bp, Homo sapiens
aggggaatggggaaa

SEQ ID NO: 1065200 - DNA, 15 bp, Homo sapiens
aaggggaatggggaa

SEQ ID NO: 1065201 - DNA, 15 bp, Homo sapiens
caaggggaatgggga

SEQ ID NO: 1065202 - DNA, 15 bp, Homo sapiens
tcaaggggaatgggg

SEQ ID NO: 1065203 - DNA, 15 bp, Homo sapiens
atcaaggggaatggg

SEQ ID NO: 1065204 - DNA, 15 bp, Homo sapiens
tatcaaggggaatgg

SEQ ID NO: 1065205 - DNA, 15 bp, Homo sapiens
gtatcaaggggaatg

SEQ ID NO: 1065206 - DNA, 15 bp, Homo sapiens
agtatcaaggggaat

SEQ ID NO: 1065207 - DNA, 15 bp, Homo sapiens
cagtatcaaggggaa

SEQ ID NO: 1065208 - DNA, 15 bp, Homo sapiens
ccagtatcaagggga

SEQ ID NO: 1065209 - DNA, 15 bp, Homo sapiens
cccagtatcaagggg

SEQ ID NO: 1065210 - DNA, 15 bp, Homo sapiens
acccagtatcaaggg

SEQ ID NO: 1065211 - DNA, 15 bp, Homo sapiens
tacccagtatcaagg

SEQ ID NO: 1065212 - DNA, 15 bp, Homo sapiens
ctacccagtatcaag

SEQ ID NO: 1065213 - DNA, 15 bp, Homo sapiens
tctacccagtatcaa

SEQ ID NO: 1065214 - DNA, 15 bp, Homo sapiens
atctacccagtatca

SEQ ID NO: 1065215 - DNA, 15 bp, Homo sapiens
aatctacccagtatc

SEQ ID NO: 1065216 - DNA, 15 bp, Homo sapiens
aaatctacccagtat

SEQ ID NO: 1065217 - DNA, 15 bp, Homo sapiens
gaaatctacccagta

SEQ ID NO: 1065218 - DNA, 15 bp, Homo sapiens
ggaaatctacccagt

SEQ ID NO: 1065219 - DNA, 15 bp, Homo sapiens
aggaaatctacccag

SEQ ID NO: 1065220 - DNA, 15 bp, Homo sapiens
gaggaaatctaccca

SEQ ID NO: 1065221 - DNA, 15 bp, Homo sapiens
tgaggaaatctaccc

SEQ ID NO: 1065222 - DNA, 15 bp, Homo sapiens
atgaggaaatctacc

SEQ ID NO: 1065223 - DNA, 15 bp, Homo sapiens
tatgaggaaatctac

SEQ ID NO: 1065224 - DNA, 15 bp, Homo sapiens
atatgaggaaatcta

SEQ ID NO: 1065225 - DNA, 15 bp, Homo sapiens
gatatgaggaaatct

SEQ ID NO: 1065226 - DNA, 15 bp, Homo sapiens
tgatatgaggaaatc

SEQ ID NO: 1065227 - DNA, 15 bp, Homo sapiens
atgatatgaggaaat

SEQ ID NO: 1065228 - DNA, 15 bp, Homo sapiens
gatgatatgaggaaa

SEQ ID NO: 1065229 - DNA, 15 bp, Homo sapiens
tgatgatatgaggaa

SEQ ID NO: 1065230 - DNA, 15 bp, Homo sapiens
atgatgatatgagga

SEQ ID NO: 1065231 - DNA, 15 bp, Homo sapiens
gatgatgatatgagg

SEQ ID NO: 1065232 - DNA, 15 bp, Homo sapiens
agatgatgatatgag

SEQ ID NO: 1065233 - DNA, 15 bp, Homo sapiens
gagatgatgatatga

SEQ ID NO: 1065234 - DNA, 15 bp, Homo sapiens
tgagatgatgatatg

SEQ ID NO: 1065235 - DNA, 15 bp, Homo sapiens
gtgagatgatgatat

SEQ ID NO: 1065236 - DNA, 15 bp, Homo sapiens
ggtgagatgatgata

SEQ ID NO: 1065237 - DNA, 15 bp, Homo sapiens
tggtgagatgatgat

SEQ ID NO: 1065238 - DNA, 15 bp, Homo sapiens
tttctccaccaagtg

SEQ ID NO: 1065239 - DNA, 15 bp, Homo sapiens
atttctccaccaagt

SEQ ID NO: 1065240 - DNA, 15 bp, Homo sapiens
aatttctccaccaag

SEQ ID NO: 1065241 - DNA, 15 bp, Homo sapiens
caatttctccaccaa

SEQ ID NO: 1065242 - DNA, 15 bp, Homo sapiens
tcaatttctccacca

SEQ ID NO: 1065243 - DNA, 15 bp, Homo sapiens
atcaatttctccacc

SEQ ID NO: 1065244 - DNA, 15 bp, Homo sapiens
catcaatttctccac

SEQ ID NO: 1065245 - DNA, 15 bp, Homo sapiens
acatcaatttctcca

SEQ ID NO: 1065246 - DNA, 15 bp, Homo sapiens
gacatcaatttctcc

SEQ ID NO: 1065247 - DNA, 15 bp, Homo sapiens
agacatcaatttctc

SEQ ID NO: 1065248 - DNA, 15 bp, Homo sapiens
gagacatcaatttct

SEQ ID NO: 1065249 - DNA, 15 bp, Homo sapiens
tgagacatcaatttc

SEQ ID NO: 1065250 - DNA, 15 bp, Homo sapiens
ctgagacatcaattt

SEQ ID NO: 1065251 - DNA, 15 bp, Homo sapiens
tctgagacatcaatt

SEQ ID NO: 1065252 - DNA, 15 bp, Homo sapiens
ttctgagacatcaat

SEQ ID NO: 1065253 - DNA, 15 bp, Homo sapiens
gttctgagacatcaa

SEQ ID NO: 1065254 - DNA, 15 bp, Homo sapiens
ggttctgagacatca

SEQ ID NO: 1065255 - DNA, 15 bp, Homo sapiens
gggttctgagacatc

SEQ ID NO: 1065256 - DNA, 15 bp, Homo sapiens
agggttctgagacat

SEQ ID NO: 1065257 - DNA, 15 bp, Homo sapiens
cagggttctgagaca

SEQ ID NO: 1065258 - DNA, 15 bp, Homo sapiens
gcagggttctgagac

SEQ ID NO: 1065259 - DNA, 15 bp, Homo sapiens
ggcagggttctgaga

SEQ ID NO: 1065260 - DNA, 15 bp, Homo sapiens
tggcagggttctgag

SEQ ID NO: 1065261 - DNA, 15 bp, Homo sapiens
atggcagggttctga

SEQ ID NO: 1065262 - DNA, 15 bp, Homo sapiens
gatggcagggttctg

SEQ ID NO: 1065263 - DNA, 15 bp, Homo sapiens
agatggcagggttct

SEQ ID NO: 1065264 - DNA, 15 bp, Homo sapiens
gagatggcagggttc

SEQ ID NO: 1065265 - DNA, 15 bp, Homo sapiens
ggagatggcagggtt

SEQ ID NO: 1065266 - DNA, 15 bp, Homo sapiens
aggagatggcagggt

SEQ ID NO: 1065267 - DNA, 15 bp, Homo sapiens
gaggagatggcaggg

SEQ ID NO: 1065268 - DNA, 15 bp, Homo sapiens
tgaggagatggcagg

SEQ ID NO: 1065269 - DNA, 15 bp, Homo sapiens
ttgaggagatggcag

SEQ ID NO: 1065270 - DNA, 15 bp, Homo sapiens
gttgaggagatggca

SEQ ID NO: 1065271 - DNA, 15 bp, Homo sapiens
tgttgaggagatggc

SEQ ID NO: 1065272 - DNA, 15 bp, Homo sapiens
ctgttgaggagatgg

SEQ ID NO: 1065273 - DNA, 15 bp, Homo sapiens
cctgttgaggagatg

SEQ ID NO: 1065274 - DNA, 15 bp, Homo sapiens
acctgttgaggagat

SEQ ID NO: 1065275 - DNA, 15 bp, Homo sapiens
aacctgttgaggaga

SEQ ID NO: 1065276 - DNA, 15 bp, Homo sapiens
taacctgttgaggag

SEQ ID NO: 1065277 - DNA, 15 bp, Homo sapiens
ataacctgttgagga

SEQ ID NO: 1065278 - DNA, 15 bp, Homo sapiens
gataacctgttgagg

SEQ ID NO: 1065279 - DNA, 15 bp, Homo sapiens
agataacctgttgag

SEQ ID NO: 1065280 - DNA, 15 bp, Homo sapiens
aagataacctgttga

SEQ ID NO: 1065281 - DNA, 15 bp, Homo sapiens
gaagataacctgttg

SEQ ID NO: 1065282 - DNA, 15 bp, Homo sapiens
agaagataacctgtt

SEQ ID NO: 1065283 - DNA, 15 bp, Homo sapiens
cagaagataacctgt

SEQ ID NO: 1065284 - DNA, 15 bp, Homo sapiens
acagaagataacctg

SEQ ID NO: 1065285 - DNA, 15 bp, Homo sapiens
gacagaagataacct

SEQ ID NO: 1065286 - DNA, 15 bp, Homo sapiens
ggacagaagataacc

SEQ ID NO: 1065287 - DNA, 15 bp, Homo sapiens
gggacagaagataac

SEQ ID NO: 1065288 - DNA, 15 bp, Homo sapiens
agggacagaagataa

SEQ ID NO: 1065289 - DNA, 15 bp, Homo sapiens
cagggacagaagata

SEQ ID NO: 1065290 - DNA, 15 bp, Homo sapiens
tcagggacagaagat

SEQ ID NO: 1065291 - DNA, 15 bp, Homo sapiens
atcagggacagaaga

SEQ ID NO: 1065292 - DNA, 15 bp, Homo sapiens
catcagggacagaag

SEQ ID NO: 1065293 - DNA, 15 bp, Homo sapiens
tcatcagggacagaa

SEQ ID NO: 1065294 - DNA, 15 bp, Homo sapiens
ctcatcagggacaga

SEQ ID NO: 1065295 - DNA, 15 bp, Homo sapiens
cctcatcagggacag

SEQ ID NO: 1065296 - DNA, 15 bp, Homo sapiens
tcctcatcagggaca

SEQ ID NO: 1065297 - DNA, 15 bp, Homo sapiens
ctcctcatcagggac

SEQ ID NO: 1065298 - DNA, 15 bp, Homo sapiens
tctcctcatcaggga

SEQ ID NO: 1065299 - DNA, 15 bp, Homo sapiens
atctcctcatcaggg

SEQ ID NO: 1065300 - DNA, 15 bp, Homo sapiens
catctcctcatcagg

SEQ ID NO: 1065301 - DNA, 15 bp, Homo sapiens
gcatctcctcatcag

SEQ ID NO: 1065302 - DNA, 15 bp, Homo sapiens
ggcatctcctcatca

SEQ ID NO: 1065303 - DNA, 15 bp, Homo sapiens
cggcatctcctcatc

SEQ ID NO: 1065304 - DNA, 15 bp, Homo sapiens
ccggcatctcctcat

SEQ ID NO: 1065305 - DNA, 15 bp, Homo sapiens
cccggcatctcctca

SEQ ID NO: 1065306 - DNA, 15 bp, Homo sapiens
ccccggcatctcctc

SEQ ID NO: 1065307 - DNA, 15 bp, Homo sapiens
cccccggcatctcct

SEQ ID NO: 1065308 - DNA, 15 bp, Homo sapiens
ccccccggcatctcc

SEQ ID NO: 1065309 - DNA, 15 bp, Homo sapiens
accccccggcatctc

SEQ ID NO: 1065310 - DNA, 15 bp, Homo sapiens
gaccccccggcatct

SEQ ID NO: 1065311 - DNA, 15 bp, Homo sapiens
agaccccccggcatc

SEQ ID NO: 1065312 - DNA, 15 bp, Homo sapiens
cagaccccccggcat

SEQ ID NO: 1065313 - DNA, 15 bp, Homo sapiens
ccagaccccccggca

SEQ ID NO: 1065314 - DNA, 15 bp, Homo sapiens
cccagaccccccggc

SEQ ID NO: 1065315 - DNA, 15 bp, Homo sapiens
tcccagaccccccgg

SEQ ID NO: 1065316 - DNA, 15 bp, Homo sapiens
gtcccagaccccccg

SEQ ID NO: 1065317 - DNA, 15 bp, Homo sapiens
tgtcccagacccccc

SEQ ID NO: 1065318 - DNA, 15 bp, Homo sapiens
atgtcccagaccccc

SEQ ID NO: 1065319 - DNA, 15 bp, Homo sapiens
gatgtcccagacccc

SEQ ID NO: 1065320 - DNA, 15 bp, Homo sapiens
tgatgtcccagaccc

SEQ ID NO: 1065321 - DNA, 15 bp, Homo sapiens
ctgatgtcccagacc

SEQ ID NO: 1065322 - DNA, 15 bp, Homo sapiens
cctgatgtcccagac

SEQ ID NO: 1065323 - DNA, 15 bp, Homo sapiens
acctgatgtcccaga

SEQ ID NO: 1065324 - DNA, 15 bp, Homo sapiens
aacctgatgtcccag

SEQ ID NO: 1065325 - DNA, 15 bp, Homo sapiens
gaacctgatgtccca

SEQ ID NO: 1065326 - DNA, 15 bp, Homo sapiens
agaacctgatgtccc

SEQ ID NO: 1065327 - DNA, 15 bp, Homo sapiens
gagaacctgatgtcc

SEQ ID NO: 1065328 - DNA, 15 bp, Homo sapiens
ggagaacctgatgtc

SEQ ID NO: 1065329 - DNA, 15 bp, Homo sapiens
tggagaacctgatgt

SEQ ID NO: 1065330 - DNA, 15 bp, Homo sapiens
gtggagaacctgatg

SEQ ID NO: 1065331 - DNA, 15 bp, Homo sapiens
ggtggagaacctgat

SEQ ID NO: 1065332 - DNA, 15 bp, Homo sapiens
tggtggagaacctga

SEQ ID NO: 1065333 - DNA, 15 bp, Homo sapiens
ttggtggagaacctg

SEQ ID NO: 1065334 - DNA, 15 bp, Homo sapiens
cttggtggagaacct

SEQ ID NO: 1065335 - DNA, 15 bp, Homo sapiens
acttggtggagaacc

SEQ ID NO: 1065336 - DNA, 15 bp, Homo sapiens
cacttggtggagaac

SEQ ID NO: 1065337 - DNA, 15 bp, Homo sapiens
gtcatcatctcacca

SEQ ID NO: 1065338 - DNA, 15 bp, Homo sapiens
tgtcatcatctcacc

SEQ ID NO: 1065339 - DNA, 15 bp, Homo sapiens
atgtcatcatctcac

SEQ ID NO: 1065340 - DNA, 15 bp, Homo sapiens
catgtcatcatctca

SEQ ID NO: 1065341 - DNA, 15 bp, Homo sapiens
acatgtcatcatctc

SEQ ID NO: 1065342 - DNA, 15 bp, Homo sapiens
gacatgtcatcatct

SEQ ID NO: 1065343 - DNA, 15 bp, Homo sapiens
cgacatgtcatcatc

SEQ ID NO: 1065344 - DNA, 15 bp, Homo sapiens
tcgacatgtcatcat

SEQ ID NO: 1065345 - DNA, 15 bp, Homo sapiens
ttcgacatgtcatca

SEQ ID NO: 1065346 - DNA, 15 bp, Homo sapiens
cttcgacatgtcatc

SEQ ID NO: 1065347 - DNA, 15 bp, Homo sapiens
acttcgacatgtcat

SEQ ID NO: 1065348 - DNA, 15 bp, Homo sapiens
gacttcgacatgtca

SEQ ID NO: 1065349 - DNA, 15 bp, Homo sapiens
agacttcgacatgtc

SEQ ID NO: 1065350 - DNA, 15 bp, Homo sapiens
tagacttcgacatgt

SEQ ID NO: 1065351 - DNA, 15 bp, Homo sapiens
gtagacttcgacatg

SEQ ID NO: 1065352 - DNA, 15 bp, Homo sapiens
ggtagacttcgacat

SEQ ID NO: 1065353 - DNA, 15 bp, Homo sapiens
gggtagacttcgaca

SEQ ID NO: 1065354 - DNA, 15 bp, Homo sapiens
tgggtagacttcgac

SEQ ID NO: 1065355 - DNA, 15 bp, Homo sapiens
ttgggtagacttcga

SEQ ID NO: 1065356 - DNA, 15 bp, Homo sapiens
attgggtagacttcg

SEQ ID NO: 1065357 - DNA, 15 bp, Homo sapiens
tattgggtagacttc

SEQ ID NO: 1065358 - DNA, 15 bp, Homo sapiens
atattgggtagactt

SEQ ID NO: 1065359 - DNA, 15 bp, Homo sapiens
gatattgggtagact

SEQ ID NO: 1065360 - DNA, 15 bp, Homo sapiens
ggatattgggtagac

SEQ ID NO: 1065361 - DNA, 15 bp, Homo sapiens
gggatattgggtaga

SEQ ID NO: 1065362 - DNA, 15 bp, Homo sapiens
ggggatattgggtag

SEQ ID NO: 1065363 - DNA, 15 bp, Homo sapiens
gggggatattgggta

SEQ ID NO: 1065364 - DNA, 15 bp, Homo sapiens
tgggggatattgggt

SEQ ID NO: 1065365 - DNA, 15 bp, Homo sapiens
ctgggggatattggg

SEQ ID NO: 1065366 - DNA, 15 bp, Homo sapiens
actgggggatattgg

SEQ ID NO: 1065367 - DNA, 15 bp, Homo sapiens
tactgggggatattg

SEQ ID NO: 1065368 - DNA, 15 bp, Homo sapiens
ttactgggggatatt

SEQ ID NO: 1065369 - DNA, 15 bp, Homo sapiens
cttactgggggatat

SEQ ID NO: 1065370 - DNA, 15 bp, Homo sapiens
tcttactgggggata

SEQ ID NO: 1065371 - DNA, 15 bp, Homo sapiens
ctcttactgggggat

SEQ ID NO: 1065372 - DNA, 15 bp, Homo sapiens
tctcttactggggga

SEQ ID NO: 1065373 - DNA, 15 bp, Homo sapiens
ttctcttactggggg

SEQ ID NO: 1065374 - DNA, 15 bp, Homo sapiens
attctcttactgggg

SEQ ID NO: 1065375 - DNA, 15 bp, Homo sapiens
tattctcttactggg

SEQ ID NO: 1065376 - DNA, 15 bp, Homo sapiens
ttattctcttactgg

SEQ ID NO: 1065377 - DNA, 15 bp, Homo sapiens
cttattctcttactg

SEQ ID NO: 1065378 - DNA, 15 bp, Homo sapiens
ccttattctcttact

SEQ ID NO: 1065379 - DNA, 15 bp, Homo sapiens
cccttattctcttac

SEQ ID NO: 1065380 - DNA, 15 bp, Homo sapiens
ccccttattctctta

SEQ ID NO: 1065381 - DNA, 15 bp, Homo sapiens
gccccttattctctt

SEQ ID NO: 1065382 - DNA, 15 bp, Homo sapiens
tgccccttattctct

SEQ ID NO: 1065383 - DNA, 15 bp, Homo sapiens
ttgccccttattctc

SEQ ID NO: 1065384 - DNA, 15 bp, Homo sapiens
cttgccccttattct

SEQ ID NO: 1065385 - DNA, 15 bp, Homo sapiens
tcttgccccttattc

SEQ ID NO: 1065386 - DNA, 15 bp, Homo sapiens
ttcttgccccttatt

SEQ ID NO: 1065387 - DNA, 15 bp, Homo sapiens
attcttgccccttat

SEQ ID NO: 1065388 - DNA, 15 bp, Homo sapiens
cattcttgcccctta

SEQ ID NO: 1065389 - DNA, 15 bp, Homo sapiens
tcattcttgcccctt

SEQ ID NO: 1065390 - DNA, 15 bp, Homo sapiens
gtcattcttgcccct

SEQ ID NO: 1065391 - DNA, 15 bp, Homo sapiens
agtcattcttgcccc

SEQ ID NO: 1065392 - DNA, 15 bp, Homo sapiens
gagtcattcttgccc

SEQ ID NO: 1065393 - DNA, 15 bp, Homo sapiens
tgagtcattcttgcc

SEQ ID NO: 1065394 - DNA, 15 bp, Homo sapiens
atgagtcattcttgc

SEQ ID NO: 1065395 - DNA, 15 bp, Homo sapiens
catgagtcattcttg

SEQ ID NO: 1065396 - DNA, 15 bp, Homo sapiens
tcatgagtcattctt

SEQ ID NO: 1065397 - DNA, 15 bp, Homo sapiens
ttcatgagtcattct

SEQ ID NO: 1065398 - DNA, 15 bp, Homo sapiens
gttcatgagtcattc

SEQ ID NO: 1065399 - DNA, 15 bp, Homo sapiens
agttcatgagtcatt

SEQ ID NO: 1065400 - DNA, 15 bp, Homo sapiens
gagttcatgagtcat

SEQ ID NO: 1065401 - DNA, 15 bp, Homo sapiens
ggagttcatgagtca

SEQ ID NO: 1065402 - DNA, 15 bp, Homo sapiens
aggagttcatgagtc

SEQ ID NO: 1065403 - DNA, 15 bp, Homo sapiens
caggagttcatgagt

SEQ ID NO: 1065404 - DNA, 15 bp, Homo sapiens
acaggagttcatgag

SEQ ID NO: 1065405 - DNA, 15 bp, Homo sapiens
tacaggagttcatga

SEQ ID NO: 1065406 - DNA, 15 bp, Homo sapiens
gtacaggagttcatg

SEQ ID NO: 1065407 - DNA, 15 bp, Homo sapiens
ggtacaggagttcat

SEQ ID NO: 1065408 - DNA, 15 bp, Homo sapiens
tggtacaggagttca

SEQ ID NO: 1065409 - DNA, 15 bp, Homo sapiens
ctggtacaggagttc

SEQ ID NO: 1065410 - DNA, 15 bp, Homo sapiens
tctggtacaggagtt

SEQ ID NO: 1065411 - DNA, 15 bp, Homo sapiens
ttctggtacaggagt

SEQ ID NO: 1065412 - DNA, 15 bp, Homo sapiens
tttctggtacaggag

SEQ ID NO: 1065413 - DNA, 15 bp, Homo sapiens
atttctggtacagga

SEQ ID NO: 1065414 - DNA, 15 bp, Homo sapiens
gatttctggtacagg

SEQ ID NO: 1065415 - DNA, 15 bp, Homo sapiens
tgatttctggtacag

SEQ ID NO: 1065416 - DNA, 15 bp, Homo sapiens
ttgatttctggtaca

SEQ ID NO: 1065417 - DNA, 15 bp, Homo sapiens
tttgatttctggtac

SEQ ID NO: 1065418 - DNA, 15 bp, Homo sapiens
gtttgatttctggta

SEQ ID NO: 1065419 - DNA, 15 bp, Homo sapiens
agtttgatttctggt

SEQ ID NO: 1065420 - DNA, 15 bp, Homo sapiens
aagtttgatttctgg

SEQ ID NO: 1065421 - DNA, 15 bp, Homo sapiens
caagtttgatttctg

SEQ ID NO: 1065422 - DNA, 15 bp, Homo sapiens
gcaagtttgatttct

SEQ ID NO: 1065423 - DNA, 15 bp, Homo sapiens
ggcaagtttgatttc

SEQ ID NO: 1065424 - DNA, 15 bp, Homo sapiens
tggcaagtttgattt

SEQ ID NO: 1065425 - DNA, 15 bp, Homo sapiens
atggcaagtttgatt

SEQ ID NO: 1065426 - DNA, 15 bp, Homo sapiens
catggcaagtttgat

SEQ ID NO: 1065427 - DNA, 15 bp, Homo sapiens
gcatggcaagtttga

SEQ ID NO: 1065428 - DNA, 15 bp, Homo sapiens
ggcatggcaagtttg

SEQ ID NO: 1065429 - DNA, 15 bp, Homo sapiens
aggcatggcaagttt

SEQ ID NO: 1065430 - DNA, 15 bp, Homo sapiens
taggcatggcaagtt

SEQ ID NO: 1065431 - DNA, 15 bp, Homo sapiens
ctaggcatggcaagt

SEQ ID NO: 1065432 - DNA, 15 bp, Homo sapiens
cctaggcatggcaag

SEQ ID NO: 1065433 - DNA, 15 bp, Homo sapiens
tcctaggcatggcaa

SEQ ID NO: 1065434 - DNA, 15 bp, Homo sapiens
ttcctaggcatggca

SEQ ID NO: 1065435 - DNA, 15 bp, Homo sapiens
cttcctaggcatggc

SEQ ID NO: 1065436 - DNA, 15 bp, Homo sapiens
gcttcctaggcatgg

SEQ ID NO: 1065437 - DNA, 15 bp, Homo sapiens
tgcttcctaggcatg

SEQ ID NO: 1065438 - DNA, 15 bp, Homo sapiens
ttgcttcctaggcat

SEQ ID NO: 1065439 - DNA, 15 bp, Homo sapiens
tttgcttcctaggca

SEQ ID NO: 1065440 - DNA, 15 bp, Homo sapiens
ttttgcttcctaggc

SEQ ID NO: 1065441 - DNA, 15 bp, Homo sapiens
attttgcttcctagg

SEQ ID NO: 1065442 - DNA, 15 bp, Homo sapiens
tattttgcttcctag

SEQ ID NO: 1065443 - DNA, 15 bp, Homo sapiens
atattttgcttccta

SEQ ID NO: 1065444 - DNA, 15 bp, Homo sapiens
catattttgcttcct

SEQ ID NO: 1065445 - DNA, 15 bp, Homo sapiens
tcatattttgcttcc

SEQ ID NO: 1065446 - DNA, 15 bp, Homo sapiens
ttcatattttgcttc

SEQ ID NO: 1065447 - DNA, 15 bp, Homo sapiens
cttcatattttgctt

SEQ ID NO: 1065448 - DNA, 15 bp, Homo sapiens
gcttcatattttgct

SEQ ID NO: 1065449 - DNA, 15 bp, Homo sapiens
tgcttcatattttgc

SEQ ID NO: 1065450 - DNA, 15 bp, Homo sapiens
gtgcttcatattttg

SEQ ID NO: 1065451 - DNA, 15 bp, Homo sapiens
tgtgcttcatatttt

SEQ ID NO: 1065452 - DNA, 15 bp, Homo sapiens
atgtgcttcatattt

SEQ ID NO: 1065453 - DNA, 15 bp, Homo sapiens
catgtgcttcatatt

SEQ ID NO: 1065454 - DNA, 15 bp, Homo sapiens
tcatgtgcttcatat

SEQ ID NO: 1065455 - DNA, 15 bp, Homo sapiens
ttcatgtgcttcata

SEQ ID NO: 1065456 - DNA, 15 bp, Homo sapiens
gttcatgtgcttcat

SEQ ID NO: 1065457 - DNA, 15 bp, Homo sapiens
tgttcatgtgcttca

SEQ ID NO: 1065458 - DNA, 15 bp, Homo sapiens
ctgttcatgtgcttc

SEQ ID NO: 1065459 - DNA, 15 bp, Homo sapiens
cctgttcatgtgctt

SEQ ID NO: 1065460 - DNA, 15 bp, Homo sapiens
acctgttcatgtgct

SEQ ID NO: 1065461 - DNA, 15 bp, Homo sapiens
cacctgttcatgtgc

SEQ ID NO: 1065462 - DNA, 15 bp, Homo sapiens
ccacctgttcatgtg

SEQ ID NO: 1065463 - DNA, 15 bp, Homo sapiens
accacctgttcatgt

SEQ ID NO: 1065464 - DNA, 15 bp, Homo sapiens
taccacctgttcatg

SEQ ID NO: 1065465 - DNA, 15 bp, Homo sapiens
ttaccacctgttcat

SEQ ID NO: 1065466 - DNA, 15 bp, Homo sapiens
tttaccacctgttca

SEQ ID NO: 1065467 - DNA, 15 bp, Homo sapiens
ctttaccacctgttc

SEQ ID NO: 1065468 - DNA, 15 bp, Homo sapiens
cctttaccacctgtt

SEQ ID NO: 1065469 - DNA, 15 bp, Homo sapiens
ccctttaccacctgt

SEQ ID NO: 1065470 - DNA, 15 bp, Homo sapiens
tccctttaccacctg

SEQ ID NO: 1065471 - DNA, 15 bp, Homo sapiens
ttccctttaccacct

SEQ ID NO: 1065472 - DNA, 15 bp, Homo sapiens
attccctttaccacc

SEQ ID NO: 1065473 - DNA, 15 bp, Homo sapiens
aattccctttaccac

SEQ ID NO: 1065474 - DNA, 15 bp, Homo sapiens
gaattccctttacca

SEQ ID NO: 1065475 - DNA, 15 bp, Homo sapiens
agaattccctttacc

SEQ ID NO: 1065476 - DNA, 15 bp, Homo sapiens
aagaattccctttac

SEQ ID NO: 1065477 - DNA, 15 bp, Homo sapiens
aaagaattcccttta

SEQ ID NO: 1065478 - DNA, 15 bp, Homo sapiens
gaaagaattcccttt

SEQ ID NO: 1065479 - DNA, 15 bp, Homo sapiens
tgaaagaattccctt

SEQ ID NO: 1065480 - DNA, 15 bp, Homo sapiens
ttgaaagaattccct

SEQ ID NO: 1065481 - DNA, 15 bp, Homo sapiens
cttgaaagaattccc

SEQ ID NO: 1065482 - DNA, 15 bp, Homo sapiens
tcttgaaagaattcc

SEQ ID NO: 1065483 - DNA, 15 bp, Homo sapiens
ttcttgaaagaattc

SEQ ID NO: 1065484 - DNA, 15 bp, Homo sapiens
tttcttgaaagaatt

SEQ ID NO: 1065485 - DNA, 15 bp, Homo sapiens
ctttcttgaaagaat

SEQ ID NO: 1065486 - DNA, 15 bp, Homo sapiens
tctttcttgaaagaa

SEQ ID NO: 1065487 - DNA, 15 bp, Homo sapiens
ctctttcttgaaaga

SEQ ID NO: 1065488 - DNA, 15 bp, Homo sapiens
cctctttcttgaaag

SEQ ID NO: 1065489 - DNA, 15 bp, Homo sapiens
acctctttcttgaaa

SEQ ID NO: 1065490 - DNA, 15 bp, Homo sapiens
aacctctttcttgaa

SEQ ID NO: 1065491 - DNA, 15 bp, Homo sapiens
caacctctttcttga

SEQ ID NO: 1065492 - DNA, 15 bp, Homo sapiens
ccaacctctttcttg

SEQ ID NO: 1065493 - DNA, 15 bp, Homo sapiens
cccaacctctttctt

SEQ ID NO: 1065494 - DNA, 15 bp, Homo sapiens
ccccaacctctttct

SEQ ID NO: 1065495 - DNA, 15 bp, Homo sapiens
accccaacctctttc

SEQ ID NO: 1065496 - DNA, 15 bp, Homo sapiens
aaccccaacctcttt

SEQ ID NO: 1065497 - DNA, 15 bp, Homo sapiens
taaccccaacctctt

SEQ ID NO: 1065498 - DNA, 15 bp, Homo sapiens
gtaaccccaacctct

SEQ ID NO: 1065499 - DNA, 15 bp, Homo sapiens
tgtaaccccaacctc

SEQ ID NO: 1065500 - DNA, 15 bp, Homo sapiens
ttgtaaccccaacct

SEQ ID NO: 1065501 - DNA, 15 bp, Homo sapiens
tttgtaaccccaacc

SEQ ID NO: 1065502 - DNA, 15 bp, Homo sapiens
atttgtaaccccaac

SEQ ID NO: 1065503 - DNA, 15 bp, Homo sapiens
aatttgtaaccccaa

SEQ ID NO: 1065504 - DNA, 15 bp, Homo sapiens
taatttgtaacccca

SEQ ID NO: 1065505 - DNA, 15 bp, Homo sapiens
ttaatttgtaacccc

SEQ ID NO: 1065506 - DNA, 15 bp, Homo sapiens
attaatttgtaaccc

SEQ ID NO: 1065507 - DNA, 15 bp, Homo sapiens
cattaatttgtaacc

SEQ ID NO: 1065508 - DNA, 15 bp, Homo sapiens
gcattaatttgtaac

SEQ ID NO: 1065509 - DNA, 15 bp, Homo sapiens
ggcattaatttgtaa

SEQ ID NO: 1065510 - DNA, 15 bp, Homo sapiens
gggcattaatttgta

SEQ ID NO: 1065511 - DNA, 15 bp, Homo sapiens
tgggcattaatttgt

SEQ ID NO: 1065512 - DNA, 15 bp, Homo sapiens
ttgggcattaatttg

SEQ ID NO: 1065513 - DNA, 15 bp, Homo sapiens
tttgggcattaattt

SEQ ID NO: 1065514 - DNA, 15 bp, Homo sapiens
gtttgggcattaatt

SEQ ID NO: 1065515 - DNA, 15 bp, Homo sapiens
tgtttgggcattaat

SEQ ID NO: 1065516 - DNA, 15 bp, Homo sapiens
ttgtttgggcattaa

SEQ ID NO: 1065517 - DNA, 15 bp, Homo sapiens
attgtttgggcatta

SEQ ID NO: 1065518 - DNA, 15 bp, Homo sapiens
tattgtttgggcatt

SEQ ID NO: 1065519 - DNA, 15 bp, Homo sapiens
ttattgtttgggcat

SEQ ID NO: 1065520 - DNA, 15 bp, Homo sapiens
gttattgtttgggca

SEQ ID NO: 1065521 - DNA, 15 bp, Homo sapiens
ggttattgtttgggc

SEQ ID NO: 1065522 - DNA, 15 bp, Homo sapiens
tggttattgtttggg

SEQ ID NO: 1065523 - DNA, 15 bp, Homo sapiens
ttggttattgtttgg

SEQ ID NO: 1065524 - DNA, 15 bp, Homo sapiens
cttggttattgtttg

SEQ ID NO: 1065525 - DNA, 15 bp, Homo sapiens
tcttggttattgttt

SEQ ID NO: 1065526 - DNA, 15 bp, Homo sapiens
gtcttggttattgtt

SEQ ID NO: 1065527 - DNA, 15 bp, Homo sapiens
ggtcttggttattgt

SEQ ID NO: 1065528 - DNA, 15 bp, Homo sapiens
gggtcttggttattg

SEQ ID NO: 1065529 - DNA, 15 bp, Homo sapiens
ggggtcttggttatt

SEQ ID NO: 1065530 - DNA, 15 bp, Homo sapiens
aggggtcttggttat

SEQ ID NO: 1065531 - DNA, 15 bp, Homo sapiens
aaggggtcttggtta

SEQ ID NO: 1065532 - DNA, 15 bp, Homo sapiens
gaaggggtcttggtt

SEQ ID NO: 1065533 - DNA, 15 bp, Homo sapiens
ggaaggggtcttggt

SEQ ID NO: 1065534 - DNA, 15 bp, Homo sapiens
tggaaggggtcttgg

SEQ ID NO: 1065535 - DNA, 15 bp, Homo sapiens
ttggaaggggtcttg

SEQ ID NO: 1065536 - DNA, 15 bp, Homo sapiens
attggaaggggtctt

SEQ ID NO: 1065537 - DNA, 15 bp, Homo sapiens
aattggaaggggtct

SEQ ID NO: 1065538 - DNA, 15 bp, Homo sapiens
taattggaaggggtc

SEQ ID NO: 1065539 - DNA, 15 bp, Homo sapiens
ataattggaaggggt

SEQ ID NO: 1065540 - DNA, 15 bp, Homo sapiens
cataattggaagggg

SEQ ID NO: 1065541 - DNA, 15 bp, Homo sapiens
acataattggaaggg

SEQ ID NO: 1065542 - DNA, 15 bp, Homo sapiens
cacataattggaagg

SEQ ID NO: 1065543 - DNA, 15 bp, Homo sapiens
acacataattggaag

SEQ ID NO: 1065544 - DNA, 15 bp, Homo sapiens
tacacataattggaa

SEQ ID NO: 1065545 - DNA, 15 bp, Homo sapiens
atacacataattgga

SEQ ID NO: 1065546 - DNA, 15 bp, Homo sapiens
aatacacataattgg

SEQ ID NO: 1065547 - DNA, 15 bp, Homo sapiens
taatacacataattg

SEQ ID NO: 1065548 - DNA, 15 bp, Homo sapiens
ttaatacacataatt

SEQ ID NO: 1065549 - DNA, 15 bp, Homo sapiens
attaatacacataat

SEQ ID NO: 1065550 - DNA, 15 bp, Homo sapiens
aattaatacacataa

SEQ ID NO: 1065551 - DNA, 15 bp, Homo sapiens
taattaatacacata

SEQ ID NO: 1065552 - DNA, 15 bp, Homo sapiens
ataattaatacacat

SEQ ID NO: 1065553 - DNA, 15 bp, Homo sapiens
aataattaatacaca

SEQ ID NO: 1065554 - DNA, 15 bp, Homo sapiens
aaataattaatacac

SEQ ID NO: 1065555 - DNA, 15 bp, Homo sapiens
taaataattaataca

SEQ ID NO: 1065556 - DNA, 15 bp, Homo sapiens
gtaaataattaatac

SEQ ID NO: 1065557 - DNA, 15 bp, Homo sapiens
agtaaataattaata

SEQ ID NO: 1065558 - DNA, 15 bp, Homo sapiens
aagtaaataattaat

SEQ ID NO: 1065559 - DNA, 15 bp, Homo sapiens
taagtaaataattaa

SEQ ID NO: 1065560 - DNA, 15 bp, Homo sapiens
gtaagtaaataatta

SEQ ID NO: 1065561 - DNA, 15 bp, Homo sapiens
agtaagtaaataatt

SEQ ID NO: 1065562 - DNA, 15 bp, Homo sapiens
gagtaagtaaataat

SEQ ID NO: 1065563 - DNA, 15 bp, Homo sapiens
agagtaagtaaataa

SEQ ID NO: 1065564 - DNA, 15 bp, Homo sapiens
cagagtaagtaaata

SEQ ID NO: 1065565 - DNA, 15 bp, Homo sapiens
gcagagtaagtaaat

SEQ ID NO: 1065566 - DNA, 15 bp, Homo sapiens
tgcagagtaagtaaa

SEQ ID NO: 1065567 - DNA, 15 bp, Homo sapiens
gtgcagagtaagtaa

SEQ ID NO: 1065568 - DNA, 15 bp, Homo sapiens
tgtgcagagtaagta

SEQ ID NO: 1065569 - DNA, 15 bp, Homo sapiens
atgtgcagagtaagt

SEQ ID NO: 1065570 - DNA, 15 bp, Homo sapiens
catgtgcagagtaag

SEQ ID NO: 1065571 - DNA, 15 bp, Homo sapiens
tcatgtgcagagtaa

SEQ ID NO: 1065572 - DNA, 15 bp, Homo sapiens
gtcatgtgcagagta

SEQ ID NO: 1065573 - DNA, 15 bp, Homo sapiens
tgtcatgtgcagagt

SEQ ID NO: 1065574 - DNA, 15 bp, Homo sapiens
atgtcatgtgcagag

SEQ ID NO: 1065575 - DNA, 15 bp, Homo sapiens
aatgtcatgtgcaga

SEQ ID NO: 1065576 - DNA, 15 bp, Homo sapiens
aaatgtcatgtgcag

SEQ ID NO: 1065577 - DNA, 15 bp, Homo sapiens
caaatgtcatgtgca

SEQ ID NO: 1065578 - DNA, 15 bp, Homo sapiens
ccaaatgtcatgtgc

SEQ ID NO: 1065579 - DNA, 15 bp, Homo sapiens
gccaaatgtcatgtg

SEQ ID NO: 1065580 - DNA, 15 bp, Homo sapiens
tgccaaatgtcatgt

SEQ ID NO: 1065581 - DNA, 15 bp, Homo sapiens
ttgccaaatgtcatg

SEQ ID NO: 1065582 - DNA, 15 bp, Homo sapiens
attgccaaatgtcat

SEQ ID NO: 1065583 - DNA, 15 bp, Homo sapiens
tattgccaaatgtca

SEQ ID NO: 1065584 - DNA, 15 bp, Homo sapiens
atattgccaaatgtc

SEQ ID NO: 1065585 - DNA, 15 bp, Homo sapiens
tatattgccaaatgt

SEQ ID NO: 1065586 - DNA, 15 bp, Homo sapiens
ttatattgccaaatg

SEQ ID NO: 1065587 - DNA, 15 bp, Homo sapiens
cttatattgccaaat

SEQ ID NO: 1065588 - DNA, 15 bp, Homo sapiens
tcttatattgccaaa

SEQ ID NO: 1065589 - DNA, 15 bp, Homo sapiens
atcttatattgccaa

SEQ ID NO: 1065590 - DNA, 15 bp, Homo sapiens
aatcttatattgcca

SEQ ID NO: 1065591 - DNA, 15 bp, Homo sapiens
gaatcttatattgcc

SEQ ID NO: 1065592 - DNA, 15 bp, Homo sapiens
tgaatcttatattgc

SEQ ID NO: 1065593 - DNA, 15 bp, Homo sapiens
gtgaatcttatattg

SEQ ID NO: 1065594 - DNA, 15 bp, Homo sapiens
tgtgaatcttatatt

SEQ ID NO: 1065595 - DNA, 15 bp, Homo sapiens
ttgtgaatcttatat

SEQ ID NO: 1065596 - DNA, 15 bp, Homo sapiens
tttgtgaatcttata

SEQ ID NO: 1065597 - DNA, 15 bp, Homo sapiens
ctttgtgaatcttat

SEQ ID NO: 1065598 - DNA, 15 bp, Homo sapiens
tctttgtgaatctta

SEQ ID NO: 1065599 - DNA, 15 bp, Homo sapiens
atctttgtgaatctt

SEQ ID NO: 1065600 - DNA, 15 bp, Homo sapiens
catctttgtgaatct

SEQ ID NO: 1065601 - DNA, 15 bp, Homo sapiens
tcatctttgtgaatc

SEQ ID NO: 1065602 - DNA, 15 bp, Homo sapiens
ttcatctttgtgaat

SEQ ID NO: 1065603 - DNA, 15 bp, Homo sapiens
attcatctttgtgaa

SEQ ID NO: 1065604 - DNA, 15 bp, Homo sapiens
gattcatctttgtga

SEQ ID NO: 1065605 - DNA, 15 bp, Homo sapiens
tgattcatctttgtg

SEQ ID NO: 1065606 - DNA, 15 bp, Homo sapiens
ctgattcatctttgt

SEQ ID NO: 1065607 - DNA, 15 bp, Homo sapiens
tctgattcatctttg

SEQ ID NO: 1065608 - DNA, 15 bp, Homo sapiens
gtctgattcatcttt

SEQ ID NO: 1065609 - DNA, 15 bp, Homo sapiens
tgtctgattcatctt

SEQ ID NO: 1065610 - DNA, 15 bp, Homo sapiens
atgtctgattcatct

SEQ ID NO: 1065611 - DNA, 15 bp, Homo sapiens
catgtctgattcatc

SEQ ID NO: 1065612 - DNA, 15 bp, Homo sapiens
gcatgtctgattcat

SEQ ID NO: 1065613 - DNA, 15 bp, Homo sapiens
tgcatgtctgattca

SEQ ID NO: 1065614 - DNA, 15 bp, Homo sapiens
gtgcatgtctgattc

SEQ ID NO: 1065615 - DNA, 15 bp, Homo sapiens
agtgcatgtctgatt

SEQ ID NO: 1065616 - DNA, 15 bp, Homo sapiens
cagtgcatgtctgat

SEQ ID NO: 1065617 - DNA, 15 bp, Homo sapiens
ccagtgcatgtctga

SEQ ID NO: 1065618 - DNA, 15 bp, Homo sapiens
accagtgcatgtctg

SEQ ID NO: 1065619 - DNA, 15 bp, Homo sapiens
gaccagtgcatgtct

SEQ ID NO: 1065620 - DNA, 15 bp, Homo sapiens
ggaccagtgcatgtc

SEQ ID NO: 1065621 - DNA, 15 bp, Homo sapiens
gggaccagtgcatgt

SEQ ID NO: 1065622 - DNA, 15 bp, Homo sapiens
tgggaccagtgcatg

SEQ ID NO: 1065623 - DNA, 15 bp, Homo sapiens
atgggaccagtgcat

SEQ ID NO: 1065624 - DNA, 15 bp, Homo sapiens
tatgggaccagtgca

SEQ ID NO: 1065625 - DNA, 15 bp, Homo sapiens
ttatgggaccagtgc

SEQ ID NO: 1065626 - DNA, 15 bp, Homo sapiens
cttatgggaccagtg

SEQ ID NO: 1065627 - DNA, 15 bp, Homo sapiens
gcttatgggaccagt

SEQ ID NO: 1065628 - DNA, 15 bp, Homo sapiens
cgcttatgggaccag

SEQ ID NO: 1065629 - DNA, 15 bp, Homo sapiens
ccgcttatgggacca

SEQ ID NO: 1065630 - DNA, 15 bp, Homo sapiens
cccgcttatgggacc

SEQ ID NO: 1065631 - DNA, 15 bp, Homo sapiens
tcccgcttatgggac

SEQ ID NO: 1065632 - DNA, 15 bp, Homo sapiens
ctcccgcttatggga

SEQ ID NO: 1065633 - DNA, 15 bp, Homo sapiens
tctcccgcttatggg

SEQ ID NO: 1065634 - DNA, 15 bp, Homo sapiens
ctctcccgcttatgg

SEQ ID NO: 1065635 - DNA, 15 bp, Homo sapiens
tctctcccgcttatg

SEQ ID NO: 1065636 - DNA, 15 bp, Homo sapiens
ctctctcccgcttat

SEQ ID NO: 1065637 - DNA, 15 bp, Homo sapiens
tctctctcccgctta

SEQ ID NO: 1065638 - DNA, 15 bp, Homo sapiens
ttctctctcccgctt

SEQ ID NO: 1065639 - DNA, 15 bp, Homo sapiens
tttctctctcccgct

SEQ ID NO: 1065640 - DNA, 15 bp, Homo sapiens
atttctctctcccgc

SEQ ID NO: 1065641 - DNA, 15 bp, Homo sapiens
gatttctctctcccg

SEQ ID NO: 1065642 - DNA, 15 bp, Homo sapiens
tgatttctctctccc

SEQ ID NO: 1065643 - DNA, 15 bp, Homo sapiens
ttgatttctctctcc

SEQ ID NO: 1065644 - DNA, 15 bp, Homo sapiens
cttgatttctctctc

SEQ ID NO: 1065645 - DNA, 15 bp, Homo sapiens
gcttgatttctctct

SEQ ID NO: 1065646 - DNA, 15 bp, Homo sapiens
tgcttgatttctctc

SEQ ID NO: 1065647 - DNA, 15 bp, Homo sapiens
gtgcttgatttctct

SEQ ID NO: 1065648 - DNA, 15 bp, Homo sapiens
tgtgcttgatttctc

SEQ ID NO: 1065649 - DNA, 15 bp, Homo sapiens
gtgtgcttgatttct

SEQ ID NO: 1065650 - DNA, 15 bp, Homo sapiens
tgtgtgcttgatttc

SEQ ID NO: 1065651 - DNA, 15 bp, Homo sapiens
gtgtgtgcttgattt

SEQ ID NO: 1065652 - DNA, 15 bp, Homo sapiens
tgtgtgtgcttgatt

SEQ ID NO: 1065653 - DNA, 15 bp, Homo sapiens
ctgtgtgtgcttgat

SEQ ID NO: 1065654 - DNA, 15 bp, Homo sapiens
tctgtgtgtgcttga

SEQ ID NO: 1065655 - DNA, 15 bp, Homo sapiens
ttctgtgtgtgcttg

SEQ ID NO: 1065656 - DNA, 15 bp, Homo sapiens
gttctgtgtgtgctt

SEQ ID NO: 1065657 - DNA, 15 bp, Homo sapiens
agttctgtgtgtgct

SEQ ID NO: 1065658 - DNA, 15 bp, Homo sapiens
gagttctgtgtgtgc

SEQ ID NO: 1065659 - DNA, 15 bp, Homo sapiens
ggagttctgtgtgtg

SEQ ID NO: 1065660 - DNA, 15 bp, Homo sapiens
aggagttctgtgtgt

SEQ ID NO: 1065661 - DNA, 15 bp, Homo sapiens
aaggagttctgtgtg

SEQ ID NO: 1065662 - DNA, 15 bp, Homo sapiens
aaaggagttctgtgt

SEQ ID NO: 1065663 - DNA, 15 bp, Homo sapiens
gaaaggagttctgtg

SEQ ID NO: 1065664 - DNA, 15 bp, Homo sapiens
agaaaggagttctgt

SEQ ID NO: 1065665 - DNA, 15 bp, Homo sapiens
aagaaaggagttctg

SEQ ID NO: 1065666 - DNA, 15 bp, Homo sapiens
gaagaaaggagttct

SEQ ID NO: 1065667 - DNA, 15 bp, Homo sapiens
agaagaaaggagttc

SEQ ID NO: 1065668 - DNA, 15 bp, Homo sapiens
cagaagaaaggagtt

SEQ ID NO: 1065669 - DNA, 15 bp, Homo sapiens
ccagaagaaaggagt

SEQ ID NO: 1065670 - DNA, 15 bp, Homo sapiens
accagaagaaaggag

SEQ ID NO: 1065671 - DNA, 15 bp, Homo sapiens
aaccagaagaaagga

SEQ ID NO: 1065672 - DNA, 15 bp, Homo sapiens
ccaaccagaagaaag

SEQ ID NO: 1065673 - DNA, 15 bp, Homo sapiens
accaaccagaagaaa

SEQ ID NO: 1065674 - DNA, 15 bp, Homo sapiens
taccaaccagaagaa

SEQ ID NO: 1065675 - DNA, 15 bp, Homo sapiens
ataccaaccagaaga

SEQ ID NO: 1065676 - DNA, 15 bp, Homo sapiens
gataccaaccagaag

SEQ ID NO: 1065677 - DNA, 15 bp, Homo sapiens
tgataccaaccagaa

SEQ ID NO: 1065678 - DNA, 15 bp, Homo sapiens
ttgataccaaccaga

SEQ ID NO: 1065679 - DNA, 15 bp, Homo sapiens
cttgataccaaccag

SEQ ID NO: 1065680 - DNA, 15 bp, Homo sapiens
ccttgataccaacca

SEQ ID NO: 1065681 - DNA, 15 bp, Homo sapiens
tccttgataccaacc

SEQ ID NO: 1065682 - DNA, 15 bp, Homo sapiens
ttccttgataccaac

SEQ ID NO: 1065683 - DNA, 15 bp, Homo sapiens
cttccttgataccaa

SEQ ID NO: 1065684 - DNA, 15 bp, Homo sapiens
ccttccttgatacca

SEQ ID NO: 1065685 - DNA, 15 bp, Homo sapiens
gccttccttgatacc

SEQ ID NO: 1065686 - DNA, 15 bp, Homo sapiens
agccttccttgatac

SEQ ID NO: 1065687 - DNA, 15 bp, Homo sapiens
aagccttccttgata

SEQ ID NO: 1065688 - DNA, 15 bp, Homo sapiens
aaagccttccttgat

SEQ ID NO: 1065689 - DNA, 15 bp, Homo sapiens
caaagccttccttga

SEQ ID NO: 1065690 - DNA, 15 bp, Homo sapiens
acaaagccttccttg

SEQ ID NO: 1065691 - DNA, 15 bp, Homo sapiens
cacaaagccttcctt

SEQ ID NO: 1065692 - DNA, 15 bp, Homo sapiens
ccacaaagccttcct

SEQ ID NO: 1065693 - DNA, 15 bp, Homo sapiens
tccacaaagccttcc

SEQ ID NO: 1065694 - DNA, 15 bp, Homo sapiens
gtccacaaagccttc

SEQ ID NO: 1065695 - DNA, 15 bp, Homo sapiens
ggtccacaaagcctt

SEQ ID NO: 1065696 - DNA, 15 bp, Homo sapiens
aggtccacaaagcct

SEQ ID NO: 1065697 - DNA, 15 bp, Homo sapiens
caggtccacaaagcc

SEQ ID NO: 1065698 - DNA, 15 bp, Homo sapiens
ccaggtccacaaagc

SEQ ID NO: 1065699 - DNA, 15 bp, Homo sapiens
accaggtccacaaag

SEQ ID NO: 1065700 - DNA, 15 bp, Homo sapiens
taccaggtccacaaa

SEQ ID NO: 1065701 - DNA, 15 bp, Homo sapiens
ctaccaggtccacaa

SEQ ID NO: 1065702 - DNA, 15 bp, Homo sapiens
gctaccaggtccaca

SEQ ID NO: 1065703 - DNA, 15 bp, Homo sapiens
tgctaccaggtccac

SEQ ID NO: 1065704 - DNA, 15 bp, Homo sapiens
gtgctaccaggtcca

SEQ ID NO: 1065705 - DNA, 15 bp, Homo sapiens
agtgctaccaggtcc

SEQ ID NO: 1065706 - DNA, 15 bp, Homo sapiens
aagtgctaccaggtc

SEQ ID NO: 1065707 - DNA, 15 bp, Homo sapiens
caagtgctaccaggt

SEQ ID NO: 1065708 - DNA, 15 bp, Homo sapiens
tcaagtgctaccagg

SEQ ID NO: 1065709 - DNA, 15 bp, Homo sapiens
ctcaagtgctaccag

SEQ ID NO: 1065710 - DNA, 15 bp, Homo sapiens
actcaagtgctacca

SEQ ID NO: 1065711 - DNA, 15 bp, Homo sapiens
aactcaagtgctacc

SEQ ID NO: 1065712 - DNA, 15 bp, Homo sapiens
taactcaagtgctac

SEQ ID NO: 1065713 - DNA, 15 bp, Homo sapiens
ctaactcaagtgcta

SEQ ID NO: 1065714 - DNA, 15 bp, Homo sapiens
gctaactcaagtgct

SEQ ID NO: 1065715 - DNA, 15 bp, Homo sapiens
agctaactcaagtgc

SEQ ID NO: 1065716 - DNA, 15 bp, Homo sapiens
gagctaactcaagtg

SEQ ID NO: 1065717 - DNA, 15 bp, Homo sapiens
agagctaactcaagt

SEQ ID NO: 1065718 - DNA, 15 bp, Homo sapiens
cagagctaactcaag

SEQ ID NO: 1065719 - DNA, 15 bp, Homo sapiens
ccagagctaactcaa

SEQ ID NO: 1065720 - DNA, 15 bp, Homo sapiens
tccagagctaactca

SEQ ID NO: 1065721 - DNA, 15 bp, Homo sapiens
ttccagagctaactc

SEQ ID NO: 1065722 - DNA, 15 bp, Homo sapiens
cttccagagctaact

SEQ ID NO: 1065723 - DNA, 15 bp, Homo sapiens
ccttccagagctaac

SEQ ID NO: 1065724 - DNA, 15 bp, Homo sapiens
tccttccagagctaa

SEQ ID NO: 1065725 - DNA, 15 bp, Homo sapiens
ctccttccagagcta

SEQ ID NO: 1065726 - DNA, 15 bp, Homo sapiens
tctccttccagagct

SEQ ID NO: 1065727 - DNA, 15 bp, Homo sapiens
ctctccttccagagc

SEQ ID NO: 1065728 - DNA, 15 bp, Homo sapiens
cctctccttccagag

SEQ ID NO: 1065729 - DNA, 15 bp, Homo sapiens
gcctctccttccaga

SEQ ID NO: 1065730 - DNA, 15 bp, Homo sapiens
tgcctctccttccag

SEQ ID NO: 1065731 - DNA, 15 bp, Homo sapiens
ctgcctctccttcca

SEQ ID NO: 1065732 - DNA, 15 bp, Homo sapiens
cctgcctctccttcc

SEQ ID NO: 1065733 - DNA, 15 bp, Homo sapiens
tcctgcctctccttc

SEQ ID NO: 1065734 - DNA, 15 bp, Homo sapiens
atcctgcctctcctt

SEQ ID NO: 1065735 - DNA, 15 bp, Homo sapiens
aatcctgcctctcct

SEQ ID NO: 1065736 - DNA, 15 bp, Homo sapiens
aaatcctgcctctcc

SEQ ID NO: 1065737 - DNA, 15 bp, Homo sapiens
caaatcctgcctctc

SEQ ID NO: 1065738 - DNA, 15 bp, Homo sapiens
ccaaatcctgcctct

SEQ ID NO: 1065739 - DNA, 15 bp, Homo sapiens
tccaaatcctgcctc

SEQ ID NO: 1065740 - DNA, 15 bp, Homo sapiens
gtccaaatcctgcct

SEQ ID NO: 1065741 - DNA, 15 bp, Homo sapiens
ggtccaaatcctgcc

SEQ ID NO: 1065742 - DNA, 15 bp, Homo sapiens
aggtccaaatcctgc

SEQ ID NO: 1065743 - DNA, 15 bp, Homo sapiens
caggtccaaatcctg

SEQ ID NO: 1065744 - DNA, 15 bp, Homo sapiens
acaggtccaaatcct

SEQ ID NO: 1065745 - DNA, 15 bp, Homo sapiens
cacaggtccaaatcc

SEQ ID NO: 1065746 - DNA, 15 bp, Homo sapiens
ccacaggtccaaatc

SEQ ID NO: 1065747 - DNA, 15 bp, Homo sapiens
gccacaggtccaaat

SEQ ID NO: 1065748 - DNA, 15 bp, Homo sapiens
cgccacaggtccaaa

SEQ ID NO: 1065749 - DNA, 15 bp, Homo sapiens
tcgccacaggtccaa

SEQ ID NO: 1065750 - DNA, 15 bp, Homo sapiens
atcgccacaggtcca

SEQ ID NO: 1065751 - DNA, 15 bp, Homo sapiens
tatcgccacaggtcc

SEQ ID NO: 1065752 - DNA, 15 bp, Homo sapiens
atatcgccacaggtc

SEQ ID NO: 1065753 - DNA, 15 bp, Homo sapiens
catatcgccacaggt

SEQ ID NO: 1065754 - DNA, 15 bp, Homo sapiens
ccatatcgccacagg

SEQ ID NO: 1065755 - DNA, 15 bp, Homo sapiens
cccatatcgccacag

SEQ ID NO: 1065756 - DNA, 15 bp, Homo sapiens
gcccatatcgccaca

SEQ ID NO: 1065757 - DNA, 15 bp, Homo sapiens
agcccatatcgccac

SEQ ID NO: 1065758 - DNA, 15 bp, Homo sapiens
cagcccatatcgcca

SEQ ID NO: 1065759 - DNA, 15 bp, Homo sapiens
ccagcccatatcgcc

SEQ ID NO: 1065760 - DNA, 15 bp, Homo sapiens
cccagcccatatcgc

SEQ ID NO: 1065761 - DNA, 15 bp, Homo sapiens
ccccagcccatatcg

SEQ ID NO: 1065762 - DNA, 15 bp, Homo sapiens
tccccagcccatatc

SEQ ID NO: 1065763 - DNA, 15 bp, Homo sapiens
ttccccagcccatat

SEQ ID NO: 1065764 - DNA, 15 bp, Homo sapiens
gtcttccccagccca

SEQ ID NO: 1065765 - DNA, 15 bp, Homo sapiens
tgtcttccccagccc

SEQ ID NO: 1065766 - DNA, 15 bp, Homo sapiens
atgtcttccccagcc

SEQ ID NO: 1065767 - DNA, 15 bp, Homo sapiens
catgtcttccccagc

SEQ ID NO: 1065768 - DNA, 15 bp, Homo sapiens
tcatgtcttccccag

SEQ ID NO: 1065769 - DNA, 15 bp, Homo sapiens
ctcatgtcttcccca

SEQ ID NO: 1065770 - DNA, 15 bp, Homo sapiens
gctcatgtcttcccc

SEQ ID NO: 1065771 - DNA, 15 bp, Homo sapiens
agctcatgtcttccc

SEQ ID NO: 1065772 - DNA, 15 bp, Homo sapiens
aagctcatgtcttcc

SEQ ID NO: 1065773 - DNA, 15 bp, Homo sapiens
caagctcatgtcttc

SEQ ID NO: 1065774 - DNA, 15 bp, Homo sapiens
ccaagctcatgtctt

SEQ ID NO: 1065775 - DNA, 15 bp, Homo sapiens
gccaagctcatgtct

SEQ ID NO: 1065776 - DNA, 15 bp, Homo sapiens
tgccaagctcatgtc

SEQ ID NO: 1065777 - DNA, 15 bp, Homo sapiens
atgccaagctcatgt

SEQ ID NO: 1065778 - DNA, 15 bp, Homo sapiens
catgccaagctcatg

SEQ ID NO: 1065779 - DNA, 15 bp, Homo sapiens
acatgccaagctcat

SEQ ID NO: 1065780 - DNA, 15 bp, Homo sapiens
gacatgccaagctca

SEQ ID NO: 1065781 - DNA, 15 bp, Homo sapiens
agacatgccaagctc

SEQ ID NO: 1065782 - DNA, 15 bp, Homo sapiens
cagacatgccaagct

SEQ ID NO: 1065783 - DNA, 15 bp, Homo sapiens
tcagacatgccaagc

SEQ ID NO: 1065784 - DNA, 15 bp, Homo sapiens
gtcagacatgccaag

SEQ ID NO: 1065785 - DNA, 15 bp, Homo sapiens
tgtcagacatgccaa

SEQ ID NO: 1065786 - DNA, 15 bp, Homo sapiens
ctgtcagacatgcca

SEQ ID NO: 1065787 - DNA, 15 bp, Homo sapiens
actgtcagacatgcc

SEQ ID NO: 1065788 - DNA, 15 bp, Homo sapiens
gactgtcagacatgc

SEQ ID NO: 1065789 - DNA, 15 bp, Homo sapiens
tgactgtcagacatg

SEQ ID NO: 1065790 - DNA, 15 bp, Homo sapiens
ctgactgtcagacat

SEQ ID NO: 1065791 - DNA, 15 bp, Homo sapiens
actgactgtcagaca

SEQ ID NO: 1065792 - DNA, 15 bp, Homo sapiens
cactgactgtcagac

SEQ ID NO: 1065793 - DNA, 15 bp, Homo sapiens
tcactgactgtcaga

SEQ ID NO: 1065794 - DNA, 15 bp, Homo sapiens
ctcactgactgtcag

SEQ ID NO: 1065795 - DNA, 15 bp, Homo sapiens
cctcactgactgtca

SEQ ID NO: 1065796 - DNA, 15 bp, Homo sapiens
tcctcactgactgtc

SEQ ID NO: 1065797 - DNA, 15 bp, Homo sapiens
gtcctcactgactgt

SEQ ID NO: 1065798 - DNA, 15 bp, Homo sapiens
ggtcctcactgactg

SEQ ID NO: 1065799 - DNA, 15 bp, Homo sapiens
aggtcctcactgact

SEQ ID NO: 1065800 - DNA, 15 bp, Homo sapiens
gaggtcctcactgac

SEQ ID NO: 1065801 - DNA, 15 bp, Homo sapiens
tgaggtcctcactga

SEQ ID NO: 1065802 - DNA, 15 bp, Homo sapiens
ctgaggtcctcactg

SEQ ID NO: 1065803 - DNA, 15 bp, Homo sapiens
cctgaggtcctcact

SEQ ID NO: 1065804 - DNA, 15 bp, Homo sapiens
acctgaggtcctcac

SEQ ID NO: 1065805 - DNA, 15 bp, Homo sapiens
aacctgaggtcctca

SEQ ID NO: 1065806 - DNA, 15 bp, Homo sapiens
gaacctgaggtcctc

SEQ ID NO: 1065807 - DNA, 15 bp, Homo sapiens
ggaacctgaggtcct

SEQ ID NO: 1065808 - DNA, 15 bp, Homo sapiens
aggaacctgaggtcc

SEQ ID NO: 1065809 - DNA, 15 bp, Homo sapiens
caggaacctgaggtc

SEQ ID NO: 1065810 - DNA, 15 bp, Homo sapiens
ccaggaacctgaggt

SEQ ID NO: 1065811 - DNA, 15 bp, Homo sapiens
tccaggaacctgagg

SEQ ID NO: 1065812 - DNA, 15 bp, Homo sapiens
ctccaggaacctgag

SEQ ID NO: 1065813 - DNA, 15 bp, Homo sapiens
gctccaggaacctga

SEQ ID NO: 1065814 - DNA, 15 bp, Homo sapiens
agctccaggaacctg

SEQ ID NO: 1065815 - DNA, 15 bp, Homo sapiens
aagctccaggaacct

SEQ ID NO: 1065816 - DNA, 15 bp, Homo sapiens
taagctccaggaacc

SEQ ID NO: 1065817 - DNA, 15 bp, Homo sapiens
ctaagctccaggaac

SEQ ID NO: 1065818 - DNA, 15 bp, Homo sapiens
cctaagctccaggaa

SEQ ID NO: 1065819 - DNA, 15 bp, Homo sapiens
tcctaagctccagga

SEQ ID NO: 1065820 - DNA, 15 bp, Homo sapiens
atcctaagctccagg

SEQ ID NO: 1065821 - DNA, 15 bp, Homo sapiens
catcctaagctccag

SEQ ID NO: 1065822 - DNA, 15 bp, Homo sapiens
acatcctaagctcca

SEQ ID NO: 1065823 - DNA, 15 bp, Homo sapiens
cacatcctaagctcc

SEQ ID NO: 1065824 - DNA, 15 bp, Homo sapiens
acacatcctaagctc

SEQ ID NO: 1065825 - DNA, 15 bp, Homo sapiens
cacacatcctaagct

SEQ ID NO: 1065826 - DNA, 15 bp, Homo sapiens
tcacacatcctaagc

SEQ ID NO: 1065827 - DNA, 15 bp, Homo sapiens
atcacacatcctaag

SEQ ID NO: 1065828 - DNA, 15 bp, Homo sapiens
catcacacatcctaa

SEQ ID NO: 1065829 - DNA, 15 bp, Homo sapiens
gcatcacacatccta

SEQ ID NO: 1065830 - DNA, 15 bp, Homo sapiens
tgcatcacacatcct

SEQ ID NO: 1065831 - DNA, 15 bp, Homo sapiens
ctgcatcacacatcc

SEQ ID NO: 1065832 - DNA, 15 bp, Homo sapiens
tctgcatcacacatc

SEQ ID NO: 1065833 - DNA, 15 bp, Homo sapiens
ttctgcatcacacat

SEQ ID NO: 1065834 - DNA, 15 bp, Homo sapiens
cttctgcatcacaca

SEQ ID NO: 1065835 - DNA, 15 bp, Homo sapiens
tcttctgcatcacac

SEQ ID NO: 1065836 - DNA, 15 bp, Homo sapiens
ttcttctgcatcaca

SEQ ID NO: 1065837 - DNA, 15 bp, Homo sapiens
cttcttctgcatcac

SEQ ID NO: 1065838 - DNA, 15 bp, Homo sapiens
acttcttctgcatca

SEQ ID NO: 1065839 - DNA, 15 bp, Homo sapiens
gacttcttctgcatc

SEQ ID NO: 1065840 - DNA, 15 bp, Homo sapiens
agacttcttctgcat

SEQ ID NO: 1065841 - DNA, 15 bp, Homo sapiens
cagacttcttctgca

SEQ ID NO: 1065842 - DNA, 15 bp, Homo sapiens
ccagacttcttctgc

SEQ ID NO: 1065843 - DNA, 15 bp, Homo sapiens
tccagacttcttctg

SEQ ID NO: 1065844 - DNA, 15 bp, Homo sapiens
ttccagacttcttct

SEQ ID NO: 1065845 - DNA, 15 bp, Homo sapiens
tttccagacttcttc

SEQ ID NO: 1065846 - DNA, 15 bp, Homo sapiens
ctttccagacttctt

SEQ ID NO: 1065847 - DNA, 15 bp, Homo sapiens
cctttccagacttct

SEQ ID NO: 1065848 - DNA, 15 bp, Homo sapiens
acctttccagacttc

SEQ ID NO: 1065849 - DNA, 15 bp, Homo sapiens
tacctttccagactt

SEQ ID NO: 1065850 - DNA, 15 bp, Homo sapiens
ttacctttccagact

SEQ ID NO: 1065851 - DNA, 15 bp, Homo sapiens
cttacctttccagac

SEQ ID NO: 1065852 - DNA, 15 bp, Homo sapiens
tcttacctttccaga

SEQ ID NO: 1065853 - DNA, 15 bp, Homo sapiens
ttcttacctttccag

SEQ ID NO: 1065854 - DNA, 15 bp, Homo sapiens
ctgtttcttaccttt

SEQ ID NO: 1065855 - DNA, 15 bp, Homo sapiens
tctgtttcttacctt

SEQ ID NO: 1065856 - DNA, 15 bp, Homo sapiens
ttctgtttcttacct

SEQ ID NO: 1065857 - DNA, 15 bp, Homo sapiens
attctgtttcttacc

SEQ ID NO: 1065858 - DNA, 15 bp, Homo sapiens
aattctgtttcttac

SEQ ID NO: 1065859 - DNA, 15 bp, Homo sapiens
caattctgtttctta

SEQ ID NO: 1065860 - DNA, 15 bp, Homo sapiens
acaattctgtttctt

SEQ ID NO: 1065861 - DNA, 15 bp, Homo sapiens
tacaattctgtttct

SEQ ID NO: 1065862 - DNA, 15 bp, Homo sapiens
ttacaattctgtttc

SEQ ID NO: 1065863 - DNA, 15 bp, Homo sapiens
tttacaattctgttt

SEQ ID NO: 1065864 - DNA, 15 bp, Homo sapiens
atttacaattctgtt

SEQ ID NO: 1065865 - DNA, 15 bp, Homo sapiens
catttacaattctgt

SEQ ID NO: 1065866 - DNA, 15 bp, Homo sapiens
tcatttacaattctg

SEQ ID NO: 1065867 - DNA, 15 bp, Homo sapiens
atcatttacaattct

SEQ ID NO: 1065868 - DNA, 15 bp, Homo sapiens
catcatttacaattc

SEQ ID NO: 1065869 - DNA, 15 bp, Homo sapiens
gcatcatttacaatt

SEQ ID NO: 1065870 - DNA, 15 bp, Homo sapiens
agcatcatttacaat

SEQ ID NO: 1065871 - DNA, 15 bp, Homo sapiens
tagcatcatttacaa

SEQ ID NO: 1065872 - DNA, 15 bp, Homo sapiens
atagcatcatttaca

SEQ ID NO: 1065873 - DNA, 15 bp, Homo sapiens
catagcatcatttac

SEQ ID NO: 1065874 - DNA, 15 bp, Homo sapiens
tcatagcatcattta

SEQ ID NO: 1065875 - DNA, 15 bp, Homo sapiens
ttcatagcatcattt

SEQ ID NO: 1065876 - DNA, 15 bp, Homo sapiens
cttcatagcatcatt

SEQ ID NO: 1065877 - DNA, 15 bp, Homo sapiens
tcttcatagcatcat

SEQ ID NO: 1065878 - DNA, 15 bp, Homo sapiens
atcttcatagcatca

SEQ ID NO: 1065879 - DNA, 15 bp, Homo sapiens
tatcttcatagcatc

SEQ ID NO: 1065880 - DNA, 15 bp, Homo sapiens
atatcttcatagcat

SEQ ID NO: 1065881 - DNA, 15 bp, Homo sapiens
catatcttcatagca

SEQ ID NO: 1065882 - DNA, 15 bp, Homo sapiens
gcatatcttcatagc

SEQ ID NO: 1065883 - DNA, 15 bp, Homo sapiens
ggcatatcttcatag

SEQ ID NO: 1065884 - DNA, 15 bp, Homo sapiens
aggcatatcttcata

SEQ ID NO: 1065885 - DNA, 15 bp, Homo sapiens
aaggcatatcttcat

SEQ ID NO: 1065886 - DNA, 15 bp, Homo sapiens
taaggcatatcttca

SEQ ID NO: 1065887 - DNA, 15 bp, Homo sapiens
ctaaggcatatcttc

SEQ ID NO: 1065888 - DNA, 15 bp, Homo sapiens
actaaggcatatctt

SEQ ID NO: 1065889 - DNA, 15 bp, Homo sapiens
aactaaggcatatct

SEQ ID NO: 1065890 - DNA, 15 bp, Homo sapiens
gaactaaggcatatc

SEQ ID NO: 1065891 - DNA, 15 bp, Homo sapiens
agaactaaggcatat

SEQ ID NO: 1065892 - DNA, 15 bp, Homo sapiens
aagaactaaggcata

SEQ ID NO: 1065893 - DNA, 15 bp, Homo sapiens
aaagaactaaggcat

SEQ ID NO: 1065894 - DNA, 15 bp, Homo sapiens
taaagaactaaggca

SEQ ID NO: 1065895 - DNA, 15 bp, Homo sapiens
ctaaagaactaaggc

SEQ ID NO: 1065896 - DNA, 15 bp, Homo sapiens
cctaaagaactaagg

SEQ ID NO: 1065897 - DNA, 15 bp, Homo sapiens
gcctaaagaactaag

SEQ ID NO: 1065898 - DNA, 15 bp, Homo sapiens
tgcctaaagaactaa

SEQ ID NO: 1065899 - DNA, 15 bp, Homo sapiens
ttgcctaaagaacta

SEQ ID NO: 1065900 - DNA, 15 bp, Homo sapiens
attgcctaaagaact

SEQ ID NO: 1065901 - DNA, 15 bp, Homo sapiens
cattgcctaaagaac

SEQ ID NO: 1065902 - DNA, 15 bp, Homo sapiens
tcattgcctaaagaa

SEQ ID NO: 1065903 - DNA, 15 bp, Homo sapiens
ttcattgcctaaaga

SEQ ID NO: 1065904 - DNA, 15 bp, Homo sapiens
cttcattgcctaaag

SEQ ID NO: 1065905 - DNA, 15 bp, Homo sapiens
tcttcattgcctaaa

SEQ ID NO: 1065906 - DNA, 15 bp, Homo sapiens
ctcttcattgcctaa

SEQ ID NO: 1065907 - DNA, 15 bp, Homo sapiens
actcttcattgccta

SEQ ID NO: 1065908 - DNA, 15 bp, Homo sapiens
gactcttcattgcct

SEQ ID NO: 1065909 - DNA, 15 bp, Homo sapiens
tgactcttcattgcc

SEQ ID NO: 1065910 - DNA, 15 bp, Homo sapiens
gtgactcttcattgc

SEQ ID NO: 1065911 - DNA, 15 bp, Homo sapiens
agtgactcttcattg

SEQ ID NO: 1065912 - DNA, 15 bp, Homo sapiens
tagtgactcttcatt

SEQ ID NO: 1065913 - DNA, 15 bp, Homo sapiens
ttagtgactcttcat

SEQ ID NO: 1065914 - DNA, 15 bp, Homo sapiens
cttagtgactcttca

SEQ ID NO: 1065915 - DNA, 15 bp, Homo sapiens
ccttagtgactcttc

SEQ ID NO: 1065916 - DNA, 15 bp, Homo sapiens
accttagtgactctt

SEQ ID NO: 1065917 - DNA, 15 bp, Homo sapiens
aaccttagtgactct

SEQ ID NO: 1065918 - DNA, 15 bp, Homo sapiens
aaaccttagtgactc

SEQ ID NO: 1065919 - DNA, 15 bp, Homo sapiens
aaaaccttagtgact

SEQ ID NO: 1065920 - DNA, 15 bp, Homo sapiens
caaaaccttagtgac

SEQ ID NO: 1065921 - DNA, 15 bp, Homo sapiens
tcaaaaccttagtga

SEQ ID NO: 1065922 - DNA, 15 bp, Homo sapiens
ttcaaaaccttagtg

SEQ ID NO: 1065923 - DNA, 15 bp, Homo sapiens
gttcaaaaccttagt

SEQ ID NO: 1065924 - DNA, 15 bp, Homo sapiens
tgttcaaaaccttag

SEQ ID NO: 1065925 - DNA, 15 bp, Homo sapiens
gtgttcaaaacctta

SEQ ID NO: 1065926 - DNA, 15 bp, Homo sapiens
agtgttcaaaacctt

SEQ ID NO: 1065927 - DNA, 15 bp, Homo sapiens
cagtgttcaaaacct

SEQ ID NO: 1065928 - DNA, 15 bp, Homo sapiens
ccagtgttcaaaacc

SEQ ID NO: 1065929 - DNA, 15 bp, Homo sapiens
gccagtgttcaaaac

SEQ ID NO: 1065930 - DNA, 15 bp, Homo sapiens
cgccagtgttcaaaa

SEQ ID NO: 1065931 - DNA, 15 bp, Homo sapiens
acgccagtgttcaaa

SEQ ID NO: 1065932 - DNA, 15 bp, Homo sapiens
cacgccagtgttcaa

SEQ ID NO: 1065933 - DNA, 15 bp, Homo sapiens
acacgccagtgttca

SEQ ID NO: 1065934 - DNA, 15 bp, Homo sapiens
tacacgccagtgttc

SEQ ID NO: 1065935 - DNA, 15 bp, Homo sapiens
atacacgccagtgtt

SEQ ID NO: 1065936 - DNA, 15 bp, Homo sapiens
catacacgccagtgt

SEQ ID NO: 1065937 - DNA, 15 bp, Homo sapiens
ccatacacgccagtg

SEQ ID NO: 1065938 - DNA, 15 bp, Homo sapiens
accatacacgccagt

SEQ ID NO: 1065939 - DNA, 15 bp, Homo sapiens
caccatacacgccag

SEQ ID NO: 1065940 - DNA, 15 bp, Homo sapiens
ccaccatacacgcca

SEQ ID NO: 1065941 - DNA, 15 bp, Homo sapiens
cccaccatacacgcc

SEQ ID NO: 1065942 - DNA, 15 bp, Homo sapiens
acccaccatacacgc

SEQ ID NO: 1065943 - DNA, 15 bp, Homo sapiens
aacccaccatacacg

SEQ ID NO: 1065944 - DNA, 15 bp, Homo sapiens
caacccaccatacac

SEQ ID NO: 1065945 - DNA, 15 bp, Homo sapiens
acaacccaccataca

SEQ ID NO: 1065946 - DNA, 15 bp, Homo sapiens
cacaacccaccatac

SEQ ID NO: 1065947 - DNA, 15 bp, Homo sapiens
ccacaacccaccata

SEQ ID NO: 1065948 - DNA, 15 bp, Homo sapiens
cccacaacccaccat

SEQ ID NO: 1065949 - DNA, 15 bp, Homo sapiens
ccccacaacccacca

SEQ ID NO: 1065950 - DNA, 15 bp, Homo sapiens
tccccacaacccacc

SEQ ID NO: 1065951 - DNA, 15 bp, Homo sapiens
ctccccacaacccac

SEQ ID NO: 1065952 - DNA, 15 bp, Homo sapiens
tctccccacaaccca

SEQ ID NO: 1065953 - DNA, 15 bp, Homo sapiens
gtctccccacaaccc

SEQ ID NO: 1065954 - DNA, 15 bp, Homo sapiens
tgtctccccacaacc

SEQ ID NO: 1065955 - DNA, 15 bp, Homo sapiens
ctgtctccccacaac

SEQ ID NO: 1065956 - DNA, 15 bp, Homo sapiens
tctgtctccccacaa

SEQ ID NO: 1065957 - DNA, 15 bp, Homo sapiens
ttctgtctccccaca

SEQ ID NO: 1065958 - DNA, 15 bp, Homo sapiens
cttctgtctccccac

SEQ ID NO: 1065959 - DNA, 15 bp, Homo sapiens
tcttctgtctcccca

SEQ ID NO: 1065960 - DNA, 15 bp, Homo sapiens
ctcttctgtctcccc

SEQ ID NO: 1065961 - DNA, 15 bp, Homo sapiens
actcttctgtctccc

SEQ ID NO: 1065962 - DNA, 15 bp, Homo sapiens
tactcttctgtctcc

SEQ ID NO: 1065963 - DNA, 15 bp, Homo sapiens
ttactcttctgtctc

SEQ ID NO: 1065964 - DNA, 15 bp, Homo sapiens
attactcttctgtct

SEQ ID NO: 1065965 - DNA, 15 bp, Homo sapiens
cattactcttctgtc

SEQ ID NO: 1065966 - DNA, 15 bp, Homo sapiens
tcattactcttctgt

SEQ ID NO: 1065967 - DNA, 15 bp, Homo sapiens
ctcattactcttctg

SEQ ID NO: 1065968 - DNA, 15 bp, Homo sapiens
cctcattactcttct

SEQ ID NO: 1065969 - DNA, 15 bp, Homo sapiens
tcctcattactcttc

SEQ ID NO: 1065970 - DNA, 15 bp, Homo sapiens
gtcctcattactctt

SEQ ID NO: 1065971 - DNA, 15 bp, Homo sapiens
tgtcctcattactct

SEQ ID NO: 1065972 - DNA, 15 bp, Homo sapiens
gtgtcctcattactc

SEQ ID NO: 1065973 - DNA, 15 bp, Homo sapiens
ggtgtcctcattact

SEQ ID NO: 1065974 - DNA, 15 bp, Homo sapiens
tggtgtcctcattac

SEQ ID NO: 1065975 - DNA, 15 bp, Homo sapiens
ctggtgtcctcatta

SEQ ID NO: 1065976 - DNA, 15 bp, Homo sapiens
actggtgtcctcatt

SEQ ID NO: 1065977 - DNA, 15 bp, Homo sapiens
gactggtgtcctcat

SEQ ID NO: 1065978 - DNA, 15 bp, Homo sapiens
tgactggtgtcctca

SEQ ID NO: 1065979 - DNA, 15 bp, Homo sapiens
ctgactggtgtcctc

SEQ ID NO: 1065980 - DNA, 15 bp, Homo sapiens
tctgactggtgtcct

SEQ ID NO: 1065981 - DNA, 15 bp, Homo sapiens
gtctgactggtgtcc

SEQ ID NO: 1065982 - DNA, 15 bp, Homo sapiens
agtctgactggtgtc

SEQ ID NO: 1065983 - DNA, 15 bp, Homo sapiens
tagtctgactggtgt

SEQ ID NO: 1065984 - DNA, 15 bp, Homo sapiens
ttagtctgactggtg

SEQ ID NO: 1065985 - DNA, 15 bp, Homo sapiens
cttagtctgactggt

SEQ ID NO: 1065986 - DNA, 15 bp, Homo sapiens
gcttagtctgactgg

SEQ ID NO: 1065987 - DNA, 15 bp, Homo sapiens
ggcttagtctgactg

SEQ ID NO: 1065988 - DNA, 15 bp, Homo sapiens
tggcttagtctgact

SEQ ID NO: 1065989 - DNA, 15 bp, Homo sapiens
ctggcttagtctgac

SEQ ID NO: 1065990 - DNA, 15 bp, Homo sapiens
tctggcttagtctga

SEQ ID NO: 1065991 - DNA, 15 bp, Homo sapiens
ttctggcttagtctg

SEQ ID NO: 1065992 - DNA, 15 bp, Homo sapiens
tttctggcttagtct

SEQ ID NO: 1065993 - DNA, 15 bp, Homo sapiens
gtttctggcttagtc

SEQ ID NO: 1065994 - DNA, 15 bp, Homo sapiens
ggtttctggcttagt

SEQ ID NO: 1065995 - DNA, 15 bp, Homo sapiens
tggtttctggcttag

SEQ ID NO: 1065996 - DNA, 15 bp, Homo sapiens
atggtttctggctta

SEQ ID NO: 1065997 - DNA, 15 bp, Homo sapiens
catggtttctggctt

SEQ ID NO: 1065998 - DNA, 15 bp, Homo sapiens
gcatggtttctggct

SEQ ID NO: 1065999 - DNA, 15 bp, Homo sapiens
tgcatggtttctggc

SEQ ID NO: 1066000 - DNA, 15 bp, Homo sapiens
ttgcatggtttctgg

SEQ ID NO: 1066001 - DNA, 15 bp, Homo sapiens
cttgcatggtttctg

SEQ ID NO: 1066002 - DNA, 15 bp, Homo sapiens
tcttgcatggtttct

SEQ ID NO: 1066003 - DNA, 15 bp, Homo sapiens
ttcttgcatggtttc

SEQ ID NO: 1066004 - DNA, 15 bp, Homo sapiens
cttcttgcatggttt

SEQ ID NO: 1066005 - DNA, 15 bp, Homo sapiens
gcttcttgcatggtt

SEQ ID NO: 1066006 - DNA, 15 bp, Homo sapiens
tgcttcttgcatggt

SEQ ID NO: 1066007 - DNA, 15 bp, Homo sapiens
ttgcttcttgcatgg

SEQ ID NO: 1066008 - DNA, 15 bp, Homo sapiens
attgcttcttgcatg

SEQ ID NO: 1066009 - DNA, 15 bp, Homo sapiens
tattgcttcttgcat

SEQ ID NO: 1066010 - DNA, 15 bp, Homo sapiens
gtattgcttcttgca

SEQ ID NO: 1066011 - DNA, 15 bp, Homo sapiens
tgtattgcttcttgc

SEQ ID NO: 1066012 - DNA, 15 bp, Homo sapiens
ctgtattgcttcttg

SEQ ID NO: 1066013 - DNA, 15 bp, Homo sapiens
tctgtattgcttctt

SEQ ID NO: 1066014 - DNA, 15 bp, Homo sapiens
atctgtattgcttct

SEQ ID NO: 1066015 - DNA, 15 bp, Homo sapiens
gatctgtattgcttc

SEQ ID NO: 1066016 - DNA, 15 bp, Homo sapiens
agatctgtattgctt

SEQ ID NO: 1066017 - DNA, 15 bp, Homo sapiens
cagatctgtattgct

SEQ ID NO: 1066018 - DNA, 15 bp, Homo sapiens
acagatctgtattgc

SEQ ID NO: 1066019 - DNA, 15 bp, Homo sapiens
cacagatctgtattg

SEQ ID NO: 1066020 - DNA, 15 bp, Homo sapiens
tcacagatctgtatt

SEQ ID NO: 1066021 - DNA, 15 bp, Homo sapiens
atcacagatctgtat

SEQ ID NO: 1066022 - DNA, 15 bp, Homo sapiens
catcacagatctgta

SEQ ID NO: 1066023 - DNA, 15 bp, Homo sapiens
gcatcacagatctgt

SEQ ID NO: 1066024 - DNA, 15 bp, Homo sapiens
tgcatcacagatctg

SEQ ID NO: 1066025 - DNA, 15 bp, Homo sapiens
ctgcatcacagatct

SEQ ID NO: 1066026 - DNA, 15 bp, Homo sapiens
tctgcatcacagatc

SEQ ID NO: 1066027 - DNA, 15 bp, Homo sapiens
ttctgcatcacagat

SEQ ID NO: 1066028 - DNA, 15 bp, Homo sapiens
cttctgcatcacaga

SEQ ID NO: 1066029 - DNA, 15 bp, Homo sapiens
acttctgcatcacag

SEQ ID NO: 1066030 - DNA, 15 bp, Homo sapiens
cacttctgcatcaca

SEQ ID NO: 1066031 - DNA, 15 bp, Homo sapiens
tcacttctgcatcac

SEQ ID NO: 1066032 - DNA, 15 bp, Homo sapiens
atcacttctgcatca

SEQ ID NO: 1066033 - DNA, 15 bp, Homo sapiens
gatcacttctgcatc

SEQ ID NO: 1066034 - DNA, 15 bp, Homo sapiens
tgatcacttctgcat

SEQ ID NO: 1066035 - DNA, 15 bp, Homo sapiens
atgatcacttctgca

SEQ ID NO: 1066036 - DNA, 15 bp, Homo sapiens
catgatcacttctgc

SEQ ID NO: 1066037 - DNA, 15 bp, Homo sapiens
ccatgatcacttctg

SEQ ID NO: 1066038 - DNA, 15 bp, Homo sapiens
cccatgatcacttct

SEQ ID NO: 1066039 - DNA, 15 bp, Homo sapiens
tcccatgatcacttc

SEQ ID NO: 1066040 - DNA, 15 bp, Homo sapiens
ttcccatgatcactt

SEQ ID NO: 1066041 - DNA, 15 bp, Homo sapiens
attcccatgatcact

SEQ ID NO: 1066042 - DNA, 15 bp, Homo sapiens
cattcccatgatcac

SEQ ID NO: 1066043 - DNA, 15 bp, Homo sapiens
ccattcccatgatca

SEQ ID NO: 1066044 - DNA, 15 bp, Homo sapiens
tccattcccatgatc

SEQ ID NO: 1066045 - DNA, 15 bp, Homo sapiens
ttccattcccatgat

SEQ ID NO: 1066046 - DNA, 15 bp, Homo sapiens
cttccattcccatga

SEQ ID NO: 1066047 - DNA, 15 bp, Homo sapiens
ccttccattcccatg

SEQ ID NO: 1066048 - DNA, 15 bp, Homo sapiens
cccttccattcccat

SEQ ID NO: 1066049 - DNA, 15 bp, Homo sapiens
ccccttccattccca

SEQ ID NO: 1066050 - DNA, 15 bp, Homo sapiens
accccttccattccc

SEQ ID NO: 1066051 - DNA, 15 bp, Homo sapiens
caccccttccattcc

SEQ ID NO: 1066052 - DNA, 15 bp, Homo sapiens
acaccccttccattc

SEQ ID NO: 1066053 - DNA, 15 bp, Homo sapiens
cacaccccttccatt

SEQ ID NO: 1066054 - DNA, 15 bp, Homo sapiens
acacaccccttccat

SEQ ID NO: 1066055 - DNA, 15 bp, Homo sapiens
cacacaccccttcca

SEQ ID NO: 1066056 - DNA, 15 bp, Homo sapiens
tcacacaccccttcc

SEQ ID NO: 1066057 - DNA, 15 bp, Homo sapiens
ctcacacaccccttc

SEQ ID NO: 1066058 - DNA, 15 bp, Homo sapiens
tctcacacacccctt

SEQ ID NO: 1066059 - DNA, 15 bp, Homo sapiens
ctctcacacacccct

SEQ ID NO: 1066060 - DNA, 15 bp, Homo sapiens
tctctcacacacccc

SEQ ID NO: 1066061 - DNA, 15 bp, Homo sapiens
atctctcacacaccc

SEQ ID NO: 1066062 - DNA, 15 bp, Homo sapiens
tatctctcacacacc

SEQ ID NO: 1066063 - DNA, 15 bp, Homo sapiens
gtatctctcacacac

SEQ ID NO: 1066064 - DNA, 15 bp, Homo sapiens
ggtatctctcacaca

SEQ ID NO: 1066065 - DNA, 15 bp, Homo sapiens
tggtatctctcacac

SEQ ID NO: 1066066 - DNA, 15 bp, Homo sapiens
ttggtatctctcaca

SEQ ID NO: 1066067 - DNA, 15 bp, Homo sapiens
cttggtatctctcac

SEQ ID NO: 1066068 - DNA, 15 bp, Homo sapiens
ccttggtatctctca

SEQ ID NO: 1066069 - DNA, 15 bp, Homo sapiens
tccttggtatctctc

SEQ ID NO: 1066070 - DNA, 15 bp, Homo sapiens
ctccttggtatctct

SEQ ID NO: 1066071 - DNA, 15 bp, Homo sapiens
cctccttggtatctc

SEQ ID NO: 1066072 - DNA, 15 bp, Homo sapiens
tcctccttggtatct

SEQ ID NO: 1066073 - DNA, 15 bp, Homo sapiens
ttcctccttggtatc

SEQ ID NO: 1066074 - DNA, 15 bp, Homo sapiens
tttcctccttggtat

SEQ ID NO: 1066075 - DNA, 15 bp, Homo sapiens
gtttcctccttggta

SEQ ID NO: 1066076 - DNA, 15 bp, Homo sapiens
agtttcctccttggt

SEQ ID NO: 1066077 - DNA, 15 bp, Homo sapiens
gagtttcctccttgg

SEQ ID NO: 1066078 - DNA, 15 bp, Homo sapiens
tgagtttcctccttg

SEQ ID NO: 1066079 - DNA, 15 bp, Homo sapiens
gtgagtttcctcctt

SEQ ID NO: 1066080 - DNA, 15 bp, Homo sapiens
tgtgagtttcctcct

SEQ ID NO: 1066081 - DNA, 15 bp, Homo sapiens
ttgtgagtttcctcc

SEQ ID NO: 1066082 - DNA, 15 bp, Homo sapiens
cttgtgagtttcctc

SEQ ID NO: 1066083 - DNA, 15 bp, Homo sapiens
tcttgtgagtttcct

SEQ ID NO: 1066084 - DNA, 15 bp, Homo sapiens
gtcttgtgagtttcc

SEQ ID NO: 1066085 - DNA, 15 bp, Homo sapiens
tgtcttgtgagtttc

SEQ ID NO: 1066086 - DNA, 15 bp, Homo sapiens
ctgtcttgtgagttt

SEQ ID NO: 1066087 - DNA, 15 bp, Homo sapiens
cctgtcttgtgagtt

SEQ ID NO: 1066088 - DNA, 15 bp, Homo sapiens
ccctgtcttgtgagt

SEQ ID NO: 1066089 - DNA, 15 bp, Homo sapiens
tccctgtcttgtgag

SEQ ID NO: 1066090 - DNA, 15 bp, Homo sapiens
gtccctgtcttgtga

SEQ ID NO: 1066091 - DNA, 15 bp, Homo sapiens
tgtccctgtcttgtg

SEQ ID NO: 1066092 - DNA, 15 bp, Homo sapiens
gtgtccctgtcttgt

SEQ ID NO: 1066093 - DNA, 15 bp, Homo sapiens
ggtgtccctgtcttg

SEQ ID NO: 1066094 - DNA, 15 bp, Homo sapiens
tggtgtccctgtctt

SEQ ID NO: 1066095 - DNA, 15 bp, Homo sapiens
ctggtgtccctgtct

SEQ ID NO: 1066096 - DNA, 15 bp, Homo sapiens
cctggtgtccctgtc

SEQ ID NO: 1066097 - DNA, 15 bp, Homo sapiens
tcctggtgtccctgt

SEQ ID NO: 1066098 - DNA, 15 bp, Homo sapiens
ttcctggtgtccctg

SEQ ID NO: 1066099 - DNA, 15 bp, Homo sapiens
cttcctggtgtccct

SEQ ID NO: 1066100 - DNA, 15 bp, Homo sapiens
gcttcctggtgtccc

SEQ ID NO: 1066101 - DNA, 15 bp, Homo sapiens
tgcttcctggtgtcc

SEQ ID NO: 1066102 - DNA, 15 bp, Homo sapiens
ctgcttcctggtgtc

SEQ ID NO: 1066103 - DNA, 15 bp, Homo sapiens
gctgcttcctggtgt

SEQ ID NO: 1066104 - DNA, 15 bp, Homo sapiens
agctgcttcctggtg

SEQ ID NO: 1066105 - DNA, 15 bp, Homo sapiens
cagctgcttcctggt

SEQ ID NO: 1066106 - DNA, 15 bp, Homo sapiens
tcagctgcttcctgg

SEQ ID NO: 1066107 - DNA, 15 bp, Homo sapiens
atcagctgcttcctg

SEQ ID NO: 1066108 - DNA, 15 bp, Homo sapiens
gatcagctgcttcct

SEQ ID NO: 1066109 - DNA, 15 bp, Homo sapiens
agatcagctgcttcc

SEQ ID NO: 1066110 - DNA, 15 bp, Homo sapiens
aagatcagctgcttc

SEQ ID NO: 1066111 - DNA, 15 bp, Homo sapiens
aaagatcagctgctt

SEQ ID NO: 1066112 - DNA, 15 bp, Homo sapiens
caaagatcagctgct

SEQ ID NO: 1066113 - DNA, 15 bp, Homo sapiens
gcaaagatcagctgc

SEQ ID NO: 1066114 - DNA, 15 bp, Homo sapiens
agcaaagatcagctg

SEQ ID NO: 1066115 - DNA, 15 bp, Homo sapiens
gagcaaagatcagct

SEQ ID NO: 1066116 - DNA, 15 bp, Homo sapiens
tgagcaaagatcagc

SEQ ID NO: 1066117 - DNA, 15 bp, Homo sapiens
ctgagcaaagatcag

SEQ ID NO: 1066118 - DNA, 15 bp, Homo sapiens
tctgagcaaagatca

SEQ ID NO: 1066119 - DNA, 15 bp, Homo sapiens
atctgagcaaagatc

SEQ ID NO: 1066120 - DNA, 15 bp, Homo sapiens
catctgagcaaagat

SEQ ID NO: 1066121 - DNA, 15 bp, Homo sapiens
acatctgagcaaaga

SEQ ID NO: 1066122 - DNA, 15 bp, Homo sapiens
gacatctgagcaaag

SEQ ID NO: 1066123 - DNA, 15 bp, Homo sapiens
tgacatctgagcaaa

SEQ ID NO: 1066124 - DNA, 15 bp, Homo sapiens
gtgacatctgagcaa

SEQ ID NO: 1066125 - DNA, 15 bp, Homo sapiens
agtgacatctgagca

SEQ ID NO: 1066126 - DNA, 15 bp, Homo sapiens
aagtgacatctgagc

SEQ ID NO: 1066127 - DNA, 15 bp, Homo sapiens
aaagtgacatctgag

SEQ ID NO: 1066128 - DNA, 15 bp, Homo sapiens
gaaagtgacatctga

SEQ ID NO: 1066129 - DNA, 15 bp, Homo sapiens
agaaagtgacatctg

SEQ ID NO: 1066130 - DNA, 15 bp, Homo sapiens
gagaaagtgacatct

SEQ ID NO: 1066131 - DNA, 15 bp, Homo sapiens
tgagaaagtgacatc

SEQ ID NO: 1066132 - DNA, 15 bp, Homo sapiens
ctgagaaagtgacat

SEQ ID NO: 1066133 - DNA, 15 bp, Homo sapiens
actgagaaagtgaca

SEQ ID NO: 1066134 - DNA, 15 bp, Homo sapiens
tactgagaaagtgac

SEQ ID NO: 1066135 - DNA, 15 bp, Homo sapiens
ttactgagaaagtga

SEQ ID NO: 1066136 - DNA, 15 bp, Homo sapiens
cttactgagaaagtg

SEQ ID NO: 1066137 - DNA, 15 bp, Homo sapiens
ccttactgagaaagt

SEQ ID NO: 1066138 - DNA, 15 bp, Homo sapiens
tccttactgagaaag

SEQ ID NO: 1066139 - DNA, 15 bp, Homo sapiens
gtccttactgagaaa

SEQ ID NO: 1066140 - DNA, 15 bp, Homo sapiens
agtccttactgagaa

SEQ ID NO: 1066141 - DNA, 15 bp, Homo sapiens
aagtccttactgaga

SEQ ID NO: 1066142 - DNA, 15 bp, Homo sapiens
gaagtccttactgag

SEQ ID NO: 1066143 - DNA, 15 bp, Homo sapiens
agaagtccttactga

SEQ ID NO: 1066144 - DNA, 15 bp, Homo sapiens
gagaagtccttactg

SEQ ID NO: 1066145 - DNA, 15 bp, Homo sapiens
agagaagtccttact

SEQ ID NO: 1066146 - DNA, 15 bp, Homo sapiens
tagagaagtccttac

SEQ ID NO: 1066147 - DNA, 15 bp, Homo sapiens
ttagagaagtcctta

SEQ ID NO: 1066148 - DNA, 15 bp, Homo sapiens
gttagagaagtcctt

SEQ ID NO: 1066149 - DNA, 15 bp, Homo sapiens
agttagagaagtcct

SEQ ID NO: 1066150 - DNA, 15 bp, Homo sapiens
aagttagagaagtcc

SEQ ID NO: 1066151 - DNA, 15 bp, Homo sapiens
aaagttagagaagtc

SEQ ID NO: 1066152 - DNA, 15 bp, Homo sapiens
gaaagttagagaagt

SEQ ID NO: 1066153 - DNA, 15 bp, Homo sapiens
ggaaagttagagaag

SEQ ID NO: 1066154 - DNA, 15 bp, Homo sapiens
cggaaagttagagaa

SEQ ID NO: 1066155 - DNA, 15 bp, Homo sapiens
tcggaaagttagaga

SEQ ID NO: 1066156 - DNA, 15 bp, Homo sapiens
atcggaaagttagag

SEQ ID NO: 1066157 - DNA, 15 bp, Homo sapiens
aatcggaaagttaga

SEQ ID NO: 1066158 - DNA, 15 bp, Homo sapiens
aaatcggaaagttag

SEQ ID NO: 1066159 - DNA, 15 bp, Homo sapiens
caaatcggaaagtta

SEQ ID NO: 1066160 - DNA, 15 bp, Homo sapiens
tcaaatcggaaagtt

SEQ ID NO: 1066161 - DNA, 15 bp, Homo sapiens
ttcaaatcggaaagt

SEQ ID NO: 1066162 - DNA, 15 bp, Homo sapiens
tttcaaatcggaaag

SEQ ID NO: 1066163 - DNA, 15 bp, Homo sapiens
ttttcaaatcggaaa

SEQ ID NO: 1066164 - DNA, 15 bp, Homo sapiens
attttcaaatcggaa

SEQ ID NO: 1066165 - DNA, 15 bp, Homo sapiens
cattttcaaatcgga

SEQ ID NO: 1066166 - DNA, 15 bp, Homo sapiens
tcattttcaaatcgg

SEQ ID NO: 1066167 - DNA, 15 bp, Homo sapiens
ttcattttcaaatcg

SEQ ID NO: 1066168 - DNA, 15 bp, Homo sapiens
tttcattttcaaatc

SEQ ID NO: 1066169 - DNA, 15 bp, Homo sapiens
atttcattttcaaat

SEQ ID NO: 1066170 - DNA, 15 bp, Homo sapiens
gatttcattttcaaa

SEQ ID NO: 1066171 - DNA, 15 bp, Homo sapiens
ggatttcattttcaa

SEQ ID NO: 1066172 - DNA, 15 bp, Homo sapiens
tggatttcattttca

SEQ ID NO: 1066173 - DNA, 15 bp, Homo sapiens
gtggatttcattttc

SEQ ID NO: 1066174 - DNA, 15 bp, Homo sapiens
tgtggatttcatttt

SEQ ID NO: 1066175 - DNA, 15 bp, Homo sapiens
ctgtggatttcattt

SEQ ID NO: 1066176 - DNA, 15 bp, Homo sapiens
gctgtggatttcatt

SEQ ID NO: 1066177 - DNA, 15 bp, Homo sapiens
ggctgtggatttcat

SEQ ID NO: 1066178 - DNA, 15 bp, Homo sapiens
aggctgtggatttca

SEQ ID NO: 1066179 - DNA, 15 bp, Homo sapiens
gaggctgtggatttc

SEQ ID NO: 1066180 - DNA, 15 bp, Homo sapiens
actgaggctgtggat

SEQ ID NO: 1066181 - DNA, 15 bp, Homo sapiens
tactgaggctgtgga

SEQ ID NO: 1066182 - DNA, 15 bp, Homo sapiens
gtactgaggctgtgg

SEQ ID NO: 1066183 - DNA, 15 bp, Homo sapiens
ggtactgaggctgtg

SEQ ID NO: 1066184 - DNA, 15 bp, Homo sapiens
tggtactgaggctgt

SEQ ID NO: 1066185 - DNA, 15 bp, Homo sapiens
atggtactgaggctg

SEQ ID NO: 1066186 - DNA, 15 bp, Homo sapiens
gatggtactgaggct

SEQ ID NO: 1066187 - DNA, 15 bp, Homo sapiens
tgatggtactgaggc

SEQ ID NO: 1066188 - DNA, 15 bp, Homo sapiens
ctgatggtactgagg

SEQ ID NO: 1066189 - DNA, 15 bp, Homo sapiens
actgatggtactgag

SEQ ID NO: 1066190 - DNA, 15 bp, Homo sapiens
cactgatggtactga

SEQ ID NO: 1066191 - DNA, 15 bp, Homo sapiens
tcactgatggtactg

SEQ ID NO: 1066192 - DNA, 15 bp, Homo sapiens
atcactgatggtact

SEQ ID NO: 1066193 - DNA, 15 bp, Homo sapiens
catcactgatggtac

SEQ ID NO: 1066194 - DNA, 15 bp, Homo sapiens
gcatcactgatggta

SEQ ID NO: 1066195 - DNA, 15 bp, Homo sapiens
agcatcactgatggt

SEQ ID NO: 1066196 - DNA, 15 bp, Homo sapiens
tagcatcactgatgg

SEQ ID NO: 1066197 - DNA, 15 bp, Homo sapiens
atagcatcactgatg

SEQ ID NO: 1066198 - DNA, 15 bp, Homo sapiens
tatagcatcactgat

SEQ ID NO: 1066199 - DNA, 15 bp, Homo sapiens
gtatagcatcactga

SEQ ID NO: 1066200 - DNA, 15 bp, Homo sapiens
agtatagcatcactg

SEQ ID NO: 1066201 - DNA, 15 bp, Homo sapiens
cagtatagcatcact

SEQ ID NO: 1066202 - DNA, 15 bp, Homo sapiens
acagtatagcatcac

SEQ ID NO: 1066203 - DNA, 15 bp, Homo sapiens
aacagtatagcatca

SEQ ID NO: 1066204 - DNA, 15 bp, Homo sapiens
taacagtatagcatc

SEQ ID NO: 1066205 - DNA, 15 bp, Homo sapiens
ctaacagtatagcat

SEQ ID NO: 1066206 - DNA, 15 bp, Homo sapiens
actaacagtatagca

SEQ ID NO: 1066207 - DNA, 15 bp, Homo sapiens
aactaacagtatagc

SEQ ID NO: 1066208 - DNA, 15 bp, Homo sapiens
aaactaacagtatag

SEQ ID NO: 1066209 - DNA, 15 bp, Homo sapiens
taaactaacagtata

SEQ ID NO: 1066210 - DNA, 15 bp, Homo sapiens
gtaaactaacagtat

SEQ ID NO: 1066211 - DNA, 15 bp, Homo sapiens
agtaaactaacagta

SEQ ID NO: 1066212 - DNA, 15 bp, Homo sapiens
aagtaaactaacagt

SEQ ID NO: 1066213 - DNA, 15 bp, Homo sapiens
aaagtaaactaacag

SEQ ID NO: 1066214 - DNA, 15 bp, Homo sapiens
aaaagtaaactaaca

SEQ ID NO: 1066215 - DNA, 15 bp, Homo sapiens
aaaaagtaaactaac

SEQ ID NO: 1066216 - DNA, 15 bp, Homo sapiens
taaaaagtaaactaa

SEQ ID NO: 1066217 - DNA, 15 bp, Homo sapiens
ttaaaaagtaaacta

SEQ ID NO: 1066218 - DNA, 15 bp, Homo sapiens
tttaaaaagtaaact

SEQ ID NO: 1066219 - DNA, 15 bp, Homo sapiens
ttttaaaaagtaaac

SEQ ID NO: 1066220 - DNA, 15 bp, Homo sapiens
tttttaaaaagtaaa

SEQ ID NO: 1066221 - DNA, 15 bp, Homo sapiens
atttttaaaaagtaa

SEQ ID NO: 1066222 - DNA, 15 bp, Homo sapiens
aatttttaaaaagta

SEQ ID NO: 1066223 - DNA, 15 bp, Homo sapiens
aaatttttaaaaagt

SEQ ID NO: 1066224 - DNA, 15 bp, Homo sapiens
caaatttttaaaaag

SEQ ID NO: 1066225 - DNA, 15 bp, Homo sapiens
tcaaatttttaaaaa

SEQ ID NO: 1066226 - DNA, 15 bp, Homo sapiens
ttcaaatttttaaaa

SEQ ID NO: 1066227 - DNA, 15 bp, Homo sapiens
tttcaaatttttaaa

SEQ ID NO: 1066228 - DNA, 15 bp, Homo sapiens
ttttcaaatttttaa

SEQ ID NO: 1066229 - DNA, 15 bp, Homo sapiens
attttcaaattttta

SEQ ID NO: 1066230 - DNA, 15 bp, Homo sapiens
cattttcaaattttt

SEQ ID NO: 1066231 - DNA, 15 bp, Homo sapiens
tcattttcaaatttt

SEQ ID NO: 1066232 - DNA, 15 bp, Homo sapiens
ttcattttcaaattt

SEQ ID NO: 1066233 - DNA, 15 bp, Homo sapiens
tttcattttcaaatt

SEQ ID NO: 1066234 - DNA, 15 bp, Homo sapiens
ttttcattttcaaat

SEQ ID NO: 1066235 - DNA, 15 bp, Homo sapiens
cttttcattttcaaa

SEQ ID NO: 1066236 - DNA, 15 bp, Homo sapiens
ccttttcattttcaa

SEQ ID NO: 1066237 - DNA, 15 bp, Homo sapiens
accttttcattttca

SEQ ID NO: 1066238 - DNA, 15 bp, Homo sapiens
caccttttcattttc

SEQ ID NO: 1066239 - DNA, 15 bp, Homo sapiens
tcaccttttcatttt

SEQ ID NO: 1066240 - DNA, 15 bp, Homo sapiens
gtcaccttttcattt

SEQ ID NO: 1066241 - DNA, 15 bp, Homo sapiens
tgtcaccttttcatt

SEQ ID NO: 1066242 - DNA, 15 bp, Homo sapiens
atgtcaccttttcat

SEQ ID NO: 1066243 - DNA, 15 bp, Homo sapiens
aatgtcaccttttca

SEQ ID NO: 1066244 - DNA, 15 bp, Homo sapiens
aaatgtcaccttttc

SEQ ID NO: 1066245 - DNA, 15 bp, Homo sapiens
taaatgtcacctttt

SEQ ID NO: 1066246 - DNA, 15 bp, Homo sapiens
ttaaatgtcaccttt

SEQ ID NO: 1066247 - DNA, 15 bp, Homo sapiens
cttaaatgtcacctt

SEQ ID NO: 1066248 - DNA, 15 bp, Homo sapiens
gcttaaatgtcacct

SEQ ID NO: 1066249 - DNA, 15 bp, Homo sapiens
tgcttaaatgtcacc

SEQ ID NO: 1066250 - DNA, 15 bp, Homo sapiens
ttgcttaaatgtcac

SEQ ID NO: 1066251 - DNA, 15 bp, Homo sapiens
tttgcttaaatgtca

SEQ ID NO: 1066252 - DNA, 15 bp, Homo sapiens
ctttgcttaaatgtc

SEQ ID NO: 1066253 - DNA, 15 bp, Homo sapiens
gtctttgcttaaatg

SEQ ID NO: 1066254 - DNA, 15 bp, Homo sapiens
tgtctttgcttaaat

SEQ ID NO: 1066255 - DNA, 15 bp, Homo sapiens
ttgtctttgcttaaa

SEQ ID NO: 1066256 - DNA, 15 bp, Homo sapiens
tttgtctttgcttaa

SEQ ID NO: 1066257 - DNA, 15 bp, Homo sapiens
ttttgtctttgctta

SEQ ID NO: 1066258 - DNA, 15 bp, Homo sapiens
attttgtctttgctt

SEQ ID NO: 1066259 - DNA, 15 bp, Homo sapiens
aattttgtctttgct

SEQ ID NO: 1066260 - DNA, 15 bp, Homo sapiens
aaattttgtctttgc

SEQ ID NO: 1066261 - DNA, 15 bp, Homo sapiens
aaaattttgtctttg

SEQ ID NO: 1066262 - DNA, 15 bp, Homo sapiens
taaaattttgtcttt

SEQ ID NO: 1066263 - DNA, 15 bp, Homo sapiens
ttaaaattttgtctt

SEQ ID NO: 1066264 - DNA, 15 bp, Homo sapiens
cttaaaattttgtct

SEQ ID NO: 1066265 - DNA, 15 bp, Homo sapiens
tcttaaaattttgtc

SEQ ID NO: 1066266 - DNA, 15 bp, Homo sapiens
ttcttaaaattttgt

SEQ ID NO: 1066267 - DNA, 15 bp, Homo sapiens
attcttaaaattttg

SEQ ID NO: 1066268 - DNA, 15 bp, Homo sapiens
aattcttaaaatttt

SEQ ID NO: 1066269 - DNA, 15 bp, Homo sapiens
aaattcttaaaattt

SEQ ID NO: 1066270 - DNA, 15 bp, Homo sapiens
taaattcttaaaatt

SEQ ID NO: 1066271 - DNA, 15 bp, Homo sapiens
ttaaattcttaaaat

SEQ ID NO: 1066272 - DNA, 15 bp, Homo sapiens
tttaaattcttaaaa

SEQ ID NO: 1066273 - DNA, 15 bp, Homo sapiens
ttttaaattcttaaa

SEQ ID NO: 1066274 - DNA, 15 bp, Homo sapiens
tttttaaattcttaa

SEQ ID NO: 1066275 - DNA, 15 bp, Homo sapiens
atttttaaattctta

SEQ ID NO: 1066276 - DNA, 15 bp, Homo sapiens
catttttaaattctt

SEQ ID NO: 1066277 - DNA, 15 bp, Homo sapiens
acatttttaaattct

SEQ ID NO: 1066278 - DNA, 15 bp, Homo sapiens
cacatttttaaattc

SEQ ID NO: 1066279 - DNA, 15 bp, Homo sapiens
acacatttttaaatt

SEQ ID NO: 1066280 - DNA, 15 bp, Homo sapiens
aacacatttttaaat

SEQ ID NO: 1066281 - DNA, 15 bp, Homo sapiens
aaacacatttttaaa

SEQ ID NO: 1066282 - DNA, 15 bp, Homo sapiens
taaacacatttttaa

SEQ ID NO: 1066283 - DNA, 15 bp, Homo sapiens
ataaacacattttta

SEQ ID NO: 1066284 - DNA, 15 bp, Homo sapiens
aataaacacattttt

SEQ ID NO: 1066285 - DNA, 15 bp, Homo sapiens
taataaacacatttt

SEQ ID NO: 1066286 - DNA, 15 bp, Homo sapiens
ataataaacacattt

SEQ ID NO: 1066287 - DNA, 15 bp, Homo sapiens
aataataaacacatt

SEQ ID NO: 1066288 - DNA, 15 bp, Homo sapiens
caataataaacacat

SEQ ID NO: 1066289 - DNA, 15 bp, Homo sapiens
acaataataaacaca

SEQ ID NO: 1066290 - DNA, 15 bp, Homo sapiens
gacaataataaacac

SEQ ID NO: 1066291 - DNA, 15 bp, Homo sapiens
agacaataataaaca

SEQ ID NO: 1066292 - DNA, 15 bp, Homo sapiens
gagacaataataaac

SEQ ID NO: 1066293 - DNA, 15 bp, Homo sapiens
agagacaataataaa

SEQ ID NO: 1066294 - DNA, 15 bp, Homo sapiens
gagagacaataataa

SEQ ID NO: 1066295 - DNA, 15 bp, Homo sapiens
ggagagacaataata

SEQ ID NO: 1066296 - DNA, 15 bp, Homo sapiens
gggagagacaataat

SEQ ID NO: 1066297 - DNA, 15 bp, Homo sapiens
tgggagagacaataa

SEQ ID NO: 1066298 - DNA, 15 bp, Homo sapiens
atgggagagacaata

SEQ ID NO: 1066299 - DNA, 15 bp, Homo sapiens
aatgggagagacaat

SEQ ID NO: 1066300 - DNA, 15 bp, Homo sapiens
caatgggagagacaa

SEQ ID NO: 1066301 - DNA, 15 bp, Homo sapiens
ccaatgggagagaca

SEQ ID NO: 1066302 - DNA, 15 bp, Homo sapiens
tccaatgggagagac

SEQ ID NO: 1066303 - DNA, 15 bp, Homo sapiens
ttccaatgggagaga

SEQ ID NO: 1066304 - DNA, 15 bp, Homo sapiens
attccaatgggagag

SEQ ID NO: 1066305 - DNA, 15 bp, Homo sapiens
cattccaatgggaga

SEQ ID NO: 1066306 - DNA, 15 bp, Homo sapiens
gcattccaatgggag

SEQ ID NO: 1066307 - DNA, 15 bp, Homo sapiens
cgcattccaatggga

SEQ ID NO: 1066308 - DNA, 15 bp, Homo sapiens
tcgcattccaatggg

SEQ ID NO: 1066309 - DNA, 15 bp, Homo sapiens
ctcgcattccaatgg

SEQ ID NO: 1066310 - DNA, 15 bp, Homo sapiens
actcgcattccaatg

SEQ ID NO: 1066311 - DNA, 15 bp, Homo sapiens
aactcgcattccaat

SEQ ID NO: 1066312 - DNA, 15 bp, Homo sapiens
gaactcgcattccaa

SEQ ID NO: 1066313 - DNA, 15 bp, Homo sapiens
agaactcgcattcca

SEQ ID NO: 1066314 - DNA, 15 bp, Homo sapiens
tagaactcgcattcc

SEQ ID NO: 1066315 - DNA, 15 bp, Homo sapiens
gtagaactcgcattc

SEQ ID NO: 1066316 - DNA, 15 bp, Homo sapiens
ggtagaactcgcatt

SEQ ID NO: 1066317 - DNA, 15 bp, Homo sapiens
tggtagaactcgcat

SEQ ID NO: 1066318 - DNA, 15 bp, Homo sapiens
ctggtagaactcgca

SEQ ID NO: 1066319 - DNA, 15 bp, Homo sapiens
cctggtagaactcgc

SEQ ID NO: 1066320 - DNA, 15 bp, Homo sapiens
tcctggtagaactcg

SEQ ID NO: 1066321 - DNA, 15 bp, Homo sapiens
ttcctggtagaactc

SEQ ID NO: 1066322 - DNA, 15 bp, Homo sapiens
gttcctggtagaact

SEQ ID NO: 1066323 - DNA, 15 bp, Homo sapiens
agttcctggtagaac

SEQ ID NO: 1066324 - DNA, 15 bp, Homo sapiens
cagttcctggtagaa

SEQ ID NO: 1066325 - DNA, 15 bp, Homo sapiens
gcagttcctggtaga

SEQ ID NO: 1066326 - DNA, 15 bp, Homo sapiens
agcagttcctggtag

SEQ ID NO: 1066327 - DNA, 15 bp, Homo sapiens
aagcagttcctggta

SEQ ID NO: 1066328 - DNA, 15 bp, Homo sapiens
caagcagttcctggt

SEQ ID NO: 1066329 - DNA, 15 bp, Homo sapiens
acaagcagttcctgg

SEQ ID NO: 1066330 - DNA, 15 bp, Homo sapiens
aacaagcagttcctg

SEQ ID NO: 1066331 - DNA, 15 bp, Homo sapiens
gaacaagcagttcct

SEQ ID NO: 1066332 - DNA, 15 bp, Homo sapiens
tgaacaagcagttcc

SEQ ID NO: 1066333 - DNA, 15 bp, Homo sapiens
atgaacaagcagttc

SEQ ID NO: 1066334 - DNA, 15 bp, Homo sapiens
aatgaacaagcagtt

SEQ ID NO: 1066335 - DNA, 15 bp, Homo sapiens
gaatgaacaagcagt

SEQ ID NO: 1066336 - DNA, 15 bp, Homo sapiens
ggaatgaacaagcag

SEQ ID NO: 1066337 - DNA, 15 bp, Homo sapiens
aggaatgaacaagca

SEQ ID NO: 1066338 - DNA, 15 bp, Homo sapiens
caggaatgaacaagc

SEQ ID NO: 1066339 - DNA, 15 bp, Homo sapiens
tcaggaatgaacaag

SEQ ID NO: 1066340 - DNA, 15 bp, Homo sapiens
ttcaggaatgaacaa

SEQ ID NO: 1066341 - DNA, 15 bp, Homo sapiens
attcaggaatgaaca

SEQ ID NO: 1066342 - DNA, 15 bp, Homo sapiens
gattcaggaatgaac

SEQ ID NO: 1066343 - DNA, 15 bp, Homo sapiens
agattcaggaatgaa

SEQ ID NO: 1066344 - DNA, 15 bp, Homo sapiens
gagattcaggaatga

SEQ ID NO: 1066345 - DNA, 15 bp, Homo sapiens
ggagattcaggaatg

SEQ ID NO: 1066346 - DNA, 15 bp, Homo sapiens
tggagattcaggaat

SEQ ID NO: 1066347 - DNA, 15 bp, Homo sapiens
ctggagattcaggaa

SEQ ID NO: 1066348 - DNA, 15 bp, Homo sapiens
gctggagattcagga

SEQ ID NO: 1066349 - DNA, 15 bp, Homo sapiens
ggctggagattcagg

SEQ ID NO: 1066350 - DNA, 15 bp, Homo sapiens
aggctggagattcag

SEQ ID NO: 1066351 - DNA, 15 bp, Homo sapiens
caggctggagattca

SEQ ID NO: 1066352 - DNA, 15 bp, Homo sapiens
ccaggctggagattc

SEQ ID NO: 1066353 - DNA, 15 bp, Homo sapiens
tccaggctggagatt

SEQ ID NO: 1066354 - DNA, 15 bp, Homo sapiens
ctccaggctggagat

SEQ ID NO: 1066355 - DNA, 15 bp, Homo sapiens
tctccaggctggaga

SEQ ID NO: 1066356 - DNA, 15 bp, Homo sapiens
ttctccaggctggag

SEQ ID NO: 1066357 - DNA, 15 bp, Homo sapiens
gttctccaggctgga

SEQ ID NO: 1066358 - DNA, 15 bp, Homo sapiens
tgttctccaggctgg

SEQ ID NO: 1066359 - DNA, 15 bp, Homo sapiens
ctgttctccaggctg

SEQ ID NO: 1066360 - DNA, 15 bp, Homo sapiens
cctgttctccaggct

SEQ ID NO: 1066361 - DNA, 15 bp, Homo sapiens
ccctgttctccaggc

SEQ ID NO: 1066362 - DNA, 15 bp, Homo sapiens
gccctgttctccagg

SEQ ID NO: 1066363 - DNA, 15 bp, Homo sapiens
ggccctgttctccag

SEQ ID NO: 1066364 - DNA, 15 bp, Homo sapiens
tggccctgttctcca

SEQ ID NO: 1066365 - DNA, 15 bp, Homo sapiens
ctggccctgttctcc

SEQ ID NO: 1066366 - DNA, 15 bp, Homo sapiens
gctggccctgttctc

SEQ ID NO: 1066367 - DNA, 15 bp, Homo sapiens
tgctggccctgttct

SEQ ID NO: 1066368 - DNA, 15 bp, Homo sapiens
gtgctggccctgttc

SEQ ID NO: 1066369 - DNA, 15 bp, Homo sapiens
tgtgctggccctgtt

SEQ ID NO: 1066370 - DNA, 15 bp, Homo sapiens
atgtgctggccctgt

SEQ ID NO: 1066371 - DNA, 15 bp, Homo sapiens
tatgtgctggccctg

SEQ ID NO: 1066372 - DNA, 15 bp, Homo sapiens
ctatgtgctggccct

SEQ ID NO: 1066373 - DNA, 15 bp, Homo sapiens
actatgtgctggccc

SEQ ID NO: 1066374 - DNA, 15 bp, Homo sapiens
tactatgtgctggcc

SEQ ID NO: 1066375 - DNA, 15 bp, Homo sapiens
ctactatgtgctggc

SEQ ID NO: 1066376 - DNA, 15 bp, Homo sapiens
tctactatgtgctgg

SEQ ID NO: 1066377 - DNA, 15 bp, Homo sapiens
atctactatgtgctg

SEQ ID NO: 1066378 - DNA, 15 bp, Homo sapiens
aatctactatgtgct

SEQ ID NO: 1066379 - DNA, 15 bp, Homo sapiens
gaatctactatgtgc

SEQ ID NO: 1066380 - DNA, 15 bp, Homo sapiens
agaatctactatgtg

SEQ ID NO: 1066381 - DNA, 15 bp, Homo sapiens
tagaatctactatgt

SEQ ID NO: 1066382 - DNA, 15 bp, Homo sapiens
ctagaatctactatg

SEQ ID NO: 1066383 - DNA, 15 bp, Homo sapiens
cctagaatctactat

SEQ ID NO: 1066384 - DNA, 15 bp, Homo sapiens
acctagaatctacta

SEQ ID NO: 1066385 - DNA, 15 bp, Homo sapiens
tacctagaatctact

SEQ ID NO: 1066386 - DNA, 15 bp, Homo sapiens
ttacctagaatctac

SEQ ID NO: 1066387 - DNA, 15 bp, Homo sapiens
tttacctagaatcta

SEQ ID NO: 1066388 - DNA, 15 bp, Homo sapiens
atttacctagaatct

SEQ ID NO: 1066389 - DNA, 15 bp, Homo sapiens
catttacctagaatc

SEQ ID NO: 1066390 - DNA, 15 bp, Homo sapiens
acatttacctagaat

SEQ ID NO: 1066391 - DNA, 15 bp, Homo sapiens
aacatttacctagaa

SEQ ID NO: 1066392 - DNA, 15 bp, Homo sapiens
aaacatttacctaga

SEQ ID NO: 1066393 - DNA, 15 bp, Homo sapiens
gaaacatttacctag

SEQ ID NO: 1066394 - DNA, 15 bp, Homo sapiens
agaaacatttaccta

SEQ ID NO: 1066395 - DNA, 15 bp, Homo sapiens
tagaaacatttacct

SEQ ID NO: 1066396 - DNA, 15 bp, Homo sapiens
ttagaaacatttacc

SEQ ID NO: 1066397 - DNA, 15 bp, Homo sapiens
tttagaaacatttac

SEQ ID NO: 1066398 - DNA, 15 bp, Homo sapiens
ttttagaaacattta

SEQ ID NO: 1066399 - DNA, 15 bp, Homo sapiens
attttagaaacattt

SEQ ID NO: 1066400 - DNA, 15 bp, Homo sapiens
tattttagaaacatt

SEQ ID NO: 1066401 - DNA, 15 bp, Homo sapiens
ttattttagaaacat

SEQ ID NO: 1066402 - DNA, 15 bp, Homo sapiens
cttattttagaaaca

SEQ ID NO: 1066403 - DNA, 15 bp, Homo sapiens
tcttattttagaaac

SEQ ID NO: 1066404 - DNA, 15 bp, Homo sapiens
atcttattttagaaa

SEQ ID NO: 1066405 - DNA, 15 bp, Homo sapiens
catcttattttagaa

SEQ ID NO: 1066406 - DNA, 15 bp, Homo sapiens
tcatcttattttaga

SEQ ID NO: 1066407 - DNA, 15 bp, Homo sapiens
ttcatcttattttag

SEQ ID NO: 1066408 - DNA, 15 bp, Homo sapiens
attcatcttatttta

SEQ ID NO: 1066409 - DNA, 15 bp, Homo sapiens
tattcatcttatttt

SEQ ID NO: 1066410 - DNA, 15 bp, Homo sapiens
ttattcatcttattt

SEQ ID NO: 1066411 - DNA, 15 bp, Homo sapiens
tttattcatcttatt

SEQ ID NO: 1066412 - DNA, 15 bp, Homo sapiens
atttattcatcttat

SEQ ID NO: 1066413 - DNA, 15 bp, Homo sapiens
catttattcatctta

SEQ ID NO: 1066414 - DNA, 15 bp, Homo sapiens
tcatttattcatctt

SEQ ID NO: 1066415 - DNA, 15 bp, Homo sapiens
ctcatttattcatct

SEQ ID NO: 1066416 - DNA, 15 bp, Homo sapiens
actcatttattcatc

SEQ ID NO: 1066417 - DNA, 15 bp, Homo sapiens
gactcatttattcat

SEQ ID NO: 1066418 - DNA, 15 bp, Homo sapiens
tgactcatttattca

SEQ ID NO: 1066419 - DNA, 15 bp, Homo sapiens
ctgactcatttattc

SEQ ID NO: 1066420 - DNA, 15 bp, Homo sapiens
actgactcatttatt

SEQ ID NO: 1066421 - DNA, 15 bp, Homo sapiens
cactgactcatttat

SEQ ID NO: 1066422 - DNA, 15 bp, Homo sapiens
ccactgactcattta

SEQ ID NO: 1066423 - DNA, 15 bp, Homo sapiens
tccactgactcattt

SEQ ID NO: 1066424 - DNA, 15 bp, Homo sapiens
ctccactgactcatt

SEQ ID NO: 1066425 - DNA, 15 bp, Homo sapiens
tctccactgactcat

SEQ ID NO: 1066426 - DNA, 15 bp, Homo sapiens
ctctccactgactca

SEQ ID NO: 1066427 - DNA, 15 bp, Homo sapiens
actctccactgactc

SEQ ID NO: 1066428 - DNA, 15 bp, Homo sapiens
cactctccactgact

SEQ ID NO: 1066429 - DNA, 15 bp, Homo sapiens
ccactctccactgac

SEQ ID NO: 1066430 - DNA, 15 bp, Homo sapiens
cccactctccactga

SEQ ID NO: 1066431 - DNA, 15 bp, Homo sapiens
gcccactctccactg

SEQ ID NO: 1066432 - DNA, 15 bp, Homo sapiens
cgcccactctccact

SEQ ID NO: 1066433 - DNA, 15 bp, Homo sapiens
tcgcccactctccac

SEQ ID NO: 1066434 - DNA, 15 bp, Homo sapiens
ttcgcccactctcca

SEQ ID NO: 1066435 - DNA, 15 bp, Homo sapiens
cttcgcccactctcc

SEQ ID NO: 1066436 - DNA, 15 bp, Homo sapiens
ccttcgcccactctc

SEQ ID NO: 1066437 - DNA, 15 bp, Homo sapiens
tccttcgcccactct

SEQ ID NO: 1066438 - DNA, 15 bp, Homo sapiens
ttccttcgcccactc

SEQ ID NO: 1066439 - DNA, 15 bp, Homo sapiens
attccttcgcccact

SEQ ID NO: 1066440 - DNA, 15 bp, Homo sapiens
cattccttcgcccac

SEQ ID NO: 1066441 - DNA, 15 bp, Homo sapiens
tcattccttcgccca

SEQ ID NO: 1066442 - DNA, 15 bp, Homo sapiens
ctcattccttcgccc

SEQ ID NO: 1066443 - DNA, 15 bp, Homo sapiens
actcattccttcgcc

SEQ ID NO: 1066444 - DNA, 15 bp, Homo sapiens
cactcattccttcgc

SEQ ID NO: 1066445 - DNA, 15 bp, Homo sapiens
tcactcattccttcg

SEQ ID NO: 1066446 - DNA, 15 bp, Homo sapiens
ctcactcattccttc

SEQ ID NO: 1066447 - DNA, 15 bp, Homo sapiens
tctcactcattcctt

SEQ ID NO: 1066448 - DNA, 15 bp, Homo sapiens
ttctcactcattcct

SEQ ID NO: 1066449 - DNA, 15 bp, Homo sapiens
tttctcactcattcc

SEQ ID NO: 1066450 - DNA, 15 bp, Homo sapiens
ctttctcactcattc

SEQ ID NO: 1066451 - DNA, 15 bp, Homo sapiens
gctttctcactcatt

SEQ ID NO: 1066452 - DNA, 15 bp, Homo sapiens
tgctttctcactcat

SEQ ID NO: 1066453 - DNA, 15 bp, Homo sapiens
gtgctttctcactca

SEQ ID NO: 1066454 - DNA, 15 bp, Homo sapiens
tgtgctttctcactc

SEQ ID NO: 1066455 - DNA, 15 bp, Homo sapiens
atgtgctttctcact

SEQ ID NO: 1066456 - DNA, 15 bp, Homo sapiens
gatgtgctttctcac

SEQ ID NO: 1066457 - DNA, 15 bp, Homo sapiens
agatgtgctttctca

SEQ ID NO: 1066458 - DNA, 15 bp, Homo sapiens
cagatgtgctttctc

SEQ ID NO: 1066459 - DNA, 15 bp, Homo sapiens
acagatgtgctttct

SEQ ID NO: 1066460 - DNA, 15 bp, Homo sapiens
gacagatgtgctttc

SEQ ID NO: 1066461 - DNA, 15 bp, Homo sapiens
tgacagatgtgcttt

SEQ ID NO: 1066462 - DNA, 15 bp, Homo sapiens
ttgacagatgtgctt

SEQ ID NO: 1066463 - DNA, 15 bp, Homo sapiens
cttgacagatgtgct

SEQ ID NO: 1066464 - DNA, 15 bp, Homo sapiens
tcttgacagatgtgc

SEQ ID NO: 1066465 - DNA, 15 bp, Homo sapiens
gtcttgacagatgtg

SEQ ID NO: 1066466 - DNA, 15 bp, Homo sapiens
cgtcttgacagatgt

SEQ ID NO: 1066467 - DNA, 15 bp, Homo sapiens
acgtcttgacagatg

SEQ ID NO: 1066468 - DNA, 15 bp, Homo sapiens
gacgtcttgacagat

SEQ ID NO: 1066469 - DNA, 15 bp, Homo sapiens
agacgtcttgacaga

SEQ ID NO: 1066470 - DNA, 15 bp, Homo sapiens
aagacgtcttgacag

SEQ ID NO: 1066471 - DNA, 15 bp, Homo sapiens
caagacgtcttgaca

SEQ ID NO: 1066472 - DNA, 15 bp, Homo sapiens
gcaagacgtcttgac

SEQ ID NO: 1066473 - DNA, 15 bp, Homo sapiens
agcaagacgtcttga

SEQ ID NO: 1066474 - DNA, 15 bp, Homo sapiens
gagcaagacgtcttg

SEQ ID NO: 1066475 - DNA, 15 bp, Homo sapiens
ggagcaagacgtctt

SEQ ID NO: 1066476 - DNA, 15 bp, Homo sapiens
gggagcaagacgtct

SEQ ID NO: 1066477 - DNA, 15 bp, Homo sapiens
ggggagcaagacgtc

SEQ ID NO: 1066478 - DNA, 15 bp, Homo sapiens
aggggagcaagacgt

SEQ ID NO: 1066479 - DNA, 15 bp, Homo sapiens
gaggggagcaagacg

SEQ ID NO: 1066480 - DNA, 15 bp, Homo sapiens
cgaggggagcaagac

SEQ ID NO: 1066481 - DNA, 15 bp, Homo sapiens
ccgaggggagcaaga

SEQ ID NO: 1066482 - DNA, 15 bp, Homo sapiens
cccgaggggagcaag

SEQ ID NO: 1066483 - DNA, 15 bp, Homo sapiens
ccccgaggggagcaa

SEQ ID NO: 1066484 - DNA, 15 bp, Homo sapiens
tccccgaggggagca

SEQ ID NO: 1066485 - DNA, 15 bp, Homo sapiens
ctccccgaggggagc

SEQ ID NO: 1066486 - DNA, 15 bp, Homo sapiens
gctccccgaggggag

SEQ ID NO: 1066487 - DNA, 15 bp, Homo sapiens
agctccccgagggga

SEQ ID NO: 1066488 - DNA, 15 bp, Homo sapiens
cagctccccgagggg

SEQ ID NO: 1066489 - DNA, 15 bp, Homo sapiens
ccagctccccgaggg

SEQ ID NO: 1066490 - DNA, 15 bp, Homo sapiens
cccagctccccgagg

SEQ ID NO: 1066491 - DNA, 15 bp, Homo sapiens
acccagctccccgag

SEQ ID NO: 1066492 - DNA, 15 bp, Homo sapiens
gacccagctccccga

SEQ ID NO: 1066493 - DNA, 15 bp, Homo sapiens
ggacccagctccccg

SEQ ID NO: 1066494 - DNA, 15 bp, Homo sapiens
aggacccagctcccc

SEQ ID NO: 1066495 - DNA, 15 bp, Homo sapiens
taggacccagctccc

SEQ ID NO: 1066496 - DNA, 15 bp, Homo sapiens
gtaggacccagctcc

SEQ ID NO: 1066497 - DNA, 15 bp, Homo sapiens
agtaggacccagctc

SEQ ID NO: 1066498 - DNA, 15 bp, Homo sapiens
gagtaggacccagct

SEQ ID NO: 1066499 - DNA, 15 bp, Homo sapiens
tgagtaggacccagc

SEQ ID NO: 1066500 - DNA, 15 bp, Homo sapiens
gtgagtaggacccag

SEQ ID NO: 1066501 - DNA, 15 bp, Homo sapiens
agtgagtaggaccca

SEQ ID NO: 1066502 - DNA, 15 bp, Homo sapiens
cagtgagtaggaccc

SEQ ID NO: 1066503 - DNA, 15 bp, Homo sapiens
gcagtgagtaggacc

SEQ ID NO: 1066504 - DNA, 15 bp, Homo sapiens
tgcagtgagtaggac

SEQ ID NO: 1066505 - DNA, 15 bp, Homo sapiens
atgcagtgagtagga

SEQ ID NO: 1066506 - DNA, 15 bp, Homo sapiens
aatgcagtgagtagg

SEQ ID NO: 1066507 - DNA, 15 bp, Homo sapiens
aaatgcagtgagtag

SEQ ID NO: 1066508 - DNA, 15 bp, Homo sapiens
gaaatgcagtgagta

SEQ ID NO: 1066509 - DNA, 15 bp, Homo sapiens
agaaatgcagtgagt

SEQ ID NO: 1066510 - DNA, 15 bp, Homo sapiens
aagaaatgcagtgag

SEQ ID NO: 1066511 - DNA, 15 bp, Homo sapiens
aaagaaatgcagtga

SEQ ID NO: 1066512 - DNA, 15 bp, Homo sapiens
gaaagaaatgcagtg

SEQ ID NO: 1066513 - DNA, 15 bp, Homo sapiens
ggaaagaaatgcagt

SEQ ID NO: 1066514 - DNA, 15 bp, Homo sapiens
gggaaagaaatgcag

SEQ ID NO: 1066515 - DNA, 15 bp, Homo sapiens
agggaaagaaatgca

SEQ ID NO: 1066516 - DNA, 15 bp, Homo sapiens
gagggaaagaaatgc

SEQ ID NO: 1066517 - DNA, 15 bp, Homo sapiens
agagggaaagaaatg

SEQ ID NO: 1066518 - DNA, 15 bp, Homo sapiens
aagagggaaagaaat

SEQ ID NO: 1066519 - DNA, 15 bp, Homo sapiens
caagagggaaagaaa

SEQ ID NO: 1066520 - DNA, 15 bp, Homo sapiens
gcaagagggaaagaa

SEQ ID NO: 1066521 - DNA, 15 bp, Homo sapiens
ggcaagagggaaaga

SEQ ID NO: 1066522 - DNA, 15 bp, Homo sapiens
tggcaagagggaaag

SEQ ID NO: 1066523 - DNA, 15 bp, Homo sapiens
gtggcaagagggaaa

SEQ ID NO: 1066524 - DNA, 15 bp, Homo sapiens
tgtggcaagagggaa

SEQ ID NO: 1066525 - DNA, 15 bp, Homo sapiens
ctgtggcaagaggga

SEQ ID NO: 1066526 - DNA, 15 bp, Homo sapiens
cctgtggcaagaggg

SEQ ID NO: 1066527 - DNA, 15 bp, Homo sapiens
acctgtggcaagagg

SEQ ID NO: 1066528 - DNA, 15 bp, Homo sapiens
gacctgtggcaagag

SEQ ID NO: 1066529 - DNA, 15 bp, Homo sapiens
ggacctgtggcaaga

SEQ ID NO: 1066530 - DNA, 15 bp, Homo sapiens
aggacctgtggcaag

SEQ ID NO: 1066531 - DNA, 15 bp, Homo sapiens
gaggacctgtggcaa

SEQ ID NO: 1066532 - DNA, 15 bp, Homo sapiens
ggaggacctgtggca

SEQ ID NO: 1066533 - DNA, 15 bp, Homo sapiens
gggaggacctgtggc

SEQ ID NO: 1066534 - DNA, 15 bp, Homo sapiens
ggggaggacctgtgg

SEQ ID NO: 1066535 - DNA, 15 bp, Homo sapiens
aggggaggacctgtg

SEQ ID NO: 1066536 - DNA, 15 bp, Homo sapiens
aaggggaggacctgt

SEQ ID NO: 1066537 - DNA, 15 bp, Homo sapiens
caaggggaggacctg

SEQ ID NO: 1066538 - DNA, 15 bp, Homo sapiens
ccaaggggaggacct

SEQ ID NO: 1066539 - DNA, 15 bp, Homo sapiens
tccaaggggaggacc

SEQ ID NO: 1066540 - DNA, 15 bp, Homo sapiens
ctccaaggggaggac

SEQ ID NO: 1066541 - DNA, 15 bp, Homo sapiens
cctccaaggggagga

SEQ ID NO: 1066542 - DNA, 15 bp, Homo sapiens
ccctccaaggggagg

SEQ ID NO: 1066543 - DNA, 15 bp, Homo sapiens
cccctccaaggggag

SEQ ID NO: 1066544 - DNA, 15 bp, Homo sapiens
gcccctccaagggga

SEQ ID NO: 1066545 - DNA, 15 bp, Homo sapiens
tgcccctccaagggg

SEQ ID NO: 1066546 - DNA, 15 bp, Homo sapiens
gtgcccctccaaggg

SEQ ID NO: 1066547 - DNA, 15 bp, Homo sapiens
tgtgcccctccaagg

SEQ ID NO: 1066548 - DNA, 15 bp, Homo sapiens
ttgtgcccctccaag

SEQ ID NO: 1066549 - DNA, 15 bp, Homo sapiens
tttgtgcccctccaa

SEQ ID NO: 1066550 - DNA, 15 bp, Homo sapiens
gtttgtgcccctcca

SEQ ID NO: 1066551 - DNA, 15 bp, Homo sapiens
cgtttgtgcccctcc

SEQ ID NO: 1066552 - DNA, 15 bp, Homo sapiens
tcgtttgtgcccctc

SEQ ID NO: 1066553 - DNA, 15 bp, Homo sapiens
atcgtttgtgcccct

SEQ ID NO: 1066554 - DNA, 15 bp, Homo sapiens
gatcgtttgtgcccc

SEQ ID NO: 1066555 - DNA, 15 bp, Homo sapiens
tgatcgtttgtgccc

SEQ ID NO: 1066556 - DNA, 15 bp, Homo sapiens
ctgatcgtttgtgcc

SEQ ID NO: 1066557 - DNA, 15 bp, Homo sapiens
actgatcgtttgtgc

SEQ ID NO: 1066558 - DNA, 15 bp, Homo sapiens
tactgatcgtttgtg

SEQ ID NO: 1066559 - DNA, 15 bp, Homo sapiens
ttactgatcgtttgt

SEQ ID NO: 1066560 - DNA, 15 bp, Homo sapiens
cttactgatcgtttg

SEQ ID NO: 1066561 - DNA, 15 bp, Homo sapiens
tcttactgatcgttt

SEQ ID NO: 1066562 - DNA, 15 bp, Homo sapiens
ttcttactgatcgtt

SEQ ID NO: 1066563 - DNA, 15 bp, Homo sapiens
attcttactgatcgt

SEQ ID NO: 1066564 - DNA, 15 bp, Homo sapiens
tattcttactgatcg

SEQ ID NO: 1066565 - DNA, 15 bp, Homo sapiens
gtattcttactgatc

SEQ ID NO: 1066566 - DNA, 15 bp, Homo sapiens
tgtattcttactgat

SEQ ID NO: 1066567 - DNA, 15 bp, Homo sapiens
ctgtattcttactga

SEQ ID NO: 1066568 - DNA, 15 bp, Homo sapiens
tctgtattcttactg

SEQ ID NO: 1066569 - DNA, 15 bp, Homo sapiens
ctctgtattcttact

SEQ ID NO: 1066570 - DNA, 15 bp, Homo sapiens
gctctgtattcttac

SEQ ID NO: 1066571 - DNA, 15 bp, Homo sapiens
tgctctgtattctta

SEQ ID NO: 1066572 - DNA, 15 bp, Homo sapiens
ttgctctgtattctt

SEQ ID NO: 1066573 - DNA, 15 bp, Homo sapiens
gttgctctgtattct

SEQ ID NO: 1066574 - DNA, 15 bp, Homo sapiens
cgttgctctgtattc

SEQ ID NO: 1066575 - DNA, 15 bp, Homo sapiens
ccgttgctctgtatt

SEQ ID NO: 1066576 - DNA, 15 bp, Homo sapiens
gccgttgctctgtat

SEQ ID NO: 1066577 - DNA, 15 bp, Homo sapiens
ggccgttgctctgta

SEQ ID NO: 1066578 - DNA, 15 bp, Homo sapiens
gggccgttgctctgt

SEQ ID NO: 1066579 - DNA, 15 bp, Homo sapiens
ggggccgttgctctg

SEQ ID NO: 1066580 - DNA, 15 bp, Homo sapiens
tggggccgttgctct

SEQ ID NO: 1066581 - DNA, 15 bp, Homo sapiens
ctggggccgttgctc

SEQ ID NO: 1066582 - DNA, 15 bp, Homo sapiens
gctggggccgttgct

SEQ ID NO: 1066583 - DNA, 15 bp, Homo sapiens
ggctggggccgttgc

SEQ ID NO: 1066584 - DNA, 15 bp, Homo sapiens
tggctggggccgttg

SEQ ID NO: 1066585 - DNA, 15 bp, Homo sapiens
ctggctggggccgtt

SEQ ID NO: 1066586 - DNA, 15 bp, Homo sapiens
cctggctggggccgt

SEQ ID NO: 1066587 - DNA, 15 bp, Homo sapiens
acctggctggggccg

SEQ ID NO: 1066588 - DNA, 15 bp, Homo sapiens
tacctggctggggcc

SEQ ID NO: 1066589 - DNA, 15 bp, Homo sapiens
gtacctggctggggc

SEQ ID NO: 1066590 - DNA, 15 bp, Homo sapiens
ggtacctggctgggg

SEQ ID NO: 1066591 - DNA, 15 bp, Homo sapiens
aggtacctggctggg

SEQ ID NO: 1066592 - DNA, 15 bp, Homo sapiens
caggtacctggctgg

SEQ ID NO: 1066593 - DNA, 15 bp, Homo sapiens
gcaggtacctggctg

SEQ ID NO: 1066594 - DNA, 15 bp, Homo sapiens
ggcaggtacctggct

SEQ ID NO: 1066595 - DNA, 15 bp, Homo sapiens
gggcaggtacctggc

SEQ ID NO: 1066596 - DNA, 15 bp, Homo sapiens
tgggcaggtacctgg

SEQ ID NO: 1066597 - DNA, 15 bp, Homo sapiens
ctgggcaggtacctg

SEQ ID NO: 1066598 - DNA, 15 bp, Homo sapiens
cctgggcaggtacct

SEQ ID NO: 1066599 - DNA, 15 bp, Homo sapiens
tcctgggcaggtacc

SEQ ID NO: 1066600 - DNA, 15 bp, Homo sapiens
atcctgggcaggtac

SEQ ID NO: 1066601 - DNA, 15 bp, Homo sapiens
tatcctgggcaggta

SEQ ID NO: 1066602 - DNA, 15 bp, Homo sapiens
atatcctgggcaggt

SEQ ID NO: 1066603 - DNA, 15 bp, Homo sapiens
catatcctgggcagg

SEQ ID NO: 1066604 - DNA, 15 bp, Homo sapiens
acatatcctgggcag

SEQ ID NO: 1066605 - DNA, 15 bp, Homo sapiens
tacatatcctgggca

SEQ ID NO: 1066606 - DNA, 15 bp, Homo sapiens
ttacatatcctgggc

SEQ ID NO: 1066607 - DNA, 15 bp, Homo sapiens
attacatatcctggg

SEQ ID NO: 1066608 - DNA, 15 bp, Homo sapiens
gattacatatcctgg

SEQ ID NO: 1066609 - DNA, 15 bp, Homo sapiens
agattacatatcctg

SEQ ID NO: 1066610 - DNA, 15 bp, Homo sapiens
gagattacatatcct

SEQ ID NO: 1066611 - DNA, 15 bp, Homo sapiens
agagattacatatcc

SEQ ID NO: 1066612 - DNA, 15 bp, Homo sapiens
gagagattacatatc

SEQ ID NO: 1066613 - DNA, 15 bp, Homo sapiens
ggagagattacatat

SEQ ID NO: 1066614 - DNA, 15 bp, Homo sapiens
aggagagattacata

SEQ ID NO: 1066615 - DNA, 15 bp, Homo sapiens
aaggagagattacat

SEQ ID NO: 1066616 - DNA, 15 bp, Homo sapiens
aaaggagagattaca

SEQ ID NO: 1066617 - DNA, 15 bp, Homo sapiens
caaaggagagattac

SEQ ID NO: 1066618 - DNA, 15 bp, Homo sapiens
gcaaaggagagatta

SEQ ID NO: 1066619 - DNA, 15 bp, Homo sapiens
agcaaaggagagatt

SEQ ID NO: 1066620 - DNA, 15 bp, Homo sapiens
aagcaaaggagagat

SEQ ID NO: 1066621 - DNA, 15 bp, Homo sapiens
gaagcaaaggagaga

SEQ ID NO: 1066622 - DNA, 15 bp, Homo sapiens
ggaagcaaaggagag

SEQ ID NO: 1066623 - DNA, 15 bp, Homo sapiens
aggaagcaaaggaga

SEQ ID NO: 1066624 - DNA, 15 bp, Homo sapiens
caggaagcaaaggag

SEQ ID NO: 1066625 - DNA, 15 bp, Homo sapiens
gcaggaagcaaagga

SEQ ID NO: 1066626 - DNA, 15 bp, Homo sapiens
tgcaggaagcaaagg

SEQ ID NO: 1066627 - DNA, 15 bp, Homo sapiens
gtgcaggaagcaaag

SEQ ID NO: 1066628 - DNA, 15 bp, Homo sapiens
tgtgcaggaagcaaa

SEQ ID NO: 1066629 - DNA, 15 bp, Homo sapiens
ctgtgcaggaagcaa

SEQ ID NO: 1066630 - DNA, 15 bp, Homo sapiens
actgtgcaggaagca

SEQ ID NO: 1066631 - DNA, 15 bp, Homo sapiens
aactgtgcaggaagc

SEQ ID NO: 1066632 - DNA, 15 bp, Homo sapiens
caactgtgcaggaag

SEQ ID NO: 1066633 - DNA, 15 bp, Homo sapiens
acaactgtgcaggaa

SEQ ID NO: 1066634 - DNA, 15 bp, Homo sapiens
aacaactgtgcagga

SEQ ID NO: 1066635 - DNA, 15 bp, Homo sapiens
caacaactgtgcagg

SEQ ID NO: 1066636 - DNA, 15 bp, Homo sapiens
tcaacaactgtgcag

SEQ ID NO: 1066637 - DNA, 15 bp, Homo sapiens
atcaacaactgtgca

SEQ ID NO: 1066638 - DNA, 15 bp, Homo sapiens
aatcaacaactgtgc

SEQ ID NO: 1066639 - DNA, 15 bp, Homo sapiens
aaatcaacaactgtg

SEQ ID NO: 1066640 - DNA, 15 bp, Homo sapiens
gaaatcaacaactgt

SEQ ID NO: 1066641 - DNA, 15 bp, Homo sapiens
tgaaatcaacaactg

SEQ ID NO: 1066642 - DNA, 15 bp, Homo sapiens
gtgaaatcaacaact

SEQ ID NO: 1066643 - DNA, 15 bp, Homo sapiens
tgtgaaatcaacaac

SEQ ID NO: 1066644 - DNA, 15 bp, Homo sapiens
atgtgaaatcaacaa

SEQ ID NO: 1066645 - DNA, 15 bp, Homo sapiens
catgtgaaatcaaca

SEQ ID NO: 1066646 - DNA, 15 bp, Homo sapiens
ccatgtgaaatcaac

SEQ ID NO: 1066647 - DNA, 15 bp, Homo sapiens
accatgtgaaatcaa

SEQ ID NO: 1066648 - DNA, 15 bp, Homo sapiens
gaccatgtgaaatca

SEQ ID NO: 1066649 - DNA, 15 bp, Homo sapiens
tgaccatgtgaaatc

SEQ ID NO: 1066650 - DNA, 15 bp, Homo sapiens
ttgaccatgtgaaat

SEQ ID NO: 1066651 - DNA, 15 bp, Homo sapiens
gttgaccatgtgaaa

SEQ ID NO: 1066652 - DNA, 15 bp, Homo sapiens
agttgaccatgtgaa

SEQ ID NO: 1066653 - DNA, 15 bp, Homo sapiens
cagttgaccatgtga

SEQ ID NO: 1066654 - DNA, 15 bp, Homo sapiens
tcagttgaccatgtg

SEQ ID NO: 1066655 - DNA, 15 bp, Homo sapiens
atcagttgaccatgt

SEQ ID NO: 1066656 - DNA, 15 bp, Homo sapiens
catcagttgaccatg

SEQ ID NO: 1066657 - DNA, 15 bp, Homo sapiens
ccatcagttgaccat

SEQ ID NO: 1066658 - DNA, 15 bp, Homo sapiens
tccatcagttgacca

SEQ ID NO: 1066659 - DNA, 15 bp, Homo sapiens
ctccatcagttgacc

SEQ ID NO: 1066660 - DNA, 15 bp, Homo sapiens
cctccatcagttgac

SEQ ID NO: 1066661 - DNA, 15 bp, Homo sapiens
ccctccatcagttga

SEQ ID NO: 1066662 - DNA, 15 bp, Homo sapiens
accctccatcagttg

SEQ ID NO: 1066663 - DNA, 15 bp, Homo sapiens
aaccctccatcagtt

SEQ ID NO: 1066664 - DNA, 15 bp, Homo sapiens
aaaccctccatcagt

SEQ ID NO: 1066665 - DNA, 15 bp, Homo sapiens
taaaccctccatcag

SEQ ID NO: 1066666 - DNA, 15 bp, Homo sapiens
ttaaaccctccatca

SEQ ID NO: 1066667 - DNA, 15 bp, Homo sapiens
tttaaaccctccatc

SEQ ID NO: 1066668 - DNA, 15 bp, Homo sapiens
gtttaaaccctccat

SEQ ID NO: 1066669 - DNA, 15 bp, Homo sapiens
tgtttaaaccctcca

SEQ ID NO: 1066670 - DNA, 15 bp, Homo sapiens
ttgtttaaaccctcc

SEQ ID NO: 1066671 - DNA, 15 bp, Homo sapiens
attgtttaaaccctc

SEQ ID NO: 1066672 - DNA, 15 bp, Homo sapiens
tattgtttaaaccct

SEQ ID NO: 1066673 - DNA, 15 bp, Homo sapiens
atattgtttaaaccc

SEQ ID NO: 1066674 - DNA, 15 bp, Homo sapiens
tatattgtttaaacc

SEQ ID NO: 1066675 - DNA, 15 bp, Homo sapiens
gtatattgtttaaac

SEQ ID NO: 1066676 - DNA, 15 bp, Homo sapiens
ggtatattgtttaaa

SEQ ID NO: 1066677 - DNA, 15 bp, Homo sapiens
tggtatattgtttaa

SEQ ID NO: 1066678 - DNA, 15 bp, Homo sapiens
gtggtatattgttta

SEQ ID NO: 1066679 - DNA, 15 bp, Homo sapiens
tgtggtatattgttt

SEQ ID NO: 1066680 - DNA, 15 bp, Homo sapiens
atgtggtatattgtt

SEQ ID NO: 1066681 - DNA, 15 bp, Homo sapiens
tatgtggtatattgt

SEQ ID NO: 1066682 - DNA, 15 bp, Homo sapiens
atatgtggtatattg

SEQ ID NO: 1066683 - DNA, 15 bp, Homo sapiens
catatgtggtatatt

SEQ ID NO: 1066684 - DNA, 15 bp, Homo sapiens
acatatgtggtatat

SEQ ID NO: 1066685 - DNA, 15 bp, Homo sapiens
aacatatgtggtata

SEQ ID NO: 1066686 - DNA, 15 bp, Homo sapiens
aaacatatgtggtat

SEQ ID NO: 1066687 - DNA, 15 bp, Homo sapiens
aaaacatatgtggta

SEQ ID NO: 1066688 - DNA, 15 bp, Homo sapiens
gaaaacatatgtggt

SEQ ID NO: 1066689 - DNA, 15 bp, Homo sapiens
agaaaacatatgtgg

SEQ ID NO: 1066690 - DNA, 15 bp, Homo sapiens
gagaaaacatatgtg

SEQ ID NO: 1066691 - DNA, 15 bp, Homo sapiens
agagaaaacatatgt

SEQ ID NO: 1066692 - DNA, 15 bp, Homo sapiens
aagagaaaacatatg

SEQ ID NO: 1066693 - DNA, 15 bp, Homo sapiens
taagagaaaacatat

SEQ ID NO: 1066694 - DNA, 15 bp, Homo sapiens
ataagagaaaacata

SEQ ID NO: 1066695 - DNA, 15 bp, Homo sapiens
aataagagaaaacat

SEQ ID NO: 1066696 - DNA, 15 bp, Homo sapiens
aaataagagaaaaca

SEQ ID NO: 1066697 - DNA, 15 bp, Homo sapiens
gaaataagagaaaac

SEQ ID NO: 1066698 - DNA, 15 bp, Homo sapiens
agaaataagagaaaa

SEQ ID NO: 1066699 - DNA, 15 bp, Homo sapiens
gagaaataagagaaa

SEQ ID NO: 1066700 - DNA, 15 bp, Homo sapiens
agagaaataagagaa

SEQ ID NO: 1066701 - DNA, 15 bp, Homo sapiens
gagagaaataagaga

SEQ ID NO: 1066702 - DNA, 15 bp, Homo sapiens
tgagagaaataagag

SEQ ID NO: 1066703 - DNA, 15 bp, Homo sapiens
ttgagagaaataaga

SEQ ID NO: 1066704 - DNA, 15 bp, Homo sapiens
tttgagagaaataag

SEQ ID NO: 1066705 - DNA, 15 bp, Homo sapiens
ctttgagagaaataa

SEQ ID NO: 1066706 - DNA, 15 bp, Homo sapiens
tctttgagagaaata

SEQ ID NO: 1066707 - DNA, 15 bp, Homo sapiens
ctctttgagagaaat

SEQ ID NO: 1066708 - DNA, 15 bp, Homo sapiens
cctctttgagagaaa

SEQ ID NO: 1066709 - DNA, 15 bp, Homo sapiens
ccctctttgagagaa

SEQ ID NO: 1066710 - DNA, 15 bp, Homo sapiens
accctctttgagaga

SEQ ID NO: 1066711 - DNA, 15 bp, Homo sapiens
gaccctctttgagag

SEQ ID NO: 1066712 - DNA, 15 bp, Homo sapiens
agaccctctttgaga

SEQ ID NO: 1066713 - DNA, 15 bp, Homo sapiens
tagaccctctttgag

SEQ ID NO: 1066714 - DNA, 15 bp, Homo sapiens
atagaccctctttga

SEQ ID NO: 1066715 - DNA, 15 bp, Homo sapiens
gatagaccctctttg

SEQ ID NO: 1066716 - DNA, 15 bp, Homo sapiens
agatagaccctcttt

SEQ ID NO: 1066717 - DNA, 15 bp, Homo sapiens
aagatagaccctctt

SEQ ID NO: 1066718 - DNA, 15 bp, Homo sapiens
aaagatagaccctct

SEQ ID NO: 1066719 - DNA, 15 bp, Homo sapiens
caaagatagaccctc

SEQ ID NO: 1066720 - DNA, 15 bp, Homo sapiens
tcaaagatagaccct

SEQ ID NO: 1066721 - DNA, 15 bp, Homo sapiens
gtcaaagatagaccc

SEQ ID NO: 1066722 - DNA, 15 bp, Homo sapiens
ggtcaaagatagacc

SEQ ID NO: 1066723 - DNA, 15 bp, Homo sapiens
gggtcaaagatagac

SEQ ID NO: 1066724 - DNA, 15 bp, Homo sapiens
agggtcaaagataga

SEQ ID NO: 1066725 - DNA, 15 bp, Homo sapiens
tagggtcaaagatag

SEQ ID NO: 1066726 - DNA, 15 bp, Homo sapiens
ttagggtcaaagata

SEQ ID NO: 1066727 - DNA, 15 bp, Homo sapiens
attagggtcaaagat

SEQ ID NO: 1066728 - DNA, 15 bp, Homo sapiens
tattagggtcaaaga

SEQ ID NO: 1066729 - DNA, 15 bp, Homo sapiens
ctattagggtcaaag

SEQ ID NO: 1066730 - DNA, 15 bp, Homo sapiens
actattagggtcaaa

SEQ ID NO: 1066731 - DNA, 15 bp, Homo sapiens
gactattagggtcaa

SEQ ID NO: 1066732 - DNA, 15 bp, Homo sapiens
ggactattagggtca

SEQ ID NO: 1066733 - DNA, 15 bp, Homo sapiens
aggactattagggtc

SEQ ID NO: 1066734 - DNA, 15 bp, Homo sapiens
caggactattagggt

SEQ ID NO: 1066735 - DNA, 15 bp, Homo sapiens
acaggactattaggg

SEQ ID NO: 1066736 - DNA, 15 bp, Homo sapiens
cacaggactattagg

SEQ ID NO: 1066737 - DNA, 15 bp, Homo sapiens
tcacaggactattag

SEQ ID NO: 1066738 - DNA, 15 bp, Homo sapiens
ttcacaggactatta

SEQ ID NO: 1066739 - DNA, 15 bp, Homo sapiens
attcacaggactatt

SEQ ID NO: 1066740 - DNA, 15 bp, Homo sapiens
cattcacaggactat

SEQ ID NO: 1066741 - DNA, 15 bp, Homo sapiens
tcattcacaggacta

SEQ ID NO: 1066742 - DNA, 15 bp, Homo sapiens
ttcattcacaggact

SEQ ID NO: 1066743 - DNA, 15 bp, Homo sapiens
cttcattcacaggac

SEQ ID NO: 1066744 - DNA, 15 bp, Homo sapiens
acttcattcacagga

SEQ ID NO: 1066745 - DNA, 15 bp, Homo sapiens
tacttcattcacagg

SEQ ID NO: 1066746 - DNA, 15 bp, Homo sapiens
ttacttcattcacag

SEQ ID NO: 1066747 - DNA, 15 bp, Homo sapiens
gttacttcattcaca

SEQ ID NO: 1066748 - DNA, 15 bp, Homo sapiens
tgttacttcattcac

SEQ ID NO: 1066749 - DNA, 15 bp, Homo sapiens
ctgttacttcattca

SEQ ID NO: 1066750 - DNA, 15 bp, Homo sapiens
cctgttacttcattc

SEQ ID NO: 1066751 - DNA, 15 bp, Homo sapiens
acctgttacttcatt

SEQ ID NO: 1066752 - DNA, 15 bp, Homo sapiens
tacctgttacttcat

SEQ ID NO: 1066753 - DNA, 15 bp, Homo sapiens
gtacctgttacttca

SEQ ID NO: 1066754 - DNA, 15 bp, Homo sapiens
agtacctgttacttc

SEQ ID NO: 1066755 - DNA, 15 bp, Homo sapiens
cagtacctgttactt

SEQ ID NO: 1066756 - DNA, 15 bp, Homo sapiens
tcagtacctgttact

SEQ ID NO: 1066757 - DNA, 15 bp, Homo sapiens
gtcagtacctgttac

SEQ ID NO: 1066758 - DNA, 15 bp, Homo sapiens
tgtcagtacctgtta

SEQ ID NO: 1066759 - DNA, 15 bp, Homo sapiens
atgtcagtacctgtt

SEQ ID NO: 1066760 - DNA, 15 bp, Homo sapiens
gatgtcagtacctgt

SEQ ID NO: 1066761 - DNA, 15 bp, Homo sapiens
tgatgtcagtacctg

SEQ ID NO: 1066762 - DNA, 15 bp, Homo sapiens
ttgatgtcagtacct

SEQ ID NO: 1066763 - DNA, 15 bp, Homo sapiens
cttgatgtcagtacc

SEQ ID NO: 1066764 - DNA, 15 bp, Homo sapiens
acttgatgtcagtac

SEQ ID NO: 1066765 - DNA, 15 bp, Homo sapiens
tacttgatgtcagta

SEQ ID NO: 1066766 - DNA, 15 bp, Homo sapiens
ctacttgatgtcagt

SEQ ID NO: 1066767 - DNA, 15 bp, Homo sapiens
tctacttgatgtcag

SEQ ID NO: 1066768 - DNA, 15 bp, Homo sapiens
ctctacttgatgtca

SEQ ID NO: 1066769 - DNA, 15 bp, Homo sapiens
tctctacttgatgtc

SEQ ID NO: 1066770 - DNA, 15 bp, Homo sapiens
gtctctacttgatgt

SEQ ID NO: 1066771 - DNA, 15 bp, Homo sapiens
agtctctacttgatg

SEQ ID NO: 1066772 - DNA, 15 bp, Homo sapiens
aagtctctacttgat

SEQ ID NO: 1066773 - DNA, 15 bp, Homo sapiens
caagtctctacttga

SEQ ID NO: 1066774 - DNA, 15 bp, Homo sapiens
acaagtctctacttg

SEQ ID NO: 1066775 - DNA, 15 bp, Homo sapiens
aacaagtctctactt

SEQ ID NO: 1066776 - DNA, 15 bp, Homo sapiens
taacaagtctctact

SEQ ID NO: 1066777 - DNA, 15 bp, Homo sapiens
ttaacaagtctctac

SEQ ID NO: 1066778 - DNA, 15 bp, Homo sapiens
tttaacaagtctcta

SEQ ID NO: 1066779 - DNA, 15 bp, Homo sapiens
atttaacaagtctct

SEQ ID NO: 1066780 - DNA, 15 bp, Homo sapiens
tatttaacaagtctc

SEQ ID NO: 1066781 - DNA, 15 bp, Homo sapiens
atatttaacaagtct

SEQ ID NO: 1066782 - DNA, 15 bp, Homo sapiens
gatatttaacaagtc

SEQ ID NO: 1066783 - DNA, 15 bp, Homo sapiens
tgatatttaacaagt

SEQ ID NO: 1066784 - DNA, 15 bp, Homo sapiens
ttgatatttaacaag

SEQ ID NO: 1066785 - DNA, 15 bp, Homo sapiens
tttgatatttaacaa

SEQ ID NO: 1066786 - DNA, 15 bp, Homo sapiens
ctttgatatttaaca

SEQ ID NO: 1066787 - DNA, 15 bp, Homo sapiens
cctttgatatttaac

SEQ ID NO: 1066788 - DNA, 15 bp, Homo sapiens
acctttgatatttaa

SEQ ID NO: 1066789 - DNA, 15 bp, Homo sapiens
cacctttgatattta

SEQ ID NO: 1066790 - DNA, 15 bp, Homo sapiens
tcacctttgatattt

SEQ ID NO: 1066791 - DNA, 15 bp, Homo sapiens
ttcacctttgatatt

SEQ ID NO: 1066792 - DNA, 15 bp, Homo sapiens
tttcacctttgatat

SEQ ID NO: 1066793 - DNA, 15 bp, Homo sapiens
ctttcacctttgata

SEQ ID NO: 1066794 - DNA, 15 bp, Homo sapiens
tctttcacctttgat

SEQ ID NO: 1066795 - DNA, 15 bp, Homo sapiens
ttctttcacctttga

SEQ ID NO: 1066796 - DNA, 15 bp, Homo sapiens
gttctttcacctttg

SEQ ID NO: 1066797 - DNA, 15 bp, Homo sapiens
agttctttcaccttt

SEQ ID NO: 1066798 - DNA, 15 bp, Homo sapiens
aagttctttcacctt

SEQ ID NO: 1066799 - DNA, 15 bp, Homo sapiens
caagttctttcacct

SEQ ID NO: 1066800 - DNA, 15 bp, Homo sapiens
tcaagttctttcacc

SEQ ID NO: 1066801 - DNA, 15 bp, Homo sapiens
ttcaagttctttcac

SEQ ID NO: 1066802 - DNA, 15 bp, Homo sapiens
cttcaagttctttca

SEQ ID NO: 1066803 - DNA, 15 bp, Homo sapiens
tcttcaagttctttc

SEQ ID NO: 1066804 - DNA, 15 bp, Homo sapiens
atcttcaagttcttt

SEQ ID NO: 1066805 - DNA, 15 bp, Homo sapiens
catcttcaagttctt

SEQ ID NO: 1066806 - DNA, 15 bp, Homo sapiens
tcatcttcaagttct

SEQ ID NO: 1066807 - DNA, 15 bp, Homo sapiens
ttcatcttcaagttc

SEQ ID NO: 1066808 - DNA, 15 bp, Homo sapiens
gttcatcttcaagtt

SEQ ID NO: 1066809 - DNA, 15 bp, Homo sapiens
agttcatcttcaagt

SEQ ID NO: 1066810 - DNA, 15 bp, Homo sapiens
tagttcatcttcaag

SEQ ID NO: 1066811 - DNA, 15 bp, Homo sapiens
atagttcatcttcaa

SEQ ID NO: 1066812 - DNA, 15 bp, Homo sapiens
aatagttcatcttca

SEQ ID NO: 1066813 - DNA, 15 bp, Homo sapiens
gaatagttcatcttc

SEQ ID NO: 1066814 - DNA, 15 bp, Homo sapiens
ggaatagttcatctt

SEQ ID NO: 1066815 - DNA, 15 bp, Homo sapiens
tggaatagttcatct

SEQ ID NO: 1066816 - DNA, 15 bp, Homo sapiens
ttggaatagttcatc

SEQ ID NO: 1066817 - DNA, 15 bp, Homo sapiens
attggaatagttcat

SEQ ID NO: 1066818 - DNA, 15 bp, Homo sapiens
cattggaatagttca

SEQ ID NO: 1066819 - DNA, 15 bp, Homo sapiens
gcattggaatagttc

SEQ ID NO: 1066820 - DNA, 15 bp, Homo sapiens
agcattggaatagtt

SEQ ID NO: 1066821 - DNA, 15 bp, Homo sapiens
aagcattggaatagt

SEQ ID NO: 1066822 - DNA, 15 bp, Homo sapiens
aaagcattggaatag

SEQ ID NO: 1066823 - DNA, 15 bp, Homo sapiens
taaagcattggaata

SEQ ID NO: 1066824 - DNA, 15 bp, Homo sapiens
ataaagcattggaat

SEQ ID NO: 1066825 - DNA, 15 bp, Homo sapiens
aataaagcattggaa

SEQ ID NO: 1066826 - DNA, 15 bp, Homo sapiens
aaataaagcattgga

SEQ ID NO: 1066827 - DNA, 15 bp, Homo sapiens
aaaataaagcattgg

SEQ ID NO: 1066828 - DNA, 15 bp, Homo sapiens
caaaataaagcattg

SEQ ID NO: 1066829 - DNA, 15 bp, Homo sapiens
acaaaataaagcatt

SEQ ID NO: 1066830 - DNA, 15 bp, Homo sapiens
aacaaaataaagcat

SEQ ID NO: 1066831 - DNA, 15 bp, Homo sapiens
gaacaaaataaagca

SEQ ID NO: 1066832 - DNA, 15 bp, Homo sapiens
tgaacaaaataaagc

SEQ ID NO: 1066833 - DNA, 15 bp, Homo sapiens
ttgaacaaaataaag

SEQ ID NO: 1066834 - DNA, 15 bp, Homo sapiens
attgaacaaaataaa

SEQ ID NO: 1066835 - DNA, 15 bp, Homo sapiens
tattgaacaaaataa

SEQ ID NO: 1066836 - DNA, 15 bp, Homo sapiens
ttattgaacaaaata

SEQ ID NO: 1066837 - DNA, 15 bp, Homo sapiens
tttattgaacaaaat

SEQ ID NO: 1066838 - DNA, 15 bp, Homo sapiens
ctttattgaacaaaa

SEQ ID NO: 1066839 - DNA, 15 bp, Homo sapiens
tctttattgaacaaa

SEQ ID NO: 1066840 - DNA, 15 bp, Homo sapiens
ttctttattgaacaa

SEQ ID NO: 1066841 - DNA, 15 bp, Homo sapiens
tttctttattgaaca

SEQ ID NO: 1066842 - DNA, 15 bp, Homo sapiens
gtttctttattgaac

SEQ ID NO: 1066843 - DNA, 15 bp, Homo sapiens
agtttctttattgaa

SEQ ID NO: 1066844 - DNA, 15 bp, Homo sapiens
cagtttctttattga

SEQ ID NO: 1066845 - DNA, 15 bp, Homo sapiens
tcagtttctttattg

SEQ ID NO: 1066846 - DNA, 15 bp, Homo sapiens
ctcagtttctttatt

SEQ ID NO: 1066847 - DNA, 15 bp, Homo sapiens
cctcagtttctttat

SEQ ID NO: 1066848 - DNA, 15 bp, Homo sapiens
gcctcagtttcttta

SEQ ID NO: 1066849 - DNA, 15 bp, Homo sapiens
ggcctcagtttcttt

SEQ ID NO: 1066850 - DNA, 15 bp, Homo sapiens
gggcctcagtttctt

SEQ ID NO: 1066851 - DNA, 15 bp, Homo sapiens
cgggcctcagtttct

SEQ ID NO: 1066852 - DNA, 15 bp, Homo sapiens
ccgggcctcagtttc

SEQ ID NO: 1066853 - DNA, 15 bp, Homo sapiens
cccgggcctcagttt

SEQ ID NO: 1066854 - DNA, 15 bp, Homo sapiens
ccccgggcctcagtt

SEQ ID NO: 1066855 - DNA, 15 bp, Homo sapiens
tccccgggcctcagt

SEQ ID NO: 1066856 - DNA, 15 bp, Homo sapiens
ctccccgggcctcag

SEQ ID NO: 1066857 - DNA, 15 bp, Homo sapiens
cctccccgggcctca

SEQ ID NO: 1066858 - DNA, 15 bp, Homo sapiens
acctccccgggcctc

SEQ ID NO: 1066859 - DNA, 15 bp, Homo sapiens
cacctccccgggcct

SEQ ID NO: 1066860 - DNA, 15 bp, Homo sapiens
tcacctccccgggcc

SEQ ID NO: 1066861 - DNA, 15 bp, Homo sapiens
ttcacctccccgggc

SEQ ID NO: 1066862 - DNA, 15 bp, Homo sapiens
cttcacctccccggg

SEQ ID NO: 1066863 - DNA, 15 bp, Homo sapiens
acttcacctccccgg

SEQ ID NO: 1066864 - DNA, 15 bp, Homo sapiens
cacttcacctccccg

SEQ ID NO: 1066865 - DNA, 15 bp, Homo sapiens
tcacttcacctcccc

SEQ ID NO: 1066866 - DNA, 15 bp, Homo sapiens
gtcacttcacctccc

SEQ ID NO: 1066867 - DNA, 15 bp, Homo sapiens
agtcacttcacctcc

SEQ ID NO: 1066868 - DNA, 15 bp, Homo sapiens
agcaagtcacttcac

SEQ ID NO: 1066869 - DNA, 15 bp, Homo sapiens
tagcaagtcacttca

SEQ ID NO: 1066870 - DNA, 15 bp, Homo sapiens
ttagcaagtcacttc

SEQ ID NO: 1066871 - DNA, 15 bp, Homo sapiens
tttagcaagtcactt

SEQ ID NO: 1066872 - DNA, 15 bp, Homo sapiens
ttttagcaagtcact

SEQ ID NO: 1066873 - DNA, 15 bp, Homo sapiens
tttttagcaagtcac

SEQ ID NO: 1066874 - DNA, 15 bp, Homo sapiens
gtttttagcaagtca

SEQ ID NO: 1066875 - DNA, 15 bp, Homo sapiens
ggtttttagcaagtc

SEQ ID NO: 1066876 - DNA, 15 bp, Homo sapiens
tggtttttagcaagt

SEQ ID NO: 1066877 - DNA, 15 bp, Homo sapiens
atggtttttagcaag

SEQ ID NO: 1066878 - DNA, 15 bp, Homo sapiens
tatggtttttagcaa

SEQ ID NO: 1066879 - DNA, 15 bp, Homo sapiens
gtatggtttttagca

SEQ ID NO: 1066880 - DNA, 15 bp, Homo sapiens
tgtatggtttttagc

SEQ ID NO: 1066881 - DNA, 15 bp, Homo sapiens
ctgtatggtttttag

SEQ ID NO: 1066882 - DNA, 15 bp, Homo sapiens
gctgtatggttttta

SEQ ID NO: 1066883 - DNA, 15 bp, Homo sapiens
agctgtatggttttt

SEQ ID NO: 1066884 - DNA, 15 bp, Homo sapiens
cagctgtatggtttt

SEQ ID NO: 1066885 - DNA, 15 bp, Homo sapiens
ccagctgtatggttt

SEQ ID NO: 1066886 - DNA, 15 bp, Homo sapiens
accagctgtatggtt

SEQ ID NO: 1066887 - DNA, 15 bp, Homo sapiens
aaccagctgtatggt

SEQ ID NO: 1066888 - DNA, 15 bp, Homo sapiens
taaccagctgtatgg

SEQ ID NO: 1066889 - DNA, 15 bp, Homo sapiens
ttaaccagctgtatg

SEQ ID NO: 1066890 - DNA, 15 bp, Homo sapiens
attaaccagctgtat

SEQ ID NO: 1066891 - DNA, 15 bp, Homo sapiens
cattaaccagctgta

SEQ ID NO: 1066892 - DNA, 15 bp, Homo sapiens
tcattaaccagctgt

SEQ ID NO: 1066893 - DNA, 15 bp, Homo sapiens
ttcattaaccagctg

SEQ ID NO: 1066894 - DNA, 15 bp, Homo sapiens
tttcattaaccagct

SEQ ID NO: 1066895 - DNA, 15 bp, Homo sapiens
ctttcattaaccagc

SEQ ID NO: 1066896 - DNA, 15 bp, Homo sapiens
tctttcattaaccag

SEQ ID NO: 1066897 - DNA, 15 bp, Homo sapiens
ttctttcattaacca

SEQ ID NO: 1066898 - DNA, 15 bp, Homo sapiens
tttctttcattaacc

SEQ ID NO: 1066899 - DNA, 15 bp, Homo sapiens
atttctttcattaac

SEQ ID NO: 1066900 - DNA, 15 bp, Homo sapiens
tatttctttcattaa

SEQ ID NO: 1066901 - DNA, 15 bp, Homo sapiens
ctatttctttcatta

SEQ ID NO: 1066902 - DNA, 15 bp, Homo sapiens
cctatttctttcatt

SEQ ID NO: 1066903 - DNA, 15 bp, Homo sapiens
ccctatttctttcat

SEQ ID NO: 1066904 - DNA, 15 bp, Homo sapiens
gccctatttctttca

SEQ ID NO: 1066905 - DNA, 15 bp, Homo sapiens
agccctatttctttc

SEQ ID NO: 1066906 - DNA, 15 bp, Homo sapiens
tagccctatttcttt

SEQ ID NO: 1066907 - DNA, 15 bp, Homo sapiens
gtagccctatttctt

SEQ ID NO: 1066908 - DNA, 15 bp, Homo sapiens
tgtagccctatttct

SEQ ID NO: 1066909 - DNA, 15 bp, Homo sapiens
ttgtagccctatttc

SEQ ID NO: 1066910 - DNA, 15 bp, Homo sapiens
attgtagccctattt

SEQ ID NO: 1066911 - DNA, 15 bp, Homo sapiens
gattgtagccctatt

SEQ ID NO: 1066912 - DNA, 15 bp, Homo sapiens
ggattgtagccctat

SEQ ID NO: 1066913 - DNA, 15 bp, Homo sapiens
gggattgtagcccta

SEQ ID NO: 1066914 - DNA, 15 bp, Homo sapiens
tgggattgtagccct

SEQ ID NO: 1066915 - DNA, 15 bp, Homo sapiens
ctgggattgtagccc

SEQ ID NO: 1066916 - DNA, 15 bp, Homo sapiens
tctgggattgtagcc

SEQ ID NO: 1066917 - DNA, 15 bp, Homo sapiens
atctgggattgtagc

SEQ ID NO: 1066918 - DNA, 15 bp, Homo sapiens
gatctgggattgtag

SEQ ID NO: 1066919 - DNA, 15 bp, Homo sapiens
ggatctgggattgta

SEQ ID NO: 1066920 - DNA, 15 bp, Homo sapiens
gggatctgggattgt

SEQ ID NO: 1066921 - DNA, 15 bp, Homo sapiens
ggggatctgggattg

SEQ ID NO: 1066922 - DNA, 15 bp, Homo sapiens
gggggatctgggatt

SEQ ID NO: 1066923 - DNA, 15 bp, Homo sapiens
tgggggatctgggat

SEQ ID NO: 1066924 - DNA, 15 bp, Homo sapiens
ttgggggatctggga

SEQ ID NO: 1066925 - DNA, 15 bp, Homo sapiens
tttgggggatctggg

SEQ ID NO: 1066926 - DNA, 15 bp, Homo sapiens
atttgggggatctgg

SEQ ID NO: 1066927 - DNA, 15 bp, Homo sapiens
aatttgggggatctg

SEQ ID NO: 1066928 - DNA, 15 bp, Homo sapiens
gaatttgggggatct

SEQ ID NO: 1066929 - DNA, 15 bp, Homo sapiens
ggaatttgggggatc

SEQ ID NO: 1066930 - DNA, 15 bp, Homo sapiens
aggaatttgggggat

SEQ ID NO: 1066931 - DNA, 15 bp, Homo sapiens
caggaatttggggga

SEQ ID NO: 1066932 - DNA, 15 bp, Homo sapiens
acaggaatttggggg

SEQ ID NO: 1066933 - DNA, 15 bp, Homo sapiens
gacaggaatttgggg

SEQ ID NO: 1066934 - DNA, 15 bp, Homo sapiens
ggacaggaatttggg

SEQ ID NO: 1066935 - DNA, 15 bp, Homo sapiens
tggacaggaatttgg

SEQ ID NO: 1066936 - DNA, 15 bp, Homo sapiens
ttggacaggaatttg

SEQ ID NO: 1066937 - DNA, 15 bp, Homo sapiens
cttggacaggaattt

SEQ ID NO: 1066938 - DNA, 15 bp, Homo sapiens
gcttggacaggaatt

SEQ ID NO: 1066939 - DNA, 15 bp, Homo sapiens
ggcttggacaggaat

SEQ ID NO: 1066940 - DNA, 15 bp, Homo sapiens
aggcttggacaggaa

SEQ ID NO: 1066941 - DNA, 15 bp, Homo sapiens
aaggcttggacagga

SEQ ID NO: 1066942 - DNA, 15 bp, Homo sapiens
aaaggcttggacagg

SEQ ID NO: 1066943 - DNA, 15 bp, Homo sapiens
aaaaggcttggacag

SEQ ID NO: 1066944 - DNA, 15 bp, Homo sapiens
taaaaggcttggaca

SEQ ID NO: 1066945 - DNA, 15 bp, Homo sapiens
ataaaaggcttggac

SEQ ID NO: 1066946 - DNA, 15 bp, Homo sapiens
cataaaaggcttgga

SEQ ID NO: 1066947 - DNA, 15 bp, Homo sapiens
gcataaaaggcttgg

SEQ ID NO: 1066948 - DNA, 15 bp, Homo sapiens
agcataaaaggcttg

SEQ ID NO: 1066949 - DNA, 15 bp, Homo sapiens
aagcataaaaggctt

SEQ ID NO: 1066950 - DNA, 15 bp, Homo sapiens
gaagcataaaaggct

SEQ ID NO: 1066951 - DNA, 15 bp, Homo sapiens
tgaagcataaaaggc

SEQ ID NO: 1066952 - DNA, 15 bp, Homo sapiens
gtgaagcataaaagg

SEQ ID NO: 1066953 - DNA, 15 bp, Homo sapiens
ggtgaagcataaaag

SEQ ID NO: 1066954 - DNA, 15 bp, Homo sapiens
tggtgaagcataaaa

SEQ ID NO: 1066955 - DNA, 15 bp, Homo sapiens
ttggtgaagcataaa

SEQ ID NO: 1066956 - DNA, 15 bp, Homo sapiens
tttggtgaagcataa

SEQ ID NO: 1066957 - DNA, 15 bp, Homo sapiens
gtttggtgaagcata

SEQ ID NO: 1066958 - DNA, 15 bp, Homo sapiens
ggtttggtgaagcat

SEQ ID NO: 1066959 - DNA, 15 bp, Homo sapiens
aggtttggtgaagca

SEQ ID NO: 1066960 - DNA, 15 bp, Homo sapiens
aaggtttggtgaagc

SEQ ID NO: 1066961 - DNA, 15 bp, Homo sapiens
taaggtttggtgaag

SEQ ID NO: 1066962 - DNA, 15 bp, Homo sapiens
gtaaggtttggtgaa

SEQ ID NO: 1066963 - DNA, 15 bp, Homo sapiens
agtaaggtttggtga

SEQ ID NO: 1066964 - DNA, 15 bp, Homo sapiens
aagtaaggtttggtg

SEQ ID NO: 1066965 - DNA, 15 bp, Homo sapiens
aaagtaaggtttggt

SEQ ID NO: 1066966 - DNA, 15 bp, Homo sapiens
gaaagtaaggtttgg

SEQ ID NO: 1066967 - DNA, 15 bp, Homo sapiens
tgaaagtaaggtttg

SEQ ID NO: 1066968 - DNA, 15 bp, Homo sapiens
ctgaaagtaaggttt

SEQ ID NO: 1066969 - DNA, 15 bp, Homo sapiens
tctgaaagtaaggtt

SEQ ID NO: 1066970 - DNA, 15 bp, Homo sapiens
ttctgaaagtaaggt

SEQ ID NO: 1066971 - DNA, 15 bp, Homo sapiens
tttctgaaagtaagg

SEQ ID NO: 1066972 - DNA, 15 bp, Homo sapiens
atttctgaaagtaag

SEQ ID NO: 1066973 - DNA, 15 bp, Homo sapiens
tatttctgaaagtaa

SEQ ID NO: 1066974 - DNA, 15 bp, Homo sapiens
atatttctgaaagta

SEQ ID NO: 1066975 - DNA, 15 bp, Homo sapiens
gatatttctgaaagt

SEQ ID NO: 1066976 - DNA, 15 bp, Homo sapiens
ggatatttctgaaag

SEQ ID NO: 1066977 - DNA, 15 bp, Homo sapiens
gggatatttctgaaa

SEQ ID NO: 1066978 - DNA, 15 bp, Homo sapiens
ggggatatttctgaa

SEQ ID NO: 1066979 - DNA, 15 bp, Homo sapiens
tggggatatttctga

SEQ ID NO: 1066980 - DNA, 15 bp, Homo sapiens
atggggatatttctg

SEQ ID NO: 1066981 - DNA, 15 bp, Homo sapiens
gatggggatatttct

SEQ ID NO: 1066982 - DNA, 15 bp, Homo sapiens
ggatggggatatttc

SEQ ID NO: 1066983 - DNA, 15 bp, Homo sapiens
aggatggggatattt

SEQ ID NO: 1066984 - DNA, 15 bp, Homo sapiens
caggatggggatatt

SEQ ID NO: 1066985 - DNA, 15 bp, Homo sapiens
acaggatggggatat

SEQ ID NO: 1066986 - DNA, 15 bp, Homo sapiens
cacaggatggggata

SEQ ID NO: 1066987 - DNA, 15 bp, Homo sapiens
tcacaggatggggat

SEQ ID NO: 1066988 - DNA, 15 bp, Homo sapiens
atcacaggatgggga

SEQ ID NO: 1066989 - DNA, 15 bp, Homo sapiens
catcacaggatgggg

SEQ ID NO: 1066990 - DNA, 15 bp, Homo sapiens
tcatcacaggatggg

SEQ ID NO: 1066991 - DNA, 15 bp, Homo sapiens
ctcatcacaggatgg

SEQ ID NO: 1066992 - DNA, 15 bp, Homo sapiens
actcatcacaggatg

SEQ ID NO: 1066993 - DNA, 15 bp, Homo sapiens
aactcatcacaggat

SEQ ID NO: 1066994 - DNA, 15 bp, Homo sapiens
caactcatcacagga

SEQ ID NO: 1066995 - DNA, 15 bp, Homo sapiens
ccaactcatcacagg

SEQ ID NO: 1066996 - DNA, 15 bp, Homo sapiens
gccaactcatcacag

SEQ ID NO: 1066997 - DNA, 15 bp, Homo sapiens
agccaactcatcaca

SEQ ID NO: 1066998 - DNA, 15 bp, Homo sapiens
aagccaactcatcac

SEQ ID NO: 1066999 - DNA, 15 bp, Homo sapiens
taagccaactcatca

SEQ ID NO: 1067000 - DNA, 15 bp, Homo sapiens
ttaagccaactcatc

SEQ ID NO: 1067001 - DNA, 15 bp, Homo sapiens
gttaagccaactcat

SEQ ID NO: 1067002 - DNA, 15 bp, Homo sapiens
tgttaagccaactca

SEQ ID NO: 1067003 - DNA, 15 bp, Homo sapiens
ttgttaagccaactc

SEQ ID NO: 1067004 - DNA, 15 bp, Homo sapiens
attgttaagccaact

SEQ ID NO: 1067005 - DNA, 15 bp, Homo sapiens
aattgttaagccaac

SEQ ID NO: 1067006 - DNA, 15 bp, Homo sapiens
taattgttaagccaa

SEQ ID NO: 1067007 - DNA, 15 bp, Homo sapiens
ttaattgttaagcca

SEQ ID NO: 1067008 - DNA, 15 bp, Homo sapiens
cttaattgttaagcc

SEQ ID NO: 1067009 - DNA, 15 bp, Homo sapiens
ccttaattgttaagc

SEQ ID NO: 1067010 - DNA, 15 bp, Homo sapiens
gccttaattgttaag

SEQ ID NO: 1067011 - DNA, 15 bp, Homo sapiens
tgccttaattgttaa

SEQ ID NO: 1067012 - DNA, 15 bp, Homo sapiens
ctgccttaattgtta

SEQ ID NO: 1067013 - DNA, 15 bp, Homo sapiens
tctgccttaattgtt

SEQ ID NO: 1067014 - DNA, 15 bp, Homo sapiens
ctctgccttaattgt

SEQ ID NO: 1067015 - DNA, 15 bp, Homo sapiens
cctctgccttaattg

SEQ ID NO: 1067016 - DNA, 15 bp, Homo sapiens
tcctctgccttaatt

SEQ ID NO: 1067017 - DNA, 15 bp, Homo sapiens
ttcctctgccttaat

SEQ ID NO: 1067018 - DNA, 15 bp, Homo sapiens
gttcctctgccttaa

SEQ ID NO: 1067019 - DNA, 15 bp, Homo sapiens
agttcctctgcctta

SEQ ID NO: 1067020 - DNA, 15 bp, Homo sapiens
aagttcctctgcctt

SEQ ID NO: 1067021 - DNA, 15 bp, Homo sapiens
aaagttcctctgcct

SEQ ID NO: 1067022 - DNA, 15 bp, Homo sapiens
caaagttcctctgcc

SEQ ID NO: 1067023 - DNA, 15 bp, Homo sapiens
tcaaagttcctctgc

SEQ ID NO: 1067024 - DNA, 15 bp, Homo sapiens
ttcaaagttcctctg

SEQ ID NO: 1067025 - DNA, 15 bp, Homo sapiens
tttcaaagttcctct

SEQ ID NO: 1067026 - DNA, 15 bp, Homo sapiens
ctttcaaagttcctc

SEQ ID NO: 1067027 - DNA, 15 bp, Homo sapiens
gctttcaaagttcct

SEQ ID NO: 1067028 - DNA, 15 bp, Homo sapiens
ggctttcaaagttcc

SEQ ID NO: 1067029 - DNA, 15 bp, Homo sapiens
tggctttcaaagttc

SEQ ID NO: 1067030 - DNA, 15 bp, Homo sapiens
atggctttcaaagtt

SEQ ID NO: 1067031 - DNA, 15 bp, Homo sapiens
catggctttcaaagt

SEQ ID NO: 1067032 - DNA, 15 bp, Homo sapiens
ccatggctttcaaag

SEQ ID NO: 1067033 - DNA, 15 bp, Homo sapiens
tccatggctttcaaa

SEQ ID NO: 1067034 - DNA, 15 bp, Homo sapiens
gtccatggctttcaa

SEQ ID NO: 1067035 - DNA, 15 bp, Homo sapiens
ggtccatggctttca

SEQ ID NO: 1067036 - DNA, 15 bp, Homo sapiens
aggtccatggctttc

SEQ ID NO: 1067037 - DNA, 15 bp, Homo sapiens
caggtccatggcttt

SEQ ID NO: 1067038 - DNA, 15 bp, Homo sapiens
ccaggtccatggctt

SEQ ID NO: 1067039 - DNA, 15 bp, Homo sapiens
tccaggtccatggct

SEQ ID NO: 1067040 - DNA, 15 bp, Homo sapiens
ctccaggtccatggc

SEQ ID NO: 1067041 - DNA, 15 bp, Homo sapiens
tctccaggtccatgg

SEQ ID NO: 1067042 - DNA, 15 bp, Homo sapiens
gtctccaggtccatg

SEQ ID NO: 1067043 - DNA, 15 bp, Homo sapiens
agtctccaggtccat

SEQ ID NO: 1067044 - DNA, 15 bp, Homo sapiens
gagtctccaggtcca

SEQ ID NO: 1067045 - DNA, 15 bp, Homo sapiens
ggagtctccaggtcc

SEQ ID NO: 1067046 - DNA, 15 bp, Homo sapiens
cggagtctccaggtc

SEQ ID NO: 1067047 - DNA, 15 bp, Homo sapiens
acggagtctccaggt

SEQ ID NO: 1067048 - DNA, 15 bp, Homo sapiens
tacggagtctccagg

SEQ ID NO: 1067049 - DNA, 15 bp, Homo sapiens
atacggagtctccag

SEQ ID NO: 1067050 - DNA, 15 bp, Homo sapiens
aatacggagtctcca

SEQ ID NO: 1067051 - DNA, 15 bp, Homo sapiens
caatacggagtctcc

SEQ ID NO: 1067052 - DNA, 15 bp, Homo sapiens
ccaatacggagtctc

SEQ ID NO: 1067053 - DNA, 15 bp, Homo sapiens
tccaatacggagtct

SEQ ID NO: 1067054 - DNA, 15 bp, Homo sapiens
ctccaatacggagtc

SEQ ID NO: 1067055 - DNA, 15 bp, Homo sapiens
tctccaatacggagt

SEQ ID NO: 1067056 - DNA, 15 bp, Homo sapiens
ctctccaatacggag

SEQ ID NO: 1067057 - DNA, 15 bp, Homo sapiens
cctctccaatacgga

SEQ ID NO: 1067058 - DNA, 15 bp, Homo sapiens
tcctctccaatacgg

SEQ ID NO: 1067059 - DNA, 15 bp, Homo sapiens
ttcctctccaatacg

SEQ ID NO: 1067060 - DNA, 15 bp, Homo sapiens
gttcctctccaatac

SEQ ID NO: 1067061 - DNA, 15 bp, Homo sapiens
agttcctctccaata

SEQ ID NO: 1067062 - DNA, 15 bp, Homo sapiens
aagttcctctccaat

SEQ ID NO: 1067063 - DNA, 15 bp, Homo sapiens
caagttcctctccaa

SEQ ID NO: 1067064 - DNA, 15 bp, Homo sapiens
ccaagttcctctcca

SEQ ID NO: 1067065 - DNA, 15 bp, Homo sapiens
tccaagttcctctcc

SEQ ID NO: 1067066 - DNA, 15 bp, Homo sapiens
ctccaagttcctctc

SEQ ID NO: 1067067 - DNA, 15 bp, Homo sapiens
tctccaagttcctct

SEQ ID NO: 1067068 - DNA, 15 bp, Homo sapiens
atctccaagttcctc

SEQ ID NO: 1067069 - DNA, 15 bp, Homo sapiens
aatctccaagttcct

SEQ ID NO: 1067070 - DNA, 15 bp, Homo sapiens
aaatctccaagttcc

SEQ ID NO: 1067071 - DNA, 15 bp, Homo sapiens
gaaatctccaagttc

SEQ ID NO: 1067072 - DNA, 15 bp, Homo sapiens
agaaatctccaagtt

SEQ ID NO: 1067073 - DNA, 15 bp, Homo sapiens
cagaaatctccaagt

SEQ ID NO: 1067074 - DNA, 15 bp, Homo sapiens
ccagaaatctccaag

SEQ ID NO: 1067075 - DNA, 15 bp, Homo sapiens
cccagaaatctccaa

SEQ ID NO: 1067076 - DNA, 15 bp, Homo sapiens
acccagaaatctcca

SEQ ID NO: 1067077 - DNA, 15 bp, Homo sapiens
gacccagaaatctcc

SEQ ID NO: 1067078 - DNA, 15 bp, Homo sapiens
agacccagaaatctc

SEQ ID NO: 1067079 - DNA, 15 bp, Homo sapiens
tagacccagaaatct

SEQ ID NO: 1067080 - DNA, 15 bp, Homo sapiens
atagacccagaaatc

SEQ ID NO: 1067081 - DNA, 15 bp, Homo sapiens
gatagacccagaaat

SEQ ID NO: 1067082 - DNA, 15 bp, Homo sapiens
ggatagacccagaaa

SEQ ID NO: 1067083 - DNA, 15 bp, Homo sapiens
aggatagacccagaa

SEQ ID NO: 1067084 - DNA, 15 bp, Homo sapiens
taggatagacccaga

SEQ ID NO: 1067085 - DNA, 15 bp, Homo sapiens
gtaggatagacccag

SEQ ID NO: 1067086 - DNA, 15 bp, Homo sapiens
ggtaggatagaccca

SEQ ID NO: 1067087 - DNA, 15 bp, Homo sapiens
gggtaggatagaccc

SEQ ID NO: 1067088 - DNA, 15 bp, Homo sapiens
agggtaggatagacc

SEQ ID NO: 1067089 - DNA, 15 bp, Homo sapiens
gagggtaggatagac

SEQ ID NO: 1067090 - DNA, 15 bp, Homo sapiens
tgagggtaggataga

SEQ ID NO: 1067091 - DNA, 15 bp, Homo sapiens
gtgagggtaggatag

SEQ ID NO: 1067092 - DNA, 15 bp, Homo sapiens
ggtgagggtaggata

SEQ ID NO: 1067093 - DNA, 15 bp, Homo sapiens
aggtgagggtaggat

SEQ ID NO: 1067094 - DNA, 15 bp, Homo sapiens
gaggtgagggtagga

SEQ ID NO: 1067095 - DNA, 15 bp, Homo sapiens
agaggtgagggtagg

SEQ ID NO: 1067096 - DNA, 15 bp, Homo sapiens
tagaggtgagggtag

SEQ ID NO: 1067097 - DNA, 15 bp, Homo sapiens
gtagaggtgagggta

SEQ ID NO: 1067098 - DNA, 15 bp, Homo sapiens
ggtagaggtgagggt

SEQ ID NO: 1067099 - DNA, 15 bp, Homo sapiens
aggtagaggtgaggg

SEQ ID NO: 1067100 - DNA, 15 bp, Homo sapiens
aaggtagaggtgagg

SEQ ID NO: 1067101 - DNA, 15 bp, Homo sapiens
taaggtagaggtgag

SEQ ID NO: 1067102 - DNA, 15 bp, Homo sapiens
gtaaggtagaggtga

SEQ ID NO: 1067103 - DNA, 15 bp, Homo sapiens
agtaaggtagaggtg

SEQ ID NO: 1067104 - DNA, 15 bp, Homo sapiens
aagtaaggtagaggt

SEQ ID NO: 1067105 - DNA, 15 bp, Homo sapiens
caagtaaggtagagg

SEQ ID NO: 1067106 - DNA, 15 bp, Homo sapiens
acaagtaaggtagag

SEQ ID NO: 1067107 - DNA, 15 bp, Homo sapiens
cacaagtaaggtaga

SEQ ID NO: 1067108 - DNA, 15 bp, Homo sapiens
gcacaagtaaggtag

SEQ ID NO: 1067109 - DNA, 15 bp, Homo sapiens
agcacaagtaaggta

SEQ ID NO: 1067110 - DNA, 15 bp, Homo sapiens
aagcacaagtaaggt

SEQ ID NO: 1067111 - DNA, 15 bp, Homo sapiens
caagcacaagtaagg

SEQ ID NO: 1067112 - DNA, 15 bp, Homo sapiens
acaagcacaagtaag

SEQ ID NO: 1067113 - DNA, 15 bp, Homo sapiens
tacaagcacaagtaa

SEQ ID NO: 1067114 - DNA, 15 bp, Homo sapiens
ctacaagcacaagta

SEQ ID NO: 1067115 - DNA, 15 bp, Homo sapiens
actacaagcacaagt

SEQ ID NO: 1067116 - DNA, 15 bp, Homo sapiens
tactacaagcacaag

SEQ ID NO: 1067117 - DNA, 15 bp, Homo sapiens
ttactacaagcacaa

SEQ ID NO: 1067118 - DNA, 15 bp, Homo sapiens
tttactacaagcaca

SEQ ID NO: 1067119 - DNA, 15 bp, Homo sapiens
ttttactacaagcac

SEQ ID NO: 1067120 - DNA, 15 bp, Homo sapiens
gttttactacaagca

SEQ ID NO: 1067121 - DNA, 15 bp, Homo sapiens
tgttttactacaagc

SEQ ID NO: 1067122 - DNA, 15 bp, Homo sapiens
ctgttttactacaag

SEQ ID NO: 1067123 - DNA, 15 bp, Homo sapiens
cctgttttactacaa

SEQ ID NO: 1067124 - DNA, 15 bp, Homo sapiens
ccctgttttactaca

SEQ ID NO: 1067125 - DNA, 15 bp, Homo sapiens
gccctgttttactac

SEQ ID NO: 1067126 - DNA, 15 bp, Homo sapiens
cgccctgttttacta

SEQ ID NO: 1067127 - DNA, 15 bp, Homo sapiens
acgccctgttttact

SEQ ID NO: 1067128 - DNA, 15 bp, Homo sapiens
aacgccctgttttac

SEQ ID NO: 1067129 - DNA, 15 bp, Homo sapiens
caacgccctgtttta

SEQ ID NO: 1067130 - DNA, 15 bp, Homo sapiens
tcaacgccctgtttt

SEQ ID NO: 1067131 - DNA, 15 bp, Homo sapiens
gtcaacgccctgttt

SEQ ID NO: 1067132 - DNA, 15 bp, Homo sapiens
agtcaacgccctgtt

SEQ ID NO: 1067133 - DNA, 15 bp, Homo sapiens
aagtcaacgccctgt

SEQ ID NO: 1067134 - DNA, 15 bp, Homo sapiens
aaagtcaacgccctg

SEQ ID NO: 1067135 - DNA, 15 bp, Homo sapiens
gaaagtcaacgccct

SEQ ID NO: 1067136 - DNA, 15 bp, Homo sapiens
agaaagtcaacgccc

SEQ ID NO: 1067137 - DNA, 15 bp, Homo sapiens
tagaaagtcaacgcc

SEQ ID NO: 1067138 - DNA, 15 bp, Homo sapiens
ctagaaagtcaacgc

SEQ ID NO: 1067139 - DNA, 15 bp, Homo sapiens
gctagaaagtcaacg

SEQ ID NO: 1067140 - DNA, 15 bp, Homo sapiens
agctagaaagtcaac

SEQ ID NO: 1067141 - DNA, 15 bp, Homo sapiens
cagctagaaagtcaa

SEQ ID NO: 1067142 - DNA, 15 bp, Homo sapiens
ccagctagaaagtca

SEQ ID NO: 1067143 - DNA, 15 bp, Homo sapiens
cccagctagaaagtc

SEQ ID NO: 1067144 - DNA, 15 bp, Homo sapiens
gcccagctagaaagt

SEQ ID NO: 1067145 - DNA, 15 bp, Homo sapiens
agcccagctagaaag

SEQ ID NO: 1067146 - DNA, 15 bp, Homo sapiens
gagcccagctagaaa

SEQ ID NO: 1067147 - DNA, 15 bp, Homo sapiens
tgagcccagctagaa

SEQ ID NO: 1067148 - DNA, 15 bp, Homo sapiens
ctgagcccagctaga

SEQ ID NO: 1067149 - DNA, 15 bp, Homo sapiens
actgagcccagctag

SEQ ID NO: 1067150 - DNA, 15 bp, Homo sapiens
aactgagcccagcta

SEQ ID NO: 1067151 - DNA, 15 bp, Homo sapiens
gaactgagcccagct

SEQ ID NO: 1067152 - DNA, 15 bp, Homo sapiens
ggaactgagcccagc

SEQ ID NO: 1067153 - DNA, 15 bp, Homo sapiens
tggaactgagcccag

SEQ ID NO: 1067154 - DNA, 15 bp, Homo sapiens
gtggaactgagccca

SEQ ID NO: 1067155 - DNA, 15 bp, Homo sapiens
agtggaactgagccc

SEQ ID NO: 1067156 - DNA, 15 bp, Homo sapiens
tagtggaactgagcc

SEQ ID NO: 1067157 - DNA, 15 bp, Homo sapiens
atagtggaactgagc

SEQ ID NO: 1067158 - DNA, 15 bp, Homo sapiens
gatagtggaactgag

SEQ ID NO: 1067159 - DNA, 15 bp, Homo sapiens
agatagtggaactga

SEQ ID NO: 1067160 - DNA, 15 bp, Homo sapiens
cagatagtggaactg

SEQ ID NO: 1067161 - DNA, 15 bp, Homo sapiens
tcagatagtggaact

SEQ ID NO: 1067162 - DNA, 15 bp, Homo sapiens
gtcagatagtggaac

SEQ ID NO: 1067163 - DNA, 15 bp, Homo sapiens
ggtcagatagtggaa

SEQ ID NO: 1067164 - DNA, 15 bp, Homo sapiens
gggtcagatagtgga

SEQ ID NO: 1067165 - DNA, 15 bp, Homo sapiens
tgggtcagatagtgg

SEQ ID NO: 1067166 - DNA, 15 bp, Homo sapiens
ttgggtcagatagtg

SEQ ID NO: 1067167 - DNA, 15 bp, Homo sapiens
tttgggtcagatagt

SEQ ID NO: 1067168 - DNA, 15 bp, Homo sapiens
ctttgggtcagatag

SEQ ID NO: 1067169 - DNA, 15 bp, Homo sapiens
actttgggtcagata

SEQ ID NO: 1067170 - DNA, 15 bp, Homo sapiens
gactttgggtcagat

SEQ ID NO: 1067171 - DNA, 15 bp, Homo sapiens
agactttgggtcaga

SEQ ID NO: 1067172 - DNA, 15 bp, Homo sapiens
cagactttgggtcag

SEQ ID NO: 1067173 - DNA, 15 bp, Homo sapiens
gcagactttgggtca

SEQ ID NO: 1067174 - DNA, 15 bp, Homo sapiens
ggcagactttgggtc

SEQ ID NO: 1067175 - DNA, 15 bp, Homo sapiens
aggcagactttgggt

SEQ ID NO: 1067176 - DNA, 15 bp, Homo sapiens
gaggcagactttggg

SEQ ID NO: 1067177 - DNA, 15 bp, Homo sapiens
ggaggcagactttgg

SEQ ID NO: 1067178 - DNA, 15 bp, Homo sapiens
aggaggcagactttg

SEQ ID NO: 1067179 - DNA, 15 bp, Homo sapiens
caggaggcagacttt

SEQ ID NO: 1067180 - DNA, 15 bp, Homo sapiens
ccaggaggcagactt

SEQ ID NO: 1067181 - DNA, 15 bp, Homo sapiens
tccaggaggcagact

SEQ ID NO: 1067182 - DNA, 15 bp, Homo sapiens
ttccaggaggcagac

SEQ ID NO: 1067183 - DNA, 15 bp, Homo sapiens
attccaggaggcaga

SEQ ID NO: 1067184 - DNA, 15 bp, Homo sapiens
aattccaggaggcag

SEQ ID NO: 1067185 - DNA, 15 bp, Homo sapiens
aaattccaggaggca

SEQ ID NO: 1067186 - DNA, 15 bp, Homo sapiens
gaaattccaggaggc

SEQ ID NO: 1067187 - DNA, 15 bp, Homo sapiens
ggaaattccaggagg

SEQ ID NO: 1067188 - DNA, 15 bp, Homo sapiens
tggaaattccaggag

SEQ ID NO: 1067189 - DNA, 15 bp, Homo sapiens
gtggaaattccagga

SEQ ID NO: 1067190 - DNA, 15 bp, Homo sapiens
agtggaaattccagg

SEQ ID NO: 1067191 - DNA, 15 bp, Homo sapiens
gagtggaaattccag

SEQ ID NO: 1067192 - DNA, 15 bp, Homo sapiens
tgagtggaaattcca

SEQ ID NO: 1067193 - DNA, 15 bp, Homo sapiens
ttgagtggaaattcc

SEQ ID NO: 1067194 - DNA, 15 bp, Homo sapiens
cttgagtggaaattc

SEQ ID NO: 1067195 - DNA, 15 bp, Homo sapiens
gcttgagtggaaatt

SEQ ID NO: 1067196 - DNA, 15 bp, Homo sapiens
agcttgagtggaaat

SEQ ID NO: 1067197 - DNA, 15 bp, Homo sapiens
aagcttgagtggaaa

SEQ ID NO: 1067198 - DNA, 15 bp, Homo sapiens
aaagcttgagtggaa

SEQ ID NO: 1067199 - DNA, 15 bp, Homo sapiens
aaaagcttgagtgga

SEQ ID NO: 1067200 - DNA, 15 bp, Homo sapiens
gaaaagcttgagtgg

SEQ ID NO: 1067201 - DNA, 15 bp, Homo sapiens
ggaaaagcttgagtg

SEQ ID NO: 1067202 - DNA, 15 bp, Homo sapiens
aggaaaagcttgagt

SEQ ID NO: 1067203 - DNA, 15 bp, Homo sapiens
aaggaaaagcttgag

SEQ ID NO: 1067204 - DNA, 15 bp, Homo sapiens
gaaggaaaagcttga

SEQ ID NO: 1067205 - DNA, 15 bp, Homo sapiens
agaaggaaaagcttg

SEQ ID NO: 1067206 - DNA, 15 bp, Homo sapiens
cagaaggaaaagctt

SEQ ID NO: 1067207 - DNA, 15 bp, Homo sapiens
ccagaaggaaaagct

SEQ ID NO: 1067208 - DNA, 15 bp, Homo sapiens
tccagaaggaaaagc

SEQ ID NO: 1067209 - DNA, 15 bp, Homo sapiens
tctccagaaggaaaa

SEQ ID NO: 1067210 - DNA, 15 bp, Homo sapiens
ttctccagaaggaaa

SEQ ID NO: 1067211 - DNA, 15 bp, Homo sapiens
cttctccagaaggaa

SEQ ID NO: 1067212 - DNA, 15 bp, Homo sapiens
gcttctccagaagga

SEQ ID NO: 1067213 - DNA, 15 bp, Homo sapiens
ggcttctccagaagg

SEQ ID NO: 1067214 - DNA, 15 bp, Homo sapiens
aggcttctccagaag

SEQ ID NO: 1067215 - DNA, 15 bp, Homo sapiens
aaggcttctccagaa

SEQ ID NO: 1067216 - DNA, 15 bp, Homo sapiens
gaaggcttctccaga

SEQ ID NO: 1067217 - DNA, 15 bp, Homo sapiens
ggaaggcttctccag

SEQ ID NO: 1067218 - DNA, 15 bp, Homo sapiens
aggaaggcttctcca

SEQ ID NO: 1067219 - DNA, 15 bp, Homo sapiens
gaggaaggcttctcc

SEQ ID NO: 1067220 - DNA, 15 bp, Homo sapiens
ggaggaaggcttctc

SEQ ID NO: 1067221 - DNA, 15 bp, Homo sapiens
aggaggaaggcttct

SEQ ID NO: 1067222 - DNA, 15 bp, Homo sapiens
caggaggaaggcttc

SEQ ID NO: 1067223 - DNA, 15 bp, Homo sapiens
gcaggaggaaggctt

SEQ ID NO: 1067224 - DNA, 15 bp, Homo sapiens
agcaggaggaaggct

SEQ ID NO: 1067225 - DNA, 15 bp, Homo sapiens
aagcaggaggaaggc

SEQ ID NO: 1067226 - DNA, 15 bp, Homo sapiens
gaagcaggaggaagg

SEQ ID NO: 1067227 - DNA, 15 bp, Homo sapiens
ggaagcaggaggaag

SEQ ID NO: 1067228 - DNA, 15 bp, Homo sapiens
aggaagcaggaggaa

SEQ ID NO: 1067229 - DNA, 15 bp, Homo sapiens
gaggaagcaggagga

SEQ ID NO: 1067230 - DNA, 15 bp, Homo sapiens
ggaggaagcaggagg

SEQ ID NO: 1067231 - DNA, 15 bp, Homo sapiens
cggaggaagcaggag

SEQ ID NO: 1067232 - DNA, 15 bp, Homo sapiens
tcggaggaagcagga

SEQ ID NO: 1067233 - DNA, 15 bp, Homo sapiens
ttcggaggaagcagg

SEQ ID NO: 1067234 - DNA, 15 bp, Homo sapiens
tttcggaggaagcag

SEQ ID NO: 1067235 - DNA, 15 bp, Homo sapiens
atttcggaggaagca

SEQ ID NO: 1067236 - DNA, 15 bp, Homo sapiens
gatttcggaggaagc

SEQ ID NO: 1067237 - DNA, 15 bp, Homo sapiens
ggatttcggaggaag

SEQ ID NO: 1067238 - DNA, 15 bp, Homo sapiens
aggatttcggaggaa

SEQ ID NO: 1067239 - DNA, 15 bp, Homo sapiens
aaggatttcggagga

SEQ ID NO: 1067240 - DNA, 15 bp, Homo sapiens
aaaggatttcggagg

SEQ ID NO: 1067241 - DNA, 15 bp, Homo sapiens
caaaggatttcggag

SEQ ID NO: 1067242 - DNA, 15 bp, Homo sapiens
gcaaaggatttcgga

SEQ ID NO: 1067243 - DNA, 15 bp, Homo sapiens
tgcaaaggatttcgg

SEQ ID NO: 1067244 - DNA, 15 bp, Homo sapiens
atgcaaaggatttcg

SEQ ID NO: 1067245 - DNA, 15 bp, Homo sapiens
tatgcaaaggatttc

SEQ ID NO: 1067246 - DNA, 15 bp, Homo sapiens
atatgcaaaggattt

SEQ ID NO: 1067247 - DNA, 15 bp, Homo sapiens
gatatgcaaaggatt

SEQ ID NO: 1067248 - DNA, 15 bp, Homo sapiens
agatatgcaaaggat

SEQ ID NO: 1067249 - DNA, 15 bp, Homo sapiens
cagatatgcaaagga

SEQ ID NO: 1067250 - DNA, 15 bp, Homo sapiens
tcagatatgcaaagg

SEQ ID NO: 1067251 - DNA, 15 bp, Homo sapiens
ttcagatatgcaaag

SEQ ID NO: 1067252 - DNA, 15 bp, Homo sapiens
cttcagatatgcaaa

SEQ ID NO: 1067253 - DNA, 15 bp, Homo sapiens
tcttcagatatgcaa

SEQ ID NO: 1067254 - DNA, 15 bp, Homo sapiens
gtcttcagatatgca

SEQ ID NO: 1067255 - DNA, 15 bp, Homo sapiens
tgtcttcagatatgc

SEQ ID NO: 1067256 - DNA, 15 bp, Homo sapiens
ctgtcttcagatatg

SEQ ID NO: 1067257 - DNA, 15 bp, Homo sapiens
gctgtcttcagatat

SEQ ID NO: 1067258 - DNA, 15 bp, Homo sapiens
agctgtcttcagata

SEQ ID NO: 1067259 - DNA, 15 bp, Homo sapiens
cagctgtcttcagat

SEQ ID NO: 1067260 - DNA, 15 bp, Homo sapiens
gcagctgtcttcaga

SEQ ID NO: 1067261 - DNA, 15 bp, Homo sapiens
agcagctgtcttcag

SEQ ID NO: 1067262 - DNA, 15 bp, Homo sapiens
cagcagctgtcttca

SEQ ID NO: 1067263 - DNA, 15 bp, Homo sapiens
acagcagctgtcttc

SEQ ID NO: 1067264 - DNA, 15 bp, Homo sapiens
cacagcagctgtctt

SEQ ID NO: 1067265 - DNA, 15 bp, Homo sapiens
gcacagcagctgtct

SEQ ID NO: 1067266 - DNA, 15 bp, Homo sapiens
ggcacagcagctgtc

SEQ ID NO: 1067267 - DNA, 15 bp, Homo sapiens
gggcacagcagctgt

SEQ ID NO: 1067268 - DNA, 15 bp, Homo sapiens
tgggcacagcagctg

SEQ ID NO: 1067269 - DNA, 15 bp, Homo sapiens
ttgggcacagcagct

SEQ ID NO: 1067270 - DNA, 15 bp, Homo sapiens
cttgggcacagcagc

SEQ ID NO: 1067271 - DNA, 15 bp, Homo sapiens
gcttgggcacagcag

SEQ ID NO: 1067272 - DNA, 15 bp, Homo sapiens
ggcttgggcacagca

SEQ ID NO: 1067273 - DNA, 15 bp, Homo sapiens
gggcttgggcacagc

SEQ ID NO: 1067274 - DNA, 15 bp, Homo sapiens
ggggcttgggcacag

SEQ ID NO: 1067275 - DNA, 15 bp, Homo sapiens
tggggcttgggcaca

SEQ ID NO: 1067276 - DNA, 15 bp, Homo sapiens
ctggggcttgggcac

SEQ ID NO: 1067277 - DNA, 15 bp, Homo sapiens
gctggggcttgggca

SEQ ID NO: 1067278 - DNA, 15 bp, Homo sapiens
agctggggcttgggc

SEQ ID NO: 1067279 - DNA, 15 bp, Homo sapiens
gagctggggcttggg

SEQ ID NO: 1067280 - DNA, 15 bp, Homo sapiens
ggagctggggcttgg

SEQ ID NO: 1067281 - DNA, 15 bp, Homo sapiens
aggagctggggcttg

SEQ ID NO: 1067282 - DNA, 15 bp, Homo sapiens
gaggagctggggctt

SEQ ID NO: 1067283 - DNA, 15 bp, Homo sapiens
agaggagctggggct

SEQ ID NO: 1067284 - DNA, 15 bp, Homo sapiens
gagaggagctggggc

SEQ ID NO: 1067285 - DNA, 15 bp, Homo sapiens
agagaggagctgggg

SEQ ID NO: 1067286 - DNA, 15 bp, Homo sapiens
gagagaggagctggg

SEQ ID NO: 1067287 - DNA, 15 bp, Homo sapiens
agagagaggagctgg

SEQ ID NO: 1067288 - DNA, 15 bp, Homo sapiens
tagagagaggagctg

SEQ ID NO: 1067289 - DNA, 15 bp, Homo sapiens
atagagagaggagct

SEQ ID NO: 1067290 - DNA, 15 bp, Homo sapiens
gatagagagaggagc

SEQ ID NO: 1067291 - DNA, 15 bp, Homo sapiens
agatagagagaggag

SEQ ID NO: 1067292 - DNA, 15 bp, Homo sapiens
aagatagagagagga

SEQ ID NO: 1067293 - DNA, 15 bp, Homo sapiens
gaagatagagagagg

SEQ ID NO: 1067294 - DNA, 15 bp, Homo sapiens
agaagatagagagag

SEQ ID NO: 1067295 - DNA, 15 bp, Homo sapiens
aagaagatagagaga

SEQ ID NO: 1067296 - DNA, 15 bp, Homo sapiens
taagaagatagagag

SEQ ID NO: 1067297 - DNA, 15 bp, Homo sapiens
ataagaagatagaga

SEQ ID NO: 1067298 - DNA, 15 bp, Homo sapiens
cataagaagatagag

SEQ ID NO: 1067299 - DNA, 15 bp, Homo sapiens
acataagaagataga

SEQ ID NO: 1067300 - DNA, 15 bp, Homo sapiens
cacataagaagatag

SEQ ID NO: 1067301 - DNA, 15 bp, Homo sapiens
tcacataagaagata

SEQ ID NO: 1067302 - DNA, 15 bp, Homo sapiens
atcacataagaagat

SEQ ID NO: 1067303 - DNA, 15 bp, Homo sapiens
catcacataagaaga

SEQ ID NO: 1067304 - DNA, 15 bp, Homo sapiens
gcatcacataagaag

SEQ ID NO: 1067305 - DNA, 15 bp, Homo sapiens
tgcatcacataagaa

SEQ ID NO: 1067306 - DNA, 15 bp, Homo sapiens
ctgcatcacataaga

SEQ ID NO: 1067307 - DNA, 15 bp, Homo sapiens
gctgcatcacataag

SEQ ID NO: 1067308 - DNA, 15 bp, Homo sapiens
agctgcatcacataa

SEQ ID NO: 1067309 - DNA, 15 bp, Homo sapiens
cagctgcatcacata

SEQ ID NO: 1067310 - DNA, 15 bp, Homo sapiens
tcagctgcatcacat

SEQ ID NO: 1067311 - DNA, 15 bp, Homo sapiens
ctcagctgcatcaca

SEQ ID NO: 1067312 - DNA, 15 bp, Homo sapiens
tctcagctgcatcac

SEQ ID NO: 1067313 - DNA, 15 bp, Homo sapiens
atctcagctgcatca

SEQ ID NO: 1067314 - DNA, 15 bp, Homo sapiens
catctcagctgcatc

SEQ ID NO: 1067315 - DNA, 15 bp, Homo sapiens
tcatctcagctgcat

SEQ ID NO: 1067316 - DNA, 15 bp, Homo sapiens
ttcatctcagctgca

SEQ ID NO: 1067317 - DNA, 15 bp, Homo sapiens
cttcatctcagctgc

SEQ ID NO: 1067318 - DNA, 15 bp, Homo sapiens
acttcatctcagctg

SEQ ID NO: 1067319 - DNA, 15 bp, Homo sapiens
aacttcatctcagct

SEQ ID NO: 1067320 - DNA, 15 bp, Homo sapiens
gaacttcatctcagc

SEQ ID NO: 1067321 - DNA, 15 bp, Homo sapiens
agaacttcatctcag

SEQ ID NO: 1067322 - DNA, 15 bp, Homo sapiens
cagaacttcatctca

SEQ ID NO: 1067323 - DNA, 15 bp, Homo sapiens
tcagaacttcatctc

SEQ ID NO: 1067324 - DNA, 15 bp, Homo sapiens
ttcagaacttcatct

SEQ ID NO: 1067325 - DNA, 15 bp, Homo sapiens
gttcagaacttcatc

SEQ ID NO: 1067326 - DNA, 15 bp, Homo sapiens
tgttcagaacttcat

SEQ ID NO: 1067327 - DNA, 15 bp, Homo sapiens
ttgttcagaacttca

SEQ ID NO: 1067328 - DNA, 15 bp, Homo sapiens
cttgttcagaacttc

SEQ ID NO: 1067329 - DNA, 15 bp, Homo sapiens
acttgttcagaactt

SEQ ID NO: 1067330 - DNA, 15 bp, Homo sapiens
gacttgttcagaact

SEQ ID NO: 1067331 - DNA, 15 bp, Homo sapiens
tgacttgttcagaac

SEQ ID NO: 1067332 - DNA, 15 bp, Homo sapiens
atgacttgttcagaa

SEQ ID NO: 1067333 - DNA, 15 bp, Homo sapiens
aatgacttgttcaga

SEQ ID NO: 1067334 - DNA, 15 bp, Homo sapiens
aaatgacttgttcag

SEQ ID NO: 1067335 - DNA, 15 bp, Homo sapiens
caaatgacttgttca

SEQ ID NO: 1067336 - DNA, 15 bp, Homo sapiens
gcaaatgacttgttc

SEQ ID NO: 1067337 - DNA, 15 bp, Homo sapiens
agcaaatgacttgtt

SEQ ID NO: 1067338 - DNA, 15 bp, Homo sapiens
aagcaaatgacttgt

SEQ ID NO: 1067339 - DNA, 15 bp, Homo sapiens
aaagcaaatgacttg

SEQ ID NO: 1067340 - DNA, 15 bp, Homo sapiens
caaagcaaatgactt

SEQ ID NO: 1067341 - DNA, 15 bp, Homo sapiens
ccaaagcaaatgact

SEQ ID NO: 1067342 - DNA, 15 bp, Homo sapiens
cccaaagcaaatgac

SEQ ID NO: 1067343 - DNA, 15 bp, Homo sapiens
ccccaaagcaaatga

SEQ ID NO: 1067344 - DNA, 15 bp, Homo sapiens
accccaaagcaaatg

SEQ ID NO: 1067345 - DNA, 15 bp, Homo sapiens
taccccaaagcaaat

SEQ ID NO: 1067346 - DNA, 15 bp, Homo sapiens
ctaccccaaagcaaa

SEQ ID NO: 1067347 - DNA, 15 bp, Homo sapiens
cctaccccaaagcaa

SEQ ID NO: 1067348 - DNA, 15 bp, Homo sapiens
gcctaccccaaagca

SEQ ID NO: 1067349 - DNA, 15 bp, Homo sapiens
tgcctaccccaaagc

SEQ ID NO: 1067350 - DNA, 15 bp, Homo sapiens
ttgcctaccccaaag

SEQ ID NO: 1067351 - DNA, 15 bp, Homo sapiens
tttgcctaccccaaa

SEQ ID NO: 1067352 - DNA, 15 bp, Homo sapiens
gtttgcctaccccaa

SEQ ID NO: 1067353 - DNA, 15 bp, Homo sapiens
tgtttgcctacccca

SEQ ID NO: 1067354 - DNA, 15 bp, Homo sapiens
atgtttgcctacccc

SEQ ID NO: 1067355 - DNA, 15 bp, Homo sapiens
aatgtttgcctaccc

SEQ ID NO: 1067356 - DNA, 15 bp, Homo sapiens
caatgtttgcctacc

SEQ ID NO: 1067357 - DNA, 15 bp, Homo sapiens
acaatgtttgcctac

SEQ ID NO: 1067358 - DNA, 15 bp, Homo sapiens
aacaatgtttgccta

SEQ ID NO: 1067359 - DNA, 15 bp, Homo sapiens
gaacaatgtttgcct

SEQ ID NO: 1067360 - DNA, 15 bp, Homo sapiens
ggaacaatgtttgcc

SEQ ID NO: 1067361 - DNA, 15 bp, Homo sapiens
gggaacaatgtttgc

SEQ ID NO: 1067362 - DNA, 15 bp, Homo sapiens
ggggaacaatgtttg

SEQ ID NO: 1067363 - DNA, 15 bp, Homo sapiens
tggggaacaatgttt

SEQ ID NO: 1067364 - DNA, 15 bp, Homo sapiens
atggggaacaatgtt

SEQ ID NO: 1067365 - DNA, 15 bp, Homo sapiens
gatggggaacaatgt

SEQ ID NO: 1067366 - DNA, 15 bp, Homo sapiens
agatggggaacaatg

SEQ ID NO: 1067367 - DNA, 15 bp, Homo sapiens
gagatggggaacaat

SEQ ID NO: 1067368 - DNA, 15 bp, Homo sapiens
ggagatggggaacaa

SEQ ID NO: 1067369 - DNA, 15 bp, Homo sapiens
tggagatggggaaca

SEQ ID NO: 1067370 - DNA, 15 bp, Homo sapiens
gtggagatggggaac

SEQ ID NO: 1067371 - DNA, 15 bp, Homo sapiens
tgtggagatggggaa

SEQ ID NO: 1067372 - DNA, 15 bp, Homo sapiens
ctgtggagatgggga

SEQ ID NO: 1067373 - DNA, 15 bp, Homo sapiens
tctgtggagatgggg

SEQ ID NO: 1067374 - DNA, 15 bp, Homo sapiens
ttctgtggagatggg

SEQ ID NO: 1067375 - DNA, 15 bp, Homo sapiens
cttctgtggagatgg

SEQ ID NO: 1067376 - DNA, 15 bp, Homo sapiens
ccttctgtggagatg

SEQ ID NO: 1067377 - DNA, 15 bp, Homo sapiens
gccttctgtggagat

SEQ ID NO: 1067378 - DNA, 15 bp, Homo sapiens
tgccttctgtggaga

SEQ ID NO: 1067379 - DNA, 15 bp, Homo sapiens
ctgccttctgtggag

SEQ ID NO: 1067380 - DNA, 15 bp, Homo sapiens
tctgccttctgtgga

SEQ ID NO: 1067381 - DNA, 15 bp, Homo sapiens
ctctgccttctgtgg

SEQ ID NO: 1067382 - DNA, 15 bp, Homo sapiens
gctctgccttctgtg

SEQ ID NO: 1067383 - DNA, 15 bp, Homo sapiens
tgctctgccttctgt

SEQ ID NO: 1067384 - DNA, 15 bp, Homo sapiens
ttgctctgccttctg

SEQ ID NO: 1067385 - DNA, 15 bp, Homo sapiens
cttgctctgccttct

SEQ ID NO: 1067386 - DNA, 15 bp, Homo sapiens
tcttgctctgccttc

SEQ ID NO: 1067387 - DNA, 15 bp, Homo sapiens
ctcttgctctgcctt

SEQ ID NO: 1067388 - DNA, 15 bp, Homo sapiens
tctcttgctctgcct

SEQ ID NO: 1067389 - DNA, 15 bp, Homo sapiens
ttctcttgctctgcc

SEQ ID NO: 1067390 - DNA, 15 bp, Homo sapiens
tttctcttgctctgc

SEQ ID NO: 1067391 - DNA, 15 bp, Homo sapiens
ttttctcttgctctg

SEQ ID NO: 1067392 - DNA, 15 bp, Homo sapiens
attttctcttgctct

SEQ ID NO: 1067393 - DNA, 15 bp, Homo sapiens
gattttctcttgctc

SEQ ID NO: 1067394 - DNA, 15 bp, Homo sapiens
tgattttctcttgct

SEQ ID NO: 1067395 - DNA, 15 bp, Homo sapiens
ttgattttctcttgc

SEQ ID NO: 1067396 - DNA, 15 bp, Homo sapiens
gttgattttctcttg

SEQ ID NO: 1067397 - DNA, 15 bp, Homo sapiens
agttgattttctctt

SEQ ID NO: 1067398 - DNA, 15 bp, Homo sapiens
cagttgattttctct

SEQ ID NO: 1067399 - DNA, 15 bp, Homo sapiens
tcagttgattttctc

SEQ ID NO: 1067400 - DNA, 15 bp, Homo sapiens
gtcagttgattttct

SEQ ID NO: 1067401 - DNA, 15 bp, Homo sapiens
tgtcagttgattttc

SEQ ID NO: 1067402 - DNA, 15 bp, Homo sapiens
atgtcagttgatttt

SEQ ID NO: 1067403 - DNA, 15 bp, Homo sapiens
aatgtcagttgattt

SEQ ID NO: 1067404 - DNA, 15 bp, Homo sapiens
aaatgtcagttgatt

SEQ ID NO: 1067405 - DNA, 15 bp, Homo sapiens
gaaatgtcagttgat

SEQ ID NO: 1067406 - DNA, 15 bp, Homo sapiens
tgaaatgtcagttga

SEQ ID NO: 1067407 - DNA, 15 bp, Homo sapiens
gtgaaatgtcagttg

SEQ ID NO: 1067408 - DNA, 15 bp, Homo sapiens
ggtgaaatgtcagtt

SEQ ID NO: 1067409 - DNA, 15 bp, Homo sapiens
aggtgaaatgtcagt

SEQ ID NO: 1067410 - DNA, 15 bp, Homo sapiens
caggtgaaatgtcag

SEQ ID NO: 1067411 - DNA, 15 bp, Homo sapiens
ccaggtgaaatgtca

SEQ ID NO: 1067412 - DNA, 15 bp, Homo sapiens
tccaggtgaaatgtc

SEQ ID NO: 1067413 - DNA, 15 bp, Homo sapiens
ttccaggtgaaatgt

SEQ ID NO: 1067414 - DNA, 15 bp, Homo sapiens
cttccaggtgaaatg

SEQ ID NO: 1067415 - DNA, 15 bp, Homo sapiens
ccttccaggtgaaat

SEQ ID NO: 1067416 - DNA, 15 bp, Homo sapiens
accttccaggtgaaa

SEQ ID NO: 1067417 - DNA, 15 bp, Homo sapiens
aaccttccaggtgaa

SEQ ID NO: 1067418 - DNA, 15 bp, Homo sapiens
taaccttccaggtga

SEQ ID NO: 1067419 - DNA, 15 bp, Homo sapiens
ttaaccttccaggtg

SEQ ID NO: 1067420 - DNA, 15 bp, Homo sapiens
cttaaccttccaggt

SEQ ID NO: 1067421 - DNA, 15 bp, Homo sapiens
tcttaaccttccagg

SEQ ID NO: 1067422 - DNA, 15 bp, Homo sapiens
ttcttaaccttccag

SEQ ID NO: 1067423 - DNA, 15 bp, Homo sapiens
tttcttaaccttcca

SEQ ID NO: 1067424 - DNA, 15 bp, Homo sapiens
ttttcttaaccttcc

SEQ ID NO: 1067425 - DNA, 15 bp, Homo sapiens
tttttcttaaccttc

SEQ ID NO: 1067426 - DNA, 15 bp, Homo sapiens
ttttttcttaacctt

SEQ ID NO: 1067427 - DNA, 15 bp, Homo sapiens
attttttcttaacct

SEQ ID NO: 1067428 - DNA, 15 bp, Homo sapiens
aattttttcttaacc

SEQ ID NO: 1067429 - DNA, 15 bp, Homo sapiens
aaattttttcttaac

SEQ ID NO: 1067430 - DNA, 15 bp, Homo sapiens
caaattttttcttaa

SEQ ID NO: 1067431 - DNA, 15 bp, Homo sapiens
gcaaattttttctta

SEQ ID NO: 1067432 - DNA, 15 bp, Homo sapiens
agcaaattttttctt

SEQ ID NO: 1067433 - DNA, 15 bp, Homo sapiens
cagcaaattttttct

SEQ ID NO: 1067434 - DNA, 15 bp, Homo sapiens
tcagcaaattttttc

SEQ ID NO: 1067435 - DNA, 15 bp, Homo sapiens
gtcagcaaatttttt

SEQ ID NO: 1067436 - DNA, 15 bp, Homo sapiens
agtcagcaaattttt

SEQ ID NO: 1067437 - DNA, 15 bp, Homo sapiens
cagtcagcaaatttt

SEQ ID NO: 1067438 - DNA, 15 bp, Homo sapiens
acagtcagcaaattt

SEQ ID NO: 1067439 - DNA, 15 bp, Homo sapiens
cacagtcagcaaatt

SEQ ID NO: 1067440 - DNA, 15 bp, Homo sapiens
ccacagtcagcaaat

SEQ ID NO: 1067441 - DNA, 15 bp, Homo sapiens
tccacagtcagcaaa

SEQ ID NO: 1067442 - DNA, 15 bp, Homo sapiens
atccacagtcagcaa

SEQ ID NO: 1067443 - DNA, 15 bp, Homo sapiens
gatccacagtcagca

SEQ ID NO: 1067444 - DNA, 15 bp, Homo sapiens
tgatccacagtcagc

SEQ ID NO: 1067445 - DNA, 15 bp, Homo sapiens
atgatccacagtcag

SEQ ID NO: 1067446 - DNA, 15 bp, Homo sapiens
tatgatccacagtca

SEQ ID NO: 1067447 - DNA, 15 bp, Homo sapiens
ttatgatccacagtc

SEQ ID NO: 1067448 - DNA, 15 bp, Homo sapiens
cttatgatccacagt

SEQ ID NO: 1067449 - DNA, 15 bp, Homo sapiens
acttatgatccacag

SEQ ID NO: 1067450 - DNA, 15 bp, Homo sapiens
gacttatgatccaca

SEQ ID NO: 1067451 - DNA, 15 bp, Homo sapiens
tgacttatgatccac

SEQ ID NO: 1067452 - DNA, 15 bp, Homo sapiens
ctgacttatgatcca

SEQ ID NO: 1067453 - DNA, 15 bp, Homo sapiens
tctgacttatgatcc

SEQ ID NO: 1067454 - DNA, 15 bp, Homo sapiens
atctgacttatgatc

SEQ ID NO: 1067455 - DNA, 15 bp, Homo sapiens
catctgacttatgat

SEQ ID NO: 1067456 - DNA, 15 bp, Homo sapiens
acatctgacttatga

SEQ ID NO: 1067457 - DNA, 15 bp, Homo sapiens
tacatctgacttatg

SEQ ID NO: 1067458 - DNA, 15 bp, Homo sapiens
ctacatctgacttat

SEQ ID NO: 1067459 - DNA, 15 bp, Homo sapiens
tctacatctgactta

SEQ ID NO: 1067460 - DNA, 15 bp, Homo sapiens
ctctacatctgactt

SEQ ID NO: 1067461 - DNA, 15 bp, Homo sapiens
tctctacatctgact

SEQ ID NO: 1067462 - DNA, 15 bp, Homo sapiens
ctctctacatctgac

SEQ ID NO: 1067463 - DNA, 15 bp, Homo sapiens
actctctacatctga

SEQ ID NO: 1067464 - DNA, 15 bp, Homo sapiens
aactctctacatctg

SEQ ID NO: 1067465 - DNA, 15 bp, Homo sapiens
aaactctctacatct

SEQ ID NO: 1067466 - DNA, 15 bp, Homo sapiens
aaaactctctacatc

SEQ ID NO: 1067467 - DNA, 15 bp, Homo sapiens
taaaactctctacat

SEQ ID NO: 1067468 - DNA, 15 bp, Homo sapiens
ttaaaactctctaca

SEQ ID NO: 1067469 - DNA, 15 bp, Homo sapiens
tttaaaactctctac

SEQ ID NO: 1067470 - DNA, 15 bp, Homo sapiens
ctttaaaactctcta

SEQ ID NO: 1067471 - DNA, 15 bp, Homo sapiens
tctttaaaactctct

SEQ ID NO: 1067472 - DNA, 15 bp, Homo sapiens
gtctttaaaactctc

SEQ ID NO: 1067473 - DNA, 15 bp, Homo sapiens
agtctttaaaactct

SEQ ID NO: 1067474 - DNA, 15 bp, Homo sapiens
cagtctttaaaactc

SEQ ID NO: 1067475 - DNA, 15 bp, Homo sapiens
acagtctttaaaact

SEQ ID NO: 1067476 - DNA, 15 bp, Homo sapiens
gacagtctttaaaac

SEQ ID NO: 1067477 - DNA, 15 bp, Homo sapiens
ggacagtctttaaaa

SEQ ID NO: 1067478 - DNA, 15 bp, Homo sapiens
tggacagtctttaaa

SEQ ID NO: 1067479 - DNA, 15 bp, Homo sapiens
ttggacagtctttaa

SEQ ID NO: 1067480 - DNA, 15 bp, Homo sapiens
attggacagtcttta

SEQ ID NO: 1067481 - DNA, 15 bp, Homo sapiens
tattggacagtcttt

SEQ ID NO: 1067482 - DNA, 15 bp, Homo sapiens
ttattggacagtctt

SEQ ID NO: 1067483 - DNA, 15 bp, Homo sapiens
gttattggacagtct

SEQ ID NO: 1067484 - DNA, 15 bp, Homo sapiens
tgttattggacagtc

SEQ ID NO: 1067485 - DNA, 15 bp, Homo sapiens
ttgttattggacagt

SEQ ID NO: 1067486 - DNA, 15 bp, Homo sapiens
gttgttattggacag

SEQ ID NO: 1067487 - DNA, 15 bp, Homo sapiens
tgttgttattggaca

SEQ ID NO: 1067488 - DNA, 15 bp, Homo sapiens
ttgttgttattggac

SEQ ID NO: 1067489 - DNA, 15 bp, Homo sapiens
tttgttgttattgga

SEQ ID NO: 1067490 - DNA, 15 bp, Homo sapiens
ttttgttgttattgg

SEQ ID NO: 1067491 - DNA, 15 bp, Homo sapiens
attttgttgttattg

SEQ ID NO: 1067492 - DNA, 15 bp, Homo sapiens
aattttgttgttatt

SEQ ID NO: 1067493 - DNA, 15 bp, Homo sapiens
taattttgttgttat

SEQ ID NO: 1067494 - DNA, 15 bp, Homo sapiens
ataattttgttgtta

SEQ ID NO: 1067495 - DNA, 15 bp, Homo sapiens
cataattttgttgtt

SEQ ID NO: 1067496 - DNA, 15 bp, Homo sapiens
gcataattttgttgt

SEQ ID NO: 1067497 - DNA, 15 bp, Homo sapiens
tgcataattttgttg

SEQ ID NO: 1067498 - DNA, 15 bp, Homo sapiens
atgcataattttgtt

SEQ ID NO: 1067499 - DNA, 15 bp, Homo sapiens
aatgcataattttgt

SEQ ID NO: 1067500 - DNA, 15 bp, Homo sapiens
taatgcataattttg

SEQ ID NO: 1067501 - DNA, 15 bp, Homo sapiens
ctaatgcataatttt

SEQ ID NO: 1067502 - DNA, 15 bp, Homo sapiens
actaatgcataattt

SEQ ID NO: 1067503 - DNA, 15 bp, Homo sapiens
gactaatgcataatt

SEQ ID NO: 1067504 - DNA, 15 bp, Homo sapiens
tgactaatgcataat

SEQ ID NO: 1067505 - DNA, 15 bp, Homo sapiens
atgactaatgcataa

SEQ ID NO: 1067506 - DNA, 15 bp, Homo sapiens
gatgactaatgcata

SEQ ID NO: 1067507 - DNA, 15 bp, Homo sapiens
tgatgactaatgcat

SEQ ID NO: 1067508 - DNA, 15 bp, Homo sapiens
gtgatgactaatgca

SEQ ID NO: 1067509 - DNA, 15 bp, Homo sapiens
ggtgatgactaatgc

SEQ ID NO: 1067510 - DNA, 15 bp, Homo sapiens
aggtgatgactaatg

SEQ ID NO: 1067511 - DNA, 15 bp, Homo sapiens
caggtgatgactaat

SEQ ID NO: 1067512 - DNA, 15 bp, Homo sapiens
gcaggtgatgactaa

SEQ ID NO: 1067513 - DNA, 15 bp, Homo sapiens
ggcaggtgatgacta

SEQ ID NO: 1067514 - DNA, 15 bp, Homo sapiens
tggcaggtgatgact

SEQ ID NO: 1067515 - DNA, 15 bp, Homo sapiens
ttggcaggtgatgac

SEQ ID NO: 1067516 - DNA, 15 bp, Homo sapiens
tttggcaggtgatga

SEQ ID NO: 1067517 - DNA, 15 bp, Homo sapiens
ttttggcaggtgatg

SEQ ID NO: 1067518 - DNA, 15 bp, Homo sapiens
tttttggcaggtgat

SEQ ID NO: 1067519 - DNA, 15 bp, Homo sapiens
atttttggcaggtga

SEQ ID NO: 1067520 - DNA, 15 bp, Homo sapiens
tatttttggcaggtg

SEQ ID NO: 1067521 - DNA, 15 bp, Homo sapiens
ttatttttggcaggt

SEQ ID NO: 1067522 - DNA, 15 bp, Homo sapiens
attatttttggcagg

SEQ ID NO: 1067523 - DNA, 15 bp, Homo sapiens
aattatttttggcag

SEQ ID NO: 1067524 - DNA, 15 bp, Homo sapiens
taattatttttggca

SEQ ID NO: 1067525 - DNA, 15 bp, Homo sapiens
ataattatttttggc

SEQ ID NO: 1067526 - DNA, 15 bp, Homo sapiens
gataattatttttgg

SEQ ID NO: 1067527 - DNA, 15 bp, Homo sapiens
tgataattatttttg

SEQ ID NO: 1067528 - DNA, 15 bp, Homo sapiens
atgataattattttt

SEQ ID NO: 1067529 - DNA, 15 bp, Homo sapiens
tatgataattatttt

SEQ ID NO: 1067530 - DNA, 15 bp, Homo sapiens
atatgataattattt

SEQ ID NO: 1067531 - DNA, 15 bp, Homo sapiens
aatatgataattatt

SEQ ID NO: 1067532 - DNA, 15 bp, Homo sapiens
taatatgataattat

SEQ ID NO: 1067533 - DNA, 15 bp, Homo sapiens
ttaatatgataatta

SEQ ID NO: 1067534 - DNA, 15 bp, Homo sapiens
attaatatgataatt

SEQ ID NO: 1067535 - DNA, 15 bp, Homo sapiens
cattaatatgataat

SEQ ID NO: 1067536 - DNA, 15 bp, Homo sapiens
tcattaatatgataa

SEQ ID NO: 1067537 - DNA, 15 bp, Homo sapiens
atcattaatatgata

SEQ ID NO: 1067538 - DNA, 15 bp, Homo sapiens
catcattaatatgat

SEQ ID NO: 1067539 - DNA, 15 bp, Homo sapiens
acatcattaatatga

SEQ ID NO: 1067540 - DNA, 15 bp, Homo sapiens
cacatcattaatatg

SEQ ID NO: 1067541 - DNA, 15 bp, Homo sapiens
ccacatcattaatat

SEQ ID NO: 1067542 - DNA, 15 bp, Homo sapiens
tccacatcattaata

SEQ ID NO: 1067543 - DNA, 15 bp, Homo sapiens
atccacatcattaat

SEQ ID NO: 1067544 - DNA, 15 bp, Homo sapiens
catccacatcattaa

SEQ ID NO: 1067545 - DNA, 15 bp, Homo sapiens
tcatccacatcatta

SEQ ID NO: 1067546 - DNA, 15 bp, Homo sapiens
ctcatccacatcatt

SEQ ID NO: 1067547 - DNA, 15 bp, Homo sapiens
tctcatccacatcat

SEQ ID NO: 1067548 - DNA, 15 bp, Homo sapiens
ttctcatccacatca

SEQ ID NO: 1067549 - DNA, 15 bp, Homo sapiens
tttctcatccacatc

SEQ ID NO: 1067550 - DNA, 15 bp, Homo sapiens
ttttctcatccacat

SEQ ID NO: 1067551 - DNA, 15 bp, Homo sapiens
cttttctcatccaca

SEQ ID NO: 1067552 - DNA, 15 bp, Homo sapiens
tcttttctcatccac

SEQ ID NO: 1067553 - DNA, 15 bp, Homo sapiens
atcttttctcatcca

SEQ ID NO: 1067554 - DNA, 15 bp, Homo sapiens
catcttttctcatcc

SEQ ID NO: 1067555 - DNA, 15 bp, Homo sapiens
ccatcttttctcatc

SEQ ID NO: 1067556 - DNA, 15 bp, Homo sapiens
accatcttttctcat

SEQ ID NO: 1067557 - DNA, 15 bp, Homo sapiens
gaccatcttttctca

SEQ ID NO: 1067558 - DNA, 15 bp, Homo sapiens
agaccatcttttctc

SEQ ID NO: 1067559 - DNA, 15 bp, Homo sapiens
gagaccatcttttct

SEQ ID NO: 1067560 - DNA, 15 bp, Homo sapiens
tgagaccatcttttc

SEQ ID NO: 1067561 - DNA, 15 bp, Homo sapiens
ttgagaccatctttt

SEQ ID NO: 1067562 - DNA, 15 bp, Homo sapiens
attgagaccatcttt

SEQ ID NO: 1067563 - DNA, 15 bp, Homo sapiens
cattgagaccatctt

SEQ ID NO: 1067564 - DNA, 15 bp, Homo sapiens
ccattgagaccatct

SEQ ID NO: 1067565 - DNA, 15 bp, Homo sapiens
cccattgagaccatc

SEQ ID NO: 1067566 - DNA, 15 bp, Homo sapiens
gcccattgagaccat

SEQ ID NO: 1067567 - DNA, 15 bp, Homo sapiens
agcccattgagacca

SEQ ID NO: 1067568 - DNA, 15 bp, Homo sapiens
aagcccattgagacc

SEQ ID NO: 1067569 - DNA, 15 bp, Homo sapiens
taagcccattgagac

SEQ ID NO: 1067570 - DNA, 15 bp, Homo sapiens
ttaagcccattgaga

SEQ ID NO: 1067571 - DNA, 15 bp, Homo sapiens
cttaagcccattgag

SEQ ID NO: 1067572 - DNA, 15 bp, Homo sapiens
ccttaagcccattga

SEQ ID NO: 1067573 - DNA, 15 bp, Homo sapiens
tccttaagcccattg

SEQ ID NO: 1067574 - DNA, 15 bp, Homo sapiens
gtccttaagcccatt

SEQ ID NO: 1067575 - DNA, 15 bp, Homo sapiens
agtccttaagcccat

SEQ ID NO: 1067576 - DNA, 15 bp, Homo sapiens
aagtccttaagccca

SEQ ID NO: 1067577 - DNA, 15 bp, Homo sapiens
aaagtccttaagccc

SEQ ID NO: 1067578 - DNA, 15 bp, Homo sapiens
aaaagtccttaagcc

SEQ ID NO: 1067579 - DNA, 15 bp, Homo sapiens
caaaagtccttaagc

SEQ ID NO: 1067580 - DNA, 15 bp, Homo sapiens
tcaaaagtccttaag

SEQ ID NO: 1067581 - DNA, 15 bp, Homo sapiens
ttcaaaagtccttaa

SEQ ID NO: 1067582 - DNA, 15 bp, Homo sapiens
cttcaaaagtcctta

SEQ ID NO: 1067583 - DNA, 15 bp, Homo sapiens
ccttcaaaagtcctt

SEQ ID NO: 1067584 - DNA, 15 bp, Homo sapiens
accttcaaaagtcct

SEQ ID NO: 1067585 - DNA, 15 bp, Homo sapiens
taccttcaaaagtcc

SEQ ID NO: 1067586 - DNA, 15 bp, Homo sapiens
ttaccttcaaaagtc

SEQ ID NO: 1067587 - DNA, 15 bp, Homo sapiens
attaccttcaaaagt

SEQ ID NO: 1067588 - DNA, 15 bp, Homo sapiens
aattaccttcaaaag

SEQ ID NO: 1067589 - DNA, 15 bp, Homo sapiens
aaattaccttcaaaa

SEQ ID NO: 1067590 - DNA, 15 bp, Homo sapiens
taaattaccttcaaa

SEQ ID NO: 1067591 - DNA, 15 bp, Homo sapiens
ataaattaccttcaa

SEQ ID NO: 1067592 - DNA, 15 bp, Homo sapiens
cataaattaccttca

SEQ ID NO: 1067593 - DNA, 15 bp, Homo sapiens
ccataaattaccttc

SEQ ID NO: 1067594 - DNA, 15 bp, Homo sapiens
accataaattacctt

SEQ ID NO: 1067595 - DNA, 15 bp, Homo sapiens
aaccataaattacct

SEQ ID NO: 1067596 - DNA, 15 bp, Homo sapiens
gaaccataaattacc

SEQ ID NO: 1067597 - DNA, 15 bp, Homo sapiens
agaaccataaattac

SEQ ID NO: 1067598 - DNA, 15 bp, Homo sapiens
tagaaccataaatta

SEQ ID NO: 1067599 - DNA, 15 bp, Homo sapiens
ttagaaccataaatt

SEQ ID NO: 1067600 - DNA, 15 bp, Homo sapiens
cttagaaccataaat

SEQ ID NO: 1067601 - DNA, 15 bp, Homo sapiens
acttagaaccataaa

SEQ ID NO: 1067602 - DNA, 15 bp, Homo sapiens
tacttagaaccataa

SEQ ID NO: 1067603 - DNA, 15 bp, Homo sapiens
ctacttagaaccata

SEQ ID NO: 1067604 - DNA, 15 bp, Homo sapiens
tctacttagaaccat

SEQ ID NO: 1067605 - DNA, 15 bp, Homo sapiens
ttctacttagaacca

SEQ ID NO: 1067606 - DNA, 15 bp, Homo sapiens
tttctacttagaacc

SEQ ID NO: 1067607 - DNA, 15 bp, Homo sapiens
gtttctacttagaac

SEQ ID NO: 1067608 - DNA, 15 bp, Homo sapiens
ggtttctacttagaa

SEQ ID NO: 1067609 - DNA, 15 bp, Homo sapiens
gggtttctacttaga

SEQ ID NO: 1067610 - DNA, 15 bp, Homo sapiens
tgggtttctacttag

SEQ ID NO: 1067611 - DNA, 15 bp, Homo sapiens
ttgggtttctactta

SEQ ID NO: 1067612 - DNA, 15 bp, Homo sapiens
tttgggtttctactt

SEQ ID NO: 1067613 - DNA, 15 bp, Homo sapiens
ttttgggtttctact

SEQ ID NO: 1067614 - DNA, 15 bp, Homo sapiens
tttttgggtttctac

SEQ ID NO: 1067615 - DNA, 15 bp, Homo sapiens
atttttgggtttcta

SEQ ID NO: 1067616 - DNA, 15 bp, Homo sapiens
gatttttgggtttct

SEQ ID NO: 1067617 - DNA, 15 bp, Homo sapiens
tgatttttgggtttc

SEQ ID NO: 1067618 - DNA, 15 bp, Homo sapiens
atgatttttgggttt

SEQ ID NO: 1067619 - DNA, 15 bp, Homo sapiens
tatgatttttgggtt

SEQ ID NO: 1067620 - DNA, 15 bp, Homo sapiens
ctatgatttttgggt

SEQ ID NO: 1067621 - DNA, 15 bp, Homo sapiens
actatgatttttggg

SEQ ID NO: 1067622 - DNA, 15 bp, Homo sapiens
cactatgatttttgg

SEQ ID NO: 1067623 - DNA, 15 bp, Homo sapiens
tcactatgatttttg

SEQ ID NO: 1067624 - DNA, 15 bp, Homo sapiens
atcactatgattttt

SEQ ID NO: 1067625 - DNA, 15 bp, Homo sapiens
tatcactatgatttt

SEQ ID NO: 1067626 - DNA, 15 bp, Homo sapiens
atatcactatgattt

SEQ ID NO: 1067627 - DNA, 15 bp, Homo sapiens
aatatcactatgatt

SEQ ID NO: 1067628 - DNA, 15 bp, Homo sapiens
aaatatcactatgat

SEQ ID NO: 1067629 - DNA, 15 bp, Homo sapiens
aaaatatcactatga

SEQ ID NO: 1067630 - DNA, 15 bp, Homo sapiens
aaaaatatcactatg

SEQ ID NO: 1067631 - DNA, 15 bp, Homo sapiens
taaaaatatcactat

SEQ ID NO: 1067632 - DNA, 15 bp, Homo sapiens
ttaaaaatatcacta

SEQ ID NO: 1067633 - DNA, 15 bp, Homo sapiens
tttaaaaatatcact

SEQ ID NO: 1067634 - DNA, 15 bp, Homo sapiens
ttttaaaaatatcac

SEQ ID NO: 1067635 - DNA, 15 bp, Homo sapiens
gttttaaaaatatca

SEQ ID NO: 1067636 - DNA, 15 bp, Homo sapiens
agttttaaaaatatc

SEQ ID NO: 1067637 - DNA, 15 bp, Homo sapiens
cagttttaaaaatat

SEQ ID NO: 1067638 - DNA, 15 bp, Homo sapiens
gcagttttaaaaata

SEQ ID NO: 1067639 - DNA, 15 bp, Homo sapiens
tgcagttttaaaaat

SEQ ID NO: 1067640 - DNA, 15 bp, Homo sapiens
ttgcagttttaaaaa

SEQ ID NO: 1067641 - DNA, 15 bp, Homo sapiens
attgcagttttaaaa

SEQ ID NO: 1067642 - DNA, 15 bp, Homo sapiens
aattgcagttttaaa

SEQ ID NO: 1067643 - DNA, 15 bp, Homo sapiens
taattgcagttttaa

SEQ ID NO: 1067644 - DNA, 15 bp, Homo sapiens
ataattgcagtttta

SEQ ID NO: 1067645 - DNA, 15 bp, Homo sapiens
tataattgcagtttt

SEQ ID NO: 1067646 - DNA, 15 bp, Homo sapiens
ctataattgcagttt

SEQ ID NO: 1067647 - DNA, 15 bp, Homo sapiens
actataattgcagtt

SEQ ID NO: 1067648 - DNA, 15 bp, Homo sapiens
aactataattgcagt

SEQ ID NO: 1067649 - DNA, 15 bp, Homo sapiens
caactataattgcag

SEQ ID NO: 1067650 - DNA, 15 bp, Homo sapiens
tcaactataattgca

SEQ ID NO: 1067651 - DNA, 15 bp, Homo sapiens
ttcaactataattgc

SEQ ID NO: 1067652 - DNA, 15 bp, Homo sapiens
tttcaactataattg

SEQ ID NO: 1067653 - DNA, 15 bp, Homo sapiens
ttttcaactataatt

SEQ ID NO: 1067654 - DNA, 15 bp, Homo sapiens
tttttcaactataat

SEQ ID NO: 1067655 - DNA, 15 bp, Homo sapiens
atttttcaactataa

SEQ ID NO: 1067656 - DNA, 15 bp, Homo sapiens
tatttttcaactata

SEQ ID NO: 1067657 - DNA, 15 bp, Homo sapiens
ctatttttcaactat

SEQ ID NO: 1067658 - DNA, 15 bp, Homo sapiens
gctatttttcaacta

SEQ ID NO: 1067659 - DNA, 15 bp, Homo sapiens
tgctatttttcaact

SEQ ID NO: 1067660 - DNA, 15 bp, Homo sapiens
ttgctatttttcaac

SEQ ID NO: 1067661 - DNA, 15 bp, Homo sapiens
tttgctatttttcaa

SEQ ID NO: 1067662 - DNA, 15 bp, Homo sapiens
ttttgctatttttca

SEQ ID NO: 1067663 - DNA, 15 bp, Homo sapiens
attttgctatttttc

SEQ ID NO: 1067664 - DNA, 15 bp, Homo sapiens
aattttgctattttt

SEQ ID NO: 1067665 - DNA, 15 bp, Homo sapiens
aaattttgctatttt

SEQ ID NO: 1067666 - DNA, 15 bp, Homo sapiens
aaaattttgctattt

SEQ ID NO: 1067667 - DNA, 15 bp, Homo sapiens
taaaattttgctatt

SEQ ID NO: 1067668 - DNA, 15 bp, Homo sapiens
gtaaaattttgctat

SEQ ID NO: 1067669 - DNA, 15 bp, Homo sapiens
tgtaaaattttgcta

SEQ ID NO: 1067670 - DNA, 15 bp, Homo sapiens
ttgtaaaattttgct

SEQ ID NO: 1067671 - DNA, 15 bp, Homo sapiens
tttgtaaaattttgc

SEQ ID NO: 1067672 - DNA, 15 bp, Homo sapiens
ttttgtaaaattttg

SEQ ID NO: 1067673 - DNA, 15 bp, Homo sapiens
attttgtaaaatttt

SEQ ID NO: 1067674 - DNA, 15 bp, Homo sapiens
tattttgtaaaattt

SEQ ID NO: 1067675 - DNA, 15 bp, Homo sapiens
gtattttgtaaaatt

SEQ ID NO: 1067676 - DNA, 15 bp, Homo sapiens
tgtattttgtaaaat

SEQ ID NO: 1067677 - DNA, 15 bp, Homo sapiens
atgtattttgtaaaa

SEQ ID NO: 1067678 - DNA, 15 bp, Homo sapiens
catgtattttgtaaa

SEQ ID NO: 1067679 - DNA, 15 bp, Homo sapiens
tcatgtattttgtaa

SEQ ID NO: 1067680 - DNA, 15 bp, Homo sapiens
gtcatgtattttgta

SEQ ID NO: 1067681 - DNA, 15 bp, Homo sapiens
tgtcatgtattttgt

SEQ ID NO: 1067682 - DNA, 15 bp, Homo sapiens
ttgtcatgtattttg

SEQ ID NO: 1067683 - DNA, 15 bp, Homo sapiens
attgtcatgtatttt

SEQ ID NO: 1067684 - DNA, 15 bp, Homo sapiens
aattgtcatgtattt

SEQ ID NO: 1067685 - DNA, 15 bp, Homo sapiens
aaattgtcatgtatt

SEQ ID NO: 1067686 - DNA, 15 bp, Homo sapiens
aaaattgtcatgtat

SEQ ID NO: 1067687 - DNA, 15 bp, Homo sapiens
caaaattgtcatgta

SEQ ID NO: 1067688 - DNA, 15 bp, Homo sapiens
gcaaaattgtcatgt

SEQ ID NO: 1067689 - DNA, 15 bp, Homo sapiens
ggcaaaattgtcatg

SEQ ID NO: 1067690 - DNA, 15 bp, Homo sapiens
tggcaaaattgtcat

SEQ ID NO: 1067691 - DNA, 15 bp, Homo sapiens
ttggcaaaattgtca

SEQ ID NO: 1067692 - DNA, 15 bp, Homo sapiens
cttggcaaaattgtc

SEQ ID NO: 1067693 - DNA, 15 bp, Homo sapiens
acttggcaaaattgt

SEQ ID NO: 1067694 - DNA, 15 bp, Homo sapiens
gacttggcaaaattg

SEQ ID NO: 1067695 - DNA, 15 bp, Homo sapiens
cgacttggcaaaatt

SEQ ID NO: 1067696 - DNA, 15 bp, Homo sapiens
tcgacttggcaaaat

SEQ ID NO: 1067697 - DNA, 15 bp, Homo sapiens
ctcgacttggcaaaa

SEQ ID NO: 1067698 - DNA, 15 bp, Homo sapiens
tctcgacttggcaaa

SEQ ID NO: 1067699 - DNA, 15 bp, Homo sapiens
gtctcgacttggcaa

SEQ ID NO: 1067700 - DNA, 15 bp, Homo sapiens
ggtctcgacttggca

SEQ ID NO: 1067701 - DNA, 15 bp, Homo sapiens
gggtctcgacttggc

SEQ ID NO: 1067702 - DNA, 15 bp, Homo sapiens
tgggtctcgacttgg

SEQ ID NO: 1067703 - DNA, 15 bp, Homo sapiens
ctgggtctcgacttg

SEQ ID NO: 1067704 - DNA, 15 bp, Homo sapiens
gctgggtctcgactt

SEQ ID NO: 1067705 - DNA, 15 bp, Homo sapiens
agctgggtctcgact

SEQ ID NO: 1067706 - DNA, 15 bp, Homo sapiens
gagctgggtctcgac

SEQ ID NO: 1067707 - DNA, 15 bp, Homo sapiens
agagctgggtctcga

SEQ ID NO: 1067708 - DNA, 15 bp, Homo sapiens
gagagctgggtctcg

SEQ ID NO: 1067709 - DNA, 15 bp, Homo sapiens
agagagctgggtctc

SEQ ID NO: 1067710 - DNA, 15 bp, Homo sapiens
tagagagctgggtct

SEQ ID NO: 1067711 - DNA, 15 bp, Homo sapiens
gtagagagctgggtc

SEQ ID NO: 1067712 - DNA, 15 bp, Homo sapiens
ggtagagagctgggt

SEQ ID NO: 1067713 - DNA, 15 bp, Homo sapiens
tggtagagagctggg

SEQ ID NO: 1067714 - DNA, 15 bp, Homo sapiens
atggtagagagctgg

SEQ ID NO: 1067715 - DNA, 15 bp, Homo sapiens
catggtagagagctg

SEQ ID NO: 1067716 - DNA, 15 bp, Homo sapiens
tcatggtagagagct

SEQ ID NO: 1067717 - DNA, 15 bp, Homo sapiens
atcatggtagagagc

SEQ ID NO: 1067718 - DNA, 15 bp, Homo sapiens
aatcatggtagagag

SEQ ID NO: 1067719 - DNA, 15 bp, Homo sapiens
aaatcatggtagaga

SEQ ID NO: 1067720 - DNA, 15 bp, Homo sapiens
gaaatcatggtagag

SEQ ID NO: 1067721 - DNA, 15 bp, Homo sapiens
ggaaatcatggtaga

SEQ ID NO: 1067722 - DNA, 15 bp, Homo sapiens
aggaaatcatggtag

SEQ ID NO: 1067723 - DNA, 15 bp, Homo sapiens
gaggaaatcatggta

SEQ ID NO: 1067724 - DNA, 15 bp, Homo sapiens
tgaggaaatcatggt

SEQ ID NO: 1067725 - DNA, 15 bp, Homo sapiens
ttgaggaaatcatgg

SEQ ID NO: 1067726 - DNA, 15 bp, Homo sapiens
gttgaggaaatcatg

SEQ ID NO: 1067727 - DNA, 15 bp, Homo sapiens
agttgaggaaatcat

SEQ ID NO: 1067728 - DNA, 15 bp, Homo sapiens
tagttgaggaaatca

SEQ ID NO: 1067729 - DNA, 15 bp, Homo sapiens
ttagttgaggaaatc

SEQ ID NO: 1067730 - DNA, 15 bp, Homo sapiens
gttagttgaggaaat

SEQ ID NO: 1067731 - DNA, 15 bp, Homo sapiens
tgttagttgaggaaa

SEQ ID NO: 1067732 - DNA, 15 bp, Homo sapiens
ttgttagttgaggaa

SEQ ID NO: 1067733 - DNA, 15 bp, Homo sapiens
tttgttagttgagga

SEQ ID NO: 1067734 - DNA, 15 bp, Homo sapiens
ttttgttagttgagg

SEQ ID NO: 1067735 - DNA, 15 bp, Homo sapiens
tttttgttagttgag

SEQ ID NO: 1067736 - DNA, 15 bp, Homo sapiens
ttttttgttagttga

SEQ ID NO: 1067737 - DNA, 15 bp, Homo sapiens
cttttttgttagttg

SEQ ID NO: 1067738 - DNA, 15 bp, Homo sapiens
ccttttttgttagtt

SEQ ID NO: 1067739 - DNA, 15 bp, Homo sapiens
tccttttttgttagt

SEQ ID NO: 1067740 - DNA, 15 bp, Homo sapiens
ctccttttttgttag

SEQ ID NO: 1067741 - DNA, 15 bp, Homo sapiens
tctccttttttgtta

SEQ ID NO: 1067742 - DNA, 15 bp, Homo sapiens
atctccttttttgtt

SEQ ID NO: 1067743 - DNA, 15 bp, Homo sapiens
tatctccttttttgt

SEQ ID NO: 1067744 - DNA, 15 bp, Homo sapiens
ttatctccttttttg

SEQ ID NO: 1067745 - DNA, 15 bp, Homo sapiens
tttatctcctttttt

SEQ ID NO: 1067746 - DNA, 15 bp, Homo sapiens
gtttatctccttttt

SEQ ID NO: 1067747 - DNA, 15 bp, Homo sapiens
ggtttatctcctttt

SEQ ID NO: 1067748 - DNA, 15 bp, Homo sapiens
aggtttatctccttt

SEQ ID NO: 1067749 - DNA, 15 bp, Homo sapiens
gaggtttatctcctt

SEQ ID NO: 1067750 - DNA, 15 bp, Homo sapiens
agaggtttatctcct

SEQ ID NO: 1067751 - DNA, 15 bp, Homo sapiens
gagaggtttatctcc

SEQ ID NO: 1067752 - DNA, 15 bp, Homo sapiens
tgagaggtttatctc

SEQ ID NO: 1067753 - DNA, 15 bp, Homo sapiens
gtgagaggtttatct

SEQ ID NO: 1067754 - DNA, 15 bp, Homo sapiens
ggtgagaggtttatc

SEQ ID NO: 1067755 - DNA, 15 bp, Homo sapiens
aggtgagaggtttat

SEQ ID NO: 1067756 - DNA, 15 bp, Homo sapiens
taggtgagaggttta

SEQ ID NO: 1067757 - DNA, 15 bp, Homo sapiens
ttaggtgagaggttt

SEQ ID NO: 1067758 - DNA, 15 bp, Homo sapiens
tttaggtgagaggtt

SEQ ID NO: 1067759 - DNA, 15 bp, Homo sapiens
gtttaggtgagaggt

SEQ ID NO: 1067760 - DNA, 15 bp, Homo sapiens
ggtttaggtgagagg

SEQ ID NO: 1067761 - DNA, 15 bp, Homo sapiens
tggtttaggtgagag

SEQ ID NO: 1067762 - DNA, 15 bp, Homo sapiens
ctggtttaggtgaga

SEQ ID NO: 1067763 - DNA, 15 bp, Homo sapiens
actggtttaggtgag

SEQ ID NO: 1067764 - DNA, 15 bp, Homo sapiens
tactggtttaggtga

SEQ ID NO: 1067765 - DNA, 15 bp, Homo sapiens
atactggtttaggtg

SEQ ID NO: 1067766 - DNA, 15 bp, Homo sapiens
aatactggtttaggt

SEQ ID NO: 1067767 - DNA, 15 bp, Homo sapiens
caatactggtttagg

SEQ ID NO: 1067768 - DNA, 15 bp, Homo sapiens
gcaatactggtttag

SEQ ID NO: 1067769 - DNA, 15 bp, Homo sapiens
tgcaatactggttta

SEQ ID NO: 1067770 - DNA, 15 bp, Homo sapiens
ttgcaatactggttt

SEQ ID NO: 1067771 - DNA, 15 bp, Homo sapiens
tttgcaatactggtt

SEQ ID NO: 1067772 - DNA, 15 bp, Homo sapiens
ctttgcaatactggt

SEQ ID NO: 1067773 - DNA, 15 bp, Homo sapiens
tctttgcaatactgg

SEQ ID NO: 1067774 - DNA, 15 bp, Homo sapiens
gtctttgcaatactg

SEQ ID NO: 1067775 - DNA, 15 bp, Homo sapiens
agtctttgcaatact

SEQ ID NO: 1067776 - DNA, 15 bp, Homo sapiens
aagtctttgcaatac

SEQ ID NO: 1067777 - DNA, 15 bp, Homo sapiens
aaagtctttgcaata

SEQ ID NO: 1067778 - DNA, 15 bp, Homo sapiens
aaaagtctttgcaat

SEQ ID NO: 1067779 - DNA, 15 bp, Homo sapiens
aaaaagtctttgcaa

SEQ ID NO: 1067780 - DNA, 15 bp, Homo sapiens
gaaaaagtctttgca

SEQ ID NO: 1067781 - DNA, 15 bp, Homo sapiens
tgaaaaagtctttgc

SEQ ID NO: 1067782 - DNA, 15 bp, Homo sapiens
atgaaaaagtctttg

SEQ ID NO: 1067783 - DNA, 15 bp, Homo sapiens
catgaaaaagtcttt

SEQ ID NO: 1067784 - DNA, 15 bp, Homo sapiens
ccatgaaaaagtctt

SEQ ID NO: 1067785 - DNA, 15 bp, Homo sapiens
gccatgaaaaagtct

SEQ ID NO: 1067786 - DNA, 15 bp, Homo sapiens
agccatgaaaaagtc

SEQ ID NO: 1067787 - DNA, 15 bp, Homo sapiens
tagccatgaaaaagt

SEQ ID NO: 1067788 - DNA, 15 bp, Homo sapiens
ttagccatgaaaaag

SEQ ID NO: 1067789 - DNA, 15 bp, Homo sapiens
tttagccatgaaaaa

SEQ ID NO: 1067790 - DNA, 15 bp, Homo sapiens
atttagccatgaaaa

SEQ ID NO: 1067791 - DNA, 15 bp, Homo sapiens
tatttagccatgaaa

SEQ ID NO: 1067792 - DNA, 15 bp, Homo sapiens
ttatttagccatgaa

SEQ ID NO: 1067793 - DNA, 15 bp, Homo sapiens
tttatttagccatga

SEQ ID NO: 1067794 - DNA, 15 bp, Homo sapiens
gtttatttagccatg

SEQ ID NO: 1067795 - DNA, 15 bp, Homo sapiens
tgtttatttagccat

SEQ ID NO: 1067796 - DNA, 15 bp, Homo sapiens
gtgtttatttagcca

SEQ ID NO: 1067797 - DNA, 15 bp, Homo sapiens
tgtgtttatttagcc

SEQ ID NO: 1067798 - DNA, 15 bp, Homo sapiens
atgtgtttatttagc

SEQ ID NO: 1067799 - DNA, 15 bp, Homo sapiens
tatgtgtttatttag

SEQ ID NO: 1067800 - DNA, 15 bp, Homo sapiens
gtatgtgtttattta

SEQ ID NO: 1067801 - DNA, 15 bp, Homo sapiens
cgtatgtgtttattt

SEQ ID NO: 1067802 - DNA, 15 bp, Homo sapiens
acgtatgtgtttatt

SEQ ID NO: 1067803 - DNA, 15 bp, Homo sapiens
aacgtatgtgtttat

SEQ ID NO: 1067804 - DNA, 15 bp, Homo sapiens
aaacgtatgtgttta

SEQ ID NO: 1067805 - DNA, 15 bp, Homo sapiens
aaaacgtatgtgttt

SEQ ID NO: 1067806 - DNA, 15 bp, Homo sapiens
caaaacgtatgtgtt

SEQ ID NO: 1067807 - DNA, 15 bp, Homo sapiens
tcaaaacgtatgtgt

SEQ ID NO: 1067808 - DNA, 15 bp, Homo sapiens
ctcaaaacgtatgtg

SEQ ID NO: 1067809 - DNA, 15 bp, Homo sapiens
cctcaaaacgtatgt

SEQ ID NO: 1067810 - DNA, 15 bp, Homo sapiens
tcctcaaaacgtatg

SEQ ID NO: 1067811 - DNA, 15 bp, Homo sapiens
ttcctcaaaacgtat

SEQ ID NO: 1067812 - DNA, 15 bp, Homo sapiens
tttcctcaaaacgta

SEQ ID NO: 1067813 - DNA, 15 bp, Homo sapiens
ctttcctcaaaacgt

SEQ ID NO: 1067814 - DNA, 15 bp, Homo sapiens
actttcctcaaaacg

SEQ ID NO: 1067815 - DNA, 15 bp, Homo sapiens
cactttcctcaaaac

SEQ ID NO: 1067816 - DNA, 15 bp, Homo sapiens
tcactttcctcaaaa

SEQ ID NO: 1067817 - DNA, 15 bp, Homo sapiens
ctcactttcctcaaa

SEQ ID NO: 1067818 - DNA, 15 bp, Homo sapiens
tctcactttcctcaa

SEQ ID NO: 1067819 - DNA, 15 bp, Homo sapiens
atctcactttcctca

SEQ ID NO: 1067820 - DNA, 15 bp, Homo sapiens
aatctcactttcctc

SEQ ID NO: 1067821 - DNA, 15 bp, Homo sapiens
aaatctcactttcct

SEQ ID NO: 1067822 - DNA, 15 bp, Homo sapiens
aaaatctcactttcc

SEQ ID NO: 1067823 - DNA, 15 bp, Homo sapiens
taaaatctcactttc

SEQ ID NO: 1067824 - DNA, 15 bp, Homo sapiens
ttaaaatctcacttt

SEQ ID NO: 1067825 - DNA, 15 bp, Homo sapiens
cttaaaatctcactt

SEQ ID NO: 1067826 - DNA, 15 bp, Homo sapiens
tcttaaaatctcact

SEQ ID NO: 1067827 - DNA, 15 bp, Homo sapiens
ttcttaaaatctcac

SEQ ID NO: 1067828 - DNA, 15 bp, Homo sapiens
attcttaaaatctca

SEQ ID NO: 1067829 - DNA, 15 bp, Homo sapiens
tattcttaaaatctc

SEQ ID NO: 1067830 - DNA, 15 bp, Homo sapiens
ctattcttaaaatct

SEQ ID NO: 1067831 - DNA, 15 bp, Homo sapiens
actattcttaaaatc

SEQ ID NO: 1067832 - DNA, 15 bp, Homo sapiens
gactattcttaaaat

SEQ ID NO: 1067833 - DNA, 15 bp, Homo sapiens
tgactattcttaaaa

SEQ ID NO: 1067834 - DNA, 15 bp, Homo sapiens
atgactattcttaaa

SEQ ID NO: 1067835 - DNA, 15 bp, Homo sapiens
aatgactattcttaa

SEQ ID NO: 1067836 - DNA, 15 bp, Homo sapiens
aaatgactattctta

SEQ ID NO: 1067837 - DNA, 15 bp, Homo sapiens
aaaatgactattctt

SEQ ID NO: 1067838 - DNA, 15 bp, Homo sapiens
taaaatgactattct

SEQ ID NO: 1067839 - DNA, 15 bp, Homo sapiens
ataaaatgactattc

SEQ ID NO: 1067840 - DNA, 15 bp, Homo sapiens
tataaaatgactatt

SEQ ID NO: 1067841 - DNA, 15 bp, Homo sapiens
ctataaaatgactat

SEQ ID NO: 1067842 - DNA, 15 bp, Homo sapiens
gctataaaatgacta

SEQ ID NO: 1067843 - DNA, 15 bp, Homo sapiens
agctataaaatgact

SEQ ID NO: 1067844 - DNA, 15 bp, Homo sapiens
tagctataaaatgac

SEQ ID NO: 1067845 - DNA, 15 bp, Homo sapiens
ttagctataaaatga

SEQ ID NO: 1067846 - DNA, 15 bp, Homo sapiens
tttagctataaaatg

SEQ ID NO: 1067847 - DNA, 15 bp, Homo sapiens
ttttagctataaaat

SEQ ID NO: 1067848 - DNA, 15 bp, Homo sapiens
attttagctataaaa

SEQ ID NO: 1067849 - DNA, 15 bp, Homo sapiens
cattttagctataaa

SEQ ID NO: 1067850 - DNA, 15 bp, Homo sapiens
acattttagctataa

SEQ ID NO: 1067851 - DNA, 15 bp, Homo sapiens
tacattttagctata

SEQ ID NO: 1067852 - DNA, 15 bp, Homo sapiens
gtacattttagctat

SEQ ID NO: 1067853 - DNA, 15 bp, Homo sapiens
tgtacattttagcta

SEQ ID NO: 1067854 - DNA, 15 bp, Homo sapiens
gtgtacattttagct

SEQ ID NO: 1067855 - DNA, 15 bp, Homo sapiens
agtgtacattttagc

SEQ ID NO: 1067856 - DNA, 15 bp, Homo sapiens
gagtgtacattttag

SEQ ID NO: 1067857 - DNA, 15 bp, Homo sapiens
agagtgtacatttta

SEQ ID NO: 1067858 - DNA, 15 bp, Homo sapiens
cagagtgtacatttt

SEQ ID NO: 1067859 - DNA, 15 bp, Homo sapiens
ccagagtgtacattt

SEQ ID NO: 1067860 - DNA, 15 bp, Homo sapiens
accagagtgtacatt

SEQ ID NO: 1067861 - DNA, 15 bp, Homo sapiens
aaccagagtgtacat

SEQ ID NO: 1067862 - DNA, 15 bp, Homo sapiens
aaaccagagtgtaca

SEQ ID NO: 1067863 - DNA, 15 bp, Homo sapiens
caaaccagagtgtac

SEQ ID NO: 1067864 - DNA, 15 bp, Homo sapiens
acaaaccagagtgta

SEQ ID NO: 1067865 - DNA, 15 bp, Homo sapiens
cacaaaccagagtgt

SEQ ID NO: 1067866 - DNA, 15 bp, Homo sapiens
gcacaaaccagagtg

SEQ ID NO: 1067867 - DNA, 15 bp, Homo sapiens
agcacaaaccagagt

SEQ ID NO: 1067868 - DNA, 15 bp, Homo sapiens
cagcacaaaccagag

SEQ ID NO: 1067869 - DNA, 15 bp, Homo sapiens
tcagcacaaaccaga

SEQ ID NO: 1067870 - DNA, 15 bp, Homo sapiens
gtcagcacaaaccag

SEQ ID NO: 1067871 - DNA, 15 bp, Homo sapiens
tgtcagcacaaacca

SEQ ID NO: 1067872 - DNA, 15 bp, Homo sapiens
atgtcagcacaaacc

SEQ ID NO: 1067873 - DNA, 15 bp, Homo sapiens
aatgtcagcacaaac

SEQ ID NO: 1067874 - DNA, 15 bp, Homo sapiens
aaatgtcagcacaaa

SEQ ID NO: 1067875 - DNA, 15 bp, Homo sapiens
gaaatgtcagcacaa

SEQ ID NO: 1067876 - DNA, 15 bp, Homo sapiens
agaaatgtcagcaca

SEQ ID NO: 1067877 - DNA, 15 bp, Homo sapiens
cagaaatgtcagcac

SEQ ID NO: 1067878 - DNA, 15 bp, Homo sapiens
ccagaaatgtcagca

SEQ ID NO: 1067879 - DNA, 15 bp, Homo sapiens
gccagaaatgtcagc

SEQ ID NO: 1067880 - DNA, 15 bp, Homo sapiens
agccagaaatgtcag

SEQ ID NO: 1067881 - DNA, 15 bp, Homo sapiens
aagccagaaatgtca

SEQ ID NO: 1067882 - DNA, 15 bp, Homo sapiens
caagccagaaatgtc

SEQ ID NO: 1067883 - DNA, 15 bp, Homo sapiens
acaagccagaaatgt

SEQ ID NO: 1067884 - DNA, 15 bp, Homo sapiens
cacaagccagaaatg

SEQ ID NO: 1067885 - DNA, 15 bp, Homo sapiens
acacaagccagaaat

SEQ ID NO: 1067886 - DNA, 15 bp, Homo sapiens
cacacaagccagaaa

SEQ ID NO: 1067887 - DNA, 15 bp, Homo sapiens
tcacacaagccagaa

SEQ ID NO: 1067888 - DNA, 15 bp, Homo sapiens
gtcacacaagccaga

SEQ ID NO: 1067889 - DNA, 15 bp, Homo sapiens
tgtcacacaagccag

SEQ ID NO: 1067890 - DNA, 15 bp, Homo sapiens
atgtcacacaagcca

SEQ ID NO: 1067891 - DNA, 15 bp, Homo sapiens
aatgtcacacaagcc

SEQ ID NO: 1067892 - DNA, 15 bp, Homo sapiens
aaatgtcacacaagc

SEQ ID NO: 1067893 - DNA, 15 bp, Homo sapiens
gaaatgtcacacaag

SEQ ID NO: 1067894 - DNA, 15 bp, Homo sapiens
tgaaatgtcacacaa

SEQ ID NO: 1067895 - DNA, 15 bp, Homo sapiens
ttgaaatgtcacaca

SEQ ID NO: 1067896 - DNA, 15 bp, Homo sapiens
tttgaaatgtcacac

SEQ ID NO: 1067897 - DNA, 15 bp, Homo sapiens
atttgaaatgtcaca

SEQ ID NO: 1067898 - DNA, 15 bp, Homo sapiens
gatttgaaatgtcac

SEQ ID NO: 1067899 - DNA, 15 bp, Homo sapiens
tgatttgaaatgtca

SEQ ID NO: 1067900 - DNA, 15 bp, Homo sapiens
gtgatttgaaatgtc

SEQ ID NO: 1067901 - DNA, 15 bp, Homo sapiens
tgtgatttgaaatgt

SEQ ID NO: 1067902 - DNA, 15 bp, Homo sapiens
ctgtgatttgaaatg

SEQ ID NO: 1067903 - DNA, 15 bp, Homo sapiens
ctctgtgatttgaaa

SEQ ID NO: 1067904 - DNA, 15 bp, Homo sapiens
actctgtgatttgaa

SEQ ID NO: 1067905 - DNA, 15 bp, Homo sapiens
cactctgtgatttga

SEQ ID NO: 1067906 - DNA, 15 bp, Homo sapiens
acactctgtgatttg

SEQ ID NO: 1067907 - DNA, 15 bp, Homo sapiens
aacactctgtgattt

SEQ ID NO: 1067908 - DNA, 15 bp, Homo sapiens
taacactctgtgatt

SEQ ID NO: 1067909 - DNA, 15 bp, Homo sapiens
ataacactctgtgat

SEQ ID NO: 1067910 - DNA, 15 bp, Homo sapiens
tataacactctgtga

SEQ ID NO: 1067911 - DNA, 15 bp, Homo sapiens
gtataacactctgtg

SEQ ID NO: 1067912 - DNA, 15 bp, Homo sapiens
agtataacactctgt

SEQ ID NO: 1067913 - DNA, 15 bp, Homo sapiens
tagtataacactctg

SEQ ID NO: 1067914 - DNA, 15 bp, Homo sapiens
ctagtataacactct

SEQ ID NO: 1067915 - DNA, 15 bp, Homo sapiens
tctagtataacactc

SEQ ID NO: 1067916 - DNA, 15 bp, Homo sapiens
ttctagtataacact

SEQ ID NO: 1067917 - DNA, 15 bp, Homo sapiens
cttctagtataacac

SEQ ID NO: 1067918 - DNA, 15 bp, Homo sapiens
tcttctagtataaca

SEQ ID NO: 1067919 - DNA, 15 bp, Homo sapiens
ttcttctagtataac

SEQ ID NO: 1067920 - DNA, 15 bp, Homo sapiens
tttcttctagtataa

SEQ ID NO: 1067921 - DNA, 15 bp, Homo sapiens
ttttcttctagtata

SEQ ID NO: 1067922 - DNA, 15 bp, Homo sapiens
gttttcttctagtat

SEQ ID NO: 1067923 - DNA, 15 bp, Homo sapiens
agttttcttctagta

SEQ ID NO: 1067924 - DNA, 15 bp, Homo sapiens
cagttttcttctagt

SEQ ID NO: 1067925 - DNA, 15 bp, Homo sapiens
tcagttttcttctag

SEQ ID NO: 1067926 - DNA, 15 bp, Homo sapiens
ctcagttttcttcta

SEQ ID NO: 1067927 - DNA, 15 bp, Homo sapiens
cctcagttttcttct

SEQ ID NO: 1067928 - DNA, 15 bp, Homo sapiens
tcctcagttttcttc

SEQ ID NO: 1067929 - DNA, 15 bp, Homo sapiens
ttcctcagttttctt

SEQ ID NO: 1067930 - DNA, 15 bp, Homo sapiens
attcctcagttttct

SEQ ID NO: 1067931 - DNA, 15 bp, Homo sapiens
gattcctcagttttc

SEQ ID NO: 1067932 - DNA, 15 bp, Homo sapiens
ggattcctcagtttt

SEQ ID NO: 1067933 - DNA, 15 bp, Homo sapiens
tggattcctcagttt

SEQ ID NO: 1067934 - DNA, 15 bp, Homo sapiens
ctggattcctcagtt

SEQ ID NO: 1067935 - DNA, 15 bp, Homo sapiens
actggattcctcagt

SEQ ID NO: 1067936 - DNA, 15 bp, Homo sapiens
tactggattcctcag

SEQ ID NO: 1067937 - DNA, 15 bp, Homo sapiens
ctactggattcctca

SEQ ID NO: 1067938 - DNA, 15 bp, Homo sapiens
gctactggattcctc

SEQ ID NO: 1067939 - DNA, 15 bp, Homo sapiens
ggctactggattcct

SEQ ID NO: 1067940 - DNA, 15 bp, Homo sapiens
gggctactggattcc

SEQ ID NO: 1067941 - DNA, 15 bp, Homo sapiens
tgggctactggattc

SEQ ID NO: 1067942 - DNA, 15 bp, Homo sapiens
ttgggctactggatt

SEQ ID NO: 1067943 - DNA, 15 bp, Homo sapiens
gttgggctactggat

SEQ ID NO: 1067944 - DNA, 15 bp, Homo sapiens
ggttgggctactgga

SEQ ID NO: 1067945 - DNA, 15 bp, Homo sapiens
gggttgggctactgg

SEQ ID NO: 1067946 - DNA, 15 bp, Homo sapiens
tgggttgggctactg

SEQ ID NO: 1067947 - DNA, 15 bp, Homo sapiens
gtgggttgggctact

SEQ ID NO: 1067948 - DNA, 15 bp, Homo sapiens
agtgggttgggctac

SEQ ID NO: 1067949 - DNA, 15 bp, Homo sapiens
gagtgggttgggcta

SEQ ID NO: 1067950 - DNA, 15 bp, Homo sapiens
tgagtgggttgggct

SEQ ID NO: 1067951 - DNA, 15 bp, Homo sapiens
atgagtgggttgggc

SEQ ID NO: 1067952 - DNA, 15 bp, Homo sapiens
aatgagtgggttggg

SEQ ID NO: 1067953 - DNA, 15 bp, Homo sapiens
aaatgagtgggttgg

SEQ ID NO: 1067954 - DNA, 15 bp, Homo sapiens
caaatgagtgggttg

SEQ ID NO: 1067955 - DNA, 15 bp, Homo sapiens
acaaatgagtgggtt

SEQ ID NO: 1067956 - DNA, 15 bp, Homo sapiens
gacaaatgagtgggt

SEQ ID NO: 1067957 - DNA, 15 bp, Homo sapiens
tgacaaatgagtggg

SEQ ID NO: 1067958 - DNA, 15 bp, Homo sapiens
ctgacaaatgagtgg

SEQ ID NO: 1067959 - DNA, 15 bp, Homo sapiens
tctgacaaatgagtg

SEQ ID NO: 1067960 - DNA, 15 bp, Homo sapiens
atctgacaaatgagt

SEQ ID NO: 1067961 - DNA, 15 bp, Homo sapiens
catctgacaaatgag

SEQ ID NO: 1067962 - DNA, 15 bp, Homo sapiens
tcatctgacaaatga

SEQ ID NO: 1067963 - DNA, 15 bp, Homo sapiens
ctcatctgacaaatg

SEQ ID NO: 1067964 - DNA, 15 bp, Homo sapiens
tctcatctgacaaat

SEQ ID NO: 1067965 - DNA, 15 bp, Homo sapiens
ttctcatctgacaaa

SEQ ID NO: 1067966 - DNA, 15 bp, Homo sapiens
tttctcatctgacaa

SEQ ID NO: 1067967 - DNA, 15 bp, Homo sapiens
ttttctcatctgaca

SEQ ID NO: 1067968 - DNA, 15 bp, Homo sapiens
gttttctcatctgac

SEQ ID NO: 1067969 - DNA, 15 bp, Homo sapiens
agttttctcatctga

SEQ ID NO: 1067970 - DNA, 15 bp, Homo sapiens
cagttttctcatctg

SEQ ID NO: 1067971 - DNA, 15 bp, Homo sapiens
tcagttttctcatct

SEQ ID NO: 1067972 - DNA, 15 bp, Homo sapiens
atcagttttctcatc

SEQ ID NO: 1067973 - DNA, 15 bp, Homo sapiens
aatcagttttctcat

SEQ ID NO: 1067974 - DNA, 15 bp, Homo sapiens
gaatcagttttctca

SEQ ID NO: 1067975 - DNA, 15 bp, Homo sapiens
ggaatcagttttctc

SEQ ID NO: 1067976 - DNA, 15 bp, Homo sapiens
gggaatcagttttct

SEQ ID NO: 1067977 - DNA, 15 bp, Homo sapiens
tgggaatcagttttc

SEQ ID NO: 1067978 - DNA, 15 bp, Homo sapiens
ctgggaatcagtttt

SEQ ID NO: 1067979 - DNA, 15 bp, Homo sapiens
tctgggaatcagttt

SEQ ID NO: 1067980 - DNA, 15 bp, Homo sapiens
ttctgggaatcagtt

SEQ ID NO: 1067981 - DNA, 15 bp, Homo sapiens
tttctgggaatcagt

SEQ ID NO: 1067982 - DNA, 15 bp, Homo sapiens
atttctgggaatcag

SEQ ID NO: 1067983 - DNA, 15 bp, Homo sapiens
aatttctgggaatca

SEQ ID NO: 1067984 - DNA, 15 bp, Homo sapiens
caatttctgggaatc

SEQ ID NO: 1067985 - DNA, 15 bp, Homo sapiens
acaatttctgggaat

SEQ ID NO: 1067986 - DNA, 15 bp, Homo sapiens
gacaatttctgggaa

SEQ ID NO: 1067987 - DNA, 15 bp, Homo sapiens
ggacaatttctggga

SEQ ID NO: 1067988 - DNA, 15 bp, Homo sapiens
tggacaatttctggg

SEQ ID NO: 1067989 - DNA, 15 bp, Homo sapiens
ttggacaatttctgg

SEQ ID NO: 1067990 - DNA, 15 bp, Homo sapiens
gttggacaatttctg

SEQ ID NO: 1067991 - DNA, 15 bp, Homo sapiens
tgttggacaatttct

SEQ ID NO: 1067992 - DNA, 15 bp, Homo sapiens
ttgttggacaatttc

SEQ ID NO: 1067993 - DNA, 15 bp, Homo sapiens
cttgttggacaattt

SEQ ID NO: 1067994 - DNA, 15 bp, Homo sapiens
acttgttggacaatt

SEQ ID NO: 1067995 - DNA, 15 bp, Homo sapiens
aacttgttggacaat

SEQ ID NO: 1067996 - DNA, 15 bp, Homo sapiens
taacttgttggacaa

SEQ ID NO: 1067997 - DNA, 15 bp, Homo sapiens
ataacttgttggaca

SEQ ID NO: 1067998 - DNA, 15 bp, Homo sapiens
aataacttgttggac

SEQ ID NO: 1067999 - DNA, 15 bp, Homo sapiens
aaataacttgttgga

SEQ ID NO: 1068000 - DNA, 15 bp, Homo sapiens
caaataacttgttgg

SEQ ID NO: 1068001 - DNA, 15 bp, Homo sapiens
acaaataacttgttg

SEQ ID NO: 1068002 - DNA, 15 bp, Homo sapiens
aacaaataacttgtt

SEQ ID NO: 1068003 - DNA, 15 bp, Homo sapiens
aaacaaataacttgt

SEQ ID NO: 1068004 - DNA, 15 bp, Homo sapiens
taaacaaataacttg

SEQ ID NO: 1068005 - DNA, 15 bp, Homo sapiens
ataaacaaataactt

SEQ ID NO: 1068006 - DNA, 15 bp, Homo sapiens
gataaacaaataact

SEQ ID NO: 1068007 - DNA, 15 bp, Homo sapiens
tgataaacaaataac

SEQ ID NO: 1068008 - DNA, 15 bp, Homo sapiens
gtgataaacaaataa

SEQ ID NO: 1068009 - DNA, 15 bp, Homo sapiens
tgtgataaacaaata

SEQ ID NO: 1068010 - DNA, 15 bp, Homo sapiens
atgtgataaacaaat

SEQ ID NO: 1068011 - DNA, 15 bp, Homo sapiens
tatgtgataaacaaa

SEQ ID NO: 1068012 - DNA, 15 bp, Homo sapiens
ctatgtgataaacaa

SEQ ID NO: 1068013 - DNA, 15 bp, Homo sapiens
gctatgtgataaaca

SEQ ID NO: 1068014 - DNA, 15 bp, Homo sapiens
agctatgtgataaac

SEQ ID NO: 1068015 - DNA, 15 bp, Homo sapiens
cagctatgtgataaa

SEQ ID NO: 1068016 - DNA, 15 bp, Homo sapiens
gcagctatgtgataa

SEQ ID NO: 1068017 - DNA, 15 bp, Homo sapiens
agcagctatgtgata

SEQ ID NO: 1068018 - DNA, 15 bp, Homo sapiens
cagcagctatgtgat

SEQ ID NO: 1068019 - DNA, 15 bp, Homo sapiens
gcagcagctatgtga

SEQ ID NO: 1068020 - DNA, 15 bp, Homo sapiens
agcagcagctatgtg

SEQ ID NO: 1068021 - DNA, 15 bp, Homo sapiens
tagcagcagctatgt

SEQ ID NO: 1068022 - DNA, 15 bp, Homo sapiens
ttagcagcagctatg

SEQ ID NO: 1068023 - DNA, 15 bp, Homo sapiens
tttagcagcagctat

SEQ ID NO: 1068024 - DNA, 15 bp, Homo sapiens
ttttagcagcagcta

SEQ ID NO: 1068025 - DNA, 15 bp, Homo sapiens
gttttagcagcagct

SEQ ID NO: 1068026 - DNA, 15 bp, Homo sapiens
ggttttagcagcagc

SEQ ID NO: 1068027 - DNA, 15 bp, Homo sapiens
gggttttagcagcag

SEQ ID NO: 1068028 - DNA, 15 bp, Homo sapiens
tgggttttagcagca

SEQ ID NO: 1068029 - DNA, 15 bp, Homo sapiens
ctgggttttagcagc

SEQ ID NO: 1068030 - DNA, 15 bp, Homo sapiens
cctgggttttagcag

SEQ ID NO: 1068031 - DNA, 15 bp, Homo sapiens
gcctgggttttagca

SEQ ID NO: 1068032 - DNA, 15 bp, Homo sapiens
agcctgggttttagc

SEQ ID NO: 1068033 - DNA, 15 bp, Homo sapiens
cagcctgggttttag

SEQ ID NO: 1068034 - DNA, 15 bp, Homo sapiens
gcagcctgggtttta

SEQ ID NO: 1068035 - DNA, 15 bp, Homo sapiens
agcagcctgggtttt

SEQ ID NO: 1068036 - DNA, 15 bp, Homo sapiens
aagcagcctgggttt

SEQ ID NO: 1068037 - DNA, 15 bp, Homo sapiens
caagcagcctgggtt

SEQ ID NO: 1068038 - DNA, 15 bp, Homo sapiens
ccaagcagcctgggt

SEQ ID NO: 1068039 - DNA, 15 bp, Homo sapiens
accaagcagcctggg

SEQ ID NO: 1068040 - DNA, 15 bp, Homo sapiens
aaccaagcagcctgg

SEQ ID NO: 1068041 - DNA, 15 bp, Homo sapiens
aaaccaagcagcctg

SEQ ID NO: 1068042 - DNA, 15 bp, Homo sapiens
gaaaccaagcagcct

SEQ ID NO: 1068043 - DNA, 15 bp, Homo sapiens
agaaaccaagcagcc

SEQ ID NO: 1068044 - DNA, 15 bp, Homo sapiens
tagaaaccaagcagc

SEQ ID NO: 1068045 - DNA, 15 bp, Homo sapiens
ctagaaaccaagcag

SEQ ID NO: 1068046 - DNA, 15 bp, Homo sapiens
cctagaaaccaagca

SEQ ID NO: 1068047 - DNA, 15 bp, Homo sapiens
gcctagaaaccaagc

SEQ ID NO: 1068048 - DNA, 15 bp, Homo sapiens
tgcctagaaaccaag

SEQ ID NO: 1068049 - DNA, 15 bp, Homo sapiens
atgcctagaaaccaa

SEQ ID NO: 1068050 - DNA, 15 bp, Homo sapiens
catgcctagaaacca

SEQ ID NO: 1068051 - DNA, 15 bp, Homo sapiens
acatgcctagaaacc

SEQ ID NO: 1068052 - DNA, 15 bp, Homo sapiens
cacatgcctagaaac

SEQ ID NO: 1068053 - DNA, 15 bp, Homo sapiens
acacatgcctagaaa

SEQ ID NO: 1068054 - DNA, 15 bp, Homo sapiens
aacacatgcctagaa

SEQ ID NO: 1068055 - DNA, 15 bp, Homo sapiens
aaacacatgcctaga

SEQ ID NO: 1068056 - DNA, 15 bp, Homo sapiens
aaaacacatgcctag

SEQ ID NO: 1068057 - DNA, 15 bp, Homo sapiens
aaaaacacatgccta

SEQ ID NO: 1068058 - DNA, 15 bp, Homo sapiens
gaaaaacacatgcct

SEQ ID NO: 1068059 - DNA, 15 bp, Homo sapiens
tgaaaaacacatgcc

SEQ ID NO: 1068060 - DNA, 15 bp, Homo sapiens
atgaaaaacacatgc

SEQ ID NO: 1068061 - DNA, 15 bp, Homo sapiens
catgaaaaacacatg

SEQ ID NO: 1068062 - DNA, 15 bp, Homo sapiens
gcatgaaaaacacat

SEQ ID NO: 1068063 - DNA, 15 bp, Homo sapiens
agcatgaaaaacaca

SEQ ID NO: 1068064 - DNA, 15 bp, Homo sapiens
tagcatgaaaaacac

SEQ ID NO: 1068065 - DNA, 15 bp, Homo sapiens
gtagcatgaaaaaca

SEQ ID NO: 1068066 - DNA, 15 bp, Homo sapiens
tgtagcatgaaaaac

SEQ ID NO: 1068067 - DNA, 15 bp, Homo sapiens
atgtagcatgaaaaa

SEQ ID NO: 1068068 - DNA, 15 bp, Homo sapiens
aatgtagcatgaaaa

SEQ ID NO: 1068069 - DNA, 15 bp, Homo sapiens
aaatgtagcatgaaa

SEQ ID NO: 1068070 - DNA, 15 bp, Homo sapiens
taaatgtagcatgaa

SEQ ID NO: 1068071 - DNA, 15 bp, Homo sapiens
ttaaatgtagcatga

SEQ ID NO: 1068072 - DNA, 15 bp, Homo sapiens
tttaaatgtagcatg

SEQ ID NO: 1068073 - DNA, 15 bp, Homo sapiens
ttttaaatgtagcat

SEQ ID NO: 1068074 - DNA, 15 bp, Homo sapiens
tttttaaatgtagca

SEQ ID NO: 1068075 - DNA, 15 bp, Homo sapiens
ttttttaaatgtagc

SEQ ID NO: 1068076 - DNA, 15 bp, Homo sapiens
tttttttaaatgtag

SEQ ID NO: 1068077 - DNA, 15 bp, Homo sapiens
ttttttttaaatgta

SEQ ID NO: 1068078 - DNA, 15 bp, Homo sapiens
tttttttttaaatgt

SEQ ID NO: 1068079 - DNA, 15 bp, Homo sapiens
gtttttttttttaaa

SEQ ID NO: 1068080 - DNA, 15 bp, Homo sapiens
ctgttttttttttta

SEQ ID NO: 1068081 - DNA, 15 bp, Homo sapiens
tctgttttttttttt

SEQ ID NO: 1068082 - DNA, 15 bp, Homo sapiens
atctgtttttttttt

SEQ ID NO: 1068083 - DNA, 15 bp, Homo sapiens
aatctgttttttttt

SEQ ID NO: 1068084 - DNA, 15 bp, Homo sapiens
taatctgtttttttt

SEQ ID NO: 1068085 - DNA, 15 bp, Homo sapiens
ttaatctgttttttt

SEQ ID NO: 1068086 - DNA, 15 bp, Homo sapiens
attaatctgtttttt

SEQ ID NO: 1068087 - DNA, 15 bp, Homo sapiens
tattaatctgttttt

SEQ ID NO: 1068088 - DNA, 15 bp, Homo sapiens
ttattaatctgtttt

SEQ ID NO: 1068089 - DNA, 15 bp, Homo sapiens
attattaatctgttt

SEQ ID NO: 1068090 - DNA, 15 bp, Homo sapiens
cattattaatctgtt

SEQ ID NO: 1068091 - DNA, 15 bp, Homo sapiens
acattattaatctgt

SEQ ID NO: 1068092 - DNA, 15 bp, Homo sapiens
aacattattaatctg

SEQ ID NO: 1068093 - DNA, 15 bp, Homo sapiens
caacattattaatct

SEQ ID NO: 1068094 - DNA, 15 bp, Homo sapiens
acaacattattaatc

SEQ ID NO: 1068095 - DNA, 15 bp, Homo sapiens
aacaacattattaat

SEQ ID NO: 1068096 - DNA, 15 bp, Homo sapiens
taacaacattattaa

SEQ ID NO: 1068097 - DNA, 15 bp, Homo sapiens
ctaacaacattatta

SEQ ID NO: 1068098 - DNA, 15 bp, Homo sapiens
actaacaacattatt

SEQ ID NO: 1068099 - DNA, 15 bp, Homo sapiens
tactaacaacattat

SEQ ID NO: 1068100 - DNA, 15 bp, Homo sapiens
atactaacaacatta

SEQ ID NO: 1068101 - DNA, 15 bp, Homo sapiens
aatactaacaacatt

SEQ ID NO: 1068102 - DNA, 15 bp, Homo sapiens
taatactaacaacat

SEQ ID NO: 1068103 - DNA, 15 bp, Homo sapiens
ctaatactaacaaca

SEQ ID NO: 1068104 - DNA, 15 bp, Homo sapiens
cctaatactaacaac

SEQ ID NO: 1068105 - DNA, 15 bp, Homo sapiens
acctaatactaacaa

SEQ ID NO: 1068106 - DNA, 15 bp, Homo sapiens
tacctaatactaaca

SEQ ID NO: 1068107 - DNA, 15 bp, Homo sapiens
ctacctaatactaac

SEQ ID NO: 1068108 - DNA, 15 bp, Homo sapiens
tctacctaatactaa

SEQ ID NO: 1068109 - DNA, 15 bp, Homo sapiens
ctctacctaatacta

SEQ ID NO: 1068110 - DNA, 15 bp, Homo sapiens
actctacctaatact

SEQ ID NO: 1068111 - DNA, 15 bp, Homo sapiens
aactctacctaatac

SEQ ID NO: 1068112 - DNA, 15 bp, Homo sapiens
taactctacctaata

SEQ ID NO: 1068113 - DNA, 15 bp, Homo sapiens
ataactctacctaat

SEQ ID NO: 1068114 - DNA, 15 bp, Homo sapiens
aataactctacctaa

SEQ ID NO: 1068115 - DNA, 15 bp, Homo sapiens
taataactctaccta

SEQ ID NO: 1068116 - DNA, 15 bp, Homo sapiens
ttaataactctacct

SEQ ID NO: 1068117 - DNA, 15 bp, Homo sapiens
tttaataactctacc

SEQ ID NO: 1068118 - DNA, 15 bp, Homo sapiens
ctttaataactctac

SEQ ID NO: 1068119 - DNA, 15 bp, Homo sapiens
tctttaataactcta

SEQ ID NO: 1068120 - DNA, 15 bp, Homo sapiens
gtctttaataactct

SEQ ID NO: 1068121 - DNA, 15 bp, Homo sapiens
ggtctttaataactc

SEQ ID NO: 1068122 - DNA, 15 bp, Homo sapiens
tggtctttaataact

SEQ ID NO: 1068123 - DNA, 15 bp, Homo sapiens
ctggtctttaataac

SEQ ID NO: 1068124 - DNA, 15 bp, Homo sapiens
actggtctttaataa

SEQ ID NO: 1068125 - DNA, 15 bp, Homo sapiens
tactggtctttaata

SEQ ID NO: 1068126 - DNA, 15 bp, Homo sapiens
ttactggtctttaat

SEQ ID NO: 1068127 - DNA, 15 bp, Homo sapiens
gttactggtctttaa

SEQ ID NO: 1068128 - DNA, 15 bp, Homo sapiens
ggttactggtcttta

SEQ ID NO: 1068129 - DNA, 15 bp, Homo sapiens
tggttactggtcttt

SEQ ID NO: 1068130 - DNA, 15 bp, Homo sapiens
atggttactggtctt

SEQ ID NO: 1068131 - DNA, 15 bp, Homo sapiens
catggttactggtct

SEQ ID NO: 1068132 - DNA, 15 bp, Homo sapiens
tcatggttactggtc

SEQ ID NO: 1068133 - DNA, 15 bp, Homo sapiens
ctcatggttactggt

SEQ ID NO: 1068134 - DNA, 15 bp, Homo sapiens
tctcatggttactgg

SEQ ID NO: 1068135 - DNA, 15 bp, Homo sapiens
gtctcatggttactg

SEQ ID NO: 1068136 - DNA, 15 bp, Homo sapiens
ggtctcatggttact

SEQ ID NO: 1068137 - DNA, 15 bp, Homo sapiens
aggtctcatggttac

SEQ ID NO: 1068138 - DNA, 15 bp, Homo sapiens
caggtctcatggtta

SEQ ID NO: 1068139 - DNA, 15 bp, Homo sapiens
gcaggtctcatggtt

SEQ ID NO: 1068140 - DNA, 15 bp, Homo sapiens
agcaggtctcatggt

SEQ ID NO: 1068141 - DNA, 15 bp, Homo sapiens
aagcaggtctcatgg

SEQ ID NO: 1068142 - DNA, 15 bp, Homo sapiens
aaagcaggtctcatg

SEQ ID NO: 1068143 - DNA, 15 bp, Homo sapiens
taaagcaggtctcat

SEQ ID NO: 1068144 - DNA, 15 bp, Homo sapiens
ttaaagcaggtctca

SEQ ID NO: 1068145 - DNA, 15 bp, Homo sapiens
cttaaagcaggtctc

SEQ ID NO: 1068146 - DNA, 15 bp, Homo sapiens
gcttaaagcaggtct

SEQ ID NO: 1068147 - DNA, 15 bp, Homo sapiens
ggcttaaagcaggtc

SEQ ID NO: 1068148 - DNA, 15 bp, Homo sapiens
gggcttaaagcaggt

SEQ ID NO: 1068149 - DNA, 15 bp, Homo sapiens
tgggcttaaagcagg

SEQ ID NO: 1068150 - DNA, 15 bp, Homo sapiens
atgggcttaaagcag

SEQ ID NO: 1068151 - DNA, 15 bp, Homo sapiens
catgggcttaaagca

SEQ ID NO: 1068152 - DNA, 15 bp, Homo sapiens
ccatgggcttaaagc

SEQ ID NO: 1068153 - DNA, 15 bp, Homo sapiens
tccatgggcttaaag

SEQ ID NO: 1068154 - DNA, 15 bp, Homo sapiens
ctccatgggcttaaa

SEQ ID NO: 1068155 - DNA, 15 bp, Homo sapiens
actccatgggcttaa

SEQ ID NO: 1068156 - DNA, 15 bp, Homo sapiens
gactccatgggctta

SEQ ID NO: 1068157 - DNA, 15 bp, Homo sapiens
tgactccatgggctt

SEQ ID NO: 1068158 - DNA, 15 bp, Homo sapiens
ctgactccatgggct

SEQ ID NO: 1068159 - DNA, 15 bp, Homo sapiens
gctgactccatgggc

SEQ ID NO: 1068160 - DNA, 15 bp, Homo sapiens
agctgactccatggg

SEQ ID NO: 1068161 - DNA, 15 bp, Homo sapiens
cagctgactccatgg

SEQ ID NO: 1068162 - DNA, 15 bp, Homo sapiens
acagctgactccatg

SEQ ID NO: 1068163 - DNA, 15 bp, Homo sapiens
gacagctgactccat

SEQ ID NO: 1068164 - DNA, 15 bp, Homo sapiens
ggacagctgactcca

SEQ ID NO: 1068165 - DNA, 15 bp, Homo sapiens
cggacagctgactcc

SEQ ID NO: 1068166 - DNA, 15 bp, Homo sapiens
acggacagctgactc

SEQ ID NO: 1068167 - DNA, 15 bp, Homo sapiens
aacggacagctgact

SEQ ID NO: 1068168 - DNA, 15 bp, Homo sapiens
caacggacagctgac

SEQ ID NO: 1068169 - DNA, 15 bp, Homo sapiens
acaacggacagctga

SEQ ID NO: 1068170 - DNA, 15 bp, Homo sapiens
tacaacggacagctg

SEQ ID NO: 1068171 - DNA, 15 bp, Homo sapiens
atacaacggacagct

SEQ ID NO: 1068172 - DNA, 15 bp, Homo sapiens
gatacaacggacagc

SEQ ID NO: 1068173 - DNA, 15 bp, Homo sapiens
tgatacaacggacag

SEQ ID NO: 1068174 - DNA, 15 bp, Homo sapiens
atgatacaacggaca

SEQ ID NO: 1068175 - DNA, 15 bp, Homo sapiens
aatgatacaacggac

SEQ ID NO: 1068176 - DNA, 15 bp, Homo sapiens
caatgatacaacgga

SEQ ID NO: 1068177 - DNA, 15 bp, Homo sapiens
tcaatgatacaacgg

SEQ ID NO: 1068178 - DNA, 15 bp, Homo sapiens
ttcaatgatacaacg

SEQ ID NO: 1068179 - DNA, 15 bp, Homo sapiens
attcaatgatacaac

SEQ ID NO: 1068180 - DNA, 15 bp, Homo sapiens
tattcaatgatacaa

SEQ ID NO: 1068181 - DNA, 15 bp, Homo sapiens
atattcaatgataca

SEQ ID NO: 1068182 - DNA, 15 bp, Homo sapiens
aatattcaatgatac

SEQ ID NO: 1068183 - DNA, 15 bp, Homo sapiens
taatattcaatgata

SEQ ID NO: 1068184 - DNA, 15 bp, Homo sapiens
ataatattcaatgat

SEQ ID NO: 1068185 - DNA, 15 bp, Homo sapiens
gataatattcaatga

SEQ ID NO: 1068186 - DNA, 15 bp, Homo sapiens
ggataatattcaatg

SEQ ID NO: 1068187 - DNA, 15 bp, Homo sapiens
tggataatattcaat

SEQ ID NO: 1068188 - DNA, 15 bp, Homo sapiens
ctggataatattcaa

SEQ ID NO: 1068189 - DNA, 15 bp, Homo sapiens
actggataatattca

SEQ ID NO: 1068190 - DNA, 15 bp, Homo sapiens
aactggataatattc

SEQ ID NO: 1068191 - DNA, 15 bp, Homo sapiens
gaactggataatatt

SEQ ID NO: 1068192 - DNA, 15 bp, Homo sapiens
ggaactggataatat

SEQ ID NO: 1068193 - DNA, 15 bp, Homo sapiens
aggaactggataata

SEQ ID NO: 1068194 - DNA, 15 bp, Homo sapiens
aaggaactggataat

SEQ ID NO: 1068195 - DNA, 15 bp, Homo sapiens
aaaggaactggataa

SEQ ID NO: 1068196 - DNA, 15 bp, Homo sapiens
gaaaggaactggata

SEQ ID NO: 1068197 - DNA, 15 bp, Homo sapiens
ggaaaggaactggat

SEQ ID NO: 1068198 - DNA, 15 bp, Homo sapiens
tggaaaggaactgga

SEQ ID NO: 1068199 - DNA, 15 bp, Homo sapiens
ttggaaaggaactgg

SEQ ID NO: 1068200 - DNA, 15 bp, Homo sapiens
tttggaaaggaactg

SEQ ID NO: 1068201 - DNA, 15 bp, Homo sapiens
atttggaaaggaact

SEQ ID NO: 1068202 - DNA, 15 bp, Homo sapiens
catttggaaaggaac

SEQ ID NO: 1068203 - DNA, 15 bp, Homo sapiens
acatttggaaaggaa

SEQ ID NO: 1068204 - DNA, 15 bp, Homo sapiens
aacatttggaaagga

SEQ ID NO: 1068205 - DNA, 15 bp, Homo sapiens
aaacatttggaaagg

SEQ ID NO: 1068206 - DNA, 15 bp, Homo sapiens
aaaacatttggaaag

SEQ ID NO: 1068207 - DNA, 15 bp, Homo sapiens
gaaaacatttggaaa

SEQ ID NO: 1068208 - DNA, 15 bp, Homo sapiens
agaaaacatttggaa

SEQ ID NO: 1068209 - DNA, 15 bp, Homo sapiens
aagaaaacatttgga

SEQ ID NO: 1068210 - DNA, 15 bp, Homo sapiens
aaagaaaacatttgg

SEQ ID NO: 1068211 - DNA, 15 bp, Homo sapiens
caaagaaaacatttg

SEQ ID NO: 1068212 - DNA, 15 bp, Homo sapiens
acaaagaaaacattt

SEQ ID NO: 1068213 - DNA, 15 bp, Homo sapiens
aacaaagaaaacatt

SEQ ID NO: 1068214 - DNA, 15 bp, Homo sapiens
aaacaaagaaaacat

SEQ ID NO: 1068215 - DNA, 15 bp, Homo sapiens
aaaacaaagaaaaca

SEQ ID NO: 1068216 - DNA, 15 bp, Homo sapiens
caaaacaaagaaaac

SEQ ID NO: 1068217 - DNA, 15 bp, Homo sapiens
gcaaaacaaagaaaa

SEQ ID NO: 1068218 - DNA, 15 bp, Homo sapiens
agcaaaacaaagaaa

SEQ ID NO: 1068219 - DNA, 15 bp, Homo sapiens
aagcaaaacaaagaa

SEQ ID NO: 1068220 - DNA, 15 bp, Homo sapiens
aaagcaaaacaaaga

SEQ ID NO: 1068221 - DNA, 15 bp, Homo sapiens
caaagcaaaacaaag

SEQ ID NO: 1068222 - DNA, 15 bp, Homo sapiens
ccaaagcaaaacaaa

SEQ ID NO: 1068223 - DNA, 15 bp, Homo sapiens
cccaaagcaaaacaa

SEQ ID NO: 1068224 - DNA, 15 bp, Homo sapiens
acccaaagcaaaaca

SEQ ID NO: 1068225 - DNA, 15 bp, Homo sapiens
tacccaaagcaaaac

SEQ ID NO: 1068226 - DNA, 15 bp, Homo sapiens
ttacccaaagcaaaa

SEQ ID NO: 1068227 - DNA, 15 bp, Homo sapiens
attacccaaagcaaa

SEQ ID NO: 1068228 - DNA, 15 bp, Homo sapiens
cattacccaaagcaa

SEQ ID NO: 1068229 - DNA, 15 bp, Homo sapiens
tcattacccaaagca

SEQ ID NO: 1068230 - DNA, 15 bp, Homo sapiens
gtcattacccaaagc

SEQ ID NO: 1068231 - DNA, 15 bp, Homo sapiens
tgtcattacccaaag

SEQ ID NO: 1068232 - DNA, 15 bp, Homo sapiens
ttgtcattacccaaa

SEQ ID NO: 1068233 - DNA, 15 bp, Homo sapiens
gttgtcattacccaa

SEQ ID NO: 1068234 - DNA, 15 bp, Homo sapiens
tgttgtcattaccca

SEQ ID NO: 1068235 - DNA, 15 bp, Homo sapiens
atgttgtcattaccc

SEQ ID NO: 1068236 - DNA, 15 bp, Homo sapiens
tatgttgtcattacc

SEQ ID NO: 1068237 - DNA, 15 bp, Homo sapiens
ttatgttgtcattac

SEQ ID NO: 1068238 - DNA, 15 bp, Homo sapiens
attatgttgtcatta

SEQ ID NO: 1068239 - DNA, 15 bp, Homo sapiens
gattatgttgtcatt

SEQ ID NO: 1068240 - DNA, 15 bp, Homo sapiens
agattatgttgtcat

SEQ ID NO: 1068241 - DNA, 15 bp, Homo sapiens
cagattatgttgtca

SEQ ID NO: 1068242 - DNA, 15 bp, Homo sapiens
gcagattatgttgtc

SEQ ID NO: 1068243 - DNA, 15 bp, Homo sapiens
tgcagattatgttgt

SEQ ID NO: 1068244 - DNA, 15 bp, Homo sapiens
gtgcagattatgttg

SEQ ID NO: 1068245 - DNA, 15 bp, Homo sapiens
tgtgcagattatgtt

SEQ ID NO: 1068246 - DNA, 15 bp, Homo sapiens
atgtgcagattatgt

SEQ ID NO: 1068247 - DNA, 15 bp, Homo sapiens
aatgtgcagattatg

SEQ ID NO: 1068248 - DNA, 15 bp, Homo sapiens
aaatgtgcagattat

SEQ ID NO: 1068249 - DNA, 15 bp, Homo sapiens
aaaatgtgcagatta

SEQ ID NO: 1068250 - DNA, 15 bp, Homo sapiens
taaaatgtgcagatt

SEQ ID NO: 1068251 - DNA, 15 bp, Homo sapiens
ctaaaatgtgcagat

SEQ ID NO: 1068252 - DNA, 15 bp, Homo sapiens
tctaaaatgtgcaga

SEQ ID NO: 1068253 - DNA, 15 bp, Homo sapiens
atctaaaatgtgcag

SEQ ID NO: 1068254 - DNA, 15 bp, Homo sapiens
catctaaaatgtgca

SEQ ID NO: 1068255 - DNA, 15 bp, Homo sapiens
gcatctaaaatgtgc

SEQ ID NO: 1068256 - DNA, 15 bp, Homo sapiens
ggcatctaaaatgtg

SEQ ID NO: 1068257 - DNA, 15 bp, Homo sapiens
tggcatctaaaatgt

SEQ ID NO: 1068258 - DNA, 15 bp, Homo sapiens
ttggcatctaaaatg

SEQ ID NO: 1068259 - DNA, 15 bp, Homo sapiens
tttggcatctaaaat

SEQ ID NO: 1068260 - DNA, 15 bp, Homo sapiens
ttttggcatctaaaa

SEQ ID NO: 1068261 - DNA, 15 bp, Homo sapiens
attttggcatctaaa

SEQ ID NO: 1068262 - DNA, 15 bp, Homo sapiens
tattttggcatctaa

SEQ ID NO: 1068263 - DNA, 15 bp, Homo sapiens
ttattttggcatcta

SEQ ID NO: 1068264 - DNA, 15 bp, Homo sapiens
cttattttggcatct

SEQ ID NO: 1068265 - DNA, 15 bp, Homo sapiens
tcttattttggcatc

SEQ ID NO: 1068266 - DNA, 15 bp, Homo sapiens
ttcttattttggcat

SEQ ID NO: 1068267 - DNA, 15 bp, Homo sapiens
tttcttattttggca

SEQ ID NO: 1068268 - DNA, 15 bp, Homo sapiens
ttttcttattttggc

SEQ ID NO: 1068269 - DNA, 15 bp, Homo sapiens
tttttcttattttgg

SEQ ID NO: 1068270 - DNA, 15 bp, Homo sapiens
ctttttcttattttg

SEQ ID NO: 1068271 - DNA, 15 bp, Homo sapiens
actttttcttatttt

SEQ ID NO: 1068272 - DNA, 15 bp, Homo sapiens
tactttttcttattt

SEQ ID NO: 1068273 - DNA, 15 bp, Homo sapiens
ttactttttcttatt

SEQ ID NO: 1068274 - DNA, 15 bp, Homo sapiens
attactttttcttat

SEQ ID NO: 1068275 - DNA, 15 bp, Homo sapiens
gattactttttctta

SEQ ID NO: 1068276 - DNA, 15 bp, Homo sapiens
ggattactttttctt

SEQ ID NO: 1068277 - DNA, 15 bp, Homo sapiens
aggattactttttct

SEQ ID NO: 1068278 - DNA, 15 bp, Homo sapiens
caggattactttttc

SEQ ID NO: 1068279 - DNA, 15 bp, Homo sapiens
acaggattacttttt

SEQ ID NO: 1068280 - DNA, 15 bp, Homo sapiens
aacaggattactttt

SEQ ID NO: 1068281 - DNA, 15 bp, Homo sapiens
gaacaggattacttt

SEQ ID NO: 1068282 - DNA, 15 bp, Homo sapiens
ggaacaggattactt

SEQ ID NO: 1068283 - DNA, 15 bp, Homo sapiens
aggaacaggattact

SEQ ID NO: 1068284 - DNA, 15 bp, Homo sapiens
taggaacaggattac

SEQ ID NO: 1068285 - DNA, 15 bp, Homo sapiens
ataggaacaggatta

SEQ ID NO: 1068286 - DNA, 15 bp, Homo sapiens
aataggaacaggatt

SEQ ID NO: 1068287 - DNA, 15 bp, Homo sapiens
gaataggaacaggat

SEQ ID NO: 1068288 - DNA, 15 bp, Homo sapiens
agaataggaacagga

SEQ ID NO: 1068289 - DNA, 15 bp, Homo sapiens
aagaataggaacagg

SEQ ID NO: 1068290 - DNA, 15 bp, Homo sapiens
aaagaataggaacag

SEQ ID NO: 1068291 - DNA, 15 bp, Homo sapiens
caaagaataggaaca

SEQ ID NO: 1068292 - DNA, 15 bp, Homo sapiens
acaaagaataggaac

SEQ ID NO: 1068293 - DNA, 15 bp, Homo sapiens
aacaaagaataggaa

SEQ ID NO: 1068294 - DNA, 15 bp, Homo sapiens
gaacaaagaatagga

SEQ ID NO: 1068295 - DNA, 15 bp, Homo sapiens
agaacaaagaatagg

SEQ ID NO: 1068296 - DNA, 15 bp, Homo sapiens
aagaacaaagaatag

SEQ ID NO: 1068297 - DNA, 15 bp, Homo sapiens
aaagaacaaagaata

SEQ ID NO: 1068298 - DNA, 15 bp, Homo sapiens
gaaagaacaaagaat

SEQ ID NO: 1068299 - DNA, 15 bp, Homo sapiens
agaaagaacaaagaa

SEQ ID NO: 1068300 - DNA, 15 bp, Homo sapiens
cagaaagaacaaaga

SEQ ID NO: 1068301 - DNA, 15 bp, Homo sapiens
acagaaagaacaaag

SEQ ID NO: 1068302 - DNA, 15 bp, Homo sapiens
tacagaaagaacaaa

SEQ ID NO: 1068303 - DNA, 15 bp, Homo sapiens
ttacagaaagaacaa

SEQ ID NO: 1068304 - DNA, 15 bp, Homo sapiens
attacagaaagaaca

SEQ ID NO: 1068305 - DNA, 15 bp, Homo sapiens
aattacagaaagaac

SEQ ID NO: 1068306 - DNA, 15 bp, Homo sapiens
taattacagaaagaa

SEQ ID NO: 1068307 - DNA, 15 bp, Homo sapiens
ataattacagaaaga

SEQ ID NO: 1068308 - DNA, 15 bp, Homo sapiens
aataattacagaaag

SEQ ID NO: 1068309 - DNA, 15 bp, Homo sapiens
caataattacagaaa

SEQ ID NO: 1068310 - DNA, 15 bp, Homo sapiens
tcaataattacagaa

SEQ ID NO: 1068311 - DNA, 15 bp, Homo sapiens
ctcaataattacaga

SEQ ID NO: 1068312 - DNA, 15 bp, Homo sapiens
tctcaataattacag

SEQ ID NO: 1068313 - DNA, 15 bp, Homo sapiens
atctcaataattaca

SEQ ID NO: 1068314 - DNA, 15 bp, Homo sapiens
catctcaataattac

SEQ ID NO: 1068315 - DNA, 15 bp, Homo sapiens
tcatctcaataatta

SEQ ID NO: 1068316 - DNA, 15 bp, Homo sapiens
ttcatctcaataatt

SEQ ID NO: 1068317 - DNA, 15 bp, Homo sapiens
cttcatctcaataat

SEQ ID NO: 1068318 - DNA, 15 bp, Homo sapiens
tcttcatctcaataa

SEQ ID NO: 1068319 - DNA, 15 bp, Homo sapiens
gtcttcatctcaata

SEQ ID NO: 1068320 - DNA, 15 bp, Homo sapiens
ggtcttcatctcaat

SEQ ID NO: 1068321 - DNA, 15 bp, Homo sapiens
tggtcttcatctcaa

SEQ ID NO: 1068322 - DNA, 15 bp, Homo sapiens
gtggtcttcatctca

SEQ ID NO: 1068323 - DNA, 15 bp, Homo sapiens
tgtggtcttcatctc

SEQ ID NO: 1068324 - DNA, 15 bp, Homo sapiens
ttgtggtcttcatct

SEQ ID NO: 1068325 - DNA, 15 bp, Homo sapiens
tttgtggtcttcatc

SEQ ID NO: 1068326 - DNA, 15 bp, Homo sapiens
atttgtggtcttcat

SEQ ID NO: 1068327 - DNA, 15 bp, Homo sapiens
catttgtggtcttca

SEQ ID NO: 1068328 - DNA, 15 bp, Homo sapiens
acatttgtggtcttc

SEQ ID NO: 1068329 - DNA, 15 bp, Homo sapiens
gacatttgtggtctt

SEQ ID NO: 1068330 - DNA, 15 bp, Homo sapiens
tgacatttgtggtct

SEQ ID NO: 1068331 - DNA, 15 bp, Homo sapiens
atgacatttgtggtc

SEQ ID NO: 1068332 - DNA, 15 bp, Homo sapiens
gatgacatttgtggt

SEQ ID NO: 1068333 - DNA, 15 bp, Homo sapiens
tgatgacatttgtgg

SEQ ID NO: 1068334 - DNA, 15 bp, Homo sapiens
ttgatgacatttgtg

SEQ ID NO: 1068335 - DNA, 15 bp, Homo sapiens
cttgatgacatttgt

SEQ ID NO: 1068336 - DNA, 15 bp, Homo sapiens
tcttgatgacatttg

SEQ ID NO: 1068337 - DNA, 15 bp, Homo sapiens
atcttgatgacattt

SEQ ID NO: 1068338 - DNA, 15 bp, Homo sapiens
gatcttgatgacatt

SEQ ID NO: 1068339 - DNA, 15 bp, Homo sapiens
agatcttgatgacat

SEQ ID NO: 1068340 - DNA, 15 bp, Homo sapiens
aagatcttgatgaca

SEQ ID NO: 1068341 - DNA, 15 bp, Homo sapiens
aaagatcttgatgac

SEQ ID NO: 1068342 - DNA, 15 bp, Homo sapiens
caaagatcttgatga

SEQ ID NO: 1068343 - DNA, 15 bp, Homo sapiens
tcaaagatcttgatg

SEQ ID NO: 1068344 - DNA, 15 bp, Homo sapiens
ctcaaagatcttgat

SEQ ID NO: 1068345 - DNA, 15 bp, Homo sapiens
tctcaaagatcttga

SEQ ID NO: 1068346 - DNA, 15 bp, Homo sapiens
atctcaaagatcttg

SEQ ID NO: 1068347 - DNA, 15 bp, Homo sapiens
gatctcaaagatctt

SEQ ID NO: 1068348 - DNA, 15 bp, Homo sapiens
agatctcaaagatct

SEQ ID NO: 1068349 - DNA, 15 bp, Homo sapiens
cagatctcaaagatc

SEQ ID NO: 1068350 - DNA, 15 bp, Homo sapiens
gcagatctcaaagat

SEQ ID NO: 1068351 - DNA, 15 bp, Homo sapiens
tgcagatctcaaaga

SEQ ID NO: 1068352 - DNA, 15 bp, Homo sapiens
ttgcagatctcaaag

SEQ ID NO: 1068353 - DNA, 15 bp, Homo sapiens
tttgcagatctcaaa

SEQ ID NO: 1068354 - DNA, 15 bp, Homo sapiens
atttgcagatctcaa

SEQ ID NO: 1068355 - DNA, 15 bp, Homo sapiens
tatttgcagatctca

SEQ ID NO: 1068356 - DNA, 15 bp, Homo sapiens
ttatttgcagatctc

SEQ ID NO: 1068357 - DNA, 15 bp, Homo sapiens
tttatttgcagatct

SEQ ID NO: 1068358 - DNA, 15 bp, Homo sapiens
ttttatttgcagatc

SEQ ID NO: 1068359 - DNA, 15 bp, Homo sapiens
cttttatttgcagat

SEQ ID NO: 1068360 - DNA, 15 bp, Homo sapiens
gcttttatttgcaga

SEQ ID NO: 1068361 - DNA, 15 bp, Homo sapiens
tgcttttatttgcag

SEQ ID NO: 1068362 - DNA, 15 bp, Homo sapiens
ctgcttttatttgca

SEQ ID NO: 1068363 - DNA, 15 bp, Homo sapiens
actgcttttatttgc

SEQ ID NO: 1068364 - DNA, 15 bp, Homo sapiens
tactgcttttatttg

SEQ ID NO: 1068365 - DNA, 15 bp, Homo sapiens
ttactgcttttattt

SEQ ID NO: 1068366 - DNA, 15 bp, Homo sapiens
tttactgcttttatt

SEQ ID NO: 1068367 - DNA, 15 bp, Homo sapiens
ctttactgcttttat

SEQ ID NO: 1068368 - DNA, 15 bp, Homo sapiens
actttactgctttta

SEQ ID NO: 1068369 - DNA, 15 bp, Homo sapiens
aactttactgctttt

SEQ ID NO: 1068370 - DNA, 15 bp, Homo sapiens
aaactttactgcttt

SEQ ID NO: 1068371 - DNA, 15 bp, Homo sapiens
aaaactttactgctt

SEQ ID NO: 1068372 - DNA, 15 bp, Homo sapiens
gaaaactttactgct

SEQ ID NO: 1068373 - DNA, 15 bp, Homo sapiens
agaaaactttactgc

SEQ ID NO: 1068374 - DNA, 15 bp, Homo sapiens
cagaaaactttactg

SEQ ID NO: 1068375 - DNA, 15 bp, Homo sapiens
tcagaaaactttact

SEQ ID NO: 1068376 - DNA, 15 bp, Homo sapiens
ttcagaaaactttac

SEQ ID NO: 1068377 - DNA, 15 bp, Homo sapiens
tttcagaaaacttta

SEQ ID NO: 1068378 - DNA, 15 bp, Homo sapiens
atttcagaaaacttt

SEQ ID NO: 1068379 - DNA, 15 bp, Homo sapiens
gatttcagaaaactt

SEQ ID NO: 1068380 - DNA, 15 bp, Homo sapiens
tgatttcagaaaact

SEQ ID NO: 1068381 - DNA, 15 bp, Homo sapiens
ctgatttcagaaaac

SEQ ID NO: 1068382 - DNA, 15 bp, Homo sapiens
actgatttcagaaaa

SEQ ID NO: 1068383 - DNA, 15 bp, Homo sapiens
gactgatttcagaaa

SEQ ID NO: 1068384 - DNA, 15 bp, Homo sapiens
agactgatttcagaa

SEQ ID NO: 1068385 - DNA, 15 bp, Homo sapiens
aagactgatttcaga

SEQ ID NO: 1068386 - DNA, 15 bp, Homo sapiens
aaagactgatttcag

SEQ ID NO: 1068387 - DNA, 15 bp, Homo sapiens
gaaagactgatttca

SEQ ID NO: 1068388 - DNA, 15 bp, Homo sapiens
ggaaagactgatttc

SEQ ID NO: 1068389 - DNA, 15 bp, Homo sapiens
aggaaagactgattt

SEQ ID NO: 1068390 - DNA, 15 bp, Homo sapiens
caggaaagactgatt

SEQ ID NO: 1068391 - DNA, 15 bp, Homo sapiens
acaggaaagactgat

SEQ ID NO: 1068392 - DNA, 15 bp, Homo sapiens
cacaggaaagactga

SEQ ID NO: 1068393 - DNA, 15 bp, Homo sapiens
tcacaggaaagactg

SEQ ID NO: 1068394 - DNA, 15 bp, Homo sapiens
atcacaggaaagact

SEQ ID NO: 1068395 - DNA, 15 bp, Homo sapiens
gatcacaggaaagac

SEQ ID NO: 1068396 - DNA, 15 bp, Homo sapiens
agatcacaggaaaga

SEQ ID NO: 1068397 - DNA, 15 bp, Homo sapiens
aagatcacaggaaag

SEQ ID NO: 1068398 - DNA, 15 bp, Homo sapiens
caagatcacaggaaa

SEQ ID NO: 1068399 - DNA, 15 bp, Homo sapiens
tcaagatcacaggaa

SEQ ID NO: 1068400 - DNA, 15 bp, Homo sapiens
ttcaagatcacagga

SEQ ID NO: 1068401 - DNA, 15 bp, Homo sapiens
tttcaagatcacagg

SEQ ID NO: 1068402 - DNA, 15 bp, Homo sapiens
atttcaagatcacag

SEQ ID NO: 1068403 - DNA, 15 bp, Homo sapiens
tatttcaagatcaca

SEQ ID NO: 1068404 - DNA, 15 bp, Homo sapiens
ttatttcaagatcac

SEQ ID NO: 1068405 - DNA, 15 bp, Homo sapiens
tttatttcaagatca

SEQ ID NO: 1068406 - DNA, 15 bp, Homo sapiens
ttttatttcaagatc

SEQ ID NO: 1068407 - DNA, 15 bp, Homo sapiens
cttttatttcaagat

SEQ ID NO: 1068408 - DNA, 15 bp, Homo sapiens
acttttatttcaaga

SEQ ID NO: 1068409 - DNA, 15 bp, Homo sapiens
tacttttatttcaag

SEQ ID NO: 1068410 - DNA, 15 bp, Homo sapiens
atacttttatttcaa

SEQ ID NO: 1068411 - DNA, 15 bp, Homo sapiens
tatacttttatttca

SEQ ID NO: 1068412 - DNA, 15 bp, Homo sapiens
ttatacttttatttc

SEQ ID NO: 1068413 - DNA, 15 bp, Homo sapiens
tttatacttttattt

SEQ ID NO: 1068414 - DNA, 15 bp, Homo sapiens
gtttatacttttatt

SEQ ID NO: 1068415 - DNA, 15 bp, Homo sapiens
ggtttatacttttat

SEQ ID NO: 1068416 - DNA, 15 bp, Homo sapiens
gggtttatactttta

SEQ ID NO: 1068417 - DNA, 15 bp, Homo sapiens
agggtttatactttt

SEQ ID NO: 1068418 - DNA, 15 bp, Homo sapiens
aagggtttatacttt

SEQ ID NO: 1068419 - DNA, 15 bp, Homo sapiens
taagggtttatactt

SEQ ID NO: 1068420 - DNA, 15 bp, Homo sapiens
ataagggtttatact

SEQ ID NO: 1068421 - DNA, 15 bp, Homo sapiens
cataagggtttatac

SEQ ID NO: 1068422 - DNA, 15 bp, Homo sapiens
ccataagggtttata

SEQ ID NO: 1068423 - DNA, 15 bp, Homo sapiens
accataagggtttat

SEQ ID NO: 1068424 - DNA, 15 bp, Homo sapiens
aaccataagggttta

SEQ ID NO: 1068425 - DNA, 15 bp, Homo sapiens
aaaccataagggttt

SEQ ID NO: 1068426 - DNA, 15 bp, Homo sapiens
aaaaccataagggtt

SEQ ID NO: 1068427 - DNA, 15 bp, Homo sapiens
gaaaaccataagggt

SEQ ID NO: 1068428 - DNA, 15 bp, Homo sapiens
agaaaaccataaggg

SEQ ID NO: 1068429 - DNA, 15 bp, Homo sapiens
aagaaaaccataagg

SEQ ID NO: 1068430 - DNA, 15 bp, Homo sapiens
ataagaaaaccataa

SEQ ID NO: 1068431 - DNA, 15 bp, Homo sapiens
cataagaaaaccata

SEQ ID NO: 1068432 - DNA, 15 bp, Homo sapiens
ccataagaaaaccat

SEQ ID NO: 1068433 - DNA, 15 bp, Homo sapiens
accataagaaaacca

SEQ ID NO: 1068434 - DNA, 15 bp, Homo sapiens
aaccataagaaaacc

SEQ ID NO: 1068435 - DNA, 15 bp, Homo sapiens
caaccataagaaaac

SEQ ID NO: 1068436 - DNA, 15 bp, Homo sapiens
ccaaccataagaaaa

SEQ ID NO: 1068437 - DNA, 15 bp, Homo sapiens
accaaccataagaaa

SEQ ID NO: 1068438 - DNA, 15 bp, Homo sapiens
taccaaccataagaa

SEQ ID NO: 1068439 - DNA, 15 bp, Homo sapiens
gtaccaaccataaga

SEQ ID NO: 1068440 - DNA, 15 bp, Homo sapiens
cgtaccaaccataag

SEQ ID NO: 1068441 - DNA, 15 bp, Homo sapiens
ccgtaccaaccataa

SEQ ID NO: 1068442 - DNA, 15 bp, Homo sapiens
accgtaccaaccata

SEQ ID NO: 1068443 - DNA, 15 bp, Homo sapiens
aaccgtaccaaccat

SEQ ID NO: 1068444 - DNA, 15 bp, Homo sapiens
caaccgtaccaacca

SEQ ID NO: 1068445 - DNA, 15 bp, Homo sapiens
acaaccgtaccaacc

SEQ ID NO: 1068446 - DNA, 15 bp, Homo sapiens
gacaaccgtaccaac

SEQ ID NO: 1068447 - DNA, 15 bp, Homo sapiens
tgacaaccgtaccaa

SEQ ID NO: 1068448 - DNA, 15 bp, Homo sapiens
atgacaaccgtacca

SEQ ID NO: 1068449 - DNA, 15 bp, Homo sapiens
tatgacaaccgtacc

SEQ ID NO: 1068450 - DNA, 15 bp, Homo sapiens
atatgacaaccgtac

SEQ ID NO: 1068451 - DNA, 15 bp, Homo sapiens
aatatgacaaccgta

SEQ ID NO: 1068452 - DNA, 15 bp, Homo sapiens
aaatatgacaaccgt

SEQ ID NO: 1068453 - DNA, 15 bp, Homo sapiens
aaaatatgacaaccg

SEQ ID NO: 1068454 - DNA, 15 bp, Homo sapiens
aaaaatatgacaacc

SEQ ID NO: 1068455 - DNA, 15 bp, Homo sapiens
aaaaaatatgacaac

SEQ ID NO: 1068456 - DNA, 15 bp, Homo sapiens
taaaaaatatgacaa

SEQ ID NO: 1068457 - DNA, 15 bp, Homo sapiens
ttaaaaaatatgaca

SEQ ID NO: 1068458 - DNA, 15 bp, Homo sapiens
tttaaaaaatatgac

SEQ ID NO: 1068459 - DNA, 15 bp, Homo sapiens
ttttaaaaaatatga

SEQ ID NO: 1068460 - DNA, 15 bp, Homo sapiens
tttttaaaaaatatg

SEQ ID NO: 1068461 - DNA, 15 bp, Homo sapiens
gtttttaaaaaatat

SEQ ID NO: 1068462 - DNA, 15 bp, Homo sapiens
tgtttttaaaaaata

SEQ ID NO: 1068463 - DNA, 15 bp, Homo sapiens
gtgtttttaaaaaat

SEQ ID NO: 1068464 - DNA, 15 bp, Homo sapiens
agtgtttttaaaaaa

SEQ ID NO: 1068465 - DNA, 15 bp, Homo sapiens
cagtgtttttaaaaa

SEQ ID NO: 1068466 - DNA, 15 bp, Homo sapiens
tcagtgtttttaaaa

SEQ ID NO: 1068467 - DNA, 15 bp, Homo sapiens
ttcagtgtttttaaa

SEQ ID NO: 1068468 - DNA, 15 bp, Homo sapiens
cttcagtgtttttaa

SEQ ID NO: 1068469 - DNA, 15 bp, Homo sapiens
gcttcagtgttttta

SEQ ID NO: 1068470 - DNA, 15 bp, Homo sapiens
tgcttcagtgttttt

SEQ ID NO: 1068471 - DNA, 15 bp, Homo sapiens
ttgcttcagtgtttt

SEQ ID NO: 1068472 - DNA, 15 bp, Homo sapiens
tttgcttcagtgttt

SEQ ID NO: 1068473 - DNA, 15 bp, Homo sapiens
atttgcttcagtgtt

SEQ ID NO: 1068474 - DNA, 15 bp, Homo sapiens
aatttgcttcagtgt

SEQ ID NO: 1068475 - DNA, 15 bp, Homo sapiens
aaatttgcttcagtg

SEQ ID NO: 1068476 - DNA, 15 bp, Homo sapiens
gaaatttgcttcagt

SEQ ID NO: 1068477 - DNA, 15 bp, Homo sapiens
ggaaatttgcttcag

SEQ ID NO: 1068478 - DNA, 15 bp, Homo sapiens
aggaaatttgcttca

SEQ ID NO: 1068479 - DNA, 15 bp, Homo sapiens
aaggaaatttgcttc

SEQ ID NO: 1068480 - DNA, 15 bp, Homo sapiens
aaaggaaatttgctt

SEQ ID NO: 1068481 - DNA, 15 bp, Homo sapiens
aaaaggaaatttgct

SEQ ID NO: 1068482 - DNA, 15 bp, Homo sapiens
aaaaaggaaatttgc

SEQ ID NO: 1068483 - DNA, 15 bp, Homo sapiens
aaaaaaggaaatttg

SEQ ID NO: 1068484 - DNA, 15 bp, Homo sapiens
ataaaaaaggaaatt

SEQ ID NO: 1068485 - DNA, 15 bp, Homo sapiens
aataaaaaaggaaat

SEQ ID NO: 1068486 - DNA, 15 bp, Homo sapiens
aaataaaaaaggaaa

SEQ ID NO: 1068487 - DNA, 15 bp, Homo sapiens
gaaataaaaaaggaa

SEQ ID NO: 1068488 - DNA, 15 bp, Homo sapiens
ggaaataaaaaagga

SEQ ID NO: 1068489 - DNA, 15 bp, Homo sapiens
aggaaataaaaaagg

SEQ ID NO: 1068490 - DNA, 15 bp, Homo sapiens
aaggaaataaaaaag

SEQ ID NO: 1068491 - DNA, 15 bp, Homo sapiens
taaggaaataaaaaa

SEQ ID NO: 1068492 - DNA, 15 bp, Homo sapiens
ctaaggaaataaaaa

SEQ ID NO: 1068493 - DNA, 15 bp, Homo sapiens
tctaaggaaataaaa

SEQ ID NO: 1068494 - DNA, 15 bp, Homo sapiens
gatctaaggaaataa

SEQ ID NO: 1068495 - DNA, 15 bp, Homo sapiens
ggatctaaggaaata

SEQ ID NO: 1068496 - DNA, 15 bp, Homo sapiens
cggatctaaggaaat

SEQ ID NO: 1068497 - DNA, 15 bp, Homo sapiens
acggatctaaggaaa

SEQ ID NO: 1068498 - DNA, 15 bp, Homo sapiens
tacggatctaaggaa

SEQ ID NO: 1068499 - DNA, 15 bp, Homo sapiens
atacggatctaagga

SEQ ID NO: 1068500 - DNA, 15 bp, Homo sapiens
gatacggatctaagg

SEQ ID NO: 1068501 - DNA, 15 bp, Homo sapiens
tgatacggatctaag

SEQ ID NO: 1068502 - DNA, 15 bp, Homo sapiens
ctgatacggatctaa

SEQ ID NO: 1068503 - DNA, 15 bp, Homo sapiens
tctgatacggatcta

SEQ ID NO: 1068504 - DNA, 15 bp, Homo sapiens
atctgatacggatct

SEQ ID NO: 1068505 - DNA, 15 bp, Homo sapiens
gatctgatacggatc

SEQ ID NO: 1068506 - DNA, 15 bp, Homo sapiens
ggatctgatacggat

SEQ ID NO: 1068507 - DNA, 15 bp, Homo sapiens
aggatctgatacgga

SEQ ID NO: 1068508 - DNA, 15 bp, Homo sapiens
caggatctgatacgg

SEQ ID NO: 1068509 - DNA, 15 bp, Homo sapiens
ccaggatctgatacg

SEQ ID NO: 1068510 - DNA, 15 bp, Homo sapiens
cccaggatctgatac

SEQ ID NO: 1068511 - DNA, 15 bp, Homo sapiens
gcccaggatctgata

SEQ ID NO: 1068512 - DNA, 15 bp, Homo sapiens
ggcccaggatctgat

SEQ ID NO: 1068513 - DNA, 15 bp, Homo sapiens
gggcccaggatctga

SEQ ID NO: 1068514 - DNA, 15 bp, Homo sapiens
cgggcccaggatctg

SEQ ID NO: 1068515 - DNA, 15 bp, Homo sapiens
tcgggcccaggatct

SEQ ID NO: 1068516 - DNA, 15 bp, Homo sapiens
gtcgggcccaggatc

SEQ ID NO: 1068517 - DNA, 15 bp, Homo sapiens
ggtcgggcccaggat

SEQ ID NO: 1068518 - DNA, 15 bp, Homo sapiens
tggtcgggcccagga

SEQ ID NO: 1068519 - DNA, 15 bp, Homo sapiens
ctggtcgggcccagg

SEQ ID NO: 1068520 - DNA, 15 bp, Homo sapiens
gctggtcgggcccag

SEQ ID NO: 1068521 - DNA, 15 bp, Homo sapiens
tgctggtcgggccca

SEQ ID NO: 1068522 - DNA, 15 bp, Homo sapiens
ctgctggtcgggccc

SEQ ID NO: 1068523 - DNA, 15 bp, Homo sapiens
actgctggtcgggcc

SEQ ID NO: 1068524 - DNA, 15 bp, Homo sapiens
gactgctggtcgggc

SEQ ID NO: 1068525 - DNA, 15 bp, Homo sapiens
cgactgctggtcggg

SEQ ID NO: 1068526 - DNA, 15 bp, Homo sapiens
gcgactgctggtcgg

SEQ ID NO: 1068527 - DNA, 15 bp, Homo sapiens
ggcgactgctggtcg

SEQ ID NO: 1068528 - DNA, 15 bp, Homo sapiens
aggcgactgctggtc

SEQ ID NO: 1068529 - DNA, 15 bp, Homo sapiens
taggcgactgctggt

SEQ ID NO: 1068530 - DNA, 15 bp, Homo sapiens
ctaggcgactgctgg

SEQ ID NO: 1068531 - DNA, 15 bp, Homo sapiens
gctaggcgactgctg

SEQ ID NO: 1068532 - DNA, 15 bp, Homo sapiens
ggctaggcgactgct

SEQ ID NO: 1068533 - DNA, 15 bp, Homo sapiens
tggctaggcgactgc

SEQ ID NO: 1068534 - DNA, 15 bp, Homo sapiens
ttggctaggcgactg

SEQ ID NO: 1068535 - DNA, 15 bp, Homo sapiens
gttggctaggcgact

SEQ ID NO: 1068536 - DNA, 15 bp, Homo sapiens
ggttggctaggcgac

SEQ ID NO: 1068537 - DNA, 15 bp, Homo sapiens
gggttggctaggcga

SEQ ID NO: 1068538 - DNA, 15 bp, Homo sapiens
agggttggctaggcg

SEQ ID NO: 1068539 - DNA, 15 bp, Homo sapiens
cagggttggctaggc

SEQ ID NO: 1068540 - DNA, 15 bp, Homo sapiens
ccagggttggctagg

SEQ ID NO: 1068541 - DNA, 15 bp, Homo sapiens
accagggttggctag

SEQ ID NO: 1068542 - DNA, 15 bp, Homo sapiens
caccagggttggcta

SEQ ID NO: 1068543 - DNA, 15 bp, Homo sapiens
tcaccagggttggct

SEQ ID NO: 1068544 - DNA, 15 bp, Homo sapiens
ctcaccagggttggc

SEQ ID NO: 1068545 - DNA, 15 bp, Homo sapiens
actcaccagggttgg

SEQ ID NO: 1068546 - DNA, 15 bp, Homo sapiens
aactcaccagggttg

SEQ ID NO: 1068547 - DNA, 15 bp, Homo sapiens
aaactcaccagggtt

SEQ ID NO: 1068548 - DNA, 15 bp, Homo sapiens
taaactcaccagggt

SEQ ID NO: 1068549 - DNA, 15 bp, Homo sapiens
gtaaactcaccaggg

SEQ ID NO: 1068550 - DNA, 15 bp, Homo sapiens
ggtaaactcaccagg

SEQ ID NO: 1068551 - DNA, 15 bp, Homo sapiens
aggtaaactcaccag

SEQ ID NO: 1068552 - DNA, 15 bp, Homo sapiens
aaggtaaactcacca

SEQ ID NO: 1068553 - DNA, 15 bp, Homo sapiens
caaggtaaactcacc

SEQ ID NO: 1068554 - DNA, 15 bp, Homo sapiens
ccaaggtaaactcac

SEQ ID NO: 1068555 - DNA, 15 bp, Homo sapiens
gccaaggtaaactca

SEQ ID NO: 1068556 - DNA, 15 bp, Homo sapiens
ggccaaggtaaactc

SEQ ID NO: 1068557 - DNA, 15 bp, Homo sapiens
aggccaaggtaaact

SEQ ID NO: 1068558 - DNA, 15 bp, Homo sapiens
caggccaaggtaaac

SEQ ID NO: 1068559 - DNA, 15 bp, Homo sapiens
gcaggccaaggtaaa

SEQ ID NO: 1068560 - DNA, 15 bp, Homo sapiens
tgcaggccaaggtaa

SEQ ID NO: 1068561 - DNA, 15 bp, Homo sapiens
ttgcaggccaaggta

SEQ ID NO: 1068562 - DNA, 15 bp, Homo sapiens
cttgcaggccaaggt

SEQ ID NO: 1068563 - DNA, 15 bp, Homo sapiens
gcttgcaggccaagg

SEQ ID NO: 1068564 - DNA, 15 bp, Homo sapiens
ggcttgcaggccaag

SEQ ID NO: 1068565 - DNA, 15 bp, Homo sapiens
aggcttgcaggccaa

SEQ ID NO: 1068566 - DNA, 15 bp, Homo sapiens
aaggcttgcaggcca

SEQ ID NO: 1068567 - DNA, 15 bp, Homo sapiens
aaaggcttgcaggcc

SEQ ID NO: 1068568 - DNA, 15 bp, Homo sapiens
aaaaggcttgcaggc

SEQ ID NO: 1068569 - DNA, 15 bp, Homo sapiens
aaaaaggcttgcagg

SEQ ID NO: 1068570 - DNA, 15 bp, Homo sapiens
aaaaaaggcttgcag

SEQ ID NO: 1068571 - DNA, 15 bp, Homo sapiens
caaaaaaggcttgca

SEQ ID NO: 1068572 - DNA, 15 bp, Homo sapiens
gcaaaaaaggcttgc

SEQ ID NO: 1068573 - DNA, 15 bp, Homo sapiens
ggcaaaaaaggcttg

SEQ ID NO: 1068574 - DNA, 15 bp, Homo sapiens
tggcaaaaaaggctt

SEQ ID NO: 1068575 - DNA, 15 bp, Homo sapiens
ctggcaaaaaaggct

SEQ ID NO: 1068576 - DNA, 15 bp, Homo sapiens
tctggcaaaaaaggc

SEQ ID NO: 1068577 - DNA, 15 bp, Homo sapiens
ttctggcaaaaaagg

SEQ ID NO: 1068578 - DNA, 15 bp, Homo sapiens
attctggcaaaaaag

SEQ ID NO: 1068579 - DNA, 15 bp, Homo sapiens
cattctggcaaaaaa

SEQ ID NO: 1068580 - DNA, 15 bp, Homo sapiens
acattctggcaaaaa

SEQ ID NO: 1068581 - DNA, 15 bp, Homo sapiens
aacattctggcaaaa

SEQ ID NO: 1068582 - DNA, 15 bp, Homo sapiens
aaacattctggcaaa

SEQ ID NO: 1068583 - DNA, 15 bp, Homo sapiens
gaaacattctggcaa

SEQ ID NO: 1068584 - DNA, 15 bp, Homo sapiens
cgaaacattctggca

SEQ ID NO: 1068585 - DNA, 15 bp, Homo sapiens
acgaaacattctggc

SEQ ID NO: 1068586 - DNA, 15 bp, Homo sapiens
tacgaaacattctgg

SEQ ID NO: 1068587 - DNA, 15 bp, Homo sapiens
ctacgaaacattctg

SEQ ID NO: 1068588 - DNA, 15 bp, Homo sapiens
gctacgaaacattct

SEQ ID NO: 1068589 - DNA, 15 bp, Homo sapiens
agctacgaaacattc

SEQ ID NO: 1068590 - DNA, 15 bp, Homo sapiens
aagctacgaaacatt

SEQ ID NO: 1068591 - DNA, 15 bp, Homo sapiens
aaagctacgaaacat

SEQ ID NO: 1068592 - DNA, 15 bp, Homo sapiens
caaagctacgaaaca

SEQ ID NO: 1068593 - DNA, 15 bp, Homo sapiens
acaaagctacgaaac

SEQ ID NO: 1068594 - DNA, 15 bp, Homo sapiens
cacaaagctacgaaa

SEQ ID NO: 1068595 - DNA, 15 bp, Homo sapiens
tcacaaagctacgaa

SEQ ID NO: 1068596 - DNA, 15 bp, Homo sapiens
ttcacaaagctacga

SEQ ID NO: 1068597 - DNA, 15 bp, Homo sapiens
tttcacaaagctacg

SEQ ID NO: 1068598 - DNA, 15 bp, Homo sapiens
atttcacaaagctac

SEQ ID NO: 1068599 - DNA, 15 bp, Homo sapiens
gatttcacaaagcta

SEQ ID NO: 1068600 - DNA, 15 bp, Homo sapiens
tgatttcacaaagct

SEQ ID NO: 1068601 - DNA, 15 bp, Homo sapiens
gtgatttcacaaagc

SEQ ID NO: 1068602 - DNA, 15 bp, Homo sapiens
tgtgatttcacaaag

SEQ ID NO: 1068603 - DNA, 15 bp, Homo sapiens
ctgtgatttcacaaa

SEQ ID NO: 1068604 - DNA, 15 bp, Homo sapiens
tctgtgatttcacaa

SEQ ID NO: 1068605 - DNA, 15 bp, Homo sapiens
ctctgtgatttcaca

SEQ ID NO: 1068606 - DNA, 15 bp, Homo sapiens
tctctgtgatttcac

SEQ ID NO: 1068607 - DNA, 15 bp, Homo sapiens
gtctctgtgatttca

SEQ ID NO: 1068608 - DNA, 15 bp, Homo sapiens
agtctctgtgatttc

SEQ ID NO: 1068609 - DNA, 15 bp, Homo sapiens
aagtctctgtgattt

SEQ ID NO: 1068610 - DNA, 15 bp, Homo sapiens
gaagtctctgtgatt

SEQ ID NO: 1068611 - DNA, 15 bp, Homo sapiens
agaagtctctgtgat

SEQ ID NO: 1068612 - DNA, 15 bp, Homo sapiens
cagaagtctctgtga

SEQ ID NO: 1068613 - DNA, 15 bp, Homo sapiens
acagaagtctctgtg

SEQ ID NO: 1068614 - DNA, 15 bp, Homo sapiens
gacagaagtctctgt

SEQ ID NO: 1068615 - DNA, 15 bp, Homo sapiens
ggacagaagtctctg

SEQ ID NO: 1068616 - DNA, 15 bp, Homo sapiens
aggacagaagtctct

SEQ ID NO: 1068617 - DNA, 15 bp, Homo sapiens
taggacagaagtctc

SEQ ID NO: 1068618 - DNA, 15 bp, Homo sapiens
ttaggacagaagtct

SEQ ID NO: 1068619 - DNA, 15 bp, Homo sapiens
cttaggacagaagtc

SEQ ID NO: 1068620 - DNA, 15 bp, Homo sapiens
acttaggacagaagt

SEQ ID NO: 1068621 - DNA, 15 bp, Homo sapiens
gacttaggacagaag

SEQ ID NO: 1068622 - DNA, 15 bp, Homo sapiens
ggacttaggacagaa

SEQ ID NO: 1068623 - DNA, 15 bp, Homo sapiens
tggacttaggacaga

SEQ ID NO: 1068624 - DNA, 15 bp, Homo sapiens
ctggacttaggacag

SEQ ID NO: 1068625 - DNA, 15 bp, Homo sapiens
tctggacttaggaca

SEQ ID NO: 1068626 - DNA, 15 bp, Homo sapiens
gtctggacttaggac

SEQ ID NO: 1068627 - DNA, 15 bp, Homo sapiens
tgtctggacttagga

SEQ ID NO: 1068628 - DNA, 15 bp, Homo sapiens
gtgtctggacttagg

SEQ ID NO: 1068629 - DNA, 15 bp, Homo sapiens
ggtgtctggacttag

SEQ ID NO: 1068630 - DNA, 15 bp, Homo sapiens
aggtgtctggactta

SEQ ID NO: 1068631 - DNA, 15 bp, Homo sapiens
caggtgtctggactt

SEQ ID NO: 1068632 - DNA, 15 bp, Homo sapiens
tcaggtgtctggact

SEQ ID NO: 1068633 - DNA, 15 bp, Homo sapiens
ctcaggtgtctggac

SEQ ID NO: 1068634 - DNA, 15 bp, Homo sapiens
actcaggtgtctgga

SEQ ID NO: 1068635 - DNA, 15 bp, Homo sapiens
cactcaggtgtctgg

SEQ ID NO: 1068636 - DNA, 15 bp, Homo sapiens
ccactcaggtgtctg

SEQ ID NO: 1068637 - DNA, 15 bp, Homo sapiens
cccactcaggtgtct

SEQ ID NO: 1068638 - DNA, 15 bp, Homo sapiens
ccccactcaggtgtc

SEQ ID NO: 1068639 - DNA, 15 bp, Homo sapiens
tccccactcaggtgt

SEQ ID NO: 1068640 - DNA, 15 bp, Homo sapiens
ctccccactcaggtg

SEQ ID NO: 1068641 - DNA, 15 bp, Homo sapiens
actccccactcaggt

SEQ ID NO: 1068642 - DNA, 15 bp, Homo sapiens
tactccccactcagg

SEQ ID NO: 1068643 - DNA, 15 bp, Homo sapiens
ttactccccactcag

SEQ ID NO: 1068644 - DNA, 15 bp, Homo sapiens
gttactccccactca

SEQ ID NO: 1068645 - DNA, 15 bp, Homo sapiens
tgttactccccactc

SEQ ID NO: 1068646 - DNA, 15 bp, Homo sapiens
atgttactccccact

SEQ ID NO: 1068647 - DNA, 15 bp, Homo sapiens
catgttactccccac

SEQ ID NO: 1068648 - DNA, 15 bp, Homo sapiens
gcatgttactcccca

SEQ ID NO: 1068649 - DNA, 15 bp, Homo sapiens
tgcatgttactcccc

SEQ ID NO: 1068650 - DNA, 15 bp, Homo sapiens
gtgcatgttactccc

SEQ ID NO: 1068651 - DNA, 15 bp, Homo sapiens
cgtgcatgttactcc

SEQ ID NO: 1068652 - DNA, 15 bp, Homo sapiens
acgtgcatgttactc

SEQ ID NO: 1068653 - DNA, 15 bp, Homo sapiens
gacgtgcatgttact

SEQ ID NO: 1068654 - DNA, 15 bp, Homo sapiens
agacgtgcatgttac

SEQ ID NO: 1068655 - DNA, 15 bp, Homo sapiens
aagacgtgcatgtta

SEQ ID NO: 1068656 - DNA, 15 bp, Homo sapiens
aaagacgtgcatgtt

SEQ ID NO: 1068657 - DNA, 15 bp, Homo sapiens
gaaagacgtgcatgt

SEQ ID NO: 1068658 - DNA, 15 bp, Homo sapiens
ggaaagacgtgcatg

SEQ ID NO: 1068659 - DNA, 15 bp, Homo sapiens
aggaaagacgtgcat

SEQ ID NO: 1068660 - DNA, 15 bp, Homo sapiens
aaggaaagacgtgca

SEQ ID NO: 1068661 - DNA, 15 bp, Homo sapiens
caaggaaagacgtgc

SEQ ID NO: 1068662 - DNA, 15 bp, Homo sapiens
tcaaggaaagacgtg

SEQ ID NO: 1068663 - DNA, 15 bp, Homo sapiens
ttcaaggaaagacgt

SEQ ID NO: 1068664 - DNA, 15 bp, Homo sapiens
tttcaaggaaagacg

SEQ ID NO: 1068665 - DNA, 15 bp, Homo sapiens
atttcaaggaaagac

SEQ ID NO: 1068666 - DNA, 15 bp, Homo sapiens
catttcaaggaaaga

SEQ ID NO: 1068667 - DNA, 15 bp, Homo sapiens
acatttcaaggaaag

SEQ ID NO: 1068668 - DNA, 15 bp, Homo sapiens
aacatttcaaggaaa

SEQ ID NO: 1068669 - DNA, 15 bp, Homo sapiens
gaacatttcaaggaa

SEQ ID NO: 1068670 - DNA, 15 bp, Homo sapiens
tgaacatttcaagga

SEQ ID NO: 1068671 - DNA, 15 bp, Homo sapiens
ttgaacatttcaagg

SEQ ID NO: 1068672 - DNA, 15 bp, Homo sapiens
attgaacatttcaag

SEQ ID NO: 1068673 - DNA, 15 bp, Homo sapiens
cattgaacatttcaa

SEQ ID NO: 1068674 - DNA, 15 bp, Homo sapiens
acattgaacatttca

SEQ ID NO: 1068675 - DNA, 15 bp, Homo sapiens
gacattgaacatttc

SEQ ID NO: 1068676 - DNA, 15 bp, Homo sapiens
agacattgaacattt

SEQ ID NO: 1068677 - DNA, 15 bp, Homo sapiens
cagacattgaacatt

SEQ ID NO: 1068678 - DNA, 15 bp, Homo sapiens
acagacattgaacat

SEQ ID NO: 1068679 - DNA, 15 bp, Homo sapiens
aacagacattgaaca

SEQ ID NO: 1068680 - DNA, 15 bp, Homo sapiens
aaacagacattgaac

SEQ ID NO: 1068681 - DNA, 15 bp, Homo sapiens
gaaacagacattgaa

SEQ ID NO: 1068682 - DNA, 15 bp, Homo sapiens
agaaacagacattga

SEQ ID NO: 1068683 - DNA, 15 bp, Homo sapiens
cagaaacagacattg

SEQ ID NO: 1068684 - DNA, 15 bp, Homo sapiens
ccagaaacagacatt

SEQ ID NO: 1068685 - DNA, 15 bp, Homo sapiens
tccagaaacagacat

SEQ ID NO: 1068686 - DNA, 15 bp, Homo sapiens
ctccagaaacagaca

SEQ ID NO: 1068687 - DNA, 15 bp, Homo sapiens
gctccagaaacagac

SEQ ID NO: 1068688 - DNA, 15 bp, Homo sapiens
tgctccagaaacaga

SEQ ID NO: 1068689 - DNA, 15 bp, Homo sapiens
atgctccagaaacag

SEQ ID NO: 1068690 - DNA, 15 bp, Homo sapiens
catgctccagaaaca

SEQ ID NO: 1068691 - DNA, 15 bp, Homo sapiens
acatgctccagaaac

SEQ ID NO: 1068692 - DNA, 15 bp, Homo sapiens
cacatgctccagaaa

SEQ ID NO: 1068693 - DNA, 15 bp, Homo sapiens
tcacatgctccagaa

SEQ ID NO: 1068694 - DNA, 15 bp, Homo sapiens
ttcacatgctccaga

SEQ ID NO: 1068695 - DNA, 15 bp, Homo sapiens
gttcacatgctccag

SEQ ID NO: 1068696 - DNA, 15 bp, Homo sapiens
tgttcacatgctcca

SEQ ID NO: 1068697 - DNA, 15 bp, Homo sapiens
ttgttcacatgctcc

SEQ ID NO: 1068698 - DNA, 15 bp, Homo sapiens
gttgttcacatgctc

SEQ ID NO: 1068699 - DNA, 15 bp, Homo sapiens
tgttgttcacatgct

SEQ ID NO: 1068700 - DNA, 15 bp, Homo sapiens
ctgttgttcacatgc

SEQ ID NO: 1068701 - DNA, 15 bp, Homo sapiens
cctgttgttcacatg

SEQ ID NO: 1068702 - DNA, 15 bp, Homo sapiens
acctgttgttcacat

SEQ ID NO: 1068703 - DNA, 15 bp, Homo sapiens
gacctgttgttcaca

SEQ ID NO: 1068704 - DNA, 15 bp, Homo sapiens
tgacctgttgttcac

SEQ ID NO: 1068705 - DNA, 15 bp, Homo sapiens
ctgacctgttgttca

SEQ ID NO: 1068706 - DNA, 15 bp, Homo sapiens
cctgacctgttgttc

SEQ ID NO: 1068707 - DNA, 15 bp, Homo sapiens
ccctgacctgttgtt

SEQ ID NO: 1068708 - DNA, 15 bp, Homo sapiens
gccctgacctgttgt

SEQ ID NO: 1068709 - DNA, 15 bp, Homo sapiens
agccctgacctgttg

SEQ ID NO: 1068710 - DNA, 15 bp, Homo sapiens
aagccctgacctgtt

SEQ ID NO: 1068711 - DNA, 15 bp, Homo sapiens
caagccctgacctgt

SEQ ID NO: 1068712 - DNA, 15 bp, Homo sapiens
acaagccctgacctg

SEQ ID NO: 1068713 - DNA, 15 bp, Homo sapiens
aacaagccctgacct

SEQ ID NO: 1068714 - DNA, 15 bp, Homo sapiens
taacaagccctgacc

SEQ ID NO: 1068715 - DNA, 15 bp, Homo sapiens
ataacaagccctgac

SEQ ID NO: 1068716 - DNA, 15 bp, Homo sapiens
cataacaagccctga

SEQ ID NO: 1068717 - DNA, 15 bp, Homo sapiens
tcataacaagccctg

SEQ ID NO: 1068718 - DNA, 15 bp, Homo sapiens
ctcataacaagccct

SEQ ID NO: 1068719 - DNA, 15 bp, Homo sapiens
cctcataacaagccc

SEQ ID NO: 1068720 - DNA, 15 bp, Homo sapiens
acctcataacaagcc

SEQ ID NO: 1068721 - DNA, 15 bp, Homo sapiens
cacctcataacaagc

SEQ ID NO: 1068722 - DNA, 15 bp, Homo sapiens
acacctcataacaag

SEQ ID NO: 1068723 - DNA, 15 bp, Homo sapiens
gacacctcataacaa

SEQ ID NO: 1068724 - DNA, 15 bp, Homo sapiens
tgacacctcataaca

SEQ ID NO: 1068725 - DNA, 15 bp, Homo sapiens
ttgacacctcataac

SEQ ID NO: 1068726 - DNA, 15 bp, Homo sapiens
cttgacacctcataa

SEQ ID NO: 1068727 - DNA, 15 bp, Homo sapiens
ccttgacacctcata

SEQ ID NO: 1068728 - DNA, 15 bp, Homo sapiens
accttgacacctcat

SEQ ID NO: 1068729 - DNA, 15 bp, Homo sapiens
aaccttgacacctca

SEQ ID NO: 1068730 - DNA, 15 bp, Homo sapiens
caaccttgacacctc

SEQ ID NO: 1068731 - DNA, 15 bp, Homo sapiens
ccaaccttgacacct

SEQ ID NO: 1068732 - DNA, 15 bp, Homo sapiens
accaaccttgacacc

SEQ ID NO: 1068733 - DNA, 15 bp, Homo sapiens
aaccaaccttgacac

SEQ ID NO: 1068734 - DNA, 15 bp, Homo sapiens
taaccaaccttgaca

SEQ ID NO: 1068735 - DNA, 15 bp, Homo sapiens
ctaaccaaccttgac

SEQ ID NO: 1068736 - DNA, 15 bp, Homo sapiens
gctaaccaaccttga

SEQ ID NO: 1068737 - DNA, 15 bp, Homo sapiens
agctaaccaaccttg

SEQ ID NO: 1068738 - DNA, 15 bp, Homo sapiens
cagctaaccaacctt

SEQ ID NO: 1068739 - DNA, 15 bp, Homo sapiens
tcagctaaccaacct

SEQ ID NO: 1068740 - DNA, 15 bp, Homo sapiens
ctcagctaaccaacc

SEQ ID NO: 1068741 - DNA, 15 bp, Homo sapiens
cctcagctaaccaac

SEQ ID NO: 1068742 - DNA, 15 bp, Homo sapiens
tcctcagctaaccaa

SEQ ID NO: 1068743 - DNA, 15 bp, Homo sapiens
atcctcagctaacca

SEQ ID NO: 1068744 - DNA, 15 bp, Homo sapiens
tatcctcagctaacc

SEQ ID NO: 1068745 - DNA, 15 bp, Homo sapiens
gtatcctcagctaac

SEQ ID NO: 1068746 - DNA, 15 bp, Homo sapiens
agtatcctcagctaa

SEQ ID NO: 1068747 - DNA, 15 bp, Homo sapiens
aagtatcctcagcta

SEQ ID NO: 1068748 - DNA, 15 bp, Homo sapiens
gaagtatcctcagct

SEQ ID NO: 1068749 - DNA, 15 bp, Homo sapiens
agaagtatcctcagc

SEQ ID NO: 1068750 - DNA, 15 bp, Homo sapiens
tagaagtatcctcag

SEQ ID NO: 1068751 - DNA, 15 bp, Homo sapiens
ctagaagtatcctca

SEQ ID NO: 1068752 - DNA, 15 bp, Homo sapiens
cctagaagtatcctc

SEQ ID NO: 1068753 - DNA, 15 bp, Homo sapiens
tcctagaagtatcct

SEQ ID NO: 1068754 - DNA, 15 bp, Homo sapiens
ttcctagaagtatcc

SEQ ID NO: 1068755 - DNA, 15 bp, Homo sapiens
attcctagaagtatc

SEQ ID NO: 1068756 - DNA, 15 bp, Homo sapiens
tattcctagaagtat

SEQ ID NO: 1068757 - DNA, 15 bp, Homo sapiens
tttattcctagaagt

SEQ ID NO: 1068758 - DNA, 15 bp, Homo sapiens
gtttattcctagaag

SEQ ID NO: 1068759 - DNA, 15 bp, Homo sapiens
tgtttattcctagaa

SEQ ID NO: 1068760 - DNA, 15 bp, Homo sapiens
gtgtttattcctaga

SEQ ID NO: 1068761 - DNA, 15 bp, Homo sapiens
tgtgtttattcctag

SEQ ID NO: 1068762 - DNA, 15 bp, Homo sapiens
atgtgtttattccta

SEQ ID NO: 1068763 - DNA, 15 bp, Homo sapiens
gatgtgtttattcct

SEQ ID NO: 1068764 - DNA, 15 bp, Homo sapiens
tgatgtgtttattcc

SEQ ID NO: 1068765 - DNA, 15 bp, Homo sapiens
ctgatgtgtttattc

SEQ ID NO: 1068766 - DNA, 15 bp, Homo sapiens
gctgatgtgtttatt

SEQ ID NO: 1068767 - DNA, 15 bp, Homo sapiens
tgctgatgtgtttat

SEQ ID NO: 1068768 - DNA, 15 bp, Homo sapiens
gtgctgatgtgttta

SEQ ID NO: 1068769 - DNA, 15 bp, Homo sapiens
agtgctgatgtgttt

SEQ ID NO: 1068770 - DNA, 15 bp, Homo sapiens
cagtgctgatgtgtt

SEQ ID NO: 1068771 - DNA, 15 bp, Homo sapiens
gcagtgctgatgtgt

SEQ ID NO: 1068772 - DNA, 15 bp, Homo sapiens
tgcagtgctgatgtg

SEQ ID NO: 1068773 - DNA, 15 bp, Homo sapiens
gtgcagtgctgatgt

SEQ ID NO: 1068774 - DNA, 15 bp, Homo sapiens
tgtgcagtgctgatg

SEQ ID NO: 1068775 - DNA, 15 bp, Homo sapiens
atgtgcagtgctgat

SEQ ID NO: 1068776 - DNA, 15 bp, Homo sapiens
catgtgcagtgctga

SEQ ID NO: 1068777 - DNA, 15 bp, Homo sapiens
acatgtgcagtgctg

SEQ ID NO: 1068778 - DNA, 15 bp, Homo sapiens
cacatgtgcagtgct

SEQ ID NO: 1068779 - DNA, 15 bp, Homo sapiens
gcacatgtgcagtgc

SEQ ID NO: 1068780 - DNA, 15 bp, Homo sapiens
tgcacatgtgcagtg

SEQ ID NO: 1068781 - DNA, 15 bp, Homo sapiens
gtgcacatgtgcagt

SEQ ID NO: 1068782 - DNA, 15 bp, Homo sapiens
agtgcacatgtgcag

SEQ ID NO: 1068783 - DNA, 15 bp, Homo sapiens
aagtgcacatgtgca

SEQ ID NO: 1068784 - DNA, 15 bp, Homo sapiens
taagtgcacatgtgc

SEQ ID NO: 1068785 - DNA, 15 bp, Homo sapiens
ctaagtgcacatgtg

SEQ ID NO: 1068786 - DNA, 15 bp, Homo sapiens
cctaagtgcacatgt

SEQ ID NO: 1068787 - DNA, 15 bp, Homo sapiens
acctaagtgcacatg

SEQ ID NO: 1068788 - DNA, 15 bp, Homo sapiens
cacctaagtgcacat

SEQ ID NO: 1068789 - DNA, 15 bp, Homo sapiens
acacctaagtgcaca

SEQ ID NO: 1068790 - DNA, 15 bp, Homo sapiens
tacacctaagtgcac

SEQ ID NO: 1068791 - DNA, 15 bp, Homo sapiens
ctacacctaagtgca

SEQ ID NO: 1068792 - DNA, 15 bp, Homo sapiens
tctacacctaagtgc

SEQ ID NO: 1068793 - DNA, 15 bp, Homo sapiens
atctacacctaagtg

SEQ ID NO: 1068794 - DNA, 15 bp, Homo sapiens
catctacacctaagt

SEQ ID NO: 1068795 - DNA, 15 bp, Homo sapiens
tcatctacacctaag

SEQ ID NO: 1068796 - DNA, 15 bp, Homo sapiens
ctcatctacacctaa

SEQ ID NO: 1068797 - DNA, 15 bp, Homo sapiens
actcatctacaccta

SEQ ID NO: 1068798 - DNA, 15 bp, Homo sapiens
tactcatctacacct

SEQ ID NO: 1068799 - DNA, 15 bp, Homo sapiens
ttactcatctacacc

SEQ ID NO: 1068800 - DNA, 15 bp, Homo sapiens
attactcatctacac

SEQ ID NO: 1068801 - DNA, 15 bp, Homo sapiens
tattactcatctaca

SEQ ID NO: 1068802 - DNA, 15 bp, Homo sapiens
ttattactcatctac

SEQ ID NO: 1068803 - DNA, 15 bp, Homo sapiens
cttattactcatcta

SEQ ID NO: 1068804 - DNA, 15 bp, Homo sapiens
acttattactcatct

SEQ ID NO: 1068805 - DNA, 15 bp, Homo sapiens
cacttattactcatc

SEQ ID NO: 1068806 - DNA, 15 bp, Homo sapiens
ccacttattactcat

SEQ ID NO: 1068807 - DNA, 15 bp, Homo sapiens
gccacttattactca

SEQ ID NO: 1068808 - DNA, 15 bp, Homo sapiens
tgccacttattactc

SEQ ID NO: 1068809 - DNA, 15 bp, Homo sapiens
gtgccacttattact

SEQ ID NO: 1068810 - DNA, 15 bp, Homo sapiens
tgtgccacttattac

SEQ ID NO: 1068811 - DNA, 15 bp, Homo sapiens
ctgtgccacttatta

SEQ ID NO: 1068812 - DNA, 15 bp, Homo sapiens
cctgtgccacttatt

SEQ ID NO: 1068813 - DNA, 15 bp, Homo sapiens
acctgtgccacttat

SEQ ID NO: 1068814 - DNA, 15 bp, Homo sapiens
tacctgtgccactta

SEQ ID NO: 1068815 - DNA, 15 bp, Homo sapiens
ctacctgtgccactt

SEQ ID NO: 1068816 - DNA, 15 bp, Homo sapiens
cctacctgtgccact

SEQ ID NO: 1068817 - DNA, 15 bp, Homo sapiens
acctacctgtgccac

SEQ ID NO: 1068818 - DNA, 15 bp, Homo sapiens
tacctacctgtgcca

SEQ ID NO: 1068819 - DNA, 15 bp, Homo sapiens
ctacctacctgtgcc

SEQ ID NO: 1068820 - DNA, 15 bp, Homo sapiens
cctacctacctgtgc

SEQ ID NO: 1068821 - DNA, 15 bp, Homo sapiens
gcctacctacctgtg

SEQ ID NO: 1068822 - DNA, 15 bp, Homo sapiens
cgcctacctacctgt

SEQ ID NO: 1068823 - DNA, 15 bp, Homo sapiens
acgcctacctacctg

SEQ ID NO: 1068824 - DNA, 15 bp, Homo sapiens
aacgcctacctacct

SEQ ID NO: 1068825 - DNA, 15 bp, Homo sapiens
aaacgcctacctacc

SEQ ID NO: 1068826 - DNA, 15 bp, Homo sapiens
gaaacgcctacctac

SEQ ID NO: 1068827 - DNA, 15 bp, Homo sapiens
tgaaacgcctaccta

SEQ ID NO: 1068828 - DNA, 15 bp, Homo sapiens
ttgaaacgcctacct

SEQ ID NO: 1068829 - DNA, 15 bp, Homo sapiens
attgaaacgcctacc

SEQ ID NO: 1068830 - DNA, 15 bp, Homo sapiens
gattgaaacgcctac

SEQ ID NO: 1068831 - DNA, 15 bp, Homo sapiens
tgattgaaacgccta

SEQ ID NO: 1068832 - DNA, 15 bp, Homo sapiens
ctgattgaaacgcct

SEQ ID NO: 1068833 - DNA, 15 bp, Homo sapiens
tctgattgaaacgcc

SEQ ID NO: 1068834 - DNA, 15 bp, Homo sapiens
ctctgattgaaacgc

SEQ ID NO: 1068835 - DNA, 15 bp, Homo sapiens
tctctgattgaaacg

SEQ ID NO: 1068836 - DNA, 15 bp, Homo sapiens
ttctctgattgaaac

SEQ ID NO: 1068837 - DNA, 15 bp, Homo sapiens
tttctctgattgaaa

SEQ ID NO: 1068838 - DNA, 15 bp, Homo sapiens
ttttctctgattgaa

SEQ ID NO: 1068839 - DNA, 15 bp, Homo sapiens
attttctctgattga

SEQ ID NO: 1068840 - DNA, 15 bp, Homo sapiens
cattttctctgattg

SEQ ID NO: 1068841 - DNA, 15 bp, Homo sapiens
ccattttctctgatt

SEQ ID NO: 1068842 - DNA, 15 bp, Homo sapiens
cccattttctctgat

SEQ ID NO: 1068843 - DNA, 15 bp, Homo sapiens
gcccattttctctga

SEQ ID NO: 1068844 - DNA, 15 bp, Homo sapiens
tgcccattttctctg

SEQ ID NO: 1068845 - DNA, 15 bp, Homo sapiens
ttgcccattttctct

SEQ ID NO: 1068846 - DNA, 15 bp, Homo sapiens
cttgcccattttctc

SEQ ID NO: 1068847 - DNA, 15 bp, Homo sapiens
tcttgcccattttct

SEQ ID NO: 1068848 - DNA, 15 bp, Homo sapiens
ttcttgcccattttc

SEQ ID NO: 1068849 - DNA, 15 bp, Homo sapiens
tttcttgcccatttt

SEQ ID NO: 1068850 - DNA, 15 bp, Homo sapiens
ctttcttgcccattt

SEQ ID NO: 1068851 - DNA, 15 bp, Homo sapiens
tctttcttgcccatt

SEQ ID NO: 1068852 - DNA, 15 bp, Homo sapiens
ttctttcttgcccat

SEQ ID NO: 1068853 - DNA, 15 bp, Homo sapiens
tttctttcttgccca

SEQ ID NO: 1068854 - DNA, 15 bp, Homo sapiens
ttttctttcttgccc

SEQ ID NO: 1068855 - DNA, 15 bp, Homo sapiens
cttttctttcttgcc

SEQ ID NO: 1068856 - DNA, 15 bp, Homo sapiens
tcttttctttcttgc

SEQ ID NO: 1068857 - DNA, 15 bp, Homo sapiens
ttcttttctttcttg

SEQ ID NO: 1068858 - DNA, 15 bp, Homo sapiens
cttcttttctttctt

SEQ ID NO: 1068859 - DNA, 15 bp, Homo sapiens
tcttcttttctttct

SEQ ID NO: 1068860 - DNA, 15 bp, Homo sapiens
gtcttcttttctttc

SEQ ID NO: 1068861 - DNA, 15 bp, Homo sapiens
tgtcttcttttcttt

SEQ ID NO: 1068862 - DNA, 15 bp, Homo sapiens
ttgtcttcttttctt

SEQ ID NO: 1068863 - DNA, 15 bp, Homo sapiens
gttgtcttcttttct

SEQ ID NO: 1068864 - DNA, 15 bp, Homo sapiens
agttgtcttcttttc

SEQ ID NO: 1068865 - DNA, 15 bp, Homo sapiens
gagttgtcttctttt

SEQ ID NO: 1068866 - DNA, 15 bp, Homo sapiens
ggagttgtcttcttt

SEQ ID NO: 1068867 - DNA, 15 bp, Homo sapiens
tggagttgtcttctt

SEQ ID NO: 1068868 - DNA, 15 bp, Homo sapiens
gtggagttgtcttct

SEQ ID NO: 1068869 - DNA, 15 bp, Homo sapiens
agtggagttgtcttc

SEQ ID NO: 1068870 - DNA, 15 bp, Homo sapiens
gagtggagttgtctt

SEQ ID NO: 1068871 - DNA, 15 bp, Homo sapiens
tgagtggagttgtct

SEQ ID NO: 1068872 - DNA, 15 bp, Homo sapiens
ctgagtggagttgtc

SEQ ID NO: 1068873 - DNA, 15 bp, Homo sapiens
gctgagtggagttgt

SEQ ID NO: 1068874 - DNA, 15 bp, Homo sapiens
agctgagtggagttg

SEQ ID NO: 1068875 - DNA, 15 bp, Homo sapiens
gagctgagtggagtt

SEQ ID NO: 1068876 - DNA, 15 bp, Homo sapiens
agagctgagtggagt

SEQ ID NO: 1068877 - DNA, 15 bp, Homo sapiens
gagagctgagtggag

SEQ ID NO: 1068878 - DNA, 15 bp, Homo sapiens
tgagagctgagtgga

SEQ ID NO: 1068879 - DNA, 15 bp, Homo sapiens
ctgagagctgagtgg

SEQ ID NO: 1068880 - DNA, 15 bp, Homo sapiens
actgagagctgagtg

SEQ ID NO: 1068881 - DNA, 15 bp, Homo sapiens
aactgagagctgagt

SEQ ID NO: 1068882 - DNA, 15 bp, Homo sapiens
caactgagagctgag

SEQ ID NO: 1068883 - DNA, 15 bp, Homo sapiens
acaactgagagctga

SEQ ID NO: 1068884 - DNA, 15 bp, Homo sapiens
gacaactgagagctg

SEQ ID NO: 1068885 - DNA, 15 bp, Homo sapiens
agacaactgagagct

SEQ ID NO: 1068886 - DNA, 15 bp, Homo sapiens
gagacaactgagagc

SEQ ID NO: 1068887 - DNA, 15 bp, Homo sapiens
ggagacaactgagag

SEQ ID NO: 1068888 - DNA, 15 bp, Homo sapiens
gggagacaactgaga

SEQ ID NO: 1068889 - DNA, 15 bp, Homo sapiens
cgggagacaactgag

SEQ ID NO: 1068890 - DNA, 15 bp, Homo sapiens
gcgggagacaactga

SEQ ID NO: 1068891 - DNA, 15 bp, Homo sapiens
tgcgggagacaactg

SEQ ID NO: 1068892 - DNA, 15 bp, Homo sapiens
atgcgggagacaact

SEQ ID NO: 1068893 - DNA, 15 bp, Homo sapiens
catgcgggagacaac

SEQ ID NO: 1068894 - DNA, 15 bp, Homo sapiens
gcatgcgggagacaa

SEQ ID NO: 1068895 - DNA, 15 bp, Homo sapiens
ggcatgcgggagaca

SEQ ID NO: 1068896 - DNA, 15 bp, Homo sapiens
tggcatgcgggagac

SEQ ID NO: 1068897 - DNA, 15 bp, Homo sapiens
ctggcatgcgggaga

SEQ ID NO: 1068898 - DNA, 15 bp, Homo sapiens
cctggcatgcgggag

SEQ ID NO: 1068899 - DNA, 15 bp, Homo sapiens
gcctggcatgcggga

SEQ ID NO: 1068900 - DNA, 15 bp, Homo sapiens
tgcctggcatgcggg

SEQ ID NO: 1068901 - DNA, 15 bp, Homo sapiens
gtgcctggcatgcgg

SEQ ID NO: 1068902 - DNA, 15 bp, Homo sapiens
tgtgcctggcatgcg

SEQ ID NO: 1068903 - DNA, 15 bp, Homo sapiens
ttgtgcctggcatgc

SEQ ID NO: 1068904 - DNA, 15 bp, Homo sapiens
cttgtgcctggcatg

SEQ ID NO: 1068905 - DNA, 15 bp, Homo sapiens
acttgtgcctggcat

SEQ ID NO: 1068906 - DNA, 15 bp, Homo sapiens
aacttgtgcctggca

SEQ ID NO: 1068907 - DNA, 15 bp, Homo sapiens
gaacttgtgcctggc

SEQ ID NO: 1068908 - DNA, 15 bp, Homo sapiens
tgaacttgtgcctgg

SEQ ID NO: 1068909 - DNA, 15 bp, Homo sapiens
atgaacttgtgcctg

SEQ ID NO: 1068910 - DNA, 15 bp, Homo sapiens
tatgaacttgtgcct

SEQ ID NO: 1068911 - DNA, 15 bp, Homo sapiens
ttatgaacttgtgcc

SEQ ID NO: 1068912 - DNA, 15 bp, Homo sapiens
tttatgaacttgtgc

SEQ ID NO: 1068913 - DNA, 15 bp, Homo sapiens
atttatgaacttgtg

SEQ ID NO: 1068914 - DNA, 15 bp, Homo sapiens
tatttatgaacttgt

SEQ ID NO: 1068915 - DNA, 15 bp, Homo sapiens
atatttatgaacttg

SEQ ID NO: 1068916 - DNA, 15 bp, Homo sapiens
aatatttatgaactt

SEQ ID NO: 1068917 - DNA, 15 bp, Homo sapiens
gaatatttatgaact

SEQ ID NO: 1068918 - DNA, 15 bp, Homo sapiens
ggaatatttatgaac

SEQ ID NO: 1068919 - DNA, 15 bp, Homo sapiens
tggaatatttatgaa

SEQ ID NO: 1068920 - DNA, 15 bp, Homo sapiens
ttggaatatttatga

SEQ ID NO: 1068921 - DNA, 15 bp, Homo sapiens
tttggaatatttatg

SEQ ID NO: 1068922 - DNA, 15 bp, Homo sapiens
ctttggaatatttat

SEQ ID NO: 1068923 - DNA, 15 bp, Homo sapiens
cctttggaatattta

SEQ ID NO: 1068924 - DNA, 15 bp, Homo sapiens
ccctttggaatattt

SEQ ID NO: 1068925 - DNA, 15 bp, Homo sapiens
accctttggaatatt

SEQ ID NO: 1068926 - DNA, 15 bp, Homo sapiens
aaccctttggaatat

SEQ ID NO: 1068927 - DNA, 15 bp, Homo sapiens
aaaccctttggaata

SEQ ID NO: 1068928 - DNA, 15 bp, Homo sapiens
aaaaccctttggaat

SEQ ID NO: 1068929 - DNA, 15 bp, Homo sapiens
taaaaccctttggaa

SEQ ID NO: 1068930 - DNA, 15 bp, Homo sapiens
ataaaaccctttgga

SEQ ID NO: 1068931 - DNA, 15 bp, Homo sapiens
aataaaaccctttgg

SEQ ID NO: 1068932 - DNA, 15 bp, Homo sapiens
aaataaaaccctttg

SEQ ID NO: 1068933 - DNA, 15 bp, Homo sapiens
caaataaaacccttt

SEQ ID NO: 1068934 - DNA, 15 bp, Homo sapiens
acaaataaaaccctt

SEQ ID NO: 1068935 - DNA, 15 bp, Homo sapiens
cacaaataaaaccct

SEQ ID NO: 1068936 - DNA, 15 bp, Homo sapiens
tcacaaataaaaccc

SEQ ID NO: 1068937 - DNA, 15 bp, Homo sapiens
atcacaaataaaacc

SEQ ID NO: 1068938 - DNA, 15 bp, Homo sapiens
aatcacaaataaaac

SEQ ID NO: 1068939 - DNA, 15 bp, Homo sapiens
aaatcacaaataaaa

SEQ ID NO: 1068940 - DNA, 15 bp, Homo sapiens
aaaatcacaaataaa

SEQ ID NO: 1068941 - DNA, 15 bp, Homo sapiens
taaaatcacaaataa

SEQ ID NO: 1068942 - DNA, 15 bp, Homo sapiens
ctaaaatcacaaata

SEQ ID NO: 1068943 - DNA, 15 bp, Homo sapiens
tctaaaatcacaaat

SEQ ID NO: 1068944 - DNA, 15 bp, Homo sapiens
ttctaaaatcacaaa

SEQ ID NO: 1068945 - DNA, 15 bp, Homo sapiens
tttctaaaatcacaa

SEQ ID NO: 1068946 - DNA, 15 bp, Homo sapiens
ctttctaaaatcaca

SEQ ID NO: 1068947 - DNA, 15 bp, Homo sapiens
actttctaaaatcac

SEQ ID NO: 1068948 - DNA, 15 bp, Homo sapiens
cactttctaaaatca

SEQ ID NO: 1068949 - DNA, 15 bp, Homo sapiens
acactttctaaaatc

SEQ ID NO: 1068950 - DNA, 15 bp, Homo sapiens
aacactttctaaaat

SEQ ID NO: 1068951 - DNA, 15 bp, Homo sapiens
caacactttctaaaa

SEQ ID NO: 1068952 - DNA, 15 bp, Homo sapiens
gcaacactttctaaa

SEQ ID NO: 1068953 - DNA, 15 bp, Homo sapiens
ggcaacactttctaa

SEQ ID NO: 1068954 - DNA, 15 bp, Homo sapiens
tggcaacactttcta

SEQ ID NO: 1068955 - DNA, 15 bp, Homo sapiens
ttggcaacactttct

SEQ ID NO: 1068956 - DNA, 15 bp, Homo sapiens
cttggcaacactttc

SEQ ID NO: 1068957 - DNA, 15 bp, Homo sapiens
acttggcaacacttt

SEQ ID NO: 1068958 - DNA, 15 bp, Homo sapiens
aacttggcaacactt

SEQ ID NO: 1068959 - DNA, 15 bp, Homo sapiens
taacttggcaacact

SEQ ID NO: 1068960 - DNA, 15 bp, Homo sapiens
ataacttggcaacac

SEQ ID NO: 1068961 - DNA, 15 bp, Homo sapiens
gataacttggcaaca

SEQ ID NO: 1068962 - DNA, 15 bp, Homo sapiens
agataacttggcaac

SEQ ID NO: 1068963 - DNA, 15 bp, Homo sapiens
cagataacttggcaa

SEQ ID NO: 1068964 - DNA, 15 bp, Homo sapiens
ccagataacttggca

SEQ ID NO: 1068965 - DNA, 15 bp, Homo sapiens
agatttggctaaagc

SEQ ID NO: 1068966 - DNA, 15 bp, Homo sapiens
gagatttggctaaag

SEQ ID NO: 1068967 - DNA, 15 bp, Homo sapiens
cgagatttggctaaa

SEQ ID NO: 1068968 - DNA, 15 bp, Homo sapiens
gcgagatttggctaa

SEQ ID NO: 1068969 - DNA, 15 bp, Homo sapiens
ggcgagatttggcta

SEQ ID NO: 1068970 - DNA, 15 bp, Homo sapiens
gggcgagatttggct

SEQ ID NO: 1068971 - DNA, 15 bp, Homo sapiens
ggggcgagatttggc

SEQ ID NO: 1068972 - DNA, 15 bp, Homo sapiens
gggggcgagatttgg

SEQ ID NO: 1068973 - DNA, 15 bp, Homo sapiens
agggggcgagatttg

SEQ ID NO: 1068974 - DNA, 15 bp, Homo sapiens
cagggggcgagattt

SEQ ID NO: 1068975 - DNA, 15 bp, Homo sapiens
tcagggggcgagatt

SEQ ID NO: 1068976 - DNA, 15 bp, Homo sapiens
ttcagggggcgagat

SEQ ID NO: 1068977 - DNA, 15 bp, Homo sapiens
attcagggggcgaga

SEQ ID NO: 1068978 - DNA, 15 bp, Homo sapiens
tattcagggggcgag

SEQ ID NO: 1068979 - DNA, 15 bp, Homo sapiens
atattcagggggcga

SEQ ID NO: 1068980 - DNA, 15 bp, Homo sapiens
catattcagggggcg

SEQ ID NO: 1068981 - DNA, 15 bp, Homo sapiens
acatattcagggggc

SEQ ID NO: 1068982 - DNA, 15 bp, Homo sapiens
aacatattcaggggg

SEQ ID NO: 1068983 - DNA, 15 bp, Homo sapiens
gaacatattcagggg

SEQ ID NO: 1068984 - DNA, 15 bp, Homo sapiens
ggaacatattcaggg

SEQ ID NO: 1068985 - DNA, 15 bp, Homo sapiens
tggaacatattcagg

SEQ ID NO: 1068986 - DNA, 15 bp, Homo sapiens
gtggaacatattcag

SEQ ID NO: 1068987 - DNA, 15 bp, Homo sapiens
tgtggaacatattca

SEQ ID NO: 1068988 - DNA, 15 bp, Homo sapiens
ctgtggaacatattc

SEQ ID NO: 1068989 - DNA, 15 bp, Homo sapiens
actgtggaacatatt

SEQ ID NO: 1068990 - DNA, 15 bp, Homo sapiens
cactgtggaacatat

SEQ ID NO: 1068991 - DNA, 15 bp, Homo sapiens
tcactgtggaacata

SEQ ID NO: 1068992 - DNA, 15 bp, Homo sapiens
atcactgtggaacat

SEQ ID NO: 1068993 - DNA, 15 bp, Homo sapiens
aatcactgtggaaca

SEQ ID NO: 1068994 - DNA, 15 bp, Homo sapiens
aaatcactgtggaac

SEQ ID NO: 1068995 - DNA, 15 bp, Homo sapiens
caaatcactgtggaa

SEQ ID NO: 1068996 - DNA, 15 bp, Homo sapiens
acaaatcactgtgga

SEQ ID NO: 1068997 - DNA, 15 bp, Homo sapiens
gacaaatcactgtgg

SEQ ID NO: 1068998 - DNA, 15 bp, Homo sapiens
aggacaaatcactgt

SEQ ID NO: 1068999 - DNA, 15 bp, Homo sapiens
taggacaaatcactg

SEQ ID NO: 1069000 - DNA, 15 bp, Homo sapiens
ataggacaaatcact

SEQ ID NO: 1069001 - DNA, 15 bp, Homo sapiens
cataggacaaatcac

SEQ ID NO: 1069002 - DNA, 15 bp, Homo sapiens
gcataggacaaatca

SEQ ID NO: 1069003 - DNA, 15 bp, Homo sapiens
ggcataggacaaatc

SEQ ID NO: 1069004 - DNA, 15 bp, Homo sapiens
aggcataggacaaat

SEQ ID NO: 1069005 - DNA, 15 bp, Homo sapiens
gaggcataggacaaa

SEQ ID NO: 1069006 - DNA, 15 bp, Homo sapiens
tgaggcataggacaa

SEQ ID NO: 1069007 - DNA, 15 bp, Homo sapiens
ctgaggcataggaca

SEQ ID NO: 1069008 - DNA, 15 bp, Homo sapiens
tctgaggcataggac

SEQ ID NO: 1069009 - DNA, 15 bp, Homo sapiens
ttctgaggcatagga

SEQ ID NO: 1069010 - DNA, 15 bp, Homo sapiens
cttctgaggcatagg

SEQ ID NO: 1069011 - DNA, 15 bp, Homo sapiens
gcttctgaggcatag

SEQ ID NO: 1069012 - DNA, 15 bp, Homo sapiens
agcttctgaggcata

SEQ ID NO: 1069013 - DNA, 15 bp, Homo sapiens
cagcttctgaggcat

SEQ ID NO: 1069014 - DNA, 15 bp, Homo sapiens
ccagcttctgaggca

SEQ ID NO: 1069015 - DNA, 15 bp, Homo sapiens
gccagcttctgaggc

SEQ ID NO: 1069016 - DNA, 15 bp, Homo sapiens
ggccagcttctgagg

SEQ ID NO: 1069017 - DNA, 15 bp, Homo sapiens
gggccagcttctgag

SEQ ID NO: 1069018 - DNA, 15 bp, Homo sapiens
tgggccagcttctga

SEQ ID NO: 1069019 - DNA, 15 bp, Homo sapiens
gtgggccagcttctg

SEQ ID NO: 1069020 - DNA, 15 bp, Homo sapiens
agtgggccagcttct

SEQ ID NO: 1069021 - DNA, 15 bp, Homo sapiens
cagtgggccagcttc

SEQ ID NO: 1069022 - DNA, 15 bp, Homo sapiens
ccagtgggccagctt

SEQ ID NO: 1069023 - DNA, 15 bp, Homo sapiens
gccagtgggccagct

SEQ ID NO: 1069024 - DNA, 15 bp, Homo sapiens
agccagtgggccagc

SEQ ID NO: 1069025 - DNA, 15 bp, Homo sapiens
cagccagtgggccag

SEQ ID NO: 1069026 - DNA, 15 bp, Homo sapiens
tcagccagtgggcca

SEQ ID NO: 1069027 - DNA, 15 bp, Homo sapiens
gtcagccagtgggcc

SEQ ID NO: 1069028 - DNA, 15 bp, Homo sapiens
tgtcagccagtgggc

SEQ ID NO: 1069029 - DNA, 15 bp, Homo sapiens
ctgtcagccagtggg

SEQ ID NO: 1069030 - DNA, 15 bp, Homo sapiens
cctgtcagccagtgg

SEQ ID NO: 1069031 - DNA, 15 bp, Homo sapiens
tcctgtcagccagtg

SEQ ID NO: 1069032 - DNA, 15 bp, Homo sapiens
gtcctgtcagccagt

SEQ ID NO: 1069033 - DNA, 15 bp, Homo sapiens
agtcctgtcagccag

SEQ ID NO: 1069034 - DNA, 15 bp, Homo sapiens
cagtcctgtcagcca

SEQ ID NO: 1069035 - DNA, 15 bp, Homo sapiens
ccagtcctgtcagcc

SEQ ID NO: 1069036 - DNA, 15 bp, Homo sapiens
cccagtcctgtcagc

SEQ ID NO: 1069037 - DNA, 15 bp, Homo sapiens
ccccagtcctgtcag

SEQ ID NO: 1069038 - DNA, 15 bp, Homo sapiens
gccccagtcctgtca

SEQ ID NO: 1069039 - DNA, 15 bp, Homo sapiens
tgccccagtcctgtc

SEQ ID NO: 1069040 - DNA, 15 bp, Homo sapiens
gtgccccagtcctgt

SEQ ID NO: 1069041 - DNA, 15 bp, Homo sapiens
ggtgccccagtcctg

SEQ ID NO: 1069042 - DNA, 15 bp, Homo sapiens
tggtgccccagtcct

SEQ ID NO: 1069043 - DNA, 15 bp, Homo sapiens
atggtgccccagtcc

SEQ ID NO: 1069044 - DNA, 15 bp, Homo sapiens
aatggtgccccagtc

SEQ ID NO: 1069045 - DNA, 15 bp, Homo sapiens
aaatggtgccccagt

SEQ ID NO: 1069046 - DNA, 15 bp, Homo sapiens
aaaatggtgccccag

SEQ ID NO: 1069047 - DNA, 15 bp, Homo sapiens
gaaaatggtgcccca

SEQ ID NO: 1069048 - DNA, 15 bp, Homo sapiens
agaaaatggtgcccc

SEQ ID NO: 1069049 - DNA, 15 bp, Homo sapiens
gagaaaatggtgccc

SEQ ID NO: 1069050 - DNA, 15 bp, Homo sapiens
ggagaaaatggtgcc

SEQ ID NO: 1069051 - DNA, 15 bp, Homo sapiens
aggagaaaatggtgc

SEQ ID NO: 1069052 - DNA, 15 bp, Homo sapiens
gaggagaaaatggtg

SEQ ID NO: 1069053 - DNA, 15 bp, Homo sapiens
tgaggagaaaatggt

SEQ ID NO: 1069054 - DNA, 15 bp, Homo sapiens
atgaggagaaaatgg

SEQ ID NO: 1069055 - DNA, 15 bp, Homo sapiens
tatgaggagaaaatg

SEQ ID NO: 1069056 - DNA, 15 bp, Homo sapiens
ttatgaggagaaaat

SEQ ID NO: 1069057 - DNA, 15 bp, Homo sapiens
cttatgaggagaaaa

SEQ ID NO: 1069058 - DNA, 15 bp, Homo sapiens
gcttatgaggagaaa

SEQ ID NO: 1069059 - DNA, 15 bp, Homo sapiens
tgcttatgaggagaa

SEQ ID NO: 1069060 - DNA, 15 bp, Homo sapiens
atgcttatgaggaga

SEQ ID NO: 1069061 - DNA, 15 bp, Homo sapiens
aatgcttatgaggag

SEQ ID NO: 1069062 - DNA, 15 bp, Homo sapiens
aaatgcttatgagga

SEQ ID NO: 1069063 - DNA, 15 bp, Homo sapiens
caaatgcttatgagg

SEQ ID NO: 1069064 - DNA, 15 bp, Homo sapiens
acaaatgcttatgag

SEQ ID NO: 1069065 - DNA, 15 bp, Homo sapiens
tacaaatgcttatga

SEQ ID NO: 1069066 - DNA, 15 bp, Homo sapiens
gtacaaatgcttatg

SEQ ID NO: 1069067 - DNA, 15 bp, Homo sapiens
tgtacaaatgcttat

SEQ ID NO: 1069068 - DNA, 15 bp, Homo sapiens
ctgtacaaatgctta

SEQ ID NO: 1069069 - DNA, 15 bp, Homo sapiens
tctgtacaaatgctt

SEQ ID NO: 1069070 - DNA, 15 bp, Homo sapiens
ctctgtacaaatgct

SEQ ID NO: 1069071 - DNA, 15 bp, Homo sapiens
cctctgtacaaatgc

SEQ ID NO: 1069072 - DNA, 15 bp, Homo sapiens
ccctctgtacaaatg

SEQ ID NO: 1069073 - DNA, 15 bp, Homo sapiens
cccctctgtacaaat

SEQ ID NO: 1069074 - DNA, 15 bp, Homo sapiens
ccccctctgtacaaa

SEQ ID NO: 1069075 - DNA, 15 bp, Homo sapiens
gccccctctgtacaa

SEQ ID NO: 1069076 - DNA, 15 bp, Homo sapiens
tgccccctctgtaca

SEQ ID NO: 1069077 - DNA, 15 bp, Homo sapiens
gtgccccctctgtac

SEQ ID NO: 1069078 - DNA, 15 bp, Homo sapiens
agtgccccctctgta

SEQ ID NO: 1069079 - DNA, 15 bp, Homo sapiens
cagtgccccctctgt

SEQ ID NO: 1069080 - DNA, 15 bp, Homo sapiens
ccagtgccccctctg

SEQ ID NO: 1069081 - DNA, 15 bp, Homo sapiens
gccagtgccccctct

SEQ ID NO: 1069082 - DNA, 15 bp, Homo sapiens
tgccagtgccccctc

SEQ ID NO: 1069083 - DNA, 15 bp, Homo sapiens
atgccagtgccccct

SEQ ID NO: 1069084 - DNA, 15 bp, Homo sapiens
aatgccagtgccccc

SEQ ID NO: 1069085 - DNA, 15 bp, Homo sapiens
aaatgccagtgcccc

SEQ ID NO: 1069086 - DNA, 15 bp, Homo sapiens
taaatgccagtgccc

SEQ ID NO: 1069087 - DNA, 15 bp, Homo sapiens
ataaatgccagtgcc

SEQ ID NO: 1069088 - DNA, 15 bp, Homo sapiens
aataaatgccagtgc

SEQ ID NO: 1069089 - DNA, 15 bp, Homo sapiens
gaataaatgccagtg

SEQ ID NO: 1069090 - DNA, 15 bp, Homo sapiens
ggaataaatgccagt

SEQ ID NO: 1069091 - DNA, 15 bp, Homo sapiens
gggaataaatgccag

SEQ ID NO: 1069092 - DNA, 15 bp, Homo sapiens
ggggaataaatgcca

SEQ ID NO: 1069093 - DNA, 15 bp, Homo sapiens
aggggaataaatgcc

SEQ ID NO: 1069094 - DNA, 15 bp, Homo sapiens
caggggaataaatgc

SEQ ID NO: 1069095 - DNA, 15 bp, Homo sapiens
gcaggggaataaatg

SEQ ID NO: 1069096 - DNA, 15 bp, Homo sapiens
tgcaggggaataaat

SEQ ID NO: 1069097 - DNA, 15 bp, Homo sapiens
ttgcaggggaataaa

SEQ ID NO: 1069098 - DNA, 15 bp, Homo sapiens
attgcaggggaataa

SEQ ID NO: 1069099 - DNA, 15 bp, Homo sapiens
cattgcaggggaata

SEQ ID NO: 1069100 - DNA, 15 bp, Homo sapiens
gcattgcaggggaat

SEQ ID NO: 1069101 - DNA, 15 bp, Homo sapiens
ggcattgcaggggaa

SEQ ID NO: 1069102 - DNA, 15 bp, Homo sapiens
gggcattgcagggga

SEQ ID NO: 1069103 - DNA, 15 bp, Homo sapiens
tgggcattgcagggg

SEQ ID NO: 1069104 - DNA, 15 bp, Homo sapiens
ctgggcattgcaggg

SEQ ID NO: 1069105 - DNA, 15 bp, Homo sapiens
tctgggcattgcagg

SEQ ID NO: 1069106 - DNA, 15 bp, Homo sapiens
atctgggcattgcag

SEQ ID NO: 1069107 - DNA, 15 bp, Homo sapiens
aatctgggcattgca

SEQ ID NO: 1069108 - DNA, 15 bp, Homo sapiens
caatctgggcattgc

SEQ ID NO: 1069109 - DNA, 15 bp, Homo sapiens
tcaatctgggcattg

SEQ ID NO: 1069110 - DNA, 15 bp, Homo sapiens
ttcaatctgggcatt

SEQ ID NO: 1069111 - DNA, 15 bp, Homo sapiens
gttcaatctgggcat

SEQ ID NO: 1069112 - DNA, 15 bp, Homo sapiens
cgttcaatctgggca

SEQ ID NO: 1069113 - DNA, 15 bp, Homo sapiens
acgttcaatctgggc

SEQ ID NO: 1069114 - DNA, 15 bp, Homo sapiens
aacgttcaatctggg

SEQ ID NO: 1069115 - DNA, 15 bp, Homo sapiens
aaacgttcaatctgg

SEQ ID NO: 1069116 - DNA, 15 bp, Homo sapiens
caaacgttcaatctg

SEQ ID NO: 1069117 - DNA, 15 bp, Homo sapiens
gcaaacgttcaatct

SEQ ID NO: 1069118 - DNA, 15 bp, Homo sapiens
agcaaacgttcaatc

SEQ ID NO: 1069119 - DNA, 15 bp, Homo sapiens
tagcaaacgttcaat

SEQ ID NO: 1069120 - DNA, 15 bp, Homo sapiens
ctagcaaacgttcaa

SEQ ID NO: 1069121 - DNA, 15 bp, Homo sapiens
gctagcaaacgttca

SEQ ID NO: 1069122 - DNA, 15 bp, Homo sapiens
agctagcaaacgttc

SEQ ID NO: 1069123 - DNA, 15 bp, Homo sapiens
cagctagcaaacgtt

SEQ ID NO: 1069124 - DNA, 15 bp, Homo sapiens
ccagctagcaaacgt

SEQ ID NO: 1069125 - DNA, 15 bp, Homo sapiens
gccagctagcaaacg

SEQ ID NO: 1069126 - DNA, 15 bp, Homo sapiens
agccagctagcaaac

SEQ ID NO: 1069127 - DNA, 15 bp, Homo sapiens
gagccagctagcaaa

SEQ ID NO: 1069128 - DNA, 15 bp, Homo sapiens
ggagccagctagcaa

SEQ ID NO: 1069129 - DNA, 15 bp, Homo sapiens
tggagccagctagca

SEQ ID NO: 1069130 - DNA, 15 bp, Homo sapiens
ctggagccagctagc

SEQ ID NO: 1069131 - DNA, 15 bp, Homo sapiens
cctggagccagctag

SEQ ID NO: 1069132 - DNA, 15 bp, Homo sapiens
ccctggagccagcta

SEQ ID NO: 1069133 - DNA, 15 bp, Homo sapiens
gccctggagccagct

SEQ ID NO: 1069134 - DNA, 15 bp, Homo sapiens
tgccctggagccagc

SEQ ID NO: 1069135 - DNA, 15 bp, Homo sapiens
atgccctggagccag

SEQ ID NO: 1069136 - DNA, 15 bp, Homo sapiens
catgccctggagcca

SEQ ID NO: 1069137 - DNA, 15 bp, Homo sapiens
gcatgccctggagcc

SEQ ID NO: 1069138 - DNA, 15 bp, Homo sapiens
tgcatgccctggagc

SEQ ID NO: 1069139 - DNA, 15 bp, Homo sapiens
ctgcatgccctggag

SEQ ID NO: 1069140 - DNA, 15 bp, Homo sapiens
gctgcatgccctgga

SEQ ID NO: 1069141 - DNA, 15 bp, Homo sapiens
cgctgcatgccctgg

SEQ ID NO: 1069142 - DNA, 15 bp, Homo sapiens
ccgctgcatgccctg

SEQ ID NO: 1069143 - DNA, 15 bp, Homo sapiens
tccgctgcatgccct

SEQ ID NO: 1069144 - DNA, 15 bp, Homo sapiens
gtccgctgcatgccc

SEQ ID NO: 1069145 - DNA, 15 bp, Homo sapiens
agtccgctgcatgcc

SEQ ID NO: 1069146 - DNA, 15 bp, Homo sapiens
tagtccgctgcatgc

SEQ ID NO: 1069147 - DNA, 15 bp, Homo sapiens
ctagtccgctgcatg

SEQ ID NO: 1069148 - DNA, 15 bp, Homo sapiens
actagtccgctgcat

SEQ ID NO: 1069149 - DNA, 15 bp, Homo sapiens
gactagtccgctgca

SEQ ID NO: 1069150 - DNA, 15 bp, Homo sapiens
ggactagtccgctgc

SEQ ID NO: 1069151 - DNA, 15 bp, Homo sapiens
gggactagtccgctg

SEQ ID NO: 1069152 - DNA, 15 bp, Homo sapiens
tgggactagtccgct

SEQ ID NO: 1069153 - DNA, 15 bp, Homo sapiens
ctgggactagtccgc

SEQ ID NO: 1069154 - DNA, 15 bp, Homo sapiens
tctgggactagtccg

SEQ ID NO: 1069155 - DNA, 15 bp, Homo sapiens
ctctgggactagtcc

SEQ ID NO: 1069156 - DNA, 15 bp, Homo sapiens
cctctgggactagtc

SEQ ID NO: 1069157 - DNA, 15 bp, Homo sapiens
tcctctgggactagt

SEQ ID NO: 1069158 - DNA, 15 bp, Homo sapiens
gtcctctgggactag

SEQ ID NO: 1069159 - DNA, 15 bp, Homo sapiens
tgtcctctgggacta

SEQ ID NO: 1069160 - DNA, 15 bp, Homo sapiens
ttgtcctctgggact

SEQ ID NO: 1069161 - DNA, 15 bp, Homo sapiens
tttgtcctctgggac

SEQ ID NO: 1069162 - DNA, 15 bp, Homo sapiens
gtttgtcctctggga

SEQ ID NO: 1069163 - DNA, 15 bp, Homo sapiens
tgtttgtcctctggg

SEQ ID NO: 1069164 - DNA, 15 bp, Homo sapiens
ctgtttgtcctctgg

SEQ ID NO: 1069165 - DNA, 15 bp, Homo sapiens
tctgtttgtcctctg

SEQ ID NO: 1069166 - DNA, 15 bp, Homo sapiens
ttctgtttgtcctct

SEQ ID NO: 1069167 - DNA, 15 bp, Homo sapiens
attctgtttgtcctc

SEQ ID NO: 1069168 - DNA, 15 bp, Homo sapiens
gattctgtttgtcct

SEQ ID NO: 1069169 - DNA, 15 bp, Homo sapiens
agattctgtttgtcc

SEQ ID NO: 1069170 - DNA, 15 bp, Homo sapiens
aagattctgtttgtc

SEQ ID NO: 1069171 - DNA, 15 bp, Homo sapiens
aaagattctgtttgt

SEQ ID NO: 1069172 - DNA, 15 bp, Homo sapiens
caaagattctgtttg

SEQ ID NO: 1069173 - DNA, 15 bp, Homo sapiens
gcaaagattctgttt

SEQ ID NO: 1069174 - DNA, 15 bp, Homo sapiens
ggcaaagattctgtt

SEQ ID NO: 1069175 - DNA, 15 bp, Homo sapiens
gggcaaagattctgt

SEQ ID NO: 1069176 - DNA, 15 bp, Homo sapiens
agggcaaagattctg

SEQ ID NO: 1069177 - DNA, 15 bp, Homo sapiens
gagggcaaagattct

SEQ ID NO: 1069178 - DNA, 15 bp, Homo sapiens
ggagggcaaagattc

SEQ ID NO: 1069179 - DNA, 15 bp, Homo sapiens
aggagggcaaagatt

SEQ ID NO: 1069180 - DNA, 15 bp, Homo sapiens
caggagggcaaagat

SEQ ID NO: 1069181 - DNA, 15 bp, Homo sapiens
acaggagggcaaaga

SEQ ID NO: 1069182 - DNA, 15 bp, Homo sapiens
gacaggagggcaaag

SEQ ID NO: 1069183 - DNA, 15 bp, Homo sapiens
agacaggagggcaaa

SEQ ID NO: 1069184 - DNA, 15 bp, Homo sapiens
cagacaggagggcaa

SEQ ID NO: 1069185 - DNA, 15 bp, Homo sapiens
gcagacaggagggca

SEQ ID NO: 1069186 - DNA, 15 bp, Homo sapiens
agcagacaggagggc

SEQ ID NO: 1069187 - DNA, 15 bp, Homo sapiens
tagcagacaggaggg

SEQ ID NO: 1069188 - DNA, 15 bp, Homo sapiens
ctagcagacaggagg

SEQ ID NO: 1069189 - DNA, 15 bp, Homo sapiens
actagcagacaggag

SEQ ID NO: 1069190 - DNA, 15 bp, Homo sapiens
gactagcagacagga

SEQ ID NO: 1069191 - DNA, 15 bp, Homo sapiens
ggactagcagacagg

SEQ ID NO: 1069192 - DNA, 15 bp, Homo sapiens
tggactagcagacag

SEQ ID NO: 1069193 - DNA, 15 bp, Homo sapiens
ctggactagcagaca

SEQ ID NO: 1069194 - DNA, 15 bp, Homo sapiens
actggactagcagac

SEQ ID NO: 1069195 - DNA, 15 bp, Homo sapiens
gactggactagcaga

SEQ ID NO: 1069196 - DNA, 15 bp, Homo sapiens
agactggactagcag

SEQ ID NO: 1069197 - DNA, 15 bp, Homo sapiens
aagactggactagca

SEQ ID NO: 1069198 - DNA, 15 bp, Homo sapiens
aaagactggactagc

SEQ ID NO: 1069199 - DNA, 15 bp, Homo sapiens
aaaagactggactag

SEQ ID NO: 1069200 - DNA, 15 bp, Homo sapiens
gaaaagactggacta

SEQ ID NO: 1069201 - DNA, 15 bp, Homo sapiens
ggaaaagactggact

SEQ ID NO: 1069202 - DNA, 15 bp, Homo sapiens
gggaaaagactggac

SEQ ID NO: 1069203 - DNA, 15 bp, Homo sapiens
agggaaaagactgga

SEQ ID NO: 1069204 - DNA, 15 bp, Homo sapiens
cagggaaaagactgg

SEQ ID NO: 1069205 - DNA, 15 bp, Homo sapiens
gcagggaaaagactg

SEQ ID NO: 1069206 - DNA, 15 bp, Homo sapiens
agcagggaaaagact

SEQ ID NO: 1069207 - DNA, 15 bp, Homo sapiens
cagcagggaaaagac

SEQ ID NO: 1069208 - DNA, 15 bp, Homo sapiens
ccagcagggaaaaga

SEQ ID NO: 1069209 - DNA, 15 bp, Homo sapiens
tccagcagggaaaag

SEQ ID NO: 1069210 - DNA, 15 bp, Homo sapiens
atccagcagggaaaa

SEQ ID NO: 1069211 - DNA, 15 bp, Homo sapiens
gatccagcagggaaa

SEQ ID NO: 1069212 - DNA, 15 bp, Homo sapiens
tgatccagcagggaa

SEQ ID NO: 1069213 - DNA, 15 bp, Homo sapiens
atgatccagcaggga

SEQ ID NO: 1069214 - DNA, 15 bp, Homo sapiens
aatgatccagcaggg

SEQ ID NO: 1069215 - DNA, 15 bp, Homo sapiens
gaatgatccagcagg

SEQ ID NO: 1069216 - DNA, 15 bp, Homo sapiens
agaatgatccagcag

SEQ ID NO: 1069217 - DNA, 15 bp, Homo sapiens
cagaatgatccagca

SEQ ID NO: 1069218 - DNA, 15 bp, Homo sapiens
acagaatgatccagc

SEQ ID NO: 1069219 - DNA, 15 bp, Homo sapiens
cacagaatgatccag

SEQ ID NO: 1069220 - DNA, 15 bp, Homo sapiens
gcacagaatgatcca

SEQ ID NO: 1069221 - DNA, 15 bp, Homo sapiens
ggcacagaatgatcc

SEQ ID NO: 1069222 - DNA, 15 bp, Homo sapiens
aggcacagaatgatc

SEQ ID NO: 1069223 - DNA, 15 bp, Homo sapiens
caggcacagaatgat

SEQ ID NO: 1069224 - DNA, 15 bp, Homo sapiens
acaggcacagaatga

SEQ ID NO: 1069225 - DNA, 15 bp, Homo sapiens
cacaggcacagaatg

SEQ ID NO: 1069226 - DNA, 15 bp, Homo sapiens
gcacaggcacagaat

SEQ ID NO: 1069227 - DNA, 15 bp, Homo sapiens
ggcacaggcacagaa

SEQ ID NO: 1069228 - DNA, 15 bp, Homo sapiens
tggcacaggcacaga

SEQ ID NO: 1069229 - DNA, 15 bp, Homo sapiens
atggcacaggcacag

SEQ ID NO: 1069230 - DNA, 15 bp, Homo sapiens
catggcacaggcaca

SEQ ID NO: 1069231 - DNA, 15 bp, Homo sapiens
tcatggcacaggcac

SEQ ID NO: 1069232 - DNA, 15 bp, Homo sapiens
ctcatggcacaggca

SEQ ID NO: 1069233 - DNA, 15 bp, Homo sapiens
cctcatggcacaggc

SEQ ID NO: 1069234 - DNA, 15 bp, Homo sapiens
acctcatggcacagg

SEQ ID NO: 1069235 - DNA, 15 bp, Homo sapiens
aacctcatggcacag

SEQ ID NO: 1069236 - DNA, 15 bp, Homo sapiens
aaacctcatggcaca

SEQ ID NO: 1069237 - DNA, 15 bp, Homo sapiens
gaaacctcatggcac

SEQ ID NO: 1069238 - DNA, 15 bp, Homo sapiens
agaaacctcatggca

SEQ ID NO: 1069239 - DNA, 15 bp, Homo sapiens
cagaaacctcatggc

SEQ ID NO: 1069240 - DNA, 15 bp, Homo sapiens
gcagaaacctcatgg

SEQ ID NO: 1069241 - DNA, 15 bp, Homo sapiens
ggcagaaacctcatg

SEQ ID NO: 1069242 - DNA, 15 bp, Homo sapiens
tggcagaaacctcat

SEQ ID NO: 1069243 - DNA, 15 bp, Homo sapiens
atggcagaaacctca

SEQ ID NO: 1069244 - DNA, 15 bp, Homo sapiens
gatggcagaaacctc

SEQ ID NO: 1069245 - DNA, 15 bp, Homo sapiens
agatggcagaaacct

SEQ ID NO: 1069246 - DNA, 15 bp, Homo sapiens
tagatggcagaaacc

SEQ ID NO: 1069247 - DNA, 15 bp, Homo sapiens
ttagatggcagaaac

SEQ ID NO: 1069248 - DNA, 15 bp, Homo sapiens
gttagatggcagaaa

SEQ ID NO: 1069249 - DNA, 15 bp, Homo sapiens
tgttagatggcagaa

SEQ ID NO: 1069250 - DNA, 15 bp, Homo sapiens
ttgttagatggcaga

SEQ ID NO: 1069251 - DNA, 15 bp, Homo sapiens
tttgttagatggcag

SEQ ID NO: 1069252 - DNA, 15 bp, Homo sapiens
gtttgttagatggca

SEQ ID NO: 1069253 - DNA, 15 bp, Homo sapiens
tgtttgttagatggc

SEQ ID NO: 1069254 - DNA, 15 bp, Homo sapiens
ctgtttgttagatgg

SEQ ID NO: 1069255 - DNA, 15 bp, Homo sapiens
actgtttgttagatg

SEQ ID NO: 1069256 - DNA, 15 bp, Homo sapiens
cactgtttgttagat

SEQ ID NO: 1069257 - DNA, 15 bp, Homo sapiens
gcactgtttgttaga

SEQ ID NO: 1069258 - DNA, 15 bp, Homo sapiens
ggcactgtttgttag

SEQ ID NO: 1069259 - DNA, 15 bp, Homo sapiens
tggcactgtttgtta

SEQ ID NO: 1069260 - DNA, 15 bp, Homo sapiens
ctggcactgtttgtt

SEQ ID NO: 1069261 - DNA, 15 bp, Homo sapiens
gctggcactgtttgt

SEQ ID NO: 1069262 - DNA, 15 bp, Homo sapiens
ggctggcactgtttg

SEQ ID NO: 1069263 - DNA, 15 bp, Homo sapiens
tggctggcactgttt

SEQ ID NO: 1069264 - DNA, 15 bp, Homo sapiens
ttggctggcactgtt

SEQ ID NO: 1069265 - DNA, 15 bp, Homo sapiens
cttggctggcactgt

SEQ ID NO: 1069266 - DNA, 15 bp, Homo sapiens
gcttggctggcactg

SEQ ID NO: 1069267 - DNA, 15 bp, Homo sapiens
tgcttggctggcact

SEQ ID NO: 1069268 - DNA, 15 bp, Homo sapiens
ttgcttggctggcac

SEQ ID NO: 1069269 - DNA, 15 bp, Homo sapiens
tttgcttggctggca

SEQ ID NO: 1069270 - DNA, 15 bp, Homo sapiens
ctttgcttggctggc

SEQ ID NO: 1069271 - DNA, 15 bp, Homo sapiens
gctttgcttggctgg

SEQ ID NO: 1069272 - DNA, 15 bp, Homo sapiens
cgctttgcttggctg

SEQ ID NO: 1069273 - DNA, 15 bp, Homo sapiens
ccgctttgcttggct

SEQ ID NO: 1069274 - DNA, 15 bp, Homo sapiens
cccgctttgcttggc

SEQ ID NO: 1069275 - DNA, 15 bp, Homo sapiens
gcccgctttgcttgg

SEQ ID NO: 1069276 - DNA, 15 bp, Homo sapiens
tgcccgctttgcttg

SEQ ID NO: 1069277 - DNA, 15 bp, Homo sapiens
atgcccgctttgctt

SEQ ID NO: 1069278 - DNA, 15 bp, Homo sapiens
catgcccgctttgct

SEQ ID NO: 1069279 - DNA, 15 bp, Homo sapiens
gcatgcccgctttgc

SEQ ID NO: 1069280 - DNA, 15 bp, Homo sapiens
tgcatgcccgctttg

SEQ ID NO: 1069281 - DNA, 15 bp, Homo sapiens
ctgcatgcccgcttt

SEQ ID NO: 1069282 - DNA, 15 bp, Homo sapiens
cctgcatgcccgctt

SEQ ID NO: 1069283 - DNA, 15 bp, Homo sapiens
gcctgcatgcccgct

SEQ ID NO: 1069284 - DNA, 15 bp, Homo sapiens
ggcctgcatgcccgc

SEQ ID NO: 1069285 - DNA, 15 bp, Homo sapiens
aggcctgcatgcccg

SEQ ID NO: 1069286 - DNA, 15 bp, Homo sapiens
caggcctgcatgccc

SEQ ID NO: 1069287 - DNA, 15 bp, Homo sapiens
gcaggcctgcatgcc

SEQ ID NO: 1069288 - DNA, 15 bp, Homo sapiens
tgcaggcctgcatgc

SEQ ID NO: 1069289 - DNA, 15 bp, Homo sapiens
ttgcaggcctgcatg

SEQ ID NO: 1069290 - DNA, 15 bp, Homo sapiens
cttgcaggcctgcat

SEQ ID NO: 1069291 - DNA, 15 bp, Homo sapiens
acttgcaggcctgca

SEQ ID NO: 1069292 - DNA, 15 bp, Homo sapiens
cacttgcaggcctgc

SEQ ID NO: 1069293 - DNA, 15 bp, Homo sapiens
ccacttgcaggcctg

SEQ ID NO: 1069294 - DNA, 15 bp, Homo sapiens
accacttgcaggcct

SEQ ID NO: 1069295 - DNA, 15 bp, Homo sapiens
aaccacttgcaggcc

SEQ ID NO: 1069296 - DNA, 15 bp, Homo sapiens
gaaccacttgcaggc

SEQ ID NO: 1069297 - DNA, 15 bp, Homo sapiens
agaaccacttgcagg

SEQ ID NO: 1069298 - DNA, 15 bp, Homo sapiens
gagaaccacttgcag

SEQ ID NO: 1069299 - DNA, 15 bp, Homo sapiens
tgagaaccacttgca

SEQ ID NO: 1069300 - DNA, 15 bp, Homo sapiens
atgagaaccacttgc

SEQ ID NO: 1069301 - DNA, 15 bp, Homo sapiens
catgagaaccacttg

SEQ ID NO: 1069302 - DNA, 15 bp, Homo sapiens
ccatgagaaccactt

SEQ ID NO: 1069303 - DNA, 15 bp, Homo sapiens
tccatgagaaccact

SEQ ID NO: 1069304 - DNA, 15 bp, Homo sapiens
ttccatgagaaccac

SEQ ID NO: 1069305 - DNA, 15 bp, Homo sapiens
cttccatgagaacca

SEQ ID NO: 1069306 - DNA, 15 bp, Homo sapiens
gcttccatgagaacc

SEQ ID NO: 1069307 - DNA, 15 bp, Homo sapiens
agcttccatgagaac

SEQ ID NO: 1069308 - DNA, 15 bp, Homo sapiens
cagcttccatgagaa

SEQ ID NO: 1069309 - DNA, 15 bp, Homo sapiens
acagcttccatgaga

SEQ ID NO: 1069310 - DNA, 15 bp, Homo sapiens
aacagcttccatgag

SEQ ID NO: 1069311 - DNA, 15 bp, Homo sapiens
gaacagcttccatga

SEQ ID NO: 1069312 - DNA, 15 bp, Homo sapiens
ggaacagcttccatg

SEQ ID NO: 1069313 - DNA, 15 bp, Homo sapiens
aggaacagcttccat

SEQ ID NO: 1069314 - DNA, 15 bp, Homo sapiens
gaggaacagcttcca

SEQ ID NO: 1069315 - DNA, 15 bp, Homo sapiens
ggaggaacagcttcc

SEQ ID NO: 1069316 - DNA, 15 bp, Homo sapiens
gggaggaacagcttc

SEQ ID NO: 1069317 - DNA, 15 bp, Homo sapiens
ggggaggaacagctt

SEQ ID NO: 1069318 - DNA, 15 bp, Homo sapiens
tggggaggaacagct

SEQ ID NO: 1069319 - DNA, 15 bp, Homo sapiens
gtggggaggaacagc

SEQ ID NO: 1069320 - DNA, 15 bp, Homo sapiens
tgtggggaggaacag

SEQ ID NO: 1069321 - DNA, 15 bp, Homo sapiens
ctgtggggaggaaca

SEQ ID NO: 1069322 - DNA, 15 bp, Homo sapiens
actgtggggaggaac

SEQ ID NO: 1069323 - DNA, 15 bp, Homo sapiens
aactgtggggaggaa

SEQ ID NO: 1069324 - DNA, 15 bp, Homo sapiens
aaactgtggggagga

SEQ ID NO: 1069325 - DNA, 15 bp, Homo sapiens
caaactgtggggagg

SEQ ID NO: 1069326 - DNA, 15 bp, Homo sapiens
ccaaactgtggggag

SEQ ID NO: 1069327 - DNA, 15 bp, Homo sapiens
cccaaactgtgggga

SEQ ID NO: 1069328 - DNA, 15 bp, Homo sapiens
tcccaaactgtgggg

SEQ ID NO: 1069329 - DNA, 15 bp, Homo sapiens
gtcccaaactgtggg

SEQ ID NO: 1069330 - DNA, 15 bp, Homo sapiens
tgtcccaaactgtgg

SEQ ID NO: 1069331 - DNA, 15 bp, Homo sapiens
gtgtcccaaactgtg

SEQ ID NO: 1069332 - DNA, 15 bp, Homo sapiens
agtgtcccaaactgt

SEQ ID NO: 1069333 - DNA, 15 bp, Homo sapiens
cagtgtcccaaactg

SEQ ID NO: 1069334 - DNA, 15 bp, Homo sapiens
tcagtgtcccaaact

SEQ ID NO: 1069335 - DNA, 15 bp, Homo sapiens
gtcagtgtcccaaac

SEQ ID NO: 1069336 - DNA, 15 bp, Homo sapiens
ggtcagtgtcccaaa

SEQ ID NO: 1069337 - DNA, 15 bp, Homo sapiens
tggtcagtgtcccaa

SEQ ID NO: 1069338 - DNA, 15 bp, Homo sapiens
ttggtcagtgtccca

SEQ ID NO: 1069339 - DNA, 15 bp, Homo sapiens
gttggtcagtgtccc

SEQ ID NO: 1069340 - DNA, 15 bp, Homo sapiens
tgttggtcagtgtcc

SEQ ID NO: 1069341 - DNA, 15 bp, Homo sapiens
ctgttggtcagtgtc

SEQ ID NO: 1069342 - DNA, 15 bp, Homo sapiens
actgttggtcagtgt

SEQ ID NO: 1069343 - DNA, 15 bp, Homo sapiens
gactgttggtcagtg

SEQ ID NO: 1069344 - DNA, 15 bp, Homo sapiens
ggactgttggtcagt

SEQ ID NO: 1069345 - DNA, 15 bp, Homo sapiens
aggactgttggtcag

SEQ ID NO: 1069346 - DNA, 15 bp, Homo sapiens
aaggactgttggtca

SEQ ID NO: 1069347 - DNA, 15 bp, Homo sapiens
aaaggactgttggtc

SEQ ID NO: 1069348 - DNA, 15 bp, Homo sapiens
taaaggactgttggt

SEQ ID NO: 1069349 - DNA, 15 bp, Homo sapiens
ctaaaggactgttgg

SEQ ID NO: 1069350 - DNA, 15 bp, Homo sapiens
gctaaaggactgttg

SEQ ID NO: 1069351 - DNA, 15 bp, Homo sapiens
tgctaaaggactgtt

SEQ ID NO: 1069352 - DNA, 15 bp, Homo sapiens
ctgctaaaggactgt

SEQ ID NO: 1069353 - DNA, 15 bp, Homo sapiens
cctgctaaaggactg

SEQ ID NO: 1069354 - DNA, 15 bp, Homo sapiens
tcctgctaaaggact

SEQ ID NO: 1069355 - DNA, 15 bp, Homo sapiens
ctcctgctaaaggac

SEQ ID NO: 1069356 - DNA, 15 bp, Homo sapiens
cctcctgctaaagga

SEQ ID NO: 1069357 - DNA, 15 bp, Homo sapiens
acctcctgctaaagg

SEQ ID NO: 1069358 - DNA, 15 bp, Homo sapiens
gacctcctgctaaag

SEQ ID NO: 1069359 - DNA, 15 bp, Homo sapiens
cgacctcctgctaaa

SEQ ID NO: 1069360 - DNA, 15 bp, Homo sapiens
acgacctcctgctaa

SEQ ID NO: 1069361 - DNA, 15 bp, Homo sapiens
gacgacctcctgcta

SEQ ID NO: 1069362 - DNA, 15 bp, Homo sapiens
agacgacctcctgct

SEQ ID NO: 1069363 - DNA, 15 bp, Homo sapiens
aagacgacctcctgc

SEQ ID NO: 1069364 - DNA, 15 bp, Homo sapiens
taagacgacctcctg

SEQ ID NO: 1069365 - DNA, 15 bp, Homo sapiens
ctaagacgacctcct

SEQ ID NO: 1069366 - DNA, 15 bp, Homo sapiens
actaagacgacctcc

SEQ ID NO: 1069367 - DNA, 15 bp, Homo sapiens
gactaagacgacctc

SEQ ID NO: 1069368 - DNA, 15 bp, Homo sapiens
ggactaagacgacct

SEQ ID NO: 1069369 - DNA, 15 bp, Homo sapiens
tggactaagacgacc

SEQ ID NO: 1069370 - DNA, 15 bp, Homo sapiens
atggactaagacgac

SEQ ID NO: 1069371 - DNA, 15 bp, Homo sapiens
aatggactaagacga

SEQ ID NO: 1069372 - DNA, 15 bp, Homo sapiens
aaatggactaagacg

SEQ ID NO: 1069373 - DNA, 15 bp, Homo sapiens
caaatggactaagac

SEQ ID NO: 1069374 - DNA, 15 bp, Homo sapiens
ccaaatggactaaga

SEQ ID NO: 1069375 - DNA, 15 bp, Homo sapiens
accaaatggactaag

SEQ ID NO: 1069376 - DNA, 15 bp, Homo sapiens
gaccaaatggactaa

SEQ ID NO: 1069377 - DNA, 15 bp, Homo sapiens
agaccaaatggacta

SEQ ID NO: 1069378 - DNA, 15 bp, Homo sapiens
cagaccaaatggact

SEQ ID NO: 1069379 - DNA, 15 bp, Homo sapiens
gcagaccaaatggac

SEQ ID NO: 1069380 - DNA, 15 bp, Homo sapiens
agcagaccaaatgga

SEQ ID NO: 1069381 - DNA, 15 bp, Homo sapiens
tagcagaccaaatgg

SEQ ID NO: 1069382 - DNA, 15 bp, Homo sapiens
atagcagaccaaatg

SEQ ID NO: 1069383 - DNA, 15 bp, Homo sapiens
tatagcagaccaaat

SEQ ID NO: 1069384 - DNA, 15 bp, Homo sapiens
ttatagcagaccaaa

SEQ ID NO: 1069385 - DNA, 15 bp, Homo sapiens
gttatagcagaccaa

SEQ ID NO: 1069386 - DNA, 15 bp, Homo sapiens
tgttatagcagacca

SEQ ID NO: 1069387 - DNA, 15 bp, Homo sapiens
ttgttatagcagacc

SEQ ID NO: 1069388 - DNA, 15 bp, Homo sapiens
tttgttatagcagac

SEQ ID NO: 1069389 - DNA, 15 bp, Homo sapiens
gtttgttatagcaga

SEQ ID NO: 1069390 - DNA, 15 bp, Homo sapiens
agtttgttatagcag

SEQ ID NO: 1069391 - DNA, 15 bp, Homo sapiens
tagtttgttatagca

SEQ ID NO: 1069392 - DNA, 15 bp, Homo sapiens
gtagtttgttatagc

SEQ ID NO: 1069393 - DNA, 15 bp, Homo sapiens
ggtagtttgttatag

SEQ ID NO: 1069394 - DNA, 15 bp, Homo sapiens
tggtagtttgttata

SEQ ID NO: 1069395 - DNA, 15 bp, Homo sapiens
atggtagtttgttat

SEQ ID NO: 1069396 - DNA, 15 bp, Homo sapiens
tatggtagtttgtta

SEQ ID NO: 1069397 - DNA, 15 bp, Homo sapiens
ctatggtagtttgtt

SEQ ID NO: 1069398 - DNA, 15 bp, Homo sapiens
tctatggtagtttgt

SEQ ID NO: 1069399 - DNA, 15 bp, Homo sapiens
gtctatggtagtttg

SEQ ID NO: 1069400 - DNA, 15 bp, Homo sapiens
agtctatggtagttt

SEQ ID NO: 1069401 - DNA, 15 bp, Homo sapiens
cagtctatggtagtt

SEQ ID NO: 1069402 - DNA, 15 bp, Homo sapiens
ccagtctatggtagt

SEQ ID NO: 1069403 - DNA, 15 bp, Homo sapiens
cccagtctatggtag

SEQ ID NO: 1069404 - DNA, 15 bp, Homo sapiens
acccagtctatggta

SEQ ID NO: 1069405 - DNA, 15 bp, Homo sapiens
cacccagtctatggt

SEQ ID NO: 1069406 - DNA, 15 bp, Homo sapiens
ccacccagtctatgg

SEQ ID NO: 1069407 - DNA, 15 bp, Homo sapiens
gccacccagtctatg

SEQ ID NO: 1069408 - DNA, 15 bp, Homo sapiens
agccacccagtctat

SEQ ID NO: 1069409 - DNA, 15 bp, Homo sapiens
gagccacccagtcta

SEQ ID NO: 1069410 - DNA, 15 bp, Homo sapiens
atgagccacccagtc

SEQ ID NO: 1069411 - DNA, 15 bp, Homo sapiens
tatgagccacccagt

SEQ ID NO: 1069412 - DNA, 15 bp, Homo sapiens
ttatgagccacccag

SEQ ID NO: 1069413 - DNA, 15 bp, Homo sapiens
tttatgagccaccca

SEQ ID NO: 1069414 - DNA, 15 bp, Homo sapiens
ttttatgagccaccc

SEQ ID NO: 1069415 - DNA, 15 bp, Homo sapiens
tttttatgagccacc

SEQ ID NO: 1069416 - DNA, 15 bp, Homo sapiens
gtttttatgagccac

SEQ ID NO: 1069417 - DNA, 15 bp, Homo sapiens
tgtttttatgagcca

SEQ ID NO: 1069418 - DNA, 15 bp, Homo sapiens
ctgtttttatgagcc

SEQ ID NO: 1069419 - DNA, 15 bp, Homo sapiens
cctgtttttatgagc

SEQ ID NO: 1069420 - DNA, 15 bp, Homo sapiens
tcctgtttttatgag

SEQ ID NO: 1069421 - DNA, 15 bp, Homo sapiens
gtcctgtttttatga

SEQ ID NO: 1069422 - DNA, 15 bp, Homo sapiens
agtcctgtttttatg

SEQ ID NO: 1069423 - DNA, 15 bp, Homo sapiens
aagtcctgtttttat

SEQ ID NO: 1069424 - DNA, 15 bp, Homo sapiens
aaagtcctgttttta

SEQ ID NO: 1069425 - DNA, 15 bp, Homo sapiens
taaagtcctgttttt

SEQ ID NO: 1069426 - DNA, 15 bp, Homo sapiens
ataaagtcctgtttt

SEQ ID NO: 1069427 - DNA, 15 bp, Homo sapiens
aataaagtcctgttt

SEQ ID NO: 1069428 - DNA, 15 bp, Homo sapiens
aaataaagtcctgtt

SEQ ID NO: 1069429 - DNA, 15 bp, Homo sapiens
gaaataaagtcctgt

SEQ ID NO: 1069430 - DNA, 15 bp, Homo sapiens
agaaataaagtcctg

SEQ ID NO: 1069431 - DNA, 15 bp, Homo sapiens
gagaaataaagtcct

SEQ ID NO: 1069432 - DNA, 15 bp, Homo sapiens
tgagaaataaagtcc

SEQ ID NO: 1069433 - DNA, 15 bp, Homo sapiens
gtgagaaataaagtc

SEQ ID NO: 1069434 - DNA, 15 bp, Homo sapiens
tgtgagaaataaagt

SEQ ID NO: 1069435 - DNA, 15 bp, Homo sapiens
ctgtgagaaataaag

SEQ ID NO: 1069436 - DNA, 15 bp, Homo sapiens
actgtgagaaataaa

SEQ ID NO: 1069437 - DNA, 15 bp, Homo sapiens
aactgtgagaaataa

SEQ ID NO: 1069438 - DNA, 15 bp, Homo sapiens
gaactgtgagaaata

SEQ ID NO: 1069439 - DNA, 15 bp, Homo sapiens
agaactgtgagaaat

SEQ ID NO: 1069440 - DNA, 15 bp, Homo sapiens
cagaactgtgagaaa

SEQ ID NO: 1069441 - DNA, 15 bp, Homo sapiens
ccagaactgtgagaa

SEQ ID NO: 1069442 - DNA, 15 bp, Homo sapiens
agcctccagaactgt

SEQ ID NO: 1069443 - DNA, 15 bp, Homo sapiens
cagcctccagaactg

SEQ ID NO: 1069444 - DNA, 15 bp, Homo sapiens
cccagcctccagaac

SEQ ID NO: 1069445 - DNA, 15 bp, Homo sapiens
tcccagcctccagaa

SEQ ID NO: 1069446 - DNA, 15 bp, Homo sapiens
ttcccagcctccaga

SEQ ID NO: 1069447 - DNA, 15 bp, Homo sapiens
cttcccagcctccag

SEQ ID NO: 1069448 - DNA, 15 bp, Homo sapiens
acttcccagcctcca

SEQ ID NO: 1069449 - DNA, 15 bp, Homo sapiens
gacttcccagcctcc

SEQ ID NO: 1069450 - DNA, 15 bp, Homo sapiens
ggacttcccagcctc

SEQ ID NO: 1069451 - DNA, 15 bp, Homo sapiens
tggacttcccagcct

SEQ ID NO: 1069452 - DNA, 15 bp, Homo sapiens
ttggacttcccagcc

SEQ ID NO: 1069453 - DNA, 15 bp, Homo sapiens
cttggacttcccagc

SEQ ID NO: 1069454 - DNA, 15 bp, Homo sapiens
tcttggacttcccag

SEQ ID NO: 1069455 - DNA, 15 bp, Homo sapiens
atcttggacttccca

SEQ ID NO: 1069456 - DNA, 15 bp, Homo sapiens
gatcttggacttccc

SEQ ID NO: 1069457 - DNA, 15 bp, Homo sapiens
ttgatcttggacttc

SEQ ID NO: 1069458 - DNA, 15 bp, Homo sapiens
cttgatcttggactt

SEQ ID NO: 1069459 - DNA, 15 bp, Homo sapiens
ccttgatcttggact

SEQ ID NO: 1069460 - DNA, 15 bp, Homo sapiens
accttgatcttggac

SEQ ID NO: 1069461 - DNA, 15 bp, Homo sapiens
caccttgatcttgga

SEQ ID NO: 1069462 - DNA, 15 bp, Homo sapiens
gcaccttgatcttgg

SEQ ID NO: 1069463 - DNA, 15 bp, Homo sapiens
ggcaccttgatcttg

SEQ ID NO: 1069464 - DNA, 15 bp, Homo sapiens
tggcaccttgatctt

SEQ ID NO: 1069465 - DNA, 15 bp, Homo sapiens
ctggcaccttgatct

SEQ ID NO: 1069466 - DNA, 15 bp, Homo sapiens
gctggcaccttgatc

SEQ ID NO: 1069467 - DNA, 15 bp, Homo sapiens
tgctggcaccttgat

SEQ ID NO: 1069468 - DNA, 15 bp, Homo sapiens
ctgctggcaccttga

SEQ ID NO: 1069469 - DNA, 15 bp, Homo sapiens
tctgctggcaccttg

SEQ ID NO: 1069470 - DNA, 15 bp, Homo sapiens
atctgctggcacctt

SEQ ID NO: 1069471 - DNA, 15 bp, Homo sapiens
aatctgctggcacct

SEQ ID NO: 1069472 - DNA, 15 bp, Homo sapiens
gaatctgctggcacc

SEQ ID NO: 1069473 - DNA, 15 bp, Homo sapiens
tgaatctgctggcac

SEQ ID NO: 1069474 - DNA, 15 bp, Homo sapiens
ctgaatctgctggca

SEQ ID NO: 1069475 - DNA, 15 bp, Homo sapiens
actgaatctgctggc

SEQ ID NO: 1069476 - DNA, 15 bp, Homo sapiens
cactgaatctgctgg

SEQ ID NO: 1069477 - DNA, 15 bp, Homo sapiens
acactgaatctgctg

SEQ ID NO: 1069478 - DNA, 15 bp, Homo sapiens
gacactgaatctgct

SEQ ID NO: 1069479 - DNA, 15 bp, Homo sapiens
agacactgaatctgc

SEQ ID NO: 1069480 - DNA, 15 bp, Homo sapiens
cagacactgaatctg

SEQ ID NO: 1069481 - DNA, 15 bp, Homo sapiens
ccagacactgaatct

SEQ ID NO: 1069482 - DNA, 15 bp, Homo sapiens
accagacactgaatc

SEQ ID NO: 1069483 - DNA, 15 bp, Homo sapiens
caccagacactgaat

SEQ ID NO: 1069484 - DNA, 15 bp, Homo sapiens
tcaccagacactgaa

SEQ ID NO: 1069485 - DNA, 15 bp, Homo sapiens
ctcaccagacactga

SEQ ID NO: 1069486 - DNA, 15 bp, Homo sapiens
cctcaccagacactg

SEQ ID NO: 1069487 - DNA, 15 bp, Homo sapiens
ccctcaccagacact

SEQ ID NO: 1069488 - DNA, 15 bp, Homo sapiens
gccctcaccagacac

SEQ ID NO: 1069489 - DNA, 15 bp, Homo sapiens
ggccctcaccagaca

SEQ ID NO: 1069490 - DNA, 15 bp, Homo sapiens
gggccctcaccagac

SEQ ID NO: 1069491 - DNA, 15 bp, Homo sapiens
agggccctcaccaga

SEQ ID NO: 1069492 - DNA, 15 bp, Homo sapiens
aagggccctcaccag

SEQ ID NO: 1069493 - DNA, 15 bp, Homo sapiens
caagggccctcacca

SEQ ID NO: 1069494 - DNA, 15 bp, Homo sapiens
gcaagggccctcacc

SEQ ID NO: 1069495 - DNA, 15 bp, Homo sapiens
ggcaagggccctcac

SEQ ID NO: 1069496 - DNA, 15 bp, Homo sapiens
aggcaagggccctca

SEQ ID NO: 1069497 - DNA, 15 bp, Homo sapiens
aaggcaagggccctc

SEQ ID NO: 1069498 - DNA, 15 bp, Homo sapiens
caaggcaagggccct

SEQ ID NO: 1069499 - DNA, 15 bp, Homo sapiens
ccaaggcaagggccc

SEQ ID NO: 1069500 - DNA, 15 bp, Homo sapiens
accaaggcaagggcc

SEQ ID NO: 1069501 - DNA, 15 bp, Homo sapiens
aaccaaggcaagggc

SEQ ID NO: 1069502 - DNA, 15 bp, Homo sapiens
aaaccaaggcaaggg

SEQ ID NO: 1069503 - DNA, 15 bp, Homo sapiens
taaaccaaggcaagg

SEQ ID NO: 1069504 - DNA, 15 bp, Homo sapiens
ataaaccaaggcaag

SEQ ID NO: 1069505 - DNA, 15 bp, Homo sapiens
tataaaccaaggcaa

SEQ ID NO: 1069506 - DNA, 15 bp, Homo sapiens
ctataaaccaaggca

SEQ ID NO: 1069507 - DNA, 15 bp, Homo sapiens
tctataaaccaaggc

SEQ ID NO: 1069508 - DNA, 15 bp, Homo sapiens
ctctataaaccaagg

SEQ ID NO: 1069509 - DNA, 15 bp, Homo sapiens
cctctataaaccaag

SEQ ID NO: 1069510 - DNA, 15 bp, Homo sapiens
ccctctataaaccaa

SEQ ID NO: 1069511 - DNA, 15 bp, Homo sapiens
tccctctataaacca

SEQ ID NO: 1069512 - DNA, 15 bp, Homo sapiens
ttccctctataaacc

SEQ ID NO: 1069513 - DNA, 15 bp, Homo sapiens
gttccctctataaac

SEQ ID NO: 1069514 - DNA, 15 bp, Homo sapiens
ggttccctctataaa

SEQ ID NO: 1069515 - DNA, 15 bp, Homo sapiens
aggttccctctataa

SEQ ID NO: 1069516 - DNA, 15 bp, Homo sapiens
aaggttccctctata

SEQ ID NO: 1069517 - DNA, 15 bp, Homo sapiens
gaaggttccctctat

SEQ ID NO: 1069518 - DNA, 15 bp, Homo sapiens
agaaggttccctcta

SEQ ID NO: 1069519 - DNA, 15 bp, Homo sapiens
gagaaggttccctct

SEQ ID NO: 1069520 - DNA, 15 bp, Homo sapiens
tgagaaggttccctc

SEQ ID NO: 1069521 - DNA, 15 bp, Homo sapiens
gtgagaaggttccct

SEQ ID NO: 1069522 - DNA, 15 bp, Homo sapiens
agtgagaaggttccc

SEQ ID NO: 1069523 - DNA, 15 bp, Homo sapiens
cagtgagaaggttcc

SEQ ID NO: 1069524 - DNA, 15 bp, Homo sapiens
acagtgagaaggttc

SEQ ID NO: 1069525 - DNA, 15 bp, Homo sapiens
cacagtgagaaggtt

SEQ ID NO: 1069526 - DNA, 15 bp, Homo sapiens
acacagtgagaaggt

SEQ ID NO: 1069527 - DNA, 15 bp, Homo sapiens
cacacagtgagaagg

SEQ ID NO: 1069528 - DNA, 15 bp, Homo sapiens
gcacacagtgagaag

SEQ ID NO: 1069529 - DNA, 15 bp, Homo sapiens
agcacacagtgagaa

SEQ ID NO: 1069530 - DNA, 15 bp, Homo sapiens
cagcacacagtgaga

SEQ ID NO: 1069531 - DNA, 15 bp, Homo sapiens
tcagcacacagtgag

SEQ ID NO: 1069532 - DNA, 15 bp, Homo sapiens
atcagcacacagtga

SEQ ID NO: 1069533 - DNA, 15 bp, Homo sapiens
tatcagcacacagtg

SEQ ID NO: 1069534 - DNA, 15 bp, Homo sapiens
atatcagcacacagt

SEQ ID NO: 1069535 - DNA, 15 bp, Homo sapiens
catatcagcacacag

SEQ ID NO: 1069536 - DNA, 15 bp, Homo sapiens
ccatatcagcacaca

SEQ ID NO: 1069537 - DNA, 15 bp, Homo sapiens
accatatcagcacac

SEQ ID NO: 1069538 - DNA, 15 bp, Homo sapiens
caccatatcagcaca

SEQ ID NO: 1069539 - DNA, 15 bp, Homo sapiens
acaccatatcagcac

SEQ ID NO: 1069540 - DNA, 15 bp, Homo sapiens
tacaccatatcagca

SEQ ID NO: 1069541 - DNA, 15 bp, Homo sapiens
ttacaccatatcagc

SEQ ID NO: 1069542 - DNA, 15 bp, Homo sapiens
cttacaccatatcag

SEQ ID NO: 1069543 - DNA, 15 bp, Homo sapiens
ccttacaccatatca

SEQ ID NO: 1069544 - DNA, 15 bp, Homo sapiens
tccttacaccatatc

SEQ ID NO: 1069545 - DNA, 15 bp, Homo sapiens
ctccttacaccatat

SEQ ID NO: 1069546 - DNA, 15 bp, Homo sapiens
gctccttacaccata

SEQ ID NO: 1069547 - DNA, 15 bp, Homo sapiens
tgctccttacaccat

SEQ ID NO: 1069548 - DNA, 15 bp, Homo sapiens
ttgctccttacacca

SEQ ID NO: 1069549 - DNA, 15 bp, Homo sapiens
cttgctccttacacc

SEQ ID NO: 1069550 - DNA, 15 bp, Homo sapiens
ccttgctccttacac

SEQ ID NO: 1069551 - DNA, 15 bp, Homo sapiens
cccttgctccttaca

SEQ ID NO: 1069552 - DNA, 15 bp, Homo sapiens
tcccttgctccttac

SEQ ID NO: 1069553 - DNA, 15 bp, Homo sapiens
ttcccttgctcctta

SEQ ID NO: 1069554 - DNA, 15 bp, Homo sapiens
attcccttgctcctt

SEQ ID NO: 1069555 - DNA, 15 bp, Homo sapiens
cattcccttgctcct

SEQ ID NO: 1069556 - DNA, 15 bp, Homo sapiens
gcattcccttgctcc

SEQ ID NO: 1069557 - DNA, 15 bp, Homo sapiens
agcattcccttgctc

SEQ ID NO: 1069558 - DNA, 15 bp, Homo sapiens
gagcattcccttgct

SEQ ID NO: 1069559 - DNA, 15 bp, Homo sapiens
agagcattcccttgc

SEQ ID NO: 1069560 - DNA, 15 bp, Homo sapiens
cagagcattcccttg

SEQ ID NO: 1069561 - DNA, 15 bp, Homo sapiens
ccagagcattccctt

SEQ ID NO: 1069562 - DNA, 15 bp, Homo sapiens
cccagagcattccct

SEQ ID NO: 1069563 - DNA, 15 bp, Homo sapiens
ccccagagcattccc

SEQ ID NO: 1069564 - DNA, 15 bp, Homo sapiens
accccagagcattcc

SEQ ID NO: 1069565 - DNA, 15 bp, Homo sapiens
gaccccagagcattc

SEQ ID NO: 1069566 - DNA, 15 bp, Homo sapiens
agaccccagagcatt

SEQ ID NO: 1069567 - DNA, 15 bp, Homo sapiens
gagaccccagagcat

SEQ ID NO: 1069568 - DNA, 15 bp, Homo sapiens
agagaccccagagca

SEQ ID NO: 1069569 - DNA, 15 bp, Homo sapiens
aagagaccccagagc

SEQ ID NO: 1069570 - DNA, 15 bp, Homo sapiens
aaagagaccccagag

SEQ ID NO: 1069571 - DNA, 15 bp, Homo sapiens
gaaagagaccccaga

SEQ ID NO: 1069572 - DNA, 15 bp, Homo sapiens
tgaaagagaccccag

SEQ ID NO: 1069573 - DNA, 15 bp, Homo sapiens
atgaaagagacccca

SEQ ID NO: 1069574 - DNA, 15 bp, Homo sapiens
tatgaaagagacccc

SEQ ID NO: 1069575 - DNA, 15 bp, Homo sapiens
ttatgaaagagaccc

SEQ ID NO: 1069576 - DNA, 15 bp, Homo sapiens
cttatgaaagagacc

SEQ ID NO: 1069577 - DNA, 15 bp, Homo sapiens
ccttatgaaagagac

SEQ ID NO: 1069578 - DNA, 15 bp, Homo sapiens
cccttatgaaagaga

SEQ ID NO: 1069579 - DNA, 15 bp, Homo sapiens
tcccttatgaaagag

SEQ ID NO: 1069580 - DNA, 15 bp, Homo sapiens
ttcccttatgaaaga

SEQ ID NO: 1069581 - DNA, 15 bp, Homo sapiens
attcccttatgaaag

SEQ ID NO: 1069582 - DNA, 15 bp, Homo sapiens
aattcccttatgaaa

SEQ ID NO: 1069583 - DNA, 15 bp, Homo sapiens
taattcccttatgaa

SEQ ID NO: 1069584 - DNA, 15 bp, Homo sapiens
ttaattcccttatga

SEQ ID NO: 1069585 - DNA, 15 bp, Homo sapiens
attaattcccttatg

SEQ ID NO: 1069586 - DNA, 15 bp, Homo sapiens
gattaattcccttat

SEQ ID NO: 1069587 - DNA, 15 bp, Homo sapiens
ggattaattccctta

SEQ ID NO: 1069588 - DNA, 15 bp, Homo sapiens
gggattaattccctt

SEQ ID NO: 1069589 - DNA, 15 bp, Homo sapiens
tgggattaattccct

SEQ ID NO: 1069590 - DNA, 15 bp, Homo sapiens
gtgggattaattccc

SEQ ID NO: 1069591 - DNA, 15 bp, Homo sapiens
agtgggattaattcc

SEQ ID NO: 1069592 - DNA, 15 bp, Homo sapiens
gagtgggattaattc

SEQ ID NO: 1069593 - DNA, 15 bp, Homo sapiens
agagtgggattaatt

SEQ ID NO: 1069594 - DNA, 15 bp, Homo sapiens
aagagtgggattaat

SEQ ID NO: 1069595 - DNA, 15 bp, Homo sapiens
caagagtgggattaa

SEQ ID NO: 1069596 - DNA, 15 bp, Homo sapiens
tcaagagtgggatta

SEQ ID NO: 1069597 - DNA, 15 bp, Homo sapiens
ctcaagagtgggatt

SEQ ID NO: 1069598 - DNA, 15 bp, Homo sapiens
actcaagagtgggat

SEQ ID NO: 1069599 - DNA, 15 bp, Homo sapiens
cactcaagagtggga

SEQ ID NO: 1069600 - DNA, 15 bp, Homo sapiens
gcactcaagagtggg

SEQ ID NO: 1069601 - DNA, 15 bp, Homo sapiens
agcactcaagagtgg

SEQ ID NO: 1069602 - DNA, 15 bp, Homo sapiens
gagcactcaagagtg

SEQ ID NO: 1069603 - DNA, 15 bp, Homo sapiens
ggagcactcaagagt

SEQ ID NO: 1069604 - DNA, 15 bp, Homo sapiens
tggagcactcaagag

SEQ ID NO: 1069605 - DNA, 15 bp, Homo sapiens
gtggagcactcaaga

SEQ ID NO: 1069606 - DNA, 15 bp, Homo sapiens
ggtggagcactcaag

SEQ ID NO: 1069607 - DNA, 15 bp, Homo sapiens
gggtggagcactcaa

SEQ ID NO: 1069608 - DNA, 15 bp, Homo sapiens
agggtggagcactca

SEQ ID NO: 1069609 - DNA, 15 bp, Homo sapiens
gagggtggagcactc

SEQ ID NO: 1069610 - DNA, 15 bp, Homo sapiens
tgagggtggagcact

SEQ ID NO: 1069611 - DNA, 15 bp, Homo sapiens
atgagggtggagcac

SEQ ID NO: 1069612 - DNA, 15 bp, Homo sapiens
catgagggtggagca

SEQ ID NO: 1069613 - DNA, 15 bp, Homo sapiens
gcatgagggtggagc

SEQ ID NO: 1069614 - DNA, 15 bp, Homo sapiens
ggcatgagggtggag

SEQ ID NO: 1069615 - DNA, 15 bp, Homo sapiens
gggcatgagggtgga

SEQ ID NO: 1069616 - DNA, 15 bp, Homo sapiens
agggcatgagggtgg

SEQ ID NO: 1069617 - DNA, 15 bp, Homo sapiens
tagggcatgagggtg

SEQ ID NO: 1069618 - DNA, 15 bp, Homo sapiens
ttagggcatgagggt

SEQ ID NO: 1069619 - DNA, 15 bp, Homo sapiens
attagggcatgaggg

SEQ ID NO: 1069620 - DNA, 15 bp, Homo sapiens
gattagggcatgagg

SEQ ID NO: 1069621 - DNA, 15 bp, Homo sapiens
tgattagggcatgag

SEQ ID NO: 1069622 - DNA, 15 bp, Homo sapiens
gtgattagggcatga

SEQ ID NO: 1069623 - DNA, 15 bp, Homo sapiens
ggtgattagggcatg

SEQ ID NO: 1069624 - DNA, 15 bp, Homo sapiens
aggtgattagggcat

SEQ ID NO: 1069625 - DNA, 15 bp, Homo sapiens
gaggtgattagggca

SEQ ID NO: 1069626 - DNA, 15 bp, Homo sapiens
ggaggtgattagggc

SEQ ID NO: 1069627 - DNA, 15 bp, Homo sapiens
tggaggtgattaggg

SEQ ID NO: 1069628 - DNA, 15 bp, Homo sapiens
ttggaggtgattagg

SEQ ID NO: 1069629 - DNA, 15 bp, Homo sapiens
tttggaggtgattag

SEQ ID NO: 1069630 - DNA, 15 bp, Homo sapiens
atttggaggtgatta

SEQ ID NO: 1069631 - DNA, 15 bp, Homo sapiens
tatttggaggtgatt

SEQ ID NO: 1069632 - DNA, 15 bp, Homo sapiens
gtatttggaggtgat

SEQ ID NO: 1069633 - DNA, 15 bp, Homo sapiens
ggtatttggaggtga

SEQ ID NO: 1069634 - DNA, 15 bp, Homo sapiens
aggtatttggaggtg

SEQ ID NO: 1069635 - DNA, 15 bp, Homo sapiens
aaggtatttggaggt

SEQ ID NO: 1069636 - DNA, 15 bp, Homo sapiens
gaaggtatttggagg

SEQ ID NO: 1069637 - DNA, 15 bp, Homo sapiens
tgaaggtatttggag

SEQ ID NO: 1069638 - DNA, 15 bp, Homo sapiens
gtgaaggtatttgga

SEQ ID NO: 1069639 - DNA, 15 bp, Homo sapiens
tgtgaaggtatttgg

SEQ ID NO: 1069640 - DNA, 15 bp, Homo sapiens
atgtgaaggtatttg

SEQ ID NO: 1069641 - DNA, 15 bp, Homo sapiens
aatgtgaaggtattt

SEQ ID NO: 1069642 - DNA, 15 bp, Homo sapiens
caatgtgaaggtatt

SEQ ID NO: 1069643 - DNA, 15 bp, Homo sapiens
ccaatgtgaaggtat

SEQ ID NO: 1069644 - DNA, 15 bp, Homo sapiens
cccaatgtgaaggta

SEQ ID NO: 1069645 - DNA, 15 bp, Homo sapiens
ccccaatgtgaaggt

SEQ ID NO: 1069646 - DNA, 15 bp, Homo sapiens
tccccaatgtgaagg

SEQ ID NO: 1069647 - DNA, 15 bp, Homo sapiens
atccccaatgtgaag

SEQ ID NO: 1069648 - DNA, 15 bp, Homo sapiens
aatccccaatgtgaa

SEQ ID NO: 1069649 - DNA, 15 bp, Homo sapiens
taatccccaatgtga

SEQ ID NO: 1069650 - DNA, 15 bp, Homo sapiens
ctaatccccaatgtg

SEQ ID NO: 1069651 - DNA, 15 bp, Homo sapiens
cctaatccccaatgt

SEQ ID NO: 1069652 - DNA, 15 bp, Homo sapiens
acctaatccccaatg

SEQ ID NO: 1069653 - DNA, 15 bp, Homo sapiens
aacctaatccccaat

SEQ ID NO: 1069654 - DNA, 15 bp, Homo sapiens
aaacctaatccccaa

SEQ ID NO: 1069655 - DNA, 15 bp, Homo sapiens
gaaacctaatcccca

SEQ ID NO: 1069656 - DNA, 15 bp, Homo sapiens
tgaaacctaatcccc

SEQ ID NO: 1069657 - DNA, 15 bp, Homo sapiens
ctgaaacctaatccc

SEQ ID NO: 1069658 - DNA, 15 bp, Homo sapiens
gctgaaacctaatcc

SEQ ID NO: 1069659 - DNA, 15 bp, Homo sapiens
tgctgaaacctaatc

SEQ ID NO: 1069660 - DNA, 15 bp, Homo sapiens
atgctgaaacctaat

SEQ ID NO: 1069661 - DNA, 15 bp, Homo sapiens
tatgctgaaacctaa

SEQ ID NO: 1069662 - DNA, 15 bp, Homo sapiens
atatgctgaaaccta

SEQ ID NO: 1069663 - DNA, 15 bp, Homo sapiens
catatgctgaaacct

SEQ ID NO: 1069664 - DNA, 15 bp, Homo sapiens
tcatatgctgaaacc

SEQ ID NO: 1069665 - DNA, 15 bp, Homo sapiens
ttcatatgctgaaac

SEQ ID NO: 1069666 - DNA, 15 bp, Homo sapiens
attcatatgctgaaa

SEQ ID NO: 1069667 - DNA, 15 bp, Homo sapiens
caaattcatatgctg

SEQ ID NO: 1069668 - DNA, 15 bp, Homo sapiens
ccaaattcatatgct

SEQ ID NO: 1069669 - DNA, 15 bp, Homo sapiens
cccaaattcatatgc

SEQ ID NO: 1069670 - DNA, 15 bp, Homo sapiens
tcccaaattcatatg

SEQ ID NO: 1069671 - DNA, 15 bp, Homo sapiens
ctcccaaattcatat

SEQ ID NO: 1069672 - DNA, 15 bp, Homo sapiens
tctcccaaattcata

SEQ ID NO: 1069673 - DNA, 15 bp, Homo sapiens
ttctcccaaattcat

SEQ ID NO: 1069674 - DNA, 15 bp, Homo sapiens
cttctcccaaattca

SEQ ID NO: 1069675 - DNA, 15 bp, Homo sapiens
ccttctcccaaattc

SEQ ID NO: 1069676 - DNA, 15 bp, Homo sapiens
cccttctcccaaatt

SEQ ID NO: 1069677 - DNA, 15 bp, Homo sapiens
tcccttctcccaaat

SEQ ID NO: 1069678 - DNA, 15 bp, Homo sapiens
gtcccttctcccaaa

SEQ ID NO: 1069679 - DNA, 15 bp, Homo sapiens
tgtcccttctcccaa

SEQ ID NO: 1069680 - DNA, 15 bp, Homo sapiens
ctgtcccttctccca

SEQ ID NO: 1069681 - DNA, 15 bp, Homo sapiens
tctgtcccttctccc

SEQ ID NO: 1069682 - DNA, 15 bp, Homo sapiens
gtctgtcccttctcc

SEQ ID NO: 1069683 - DNA, 15 bp, Homo sapiens
tgtctgtcccttctc

SEQ ID NO: 1069684 - DNA, 15 bp, Homo sapiens
gtgtctgtcccttct

SEQ ID NO: 1069685 - DNA, 15 bp, Homo sapiens
tgtgtctgtcccttc

SEQ ID NO: 1069686 - DNA, 15 bp, Homo sapiens
ctgtgtctgtccctt

SEQ ID NO: 1069687 - DNA, 15 bp, Homo sapiens
actgtgtctgtccct

SEQ ID NO: 1069688 - DNA, 15 bp, Homo sapiens
gactgtgtctgtccc

SEQ ID NO: 1069689 - DNA, 15 bp, Homo sapiens
tgactgtgtctgtcc

SEQ ID NO: 1069690 - DNA, 15 bp, Homo sapiens
ctgactgtgtctgtc

SEQ ID NO: 1069691 - DNA, 15 bp, Homo sapiens
actgactgtgtctgt

SEQ ID NO: 1069692 - DNA, 15 bp, Homo sapiens
gactgactgtgtctg

SEQ ID NO: 1069693 - DNA, 15 bp, Homo sapiens
agactgactgtgtct

SEQ ID NO: 1069694 - DNA, 15 bp, Homo sapiens
tagactgactgtgtc

SEQ ID NO: 1069695 - DNA, 15 bp, Homo sapiens
atagactgactgtgt

SEQ ID NO: 1069696 - DNA, 15 bp, Homo sapiens
tatagactgactgtg

SEQ ID NO: 1069697 - DNA, 15 bp, Homo sapiens
ctatagactgactgt

SEQ ID NO: 1069698 - DNA, 15 bp, Homo sapiens
gctatagactgactg

SEQ ID NO: 1069699 - DNA, 15 bp, Homo sapiens
tgctatagactgact

SEQ ID NO: 1069700 - DNA, 15 bp, Homo sapiens
ctgctatagactgac

SEQ ID NO: 1069701 - DNA, 15 bp, Homo sapiens
tctgctatagactga

SEQ ID NO: 1069702 - DNA, 15 bp, Homo sapiens
ctctgctatagactg

SEQ ID NO: 1069703 - DNA, 15 bp, Homo sapiens
cctctgctatagact

SEQ ID NO: 1069704 - DNA, 15 bp, Homo sapiens
acctctgctatagac

SEQ ID NO: 1069705 - DNA, 15 bp, Homo sapiens
gacctctgctataga

SEQ ID NO: 1069706 - DNA, 15 bp, Homo sapiens
tgacctctgctatag

SEQ ID NO: 1069707 - DNA, 15 bp, Homo sapiens
atgacctctgctata

SEQ ID NO: 1069708 - DNA, 15 bp, Homo sapiens
gatgacctctgctat

SEQ ID NO: 1069709 - DNA, 15 bp, Homo sapiens
agatgacctctgcta

SEQ ID NO: 1069710 - DNA, 15 bp, Homo sapiens
aagatgacctctgct

SEQ ID NO: 1069711 - DNA, 15 bp, Homo sapiens
aaagatgacctctgc

SEQ ID NO: 1069712 - DNA, 15 bp, Homo sapiens
aaaagatgacctctg

SEQ ID NO: 1069713 - DNA, 15 bp, Homo sapiens
aaaaagatgacctct

SEQ ID NO: 1069714 - DNA, 15 bp, Homo sapiens
aaaaaagatgacctc

SEQ ID NO: 1069715 - DNA, 15 bp, Homo sapiens
gaaaaaagatgacct

SEQ ID NO: 1069716 - DNA, 15 bp, Homo sapiens
tgaaaaaagatgacc

SEQ ID NO: 1069717 - DNA, 15 bp, Homo sapiens
ctgaaaaaagatgac

SEQ ID NO: 1069718 - DNA, 15 bp, Homo sapiens
actgaaaaaagatga

SEQ ID NO: 1069719 - DNA, 15 bp, Homo sapiens
cactgaaaaaagatg

SEQ ID NO: 1069720 - DNA, 15 bp, Homo sapiens
acactgaaaaaagat

SEQ ID NO: 1069721 - DNA, 15 bp, Homo sapiens
gacactgaaaaaaga

SEQ ID NO: 1069722 - DNA, 15 bp, Homo sapiens
cgacactgaaaaaag

SEQ ID NO: 1069723 - DNA, 15 bp, Homo sapiens
tcgacactgaaaaaa

SEQ ID NO: 1069724 - DNA, 15 bp, Homo sapiens
ttcgacactgaaaaa

SEQ ID NO: 1069725 - DNA, 15 bp, Homo sapiens
tttcgacactgaaaa

SEQ ID NO: 1069726 - DNA, 15 bp, Homo sapiens
ttttcgacactgaaa

SEQ ID NO: 1069727 - DNA, 15 bp, Homo sapiens
tttttcgacactgaa

SEQ ID NO: 1069728 - DNA, 15 bp, Homo sapiens
atttttcgacactga

SEQ ID NO: 1069729 - DNA, 15 bp, Homo sapiens
catttttcgacactg

SEQ ID NO: 1069730 - DNA, 15 bp, Homo sapiens
acatttttcgacact

SEQ ID NO: 1069731 - DNA, 15 bp, Homo sapiens
aacatttttcgacac

SEQ ID NO: 1069732 - DNA, 15 bp, Homo sapiens
caacatttttcgaca

SEQ ID NO: 1069733 - DNA, 15 bp, Homo sapiens
acaacatttttcgac

SEQ ID NO: 1069734 - DNA, 15 bp, Homo sapiens
aacaacatttttcga

SEQ ID NO: 1069735 - DNA, 15 bp, Homo sapiens
caacaacatttttcg

SEQ ID NO: 1069736 - DNA, 15 bp, Homo sapiens
tcaacaacatttttc

SEQ ID NO: 1069737 - DNA, 15 bp, Homo sapiens
ctcaacaacattttt

SEQ ID NO: 1069738 - DNA, 15 bp, Homo sapiens
actcaacaacatttt

SEQ ID NO: 1069739 - DNA, 15 bp, Homo sapiens
gactcaacaacattt

SEQ ID NO: 1069740 - DNA, 15 bp, Homo sapiens
ggactcaacaacatt

SEQ ID NO: 1069741 - DNA, 15 bp, Homo sapiens
gggactcaacaacat

SEQ ID NO: 1069742 - DNA, 15 bp, Homo sapiens
tgggactcaacaaca

SEQ ID NO: 1069743 - DNA, 15 bp, Homo sapiens
gtgggactcaacaac

SEQ ID NO: 1069744 - DNA, 15 bp, Homo sapiens
tgtgggactcaacaa

SEQ ID NO: 1069745 - DNA, 15 bp, Homo sapiens
gtgtgggactcaaca

SEQ ID NO: 1069746 - DNA, 15 bp, Homo sapiens
tgtgtgggactcaac

SEQ ID NO: 1069747 - DNA, 15 bp, Homo sapiens
ttgtgtgggactcaa

SEQ ID NO: 1069748 - DNA, 15 bp, Homo sapiens
tttgtgtgggactca

SEQ ID NO: 1069749 - DNA, 15 bp, Homo sapiens
ctttgtgtgggactc

SEQ ID NO: 1069750 - DNA, 15 bp, Homo sapiens
cctttgtgtgggact

SEQ ID NO: 1069751 - DNA, 15 bp, Homo sapiens
tcctttgtgtgggac

SEQ ID NO: 1069752 - DNA, 15 bp, Homo sapiens
ttcctttgtgtggga

SEQ ID NO: 1069753 - DNA, 15 bp, Homo sapiens
cttcctttgtgtggg

SEQ ID NO: 1069754 - DNA, 15 bp, Homo sapiens
acttcctttgtgtgg

SEQ ID NO: 1069755 - DNA, 15 bp, Homo sapiens
aacttcctttgtgtg

SEQ ID NO: 1069756 - DNA, 15 bp, Homo sapiens
gaacttcctttgtgt

SEQ ID NO: 1069757 - DNA, 15 bp, Homo sapiens
agaacttcctttgtg

SEQ ID NO: 1069758 - DNA, 15 bp, Homo sapiens
tagaacttcctttgt

SEQ ID NO: 1069759 - DNA, 15 bp, Homo sapiens
atagaacttcctttg

SEQ ID NO: 1069760 - DNA, 15 bp, Homo sapiens
aatagaacttccttt

SEQ ID NO: 1069761 - DNA, 15 bp, Homo sapiens
aaatagaacttcctt

SEQ ID NO: 1069762 - DNA, 15 bp, Homo sapiens
aaaatagaacttcct

SEQ ID NO: 1069763 - DNA, 15 bp, Homo sapiens
taaaatagaacttcc

SEQ ID NO: 1069764 - DNA, 15 bp, Homo sapiens
aaataaaatagaact

SEQ ID NO: 1069765 - DNA, 15 bp, Homo sapiens
aaaataaaatagaac

SEQ ID NO: 1069766 - DNA, 15 bp, Homo sapiens
taaaataaaatagaa

SEQ ID NO: 1069767 - DNA, 15 bp, Homo sapiens
ataaaataaaataga

SEQ ID NO: 1069768 - DNA, 15 bp, Homo sapiens
gaaataaaataaaat

SEQ ID NO: 1069769 - DNA, 15 bp, Homo sapiens
agaaataaaataaaa

SEQ ID NO: 1069770 - DNA, 15 bp, Homo sapiens
cagaaataaaataaa

SEQ ID NO: 1069771 - DNA, 15 bp, Homo sapiens
ccagaaataaaataa

SEQ ID NO: 1069772 - DNA, 15 bp, Homo sapiens
tccagaaataaaata

SEQ ID NO: 1069773 - DNA, 15 bp, Homo sapiens
ctccagaaataaaat

SEQ ID NO: 1069774 - DNA, 15 bp, Homo sapiens
tctccagaaataaaa

SEQ ID NO: 1069775 - DNA, 15 bp, Homo sapiens
atctccagaaataaa

SEQ ID NO: 1069776 - DNA, 15 bp, Homo sapiens
tatctccagaaataa

SEQ ID NO: 1069777 - DNA, 15 bp, Homo sapiens
ctatctccagaaata

SEQ ID NO: 1069778 - DNA, 15 bp, Homo sapiens
cctatctccagaaat

SEQ ID NO: 1069779 - DNA, 15 bp, Homo sapiens
ccctatctccagaaa

SEQ ID NO: 1069780 - DNA, 15 bp, Homo sapiens
accctatctccagaa

SEQ ID NO: 1069781 - DNA, 15 bp, Homo sapiens
taccctatctccaga

SEQ ID NO: 1069782 - DNA, 15 bp, Homo sapiens
ataccctatctccag

SEQ ID NO: 1069783 - DNA, 15 bp, Homo sapiens
gataccctatctcca

SEQ ID NO: 1069784 - DNA, 15 bp, Homo sapiens
agataccctatctcc

SEQ ID NO: 1069785 - DNA, 15 bp, Homo sapiens
gagataccctatctc

SEQ ID NO: 1069786 - DNA, 15 bp, Homo sapiens
agagataccctatct

SEQ ID NO: 1069787 - DNA, 15 bp, Homo sapiens
tagagataccctatc

SEQ ID NO: 1069788 - DNA, 15 bp, Homo sapiens
atagagataccctat

SEQ ID NO: 1069789 - DNA, 15 bp, Homo sapiens
catagagatacccta

SEQ ID NO: 1069790 - DNA, 15 bp, Homo sapiens
acatagagataccct

SEQ ID NO: 1069791 - DNA, 15 bp, Homo sapiens
aacatagagataccc

SEQ ID NO: 1069792 - DNA, 15 bp, Homo sapiens
caacatagagatacc

SEQ ID NO: 1069793 - DNA, 15 bp, Homo sapiens
gcaacatagagatac

SEQ ID NO: 1069794 - DNA, 15 bp, Homo sapiens
ggcaacatagagata

SEQ ID NO: 1069795 - DNA, 15 bp, Homo sapiens
gggcaacatagagat

SEQ ID NO: 1069796 - DNA, 15 bp, Homo sapiens
tgggcaacatagaga

SEQ ID NO: 1069797 - DNA, 15 bp, Homo sapiens
ctgggcaacatagag

SEQ ID NO: 1069798 - DNA, 15 bp, Homo sapiens
cctgggcaacataga

SEQ ID NO: 1069799 - DNA, 15 bp, Homo sapiens
tgcctgggcaacata

SEQ ID NO: 1069800 - DNA, 15 bp, Homo sapiens
ctgcctgggcaacat

SEQ ID NO: 1069801 - DNA, 15 bp, Homo sapiens
cctgcctgggcaaca

SEQ ID NO: 1069802 - DNA, 15 bp, Homo sapiens
acctgcctgggcaac

SEQ ID NO: 1069803 - DNA, 15 bp, Homo sapiens
gacctgcctgggcaa

SEQ ID NO: 1069804 - DNA, 15 bp, Homo sapiens
agacctgcctgggca

SEQ ID NO: 1069805 - DNA, 15 bp, Homo sapiens
gagacctgcctgggc

SEQ ID NO: 1069806 - DNA, 15 bp, Homo sapiens
tgagacctgcctggg

SEQ ID NO: 1069807 - DNA, 15 bp, Homo sapiens
ttgagacctgcctgg

SEQ ID NO: 1069808 - DNA, 15 bp, Homo sapiens
tttgagacctgcctg

SEQ ID NO: 1069809 - DNA, 15 bp, Homo sapiens
gtttgagacctgcct

SEQ ID NO: 1069810 - DNA, 15 bp, Homo sapiens
agtttgagacctgcc

SEQ ID NO: 1069811 - DNA, 15 bp, Homo sapiens
gagtttgagacctgc

SEQ ID NO: 1069812 - DNA, 15 bp, Homo sapiens
ggagtttgagacctg

SEQ ID NO: 1069813 - DNA, 15 bp, Homo sapiens
aggagtttgagacct

SEQ ID NO: 1069814 - DNA, 15 bp, Homo sapiens
aaggattgcttgaag

SEQ ID NO: 1069815 - DNA, 15 bp, Homo sapiens
gaaggattgcttgaa

SEQ ID NO: 1069816 - DNA, 15 bp, Homo sapiens
ggaaggattgcttga

SEQ ID NO: 1069817 - DNA, 15 bp, Homo sapiens
tggaaggattgcttg

SEQ ID NO: 1069818 - DNA, 15 bp, Homo sapiens
gtggaaggattgctt

SEQ ID NO: 1069819 - DNA, 15 bp, Homo sapiens
ggtggaaggattgct

SEQ ID NO: 1069820 - DNA, 15 bp, Homo sapiens
aggtggaaggattgc

SEQ ID NO: 1069821 - DNA, 15 bp, Homo sapiens
gaggtggaaggattg

SEQ ID NO: 1069822 - DNA, 15 bp, Homo sapiens
tgaggtggaaggatt

SEQ ID NO: 1069823 - DNA, 15 bp, Homo sapiens
ttgaggtggaaggat

SEQ ID NO: 1069824 - DNA, 15 bp, Homo sapiens
gttgaggtggaagga

SEQ ID NO: 1069825 - DNA, 15 bp, Homo sapiens
ggttgaggtggaagg

SEQ ID NO: 1069826 - DNA, 15 bp, Homo sapiens
aggttgaggtggaag

SEQ ID NO: 1069827 - DNA, 15 bp, Homo sapiens
gaggttgaggtggaa

SEQ ID NO: 1069828 - DNA, 15 bp, Homo sapiens
ggaggttgaggtgga

SEQ ID NO: 1069829 - DNA, 15 bp, Homo sapiens
acactttgggaggtt

SEQ ID NO: 1069830 - DNA, 15 bp, Homo sapiens
aacactttgggaggt

SEQ ID NO: 1069831 - DNA, 15 bp, Homo sapiens
tggtggctcacgcca

SEQ ID NO: 1069832 - DNA, 15 bp, Homo sapiens
agtgtggtggctcac

SEQ ID NO: 1069833 - DNA, 15 bp, Homo sapiens
cagtgtggtggctca

SEQ ID NO: 1069834 - DNA, 15 bp, Homo sapiens
ccagtgtggtggctc

SEQ ID NO: 1069835 - DNA, 15 bp, Homo sapiens
cccagtgtggtggct

SEQ ID NO: 1069836 - DNA, 15 bp, Homo sapiens
gcccagtgtggtggc

SEQ ID NO: 1069837 - DNA, 15 bp, Homo sapiens
ggcccagtgtggtgg

SEQ ID NO: 1069838 - DNA, 15 bp, Homo sapiens
aggcccagtgtggtg

SEQ ID NO: 1069839 - DNA, 15 bp, Homo sapiens
taggcccagtgtggt

SEQ ID NO: 1069840 - DNA, 15 bp, Homo sapiens
ataggcccagtgtgg

SEQ ID NO: 1069841 - DNA, 15 bp, Homo sapiens
aataggcccagtgtg

SEQ ID NO: 1069842 - DNA, 15 bp, Homo sapiens
aaataggcccagtgt

SEQ ID NO: 1069843 - DNA, 15 bp, Homo sapiens
aaaataggcccagtg

SEQ ID NO: 1069844 - DNA, 15 bp, Homo sapiens
gaaaataggcccagt

SEQ ID NO: 1069845 - DNA, 15 bp, Homo sapiens
tgaaaataggcccag

SEQ ID NO: 1069846 - DNA, 15 bp, Homo sapiens
ttgaaaataggccca

SEQ ID NO: 1069847 - DNA, 15 bp, Homo sapiens
attgaaaataggccc

SEQ ID NO: 1069848 - DNA, 15 bp, Homo sapiens
tattgaaaataggcc

SEQ ID NO: 1069849 - DNA, 15 bp, Homo sapiens
atattgaaaataggc

SEQ ID NO: 1069850 - DNA, 15 bp, Homo sapiens
gatattgaaaatagg

SEQ ID NO: 1069851 - DNA, 15 bp, Homo sapiens
agatattgaaaatag

SEQ ID NO: 1069852 - DNA, 15 bp, Homo sapiens
cagatattgaaaata

SEQ ID NO: 1069853 - DNA, 15 bp, Homo sapiens
acagatattgaaaat

SEQ ID NO: 1069854 - DNA, 15 bp, Homo sapiens
aacagatattgaaaa

SEQ ID NO: 1069855 - DNA, 15 bp, Homo sapiens
taacagatattgaaa

SEQ ID NO: 1069856 - DNA, 15 bp, Homo sapiens
ataacagatattgaa

SEQ ID NO: 1069857 - DNA, 15 bp, Homo sapiens
aataacagatattga

SEQ ID NO: 1069858 - DNA, 15 bp, Homo sapiens
aaataacagatattg

SEQ ID NO: 1069859 - DNA, 15 bp, Homo sapiens
aaaataacagatatt

SEQ ID NO: 1069860 - DNA, 15 bp, Homo sapiens
taaaataacagatat

SEQ ID NO: 1069861 - DNA, 15 bp, Homo sapiens
ttaaaataacagata

SEQ ID NO: 1069862 - DNA, 15 bp, Homo sapiens
tttaaaataacagat

SEQ ID NO: 1069863 - DNA, 15 bp, Homo sapiens
ttttaaaataacaga

SEQ ID NO: 1069864 - DNA, 15 bp, Homo sapiens
gttttaaaataacag

SEQ ID NO: 1069865 - DNA, 15 bp, Homo sapiens
tgttttaaaataaca

SEQ ID NO: 1069866 - DNA, 15 bp, Homo sapiens
atgttttaaaataac

SEQ ID NO: 1069867 - DNA, 15 bp, Homo sapiens
aatgttttaaaataa

SEQ ID NO: 1069868 - DNA, 15 bp, Homo sapiens
aaatgttttaaaata

SEQ ID NO: 1069869 - DNA, 15 bp, Homo sapiens
aaaaatgttttaaaa

SEQ ID NO: 1069870 - DNA, 15 bp, Homo sapiens
taaaaatgttttaaa

SEQ ID NO: 1069871 - DNA, 15 bp, Homo sapiens
ttaaaaatgttttaa

SEQ ID NO: 1069872 - DNA, 15 bp, Homo sapiens
attaaaaatgtttta

SEQ ID NO: 1069873 - DNA, 15 bp, Homo sapiens
tattaaaaatgtttt

SEQ ID NO: 1069874 - DNA, 15 bp, Homo sapiens
ctattaaaaatgttt

SEQ ID NO: 1069875 - DNA, 15 bp, Homo sapiens
actattaaaaatgtt

SEQ ID NO: 1069876 - DNA, 15 bp, Homo sapiens
gactattaaaaatgt

SEQ ID NO: 1069877 - DNA, 15 bp, Homo sapiens
tgactattaaaaatg

SEQ ID NO: 1069878 - DNA, 15 bp, Homo sapiens
ttgactattaaaaat

SEQ ID NO: 1069879 - DNA, 15 bp, Homo sapiens
gttgactattaaaaa

SEQ ID NO: 1069880 - DNA, 15 bp, Homo sapiens
tgttgactattaaaa

SEQ ID NO: 1069881 - DNA, 15 bp, Homo sapiens
ctgttgactattaaa

SEQ ID NO: 1069882 - DNA, 15 bp, Homo sapiens
gctgttgactattaa

SEQ ID NO: 1069883 - DNA, 15 bp, Homo sapiens
ggctgttgactatta

SEQ ID NO: 1069884 - DNA, 15 bp, Homo sapiens
tggctgttgactatt

SEQ ID NO: 1069885 - DNA, 15 bp, Homo sapiens
gtggctgttgactat

SEQ ID NO: 1069886 - DNA, 15 bp, Homo sapiens
agtggctgttgacta

SEQ ID NO: 1069887 - DNA, 15 bp, Homo sapiens
tagtggctgttgact

SEQ ID NO: 1069888 - DNA, 15 bp, Homo sapiens
ctagtggctgttgac

SEQ ID NO: 1069889 - DNA, 15 bp, Homo sapiens
tctagtggctgttga

SEQ ID NO: 1069890 - DNA, 15 bp, Homo sapiens
ttctagtggctgttg

SEQ ID NO: 1069891 - DNA, 15 bp, Homo sapiens
tttctagtggctgtt

SEQ ID NO: 1069892 - DNA, 15 bp, Homo sapiens
ttttctagtggctgt

SEQ ID NO: 1069893 - DNA, 15 bp, Homo sapiens
attttctagtggctg

SEQ ID NO: 1069894 - DNA, 15 bp, Homo sapiens
cattttctagtggct

SEQ ID NO: 1069895 - DNA, 15 bp, Homo sapiens
acattttctagtggc

SEQ ID NO: 1069896 - DNA, 15 bp, Homo sapiens
tacattttctagtgg

SEQ ID NO: 1069897 - DNA, 15 bp, Homo sapiens
ttacattttctagtg

SEQ ID NO: 1069898 - DNA, 15 bp, Homo sapiens
attacattttctagt

SEQ ID NO: 1069899 - DNA, 15 bp, Homo sapiens
cattacattttctag

SEQ ID NO: 1069900 - DNA, 15 bp, Homo sapiens
tcattacattttcta

SEQ ID NO: 1069901 - DNA, 15 bp, Homo sapiens
gtcattacattttct

SEQ ID NO: 1069902 - DNA, 15 bp, Homo sapiens
tgtcattacattttc

SEQ ID NO: 1069903 - DNA, 15 bp, Homo sapiens
gtgtcattacatttt

SEQ ID NO: 1069904 - DNA, 15 bp, Homo sapiens
agtgtcattacattt

SEQ ID NO: 1069905 - DNA, 15 bp, Homo sapiens
aagtgtcattacatt

SEQ ID NO: 1069906 - DNA, 15 bp, Homo sapiens
taagtgtcattacat

SEQ ID NO: 1069907 - DNA, 15 bp, Homo sapiens
ttaagtgtcattaca

SEQ ID NO: 1069908 - DNA, 15 bp, Homo sapiens
tttaagtgtcattac

SEQ ID NO: 1069909 - DNA, 15 bp, Homo sapiens
ttttaagtgtcatta

SEQ ID NO: 1069910 - DNA, 15 bp, Homo sapiens
tttttaagtgtcatt

SEQ ID NO: 1069911 - DNA, 15 bp, Homo sapiens
ctttttaagtgtcat

SEQ ID NO: 1069912 - DNA, 15 bp, Homo sapiens
tctttttaagtgtca

SEQ ID NO: 1069913 - DNA, 15 bp, Homo sapiens
atctttttaagtgtc

SEQ ID NO: 1069914 - DNA, 15 bp, Homo sapiens
aatctttttaagtgt

SEQ ID NO: 1069915 - DNA, 15 bp, Homo sapiens
caatctttttaagtg

SEQ ID NO: 1069916 - DNA, 15 bp, Homo sapiens
acaatctttttaagt

SEQ ID NO: 1069917 - DNA, 15 bp, Homo sapiens
aacaatctttttaag

SEQ ID NO: 1069918 - DNA, 15 bp, Homo sapiens
taacaatctttttaa

SEQ ID NO: 1069919 - DNA, 15 bp, Homo sapiens
ataacaatcttttta

SEQ ID NO: 1069920 - DNA, 15 bp, Homo sapiens
aataacaatcttttt

SEQ ID NO: 1069921 - DNA, 15 bp, Homo sapiens
aaataacaatctttt

SEQ ID NO: 1069922 - DNA, 15 bp, Homo sapiens
aaaataacaatcttt

SEQ ID NO: 1069923 - DNA, 15 bp, Homo sapiens
taaaataacaatctt

SEQ ID NO: 1069924 - DNA, 15 bp, Homo sapiens
gtaaaataacaatct

SEQ ID NO: 1069925 - DNA, 15 bp, Homo sapiens
agtaaaataacaatc

SEQ ID NO: 1069926 - DNA, 15 bp, Homo sapiens
aagtaaaataacaat

SEQ ID NO: 1069927 - DNA, 15 bp, Homo sapiens
taagtaaaataacaa

SEQ ID NO: 1069928 - DNA, 15 bp, Homo sapiens
ttaagtaaaataaca

SEQ ID NO: 1069929 - DNA, 15 bp, Homo sapiens
gttaagtaaaataac

SEQ ID NO: 1069930 - DNA, 15 bp, Homo sapiens
ggttaagtaaaataa

SEQ ID NO: 1069931 - DNA, 15 bp, Homo sapiens
tggttaagtaaaata

SEQ ID NO: 1069932 - DNA, 15 bp, Homo sapiens
ttggttaagtaaaat

SEQ ID NO: 1069933 - DNA, 15 bp, Homo sapiens
attggttaagtaaaa

SEQ ID NO: 1069934 - DNA, 15 bp, Homo sapiens
tattggttaagtaaa

SEQ ID NO: 1069935 - DNA, 15 bp, Homo sapiens
ttattggttaagtaa

SEQ ID NO: 1069936 - DNA, 15 bp, Homo sapiens
gttattggttaagta

SEQ ID NO: 1069937 - DNA, 15 bp, Homo sapiens
tgttattggttaagt

SEQ ID NO: 1069938 - DNA, 15 bp, Homo sapiens
atgttattggttaag

SEQ ID NO: 1069939 - DNA, 15 bp, Homo sapiens
gatgttattggttaa

SEQ ID NO: 1069940 - DNA, 15 bp, Homo sapiens
agatgttattggtta

SEQ ID NO: 1069941 - DNA, 15 bp, Homo sapiens
cagatgttattggtt

SEQ ID NO: 1069942 - DNA, 15 bp, Homo sapiens
gcagatgttattggt

SEQ ID NO: 1069943 - DNA, 15 bp, Homo sapiens
tgcagatgttattgg

SEQ ID NO: 1069944 - DNA, 15 bp, Homo sapiens
atgcagatgttattg

SEQ ID NO: 1069945 - DNA, 15 bp, Homo sapiens
catgcagatgttatt

SEQ ID NO: 1069946 - DNA, 15 bp, Homo sapiens
gcatgcagatgttat

SEQ ID NO: 1069947 - DNA, 15 bp, Homo sapiens
tgcatgcagatgtta

SEQ ID NO: 1069948 - DNA, 15 bp, Homo sapiens
ttgcatgcagatgtt

SEQ ID NO: 1069949 - DNA, 15 bp, Homo sapiens
cttgcatgcagatgt

SEQ ID NO: 1069950 - DNA, 15 bp, Homo sapiens
acttgcatgcagatg

SEQ ID NO: 1069951 - DNA, 15 bp, Homo sapiens
cacttgcatgcagat

SEQ ID NO: 1069952 - DNA, 15 bp, Homo sapiens
tcacttgcatgcaga

SEQ ID NO: 1069953 - DNA, 15 bp, Homo sapiens
ctcacttgcatgcag

SEQ ID NO: 1069954 - DNA, 15 bp, Homo sapiens
gctcacttgcatgca

SEQ ID NO: 1069955 - DNA, 15 bp, Homo sapiens
cgctcacttgcatgc

SEQ ID NO: 1069956 - DNA, 15 bp, Homo sapiens
tcgctcacttgcatg

SEQ ID NO: 1069957 - DNA, 15 bp, Homo sapiens
atcgctcacttgcat

SEQ ID NO: 1069958 - DNA, 15 bp, Homo sapiens
catcgctcacttgca

SEQ ID NO: 1069959 - DNA, 15 bp, Homo sapiens
tcatcgctcacttgc

SEQ ID NO: 1069960 - DNA, 15 bp, Homo sapiens
ttcatcgctcacttg

SEQ ID NO: 1069961 - DNA, 15 bp, Homo sapiens
gttcatcgctcactt

SEQ ID NO: 1069962 - DNA, 15 bp, Homo sapiens
tgttcatcgctcact

SEQ ID NO: 1069963 - DNA, 15 bp, Homo sapiens
atgttcatcgctcac

SEQ ID NO: 1069964 - DNA, 15 bp, Homo sapiens
tatgttcatcgctca

SEQ ID NO: 1069965 - DNA, 15 bp, Homo sapiens
gtatgttcatcgctc

SEQ ID NO: 1069966 - DNA, 15 bp, Homo sapiens
tgtatgttcatcgct

SEQ ID NO: 1069967 - DNA, 15 bp, Homo sapiens
gtgtatgttcatcgc

SEQ ID NO: 1069968 - DNA, 15 bp, Homo sapiens
tgtgtatgttcatcg

SEQ ID NO: 1069969 - DNA, 15 bp, Homo sapiens
ttgtgtatgttcatc

SEQ ID NO: 1069970 - DNA, 15 bp, Homo sapiens
tttgtgtatgttcat

SEQ ID NO: 1069971 - DNA, 15 bp, Homo sapiens
ctttgtgtatgttca

SEQ ID NO: 1069972 - DNA, 15 bp, Homo sapiens
cctttgtgtatgttc

SEQ ID NO: 1069973 - DNA, 15 bp, Homo sapiens
ccctttgtgtatgtt

SEQ ID NO: 1069974 - DNA, 15 bp, Homo sapiens
tccctttgtgtatgt

SEQ ID NO: 1069975 - DNA, 15 bp, Homo sapiens
ttccctttgtgtatg

SEQ ID NO: 1069976 - DNA, 15 bp, Homo sapiens
tttccctttgtgtat

SEQ ID NO: 1069977 - DNA, 15 bp, Homo sapiens
atttccctttgtgta

SEQ ID NO: 1069978 - DNA, 15 bp, Homo sapiens
catttccctttgtgt

SEQ ID NO: 1069979 - DNA, 15 bp, Homo sapiens
ccatttccctttgtg

SEQ ID NO: 1069980 - DNA, 15 bp, Homo sapiens
tccatttccctttgt

SEQ ID NO: 1069981 - DNA, 15 bp, Homo sapiens
atccatttccctttg

SEQ ID NO: 1069982 - DNA, 15 bp, Homo sapiens
aatccatttcccttt

SEQ ID NO: 1069983 - DNA, 15 bp, Homo sapiens
taatccatttccctt

SEQ ID NO: 1069984 - DNA, 15 bp, Homo sapiens
ttaatccatttccct

SEQ ID NO: 1069985 - DNA, 15 bp, Homo sapiens
cttaatccatttccc

SEQ ID NO: 1069986 - DNA, 15 bp, Homo sapiens
tcttaatccatttcc

SEQ ID NO: 1069987 - DNA, 15 bp, Homo sapiens
ctcttaatccatttc

SEQ ID NO: 1069988 - DNA, 15 bp, Homo sapiens
cctcttaatccattt

SEQ ID NO: 1069989 - DNA, 15 bp, Homo sapiens
acctcttaatccatt

SEQ ID NO: 1069990 - DNA, 15 bp, Homo sapiens
aacctcttaatccat

SEQ ID NO: 1069991 - DNA, 15 bp, Homo sapiens
gaacctcttaatcca

SEQ ID NO: 1069992 - DNA, 15 bp, Homo sapiens
agaacctcttaatcc

SEQ ID NO: 1069993 - DNA, 15 bp, Homo sapiens
gagaacctcttaatc

SEQ ID NO: 1069994 - DNA, 15 bp, Homo sapiens
tgagaacctcttaat

SEQ ID NO: 1069995 - DNA, 15 bp, Homo sapiens
ctgagaacctcttaa

SEQ ID NO: 1069996 - DNA, 15 bp, Homo sapiens
tctgagaacctctta

SEQ ID NO: 1069997 - DNA, 15 bp, Homo sapiens
atctgagaacctctt

SEQ ID NO: 1069998 - DNA, 15 bp, Homo sapiens
tatctgagaacctct

SEQ ID NO: 1069999 - DNA, 15 bp, Homo sapiens
ttatctgagaacctc

SEQ ID NO: 1070000 - DNA, 15 bp, Homo sapiens
cttatctgagaacct

SEQ ID NO: 1070001 - DNA, 15 bp, Homo sapiens
ccttatctgagaacc

SEQ ID NO: 1070002 - DNA, 15 bp, Homo sapiens
accttatctgagaac

SEQ ID NO: 1070003 - DNA, 15 bp, Homo sapiens
aaccttatctgagaa

SEQ ID NO: 1070004 - DNA, 15 bp, Homo sapiens
aaaccttatctgaga

SEQ ID NO: 1070005 - DNA, 15 bp, Homo sapiens
caaaccttatctgag

SEQ ID NO: 1070006 - DNA, 15 bp, Homo sapiens
gcaaaccttatctga

SEQ ID NO: 1070007 - DNA, 15 bp, Homo sapiens
agcaaaccttatctg

SEQ ID NO: 1070008 - DNA, 15 bp, Homo sapiens
tagcaaaccttatct

SEQ ID NO: 1070009 - DNA, 15 bp, Homo sapiens
ctagcaaaccttatc

SEQ ID NO: 1070010 - DNA, 15 bp, Homo sapiens
actagcaaaccttat

SEQ ID NO: 1070011 - DNA, 15 bp, Homo sapiens
aactagcaaacctta

SEQ ID NO: 1070012 - DNA, 15 bp, Homo sapiens
aaactagcaaacctt

SEQ ID NO: 1070013 - DNA, 15 bp, Homo sapiens
taaactagcaaacct

SEQ ID NO: 1070014 - DNA, 15 bp, Homo sapiens
ctaaactagcaaacc

SEQ ID NO: 1070015 - DNA, 15 bp, Homo sapiens
tctaaactagcaaac

SEQ ID NO: 1070016 - DNA, 15 bp, Homo sapiens
gtctaaactagcaaa

SEQ ID NO: 1070017 - DNA, 15 bp, Homo sapiens
ggtctaaactagcaa

SEQ ID NO: 1070018 - DNA, 15 bp, Homo sapiens
tggtctaaactagca

SEQ ID NO: 1070019 - DNA, 15 bp, Homo sapiens
ttggtctaaactagc

SEQ ID NO: 1070020 - DNA, 15 bp, Homo sapiens
tttggtctaaactag

SEQ ID NO: 1070021 - DNA, 15 bp, Homo sapiens
atttggtctaaacta

SEQ ID NO: 1070022 - DNA, 15 bp, Homo sapiens
catttggtctaaact

SEQ ID NO: 1070023 - DNA, 15 bp, Homo sapiens
tcatttggtctaaac

SEQ ID NO: 1070024 - DNA, 15 bp, Homo sapiens
ctcatttggtctaaa

SEQ ID NO: 1070025 - DNA, 15 bp, Homo sapiens
tctcatttggtctaa

SEQ ID NO: 1070026 - DNA, 15 bp, Homo sapiens
atctcatttggtcta

SEQ ID NO: 1070027 - DNA, 15 bp, Homo sapiens
gatctcatttggtct

SEQ ID NO: 1070028 - DNA, 15 bp, Homo sapiens
tgatctcatttggtc

SEQ ID NO: 1070029 - DNA, 15 bp, Homo sapiens
ctgatctcatttggt

SEQ ID NO: 1070030 - DNA, 15 bp, Homo sapiens
cctgatctcatttgg

SEQ ID NO: 1070031 - DNA, 15 bp, Homo sapiens
tcctgatctcatttg

SEQ ID NO: 1070032 - DNA, 15 bp, Homo sapiens
cctcctgatctcatt

SEQ ID NO: 1070033 - DNA, 15 bp, Homo sapiens
acctcctgatctcat

SEQ ID NO: 1070034 - DNA, 15 bp, Homo sapiens
aacctcctgatctca

SEQ ID NO: 1070035 - DNA, 15 bp, Homo sapiens
gaacctcctgatctc

SEQ ID NO: 1070036 - DNA, 15 bp, Homo sapiens
agaacctcctgatct

SEQ ID NO: 1070037 - DNA, 15 bp, Homo sapiens
tagaacctcctgatc

SEQ ID NO: 1070038 - DNA, 15 bp, Homo sapiens
ctagaacctcctgat

SEQ ID NO: 1070039 - DNA, 15 bp, Homo sapiens
tctagaacctcctga

SEQ ID NO: 1070040 - DNA, 15 bp, Homo sapiens
ttctagaacctcctg

SEQ ID NO: 1070041 - DNA, 15 bp, Homo sapiens
gttctagaacctcct

SEQ ID NO: 1070042 - DNA, 15 bp, Homo sapiens
tgttctagaacctcc

SEQ ID NO: 1070043 - DNA, 15 bp, Homo sapiens
gtgttctagaacctc

SEQ ID NO: 1070044 - DNA, 15 bp, Homo sapiens
tgtgttctagaacct

SEQ ID NO: 1070045 - DNA, 15 bp, Homo sapiens
ttgtgttctagaacc

SEQ ID NO: 1070046 - DNA, 15 bp, Homo sapiens
cttgtgttctagaac

SEQ ID NO: 1070047 - DNA, 15 bp, Homo sapiens
ccttgtgttctagaa

SEQ ID NO: 1070048 - DNA, 15 bp, Homo sapiens
cccttgtgttctaga

SEQ ID NO: 1070049 - DNA, 15 bp, Homo sapiens
tcccttgtgttctag

SEQ ID NO: 1070050 - DNA, 15 bp, Homo sapiens
ctcccttgtgttcta

SEQ ID NO: 1070051 - DNA, 15 bp, Homo sapiens
cctcccttgtgttct

SEQ ID NO: 1070052 - DNA, 15 bp, Homo sapiens
tcctcccttgtgttc

SEQ ID NO: 1070053 - DNA, 15 bp, Homo sapiens
ttcctcccttgtgtt

SEQ ID NO: 1070054 - DNA, 15 bp, Homo sapiens
tttcctcccttgtgt

SEQ ID NO: 1070055 - DNA, 15 bp, Homo sapiens
ctttcctcccttgtg

SEQ ID NO: 1070056 - DNA, 15 bp, Homo sapiens
gctttcctcccttgt

SEQ ID NO: 1070057 - DNA, 15 bp, Homo sapiens
tgctttcctcccttg

SEQ ID NO: 1070058 - DNA, 15 bp, Homo sapiens
ctgctttcctccctt

SEQ ID NO: 1070059 - DNA, 15 bp, Homo sapiens
gctgctttcctccct

SEQ ID NO: 1070060 - DNA, 15 bp, Homo sapiens
tgctgctttcctccc

SEQ ID NO: 1070061 - DNA, 15 bp, Homo sapiens
atgctgctttcctcc

SEQ ID NO: 1070062 - DNA, 15 bp, Homo sapiens
gatgctgctttcctc

SEQ ID NO: 1070063 - DNA, 15 bp, Homo sapiens
agatgctgctttcct

SEQ ID NO: 1070064 - DNA, 15 bp, Homo sapiens
cagatgctgctttcc

SEQ ID NO: 1070065 - DNA, 15 bp, Homo sapiens
acagatgctgctttc

SEQ ID NO: 1070066 - DNA, 15 bp, Homo sapiens
gacagatgctgcttt

SEQ ID NO: 1070067 - DNA, 15 bp, Homo sapiens
ggacagatgctgctt

SEQ ID NO: 1070068 - DNA, 15 bp, Homo sapiens
tggacagatgctgct

SEQ ID NO: 1070069 - DNA, 15 bp, Homo sapiens
gtggacagatgctgc

SEQ ID NO: 1070070 - DNA, 15 bp, Homo sapiens
ggtggacagatgctg

SEQ ID NO: 1070071 - DNA, 15 bp, Homo sapiens
gggtggacagatgct

SEQ ID NO: 1070072 - DNA, 15 bp, Homo sapiens
ggggtggacagatgc

SEQ ID NO: 1070073 - DNA, 15 bp, Homo sapiens
tggggtggacagatg

SEQ ID NO: 1070074 - DNA, 15 bp, Homo sapiens
ttggggtggacagat

SEQ ID NO: 1070075 - DNA, 15 bp, Homo sapiens
cttggggtggacaga

SEQ ID NO: 1070076 - DNA, 15 bp, Homo sapiens
gcttggggtggacag

SEQ ID NO: 1070077 - DNA, 15 bp, Homo sapiens
ggcttggggtggaca

SEQ ID NO: 1070078 - DNA, 15 bp, Homo sapiens
tggcttggggtggac

SEQ ID NO: 1070079 - DNA, 15 bp, Homo sapiens
ttggcttggggtgga

SEQ ID NO: 1070080 - DNA, 15 bp, Homo sapiens
cttggcttggggtgg

SEQ ID NO: 1070081 - DNA, 15 bp, Homo sapiens
acttggcttggggtg

SEQ ID NO: 1070082 - DNA, 15 bp, Homo sapiens
aacttggcttggggt

SEQ ID NO: 1070083 - DNA, 15 bp, Homo sapiens
taacttggcttgggg

SEQ ID NO: 1070084 - DNA, 15 bp, Homo sapiens
gtaacttggcttggg

SEQ ID NO: 1070085 - DNA, 15 bp, Homo sapiens
agtaacttggcttgg

SEQ ID NO: 1070086 - DNA, 15 bp, Homo sapiens
cagtaacttggcttg

SEQ ID NO: 1070087 - DNA, 15 bp, Homo sapiens
gcagtaacttggctt

SEQ ID NO: 1070088 - DNA, 15 bp, Homo sapiens
ggcagtaacttggct

SEQ ID NO: 1070089 - DNA, 15 bp, Homo sapiens
tggcagtaacttggc

SEQ ID NO: 1070090 - DNA, 15 bp, Homo sapiens
ttggcagtaacttgg

SEQ ID NO: 1070091 - DNA, 15 bp, Homo sapiens
gttggcagtaacttg

SEQ ID NO: 1070092 - DNA, 15 bp, Homo sapiens
ggttggcagtaactt

SEQ ID NO: 1070093 - DNA, 15 bp, Homo sapiens
gggttggcagtaact

SEQ ID NO: 1070094 - DNA, 15 bp, Homo sapiens
tgggttggcagtaac

SEQ ID NO: 1070095 - DNA, 15 bp, Homo sapiens
ttgggttggcagtaa

SEQ ID NO: 1070096 - DNA, 15 bp, Homo sapiens
cttgggttggcagta

SEQ ID NO: 1070097 - DNA, 15 bp, Homo sapiens
ccttgggttggcagt

SEQ ID NO: 1070098 - DNA, 15 bp, Homo sapiens
gccttgggttggcag

SEQ ID NO: 1070099 - DNA, 15 bp, Homo sapiens
tgccttgggttggca

SEQ ID NO: 1070100 - DNA, 15 bp, Homo sapiens
ttgccttgggttggc

SEQ ID NO: 1070101 - DNA, 15 bp, Homo sapiens
attgccttgggttgg

SEQ ID NO: 1070102 - DNA, 15 bp, Homo sapiens
cattgccttgggttg

SEQ ID NO: 1070103 - DNA, 15 bp, Homo sapiens
gcattgccttgggtt

SEQ ID NO: 1070104 - DNA, 15 bp, Homo sapiens
agcattgccttgggt

SEQ ID NO: 1070105 - DNA, 15 bp, Homo sapiens
aagcattgccttggg

SEQ ID NO: 1070106 - DNA, 15 bp, Homo sapiens
taagcattgccttgg

SEQ ID NO: 1070107 - DNA, 15 bp, Homo sapiens
ctaagcattgccttg

SEQ ID NO: 1070108 - DNA, 15 bp, Homo sapiens
actaagcattgcctt

SEQ ID NO: 1070109 - DNA, 15 bp, Homo sapiens
cactaagcattgcct

SEQ ID NO: 1070110 - DNA, 15 bp, Homo sapiens
ccactaagcattgcc

SEQ ID NO: 1070111 - DNA, 15 bp, Homo sapiens
tccactaagcattgc

SEQ ID NO: 1070112 - DNA, 15 bp, Homo sapiens
atccactaagcattg

SEQ ID NO: 1070113 - DNA, 15 bp, Homo sapiens
tatccactaagcatt

SEQ ID NO: 1070114 - DNA, 15 bp, Homo sapiens
ttatccactaagcat

SEQ ID NO: 1070115 - DNA, 15 bp, Homo sapiens
tttatccactaagca

SEQ ID NO: 1070116 - DNA, 15 bp, Homo sapiens
atttatccactaagc

SEQ ID NO: 1070117 - DNA, 15 bp, Homo sapiens
tatttatccactaag

SEQ ID NO: 1070118 - DNA, 15 bp, Homo sapiens
ttatttatccactaa

SEQ ID NO: 1070119 - DNA, 15 bp, Homo sapiens
tttatttatccacta

SEQ ID NO: 1070120 - DNA, 15 bp, Homo sapiens
ttttatttatccact

SEQ ID NO: 1070121 - DNA, 15 bp, Homo sapiens
tttttatttatccac

SEQ ID NO: 1070122 - DNA, 15 bp, Homo sapiens
gtttttatttatcca

SEQ ID NO: 1070123 - DNA, 15 bp, Homo sapiens
ggtttttatttatcc

SEQ ID NO: 1070124 - DNA, 15 bp, Homo sapiens
aggtttttatttatc

SEQ ID NO: 1070125 - DNA, 15 bp, Homo sapiens
caggtttttatttat

SEQ ID NO: 1070126 - DNA, 15 bp, Homo sapiens
tcaggtttttattta

SEQ ID NO: 1070127 - DNA, 15 bp, Homo sapiens
ttcaggtttttattt

SEQ ID NO: 1070128 - DNA, 15 bp, Homo sapiens
gttcaggtttttatt

SEQ ID NO: 1070129 - DNA, 15 bp, Homo sapiens
tgttcaggtttttat

SEQ ID NO: 1070130 - DNA, 15 bp, Homo sapiens
ttgttcaggttttta

SEQ ID NO: 1070131 - DNA, 15 bp, Homo sapiens
tttgttcaggttttt

SEQ ID NO: 1070132 - DNA, 15 bp, Homo sapiens
ttttgttcaggtttt

SEQ ID NO: 1070133 - DNA, 15 bp, Homo sapiens
attttgttcaggttt

SEQ ID NO: 1070134 - DNA, 15 bp, Homo sapiens
cattttgttcaggtt

SEQ ID NO: 1070135 - DNA, 15 bp, Homo sapiens
gcattttgttcaggt

SEQ ID NO: 1070136 - DNA, 15 bp, Homo sapiens
tgcattttgttcagg

SEQ ID NO: 1070137 - DNA, 15 bp, Homo sapiens
ctgcattttgttcag

SEQ ID NO: 1070138 - DNA, 15 bp, Homo sapiens
actgcattttgttca

SEQ ID NO: 1070139 - DNA, 15 bp, Homo sapiens
tactgcattttgttc

SEQ ID NO: 1070140 - DNA, 15 bp, Homo sapiens
gtactgcattttgtt

SEQ ID NO: 1070141 - DNA, 15 bp, Homo sapiens
agtactgcattttgt

SEQ ID NO: 1070142 - DNA, 15 bp, Homo sapiens
aagtactgcattttg

SEQ ID NO: 1070143 - DNA, 15 bp, Homo sapiens
gaagtactgcatttt

SEQ ID NO: 1070144 - DNA, 15 bp, Homo sapiens
tgaagtactgcattt

SEQ ID NO: 1070145 - DNA, 15 bp, Homo sapiens
atgaagtactgcatt

SEQ ID NO: 1070146 - DNA, 15 bp, Homo sapiens
catgaagtactgcat

SEQ ID NO: 1070147 - DNA, 15 bp, Homo sapiens
acatgaagtactgca

SEQ ID NO: 1070148 - DNA, 15 bp, Homo sapiens
cacatgaagtactgc

SEQ ID NO: 1070149 - DNA, 15 bp, Homo sapiens
tcacatgaagtactg

SEQ ID NO: 1070150 - DNA, 15 bp, Homo sapiens
ctcacatgaagtact

SEQ ID NO: 1070151 - DNA, 15 bp, Homo sapiens
tctcacatgaagtac

SEQ ID NO: 1070152 - DNA, 15 bp, Homo sapiens
ctctcacatgaagta

SEQ ID NO: 1070153 - DNA, 15 bp, Homo sapiens
cctctcacatgaagt

SEQ ID NO: 1070154 - DNA, 15 bp, Homo sapiens
acctctcacatgaag

SEQ ID NO: 1070155 - DNA, 15 bp, Homo sapiens
cacctctcacatgaa

SEQ ID NO: 1070156 - DNA, 15 bp, Homo sapiens
ccacctctcacatga

SEQ ID NO: 1070157 - DNA, 15 bp, Homo sapiens
accacctctcacatg

SEQ ID NO: 1070158 - DNA, 15 bp, Homo sapiens
aaccacctctcacat

SEQ ID NO: 1070159 - DNA, 15 bp, Homo sapiens
aaaccacctctcaca

SEQ ID NO: 1070160 - DNA, 15 bp, Homo sapiens
gaaaccacctctcac

SEQ ID NO: 1070161 - DNA, 15 bp, Homo sapiens
agaaaccacctctca

SEQ ID NO: 1070162 - DNA, 15 bp, Homo sapiens
cagaaaccacctctc

SEQ ID NO: 1070163 - DNA, 15 bp, Homo sapiens
acagaaaccacctct

SEQ ID NO: 1070164 - DNA, 15 bp, Homo sapiens
cacagaaaccacctc

SEQ ID NO: 1070165 - DNA, 15 bp, Homo sapiens
ccacagaaaccacct

SEQ ID NO: 1070166 - DNA, 15 bp, Homo sapiens
tccacagaaaccacc

SEQ ID NO: 1070167 - DNA, 15 bp, Homo sapiens
gtccacagaaaccac

SEQ ID NO: 1070168 - DNA, 15 bp, Homo sapiens
agtccacagaaacca

SEQ ID NO: 1070169 - DNA, 15 bp, Homo sapiens
aagtccacagaaacc

SEQ ID NO: 1070170 - DNA, 15 bp, Homo sapiens
caagtccacagaaac

SEQ ID NO: 1070171 - DNA, 15 bp, Homo sapiens
ccaagtccacagaaa

SEQ ID NO: 1070172 - DNA, 15 bp, Homo sapiens
tccaagtccacagaa

SEQ ID NO: 1070173 - DNA, 15 bp, Homo sapiens
atccaagtccacaga

SEQ ID NO: 1070174 - DNA, 15 bp, Homo sapiens
aatccaagtccacag

SEQ ID NO: 1070175 - DNA, 15 bp, Homo sapiens
gaatccaagtccaca

SEQ ID NO: 1070176 - DNA, 15 bp, Homo sapiens
agaatccaagtccac

SEQ ID NO: 1070177 - DNA, 15 bp, Homo sapiens
aagaatccaagtcca

SEQ ID NO: 1070178 - DNA, 15 bp, Homo sapiens
taagaatccaagtcc

SEQ ID NO: 1070179 - DNA, 15 bp, Homo sapiens
gtaagaatccaagtc

SEQ ID NO: 1070180 - DNA, 15 bp, Homo sapiens
ggtaagaatccaagt

SEQ ID NO: 1070181 - DNA, 15 bp, Homo sapiens
cggtaagaatccaag

SEQ ID NO: 1070182 - DNA, 15 bp, Homo sapiens
acggtaagaatccaa

SEQ ID NO: 1070183 - DNA, 15 bp, Homo sapiens
tacggtaagaatcca

SEQ ID NO: 1070184 - DNA, 15 bp, Homo sapiens
atacggtaagaatcc

SEQ ID NO: 1070185 - DNA, 15 bp, Homo sapiens
aatacggtaagaatc

SEQ ID NO: 1070186 - DNA, 15 bp, Homo sapiens
aaatacggtaagaat

SEQ ID NO: 1070187 - DNA, 15 bp, Homo sapiens
gaaatacggtaagaa

SEQ ID NO: 1070188 - DNA, 15 bp, Homo sapiens
ggaaatacggtaaga

SEQ ID NO: 1070189 - DNA, 15 bp, Homo sapiens
aggaaatacggtaag

SEQ ID NO: 1070190 - DNA, 15 bp, Homo sapiens
gaggaaatacggtaa

SEQ ID NO: 1070191 - DNA, 15 bp, Homo sapiens
agaggaaatacggta

SEQ ID NO: 1070192 - DNA, 15 bp, Homo sapiens
tagaggaaatacggt

SEQ ID NO: 1070193 - DNA, 15 bp, Homo sapiens
ttagaggaaatacgg

SEQ ID NO: 1070194 - DNA, 15 bp, Homo sapiens
attagaggaaatacg

SEQ ID NO: 1070195 - DNA, 15 bp, Homo sapiens
tattagaggaaatac

SEQ ID NO: 1070196 - DNA, 15 bp, Homo sapiens
atattagaggaaata

SEQ ID NO: 1070197 - DNA, 15 bp, Homo sapiens
gatattagaggaaat

SEQ ID NO: 1070198 - DNA, 15 bp, Homo sapiens
agatattagaggaaa

SEQ ID NO: 1070199 - DNA, 15 bp, Homo sapiens
cagatattagaggaa

SEQ ID NO: 1070200 - DNA, 15 bp, Homo sapiens
acagatattagagga

SEQ ID NO: 1070201 - DNA, 15 bp, Homo sapiens
aacagatattagagg

SEQ ID NO: 1070202 - DNA, 15 bp, Homo sapiens
gaacagatattagag

SEQ ID NO: 1070203 - DNA, 15 bp, Homo sapiens
tgaacagatattaga

SEQ ID NO: 1070204 - DNA, 15 bp, Homo sapiens
atgaacagatattag

SEQ ID NO: 1070205 - DNA, 15 bp, Homo sapiens
aatgaacagatatta

SEQ ID NO: 1070206 - DNA, 15 bp, Homo sapiens
taatgaacagatatt

SEQ ID NO: 1070207 - DNA, 15 bp, Homo sapiens
gtaatgaacagatat

SEQ ID NO: 1070208 - DNA, 15 bp, Homo sapiens
tgtaatgaacagata

SEQ ID NO: 1070209 - DNA, 15 bp, Homo sapiens
ttgtaatgaacagat

SEQ ID NO: 1070210 - DNA, 15 bp, Homo sapiens
cttgtaatgaacaga

SEQ ID NO: 1070211 - DNA, 15 bp, Homo sapiens
gcttgtaatgaacag

SEQ ID NO: 1070212 - DNA, 15 bp, Homo sapiens
tgcttgtaatgaaca

SEQ ID NO: 1070213 - DNA, 15 bp, Homo sapiens
atgcttgtaatgaac

SEQ ID NO: 1070214 - DNA, 15 bp, Homo sapiens
gatgcttgtaatgaa

SEQ ID NO: 1070215 - DNA, 15 bp, Homo sapiens
tgatgcttgtaatga

SEQ ID NO: 1070216 - DNA, 15 bp, Homo sapiens
atgatgcttgtaatg

SEQ ID NO: 1070217 - DNA, 15 bp, Homo sapiens
catgatgcttgtaat

SEQ ID NO: 1070218 - DNA, 15 bp, Homo sapiens
acatgatgcttgtaa

SEQ ID NO: 1070219 - DNA, 15 bp, Homo sapiens
tacatgatgcttgta

SEQ ID NO: 1070220 - DNA, 15 bp, Homo sapiens
ttacatgatgcttgt

SEQ ID NO: 1070221 - DNA, 15 bp, Homo sapiens
tttacatgatgcttg

SEQ ID NO: 1070222 - DNA, 15 bp, Homo sapiens
gtttacatgatgctt

SEQ ID NO: 1070223 - DNA, 15 bp, Homo sapiens
ggtttacatgatgct

SEQ ID NO: 1070224 - DNA, 15 bp, Homo sapiens
aggtttacatgatgc

SEQ ID NO: 1070225 - DNA, 15 bp, Homo sapiens
caggtttacatgatg

SEQ ID NO: 1070226 - DNA, 15 bp, Homo sapiens
acaggtttacatgat

SEQ ID NO: 1070227 - DNA, 15 bp, Homo sapiens
aacaggtttacatga

SEQ ID NO: 1070228 - DNA, 15 bp, Homo sapiens
caacaggtttacatg

SEQ ID NO: 1070229 - DNA, 15 bp, Homo sapiens
gcaacaggtttacat

SEQ ID NO: 1070230 - DNA, 15 bp, Homo sapiens
ggcaacaggtttaca

SEQ ID NO: 1070231 - DNA, 15 bp, Homo sapiens
aggcaacaggtttac

SEQ ID NO: 1070232 - DNA, 15 bp, Homo sapiens
aaggcaacaggttta

SEQ ID NO: 1070233 - DNA, 15 bp, Homo sapiens
taaggcaacaggttt

SEQ ID NO: 1070234 - DNA, 15 bp, Homo sapiens
ttaaggcaacaggtt

SEQ ID NO: 1070235 - DNA, 15 bp, Homo sapiens
tttaaggcaacaggt

SEQ ID NO: 1070236 - DNA, 15 bp, Homo sapiens
ttttaaggcaacagg

SEQ ID NO: 1070237 - DNA, 15 bp, Homo sapiens
tttttaaggcaacag

SEQ ID NO: 1070238 - DNA, 15 bp, Homo sapiens
gtttttaaggcaaca

SEQ ID NO: 1070239 - DNA, 15 bp, Homo sapiens
agtttttaaggcaac

SEQ ID NO: 1070240 - DNA, 15 bp, Homo sapiens
gagtttttaaggcaa

SEQ ID NO: 1070241 - DNA, 15 bp, Homo sapiens
agagtttttaaggca

SEQ ID NO: 1070242 - DNA, 15 bp, Homo sapiens
aagagtttttaaggc

SEQ ID NO: 1070243 - DNA, 15 bp, Homo sapiens
caagagtttttaagg

SEQ ID NO: 1070244 - DNA, 15 bp, Homo sapiens
tcaagagtttttaag

SEQ ID NO: 1070245 - DNA, 15 bp, Homo sapiens
ttcaagagtttttaa

SEQ ID NO: 1070246 - DNA, 15 bp, Homo sapiens
tttcaagagttttta

SEQ ID NO: 1070247 - DNA, 15 bp, Homo sapiens
ttttcaagagttttt

SEQ ID NO: 1070248 - DNA, 15 bp, Homo sapiens
cttttcaagagtttt

SEQ ID NO: 1070249 - DNA, 15 bp, Homo sapiens
ccttttcaagagttt

SEQ ID NO: 1070250 - DNA, 15 bp, Homo sapiens
accttttcaagagtt

SEQ ID NO: 1070251 - DNA, 15 bp, Homo sapiens
caccttttcaagagt

SEQ ID NO: 1070252 - DNA, 15 bp, Homo sapiens
acaccttttcaagag

SEQ ID NO: 1070253 - DNA, 15 bp, Homo sapiens
gacaccttttcaaga

SEQ ID NO: 1070254 - DNA, 15 bp, Homo sapiens
ggacaccttttcaag

SEQ ID NO: 1070255 - DNA, 15 bp, Homo sapiens
aggacaccttttcaa

SEQ ID NO: 1070256 - DNA, 15 bp, Homo sapiens
aaggacaccttttca

SEQ ID NO: 1070257 - DNA, 15 bp, Homo sapiens
aaaggacaccttttc

SEQ ID NO: 1070258 - DNA, 15 bp, Homo sapiens
caaaggacacctttt

SEQ ID NO: 1070259 - DNA, 15 bp, Homo sapiens
ccaaaggacaccttt

SEQ ID NO: 1070260 - DNA, 15 bp, Homo sapiens
cccaaaggacacctt

SEQ ID NO: 1070261 - DNA, 15 bp, Homo sapiens
ccccaaaggacacct

SEQ ID NO: 1070262 - DNA, 15 bp, Homo sapiens
cccccaaaggacacc

SEQ ID NO: 1070263 - DNA, 15 bp, Homo sapiens
tcccccaaaggacac

SEQ ID NO: 1070264 - DNA, 15 bp, Homo sapiens
ttcccccaaaggaca

SEQ ID NO: 1070265 - DNA, 15 bp, Homo sapiens
attcccccaaaggac

SEQ ID NO: 1070266 - DNA, 15 bp, Homo sapiens
cattcccccaaagga

SEQ ID NO: 1070267 - DNA, 15 bp, Homo sapiens
acattcccccaaagg

SEQ ID NO: 1070268 - DNA, 15 bp, Homo sapiens
cacattcccccaaag

SEQ ID NO: 1070269 - DNA, 15 bp, Homo sapiens
gcacattcccccaaa

SEQ ID NO: 1070270 - DNA, 15 bp, Homo sapiens
agcacattcccccaa

SEQ ID NO: 1070271 - DNA, 15 bp, Homo sapiens
aagcacattccccca

SEQ ID NO: 1070272 - DNA, 15 bp, Homo sapiens
caagcacattccccc

SEQ ID NO: 1070273 - DNA, 15 bp, Homo sapiens
ccaagcacattcccc

SEQ ID NO: 1070274 - DNA, 15 bp, Homo sapiens
tcccccaagcacatt

SEQ ID NO: 1070275 - DNA, 15 bp, Homo sapiens
ttcccccaagcacat

SEQ ID NO: 1070276 - DNA, 15 bp, Homo sapiens
cttcccccaagcaca

SEQ ID NO: 1070277 - DNA, 15 bp, Homo sapiens
gcttcccccaagcac

SEQ ID NO: 1070278 - DNA, 15 bp, Homo sapiens
tgcttcccccaagca

SEQ ID NO: 1070279 - DNA, 15 bp, Homo sapiens
ttgcttcccccaagc

SEQ ID NO: 1070280 - DNA, 15 bp, Homo sapiens
gttgcttcccccaag

SEQ ID NO: 1070281 - DNA, 15 bp, Homo sapiens
ggttgcttcccccaa

SEQ ID NO: 1070282 - DNA, 15 bp, Homo sapiens
gggttgcttccccca

SEQ ID NO: 1070283 - DNA, 15 bp, Homo sapiens
agggttgcttccccc

SEQ ID NO: 1070284 - DNA, 15 bp, Homo sapiens
aagggttgcttcccc

SEQ ID NO: 1070285 - DNA, 15 bp, Homo sapiens
taagggttgcttccc

SEQ ID NO: 1070286 - DNA, 15 bp, Homo sapiens
ttaagggttgcttcc

SEQ ID NO: 1070287 - DNA, 15 bp, Homo sapiens
cttaagggttgcttc

SEQ ID NO: 1070288 - DNA, 15 bp, Homo sapiens
gcttaagggttgctt

SEQ ID NO: 1070289 - DNA, 15 bp, Homo sapiens
tgcttaagggttgct

SEQ ID NO: 1070290 - DNA, 15 bp, Homo sapiens
atgcttaagggttgc

SEQ ID NO: 1070291 - DNA, 15 bp, Homo sapiens
catgcttaagggttg

SEQ ID NO: 1070292 - DNA, 15 bp, Homo sapiens
ccatgcttaagggtt

SEQ ID NO: 1070293 - DNA, 15 bp, Homo sapiens
gccatgcttaagggt

SEQ ID NO: 1070294 - DNA, 15 bp, Homo sapiens
agccatgcttaaggg

SEQ ID NO: 1070295 - DNA, 15 bp, Homo sapiens
cagccatgcttaagg

SEQ ID NO: 1070296 - DNA, 15 bp, Homo sapiens
acagccatgcttaag

SEQ ID NO: 1070297 - DNA, 15 bp, Homo sapiens
gacagccatgcttaa

SEQ ID NO: 1070298 - DNA, 15 bp, Homo sapiens
agacagccatgctta

SEQ ID NO: 1070299 - DNA, 15 bp, Homo sapiens
cagacagccatgctt

SEQ ID NO: 1070300 - DNA, 15 bp, Homo sapiens
gcagacagccatgct

SEQ ID NO: 1070301 - DNA, 15 bp, Homo sapiens
agcagacagccatgc

SEQ ID NO: 1070302 - DNA, 15 bp, Homo sapiens
cagcagacagccatg

SEQ ID NO: 1070303 - DNA, 15 bp, Homo sapiens
gcagcagacagccat

SEQ ID NO: 1070304 - DNA, 15 bp, Homo sapiens
ggcagcagacagcca

SEQ ID NO: 1070305 - DNA, 15 bp, Homo sapiens
gggcagcagacagcc

SEQ ID NO: 1070306 - DNA, 15 bp, Homo sapiens
tgggcagcagacagc

SEQ ID NO: 1070307 - DNA, 15 bp, Homo sapiens
ctgggcagcagacag

SEQ ID NO: 1070308 - DNA, 15 bp, Homo sapiens
gctgggcagcagaca

SEQ ID NO: 1070309 - DNA, 15 bp, Homo sapiens
ggctgggcagcagac

SEQ ID NO: 1070310 - DNA, 15 bp, Homo sapiens
gggctgggcagcaga

SEQ ID NO: 1070311 - DNA, 15 bp, Homo sapiens
ggggctgggcagcag

SEQ ID NO: 1070312 - DNA, 15 bp, Homo sapiens
tggggctgggcagca

SEQ ID NO: 1070313 - DNA, 15 bp, Homo sapiens
gtggggctgggcagc

SEQ ID NO: 1070314 - DNA, 15 bp, Homo sapiens
agtggggctgggcag

SEQ ID NO: 1070315 - DNA, 15 bp, Homo sapiens
gagtggggctgggca

SEQ ID NO: 1070316 - DNA, 15 bp, Homo sapiens
ggagtggggctgggc

SEQ ID NO: 1070317 - DNA, 15 bp, Homo sapiens
gggagtggggctggg

SEQ ID NO: 1070318 - DNA, 15 bp, Homo sapiens
tgggagtggggctgg

SEQ ID NO: 1070319 - DNA, 15 bp, Homo sapiens
gtgggagtggggctg

SEQ ID NO: 1070320 - DNA, 15 bp, Homo sapiens
tgtgggagtggggct

SEQ ID NO: 1070321 - DNA, 15 bp, Homo sapiens
gtgtgggagtggggc

SEQ ID NO: 1070322 - DNA, 15 bp, Homo sapiens
ggtgtgggagtgggg

SEQ ID NO: 1070323 - DNA, 15 bp, Homo sapiens
aggtgtgggagtggg

SEQ ID NO: 1070324 - DNA, 15 bp, Homo sapiens
aaggtgtgggagtgg

SEQ ID NO: 1070325 - DNA, 15 bp, Homo sapiens
caaggtgtgggagtg

SEQ ID NO: 1070326 - DNA, 15 bp, Homo sapiens
gcaaggtgtgggagt

SEQ ID NO: 1070327 - DNA, 15 bp, Homo sapiens
agcaaggtgtgggag

SEQ ID NO: 1070328 - DNA, 15 bp, Homo sapiens
gagcaaggtgtggga

SEQ ID NO: 1070329 - DNA, 15 bp, Homo sapiens
tgagcaaggtgtggg

SEQ ID NO: 1070330 - DNA, 15 bp, Homo sapiens
ctgagcaaggtgtgg

SEQ ID NO: 1070331 - DNA, 15 bp, Homo sapiens
tctgagcaaggtgtg

SEQ ID NO: 1070332 - DNA, 15 bp, Homo sapiens
ttctgagcaaggtgt

SEQ ID NO: 1070333 - DNA, 15 bp, Homo sapiens
cttctgagcaaggtg

SEQ ID NO: 1070334 - DNA, 15 bp, Homo sapiens
acttctgagcaaggt

SEQ ID NO: 1070335 - DNA, 15 bp, Homo sapiens
aacttctgagcaagg

SEQ ID NO: 1070336 - DNA, 15 bp, Homo sapiens
gaacttctgagcaag

SEQ ID NO: 1070337 - DNA, 15 bp, Homo sapiens
ggaacttctgagcaa

SEQ ID NO: 1070338 - DNA, 15 bp, Homo sapiens
aggaacttctgagca

SEQ ID NO: 1070339 - DNA, 15 bp, Homo sapiens
gaggaacttctgagc

SEQ ID NO: 1070340 - DNA, 15 bp, Homo sapiens
ggaggaacttctgag

SEQ ID NO: 1070341 - DNA, 15 bp, Homo sapiens
tggaggaacttctga

SEQ ID NO: 1070342 - DNA, 15 bp, Homo sapiens
gtggaggaacttctg

SEQ ID NO: 1070343 - DNA, 15 bp, Homo sapiens
ggtggaggaacttct

SEQ ID NO: 1070344 - DNA, 15 bp, Homo sapiens
tggtggaggaacttc

SEQ ID NO: 1070345 - DNA, 15 bp, Homo sapiens
atggtggaggaactt

SEQ ID NO: 1070346 - DNA, 15 bp, Homo sapiens
gatggtggaggaact

SEQ ID NO: 1070347 - DNA, 15 bp, Homo sapiens
tgatggtggaggaac

SEQ ID NO: 1070348 - DNA, 15 bp, Homo sapiens
ttgatggtggaggaa

SEQ ID NO: 1070349 - DNA, 15 bp, Homo sapiens
gttgatggtggagga

SEQ ID NO: 1070350 - DNA, 15 bp, Homo sapiens
tgttgatggtggagg

SEQ ID NO: 1070351 - DNA, 15 bp, Homo sapiens
ctgttgatggtggag

SEQ ID NO: 1070352 - DNA, 15 bp, Homo sapiens
gctgttgatggtgga

SEQ ID NO: 1070353 - DNA, 15 bp, Homo sapiens
tgctgttgatggtgg

SEQ ID NO: 1070354 - DNA, 15 bp, Homo sapiens
gtgctgttgatggtg

SEQ ID NO: 1070355 - DNA, 15 bp, Homo sapiens
ggtgctgttgatggt

SEQ ID NO: 1070356 - DNA, 15 bp, Homo sapiens
tggtgctgttgatgg

SEQ ID NO: 1070357 - DNA, 15 bp, Homo sapiens
gtggtgctgttgatg

SEQ ID NO: 1070358 - DNA, 15 bp, Homo sapiens
agtggtgctgttgat

SEQ ID NO: 1070359 - DNA, 15 bp, Homo sapiens
cagtggtgctgttga

SEQ ID NO: 1070360 - DNA, 15 bp, Homo sapiens
tcagtggtgctgttg

SEQ ID NO: 1070361 - DNA, 15 bp, Homo sapiens
ctcagtggtgctgtt

SEQ ID NO: 1070362 - DNA, 15 bp, Homo sapiens
gctcagtggtgctgt

SEQ ID NO: 1070363 - DNA, 15 bp, Homo sapiens
agctcagtggtgctg

SEQ ID NO: 1070364 - DNA, 15 bp, Homo sapiens
aagctcagtggtgct

SEQ ID NO: 1070365 - DNA, 15 bp, Homo sapiens
caagctcagtggtgc

SEQ ID NO: 1070366 - DNA, 15 bp, Homo sapiens
acaagctcagtggtg

SEQ ID NO: 1070367 - DNA, 15 bp, Homo sapiens
cacaagctcagtggt

SEQ ID NO: 1070368 - DNA, 15 bp, Homo sapiens
acacaagctcagtgg

SEQ ID NO: 1070369 - DNA, 15 bp, Homo sapiens
gacacaagctcagtg

SEQ ID NO: 1070370 - DNA, 15 bp, Homo sapiens
ggacacaagctcagt

SEQ ID NO: 1070371 - DNA, 15 bp, Homo sapiens
tggacacaagctcag

SEQ ID NO: 1070372 - DNA, 15 bp, Homo sapiens
ctggacacaagctca

SEQ ID NO: 1070373 - DNA, 15 bp, Homo sapiens
tctggacacaagctc

SEQ ID NO: 1070374 - DNA, 15 bp, Homo sapiens
ttctggacacaagct

SEQ ID NO: 1070375 - DNA, 15 bp, Homo sapiens
cttctggacacaagc

SEQ ID NO: 1070376 - DNA, 15 bp, Homo sapiens
ccttctggacacaag

SEQ ID NO: 1070377 - DNA, 15 bp, Homo sapiens
gccttctggacacaa

SEQ ID NO: 1070378 - DNA, 15 bp, Homo sapiens
ggccttctggacaca

SEQ ID NO: 1070379 - DNA, 15 bp, Homo sapiens
gggccttctggacac

SEQ ID NO: 1070380 - DNA, 15 bp, Homo sapiens
agggccttctggaca

SEQ ID NO: 1070381 - DNA, 15 bp, Homo sapiens
gagggccttctggac

SEQ ID NO: 1070382 - DNA, 15 bp, Homo sapiens
tgagggccttctgga

SEQ ID NO: 1070383 - DNA, 15 bp, Homo sapiens
ctgagggccttctgg

SEQ ID NO: 1070384 - DNA, 15 bp, Homo sapiens
cctgagggccttctg

SEQ ID NO: 1070385 - DNA, 15 bp, Homo sapiens
ccctgagggccttct

SEQ ID NO: 1070386 - DNA, 15 bp, Homo sapiens
cccctgagggccttc

SEQ ID NO: 1070387 - DNA, 15 bp, Homo sapiens
ccccctgagggcctt

SEQ ID NO: 1070388 - DNA, 15 bp, Homo sapiens
accccctgagggcct

SEQ ID NO: 1070389 - DNA, 15 bp, Homo sapiens
gaccccctgagggcc

SEQ ID NO: 1070390 - DNA, 15 bp, Homo sapiens
cgaccccctgagggc

SEQ ID NO: 1070391 - DNA, 15 bp, Homo sapiens
tcgaccccctgaggg

SEQ ID NO: 1070392 - DNA, 15 bp, Homo sapiens
ctcgaccccctgagg

SEQ ID NO: 1070393 - DNA, 15 bp, Homo sapiens
cctcgaccccctgag

SEQ ID NO: 1070394 - DNA, 15 bp, Homo sapiens
acctcgaccccctga

SEQ ID NO: 1070395 - DNA, 15 bp, Homo sapiens
tacctcgaccccctg

SEQ ID NO: 1070396 - DNA, 15 bp, Homo sapiens
ttacctcgaccccct

SEQ ID NO: 1070397 - DNA, 15 bp, Homo sapiens
cttacctcgaccccc

SEQ ID NO: 1070398 - DNA, 15 bp, Homo sapiens
tcttacctcgacccc

SEQ ID NO: 1070399 - DNA, 15 bp, Homo sapiens
ctcttacctcgaccc

SEQ ID NO: 1070400 - DNA, 15 bp, Homo sapiens
cctcttacctcgacc

SEQ ID NO: 1070401 - DNA, 15 bp, Homo sapiens
tcctcttacctcgac

SEQ ID NO: 1070402 - DNA, 15 bp, Homo sapiens
atcctcttacctcga

SEQ ID NO: 1070403 - DNA, 15 bp, Homo sapiens
catcctcttacctcg

SEQ ID NO: 1070404 - DNA, 15 bp, Homo sapiens
gcatcctcttacctc

SEQ ID NO: 1070405 - DNA, 15 bp, Homo sapiens
agcatcctcttacct

SEQ ID NO: 1070406 - DNA, 15 bp, Homo sapiens
aagcatcctcttacc

SEQ ID NO: 1070407 - DNA, 15 bp, Homo sapiens
aaagcatcctcttac

SEQ ID NO: 1070408 - DNA, 15 bp, Homo sapiens
caaagcatcctctta

SEQ ID NO: 1070409 - DNA, 15 bp, Homo sapiens
acaaagcatcctctt

SEQ ID NO: 1070410 - DNA, 15 bp, Homo sapiens
tacaaagcatcctct

SEQ ID NO: 1070411 - DNA, 15 bp, Homo sapiens
atacaaagcatcctc

SEQ ID NO: 1070412 - DNA, 15 bp, Homo sapiens
gatacaaagcatcct

SEQ ID NO: 1070413 - DNA, 15 bp, Homo sapiens
tgatacaaagcatcc

SEQ ID NO: 1070414 - DNA, 15 bp, Homo sapiens
ctgatacaaagcatc

SEQ ID NO: 1070415 - DNA, 15 bp, Homo sapiens
actgatacaaagcat

SEQ ID NO: 1070416 - DNA, 15 bp, Homo sapiens
cactgatacaaagca

SEQ ID NO: 1070417 - DNA, 15 bp, Homo sapiens
ccactgatacaaagc

SEQ ID NO: 1070418 - DNA, 15 bp, Homo sapiens
cccactgatacaaag

SEQ ID NO: 1070419 - DNA, 15 bp, Homo sapiens
ccccactgatacaaa

SEQ ID NO: 1070420 - DNA, 15 bp, Homo sapiens
cccccactgatacaa

SEQ ID NO: 1070421 - DNA, 15 bp, Homo sapiens
gcccccactgataca

SEQ ID NO: 1070422 - DNA, 15 bp, Homo sapiens
tgcccccactgatac

SEQ ID NO: 1070423 - DNA, 15 bp, Homo sapiens
ctgcccccactgata

SEQ ID NO: 1070424 - DNA, 15 bp, Homo sapiens
cctgcccccactgat

SEQ ID NO: 1070425 - DNA, 15 bp, Homo sapiens
ccctgcccccactga

SEQ ID NO: 1070426 - DNA, 15 bp, Homo sapiens
tccctgcccccactg

SEQ ID NO: 1070427 - DNA, 15 bp, Homo sapiens
atccctgcccccact

SEQ ID NO: 1070428 - DNA, 15 bp, Homo sapiens
catccctgcccccac

SEQ ID NO: 1070429 - DNA, 15 bp, Homo sapiens
ccatccctgccccca

SEQ ID NO: 1070430 - DNA, 15 bp, Homo sapiens
cccatccctgccccc

SEQ ID NO: 1070431 - DNA, 15 bp, Homo sapiens
tcccatccctgcccc

SEQ ID NO: 1070432 - DNA, 15 bp, Homo sapiens
ctcccatccctgccc

SEQ ID NO: 1070433 - DNA, 15 bp, Homo sapiens
tctcccatccctgcc

SEQ ID NO: 1070434 - DNA, 15 bp, Homo sapiens
ctctcccatccctgc

SEQ ID NO: 1070435 - DNA, 15 bp, Homo sapiens
cctctcccatccctg

SEQ ID NO: 1070436 - DNA, 15 bp, Homo sapiens
acctctcccatccct

SEQ ID NO: 1070437 - DNA, 15 bp, Homo sapiens
tacctctcccatccc

SEQ ID NO: 1070438 - DNA, 15 bp, Homo sapiens
ttacctctcccatcc

SEQ ID NO: 1070439 - DNA, 15 bp, Homo sapiens
attacctctcccatc

SEQ ID NO: 1070440 - DNA, 15 bp, Homo sapiens
tattacctctcccat

SEQ ID NO: 1070441 - DNA, 15 bp, Homo sapiens
ttattacctctccca

SEQ ID NO: 1070442 - DNA, 15 bp, Homo sapiens
cttattacctctccc

SEQ ID NO: 1070443 - DNA, 15 bp, Homo sapiens
tcttattacctctcc

SEQ ID NO: 1070444 - DNA, 15 bp, Homo sapiens
ctcttattacctctc

SEQ ID NO: 1070445 - DNA, 15 bp, Homo sapiens
gctcttattacctct

SEQ ID NO: 1070446 - DNA, 15 bp, Homo sapiens
ggctcttattacctc

SEQ ID NO: 1070447 - DNA, 15 bp, Homo sapiens
cggctcttattacct

SEQ ID NO: 1070448 - DNA, 15 bp, Homo sapiens
ccggctcttattacc

SEQ ID NO: 1070449 - DNA, 15 bp, Homo sapiens
cccggctcttattac

SEQ ID NO: 1070450 - DNA, 15 bp, Homo sapiens
tcccggctcttatta

SEQ ID NO: 1070451 - DNA, 15 bp, Homo sapiens
atcccggctcttatt

SEQ ID NO: 1070452 - DNA, 15 bp, Homo sapiens
catcccggctcttat

SEQ ID NO: 1070453 - DNA, 15 bp, Homo sapiens
ccatcccggctctta

SEQ ID NO: 1070454 - DNA, 15 bp, Homo sapiens
cccatcccggctctt

SEQ ID NO: 1070455 - DNA, 15 bp, Homo sapiens
ccccatcccggctct

SEQ ID NO: 1070456 - DNA, 15 bp, Homo sapiens
cccccatcccggctc

SEQ ID NO: 1070457 - DNA, 15 bp, Homo sapiens
gcccccatcccggct

SEQ ID NO: 1070458 - DNA, 15 bp, Homo sapiens
ggcccccatcccggc

SEQ ID NO: 1070459 - DNA, 15 bp, Homo sapiens
tggcccccatcccgg

SEQ ID NO: 1070460 - DNA, 15 bp, Homo sapiens
ctggcccccatcccg

SEQ ID NO: 1070461 - DNA, 15 bp, Homo sapiens
cctggcccccatccc

SEQ ID NO: 1070462 - DNA, 15 bp, Homo sapiens
ccctggcccccatcc

SEQ ID NO: 1070463 - DNA, 15 bp, Homo sapiens
cccctggcccccatc

SEQ ID NO: 1070464 - DNA, 15 bp, Homo sapiens
tcccctggcccccat

SEQ ID NO: 1070465 - DNA, 15 bp, Homo sapiens
ctcccctggccccca

SEQ ID NO: 1070466 - DNA, 15 bp, Homo sapiens
actcccctggccccc

SEQ ID NO: 1070467 - DNA, 15 bp, Homo sapiens
cactcccctggcccc

SEQ ID NO: 1070468 - DNA, 15 bp, Homo sapiens
tcactcccctggccc

SEQ ID NO: 1070469 - DNA, 15 bp, Homo sapiens
gtcactcccctggcc

SEQ ID NO: 1070470 - DNA, 15 bp, Homo sapiens
agtcactcccctggc

SEQ ID NO: 1070471 - DNA, 15 bp, Homo sapiens
cagtcactcccctgg

SEQ ID NO: 1070472 - DNA, 15 bp, Homo sapiens
ccagtcactcccctg

SEQ ID NO: 1070473 - DNA, 15 bp, Homo sapiens
cccagtcactcccct

SEQ ID NO: 1070474 - DNA, 15 bp, Homo sapiens
acccagtcactcccc

SEQ ID NO: 1070475 - DNA, 15 bp, Homo sapiens
aacccagtcactccc

SEQ ID NO: 1070476 - DNA, 15 bp, Homo sapiens
gaacccagtcactcc

SEQ ID NO: 1070477 - DNA, 15 bp, Homo sapiens
agaacccagtcactc

SEQ ID NO: 1070478 - DNA, 15 bp, Homo sapiens
cagaacccagtcact

SEQ ID NO: 1070479 - DNA, 15 bp, Homo sapiens
ccagaacccagtcac

SEQ ID NO: 1070480 - DNA, 15 bp, Homo sapiens
accagaacccagtca

SEQ ID NO: 1070481 - DNA, 15 bp, Homo sapiens
caccagaacccagtc

SEQ ID NO: 1070482 - DNA, 15 bp, Homo sapiens
tcaccagaacccagt

SEQ ID NO: 1070483 - DNA, 15 bp, Homo sapiens
ctcaccagaacccag

SEQ ID NO: 1070484 - DNA, 15 bp, Homo sapiens
gctcaccagaaccca

SEQ ID NO: 1070485 - DNA, 15 bp, Homo sapiens
tgctcaccagaaccc

SEQ ID NO: 1070486 - DNA, 15 bp, Homo sapiens
atgctcaccagaacc

SEQ ID NO: 1070487 - DNA, 15 bp, Homo sapiens
tatgctcaccagaac

SEQ ID NO: 1070488 - DNA, 15 bp, Homo sapiens
gtatgctcaccagaa

SEQ ID NO: 1070489 - DNA, 15 bp, Homo sapiens
tgtatgctcaccaga

SEQ ID NO: 1070490 - DNA, 15 bp, Homo sapiens
ctgtatgctcaccag

SEQ ID NO: 1070491 - DNA, 15 bp, Homo sapiens
tctgtatgctcacca

SEQ ID NO: 1070492 - DNA, 15 bp, Homo sapiens
ttctgtatgctcacc

SEQ ID NO: 1070493 - DNA, 15 bp, Homo sapiens
cttctgtatgctcac

SEQ ID NO: 1070494 - DNA, 15 bp, Homo sapiens
gcttctgtatgctca

SEQ ID NO: 1070495 - DNA, 15 bp, Homo sapiens
agcttctgtatgctc

SEQ ID NO: 1070496 - DNA, 15 bp, Homo sapiens
aagcttctgtatgct

SEQ ID NO: 1070497 - DNA, 15 bp, Homo sapiens
aaagcttctgtatgc

SEQ ID NO: 1070498 - DNA, 15 bp, Homo sapiens
caaagcttctgtatg

SEQ ID NO: 1070499 - DNA, 15 bp, Homo sapiens
gcaaagcttctgtat

SEQ ID NO: 1070500 - DNA, 15 bp, Homo sapiens
agcaaagcttctgta

SEQ ID NO: 1070501 - DNA, 15 bp, Homo sapiens
cagcaaagcttctgt

SEQ ID NO: 1070502 - DNA, 15 bp, Homo sapiens
acagcaaagcttctg

SEQ ID NO: 1070503 - DNA, 15 bp, Homo sapiens
aacagcaaagcttct

SEQ ID NO: 1070504 - DNA, 15 bp, Homo sapiens
taacagcaaagcttc

SEQ ID NO: 1070505 - DNA, 15 bp, Homo sapiens
ataacagcaaagctt

SEQ ID NO: 1070506 - DNA, 15 bp, Homo sapiens
aataacagcaaagct

SEQ ID NO: 1070507 - DNA, 15 bp, Homo sapiens
gaataacagcaaagc

SEQ ID NO: 1070508 - DNA, 15 bp, Homo sapiens
tgaataacagcaaag

SEQ ID NO: 1070509 - DNA, 15 bp, Homo sapiens
ctgaataacagcaaa

SEQ ID NO: 1070510 - DNA, 15 bp, Homo sapiens
cctgaataacagcaa

SEQ ID NO: 1070511 - DNA, 15 bp, Homo sapiens
tcctgaataacagca

SEQ ID NO: 1070512 - DNA, 15 bp, Homo sapiens
ttcctgaataacagc

SEQ ID NO: 1070513 - DNA, 15 bp, Homo sapiens
cttcctgaataacag

SEQ ID NO: 1070514 - DNA, 15 bp, Homo sapiens
ccttcctgaataaca

SEQ ID NO: 1070515 - DNA, 15 bp, Homo sapiens
tccttcctgaataac

SEQ ID NO: 1070516 - DNA, 15 bp, Homo sapiens
ttccttcctgaataa

SEQ ID NO: 1070517 - DNA, 15 bp, Homo sapiens
attccttcctgaata

SEQ ID NO: 1070518 - DNA, 15 bp, Homo sapiens
cattccttcctgaat

SEQ ID NO: 1070519 - DNA, 15 bp, Homo sapiens
gcattccttcctgaa

SEQ ID NO: 1070520 - DNA, 15 bp, Homo sapiens
tgcattccttcctga

SEQ ID NO: 1070521 - DNA, 15 bp, Homo sapiens
ctgcattccttcctg

SEQ ID NO: 1070522 - DNA, 15 bp, Homo sapiens
cctgcattccttcct

SEQ ID NO: 1070523 - DNA, 15 bp, Homo sapiens
acctgcattccttcc

SEQ ID NO: 1070524 - DNA, 15 bp, Homo sapiens
aacctgcattccttc

SEQ ID NO: 1070525 - DNA, 15 bp, Homo sapiens
aaacctgcattcctt

SEQ ID NO: 1070526 - DNA, 15 bp, Homo sapiens
aaaacctgcattcct

SEQ ID NO: 1070527 - DNA, 15 bp, Homo sapiens
caaaacctgcattcc

SEQ ID NO: 1070528 - DNA, 15 bp, Homo sapiens
gcaaaacctgcattc

SEQ ID NO: 1070529 - DNA, 15 bp, Homo sapiens
tgcaaaacctgcatt

SEQ ID NO: 1070530 - DNA, 15 bp, Homo sapiens
ctgcaaaacctgcat

SEQ ID NO: 1070531 - DNA, 15 bp, Homo sapiens
tctgcaaaacctgca

SEQ ID NO: 1070532 - DNA, 15 bp, Homo sapiens
ttctgcaaaacctgc

SEQ ID NO: 1070533 - DNA, 15 bp, Homo sapiens
ctttctgcaaaacct

SEQ ID NO: 1070534 - DNA, 15 bp, Homo sapiens
gctttctgcaaaacc

SEQ ID NO: 1070535 - DNA, 15 bp, Homo sapiens
tgctttctgcaaaac

SEQ ID NO: 1070536 - DNA, 15 bp, Homo sapiens
gtgctttctgcaaaa

SEQ ID NO: 1070537 - DNA, 15 bp, Homo sapiens
tgtgctttctgcaaa

SEQ ID NO: 1070538 - DNA, 15 bp, Homo sapiens
atgtgctttctgcaa

SEQ ID NO: 1070539 - DNA, 15 bp, Homo sapiens
aatgtgctttctgca

SEQ ID NO: 1070540 - DNA, 15 bp, Homo sapiens
caatgtgctttctgc

SEQ ID NO: 1070541 - DNA, 15 bp, Homo sapiens
ccaatgtgctttctg

SEQ ID NO: 1070542 - DNA, 15 bp, Homo sapiens
cccaatgtgctttct

SEQ ID NO: 1070543 - DNA, 15 bp, Homo sapiens
gcccaatgtgctttc

SEQ ID NO: 1070544 - DNA, 15 bp, Homo sapiens
tgcccaatgtgcttt

SEQ ID NO: 1070545 - DNA, 15 bp, Homo sapiens
atgcccaatgtgctt

SEQ ID NO: 1070546 - DNA, 15 bp, Homo sapiens
aatgcccaatgtgct

SEQ ID NO: 1070547 - DNA, 15 bp, Homo sapiens
aaatgcccaatgtgc

SEQ ID NO: 1070548 - DNA, 15 bp, Homo sapiens
gaaatgcccaatgtg

SEQ ID NO: 1070549 - DNA, 15 bp, Homo sapiens
tgaaatgcccaatgt

SEQ ID NO: 1070550 - DNA, 15 bp, Homo sapiens
atgaaatgcccaatg

SEQ ID NO: 1070551 - DNA, 15 bp, Homo sapiens
gatgaaatgcccaat

SEQ ID NO: 1070552 - DNA, 15 bp, Homo sapiens
tgatgaaatgcccaa

SEQ ID NO: 1070553 - DNA, 15 bp, Homo sapiens
gtgatgaaatgccca

SEQ ID NO: 1070554 - DNA, 15 bp, Homo sapiens
cgtgatgaaatgccc

SEQ ID NO: 1070555 - DNA, 15 bp, Homo sapiens
acgtgatgaaatgcc

SEQ ID NO: 1070556 - DNA, 15 bp, Homo sapiens
tacgtgatgaaatgc

SEQ ID NO: 1070557 - DNA, 15 bp, Homo sapiens
ctacgtgatgaaatg

SEQ ID NO: 1070558 - DNA, 15 bp, Homo sapiens
tctacgtgatgaaat

SEQ ID NO: 1070559 - DNA, 15 bp, Homo sapiens
ttctacgtgatgaaa

SEQ ID NO: 1070560 - DNA, 15 bp, Homo sapiens
tttctacgtgatgaa

SEQ ID NO: 1070561 - DNA, 15 bp, Homo sapiens
ctttctacgtgatga

SEQ ID NO: 1070562 - DNA, 15 bp, Homo sapiens
gctttctacgtgatg

SEQ ID NO: 1070563 - DNA, 15 bp, Homo sapiens
agctttctacgtgat

SEQ ID NO: 1070564 - DNA, 15 bp, Homo sapiens
tagctttctacgtga

SEQ ID NO: 1070565 - DNA, 15 bp, Homo sapiens
gtagctttctacgtg

SEQ ID NO: 1070566 - DNA, 15 bp, Homo sapiens
agtagctttctacgt

SEQ ID NO: 1070567 - DNA, 15 bp, Homo sapiens
cagtagctttctacg

SEQ ID NO: 1070568 - DNA, 15 bp, Homo sapiens
tcagtagctttctac

SEQ ID NO: 1070569 - DNA, 15 bp, Homo sapiens
ttcagtagctttcta

SEQ ID NO: 1070570 - DNA, 15 bp, Homo sapiens
tttcagtagctttct

SEQ ID NO: 1070571 - DNA, 15 bp, Homo sapiens
gtttcagtagctttc

SEQ ID NO: 1070572 - DNA, 15 bp, Homo sapiens
agtttcagtagcttt

SEQ ID NO: 1070573 - DNA, 15 bp, Homo sapiens
cagtttcagtagctt

SEQ ID NO: 1070574 - DNA, 15 bp, Homo sapiens
tcagtttcagtagct

SEQ ID NO: 1070575 - DNA, 15 bp, Homo sapiens
gtcagtttcagtagc

SEQ ID NO: 1070576 - DNA, 15 bp, Homo sapiens
tgtcagtttcagtag

SEQ ID NO: 1070577 - DNA, 15 bp, Homo sapiens
gtgtcagtttcagta

SEQ ID NO: 1070578 - DNA, 15 bp, Homo sapiens
agtgtcagtttcagt

SEQ ID NO: 1070579 - DNA, 15 bp, Homo sapiens
tagtgtcagtttcag

SEQ ID NO: 1070580 - DNA, 15 bp, Homo sapiens
gtagtgtcagtttca

SEQ ID NO: 1070581 - DNA, 15 bp, Homo sapiens
tgtagtgtcagtttc

SEQ ID NO: 1070582 - DNA, 15 bp, Homo sapiens
gtgtagtgtcagttt

SEQ ID NO: 1070583 - DNA, 15 bp, Homo sapiens
cgtgtagtgtcagtt

SEQ ID NO: 1070584 - DNA, 15 bp, Homo sapiens
gcgtgtagtgtcagt

SEQ ID NO: 1070585 - DNA, 15 bp, Homo sapiens
ggcgtgtagtgtcag

SEQ ID NO: 1070586 - DNA, 15 bp, Homo sapiens
gggcgtgtagtgtca

SEQ ID NO: 1070587 - DNA, 15 bp, Homo sapiens
agggcgtgtagtgtc

SEQ ID NO: 1070588 - DNA, 15 bp, Homo sapiens
gagggcgtgtagtgt

SEQ ID NO: 1070589 - DNA, 15 bp, Homo sapiens
tgagggcgtgtagtg

SEQ ID NO: 1070590 - DNA, 15 bp, Homo sapiens
ctgagggcgtgtagt

SEQ ID NO: 1070591 - DNA, 15 bp, Homo sapiens
gctgagggcgtgtag

SEQ ID NO: 1070592 - DNA, 15 bp, Homo sapiens
ggctgagggcgtgta

SEQ ID NO: 1070593 - DNA, 15 bp, Homo sapiens
tggctgagggcgtgt

SEQ ID NO: 1070594 - DNA, 15 bp, Homo sapiens
ctggctgagggcgtg

SEQ ID NO: 1070595 - DNA, 15 bp, Homo sapiens
cctggctgagggcgt

SEQ ID NO: 1070596 - DNA, 15 bp, Homo sapiens
ccctggctgagggcg

SEQ ID NO: 1070597 - DNA, 15 bp, Homo sapiens
tccctggctgagggc

SEQ ID NO: 1070598 - DNA, 15 bp, Homo sapiens
ctccctggctgaggg

SEQ ID NO: 1070599 - DNA, 15 bp, Homo sapiens
actccctggctgagg

SEQ ID NO: 1070600 - DNA, 15 bp, Homo sapiens
gactccctggctgag

SEQ ID NO: 1070601 - DNA, 15 bp, Homo sapiens
ggactccctggctga

SEQ ID NO: 1070602 - DNA, 15 bp, Homo sapiens
gggactccctggctg

SEQ ID NO: 1070603 - DNA, 15 bp, Homo sapiens
cgggactccctggct

SEQ ID NO: 1070604 - DNA, 15 bp, Homo sapiens
gcgggactccctggc

SEQ ID NO: 1070605 - DNA, 15 bp, Homo sapiens
agcgggactccctgg

SEQ ID NO: 1070606 - DNA, 15 bp, Homo sapiens
tagcgggactccctg

SEQ ID NO: 1070607 - DNA, 15 bp, Homo sapiens
ttagcgggactccct

SEQ ID NO: 1070608 - DNA, 15 bp, Homo sapiens
cttagcgggactccc

SEQ ID NO: 1070609 - DNA, 15 bp, Homo sapiens
ccttagcgggactcc

SEQ ID NO: 1070610 - DNA, 15 bp, Homo sapiens
cccttagcgggactc

SEQ ID NO: 1070611 - DNA, 15 bp, Homo sapiens
tcccttagcgggact

SEQ ID NO: 1070612 - DNA, 15 bp, Homo sapiens
atcccttagcgggac

SEQ ID NO: 1070613 - DNA, 15 bp, Homo sapiens
aatcccttagcggga

SEQ ID NO: 1070614 - DNA, 15 bp, Homo sapiens
taatcccttagcggg

SEQ ID NO: 1070615 - DNA, 15 bp, Homo sapiens
ataatcccttagcgg

SEQ ID NO: 1070616 - DNA, 15 bp, Homo sapiens
cataatcccttagcg

SEQ ID NO: 1070617 - DNA, 15 bp, Homo sapiens
tcataatcccttagc

SEQ ID NO: 1070618 - DNA, 15 bp, Homo sapiens
ttcataatcccttag

SEQ ID NO: 1070619 - DNA, 15 bp, Homo sapiens
tttcataatccctta

SEQ ID NO: 1070620 - DNA, 15 bp, Homo sapiens
ctttcataatccctt

SEQ ID NO: 1070621 - DNA, 15 bp, Homo sapiens
cctttcataatccct

SEQ ID NO: 1070622 - DNA, 15 bp, Homo sapiens
gcctttcataatccc

SEQ ID NO: 1070623 - DNA, 15 bp, Homo sapiens
tgcctttcataatcc

SEQ ID NO: 1070624 - DNA, 15 bp, Homo sapiens
ctgcctttcataatc

SEQ ID NO: 1070625 - DNA, 15 bp, Homo sapiens
cctgcctttcataat

SEQ ID NO: 1070626 - DNA, 15 bp, Homo sapiens
gcctgcctttcataa

SEQ ID NO: 1070627 - DNA, 15 bp, Homo sapiens
agcctgcctttcata

SEQ ID NO: 1070628 - DNA, 15 bp, Homo sapiens
cagcctgcctttcat

SEQ ID NO: 1070629 - DNA, 15 bp, Homo sapiens
tcagcctgcctttca

SEQ ID NO: 1070630 - DNA, 15 bp, Homo sapiens
atcagcctgcctttc

SEQ ID NO: 1070631 - DNA, 15 bp, Homo sapiens
tatcagcctgccttt

SEQ ID NO: 1070632 - DNA, 15 bp, Homo sapiens
gtatcagcctgcctt

SEQ ID NO: 1070633 - DNA, 15 bp, Homo sapiens
ggtatcagcctgcct

SEQ ID NO: 1070634 - DNA, 15 bp, Homo sapiens
tggtatcagcctgcc

SEQ ID NO: 1070635 - DNA, 15 bp, Homo sapiens
ttggtatcagcctgc

SEQ ID NO: 1070636 - DNA, 15 bp, Homo sapiens
ttttggtatcagcct

SEQ ID NO: 1070637 - DNA, 15 bp, Homo sapiens
gttttggtatcagcc

SEQ ID NO: 1070638 - DNA, 15 bp, Homo sapiens
agttttggtatcagc

SEQ ID NO: 1070639 - DNA, 15 bp, Homo sapiens
tagttttggtatcag

SEQ ID NO: 1070640 - DNA, 15 bp, Homo sapiens
gtagttttggtatca

SEQ ID NO: 1070641 - DNA, 15 bp, Homo sapiens
tgtagttttggtatc

SEQ ID NO: 1070642 - DNA, 15 bp, Homo sapiens
ttgtagttttggtat

SEQ ID NO: 1070643 - DNA, 15 bp, Homo sapiens
tttgtagttttggta

SEQ ID NO: 1070644 - DNA, 15 bp, Homo sapiens
atttgtagttttggt

SEQ ID NO: 1070645 - DNA, 15 bp, Homo sapiens
gatttgtagttttgg

SEQ ID NO: 1070646 - DNA, 15 bp, Homo sapiens
ggatttgtagttttg

SEQ ID NO: 1070647 - DNA, 15 bp, Homo sapiens
gagccatcttctatg

SEQ ID NO: 1070648 - DNA, 15 bp, Homo sapiens
ggagccatcttctat

SEQ ID NO: 1070649 - DNA, 15 bp, Homo sapiens
aggagccatcttcta

SEQ ID NO: 1070650 - DNA, 15 bp, Homo sapiens
aaggagccatcttct

SEQ ID NO: 1070651 - DNA, 15 bp, Homo sapiens
aaaggagccatcttc

SEQ ID NO: 1070652 - DNA, 15 bp, Homo sapiens
caaaggagccatctt

SEQ ID NO: 1070653 - DNA, 15 bp, Homo sapiens
tcaaaggagccatct

SEQ ID NO: 1070654 - DNA, 15 bp, Homo sapiens
ctcaaaggagccatc

SEQ ID NO: 1070655 - DNA, 15 bp, Homo sapiens
actcaaaggagccat

SEQ ID NO: 1070656 - DNA, 15 bp, Homo sapiens
aactcaaaggagcca

SEQ ID NO: 1070657 - DNA, 15 bp, Homo sapiens
caactcaaaggagcc

SEQ ID NO: 1070658 - DNA, 15 bp, Homo sapiens
tcaactcaaaggagc

SEQ ID NO: 1070659 - DNA, 15 bp, Homo sapiens
atcaactcaaaggag

SEQ ID NO: 1070660 - DNA, 15 bp, Homo sapiens
tatcaactcaaagga

SEQ ID NO: 1070661 - DNA, 15 bp, Homo sapiens
ctatcaactcaaagg

SEQ ID NO: 1070662 - DNA, 15 bp, Homo sapiens
cctatcaactcaaag

SEQ ID NO: 1070663 - DNA, 15 bp, Homo sapiens
gcctatcaactcaaa

SEQ ID NO: 1070664 - DNA, 15 bp, Homo sapiens
tgcctatcaactcaa

SEQ ID NO: 1070665 - DNA, 15 bp, Homo sapiens
atgcctatcaactca

SEQ ID NO: 1070666 - DNA, 15 bp, Homo sapiens
aatgcctatcaactc

SEQ ID NO: 1070667 - DNA, 15 bp, Homo sapiens
gaatgcctatcaact

SEQ ID NO: 1070668 - DNA, 15 bp, Homo sapiens
tgaatgcctatcaac

SEQ ID NO: 1070669 - DNA, 15 bp, Homo sapiens
atgaatgcctatcaa

SEQ ID NO: 1070670 - DNA, 15 bp, Homo sapiens
catgaatgcctatca

SEQ ID NO: 1070671 - DNA, 15 bp, Homo sapiens
gcatgaatgcctatc

SEQ ID NO: 1070672 - DNA, 15 bp, Homo sapiens
tgcatgaatgcctat

SEQ ID NO: 1070673 - DNA, 15 bp, Homo sapiens
ctgcatgaatgccta

SEQ ID NO: 1070674 - DNA, 15 bp, Homo sapiens
cctgcatgaatgcct

SEQ ID NO: 1070675 - DNA, 15 bp, Homo sapiens
gcctgcatgaatgcc

SEQ ID NO: 1070676 - DNA, 15 bp, Homo sapiens
agcctgcatgaatgc

SEQ ID NO: 1070677 - DNA, 15 bp, Homo sapiens
aagcctgcatgaatg

SEQ ID NO: 1070678 - DNA, 15 bp, Homo sapiens
gaagcctgcatgaat

SEQ ID NO: 1070679 - DNA, 15 bp, Homo sapiens
ggaagcctgcatgaa

SEQ ID NO: 1070680 - DNA, 15 bp, Homo sapiens
aggaagcctgcatga

SEQ ID NO: 1070681 - DNA, 15 bp, Homo sapiens
caggaagcctgcatg

SEQ ID NO: 1070682 - DNA, 15 bp, Homo sapiens
ccaggaagcctgcat

SEQ ID NO: 1070683 - DNA, 15 bp, Homo sapiens
tccaggaagcctgca

SEQ ID NO: 1070684 - DNA, 15 bp, Homo sapiens
ttccaggaagcctgc

SEQ ID NO: 1070685 - DNA, 15 bp, Homo sapiens
attccaggaagcctg

SEQ ID NO: 1070686 - DNA, 15 bp, Homo sapiens
tattccaggaagcct

SEQ ID NO: 1070687 - DNA, 15 bp, Homo sapiens
gtattccaggaagcc

SEQ ID NO: 1070688 - DNA, 15 bp, Homo sapiens
agtattccaggaagc

SEQ ID NO: 1070689 - DNA, 15 bp, Homo sapiens
cagtattccaggaag

SEQ ID NO: 1070690 - DNA, 15 bp, Homo sapiens
ccagtattccaggaa

SEQ ID NO: 1070691 - DNA, 15 bp, Homo sapiens
cccagtattccagga

SEQ ID NO: 1070692 - DNA, 15 bp, Homo sapiens
tcccagtattccagg

SEQ ID NO: 1070693 - DNA, 15 bp, Homo sapiens
ttcccagtattccag

SEQ ID NO: 1070694 - DNA, 15 bp, Homo sapiens
attcccagtattcca

SEQ ID NO: 1070695 - DNA, 15 bp, Homo sapiens
aattcccagtattcc

SEQ ID NO: 1070696 - DNA, 15 bp, Homo sapiens
aaattcccagtattc

SEQ ID NO: 1070697 - DNA, 15 bp, Homo sapiens
taaattcccagtatt

SEQ ID NO: 1070698 - DNA, 15 bp, Homo sapiens
gtaaattcccagtat

SEQ ID NO: 1070699 - DNA, 15 bp, Homo sapiens
agtaaattcccagta

SEQ ID NO: 1070700 - DNA, 15 bp, Homo sapiens
cagtaaattcccagt

SEQ ID NO: 1070701 - DNA, 15 bp, Homo sapiens
acagtaaattcccag

SEQ ID NO: 1070702 - DNA, 15 bp, Homo sapiens
gacagtaaattccca

SEQ ID NO: 1070703 - DNA, 15 bp, Homo sapiens
tgacagtaaattccc

SEQ ID NO: 1070704 - DNA, 15 bp, Homo sapiens
ttgacagtaaattcc

SEQ ID NO: 1070705 - DNA, 15 bp, Homo sapiens
tttgacagtaaattc

SEQ ID NO: 1070706 - DNA, 15 bp, Homo sapiens
gtttgacagtaaatt

SEQ ID NO: 1070707 - DNA, 15 bp, Homo sapiens
tgtttgacagtaaat

SEQ ID NO: 1070708 - DNA, 15 bp, Homo sapiens
ctgtttgacagtaaa

SEQ ID NO: 1070709 - DNA, 15 bp, Homo sapiens
gctgtttgacagtaa

SEQ ID NO: 1070710 - DNA, 15 bp, Homo sapiens
ggctgtttgacagta

SEQ ID NO: 1070711 - DNA, 15 bp, Homo sapiens
tggctgtttgacagt

SEQ ID NO: 1070712 - DNA, 15 bp, Homo sapiens
atggctgtttgacag

SEQ ID NO: 1070713 - DNA, 15 bp, Homo sapiens
catggctgtttgaca

SEQ ID NO: 1070714 - DNA, 15 bp, Homo sapiens
ccatggctgtttgac

SEQ ID NO: 1070715 - DNA, 15 bp, Homo sapiens
gccatggctgtttga

SEQ ID NO: 1070716 - DNA, 15 bp, Homo sapiens
tgccatggctgtttg

SEQ ID NO: 1070717 - DNA, 15 bp, Homo sapiens
ttgccatggctgttt

SEQ ID NO: 1070718 - DNA, 15 bp, Homo sapiens
attgccatggctgtt

SEQ ID NO: 1070719 - DNA, 15 bp, Homo sapiens
cattgccatggctgt

SEQ ID NO: 1070720 - DNA, 15 bp, Homo sapiens
tcattgccatggctg

SEQ ID NO: 1070721 - DNA, 15 bp, Homo sapiens
ctcattgccatggct

SEQ ID NO: 1070722 - DNA, 15 bp, Homo sapiens
cctcattgccatggc

SEQ ID NO: 1070723 - DNA, 15 bp, Homo sapiens
ccctcattgccatgg

SEQ ID NO: 1070724 - DNA, 15 bp, Homo sapiens
tccctcattgccatg

SEQ ID NO: 1070725 - DNA, 15 bp, Homo sapiens
ctccctcattgccat

SEQ ID NO: 1070726 - DNA, 15 bp, Homo sapiens
tctccctcattgcca

SEQ ID NO: 1070727 - DNA, 15 bp, Homo sapiens
gtctccctcattgcc

SEQ ID NO: 1070728 - DNA, 15 bp, Homo sapiens
tgtctccctcattgc

SEQ ID NO: 1070729 - DNA, 15 bp, Homo sapiens
ctgtctccctcattg

SEQ ID NO: 1070730 - DNA, 15 bp, Homo sapiens
cctgtctccctcatt

SEQ ID NO: 1070731 - DNA, 15 bp, Homo sapiens
tcctgtctccctcat

SEQ ID NO: 1070732 - DNA, 15 bp, Homo sapiens
ttcctgtctccctca

SEQ ID NO: 1070733 - DNA, 15 bp, Homo sapiens
gttcctgtctccctc

SEQ ID NO: 1070734 - DNA, 15 bp, Homo sapiens
ggttcctgtctccct

SEQ ID NO: 1070735 - DNA, 15 bp, Homo sapiens
aggttcctgtctccc

SEQ ID NO: 1070736 - DNA, 15 bp, Homo sapiens
gaggttcctgtctcc

SEQ ID NO: 1070737 - DNA, 15 bp, Homo sapiens
tgaggttcctgtctc

SEQ ID NO: 1070738 - DNA, 15 bp, Homo sapiens
ctgaggttcctgtct

SEQ ID NO: 1070739 - DNA, 15 bp, Homo sapiens
cctgaggttcctgtc

SEQ ID NO: 1070740 - DNA, 15 bp, Homo sapiens
tcctgaggttcctgt

SEQ ID NO: 1070741 - DNA, 15 bp, Homo sapiens
ctcctgaggttcctg

SEQ ID NO: 1070742 - DNA, 15 bp, Homo sapiens
tctcctgaggttcct

SEQ ID NO: 1070743 - DNA, 15 bp, Homo sapiens
ttctcctgaggttcc

SEQ ID NO: 1070744 - DNA, 15 bp, Homo sapiens
gttctcctgaggttc

SEQ ID NO: 1070745 - DNA, 15 bp, Homo sapiens
tgttctcctgaggtt

SEQ ID NO: 1070746 - DNA, 15 bp, Homo sapiens
ctgttctcctgaggt

SEQ ID NO: 1070747 - DNA, 15 bp, Homo sapiens
cctgttctcctgagg

SEQ ID NO: 1070748 - DNA, 15 bp, Homo sapiens
tcctgttctcctgag

SEQ ID NO: 1070749 - DNA, 15 bp, Homo sapiens
ttcctgttctcctga

SEQ ID NO: 1070750 - DNA, 15 bp, Homo sapiens
gttcctgttctcctg

SEQ ID NO: 1070751 - DNA, 15 bp, Homo sapiens
agttcctgttctcct

SEQ ID NO: 1070752 - DNA, 15 bp, Homo sapiens
gagttcctgttctcc

SEQ ID NO: 1070753 - DNA, 15 bp, Homo sapiens
agagttcctgttctc

SEQ ID NO: 1070754 - DNA, 15 bp, Homo sapiens
aagagttcctgttct

SEQ ID NO: 1070755 - DNA, 15 bp, Homo sapiens
caagagttcctgttc

SEQ ID NO: 1070756 - DNA, 15 bp, Homo sapiens
ccaagagttcctgtt

SEQ ID NO: 1070757 - DNA, 15 bp, Homo sapiens
tccaagagttcctgt

SEQ ID NO: 1070758 - DNA, 15 bp, Homo sapiens
ctccaagagttcctg

SEQ ID NO: 1070759 - DNA, 15 bp, Homo sapiens
cctccaagagttcct

SEQ ID NO: 1070760 - DNA, 15 bp, Homo sapiens
ccctccaagagttcc

SEQ ID NO: 1070761 - DNA, 15 bp, Homo sapiens
tccctccaagagttc

SEQ ID NO: 1070762 - DNA, 15 bp, Homo sapiens
gtccctccaagagtt

SEQ ID NO: 1070763 - DNA, 15 bp, Homo sapiens
tgtccctccaagagt

SEQ ID NO: 1070764 - DNA, 15 bp, Homo sapiens
ctgtccctccaagag

SEQ ID NO: 1070765 - DNA, 15 bp, Homo sapiens
gctgtccctccaaga

SEQ ID NO: 1070766 - DNA, 15 bp, Homo sapiens
ggctgtccctccaag

SEQ ID NO: 1070767 - DNA, 15 bp, Homo sapiens
aggctgtccctccaa

SEQ ID NO: 1070768 - DNA, 15 bp, Homo sapiens
gaggctgtccctcca

SEQ ID NO: 1070769 - DNA, 15 bp, Homo sapiens
ggaggctgtccctcc

SEQ ID NO: 1070770 - DNA, 15 bp, Homo sapiens
aggaggctgtccctc

SEQ ID NO: 1070771 - DNA, 15 bp, Homo sapiens
caggaggctgtccct

SEQ ID NO: 1070772 - DNA, 15 bp, Homo sapiens
ccaggaggctgtccc

SEQ ID NO: 1070773 - DNA, 15 bp, Homo sapiens
gccaggaggctgtcc

SEQ ID NO: 1070774 - DNA, 15 bp, Homo sapiens
cgccaggaggctgtc

SEQ ID NO: 1070775 - DNA, 15 bp, Homo sapiens
gcgccaggaggctgt

SEQ ID NO: 1070776 - DNA, 15 bp, Homo sapiens
agcgccaggaggctg

SEQ ID NO: 1070777 - DNA, 15 bp, Homo sapiens
cagcgccaggaggct

SEQ ID NO: 1070778 - DNA, 15 bp, Homo sapiens
ccagcgccaggaggc

SEQ ID NO: 1070779 - DNA, 15 bp, Homo sapiens
tccagcgccaggagg

SEQ ID NO: 1070780 - DNA, 15 bp, Homo sapiens
ttccagcgccaggag

SEQ ID NO: 1070781 - DNA, 15 bp, Homo sapiens
gttccagcgccagga

SEQ ID NO: 1070782 - DNA, 15 bp, Homo sapiens
tgttccagcgccagg

SEQ ID NO: 1070783 - DNA, 15 bp, Homo sapiens
ttgttccagcgccag

SEQ ID NO: 1070784 - DNA, 15 bp, Homo sapiens
tttgttccagcgcca

SEQ ID NO: 1070785 - DNA, 15 bp, Homo sapiens
ttttgttccagcgcc

SEQ ID NO: 1070786 - DNA, 15 bp, Homo sapiens
tttttgttccagcgc

SEQ ID NO: 1070787 - DNA, 15 bp, Homo sapiens
ttttttgttccagcg

SEQ ID NO: 1070788 - DNA, 15 bp, Homo sapiens
cttttttgttccagc

SEQ ID NO: 1070789 - DNA, 15 bp, Homo sapiens
acttttttgttccag

SEQ ID NO: 1070790 - DNA, 15 bp, Homo sapiens
aacttttttgttcca

SEQ ID NO: 1070791 - DNA, 15 bp, Homo sapiens
taacttttttgttcc

SEQ ID NO: 1070792 - DNA, 15 bp, Homo sapiens
gtaacttttttgttc

SEQ ID NO: 1070793 - DNA, 15 bp, Homo sapiens
ggtaacttttttgtt

SEQ ID NO: 1070794 - DNA, 15 bp, Homo sapiens
tggtaacttttttgt

SEQ ID NO: 1070795 - DNA, 15 bp, Homo sapiens
ctggtaacttttttg

SEQ ID NO: 1070796 - DNA, 15 bp, Homo sapiens
actggtaactttttt

SEQ ID NO: 1070797 - DNA, 15 bp, Homo sapiens
cactggtaacttttt

SEQ ID NO: 1070798 - DNA, 15 bp, Homo sapiens
acactggtaactttt

SEQ ID NO: 1070799 - DNA, 15 bp, Homo sapiens
gacactggtaacttt

SEQ ID NO: 1070800 - DNA, 15 bp, Homo sapiens
ggacactggtaactt

SEQ ID NO: 1070801 - DNA, 15 bp, Homo sapiens
tggacactggtaact

SEQ ID NO: 1070802 - DNA, 15 bp, Homo sapiens
ttggacactggtaac

SEQ ID NO: 1070803 - DNA, 15 bp, Homo sapiens
tttggacactggtaa

SEQ ID NO: 1070804 - DNA, 15 bp, Homo sapiens
ctttggacactggta

SEQ ID NO: 1070805 - DNA, 15 bp, Homo sapiens
actttggacactggt

SEQ ID NO: 1070806 - DNA, 15 bp, Homo sapiens
cactttggacactgg

SEQ ID NO: 1070807 - DNA, 15 bp, Homo sapiens
ccactttggacactg

SEQ ID NO: 1070808 - DNA, 15 bp, Homo sapiens
gccactttggacact

SEQ ID NO: 1070809 - DNA, 15 bp, Homo sapiens
tgccactttggacac

SEQ ID NO: 1070810 - DNA, 15 bp, Homo sapiens
ctgccactttggaca

SEQ ID NO: 1070811 - DNA, 15 bp, Homo sapiens
cctgccactttggac

SEQ ID NO: 1070812 - DNA, 15 bp, Homo sapiens
acctgccactttgga

SEQ ID NO: 1070813 - DNA, 15 bp, Homo sapiens
cacctgccactttgg

SEQ ID NO: 1070814 - DNA, 15 bp, Homo sapiens
acacctgccactttg

SEQ ID NO: 1070815 - DNA, 15 bp, Homo sapiens
aacacctgccacttt

SEQ ID NO: 1070816 - DNA, 15 bp, Homo sapiens
gaacacctgccactt

SEQ ID NO: 1070817 - DNA, 15 bp, Homo sapiens
ggaacacctgccact

SEQ ID NO: 1070818 - DNA, 15 bp, Homo sapiens
aggaacacctgccac

SEQ ID NO: 1070819 - DNA, 15 bp, Homo sapiens
caggaacacctgcca

SEQ ID NO: 1070820 - DNA, 15 bp, Homo sapiens
ccaggaacacctgcc

SEQ ID NO: 1070821 - DNA, 15 bp, Homo sapiens
cccaggaacacctgc

SEQ ID NO: 1070822 - DNA, 15 bp, Homo sapiens
acccaggaacacctg

SEQ ID NO: 1070823 - DNA, 15 bp, Homo sapiens
aacccaggaacacct

SEQ ID NO: 1070824 - DNA, 15 bp, Homo sapiens
gaacccaggaacacc

SEQ ID NO: 1070825 - DNA, 15 bp, Homo sapiens
ggaacccaggaacac

SEQ ID NO: 1070826 - DNA, 15 bp, Homo sapiens
gggaacccaggaaca

SEQ ID NO: 1070827 - DNA, 15 bp, Homo sapiens
tgggaacccaggaac

SEQ ID NO: 1070828 - DNA, 15 bp, Homo sapiens
atgggaacccaggaa

SEQ ID NO: 1070829 - DNA, 15 bp, Homo sapiens
catgggaacccagga

SEQ ID NO: 1070830 - DNA, 15 bp, Homo sapiens
tcatgggaacccagg

SEQ ID NO: 1070831 - DNA, 15 bp, Homo sapiens
gtcatgggaacccag

SEQ ID NO: 1070832 - DNA, 15 bp, Homo sapiens
agtcatgggaaccca

SEQ ID NO: 1070833 - DNA, 15 bp, Homo sapiens
tagtcatgggaaccc

SEQ ID NO: 1070834 - DNA, 15 bp, Homo sapiens
ttagtcatgggaacc

SEQ ID NO: 1070835 - DNA, 15 bp, Homo sapiens
cttagtcatgggaac

SEQ ID NO: 1070836 - DNA, 15 bp, Homo sapiens
ccttagtcatgggaa

SEQ ID NO: 1070837 - DNA, 15 bp, Homo sapiens
accttagtcatggga

SEQ ID NO: 1070838 - DNA, 15 bp, Homo sapiens
gaccttagtcatggg

SEQ ID NO: 1070839 - DNA, 15 bp, Homo sapiens
ggaccttagtcatgg

SEQ ID NO: 1070840 - DNA, 15 bp, Homo sapiens
gggaccttagtcatg

SEQ ID NO: 1070841 - DNA, 15 bp, Homo sapiens
agggaccttagtcat

SEQ ID NO: 1070842 - DNA, 15 bp, Homo sapiens
aagggaccttagtca

SEQ ID NO: 1070843 - DNA, 15 bp, Homo sapiens
gaagggaccttagtc

SEQ ID NO: 1070844 - DNA, 15 bp, Homo sapiens
agaagggaccttagt

SEQ ID NO: 1070845 - DNA, 15 bp, Homo sapiens
gagaagggaccttag

SEQ ID NO: 1070846 - DNA, 15 bp, Homo sapiens
tgagaagggacctta

SEQ ID NO: 1070847 - DNA, 15 bp, Homo sapiens
gtgagaagggacctt

SEQ ID NO: 1070848 - DNA, 15 bp, Homo sapiens
tgtgagaagggacct

SEQ ID NO: 1070849 - DNA, 15 bp, Homo sapiens
ctgtgagaagggacc

SEQ ID NO: 1070850 - DNA, 15 bp, Homo sapiens
gctgtgagaagggac

SEQ ID NO: 1070851 - DNA, 15 bp, Homo sapiens
agctgtgagaaggga

SEQ ID NO: 1070852 - DNA, 15 bp, Homo sapiens
aagctgtgagaaggg

SEQ ID NO: 1070853 - DNA, 15 bp, Homo sapiens
caagctgtgagaagg

SEQ ID NO: 1070854 - DNA, 15 bp, Homo sapiens
gcaagctgtgagaag

SEQ ID NO: 1070855 - DNA, 15 bp, Homo sapiens
ggcaagctgtgagaa

SEQ ID NO: 1070856 - DNA, 15 bp, Homo sapiens
tggcaagctgtgaga

SEQ ID NO: 1070857 - DNA, 15 bp, Homo sapiens
gtggcaagctgtgag

SEQ ID NO: 1070858 - DNA, 15 bp, Homo sapiens
agtggcaagctgtga

SEQ ID NO: 1070859 - DNA, 15 bp, Homo sapiens
cagtggcaagctgtg

SEQ ID NO: 1070860 - DNA, 15 bp, Homo sapiens
ccagtggcaagctgt

SEQ ID NO: 1070861 - DNA, 15 bp, Homo sapiens
accagtggcaagctg

SEQ ID NO: 1070862 - DNA, 15 bp, Homo sapiens
caccagtggcaagct

SEQ ID NO: 1070863 - DNA, 15 bp, Homo sapiens
ccaccagtggcaagc

SEQ ID NO: 1070864 - DNA, 15 bp, Homo sapiens
accaccagtggcaag

SEQ ID NO: 1070865 - DNA, 15 bp, Homo sapiens
aaccaccagtggcaa

SEQ ID NO: 1070866 - DNA, 15 bp, Homo sapiens
gaaccaccagtggca

SEQ ID NO: 1070867 - DNA, 15 bp, Homo sapiens
tgaaccaccagtggc

SEQ ID NO: 1070868 - DNA, 15 bp, Homo sapiens
atgaaccaccagtgg

SEQ ID NO: 1070869 - DNA, 15 bp, Homo sapiens
gatgaaccaccagtg

SEQ ID NO: 1070870 - DNA, 15 bp, Homo sapiens
agatgaaccaccagt

SEQ ID NO: 1070871 - DNA, 15 bp, Homo sapiens
gagatgaaccaccag

SEQ ID NO: 1070872 - DNA, 15 bp, Homo sapiens
tgagatgaaccacca

SEQ ID NO: 1070873 - DNA, 15 bp, Homo sapiens
gtgagatgaaccacc

SEQ ID NO: 1070874 - DNA, 15 bp, Homo sapiens
agtgagatgaaccac

SEQ ID NO: 1070875 - DNA, 15 bp, Homo sapiens
tagtgagatgaacca

SEQ ID NO: 1070876 - DNA, 15 bp, Homo sapiens
atagtgagatgaacc

SEQ ID NO: 1070877 - DNA, 15 bp, Homo sapiens
gatagtgagatgaac

SEQ ID NO: 1070878 - DNA, 15 bp, Homo sapiens
tgatagtgagatgaa

SEQ ID NO: 1070879 - DNA, 15 bp, Homo sapiens
atgatagtgagatga

SEQ ID NO: 1070880 - DNA, 15 bp, Homo sapiens
gatgatagtgagatg

SEQ ID NO: 1070881 - DNA, 15 bp, Homo sapiens
agatgatagtgagat

SEQ ID NO: 1070882 - DNA, 15 bp, Homo sapiens
aagatgatagtgaga

SEQ ID NO: 1070883 - DNA, 15 bp, Homo sapiens
caagatgatagtgag

SEQ ID NO: 1070884 - DNA, 15 bp, Homo sapiens
gcaagatgatagtga

SEQ ID NO: 1070885 - DNA, 15 bp, Homo sapiens
ggcaagatgatagtg

SEQ ID NO: 1070886 - DNA, 15 bp, Homo sapiens
aggcaagatgatagt

SEQ ID NO: 1070887 - DNA, 15 bp, Homo sapiens
gaggcaagatgatag

SEQ ID NO: 1070888 - DNA, 15 bp, Homo sapiens
tgaggcaagatgata

SEQ ID NO: 1070889 - DNA, 15 bp, Homo sapiens
ttgaggcaagatgat

SEQ ID NO: 1070890 - DNA, 15 bp, Homo sapiens
attgaggcaagatga

SEQ ID NO: 1070891 - DNA, 15 bp, Homo sapiens
gattgaggcaagatg

SEQ ID NO: 1070892 - DNA, 15 bp, Homo sapiens
agattgaggcaagat

SEQ ID NO: 1070893 - DNA, 15 bp, Homo sapiens
gagattgaggcaaga

SEQ ID NO: 1070894 - DNA, 15 bp, Homo sapiens
agagattgaggcaag

SEQ ID NO: 1070895 - DNA, 15 bp, Homo sapiens
gagagattgaggcaa

SEQ ID NO: 1070896 - DNA, 15 bp, Homo sapiens
ggagagattgaggca

SEQ ID NO: 1070897 - DNA, 15 bp, Homo sapiens
cggagagattgaggc

SEQ ID NO: 1070898 - DNA, 15 bp, Homo sapiens
acggagagattgagg

SEQ ID NO: 1070899 - DNA, 15 bp, Homo sapiens
tacggagagattgag

SEQ ID NO: 1070900 - DNA, 15 bp, Homo sapiens
atacggagagattga

SEQ ID NO: 1070901 - DNA, 15 bp, Homo sapiens
aatacggagagattg

SEQ ID NO: 1070902 - DNA, 15 bp, Homo sapiens
aaatacggagagatt

SEQ ID NO: 1070903 - DNA, 15 bp, Homo sapiens
gaaatacggagagat

SEQ ID NO: 1070904 - DNA, 15 bp, Homo sapiens
ggaaatacggagaga

SEQ ID NO: 1070905 - DNA, 15 bp, Homo sapiens
gggaaatacggagag

SEQ ID NO: 1070906 - DNA, 15 bp, Homo sapiens
tgggaaatacggaga

SEQ ID NO: 1070907 - DNA, 15 bp, Homo sapiens
ctgggaaatacggag

SEQ ID NO: 1070908 - DNA, 15 bp, Homo sapiens
actgggaaatacgga

SEQ ID NO: 1070909 - DNA, 15 bp, Homo sapiens
aactgggaaatacgg

SEQ ID NO: 1070910 - DNA, 15 bp, Homo sapiens
taactgggaaatacg

SEQ ID NO: 1070911 - DNA, 15 bp, Homo sapiens
ttaactgggaaatac

SEQ ID NO: 1070912 - DNA, 15 bp, Homo sapiens
tttaactgggaaata

SEQ ID NO: 1070913 - DNA, 15 bp, Homo sapiens
ttttaactgggaaat

SEQ ID NO: 1070914 - DNA, 15 bp, Homo sapiens
attttaactgggaaa

SEQ ID NO: 1070915 - DNA, 15 bp, Homo sapiens
cattttaactgggaa

SEQ ID NO: 1070916 - DNA, 15 bp, Homo sapiens
acattttaactggga

SEQ ID NO: 1070917 - DNA, 15 bp, Homo sapiens
aacattttaactggg

SEQ ID NO: 1070918 - DNA, 15 bp, Homo sapiens
aaacattttaactgg

SEQ ID NO: 1070919 - DNA, 15 bp, Homo sapiens
caaacattttaactg

SEQ ID NO: 1070920 - DNA, 15 bp, Homo sapiens
tcaaacattttaact

SEQ ID NO: 1070921 - DNA, 15 bp, Homo sapiens
ctcaaacattttaac

SEQ ID NO: 1070922 - DNA, 15 bp, Homo sapiens
gctcaaacattttaa

SEQ ID NO: 1070923 - DNA, 15 bp, Homo sapiens
cgctcaaacatttta

SEQ ID NO: 1070924 - DNA, 15 bp, Homo sapiens
ccgctcaaacatttt

SEQ ID NO: 1070925 - DNA, 15 bp, Homo sapiens
cccgctcaaacattt

SEQ ID NO: 1070926 - DNA, 15 bp, Homo sapiens
tcccgctcaaacatt

SEQ ID NO: 1070927 - DNA, 15 bp, Homo sapiens
ttcccgctcaaacat

SEQ ID NO: 1070928 - DNA, 15 bp, Homo sapiens
cttcccgctcaaaca

SEQ ID NO: 1070929 - DNA, 15 bp, Homo sapiens
tcttcccgctcaaac

SEQ ID NO: 1070930 - DNA, 15 bp, Homo sapiens
atcttcccgctcaaa

SEQ ID NO: 1070931 - DNA, 15 bp, Homo sapiens
gatcttcccgctcaa

SEQ ID NO: 1070932 - DNA, 15 bp, Homo sapiens
agatcttcccgctca

SEQ ID NO: 1070933 - DNA, 15 bp, Homo sapiens
cagatcttcccgctc

SEQ ID NO: 1070934 - DNA, 15 bp, Homo sapiens
ccagatcttcccgct

SEQ ID NO: 1070935 - DNA, 15 bp, Homo sapiens
accagatcttcccgc

SEQ ID NO: 1070936 - DNA, 15 bp, Homo sapiens
aaccagatcttcccg

SEQ ID NO: 1070937 - DNA, 15 bp, Homo sapiens
aaaccagatcttccc

SEQ ID NO: 1070938 - DNA, 15 bp, Homo sapiens
caaaccagatcttcc

SEQ ID NO: 1070939 - DNA, 15 bp, Homo sapiens
gcaaaccagatcttc

SEQ ID NO: 1070940 - DNA, 15 bp, Homo sapiens
ggcaaaccagatctt

SEQ ID NO: 1070941 - DNA, 15 bp, Homo sapiens
aggcaaaccagatct

SEQ ID NO: 1070942 - DNA, 15 bp, Homo sapiens
taggcaaaccagatc

SEQ ID NO: 1070943 - DNA, 15 bp, Homo sapiens
ctaggcaaaccagat

SEQ ID NO: 1070944 - DNA, 15 bp, Homo sapiens
tctaggcaaaccaga

SEQ ID NO: 1070945 - DNA, 15 bp, Homo sapiens
ctctaggcaaaccag

SEQ ID NO: 1070946 - DNA, 15 bp, Homo sapiens
tctctaggcaaacca

SEQ ID NO: 1070947 - DNA, 15 bp, Homo sapiens
ctctctaggcaaacc

SEQ ID NO: 1070948 - DNA, 15 bp, Homo sapiens
actctctaggcaaac

SEQ ID NO: 1070949 - DNA, 15 bp, Homo sapiens
aactctctaggcaaa

SEQ ID NO: 1070950 - DNA, 15 bp, Homo sapiens
taactctctaggcaa

SEQ ID NO: 1070951 - DNA, 15 bp, Homo sapiens
gtaactctctaggca

SEQ ID NO: 1070952 - DNA, 15 bp, Homo sapiens
agtaactctctaggc

SEQ ID NO: 1070953 - DNA, 15 bp, Homo sapiens
cagtaactctctagg

SEQ ID NO: 1070954 - DNA, 15 bp, Homo sapiens
gcagtaactctctag

SEQ ID NO: 1070955 - DNA, 15 bp, Homo sapiens
ggcagtaactctcta

SEQ ID NO: 1070956 - DNA, 15 bp, Homo sapiens
tggcagtaactctct

SEQ ID NO: 1070957 - DNA, 15 bp, Homo sapiens
ctggcagtaactctc

SEQ ID NO: 1070958 - DNA, 15 bp, Homo sapiens
actggcagtaactct

SEQ ID NO: 1070959 - DNA, 15 bp, Homo sapiens
cactggcagtaactc

SEQ ID NO: 1070960 - DNA, 15 bp, Homo sapiens
tcactggcagtaact

SEQ ID NO: 1070961 - DNA, 15 bp, Homo sapiens
ctcactggcagtaac

SEQ ID NO: 1070962 - DNA, 15 bp, Homo sapiens
cctcactggcagtaa

SEQ ID NO: 1070963 - DNA, 15 bp, Homo sapiens
acctcactggcagta

SEQ ID NO: 1070964 - DNA, 15 bp, Homo sapiens
tacctcactggcagt

SEQ ID NO: 1070965 - DNA, 15 bp, Homo sapiens
gtacctcactggcag

SEQ ID NO: 1070966 - DNA, 15 bp, Homo sapiens
ggtacctcactggca

SEQ ID NO: 1070967 - DNA, 15 bp, Homo sapiens
gggtacctcactggc

SEQ ID NO: 1070968 - DNA, 15 bp, Homo sapiens
agggtacctcactgg

SEQ ID NO: 1070969 - DNA, 15 bp, Homo sapiens
tagggtacctcactg

SEQ ID NO: 1070970 - DNA, 15 bp, Homo sapiens
ttagggtacctcact

SEQ ID NO: 1070971 - DNA, 15 bp, Homo sapiens
attagggtacctcac

SEQ ID NO: 1070972 - DNA, 15 bp, Homo sapiens
cattagggtacctca

SEQ ID NO: 1070973 - DNA, 15 bp, Homo sapiens
ccattagggtacctc

SEQ ID NO: 1070974 - DNA, 15 bp, Homo sapiens
cccattagggtacct

SEQ ID NO: 1070975 - DNA, 15 bp, Homo sapiens
gcccattagggtacc

SEQ ID NO: 1070976 - DNA, 15 bp, Homo sapiens
ggcccattagggtac

SEQ ID NO: 1070977 - DNA, 15 bp, Homo sapiens
tggcccattagggta

SEQ ID NO: 1070978 - DNA, 15 bp, Homo sapiens
ctggcccattagggt

SEQ ID NO: 1070979 - DNA, 15 bp, Homo sapiens
gctggcccattaggg

SEQ ID NO: 1070980 - DNA, 15 bp, Homo sapiens
ggctggcccattagg

SEQ ID NO: 1070981 - DNA, 15 bp, Homo sapiens
aggctggcccattag

SEQ ID NO: 1070982 - DNA, 15 bp, Homo sapiens
taggctggcccatta

SEQ ID NO: 1070983 - DNA, 15 bp, Homo sapiens
ctaggctggcccatt

SEQ ID NO: 1070984 - DNA, 15 bp, Homo sapiens
cctaggctggcccat

SEQ ID NO: 1070985 - DNA, 15 bp, Homo sapiens
gcctaggctggccca

SEQ ID NO: 1070986 - DNA, 15 bp, Homo sapiens
ggcctaggctggccc

SEQ ID NO: 1070987 - DNA, 15 bp, Homo sapiens
tggcctaggctggcc

SEQ ID NO: 1070988 - DNA, 15 bp, Homo sapiens
gtggcctaggctggc

SEQ ID NO: 1070989 - DNA, 15 bp, Homo sapiens
ggtggcctaggctgg

SEQ ID NO: 1070990 - DNA, 15 bp, Homo sapiens
gggtggcctaggctg

SEQ ID NO: 1070991 - DNA, 15 bp, Homo sapiens
ggggtggcctaggct

SEQ ID NO: 1070992 - DNA, 15 bp, Homo sapiens
aggggtggcctaggc

SEQ ID NO: 1070993 - DNA, 15 bp, Homo sapiens
taggggtggcctagg

SEQ ID NO: 1070994 - DNA, 15 bp, Homo sapiens
ataggggtggcctag

SEQ ID NO: 1070995 - DNA, 15 bp, Homo sapiens
cataggggtggccta

SEQ ID NO: 1070996 - DNA, 15 bp, Homo sapiens
ccataggggtggcct

SEQ ID NO: 1070997 - DNA, 15 bp, Homo sapiens
gccataggggtggcc

SEQ ID NO: 1070998 - DNA, 15 bp, Homo sapiens
ggccataggggtggc

SEQ ID NO: 1070999 - DNA, 15 bp, Homo sapiens
tggccataggggtgg

SEQ ID NO: 1071000 - DNA, 15 bp, Homo sapiens
ttggccataggggtg

SEQ ID NO: 1071001 - DNA, 15 bp, Homo sapiens
tttggccataggggt

SEQ ID NO: 1071002 - DNA, 15 bp, Homo sapiens
ttttggccatagggg

SEQ ID NO: 1071003 - DNA, 15 bp, Homo sapiens
attttggccataggg

SEQ ID NO: 1071004 - DNA, 15 bp, Homo sapiens
gattttggccatagg

SEQ ID NO: 1071005 - DNA, 15 bp, Homo sapiens
tgattttggccatag

SEQ ID NO: 1071006 - DNA, 15 bp, Homo sapiens
ctgattttggccata

SEQ ID NO: 1071007 - DNA, 15 bp, Homo sapiens
cctgattttggccat

SEQ ID NO: 1071008 - DNA, 15 bp, Homo sapiens
tcctgattttggcca

SEQ ID NO: 1071009 - DNA, 15 bp, Homo sapiens
gtcctgattttggcc

SEQ ID NO: 1071010 - DNA, 15 bp, Homo sapiens
tgtcctgattttggc

SEQ ID NO: 1071011 - DNA, 15 bp, Homo sapiens
ctgtcctgattttgg

SEQ ID NO: 1071012 - DNA, 15 bp, Homo sapiens
gctgtcctgattttg

SEQ ID NO: 1071013 - DNA, 15 bp, Homo sapiens
tgctgtcctgatttt

SEQ ID NO: 1071014 - DNA, 15 bp, Homo sapiens
gtgctgtcctgattt

SEQ ID NO: 1071015 - DNA, 15 bp, Homo sapiens
ggtgctgtcctgatt

SEQ ID NO: 1071016 - DNA, 15 bp, Homo sapiens
cggtgctgtcctgat

SEQ ID NO: 1071017 - DNA, 15 bp, Homo sapiens
tcggtgctgtcctga

SEQ ID NO: 1071018 - DNA, 15 bp, Homo sapiens
ctcggtgctgtcctg

SEQ ID NO: 1071019 - DNA, 15 bp, Homo sapiens
actcggtgctgtcct

SEQ ID NO: 1071020 - DNA, 15 bp, Homo sapiens
cactcggtgctgtcc

SEQ ID NO: 1071021 - DNA, 15 bp, Homo sapiens
tcactcggtgctgtc

SEQ ID NO: 1071022 - DNA, 15 bp, Homo sapiens
ctcactcggtgctgt

SEQ ID NO: 1071023 - DNA, 15 bp, Homo sapiens
tctcactcggtgctg

SEQ ID NO: 1071024 - DNA, 15 bp, Homo sapiens
ctctcactcggtgct

SEQ ID NO: 1071025 - DNA, 15 bp, Homo sapiens
cctctcactcggtgc

SEQ ID NO: 1071026 - DNA, 15 bp, Homo sapiens
gcctctcactcggtg

SEQ ID NO: 1071027 - DNA, 15 bp, Homo sapiens
ggcctctcactcggt

SEQ ID NO: 1071028 - DNA, 15 bp, Homo sapiens
tggcctctcactcgg

SEQ ID NO: 1071029 - DNA, 15 bp, Homo sapiens
gtggcctctcactcg

SEQ ID NO: 1071030 - DNA, 15 bp, Homo sapiens
ggtggcctctcactc

SEQ ID NO: 1071031 - DNA, 15 bp, Homo sapiens
aggtggcctctcact

SEQ ID NO: 1071032 - DNA, 15 bp, Homo sapiens
taggtggcctctcac

SEQ ID NO: 1071033 - DNA, 15 bp, Homo sapiens
ctaggtggcctctca

SEQ ID NO: 1071034 - DNA, 15 bp, Homo sapiens
cctaggtggcctctc

SEQ ID NO: 1071035 - DNA, 15 bp, Homo sapiens
tcctaggtggcctct

SEQ ID NO: 1071036 - DNA, 15 bp, Homo sapiens
gtcctaggtggcctc

SEQ ID NO: 1071037 - DNA, 15 bp, Homo sapiens
tgtcctaggtggcct

SEQ ID NO: 1071038 - DNA, 15 bp, Homo sapiens
ctgtcctaggtggcc

SEQ ID NO: 1071039 - DNA, 15 bp, Homo sapiens
gctgtcctaggtggc

SEQ ID NO: 1071040 - DNA, 15 bp, Homo sapiens
tgctgtcctaggtgg

SEQ ID NO: 1071041 - DNA, 15 bp, Homo sapiens
atgctgtcctaggtg

SEQ ID NO: 1071042 - DNA, 15 bp, Homo sapiens
gatgctgtcctaggt

SEQ ID NO: 1071043 - DNA, 15 bp, Homo sapiens
agatgctgtcctagg

SEQ ID NO: 1071044 - DNA, 15 bp, Homo sapiens
gagatgctgtcctag

SEQ ID NO: 1071045 - DNA, 15 bp, Homo sapiens
ggagatgctgtccta

SEQ ID NO: 1071046 - DNA, 15 bp, Homo sapiens
gggagatgctgtcct

SEQ ID NO: 1071047 - DNA, 15 bp, Homo sapiens
ggggagatgctgtcc

SEQ ID NO: 1071048 - DNA, 15 bp, Homo sapiens
tggggagatgctgtc

SEQ ID NO: 1071049 - DNA, 15 bp, Homo sapiens
ctggggagatgctgt

SEQ ID NO: 1071050 - DNA, 15 bp, Homo sapiens
tctggggagatgctg

SEQ ID NO: 1071051 - DNA, 15 bp, Homo sapiens
ctctggggagatgct

SEQ ID NO: 1071052 - DNA, 15 bp, Homo sapiens
actctggggagatgc

SEQ ID NO: 1071053 - DNA, 15 bp, Homo sapiens
cactctggggagatg

SEQ ID NO: 1071054 - DNA, 15 bp, Homo sapiens
ccactctggggagat

SEQ ID NO: 1071055 - DNA, 15 bp, Homo sapiens
gccactctggggaga

SEQ ID NO: 1071056 - DNA, 15 bp, Homo sapiens
ggccactctggggag

SEQ ID NO: 1071057 - DNA, 15 bp, Homo sapiens
gggccactctgggga

SEQ ID NO: 1071058 - DNA, 15 bp, Homo sapiens
ggggccactctgggg

SEQ ID NO: 1071059 - DNA, 15 bp, Homo sapiens
tggggccactctggg

SEQ ID NO: 1071060 - DNA, 15 bp, Homo sapiens
gtggggccactctgg

SEQ ID NO: 1071061 - DNA, 15 bp, Homo sapiens
agtggggccactctg

SEQ ID NO: 1071062 - DNA, 15 bp, Homo sapiens
cagtggggccactct

SEQ ID NO: 1071063 - DNA, 15 bp, Homo sapiens
acagtggggccactc

SEQ ID NO: 1071064 - DNA, 15 bp, Homo sapiens
gacagtggggccact

SEQ ID NO: 1071065 - DNA, 15 bp, Homo sapiens
ggacagtggggccac

SEQ ID NO: 1071066 - DNA, 15 bp, Homo sapiens
tggacagtggggcca

SEQ ID NO: 1071067 - DNA, 15 bp, Homo sapiens
ctggacagtggggcc

SEQ ID NO: 1071068 - DNA, 15 bp, Homo sapiens
cctggacagtggggc

SEQ ID NO: 1071069 - DNA, 15 bp, Homo sapiens
tcctggacagtgggg

SEQ ID NO: 1071070 - DNA, 15 bp, Homo sapiens
gtcctggacagtggg

SEQ ID NO: 1071071 - DNA, 15 bp, Homo sapiens
agtcctggacagtgg

SEQ ID NO: 1071072 - DNA, 15 bp, Homo sapiens
aagtcctggacagtg

SEQ ID NO: 1071073 - DNA, 15 bp, Homo sapiens
taagtcctggacagt

SEQ ID NO: 1071074 - DNA, 15 bp, Homo sapiens
gtaagtcctggacag

SEQ ID NO: 1071075 - DNA, 15 bp, Homo sapiens
tgtaagtcctggaca

SEQ ID NO: 1071076 - DNA, 15 bp, Homo sapiens
ctgtaagtcctggac

SEQ ID NO: 1071077 - DNA, 15 bp, Homo sapiens
cctgtaagtcctgga

SEQ ID NO: 1071078 - DNA, 15 bp, Homo sapiens
acctgtaagtcctgg

SEQ ID NO: 1071079 - DNA, 15 bp, Homo sapiens
tacctgtaagtcctg

SEQ ID NO: 1071080 - DNA, 15 bp, Homo sapiens
atacctgtaagtcct

SEQ ID NO: 1071081 - DNA, 15 bp, Homo sapiens
gatacctgtaagtcc

SEQ ID NO: 1071082 - DNA, 15 bp, Homo sapiens
ggatacctgtaagtc

SEQ ID NO: 1071083 - DNA, 15 bp, Homo sapiens
tggatacctgtaagt

SEQ ID NO: 1071084 - DNA, 15 bp, Homo sapiens
atggatacctgtaag

SEQ ID NO: 1071085 - DNA, 15 bp, Homo sapiens
catggatacctgtaa

SEQ ID NO: 1071086 - DNA, 15 bp, Homo sapiens
gcatggatacctgta

SEQ ID NO: 1071087 - DNA, 15 bp, Homo sapiens
agcatggatacctgt

SEQ ID NO: 1071088 - DNA, 15 bp, Homo sapiens
aagcatggatacctg

SEQ ID NO: 1071089 - DNA, 15 bp, Homo sapiens
gaagcatggatacct

SEQ ID NO: 1071090 - DNA, 15 bp, Homo sapiens
tgaagcatggatacc

SEQ ID NO: 1071091 - DNA, 15 bp, Homo sapiens
gtgaagcatggatac

SEQ ID NO: 1071092 - DNA, 15 bp, Homo sapiens
ggtgaagcatggata

SEQ ID NO: 1071093 - DNA, 15 bp, Homo sapiens
gggtgaagcatggat

SEQ ID NO: 1071094 - DNA, 15 bp, Homo sapiens
tgggtgaagcatgga

SEQ ID NO: 1071095 - DNA, 15 bp, Homo sapiens
ctgggtgaagcatgg

SEQ ID NO: 1071096 - DNA, 15 bp, Homo sapiens
tctgggtgaagcatg

SEQ ID NO: 1071097 - DNA, 15 bp, Homo sapiens
ttctgggtgaagcat

SEQ ID NO: 1071098 - DNA, 15 bp, Homo sapiens
tttctgggtgaagca

SEQ ID NO: 1071099 - DNA, 15 bp, Homo sapiens
atttctgggtgaagc

SEQ ID NO: 1071100 - DNA, 15 bp, Homo sapiens
gatttctgggtgaag

SEQ ID NO: 1071101 - DNA, 15 bp, Homo sapiens
agatttctgggtgaa

SEQ ID NO: 1071102 - DNA, 15 bp, Homo sapiens
aagatttctgggtga

SEQ ID NO: 1071103 - DNA, 15 bp, Homo sapiens
taagatttctgggtg

SEQ ID NO: 1071104 - DNA, 15 bp, Homo sapiens
ataagatttctgggt

SEQ ID NO: 1071105 - DNA, 15 bp, Homo sapiens
cataagatttctggg

SEQ ID NO: 1071106 - DNA, 15 bp, Homo sapiens
acataagatttctgg

SEQ ID NO: 1071107 - DNA, 15 bp, Homo sapiens
aacataagatttctg

SEQ ID NO: 1071108 - DNA, 15 bp, Homo sapiens
taacataagatttct

SEQ ID NO: 1071109 - DNA, 15 bp, Homo sapiens
ataacataagatttc

SEQ ID NO: 1071110 - DNA, 15 bp, Homo sapiens
cataacataagattt

SEQ ID NO: 1071111 - DNA, 15 bp, Homo sapiens
ccataacataagatt

SEQ ID NO: 1071112 - DNA, 15 bp, Homo sapiens
tccataacataagat

SEQ ID NO: 1071113 - DNA, 15 bp, Homo sapiens
ttccataacataaga

SEQ ID NO: 1071114 - DNA, 15 bp, Homo sapiens
tttccataacataag

SEQ ID NO: 1071115 - DNA, 15 bp, Homo sapiens
ctttccataacataa

SEQ ID NO: 1071116 - DNA, 15 bp, Homo sapiens
actttccataacata

SEQ ID NO: 1071117 - DNA, 15 bp, Homo sapiens
gactttccataacat

SEQ ID NO: 1071118 - DNA, 15 bp, Homo sapiens
tgactttccataaca

SEQ ID NO: 1071119 - DNA, 15 bp, Homo sapiens
ctgactttccataac

SEQ ID NO: 1071120 - DNA, 15 bp, Homo sapiens
gctgactttccataa

SEQ ID NO: 1071121 - DNA, 15 bp, Homo sapiens
ggctgactttccata

SEQ ID NO: 1071122 - DNA, 15 bp, Homo sapiens
tggctgactttccat

SEQ ID NO: 1071123 - DNA, 15 bp, Homo sapiens
ttggctgactttcca

SEQ ID NO: 1071124 - DNA, 15 bp, Homo sapiens
attggctgactttcc

SEQ ID NO: 1071125 - DNA, 15 bp, Homo sapiens
cattggctgactttc

SEQ ID NO: 1071126 - DNA, 15 bp, Homo sapiens
acattggctgacttt

SEQ ID NO: 1071127 - DNA, 15 bp, Homo sapiens
gacattggctgactt

SEQ ID NO: 1071128 - DNA, 15 bp, Homo sapiens
tgacattggctgact

SEQ ID NO: 1071129 - DNA, 15 bp, Homo sapiens
atgacattggctgac

SEQ ID NO: 1071130 - DNA, 15 bp, Homo sapiens
gatgacattggctga

SEQ ID NO: 1071131 - DNA, 15 bp, Homo sapiens
agatgacattggctg

SEQ ID NO: 1071132 - DNA, 15 bp, Homo sapiens
aagatgacattggct

SEQ ID NO: 1071133 - DNA, 15 bp, Homo sapiens
taagatgacattggc

SEQ ID NO: 1071134 - DNA, 15 bp, Homo sapiens
ctaagatgacattgg

SEQ ID NO: 1071135 - DNA, 15 bp, Homo sapiens
tctaagatgacattg

SEQ ID NO: 1071136 - DNA, 15 bp, Homo sapiens
ctctaagatgacatt

SEQ ID NO: 1071137 - DNA, 15 bp, Homo sapiens
tctctaagatgacat

SEQ ID NO: 1071138 - DNA, 15 bp, Homo sapiens
ttctctaagatgaca

SEQ ID NO: 1071139 - DNA, 15 bp, Homo sapiens
cttctctaagatgac

SEQ ID NO: 1071140 - DNA, 15 bp, Homo sapiens
tccttctctaagatg

SEQ ID NO: 1071141 - DNA, 15 bp, Homo sapiens
atccttctctaagat

SEQ ID NO: 1071142 - DNA, 15 bp, Homo sapiens
catccttctctaaga

SEQ ID NO: 1071143 - DNA, 15 bp, Homo sapiens
gcatccttctctaag

SEQ ID NO: 1071144 - DNA, 15 bp, Homo sapiens
agcatccttctctaa

SEQ ID NO: 1071145 - DNA, 15 bp, Homo sapiens
tagcatccttctcta

SEQ ID NO: 1071146 - DNA, 15 bp, Homo sapiens
gtagcatccttctct

SEQ ID NO: 1071147 - DNA, 15 bp, Homo sapiens
tgtagcatccttctc

SEQ ID NO: 1071148 - DNA, 15 bp, Homo sapiens
atgtagcatccttct

SEQ ID NO: 1071149 - DNA, 15 bp, Homo sapiens
gatgtagcatccttc

SEQ ID NO: 1071150 - DNA, 15 bp, Homo sapiens
cgatgtagcatcctt

SEQ ID NO: 1071151 - DNA, 15 bp, Homo sapiens
gcgatgtagcatcct

SEQ ID NO: 1071152 - DNA, 15 bp, Homo sapiens
ggcgatgtagcatcc

SEQ ID NO: 1071153 - DNA, 15 bp, Homo sapiens
tggcgatgtagcatc

SEQ ID NO: 1071154 - DNA, 15 bp, Homo sapiens
gtggcgatgtagcat

SEQ ID NO: 1071155 - DNA, 15 bp, Homo sapiens
agtggcgatgtagca

SEQ ID NO: 1071156 - DNA, 15 bp, Homo sapiens
cagtggcgatgtagc

SEQ ID NO: 1071157 - DNA, 15 bp, Homo sapiens
ccagtggcgatgtag

SEQ ID NO: 1071158 - DNA, 15 bp, Homo sapiens
cccagtggcgatgta

SEQ ID NO: 1071159 - DNA, 15 bp, Homo sapiens
gcccagtggcgatgt

SEQ ID NO: 1071160 - DNA, 15 bp, Homo sapiens
ggcccagtggcgatg

SEQ ID NO: 1071161 - DNA, 15 bp, Homo sapiens
aggcccagtggcgat

SEQ ID NO: 1071162 - DNA, 15 bp, Homo sapiens
taggcccagtggcga

SEQ ID NO: 1071163 - DNA, 15 bp, Homo sapiens
ctaggcccagtggcg

SEQ ID NO: 1071164 - DNA, 15 bp, Homo sapiens
cctaggcccagtggc

SEQ ID NO: 1071165 - DNA, 15 bp, Homo sapiens
gcctaggcccagtgg

SEQ ID NO: 1071166 - DNA, 15 bp, Homo sapiens
agcctaggcccagtg

SEQ ID NO: 1071167 - DNA, 15 bp, Homo sapiens
cagcctaggcccagt

SEQ ID NO: 1071168 - DNA, 15 bp, Homo sapiens
tcagcctaggcccag

SEQ ID NO: 1071169 - DNA, 15 bp, Homo sapiens
ttcagcctaggccca

SEQ ID NO: 1071170 - DNA, 15 bp, Homo sapiens
tttcagcctaggccc

SEQ ID NO: 1071171 - DNA, 15 bp, Homo sapiens
ctttcagcctaggcc

SEQ ID NO: 1071172 - DNA, 15 bp, Homo sapiens
cctttcagcctaggc

SEQ ID NO: 1071173 - DNA, 15 bp, Homo sapiens
gcctttcagcctagg

SEQ ID NO: 1071174 - DNA, 15 bp, Homo sapiens
cgcctttcagcctag

SEQ ID NO: 1071175 - DNA, 15 bp, Homo sapiens
ccgcctttcagccta

SEQ ID NO: 1071176 - DNA, 15 bp, Homo sapiens
gccgcctttcagcct

SEQ ID NO: 1071177 - DNA, 15 bp, Homo sapiens
ggccgcctttcagcc

SEQ ID NO: 1071178 - DNA, 15 bp, Homo sapiens
aggccgcctttcagc

SEQ ID NO: 1071179 - DNA, 15 bp, Homo sapiens
aaggccgcctttcag

SEQ ID NO: 1071180 - DNA, 15 bp, Homo sapiens
aaaggccgcctttca

SEQ ID NO: 1071181 - DNA, 15 bp, Homo sapiens
taaaggccgcctttc

SEQ ID NO: 1071182 - DNA, 15 bp, Homo sapiens
ctaaaggccgccttt

SEQ ID NO: 1071183 - DNA, 15 bp, Homo sapiens
cctaaaggccgcctt

SEQ ID NO: 1071184 - DNA, 15 bp, Homo sapiens
tcctaaaggccgcct

SEQ ID NO: 1071185 - DNA, 15 bp, Homo sapiens
ttcctaaaggccgcc

SEQ ID NO: 1071186 - DNA, 15 bp, Homo sapiens
gttcctaaaggccgc

SEQ ID NO: 1071187 - DNA, 15 bp, Homo sapiens
agttcctaaaggccg

SEQ ID NO: 1071188 - DNA, 15 bp, Homo sapiens
tagttcctaaaggcc

SEQ ID NO: 1071189 - DNA, 15 bp, Homo sapiens
ttagttcctaaaggc

SEQ ID NO: 1071190 - DNA, 15 bp, Homo sapiens
gttagttcctaaagg

SEQ ID NO: 1071191 - DNA, 15 bp, Homo sapiens
tgttagttcctaaag

SEQ ID NO: 1071192 - DNA, 15 bp, Homo sapiens
gtgttagttcctaaa

SEQ ID NO: 1071193 - DNA, 15 bp, Homo sapiens
ggtgttagttcctaa

SEQ ID NO: 1071194 - DNA, 15 bp, Homo sapiens
tggtgttagttccta

SEQ ID NO: 1071195 - DNA, 15 bp, Homo sapiens
ttggtgttagttcct

SEQ ID NO: 1071196 - DNA, 15 bp, Homo sapiens
cttggtgttagttcc

SEQ ID NO: 1071197 - DNA, 15 bp, Homo sapiens
acttggtgttagttc

SEQ ID NO: 1071198 - DNA, 15 bp, Homo sapiens
tacttggtgttagtt

SEQ ID NO: 1071199 - DNA, 15 bp, Homo sapiens
gtacttggtgttagt

SEQ ID NO: 1071200 - DNA, 15 bp, Homo sapiens
agtacttggtgttag

SEQ ID NO: 1071201 - DNA, 15 bp, Homo sapiens
tagtacttggtgtta

SEQ ID NO: 1071202 - DNA, 15 bp, Homo sapiens
atagtacttggtgtt

SEQ ID NO: 1071203 - DNA, 15 bp, Homo sapiens
gatagtacttggtgt

SEQ ID NO: 1071204 - DNA, 15 bp, Homo sapiens
cgatagtacttggtg

SEQ ID NO: 1071205 - DNA, 15 bp, Homo sapiens
tcgatagtacttggt

SEQ ID NO: 1071206 - DNA, 15 bp, Homo sapiens
atcgatagtacttgg

SEQ ID NO: 1071207 - DNA, 15 bp, Homo sapiens
aatcgatagtacttg

SEQ ID NO: 1071208 - DNA, 15 bp, Homo sapiens
aaatcgatagtactt

SEQ ID NO: 1071209 - DNA, 15 bp, Homo sapiens
aaaatcgatagtact

SEQ ID NO: 1071210 - DNA, 15 bp, Homo sapiens
gaaaatcgatagtac

SEQ ID NO: 1071211 - DNA, 15 bp, Homo sapiens
tgaaaatcgatagta

SEQ ID NO: 1071212 - DNA, 15 bp, Homo sapiens
atgaaaatcgatagt

SEQ ID NO: 1071213 - DNA, 15 bp, Homo sapiens
aatgaaaatcgatag

SEQ ID NO: 1071214 - DNA, 15 bp, Homo sapiens
aaatgaaaatcgata

SEQ ID NO: 1071215 - DNA, 15 bp, Homo sapiens
taaatgaaaatcgat

SEQ ID NO: 1071216 - DNA, 15 bp, Homo sapiens
ttaaatgaaaatcga

SEQ ID NO: 1071217 - DNA, 15 bp, Homo sapiens
gttaaatgaaaatcg

SEQ ID NO: 1071218 - DNA, 15 bp, Homo sapiens
ggttaaatgaaaatc

SEQ ID NO: 1071219 - DNA, 15 bp, Homo sapiens
gggttaaatgaaaat

SEQ ID NO: 1071220 - DNA, 15 bp, Homo sapiens
agggttaaatgaaaa

SEQ ID NO: 1071221 - DNA, 15 bp, Homo sapiens
gagggttaaatgaaa

SEQ ID NO: 1071222 - DNA, 15 bp, Homo sapiens
cgagggttaaatgaa

SEQ ID NO: 1071223 - DNA, 15 bp, Homo sapiens
acgagggttaaatga

SEQ ID NO: 1071224 - DNA, 15 bp, Homo sapiens
tacgagggttaaatg

SEQ ID NO: 1071225 - DNA, 15 bp, Homo sapiens
ttacgagggttaaat

SEQ ID NO: 1071226 - DNA, 15 bp, Homo sapiens
gttacgagggttaaa

SEQ ID NO: 1071227 - DNA, 15 bp, Homo sapiens
tgttacgagggttaa

SEQ ID NO: 1071228 - DNA, 15 bp, Homo sapiens
ctgttacgagggtta

SEQ ID NO: 1071229 - DNA, 15 bp, Homo sapiens
gctgttacgagggtt

SEQ ID NO: 1071230 - DNA, 15 bp, Homo sapiens
ggctgttacgagggt

SEQ ID NO: 1071231 - DNA, 15 bp, Homo sapiens
gggctgttacgaggg

SEQ ID NO: 1071232 - DNA, 15 bp, Homo sapiens
tgggctgttacgagg

SEQ ID NO: 1071233 - DNA, 15 bp, Homo sapiens
ttgggctgttacgag

SEQ ID NO: 1071234 - DNA, 15 bp, Homo sapiens
attgggctgttacga

SEQ ID NO: 1071235 - DNA, 15 bp, Homo sapiens
cattgggctgttacg

SEQ ID NO: 1071236 - DNA, 15 bp, Homo sapiens
tcattgggctgttac

SEQ ID NO: 1071237 - DNA, 15 bp, Homo sapiens
ctcattgggctgtta

SEQ ID NO: 1071238 - DNA, 15 bp, Homo sapiens
cctcattgggctgtt

SEQ ID NO: 1071239 - DNA, 15 bp, Homo sapiens
acctcattgggctgt

SEQ ID NO: 1071240 - DNA, 15 bp, Homo sapiens
cacctcattgggctg

SEQ ID NO: 1071241 - DNA, 15 bp, Homo sapiens
ccacctcattgggct

SEQ ID NO: 1071242 - DNA, 15 bp, Homo sapiens
cccacctcattgggc

SEQ ID NO: 1071243 - DNA, 15 bp, Homo sapiens
acccacctcattggg

SEQ ID NO: 1071244 - DNA, 15 bp, Homo sapiens
tacccacctcattgg

SEQ ID NO: 1071245 - DNA, 15 bp, Homo sapiens
atacccacctcattg

SEQ ID NO: 1071246 - DNA, 15 bp, Homo sapiens
aatacccacctcatt

SEQ ID NO: 1071247 - DNA, 15 bp, Homo sapiens
caatacccacctcat

SEQ ID NO: 1071248 - DNA, 15 bp, Homo sapiens
gcaatacccacctca

SEQ ID NO: 1071249 - DNA, 15 bp, Homo sapiens
ggcaatacccacctc

SEQ ID NO: 1071250 - DNA, 15 bp, Homo sapiens
gggcaatacccacct

SEQ ID NO: 1071251 - DNA, 15 bp, Homo sapiens
tgggcaatacccacc

SEQ ID NO: 1071252 - DNA, 15 bp, Homo sapiens
atgggcaatacccac

SEQ ID NO: 1071253 - DNA, 15 bp, Homo sapiens
gatgggcaataccca

SEQ ID NO: 1071254 - DNA, 15 bp, Homo sapiens
ggatgggcaataccc

SEQ ID NO: 1071255 - DNA, 15 bp, Homo sapiens
gggatgggcaatacc

SEQ ID NO: 1071256 - DNA, 15 bp, Homo sapiens
tgggatgggcaatac

SEQ ID NO: 1071257 - DNA, 15 bp, Homo sapiens
ctgggatgggcaata

SEQ ID NO: 1071258 - DNA, 15 bp, Homo sapiens
actgggatgggcaat

SEQ ID NO: 1071259 - DNA, 15 bp, Homo sapiens
aactgggatgggcaa

SEQ ID NO: 1071260 - DNA, 15 bp, Homo sapiens
gaactgggatgggca

SEQ ID NO: 1071261 - DNA, 15 bp, Homo sapiens
tgaactgggatgggc

SEQ ID NO: 1071262 - DNA, 15 bp, Homo sapiens
atgaactgggatggg

SEQ ID NO: 1071263 - DNA, 15 bp, Homo sapiens
tatgaactgggatgg

SEQ ID NO: 1071264 - DNA, 15 bp, Homo sapiens
ctatgaactgggatg

SEQ ID NO: 1071265 - DNA, 15 bp, Homo sapiens
actatgaactgggat

SEQ ID NO: 1071266 - DNA, 15 bp, Homo sapiens
aactatgaactggga

SEQ ID NO: 1071267 - DNA, 15 bp, Homo sapiens
caactatgaactggg

SEQ ID NO: 1071268 - DNA, 15 bp, Homo sapiens
tcaactatgaactgg

SEQ ID NO: 1071269 - DNA, 15 bp, Homo sapiens
ctcaactatgaactg

SEQ ID NO: 1071270 - DNA, 15 bp, Homo sapiens
cctcaactatgaact

SEQ ID NO: 1071271 - DNA, 15 bp, Homo sapiens
tcctcaactatgaac

SEQ ID NO: 1071272 - DNA, 15 bp, Homo sapiens
atcctcaactatgaa

SEQ ID NO: 1071273 - DNA, 15 bp, Homo sapiens
aatcctcaactatga

SEQ ID NO: 1071274 - DNA, 15 bp, Homo sapiens
gaatcctcaactatg

SEQ ID NO: 1071275 - DNA, 15 bp, Homo sapiens
ggaatcctcaactat

SEQ ID NO: 1071276 - DNA, 15 bp, Homo sapiens
cggaatcctcaacta

SEQ ID NO: 1071277 - DNA, 15 bp, Homo sapiens
tcggaatcctcaact

SEQ ID NO: 1071278 - DNA, 15 bp, Homo sapiens
ctcggaatcctcaac

SEQ ID NO: 1071279 - DNA, 15 bp, Homo sapiens
cctcggaatcctcaa

SEQ ID NO: 1071280 - DNA, 15 bp, Homo sapiens
acctcggaatcctca

SEQ ID NO: 1071281 - DNA, 15 bp, Homo sapiens
aacctcggaatcctc

SEQ ID NO: 1071282 - DNA, 15 bp, Homo sapiens
gaacctcggaatcct

SEQ ID NO: 1071283 - DNA, 15 bp, Homo sapiens
agaacctcggaatcc

SEQ ID NO: 1071284 - DNA, 15 bp, Homo sapiens
cagaacctcggaatc

SEQ ID NO: 1071285 - DNA, 15 bp, Homo sapiens
tcagaacctcggaat

SEQ ID NO: 1071286 - DNA, 15 bp, Homo sapiens
ttcagaacctcggaa

SEQ ID NO: 1071287 - DNA, 15 bp, Homo sapiens
tttcagaacctcgga

SEQ ID NO: 1071288 - DNA, 15 bp, Homo sapiens
ctttcagaacctcgg

SEQ ID NO: 1071289 - DNA, 15 bp, Homo sapiens
cctttcagaacctcg

SEQ ID NO: 1071290 - DNA, 15 bp, Homo sapiens
tcctttcagaacctc

SEQ ID NO: 1071291 - DNA, 15 bp, Homo sapiens
gtcctttcagaacct

SEQ ID NO: 1071292 - DNA, 15 bp, Homo sapiens
tgtcctttcagaacc

SEQ ID NO: 1071293 - DNA, 15 bp, Homo sapiens
gtgtcctttcagaac

SEQ ID NO: 1071294 - DNA, 15 bp, Homo sapiens
agtgtcctttcagaa

SEQ ID NO: 1071295 - DNA, 15 bp, Homo sapiens
tagtgtcctttcaga

SEQ ID NO: 1071296 - DNA, 15 bp, Homo sapiens
ctagtgtcctttcag

SEQ ID NO: 1071297 - DNA, 15 bp, Homo sapiens
gctagtgtcctttca

SEQ ID NO: 1071298 - DNA, 15 bp, Homo sapiens
tgctagtgtcctttc

SEQ ID NO: 1071299 - DNA, 15 bp, Homo sapiens
ctgctagtgtccttt

SEQ ID NO: 1071300 - DNA, 15 bp, Homo sapiens
cctgctagtgtcctt

SEQ ID NO: 1071301 - DNA, 15 bp, Homo sapiens
acctgctagtgtcct

SEQ ID NO: 1071302 - DNA, 15 bp, Homo sapiens
cacctgctagtgtcc

SEQ ID NO: 1071303 - DNA, 15 bp, Homo sapiens
ccacctgctagtgtc

SEQ ID NO: 1071304 - DNA, 15 bp, Homo sapiens
tccacctgctagtgt

SEQ ID NO: 1071305 - DNA, 15 bp, Homo sapiens
gtccacctgctagtg

SEQ ID NO: 1071306 - DNA, 15 bp, Homo sapiens
agtccacctgctagt

SEQ ID NO: 1071307 - DNA, 15 bp, Homo sapiens
aagtccacctgctag

SEQ ID NO: 1071308 - DNA, 15 bp, Homo sapiens
caagtccacctgcta

SEQ ID NO: 1071309 - DNA, 15 bp, Homo sapiens
ccaagtccacctgct

SEQ ID NO: 1071310 - DNA, 15 bp, Homo sapiens
tccaagtccacctgc

SEQ ID NO: 1071311 - DNA, 15 bp, Homo sapiens
ttccaagtccacctg

SEQ ID NO: 1071312 - DNA, 15 bp, Homo sapiens
gttccaagtccacct

SEQ ID NO: 1071313 - DNA, 15 bp, Homo sapiens
ggttccaagtccacc

SEQ ID NO: 1071314 - DNA, 15 bp, Homo sapiens
aggttccaagtccac

SEQ ID NO: 1071315 - DNA, 15 bp, Homo sapiens
caggttccaagtcca

SEQ ID NO: 1071316 - DNA, 15 bp, Homo sapiens
ccaggttccaagtcc

SEQ ID NO: 1071317 - DNA, 15 bp, Homo sapiens
gccaggttccaagtc

SEQ ID NO: 1071318 - DNA, 15 bp, Homo sapiens
ggccaggttccaagt

SEQ ID NO: 1071319 - DNA, 15 bp, Homo sapiens
aggccaggttccaag

SEQ ID NO: 1071320 - DNA, 15 bp, Homo sapiens
caggccaggttccaa

SEQ ID NO: 1071321 - DNA, 15 bp, Homo sapiens
gcaggccaggttcca

SEQ ID NO: 1071322 - DNA, 15 bp, Homo sapiens
ggcaggccaggttcc

SEQ ID NO: 1071323 - DNA, 15 bp, Homo sapiens
cggcaggccaggttc

SEQ ID NO: 1071324 - DNA, 15 bp, Homo sapiens
ccggcaggccaggtt

SEQ ID NO: 1071325 - DNA, 15 bp, Homo sapiens
gccggcaggccaggt

SEQ ID NO: 1071326 - DNA, 15 bp, Homo sapiens
agccggcaggccagg

SEQ ID NO: 1071327 - DNA, 15 bp, Homo sapiens
gagccggcaggccag

SEQ ID NO: 1071328 - DNA, 15 bp, Homo sapiens
ggagccggcaggcca

SEQ ID NO: 1071329 - DNA, 15 bp, Homo sapiens
tggagccggcaggcc

SEQ ID NO: 1071330 - DNA, 15 bp, Homo sapiens
gtggagccggcaggc

SEQ ID NO: 1071331 - DNA, 15 bp, Homo sapiens
ggtggagccggcagg

SEQ ID NO: 1071332 - DNA, 15 bp, Homo sapiens
gggtggagccggcag

SEQ ID NO: 1071333 - DNA, 15 bp, Homo sapiens
ggggtggagccggca

SEQ ID NO: 1071334 - DNA, 15 bp, Homo sapiens
aggggtggagccggc

SEQ ID NO: 1071335 - DNA, 15 bp, Homo sapiens
caggggtggagccgg

SEQ ID NO: 1071336 - DNA, 15 bp, Homo sapiens
tcaggggtggagccg

SEQ ID NO: 1071337 - DNA, 15 bp, Homo sapiens
ctcaggggtggagcc

SEQ ID NO: 1071338 - DNA, 15 bp, Homo sapiens
tctcaggggtggagc

SEQ ID NO: 1071339 - DNA, 15 bp, Homo sapiens
atctcaggggtggag

SEQ ID NO: 1071340 - DNA, 15 bp, Homo sapiens
catctcaggggtgga

SEQ ID NO: 1071341 - DNA, 15 bp, Homo sapiens
acatctcaggggtgg

SEQ ID NO: 1071342 - DNA, 15 bp, Homo sapiens
aacatctcaggggtg

SEQ ID NO: 1071343 - DNA, 15 bp, Homo sapiens
aaacatctcaggggt

SEQ ID NO: 1071344 - DNA, 15 bp, Homo sapiens
caaacatctcagggg

SEQ ID NO: 1071345 - DNA, 15 bp, Homo sapiens
ccaaacatctcaggg

SEQ ID NO: 1071346 - DNA, 15 bp, Homo sapiens
gccaaacatctcagg

SEQ ID NO: 1071347 - DNA, 15 bp, Homo sapiens
tgccaaacatctcag

SEQ ID NO: 1071348 - DNA, 15 bp, Homo sapiens
gtgccaaacatctca

SEQ ID NO: 1071349 - DNA, 15 bp, Homo sapiens
agtgccaaacatctc

SEQ ID NO: 1071350 - DNA, 15 bp, Homo sapiens
tagtgccaaacatct

SEQ ID NO: 1071351 - DNA, 15 bp, Homo sapiens
ctagtgccaaacatc

SEQ ID NO: 1071352 - DNA, 15 bp, Homo sapiens
gctagtgccaaacat

SEQ ID NO: 1071353 - DNA, 15 bp, Homo sapiens
tgctagtgccaaaca

SEQ ID NO: 1071354 - DNA, 15 bp, Homo sapiens
ctgctagtgccaaac

SEQ ID NO: 1071355 - DNA, 15 bp, Homo sapiens
gctgctagtgccaaa

SEQ ID NO: 1071356 - DNA, 15 bp, Homo sapiens
tgctgctagtgccaa

SEQ ID NO: 1071357 - DNA, 15 bp, Homo sapiens
gtgctgctagtgcca

SEQ ID NO: 1071358 - DNA, 15 bp, Homo sapiens
ggtgctgctagtgcc

SEQ ID NO: 1071359 - DNA, 15 bp, Homo sapiens
aggtgctgctagtgc

SEQ ID NO: 1071360 - DNA, 15 bp, Homo sapiens
aaggtgctgctagtg

SEQ ID NO: 1071361 - DNA, 15 bp, Homo sapiens
gaaggtgctgctagt

SEQ ID NO: 1071362 - DNA, 15 bp, Homo sapiens
agaaggtgctgctag

SEQ ID NO: 1071363 - DNA, 15 bp, Homo sapiens
cagaaggtgctgcta

SEQ ID NO: 1071364 - DNA, 15 bp, Homo sapiens
tcagaaggtgctgct

SEQ ID NO: 1071365 - DNA, 15 bp, Homo sapiens
gtcagaaggtgctgc

SEQ ID NO: 1071366 - DNA, 15 bp, Homo sapiens
agtcagaaggtgctg

SEQ ID NO: 1071367 - DNA, 15 bp, Homo sapiens
gagtcagaaggtgct

SEQ ID NO: 1071368 - DNA, 15 bp, Homo sapiens
agagtcagaaggtgc

SEQ ID NO: 1071369 - DNA, 15 bp, Homo sapiens
aagagtcagaaggtg

SEQ ID NO: 1071370 - DNA, 15 bp, Homo sapiens
caagagtcagaaggt

SEQ ID NO: 1071371 - DNA, 15 bp, Homo sapiens
ccaagagtcagaagg

SEQ ID NO: 1071372 - DNA, 15 bp, Homo sapiens
gccaagagtcagaag

SEQ ID NO: 1071373 - DNA, 15 bp, Homo sapiens
ggccaagagtcagaa

SEQ ID NO: 1071374 - DNA, 15 bp, Homo sapiens
aggccaagagtcaga

SEQ ID NO: 1071375 - DNA, 15 bp, Homo sapiens
aaggccaagagtcag

SEQ ID NO: 1071376 - DNA, 15 bp, Homo sapiens
aaaggccaagagtca

SEQ ID NO: 1071377 - DNA, 15 bp, Homo sapiens
aaaaggccaagagtc

SEQ ID NO: 1071378 - DNA, 15 bp, Homo sapiens
gaaaaggccaagagt

SEQ ID NO: 1071379 - DNA, 15 bp, Homo sapiens
agaaaaggccaagag

SEQ ID NO: 1071380 - DNA, 15 bp, Homo sapiens
cagaaaaggccaaga

SEQ ID NO: 1071381 - DNA, 15 bp, Homo sapiens
gcagaaaaggccaag

SEQ ID NO: 1071382 - DNA, 15 bp, Homo sapiens
ggcagaaaaggccaa

SEQ ID NO: 1071383 - DNA, 15 bp, Homo sapiens
aggcagaaaaggcca

SEQ ID NO: 1071384 - DNA, 15 bp, Homo sapiens
caggcagaaaaggcc

SEQ ID NO: 1071385 - DNA, 15 bp, Homo sapiens
gcaggcagaaaaggc

SEQ ID NO: 1071386 - DNA, 15 bp, Homo sapiens
agcaggcagaaaagg

SEQ ID NO: 1071387 - DNA, 15 bp, Homo sapiens
gagcaggcagaaaag

SEQ ID NO: 1071388 - DNA, 15 bp, Homo sapiens
ggagcaggcagaaaa

SEQ ID NO: 1071389 - DNA, 15 bp, Homo sapiens
tggagcaggcagaaa

SEQ ID NO: 1071390 - DNA, 15 bp, Homo sapiens
gtggagcaggcagaa

SEQ ID NO: 1071391 - DNA, 15 bp, Homo sapiens
cgtggagcaggcaga

SEQ ID NO: 1071392 - DNA, 15 bp, Homo sapiens
ccgtggagcaggcag

SEQ ID NO: 1071393 - DNA, 15 bp, Homo sapiens
cccgtggagcaggca

SEQ ID NO: 1071394 - DNA, 15 bp, Homo sapiens
tcccgtggagcaggc

SEQ ID NO: 1071395 - DNA, 15 bp, Homo sapiens
ctcccgtggagcagg

SEQ ID NO: 1071396 - DNA, 15 bp, Homo sapiens
tctcccgtggagcag

SEQ ID NO: 1071397 - DNA, 15 bp, Homo sapiens
gtctcccgtggagca

SEQ ID NO: 1071398 - DNA, 15 bp, Homo sapiens
tgtctcccgtggagc

SEQ ID NO: 1071399 - DNA, 15 bp, Homo sapiens
ctgtctcccgtggag

SEQ ID NO: 1071400 - DNA, 15 bp, Homo sapiens
tctgtctcccgtgga

SEQ ID NO: 1071401 - DNA, 15 bp, Homo sapiens
gtctgtctcccgtgg

SEQ ID NO: 1071402 - DNA, 15 bp, Homo sapiens
cgtctgtctcccgtg

SEQ ID NO: 1071403 - DNA, 15 bp, Homo sapiens
tcgtctgtctcccgt

SEQ ID NO: 1071404 - DNA, 15 bp, Homo sapiens
gtcgtctgtctcccg

SEQ ID NO: 1071405 - DNA, 15 bp, Homo sapiens
ggtcgtctgtctccc

SEQ ID NO: 1071406 - DNA, 15 bp, Homo sapiens
gggtcgtctgtctcc

SEQ ID NO: 1071407 - DNA, 15 bp, Homo sapiens
ggggtcgtctgtctc

SEQ ID NO: 1071408 - DNA, 15 bp, Homo sapiens
cggggtcgtctgtct

SEQ ID NO: 1071409 - DNA, 15 bp, Homo sapiens
ccggggtcgtctgtc

SEQ ID NO: 1071410 - DNA, 15 bp, Homo sapiens
gccggggtcgtctgt

SEQ ID NO: 1071411 - DNA, 15 bp, Homo sapiens
tgccggggtcgtctg

SEQ ID NO: 1071412 - DNA, 15 bp, Homo sapiens
ctgccggggtcgtct

SEQ ID NO: 1071413 - DNA, 15 bp, Homo sapiens
tctgccggggtcgtc

SEQ ID NO: 1071414 - DNA, 15 bp, Homo sapiens
ctctgccggggtcgt

SEQ ID NO: 1071415 - DNA, 15 bp, Homo sapiens
tctctgccggggtcg

SEQ ID NO: 1071416 - DNA, 15 bp, Homo sapiens
ctctctgccggggtc

SEQ ID NO: 1071417 - DNA, 15 bp, Homo sapiens
gctctctgccggggt

SEQ ID NO: 1071418 - DNA, 15 bp, Homo sapiens
agctctctgccgggg

SEQ ID NO: 1071419 - DNA, 15 bp, Homo sapiens
cagctctctgccggg

SEQ ID NO: 1071420 - DNA, 15 bp, Homo sapiens
gcagctctctgccgg

SEQ ID NO: 1071421 - DNA, 15 bp, Homo sapiens
ggcagctctctgccg

SEQ ID NO: 1071422 - DNA, 15 bp, Homo sapiens
aggcagctctctgcc

SEQ ID NO: 1071423 - DNA, 15 bp, Homo sapiens
gaggcagctctctgc

SEQ ID NO: 1071424 - DNA, 15 bp, Homo sapiens
ggaggcagctctctg

SEQ ID NO: 1071425 - DNA, 15 bp, Homo sapiens
tggaggcagctctct

SEQ ID NO: 1071426 - DNA, 15 bp, Homo sapiens
gtggaggcagctctc

SEQ ID NO: 1071427 - DNA, 15 bp, Homo sapiens
ggtggaggcagctct

SEQ ID NO: 1071428 - DNA, 15 bp, Homo sapiens
tggtggaggcagctc

SEQ ID NO: 1071429 - DNA, 15 bp, Homo sapiens
gtggtggaggcagct

SEQ ID NO: 1071430 - DNA, 15 bp, Homo sapiens
tgtggtggaggcagc

SEQ ID NO: 1071431 - DNA, 15 bp, Homo sapiens
ctgtggtggaggcag

SEQ ID NO: 1071432 - DNA, 15 bp, Homo sapiens
tctgtggtggaggca

SEQ ID NO: 1071433 - DNA, 15 bp, Homo sapiens
ctctgtggtggaggc

SEQ ID NO: 1071434 - DNA, 15 bp, Homo sapiens
gctctgtggtggagg

SEQ ID NO: 1071435 - DNA, 15 bp, Homo sapiens
agctctgtggtggag

SEQ ID NO: 1071436 - DNA, 15 bp, Homo sapiens
cagctctgtggtgga

SEQ ID NO: 1071437 - DNA, 15 bp, Homo sapiens
tcagctctgtggtgg

SEQ ID NO: 1071438 - DNA, 15 bp, Homo sapiens
ttcagctctgtggtg

SEQ ID NO: 1071439 - DNA, 15 bp, Homo sapiens
cttcagctctgtggt

SEQ ID NO: 1071440 - DNA, 15 bp, Homo sapiens
gcttcagctctgtgg

SEQ ID NO: 1071441 - DNA, 15 bp, Homo sapiens
tgcttcagctctgtg

SEQ ID NO: 1071442 - DNA, 15 bp, Homo sapiens
gtgcttcagctctgt

SEQ ID NO: 1071443 - DNA, 15 bp, Homo sapiens
tgtgcttcagctctg

SEQ ID NO: 1071444 - DNA, 15 bp, Homo sapiens
ttgtgcttcagctct

SEQ ID NO: 1071445 - DNA, 15 bp, Homo sapiens
tttgtgcttcagctc

SEQ ID NO: 1071446 - DNA, 15 bp, Homo sapiens
ctttgtgcttcagct

SEQ ID NO: 1071447 - DNA, 15 bp, Homo sapiens
gctttgtgcttcagc

SEQ ID NO: 1071448 - DNA, 15 bp, Homo sapiens
ggctttgtgcttcag

SEQ ID NO: 1071449 - DNA, 15 bp, Homo sapiens
gggctttgtgcttca

SEQ ID NO: 1071450 - DNA, 15 bp, Homo sapiens
agggctttgtgcttc

SEQ ID NO: 1071451 - DNA, 15 bp, Homo sapiens
aagggctttgtgctt

SEQ ID NO: 1071452 - DNA, 15 bp, Homo sapiens
gaagggctttgtgct

SEQ ID NO: 1071453 - DNA, 15 bp, Homo sapiens
tgaagggctttgtgc

SEQ ID NO: 1071454 - DNA, 15 bp, Homo sapiens
gtgaagggctttgtg

SEQ ID NO: 1071455 - DNA, 15 bp, Homo sapiens
tgtgaagggctttgt

SEQ ID NO: 1071456 - DNA, 15 bp, Homo sapiens
ctgtgaagggctttg

SEQ ID NO: 1071457 - DNA, 15 bp, Homo sapiens
actgtgaagggcttt

SEQ ID NO: 1071458 - DNA, 15 bp, Homo sapiens
aactgtgaagggctt

SEQ ID NO: 1071459 - DNA, 15 bp, Homo sapiens
aaactgtgaagggct

SEQ ID NO: 1071460 - DNA, 15 bp, Homo sapiens
gaaactgtgaagggc

SEQ ID NO: 1071461 - DNA, 15 bp, Homo sapiens
ggaaactgtgaaggg

SEQ ID NO: 1071462 - DNA, 15 bp, Homo sapiens
tggaaactgtgaagg

SEQ ID NO: 1071463 - DNA, 15 bp, Homo sapiens
ttggaaactgtgaag

SEQ ID NO: 1071464 - DNA, 15 bp, Homo sapiens
cttggaaactgtgaa

SEQ ID NO: 1071465 - DNA, 15 bp, Homo sapiens
ccttggaaactgtga

SEQ ID NO: 1071466 - DNA, 15 bp, Homo sapiens
gccttggaaactgtg

SEQ ID NO: 1071467 - DNA, 15 bp, Homo sapiens
ggccttggaaactgt

SEQ ID NO: 1071468 - DNA, 15 bp, Homo sapiens
aggccttggaaactg

SEQ ID NO: 1071469 - DNA, 15 bp, Homo sapiens
aaggccttggaaact

SEQ ID NO: 1071470 - DNA, 15 bp, Homo sapiens
aaaggccttggaaac

SEQ ID NO: 1071471 - DNA, 15 bp, Homo sapiens
gaaaggccttggaaa

SEQ ID NO: 1071472 - DNA, 15 bp, Homo sapiens
agaaaggccttggaa

SEQ ID NO: 1071473 - DNA, 15 bp, Homo sapiens
aagaaaggccttgga

SEQ ID NO: 1071474 - DNA, 15 bp, Homo sapiens
aaagaaaggccttgg

SEQ ID NO: 1071475 - DNA, 15 bp, Homo sapiens
gaaagaaaggccttg

SEQ ID NO: 1071476 - DNA, 15 bp, Homo sapiens
aggaaagaaaggcct

SEQ ID NO: 1071477 - DNA, 15 bp, Homo sapiens
caggaaagaaaggcc

SEQ ID NO: 1071478 - DNA, 15 bp, Homo sapiens
tacaggaaagaaagg

SEQ ID NO: 1071479 - DNA, 15 bp, Homo sapiens
ttacaggaaagaaag

SEQ ID NO: 1071480 - DNA, 15 bp, Homo sapiens
gttacaggaaagaaa

SEQ ID NO: 1071481 - DNA, 15 bp, Homo sapiens
tgttacaggaaagaa

SEQ ID NO: 1071482 - DNA, 15 bp, Homo sapiens
atgttacaggaaaga

SEQ ID NO: 1071483 - DNA, 15 bp, Homo sapiens
aatgttacaggaaag

SEQ ID NO: 1071484 - DNA, 15 bp, Homo sapiens
gaatgttacaggaaa

SEQ ID NO: 1071485 - DNA, 15 bp, Homo sapiens
cgaatgttacaggaa

SEQ ID NO: 1071486 - DNA, 15 bp, Homo sapiens
acgaatgttacagga

SEQ ID NO: 1071487 - DNA, 15 bp, Homo sapiens
gacgaatgttacagg

SEQ ID NO: 1071488 - DNA, 15 bp, Homo sapiens
tgacgaatgttacag

SEQ ID NO: 1071489 - DNA, 15 bp, Homo sapiens
gtgacgaatgttaca

SEQ ID NO: 1071490 - DNA, 15 bp, Homo sapiens
agtgacgaatgttac

SEQ ID NO: 1071491 - DNA, 15 bp, Homo sapiens
cagtgacgaatgtta

SEQ ID NO: 1071492 - DNA, 15 bp, Homo sapiens
gcagtgacgaatgtt

SEQ ID NO: 1071493 - DNA, 15 bp, Homo sapiens
ggcagtgacgaatgt

SEQ ID NO: 1071494 - DNA, 15 bp, Homo sapiens
gggcagtgacgaatg

SEQ ID NO: 1071495 - DNA, 15 bp, Homo sapiens
tgggcagtgacgaat

SEQ ID NO: 1071496 - DNA, 15 bp, Homo sapiens
atgggcagtgacgaa

SEQ ID NO: 1071497 - DNA, 15 bp, Homo sapiens
gatgggcagtgacga

SEQ ID NO: 1071498 - DNA, 15 bp, Homo sapiens
cgatgggcagtgacg

SEQ ID NO: 1071499 - DNA, 15 bp, Homo sapiens
acgatgggcagtgac

SEQ ID NO: 1071500 - DNA, 15 bp, Homo sapiens
gtacgatgggcagtg

SEQ ID NO: 1071501 - DNA, 15 bp, Homo sapiens
ggtacgatgggcagt

SEQ ID NO: 1071502 - DNA, 15 bp, Homo sapiens
gggtacgatgggcag

SEQ ID NO: 1071503 - DNA, 15 bp, Homo sapiens
tgggtacgatgggca

SEQ ID NO: 1071504 - DNA, 15 bp, Homo sapiens
gtgggtacgatgggc

SEQ ID NO: 1071505 - DNA, 15 bp, Homo sapiens
agtgggtacgatggg

SEQ ID NO: 1071506 - DNA, 15 bp, Homo sapiens
cagtgggtacgatgg

SEQ ID NO: 1071507 - DNA, 15 bp, Homo sapiens
ccagtgggtacgatg

SEQ ID NO: 1071508 - DNA, 15 bp, Homo sapiens
gccagtgggtacgat

SEQ ID NO: 1071509 - DNA, 15 bp, Homo sapiens
agccagtgggtacga

SEQ ID NO: 1071510 - DNA, 15 bp, Homo sapiens
aagccagtgggtacg

SEQ ID NO: 1071511 - DNA, 15 bp, Homo sapiens
taagccagtgggtac

SEQ ID NO: 1071512 - DNA, 15 bp, Homo sapiens
ttaagccagtgggta

SEQ ID NO: 1071513 - DNA, 15 bp, Homo sapiens
attaagccagtgggt

SEQ ID NO: 1071514 - DNA, 15 bp, Homo sapiens
cattaagccagtggg

SEQ ID NO: 1071515 - DNA, 15 bp, Homo sapiens
acattaagccagtgg

SEQ ID NO: 1071516 - DNA, 15 bp, Homo sapiens
gacattaagccagtg

SEQ ID NO: 1071517 - DNA, 15 bp, Homo sapiens
agacattaagccagt

SEQ ID NO: 1071518 - DNA, 15 bp, Homo sapiens
cagacattaagccag

SEQ ID NO: 1071519 - DNA, 15 bp, Homo sapiens
acagacattaagcca

SEQ ID NO: 1071520 - DNA, 15 bp, Homo sapiens
gacagacattaagcc

SEQ ID NO: 1071521 - DNA, 15 bp, Homo sapiens
agacagacattaagc

SEQ ID NO: 1071522 - DNA, 15 bp, Homo sapiens
gagacagacattaag

SEQ ID NO: 1071523 - DNA, 15 bp, Homo sapiens
agagacagacattaa

SEQ ID NO: 1071524 - DNA, 15 bp, Homo sapiens
gagagacagacatta

SEQ ID NO: 1071525 - DNA, 15 bp, Homo sapiens
agagagacagacatt

SEQ ID NO: 1071526 - DNA, 15 bp, Homo sapiens
gagagagacagacat

SEQ ID NO: 1071527 - DNA, 15 bp, Homo sapiens
ggagagagacagaca

SEQ ID NO: 1071528 - DNA, 15 bp, Homo sapiens
tggagagagacagac

SEQ ID NO: 1071529 - DNA, 15 bp, Homo sapiens
gtggagagagacaga

SEQ ID NO: 1071530 - DNA, 15 bp, Homo sapiens
agtggagagagacag

SEQ ID NO: 1071531 - DNA, 15 bp, Homo sapiens
cagtggagagagaca

SEQ ID NO: 1071532 - DNA, 15 bp, Homo sapiens
ccagtggagagagac

SEQ ID NO: 1071533 - DNA, 15 bp, Homo sapiens
tccagtggagagaga

SEQ ID NO: 1071534 - DNA, 15 bp, Homo sapiens
ttccagtggagagag

SEQ ID NO: 1071535 - DNA, 15 bp, Homo sapiens
cttccagtggagaga

SEQ ID NO: 1071536 - DNA, 15 bp, Homo sapiens
ccttccagtggagag

SEQ ID NO: 1071537 - DNA, 15 bp, Homo sapiens
tccttccagtggaga

SEQ ID NO: 1071538 - DNA, 15 bp, Homo sapiens
ctccttccagtggag

SEQ ID NO: 1071539 - DNA, 15 bp, Homo sapiens
cctccttccagtgga

SEQ ID NO: 1071540 - DNA, 15 bp, Homo sapiens
gcctccttccagtgg

SEQ ID NO: 1071541 - DNA, 15 bp, Homo sapiens
agcctccttccagtg

SEQ ID NO: 1071542 - DNA, 15 bp, Homo sapiens
gagcctccttccagt

SEQ ID NO: 1071543 - DNA, 15 bp, Homo sapiens
ggagcctccttccag

SEQ ID NO: 1071544 - DNA, 15 bp, Homo sapiens
tggagcctccttcca

SEQ ID NO: 1071545 - DNA, 15 bp, Homo sapiens
gtggagcctccttcc

SEQ ID NO: 1071546 - DNA, 15 bp, Homo sapiens
cgtggagcctccttc

SEQ ID NO: 1071547 - DNA, 15 bp, Homo sapiens
tcgtggagcctcctt

SEQ ID NO: 1071548 - DNA, 15 bp, Homo sapiens
ctcgtggagcctcct

SEQ ID NO: 1071549 - DNA, 15 bp, Homo sapiens
cctcgtggagcctcc

SEQ ID NO: 1071550 - DNA, 15 bp, Homo sapiens
ccctcgtggagcctc

SEQ ID NO: 1071551 - DNA, 15 bp, Homo sapiens
gccctcgtggagcct

SEQ ID NO: 1071552 - DNA, 15 bp, Homo sapiens
tgccctcgtggagcc

SEQ ID NO: 1071553 - DNA, 15 bp, Homo sapiens
gtgccctcgtggagc

SEQ ID NO: 1071554 - DNA, 15 bp, Homo sapiens
ggtgccctcgtggag

SEQ ID NO: 1071555 - DNA, 15 bp, Homo sapiens
cggtgccctcgtgga

SEQ ID NO: 1071556 - DNA, 15 bp, Homo sapiens
gcggtgccctcgtgg

SEQ ID NO: 1071557 - DNA, 15 bp, Homo sapiens
agcggtgccctcgtg

SEQ ID NO: 1071558 - DNA, 15 bp, Homo sapiens
gagcggtgccctcgt

SEQ ID NO: 1071559 - DNA, 15 bp, Homo sapiens
agagcggtgccctcg

SEQ ID NO: 1071560 - DNA, 15 bp, Homo sapiens
cagagcggtgccctc

SEQ ID NO: 1071561 - DNA, 15 bp, Homo sapiens
ccagagcggtgccct

SEQ ID NO: 1071562 - DNA, 15 bp, Homo sapiens
accagagcggtgccc

SEQ ID NO: 1071563 - DNA, 15 bp, Homo sapiens
aaccagagcggtgcc

SEQ ID NO: 1071564 - DNA, 15 bp, Homo sapiens
aaaccagagcggtgc

SEQ ID NO: 1071565 - DNA, 15 bp, Homo sapiens
aaaaccagagcggtg

SEQ ID NO: 1071566 - DNA, 15 bp, Homo sapiens
gaaaaccagagcggt

SEQ ID NO: 1071567 - DNA, 15 bp, Homo sapiens
agaaaaccagagcgg

SEQ ID NO: 1071568 - DNA, 15 bp, Homo sapiens
aagaaaaccagagcg

SEQ ID NO: 1071569 - DNA, 15 bp, Homo sapiens
gaagaaaaccagagc

SEQ ID NO: 1071570 - DNA, 15 bp, Homo sapiens
ggaagaaaaccagag

SEQ ID NO: 1071571 - DNA, 15 bp, Homo sapiens
gggaagaaaaccaga

SEQ ID NO: 1071572 - DNA, 15 bp, Homo sapiens
agggaagaaaaccag

SEQ ID NO: 1071573 - DNA, 15 bp, Homo sapiens
cagggaagaaaacca

SEQ ID NO: 1071574 - DNA, 15 bp, Homo sapiens
ccagggaagaaaacc

SEQ ID NO: 1071575 - DNA, 15 bp, Homo sapiens
accagggaagaaaac

SEQ ID NO: 1071576 - DNA, 15 bp, Homo sapiens
caccagggaagaaaa

SEQ ID NO: 1071577 - DNA, 15 bp, Homo sapiens
tcaccagggaagaaa

SEQ ID NO: 1071578 - DNA, 15 bp, Homo sapiens
atcaccagggaagaa

SEQ ID NO: 1071579 - DNA, 15 bp, Homo sapiens
gatcaccagggaaga

SEQ ID NO: 1071580 - DNA, 15 bp, Homo sapiens
ggatcaccagggaag

SEQ ID NO: 1071581 - DNA, 15 bp, Homo sapiens
gggatcaccagggaa

SEQ ID NO: 1071582 - DNA, 15 bp, Homo sapiens
tgggatcaccaggga

SEQ ID NO: 1071583 - DNA, 15 bp, Homo sapiens
ctgggatcaccaggg

SEQ ID NO: 1071584 - DNA, 15 bp, Homo sapiens
gctgggatcaccagg

SEQ ID NO: 1071585 - DNA, 15 bp, Homo sapiens
tgctgggatcaccag

SEQ ID NO: 1071586 - DNA, 15 bp, Homo sapiens
gtgctgggatcacca

SEQ ID NO: 1071587 - DNA, 15 bp, Homo sapiens
ggtgctgggatcacc

SEQ ID NO: 1071588 - DNA, 15 bp, Homo sapiens
aggtgctgggatcac

SEQ ID NO: 1071589 - DNA, 15 bp, Homo sapiens
taggtgctgggatca

SEQ ID NO: 1071590 - DNA, 15 bp, Homo sapiens
ctaggtgctgggatc

SEQ ID NO: 1071591 - DNA, 15 bp, Homo sapiens
tctaggtgctgggat

SEQ ID NO: 1071592 - DNA, 15 bp, Homo sapiens
ttctaggtgctggga

SEQ ID NO: 1071593 - DNA, 15 bp, Homo sapiens
cttctaggtgctggg

SEQ ID NO: 1071594 - DNA, 15 bp, Homo sapiens
ccttctaggtgctgg

SEQ ID NO: 1071595 - DNA, 15 bp, Homo sapiens
tccttctaggtgctg

SEQ ID NO: 1071596 - DNA, 15 bp, Homo sapiens
gtccttctaggtgct

SEQ ID NO: 1071597 - DNA, 15 bp, Homo sapiens
cgtccttctaggtgc

SEQ ID NO: 1071598 - DNA, 15 bp, Homo sapiens
gcgtccttctaggtg

SEQ ID NO: 1071599 - DNA, 15 bp, Homo sapiens
ggcgtccttctaggt

SEQ ID NO: 1071600 - DNA, 15 bp, Homo sapiens
gggcgtccttctagg

SEQ ID NO: 1071601 - DNA, 15 bp, Homo sapiens
cgggcgtccttctag

SEQ ID NO: 1071602 - DNA, 15 bp, Homo sapiens
gcgggcgtccttcta

SEQ ID NO: 1071603 - DNA, 15 bp, Homo sapiens
ggcgggcgtccttct

SEQ ID NO: 1071604 - DNA, 15 bp, Homo sapiens
gggcgggcgtccttc

SEQ ID NO: 1071605 - DNA, 15 bp, Homo sapiens
cgggcgggcgtcctt

SEQ ID NO: 1071606 - DNA, 15 bp, Homo sapiens
gcgggcgggcgtcct

SEQ ID NO: 1071607 - DNA, 15 bp, Homo sapiens
agcgggcgggcgtcc

SEQ ID NO: 1071608 - DNA, 15 bp, Homo sapiens
cagcgggcgggcgtc

SEQ ID NO: 1071609 - DNA, 15 bp, Homo sapiens
gcagcgggcgggcgt

SEQ ID NO: 1071610 - DNA, 15 bp, Homo sapiens
ggcagcgggcgggcg

SEQ ID NO: 1071611 - DNA, 15 bp, Homo sapiens
aggcagcgggcgggc

SEQ ID NO: 1071612 - DNA, 15 bp, Homo sapiens
caggcagcgggcggg

SEQ ID NO: 1071613 - DNA, 15 bp, Homo sapiens
acaggcagcgggcgg

SEQ ID NO: 1071614 - DNA, 15 bp, Homo sapiens
cacaggcagcgggcg

SEQ ID NO: 1071615 - DNA, 15 bp, Homo sapiens
gcacaggcagcgggc

SEQ ID NO: 1071616 - DNA, 15 bp, Homo sapiens
agcacaggcagcggg

SEQ ID NO: 1071617 - DNA, 15 bp, Homo sapiens
gagcacaggcagcgg

SEQ ID NO: 1071618 - DNA, 15 bp, Homo sapiens
tgagcacaggcagcg

SEQ ID NO: 1071619 - DNA, 15 bp, Homo sapiens
ctgagcacaggcagc

SEQ ID NO: 1071620 - DNA, 15 bp, Homo sapiens
tctgagcacaggcag

SEQ ID NO: 1071621 - DNA, 15 bp, Homo sapiens
atctgagcacaggca

SEQ ID NO: 1071622 - DNA, 15 bp, Homo sapiens
tatctgagcacaggc

SEQ ID NO: 1071623 - DNA, 15 bp, Homo sapiens
gtatctgagcacagg

SEQ ID NO: 1071624 - DNA, 15 bp, Homo sapiens
tgtatctgagcacag

SEQ ID NO: 1071625 - DNA, 15 bp, Homo sapiens
atgtatctgagcaca

SEQ ID NO: 1071626 - DNA, 15 bp, Homo sapiens
aatgtatctgagcac

SEQ ID NO: 1071627 - DNA, 15 bp, Homo sapiens
gaatgtatctgagca

SEQ ID NO: 1071628 - DNA, 15 bp, Homo sapiens
agaatgtatctgagc

SEQ ID NO: 1071629 - DNA, 15 bp, Homo sapiens
gagaatgtatctgag

SEQ ID NO: 1071630 - DNA, 15 bp, Homo sapiens
tgagaatgtatctga

SEQ ID NO: 1071631 - DNA, 15 bp, Homo sapiens
ttgagaatgtatctg

SEQ ID NO: 1071632 - DNA, 15 bp, Homo sapiens
tttgagaatgtatct

SEQ ID NO: 1071633 - DNA, 15 bp, Homo sapiens
atttgagaatgtatc

SEQ ID NO: 1071634 - DNA, 15 bp, Homo sapiens
catttgagaatgtat

SEQ ID NO: 1071635 - DNA, 15 bp, Homo sapiens
tcatttgagaatgta

SEQ ID NO: 1071636 - DNA, 15 bp, Homo sapiens
ttcatttgagaatgt

SEQ ID NO: 1071637 - DNA, 15 bp, Homo sapiens
gttcatttgagaatg

SEQ ID NO: 1071638 - DNA, 15 bp, Homo sapiens
tgttcatttgagaat

SEQ ID NO: 1071639 - DNA, 15 bp, Homo sapiens
ctgttcatttgagaa

SEQ ID NO: 1071640 - DNA, 15 bp, Homo sapiens
gctgttcatttgaga

SEQ ID NO: 1071641 - DNA, 15 bp, Homo sapiens
agctgttcatttgag

SEQ ID NO: 1071642 - DNA, 15 bp, Homo sapiens
gagctgttcatttga

SEQ ID NO: 1071643 - DNA, 15 bp, Homo sapiens
agagctgttcatttg

SEQ ID NO: 1071644 - DNA, 15 bp, Homo sapiens
gagagctgttcattt

SEQ ID NO: 1071645 - DNA, 15 bp, Homo sapiens
ggagagctgttcatt

SEQ ID NO: 1071646 - DNA, 15 bp, Homo sapiens
aggagagctgttcat

SEQ ID NO: 1071647 - DNA, 15 bp, Homo sapiens
caggagagctgttca

SEQ ID NO: 1071648 - DNA, 15 bp, Homo sapiens
acaggagagctgttc

SEQ ID NO: 1071649 - DNA, 15 bp, Homo sapiens
cacaggagagctgtt

SEQ ID NO: 1071650 - DNA, 15 bp, Homo sapiens
tcacaggagagctgt

SEQ ID NO: 1071651 - DNA, 15 bp, Homo sapiens
gtcacaggagagctg

SEQ ID NO: 1071652 - DNA, 15 bp, Homo sapiens
tgtcacaggagagct

SEQ ID NO: 1071653 - DNA, 15 bp, Homo sapiens
ttgtcacaggagagc

SEQ ID NO: 1071654 - DNA, 15 bp, Homo sapiens
cttgtcacaggagag

SEQ ID NO: 1071655 - DNA, 15 bp, Homo sapiens
ccttgtcacaggaga

SEQ ID NO: 1071656 - DNA, 15 bp, Homo sapiens
tccttgtcacaggag

SEQ ID NO: 1071657 - DNA, 15 bp, Homo sapiens
gtccttgtcacagga

SEQ ID NO: 1071658 - DNA, 15 bp, Homo sapiens
tgtccttgtcacagg

SEQ ID NO: 1071659 - DNA, 15 bp, Homo sapiens
gtgtccttgtcacag

SEQ ID NO: 1071660 - DNA, 15 bp, Homo sapiens
cgtgtccttgtcaca

SEQ ID NO: 1071661 - DNA, 15 bp, Homo sapiens
acgtgtccttgtcac

SEQ ID NO: 1071662 - DNA, 15 bp, Homo sapiens
aacgtgtccttgtca

SEQ ID NO: 1071663 - DNA, 15 bp, Homo sapiens
gaacgtgtccttgtc

SEQ ID NO: 1071664 - DNA, 15 bp, Homo sapiens
cgaacgtgtccttgt

SEQ ID NO: 1071665 - DNA, 15 bp, Homo sapiens
ccgaacgtgtccttg

SEQ ID NO: 1071666 - DNA, 15 bp, Homo sapiens
accgaacgtgtcctt

SEQ ID NO: 1071667 - DNA, 15 bp, Homo sapiens
gaccgaacgtgtcct

SEQ ID NO: 1071668 - DNA, 15 bp, Homo sapiens
ggaccgaacgtgtcc

SEQ ID NO: 1071669 - DNA, 15 bp, Homo sapiens
gggaccgaacgtgtc

SEQ ID NO: 1071670 - DNA, 15 bp, Homo sapiens
ggggaccgaacgtgt

SEQ ID NO: 1071671 - DNA, 15 bp, Homo sapiens
tggggaccgaacgtg

SEQ ID NO: 1071672 - DNA, 15 bp, Homo sapiens
gtggggaccgaacgt

SEQ ID NO: 1071673 - DNA, 15 bp, Homo sapiens
agtggggaccgaacg

SEQ ID NO: 1071674 - DNA, 15 bp, Homo sapiens
aagtggggaccgaac

SEQ ID NO: 1071675 - DNA, 15 bp, Homo sapiens
aaagtggggaccgaa

SEQ ID NO: 1071676 - DNA, 15 bp, Homo sapiens
taaagtggggaccga

SEQ ID NO: 1071677 - DNA, 15 bp, Homo sapiens
gtaaagtggggaccg

SEQ ID NO: 1071678 - DNA, 15 bp, Homo sapiens
tgtaaagtggggacc

SEQ ID NO: 1071679 - DNA, 15 bp, Homo sapiens
ttgtaaagtggggac

SEQ ID NO: 1071680 - DNA, 15 bp, Homo sapiens
cttgtaaagtgggga

SEQ ID NO: 1071681 - DNA, 15 bp, Homo sapiens
acttgtaaagtgggg

SEQ ID NO: 1071682 - DNA, 15 bp, Homo sapiens
tacttgtaaagtggg

SEQ ID NO: 1071683 - DNA, 15 bp, Homo sapiens
ttacttgtaaagtgg

SEQ ID NO: 1071684 - DNA, 15 bp, Homo sapiens
cttacttgtaaagtg

SEQ ID NO: 1071685 - DNA, 15 bp, Homo sapiens
ccttacttgtaaagt

SEQ ID NO: 1071686 - DNA, 15 bp, Homo sapiens
cccttacttgtaaag

SEQ ID NO: 1071687 - DNA, 15 bp, Homo sapiens
tcccttacttgtaaa

SEQ ID NO: 1071688 - DNA, 15 bp, Homo sapiens
gtcccttacttgtaa

SEQ ID NO: 1071689 - DNA, 15 bp, Homo sapiens
tgtcccttacttgta

SEQ ID NO: 1071690 - DNA, 15 bp, Homo sapiens
gtgtcccttacttgt

SEQ ID NO: 1071691 - DNA, 15 bp, Homo sapiens
cgtgtcccttacttg

SEQ ID NO: 1071692 - DNA, 15 bp, Homo sapiens
ccgtgtcccttactt

SEQ ID NO: 1071693 - DNA, 15 bp, Homo sapiens
gccgtgtcccttact

SEQ ID NO: 1071694 - DNA, 15 bp, Homo sapiens
ggccgtgtcccttac

SEQ ID NO: 1071695 - DNA, 15 bp, Homo sapiens
aggccgtgtccctta

SEQ ID NO: 1071696 - DNA, 15 bp, Homo sapiens
gaggccgtgtccctt

SEQ ID NO: 1071697 - DNA, 15 bp, Homo sapiens
agaggccgtgtccct

SEQ ID NO: 1071698 - DNA, 15 bp, Homo sapiens
gagaggccgtgtccc

SEQ ID NO: 1071699 - DNA, 15 bp, Homo sapiens
tgagaggccgtgtcc

SEQ ID NO: 1071700 - DNA, 15 bp, Homo sapiens
ctgagaggccgtgtc

SEQ ID NO: 1071701 - DNA, 15 bp, Homo sapiens
gctgagaggccgtgt

SEQ ID NO: 1071702 - DNA, 15 bp, Homo sapiens
tgctgagaggccgtg

SEQ ID NO: 1071703 - DNA, 15 bp, Homo sapiens
ttgctgagaggccgt

SEQ ID NO: 1071704 - DNA, 15 bp, Homo sapiens
gttgctgagaggccg

SEQ ID NO: 1071705 - DNA, 15 bp, Homo sapiens
agttgctgagaggcc

SEQ ID NO: 1071706 - DNA, 15 bp, Homo sapiens
gagttgctgagaggc

SEQ ID NO: 1071707 - DNA, 15 bp, Homo sapiens
ggagttgctgagagg

SEQ ID NO: 1071708 - DNA, 15 bp, Homo sapiens
cggagttgctgagag

SEQ ID NO: 1071709 - DNA, 15 bp, Homo sapiens
ccggagttgctgaga

SEQ ID NO: 1071710 - DNA, 15 bp, Homo sapiens
cccggagttgctgag

SEQ ID NO: 1071711 - DNA, 15 bp, Homo sapiens
tcccggagttgctga

SEQ ID NO: 1071712 - DNA, 15 bp, Homo sapiens
gtcccggagttgctg

SEQ ID NO: 1071713 - DNA, 15 bp, Homo sapiens
agtcccggagttgct

SEQ ID NO: 1071714 - DNA, 15 bp, Homo sapiens
cagtcccggagttgc

SEQ ID NO: 1071715 - DNA, 15 bp, Homo sapiens
ccagtcccggagttg

SEQ ID NO: 1071716 - DNA, 15 bp, Homo sapiens
tccagtcccggagtt

SEQ ID NO: 1071717 - DNA, 15 bp, Homo sapiens
ctccagtcccggagt

SEQ ID NO: 1071718 - DNA, 15 bp, Homo sapiens
cctccagtcccggag

SEQ ID NO: 1071719 - DNA, 15 bp, Homo sapiens
ccctccagtcccgga

SEQ ID NO: 1071720 - DNA, 15 bp, Homo sapiens
gccctccagtcccgg

SEQ ID NO: 1071721 - DNA, 15 bp, Homo sapiens
agccctccagtcccg

SEQ ID NO: 1071722 - DNA, 15 bp, Homo sapiens
tagccctccagtccc

SEQ ID NO: 1071723 - DNA, 15 bp, Homo sapiens
ctagccctccagtcc

SEQ ID NO: 1071724 - DNA, 15 bp, Homo sapiens
cctagccctccagtc

SEQ ID NO: 1071725 - DNA, 15 bp, Homo sapiens
ccctagccctccagt

SEQ ID NO: 1071726 - DNA, 15 bp, Homo sapiens
gccctagccctccag

SEQ ID NO: 1071727 - DNA, 15 bp, Homo sapiens
tgccctagccctcca

SEQ ID NO: 1071728 - DNA, 15 bp, Homo sapiens
ctgccctagccctcc

SEQ ID NO: 1071729 - DNA, 15 bp, Homo sapiens
actgccctagccctc

SEQ ID NO: 1071730 - DNA, 15 bp, Homo sapiens
gactgccctagccct

SEQ ID NO: 1071731 - DNA, 15 bp, Homo sapiens
agactgccctagccc

SEQ ID NO: 1071732 - DNA, 15 bp, Homo sapiens
cagactgccctagcc

SEQ ID NO: 1071733 - DNA, 15 bp, Homo sapiens
ccagactgccctagc

SEQ ID NO: 1071734 - DNA, 15 bp, Homo sapiens
cccagactgccctag

SEQ ID NO: 1071735 - DNA, 15 bp, Homo sapiens
tcccagactgcccta

SEQ ID NO: 1071736 - DNA, 15 bp, Homo sapiens
atcccagactgccct

SEQ ID NO: 1071737 - DNA, 15 bp, Homo sapiens
catcccagactgccc

SEQ ID NO: 1071738 - DNA, 15 bp, Homo sapiens
gcatcccagactgcc

SEQ ID NO: 1071739 - DNA, 15 bp, Homo sapiens
ggcatcccagactgc

SEQ ID NO: 1071740 - DNA, 15 bp, Homo sapiens
aggcatcccagactg

SEQ ID NO: 1071741 - DNA, 15 bp, Homo sapiens
gaggcatcccagact

SEQ ID NO: 1071742 - DNA, 15 bp, Homo sapiens
tgaggcatcccagac

SEQ ID NO: 1071743 - DNA, 15 bp, Homo sapiens
atgaggcatcccaga

SEQ ID NO: 1071744 - DNA, 15 bp, Homo sapiens
gatgaggcatcccag

SEQ ID NO: 1071745 - DNA, 15 bp, Homo sapiens
ggatgaggcatccca

SEQ ID NO: 1071746 - DNA, 15 bp, Homo sapiens
aggatgaggcatccc

SEQ ID NO: 1071747 - DNA, 15 bp, Homo sapiens
caggatgaggcatcc

SEQ ID NO: 1071748 - DNA, 15 bp, Homo sapiens
gcaggatgaggcatc

SEQ ID NO: 1071749 - DNA, 15 bp, Homo sapiens
tgcaggatgaggcat

SEQ ID NO: 1071750 - DNA, 15 bp, Homo sapiens
ttgcaggatgaggca

SEQ ID NO: 1071751 - DNA, 15 bp, Homo sapiens
attgcaggatgaggc

SEQ ID NO: 1071752 - DNA, 15 bp, Homo sapiens
cattgcaggatgagg

SEQ ID NO: 1071753 - DNA, 15 bp, Homo sapiens
ccattgcaggatgag

SEQ ID NO: 1071754 - DNA, 15 bp, Homo sapiens
tccattgcaggatga

SEQ ID NO: 1071755 - DNA, 15 bp, Homo sapiens
ctccattgcaggatg

SEQ ID NO: 1071756 - DNA, 15 bp, Homo sapiens
actccattgcaggat

SEQ ID NO: 1071757 - DNA, 15 bp, Homo sapiens
gactccattgcagga

SEQ ID NO: 1071758 - DNA, 15 bp, Homo sapiens
ggactccattgcagg

SEQ ID NO: 1071759 - DNA, 15 bp, Homo sapiens
cggactccattgcag

SEQ ID NO: 1071760 - DNA, 15 bp, Homo sapiens
gcggactccattgca

SEQ ID NO: 1071761 - DNA, 15 bp, Homo sapiens
ggcggactccattgc

SEQ ID NO: 1071762 - DNA, 15 bp, Homo sapiens
aggcggactccattg

SEQ ID NO: 1071763 - DNA, 15 bp, Homo sapiens
taggcggactccatt

SEQ ID NO: 1071764 - DNA, 15 bp, Homo sapiens
ataggcggactccat

SEQ ID NO: 1071765 - DNA, 15 bp, Homo sapiens
cataggcggactcca

SEQ ID NO: 1071766 - DNA, 15 bp, Homo sapiens
tcataggcggactcc

SEQ ID NO: 1071767 - DNA, 15 bp, Homo sapiens
gtcataggcggactc

SEQ ID NO: 1071768 - DNA, 15 bp, Homo sapiens
tgtcataggcggact

SEQ ID NO: 1071769 - DNA, 15 bp, Homo sapiens
ttgtcataggcggac

SEQ ID NO: 1071770 - DNA, 15 bp, Homo sapiens
gttgtcataggcgga

SEQ ID NO: 1071771 - DNA, 15 bp, Homo sapiens
cgttgtcataggcgg

SEQ ID NO: 1071772 - DNA, 15 bp, Homo sapiens
acgttgtcataggcg

SEQ ID NO: 1071773 - DNA, 15 bp, Homo sapiens
tacgttgtcataggc

SEQ ID NO: 1071774 - DNA, 15 bp, Homo sapiens
ctacgttgtcatagg

SEQ ID NO: 1071775 - DNA, 15 bp, Homo sapiens
tctacgttgtcatag

SEQ ID NO: 1071776 - DNA, 15 bp, Homo sapiens
ttctacgttgtcata

SEQ ID NO: 1071777 - DNA, 15 bp, Homo sapiens
cttctacgttgtcat

SEQ ID NO: 1071778 - DNA, 15 bp, Homo sapiens
gcttctacgttgtca

SEQ ID NO: 1071779 - DNA, 15 bp, Homo sapiens
agcttctacgttgtc

SEQ ID NO: 1071780 - DNA, 15 bp, Homo sapiens
gagcttctacgttgt

SEQ ID NO: 1071781 - DNA, 15 bp, Homo sapiens
agagcttctacgttg

SEQ ID NO: 1071782 - DNA, 15 bp, Homo sapiens
gagagcttctacgtt

SEQ ID NO: 1071783 - DNA, 15 bp, Homo sapiens
agagagcttctacgt

SEQ ID NO: 1071784 - DNA, 15 bp, Homo sapiens
cagagagcttctacg

SEQ ID NO: 1071785 - DNA, 15 bp, Homo sapiens
ccagagagcttctac

SEQ ID NO: 1071786 - DNA, 15 bp, Homo sapiens
cccagagagcttcta

SEQ ID NO: 1071787 - DNA, 15 bp, Homo sapiens
tcccagagagcttct

SEQ ID NO: 1071788 - DNA, 15 bp, Homo sapiens
ctcccagagagcttc

SEQ ID NO: 1071789 - DNA, 15 bp, Homo sapiens
cctcccagagagctt

SEQ ID NO: 1071790 - DNA, 15 bp, Homo sapiens
tcctcccagagagct

SEQ ID NO: 1071791 - DNA, 15 bp, Homo sapiens
ttcctcccagagagc

SEQ ID NO: 1071792 - DNA, 15 bp, Homo sapiens
tttcctcccagagag

SEQ ID NO: 1071793 - DNA, 15 bp, Homo sapiens
ttttcctcccagaga

SEQ ID NO: 1071794 - DNA, 15 bp, Homo sapiens
cttttcctcccagag

SEQ ID NO: 1071795 - DNA, 15 bp, Homo sapiens
ccttttcctcccaga

SEQ ID NO: 1071796 - DNA, 15 bp, Homo sapiens
cccttttcctcccag

SEQ ID NO: 1071797 - DNA, 15 bp, Homo sapiens
tcccttttcctccca

SEQ ID NO: 1071798 - DNA, 15 bp, Homo sapiens
ttcccttttcctccc

SEQ ID NO: 1071799 - DNA, 15 bp, Homo sapiens
cttcccttttcctcc

SEQ ID NO: 1071800 - DNA, 15 bp, Homo sapiens
gcttcccttttcctc

SEQ ID NO: 1071801 - DNA, 15 bp, Homo sapiens
cgcttcccttttcct

SEQ ID NO: 1071802 - DNA, 15 bp, Homo sapiens
ccgcttcccttttcc

SEQ ID NO: 1071803 - DNA, 15 bp, Homo sapiens
accgcttcccttttc

SEQ ID NO: 1071804 - DNA, 15 bp, Homo sapiens
aaccgcttccctttt

SEQ ID NO: 1071805 - DNA, 15 bp, Homo sapiens
aaaccgcttcccttt

SEQ ID NO: 1071806 - DNA, 15 bp, Homo sapiens
caaaccgcttccctt

SEQ ID NO: 1071807 - DNA, 15 bp, Homo sapiens
ccaaaccgcttccct

SEQ ID NO: 1071808 - DNA, 15 bp, Homo sapiens
cccaaaccgcttccc

SEQ ID NO: 1071809 - DNA, 15 bp, Homo sapiens
tcccaaaccgcttcc

SEQ ID NO: 1071810 - DNA, 15 bp, Homo sapiens
ctcccaaaccgcttc

SEQ ID NO: 1071811 - DNA, 15 bp, Homo sapiens
actcccaaaccgctt

SEQ ID NO: 1071812 - DNA, 15 bp, Homo sapiens
aactcccaaaccgct

SEQ ID NO: 1071813 - DNA, 15 bp, Homo sapiens
aaactcccaaaccgc

SEQ ID NO: 1071814 - DNA, 15 bp, Homo sapiens
gaaactcccaaaccg

SEQ ID NO: 1071815 - DNA, 15 bp, Homo sapiens
agaaactcccaaacc

SEQ ID NO: 1071816 - DNA, 15 bp, Homo sapiens
tagaaactcccaaac

SEQ ID NO: 1071817 - DNA, 15 bp, Homo sapiens
ctagaaactcccaaa

SEQ ID NO: 1071818 - DNA, 15 bp, Homo sapiens
tctagaaactcccaa

SEQ ID NO: 1071819 - DNA, 15 bp, Homo sapiens
ttctagaaactccca

SEQ ID NO: 1071820 - DNA, 15 bp, Homo sapiens
cttctagaaactccc

SEQ ID NO: 1071821 - DNA, 15 bp, Homo sapiens
acttctagaaactcc

SEQ ID NO: 1071822 - DNA, 15 bp, Homo sapiens
gacttctagaaactc

SEQ ID NO: 1071823 - DNA, 15 bp, Homo sapiens
agacttctagaaact

SEQ ID NO: 1071824 - DNA, 15 bp, Homo sapiens
tagacttctagaaac

SEQ ID NO: 1071825 - DNA, 15 bp, Homo sapiens
gtagacttctagaaa

SEQ ID NO: 1071826 - DNA, 15 bp, Homo sapiens
ggtagacttctagaa

SEQ ID NO: 1071827 - DNA, 15 bp, Homo sapiens
aggtagacttctaga

SEQ ID NO: 1071828 - DNA, 15 bp, Homo sapiens
gaggtagacttctag

SEQ ID NO: 1071829 - DNA, 15 bp, Homo sapiens
agaggtagacttcta

SEQ ID NO: 1071830 - DNA, 15 bp, Homo sapiens
cagaggtagacttct

SEQ ID NO: 1071831 - DNA, 15 bp, Homo sapiens
gcagaggtagacttc

SEQ ID NO: 1071832 - DNA, 15 bp, Homo sapiens
tgcagaggtagactt

SEQ ID NO: 1071833 - DNA, 15 bp, Homo sapiens
ctgcagaggtagact

SEQ ID NO: 1071834 - DNA, 15 bp, Homo sapiens
gctgcagaggtagac

SEQ ID NO: 1071835 - DNA, 15 bp, Homo sapiens
tgctgcagaggtaga

SEQ ID NO: 1071836 - DNA, 15 bp, Homo sapiens
ttgctgcagaggtag

SEQ ID NO: 1071837 - DNA, 15 bp, Homo sapiens
gttgctgcagaggta

SEQ ID NO: 1071838 - DNA, 15 bp, Homo sapiens
tgttgctgcagaggt

SEQ ID NO: 1071839 - DNA, 15 bp, Homo sapiens
atgttgctgcagagg

SEQ ID NO: 1071840 - DNA, 15 bp, Homo sapiens
aatgttgctgcagag

SEQ ID NO: 1071841 - DNA, 15 bp, Homo sapiens
aaatgttgctgcaga

SEQ ID NO: 1071842 - DNA, 15 bp, Homo sapiens
caaatgttgctgcag

SEQ ID NO: 1071843 - DNA, 15 bp, Homo sapiens
ccaaatgttgctgca

SEQ ID NO: 1071844 - DNA, 15 bp, Homo sapiens
gccaaatgttgctgc

SEQ ID NO: 1071845 - DNA, 15 bp, Homo sapiens
ggccaaatgttgctg

SEQ ID NO: 1071846 - DNA, 15 bp, Homo sapiens
tggccaaatgttgct

SEQ ID NO: 1071847 - DNA, 15 bp, Homo sapiens
ttggccaaatgttgc

SEQ ID NO: 1071848 - DNA, 15 bp, Homo sapiens
gttggccaaatgttg

SEQ ID NO: 1071849 - DNA, 15 bp, Homo sapiens
ggttggccaaatgtt

SEQ ID NO: 1071850 - DNA, 15 bp, Homo sapiens
tggttggccaaatgt

SEQ ID NO: 1071851 - DNA, 15 bp, Homo sapiens
ttggttggccaaatg

SEQ ID NO: 1071852 - DNA, 15 bp, Homo sapiens
tttggttggccaaat

SEQ ID NO: 1071853 - DNA, 15 bp, Homo sapiens
ctttggttggccaaa

SEQ ID NO: 1071854 - DNA, 15 bp, Homo sapiens
tctttggttggccaa

SEQ ID NO: 1071855 - DNA, 15 bp, Homo sapiens
ttctttggttggcca

SEQ ID NO: 1071856 - DNA, 15 bp, Homo sapiens
tttctttggttggcc

SEQ ID NO: 1071857 - DNA, 15 bp, Homo sapiens
ctttctttggttggc

SEQ ID NO: 1071858 - DNA, 15 bp, Homo sapiens
cctttctttggttgg

SEQ ID NO: 1071859 - DNA, 15 bp, Homo sapiens
acctttctttggttg

SEQ ID NO: 1071860 - DNA, 15 bp, Homo sapiens
aacctttctttggtt

SEQ ID NO: 1071861 - DNA, 15 bp, Homo sapiens
aaacctttctttggt

SEQ ID NO: 1071862 - DNA, 15 bp, Homo sapiens
aaaacctttctttgg

SEQ ID NO: 1071863 - DNA, 15 bp, Homo sapiens
gaaaacctttctttg

SEQ ID NO: 1071864 - DNA, 15 bp, Homo sapiens
cgaaaacctttcttt

SEQ ID NO: 1071865 - DNA, 15 bp, Homo sapiens
tcgaaaacctttctt

SEQ ID NO: 1071866 - DNA, 15 bp, Homo sapiens
atcgaaaacctttct

SEQ ID NO: 1071867 - DNA, 15 bp, Homo sapiens
aatcgaaaacctttc

SEQ ID NO: 1071868 - DNA, 15 bp, Homo sapiens
aaatcgaaaaccttt

SEQ ID NO: 1071869 - DNA, 15 bp, Homo sapiens
caaatcgaaaacctt

SEQ ID NO: 1071870 - DNA, 15 bp, Homo sapiens
acaaatcgaaaacct

SEQ ID NO: 1071871 - DNA, 15 bp, Homo sapiens
aacaaatcgaaaacc

SEQ ID NO: 1071872 - DNA, 15 bp, Homo sapiens
aaacaaatcgaaaac

SEQ ID NO: 1071873 - DNA, 15 bp, Homo sapiens
aaaacaaatcgaaaa

SEQ ID NO: 1071874 - DNA, 15 bp, Homo sapiens
taaaacaaatcgaaa

SEQ ID NO: 1071875 - DNA, 15 bp, Homo sapiens
ataaaacaaatcgaa

SEQ ID NO: 1071876 - DNA, 15 bp, Homo sapiens
aataaaacaaatcga

SEQ ID NO: 1071877 - DNA, 15 bp, Homo sapiens
aaataaaacaaatcg

SEQ ID NO: 1071878 - DNA, 15 bp, Homo sapiens
aaaataaaacaaatc

SEQ ID NO: 1071879 - DNA, 15 bp, Homo sapiens
caaaataaaacaaat

SEQ ID NO: 1071880 - DNA, 15 bp, Homo sapiens
tcaaaataaaacaaa

SEQ ID NO: 1071881 - DNA, 15 bp, Homo sapiens
ctcaaaataaaacaa

SEQ ID NO: 1071882 - DNA, 15 bp, Homo sapiens
tctcaaaataaaaca

SEQ ID NO: 1071883 - DNA, 15 bp, Homo sapiens
ttctcaaaataaaac

SEQ ID NO: 1071884 - DNA, 15 bp, Homo sapiens
tttctcaaaataaaa

SEQ ID NO: 1071885 - DNA, 15 bp, Homo sapiens
ctttctcaaaataaa

SEQ ID NO: 1071886 - DNA, 15 bp, Homo sapiens
cctttctcaaaataa

SEQ ID NO: 1071887 - DNA, 15 bp, Homo sapiens
acctttctcaaaata

SEQ ID NO: 1071888 - DNA, 15 bp, Homo sapiens
aacctttctcaaaat

SEQ ID NO: 1071889 - DNA, 15 bp, Homo sapiens
gaacctttctcaaaa

SEQ ID NO: 1071890 - DNA, 15 bp, Homo sapiens
ggaacctttctcaaa

SEQ ID NO: 1071891 - DNA, 15 bp, Homo sapiens
aggaacctttctcaa

SEQ ID NO: 1071892 - DNA, 15 bp, Homo sapiens
caggaacctttctca

SEQ ID NO: 1071893 - DNA, 15 bp, Homo sapiens
ccaggaacctttctc

SEQ ID NO: 1071894 - DNA, 15 bp, Homo sapiens
tccaggaacctttct

SEQ ID NO: 1071895 - DNA, 15 bp, Homo sapiens
ttccaggaacctttc

SEQ ID NO: 1071896 - DNA, 15 bp, Homo sapiens
cttccaggaaccttt

SEQ ID NO: 1071897 - DNA, 15 bp, Homo sapiens
tcttccaggaacctt

SEQ ID NO: 1071898 - DNA, 15 bp, Homo sapiens
gtcttccaggaacct

SEQ ID NO: 1071899 - DNA, 15 bp, Homo sapiens
ggtcttccaggaacc

SEQ ID NO: 1071900 - DNA, 15 bp, Homo sapiens
gggtcttccaggaac

SEQ ID NO: 1071901 - DNA, 15 bp, Homo sapiens
ggggtcttccaggaa

SEQ ID NO: 1071902 - DNA, 15 bp, Homo sapiens
gggggtcttccagga

SEQ ID NO: 1071903 - DNA, 15 bp, Homo sapiens
ggggggtcttccagg

SEQ ID NO: 1071904 - DNA, 15 bp, Homo sapiens
gggggggtcttccag

SEQ ID NO: 1071905 - DNA, 15 bp, Homo sapiens
tgggggggtcttcca

SEQ ID NO: 1071906 - DNA, 15 bp, Homo sapiens
gtgggggggtcttcc

SEQ ID NO: 1071907 - DNA, 15 bp, Homo sapiens
ggtgggggggtcttc

SEQ ID NO: 1071908 - DNA, 15 bp, Homo sapiens
gggtgggggggtctt

SEQ ID NO: 1071909 - DNA, 15 bp, Homo sapiens
ggggtgggggggtct

SEQ ID NO: 1071910 - DNA, 15 bp, Homo sapiens
tggggtgggggggtc

SEQ ID NO: 1071911 - DNA, 15 bp, Homo sapiens
gtggggtgggggggt

SEQ ID NO: 1071912 - DNA, 15 bp, Homo sapiens
ggtggggtggggggg

SEQ ID NO: 1071913 - DNA, 15 bp, Homo sapiens
gggtggggtgggggg

SEQ ID NO: 1071914 - DNA, 15 bp, Homo sapiens
tgggtggggtggggg

SEQ ID NO: 1071915 - DNA, 15 bp, Homo sapiens
ctgggtggggtgggg

SEQ ID NO: 1071916 - DNA, 15 bp, Homo sapiens
cctgggtggggtggg

SEQ ID NO: 1071917 - DNA, 15 bp, Homo sapiens
ccctgggtggggtgg

SEQ ID NO: 1071918 - DNA, 15 bp, Homo sapiens
accctgggtggggtg

SEQ ID NO: 1071919 - DNA, 15 bp, Homo sapiens
caccctgggtggggt

SEQ ID NO: 1071920 - DNA, 15 bp, Homo sapiens
ccaccctgggtgggg

SEQ ID NO: 1071921 - DNA, 15 bp, Homo sapiens
tccaccctgggtggg

SEQ ID NO: 1071922 - DNA, 15 bp, Homo sapiens
ctccaccctgggtgg

SEQ ID NO: 1071923 - DNA, 15 bp, Homo sapiens
tctccaccctgggtg

SEQ ID NO: 1071924 - DNA, 15 bp, Homo sapiens
gtctccaccctgggt

SEQ ID NO: 1071925 - DNA, 15 bp, Homo sapiens
cgtctccaccctggg

SEQ ID NO: 1071926 - DNA, 15 bp, Homo sapiens
acgtctccaccctgg

SEQ ID NO: 1071927 - DNA, 15 bp, Homo sapiens
gacgtctccaccctg

SEQ ID NO: 1071928 - DNA, 15 bp, Homo sapiens
ggacgtctccaccct

SEQ ID NO: 1071929 - DNA, 15 bp, Homo sapiens
tggacgtctccaccc

SEQ ID NO: 1071930 - DNA, 15 bp, Homo sapiens
gtggacgtctccacc

SEQ ID NO: 1071931 - DNA, 15 bp, Homo sapiens
ggtggacgtctccac

SEQ ID NO: 1071932 - DNA, 15 bp, Homo sapiens
aggtggacgtctcca

SEQ ID NO: 1071933 - DNA, 15 bp, Homo sapiens
caggtggacgtctcc

SEQ ID NO: 1071934 - DNA, 15 bp, Homo sapiens
ccaggtggacgtctc

SEQ ID NO: 1071935 - DNA, 15 bp, Homo sapiens
gccaggtggacgtct

SEQ ID NO: 1071936 - DNA, 15 bp, Homo sapiens
tgccaggtggacgtc

SEQ ID NO: 1071937 - DNA, 15 bp, Homo sapiens
ctgccaggtggacgt

SEQ ID NO: 1071938 - DNA, 15 bp, Homo sapiens
gctgccaggtggacg

SEQ ID NO: 1071939 - DNA, 15 bp, Homo sapiens
cgctgccaggtggac

SEQ ID NO: 1071940 - DNA, 15 bp, Homo sapiens
gcgctgccaggtgga

SEQ ID NO: 1071941 - DNA, 15 bp, Homo sapiens
ggcgctgccaggtgg

SEQ ID NO: 1071942 - DNA, 15 bp, Homo sapiens
aggcgctgccaggtg

SEQ ID NO: 1071943 - DNA, 15 bp, Homo sapiens
gaggcgctgccaggt

SEQ ID NO: 1071944 - DNA, 15 bp, Homo sapiens
cgaggcgctgccagg

SEQ ID NO: 1071945 - DNA, 15 bp, Homo sapiens
ccgaggcgctgccag

SEQ ID NO: 1071946 - DNA, 15 bp, Homo sapiens
gccgaggcgctgcca

SEQ ID NO: 1071947 - DNA, 15 bp, Homo sapiens
ggccgaggcgctgcc

SEQ ID NO: 1071948 - DNA, 15 bp, Homo sapiens
gggccgaggcgctgc

SEQ ID NO: 1071949 - DNA, 15 bp, Homo sapiens
tgggccgaggcgctg

SEQ ID NO: 1071950 - DNA, 15 bp, Homo sapiens
ctgggccgaggcgct

SEQ ID NO: 1071951 - DNA, 15 bp, Homo sapiens
gctgggccgaggcgc

SEQ ID NO: 1071952 - DNA, 15 bp, Homo sapiens
agctgggccgaggcg

SEQ ID NO: 1071953 - DNA, 15 bp, Homo sapiens
gagctgggccgaggc

SEQ ID NO: 1071954 - DNA, 15 bp, Homo sapiens
ggagctgggccgagg

SEQ ID NO: 1071955 - DNA, 15 bp, Homo sapiens
cggagctgggccgag

SEQ ID NO: 1071956 - DNA, 15 bp, Homo sapiens
ccggagctgggccga

SEQ ID NO: 1071957 - DNA, 15 bp, Homo sapiens
gccggagctgggccg

SEQ ID NO: 1071958 - DNA, 15 bp, Homo sapiens
ggccggagctgggcc

SEQ ID NO: 1071959 - DNA, 15 bp, Homo sapiens
aggccggagctgggc

SEQ ID NO: 1071960 - DNA, 15 bp, Homo sapiens
caggccggagctggg

SEQ ID NO: 1071961 - DNA, 15 bp, Homo sapiens
tcaggccggagctgg

SEQ ID NO: 1071962 - DNA, 15 bp, Homo sapiens
gtcaggccggagctg

SEQ ID NO: 1071963 - DNA, 15 bp, Homo sapiens
ggtcaggccggagct

SEQ ID NO: 1071964 - DNA, 15 bp, Homo sapiens
tggtcaggccggagc

SEQ ID NO: 1071965 - DNA, 15 bp, Homo sapiens
gtggtcaggccggag

SEQ ID NO: 1071966 - DNA, 15 bp, Homo sapiens
ggtggtcaggccgga

SEQ ID NO: 1071967 - DNA, 15 bp, Homo sapiens
gggtggtcaggccgg

SEQ ID NO: 1071968 - DNA, 15 bp, Homo sapiens
tgggtggtcaggccg

SEQ ID NO: 1071969 - DNA, 15 bp, Homo sapiens
ctgggtggtcaggcc

SEQ ID NO: 1071970 - DNA, 15 bp, Homo sapiens
cctgggtggtcaggc

SEQ ID NO: 1071971 - DNA, 15 bp, Homo sapiens
acctgggtggtcagg

SEQ ID NO: 1071972 - DNA, 15 bp, Homo sapiens
aacctgggtggtcag

SEQ ID NO: 1071973 - DNA, 15 bp, Homo sapiens
gaacctgggtggtca

SEQ ID NO: 1071974 - DNA, 15 bp, Homo sapiens
tgaacctgggtggtc

SEQ ID NO: 1071975 - DNA, 15 bp, Homo sapiens
atgaacctgggtggt

SEQ ID NO: 1071976 - DNA, 15 bp, Homo sapiens
gatgaacctgggtgg

SEQ ID NO: 1071977 - DNA, 15 bp, Homo sapiens
agatgaacctgggtg

SEQ ID NO: 1071978 - DNA, 15 bp, Homo sapiens
gagatgaacctgggt

SEQ ID NO: 1071979 - DNA, 15 bp, Homo sapiens
ggagatgaacctggg

SEQ ID NO: 1071980 - DNA, 15 bp, Homo sapiens
gggagatgaacctgg

SEQ ID NO: 1071981 - DNA, 15 bp, Homo sapiens
ggggagatgaacctg

SEQ ID NO: 1071982 - DNA, 15 bp, Homo sapiens
gggggagatgaacct

SEQ ID NO: 1071983 - DNA, 15 bp, Homo sapiens
agggggagatgaacc

SEQ ID NO: 1071984 - DNA, 15 bp, Homo sapiens
cagggggagatgaac

SEQ ID NO: 1071985 - DNA, 15 bp, Homo sapiens
gcagggggagatgaa

SEQ ID NO: 1071986 - DNA, 15 bp, Homo sapiens
ggcagggggagatga

SEQ ID NO: 1071987 - DNA, 15 bp, Homo sapiens
gggcagggggagatg

SEQ ID NO: 1071988 - DNA, 15 bp, Homo sapiens
cgggcagggggagat

SEQ ID NO: 1071989 - DNA, 15 bp, Homo sapiens
gcgggcagggggaga

SEQ ID NO: 1071990 - DNA, 15 bp, Homo sapiens
ggcgggcagggggag

SEQ ID NO: 1071991 - DNA, 15 bp, Homo sapiens
cggcgggcaggggga

SEQ ID NO: 1071992 - DNA, 15 bp, Homo sapiens
gcggcgggcaggggg

SEQ ID NO: 1071993 - DNA, 15 bp, Homo sapiens
ggcggcgggcagggg

SEQ ID NO: 1071994 - DNA, 15 bp, Homo sapiens
aggcggcgggcaggg

SEQ ID NO: 1071995 - DNA, 15 bp, Homo sapiens
gaggcggcgggcagg

SEQ ID NO: 1071996 - DNA, 15 bp, Homo sapiens
ggaggcggcgggcag

SEQ ID NO: 1071997 - DNA, 15 bp, Homo sapiens
gggaggcggcgggca

SEQ ID NO: 1071998 - DNA, 15 bp, Homo sapiens
tgggaggcggcgggc

SEQ ID NO: 1071999 - DNA, 15 bp, Homo sapiens
gtgggaggcggcggg

SEQ ID NO: 1072000 - DNA, 15 bp, Homo sapiens
ggtgggaggcggcgg

SEQ ID NO: 1072001 - DNA, 15 bp, Homo sapiens
gggtgggaggcggcg

SEQ ID NO: 1072002 - DNA, 15 bp, Homo sapiens
ggggtgggaggcggc

SEQ ID NO: 1072003 - DNA, 15 bp, Homo sapiens
gggggtgggaggcgg

SEQ ID NO: 1072004 - DNA, 15 bp, Homo sapiens
ggggggtgggaggcg

SEQ ID NO: 1072005 - DNA, 15 bp, Homo sapiens
cggggggtgggaggc

SEQ ID NO: 1072006 - DNA, 15 bp, Homo sapiens
gcggggggtgggagg

SEQ ID NO: 1072007 - DNA, 15 bp, Homo sapiens
ggcggggggtgggag

SEQ ID NO: 1072008 - DNA, 15 bp, Homo sapiens
tggcggggggtggga

SEQ ID NO: 1072009 - DNA, 15 bp, Homo sapiens
ctggcggggggtggg

SEQ ID NO: 1072010 - DNA, 15 bp, Homo sapiens
cctggcggggggtgg

SEQ ID NO: 1072011 - DNA, 15 bp, Homo sapiens
gcctggcggggggtg

SEQ ID NO: 1072012 - DNA, 15 bp, Homo sapiens
ggcctggcggggggt

SEQ ID NO: 1072013 - DNA, 15 bp, Homo sapiens
gggcctggcgggggg

SEQ ID NO: 1072014 - DNA, 15 bp, Homo sapiens
ggggcctggcggggg

SEQ ID NO: 1072015 - DNA, 15 bp, Homo sapiens
aggggcctggcgggg

SEQ ID NO: 1072016 - DNA, 15 bp, Homo sapiens
gaggggcctggcggg

SEQ ID NO: 1072017 - DNA, 15 bp, Homo sapiens
ggaggggcctggcgg

SEQ ID NO: 1072018 - DNA, 15 bp, Homo sapiens
aggaggggcctggcg

SEQ ID NO: 1072019 - DNA, 15 bp, Homo sapiens
gaggaggggcctggc

SEQ ID NO: 1072020 - DNA, 15 bp, Homo sapiens
ggaggaggggcctgg

SEQ ID NO: 1072021 - DNA, 15 bp, Homo sapiens
tggaggaggggcctg

SEQ ID NO: 1072022 - DNA, 15 bp, Homo sapiens
ctggaggaggggcct

SEQ ID NO: 1072023 - DNA, 15 bp, Homo sapiens
gctggaggaggggcc

SEQ ID NO: 1072024 - DNA, 15 bp, Homo sapiens
ggctggaggaggggc

SEQ ID NO: 1072025 - DNA, 15 bp, Homo sapiens
cggctggaggagggg

SEQ ID NO: 1072026 - DNA, 15 bp, Homo sapiens
acggctggaggaggg

SEQ ID NO: 1072027 - DNA, 15 bp, Homo sapiens
gacggctggaggagg

SEQ ID NO: 1072028 - DNA, 15 bp, Homo sapiens
agacggctggaggag

SEQ ID NO: 1072029 - DNA, 15 bp, Homo sapiens
cagacggctggagga

SEQ ID NO: 1072030 - DNA, 15 bp, Homo sapiens
acagacggctggagg

SEQ ID NO: 1072031 - DNA, 15 bp, Homo sapiens
cacagacggctggag

SEQ ID NO: 1072032 - DNA, 15 bp, Homo sapiens
tcacagacggctgga

SEQ ID NO: 1072033 - DNA, 15 bp, Homo sapiens
ttcacagacggctgg

SEQ ID NO: 1072034 - DNA, 15 bp, Homo sapiens
attcacagacggctg

SEQ ID NO: 1072035 - DNA, 15 bp, Homo sapiens
gattcacagacggct

SEQ ID NO: 1072036 - DNA, 15 bp, Homo sapiens
ggattcacagacggc

SEQ ID NO: 1072037 - DNA, 15 bp, Homo sapiens
tggattcacagacgg

SEQ ID NO: 1072038 - DNA, 15 bp, Homo sapiens
ctggattcacagacg

SEQ ID NO: 1072039 - DNA, 15 bp, Homo sapiens
gctggattcacagac

SEQ ID NO: 1072040 - DNA, 15 bp, Homo sapiens
ggctggattcacaga

SEQ ID NO: 1072041 - DNA, 15 bp, Homo sapiens
gggctggattcacag

SEQ ID NO: 1072042 - DNA, 15 bp, Homo sapiens
tgggctggattcaca

SEQ ID NO: 1072043 - DNA, 15 bp, Homo sapiens
atgggctggattcac

SEQ ID NO: 1072044 - DNA, 15 bp, Homo sapiens
aatgggctggattca

SEQ ID NO: 1072045 - DNA, 15 bp, Homo sapiens
aaatgggctggattc

SEQ ID NO: 1072046 - DNA, 15 bp, Homo sapiens
taaatgggctggatt

SEQ ID NO: 1072047 - DNA, 15 bp, Homo sapiens
ttaaatgggctggat

SEQ ID NO: 1072048 - DNA, 15 bp, Homo sapiens
tttaaatgggctgga

SEQ ID NO: 1072049 - DNA, 15 bp, Homo sapiens
ttttaaatgggctgg

SEQ ID NO: 1072050 - DNA, 15 bp, Homo sapiens
attttaaatgggctg

SEQ ID NO: 1072051 - DNA, 15 bp, Homo sapiens
aattttaaatgggct

SEQ ID NO: 1072052 - DNA, 15 bp, Homo sapiens
gaattttaaatgggc

SEQ ID NO: 1072053 - DNA, 15 bp, Homo sapiens
ggaattttaaatggg

SEQ ID NO: 1072054 - DNA, 15 bp, Homo sapiens
gggaattttaaatgg

SEQ ID NO: 1072055 - DNA, 15 bp, Homo sapiens
agggaattttaaatg

SEQ ID NO: 1072056 - DNA, 15 bp, Homo sapiens
aagggaattttaaat

SEQ ID NO: 1072057 - DNA, 15 bp, Homo sapiens
aaagggaattttaaa

SEQ ID NO: 1072058 - DNA, 15 bp, Homo sapiens
caaagggaattttaa

SEQ ID NO: 1072059 - DNA, 15 bp, Homo sapiens
tcaaagggaatttta

SEQ ID NO: 1072060 - DNA, 15 bp, Homo sapiens
ttcaaagggaatttt

SEQ ID NO: 1072061 - DNA, 15 bp, Homo sapiens
tttcaaagggaattt

SEQ ID NO: 1072062 - DNA, 15 bp, Homo sapiens
ttttcaaagggaatt

SEQ ID NO: 1072063 - DNA, 15 bp, Homo sapiens
cttttcaaagggaat

SEQ ID NO: 1072064 - DNA, 15 bp, Homo sapiens
tcttttcaaagggaa

SEQ ID NO: 1072065 - DNA, 15 bp, Homo sapiens
atcttttcaaaggga

SEQ ID NO: 1072066 - DNA, 15 bp, Homo sapiens
gatcttttcaaaggg

SEQ ID NO: 1072067 - DNA, 15 bp, Homo sapiens
agatcttttcaaagg

SEQ ID NO: 1072068 - DNA, 15 bp, Homo sapiens
gagatcttttcaaag

SEQ ID NO: 1072069 - DNA, 15 bp, Homo sapiens
agagatcttttcaaa

SEQ ID NO: 1072070 - DNA, 15 bp, Homo sapiens
cagagatcttttcaa

SEQ ID NO: 1072071 - DNA, 15 bp, Homo sapiens
acagagatcttttca

SEQ ID NO: 1072072 - DNA, 15 bp, Homo sapiens
aacagagatcttttc

SEQ ID NO: 1072073 - DNA, 15 bp, Homo sapiens
aaacagagatctttt

SEQ ID NO: 1072074 - DNA, 15 bp, Homo sapiens
caaacagagatcttt

SEQ ID NO: 1072075 - DNA, 15 bp, Homo sapiens
ccaaacagagatctt

SEQ ID NO: 1072076 - DNA, 15 bp, Homo sapiens
cccaaacagagatct

SEQ ID NO: 1072077 - DNA, 15 bp, Homo sapiens
acccaaacagagatc

SEQ ID NO: 1072078 - DNA, 15 bp, Homo sapiens
cacccaaacagagat

SEQ ID NO: 1072079 - DNA, 15 bp, Homo sapiens
tcacccaaacagaga

SEQ ID NO: 1072080 - DNA, 15 bp, Homo sapiens
ctcacccaaacagag

SEQ ID NO: 1072081 - DNA, 15 bp, Homo sapiens
actcacccaaacaga

SEQ ID NO: 1072082 - DNA, 15 bp, Homo sapiens
aactcacccaaacag

SEQ ID NO: 1072083 - DNA, 15 bp, Homo sapiens
gaactcacccaaaca

SEQ ID NO: 1072084 - DNA, 15 bp, Homo sapiens
ggaactcacccaaac

SEQ ID NO: 1072085 - DNA, 15 bp, Homo sapiens
cggaactcacccaaa

SEQ ID NO: 1072086 - DNA, 15 bp, Homo sapiens
acggaactcacccaa

SEQ ID NO: 1072087 - DNA, 15 bp, Homo sapiens
cacggaactcaccca

SEQ ID NO: 1072088 - DNA, 15 bp, Homo sapiens
ccacggaactcaccc

SEQ ID NO: 1072089 - DNA, 15 bp, Homo sapiens
cccacggaactcacc

SEQ ID NO: 1072090 - DNA, 15 bp, Homo sapiens
gcccacggaactcac

SEQ ID NO: 1072091 - DNA, 15 bp, Homo sapiens
agcccacggaactca

SEQ ID NO: 1072092 - DNA, 15 bp, Homo sapiens
gagcccacggaactc

SEQ ID NO: 1072093 - DNA, 15 bp, Homo sapiens
agagcccacggaact

SEQ ID NO: 1072094 - DNA, 15 bp, Homo sapiens
cagagcccacggaac

SEQ ID NO: 1072095 - DNA, 15 bp, Homo sapiens
gcagagcccacggaa

SEQ ID NO: 1072096 - DNA, 15 bp, Homo sapiens
ggcagagcccacgga

SEQ ID NO: 1072097 - DNA, 15 bp, Homo sapiens
gggcagagcccacgg

SEQ ID NO: 1072098 - DNA, 15 bp, Homo sapiens
tgggcagagcccacg

SEQ ID NO: 1072099 - DNA, 15 bp, Homo sapiens
ctgggcagagcccac

SEQ ID NO: 1072100 - DNA, 15 bp, Homo sapiens
tctgggcagagccca

SEQ ID NO: 1072101 - DNA, 15 bp, Homo sapiens
ctctgggcagagccc

SEQ ID NO: 1072102 - DNA, 15 bp, Homo sapiens
tctctgggcagagcc

SEQ ID NO: 1072103 - DNA, 15 bp, Homo sapiens
ctctctgggcagagc

SEQ ID NO: 1072104 - DNA, 15 bp, Homo sapiens
cctctctgggcagag

SEQ ID NO: 1072105 - DNA, 15 bp, Homo sapiens
ccctctctgggcaga

SEQ ID NO: 1072106 - DNA, 15 bp, Homo sapiens
gccctctctgggcag

SEQ ID NO: 1072107 - DNA, 15 bp, Homo sapiens
tgccctctctgggca

SEQ ID NO: 1072108 - DNA, 15 bp, Homo sapiens
ctgccctctctgggc

SEQ ID NO: 1072109 - DNA, 15 bp, Homo sapiens
tctgccctctctggg

SEQ ID NO: 1072110 - DNA, 15 bp, Homo sapiens
atctgccctctctgg

SEQ ID NO: 1072111 - DNA, 15 bp, Homo sapiens
aatctgccctctctg

SEQ ID NO: 1072112 - DNA, 15 bp, Homo sapiens
taatctgccctctct

SEQ ID NO: 1072113 - DNA, 15 bp, Homo sapiens
ataatctgccctctc

SEQ ID NO: 1072114 - DNA, 15 bp, Homo sapiens
gataatctgccctct

SEQ ID NO: 1072115 - DNA, 15 bp, Homo sapiens
agataatctgccctc

SEQ ID NO: 1072116 - DNA, 15 bp, Homo sapiens
cagataatctgccct

SEQ ID NO: 1072117 - DNA, 15 bp, Homo sapiens
tcagataatctgccc

SEQ ID NO: 1072118 - DNA, 15 bp, Homo sapiens
ttcagataatctgcc

SEQ ID NO: 1072119 - DNA, 15 bp, Homo sapiens
tttcagataatctgc

SEQ ID NO: 1072120 - DNA, 15 bp, Homo sapiens
ttttcagataatctg

SEQ ID NO: 1072121 - DNA, 15 bp, Homo sapiens
attttcagataatct

SEQ ID NO: 1072122 - DNA, 15 bp, Homo sapiens
tattttcagataatc

SEQ ID NO: 1072123 - DNA, 15 bp, Homo sapiens
ctattttcagataat

SEQ ID NO: 1072124 - DNA, 15 bp, Homo sapiens
cctattttcagataa

SEQ ID NO: 1072125 - DNA, 15 bp, Homo sapiens
acctattttcagata

SEQ ID NO: 1072126 - DNA, 15 bp, Homo sapiens
cacctattttcagat

SEQ ID NO: 1072127 - DNA, 15 bp, Homo sapiens
acacctattttcaga

SEQ ID NO: 1072128 - DNA, 15 bp, Homo sapiens
aacacctattttcag

SEQ ID NO: 1072129 - DNA, 15 bp, Homo sapiens
taacacctattttca

SEQ ID NO: 1072130 - DNA, 15 bp, Homo sapiens
ataacacctattttc

SEQ ID NO: 1072131 - DNA, 15 bp, Homo sapiens
aataacacctatttt

SEQ ID NO: 1072132 - DNA, 15 bp, Homo sapiens
caataacacctattt

SEQ ID NO: 1072133 - DNA, 15 bp, Homo sapiens
tcaataacacctatt

SEQ ID NO: 1072134 - DNA, 15 bp, Homo sapiens
atcaataacacctat

SEQ ID NO: 1072135 - DNA, 15 bp, Homo sapiens
aatcaataacaccta

SEQ ID NO: 1072136 - DNA, 15 bp, Homo sapiens
taatcaataacacct

SEQ ID NO: 1072137 - DNA, 15 bp, Homo sapiens
gtaatcaataacacc

SEQ ID NO: 1072138 - DNA, 15 bp, Homo sapiens
tgtaatcaataacac

SEQ ID NO: 1072139 - DNA, 15 bp, Homo sapiens
ttgtaatcaataaca

SEQ ID NO: 1072140 - DNA, 15 bp, Homo sapiens
gttgtaatcaataac

SEQ ID NO: 1072141 - DNA, 15 bp, Homo sapiens
ggttgtaatcaataa

SEQ ID NO: 1072142 - DNA, 15 bp, Homo sapiens
tggttgtaatcaata

SEQ ID NO: 1072143 - DNA, 15 bp, Homo sapiens
ttggttgtaatcaat

SEQ ID NO: 1072144 - DNA, 15 bp, Homo sapiens
cttggttgtaatcaa

SEQ ID NO: 1072145 - DNA, 15 bp, Homo sapiens
acttggttgtaatca

SEQ ID NO: 1072146 - DNA, 15 bp, Homo sapiens
cacttggttgtaatc

SEQ ID NO: 1072147 - DNA, 15 bp, Homo sapiens
ccacttggttgtaat

SEQ ID NO: 1072148 - DNA, 15 bp, Homo sapiens
accacttggttgtaa

SEQ ID NO: 1072149 - DNA, 15 bp, Homo sapiens
gaccacttggttgta

SEQ ID NO: 1072150 - DNA, 15 bp, Homo sapiens
agaccacttggttgt

SEQ ID NO: 1072151 - DNA, 15 bp, Homo sapiens
aagaccacttggttg

SEQ ID NO: 1072152 - DNA, 15 bp, Homo sapiens
aaagaccacttggtt

SEQ ID NO: 1072153 - DNA, 15 bp, Homo sapiens
caaagaccacttggt

SEQ ID NO: 1072154 - DNA, 15 bp, Homo sapiens
acaaagaccacttgg

SEQ ID NO: 1072155 - DNA, 15 bp, Homo sapiens
cacaaagaccacttg

SEQ ID NO: 1072156 - DNA, 15 bp, Homo sapiens
ccacaaagaccactt

SEQ ID NO: 1072157 - DNA, 15 bp, Homo sapiens
tccacaaagaccact

SEQ ID NO: 1072158 - DNA, 15 bp, Homo sapiens
ttccacaaagaccac

SEQ ID NO: 1072159 - DNA, 15 bp, Homo sapiens
tttccacaaagacca

SEQ ID NO: 1072160 - DNA, 15 bp, Homo sapiens
ctttccacaaagacc

SEQ ID NO: 1072161 - DNA, 15 bp, Homo sapiens
cctttccacaaagac

SEQ ID NO: 1072162 - DNA, 15 bp, Homo sapiens
ccctttccacaaaga

SEQ ID NO: 1072163 - DNA, 15 bp, Homo sapiens
accctttccacaaag

SEQ ID NO: 1072164 - DNA, 15 bp, Homo sapiens
aaccctttccacaaa

SEQ ID NO: 1072165 - DNA, 15 bp, Homo sapiens
gaaccctttccacaa

SEQ ID NO: 1072166 - DNA, 15 bp, Homo sapiens
ggaaccctttccaca

SEQ ID NO: 1072167 - DNA, 15 bp, Homo sapiens
tggaaccctttccac

SEQ ID NO: 1072168 - DNA, 15 bp, Homo sapiens
gtggaaccctttcca

SEQ ID NO: 1072169 - DNA, 15 bp, Homo sapiens
agtggaaccctttcc

SEQ ID NO: 1072170 - DNA, 15 bp, Homo sapiens
aagtggaaccctttc

SEQ ID NO: 1072171 - DNA, 15 bp, Homo sapiens
caagtggaacccttt

SEQ ID NO: 1072172 - DNA, 15 bp, Homo sapiens
tcaagtggaaccctt

SEQ ID NO: 1072173 - DNA, 15 bp, Homo sapiens
ttcaagtggaaccct

SEQ ID NO: 1072174 - DNA, 15 bp, Homo sapiens
gttcaagtggaaccc

SEQ ID NO: 1072175 - DNA, 15 bp, Homo sapiens
ggttcaagtggaacc

SEQ ID NO: 1072176 - DNA, 15 bp, Homo sapiens
tggttcaagtggaac

SEQ ID NO: 1072177 - DNA, 15 bp, Homo sapiens
ttggttcaagtggaa

SEQ ID NO: 1072178 - DNA, 15 bp, Homo sapiens
tttggttcaagtgga

SEQ ID NO: 1072179 - DNA, 15 bp, Homo sapiens
ttttggttcaagtgg

SEQ ID NO: 1072180 - DNA, 15 bp, Homo sapiens
attttggttcaagtg

SEQ ID NO: 1072181 - DNA, 15 bp, Homo sapiens
tattttggttcaagt

SEQ ID NO: 1072182 - DNA, 15 bp, Homo sapiens
ttattttggttcaag

SEQ ID NO: 1072183 - DNA, 15 bp, Homo sapiens
tttattttggttcaa

SEQ ID NO: 1072184 - DNA, 15 bp, Homo sapiens
atttattttggttca

SEQ ID NO: 1072185 - DNA, 15 bp, Homo sapiens
tatttattttggttc

SEQ ID NO: 1072186 - DNA, 15 bp, Homo sapiens
atatttattttggtt

SEQ ID NO: 1072187 - DNA, 15 bp, Homo sapiens
aatatttattttggt

SEQ ID NO: 1072188 - DNA, 15 bp, Homo sapiens
aaatatttattttgg

SEQ ID NO: 1072189 - DNA, 15 bp, Homo sapiens
caaatatttattttg

SEQ ID NO: 1072190 - DNA, 15 bp, Homo sapiens
gcaaatatttatttt

SEQ ID NO: 1072191 - DNA, 15 bp, Homo sapiens
ggcaaatatttattt

SEQ ID NO: 1072192 - DNA, 15 bp, Homo sapiens
tggcaaatatttatt

SEQ ID NO: 1072193 - DNA, 15 bp, Homo sapiens
atggcaaatatttat

SEQ ID NO: 1072194 - DNA, 15 bp, Homo sapiens
aatggcaaatattta

SEQ ID NO: 1072195 - DNA, 15 bp, Homo sapiens
taatggcaaatattt

SEQ ID NO: 1072196 - DNA, 15 bp, Homo sapiens
gtaatggcaaatatt

SEQ ID NO: 1072197 - DNA, 15 bp, Homo sapiens
tgtaatggcaaatat

SEQ ID NO: 1072198 - DNA, 15 bp, Homo sapiens
ttgtaatggcaaata

SEQ ID NO: 1072199 - DNA, 15 bp, Homo sapiens
tttgtaatggcaaat

SEQ ID NO: 1072200 - DNA, 15 bp, Homo sapiens
ctttgtaatggcaaa

SEQ ID NO: 1072201 - DNA, 15 bp, Homo sapiens
tctttgtaatggcaa

SEQ ID NO: 1072202 - DNA, 15 bp, Homo sapiens
ttctttgtaatggca

SEQ ID NO: 1072203 - DNA, 15 bp, Homo sapiens
gttctttgtaatggc

SEQ ID NO: 1072204 - DNA, 15 bp, Homo sapiens
tgttctttgtaatgg

SEQ ID NO: 1072205 - DNA, 15 bp, Homo sapiens
ttgttctttgtaatg

SEQ ID NO: 1072206 - DNA, 15 bp, Homo sapiens
cttgttctttgtaat

SEQ ID NO: 1072207 - DNA, 15 bp, Homo sapiens
gcttgttctttgtaa

SEQ ID NO: 1072208 - DNA, 15 bp, Homo sapiens
ggcttgttctttgta

SEQ ID NO: 1072209 - DNA, 15 bp, Homo sapiens
cggcttgttctttgt

SEQ ID NO: 1072210 - DNA, 15 bp, Homo sapiens
ccggcttgttctttg

SEQ ID NO: 1072211 - DNA, 15 bp, Homo sapiens
accggcttgttcttt

SEQ ID NO: 1072212 - DNA, 15 bp, Homo sapiens
gaccggcttgttctt

SEQ ID NO: 1072213 - DNA, 15 bp, Homo sapiens
ggaccggcttgttct

SEQ ID NO: 1072214 - DNA, 15 bp, Homo sapiens
gggaccggcttgttc

SEQ ID NO: 1072215 - DNA, 15 bp, Homo sapiens
agggaccggcttgtt

SEQ ID NO: 1072216 - DNA, 15 bp, Homo sapiens
cagggaccggcttgt

SEQ ID NO: 1072217 - DNA, 15 bp, Homo sapiens
acagggaccggcttg

SEQ ID NO: 1072218 - DNA, 15 bp, Homo sapiens
aacagggaccggctt

SEQ ID NO: 1072219 - DNA, 15 bp, Homo sapiens
caacagggaccggct

SEQ ID NO: 1072220 - DNA, 15 bp, Homo sapiens
gcaacagggaccggc

SEQ ID NO: 1072221 - DNA, 15 bp, Homo sapiens
cgcaacagggaccgg

SEQ ID NO: 1072222 - DNA, 15 bp, Homo sapiens
ccgcaacagggaccg

SEQ ID NO: 1072223 - DNA, 15 bp, Homo sapiens
cccgcaacagggacc

SEQ ID NO: 1072224 - DNA, 15 bp, Homo sapiens
gcccgcaacagggac

SEQ ID NO: 1072225 - DNA, 15 bp, Homo sapiens
cgcccgcaacaggga

SEQ ID NO: 1072226 - DNA, 15 bp, Homo sapiens
ccgcccgcaacaggg

SEQ ID NO: 1072227 - DNA, 15 bp, Homo sapiens
cccgcccgcaacagg

SEQ ID NO: 1072228 - DNA, 15 bp, Homo sapiens
ccccgcccgcaacag

SEQ ID NO: 1072229 - DNA, 15 bp, Homo sapiens
cccccgcccgcaaca

SEQ ID NO: 1072230 - DNA, 15 bp, Homo sapiens
gcccccgcccgcaac

SEQ ID NO: 1072231 - DNA, 15 bp, Homo sapiens
cgcccccgcccgcaa

SEQ ID NO: 1072232 - DNA, 15 bp, Homo sapiens
acgcccccgcccgca

SEQ ID NO: 1072233 - DNA, 15 bp, Homo sapiens
gacgcccccgcccgc

SEQ ID NO: 1072234 - DNA, 15 bp, Homo sapiens
ggacgcccccgcccg

SEQ ID NO: 1072235 - DNA, 15 bp, Homo sapiens
aggacgcccccgccc

SEQ ID NO: 1072236 - DNA, 15 bp, Homo sapiens
gaggacgcccccgcc

SEQ ID NO: 1072237 - DNA, 15 bp, Homo sapiens
cgaggacgcccccgc

SEQ ID NO: 1072238 - DNA, 15 bp, Homo sapiens
ccgaggacgcccccg

SEQ ID NO: 1072239 - DNA, 15 bp, Homo sapiens
gccgaggacgccccc

SEQ ID NO: 1072240 - DNA, 15 bp, Homo sapiens
ggccgaggacgcccc

SEQ ID NO: 1072241 - DNA, 15 bp, Homo sapiens
gggccgaggacgccc

SEQ ID NO: 1072242 - DNA, 15 bp, Homo sapiens
agggccgaggacgcc

SEQ ID NO: 1072243 - DNA, 15 bp, Homo sapiens
gagggccgaggacgc

SEQ ID NO: 1072244 - DNA, 15 bp, Homo sapiens
agagggccgaggacg

SEQ ID NO: 1072245 - DNA, 15 bp, Homo sapiens
gagagggccgaggac

SEQ ID NO: 1072246 - DNA, 15 bp, Homo sapiens
agagagggccgagga

SEQ ID NO: 1072247 - DNA, 15 bp, Homo sapiens
cagagagggccgagg

SEQ ID NO: 1072248 - DNA, 15 bp, Homo sapiens
ccagagagggccgag

SEQ ID NO: 1072249 - DNA, 15 bp, Homo sapiens
gccagagagggccga

SEQ ID NO: 1072250 - DNA, 15 bp, Homo sapiens
ggccagagagggccg

SEQ ID NO: 1072251 - DNA, 15 bp, Homo sapiens
gggccagagagggcc

SEQ ID NO: 1072252 - DNA, 15 bp, Homo sapiens
ggggccagagagggc

SEQ ID NO: 1072253 - DNA, 15 bp, Homo sapiens
gggggccagagaggg

SEQ ID NO: 1072254 - DNA, 15 bp, Homo sapiens
agggggccagagagg

SEQ ID NO: 1072255 - DNA, 15 bp, Homo sapiens
gagggggccagagag

SEQ ID NO: 1072256 - DNA, 15 bp, Homo sapiens
cgagggggccagaga

SEQ ID NO: 1072257 - DNA, 15 bp, Homo sapiens
ccgagggggccagag

SEQ ID NO: 1072258 - DNA, 15 bp, Homo sapiens
gccgagggggccaga

SEQ ID NO: 1072259 - DNA, 15 bp, Homo sapiens
ggccgagggggccag

SEQ ID NO: 1072260 - DNA, 15 bp, Homo sapiens
gggccgagggggcca

SEQ ID NO: 1072261 - DNA, 15 bp, Homo sapiens
tgggccgagggggcc

SEQ ID NO: 1072262 - DNA, 15 bp, Homo sapiens
ctgggccgagggggc

SEQ ID NO: 1072263 - DNA, 15 bp, Homo sapiens
cctgggccgaggggg

SEQ ID NO: 1072264 - DNA, 15 bp, Homo sapiens
tcctgggccgagggg

SEQ ID NO: 1072265 - DNA, 15 bp, Homo sapiens
ctcctgggccgaggg

SEQ ID NO: 1072266 - DNA, 15 bp, Homo sapiens
gctcctgggccgagg

SEQ ID NO: 1072267 - DNA, 15 bp, Homo sapiens
agctcctgggccgag

SEQ ID NO: 1072268 - DNA, 15 bp, Homo sapiens
tagctcctgggccga

SEQ ID NO: 1072269 - DNA, 15 bp, Homo sapiens
gtagctcctgggccg

SEQ ID NO: 1072270 - DNA, 15 bp, Homo sapiens
cgtagctcctgggcc

SEQ ID NO: 1072271 - DNA, 15 bp, Homo sapiens
gcgtagctcctgggc

SEQ ID NO: 1072272 - DNA, 15 bp, Homo sapiens
cgcgtagctcctggg

SEQ ID NO: 1072273 - DNA, 15 bp, Homo sapiens
tcgcgtagctcctgg

SEQ ID NO: 1072274 - DNA, 15 bp, Homo sapiens
ctcgcgtagctcctg

SEQ ID NO: 1072275 - DNA, 15 bp, Homo sapiens
gctcgcgtagctcct

SEQ ID NO: 1072276 - DNA, 15 bp, Homo sapiens
agctcgcgtagctcc

SEQ ID NO: 1072277 - DNA, 15 bp, Homo sapiens
gagctcgcgtagctc

SEQ ID NO: 1072278 - DNA, 15 bp, Homo sapiens
cgagctcgcgtagct

SEQ ID NO: 1072279 - DNA, 15 bp, Homo sapiens
ccgagctcgcgtagc

SEQ ID NO: 1072280 - DNA, 15 bp, Homo sapiens
tccgagctcgcgtag

SEQ ID NO: 1072281 - DNA, 15 bp, Homo sapiens
atccgagctcgcgta

SEQ ID NO: 1072282 - DNA, 15 bp, Homo sapiens
aatccgagctcgcgt

SEQ ID NO: 1072283 - DNA, 15 bp, Homo sapiens
caatccgagctcgcg

SEQ ID NO: 1072284 - DNA, 15 bp, Homo sapiens
acaatccgagctcgc

SEQ ID NO: 1072285 - DNA, 15 bp, Homo sapiens
cacaatccgagctcg

SEQ ID NO: 1072286 - DNA, 15 bp, Homo sapiens
acacaatccgagctc

SEQ ID NO: 1072287 - DNA, 15 bp, Homo sapiens
aacacaatccgagct

SEQ ID NO: 1072288 - DNA, 15 bp, Homo sapiens
aaacacaatccgagc

SEQ ID NO: 1072289 - DNA, 15 bp, Homo sapiens
gaaacacaatccgag

SEQ ID NO: 1072290 - DNA, 15 bp, Homo sapiens
ggaaacacaatccga

SEQ ID NO: 1072291 - DNA, 15 bp, Homo sapiens
gggaaacacaatccg

SEQ ID NO: 1072292 - DNA, 15 bp, Homo sapiens
ggggaaacacaatcc

SEQ ID NO: 1072293 - DNA, 15 bp, Homo sapiens
cggggaaacacaatc

SEQ ID NO: 1072294 - DNA, 15 bp, Homo sapiens
ccggggaaacacaat

SEQ ID NO: 1072295 - DNA, 15 bp, Homo sapiens
gccggggaaacacaa

SEQ ID NO: 1072296 - DNA, 15 bp, Homo sapiens
cgccggggaaacaca

SEQ ID NO: 1072297 - DNA, 15 bp, Homo sapiens
tcgccggggaaacac

SEQ ID NO: 1072298 - DNA, 15 bp, Homo sapiens
ctcgccggggaaaca

SEQ ID NO: 1072299 - DNA, 15 bp, Homo sapiens
cctcgccggggaaac

SEQ ID NO: 1072300 - DNA, 15 bp, Homo sapiens
tcctcgccggggaaa

SEQ ID NO: 1072301 - DNA, 15 bp, Homo sapiens
gtcctcgccggggaa

SEQ ID NO: 1072302 - DNA, 15 bp, Homo sapiens
tgtcctcgccgggga

SEQ ID NO: 1072303 - DNA, 15 bp, Homo sapiens
ctgtcctcgccgggg

SEQ ID NO: 1072304 - DNA, 15 bp, Homo sapiens
cctgtcctcgccggg

SEQ ID NO: 1072305 - DNA, 15 bp, Homo sapiens
ccctgtcctcgccgg

SEQ ID NO: 1072306 - DNA, 15 bp, Homo sapiens
tccctgtcctcgccg

SEQ ID NO: 1072307 - DNA, 15 bp, Homo sapiens
gtccctgtcctcgcc

SEQ ID NO: 1072308 - DNA, 15 bp, Homo sapiens
cgtccctgtcctcgc

SEQ ID NO: 1072309 - DNA, 15 bp, Homo sapiens
gcgtccctgtcctcg

SEQ ID NO: 1072310 - DNA, 15 bp, Homo sapiens
cgcgtccctgtcctc

SEQ ID NO: 1072311 - DNA, 15 bp, Homo sapiens
gcgcgtccctgtcct

SEQ ID NO: 1072312 - DNA, 15 bp, Homo sapiens
cgcgcgtccctgtcc

SEQ ID NO: 1072313 - DNA, 15 bp, Homo sapiens
gcgcgcgtccctgtc

SEQ ID NO: 1072314 - DNA, 15 bp, Homo sapiens
cgcgcgcgtccctgt

SEQ ID NO: 1072315 - DNA, 15 bp, Homo sapiens
ccgcgcgcgtccctg

SEQ ID NO: 1072316 - DNA, 15 bp, Homo sapiens
cccgcgcgcgtccct

SEQ ID NO: 1072317 - DNA, 15 bp, Homo sapiens
gcccgcgcgcgtccc

SEQ ID NO: 1072318 - DNA, 15 bp, Homo sapiens
cgcccgcgcgcgtcc

SEQ ID NO: 1072319 - DNA, 15 bp, Homo sapiens
ccgcccgcgcgcgtc

SEQ ID NO: 1072320 - DNA, 15 bp, Homo sapiens
cccgcccgcgcgcgt

SEQ ID NO: 1072321 - DNA, 15 bp, Homo sapiens
ccccgcccgcgcgcg

SEQ ID NO: 1072322 - DNA, 15 bp, Homo sapiens
tccccgcccgcgcgc

SEQ ID NO: 1072323 - DNA, 15 bp, Homo sapiens
ctccccgcccgcgcg

SEQ ID NO: 1072324 - DNA, 15 bp, Homo sapiens
gctccccgcccgcgc

SEQ ID NO: 1072325 - DNA, 15 bp, Homo sapiens
tgctccccgcccgcg

SEQ ID NO: 1072326 - DNA, 15 bp, Homo sapiens
ctgctccccgcccgc

SEQ ID NO: 1072327 - DNA, 15 bp, Homo sapiens
cctgctccccgcccg

SEQ ID NO: 1072328 - DNA, 15 bp, Homo sapiens
ccctgctccccgccc

SEQ ID NO: 1072329 - DNA, 15 bp, Homo sapiens
cccctgctccccgcc

SEQ ID NO: 1072330 - DNA, 15 bp, Homo sapiens
gcccctgctccccgc

SEQ ID NO: 1072331 - DNA, 15 bp, Homo sapiens
ggcccctgctccccg

SEQ ID NO: 1072332 - DNA, 15 bp, Homo sapiens
gggcccctgctcccc

SEQ ID NO: 1072333 - DNA, 15 bp, Homo sapiens
cgggcccctgctccc

SEQ ID NO: 1072334 - DNA, 15 bp, Homo sapiens
ccgggcccctgctcc

SEQ ID NO: 1072335 - DNA, 15 bp, Homo sapiens
accgggcccctgctc

SEQ ID NO: 1072336 - DNA, 15 bp, Homo sapiens
caccgggcccctgct

SEQ ID NO: 1072337 - DNA, 15 bp, Homo sapiens
ccaccgggcccctgc

SEQ ID NO: 1072338 - DNA, 15 bp, Homo sapiens
gccaccgggcccctg

SEQ ID NO: 1072339 - DNA, 15 bp, Homo sapiens
agccaccgggcccct

SEQ ID NO: 1072340 - DNA, 15 bp, Homo sapiens
gagccaccgggcccc

SEQ ID NO: 1072341 - DNA, 15 bp, Homo sapiens
ggagccaccgggccc

SEQ ID NO: 1072342 - DNA, 15 bp, Homo sapiens
cggagccaccgggcc

SEQ ID NO: 1072343 - DNA, 15 bp, Homo sapiens
tcggagccaccgggc

SEQ ID NO: 1072344 - DNA, 15 bp, Homo sapiens
gtcggagccaccggg

SEQ ID NO: 1072345 - DNA, 15 bp, Homo sapiens
cgtcggagccaccgg

SEQ ID NO: 1072346 - DNA, 15 bp, Homo sapiens
gcgtcggagccaccg

SEQ ID NO: 1072347 - DNA, 15 bp, Homo sapiens
ggcgtcggagccacc

SEQ ID NO: 1072348 - DNA, 15 bp, Homo sapiens
cggcgtcggagccac

SEQ ID NO: 1072349 - DNA, 15 bp, Homo sapiens
ccggcgtcggagcca

SEQ ID NO: 1072350 - DNA, 15 bp, Homo sapiens
tccggcgtcggagcc

SEQ ID NO: 1072351 - DNA, 15 bp, Homo sapiens
ctccggcgtcggagc

SEQ ID NO: 1072352 - DNA, 15 bp, Homo sapiens
cctccggcgtcggag

SEQ ID NO: 1072353 - DNA, 15 bp, Homo sapiens
gcctccggcgtcgga

SEQ ID NO: 1072354 - DNA, 15 bp, Homo sapiens
agcctccggcgtcgg

SEQ ID NO: 1072355 - DNA, 15 bp, Homo sapiens
aagcctccggcgtcg

SEQ ID NO: 1072356 - DNA, 15 bp, Homo sapiens
caagcctccggcgtc

SEQ ID NO: 1072357 - DNA, 15 bp, Homo sapiens
gcaagcctccggcgt

SEQ ID NO: 1072358 - DNA, 15 bp, Homo sapiens
cgcaagcctccggcg

SEQ ID NO: 1072359 - DNA, 15 bp, Homo sapiens
ccgcaagcctccggc

SEQ ID NO: 1072360 - DNA, 15 bp, Homo sapiens
gccgcaagcctccgg

SEQ ID NO: 1072361 - DNA, 15 bp, Homo sapiens
ggccgcaagcctccg

SEQ ID NO: 1072362 - DNA, 15 bp, Homo sapiens
gggccgcaagcctcc

SEQ ID NO: 1072363 - DNA, 15 bp, Homo sapiens
tgggccgcaagcctc

SEQ ID NO: 1072364 - DNA, 15 bp, Homo sapiens
ctgggccgcaagcct

SEQ ID NO: 1072365 - DNA, 15 bp, Homo sapiens
cctgggccgcaagcc

SEQ ID NO: 1072366 - DNA, 15 bp, Homo sapiens
ccctgggccgcaagc

SEQ ID NO: 1072367 - DNA, 15 bp, Homo sapiens
gccctgggccgcaag

SEQ ID NO: 1072368 - DNA, 15 bp, Homo sapiens
ggccctgggccgcaa

SEQ ID NO: 1072369 - DNA, 15 bp, Homo sapiens
cggccctgggccgca

SEQ ID NO: 1072370 - DNA, 15 bp, Homo sapiens
ccggccctgggccgc

SEQ ID NO: 1072371 - DNA, 15 bp, Homo sapiens
gccggccctgggccg

SEQ ID NO: 1072372 - DNA, 15 bp, Homo sapiens
agccggccctgggcc

SEQ ID NO: 1072373 - DNA, 15 bp, Homo sapiens
cagccggccctgggc

SEQ ID NO: 1072374 - DNA, 15 bp, Homo sapiens
gcagccggccctggg

SEQ ID NO: 1072375 - DNA, 15 bp, Homo sapiens
tgcagccggccctgg

SEQ ID NO: 1072376 - DNA, 15 bp, Homo sapiens
ctgcagccggccctg

SEQ ID NO: 1072377 - DNA, 15 bp, Homo sapiens
cctgcagccggccct

SEQ ID NO: 1072378 - DNA, 15 bp, Homo sapiens
gcctgcagccggccc

SEQ ID NO: 1072379 - DNA, 15 bp, Homo sapiens
agcctgcagccggcc

SEQ ID NO: 1072380 - DNA, 15 bp, Homo sapiens
aagcctgcagccggc

SEQ ID NO: 1072381 - DNA, 15 bp, Homo sapiens
caagcctgcagccgg

SEQ ID NO: 1072382 - DNA, 15 bp, Homo sapiens
tcaagcctgcagccg

SEQ ID NO: 1072383 - DNA, 15 bp, Homo sapiens
ttcaagcctgcagcc

SEQ ID NO: 1072384 - DNA, 15 bp, Homo sapiens
cttcaagcctgcagc

SEQ ID NO: 1072385 - DNA, 15 bp, Homo sapiens
gcttcaagcctgcag

SEQ ID NO: 1072386 - DNA, 15 bp, Homo sapiens
ggcttcaagcctgca

SEQ ID NO: 1072387 - DNA, 15 bp, Homo sapiens
aggcttcaagcctgc

SEQ ID NO: 1072388 - DNA, 15 bp, Homo sapiens
caggcttcaagcctg

SEQ ID NO: 1072389 - DNA, 15 bp, Homo sapiens
gcaggcttcaagcct

SEQ ID NO: 1072390 - DNA, 15 bp, Homo sapiens
agcaggcttcaagcc

SEQ ID NO: 1072391 - DNA, 15 bp, Homo sapiens
gagcaggcttcaagc

SEQ ID NO: 1072392 - DNA, 15 bp, Homo sapiens
cgagcaggcttcaag

SEQ ID NO: 1072393 - DNA, 15 bp, Homo sapiens
ccgagcaggcttcaa

SEQ ID NO: 1072394 - DNA, 15 bp, Homo sapiens
tccgagcaggcttca

SEQ ID NO: 1072395 - DNA, 15 bp, Homo sapiens
ctccgagcaggcttc

SEQ ID NO: 1072396 - DNA, 15 bp, Homo sapiens
gctccgagcaggctt

SEQ ID NO: 1072397 - DNA, 15 bp, Homo sapiens
agctccgagcaggct

SEQ ID NO: 1072398 - DNA, 15 bp, Homo sapiens
aagctccgagcaggc

SEQ ID NO: 1072399 - DNA, 15 bp, Homo sapiens
caagctccgagcagg

SEQ ID NO: 1072400 - DNA, 15 bp, Homo sapiens
ccaagctccgagcag

SEQ ID NO: 1072401 - DNA, 15 bp, Homo sapiens
cccaagctccgagca

SEQ ID NO: 1072402 - DNA, 15 bp, Homo sapiens
tcccaagctccgagc

SEQ ID NO: 1072403 - DNA, 15 bp, Homo sapiens
atcccaagctccgag

SEQ ID NO: 1072404 - DNA, 15 bp, Homo sapiens
aatcccaagctccga

SEQ ID NO: 1072405 - DNA, 15 bp, Homo sapiens
caatcccaagctccg

SEQ ID NO: 1072406 - DNA, 15 bp, Homo sapiens
acaatcccaagctcc

SEQ ID NO: 1072407 - DNA, 15 bp, Homo sapiens
tacaatcccaagctc

SEQ ID NO: 1072408 - DNA, 15 bp, Homo sapiens
atacaatcccaagct

SEQ ID NO: 1072409 - DNA, 15 bp, Homo sapiens
aatacaatcccaagc

SEQ ID NO: 1072410 - DNA, 15 bp, Homo sapiens
aaatacaatcccaag

SEQ ID NO: 1072411 - DNA, 15 bp, Homo sapiens
aaaatacaatcccaa

SEQ ID NO: 1072412 - DNA, 15 bp, Homo sapiens
gaaaatacaatccca

SEQ ID NO: 1072413 - DNA, 15 bp, Homo sapiens
agaaaatacaatccc

SEQ ID NO: 1072414 - DNA, 15 bp, Homo sapiens
aagaaaatacaatcc

SEQ ID NO: 1072415 - DNA, 15 bp, Homo sapiens
aaagaaaatacaatc

SEQ ID NO: 1072416 - DNA, 15 bp, Homo sapiens
caaagaaaatacaat

SEQ ID NO: 1072417 - DNA, 15 bp, Homo sapiens
ccaaagaaaatacaa

SEQ ID NO: 1072418 - DNA, 15 bp, Homo sapiens
gccaaagaaaataca

SEQ ID NO: 1072419 - DNA, 15 bp, Homo sapiens
agccaaagaaaatac

SEQ ID NO: 1072420 - DNA, 15 bp, Homo sapiens
aagccaaagaaaata

SEQ ID NO: 1072421 - DNA, 15 bp, Homo sapiens
aaagccaaagaaaat

SEQ ID NO: 1072422 - DNA, 15 bp, Homo sapiens
gaaagccaaagaaaa

SEQ ID NO: 1072423 - DNA, 15 bp, Homo sapiens
agaaagccaaagaaa

SEQ ID NO: 1072424 - DNA, 15 bp, Homo sapiens
cagaaagccaaagaa

SEQ ID NO: 1072425 - DNA, 15 bp, Homo sapiens
ccagaaagccaaaga

SEQ ID NO: 1072426 - DNA, 15 bp, Homo sapiens
gccagaaagccaaag

SEQ ID NO: 1072427 - DNA, 15 bp, Homo sapiens
cgccagaaagccaaa

SEQ ID NO: 1072428 - DNA, 15 bp, Homo sapiens
gcgccagaaagccaa

SEQ ID NO: 1072429 - DNA, 15 bp, Homo sapiens
cgcgccagaaagcca

SEQ ID NO: 1072430 - DNA, 15 bp, Homo sapiens
gcgcgccagaaagcc

SEQ ID NO: 1072431 - DNA, 15 bp, Homo sapiens
agcgcgccagaaagc

SEQ ID NO: 1072432 - DNA, 15 bp, Homo sapiens
gagcgcgccagaaag

SEQ ID NO: 1072433 - DNA, 15 bp, Homo sapiens
ggagcgcgccagaaa

SEQ ID NO: 1072434 - DNA, 15 bp, Homo sapiens
aggagcgcgccagaa

SEQ ID NO: 1072435 - DNA, 15 bp, Homo sapiens
aaggagcgcgccaga

SEQ ID NO: 1072436 - DNA, 15 bp, Homo sapiens
taaggagcgcgccag

SEQ ID NO: 1072437 - DNA, 15 bp, Homo sapiens
ataaggagcgcgcca

SEQ ID NO: 1072438 - DNA, 15 bp, Homo sapiens
aataaggagcgcgcc

SEQ ID NO: 1072439 - DNA, 15 bp, Homo sapiens
taataaggagcgcgc

SEQ ID NO: 1072440 - DNA, 15 bp, Homo sapiens
ataataaggagcgcg

SEQ ID NO: 1072441 - DNA, 15 bp, Homo sapiens
aataataaggagcgc

SEQ ID NO: 1072442 - DNA, 15 bp, Homo sapiens
aaataataaggagcg

SEQ ID NO: 1072443 - DNA, 15 bp, Homo sapiens
taaataataaggagc

SEQ ID NO: 1072444 - DNA, 15 bp, Homo sapiens
ataaataataaggag

SEQ ID NO: 1072445 - DNA, 15 bp, Homo sapiens
aataaataataagga

SEQ ID NO: 1072446 - DNA, 15 bp, Homo sapiens
aaataaataataagg

SEQ ID NO: 1072447 - DNA, 15 bp, Homo sapiens
gaaataaataataag

SEQ ID NO: 1072448 - DNA, 15 bp, Homo sapiens
agaaataaataataa

SEQ ID NO: 1072449 - DNA, 15 bp, Homo sapiens
aagaaataaataata

SEQ ID NO: 1072450 - DNA, 15 bp, Homo sapiens
aaagaaataaataat

SEQ ID NO: 1072451 - DNA, 15 bp, Homo sapiens
aaaagaaataaataa

SEQ ID NO: 1072452 - DNA, 15 bp, Homo sapiens
gaaaagaaataaata

SEQ ID NO: 1072453 - DNA, 15 bp, Homo sapiens
ggaaaagaaataaat

SEQ ID NO: 1072454 - DNA, 15 bp, Homo sapiens
gggaaaagaaataaa

SEQ ID NO: 1072455 - DNA, 15 bp, Homo sapiens
agggaaaagaaataa

SEQ ID NO: 1072456 - DNA, 15 bp, Homo sapiens
gagggaaaagaaata

SEQ ID NO: 1072457 - DNA, 15 bp, Homo sapiens
agagggaaaagaaat

SEQ ID NO: 1072458 - DNA, 15 bp, Homo sapiens
cagagggaaaagaaa

SEQ ID NO: 1072459 - DNA, 15 bp, Homo sapiens
acagagggaaaagaa

SEQ ID NO: 1072460 - DNA, 15 bp, Homo sapiens
aacagagggaaaaga

SEQ ID NO: 1072461 - DNA, 15 bp, Homo sapiens
aaacagagggaaaag

SEQ ID NO: 1072462 - DNA, 15 bp, Homo sapiens
aaaacagagggaaaa

SEQ ID NO: 1072463 - DNA, 15 bp, Homo sapiens
taaaacagagggaaa

SEQ ID NO: 1072464 - DNA, 15 bp, Homo sapiens
ataaaacagagggaa

SEQ ID NO: 1072465 - DNA, 15 bp, Homo sapiens
aataaaacagaggga

SEQ ID NO: 1072466 - DNA, 15 bp, Homo sapiens
aaataaaacagaggg

SEQ ID NO: 1072467 - DNA, 15 bp, Homo sapiens
aaaataaaacagagg

SEQ ID NO: 1072468 - DNA, 15 bp, Homo sapiens
aaaaataaaacagag

SEQ ID NO: 1072469 - DNA, 15 bp, Homo sapiens
taaaaataaaacaga

SEQ ID NO: 1072470 - DNA, 15 bp, Homo sapiens
ataaaaataaaacag

SEQ ID NO: 1072471 - DNA, 15 bp, Homo sapiens
gaaaataaaaataaa

SEQ ID NO: 1072472 - DNA, 15 bp, Homo sapiens
tgaaaataaaaataa

SEQ ID NO: 1072473 - DNA, 15 bp, Homo sapiens
ttgaaaataaaaata

SEQ ID NO: 1072474 - DNA, 15 bp, Homo sapiens
cttgaaaataaaaat

SEQ ID NO: 1072475 - DNA, 15 bp, Homo sapiens
gcttgaaaataaaaa

SEQ ID NO: 1072476 - DNA, 15 bp, Homo sapiens
agcttgaaaataaaa

SEQ ID NO: 1072477 - DNA, 15 bp, Homo sapiens
cagcttgaaaataaa

SEQ ID NO: 1072478 - DNA, 15 bp, Homo sapiens
gcagcttgaaaataa

SEQ ID NO: 1072479 - DNA, 15 bp, Homo sapiens
ggcagcttgaaaata

SEQ ID NO: 1072480 - DNA, 15 bp, Homo sapiens
cggcagcttgaaaat

SEQ ID NO: 1072481 - DNA, 15 bp, Homo sapiens
ccggcagcttgaaaa

SEQ ID NO: 1072482 - DNA, 15 bp, Homo sapiens
gccggcagcttgaaa

SEQ ID NO: 1072483 - DNA, 15 bp, Homo sapiens
ggccggcagcttgaa

SEQ ID NO: 1072484 - DNA, 15 bp, Homo sapiens
tggccggcagcttga

SEQ ID NO: 1072485 - DNA, 15 bp, Homo sapiens
ctggccggcagcttg

SEQ ID NO: 1072486 - DNA, 15 bp, Homo sapiens
cctggccggcagctt

SEQ ID NO: 1072487 - DNA, 15 bp, Homo sapiens
gcctggccggcagct

SEQ ID NO: 1072488 - DNA, 15 bp, Homo sapiens
agcctggccggcagc

SEQ ID NO: 1072489 - DNA, 15 bp, Homo sapiens
cagcctggccggcag

SEQ ID NO: 1072490 - DNA, 15 bp, Homo sapiens
ccagcctggccggca

SEQ ID NO: 1072491 - DNA, 15 bp, Homo sapiens
tccagcctggccggc

SEQ ID NO: 1072492 - DNA, 15 bp, Homo sapiens
atccagcctggccgg

SEQ ID NO: 1072493 - DNA, 15 bp, Homo sapiens
catccagcctggccg

SEQ ID NO: 1072494 - DNA, 15 bp, Homo sapiens
gcatccagcctggcc

SEQ ID NO: 1072495 - DNA, 15 bp, Homo sapiens
ggcatccagcctggc

SEQ ID NO: 1072496 - DNA, 15 bp, Homo sapiens
cggcatccagcctgg

SEQ ID NO: 1072497 - DNA, 15 bp, Homo sapiens
acggcatccagcctg

SEQ ID NO: 1072498 - DNA, 15 bp, Homo sapiens
gacggcatccagcct

SEQ ID NO: 1072499 - DNA, 15 bp, Homo sapiens
ggacggcatccagcc

SEQ ID NO: 1072500 - DNA, 15 bp, Homo sapiens
tggacggcatccagc

SEQ ID NO: 1072501 - DNA, 15 bp, Homo sapiens
atggacggcatccag

SEQ ID NO: 1072502 - DNA, 15 bp, Homo sapiens
aatggacggcatcca

SEQ ID NO: 1072503 - DNA, 15 bp, Homo sapiens
gaatggacggcatcc

SEQ ID NO: 1072504 - DNA, 15 bp, Homo sapiens
tgaatggacggcatc

SEQ ID NO: 1072505 - DNA, 15 bp, Homo sapiens
gtgaatggacggcat

SEQ ID NO: 1072506 - DNA, 15 bp, Homo sapiens
ggtgaatggacggca

SEQ ID NO: 1072507 - DNA, 15 bp, Homo sapiens
gggtgaatggacggc

SEQ ID NO: 1072508 - DNA, 15 bp, Homo sapiens
ggggtgaatggacgg

SEQ ID NO: 1072509 - DNA, 15 bp, Homo sapiens
cggggtgaatggacg

SEQ ID NO: 1072510 - DNA, 15 bp, Homo sapiens
gcggggtgaatggac

SEQ ID NO: 1072511 - DNA, 15 bp, Homo sapiens
agcggggtgaatgga

SEQ ID NO: 1072512 - DNA, 15 bp, Homo sapiens
cagcggggtgaatgg

SEQ ID NO: 1072513 - DNA, 15 bp, Homo sapiens
gcagcggggtgaatg

SEQ ID NO: 1072514 - DNA, 15 bp, Homo sapiens
ggcagcggggtgaat

SEQ ID NO: 1072515 - DNA, 15 bp, Homo sapiens
aggcagcggggtgaa

SEQ ID NO: 1072516 - DNA, 15 bp, Homo sapiens
aaggcagcggggtga

SEQ ID NO: 1072517 - DNA, 15 bp, Homo sapiens
caaggcagcggggtg

SEQ ID NO: 1072518 - DNA, 15 bp, Homo sapiens
ccaaggcagcggggt

SEQ ID NO: 1072519 - DNA, 15 bp, Homo sapiens
tccaaggcagcgggg

SEQ ID NO: 1072520 - DNA, 15 bp, Homo sapiens
ctccaaggcagcggg

SEQ ID NO: 1072521 - DNA, 15 bp, Homo sapiens
gctccaaggcagcgg

SEQ ID NO: 1072522 - DNA, 15 bp, Homo sapiens
cgctccaaggcagcg

SEQ ID NO: 1072523 - DNA, 15 bp, Homo sapiens
gcgctccaaggcagc

SEQ ID NO: 1072524 - DNA, 15 bp, Homo sapiens
agcgctccaaggcag

SEQ ID NO: 1072525 - DNA, 15 bp, Homo sapiens
cagcgctccaaggca

SEQ ID NO: 1072526 - DNA, 15 bp, Homo sapiens
gcagcgctccaaggc

SEQ ID NO: 1072527 - DNA, 15 bp, Homo sapiens
cgcagcgctccaagg

SEQ ID NO: 1072528 - DNA, 15 bp, Homo sapiens
gcgcagcgctccaag

SEQ ID NO: 1072529 - DNA, 15 bp, Homo sapiens
cgcgcagcgctccaa

SEQ ID NO: 1072530 - DNA, 15 bp, Homo sapiens
gcgcgcagcgctcca

SEQ ID NO: 1072531 - DNA, 15 bp, Homo sapiens
tgcgcgcagcgctcc

SEQ ID NO: 1072532 - DNA, 15 bp, Homo sapiens
ctgcgcgcagcgctc

SEQ ID NO: 1072533 - DNA, 15 bp, Homo sapiens
tctgcgcgcagcgct

SEQ ID NO: 1072534 - DNA, 15 bp, Homo sapiens
gtctgcgcgcagcgc

SEQ ID NO: 1072535 - DNA, 15 bp, Homo sapiens
tgtctgcgcgcagcg

SEQ ID NO: 1072536 - DNA, 15 bp, Homo sapiens
ctgtctgcgcgcagc

SEQ ID NO: 1072537 - DNA, 15 bp, Homo sapiens
gctgtctgcgcgcag

SEQ ID NO: 1072538 - DNA, 15 bp, Homo sapiens
ggctgtctgcgcgca

SEQ ID NO: 1072539 - DNA, 15 bp, Homo sapiens
cggctgtctgcgcgc

SEQ ID NO: 1072540 - DNA, 15 bp, Homo sapiens
ccggctgtctgcgcg

SEQ ID NO: 1072541 - DNA, 15 bp, Homo sapiens
tccggctgtctgcgc

SEQ ID NO: 1072542 - DNA, 15 bp, Homo sapiens
ctccggctgtctgcg

SEQ ID NO: 1072543 - DNA, 15 bp, Homo sapiens
gctccggctgtctgc

SEQ ID NO: 1072544 - DNA, 15 bp, Homo sapiens
ggctccggctgtctg

SEQ ID NO: 1072545 - DNA, 15 bp, Homo sapiens
cggctccggctgtct

SEQ ID NO: 1072546 - DNA, 15 bp, Homo sapiens
ccggctccggctgtc

SEQ ID NO: 1072547 - DNA, 15 bp, Homo sapiens
gccggctccggctgt

SEQ ID NO: 1072548 - DNA, 15 bp, Homo sapiens
agccggctccggctg

SEQ ID NO: 1072549 - DNA, 15 bp, Homo sapiens
gagccggctccggct

SEQ ID NO: 1072550 - DNA, 15 bp, Homo sapiens
cgagccggctccggc

SEQ ID NO: 1072551 - DNA, 15 bp, Homo sapiens
ccgagccggctccgg

SEQ ID NO: 1072552 - DNA, 15 bp, Homo sapiens
cccgagccggctccg

SEQ ID NO: 1072553 - DNA, 15 bp, Homo sapiens
gcccgagccggctcc

SEQ ID NO: 1072554 - DNA, 15 bp, Homo sapiens
agcccgagccggctc

SEQ ID NO: 1072555 - DNA, 15 bp, Homo sapiens
gagcccgagccggct

SEQ ID NO: 1072556 - DNA, 15 bp, Homo sapiens
tgagcccgagccggc

SEQ ID NO: 1072557 - DNA, 15 bp, Homo sapiens
ctgagcccgagccgg

SEQ ID NO: 1072558 - DNA, 15 bp, Homo sapiens
gctgagcccgagccg

SEQ ID NO: 1072559 - DNA, 15 bp, Homo sapiens
ggctgagcccgagcc

SEQ ID NO: 1072560 - DNA, 15 bp, Homo sapiens
gggctgagcccgagc

SEQ ID NO: 1072561 - DNA, 15 bp, Homo sapiens
agggctgagcccgag

SEQ ID NO: 1072562 - DNA, 15 bp, Homo sapiens
cagggctgagcccga

SEQ ID NO: 1072563 - DNA, 15 bp, Homo sapiens
ccagggctgagcccg

SEQ ID NO: 1072564 - DNA, 15 bp, Homo sapiens
cccagggctgagccc

SEQ ID NO: 1072565 - DNA, 15 bp, Homo sapiens
ccccagggctgagcc

SEQ ID NO: 1072566 - DNA, 15 bp, Homo sapiens
cccccagggctgagc

SEQ ID NO: 1072567 - DNA, 15 bp, Homo sapiens
acccccagggctgag

SEQ ID NO: 1072568 - DNA, 15 bp, Homo sapiens
cacccccagggctga

SEQ ID NO: 1072569 - DNA, 15 bp, Homo sapiens
ccacccccagggctg

SEQ ID NO: 1072570 - DNA, 15 bp, Homo sapiens
cccacccccagggct

SEQ ID NO: 1072571 - DNA, 15 bp, Homo sapiens
ccccacccccagggc

SEQ ID NO: 1072572 - DNA, 15 bp, Homo sapiens
cccccacccccaggg

SEQ ID NO: 1072573 - DNA, 15 bp, Homo sapiens
ccccccacccccagg

SEQ ID NO: 1072574 - DNA, 15 bp, Homo sapiens
gccccccacccccag

SEQ ID NO: 1072575 - DNA, 15 bp, Homo sapiens
tgccccccaccccca

SEQ ID NO: 1072576 - DNA, 15 bp, Homo sapiens
ctgccccccaccccc

SEQ ID NO: 1072577 - DNA, 15 bp, Homo sapiens
gctgccccccacccc

SEQ ID NO: 1072578 - DNA, 15 bp, Homo sapiens
ggctgccccccaccc

SEQ ID NO: 1072579 - DNA, 15 bp, Homo sapiens
cggctgccccccacc

SEQ ID NO: 1072580 - DNA, 15 bp, Homo sapiens
tcggctgccccccac

SEQ ID NO: 1072581 - DNA, 15 bp, Homo sapiens
ctcggctgcccccca

SEQ ID NO: 1072582 - DNA, 15 bp, Homo sapiens
cctcggctgcccccc

SEQ ID NO: 1072583 - DNA, 15 bp, Homo sapiens
ccctcggctgccccc

SEQ ID NO: 1072584 - DNA, 15 bp, Homo sapiens
gccctcggctgcccc

SEQ ID NO: 1072585 - DNA, 15 bp, Homo sapiens
cgccctcggctgccc

SEQ ID NO: 1072586 - DNA, 15 bp, Homo sapiens
gcgccctcggctgcc

SEQ ID NO: 1072587 - DNA, 15 bp, Homo sapiens
cgcgccctcggctgc

SEQ ID NO: 1072588 - DNA, 15 bp, Homo sapiens
ccgcgccctcggctg

SEQ ID NO: 1072589 - DNA, 15 bp, Homo sapiens
cccgcgccctcggct

SEQ ID NO: 1072590 - DNA, 15 bp, Homo sapiens
ccccgcgccctcggc

SEQ ID NO: 1072591 - DNA, 15 bp, Homo sapiens
cccccgcgccctcgg

SEQ ID NO: 1072592 - DNA, 15 bp, Homo sapiens
ccccccgcgccctcg

SEQ ID NO: 1072593 - DNA, 15 bp, Homo sapiens
gccccccgcgccctc

SEQ ID NO: 1072594 - DNA, 15 bp, Homo sapiens
cgccccccgcgccct

SEQ ID NO: 1072595 - DNA, 15 bp, Homo sapiens
ccgccccccgcgccc

SEQ ID NO: 1072596 - DNA, 15 bp, Homo sapiens
cccgccccccgcgcc

SEQ ID NO: 1072597 - DNA, 15 bp, Homo sapiens
ccccgccccccgcgc

SEQ ID NO: 1072598 - DNA, 15 bp, Homo sapiens
accccgccccccgcg

SEQ ID NO: 1072599 - DNA, 15 bp, Homo sapiens
taccccgccccccgc

SEQ ID NO: 1072600 - DNA, 15 bp, Homo sapiens
gtaccccgccccccg

SEQ ID NO: 1072601 - DNA, 15 bp, Homo sapiens
cgtaccccgcccccc

SEQ ID NO: 1072602 - DNA, 15 bp, Homo sapiens
gcgtaccccgccccc

SEQ ID NO: 1072603 - DNA, 15 bp, Homo sapiens
cgcgtaccccgcccc

SEQ ID NO: 1072604 - DNA, 15 bp, Homo sapiens
ccgcgtaccccgccc

SEQ ID NO: 1072605 - DNA, 15 bp, Homo sapiens
cccgcgtaccccgcc

SEQ ID NO: 1072606 - DNA, 15 bp, Homo sapiens
acccgcgtaccccgc

SEQ ID NO: 1072607 - DNA, 15 bp, Homo sapiens
tacccgcgtaccccg

SEQ ID NO: 1072608 - DNA, 15 bp, Homo sapiens
ctacccgcgtacccc

SEQ ID NO: 1072609 - DNA, 15 bp, Homo sapiens
gctacccgcgtaccc

SEQ ID NO: 1072610 - DNA, 15 bp, Homo sapiens
tgctacccgcgtacc

SEQ ID NO: 1072611 - DNA, 15 bp, Homo sapiens
ctgctacccgcgtac

SEQ ID NO: 1072612 - DNA, 15 bp, Homo sapiens
gctgctacccgcgta

SEQ ID NO: 1072613 - DNA, 15 bp, Homo sapiens
agctgctacccgcgt

SEQ ID NO: 1072614 - DNA, 15 bp, Homo sapiens
gagctgctacccgcg

SEQ ID NO: 1072615 - DNA, 15 bp, Homo sapiens
tgagctgctacccgc

SEQ ID NO: 1072616 - DNA, 15 bp, Homo sapiens
ttgagctgctacccg

SEQ ID NO: 1072617 - DNA, 15 bp, Homo sapiens
cttgagctgctaccc

SEQ ID NO: 1072618 - DNA, 15 bp, Homo sapiens
ccttgagctgctacc

SEQ ID NO: 1072619 - DNA, 15 bp, Homo sapiens
cccttgagctgctac

SEQ ID NO: 1072620 - DNA, 15 bp, Homo sapiens
acccttgagctgcta

SEQ ID NO: 1072621 - DNA, 15 bp, Homo sapiens
cacccttgagctgct

SEQ ID NO: 1072622 - DNA, 15 bp, Homo sapiens
tcacccttgagctgc

SEQ ID NO: 1072623 - DNA, 15 bp, Homo sapiens
ctcacccttgagctg

SEQ ID NO: 1072624 - DNA, 15 bp, Homo sapiens
cctcacccttgagct

SEQ ID NO: 1072625 - DNA, 15 bp, Homo sapiens
ccctcacccttgagc

SEQ ID NO: 1072626 - DNA, 15 bp, Homo sapiens
cccctcacccttgag

SEQ ID NO: 1072627 - DNA, 15 bp, Homo sapiens
gcccctcacccttga

SEQ ID NO: 1072628 - DNA, 15 bp, Homo sapiens
tgcccctcacccttg

SEQ ID NO: 1072629 - DNA, 15 bp, Homo sapiens
ctgcccctcaccctt

SEQ ID NO: 1072630 - DNA, 15 bp, Homo sapiens
gctgcccctcaccct

SEQ ID NO: 1072631 - DNA, 15 bp, Homo sapiens
ggctgcccctcaccc

SEQ ID NO: 1072632 - DNA, 15 bp, Homo sapiens
cggctgcccctcacc

SEQ ID NO: 1072633 - DNA, 15 bp, Homo sapiens
tcggctgcccctcac

SEQ ID NO: 1072634 - DNA, 15 bp, Homo sapiens
ctcggctgcccctca

SEQ ID NO: 1072635 - DNA, 15 bp, Homo sapiens
tctcggctgcccctc

SEQ ID NO: 1072636 - DNA, 15 bp, Homo sapiens
ctctcggctgcccct

SEQ ID NO: 1072637 - DNA, 15 bp, Homo sapiens
gctctcggctgcccc

SEQ ID NO: 1072638 - DNA, 15 bp, Homo sapiens
cgctctcggctgccc

SEQ ID NO: 1072639 - DNA, 15 bp, Homo sapiens
gcgctctcggctgcc

SEQ ID NO: 1072640 - DNA, 15 bp, Homo sapiens
cgcgctctcggctgc

SEQ ID NO: 1072641 - DNA, 15 bp, Homo sapiens
gcgcgctctcggctg

SEQ ID NO: 1072642 - DNA, 15 bp, Homo sapiens
cgcgcgctctcggct

SEQ ID NO: 1072643 - DNA, 15 bp, Homo sapiens
ccgcgcgctctcggc

SEQ ID NO: 1072644 - DNA, 15 bp, Homo sapiens
cccgcgcgctctcgg

SEQ ID NO: 1072645 - DNA, 15 bp, Homo sapiens
ccccgcgcgctctcg

SEQ ID NO: 1072646 - DNA, 15 bp, Homo sapiens
gccccgcgcgctctc

SEQ ID NO: 1072647 - DNA, 15 bp, Homo sapiens
cgccccgcgcgctct

SEQ ID NO: 1072648 - DNA, 15 bp, Homo sapiens
ccgccccgcgcgctc

SEQ ID NO: 1072649 - DNA, 15 bp, Homo sapiens
cccgccccgcgcgct

SEQ ID NO: 1072650 - DNA, 15 bp, Homo sapiens
ccccgccccgcgcgc

SEQ ID NO: 1072651 - DNA, 15 bp, Homo sapiens
accccgccccgcgcg

SEQ ID NO: 1072652 - DNA, 15 bp, Homo sapiens
taccccgccccgcgc

SEQ ID NO: 1072653 - DNA, 15 bp, Homo sapiens
gtaccccgccccgcg

SEQ ID NO: 1072654 - DNA, 15 bp, Homo sapiens
agtaccccgccccgc

SEQ ID NO: 1072655 - DNA, 15 bp, Homo sapiens
gagtaccccgccccg

SEQ ID NO: 1072656 - DNA, 15 bp, Homo sapiens
ggagtaccccgcccc

SEQ ID NO: 1072657 - DNA, 15 bp, Homo sapiens
cggagtaccccgccc

SEQ ID NO: 1072658 - DNA, 15 bp, Homo sapiens
ccggagtaccccgcc

SEQ ID NO: 1072659 - DNA, 15 bp, Homo sapiens
cccggagtaccccgc

SEQ ID NO: 1072660 - DNA, 15 bp, Homo sapiens
tcccggagtaccccg

SEQ ID NO: 1072661 - DNA, 15 bp, Homo sapiens
ctcccggagtacccc

SEQ ID NO: 1072662 - DNA, 15 bp, Homo sapiens
gctcccggagtaccc

SEQ ID NO: 1072663 - DNA, 15 bp, Homo sapiens
tgctcccggagtacc

SEQ ID NO: 1072664 - DNA, 15 bp, Homo sapiens
ctgctcccggagtac

SEQ ID NO: 1072665 - DNA, 15 bp, Homo sapiens
gctgctcccggagta

SEQ ID NO: 1072666 - DNA, 15 bp, Homo sapiens
agctgctcccggagt

SEQ ID NO: 1072667 - DNA, 15 bp, Homo sapiens
gagctgctcccggag

SEQ ID NO: 1072668 - DNA, 15 bp, Homo sapiens
ggagctgctcccgga

SEQ ID NO: 1072669 - DNA, 15 bp, Homo sapiens
cggagctgctcccgg

SEQ ID NO: 1072670 - DNA, 15 bp, Homo sapiens
ccggagctgctcccg

SEQ ID NO: 1072671 - DNA, 15 bp, Homo sapiens
cccggagctgctccc

SEQ ID NO: 1072672 - DNA, 15 bp, Homo sapiens
acccggagctgctcc

SEQ ID NO: 1072673 - DNA, 15 bp, Homo sapiens
cacccggagctgctc

SEQ ID NO: 1072674 - DNA, 15 bp, Homo sapiens
ccacccggagctgct

SEQ ID NO: 1072675 - DNA, 15 bp, Homo sapiens
cccacccggagctgc

SEQ ID NO: 1072676 - DNA, 15 bp, Homo sapiens
ccccacccggagctg

SEQ ID NO: 1072677 - DNA, 15 bp, Homo sapiens
cccccacccggagct

SEQ ID NO: 1072678 - DNA, 15 bp, Homo sapiens
ccccccacccggagc

SEQ ID NO: 1072679 - DNA, 15 bp, Homo sapiens
gccccccacccggag

SEQ ID NO: 1072680 - DNA, 15 bp, Homo sapiens
tgccccccacccgga

SEQ ID NO: 1072681 - DNA, 15 bp, Homo sapiens
ctgccccccacccgg

SEQ ID NO: 1072682 - DNA, 15 bp, Homo sapiens
gctgccccccacccg

SEQ ID NO: 1072683 - DNA, 15 bp, Homo sapiens
aggctgccccccacc

SEQ ID NO: 1072684 - DNA, 15 bp, Homo sapiens
aaggctgccccccac

SEQ ID NO: 1072685 - DNA, 15 bp, Homo sapiens
caaggctgcccccca

SEQ ID NO: 1072686 - DNA, 15 bp, Homo sapiens
ccaaggctgcccccc

SEQ ID NO: 1072687 - DNA, 15 bp, Homo sapiens
cccaaggctgccccc

SEQ ID NO: 1072688 - DNA, 15 bp, Homo sapiens
gcccaaggctgcccc

SEQ ID NO: 1072689 - DNA, 15 bp, Homo sapiens
tgcccaaggctgccc

SEQ ID NO: 1072690 - DNA, 15 bp, Homo sapiens
gtgcccaaggctgcc

SEQ ID NO: 1072691 - DNA, 15 bp, Homo sapiens
tgtgcccaaggctgc

SEQ ID NO: 1072692 - DNA, 15 bp, Homo sapiens
ctgtgcccaaggctg

SEQ ID NO: 1072693 - DNA, 15 bp, Homo sapiens
cctgtgcccaaggct

SEQ ID NO: 1072694 - DNA, 15 bp, Homo sapiens
ccctgtgcccaaggc

SEQ ID NO: 1072695 - DNA, 15 bp, Homo sapiens
tccctgtgcccaagg

SEQ ID NO: 1072696 - DNA, 15 bp, Homo sapiens
ctccctgtgcccaag

SEQ ID NO: 1072697 - DNA, 15 bp, Homo sapiens
cctccctgtgcccaa

SEQ ID NO: 1072698 - DNA, 15 bp, Homo sapiens
acctccctgtgccca

SEQ ID NO: 1072699 - DNA, 15 bp, Homo sapiens
cacctccctgtgccc

SEQ ID NO: 1072700 - DNA, 15 bp, Homo sapiens
ccacctccctgtgcc

SEQ ID NO: 1072701 - DNA, 15 bp, Homo sapiens
cccacctccctgtgc

SEQ ID NO: 1072702 - DNA, 15 bp, Homo sapiens
ccccacctccctgtg

SEQ ID NO: 1072703 - DNA, 15 bp, Homo sapiens
cccccacctccctgt

SEQ ID NO: 1072704 - DNA, 15 bp, Homo sapiens
ccccccacctccctg

SEQ ID NO: 1072705 - DNA, 15 bp, Homo sapiens
tccccccacctccct

SEQ ID NO: 1072706 - DNA, 15 bp, Homo sapiens
ttccccccacctccc

SEQ ID NO: 1072707 - DNA, 15 bp, Homo sapiens
gttccccccacctcc

SEQ ID NO: 1072708 - DNA, 15 bp, Homo sapiens
agttccccccacctc

SEQ ID NO: 1072709 - DNA, 15 bp, Homo sapiens
gagttccccccacct

SEQ ID NO: 1072710 - DNA, 15 bp, Homo sapiens
tgagttccccccacc

SEQ ID NO: 1072711 - DNA, 15 bp, Homo sapiens
ctgagttccccccac

SEQ ID NO: 1072712 - DNA, 15 bp, Homo sapiens
cctgagttcccccca

SEQ ID NO: 1072713 - DNA, 15 bp, Homo sapiens
ccctgagttcccccc

SEQ ID NO: 1072714 - DNA, 15 bp, Homo sapiens
cccctgagttccccc

SEQ ID NO: 1072715 - DNA, 15 bp, Homo sapiens
ccccctgagttcccc

SEQ ID NO: 1072716 - DNA, 15 bp, Homo sapiens
gccccctgagttccc

SEQ ID NO: 1072717 - DNA, 15 bp, Homo sapiens
tgccccctgagttcc

SEQ ID NO: 1072718 - DNA, 15 bp, Homo sapiens
ctgccccctgagttc

SEQ ID NO: 1072719 - DNA, 15 bp, Homo sapiens
gctgccccctgagtt

SEQ ID NO: 1072720 - DNA, 15 bp, Homo sapiens
agctgccccctgagt

SEQ ID NO: 1072721 - DNA, 15 bp, Homo sapiens
gagctgccccctgag

SEQ ID NO: 1072722 - DNA, 15 bp, Homo sapiens
ggagctgccccctga

SEQ ID NO: 1072723 - DNA, 15 bp, Homo sapiens
cggagctgccccctg

SEQ ID NO: 1072724 - DNA, 15 bp, Homo sapiens
ccggagctgccccct

SEQ ID NO: 1072725 - DNA, 15 bp, Homo sapiens
cccggagctgccccc

SEQ ID NO: 1072726 - DNA, 15 bp, Homo sapiens
acccggagctgcccc

SEQ ID NO: 1072727 - DNA, 15 bp, Homo sapiens
cacccggagctgccc

SEQ ID NO: 1072728 - DNA, 15 bp, Homo sapiens
ccacccggagctgcc

SEQ ID NO: 1072729 - DNA, 15 bp, Homo sapiens
accccccacccggag

SEQ ID NO: 1072730 - DNA, 15 bp, Homo sapiens
caccccccacccgga

SEQ ID NO: 1072731 - DNA, 15 bp, Homo sapiens
ccaccccccacccgg

SEQ ID NO: 1072732 - DNA, 15 bp, Homo sapiens
gccaccccccacccg

SEQ ID NO: 1072733 - DNA, 15 bp, Homo sapiens
ggccaccccccaccc

SEQ ID NO: 1072734 - DNA, 15 bp, Homo sapiens
cggccaccccccacc

SEQ ID NO: 1072735 - DNA, 15 bp, Homo sapiens
tcggccaccccccac

SEQ ID NO: 1072736 - DNA, 15 bp, Homo sapiens
ctcggccacccccca

SEQ ID NO: 1072737 - DNA, 15 bp, Homo sapiens
cctcggccacccccc

SEQ ID NO: 1072738 - DNA, 15 bp, Homo sapiens
ccctcggccaccccc

SEQ ID NO: 1072739 - DNA, 15 bp, Homo sapiens
gccctcggccacccc

SEQ ID NO: 1072740 - DNA, 15 bp, Homo sapiens
cgccctcggccaccc

SEQ ID NO: 1072741 - DNA, 15 bp, Homo sapiens
acgccctcggccacc

SEQ ID NO: 1072742 - DNA, 15 bp, Homo sapiens
aacgccctcggccac

SEQ ID NO: 1072743 - DNA, 15 bp, Homo sapiens
caacgccctcggcca

SEQ ID NO: 1072744 - DNA, 15 bp, Homo sapiens
ccaacgccctcggcc

SEQ ID NO: 1072745 - DNA, 15 bp, Homo sapiens
cccaacgccctcggc

SEQ ID NO: 1072746 - DNA, 15 bp, Homo sapiens
ccccaacgccctcgg

SEQ ID NO: 1072747 - DNA, 15 bp, Homo sapiens
cccccaacgccctcg

SEQ ID NO: 1072748 - DNA, 15 bp, Homo sapiens
gcccccaacgccctc

SEQ ID NO: 1072749 - DNA, 15 bp, Homo sapiens
ggcccccaacgccct

SEQ ID NO: 1072750 - DNA, 15 bp, Homo sapiens
cggcccccaacgccc

SEQ ID NO: 1072751 - DNA, 15 bp, Homo sapiens
ccggcccccaacgcc

SEQ ID NO: 1072752 - DNA, 15 bp, Homo sapiens
cccggcccccaacgc

SEQ ID NO: 1072753 - DNA, 15 bp, Homo sapiens
ccccggcccccaacg

SEQ ID NO: 1072754 - DNA, 15 bp, Homo sapiens
cccccggcccccaac

SEQ ID NO: 1072755 - DNA, 15 bp, Homo sapiens
tcccccggcccccaa

SEQ ID NO: 1072756 - DNA, 15 bp, Homo sapiens
atcccccggccccca

SEQ ID NO: 1072757 - DNA, 15 bp, Homo sapiens
tatcccccggccccc

SEQ ID NO: 1072758 - DNA, 15 bp, Homo sapiens
gtatcccccggcccc

SEQ ID NO: 1072759 - DNA, 15 bp, Homo sapiens
tgtatcccccggccc

SEQ ID NO: 1072760 - DNA, 15 bp, Homo sapiens
ctgtatcccccggcc

SEQ ID NO: 1072761 - DNA, 15 bp, Homo sapiens
cctgtatcccccggc

SEQ ID NO: 1072762 - DNA, 15 bp, Homo sapiens
ccctgtatcccccgg

SEQ ID NO: 1072763 - DNA, 15 bp, Homo sapiens
cccctgtatcccccg

SEQ ID NO: 1072764 - DNA, 15 bp, Homo sapiens
tcccctgtatccccc

SEQ ID NO: 1072765 - DNA, 15 bp, Homo sapiens
gtcccctgtatcccc

SEQ ID NO: 1072766 - DNA, 15 bp, Homo sapiens
tgtcccctgtatccc

SEQ ID NO: 1072767 - DNA, 15 bp, Homo sapiens
ctgtcccctgtatcc

SEQ ID NO: 1072768 - DNA, 15 bp, Homo sapiens
gctgtcccctgtatc

SEQ ID NO: 1072769 - DNA, 15 bp, Homo sapiens
agctgtcccctgtat

SEQ ID NO: 1072770 - DNA, 15 bp, Homo sapiens
gagctgtcccctgta

SEQ ID NO: 1072771 - DNA, 15 bp, Homo sapiens
cgagctgtcccctgt

SEQ ID NO: 1072772 - DNA, 15 bp, Homo sapiens
ccgagctgtcccctg

SEQ ID NO: 1072773 - DNA, 15 bp, Homo sapiens
cccgagctgtcccct

SEQ ID NO: 1072774 - DNA, 15 bp, Homo sapiens
tcccgagctgtcccc

SEQ ID NO: 1072775 - DNA, 15 bp, Homo sapiens
ctcccgagctgtccc

SEQ ID NO: 1072776 - DNA, 15 bp, Homo sapiens
gctcccgagctgtcc

SEQ ID NO: 1072777 - DNA, 15 bp, Homo sapiens
tgctcccgagctgtc

SEQ ID NO: 1072778 - DNA, 15 bp, Homo sapiens
ctgctcccgagctgt

SEQ ID NO: 1072779 - DNA, 15 bp, Homo sapiens
gctgctcccgagctg

SEQ ID NO: 1072780 - DNA, 15 bp, Homo sapiens
ggctgctcccgagct

SEQ ID NO: 1072781 - DNA, 15 bp, Homo sapiens
cggctgctcccgagc

SEQ ID NO: 1072782 - DNA, 15 bp, Homo sapiens
ccggctgctcccgag

SEQ ID NO: 1072783 - DNA, 15 bp, Homo sapiens
cccggctgctcccga

SEQ ID NO: 1072784 - DNA, 15 bp, Homo sapiens
acccggctgctcccg

SEQ ID NO: 1072785 - DNA, 15 bp, Homo sapiens
cacccggctgctccc

SEQ ID NO: 1072786 - DNA, 15 bp, Homo sapiens
ccacccggctgctcc

SEQ ID NO: 1072787 - DNA, 15 bp, Homo sapiens
cccacccggctgctc

SEQ ID NO: 1072788 - DNA, 15 bp, Homo sapiens
ccccacccggctgct

SEQ ID NO: 1072789 - DNA, 15 bp, Homo sapiens
cccccacccggctgc

SEQ ID NO: 1072790 - DNA, 15 bp, Homo sapiens
acccccacccggctg

SEQ ID NO: 1072791 - DNA, 15 bp, Homo sapiens
cacccccacccggct

SEQ ID NO: 1072792 - DNA, 15 bp, Homo sapiens
ccacccccacccggc

SEQ ID NO: 1072793 - DNA, 15 bp, Homo sapiens
gccacccccacccgg

SEQ ID NO: 1072794 - DNA, 15 bp, Homo sapiens
ggccacccccacccg

SEQ ID NO: 1072795 - DNA, 15 bp, Homo sapiens
cggccacccccaccc

SEQ ID NO: 1072796 - DNA, 15 bp, Homo sapiens
tcggccacccccacc

SEQ ID NO: 1072797 - DNA, 15 bp, Homo sapiens
ctcggccacccccac

SEQ ID NO: 1072798 - DNA, 15 bp, Homo sapiens
cctcggccaccccca

SEQ ID NO: 1072799 - DNA, 15 bp, Homo sapiens
gcgccctcggccacc

SEQ ID NO: 1072800 - DNA, 15 bp, Homo sapiens
cgcgccctcggccac

SEQ ID NO: 1072801 - DNA, 15 bp, Homo sapiens
ccgcgccctcggcca

SEQ ID NO: 1072802 - DNA, 15 bp, Homo sapiens
cccgcgccctcggcc

SEQ ID NO: 1072803 - DNA, 15 bp, Homo sapiens
tccccgcgccctcgg

SEQ ID NO: 1072804 - DNA, 15 bp, Homo sapiens
ctccccgcgccctcg

SEQ ID NO: 1072805 - DNA, 15 bp, Homo sapiens
gctccccgcgccctc

SEQ ID NO: 1072806 - DNA, 15 bp, Homo sapiens
tgctccccgcgccct

SEQ ID NO: 1072807 - DNA, 15 bp, Homo sapiens
ctgctccccgcgccc

SEQ ID NO: 1072808 - DNA, 15 bp, Homo sapiens
gctgctccccgcgcc

SEQ ID NO: 1072809 - DNA, 15 bp, Homo sapiens
agctgctccccgcgc

SEQ ID NO: 1072810 - DNA, 15 bp, Homo sapiens
aagctgctccccgcg

SEQ ID NO: 1072811 - DNA, 15 bp, Homo sapiens
caagctgctccccgc

SEQ ID NO: 1072812 - DNA, 15 bp, Homo sapiens
ccaagctgctccccg

SEQ ID NO: 1072813 - DNA, 15 bp, Homo sapiens
cccaagctgctcccc

SEQ ID NO: 1072814 - DNA, 15 bp, Homo sapiens
ccccaagctgctccc

SEQ ID NO: 1072815 - DNA, 15 bp, Homo sapiens
cccccaagctgctcc

SEQ ID NO: 1072816 - DNA, 15 bp, Homo sapiens
acccccaagctgctc

SEQ ID NO: 1072817 - DNA, 15 bp, Homo sapiens
aacccccaagctgct

SEQ ID NO: 1072818 - DNA, 15 bp, Homo sapiens
caacccccaagctgc

SEQ ID NO: 1072819 - DNA, 15 bp, Homo sapiens
ccaacccccaagctg

SEQ ID NO: 1072820 - DNA, 15 bp, Homo sapiens
cccaacccccaagct

SEQ ID NO: 1072821 - DNA, 15 bp, Homo sapiens
ccccaacccccaagc

SEQ ID NO: 1072822 - DNA, 15 bp, Homo sapiens
cccccaacccccaag

SEQ ID NO: 1072823 - DNA, 15 bp, Homo sapiens
gcccccaacccccaa

SEQ ID NO: 1072824 - DNA, 15 bp, Homo sapiens
tgcccccaaccccca

SEQ ID NO: 1072825 - DNA, 15 bp, Homo sapiens
ctgcccccaaccccc

SEQ ID NO: 1072826 - DNA, 15 bp, Homo sapiens
gctgcccccaacccc

SEQ ID NO: 1072827 - DNA, 15 bp, Homo sapiens
ggctgcccccaaccc

SEQ ID NO: 1072828 - DNA, 15 bp, Homo sapiens
aggctgcccccaacc

SEQ ID NO: 1072829 - DNA, 15 bp, Homo sapiens
aaggctgcccccaac

SEQ ID NO: 1072830 - DNA, 15 bp, Homo sapiens
caaggctgcccccaa

SEQ ID NO: 1072831 - DNA, 15 bp, Homo sapiens
ccaaggctgccccca

SEQ ID NO: 1072832 - DNA, 15 bp, Homo sapiens
cgcccaaggctgccc

SEQ ID NO: 1072833 - DNA, 15 bp, Homo sapiens
tcgcccaaggctgcc

SEQ ID NO: 1072834 - DNA, 15 bp, Homo sapiens
ctcgcccaaggctgc

SEQ ID NO: 1072835 - DNA, 15 bp, Homo sapiens
cctcgcccaaggctg

SEQ ID NO: 1072836 - DNA, 15 bp, Homo sapiens
ccctcgcccaaggct

SEQ ID NO: 1072837 - DNA, 15 bp, Homo sapiens
tccctcgcccaaggc

SEQ ID NO: 1072838 - DNA, 15 bp, Homo sapiens
ttccctcgcccaagg

SEQ ID NO: 1072839 - DNA, 15 bp, Homo sapiens
attccctcgcccaag

SEQ ID NO: 1072840 - DNA, 15 bp, Homo sapiens
cattccctcgcccaa

SEQ ID NO: 1072841 - DNA, 15 bp, Homo sapiens
acattccctcgccca

SEQ ID NO: 1072842 - DNA, 15 bp, Homo sapiens
aacattccctcgccc

SEQ ID NO: 1072843 - DNA, 15 bp, Homo sapiens
caacattccctcgcc

SEQ ID NO: 1072844 - DNA, 15 bp, Homo sapiens
ccaacattccctcgc

SEQ ID NO: 1072845 - DNA, 15 bp, Homo sapiens
cccaacattccctcg

SEQ ID NO: 1072846 - DNA, 15 bp, Homo sapiens
ccccaacattccctc

SEQ ID NO: 1072847 - DNA, 15 bp, Homo sapiens
cccccaacattccct

SEQ ID NO: 1072848 - DNA, 15 bp, Homo sapiens
tcccccaacattccc

SEQ ID NO: 1072849 - DNA, 15 bp, Homo sapiens
gtcccccaacattcc

SEQ ID NO: 1072850 - DNA, 15 bp, Homo sapiens
cgtcccccaacattc

SEQ ID NO: 1072851 - DNA, 15 bp, Homo sapiens
gcgtcccccaacatt

SEQ ID NO: 1072852 - DNA, 15 bp, Homo sapiens
tgcgtcccccaacat

SEQ ID NO: 1072853 - DNA, 15 bp, Homo sapiens
ctgcgtcccccaaca

SEQ ID NO: 1072854 - DNA, 15 bp, Homo sapiens
cctgcgtcccccaac

SEQ ID NO: 1072855 - DNA, 15 bp, Homo sapiens
ccctgcgtcccccaa

SEQ ID NO: 1072856 - DNA, 15 bp, Homo sapiens
cccctgcgtccccca

SEQ ID NO: 1072857 - DNA, 15 bp, Homo sapiens
ccccctgcgtccccc

SEQ ID NO: 1072858 - DNA, 15 bp, Homo sapiens
gccccctgcgtcccc

SEQ ID NO: 1072859 - DNA, 15 bp, Homo sapiens
tgccccctgcgtccc

SEQ ID NO: 1072860 - DNA, 15 bp, Homo sapiens
ctgccccctgcgtcc

SEQ ID NO: 1072861 - DNA, 15 bp, Homo sapiens
gctgccccctgcgtc

SEQ ID NO: 1072862 - DNA, 15 bp, Homo sapiens
agctgccccctgcgt

SEQ ID NO: 1072863 - DNA, 15 bp, Homo sapiens
gagctgccccctgcg

SEQ ID NO: 1072864 - DNA, 15 bp, Homo sapiens
cgagctgccccctgc

SEQ ID NO: 1072865 - DNA, 15 bp, Homo sapiens
ccgagctgccccctg

SEQ ID NO: 1072866 - DNA, 15 bp, Homo sapiens
cccgagctgccccct

SEQ ID NO: 1072867 - DNA, 15 bp, Homo sapiens
acccgagctgccccc

SEQ ID NO: 1072868 - DNA, 15 bp, Homo sapiens
cacccgagctgcccc

SEQ ID NO: 1072869 - DNA, 15 bp, Homo sapiens
ccacccgagctgccc

SEQ ID NO: 1072870 - DNA, 15 bp, Homo sapiens
cccacccgagctgcc

SEQ ID NO: 1072871 - DNA, 15 bp, Homo sapiens
ccccacccgagctgc

SEQ ID NO: 1072872 - DNA, 15 bp, Homo sapiens
cccccacccgagctg

SEQ ID NO: 1072873 - DNA, 15 bp, Homo sapiens
acccccacccgagct

SEQ ID NO: 1072874 - DNA, 15 bp, Homo sapiens
cacccccacccgagc

SEQ ID NO: 1072875 - DNA, 15 bp, Homo sapiens
ccacccccacccgag

SEQ ID NO: 1072876 - DNA, 15 bp, Homo sapiens
gccacccccacccga

SEQ ID NO: 1072877 - DNA, 15 bp, Homo sapiens
accctcggccacccc

SEQ ID NO: 1072878 - DNA, 15 bp, Homo sapiens
caccctcggccaccc

SEQ ID NO: 1072879 - DNA, 15 bp, Homo sapiens
gcaccctcggccacc

SEQ ID NO: 1072880 - DNA, 15 bp, Homo sapiens
agcaccctcggccac

SEQ ID NO: 1072881 - DNA, 15 bp, Homo sapiens
cagcaccctcggcca

SEQ ID NO: 1072882 - DNA, 15 bp, Homo sapiens
ccagcaccctcggcc

SEQ ID NO: 1072883 - DNA, 15 bp, Homo sapiens
cccagcaccctcggc

SEQ ID NO: 1072884 - DNA, 15 bp, Homo sapiens
tcccagcaccctcgg

SEQ ID NO: 1072885 - DNA, 15 bp, Homo sapiens
ctcccagcaccctcg

SEQ ID NO: 1072886 - DNA, 15 bp, Homo sapiens
gctcccagcaccctc

SEQ ID NO: 1072887 - DNA, 15 bp, Homo sapiens
ggctcccagcaccct

SEQ ID NO: 1072888 - DNA, 15 bp, Homo sapiens
tggctcccagcaccc

SEQ ID NO: 1072889 - DNA, 15 bp, Homo sapiens
gtggctcccagcacc

SEQ ID NO: 1072890 - DNA, 15 bp, Homo sapiens
tgtggctcccagcac

SEQ ID NO: 1072891 - DNA, 15 bp, Homo sapiens
ctgtggctcccagca

SEQ ID NO: 1072892 - DNA, 15 bp, Homo sapiens
cctgtggctcccagc

SEQ ID NO: 1072893 - DNA, 15 bp, Homo sapiens
ccctgtggctcccag

SEQ ID NO: 1072894 - DNA, 15 bp, Homo sapiens
cccctgtggctccca

SEQ ID NO: 1072895 - DNA, 15 bp, Homo sapiens
ccccctgtggctccc

SEQ ID NO: 1072896 - DNA, 15 bp, Homo sapiens
gccccctgtggctcc

SEQ ID NO: 1072897 - DNA, 15 bp, Homo sapiens
ggccccctgtggctc

SEQ ID NO: 1072898 - DNA, 15 bp, Homo sapiens
cggccccctgtggct

SEQ ID NO: 1072899 - DNA, 15 bp, Homo sapiens
tcggccccctgtggc

SEQ ID NO: 1072900 - DNA, 15 bp, Homo sapiens
ctcggccccctgtgg

SEQ ID NO: 1072901 - DNA, 15 bp, Homo sapiens
cctcggccccctgtg

SEQ ID NO: 1072902 - DNA, 15 bp, Homo sapiens
ccctcggccccctgt

SEQ ID NO: 1072903 - DNA, 15 bp, Homo sapiens
gccctcggccccctg

SEQ ID NO: 1072904 - DNA, 15 bp, Homo sapiens
agccctcggccccct

SEQ ID NO: 1072905 - DNA, 15 bp, Homo sapiens
cagccctcggccccc

SEQ ID NO: 1072906 - DNA, 15 bp, Homo sapiens
ccagccctcggcccc

SEQ ID NO: 1072907 - DNA, 15 bp, Homo sapiens
cccagccctcggccc

SEQ ID NO: 1072908 - DNA, 15 bp, Homo sapiens
ccccagccctcggcc

SEQ ID NO: 1072909 - DNA, 15 bp, Homo sapiens
tccccagccctcggc

SEQ ID NO: 1072910 - DNA, 15 bp, Homo sapiens
ctccccagccctcgg

SEQ ID NO: 1072911 - DNA, 15 bp, Homo sapiens
tctccccagccctcg

SEQ ID NO: 1072912 - DNA, 15 bp, Homo sapiens
ttctccccagccctc

SEQ ID NO: 1072913 - DNA, 15 bp, Homo sapiens
gttctccccagccct

SEQ ID NO: 1072914 - DNA, 15 bp, Homo sapiens
tgttctccccagccc

SEQ ID NO: 1072915 - DNA, 15 bp, Homo sapiens
ctgttctccccagcc

SEQ ID NO: 1072916 - DNA, 15 bp, Homo sapiens
cctgttctccccagc

SEQ ID NO: 1072917 - DNA, 15 bp, Homo sapiens
ccctgttctccccag

SEQ ID NO: 1072918 - DNA, 15 bp, Homo sapiens
cccctgttctcccca

SEQ ID NO: 1072919 - DNA, 15 bp, Homo sapiens
gcccctgttctcccc

SEQ ID NO: 1072920 - DNA, 15 bp, Homo sapiens
tgcccctgttctccc

SEQ ID NO: 1072921 - DNA, 15 bp, Homo sapiens
gtgcccctgttctcc

SEQ ID NO: 1072922 - DNA, 15 bp, Homo sapiens
ggtgcccctgttctc

SEQ ID NO: 1072923 - DNA, 15 bp, Homo sapiens
cggtgcccctgttct

SEQ ID NO: 1072924 - DNA, 15 bp, Homo sapiens
gcggtgcccctgttc

SEQ ID NO: 1072925 - DNA, 15 bp, Homo sapiens
cgcggtgcccctgtt

SEQ ID NO: 1072926 - DNA, 15 bp, Homo sapiens
ccgcggtgcccctgt

SEQ ID NO: 1072927 - DNA, 15 bp, Homo sapiens
cccgcggtgcccctg

SEQ ID NO: 1072928 - DNA, 15 bp, Homo sapiens
ccccgcggtgcccct

SEQ ID NO: 1072929 - DNA, 15 bp, Homo sapiens
accccgcggtgcccc

SEQ ID NO: 1072930 - DNA, 15 bp, Homo sapiens
aaccccgcggtgccc

SEQ ID NO: 1072931 - DNA, 15 bp, Homo sapiens
caaccccgcggtgcc

SEQ ID NO: 1072932 - DNA, 15 bp, Homo sapiens
ccaaccccgcggtgc

SEQ ID NO: 1072933 - DNA, 15 bp, Homo sapiens
tccaaccccgcggtg

SEQ ID NO: 1072934 - DNA, 15 bp, Homo sapiens
ctccaaccccgcggt

SEQ ID NO: 1072935 - DNA, 15 bp, Homo sapiens
cctccaaccccgcgg

SEQ ID NO: 1072936 - DNA, 15 bp, Homo sapiens
ccctccaaccccgcg

SEQ ID NO: 1072937 - DNA, 15 bp, Homo sapiens
tccctccaaccccgc

SEQ ID NO: 1072938 - DNA, 15 bp, Homo sapiens
ctccctccaaccccg

SEQ ID NO: 1072939 - DNA, 15 bp, Homo sapiens
cctccctccaacccc

SEQ ID NO: 1072940 - DNA, 15 bp, Homo sapiens
tcctccctccaaccc

SEQ ID NO: 1072941 - DNA, 15 bp, Homo sapiens
gtcctccctccaacc

SEQ ID NO: 1072942 - DNA, 15 bp, Homo sapiens
cgtcctccctccaac

SEQ ID NO: 1072943 - DNA, 15 bp, Homo sapiens
gcgtcctccctccaa

SEQ ID NO: 1072944 - DNA, 15 bp, Homo sapiens
ggcgtcctccctcca

SEQ ID NO: 1072945 - DNA, 15 bp, Homo sapiens
tggcgtcctccctcc

SEQ ID NO: 1072946 - DNA, 15 bp, Homo sapiens
ctggcgtcctccctc

SEQ ID NO: 1072947 - DNA, 15 bp, Homo sapiens
cctggcgtcctccct

SEQ ID NO: 1072948 - DNA, 15 bp, Homo sapiens
gcctggcgtcctccc

SEQ ID NO: 1072949 - DNA, 15 bp, Homo sapiens
agcctggcgtcctcc

SEQ ID NO: 1072950 - DNA, 15 bp, Homo sapiens
cagcctggcgtcctc

SEQ ID NO: 1072951 - DNA, 15 bp, Homo sapiens
acagcctggcgtcct

SEQ ID NO: 1072952 - DNA, 15 bp, Homo sapiens
cacagcctggcgtcc

SEQ ID NO: 1072953 - DNA, 15 bp, Homo sapiens
acacagcctggcgtc

SEQ ID NO: 1072954 - DNA, 15 bp, Homo sapiens
cacacagcctggcgt

SEQ ID NO: 1072955 - DNA, 15 bp, Homo sapiens
ggcacacagcctggc

SEQ ID NO: 1072956 - DNA, 15 bp, Homo sapiens
aggcacacagcctgg

SEQ ID NO: 1072957 - DNA, 15 bp, Homo sapiens
caggcacacagcctg

SEQ ID NO: 1072958 - DNA, 15 bp, Homo sapiens
gcaggcacacagcct

SEQ ID NO: 1072959 - DNA, 15 bp, Homo sapiens
ggcaggcacacagcc

SEQ ID NO: 1072960 - DNA, 15 bp, Homo sapiens
aggcaggcacacagc

SEQ ID NO: 1072961 - DNA, 15 bp, Homo sapiens
caggcaggcacacag

SEQ ID NO: 1072962 - DNA, 15 bp, Homo sapiens
ccaggcaggcacaca

SEQ ID NO: 1072963 - DNA, 15 bp, Homo sapiens
gccaggcaggcacac

SEQ ID NO: 1072964 - DNA, 15 bp, Homo sapiens
agccaggcaggcaca

SEQ ID NO: 1072965 - DNA, 15 bp, Homo sapiens
cagccaggcaggcac

SEQ ID NO: 1072966 - DNA, 15 bp, Homo sapiens
ccagccaggcaggca

SEQ ID NO: 1072967 - DNA, 15 bp, Homo sapiens
cccagccaggcaggc

SEQ ID NO: 1072968 - DNA, 15 bp, Homo sapiens
ccccagccaggcagg

SEQ ID NO: 1072969 - DNA, 15 bp, Homo sapiens
gccccagccaggcag

SEQ ID NO: 1072970 - DNA, 15 bp, Homo sapiens
cgccccagccaggca

SEQ ID NO: 1072971 - DNA, 15 bp, Homo sapiens
tcgccccagccaggc

SEQ ID NO: 1072972 - DNA, 15 bp, Homo sapiens
gtcgccccagccagg

SEQ ID NO: 1072973 - DNA, 15 bp, Homo sapiens
tgtcgccccagccag

SEQ ID NO: 1072974 - DNA, 15 bp, Homo sapiens
ctgtcgccccagcca

SEQ ID NO: 1072975 - DNA, 15 bp, Homo sapiens
cctgtcgccccagcc

SEQ ID NO: 1072976 - DNA, 15 bp, Homo sapiens
tcctgtcgccccagc

SEQ ID NO: 1072977 - DNA, 15 bp, Homo sapiens
ttcctgtcgccccag

SEQ ID NO: 1072978 - DNA, 15 bp, Homo sapiens
attcctgtcgcccca

SEQ ID NO: 1072979 - DNA, 15 bp, Homo sapiens
gattcctgtcgcccc

SEQ ID NO: 1072980 - DNA, 15 bp, Homo sapiens
ggattcctgtcgccc

SEQ ID NO: 1072981 - DNA, 15 bp, Homo sapiens
tggattcctgtcgcc

SEQ ID NO: 1072982 - DNA, 15 bp, Homo sapiens
atggattcctgtcgc

SEQ ID NO: 1072983 - DNA, 15 bp, Homo sapiens
gatggattcctgtcg

SEQ ID NO: 1072984 - DNA, 15 bp, Homo sapiens
agatggattcctgtc

SEQ ID NO: 1072985 - DNA, 15 bp, Homo sapiens
aagatggattcctgt

SEQ ID NO: 1072986 - DNA, 15 bp, Homo sapiens
caagatggattcctg

SEQ ID NO: 1072987 - DNA, 15 bp, Homo sapiens
ccaagatggattcct

SEQ ID NO: 1072988 - DNA, 15 bp, Homo sapiens
gccaagatggattcc

SEQ ID NO: 1072989 - DNA, 15 bp, Homo sapiens
tgccaagatggattc

SEQ ID NO: 1072990 - DNA, 15 bp, Homo sapiens
ctgccaagatggatt

SEQ ID NO: 1072991 - DNA, 15 bp, Homo sapiens
actgccaagatggat

SEQ ID NO: 1072992 - DNA, 15 bp, Homo sapiens
cactgccaagatgga

SEQ ID NO: 1072993 - DNA, 15 bp, Homo sapiens
ccactgccaagatgg

SEQ ID NO: 1072994 - DNA, 15 bp, Homo sapiens
cccactgccaagatg

SEQ ID NO: 1072995 - DNA, 15 bp, Homo sapiens
acccactgccaagat

SEQ ID NO: 1072996 - DNA, 15 bp, Homo sapiens
cacccactgccaaga

SEQ ID NO: 1072997 - DNA, 15 bp, Homo sapiens
gcacccactgccaag

SEQ ID NO: 1072998 - DNA, 15 bp, Homo sapiens
ggcacccactgccaa

SEQ ID NO: 1072999 - DNA, 15 bp, Homo sapiens
aggcacccactgcca

SEQ ID NO: 1073000 - DNA, 15 bp, Homo sapiens
gaggcacccactgcc

SEQ ID NO: 1073001 - DNA, 15 bp, Homo sapiens
ggaggcacccactgc

SEQ ID NO: 1073002 - DNA, 15 bp, Homo sapiens
cggaggcacccactg

SEQ ID NO: 1073003 - DNA, 15 bp, Homo sapiens
gcggaggcacccact

SEQ ID NO: 1073004 - DNA, 15 bp, Homo sapiens
cgcggaggcacccac

SEQ ID NO: 1073005 - DNA, 15 bp, Homo sapiens
ccgcggaggcaccca

SEQ ID NO: 1073006 - DNA, 15 bp, Homo sapiens
accgcggaggcaccc

SEQ ID NO: 1073007 - DNA, 15 bp, Homo sapiens
gaccgcggaggcacc

SEQ ID NO: 1073008 - DNA, 15 bp, Homo sapiens
ggaccgcggaggcac

SEQ ID NO: 1073009 - DNA, 15 bp, Homo sapiens
tggaccgcggaggca

SEQ ID NO: 1073010 - DNA, 15 bp, Homo sapiens
ctggaccgcggaggc

SEQ ID NO: 1073011 - DNA, 15 bp, Homo sapiens
cctggaccgcggagg

SEQ ID NO: 1073012 - DNA, 15 bp, Homo sapiens
ccctggaccgcggag

SEQ ID NO: 1073013 - DNA, 15 bp, Homo sapiens
tccctggaccgcgga

SEQ ID NO: 1073014 - DNA, 15 bp, Homo sapiens
atccctggaccgcgg

SEQ ID NO: 1073015 - DNA, 15 bp, Homo sapiens
gatccctggaccgcg

SEQ ID NO: 1073016 - DNA, 15 bp, Homo sapiens
agatccctggaccgc

SEQ ID NO: 1073017 - DNA, 15 bp, Homo sapiens
gagatccctggaccg

SEQ ID NO: 1073018 - DNA, 15 bp, Homo sapiens
cgagatccctggacc

SEQ ID NO: 1073019 - DNA, 15 bp, Homo sapiens
acgagatccctggac

SEQ ID NO: 1073020 - DNA, 15 bp, Homo sapiens
cacgagatccctgga

SEQ ID NO: 1073021 - DNA, 15 bp, Homo sapiens
tcacgagatccctgg

SEQ ID NO: 1073022 - DNA, 15 bp, Homo sapiens
gtcacgagatccctg

SEQ ID NO: 1073023 - DNA, 15 bp, Homo sapiens
ggtcacgagatccct

SEQ ID NO: 1073024 - DNA, 15 bp, Homo sapiens
gggtcacgagatccc

SEQ ID NO: 1073025 - DNA, 15 bp, Homo sapiens
cgggtcacgagatcc

SEQ ID NO: 1073026 - DNA, 15 bp, Homo sapiens
ccgggtcacgagatc

SEQ ID NO: 1073027 - DNA, 15 bp, Homo sapiens
gccgggtcacgagat

SEQ ID NO: 1073028 - DNA, 15 bp, Homo sapiens
tgccgggtcacgaga

SEQ ID NO: 1073029 - DNA, 15 bp, Homo sapiens
ctgccgggtcacgag

SEQ ID NO: 1073030 - DNA, 15 bp, Homo sapiens
actgccgggtcacga

SEQ ID NO: 1073031 - DNA, 15 bp, Homo sapiens
tactgccgggtcacg

SEQ ID NO: 1073032 - DNA, 15 bp, Homo sapiens
ttactgccgggtcac

SEQ ID NO: 1073033 - DNA, 15 bp, Homo sapiens
gttactgccgggtca

SEQ ID NO: 1073034 - DNA, 15 bp, Homo sapiens
tgttactgccgggtc

SEQ ID NO: 1073035 - DNA, 15 bp, Homo sapiens
ttgttactgccgggt

SEQ ID NO: 1073036 - DNA, 15 bp, Homo sapiens
attgttactgccggg

SEQ ID NO: 1073037 - DNA, 15 bp, Homo sapiens
aattgttactgccgg

SEQ ID NO: 1073038 - DNA, 15 bp, Homo sapiens
aaattgttactgccg

SEQ ID NO: 1073039 - DNA, 15 bp, Homo sapiens
caaattgttactgcc

SEQ ID NO: 1073040 - DNA, 15 bp, Homo sapiens
ccaaattgttactgc

SEQ ID NO: 1073041 - DNA, 15 bp, Homo sapiens
accaaattgttactg

SEQ ID NO: 1073042 - DNA, 15 bp, Homo sapiens
aaccaaattgttact

SEQ ID NO: 1073043 - DNA, 15 bp, Homo sapiens
aaaccaaattgttac

SEQ ID NO: 1073044 - DNA, 15 bp, Homo sapiens
aaaaccaaattgtta

SEQ ID NO: 1073045 - DNA, 15 bp, Homo sapiens
gaaaaccaaattgtt

SEQ ID NO: 1073046 - DNA, 15 bp, Homo sapiens
ggaaaaccaaattgt

SEQ ID NO: 1073047 - DNA, 15 bp, Homo sapiens
aggaaaaccaaattg

SEQ ID NO: 1073048 - DNA, 15 bp, Homo sapiens
caggaaaaccaaatt

SEQ ID NO: 1073049 - DNA, 15 bp, Homo sapiens
tcaggaaaaccaaat

SEQ ID NO: 1073050 - DNA, 15 bp, Homo sapiens
ttcaggaaaaccaaa

SEQ ID NO: 1073051 - DNA, 15 bp, Homo sapiens
tttcaggaaaaccaa

SEQ ID NO: 1073052 - DNA, 15 bp, Homo sapiens
ttttcaggaaaacca

SEQ ID NO: 1073053 - DNA, 15 bp, Homo sapiens
cttttcaggaaaacc

SEQ ID NO: 1073054 - DNA, 15 bp, Homo sapiens
tcttttcaggaaaac

SEQ ID NO: 1073055 - DNA, 15 bp, Homo sapiens
atcttttcaggaaaa

SEQ ID NO: 1073056 - DNA, 15 bp, Homo sapiens
catcttttcaggaaa

SEQ ID NO: 1073057 - DNA, 15 bp, Homo sapiens
tcatcttttcaggaa

SEQ ID NO: 1073058 - DNA, 15 bp, Homo sapiens
atcatcttttcagga

SEQ ID NO: 1073059 - DNA, 15 bp, Homo sapiens
catcatcttttcagg

SEQ ID NO: 1073060 - DNA, 15 bp, Homo sapiens
ccatcatcttttcag

SEQ ID NO: 1073061 - DNA, 15 bp, Homo sapiens
accatcatcttttca

SEQ ID NO: 1073062 - DNA, 15 bp, Homo sapiens
taccatcatcttttc

SEQ ID NO: 1073063 - DNA, 15 bp, Homo sapiens
ttaccatcatctttt

SEQ ID NO: 1073064 - DNA, 15 bp, Homo sapiens
attaccatcatcttt

SEQ ID NO: 1073065 - DNA, 15 bp, Homo sapiens
aattaccatcatctt

SEQ ID NO: 1073066 - DNA, 15 bp, Homo sapiens
gaattaccatcatct

SEQ ID NO: 1073067 - DNA, 15 bp, Homo sapiens
cgaattaccatcatc

SEQ ID NO: 1073068 - DNA, 15 bp, Homo sapiens
ccgaattaccatcat

SEQ ID NO: 1073069 - DNA, 15 bp, Homo sapiens
accgaattaccatca

SEQ ID NO: 1073070 - DNA, 15 bp, Homo sapiens
caccgaattaccatc

SEQ ID NO: 1073071 - DNA, 15 bp, Homo sapiens
acaccgaattaccat

SEQ ID NO: 1073072 - DNA, 15 bp, Homo sapiens
tacaccgaattacca

SEQ ID NO: 1073073 - DNA, 15 bp, Homo sapiens
ttacaccgaattacc

SEQ ID NO: 1073074 - DNA, 15 bp, Homo sapiens
cttacaccgaattac

SEQ ID NO: 1073075 - DNA, 15 bp, Homo sapiens
tcttacaccgaatta

SEQ ID NO: 1073076 - DNA, 15 bp, Homo sapiens
gtcttacaccgaatt

SEQ ID NO: 1073077 - DNA, 15 bp, Homo sapiens
ggtcttacaccgaat

SEQ ID NO: 1073078 - DNA, 15 bp, Homo sapiens
aggtcttacaccgaa

SEQ ID NO: 1073079 - DNA, 15 bp, Homo sapiens
caggtcttacaccga

SEQ ID NO: 1073080 - DNA, 15 bp, Homo sapiens
ccaggtcttacaccg

SEQ ID NO: 1073081 - DNA, 15 bp, Homo sapiens
cccaggtcttacacc

SEQ ID NO: 1073082 - DNA, 15 bp, Homo sapiens
ccccaggtcttacac

SEQ ID NO: 1073083 - DNA, 15 bp, Homo sapiens
cccccaggtcttaca

SEQ ID NO: 1073084 - DNA, 15 bp, Homo sapiens
acccccaggtcttac

SEQ ID NO: 1073085 - DNA, 15 bp, Homo sapiens
tacccccaggtctta

SEQ ID NO: 1073086 - DNA, 15 bp, Homo sapiens
ctacccccaggtctt

SEQ ID NO: 1073087 - DNA, 15 bp, Homo sapiens
cctacccccaggtct

SEQ ID NO: 1073088 - DNA, 15 bp, Homo sapiens
tcctacccccaggtc

SEQ ID NO: 1073089 - DNA, 15 bp, Homo sapiens
ctcctacccccaggt

SEQ ID NO: 1073090 - DNA, 15 bp, Homo sapiens
cctcctacccccagg

SEQ ID NO: 1073091 - DNA, 15 bp, Homo sapiens
gcctcctacccccag

SEQ ID NO: 1073092 - DNA, 15 bp, Homo sapiens
tgcctcctaccccca

SEQ ID NO: 1073093 - DNA, 15 bp, Homo sapiens
ctgcctcctaccccc

SEQ ID NO: 1073094 - DNA, 15 bp, Homo sapiens
gctgcctcctacccc

SEQ ID NO: 1073095 - DNA, 15 bp, Homo sapiens
agctgcctcctaccc

SEQ ID NO: 1073096 - DNA, 15 bp, Homo sapiens
cagctgcctcctacc

SEQ ID NO: 1073097 - DNA, 15 bp, Homo sapiens
tcagctgcctcctac

SEQ ID NO: 1073098 - DNA, 15 bp, Homo sapiens
ttcagctgcctccta

SEQ ID NO: 1073099 - DNA, 15 bp, Homo sapiens
tttcagctgcctcct

SEQ ID NO: 1073100 - DNA, 15 bp, Homo sapiens
gtttcagctgcctcc

SEQ ID NO: 1073101 - DNA, 15 bp, Homo sapiens
agtttcagctgcctc

SEQ ID NO: 1073102 - DNA, 15 bp, Homo sapiens
aagtttcagctgcct

SEQ ID NO: 1073103 - DNA, 15 bp, Homo sapiens
caagtttcagctgcc

SEQ ID NO: 1073104 - DNA, 15 bp, Homo sapiens
ccaagtttcagctgc

SEQ ID NO: 1073105 - DNA, 15 bp, Homo sapiens
tccaagtttcagctg

SEQ ID NO: 1073106 - DNA, 15 bp, Homo sapiens
gtccaagtttcagct

SEQ ID NO: 1073107 - DNA, 15 bp, Homo sapiens
ggtccaagtttcagc

SEQ ID NO: 1073108 - DNA, 15 bp, Homo sapiens
gggtccaagtttcag

SEQ ID NO: 1073109 - DNA, 15 bp, Homo sapiens
ggggtccaagtttca

SEQ ID NO: 1073110 - DNA, 15 bp, Homo sapiens
gggggtccaagtttc

SEQ ID NO: 1073111 - DNA, 15 bp, Homo sapiens
tgggggtccaagttt

SEQ ID NO: 1073112 - DNA, 15 bp, Homo sapiens
gtgggggtccaagtt

SEQ ID NO: 1073113 - DNA, 15 bp, Homo sapiens
agtgggggtccaagt

SEQ ID NO: 1073114 - DNA, 15 bp, Homo sapiens
cagtgggggtccaag

SEQ ID NO: 1073115 - DNA, 15 bp, Homo sapiens
ccagtgggggtccaa

SEQ ID NO: 1073116 - DNA, 15 bp, Homo sapiens
tccagtgggggtcca

SEQ ID NO: 1073117 - DNA, 15 bp, Homo sapiens
ctccagtgggggtcc

SEQ ID NO: 1073118 - DNA, 15 bp, Homo sapiens
actccagtgggggtc

SEQ ID NO: 1073119 - DNA, 15 bp, Homo sapiens
gactccagtgggggt

SEQ ID NO: 1073120 - DNA, 15 bp, Homo sapiens
ggactccagtggggg

SEQ ID NO: 1073121 - DNA, 15 bp, Homo sapiens
gggactccagtgggg

SEQ ID NO: 1073122 - DNA, 15 bp, Homo sapiens
ggggactccagtggg

SEQ ID NO: 1073123 - DNA, 15 bp, Homo sapiens
aggggactccagtgg

SEQ ID NO: 1073124 - DNA, 15 bp, Homo sapiens
aaggggactccagtg

SEQ ID NO: 1073125 - DNA, 15 bp, Homo sapiens
gaaggggactccagt

SEQ ID NO: 1073126 - DNA, 15 bp, Homo sapiens
agaaggggactccag

SEQ ID NO: 1073127 - DNA, 15 bp, Homo sapiens
aagaaggggactcca

SEQ ID NO: 1073128 - DNA, 15 bp, Homo sapiens
gaagaaggggactcc

SEQ ID NO: 1073129 - DNA, 15 bp, Homo sapiens
ggaagaaggggactc

SEQ ID NO: 1073130 - DNA, 15 bp, Homo sapiens
tggaagaaggggact

SEQ ID NO: 1073131 - DNA, 15 bp, Homo sapiens
atggaagaaggggac

SEQ ID NO: 1073132 - DNA, 15 bp, Homo sapiens
aatggaagaagggga

SEQ ID NO: 1073133 - DNA, 15 bp, Homo sapiens
gaatggaagaagggg

SEQ ID NO: 1073134 - DNA, 15 bp, Homo sapiens
agaatggaagaaggg

SEQ ID NO: 1073135 - DNA, 15 bp, Homo sapiens
aagaatggaagaagg

SEQ ID NO: 1073136 - DNA, 15 bp, Homo sapiens
aaagaatggaagaag

SEQ ID NO: 1073137 - DNA, 15 bp, Homo sapiens
aaaagaatggaagaa

SEQ ID NO: 1073138 - DNA, 15 bp, Homo sapiens
gaaaagaatggaaga

SEQ ID NO: 1073139 - DNA, 15 bp, Homo sapiens
agaaaagaatggaag

SEQ ID NO: 1073140 - DNA, 15 bp, Homo sapiens
gagaaaagaatggaa

SEQ ID NO: 1073141 - DNA, 15 bp, Homo sapiens
ggagaaaagaatgga

SEQ ID NO: 1073142 - DNA, 15 bp, Homo sapiens
gggagaaaagaatgg

SEQ ID NO: 1073143 - DNA, 15 bp, Homo sapiens
agggagaaaagaatg

SEQ ID NO: 1073144 - DNA, 15 bp, Homo sapiens
cagggagaaaagaat

SEQ ID NO: 1073145 - DNA, 15 bp, Homo sapiens
gcagggagaaaagaa

SEQ ID NO: 1073146 - DNA, 15 bp, Homo sapiens
agcagggagaaaaga

SEQ ID NO: 1073147 - DNA, 15 bp, Homo sapiens
aagcagggagaaaag

SEQ ID NO: 1073148 - DNA, 15 bp, Homo sapiens
aaagcagggagaaaa

SEQ ID NO: 1073149 - DNA, 15 bp, Homo sapiens
caaagcagggagaaa

SEQ ID NO: 1073150 - DNA, 15 bp, Homo sapiens
acaaagcagggagaa

SEQ ID NO: 1073151 - DNA, 15 bp, Homo sapiens
cacaaagcagggaga

SEQ ID NO: 1073152 - DNA, 15 bp, Homo sapiens
gcacaaagcagggag

SEQ ID NO: 1073153 - DNA, 15 bp, Homo sapiens
ggcacaaagcaggga

SEQ ID NO: 1073154 - DNA, 15 bp, Homo sapiens
gggcacaaagcaggg

SEQ ID NO: 1073155 - DNA, 15 bp, Homo sapiens
tgggcacaaagcagg

SEQ ID NO: 1073156 - DNA, 15 bp, Homo sapiens
ctgggcacaaagcag

SEQ ID NO: 1073157 - DNA, 15 bp, Homo sapiens
cctgggcacaaagca

SEQ ID NO: 1073158 - DNA, 15 bp, Homo sapiens
ccctgggcacaaagc

SEQ ID NO: 1073159 - DNA, 15 bp, Homo sapiens
cccctgggcacaaag

SEQ ID NO: 1073160 - DNA, 15 bp, Homo sapiens
ccccctgggcacaaa

SEQ ID NO: 1073161 - DNA, 15 bp, Homo sapiens
tccccctgggcacaa

SEQ ID NO: 1073162 - DNA, 15 bp, Homo sapiens
ctccccctgggcaca

SEQ ID NO: 1073163 - DNA, 15 bp, Homo sapiens
gctccccctgggcac

SEQ ID NO: 1073164 - DNA, 15 bp, Homo sapiens
tgctccccctgggca

SEQ ID NO: 1073165 - DNA, 15 bp, Homo sapiens
gtgctccccctgggc

SEQ ID NO: 1073166 - DNA, 15 bp, Homo sapiens
tgtgctccccctggg

SEQ ID NO: 1073167 - DNA, 15 bp, Homo sapiens
ctgtgctccccctgg

SEQ ID NO: 1073168 - DNA, 15 bp, Homo sapiens
tctgtgctccccctg

SEQ ID NO: 1073169 - DNA, 15 bp, Homo sapiens
gtctgtgctccccct

SEQ ID NO: 1073170 - DNA, 15 bp, Homo sapiens
ggtctgtgctccccc

SEQ ID NO: 1073171 - DNA, 15 bp, Homo sapiens
aggtctgtgctcccc

SEQ ID NO: 1073172 - DNA, 15 bp, Homo sapiens
aaggtctgtgctccc

SEQ ID NO: 1073173 - DNA, 15 bp, Homo sapiens
gaaggtctgtgctcc

SEQ ID NO: 1073174 - DNA, 15 bp, Homo sapiens
ggaaggtctgtgctc

SEQ ID NO: 1073175 - DNA, 15 bp, Homo sapiens
gggaaggtctgtgct

SEQ ID NO: 1073176 - DNA, 15 bp, Homo sapiens
ggggaaggtctgtgc

SEQ ID NO: 1073177 - DNA, 15 bp, Homo sapiens
aggggaaggtctgtg

SEQ ID NO: 1073178 - DNA, 15 bp, Homo sapiens
gaggggaaggtctgt

SEQ ID NO: 1073179 - DNA, 15 bp, Homo sapiens
cgaggggaaggtctg

SEQ ID NO: 1073180 - DNA, 15 bp, Homo sapiens
tcgaggggaaggtct

SEQ ID NO: 1073181 - DNA, 15 bp, Homo sapiens
ctcgaggggaaggtc

SEQ ID NO: 1073182 - DNA, 15 bp, Homo sapiens
cctcgaggggaaggt

SEQ ID NO: 1073183 - DNA, 15 bp, Homo sapiens
ccctcgaggggaagg

SEQ ID NO: 1073184 - DNA, 15 bp, Homo sapiens
accctcgaggggaag

SEQ ID NO: 1073185 - DNA, 15 bp, Homo sapiens
caccctcgaggggaa

SEQ ID NO: 1073186 - DNA, 15 bp, Homo sapiens
gcaccctcgagggga

SEQ ID NO: 1073187 - DNA, 15 bp, Homo sapiens
agcaccctcgagggg

SEQ ID NO: 1073188 - DNA, 15 bp, Homo sapiens
gagcaccctcgaggg

SEQ ID NO: 1073189 - DNA, 15 bp, Homo sapiens
cgagcaccctcgagg

SEQ ID NO: 1073190 - DNA, 15 bp, Homo sapiens
acgagcaccctcgag

SEQ ID NO: 1073191 - DNA, 15 bp, Homo sapiens
cacgagcaccctcga

SEQ ID NO: 1073192 - DNA, 15 bp, Homo sapiens
ccacgagcaccctcg

SEQ ID NO: 1073193 - DNA, 15 bp, Homo sapiens
cccacgagcaccctc

SEQ ID NO: 1073194 - DNA, 15 bp, Homo sapiens
gcccacgagcaccct

SEQ ID NO: 1073195 - DNA, 15 bp, Homo sapiens
cgcccacgagcaccc

SEQ ID NO: 1073196 - DNA, 15 bp, Homo sapiens
ccgcccacgagcacc

SEQ ID NO: 1073197 - DNA, 15 bp, Homo sapiens
gccgcccacgagcac

SEQ ID NO: 1073198 - DNA, 15 bp, Homo sapiens
tgccgcccacgagca

SEQ ID NO: 1073199 - DNA, 15 bp, Homo sapiens
atgccgcccacgagc

SEQ ID NO: 1073200 - DNA, 15 bp, Homo sapiens
gatgccgcccacgag

SEQ ID NO: 1073201 - DNA, 15 bp, Homo sapiens
ggatgccgcccacga

SEQ ID NO: 1073202 - DNA, 15 bp, Homo sapiens
gggatgccgcccacg

SEQ ID NO: 1073203 - DNA, 15 bp, Homo sapiens
cgggatgccgcccac

SEQ ID NO: 1073204 - DNA, 15 bp, Homo sapiens
gcgggatgccgccca

SEQ ID NO: 1073205 - DNA, 15 bp, Homo sapiens
cgcgggatgccgccc

SEQ ID NO: 1073206 - DNA, 15 bp, Homo sapiens
ccgcgggatgccgcc

SEQ ID NO: 1073207 - DNA, 15 bp, Homo sapiens
cccgcgggatgccgc

SEQ ID NO: 1073208 - DNA, 15 bp, Homo sapiens
tcccgcgggatgccg

SEQ ID NO: 1073209 - DNA, 15 bp, Homo sapiens
ctcccgcgggatgcc

SEQ ID NO: 1073210 - DNA, 15 bp, Homo sapiens
gctcccgcgggatgc

SEQ ID NO: 1073211 - DNA, 15 bp, Homo sapiens
ggctcccgcgggatg

SEQ ID NO: 1073212 - DNA, 15 bp, Homo sapiens
cggctcccgcgggat

SEQ ID NO: 1073213 - DNA, 15 bp, Homo sapiens
ccggctcccgcggga

SEQ ID NO: 1073214 - DNA, 15 bp, Homo sapiens
tccggctcccgcggg

SEQ ID NO: 1073215 - DNA, 15 bp, Homo sapiens
ctccggctcccgcgg

SEQ ID NO: 1073216 - DNA, 15 bp, Homo sapiens
gctccggctcccgcg

SEQ ID NO: 1073217 - DNA, 15 bp, Homo sapiens
ggctccggctcccgc

SEQ ID NO: 1073218 - DNA, 15 bp, Homo sapiens
aggctccggctcccg

SEQ ID NO: 1073219 - DNA, 15 bp, Homo sapiens
gaggctccggctccc

SEQ ID NO: 1073220 - DNA, 15 bp, Homo sapiens
agaggctccggctcc

SEQ ID NO: 1073221 - DNA, 15 bp, Homo sapiens
cagaggctccggctc

SEQ ID NO: 1073222 - DNA, 15 bp, Homo sapiens
tcagaggctccggct

SEQ ID NO: 1073223 - DNA, 15 bp, Homo sapiens
ctcagaggctccggc

SEQ ID NO: 1073224 - DNA, 15 bp, Homo sapiens
tctcagaggctccgg

SEQ ID NO: 1073225 - DNA, 15 bp, Homo sapiens
ctctcagaggctccg

SEQ ID NO: 1073226 - DNA, 15 bp, Homo sapiens
cctctcagaggctcc

SEQ ID NO: 1073227 - DNA, 15 bp, Homo sapiens
acctctcagaggctc

SEQ ID NO: 1073228 - DNA, 15 bp, Homo sapiens
gacctctcagaggct

SEQ ID NO: 1073229 - DNA, 15 bp, Homo sapiens
agacctctcagaggc

SEQ ID NO: 1073230 - DNA, 15 bp, Homo sapiens
gagacctctcagagg

SEQ ID NO: 1073231 - DNA, 15 bp, Homo sapiens
ggagacctctcagag

SEQ ID NO: 1073232 - DNA, 15 bp, Homo sapiens
aggagacctctcaga

SEQ ID NO: 1073233 - DNA, 15 bp, Homo sapiens
gaggagacctctcag

SEQ ID NO: 1073234 - DNA, 15 bp, Homo sapiens
ggaggagacctctca

SEQ ID NO: 1073235 - DNA, 15 bp, Homo sapiens
aggaggagacctctc

SEQ ID NO: 1073236 - DNA, 15 bp, Homo sapiens
caggaggagacctct

SEQ ID NO: 1073237 - DNA, 15 bp, Homo sapiens
gcaggaggagacctc

SEQ ID NO: 1073238 - DNA, 15 bp, Homo sapiens
ggcaggaggagacct

SEQ ID NO: 1073239 - DNA, 15 bp, Homo sapiens
gggcaggaggagacc

SEQ ID NO: 1073240 - DNA, 15 bp, Homo sapiens
ggggcaggaggagac

SEQ ID NO: 1073241 - DNA, 15 bp, Homo sapiens
aggggcaggaggaga

SEQ ID NO: 1073242 - DNA, 15 bp, Homo sapiens
caggggcaggaggag

SEQ ID NO: 1073243 - DNA, 15 bp, Homo sapiens
ccaggggcaggagga

SEQ ID NO: 1073244 - DNA, 15 bp, Homo sapiens
tccaggggcaggagg

SEQ ID NO: 1073245 - DNA, 15 bp, Homo sapiens
ctccaggggcaggag

SEQ ID NO: 1073246 - DNA, 15 bp, Homo sapiens
tctccaggggcagga

SEQ ID NO: 1073247 - DNA, 15 bp, Homo sapiens
atctccaggggcagg

SEQ ID NO: 1073248 - DNA, 15 bp, Homo sapiens
gatctccaggggcag

SEQ ID NO: 1073249 - DNA, 15 bp, Homo sapiens
ggatctccaggggca

SEQ ID NO: 1073250 - DNA, 15 bp, Homo sapiens
gggatctccaggggc

SEQ ID NO: 1073251 - DNA, 15 bp, Homo sapiens
tgggatctccagggg

SEQ ID NO: 1073252 - DNA, 15 bp, Homo sapiens
gtgggatctccaggg

SEQ ID NO: 1073253 - DNA, 15 bp, Homo sapiens
ggtgggatctccagg

SEQ ID NO: 1073254 - DNA, 15 bp, Homo sapiens
gggtgggatctccag

SEQ ID NO: 1073255 - DNA, 15 bp, Homo sapiens
agggtgggatctcca

SEQ ID NO: 1073256 - DNA, 15 bp, Homo sapiens
gagggtgggatctcc

SEQ ID NO: 1073257 - DNA, 15 bp, Homo sapiens
tgagggtgggatctc

SEQ ID NO: 1073258 - DNA, 15 bp, Homo sapiens
gtgagggtgggatct

SEQ ID NO: 1073259 - DNA, 15 bp, Homo sapiens
ggtgagggtgggatc

SEQ ID NO: 1073260 - DNA, 15 bp, Homo sapiens
aggtgagggtgggat

SEQ ID NO: 1073261 - DNA, 15 bp, Homo sapiens
gaggtgagggtggga

SEQ ID NO: 1073262 - DNA, 15 bp, Homo sapiens
agaggtgagggtggg

SEQ ID NO: 1073263 - DNA, 15 bp, Homo sapiens
gagaggtgagggtgg

SEQ ID NO: 1073264 - DNA, 15 bp, Homo sapiens
agagaggtgagggtg

SEQ ID NO: 1073265 - DNA, 15 bp, Homo sapiens
ataggcgcttccatg

SEQ ID NO: 1073266 - DNA, 15 bp, Homo sapiens
aataggcgcttccat

SEQ ID NO: 1073267 - DNA, 15 bp, Homo sapiens
gaataggcgcttcca

SEQ ID NO: 1073268 - DNA, 15 bp, Homo sapiens
agaataggcgcttcc

SEQ ID NO: 1073269 - DNA, 15 bp, Homo sapiens
aagaataggcgcttc

SEQ ID NO: 1073270 - DNA, 15 bp, Homo sapiens
gaagaataggcgctt

SEQ ID NO: 1073271 - DNA, 15 bp, Homo sapiens
tgaagaataggcgct

SEQ ID NO: 1073272 - DNA, 15 bp, Homo sapiens
atgaagaataggcgc

SEQ ID NO: 1073273 - DNA, 15 bp, Homo sapiens
tatgaagaataggcg

SEQ ID NO: 1073274 - DNA, 15 bp, Homo sapiens
gtatgaagaataggc

SEQ ID NO: 1073275 - DNA, 15 bp, Homo sapiens
ggtatgaagaatagg

SEQ ID NO: 1073276 - DNA, 15 bp, Homo sapiens
gggtatgaagaatag

SEQ ID NO: 1073277 - DNA, 15 bp, Homo sapiens
ggggtatgaagaata

SEQ ID NO: 1073278 - DNA, 15 bp, Homo sapiens
aggggtatgaagaat

SEQ ID NO: 1073279 - DNA, 15 bp, Homo sapiens
aaggggtatgaagaa

SEQ ID NO: 1073280 - DNA, 15 bp, Homo sapiens
taaggggtatgaaga

SEQ ID NO: 1073281 - DNA, 15 bp, Homo sapiens
ataaggggtatgaag

SEQ ID NO: 1073282 - DNA, 15 bp, Homo sapiens
gataaggggtatgaa

SEQ ID NO: 1073283 - DNA, 15 bp, Homo sapiens
tgataaggggtatga

SEQ ID NO: 1073284 - DNA, 15 bp, Homo sapiens
gtgataaggggtatg

SEQ ID NO: 1073285 - DNA, 15 bp, Homo sapiens
tgtgataaggggtat

SEQ ID NO: 1073286 - DNA, 15 bp, Homo sapiens
ctgtgataaggggta

SEQ ID NO: 1073287 - DNA, 15 bp, Homo sapiens
gctgtgataaggggt

SEQ ID NO: 1073288 - DNA, 15 bp, Homo sapiens
agctgtgataagggg

SEQ ID NO: 1073289 - DNA, 15 bp, Homo sapiens
cagctgtgataaggg

SEQ ID NO: 1073290 - DNA, 15 bp, Homo sapiens
gcagctgtgataagg

SEQ ID NO: 1073291 - DNA, 15 bp, Homo sapiens
tgcagctgtgataag

SEQ ID NO: 1073292 - DNA, 15 bp, Homo sapiens
ttgcagctgtgataa

SEQ ID NO: 1073293 - DNA, 15 bp, Homo sapiens
gttgcagctgtgata

SEQ ID NO: 1073294 - DNA, 15 bp, Homo sapiens
agttgcagctgtgat

SEQ ID NO: 1073295 - DNA, 15 bp, Homo sapiens
tagttgcagctgtga

SEQ ID NO: 1073296 - DNA, 15 bp, Homo sapiens
gtagttgcagctgtg

SEQ ID NO: 1073297 - DNA, 15 bp, Homo sapiens
agtagttgcagctgt

SEQ ID NO: 1073298 - DNA, 15 bp, Homo sapiens
gagtagttgcagctg

SEQ ID NO: 1073299 - DNA, 15 bp, Homo sapiens
tgagtagttgcagct

SEQ ID NO: 1073300 - DNA, 15 bp, Homo sapiens
atgagtagttgcagc

SEQ ID NO: 1073301 - DNA, 15 bp, Homo sapiens
aatgagtagttgcag

SEQ ID NO: 1073302 - DNA, 15 bp, Homo sapiens
aaatgagtagttgca

SEQ ID NO: 1073303 - DNA, 15 bp, Homo sapiens
taaatgagtagttgc

SEQ ID NO: 1073304 - DNA, 15 bp, Homo sapiens
gtaaatgagtagttg

SEQ ID NO: 1073305 - DNA, 15 bp, Homo sapiens
agtaaatgagtagtt

SEQ ID NO: 1073306 - DNA, 15 bp, Homo sapiens
aagtaaatgagtagt

SEQ ID NO: 1073307 - DNA, 15 bp, Homo sapiens
caagtaaatgagtag

SEQ ID NO: 1073308 - DNA, 15 bp, Homo sapiens
acaagtaaatgagta

SEQ ID NO: 1073309 - DNA, 15 bp, Homo sapiens
gacaagtaaatgagt

SEQ ID NO: 1073310 - DNA, 15 bp, Homo sapiens
agacaagtaaatgag

SEQ ID NO: 1073311 - DNA, 15 bp, Homo sapiens
cagacaagtaaatga

SEQ ID NO: 1073312 - DNA, 15 bp, Homo sapiens
tcagacaagtaaatg

SEQ ID NO: 1073313 - DNA, 15 bp, Homo sapiens
gtcagacaagtaaat

SEQ ID NO: 1073314 - DNA, 15 bp, Homo sapiens
tgtcagacaagtaaa

SEQ ID NO: 1073315 - DNA, 15 bp, Homo sapiens
ttgtcagacaagtaa

SEQ ID NO: 1073316 - DNA, 15 bp, Homo sapiens
attgtcagacaagta

SEQ ID NO: 1073317 - DNA, 15 bp, Homo sapiens
aattgtcagacaagt

SEQ ID NO: 1073318 - DNA, 15 bp, Homo sapiens
aaattgtcagacaag

SEQ ID NO: 1073319 - DNA, 15 bp, Homo sapiens
caaattgtcagacaa

SEQ ID NO: 1073320 - DNA, 15 bp, Homo sapiens
tcaaattgtcagaca

SEQ ID NO: 1073321 - DNA, 15 bp, Homo sapiens
atcaaattgtcagac

SEQ ID NO: 1073322 - DNA, 15 bp, Homo sapiens
aatcaaattgtcaga

SEQ ID NO: 1073323 - DNA, 15 bp, Homo sapiens
aaatcaaattgtcag

SEQ ID NO: 1073324 - DNA, 15 bp, Homo sapiens
taaatcaaattgtca

SEQ ID NO: 1073325 - DNA, 15 bp, Homo sapiens
ataaatcaaattgtc

SEQ ID NO: 1073326 - DNA, 15 bp, Homo sapiens
cataaatcaaattgt

SEQ ID NO: 1073327 - DNA, 15 bp, Homo sapiens
acataaatcaaattg

SEQ ID NO: 1073328 - DNA, 15 bp, Homo sapiens
gacataaatcaaatt

SEQ ID NO: 1073329 - DNA, 15 bp, Homo sapiens
ggacataaatcaaat

SEQ ID NO: 1073330 - DNA, 15 bp, Homo sapiens
tggacataaatcaaa

SEQ ID NO: 1073331 - DNA, 15 bp, Homo sapiens
gtggacataaatcaa

SEQ ID NO: 1073332 - DNA, 15 bp, Homo sapiens
ggtggacataaatca

SEQ ID NO: 1073333 - DNA, 15 bp, Homo sapiens
aggtggacataaatc

SEQ ID NO: 1073334 - DNA, 15 bp, Homo sapiens
taggtggacataaat

SEQ ID NO: 1073335 - DNA, 15 bp, Homo sapiens
gtaggtggacataaa

SEQ ID NO: 1073336 - DNA, 15 bp, Homo sapiens
agtaggtggacataa

SEQ ID NO: 1073337 - DNA, 15 bp, Homo sapiens
aagtaggtggacata

SEQ ID NO: 1073338 - DNA, 15 bp, Homo sapiens
aaagtaggtggacat

SEQ ID NO: 1073339 - DNA, 15 bp, Homo sapiens
caaagtaggtggaca

SEQ ID NO: 1073340 - DNA, 15 bp, Homo sapiens
gcaaagtaggtggac

SEQ ID NO: 1073341 - DNA, 15 bp, Homo sapiens
agcaaagtaggtgga

SEQ ID NO: 1073342 - DNA, 15 bp, Homo sapiens
tagcaaagtaggtgg

SEQ ID NO: 1073343 - DNA, 15 bp, Homo sapiens
ctagcaaagtaggtg

SEQ ID NO: 1073344 - DNA, 15 bp, Homo sapiens
cctagcaaagtaggt

SEQ ID NO: 1073345 - DNA, 15 bp, Homo sapiens
acctagcaaagtagg

SEQ ID NO: 1073346 - DNA, 15 bp, Homo sapiens
tacctagcaaagtag

SEQ ID NO: 1073347 - DNA, 15 bp, Homo sapiens
gtacctagcaaagta

SEQ ID NO: 1073348 - DNA, 15 bp, Homo sapiens
agtacctagcaaagt

SEQ ID NO: 1073349 - DNA, 15 bp, Homo sapiens
tagtacctagcaaag

SEQ ID NO: 1073350 - DNA, 15 bp, Homo sapiens
ttagtacctagcaaa

SEQ ID NO: 1073351 - DNA, 15 bp, Homo sapiens
cttagtacctagcaa

SEQ ID NO: 1073352 - DNA, 15 bp, Homo sapiens
acttagtacctagca

SEQ ID NO: 1073353 - DNA, 15 bp, Homo sapiens
aacttagtacctagc

SEQ ID NO: 1073354 - DNA, 15 bp, Homo sapiens
gaacttagtacctag

SEQ ID NO: 1073355 - DNA, 15 bp, Homo sapiens
tgaacttagtaccta

SEQ ID NO: 1073356 - DNA, 15 bp, Homo sapiens
ttgaacttagtacct

SEQ ID NO: 1073357 - DNA, 15 bp, Homo sapiens
attgaacttagtacc

SEQ ID NO: 1073358 - DNA, 15 bp, Homo sapiens
cattgaacttagtac

SEQ ID NO: 1073359 - DNA, 15 bp, Homo sapiens
gcattgaacttagta

SEQ ID NO: 1073360 - DNA, 15 bp, Homo sapiens
agcattgaacttagt

SEQ ID NO: 1073361 - DNA, 15 bp, Homo sapiens
cagcattgaacttag

SEQ ID NO: 1073362 - DNA, 15 bp, Homo sapiens
ccagcattgaactta

SEQ ID NO: 1073363 - DNA, 15 bp, Homo sapiens
gccagcattgaactt

SEQ ID NO: 1073364 - DNA, 15 bp, Homo sapiens
tgccagcattgaact

SEQ ID NO: 1073365 - DNA, 15 bp, Homo sapiens
ctgccagcattgaac

SEQ ID NO: 1073366 - DNA, 15 bp, Homo sapiens
actgccagcattgaa

SEQ ID NO: 1073367 - DNA, 15 bp, Homo sapiens
gactgccagcattga

SEQ ID NO: 1073368 - DNA, 15 bp, Homo sapiens
cgactgccagcattg

SEQ ID NO: 1073369 - DNA, 15 bp, Homo sapiens
acgactgccagcatt

SEQ ID NO: 1073370 - DNA, 15 bp, Homo sapiens
aacgactgccagcat

SEQ ID NO: 1073371 - DNA, 15 bp, Homo sapiens
aaacgactgccagca

SEQ ID NO: 1073372 - DNA, 15 bp, Homo sapiens
gaaacgactgccagc

SEQ ID NO: 1073373 - DNA, 15 bp, Homo sapiens
agaaacgactgccag

SEQ ID NO: 1073374 - DNA, 15 bp, Homo sapiens
aagaaacgactgcca

SEQ ID NO: 1073375 - DNA, 15 bp, Homo sapiens
gaagaaacgactgcc

SEQ ID NO: 1073376 - DNA, 15 bp, Homo sapiens
agaagaaacgactgc

SEQ ID NO: 1073377 - DNA, 15 bp, Homo sapiens
aagaagaaacgactg

SEQ ID NO: 1073378 - DNA, 15 bp, Homo sapiens
aaagaagaaacgact

SEQ ID NO: 1073379 - DNA, 15 bp, Homo sapiens
aaaagaagaaacgac

SEQ ID NO: 1073380 - DNA, 15 bp, Homo sapiens
aaaaagaagaaacga

SEQ ID NO: 1073381 - DNA, 15 bp, Homo sapiens
aaaaaagaagaaacg

SEQ ID NO: 1073382 - DNA, 15 bp, Homo sapiens
aaaaaaagaagaaac

SEQ ID NO: 1073383 - DNA, 15 bp, Homo sapiens
aaaaaaaagaagaaa

SEQ ID NO: 1073384 - DNA, 15 bp, Homo sapiens
gaaaaaaaaagaaga

SEQ ID NO: 1073385 - DNA, 15 bp, Homo sapiens
agaaaaaaaaagaag

SEQ ID NO: 1073386 - DNA, 15 bp, Homo sapiens
cagaaaagaaaaaaa

SEQ ID NO: 1073387 - DNA, 15 bp, Homo sapiens
acagaaaagaaaaaa

SEQ ID NO: 1073388 - DNA, 15 bp, Homo sapiens
aacagaaaagaaaaa

SEQ ID NO: 1073389 - DNA, 15 bp, Homo sapiens
aaacagaaaagaaaa

SEQ ID NO: 1073390 - DNA, 15 bp, Homo sapiens
aaaacagaaaagaaa

SEQ ID NO: 1073391 - DNA, 15 bp, Homo sapiens
caaaacagaaaagaa

SEQ ID NO: 1073392 - DNA, 15 bp, Homo sapiens
gcaaaacagaaaaga

SEQ ID NO: 1073393 - DNA, 15 bp, Homo sapiens
agcaaaacagaaaag

SEQ ID NO: 1073394 - DNA, 15 bp, Homo sapiens
gagcaaaacagaaaa

SEQ ID NO: 1073395 - DNA, 15 bp, Homo sapiens
tgagcaaaacagaaa

SEQ ID NO: 1073396 - DNA, 15 bp, Homo sapiens
gtgagcaaaacagaa

SEQ ID NO: 1073397 - DNA, 15 bp, Homo sapiens
ggtgagcaaaacaga

SEQ ID NO: 1073398 - DNA, 15 bp, Homo sapiens
cggtgagcaaaacag

SEQ ID NO: 1073399 - DNA, 15 bp, Homo sapiens
tcggtgagcaaaaca

SEQ ID NO: 1073400 - DNA, 15 bp, Homo sapiens
atcggtgagcaaaac

SEQ ID NO: 1073401 - DNA, 15 bp, Homo sapiens
aatcggtgagcaaaa

SEQ ID NO: 1073402 - DNA, 15 bp, Homo sapiens
aaatcggtgagcaaa

SEQ ID NO: 1073403 - DNA, 15 bp, Homo sapiens
gaaatcggtgagcaa

SEQ ID NO: 1073404 - DNA, 15 bp, Homo sapiens
agaaatcggtgagca

SEQ ID NO: 1073405 - DNA, 15 bp, Homo sapiens
gagaaatcggtgagc

SEQ ID NO: 1073406 - DNA, 15 bp, Homo sapiens
cgagaaatcggtgag

SEQ ID NO: 1073407 - DNA, 15 bp, Homo sapiens
acgagaaatcggtga

SEQ ID NO: 1073408 - DNA, 15 bp, Homo sapiens
aacgagaaatcggtg

SEQ ID NO: 1073409 - DNA, 15 bp, Homo sapiens
taacgagaaatcggt

SEQ ID NO: 1073410 - DNA, 15 bp, Homo sapiens
ctaacgagaaatcgg

SEQ ID NO: 1073411 - DNA, 15 bp, Homo sapiens
gctaacgagaaatcg

SEQ ID NO: 1073412 - DNA, 15 bp, Homo sapiens
tgctaacgagaaatc

SEQ ID NO: 1073413 - DNA, 15 bp, Homo sapiens
gtgctaacgagaaat

SEQ ID NO: 1073414 - DNA, 15 bp, Homo sapiens
agtgctaacgagaaa

SEQ ID NO: 1073415 - DNA, 15 bp, Homo sapiens
aagtgctaacgagaa

SEQ ID NO: 1073416 - DNA, 15 bp, Homo sapiens
taagtgctaacgaga

SEQ ID NO: 1073417 - DNA, 15 bp, Homo sapiens
ctaagtgctaacgag

SEQ ID NO: 1073418 - DNA, 15 bp, Homo sapiens
gctaagtgctaacga

SEQ ID NO: 1073419 - DNA, 15 bp, Homo sapiens
tgctaagtgctaacg

SEQ ID NO: 1073420 - DNA, 15 bp, Homo sapiens
gtgctaagtgctaac

SEQ ID NO: 1073421 - DNA, 15 bp, Homo sapiens
tgtgctaagtgctaa

SEQ ID NO: 1073422 - DNA, 15 bp, Homo sapiens
ctgtgctaagtgcta

SEQ ID NO: 1073423 - DNA, 15 bp, Homo sapiens
actgtgctaagtgct

SEQ ID NO: 1073424 - DNA, 15 bp, Homo sapiens
cactgtgctaagtgc

SEQ ID NO: 1073425 - DNA, 15 bp, Homo sapiens
acactgtgctaagtg

SEQ ID NO: 1073426 - DNA, 15 bp, Homo sapiens
gacactgtgctaagt

SEQ ID NO: 1073427 - DNA, 15 bp, Homo sapiens
agacactgtgctaag

SEQ ID NO: 1073428 - DNA, 15 bp, Homo sapiens
cagacactgtgctaa

SEQ ID NO: 1073429 - DNA, 15 bp, Homo sapiens
ccagacactgtgcta

SEQ ID NO: 1073430 - DNA, 15 bp, Homo sapiens
gccagacactgtgct

SEQ ID NO: 1073431 - DNA, 15 bp, Homo sapiens
tgccagacactgtgc

SEQ ID NO: 1073432 - DNA, 15 bp, Homo sapiens
gtgccagacactgtg

SEQ ID NO: 1073433 - DNA, 15 bp, Homo sapiens
tgtgccagacactgt

SEQ ID NO: 1073434 - DNA, 15 bp, Homo sapiens
gtgtgccagacactg

SEQ ID NO: 1073435 - DNA, 15 bp, Homo sapiens
cgtgtgccagacact

SEQ ID NO: 1073436 - DNA, 15 bp, Homo sapiens
tcgtgtgccagacac

SEQ ID NO: 1073437 - DNA, 15 bp, Homo sapiens
atcgtgtgccagaca

SEQ ID NO: 1073438 - DNA, 15 bp, Homo sapiens
tatcgtgtgccagac

SEQ ID NO: 1073439 - DNA, 15 bp, Homo sapiens
ctatcgtgtgccaga

SEQ ID NO: 1073440 - DNA, 15 bp, Homo sapiens
tctatcgtgtgccag

SEQ ID NO: 1073441 - DNA, 15 bp, Homo sapiens
atctatcgtgtgcca

SEQ ID NO: 1073442 - DNA, 15 bp, Homo sapiens
catctatcgtgtgcc

SEQ ID NO: 1073443 - DNA, 15 bp, Homo sapiens
gcatctatcgtgtgc

SEQ ID NO: 1073444 - DNA, 15 bp, Homo sapiens
agcatctatcgtgtg

SEQ ID NO: 1073445 - DNA, 15 bp, Homo sapiens
gagcatctatcgtgt

SEQ ID NO: 1073446 - DNA, 15 bp, Homo sapiens
ggagcatctatcgtg

SEQ ID NO: 1073447 - DNA, 15 bp, Homo sapiens
cggagcatctatcgt

SEQ ID NO: 1073448 - DNA, 15 bp, Homo sapiens
acggagcatctatcg

SEQ ID NO: 1073449 - DNA, 15 bp, Homo sapiens
gacggagcatctatc

SEQ ID NO: 1073450 - DNA, 15 bp, Homo sapiens
tgacggagcatctat

SEQ ID NO: 1073451 - DNA, 15 bp, Homo sapiens
ttgacggagcatcta

SEQ ID NO: 1073452 - DNA, 15 bp, Homo sapiens
gttgacggagcatct

SEQ ID NO: 1073453 - DNA, 15 bp, Homo sapiens
agttgacggagcatc

SEQ ID NO: 1073454 - DNA, 15 bp, Homo sapiens
aagttgacggagcat

SEQ ID NO: 1073455 - DNA, 15 bp, Homo sapiens
gaagttgacggagca

SEQ ID NO: 1073456 - DNA, 15 bp, Homo sapiens
agaagttgacggagc

SEQ ID NO: 1073457 - DNA, 15 bp, Homo sapiens
gagaagttgacggag

SEQ ID NO: 1073458 - DNA, 15 bp, Homo sapiens
tgagaagttgacgga

SEQ ID NO: 1073459 - DNA, 15 bp, Homo sapiens
ctgagaagttgacgg

SEQ ID NO: 1073460 - DNA, 15 bp, Homo sapiens
actgagaagttgacg

SEQ ID NO: 1073461 - DNA, 15 bp, Homo sapiens
aactgagaagttgac

SEQ ID NO: 1073462 - DNA, 15 bp, Homo sapiens
caactgagaagttga

SEQ ID NO: 1073463 - DNA, 15 bp, Homo sapiens
ccaactgagaagttg

SEQ ID NO: 1073464 - DNA, 15 bp, Homo sapiens
tccaactgagaagtt

SEQ ID NO: 1073465 - DNA, 15 bp, Homo sapiens
atccaactgagaagt

SEQ ID NO: 1073466 - DNA, 15 bp, Homo sapiens
tatccaactgagaag

SEQ ID NO: 1073467 - DNA, 15 bp, Homo sapiens
gtatccaactgagaa

SEQ ID NO: 1073468 - DNA, 15 bp, Homo sapiens
ggtatccaactgaga

SEQ ID NO: 1073469 - DNA, 15 bp, Homo sapiens
tggtatccaactgag

SEQ ID NO: 1073470 - DNA, 15 bp, Homo sapiens
ctggtatccaactga

SEQ ID NO: 1073471 - DNA, 15 bp, Homo sapiens
gctggtatccaactg

SEQ ID NO: 1073472 - DNA, 15 bp, Homo sapiens
tgctggtatccaact

SEQ ID NO: 1073473 - DNA, 15 bp, Homo sapiens
atgctggtatccaac

SEQ ID NO: 1073474 - DNA, 15 bp, Homo sapiens
gatgctggtatccaa

SEQ ID NO: 1073475 - DNA, 15 bp, Homo sapiens
ggatgctggtatcca

SEQ ID NO: 1073476 - DNA, 15 bp, Homo sapiens
gggatgctggtatcc

SEQ ID NO: 1073477 - DNA, 15 bp, Homo sapiens
cgggatgctggtatc

SEQ ID NO: 1073478 - DNA, 15 bp, Homo sapiens
tcgggatgctggtat

SEQ ID NO: 1073479 - DNA, 15 bp, Homo sapiens
ttcgggatgctggta

SEQ ID NO: 1073480 - DNA, 15 bp, Homo sapiens
cttcgggatgctggt

SEQ ID NO: 1073481 - DNA, 15 bp, Homo sapiens
ccttcgggatgctgg

SEQ ID NO: 1073482 - DNA, 15 bp, Homo sapiens
cccttcgggatgctg

SEQ ID NO: 1073483 - DNA, 15 bp, Homo sapiens
tcccttcgggatgct

SEQ ID NO: 1073484 - DNA, 15 bp, Homo sapiens
ttcccttcgggatgc

SEQ ID NO: 1073485 - DNA, 15 bp, Homo sapiens
gttcccttcgggatg

SEQ ID NO: 1073486 - DNA, 15 bp, Homo sapiens
tgttcccttcgggat

SEQ ID NO: 1073487 - DNA, 15 bp, Homo sapiens
atgttcccttcggga

SEQ ID NO: 1073488 - DNA, 15 bp, Homo sapiens
catgttcccttcggg

SEQ ID NO: 1073489 - DNA, 15 bp, Homo sapiens
ccatgttcccttcgg

SEQ ID NO: 1073490 - DNA, 15 bp, Homo sapiens
tccatgttcccttcg

SEQ ID NO: 1073491 - DNA, 15 bp, Homo sapiens
atccatgttcccttc

SEQ ID NO: 1073492 - DNA, 15 bp, Homo sapiens
aatccatgttccctt

SEQ ID NO: 1073493 - DNA, 15 bp, Homo sapiens
taatccatgttccct

SEQ ID NO: 1073494 - DNA, 15 bp, Homo sapiens
ttaatccatgttccc

SEQ ID NO: 1073495 - DNA, 15 bp, Homo sapiens
cttaatccatgttcc

SEQ ID NO: 1073496 - DNA, 15 bp, Homo sapiens
ccttaatccatgttc

SEQ ID NO: 1073497 - DNA, 15 bp, Homo sapiens
gccttaatccatgtt

SEQ ID NO: 1073498 - DNA, 15 bp, Homo sapiens
tgccttaatccatgt

SEQ ID NO: 1073499 - DNA, 15 bp, Homo sapiens
ctgccttaatccatg

SEQ ID NO: 1073500 - DNA, 15 bp, Homo sapiens
gctgccttaatccat

SEQ ID NO: 1073501 - DNA, 15 bp, Homo sapiens
agctgccttaatcca

SEQ ID NO: 1073502 - DNA, 15 bp, Homo sapiens
tagctgccttaatcc

SEQ ID NO: 1073503 - DNA, 15 bp, Homo sapiens
atagctgccttaatc

SEQ ID NO: 1073504 - DNA, 15 bp, Homo sapiens
tatagctgccttaat

SEQ ID NO: 1073505 - DNA, 15 bp, Homo sapiens
ttatagctgccttaa

SEQ ID NO: 1073506 - DNA, 15 bp, Homo sapiens
cttatagctgcctta

SEQ ID NO: 1073507 - DNA, 15 bp, Homo sapiens
gcttatagctgcctt

SEQ ID NO: 1073508 - DNA, 15 bp, Homo sapiens
tgcttatagctgcct

SEQ ID NO: 1073509 - DNA, 15 bp, Homo sapiens
gtgcttatagctgcc

SEQ ID NO: 1073510 - DNA, 15 bp, Homo sapiens
cgtgcttatagctgc

SEQ ID NO: 1073511 - DNA, 15 bp, Homo sapiens
ccgtgcttatagctg

SEQ ID NO: 1073512 - DNA, 15 bp, Homo sapiens
accgtgcttatagct

SEQ ID NO: 1073513 - DNA, 15 bp, Homo sapiens
caccgtgcttatagc

SEQ ID NO: 1073514 - DNA, 15 bp, Homo sapiens
acaccgtgcttatag

SEQ ID NO: 1073515 - DNA, 15 bp, Homo sapiens
tacaccgtgcttata

SEQ ID NO: 1073516 - DNA, 15 bp, Homo sapiens
ttacaccgtgcttat

SEQ ID NO: 1073517 - DNA, 15 bp, Homo sapiens
tttacaccgtgctta

SEQ ID NO: 1073518 - DNA, 15 bp, Homo sapiens
ttttacaccgtgctt

SEQ ID NO: 1073519 - DNA, 15 bp, Homo sapiens
tttttacaccgtgct

SEQ ID NO: 1073520 - DNA, 15 bp, Homo sapiens
gtttttacaccgtgc

SEQ ID NO: 1073521 - DNA, 15 bp, Homo sapiens
tgtttttacaccgtg

SEQ ID NO: 1073522 - DNA, 15 bp, Homo sapiens
ctgtttttacaccgt

SEQ ID NO: 1073523 - DNA, 15 bp, Homo sapiens
cctgtttttacaccg

SEQ ID NO: 1073524 - DNA, 15 bp, Homo sapiens
tcctgtttttacacc

SEQ ID NO: 1073525 - DNA, 15 bp, Homo sapiens
ttcctgtttttacac

SEQ ID NO: 1073526 - DNA, 15 bp, Homo sapiens
attcctgtttttaca

SEQ ID NO: 1073527 - DNA, 15 bp, Homo sapiens
tattcctgtttttac

SEQ ID NO: 1073528 - DNA, 15 bp, Homo sapiens
ttattcctgttttta

SEQ ID NO: 1073529 - DNA, 15 bp, Homo sapiens
cttattcctgttttt

SEQ ID NO: 1073530 - DNA, 15 bp, Homo sapiens
tcttattcctgtttt

SEQ ID NO: 1073531 - DNA, 15 bp, Homo sapiens
ttcttattcctgttt

SEQ ID NO: 1073532 - DNA, 15 bp, Homo sapiens
tttcttattcctgtt

SEQ ID NO: 1073533 - DNA, 15 bp, Homo sapiens
ttttcttattcctgt

SEQ ID NO: 1073534 - DNA, 15 bp, Homo sapiens
tttttcttattcctg

SEQ ID NO: 1073535 - DNA, 15 bp, Homo sapiens
ctttttcttattcct

SEQ ID NO: 1073536 - DNA, 15 bp, Homo sapiens
actttttcttattcc

SEQ ID NO: 1073537 - DNA, 15 bp, Homo sapiens
aactttttcttattc

SEQ ID NO: 1073538 - DNA, 15 bp, Homo sapiens
caactttttcttatt

SEQ ID NO: 1073539 - DNA, 15 bp, Homo sapiens
tcaactttttcttat

SEQ ID NO: 1073540 - DNA, 15 bp, Homo sapiens
ctcaactttttctta

SEQ ID NO: 1073541 - DNA, 15 bp, Homo sapiens
cctcaactttttctt

SEQ ID NO: 1073542 - DNA, 15 bp, Homo sapiens
acctcaactttttct

SEQ ID NO: 1073543 - DNA, 15 bp, Homo sapiens
aacctcaactttttc

SEQ ID NO: 1073544 - DNA, 15 bp, Homo sapiens
aaacctcaacttttt

SEQ ID NO: 1073545 - DNA, 15 bp, Homo sapiens
caaacctcaactttt

SEQ ID NO: 1073546 - DNA, 15 bp, Homo sapiens
acaaacctcaacttt

SEQ ID NO: 1073547 - DNA, 15 bp, Homo sapiens
aacaaacctcaactt

SEQ ID NO: 1073548 - DNA, 15 bp, Homo sapiens
aaacaaacctcaact

SEQ ID NO: 1073549 - DNA, 15 bp, Homo sapiens
gaaacaaacctcaac

SEQ ID NO: 1073550 - DNA, 15 bp, Homo sapiens
tgaaacaaacctcaa

SEQ ID NO: 1073551 - DNA, 15 bp, Homo sapiens
gtgaaacaaacctca

SEQ ID NO: 1073552 - DNA, 15 bp, Homo sapiens
tgtgaaacaaacctc

SEQ ID NO: 1073553 - DNA, 15 bp, Homo sapiens
ctgtgaaacaaacct

SEQ ID NO: 1073554 - DNA, 15 bp, Homo sapiens
actgtgaaacaaacc

SEQ ID NO: 1073555 - DNA, 15 bp, Homo sapiens
cactgtgaaacaaac

SEQ ID NO: 1073556 - DNA, 15 bp, Homo sapiens
ccactgtgaaacaaa

SEQ ID NO: 1073557 - DNA, 15 bp, Homo sapiens
tccactgtgaaacaa

SEQ ID NO: 1073558 - DNA, 15 bp, Homo sapiens
ttccactgtgaaaca

SEQ ID NO: 1073559 - DNA, 15 bp, Homo sapiens
attccactgtgaaac

SEQ ID NO: 1073560 - DNA, 15 bp, Homo sapiens
cattccactgtgaaa

SEQ ID NO: 1073561 - DNA, 15 bp, Homo sapiens
acattccactgtgaa

SEQ ID NO: 1073562 - DNA, 15 bp, Homo sapiens
tacattccactgtga

SEQ ID NO: 1073563 - DNA, 15 bp, Homo sapiens
ttacattccactgtg

SEQ ID NO: 1073564 - DNA, 15 bp, Homo sapiens
tttacattccactgt

SEQ ID NO: 1073565 - DNA, 15 bp, Homo sapiens
ctttacattccactg

SEQ ID NO: 1073566 - DNA, 15 bp, Homo sapiens
cctttacattccact

SEQ ID NO: 1073567 - DNA, 15 bp, Homo sapiens
ccctttacattccac

SEQ ID NO: 1073568 - DNA, 15 bp, Homo sapiens
accctttacattcca

SEQ ID NO: 1073569 - DNA, 15 bp, Homo sapiens
aaccctttacattcc

SEQ ID NO: 1073570 - DNA, 15 bp, Homo sapiens
caaccctttacattc

SEQ ID NO: 1073571 - DNA, 15 bp, Homo sapiens
gcaaccctttacatt

SEQ ID NO: 1073572 - DNA, 15 bp, Homo sapiens
tgcaaccctttacat

SEQ ID NO: 1073573 - DNA, 15 bp, Homo sapiens
ttgcaaccctttaca

SEQ ID NO: 1073574 - DNA, 15 bp, Homo sapiens
cttgcaaccctttac

SEQ ID NO: 1073575 - DNA, 15 bp, Homo sapiens
ccttgcaacccttta

SEQ ID NO: 1073576 - DNA, 15 bp, Homo sapiens
tccttgcaacccttt

SEQ ID NO: 1073577 - DNA, 15 bp, Homo sapiens
ctccttgcaaccctt

SEQ ID NO: 1073578 - DNA, 15 bp, Homo sapiens
cctccttgcaaccct

SEQ ID NO: 1073579 - DNA, 15 bp, Homo sapiens
acctccttgcaaccc

SEQ ID NO: 1073580 - DNA, 15 bp, Homo sapiens
cacctccttgcaacc

SEQ ID NO: 1073581 - DNA, 15 bp, Homo sapiens
gcacctccttgcaac

SEQ ID NO: 1073582 - DNA, 15 bp, Homo sapiens
tgcacctccttgcaa

SEQ ID NO: 1073583 - DNA, 15 bp, Homo sapiens
atgcacctccttgca

SEQ ID NO: 1073584 - DNA, 15 bp, Homo sapiens
gatgcacctccttgc

SEQ ID NO: 1073585 - DNA, 15 bp, Homo sapiens
cgatgcacctccttg

SEQ ID NO: 1073586 - DNA, 15 bp, Homo sapiens
ccgatgcacctcctt

SEQ ID NO: 1073587 - DNA, 15 bp, Homo sapiens
gccgatgcacctcct

SEQ ID NO: 1073588 - DNA, 15 bp, Homo sapiens
ggccgatgcacctcc

SEQ ID NO: 1073589 - DNA, 15 bp, Homo sapiens
gggccgatgcacctc

SEQ ID NO: 1073590 - DNA, 15 bp, Homo sapiens
ggggccgatgcacct

SEQ ID NO: 1073591 - DNA, 15 bp, Homo sapiens
aggggccgatgcacc

SEQ ID NO: 1073592 - DNA, 15 bp, Homo sapiens
caggggccgatgcac

SEQ ID NO: 1073593 - DNA, 15 bp, Homo sapiens
acaggggccgatgca

SEQ ID NO: 1073594 - DNA, 15 bp, Homo sapiens
cacaggggccgatgc

SEQ ID NO: 1073595 - DNA, 15 bp, Homo sapiens
ccacaggggccgatg

SEQ ID NO: 1073596 - DNA, 15 bp, Homo sapiens
tccacaggggccgat

SEQ ID NO: 1073597 - DNA, 15 bp, Homo sapiens
gtccacaggggccga

SEQ ID NO: 1073598 - DNA, 15 bp, Homo sapiens
tgtccacaggggccg

SEQ ID NO: 1073599 - DNA, 15 bp, Homo sapiens
ctgtccacaggggcc

SEQ ID NO: 1073600 - DNA, 15 bp, Homo sapiens
cctgtccacaggggc

SEQ ID NO: 1073601 - DNA, 15 bp, Homo sapiens
tcctgtccacagggg

SEQ ID NO: 1073602 - DNA, 15 bp, Homo sapiens
gtcctgtccacaggg

SEQ ID NO: 1073603 - DNA, 15 bp, Homo sapiens
cgtcctgtccacagg

SEQ ID NO: 1073604 - DNA, 15 bp, Homo sapiens
gcgtcctgtccacag

SEQ ID NO: 1073605 - DNA, 15 bp, Homo sapiens
tgcgtcctgtccaca

SEQ ID NO: 1073606 - DNA, 15 bp, Homo sapiens
atgcgtcctgtccac

SEQ ID NO: 1073607 - DNA, 15 bp, Homo sapiens
catgcgtcctgtcca

SEQ ID NO: 1073608 - DNA, 15 bp, Homo sapiens
tcatgcgtcctgtcc

SEQ ID NO: 1073609 - DNA, 15 bp, Homo sapiens
gtcatgcgtcctgtc

SEQ ID NO: 1073610 - DNA, 15 bp, Homo sapiens
agtcatgcgtcctgt

SEQ ID NO: 1073611 - DNA, 15 bp, Homo sapiens
cagtcatgcgtcctg

SEQ ID NO: 1073612 - DNA, 15 bp, Homo sapiens
gcagtcatgcgtcct

SEQ ID NO: 1073613 - DNA, 15 bp, Homo sapiens
agcagtcatgcgtcc

SEQ ID NO: 1073614 - DNA, 15 bp, Homo sapiens
tagcagtcatgcgtc

SEQ ID NO: 1073615 - DNA, 15 bp, Homo sapiens
gtagcagtcatgcgt

SEQ ID NO: 1073616 - DNA, 15 bp, Homo sapiens
tgtagcagtcatgcg

SEQ ID NO: 1073617 - DNA, 15 bp, Homo sapiens
gtgtagcagtcatgc

SEQ ID NO: 1073618 - DNA, 15 bp, Homo sapiens
tgtgtagcagtcatg

SEQ ID NO: 1073619 - DNA, 15 bp, Homo sapiens
gtgtgtagcagtcat

SEQ ID NO: 1073620 - DNA, 15 bp, Homo sapiens
cgtgtgtagcagtca

SEQ ID NO: 1073621 - DNA, 15 bp, Homo sapiens
acgtgtgtagcagtc

SEQ ID NO: 1073622 - DNA, 15 bp, Homo sapiens
cacgtgtgtagcagt

SEQ ID NO: 1073623 - DNA, 15 bp, Homo sapiens
acacgtgtgtagcag

SEQ ID NO: 1073624 - DNA, 15 bp, Homo sapiens
aacacgtgtgtagca

SEQ ID NO: 1073625 - DNA, 15 bp, Homo sapiens
gaacacgtgtgtagc

SEQ ID NO: 1073626 - DNA, 15 bp, Homo sapiens
tgaacacgtgtgtag

SEQ ID NO: 1073627 - DNA, 15 bp, Homo sapiens
gtgaacacgtgtgta

SEQ ID NO: 1073628 - DNA, 15 bp, Homo sapiens
ggtgaacacgtgtgt

SEQ ID NO: 1073629 - DNA, 15 bp, Homo sapiens
gggtgaacacgtgtg

SEQ ID NO: 1073630 - DNA, 15 bp, Homo sapiens
ggggtgaacacgtgt

SEQ ID NO: 1073631 - DNA, 15 bp, Homo sapiens
tggggtgaacacgtg

SEQ ID NO: 1073632 - DNA, 15 bp, Homo sapiens
gtggggtgaacacgt

SEQ ID NO: 1073633 - DNA, 15 bp, Homo sapiens
ggtggggtgaacacg

SEQ ID NO: 1073634 - DNA, 15 bp, Homo sapiens
gggtggggtgaacac

SEQ ID NO: 1073635 - DNA, 15 bp, Homo sapiens
agggtggggtgaaca

SEQ ID NO: 1073636 - DNA, 15 bp, Homo sapiens
gagggtggggtgaac

SEQ ID NO: 1073637 - DNA, 15 bp, Homo sapiens
agagggtggggtgaa

SEQ ID NO: 1073638 - DNA, 15 bp, Homo sapiens
cagagggtggggtga

SEQ ID NO: 1073639 - DNA, 15 bp, Homo sapiens
ccagagggtggggtg

SEQ ID NO: 1073640 - DNA, 15 bp, Homo sapiens
gccagagggtggggt

SEQ ID NO: 1073641 - DNA, 15 bp, Homo sapiens
tgccagagggtgggg

SEQ ID NO: 1073642 - DNA, 15 bp, Homo sapiens
gtgccagagggtggg

SEQ ID NO: 1073643 - DNA, 15 bp, Homo sapiens
tgtgccagagggtgg

SEQ ID NO: 1073644 - DNA, 15 bp, Homo sapiens
ctgtgccagagggtg

SEQ ID NO: 1073645 - DNA, 15 bp, Homo sapiens
cctgtgccagagggt

SEQ ID NO: 1073646 - DNA, 15 bp, Homo sapiens
ccctgtgccagaggg

SEQ ID NO: 1073647 - DNA, 15 bp, Homo sapiens
accctgtgccagagg

SEQ ID NO: 1073648 - DNA, 15 bp, Homo sapiens
caccctgtgccagag

SEQ ID NO: 1073649 - DNA, 15 bp, Homo sapiens
gcaccctgtgccaga

SEQ ID NO: 1073650 - DNA, 15 bp, Homo sapiens
tgcaccctgtgccag

SEQ ID NO: 1073651 - DNA, 15 bp, Homo sapiens
gtgcaccctgtgcca

SEQ ID NO: 1073652 - DNA, 15 bp, Homo sapiens
tgtgcaccctgtgcc

SEQ ID NO: 1073653 - DNA, 15 bp, Homo sapiens
atgtgcaccctgtgc

SEQ ID NO: 1073654 - DNA, 15 bp, Homo sapiens
tatgtgcaccctgtg

SEQ ID NO: 1073655 - DNA, 15 bp, Homo sapiens
gtatgtgcaccctgt

SEQ ID NO: 1073656 - DNA, 15 bp, Homo sapiens
tgtatgtgcaccctg

SEQ ID NO: 1073657 - DNA, 15 bp, Homo sapiens
ctgtatgtgcaccct

SEQ ID NO: 1073658 - DNA, 15 bp, Homo sapiens
actgtatgtgcaccc

SEQ ID NO: 1073659 - DNA, 15 bp, Homo sapiens
tactgtatgtgcacc

SEQ ID NO: 1073660 - DNA, 15 bp, Homo sapiens
ctactgtatgtgcac

SEQ ID NO: 1073661 - DNA, 15 bp, Homo sapiens
cctactgtatgtgca

SEQ ID NO: 1073662 - DNA, 15 bp, Homo sapiens
ccctactgtatgtgc

SEQ ID NO: 1073663 - DNA, 15 bp, Homo sapiens
cccctactgtatgtg

SEQ ID NO: 1073664 - DNA, 15 bp, Homo sapiens
gcccctactgtatgt

SEQ ID NO: 1073665 - DNA, 15 bp, Homo sapiens
tgcccctactgtatg

SEQ ID NO: 1073666 - DNA, 15 bp, Homo sapiens
ctgcccctactgtat

SEQ ID NO: 1073667 - DNA, 15 bp, Homo sapiens
tctgcccctactgta

SEQ ID NO: 1073668 - DNA, 15 bp, Homo sapiens
ttctgcccctactgt

SEQ ID NO: 1073669 - DNA, 15 bp, Homo sapiens
tttctgcccctactg

SEQ ID NO: 1073670 - DNA, 15 bp, Homo sapiens
atttctgcccctact

SEQ ID NO: 1073671 - DNA, 15 bp, Homo sapiens
catttctgcccctac

SEQ ID NO: 1073672 - DNA, 15 bp, Homo sapiens
tcatttctgccccta

SEQ ID NO: 1073673 - DNA, 15 bp, Homo sapiens
ttcatttctgcccct

SEQ ID NO: 1073674 - DNA, 15 bp, Homo sapiens
gttcatttctgcccc

SEQ ID NO: 1073675 - DNA, 15 bp, Homo sapiens
ggttcatttctgccc

SEQ ID NO: 1073676 - DNA, 15 bp, Homo sapiens
aggttcatttctgcc

SEQ ID NO: 1073677 - DNA, 15 bp, Homo sapiens
gaggttcatttctgc

SEQ ID NO: 1073678 - DNA, 15 bp, Homo sapiens
tgaggttcatttctg

SEQ ID NO: 1073679 - DNA, 15 bp, Homo sapiens
ttgaggttcatttct

SEQ ID NO: 1073680 - DNA, 15 bp, Homo sapiens
cttgaggttcatttc

SEQ ID NO: 1073681 - DNA, 15 bp, Homo sapiens
acttgaggttcattt

SEQ ID NO: 1073682 - DNA, 15 bp, Homo sapiens
cacttgaggttcatt

SEQ ID NO: 1073683 - DNA, 15 bp, Homo sapiens
gcacttgaggttcat

SEQ ID NO: 1073684 - DNA, 15 bp, Homo sapiens
agcacttgaggttca

SEQ ID NO: 1073685 - DNA, 15 bp, Homo sapiens
aagcacttgaggttc

SEQ ID NO: 1073686 - DNA, 15 bp, Homo sapiens
taagcacttgaggtt

SEQ ID NO: 1073687 - DNA, 15 bp, Homo sapiens
ttaagcacttgaggt

SEQ ID NO: 1073688 - DNA, 15 bp, Homo sapiens
gttaagcacttgagg

SEQ ID NO: 1073689 - DNA, 15 bp, Homo sapiens
tgttaagcacttgag

SEQ ID NO: 1073690 - DNA, 15 bp, Homo sapiens
gtgttaagcacttga

SEQ ID NO: 1073691 - DNA, 15 bp, Homo sapiens
tgtgttaagcacttg

SEQ ID NO: 1073692 - DNA, 15 bp, Homo sapiens
ttgtgttaagcactt

SEQ ID NO: 1073693 - DNA, 15 bp, Homo sapiens
attgtgttaagcact

SEQ ID NO: 1073694 - DNA, 15 bp, Homo sapiens
aattgtgttaagcac

SEQ ID NO: 1073695 - DNA, 15 bp, Homo sapiens
aaattgtgttaagca

SEQ ID NO: 1073696 - DNA, 15 bp, Homo sapiens
aaaattgtgttaagc

SEQ ID NO: 1073697 - DNA, 15 bp, Homo sapiens
aaaaattgtgttaag

SEQ ID NO: 1073698 - DNA, 15 bp, Homo sapiens
taaaaattgtgttaa

SEQ ID NO: 1073699 - DNA, 15 bp, Homo sapiens
ttaaaaattgtgtta

SEQ ID NO: 1073700 - DNA, 15 bp, Homo sapiens
tttaaaaattgtgtt

SEQ ID NO: 1073701 - DNA, 15 bp, Homo sapiens
ttttaaaaattgtgt

SEQ ID NO: 1073702 - DNA, 15 bp, Homo sapiens
ttttttaaaaattgt

SEQ ID NO: 1073703 - DNA, 15 bp, Homo sapiens
attttttaaaaattg

SEQ ID NO: 1073704 - DNA, 15 bp, Homo sapiens
tattttttaaaaatt

SEQ ID NO: 1073705 - DNA, 15 bp, Homo sapiens
atattttttaaaaat

SEQ ID NO: 1073706 - DNA, 15 bp, Homo sapiens
tatattttttaaaaa

SEQ ID NO: 1073707 - DNA, 15 bp, Homo sapiens
atatattttttaaaa

SEQ ID NO: 1073708 - DNA, 15 bp, Homo sapiens
ctatatattttttaa

SEQ ID NO: 1073709 - DNA, 15 bp, Homo sapiens
actatatatttttta

SEQ ID NO: 1073710 - DNA, 15 bp, Homo sapiens
gactatatatttttt

SEQ ID NO: 1073711 - DNA, 15 bp, Homo sapiens
tgactatatattttt

SEQ ID NO: 1073712 - DNA, 15 bp, Homo sapiens
ttgactatatatttt

SEQ ID NO: 1073713 - DNA, 15 bp, Homo sapiens
cttgactatatattt

SEQ ID NO: 1073714 - DNA, 15 bp, Homo sapiens
acttgactatatatt

SEQ ID NO: 1073715 - DNA, 15 bp, Homo sapiens
cacttgactatatat

SEQ ID NO: 1073716 - DNA, 15 bp, Homo sapiens
tcacttgactatata

SEQ ID NO: 1073717 - DNA, 15 bp, Homo sapiens
ttcacttgactatat

SEQ ID NO: 1073718 - DNA, 15 bp, Homo sapiens
tttcacttgactata

SEQ ID NO: 1073719 - DNA, 15 bp, Homo sapiens
ctttcacttgactat

SEQ ID NO: 1073720 - DNA, 15 bp, Homo sapiens
actttcacttgacta

SEQ ID NO: 1073721 - DNA, 15 bp, Homo sapiens
tactttcacttgact

SEQ ID NO: 1073722 - DNA, 15 bp, Homo sapiens
atactttcacttgac

SEQ ID NO: 1073723 - DNA, 15 bp, Homo sapiens
catactttcacttga

SEQ ID NO: 1073724 - DNA, 15 bp, Homo sapiens
tcatactttcacttg

SEQ ID NO: 1073725 - DNA, 15 bp, Homo sapiens
ttcatactttcactt

SEQ ID NO: 1073726 - DNA, 15 bp, Homo sapiens
tttcatactttcact

SEQ ID NO: 1073727 - DNA, 15 bp, Homo sapiens
ttttcatactttcac

SEQ ID NO: 1073728 - DNA, 15 bp, Homo sapiens
attttcatactttca

SEQ ID NO: 1073729 - DNA, 15 bp, Homo sapiens
cattttcatactttc

SEQ ID NO: 1073730 - DNA, 15 bp, Homo sapiens
tcattttcatacttt

SEQ ID NO: 1073731 - DNA, 15 bp, Homo sapiens
ctcattttcatactt

SEQ ID NO: 1073732 - DNA, 15 bp, Homo sapiens
actcattttcatact

SEQ ID NO: 1073733 - DNA, 15 bp, Homo sapiens
aactcattttcatac

SEQ ID NO: 1073734 - DNA, 15 bp, Homo sapiens
caactcattttcata

SEQ ID NO: 1073735 - DNA, 15 bp, Homo sapiens
tcaactcattttcat

SEQ ID NO: 1073736 - DNA, 15 bp, Homo sapiens
ctcaactcattttca

SEQ ID NO: 1073737 - DNA, 15 bp, Homo sapiens
cctcaactcattttc

SEQ ID NO: 1073738 - DNA, 15 bp, Homo sapiens
tcctcaactcatttt

SEQ ID NO: 1073739 - DNA, 15 bp, Homo sapiens
ttcctcaactcattt

SEQ ID NO: 1073740 - DNA, 15 bp, Homo sapiens
tttcctcaactcatt

SEQ ID NO: 1073741 - DNA, 15 bp, Homo sapiens
ctttcctcaactcat

SEQ ID NO: 1073742 - DNA, 15 bp, Homo sapiens
cctttcctcaactca

SEQ ID NO: 1073743 - DNA, 15 bp, Homo sapiens
gcctttcctcaactc

SEQ ID NO: 1073744 - DNA, 15 bp, Homo sapiens
cgcctttcctcaact

SEQ ID NO: 1073745 - DNA, 15 bp, Homo sapiens
tcgcctttcctcaac

SEQ ID NO: 1073746 - DNA, 15 bp, Homo sapiens
ctcgcctttcctcaa

SEQ ID NO: 1073747 - DNA, 15 bp, Homo sapiens
actcgcctttcctca

SEQ ID NO: 1073748 - DNA, 15 bp, Homo sapiens
tactcgcctttcctc

SEQ ID NO: 1073749 - DNA, 15 bp, Homo sapiens
gtactcgcctttcct

SEQ ID NO: 1073750 - DNA, 15 bp, Homo sapiens
cgtactcgcctttcc

SEQ ID NO: 1073751 - DNA, 15 bp, Homo sapiens
acgtactcgcctttc

SEQ ID NO: 1073752 - DNA, 15 bp, Homo sapiens
cacgtactcgccttt

SEQ ID NO: 1073753 - DNA, 15 bp, Homo sapiens
ccacgtactcgcctt

SEQ ID NO: 1073754 - DNA, 15 bp, Homo sapiens
cccacgtactcgcct

SEQ ID NO: 1073755 - DNA, 15 bp, Homo sapiens
acccacgtactcgcc

SEQ ID NO: 1073756 - DNA, 15 bp, Homo sapiens
gacccacgtactcgc

SEQ ID NO: 1073757 - DNA, 15 bp, Homo sapiens
tgacccacgtactcg

SEQ ID NO: 1073758 - DNA, 15 bp, Homo sapiens
ttgacccacgtactc

SEQ ID NO: 1073759 - DNA, 15 bp, Homo sapiens
tttgacccacgtact

SEQ ID NO: 1073760 - DNA, 15 bp, Homo sapiens
ctttgacccacgtac

SEQ ID NO: 1073761 - DNA, 15 bp, Homo sapiens
gctttgacccacgta

SEQ ID NO: 1073762 - DNA, 15 bp, Homo sapiens
agctttgacccacgt

SEQ ID NO: 1073763 - DNA, 15 bp, Homo sapiens
cagctttgacccacg

SEQ ID NO: 1073764 - DNA, 15 bp, Homo sapiens
ccagctttgacccac

SEQ ID NO: 1073765 - DNA, 15 bp, Homo sapiens
cccagctttgaccca

SEQ ID NO: 1073766 - DNA, 15 bp, Homo sapiens
acccagctttgaccc

SEQ ID NO: 1073767 - DNA, 15 bp, Homo sapiens
gacccagctttgacc

SEQ ID NO: 1073768 - DNA, 15 bp, Homo sapiens
agacccagctttgac

SEQ ID NO: 1073769 - DNA, 15 bp, Homo sapiens
cagacccagctttga

SEQ ID NO: 1073770 - DNA, 15 bp, Homo sapiens
tcagacccagctttg

SEQ ID NO: 1073771 - DNA, 15 bp, Homo sapiens
ctcagacccagcttt

SEQ ID NO: 1073772 - DNA, 15 bp, Homo sapiens
cctcagacccagctt

SEQ ID NO: 1073773 - DNA, 15 bp, Homo sapiens
tcctcagacccagct

SEQ ID NO: 1073774 - DNA, 15 bp, Homo sapiens
ttcctcagacccagc

SEQ ID NO: 1073775 - DNA, 15 bp, Homo sapiens
tttcctcagacccag

SEQ ID NO: 1073776 - DNA, 15 bp, Homo sapiens
ctttcctcagaccca

SEQ ID NO: 1073777 - DNA, 15 bp, Homo sapiens
cctttcctcagaccc

SEQ ID NO: 1073778 - DNA, 15 bp, Homo sapiens
gcctttcctcagacc

SEQ ID NO: 1073779 - DNA, 15 bp, Homo sapiens
agcctttcctcagac

SEQ ID NO: 1073780 - DNA, 15 bp, Homo sapiens
gagcctttcctcaga

SEQ ID NO: 1073781 - DNA, 15 bp, Homo sapiens
tgagcctttcctcag

SEQ ID NO: 1073782 - DNA, 15 bp, Homo sapiens
gtgagcctttcctca

SEQ ID NO: 1073783 - DNA, 15 bp, Homo sapiens
tgtgagcctttcctc

SEQ ID NO: 1073784 - DNA, 15 bp, Homo sapiens
atgtgagcctttcct

SEQ ID NO: 1073785 - DNA, 15 bp, Homo sapiens
aatgtgagcctttcc

SEQ ID NO: 1073786 - DNA, 15 bp, Homo sapiens
aaatgtgagcctttc

SEQ ID NO: 1073787 - DNA, 15 bp, Homo sapiens
aaaatgtgagccttt

SEQ ID NO: 1073788 - DNA, 15 bp, Homo sapiens
caaaatgtgagcctt

SEQ ID NO: 1073789 - DNA, 15 bp, Homo sapiens
tcaaaatgtgagcct

SEQ ID NO: 1073790 - DNA, 15 bp, Homo sapiens
ctcaaaatgtgagcc

SEQ ID NO: 1073791 - DNA, 15 bp, Homo sapiens
tctcaaaatgtgagc

SEQ ID NO: 1073792 - DNA, 15 bp, Homo sapiens
atctcaaaatgtgag

SEQ ID NO: 1073793 - DNA, 15 bp, Homo sapiens
gatctcaaaatgtga

SEQ ID NO: 1073794 - DNA, 15 bp, Homo sapiens
ggatctcaaaatgtg

SEQ ID NO: 1073795 - DNA, 15 bp, Homo sapiens
gggatctcaaaatgt

SEQ ID NO: 1073796 - DNA, 15 bp, Homo sapiens
cgggatctcaaaatg

SEQ ID NO: 1073797 - DNA, 15 bp, Homo sapiens
tcgggatctcaaaat

SEQ ID NO: 1073798 - DNA, 15 bp, Homo sapiens
gtcgggatctcaaaa

SEQ ID NO: 1073799 - DNA, 15 bp, Homo sapiens
agtcgggatctcaaa

SEQ ID NO: 1073800 - DNA, 15 bp, Homo sapiens
gagtcgggatctcaa

SEQ ID NO: 1073801 - DNA, 15 bp, Homo sapiens
tgagtcgggatctca

SEQ ID NO: 1073802 - DNA, 15 bp, Homo sapiens
ttgagtcgggatctc

SEQ ID NO: 1073803 - DNA, 15 bp, Homo sapiens
attgagtcgggatct

SEQ ID NO: 1073804 - DNA, 15 bp, Homo sapiens
gattgagtcgggatc

SEQ ID NO: 1073805 - DNA, 15 bp, Homo sapiens
ggattgagtcgggat

SEQ ID NO: 1073806 - DNA, 15 bp, Homo sapiens
tggattgagtcggga

SEQ ID NO: 1073807 - DNA, 15 bp, Homo sapiens
atggattgagtcggg

SEQ ID NO: 1073808 - DNA, 15 bp, Homo sapiens
catggattgagtcgg

SEQ ID NO: 1073809 - DNA, 15 bp, Homo sapiens
acatggattgagtcg

SEQ ID NO: 1073810 - DNA, 15 bp, Homo sapiens
gacatggattgagtc

SEQ ID NO: 1073811 - DNA, 15 bp, Homo sapiens
ggacatggattgagt

SEQ ID NO: 1073812 - DNA, 15 bp, Homo sapiens
gggacatggattgag

SEQ ID NO: 1073813 - DNA, 15 bp, Homo sapiens
agggacatggattga

SEQ ID NO: 1073814 - DNA, 15 bp, Homo sapiens
aagggacatggattg

SEQ ID NO: 1073815 - DNA, 15 bp, Homo sapiens
taagggacatggatt

SEQ ID NO: 1073816 - DNA, 15 bp, Homo sapiens
ttaagggacatggat

SEQ ID NO: 1073817 - DNA, 15 bp, Homo sapiens
tttaagggacatgga

SEQ ID NO: 1073818 - DNA, 15 bp, Homo sapiens
ctttaagggacatgg

SEQ ID NO: 1073819 - DNA, 15 bp, Homo sapiens
cctttaagggacatg

SEQ ID NO: 1073820 - DNA, 15 bp, Homo sapiens
ccctttaagggacat

SEQ ID NO: 1073821 - DNA, 15 bp, Homo sapiens
gccctttaagggaca

SEQ ID NO: 1073822 - DNA, 15 bp, Homo sapiens
tgccctttaagggac

SEQ ID NO: 1073823 - DNA, 15 bp, Homo sapiens
gtgccctttaaggga

SEQ ID NO: 1073824 - DNA, 15 bp, Homo sapiens
tgtgccctttaaggg

SEQ ID NO: 1073825 - DNA, 15 bp, Homo sapiens
ctgtgccctttaagg

SEQ ID NO: 1073826 - DNA, 15 bp, Homo sapiens
cctgtgccctttaag

SEQ ID NO: 1073827 - DNA, 15 bp, Homo sapiens
ccctgtgccctttaa

SEQ ID NO: 1073828 - DNA, 15 bp, Homo sapiens
accctgtgcccttta

SEQ ID NO: 1073829 - DNA, 15 bp, Homo sapiens
caccctgtgcccttt

SEQ ID NO: 1073830 - DNA, 15 bp, Homo sapiens
acaccctgtgccctt

SEQ ID NO: 1073831 - DNA, 15 bp, Homo sapiens
gacaccctgtgccct

SEQ ID NO: 1073832 - DNA, 15 bp, Homo sapiens
agacaccctgtgccc

SEQ ID NO: 1073833 - DNA, 15 bp, Homo sapiens
gagacaccctgtgcc

SEQ ID NO: 1073834 - DNA, 15 bp, Homo sapiens
ggagacaccctgtgc

SEQ ID NO: 1073835 - DNA, 15 bp, Homo sapiens
tggagacaccctgtg

SEQ ID NO: 1073836 - DNA, 15 bp, Homo sapiens
gtggagacaccctgt

SEQ ID NO: 1073837 - DNA, 15 bp, Homo sapiens
tgtggagacaccctg

SEQ ID NO: 1073838 - DNA, 15 bp, Homo sapiens
ctgtggagacaccct

SEQ ID NO: 1073839 - DNA, 15 bp, Homo sapiens
cctgtggagacaccc

SEQ ID NO: 1073840 - DNA, 15 bp, Homo sapiens
ccctgtggagacacc

SEQ ID NO: 1073841 - DNA, 15 bp, Homo sapiens
gccctgtggagacac

SEQ ID NO: 1073842 - DNA, 15 bp, Homo sapiens
ggccctgtggagaca

SEQ ID NO: 1073843 - DNA, 15 bp, Homo sapiens
cggccctgtggagac

SEQ ID NO: 1073844 - DNA, 15 bp, Homo sapiens
gcggccctgtggaga

SEQ ID NO: 1073845 - DNA, 15 bp, Homo sapiens
ggcggccctgtggag

SEQ ID NO: 1073846 - DNA, 15 bp, Homo sapiens
gggcggccctgtgga

SEQ ID NO: 1073847 - DNA, 15 bp, Homo sapiens
tgggcggccctgtgg

SEQ ID NO: 1073848 - DNA, 15 bp, Homo sapiens
ttgggcggccctgtg

SEQ ID NO: 1073849 - DNA, 15 bp, Homo sapiens
tttgggcggccctgt

SEQ ID NO: 1073850 - DNA, 15 bp, Homo sapiens
ttttgggcggccctg

SEQ ID NO: 1073851 - DNA, 15 bp, Homo sapiens
attttgggcggccct

SEQ ID NO: 1073852 - DNA, 15 bp, Homo sapiens
gattttgggcggccc

SEQ ID NO: 1073853 - DNA, 15 bp, Homo sapiens
agattttgggcggcc

SEQ ID NO: 1073854 - DNA, 15 bp, Homo sapiens
cagattttgggcggc

SEQ ID NO: 1073855 - DNA, 15 bp, Homo sapiens
ccagattttgggcgg

SEQ ID NO: 1073856 - DNA, 15 bp, Homo sapiens
accagattttgggcg

SEQ ID NO: 1073857 - DNA, 15 bp, Homo sapiens
caccagattttgggc

SEQ ID NO: 1073858 - DNA, 15 bp, Homo sapiens
tcaccagattttggg

SEQ ID NO: 1073859 - DNA, 15 bp, Homo sapiens
ctcaccagattttgg

SEQ ID NO: 1073860 - DNA, 15 bp, Homo sapiens
tctcaccagattttg

SEQ ID NO: 1073861 - DNA, 15 bp, Homo sapiens
ctctcaccagatttt

SEQ ID NO: 1073862 - DNA, 15 bp, Homo sapiens
tctctcaccagattt

SEQ ID NO: 1073863 - DNA, 15 bp, Homo sapiens
ctctctcaccagatt

SEQ ID NO: 1073864 - DNA, 15 bp, Homo sapiens
cctctctcaccagat

SEQ ID NO: 1073865 - DNA, 15 bp, Homo sapiens
ccctctctcaccaga

SEQ ID NO: 1073866 - DNA, 15 bp, Homo sapiens
gccctctctcaccag

SEQ ID NO: 1073867 - DNA, 15 bp, Homo sapiens
cgccctctctcacca

SEQ ID NO: 1073868 - DNA, 15 bp, Homo sapiens
acgccctctctcacc

SEQ ID NO: 1073869 - DNA, 15 bp, Homo sapiens
tacgccctctctcac

SEQ ID NO: 1073870 - DNA, 15 bp, Homo sapiens
ctacgccctctctca

SEQ ID NO: 1073871 - DNA, 15 bp, Homo sapiens
tctacgccctctctc

SEQ ID NO: 1073872 - DNA, 15 bp, Homo sapiens
gtctacgccctctct

SEQ ID NO: 1073873 - DNA, 15 bp, Homo sapiens
cgtctacgccctctc

SEQ ID NO: 1073874 - DNA, 15 bp, Homo sapiens
gcgtctacgccctct

SEQ ID NO: 1073875 - DNA, 15 bp, Homo sapiens
ggcgtctacgccctc

SEQ ID NO: 1073876 - DNA, 15 bp, Homo sapiens
aggcgtctacgccct

SEQ ID NO: 1073877 - DNA, 15 bp, Homo sapiens
gaggcgtctacgccc

SEQ ID NO: 1073878 - DNA, 15 bp, Homo sapiens
tgaggcgtctacgcc

SEQ ID NO: 1073879 - DNA, 15 bp, Homo sapiens
gtgaggcgtctacgc

SEQ ID NO: 1073880 - DNA, 15 bp, Homo sapiens
ggtgaggcgtctacg

SEQ ID NO: 1073881 - DNA, 15 bp, Homo sapiens
aggtgaggcgtctac

SEQ ID NO: 1073882 - DNA, 15 bp, Homo sapiens
aaggtgaggcgtcta

SEQ ID NO: 1073883 - DNA, 15 bp, Homo sapiens
gaaggtgaggcgtct

SEQ ID NO: 1073884 - DNA, 15 bp, Homo sapiens
agaaggtgaggcgtc

SEQ ID NO: 1073885 - DNA, 15 bp, Homo sapiens
cagaaggtgaggcgt

SEQ ID NO: 1073886 - DNA, 15 bp, Homo sapiens
gcagaaggtgaggcg

SEQ ID NO: 1073887 - DNA, 15 bp, Homo sapiens
ggcagaaggtgaggc

SEQ ID NO: 1073888 - DNA, 15 bp, Homo sapiens
aggcagaaggtgagg

SEQ ID NO: 1073889 - DNA, 15 bp, Homo sapiens
gaggcagaaggtgag

SEQ ID NO: 1073890 - DNA, 15 bp, Homo sapiens
agaggcagaaggtga

SEQ ID NO: 1073891 - DNA, 15 bp, Homo sapiens
tagaggcagaaggtg

SEQ ID NO: 1073892 - DNA, 15 bp, Homo sapiens
gtagaggcagaaggt

SEQ ID NO: 1073893 - DNA, 15 bp, Homo sapiens
cgtagaggcagaagg

SEQ ID NO: 1073894 - DNA, 15 bp, Homo sapiens
ccgtagaggcagaag

SEQ ID NO: 1073895 - DNA, 15 bp, Homo sapiens
cccgtagaggcagaa

SEQ ID NO: 1073896 - DNA, 15 bp, Homo sapiens
acccgtagaggcaga

SEQ ID NO: 1073897 - DNA, 15 bp, Homo sapiens
gacccgtagaggcag

SEQ ID NO: 1073898 - DNA, 15 bp, Homo sapiens
tgacccgtagaggca

SEQ ID NO: 1073899 - DNA, 15 bp, Homo sapiens
gtgacccgtagaggc

SEQ ID NO: 1073900 - DNA, 15 bp, Homo sapiens
tgtgacccgtagagg

SEQ ID NO: 1073901 - DNA, 15 bp, Homo sapiens
ttgtgacccgtagag

SEQ ID NO: 1073902 - DNA, 15 bp, Homo sapiens
tttgtgacccgtaga

SEQ ID NO: 1073903 - DNA, 15 bp, Homo sapiens
ttttgtgacccgtag

SEQ ID NO: 1073904 - DNA, 15 bp, Homo sapiens
cttttgtgacccgta

SEQ ID NO: 1073905 - DNA, 15 bp, Homo sapiens
gcttttgtgacccgt

SEQ ID NO: 1073906 - DNA, 15 bp, Homo sapiens
ggcttttgtgacccg

SEQ ID NO: 1073907 - DNA, 15 bp, Homo sapiens
aggcttttgtgaccc

SEQ ID NO: 1073908 - DNA, 15 bp, Homo sapiens
caggcttttgtgacc

SEQ ID NO: 1073909 - DNA, 15 bp, Homo sapiens
ccaggcttttgtgac

SEQ ID NO: 1073910 - DNA, 15 bp, Homo sapiens
cccaggcttttgtga

SEQ ID NO: 1073911 - DNA, 15 bp, Homo sapiens
acccaggcttttgtg

SEQ ID NO: 1073912 - DNA, 15 bp, Homo sapiens
gacccaggcttttgt

SEQ ID NO: 1073913 - DNA, 15 bp, Homo sapiens
tgacccaggcttttg

SEQ ID NO: 1073914 - DNA, 15 bp, Homo sapiens
gtgacccaggctttt

SEQ ID NO: 1073915 - DNA, 15 bp, Homo sapiens
ggtgacccaggcttt

SEQ ID NO: 1073916 - DNA, 15 bp, Homo sapiens
gggtgacccaggctt

SEQ ID NO: 1073917 - DNA, 15 bp, Homo sapiens
agggtgacccaggct

SEQ ID NO: 1073918 - DNA, 15 bp, Homo sapiens
cagggtgacccaggc

SEQ ID NO: 1073919 - DNA, 15 bp, Homo sapiens
ccagggtgacccagg

SEQ ID NO: 1073920 - DNA, 15 bp, Homo sapiens
accagggtgacccag

SEQ ID NO: 1073921 - DNA, 15 bp, Homo sapiens
aaccagggtgaccca

SEQ ID NO: 1073922 - DNA, 15 bp, Homo sapiens
caaccagggtgaccc

SEQ ID NO: 1073923 - DNA, 15 bp, Homo sapiens
gcaaccagggtgacc

SEQ ID NO: 1073924 - DNA, 15 bp, Homo sapiens
ggcaaccagggtgac

SEQ ID NO: 1073925 - DNA, 15 bp, Homo sapiens
tggcaaccagggtga

SEQ ID NO: 1073926 - DNA, 15 bp, Homo sapiens
gtggcaaccagggtg

SEQ ID NO: 1073927 - DNA, 15 bp, Homo sapiens
agtggcaaccagggt

SEQ ID NO: 1073928 - DNA, 15 bp, Homo sapiens
cagtggcaaccaggg

SEQ ID NO: 1073929 - DNA, 15 bp, Homo sapiens
acagtggcaaccagg

SEQ ID NO: 1073930 - DNA, 15 bp, Homo sapiens
aacagtggcaaccag

SEQ ID NO: 1073931 - DNA, 15 bp, Homo sapiens
gaacagtggcaacca

SEQ ID NO: 1073932 - DNA, 15 bp, Homo sapiens
ggaacagtggcaacc

SEQ ID NO: 1073933 - DNA, 15 bp, Homo sapiens
aggaacagtggcaac

SEQ ID NO: 1073934 - DNA, 15 bp, Homo sapiens
taggaacagtggcaa

SEQ ID NO: 1073935 - DNA, 15 bp, Homo sapiens
ctaggaacagtggca

SEQ ID NO: 1073936 - DNA, 15 bp, Homo sapiens
actaggaacagtggc

SEQ ID NO: 1073937 - DNA, 15 bp, Homo sapiens
aactaggaacagtgg

SEQ ID NO: 1073938 - DNA, 15 bp, Homo sapiens
gaactaggaacagtg

SEQ ID NO: 1073939 - DNA, 15 bp, Homo sapiens
tgaactaggaacagt

SEQ ID NO: 1073940 - DNA, 15 bp, Homo sapiens
ttgaactaggaacag

SEQ ID NO: 1073941 - DNA, 15 bp, Homo sapiens
tttgaactaggaaca

SEQ ID NO: 1073942 - DNA, 15 bp, Homo sapiens
ctttgaactaggaac

SEQ ID NO: 1073943 - DNA, 15 bp, Homo sapiens
actttgaactaggaa

SEQ ID NO: 1073944 - DNA, 15 bp, Homo sapiens
gactttgaactagga

SEQ ID NO: 1073945 - DNA, 15 bp, Homo sapiens
agactttgaactagg

SEQ ID NO: 1073946 - DNA, 15 bp, Homo sapiens
aagactttgaactag

SEQ ID NO: 1073947 - DNA, 15 bp, Homo sapiens
gaagactttgaacta

SEQ ID NO: 1073948 - DNA, 15 bp, Homo sapiens
agaagactttgaact

SEQ ID NO: 1073949 - DNA, 15 bp, Homo sapiens
aagaagactttgaac

SEQ ID NO: 1073950 - DNA, 15 bp, Homo sapiens
gaagaagactttgaa

SEQ ID NO: 1073951 - DNA, 15 bp, Homo sapiens
agaagaagactttga

SEQ ID NO: 1073952 - DNA, 15 bp, Homo sapiens
cagaagaagactttg

SEQ ID NO: 1073953 - DNA, 15 bp, Homo sapiens
acagaagaagacttt

SEQ ID NO: 1073954 - DNA, 15 bp, Homo sapiens
gacagaagaagactt

SEQ ID NO: 1073955 - DNA, 15 bp, Homo sapiens
agacagaagaagact

SEQ ID NO: 1073956 - DNA, 15 bp, Homo sapiens
tagacagaagaagac

SEQ ID NO: 1073957 - DNA, 15 bp, Homo sapiens
ttagacagaagaaga

SEQ ID NO: 1073958 - DNA, 15 bp, Homo sapiens
attagacagaagaag

SEQ ID NO: 1073959 - DNA, 15 bp, Homo sapiens
gattagacagaagaa

SEQ ID NO: 1073960 - DNA, 15 bp, Homo sapiens
ggattagacagaaga

SEQ ID NO: 1073961 - DNA, 15 bp, Homo sapiens
aggattagacagaag

SEQ ID NO: 1073962 - DNA, 15 bp, Homo sapiens
aaggattagacagaa

SEQ ID NO: 1073963 - DNA, 15 bp, Homo sapiens
gaaggattagacaga

SEQ ID NO: 1073964 - DNA, 15 bp, Homo sapiens
tgaaggattagacag

SEQ ID NO: 1073965 - DNA, 15 bp, Homo sapiens
gtgaaggattagaca

SEQ ID NO: 1073966 - DNA, 15 bp, Homo sapiens
ggtgaaggattagac

SEQ ID NO: 1073967 - DNA, 15 bp, Homo sapiens
gggtgaaggattaga

SEQ ID NO: 1073968 - DNA, 15 bp, Homo sapiens
ggggtgaaggattag

SEQ ID NO: 1073969 - DNA, 15 bp, Homo sapiens
aggggtgaaggatta

SEQ ID NO: 1073970 - DNA, 15 bp, Homo sapiens
taggggtgaaggatt

SEQ ID NO: 1073971 - DNA, 15 bp, Homo sapiens
ataggggtgaaggat

SEQ ID NO: 1073972 - DNA, 15 bp, Homo sapiens
aataggggtgaagga

SEQ ID NO: 1073973 - DNA, 15 bp, Homo sapiens
gaataggggtgaagg

SEQ ID NO: 1073974 - DNA, 15 bp, Homo sapiens
agaataggggtgaag

SEQ ID NO: 1073975 - DNA, 15 bp, Homo sapiens
gagaataggggtgaa

SEQ ID NO: 1073976 - DNA, 15 bp, Homo sapiens
cgagaataggggtga

SEQ ID NO: 1073977 - DNA, 15 bp, Homo sapiens
gcgagaataggggtg

SEQ ID NO: 1073978 - DNA, 15 bp, Homo sapiens
ggcgagaataggggt

SEQ ID NO: 1073979 - DNA, 15 bp, Homo sapiens
aggcgagaatagggg

SEQ ID NO: 1073980 - DNA, 15 bp, Homo sapiens
aaggcgagaataggg

SEQ ID NO: 1073981 - DNA, 15 bp, Homo sapiens
gaaggcgagaatagg

SEQ ID NO: 1073982 - DNA, 15 bp, Homo sapiens
ggaaggcgagaatag

SEQ ID NO: 1073983 - DNA, 15 bp, Homo sapiens
tggaaggcgagaata

SEQ ID NO: 1073984 - DNA, 15 bp, Homo sapiens
gtggaaggcgagaat

SEQ ID NO: 1073985 - DNA, 15 bp, Homo sapiens
agtggaaggcgagaa

SEQ ID NO: 1073986 - DNA, 15 bp, Homo sapiens
gagtggaaggcgaga

SEQ ID NO: 1073987 - DNA, 15 bp, Homo sapiens
ggagtggaaggcgag

SEQ ID NO: 1073988 - DNA, 15 bp, Homo sapiens
tggagtggaaggcga

SEQ ID NO: 1073989 - DNA, 15 bp, Homo sapiens
gtggagtggaaggcg

SEQ ID NO: 1073990 - DNA, 15 bp, Homo sapiens
ggtggagtggaaggc

SEQ ID NO: 1073991 - DNA, 15 bp, Homo sapiens
aggtggagtggaagg

SEQ ID NO: 1073992 - DNA, 15 bp, Homo sapiens
gaggtggagtggaag

SEQ ID NO: 1073993 - DNA, 15 bp, Homo sapiens
ggaggtggagtggaa

SEQ ID NO: 1073994 - DNA, 15 bp, Homo sapiens
gggaggtggagtgga

SEQ ID NO: 1073995 - DNA, 15 bp, Homo sapiens
cgggaggtggagtgg

SEQ ID NO: 1073996 - DNA, 15 bp, Homo sapiens
gcgggaggtggagtg

SEQ ID NO: 1073997 - DNA, 15 bp, Homo sapiens
agcgggaggtggagt

SEQ ID NO: 1073998 - DNA, 15 bp, Homo sapiens
gagcgggaggtggag

SEQ ID NO: 1073999 - DNA, 15 bp, Homo sapiens
tgagcgggaggtgga

SEQ ID NO: 1074000 - DNA, 15 bp, Homo sapiens
ctgagcgggaggtgg

SEQ ID NO: 1074001 - DNA, 15 bp, Homo sapiens
actgagcgggaggtg

SEQ ID NO: 1074002 - DNA, 15 bp, Homo sapiens
gactgagcgggaggt

SEQ ID NO: 1074003 - DNA, 15 bp, Homo sapiens
tgactgagcgggagg

SEQ ID NO: 1074004 - DNA, 15 bp, Homo sapiens
ctgactgagcgggag

SEQ ID NO: 1074005 - DNA, 15 bp, Homo sapiens
tctgactgagcggga

SEQ ID NO: 1074006 - DNA, 15 bp, Homo sapiens
gtctgactgagcggg

SEQ ID NO: 1074007 - DNA, 15 bp, Homo sapiens
agtctgactgagcgg

SEQ ID NO: 1074008 - DNA, 15 bp, Homo sapiens
cagtctgactgagcg

SEQ ID NO: 1074009 - DNA, 15 bp, Homo sapiens
gcagtctgactgagc

SEQ ID NO: 1074010 - DNA, 15 bp, Homo sapiens
cgcagtctgactgag

SEQ ID NO: 1074011 - DNA, 15 bp, Homo sapiens
gcgcagtctgactga

SEQ ID NO: 1074012 - DNA, 15 bp, Homo sapiens
agcgcagtctgactg

SEQ ID NO: 1074013 - DNA, 15 bp, Homo sapiens
tagcgcagtctgact

SEQ ID NO: 1074014 - DNA, 15 bp, Homo sapiens
gtagcgcagtctgac

SEQ ID NO: 1074015 - DNA, 15 bp, Homo sapiens
agtagcgcagtctga

SEQ ID NO: 1074016 - DNA, 15 bp, Homo sapiens
aagtagcgcagtctg

SEQ ID NO: 1074017 - DNA, 15 bp, Homo sapiens
aaagtagcgcagtct

SEQ ID NO: 1074018 - DNA, 15 bp, Homo sapiens
caaagtagcgcagtc

SEQ ID NO: 1074019 - DNA, 15 bp, Homo sapiens
tcaaagtagcgcagt

SEQ ID NO: 1074020 - DNA, 15 bp, Homo sapiens
ttcaaagtagcgcag

SEQ ID NO: 1074021 - DNA, 15 bp, Homo sapiens
gttcaaagtagcgca

SEQ ID NO: 1074022 - DNA, 15 bp, Homo sapiens
ggttcaaagtagcgc

SEQ ID NO: 1074023 - DNA, 15 bp, Homo sapiens
cggttcaaagtagcg

SEQ ID NO: 1074024 - DNA, 15 bp, Homo sapiens
ccggttcaaagtagc

SEQ ID NO: 1074025 - DNA, 15 bp, Homo sapiens
tccggttcaaagtag

SEQ ID NO: 1074026 - DNA, 15 bp, Homo sapiens
gtccggttcaaagta

SEQ ID NO: 1074027 - DNA, 15 bp, Homo sapiens
ggtccggttcaaagt

SEQ ID NO: 1074028 - DNA, 15 bp, Homo sapiens
tggtccggttcaaag

SEQ ID NO: 1074029 - DNA, 15 bp, Homo sapiens
ttggtccggttcaaa

SEQ ID NO: 1074030 - DNA, 15 bp, Homo sapiens
tttggtccggttcaa

SEQ ID NO: 1074031 - DNA, 15 bp, Homo sapiens
gtttggtccggttca

SEQ ID NO: 1074032 - DNA, 15 bp, Homo sapiens
ggtttggtccggttc

SEQ ID NO: 1074033 - DNA, 15 bp, Homo sapiens
tggtttggtccggtt

SEQ ID NO: 1074034 - DNA, 15 bp, Homo sapiens
ttggtttggtccggt

SEQ ID NO: 1074035 - DNA, 15 bp, Homo sapiens
tttggtttggtccgg

SEQ ID NO: 1074036 - DNA, 15 bp, Homo sapiens
gtttggtttggtccg

SEQ ID NO: 1074037 - DNA, 15 bp, Homo sapiens
ggtttggtttggtcc

SEQ ID NO: 1074038 - DNA, 15 bp, Homo sapiens
tggtttggtttggtc

SEQ ID NO: 1074039 - DNA, 15 bp, Homo sapiens
ttggtttggtttggt

SEQ ID NO: 1074040 - DNA, 15 bp, Homo sapiens
tttggtttggtttgg

SEQ ID NO: 1074041 - DNA, 15 bp, Homo sapiens
gtttggtttggtttg

SEQ ID NO: 1074042 - DNA, 15 bp, Homo sapiens
ggtttggtttggttt

SEQ ID NO: 1074043 - DNA, 15 bp, Homo sapiens
tggtttggtttggtt

SEQ ID NO: 1074044 - DNA, 15 bp, Homo sapiens
ctggtttggtttggt

SEQ ID NO: 1074045 - DNA, 15 bp, Homo sapiens
tctggtttggtttgg

SEQ ID NO: 1074046 - DNA, 15 bp, Homo sapiens
gtctggtttggtttg

SEQ ID NO: 1074047 - DNA, 15 bp, Homo sapiens
ggtctggtttggttt

SEQ ID NO: 1074048 - DNA, 15 bp, Homo sapiens
tggtctggtttggtt

SEQ ID NO: 1074049 - DNA, 15 bp, Homo sapiens
ctggtctggtttggt

SEQ ID NO: 1074050 - DNA, 15 bp, Homo sapiens
tctggtctggtttgg

SEQ ID NO: 1074051 - DNA, 15 bp, Homo sapiens
gtctggtctggtttg

SEQ ID NO: 1074052 - DNA, 15 bp, Homo sapiens
tgtctggtctggttt

SEQ ID NO: 1074053 - DNA, 15 bp, Homo sapiens
gtgtctggtctggtt

SEQ ID NO: 1074054 - DNA, 15 bp, Homo sapiens
ggtgtctggtctggt

SEQ ID NO: 1074055 - DNA, 15 bp, Homo sapiens
gggtgtctggtctgg

SEQ ID NO: 1074056 - DNA, 15 bp, Homo sapiens
ggggtgtctggtctg

SEQ ID NO: 1074057 - DNA, 15 bp, Homo sapiens
gggggtgtctggtct

SEQ ID NO: 1074058 - DNA, 15 bp, Homo sapiens
agggggtgtctggtc

SEQ ID NO: 1074059 - DNA, 15 bp, Homo sapiens
gagggggtgtctggt

SEQ ID NO: 1074060 - DNA, 15 bp, Homo sapiens
ggagggggtgtctgg

SEQ ID NO: 1074061 - DNA, 15 bp, Homo sapiens
gggagggggtgtctg

SEQ ID NO: 1074062 - DNA, 15 bp, Homo sapiens
cgggagggggtgtct

SEQ ID NO: 1074063 - DNA, 15 bp, Homo sapiens
gcgggagggggtgtc

SEQ ID NO: 1074064 - DNA, 15 bp, Homo sapiens
cgcgggagggggtgt

SEQ ID NO: 1074065 - DNA, 15 bp, Homo sapiens
ccgcgggagggggtg

SEQ ID NO: 1074066 - DNA, 15 bp, Homo sapiens
tccgcgggagggggt

SEQ ID NO: 1074067 - DNA, 15 bp, Homo sapiens
ttccgcgggaggggg

SEQ ID NO: 1074068 - DNA, 15 bp, Homo sapiens
attccgcgggagggg

SEQ ID NO: 1074069 - DNA, 15 bp, Homo sapiens
gattccgcgggaggg

SEQ ID NO: 1074070 - DNA, 15 bp, Homo sapiens
ggattccgcgggagg

SEQ ID NO: 1074071 - DNA, 15 bp, Homo sapiens
gggattccgcgggag

SEQ ID NO: 1074072 - DNA, 15 bp, Homo sapiens
tgggattccgcggga

SEQ ID NO: 1074073 - DNA, 15 bp, Homo sapiens
ctgggattccgcggg

SEQ ID NO: 1074074 - DNA, 15 bp, Homo sapiens
tctgggattccgcgg

SEQ ID NO: 1074075 - DNA, 15 bp, Homo sapiens
ctctgggattccgcg

SEQ ID NO: 1074076 - DNA, 15 bp, Homo sapiens
tctctgggattccgc

SEQ ID NO: 1074077 - DNA, 15 bp, Homo sapiens
ctctctgggattccg

SEQ ID NO: 1074078 - DNA, 15 bp, Homo sapiens
cctctctgggattcc

SEQ ID NO: 1074079 - DNA, 15 bp, Homo sapiens
gcctctctgggattc

SEQ ID NO: 1074080 - DNA, 15 bp, Homo sapiens
ggcctctctgggatt

SEQ ID NO: 1074081 - DNA, 15 bp, Homo sapiens
cggcctctctgggat

SEQ ID NO: 1074082 - DNA, 15 bp, Homo sapiens
tcggcctctctggga

SEQ ID NO: 1074083 - DNA, 15 bp, Homo sapiens
ttcggcctctctggg

SEQ ID NO: 1074084 - DNA, 15 bp, Homo sapiens
gttcggcctctctgg

SEQ ID NO: 1074085 - DNA, 15 bp, Homo sapiens
agttcggcctctctg

SEQ ID NO: 1074086 - DNA, 15 bp, Homo sapiens
cagttcggcctctct

SEQ ID NO: 1074087 - DNA, 15 bp, Homo sapiens
ccagttcggcctctc

SEQ ID NO: 1074088 - DNA, 15 bp, Homo sapiens
cccagttcggcctct

SEQ ID NO: 1074089 - DNA, 15 bp, Homo sapiens
tcccagttcggcctc

SEQ ID NO: 1074090 - DNA, 15 bp, Homo sapiens
atcccagttcggcct

SEQ ID NO: 1074091 - DNA, 15 bp, Homo sapiens
tatcccagttcggcc

SEQ ID NO: 1074092 - DNA, 15 bp, Homo sapiens
ttatcccagttcggc

SEQ ID NO: 1074093 - DNA, 15 bp, Homo sapiens
gttatcccagttcgg

SEQ ID NO: 1074094 - DNA, 15 bp, Homo sapiens
ggttatcccagttcg

SEQ ID NO: 1074095 - DNA, 15 bp, Homo sapiens
cggttatcccagttc

SEQ ID NO: 1074096 - DNA, 15 bp, Homo sapiens
ccggttatcccagtt

SEQ ID NO: 1074097 - DNA, 15 bp, Homo sapiens
tccggttatcccagt

SEQ ID NO: 1074098 - DNA, 15 bp, Homo sapiens
atccggttatcccag

SEQ ID NO: 1074099 - DNA, 15 bp, Homo sapiens
catccggttatccca

SEQ ID NO: 1074100 - DNA, 15 bp, Homo sapiens
gcatccggttatccc

SEQ ID NO: 1074101 - DNA, 15 bp, Homo sapiens
tgcatccggttatcc

SEQ ID NO: 1074102 - DNA, 15 bp, Homo sapiens
atgcatccggttatc

SEQ ID NO: 1074103 - DNA, 15 bp, Homo sapiens
aatgcatccggttat

SEQ ID NO: 1074104 - DNA, 15 bp, Homo sapiens
aaatgcatccggtta

SEQ ID NO: 1074105 - DNA, 15 bp, Homo sapiens
caaatgcatccggtt

SEQ ID NO: 1074106 - DNA, 15 bp, Homo sapiens
tcaaatgcatccggt

SEQ ID NO: 1074107 - DNA, 15 bp, Homo sapiens
atcaaatgcatccgg

SEQ ID NO: 1074108 - DNA, 15 bp, Homo sapiens
aatcaaatgcatccg

SEQ ID NO: 1074109 - DNA, 15 bp, Homo sapiens
aaatcaaatgcatcc

SEQ ID NO: 1074110 - DNA, 15 bp, Homo sapiens
gaaatcaaatgcatc

SEQ ID NO: 1074111 - DNA, 15 bp, Homo sapiens
ggaaatcaaatgcat

SEQ ID NO: 1074112 - DNA, 15 bp, Homo sapiens
gggaaatcaaatgca

SEQ ID NO: 1074113 - DNA, 15 bp, Homo sapiens
tgggaaatcaaatgc

SEQ ID NO: 1074114 - DNA, 15 bp, Homo sapiens
gtgggaaatcaaatg

SEQ ID NO: 1074115 - DNA, 15 bp, Homo sapiens
cgtgggaaatcaaat

SEQ ID NO: 1074116 - DNA, 15 bp, Homo sapiens
gcgtgggaaatcaaa

SEQ ID NO: 1074117 - DNA, 15 bp, Homo sapiens
ggcgtgggaaatcaa

SEQ ID NO: 1074118 - DNA, 15 bp, Homo sapiens
tggcgtgggaaatca

SEQ ID NO: 1074119 - DNA, 15 bp, Homo sapiens
gtggcgtgggaaatc

SEQ ID NO: 1074120 - DNA, 15 bp, Homo sapiens
agtggcgtgggaaat

SEQ ID NO: 1074121 - DNA, 15 bp, Homo sapiens
cagtggcgtgggaaa

SEQ ID NO: 1074122 - DNA, 15 bp, Homo sapiens
tcagtggcgtgggaa

SEQ ID NO: 1074123 - DNA, 15 bp, Homo sapiens
ctcagtggcgtggga

SEQ ID NO: 1074124 - DNA, 15 bp, Homo sapiens
actcagtggcgtggg

SEQ ID NO: 1074125 - DNA, 15 bp, Homo sapiens
cactcagtggcgtgg

SEQ ID NO: 1074126 - DNA, 15 bp, Homo sapiens
gcactcagtggcgtg

SEQ ID NO: 1074127 - DNA, 15 bp, Homo sapiens
tgcactcagtggcgt

SEQ ID NO: 1074128 - DNA, 15 bp, Homo sapiens
gtgcactcagtggcg

SEQ ID NO: 1074129 - DNA, 15 bp, Homo sapiens
ggtgcactcagtggc

SEQ ID NO: 1074130 - DNA, 15 bp, Homo sapiens
aggtgcactcagtgg

SEQ ID NO: 1074131 - DNA, 15 bp, Homo sapiens
gaggtgcactcagtg

SEQ ID NO: 1074132 - DNA, 15 bp, Homo sapiens
agaggtgcactcagt

SEQ ID NO: 1074133 - DNA, 15 bp, Homo sapiens
cagaggtgcactcag

SEQ ID NO: 1074134 - DNA, 15 bp, Homo sapiens
gcagaggtgcactca

SEQ ID NO: 1074135 - DNA, 15 bp, Homo sapiens
tgcagaggtgcactc

SEQ ID NO: 1074136 - DNA, 15 bp, Homo sapiens
ctgcagaggtgcact

SEQ ID NO: 1074137 - DNA, 15 bp, Homo sapiens
tctgcagaggtgcac

SEQ ID NO: 1074138 - DNA, 15 bp, Homo sapiens
ttctgcagaggtgca

SEQ ID NO: 1074139 - DNA, 15 bp, Homo sapiens
tttctgcagaggtgc

SEQ ID NO: 1074140 - DNA, 15 bp, Homo sapiens
atttctgcagaggtg

SEQ ID NO: 1074141 - DNA, 15 bp, Homo sapiens
catttctgcagaggt

SEQ ID NO: 1074142 - DNA, 15 bp, Homo sapiens
ccatttctgcagagg

SEQ ID NO: 1074143 - DNA, 15 bp, Homo sapiens
cccatttctgcagag

SEQ ID NO: 1074144 - DNA, 15 bp, Homo sapiens
gcccatttctgcaga

SEQ ID NO: 1074145 - DNA, 15 bp, Homo sapiens
cgcccatttctgcag

SEQ ID NO: 1074146 - DNA, 15 bp, Homo sapiens
acgcccatttctgca

SEQ ID NO: 1074147 - DNA, 15 bp, Homo sapiens
aacgcccatttctgc

SEQ ID NO: 1074148 - DNA, 15 bp, Homo sapiens
gaacgcccatttctg

SEQ ID NO: 1074149 - DNA, 15 bp, Homo sapiens
agaacgcccatttct

SEQ ID NO: 1074150 - DNA, 15 bp, Homo sapiens
cagaacgcccatttc

SEQ ID NO: 1074151 - DNA, 15 bp, Homo sapiens
ccagaacgcccattt

SEQ ID NO: 1074152 - DNA, 15 bp, Homo sapiens
gccagaacgcccatt

SEQ ID NO: 1074153 - DNA, 15 bp, Homo sapiens
ggccagaacgcccat

SEQ ID NO: 1074154 - DNA, 15 bp, Homo sapiens
gggccagaacgccca

SEQ ID NO: 1074155 - DNA, 15 bp, Homo sapiens
agggccagaacgccc

SEQ ID NO: 1074156 - DNA, 15 bp, Homo sapiens
gagggccagaacgcc

SEQ ID NO: 1074157 - DNA, 15 bp, Homo sapiens
cgagggccagaacgc

SEQ ID NO: 1074158 - DNA, 15 bp, Homo sapiens
gcgagggccagaacg

SEQ ID NO: 1074159 - DNA, 15 bp, Homo sapiens
cgcgagggccagaac

SEQ ID NO: 1074160 - DNA, 15 bp, Homo sapiens
tcgcgagggccagaa

SEQ ID NO: 1074161 - DNA, 15 bp, Homo sapiens
ctcgcgagggccaga

SEQ ID NO: 1074162 - DNA, 15 bp, Homo sapiens
cctcgcgagggccag

SEQ ID NO: 1074163 - DNA, 15 bp, Homo sapiens
gcctcgcgagggcca

SEQ ID NO: 1074164 - DNA, 15 bp, Homo sapiens
tgcctcgcgagggcc

SEQ ID NO: 1074165 - DNA, 15 bp, Homo sapiens
ctgcctcgcgagggc

SEQ ID NO: 1074166 - DNA, 15 bp, Homo sapiens
actgcctcgcgaggg

SEQ ID NO: 1074167 - DNA, 15 bp, Homo sapiens
cactgcctcgcgagg

SEQ ID NO: 1074168 - DNA, 15 bp, Homo sapiens
gcactgcctcgcgag

SEQ ID NO: 1074169 - DNA, 15 bp, Homo sapiens
cgcactgcctcgcga

SEQ ID NO: 1074170 - DNA, 15 bp, Homo sapiens
tcgcactgcctcgcg

SEQ ID NO: 1074171 - DNA, 15 bp, Homo sapiens
gtcgcactgcctcgc

SEQ ID NO: 1074172 - DNA, 15 bp, Homo sapiens
ggtcgcactgcctcg

SEQ ID NO: 1074173 - DNA, 15 bp, Homo sapiens
aggtcgcactgcctc

SEQ ID NO: 1074174 - DNA, 15 bp, Homo sapiens
caggtcgcactgcct

SEQ ID NO: 1074175 - DNA, 15 bp, Homo sapiens
acaggtcgcactgcc

SEQ ID NO: 1074176 - DNA, 15 bp, Homo sapiens
gacaggtcgcactgc

SEQ ID NO: 1074177 - DNA, 15 bp, Homo sapiens
tgacaggtcgcactg

SEQ ID NO: 1074178 - DNA, 15 bp, Homo sapiens
gtgacaggtcgcact

SEQ ID NO: 1074179 - DNA, 15 bp, Homo sapiens
ggtgacaggtcgcac

SEQ ID NO: 1074180 - DNA, 15 bp, Homo sapiens
cggtgacaggtcgca

SEQ ID NO: 1074181 - DNA, 15 bp, Homo sapiens
gcggtgacaggtcgc

SEQ ID NO: 1074182 - DNA, 15 bp, Homo sapiens
ggcggtgacaggtcg

SEQ ID NO: 1074183 - DNA, 15 bp, Homo sapiens
gggcggtgacaggtc

SEQ ID NO: 1074184 - DNA, 15 bp, Homo sapiens
agggcggtgacaggt

SEQ ID NO: 1074185 - DNA, 15 bp, Homo sapiens
aagggcggtgacagg

SEQ ID NO: 1074186 - DNA, 15 bp, Homo sapiens
gaagggcggtgacag

SEQ ID NO: 1074187 - DNA, 15 bp, Homo sapiens
tgaagggcggtgaca

SEQ ID NO: 1074188 - DNA, 15 bp, Homo sapiens
ctgaagggcggtgac

SEQ ID NO: 1074189 - DNA, 15 bp, Homo sapiens
gctgaagggcggtga

SEQ ID NO: 1074190 - DNA, 15 bp, Homo sapiens
ggctgaagggcggtg

SEQ ID NO: 1074191 - DNA, 15 bp, Homo sapiens
aggctgaagggcggt

SEQ ID NO: 1074192 - DNA, 15 bp, Homo sapiens
aaggctgaagggcgg

SEQ ID NO: 1074193 - DNA, 15 bp, Homo sapiens
gaaggctgaagggcg

SEQ ID NO: 1074194 - DNA, 15 bp, Homo sapiens
ggaaggctgaagggc

SEQ ID NO: 1074195 - DNA, 15 bp, Homo sapiens
gggaaggctgaaggg

SEQ ID NO: 1074196 - DNA, 15 bp, Homo sapiens
cgggaaggctgaagg

SEQ ID NO: 1074197 - DNA, 15 bp, Homo sapiens
gcgggaaggctgaag

SEQ ID NO: 1074198 - DNA, 15 bp, Homo sapiens
ggcgggaaggctgaa

SEQ ID NO: 1074199 - DNA, 15 bp, Homo sapiens
gggcgggaaggctga

SEQ ID NO: 1074200 - DNA, 15 bp, Homo sapiens
agggcgggaaggctg

SEQ ID NO: 1074201 - DNA, 15 bp, Homo sapiens
gagggcgggaaggct

SEQ ID NO: 1074202 - DNA, 15 bp, Homo sapiens
ggagggcgggaaggc

SEQ ID NO: 1074203 - DNA, 15 bp, Homo sapiens
tggagggcgggaagg

SEQ ID NO: 1074204 - DNA, 15 bp, Homo sapiens
gtggagggcgggaag

SEQ ID NO: 1074205 - DNA, 15 bp, Homo sapiens
ggtggagggcgggaa

SEQ ID NO: 1074206 - DNA, 15 bp, Homo sapiens
tggtggagggcggga

SEQ ID NO: 1074207 - DNA, 15 bp, Homo sapiens
ttggtggagggcggg

SEQ ID NO: 1074208 - DNA, 15 bp, Homo sapiens
cttggtggagggcgg

SEQ ID NO: 1074209 - DNA, 15 bp, Homo sapiens
gcttggtggagggcg

SEQ ID NO: 1074210 - DNA, 15 bp, Homo sapiens
ggcttggtggagggc

SEQ ID NO: 1074211 - DNA, 15 bp, Homo sapiens
gggcttggtggaggg

SEQ ID NO: 1074212 - DNA, 15 bp, Homo sapiens
cgggcttggtggagg

SEQ ID NO: 1074213 - DNA, 15 bp, Homo sapiens
gcgggcttggtggag

SEQ ID NO: 1074214 - DNA, 15 bp, Homo sapiens
cgcgggcttggtgga

SEQ ID NO: 1074215 - DNA, 15 bp, Homo sapiens
gcgcgggcttggtgg

SEQ ID NO: 1074216 - DNA, 15 bp, Homo sapiens
tgcgcgggcttggtg

SEQ ID NO: 1074217 - DNA, 15 bp, Homo sapiens
gtgcgcgggcttggt

SEQ ID NO: 1074218 - DNA, 15 bp, Homo sapiens
cgtgcgcgggcttgg

SEQ ID NO: 1074219 - DNA, 15 bp, Homo sapiens
gcgtgcgcgggcttg

SEQ ID NO: 1074220 - DNA, 15 bp, Homo sapiens
ggcgtgcgcgggctt

SEQ ID NO: 1074221 - DNA, 15 bp, Homo sapiens
gggcgtgcgcgggct

SEQ ID NO: 1074222 - DNA, 15 bp, Homo sapiens
cgggcgtgcgcgggc

SEQ ID NO: 1074223 - DNA, 15 bp, Homo sapiens
ccgggcgtgcgcggg

SEQ ID NO: 1074224 - DNA, 15 bp, Homo sapiens
gccgggcgtgcgcgg

SEQ ID NO: 1074225 - DNA, 15 bp, Homo sapiens
ggccgggcgtgcgcg

SEQ ID NO: 1074226 - DNA, 15 bp, Homo sapiens
gggccgggcgtgcgc

SEQ ID NO: 1074227 - DNA, 15 bp, Homo sapiens
cgggccgggcgtgcg

SEQ ID NO: 1074228 - DNA, 15 bp, Homo sapiens
gcgggccgggcgtgc

SEQ ID NO: 1074229 - DNA, 15 bp, Homo sapiens
cgcgggccgggcgtg

SEQ ID NO: 1074230 - DNA, 15 bp, Homo sapiens
gcgcgggccgggcgt

SEQ ID NO: 1074231 - DNA, 15 bp, Homo sapiens
cgcgcgggccgggcg

SEQ ID NO: 1074232 - DNA, 15 bp, Homo sapiens
acgcgcgggccgggc

SEQ ID NO: 1074233 - DNA, 15 bp, Homo sapiens
gacgcgcgggccggg

SEQ ID NO: 1074234 - DNA, 15 bp, Homo sapiens
agacgcgcgggccgg

SEQ ID NO: 1074235 - DNA, 15 bp, Homo sapiens
cagacgcgcgggccg

SEQ ID NO: 1074236 - DNA, 15 bp, Homo sapiens
acagacgcgcgggcc

SEQ ID NO: 1074237 - DNA, 15 bp, Homo sapiens
gacagacgcgcgggc

SEQ ID NO: 1074238 - DNA, 15 bp, Homo sapiens
agacagacgcgcggg

SEQ ID NO: 1074239 - DNA, 15 bp, Homo sapiens
aagacagacgcgcgg

SEQ ID NO: 1074240 - DNA, 15 bp, Homo sapiens
aaagacagacgcgcg

SEQ ID NO: 1074241 - DNA, 15 bp, Homo sapiens
gaaagacagacgcgc

SEQ ID NO: 1074242 - DNA, 15 bp, Homo sapiens
cgaaagacagacgcg

SEQ ID NO: 1074243 - DNA, 15 bp, Homo sapiens
tcgaaagacagacgc

SEQ ID NO: 1074244 - DNA, 15 bp, Homo sapiens
gtcgaaagacagacg

SEQ ID NO: 1074245 - DNA, 15 bp, Homo sapiens
ggtcgaaagacagac

SEQ ID NO: 1074246 - DNA, 15 bp, Homo sapiens
gggtcgaaagacaga

SEQ ID NO: 1074247 - DNA, 15 bp, Homo sapiens
cgggtcgaaagacag

SEQ ID NO: 1074248 - DNA, 15 bp, Homo sapiens
ccgggtcgaaagaca

SEQ ID NO: 1074249 - DNA, 15 bp, Homo sapiens
gccgggtcgaaagac

SEQ ID NO: 1074250 - DNA, 15 bp, Homo sapiens
tgccgggtcgaaaga

SEQ ID NO: 1074251 - DNA, 15 bp, Homo sapiens
gtgccgggtcgaaag

SEQ ID NO: 1074252 - DNA, 15 bp, Homo sapiens
ggtgccgggtcgaaa

SEQ ID NO: 1074253 - DNA, 15 bp, Homo sapiens
gggtgccgggtcgaa

SEQ ID NO: 1074254 - DNA, 15 bp, Homo sapiens
ggggtgccgggtcga

SEQ ID NO: 1074255 - DNA, 15 bp, Homo sapiens
cggggtgccgggtcg

SEQ ID NO: 1074256 - DNA, 15 bp, Homo sapiens
ccggggtgccgggtc

SEQ ID NO: 1074257 - DNA, 15 bp, Homo sapiens
gccggggtgccgggt

SEQ ID NO: 1074258 - DNA, 15 bp, Homo sapiens
ggccggggtgccggg

SEQ ID NO: 1074259 - DNA, 15 bp, Homo sapiens
cggccggggtgccgg

SEQ ID NO: 1074260 - DNA, 15 bp, Homo sapiens
ccggccggggtgccg

SEQ ID NO: 1074261 - DNA, 15 bp, Homo sapiens
accggccggggtgcc

SEQ ID NO: 1074262 - DNA, 15 bp, Homo sapiens
aaccggccggggtgc

SEQ ID NO: 1074263 - DNA, 15 bp, Homo sapiens
gaaccggccggggtg

SEQ ID NO: 1074264 - DNA, 15 bp, Homo sapiens
ggaaccggccggggt

SEQ ID NO: 1074265 - DNA, 15 bp, Homo sapiens
gggaaccggccgggg

SEQ ID NO: 1074266 - DNA, 15 bp, Homo sapiens
tgggaaccggccggg

SEQ ID NO: 1074267 - DNA, 15 bp, Homo sapiens
ctgggaaccggccgg

SEQ ID NO: 1074268 - DNA, 15 bp, Homo sapiens
gctgggaaccggccg

SEQ ID NO: 1074269 - DNA, 15 bp, Homo sapiens
tgctgggaaccggcc

SEQ ID NO: 1074270 - DNA, 15 bp, Homo sapiens
ctgctgggaaccggc

SEQ ID NO: 1074271 - DNA, 15 bp, Homo sapiens
gctgctgggaaccgg

SEQ ID NO: 1074272 - DNA, 15 bp, Homo sapiens
cgctgctgggaaccg

SEQ ID NO: 1074273 - DNA, 15 bp, Homo sapiens
gcgctgctgggaacc

SEQ ID NO: 1074274 - DNA, 15 bp, Homo sapiens
cgcgctgctgggaac

SEQ ID NO: 1074275 - DNA, 15 bp, Homo sapiens
gcgcgctgctgggaa

SEQ ID NO: 1074276 - DNA, 15 bp, Homo sapiens
tgcgcgctgctggga

SEQ ID NO: 1074277 - DNA, 15 bp, Homo sapiens
atgcgcgctgctggg

SEQ ID NO: 1074278 - DNA, 15 bp, Homo sapiens
catgcgcgctgctgg

SEQ ID NO: 1074279 - DNA, 15 bp, Homo sapiens
gcatgcgcgctgctg

SEQ ID NO: 1074280 - DNA, 15 bp, Homo sapiens
cgcatgcgcgctgct

SEQ ID NO: 1074281 - DNA, 15 bp, Homo sapiens
gcgcatgcgcgctgc

SEQ ID NO: 1074282 - DNA, 15 bp, Homo sapiens
cgcgcatgcgcgctg

SEQ ID NO: 1074283 - DNA, 15 bp, Homo sapiens
gcgcgcatgcgcgct

SEQ ID NO: 1074284 - DNA, 15 bp, Homo sapiens
cgcgcgcatgcgcgc

SEQ ID NO: 1074285 - DNA, 15 bp, Homo sapiens
gcgcgcgcatgcgcg

SEQ ID NO: 1074286 - DNA, 15 bp, Homo sapiens
agcgcgcgcatgcgc

SEQ ID NO: 1074287 - DNA, 15 bp, Homo sapiens
gagcgcgcgcatgcg

SEQ ID NO: 1074288 - DNA, 15 bp, Homo sapiens
ggagcgcgcgcatgc

SEQ ID NO: 1074289 - DNA, 15 bp, Homo sapiens
gggagcgcgcgcatg

SEQ ID NO: 1074290 - DNA, 15 bp, Homo sapiens
tgggagcgcgcgcat

SEQ ID NO: 1074291 - DNA, 15 bp, Homo sapiens
ctgggagcgcgcgca

SEQ ID NO: 1074292 - DNA, 15 bp, Homo sapiens
cctgggagcgcgcgc

SEQ ID NO: 1074293 - DNA, 15 bp, Homo sapiens
gcctgggagcgcgcg

SEQ ID NO: 1074294 - DNA, 15 bp, Homo sapiens
ggcctgggagcgcgc

SEQ ID NO: 1074295 - DNA, 15 bp, Homo sapiens
tggcctgggagcgcg

SEQ ID NO: 1074296 - DNA, 15 bp, Homo sapiens
gtggcctgggagcgc

SEQ ID NO: 1074297 - DNA, 15 bp, Homo sapiens
agtggcctgggagcg

SEQ ID NO: 1074298 - DNA, 15 bp, Homo sapiens
aagtggcctgggagc

SEQ ID NO: 1074299 - DNA, 15 bp, Homo sapiens
caagtggcctgggag

SEQ ID NO: 1074300 - DNA, 15 bp, Homo sapiens
tcaagtggcctggga

SEQ ID NO: 1074301 - DNA, 15 bp, Homo sapiens
ttcaagtggcctggg

SEQ ID NO: 1074302 - DNA, 15 bp, Homo sapiens
cttcaagtggcctgg

SEQ ID NO: 1074303 - DNA, 15 bp, Homo sapiens
tcttcaagtggcctg

SEQ ID NO: 1074304 - DNA, 15 bp, Homo sapiens
ctcttcaagtggcct

SEQ ID NO: 1074305 - DNA, 15 bp, Homo sapiens
tctcttcaagtggcc

SEQ ID NO: 1074306 - DNA, 15 bp, Homo sapiens
ctctcttcaagtggc

SEQ ID NO: 1074307 - DNA, 15 bp, Homo sapiens
tctctcttcaagtgg

SEQ ID NO: 1074308 - DNA, 15 bp, Homo sapiens
ctctctcttcaagtg

SEQ ID NO: 1074309 - DNA, 15 bp, Homo sapiens
cctctctcttcaagt

SEQ ID NO: 1074310 - DNA, 15 bp, Homo sapiens
ccctctctcttcaag

SEQ ID NO: 1074311 - DNA, 15 bp, Homo sapiens
gccctctctcttcaa

SEQ ID NO: 1074312 - DNA, 15 bp, Homo sapiens
cgccctctctcttca

SEQ ID NO: 1074313 - DNA, 15 bp, Homo sapiens
ccgccctctctcttc

SEQ ID NO: 1074314 - DNA, 15 bp, Homo sapiens
cccgccctctctctt

SEQ ID NO: 1074315 - DNA, 15 bp, Homo sapiens
ccccgccctctctct

SEQ ID NO: 1074316 - DNA, 15 bp, Homo sapiens
gccccgccctctctc

SEQ ID NO: 1074317 - DNA, 15 bp, Homo sapiens
ggccccgccctctct

SEQ ID NO: 1074318 - DNA, 15 bp, Homo sapiens
cggccccgccctctc

SEQ ID NO: 1074319 - DNA, 15 bp, Homo sapiens
tcggccccgccctct

SEQ ID NO: 1074320 - DNA, 15 bp, Homo sapiens
ctcggccccgccctc

SEQ ID NO: 1074321 - DNA, 15 bp, Homo sapiens
cctcggccccgccct

SEQ ID NO: 1074322 - DNA, 15 bp, Homo sapiens
ccctcggccccgccc

SEQ ID NO: 1074323 - DNA, 15 bp, Homo sapiens
cccctcggccccgcc

SEQ ID NO: 1074324 - DNA, 15 bp, Homo sapiens
gcccctcggccccgc

SEQ ID NO: 1074325 - DNA, 15 bp, Homo sapiens
agcccctcggccccg

SEQ ID NO: 1074326 - DNA, 15 bp, Homo sapiens
cagcccctcggcccc

SEQ ID NO: 1074327 - DNA, 15 bp, Homo sapiens
tcagcccctcggccc

SEQ ID NO: 1074328 - DNA, 15 bp, Homo sapiens
ctcagcccctcggcc

SEQ ID NO: 1074329 - DNA, 15 bp, Homo sapiens
gctcagcccctcggc

SEQ ID NO: 1074330 - DNA, 15 bp, Homo sapiens
ggctcagcccctcgg

SEQ ID NO: 1074331 - DNA, 15 bp, Homo sapiens
gggctcagcccctcg

SEQ ID NO: 1074332 - DNA, 15 bp, Homo sapiens
cgggctcagcccctc

SEQ ID NO: 1074333 - DNA, 15 bp, Homo sapiens
gcgggctcagcccct

SEQ ID NO: 1074334 - DNA, 15 bp, Homo sapiens
cgcgggctcagcccc

SEQ ID NO: 1074335 - DNA, 15 bp, Homo sapiens
ccgcgggctcagccc

SEQ ID NO: 1074336 - DNA, 15 bp, Homo sapiens
cccgcgggctcagcc

SEQ ID NO: 1074337 - DNA, 15 bp, Homo sapiens
ccccgcgggctcagc

SEQ ID NO: 1074338 - DNA, 15 bp, Homo sapiens
cccccgcgggctcag

SEQ ID NO: 1074339 - DNA, 15 bp, Homo sapiens
ccccccgcgggctca

SEQ ID NO: 1074340 - DNA, 15 bp, Homo sapiens
tccccccgcgggctc

SEQ ID NO: 1074341 - DNA, 15 bp, Homo sapiens
ctccccccgcgggct

SEQ ID NO: 1074342 - DNA, 15 bp, Homo sapiens
cctccccccgcgggc

SEQ ID NO: 1074343 - DNA, 15 bp, Homo sapiens
ccctccccccgcggg

SEQ ID NO: 1074344 - DNA, 15 bp, Homo sapiens
tccctccccccgcgg

SEQ ID NO: 1074345 - DNA, 15 bp, Homo sapiens
ttccctccccccgcg

SEQ ID NO: 1074346 - DNA, 15 bp, Homo sapiens
gttccctccccccgc

SEQ ID NO: 1074347 - DNA, 15 bp, Homo sapiens
tgttccctccccccg

SEQ ID NO: 1074348 - DNA, 15 bp, Homo sapiens
ctgttccctcccccc

SEQ ID NO: 1074349 - DNA, 15 bp, Homo sapiens
gctgttccctccccc

SEQ ID NO: 1074350 - DNA, 15 bp, Homo sapiens
cgctgttccctcccc

SEQ ID NO: 1074351 - DNA, 15 bp, Homo sapiens
acgctgttccctccc

SEQ ID NO: 1074352 - DNA, 15 bp, Homo sapiens
aacgctgttccctcc

SEQ ID NO: 1074353 - DNA, 15 bp, Homo sapiens
caacgctgttccctc

SEQ ID NO: 1074354 - DNA, 15 bp, Homo sapiens
tcaacgctgttccct

SEQ ID NO: 1074355 - DNA, 15 bp, Homo sapiens
atcaacgctgttccc

SEQ ID NO: 1074356 - DNA, 15 bp, Homo sapiens
gatcaacgctgttcc

SEQ ID NO: 1074357 - DNA, 15 bp, Homo sapiens
tgatcaacgctgttc

SEQ ID NO: 1074358 - DNA, 15 bp, Homo sapiens
gtgatcaacgctgtt

SEQ ID NO: 1074359 - DNA, 15 bp, Homo sapiens
cgtgatcaacgctgt

SEQ ID NO: 1074360 - DNA, 15 bp, Homo sapiens
acgtgatcaacgctg

SEQ ID NO: 1074361 - DNA, 15 bp, Homo sapiens
cacgtgatcaacgct

SEQ ID NO: 1074362 - DNA, 15 bp, Homo sapiens
tcacgtgatcaacgc

SEQ ID NO: 1074363 - DNA, 15 bp, Homo sapiens
gtcacgtgatcaacg

SEQ ID NO: 1074364 - DNA, 15 bp, Homo sapiens
cgtcacgtgatcaac

SEQ ID NO: 1074365 - DNA, 15 bp, Homo sapiens
acgtcacgtgatcaa

SEQ ID NO: 1074366 - DNA, 15 bp, Homo sapiens
cacgtcacgtgatca

SEQ ID NO: 1074367 - DNA, 15 bp, Homo sapiens
ccacgtcacgtgatc

SEQ ID NO: 1074368 - DNA, 15 bp, Homo sapiens
accacgtcacgtgat

SEQ ID NO: 1074369 - DNA, 15 bp, Homo sapiens
aaccacgtcacgtga

SEQ ID NO: 1074370 - DNA, 15 bp, Homo sapiens
aaaccacgtcacgtg

SEQ ID NO: 1074371 - DNA, 15 bp, Homo sapiens
gaaaccacgtcacgt

SEQ ID NO: 1074372 - DNA, 15 bp, Homo sapiens
tgaaaccacgtcacg

SEQ ID NO: 1074373 - DNA, 15 bp, Homo sapiens
ctgaaaccacgtcac

SEQ ID NO: 1074374 - DNA, 15 bp, Homo sapiens
actgaaaccacgtca

SEQ ID NO: 1074375 - DNA, 15 bp, Homo sapiens
cactgaaaccacgtc

SEQ ID NO: 1074376 - DNA, 15 bp, Homo sapiens
acactgaaaccacgt

SEQ ID NO: 1074377 - DNA, 15 bp, Homo sapiens
aacactgaaaccacg

SEQ ID NO: 1074378 - DNA, 15 bp, Homo sapiens
aaacactgaaaccac

SEQ ID NO: 1074379 - DNA, 15 bp, Homo sapiens
taaacactgaaacca

SEQ ID NO: 1074380 - DNA, 15 bp, Homo sapiens
gtaaacactgaaacc

SEQ ID NO: 1074381 - DNA, 15 bp, Homo sapiens
tgtaaacactgaaac

SEQ ID NO: 1074382 - DNA, 15 bp, Homo sapiens
gtgtaaacactgaaa

SEQ ID NO: 1074383 - DNA, 15 bp, Homo sapiens
ggtgtaaacactgaa

SEQ ID NO: 1074384 - DNA, 15 bp, Homo sapiens
gggtgtaaacactga

SEQ ID NO: 1074385 - DNA, 15 bp, Homo sapiens
cgggtgtaaacactg

SEQ ID NO: 1074386 - DNA, 15 bp, Homo sapiens
gcgggtgtaaacact

SEQ ID NO: 1074387 - DNA, 15 bp, Homo sapiens
tgcgggtgtaaacac

SEQ ID NO: 1074388 - DNA, 15 bp, Homo sapiens
ctgcgggtgtaaaca

SEQ ID NO: 1074389 - DNA, 15 bp, Homo sapiens
gctgcgggtgtaaac

SEQ ID NO: 1074390 - DNA, 15 bp, Homo sapiens
cgctgcgggtgtaaa

SEQ ID NO: 1074391 - DNA, 15 bp, Homo sapiens
ccgctgcgggtgtaa

SEQ ID NO: 1074392 - DNA, 15 bp, Homo sapiens
cccgctgcgggtgta

SEQ ID NO: 1074393 - DNA, 15 bp, Homo sapiens
gcccgctgcgggtgt

SEQ ID NO: 1074394 - DNA, 15 bp, Homo sapiens
ggcccgctgcgggtg

SEQ ID NO: 1074395 - DNA, 15 bp, Homo sapiens
cggcccgctgcgggt

SEQ ID NO: 1074396 - DNA, 15 bp, Homo sapiens
ccggcccgctgcggg

SEQ ID NO: 1074397 - DNA, 15 bp, Homo sapiens
cccggcccgctgcgg

SEQ ID NO: 1074398 - DNA, 15 bp, Homo sapiens
acccccggcccgctg

SEQ ID NO: 1074399 - DNA, 15 bp, Homo sapiens
aacccccggcccgct

SEQ ID NO: 1074400 - DNA, 15 bp, Homo sapiens
gaacccccggcccgc

SEQ ID NO: 1074401 - DNA, 15 bp, Homo sapiens
cgaacccccggcccg

SEQ ID NO: 1074402 - DNA, 15 bp, Homo sapiens
ccgaacccccggccc

SEQ ID NO: 1074403 - DNA, 15 bp, Homo sapiens
gccgaacccccggcc

SEQ ID NO: 1074404 - DNA, 15 bp, Homo sapiens
ggccgaacccccggc

SEQ ID NO: 1074405 - DNA, 15 bp, Homo sapiens
aggccgaacccccgg

SEQ ID NO: 1074406 - DNA, 15 bp, Homo sapiens
gaggccgaacccccg

SEQ ID NO: 1074407 - DNA, 15 bp, Homo sapiens
tgaggccgaaccccc

SEQ ID NO: 1074408 - DNA, 15 bp, Homo sapiens
ctgaggccgaacccc

SEQ ID NO: 1074409 - DNA, 15 bp, Homo sapiens
actgaggccgaaccc

SEQ ID NO: 1074410 - DNA, 15 bp, Homo sapiens
gactgaggccgaacc

SEQ ID NO: 1074411 - DNA, 15 bp, Homo sapiens
tgactgaggccgaac

SEQ ID NO: 1074412 - DNA, 15 bp, Homo sapiens
ctgactgaggccgaa

SEQ ID NO: 1074413 - DNA, 15 bp, Homo sapiens
cctgactgaggccga

SEQ ID NO: 1074414 - DNA, 15 bp, Homo sapiens
gcctgactgaggccg

SEQ ID NO: 1074415 - DNA, 15 bp, Homo sapiens
cgcctgactgaggcc

SEQ ID NO: 1074416 - DNA, 15 bp, Homo sapiens
gcgcctgactgaggc

SEQ ID NO: 1074417 - DNA, 15 bp, Homo sapiens
agcgcctgactgagg

SEQ ID NO: 1074418 - DNA, 15 bp, Homo sapiens
gagcgcctgactgag

SEQ ID NO: 1074419 - DNA, 15 bp, Homo sapiens
tgagcgcctgactga

SEQ ID NO: 1074420 - DNA, 15 bp, Homo sapiens
ctgagcgcctgactg

SEQ ID NO: 1074421 - DNA, 15 bp, Homo sapiens
gctgagcgcctgact

SEQ ID NO: 1074422 - DNA, 15 bp, Homo sapiens
agctgagcgcctgac

SEQ ID NO: 1074423 - DNA, 15 bp, Homo sapiens
gagctgagcgcctga

SEQ ID NO: 1074424 - DNA, 15 bp, Homo sapiens
ggagctgagcgcctg

SEQ ID NO: 1074425 - DNA, 15 bp, Homo sapiens
cggagctgagcgcct

SEQ ID NO: 1074426 - DNA, 15 bp, Homo sapiens
acggagctgagcgcc

SEQ ID NO: 1074427 - DNA, 15 bp, Homo sapiens
aacggagctgagcgc

SEQ ID NO: 1074428 - DNA, 15 bp, Homo sapiens
aaacggagctgagcg

SEQ ID NO: 1074429 - DNA, 15 bp, Homo sapiens
gaaacggagctgagc

SEQ ID NO: 1074430 - DNA, 15 bp, Homo sapiens
cgaaacggagctgag

SEQ ID NO: 1074431 - DNA, 15 bp, Homo sapiens
ccgaaacggagctga

SEQ ID NO: 1074432 - DNA, 15 bp, Homo sapiens
accgaaacggagctg

SEQ ID NO: 1074433 - DNA, 15 bp, Homo sapiens
aaccgaaacggagct

SEQ ID NO: 1074434 - DNA, 15 bp, Homo sapiens
aaaccgaaacggagc

SEQ ID NO: 1074435 - DNA, 15 bp, Homo sapiens
gaaaccgaaacggag

SEQ ID NO: 1074436 - DNA, 15 bp, Homo sapiens
tgaaaccgaaacgga

SEQ ID NO: 1074437 - DNA, 15 bp, Homo sapiens
gtgaaaccgaaacgg

SEQ ID NO: 1074438 - DNA, 15 bp, Homo sapiens
agtgaaaccgaaacg

SEQ ID NO: 1074439 - DNA, 15 bp, Homo sapiens
aagtgaaaccgaaac

SEQ ID NO: 1074440 - DNA, 15 bp, Homo sapiens
gaagtgaaaccgaaa

SEQ ID NO: 1074441 - DNA, 15 bp, Homo sapiens
ggaagtgaaaccgaa

SEQ ID NO: 1074442 - DNA, 15 bp, Homo sapiens
cggaagtgaaaccga

SEQ ID NO: 1074443 - DNA, 15 bp, Homo sapiens
ccggaagtgaaaccg

SEQ ID NO: 1074444 - DNA, 15 bp, Homo sapiens
accggaagtgaaacc

SEQ ID NO: 1074445 - DNA, 15 bp, Homo sapiens
caccggaagtgaaac

SEQ ID NO: 1074446 - DNA, 15 bp, Homo sapiens
ccaccggaagtgaaa

SEQ ID NO: 1074447 - DNA, 15 bp, Homo sapiens
tccaccggaagtgaa

SEQ ID NO: 1074448 - DNA, 15 bp, Homo sapiens
ctccaccggaagtga

SEQ ID NO: 1074449 - DNA, 15 bp, Homo sapiens
cctccaccggaagtg

SEQ ID NO: 1074450 - DNA, 15 bp, Homo sapiens
ccctccaccggaagt

SEQ ID NO: 1074451 - DNA, 15 bp, Homo sapiens
gccctccaccggaag

SEQ ID NO: 1074452 - DNA, 15 bp, Homo sapiens
ggccctccaccggaa

SEQ ID NO: 1074453 - DNA, 15 bp, Homo sapiens
cggccctccaccgga

SEQ ID NO: 1074454 - DNA, 15 bp, Homo sapiens
gcggccctccaccgg

SEQ ID NO: 1074455 - DNA, 15 bp, Homo sapiens
ggcggccctccaccg

SEQ ID NO: 1074456 - DNA, 15 bp, Homo sapiens
aggcggccctccacc

SEQ ID NO: 1074457 - DNA, 15 bp, Homo sapiens
gaggcggccctccac

SEQ ID NO: 1074458 - DNA, 15 bp, Homo sapiens
agaggcggccctcca

SEQ ID NO: 1074459 - DNA, 15 bp, Homo sapiens
cagaggcggccctcc

SEQ ID NO: 1074460 - DNA, 15 bp, Homo sapiens
tcagaggcggccctc

SEQ ID NO: 1074461 - DNA, 15 bp, Homo sapiens
ctcagaggcggccct

SEQ ID NO: 1074462 - DNA, 15 bp, Homo sapiens
gctcagaggcggccc

SEQ ID NO: 1074463 - DNA, 15 bp, Homo sapiens
cgctcagaggcggcc

SEQ ID NO: 1074464 - DNA, 15 bp, Homo sapiens
ccgctcagaggcggc

SEQ ID NO: 1074465 - DNA, 15 bp, Homo sapiens
cccgctcagaggcgg

SEQ ID NO: 1074466 - DNA, 15 bp, Homo sapiens
gcccgctcagaggcg

SEQ ID NO: 1074467 - DNA, 15 bp, Homo sapiens
cgcccgctcagaggc

SEQ ID NO: 1074468 - DNA, 15 bp, Homo sapiens
ccgcccgctcagagg

SEQ ID NO: 1074469 - DNA, 15 bp, Homo sapiens
gccgcccgctcagag

SEQ ID NO: 1074470 - DNA, 15 bp, Homo sapiens
cgccgcccgctcaga

SEQ ID NO: 1074471 - DNA, 15 bp, Homo sapiens
ccgccgcccgctcag

SEQ ID NO: 1074472 - DNA, 15 bp, Homo sapiens
cccgccgcccgctca

SEQ ID NO: 1074473 - DNA, 15 bp, Homo sapiens
gcccgccgcccgctc

SEQ ID NO: 1074474 - DNA, 15 bp, Homo sapiens
ggcccgccgcccgct

SEQ ID NO: 1074475 - DNA, 15 bp, Homo sapiens
cggcccgccgcccgc

SEQ ID NO: 1074476 - DNA, 15 bp, Homo sapiens
tcggcccgccgcccg

SEQ ID NO: 1074477 - DNA, 15 bp, Homo sapiens
gtcggcccgccgccc

SEQ ID NO: 1074478 - DNA, 15 bp, Homo sapiens
cgtcggcccgccgcc

SEQ ID NO: 1074479 - DNA, 15 bp, Homo sapiens
ccgtcggcccgccgc

SEQ ID NO: 1074480 - DNA, 15 bp, Homo sapiens
gccgtcggcccgccg

SEQ ID NO: 1074481 - DNA, 15 bp, Homo sapiens
cgccgtcggcccgcc

SEQ ID NO: 1074482 - DNA, 15 bp, Homo sapiens
tcgccgtcggcccgc

SEQ ID NO: 1074483 - DNA, 15 bp, Homo sapiens
ctcgccgtcggcccg

SEQ ID NO: 1074484 - DNA, 15 bp, Homo sapiens
gctcgccgtcggccc

SEQ ID NO: 1074485 - DNA, 15 bp, Homo sapiens
cgctcgccgtcggcc

SEQ ID NO: 1074486 - DNA, 15 bp, Homo sapiens
gcgctcgccgtcggc

SEQ ID NO: 1074487 - DNA, 15 bp, Homo sapiens
cgcgctcgccgtcgg

SEQ ID NO: 1074488 - DNA, 15 bp, Homo sapiens
ccgcgctcgccgtcg

SEQ ID NO: 1074489 - DNA, 15 bp, Homo sapiens
cccgcgctcgccgtc

SEQ ID NO: 1074490 - DNA, 15 bp, Homo sapiens
gcccgcgctcgccgt

SEQ ID NO: 1074491 - DNA, 15 bp, Homo sapiens
cgcccgcgctcgccg

SEQ ID NO: 1074492 - DNA, 15 bp, Homo sapiens
ccgcccgcgctcgcc

SEQ ID NO: 1074493 - DNA, 15 bp, Homo sapiens
gccgcccgcgctcgc

SEQ ID NO: 1074494 - DNA, 15 bp, Homo sapiens
cgccgcccgcgctcg

SEQ ID NO: 1074495 - DNA, 15 bp, Homo sapiens
ccgccgcccgcgctc

SEQ ID NO: 1074496 - DNA, 15 bp, Homo sapiens
gccgccgcccgcgct

SEQ ID NO: 1074497 - DNA, 15 bp, Homo sapiens
accgccgccgcccgc

SEQ ID NO: 1074498 - DNA, 15 bp, Homo sapiens
caccgccgccgcccg

SEQ ID NO: 1074499 - DNA, 15 bp, Homo sapiens
tcaccgccgccgccc

SEQ ID NO: 1074500 - DNA, 15 bp, Homo sapiens
gtcaccgccgccgcc

SEQ ID NO: 1074501 - DNA, 15 bp, Homo sapiens
cgtcaccgccgccgc

SEQ ID NO: 1074502 - DNA, 15 bp, Homo sapiens
ccgtcaccgccgccg

SEQ ID NO: 1074503 - DNA, 15 bp, Homo sapiens
tccgtcaccgccgcc

SEQ ID NO: 1074504 - DNA, 15 bp, Homo sapiens
ctccgtcaccgccgc

SEQ ID NO: 1074505 - DNA, 15 bp, Homo sapiens
cctccgtcaccgccg

SEQ ID NO: 1074506 - DNA, 15 bp, Homo sapiens
gcctccgtcaccgcc

SEQ ID NO: 1074507 - DNA, 15 bp, Homo sapiens
cgcctccgtcaccgc

SEQ ID NO: 1074508 - DNA, 15 bp, Homo sapiens
gcgcctccgtcaccg

SEQ ID NO: 1074509 - DNA, 15 bp, Homo sapiens
ggcgcctccgtcacc

SEQ ID NO: 1074510 - DNA, 15 bp, Homo sapiens
cggcgcctccgtcac

SEQ ID NO: 1074511 - DNA, 15 bp, Homo sapiens
gcggcgcctccgtca

SEQ ID NO: 1074512 - DNA, 15 bp, Homo sapiens
agcggcgcctccgtc

SEQ ID NO: 1074513 - DNA, 15 bp, Homo sapiens
cagcggcgcctccgt

SEQ ID NO: 1074514 - DNA, 15 bp, Homo sapiens
gcagcggcgcctccg

SEQ ID NO: 1074515 - DNA, 15 bp, Homo sapiens
ggcagcggcgcctcc

SEQ ID NO: 1074516 - DNA, 15 bp, Homo sapiens
tggcagcggcgcctc

SEQ ID NO: 1074517 - DNA, 15 bp, Homo sapiens
ctggcagcggcgcct

SEQ ID NO: 1074518 - DNA, 15 bp, Homo sapiens
cctggcagcggcgcc

SEQ ID NO: 1074519 - DNA, 15 bp, Homo sapiens
ccctggcagcggcgc

SEQ ID NO: 1074520 - DNA, 15 bp, Homo sapiens
cccctggcagcggcg

SEQ ID NO: 1074521 - DNA, 15 bp, Homo sapiens
ccccctggcagcggc

SEQ ID NO: 1074522 - DNA, 15 bp, Homo sapiens
gccccctggcagcgg

SEQ ID NO: 1074523 - DNA, 15 bp, Homo sapiens
cgccccctggcagcg

SEQ ID NO: 1074524 - DNA, 15 bp, Homo sapiens
acgccccctggcagc

SEQ ID NO: 1074525 - DNA, 15 bp, Homo sapiens
cacgccccctggcag

SEQ ID NO: 1074526 - DNA, 15 bp, Homo sapiens
gcacgccccctggca

SEQ ID NO: 1074527 - DNA, 15 bp, Homo sapiens
cgcacgccccctggc

SEQ ID NO: 1074528 - DNA, 15 bp, Homo sapiens
ccgcacgccccctgg

SEQ ID NO: 1074529 - DNA, 15 bp, Homo sapiens
gccgcacgccccctg

SEQ ID NO: 1074530 - DNA, 15 bp, Homo sapiens
tgccgcacgccccct

SEQ ID NO: 1074531 - DNA, 15 bp, Homo sapiens
ctgccgcacgccccc

SEQ ID NO: 1074532 - DNA, 15 bp, Homo sapiens
gctgccgcacgcccc

SEQ ID NO: 1074533 - DNA, 15 bp, Homo sapiens
cgctgccgcacgccc

SEQ ID NO: 1074534 - DNA, 15 bp, Homo sapiens
gcgctgccgcacgcc

SEQ ID NO: 1074535 - DNA, 15 bp, Homo sapiens
cgcgctgccgcacgc

SEQ ID NO: 1074536 - DNA, 15 bp, Homo sapiens
ccgcgctgccgcacg

SEQ ID NO: 1074537 - DNA, 15 bp, Homo sapiens
gccgcgctgccgcac

SEQ ID NO: 1074538 - DNA, 15 bp, Homo sapiens
cgccgcgctgccgca

SEQ ID NO: 1074539 - DNA, 15 bp, Homo sapiens
ccgccgcgctgccgc

SEQ ID NO: 1074540 - DNA, 15 bp, Homo sapiens
gccgccgcgctgccg

SEQ ID NO: 1074541 - DNA, 15 bp, Homo sapiens
cgccgccgcgctgcc

SEQ ID NO: 1074542 - DNA, 15 bp, Homo sapiens
ccgccgccgcgctgc

SEQ ID NO: 1074543 - DNA, 15 bp, Homo sapiens
gccgccgccgcgctg

SEQ ID NO: 1074544 - DNA, 15 bp, Homo sapiens
cgccgccgccgcgct

SEQ ID NO: 1074545 - DNA, 15 bp, Homo sapiens
gccgccgccgccgcg

SEQ ID NO: 1074546 - DNA, 15 bp, Homo sapiens
tccgccgccgccgcc

SEQ ID NO: 1074547 - DNA, 15 bp, Homo sapiens
gcctccgccgccgcc

SEQ ID NO: 1074548 - DNA, 15 bp, Homo sapiens
cgcctccgccgccgc

SEQ ID NO: 1074549 - DNA, 15 bp, Homo sapiens
ccgcctccgccgccg

SEQ ID NO: 1074550 - DNA, 15 bp, Homo sapiens
gccgcctccgccgcc

SEQ ID NO: 1074551 - DNA, 15 bp, Homo sapiens
cgccgcctccgccgc

SEQ ID NO: 1074552 - DNA, 15 bp, Homo sapiens
ccgccgcctccgccg

SEQ ID NO: 1074553 - DNA, 15 bp, Homo sapiens
gccgccgcctccgcc

SEQ ID NO: 1074554 - DNA, 15 bp, Homo sapiens
cgccgccgcctccgc

SEQ ID NO: 1074555 - DNA, 15 bp, Homo sapiens
ccgccgccgcctccg

SEQ ID NO: 1074556 - DNA, 15 bp, Homo sapiens
gccgccgccgcctcc

SEQ ID NO: 1074557 - DNA, 15 bp, Homo sapiens
agccgccgccgccgc

SEQ ID NO: 1074558 - DNA, 15 bp, Homo sapiens
cagccgccgccgccg

SEQ ID NO: 1074559 - DNA, 15 bp, Homo sapiens
ccagccgccgccgcc

SEQ ID NO: 1074560 - DNA, 15 bp, Homo sapiens
cccagccgccgccgc

SEQ ID NO: 1074561 - DNA, 15 bp, Homo sapiens
gcccagccgccgccg

SEQ ID NO: 1074562 - DNA, 15 bp, Homo sapiens
ggcccagccgccgcc

SEQ ID NO: 1074563 - DNA, 15 bp, Homo sapiens
aggcccagccgccgc

SEQ ID NO: 1074564 - DNA, 15 bp, Homo sapiens
gaggcccagccgccg

SEQ ID NO: 1074565 - DNA, 15 bp, Homo sapiens
cgaggcccagccgcc

SEQ ID NO: 1074566 - DNA, 15 bp, Homo sapiens
tcgaggcccagccgc

SEQ ID NO: 1074567 - DNA, 15 bp, Homo sapiens
ctcgaggcccagccg

SEQ ID NO: 1074568 - DNA, 15 bp, Homo sapiens
gctcgaggcccagcc

SEQ ID NO: 1074569 - DNA, 15 bp, Homo sapiens
cgctcgaggcccagc

SEQ ID NO: 1074570 - DNA, 15 bp, Homo sapiens
gcgctcgaggcccag

SEQ ID NO: 1074571 - DNA, 15 bp, Homo sapiens
ggcgctcgaggccca

SEQ ID NO: 1074572 - DNA, 15 bp, Homo sapiens
gggcgctcgaggccc

SEQ ID NO: 1074573 - DNA, 15 bp, Homo sapiens
cgggcgctcgaggcc

SEQ ID NO: 1074574 - DNA, 15 bp, Homo sapiens
gcgggcgctcgaggc

SEQ ID NO: 1074575 - DNA, 15 bp, Homo sapiens
tgcgggcgctcgagg

SEQ ID NO: 1074576 - DNA, 15 bp, Homo sapiens
ctgcgggcgctcgag

SEQ ID NO: 1074577 - DNA, 15 bp, Homo sapiens
gctgcgggcgctcga

SEQ ID NO: 1074578 - DNA, 15 bp, Homo sapiens
ggctgcgggcgctcg

SEQ ID NO: 1074579 - DNA, 15 bp, Homo sapiens
gggctgcgggcgctc

SEQ ID NO: 1074580 - DNA, 15 bp, Homo sapiens
tgggctgcgggcgct

SEQ ID NO: 1074581 - DNA, 15 bp, Homo sapiens
gtgggctgcgggcgc

SEQ ID NO: 1074582 - DNA, 15 bp, Homo sapiens
ggtgggctgcgggcg

SEQ ID NO: 1074583 - DNA, 15 bp, Homo sapiens
aggtgggctgcgggc

SEQ ID NO: 1074584 - DNA, 15 bp, Homo sapiens
gaggtgggctgcggg

SEQ ID NO: 1074585 - DNA, 15 bp, Homo sapiens
agaggtgggctgcgg

SEQ ID NO: 1074586 - DNA, 15 bp, Homo sapiens
gagaggtgggctgcg

SEQ ID NO: 1074587 - DNA, 15 bp, Homo sapiens
cgagaggtgggctgc

SEQ ID NO: 1074588 - DNA, 15 bp, Homo sapiens
ccgagaggtgggctg

SEQ ID NO: 1074589 - DNA, 15 bp, Homo sapiens
cccgagaggtgggct

SEQ ID NO: 1074590 - DNA, 15 bp, Homo sapiens
ccccgagaggtgggc

SEQ ID NO: 1074591 - DNA, 15 bp, Homo sapiens
cccccgagaggtggg

SEQ ID NO: 1074592 - DNA, 15 bp, Homo sapiens
gcccccgagaggtgg

SEQ ID NO: 1074593 - DNA, 15 bp, Homo sapiens
cgcccccgagaggtg

SEQ ID NO: 1074594 - DNA, 15 bp, Homo sapiens
ccgcccccgagaggt

SEQ ID NO: 1074595 - DNA, 15 bp, Homo sapiens
cccgcccccgagagg

SEQ ID NO: 1074596 - DNA, 15 bp, Homo sapiens
gcccgcccccgagag

SEQ ID NO: 1074597 - DNA, 15 bp, Homo sapiens
agcccgcccccgaga

SEQ ID NO: 1074598 - DNA, 15 bp, Homo sapiens
gagcccgcccccgag

SEQ ID NO: 1074599 - DNA, 15 bp, Homo sapiens
ggagcccgcccccga

SEQ ID NO: 1074600 - DNA, 15 bp, Homo sapiens
gggagcccgcccccg

SEQ ID NO: 1074601 - DNA, 15 bp, Homo sapiens
cgggagcccgccccc

SEQ ID NO: 1074602 - DNA, 15 bp, Homo sapiens
ccgggagcccgcccc

SEQ ID NO: 1074603 - DNA, 15 bp, Homo sapiens
gccgggagcccgccc

SEQ ID NO: 1074604 - DNA, 15 bp, Homo sapiens
cgccgggagcccgcc

SEQ ID NO: 1074605 - DNA, 15 bp, Homo sapiens
gcgccgggagcccgc

SEQ ID NO: 1074606 - DNA, 15 bp, Homo sapiens
agcgccgggagcccg

SEQ ID NO: 1074607 - DNA, 15 bp, Homo sapiens
tagcgccgggagccc

SEQ ID NO: 1074608 - DNA, 15 bp, Homo sapiens
ctagcgccgggagcc

SEQ ID NO: 1074609 - DNA, 15 bp, Homo sapiens
gctagcgccgggagc

SEQ ID NO: 1074610 - DNA, 15 bp, Homo sapiens
tgctagcgccgggag

SEQ ID NO: 1074611 - DNA, 15 bp, Homo sapiens
ctgctagcgccggga

SEQ ID NO: 1074612 - DNA, 15 bp, Homo sapiens
cctgctagcgccggg

SEQ ID NO: 1074613 - DNA, 15 bp, Homo sapiens
ccctgctagcgccgg

SEQ ID NO: 1074614 - DNA, 15 bp, Homo sapiens
gccctgctagcgccg

SEQ ID NO: 1074615 - DNA, 15 bp, Homo sapiens
agccctgctagcgcc

SEQ ID NO: 1074616 - DNA, 15 bp, Homo sapiens
cagccctgctagcgc

SEQ ID NO: 1074617 - DNA, 15 bp, Homo sapiens
tcagccctgctagcg

SEQ ID NO: 1074618 - DNA, 15 bp, Homo sapiens
ttcagccctgctagc

SEQ ID NO: 1074619 - DNA, 15 bp, Homo sapiens
cttcagccctgctag

SEQ ID NO: 1074620 - DNA, 15 bp, Homo sapiens
tcttcagccctgcta

SEQ ID NO: 1074621 - DNA, 15 bp, Homo sapiens
ctcttcagccctgct

SEQ ID NO: 1074622 - DNA, 15 bp, Homo sapiens
tctcttcagccctgc

SEQ ID NO: 1074623 - DNA, 15 bp, Homo sapiens
ttctcttcagccctg

SEQ ID NO: 1074624 - DNA, 15 bp, Homo sapiens
cttctcttcagccct

SEQ ID NO: 1074625 - DNA, 15 bp, Homo sapiens
tcttctcttcagccc

SEQ ID NO: 1074626 - DNA, 15 bp, Homo sapiens
atcttctcttcagcc

SEQ ID NO: 1074627 - DNA, 15 bp, Homo sapiens
catcttctcttcagc

SEQ ID NO: 1074628 - DNA, 15 bp, Homo sapiens
ccatcttctcttcag

SEQ ID NO: 1074629 - DNA, 15 bp, Homo sapiens
tccatcttctcttca

SEQ ID NO: 1074630 - DNA, 15 bp, Homo sapiens
ctccatcttctcttc

SEQ ID NO: 1074631 - DNA, 15 bp, Homo sapiens
cctccatcttctctt

SEQ ID NO: 1074632 - DNA, 15 bp, Homo sapiens
tcctccatcttctct

SEQ ID NO: 1074633 - DNA, 15 bp, Homo sapiens
ctcctccatcttctc

SEQ ID NO: 1074634 - DNA, 15 bp, Homo sapiens
gctcctccatcttct

SEQ ID NO: 1074635 - DNA, 15 bp, Homo sapiens
agctcctccatcttc

SEQ ID NO: 1074636 - DNA, 15 bp, Homo sapiens
cagctcctccatctt

SEQ ID NO: 1074637 - DNA, 15 bp, Homo sapiens
ccagctcctccatct

SEQ ID NO: 1074638 - DNA, 15 bp, Homo sapiens
accagctcctccatc

SEQ ID NO: 1074639 - DNA, 15 bp, Homo sapiens
caccagctcctccat

SEQ ID NO: 1074640 - DNA, 15 bp, Homo sapiens
ccaccagctcctcca

SEQ ID NO: 1074641 - DNA, 15 bp, Homo sapiens
accaccagctcctcc

SEQ ID NO: 1074642 - DNA, 15 bp, Homo sapiens
caccaccagctcctc

SEQ ID NO: 1074643 - DNA, 15 bp, Homo sapiens
ccaccaccagctcct

SEQ ID NO: 1074644 - DNA, 15 bp, Homo sapiens
tccaccaccagctcc

SEQ ID NO: 1074645 - DNA, 15 bp, Homo sapiens
ttccaccaccagctc

SEQ ID NO: 1074646 - DNA, 15 bp, Homo sapiens
cttccaccaccagct

SEQ ID NO: 1074647 - DNA, 15 bp, Homo sapiens
acttccaccaccagc

SEQ ID NO: 1074648 - DNA, 15 bp, Homo sapiens
cacttccaccaccag

SEQ ID NO: 1074649 - DNA, 15 bp, Homo sapiens
gcacttccaccacca

SEQ ID NO: 1074650 - DNA, 15 bp, Homo sapiens
cgcacttccaccacc

SEQ ID NO: 1074651 - DNA, 15 bp, Homo sapiens
ccgcacttccaccac

SEQ ID NO: 1074652 - DNA, 15 bp, Homo sapiens
cccgcacttccacca

SEQ ID NO: 1074653 - DNA, 15 bp, Homo sapiens
ccccgcacttccacc

SEQ ID NO: 1074654 - DNA, 15 bp, Homo sapiens
gccccgcacttccac

SEQ ID NO: 1074655 - DNA, 15 bp, Homo sapiens
agccccgcacttcca

SEQ ID NO: 1074656 - DNA, 15 bp, Homo sapiens
gagccccgcacttcc

SEQ ID NO: 1074657 - DNA, 15 bp, Homo sapiens
ggagccccgcacttc

SEQ ID NO: 1074658 - DNA, 15 bp, Homo sapiens
tggagccccgcactt

SEQ ID NO: 1074659 - DNA, 15 bp, Homo sapiens
ttggagccccgcact

SEQ ID NO: 1074660 - DNA, 15 bp, Homo sapiens
attggagccccgcac

SEQ ID NO: 1074661 - DNA, 15 bp, Homo sapiens
cattggagccccgca

SEQ ID NO: 1074662 - DNA, 15 bp, Homo sapiens
ccattggagccccgc

SEQ ID NO: 1074663 - DNA, 15 bp, Homo sapiens
gccattggagccccg

SEQ ID NO: 1074664 - DNA, 15 bp, Homo sapiens
cgccattggagcccc

SEQ ID NO: 1074665 - DNA, 15 bp, Homo sapiens
gcgccattggagccc

SEQ ID NO: 1074666 - DNA, 15 bp, Homo sapiens
agcgccattggagcc

SEQ ID NO: 1074667 - DNA, 15 bp, Homo sapiens
aagcgccattggagc

SEQ ID NO: 1074668 - DNA, 15 bp, Homo sapiens
aaagcgccattggag

SEQ ID NO: 1074669 - DNA, 15 bp, Homo sapiens
gaaagcgccattgga

SEQ ID NO: 1074670 - DNA, 15 bp, Homo sapiens
agaaagcgccattgg

SEQ ID NO: 1074671 - DNA, 15 bp, Homo sapiens
tagaaagcgccattg

SEQ ID NO: 1074672 - DNA, 15 bp, Homo sapiens
gtagaaagcgccatt

SEQ ID NO: 1074673 - DNA, 15 bp, Homo sapiens
tgtagaaagcgccat

SEQ ID NO: 1074674 - DNA, 15 bp, Homo sapiens
ttgtagaaagcgcca

SEQ ID NO: 1074675 - DNA, 15 bp, Homo sapiens
cttgtagaaagcgcc

SEQ ID NO: 1074676 - DNA, 15 bp, Homo sapiens
ccttgtagaaagcgc

SEQ ID NO: 1074677 - DNA, 15 bp, Homo sapiens
accttgtagaaagcg

SEQ ID NO: 1074678 - DNA, 15 bp, Homo sapiens
taccttgtagaaagc

SEQ ID NO: 1074679 - DNA, 15 bp, Homo sapiens
gtaccttgtagaaag

SEQ ID NO: 1074680 - DNA, 15 bp, Homo sapiens
agtaccttgtagaaa

SEQ ID NO: 1074681 - DNA, 15 bp, Homo sapiens
aagtaccttgtagaa

SEQ ID NO: 1074682 - DNA, 15 bp, Homo sapiens
caagtaccttgtaga

SEQ ID NO: 1074683 - DNA, 15 bp, Homo sapiens
ccaagtaccttgtag

SEQ ID NO: 1074684 - DNA, 15 bp, Homo sapiens
gccaagtaccttgta

SEQ ID NO: 1074685 - DNA, 15 bp, Homo sapiens
agccaagtaccttgt

SEQ ID NO: 1074686 - DNA, 15 bp, Homo sapiens
gagccaagtaccttg

SEQ ID NO: 1074687 - DNA, 15 bp, Homo sapiens
agagccaagtacctt

SEQ ID NO: 1074688 - DNA, 15 bp, Homo sapiens
tagagccaagtacct

SEQ ID NO: 1074689 - DNA, 15 bp, Homo sapiens
ctagagccaagtacc

SEQ ID NO: 1074690 - DNA, 15 bp, Homo sapiens
cctagagccaagtac

SEQ ID NO: 1074691 - DNA, 15 bp, Homo sapiens
ccctagagccaagta

SEQ ID NO: 1074692 - DNA, 15 bp, Homo sapiens
gccctagagccaagt

SEQ ID NO: 1074693 - DNA, 15 bp, Homo sapiens
tgccctagagccaag

SEQ ID NO: 1074694 - DNA, 15 bp, Homo sapiens
ctgccctagagccaa

SEQ ID NO: 1074695 - DNA, 15 bp, Homo sapiens
cctgccctagagcca

SEQ ID NO: 1074696 - DNA, 15 bp, Homo sapiens
gcctgccctagagcc

SEQ ID NO: 1074697 - DNA, 15 bp, Homo sapiens
ggcctgccctagagc

SEQ ID NO: 1074698 - DNA, 15 bp, Homo sapiens
gggcctgccctagag

SEQ ID NO: 1074699 - DNA, 15 bp, Homo sapiens
ggggcctgccctaga

SEQ ID NO: 1074700 - DNA, 15 bp, Homo sapiens
tggggcctgccctag

SEQ ID NO: 1074701 - DNA, 15 bp, Homo sapiens
atggggcctgcccta

SEQ ID NO: 1074702 - DNA, 15 bp, Homo sapiens
gatggggcctgccct

SEQ ID NO: 1074703 - DNA, 15 bp, Homo sapiens
agatggggcctgccc

SEQ ID NO: 1074704 - DNA, 15 bp, Homo sapiens
aagatggggcctgcc

SEQ ID NO: 1074705 - DNA, 15 bp, Homo sapiens
gaagatggggcctgc

SEQ ID NO: 1074706 - DNA, 15 bp, Homo sapiens
cgaagatggggcctg

SEQ ID NO: 1074707 - DNA, 15 bp, Homo sapiens
gcgaagatggggcct

SEQ ID NO: 1074708 - DNA, 15 bp, Homo sapiens
ggcgaagatggggcc

SEQ ID NO: 1074709 - DNA, 15 bp, Homo sapiens
gggcgaagatggggc

SEQ ID NO: 1074710 - DNA, 15 bp, Homo sapiens
agggcgaagatgggg

SEQ ID NO: 1074711 - DNA, 15 bp, Homo sapiens
aagggcgaagatggg

SEQ ID NO: 1074712 - DNA, 15 bp, Homo sapiens
gaagggcgaagatgg

SEQ ID NO: 1074713 - DNA, 15 bp, Homo sapiens
ggaagggcgaagatg

SEQ ID NO: 1074714 - DNA, 15 bp, Homo sapiens
aggaagggcgaagat

SEQ ID NO: 1074715 - DNA, 15 bp, Homo sapiens
aaggaagggcgaaga

SEQ ID NO: 1074716 - DNA, 15 bp, Homo sapiens
gaaggaagggcgaag

SEQ ID NO: 1074717 - DNA, 15 bp, Homo sapiens
ggaaggaagggcgaa

SEQ ID NO: 1074718 - DNA, 15 bp, Homo sapiens
gggaaggaagggcga

SEQ ID NO: 1074719 - DNA, 15 bp, Homo sapiens
agggaaggaagggcg

SEQ ID NO: 1074720 - DNA, 15 bp, Homo sapiens
gagggaaggaagggc

SEQ ID NO: 1074721 - DNA, 15 bp, Homo sapiens
ggagggaaggaaggg

SEQ ID NO: 1074722 - DNA, 15 bp, Homo sapiens
aagggagggaaggaa

SEQ ID NO: 1074723 - DNA, 15 bp, Homo sapiens
aaagggagggaagga

SEQ ID NO: 1074724 - DNA, 15 bp, Homo sapiens
aaaagggagggaagg

SEQ ID NO: 1074725 - DNA, 15 bp, Homo sapiens
gaaaagggagggaag

SEQ ID NO: 1074726 - DNA, 15 bp, Homo sapiens
agaaaagggagggaa

SEQ ID NO: 1074727 - DNA, 15 bp, Homo sapiens
aagaaaagggaggga

SEQ ID NO: 1074728 - DNA, 15 bp, Homo sapiens
gaagaaaagggaggg

SEQ ID NO: 1074729 - DNA, 15 bp, Homo sapiens
agaagaaaagggagg

SEQ ID NO: 1074730 - DNA, 15 bp, Homo sapiens
aagaagaaaagggag

SEQ ID NO: 1074731 - DNA, 15 bp, Homo sapiens
caagaagaaaaggga

SEQ ID NO: 1074732 - DNA, 15 bp, Homo sapiens
ccaagaagaaaaggg

SEQ ID NO: 1074733 - DNA, 15 bp, Homo sapiens
accaagaagaaaagg

SEQ ID NO: 1074734 - DNA, 15 bp, Homo sapiens
caccaagaagaaaag

SEQ ID NO: 1074735 - DNA, 15 bp, Homo sapiens
acaccaagaagaaaa

SEQ ID NO: 1074736 - DNA, 15 bp, Homo sapiens
gacaccaagaagaaa

SEQ ID NO: 1074737 - DNA, 15 bp, Homo sapiens
cgacaccaagaagaa

SEQ ID NO: 1074738 - DNA, 15 bp, Homo sapiens
ccgacaccaagaaga

SEQ ID NO: 1074739 - DNA, 15 bp, Homo sapiens
gccgacaccaagaag

SEQ ID NO: 1074740 - DNA, 15 bp, Homo sapiens
cgccgacaccaagaa

SEQ ID NO: 1074741 - DNA, 15 bp, Homo sapiens
ccgccgacaccaaga

SEQ ID NO: 1074742 - DNA, 15 bp, Homo sapiens
cccgccgacaccaag

SEQ ID NO: 1074743 - DNA, 15 bp, Homo sapiens
tcccgccgacaccaa

SEQ ID NO: 1074744 - DNA, 15 bp, Homo sapiens
ctcccgccgacacca

SEQ ID NO: 1074745 - DNA, 15 bp, Homo sapiens
cctcccgccgacacc

SEQ ID NO: 1074746 - DNA, 15 bp, Homo sapiens
gcctcccgccgacac

SEQ ID NO: 1074747 - DNA, 15 bp, Homo sapiens
tgcctcccgccgaca

SEQ ID NO: 1074748 - DNA, 15 bp, Homo sapiens
ctgcctcccgccgac

SEQ ID NO: 1074749 - DNA, 15 bp, Homo sapiens
cctgcctcccgccga

SEQ ID NO: 1074750 - DNA, 15 bp, Homo sapiens
gcctgcctcccgccg

SEQ ID NO: 1074751 - DNA, 15 bp, Homo sapiens
ggcctgcctcccgcc

SEQ ID NO: 1074752 - DNA, 15 bp, Homo sapiens
gggcctgcctcccgc

SEQ ID NO: 1074753 - DNA, 15 bp, Homo sapiens
cgggcctgcctcccg

SEQ ID NO: 1074754 - DNA, 15 bp, Homo sapiens
ccgggcctgcctccc

SEQ ID NO: 1074755 - DNA, 15 bp, Homo sapiens
cccgggcctgcctcc

SEQ ID NO: 1074756 - DNA, 15 bp, Homo sapiens
ccccgggcctgcctc

SEQ ID NO: 1074757 - DNA, 15 bp, Homo sapiens
gccccgggcctgcct

SEQ ID NO: 1074758 - DNA, 15 bp, Homo sapiens
ggccccgggcctgcc

SEQ ID NO: 1074759 - DNA, 15 bp, Homo sapiens
gggccccgggcctgc

SEQ ID NO: 1074760 - DNA, 15 bp, Homo sapiens
agggccccgggcctg

SEQ ID NO: 1074761 - DNA, 15 bp, Homo sapiens
gagggccccgggcct

SEQ ID NO: 1074762 - DNA, 15 bp, Homo sapiens
agagggccccgggcc

SEQ ID NO: 1074763 - DNA, 15 bp, Homo sapiens
aagagggccccgggc

SEQ ID NO: 1074764 - DNA, 15 bp, Homo sapiens
gaagagggccccggg

SEQ ID NO: 1074765 - DNA, 15 bp, Homo sapiens
ggaagagggccccgg

SEQ ID NO: 1074766 - DNA, 15 bp, Homo sapiens
gggaagagggccccg

SEQ ID NO: 1074767 - DNA, 15 bp, Homo sapiens
cgggaagagggcccc

SEQ ID NO: 1074768 - DNA, 15 bp, Homo sapiens
tcgggaagagggccc

SEQ ID NO: 1074769 - DNA, 15 bp, Homo sapiens
ctcgggaagagggcc

SEQ ID NO: 1074770 - DNA, 15 bp, Homo sapiens
gctcgggaagagggc

SEQ ID NO: 1074771 - DNA, 15 bp, Homo sapiens
tgctcgggaagaggg

SEQ ID NO: 1074772 - DNA, 15 bp, Homo sapiens
gtgctcgggaagagg

SEQ ID NO: 1074773 - DNA, 15 bp, Homo sapiens
ggtgctcgggaagag

SEQ ID NO: 1074774 - DNA, 15 bp, Homo sapiens
cggtgctcgggaaga

SEQ ID NO: 1074775 - DNA, 15 bp, Homo sapiens
gcggtgctcgggaag

SEQ ID NO: 1074776 - DNA, 15 bp, Homo sapiens
cgcggtgctcgggaa

SEQ ID NO: 1074777 - DNA, 15 bp, Homo sapiens
gcgcggtgctcggga

SEQ ID NO: 1074778 - DNA, 15 bp, Homo sapiens
ggcgcggtgctcggg

SEQ ID NO: 1074779 - DNA, 15 bp, Homo sapiens
aggcgcggtgctcgg

SEQ ID NO: 1074780 - DNA, 15 bp, Homo sapiens
caggcgcggtgctcg

SEQ ID NO: 1074781 - DNA, 15 bp, Homo sapiens
ccaggcgcggtgctc

SEQ ID NO: 1074782 - DNA, 15 bp, Homo sapiens
cccaggcgcggtgct

SEQ ID NO: 1074783 - DNA, 15 bp, Homo sapiens
acccaggcgcggtgc

SEQ ID NO: 1074784 - DNA, 15 bp, Homo sapiens
cacccaggcgcggtg

SEQ ID NO: 1074785 - DNA, 15 bp, Homo sapiens
gcacccaggcgcggt

SEQ ID NO: 1074786 - DNA, 15 bp, Homo sapiens
ggcacccaggcgcgg

SEQ ID NO: 1074787 - DNA, 15 bp, Homo sapiens
tggcacccaggcgcg

SEQ ID NO: 1074788 - DNA, 15 bp, Homo sapiens
ctggcacccaggcgc

SEQ ID NO: 1074789 - DNA, 15 bp, Homo sapiens
cctggcacccaggcg

SEQ ID NO: 1074790 - DNA, 15 bp, Homo sapiens
ccctggcacccaggc

SEQ ID NO: 1074791 - DNA, 15 bp, Homo sapiens
gccctggcacccagg

SEQ ID NO: 1074792 - DNA, 15 bp, Homo sapiens
tgccctggcacccag

SEQ ID NO: 1074793 - DNA, 15 bp, Homo sapiens
gtgccctggcaccca

SEQ ID NO: 1074794 - DNA, 15 bp, Homo sapiens
cgtgccctggcaccc

SEQ ID NO: 1074795 - DNA, 15 bp, Homo sapiens
gcgtgccctggcacc

SEQ ID NO: 1074796 - DNA, 15 bp, Homo sapiens
agcgtgccctggcac

SEQ ID NO: 1074797 - DNA, 15 bp, Homo sapiens
gagcgtgccctggca

SEQ ID NO: 1074798 - DNA, 15 bp, Homo sapiens
cgagcgtgccctggc

SEQ ID NO: 1074799 - DNA, 15 bp, Homo sapiens
ccgagcgtgccctgg

SEQ ID NO: 1074800 - DNA, 15 bp, Homo sapiens
gccgagcgtgccctg

SEQ ID NO: 1074801 - DNA, 15 bp, Homo sapiens
cgccgagcgtgccct

SEQ ID NO: 1074802 - DNA, 15 bp, Homo sapiens
ccgccgagcgtgccc

SEQ ID NO: 1074803 - DNA, 15 bp, Homo sapiens
cccgccgagcgtgcc

SEQ ID NO: 1074804 - DNA, 15 bp, Homo sapiens
tcccgccgagcgtgc

SEQ ID NO: 1074805 - DNA, 15 bp, Homo sapiens
atcccgccgagcgtg

SEQ ID NO: 1074806 - DNA, 15 bp, Homo sapiens
catcccgccgagcgt

SEQ ID NO: 1074807 - DNA, 15 bp, Homo sapiens
acatcccgccgagcg

SEQ ID NO: 1074808 - DNA, 15 bp, Homo sapiens
aacatcccgccgagc

SEQ ID NO: 1074809 - DNA, 15 bp, Homo sapiens
caacatcccgccgag

SEQ ID NO: 1074810 - DNA, 15 bp, Homo sapiens
acaacatcccgccga

SEQ ID NO: 1074811 - DNA, 15 bp, Homo sapiens
aacaacatcccgccg

SEQ ID NO: 1074812 - DNA, 15 bp, Homo sapiens
caacaacatcccgcc

SEQ ID NO: 1074813 - DNA, 15 bp, Homo sapiens
ccaacaacatcccgc

SEQ ID NO: 1074814 - DNA, 15 bp, Homo sapiens
cccaacaacatcccg

SEQ ID NO: 1074815 - DNA, 15 bp, Homo sapiens
tcccaacaacatccc

SEQ ID NO: 1074816 - DNA, 15 bp, Homo sapiens
ctcccaacaacatcc

SEQ ID NO: 1074817 - DNA, 15 bp, Homo sapiens
cctcccaacaacatc

SEQ ID NO: 1074818 - DNA, 15 bp, Homo sapiens
ccctcccaacaacat

SEQ ID NO: 1074819 - DNA, 15 bp, Homo sapiens
tccctcccaacaaca

SEQ ID NO: 1074820 - DNA, 15 bp, Homo sapiens
ttccctcccaacaac

SEQ ID NO: 1074821 - DNA, 15 bp, Homo sapiens
cttccctcccaacaa

SEQ ID NO: 1074822 - DNA, 15 bp, Homo sapiens
ccttccctcccaaca

SEQ ID NO: 1074823 - DNA, 15 bp, Homo sapiens
tccttccctcccaac

SEQ ID NO: 1074824 - DNA, 15 bp, Homo sapiens
gtccttccctcccaa

SEQ ID NO: 1074825 - DNA, 15 bp, Homo sapiens
agtccttccctccca

SEQ ID NO: 1074826 - DNA, 15 bp, Homo sapiens
cagtccttccctccc

SEQ ID NO: 1074827 - DNA, 15 bp, Homo sapiens
tccagtccttccctc

SEQ ID NO: 1074828 - DNA, 15 bp, Homo sapiens
gtccagtccttccct

SEQ ID NO: 1074829 - DNA, 15 bp, Homo sapiens
agtccagtccttccc

SEQ ID NO: 1074830 - DNA, 15 bp, Homo sapiens
aagtccagtccttcc

SEQ ID NO: 1074831 - DNA, 15 bp, Homo sapiens
caagtccagtccttc

SEQ ID NO: 1074832 - DNA, 15 bp, Homo sapiens
ccaagtccagtcctt

SEQ ID NO: 1074833 - DNA, 15 bp, Homo sapiens
cccaagtccagtcct

SEQ ID NO: 1074834 - DNA, 15 bp, Homo sapiens
ccccaagtccagtcc

SEQ ID NO: 1074835 - DNA, 15 bp, Homo sapiens
gccccaagtccagtc

SEQ ID NO: 1074836 - DNA, 15 bp, Homo sapiens
ggccccaagtccagt

SEQ ID NO: 1074837 - DNA, 15 bp, Homo sapiens
aggccccaagtccag

SEQ ID NO: 1074838 - DNA, 15 bp, Homo sapiens
caggccccaagtcca

SEQ ID NO: 1074839 - DNA, 15 bp, Homo sapiens
acaggccccaagtcc

SEQ ID NO: 1074840 - DNA, 15 bp, Homo sapiens
aacaggccccaagtc

SEQ ID NO: 1074841 - DNA, 15 bp, Homo sapiens
caacaggccccaagt

SEQ ID NO: 1074842 - DNA, 15 bp, Homo sapiens
ccaacaggccccaag

SEQ ID NO: 1074843 - DNA, 15 bp, Homo sapiens
tccaacaggccccaa

SEQ ID NO: 1074844 - DNA, 15 bp, Homo sapiens
ttccaacaggcccca

SEQ ID NO: 1074845 - DNA, 15 bp, Homo sapiens
cttccaacaggcccc

SEQ ID NO: 1074846 - DNA, 15 bp, Homo sapiens
gcttccaacaggccc

SEQ ID NO: 1074847 - DNA, 15 bp, Homo sapiens
ggcttccaacaggcc

SEQ ID NO: 1074848 - DNA, 15 bp, Homo sapiens
gggcttccaacaggc

SEQ ID NO: 1074849 - DNA, 15 bp, Homo sapiens
ggggcttccaacagg

SEQ ID NO: 1074850 - DNA, 15 bp, Homo sapiens
aggggcttccaacag

SEQ ID NO: 1074851 - DNA, 15 bp, Homo sapiens
gaggggcttccaaca

SEQ ID NO: 1074852 - DNA, 15 bp, Homo sapiens
agaggggcttccaac

SEQ ID NO: 1074853 - DNA, 15 bp, Homo sapiens
gagaggggcttccaa

SEQ ID NO: 1074854 - DNA, 15 bp, Homo sapiens
ggagaggggcttcca

SEQ ID NO: 1074855 - DNA, 15 bp, Homo sapiens
cggagaggggcttcc

SEQ ID NO: 1074856 - DNA, 15 bp, Homo sapiens
tcggagaggggcttc

SEQ ID NO: 1074857 - DNA, 15 bp, Homo sapiens
gtcggagaggggctt

SEQ ID NO: 1074858 - DNA, 15 bp, Homo sapiens
agtcggagaggggct

SEQ ID NO: 1074859 - DNA, 15 bp, Homo sapiens
gagtcggagaggggc

SEQ ID NO: 1074860 - DNA, 15 bp, Homo sapiens
ggagtcggagagggg

SEQ ID NO: 1074861 - DNA, 15 bp, Homo sapiens
cggagtcggagaggg

SEQ ID NO: 1074862 - DNA, 15 bp, Homo sapiens
tcggagtcggagagg

SEQ ID NO: 1074863 - DNA, 15 bp, Homo sapiens
ctcggagtcggagag

SEQ ID NO: 1074864 - DNA, 15 bp, Homo sapiens
tctcggagtcggaga

SEQ ID NO: 1074865 - DNA, 15 bp, Homo sapiens
ctctcggagtcggag

SEQ ID NO: 1074866 - DNA, 15 bp, Homo sapiens
cctctcggagtcgga

SEQ ID NO: 1074867 - DNA, 15 bp, Homo sapiens
gcctctcggagtcgg

SEQ ID NO: 1074868 - DNA, 15 bp, Homo sapiens
ggcctctcggagtcg

SEQ ID NO: 1074869 - DNA, 15 bp, Homo sapiens
gggcctctcggagtc

SEQ ID NO: 1074870 - DNA, 15 bp, Homo sapiens
agggcctctcggagt

SEQ ID NO: 1074871 - DNA, 15 bp, Homo sapiens
tagggcctctcggag

SEQ ID NO: 1074872 - DNA, 15 bp, Homo sapiens
ctagggcctctcgga

SEQ ID NO: 1074873 - DNA, 15 bp, Homo sapiens
gctagggcctctcgg

SEQ ID NO: 1074874 - DNA, 15 bp, Homo sapiens
cgctagggcctctcg

SEQ ID NO: 1074875 - DNA, 15 bp, Homo sapiens
gcgctagggcctctc

SEQ ID NO: 1074876 - DNA, 15 bp, Homo sapiens
ggcgctagggcctct

SEQ ID NO: 1074877 - DNA, 15 bp, Homo sapiens
aggcgctagggcctc

SEQ ID NO: 1074878 - DNA, 15 bp, Homo sapiens
taggcgctagggcct

SEQ ID NO: 1074879 - DNA, 15 bp, Homo sapiens
ataggcgctagggcc

SEQ ID NO: 1074880 - DNA, 15 bp, Homo sapiens
gataggcgctagggc

SEQ ID NO: 1074881 - DNA, 15 bp, Homo sapiens
cgataggcgctaggg

SEQ ID NO: 1074882 - DNA, 15 bp, Homo sapiens
tcgataggcgctagg

SEQ ID NO: 1074883 - DNA, 15 bp, Homo sapiens
ttcgataggcgctag

SEQ ID NO: 1074884 - DNA, 15 bp, Homo sapiens
tttcgataggcgcta

SEQ ID NO: 1074885 - DNA, 15 bp, Homo sapiens
atttcgataggcgct

SEQ ID NO: 1074886 - DNA, 15 bp, Homo sapiens
catttcgataggcgc

SEQ ID NO: 1074887 - DNA, 15 bp, Homo sapiens
tcatttcgataggcg

SEQ ID NO: 1074888 - DNA, 15 bp, Homo sapiens
ctcatttcgataggc

SEQ ID NO: 1074889 - DNA, 15 bp, Homo sapiens
tctcatttcgatagg

SEQ ID NO: 1074890 - DNA, 15 bp, Homo sapiens
ctctcatttcgatag

SEQ ID NO: 1074891 - DNA, 15 bp, Homo sapiens
tctctcatttcgata

SEQ ID NO: 1074892 - DNA, 15 bp, Homo sapiens
gtctctcatttcgat

SEQ ID NO: 1074893 - DNA, 15 bp, Homo sapiens
ggtctctcatttcga

SEQ ID NO: 1074894 - DNA, 15 bp, Homo sapiens
tggtctctcatttcg

SEQ ID NO: 1074895 - DNA, 15 bp, Homo sapiens
ctggtctctcatttc

SEQ ID NO: 1074896 - DNA, 15 bp, Homo sapiens
gctggtctctcattt

SEQ ID NO: 1074897 - DNA, 15 bp, Homo sapiens
cgctggtctctcatt

SEQ ID NO: 1074898 - DNA, 15 bp, Homo sapiens
tcgctggtctctcat

SEQ ID NO: 1074899 - DNA, 15 bp, Homo sapiens
ctcgctggtctctca

SEQ ID NO: 1074900 - DNA, 15 bp, Homo sapiens
cctcgctggtctctc

SEQ ID NO: 1074901 - DNA, 15 bp, Homo sapiens
tcctcgctggtctct

SEQ ID NO: 1074902 - DNA, 15 bp, Homo sapiens
ctcctcgctggtctc

SEQ ID NO: 1074903 - DNA, 15 bp, Homo sapiens
tctcctcgctggtct

SEQ ID NO: 1074904 - DNA, 15 bp, Homo sapiens
ctctcctcgctggtc

SEQ ID NO: 1074905 - DNA, 15 bp, Homo sapiens
cctctcctcgctggt

SEQ ID NO: 1074906 - DNA, 15 bp, Homo sapiens
ccctctcctcgctgg

SEQ ID NO: 1074907 - DNA, 15 bp, Homo sapiens
accctctcctcgctg

SEQ ID NO: 1074908 - DNA, 15 bp, Homo sapiens
aaccctctcctcgct

SEQ ID NO: 1074909 - DNA, 15 bp, Homo sapiens
gaaccctctcctcgc

SEQ ID NO: 1074910 - DNA, 15 bp, Homo sapiens
agaaccctctcctcg

SEQ ID NO: 1074911 - DNA, 15 bp, Homo sapiens
gagaaccctctcctc

SEQ ID NO: 1074912 - DNA, 15 bp, Homo sapiens
agagaaccctctcct

SEQ ID NO: 1074913 - DNA, 15 bp, Homo sapiens
aagagaaccctctcc

SEQ ID NO: 1074914 - DNA, 15 bp, Homo sapiens
aaagagaaccctctc

SEQ ID NO: 1074915 - DNA, 15 bp, Homo sapiens
gaaagagaaccctct

SEQ ID NO: 1074916 - DNA, 15 bp, Homo sapiens
cgaaagagaaccctc

SEQ ID NO: 1074917 - DNA, 15 bp, Homo sapiens
ccgaaagagaaccct

SEQ ID NO: 1074918 - DNA, 15 bp, Homo sapiens
gccgaaagagaaccc

SEQ ID NO: 1074919 - DNA, 15 bp, Homo sapiens
cgccgaaagagaacc

SEQ ID NO: 1074920 - DNA, 15 bp, Homo sapiens
gcgccgaaagagaac

SEQ ID NO: 1074921 - DNA, 15 bp, Homo sapiens
ggcgccgaaagagaa

SEQ ID NO: 1074922 - DNA, 15 bp, Homo sapiens
cggcgccgaaagaga

SEQ ID NO: 1074923 - DNA, 15 bp, Homo sapiens
tcggcgccgaaagag

SEQ ID NO: 1074924 - DNA, 15 bp, Homo sapiens
ctcggcgccgaaaga

SEQ ID NO: 1074925 - DNA, 15 bp, Homo sapiens
gctcggcgccgaaag

SEQ ID NO: 1074926 - DNA, 15 bp, Homo sapiens
cacacgcaccttcta

SEQ ID NO: 1074927 - DNA, 15 bp, Homo sapiens
ccacacgcaccttct

SEQ ID NO: 1074928 - DNA, 15 bp, Homo sapiens
tccacacgcaccttc

SEQ ID NO: 1074929 - DNA, 15 bp, Homo sapiens
ttccacacgcacctt

SEQ ID NO: 1074930 - DNA, 15 bp, Homo sapiens
cttccacacgcacct

SEQ ID NO: 1074931 - DNA, 15 bp, Homo sapiens
ccttccacacgcacc

SEQ ID NO: 1074932 - DNA, 15 bp, Homo sapiens
tccttccacacgcac

SEQ ID NO: 1074933 - DNA, 15 bp, Homo sapiens
ttccttccacacgca

SEQ ID NO: 1074934 - DNA, 15 bp, Homo sapiens
cttccttccacacgc

SEQ ID NO: 1074935 - DNA, 15 bp, Homo sapiens
ccttccttccacacg

SEQ ID NO: 1074936 - DNA, 15 bp, Homo sapiens
gccttccttccacac

SEQ ID NO: 1074937 - DNA, 15 bp, Homo sapiens
agccttccttccaca

SEQ ID NO: 1074938 - DNA, 15 bp, Homo sapiens
cagccttccttccac

SEQ ID NO: 1074939 - DNA, 15 bp, Homo sapiens
ccagccttccttcca

SEQ ID NO: 1074940 - DNA, 15 bp, Homo sapiens
tccagccttccttcc

SEQ ID NO: 1074941 - DNA, 15 bp, Homo sapiens
ttccagccttccttc

SEQ ID NO: 1074942 - DNA, 15 bp, Homo sapiens
tttccagccttcctt

SEQ ID NO: 1074943 - DNA, 15 bp, Homo sapiens
ttttccagccttcct

SEQ ID NO: 1074944 - DNA, 15 bp, Homo sapiens
attttccagccttcc

SEQ ID NO: 1074945 - DNA, 15 bp, Homo sapiens
tattttccagccttc

SEQ ID NO: 1074946 - DNA, 15 bp, Homo sapiens
ctattttccagcctt

SEQ ID NO: 1074947 - DNA, 15 bp, Homo sapiens
gctattttccagcct

SEQ ID NO: 1074948 - DNA, 15 bp, Homo sapiens
agctattttccagcc

SEQ ID NO: 1074949 - DNA, 15 bp, Homo sapiens
tagctattttccagc

SEQ ID NO: 1074950 - DNA, 15 bp, Homo sapiens
atagctattttccag

SEQ ID NO: 1074951 - DNA, 15 bp, Homo sapiens
aatagctattttcca

SEQ ID NO: 1074952 - DNA, 15 bp, Homo sapiens
taatagctattttcc

SEQ ID NO: 1074953 - DNA, 15 bp, Homo sapiens
ctaatagctattttc

SEQ ID NO: 1074954 - DNA, 15 bp, Homo sapiens
gctaatagctatttt

SEQ ID NO: 1074955 - DNA, 15 bp, Homo sapiens
tgctaatagctattt

SEQ ID NO: 1074956 - DNA, 15 bp, Homo sapiens
ctgctaatagctatt

SEQ ID NO: 1074957 - DNA, 15 bp, Homo sapiens
actgctaatagctat

SEQ ID NO: 1074958 - DNA, 15 bp, Homo sapiens
cactgctaatagcta

SEQ ID NO: 1074959 - DNA, 15 bp, Homo sapiens
acactgctaatagct

SEQ ID NO: 1074960 - DNA, 15 bp, Homo sapiens
gacactgctaatagc

SEQ ID NO: 1074961 - DNA, 15 bp, Homo sapiens
ggacactgctaatag

SEQ ID NO: 1074962 - DNA, 15 bp, Homo sapiens
tggacactgctaata

SEQ ID NO: 1074963 - DNA, 15 bp, Homo sapiens
ttggacactgctaat

SEQ ID NO: 1074964 - DNA, 15 bp, Homo sapiens
gttggacactgctaa

SEQ ID NO: 1074965 - DNA, 15 bp, Homo sapiens
tgttggacactgcta

SEQ ID NO: 1074966 - DNA, 15 bp, Homo sapiens
gtgttggacactgct

SEQ ID NO: 1074967 - DNA, 15 bp, Homo sapiens
ttgtgttggacactg

SEQ ID NO: 1074968 - DNA, 15 bp, Homo sapiens
attgtgttggacact

SEQ ID NO: 1074969 - DNA, 15 bp, Homo sapiens
aattgtgttggacac

SEQ ID NO: 1074970 - DNA, 15 bp, Homo sapiens
gaattgtgttggaca

SEQ ID NO: 1074971 - DNA, 15 bp, Homo sapiens
agaattgtgttggac

SEQ ID NO: 1074972 - DNA, 15 bp, Homo sapiens
aagaattgtgttgga

SEQ ID NO: 1074973 - DNA, 15 bp, Homo sapiens
taagaattgtgttgg

SEQ ID NO: 1074974 - DNA, 15 bp, Homo sapiens
ttaagaattgtgttg

SEQ ID NO: 1074975 - DNA, 15 bp, Homo sapiens
tttaagaattgtgtt

SEQ ID NO: 1074976 - DNA, 15 bp, Homo sapiens
atttaagaattgtgt

SEQ ID NO: 1074977 - DNA, 15 bp, Homo sapiens
catttaagaattgtg

SEQ ID NO: 1074978 - DNA, 15 bp, Homo sapiens
acatttaagaattgt

SEQ ID NO: 1074979 - DNA, 15 bp, Homo sapiens
tacatttaagaattg

SEQ ID NO: 1074980 - DNA, 15 bp, Homo sapiens
cacactttccttggg

SEQ ID NO: 1074981 - DNA, 15 bp, Homo sapiens
gcacactttccttgg

SEQ ID NO: 1074982 - DNA, 15 bp, Homo sapiens
agcacactttccttg

SEQ ID NO: 1074983 - DNA, 15 bp, Homo sapiens
aagcacactttcctt

SEQ ID NO: 1074984 - DNA, 15 bp, Homo sapiens
caagcacactttcct

SEQ ID NO: 1074985 - DNA, 15 bp, Homo sapiens
acaagcacactttcc

SEQ ID NO: 1074986 - DNA, 15 bp, Homo sapiens
tacaagcacactttc

SEQ ID NO: 1074987 - DNA, 15 bp, Homo sapiens
atacaagcacacttt

SEQ ID NO: 1074988 - DNA, 15 bp, Homo sapiens
aatacaagcacactt

SEQ ID NO: 1074989 - DNA, 15 bp, Homo sapiens
aaatacaagcacact

SEQ ID NO: 1074990 - DNA, 15 bp, Homo sapiens
taaatacaagcacac

SEQ ID NO: 1074991 - DNA, 15 bp, Homo sapiens
ataaatacaagcaca

SEQ ID NO: 1074992 - DNA, 15 bp, Homo sapiens
cataaatacaagcac

SEQ ID NO: 1074993 - DNA, 15 bp, Homo sapiens
ccataaatacaagca

SEQ ID NO: 1074994 - DNA, 15 bp, Homo sapiens
cccataaatacaagc

SEQ ID NO: 1074995 - DNA, 15 bp, Homo sapiens
gcccataaatacaag

SEQ ID NO: 1074996 - DNA, 15 bp, Homo sapiens
cgcccataaatacaa

SEQ ID NO: 1074997 - DNA, 15 bp, Homo sapiens
acgcccataaataca

SEQ ID NO: 1074998 - DNA, 15 bp, Homo sapiens
gacgcccataaatac

SEQ ID NO: 1074999 - DNA, 15 bp, Homo sapiens
agacgcccataaata

SEQ ID NO: 1075000 - DNA, 15 bp, Homo sapiens
tagacgcccataaat

SEQ ID NO: 1075001 - DNA, 15 bp, Homo sapiens
atagacgcccataaa

SEQ ID NO: 1075002 - DNA, 15 bp, Homo sapiens
aatagacgcccataa

SEQ ID NO: 1075003 - DNA, 15 bp, Homo sapiens
aaatagacgcccata

SEQ ID NO: 1075004 - DNA, 15 bp, Homo sapiens
aaaatagacgcccat

SEQ ID NO: 1075005 - DNA, 15 bp, Homo sapiens
gaaaatagacgccca

SEQ ID NO: 1075006 - DNA, 15 bp, Homo sapiens
tgaaaatagacgccc

SEQ ID NO: 1075007 - DNA, 15 bp, Homo sapiens
ctgaaaatagacgcc

SEQ ID NO: 1075008 - DNA, 15 bp, Homo sapiens
tctgaaaatagacgc

SEQ ID NO: 1075009 - DNA, 15 bp, Homo sapiens
ctctgaaaatagacg

SEQ ID NO: 1075010 - DNA, 15 bp, Homo sapiens
gctctgaaaatagac

SEQ ID NO: 1075011 - DNA, 15 bp, Homo sapiens
tgctctgaaaataga

SEQ ID NO: 1075012 - DNA, 15 bp, Homo sapiens
gtgctctgaaaatag

SEQ ID NO: 1075013 - DNA, 15 bp, Homo sapiens
agtgctctgaaaata

SEQ ID NO: 1075014 - DNA, 15 bp, Homo sapiens
tagtgctctgaaaat

SEQ ID NO: 1075015 - DNA, 15 bp, Homo sapiens
ttagtgctctgaaaa

SEQ ID NO: 1075016 - DNA, 15 bp, Homo sapiens
attagtgctctgaaa

SEQ ID NO: 1075017 - DNA, 15 bp, Homo sapiens
aattagtgctctgaa

SEQ ID NO: 1075018 - DNA, 15 bp, Homo sapiens
taattagtgctctga

SEQ ID NO: 1075019 - DNA, 15 bp, Homo sapiens
ataattagtgctctg

SEQ ID NO: 1075020 - DNA, 15 bp, Homo sapiens
aataattagtgctct

SEQ ID NO: 1075021 - DNA, 15 bp, Homo sapiens
caataattagtgctc

SEQ ID NO: 1075022 - DNA, 15 bp, Homo sapiens
gcaataattagtgct

SEQ ID NO: 1075023 - DNA, 15 bp, Homo sapiens
agcaataattagtgc

SEQ ID NO: 1075024 - DNA, 15 bp, Homo sapiens
cagcaataattagtg

SEQ ID NO: 1075025 - DNA, 15 bp, Homo sapiens
tcagcaataattagt

SEQ ID NO: 1075026 - DNA, 15 bp, Homo sapiens
ttcagcaataattag

SEQ ID NO: 1075027 - DNA, 15 bp, Homo sapiens
attcagcaataatta

SEQ ID NO: 1075028 - DNA, 15 bp, Homo sapiens
aattcagcaataatt

SEQ ID NO: 1075029 - DNA, 15 bp, Homo sapiens
taattcagcaataat

SEQ ID NO: 1075030 - DNA, 15 bp, Homo sapiens
ctaattcagcaataa

SEQ ID NO: 1075031 - DNA, 15 bp, Homo sapiens
tctaattcagcaata

SEQ ID NO: 1075032 - DNA, 15 bp, Homo sapiens
ttctaattcagcaat

SEQ ID NO: 1075033 - DNA, 15 bp, Homo sapiens
gttctaattcagcaa

SEQ ID NO: 1075034 - DNA, 15 bp, Homo sapiens
tgttctaattcagca

SEQ ID NO: 1075035 - DNA, 15 bp, Homo sapiens
ctgttctaattcagc

SEQ ID NO: 1075036 - DNA, 15 bp, Homo sapiens
tctgttctaattcag

SEQ ID NO: 1075037 - DNA, 15 bp, Homo sapiens
ttctgttctaattca

SEQ ID NO: 1075038 - DNA, 15 bp, Homo sapiens
tttctgttctaattc

SEQ ID NO: 1075039 - DNA, 15 bp, Homo sapiens
atttctgttctaatt

SEQ ID NO: 1075040 - DNA, 15 bp, Homo sapiens
tatttctgttctaat

SEQ ID NO: 1075041 - DNA, 15 bp, Homo sapiens
atatttctgttctaa

SEQ ID NO: 1075042 - DNA, 15 bp, Homo sapiens
tatatttctgttcta

SEQ ID NO: 1075043 - DNA, 15 bp, Homo sapiens
ctatatttctgttct

SEQ ID NO: 1075044 - DNA, 15 bp, Homo sapiens
cctatatttctgttc

SEQ ID NO: 1075045 - DNA, 15 bp, Homo sapiens
tcctatatttctgtt

SEQ ID NO: 1075046 - DNA, 15 bp, Homo sapiens
ttcctatatttctgt

SEQ ID NO: 1075047 - DNA, 15 bp, Homo sapiens
tttcctatatttctg

SEQ ID NO: 1075048 - DNA, 15 bp, Homo sapiens
ttttcctatatttct

SEQ ID NO: 1075049 - DNA, 15 bp, Homo sapiens
gttttcctatatttc

SEQ ID NO: 1075050 - DNA, 15 bp, Homo sapiens
agttttcctatattt

SEQ ID NO: 1075051 - DNA, 15 bp, Homo sapiens
cagttttcctatatt

SEQ ID NO: 1075052 - DNA, 15 bp, Homo sapiens
tcagttttcctatat

SEQ ID NO: 1075053 - DNA, 15 bp, Homo sapiens
atcagttttcctata

SEQ ID NO: 1075054 - DNA, 15 bp, Homo sapiens
aatcagttttcctat

SEQ ID NO: 1075055 - DNA, 15 bp, Homo sapiens
aaatcagttttccta

SEQ ID NO: 1075056 - DNA, 15 bp, Homo sapiens
aaaaatcagttttcc

SEQ ID NO: 1075057 - DNA, 15 bp, Homo sapiens
taaaaatcagttttc

SEQ ID NO: 1075058 - DNA, 15 bp, Homo sapiens
gtaaaaatcagtttt

SEQ ID NO: 1075059 - DNA, 15 bp, Homo sapiens
tgtaaaaatcagttt

SEQ ID NO: 1075060 - DNA, 15 bp, Homo sapiens
ttgtaaaaatcagtt

SEQ ID NO: 1075061 - DNA, 15 bp, Homo sapiens
cttgtaaaaatcagt

SEQ ID NO: 1075062 - DNA, 15 bp, Homo sapiens
ccttgtaaaaatcag

SEQ ID NO: 1075063 - DNA, 15 bp, Homo sapiens
tccttgtaaaaatca

SEQ ID NO: 1075064 - DNA, 15 bp, Homo sapiens
ctccttgtaaaaatc

SEQ ID NO: 1075065 - DNA, 15 bp, Homo sapiens
gctccttgtaaaaat

SEQ ID NO: 1075066 - DNA, 15 bp, Homo sapiens
agctccttgtaaaaa

SEQ ID NO: 1075067 - DNA, 15 bp, Homo sapiens
aagctccttgtaaaa

SEQ ID NO: 1075068 - DNA, 15 bp, Homo sapiens
gaagctccttgtaaa

SEQ ID NO: 1075069 - DNA, 15 bp, Homo sapiens
tgaagctccttgtaa

SEQ ID NO: 1075070 - DNA, 15 bp, Homo sapiens
ttgaagctccttgta

SEQ ID NO: 1075071 - DNA, 15 bp, Homo sapiens
tttgaagctccttgt

SEQ ID NO: 1075072 - DNA, 15 bp, Homo sapiens
ctttgaagctccttg

SEQ ID NO: 1075073 - DNA, 15 bp, Homo sapiens
gctttgaagctcctt

SEQ ID NO: 1075074 - DNA, 15 bp, Homo sapiens
tgctttgaagctcct

SEQ ID NO: 1075075 - DNA, 15 bp, Homo sapiens
ttgctttgaagctcc

SEQ ID NO: 1075076 - DNA, 15 bp, Homo sapiens
attgctttgaagctc

SEQ ID NO: 1075077 - DNA, 15 bp, Homo sapiens
gattgctttgaagct

SEQ ID NO: 1075078 - DNA, 15 bp, Homo sapiens
agattgctttgaagc

SEQ ID NO: 1075079 - DNA, 15 bp, Homo sapiens
gagattgctttgaag

SEQ ID NO: 1075080 - DNA, 15 bp, Homo sapiens
tgagattgctttgaa

SEQ ID NO: 1075081 - DNA, 15 bp, Homo sapiens
ctgagattgctttga

SEQ ID NO: 1075082 - DNA, 15 bp, Homo sapiens
cctgagattgctttg

SEQ ID NO: 1075083 - DNA, 15 bp, Homo sapiens
acctgagattgcttt

SEQ ID NO: 1075084 - DNA, 15 bp, Homo sapiens
tacctgagattgctt

SEQ ID NO: 1075085 - DNA, 15 bp, Homo sapiens
ctacctgagattgct

SEQ ID NO: 1075086 - DNA, 15 bp, Homo sapiens
actacctgagattgc

SEQ ID NO: 1075087 - DNA, 15 bp, Homo sapiens
aactacctgagattg

SEQ ID NO: 1075088 - DNA, 15 bp, Homo sapiens
aaactacctgagatt

SEQ ID NO: 1075089 - DNA, 15 bp, Homo sapiens
gaaactacctgagat

SEQ ID NO: 1075090 - DNA, 15 bp, Homo sapiens
agaaactacctgaga

SEQ ID NO: 1075091 - DNA, 15 bp, Homo sapiens
cagaaactacctgag

SEQ ID NO: 1075092 - DNA, 15 bp, Homo sapiens
tcagaaactacctga

SEQ ID NO: 1075093 - DNA, 15 bp, Homo sapiens
atcagaaactacctg

SEQ ID NO: 1075094 - DNA, 15 bp, Homo sapiens
aatcagaaactacct

SEQ ID NO: 1075095 - DNA, 15 bp, Homo sapiens
taatcagaaactacc

SEQ ID NO: 1075096 - DNA, 15 bp, Homo sapiens
ataatcagaaactac

SEQ ID NO: 1075097 - DNA, 15 bp, Homo sapiens
cataatcagaaacta

SEQ ID NO: 1075098 - DNA, 15 bp, Homo sapiens
acataatcagaaact

SEQ ID NO: 1075099 - DNA, 15 bp, Homo sapiens
tacataatcagaaac

SEQ ID NO: 1075100 - DNA, 15 bp, Homo sapiens
gatacataatcagaa

SEQ ID NO: 1075101 - DNA, 15 bp, Homo sapiens
agatacataatcaga

SEQ ID NO: 1075102 - DNA, 15 bp, Homo sapiens
gagatacataatcag

SEQ ID NO: 1075103 - DNA, 15 bp, Homo sapiens
agagatacataatca

SEQ ID NO: 1075104 - DNA, 15 bp, Homo sapiens
cagagatacataatc

SEQ ID NO: 1075105 - DNA, 15 bp, Homo sapiens
gcagagatacataat

SEQ ID NO: 1075106 - DNA, 15 bp, Homo sapiens
ggcagagatacataa

SEQ ID NO: 1075107 - DNA, 15 bp, Homo sapiens
aggcagagatacata

SEQ ID NO: 1075108 - DNA, 15 bp, Homo sapiens
taggcagagatacat

SEQ ID NO: 1075109 - DNA, 15 bp, Homo sapiens
gtaggcagagataca

SEQ ID NO: 1075110 - DNA, 15 bp, Homo sapiens
ggtaggcagagatac

SEQ ID NO: 1075111 - DNA, 15 bp, Homo sapiens
aggtaggcagagata

SEQ ID NO: 1075112 - DNA, 15 bp, Homo sapiens
gaggtaggcagagat

SEQ ID NO: 1075113 - DNA, 15 bp, Homo sapiens
cgaggtaggcagaga

SEQ ID NO: 1075114 - DNA, 15 bp, Homo sapiens
ccgaggtaggcagag

SEQ ID NO: 1075115 - DNA, 15 bp, Homo sapiens
cccgaggtaggcaga

SEQ ID NO: 1075116 - DNA, 15 bp, Homo sapiens
ccccgaggtaggcag

SEQ ID NO: 1075117 - DNA, 15 bp, Homo sapiens
accccgaggtaggca

SEQ ID NO: 1075118 - DNA, 15 bp, Homo sapiens
taccccgaggtaggc

SEQ ID NO: 1075119 - DNA, 15 bp, Homo sapiens
gtaccccgaggtagg

SEQ ID NO: 1075120 - DNA, 15 bp, Homo sapiens
tgtaccccgaggtag

SEQ ID NO: 1075121 - DNA, 15 bp, Homo sapiens
atgtaccccgaggta

SEQ ID NO: 1075122 - DNA, 15 bp, Homo sapiens
tatgtaccccgaggt

SEQ ID NO: 1075123 - DNA, 15 bp, Homo sapiens
ctatgtaccccgagg

SEQ ID NO: 1075124 - DNA, 15 bp, Homo sapiens
tctatgtaccccgag

SEQ ID NO: 1075125 - DNA, 15 bp, Homo sapiens
gtctatgtaccccga

SEQ ID NO: 1075126 - DNA, 15 bp, Homo sapiens
tgtctatgtaccccg

SEQ ID NO: 1075127 - DNA, 15 bp, Homo sapiens
ctgtctatgtacccc

SEQ ID NO: 1075128 - DNA, 15 bp, Homo sapiens
cctgtctatgtaccc

SEQ ID NO: 1075129 - DNA, 15 bp, Homo sapiens
ccctgtctatgtacc

SEQ ID NO: 1075130 - DNA, 15 bp, Homo sapiens
accctgtctatgtac

SEQ ID NO: 1075131 - DNA, 15 bp, Homo sapiens
aaccctgtctatgta

SEQ ID NO: 1075132 - DNA, 15 bp, Homo sapiens
taaccctgtctatgt

SEQ ID NO: 1075133 - DNA, 15 bp, Homo sapiens
gtaaccctgtctatg

SEQ ID NO: 1075134 - DNA, 15 bp, Homo sapiens
tgtaaccctgtctat

SEQ ID NO: 1075135 - DNA, 15 bp, Homo sapiens
ttgtaaccctgtcta

SEQ ID NO: 1075136 - DNA, 15 bp, Homo sapiens
attgtaaccctgtct

SEQ ID NO: 1075137 - DNA, 15 bp, Homo sapiens
aattgtaaccctgtc

SEQ ID NO: 1075138 - DNA, 15 bp, Homo sapiens
aaattgtaaccctgt

SEQ ID NO: 1075139 - DNA, 15 bp, Homo sapiens
caaattgtaaccctg

SEQ ID NO: 1075140 - DNA, 15 bp, Homo sapiens
ccaaattgtaaccct

SEQ ID NO: 1075141 - DNA, 15 bp, Homo sapiens
accaaattgtaaccc

SEQ ID NO: 1075142 - DNA, 15 bp, Homo sapiens
aaccaaattgtaacc

SEQ ID NO: 1075143 - DNA, 15 bp, Homo sapiens
caaccaaattgtaac

SEQ ID NO: 1075144 - DNA, 15 bp, Homo sapiens
tcaaccaaattgtaa

SEQ ID NO: 1075145 - DNA, 15 bp, Homo sapiens
ctcaaccaaattgta

SEQ ID NO: 1075146 - DNA, 15 bp, Homo sapiens
cctcaaccaaattgt

SEQ ID NO: 1075147 - DNA, 15 bp, Homo sapiens
tcctcaaccaaattg

SEQ ID NO: 1075148 - DNA, 15 bp, Homo sapiens
atcctcaaccaaatt

SEQ ID NO: 1075149 - DNA, 15 bp, Homo sapiens
tatcctcaaccaaat

SEQ ID NO: 1075150 - DNA, 15 bp, Homo sapiens
atatcctcaaccaaa

SEQ ID NO: 1075151 - DNA, 15 bp, Homo sapiens
tatatcctcaaccaa

SEQ ID NO: 1075152 - DNA, 15 bp, Homo sapiens
atatatcctcaacca

SEQ ID NO: 1075153 - DNA, 15 bp, Homo sapiens
catatatcctcaacc

SEQ ID NO: 1075154 - DNA, 15 bp, Homo sapiens
tcatatatcctcaac

SEQ ID NO: 1075155 - DNA, 15 bp, Homo sapiens
gtcatatatcctcaa

SEQ ID NO: 1075156 - DNA, 15 bp, Homo sapiens
tgtcatatatcctca

SEQ ID NO: 1075157 - DNA, 15 bp, Homo sapiens
atgtcatatatcctc

SEQ ID NO: 1075158 - DNA, 15 bp, Homo sapiens
catgtcatatatcct

SEQ ID NO: 1075159 - DNA, 15 bp, Homo sapiens
acatgtcatatatcc

SEQ ID NO: 1075160 - DNA, 15 bp, Homo sapiens
cacatgtcatatatc

SEQ ID NO: 1075161 - DNA, 15 bp, Homo sapiens
ccacatgtcatatat

SEQ ID NO: 1075162 - DNA, 15 bp, Homo sapiens
accacatgtcatata

SEQ ID NO: 1075163 - DNA, 15 bp, Homo sapiens
aaccacatgtcatat

SEQ ID NO: 1075164 - DNA, 15 bp, Homo sapiens
aaaccacatgtcata

SEQ ID NO: 1075165 - DNA, 15 bp, Homo sapiens
aaaaccacatgtcat

SEQ ID NO: 1075166 - DNA, 15 bp, Homo sapiens
aaaaaccacatgtca

SEQ ID NO: 1075167 - DNA, 15 bp, Homo sapiens
taaaaaccacatgtc

SEQ ID NO: 1075168 - DNA, 15 bp, Homo sapiens
ttaaaaaccacatgt

SEQ ID NO: 1075169 - DNA, 15 bp, Homo sapiens
tttaaaaaccacatg

SEQ ID NO: 1075170 - DNA, 15 bp, Homo sapiens
ctttaaaaaccacat

SEQ ID NO: 1075171 - DNA, 15 bp, Homo sapiens
tctttaaaaaccaca

SEQ ID NO: 1075172 - DNA, 15 bp, Homo sapiens
gtctttaaaaaccac

SEQ ID NO: 1075173 - DNA, 15 bp, Homo sapiens
tgtctttaaaaacca

SEQ ID NO: 1075174 - DNA, 15 bp, Homo sapiens
gtgtctttaaaaacc

SEQ ID NO: 1075175 - DNA, 15 bp, Homo sapiens
ggtgtctttaaaaac

SEQ ID NO: 1075176 - DNA, 15 bp, Homo sapiens
aggtgtctttaaaaa

SEQ ID NO: 1075177 - DNA, 15 bp, Homo sapiens
taggtgtctttaaaa

SEQ ID NO: 1075178 - DNA, 15 bp, Homo sapiens
ctaggtgtctttaaa

SEQ ID NO: 1075179 - DNA, 15 bp, Homo sapiens
cctaggtgtctttaa

SEQ ID NO: 1075180 - DNA, 15 bp, Homo sapiens
ccctaggtgtcttta

SEQ ID NO: 1075181 - DNA, 15 bp, Homo sapiens
cccctaggtgtcttt

SEQ ID NO: 1075182 - DNA, 15 bp, Homo sapiens
gcccctaggtgtctt

SEQ ID NO: 1075183 - DNA, 15 bp, Homo sapiens
tgcccctaggtgtct

SEQ ID NO: 1075184 - DNA, 15 bp, Homo sapiens
atgcccctaggtgtc

SEQ ID NO: 1075185 - DNA, 15 bp, Homo sapiens
aatgcccctaggtgt

SEQ ID NO: 1075186 - DNA, 15 bp, Homo sapiens
aaatgcccctaggtg

SEQ ID NO: 1075187 - DNA, 15 bp, Homo sapiens
aaaatgcccctaggt

SEQ ID NO: 1075188 - DNA, 15 bp, Homo sapiens
taaaatgcccctagg

SEQ ID NO: 1075189 - DNA, 15 bp, Homo sapiens
ttaaaatgcccctag

SEQ ID NO: 1075190 - DNA, 15 bp, Homo sapiens
cttaaaatgccccta

SEQ ID NO: 1075191 - DNA, 15 bp, Homo sapiens
tcttaaaatgcccct

SEQ ID NO: 1075192 - DNA, 15 bp, Homo sapiens
ttcttaaaatgcccc

SEQ ID NO: 1075193 - DNA, 15 bp, Homo sapiens
tttcttaaaatgccc

SEQ ID NO: 1075194 - DNA, 15 bp, Homo sapiens
ttttcttaaaatgcc

SEQ ID NO: 1075195 - DNA, 15 bp, Homo sapiens
attttcttaaaatgc

SEQ ID NO: 1075196 - DNA, 15 bp, Homo sapiens
aattttcttaaaatg

SEQ ID NO: 1075197 - DNA, 15 bp, Homo sapiens
aaattttcttaaaat

SEQ ID NO: 1075198 - DNA, 15 bp, Homo sapiens
gaaattttcttaaaa

SEQ ID NO: 1075199 - DNA, 15 bp, Homo sapiens
ggaaattttcttaaa

SEQ ID NO: 1075200 - DNA, 15 bp, Homo sapiens
aggaaattttcttaa

SEQ ID NO: 1075201 - DNA, 15 bp, Homo sapiens
gaggaaattttctta

SEQ ID NO: 1075202 - DNA, 15 bp, Homo sapiens
cgaggaaattttctt

SEQ ID NO: 1075203 - DNA, 15 bp, Homo sapiens
tcgaggaaattttct

SEQ ID NO: 1075204 - DNA, 15 bp, Homo sapiens
atcgaggaaattttc

SEQ ID NO: 1075205 - DNA, 15 bp, Homo sapiens
tatcgaggaaatttt

SEQ ID NO: 1075206 - DNA, 15 bp, Homo sapiens
atatcgaggaaattt

SEQ ID NO: 1075207 - DNA, 15 bp, Homo sapiens
gatatcgaggaaatt

SEQ ID NO: 1075208 - DNA, 15 bp, Homo sapiens
agatatcgaggaaat

SEQ ID NO: 1075209 - DNA, 15 bp, Homo sapiens
cagatatcgaggaaa

SEQ ID NO: 1075210 - DNA, 15 bp, Homo sapiens
tcagatatcgaggaa

SEQ ID NO: 1075211 - DNA, 15 bp, Homo sapiens
ttcagatatcgagga

SEQ ID NO: 1075212 - DNA, 15 bp, Homo sapiens
tttcagatatcgagg

SEQ ID NO: 1075213 - DNA, 15 bp, Homo sapiens
ttttcagatatcgag

SEQ ID NO: 1075214 - DNA, 15 bp, Homo sapiens
attttcagatatcga

SEQ ID NO: 1075215 - DNA, 15 bp, Homo sapiens
gattttcagatatcg

SEQ ID NO: 1075216 - DNA, 15 bp, Homo sapiens
agattttcagatatc

SEQ ID NO: 1075217 - DNA, 15 bp, Homo sapiens
cagattttcagatat

SEQ ID NO: 1075218 - DNA, 15 bp, Homo sapiens
acagattttcagata

SEQ ID NO: 1075219 - DNA, 15 bp, Homo sapiens
tacagattttcagat

SEQ ID NO: 1075220 - DNA, 15 bp, Homo sapiens
ctacagattttcaga

SEQ ID NO: 1075221 - DNA, 15 bp, Homo sapiens
tctacagattttcag

SEQ ID NO: 1075222 - DNA, 15 bp, Homo sapiens
atctacagattttca

SEQ ID NO: 1075223 - DNA, 15 bp, Homo sapiens
aatctacagattttc

SEQ ID NO: 1075224 - DNA, 15 bp, Homo sapiens
aaatctacagatttt

SEQ ID NO: 1075225 - DNA, 15 bp, Homo sapiens
gaaatctacagattt

SEQ ID NO: 1075226 - DNA, 15 bp, Homo sapiens
tgaaatctacagatt

SEQ ID NO: 1075227 - DNA, 15 bp, Homo sapiens
ttgaaatctacagat

SEQ ID NO: 1075228 - DNA, 15 bp, Homo sapiens
tttgaaatctacaga

SEQ ID NO: 1075229 - DNA, 15 bp, Homo sapiens
ttttgaaatctacag

SEQ ID NO: 1075230 - DNA, 15 bp, Homo sapiens
attttgaaatctaca

SEQ ID NO: 1075231 - DNA, 15 bp, Homo sapiens
aattttgaaatctac

SEQ ID NO: 1075232 - DNA, 15 bp, Homo sapiens
taattttgaaatcta

SEQ ID NO: 1075233 - DNA, 15 bp, Homo sapiens
ataattttgaaatct

SEQ ID NO: 1075234 - DNA, 15 bp, Homo sapiens
cataattttgaaatc

SEQ ID NO: 1075235 - DNA, 15 bp, Homo sapiens
acataattttgaaat

SEQ ID NO: 1075236 - DNA, 15 bp, Homo sapiens
aacataattttgaaa

SEQ ID NO: 1075237 - DNA, 15 bp, Homo sapiens
taacataattttgaa

SEQ ID NO: 1075238 - DNA, 15 bp, Homo sapiens
ttaacataattttga

SEQ ID NO: 1075239 - DNA, 15 bp, Homo sapiens
attaacataattttg

SEQ ID NO: 1075240 - DNA, 15 bp, Homo sapiens
gattaacataatttt

SEQ ID NO: 1075241 - DNA, 15 bp, Homo sapiens
tgattaacataattt

SEQ ID NO: 1075242 - DNA, 15 bp, Homo sapiens
atgattaacataatt

SEQ ID NO: 1075243 - DNA, 15 bp, Homo sapiens
catgattaacataat

SEQ ID NO: 1075244 - DNA, 15 bp, Homo sapiens
tcatgattaacataa

SEQ ID NO: 1075245 - DNA, 15 bp, Homo sapiens
ttcatgattaacata

SEQ ID NO: 1075246 - DNA, 15 bp, Homo sapiens
tttcatgattaacat

SEQ ID NO: 1075247 - DNA, 15 bp, Homo sapiens
atttcatgattaaca

SEQ ID NO: 1075248 - DNA, 15 bp, Homo sapiens
tatttcatgattaac

SEQ ID NO: 1075249 - DNA, 15 bp, Homo sapiens
atatttcatgattaa

SEQ ID NO: 1075250 - DNA, 15 bp, Homo sapiens
aatatttcatgatta

SEQ ID NO: 1075251 - DNA, 15 bp, Homo sapiens
gaatatttcatgatt

SEQ ID NO: 1075252 - DNA, 15 bp, Homo sapiens
agaatatttcatgat

SEQ ID NO: 1075253 - DNA, 15 bp, Homo sapiens
cagaatatttcatga

SEQ ID NO: 1075254 - DNA, 15 bp, Homo sapiens
acagaatatttcatg

SEQ ID NO: 1075255 - DNA, 15 bp, Homo sapiens
cacagaatatttcat

SEQ ID NO: 1075256 - DNA, 15 bp, Homo sapiens
acacagaatatttca

SEQ ID NO: 1075257 - DNA, 15 bp, Homo sapiens
aacacagaatatttc

SEQ ID NO: 1075258 - DNA, 15 bp, Homo sapiens
caacacagaatattt

SEQ ID NO: 1075259 - DNA, 15 bp, Homo sapiens
acaacacagaatatt

SEQ ID NO: 1075260 - DNA, 15 bp, Homo sapiens
tacaacacagaatat

SEQ ID NO: 1075261 - DNA, 15 bp, Homo sapiens
ttacaacacagaata

SEQ ID NO: 1075262 - DNA, 15 bp, Homo sapiens
attacaacacagaat

SEQ ID NO: 1075263 - DNA, 15 bp, Homo sapiens
aattacaacacagaa

SEQ ID NO: 1075264 - DNA, 15 bp, Homo sapiens
aaattacaacacaga

SEQ ID NO: 1075265 - DNA, 15 bp, Homo sapiens
aaaattacaacacag

SEQ ID NO: 1075266 - DNA, 15 bp, Homo sapiens
aaaaattacaacaca

SEQ ID NO: 1075267 - DNA, 15 bp, Homo sapiens
caaaaattacaacac

SEQ ID NO: 1075268 - DNA, 15 bp, Homo sapiens
acaaaaattacaaca

SEQ ID NO: 1075269 - DNA, 15 bp, Homo sapiens
cacaaaaattacaac

SEQ ID NO: 1075270 - DNA, 15 bp, Homo sapiens
acacaaaaattacaa

SEQ ID NO: 1075271 - DNA, 15 bp, Homo sapiens
tacacaaaaattaca

SEQ ID NO: 1075272 - DNA, 15 bp, Homo sapiens
ctacacaaaaattac

SEQ ID NO: 1075273 - DNA, 15 bp, Homo sapiens
cctacacaaaaatta

SEQ ID NO: 1075274 - DNA, 15 bp, Homo sapiens
acctacacaaaaatt

SEQ ID NO: 1075275 - DNA, 15 bp, Homo sapiens
cacctacacaaaaat

SEQ ID NO: 1075276 - DNA, 15 bp, Homo sapiens
acacctacacaaaaa

SEQ ID NO: 1075277 - DNA, 15 bp, Homo sapiens
tacacctacacaaaa

SEQ ID NO: 1075278 - DNA, 15 bp, Homo sapiens
atacacctacacaaa

SEQ ID NO: 1075279 - DNA, 15 bp, Homo sapiens
aatacacctacacaa

SEQ ID NO: 1075280 - DNA, 15 bp, Homo sapiens
gaatacacctacaca

SEQ ID NO: 1075281 - DNA, 15 bp, Homo sapiens
ggaatacacctacac

SEQ ID NO: 1075282 - DNA, 15 bp, Homo sapiens
ggctgactttggcca

SEQ ID NO: 1075283 - DNA, 15 bp, Homo sapiens
gggctgactttggcc

SEQ ID NO: 1075284 - DNA, 15 bp, Homo sapiens
agggctgactttggc

SEQ ID NO: 1075285 - DNA, 15 bp, Homo sapiens
tagggctgactttgg

SEQ ID NO: 1075286 - DNA, 15 bp, Homo sapiens
ctagggctgactttg

SEQ ID NO: 1075287 - DNA, 15 bp, Homo sapiens
cctagggctgacttt

SEQ ID NO: 1075288 - DNA, 15 bp, Homo sapiens
gcctagggctgactt

SEQ ID NO: 1075289 - DNA, 15 bp, Homo sapiens
tgcctagggctgact

SEQ ID NO: 1075290 - DNA, 15 bp, Homo sapiens
gtgcctagggctgac

SEQ ID NO: 1075291 - DNA, 15 bp, Homo sapiens
tgtgcctagggctga

SEQ ID NO: 1075292 - DNA, 15 bp, Homo sapiens
ctgtgcctagggctg

SEQ ID NO: 1075293 - DNA, 15 bp, Homo sapiens
actgtgcctagggct

SEQ ID NO: 1075294 - DNA, 15 bp, Homo sapiens
gactgtgcctagggc

SEQ ID NO: 1075295 - DNA, 15 bp, Homo sapiens
tgactgtgcctaggg

SEQ ID NO: 1075296 - DNA, 15 bp, Homo sapiens
ttgactgtgcctagg

SEQ ID NO: 1075297 - DNA, 15 bp, Homo sapiens
cttgactgtgcctag

SEQ ID NO: 1075298 - DNA, 15 bp, Homo sapiens
tcttgactgtgccta

SEQ ID NO: 1075299 - DNA, 15 bp, Homo sapiens
ttcttgactgtgcct

SEQ ID NO: 1075300 - DNA, 15 bp, Homo sapiens
cttcttgactgtgcc

SEQ ID NO: 1075301 - DNA, 15 bp, Homo sapiens
acttcttgactgtgc

SEQ ID NO: 1075302 - DNA, 15 bp, Homo sapiens
tacttcttgactgtg

SEQ ID NO: 1075303 - DNA, 15 bp, Homo sapiens
ctacttcttgactgt

SEQ ID NO: 1075304 - DNA, 15 bp, Homo sapiens
cctacttcttgactg

SEQ ID NO: 1075305 - DNA, 15 bp, Homo sapiens
gcctacttcttgact

SEQ ID NO: 1075306 - DNA, 15 bp, Homo sapiens
cgcctacttcttgac

SEQ ID NO: 1075307 - DNA, 15 bp, Homo sapiens
tcgcctacttcttga

SEQ ID NO: 1075308 - DNA, 15 bp, Homo sapiens
ttcgcctacttcttg

SEQ ID NO: 1075309 - DNA, 15 bp, Homo sapiens
cttcgcctacttctt

SEQ ID NO: 1075310 - DNA, 15 bp, Homo sapiens
acttcgcctacttct

SEQ ID NO: 1075311 - DNA, 15 bp, Homo sapiens
aacttcgcctacttc

SEQ ID NO: 1075312 - DNA, 15 bp, Homo sapiens
aaacttcgcctactt

SEQ ID NO: 1075313 - DNA, 15 bp, Homo sapiens
gaaacttcgcctact

SEQ ID NO: 1075314 - DNA, 15 bp, Homo sapiens
agaaacttcgcctac

SEQ ID NO: 1075315 - DNA, 15 bp, Homo sapiens
gagaaacttcgccta

SEQ ID NO: 1075316 - DNA, 15 bp, Homo sapiens
caaagagaaacttcg

SEQ ID NO: 1075317 - DNA, 15 bp, Homo sapiens
gcaaagagaaacttc

SEQ ID NO: 1075318 - DNA, 15 bp, Homo sapiens
ggcaaagagaaactt

SEQ ID NO: 1075319 - DNA, 15 bp, Homo sapiens
aggcaaagagaaact

SEQ ID NO: 1075320 - DNA, 15 bp, Homo sapiens
aaggcaaagagaaac

SEQ ID NO: 1075321 - DNA, 15 bp, Homo sapiens
gaaggcaaagagaaa

SEQ ID NO: 1075322 - DNA, 15 bp, Homo sapiens
ggaaggcaaagagaa

SEQ ID NO: 1075323 - DNA, 15 bp, Homo sapiens
gggaaggcaaagaga

SEQ ID NO: 1075324 - DNA, 15 bp, Homo sapiens
tgggaaggcaaagag

SEQ ID NO: 1075325 - DNA, 15 bp, Homo sapiens
ctgggaaggcaaaga

SEQ ID NO: 1075326 - DNA, 15 bp, Homo sapiens
gctgggaaggcaaag

SEQ ID NO: 1075327 - DNA, 15 bp, Homo sapiens
agctgggaaggcaaa

SEQ ID NO: 1075328 - DNA, 15 bp, Homo sapiens
aagctgggaaggcaa

SEQ ID NO: 1075329 - DNA, 15 bp, Homo sapiens
aaagctgggaaggca

SEQ ID NO: 1075330 - DNA, 15 bp, Homo sapiens
aaaagctgggaaggc

SEQ ID NO: 1075331 - DNA, 15 bp, Homo sapiens
gaaaagctgggaagg

SEQ ID NO: 1075332 - DNA, 15 bp, Homo sapiens
agaaaagctgggaag

SEQ ID NO: 1075333 - DNA, 15 bp, Homo sapiens
cagaaaagctgggaa

SEQ ID NO: 1075334 - DNA, 15 bp, Homo sapiens
acagaaaagctggga

SEQ ID NO: 1075335 - DNA, 15 bp, Homo sapiens
gacagaaaagctggg

SEQ ID NO: 1075336 - DNA, 15 bp, Homo sapiens
ggacagaaaagctgg

SEQ ID NO: 1075337 - DNA, 15 bp, Homo sapiens
cggacagaaaagctg

SEQ ID NO: 1075338 - DNA, 15 bp, Homo sapiens
acggacagaaaagct

SEQ ID NO: 1075339 - DNA, 15 bp, Homo sapiens
cacggacagaaaagc

SEQ ID NO: 1075340 - DNA, 15 bp, Homo sapiens
gcacggacagaaaag

SEQ ID NO: 1075341 - DNA, 15 bp, Homo sapiens
agcacggacagaaaa

SEQ ID NO: 1075342 - DNA, 15 bp, Homo sapiens
aagcacggacagaaa

SEQ ID NO: 1075343 - DNA, 15 bp, Homo sapiens
gaagcacggacagaa

SEQ ID NO: 1075344 - DNA, 15 bp, Homo sapiens
agaagcacggacaga

SEQ ID NO: 1075345 - DNA, 15 bp, Homo sapiens
aagaagcacggacag

SEQ ID NO: 1075346 - DNA, 15 bp, Homo sapiens
aaagaagcacggaca

SEQ ID NO: 1075347 - DNA, 15 bp, Homo sapiens
gaaagaagcacggac

SEQ ID NO: 1075348 - DNA, 15 bp, Homo sapiens
agaaagaagcacgga

SEQ ID NO: 1075349 - DNA, 15 bp, Homo sapiens
aagaaagaagcacgg

SEQ ID NO: 1075350 - DNA, 15 bp, Homo sapiens
gaagaaagaagcacg

SEQ ID NO: 1075351 - DNA, 15 bp, Homo sapiens
agaagaaagaagcac

SEQ ID NO: 1075352 - DNA, 15 bp, Homo sapiens
gagaagaaagaagca

SEQ ID NO: 1075353 - DNA, 15 bp, Homo sapiens
agagaagaaagaagc

SEQ ID NO: 1075354 - DNA, 15 bp, Homo sapiens
gagagaagaaagaag

SEQ ID NO: 1075355 - DNA, 15 bp, Homo sapiens
ggagagaagaaagaa

SEQ ID NO: 1075356 - DNA, 15 bp, Homo sapiens
gggagagaagaaaga

SEQ ID NO: 1075357 - DNA, 15 bp, Homo sapiens
tgggagagaagaaag

SEQ ID NO: 1075358 - DNA, 15 bp, Homo sapiens
ctgggagagaagaaa

SEQ ID NO: 1075359 - DNA, 15 bp, Homo sapiens
actgggagagaagaa

SEQ ID NO: 1075360 - DNA, 15 bp, Homo sapiens
tactgggagagaaga

SEQ ID NO: 1075361 - DNA, 15 bp, Homo sapiens
gtactgggagagaag

SEQ ID NO: 1075362 - DNA, 15 bp, Homo sapiens
ggtactgggagagaa

SEQ ID NO: 1075363 - DNA, 15 bp, Homo sapiens
aggtactgggagaga

SEQ ID NO: 1075364 - DNA, 15 bp, Homo sapiens
aaggtactgggagag

SEQ ID NO: 1075365 - DNA, 15 bp, Homo sapiens
aaaggtactgggaga

SEQ ID NO: 1075366 - DNA, 15 bp, Homo sapiens
gaaaggtactgggag

SEQ ID NO: 1075367 - DNA, 15 bp, Homo sapiens
tgaaaggtactggga

SEQ ID NO: 1075368 - DNA, 15 bp, Homo sapiens
ctgaaaggtactggg

SEQ ID NO: 1075369 - DNA, 15 bp, Homo sapiens
actgaaaggtactgg

SEQ ID NO: 1075370 - DNA, 15 bp, Homo sapiens
cactgaaaggtactg

SEQ ID NO: 1075371 - DNA, 15 bp, Homo sapiens
tcactgaaaggtact

SEQ ID NO: 1075372 - DNA, 15 bp, Homo sapiens
ttcactgaaaggtac

SEQ ID NO: 1075373 - DNA, 15 bp, Homo sapiens
gttcactgaaaggta

SEQ ID NO: 1075374 - DNA, 15 bp, Homo sapiens
ggttcactgaaaggt

SEQ ID NO: 1075375 - DNA, 15 bp, Homo sapiens
aggttcactgaaagg

SEQ ID NO: 1075376 - DNA, 15 bp, Homo sapiens
caggttcactgaaag

SEQ ID NO: 1075377 - DNA, 15 bp, Homo sapiens
tcaggttcactgaaa

SEQ ID NO: 1075378 - DNA, 15 bp, Homo sapiens
atcaggttcactgaa

SEQ ID NO: 1075379 - DNA, 15 bp, Homo sapiens
gatcaggttcactga

SEQ ID NO: 1075380 - DNA, 15 bp, Homo sapiens
ggatcaggttcactg

SEQ ID NO: 1075381 - DNA, 15 bp, Homo sapiens
gggatcaggttcact

SEQ ID NO: 1075382 - DNA, 15 bp, Homo sapiens
ggggatcaggttcac

SEQ ID NO: 1075383 - DNA, 15 bp, Homo sapiens
tggggatcaggttca

SEQ ID NO: 1075384 - DNA, 15 bp, Homo sapiens
gtggggatcaggttc

SEQ ID NO: 1075385 - DNA, 15 bp, Homo sapiens
ggtggggatcaggtt

SEQ ID NO: 1075386 - DNA, 15 bp, Homo sapiens
aggtggggatcaggt

SEQ ID NO: 1075387 - DNA, 15 bp, Homo sapiens
caggtggggatcagg

SEQ ID NO: 1075388 - DNA, 15 bp, Homo sapiens
gcaggtggggatcag

SEQ ID NO: 1075389 - DNA, 15 bp, Homo sapiens
ggcaggtggggatca

SEQ ID NO: 1075390 - DNA, 15 bp, Homo sapiens
tggcaggtggggatc

SEQ ID NO: 1075391 - DNA, 15 bp, Homo sapiens
ctggcaggtggggat

SEQ ID NO: 1075392 - DNA, 15 bp, Homo sapiens
actggcaggtgggga

SEQ ID NO: 1075393 - DNA, 15 bp, Homo sapiens
cactggcaggtgggg

SEQ ID NO: 1075394 - DNA, 15 bp, Homo sapiens
gcactggcaggtggg

SEQ ID NO: 1075395 - DNA, 15 bp, Homo sapiens
ggcactggcaggtgg

SEQ ID NO: 1075396 - DNA, 15 bp, Homo sapiens
aggcactggcaggtg

SEQ ID NO: 1075397 - DNA, 15 bp, Homo sapiens
taggcactggcaggt

SEQ ID NO: 1075398 - DNA, 15 bp, Homo sapiens
gtaggcactggcagg

SEQ ID NO: 1075399 - DNA, 15 bp, Homo sapiens
agtaggcactggcag

SEQ ID NO: 1075400 - DNA, 15 bp, Homo sapiens
cagtaggcactggca

SEQ ID NO: 1075401 - DNA, 15 bp, Homo sapiens
acagtaggcactggc

SEQ ID NO: 1075402 - DNA, 15 bp, Homo sapiens
gacagtaggcactgg

SEQ ID NO: 1075403 - DNA, 15 bp, Homo sapiens
agacagtaggcactg

SEQ ID NO: 1075404 - DNA, 15 bp, Homo sapiens
aagacagtaggcact

SEQ ID NO: 1075405 - DNA, 15 bp, Homo sapiens
aaagacagtaggcac

SEQ ID NO: 1075406 - DNA, 15 bp, Homo sapiens
gaaagacagtaggca

SEQ ID NO: 1075407 - DNA, 15 bp, Homo sapiens
agaaagacagtaggc

SEQ ID NO: 1075408 - DNA, 15 bp, Homo sapiens
aagaaagacagtagg

SEQ ID NO: 1075409 - DNA, 15 bp, Homo sapiens
caagaaagacagtag

SEQ ID NO: 1075410 - DNA, 15 bp, Homo sapiens
gcaagaaagacagta

SEQ ID NO: 1075411 - DNA, 15 bp, Homo sapiens
agcaagaaagacagt

SEQ ID NO: 1075412 - DNA, 15 bp, Homo sapiens
gagcaagaaagacag

SEQ ID NO: 1075413 - DNA, 15 bp, Homo sapiens
tgagcaagaaagaca

SEQ ID NO: 1075414 - DNA, 15 bp, Homo sapiens
ttgagcaagaaagac

SEQ ID NO: 1075415 - DNA, 15 bp, Homo sapiens
gttgagcaagaaaga

SEQ ID NO: 1075416 - DNA, 15 bp, Homo sapiens
tgttgagcaagaaag

SEQ ID NO: 1075417 - DNA, 15 bp, Homo sapiens
ctgttgagcaagaaa

SEQ ID NO: 1075418 - DNA, 15 bp, Homo sapiens
actgttgagcaagaa

SEQ ID NO: 1075419 - DNA, 15 bp, Homo sapiens
cactgttgagcaaga

SEQ ID NO: 1075420 - DNA, 15 bp, Homo sapiens
acactgttgagcaag

SEQ ID NO: 1075421 - DNA, 15 bp, Homo sapiens
tacactgttgagcaa

SEQ ID NO: 1075422 - DNA, 15 bp, Homo sapiens
atacactgttgagca

SEQ ID NO: 1075423 - DNA, 15 bp, Homo sapiens
gatacactgttgagc

SEQ ID NO: 1075424 - DNA, 15 bp, Homo sapiens
agatacactgttgag

SEQ ID NO: 1075425 - DNA, 15 bp, Homo sapiens
gagatacactgttga

SEQ ID NO: 1075426 - DNA, 15 bp, Homo sapiens
ggagatacactgttg

SEQ ID NO: 1075427 - DNA, 15 bp, Homo sapiens
aggagatacactgtt

SEQ ID NO: 1075428 - DNA, 15 bp, Homo sapiens
aaggagatacactgt

SEQ ID NO: 1075429 - DNA, 15 bp, Homo sapiens
aaaggagatacactg

SEQ ID NO: 1075430 - DNA, 15 bp, Homo sapiens
caaaggagatacact

SEQ ID NO: 1075431 - DNA, 15 bp, Homo sapiens
acaaaggagatacac

SEQ ID NO: 1075432 - DNA, 15 bp, Homo sapiens
tacaaaggagataca

SEQ ID NO: 1075433 - DNA, 15 bp, Homo sapiens
ttacaaaggagatac

SEQ ID NO: 1075434 - DNA, 15 bp, Homo sapiens
gttacaaaggagata

SEQ ID NO: 1075435 - DNA, 15 bp, Homo sapiens
agttacaaaggagat

SEQ ID NO: 1075436 - DNA, 15 bp, Homo sapiens
aagttacaaaggaga

SEQ ID NO: 1075437 - DNA, 15 bp, Homo sapiens
caagttacaaaggag

SEQ ID NO: 1075438 - DNA, 15 bp, Homo sapiens
gcaagttacaaagga

SEQ ID NO: 1075439 - DNA, 15 bp, Homo sapiens
agcaagttacaaagg

SEQ ID NO: 1075440 - DNA, 15 bp, Homo sapiens
tagcaagttacaaag

SEQ ID NO: 1075441 - DNA, 15 bp, Homo sapiens
ttagcaagttacaaa

SEQ ID NO: 1075442 - DNA, 15 bp, Homo sapiens
attagcaagttacaa

SEQ ID NO: 1075443 - DNA, 15 bp, Homo sapiens
cattagcaagttaca

SEQ ID NO: 1075444 - DNA, 15 bp, Homo sapiens
tcattagcaagttac

SEQ ID NO: 1075445 - DNA, 15 bp, Homo sapiens
atcattagcaagtta

SEQ ID NO: 1075446 - DNA, 15 bp, Homo sapiens
catcattagcaagtt

SEQ ID NO: 1075447 - DNA, 15 bp, Homo sapiens
ccatcattagcaagt

SEQ ID NO: 1075448 - DNA, 15 bp, Homo sapiens
accatcattagcaag

SEQ ID NO: 1075449 - DNA, 15 bp, Homo sapiens
taccatcattagcaa

SEQ ID NO: 1075450 - DNA, 15 bp, Homo sapiens
ataccatcattagca

SEQ ID NO: 1075451 - DNA, 15 bp, Homo sapiens
tataccatcattagc

SEQ ID NO: 1075452 - DNA, 15 bp, Homo sapiens
ttataccatcattag

SEQ ID NO: 1075453 - DNA, 15 bp, Homo sapiens
cttataccatcatta

SEQ ID NO: 1075454 - DNA, 15 bp, Homo sapiens
ccttataccatcatt

SEQ ID NO: 1075455 - DNA, 15 bp, Homo sapiens
accttataccatcat

SEQ ID NO: 1075456 - DNA, 15 bp, Homo sapiens
taccttataccatca

SEQ ID NO: 1075457 - DNA, 15 bp, Homo sapiens
ataccttataccatc

SEQ ID NO: 1075458 - DNA, 15 bp, Homo sapiens
tataccttataccat

SEQ ID NO: 1075459 - DNA, 15 bp, Homo sapiens
ttataccttatacca

SEQ ID NO: 1075460 - DNA, 15 bp, Homo sapiens
attataccttatacc

SEQ ID NO: 1075461 - DNA, 15 bp, Homo sapiens
gattataccttatac

SEQ ID NO: 1075462 - DNA, 15 bp, Homo sapiens
ggattataccttata

SEQ ID NO: 1075463 - DNA, 15 bp, Homo sapiens
tggattataccttat

SEQ ID NO: 1075464 - DNA, 15 bp, Homo sapiens
atggattatacctta

SEQ ID NO: 1075465 - DNA, 15 bp, Homo sapiens
aatggattatacctt

SEQ ID NO: 1075466 - DNA, 15 bp, Homo sapiens
aaatggattatacct

SEQ ID NO: 1075467 - DNA, 15 bp, Homo sapiens
gaaatggattatacc

SEQ ID NO: 1075468 - DNA, 15 bp, Homo sapiens
tgaaatggattatac

SEQ ID NO: 1075469 - DNA, 15 bp, Homo sapiens
gtgaaatggattata

SEQ ID NO: 1075470 - DNA, 15 bp, Homo sapiens
cgtgaaatggattat

SEQ ID NO: 1075471 - DNA, 15 bp, Homo sapiens
gcgtgaaatggatta

SEQ ID NO: 1075472 - DNA, 15 bp, Homo sapiens
tgcgtgaaatggatt

SEQ ID NO: 1075473 - DNA, 15 bp, Homo sapiens
atgcgtgaaatggat

SEQ ID NO: 1075474 - DNA, 15 bp, Homo sapiens
tatgcgtgaaatgga

SEQ ID NO: 1075475 - DNA, 15 bp, Homo sapiens
atatgcgtgaaatgg

SEQ ID NO: 1075476 - DNA, 15 bp, Homo sapiens
aatatgcgtgaaatg

SEQ ID NO: 1075477 - DNA, 15 bp, Homo sapiens
aaatatgcgtgaaat

SEQ ID NO: 1075478 - DNA, 15 bp, Homo sapiens
caaatatgcgtgaaa

SEQ ID NO: 1075479 - DNA, 15 bp, Homo sapiens
gcaaatatgcgtgaa

SEQ ID NO: 1075480 - DNA, 15 bp, Homo sapiens
tgcaaatatgcgtga

SEQ ID NO: 1075481 - DNA, 15 bp, Homo sapiens
atgcaaatatgcgtg

SEQ ID NO: 1075482 - DNA, 15 bp, Homo sapiens
aatgcaaatatgcgt

SEQ ID NO: 1075483 - DNA, 15 bp, Homo sapiens
aaatgcaaatatgcg

SEQ ID NO: 1075484 - DNA, 15 bp, Homo sapiens
gaaatgcaaatatgc

SEQ ID NO: 1075485 - DNA, 15 bp, Homo sapiens
tgaaatgcaaatatg

SEQ ID NO: 1075486 - DNA, 15 bp, Homo sapiens
ttgaaatgcaaatat

SEQ ID NO: 1075487 - DNA, 15 bp, Homo sapiens
tttgaaatgcaaata

SEQ ID NO: 1075488 - DNA, 15 bp, Homo sapiens
ttttgaaatgcaaat

SEQ ID NO: 1075489 - DNA, 15 bp, Homo sapiens
tttttgaaatgcaaa

SEQ ID NO: 1075490 - DNA, 15 bp, Homo sapiens
ctttttgaaatgcaa

SEQ ID NO: 1075491 - DNA, 15 bp, Homo sapiens
cctttttgaaatgca

SEQ ID NO: 1075492 - DNA, 15 bp, Homo sapiens
tcctttttgaaatgc

SEQ ID NO: 1075493 - DNA, 15 bp, Homo sapiens
ttcctttttgaaatg

SEQ ID NO: 1075494 - DNA, 15 bp, Homo sapiens
gttcctttttgaaat

SEQ ID NO: 1075495 - DNA, 15 bp, Homo sapiens
agttcctttttgaaa

SEQ ID NO: 1075496 - DNA, 15 bp, Homo sapiens
gagttcctttttgaa

SEQ ID NO: 1075497 - DNA, 15 bp, Homo sapiens
agagttcctttttga

SEQ ID NO: 1075498 - DNA, 15 bp, Homo sapiens
aagagttcctttttg

SEQ ID NO: 1075499 - DNA, 15 bp, Homo sapiens
aaagagttccttttt

SEQ ID NO: 1075500 - DNA, 15 bp, Homo sapiens
taaagagttcctttt

SEQ ID NO: 1075501 - DNA, 15 bp, Homo sapiens
ttaaagagttccttt

SEQ ID NO: 1075502 - DNA, 15 bp, Homo sapiens
cttaaagagttcctt

SEQ ID NO: 1075503 - DNA, 15 bp, Homo sapiens
tcttaaagagttcct

SEQ ID NO: 1075504 - DNA, 15 bp, Homo sapiens
atcttaaagagttcc

SEQ ID NO: 1075505 - DNA, 15 bp, Homo sapiens
catcttaaagagttc

SEQ ID NO: 1075506 - DNA, 15 bp, Homo sapiens
ccatcttaaagagtt

SEQ ID NO: 1075507 - DNA, 15 bp, Homo sapiens
tccatcttaaagagt

SEQ ID NO: 1075508 - DNA, 15 bp, Homo sapiens
ttccatcttaaagag

SEQ ID NO: 1075509 - DNA, 15 bp, Homo sapiens
tttccatcttaaaga

SEQ ID NO: 1075510 - DNA, 15 bp, Homo sapiens
ttttccatcttaaag

SEQ ID NO: 1075511 - DNA, 15 bp, Homo sapiens
cttttccatcttaaa

SEQ ID NO: 1075512 - DNA, 15 bp, Homo sapiens
gcttttccatcttaa

SEQ ID NO: 1075513 - DNA, 15 bp, Homo sapiens
ggcttttccatctta

SEQ ID NO: 1075514 - DNA, 15 bp, Homo sapiens
aggcttttccatctt

SEQ ID NO: 1075515 - DNA, 15 bp, Homo sapiens
aaggcttttccatct

SEQ ID NO: 1075516 - DNA, 15 bp, Homo sapiens
gaaggcttttccatc

SEQ ID NO: 1075517 - DNA, 15 bp, Homo sapiens
tgaaggcttttccat

SEQ ID NO: 1075518 - DNA, 15 bp, Homo sapiens
ttgaaggcttttcca

SEQ ID NO: 1075519 - DNA, 15 bp, Homo sapiens
cttgaaggcttttcc

SEQ ID NO: 1075520 - DNA, 15 bp, Homo sapiens
tcttgaaggcttttc

SEQ ID NO: 1075521 - DNA, 15 bp, Homo sapiens
atcttgaaggctttt

SEQ ID NO: 1075522 - DNA, 15 bp, Homo sapiens
gatcttgaaggcttt

SEQ ID NO: 1075523 - DNA, 15 bp, Homo sapiens
ggatcttgaaggctt

SEQ ID NO: 1075524 - DNA, 15 bp, Homo sapiens
tggatcttgaaggct

SEQ ID NO: 1075525 - DNA, 15 bp, Homo sapiens
gtggatcttgaaggc

SEQ ID NO: 1075526 - DNA, 15 bp, Homo sapiens
tgtggatcttgaagg

SEQ ID NO: 1075527 - DNA, 15 bp, Homo sapiens
ctgtggatcttgaag

SEQ ID NO: 1075528 - DNA, 15 bp, Homo sapiens
cctgtggatcttgaa

SEQ ID NO: 1075529 - DNA, 15 bp, Homo sapiens
tcctgtggatcttga

SEQ ID NO: 1075530 - DNA, 15 bp, Homo sapiens
ttcctgtggatcttg

SEQ ID NO: 1075531 - DNA, 15 bp, Homo sapiens
attcctgtggatctt

SEQ ID NO: 1075532 - DNA, 15 bp, Homo sapiens
cattcctgtggatct

SEQ ID NO: 1075533 - DNA, 15 bp, Homo sapiens
tcattcctgtggatc

SEQ ID NO: 1075534 - DNA, 15 bp, Homo sapiens
ttcattcctgtggat

SEQ ID NO: 1075535 - DNA, 15 bp, Homo sapiens
cttcattcctgtgga

SEQ ID NO: 1075536 - DNA, 15 bp, Homo sapiens
gcttcattcctgtgg

SEQ ID NO: 1075537 - DNA, 15 bp, Homo sapiens
agcttcattcctgtg

SEQ ID NO: 1075538 - DNA, 15 bp, Homo sapiens
tagcttcattcctgt

SEQ ID NO: 1075539 - DNA, 15 bp, Homo sapiens
atagcttcattcctg

SEQ ID NO: 1075540 - DNA, 15 bp, Homo sapiens
tatagcttcattcct

SEQ ID NO: 1075541 - DNA, 15 bp, Homo sapiens
ttatagcttcattcc

SEQ ID NO: 1075542 - DNA, 15 bp, Homo sapiens
attatagcttcattc

SEQ ID NO: 1075543 - DNA, 15 bp, Homo sapiens
cattatagcttcatt

SEQ ID NO: 1075544 - DNA, 15 bp, Homo sapiens
ccattatagcttcat

SEQ ID NO: 1075545 - DNA, 15 bp, Homo sapiens
accattatagcttca

SEQ ID NO: 1075546 - DNA, 15 bp, Homo sapiens
caccattatagcttc

SEQ ID NO: 1075547 - DNA, 15 bp, Homo sapiens
tcaccattatagctt

SEQ ID NO: 1075548 - DNA, 15 bp, Homo sapiens
ttcaccattatagct

SEQ ID NO: 1075549 - DNA, 15 bp, Homo sapiens
cttcaccattatagc

SEQ ID NO: 1075550 - DNA, 15 bp, Homo sapiens
gcttcaccattatag

SEQ ID NO: 1075551 - DNA, 15 bp, Homo sapiens
agcttcaccattata

SEQ ID NO: 1075552 - DNA, 15 bp, Homo sapiens
tagcttcaccattat

SEQ ID NO: 1075553 - DNA, 15 bp, Homo sapiens
atagcttcaccatta

SEQ ID NO: 1075554 - DNA, 15 bp, Homo sapiens
tatagcttcaccatt

SEQ ID NO: 1075555 - DNA, 15 bp, Homo sapiens
ttatagcttcaccat

SEQ ID NO: 1075556 - DNA, 15 bp, Homo sapiens
attatagcttcacca

SEQ ID NO: 1075557 - DNA, 15 bp, Homo sapiens
aattatagcttcacc

SEQ ID NO: 1075558 - DNA, 15 bp, Homo sapiens
caattatagcttcac

SEQ ID NO: 1075559 - DNA, 15 bp, Homo sapiens
ccaattatagcttca

SEQ ID NO: 1075560 - DNA, 15 bp, Homo sapiens
accaattatagcttc

SEQ ID NO: 1075561 - DNA, 15 bp, Homo sapiens
gaccaattatagctt

SEQ ID NO: 1075562 - DNA, 15 bp, Homo sapiens
tgaccaattatagct

SEQ ID NO: 1075563 - DNA, 15 bp, Homo sapiens
atgaccaattatagc

SEQ ID NO: 1075564 - DNA, 15 bp, Homo sapiens
aatgaccaattatag

SEQ ID NO: 1075565 - DNA, 15 bp, Homo sapiens
taatgaccaattata

SEQ ID NO: 1075566 - DNA, 15 bp, Homo sapiens
ctaatgaccaattat

SEQ ID NO: 1075567 - DNA, 15 bp, Homo sapiens
gctaatgaccaatta

SEQ ID NO: 1075568 - DNA, 15 bp, Homo sapiens
agctaatgaccaatt

SEQ ID NO: 1075569 - DNA, 15 bp, Homo sapiens
gagctaatgaccaat

SEQ ID NO: 1075570 - DNA, 15 bp, Homo sapiens
ggagctaatgaccaa

SEQ ID NO: 1075571 - DNA, 15 bp, Homo sapiens
tggagctaatgacca

SEQ ID NO: 1075572 - DNA, 15 bp, Homo sapiens
ttggagctaatgacc

SEQ ID NO: 1075573 - DNA, 15 bp, Homo sapiens
gttggagctaatgac

SEQ ID NO: 1075574 - DNA, 15 bp, Homo sapiens
tgttggagctaatga

SEQ ID NO: 1075575 - DNA, 15 bp, Homo sapiens
ctgttggagctaatg

SEQ ID NO: 1075576 - DNA, 15 bp, Homo sapiens
tctgttggagctaat

SEQ ID NO: 1075577 - DNA, 15 bp, Homo sapiens
ctctgttggagctaa

SEQ ID NO: 1075578 - DNA, 15 bp, Homo sapiens
cctctgttggagcta

SEQ ID NO: 1075579 - DNA, 15 bp, Homo sapiens
tcctctgttggagct

SEQ ID NO: 1075580 - DNA, 15 bp, Homo sapiens
ttcctctgttggagc

SEQ ID NO: 1075581 - DNA, 15 bp, Homo sapiens
cttcctctgttggag

SEQ ID NO: 1075582 - DNA, 15 bp, Homo sapiens
tcttcctctgttgga

SEQ ID NO: 1075583 - DNA, 15 bp, Homo sapiens
ctcttcctctgttgg

SEQ ID NO: 1075584 - DNA, 15 bp, Homo sapiens
tctcttcctctgttg

SEQ ID NO: 1075585 - DNA, 15 bp, Homo sapiens
ctctcttcctctgtt

SEQ ID NO: 1075586 - DNA, 15 bp, Homo sapiens
tctctcttcctctgt

SEQ ID NO: 1075587 - DNA, 15 bp, Homo sapiens
ctctctcttcctctg

SEQ ID NO: 1075588 - DNA, 15 bp, Homo sapiens
acctctctcttcctc

SEQ ID NO: 1075589 - DNA, 15 bp, Homo sapiens
tacctctctcttcct

SEQ ID NO: 1075590 - DNA, 15 bp, Homo sapiens
ctacctctctcttcc

SEQ ID NO: 1075591 - DNA, 15 bp, Homo sapiens
actacctctctcttc

SEQ ID NO: 1075592 - DNA, 15 bp, Homo sapiens
tactacctctctctt

SEQ ID NO: 1075593 - DNA, 15 bp, Homo sapiens
ctactacctctctct

SEQ ID NO: 1075594 - DNA, 15 bp, Homo sapiens
tctactacctctctc

SEQ ID NO: 1075595 - DNA, 15 bp, Homo sapiens
ctctactacctctct

SEQ ID NO: 1075596 - DNA, 15 bp, Homo sapiens
gctctactacctctc

SEQ ID NO: 1075597 - DNA, 15 bp, Homo sapiens
agctctactacctct

SEQ ID NO: 1075598 - DNA, 15 bp, Homo sapiens
cagctctactacctc

SEQ ID NO: 1075599 - DNA, 15 bp, Homo sapiens
tcagctctactacct

SEQ ID NO: 1075600 - DNA, 15 bp, Homo sapiens
atcagctctactacc

SEQ ID NO: 1075601 - DNA, 15 bp, Homo sapiens
tatcagctctactac

SEQ ID NO: 1075602 - DNA, 15 bp, Homo sapiens
atatcagctctacta

SEQ ID NO: 1075603 - DNA, 15 bp, Homo sapiens
aatatcagctctact

SEQ ID NO: 1075604 - DNA, 15 bp, Homo sapiens
gaatatcagctctac

SEQ ID NO: 1075605 - DNA, 15 bp, Homo sapiens
agaatatcagctcta

SEQ ID NO: 1075606 - DNA, 15 bp, Homo sapiens
cagaatatcagctct

SEQ ID NO: 1075607 - DNA, 15 bp, Homo sapiens
ccagaatatcagctc

SEQ ID NO: 1075608 - DNA, 15 bp, Homo sapiens
tccagaatatcagct

SEQ ID NO: 1075609 - DNA, 15 bp, Homo sapiens
ctccagaatatcagc

SEQ ID NO: 1075610 - DNA, 15 bp, Homo sapiens
actccagaatatcag

SEQ ID NO: 1075611 - DNA, 15 bp, Homo sapiens
aactccagaatatca

SEQ ID NO: 1075612 - DNA, 15 bp, Homo sapiens
caactccagaatatc

SEQ ID NO: 1075613 - DNA, 15 bp, Homo sapiens
ccaactccagaatat

SEQ ID NO: 1075614 - DNA, 15 bp, Homo sapiens
cccaactccagaata

SEQ ID NO: 1075615 - DNA, 15 bp, Homo sapiens
ccccaactccagaat

SEQ ID NO: 1075616 - DNA, 15 bp, Homo sapiens
tccccaactccagaa

SEQ ID NO: 1075617 - DNA, 15 bp, Homo sapiens
ctccccaactccaga

SEQ ID NO: 1075618 - DNA, 15 bp, Homo sapiens
tctccccaactccag

SEQ ID NO: 1075619 - DNA, 15 bp, Homo sapiens
ctctccccaactcca

SEQ ID NO: 1075620 - DNA, 15 bp, Homo sapiens
actctccccaactcc

SEQ ID NO: 1075621 - DNA, 15 bp, Homo sapiens
aactctccccaactc

SEQ ID NO: 1075622 - DNA, 15 bp, Homo sapiens
taactctccccaact

SEQ ID NO: 1075623 - DNA, 15 bp, Homo sapiens
gtaactctccccaac

SEQ ID NO: 1075624 - DNA, 15 bp, Homo sapiens
ggtaactctccccaa

SEQ ID NO: 1075625 - DNA, 15 bp, Homo sapiens
aggtaactctcccca

SEQ ID NO: 1075626 - DNA, 15 bp, Homo sapiens
taggtaactctcccc

SEQ ID NO: 1075627 - DNA, 15 bp, Homo sapiens
gtaggtaactctccc

SEQ ID NO: 1075628 - DNA, 15 bp, Homo sapiens
agtaggtaactctcc

SEQ ID NO: 1075629 - DNA, 15 bp, Homo sapiens
gagtaggtaactctc

SEQ ID NO: 1075630 - DNA, 15 bp, Homo sapiens
ggagtaggtaactct

SEQ ID NO: 1075631 - DNA, 15 bp, Homo sapiens
aggagtaggtaactc

SEQ ID NO: 1075632 - DNA, 15 bp, Homo sapiens
taggagtaggtaact

SEQ ID NO: 1075633 - DNA, 15 bp, Homo sapiens
ttaggagtaggtaac

SEQ ID NO: 1075634 - DNA, 15 bp, Homo sapiens
cttaggagtaggtaa

SEQ ID NO: 1075635 - DNA, 15 bp, Homo sapiens
ccttaggagtaggta

SEQ ID NO: 1075636 - DNA, 15 bp, Homo sapiens
gccttaggagtaggt

SEQ ID NO: 1075637 - DNA, 15 bp, Homo sapiens
ggccttaggagtagg

SEQ ID NO: 1075638 - DNA, 15 bp, Homo sapiens
tggccttaggagtag

SEQ ID NO: 1075639 - DNA, 15 bp, Homo sapiens
ttggccttaggagta

SEQ ID NO: 1075640 - DNA, 15 bp, Homo sapiens
gttggccttaggagt

SEQ ID NO: 1075641 - DNA, 15 bp, Homo sapiens
ggttggccttaggag

SEQ ID NO: 1075642 - DNA, 15 bp, Homo sapiens
aggttggccttagga

SEQ ID NO: 1075643 - DNA, 15 bp, Homo sapiens
aaggttggccttagg

SEQ ID NO: 1075644 - DNA, 15 bp, Homo sapiens
caaggttggccttag

SEQ ID NO: 1075645 - DNA, 15 bp, Homo sapiens
tcaaggttggcctta

SEQ ID NO: 1075646 - DNA, 15 bp, Homo sapiens
ttcaaggttggcctt

SEQ ID NO: 1075647 - DNA, 15 bp, Homo sapiens
gttcaaggttggcct

SEQ ID NO: 1075648 - DNA, 15 bp, Homo sapiens
ggttcaaggttggcc

SEQ ID NO: 1075649 - DNA, 15 bp, Homo sapiens
aggttcaaggttggc

SEQ ID NO: 1075650 - DNA, 15 bp, Homo sapiens
taggttcaaggttgg

SEQ ID NO: 1075651 - DNA, 15 bp, Homo sapiens
ttaggttcaaggttg

SEQ ID NO: 1075652 - DNA, 15 bp, Homo sapiens
gttaggttcaaggtt

SEQ ID NO: 1075653 - DNA, 15 bp, Homo sapiens
ggttaggttcaaggt

SEQ ID NO: 1075654 - DNA, 15 bp, Homo sapiens
gggttaggttcaagg

SEQ ID NO: 1075655 - DNA, 15 bp, Homo sapiens
ggggttaggttcaag

SEQ ID NO: 1075656 - DNA, 15 bp, Homo sapiens
aggggttaggttcaa

SEQ ID NO: 1075657 - DNA, 15 bp, Homo sapiens
taggggttaggttca

SEQ ID NO: 1075658 - DNA, 15 bp, Homo sapiens
ttaggggttaggttc

SEQ ID NO: 1075659 - DNA, 15 bp, Homo sapiens
gttaggggttaggtt

SEQ ID NO: 1075660 - DNA, 15 bp, Homo sapiens
ggttaggggttaggt

SEQ ID NO: 1075661 - DNA, 15 bp, Homo sapiens
gggttaggggttagg

SEQ ID NO: 1075662 - DNA, 15 bp, Homo sapiens
ggggttaggggttag

SEQ ID NO: 1075663 - DNA, 15 bp, Homo sapiens
aggggttaggggtta

SEQ ID NO: 1075664 - DNA, 15 bp, Homo sapiens
gaggggttaggggtt

SEQ ID NO: 1075665 - DNA, 15 bp, Homo sapiens
agaggggttaggggt

SEQ ID NO: 1075666 - DNA, 15 bp, Homo sapiens
gagaggggttagggg

SEQ ID NO: 1075667 - DNA, 15 bp, Homo sapiens
ggagaggggttaggg

SEQ ID NO: 1075668 - DNA, 15 bp, Homo sapiens
gggagaggggttagg

SEQ ID NO: 1075669 - DNA, 15 bp, Homo sapiens
tgggagaggggttag

SEQ ID NO: 1075670 - DNA, 15 bp, Homo sapiens
ttgggagaggggtta

SEQ ID NO: 1075671 - DNA, 15 bp, Homo sapiens
gttgggagaggggtt

SEQ ID NO: 1075672 - DNA, 15 bp, Homo sapiens
tgttgggagaggggt

SEQ ID NO: 1075673 - DNA, 15 bp, Homo sapiens
ctgttgggagagggg

SEQ ID NO: 1075674 - DNA, 15 bp, Homo sapiens
actgttgggagaggg

SEQ ID NO: 1075675 - DNA, 15 bp, Homo sapiens
gactgttgggagagg

SEQ ID NO: 1075676 - DNA, 15 bp, Homo sapiens
agactgttgggagag

SEQ ID NO: 1075677 - DNA, 15 bp, Homo sapiens
cagactgttgggaga

SEQ ID NO: 1075678 - DNA, 15 bp, Homo sapiens
acagactgttgggag

SEQ ID NO: 1075679 - DNA, 15 bp, Homo sapiens
aacagactgttggga

SEQ ID NO: 1075680 - DNA, 15 bp, Homo sapiens
gaacagactgttggg

SEQ ID NO: 1075681 - DNA, 15 bp, Homo sapiens
agaacagactgttgg

SEQ ID NO: 1075682 - DNA, 15 bp, Homo sapiens
aagaacagactgttg

SEQ ID NO: 1075683 - DNA, 15 bp, Homo sapiens
aaagaacagactgtt

SEQ ID NO: 1075684 - DNA, 15 bp, Homo sapiens
aaaagaacagactgt

SEQ ID NO: 1075685 - DNA, 15 bp, Homo sapiens
aaaaagaacagactg

SEQ ID NO: 1075686 - DNA, 15 bp, Homo sapiens
taaaaagaacagact

SEQ ID NO: 1075687 - DNA, 15 bp, Homo sapiens
gtaaaaagaacagac

SEQ ID NO: 1075688 - DNA, 15 bp, Homo sapiens
agtaaaaagaacaga

SEQ ID NO: 1075689 - DNA, 15 bp, Homo sapiens
gagtaaaaagaacag

SEQ ID NO: 1075690 - DNA, 15 bp, Homo sapiens
tgagtaaaaagaaca

SEQ ID NO: 1075691 - DNA, 15 bp, Homo sapiens
atgagtaaaaagaac

SEQ ID NO: 1075692 - DNA, 15 bp, Homo sapiens
catgagtaaaaagaa

SEQ ID NO: 1075693 - DNA, 15 bp, Homo sapiens
tcatgagtaaaaaga

SEQ ID NO: 1075694 - DNA, 15 bp, Homo sapiens
ttcatgagtaaaaag

SEQ ID NO: 1075695 - DNA, 15 bp, Homo sapiens
attcatgagtaaaaa

SEQ ID NO: 1075696 - DNA, 15 bp, Homo sapiens
aattcatgagtaaaa

SEQ ID NO: 1075697 - DNA, 15 bp, Homo sapiens
aaattcatgagtaaa

SEQ ID NO: 1075698 - DNA, 15 bp, Homo sapiens
gaaattcatgagtaa

SEQ ID NO: 1075699 - DNA, 15 bp, Homo sapiens
agaaattcatgagta

SEQ ID NO: 1075700 - DNA, 15 bp, Homo sapiens
cagaaattcatgagt

SEQ ID NO: 1075701 - DNA, 15 bp, Homo sapiens
gcagaaattcatgag

SEQ ID NO: 1075702 - DNA, 15 bp, Homo sapiens
ggcagaaattcatga

SEQ ID NO: 1075703 - DNA, 15 bp, Homo sapiens
aggcagaaattcatg

SEQ ID NO: 1075704 - DNA, 15 bp, Homo sapiens
gaggcagaaattcat

SEQ ID NO: 1075705 - DNA, 15 bp, Homo sapiens
tgaggcagaaattca

SEQ ID NO: 1075706 - DNA, 15 bp, Homo sapiens
gtgaggcagaaattc

SEQ ID NO: 1075707 - DNA, 15 bp, Homo sapiens
ggtgaggcagaaatt

SEQ ID NO: 1075708 - DNA, 15 bp, Homo sapiens
cggtgaggcagaaat

SEQ ID NO: 1075709 - DNA, 15 bp, Homo sapiens
acggtgaggcagaaa

SEQ ID NO: 1075710 - DNA, 15 bp, Homo sapiens
cacggtgaggcagaa

SEQ ID NO: 1075711 - DNA, 15 bp, Homo sapiens
ccacggtgaggcaga

SEQ ID NO: 1075712 - DNA, 15 bp, Homo sapiens
tccacggtgaggcag

SEQ ID NO: 1075713 - DNA, 15 bp, Homo sapiens
ctccacggtgaggca

SEQ ID NO: 1075714 - DNA, 15 bp, Homo sapiens
gctccacggtgaggc

SEQ ID NO: 1075715 - DNA, 15 bp, Homo sapiens
agctccacggtgagg

SEQ ID NO: 1075716 - DNA, 15 bp, Homo sapiens
gagctccacggtgag

SEQ ID NO: 1075717 - DNA, 15 bp, Homo sapiens
agagctccacggtga

SEQ ID NO: 1075718 - DNA, 15 bp, Homo sapiens
ttcaaaccttgatgt

SEQ ID NO: 1075719 - DNA, 15 bp, Homo sapiens
gttcaaaccttgatg

SEQ ID NO: 1075720 - DNA, 15 bp, Homo sapiens
agttcaaaccttgat

SEQ ID NO: 1075721 - DNA, 15 bp, Homo sapiens
aagttcaaaccttga

SEQ ID NO: 1075722 - DNA, 15 bp, Homo sapiens
taagttcaaaccttg

SEQ ID NO: 1075723 - DNA, 15 bp, Homo sapiens
ctaagttcaaacctt

SEQ ID NO: 1075724 - DNA, 15 bp, Homo sapiens
cctaagttcaaacct

SEQ ID NO: 1075725 - DNA, 15 bp, Homo sapiens
acctaagttcaaacc

SEQ ID NO: 1075726 - DNA, 15 bp, Homo sapiens
cacctaagttcaaac

SEQ ID NO: 1075727 - DNA, 15 bp, Homo sapiens
ccacctaagttcaaa

SEQ ID NO: 1075728 - DNA, 15 bp, Homo sapiens
gccacctaagttcaa

SEQ ID NO: 1075729 - DNA, 15 bp, Homo sapiens
agccacctaagttca

SEQ ID NO: 1075730 - DNA, 15 bp, Homo sapiens
tagccacctaagttc

SEQ ID NO: 1075731 - DNA, 15 bp, Homo sapiens
ttagccacctaagtt

SEQ ID NO: 1075732 - DNA, 15 bp, Homo sapiens
attagccacctaagt

SEQ ID NO: 1075733 - DNA, 15 bp, Homo sapiens
tattagccacctaag

SEQ ID NO: 1075734 - DNA, 15 bp, Homo sapiens
ttattagccacctaa

SEQ ID NO: 1075735 - DNA, 15 bp, Homo sapiens
gttattagccaccta

SEQ ID NO: 1075736 - DNA, 15 bp, Homo sapiens
tgttattagccacct

SEQ ID NO: 1075737 - DNA, 15 bp, Homo sapiens
atgttattagccacc

SEQ ID NO: 1075738 - DNA, 15 bp, Homo sapiens
tatgttattagccac

SEQ ID NO: 1075739 - DNA, 15 bp, Homo sapiens
gtatgttattagcca

SEQ ID NO: 1075740 - DNA, 15 bp, Homo sapiens
ggtatgttattagcc

SEQ ID NO: 1075741 - DNA, 15 bp, Homo sapiens
aggtatgttattagc

SEQ ID NO: 1075742 - DNA, 15 bp, Homo sapiens
aaggtatgttattag

SEQ ID NO: 1075743 - DNA, 15 bp, Homo sapiens
aaaggtatgttatta

SEQ ID NO: 1075744 - DNA, 15 bp, Homo sapiens
aaaaggtatgttatt

SEQ ID NO: 1075745 - DNA, 15 bp, Homo sapiens
aaaaaggtatgttat

SEQ ID NO: 1075746 - DNA, 15 bp, Homo sapiens
taaaaaggtatgtta

SEQ ID NO: 1075747 - DNA, 15 bp, Homo sapiens
ttaaaaaggtatgtt

SEQ ID NO: 1075748 - DNA, 15 bp, Homo sapiens
tttaaaaaggtatgt

SEQ ID NO: 1075749 - DNA, 15 bp, Homo sapiens
ttttaaaaaggtatg

SEQ ID NO: 1075750 - DNA, 15 bp, Homo sapiens
tttttaaaaaggtat

SEQ ID NO: 1075751 - DNA, 15 bp, Homo sapiens
atttttaaaaaggta

SEQ ID NO: 1075752 - DNA, 15 bp, Homo sapiens
catttttaaaaaggt

SEQ ID NO: 1075753 - DNA, 15 bp, Homo sapiens
tcatttttaaaaagg

SEQ ID NO: 1075754 - DNA, 15 bp, Homo sapiens
ctcatttttaaaaag

SEQ ID NO: 1075755 - DNA, 15 bp, Homo sapiens
tctcatttttaaaaa

SEQ ID NO: 1075756 - DNA, 15 bp, Homo sapiens
ttctcatttttaaaa

SEQ ID NO: 1075757 - DNA, 15 bp, Homo sapiens
attctcatttttaaa

SEQ ID NO: 1075758 - DNA, 15 bp, Homo sapiens
cattctcatttttaa

SEQ ID NO: 1075759 - DNA, 15 bp, Homo sapiens
tttcattctcatttt

SEQ ID NO: 1075760 - DNA, 15 bp, Homo sapiens
gtttcattctcattt

SEQ ID NO: 1075761 - DNA, 15 bp, Homo sapiens
tgtttcattctcatt

SEQ ID NO: 1075762 - DNA, 15 bp, Homo sapiens
atgtttcattctcat

SEQ ID NO: 1075763 - DNA, 15 bp, Homo sapiens
catgtttcattctca

SEQ ID NO: 1075764 - DNA, 15 bp, Homo sapiens
acatgtttcattctc

SEQ ID NO: 1075765 - DNA, 15 bp, Homo sapiens
aacatgtttcattct

SEQ ID NO: 1075766 - DNA, 15 bp, Homo sapiens
aaacatgtttcattc

SEQ ID NO: 1075767 - DNA, 15 bp, Homo sapiens
taaacatgtttcatt

SEQ ID NO: 1075768 - DNA, 15 bp, Homo sapiens
ataaacatgtttcat

SEQ ID NO: 1075769 - DNA, 15 bp, Homo sapiens
tataaacatgtttca

SEQ ID NO: 1075770 - DNA, 15 bp, Homo sapiens
cagcgggaccccatc

SEQ ID NO: 1075771 - DNA, 15 bp, Homo sapiens
acagcgggaccccat

SEQ ID NO: 1075772 - DNA, 15 bp, Homo sapiens
cacagcgggacccca

SEQ ID NO: 1075773 - DNA, 15 bp, Homo sapiens
gcacagcgggacccc

SEQ ID NO: 1075774 - DNA, 15 bp, Homo sapiens
tgcacagcgggaccc

SEQ ID NO: 1075775 - DNA, 15 bp, Homo sapiens
ctgcacagcgggacc

SEQ ID NO: 1075776 - DNA, 15 bp, Homo sapiens
cctgcacagcgggac

SEQ ID NO: 1075777 - DNA, 15 bp, Homo sapiens
tcctgcacagcggga

SEQ ID NO: 1075778 - DNA, 15 bp, Homo sapiens
ctcctgcacagcggg

SEQ ID NO: 1075779 - DNA, 15 bp, Homo sapiens
gctcctgcacagcgg

SEQ ID NO: 1075780 - DNA, 15 bp, Homo sapiens
tgctcctgcacagcg

SEQ ID NO: 1075781 - DNA, 15 bp, Homo sapiens
gtgctcctgcacagc

SEQ ID NO: 1075782 - DNA, 15 bp, Homo sapiens
cgtgctcctgcacag

SEQ ID NO: 1075783 - DNA, 15 bp, Homo sapiens
acgtgctcctgcaca

SEQ ID NO: 1075784 - DNA, 15 bp, Homo sapiens
cacgtgctcctgcac

SEQ ID NO: 1075785 - DNA, 15 bp, Homo sapiens
acacgtgctcctgca

SEQ ID NO: 1075786 - DNA, 15 bp, Homo sapiens
cacacgtgctcctgc

SEQ ID NO: 1075787 - DNA, 15 bp, Homo sapiens
tcacacgtgctcctg

SEQ ID NO: 1075788 - DNA, 15 bp, Homo sapiens
ttcacacgtgctcct

SEQ ID NO: 1075789 - DNA, 15 bp, Homo sapiens
cttcacacgtgctcc

SEQ ID NO: 1075790 - DNA, 15 bp, Homo sapiens
ccttcacacgtgctc

SEQ ID NO: 1075791 - DNA, 15 bp, Homo sapiens
cccttcacacgtgct

SEQ ID NO: 1075792 - DNA, 15 bp, Homo sapiens
ccccttcacacgtgc

SEQ ID NO: 1075793 - DNA, 15 bp, Homo sapiens
tccccttcacacgtg

SEQ ID NO: 1075794 - DNA, 15 bp, Homo sapiens
atccccttcacacgt

SEQ ID NO: 1075795 - DNA, 15 bp, Homo sapiens
catccccttcacacg

SEQ ID NO: 1075796 - DNA, 15 bp, Homo sapiens
ccatccccttcacac

SEQ ID NO: 1075797 - DNA, 15 bp, Homo sapiens
cccatccccttcaca

SEQ ID NO: 1075798 - DNA, 15 bp, Homo sapiens
ccccatccccttcac

SEQ ID NO: 1075799 - DNA, 15 bp, Homo sapiens
cccccatccccttca

SEQ ID NO: 1075800 - DNA, 15 bp, Homo sapiens
gcccccatccccttc

SEQ ID NO: 1075801 - DNA, 15 bp, Homo sapiens
agcccccatcccctt

SEQ ID NO: 1075802 - DNA, 15 bp, Homo sapiens
cagcccccatcccct

SEQ ID NO: 1075803 - DNA, 15 bp, Homo sapiens
ccagcccccatcccc

SEQ ID NO: 1075804 - DNA, 15 bp, Homo sapiens
gccagcccccatccc

SEQ ID NO: 1075805 - DNA, 15 bp, Homo sapiens
tgccagcccccatcc

SEQ ID NO: 1075806 - DNA, 15 bp, Homo sapiens
gtgccagcccccatc

SEQ ID NO: 1075807 - DNA, 15 bp, Homo sapiens
ggtgccagcccccat

SEQ ID NO: 1075808 - DNA, 15 bp, Homo sapiens
aggtgccagccccca

SEQ ID NO: 1075809 - DNA, 15 bp, Homo sapiens
caggtgccagccccc

SEQ ID NO: 1075810 - DNA, 15 bp, Homo sapiens
tcaggtgccagcccc

SEQ ID NO: 1075811 - DNA, 15 bp, Homo sapiens
ctcaggtgccagccc

SEQ ID NO: 1075812 - DNA, 15 bp, Homo sapiens
cctcaggtgccagcc

SEQ ID NO: 1075813 - DNA, 15 bp, Homo sapiens
ccctcaggtgccagc

SEQ ID NO: 1075814 - DNA, 15 bp, Homo sapiens
gccctcaggtgccag

SEQ ID NO: 1075815 - DNA, 15 bp, Homo sapiens
cgccctcaggtgcca

SEQ ID NO: 1075816 - DNA, 15 bp, Homo sapiens
gcgccctcaggtgcc

SEQ ID NO: 1075817 - DNA, 15 bp, Homo sapiens
tgcgccctcaggtgc

SEQ ID NO: 1075818 - DNA, 15 bp, Homo sapiens
ctgcgccctcaggtg

SEQ ID NO: 1075819 - DNA, 15 bp, Homo sapiens
cctgcgccctcaggt

SEQ ID NO: 1075820 - DNA, 15 bp, Homo sapiens
ccctgcgccctcagg

SEQ ID NO: 1075821 - DNA, 15 bp, Homo sapiens
gccctgcgccctcag

SEQ ID NO: 1075822 - DNA, 15 bp, Homo sapiens
cgccctgcgccctca

SEQ ID NO: 1075823 - DNA, 15 bp, Homo sapiens
acgccctgcgccctc

SEQ ID NO: 1075824 - DNA, 15 bp, Homo sapiens
cacgccctgcgccct

SEQ ID NO: 1075825 - DNA, 15 bp, Homo sapiens
ccacgccctgcgccc

SEQ ID NO: 1075826 - DNA, 15 bp, Homo sapiens
cccacgccctgcgcc

SEQ ID NO: 1075827 - DNA, 15 bp, Homo sapiens
ccccacgccctgcgc

SEQ ID NO: 1075828 - DNA, 15 bp, Homo sapiens
accccacgccctgcg

SEQ ID NO: 1075829 - DNA, 15 bp, Homo sapiens
caccccacgccctgc

SEQ ID NO: 1075830 - DNA, 15 bp, Homo sapiens
ccaccccacgccctg

SEQ ID NO: 1075831 - DNA, 15 bp, Homo sapiens
cccaccccacgccct

SEQ ID NO: 1075832 - DNA, 15 bp, Homo sapiens
gcccaccccacgccc

SEQ ID NO: 1075833 - DNA, 15 bp, Homo sapiens
ggcccaccccacgcc

SEQ ID NO: 1075834 - DNA, 15 bp, Homo sapiens
gggcccaccccacgc

SEQ ID NO: 1075835 - DNA, 15 bp, Homo sapiens
ggggcccaccccacg

SEQ ID NO: 1075836 - DNA, 15 bp, Homo sapiens
cggggcccaccccac

SEQ ID NO: 1075837 - DNA, 15 bp, Homo sapiens
ccggggcccacccca

SEQ ID NO: 1075838 - DNA, 15 bp, Homo sapiens
gccggggcccacccc

SEQ ID NO: 1075839 - DNA, 15 bp, Homo sapiens
tgccggggcccaccc

SEQ ID NO: 1075840 - DNA, 15 bp, Homo sapiens
gtgccggggcccacc

SEQ ID NO: 1075841 - DNA, 15 bp, Homo sapiens
ggtgccggggcccac

SEQ ID NO: 1075842 - DNA, 15 bp, Homo sapiens
gggtgccggggccca

SEQ ID NO: 1075843 - DNA, 15 bp, Homo sapiens
ggggtgccggggccc

SEQ ID NO: 1075844 - DNA, 15 bp, Homo sapiens
aggggtgccggggcc

SEQ ID NO: 1075845 - DNA, 15 bp, Homo sapiens
caggggtgccggggc

SEQ ID NO: 1075846 - DNA, 15 bp, Homo sapiens
tcaggggtgccgggg

SEQ ID NO: 1075847 - DNA, 15 bp, Homo sapiens
atcaggggtgccggg

SEQ ID NO: 1075848 - DNA, 15 bp, Homo sapiens
gatcaggggtgccgg

SEQ ID NO: 1075849 - DNA, 15 bp, Homo sapiens
agatcaggggtgccg

SEQ ID NO: 1075850 - DNA, 15 bp, Homo sapiens
cagatcaggggtgcc

SEQ ID NO: 1075851 - DNA, 15 bp, Homo sapiens
ccagatcaggggtgc

SEQ ID NO: 1075852 - DNA, 15 bp, Homo sapiens
accagatcaggggtg

SEQ ID NO: 1075853 - DNA, 15 bp, Homo sapiens
taccagatcaggggt

SEQ ID NO: 1075854 - DNA, 15 bp, Homo sapiens
gtaccagatcagggg

SEQ ID NO: 1075855 - DNA, 15 bp, Homo sapiens
tgtaccagatcaggg

SEQ ID NO: 1075856 - DNA, 15 bp, Homo sapiens
ctgtaccagatcagg

SEQ ID NO: 1075857 - DNA, 15 bp, Homo sapiens
actgtaccagatcag

SEQ ID NO: 1075858 - DNA, 15 bp, Homo sapiens
cactgtaccagatca

SEQ ID NO: 1075859 - DNA, 15 bp, Homo sapiens
acactgtaccagatc

SEQ ID NO: 1075860 - DNA, 15 bp, Homo sapiens
gacactgtaccagat

SEQ ID NO: 1075861 - DNA, 15 bp, Homo sapiens
agacactgtaccaga

SEQ ID NO: 1075862 - DNA, 15 bp, Homo sapiens
cagacactgtaccag

SEQ ID NO: 1075863 - DNA, 15 bp, Homo sapiens
ccagacactgtacca

SEQ ID NO: 1075864 - DNA, 15 bp, Homo sapiens
gccagacactgtacc

SEQ ID NO: 1075865 - DNA, 15 bp, Homo sapiens
ggccagacactgtac

SEQ ID NO: 1075866 - DNA, 15 bp, Homo sapiens
aggccagacactgta

SEQ ID NO: 1075867 - DNA, 15 bp, Homo sapiens
caggccagacactgt

SEQ ID NO: 1075868 - DNA, 15 bp, Homo sapiens
gcaggccagacactg

SEQ ID NO: 1075869 - DNA, 15 bp, Homo sapiens
ggcaggccagacact

SEQ ID NO: 1075870 - DNA, 15 bp, Homo sapiens
gggcaggccagacac

SEQ ID NO: 1075871 - DNA, 15 bp, Homo sapiens
ggggcaggccagaca

SEQ ID NO: 1075872 - DNA, 15 bp, Homo sapiens
tggggcaggccagac

SEQ ID NO: 1075873 - DNA, 15 bp, Homo sapiens
atggggcaggccaga

SEQ ID NO: 1075874 - DNA, 15 bp, Homo sapiens
catggggcaggccag

SEQ ID NO: 1075875 - DNA, 15 bp, Homo sapiens
ccatggggcaggcca

SEQ ID NO: 1075876 - DNA, 15 bp, Homo sapiens
cccatggggcaggcc

SEQ ID NO: 1075877 - DNA, 15 bp, Homo sapiens
ccccatggggcaggc

SEQ ID NO: 1075878 - DNA, 15 bp, Homo sapiens
gccccatggggcagg

SEQ ID NO: 1075879 - DNA, 15 bp, Homo sapiens
ggccccatggggcag

SEQ ID NO: 1075880 - DNA, 15 bp, Homo sapiens
cggccccatggggca

SEQ ID NO: 1075881 - DNA, 15 bp, Homo sapiens
ccggccccatggggc

SEQ ID NO: 1075882 - DNA, 15 bp, Homo sapiens
gccggccccatgggg

SEQ ID NO: 1075883 - DNA, 15 bp, Homo sapiens
ggccggccccatggg

SEQ ID NO: 1075884 - DNA, 15 bp, Homo sapiens
gggccggccccatgg

SEQ ID NO: 1075885 - DNA, 15 bp, Homo sapiens
cgggccggccccatg

SEQ ID NO: 1075886 - DNA, 15 bp, Homo sapiens
acgggccggccccat

SEQ ID NO: 1075887 - DNA, 15 bp, Homo sapiens
gacgggccggcccca

SEQ ID NO: 1075888 - DNA, 15 bp, Homo sapiens
ggacgggccggcccc

SEQ ID NO: 1075889 - DNA, 15 bp, Homo sapiens
aggacgggccggccc

SEQ ID NO: 1075890 - DNA, 15 bp, Homo sapiens
aaggacgggccggcc

SEQ ID NO: 1075891 - DNA, 15 bp, Homo sapiens
caaggacgggccggc

SEQ ID NO: 1075892 - DNA, 15 bp, Homo sapiens
gcaaggacgggccgg

SEQ ID NO: 1075893 - DNA, 15 bp, Homo sapiens
ggcaaggacgggccg

SEQ ID NO: 1075894 - DNA, 15 bp, Homo sapiens
gggcaaggacgggcc

SEQ ID NO: 1075895 - DNA, 15 bp, Homo sapiens
tgggcaaggacgggc

SEQ ID NO: 1075896 - DNA, 15 bp, Homo sapiens
ctgggcaaggacggg

SEQ ID NO: 1075897 - DNA, 15 bp, Homo sapiens
gctgggcaaggacgg

SEQ ID NO: 1075898 - DNA, 15 bp, Homo sapiens
ggctgggcaaggacg

SEQ ID NO: 1075899 - DNA, 15 bp, Homo sapiens
aggctgggcaaggac

SEQ ID NO: 1075900 - DNA, 15 bp, Homo sapiens
gaggctgggcaagga

SEQ ID NO: 1075901 - DNA, 15 bp, Homo sapiens
agaggctgggcaagg

SEQ ID NO: 1075902 - DNA, 15 bp, Homo sapiens
gagaggctgggcaag

SEQ ID NO: 1075903 - DNA, 15 bp, Homo sapiens
ggagaggctgggcaa

SEQ ID NO: 1075904 - DNA, 15 bp, Homo sapiens
aggagaggctgggca

SEQ ID NO: 1075905 - DNA, 15 bp, Homo sapiens
caggagaggctgggc

SEQ ID NO: 1075906 - DNA, 15 bp, Homo sapiens
gcaggagaggctggg

SEQ ID NO: 1075907 - DNA, 15 bp, Homo sapiens
ggcaggagaggctgg

SEQ ID NO: 1075908 - DNA, 15 bp, Homo sapiens
tggcaggagaggctg

SEQ ID NO: 1075909 - DNA, 15 bp, Homo sapiens
gtggcaggagaggct

SEQ ID NO: 1075910 - DNA, 15 bp, Homo sapiens
agtggcaggagaggc

SEQ ID NO: 1075911 - DNA, 15 bp, Homo sapiens
gagtggcaggagagg

SEQ ID NO: 1075912 - DNA, 15 bp, Homo sapiens
agagtggcaggagag

SEQ ID NO: 1075913 - DNA, 15 bp, Homo sapiens
cagagtggcaggaga

SEQ ID NO: 1075914 - DNA, 15 bp, Homo sapiens
acagagtggcaggag

SEQ ID NO: 1075915 - DNA, 15 bp, Homo sapiens
gacagagtggcagga

SEQ ID NO: 1075916 - DNA, 15 bp, Homo sapiens
agacagagtggcagg

SEQ ID NO: 1075917 - DNA, 15 bp, Homo sapiens
aagacagagtggcag

SEQ ID NO: 1075918 - DNA, 15 bp, Homo sapiens
aaagacagagtggca

SEQ ID NO: 1075919 - DNA, 15 bp, Homo sapiens
caaagacagagtggc

SEQ ID NO: 1075920 - DNA, 15 bp, Homo sapiens
acaaagacagagtgg

SEQ ID NO: 1075921 - DNA, 15 bp, Homo sapiens
gacaaagacagagtg

SEQ ID NO: 1075922 - DNA, 15 bp, Homo sapiens
ggacaaagacagagt

SEQ ID NO: 1075923 - DNA, 15 bp, Homo sapiens
gggacaaagacagag

SEQ ID NO: 1075924 - DNA, 15 bp, Homo sapiens
agggacaaagacaga

SEQ ID NO: 1075925 - DNA, 15 bp, Homo sapiens
gagggacaaagacag

SEQ ID NO: 1075926 - DNA, 15 bp, Homo sapiens
ggagggacaaagaca

SEQ ID NO: 1075927 - DNA, 15 bp, Homo sapiens
aggagggacaaagac

SEQ ID NO: 1075928 - DNA, 15 bp, Homo sapiens
caggagggacaaaga

SEQ ID NO: 1075929 - DNA, 15 bp, Homo sapiens
ccaggagggacaaag

SEQ ID NO: 1075930 - DNA, 15 bp, Homo sapiens
gccaggagggacaaa

SEQ ID NO: 1075931 - DNA, 15 bp, Homo sapiens
agccaggagggacaa

SEQ ID NO: 1075932 - DNA, 15 bp, Homo sapiens
cagccaggagggaca

SEQ ID NO: 1075933 - DNA, 15 bp, Homo sapiens
gcagccaggagggac

SEQ ID NO: 1075934 - DNA, 15 bp, Homo sapiens
ggcagccaggaggga

SEQ ID NO: 1075935 - DNA, 15 bp, Homo sapiens
cggcagccaggaggg

SEQ ID NO: 1075936 - DNA, 15 bp, Homo sapiens
gcggcagccaggagg

SEQ ID NO: 1075937 - DNA, 15 bp, Homo sapiens
agcggcagccaggag

SEQ ID NO: 1075938 - DNA, 15 bp, Homo sapiens
cagcggcagccagga

SEQ ID NO: 1075939 - DNA, 15 bp, Homo sapiens
gcagcggcagccagg

SEQ ID NO: 1075940 - DNA, 15 bp, Homo sapiens
ggcagcggcagccag

SEQ ID NO: 1075941 - DNA, 15 bp, Homo sapiens
gggcagcggcagcca

SEQ ID NO: 1075942 - DNA, 15 bp, Homo sapiens
cgggcagcggcagcc

SEQ ID NO: 1075943 - DNA, 15 bp, Homo sapiens
ccgggcagcggcagc

SEQ ID NO: 1075944 - DNA, 15 bp, Homo sapiens
gccgggcagcggcag

SEQ ID NO: 1075945 - DNA, 15 bp, Homo sapiens
agccgggcagcggca

SEQ ID NO: 1075946 - DNA, 15 bp, Homo sapiens
gagccgggcagcggc

SEQ ID NO: 1075947 - DNA, 15 bp, Homo sapiens
tgagccgggcagcgg

SEQ ID NO: 1075948 - DNA, 15 bp, Homo sapiens
atgagccgggcagcg

SEQ ID NO: 1075949 - DNA, 15 bp, Homo sapiens
gatgagccgggcagc

SEQ ID NO: 1075950 - DNA, 15 bp, Homo sapiens
agatgagccgggcag

SEQ ID NO: 1075951 - DNA, 15 bp, Homo sapiens
gagatgagccgggca

SEQ ID NO: 1075952 - DNA, 15 bp, Homo sapiens
agagatgagccgggc

SEQ ID NO: 1075953 - DNA, 15 bp, Homo sapiens
gagagatgagccggg

SEQ ID NO: 1075954 - DNA, 15 bp, Homo sapiens
ggagagatgagccgg

SEQ ID NO: 1075955 - DNA, 15 bp, Homo sapiens
gggagagatgagccg

SEQ ID NO: 1075956 - DNA, 15 bp, Homo sapiens
agggagagatgagcc

SEQ ID NO: 1075957 - DNA, 15 bp, Homo sapiens
gagggagagatgagc

SEQ ID NO: 1075958 - DNA, 15 bp, Homo sapiens
ggagggagagatgag

SEQ ID NO: 1075959 - DNA, 15 bp, Homo sapiens
cggagggagagatga

SEQ ID NO: 1075960 - DNA, 15 bp, Homo sapiens
acggagggagagatg

SEQ ID NO: 1075961 - DNA, 15 bp, Homo sapiens
cacggagggagagat

SEQ ID NO: 1075962 - DNA, 15 bp, Homo sapiens
ccacggagggagaga

SEQ ID NO: 1075963 - DNA, 15 bp, Homo sapiens
gccacggagggagag

SEQ ID NO: 1075964 - DNA, 15 bp, Homo sapiens
agccacggagggaga

SEQ ID NO: 1075965 - DNA, 15 bp, Homo sapiens
gagccacggagggag

SEQ ID NO: 1075966 - DNA, 15 bp, Homo sapiens
cgagccacggaggga

SEQ ID NO: 1075967 - DNA, 15 bp, Homo sapiens
ccgagccacggaggg

SEQ ID NO: 1075968 - DNA, 15 bp, Homo sapiens
cccgagccacggagg

SEQ ID NO: 1075969 - DNA, 15 bp, Homo sapiens
ccccgagccacggag

SEQ ID NO: 1075970 - DNA, 15 bp, Homo sapiens
tccccgagccacgga

SEQ ID NO: 1075971 - DNA, 15 bp, Homo sapiens
ctccccgagccacgg

SEQ ID NO: 1075972 - DNA, 15 bp, Homo sapiens
gctccccgagccacg

SEQ ID NO: 1075973 - DNA, 15 bp, Homo sapiens
cgctccccgagccac

SEQ ID NO: 1075974 - DNA, 15 bp, Homo sapiens
gcgctccccgagcca

SEQ ID NO: 1075975 - DNA, 15 bp, Homo sapiens
agcgctccccgagcc

SEQ ID NO: 1075976 - DNA, 15 bp, Homo sapiens
gagcgctccccgagc

SEQ ID NO: 1075977 - DNA, 15 bp, Homo sapiens
agagcgctccccgag

SEQ ID NO: 1075978 - DNA, 15 bp, Homo sapiens
gagagcgctccccga

SEQ ID NO: 1075979 - DNA, 15 bp, Homo sapiens
agagagcgctccccg

SEQ ID NO: 1075980 - DNA, 15 bp, Homo sapiens
gagagagcgctcccc

SEQ ID NO: 1075981 - DNA, 15 bp, Homo sapiens
cgagagagcgctccc

SEQ ID NO: 1075982 - DNA, 15 bp, Homo sapiens
gcgagagagcgctcc

SEQ ID NO: 1075983 - DNA, 15 bp, Homo sapiens
tgcgagagagcgctc

SEQ ID NO: 1075984 - DNA, 15 bp, Homo sapiens
ctgcgagagagcgct

SEQ ID NO: 1075985 - DNA, 15 bp, Homo sapiens
gctgcgagagagcgc

SEQ ID NO: 1075986 - DNA, 15 bp, Homo sapiens
agctgcgagagagcg

SEQ ID NO: 1075987 - DNA, 15 bp, Homo sapiens
cagctgcgagagagc

SEQ ID NO: 1075988 - DNA, 15 bp, Homo sapiens
acagctgcgagagag

SEQ ID NO: 1075989 - DNA, 15 bp, Homo sapiens
gacagctgcgagaga

SEQ ID NO: 1075990 - DNA, 15 bp, Homo sapiens
agacagctgcgagag

SEQ ID NO: 1075991 - DNA, 15 bp, Homo sapiens
aagacagctgcgaga

SEQ ID NO: 1075992 - DNA, 15 bp, Homo sapiens
aaagacagctgcgag

SEQ ID NO: 1075993 - DNA, 15 bp, Homo sapiens
gaaagacagctgcga

SEQ ID NO: 1075994 - DNA, 15 bp, Homo sapiens
agaaagacagctgcg

SEQ ID NO: 1075995 - DNA, 15 bp, Homo sapiens
gagaaagacagctgc

SEQ ID NO: 1075996 - DNA, 15 bp, Homo sapiens
tgagaaagacagctg

SEQ ID NO: 1075997 - DNA, 15 bp, Homo sapiens
ctgagaaagacagct

SEQ ID NO: 1075998 - DNA, 15 bp, Homo sapiens
tctgagaaagacagc

SEQ ID NO: 1075999 - DNA, 15 bp, Homo sapiens
atctgagaaagacag

SEQ ID NO: 1076000 - DNA, 15 bp, Homo sapiens
catctgagaaagaca

SEQ ID NO: 1076001 - DNA, 15 bp, Homo sapiens
gcatctgagaaagac

SEQ ID NO: 1076002 - DNA, 15 bp, Homo sapiens
ggcatctgagaaaga

SEQ ID NO: 1076003 - DNA, 15 bp, Homo sapiens
gggcatctgagaaag

SEQ ID NO: 1076004 - DNA, 15 bp, Homo sapiens
ggggcatctgagaaa

SEQ ID NO: 1076005 - DNA, 15 bp, Homo sapiens
tggggcatctgagaa

SEQ ID NO: 1076006 - DNA, 15 bp, Homo sapiens
gtggggcatctgaga

SEQ ID NO: 1076007 - DNA, 15 bp, Homo sapiens
agtggggcatctgag

SEQ ID NO: 1076008 - DNA, 15 bp, Homo sapiens
aagtggggcatctga

SEQ ID NO: 1076009 - DNA, 15 bp, Homo sapiens
gaagtggggcatctg

SEQ ID NO: 1076010 - DNA, 15 bp, Homo sapiens
agaagtggggcatct

SEQ ID NO: 1076011 - DNA, 15 bp, Homo sapiens
gagaagtggggcatc

SEQ ID NO: 1076012 - DNA, 15 bp, Homo sapiens
agagaagtggggcat

SEQ ID NO: 1076013 - DNA, 15 bp, Homo sapiens
cagagaagtggggca

SEQ ID NO: 1076014 - DNA, 15 bp, Homo sapiens
acagagaagtggggc

SEQ ID NO: 1076015 - DNA, 15 bp, Homo sapiens
gacagagaagtgggg

SEQ ID NO: 1076016 - DNA, 15 bp, Homo sapiens
ggacagagaagtggg

SEQ ID NO: 1076017 - DNA, 15 bp, Homo sapiens
aggacagagaagtgg

SEQ ID NO: 1076018 - DNA, 15 bp, Homo sapiens
gaggacagagaagtg

SEQ ID NO: 1076019 - DNA, 15 bp, Homo sapiens
agaggacagagaagt

SEQ ID NO: 1076020 - DNA, 15 bp, Homo sapiens
cagaggacagagaag

SEQ ID NO: 1076021 - DNA, 15 bp, Homo sapiens
ccagaggacagagaa

SEQ ID NO: 1076022 - DNA, 15 bp, Homo sapiens
accagaggacagaga

SEQ ID NO: 1076023 - DNA, 15 bp, Homo sapiens
aaccagaggacagag

SEQ ID NO: 1076024 - DNA, 15 bp, Homo sapiens
gaaccagaggacaga

SEQ ID NO: 1076025 - DNA, 15 bp, Homo sapiens
agaaccagaggacag

SEQ ID NO: 1076026 - DNA, 15 bp, Homo sapiens
cagaaccagaggaca

SEQ ID NO: 1076027 - DNA, 15 bp, Homo sapiens
acagaaccagaggac

SEQ ID NO: 1076028 - DNA, 15 bp, Homo sapiens
cacagaaccagagga

SEQ ID NO: 1076029 - DNA, 15 bp, Homo sapiens
acacagaaccagagg

SEQ ID NO: 1076030 - DNA, 15 bp, Homo sapiens
gacacagaaccagag

SEQ ID NO: 1076031 - DNA, 15 bp, Homo sapiens
agacacagaaccaga

SEQ ID NO: 1076032 - DNA, 15 bp, Homo sapiens
cagacacagaaccag

SEQ ID NO: 1076033 - DNA, 15 bp, Homo sapiens
gcagacacagaacca

SEQ ID NO: 1076034 - DNA, 15 bp, Homo sapiens
ggcagacacagaacc

SEQ ID NO: 1076035 - DNA, 15 bp, Homo sapiens
tggcagacacagaac

SEQ ID NO: 1076036 - DNA, 15 bp, Homo sapiens
gtggcagacacagaa

SEQ ID NO: 1076037 - DNA, 15 bp, Homo sapiens
ggtggcagacacaga

SEQ ID NO: 1076038 - DNA, 15 bp, Homo sapiens
tggtggcagacacag

SEQ ID NO: 1076039 - DNA, 15 bp, Homo sapiens
gtggtggcagacaca

SEQ ID NO: 1076040 - DNA, 15 bp, Homo sapiens
ggtggtggcagacac

SEQ ID NO: 1076041 - DNA, 15 bp, Homo sapiens
aggtggtggcagaca

SEQ ID NO: 1076042 - DNA, 15 bp, Homo sapiens
caggtggtggcagac

SEQ ID NO: 1076043 - DNA, 15 bp, Homo sapiens
acaggtggtggcaga

SEQ ID NO: 1076044 - DNA, 15 bp, Homo sapiens
gacaggtggtggcag

SEQ ID NO: 1076045 - DNA, 15 bp, Homo sapiens
agacaggtggtggca

SEQ ID NO: 1076046 - DNA, 15 bp, Homo sapiens
cagacaggtggtggc

SEQ ID NO: 1076047 - DNA, 15 bp, Homo sapiens
acagacaggtggtgg

SEQ ID NO: 1076048 - DNA, 15 bp, Homo sapiens
cacagacaggtggtg

SEQ ID NO: 1076049 - DNA, 15 bp, Homo sapiens
acacagacaggtggt

SEQ ID NO: 1076050 - DNA, 15 bp, Homo sapiens
gacacagacaggtgg

SEQ ID NO: 1076051 - DNA, 15 bp, Homo sapiens
ggacacagacaggtg

SEQ ID NO: 1076052 - DNA, 15 bp, Homo sapiens
aggacacagacaggt

SEQ ID NO: 1076053 - DNA, 15 bp, Homo sapiens
caggacacagacagg

SEQ ID NO: 1076054 - DNA, 15 bp, Homo sapiens
acaggacacagacag

SEQ ID NO: 1076055 - DNA, 15 bp, Homo sapiens
gacaggacacagaca

SEQ ID NO: 1076056 - DNA, 15 bp, Homo sapiens
agacaggacacagac

SEQ ID NO: 1076057 - DNA, 15 bp, Homo sapiens
gagacaggacacaga

SEQ ID NO: 1076058 - DNA, 15 bp, Homo sapiens
agagacaggacacag

SEQ ID NO: 1076059 - DNA, 15 bp, Homo sapiens
gagagacaggacaca

SEQ ID NO: 1076060 - DNA, 15 bp, Homo sapiens
ggagagacaggacac

SEQ ID NO: 1076061 - DNA, 15 bp, Homo sapiens
tggagagacaggaca

SEQ ID NO: 1076062 - DNA, 15 bp, Homo sapiens
gtggagagacaggac

SEQ ID NO: 1076063 - DNA, 15 bp, Homo sapiens
ggtggagagacagga

SEQ ID NO: 1076064 - DNA, 15 bp, Homo sapiens
aggtggagagacagg

SEQ ID NO: 1076065 - DNA, 15 bp, Homo sapiens
gaggtggagagacag

SEQ ID NO: 1076066 - DNA, 15 bp, Homo sapiens
ggaggtggagagaca

SEQ ID NO: 1076067 - DNA, 15 bp, Homo sapiens
gggaggtggagagac

SEQ ID NO: 1076068 - DNA, 15 bp, Homo sapiens
ggggaggtggagaga

SEQ ID NO: 1076069 - DNA, 15 bp, Homo sapiens
gggggaggtggagag

SEQ ID NO: 1076070 - DNA, 15 bp, Homo sapiens
agggggaggtggaga

SEQ ID NO: 1076071 - DNA, 15 bp, Homo sapiens
gagggggaggtggag

SEQ ID NO: 1076072 - DNA, 15 bp, Homo sapiens
ggagggggaggtgga

SEQ ID NO: 1076073 - DNA, 15 bp, Homo sapiens
tggagggggaggtgg

SEQ ID NO: 1076074 - DNA, 15 bp, Homo sapiens
atggagggggaggtg

SEQ ID NO: 1076075 - DNA, 15 bp, Homo sapiens
catggagggggaggt

SEQ ID NO: 1076076 - DNA, 15 bp, Homo sapiens
acatggagggggagg

SEQ ID NO: 1076077 - DNA, 15 bp, Homo sapiens
gacatggagggggag

SEQ ID NO: 1076078 - DNA, 15 bp, Homo sapiens
agacatggaggggga

SEQ ID NO: 1076079 - DNA, 15 bp, Homo sapiens
cagacatggaggggg

SEQ ID NO: 1076080 - DNA, 15 bp, Homo sapiens
ccagacatggagggg

SEQ ID NO: 1076081 - DNA, 15 bp, Homo sapiens
gccagacatggaggg

SEQ ID NO: 1076082 - DNA, 15 bp, Homo sapiens
agccagacatggagg

SEQ ID NO: 1076083 - DNA, 15 bp, Homo sapiens
gagccagacatggag

SEQ ID NO: 1076084 - DNA, 15 bp, Homo sapiens
agagccagacatgga

SEQ ID NO: 1076085 - DNA, 15 bp, Homo sapiens
cagagccagacatgg

SEQ ID NO: 1076086 - DNA, 15 bp, Homo sapiens
acagagccagacatg

SEQ ID NO: 1076087 - DNA, 15 bp, Homo sapiens
gacagagccagacat

SEQ ID NO: 1076088 - DNA, 15 bp, Homo sapiens
agacagagccagaca

SEQ ID NO: 1076089 - DNA, 15 bp, Homo sapiens
gagacagagccagac

SEQ ID NO: 1076090 - DNA, 15 bp, Homo sapiens
ggagacagagccaga

SEQ ID NO: 1076091 - DNA, 15 bp, Homo sapiens
gggagacagagccag

SEQ ID NO: 1076092 - DNA, 15 bp, Homo sapiens
agggagacagagcca

SEQ ID NO: 1076093 - DNA, 15 bp, Homo sapiens
gagggagacagagcc

SEQ ID NO: 1076094 - DNA, 15 bp, Homo sapiens
tgagggagacagagc

SEQ ID NO: 1076095 - DNA, 15 bp, Homo sapiens
ctgagggagacagag

SEQ ID NO: 1076096 - DNA, 15 bp, Homo sapiens
cctgagggagacaga

SEQ ID NO: 1076097 - DNA, 15 bp, Homo sapiens
acctgagggagacag

SEQ ID NO: 1076098 - DNA, 15 bp, Homo sapiens
gacctgagggagaca

SEQ ID NO: 1076099 - DNA, 15 bp, Homo sapiens
ggacctgagggagac

SEQ ID NO: 1076100 - DNA, 15 bp, Homo sapiens
gggacctgagggaga

SEQ ID NO: 1076101 - DNA, 15 bp, Homo sapiens
tgggacctgagggag

SEQ ID NO: 1076102 - DNA, 15 bp, Homo sapiens
ctgggacctgaggga

SEQ ID NO: 1076103 - DNA, 15 bp, Homo sapiens
cctgggacctgaggg

SEQ ID NO: 1076104 - DNA, 15 bp, Homo sapiens
gcctgggacctgagg

SEQ ID NO: 1076105 - DNA, 15 bp, Homo sapiens
ggcctgggacctgag

SEQ ID NO: 1076106 - DNA, 15 bp, Homo sapiens
gggcctgggacctga

SEQ ID NO: 1076107 - DNA, 15 bp, Homo sapiens
tgggcctgggacctg

SEQ ID NO: 1076108 - DNA, 15 bp, Homo sapiens
ctgggcctgggacct

SEQ ID NO: 1076109 - DNA, 15 bp, Homo sapiens
gctgggcctgggacc

SEQ ID NO: 1076110 - DNA, 15 bp, Homo sapiens
ggctgggcctgggac

SEQ ID NO: 1076111 - DNA, 15 bp, Homo sapiens
gggctgggcctggga

SEQ ID NO: 1076112 - DNA, 15 bp, Homo sapiens
ggggctgggcctggg

SEQ ID NO: 1076113 - DNA, 15 bp, Homo sapiens
gggggctgggcctgg

SEQ ID NO: 1076114 - DNA, 15 bp, Homo sapiens
agggggctgggcctg

SEQ ID NO: 1076115 - DNA, 15 bp, Homo sapiens
cagggggctgggcct

SEQ ID NO: 1076116 - DNA, 15 bp, Homo sapiens
ccagggggctgggcc

SEQ ID NO: 1076117 - DNA, 15 bp, Homo sapiens
cccagggggctgggc

SEQ ID NO: 1076118 - DNA, 15 bp, Homo sapiens
acccagggggctggg

SEQ ID NO: 1076119 - DNA, 15 bp, Homo sapiens
gacccagggggctgg

SEQ ID NO: 1076120 - DNA, 15 bp, Homo sapiens
agacccagggggctg

SEQ ID NO: 1076121 - DNA, 15 bp, Homo sapiens
gagacccagggggct

SEQ ID NO: 1076122 - DNA, 15 bp, Homo sapiens
tgagacccagggggc

SEQ ID NO: 1076123 - DNA, 15 bp, Homo sapiens
ttgagacccaggggg

SEQ ID NO: 1076124 - DNA, 15 bp, Homo sapiens
cttgagacccagggg

SEQ ID NO: 1076125 - DNA, 15 bp, Homo sapiens
acttgagacccaggg

SEQ ID NO: 1076126 - DNA, 15 bp, Homo sapiens
aacttgagacccagg

SEQ ID NO: 1076127 - DNA, 15 bp, Homo sapiens
gaacttgagacccag

SEQ ID NO: 1076128 - DNA, 15 bp, Homo sapiens
tgaacttgagaccca

SEQ ID NO: 1076129 - DNA, 15 bp, Homo sapiens
gtgaacttgagaccc

SEQ ID NO: 1076130 - DNA, 15 bp, Homo sapiens
agtgaacttgagacc

SEQ ID NO: 1076131 - DNA, 15 bp, Homo sapiens
gagtgaacttgagac

SEQ ID NO: 1076132 - DNA, 15 bp, Homo sapiens
agagtgaacttgaga

SEQ ID NO: 1076133 - DNA, 15 bp, Homo sapiens
gagagtgaacttgag

SEQ ID NO: 1076134 - DNA, 15 bp, Homo sapiens
agagagtgaacttga

SEQ ID NO: 1076135 - DNA, 15 bp, Homo sapiens
cagagagtgaacttg

SEQ ID NO: 1076136 - DNA, 15 bp, Homo sapiens
acagagagtgaactt

SEQ ID NO: 1076137 - DNA, 15 bp, Homo sapiens
cacagagagtgaact

SEQ ID NO: 1076138 - DNA, 15 bp, Homo sapiens
ccacagagagtgaac

SEQ ID NO: 1076139 - DNA, 15 bp, Homo sapiens
cccacagagagtgaa

SEQ ID NO: 1076140 - DNA, 15 bp, Homo sapiens
ccccacagagagtga

SEQ ID NO: 1076141 - DNA, 15 bp, Homo sapiens
accccacagagagtg

SEQ ID NO: 1076142 - DNA, 15 bp, Homo sapiens
caccccacagagagt

SEQ ID NO: 1076143 - DNA, 15 bp, Homo sapiens
tcaccccacagagag

SEQ ID NO: 1076144 - DNA, 15 bp, Homo sapiens
ctcaccccacagaga

SEQ ID NO: 1076145 - DNA, 15 bp, Homo sapiens
cctcaccccacagag

SEQ ID NO: 1076146 - DNA, 15 bp, Homo sapiens
ccctcaccccacaga

SEQ ID NO: 1076147 - DNA, 15 bp, Homo sapiens
cccctcaccccacag

SEQ ID NO: 1076148 - DNA, 15 bp, Homo sapiens
acccctcaccccaca

SEQ ID NO: 1076149 - DNA, 15 bp, Homo sapiens
cacccctcaccccac

SEQ ID NO: 1076150 - DNA, 15 bp, Homo sapiens
gcacccctcacccca

SEQ ID NO: 1076151 - DNA, 15 bp, Homo sapiens
agcacccctcacccc

SEQ ID NO: 1076152 - DNA, 15 bp, Homo sapiens
cagcacccctcaccc

SEQ ID NO: 1076153 - DNA, 15 bp, Homo sapiens
gcagcacccctcacc

SEQ ID NO: 1076154 - DNA, 15 bp, Homo sapiens
agcagcacccctcac

SEQ ID NO: 1076155 - DNA, 15 bp, Homo sapiens
gagcagcacccctca

SEQ ID NO: 1076156 - DNA, 15 bp, Homo sapiens
tgagcagcacccctc

SEQ ID NO: 1076157 - DNA, 15 bp, Homo sapiens
ctgagcagcacccct

SEQ ID NO: 1076158 - DNA, 15 bp, Homo sapiens
cctgagcagcacccc

SEQ ID NO: 1076159 - DNA, 15 bp, Homo sapiens
gcctgagcagcaccc

SEQ ID NO: 1076160 - DNA, 15 bp, Homo sapiens
cgcctgagcagcacc

SEQ ID NO: 1076161 - DNA, 15 bp, Homo sapiens
gcgcctgagcagcac

SEQ ID NO: 1076162 - DNA, 15 bp, Homo sapiens
tgcgcctgagcagca

SEQ ID NO: 1076163 - DNA, 15 bp, Homo sapiens
ctgcgcctgagcagc

SEQ ID NO: 1076164 - DNA, 15 bp, Homo sapiens
gctgcgcctgagcag

SEQ ID NO: 1076165 - DNA, 15 bp, Homo sapiens
agctgcgcctgagca

SEQ ID NO: 1076166 - DNA, 15 bp, Homo sapiens
gagctgcgcctgagc

SEQ ID NO: 1076167 - DNA, 15 bp, Homo sapiens
agagctgcgcctgag

SEQ ID NO: 1076168 - DNA, 15 bp, Homo sapiens
cagagctgcgcctga

SEQ ID NO: 1076169 - DNA, 15 bp, Homo sapiens
gcagagctgcgcctg

SEQ ID NO: 1076170 - DNA, 15 bp, Homo sapiens
ggcagagctgcgcct

SEQ ID NO: 1076171 - DNA, 15 bp, Homo sapiens
gggcagagctgcgcc

SEQ ID NO: 1076172 - DNA, 15 bp, Homo sapiens
ggggcagagctgcgc

SEQ ID NO: 1076173 - DNA, 15 bp, Homo sapiens
cggggcagagctgcg

SEQ ID NO: 1076174 - DNA, 15 bp, Homo sapiens
acggggcagagctgc

SEQ ID NO: 1076175 - DNA, 15 bp, Homo sapiens
cacggggcagagctg

SEQ ID NO: 1076176 - DNA, 15 bp, Homo sapiens
gcacggggcagagct

SEQ ID NO: 1076177 - DNA, 15 bp, Homo sapiens
agcacggggcagagc

SEQ ID NO: 1076178 - DNA, 15 bp, Homo sapiens
cagcacggggcagag

SEQ ID NO: 1076179 - DNA, 15 bp, Homo sapiens
gcagcacggggcaga

SEQ ID NO: 1076180 - DNA, 15 bp, Homo sapiens
tgcagcacggggcag

SEQ ID NO: 1076181 - DNA, 15 bp, Homo sapiens
gtgcagcacggggca

SEQ ID NO: 1076182 - DNA, 15 bp, Homo sapiens
ggtgcagcacggggc

SEQ ID NO: 1076183 - DNA, 15 bp, Homo sapiens
aggtgcagcacgggg

SEQ ID NO: 1076184 - DNA, 15 bp, Homo sapiens
caggtgcagcacggg

SEQ ID NO: 1076185 - DNA, 15 bp, Homo sapiens
gcaggtgcagcacgg

SEQ ID NO: 1076186 - DNA, 15 bp, Homo sapiens
ggcaggtgcagcacg

SEQ ID NO: 1076187 - DNA, 15 bp, Homo sapiens
gggcaggtgcagcac

SEQ ID NO: 1076188 - DNA, 15 bp, Homo sapiens
ggggcaggtgcagca

SEQ ID NO: 1076189 - DNA, 15 bp, Homo sapiens
aggggcaggtgcagc

SEQ ID NO: 1076190 - DNA, 15 bp, Homo sapiens
aaggggcaggtgcag

SEQ ID NO: 1076191 - DNA, 15 bp, Homo sapiens
caaggggcaggtgca

SEQ ID NO: 1076192 - DNA, 15 bp, Homo sapiens
ccaaggggcaggtgc

SEQ ID NO: 1076193 - DNA, 15 bp, Homo sapiens
tccaaggggcaggtg

SEQ ID NO: 1076194 - DNA, 15 bp, Homo sapiens
ttccaaggggcaggt

SEQ ID NO: 1076195 - DNA, 15 bp, Homo sapiens
cttccaaggggcagg

SEQ ID NO: 1076196 - DNA, 15 bp, Homo sapiens
tcttccaaggggcag

SEQ ID NO: 1076197 - DNA, 15 bp, Homo sapiens
atcttccaaggggca

SEQ ID NO: 1076198 - DNA, 15 bp, Homo sapiens
tatcttccaaggggc

SEQ ID NO: 1076199 - DNA, 15 bp, Homo sapiens
gtatcttccaagggg

SEQ ID NO: 1076200 - DNA, 15 bp, Homo sapiens
agtatcttccaaggg

SEQ ID NO: 1076201 - DNA, 15 bp, Homo sapiens
cagtatcttccaagg

SEQ ID NO: 1076202 - DNA, 15 bp, Homo sapiens
tcagtatcttccaag

SEQ ID NO: 1076203 - DNA, 15 bp, Homo sapiens
ctcagtatcttccaa

SEQ ID NO: 1076204 - DNA, 15 bp, Homo sapiens
gctcagtatcttcca

SEQ ID NO: 1076205 - DNA, 15 bp, Homo sapiens
ggctcagtatcttcc

SEQ ID NO: 1076206 - DNA, 15 bp, Homo sapiens
aggctcagtatcttc

SEQ ID NO: 1076207 - DNA, 15 bp, Homo sapiens
aaggctcagtatctt

SEQ ID NO: 1076208 - DNA, 15 bp, Homo sapiens
taaggctcagtatct

SEQ ID NO: 1076209 - DNA, 15 bp, Homo sapiens
ataaggctcagtatc

SEQ ID NO: 1076210 - DNA, 15 bp, Homo sapiens
cataaggctcagtat

SEQ ID NO: 1076211 - DNA, 15 bp, Homo sapiens
acataaggctcagta

SEQ ID NO: 1076212 - DNA, 15 bp, Homo sapiens
cacataaggctcagt

SEQ ID NO: 1076213 - DNA, 15 bp, Homo sapiens
tcacataaggctcag

SEQ ID NO: 1076214 - DNA, 15 bp, Homo sapiens
gtcacataaggctca

SEQ ID NO: 1076215 - DNA, 15 bp, Homo sapiens
agtcacataaggctc

SEQ ID NO: 1076216 - DNA, 15 bp, Homo sapiens
cagtcacataaggct

SEQ ID NO: 1076217 - DNA, 15 bp, Homo sapiens
gcagtcacataaggc

SEQ ID NO: 1076218 - DNA, 15 bp, Homo sapiens
tgcagtcacataagg

SEQ ID NO: 1076219 - DNA, 15 bp, Homo sapiens
gtgcagtcacataag

SEQ ID NO: 1076220 - DNA, 15 bp, Homo sapiens
agtgcagtcacataa

SEQ ID NO: 1076221 - DNA, 15 bp, Homo sapiens
cagtgcagtcacata

SEQ ID NO: 1076222 - DNA, 15 bp, Homo sapiens
gcagtgcagtcacat

SEQ ID NO: 1076223 - DNA, 15 bp, Homo sapiens
ggcagtgcagtcaca

SEQ ID NO: 1076224 - DNA, 15 bp, Homo sapiens
gggcagtgcagtcac

SEQ ID NO: 1076225 - DNA, 15 bp, Homo sapiens
ggggcagtgcagtca

SEQ ID NO: 1076226 - DNA, 15 bp, Homo sapiens
aggggcagtgcagtc

SEQ ID NO: 1076227 - DNA, 15 bp, Homo sapiens
gaggggcagtgcagt

SEQ ID NO: 1076228 - DNA, 15 bp, Homo sapiens
agaggggcagtgcag

SEQ ID NO: 1076229 - DNA, 15 bp, Homo sapiens
gagaggggcagtgca

SEQ ID NO: 1076230 - DNA, 15 bp, Homo sapiens
ggagaggggcagtgc

SEQ ID NO: 1076231 - DNA, 15 bp, Homo sapiens
aggagaggggcagtg

SEQ ID NO: 1076232 - DNA, 15 bp, Homo sapiens
caggagaggggcagt

SEQ ID NO: 1076233 - DNA, 15 bp, Homo sapiens
ccaggagaggggcag

SEQ ID NO: 1076234 - DNA, 15 bp, Homo sapiens
tccaggagaggggca

SEQ ID NO: 1076235 - DNA, 15 bp, Homo sapiens
gtccaggagaggggc

SEQ ID NO: 1076236 - DNA, 15 bp, Homo sapiens
cgtccaggagagggg

SEQ ID NO: 1076237 - DNA, 15 bp, Homo sapiens
ccgtccaggagaggg

SEQ ID NO: 1076238 - DNA, 15 bp, Homo sapiens
accgtccaggagagg

SEQ ID NO: 1076239 - DNA, 15 bp, Homo sapiens
aaccgtccaggagag

SEQ ID NO: 1076240 - DNA, 15 bp, Homo sapiens
aaaccgtccaggaga

SEQ ID NO: 1076241 - DNA, 15 bp, Homo sapiens
aaaaccgtccaggag

SEQ ID NO: 1076242 - DNA, 15 bp, Homo sapiens
gaaaaccgtccagga

SEQ ID NO: 1076243 - DNA, 15 bp, Homo sapiens
ggaaaaccgtccagg

SEQ ID NO: 1076244 - DNA, 15 bp, Homo sapiens
aggaaaaccgtccag

SEQ ID NO: 1076245 - DNA, 15 bp, Homo sapiens
gaggaaaaccgtcca

SEQ ID NO: 1076246 - DNA, 15 bp, Homo sapiens
tgaggaaaaccgtcc

SEQ ID NO: 1076247 - DNA, 15 bp, Homo sapiens
gtgaggaaaaccgtc

SEQ ID NO: 1076248 - DNA, 15 bp, Homo sapiens
agtgaggaaaaccgt

SEQ ID NO: 1076249 - DNA, 15 bp, Homo sapiens
cagtgaggaaaaccg

SEQ ID NO: 1076250 - DNA, 15 bp, Homo sapiens
tcagtgaggaaaacc

SEQ ID NO: 1076251 - DNA, 15 bp, Homo sapiens
gtcagtgaggaaaac

SEQ ID NO: 1076252 - DNA, 15 bp, Homo sapiens
ggtcagtgaggaaaa

SEQ ID NO: 1076253 - DNA, 15 bp, Homo sapiens
gggtcagtgaggaaa

SEQ ID NO: 1076254 - DNA, 15 bp, Homo sapiens
ggggtcagtgaggaa

SEQ ID NO: 1076255 - DNA, 15 bp, Homo sapiens
gggggtcagtgagga

SEQ ID NO: 1076256 - DNA, 15 bp, Homo sapiens
tgggggtcagtgagg

SEQ ID NO: 1076257 - DNA, 15 bp, Homo sapiens
gtgggggtcagtgag

SEQ ID NO: 1076258 - DNA, 15 bp, Homo sapiens
agtgggggtcagtga

SEQ ID NO: 1076259 - DNA, 15 bp, Homo sapiens
tagtgggggtcagtg

SEQ ID NO: 1076260 - DNA, 15 bp, Homo sapiens
atagtgggggtcagt

SEQ ID NO: 1076261 - DNA, 15 bp, Homo sapiens
gatagtgggggtcag

SEQ ID NO: 1076262 - DNA, 15 bp, Homo sapiens
ggatagtgggggtca

SEQ ID NO: 1076263 - DNA, 15 bp, Homo sapiens
gggatagtgggggtc

SEQ ID NO: 1076264 - DNA, 15 bp, Homo sapiens
agggatagtgggggt

SEQ ID NO: 1076265 - DNA, 15 bp, Homo sapiens
tagggatagtggggg

SEQ ID NO: 1076266 - DNA, 15 bp, Homo sapiens
atagggatagtgggg

SEQ ID NO: 1076267 - DNA, 15 bp, Homo sapiens
gatagggatagtggg

SEQ ID NO: 1076268 - DNA, 15 bp, Homo sapiens
tgatagggatagtgg

SEQ ID NO: 1076269 - DNA, 15 bp, Homo sapiens
gtgatagggatagtg

SEQ ID NO: 1076270 - DNA, 15 bp, Homo sapiens
agtgatagggatagt

SEQ ID NO: 1076271 - DNA, 15 bp, Homo sapiens
gagtgatagggatag

SEQ ID NO: 1076272 - DNA, 15 bp, Homo sapiens
agagtgatagggata

SEQ ID NO: 1076273 - DNA, 15 bp, Homo sapiens
gagagtgatagggat

SEQ ID NO: 1076274 - DNA, 15 bp, Homo sapiens
tgagagtgataggga

SEQ ID NO: 1076275 - DNA, 15 bp, Homo sapiens
gtgagagtgataggg

SEQ ID NO: 1076276 - DNA, 15 bp, Homo sapiens
ggtgagagtgatagg

SEQ ID NO: 1076277 - DNA, 15 bp, Homo sapiens
gggtgagagtgatag

SEQ ID NO: 1076278 - DNA, 15 bp, Homo sapiens
ggggtgagagtgata

SEQ ID NO: 1076279 - DNA, 15 bp, Homo sapiens
gggggtgagagtgat

SEQ ID NO: 1076280 - DNA, 15 bp, Homo sapiens
tgggggtgagagtga

SEQ ID NO: 1076281 - DNA, 15 bp, Homo sapiens
gtgggggtgagagtg

SEQ ID NO: 1076282 - DNA, 15 bp, Homo sapiens
agtgggggtgagagt

SEQ ID NO: 1076283 - DNA, 15 bp, Homo sapiens
aagtgggggtgagag

SEQ ID NO: 1076284 - DNA, 15 bp, Homo sapiens
gaagtgggggtgaga

SEQ ID NO: 1076285 - DNA, 15 bp, Homo sapiens
ggaagtgggggtgag

SEQ ID NO: 1076286 - DNA, 15 bp, Homo sapiens
gggaagtgggggtga

SEQ ID NO: 1076287 - DNA, 15 bp, Homo sapiens
agggaagtgggggtg

SEQ ID NO: 1076288 - DNA, 15 bp, Homo sapiens
gagggaagtgggggt

SEQ ID NO: 1076289 - DNA, 15 bp, Homo sapiens
aggagggaagtgggg

SEQ ID NO: 1076290 - DNA, 15 bp, Homo sapiens
caggagggaagtggg

SEQ ID NO: 1076291 - DNA, 15 bp, Homo sapiens
acaggagggaagtgg

SEQ ID NO: 1076292 - DNA, 15 bp, Homo sapiens
gacaggagggaagtg

SEQ ID NO: 1076293 - DNA, 15 bp, Homo sapiens
agacaggagggaagt

SEQ ID NO: 1076294 - DNA, 15 bp, Homo sapiens
gagacaggagggaag

SEQ ID NO: 1076295 - DNA, 15 bp, Homo sapiens
agagacaggagggaa

SEQ ID NO: 1076296 - DNA, 15 bp, Homo sapiens
aagagacaggaggga

SEQ ID NO: 1076297 - DNA, 15 bp, Homo sapiens
gaagagacaggaggg

SEQ ID NO: 1076298 - DNA, 15 bp, Homo sapiens
agaagagacaggagg

SEQ ID NO: 1076299 - DNA, 15 bp, Homo sapiens
cagaagagacaggag

SEQ ID NO: 1076300 - DNA, 15 bp, Homo sapiens
ccagaagagacagga

SEQ ID NO: 1076301 - DNA, 15 bp, Homo sapiens
tccagaagagacagg

SEQ ID NO: 1076302 - DNA, 15 bp, Homo sapiens
ctccagaagagacag

SEQ ID NO: 1076303 - DNA, 15 bp, Homo sapiens
actccagaagagaca

SEQ ID NO: 1076304 - DNA, 15 bp, Homo sapiens
cactccagaagagac

SEQ ID NO: 1076305 - DNA, 15 bp, Homo sapiens
tcactccagaagaga

SEQ ID NO: 1076306 - DNA, 15 bp, Homo sapiens
atcactccagaagag

SEQ ID NO: 1076307 - DNA, 15 bp, Homo sapiens
aatcactccagaaga

SEQ ID NO: 1076308 - DNA, 15 bp, Homo sapiens
gaatcactccagaag

SEQ ID NO: 1076309 - DNA, 15 bp, Homo sapiens
ggaatcactccagaa

SEQ ID NO: 1076310 - DNA, 15 bp, Homo sapiens
aggaatcactccaga

SEQ ID NO: 1076311 - DNA, 15 bp, Homo sapiens
gaggaatcactccag

SEQ ID NO: 1076312 - DNA, 15 bp, Homo sapiens
tgaggaatcactcca

SEQ ID NO: 1076313 - DNA, 15 bp, Homo sapiens
atgaggaatcactcc

SEQ ID NO: 1076314 - DNA, 15 bp, Homo sapiens
aatgaggaatcactc

SEQ ID NO: 1076315 - DNA, 15 bp, Homo sapiens
gaatgaggaatcact

SEQ ID NO: 1076316 - DNA, 15 bp, Homo sapiens
tgaatgaggaatcac

SEQ ID NO: 1076317 - DNA, 15 bp, Homo sapiens
atgaatgaggaatca

SEQ ID NO: 1076318 - DNA, 15 bp, Homo sapiens
gatgaatgaggaatc

SEQ ID NO: 1076319 - DNA, 15 bp, Homo sapiens
ggatgaatgaggaat

SEQ ID NO: 1076320 - DNA, 15 bp, Homo sapiens
aggatgaatgaggaa

SEQ ID NO: 1076321 - DNA, 15 bp, Homo sapiens
gaggatgaatgagga

SEQ ID NO: 1076322 - DNA, 15 bp, Homo sapiens
agaggatgaatgagg

SEQ ID NO: 1076323 - DNA, 15 bp, Homo sapiens
aagaggatgaatgag

SEQ ID NO: 1076324 - DNA, 15 bp, Homo sapiens
gaagaggatgaatga

SEQ ID NO: 1076325 - DNA, 15 bp, Homo sapiens
ggaagaggatgaatg

SEQ ID NO: 1076326 - DNA, 15 bp, Homo sapiens
gggaagaggatgaat

SEQ ID NO: 1076327 - DNA, 15 bp, Homo sapiens
ggggaagaggatgaa

SEQ ID NO: 1076328 - DNA, 15 bp, Homo sapiens
aggggaagaggatga

SEQ ID NO: 1076329 - DNA, 15 bp, Homo sapiens
taggggaagaggatg

SEQ ID NO: 1076330 - DNA, 15 bp, Homo sapiens
gtaggggaagaggat

SEQ ID NO: 1076331 - DNA, 15 bp, Homo sapiens
ggtaggggaagagga

SEQ ID NO: 1076332 - DNA, 15 bp, Homo sapiens
aggtaggggaagagg

SEQ ID NO: 1076333 - DNA, 15 bp, Homo sapiens
caggtaggggaagag

SEQ ID NO: 1076334 - DNA, 15 bp, Homo sapiens
acaggtaggggaaga

SEQ ID NO: 1076335 - DNA, 15 bp, Homo sapiens
aacaggtaggggaag

SEQ ID NO: 1076336 - DNA, 15 bp, Homo sapiens
gaacaggtaggggaa

SEQ ID NO: 1076337 - DNA, 15 bp, Homo sapiens
agaacaggtagggga

SEQ ID NO: 1076338 - DNA, 15 bp, Homo sapiens
gagaacaggtagggg

SEQ ID NO: 1076339 - DNA, 15 bp, Homo sapiens
agagaacaggtaggg

SEQ ID NO: 1076340 - DNA, 15 bp, Homo sapiens
gagagaacaggtagg

SEQ ID NO: 1076341 - DNA, 15 bp, Homo sapiens
ggagagaacaggtag

SEQ ID NO: 1076342 - DNA, 15 bp, Homo sapiens
aggagagaacaggta

SEQ ID NO: 1076343 - DNA, 15 bp, Homo sapiens
gaggagagaacaggt

SEQ ID NO: 1076344 - DNA, 15 bp, Homo sapiens
agaggagagaacagg

SEQ ID NO: 1076345 - DNA, 15 bp, Homo sapiens
gagaggagagaacag

SEQ ID NO: 1076346 - DNA, 15 bp, Homo sapiens
ggagaggagagaaca

SEQ ID NO: 1076347 - DNA, 15 bp, Homo sapiens
tggagaggagagaac

SEQ ID NO: 1076348 - DNA, 15 bp, Homo sapiens
gtggagaggagagaa

SEQ ID NO: 1076349 - DNA, 15 bp, Homo sapiens
agtggagaggagaga

SEQ ID NO: 1076350 - DNA, 15 bp, Homo sapiens
gagtggagaggagag

SEQ ID NO: 1076351 - DNA, 15 bp, Homo sapiens
cgagtggagaggaga

SEQ ID NO: 1076352 - DNA, 15 bp, Homo sapiens
gcgagtggagaggag

SEQ ID NO: 1076353 - DNA, 15 bp, Homo sapiens
ggcgagtggagagga

SEQ ID NO: 1076354 - DNA, 15 bp, Homo sapiens
tggcgagtggagagg

SEQ ID NO: 1076355 - DNA, 15 bp, Homo sapiens
atggcgagtggagag

SEQ ID NO: 1076356 - DNA, 15 bp, Homo sapiens
catggcgagtggaga

SEQ ID NO: 1076357 - DNA, 15 bp, Homo sapiens
ccatggcgagtggag

SEQ ID NO: 1076358 - DNA, 15 bp, Homo sapiens
tccatggcgagtgga

SEQ ID NO: 1076359 - DNA, 15 bp, Homo sapiens
ctccatggcgagtgg

SEQ ID NO: 1076360 - DNA, 15 bp, Homo sapiens
cctccatggcgagtg

SEQ ID NO: 1076361 - DNA, 15 bp, Homo sapiens
ccctccatggcgagt

SEQ ID NO: 1076362 - DNA, 15 bp, Homo sapiens
cccctccatggcgag

SEQ ID NO: 1076363 - DNA, 15 bp, Homo sapiens
gcccctccatggcga

SEQ ID NO: 1076364 - DNA, 15 bp, Homo sapiens
ggcccctccatggcg

SEQ ID NO: 1076365 - DNA, 15 bp, Homo sapiens
gggcccctccatggc

SEQ ID NO: 1076366 - DNA, 15 bp, Homo sapiens
agggcccctccatgg

SEQ ID NO: 1076367 - DNA, 15 bp, Homo sapiens
cagggcccctccatg

SEQ ID NO: 1076368 - DNA, 15 bp, Homo sapiens
gcagggcccctccat

SEQ ID NO: 1076369 - DNA, 15 bp, Homo sapiens
agcagggcccctcca

SEQ ID NO: 1076370 - DNA, 15 bp, Homo sapiens
gagcagggcccctcc

SEQ ID NO: 1076371 - DNA, 15 bp, Homo sapiens
agagcagggcccctc

SEQ ID NO: 1076372 - DNA, 15 bp, Homo sapiens
cagagcagggcccct

SEQ ID NO: 1076373 - DNA, 15 bp, Homo sapiens
tcagagcagggcccc

SEQ ID NO: 1076374 - DNA, 15 bp, Homo sapiens
ctcagagcagggccc

SEQ ID NO: 1076375 - DNA, 15 bp, Homo sapiens
actcagagcagggcc

SEQ ID NO: 1076376 - DNA, 15 bp, Homo sapiens
cactcagagcagggc

SEQ ID NO: 1076377 - DNA, 15 bp, Homo sapiens
tcactcagagcaggg

SEQ ID NO: 1076378 - DNA, 15 bp, Homo sapiens
gtcactcagagcagg

SEQ ID NO: 1076379 - DNA, 15 bp, Homo sapiens
ggtcactcagagcag

SEQ ID NO: 1076380 - DNA, 15 bp, Homo sapiens
gggtcactcagagca

SEQ ID NO: 1076381 - DNA, 15 bp, Homo sapiens
ggggtcactcagagc

SEQ ID NO: 1076382 - DNA, 15 bp, Homo sapiens
tggggtcactcagag

SEQ ID NO: 1076383 - DNA, 15 bp, Homo sapiens
atggggtcactcaga

SEQ ID NO: 1076384 - DNA, 15 bp, Homo sapiens
gatggggtcactcag

SEQ ID NO: 1076385 - DNA, 15 bp, Homo sapiens
agatggggtcactca

SEQ ID NO: 1076386 - DNA, 15 bp, Homo sapiens
aagatggggtcactc

SEQ ID NO: 1076387 - DNA, 15 bp, Homo sapiens
gaagatggggtcact

SEQ ID NO: 1076388 - DNA, 15 bp, Homo sapiens
ggaagatggggtcac

SEQ ID NO: 1076389 - DNA, 15 bp, Homo sapiens
gggaagatggggtca

SEQ ID NO: 1076390 - DNA, 15 bp, Homo sapiens
ggggaagatggggtc

SEQ ID NO: 1076391 - DNA, 15 bp, Homo sapiens
aggggaagatggggt

SEQ ID NO: 1076392 - DNA, 15 bp, Homo sapiens
caggggaagatgggg

SEQ ID NO: 1076393 - DNA, 15 bp, Homo sapiens
gcaggggaagatggg

SEQ ID NO: 1076394 - DNA, 15 bp, Homo sapiens
ggcaggggaagatgg

SEQ ID NO: 1076395 - DNA, 15 bp, Homo sapiens
tggcaggggaagatg

SEQ ID NO: 1076396 - DNA, 15 bp, Homo sapiens
gtggcaggggaagat

SEQ ID NO: 1076397 - DNA, 15 bp, Homo sapiens
ggtggcaggggaaga

SEQ ID NO: 1076398 - DNA, 15 bp, Homo sapiens
aggtggcaggggaag

SEQ ID NO: 1076399 - DNA, 15 bp, Homo sapiens
gaggtggcaggggaa

SEQ ID NO: 1076400 - DNA, 15 bp, Homo sapiens
ggaggtggcagggga

SEQ ID NO: 1076401 - DNA, 15 bp, Homo sapiens
gggaggtggcagggg

SEQ ID NO: 1076402 - DNA, 15 bp, Homo sapiens
ggggaggtggcaggg

SEQ ID NO: 1076403 - DNA, 15 bp, Homo sapiens
tggggaggtggcagg

SEQ ID NO: 1076404 - DNA, 15 bp, Homo sapiens
gtggggaggtggcag

SEQ ID NO: 1076405 - DNA, 15 bp, Homo sapiens
ggtggggaggtggca

SEQ ID NO: 1076406 - DNA, 15 bp, Homo sapiens
aggtggggaggtggc

SEQ ID NO: 1076407 - DNA, 15 bp, Homo sapiens
caggtggggaggtgg

SEQ ID NO: 1076408 - DNA, 15 bp, Homo sapiens
gcaggtggggaggtg

SEQ ID NO: 1076409 - DNA, 15 bp, Homo sapiens
tgcaggtggggaggt

SEQ ID NO: 1076410 - DNA, 15 bp, Homo sapiens
atgcaggtggggagg

SEQ ID NO: 1076411 - DNA, 15 bp, Homo sapiens
gatgcaggtggggag

SEQ ID NO: 1076412 - DNA, 15 bp, Homo sapiens
agatgcaggtgggga

SEQ ID NO: 1076413 - DNA, 15 bp, Homo sapiens
aagatgcaggtgggg

SEQ ID NO: 1076414 - DNA, 15 bp, Homo sapiens
caagatgcaggtggg

SEQ ID NO: 1076415 - DNA, 15 bp, Homo sapiens
ccaagatgcaggtgg

SEQ ID NO: 1076416 - DNA, 15 bp, Homo sapiens
cccaagatgcaggtg

SEQ ID NO: 1076417 - DNA, 15 bp, Homo sapiens
ccccaagatgcaggt

SEQ ID NO: 1076418 - DNA, 15 bp, Homo sapiens
gccccaagatgcagg

SEQ ID NO: 1076419 - DNA, 15 bp, Homo sapiens
agccccaagatgcag

SEQ ID NO: 1076420 - DNA, 15 bp, Homo sapiens
cagccccaagatgca

SEQ ID NO: 1076421 - DNA, 15 bp, Homo sapiens
ccagccccaagatgc

SEQ ID NO: 1076422 - DNA, 15 bp, Homo sapiens
tccagccccaagatg

SEQ ID NO: 1076423 - DNA, 15 bp, Homo sapiens
ttccagccccaagat

SEQ ID NO: 1076424 - DNA, 15 bp, Homo sapiens
cttccagccccaaga

SEQ ID NO: 1076425 - DNA, 15 bp, Homo sapiens
tcttccagccccaag

SEQ ID NO: 1076426 - DNA, 15 bp, Homo sapiens
ctcttccagccccaa

SEQ ID NO: 1076427 - DNA, 15 bp, Homo sapiens
gctcttccagcccca

SEQ ID NO: 1076428 - DNA, 15 bp, Homo sapiens
catgctcttccagcc

SEQ ID NO: 1076429 - DNA, 15 bp, Homo sapiens
ccatgctcttccagc

SEQ ID NO: 1076430 - DNA, 15 bp, Homo sapiens
tccatgctcttccag

SEQ ID NO: 1076431 - DNA, 15 bp, Homo sapiens
atccatgctcttcca

SEQ ID NO: 1076432 - DNA, 15 bp, Homo sapiens
tatccatgctcttcc

SEQ ID NO: 1076433 - DNA, 15 bp, Homo sapiens
ttatccatgctcttc

SEQ ID NO: 1076434 - DNA, 15 bp, Homo sapiens
cttatccatgctctt

SEQ ID NO: 1076435 - DNA, 15 bp, Homo sapiens
tcttatccatgctct

SEQ ID NO: 1076436 - DNA, 15 bp, Homo sapiens
ctcttatccatgctc

SEQ ID NO: 1076437 - DNA, 15 bp, Homo sapiens
cctcttatccatgct

SEQ ID NO: 1076438 - DNA, 15 bp, Homo sapiens
gcctcttatccatgc

SEQ ID NO: 1076439 - DNA, 15 bp, Homo sapiens
agcctcttatccatg

SEQ ID NO: 1076440 - DNA, 15 bp, Homo sapiens
gagcctcttatccat

SEQ ID NO: 1076441 - DNA, 15 bp, Homo sapiens
tgagcctcttatcca

SEQ ID NO: 1076442 - DNA, 15 bp, Homo sapiens
gtgagcctcttatcc

SEQ ID NO: 1076443 - DNA, 15 bp, Homo sapiens
tgtgagcctcttatc

SEQ ID NO: 1076444 - DNA, 15 bp, Homo sapiens
gtgtgagcctcttat

SEQ ID NO: 1076445 - DNA, 15 bp, Homo sapiens
tgtgtgagcctctta

SEQ ID NO: 1076446 - DNA, 15 bp, Homo sapiens
ctgtgtgagcctctt

SEQ ID NO: 1076447 - DNA, 15 bp, Homo sapiens
tctgtgtgagcctct

SEQ ID NO: 1076448 - DNA, 15 bp, Homo sapiens
gtctgtgtgagcctc

SEQ ID NO: 1076449 - DNA, 15 bp, Homo sapiens
agtctgtgtgagcct

SEQ ID NO: 1076450 - DNA, 15 bp, Homo sapiens
gagtctgtgtgagcc

SEQ ID NO: 1076451 - DNA, 15 bp, Homo sapiens
agagtctgtgtgagc

SEQ ID NO: 1076452 - DNA, 15 bp, Homo sapiens
aagagtctgtgtgag

SEQ ID NO: 1076453 - DNA, 15 bp, Homo sapiens
gaagagtctgtgtga

SEQ ID NO: 1076454 - DNA, 15 bp, Homo sapiens
ggaagagtctgtgtg

SEQ ID NO: 1076455 - DNA, 15 bp, Homo sapiens
cggaagagtctgtgt

SEQ ID NO: 1076456 - DNA, 15 bp, Homo sapiens
gcggaagagtctgtg

SEQ ID NO: 1076457 - DNA, 15 bp, Homo sapiens
tgcggaagagtctgt

SEQ ID NO: 1076458 - DNA, 15 bp, Homo sapiens
ctgcggaagagtctg

SEQ ID NO: 1076459 - DNA, 15 bp, Homo sapiens
cctgcggaagagtct

SEQ ID NO: 1076460 - DNA, 15 bp, Homo sapiens
gcctgcggaagagtc

SEQ ID NO: 1076461 - DNA, 15 bp, Homo sapiens
agcctgcggaagagt

SEQ ID NO: 1076462 - DNA, 15 bp, Homo sapiens
aagcctgcggaagag

SEQ ID NO: 1076463 - DNA, 15 bp, Homo sapiens
aaagcctgcggaaga

SEQ ID NO: 1076464 - DNA, 15 bp, Homo sapiens
taaagcctgcggaag

SEQ ID NO: 1076465 - DNA, 15 bp, Homo sapiens
ataaagcctgcggaa

SEQ ID NO: 1076466 - DNA, 15 bp, Homo sapiens
aataaagcctgcgga

SEQ ID NO: 1076467 - DNA, 15 bp, Homo sapiens
gaataaagcctgcgg

SEQ ID NO: 1076468 - DNA, 15 bp, Homo sapiens
agaataaagcctgcg

SEQ ID NO: 1076469 - DNA, 15 bp, Homo sapiens
cagaataaagcctgc

SEQ ID NO: 1076470 - DNA, 15 bp, Homo sapiens
gcagaataaagcctg

SEQ ID NO: 1076471 - DNA, 15 bp, Homo sapiens
ggcagaataaagcct

SEQ ID NO: 1076472 - DNA, 15 bp, Homo sapiens
aggcagaataaagcc

SEQ ID NO: 1076473 - DNA, 15 bp, Homo sapiens
caggcagaataaagc

SEQ ID NO: 1076474 - DNA, 15 bp, Homo sapiens
ccaggcagaataaag

SEQ ID NO: 1076475 - DNA, 15 bp, Homo sapiens
cccaggcagaataaa

SEQ ID NO: 1076476 - DNA, 15 bp, Homo sapiens
gcccaggcagaataa

SEQ ID NO: 1076477 - DNA, 15 bp, Homo sapiens
ggcccaggcagaata

SEQ ID NO: 1076478 - DNA, 15 bp, Homo sapiens
tggcccaggcagaat

SEQ ID NO: 1076479 - DNA, 15 bp, Homo sapiens
gtggcccaggcagaa

SEQ ID NO: 1076480 - DNA, 15 bp, Homo sapiens
ggtggcccaggcaga

SEQ ID NO: 1076481 - DNA, 15 bp, Homo sapiens
tggtggcccaggcag

SEQ ID NO: 1076482 - DNA, 15 bp, Homo sapiens
gtggtggcccaggca

SEQ ID NO: 1076483 - DNA, 15 bp, Homo sapiens
tgtggtggcccaggc

SEQ ID NO: 1076484 - DNA, 15 bp, Homo sapiens
ctgtggtggcccagg

SEQ ID NO: 1076485 - DNA, 15 bp, Homo sapiens
gctgtggtggcccag

SEQ ID NO: 1076486 - DNA, 15 bp, Homo sapiens
agctgtggtggccca

SEQ ID NO: 1076487 - DNA, 15 bp, Homo sapiens
gagctgtggtggccc

SEQ ID NO: 1076488 - DNA, 15 bp, Homo sapiens
agagctgtggtggcc

SEQ ID NO: 1076489 - DNA, 15 bp, Homo sapiens
cagagctgtggtggc

SEQ ID NO: 1076490 - DNA, 15 bp, Homo sapiens
tcagagctgtggtgg

SEQ ID NO: 1076491 - DNA, 15 bp, Homo sapiens
ctcagagctgtggtg

SEQ ID NO: 1076492 - DNA, 15 bp, Homo sapiens
cctcagagctgtggt

SEQ ID NO: 1076493 - DNA, 15 bp, Homo sapiens
tcctcagagctgtgg

SEQ ID NO: 1076494 - DNA, 15 bp, Homo sapiens
atcctcagagctgtg

SEQ ID NO: 1076495 - DNA, 15 bp, Homo sapiens
tatcctcagagctgt

SEQ ID NO: 1076496 - DNA, 15 bp, Homo sapiens
gtatcctcagagctg

SEQ ID NO: 1076497 - DNA, 15 bp, Homo sapiens
agtatcctcagagct

SEQ ID NO: 1076498 - DNA, 15 bp, Homo sapiens
aagtatcctcagagc

SEQ ID NO: 1076499 - DNA, 15 bp, Homo sapiens
gaagtatcctcagag

SEQ ID NO: 1076500 - DNA, 15 bp, Homo sapiens
agaagtatcctcaga

SEQ ID NO: 1076501 - DNA, 15 bp, Homo sapiens
cagaagtatcctcag

SEQ ID NO: 1076502 - DNA, 15 bp, Homo sapiens
acagaagtatcctca

SEQ ID NO: 1076503 - DNA, 15 bp, Homo sapiens
aacagaagtatcctc

SEQ ID NO: 1076504 - DNA, 15 bp, Homo sapiens
gaacagaagtatcct

SEQ ID NO: 1076505 - DNA, 15 bp, Homo sapiens
agaacagaagtatcc

SEQ ID NO: 1076506 - DNA, 15 bp, Homo sapiens
gagaacagaagtatc

SEQ ID NO: 1076507 - DNA, 15 bp, Homo sapiens
ggagaacagaagtat

SEQ ID NO: 1076508 - DNA, 15 bp, Homo sapiens
aggagaacagaagta

SEQ ID NO: 1076509 - DNA, 15 bp, Homo sapiens
gaggagaacagaagt

SEQ ID NO: 1076510 - DNA, 15 bp, Homo sapiens
tgaggagaacagaag

SEQ ID NO: 1076511 - DNA, 15 bp, Homo sapiens
gtgaggagaacagaa

SEQ ID NO: 1076512 - DNA, 15 bp, Homo sapiens
agtgaggagaacaga

SEQ ID NO: 1076513 - DNA, 15 bp, Homo sapiens
gagtgaggagaacag

SEQ ID NO: 1076514 - DNA, 15 bp, Homo sapiens
ggagtgaggagaaca

SEQ ID NO: 1076515 - DNA, 15 bp, Homo sapiens
gggagtgaggagaac

SEQ ID NO: 1076516 - DNA, 15 bp, Homo sapiens
tgggagtgaggagaa

SEQ ID NO: 1076517 - DNA, 15 bp, Homo sapiens
ctgggagtgaggaga

SEQ ID NO: 1076518 - DNA, 15 bp, Homo sapiens
actgggagtgaggag

SEQ ID NO: 1076519 - DNA, 15 bp, Homo sapiens
gactgggagtgagga

SEQ ID NO: 1076520 - DNA, 15 bp, Homo sapiens
ggactgggagtgagg

SEQ ID NO: 1076521 - DNA, 15 bp, Homo sapiens
tggactgggagtgag

SEQ ID NO: 1076522 - DNA, 15 bp, Homo sapiens
ctggactgggagtga

SEQ ID NO: 1076523 - DNA, 15 bp, Homo sapiens
cctggactgggagtg

SEQ ID NO: 1076524 - DNA, 15 bp, Homo sapiens
ccctggactgggagt

SEQ ID NO: 1076525 - DNA, 15 bp, Homo sapiens
gccctggactgggag

SEQ ID NO: 1076526 - DNA, 15 bp, Homo sapiens
agccctggactggga

SEQ ID NO: 1076527 - DNA, 15 bp, Homo sapiens
gagccctggactggg

SEQ ID NO: 1076528 - DNA, 15 bp, Homo sapiens
tgagccctggactgg

SEQ ID NO: 1076529 - DNA, 15 bp, Homo sapiens
gtgagccctggactg

SEQ ID NO: 1076530 - DNA, 15 bp, Homo sapiens
ggtgagccctggact

SEQ ID NO: 1076531 - DNA, 15 bp, Homo sapiens
gggtgagccctggac

SEQ ID NO: 1076532 - DNA, 15 bp, Homo sapiens
ggggtgagccctgga

SEQ ID NO: 1076533 - DNA, 15 bp, Homo sapiens
tggggtgagccctgg

SEQ ID NO: 1076534 - DNA, 15 bp, Homo sapiens
ctggggtgagccctg

SEQ ID NO: 1076535 - DNA, 15 bp, Homo sapiens
gctggggtgagccct

SEQ ID NO: 1076536 - DNA, 15 bp, Homo sapiens
ggctggggtgagccc

SEQ ID NO: 1076537 - DNA, 15 bp, Homo sapiens
aggctggggtgagcc

SEQ ID NO: 1076538 - DNA, 15 bp, Homo sapiens
caggctggggtgagc

SEQ ID NO: 1076539 - DNA, 15 bp, Homo sapiens
tcaggctggggtgag

SEQ ID NO: 1076540 - DNA, 15 bp, Homo sapiens
gtcaggctggggtga

SEQ ID NO: 1076541 - DNA, 15 bp, Homo sapiens
tgtcaggctggggtg

SEQ ID NO: 1076542 - DNA, 15 bp, Homo sapiens
gtgtcaggctggggt

SEQ ID NO: 1076543 - DNA, 15 bp, Homo sapiens
agtgtcaggctgggg

SEQ ID NO: 1076544 - DNA, 15 bp, Homo sapiens
aagtgtcaggctggg

SEQ ID NO: 1076545 - DNA, 15 bp, Homo sapiens
gaagtgtcaggctgg

SEQ ID NO: 1076546 - DNA, 15 bp, Homo sapiens
agaagtgtcaggctg

SEQ ID NO: 1076547 - DNA, 15 bp, Homo sapiens
gagaagtgtcaggct

SEQ ID NO: 1076548 - DNA, 15 bp, Homo sapiens
cgagaagtgtcaggc

SEQ ID NO: 1076549 - DNA, 15 bp, Homo sapiens
tcgagaagtgtcagg

SEQ ID NO: 1076550 - DNA, 15 bp, Homo sapiens
atcgagaagtgtcag

SEQ ID NO: 1076551 - DNA, 15 bp, Homo sapiens
gatcgagaagtgtca

SEQ ID NO: 1076552 - DNA, 15 bp, Homo sapiens
agatcgagaagtgtc

SEQ ID NO: 1076553 - DNA, 15 bp, Homo sapiens
gagatcgagaagtgt

SEQ ID NO: 1076554 - DNA, 15 bp, Homo sapiens
agagatcgagaagtg

SEQ ID NO: 1076555 - DNA, 15 bp, Homo sapiens
cagagatcgagaagt

SEQ ID NO: 1076556 - DNA, 15 bp, Homo sapiens
ccagagatcgagaag

SEQ ID NO: 1076557 - DNA, 15 bp, Homo sapiens
cccagagatcgagaa

SEQ ID NO: 1076558 - DNA, 15 bp, Homo sapiens
acccagagatcgaga

SEQ ID NO: 1076559 - DNA, 15 bp, Homo sapiens
gacccagagatcgag

SEQ ID NO: 1076560 - DNA, 15 bp, Homo sapiens
agacccagagatcga

SEQ ID NO: 1076561 - DNA, 15 bp, Homo sapiens
aagacccagagatcg

SEQ ID NO: 1076562 - DNA, 15 bp, Homo sapiens
aaagacccagagatc

SEQ ID NO: 1076563 - DNA, 15 bp, Homo sapiens
gaaagacccagagat

SEQ ID NO: 1076564 - DNA, 15 bp, Homo sapiens
agaaagacccagaga

SEQ ID NO: 1076565 - DNA, 15 bp, Homo sapiens
gagaaagacccagag

SEQ ID NO: 1076566 - DNA, 15 bp, Homo sapiens
ggagaaagacccaga

SEQ ID NO: 1076567 - DNA, 15 bp, Homo sapiens
aggagaaagacccag

SEQ ID NO: 1076568 - DNA, 15 bp, Homo sapiens
aaggagaaagaccca

SEQ ID NO: 1076569 - DNA, 15 bp, Homo sapiens
gaaggagaaagaccc

SEQ ID NO: 1076570 - DNA, 15 bp, Homo sapiens
cgaaggagaaagacc

SEQ ID NO: 1076571 - DNA, 15 bp, Homo sapiens
gcgaaggagaaagac

SEQ ID NO: 1076572 - DNA, 15 bp, Homo sapiens
cgcgaaggagaaaga

SEQ ID NO: 1076573 - DNA, 15 bp, Homo sapiens
gcgcgaaggagaaag

SEQ ID NO: 1076574 - DNA, 15 bp, Homo sapiens
tgcgcgaaggagaaa

SEQ ID NO: 1076575 - DNA, 15 bp, Homo sapiens
ttgcgcgaaggagaa

SEQ ID NO: 1076576 - DNA, 15 bp, Homo sapiens
cttgcgcgaaggaga

SEQ ID NO: 1076577 - DNA, 15 bp, Homo sapiens
ccttgcgcgaaggag

SEQ ID NO: 1076578 - DNA, 15 bp, Homo sapiens
accttgcgcgaagga

SEQ ID NO: 1076579 - DNA, 15 bp, Homo sapiens
gaccttgcgcgaagg

SEQ ID NO: 1076580 - DNA, 15 bp, Homo sapiens
tgaccttgcgcgaag

SEQ ID NO: 1076581 - DNA, 15 bp, Homo sapiens
gtgaccttgcgcgaa

SEQ ID NO: 1076582 - DNA, 15 bp, Homo sapiens
agtgaccttgcgcga

SEQ ID NO: 1076583 - DNA, 15 bp, Homo sapiens
gagtgaccttgcgcg

SEQ ID NO: 1076584 - DNA, 15 bp, Homo sapiens
tgagtgaccttgcgc

SEQ ID NO: 1076585 - DNA, 15 bp, Homo sapiens
atgagtgaccttgcg

SEQ ID NO: 1076586 - DNA, 15 bp, Homo sapiens
aatgagtgaccttgc

SEQ ID NO: 1076587 - DNA, 15 bp, Homo sapiens
caatgagtgaccttg

SEQ ID NO: 1076588 - DNA, 15 bp, Homo sapiens
ccaatgagtgacctt

SEQ ID NO: 1076589 - DNA, 15 bp, Homo sapiens
tccaatgagtgacct

SEQ ID NO: 1076590 - DNA, 15 bp, Homo sapiens
gtccaatgagtgacc

SEQ ID NO: 1076591 - DNA, 15 bp, Homo sapiens
tgtccaatgagtgac

SEQ ID NO: 1076592 - DNA, 15 bp, Homo sapiens
ctgtccaatgagtga

SEQ ID NO: 1076593 - DNA, 15 bp, Homo sapiens
cctgtccaatgagtg

SEQ ID NO: 1076594 - DNA, 15 bp, Homo sapiens
ccctgtccaatgagt

SEQ ID NO: 1076595 - DNA, 15 bp, Homo sapiens
gccctgtccaatgag

SEQ ID NO: 1076596 - DNA, 15 bp, Homo sapiens
tgccctgtccaatga

SEQ ID NO: 1076597 - DNA, 15 bp, Homo sapiens
ctgccctgtccaatg

SEQ ID NO: 1076598 - DNA, 15 bp, Homo sapiens
actgccctgtccaat

SEQ ID NO: 1076599 - DNA, 15 bp, Homo sapiens
tactgccctgtccaa

SEQ ID NO: 1076600 - DNA, 15 bp, Homo sapiens
atactgccctgtcca

SEQ ID NO: 1076601 - DNA, 15 bp, Homo sapiens
aatactgccctgtcc

SEQ ID NO: 1076602 - DNA, 15 bp, Homo sapiens
caatactgccctgtc

SEQ ID NO: 1076603 - DNA, 15 bp, Homo sapiens
acaatactgccctgt

SEQ ID NO: 1076604 - DNA, 15 bp, Homo sapiens
gacaatactgccctg

SEQ ID NO: 1076605 - DNA, 15 bp, Homo sapiens
tgacaatactgccct

SEQ ID NO: 1076606 - DNA, 15 bp, Homo sapiens
ttgacaatactgccc

SEQ ID NO: 1076607 - DNA, 15 bp, Homo sapiens
tttgacaatactgcc

SEQ ID NO: 1076608 - DNA, 15 bp, Homo sapiens
ttttgacaatactgc

SEQ ID NO: 1076609 - DNA, 15 bp, Homo sapiens
cttttgacaatactg

SEQ ID NO: 1076610 - DNA, 15 bp, Homo sapiens
tcttttgacaatact

SEQ ID NO: 1076611 - DNA, 15 bp, Homo sapiens
ctcttttgacaatac

SEQ ID NO: 1076612 - DNA, 15 bp, Homo sapiens
gctcttttgacaata

SEQ ID NO: 1076613 - DNA, 15 bp, Homo sapiens
tgctcttttgacaat

SEQ ID NO: 1076614 - DNA, 15 bp, Homo sapiens
gtgctcttttgacaa

SEQ ID NO: 1076615 - DNA, 15 bp, Homo sapiens
agtgctcttttgaca

SEQ ID NO: 1076616 - DNA, 15 bp, Homo sapiens
cagtgctcttttgac

SEQ ID NO: 1076617 - DNA, 15 bp, Homo sapiens
ccagtgctcttttga

SEQ ID NO: 1076618 - DNA, 15 bp, Homo sapiens
tccagtgctcttttg

SEQ ID NO: 1076619 - DNA, 15 bp, Homo sapiens
gtccagtgctctttt

SEQ ID NO: 1076620 - DNA, 15 bp, Homo sapiens
agtccagtgctcttt

SEQ ID NO: 1076621 - DNA, 15 bp, Homo sapiens
cagtccagtgctctt

SEQ ID NO: 1076622 - DNA, 15 bp, Homo sapiens
ccagtccagtgctct

SEQ ID NO: 1076623 - DNA, 15 bp, Homo sapiens
cccagtccagtgctc

SEQ ID NO: 1076624 - DNA, 15 bp, Homo sapiens
ccccagtccagtgct

SEQ ID NO: 1076625 - DNA, 15 bp, Homo sapiens
tccccagtccagtgc

SEQ ID NO: 1076626 - DNA, 15 bp, Homo sapiens
ctccccagtccagtg

SEQ ID NO: 1076627 - DNA, 15 bp, Homo sapiens
actccccagtccagt

SEQ ID NO: 1076628 - DNA, 15 bp, Homo sapiens
gactccccagtccag

SEQ ID NO: 1076629 - DNA, 15 bp, Homo sapiens
ggactccccagtcca

SEQ ID NO: 1076630 - DNA, 15 bp, Homo sapiens
aggactccccagtcc

SEQ ID NO: 1076631 - DNA, 15 bp, Homo sapiens
aaggactccccagtc

SEQ ID NO: 1076632 - DNA, 15 bp, Homo sapiens
aaaggactccccagt

SEQ ID NO: 1076633 - DNA, 15 bp, Homo sapiens
aaaaggactccccag

SEQ ID NO: 1076634 - DNA, 15 bp, Homo sapiens
caaaaggactcccca

SEQ ID NO: 1076635 - DNA, 15 bp, Homo sapiens
acaaaaggactcccc

SEQ ID NO: 1076636 - DNA, 15 bp, Homo sapiens
gacaaaaggactccc

SEQ ID NO: 1076637 - DNA, 15 bp, Homo sapiens
agacaaaaggactcc

SEQ ID NO: 1076638 - DNA, 15 bp, Homo sapiens
cagacaaaaggactc

SEQ ID NO: 1076639 - DNA, 15 bp, Homo sapiens
gcagacaaaaggact

SEQ ID NO: 1076640 - DNA, 15 bp, Homo sapiens
agcagacaaaaggac

SEQ ID NO: 1076641 - DNA, 15 bp, Homo sapiens
aagcagacaaaagga

SEQ ID NO: 1076642 - DNA, 15 bp, Homo sapiens
aaagcagacaaaagg

SEQ ID NO: 1076643 - DNA, 15 bp, Homo sapiens
aaaagcagacaaaag

SEQ ID NO: 1076644 - DNA, 15 bp, Homo sapiens
gaaaagcagacaaaa

SEQ ID NO: 1076645 - DNA, 15 bp, Homo sapiens
tgaaaagcagacaaa

SEQ ID NO: 1076646 - DNA, 15 bp, Homo sapiens
atgaaaagcagacaa

SEQ ID NO: 1076647 - DNA, 15 bp, Homo sapiens
gatgaaaagcagaca

SEQ ID NO: 1076648 - DNA, 15 bp, Homo sapiens
tgatgaaaagcagac

SEQ ID NO: 1076649 - DNA, 15 bp, Homo sapiens
ctgatgaaaagcaga

SEQ ID NO: 1076650 - DNA, 15 bp, Homo sapiens
gctgatgaaaagcag

SEQ ID NO: 1076651 - DNA, 15 bp, Homo sapiens
agctgatgaaaagca

SEQ ID NO: 1076652 - DNA, 15 bp, Homo sapiens
tagctgatgaaaagc

SEQ ID NO: 1076653 - DNA, 15 bp, Homo sapiens
ttagctgatgaaaag

SEQ ID NO: 1076654 - DNA, 15 bp, Homo sapiens
gttagctgatgaaaa

SEQ ID NO: 1076655 - DNA, 15 bp, Homo sapiens
ggttagctgatgaaa

SEQ ID NO: 1076656 - DNA, 15 bp, Homo sapiens
aggttagctgatgaa

SEQ ID NO: 1076657 - DNA, 15 bp, Homo sapiens
aaggttagctgatga

SEQ ID NO: 1076658 - DNA, 15 bp, Homo sapiens
gaaggttagctgatg

SEQ ID NO: 1076659 - DNA, 15 bp, Homo sapiens
tgaaggttagctgat

SEQ ID NO: 1076660 - DNA, 15 bp, Homo sapiens
ctgaaggttagctga

SEQ ID NO: 1076661 - DNA, 15 bp, Homo sapiens
actgaaggttagctg

SEQ ID NO: 1076662 - DNA, 15 bp, Homo sapiens
aactgaaggttagct

SEQ ID NO: 1076663 - DNA, 15 bp, Homo sapiens
aaactgaaggttagc

SEQ ID NO: 1076664 - DNA, 15 bp, Homo sapiens
gaaactgaaggttag

SEQ ID NO: 1076665 - DNA, 15 bp, Homo sapiens
agaaactgaaggtta

SEQ ID NO: 1076666 - DNA, 15 bp, Homo sapiens
cagaaactgaaggtt

SEQ ID NO: 1076667 - DNA, 15 bp, Homo sapiens
acagaaactgaaggt

SEQ ID NO: 1076668 - DNA, 15 bp, Homo sapiens
gacagaaactgaagg

SEQ ID NO: 1076669 - DNA, 15 bp, Homo sapiens
ggacagaaactgaag

SEQ ID NO: 1076670 - DNA, 15 bp, Homo sapiens
tggacagaaactgaa

SEQ ID NO: 1076671 - DNA, 15 bp, Homo sapiens
gtggacagaaactga

SEQ ID NO: 1076672 - DNA, 15 bp, Homo sapiens
ggtggacagaaactg

SEQ ID NO: 1076673 - DNA, 15 bp, Homo sapiens
aggtggacagaaact

SEQ ID NO: 1076674 - DNA, 15 bp, Homo sapiens
taggtggacagaaac

SEQ ID NO: 1076675 - DNA, 15 bp, Homo sapiens
ataggtggacagaaa

SEQ ID NO: 1076676 - DNA, 15 bp, Homo sapiens
cataggtggacagaa

SEQ ID NO: 1076677 - DNA, 15 bp, Homo sapiens
acataggtggacaga

SEQ ID NO: 1076678 - DNA, 15 bp, Homo sapiens
gacataggtggacag

SEQ ID NO: 1076679 - DNA, 15 bp, Homo sapiens
ggacataggtggaca

SEQ ID NO: 1076680 - DNA, 15 bp, Homo sapiens
gggacataggtggac

SEQ ID NO: 1076681 - DNA, 15 bp, Homo sapiens
ggggacataggtgga

SEQ ID NO: 1076682 - DNA, 15 bp, Homo sapiens
aggggacataggtgg

SEQ ID NO: 1076683 - DNA, 15 bp, Homo sapiens
taggggacataggtg

SEQ ID NO: 1076684 - DNA, 15 bp, Homo sapiens
gtaggggacataggt

SEQ ID NO: 1076685 - DNA, 15 bp, Homo sapiens
tgtaggggacatagg

SEQ ID NO: 1076686 - DNA, 15 bp, Homo sapiens
atgtaggggacatag

SEQ ID NO: 1076687 - DNA, 15 bp, Homo sapiens
tatgtaggggacata

SEQ ID NO: 1076688 - DNA, 15 bp, Homo sapiens
ttatgtaggggacat

SEQ ID NO: 1076689 - DNA, 15 bp, Homo sapiens
gttatgtaggggaca

SEQ ID NO: 1076690 - DNA, 15 bp, Homo sapiens
agttatgtaggggac

SEQ ID NO: 1076691 - DNA, 15 bp, Homo sapiens
gagttatgtagggga

SEQ ID NO: 1076692 - DNA, 15 bp, Homo sapiens
agagttatgtagggg

SEQ ID NO: 1076693 - DNA, 15 bp, Homo sapiens
gagagttatgtaggg

SEQ ID NO: 1076694 - DNA, 15 bp, Homo sapiens
agagagttatgtagg

SEQ ID NO: 1076695 - DNA, 15 bp, Homo sapiens
gagagagttatgtag

SEQ ID NO: 1076696 - DNA, 15 bp, Homo sapiens
ggagagagttatgta

SEQ ID NO: 1076697 - DNA, 15 bp, Homo sapiens
tggagagagttatgt

SEQ ID NO: 1076698 - DNA, 15 bp, Homo sapiens
gtggagagagttatg

SEQ ID NO: 1076699 - DNA, 15 bp, Homo sapiens
tgtggagagagttat

SEQ ID NO: 1076700 - DNA, 15 bp, Homo sapiens
ttgtggagagagtta

SEQ ID NO: 1076701 - DNA, 15 bp, Homo sapiens
gttgtggagagagtt

SEQ ID NO: 1076702 - DNA, 15 bp, Homo sapiens
agttgtggagagagt

SEQ ID NO: 1076703 - DNA, 15 bp, Homo sapiens
gagttgtggagagag

SEQ ID NO: 1076704 - DNA, 15 bp, Homo sapiens
agagttgtggagaga

SEQ ID NO: 1076705 - DNA, 15 bp, Homo sapiens
tagagttgtggagag

SEQ ID NO: 1076706 - DNA, 15 bp, Homo sapiens
ttagagttgtggaga

SEQ ID NO: 1076707 - DNA, 15 bp, Homo sapiens
gttagagttgtggag

SEQ ID NO: 1076708 - DNA, 15 bp, Homo sapiens
ggttagagttgtgga

SEQ ID NO: 1076709 - DNA, 15 bp, Homo sapiens
tggttagagttgtgg

SEQ ID NO: 1076710 - DNA, 15 bp, Homo sapiens
gtggttagagttgtg

SEQ ID NO: 1076711 - DNA, 15 bp, Homo sapiens
ggtggttagagttgt

SEQ ID NO: 1076712 - DNA, 15 bp, Homo sapiens
gggtggttagagttg

SEQ ID NO: 1076713 - DNA, 15 bp, Homo sapiens
tgggtggttagagtt

SEQ ID NO: 1076714 - DNA, 15 bp, Homo sapiens
atgggtggttagagt

SEQ ID NO: 1076715 - DNA, 15 bp, Homo sapiens
gatgggtggttagag

SEQ ID NO: 1076716 - DNA, 15 bp, Homo sapiens
ggatgggtggttaga

SEQ ID NO: 1076717 - DNA, 15 bp, Homo sapiens
gggatgggtggttag

SEQ ID NO: 1076718 - DNA, 15 bp, Homo sapiens
agggatgggtggtta

SEQ ID NO: 1076719 - DNA, 15 bp, Homo sapiens
aagggatgggtggtt

SEQ ID NO: 1076720 - DNA, 15 bp, Homo sapiens
taagggatgggtggt

SEQ ID NO: 1076721 - DNA, 15 bp, Homo sapiens
ctaagggatgggtgg

SEQ ID NO: 1076722 - DNA, 15 bp, Homo sapiens
tctaagggatgggtg

SEQ ID NO: 1076723 - DNA, 15 bp, Homo sapiens
atctaagggatgggt

SEQ ID NO: 1076724 - DNA, 15 bp, Homo sapiens
tatctaagggatggg

SEQ ID NO: 1076725 - DNA, 15 bp, Homo sapiens
ctatctaagggatgg

SEQ ID NO: 1076726 - DNA, 15 bp, Homo sapiens
cctatctaagggatg

SEQ ID NO: 1076727 - DNA, 15 bp, Homo sapiens
ccctatctaagggat

SEQ ID NO: 1076728 - DNA, 15 bp, Homo sapiens
gccctatctaaggga

SEQ ID NO: 1076729 - DNA, 15 bp, Homo sapiens
ggccctatctaaggg

SEQ ID NO: 1076730 - DNA, 15 bp, Homo sapiens
gggccctatctaagg

SEQ ID NO: 1076731 - DNA, 15 bp, Homo sapiens
ggggccctatctaag

SEQ ID NO: 1076732 - DNA, 15 bp, Homo sapiens
cggggccctatctaa

SEQ ID NO: 1076733 - DNA, 15 bp, Homo sapiens
ccggggccctatcta

SEQ ID NO: 1076734 - DNA, 15 bp, Homo sapiens
gccggggccctatct

SEQ ID NO: 1076735 - DNA, 15 bp, Homo sapiens
ggccggggccctatc

SEQ ID NO: 1076736 - DNA, 15 bp, Homo sapiens
gggccggggccctat

SEQ ID NO: 1076737 - DNA, 15 bp, Homo sapiens
tgggccggggcccta

SEQ ID NO: 1076738 - DNA, 15 bp, Homo sapiens
ctgggccggggccct

SEQ ID NO: 1076739 - DNA, 15 bp, Homo sapiens
cctgggccggggccc

SEQ ID NO: 1076740 - DNA, 15 bp, Homo sapiens
gcctgggccggggcc

SEQ ID NO: 1076741 - DNA, 15 bp, Homo sapiens
ggcctgggccggggc

SEQ ID NO: 1076742 - DNA, 15 bp, Homo sapiens
gggcctgggccgggg

SEQ ID NO: 1076743 - DNA, 15 bp, Homo sapiens
tgggcctgggccggg

SEQ ID NO: 1076744 - DNA, 15 bp, Homo sapiens
atgggcctgggccgg

SEQ ID NO: 1076745 - DNA, 15 bp, Homo sapiens
gatgggcctgggccg

SEQ ID NO: 1076746 - DNA, 15 bp, Homo sapiens
tgatgggcctgggcc

SEQ ID NO: 1076747 - DNA, 15 bp, Homo sapiens
gtgatgggcctgggc

SEQ ID NO: 1076748 - DNA, 15 bp, Homo sapiens
agtgatgggcctggg

SEQ ID NO: 1076749 - DNA, 15 bp, Homo sapiens
aagtgatgggcctgg

SEQ ID NO: 1076750 - DNA, 15 bp, Homo sapiens
aaagtgatgggcctg

SEQ ID NO: 1076751 - DNA, 15 bp, Homo sapiens
caaagtgatgggcct

SEQ ID NO: 1076752 - DNA, 15 bp, Homo sapiens
tcaaagtgatgggcc

SEQ ID NO: 1076753 - DNA, 15 bp, Homo sapiens
ctcaaagtgatgggc

SEQ ID NO: 1076754 - DNA, 15 bp, Homo sapiens
gctcaaagtgatggg

SEQ ID NO: 1076755 - DNA, 15 bp, Homo sapiens
ggctcaaagtgatgg

SEQ ID NO: 1076756 - DNA, 15 bp, Homo sapiens
aggctcaaagtgatg

SEQ ID NO: 1076757 - DNA, 15 bp, Homo sapiens
aaggctcaaagtgat

SEQ ID NO: 1076758 - DNA, 15 bp, Homo sapiens
caaggctcaaagtga

SEQ ID NO: 1076759 - DNA, 15 bp, Homo sapiens
ccaaggctcaaagtg

SEQ ID NO: 1076760 - DNA, 15 bp, Homo sapiens
tccaaggctcaaagt

SEQ ID NO: 1076761 - DNA, 15 bp, Homo sapiens
gtccaaggctcaaag

SEQ ID NO: 1076762 - DNA, 15 bp, Homo sapiens
ggtccaaggctcaaa

SEQ ID NO: 1076763 - DNA, 15 bp, Homo sapiens
gggtccaaggctcaa

SEQ ID NO: 1076764 - DNA, 15 bp, Homo sapiens
ggggtccaaggctca

SEQ ID NO: 1076765 - DNA, 15 bp, Homo sapiens
aggggtccaaggctc

SEQ ID NO: 1076766 - DNA, 15 bp, Homo sapiens
gaggggtccaaggct

SEQ ID NO: 1076767 - DNA, 15 bp, Homo sapiens
tgaggggtccaaggc

SEQ ID NO: 1076768 - DNA, 15 bp, Homo sapiens
atgaggggtccaagg

SEQ ID NO: 1076769 - DNA, 15 bp, Homo sapiens
catgaggggtccaag

SEQ ID NO: 1076770 - DNA, 15 bp, Homo sapiens
ccatgaggggtccaa

SEQ ID NO: 1076771 - DNA, 15 bp, Homo sapiens
cccatgaggggtcca

SEQ ID NO: 1076772 - DNA, 15 bp, Homo sapiens
ccccatgaggggtcc

SEQ ID NO: 1076773 - DNA, 15 bp, Homo sapiens
gccccatgaggggtc

SEQ ID NO: 1076774 - DNA, 15 bp, Homo sapiens
ggccccatgaggggt

SEQ ID NO: 1076775 - DNA, 15 bp, Homo sapiens
cggccccatgagggg

SEQ ID NO: 1076776 - DNA, 15 bp, Homo sapiens
ccggccccatgaggg

SEQ ID NO: 1076777 - DNA, 15 bp, Homo sapiens
gccggccccatgagg

SEQ ID NO: 1076778 - DNA, 15 bp, Homo sapiens
ggccggccccatgag

SEQ ID NO: 1076779 - DNA, 15 bp, Homo sapiens
aggccggccccatga

SEQ ID NO: 1076780 - DNA, 15 bp, Homo sapiens
caggccggccccatg

SEQ ID NO: 1076781 - DNA, 15 bp, Homo sapiens
acaggccggccccat

SEQ ID NO: 1076782 - DNA, 15 bp, Homo sapiens
cacaggccggcccca

SEQ ID NO: 1076783 - DNA, 15 bp, Homo sapiens
ccacaggccggcccc

SEQ ID NO: 1076784 - DNA, 15 bp, Homo sapiens
gccacaggccggccc

SEQ ID NO: 1076785 - DNA, 15 bp, Homo sapiens
ggccacaggccggcc

SEQ ID NO: 1076786 - DNA, 15 bp, Homo sapiens
tggccacaggccggc

SEQ ID NO: 1076787 - DNA, 15 bp, Homo sapiens
ctggccacaggccgg

SEQ ID NO: 1076788 - DNA, 15 bp, Homo sapiens
gctggccacaggccg

SEQ ID NO: 1076789 - DNA, 15 bp, Homo sapiens
tgctggccacaggcc

SEQ ID NO: 1076790 - DNA, 15 bp, Homo sapiens
ctgctggccacaggc

SEQ ID NO: 1076791 - DNA, 15 bp, Homo sapiens
cctgctggccacagg

SEQ ID NO: 1076792 - DNA, 15 bp, Homo sapiens
ccctgctggccacag

SEQ ID NO: 1076793 - DNA, 15 bp, Homo sapiens
cccctgctggccaca

SEQ ID NO: 1076794 - DNA, 15 bp, Homo sapiens
gcccctgctggccac

SEQ ID NO: 1076795 - DNA, 15 bp, Homo sapiens
agcccctgctggcca

SEQ ID NO: 1076796 - DNA, 15 bp, Homo sapiens
aagcccctgctggcc

SEQ ID NO: 1076797 - DNA, 15 bp, Homo sapiens
gaagcccctgctggc

SEQ ID NO: 1076798 - DNA, 15 bp, Homo sapiens
ggaagcccctgctgg

SEQ ID NO: 1076799 - DNA, 15 bp, Homo sapiens
cggaagcccctgctg

SEQ ID NO: 1076800 - DNA, 15 bp, Homo sapiens
acggaagcccctgct

SEQ ID NO: 1076801 - DNA, 15 bp, Homo sapiens
gacggaagcccctgc

SEQ ID NO: 1076802 - DNA, 15 bp, Homo sapiens
ggacggaagcccctg

SEQ ID NO: 1076803 - DNA, 15 bp, Homo sapiens
gggacggaagcccct

SEQ ID NO: 1076804 - DNA, 15 bp, Homo sapiens
tgggacggaagcccc

SEQ ID NO: 1076805 - DNA, 15 bp, Homo sapiens
ctgggacggaagccc

SEQ ID NO: 1076806 - DNA, 15 bp, Homo sapiens
actgggacggaagcc

SEQ ID NO: 1076807 - DNA, 15 bp, Homo sapiens
gactgggacggaagc

SEQ ID NO: 1076808 - DNA, 15 bp, Homo sapiens
tgactgggacggaag

SEQ ID NO: 1076809 - DNA, 15 bp, Homo sapiens
atgactgggacggaa

SEQ ID NO: 1076810 - DNA, 15 bp, Homo sapiens
catgactgggacgga

SEQ ID NO: 1076811 - DNA, 15 bp, Homo sapiens
tcatgactgggacgg

SEQ ID NO: 1076812 - DNA, 15 bp, Homo sapiens
ctcatgactgggacg

SEQ ID NO: 1076813 - DNA, 15 bp, Homo sapiens
cctcatgactgggac

SEQ ID NO: 1076814 - DNA, 15 bp, Homo sapiens
tcctcatgactggga

SEQ ID NO: 1076815 - DNA, 15 bp, Homo sapiens
ctcctcatgactggg

SEQ ID NO: 1076816 - DNA, 15 bp, Homo sapiens
gctcctcatgactgg

SEQ ID NO: 1076817 - DNA, 15 bp, Homo sapiens
ggctcctcatgactg

SEQ ID NO: 1076818 - DNA, 15 bp, Homo sapiens
aggctcctcatgact

SEQ ID NO: 1076819 - DNA, 15 bp, Homo sapiens
caggctcctcatgac

SEQ ID NO: 1076820 - DNA, 15 bp, Homo sapiens
ccaggctcctcatga

SEQ ID NO: 1076821 - DNA, 15 bp, Homo sapiens
cccaggctcctcatg

SEQ ID NO: 1076822 - DNA, 15 bp, Homo sapiens
ccccaggctcctcat

SEQ ID NO: 1076823 - DNA, 15 bp, Homo sapiens
gccccaggctcctca

SEQ ID NO: 1076824 - DNA, 15 bp, Homo sapiens
ggccccaggctcctc

SEQ ID NO: 1076825 - DNA, 15 bp, Homo sapiens
aggccccaggctcct

SEQ ID NO: 1076826 - DNA, 15 bp, Homo sapiens
gaggccccaggctcc

SEQ ID NO: 1076827 - DNA, 15 bp, Homo sapiens
agaggccccaggctc

SEQ ID NO: 1076828 - DNA, 15 bp, Homo sapiens
aagaggccccaggct

SEQ ID NO: 1076829 - DNA, 15 bp, Homo sapiens
caagaggccccaggc

SEQ ID NO: 1076830 - DNA, 15 bp, Homo sapiens
ccaagaggccccagg

SEQ ID NO: 1076831 - DNA, 15 bp, Homo sapiens
cccaagaggccccag

SEQ ID NO: 1076832 - DNA, 15 bp, Homo sapiens
gcccaagaggcccca

SEQ ID NO: 1076833 - DNA, 15 bp, Homo sapiens
agcccaagaggcccc

SEQ ID NO: 1076834 - DNA, 15 bp, Homo sapiens
aagcccaagaggccc

SEQ ID NO: 1076835 - DNA, 15 bp, Homo sapiens
caagcccaagaggcc

SEQ ID NO: 1076836 - DNA, 15 bp, Homo sapiens
ccaagcccaagaggc

SEQ ID NO: 1076837 - DNA, 15 bp, Homo sapiens
accaagcccaagagg

SEQ ID NO: 1076838 - DNA, 15 bp, Homo sapiens
aaccaagcccaagag

SEQ ID NO: 1076839 - DNA, 15 bp, Homo sapiens
gaaccaagcccaaga

SEQ ID NO: 1076840 - DNA, 15 bp, Homo sapiens
agaaccaagcccaag

SEQ ID NO: 1076841 - DNA, 15 bp, Homo sapiens
aagaaccaagcccaa

SEQ ID NO: 1076842 - DNA, 15 bp, Homo sapiens
gaagaaccaagccca

SEQ ID NO: 1076843 - DNA, 15 bp, Homo sapiens
tgaagaaccaagccc

SEQ ID NO: 1076844 - DNA, 15 bp, Homo sapiens
ttgaagaaccaagcc

SEQ ID NO: 1076845 - DNA, 15 bp, Homo sapiens
gttgaagaaccaagc

SEQ ID NO: 1076846 - DNA, 15 bp, Homo sapiens
ggttgaagaaccaag

SEQ ID NO: 1076847 - DNA, 15 bp, Homo sapiens
gggttgaagaaccaa

SEQ ID NO: 1076848 - DNA, 15 bp, Homo sapiens
tgggttgaagaacca

SEQ ID NO: 1076849 - DNA, 15 bp, Homo sapiens
gtgggttgaagaacc

SEQ ID NO: 1076850 - DNA, 15 bp, Homo sapiens
agtgggttgaagaac

SEQ ID NO: 1076851 - DNA, 15 bp, Homo sapiens
cagtgggttgaagaa

SEQ ID NO: 1076852 - DNA, 15 bp, Homo sapiens
tcagtgggttgaaga

SEQ ID NO: 1076853 - DNA, 15 bp, Homo sapiens
ttcagtgggttgaag

SEQ ID NO: 1076854 - DNA, 15 bp, Homo sapiens
cttcagtgggttgaa

SEQ ID NO: 1076855 - DNA, 15 bp, Homo sapiens
tcttcagtgggttga

SEQ ID NO: 1076856 - DNA, 15 bp, Homo sapiens
ctcttcagtgggttg

SEQ ID NO: 1076857 - DNA, 15 bp, Homo sapiens
gctcttcagtgggtt

SEQ ID NO: 1076858 - DNA, 15 bp, Homo sapiens
agctcttcagtgggt

SEQ ID NO: 1076859 - DNA, 15 bp, Homo sapiens
cagctcttcagtggg

SEQ ID NO: 1076860 - DNA, 15 bp, Homo sapiens
tcagctcttcagtgg

SEQ ID NO: 1076861 - DNA, 15 bp, Homo sapiens
ctcagctcttcagtg

SEQ ID NO: 1076862 - DNA, 15 bp, Homo sapiens
tctcagctcttcagt

SEQ ID NO: 1076863 - DNA, 15 bp, Homo sapiens
ctctcagctcttcag

SEQ ID NO: 1076864 - DNA, 15 bp, Homo sapiens
gctctcagctcttca

SEQ ID NO: 1076865 - DNA, 15 bp, Homo sapiens
ggctctcagctcttc

SEQ ID NO: 1076866 - DNA, 15 bp, Homo sapiens
tggctctcagctctt

SEQ ID NO: 1076867 - DNA, 15 bp, Homo sapiens
atggctctcagctct

SEQ ID NO: 1076868 - DNA, 15 bp, Homo sapiens
catggctctcagctc

SEQ ID NO: 1076869 - DNA, 15 bp, Homo sapiens
acatggctctcagct

SEQ ID NO: 1076870 - DNA, 15 bp, Homo sapiens
gacatggctctcagc

SEQ ID NO: 1076871 - DNA, 15 bp, Homo sapiens
tgacatggctctcag

SEQ ID NO: 1076872 - DNA, 15 bp, Homo sapiens
gtgacatggctctca

SEQ ID NO: 1076873 - DNA, 15 bp, Homo sapiens
agtgacatggctctc

SEQ ID NO: 1076874 - DNA, 15 bp, Homo sapiens
cagtgacatggctct

SEQ ID NO: 1076875 - DNA, 15 bp, Homo sapiens
ccagtgacatggctc

SEQ ID NO: 1076876 - DNA, 15 bp, Homo sapiens
tccagtgacatggct

SEQ ID NO: 1076877 - DNA, 15 bp, Homo sapiens
gtccagtgacatggc

SEQ ID NO: 1076878 - DNA, 15 bp, Homo sapiens
ggtccagtgacatgg

SEQ ID NO: 1076879 - DNA, 15 bp, Homo sapiens
gggtccagtgacatg

SEQ ID NO: 1076880 - DNA, 15 bp, Homo sapiens
ggggtccagtgacat

SEQ ID NO: 1076881 - DNA, 15 bp, Homo sapiens
tggggtccagtgaca

SEQ ID NO: 1076882 - DNA, 15 bp, Homo sapiens
gtggggtccagtgac

SEQ ID NO: 1076883 - DNA, 15 bp, Homo sapiens
agtggggtccagtga

SEQ ID NO: 1076884 - DNA, 15 bp, Homo sapiens
aagtggggtccagtg

SEQ ID NO: 1076885 - DNA, 15 bp, Homo sapiens
caagtggggtccagt

SEQ ID NO: 1076886 - DNA, 15 bp, Homo sapiens
tcaagtggggtccag

SEQ ID NO: 1076887 - DNA, 15 bp, Homo sapiens
ctcaagtggggtcca

SEQ ID NO: 1076888 - DNA, 15 bp, Homo sapiens
cctcaagtggggtcc

SEQ ID NO: 1076889 - DNA, 15 bp, Homo sapiens
gcctcaagtggggtc

SEQ ID NO: 1076890 - DNA, 15 bp, Homo sapiens
ggcctcaagtggggt

SEQ ID NO: 1076891 - DNA, 15 bp, Homo sapiens
aggcctcaagtgggg

SEQ ID NO: 1076892 - DNA, 15 bp, Homo sapiens
aaggcctcaagtggg

SEQ ID NO: 1076893 - DNA, 15 bp, Homo sapiens
taaggcctcaagtgg

SEQ ID NO: 1076894 - DNA, 15 bp, Homo sapiens
ctaaggcctcaagtg

SEQ ID NO: 1076895 - DNA, 15 bp, Homo sapiens
actaaggcctcaagt

SEQ ID NO: 1076896 - DNA, 15 bp, Homo sapiens
aactaaggcctcaag

SEQ ID NO: 1076897 - DNA, 15 bp, Homo sapiens
aaactaaggcctcaa

SEQ ID NO: 1076898 - DNA, 15 bp, Homo sapiens
gaaactaaggcctca

SEQ ID NO: 1076899 - DNA, 15 bp, Homo sapiens
agaaactaaggcctc

SEQ ID NO: 1076900 - DNA, 15 bp, Homo sapiens
aagaaactaaggcct

SEQ ID NO: 1076901 - DNA, 15 bp, Homo sapiens
gaagaaactaaggcc

SEQ ID NO: 1076902 - DNA, 15 bp, Homo sapiens
ggaagaaactaaggc

SEQ ID NO: 1076903 - DNA, 15 bp, Homo sapiens
aggaagaaactaagg

SEQ ID NO: 1076904 - DNA, 15 bp, Homo sapiens
aaggaagaaactaag

SEQ ID NO: 1076905 - DNA, 15 bp, Homo sapiens
gaaggaagaaactaa

SEQ ID NO: 1076906 - DNA, 15 bp, Homo sapiens
ggaaggaagaaacta

SEQ ID NO: 1076907 - DNA, 15 bp, Homo sapiens
gggaaggaagaaact

SEQ ID NO: 1076908 - DNA, 15 bp, Homo sapiens
ggggaaggaagaaac

SEQ ID NO: 1076909 - DNA, 15 bp, Homo sapiens
aggggaaggaagaaa

SEQ ID NO: 1076910 - DNA, 15 bp, Homo sapiens
gaggggaaggaagaa

SEQ ID NO: 1076911 - DNA, 15 bp, Homo sapiens
ggaggggaaggaaga

SEQ ID NO: 1076912 - DNA, 15 bp, Homo sapiens
aggaggggaaggaag

SEQ ID NO: 1076913 - DNA, 15 bp, Homo sapiens
caggaggggaaggaa

SEQ ID NO: 1076914 - DNA, 15 bp, Homo sapiens
gcaggaggggaagga

SEQ ID NO: 1076915 - DNA, 15 bp, Homo sapiens
tgcaggaggggaagg

SEQ ID NO: 1076916 - DNA, 15 bp, Homo sapiens
atgcaggaggggaag

SEQ ID NO: 1076917 - DNA, 15 bp, Homo sapiens
catgcaggaggggaa

SEQ ID NO: 1076918 - DNA, 15 bp, Homo sapiens
ccatgcaggagggga

SEQ ID NO: 1076919 - DNA, 15 bp, Homo sapiens
gccatgcaggagggg

SEQ ID NO: 1076920 - DNA, 15 bp, Homo sapiens
ggccatgcaggaggg

SEQ ID NO: 1076921 - DNA, 15 bp, Homo sapiens
aggccatgcaggagg

SEQ ID NO: 1076922 - DNA, 15 bp, Homo sapiens
aaggccatgcaggag

SEQ ID NO: 1076923 - DNA, 15 bp, Homo sapiens
gaaggccatgcagga

SEQ ID NO: 1076924 - DNA, 15 bp, Homo sapiens
ggaaggccatgcagg

SEQ ID NO: 1076925 - DNA, 15 bp, Homo sapiens
gggaaggccatgcag

SEQ ID NO: 1076926 - DNA, 15 bp, Homo sapiens
ggggaaggccatgca

SEQ ID NO: 1076927 - DNA, 15 bp, Homo sapiens
tggggaaggccatgc

SEQ ID NO: 1076928 - DNA, 15 bp, Homo sapiens
ctggggaaggccatg

SEQ ID NO: 1076929 - DNA, 15 bp, Homo sapiens
cctggggaaggccat

SEQ ID NO: 1076930 - DNA, 15 bp, Homo sapiens
acctggggaaggcca

SEQ ID NO: 1076931 - DNA, 15 bp, Homo sapiens
aacctggggaaggcc

SEQ ID NO: 1076932 - DNA, 15 bp, Homo sapiens
aaacctggggaaggc

SEQ ID NO: 1076933 - DNA, 15 bp, Homo sapiens
gaaacctggggaagg

SEQ ID NO: 1076934 - DNA, 15 bp, Homo sapiens
ggaaacctggggaag

SEQ ID NO: 1076935 - DNA, 15 bp, Homo sapiens
gggaaacctggggaa

SEQ ID NO: 1076936 - DNA, 15 bp, Homo sapiens
ggggaaacctgggga

SEQ ID NO: 1076937 - DNA, 15 bp, Homo sapiens
aggggaaacctgggg

SEQ ID NO: 1076938 - DNA, 15 bp, Homo sapiens
aaggggaaacctggg

SEQ ID NO: 1076939 - DNA, 15 bp, Homo sapiens
gaaggggaaacctgg

SEQ ID NO: 1076940 - DNA, 15 bp, Homo sapiens
agaaggggaaacctg

SEQ ID NO: 1076941 - DNA, 15 bp, Homo sapiens
aagaaggggaaacct

SEQ ID NO: 1076942 - DNA, 15 bp, Homo sapiens
taagaaggggaaacc

SEQ ID NO: 1076943 - DNA, 15 bp, Homo sapiens
gtaagaaggggaaac

SEQ ID NO: 1076944 - DNA, 15 bp, Homo sapiens
agtaagaaggggaaa

SEQ ID NO: 1076945 - DNA, 15 bp, Homo sapiens
aagtaagaaggggaa

SEQ ID NO: 1076946 - DNA, 15 bp, Homo sapiens
taagtaagaagggga

SEQ ID NO: 1076947 - DNA, 15 bp, Homo sapiens
ataagtaagaagggg

SEQ ID NO: 1076948 - DNA, 15 bp, Homo sapiens
cataagtaagaaggg

SEQ ID NO: 1076949 - DNA, 15 bp, Homo sapiens
tcataagtaagaagg

SEQ ID NO: 1076950 - DNA, 15 bp, Homo sapiens
ctcataagtaagaag

SEQ ID NO: 1076951 - DNA, 15 bp, Homo sapiens
tctcataagtaagaa

SEQ ID NO: 1076952 - DNA, 15 bp, Homo sapiens
gtctcataagtaaga

SEQ ID NO: 1076953 - DNA, 15 bp, Homo sapiens
tgtctcataagtaag

SEQ ID NO: 1076954 - DNA, 15 bp, Homo sapiens
ctgtctcataagtaa

SEQ ID NO: 1076955 - DNA, 15 bp, Homo sapiens
actgtctcataagta

SEQ ID NO: 1076956 - DNA, 15 bp, Homo sapiens
cactgtctcataagt

SEQ ID NO: 1076957 - DNA, 15 bp, Homo sapiens
ccactgtctcataag

SEQ ID NO: 1076958 - DNA, 15 bp, Homo sapiens
cccactgtctcataa

SEQ ID NO: 1076959 - DNA, 15 bp, Homo sapiens
acccactgtctcata

SEQ ID NO: 1076960 - DNA, 15 bp, Homo sapiens
gacccactgtctcat

SEQ ID NO: 1076961 - DNA, 15 bp, Homo sapiens
agacccactgtctca

SEQ ID NO: 1076962 - DNA, 15 bp, Homo sapiens
cagacccactgtctc

SEQ ID NO: 1076963 - DNA, 15 bp, Homo sapiens
ccagacccactgtct

SEQ ID NO: 1076964 - DNA, 15 bp, Homo sapiens
cccagacccactgtc

SEQ ID NO: 1076965 - DNA, 15 bp, Homo sapiens
gcccagacccactgt

SEQ ID NO: 1076966 - DNA, 15 bp, Homo sapiens
ggcccagacccactg

SEQ ID NO: 1076967 - DNA, 15 bp, Homo sapiens
aggcccagacccact

SEQ ID NO: 1076968 - DNA, 15 bp, Homo sapiens
gaggcccagacccac

SEQ ID NO: 1076969 - DNA, 15 bp, Homo sapiens
tgaggcccagaccca

SEQ ID NO: 1076970 - DNA, 15 bp, Homo sapiens
gtgaggcccagaccc

SEQ ID NO: 1076971 - DNA, 15 bp, Homo sapiens
tgtgaggcccagacc

SEQ ID NO: 1076972 - DNA, 15 bp, Homo sapiens
ttgtgaggcccagac

SEQ ID NO: 1076973 - DNA, 15 bp, Homo sapiens
attgtgaggcccaga

SEQ ID NO: 1076974 - DNA, 15 bp, Homo sapiens
tattgtgaggcccag

SEQ ID NO: 1076975 - DNA, 15 bp, Homo sapiens
ctattgtgaggccca

SEQ ID NO: 1076976 - DNA, 15 bp, Homo sapiens
cctattgtgaggccc

SEQ ID NO: 1076977 - DNA, 15 bp, Homo sapiens
ccctattgtgaggcc

SEQ ID NO: 1076978 - DNA, 15 bp, Homo sapiens
cccctattgtgaggc

SEQ ID NO: 1076979 - DNA, 15 bp, Homo sapiens
tcccctattgtgagg

SEQ ID NO: 1076980 - DNA, 15 bp, Homo sapiens
atcccctattgtgag

SEQ ID NO: 1076981 - DNA, 15 bp, Homo sapiens
catcccctattgtga

SEQ ID NO: 1076982 - DNA, 15 bp, Homo sapiens
gcatcccctattgtg

SEQ ID NO: 1076983 - DNA, 15 bp, Homo sapiens
agcatcccctattgt

SEQ ID NO: 1076984 - DNA, 15 bp, Homo sapiens
gagcatcccctattg

SEQ ID NO: 1076985 - DNA, 15 bp, Homo sapiens
tgagcatcccctatt

SEQ ID NO: 1076986 - DNA, 15 bp, Homo sapiens
ctgagcatcccctat

SEQ ID NO: 1076987 - DNA, 15 bp, Homo sapiens
cctgagcatccccta

SEQ ID NO: 1076988 - DNA, 15 bp, Homo sapiens
gcctgagcatcccct

SEQ ID NO: 1076989 - DNA, 15 bp, Homo sapiens
agcctgagcatcccc

SEQ ID NO: 1076990 - DNA, 15 bp, Homo sapiens
aagcctgagcatccc

SEQ ID NO: 1076991 - DNA, 15 bp, Homo sapiens
taagcctgagcatcc

SEQ ID NO: 1076992 - DNA, 15 bp, Homo sapiens
ctaagcctgagcatc

SEQ ID NO: 1076993 - DNA, 15 bp, Homo sapiens
cctaagcctgagcat

SEQ ID NO: 1076994 - DNA, 15 bp, Homo sapiens
acctaagcctgagca

SEQ ID NO: 1076995 - DNA, 15 bp, Homo sapiens
cacctaagcctgagc

SEQ ID NO: 1076996 - DNA, 15 bp, Homo sapiens
gcacctaagcctgag

SEQ ID NO: 1076997 - DNA, 15 bp, Homo sapiens
ggcacctaagcctga

SEQ ID NO: 1076998 - DNA, 15 bp, Homo sapiens
aggcacctaagcctg

SEQ ID NO: 1076999 - DNA, 15 bp, Homo sapiens
gaggcacctaagcct

SEQ ID NO: 1077000 - DNA, 15 bp, Homo sapiens
ggaggcacctaagcc

SEQ ID NO: 1077001 - DNA, 15 bp, Homo sapiens
gggaggcacctaagc

SEQ ID NO: 1077002 - DNA, 15 bp, Homo sapiens
ggggaggcacctaag

SEQ ID NO: 1077003 - DNA, 15 bp, Homo sapiens
cggggaggcacctaa

SEQ ID NO: 1077004 - DNA, 15 bp, Homo sapiens
acggggaggcaccta

SEQ ID NO: 1077005 - DNA, 15 bp, Homo sapiens
gacggggaggcacct

SEQ ID NO: 1077006 - DNA, 15 bp, Homo sapiens
ggacggggaggcacc

SEQ ID NO: 1077007 - DNA, 15 bp, Homo sapiens
gggacggggaggcac

SEQ ID NO: 1077008 - DNA, 15 bp, Homo sapiens
ggggacggggaggca

SEQ ID NO: 1077009 - DNA, 15 bp, Homo sapiens
gggggacggggaggc

SEQ ID NO: 1077010 - DNA, 15 bp, Homo sapiens
tgggggacggggagg

SEQ ID NO: 1077011 - DNA, 15 bp, Homo sapiens
ctgggggacggggag

SEQ ID NO: 1077012 - DNA, 15 bp, Homo sapiens
tctgggggacgggga

SEQ ID NO: 1077013 - DNA, 15 bp, Homo sapiens
gtctgggggacgggg

SEQ ID NO: 1077014 - DNA, 15 bp, Homo sapiens
tgtctgggggacggg

SEQ ID NO: 1077015 - DNA, 15 bp, Homo sapiens
ctgtctgggggacgg

SEQ ID NO: 1077016 - DNA, 15 bp, Homo sapiens
actgtctgggggacg

SEQ ID NO: 1077017 - DNA, 15 bp, Homo sapiens
gactgtctgggggac

SEQ ID NO: 1077018 - DNA, 15 bp, Homo sapiens
ggactgtctggggga

SEQ ID NO: 1077019 - DNA, 15 bp, Homo sapiens
gggactgtctggggg

SEQ ID NO: 1077020 - DNA, 15 bp, Homo sapiens
agggactgtctgggg

SEQ ID NO: 1077021 - DNA, 15 bp, Homo sapiens
gagggactgtctggg

SEQ ID NO: 1077022 - DNA, 15 bp, Homo sapiens
tgagggactgtctgg

SEQ ID NO: 1077023 - DNA, 15 bp, Homo sapiens
ctgagggactgtctg

SEQ ID NO: 1077024 - DNA, 15 bp, Homo sapiens
gctgagggactgtct

SEQ ID NO: 1077025 - DNA, 15 bp, Homo sapiens
ggctgagggactgtc

SEQ ID NO: 1077026 - DNA, 15 bp, Homo sapiens
gggctgagggactgt

SEQ ID NO: 1077027 - DNA, 15 bp, Homo sapiens
ggggctgagggactg

SEQ ID NO: 1077028 - DNA, 15 bp, Homo sapiens
tggggctgagggact

SEQ ID NO: 1077029 - DNA, 15 bp, Homo sapiens
ctggggctgagggac

SEQ ID NO: 1077030 - DNA, 15 bp, Homo sapiens
actggggctgaggga

SEQ ID NO: 1077031 - DNA, 15 bp, Homo sapiens
cactggggctgaggg

SEQ ID NO: 1077032 - DNA, 15 bp, Homo sapiens
tcactggggctgagg

SEQ ID NO: 1077033 - DNA, 15 bp, Homo sapiens
ttcactggggctgag

SEQ ID NO: 1077034 - DNA, 15 bp, Homo sapiens
gttcactggggctga

SEQ ID NO: 1077035 - DNA, 15 bp, Homo sapiens
cgttcactggggctg

SEQ ID NO: 1077036 - DNA, 15 bp, Homo sapiens
acgttcactggggct

SEQ ID NO: 1077037 - DNA, 15 bp, Homo sapiens
gacgttcactggggc

SEQ ID NO: 1077038 - DNA, 15 bp, Homo sapiens
tgacgttcactgggg

SEQ ID NO: 1077039 - DNA, 15 bp, Homo sapiens
gtgacgttcactggg

SEQ ID NO: 1077040 - DNA, 15 bp, Homo sapiens
ggtgacgttcactgg

SEQ ID NO: 1077041 - DNA, 15 bp, Homo sapiens
cggtgacgttcactg

SEQ ID NO: 1077042 - DNA, 15 bp, Homo sapiens
acggtgacgttcact

SEQ ID NO: 1077043 - DNA, 15 bp, Homo sapiens
gacggtgacgttcac

SEQ ID NO: 1077044 - DNA, 15 bp, Homo sapiens
tgacggtgacgttca

SEQ ID NO: 1077045 - DNA, 15 bp, Homo sapiens
ctgacggtgacgttc

SEQ ID NO: 1077046 - DNA, 15 bp, Homo sapiens
cctgacggtgacgtt

SEQ ID NO: 1077047 - DNA, 15 bp, Homo sapiens
gcctgacggtgacgt

SEQ ID NO: 1077048 - DNA, 15 bp, Homo sapiens
tgcctgacggtgacg

SEQ ID NO: 1077049 - DNA, 15 bp, Homo sapiens
gtgcctgacggtgac

SEQ ID NO: 1077050 - DNA, 15 bp, Homo sapiens
ggtgcctgacggtga

SEQ ID NO: 1077051 - DNA, 15 bp, Homo sapiens
aggtgcctgacggtg

SEQ ID NO: 1077052 - DNA, 15 bp, Homo sapiens
gaggtgcctgacggt

SEQ ID NO: 1077053 - DNA, 15 bp, Homo sapiens
tgaggtgcctgacgg

SEQ ID NO: 1077054 - DNA, 15 bp, Homo sapiens
ttgaggtgcctgacg

SEQ ID NO: 1077055 - DNA, 15 bp, Homo sapiens
cttgaggtgcctgac

SEQ ID NO: 1077056 - DNA, 15 bp, Homo sapiens
ccttgaggtgcctga

SEQ ID NO: 1077057 - DNA, 15 bp, Homo sapiens
gccttgaggtgcctg

SEQ ID NO: 1077058 - DNA, 15 bp, Homo sapiens
ggccttgaggtgcct

SEQ ID NO: 1077059 - DNA, 15 bp, Homo sapiens
tggccttgaggtgcc

SEQ ID NO: 1077060 - DNA, 15 bp, Homo sapiens
ttggccttgaggtgc

SEQ ID NO: 1077061 - DNA, 15 bp, Homo sapiens
gttggccttgaggtg

SEQ ID NO: 1077062 - DNA, 15 bp, Homo sapiens
agttggccttgaggt

SEQ ID NO: 1077063 - DNA, 15 bp, Homo sapiens
gagttggccttgagg

SEQ ID NO: 1077064 - DNA, 15 bp, Homo sapiens
agagttggccttgag

SEQ ID NO: 1077065 - DNA, 15 bp, Homo sapiens
cagagttggccttga

SEQ ID NO: 1077066 - DNA, 15 bp, Homo sapiens
gcagagttggccttg

SEQ ID NO: 1077067 - DNA, 15 bp, Homo sapiens
tgcagagttggcctt

SEQ ID NO: 1077068 - DNA, 15 bp, Homo sapiens
ctgcagagttggcct

SEQ ID NO: 1077069 - DNA, 15 bp, Homo sapiens
actgcagagttggcc

SEQ ID NO: 1077070 - DNA, 15 bp, Homo sapiens
cactgcagagttggc

SEQ ID NO: 1077071 - DNA, 15 bp, Homo sapiens
ccactgcagagttgg

SEQ ID NO: 1077072 - DNA, 15 bp, Homo sapiens
accactgcagagttg

SEQ ID NO: 1077073 - DNA, 15 bp, Homo sapiens
caccactgcagagtt

SEQ ID NO: 1077074 - DNA, 15 bp, Homo sapiens
tcaccactgcagagt

SEQ ID NO: 1077075 - DNA, 15 bp, Homo sapiens
ctcaccactgcagag

SEQ ID NO: 1077076 - DNA, 15 bp, Homo sapiens
gctcaccactgcaga

SEQ ID NO: 1077077 - DNA, 15 bp, Homo sapiens
agctcaccactgcag

SEQ ID NO: 1077078 - DNA, 15 bp, Homo sapiens
cagctcaccactgca

SEQ ID NO: 1077079 - DNA, 15 bp, Homo sapiens
ccagctcaccactgc

SEQ ID NO: 1077080 - DNA, 15 bp, Homo sapiens
cccagctcaccactg

SEQ ID NO: 1077081 - DNA, 15 bp, Homo sapiens
tcccagctcaccact

SEQ ID NO: 1077082 - DNA, 15 bp, Homo sapiens
atcccagctcaccac

SEQ ID NO: 1077083 - DNA, 15 bp, Homo sapiens
catcccagctcacca

SEQ ID NO: 1077084 - DNA, 15 bp, Homo sapiens
acatcccagctcacc

SEQ ID NO: 1077085 - DNA, 15 bp, Homo sapiens
aacatcccagctcac

SEQ ID NO: 1077086 - DNA, 15 bp, Homo sapiens
gaacatcccagctca

SEQ ID NO: 1077087 - DNA, 15 bp, Homo sapiens
agaacatcccagctc

SEQ ID NO: 1077088 - DNA, 15 bp, Homo sapiens
cagaacatcccagct

SEQ ID NO: 1077089 - DNA, 15 bp, Homo sapiens
ccagaacatcccagc

SEQ ID NO: 1077090 - DNA, 15 bp, Homo sapiens
tccagaacatcccag

SEQ ID NO: 1077091 - DNA, 15 bp, Homo sapiens
ctccagaacatccca

SEQ ID NO: 1077092 - DNA, 15 bp, Homo sapiens
cctccagaacatccc

SEQ ID NO: 1077093 - DNA, 15 bp, Homo sapiens
tcctccagaacatcc

SEQ ID NO: 1077094 - DNA, 15 bp, Homo sapiens
atcctccagaacatc

SEQ ID NO: 1077095 - DNA, 15 bp, Homo sapiens
catcctccagaacat

SEQ ID NO: 1077096 - DNA, 15 bp, Homo sapiens
tcatcctccagaaca

SEQ ID NO: 1077097 - DNA, 15 bp, Homo sapiens
ctcatcctccagaac

SEQ ID NO: 1077098 - DNA, 15 bp, Homo sapiens
cctcatcctccagaa

SEQ ID NO: 1077099 - DNA, 15 bp, Homo sapiens
acctcatcctccaga

SEQ ID NO: 1077100 - DNA, 15 bp, Homo sapiens
aacctcatcctccag

SEQ ID NO: 1077101 - DNA, 15 bp, Homo sapiens
caacctcatcctcca

SEQ ID NO: 1077102 - DNA, 15 bp, Homo sapiens
acaacctcatcctcc

SEQ ID NO: 1077103 - DNA, 15 bp, Homo sapiens
gacaacctcatcctc

SEQ ID NO: 1077104 - DNA, 15 bp, Homo sapiens
tgacaacctcatcct

SEQ ID NO: 1077105 - DNA, 15 bp, Homo sapiens
atgacaacctcatcc

SEQ ID NO: 1077106 - DNA, 15 bp, Homo sapiens
gatgacaacctcatc

SEQ ID NO: 1077107 - DNA, 15 bp, Homo sapiens
cgatgacaacctcat

SEQ ID NO: 1077108 - DNA, 15 bp, Homo sapiens
ccgatgacaacctca

SEQ ID NO: 1077109 - DNA, 15 bp, Homo sapiens
tccgatgacaacctc

SEQ ID NO: 1077110 - DNA, 15 bp, Homo sapiens
atccgatgacaacct

SEQ ID NO: 1077111 - DNA, 15 bp, Homo sapiens
aatccgatgacaacc

SEQ ID NO: 1077112 - DNA, 15 bp, Homo sapiens
aaatccgatgacaac

SEQ ID NO: 1077113 - DNA, 15 bp, Homo sapiens
caaatccgatgacaa

SEQ ID NO: 1077114 - DNA, 15 bp, Homo sapiens
gcaaatccgatgaca

SEQ ID NO: 1077115 - DNA, 15 bp, Homo sapiens
ggcaaatccgatgac

SEQ ID NO: 1077116 - DNA, 15 bp, Homo sapiens
tggcaaatccgatga

SEQ ID NO: 1077117 - DNA, 15 bp, Homo sapiens
atggcaaatccgatg

SEQ ID NO: 1077118 - DNA, 15 bp, Homo sapiens
gatggcaaatccgat

SEQ ID NO: 1077119 - DNA, 15 bp, Homo sapiens
agatggcaaatccga

SEQ ID NO: 1077120 - DNA, 15 bp, Homo sapiens
gagatggcaaatccg

SEQ ID NO: 1077121 - DNA, 15 bp, Homo sapiens
ggagatggcaaatcc

SEQ ID NO: 1077122 - DNA, 15 bp, Homo sapiens
gggagatggcaaatc

SEQ ID NO: 1077123 - DNA, 15 bp, Homo sapiens
tgggagatggcaaat

SEQ ID NO: 1077124 - DNA, 15 bp, Homo sapiens
ctgggagatggcaaa

SEQ ID NO: 1077125 - DNA, 15 bp, Homo sapiens
gctgggagatggcaa

SEQ ID NO: 1077126 - DNA, 15 bp, Homo sapiens
tgctgggagatggca

SEQ ID NO: 1077127 - DNA, 15 bp, Homo sapiens
ctgctgggagatggc

SEQ ID NO: 1077128 - DNA, 15 bp, Homo sapiens
cctgctgggagatgg

SEQ ID NO: 1077129 - DNA, 15 bp, Homo sapiens
acctgctgggagatg

SEQ ID NO: 1077130 - DNA, 15 bp, Homo sapiens
tacctgctgggagat

SEQ ID NO: 1077131 - DNA, 15 bp, Homo sapiens
ttacctgctgggaga

SEQ ID NO: 1077132 - DNA, 15 bp, Homo sapiens
attacctgctgggag

SEQ ID NO: 1077133 - DNA, 15 bp, Homo sapiens
cattacctgctggga

SEQ ID NO: 1077134 - DNA, 15 bp, Homo sapiens
gcattacctgctggg

SEQ ID NO: 1077135 - DNA, 15 bp, Homo sapiens
agcattacctgctgg

SEQ ID NO: 1077136 - DNA, 15 bp, Homo sapiens
gagcattacctgctg

SEQ ID NO: 1077137 - DNA, 15 bp, Homo sapiens
ggagcattacctgct

SEQ ID NO: 1077138 - DNA, 15 bp, Homo sapiens
tggagcattacctgc

SEQ ID NO: 1077139 - DNA, 15 bp, Homo sapiens
gtggagcattacctg

SEQ ID NO: 1077140 - DNA, 15 bp, Homo sapiens
agtggagcattacct

SEQ ID NO: 1077141 - DNA, 15 bp, Homo sapiens
cagtggagcattacc

SEQ ID NO: 1077142 - DNA, 15 bp, Homo sapiens
acagtggagcattac

SEQ ID NO: 1077143 - DNA, 15 bp, Homo sapiens
gacagtggagcatta

SEQ ID NO: 1077144 - DNA, 15 bp, Homo sapiens
ggacagtggagcatt

SEQ ID NO: 1077145 - DNA, 15 bp, Homo sapiens
aggacagtggagcat

SEQ ID NO: 1077146 - DNA, 15 bp, Homo sapiens
aaggacagtggagca

SEQ ID NO: 1077147 - DNA, 15 bp, Homo sapiens
taaggacagtggagc

SEQ ID NO: 1077148 - DNA, 15 bp, Homo sapiens
ctaaggacagtggag

SEQ ID NO: 1077149 - DNA, 15 bp, Homo sapiens
cctaaggacagtgga

SEQ ID NO: 1077150 - DNA, 15 bp, Homo sapiens
tcctaaggacagtgg

SEQ ID NO: 1077151 - DNA, 15 bp, Homo sapiens
ctcctaaggacagtg

SEQ ID NO: 1077152 - DNA, 15 bp, Homo sapiens
cctcctaaggacagt

SEQ ID NO: 1077153 - DNA, 15 bp, Homo sapiens
ccctcctaaggacag

SEQ ID NO: 1077154 - DNA, 15 bp, Homo sapiens
tccctcctaaggaca

SEQ ID NO: 1077155 - DNA, 15 bp, Homo sapiens
ttccctcctaaggac

SEQ ID NO: 1077156 - DNA, 15 bp, Homo sapiens
cttccctcctaagga

SEQ ID NO: 1077157 - DNA, 15 bp, Homo sapiens
ccttccctcctaagg

SEQ ID NO: 1077158 - DNA, 15 bp, Homo sapiens
tccttccctcctaag

SEQ ID NO: 1077159 - DNA, 15 bp, Homo sapiens
gtccttccctcctaa

SEQ ID NO: 1077160 - DNA, 15 bp, Homo sapiens
tgtccttccctccta

SEQ ID NO: 1077161 - DNA, 15 bp, Homo sapiens
gtgtccttccctcct

SEQ ID NO: 1077162 - DNA, 15 bp, Homo sapiens
tgtgtccttccctcc

SEQ ID NO: 1077163 - DNA, 15 bp, Homo sapiens
atgtgtccttccctc

SEQ ID NO: 1077164 - DNA, 15 bp, Homo sapiens
gatgtgtccttccct

SEQ ID NO: 1077165 - DNA, 15 bp, Homo sapiens
tgatgtgtccttccc

SEQ ID NO: 1077166 - DNA, 15 bp, Homo sapiens
ttgatgtgtccttcc

SEQ ID NO: 1077167 - DNA, 15 bp, Homo sapiens
cttgatgtgtccttc

SEQ ID NO: 1077168 - DNA, 15 bp, Homo sapiens
tcttgatgtgtcctt

SEQ ID NO: 1077169 - DNA, 15 bp, Homo sapiens
gtcttgatgtgtcct

SEQ ID NO: 1077170 - DNA, 15 bp, Homo sapiens
tgtcttgatgtgtcc

SEQ ID NO: 1077171 - DNA, 15 bp, Homo sapiens
ctgtcttgatgtgtc

SEQ ID NO: 1077172 - DNA, 15 bp, Homo sapiens
actgtcttgatgtgt

SEQ ID NO: 1077173 - DNA, 15 bp, Homo sapiens
tactgtcttgatgtg

SEQ ID NO: 1077174 - DNA, 15 bp, Homo sapiens
ctactgtcttgatgt

SEQ ID NO: 1077175 - DNA, 15 bp, Homo sapiens
actactgtcttgatg

SEQ ID NO: 1077176 - DNA, 15 bp, Homo sapiens
cactactgtcttgat

SEQ ID NO: 1077177 - DNA, 15 bp, Homo sapiens
ccactactgtcttga

SEQ ID NO: 1077178 - DNA, 15 bp, Homo sapiens
gccactactgtcttg

SEQ ID NO: 1077179 - DNA, 15 bp, Homo sapiens
tgccactactgtctt

SEQ ID NO: 1077180 - DNA, 15 bp, Homo sapiens
ctgccactactgtct

SEQ ID NO: 1077181 - DNA, 15 bp, Homo sapiens
tctgccactactgtc

SEQ ID NO: 1077182 - DNA, 15 bp, Homo sapiens
atctgccactactgt

SEQ ID NO: 1077183 - DNA, 15 bp, Homo sapiens
catctgccactactg

SEQ ID NO: 1077184 - DNA, 15 bp, Homo sapiens
ccatctgccactact

SEQ ID NO: 1077185 - DNA, 15 bp, Homo sapiens
cccatctgccactac

SEQ ID NO: 1077186 - DNA, 15 bp, Homo sapiens
ccccatctgccacta

SEQ ID NO: 1077187 - DNA, 15 bp, Homo sapiens
cccccatctgccact

SEQ ID NO: 1077188 - DNA, 15 bp, Homo sapiens
acccccatctgccac

SEQ ID NO: 1077189 - DNA, 15 bp, Homo sapiens
tacccccatctgcca

SEQ ID NO: 1077190 - DNA, 15 bp, Homo sapiens
ctacccccatctgcc

SEQ ID NO: 1077191 - DNA, 15 bp, Homo sapiens
cctacccccatctgc

SEQ ID NO: 1077192 - DNA, 15 bp, Homo sapiens
tcctacccccatctg

SEQ ID NO: 1077193 - DNA, 15 bp, Homo sapiens
ctcctacccccatct

SEQ ID NO: 1077194 - DNA, 15 bp, Homo sapiens
actcctacccccatc

SEQ ID NO: 1077195 - DNA, 15 bp, Homo sapiens
cactcctacccccat

SEQ ID NO: 1077196 - DNA, 15 bp, Homo sapiens
acactcctaccccca

SEQ ID NO: 1077197 - DNA, 15 bp, Homo sapiens
cacactcctaccccc

SEQ ID NO: 1077198 - DNA, 15 bp, Homo sapiens
ccacactcctacccc

SEQ ID NO: 1077199 - DNA, 15 bp, Homo sapiens
gccacactcctaccc

SEQ ID NO: 1077200 - DNA, 15 bp, Homo sapiens
tgccacactcctacc

SEQ ID NO: 1077201 - DNA, 15 bp, Homo sapiens
ctgccacactcctac

SEQ ID NO: 1077202 - DNA, 15 bp, Homo sapiens
actgccacactccta

SEQ ID NO: 1077203 - DNA, 15 bp, Homo sapiens
cactgccacactcct

SEQ ID NO: 1077204 - DNA, 15 bp, Homo sapiens
ccactgccacactcc

SEQ ID NO: 1077205 - DNA, 15 bp, Homo sapiens
accactgccacactc

SEQ ID NO: 1077206 - DNA, 15 bp, Homo sapiens
caccactgccacact

SEQ ID NO: 1077207 - DNA, 15 bp, Homo sapiens
ccaccactgccacac

SEQ ID NO: 1077208 - DNA, 15 bp, Homo sapiens
accaccactgccaca

SEQ ID NO: 1077209 - DNA, 15 bp, Homo sapiens
caccaccactgccac

SEQ ID NO: 1077210 - DNA, 15 bp, Homo sapiens
tcaccaccactgcca

SEQ ID NO: 1077211 - DNA, 15 bp, Homo sapiens
atcaccaccactgcc

SEQ ID NO: 1077212 - DNA, 15 bp, Homo sapiens
catcaccaccactgc

SEQ ID NO: 1077213 - DNA, 15 bp, Homo sapiens
ccatcaccaccactg

SEQ ID NO: 1077214 - DNA, 15 bp, Homo sapiens
tccatcaccaccact

SEQ ID NO: 1077215 - DNA, 15 bp, Homo sapiens
ctccatcaccaccac

SEQ ID NO: 1077216 - DNA, 15 bp, Homo sapiens
tctccatcaccacca

SEQ ID NO: 1077217 - DNA, 15 bp, Homo sapiens
ttctccatcaccacc

SEQ ID NO: 1077218 - DNA, 15 bp, Homo sapiens
tttctccatcaccac

SEQ ID NO: 1077219 - DNA, 15 bp, Homo sapiens
atttctccatcacca

SEQ ID NO: 1077220 - DNA, 15 bp, Homo sapiens
tatttctccatcacc

SEQ ID NO: 1077221 - DNA, 15 bp, Homo sapiens
ctatttctccatcac

SEQ ID NO: 1077222 - DNA, 15 bp, Homo sapiens
tctatttctccatca

SEQ ID NO: 1077223 - DNA, 15 bp, Homo sapiens
ttctatttctccatc

SEQ ID NO: 1077224 - DNA, 15 bp, Homo sapiens
tttctatttctccat

SEQ ID NO: 1077225 - DNA, 15 bp, Homo sapiens
ctttctatttctcca

SEQ ID NO: 1077226 - DNA, 15 bp, Homo sapiens
cctttctatttctcc

SEQ ID NO: 1077227 - DNA, 15 bp, Homo sapiens
tcctttctatttctc

SEQ ID NO: 1077228 - DNA, 15 bp, Homo sapiens
ttcctttctatttct

SEQ ID NO: 1077229 - DNA, 15 bp, Homo sapiens
tttcctttctatttc

SEQ ID NO: 1077230 - DNA, 15 bp, Homo sapiens
atttcctttctattt

SEQ ID NO: 1077231 - DNA, 15 bp, Homo sapiens
tatttcctttctatt

SEQ ID NO: 1077232 - DNA, 15 bp, Homo sapiens
ctatttcctttctat

SEQ ID NO: 1077233 - DNA, 15 bp, Homo sapiens
cctatttcctttcta

SEQ ID NO: 1077234 - DNA, 15 bp, Homo sapiens
tcctatttcctttct

SEQ ID NO: 1077235 - DNA, 15 bp, Homo sapiens
ttcctatttcctttc

SEQ ID NO: 1077236 - DNA, 15 bp, Homo sapiens
gttcctatttccttt

SEQ ID NO: 1077237 - DNA, 15 bp, Homo sapiens
agttcctatttcctt

SEQ ID NO: 1077238 - DNA, 15 bp, Homo sapiens
aagttcctatttcct

SEQ ID NO: 1077239 - DNA, 15 bp, Homo sapiens
caagttcctatttcc

SEQ ID NO: 1077240 - DNA, 15 bp, Homo sapiens
ccaagttcctatttc

SEQ ID NO: 1077241 - DNA, 15 bp, Homo sapiens
cccaagttcctattt

SEQ ID NO: 1077242 - DNA, 15 bp, Homo sapiens
ccccaagttcctatt

SEQ ID NO: 1077243 - DNA, 15 bp, Homo sapiens
gccccaagttcctat

SEQ ID NO: 1077244 - DNA, 15 bp, Homo sapiens
tgccccaagttccta

SEQ ID NO: 1077245 - DNA, 15 bp, Homo sapiens
ttgccccaagttcct

SEQ ID NO: 1077246 - DNA, 15 bp, Homo sapiens
cttgccccaagttcc

SEQ ID NO: 1077247 - DNA, 15 bp, Homo sapiens
ccttgccccaagttc

SEQ ID NO: 1077248 - DNA, 15 bp, Homo sapiens
cccttgccccaagtt

SEQ ID NO: 1077249 - DNA, 15 bp, Homo sapiens
tcccttgccccaagt

SEQ ID NO: 1077250 - DNA, 15 bp, Homo sapiens
ctcccttgccccaag

SEQ ID NO: 1077251 - DNA, 15 bp, Homo sapiens
tctcccttgccccaa

SEQ ID NO: 1077252 - DNA, 15 bp, Homo sapiens
atctcccttgcccca

SEQ ID NO: 1077253 - DNA, 15 bp, Homo sapiens
catctcccttgcccc

SEQ ID NO: 1077254 - DNA, 15 bp, Homo sapiens
tcatctcccttgccc

SEQ ID NO: 1077255 - DNA, 15 bp, Homo sapiens
ttcatctcccttgcc

SEQ ID NO: 1077256 - DNA, 15 bp, Homo sapiens
gttcatctcccttgc

SEQ ID NO: 1077257 - DNA, 15 bp, Homo sapiens
tgttcatctcccttg

SEQ ID NO: 1077258 - DNA, 15 bp, Homo sapiens
ctgttcatctccctt

SEQ ID NO: 1077259 - DNA, 15 bp, Homo sapiens
gctgttcatctccct

SEQ ID NO: 1077260 - DNA, 15 bp, Homo sapiens
tgctgttcatctccc

SEQ ID NO: 1077261 - DNA, 15 bp, Homo sapiens
ttgctgttcatctcc

SEQ ID NO: 1077262 - DNA, 15 bp, Homo sapiens
attgctgttcatctc

SEQ ID NO: 1077263 - DNA, 15 bp, Homo sapiens
aattgctgttcatct

SEQ ID NO: 1077264 - DNA, 15 bp, Homo sapiens
aaattgctgttcatc

SEQ ID NO: 1077265 - DNA, 15 bp, Homo sapiens
caaattgctgttcat

SEQ ID NO: 1077266 - DNA, 15 bp, Homo sapiens
ccaaattgctgttca

SEQ ID NO: 1077267 - DNA, 15 bp, Homo sapiens
tccaaattgctgttc

SEQ ID NO: 1077268 - DNA, 15 bp, Homo sapiens
gtccaaattgctgtt

SEQ ID NO: 1077269 - DNA, 15 bp, Homo sapiens
tgtccaaattgctgt

SEQ ID NO: 1077270 - DNA, 15 bp, Homo sapiens
atgtccaaattgctg

SEQ ID NO: 1077271 - DNA, 15 bp, Homo sapiens
tatgtccaaattgct

SEQ ID NO: 1077272 - DNA, 15 bp, Homo sapiens
atatgtccaaattgc

SEQ ID NO: 1077273 - DNA, 15 bp, Homo sapiens
catatgtccaaattg

SEQ ID NO: 1077274 - DNA, 15 bp, Homo sapiens
acatatgtccaaatt

SEQ ID NO: 1077275 - DNA, 15 bp, Homo sapiens
gacatatgtccaaat

SEQ ID NO: 1077276 - DNA, 15 bp, Homo sapiens
agacatatgtccaaa

SEQ ID NO: 1077277 - DNA, 15 bp, Homo sapiens
cagacatatgtccaa

SEQ ID NO: 1077278 - DNA, 15 bp, Homo sapiens
tcagacatatgtcca

SEQ ID NO: 1077279 - DNA, 15 bp, Homo sapiens
ttcagacatatgtcc

SEQ ID NO: 1077280 - DNA, 15 bp, Homo sapiens
tttcagacatatgtc

SEQ ID NO: 1077281 - DNA, 15 bp, Homo sapiens
ttttcagacatatgt

SEQ ID NO: 1077282 - DNA, 15 bp, Homo sapiens
attttcagacatatg

SEQ ID NO: 1077283 - DNA, 15 bp, Homo sapiens
aattttcagacatat

SEQ ID NO: 1077284 - DNA, 15 bp, Homo sapiens
caattttcagacata

SEQ ID NO: 1077285 - DNA, 15 bp, Homo sapiens
ccaattttcagacat

SEQ ID NO: 1077286 - DNA, 15 bp, Homo sapiens
cccaattttcagaca

SEQ ID NO: 1077287 - DNA, 15 bp, Homo sapiens
ccccaattttcagac

SEQ ID NO: 1077288 - DNA, 15 bp, Homo sapiens
gccccaattttcaga

SEQ ID NO: 1077289 - DNA, 15 bp, Homo sapiens
ggccccaattttcag

SEQ ID NO: 1077290 - DNA, 15 bp, Homo sapiens
gggccccaattttca

SEQ ID NO: 1077291 - DNA, 15 bp, Homo sapiens
ggggccccaattttc

SEQ ID NO: 1077292 - DNA, 15 bp, Homo sapiens
tggggccccaatttt

SEQ ID NO: 1077293 - DNA, 15 bp, Homo sapiens
atggggccccaattt

SEQ ID NO: 1077294 - DNA, 15 bp, Homo sapiens
aatggggccccaatt

SEQ ID NO: 1077295 - DNA, 15 bp, Homo sapiens
gaatggggccccaat

SEQ ID NO: 1077296 - DNA, 15 bp, Homo sapiens
tgaatggggccccaa

SEQ ID NO: 1077297 - DNA, 15 bp, Homo sapiens
ctgaatggggcccca

SEQ ID NO: 1077298 - DNA, 15 bp, Homo sapiens
tctgaatggggcccc

SEQ ID NO: 1077299 - DNA, 15 bp, Homo sapiens
gtctgaatggggccc

SEQ ID NO: 1077300 - DNA, 15 bp, Homo sapiens
tgtctgaatggggcc

SEQ ID NO: 1077301 - DNA, 15 bp, Homo sapiens
atgtctgaatggggc

SEQ ID NO: 1077302 - DNA, 15 bp, Homo sapiens
tatgtctgaatgggg

SEQ ID NO: 1077303 - DNA, 15 bp, Homo sapiens
atatgtctgaatggg

SEQ ID NO: 1077304 - DNA, 15 bp, Homo sapiens
catatgtctgaatgg

SEQ ID NO: 1077305 - DNA, 15 bp, Homo sapiens
acatatgtctgaatg

SEQ ID NO: 1077306 - DNA, 15 bp, Homo sapiens
gacatatgtctgaat

SEQ ID NO: 1077307 - DNA, 15 bp, Homo sapiens
gaattttcagacata

SEQ ID NO: 1077308 - DNA, 15 bp, Homo sapiens
agaattttcagacat

SEQ ID NO: 1077309 - DNA, 15 bp, Homo sapiens
gagaattttcagaca

SEQ ID NO: 1077310 - DNA, 15 bp, Homo sapiens
agagaattttcagac

SEQ ID NO: 1077311 - DNA, 15 bp, Homo sapiens
tagagaattttcaga

SEQ ID NO: 1077312 - DNA, 15 bp, Homo sapiens
ctagagaattttcag

SEQ ID NO: 1077313 - DNA, 15 bp, Homo sapiens
tctagagaattttca

SEQ ID NO: 1077314 - DNA, 15 bp, Homo sapiens
ttctagagaattttc

SEQ ID NO: 1077315 - DNA, 15 bp, Homo sapiens
cttctagagaatttt

SEQ ID NO: 1077316 - DNA, 15 bp, Homo sapiens
tcttctagagaattt

SEQ ID NO: 1077317 - DNA, 15 bp, Homo sapiens
ctcttctagagaatt

SEQ ID NO: 1077318 - DNA, 15 bp, Homo sapiens
tctcttctagagaat

SEQ ID NO: 1077319 - DNA, 15 bp, Homo sapiens
ttctcttctagagaa

SEQ ID NO: 1077320 - DNA, 15 bp, Homo sapiens
attctcttctagaga

SEQ ID NO: 1077321 - DNA, 15 bp, Homo sapiens
gattctcttctagag

SEQ ID NO: 1077322 - DNA, 15 bp, Homo sapiens
tgattctcttctaga

SEQ ID NO: 1077323 - DNA, 15 bp, Homo sapiens
ctgattctcttctag

SEQ ID NO: 1077324 - DNA, 15 bp, Homo sapiens
actgattctcttcta

SEQ ID NO: 1077325 - DNA, 15 bp, Homo sapiens
gactgattctcttct

SEQ ID NO: 1077326 - DNA, 15 bp, Homo sapiens
tgactgattctcttc

SEQ ID NO: 1077327 - DNA, 15 bp, Homo sapiens
ctgactgattctctt

SEQ ID NO: 1077328 - DNA, 15 bp, Homo sapiens
actgactgattctct

SEQ ID NO: 1077329 - DNA, 15 bp, Homo sapiens
cactgactgattctc

SEQ ID NO: 1077330 - DNA, 15 bp, Homo sapiens
tcactgactgattct

SEQ ID NO: 1077331 - DNA, 15 bp, Homo sapiens
ctcactgactgattc

SEQ ID NO: 1077332 - DNA, 15 bp, Homo sapiens
cctcactgactgatt

SEQ ID NO: 1077333 - DNA, 15 bp, Homo sapiens
ccctcactgactgat

SEQ ID NO: 1077334 - DNA, 15 bp, Homo sapiens
tccctcactgactga

SEQ ID NO: 1077335 - DNA, 15 bp, Homo sapiens
ctccctcactgactg

SEQ ID NO: 1077336 - DNA, 15 bp, Homo sapiens
cctccctcactgact

SEQ ID NO: 1077337 - DNA, 15 bp, Homo sapiens
ccctccctcactgac

SEQ ID NO: 1077338 - DNA, 15 bp, Homo sapiens
accctccctcactga

SEQ ID NO: 1077339 - DNA, 15 bp, Homo sapiens
aaccctccctcactg

SEQ ID NO: 1077340 - DNA, 15 bp, Homo sapiens
aaaccctccctcact

SEQ ID NO: 1077341 - DNA, 15 bp, Homo sapiens
caaaccctccctcac

SEQ ID NO: 1077342 - DNA, 15 bp, Homo sapiens
ccaaaccctccctca

SEQ ID NO: 1077343 - DNA, 15 bp, Homo sapiens
cccaaaccctccctc

SEQ ID NO: 1077344 - DNA, 15 bp, Homo sapiens
tcccaaaccctccct

SEQ ID NO: 1077345 - DNA, 15 bp, Homo sapiens
ttcccaaaccctccc

SEQ ID NO: 1077346 - DNA, 15 bp, Homo sapiens
gttcccaaaccctcc

SEQ ID NO: 1077347 - DNA, 15 bp, Homo sapiens
agttcccaaaccctc

SEQ ID NO: 1077348 - DNA, 15 bp, Homo sapiens
aagttcccaaaccct

SEQ ID NO: 1077349 - DNA, 15 bp, Homo sapiens
aaagttcccaaaccc

SEQ ID NO: 1077350 - DNA, 15 bp, Homo sapiens
gaaagttcccaaacc

SEQ ID NO: 1077351 - DNA, 15 bp, Homo sapiens
tgaaagttcccaaac

SEQ ID NO: 1077352 - DNA, 15 bp, Homo sapiens
ttgaaagttcccaaa

SEQ ID NO: 1077353 - DNA, 15 bp, Homo sapiens
cttgaaagttcccaa

SEQ ID NO: 1077354 - DNA, 15 bp, Homo sapiens
acttgaaagttccca

SEQ ID NO: 1077355 - DNA, 15 bp, Homo sapiens
cacttgaaagttccc

SEQ ID NO: 1077356 - DNA, 15 bp, Homo sapiens
ccacttgaaagttcc

SEQ ID NO: 1077357 - DNA, 15 bp, Homo sapiens
tccacttgaaagttc

SEQ ID NO: 1077358 - DNA, 15 bp, Homo sapiens
ttccacttgaaagtt

SEQ ID NO: 1077359 - DNA, 15 bp, Homo sapiens
gttccacttgaaagt

SEQ ID NO: 1077360 - DNA, 15 bp, Homo sapiens
tgttccacttgaaag

SEQ ID NO: 1077361 - DNA, 15 bp, Homo sapiens
gtgttccacttgaaa

SEQ ID NO: 1077362 - DNA, 15 bp, Homo sapiens
tgtgttccacttgaa

SEQ ID NO: 1077363 - DNA, 15 bp, Homo sapiens
ctgtgttccacttga

SEQ ID NO: 1077364 - DNA, 15 bp, Homo sapiens
tctgtgttccacttg

SEQ ID NO: 1077365 - DNA, 15 bp, Homo sapiens
ttctgtgttccactt

SEQ ID NO: 1077366 - DNA, 15 bp, Homo sapiens
tttctgtgttccact

SEQ ID NO: 1077367 - DNA, 15 bp, Homo sapiens
atttctgtgttccac

SEQ ID NO: 1077368 - DNA, 15 bp, Homo sapiens
aatttctgtgttcca

SEQ ID NO: 1077369 - DNA, 15 bp, Homo sapiens
taatttctgtgttcc

SEQ ID NO: 1077370 - DNA, 15 bp, Homo sapiens
ttaatttctgtgttc

SEQ ID NO: 1077371 - DNA, 15 bp, Homo sapiens
cttaatttctgtgtt

SEQ ID NO: 1077372 - DNA, 15 bp, Homo sapiens
ccttaatttctgtgt

SEQ ID NO: 1077373 - DNA, 15 bp, Homo sapiens
accttaatttctgtg

SEQ ID NO: 1077374 - DNA, 15 bp, Homo sapiens
aaccttaatttctgt

SEQ ID NO: 1077375 - DNA, 15 bp, Homo sapiens
aaaccttaatttctg

SEQ ID NO: 1077376 - DNA, 15 bp, Homo sapiens
aaaaccttaatttct

SEQ ID NO: 1077377 - DNA, 15 bp, Homo sapiens
caaaaccttaatttc

SEQ ID NO: 1077378 - DNA, 15 bp, Homo sapiens
tcaaaaccttaattt

SEQ ID NO: 1077379 - DNA, 15 bp, Homo sapiens
atcaaaaccttaatt

SEQ ID NO: 1077380 - DNA, 15 bp, Homo sapiens
gatcaaaaccttaat

SEQ ID NO: 1077381 - DNA, 15 bp, Homo sapiens
agatcaaaaccttaa

SEQ ID NO: 1077382 - DNA, 15 bp, Homo sapiens
gagatcaaaacctta

SEQ ID NO: 1077383 - DNA, 15 bp, Homo sapiens
tgagatcaaaacctt

SEQ ID NO: 1077384 - DNA, 15 bp, Homo sapiens
ctgagatcaaaacct

SEQ ID NO: 1077385 - DNA, 15 bp, Homo sapiens
tctgagatcaaaacc

SEQ ID NO: 1077386 - DNA, 15 bp, Homo sapiens
ctctgagatcaaaac

SEQ ID NO: 1077387 - DNA, 15 bp, Homo sapiens
tctctgagatcaaaa

SEQ ID NO: 1077388 - DNA, 15 bp, Homo sapiens
gtctctgagatcaaa

SEQ ID NO: 1077389 - DNA, 15 bp, Homo sapiens
tgtctctgagatcaa

SEQ ID NO: 1077390 - DNA, 15 bp, Homo sapiens
atgtctctgagatca

SEQ ID NO: 1077391 - DNA, 15 bp, Homo sapiens
gatgtctctgagatc

SEQ ID NO: 1077392 - DNA, 15 bp, Homo sapiens
agatgtctctgagat

SEQ ID NO: 1077393 - DNA, 15 bp, Homo sapiens
cagatgtctctgaga

SEQ ID NO: 1077394 - DNA, 15 bp, Homo sapiens
gcagatgtctctgag

SEQ ID NO: 1077395 - DNA, 15 bp, Homo sapiens
tgcagatgtctctga

SEQ ID NO: 1077396 - DNA, 15 bp, Homo sapiens
atgcagatgtctctg

SEQ ID NO: 1077397 - DNA, 15 bp, Homo sapiens
aatgcagatgtctct

SEQ ID NO: 1077398 - DNA, 15 bp, Homo sapiens
aaatgcagatgtctc

SEQ ID NO: 1077399 - DNA, 15 bp, Homo sapiens
taaatgcagatgtct

SEQ ID NO: 1077400 - DNA, 15 bp, Homo sapiens
ctaaatgcagatgtc

SEQ ID NO: 1077401 - DNA, 15 bp, Homo sapiens
cctaaatgcagatgt

SEQ ID NO: 1077402 - DNA, 15 bp, Homo sapiens
tcctaaatgcagatg

SEQ ID NO: 1077403 - DNA, 15 bp, Homo sapiens
gtcctaaatgcagat

SEQ ID NO: 1077404 - DNA, 15 bp, Homo sapiens
ggtcctaaatgcaga

SEQ ID NO: 1077405 - DNA, 15 bp, Homo sapiens
aggtcctaaatgcag

SEQ ID NO: 1077406 - DNA, 15 bp, Homo sapiens
taggtcctaaatgca

SEQ ID NO: 1077407 - DNA, 15 bp, Homo sapiens
ctaggtcctaaatgc

SEQ ID NO: 1077408 - DNA, 15 bp, Homo sapiens
gctaggtcctaaatg

SEQ ID NO: 1077409 - DNA, 15 bp, Homo sapiens
agctaggtcctaaat

SEQ ID NO: 1077410 - DNA, 15 bp, Homo sapiens
gagctaggtcctaaa

SEQ ID NO: 1077411 - DNA, 15 bp, Homo sapiens
ggagctaggtcctaa

SEQ ID NO: 1077412 - DNA, 15 bp, Homo sapiens
tggagctaggtccta

SEQ ID NO: 1077413 - DNA, 15 bp, Homo sapiens
ctggagctaggtcct

SEQ ID NO: 1077414 - DNA, 15 bp, Homo sapiens
actggagctaggtcc

SEQ ID NO: 1077415 - DNA, 15 bp, Homo sapiens
cactggagctaggtc

SEQ ID NO: 1077416 - DNA, 15 bp, Homo sapiens
gcactggagctaggt

SEQ ID NO: 1077417 - DNA, 15 bp, Homo sapiens
agcactggagctagg

SEQ ID NO: 1077418 - DNA, 15 bp, Homo sapiens
aagcactggagctag

SEQ ID NO: 1077419 - DNA, 15 bp, Homo sapiens
taagcactggagcta

SEQ ID NO: 1077420 - DNA, 15 bp, Homo sapiens
gtaagcactggagct

SEQ ID NO: 1077421 - DNA, 15 bp, Homo sapiens
agtaagcactggagc

SEQ ID NO: 1077422 - DNA, 15 bp, Homo sapiens
tagtaagcactggag

SEQ ID NO: 1077423 - DNA, 15 bp, Homo sapiens
ctagtaagcactgga

SEQ ID NO: 1077424 - DNA, 15 bp, Homo sapiens
tctagtaagcactgg

SEQ ID NO: 1077425 - DNA, 15 bp, Homo sapiens
atctagtaagcactg

SEQ ID NO: 1077426 - DNA, 15 bp, Homo sapiens
catctagtaagcact

SEQ ID NO: 1077427 - DNA, 15 bp, Homo sapiens
acatctagtaagcac

SEQ ID NO: 1077428 - DNA, 15 bp, Homo sapiens
cacatctagtaagca

SEQ ID NO: 1077429 - DNA, 15 bp, Homo sapiens
acacatctagtaagc

SEQ ID NO: 1077430 - DNA, 15 bp, Homo sapiens
cacacatctagtaag

SEQ ID NO: 1077431 - DNA, 15 bp, Homo sapiens
ccacacatctagtaa

SEQ ID NO: 1077432 - DNA, 15 bp, Homo sapiens
gccacacatctagta

SEQ ID NO: 1077433 - DNA, 15 bp, Homo sapiens
ggccacacatctagt

SEQ ID NO: 1077434 - DNA, 15 bp, Homo sapiens
aggccacacatctag

SEQ ID NO: 1077435 - DNA, 15 bp, Homo sapiens
aaggccacacatcta

SEQ ID NO: 1077436 - DNA, 15 bp, Homo sapiens
caaggccacacatct

SEQ ID NO: 1077437 - DNA, 15 bp, Homo sapiens
ccaaggccacacatc

SEQ ID NO: 1077438 - DNA, 15 bp, Homo sapiens
cccaaggccacacat

SEQ ID NO: 1077439 - DNA, 15 bp, Homo sapiens
gcccaaggccacaca

SEQ ID NO: 1077440 - DNA, 15 bp, Homo sapiens
tgcccaaggccacac

SEQ ID NO: 1077441 - DNA, 15 bp, Homo sapiens
ttgcccaaggccaca

SEQ ID NO: 1077442 - DNA, 15 bp, Homo sapiens
gttgcccaaggccac

SEQ ID NO: 1077443 - DNA, 15 bp, Homo sapiens
agttgcccaaggcca

SEQ ID NO: 1077444 - DNA, 15 bp, Homo sapiens
aagttgcccaaggcc

SEQ ID NO: 1077445 - DNA, 15 bp, Homo sapiens
gaagttgcccaaggc

SEQ ID NO: 1077446 - DNA, 15 bp, Homo sapiens
ggaagttgcccaagg

SEQ ID NO: 1077447 - DNA, 15 bp, Homo sapiens
gggaagttgcccaag

SEQ ID NO: 1077448 - DNA, 15 bp, Homo sapiens
ggggaagttgcccaa

SEQ ID NO: 1077449 - DNA, 15 bp, Homo sapiens
tggggaagttgccca

SEQ ID NO: 1077450 - DNA, 15 bp, Homo sapiens
ttggggaagttgccc

SEQ ID NO: 1077451 - DNA, 15 bp, Homo sapiens
gttggggaagttgcc

SEQ ID NO: 1077452 - DNA, 15 bp, Homo sapiens
ggttggggaagttgc

SEQ ID NO: 1077453 - DNA, 15 bp, Homo sapiens
aggttggggaagttg

SEQ ID NO: 1077454 - DNA, 15 bp, Homo sapiens
gaggttggggaagtt

SEQ ID NO: 1077455 - DNA, 15 bp, Homo sapiens
agaggttggggaagt

SEQ ID NO: 1077456 - DNA, 15 bp, Homo sapiens
gagaggttggggaag

SEQ ID NO: 1077457 - DNA, 15 bp, Homo sapiens
agagaggttggggaa

SEQ ID NO: 1077458 - DNA, 15 bp, Homo sapiens
cagagaggttgggga

SEQ ID NO: 1077459 - DNA, 15 bp, Homo sapiens
tcagagaggttgggg

SEQ ID NO: 1077460 - DNA, 15 bp, Homo sapiens
ttcagagaggttggg

SEQ ID NO: 1077461 - DNA, 15 bp, Homo sapiens
gttcagagaggttgg

SEQ ID NO: 1077462 - DNA, 15 bp, Homo sapiens
ggttcagagaggttg

SEQ ID NO: 1077463 - DNA, 15 bp, Homo sapiens
aggttcagagaggtt

SEQ ID NO: 1077464 - DNA, 15 bp, Homo sapiens
caggttcagagaggt

SEQ ID NO: 1077465 - DNA, 15 bp, Homo sapiens
acaggttcagagagg

SEQ ID NO: 1077466 - DNA, 15 bp, Homo sapiens
aacaggttcagagag

SEQ ID NO: 1077467 - DNA, 15 bp, Homo sapiens
aaacaggttcagaga

SEQ ID NO: 1077468 - DNA, 15 bp, Homo sapiens
gaaacaggttcagag

SEQ ID NO: 1077469 - DNA, 15 bp, Homo sapiens
ggaaacaggttcaga

SEQ ID NO: 1077470 - DNA, 15 bp, Homo sapiens
aggaaacaggttcag

SEQ ID NO: 1077471 - DNA, 15 bp, Homo sapiens
aaggaaacaggttca

SEQ ID NO: 1077472 - DNA, 15 bp, Homo sapiens
gaaggaaacaggttc

SEQ ID NO: 1077473 - DNA, 15 bp, Homo sapiens
ggaaggaaacaggtt

SEQ ID NO: 1077474 - DNA, 15 bp, Homo sapiens
gggaaggaaacaggt

SEQ ID NO: 1077475 - DNA, 15 bp, Homo sapiens
agggaaggaaacagg

SEQ ID NO: 1077476 - DNA, 15 bp, Homo sapiens
cagggaaggaaacag

SEQ ID NO: 1077477 - DNA, 15 bp, Homo sapiens
acagggaaggaaaca

SEQ ID NO: 1077478 - DNA, 15 bp, Homo sapiens
tacagggaaggaaac

SEQ ID NO: 1077479 - DNA, 15 bp, Homo sapiens
ttacagggaaggaaa

SEQ ID NO: 1077480 - DNA, 15 bp, Homo sapiens
tttacagggaaggaa

SEQ ID NO: 1077481 - DNA, 15 bp, Homo sapiens
ttttacagggaagga

SEQ ID NO: 1077482 - DNA, 15 bp, Homo sapiens
attttacagggaagg

SEQ ID NO: 1077483 - DNA, 15 bp, Homo sapiens
cattttacagggaag

SEQ ID NO: 1077484 - DNA, 15 bp, Homo sapiens
ccattttacagggaa

SEQ ID NO: 1077485 - DNA, 15 bp, Homo sapiens
tccattttacaggga

SEQ ID NO: 1077486 - DNA, 15 bp, Homo sapiens
ctccattttacaggg

SEQ ID NO: 1077487 - DNA, 15 bp, Homo sapiens
tctccattttacagg

SEQ ID NO: 1077488 - DNA, 15 bp, Homo sapiens
atctccattttacag

SEQ ID NO: 1077489 - DNA, 15 bp, Homo sapiens
tatctccattttaca

SEQ ID NO: 1077490 - DNA, 15 bp, Homo sapiens
atatctccattttac

SEQ ID NO: 1077491 - DNA, 15 bp, Homo sapiens
aatatctccatttta

SEQ ID NO: 1077492 - DNA, 15 bp, Homo sapiens
caatatctccatttt

SEQ ID NO: 1077493 - DNA, 15 bp, Homo sapiens
tcaatatctccattt

SEQ ID NO: 1077494 - DNA, 15 bp, Homo sapiens
atcaatatctccatt

SEQ ID NO: 1077495 - DNA, 15 bp, Homo sapiens
tatcaatatctccat

SEQ ID NO: 1077496 - DNA, 15 bp, Homo sapiens
ctatcaatatctcca

SEQ ID NO: 1077497 - DNA, 15 bp, Homo sapiens
gctatcaatatctcc

SEQ ID NO: 1077498 - DNA, 15 bp, Homo sapiens
cgctatcaatatctc

SEQ ID NO: 1077499 - DNA, 15 bp, Homo sapiens
ccgctatcaatatct

SEQ ID NO: 1077500 - DNA, 15 bp, Homo sapiens
tccgctatcaatatc

SEQ ID NO: 1077501 - DNA, 15 bp, Homo sapiens
ctccgctatcaatat

SEQ ID NO: 1077502 - DNA, 15 bp, Homo sapiens
cctccgctatcaata

SEQ ID NO: 1077503 - DNA, 15 bp, Homo sapiens
acctccgctatcaat

SEQ ID NO: 1077504 - DNA, 15 bp, Homo sapiens
cacctccgctatcaa

SEQ ID NO: 1077505 - DNA, 15 bp, Homo sapiens
tcacctccgctatca

SEQ ID NO: 1077506 - DNA, 15 bp, Homo sapiens
atcacctccgctatc

SEQ ID NO: 1077507 - DNA, 15 bp, Homo sapiens
catcacctccgctat

SEQ ID NO: 1077508 - DNA, 15 bp, Homo sapiens
ccatcacctccgcta

SEQ ID NO: 1077509 - DNA, 15 bp, Homo sapiens
tccatcacctccgct

SEQ ID NO: 1077510 - DNA, 15 bp, Homo sapiens
ttccatcacctccgc

SEQ ID NO: 1077511 - DNA, 15 bp, Homo sapiens
attccatcacctccg

SEQ ID NO: 1077512 - DNA, 15 bp, Homo sapiens
cattccatcacctcc

SEQ ID NO: 1077513 - DNA, 15 bp, Homo sapiens
tcattccatcacctc

SEQ ID NO: 1077514 - DNA, 15 bp, Homo sapiens
atcattccatcacct

SEQ ID NO: 1077515 - DNA, 15 bp, Homo sapiens
catcattccatcacc

SEQ ID NO: 1077516 - DNA, 15 bp, Homo sapiens
tcatcattccatcac

SEQ ID NO: 1077517 - DNA, 15 bp, Homo sapiens
ttcatcattccatca

SEQ ID NO: 1077518 - DNA, 15 bp, Homo sapiens
cttcatcattccatc

SEQ ID NO: 1077519 - DNA, 15 bp, Homo sapiens
tcttcatcattccat

SEQ ID NO: 1077520 - DNA, 15 bp, Homo sapiens
atcttcatcattcca

SEQ ID NO: 1077521 - DNA, 15 bp, Homo sapiens
aatcttcatcattcc

SEQ ID NO: 1077522 - DNA, 15 bp, Homo sapiens
caatcttcatcattc

SEQ ID NO: 1077523 - DNA, 15 bp, Homo sapiens
acaatcttcatcatt

SEQ ID NO: 1077524 - DNA, 15 bp, Homo sapiens
cacaatcttcatcat

SEQ ID NO: 1077525 - DNA, 15 bp, Homo sapiens
acacaatcttcatca

SEQ ID NO: 1077526 - DNA, 15 bp, Homo sapiens
tacacaatcttcatc

SEQ ID NO: 1077527 - DNA, 15 bp, Homo sapiens
atacacaatcttcat

SEQ ID NO: 1077528 - DNA, 15 bp, Homo sapiens
catacacaatcttca

SEQ ID NO: 1077529 - DNA, 15 bp, Homo sapiens
acatacacaatcttc

SEQ ID NO: 1077530 - DNA, 15 bp, Homo sapiens
tacatacacaatctt

SEQ ID NO: 1077531 - DNA, 15 bp, Homo sapiens
ttacatacacaatct

SEQ ID NO: 1077532 - DNA, 15 bp, Homo sapiens
tttacatacacaatc

SEQ ID NO: 1077533 - DNA, 15 bp, Homo sapiens
ctttacatacacaat

SEQ ID NO: 1077534 - DNA, 15 bp, Homo sapiens
cctttacatacacaa

SEQ ID NO: 1077535 - DNA, 15 bp, Homo sapiens
gcctttacatacaca

SEQ ID NO: 1077536 - DNA, 15 bp, Homo sapiens
agcctttacatacac

SEQ ID NO: 1077537 - DNA, 15 bp, Homo sapiens
aagcctttacataca

SEQ ID NO: 1077538 - DNA, 15 bp, Homo sapiens
aaagcctttacatac

SEQ ID NO: 1077539 - DNA, 15 bp, Homo sapiens
caaagcctttacata

SEQ ID NO: 1077540 - DNA, 15 bp, Homo sapiens
acaaagcctttacat

SEQ ID NO: 1077541 - DNA, 15 bp, Homo sapiens
gacaaagcctttaca

SEQ ID NO: 1077542 - DNA, 15 bp, Homo sapiens
tgacaaagcctttac

SEQ ID NO: 1077543 - DNA, 15 bp, Homo sapiens
gtgacaaagccttta

SEQ ID NO: 1077544 - DNA, 15 bp, Homo sapiens
ggtgacaaagccttt

SEQ ID NO: 1077545 - DNA, 15 bp, Homo sapiens
tggtgacaaagcctt

SEQ ID NO: 1077546 - DNA, 15 bp, Homo sapiens
gtggtgacaaagcct

SEQ ID NO: 1077547 - DNA, 15 bp, Homo sapiens
agtggtgacaaagcc

SEQ ID NO: 1077548 - DNA, 15 bp, Homo sapiens
cagtggtgacaaagc

SEQ ID NO: 1077549 - DNA, 15 bp, Homo sapiens
ccagtggtgacaaag

SEQ ID NO: 1077550 - DNA, 15 bp, Homo sapiens
cccagtggtgacaaa

SEQ ID NO: 1077551 - DNA, 15 bp, Homo sapiens
tcccagtggtgacaa

SEQ ID NO: 1077552 - DNA, 15 bp, Homo sapiens
ctcccagtggtgaca

SEQ ID NO: 1077553 - DNA, 15 bp, Homo sapiens
cctcccagtggtgac

SEQ ID NO: 1077554 - DNA, 15 bp, Homo sapiens
acctcccagtggtga

SEQ ID NO: 1077555 - DNA, 15 bp, Homo sapiens
cacctcccagtggtg

SEQ ID NO: 1077556 - DNA, 15 bp, Homo sapiens
ccacctcccagtggt

SEQ ID NO: 1077557 - DNA, 15 bp, Homo sapiens
cccacctcccagtgg

SEQ ID NO: 1077558 - DNA, 15 bp, Homo sapiens
gcccacctcccagtg

SEQ ID NO: 1077559 - DNA, 15 bp, Homo sapiens
tgcccacctcccagt

SEQ ID NO: 1077560 - DNA, 15 bp, Homo sapiens
ctgcccacctcccag

SEQ ID NO: 1077561 - DNA, 15 bp, Homo sapiens
cctgcccacctccca

SEQ ID NO: 1077562 - DNA, 15 bp, Homo sapiens
tcctgcccacctccc

SEQ ID NO: 1077563 - DNA, 15 bp, Homo sapiens
ctcctgcccacctcc

SEQ ID NO: 1077564 - DNA, 15 bp, Homo sapiens
gctcctgcccacctc

SEQ ID NO: 1077565 - DNA, 15 bp, Homo sapiens
cgctcctgcccacct

SEQ ID NO: 1077566 - DNA, 15 bp, Homo sapiens
ccgctcctgcccacc

SEQ ID NO: 1077567 - DNA, 15 bp, Homo sapiens
cccgctcctgcccac

SEQ ID NO: 1077568 - DNA, 15 bp, Homo sapiens
ccccgctcctgccca

SEQ ID NO: 1077569 - DNA, 15 bp, Homo sapiens
gccccgctcctgccc

SEQ ID NO: 1077570 - DNA, 15 bp, Homo sapiens
agccccgctcctgcc

SEQ ID NO: 1077571 - DNA, 15 bp, Homo sapiens
cagccccgctcctgc

SEQ ID NO: 1077572 - DNA, 15 bp, Homo sapiens
ccagccccgctcctg

SEQ ID NO: 1077573 - DNA, 15 bp, Homo sapiens
accagccccgctcct

SEQ ID NO: 1077574 - DNA, 15 bp, Homo sapiens
gaccagccccgctcc

SEQ ID NO: 1077575 - DNA, 15 bp, Homo sapiens
tgaccagccccgctc

SEQ ID NO: 1077576 - DNA, 15 bp, Homo sapiens
gtgaccagccccgct

SEQ ID NO: 1077577 - DNA, 15 bp, Homo sapiens
ggtgaccagccccgc

SEQ ID NO: 1077578 - DNA, 15 bp, Homo sapiens
cggtgaccagccccg

SEQ ID NO: 1077579 - DNA, 15 bp, Homo sapiens
tcggtgaccagcccc

SEQ ID NO: 1077580 - DNA, 15 bp, Homo sapiens
ctcggtgaccagccc

SEQ ID NO: 1077581 - DNA, 15 bp, Homo sapiens
actcggtgaccagcc

SEQ ID NO: 1077582 - DNA, 15 bp, Homo sapiens
cactcggtgaccagc

SEQ ID NO: 1077583 - DNA, 15 bp, Homo sapiens
acactcggtgaccag

SEQ ID NO: 1077584 - DNA, 15 bp, Homo sapiens
aacactcggtgacca

SEQ ID NO: 1077585 - DNA, 15 bp, Homo sapiens
caacactcggtgacc

SEQ ID NO: 1077586 - DNA, 15 bp, Homo sapiens
tcaacactcggtgac

SEQ ID NO: 1077587 - DNA, 15 bp, Homo sapiens
gtcaacactcggtga

SEQ ID NO: 1077588 - DNA, 15 bp, Homo sapiens
tgtcaacactcggtg

SEQ ID NO: 1077589 - DNA, 15 bp, Homo sapiens
ctgtcaacactcggt

SEQ ID NO: 1077590 - DNA, 15 bp, Homo sapiens
gctgtcaacactcgg

SEQ ID NO: 1077591 - DNA, 15 bp, Homo sapiens
tgctgtcaacactcg

SEQ ID NO: 1077592 - DNA, 15 bp, Homo sapiens
ctgctgtcaacactc

SEQ ID NO: 1077593 - DNA, 15 bp, Homo sapiens
actgctgtcaacact

SEQ ID NO: 1077594 - DNA, 15 bp, Homo sapiens
cactgctgtcaacac

SEQ ID NO: 1077595 - DNA, 15 bp, Homo sapiens
tcactgctgtcaaca

SEQ ID NO: 1077596 - DNA, 15 bp, Homo sapiens
gtcactgctgtcaac

SEQ ID NO: 1077597 - DNA, 15 bp, Homo sapiens
ggtcactgctgtcaa

SEQ ID NO: 1077598 - DNA, 15 bp, Homo sapiens
cggtcactgctgtca

SEQ ID NO: 1077599 - DNA, 15 bp, Homo sapiens
ccggtcactgctgtc

SEQ ID NO: 1077600 - DNA, 15 bp, Homo sapiens
gccggtcactgctgt

SEQ ID NO: 1077601 - DNA, 15 bp, Homo sapiens
cgccggtcactgctg

SEQ ID NO: 1077602 - DNA, 15 bp, Homo sapiens
gcgccggtcactgct

SEQ ID NO: 1077603 - DNA, 15 bp, Homo sapiens
agcgccggtcactgc

SEQ ID NO: 1077604 - DNA, 15 bp, Homo sapiens
aagcgccggtcactg

SEQ ID NO: 1077605 - DNA, 15 bp, Homo sapiens
caagcgccggtcact

SEQ ID NO: 1077606 - DNA, 15 bp, Homo sapiens
acaagcgccggtcac

SEQ ID NO: 1077607 - DNA, 15 bp, Homo sapiens
gacaagcgccggtca

SEQ ID NO: 1077608 - DNA, 15 bp, Homo sapiens
agacaagcgccggtc

SEQ ID NO: 1077609 - DNA, 15 bp, Homo sapiens
agaagaaggtctcgg

SEQ ID NO: 1077610 - DNA, 15 bp, Homo sapiens
aagaagaaggtctcg

SEQ ID NO: 1077611 - DNA, 15 bp, Homo sapiens
gaagaagaaggtctc

SEQ ID NO: 1077612 - DNA, 15 bp, Homo sapiens
ggaagaagaaggtct

SEQ ID NO: 1077613 - DNA, 15 bp, Homo sapiens
gggaagaagaaggtc

SEQ ID NO: 1077614 - DNA, 15 bp, Homo sapiens
agggaagaagaaggt

SEQ ID NO: 1077615 - DNA, 15 bp, Homo sapiens
gagggaagaagaagg

SEQ ID NO: 1077616 - DNA, 15 bp, Homo sapiens
tgagggaagaagaag

SEQ ID NO: 1077617 - DNA, 15 bp, Homo sapiens
ctgagggaagaagaa

SEQ ID NO: 1077618 - DNA, 15 bp, Homo sapiens
tctgagggaagaaga

SEQ ID NO: 1077619 - DNA, 15 bp, Homo sapiens
atctgagggaagaag

SEQ ID NO: 1077620 - DNA, 15 bp, Homo sapiens
aatctgagggaagaa

SEQ ID NO: 1077621 - DNA, 15 bp, Homo sapiens
gaatctgagggaaga

SEQ ID NO: 1077622 - DNA, 15 bp, Homo sapiens
agaatctgagggaag

SEQ ID NO: 1077623 - DNA, 15 bp, Homo sapiens
cagaatctgagggaa

SEQ ID NO: 1077624 - DNA, 15 bp, Homo sapiens
ccagaatctgaggga

SEQ ID NO: 1077625 - DNA, 15 bp, Homo sapiens
cccagaatctgaggg

SEQ ID NO: 1077626 - DNA, 15 bp, Homo sapiens
tcccagaatctgagg

SEQ ID NO: 1077627 - DNA, 15 bp, Homo sapiens
ttcccagaatctgag

SEQ ID NO: 1077628 - DNA, 15 bp, Homo sapiens
tttcccagaatctga

SEQ ID NO: 1077629 - DNA, 15 bp, Homo sapiens
atttcccagaatctg

SEQ ID NO: 1077630 - DNA, 15 bp, Homo sapiens
catttcccagaatct

SEQ ID NO: 1077631 - DNA, 15 bp, Homo sapiens
ccatttcccagaatc

SEQ ID NO: 1077632 - DNA, 15 bp, Homo sapiens
tccatttcccagaat

SEQ ID NO: 1077633 - DNA, 15 bp, Homo sapiens
ctccatttcccagaa

SEQ ID NO: 1077634 - DNA, 15 bp, Homo sapiens
cctccatttcccaga

SEQ ID NO: 1077635 - DNA, 15 bp, Homo sapiens
tcctccatttcccag

SEQ ID NO: 1077636 - DNA, 15 bp, Homo sapiens
gtcctccatttccca

SEQ ID NO: 1077637 - DNA, 15 bp, Homo sapiens
agtcctccatttccc

SEQ ID NO: 1077638 - DNA, 15 bp, Homo sapiens
gagtcctccatttcc

SEQ ID NO: 1077639 - DNA, 15 bp, Homo sapiens
agagtcctccatttc

SEQ ID NO: 1077640 - DNA, 15 bp, Homo sapiens
cagagtcctccattt

SEQ ID NO: 1077641 - DNA, 15 bp, Homo sapiens
tcagagtcctccatt

SEQ ID NO: 1077642 - DNA, 15 bp, Homo sapiens
gtcagagtcctccat

SEQ ID NO: 1077643 - DNA, 15 bp, Homo sapiens
ggtcagagtcctcca

SEQ ID NO: 1077644 - DNA, 15 bp, Homo sapiens
tggtcagagtcctcc

SEQ ID NO: 1077645 - DNA, 15 bp, Homo sapiens
ctggtcagagtcctc

SEQ ID NO: 1077646 - DNA, 15 bp, Homo sapiens
gctggtcagagtcct

SEQ ID NO: 1077647 - DNA, 15 bp, Homo sapiens
ggctggtcagagtcc

SEQ ID NO: 1077648 - DNA, 15 bp, Homo sapiens
gggctggtcagagtc

SEQ ID NO: 1077649 - DNA, 15 bp, Homo sapiens
ggggctggtcagagt

SEQ ID NO: 1077650 - DNA, 15 bp, Homo sapiens
aggggctggtcagag

SEQ ID NO: 1077651 - DNA, 15 bp, Homo sapiens
aaggggctggtcaga

SEQ ID NO: 1077652 - DNA, 15 bp, Homo sapiens
gaaggggctggtcag

SEQ ID NO: 1077653 - DNA, 15 bp, Homo sapiens
agaaggggctggtca

SEQ ID NO: 1077654 - DNA, 15 bp, Homo sapiens
gagaaggggctggtc

SEQ ID NO: 1077655 - DNA, 15 bp, Homo sapiens
agagaaggggctggt

SEQ ID NO: 1077656 - DNA, 15 bp, Homo sapiens
gagagaaggggctgg

SEQ ID NO: 1077657 - DNA, 15 bp, Homo sapiens
tgagagaaggggctg

SEQ ID NO: 1077658 - DNA, 15 bp, Homo sapiens
atgagagaaggggct

SEQ ID NO: 1077659 - DNA, 15 bp, Homo sapiens
catgagagaaggggc

SEQ ID NO: 1077660 - DNA, 15 bp, Homo sapiens
tcatgagagaagggg

SEQ ID NO: 1077661 - DNA, 15 bp, Homo sapiens
ttcatgagagaaggg

SEQ ID NO: 1077662 - DNA, 15 bp, Homo sapiens
tttcatgagagaagg

SEQ ID NO: 1077663 - DNA, 15 bp, Homo sapiens
ttttcatgagagaag

SEQ ID NO: 1077664 - DNA, 15 bp, Homo sapiens
tttttcatgagagaa

SEQ ID NO: 1077665 - DNA, 15 bp, Homo sapiens
ttttttcatgagaga

SEQ ID NO: 1077666 - DNA, 15 bp, Homo sapiens
tttttttcatgagag

SEQ ID NO: 1077667 - DNA, 15 bp, Homo sapiens
ctttttttcatgaga

SEQ ID NO: 1077668 - DNA, 15 bp, Homo sapiens
cctttttttcatgag

SEQ ID NO: 1077669 - DNA, 15 bp, Homo sapiens
ccctttttttcatga

SEQ ID NO: 1077670 - DNA, 15 bp, Homo sapiens
accctttttttcatg

SEQ ID NO: 1077671 - DNA, 15 bp, Homo sapiens
taccctttttttcat

SEQ ID NO: 1077672 - DNA, 15 bp, Homo sapiens
ttaccctttttttca

SEQ ID NO: 1077673 - DNA, 15 bp, Homo sapiens
cttaccctttttttc

SEQ ID NO: 1077674 - DNA, 15 bp, Homo sapiens
ccttacccttttttt

SEQ ID NO: 1077675 - DNA, 15 bp, Homo sapiens
cccttaccctttttt

SEQ ID NO: 1077676 - DNA, 15 bp, Homo sapiens
ccccttacccttttt

SEQ ID NO: 1077677 - DNA, 15 bp, Homo sapiens
accccttaccctttt

SEQ ID NO: 1077678 - DNA, 15 bp, Homo sapiens
aaccccttacccttt

SEQ ID NO: 1077679 - DNA, 15 bp, Homo sapiens
aaaccccttaccctt

SEQ ID NO: 1077680 - DNA, 15 bp, Homo sapiens
caaaccccttaccct

SEQ ID NO: 1077681 - DNA, 15 bp, Homo sapiens
ccaaaccccttaccc

SEQ ID NO: 1077682 - DNA, 15 bp, Homo sapiens
tccaaaccccttacc

SEQ ID NO: 1077683 - DNA, 15 bp, Homo sapiens
gtccaaaccccttac

SEQ ID NO: 1077684 - DNA, 15 bp, Homo sapiens
tgtccaaacccctta

SEQ ID NO: 1077685 - DNA, 15 bp, Homo sapiens
atgtccaaacccctt

SEQ ID NO: 1077686 - DNA, 15 bp, Homo sapiens
gatgtccaaacccct

SEQ ID NO: 1077687 - DNA, 15 bp, Homo sapiens
agatgtccaaacccc

SEQ ID NO: 1077688 - DNA, 15 bp, Homo sapiens
gagatgtccaaaccc

SEQ ID NO: 1077689 - DNA, 15 bp, Homo sapiens
agagatgtccaaacc

SEQ ID NO: 1077690 - DNA, 15 bp, Homo sapiens
tagagatgtccaaac

SEQ ID NO: 1077691 - DNA, 15 bp, Homo sapiens
ttagagatgtccaaa

SEQ ID NO: 1077692 - DNA, 15 bp, Homo sapiens
cttagagatgtccaa

SEQ ID NO: 1077693 - DNA, 15 bp, Homo sapiens
ccttagagatgtcca

SEQ ID NO: 1077694 - DNA, 15 bp, Homo sapiens
accttagagatgtcc

SEQ ID NO: 1077695 - DNA, 15 bp, Homo sapiens
caccttagagatgtc

SEQ ID NO: 1077696 - DNA, 15 bp, Homo sapiens
tcaccttagagatgt

SEQ ID NO: 1077697 - DNA, 15 bp, Homo sapiens
ttcaccttagagatg

SEQ ID NO: 1077698 - DNA, 15 bp, Homo sapiens
tttcaccttagagat

SEQ ID NO: 1077699 - DNA, 15 bp, Homo sapiens
ttttcaccttagaga

SEQ ID NO: 1077700 - DNA, 15 bp, Homo sapiens
cttttcaccttagag

SEQ ID NO: 1077701 - DNA, 15 bp, Homo sapiens
acttttcaccttaga

SEQ ID NO: 1077702 - DNA, 15 bp, Homo sapiens
gacttttcaccttag

SEQ ID NO: 1077703 - DNA, 15 bp, Homo sapiens
agacttttcacctta

SEQ ID NO: 1077704 - DNA, 15 bp, Homo sapiens
gagacttttcacctt

SEQ ID NO: 1077705 - DNA, 15 bp, Homo sapiens
ggagacttttcacct

SEQ ID NO: 1077706 - DNA, 15 bp, Homo sapiens
tggagacttttcacc

SEQ ID NO: 1077707 - DNA, 15 bp, Homo sapiens
ttggagacttttcac

SEQ ID NO: 1077708 - DNA, 15 bp, Homo sapiens
cttggagacttttca

SEQ ID NO: 1077709 - DNA, 15 bp, Homo sapiens
acttggagacttttc

SEQ ID NO: 1077710 - DNA, 15 bp, Homo sapiens
gacttggagactttt

SEQ ID NO: 1077711 - DNA, 15 bp, Homo sapiens
ggacttggagacttt

SEQ ID NO: 1077712 - DNA, 15 bp, Homo sapiens
aggacttggagactt

SEQ ID NO: 1077713 - DNA, 15 bp, Homo sapiens
caggacttggagact

SEQ ID NO: 1077714 - DNA, 15 bp, Homo sapiens
gcaggacttggagac

SEQ ID NO: 1077715 - DNA, 15 bp, Homo sapiens
ggcaggacttggaga

SEQ ID NO: 1077716 - DNA, 15 bp, Homo sapiens
tggcaggacttggag

SEQ ID NO: 1077717 - DNA, 15 bp, Homo sapiens
ttggcaggacttgga

SEQ ID NO: 1077718 - DNA, 15 bp, Homo sapiens
gttggcaggacttgg

SEQ ID NO: 1077719 - DNA, 15 bp, Homo sapiens
cgttggcaggacttg

SEQ ID NO: 1077720 - DNA, 15 bp, Homo sapiens
tcgttggcaggactt

SEQ ID NO: 1077721 - DNA, 15 bp, Homo sapiens
gtcgttggcaggact

SEQ ID NO: 1077722 - DNA, 15 bp, Homo sapiens
tgtcgttggcaggac

SEQ ID NO: 1077723 - DNA, 15 bp, Homo sapiens
ctgtcgttggcagga

SEQ ID NO: 1077724 - DNA, 15 bp, Homo sapiens
actgtcgttggcagg

SEQ ID NO: 1077725 - DNA, 15 bp, Homo sapiens
aactgtcgttggcag

SEQ ID NO: 1077726 - DNA, 15 bp, Homo sapiens
gaactgtcgttggca

SEQ ID NO: 1077727 - DNA, 15 bp, Homo sapiens
agaactgtcgttggc

SEQ ID NO: 1077728 - DNA, 15 bp, Homo sapiens
cagaactgtcgttgg

SEQ ID NO: 1077729 - DNA, 15 bp, Homo sapiens
ccagaactgtcgttg

SEQ ID NO: 1077730 - DNA, 15 bp, Homo sapiens
cccagaactgtcgtt

SEQ ID NO: 1077731 - DNA, 15 bp, Homo sapiens
tcccagaactgtcgt

SEQ ID NO: 1077732 - DNA, 15 bp, Homo sapiens
ttcccagaactgtcg

SEQ ID NO: 1077733 - DNA, 15 bp, Homo sapiens
tttcccagaactgtc

SEQ ID NO: 1077734 - DNA, 15 bp, Homo sapiens
gtttcccagaactgt

SEQ ID NO: 1077735 - DNA, 15 bp, Homo sapiens
tgtttcccagaactg

SEQ ID NO: 1077736 - DNA, 15 bp, Homo sapiens
ctgtttcccagaact

SEQ ID NO: 1077737 - DNA, 15 bp, Homo sapiens
tctgtttcccagaac

SEQ ID NO: 1077738 - DNA, 15 bp, Homo sapiens
atctgtttcccagaa

SEQ ID NO: 1077739 - DNA, 15 bp, Homo sapiens
gatctgtttcccaga

SEQ ID NO: 1077740 - DNA, 15 bp, Homo sapiens
agatctgtttcccag

SEQ ID NO: 1077741 - DNA, 15 bp, Homo sapiens
cagatctgtttccca

SEQ ID NO: 1077742 - DNA, 15 bp, Homo sapiens
tcagatctgtttccc

SEQ ID NO: 1077743 - DNA, 15 bp, Homo sapiens
gtcagatctgtttcc

SEQ ID NO: 1077744 - DNA, 15 bp, Homo sapiens
ggtcagatctgtttc

SEQ ID NO: 1077745 - DNA, 15 bp, Homo sapiens
gggtcagatctgttt

SEQ ID NO: 1077746 - DNA, 15 bp, Homo sapiens
ggggtcagatctgtt

SEQ ID NO: 1077747 - DNA, 15 bp, Homo sapiens
aggggtcagatctgt

SEQ ID NO: 1077748 - DNA, 15 bp, Homo sapiens
aaggggtcagatctg

SEQ ID NO: 1077749 - DNA, 15 bp, Homo sapiens
gaaggggtcagatct

SEQ ID NO: 1077750 - DNA, 15 bp, Homo sapiens
agaaggggtcagatc

SEQ ID NO: 1077751 - DNA, 15 bp, Homo sapiens
gagaaggggtcagat

SEQ ID NO: 1077752 - DNA, 15 bp, Homo sapiens
agagaaggggtcaga

SEQ ID NO: 1077753 - DNA, 15 bp, Homo sapiens
tagagaaggggtcag

SEQ ID NO: 1077754 - DNA, 15 bp, Homo sapiens
gtagagaaggggtca

SEQ ID NO: 1077755 - DNA, 15 bp, Homo sapiens
ggtagagaaggggtc

SEQ ID NO: 1077756 - DNA, 15 bp, Homo sapiens
aggtagagaaggggt

SEQ ID NO: 1077757 - DNA, 15 bp, Homo sapiens
gaggtagagaagggg

SEQ ID NO: 1077758 - DNA, 15 bp, Homo sapiens
tgaggtagagaaggg

SEQ ID NO: 1077759 - DNA, 15 bp, Homo sapiens
gtgaggtagagaagg

SEQ ID NO: 1077760 - DNA, 15 bp, Homo sapiens
agtgaggtagagaag

SEQ ID NO: 1077761 - DNA, 15 bp, Homo sapiens
gagtgaggtagagaa

SEQ ID NO: 1077762 - DNA, 15 bp, Homo sapiens
agagtgaggtagaga

SEQ ID NO: 1077763 - DNA, 15 bp, Homo sapiens
aagagtgaggtagag

SEQ ID NO: 1077764 - DNA, 15 bp, Homo sapiens
gaagagtgaggtaga

SEQ ID NO: 1077765 - DNA, 15 bp, Homo sapiens
tgaagagtgaggtag

SEQ ID NO: 1077766 - DNA, 15 bp, Homo sapiens
gtgaagagtgaggta

SEQ ID NO: 1077767 - DNA, 15 bp, Homo sapiens
ggtgaagagtgaggt

SEQ ID NO: 1077768 - DNA, 15 bp, Homo sapiens
tggtgaagagtgagg

SEQ ID NO: 1077769 - DNA, 15 bp, Homo sapiens
ttggtgaagagtgag

SEQ ID NO: 1077770 - DNA, 15 bp, Homo sapiens
tttggtgaagagtga

SEQ ID NO: 1077771 - DNA, 15 bp, Homo sapiens
ttttggtgaagagtg

SEQ ID NO: 1077772 - DNA, 15 bp, Homo sapiens
tttttggtgaagagt

SEQ ID NO: 1077773 - DNA, 15 bp, Homo sapiens
ttttttggtgaagag

SEQ ID NO: 1077774 - DNA, 15 bp, Homo sapiens
gttttttggtgaaga

SEQ ID NO: 1077775 - DNA, 15 bp, Homo sapiens
ggttttttggtgaag

SEQ ID NO: 1077776 - DNA, 15 bp, Homo sapiens
tggttttttggtgaa

SEQ ID NO: 1077777 - DNA, 15 bp, Homo sapiens
ctggttttttggtga

SEQ ID NO: 1077778 - DNA, 15 bp, Homo sapiens
gctggttttttggtg

SEQ ID NO: 1077779 - DNA, 15 bp, Homo sapiens
tgctggttttttggt

SEQ ID NO: 1077780 - DNA, 15 bp, Homo sapiens
atgctggttttttgg

SEQ ID NO: 1077781 - DNA, 15 bp, Homo sapiens
tatgctggttttttg

SEQ ID NO: 1077782 - DNA, 15 bp, Homo sapiens
atatgctggtttttt

SEQ ID NO: 1077783 - DNA, 15 bp, Homo sapiens
aatatgctggttttt

SEQ ID NO: 1077784 - DNA, 15 bp, Homo sapiens
caatatgctggtttt

SEQ ID NO: 1077785 - DNA, 15 bp, Homo sapiens
acaatatgctggttt

SEQ ID NO: 1077786 - DNA, 15 bp, Homo sapiens
aacaatatgctggtt

SEQ ID NO: 1077787 - DNA, 15 bp, Homo sapiens
taacaatatgctggt

SEQ ID NO: 1077788 - DNA, 15 bp, Homo sapiens
ctaacaatatgctgg

SEQ ID NO: 1077789 - DNA, 15 bp, Homo sapiens
gctaacaatatgctg

SEQ ID NO: 1077790 - DNA, 15 bp, Homo sapiens
agctaacaatatgct

SEQ ID NO: 1077791 - DNA, 15 bp, Homo sapiens
cagctaacaatatgc

SEQ ID NO: 1077792 - DNA, 15 bp, Homo sapiens
gcagctaacaatatg

SEQ ID NO: 1077793 - DNA, 15 bp, Homo sapiens
ggcagctaacaatat

SEQ ID NO: 1077794 - DNA, 15 bp, Homo sapiens
aggcagctaacaata

SEQ ID NO: 1077795 - DNA, 15 bp, Homo sapiens
aaggcagctaacaat

SEQ ID NO: 1077796 - DNA, 15 bp, Homo sapiens
taaggcagctaacaa

SEQ ID NO: 1077797 - DNA, 15 bp, Homo sapiens
ataaggcagctaaca

SEQ ID NO: 1077798 - DNA, 15 bp, Homo sapiens
tataaggcagctaac

SEQ ID NO: 1077799 - DNA, 15 bp, Homo sapiens
ctataaggcagctaa

SEQ ID NO: 1077800 - DNA, 15 bp, Homo sapiens
cctataaggcagcta

SEQ ID NO: 1077801 - DNA, 15 bp, Homo sapiens
tcctataaggcagct

SEQ ID NO: 1077802 - DNA, 15 bp, Homo sapiens
atcctataaggcagc

SEQ ID NO: 1077803 - DNA, 15 bp, Homo sapiens
taatcctataaggca

SEQ ID NO: 1077804 - DNA, 15 bp, Homo sapiens
ctaatcctataaggc

SEQ ID NO: 1077805 - DNA, 15 bp, Homo sapiens
tctaatcctataagg

SEQ ID NO: 1077806 - DNA, 15 bp, Homo sapiens
atctaatcctataag

SEQ ID NO: 1077807 - DNA, 15 bp, Homo sapiens
catctaatcctataa

SEQ ID NO: 1077808 - DNA, 15 bp, Homo sapiens
tcatctaatcctata

SEQ ID NO: 1077809 - DNA, 15 bp, Homo sapiens
ctcatctaatcctat

SEQ ID NO: 1077810 - DNA, 15 bp, Homo sapiens
actcatctaatccta

SEQ ID NO: 1077811 - DNA, 15 bp, Homo sapiens
tactcatctaatcct

SEQ ID NO: 1077812 - DNA, 15 bp, Homo sapiens
gtactcatctaatcc

SEQ ID NO: 1077813 - DNA, 15 bp, Homo sapiens
agtactcatctaatc

SEQ ID NO: 1077814 - DNA, 15 bp, Homo sapiens
aagtactcatctaat

SEQ ID NO: 1077815 - DNA, 15 bp, Homo sapiens
caagtactcatctaa

SEQ ID NO: 1077816 - DNA, 15 bp, Homo sapiens
gcaagtactcatcta

SEQ ID NO: 1077817 - DNA, 15 bp, Homo sapiens
ggcaagtactcatct

SEQ ID NO: 1077818 - DNA, 15 bp, Homo sapiens
aggcaagtactcatc

SEQ ID NO: 1077819 - DNA, 15 bp, Homo sapiens
aaggcaagtactcat

SEQ ID NO: 1077820 - DNA, 15 bp, Homo sapiens
gaaggcaagtactca

SEQ ID NO: 1077821 - DNA, 15 bp, Homo sapiens
cgaaggcaagtactc

SEQ ID NO: 1077822 - DNA, 15 bp, Homo sapiens
gcgaaggcaagtact

SEQ ID NO: 1077823 - DNA, 15 bp, Homo sapiens
ggcgaaggcaagtac

SEQ ID NO: 1077824 - DNA, 15 bp, Homo sapiens
gggcgaaggcaagta

SEQ ID NO: 1077825 - DNA, 15 bp, Homo sapiens
agggcgaaggcaagt

SEQ ID NO: 1077826 - DNA, 15 bp, Homo sapiens
gagggcgaaggcaag

SEQ ID NO: 1077827 - DNA, 15 bp, Homo sapiens
ggagggcgaaggcaa

SEQ ID NO: 1077828 - DNA, 15 bp, Homo sapiens
gggagggcgaaggca

SEQ ID NO: 1077829 - DNA, 15 bp, Homo sapiens
agggagggcgaaggc

SEQ ID NO: 1077830 - DNA, 15 bp, Homo sapiens
gagggagggcgaagg

SEQ ID NO: 1077831 - DNA, 15 bp, Homo sapiens
tgagggagggcgaag

SEQ ID NO: 1077832 - DNA, 15 bp, Homo sapiens
ctgagggagggcgaa

SEQ ID NO: 1077833 - DNA, 15 bp, Homo sapiens
tctgagggagggcga

SEQ ID NO: 1077834 - DNA, 15 bp, Homo sapiens
ttctgagggagggcg

SEQ ID NO: 1077835 - DNA, 15 bp, Homo sapiens
cttctgagggagggc

SEQ ID NO: 1077836 - DNA, 15 bp, Homo sapiens
tcttctgagggaggg

SEQ ID NO: 1077837 - DNA, 15 bp, Homo sapiens
ctcttctgagggagg

SEQ ID NO: 1077838 - DNA, 15 bp, Homo sapiens
cctcttctgagggag

SEQ ID NO: 1077839 - DNA, 15 bp, Homo sapiens
acctcttctgaggga

SEQ ID NO: 1077840 - DNA, 15 bp, Homo sapiens
aacctcttctgaggg

SEQ ID NO: 1077841 - DNA, 15 bp, Homo sapiens
gaacctcttctgagg

SEQ ID NO: 1077842 - DNA, 15 bp, Homo sapiens
tgaacctcttctgag

SEQ ID NO: 1077843 - DNA, 15 bp, Homo sapiens
ctgaacctcttctga

SEQ ID NO: 1077844 - DNA, 15 bp, Homo sapiens
gctgaacctcttctg

SEQ ID NO: 1077845 - DNA, 15 bp, Homo sapiens
agctgaacctcttct

SEQ ID NO: 1077846 - DNA, 15 bp, Homo sapiens
aagctgaacctcttc

SEQ ID NO: 1077847 - DNA, 15 bp, Homo sapiens
gaagctgaacctctt

SEQ ID NO: 1077848 - DNA, 15 bp, Homo sapiens
agaagctgaacctct

SEQ ID NO: 1077849 - DNA, 15 bp, Homo sapiens
aagaagctgaacctc

SEQ ID NO: 1077850 - DNA, 15 bp, Homo sapiens
caagaagctgaacct

SEQ ID NO: 1077851 - DNA, 15 bp, Homo sapiens
ccaagaagctgaacc

SEQ ID NO: 1077852 - DNA, 15 bp, Homo sapiens
cccaagaagctgaac

SEQ ID NO: 1077853 - DNA, 15 bp, Homo sapiens
ccccaagaagctgaa

SEQ ID NO: 1077854 - DNA, 15 bp, Homo sapiens
gccccaagaagctga

SEQ ID NO: 1077855 - DNA, 15 bp, Homo sapiens
agccccaagaagctg

SEQ ID NO: 1077856 - DNA, 15 bp, Homo sapiens
cagccccaagaagct

SEQ ID NO: 1077857 - DNA, 15 bp, Homo sapiens
ccagccccaagaagc

SEQ ID NO: 1077858 - DNA, 15 bp, Homo sapiens
tccagccccaagaag

SEQ ID NO: 1077859 - DNA, 15 bp, Homo sapiens
gtccagccccaagaa

SEQ ID NO: 1077860 - DNA, 15 bp, Homo sapiens
tgtccagccccaaga

SEQ ID NO: 1077861 - DNA, 15 bp, Homo sapiens
gtgtccagccccaag

SEQ ID NO: 1077862 - DNA, 15 bp, Homo sapiens
agtgtccagccccaa

SEQ ID NO: 1077863 - DNA, 15 bp, Homo sapiens
aagtgtccagcccca

SEQ ID NO: 1077864 - DNA, 15 bp, Homo sapiens
gaagtgtccagcccc

SEQ ID NO: 1077865 - DNA, 15 bp, Homo sapiens
ggaagtgtccagccc

SEQ ID NO: 1077866 - DNA, 15 bp, Homo sapiens
tggaagtgtccagcc

SEQ ID NO: 1077867 - DNA, 15 bp, Homo sapiens
gtggaagtgtccagc

SEQ ID NO: 1077868 - DNA, 15 bp, Homo sapiens
tgtggaagtgtccag

SEQ ID NO: 1077869 - DNA, 15 bp, Homo sapiens
ctgtggaagtgtcca

SEQ ID NO: 1077870 - DNA, 15 bp, Homo sapiens
cctgtggaagtgtcc

SEQ ID NO: 1077871 - DNA, 15 bp, Homo sapiens
gcctgtggaagtgtc

SEQ ID NO: 1077872 - DNA, 15 bp, Homo sapiens
ggcctgtggaagtgt

SEQ ID NO: 1077873 - DNA, 15 bp, Homo sapiens
aggcctgtggaagtg

SEQ ID NO: 1077874 - DNA, 15 bp, Homo sapiens
aaggcctgtggaagt

SEQ ID NO: 1077875 - DNA, 15 bp, Homo sapiens
aaaggcctgtggaag

SEQ ID NO: 1077876 - DNA, 15 bp, Homo sapiens
aaaaggcctgtggaa

SEQ ID NO: 1077877 - DNA, 15 bp, Homo sapiens
taaaaggcctgtgga

SEQ ID NO: 1077878 - DNA, 15 bp, Homo sapiens
gtaaaaggcctgtgg

SEQ ID NO: 1077879 - DNA, 15 bp, Homo sapiens
ggtaaaaggcctgtg

SEQ ID NO: 1077880 - DNA, 15 bp, Homo sapiens
aggtaaaaggcctgt

SEQ ID NO: 1077881 - DNA, 15 bp, Homo sapiens
gaggtaaaaggcctg

SEQ ID NO: 1077882 - DNA, 15 bp, Homo sapiens
agaggtaaaaggcct

SEQ ID NO: 1077883 - DNA, 15 bp, Homo sapiens
cagaggtaaaaggcc

SEQ ID NO: 1077884 - DNA, 15 bp, Homo sapiens
ccagaggtaaaaggc

SEQ ID NO: 1077885 - DNA, 15 bp, Homo sapiens
accagaggtaaaagg

SEQ ID NO: 1077886 - DNA, 15 bp, Homo sapiens
gaccagaggtaaaag

SEQ ID NO: 1077887 - DNA, 15 bp, Homo sapiens
tgaccagaggtaaaa

SEQ ID NO: 1077888 - DNA, 15 bp, Homo sapiens
atgaccagaggtaaa

SEQ ID NO: 1077889 - DNA, 15 bp, Homo sapiens
catgaccagaggtaa

SEQ ID NO: 1077890 - DNA, 15 bp, Homo sapiens
ccatgaccagaggta

SEQ ID NO: 1077891 - DNA, 15 bp, Homo sapiens
gccatgaccagaggt

SEQ ID NO: 1077892 - DNA, 15 bp, Homo sapiens
ggccatgaccagagg

SEQ ID NO: 1077893 - DNA, 15 bp, Homo sapiens
tggccatgaccagag

SEQ ID NO: 1077894 - DNA, 15 bp, Homo sapiens
gtggccatgaccaga

SEQ ID NO: 1077895 - DNA, 15 bp, Homo sapiens
tgtggccatgaccag

SEQ ID NO: 1077896 - DNA, 15 bp, Homo sapiens
ctgtggccatgacca

SEQ ID NO: 1077897 - DNA, 15 bp, Homo sapiens
gctgtggccatgacc

SEQ ID NO: 1077898 - DNA, 15 bp, Homo sapiens
ggctgtggccatgac

SEQ ID NO: 1077899 - DNA, 15 bp, Homo sapiens
aggctgtggccatga

SEQ ID NO: 1077900 - DNA, 15 bp, Homo sapiens
aaggctgtggccatg

SEQ ID NO: 1077901 - DNA, 15 bp, Homo sapiens
aaaggctgtggccat

SEQ ID NO: 1077902 - DNA, 15 bp, Homo sapiens
aaaaggctgtggcca

SEQ ID NO: 1077903 - DNA, 15 bp, Homo sapiens
aaaaaggctgtggcc

SEQ ID NO: 1077904 - DNA, 15 bp, Homo sapiens
aaaaaaggctgtggc

SEQ ID NO: 1077905 - DNA, 15 bp, Homo sapiens
aaaaaaaggctgtgg

SEQ ID NO: 1077906 - DNA, 15 bp, Homo sapiens
gaaaaaaaggctgtg

SEQ ID NO: 1077907 - DNA, 15 bp, Homo sapiens
agaaaaaaaggctgt

SEQ ID NO: 1077908 - DNA, 15 bp, Homo sapiens
aagaaaaaaaggctg

SEQ ID NO: 1077909 - DNA, 15 bp, Homo sapiens
gaagaaaaaaaggct

SEQ ID NO: 1077910 - DNA, 15 bp, Homo sapiens
agaagaaaaaaaggc

SEQ ID NO: 1077911 - DNA, 15 bp, Homo sapiens
cagaagaaaaaaagg

SEQ ID NO: 1077912 - DNA, 15 bp, Homo sapiens
ccagaagaaaaaaag

SEQ ID NO: 1077913 - DNA, 15 bp, Homo sapiens
cccagaagaaaaaaa

SEQ ID NO: 1077914 - DNA, 15 bp, Homo sapiens
ccccagaagaaaaaa

SEQ ID NO: 1077915 - DNA, 15 bp, Homo sapiens
accccagaagaaaaa

SEQ ID NO: 1077916 - DNA, 15 bp, Homo sapiens
caccccagaagaaaa

SEQ ID NO: 1077917 - DNA, 15 bp, Homo sapiens
gcaccccagaagaaa

SEQ ID NO: 1077918 - DNA, 15 bp, Homo sapiens
agcaccccagaagaa

SEQ ID NO: 1077919 - DNA, 15 bp, Homo sapiens
cagcaccccagaaga

SEQ ID NO: 1077920 - DNA, 15 bp, Homo sapiens
acagcaccccagaag

SEQ ID NO: 1077921 - DNA, 15 bp, Homo sapiens
cacagcaccccagaa

SEQ ID NO: 1077922 - DNA, 15 bp, Homo sapiens
gcacagcaccccaga

SEQ ID NO: 1077923 - DNA, 15 bp, Homo sapiens
ggcacagcaccccag

SEQ ID NO: 1077924 - DNA, 15 bp, Homo sapiens
aggcacagcacccca

SEQ ID NO: 1077925 - DNA, 15 bp, Homo sapiens
gaggcacagcacccc

SEQ ID NO: 1077926 - DNA, 15 bp, Homo sapiens
ggaggcacagcaccc

SEQ ID NO: 1077927 - DNA, 15 bp, Homo sapiens
tggaggcacagcacc

SEQ ID NO: 1077928 - DNA, 15 bp, Homo sapiens
ctggaggcacagcac

SEQ ID NO: 1077929 - DNA, 15 bp, Homo sapiens
cctggaggcacagca

SEQ ID NO: 1077930 - DNA, 15 bp, Homo sapiens
ccctggaggcacagc

SEQ ID NO: 1077931 - DNA, 15 bp, Homo sapiens
cccctggaggcacag

SEQ ID NO: 1077932 - DNA, 15 bp, Homo sapiens
acccctggaggcaca

SEQ ID NO: 1077933 - DNA, 15 bp, Homo sapiens
gacccctggaggcac

SEQ ID NO: 1077934 - DNA, 15 bp, Homo sapiens
ggacccctggaggca

SEQ ID NO: 1077935 - DNA, 15 bp, Homo sapiens
tggacccctggaggc

SEQ ID NO: 1077936 - DNA, 15 bp, Homo sapiens
ctggacccctggagg

SEQ ID NO: 1077937 - DNA, 15 bp, Homo sapiens
cctggacccctggag

SEQ ID NO: 1077938 - DNA, 15 bp, Homo sapiens
gcctggacccctgga

SEQ ID NO: 1077939 - DNA, 15 bp, Homo sapiens
ggcctggacccctgg

SEQ ID NO: 1077940 - DNA, 15 bp, Homo sapiens
aggcctggacccctg

SEQ ID NO: 1077941 - DNA, 15 bp, Homo sapiens
caggcctggacccct

SEQ ID NO: 1077942 - DNA, 15 bp, Homo sapiens
ccaggcctggacccc

SEQ ID NO: 1077943 - DNA, 15 bp, Homo sapiens
cccaggcctggaccc

SEQ ID NO: 1077944 - DNA, 15 bp, Homo sapiens
tcccaggcctggacc

SEQ ID NO: 1077945 - DNA, 15 bp, Homo sapiens
ttcccaggcctggac

SEQ ID NO: 1077946 - DNA, 15 bp, Homo sapiens
cttcccaggcctgga

SEQ ID NO: 1077947 - DNA, 15 bp, Homo sapiens
gcttcccaggcctgg

SEQ ID NO: 1077948 - DNA, 15 bp, Homo sapiens
agcttcccaggcctg

SEQ ID NO: 1077949 - DNA, 15 bp, Homo sapiens
gagcttcccaggcct

SEQ ID NO: 1077950 - DNA, 15 bp, Homo sapiens
tgagcttcccaggcc

SEQ ID NO: 1077951 - DNA, 15 bp, Homo sapiens
ctgagcttcccaggc

SEQ ID NO: 1077952 - DNA, 15 bp, Homo sapiens
cctgagcttcccagg

SEQ ID NO: 1077953 - DNA, 15 bp, Homo sapiens
ccctgagcttcccag

SEQ ID NO: 1077954 - DNA, 15 bp, Homo sapiens
cccctgagcttccca

SEQ ID NO: 1077955 - DNA, 15 bp, Homo sapiens
tcccctgagcttccc

SEQ ID NO: 1077956 - DNA, 15 bp, Homo sapiens
ttcccctgagcttcc

SEQ ID NO: 1077957 - DNA, 15 bp, Homo sapiens
cttcccctgagcttc

SEQ ID NO: 1077958 - DNA, 15 bp, Homo sapiens
acttcccctgagctt

SEQ ID NO: 1077959 - DNA, 15 bp, Homo sapiens
gacttcccctgagct

SEQ ID NO: 1077960 - DNA, 15 bp, Homo sapiens
tgacttcccctgagc

SEQ ID NO: 1077961 - DNA, 15 bp, Homo sapiens
gtgacttcccctgag

SEQ ID NO: 1077962 - DNA, 15 bp, Homo sapiens
agtgacttcccctga

SEQ ID NO: 1077963 - DNA, 15 bp, Homo sapiens
cagtgacttcccctg

SEQ ID NO: 1077964 - DNA, 15 bp, Homo sapiens
gcagtgacttcccct

SEQ ID NO: 1077965 - DNA, 15 bp, Homo sapiens
ggcagtgacttcccc

SEQ ID NO: 1077966 - DNA, 15 bp, Homo sapiens
aggcagtgacttccc

SEQ ID NO: 1077967 - DNA, 15 bp, Homo sapiens
caggcagtgacttcc

SEQ ID NO: 1077968 - DNA, 15 bp, Homo sapiens
ccaggcagtgacttc

SEQ ID NO: 1077969 - DNA, 15 bp, Homo sapiens
gccaggcagtgactt

SEQ ID NO: 1077970 - DNA, 15 bp, Homo sapiens
ggccaggcagtgact

SEQ ID NO: 1077971 - DNA, 15 bp, Homo sapiens
aggccaggcagtgac

SEQ ID NO: 1077972 - DNA, 15 bp, Homo sapiens
caggccaggcagtga

SEQ ID NO: 1077973 - DNA, 15 bp, Homo sapiens
ccaggccaggcagtg

SEQ ID NO: 1077974 - DNA, 15 bp, Homo sapiens
cccaggccaggcagt

SEQ ID NO: 1077975 - DNA, 15 bp, Homo sapiens
ccccaggccaggcag

SEQ ID NO: 1077976 - DNA, 15 bp, Homo sapiens
tccccaggccaggca

SEQ ID NO: 1077977 - DNA, 15 bp, Homo sapiens
gtccccaggccaggc

SEQ ID NO: 1077978 - DNA, 15 bp, Homo sapiens
tgtccccaggccagg

SEQ ID NO: 1077979 - DNA, 15 bp, Homo sapiens
atgtccccaggccag

SEQ ID NO: 1077980 - DNA, 15 bp, Homo sapiens
aatgtccccaggcca

SEQ ID NO: 1077981 - DNA, 15 bp, Homo sapiens
gaatgtccccaggcc

SEQ ID NO: 1077982 - DNA, 15 bp, Homo sapiens
agaatgtccccaggc

SEQ ID NO: 1077983 - DNA, 15 bp, Homo sapiens
gagaatgtccccagg

SEQ ID NO: 1077984 - DNA, 15 bp, Homo sapiens
ggagaatgtccccag

SEQ ID NO: 1077985 - DNA, 15 bp, Homo sapiens
aggagaatgtcccca

SEQ ID NO: 1077986 - DNA, 15 bp, Homo sapiens
taggagaatgtcccc

SEQ ID NO: 1077987 - DNA, 15 bp, Homo sapiens
ttaggagaatgtccc

SEQ ID NO: 1077988 - DNA, 15 bp, Homo sapiens
gttaggagaatgtcc

SEQ ID NO: 1077989 - DNA, 15 bp, Homo sapiens
ggttaggagaatgtc

SEQ ID NO: 1077990 - DNA, 15 bp, Homo sapiens
aggttaggagaatgt

SEQ ID NO: 1077991 - DNA, 15 bp, Homo sapiens
taggttaggagaatg

SEQ ID NO: 1077992 - DNA, 15 bp, Homo sapiens
gtaggttaggagaat

SEQ ID NO: 1077993 - DNA, 15 bp, Homo sapiens
agtaggttaggagaa

SEQ ID NO: 1077994 - DNA, 15 bp, Homo sapiens
gagtaggttaggaga

SEQ ID NO: 1077995 - DNA, 15 bp, Homo sapiens
tgagtaggttaggag

SEQ ID NO: 1077996 - DNA, 15 bp, Homo sapiens
gtgagtaggttagga

SEQ ID NO: 1077997 - DNA, 15 bp, Homo sapiens
ggtgagtaggttagg

SEQ ID NO: 1077998 - DNA, 15 bp, Homo sapiens
gggtgagtaggttag

SEQ ID NO: 1077999 - DNA, 15 bp, Homo sapiens
agggtgagtaggtta

SEQ ID NO: 1078000 - DNA, 15 bp, Homo sapiens
aagggtgagtaggtt

SEQ ID NO: 1078001 - DNA, 15 bp, Homo sapiens
gaagggtgagtaggt

SEQ ID NO: 1078002 - DNA, 15 bp, Homo sapiens
agaagggtgagtagg

SEQ ID NO: 1078003 - DNA, 15 bp, Homo sapiens
tagaagggtgagtag

SEQ ID NO: 1078004 - DNA, 15 bp, Homo sapiens
ctagaagggtgagta

SEQ ID NO: 1078005 - DNA, 15 bp, Homo sapiens
tctagaagggtgagt

SEQ ID NO: 1078006 - DNA, 15 bp, Homo sapiens
gtctagaagggtgag

SEQ ID NO: 1078007 - DNA, 15 bp, Homo sapiens
ggtctagaagggtga

SEQ ID NO: 1078008 - DNA, 15 bp, Homo sapiens
gggtctagaagggtg

SEQ ID NO: 1078009 - DNA, 15 bp, Homo sapiens
tgggtctagaagggt

SEQ ID NO: 1078010 - DNA, 15 bp, Homo sapiens
ctgggtctagaaggg

SEQ ID NO: 1078011 - DNA, 15 bp, Homo sapiens
gctgggtctagaagg

SEQ ID NO: 1078012 - DNA, 15 bp, Homo sapiens
ggctgggtctagaag

SEQ ID NO: 1078013 - DNA, 15 bp, Homo sapiens
tggctgggtctagaa

SEQ ID NO: 1078014 - DNA, 15 bp, Homo sapiens
gtggctgggtctaga

SEQ ID NO: 1078015 - DNA, 15 bp, Homo sapiens
ggtggctgggtctag

SEQ ID NO: 1078016 - DNA, 15 bp, Homo sapiens
tggtggctgggtcta

SEQ ID NO: 1078017 - DNA, 15 bp, Homo sapiens
atggtggctgggtct

SEQ ID NO: 1078018 - DNA, 15 bp, Homo sapiens
catggtggctgggtc

SEQ ID NO: 1078019 - DNA, 15 bp, Homo sapiens
ccatggtggctgggt

SEQ ID NO: 1078020 - DNA, 15 bp, Homo sapiens
gccatggtggctggg

SEQ ID NO: 1078021 - DNA, 15 bp, Homo sapiens
agccatggtggctgg

SEQ ID NO: 1078022 - DNA, 15 bp, Homo sapiens
cagccatggtggctg

SEQ ID NO: 1078023 - DNA, 15 bp, Homo sapiens
acagccatggtggct

SEQ ID NO: 1078024 - DNA, 15 bp, Homo sapiens
cacagccatggtggc

SEQ ID NO: 1078025 - DNA, 15 bp, Homo sapiens
tcacagccatggtgg

SEQ ID NO: 1078026 - DNA, 15 bp, Homo sapiens
ctcacagccatggtg

SEQ ID NO: 1078027 - DNA, 15 bp, Homo sapiens
tctcacagccatggt

SEQ ID NO: 1078028 - DNA, 15 bp, Homo sapiens
gtctcacagccatgg

SEQ ID NO: 1078029 - DNA, 15 bp, Homo sapiens
tgtctcacagccatg

SEQ ID NO: 1078030 - DNA, 15 bp, Homo sapiens
ctgtctcacagccat

SEQ ID NO: 1078031 - DNA, 15 bp, Homo sapiens
gctgtctcacagcca

SEQ ID NO: 1078032 - DNA, 15 bp, Homo sapiens
ggctgtctcacagcc

SEQ ID NO: 1078033 - DNA, 15 bp, Homo sapiens
tggctgtctcacagc

SEQ ID NO: 1078034 - DNA, 15 bp, Homo sapiens
gtggctgtctcacag

SEQ ID NO: 1078035 - DNA, 15 bp, Homo sapiens
ggtggctgtctcaca

SEQ ID NO: 1078036 - DNA, 15 bp, Homo sapiens
cggtggctgtctcac

SEQ ID NO: 1078037 - DNA, 15 bp, Homo sapiens
acggtggctgtctca

SEQ ID NO: 1078038 - DNA, 15 bp, Homo sapiens
cacggtggctgtctc

SEQ ID NO: 1078039 - DNA, 15 bp, Homo sapiens
tcacggtggctgtct

SEQ ID NO: 1078040 - DNA, 15 bp, Homo sapiens
ttcacggtggctgtc

SEQ ID NO: 1078041 - DNA, 15 bp, Homo sapiens
tttcacggtggctgt

SEQ ID NO: 1078042 - DNA, 15 bp, Homo sapiens
ttttcacggtggctg

SEQ ID NO: 1078043 - DNA, 15 bp, Homo sapiens
gttttcacggtggct

SEQ ID NO: 1078044 - DNA, 15 bp, Homo sapiens
agttttcacggtggc

SEQ ID NO: 1078045 - DNA, 15 bp, Homo sapiens
gagttttcacggtgg

SEQ ID NO: 1078046 - DNA, 15 bp, Homo sapiens
ggagttttcacggtg

SEQ ID NO: 1078047 - DNA, 15 bp, Homo sapiens
gggagttttcacggt

SEQ ID NO: 1078048 - DNA, 15 bp, Homo sapiens
agggagttttcacgg

SEQ ID NO: 1078049 - DNA, 15 bp, Homo sapiens
gagggagttttcacg

SEQ ID NO: 1078050 - DNA, 15 bp, Homo sapiens
tgagggagttttcac

SEQ ID NO: 1078051 - DNA, 15 bp, Homo sapiens
ttgagggagttttca

SEQ ID NO: 1078052 - DNA, 15 bp, Homo sapiens
attgagggagttttc

SEQ ID NO: 1078053 - DNA, 15 bp, Homo sapiens
gattgagggagtttt

SEQ ID NO: 1078054 - DNA, 15 bp, Homo sapiens
ggattgagggagttt

SEQ ID NO: 1078055 - DNA, 15 bp, Homo sapiens
tggattgagggagtt

SEQ ID NO: 1078056 - DNA, 15 bp, Homo sapiens
atggattgagggagt

SEQ ID NO: 1078057 - DNA, 15 bp, Homo sapiens
gatggattgagggag

SEQ ID NO: 1078058 - DNA, 15 bp, Homo sapiens
ggatggattgaggga

SEQ ID NO: 1078059 - DNA, 15 bp, Homo sapiens
tggatggattgaggg

SEQ ID NO: 1078060 - DNA, 15 bp, Homo sapiens
atggatggattgagg

SEQ ID NO: 1078061 - DNA, 15 bp, Homo sapiens
aatggatggattgag

SEQ ID NO: 1078062 - DNA, 15 bp, Homo sapiens
taatggatggattga

SEQ ID NO: 1078063 - DNA, 15 bp, Homo sapiens
ctaatggatggattg

SEQ ID NO: 1078064 - DNA, 15 bp, Homo sapiens
tctaatggatggatt

SEQ ID NO: 1078065 - DNA, 15 bp, Homo sapiens
ttctaatggatggat

SEQ ID NO: 1078066 - DNA, 15 bp, Homo sapiens
attctaatggatgga

SEQ ID NO: 1078067 - DNA, 15 bp, Homo sapiens
cattctaatggatgg

SEQ ID NO: 1078068 - DNA, 15 bp, Homo sapiens
ccattctaatggatg

SEQ ID NO: 1078069 - DNA, 15 bp, Homo sapiens
gccattctaatggat

SEQ ID NO: 1078070 - DNA, 15 bp, Homo sapiens
ggccattctaatgga

SEQ ID NO: 1078071 - DNA, 15 bp, Homo sapiens
gggccattctaatgg

SEQ ID NO: 1078072 - DNA, 15 bp, Homo sapiens
agggccattctaatg

SEQ ID NO: 1078073 - DNA, 15 bp, Homo sapiens
gagggccattctaat

SEQ ID NO: 1078074 - DNA, 15 bp, Homo sapiens
ggagggccattctaa

SEQ ID NO: 1078075 - DNA, 15 bp, Homo sapiens
aggagggccattcta

SEQ ID NO: 1078076 - DNA, 15 bp, Homo sapiens
caggagggccattct

SEQ ID NO: 1078077 - DNA, 15 bp, Homo sapiens
gcaggagggccattc

SEQ ID NO: 1078078 - DNA, 15 bp, Homo sapiens
agcaggagggccatt

SEQ ID NO: 1078079 - DNA, 15 bp, Homo sapiens
aagcaggagggccat

SEQ ID NO: 1078080 - DNA, 15 bp, Homo sapiens
gaagcaggagggcca

SEQ ID NO: 1078081 - DNA, 15 bp, Homo sapiens
ggaagcaggagggcc

SEQ ID NO: 1078082 - DNA, 15 bp, Homo sapiens
tggaagcaggagggc

SEQ ID NO: 1078083 - DNA, 15 bp, Homo sapiens
gtggaagcaggaggg

SEQ ID NO: 1078084 - DNA, 15 bp, Homo sapiens
tgtggaagcaggagg

SEQ ID NO: 1078085 - DNA, 15 bp, Homo sapiens
gtgtggaagcaggag

SEQ ID NO: 1078086 - DNA, 15 bp, Homo sapiens
ggtgtggaagcagga

SEQ ID NO: 1078087 - DNA, 15 bp, Homo sapiens
gggtgtggaagcagg

SEQ ID NO: 1078088 - DNA, 15 bp, Homo sapiens
ggggtgtggaagcag

SEQ ID NO: 1078089 - DNA, 15 bp, Homo sapiens
gggggtgtggaagca

SEQ ID NO: 1078090 - DNA, 15 bp, Homo sapiens
tgggggtgtggaagc

SEQ ID NO: 1078091 - DNA, 15 bp, Homo sapiens
gtgggggtgtggaag

SEQ ID NO: 1078092 - DNA, 15 bp, Homo sapiens
ggtgggggtgtggaa

SEQ ID NO: 1078093 - DNA, 15 bp, Homo sapiens
cggtgggggtgtgga

SEQ ID NO: 1078094 - DNA, 15 bp, Homo sapiens
gcggtgggggtgtgg

SEQ ID NO: 1078095 - DNA, 15 bp, Homo sapiens
tgcggtgggggtgtg

SEQ ID NO: 1078096 - DNA, 15 bp, Homo sapiens
atgcggtgggggtgt

SEQ ID NO: 1078097 - DNA, 15 bp, Homo sapiens
tatgcggtgggggtg

SEQ ID NO: 1078098 - DNA, 15 bp, Homo sapiens
gtatgcggtgggggt

SEQ ID NO: 1078099 - DNA, 15 bp, Homo sapiens
agtatgcggtggggg

SEQ ID NO: 1078100 - DNA, 15 bp, Homo sapiens
cagtatgcggtgggg

SEQ ID NO: 1078101 - DNA, 15 bp, Homo sapiens
acagtatgcggtggg

SEQ ID NO: 1078102 - DNA, 15 bp, Homo sapiens
aacagtatgcggtgg

SEQ ID NO: 1078103 - DNA, 15 bp, Homo sapiens
gaacagtatgcggtg

SEQ ID NO: 1078104 - DNA, 15 bp, Homo sapiens
tgaacagtatgcggt

SEQ ID NO: 1078105 - DNA, 15 bp, Homo sapiens
gtgaacagtatgcgg

SEQ ID NO: 1078106 - DNA, 15 bp, Homo sapiens
agtgaacagtatgcg

SEQ ID NO: 1078107 - DNA, 15 bp, Homo sapiens
gagtgaacagtatgc

SEQ ID NO: 1078108 - DNA, 15 bp, Homo sapiens
ggagtgaacagtatg

SEQ ID NO: 1078109 - DNA, 15 bp, Homo sapiens
aggagtgaacagtat

SEQ ID NO: 1078110 - DNA, 15 bp, Homo sapiens
gaggagtgaacagta

SEQ ID NO: 1078111 - DNA, 15 bp, Homo sapiens
agaggagtgaacagt

SEQ ID NO: 1078112 - DNA, 15 bp, Homo sapiens
gagaggagtgaacag

SEQ ID NO: 1078113 - DNA, 15 bp, Homo sapiens
agagaggagtgaaca

SEQ ID NO: 1078114 - DNA, 15 bp, Homo sapiens
aagagaggagtgaac

SEQ ID NO: 1078115 - DNA, 15 bp, Homo sapiens
aaagagaggagtgaa

SEQ ID NO: 1078116 - DNA, 15 bp, Homo sapiens
taaagagaggagtga

SEQ ID NO: 1078117 - DNA, 15 bp, Homo sapiens
ctaaagagaggagtg

SEQ ID NO: 1078118 - DNA, 15 bp, Homo sapiens
gctaaagagaggagt

SEQ ID NO: 1078119 - DNA, 15 bp, Homo sapiens
ggctaaagagaggag

SEQ ID NO: 1078120 - DNA, 15 bp, Homo sapiens
gggctaaagagagga

SEQ ID NO: 1078121 - DNA, 15 bp, Homo sapiens
agggctaaagagagg

SEQ ID NO: 1078122 - DNA, 15 bp, Homo sapiens
aagggctaaagagag

SEQ ID NO: 1078123 - DNA, 15 bp, Homo sapiens
gaagggctaaagaga

SEQ ID NO: 1078124 - DNA, 15 bp, Homo sapiens
agaagggctaaagag

SEQ ID NO: 1078125 - DNA, 15 bp, Homo sapiens
aagaagggctaaaga

SEQ ID NO: 1078126 - DNA, 15 bp, Homo sapiens
aaagaagggctaaag

SEQ ID NO: 1078127 - DNA, 15 bp, Homo sapiens
taaagaagggctaaa

SEQ ID NO: 1078128 - DNA, 15 bp, Homo sapiens
ttaaagaagggctaa

SEQ ID NO: 1078129 - DNA, 15 bp, Homo sapiens
gttaaagaagggcta

SEQ ID NO: 1078130 - DNA, 15 bp, Homo sapiens
ggttaaagaagggct

SEQ ID NO: 1078131 - DNA, 15 bp, Homo sapiens
gggttaaagaagggc

SEQ ID NO: 1078132 - DNA, 15 bp, Homo sapiens
agggttaaagaaggg

SEQ ID NO: 1078133 - DNA, 15 bp, Homo sapiens
gagggttaaagaagg

SEQ ID NO: 1078134 - DNA, 15 bp, Homo sapiens
agagggttaaagaag

SEQ ID NO: 1078135 - DNA, 15 bp, Homo sapiens
gagagggttaaagaa

SEQ ID NO: 1078136 - DNA, 15 bp, Homo sapiens
agagagggttaaaga

SEQ ID NO: 1078137 - DNA, 15 bp, Homo sapiens
aagagagggttaaag

SEQ ID NO: 1078138 - DNA, 15 bp, Homo sapiens
aaagagagggttaaa

SEQ ID NO: 1078139 - DNA, 15 bp, Homo sapiens
taaagagagggttaa

SEQ ID NO: 1078140 - DNA, 15 bp, Homo sapiens
ctaaagagagggtta

SEQ ID NO: 1078141 - DNA, 15 bp, Homo sapiens
gctaaagagagggtt

SEQ ID NO: 1078142 - DNA, 15 bp, Homo sapiens
ggctaaagagagggt

SEQ ID NO: 1078143 - DNA, 15 bp, Homo sapiens
gggctaaagagaggg

SEQ ID NO: 1078144 - DNA, 15 bp, Homo sapiens
caagggctaaagaga

SEQ ID NO: 1078145 - DNA, 15 bp, Homo sapiens
acaagggctaaagag

SEQ ID NO: 1078146 - DNA, 15 bp, Homo sapiens
cacaagggctaaaga

SEQ ID NO: 1078147 - DNA, 15 bp, Homo sapiens
acacaagggctaaag

SEQ ID NO: 1078148 - DNA, 15 bp, Homo sapiens
aacacaagggctaaa

SEQ ID NO: 1078149 - DNA, 15 bp, Homo sapiens
taacacaagggctaa

SEQ ID NO: 1078150 - DNA, 15 bp, Homo sapiens
ctaacacaagggcta

SEQ ID NO: 1078151 - DNA, 15 bp, Homo sapiens
actaacacaagggct

SEQ ID NO: 1078152 - DNA, 15 bp, Homo sapiens
aactaacacaagggc

SEQ ID NO: 1078153 - DNA, 15 bp, Homo sapiens
gaactaacacaaggg

SEQ ID NO: 1078154 - DNA, 15 bp, Homo sapiens
cgaactaacacaagg

SEQ ID NO: 1078155 - DNA, 15 bp, Homo sapiens
acgaactaacacaag

SEQ ID NO: 1078156 - DNA, 15 bp, Homo sapiens
aacgaactaacacaa

SEQ ID NO: 1078157 - DNA, 15 bp, Homo sapiens
gaacgaactaacaca

SEQ ID NO: 1078158 - DNA, 15 bp, Homo sapiens
cgaacgaactaacac

SEQ ID NO: 1078159 - DNA, 15 bp, Homo sapiens
ccgaacgaactaaca

SEQ ID NO: 1078160 - DNA, 15 bp, Homo sapiens
gccgaacgaactaac

SEQ ID NO: 1078161 - DNA, 15 bp, Homo sapiens
agccgaacgaactaa

SEQ ID NO: 1078162 - DNA, 15 bp, Homo sapiens
gagccgaacgaacta

SEQ ID NO: 1078163 - DNA, 15 bp, Homo sapiens
tgagccgaacgaact

SEQ ID NO: 1078164 - DNA, 15 bp, Homo sapiens
atgagccgaacgaac

SEQ ID NO: 1078165 - DNA, 15 bp, Homo sapiens
catgagccgaacgaa

SEQ ID NO: 1078166 - DNA, 15 bp, Homo sapiens
acatgagccgaacga

SEQ ID NO: 1078167 - DNA, 15 bp, Homo sapiens
gacatgagccgaacg

SEQ ID NO: 1078168 - DNA, 15 bp, Homo sapiens
agacatgagccgaac

SEQ ID NO: 1078169 - DNA, 15 bp, Homo sapiens
gagacatgagccgaa

SEQ ID NO: 1078170 - DNA, 15 bp, Homo sapiens
agagacatgagccga

SEQ ID NO: 1078171 - DNA, 15 bp, Homo sapiens
gagagacatgagccg

SEQ ID NO: 1078172 - DNA, 15 bp, Homo sapiens
ggagagacatgagcc

SEQ ID NO: 1078173 - DNA, 15 bp, Homo sapiens
aggagagacatgagc

SEQ ID NO: 1078174 - DNA, 15 bp, Homo sapiens
aaggagagacatgag

SEQ ID NO: 1078175 - DNA, 15 bp, Homo sapiens
aaaggagagacatga

SEQ ID NO: 1078176 - DNA, 15 bp, Homo sapiens
taaaggagagacatg

SEQ ID NO: 1078177 - DNA, 15 bp, Homo sapiens
gtaaaggagagacat

SEQ ID NO: 1078178 - DNA, 15 bp, Homo sapiens
ggtaaaggagagaca

SEQ ID NO: 1078179 - DNA, 15 bp, Homo sapiens
aggtaaaggagagac

SEQ ID NO: 1078180 - DNA, 15 bp, Homo sapiens
caggtaaaggagaga

SEQ ID NO: 1078181 - DNA, 15 bp, Homo sapiens
acaggtaaaggagag

SEQ ID NO: 1078182 - DNA, 15 bp, Homo sapiens
cacaggtaaaggaga

SEQ ID NO: 1078183 - DNA, 15 bp, Homo sapiens
ccacaggtaaaggag

SEQ ID NO: 1078184 - DNA, 15 bp, Homo sapiens
accacaggtaaagga

SEQ ID NO: 1078185 - DNA, 15 bp, Homo sapiens
gaccacaggtaaagg

SEQ ID NO: 1078186 - DNA, 15 bp, Homo sapiens
agaccacaggtaaag

SEQ ID NO: 1078187 - DNA, 15 bp, Homo sapiens
cagaccacaggtaaa

SEQ ID NO: 1078188 - DNA, 15 bp, Homo sapiens
acagaccacaggtaa

SEQ ID NO: 1078189 - DNA, 15 bp, Homo sapiens
cacagaccacaggta

SEQ ID NO: 1078190 - DNA, 15 bp, Homo sapiens
tcacagaccacaggt

SEQ ID NO: 1078191 - DNA, 15 bp, Homo sapiens
ctcacagaccacagg

SEQ ID NO: 1078192 - DNA, 15 bp, Homo sapiens
gctcacagaccacag

SEQ ID NO: 1078193 - DNA, 15 bp, Homo sapiens
agctcacagaccaca

SEQ ID NO: 1078194 - DNA, 15 bp, Homo sapiens
gagctcacagaccac

SEQ ID NO: 1078195 - DNA, 15 bp, Homo sapiens
ggagctcacagacca

SEQ ID NO: 1078196 - DNA, 15 bp, Homo sapiens
gggagctcacagacc

SEQ ID NO: 1078197 - DNA, 15 bp, Homo sapiens
agggagctcacagac

SEQ ID NO: 1078198 - DNA, 15 bp, Homo sapiens
cagggagctcacaga

SEQ ID NO: 1078199 - DNA, 15 bp, Homo sapiens
tcagggagctcacag

SEQ ID NO: 1078200 - DNA, 15 bp, Homo sapiens
ctcagggagctcaca

SEQ ID NO: 1078201 - DNA, 15 bp, Homo sapiens
tctcagggagctcac

SEQ ID NO: 1078202 - DNA, 15 bp, Homo sapiens
ttctcagggagctca

SEQ ID NO: 1078203 - DNA, 15 bp, Homo sapiens
attctcagggagctc

SEQ ID NO: 1078204 - DNA, 15 bp, Homo sapiens
cattctcagggagct

SEQ ID NO: 1078205 - DNA, 15 bp, Homo sapiens
tcattctcagggagc

SEQ ID NO: 1078206 - DNA, 15 bp, Homo sapiens
ttcattctcagggag

SEQ ID NO: 1078207 - DNA, 15 bp, Homo sapiens
cttcattctcaggga

SEQ ID NO: 1078208 - DNA, 15 bp, Homo sapiens
tcttcattctcaggg

SEQ ID NO: 1078209 - DNA, 15 bp, Homo sapiens
gtcttcattctcagg

SEQ ID NO: 1078210 - DNA, 15 bp, Homo sapiens
ggtcttcattctcag

SEQ ID NO: 1078211 - DNA, 15 bp, Homo sapiens
tggtcttcattctca

SEQ ID NO: 1078212 - DNA, 15 bp, Homo sapiens
ttggtcttcattctc

SEQ ID NO: 1078213 - DNA, 15 bp, Homo sapiens
cttggtcttcattct

SEQ ID NO: 1078214 - DNA, 15 bp, Homo sapiens
acttggtcttcattc

SEQ ID NO: 1078215 - DNA, 15 bp, Homo sapiens
aacttggtcttcatt

SEQ ID NO: 1078216 - DNA, 15 bp, Homo sapiens
aaacttggtcttcat

SEQ ID NO: 1078217 - DNA, 15 bp, Homo sapiens
aaaacttggtcttca

SEQ ID NO: 1078218 - DNA, 15 bp, Homo sapiens
aaaaacttggtcttc

SEQ ID NO: 1078219 - DNA, 15 bp, Homo sapiens
aaaaaacttggtctt

SEQ ID NO: 1078220 - DNA, 15 bp, Homo sapiens
aaaaaaacttggtct

SEQ ID NO: 1078221 - DNA, 15 bp, Homo sapiens
aaaaaaaacttggtc

SEQ ID NO: 1078222 - DNA, 15 bp, Homo sapiens
aaaaaaaaacttggt

SEQ ID NO: 1078223 - DNA, 15 bp, Homo sapiens
caaaaaaaaacttgg

SEQ ID NO: 1078224 - DNA, 15 bp, Homo sapiens
acaaaaaaaaacttg

SEQ ID NO: 1078225 - DNA, 15 bp, Homo sapiens
aacaaaaaaaaactt

SEQ ID NO: 1078226 - DNA, 15 bp, Homo sapiens
aaacaaaaaaaaact

SEQ ID NO: 1078227 - DNA, 15 bp, Homo sapiens
caaacaaaaaaaaac

SEQ ID NO: 1078228 - DNA, 15 bp, Homo sapiens
aaaaacaaaacaaac

SEQ ID NO: 1078229 - DNA, 15 bp, Homo sapiens
caaaaaacaaaacaa

SEQ ID NO: 1078230 - DNA, 15 bp, Homo sapiens
tcaaaaaacaaaaca

SEQ ID NO: 1078231 - DNA, 15 bp, Homo sapiens
tctcaaaaaacaaaa

SEQ ID NO: 1078232 - DNA, 15 bp, Homo sapiens
gtctcaaaaaacaaa

SEQ ID NO: 1078233 - DNA, 15 bp, Homo sapiens
tgtctcaaaaaacaa

SEQ ID NO: 1078234 - DNA, 15 bp, Homo sapiens
ttgtctcaaaaaaca

SEQ ID NO: 1078235 - DNA, 15 bp, Homo sapiens
tttgtctcaaaaaac

SEQ ID NO: 1078236 - DNA, 15 bp, Homo sapiens
ctttgtctcaaaaaa

SEQ ID NO: 1078237 - DNA, 15 bp, Homo sapiens
cctttgtctcaaaaa

SEQ ID NO: 1078238 - DNA, 15 bp, Homo sapiens
acctttgtctcaaaa

SEQ ID NO: 1078239 - DNA, 15 bp, Homo sapiens
aacctttgtctcaaa

SEQ ID NO: 1078240 - DNA, 15 bp, Homo sapiens
aaacctttgtctcaa

SEQ ID NO: 1078241 - DNA, 15 bp, Homo sapiens
aaaacctttgtctca

SEQ ID NO: 1078242 - DNA, 15 bp, Homo sapiens
caaaacctttgtctc

SEQ ID NO: 1078243 - DNA, 15 bp, Homo sapiens
acaaaacctttgtct

SEQ ID NO: 1078244 - DNA, 15 bp, Homo sapiens
aacaaaacctttgtc

SEQ ID NO: 1078245 - DNA, 15 bp, Homo sapiens
aaacaaaacctttgt

SEQ ID NO: 1078246 - DNA, 15 bp, Homo sapiens
aaaacaaaacctttg

SEQ ID NO: 1078247 - DNA, 15 bp, Homo sapiens
aaaaaacaaaacctt

SEQ ID NO: 1078248 - DNA, 15 bp, Homo sapiens
caaaaaacaaaacct

SEQ ID NO: 1078249 - DNA, 15 bp, Homo sapiens
ggtctcaaaaaacaa

SEQ ID NO: 1078250 - DNA, 15 bp, Homo sapiens
gggtctcaaaaaaca

SEQ ID NO: 1078251 - DNA, 15 bp, Homo sapiens
tgggtctcaaaaaac

SEQ ID NO: 1078252 - DNA, 15 bp, Homo sapiens
ctgggtctcaaaaaa

SEQ ID NO: 1078253 - DNA, 15 bp, Homo sapiens
cctgggtctcaaaaa

SEQ ID NO: 1078254 - DNA, 15 bp, Homo sapiens
acctgggtctcaaaa

SEQ ID NO: 1078255 - DNA, 15 bp, Homo sapiens
aacctgggtctcaaa

SEQ ID NO: 1078256 - DNA, 15 bp, Homo sapiens
caacctgggtctcaa

SEQ ID NO: 1078257 - DNA, 15 bp, Homo sapiens
ccaacctgggtctca

SEQ ID NO: 1078258 - DNA, 15 bp, Homo sapiens
tccaacctgggtctc

SEQ ID NO: 1078259 - DNA, 15 bp, Homo sapiens
ctccaacctgggtct

SEQ ID NO: 1078260 - DNA, 15 bp, Homo sapiens
actccaacctgggtc

SEQ ID NO: 1078261 - DNA, 15 bp, Homo sapiens
atgattgcaccactg

SEQ ID NO: 1078262 - DNA, 15 bp, Homo sapiens
tatgattgcaccact

SEQ ID NO: 1078263 - DNA, 15 bp, Homo sapiens
ctatgattgcaccac

SEQ ID NO: 1078264 - DNA, 15 bp, Homo sapiens
gctatgattgcacca

SEQ ID NO: 1078265 - DNA, 15 bp, Homo sapiens
agctatgattgcacc

SEQ ID NO: 1078266 - DNA, 15 bp, Homo sapiens
gagctatgattgcac

SEQ ID NO: 1078267 - DNA, 15 bp, Homo sapiens
tgagctatgattgca

SEQ ID NO: 1078268 - DNA, 15 bp, Homo sapiens
gtgagctatgattgc

SEQ ID NO: 1078269 - DNA, 15 bp, Homo sapiens
cttgagcccaggagg

SEQ ID NO: 1078270 - DNA, 15 bp, Homo sapiens
tgaggatcacttgag

SEQ ID NO: 1078271 - DNA, 15 bp, Homo sapiens
atgaggatcacttga

SEQ ID NO: 1078272 - DNA, 15 bp, Homo sapiens
catgaggatcacttg

SEQ ID NO: 1078273 - DNA, 15 bp, Homo sapiens
gcatgaggatcactt

SEQ ID NO: 1078274 - DNA, 15 bp, Homo sapiens
ggcatgaggatcact

SEQ ID NO: 1078275 - DNA, 15 bp, Homo sapiens
aggcatgaggatcac

SEQ ID NO: 1078276 - DNA, 15 bp, Homo sapiens
aaggcatgaggatca

SEQ ID NO: 1078277 - DNA, 15 bp, Homo sapiens
taaggcatgaggatc

SEQ ID NO: 1078278 - DNA, 15 bp, Homo sapiens
ctaaggcatgaggat

SEQ ID NO: 1078279 - DNA, 15 bp, Homo sapiens
gctaaggcatgagga

SEQ ID NO: 1078280 - DNA, 15 bp, Homo sapiens
ggctaaggcatgagg

SEQ ID NO: 1078281 - DNA, 15 bp, Homo sapiens
aggctaaggcatgag

SEQ ID NO: 1078282 - DNA, 15 bp, Homo sapiens
gaggctaaggcatga

SEQ ID NO: 1078283 - DNA, 15 bp, Homo sapiens
ggaggctaaggcatg

SEQ ID NO: 1078284 - DNA, 15 bp, Homo sapiens
aggaggctaaggcat

SEQ ID NO: 1078285 - DNA, 15 bp, Homo sapiens
tctgtagtctcagct

SEQ ID NO: 1078286 - DNA, 15 bp, Homo sapiens
gtctgtagtctcagc

SEQ ID NO: 1078287 - DNA, 15 bp, Homo sapiens
tgtctgtagtctcag

SEQ ID NO: 1078288 - DNA, 15 bp, Homo sapiens
atgtctgtagtctca

SEQ ID NO: 1078289 - DNA, 15 bp, Homo sapiens
catgtctgtagtctc

SEQ ID NO: 1078290 - DNA, 15 bp, Homo sapiens
acatgtctgtagtct

SEQ ID NO: 1078291 - DNA, 15 bp, Homo sapiens
cacatgtctgtagtc

SEQ ID NO: 1078292 - DNA, 15 bp, Homo sapiens
gcacatgtctgtagt

SEQ ID NO: 1078293 - DNA, 15 bp, Homo sapiens
ggcacatgtctgtag

SEQ ID NO: 1078294 - DNA, 15 bp, Homo sapiens
tggcacatgtctgta

SEQ ID NO: 1078295 - DNA, 15 bp, Homo sapiens
gtggcacatgtctgt

SEQ ID NO: 1078296 - DNA, 15 bp, Homo sapiens
ggtggcacatgtctg

SEQ ID NO: 1078297 - DNA, 15 bp, Homo sapiens
tggtggcacatgtct

SEQ ID NO: 1078298 - DNA, 15 bp, Homo sapiens
atggtggcacatgtc

SEQ ID NO: 1078299 - DNA, 15 bp, Homo sapiens
catggtggcacatgt

SEQ ID NO: 1078300 - DNA, 15 bp, Homo sapiens
acaaaaaataaaaaa

SEQ ID NO: 1078301 - DNA, 15 bp, Homo sapiens
tacaaaaaataaaaa

SEQ ID NO: 1078302 - DNA, 15 bp, Homo sapiens
ctacaaaaaataaaa

SEQ ID NO: 1078303 - DNA, 15 bp, Homo sapiens
tctacaaaaaataaa

SEQ ID NO: 1078304 - DNA, 15 bp, Homo sapiens
ctctacaaaaaataa

SEQ ID NO: 1078305 - DNA, 15 bp, Homo sapiens
ccctatctctacaaa

SEQ ID NO: 1078306 - DNA, 15 bp, Homo sapiens
accctatctctacaa

SEQ ID NO: 1078307 - DNA, 15 bp, Homo sapiens
gaccctatctctaca

SEQ ID NO: 1078308 - DNA, 15 bp, Homo sapiens
agaccctatctctac

SEQ ID NO: 1078309 - DNA, 15 bp, Homo sapiens
aagaccctatctcta

SEQ ID NO: 1078310 - DNA, 15 bp, Homo sapiens
caagaccctatctct

SEQ ID NO: 1078311 - DNA, 15 bp, Homo sapiens
gcaagaccctatctc

SEQ ID NO: 1078312 - DNA, 15 bp, Homo sapiens
agcaagaccctatct

SEQ ID NO: 1078313 - DNA, 15 bp, Homo sapiens
tagcaagaccctatc

SEQ ID NO: 1078314 - DNA, 15 bp, Homo sapiens
atagcaagaccctat

SEQ ID NO: 1078315 - DNA, 15 bp, Homo sapiens
catagcaagacccta

SEQ ID NO: 1078316 - DNA, 15 bp, Homo sapiens
acaacatagcaagac

SEQ ID NO: 1078317 - DNA, 15 bp, Homo sapiens
gacaacatagcaaga

SEQ ID NO: 1078318 - DNA, 15 bp, Homo sapiens
ggacaacatagcaag

SEQ ID NO: 1078319 - DNA, 15 bp, Homo sapiens
tggacaacatagcaa

SEQ ID NO: 1078320 - DNA, 15 bp, Homo sapiens
ctggacaacatagca

SEQ ID NO: 1078321 - DNA, 15 bp, Homo sapiens
cctggacaacatagc

SEQ ID NO: 1078322 - DNA, 15 bp, Homo sapiens
gcctggacaacatag

SEQ ID NO: 1078323 - DNA, 15 bp, Homo sapiens
agcctggacaacata

SEQ ID NO: 1078324 - DNA, 15 bp, Homo sapiens
cagcctggacaacat

SEQ ID NO: 1078325 - DNA, 15 bp, Homo sapiens
accagcctggacaac

SEQ ID NO: 1078326 - DNA, 15 bp, Homo sapiens
taccagcctggacaa

SEQ ID NO: 1078327 - DNA, 15 bp, Homo sapiens
ttaccagcctggaca

SEQ ID NO: 1078328 - DNA, 15 bp, Homo sapiens
tttaccagcctggac

SEQ ID NO: 1078329 - DNA, 15 bp, Homo sapiens
ctttaccagcctgga

SEQ ID NO: 1078330 - DNA, 15 bp, Homo sapiens
cctttaccagcctgg

SEQ ID NO: 1078331 - DNA, 15 bp, Homo sapiens
gcctttaccagcctg

SEQ ID NO: 1078332 - DNA, 15 bp, Homo sapiens
ggcctttaccagcct

SEQ ID NO: 1078333 - DNA, 15 bp, Homo sapiens
tggcctttaccagcc

SEQ ID NO: 1078334 - DNA, 15 bp, Homo sapiens
ttggcctttaccagc

SEQ ID NO: 1078335 - DNA, 15 bp, Homo sapiens
cttggcctttaccag

SEQ ID NO: 1078336 - DNA, 15 bp, Homo sapiens
acttggcctttacca

SEQ ID NO: 1078337 - DNA, 15 bp, Homo sapiens
aacttggcctttacc

SEQ ID NO: 1078338 - DNA, 15 bp, Homo sapiens
aaacttggcctttac

SEQ ID NO: 1078339 - DNA, 15 bp, Homo sapiens
gaaacttggccttta

SEQ ID NO: 1078340 - DNA, 15 bp, Homo sapiens
tgaaacttggccttt

SEQ ID NO: 1078341 - DNA, 15 bp, Homo sapiens
atgaaacttggcctt

SEQ ID NO: 1078342 - DNA, 15 bp, Homo sapiens
aatgaaacttggcct

SEQ ID NO: 1078343 - DNA, 15 bp, Homo sapiens
gaatgaaacttggcc

SEQ ID NO: 1078344 - DNA, 15 bp, Homo sapiens
tgaatgaaacttggc

SEQ ID NO: 1078345 - DNA, 15 bp, Homo sapiens
atgaatgaaacttgg

SEQ ID NO: 1078346 - DNA, 15 bp, Homo sapiens
gatgaatgaaacttg

SEQ ID NO: 1078347 - DNA, 15 bp, Homo sapiens
agatgaatgaaactt

SEQ ID NO: 1078348 - DNA, 15 bp, Homo sapiens
aagatgaatgaaact

SEQ ID NO: 1078349 - DNA, 15 bp, Homo sapiens
aaagatgaatgaaac

SEQ ID NO: 1078350 - DNA, 15 bp, Homo sapiens
caaagatgaatgaaa

SEQ ID NO: 1078351 - DNA, 15 bp, Homo sapiens
acaaagatgaatgaa

SEQ ID NO: 1078352 - DNA, 15 bp, Homo sapiens
tacaaagatgaatga

SEQ ID NO: 1078353 - DNA, 15 bp, Homo sapiens
gtacaaagatgaatg

SEQ ID NO: 1078354 - DNA, 15 bp, Homo sapiens
agtacaaagatgaat

SEQ ID NO: 1078355 - DNA, 15 bp, Homo sapiens
gagtacaaagatgaa

SEQ ID NO: 1078356 - DNA, 15 bp, Homo sapiens
tgagtacaaagatga

SEQ ID NO: 1078357 - DNA, 15 bp, Homo sapiens
ttgagtacaaagatg

SEQ ID NO: 1078358 - DNA, 15 bp, Homo sapiens
attgagtacaaagat

SEQ ID NO: 1078359 - DNA, 15 bp, Homo sapiens
aattgagtacaaaga

SEQ ID NO: 1078360 - DNA, 15 bp, Homo sapiens
gaattgagtacaaag

SEQ ID NO: 1078361 - DNA, 15 bp, Homo sapiens
tgaattgagtacaaa

SEQ ID NO: 1078362 - DNA, 15 bp, Homo sapiens
ttgaattgagtacaa

SEQ ID NO: 1078363 - DNA, 15 bp, Homo sapiens
gttgaattgagtaca

SEQ ID NO: 1078364 - DNA, 15 bp, Homo sapiens
ggttgaattgagtac

SEQ ID NO: 1078365 - DNA, 15 bp, Homo sapiens
tggttgaattgagta

SEQ ID NO: 1078366 - DNA, 15 bp, Homo sapiens
ctggttgaattgagt

SEQ ID NO: 1078367 - DNA, 15 bp, Homo sapiens
gctggttgaattgag

SEQ ID NO: 1078368 - DNA, 15 bp, Homo sapiens
tgctggttgaattga

SEQ ID NO: 1078369 - DNA, 15 bp, Homo sapiens
atgctggttgaattg

SEQ ID NO: 1078370 - DNA, 15 bp, Homo sapiens
aatgctggttgaatt

SEQ ID NO: 1078371 - DNA, 15 bp, Homo sapiens
aaatgctggttgaat

SEQ ID NO: 1078372 - DNA, 15 bp, Homo sapiens
taaatgctggttgaa

SEQ ID NO: 1078373 - DNA, 15 bp, Homo sapiens
gtaaatgctggttga

SEQ ID NO: 1078374 - DNA, 15 bp, Homo sapiens
agtaaatgctggttg

SEQ ID NO: 1078375 - DNA, 15 bp, Homo sapiens
cagtaaatgctggtt

SEQ ID NO: 1078376 - DNA, 15 bp, Homo sapiens
tcagtaaatgctggt

SEQ ID NO: 1078377 - DNA, 15 bp, Homo sapiens
ttcagtaaatgctgg

SEQ ID NO: 1078378 - DNA, 15 bp, Homo sapiens
gttcagtaaatgctg

SEQ ID NO: 1078379 - DNA, 15 bp, Homo sapiens
tgttcagtaaatgct

SEQ ID NO: 1078380 - DNA, 15 bp, Homo sapiens
ttgttcagtaaatgc

SEQ ID NO: 1078381 - DNA, 15 bp, Homo sapiens
attgttcagtaaatg

SEQ ID NO: 1078382 - DNA, 15 bp, Homo sapiens
gattgttcagtaaat

SEQ ID NO: 1078383 - DNA, 15 bp, Homo sapiens
tgattgttcagtaaa

SEQ ID NO: 1078384 - DNA, 15 bp, Homo sapiens
gtgattgttcagtaa

SEQ ID NO: 1078385 - DNA, 15 bp, Homo sapiens
agtgattgttcagta

SEQ ID NO: 1078386 - DNA, 15 bp, Homo sapiens
gagtgattgttcagt

SEQ ID NO: 1078387 - DNA, 15 bp, Homo sapiens
ggagtgattgttcag

SEQ ID NO: 1078388 - DNA, 15 bp, Homo sapiens
tggagtgattgttca

SEQ ID NO: 1078389 - DNA, 15 bp, Homo sapiens
ctggagtgattgttc

SEQ ID NO: 1078390 - DNA, 15 bp, Homo sapiens
gctggagtgattgtt

SEQ ID NO: 1078391 - DNA, 15 bp, Homo sapiens
ggctggagtgattgt

SEQ ID NO: 1078392 - DNA, 15 bp, Homo sapiens
gggctggagtgattg

SEQ ID NO: 1078393 - DNA, 15 bp, Homo sapiens
tgggctggagtgatt

SEQ ID NO: 1078394 - DNA, 15 bp, Homo sapiens
ttgggctggagtgat

SEQ ID NO: 1078395 - DNA, 15 bp, Homo sapiens
tttgggctggagtga

SEQ ID NO: 1078396 - DNA, 15 bp, Homo sapiens
gtttgggctggagtg

SEQ ID NO: 1078397 - DNA, 15 bp, Homo sapiens
tgtttgggctggagt

SEQ ID NO: 1078398 - DNA, 15 bp, Homo sapiens
ctgtttgggctggag

SEQ ID NO: 1078399 - DNA, 15 bp, Homo sapiens
actgtttgggctgga

SEQ ID NO: 1078400 - DNA, 15 bp, Homo sapiens
tactgtttgggctgg

SEQ ID NO: 1078401 - DNA, 15 bp, Homo sapiens
ctactgtttgggctg

SEQ ID NO: 1078402 - DNA, 15 bp, Homo sapiens
actactgtttgggct

SEQ ID NO: 1078403 - DNA, 15 bp, Homo sapiens
cactactgtttgggc

SEQ ID NO: 1078404 - DNA, 15 bp, Homo sapiens
gcactactgtttggg

SEQ ID NO: 1078405 - DNA, 15 bp, Homo sapiens
agcactactgtttgg

SEQ ID NO: 1078406 - DNA, 15 bp, Homo sapiens
tagcactactgtttg

SEQ ID NO: 1078407 - DNA, 15 bp, Homo sapiens
gtagcactactgttt

SEQ ID NO: 1078408 - DNA, 15 bp, Homo sapiens
tgtagcactactgtt

SEQ ID NO: 1078409 - DNA, 15 bp, Homo sapiens
ttgtagcactactgt

SEQ ID NO: 1078410 - DNA, 15 bp, Homo sapiens
attgtagcactactg

SEQ ID NO: 1078411 - DNA, 15 bp, Homo sapiens
gattgtagcactact

SEQ ID NO: 1078412 - DNA, 15 bp, Homo sapiens
tgattgtagcactac

SEQ ID NO: 1078413 - DNA, 15 bp, Homo sapiens
atgattgtagcacta

SEQ ID NO: 1078414 - DNA, 15 bp, Homo sapiens
catgattgtagcact

SEQ ID NO: 1078415 - DNA, 15 bp, Homo sapiens
tcatgattgtagcac

SEQ ID NO: 1078416 - DNA, 15 bp, Homo sapiens
gtcatgattgtagca

SEQ ID NO: 1078417 - DNA, 15 bp, Homo sapiens
agtcatgattgtagc

SEQ ID NO: 1078418 - DNA, 15 bp, Homo sapiens
tagtcatgattgtag

SEQ ID NO: 1078419 - DNA, 15 bp, Homo sapiens
ttagtcatgattgta

SEQ ID NO: 1078420 - DNA, 15 bp, Homo sapiens
cttagtcatgattgt

SEQ ID NO: 1078421 - DNA, 15 bp, Homo sapiens
tcttagtcatgattg

SEQ ID NO: 1078422 - DNA, 15 bp, Homo sapiens
ttcttagtcatgatt

SEQ ID NO: 1078423 - DNA, 15 bp, Homo sapiens
cttcttagtcatgat

SEQ ID NO: 1078424 - DNA, 15 bp, Homo sapiens
tcttcttagtcatga

SEQ ID NO: 1078425 - DNA, 15 bp, Homo sapiens
gtcttcttagtcatg

SEQ ID NO: 1078426 - DNA, 15 bp, Homo sapiens
ggtcttcttagtcat

SEQ ID NO: 1078427 - DNA, 15 bp, Homo sapiens
gggtcttcttagtca

SEQ ID NO: 1078428 - DNA, 15 bp, Homo sapiens
ggggtcttcttagtc

SEQ ID NO: 1078429 - DNA, 15 bp, Homo sapiens
aggggtcttcttagt

SEQ ID NO: 1078430 - DNA, 15 bp, Homo sapiens
gaggggtcttcttag

SEQ ID NO: 1078431 - DNA, 15 bp, Homo sapiens
agaggggtcttctta

SEQ ID NO: 1078432 - DNA, 15 bp, Homo sapiens
cagaggggtcttctt

SEQ ID NO: 1078433 - DNA, 15 bp, Homo sapiens
gcagaggggtcttct

SEQ ID NO: 1078434 - DNA, 15 bp, Homo sapiens
agcagaggggtcttc

SEQ ID NO: 1078435 - DNA, 15 bp, Homo sapiens
aagcagaggggtctt

SEQ ID NO: 1078436 - DNA, 15 bp, Homo sapiens
caagcagaggggtct

SEQ ID NO: 1078437 - DNA, 15 bp, Homo sapiens
gcaagcagaggggtc

SEQ ID NO: 1078438 - DNA, 15 bp, Homo sapiens
tgcaagcagaggggt

SEQ ID NO: 1078439 - DNA, 15 bp, Homo sapiens
ttgcaagcagagggg

SEQ ID NO: 1078440 - DNA, 15 bp, Homo sapiens
tttgcaagcagaggg

SEQ ID NO: 1078441 - DNA, 15 bp, Homo sapiens
ctttgcaagcagagg

SEQ ID NO: 1078442 - DNA, 15 bp, Homo sapiens
tctttgcaagcagag

SEQ ID NO: 1078443 - DNA, 15 bp, Homo sapiens
ttctttgcaagcaga

SEQ ID NO: 1078444 - DNA, 15 bp, Homo sapiens
gttctttgcaagcag

SEQ ID NO: 1078445 - DNA, 15 bp, Homo sapiens
agttctttgcaagca

SEQ ID NO: 1078446 - DNA, 15 bp, Homo sapiens
tagttctttgcaagc

SEQ ID NO: 1078447 - DNA, 15 bp, Homo sapiens
atagttctttgcaag

SEQ ID NO: 1078448 - DNA, 15 bp, Homo sapiens
gatagttctttgcaa

SEQ ID NO: 1078449 - DNA, 15 bp, Homo sapiens
agatagttctttgca

SEQ ID NO: 1078450 - DNA, 15 bp, Homo sapiens
cagatagttctttgc

SEQ ID NO: 1078451 - DNA, 15 bp, Homo sapiens
ccagatagttctttg

SEQ ID NO: 1078452 - DNA, 15 bp, Homo sapiens
cccagatagttcttt

SEQ ID NO: 1078453 - DNA, 15 bp, Homo sapiens
gcccagatagttctt

SEQ ID NO: 1078454 - DNA, 15 bp, Homo sapiens
cgcccagatagttct

SEQ ID NO: 1078455 - DNA, 15 bp, Homo sapiens
tcgcccagatagttc

SEQ ID NO: 1078456 - DNA, 15 bp, Homo sapiens
ttcgcccagatagtt

SEQ ID NO: 1078457 - DNA, 15 bp, Homo sapiens
cttcgcccagatagt

SEQ ID NO: 1078458 - DNA, 15 bp, Homo sapiens
gcttcgcccagatag

SEQ ID NO: 1078459 - DNA, 15 bp, Homo sapiens
ggcttcgcccagata

SEQ ID NO: 1078460 - DNA, 15 bp, Homo sapiens
tggcttcgcccagat

SEQ ID NO: 1078461 - DNA, 15 bp, Homo sapiens
ctggcttcgcccaga

SEQ ID NO: 1078462 - DNA, 15 bp, Homo sapiens
cctggcttcgcccag

SEQ ID NO: 1078463 - DNA, 15 bp, Homo sapiens
gcctggcttcgccca

SEQ ID NO: 1078464 - DNA, 15 bp, Homo sapiens
ggcctggcttcgccc

SEQ ID NO: 1078465 - DNA, 15 bp, Homo sapiens
gggcctggcttcgcc

SEQ ID NO: 1078466 - DNA, 15 bp, Homo sapiens
tgggcctggcttcgc

SEQ ID NO: 1078467 - DNA, 15 bp, Homo sapiens
ttgggcctggcttcg

SEQ ID NO: 1078468 - DNA, 15 bp, Homo sapiens
tttgggcctggcttc

SEQ ID NO: 1078469 - DNA, 15 bp, Homo sapiens
gtttgggcctggctt

SEQ ID NO: 1078470 - DNA, 15 bp, Homo sapiens
agtttgggcctggct

SEQ ID NO: 1078471 - DNA, 15 bp, Homo sapiens
aagtttgggcctggc

SEQ ID NO: 1078472 - DNA, 15 bp, Homo sapiens
aaagtttgggcctgg

SEQ ID NO: 1078473 - DNA, 15 bp, Homo sapiens
aaaagtttgggcctg

SEQ ID NO: 1078474 - DNA, 15 bp, Homo sapiens
gaaaagtttgggcct

SEQ ID NO: 1078475 - DNA, 15 bp, Homo sapiens
agaaaagtttgggcc

SEQ ID NO: 1078476 - DNA, 15 bp, Homo sapiens
aagaaaagtttgggc

SEQ ID NO: 1078477 - DNA, 15 bp, Homo sapiens
aaagaaaagtttggg

SEQ ID NO: 1078478 - DNA, 15 bp, Homo sapiens
aaaagaaaagtttgg

SEQ ID NO: 1078479 - DNA, 15 bp, Homo sapiens
aaaaagaaaagtttg

SEQ ID NO: 1078480 - DNA, 15 bp, Homo sapiens
aaaaaagaaaagttt

SEQ ID NO: 1078481 - DNA, 15 bp, Homo sapiens
gaaaaaagaaaagtt

SEQ ID NO: 1078482 - DNA, 15 bp, Homo sapiens
agaaaaaagaaaagt

SEQ ID NO: 1078483 - DNA, 15 bp, Homo sapiens
aagaaaaaagaaaag

SEQ ID NO: 1078484 - DNA, 15 bp, Homo sapiens
cgaaaagaaaaaaga

SEQ ID NO: 1078485 - DNA, 15 bp, Homo sapiens
acgaaaagaaaaaag

SEQ ID NO: 1078486 - DNA, 15 bp, Homo sapiens
aacgaaaagaaaaaa

SEQ ID NO: 1078487 - DNA, 15 bp, Homo sapiens
aaacgaaaagaaaaa

SEQ ID NO: 1078488 - DNA, 15 bp, Homo sapiens
taaacgaaaagaaaa

SEQ ID NO: 1078489 - DNA, 15 bp, Homo sapiens
gtaaacgaaaagaaa

SEQ ID NO: 1078490 - DNA, 15 bp, Homo sapiens
agtaaacgaaaagaa

SEQ ID NO: 1078491 - DNA, 15 bp, Homo sapiens
gagtaaacgaaaaga

SEQ ID NO: 1078492 - DNA, 15 bp, Homo sapiens
agagtaaacgaaaag

SEQ ID NO: 1078493 - DNA, 15 bp, Homo sapiens
aagagtaaacgaaaa

SEQ ID NO: 1078494 - DNA, 15 bp, Homo sapiens
gaagagtaaacgaaa

SEQ ID NO: 1078495 - DNA, 15 bp, Homo sapiens
agaagagtaaacgaa

SEQ ID NO: 1078496 - DNA, 15 bp, Homo sapiens
aagaagagtaaacga

SEQ ID NO: 1078497 - DNA, 15 bp, Homo sapiens
aaagaagagtaaacg

SEQ ID NO: 1078498 - DNA, 15 bp, Homo sapiens
aaaagaagagtaaac

SEQ ID NO: 1078499 - DNA, 15 bp, Homo sapiens
aaaaagaagagtaaa

SEQ ID NO: 1078500 - DNA, 15 bp, Homo sapiens
aaaaaagaagagtaa

SEQ ID NO: 1078501 - DNA, 15 bp, Homo sapiens
gaaaaaagaagagta

SEQ ID NO: 1078502 - DNA, 15 bp, Homo sapiens
agaaaaaagaagagt

SEQ ID NO: 1078503 - DNA, 15 bp, Homo sapiens
aagaaaaaagaagag

SEQ ID NO: 1078504 - DNA, 15 bp, Homo sapiens
aaagaaaaaagaaga

SEQ ID NO: 1078505 - DNA, 15 bp, Homo sapiens
aaaagaaaaaagaag

SEQ ID NO: 1078506 - DNA, 15 bp, Homo sapiens
gaaaaagaaaaaaga

SEQ ID NO: 1078507 - DNA, 15 bp, Homo sapiens
tgaaaaagaaaaaag

SEQ ID NO: 1078508 - DNA, 15 bp, Homo sapiens
atgaaaaagaaaaaa

SEQ ID NO: 1078509 - DNA, 15 bp, Homo sapiens
aatgaaaaagaaaaa

SEQ ID NO: 1078510 - DNA, 15 bp, Homo sapiens
aaatgaaaaagaaaa

SEQ ID NO: 1078511 - DNA, 15 bp, Homo sapiens
aaaatgaaaaagaaa

SEQ ID NO: 1078512 - DNA, 15 bp, Homo sapiens
gaaaatgaaaaagaa

SEQ ID NO: 1078513 - DNA, 15 bp, Homo sapiens
agaaaatgaaaaaga

SEQ ID NO: 1078514 - DNA, 15 bp, Homo sapiens
aagaaaatgaaaaag

SEQ ID NO: 1078515 - DNA, 15 bp, Homo sapiens
caagaaaatgaaaaa

SEQ ID NO: 1078516 - DNA, 15 bp, Homo sapiens
ccaagaaaatgaaaa

SEQ ID NO: 1078517 - DNA, 15 bp, Homo sapiens
cccaagaaaatgaaa

SEQ ID NO: 1078518 - DNA, 15 bp, Homo sapiens
gcccaagaaaatgaa

SEQ ID NO: 1078519 - DNA, 15 bp, Homo sapiens
agcccaagaaaatga

SEQ ID NO: 1078520 - DNA, 15 bp, Homo sapiens
cagcccaagaaaatg

SEQ ID NO: 1078521 - DNA, 15 bp, Homo sapiens
tcagcccaagaaaat

SEQ ID NO: 1078522 - DNA, 15 bp, Homo sapiens
ttcagcccaagaaaa

SEQ ID NO: 1078523 - DNA, 15 bp, Homo sapiens
gttcagcccaagaaa

SEQ ID NO: 1078524 - DNA, 15 bp, Homo sapiens
agttcagcccaagaa

SEQ ID NO: 1078525 - DNA, 15 bp, Homo sapiens
aagttcagcccaaga

SEQ ID NO: 1078526 - DNA, 15 bp, Homo sapiens
taagttcagcccaag

SEQ ID NO: 1078527 - DNA, 15 bp, Homo sapiens
ttaagttcagcccaa

SEQ ID NO: 1078528 - DNA, 15 bp, Homo sapiens
tttaagttcagccca

SEQ ID NO: 1078529 - DNA, 15 bp, Homo sapiens
gtttaagttcagccc

SEQ ID NO: 1078530 - DNA, 15 bp, Homo sapiens
agtttaagttcagcc

SEQ ID NO: 1078531 - DNA, 15 bp, Homo sapiens
tagtttaagttcagc

SEQ ID NO: 1078532 - DNA, 15 bp, Homo sapiens
atagtttaagttcag

SEQ ID NO: 1078533 - DNA, 15 bp, Homo sapiens
tatagtttaagttca

SEQ ID NO: 1078534 - DNA, 15 bp, Homo sapiens
ttatagtttaagttc

SEQ ID NO: 1078535 - DNA, 15 bp, Homo sapiens
attatagtttaagtt

SEQ ID NO: 1078536 - DNA, 15 bp, Homo sapiens
gattatagtttaagt

SEQ ID NO: 1078537 - DNA, 15 bp, Homo sapiens
ggattatagtttaag

SEQ ID NO: 1078538 - DNA, 15 bp, Homo sapiens
tggattatagtttaa

SEQ ID NO: 1078539 - DNA, 15 bp, Homo sapiens
ctggattatagttta

SEQ ID NO: 1078540 - DNA, 15 bp, Homo sapiens
actggattatagttt

SEQ ID NO: 1078541 - DNA, 15 bp, Homo sapiens
cactggattatagtt

SEQ ID NO: 1078542 - DNA, 15 bp, Homo sapiens
acactggattatagt

SEQ ID NO: 1078543 - DNA, 15 bp, Homo sapiens
cacactggattatag

SEQ ID NO: 1078544 - DNA, 15 bp, Homo sapiens
tcacactggattata

SEQ ID NO: 1078545 - DNA, 15 bp, Homo sapiens
atcacactggattat

SEQ ID NO: 1078546 - DNA, 15 bp, Homo sapiens
catcacactggatta

SEQ ID NO: 1078547 - DNA, 15 bp, Homo sapiens
tcatcacactggatt

SEQ ID NO: 1078548 - DNA, 15 bp, Homo sapiens
ctcatcacactggat

SEQ ID NO: 1078549 - DNA, 15 bp, Homo sapiens
actcatcacactgga

SEQ ID NO: 1078550 - DNA, 15 bp, Homo sapiens
cactcatcacactgg

SEQ ID NO: 1078551 - DNA, 15 bp, Homo sapiens
gcactcatcacactg

SEQ ID NO: 1078552 - DNA, 15 bp, Homo sapiens
agcactcatcacact

SEQ ID NO: 1078553 - DNA, 15 bp, Homo sapiens
tagcactcatcacac

SEQ ID NO: 1078554 - DNA, 15 bp, Homo sapiens
atagcactcatcaca

SEQ ID NO: 1078555 - DNA, 15 bp, Homo sapiens
catagcactcatcac

SEQ ID NO: 1078556 - DNA, 15 bp, Homo sapiens
tcatagcactcatca

SEQ ID NO: 1078557 - DNA, 15 bp, Homo sapiens
atcatagcactcatc

SEQ ID NO: 1078558 - DNA, 15 bp, Homo sapiens
tatcatagcactcat

SEQ ID NO: 1078559 - DNA, 15 bp, Homo sapiens
ctatcatagcactca

SEQ ID NO: 1078560 - DNA, 15 bp, Homo sapiens
actatcatagcactc

SEQ ID NO: 1078561 - DNA, 15 bp, Homo sapiens
tactatcatagcact

SEQ ID NO: 1078562 - DNA, 15 bp, Homo sapiens
gtactatcatagcac

SEQ ID NO: 1078563 - DNA, 15 bp, Homo sapiens
ggtactatcatagca

SEQ ID NO: 1078564 - DNA, 15 bp, Homo sapiens
tggtactatcatagc

SEQ ID NO: 1078565 - DNA, 15 bp, Homo sapiens
atggtactatcatag

SEQ ID NO: 1078566 - DNA, 15 bp, Homo sapiens
catggtactatcata

SEQ ID NO: 1078567 - DNA, 15 bp, Homo sapiens
acatggtactatcat

SEQ ID NO: 1078568 - DNA, 15 bp, Homo sapiens
tacatggtactatca

SEQ ID NO: 1078569 - DNA, 15 bp, Homo sapiens
ctacatggtactatc

SEQ ID NO: 1078570 - DNA, 15 bp, Homo sapiens
cctacatggtactat

SEQ ID NO: 1078571 - DNA, 15 bp, Homo sapiens
tcctacatggtacta

SEQ ID NO: 1078572 - DNA, 15 bp, Homo sapiens
ctcctacatggtact

SEQ ID NO: 1078573 - DNA, 15 bp, Homo sapiens
tctcctacatggtac

SEQ ID NO: 1078574 - DNA, 15 bp, Homo sapiens
ctctcctacatggta

SEQ ID NO: 1078575 - DNA, 15 bp, Homo sapiens
gctctcctacatggt

SEQ ID NO: 1078576 - DNA, 15 bp, Homo sapiens
tgctctcctacatgg

SEQ ID NO: 1078577 - DNA, 15 bp, Homo sapiens
ctgctctcctacatg

SEQ ID NO: 1078578 - DNA, 15 bp, Homo sapiens
tctgctctcctacat

SEQ ID NO: 1078579 - DNA, 15 bp, Homo sapiens
ctctgctctcctaca

SEQ ID NO: 1078580 - DNA, 15 bp, Homo sapiens
cctctgctctcctac

SEQ ID NO: 1078581 - DNA, 15 bp, Homo sapiens
tcctctgctctccta

SEQ ID NO: 1078582 - DNA, 15 bp, Homo sapiens
ctcctctgctctcct

SEQ ID NO: 1078583 - DNA, 15 bp, Homo sapiens
cctctcctctgctct

SEQ ID NO: 1078584 - DNA, 15 bp, Homo sapiens
ccctctcctctgctc

SEQ ID NO: 1078585 - DNA, 15 bp, Homo sapiens
tccctctcctctgct

SEQ ID NO: 1078586 - DNA, 15 bp, Homo sapiens
attccctctcctctg

SEQ ID NO: 1078587 - DNA, 15 bp, Homo sapiens
tattccctctcctct

SEQ ID NO: 1078588 - DNA, 15 bp, Homo sapiens
ttattccctctcctc

SEQ ID NO: 1078589 - DNA, 15 bp, Homo sapiens
gttattccctctcct

SEQ ID NO: 1078590 - DNA, 15 bp, Homo sapiens
agttattccctctcc

SEQ ID NO: 1078591 - DNA, 15 bp, Homo sapiens
cagttattccctctc

SEQ ID NO: 1078592 - DNA, 15 bp, Homo sapiens
acagttattccctct

SEQ ID NO: 1078593 - DNA, 15 bp, Homo sapiens
cacagttattccctc

SEQ ID NO: 1078594 - DNA, 15 bp, Homo sapiens
ccacagttattccct

SEQ ID NO: 1078595 - DNA, 15 bp, Homo sapiens
cccacagttattccc

SEQ ID NO: 1078596 - DNA, 15 bp, Homo sapiens
acccacagttattcc

SEQ ID NO: 1078597 - DNA, 15 bp, Homo sapiens
aacccacagttattc

SEQ ID NO: 1078598 - DNA, 15 bp, Homo sapiens
taacccacagttatt

SEQ ID NO: 1078599 - DNA, 15 bp, Homo sapiens
ctaacccacagttat

SEQ ID NO: 1078600 - DNA, 15 bp, Homo sapiens
tctaacccacagtta

SEQ ID NO: 1078601 - DNA, 15 bp, Homo sapiens
ttctaacccacagtt

SEQ ID NO: 1078602 - DNA, 15 bp, Homo sapiens
tttctaacccacagt

SEQ ID NO: 1078603 - DNA, 15 bp, Homo sapiens
atttctaacccacag

SEQ ID NO: 1078604 - DNA, 15 bp, Homo sapiens
gatttctaacccaca

SEQ ID NO: 1078605 - DNA, 15 bp, Homo sapiens
tgatttctaacccac

SEQ ID NO: 1078606 - DNA, 15 bp, Homo sapiens
ctgatttctaaccca

SEQ ID NO: 1078607 - DNA, 15 bp, Homo sapiens
cctgatttctaaccc

SEQ ID NO: 1078608 - DNA, 15 bp, Homo sapiens
tcctgatttctaacc

SEQ ID NO: 1078609 - DNA, 15 bp, Homo sapiens
ttcctgatttctaac

SEQ ID NO: 1078610 - DNA, 15 bp, Homo sapiens
tttcctgatttctaa

SEQ ID NO: 1078611 - DNA, 15 bp, Homo sapiens
ttttcctgatttcta

SEQ ID NO: 1078612 - DNA, 15 bp, Homo sapiens
tttttcctgatttct

SEQ ID NO: 1078613 - DNA, 15 bp, Homo sapiens
gtttttcctgatttc

SEQ ID NO: 1078614 - DNA, 15 bp, Homo sapiens
tgtttttcctgattt

SEQ ID NO: 1078615 - DNA, 15 bp, Homo sapiens
gtgtttttcctgatt

SEQ ID NO: 1078616 - DNA, 15 bp, Homo sapiens
tgtgtttttcctgat

SEQ ID NO: 1078617 - DNA, 15 bp, Homo sapiens
ctgtgtttttcctga

SEQ ID NO: 1078618 - DNA, 15 bp, Homo sapiens
tctgtgtttttcctg

SEQ ID NO: 1078619 - DNA, 15 bp, Homo sapiens
ctctgtgtttttcct

SEQ ID NO: 1078620 - DNA, 15 bp, Homo sapiens
tctctgtgtttttcc

SEQ ID NO: 1078621 - DNA, 15 bp, Homo sapiens
ctctctgtgtttttc

SEQ ID NO: 1078622 - DNA, 15 bp, Homo sapiens
cctctctgtgttttt

SEQ ID NO: 1078623 - DNA, 15 bp, Homo sapiens
tcctctctgtgtttt

SEQ ID NO: 1078624 - DNA, 15 bp, Homo sapiens
ctcctctctgtgttt

SEQ ID NO: 1078625 - DNA, 15 bp, Homo sapiens
tctcctctctgtgtt

SEQ ID NO: 1078626 - DNA, 15 bp, Homo sapiens
atctcctctctgtgt

SEQ ID NO: 1078627 - DNA, 15 bp, Homo sapiens
tatctcctctctgtg

SEQ ID NO: 1078628 - DNA, 15 bp, Homo sapiens
ttatctcctctctgt

SEQ ID NO: 1078629 - DNA, 15 bp, Homo sapiens
gttatctcctctctg

SEQ ID NO: 1078630 - DNA, 15 bp, Homo sapiens
tgttatctcctctct

SEQ ID NO: 1078631 - DNA, 15 bp, Homo sapiens
atgttatctcctctc

SEQ ID NO: 1078632 - DNA, 15 bp, Homo sapiens
catgttatctcctct

SEQ ID NO: 1078633 - DNA, 15 bp, Homo sapiens
ccatgttatctcctc

SEQ ID NO: 1078634 - DNA, 15 bp, Homo sapiens
cccatgttatctcct

SEQ ID NO: 1078635 - DNA, 15 bp, Homo sapiens
tcccatgttatctcc

SEQ ID NO: 1078636 - DNA, 15 bp, Homo sapiens
ttcccatgttatctc

SEQ ID NO: 1078637 - DNA, 15 bp, Homo sapiens
attcccatgttatct

SEQ ID NO: 1078638 - DNA, 15 bp, Homo sapiens
aattcccatgttatc

SEQ ID NO: 1078639 - DNA, 15 bp, Homo sapiens
caattcccatgttat

SEQ ID NO: 1078640 - DNA, 15 bp, Homo sapiens
tcaattcccatgtta

SEQ ID NO: 1078641 - DNA, 15 bp, Homo sapiens
ctcaattcccatgtt

SEQ ID NO: 1078642 - DNA, 15 bp, Homo sapiens
gctcaattcccatgt

SEQ ID NO: 1078643 - DNA, 15 bp, Homo sapiens
agctcaattcccatg

SEQ ID NO: 1078644 - DNA, 15 bp, Homo sapiens
aagctcaattcccat

SEQ ID NO: 1078645 - DNA, 15 bp, Homo sapiens
aaagctcaattccca

SEQ ID NO: 1078646 - DNA, 15 bp, Homo sapiens
caaagctcaattccc

SEQ ID NO: 1078647 - DNA, 15 bp, Homo sapiens
tcaaagctcaattcc

SEQ ID NO: 1078648 - DNA, 15 bp, Homo sapiens
ttcaaagctcaattc

SEQ ID NO: 1078649 - DNA, 15 bp, Homo sapiens
cttcaaagctcaatt

SEQ ID NO: 1078650 - DNA, 15 bp, Homo sapiens
ccttcaaagctcaat

SEQ ID NO: 1078651 - DNA, 15 bp, Homo sapiens
tccttcaaagctcaa

SEQ ID NO: 1078652 - DNA, 15 bp, Homo sapiens
atccttcaaagctca

SEQ ID NO: 1078653 - DNA, 15 bp, Homo sapiens
tatccttcaaagctc

SEQ ID NO: 1078654 - DNA, 15 bp, Homo sapiens
ttatccttcaaagct

SEQ ID NO: 1078655 - DNA, 15 bp, Homo sapiens
tttatccttcaaagc

SEQ ID NO: 1078656 - DNA, 15 bp, Homo sapiens
atttatccttcaaag

SEQ ID NO: 1078657 - DNA, 15 bp, Homo sapiens
tatttatccttcaaa

SEQ ID NO: 1078658 - DNA, 15 bp, Homo sapiens
ctatttatccttcaa

SEQ ID NO: 1078659 - DNA, 15 bp, Homo sapiens
cctatttatccttca

SEQ ID NO: 1078660 - DNA, 15 bp, Homo sapiens
tcctatttatccttc

SEQ ID NO: 1078661 - DNA, 15 bp, Homo sapiens
ctcctatttatcctt

SEQ ID NO: 1078662 - DNA, 15 bp, Homo sapiens
actcctatttatcct

SEQ ID NO: 1078663 - DNA, 15 bp, Homo sapiens
aactcctatttatcc

SEQ ID NO: 1078664 - DNA, 15 bp, Homo sapiens
gaactcctatttatc

SEQ ID NO: 1078665 - DNA, 15 bp, Homo sapiens
tgaactcctatttat

SEQ ID NO: 1078666 - DNA, 15 bp, Homo sapiens
gtgaactcctattta

SEQ ID NO: 1078667 - DNA, 15 bp, Homo sapiens
ggtgaactcctattt

SEQ ID NO: 1078668 - DNA, 15 bp, Homo sapiens
tggtgaactcctatt

SEQ ID NO: 1078669 - DNA, 15 bp, Homo sapiens
ttggtgaactcctat

SEQ ID NO: 1078670 - DNA, 15 bp, Homo sapiens
cttggtgaactccta

SEQ ID NO: 1078671 - DNA, 15 bp, Homo sapiens
gcttggtgaactcct

SEQ ID NO: 1078672 - DNA, 15 bp, Homo sapiens
tgcttggtgaactcc

SEQ ID NO: 1078673 - DNA, 15 bp, Homo sapiens
ctgcttggtgaactc

SEQ ID NO: 1078674 - DNA, 15 bp, Homo sapiens
gctgcttggtgaact

SEQ ID NO: 1078675 - DNA, 15 bp, Homo sapiens
ggctgcttggtgaac

SEQ ID NO: 1078676 - DNA, 15 bp, Homo sapiens
tggctgcttggtgaa

SEQ ID NO: 1078677 - DNA, 15 bp, Homo sapiens
ttggctgcttggtga

SEQ ID NO: 1078678 - DNA, 15 bp, Homo sapiens
tttggctgcttggtg

SEQ ID NO: 1078679 - DNA, 15 bp, Homo sapiens
ttttggctgcttggt

SEQ ID NO: 1078680 - DNA, 15 bp, Homo sapiens
cttttggctgcttgg

SEQ ID NO: 1078681 - DNA, 15 bp, Homo sapiens
tcttttggctgcttg

SEQ ID NO: 1078682 - DNA, 15 bp, Homo sapiens
ctcttttggctgctt

SEQ ID NO: 1078683 - DNA, 15 bp, Homo sapiens
cctcttttggctgct

SEQ ID NO: 1078684 - DNA, 15 bp, Homo sapiens
tcctcttttggctgc

SEQ ID NO: 1078685 - DNA, 15 bp, Homo sapiens
ttcctcttttggctg

SEQ ID NO: 1078686 - DNA, 15 bp, Homo sapiens
attcctcttttggct

SEQ ID NO: 1078687 - DNA, 15 bp, Homo sapiens
tattcctcttttggc

SEQ ID NO: 1078688 - DNA, 15 bp, Homo sapiens
ctattcctcttttgg

SEQ ID NO: 1078689 - DNA, 15 bp, Homo sapiens
actattcctcttttg

SEQ ID NO: 1078690 - DNA, 15 bp, Homo sapiens
cactattcctctttt

SEQ ID NO: 1078691 - DNA, 15 bp, Homo sapiens
acactattcctcttt

SEQ ID NO: 1078692 - DNA, 15 bp, Homo sapiens
aacactattcctctt

SEQ ID NO: 1078693 - DNA, 15 bp, Homo sapiens
gaacactattcctct

SEQ ID NO: 1078694 - DNA, 15 bp, Homo sapiens
tgaacactattcctc

SEQ ID NO: 1078695 - DNA, 15 bp, Homo sapiens
ctgaacactattcct

SEQ ID NO: 1078696 - DNA, 15 bp, Homo sapiens
cctgaacactattcc

SEQ ID NO: 1078697 - DNA, 15 bp, Homo sapiens
ccctgaacactattc

SEQ ID NO: 1078698 - DNA, 15 bp, Homo sapiens
gccctgaacactatt

SEQ ID NO: 1078699 - DNA, 15 bp, Homo sapiens
tgccctgaacactat

SEQ ID NO: 1078700 - DNA, 15 bp, Homo sapiens
atgccctgaacacta

SEQ ID NO: 1078701 - DNA, 15 bp, Homo sapiens
catgccctgaacact

SEQ ID NO: 1078702 - DNA, 15 bp, Homo sapiens
ccatgccctgaacac

SEQ ID NO: 1078703 - DNA, 15 bp, Homo sapiens
accatgccctgaaca

SEQ ID NO: 1078704 - DNA, 15 bp, Homo sapiens
caccatgccctgaac

SEQ ID NO: 1078705 - DNA, 15 bp, Homo sapiens
acaccatgccctgaa

SEQ ID NO: 1078706 - DNA, 15 bp, Homo sapiens
cacaccatgccctga

SEQ ID NO: 1078707 - DNA, 15 bp, Homo sapiens
acacaccatgccctg

SEQ ID NO: 1078708 - DNA, 15 bp, Homo sapiens
aacacaccatgccct

SEQ ID NO: 1078709 - DNA, 15 bp, Homo sapiens
gaacacaccatgccc

SEQ ID NO: 1078710 - DNA, 15 bp, Homo sapiens
tgaacacaccatgcc

SEQ ID NO: 1078711 - DNA, 15 bp, Homo sapiens
ttgaacacaccatgc

SEQ ID NO: 1078712 - DNA, 15 bp, Homo sapiens
cttgaacacaccatg

SEQ ID NO: 1078713 - DNA, 15 bp, Homo sapiens
tcttgaacacaccat

SEQ ID NO: 1078714 - DNA, 15 bp, Homo sapiens
ttgtttcttgaacac

SEQ ID NO: 1078715 - DNA, 15 bp, Homo sapiens
tttgtttcttgaaca

SEQ ID NO: 1078716 - DNA, 15 bp, Homo sapiens
ctttgtttcttgaac

SEQ ID NO: 1078717 - DNA, 15 bp, Homo sapiens
actttgtttcttgaa

SEQ ID NO: 1078718 - DNA, 15 bp, Homo sapiens
tactttgtttcttga

SEQ ID NO: 1078719 - DNA, 15 bp, Homo sapiens
ttactttgtttcttg

SEQ ID NO: 1078720 - DNA, 15 bp, Homo sapiens
cttactttgtttctt

SEQ ID NO: 1078721 - DNA, 15 bp, Homo sapiens
gcttactttgtttct

SEQ ID NO: 1078722 - DNA, 15 bp, Homo sapiens
agcttactttgtttc

SEQ ID NO: 1078723 - DNA, 15 bp, Homo sapiens
gagcttactttgttt

SEQ ID NO: 1078724 - DNA, 15 bp, Homo sapiens
tgagcttactttgtt

SEQ ID NO: 1078725 - DNA, 15 bp, Homo sapiens
ctgagcttactttgt

SEQ ID NO: 1078726 - DNA, 15 bp, Homo sapiens
actgagcttactttg

SEQ ID NO: 1078727 - DNA, 15 bp, Homo sapiens
gactgagcttacttt

SEQ ID NO: 1078728 - DNA, 15 bp, Homo sapiens
agactgagcttactt

SEQ ID NO: 1078729 - DNA, 15 bp, Homo sapiens
cagactgagcttact

SEQ ID NO: 1078730 - DNA, 15 bp, Homo sapiens
ccagactgagcttac

SEQ ID NO: 1078731 - DNA, 15 bp, Homo sapiens
accagactgagctta

SEQ ID NO: 1078732 - DNA, 15 bp, Homo sapiens
aaccagactgagctt

SEQ ID NO: 1078733 - DNA, 15 bp, Homo sapiens
gaaccagactgagct

SEQ ID NO: 1078734 - DNA, 15 bp, Homo sapiens
tgaaccagactgagc

SEQ ID NO: 1078735 - DNA, 15 bp, Homo sapiens
ctgaaccagactgag

SEQ ID NO: 1078736 - DNA, 15 bp, Homo sapiens
cctgaaccagactga

SEQ ID NO: 1078737 - DNA, 15 bp, Homo sapiens
ccctgaaccagactg

SEQ ID NO: 1078738 - DNA, 15 bp, Homo sapiens
gccctgaaccagact

SEQ ID NO: 1078739 - DNA, 15 bp, Homo sapiens
tgccctgaaccagac

SEQ ID NO: 1078740 - DNA, 15 bp, Homo sapiens
ctgccctgaaccaga

SEQ ID NO: 1078741 - DNA, 15 bp, Homo sapiens
gctgccctgaaccag

SEQ ID NO: 1078742 - DNA, 15 bp, Homo sapiens
agctgccctgaacca

SEQ ID NO: 1078743 - DNA, 15 bp, Homo sapiens
cagctgccctgaacc

SEQ ID NO: 1078744 - DNA, 15 bp, Homo sapiens
gcagctgccctgaac

SEQ ID NO: 1078745 - DNA, 15 bp, Homo sapiens
tgcagctgccctgaa

SEQ ID NO: 1078746 - DNA, 15 bp, Homo sapiens
ttgcagctgccctga

SEQ ID NO: 1078747 - DNA, 15 bp, Homo sapiens
attgcagctgccctg

SEQ ID NO: 1078748 - DNA, 15 bp, Homo sapiens
gattgcagctgccct

SEQ ID NO: 1078749 - DNA, 15 bp, Homo sapiens
ggattgcagctgccc

SEQ ID NO: 1078750 - DNA, 15 bp, Homo sapiens
tggattgcagctgcc

SEQ ID NO: 1078751 - DNA, 15 bp, Homo sapiens
ttggattgcagctgc

SEQ ID NO: 1078752 - DNA, 15 bp, Homo sapiens
cttggattgcagctg

SEQ ID NO: 1078753 - DNA, 15 bp, Homo sapiens
tcttggattgcagct

SEQ ID NO: 1078754 - DNA, 15 bp, Homo sapiens
ttcttggattgcagc

SEQ ID NO: 1078755 - DNA, 15 bp, Homo sapiens
tttcttggattgcag

SEQ ID NO: 1078756 - DNA, 15 bp, Homo sapiens
ctttcttggattgca

SEQ ID NO: 1078757 - DNA, 15 bp, Homo sapiens
tctttcttggattgc

SEQ ID NO: 1078758 - DNA, 15 bp, Homo sapiens
ttctttcttggattg

SEQ ID NO: 1078759 - DNA, 15 bp, Homo sapiens
cttctttcttggatt

SEQ ID NO: 1078760 - DNA, 15 bp, Homo sapiens
ccttctttcttggat

SEQ ID NO: 1078761 - DNA, 15 bp, Homo sapiens
accttctttcttgga

SEQ ID NO: 1078762 - DNA, 15 bp, Homo sapiens
taccttctttcttgg

SEQ ID NO: 1078763 - DNA, 15 bp, Homo sapiens
ctaccttctttcttg

SEQ ID NO: 1078764 - DNA, 15 bp, Homo sapiens
tctaccttctttctt

SEQ ID NO: 1078765 - DNA, 15 bp, Homo sapiens
ttctaccttctttct

SEQ ID NO: 1078766 - DNA, 15 bp, Homo sapiens
gttctaccttctttc

SEQ ID NO: 1078767 - DNA, 15 bp, Homo sapiens
cgttctaccttcttt

SEQ ID NO: 1078768 - DNA, 15 bp, Homo sapiens
acgttctaccttctt

SEQ ID NO: 1078769 - DNA, 15 bp, Homo sapiens
cacgttctaccttct

SEQ ID NO: 1078770 - DNA, 15 bp, Homo sapiens
ccacgttctaccttc

SEQ ID NO: 1078771 - DNA, 15 bp, Homo sapiens
cccacgttctacctt

SEQ ID NO: 1078772 - DNA, 15 bp, Homo sapiens
ccccacgttctacct

SEQ ID NO: 1078773 - DNA, 15 bp, Homo sapiens
cccccacgttctacc

SEQ ID NO: 1078774 - DNA, 15 bp, Homo sapiens
tcccccacgttctac

SEQ ID NO: 1078775 - DNA, 15 bp, Homo sapiens
ctcccccacgttcta

SEQ ID NO: 1078776 - DNA, 15 bp, Homo sapiens
actcccccacgttct

SEQ ID NO: 1078777 - DNA, 15 bp, Homo sapiens
tactcccccacgttc

SEQ ID NO: 1078778 - DNA, 15 bp, Homo sapiens
ttactcccccacgtt

SEQ ID NO: 1078779 - DNA, 15 bp, Homo sapiens
tttactcccccacgt

SEQ ID NO: 1078780 - DNA, 15 bp, Homo sapiens
ctttactcccccacg

SEQ ID NO: 1078781 - DNA, 15 bp, Homo sapiens
cctttactcccccac

SEQ ID NO: 1078782 - DNA, 15 bp, Homo sapiens
tcctttactccccca

SEQ ID NO: 1078783 - DNA, 15 bp, Homo sapiens
atcctttactccccc

SEQ ID NO: 1078784 - DNA, 15 bp, Homo sapiens
catcctttactcccc

SEQ ID NO: 1078785 - DNA, 15 bp, Homo sapiens
ccatcctttactccc

SEQ ID NO: 1078786 - DNA, 15 bp, Homo sapiens
accatcctttactcc

SEQ ID NO: 1078787 - DNA, 15 bp, Homo sapiens
caccatcctttactc

SEQ ID NO: 1078788 - DNA, 15 bp, Homo sapiens
tcaccatcctttact

SEQ ID NO: 1078789 - DNA, 15 bp, Homo sapiens
ctcaccatcctttac

SEQ ID NO: 1078790 - DNA, 15 bp, Homo sapiens
cctcaccatccttta

SEQ ID NO: 1078791 - DNA, 15 bp, Homo sapiens
gcctcaccatccttt

SEQ ID NO: 1078792 - DNA, 15 bp, Homo sapiens
agcctcaccatcctt

SEQ ID NO: 1078793 - DNA, 15 bp, Homo sapiens
cagcctcaccatcct

SEQ ID NO: 1078794 - DNA, 15 bp, Homo sapiens
gcagcctcaccatcc

SEQ ID NO: 1078795 - DNA, 15 bp, Homo sapiens
tgcagcctcaccatc

SEQ ID NO: 1078796 - DNA, 15 bp, Homo sapiens
ctgcagcctcaccat

SEQ ID NO: 1078797 - DNA, 15 bp, Homo sapiens
tctgcagcctcacca

SEQ ID NO: 1078798 - DNA, 15 bp, Homo sapiens
gtctgcagcctcacc

SEQ ID NO: 1078799 - DNA, 15 bp, Homo sapiens
agtctgcagcctcac

SEQ ID NO: 1078800 - DNA, 15 bp, Homo sapiens
cagtctgcagcctca

SEQ ID NO: 1078801 - DNA, 15 bp, Homo sapiens
ccagtctgcagcctc

SEQ ID NO: 1078802 - DNA, 15 bp, Homo sapiens
tccagtctgcagcct

SEQ ID NO: 1078803 - DNA, 15 bp, Homo sapiens
ctccagtctgcagcc

SEQ ID NO: 1078804 - DNA, 15 bp, Homo sapiens
actccagtctgcagc

SEQ ID NO: 1078805 - DNA, 15 bp, Homo sapiens
gactccagtctgcag

SEQ ID NO: 1078806 - DNA, 15 bp, Homo sapiens
agactccagtctgca

SEQ ID NO: 1078807 - DNA, 15 bp, Homo sapiens
aagactccagtctgc

SEQ ID NO: 1078808 - DNA, 15 bp, Homo sapiens
aaagactccagtctg

SEQ ID NO: 1078809 - DNA, 15 bp, Homo sapiens
aaaagactccagtct

SEQ ID NO: 1078810 - DNA, 15 bp, Homo sapiens
caaaagactccagtc

SEQ ID NO: 1078811 - DNA, 15 bp, Homo sapiens
tcaaaagactccagt

SEQ ID NO: 1078812 - DNA, 15 bp, Homo sapiens
ctcaaaagactccag

SEQ ID NO: 1078813 - DNA, 15 bp, Homo sapiens
cctcaaaagactcca

SEQ ID NO: 1078814 - DNA, 15 bp, Homo sapiens
ccctcaaaagactcc

SEQ ID NO: 1078815 - DNA, 15 bp, Homo sapiens
tccctcaaaagactc

SEQ ID NO: 1078816 - DNA, 15 bp, Homo sapiens
atccctcaaaagact

SEQ ID NO: 1078817 - DNA, 15 bp, Homo sapiens
aatccctcaaaagac

SEQ ID NO: 1078818 - DNA, 15 bp, Homo sapiens
aaatccctcaaaaga

SEQ ID NO: 1078819 - DNA, 15 bp, Homo sapiens
caaatccctcaaaag

SEQ ID NO: 1078820 - DNA, 15 bp, Homo sapiens
tcaaatccctcaaaa

SEQ ID NO: 1078821 - DNA, 15 bp, Homo sapiens
ttcaaatccctcaaa

SEQ ID NO: 1078822 - DNA, 15 bp, Homo sapiens
tattcaaatccctca

SEQ ID NO: 1078823 - DNA, 15 bp, Homo sapiens
gtattcaaatccctc

SEQ ID NO: 1078824 - DNA, 15 bp, Homo sapiens
ggtattcaaatccct

SEQ ID NO: 1078825 - DNA, 15 bp, Homo sapiens
tggtattcaaatccc

SEQ ID NO: 1078826 - DNA, 15 bp, Homo sapiens
atggtattcaaatcc

SEQ ID NO: 1078827 - DNA, 15 bp, Homo sapiens
catggtattcaaatc

SEQ ID NO: 1078828 - DNA, 15 bp, Homo sapiens
gcatggtattcaaat

SEQ ID NO: 1078829 - DNA, 15 bp, Homo sapiens
agcatggtattcaaa

SEQ ID NO: 1078830 - DNA, 15 bp, Homo sapiens
tagcatggtattcaa

SEQ ID NO: 1078831 - DNA, 15 bp, Homo sapiens
ttagcatggtattca

SEQ ID NO: 1078832 - DNA, 15 bp, Homo sapiens
tttagcatggtattc

SEQ ID NO: 1078833 - DNA, 15 bp, Homo sapiens
ctttagcatggtatt

SEQ ID NO: 1078834 - DNA, 15 bp, Homo sapiens
gctttagcatggtat

SEQ ID NO: 1078835 - DNA, 15 bp, Homo sapiens
agctttagcatggta

SEQ ID NO: 1078836 - DNA, 15 bp, Homo sapiens
aagctttagcatggt

SEQ ID NO: 1078837 - DNA, 15 bp, Homo sapiens
aaagctttagcatgg

SEQ ID NO: 1078838 - DNA, 15 bp, Homo sapiens
taaagctttagcatg

SEQ ID NO: 1078839 - DNA, 15 bp, Homo sapiens
ataaagctttagcat

SEQ ID NO: 1078840 - DNA, 15 bp, Homo sapiens
aataaagctttagca

SEQ ID NO: 1078841 - DNA, 15 bp, Homo sapiens
taataaagctttagc

SEQ ID NO: 1078842 - DNA, 15 bp, Homo sapiens
gtaataaagctttag

SEQ ID NO: 1078843 - DNA, 15 bp, Homo sapiens
ggtaataaagcttta

SEQ ID NO: 1078844 - DNA, 15 bp, Homo sapiens
tggtaataaagcttt

SEQ ID NO: 1078845 - DNA, 15 bp, Homo sapiens
atggtaataaagctt

SEQ ID NO: 1078846 - DNA, 15 bp, Homo sapiens
catggtaataaagct

SEQ ID NO: 1078847 - DNA, 15 bp, Homo sapiens
ccatggtaataaagc

SEQ ID NO: 1078848 - DNA, 15 bp, Homo sapiens
accatggtaataaag

SEQ ID NO: 1078849 - DNA, 15 bp, Homo sapiens
caccatggtaataaa

SEQ ID NO: 1078850 - DNA, 15 bp, Homo sapiens
ccaccatggtaataa

SEQ ID NO: 1078851 - DNA, 15 bp, Homo sapiens
accaccatggtaata

SEQ ID NO: 1078852 - DNA, 15 bp, Homo sapiens
aaccaccatggtaat

SEQ ID NO: 1078853 - DNA, 15 bp, Homo sapiens
caaccaccatggtaa

SEQ ID NO: 1078854 - DNA, 15 bp, Homo sapiens
tcaaccaccatggta

SEQ ID NO: 1078855 - DNA, 15 bp, Homo sapiens
ctcaaccaccatggt

SEQ ID NO: 1078856 - DNA, 15 bp, Homo sapiens
tctcaaccaccatgg

SEQ ID NO: 1078857 - DNA, 15 bp, Homo sapiens
ttctcaaccaccatg

SEQ ID NO: 1078858 - DNA, 15 bp, Homo sapiens
tttctcaaccaccat

SEQ ID NO: 1078859 - DNA, 15 bp, Homo sapiens
ctttctcaaccacca

SEQ ID NO: 1078860 - DNA, 15 bp, Homo sapiens
gcctttctcaaccac

SEQ ID NO: 1078861 - DNA, 15 bp, Homo sapiens
tgcctttctcaacca

SEQ ID NO: 1078862 - DNA, 15 bp, Homo sapiens
ctgcctttctcaacc

SEQ ID NO: 1078863 - DNA, 15 bp, Homo sapiens
cctgcctttctcaac

SEQ ID NO: 1078864 - DNA, 15 bp, Homo sapiens
gcctgcctttctcaa

SEQ ID NO: 1078865 - DNA, 15 bp, Homo sapiens
agcctgcctttctca

SEQ ID NO: 1078866 - DNA, 15 bp, Homo sapiens
cagcctgcctttctc

SEQ ID NO: 1078867 - DNA, 15 bp, Homo sapiens
acagcctgcctttct

SEQ ID NO: 1078868 - DNA, 15 bp, Homo sapiens
tacagcctgcctttc

SEQ ID NO: 1078869 - DNA, 15 bp, Homo sapiens
atacagcctgccttt

SEQ ID NO: 1078870 - DNA, 15 bp, Homo sapiens
aatacagcctgcctt

SEQ ID NO: 1078871 - DNA, 15 bp, Homo sapiens
caatacagcctgcct

SEQ ID NO: 1078872 - DNA, 15 bp, Homo sapiens
acaatacagcctgcc

SEQ ID NO: 1078873 - DNA, 15 bp, Homo sapiens
tacaatacagcctgc

SEQ ID NO: 1078874 - DNA, 15 bp, Homo sapiens
ctacaatacagcctg

SEQ ID NO: 1078875 - DNA, 15 bp, Homo sapiens
tctacaatacagcct

SEQ ID NO: 1078876 - DNA, 15 bp, Homo sapiens
ttctacaatacagcc

SEQ ID NO: 1078877 - DNA, 15 bp, Homo sapiens
cttctacaatacagc

SEQ ID NO: 1078878 - DNA, 15 bp, Homo sapiens
gcttctacaatacag

SEQ ID NO: 1078879 - DNA, 15 bp, Homo sapiens
tgcttctacaataca

SEQ ID NO: 1078880 - DNA, 15 bp, Homo sapiens
atgcttctacaatac

SEQ ID NO: 1078881 - DNA, 15 bp, Homo sapiens
aatgcttctacaata

SEQ ID NO: 1078882 - DNA, 15 bp, Homo sapiens
aaatgcttctacaat

SEQ ID NO: 1078883 - DNA, 15 bp, Homo sapiens
caaatgcttctacaa

SEQ ID NO: 1078884 - DNA, 15 bp, Homo sapiens
ccaaatgcttctaca

SEQ ID NO: 1078885 - DNA, 15 bp, Homo sapiens
cccaaatgcttctac

SEQ ID NO: 1078886 - DNA, 15 bp, Homo sapiens
tcccaaatgcttcta

SEQ ID NO: 1078887 - DNA, 15 bp, Homo sapiens
ttcccaaatgcttct

SEQ ID NO: 1078888 - DNA, 15 bp, Homo sapiens
tttcccaaatgcttc

SEQ ID NO: 1078889 - DNA, 15 bp, Homo sapiens
ttttcccaaatgctt

SEQ ID NO: 1078890 - DNA, 15 bp, Homo sapiens
tttttcccaaatgct

SEQ ID NO: 1078891 - DNA, 15 bp, Homo sapiens
ttttttcccaaatgc

SEQ ID NO: 1078892 - DNA, 15 bp, Homo sapiens
tttttttcccaaatg

SEQ ID NO: 1078893 - DNA, 15 bp, Homo sapiens
atttttttcccaaat

SEQ ID NO: 1078894 - DNA, 15 bp, Homo sapiens
catttttttcccaaa

SEQ ID NO: 1078895 - DNA, 15 bp, Homo sapiens
gcatttttttcccaa

SEQ ID NO: 1078896 - DNA, 15 bp, Homo sapiens
agcatttttttccca

SEQ ID NO: 1078897 - DNA, 15 bp, Homo sapiens
gagcatttttttccc

SEQ ID NO: 1078898 - DNA, 15 bp, Homo sapiens
ggagcatttttttcc

SEQ ID NO: 1078899 - DNA, 15 bp, Homo sapiens
aggagcatttttttc

SEQ ID NO: 1078900 - DNA, 15 bp, Homo sapiens
aaggagcattttttt

SEQ ID NO: 1078901 - DNA, 15 bp, Homo sapiens
taaggagcatttttt

SEQ ID NO: 1078902 - DNA, 15 bp, Homo sapiens
ctaaggagcattttt

SEQ ID NO: 1078903 - DNA, 15 bp, Homo sapiens
cctaaggagcatttt

SEQ ID NO: 1078904 - DNA, 15 bp, Homo sapiens
gcctaaggagcattt

SEQ ID NO: 1078905 - DNA, 15 bp, Homo sapiens
tgcctaaggagcatt

SEQ ID NO: 1078906 - DNA, 15 bp, Homo sapiens
gtgcctaaggagcat

SEQ ID NO: 1078907 - DNA, 15 bp, Homo sapiens
tgtgcctaaggagca

SEQ ID NO: 1078908 - DNA, 15 bp, Homo sapiens
gtgtgcctaaggagc

SEQ ID NO: 1078909 - DNA, 15 bp, Homo sapiens
tgtgtgcctaaggag

SEQ ID NO: 1078910 - DNA, 15 bp, Homo sapiens
ctgtgtgcctaagga

SEQ ID NO: 1078911 - DNA, 15 bp, Homo sapiens
tctgtgtgcctaagg

SEQ ID NO: 1078912 - DNA, 15 bp, Homo sapiens
ttctgtgtgcctaag

SEQ ID NO: 1078913 - DNA, 15 bp, Homo sapiens
tttctgtgtgcctaa

SEQ ID NO: 1078914 - DNA, 15 bp, Homo sapiens
ttttctgtgtgccta

SEQ ID NO: 1078915 - DNA, 15 bp, Homo sapiens
tttttctgtgtgcct

SEQ ID NO: 1078916 - DNA, 15 bp, Homo sapiens
gtttttctgtgtgcc

SEQ ID NO: 1078917 - DNA, 15 bp, Homo sapiens
tgtttttctgtgtgc

SEQ ID NO: 1078918 - DNA, 15 bp, Homo sapiens
ctgtttttctgtgtg

SEQ ID NO: 1078919 - DNA, 15 bp, Homo sapiens
cctgtttttctgtgt

SEQ ID NO: 1078920 - DNA, 15 bp, Homo sapiens
gcctgtttttctgtg

SEQ ID NO: 1078921 - DNA, 15 bp, Homo sapiens
tgcctgtttttctgt

SEQ ID NO: 1078922 - DNA, 15 bp, Homo sapiens
gtgcctgtttttctg

SEQ ID NO: 1078923 - DNA, 15 bp, Homo sapiens
agtgcctgtttttct

SEQ ID NO: 1078924 - DNA, 15 bp, Homo sapiens
aagtgcctgtttttc

SEQ ID NO: 1078925 - DNA, 15 bp, Homo sapiens
caagtgcctgttttt

SEQ ID NO: 1078926 - DNA, 15 bp, Homo sapiens
ccaagtgcctgtttt

SEQ ID NO: 1078927 - DNA, 15 bp, Homo sapiens
tccaagtgcctgttt

SEQ ID NO: 1078928 - DNA, 15 bp, Homo sapiens
ttccaagtgcctgtt

SEQ ID NO: 1078929 - DNA, 15 bp, Homo sapiens
tttccaagtgcctgt

SEQ ID NO: 1078930 - DNA, 15 bp, Homo sapiens
ttttccaagtgcctg

SEQ ID NO: 1078931 - DNA, 15 bp, Homo sapiens
tttttccaagtgcct

SEQ ID NO: 1078932 - DNA, 15 bp, Homo sapiens
atttttccaagtgcc

SEQ ID NO: 1078933 - DNA, 15 bp, Homo sapiens
catttttccaagtgc

SEQ ID NO: 1078934 - DNA, 15 bp, Homo sapiens
tcatttttccaagtg

SEQ ID NO: 1078935 - DNA, 15 bp, Homo sapiens
ctcatttttccaagt

SEQ ID NO: 1078936 - DNA, 15 bp, Homo sapiens
cctcatttttccaag

SEQ ID NO: 1078937 - DNA, 15 bp, Homo sapiens
ccctcatttttccaa

SEQ ID NO: 1078938 - DNA, 15 bp, Homo sapiens
tccctcatttttcca

SEQ ID NO: 1078939 - DNA, 15 bp, Homo sapiens
ttccctcatttttcc

SEQ ID NO: 1078940 - DNA, 15 bp, Homo sapiens
tttccctcatttttc

SEQ ID NO: 1078941 - DNA, 15 bp, Homo sapiens
ttttccctcattttt

SEQ ID NO: 1078942 - DNA, 15 bp, Homo sapiens
tttttccctcatttt

SEQ ID NO: 1078943 - DNA, 15 bp, Homo sapiens
gtttttccctcattt

SEQ ID NO: 1078944 - DNA, 15 bp, Homo sapiens
tgtttttccctcatt

SEQ ID NO: 1078945 - DNA, 15 bp, Homo sapiens
ttgtttttccctcat

SEQ ID NO: 1078946 - DNA, 15 bp, Homo sapiens
tttgtttttccctca

SEQ ID NO: 1078947 - DNA, 15 bp, Homo sapiens
ctttgtttttccctc

SEQ ID NO: 1078948 - DNA, 15 bp, Homo sapiens
cctttgtttttccct

SEQ ID NO: 1078949 - DNA, 15 bp, Homo sapiens
ccctttgtttttccc

SEQ ID NO: 1078950 - DNA, 15 bp, Homo sapiens
accctttgtttttcc

SEQ ID NO: 1078951 - DNA, 15 bp, Homo sapiens
aaccctttgtttttc

SEQ ID NO: 1078952 - DNA, 15 bp, Homo sapiens
caaccctttgttttt

SEQ ID NO: 1078953 - DNA, 15 bp, Homo sapiens
acaaccctttgtttt

SEQ ID NO: 1078954 - DNA, 15 bp, Homo sapiens
tacaaccctttgttt

SEQ ID NO: 1078955 - DNA, 15 bp, Homo sapiens
gtacaaccctttgtt

SEQ ID NO: 1078956 - DNA, 15 bp, Homo sapiens
tgtacaaccctttgt

SEQ ID NO: 1078957 - DNA, 15 bp, Homo sapiens
ttgtacaaccctttg

SEQ ID NO: 1078958 - DNA, 15 bp, Homo sapiens
tttgtacaacccttt

SEQ ID NO: 1078959 - DNA, 15 bp, Homo sapiens
ttttgtacaaccctt

SEQ ID NO: 1078960 - DNA, 15 bp, Homo sapiens
cttttgtacaaccct

SEQ ID NO: 1078961 - DNA, 15 bp, Homo sapiens
tcttttgtacaaccc

SEQ ID NO: 1078962 - DNA, 15 bp, Homo sapiens
ctcttttgtacaacc

SEQ ID NO: 1078963 - DNA, 15 bp, Homo sapiens
cctcttttgtacaac

SEQ ID NO: 1078964 - DNA, 15 bp, Homo sapiens
tcctcttttgtacaa

SEQ ID NO: 1078965 - DNA, 15 bp, Homo sapiens
ctcctcttttgtaca

SEQ ID NO: 1078966 - DNA, 15 bp, Homo sapiens
cctcctcttttgtac

SEQ ID NO: 1078967 - DNA, 15 bp, Homo sapiens
acctcctcttttgta

SEQ ID NO: 1078968 - DNA, 15 bp, Homo sapiens
aacctcctcttttgt

SEQ ID NO: 1078969 - DNA, 15 bp, Homo sapiens
aaacctcctcttttg

SEQ ID NO: 1078970 - DNA, 15 bp, Homo sapiens
caaacctcctctttt

SEQ ID NO: 1078971 - DNA, 15 bp, Homo sapiens
gcaaacctcctcttt

SEQ ID NO: 1078972 - DNA, 15 bp, Homo sapiens
agcaaacctcctctt

SEQ ID NO: 1078973 - DNA, 15 bp, Homo sapiens
aagcaaacctcctct

SEQ ID NO: 1078974 - DNA, 15 bp, Homo sapiens
taagcaaacctcctc

SEQ ID NO: 1078975 - DNA, 15 bp, Homo sapiens
ataagcaaacctcct

SEQ ID NO: 1078976 - DNA, 15 bp, Homo sapiens
cataagcaaacctcc

SEQ ID NO: 1078977 - DNA, 15 bp, Homo sapiens
ccataagcaaacctc

SEQ ID NO: 1078978 - DNA, 15 bp, Homo sapiens
accataagcaaacct

SEQ ID NO: 1078979 - DNA, 15 bp, Homo sapiens
caccataagcaaacc

SEQ ID NO: 1078980 - DNA, 15 bp, Homo sapiens
gcaccataagcaaac

SEQ ID NO: 1078981 - DNA, 15 bp, Homo sapiens
cgcaccataagcaaa

SEQ ID NO: 1078982 - DNA, 15 bp, Homo sapiens
acgcaccataagcaa

SEQ ID NO: 1078983 - DNA, 15 bp, Homo sapiens
aacgcaccataagca

SEQ ID NO: 1078984 - DNA, 15 bp, Homo sapiens
taacgcaccataagc

SEQ ID NO: 1078985 - DNA, 15 bp, Homo sapiens
ataacgcaccataag

SEQ ID NO: 1078986 - DNA, 15 bp, Homo sapiens
aataacgcaccataa

SEQ ID NO: 1078987 - DNA, 15 bp, Homo sapiens
taataacgcaccata

SEQ ID NO: 1078988 - DNA, 15 bp, Homo sapiens
ctaataacgcaccat

SEQ ID NO: 1078989 - DNA, 15 bp, Homo sapiens
tctaataacgcacca

SEQ ID NO: 1078990 - DNA, 15 bp, Homo sapiens
atctaataacgcacc

SEQ ID NO: 1078991 - DNA, 15 bp, Homo sapiens
aatctaataacgcac

SEQ ID NO: 1078992 - DNA, 15 bp, Homo sapiens
aaatctaataacgca

SEQ ID NO: 1078993 - DNA, 15 bp, Homo sapiens
caaatctaataacgc

SEQ ID NO: 1078994 - DNA, 15 bp, Homo sapiens
ccaaatctaataacg

SEQ ID NO: 1078995 - DNA, 15 bp, Homo sapiens
gccaaatctaataac

SEQ ID NO: 1078996 - DNA, 15 bp, Homo sapiens
tgccaaatctaataa

SEQ ID NO: 1078997 - DNA, 15 bp, Homo sapiens
gtgccaaatctaata

SEQ ID NO: 1078998 - DNA, 15 bp, Homo sapiens
tgtgccaaatctaat

SEQ ID NO: 1078999 - DNA, 15 bp, Homo sapiens
ctgtgccaaatctaa

SEQ ID NO: 1079000 - DNA, 15 bp, Homo sapiens
tctgtgccaaatcta

SEQ ID NO: 1079001 - DNA, 15 bp, Homo sapiens
gtctgtgccaaatct

SEQ ID NO: 1079002 - DNA, 15 bp, Homo sapiens
tgtctgtgccaaatc

SEQ ID NO: 1079003 - DNA, 15 bp, Homo sapiens
ctgtctgtgccaaat

SEQ ID NO: 1079004 - DNA, 15 bp, Homo sapiens
actgtctgtgccaaa

SEQ ID NO: 1079005 - DNA, 15 bp, Homo sapiens
tactgtctgtgccaa

SEQ ID NO: 1079006 - DNA, 15 bp, Homo sapiens
atactgtctgtgcca

SEQ ID NO: 1079007 - DNA, 15 bp, Homo sapiens
aatactgtctgtgcc

SEQ ID NO: 1079008 - DNA, 15 bp, Homo sapiens
aaatactgtctgtgc

SEQ ID NO: 1079009 - DNA, 15 bp, Homo sapiens
taaatactgtctgtg

SEQ ID NO: 1079010 - DNA, 15 bp, Homo sapiens
ataaatactgtctgt

SEQ ID NO: 1079011 - DNA, 15 bp, Homo sapiens
tataaatactgtctg

SEQ ID NO: 1079012 - DNA, 15 bp, Homo sapiens
atataaatactgtct

SEQ ID NO: 1079013 - DNA, 15 bp, Homo sapiens
tatataaatactgtc

SEQ ID NO: 1079014 - DNA, 15 bp, Homo sapiens
ttatataaatactgt

SEQ ID NO: 1079015 - DNA, 15 bp, Homo sapiens
attatataaatactg

SEQ ID NO: 1079016 - DNA, 15 bp, Homo sapiens
gattatataaatact

SEQ ID NO: 1079017 - DNA, 15 bp, Homo sapiens
tgattatataaatac

SEQ ID NO: 1079018 - DNA, 15 bp, Homo sapiens
atgattatataaata

SEQ ID NO: 1079019 - DNA, 15 bp, Homo sapiens
tatgattatataaat

SEQ ID NO: 1079020 - DNA, 15 bp, Homo sapiens
ttatgattatataaa

SEQ ID NO: 1079021 - DNA, 15 bp, Homo sapiens
gttatgattatataa

SEQ ID NO: 1079022 - DNA, 15 bp, Homo sapiens
tgttatgattatata

SEQ ID NO: 1079023 - DNA, 15 bp, Homo sapiens
ttgttatgattatat

SEQ ID NO: 1079024 - DNA, 15 bp, Homo sapiens
attgttatgattata

SEQ ID NO: 1079025 - DNA, 15 bp, Homo sapiens
tattgttatgattat

SEQ ID NO: 1079026 - DNA, 15 bp, Homo sapiens
atattgttatgatta

SEQ ID NO: 1079027 - DNA, 15 bp, Homo sapiens
tatattgttatgatt

SEQ ID NO: 1079028 - DNA, 15 bp, Homo sapiens
ttatattgttatgat

SEQ ID NO: 1079029 - DNA, 15 bp, Homo sapiens
tttatattgttatga

SEQ ID NO: 1079030 - DNA, 15 bp, Homo sapiens
gtttatattgttatg

SEQ ID NO: 1079031 - DNA, 15 bp, Homo sapiens
tgtttatattgttat

SEQ ID NO: 1079032 - DNA, 15 bp, Homo sapiens
atgtttatattgtta

SEQ ID NO: 1079033 - DNA, 15 bp, Homo sapiens
tatgtttatattgtt

SEQ ID NO: 1079034 - DNA, 15 bp, Homo sapiens
ctatgtttatattgt

SEQ ID NO: 1079035 - DNA, 15 bp, Homo sapiens
gctatgtttatattg

SEQ ID NO: 1079036 - DNA, 15 bp, Homo sapiens
cgctatgtttatatt

SEQ ID NO: 1079037 - DNA, 15 bp, Homo sapiens
tcgctatgtttatat

SEQ ID NO: 1079038 - DNA, 15 bp, Homo sapiens
ttcgctatgtttata

SEQ ID NO: 1079039 - DNA, 15 bp, Homo sapiens
attcgctatgtttat

SEQ ID NO: 1079040 - DNA, 15 bp, Homo sapiens
aattcgctatgttta

SEQ ID NO: 1079041 - DNA, 15 bp, Homo sapiens
taattcgctatgttt

SEQ ID NO: 1079042 - DNA, 15 bp, Homo sapiens
ttaattcgctatgtt

SEQ ID NO: 1079043 - DNA, 15 bp, Homo sapiens
gttaattcgctatgt

SEQ ID NO: 1079044 - DNA, 15 bp, Homo sapiens
ggttaattcgctatg

SEQ ID NO: 1079045 - DNA, 15 bp, Homo sapiens
gggttaattcgctat

SEQ ID NO: 1079046 - DNA, 15 bp, Homo sapiens
tgggttaattcgcta

SEQ ID NO: 1079047 - DNA, 15 bp, Homo sapiens
ttgggttaattcgct

SEQ ID NO: 1079048 - DNA, 15 bp, Homo sapiens
tttgggttaattcgc

SEQ ID NO: 1079049 - DNA, 15 bp, Homo sapiens
ttttgggttaattcg

SEQ ID NO: 1079050 - DNA, 15 bp, Homo sapiens
attttgggttaattc

SEQ ID NO: 1079051 - DNA, 15 bp, Homo sapiens
aattttgggttaatt

SEQ ID NO: 1079052 - DNA, 15 bp, Homo sapiens
caattttgggttaat

SEQ ID NO: 1079053 - DNA, 15 bp, Homo sapiens
acaattttgggttaa

SEQ ID NO: 1079054 - DNA, 15 bp, Homo sapiens
cacaattttgggtta

SEQ ID NO: 1079055 - DNA, 15 bp, Homo sapiens
tcacaattttgggtt

SEQ ID NO: 1079056 - DNA, 15 bp, Homo sapiens
atcacaattttgggt

SEQ ID NO: 1079057 - DNA, 15 bp, Homo sapiens
catcacaattttggg

SEQ ID NO: 1079058 - DNA, 15 bp, Homo sapiens
acatcacaattttgg

SEQ ID NO: 1079059 - DNA, 15 bp, Homo sapiens
tacatcacaattttg

SEQ ID NO: 1079060 - DNA, 15 bp, Homo sapiens
ttacatcacaatttt

SEQ ID NO: 1079061 - DNA, 15 bp, Homo sapiens
attacatcacaattt

SEQ ID NO: 1079062 - DNA, 15 bp, Homo sapiens
aattacatcacaatt

SEQ ID NO: 1079063 - DNA, 15 bp, Homo sapiens
aaattacatcacaat

SEQ ID NO: 1079064 - DNA, 15 bp, Homo sapiens
aaaattacatcacaa

SEQ ID NO: 1079065 - DNA, 15 bp, Homo sapiens
caaaattacatcaca

SEQ ID NO: 1079066 - DNA, 15 bp, Homo sapiens
acaaaattacatcac

SEQ ID NO: 1079067 - DNA, 15 bp, Homo sapiens
aacaaaattacatca

SEQ ID NO: 1079068 - DNA, 15 bp, Homo sapiens
taacaaaattacatc

SEQ ID NO: 1079069 - DNA, 15 bp, Homo sapiens
ctaacaaaattacat

SEQ ID NO: 1079070 - DNA, 15 bp, Homo sapiens
cctaacaaaattaca

SEQ ID NO: 1079071 - DNA, 15 bp, Homo sapiens
tcctaacaaaattac

SEQ ID NO: 1079072 - DNA, 15 bp, Homo sapiens
atcctaacaaaatta

SEQ ID NO: 1079073 - DNA, 15 bp, Homo sapiens
tatcctaacaaaatt

SEQ ID NO: 1079074 - DNA, 15 bp, Homo sapiens
ttatcctaacaaaat

SEQ ID NO: 1079075 - DNA, 15 bp, Homo sapiens
attatcctaacaaaa

SEQ ID NO: 1079076 - DNA, 15 bp, Homo sapiens
tattatcctaacaaa

SEQ ID NO: 1079077 - DNA, 15 bp, Homo sapiens
ctattatcctaacaa

SEQ ID NO: 1079078 - DNA, 15 bp, Homo sapiens
cctattatcctaaca

SEQ ID NO: 1079079 - DNA, 15 bp, Homo sapiens
ccctattatcctaac

SEQ ID NO: 1079080 - DNA, 15 bp, Homo sapiens
tccctattatcctaa

SEQ ID NO: 1079081 - DNA, 15 bp, Homo sapiens
ctccctattatccta

SEQ ID NO: 1079082 - DNA, 15 bp, Homo sapiens
cctccctattatcct

SEQ ID NO: 1079083 - DNA, 15 bp, Homo sapiens
ccctccctattatcc

SEQ ID NO: 1079084 - DNA, 15 bp, Homo sapiens
tccctccctattatc

SEQ ID NO: 1079085 - DNA, 15 bp, Homo sapiens
ttccctccctattat

SEQ ID NO: 1079086 - DNA, 15 bp, Homo sapiens
cttccctccctatta

SEQ ID NO: 1079087 - DNA, 15 bp, Homo sapiens
acttccctccctatt

SEQ ID NO: 1079088 - DNA, 15 bp, Homo sapiens
tacttccctccctat

SEQ ID NO: 1079089 - DNA, 15 bp, Homo sapiens
ctacttccctcccta

SEQ ID NO: 1079090 - DNA, 15 bp, Homo sapiens
tctacttccctccct

SEQ ID NO: 1079091 - DNA, 15 bp, Homo sapiens
ctctacttccctccc

SEQ ID NO: 1079092 - DNA, 15 bp, Homo sapiens
caagtcacatttgaa

SEQ ID NO: 1079093 - DNA, 15 bp, Homo sapiens
tcaagtcacatttga

SEQ ID NO: 1079094 - DNA, 15 bp, Homo sapiens
ttcaagtcacatttg

SEQ ID NO: 1079095 - DNA, 15 bp, Homo sapiens
cttcaagtcacattt

SEQ ID NO: 1079096 - DNA, 15 bp, Homo sapiens
acttcaagtcacatt

SEQ ID NO: 1079097 - DNA, 15 bp, Homo sapiens
aacttcaagtcacat

SEQ ID NO: 1079098 - DNA, 15 bp, Homo sapiens
taacttcaagtcaca

SEQ ID NO: 1079099 - DNA, 15 bp, Homo sapiens
ttaacttcaagtcac

SEQ ID NO: 1079100 - DNA, 15 bp, Homo sapiens
cttaacttcaagtca

SEQ ID NO: 1079101 - DNA, 15 bp, Homo sapiens
acttaacttcaagtc

SEQ ID NO: 1079102 - DNA, 15 bp, Homo sapiens
aacttaacttcaagt

SEQ ID NO: 1079103 - DNA, 15 bp, Homo sapiens
caacttaacttcaag

SEQ ID NO: 1079104 - DNA, 15 bp, Homo sapiens
tcaacttaacttcaa

SEQ ID NO: 1079105 - DNA, 15 bp, Homo sapiens
ttcaacttaacttca

SEQ ID NO: 1079106 - DNA, 15 bp, Homo sapiens
cttcaacttaacttc

SEQ ID NO: 1079107 - DNA, 15 bp, Homo sapiens
ccttcaacttaactt

SEQ ID NO: 1079108 - DNA, 15 bp, Homo sapiens
tccttcaacttaact

SEQ ID NO: 1079109 - DNA, 15 bp, Homo sapiens
ttccttcaacttaac

SEQ ID NO: 1079110 - DNA, 15 bp, Homo sapiens
tttccttcaacttaa

SEQ ID NO: 1079111 - DNA, 15 bp, Homo sapiens
ttttccttcaactta

SEQ ID NO: 1079112 - DNA, 15 bp, Homo sapiens
gttttccttcaactt

SEQ ID NO: 1079113 - DNA, 15 bp, Homo sapiens
agttttccttcaact

SEQ ID NO: 1079114 - DNA, 15 bp, Homo sapiens
cagttttccttcaac

SEQ ID NO: 1079115 - DNA, 15 bp, Homo sapiens
acagttttccttcaa

SEQ ID NO: 1079116 - DNA, 15 bp, Homo sapiens
tacagttttccttca

SEQ ID NO: 1079117 - DNA, 15 bp, Homo sapiens
gtacagttttccttc

SEQ ID NO: 1079118 - DNA, 15 bp, Homo sapiens
tgtacagttttcctt

SEQ ID NO: 1079119 - DNA, 15 bp, Homo sapiens
gtgtacagttttcct

SEQ ID NO: 1079120 - DNA, 15 bp, Homo sapiens
tgtgtacagttttcc

SEQ ID NO: 1079121 - DNA, 15 bp, Homo sapiens
ttgtgtacagttttc

SEQ ID NO: 1079122 - DNA, 15 bp, Homo sapiens
tttgtgtacagtttt

SEQ ID NO: 1079123 - DNA, 15 bp, Homo sapiens
atttgtgtacagttt

SEQ ID NO: 1079124 - DNA, 15 bp, Homo sapiens
tatttgtgtacagtt

SEQ ID NO: 1079125 - DNA, 15 bp, Homo sapiens
ctatttgtgtacagt

SEQ ID NO: 1079126 - DNA, 15 bp, Homo sapiens
actatttgtgtacag

SEQ ID NO: 1079127 - DNA, 15 bp, Homo sapiens
aactatttgtgtaca

SEQ ID NO: 1079128 - DNA, 15 bp, Homo sapiens
gaactatttgtgtac

SEQ ID NO: 1079129 - DNA, 15 bp, Homo sapiens
ggaactatttgtgta

SEQ ID NO: 1079130 - DNA, 15 bp, Homo sapiens
aggaactatttgtgt

SEQ ID NO: 1079131 - DNA, 15 bp, Homo sapiens
taggaactatttgtg

SEQ ID NO: 1079132 - DNA, 15 bp, Homo sapiens
ttaggaactatttgt

SEQ ID NO: 1079133 - DNA, 15 bp, Homo sapiens
gttaggaactatttg

SEQ ID NO: 1079134 - DNA, 15 bp, Homo sapiens
ggttaggaactattt

SEQ ID NO: 1079135 - DNA, 15 bp, Homo sapiens
tggttaggaactatt

SEQ ID NO: 1079136 - DNA, 15 bp, Homo sapiens
ctggttaggaactat

SEQ ID NO: 1079137 - DNA, 15 bp, Homo sapiens
cctggttaggaacta

SEQ ID NO: 1079138 - DNA, 15 bp, Homo sapiens
acctggttaggaact

SEQ ID NO: 1079139 - DNA, 15 bp, Homo sapiens
cacctggttaggaac

SEQ ID NO: 1079140 - DNA, 15 bp, Homo sapiens
gcacctggttaggaa

SEQ ID NO: 1079141 - DNA, 15 bp, Homo sapiens
tgcacctggttagga

SEQ ID NO: 1079142 - DNA, 15 bp, Homo sapiens
ctgcacctggttagg

SEQ ID NO: 1079143 - DNA, 15 bp, Homo sapiens
actgcacctggttag

SEQ ID NO: 1079144 - DNA, 15 bp, Homo sapiens
cactgcacctggtta

SEQ ID NO: 1079145 - DNA, 15 bp, Homo sapiens
ccactgcacctggtt

SEQ ID NO: 1079146 - DNA, 15 bp, Homo sapiens
gccactgcacctggt

SEQ ID NO: 1079147 - DNA, 15 bp, Homo sapiens
taggcgtgagccact

SEQ ID NO: 1079148 - DNA, 15 bp, Homo sapiens
ataggcgtgagccac

SEQ ID NO: 1079149 - DNA, 15 bp, Homo sapiens
tataggcgtgagcca

SEQ ID NO: 1079150 - DNA, 15 bp, Homo sapiens
gttataggcgtgagc

SEQ ID NO: 1079151 - DNA, 15 bp, Homo sapiens
ggttataggcgtgag

SEQ ID NO: 1079152 - DNA, 15 bp, Homo sapiens
gggttataggcgtga

SEQ ID NO: 1079153 - DNA, 15 bp, Homo sapiens
ggggttataggcgtg

SEQ ID NO: 1079154 - DNA, 15 bp, Homo sapiens
tggggttataggcgt

SEQ ID NO: 1079155 - DNA, 15 bp, Homo sapiens
ttggggttataggcg

SEQ ID NO: 1079156 - DNA, 15 bp, Homo sapiens
gttggggttataggc

SEQ ID NO: 1079157 - DNA, 15 bp, Homo sapiens
tgttggggttatagg

SEQ ID NO: 1079158 - DNA, 15 bp, Homo sapiens
gtgttggggttatag

SEQ ID NO: 1079159 - DNA, 15 bp, Homo sapiens
agtgttggggttata

SEQ ID NO: 1079160 - DNA, 15 bp, Homo sapiens
aagtgttggggttat

SEQ ID NO: 1079161 - DNA, 15 bp, Homo sapiens
ccccaccttggcctc

SEQ ID NO: 1079162 - DNA, 15 bp, Homo sapiens
gccccaccttggcct

SEQ ID NO: 1079163 - DNA, 15 bp, Homo sapiens
tgccccaccttggcc

SEQ ID NO: 1079164 - DNA, 15 bp, Homo sapiens
ctgccccaccttggc

SEQ ID NO: 1079165 - DNA, 15 bp, Homo sapiens
tctgccccaccttgg

SEQ ID NO: 1079166 - DNA, 15 bp, Homo sapiens
atctgccccaccttg

SEQ ID NO: 1079167 - DNA, 15 bp, Homo sapiens
gatctgccccacctt

SEQ ID NO: 1079168 - DNA, 15 bp, Homo sapiens
tgatctgccccacct

SEQ ID NO: 1079169 - DNA, 15 bp, Homo sapiens
gtgatctgccccacc

SEQ ID NO: 1079170 - DNA, 15 bp, Homo sapiens
agtgatctgccccac

SEQ ID NO: 1079171 - DNA, 15 bp, Homo sapiens
aagtgatctgcccca

SEQ ID NO: 1079172 - DNA, 15 bp, Homo sapiens
caagtgatctgcccc

SEQ ID NO: 1079173 - DNA, 15 bp, Homo sapiens
gcctcaagtgatctg

SEQ ID NO: 1079174 - DNA, 15 bp, Homo sapiens
ggcctcaagtgatct

SEQ ID NO: 1079175 - DNA, 15 bp, Homo sapiens
acctagttaattttt

SEQ ID NO: 1079176 - DNA, 15 bp, Homo sapiens
cacctagttaatttt

SEQ ID NO: 1079177 - DNA, 15 bp, Homo sapiens
acacctagttaattt

SEQ ID NO: 1079178 - DNA, 15 bp, Homo sapiens
cacacctagttaatt

SEQ ID NO: 1079179 - DNA, 15 bp, Homo sapiens
acacacctagttaat

SEQ ID NO: 1079180 - DNA, 15 bp, Homo sapiens
aacacacctagttaa

SEQ ID NO: 1079181 - DNA, 15 bp, Homo sapiens
caacacacctagtta

SEQ ID NO: 1079182 - DNA, 15 bp, Homo sapiens
ccaacacacctagtt

SEQ ID NO: 1079183 - DNA, 15 bp, Homo sapiens
gccaacacacctagt

SEQ ID NO: 1079184 - DNA, 15 bp, Homo sapiens
cgccaacacacctag

SEQ ID NO: 1079185 - DNA, 15 bp, Homo sapiens
gcgccaacacaccta

SEQ ID NO: 1079186 - DNA, 15 bp, Homo sapiens
gtgcgccaacacacc

SEQ ID NO: 1079187 - DNA, 15 bp, Homo sapiens
tgtgcgccaacacac

SEQ ID NO: 1079188 - DNA, 15 bp, Homo sapiens
gtgtgcgccaacaca

SEQ ID NO: 1079189 - DNA, 15 bp, Homo sapiens
caggtgtgcgccaac

SEQ ID NO: 1079190 - DNA, 15 bp, Homo sapiens
acaggtgtgcgccaa

SEQ ID NO: 1079191 - DNA, 15 bp, Homo sapiens
tacaggtgtgcgcca

SEQ ID NO: 1079192 - DNA, 15 bp, Homo sapiens
ttacaggtgtgcgcc

SEQ ID NO: 1079193 - DNA, 15 bp, Homo sapiens
attacaggtgtgcgc

SEQ ID NO: 1079194 - DNA, 15 bp, Homo sapiens
gattacaggtgtgcg

SEQ ID NO: 1079195 - DNA, 15 bp, Homo sapiens
ttcatgtctcagcct

SEQ ID NO: 1079196 - DNA, 15 bp, Homo sapiens
tttcatgtctcagcc

SEQ ID NO: 1079197 - DNA, 15 bp, Homo sapiens
ttttcatgtctcagc

SEQ ID NO: 1079198 - DNA, 15 bp, Homo sapiens
attttcatgtctcag

SEQ ID NO: 1079199 - DNA, 15 bp, Homo sapiens
gattttcatgtctca

SEQ ID NO: 1079200 - DNA, 15 bp, Homo sapiens
tgattttcatgtctc

SEQ ID NO: 1079201 - DNA, 15 bp, Homo sapiens
gtgattttcatgtct

SEQ ID NO: 1079202 - DNA, 15 bp, Homo sapiens
agtgattttcatgtc

SEQ ID NO: 1079203 - DNA, 15 bp, Homo sapiens
aagtgattttcatgt

SEQ ID NO: 1079204 - DNA, 15 bp, Homo sapiens
caagtgattttcatg

SEQ ID NO: 1079205 - DNA, 15 bp, Homo sapiens
tcaagtgattttcat

SEQ ID NO: 1079206 - DNA, 15 bp, Homo sapiens
ttcaagtgattttca

SEQ ID NO: 1079207 - DNA, 15 bp, Homo sapiens
ggttcaagtgatttt

SEQ ID NO: 1079208 - DNA, 15 bp, Homo sapiens
gggttcaagtgattt

SEQ ID NO: 1079209 - DNA, 15 bp, Homo sapiens
tacctcctgggttca

SEQ ID NO: 1079210 - DNA, 15 bp, Homo sapiens
ctacctcctgggttc

SEQ ID NO: 1079211 - DNA, 15 bp, Homo sapiens
tctacctcctgggtt

SEQ ID NO: 1079212 - DNA, 15 bp, Homo sapiens
ctctacctcctgggt

SEQ ID NO: 1079213 - DNA, 15 bp, Homo sapiens
cctctacctcctggg

SEQ ID NO: 1079214 - DNA, 15 bp, Homo sapiens
acctctacctcctgg

SEQ ID NO: 1079215 - DNA, 15 bp, Homo sapiens
aacctctacctcctg

SEQ ID NO: 1079216 - DNA, 15 bp, Homo sapiens
caacctctacctcct

SEQ ID NO: 1079217 - DNA, 15 bp, Homo sapiens
gcaacctctacctcc

SEQ ID NO: 1079218 - DNA, 15 bp, Homo sapiens
agcctacttggcatt

SEQ ID NO: 1079219 - DNA, 15 bp, Homo sapiens
tagcctacttggcat

SEQ ID NO: 1079220 - DNA, 15 bp, Homo sapiens
ttagcctacttggca

SEQ ID NO: 1079221 - DNA, 15 bp, Homo sapiens
gttagcctacttggc

SEQ ID NO: 1079222 - DNA, 15 bp, Homo sapiens
agttagcctacttgg

SEQ ID NO: 1079223 - DNA, 15 bp, Homo sapiens
tagttagcctacttg

SEQ ID NO: 1079224 - DNA, 15 bp, Homo sapiens
ttagttagcctactt

SEQ ID NO: 1079225 - DNA, 15 bp, Homo sapiens
tttagttagcctact

SEQ ID NO: 1079226 - DNA, 15 bp, Homo sapiens
ttttagttagcctac

SEQ ID NO: 1079227 - DNA, 15 bp, Homo sapiens
attttagttagccta

SEQ ID NO: 1079228 - DNA, 15 bp, Homo sapiens
tattttagttagcct

SEQ ID NO: 1079229 - DNA, 15 bp, Homo sapiens
ttattttagttagcc

SEQ ID NO: 1079230 - DNA, 15 bp, Homo sapiens
attattttagttagc

SEQ ID NO: 1079231 - DNA, 15 bp, Homo sapiens
tattattttagttag

SEQ ID NO: 1079232 - DNA, 15 bp, Homo sapiens
ctattattttagtta

SEQ ID NO: 1079233 - DNA, 15 bp, Homo sapiens
tctattattttagtt

SEQ ID NO: 1079234 - DNA, 15 bp, Homo sapiens
atctattattttagt

SEQ ID NO: 1079235 - DNA, 15 bp, Homo sapiens
aatctattattttag

SEQ ID NO: 1079236 - DNA, 15 bp, Homo sapiens
aaatctattatttta

SEQ ID NO: 1079237 - DNA, 15 bp, Homo sapiens
gaaatctattatttt

SEQ ID NO: 1079238 - DNA, 15 bp, Homo sapiens
tgaaatctattattt

SEQ ID NO: 1079239 - DNA, 15 bp, Homo sapiens
ttgaaatctattatt

SEQ ID NO: 1079240 - DNA, 15 bp, Homo sapiens
gttgaaatctattat

SEQ ID NO: 1079241 - DNA, 15 bp, Homo sapiens
agttgaaatctatta

SEQ ID NO: 1079242 - DNA, 15 bp, Homo sapiens
tagttgaaatctatt

SEQ ID NO: 1079243 - DNA, 15 bp, Homo sapiens
gtagttgaaatctat

SEQ ID NO: 1079244 - DNA, 15 bp, Homo sapiens
agtagttgaaatcta

SEQ ID NO: 1079245 - DNA, 15 bp, Homo sapiens
cagtagttgaaatct

SEQ ID NO: 1079246 - DNA, 15 bp, Homo sapiens
gcagtagttgaaatc

SEQ ID NO: 1079247 - DNA, 15 bp, Homo sapiens
ggcagtagttgaaat

SEQ ID NO: 1079248 - DNA, 15 bp, Homo sapiens
aggcagtagttgaaa

SEQ ID NO: 1079249 - DNA, 15 bp, Homo sapiens
aaggcagtagttgaa

SEQ ID NO: 1079250 - DNA, 15 bp, Homo sapiens
aaaggcagtagttga

SEQ ID NO: 1079251 - DNA, 15 bp, Homo sapiens
caaaggcagtagttg

SEQ ID NO: 1079252 - DNA, 15 bp, Homo sapiens
tcaaaggcagtagtt

SEQ ID NO: 1079253 - DNA, 15 bp, Homo sapiens
ttcaaaggcagtagt

SEQ ID NO: 1079254 - DNA, 15 bp, Homo sapiens
attcaaaggcagtag

SEQ ID NO: 1079255 - DNA, 15 bp, Homo sapiens
tattcaaaggcagta

SEQ ID NO: 1079256 - DNA, 15 bp, Homo sapiens
ctattcaaaggcagt

SEQ ID NO: 1079257 - DNA, 15 bp, Homo sapiens
tctattcaaaggcag

SEQ ID NO: 1079258 - DNA, 15 bp, Homo sapiens
ttctattcaaaggca

SEQ ID NO: 1079259 - DNA, 15 bp, Homo sapiens
gttctattcaaaggc

SEQ ID NO: 1079260 - DNA, 15 bp, Homo sapiens
agttctattcaaagg

SEQ ID NO: 1079261 - DNA, 15 bp, Homo sapiens
aagttctattcaaag

SEQ ID NO: 1079262 - DNA, 15 bp, Homo sapiens
gaagttctattcaaa

SEQ ID NO: 1079263 - DNA, 15 bp, Homo sapiens
agaagttctattcaa

SEQ ID NO: 1079264 - DNA, 15 bp, Homo sapiens
gagaagttctattca

SEQ ID NO: 1079265 - DNA, 15 bp, Homo sapiens
ggagaagttctattc

SEQ ID NO: 1079266 - DNA, 15 bp, Homo sapiens
aggagaagttctatt

SEQ ID NO: 1079267 - DNA, 15 bp, Homo sapiens
aaggagaagttctat

SEQ ID NO: 1079268 - DNA, 15 bp, Homo sapiens
aaaggagaagttcta

SEQ ID NO: 1079269 - DNA, 15 bp, Homo sapiens
caaaggagaagttct

SEQ ID NO: 1079270 - DNA, 15 bp, Homo sapiens
gcaaaggagaagttc

SEQ ID NO: 1079271 - DNA, 15 bp, Homo sapiens
tgcaaaggagaagtt

SEQ ID NO: 1079272 - DNA, 15 bp, Homo sapiens
atgcaaaggagaagt

SEQ ID NO: 1079273 - DNA, 15 bp, Homo sapiens
aatgcaaaggagaag

SEQ ID NO: 1079274 - DNA, 15 bp, Homo sapiens
aaatgcaaaggagaa

SEQ ID NO: 1079275 - DNA, 15 bp, Homo sapiens
aaaatgcaaaggaga

SEQ ID NO: 1079276 - DNA, 15 bp, Homo sapiens
caaaatgcaaaggag

SEQ ID NO: 1079277 - DNA, 15 bp, Homo sapiens
ccaaaatgcaaagga

SEQ ID NO: 1079278 - DNA, 15 bp, Homo sapiens
gccaaaatgcaaagg

SEQ ID NO: 1079279 - DNA, 15 bp, Homo sapiens
ggccaaaatgcaaag

SEQ ID NO: 1079280 - DNA, 15 bp, Homo sapiens
gggccaaaatgcaaa

SEQ ID NO: 1079281 - DNA, 15 bp, Homo sapiens
ggggccaaaatgcaa

SEQ ID NO: 1079282 - DNA, 15 bp, Homo sapiens
tggggccaaaatgca

SEQ ID NO: 1079283 - DNA, 15 bp, Homo sapiens
ctggggccaaaatgc

SEQ ID NO: 1079284 - DNA, 15 bp, Homo sapiens
tctggggccaaaatg

SEQ ID NO: 1079285 - DNA, 15 bp, Homo sapiens
ttctggggccaaaat

SEQ ID NO: 1079286 - DNA, 15 bp, Homo sapiens
attctggggccaaaa

SEQ ID NO: 1079287 - DNA, 15 bp, Homo sapiens
aattctggggccaaa

SEQ ID NO: 1079288 - DNA, 15 bp, Homo sapiens
aaattctggggccaa

SEQ ID NO: 1079289 - DNA, 15 bp, Homo sapiens
taaattctggggcca

SEQ ID NO: 1079290 - DNA, 15 bp, Homo sapiens
ttaaattctggggcc

SEQ ID NO: 1079291 - DNA, 15 bp, Homo sapiens
tttaaattctggggc

SEQ ID NO: 1079292 - DNA, 15 bp, Homo sapiens
ttttaaattctgggg

SEQ ID NO: 1079293 - DNA, 15 bp, Homo sapiens
gttttaaattctggg

SEQ ID NO: 1079294 - DNA, 15 bp, Homo sapiens
tgttttaaattctgg

SEQ ID NO: 1079295 - DNA, 15 bp, Homo sapiens
ttgttttaaattctg

SEQ ID NO: 1079296 - DNA, 15 bp, Homo sapiens
tttgttttaaattct

SEQ ID NO: 1079297 - DNA, 15 bp, Homo sapiens
atttgttttaaattc

SEQ ID NO: 1079298 - DNA, 15 bp, Homo sapiens
catttgttttaaatt

SEQ ID NO: 1079299 - DNA, 15 bp, Homo sapiens
acatttgttttaaat

SEQ ID NO: 1079300 - DNA, 15 bp, Homo sapiens
aacatttgttttaaa

SEQ ID NO: 1079301 - DNA, 15 bp, Homo sapiens
gaacatttgttttaa

SEQ ID NO: 1079302 - DNA, 15 bp, Homo sapiens
tgaacatttgtttta

SEQ ID NO: 1079303 - DNA, 15 bp, Homo sapiens
ttgaacatttgtttt

SEQ ID NO: 1079304 - DNA, 15 bp, Homo sapiens
cttgaacatttgttt

SEQ ID NO: 1079305 - DNA, 15 bp, Homo sapiens
ccttgaacatttgtt

SEQ ID NO: 1079306 - DNA, 15 bp, Homo sapiens
tccttgaacatttgt

SEQ ID NO: 1079307 - DNA, 15 bp, Homo sapiens
ttccttgaacatttg

SEQ ID NO: 1079308 - DNA, 15 bp, Homo sapiens
tttccttgaacattt

SEQ ID NO: 1079309 - DNA, 15 bp, Homo sapiens
ttttccttgaacatt

SEQ ID NO: 1079310 - DNA, 15 bp, Homo sapiens
cttttccttgaacat

SEQ ID NO: 1079311 - DNA, 15 bp, Homo sapiens
gcttttccttgaaca

SEQ ID NO: 1079312 - DNA, 15 bp, Homo sapiens
tgcttttccttgaac

SEQ ID NO: 1079313 - DNA, 15 bp, Homo sapiens
ttgcttttccttgaa

SEQ ID NO: 1079314 - DNA, 15 bp, Homo sapiens
tttgcttttccttga

SEQ ID NO: 1079315 - DNA, 15 bp, Homo sapiens
atttgcttttccttg

SEQ ID NO: 1079316 - DNA, 15 bp, Homo sapiens
gatttgcttttcctt

SEQ ID NO: 1079317 - DNA, 15 bp, Homo sapiens
ggatttgcttttcct

SEQ ID NO: 1079318 - DNA, 15 bp, Homo sapiens
aggatttgcttttcc

SEQ ID NO: 1079319 - DNA, 15 bp, Homo sapiens
aaggatttgcttttc

SEQ ID NO: 1079320 - DNA, 15 bp, Homo sapiens
caaggatttgctttt

SEQ ID NO: 1079321 - DNA, 15 bp, Homo sapiens
tcaaggatttgcttt

SEQ ID NO: 1079322 - DNA, 15 bp, Homo sapiens
gtcaaggatttgctt

SEQ ID NO: 1079323 - DNA, 15 bp, Homo sapiens
agtcaaggatttgct

SEQ ID NO: 1079324 - DNA, 15 bp, Homo sapiens
cagtcaaggatttgc

SEQ ID NO: 1079325 - DNA, 15 bp, Homo sapiens
ccagtcaaggatttg

SEQ ID NO: 1079326 - DNA, 15 bp, Homo sapiens
tccagtcaaggattt

SEQ ID NO: 1079327 - DNA, 15 bp, Homo sapiens
atccagtcaaggatt

SEQ ID NO: 1079328 - DNA, 15 bp, Homo sapiens
tatccagtcaaggat

SEQ ID NO: 1079329 - DNA, 15 bp, Homo sapiens
ttatccagtcaagga

SEQ ID NO: 1079330 - DNA, 15 bp, Homo sapiens
tttatccagtcaagg

SEQ ID NO: 1079331 - DNA, 15 bp, Homo sapiens
ttttatccagtcaag

SEQ ID NO: 1079332 - DNA, 15 bp, Homo sapiens
tttttatccagtcaa

SEQ ID NO: 1079333 - DNA, 15 bp, Homo sapiens
gtttttatccagtca

SEQ ID NO: 1079334 - DNA, 15 bp, Homo sapiens
tgtttttatccagtc

SEQ ID NO: 1079335 - DNA, 15 bp, Homo sapiens
ctgtttttatccagt

SEQ ID NO: 1079336 - DNA, 15 bp, Homo sapiens
actgtttttatccag

SEQ ID NO: 1079337 - DNA, 15 bp, Homo sapiens
tactgtttttatcca

SEQ ID NO: 1079338 - DNA, 15 bp, Homo sapiens
ttactgtttttatcc

SEQ ID NO: 1079339 - DNA, 15 bp, Homo sapiens
tttactgtttttatc

SEQ ID NO: 1079340 - DNA, 15 bp, Homo sapiens
gtttactgtttttat

SEQ ID NO: 1079341 - DNA, 15 bp, Homo sapiens
tgtttactgttttta

SEQ ID NO: 1079342 - DNA, 15 bp, Homo sapiens
gtgtttactgttttt

SEQ ID NO: 1079343 - DNA, 15 bp, Homo sapiens
agtgtttactgtttt

SEQ ID NO: 1079344 - DNA, 15 bp, Homo sapiens
aagtgtttactgttt

SEQ ID NO: 1079345 - DNA, 15 bp, Homo sapiens
taagtgtttactgtt

SEQ ID NO: 1079346 - DNA, 15 bp, Homo sapiens
ctaagtgtttactgt

SEQ ID NO: 1079347 - DNA, 15 bp, Homo sapiens
cctaagtgtttactg

SEQ ID NO: 1079348 - DNA, 15 bp, Homo sapiens
ccctaagtgtttact

SEQ ID NO: 1079349 - DNA, 15 bp, Homo sapiens
tccctaagtgtttac

SEQ ID NO: 1079350 - DNA, 15 bp, Homo sapiens
gtccctaagtgttta

SEQ ID NO: 1079351 - DNA, 15 bp, Homo sapiens
tgtccctaagtgttt

SEQ ID NO: 1079352 - DNA, 15 bp, Homo sapiens
atgtccctaagtgtt

SEQ ID NO: 1079353 - DNA, 15 bp, Homo sapiens
aatgtccctaagtgt

SEQ ID NO: 1079354 - DNA, 15 bp, Homo sapiens
gaatgtccctaagtg

SEQ ID NO: 1079355 - DNA, 15 bp, Homo sapiens
tgaatgtccctaagt

SEQ ID NO: 1079356 - DNA, 15 bp, Homo sapiens
gtgaatgtccctaag

SEQ ID NO: 1079357 - DNA, 15 bp, Homo sapiens
ggtgaatgtccctaa

SEQ ID NO: 1079358 - DNA, 15 bp, Homo sapiens
aggtgaatgtcccta

SEQ ID NO: 1079359 - DNA, 15 bp, Homo sapiens
taggtgaatgtccct

SEQ ID NO: 1079360 - DNA, 15 bp, Homo sapiens
ttaggtgaatgtccc

SEQ ID NO: 1079361 - DNA, 15 bp, Homo sapiens
tttaggtgaatgtcc

SEQ ID NO: 1079362 - DNA, 15 bp, Homo sapiens
atttaggtgaatgtc

SEQ ID NO: 1079363 - DNA, 15 bp, Homo sapiens
aatttaggtgaatgt

SEQ ID NO: 1079364 - DNA, 15 bp, Homo sapiens
aaatttaggtgaatg

SEQ ID NO: 1079365 - DNA, 15 bp, Homo sapiens
taaatttaggtgaat

SEQ ID NO: 1079366 - DNA, 15 bp, Homo sapiens
ataaatttaggtgaa

SEQ ID NO: 1079367 - DNA, 15 bp, Homo sapiens
aataaatttaggtga

SEQ ID NO: 1079368 - DNA, 15 bp, Homo sapiens
caataaatttaggtg

SEQ ID NO: 1079369 - DNA, 15 bp, Homo sapiens
acaataaatttaggt

SEQ ID NO: 1079370 - DNA, 15 bp, Homo sapiens
aacaataaatttagg

SEQ ID NO: 1079371 - DNA, 15 bp, Homo sapiens
caacaataaatttag

SEQ ID NO: 1079372 - DNA, 15 bp, Homo sapiens
ccaacaataaattta

SEQ ID NO: 1079373 - DNA, 15 bp, Homo sapiens
gccaacaataaattt

SEQ ID NO: 1079374 - DNA, 15 bp, Homo sapiens
agccaacaataaatt

SEQ ID NO: 1079375 - DNA, 15 bp, Homo sapiens
aagccaacaataaat

SEQ ID NO: 1079376 - DNA, 15 bp, Homo sapiens
taagccaacaataaa

SEQ ID NO: 1079377 - DNA, 15 bp, Homo sapiens
ttaagccaacaataa

SEQ ID NO: 1079378 - DNA, 15 bp, Homo sapiens
tttaagccaacaata

SEQ ID NO: 1079379 - DNA, 15 bp, Homo sapiens
atttaagccaacaat

SEQ ID NO: 1079380 - DNA, 15 bp, Homo sapiens
catttaagccaacaa

SEQ ID NO: 1079381 - DNA, 15 bp, Homo sapiens
tcatttaagccaaca

SEQ ID NO: 1079382 - DNA, 15 bp, Homo sapiens
gtcatttaagccaac

SEQ ID NO: 1079383 - DNA, 15 bp, Homo sapiens
ggtcatttaagccaa

SEQ ID NO: 1079384 - DNA, 15 bp, Homo sapiens
tggtcatttaagcca

SEQ ID NO: 1079385 - DNA, 15 bp, Homo sapiens
ttggtcatttaagcc

SEQ ID NO: 1079386 - DNA, 15 bp, Homo sapiens
cttggtcatttaagc

SEQ ID NO: 1079387 - DNA, 15 bp, Homo sapiens
gcttggtcatttaag

SEQ ID NO: 1079388 - DNA, 15 bp, Homo sapiens
cgcttggtcatttaa

SEQ ID NO: 1079389 - DNA, 15 bp, Homo sapiens
acgcttggtcattta

SEQ ID NO: 1079390 - DNA, 15 bp, Homo sapiens
aacgcttggtcattt

SEQ ID NO: 1079391 - DNA, 15 bp, Homo sapiens
gaacgcttggtcatt

SEQ ID NO: 1079392 - DNA, 15 bp, Homo sapiens
ggaacgcttggtcat

SEQ ID NO: 1079393 - DNA, 15 bp, Homo sapiens
gggaacgcttggtca

SEQ ID NO: 1079394 - DNA, 15 bp, Homo sapiens
ggggaacgcttggtc

SEQ ID NO: 1079395 - DNA, 15 bp, Homo sapiens
tggggaacgcttggt

SEQ ID NO: 1079396 - DNA, 15 bp, Homo sapiens
gtggggaacgcttgg

SEQ ID NO: 1079397 - DNA, 15 bp, Homo sapiens
cgtggggaacgcttg

SEQ ID NO: 1079398 - DNA, 15 bp, Homo sapiens
acgtggggaacgctt

SEQ ID NO: 1079399 - DNA, 15 bp, Homo sapiens
gacgtggggaacgct

SEQ ID NO: 1079400 - DNA, 15 bp, Homo sapiens
ggacgtggggaacgc

SEQ ID NO: 1079401 - DNA, 15 bp, Homo sapiens
cggacgtggggaacg

SEQ ID NO: 1079402 - DNA, 15 bp, Homo sapiens
acggacgtggggaac

SEQ ID NO: 1079403 - DNA, 15 bp, Homo sapiens
aacggacgtggggaa

SEQ ID NO: 1079404 - DNA, 15 bp, Homo sapiens
aaacggacgtgggga

SEQ ID NO: 1079405 - DNA, 15 bp, Homo sapiens
gaaacggacgtgggg

SEQ ID NO: 1079406 - DNA, 15 bp, Homo sapiens
agaaacggacgtggg

SEQ ID NO: 1079407 - DNA, 15 bp, Homo sapiens
tagaaacggacgtgg

SEQ ID NO: 1079408 - DNA, 15 bp, Homo sapiens
ttagaaacggacgtg

SEQ ID NO: 1079409 - DNA, 15 bp, Homo sapiens
tttagaaacggacgt

SEQ ID NO: 1079410 - DNA, 15 bp, Homo sapiens
ctttagaaacggacg

SEQ ID NO: 1079411 - DNA, 15 bp, Homo sapiens
actttagaaacggac

SEQ ID NO: 1079412 - DNA, 15 bp, Homo sapiens
cactttagaaacgga

SEQ ID NO: 1079413 - DNA, 15 bp, Homo sapiens
ccactttagaaacgg

SEQ ID NO: 1079414 - DNA, 15 bp, Homo sapiens
cccactttagaaacg

SEQ ID NO: 1079415 - DNA, 15 bp, Homo sapiens
ccccactttagaaac

SEQ ID NO: 1079416 - DNA, 15 bp, Homo sapiens
accccactttagaaa

SEQ ID NO: 1079417 - DNA, 15 bp, Homo sapiens
taccccactttagaa

SEQ ID NO: 1079418 - DNA, 15 bp, Homo sapiens
ctaccccactttaga

SEQ ID NO: 1079419 - DNA, 15 bp, Homo sapiens
cctaccccactttag

SEQ ID NO: 1079420 - DNA, 15 bp, Homo sapiens
tcctaccccacttta

SEQ ID NO: 1079421 - DNA, 15 bp, Homo sapiens
atcctaccccacttt

SEQ ID NO: 1079422 - DNA, 15 bp, Homo sapiens
catcctaccccactt

SEQ ID NO: 1079423 - DNA, 15 bp, Homo sapiens
acatcctaccccact

SEQ ID NO: 1079424 - DNA, 15 bp, Homo sapiens
aacatcctaccccac

SEQ ID NO: 1079425 - DNA, 15 bp, Homo sapiens
aaacatcctacccca

SEQ ID NO: 1079426 - DNA, 15 bp, Homo sapiens
taaacatcctacccc

SEQ ID NO: 1079427 - DNA, 15 bp, Homo sapiens
ctaaacatcctaccc

SEQ ID NO: 1079428 - DNA, 15 bp, Homo sapiens
tctaaacatcctacc

SEQ ID NO: 1079429 - DNA, 15 bp, Homo sapiens
ttctaaacatcctac

SEQ ID NO: 1079430 - DNA, 15 bp, Homo sapiens
attctaaacatccta

SEQ ID NO: 1079431 - DNA, 15 bp, Homo sapiens
cattctaaacatcct

SEQ ID NO: 1079432 - DNA, 15 bp, Homo sapiens
gcattctaaacatcc

SEQ ID NO: 1079433 - DNA, 15 bp, Homo sapiens
tgcattctaaacatc

SEQ ID NO: 1079434 - DNA, 15 bp, Homo sapiens
atgcattctaaacat

SEQ ID NO: 1079435 - DNA, 15 bp, Homo sapiens
aatgcattctaaaca

SEQ ID NO: 1079436 - DNA, 15 bp, Homo sapiens
taatgcattctaaac

SEQ ID NO: 1079437 - DNA, 15 bp, Homo sapiens
gtaatgcattctaaa

SEQ ID NO: 1079438 - DNA, 15 bp, Homo sapiens
agtaatgcattctaa

SEQ ID NO: 1079439 - DNA, 15 bp, Homo sapiens
gagtaatgcattcta

SEQ ID NO: 1079440 - DNA, 15 bp, Homo sapiens
tgagtaatgcattct

SEQ ID NO: 1079441 - DNA, 15 bp, Homo sapiens
gtgagtaatgcattc

SEQ ID NO: 1079442 - DNA, 15 bp, Homo sapiens
tgtgagtaatgcatt

SEQ ID NO: 1079443 - DNA, 15 bp, Homo sapiens
gtgtgagtaatgcat

SEQ ID NO: 1079444 - DNA, 15 bp, Homo sapiens
tgtgtgagtaatgca

SEQ ID NO: 1079445 - DNA, 15 bp, Homo sapiens
ctgtgtgagtaatgc

SEQ ID NO: 1079446 - DNA, 15 bp, Homo sapiens
tctgtgtgagtaatg

SEQ ID NO: 1079447 - DNA, 15 bp, Homo sapiens
ttctgtgtgagtaat

SEQ ID NO: 1079448 - DNA, 15 bp, Homo sapiens
tttctgtgtgagtaa

SEQ ID NO: 1079449 - DNA, 15 bp, Homo sapiens
ctttctgtgtgagta

SEQ ID NO: 1079450 - DNA, 15 bp, Homo sapiens
tctttctgtgtgagt

SEQ ID NO: 1079451 - DNA, 15 bp, Homo sapiens
atctttctgtgtgag

SEQ ID NO: 1079452 - DNA, 15 bp, Homo sapiens
catctttctgtgtga

SEQ ID NO: 1079453 - DNA, 15 bp, Homo sapiens
ccatctttctgtgtg

SEQ ID NO: 1079454 - DNA, 15 bp, Homo sapiens
cccatctttctgtgt

SEQ ID NO: 1079455 - DNA, 15 bp, Homo sapiens
tcccatctttctgtg

SEQ ID NO: 1079456 - DNA, 15 bp, Homo sapiens
atcccatctttctgt

SEQ ID NO: 1079457 - DNA, 15 bp, Homo sapiens
aatcccatctttctg

SEQ ID NO: 1079458 - DNA, 15 bp, Homo sapiens
caatcccatctttct

SEQ ID NO: 1079459 - DNA, 15 bp, Homo sapiens
tcaatcccatctttc

SEQ ID NO: 1079460 - DNA, 15 bp, Homo sapiens
atcaatcccatcttt

SEQ ID NO: 1079461 - DNA, 15 bp, Homo sapiens
catcaatcccatctt

SEQ ID NO: 1079462 - DNA, 15 bp, Homo sapiens
tcatcaatcccatct

SEQ ID NO: 1079463 - DNA, 15 bp, Homo sapiens
ttcatcaatcccatc

SEQ ID NO: 1079464 - DNA, 15 bp, Homo sapiens
tttcatcaatcccat

SEQ ID NO: 1079465 - DNA, 15 bp, Homo sapiens
atttcatcaatccca

SEQ ID NO: 1079466 - DNA, 15 bp, Homo sapiens
gatttcatcaatccc

SEQ ID NO: 1079467 - DNA, 15 bp, Homo sapiens
tgatttcatcaatcc

SEQ ID NO: 1079468 - DNA, 15 bp, Homo sapiens
gtgatttcatcaatc

SEQ ID NO: 1079469 - DNA, 15 bp, Homo sapiens
tgtgatttcatcaat

SEQ ID NO: 1079470 - DNA, 15 bp, Homo sapiens
ttgtgatttcatcaa

SEQ ID NO: 1079471 - DNA, 15 bp, Homo sapiens
tttgtgatttcatca

SEQ ID NO: 1079472 - DNA, 15 bp, Homo sapiens
ttttgtgatttcatc

SEQ ID NO: 1079473 - DNA, 15 bp, Homo sapiens
gttttgtgatttcat

SEQ ID NO: 1079474 - DNA, 15 bp, Homo sapiens
agttttgtgatttca

SEQ ID NO: 1079475 - DNA, 15 bp, Homo sapiens
tagttttgtgatttc

SEQ ID NO: 1079476 - DNA, 15 bp, Homo sapiens
ttagttttgtgattt

SEQ ID NO: 1079477 - DNA, 15 bp, Homo sapiens
tttagttttgtgatt

SEQ ID NO: 1079478 - DNA, 15 bp, Homo sapiens
gtttagttttgtgat

SEQ ID NO: 1079479 - DNA, 15 bp, Homo sapiens
tgtttagttttgtga

SEQ ID NO: 1079480 - DNA, 15 bp, Homo sapiens
gtgtttagttttgtg

SEQ ID NO: 1079481 - DNA, 15 bp, Homo sapiens
tgtgtttagttttgt

SEQ ID NO: 1079482 - DNA, 15 bp, Homo sapiens
ctgtgtttagttttg

SEQ ID NO: 1079483 - DNA, 15 bp, Homo sapiens
cctgtgtttagtttt

SEQ ID NO: 1079484 - DNA, 15 bp, Homo sapiens
gcctgtgtttagttt

SEQ ID NO: 1079485 - DNA, 15 bp, Homo sapiens
agcctgtgtttagtt

SEQ ID NO: 1079486 - DNA, 15 bp, Homo sapiens
tagcctgtgtttagt

SEQ ID NO: 1079487 - DNA, 15 bp, Homo sapiens
atagcctgtgtttag

SEQ ID NO: 1079488 - DNA, 15 bp, Homo sapiens
tatagcctgtgttta

SEQ ID NO: 1079489 - DNA, 15 bp, Homo sapiens
ctatagcctgtgttt

SEQ ID NO: 1079490 - DNA, 15 bp, Homo sapiens
gctatagcctgtgtt

SEQ ID NO: 1079491 - DNA, 15 bp, Homo sapiens
tgctatagcctgtgt

SEQ ID NO: 1079492 - DNA, 15 bp, Homo sapiens
ttgctatagcctgtg

SEQ ID NO: 1079493 - DNA, 15 bp, Homo sapiens
gttgctatagcctgt

SEQ ID NO: 1079494 - DNA, 15 bp, Homo sapiens
agttgctatagcctg

SEQ ID NO: 1079495 - DNA, 15 bp, Homo sapiens
tagttgctatagcct

SEQ ID NO: 1079496 - DNA, 15 bp, Homo sapiens
atagttgctatagcc

SEQ ID NO: 1079497 - DNA, 15 bp, Homo sapiens
catagttgctatagc

SEQ ID NO: 1079498 - DNA, 15 bp, Homo sapiens
tcatagttgctatag

SEQ ID NO: 1079499 - DNA, 15 bp, Homo sapiens
ttcatagttgctata

SEQ ID NO: 1079500 - DNA, 15 bp, Homo sapiens
gttcatagttgctat

SEQ ID NO: 1079501 - DNA, 15 bp, Homo sapiens
tgttcatagttgcta

SEQ ID NO: 1079502 - DNA, 15 bp, Homo sapiens
ctgttcatagttgct

SEQ ID NO: 1079503 - DNA, 15 bp, Homo sapiens
gctgttcatagttgc

SEQ ID NO: 1079504 - DNA, 15 bp, Homo sapiens
ggctgttcatagttg

SEQ ID NO: 1079505 - DNA, 15 bp, Homo sapiens
aggctgttcatagtt

SEQ ID NO: 1079506 - DNA, 15 bp, Homo sapiens
aaggctgttcatagt

SEQ ID NO: 1079507 - DNA, 15 bp, Homo sapiens
gaaggctgttcatag

SEQ ID NO: 1079508 - DNA, 15 bp, Homo sapiens
tgaaggctgttcata

SEQ ID NO: 1079509 - DNA, 15 bp, Homo sapiens
gtgaaggctgttcat

SEQ ID NO: 1079510 - DNA, 15 bp, Homo sapiens
tgtgaaggctgttca

SEQ ID NO: 1079511 - DNA, 15 bp, Homo sapiens
ctgtgaaggctgttc

SEQ ID NO: 1079512 - DNA, 15 bp, Homo sapiens
tctgtgaaggctgtt

SEQ ID NO: 1079513 - DNA, 15 bp, Homo sapiens
ctctgtgaaggctgt

SEQ ID NO: 1079514 - DNA, 15 bp, Homo sapiens
tctctgtgaaggctg

SEQ ID NO: 1079515 - DNA, 15 bp, Homo sapiens
ttctctgtgaaggct

SEQ ID NO: 1079516 - DNA, 15 bp, Homo sapiens
attctctgtgaaggc

SEQ ID NO: 1079517 - DNA, 15 bp, Homo sapiens
cattctctgtgaagg

SEQ ID NO: 1079518 - DNA, 15 bp, Homo sapiens
tcattctctgtgaag

SEQ ID NO: 1079519 - DNA, 15 bp, Homo sapiens
ttcattctctgtgaa

SEQ ID NO: 1079520 - DNA, 15 bp, Homo sapiens
gttcattctctgtga

SEQ ID NO: 1079521 - DNA, 15 bp, Homo sapiens
tgttcattctctgtg

SEQ ID NO: 1079522 - DNA, 15 bp, Homo sapiens
ttgttcattctctgt

SEQ ID NO: 1079523 - DNA, 15 bp, Homo sapiens
attgttcattctctg

SEQ ID NO: 1079524 - DNA, 15 bp, Homo sapiens
tattgttcattctct

SEQ ID NO: 1079525 - DNA, 15 bp, Homo sapiens
ctattgttcattctc

SEQ ID NO: 1079526 - DNA, 15 bp, Homo sapiens
gctattgttcattct

SEQ ID NO: 1079527 - DNA, 15 bp, Homo sapiens
tgctattgttcattc

SEQ ID NO: 1079528 - DNA, 15 bp, Homo sapiens
gtgctattgttcatt

SEQ ID NO: 1079529 - DNA, 15 bp, Homo sapiens
tgtgctattgttcat

SEQ ID NO: 1079530 - DNA, 15 bp, Homo sapiens
ttgtgctattgttca

SEQ ID NO: 1079531 - DNA, 15 bp, Homo sapiens
tttgtgctattgttc

SEQ ID NO: 1079532 - DNA, 15 bp, Homo sapiens
atttgtgctattgtt

SEQ ID NO: 1079533 - DNA, 15 bp, Homo sapiens
catttgtgctattgt

SEQ ID NO: 1079534 - DNA, 15 bp, Homo sapiens
gcatttgtgctattg

SEQ ID NO: 1079535 - DNA, 15 bp, Homo sapiens
ggcatttgtgctatt

SEQ ID NO: 1079536 - DNA, 15 bp, Homo sapiens
tggcatttgtgctat

SEQ ID NO: 1079537 - DNA, 15 bp, Homo sapiens
ctggcatttgtgcta

SEQ ID NO: 1079538 - DNA, 15 bp, Homo sapiens
tctggcatttgtgct

SEQ ID NO: 1079539 - DNA, 15 bp, Homo sapiens
gtctggcatttgtgc

SEQ ID NO: 1079540 - DNA, 15 bp, Homo sapiens
agtctggcatttgtg

SEQ ID NO: 1079541 - DNA, 15 bp, Homo sapiens
cagtctggcatttgt

SEQ ID NO: 1079542 - DNA, 15 bp, Homo sapiens
gcagtctggcatttg

SEQ ID NO: 1079543 - DNA, 15 bp, Homo sapiens
tgcagtctggcattt

SEQ ID NO: 1079544 - DNA, 15 bp, Homo sapiens
ttgcagtctggcatt

SEQ ID NO: 1079545 - DNA, 15 bp, Homo sapiens
gttgcagtctggcat

SEQ ID NO: 1079546 - DNA, 15 bp, Homo sapiens
tgttgcagtctggca

SEQ ID NO: 1079547 - DNA, 15 bp, Homo sapiens
gtgttgcagtctggc

SEQ ID NO: 1079548 - DNA, 15 bp, Homo sapiens
agtgttgcagtctgg

SEQ ID NO: 1079549 - DNA, 15 bp, Homo sapiens
aagtgttgcagtctg

SEQ ID NO: 1079550 - DNA, 15 bp, Homo sapiens
gaagtgttgcagtct

SEQ ID NO: 1079551 - DNA, 15 bp, Homo sapiens
ggaagtgttgcagtc

SEQ ID NO: 1079552 - DNA, 15 bp, Homo sapiens
aggaagtgttgcagt

SEQ ID NO: 1079553 - DNA, 15 bp, Homo sapiens
taggaagtgttgcag

SEQ ID NO: 1079554 - DNA, 15 bp, Homo sapiens
ttaggaagtgttgca

SEQ ID NO: 1079555 - DNA, 15 bp, Homo sapiens
tttaggaagtgttgc

SEQ ID NO: 1079556 - DNA, 15 bp, Homo sapiens
ttttaggaagtgttg

SEQ ID NO: 1079557 - DNA, 15 bp, Homo sapiens
attttaggaagtgtt

SEQ ID NO: 1079558 - DNA, 15 bp, Homo sapiens
cattttaggaagtgt

SEQ ID NO: 1079559 - DNA, 15 bp, Homo sapiens
tcattttaggaagtg

SEQ ID NO: 1079560 - DNA, 15 bp, Homo sapiens
atcattttaggaagt

SEQ ID NO: 1079561 - DNA, 15 bp, Homo sapiens
catcattttaggaag

SEQ ID NO: 1079562 - DNA, 15 bp, Homo sapiens
acatcattttaggaa

SEQ ID NO: 1079563 - DNA, 15 bp, Homo sapiens
gacatcattttagga

SEQ ID NO: 1079564 - DNA, 15 bp, Homo sapiens
agacatcattttagg

SEQ ID NO: 1079565 - DNA, 15 bp, Homo sapiens
tagacatcattttag

SEQ ID NO: 1079566 - DNA, 15 bp, Homo sapiens
atagacatcatttta

SEQ ID NO: 1079567 - DNA, 15 bp, Homo sapiens
tatagacatcatttt

SEQ ID NO: 1079568 - DNA, 15 bp, Homo sapiens
ctatagacatcattt

SEQ ID NO: 1079569 - DNA, 15 bp, Homo sapiens
gctatagacatcatt

SEQ ID NO: 1079570 - DNA, 15 bp, Homo sapiens
agctatagacatcat

SEQ ID NO: 1079571 - DNA, 15 bp, Homo sapiens
tagctatagacatca

SEQ ID NO: 1079572 - DNA, 15 bp, Homo sapiens
atagctatagacatc

SEQ ID NO: 1079573 - DNA, 15 bp, Homo sapiens
gatagctatagacat

SEQ ID NO: 1079574 - DNA, 15 bp, Homo sapiens
agatagctatagaca

SEQ ID NO: 1079575 - DNA, 15 bp, Homo sapiens
cagatagctatagac

SEQ ID NO: 1079576 - DNA, 15 bp, Homo sapiens
acagatagctataga

SEQ ID NO: 1079577 - DNA, 15 bp, Homo sapiens
tacagatagctatag

SEQ ID NO: 1079578 - DNA, 15 bp, Homo sapiens
ttacagatagctata

SEQ ID NO: 1079579 - DNA, 15 bp, Homo sapiens
tttacagatagctat

SEQ ID NO: 1079580 - DNA, 15 bp, Homo sapiens
ctttacagatagcta

SEQ ID NO: 1079581 - DNA, 15 bp, Homo sapiens
tctttacagatagct

SEQ ID NO: 1079582 - DNA, 15 bp, Homo sapiens
ctctttacagatagc

SEQ ID NO: 1079583 - DNA, 15 bp, Homo sapiens
tctctttacagatag

SEQ ID NO: 1079584 - DNA, 15 bp, Homo sapiens
ctctctttacagata

SEQ ID NO: 1079585 - DNA, 15 bp, Homo sapiens
tctctctttacagat

SEQ ID NO: 1079586 - DNA, 15 bp, Homo sapiens
ttctctctttacaga

SEQ ID NO: 1079587 - DNA, 15 bp, Homo sapiens
attctctctttacag

SEQ ID NO: 1079588 - DNA, 15 bp, Homo sapiens
tattctctctttaca

SEQ ID NO: 1079589 - DNA, 15 bp, Homo sapiens
ttattctctctttac

SEQ ID NO: 1079590 - DNA, 15 bp, Homo sapiens
gttattctctcttta

SEQ ID NO: 1079591 - DNA, 15 bp, Homo sapiens
ggttattctctcttt

SEQ ID NO: 1079592 - DNA, 15 bp, Homo sapiens
cggttattctctctt

SEQ ID NO: 1079593 - DNA, 15 bp, Homo sapiens
ccggttattctctct

SEQ ID NO: 1079594 - DNA, 15 bp, Homo sapiens
gccggttattctctc

SEQ ID NO: 1079595 - DNA, 15 bp, Homo sapiens
ggccggttattctct

SEQ ID NO: 1079596 - DNA, 15 bp, Homo sapiens
tggccggttattctc

SEQ ID NO: 1079597 - DNA, 15 bp, Homo sapiens
ctggccggttattct

SEQ ID NO: 1079598 - DNA, 15 bp, Homo sapiens
cctggccggttattc

SEQ ID NO: 1079599 - DNA, 15 bp, Homo sapiens
acctggccggttatt

SEQ ID NO: 1079600 - DNA, 15 bp, Homo sapiens
cacctggccggttat

SEQ ID NO: 1079601 - DNA, 15 bp, Homo sapiens
gcacctggccggtta

SEQ ID NO: 1079602 - DNA, 15 bp, Homo sapiens
tgcacctggccggtt

SEQ ID NO: 1079603 - DNA, 15 bp, Homo sapiens
ctgcacctggccggt

SEQ ID NO: 1079604 - DNA, 15 bp, Homo sapiens
actgcacctggccgg

SEQ ID NO: 1079605 - DNA, 15 bp, Homo sapiens
cactgcacctggccg

SEQ ID NO: 1079606 - DNA, 15 bp, Homo sapiens
acctcggcctcctaa

SEQ ID NO: 1079607 - DNA, 15 bp, Homo sapiens
cacctcggcctccta

SEQ ID NO: 1079608 - DNA, 15 bp, Homo sapiens
ccacctcggcctcct

SEQ ID NO: 1079609 - DNA, 15 bp, Homo sapiens
atttctccatgttgg

SEQ ID NO: 1079610 - DNA, 15 bp, Homo sapiens
gatttctccatgttg

SEQ ID NO: 1079611 - DNA, 15 bp, Homo sapiens
ggatttctccatgtt

SEQ ID NO: 1079612 - DNA, 15 bp, Homo sapiens
aggatttctccatgt

SEQ ID NO: 1079613 - DNA, 15 bp, Homo sapiens
caggatttctccatg

SEQ ID NO: 1079614 - DNA, 15 bp, Homo sapiens
acaggatttctccat

SEQ ID NO: 1079615 - DNA, 15 bp, Homo sapiens
gacaggatttctcca

SEQ ID NO: 1079616 - DNA, 15 bp, Homo sapiens
agacaggatttctcc

SEQ ID NO: 1079617 - DNA, 15 bp, Homo sapiens
gagacaggatttctc

SEQ ID NO: 1079618 - DNA, 15 bp, Homo sapiens
agagacaggatttct

SEQ ID NO: 1079619 - DNA, 15 bp, Homo sapiens
tagagacaggatttc

SEQ ID NO: 1079620 - DNA, 15 bp, Homo sapiens
gtagagacaggattt

SEQ ID NO: 1079621 - DNA, 15 bp, Homo sapiens
agtagagacaggatt

SEQ ID NO: 1079622 - DNA, 15 bp, Homo sapiens
tagtagagacaggat

SEQ ID NO: 1079623 - DNA, 15 bp, Homo sapiens
ttagtagagacagga

SEQ ID NO: 1079624 - DNA, 15 bp, Homo sapiens
atattttttagtaga

SEQ ID NO: 1079625 - DNA, 15 bp, Homo sapiens
catattttttagtag

SEQ ID NO: 1079626 - DNA, 15 bp, Homo sapiens
tcatattttttagta

SEQ ID NO: 1079627 - DNA, 15 bp, Homo sapiens
ttcatattttttagt

SEQ ID NO: 1079628 - DNA, 15 bp, Homo sapiens
tttcatattttttag

SEQ ID NO: 1079629 - DNA, 15 bp, Homo sapiens
atttcatatttttta

SEQ ID NO: 1079630 - DNA, 15 bp, Homo sapiens
aatttcatatttttt

SEQ ID NO: 1079631 - DNA, 15 bp, Homo sapiens
taatttcatattttt

SEQ ID NO: 1079632 - DNA, 15 bp, Homo sapiens
ctaatttcatatttt

SEQ ID NO: 1079633 - DNA, 15 bp, Homo sapiens
gctaatttcatattt

SEQ ID NO: 1079634 - DNA, 15 bp, Homo sapiens
ggctaatttcatatt

SEQ ID NO: 1079635 - DNA, 15 bp, Homo sapiens
tggctaatttcatat

SEQ ID NO: 1079636 - DNA, 15 bp, Homo sapiens
ctggctaatttcata

SEQ ID NO: 1079637 - DNA, 15 bp, Homo sapiens
cctggctaatttcat

SEQ ID NO: 1079638 - DNA, 15 bp, Homo sapiens
gcctggctaatttca

SEQ ID NO: 1079639 - DNA, 15 bp, Homo sapiens
tgcctggctaatttc

SEQ ID NO: 1079640 - DNA, 15 bp, Homo sapiens
ggcatgcgccaccat

SEQ ID NO: 1079641 - DNA, 15 bp, Homo sapiens
tgattacaggcatgc

SEQ ID NO: 1079642 - DNA, 15 bp, Homo sapiens
gtgattacaggcatg

SEQ ID NO: 1079643 - DNA, 15 bp, Homo sapiens
tgtgattacaggcat

SEQ ID NO: 1079644 - DNA, 15 bp, Homo sapiens
gagtagctgtgatta

SEQ ID NO: 1079645 - DNA, 15 bp, Homo sapiens
tgagtagctgtgatt

SEQ ID NO: 1079646 - DNA, 15 bp, Homo sapiens
ctgagtagctgtgat

SEQ ID NO: 1079647 - DNA, 15 bp, Homo sapiens
cctgagtagctgtga

SEQ ID NO: 1079648 - DNA, 15 bp, Homo sapiens
tcctgagtagctgtg

SEQ ID NO: 1079649 - DNA, 15 bp, Homo sapiens
ctcctgagtagctgt

SEQ ID NO: 1079650 - DNA, 15 bp, Homo sapiens
tcttagcctcctgag

SEQ ID NO: 1079651 - DNA, 15 bp, Homo sapiens
gtcttagcctcctga

SEQ ID NO: 1079652 - DNA, 15 bp, Homo sapiens
tgtcttagcctcctg

SEQ ID NO: 1079653 - DNA, 15 bp, Homo sapiens
ctgtcttagcctcct

SEQ ID NO: 1079654 - DNA, 15 bp, Homo sapiens
cctgtcttagcctcc

SEQ ID NO: 1079655 - DNA, 15 bp, Homo sapiens
tcctgtcttagcctc

SEQ ID NO: 1079656 - DNA, 15 bp, Homo sapiens
ctcctgtcttagcct

SEQ ID NO: 1079657 - DNA, 15 bp, Homo sapiens
tctcctgtcttagcc

SEQ ID NO: 1079658 - DNA, 15 bp, Homo sapiens
ttctcctgtcttagc

SEQ ID NO: 1079659 - DNA, 15 bp, Homo sapiens
attctcctgtcttag

SEQ ID NO: 1079660 - DNA, 15 bp, Homo sapiens
gattctcctgtctta

SEQ ID NO: 1079661 - DNA, 15 bp, Homo sapiens
ggattctcctgtctt

SEQ ID NO: 1079662 - DNA, 15 bp, Homo sapiens
gggattctcctgtct

SEQ ID NO: 1079663 - DNA, 15 bp, Homo sapiens
agggattctcctgtc

SEQ ID NO: 1079664 - DNA, 15 bp, Homo sapiens
aagggattctcctgt

SEQ ID NO: 1079665 - DNA, 15 bp, Homo sapiens
cctgggttcaaggga

SEQ ID NO: 1079666 - DNA, 15 bp, Homo sapiens
tcctgggttcaaggg

SEQ ID NO: 1079667 - DNA, 15 bp, Homo sapiens
ctcctgggttcaagg

SEQ ID NO: 1079668 - DNA, 15 bp, Homo sapiens
cacaacctccgcctc

SEQ ID NO: 1079669 - DNA, 15 bp, Homo sapiens
ccacaacctccgcct

SEQ ID NO: 1079670 - DNA, 15 bp, Homo sapiens
accacaacctccgcc

SEQ ID NO: 1079671 - DNA, 15 bp, Homo sapiens
caccacaacctccgc

SEQ ID NO: 1079672 - DNA, 15 bp, Homo sapiens
tcaccacaacctccg

SEQ ID NO: 1079673 - DNA, 15 bp, Homo sapiens
actcaccacaacctc

SEQ ID NO: 1079674 - DNA, 15 bp, Homo sapiens
cactcaccacaacct

SEQ ID NO: 1079675 - DNA, 15 bp, Homo sapiens
ccactcaccacaacc

SEQ ID NO: 1079676 - DNA, 15 bp, Homo sapiens
tccactcaccacaac

SEQ ID NO: 1079677 - DNA, 15 bp, Homo sapiens
ctccactcaccacaa

SEQ ID NO: 1079678 - DNA, 15 bp, Homo sapiens
tctccactcaccaca

SEQ ID NO: 1079679 - DNA, 15 bp, Homo sapiens
atctccactcaccac

SEQ ID NO: 1079680 - DNA, 15 bp, Homo sapiens
tatctccactcacca

SEQ ID NO: 1079681 - DNA, 15 bp, Homo sapiens
gtatctccactcacc

SEQ ID NO: 1079682 - DNA, 15 bp, Homo sapiens
cgtatctccactcac

SEQ ID NO: 1079683 - DNA, 15 bp, Homo sapiens
gcgtatctccactca

SEQ ID NO: 1079684 - DNA, 15 bp, Homo sapiens
ggcgtatctccactc

SEQ ID NO: 1079685 - DNA, 15 bp, Homo sapiens
tggcgtatctccact

SEQ ID NO: 1079686 - DNA, 15 bp, Homo sapiens
atggcgtatctccac

SEQ ID NO: 1079687 - DNA, 15 bp, Homo sapiens
aatggcgtatctcca

SEQ ID NO: 1079688 - DNA, 15 bp, Homo sapiens
caatggcgtatctcc

SEQ ID NO: 1079689 - DNA, 15 bp, Homo sapiens
gcaatggcgtatctc

SEQ ID NO: 1079690 - DNA, 15 bp, Homo sapiens
tgcaatggcgtatct

SEQ ID NO: 1079691 - DNA, 15 bp, Homo sapiens
gtgcaatggcgtatc

SEQ ID NO: 1079692 - DNA, 15 bp, Homo sapiens
agtgcaatggcgtat

SEQ ID NO: 1079693 - DNA, 15 bp, Homo sapiens
gagtgcaatggcgta

SEQ ID NO: 1079694 - DNA, 15 bp, Homo sapiens
gttgttgcccaggct

SEQ ID NO: 1079695 - DNA, 15 bp, Homo sapiens
tgttgttgcccaggc

SEQ ID NO: 1079696 - DNA, 15 bp, Homo sapiens
ctgttgttgcccagg

SEQ ID NO: 1079697 - DNA, 15 bp, Homo sapiens
gctgttgttgcccag

SEQ ID NO: 1079698 - DNA, 15 bp, Homo sapiens
cgctgttgttgccca

SEQ ID NO: 1079699 - DNA, 15 bp, Homo sapiens
tcgctgttgttgccc

SEQ ID NO: 1079700 - DNA, 15 bp, Homo sapiens
ttcgctgttgttgcc

SEQ ID NO: 1079701 - DNA, 15 bp, Homo sapiens
tttcgctgttgttgc

SEQ ID NO: 1079702 - DNA, 15 bp, Homo sapiens
gtttcgctgttgttg

SEQ ID NO: 1079703 - DNA, 15 bp, Homo sapiens
agtttcgctgttgtt

SEQ ID NO: 1079704 - DNA, 15 bp, Homo sapiens
gagtttcgctgttgt

SEQ ID NO: 1079705 - DNA, 15 bp, Homo sapiens
ggagtttcgctgttg

SEQ ID NO: 1079706 - DNA, 15 bp, Homo sapiens
cggagtttcgctgtt

SEQ ID NO: 1079707 - DNA, 15 bp, Homo sapiens
acggagtttcgctgt

SEQ ID NO: 1079708 - DNA, 15 bp, Homo sapiens
gacggagtttcgctg

SEQ ID NO: 1079709 - DNA, 15 bp, Homo sapiens
ctcttttttttttga

SEQ ID NO: 1079710 - DNA, 15 bp, Homo sapiens
ttctctctttttttt

SEQ ID NO: 1079711 - DNA, 15 bp, Homo sapiens
attctctcttttttt

SEQ ID NO: 1079712 - DNA, 15 bp, Homo sapiens
tattctctctttttt

SEQ ID NO: 1079713 - DNA, 15 bp, Homo sapiens
ttattctctcttttt

SEQ ID NO: 1079714 - DNA, 15 bp, Homo sapiens
gttattctctctttt

SEQ ID NO: 1079715 - DNA, 15 bp, Homo sapiens
tggttattctctctt

SEQ ID NO: 1079716 - DNA, 15 bp, Homo sapiens
ttggttattctctct

SEQ ID NO: 1079717 - DNA, 15 bp, Homo sapiens
gttggttattctctc

SEQ ID NO: 1079718 - DNA, 15 bp, Homo sapiens
agttggttattctct

SEQ ID NO: 1079719 - DNA, 15 bp, Homo sapiens
gagttggttattctc

SEQ ID NO: 1079720 - DNA, 15 bp, Homo sapiens
ggagttggttattct

SEQ ID NO: 1079721 - DNA, 15 bp, Homo sapiens
aggagttggttattc

SEQ ID NO: 1079722 - DNA, 15 bp, Homo sapiens
taggagttggttatt

SEQ ID NO: 1079723 - DNA, 15 bp, Homo sapiens
ttaggagttggttat

SEQ ID NO: 1079724 - DNA, 15 bp, Homo sapiens
cttaggagttggtta

SEQ ID NO: 1079725 - DNA, 15 bp, Homo sapiens
tcttaggagttggtt

SEQ ID NO: 1079726 - DNA, 15 bp, Homo sapiens
gtcttaggagttggt

SEQ ID NO: 1079727 - DNA, 15 bp, Homo sapiens
tgtcttaggagttgg

SEQ ID NO: 1079728 - DNA, 15 bp, Homo sapiens
atgtcttaggagttg

SEQ ID NO: 1079729 - DNA, 15 bp, Homo sapiens
gatgtcttaggagtt

SEQ ID NO: 1079730 - DNA, 15 bp, Homo sapiens
ggatgtcttaggagt

SEQ ID NO: 1079731 - DNA, 15 bp, Homo sapiens
tggatgtcttaggag

SEQ ID NO: 1079732 - DNA, 15 bp, Homo sapiens
atggatgtcttagga

SEQ ID NO: 1079733 - DNA, 15 bp, Homo sapiens
aatggatgtcttagg

SEQ ID NO: 1079734 - DNA, 15 bp, Homo sapiens
taatggatgtcttag

SEQ ID NO: 1079735 - DNA, 15 bp, Homo sapiens
ttaatggatgtctta

SEQ ID NO: 1079736 - DNA, 15 bp, Homo sapiens
cttaatggatgtctt

SEQ ID NO: 1079737 - DNA, 15 bp, Homo sapiens
tcttaatggatgtct

SEQ ID NO: 1079738 - DNA, 15 bp, Homo sapiens
gtcttaatggatgtc

SEQ ID NO: 1079739 - DNA, 15 bp, Homo sapiens
tgtcttaatggatgt

SEQ ID NO: 1079740 - DNA, 15 bp, Homo sapiens
ctgtcttaatggatg

SEQ ID NO: 1079741 - DNA, 15 bp, Homo sapiens
tctgtcttaatggat

SEQ ID NO: 1079742 - DNA, 15 bp, Homo sapiens
gtctgtcttaatgga

SEQ ID NO: 1079743 - DNA, 15 bp, Homo sapiens
cgtctgtcttaatgg

SEQ ID NO: 1079744 - DNA, 15 bp, Homo sapiens
gcgtctgtcttaatg

SEQ ID NO: 1079745 - DNA, 15 bp, Homo sapiens
tgcgtctgtcttaat

SEQ ID NO: 1079746 - DNA, 15 bp, Homo sapiens
gtgcgtctgtcttaa

SEQ ID NO: 1079747 - DNA, 15 bp, Homo sapiens
tgtgcgtctgtctta

SEQ ID NO: 1079748 - DNA, 15 bp, Homo sapiens
ctgtgcgtctgtctt

SEQ ID NO: 1079749 - DNA, 15 bp, Homo sapiens
actgtgcgtctgtct

SEQ ID NO: 1079750 - DNA, 15 bp, Homo sapiens
gactgtgcgtctgtc

SEQ ID NO: 1079751 - DNA, 15 bp, Homo sapiens
agactgtgcgtctgt

SEQ ID NO: 1079752 - DNA, 15 bp, Homo sapiens
cagactgtgcgtctg

SEQ ID NO: 1079753 - DNA, 15 bp, Homo sapiens
acagactgtgcgtct

SEQ ID NO: 1079754 - DNA, 15 bp, Homo sapiens
gacagactgtgcgtc

SEQ ID NO: 1079755 - DNA, 15 bp, Homo sapiens
tgacagactgtgcgt

SEQ ID NO: 1079756 - DNA, 15 bp, Homo sapiens
ttgacagactgtgcg

SEQ ID NO: 1079757 - DNA, 15 bp, Homo sapiens
gttgacagactgtgc

SEQ ID NO: 1079758 - DNA, 15 bp, Homo sapiens
agttgacagactgtg

SEQ ID NO: 1079759 - DNA, 15 bp, Homo sapiens
aagttgacagactgt

SEQ ID NO: 1079760 - DNA, 15 bp, Homo sapiens
aaagttgacagactg

SEQ ID NO: 1079761 - DNA, 15 bp, Homo sapiens
caaagttgacagact

SEQ ID NO: 1079762 - DNA, 15 bp, Homo sapiens
ccaaagttgacagac

SEQ ID NO: 1079763 - DNA, 15 bp, Homo sapiens
accaaagttgacaga

SEQ ID NO: 1079764 - DNA, 15 bp, Homo sapiens
aaccaaagttgacag

SEQ ID NO: 1079765 - DNA, 15 bp, Homo sapiens
taaccaaagttgaca

SEQ ID NO: 1079766 - DNA, 15 bp, Homo sapiens
ctaaccaaagttgac

SEQ ID NO: 1079767 - DNA, 15 bp, Homo sapiens
tctaaccaaagttga

SEQ ID NO: 1079768 - DNA, 15 bp, Homo sapiens
ttctaaccaaagttg

SEQ ID NO: 1079769 - DNA, 15 bp, Homo sapiens
attctaaccaaagtt

SEQ ID NO: 1079770 - DNA, 15 bp, Homo sapiens
tattctaaccaaagt

SEQ ID NO: 1079771 - DNA, 15 bp, Homo sapiens
gtattctaaccaaag

SEQ ID NO: 1079772 - DNA, 15 bp, Homo sapiens
ggtattctaaccaaa

SEQ ID NO: 1079773 - DNA, 15 bp, Homo sapiens
tggtattctaaccaa

SEQ ID NO: 1079774 - DNA, 15 bp, Homo sapiens
ttggtattctaacca

SEQ ID NO: 1079775 - DNA, 15 bp, Homo sapiens
tttggtattctaacc

SEQ ID NO: 1079776 - DNA, 15 bp, Homo sapiens
gtttggtattctaac

SEQ ID NO: 1079777 - DNA, 15 bp, Homo sapiens
ggtttggtattctaa

SEQ ID NO: 1079778 - DNA, 15 bp, Homo sapiens
aggtttggtattcta

SEQ ID NO: 1079779 - DNA, 15 bp, Homo sapiens
aaggtttggtattct

SEQ ID NO: 1079780 - DNA, 15 bp, Homo sapiens
taaggtttggtattc

SEQ ID NO: 1079781 - DNA, 15 bp, Homo sapiens
ttaaggtttggtatt

SEQ ID NO: 1079782 - DNA, 15 bp, Homo sapiens
cttaaggtttggtat

SEQ ID NO: 1079783 - DNA, 15 bp, Homo sapiens
tcttaaggtttggta

SEQ ID NO: 1079784 - DNA, 15 bp, Homo sapiens
atcttaaggtttggt

SEQ ID NO: 1079785 - DNA, 15 bp, Homo sapiens
gatcttaaggtttgg

SEQ ID NO: 1079786 - DNA, 15 bp, Homo sapiens
tgatcttaaggtttg

SEQ ID NO: 1079787 - DNA, 15 bp, Homo sapiens
ctgatcttaaggttt

SEQ ID NO: 1079788 - DNA, 15 bp, Homo sapiens
cctgatcttaaggtt

SEQ ID NO: 1079789 - DNA, 15 bp, Homo sapiens
acctgatcttaaggt

SEQ ID NO: 1079790 - DNA, 15 bp, Homo sapiens
tacctgatcttaagg

SEQ ID NO: 1079791 - DNA, 15 bp, Homo sapiens
ttacctgatcttaag

SEQ ID NO: 1079792 - DNA, 15 bp, Homo sapiens
attacctgatcttaa

SEQ ID NO: 1079793 - DNA, 15 bp, Homo sapiens
cattacctgatctta

SEQ ID NO: 1079794 - DNA, 15 bp, Homo sapiens
gcattacctgatctt

SEQ ID NO: 1079795 - DNA, 15 bp, Homo sapiens
agcattacctgatct

SEQ ID NO: 1079796 - DNA, 15 bp, Homo sapiens
aagcattacctgatc

SEQ ID NO: 1079797 - DNA, 15 bp, Homo sapiens
aaagcattacctgat

SEQ ID NO: 1079798 - DNA, 15 bp, Homo sapiens
aaaagcattacctga

SEQ ID NO: 1079799 - DNA, 15 bp, Homo sapiens
caaaagcattacctg

SEQ ID NO: 1079800 - DNA, 15 bp, Homo sapiens
acaaaagcattacct

SEQ ID NO: 1079801 - DNA, 15 bp, Homo sapiens
cacaaaagcattacc

SEQ ID NO: 1079802 - DNA, 15 bp, Homo sapiens
gcacaaaagcattac

SEQ ID NO: 1079803 - DNA, 15 bp, Homo sapiens
tgcacaaaagcatta

SEQ ID NO: 1079804 - DNA, 15 bp, Homo sapiens
atgcacaaaagcatt

SEQ ID NO: 1079805 - DNA, 15 bp, Homo sapiens
tatgcacaaaagcat

SEQ ID NO: 1079806 - DNA, 15 bp, Homo sapiens
ctatgcacaaaagca

SEQ ID NO: 1079807 - DNA, 15 bp, Homo sapiens
cctatgcacaaaagc

SEQ ID NO: 1079808 - DNA, 15 bp, Homo sapiens
gcctatgcacaaaag

SEQ ID NO: 1079809 - DNA, 15 bp, Homo sapiens
agcctatgcacaaaa

SEQ ID NO: 1079810 - DNA, 15 bp, Homo sapiens
cagcctatgcacaaa

SEQ ID NO: 1079811 - DNA, 15 bp, Homo sapiens
acagcctatgcacaa

SEQ ID NO: 1079812 - DNA, 15 bp, Homo sapiens
gacagcctatgcaca

SEQ ID NO: 1079813 - DNA, 15 bp, Homo sapiens
tgacagcctatgcac

SEQ ID NO: 1079814 - DNA, 15 bp, Homo sapiens
gtgacagcctatgca

SEQ ID NO: 1079815 - DNA, 15 bp, Homo sapiens
tgtgacagcctatgc

SEQ ID NO: 1079816 - DNA, 15 bp, Homo sapiens
ttgtgacagcctatg

SEQ ID NO: 1079817 - DNA, 15 bp, Homo sapiens
gttgtgacagcctat

SEQ ID NO: 1079818 - DNA, 15 bp, Homo sapiens
agttgtgacagccta

SEQ ID NO: 1079819 - DNA, 15 bp, Homo sapiens
tagttgtgacagcct

SEQ ID NO: 1079820 - DNA, 15 bp, Homo sapiens
atagttgtgacagcc

SEQ ID NO: 1079821 - DNA, 15 bp, Homo sapiens
tatagttgtgacagc

SEQ ID NO: 1079822 - DNA, 15 bp, Homo sapiens
atatagttgtgacag

SEQ ID NO: 1079823 - DNA, 15 bp, Homo sapiens
aatatagttgtgaca

SEQ ID NO: 1079824 - DNA, 15 bp, Homo sapiens
taatatagttgtgac

SEQ ID NO: 1079825 - DNA, 15 bp, Homo sapiens
gtaatatagttgtga

SEQ ID NO: 1079826 - DNA, 15 bp, Homo sapiens
tgtaatatagttgtg

SEQ ID NO: 1079827 - DNA, 15 bp, Homo sapiens
atgtaatatagttgt

SEQ ID NO: 1079828 - DNA, 15 bp, Homo sapiens
gatgtaatatagttg

SEQ ID NO: 1079829 - DNA, 15 bp, Homo sapiens
ggatgtaatatagtt

SEQ ID NO: 1079830 - DNA, 15 bp, Homo sapiens
tggatgtaatatagt

SEQ ID NO: 1079831 - DNA, 15 bp, Homo sapiens
gtggatgtaatatag

SEQ ID NO: 1079832 - DNA, 15 bp, Homo sapiens
cgtggatgtaatata

SEQ ID NO: 1079833 - DNA, 15 bp, Homo sapiens
acgtggatgtaatat

SEQ ID NO: 1079834 - DNA, 15 bp, Homo sapiens
aacgtggatgtaata

SEQ ID NO: 1079835 - DNA, 15 bp, Homo sapiens
taacgtggatgtaat

SEQ ID NO: 1079836 - DNA, 15 bp, Homo sapiens
ctaacgtggatgtaa

SEQ ID NO: 1079837 - DNA, 15 bp, Homo sapiens
gctaacgtggatgta

SEQ ID NO: 1079838 - DNA, 15 bp, Homo sapiens
tgctaacgtggatgt

SEQ ID NO: 1079839 - DNA, 15 bp, Homo sapiens
atgctaacgtggatg

SEQ ID NO: 1079840 - DNA, 15 bp, Homo sapiens
gatgctaacgtggat

SEQ ID NO: 1079841 - DNA, 15 bp, Homo sapiens
ggatgctaacgtgga

SEQ ID NO: 1079842 - DNA, 15 bp, Homo sapiens
tggatgctaacgtgg

SEQ ID NO: 1079843 - DNA, 15 bp, Homo sapiens
atggatgctaacgtg

SEQ ID NO: 1079844 - DNA, 15 bp, Homo sapiens
catggatgctaacgt

SEQ ID NO: 1079845 - DNA, 15 bp, Homo sapiens
acatggatgctaacg

SEQ ID NO: 1079846 - DNA, 15 bp, Homo sapiens
cacatggatgctaac

SEQ ID NO: 1079847 - DNA, 15 bp, Homo sapiens
tcacatggatgctaa

SEQ ID NO: 1079848 - DNA, 15 bp, Homo sapiens
ttcacatggatgcta

SEQ ID NO: 1079849 - DNA, 15 bp, Homo sapiens
tttcacatggatgct

SEQ ID NO: 1079850 - DNA, 15 bp, Homo sapiens
gtttcacatggatgc

SEQ ID NO: 1079851 - DNA, 15 bp, Homo sapiens
agtttcacatggatg

SEQ ID NO: 1079852 - DNA, 15 bp, Homo sapiens
tagtttcacatggat

SEQ ID NO: 1079853 - DNA, 15 bp, Homo sapiens
ctagtttcacatgga

SEQ ID NO: 1079854 - DNA, 15 bp, Homo sapiens
cctagtttcacatgg

SEQ ID NO: 1079855 - DNA, 15 bp, Homo sapiens
acctagtttcacatg

SEQ ID NO: 1079856 - DNA, 15 bp, Homo sapiens
tacctagtttcacat

SEQ ID NO: 1079857 - DNA, 15 bp, Homo sapiens
atacctagtttcaca

SEQ ID NO: 1079858 - DNA, 15 bp, Homo sapiens
gatacctagtttcac

SEQ ID NO: 1079859 - DNA, 15 bp, Homo sapiens
tgatacctagtttca

SEQ ID NO: 1079860 - DNA, 15 bp, Homo sapiens
ctgatacctagtttc

SEQ ID NO: 1079861 - DNA, 15 bp, Homo sapiens
cctgatacctagttt

SEQ ID NO: 1079862 - DNA, 15 bp, Homo sapiens
cccctgatacctagt

SEQ ID NO: 1079863 - DNA, 15 bp, Homo sapiens
gcccctgatacctag

SEQ ID NO: 1079864 - DNA, 15 bp, Homo sapiens
agcccctgataccta

SEQ ID NO: 1079865 - DNA, 15 bp, Homo sapiens
aagcccctgatacct

SEQ ID NO: 1079866 - DNA, 15 bp, Homo sapiens
caagcccctgatacc

SEQ ID NO: 1079867 - DNA, 15 bp, Homo sapiens
tcaagcccctgatac

SEQ ID NO: 1079868 - DNA, 15 bp, Homo sapiens
gtcaagcccctgata

SEQ ID NO: 1079869 - DNA, 15 bp, Homo sapiens
ggtcaagcccctgat

SEQ ID NO: 1079870 - DNA, 15 bp, Homo sapiens
tggtcaagcccctga

SEQ ID NO: 1079871 - DNA, 15 bp, Homo sapiens
ttggtcaagcccctg

SEQ ID NO: 1079872 - DNA, 15 bp, Homo sapiens
tttggtcaagcccct

SEQ ID NO: 1079873 - DNA, 15 bp, Homo sapiens
atttggtcaagcccc

SEQ ID NO: 1079874 - DNA, 15 bp, Homo sapiens
catttggtcaagccc

SEQ ID NO: 1079875 - DNA, 15 bp, Homo sapiens
tcatttggtcaagcc

SEQ ID NO: 1079876 - DNA, 15 bp, Homo sapiens
ctcatttggtcaagc

SEQ ID NO: 1079877 - DNA, 15 bp, Homo sapiens
tctcatttggtcaag

SEQ ID NO: 1079878 - DNA, 15 bp, Homo sapiens
atctcatttggtcaa

SEQ ID NO: 1079879 - DNA, 15 bp, Homo sapiens
catctcatttggtca

SEQ ID NO: 1079880 - DNA, 15 bp, Homo sapiens
ccatctcatttggtc

SEQ ID NO: 1079881 - DNA, 15 bp, Homo sapiens
accatctcatttggt

SEQ ID NO: 1079882 - DNA, 15 bp, Homo sapiens
taccatctcatttgg

SEQ ID NO: 1079883 - DNA, 15 bp, Homo sapiens
ttaccatctcatttg

SEQ ID NO: 1079884 - DNA, 15 bp, Homo sapiens
gttaccatctcattt

SEQ ID NO: 1079885 - DNA, 15 bp, Homo sapiens
tgttaccatctcatt

SEQ ID NO: 1079886 - DNA, 15 bp, Homo sapiens
atgttaccatctcat

SEQ ID NO: 1079887 - DNA, 15 bp, Homo sapiens
gatgttaccatctca

SEQ ID NO: 1079888 - DNA, 15 bp, Homo sapiens
ggatgttaccatctc

SEQ ID NO: 1079889 - DNA, 15 bp, Homo sapiens
tggatgttaccatct

SEQ ID NO: 1079890 - DNA, 15 bp, Homo sapiens
ctggatgttaccatc

SEQ ID NO: 1079891 - DNA, 15 bp, Homo sapiens
cctggatgttaccat

SEQ ID NO: 1079892 - DNA, 15 bp, Homo sapiens
ccctggatgttacca

SEQ ID NO: 1079893 - DNA, 15 bp, Homo sapiens
gccctggatgttacc

SEQ ID NO: 1079894 - DNA, 15 bp, Homo sapiens
ggccctggatgttac

SEQ ID NO: 1079895 - DNA, 15 bp, Homo sapiens
aggccctggatgtta

SEQ ID NO: 1079896 - DNA, 15 bp, Homo sapiens
taggccctggatgtt

SEQ ID NO: 1079897 - DNA, 15 bp, Homo sapiens
ttaggccctggatgt

SEQ ID NO: 1079898 - DNA, 15 bp, Homo sapiens
tttaggccctggatg

SEQ ID NO: 1079899 - DNA, 15 bp, Homo sapiens
ctttaggccctggat

SEQ ID NO: 1079900 - DNA, 15 bp, Homo sapiens
tctttaggccctgga

SEQ ID NO: 1079901 - DNA, 15 bp, Homo sapiens
gtctttaggccctgg

SEQ ID NO: 1079902 - DNA, 15 bp, Homo sapiens
tgtctttaggccctg

SEQ ID NO: 1079903 - DNA, 15 bp, Homo sapiens
gtgtctttaggccct

SEQ ID NO: 1079904 - DNA, 15 bp, Homo sapiens
ggtgtctttaggccc

SEQ ID NO: 1079905 - DNA, 15 bp, Homo sapiens
aggtgtctttaggcc

SEQ ID NO: 1079906 - DNA, 15 bp, Homo sapiens
gaggtgtctttaggc

SEQ ID NO: 1079907 - DNA, 15 bp, Homo sapiens
agaggtgtctttagg

SEQ ID NO: 1079908 - DNA, 15 bp, Homo sapiens
aagaggtgtctttag

SEQ ID NO: 1079909 - DNA, 15 bp, Homo sapiens
caagaggtgtcttta

SEQ ID NO: 1079910 - DNA, 15 bp, Homo sapiens
acaagaggtgtcttt

SEQ ID NO: 1079911 - DNA, 15 bp, Homo sapiens
aacaagaggtgtctt

SEQ ID NO: 1079912 - DNA, 15 bp, Homo sapiens
taacaagaggtgtct

SEQ ID NO: 1079913 - DNA, 15 bp, Homo sapiens
ttaacaagaggtgtc

SEQ ID NO: 1079914 - DNA, 15 bp, Homo sapiens
gttaacaagaggtgt

SEQ ID NO: 1079915 - DNA, 15 bp, Homo sapiens
agttaacaagaggtg

SEQ ID NO: 1079916 - DNA, 15 bp, Homo sapiens
tagttaacaagaggt

SEQ ID NO: 1079917 - DNA, 15 bp, Homo sapiens
ttagttaacaagagg

SEQ ID NO: 1079918 - DNA, 15 bp, Homo sapiens
attagttaacaagag

SEQ ID NO: 1079919 - DNA, 15 bp, Homo sapiens
tattagttaacaaga

SEQ ID NO: 1079920 - DNA, 15 bp, Homo sapiens
atattagttaacaag

SEQ ID NO: 1079921 - DNA, 15 bp, Homo sapiens
catattagttaacaa

SEQ ID NO: 1079922 - DNA, 15 bp, Homo sapiens
ccatattagttaaca

SEQ ID NO: 1079923 - DNA, 15 bp, Homo sapiens
tccatattagttaac

SEQ ID NO: 1079924 - DNA, 15 bp, Homo sapiens
ctccatattagttaa

SEQ ID NO: 1079925 - DNA, 15 bp, Homo sapiens
tctccatattagtta

SEQ ID NO: 1079926 - DNA, 15 bp, Homo sapiens
ttctccatattagtt

SEQ ID NO: 1079927 - DNA, 15 bp, Homo sapiens
tttctccatattagt

SEQ ID NO: 1079928 - DNA, 15 bp, Homo sapiens
ttttctccatattag

SEQ ID NO: 1079929 - DNA, 15 bp, Homo sapiens
tttttctccatatta

SEQ ID NO: 1079930 - DNA, 15 bp, Homo sapiens
ttttttctccatatt

SEQ ID NO: 1079931 - DNA, 15 bp, Homo sapiens
cttttttctccatat

SEQ ID NO: 1079932 - DNA, 15 bp, Homo sapiens
tcttttttctccata

SEQ ID NO: 1079933 - DNA, 15 bp, Homo sapiens
ctcttttttctccat

SEQ ID NO: 1079934 - DNA, 15 bp, Homo sapiens
actcttttttctcca

SEQ ID NO: 1079935 - DNA, 15 bp, Homo sapiens
cactcttttttctcc

SEQ ID NO: 1079936 - DNA, 15 bp, Homo sapiens
gcactcttttttctc

SEQ ID NO: 1079937 - DNA, 15 bp, Homo sapiens
ggcactcttttttct

SEQ ID NO: 1079938 - DNA, 15 bp, Homo sapiens
aggcactcttttttc

SEQ ID NO: 1079939 - DNA, 15 bp, Homo sapiens
aaggcactctttttt

SEQ ID NO: 1079940 - DNA, 15 bp, Homo sapiens
aaaggcactcttttt

SEQ ID NO: 1079941 - DNA, 15 bp, Homo sapiens
gaaaggcactctttt

SEQ ID NO: 1079942 - DNA, 15 bp, Homo sapiens
ggaaaggcactcttt

SEQ ID NO: 1079943 - DNA, 15 bp, Homo sapiens
tggaaaggcactctt

SEQ ID NO: 1079944 - DNA, 15 bp, Homo sapiens
gtggaaaggcactct

SEQ ID NO: 1079945 - DNA, 15 bp, Homo sapiens
tgtggaaaggcactc

SEQ ID NO: 1079946 - DNA, 15 bp, Homo sapiens
gtgtggaaaggcact

SEQ ID NO: 1079947 - DNA, 15 bp, Homo sapiens
agtgtggaaaggcac

SEQ ID NO: 1079948 - DNA, 15 bp, Homo sapiens
gagtgtggaaaggca

SEQ ID NO: 1079949 - DNA, 15 bp, Homo sapiens
agagtgtggaaaggc

SEQ ID NO: 1079950 - DNA, 15 bp, Homo sapiens
gagagtgtggaaagg

SEQ ID NO: 1079951 - DNA, 15 bp, Homo sapiens
ggagagtgtggaaag

SEQ ID NO: 1079952 - DNA, 15 bp, Homo sapiens
gggagagtgtggaaa

SEQ ID NO: 1079953 - DNA, 15 bp, Homo sapiens
tgggagagtgtggaa

SEQ ID NO: 1079954 - DNA, 15 bp, Homo sapiens
gtgggagagtgtgga

SEQ ID NO: 1079955 - DNA, 15 bp, Homo sapiens
tgtgggagagtgtgg

SEQ ID NO: 1079956 - DNA, 15 bp, Homo sapiens
ctgtgggagagtgtg

SEQ ID NO: 1079957 - DNA, 15 bp, Homo sapiens
tctgtgggagagtgt

SEQ ID NO: 1079958 - DNA, 15 bp, Homo sapiens
ttctgtgggagagtg

SEQ ID NO: 1079959 - DNA, 15 bp, Homo sapiens
attctgtgggagagt

SEQ ID NO: 1079960 - DNA, 15 bp, Homo sapiens
cattctgtgggagag

SEQ ID NO: 1079961 - DNA, 15 bp, Homo sapiens
ccattctgtgggaga

SEQ ID NO: 1079962 - DNA, 15 bp, Homo sapiens
tccattctgtgggag

SEQ ID NO: 1079963 - DNA, 15 bp, Homo sapiens
ctccattctgtggga

SEQ ID NO: 1079964 - DNA, 15 bp, Homo sapiens
cctccattctgtggg

SEQ ID NO: 1079965 - DNA, 15 bp, Homo sapiens
gcctccattctgtgg

SEQ ID NO: 1079966 - DNA, 15 bp, Homo sapiens
agcctccattctgtg

SEQ ID NO: 1079967 - DNA, 15 bp, Homo sapiens
gagcctccattctgt

SEQ ID NO: 1079968 - DNA, 15 bp, Homo sapiens
ggagcctccattctg

SEQ ID NO: 1079969 - DNA, 15 bp, Homo sapiens
gggagcctccattct

SEQ ID NO: 1079970 - DNA, 15 bp, Homo sapiens
agggagcctccattc

SEQ ID NO: 1079971 - DNA, 15 bp, Homo sapiens
tagggagcctccatt

SEQ ID NO: 1079972 - DNA, 15 bp, Homo sapiens
ttagggagcctccat

SEQ ID NO: 1079973 - DNA, 15 bp, Homo sapiens
gttagggagcctcca

SEQ ID NO: 1079974 - DNA, 15 bp, Homo sapiens
agttagggagcctcc

SEQ ID NO: 1079975 - DNA, 15 bp, Homo sapiens
tagttagggagcctc

SEQ ID NO: 1079976 - DNA, 15 bp, Homo sapiens
ttagttagggagcct

SEQ ID NO: 1079977 - DNA, 15 bp, Homo sapiens
gttagttagggagcc

SEQ ID NO: 1079978 - DNA, 15 bp, Homo sapiens
tgttagttagggagc

SEQ ID NO: 1079979 - DNA, 15 bp, Homo sapiens
gtgttagttagggag

SEQ ID NO: 1079980 - DNA, 15 bp, Homo sapiens
agtgttagttaggga

SEQ ID NO: 1079981 - DNA, 15 bp, Homo sapiens
gagtgttagttaggg

SEQ ID NO: 1079982 - DNA, 15 bp, Homo sapiens
tgagtgttagttagg

SEQ ID NO: 1079983 - DNA, 15 bp, Homo sapiens
ttgagtgttagttag

SEQ ID NO: 1079984 - DNA, 15 bp, Homo sapiens
tttgagtgttagtta

SEQ ID NO: 1079985 - DNA, 15 bp, Homo sapiens
atttgagtgttagtt

SEQ ID NO: 1079986 - DNA, 15 bp, Homo sapiens
aatttgagtgttagt

SEQ ID NO: 1079987 - DNA, 15 bp, Homo sapiens
aaatttgagtgttag

SEQ ID NO: 1079988 - DNA, 15 bp, Homo sapiens
caaatttgagtgtta

SEQ ID NO: 1079989 - DNA, 15 bp, Homo sapiens
ccaaatttgagtgtt

SEQ ID NO: 1079990 - DNA, 15 bp, Homo sapiens
cccaaatttgagtgt

SEQ ID NO: 1079991 - DNA, 15 bp, Homo sapiens
ccccaaatttgagtg

SEQ ID NO: 1079992 - DNA, 15 bp, Homo sapiens
accccaaatttgagt

SEQ ID NO: 1079993 - DNA, 15 bp, Homo sapiens
aaccccaaatttgag

SEQ ID NO: 1079994 - DNA, 15 bp, Homo sapiens
gaaccccaaatttga

SEQ ID NO: 1079995 - DNA, 15 bp, Homo sapiens
tgaaccccaaatttg

SEQ ID NO: 1079996 - DNA, 15 bp, Homo sapiens
ctgaaccccaaattt

SEQ ID NO: 1079997 - DNA, 15 bp, Homo sapiens
gctgaaccccaaatt

SEQ ID NO: 1079998 - DNA, 15 bp, Homo sapiens
tgctgaaccccaaat

SEQ ID NO: 1079999 - DNA, 15 bp, Homo sapiens
ttgctgaaccccaaa

SEQ ID NO: 1080000 - DNA, 15 bp, Homo sapiens
tttgctgaaccccaa

SEQ ID NO: 1080001 - DNA, 15 bp, Homo sapiens
atttgctgaacccca

SEQ ID NO: 1080002 - DNA, 15 bp, Homo sapiens
catttgctgaacccc

SEQ ID NO: 1080003 - DNA, 15 bp, Homo sapiens
tcatttgctgaaccc

SEQ ID NO: 1080004 - DNA, 15 bp, Homo sapiens
ttcatttgctgaacc

SEQ ID NO: 1080005 - DNA, 15 bp, Homo sapiens
tttcatttgctgaac

SEQ ID NO: 1080006 - DNA, 15 bp, Homo sapiens
gtttcatttgctgaa

SEQ ID NO: 1080007 - DNA, 15 bp, Homo sapiens
agtttcatttgctga

SEQ ID NO: 1080008 - DNA, 15 bp, Homo sapiens
tagtttcatttgctg

SEQ ID NO: 1080009 - DNA, 15 bp, Homo sapiens
ttagtttcatttgct

SEQ ID NO: 1080010 - DNA, 15 bp, Homo sapiens
tttagtttcatttgc

SEQ ID NO: 1080011 - DNA, 15 bp, Homo sapiens
atttagtttcatttg

SEQ ID NO: 1080012 - DNA, 15 bp, Homo sapiens
tatttagtttcattt

SEQ ID NO: 1080013 - DNA, 15 bp, Homo sapiens
atatttagtttcatt

SEQ ID NO: 1080014 - DNA, 15 bp, Homo sapiens
gatatttagtttcat

SEQ ID NO: 1080015 - DNA, 15 bp, Homo sapiens
tgatatttagtttca

SEQ ID NO: 1080016 - DNA, 15 bp, Homo sapiens
ttgatatttagtttc

SEQ ID NO: 1080017 - DNA, 15 bp, Homo sapiens
gttgatatttagttt

SEQ ID NO: 1080018 - DNA, 15 bp, Homo sapiens
agttgatatttagtt

SEQ ID NO: 1080019 - DNA, 15 bp, Homo sapiens
cagttgatatttagt

SEQ ID NO: 1080020 - DNA, 15 bp, Homo sapiens
tcagttgatatttag

SEQ ID NO: 1080021 - DNA, 15 bp, Homo sapiens
gtcagttgatattta

SEQ ID NO: 1080022 - DNA, 15 bp, Homo sapiens
atatccaaagcctaa

SEQ ID NO: 1080023 - DNA, 15 bp, Homo sapiens
tatatccaaagccta

SEQ ID NO: 1080024 - DNA, 15 bp, Homo sapiens
gtatatccaaagcct

SEQ ID NO: 1080025 - DNA, 15 bp, Homo sapiens
tgtatatccaaagcc

SEQ ID NO: 1080026 - DNA, 15 bp, Homo sapiens
ctgtatatccaaagc

SEQ ID NO: 1080027 - DNA, 15 bp, Homo sapiens
gctgtatatccaaag

SEQ ID NO: 1080028 - DNA, 15 bp, Homo sapiens
agctgtatatccaaa

SEQ ID NO: 1080029 - DNA, 15 bp, Homo sapiens
cagctgtatatccaa

SEQ ID NO: 1080030 - DNA, 15 bp, Homo sapiens
tcagctgtatatcca

SEQ ID NO: 1080031 - DNA, 15 bp, Homo sapiens
gtcagctgtatatcc

SEQ ID NO: 1080032 - DNA, 15 bp, Homo sapiens
ggtcagctgtatatc

SEQ ID NO: 1080033 - DNA, 15 bp, Homo sapiens
gggtcagctgtatat

SEQ ID NO: 1080034 - DNA, 15 bp, Homo sapiens
agggtcagctgtata

SEQ ID NO: 1080035 - DNA, 15 bp, Homo sapiens
gagggtcagctgtat

SEQ ID NO: 1080036 - DNA, 15 bp, Homo sapiens
ggagggtcagctgta

SEQ ID NO: 1080037 - DNA, 15 bp, Homo sapiens
tggagggtcagctgt

SEQ ID NO: 1080038 - DNA, 15 bp, Homo sapiens
atggagggtcagctg

SEQ ID NO: 1080039 - DNA, 15 bp, Homo sapiens
tatggagggtcagct

SEQ ID NO: 1080040 - DNA, 15 bp, Homo sapiens
atatggagggtcagc

SEQ ID NO: 1080041 - DNA, 15 bp, Homo sapiens
gatatggagggtcag

SEQ ID NO: 1080042 - DNA, 15 bp, Homo sapiens
ggatatggagggtca

SEQ ID NO: 1080043 - DNA, 15 bp, Homo sapiens
tggatatggagggtc

SEQ ID NO: 1080044 - DNA, 15 bp, Homo sapiens
atggatatggagggt

SEQ ID NO: 1080045 - DNA, 15 bp, Homo sapiens
catggatatggaggg

SEQ ID NO: 1080046 - DNA, 15 bp, Homo sapiens
ccatggatatggagg

SEQ ID NO: 1080047 - DNA, 15 bp, Homo sapiens
cccatggatatggag

SEQ ID NO: 1080048 - DNA, 15 bp, Homo sapiens
acccatggatatgga

SEQ ID NO: 1080049 - DNA, 15 bp, Homo sapiens
aacccatggatatgg

SEQ ID NO: 1080050 - DNA, 15 bp, Homo sapiens
gaacccatggatatg

SEQ ID NO: 1080051 - DNA, 15 bp, Homo sapiens
agaacccatggatat

SEQ ID NO: 1080052 - DNA, 15 bp, Homo sapiens
tagaacccatggata

SEQ ID NO: 1080053 - DNA, 15 bp, Homo sapiens
gtagaacccatggat

SEQ ID NO: 1080054 - DNA, 15 bp, Homo sapiens
tgtagaacccatgga

SEQ ID NO: 1080055 - DNA, 15 bp, Homo sapiens
atgtagaacccatgg

SEQ ID NO: 1080056 - DNA, 15 bp, Homo sapiens
gatgtagaacccatg

SEQ ID NO: 1080057 - DNA, 15 bp, Homo sapiens
ggatgtagaacccat

SEQ ID NO: 1080058 - DNA, 15 bp, Homo sapiens
tggatgtagaaccca

SEQ ID NO: 1080059 - DNA, 15 bp, Homo sapiens
atggatgtagaaccc

SEQ ID NO: 1080060 - DNA, 15 bp, Homo sapiens
catggatgtagaacc

SEQ ID NO: 1080061 - DNA, 15 bp, Homo sapiens
ccatggatgtagaac

SEQ ID NO: 1080062 - DNA, 15 bp, Homo sapiens
tccatggatgtagaa

SEQ ID NO: 1080063 - DNA, 15 bp, Homo sapiens
atccatggatgtaga

SEQ ID NO: 1080064 - DNA, 15 bp, Homo sapiens
aatccatggatgtag

SEQ ID NO: 1080065 - DNA, 15 bp, Homo sapiens
aaatccatggatgta

SEQ ID NO: 1080066 - DNA, 15 bp, Homo sapiens
taaatccatggatgt

SEQ ID NO: 1080067 - DNA, 15 bp, Homo sapiens
ttaaatccatggatg

SEQ ID NO: 1080068 - DNA, 15 bp, Homo sapiens
gttaaatccatggat

SEQ ID NO: 1080069 - DNA, 15 bp, Homo sapiens
ggttaaatccatgga

SEQ ID NO: 1080070 - DNA, 15 bp, Homo sapiens
tggttaaatccatgg

SEQ ID NO: 1080071 - DNA, 15 bp, Homo sapiens
ttggttaaatccatg

SEQ ID NO: 1080072 - DNA, 15 bp, Homo sapiens
gttggttaaatccat

SEQ ID NO: 1080073 - DNA, 15 bp, Homo sapiens
ggttggttaaatcca

SEQ ID NO: 1080074 - DNA, 15 bp, Homo sapiens
tggttggttaaatcc

SEQ ID NO: 1080075 - DNA, 15 bp, Homo sapiens
atggttggttaaatc

SEQ ID NO: 1080076 - DNA, 15 bp, Homo sapiens
catggttggttaaat

SEQ ID NO: 1080077 - DNA, 15 bp, Homo sapiens
ccatggttggttaaa

SEQ ID NO: 1080078 - DNA, 15 bp, Homo sapiens
cccatggttggttaa

SEQ ID NO: 1080079 - DNA, 15 bp, Homo sapiens
acccatggttggtta

SEQ ID NO: 1080080 - DNA, 15 bp, Homo sapiens
gacccatggttggtt

SEQ ID NO: 1080081 - DNA, 15 bp, Homo sapiens
tgacccatggttggt

SEQ ID NO: 1080082 - DNA, 15 bp, Homo sapiens
ttgacccatggttgg

SEQ ID NO: 1080083 - DNA, 15 bp, Homo sapiens
tttgacccatggttg

SEQ ID NO: 1080084 - DNA, 15 bp, Homo sapiens
ttttgacccatggtt

SEQ ID NO: 1080085 - DNA, 15 bp, Homo sapiens
tttttgacccatggt

SEQ ID NO: 1080086 - DNA, 15 bp, Homo sapiens
atttttgacccatgg

SEQ ID NO: 1080087 - DNA, 15 bp, Homo sapiens
tatttttgacccatg

SEQ ID NO: 1080088 - DNA, 15 bp, Homo sapiens
atatttttgacccat

SEQ ID NO: 1080089 - DNA, 15 bp, Homo sapiens
aatatttttgaccca

SEQ ID NO: 1080090 - DNA, 15 bp, Homo sapiens
gaatatttttgaccc

SEQ ID NO: 1080091 - DNA, 15 bp, Homo sapiens
tgaatatttttgacc

SEQ ID NO: 1080092 - DNA, 15 bp, Homo sapiens
ttgaatatttttgac

SEQ ID NO: 1080093 - DNA, 15 bp, Homo sapiens
tttgaatatttttga

SEQ ID NO: 1080094 - DNA, 15 bp, Homo sapiens
ctttgaatatttttg

SEQ ID NO: 1080095 - DNA, 15 bp, Homo sapiens
tctttgaatattttt

SEQ ID NO: 1080096 - DNA, 15 bp, Homo sapiens
ttctttgaatatttt

SEQ ID NO: 1080097 - DNA, 15 bp, Homo sapiens
cttctttgaatattt

SEQ ID NO: 1080098 - DNA, 15 bp, Homo sapiens
tcttctttgaatatt

SEQ ID NO: 1080099 - DNA, 15 bp, Homo sapiens
ttcttctttgaatat

SEQ ID NO: 1080100 - DNA, 15 bp, Homo sapiens
tttcttctttgaata

SEQ ID NO: 1080101 - DNA, 15 bp, Homo sapiens
ttttcttctttgaat

SEQ ID NO: 1080102 - DNA, 15 bp, Homo sapiens
tttttcttctttgaa

SEQ ID NO: 1080103 - DNA, 15 bp, Homo sapiens
atttttcttctttga

SEQ ID NO: 1080104 - DNA, 15 bp, Homo sapiens
catttttcttctttg

SEQ ID NO: 1080105 - DNA, 15 bp, Homo sapiens
tcatttttcttcttt

SEQ ID NO: 1080106 - DNA, 15 bp, Homo sapiens
ttcatttttcttctt

SEQ ID NO: 1080107 - DNA, 15 bp, Homo sapiens
attcatttttcttct

SEQ ID NO: 1080108 - DNA, 15 bp, Homo sapiens
cattcatttttcttc

SEQ ID NO: 1080109 - DNA, 15 bp, Homo sapiens
ccattcatttttctt

SEQ ID NO: 1080110 - DNA, 15 bp, Homo sapiens
accattcatttttct

SEQ ID NO: 1080111 - DNA, 15 bp, Homo sapiens
aaccattcatttttc

SEQ ID NO: 1080112 - DNA, 15 bp, Homo sapiens
gaaccattcattttt

SEQ ID NO: 1080113 - DNA, 15 bp, Homo sapiens
ggaaccattcatttt

SEQ ID NO: 1080114 - DNA, 15 bp, Homo sapiens
tggaaccattcattt

SEQ ID NO: 1080115 - DNA, 15 bp, Homo sapiens
atggaaccattcatt

SEQ ID NO: 1080116 - DNA, 15 bp, Homo sapiens
gatggaaccattcat

SEQ ID NO: 1080117 - DNA, 15 bp, Homo sapiens
agatggaaccattca

SEQ ID NO: 1080118 - DNA, 15 bp, Homo sapiens
cagatggaaccattc

SEQ ID NO: 1080119 - DNA, 15 bp, Homo sapiens
acagatggaaccatt

SEQ ID NO: 1080120 - DNA, 15 bp, Homo sapiens
tacagatggaaccat

SEQ ID NO: 1080121 - DNA, 15 bp, Homo sapiens
atacagatggaacca

SEQ ID NO: 1080122 - DNA, 15 bp, Homo sapiens
gatacagatggaacc

SEQ ID NO: 1080123 - DNA, 15 bp, Homo sapiens
cgatacagatggaac

SEQ ID NO: 1080124 - DNA, 15 bp, Homo sapiens
tcgatacagatggaa

SEQ ID NO: 1080125 - DNA, 15 bp, Homo sapiens
ttcgatacagatgga

SEQ ID NO: 1080126 - DNA, 15 bp, Homo sapiens
gttcgatacagatgg

SEQ ID NO: 1080127 - DNA, 15 bp, Homo sapiens
tgttcgatacagatg

SEQ ID NO: 1080128 - DNA, 15 bp, Homo sapiens
atgttcgatacagat

SEQ ID NO: 1080129 - DNA, 15 bp, Homo sapiens
catgttcgatacaga

SEQ ID NO: 1080130 - DNA, 15 bp, Homo sapiens
acatgttcgatacag

SEQ ID NO: 1080131 - DNA, 15 bp, Homo sapiens
tacatgttcgataca

SEQ ID NO: 1080132 - DNA, 15 bp, Homo sapiens
atacatgttcgatac

SEQ ID NO: 1080133 - DNA, 15 bp, Homo sapiens
tatacatgttcgata

SEQ ID NO: 1080134 - DNA, 15 bp, Homo sapiens
ctatacatgttcgat

SEQ ID NO: 1080135 - DNA, 15 bp, Homo sapiens
tctatacatgttcga

SEQ ID NO: 1080136 - DNA, 15 bp, Homo sapiens
gtctatacatgttcg

SEQ ID NO: 1080137 - DNA, 15 bp, Homo sapiens
tgtctatacatgttc

SEQ ID NO: 1080138 - DNA, 15 bp, Homo sapiens
atgtctatacatgtt

SEQ ID NO: 1080139 - DNA, 15 bp, Homo sapiens
aatgtctatacatgt

SEQ ID NO: 1080140 - DNA, 15 bp, Homo sapiens
aaatgtctatacatg

SEQ ID NO: 1080141 - DNA, 15 bp, Homo sapiens
aaaatgtctatacat

SEQ ID NO: 1080142 - DNA, 15 bp, Homo sapiens
aaaaatgtctataca

SEQ ID NO: 1080143 - DNA, 15 bp, Homo sapiens
gaaaaatgtctatac

SEQ ID NO: 1080144 - DNA, 15 bp, Homo sapiens
ggaaaaatgtctata

SEQ ID NO: 1080145 - DNA, 15 bp, Homo sapiens
aggaaaaatgtctat

SEQ ID NO: 1080146 - DNA, 15 bp, Homo sapiens
aaggaaaaatgtcta

SEQ ID NO: 1080147 - DNA, 15 bp, Homo sapiens
caaggaaaaatgtct

SEQ ID NO: 1080148 - DNA, 15 bp, Homo sapiens
acaaggaaaaatgtc

SEQ ID NO: 1080149 - DNA, 15 bp, Homo sapiens
gacaaggaaaaatgt

SEQ ID NO: 1080150 - DNA, 15 bp, Homo sapiens
tgacaaggaaaaatg

SEQ ID NO: 1080151 - DNA, 15 bp, Homo sapiens
atgacaaggaaaaat

SEQ ID NO: 1080152 - DNA, 15 bp, Homo sapiens
aatgacaaggaaaaa

SEQ ID NO: 1080153 - DNA, 15 bp, Homo sapiens
taatgacaaggaaaa

SEQ ID NO: 1080154 - DNA, 15 bp, Homo sapiens
ataatgacaaggaaa

SEQ ID NO: 1080155 - DNA, 15 bp, Homo sapiens
aataatgacaaggaa

SEQ ID NO: 1080156 - DNA, 15 bp, Homo sapiens
aaataatgacaagga

SEQ ID NO: 1080157 - DNA, 15 bp, Homo sapiens
gaaataatgacaagg

SEQ ID NO: 1080158 - DNA, 15 bp, Homo sapiens
ggaaataatgacaag

SEQ ID NO: 1080159 - DNA, 15 bp, Homo sapiens
aggaaataatgacaa

SEQ ID NO: 1080160 - DNA, 15 bp, Homo sapiens
taggaaataatgaca

SEQ ID NO: 1080161 - DNA, 15 bp, Homo sapiens
ttaggaaataatgac

SEQ ID NO: 1080162 - DNA, 15 bp, Homo sapiens
tttaggaaataatga

SEQ ID NO: 1080163 - DNA, 15 bp, Homo sapiens
gtttaggaaataatg

SEQ ID NO: 1080164 - DNA, 15 bp, Homo sapiens
tgtttaggaaataat

SEQ ID NO: 1080165 - DNA, 15 bp, Homo sapiens
ttgtttaggaaataa

SEQ ID NO: 1080166 - DNA, 15 bp, Homo sapiens
attgtttaggaaata

SEQ ID NO: 1080167 - DNA, 15 bp, Homo sapiens
tattgtttaggaaat

SEQ ID NO: 1080168 - DNA, 15 bp, Homo sapiens
gtattgtttaggaaa

SEQ ID NO: 1080169 - DNA, 15 bp, Homo sapiens
tgtattgtttaggaa

SEQ ID NO: 1080170 - DNA, 15 bp, Homo sapiens
ctgtattgtttagga

SEQ ID NO: 1080171 - DNA, 15 bp, Homo sapiens
actgtattgtttagg

SEQ ID NO: 1080172 - DNA, 15 bp, Homo sapiens
tactgtattgtttag

SEQ ID NO: 1080173 - DNA, 15 bp, Homo sapiens
atactgtattgttta

SEQ ID NO: 1080174 - DNA, 15 bp, Homo sapiens
tatactgtattgttt

SEQ ID NO: 1080175 - DNA, 15 bp, Homo sapiens
ttatactgtattgtt

SEQ ID NO: 1080176 - DNA, 15 bp, Homo sapiens
gttatactgtattgt

SEQ ID NO: 1080177 - DNA, 15 bp, Homo sapiens
tgttatactgtattg

SEQ ID NO: 1080178 - DNA, 15 bp, Homo sapiens
ttgttatactgtatt

SEQ ID NO: 1080179 - DNA, 15 bp, Homo sapiens
gttgttatactgtat

SEQ ID NO: 1080180 - DNA, 15 bp, Homo sapiens
agttgttatactgta

SEQ ID NO: 1080181 - DNA, 15 bp, Homo sapiens
tagttgttatactgt

SEQ ID NO: 1080182 - DNA, 15 bp, Homo sapiens
atagttgttatactg

SEQ ID NO: 1080183 - DNA, 15 bp, Homo sapiens
aatagttgttatact

SEQ ID NO: 1080184 - DNA, 15 bp, Homo sapiens
aaatagttgttatac

SEQ ID NO: 1080185 - DNA, 15 bp, Homo sapiens
caaatagttgttata

SEQ ID NO: 1080186 - DNA, 15 bp, Homo sapiens
gcaaatagttgttat

SEQ ID NO: 1080187 - DNA, 15 bp, Homo sapiens
tgcaaatagttgtta

SEQ ID NO: 1080188 - DNA, 15 bp, Homo sapiens
atgcaaatagttgtt

SEQ ID NO: 1080189 - DNA, 15 bp, Homo sapiens
tatgcaaatagttgt

SEQ ID NO: 1080190 - DNA, 15 bp, Homo sapiens
ctatgcaaatagttg

SEQ ID NO: 1080191 - DNA, 15 bp, Homo sapiens
gctatgcaaatagtt

SEQ ID NO: 1080192 - DNA, 15 bp, Homo sapiens
tgctatgcaaatagt

SEQ ID NO: 1080193 - DNA, 15 bp, Homo sapiens
atgctatgcaaatag

SEQ ID NO: 1080194 - DNA, 15 bp, Homo sapiens
aatgctatgcaaata

SEQ ID NO: 1080195 - DNA, 15 bp, Homo sapiens
aaatgctatgcaaat

SEQ ID NO: 1080196 - DNA, 15 bp, Homo sapiens
taaatgctatgcaaa

SEQ ID NO: 1080197 - DNA, 15 bp, Homo sapiens
ataaatgctatgcaa

SEQ ID NO: 1080198 - DNA, 15 bp, Homo sapiens
tataaatgctatgca

SEQ ID NO: 1080199 - DNA, 15 bp, Homo sapiens
gtataaatgctatgc

SEQ ID NO: 1080200 - DNA, 15 bp, Homo sapiens
agtataaatgctatg

SEQ ID NO: 1080201 - DNA, 15 bp, Homo sapiens
cagtataaatgctat

SEQ ID NO: 1080202 - DNA, 15 bp, Homo sapiens
acagtataaatgcta

SEQ ID NO: 1080203 - DNA, 15 bp, Homo sapiens
tacagtataaatgct

SEQ ID NO: 1080204 - DNA, 15 bp, Homo sapiens
atacagtataaatgc

SEQ ID NO: 1080205 - DNA, 15 bp, Homo sapiens
aatacagtataaatg

SEQ ID NO: 1080206 - DNA, 15 bp, Homo sapiens
taatacagtataaat

SEQ ID NO: 1080207 - DNA, 15 bp, Homo sapiens
ctaatacagtataaa

SEQ ID NO: 1080208 - DNA, 15 bp, Homo sapiens
actaatacagtataa

SEQ ID NO: 1080209 - DNA, 15 bp, Homo sapiens
aactaatacagtata

SEQ ID NO: 1080210 - DNA, 15 bp, Homo sapiens
taactaatacagtat

SEQ ID NO: 1080211 - DNA, 15 bp, Homo sapiens
ataactaatacagta

SEQ ID NO: 1080212 - DNA, 15 bp, Homo sapiens
gataactaatacagt

SEQ ID NO: 1080213 - DNA, 15 bp, Homo sapiens
tgataactaatacag

SEQ ID NO: 1080214 - DNA, 15 bp, Homo sapiens
atgataactaataca

SEQ ID NO: 1080215 - DNA, 15 bp, Homo sapiens
tatgataactaatac

SEQ ID NO: 1080216 - DNA, 15 bp, Homo sapiens
ttatgataactaata

SEQ ID NO: 1080217 - DNA, 15 bp, Homo sapiens
cttatgataactaat

SEQ ID NO: 1080218 - DNA, 15 bp, Homo sapiens
acttatgataactaa

SEQ ID NO: 1080219 - DNA, 15 bp, Homo sapiens
tacttatgataacta

SEQ ID NO: 1080220 - DNA, 15 bp, Homo sapiens
ttacttatgataact

SEQ ID NO: 1080221 - DNA, 15 bp, Homo sapiens
attacttatgataac

SEQ ID NO: 1080222 - DNA, 15 bp, Homo sapiens
gattacttatgataa

SEQ ID NO: 1080223 - DNA, 15 bp, Homo sapiens
agattacttatgata

SEQ ID NO: 1080224 - DNA, 15 bp, Homo sapiens
tagattacttatgat

SEQ ID NO: 1080225 - DNA, 15 bp, Homo sapiens
ctagattacttatga

SEQ ID NO: 1080226 - DNA, 15 bp, Homo sapiens
tctagattacttatg

SEQ ID NO: 1080227 - DNA, 15 bp, Homo sapiens
ctctagattacttat

SEQ ID NO: 1080228 - DNA, 15 bp, Homo sapiens
tctctagattactta

SEQ ID NO: 1080229 - DNA, 15 bp, Homo sapiens
atctctagattactt

SEQ ID NO: 1080230 - DNA, 15 bp, Homo sapiens
catctctagattact

SEQ ID NO: 1080231 - DNA, 15 bp, Homo sapiens
tcatctctagattac

SEQ ID NO: 1080232 - DNA, 15 bp, Homo sapiens
atcatctctagatta

SEQ ID NO: 1080233 - DNA, 15 bp, Homo sapiens
aatcatctctagatt

SEQ ID NO: 1080234 - DNA, 15 bp, Homo sapiens
aaatcatctctagat

SEQ ID NO: 1080235 - DNA, 15 bp, Homo sapiens
taaatcatctctaga

SEQ ID NO: 1080236 - DNA, 15 bp, Homo sapiens
ttaaatcatctctag

SEQ ID NO: 1080237 - DNA, 15 bp, Homo sapiens
tttaaatcatctcta

SEQ ID NO: 1080238 - DNA, 15 bp, Homo sapiens
ctttaaatcatctct

SEQ ID NO: 1080239 - DNA, 15 bp, Homo sapiens
actttaaatcatctc

SEQ ID NO: 1080240 - DNA, 15 bp, Homo sapiens
tactttaaatcatct

SEQ ID NO: 1080241 - DNA, 15 bp, Homo sapiens
atactttaaatcatc

SEQ ID NO: 1080242 - DNA, 15 bp, Homo sapiens
tatactttaaatcat

SEQ ID NO: 1080243 - DNA, 15 bp, Homo sapiens
atatactttaaatca

SEQ ID NO: 1080244 - DNA, 15 bp, Homo sapiens
catatactttaaatc

SEQ ID NO: 1080245 - DNA, 15 bp, Homo sapiens
ccatatactttaaat

SEQ ID NO: 1080246 - DNA, 15 bp, Homo sapiens
tccatatactttaaa

SEQ ID NO: 1080247 - DNA, 15 bp, Homo sapiens
ttccatatactttaa

SEQ ID NO: 1080248 - DNA, 15 bp, Homo sapiens
cttccatatacttta

SEQ ID NO: 1080249 - DNA, 15 bp, Homo sapiens
ccttccatatacttt

SEQ ID NO: 1080250 - DNA, 15 bp, Homo sapiens
tccttccatatactt

SEQ ID NO: 1080251 - DNA, 15 bp, Homo sapiens
atccttccatatact

SEQ ID NO: 1080252 - DNA, 15 bp, Homo sapiens
catccttccatatac

SEQ ID NO: 1080253 - DNA, 15 bp, Homo sapiens
acatccttccatata

SEQ ID NO: 1080254 - DNA, 15 bp, Homo sapiens
cacatccttccatat

SEQ ID NO: 1080255 - DNA, 15 bp, Homo sapiens
gcacatccttccata

SEQ ID NO: 1080256 - DNA, 15 bp, Homo sapiens
tgcacatccttccat

SEQ ID NO: 1080257 - DNA, 15 bp, Homo sapiens
gtgcacatccttcca

SEQ ID NO: 1080258 - DNA, 15 bp, Homo sapiens
tgtgcacatccttcc

SEQ ID NO: 1080259 - DNA, 15 bp, Homo sapiens
ctgtgcacatccttc

SEQ ID NO: 1080260 - DNA, 15 bp, Homo sapiens
cctgtgcacatcctt

SEQ ID NO: 1080261 - DNA, 15 bp, Homo sapiens
acctgtgcacatcct

SEQ ID NO: 1080262 - DNA, 15 bp, Homo sapiens
aacctgtgcacatcc

SEQ ID NO: 1080263 - DNA, 15 bp, Homo sapiens
taacctgtgcacatc

SEQ ID NO: 1080264 - DNA, 15 bp, Homo sapiens
ataacctgtgcacat

SEQ ID NO: 1080265 - DNA, 15 bp, Homo sapiens
cataacctgtgcaca

SEQ ID NO: 1080266 - DNA, 15 bp, Homo sapiens
gcataacctgtgcac

SEQ ID NO: 1080267 - DNA, 15 bp, Homo sapiens
tgcataacctgtgca

SEQ ID NO: 1080268 - DNA, 15 bp, Homo sapiens
ttgcataacctgtgc

SEQ ID NO: 1080269 - DNA, 15 bp, Homo sapiens
tttgcataacctgtg

SEQ ID NO: 1080270 - DNA, 15 bp, Homo sapiens
gtttgcataacctgt

SEQ ID NO: 1080271 - DNA, 15 bp, Homo sapiens
tgtttgcataacctg

SEQ ID NO: 1080272 - DNA, 15 bp, Homo sapiens
gtgtttgcataacct

SEQ ID NO: 1080273 - DNA, 15 bp, Homo sapiens
agtgtttgcataacc

SEQ ID NO: 1080274 - DNA, 15 bp, Homo sapiens
tagtgtttgcataac

SEQ ID NO: 1080275 - DNA, 15 bp, Homo sapiens
atagtgtttgcataa

SEQ ID NO: 1080276 - DNA, 15 bp, Homo sapiens
catagtgtttgcata

SEQ ID NO: 1080277 - DNA, 15 bp, Homo sapiens
ccatagtgtttgcat

SEQ ID NO: 1080278 - DNA, 15 bp, Homo sapiens
gccatagtgtttgca

SEQ ID NO: 1080279 - DNA, 15 bp, Homo sapiens
tgccatagtgtttgc

SEQ ID NO: 1080280 - DNA, 15 bp, Homo sapiens
atgccatagtgtttg

SEQ ID NO: 1080281 - DNA, 15 bp, Homo sapiens
aatgccatagtgttt

SEQ ID NO: 1080282 - DNA, 15 bp, Homo sapiens
aaatgccatagtgtt

SEQ ID NO: 1080283 - DNA, 15 bp, Homo sapiens
aaaatgccatagtgt

SEQ ID NO: 1080284 - DNA, 15 bp, Homo sapiens
taaaatgccatagtg

SEQ ID NO: 1080285 - DNA, 15 bp, Homo sapiens
ataaaatgccatagt

SEQ ID NO: 1080286 - DNA, 15 bp, Homo sapiens
tataaaatgccatag

SEQ ID NO: 1080287 - DNA, 15 bp, Homo sapiens
atataaaatgccata

SEQ ID NO: 1080288 - DNA, 15 bp, Homo sapiens
tatataaaatgccat

SEQ ID NO: 1080289 - DNA, 15 bp, Homo sapiens
ttatataaaatgcca

SEQ ID NO: 1080290 - DNA, 15 bp, Homo sapiens
cttatataaaatgcc

SEQ ID NO: 1080291 - DNA, 15 bp, Homo sapiens
ccttatataaaatgc

SEQ ID NO: 1080292 - DNA, 15 bp, Homo sapiens
tccttatataaaatg

SEQ ID NO: 1080293 - DNA, 15 bp, Homo sapiens
ttccttatataaaat

SEQ ID NO: 1080294 - DNA, 15 bp, Homo sapiens
gttccttatataaaa

SEQ ID NO: 1080295 - DNA, 15 bp, Homo sapiens
cgttccttatataaa

SEQ ID NO: 1080296 - DNA, 15 bp, Homo sapiens
acgttccttatataa

SEQ ID NO: 1080297 - DNA, 15 bp, Homo sapiens
cacgttccttatata

SEQ ID NO: 1080298 - DNA, 15 bp, Homo sapiens
tcacgttccttatat

SEQ ID NO: 1080299 - DNA, 15 bp, Homo sapiens
ctcacgttccttata

SEQ ID NO: 1080300 - DNA, 15 bp, Homo sapiens
gctcacgttccttat

SEQ ID NO: 1080301 - DNA, 15 bp, Homo sapiens
tgctcacgttcctta

SEQ ID NO: 1080302 - DNA, 15 bp, Homo sapiens
atgctcacgttcctt

SEQ ID NO: 1080303 - DNA, 15 bp, Homo sapiens
gatgctcacgttcct

SEQ ID NO: 1080304 - DNA, 15 bp, Homo sapiens
agatgctcacgttcc

SEQ ID NO: 1080305 - DNA, 15 bp, Homo sapiens
cagatgctcacgttc

SEQ ID NO: 1080306 - DNA, 15 bp, Homo sapiens
acagatgctcacgtt

SEQ ID NO: 1080307 - DNA, 15 bp, Homo sapiens
cacagatgctcacgt

SEQ ID NO: 1080308 - DNA, 15 bp, Homo sapiens
ccacagatgctcacg

SEQ ID NO: 1080309 - DNA, 15 bp, Homo sapiens
tccacagatgctcac

SEQ ID NO: 1080310 - DNA, 15 bp, Homo sapiens
atccacagatgctca

SEQ ID NO: 1080311 - DNA, 15 bp, Homo sapiens
aatccacagatgctc

SEQ ID NO: 1080312 - DNA, 15 bp, Homo sapiens
aaatccacagatgct

SEQ ID NO: 1080313 - DNA, 15 bp, Homo sapiens
aaaatccacagatgc

SEQ ID NO: 1080314 - DNA, 15 bp, Homo sapiens
caaaatccacagatg

SEQ ID NO: 1080315 - DNA, 15 bp, Homo sapiens
ccaaaatccacagat

SEQ ID NO: 1080316 - DNA, 15 bp, Homo sapiens
accaaaatccacaga

SEQ ID NO: 1080317 - DNA, 15 bp, Homo sapiens
taccaaaatccacag

SEQ ID NO: 1080318 - DNA, 15 bp, Homo sapiens
ataccaaaatccaca

SEQ ID NO: 1080319 - DNA, 15 bp, Homo sapiens
gataccaaaatccac

SEQ ID NO: 1080320 - DNA, 15 bp, Homo sapiens
ggataccaaaatcca

SEQ ID NO: 1080321 - DNA, 15 bp, Homo sapiens
tggataccaaaatcc

SEQ ID NO: 1080322 - DNA, 15 bp, Homo sapiens
ctggataccaaaatc

SEQ ID NO: 1080323 - DNA, 15 bp, Homo sapiens
tctggataccaaaat

SEQ ID NO: 1080324 - DNA, 15 bp, Homo sapiens
ctctggataccaaaa

SEQ ID NO: 1080325 - DNA, 15 bp, Homo sapiens
tctctggataccaaa

SEQ ID NO: 1080326 - DNA, 15 bp, Homo sapiens
ctctctggataccaa

SEQ ID NO: 1080327 - DNA, 15 bp, Homo sapiens
cctctctggatacca

SEQ ID NO: 1080328 - DNA, 15 bp, Homo sapiens
ccctctctggatacc

SEQ ID NO: 1080329 - DNA, 15 bp, Homo sapiens
accctctctggatac

SEQ ID NO: 1080330 - DNA, 15 bp, Homo sapiens
gaccctctctggata

SEQ ID NO: 1080331 - DNA, 15 bp, Homo sapiens
ggaccctctctggat

SEQ ID NO: 1080332 - DNA, 15 bp, Homo sapiens
aggaccctctctgga

SEQ ID NO: 1080333 - DNA, 15 bp, Homo sapiens
caggaccctctctgg

SEQ ID NO: 1080334 - DNA, 15 bp, Homo sapiens
ccaggaccctctctg

SEQ ID NO: 1080335 - DNA, 15 bp, Homo sapiens
tccaggaccctctct

SEQ ID NO: 1080336 - DNA, 15 bp, Homo sapiens
ttccaggaccctctc

SEQ ID NO: 1080337 - DNA, 15 bp, Homo sapiens
gttccaggaccctct

SEQ ID NO: 1080338 - DNA, 15 bp, Homo sapiens
agttccaggaccctc

SEQ ID NO: 1080339 - DNA, 15 bp, Homo sapiens
tagttccaggaccct

SEQ ID NO: 1080340 - DNA, 15 bp, Homo sapiens
ttagttccaggaccc

SEQ ID NO: 1080341 - DNA, 15 bp, Homo sapiens
attagttccaggacc

SEQ ID NO: 1080342 - DNA, 15 bp, Homo sapiens
gattagttccaggac

SEQ ID NO: 1080343 - DNA, 15 bp, Homo sapiens
ggattagttccagga

SEQ ID NO: 1080344 - DNA, 15 bp, Homo sapiens
gggattagttccagg

SEQ ID NO: 1080345 - DNA, 15 bp, Homo sapiens
agggattagttccag

SEQ ID NO: 1080346 - DNA, 15 bp, Homo sapiens
gagggattagttcca

SEQ ID NO: 1080347 - DNA, 15 bp, Homo sapiens
tgagggattagttcc

SEQ ID NO: 1080348 - DNA, 15 bp, Homo sapiens
atgagggattagttc

SEQ ID NO: 1080349 - DNA, 15 bp, Homo sapiens
catgagggattagtt

SEQ ID NO: 1080350 - DNA, 15 bp, Homo sapiens
tcatgagggattagt

SEQ ID NO: 1080351 - DNA, 15 bp, Homo sapiens
ttcatgagggattag

SEQ ID NO: 1080352 - DNA, 15 bp, Homo sapiens
attcatgagggatta

SEQ ID NO: 1080353 - DNA, 15 bp, Homo sapiens
tattcatgagggatt

SEQ ID NO: 1080354 - DNA, 15 bp, Homo sapiens
gtattcatgagggat

SEQ ID NO: 1080355 - DNA, 15 bp, Homo sapiens
ggtattcatgaggga

SEQ ID NO: 1080356 - DNA, 15 bp, Homo sapiens
tggtattcatgaggg

SEQ ID NO: 1080357 - DNA, 15 bp, Homo sapiens
ttggtattcatgagg

SEQ ID NO: 1080358 - DNA, 15 bp, Homo sapiens
cttggtattcatgag

SEQ ID NO: 1080359 - DNA, 15 bp, Homo sapiens
ccttggtattcatga

SEQ ID NO: 1080360 - DNA, 15 bp, Homo sapiens
tccttggtattcatg

SEQ ID NO: 1080361 - DNA, 15 bp, Homo sapiens
gtccttggtattcat

SEQ ID NO: 1080362 - DNA, 15 bp, Homo sapiens
tgtccttggtattca

SEQ ID NO: 1080363 - DNA, 15 bp, Homo sapiens
ttgtccttggtattc

SEQ ID NO: 1080364 - DNA, 15 bp, Homo sapiens
gttgtccttggtatt

SEQ ID NO: 1080365 - DNA, 15 bp, Homo sapiens
agttgtccttggtat

SEQ ID NO: 1080366 - DNA, 15 bp, Homo sapiens
cagttgtccttggta

SEQ ID NO: 1080367 - DNA, 15 bp, Homo sapiens
acagttgtccttggt

SEQ ID NO: 1080368 - DNA, 15 bp, Homo sapiens
tacagttgtccttgg

SEQ ID NO: 1080369 - DNA, 15 bp, Homo sapiens
atacagttgtccttg

SEQ ID NO: 1080370 - DNA, 15 bp, Homo sapiens
tatacagttgtcctt

SEQ ID NO: 1080371 - DNA, 15 bp, Homo sapiens
atatacagttgtcct

SEQ ID NO: 1080372 - DNA, 15 bp, Homo sapiens
catatacagttgtcc

SEQ ID NO: 1080373 - DNA, 15 bp, Homo sapiens
gcatatacagttgtc

SEQ ID NO: 1080374 - DNA, 15 bp, Homo sapiens
tgcatatacagttgt

SEQ ID NO: 1080375 - DNA, 15 bp, Homo sapiens
ctgcatatacagttg

SEQ ID NO: 1080376 - DNA, 15 bp, Homo sapiens
tctgcatatacagtt

SEQ ID NO: 1080377 - DNA, 15 bp, Homo sapiens
ttctgcatatacagt

SEQ ID NO: 1080378 - DNA, 15 bp, Homo sapiens
gttctgcatatacag

SEQ ID NO: 1080379 - DNA, 15 bp, Homo sapiens
ggttctgcatataca

SEQ ID NO: 1080380 - DNA, 15 bp, Homo sapiens
aggttctgcatatac

SEQ ID NO: 1080381 - DNA, 15 bp, Homo sapiens
taggttctgcatata

SEQ ID NO: 1080382 - DNA, 15 bp, Homo sapiens
ataggttctgcatat

SEQ ID NO: 1080383 - DNA, 15 bp, Homo sapiens
cataggttctgcata

SEQ ID NO: 1080384 - DNA, 15 bp, Homo sapiens
ccataggttctgcat

SEQ ID NO: 1080385 - DNA, 15 bp, Homo sapiens
cccataggttctgca

SEQ ID NO: 1080386 - DNA, 15 bp, Homo sapiens
tcccataggttctgc

SEQ ID NO: 1080387 - DNA, 15 bp, Homo sapiens
atcccataggttctg

SEQ ID NO: 1080388 - DNA, 15 bp, Homo sapiens
aatcccataggttct

SEQ ID NO: 1080389 - DNA, 15 bp, Homo sapiens
aaatcccataggttc

SEQ ID NO: 1080390 - DNA, 15 bp, Homo sapiens
caaatcccataggtt

SEQ ID NO: 1080391 - DNA, 15 bp, Homo sapiens
gcaaatcccataggt

SEQ ID NO: 1080392 - DNA, 15 bp, Homo sapiens
agcaaatcccatagg

SEQ ID NO: 1080393 - DNA, 15 bp, Homo sapiens
cagcaaatcccatag

SEQ ID NO: 1080394 - DNA, 15 bp, Homo sapiens
tcagcaaatcccata

SEQ ID NO: 1080395 - DNA, 15 bp, Homo sapiens
atcagcaaatcccat

SEQ ID NO: 1080396 - DNA, 15 bp, Homo sapiens
tatcagcaaatccca

SEQ ID NO: 1080397 - DNA, 15 bp, Homo sapiens
ctatcagcaaatccc

SEQ ID NO: 1080398 - DNA, 15 bp, Homo sapiens
tctatcagcaaatcc

SEQ ID NO: 1080399 - DNA, 15 bp, Homo sapiens
gtctatcagcaaatc

SEQ ID NO: 1080400 - DNA, 15 bp, Homo sapiens
agtctatcagcaaat

SEQ ID NO: 1080401 - DNA, 15 bp, Homo sapiens
cagtctatcagcaaa

SEQ ID NO: 1080402 - DNA, 15 bp, Homo sapiens
tcagtctatcagcaa

SEQ ID NO: 1080403 - DNA, 15 bp, Homo sapiens
ttcagtctatcagca

SEQ ID NO: 1080404 - DNA, 15 bp, Homo sapiens
attcagtctatcagc

SEQ ID NO: 1080405 - DNA, 15 bp, Homo sapiens
tattcagtctatcag

SEQ ID NO: 1080406 - DNA, 15 bp, Homo sapiens
atattcagtctatca

SEQ ID NO: 1080407 - DNA, 15 bp, Homo sapiens
catattcagtctatc

SEQ ID NO: 1080408 - DNA, 15 bp, Homo sapiens
ccatattcagtctat

SEQ ID NO: 1080409 - DNA, 15 bp, Homo sapiens
cccatattcagtcta

SEQ ID NO: 1080410 - DNA, 15 bp, Homo sapiens
ccccatattcagtct

SEQ ID NO: 1080411 - DNA, 15 bp, Homo sapiens
accccatattcagtc

SEQ ID NO: 1080412 - DNA, 15 bp, Homo sapiens
caccccatattcagt

SEQ ID NO: 1080413 - DNA, 15 bp, Homo sapiens
tcaccccatattcag

SEQ ID NO: 1080414 - DNA, 15 bp, Homo sapiens
ctcaccccatattca

SEQ ID NO: 1080415 - DNA, 15 bp, Homo sapiens
tctcaccccatattc

SEQ ID NO: 1080416 - DNA, 15 bp, Homo sapiens
ctctcaccccatatt

SEQ ID NO: 1080417 - DNA, 15 bp, Homo sapiens
tctctcaccccatat

SEQ ID NO: 1080418 - DNA, 15 bp, Homo sapiens
ctctctcaccccata

SEQ ID NO: 1080419 - DNA, 15 bp, Homo sapiens
tctctctcaccccat

SEQ ID NO: 1080420 - DNA, 15 bp, Homo sapiens
ttctctctcacccca

SEQ ID NO: 1080421 - DNA, 15 bp, Homo sapiens
tttctctctcacccc

SEQ ID NO: 1080422 - DNA, 15 bp, Homo sapiens
ttttctctctcaccc

SEQ ID NO: 1080423 - DNA, 15 bp, Homo sapiens
tttttctctctcacc

SEQ ID NO: 1080424 - DNA, 15 bp, Homo sapiens
ttttttctctctcac

SEQ ID NO: 1080425 - DNA, 15 bp, Homo sapiens
cttttttctctctca

SEQ ID NO: 1080426 - DNA, 15 bp, Homo sapiens
acttttttctctctc

SEQ ID NO: 1080427 - DNA, 15 bp, Homo sapiens
tacttttttctctct

SEQ ID NO: 1080428 - DNA, 15 bp, Homo sapiens
ttacttttttctctc

SEQ ID NO: 1080429 - DNA, 15 bp, Homo sapiens
tttacttttttctct

SEQ ID NO: 1080430 - DNA, 15 bp, Homo sapiens
ttttacttttttctc

SEQ ID NO: 1080431 - DNA, 15 bp, Homo sapiens
cttttacttttttct

SEQ ID NO: 1080432 - DNA, 15 bp, Homo sapiens
tcttttacttttttc

SEQ ID NO: 1080433 - DNA, 15 bp, Homo sapiens
atcttttactttttt

SEQ ID NO: 1080434 - DNA, 15 bp, Homo sapiens
catcttttacttttt

SEQ ID NO: 1080435 - DNA, 15 bp, Homo sapiens
tcatcttttactttt

SEQ ID NO: 1080436 - DNA, 15 bp, Homo sapiens
atcatcttttacttt

SEQ ID NO: 1080437 - DNA, 15 bp, Homo sapiens
aatcatcttttactt

SEQ ID NO: 1080438 - DNA, 15 bp, Homo sapiens
gaatcatcttttact

SEQ ID NO: 1080439 - DNA, 15 bp, Homo sapiens
ggaatcatcttttac

SEQ ID NO: 1080440 - DNA, 15 bp, Homo sapiens
tggaatcatctttta

SEQ ID NO: 1080441 - DNA, 15 bp, Homo sapiens
ttggaatcatctttt

SEQ ID NO: 1080442 - DNA, 15 bp, Homo sapiens
cttggaatcatcttt

SEQ ID NO: 1080443 - DNA, 15 bp, Homo sapiens
ccttggaatcatctt

SEQ ID NO: 1080444 - DNA, 15 bp, Homo sapiens
accttggaatcatct

SEQ ID NO: 1080445 - DNA, 15 bp, Homo sapiens
aaccttggaatcatc

SEQ ID NO: 1080446 - DNA, 15 bp, Homo sapiens
aaaccttggaatcat

SEQ ID NO: 1080447 - DNA, 15 bp, Homo sapiens
aaaaccttggaatca

SEQ ID NO: 1080448 - DNA, 15 bp, Homo sapiens
aaaaaccttggaatc

SEQ ID NO: 1080449 - DNA, 15 bp, Homo sapiens
caaaaaccttggaat

SEQ ID NO: 1080450 - DNA, 15 bp, Homo sapiens
tcaaaaaccttggaa

SEQ ID NO: 1080451 - DNA, 15 bp, Homo sapiens
ctcaaaaaccttgga

SEQ ID NO: 1080452 - DNA, 15 bp, Homo sapiens
actcaaaaaccttgg

SEQ ID NO: 1080453 - DNA, 15 bp, Homo sapiens
tactcaaaaaccttg

SEQ ID NO: 1080454 - DNA, 15 bp, Homo sapiens
atactcaaaaacctt

SEQ ID NO: 1080455 - DNA, 15 bp, Homo sapiens
gatactcaaaaacct

SEQ ID NO: 1080456 - DNA, 15 bp, Homo sapiens
agatactcaaaaacc

SEQ ID NO: 1080457 - DNA, 15 bp, Homo sapiens
cagatactcaaaaac

SEQ ID NO: 1080458 - DNA, 15 bp, Homo sapiens
tcagatactcaaaaa

SEQ ID NO: 1080459 - DNA, 15 bp, Homo sapiens
ttcagatactcaaaa

SEQ ID NO: 1080460 - DNA, 15 bp, Homo sapiens
attcagatactcaaa

SEQ ID NO: 1080461 - DNA, 15 bp, Homo sapiens
gattcagatactcaa

SEQ ID NO: 1080462 - DNA, 15 bp, Homo sapiens
tgattcagatactca

SEQ ID NO: 1080463 - DNA, 15 bp, Homo sapiens
ttgattcagatactc

SEQ ID NO: 1080464 - DNA, 15 bp, Homo sapiens
tttgattcagatact

SEQ ID NO: 1080465 - DNA, 15 bp, Homo sapiens
ctttgattcagatac

SEQ ID NO: 1080466 - DNA, 15 bp, Homo sapiens
actttgattcagata

SEQ ID NO: 1080467 - DNA, 15 bp, Homo sapiens
tactttgattcagat

SEQ ID NO: 1080468 - DNA, 15 bp, Homo sapiens
ttactttgattcaga

SEQ ID NO: 1080469 - DNA, 15 bp, Homo sapiens
gttactttgattcag

SEQ ID NO: 1080470 - DNA, 15 bp, Homo sapiens
agttactttgattca

SEQ ID NO: 1080471 - DNA, 15 bp, Homo sapiens
cagttactttgattc

SEQ ID NO: 1080472 - DNA, 15 bp, Homo sapiens
tcagttactttgatt

SEQ ID NO: 1080473 - DNA, 15 bp, Homo sapiens
ttcagttactttgat

SEQ ID NO: 1080474 - DNA, 15 bp, Homo sapiens
attcagttactttga

SEQ ID NO: 1080475 - DNA, 15 bp, Homo sapiens
tattcagttactttg

SEQ ID NO: 1080476 - DNA, 15 bp, Homo sapiens
ttattcagttacttt

SEQ ID NO: 1080477 - DNA, 15 bp, Homo sapiens
tttattcagttactt

SEQ ID NO: 1080478 - DNA, 15 bp, Homo sapiens
atttattcagttact

SEQ ID NO: 1080479 - DNA, 15 bp, Homo sapiens
aatttattcagttac

SEQ ID NO: 1080480 - DNA, 15 bp, Homo sapiens
aaatttattcagtta

SEQ ID NO: 1080481 - DNA, 15 bp, Homo sapiens
caaatttattcagtt

SEQ ID NO: 1080482 - DNA, 15 bp, Homo sapiens
acaaatttattcagt

SEQ ID NO: 1080483 - DNA, 15 bp, Homo sapiens
tacaaatttattcag

SEQ ID NO: 1080484 - DNA, 15 bp, Homo sapiens
gtacaaatttattca

SEQ ID NO: 1080485 - DNA, 15 bp, Homo sapiens
tgtacaaatttattc

SEQ ID NO: 1080486 - DNA, 15 bp, Homo sapiens
ctgtacaaatttatt

SEQ ID NO: 1080487 - DNA, 15 bp, Homo sapiens
gctgtacaaatttat

SEQ ID NO: 1080488 - DNA, 15 bp, Homo sapiens
ggctgtacaaattta

SEQ ID NO: 1080489 - DNA, 15 bp, Homo sapiens
tggctgtacaaattt

SEQ ID NO: 1080490 - DNA, 15 bp, Homo sapiens
gtggctgtacaaatt

SEQ ID NO: 1080491 - DNA, 15 bp, Homo sapiens
tgtggctgtacaaat

SEQ ID NO: 1080492 - DNA, 15 bp, Homo sapiens
gtgtggctgtacaaa

SEQ ID NO: 1080493 - DNA, 15 bp, Homo sapiens
agtgtggctgtacaa

SEQ ID NO: 1080494 - DNA, 15 bp, Homo sapiens
cagtgtggctgtaca

SEQ ID NO: 1080495 - DNA, 15 bp, Homo sapiens
gcagtgtggctgtac

SEQ ID NO: 1080496 - DNA, 15 bp, Homo sapiens
tgcagtgtggctgta

SEQ ID NO: 1080497 - DNA, 15 bp, Homo sapiens
atgcagtgtggctgt

SEQ ID NO: 1080498 - DNA, 15 bp, Homo sapiens
gatgcagtgtggctg

SEQ ID NO: 1080499 - DNA, 15 bp, Homo sapiens
tgatgcagtgtggct

SEQ ID NO: 1080500 - DNA, 15 bp, Homo sapiens
ttgatgcagtgtggc

SEQ ID NO: 1080501 - DNA, 15 bp, Homo sapiens
cttgatgcagtgtgg

SEQ ID NO: 1080502 - DNA, 15 bp, Homo sapiens
tcttgatgcagtgtg

SEQ ID NO: 1080503 - DNA, 15 bp, Homo sapiens
ttcttgatgcagtgt

SEQ ID NO: 1080504 - DNA, 15 bp, Homo sapiens
attcttgatgcagtg

SEQ ID NO: 1080505 - DNA, 15 bp, Homo sapiens
gattcttgatgcagt

SEQ ID NO: 1080506 - DNA, 15 bp, Homo sapiens
ggattcttgatgcag

SEQ ID NO: 1080507 - DNA, 15 bp, Homo sapiens
tggattcttgatgca

SEQ ID NO: 1080508 - DNA, 15 bp, Homo sapiens
ctggattcttgatgc

SEQ ID NO: 1080509 - DNA, 15 bp, Homo sapiens
tctggattcttgatg

SEQ ID NO: 1080510 - DNA, 15 bp, Homo sapiens
ttctggattcttgat

SEQ ID NO: 1080511 - DNA, 15 bp, Homo sapiens
tttctggattcttga

SEQ ID NO: 1080512 - DNA, 15 bp, Homo sapiens
ttttctggattcttg

SEQ ID NO: 1080513 - DNA, 15 bp, Homo sapiens
gttttctggattctt

SEQ ID NO: 1080514 - DNA, 15 bp, Homo sapiens
agttttctggattct

SEQ ID NO: 1080515 - DNA, 15 bp, Homo sapiens
cagttttctggattc

SEQ ID NO: 1080516 - DNA, 15 bp, Homo sapiens
acagttttctggatt

SEQ ID NO: 1080517 - DNA, 15 bp, Homo sapiens
tacagttttctggat

SEQ ID NO: 1080518 - DNA, 15 bp, Homo sapiens
ttacagttttctgga

SEQ ID NO: 1080519 - DNA, 15 bp, Homo sapiens
attacagttttctgg

SEQ ID NO: 1080520 - DNA, 15 bp, Homo sapiens
tattacagttttctg

SEQ ID NO: 1080521 - DNA, 15 bp, Homo sapiens
gtattacagttttct

SEQ ID NO: 1080522 - DNA, 15 bp, Homo sapiens
agtattacagttttc

SEQ ID NO: 1080523 - DNA, 15 bp, Homo sapiens
tagtattacagtttt

SEQ ID NO: 1080524 - DNA, 15 bp, Homo sapiens
ttagtattacagttt

SEQ ID NO: 1080525 - DNA, 15 bp, Homo sapiens
tttagtattacagtt

SEQ ID NO: 1080526 - DNA, 15 bp, Homo sapiens
atttagtattacagt

SEQ ID NO: 1080527 - DNA, 15 bp, Homo sapiens
aatttagtattacag

SEQ ID NO: 1080528 - DNA, 15 bp, Homo sapiens
aaatttagtattaca

SEQ ID NO: 1080529 - DNA, 15 bp, Homo sapiens
caaatttagtattac

SEQ ID NO: 1080530 - DNA, 15 bp, Homo sapiens
tcaaatttagtatta

SEQ ID NO: 1080531 - DNA, 15 bp, Homo sapiens
ctcaaatttagtatt

SEQ ID NO: 1080532 - DNA, 15 bp, Homo sapiens
gactcaaatttagta

SEQ ID NO: 1080533 - DNA, 15 bp, Homo sapiens
agactcaaatttagt

SEQ ID NO: 1080534 - DNA, 15 bp, Homo sapiens
aagactcaaatttag

SEQ ID NO: 1080535 - DNA, 15 bp, Homo sapiens
taagactcaaattta

SEQ ID NO: 1080536 - DNA, 15 bp, Homo sapiens
ttaagactcaaattt

SEQ ID NO: 1080537 - DNA, 15 bp, Homo sapiens
tttaagactcaaatt

SEQ ID NO: 1080538 - DNA, 15 bp, Homo sapiens
ttttaagactcaaat

SEQ ID NO: 1080539 - DNA, 15 bp, Homo sapiens
tttttaagactcaaa

SEQ ID NO: 1080540 - DNA, 15 bp, Homo sapiens
ttttttaagactcaa

SEQ ID NO: 1080541 - DNA, 15 bp, Homo sapiens
tttttttaagactca

SEQ ID NO: 1080542 - DNA, 15 bp, Homo sapiens
ttttttttaagactc

SEQ ID NO: 1080543 - DNA, 15 bp, Homo sapiens
tttttttttaagact

SEQ ID NO: 1080544 - DNA, 15 bp, Homo sapiens
ctggaattttttttt

SEQ ID NO: 1080545 - DNA, 15 bp, Homo sapiens
tctggaatttttttt

SEQ ID NO: 1080546 - DNA, 15 bp, Homo sapiens
ttctggaattttttt

SEQ ID NO: 1080547 - DNA, 15 bp, Homo sapiens
cttctggaatttttt

SEQ ID NO: 1080548 - DNA, 15 bp, Homo sapiens
tcttctggaattttt

SEQ ID NO: 1080549 - DNA, 15 bp, Homo sapiens
atcttctggaatttt

SEQ ID NO: 1080550 - DNA, 15 bp, Homo sapiens
aatcttctggaattt

SEQ ID NO: 1080551 - DNA, 15 bp, Homo sapiens
aaatcttctggaatt

SEQ ID NO: 1080552 - DNA, 15 bp, Homo sapiens
gaaatcttctggaat

SEQ ID NO: 1080553 - DNA, 15 bp, Homo sapiens
tgaaatcttctggaa

SEQ ID NO: 1080554 - DNA, 15 bp, Homo sapiens
ctgaaatcttctgga

SEQ ID NO: 1080555 - DNA, 15 bp, Homo sapiens
tctgaaatcttctgg

SEQ ID NO: 1080556 - DNA, 15 bp, Homo sapiens
ttctgaaatcttctg

SEQ ID NO: 1080557 - DNA, 15 bp, Homo sapiens
attctgaaatcttct

SEQ ID NO: 1080558 - DNA, 15 bp, Homo sapiens
aattctgaaatcttc

SEQ ID NO: 1080559 - DNA, 15 bp, Homo sapiens
taattctgaaatctt

SEQ ID NO: 1080560 - DNA, 15 bp, Homo sapiens
ctaattctgaaatct

SEQ ID NO: 1080561 - DNA, 15 bp, Homo sapiens
cctaattctgaaatc

SEQ ID NO: 1080562 - DNA, 15 bp, Homo sapiens
tcctaattctgaaat

SEQ ID NO: 1080563 - DNA, 15 bp, Homo sapiens
ttcctaattctgaaa

SEQ ID NO: 1080564 - DNA, 15 bp, Homo sapiens
cttcctaattctgaa

SEQ ID NO: 1080565 - DNA, 15 bp, Homo sapiens
ccttcctaattctga

SEQ ID NO: 1080566 - DNA, 15 bp, Homo sapiens
accttcctaattctg

SEQ ID NO: 1080567 - DNA, 15 bp, Homo sapiens
gaccttcctaattct

SEQ ID NO: 1080568 - DNA, 15 bp, Homo sapiens
ggaccttcctaattc

SEQ ID NO: 1080569 - DNA, 15 bp, Homo sapiens
aggaccttcctaatt

SEQ ID NO: 1080570 - DNA, 15 bp, Homo sapiens
aaggaccttcctaat

SEQ ID NO: 1080571 - DNA, 15 bp, Homo sapiens
aaaggaccttcctaa

SEQ ID NO: 1080572 - DNA, 15 bp, Homo sapiens
caaaggaccttccta

SEQ ID NO: 1080573 - DNA, 15 bp, Homo sapiens
tcaaaggaccttcct

SEQ ID NO: 1080574 - DNA, 15 bp, Homo sapiens
gtcaaaggaccttcc

SEQ ID NO: 1080575 - DNA, 15 bp, Homo sapiens
tgtcaaaggaccttc

SEQ ID NO: 1080576 - DNA, 15 bp, Homo sapiens
gtgtcaaaggacctt

SEQ ID NO: 1080577 - DNA, 15 bp, Homo sapiens
ggtgtcaaaggacct

SEQ ID NO: 1080578 - DNA, 15 bp, Homo sapiens
tggtgtcaaaggacc

SEQ ID NO: 1080579 - DNA, 15 bp, Homo sapiens
ttggtgtcaaaggac

SEQ ID NO: 1080580 - DNA, 15 bp, Homo sapiens
cttggtgtcaaagga

SEQ ID NO: 1080581 - DNA, 15 bp, Homo sapiens
acttggtgtcaaagg

SEQ ID NO: 1080582 - DNA, 15 bp, Homo sapiens
aacttggtgtcaaag

SEQ ID NO: 1080583 - DNA, 15 bp, Homo sapiens
caacttggtgtcaaa

SEQ ID NO: 1080584 - DNA, 15 bp, Homo sapiens
gcaacttggtgtcaa

SEQ ID NO: 1080585 - DNA, 15 bp, Homo sapiens
tgcaacttggtgtca

SEQ ID NO: 1080586 - DNA, 15 bp, Homo sapiens
ttgcaacttggtgtc

SEQ ID NO: 1080587 - DNA, 15 bp, Homo sapiens
tttgcaacttggtgt

SEQ ID NO: 1080588 - DNA, 15 bp, Homo sapiens
ctttgcaacttggtg

SEQ ID NO: 1080589 - DNA, 15 bp, Homo sapiens
gctttgcaacttggt

SEQ ID NO: 1080590 - DNA, 15 bp, Homo sapiens
agctttgcaacttgg

SEQ ID NO: 1080591 - DNA, 15 bp, Homo sapiens
tagctttgcaacttg

SEQ ID NO: 1080592 - DNA, 15 bp, Homo sapiens
ctagctttgcaactt

SEQ ID NO: 1080593 - DNA, 15 bp, Homo sapiens
actagctttgcaact

SEQ ID NO: 1080594 - DNA, 15 bp, Homo sapiens
tactagctttgcaac

SEQ ID NO: 1080595 - DNA, 15 bp, Homo sapiens
atactagctttgcaa

SEQ ID NO: 1080596 - DNA, 15 bp, Homo sapiens
aatactagctttgca

SEQ ID NO: 1080597 - DNA, 15 bp, Homo sapiens
taatactagctttgc

SEQ ID NO: 1080598 - DNA, 15 bp, Homo sapiens
ctaatactagctttg

SEQ ID NO: 1080599 - DNA, 15 bp, Homo sapiens
tctaatactagcttt

SEQ ID NO: 1080600 - DNA, 15 bp, Homo sapiens
ttctaatactagctt

SEQ ID NO: 1080601 - DNA, 15 bp, Homo sapiens
gttctaatactagct

SEQ ID NO: 1080602 - DNA, 15 bp, Homo sapiens
agttctaatactagc

SEQ ID NO: 1080603 - DNA, 15 bp, Homo sapiens
gagttctaatactag

SEQ ID NO: 1080604 - DNA, 15 bp, Homo sapiens
tgagttctaatacta

SEQ ID NO: 1080605 - DNA, 15 bp, Homo sapiens
ctgagttctaatact

SEQ ID NO: 1080606 - DNA, 15 bp, Homo sapiens
cctgagttctaatac

SEQ ID NO: 1080607 - DNA, 15 bp, Homo sapiens
acctgagttctaata

SEQ ID NO: 1080608 - DNA, 15 bp, Homo sapiens
aacctgagttctaat

SEQ ID NO: 1080609 - DNA, 15 bp, Homo sapiens
aaacctgagttctaa

SEQ ID NO: 1080610 - DNA, 15 bp, Homo sapiens
gaaacctgagttcta

SEQ ID NO: 1080611 - DNA, 15 bp, Homo sapiens
ggaaacctgagttct

SEQ ID NO: 1080612 - DNA, 15 bp, Homo sapiens
aggaaacctgagttc

SEQ ID NO: 1080613 - DNA, 15 bp, Homo sapiens
caggaaacctgagtt

SEQ ID NO: 1080614 - DNA, 15 bp, Homo sapiens
tcaggaaacctgagt

SEQ ID NO: 1080615 - DNA, 15 bp, Homo sapiens
ttcaggaaacctgag

SEQ ID NO: 1080616 - DNA, 15 bp, Homo sapiens
attcaggaaacctga

SEQ ID NO: 1080617 - DNA, 15 bp, Homo sapiens
aattcaggaaacctg

SEQ ID NO: 1080618 - DNA, 15 bp, Homo sapiens
aaattcaggaaacct

SEQ ID NO: 1080619 - DNA, 15 bp, Homo sapiens
gaaattcaggaaacc

SEQ ID NO: 1080620 - DNA, 15 bp, Homo sapiens
ccgagtcagaggcgg

SEQ ID NO: 1080621 - DNA, 15 bp, Homo sapiens
tccgagtcagaggcg

SEQ ID NO: 1080622 - DNA, 15 bp, Homo sapiens
gtccgagtcagaggc

SEQ ID NO: 1080623 - DNA, 15 bp, Homo sapiens
tgtccgagtcagagg

SEQ ID NO: 1080624 - DNA, 15 bp, Homo sapiens
gtgtccgagtcagag

SEQ ID NO: 1080625 - DNA, 15 bp, Homo sapiens
ggtgtccgagtcaga

SEQ ID NO: 1080626 - DNA, 15 bp, Homo sapiens
tggtgtccgagtcag

SEQ ID NO: 1080627 - DNA, 15 bp, Homo sapiens
ctggtgtccgagtca

SEQ ID NO: 1080628 - DNA, 15 bp, Homo sapiens
gctggtgtccgagtc

SEQ ID NO: 1080629 - DNA, 15 bp, Homo sapiens
ggctggtgtccgagt

SEQ ID NO: 1080630 - DNA, 15 bp, Homo sapiens
aggctggtgtccgag

SEQ ID NO: 1080631 - DNA, 15 bp, Homo sapiens
aaggctggtgtccga

SEQ ID NO: 1080632 - DNA, 15 bp, Homo sapiens
gaaggctggtgtccg

SEQ ID NO: 1080633 - DNA, 15 bp, Homo sapiens
agaaggctggtgtcc

SEQ ID NO: 1080634 - DNA, 15 bp, Homo sapiens
gagaaggctggtgtc

SEQ ID NO: 1080635 - DNA, 15 bp, Homo sapiens
tgagaaggctggtgt

SEQ ID NO: 1080636 - DNA, 15 bp, Homo sapiens
ctgagaaggctggtg

SEQ ID NO: 1080637 - DNA, 15 bp, Homo sapiens
tctgagaaggctggt

SEQ ID NO: 1080638 - DNA, 15 bp, Homo sapiens
gtctgagaaggctgg

SEQ ID NO: 1080639 - DNA, 15 bp, Homo sapiens
ggtctgagaaggctg

SEQ ID NO: 1080640 - DNA, 15 bp, Homo sapiens
gggtctgagaaggct

SEQ ID NO: 1080641 - DNA, 15 bp, Homo sapiens
ggggtctgagaaggc

SEQ ID NO: 1080642 - DNA, 15 bp, Homo sapiens
cggggtctgagaagg

SEQ ID NO: 1080643 - DNA, 15 bp, Homo sapiens
ccggggtctgagaag

SEQ ID NO: 1080644 - DNA, 15 bp, Homo sapiens
cccggggtctgagaa

SEQ ID NO: 1080645 - DNA, 15 bp, Homo sapiens
gcccggggtctgaga

SEQ ID NO: 1080646 - DNA, 15 bp, Homo sapiens
tgcccggggtctgag

SEQ ID NO: 1080647 - DNA, 15 bp, Homo sapiens
gtgcccggggtctga

SEQ ID NO: 1080648 - DNA, 15 bp, Homo sapiens
agtgcccggggtctg

SEQ ID NO: 1080649 - DNA, 15 bp, Homo sapiens
gagtgcccggggtct

SEQ ID NO: 1080650 - DNA, 15 bp, Homo sapiens
cgagtgcccggggtc

SEQ ID NO: 1080651 - DNA, 15 bp, Homo sapiens
ccgagtgcccggggt

SEQ ID NO: 1080652 - DNA, 15 bp, Homo sapiens
gccgagtgcccgggg

SEQ ID NO: 1080653 - DNA, 15 bp, Homo sapiens
ggccgagtgcccggg

SEQ ID NO: 1080654 - DNA, 15 bp, Homo sapiens
tggccgagtgcccgg

SEQ ID NO: 1080655 - DNA, 15 bp, Homo sapiens
gtggccgagtgcccg

SEQ ID NO: 1080656 - DNA, 15 bp, Homo sapiens
ggtggccgagtgccc

SEQ ID NO: 1080657 - DNA, 15 bp, Homo sapiens
gggtggccgagtgcc

SEQ ID NO: 1080658 - DNA, 15 bp, Homo sapiens
ggggtggccgagtgc

SEQ ID NO: 1080659 - DNA, 15 bp, Homo sapiens
cggggtggccgagtg

SEQ ID NO: 1080660 - DNA, 15 bp, Homo sapiens
gcggggtggccgagt

SEQ ID NO: 1080661 - DNA, 15 bp, Homo sapiens
ggcggggtggccgag

SEQ ID NO: 1080662 - DNA, 15 bp, Homo sapiens
gggcggggtggccga

SEQ ID NO: 1080663 - DNA, 15 bp, Homo sapiens
agggcggggtggccg

SEQ ID NO: 1080664 - DNA, 15 bp, Homo sapiens
cagggcggggtggcc

SEQ ID NO: 1080665 - DNA, 15 bp, Homo sapiens
gcagggcggggtggc

SEQ ID NO: 1080666 - DNA, 15 bp, Homo sapiens
ggcagggcggggtgg

SEQ ID NO: 1080667 - DNA, 15 bp, Homo sapiens
gggcagggcggggtg

SEQ ID NO: 1080668 - DNA, 15 bp, Homo sapiens
ggggcagggcggggt

SEQ ID NO: 1080669 - DNA, 15 bp, Homo sapiens
aggggcagggcgggg

SEQ ID NO: 1080670 - DNA, 15 bp, Homo sapiens
taggggcagggcggg

SEQ ID NO: 1080671 - DNA, 15 bp, Homo sapiens
gtaggggcagggcgg

SEQ ID NO: 1080672 - DNA, 15 bp, Homo sapiens
ggtaggggcagggcg

SEQ ID NO: 1080673 - DNA, 15 bp, Homo sapiens
gggtaggggcagggc

SEQ ID NO: 1080674 - DNA, 15 bp, Homo sapiens
agggtaggggcaggg

SEQ ID NO: 1080675 - DNA, 15 bp, Homo sapiens
aagggtaggggcagg

SEQ ID NO: 1080676 - DNA, 15 bp, Homo sapiens
caagggtaggggcag

SEQ ID NO: 1080677 - DNA, 15 bp, Homo sapiens
ccaagggtaggggca

SEQ ID NO: 1080678 - DNA, 15 bp, Homo sapiens
gccaagggtaggggc

SEQ ID NO: 1080679 - DNA, 15 bp, Homo sapiens
ggccaagggtagggg

SEQ ID NO: 1080680 - DNA, 15 bp, Homo sapiens
aggccaagggtaggg

SEQ ID NO: 1080681 - DNA, 15 bp, Homo sapiens
gaggccaagggtagg

SEQ ID NO: 1080682 - DNA, 15 bp, Homo sapiens
ggaggccaagggtag

SEQ ID NO: 1080683 - DNA, 15 bp, Homo sapiens
aggaggccaagggta

SEQ ID NO: 1080684 - DNA, 15 bp, Homo sapiens
gaggaggccaagggt

SEQ ID NO: 1080685 - DNA, 15 bp, Homo sapiens
ggaggaggccaaggg

SEQ ID NO: 1080686 - DNA, 15 bp, Homo sapiens
tggaggaggccaagg

SEQ ID NO: 1080687 - DNA, 15 bp, Homo sapiens
gtggaggaggccaag

SEQ ID NO: 1080688 - DNA, 15 bp, Homo sapiens
ggtggaggaggccaa

SEQ ID NO: 1080689 - DNA, 15 bp, Homo sapiens
gggtggaggaggcca

SEQ ID NO: 1080690 - DNA, 15 bp, Homo sapiens
agggtggaggaggcc

SEQ ID NO: 1080691 - DNA, 15 bp, Homo sapiens
gagggtggaggaggc

SEQ ID NO: 1080692 - DNA, 15 bp, Homo sapiens
ggagggtggaggagg

SEQ ID NO: 1080693 - DNA, 15 bp, Homo sapiens
gggagggtggaggag

SEQ ID NO: 1080694 - DNA, 15 bp, Homo sapiens
ggggagggtggagga

SEQ ID NO: 1080695 - DNA, 15 bp, Homo sapiens
aggggagggtggagg

SEQ ID NO: 1080696 - DNA, 15 bp, Homo sapiens
gaggggagggtggag

SEQ ID NO: 1080697 - DNA, 15 bp, Homo sapiens
tgaggggagggtgga

SEQ ID NO: 1080698 - DNA, 15 bp, Homo sapiens
atgaggggagggtgg

SEQ ID NO: 1080699 - DNA, 15 bp, Homo sapiens
gatgaggggagggtg

SEQ ID NO: 1080700 - DNA, 15 bp, Homo sapiens
ggatgaggggagggt

SEQ ID NO: 1080701 - DNA, 15 bp, Homo sapiens
gggatgaggggaggg

SEQ ID NO: 1080702 - DNA, 15 bp, Homo sapiens
agggatgaggggagg

SEQ ID NO: 1080703 - DNA, 15 bp, Homo sapiens
gagggatgaggggag

SEQ ID NO: 1080704 - DNA, 15 bp, Homo sapiens
ggagggatgagggga

SEQ ID NO: 1080705 - DNA, 15 bp, Homo sapiens
cggagggatgagggg

SEQ ID NO: 1080706 - DNA, 15 bp, Homo sapiens
gcggagggatgaggg

SEQ ID NO: 1080707 - DNA, 15 bp, Homo sapiens
ggcggagggatgagg

SEQ ID NO: 1080708 - DNA, 15 bp, Homo sapiens
cggcggagggatgag

SEQ ID NO: 1080709 - DNA, 15 bp, Homo sapiens
tcggcggagggatga

SEQ ID NO: 1080710 - DNA, 15 bp, Homo sapiens
gtcggcggagggatg

SEQ ID NO: 1080711 - DNA, 15 bp, Homo sapiens
ggtcggcggagggat

SEQ ID NO: 1080712 - DNA, 15 bp, Homo sapiens
gggtcggcggaggga

SEQ ID NO: 1080713 - DNA, 15 bp, Homo sapiens
ggggtcggcggaggg

SEQ ID NO: 1080714 - DNA, 15 bp, Homo sapiens
tggggtcggcggagg

SEQ ID NO: 1080715 - DNA, 15 bp, Homo sapiens
ctggggtcggcggag

SEQ ID NO: 1080716 - DNA, 15 bp, Homo sapiens
cctggggtcggcgga

SEQ ID NO: 1080717 - DNA, 15 bp, Homo sapiens
gcctggggtcggcgg

SEQ ID NO: 1080718 - DNA, 15 bp, Homo sapiens
ggcctggggtcggcg

SEQ ID NO: 1080719 - DNA, 15 bp, Homo sapiens
gggcctggggtcggc

SEQ ID NO: 1080720 - DNA, 15 bp, Homo sapiens
tgggcctggggtcgg

SEQ ID NO: 1080721 - DNA, 15 bp, Homo sapiens
gtgggcctggggtcg

SEQ ID NO: 1080722 - DNA, 15 bp, Homo sapiens
agtgggcctggggtc

SEQ ID NO: 1080723 - DNA, 15 bp, Homo sapiens
gagtgggcctggggt

SEQ ID NO: 1080724 - DNA, 15 bp, Homo sapiens
ggagtgggcctgggg

SEQ ID NO: 1080725 - DNA, 15 bp, Homo sapiens
cggagtgggcctggg

SEQ ID NO: 1080726 - DNA, 15 bp, Homo sapiens
tcggagtgggcctgg

SEQ ID NO: 1080727 - DNA, 15 bp, Homo sapiens
gtcggagtgggcctg

SEQ ID NO: 1080728 - DNA, 15 bp, Homo sapiens
agtcggagtgggcct

SEQ ID NO: 1080729 - DNA, 15 bp, Homo sapiens
gagtcggagtgggcc

SEQ ID NO: 1080730 - DNA, 15 bp, Homo sapiens
cgagtcggagtgggc

SEQ ID NO: 1080731 - DNA, 15 bp, Homo sapiens
ccgagtcggagtggg

SEQ ID NO: 1080732 - DNA, 15 bp, Homo sapiens
tccgagtcggagtgg

SEQ ID NO: 1080733 - DNA, 15 bp, Homo sapiens
gtccgagtcggagtg

SEQ ID NO: 1080734 - DNA, 15 bp, Homo sapiens
ggtccgagtcggagt

SEQ ID NO: 1080735 - DNA, 15 bp, Homo sapiens
gggtccgagtcggag

SEQ ID NO: 1080736 - DNA, 15 bp, Homo sapiens
ggggtccgagtcgga

SEQ ID NO: 1080737 - DNA, 15 bp, Homo sapiens
gggggtccgagtcgg

SEQ ID NO: 1080738 - DNA, 15 bp, Homo sapiens
tgggggtccgagtcg

SEQ ID NO: 1080739 - DNA, 15 bp, Homo sapiens
gtgggggtccgagtc

SEQ ID NO: 1080740 - DNA, 15 bp, Homo sapiens
ggtgggggtccgagt

SEQ ID NO: 1080741 - DNA, 15 bp, Homo sapiens
gggtgggggtccgag

SEQ ID NO: 1080742 - DNA, 15 bp, Homo sapiens
ggggtgggggtccga

SEQ ID NO: 1080743 - DNA, 15 bp, Homo sapiens
tggggtgggggtccg

SEQ ID NO: 1080744 - DNA, 15 bp, Homo sapiens
ctggggtgggggtcc

SEQ ID NO: 1080745 - DNA, 15 bp, Homo sapiens
actggggtgggggtc

SEQ ID NO: 1080746 - DNA, 15 bp, Homo sapiens
gactggggtgggggt

SEQ ID NO: 1080747 - DNA, 15 bp, Homo sapiens
ggactggggtggggg

SEQ ID NO: 1080748 - DNA, 15 bp, Homo sapiens
aggactggggtgggg

SEQ ID NO: 1080749 - DNA, 15 bp, Homo sapiens
gaggactggggtggg

SEQ ID NO: 1080750 - DNA, 15 bp, Homo sapiens
agaggactggggtgg

SEQ ID NO: 1080751 - DNA, 15 bp, Homo sapiens
gagaggactggggtg

SEQ ID NO: 1080752 - DNA, 15 bp, Homo sapiens
ggagaggactggggt

SEQ ID NO: 1080753 - DNA, 15 bp, Homo sapiens
cggagaggactgggg

SEQ ID NO: 1080754 - DNA, 15 bp, Homo sapiens
gcggagaggactggg

SEQ ID NO: 1080755 - DNA, 15 bp, Homo sapiens
ggcggagaggactgg

SEQ ID NO: 1080756 - DNA, 15 bp, Homo sapiens
gggcggagaggactg

SEQ ID NO: 1080757 - DNA, 15 bp, Homo sapiens
cgggcggagaggact

SEQ ID NO: 1080758 - DNA, 15 bp, Homo sapiens
tcgggcggagaggac

SEQ ID NO: 1080759 - DNA, 15 bp, Homo sapiens
gtcgggcggagagga

SEQ ID NO: 1080760 - DNA, 15 bp, Homo sapiens
ggtcgggcggagagg

SEQ ID NO: 1080761 - DNA, 15 bp, Homo sapiens
cggtcgggcggagag

SEQ ID NO: 1080762 - DNA, 15 bp, Homo sapiens
gcggtcgggcggaga

SEQ ID NO: 1080763 - DNA, 15 bp, Homo sapiens
ggcggtcgggcggag

SEQ ID NO: 1080764 - DNA, 15 bp, Homo sapiens
tggcggtcgggcgga

SEQ ID NO: 1080765 - DNA, 15 bp, Homo sapiens
gtggcggtcgggcgg

SEQ ID NO: 1080766 - DNA, 15 bp, Homo sapiens
cgtggcggtcgggcg

SEQ ID NO: 1080767 - DNA, 15 bp, Homo sapiens
ccgtggcggtcgggc

SEQ ID NO: 1080768 - DNA, 15 bp, Homo sapiens
gccgtggcggtcggg

SEQ ID NO: 1080769 - DNA, 15 bp, Homo sapiens
ggccgtggcggtcgg

SEQ ID NO: 1080770 - DNA, 15 bp, Homo sapiens
gggccgtggcggtcg

SEQ ID NO: 1080771 - DNA, 15 bp, Homo sapiens
tgggccgtggcggtc

SEQ ID NO: 1080772 - DNA, 15 bp, Homo sapiens
gtgggccgtggcggt

SEQ ID NO: 1080773 - DNA, 15 bp, Homo sapiens
ggtgggccgtggcgg

SEQ ID NO: 1080774 - DNA, 15 bp, Homo sapiens
tggtgggccgtggcg

SEQ ID NO: 1080775 - DNA, 15 bp, Homo sapiens
ctggtgggccgtggc

SEQ ID NO: 1080776 - DNA, 15 bp, Homo sapiens
gctggtgggccgtgg

SEQ ID NO: 1080777 - DNA, 15 bp, Homo sapiens
ggctggtgggccgtg

SEQ ID NO: 1080778 - DNA, 15 bp, Homo sapiens
aggctggtgggccgt

SEQ ID NO: 1080779 - DNA, 15 bp, Homo sapiens
caggctggtgggccg

SEQ ID NO: 1080780 - DNA, 15 bp, Homo sapiens
acaggctggtgggcc

SEQ ID NO: 1080781 - DNA, 15 bp, Homo sapiens
cacaggctggtgggc

SEQ ID NO: 1080782 - DNA, 15 bp, Homo sapiens
gcacaggctggtggg

SEQ ID NO: 1080783 - DNA, 15 bp, Homo sapiens
ggcacaggctggtgg

SEQ ID NO: 1080784 - DNA, 15 bp, Homo sapiens
cggcacaggctggtg

SEQ ID NO: 1080785 - DNA, 15 bp, Homo sapiens
gcggcacaggctggt

SEQ ID NO: 1080786 - DNA, 15 bp, Homo sapiens
agcggcacaggctgg

SEQ ID NO: 1080787 - DNA, 15 bp, Homo sapiens
gagcggcacaggctg

SEQ ID NO: 1080788 - DNA, 15 bp, Homo sapiens
tgagcggcacaggct

SEQ ID NO: 1080789 - DNA, 15 bp, Homo sapiens
gtgagcggcacaggc

SEQ ID NO: 1080790 - DNA, 15 bp, Homo sapiens
ggtgagcggcacagg

SEQ ID NO: 1080791 - DNA, 15 bp, Homo sapiens
aggtgagcggcacag

SEQ ID NO: 1080792 - DNA, 15 bp, Homo sapiens
caggtgagcggcaca

SEQ ID NO: 1080793 - DNA, 15 bp, Homo sapiens
ccaggtgagcggcac

SEQ ID NO: 1080794 - DNA, 15 bp, Homo sapiens
tccaggtgagcggca

SEQ ID NO: 1080795 - DNA, 15 bp, Homo sapiens
atccaggtgagcggc

SEQ ID NO: 1080796 - DNA, 15 bp, Homo sapiens
gatccaggtgagcgg

SEQ ID NO: 1080797 - DNA, 15 bp, Homo sapiens
agatccaggtgagcg

SEQ ID NO: 1080798 - DNA, 15 bp, Homo sapiens
gagatccaggtgagc

SEQ ID NO: 1080799 - DNA, 15 bp, Homo sapiens
agagatccaggtgag

SEQ ID NO: 1080800 - DNA, 15 bp, Homo sapiens
cagagatccaggtga

SEQ ID NO: 1080801 - DNA, 15 bp, Homo sapiens
ccagagatccaggtg

SEQ ID NO: 1080802 - DNA, 15 bp, Homo sapiens
tccagagatccaggt

SEQ ID NO: 1080803 - DNA, 15 bp, Homo sapiens
ttccagagatccagg

SEQ ID NO: 1080804 - DNA, 15 bp, Homo sapiens
tttccagagatccag

SEQ ID NO: 1080805 - DNA, 15 bp, Homo sapiens
ttttccagagatcca

SEQ ID NO: 1080806 - DNA, 15 bp, Homo sapiens
tttttccagagatcc

SEQ ID NO: 1080807 - DNA, 15 bp, Homo sapiens
ctttttccagagatc

SEQ ID NO: 1080808 - DNA, 15 bp, Homo sapiens
gctttttccagagat

SEQ ID NO: 1080809 - DNA, 15 bp, Homo sapiens
agctttttccagaga

SEQ ID NO: 1080810 - DNA, 15 bp, Homo sapiens
cagctttttccagag

SEQ ID NO: 1080811 - DNA, 15 bp, Homo sapiens
tcagctttttccaga

SEQ ID NO: 1080812 - DNA, 15 bp, Homo sapiens
ttcagctttttccag

SEQ ID NO: 1080813 - DNA, 15 bp, Homo sapiens
cttcagctttttcca

SEQ ID NO: 1080814 - DNA, 15 bp, Homo sapiens
ccttcagctttttcc

SEQ ID NO: 1080815 - DNA, 15 bp, Homo sapiens
tccttcagctttttc

SEQ ID NO: 1080816 - DNA, 15 bp, Homo sapiens
ttccttcagcttttt

SEQ ID NO: 1080817 - DNA, 15 bp, Homo sapiens
cttccttcagctttt

SEQ ID NO: 1080818 - DNA, 15 bp, Homo sapiens
tcttccttcagcttt

SEQ ID NO: 1080819 - DNA, 15 bp, Homo sapiens
gtcttccttcagctt

SEQ ID NO: 1080820 - DNA, 15 bp, Homo sapiens
tgtcttccttcagct

SEQ ID NO: 1080821 - DNA, 15 bp, Homo sapiens
gtgtcttccttcagc

SEQ ID NO: 1080822 - DNA, 15 bp, Homo sapiens
tgtgtcttccttcag

SEQ ID NO: 1080823 - DNA, 15 bp, Homo sapiens
atgtgtcttccttca

SEQ ID NO: 1080824 - DNA, 15 bp, Homo sapiens
gatgtgtcttccttc

SEQ ID NO: 1080825 - DNA, 15 bp, Homo sapiens
cgatgtgtcttcctt

SEQ ID NO: 1080826 - DNA, 15 bp, Homo sapiens
acgatgtgtcttcct

SEQ ID NO: 1080827 - DNA, 15 bp, Homo sapiens
tacgatgtgtcttcc

SEQ ID NO: 1080828 - DNA, 15 bp, Homo sapiens
atacgatgtgtcttc

SEQ ID NO: 1080829 - DNA, 15 bp, Homo sapiens
catacgatgtgtctt

SEQ ID NO: 1080830 - DNA, 15 bp, Homo sapiens
gcatacgatgtgtct

SEQ ID NO: 1080831 - DNA, 15 bp, Homo sapiens
cgcatacgatgtgtc

SEQ ID NO: 1080832 - DNA, 15 bp, Homo sapiens
ccgcatacgatgtgt

SEQ ID NO: 1080833 - DNA, 15 bp, Homo sapiens
gccgcatacgatgtg

SEQ ID NO: 1080834 - DNA, 15 bp, Homo sapiens
agccgcatacgatgt

SEQ ID NO: 1080835 - DNA, 15 bp, Homo sapiens
aagccgcatacgatg

SEQ ID NO: 1080836 - DNA, 15 bp, Homo sapiens
aaagccgcatacgat

SEQ ID NO: 1080837 - DNA, 15 bp, Homo sapiens
caaagccgcatacga

SEQ ID NO: 1080838 - DNA, 15 bp, Homo sapiens
tcaaagccgcatacg

SEQ ID NO: 1080839 - DNA, 15 bp, Homo sapiens
ctcaaagccgcatac

SEQ ID NO: 1080840 - DNA, 15 bp, Homo sapiens
gctcaaagccgcata

SEQ ID NO: 1080841 - DNA, 15 bp, Homo sapiens
tgctcaaagccgcat

SEQ ID NO: 1080842 - DNA, 15 bp, Homo sapiens
ctgctcaaagccgca

SEQ ID NO: 1080843 - DNA, 15 bp, Homo sapiens
gctgctcaaagccgc

SEQ ID NO: 1080844 - DNA, 15 bp, Homo sapiens
tgctgctcaaagccg

SEQ ID NO: 1080845 - DNA, 15 bp, Homo sapiens
gtgctgctcaaagcc

SEQ ID NO: 1080846 - DNA, 15 bp, Homo sapiens
ggtgctgctcaaagc

SEQ ID NO: 1080847 - DNA, 15 bp, Homo sapiens
tggtgctgctcaaag

SEQ ID NO: 1080848 - DNA, 15 bp, Homo sapiens
gtggtgctgctcaaa

SEQ ID NO: 1080849 - DNA, 15 bp, Homo sapiens
ggtggtgctgctcaa

SEQ ID NO: 1080850 - DNA, 15 bp, Homo sapiens
aggtggtgctgctca

SEQ ID NO: 1080851 - DNA, 15 bp, Homo sapiens
aaggtggtgctgctc

SEQ ID NO: 1080852 - DNA, 15 bp, Homo sapiens
caaggtggtgctgct

SEQ ID NO: 1080853 - DNA, 15 bp, Homo sapiens
ccaaggtggtgctgc

SEQ ID NO: 1080854 - DNA, 15 bp, Homo sapiens
gccaaggtggtgctg

SEQ ID NO: 1080855 - DNA, 15 bp, Homo sapiens
ggccaaggtggtgct

SEQ ID NO: 1080856 - DNA, 15 bp, Homo sapiens
aggccaaggtggtgc

SEQ ID NO: 1080857 - DNA, 15 bp, Homo sapiens
gaggccaaggtggtg

SEQ ID NO: 1080858 - DNA, 15 bp, Homo sapiens
cgaggccaaggtggt

SEQ ID NO: 1080859 - DNA, 15 bp, Homo sapiens
gcgaggccaaggtgg

SEQ ID NO: 1080860 - DNA, 15 bp, Homo sapiens
ggcgaggccaaggtg

SEQ ID NO: 1080861 - DNA, 15 bp, Homo sapiens
aggcgaggccaaggt

SEQ ID NO: 1080862 - DNA, 15 bp, Homo sapiens
aaggcgaggccaagg

SEQ ID NO: 1080863 - DNA, 15 bp, Homo sapiens
aaaggcgaggccaag

SEQ ID NO: 1080864 - DNA, 15 bp, Homo sapiens
caaaggcgaggccaa

SEQ ID NO: 1080865 - DNA, 15 bp, Homo sapiens
acaaaggcgaggcca

SEQ ID NO: 1080866 - DNA, 15 bp, Homo sapiens
tacaaaggcgaggcc

SEQ ID NO: 1080867 - DNA, 15 bp, Homo sapiens
ctacaaaggcgaggc

SEQ ID NO: 1080868 - DNA, 15 bp, Homo sapiens
tctacaaaggcgagg

SEQ ID NO: 1080869 - DNA, 15 bp, Homo sapiens
ctctacaaaggcgag

SEQ ID NO: 1080870 - DNA, 15 bp, Homo sapiens
cctctacaaaggcga

SEQ ID NO: 1080871 - DNA, 15 bp, Homo sapiens
tcctctacaaaggcg

SEQ ID NO: 1080872 - DNA, 15 bp, Homo sapiens
gtcctctacaaaggc

SEQ ID NO: 1080873 - DNA, 15 bp, Homo sapiens
cgtcctctacaaagg

SEQ ID NO: 1080874 - DNA, 15 bp, Homo sapiens
gcgtcctctacaaag

SEQ ID NO: 1080875 - DNA, 15 bp, Homo sapiens
agcgtcctctacaaa

SEQ ID NO: 1080876 - DNA, 15 bp, Homo sapiens
cagcgtcctctacaa

SEQ ID NO: 1080877 - DNA, 15 bp, Homo sapiens
tcagcgtcctctaca

SEQ ID NO: 1080878 - DNA, 15 bp, Homo sapiens
ctcagcgtcctctac

SEQ ID NO: 1080879 - DNA, 15 bp, Homo sapiens
cctcagcgtcctcta

SEQ ID NO: 1080880 - DNA, 15 bp, Homo sapiens
gcctcagcgtcctct

SEQ ID NO: 1080881 - DNA, 15 bp, Homo sapiens
agcctcagcgtcctc

SEQ ID NO: 1080882 - DNA, 15 bp, Homo sapiens
cagcctcagcgtcct

SEQ ID NO: 1080883 - DNA, 15 bp, Homo sapiens
acagcctcagcgtcc

SEQ ID NO: 1080884 - DNA, 15 bp, Homo sapiens
tacagcctcagcgtc

SEQ ID NO: 1080885 - DNA, 15 bp, Homo sapiens
gtacagcctcagcgt

SEQ ID NO: 1080886 - DNA, 15 bp, Homo sapiens
tgtacagcctcagcg

SEQ ID NO: 1080887 - DNA, 15 bp, Homo sapiens
ctgtacagcctcagc

SEQ ID NO: 1080888 - DNA, 15 bp, Homo sapiens
gctgtacagcctcag

SEQ ID NO: 1080889 - DNA, 15 bp, Homo sapiens
agctgtacagcctca

SEQ ID NO: 1080890 - DNA, 15 bp, Homo sapiens
aagctgtacagcctc

SEQ ID NO: 1080891 - DNA, 15 bp, Homo sapiens
gaagctgtacagcct

SEQ ID NO: 1080892 - DNA, 15 bp, Homo sapiens
tgaagctgtacagcc

SEQ ID NO: 1080893 - DNA, 15 bp, Homo sapiens
atgaagctgtacagc

SEQ ID NO: 1080894 - DNA, 15 bp, Homo sapiens
catgaagctgtacag

SEQ ID NO: 1080895 - DNA, 15 bp, Homo sapiens
ccatgaagctgtaca

SEQ ID NO: 1080896 - DNA, 15 bp, Homo sapiens
gccatgaagctgtac

SEQ ID NO: 1080897 - DNA, 15 bp, Homo sapiens
agccatgaagctgta

SEQ ID NO: 1080898 - DNA, 15 bp, Homo sapiens
gagccatgaagctgt

SEQ ID NO: 1080899 - DNA, 15 bp, Homo sapiens
ggagccatgaagctg

SEQ ID NO: 1080900 - DNA, 15 bp, Homo sapiens
cggagccatgaagct

SEQ ID NO: 1080901 - DNA, 15 bp, Homo sapiens
gcggagccatgaagc

SEQ ID NO: 1080902 - DNA, 15 bp, Homo sapiens
cgcggagccatgaag

SEQ ID NO: 1080903 - DNA, 15 bp, Homo sapiens
gcgcggagccatgaa

SEQ ID NO: 1080904 - DNA, 15 bp, Homo sapiens
ggcgcggagccatga

SEQ ID NO: 1080905 - DNA, 15 bp, Homo sapiens
gggcgcggagccatg

SEQ ID NO: 1080906 - DNA, 15 bp, Homo sapiens
agggcgcggagccat

SEQ ID NO: 1080907 - DNA, 15 bp, Homo sapiens
gagggcgcggagcca

SEQ ID NO: 1080908 - DNA, 15 bp, Homo sapiens
tgagggcgcggagcc

SEQ ID NO: 1080909 - DNA, 15 bp, Homo sapiens
ctgagggcgcggagc

SEQ ID NO: 1080910 - DNA, 15 bp, Homo sapiens
cctgagggcgcggag

SEQ ID NO: 1080911 - DNA, 15 bp, Homo sapiens
gcctgagggcgcgga

SEQ ID NO: 1080912 - DNA, 15 bp, Homo sapiens
ggcctgagggcgcgg

SEQ ID NO: 1080913 - DNA, 15 bp, Homo sapiens
cggcctgagggcgcg

SEQ ID NO: 1080914 - DNA, 15 bp, Homo sapiens
gcggcctgagggcgc

SEQ ID NO: 1080915 - DNA, 15 bp, Homo sapiens
ggcggcctgagggcg

SEQ ID NO: 1080916 - DNA, 15 bp, Homo sapiens
gggcggcctgagggc

SEQ ID NO: 1080917 - DNA, 15 bp, Homo sapiens
cgggcggcctgaggg

SEQ ID NO: 1080918 - DNA, 15 bp, Homo sapiens
gcgggcggcctgagg

SEQ ID NO: 1080919 - DNA, 15 bp, Homo sapiens
ggcgggcggcctgag

SEQ ID NO: 1080920 - DNA, 15 bp, Homo sapiens
aggcgggcggcctga

SEQ ID NO: 1080921 - DNA, 15 bp, Homo sapiens
caggcgggcggcctg

SEQ ID NO: 1080922 - DNA, 15 bp, Homo sapiens
gcaggcgggcggcct

SEQ ID NO: 1080923 - DNA, 15 bp, Homo sapiens
ggcaggcgggcggcc

SEQ ID NO: 1080924 - DNA, 15 bp, Homo sapiens
gggcaggcgggcggc

SEQ ID NO: 1080925 - DNA, 15 bp, Homo sapiens
tgggcaggcgggcgg

SEQ ID NO: 1080926 - DNA, 15 bp, Homo sapiens
ctgggcaggcgggcg

SEQ ID NO: 1080927 - DNA, 15 bp, Homo sapiens
gctgggcaggcgggc

SEQ ID NO: 1080928 - DNA, 15 bp, Homo sapiens
agctgggcaggcggg

SEQ ID NO: 1080929 - DNA, 15 bp, Homo sapiens
cagctgggcaggcgg

SEQ ID NO: 1080930 - DNA, 15 bp, Homo sapiens
gcagctgggcaggcg

SEQ ID NO: 1080931 - DNA, 15 bp, Homo sapiens
cgcagctgggcaggc

SEQ ID NO: 1080932 - DNA, 15 bp, Homo sapiens
ccgcagctgggcagg

SEQ ID NO: 1080933 - DNA, 15 bp, Homo sapiens
cccgcagctgggcag

SEQ ID NO: 1080934 - DNA, 15 bp, Homo sapiens
tcccgcagctgggca

SEQ ID NO: 1080935 - DNA, 15 bp, Homo sapiens
gtcccgcagctgggc

SEQ ID NO: 1080936 - DNA, 15 bp, Homo sapiens
ggtcccgcagctggg

SEQ ID NO: 1080937 - DNA, 15 bp, Homo sapiens
gggtcccgcagctgg

SEQ ID NO: 1080938 - DNA, 15 bp, Homo sapiens
cgggtcccgcagctg

SEQ ID NO: 1080939 - DNA, 15 bp, Homo sapiens
acgggtcccgcagct

SEQ ID NO: 1080940 - DNA, 15 bp, Homo sapiens
aacgggtcccgcagc

SEQ ID NO: 1080941 - DNA, 15 bp, Homo sapiens
gaacgggtcccgcag

SEQ ID NO: 1080942 - DNA, 15 bp, Homo sapiens
agaacgggtcccgca

SEQ ID NO: 1080943 - DNA, 15 bp, Homo sapiens
gagaacgggtcccgc

SEQ ID NO: 1080944 - DNA, 15 bp, Homo sapiens
tgagaacgggtcccg

SEQ ID NO: 1080945 - DNA, 15 bp, Homo sapiens
ctgagaacgggtccc

SEQ ID NO: 1080946 - DNA, 15 bp, Homo sapiens
cctgagaacgggtcc

SEQ ID NO: 1080947 - DNA, 15 bp, Homo sapiens
ccctgagaacgggtc

SEQ ID NO: 1080948 - DNA, 15 bp, Homo sapiens
tccctgagaacgggt

SEQ ID NO: 1080949 - DNA, 15 bp, Homo sapiens
ctccctgagaacggg

SEQ ID NO: 1080950 - DNA, 15 bp, Homo sapiens
gctccctgagaacgg

SEQ ID NO: 1080951 - DNA, 15 bp, Homo sapiens
tgctccctgagaacg

SEQ ID NO: 1080952 - DNA, 15 bp, Homo sapiens
ctgctccctgagaac

SEQ ID NO: 1080953 - DNA, 15 bp, Homo sapiens
gctgctccctgagaa

SEQ ID NO: 1080954 - DNA, 15 bp, Homo sapiens
cgctgctccctgaga

SEQ ID NO: 1080955 - DNA, 15 bp, Homo sapiens
gcgctgctccctgag

SEQ ID NO: 1080956 - DNA, 15 bp, Homo sapiens
cgcgctgctccctga

SEQ ID NO: 1080957 - DNA, 15 bp, Homo sapiens
ccgcgctgctccctg

SEQ ID NO: 1080958 - DNA, 15 bp, Homo sapiens
gccgcgctgctccct

SEQ ID NO: 1080959 - DNA, 15 bp, Homo sapiens
ggccgcgctgctccc

SEQ ID NO: 1080960 - DNA, 15 bp, Homo sapiens
cggccgcgctgctcc

SEQ ID NO: 1080961 - DNA, 15 bp, Homo sapiens
gcggccgcgctgctc

SEQ ID NO: 1080962 - DNA, 15 bp, Homo sapiens
ggcggccgcgctgct

SEQ ID NO: 1080963 - DNA, 15 bp, Homo sapiens
cggcggccgcgctgc

SEQ ID NO: 1080964 - DNA, 15 bp, Homo sapiens
gcggcggccgcgctg

SEQ ID NO: 1080965 - DNA, 15 bp, Homo sapiens
ggcggcggccgcgct

SEQ ID NO: 1080966 - DNA, 15 bp, Homo sapiens
gggcggcggccgcgc

SEQ ID NO: 1080967 - DNA, 15 bp, Homo sapiens
ggggcggcggccgcg

SEQ ID NO: 1080968 - DNA, 15 bp, Homo sapiens
aggggcggcggccgc

SEQ ID NO: 1080969 - DNA, 15 bp, Homo sapiens
gaggggcggcggccg

SEQ ID NO: 1080970 - DNA, 15 bp, Homo sapiens
cgaggggcggcggcc

SEQ ID NO: 1080971 - DNA, 15 bp, Homo sapiens
ccgaggggcggcggc

SEQ ID NO: 1080972 - DNA, 15 bp, Homo sapiens
cccgaggggcggcgg

SEQ ID NO: 1080973 - DNA, 15 bp, Homo sapiens
tcccgaggggcggcg

SEQ ID NO: 1080974 - DNA, 15 bp, Homo sapiens
gtcccgaggggcggc

SEQ ID NO: 1080975 - DNA, 15 bp, Homo sapiens
ggtcccgaggggcgg

SEQ ID NO: 1080976 - DNA, 15 bp, Homo sapiens
cggtcccgaggggcg

SEQ ID NO: 1080977 - DNA, 15 bp, Homo sapiens
gcggtcccgaggggc

SEQ ID NO: 1080978 - DNA, 15 bp, Homo sapiens
ggcggtcccgagggg

SEQ ID NO: 1080979 - DNA, 15 bp, Homo sapiens
cggcggtcccgaggg

SEQ ID NO: 1080980 - DNA, 15 bp, Homo sapiens
gcggcggtcccgagg

SEQ ID NO: 1080981 - DNA, 15 bp, Homo sapiens
ggcggcggtcccgag

SEQ ID NO: 1080982 - DNA, 15 bp, Homo sapiens
cggcggcggtcccga

SEQ ID NO: 1080983 - DNA, 15 bp, Homo sapiens
gcggcggcggtcccg

SEQ ID NO: 1080984 - DNA, 15 bp, Homo sapiens
ggcggcggcggtccc

SEQ ID NO: 1080985 - DNA, 15 bp, Homo sapiens
aggcggcggcggtcc

SEQ ID NO: 1080986 - DNA, 15 bp, Homo sapiens
taggcggcggcggtc

SEQ ID NO: 1080987 - DNA, 15 bp, Homo sapiens
gtaggcggcggcggt

SEQ ID NO: 1080988 - DNA, 15 bp, Homo sapiens
ggtaggcggcggcgg

SEQ ID NO: 1080989 - DNA, 15 bp, Homo sapiens
cggtaggcggcggcg

SEQ ID NO: 1080990 - DNA, 15 bp, Homo sapiens
ccggtaggcggcggc

SEQ ID NO: 1080991 - DNA, 15 bp, Homo sapiens
gccggtaggcggcgg

SEQ ID NO: 1080992 - DNA, 15 bp, Homo sapiens
ggccggtaggcggcg

SEQ ID NO: 1080993 - DNA, 15 bp, Homo sapiens
aggccggtaggcggc

SEQ ID NO: 1080994 - DNA, 15 bp, Homo sapiens
gaggccggtaggcgg

SEQ ID NO: 1080995 - DNA, 15 bp, Homo sapiens
agaggccggtaggcg

SEQ ID NO: 1080996 - DNA, 15 bp, Homo sapiens
gagaggccggtaggc

SEQ ID NO: 1080997 - DNA, 15 bp, Homo sapiens
tgagaggccggtagg

SEQ ID NO: 1080998 - DNA, 15 bp, Homo sapiens
ctgagaggccggtag

SEQ ID NO: 1080999 - DNA, 15 bp, Homo sapiens
gctgagaggccggta

SEQ ID NO: 1081000 - DNA, 15 bp, Homo sapiens
tgctgagaggccggt

SEQ ID NO: 1081001 - DNA, 15 bp, Homo sapiens
ctgctgagaggccgg

SEQ ID NO: 1081002 - DNA, 15 bp, Homo sapiens
gctgctgagaggccg

SEQ ID NO: 1081003 - DNA, 15 bp, Homo sapiens
ggctgctgagaggcc

SEQ ID NO: 1081004 - DNA, 15 bp, Homo sapiens
cggctgctgagaggc

SEQ ID NO: 1081005 - DNA, 15 bp, Homo sapiens
ccggctgctgagagg

SEQ ID NO: 1081006 - DNA, 15 bp, Homo sapiens
gccggctgctgagag

SEQ ID NO: 1081007 - DNA, 15 bp, Homo sapiens
agccggctgctgaga

SEQ ID NO: 1081008 - DNA, 15 bp, Homo sapiens
cagccggctgctgag

SEQ ID NO: 1081009 - DNA, 15 bp, Homo sapiens
gcagccggctgctga

SEQ ID NO: 1081010 - DNA, 15 bp, Homo sapiens
agcagccggctgctg

SEQ ID NO: 1081011 - DNA, 15 bp, Homo sapiens
cagcagccggctgct

SEQ ID NO: 1081012 - DNA, 15 bp, Homo sapiens
tcagcagccggctgc

SEQ ID NO: 1081013 - DNA, 15 bp, Homo sapiens
gtcagcagccggctg

SEQ ID NO: 1081014 - DNA, 15 bp, Homo sapiens
cgtcagcagccggct

SEQ ID NO: 1081015 - DNA, 15 bp, Homo sapiens
ccgtcagcagccggc

SEQ ID NO: 1081016 - DNA, 15 bp, Homo sapiens
cccgtcagcagccgg

SEQ ID NO: 1081017 - DNA, 15 bp, Homo sapiens
ccccgtcagcagccg

SEQ ID NO: 1081018 - DNA, 15 bp, Homo sapiens
gccccgtcagcagcc

SEQ ID NO: 1081019 - DNA, 15 bp, Homo sapiens
ggccccgtcagcagc

SEQ ID NO: 1081020 - DNA, 15 bp, Homo sapiens
tggccccgtcagcag

SEQ ID NO: 1081021 - DNA, 15 bp, Homo sapiens
gtggccccgtcagca

SEQ ID NO: 1081022 - DNA, 15 bp, Homo sapiens
ggtggccccgtcagc

SEQ ID NO: 1081023 - DNA, 15 bp, Homo sapiens
cggtggccccgtcag

SEQ ID NO: 1081024 - DNA, 15 bp, Homo sapiens
gcggtggccccgtca

SEQ ID NO: 1081025 - DNA, 15 bp, Homo sapiens
ggcggtggccccgtc

SEQ ID NO: 1081026 - DNA, 15 bp, Homo sapiens
cggcggtggccccgt

SEQ ID NO: 1081027 - DNA, 15 bp, Homo sapiens
ccggcggtggccccg

SEQ ID NO: 1081028 - DNA, 15 bp, Homo sapiens
gccggcggtggcccc

SEQ ID NO: 1081029 - DNA, 15 bp, Homo sapiens
agccggcggtggccc

SEQ ID NO: 1081030 - DNA, 15 bp, Homo sapiens
aagccggcggtggcc

SEQ ID NO: 1081031 - DNA, 15 bp, Homo sapiens
gaagccggcggtggc

SEQ ID NO: 1081032 - DNA, 15 bp, Homo sapiens
ggaagccggcggtgg

SEQ ID NO: 1081033 - DNA, 15 bp, Homo sapiens
aggaagccggcggtg

SEQ ID NO: 1081034 - DNA, 15 bp, Homo sapiens
gaggaagccggcggt

SEQ ID NO: 1081035 - DNA, 15 bp, Homo sapiens
ggaggaagccggcgg

SEQ ID NO: 1081036 - DNA, 15 bp, Homo sapiens
aggaggaagccggcg

SEQ ID NO: 1081037 - DNA, 15 bp, Homo sapiens
gaggaggaagccggc

SEQ ID NO: 1081038 - DNA, 15 bp, Homo sapiens
ggaggaggaagccgg

SEQ ID NO: 1081039 - DNA, 15 bp, Homo sapiens
aggaggaggaagccg

SEQ ID NO: 1081040 - DNA, 15 bp, Homo sapiens
caggaggaggaagcc

SEQ ID NO: 1081041 - DNA, 15 bp, Homo sapiens
ccaggaggaggaagc

SEQ ID NO: 1081042 - DNA, 15 bp, Homo sapiens
gccaggaggaggaag

SEQ ID NO: 1081043 - DNA, 15 bp, Homo sapiens
agccaggaggaggaa

SEQ ID NO: 1081044 - DNA, 15 bp, Homo sapiens
gagccaggaggagga

SEQ ID NO: 1081045 - DNA, 15 bp, Homo sapiens
cgagccaggaggagg

SEQ ID NO: 1081046 - DNA, 15 bp, Homo sapiens
gcgagccaggaggag

SEQ ID NO: 1081047 - DNA, 15 bp, Homo sapiens
tgcgagccaggagga

SEQ ID NO: 1081048 - DNA, 15 bp, Homo sapiens
ttgcgagccaggagg

SEQ ID NO: 1081049 - DNA, 15 bp, Homo sapiens
attgcgagccaggag

SEQ ID NO: 1081050 - DNA, 15 bp, Homo sapiens
gattgcgagccagga

SEQ ID NO: 1081051 - DNA, 15 bp, Homo sapiens
ggattgcgagccagg

SEQ ID NO: 1081052 - DNA, 15 bp, Homo sapiens
tggattgcgagccag

SEQ ID NO: 1081053 - DNA, 15 bp, Homo sapiens
gtggattgcgagcca

SEQ ID NO: 1081054 - DNA, 15 bp, Homo sapiens
agtggattgcgagcc

SEQ ID NO: 1081055 - DNA, 15 bp, Homo sapiens
aagtggattgcgagc

SEQ ID NO: 1081056 - DNA, 15 bp, Homo sapiens
gaagtggattgcgag

SEQ ID NO: 1081057 - DNA, 15 bp, Homo sapiens
ggaagtggattgcga

SEQ ID NO: 1081058 - DNA, 15 bp, Homo sapiens
cggaagtggattgcg

SEQ ID NO: 1081059 - DNA, 15 bp, Homo sapiens
ccggaagtggattgc

SEQ ID NO: 1081060 - DNA, 15 bp, Homo sapiens
tccggaagtggattg

SEQ ID NO: 1081061 - DNA, 15 bp, Homo sapiens
atccggaagtggatt

SEQ ID NO: 1081062 - DNA, 15 bp, Homo sapiens
gatccggaagtggat

SEQ ID NO: 1081063 - DNA, 15 bp, Homo sapiens
ggatccggaagtgga

SEQ ID NO: 1081064 - DNA, 15 bp, Homo sapiens
cggatccggaagtgg

SEQ ID NO: 1081065 - DNA, 15 bp, Homo sapiens
ccggatccggaagtg

SEQ ID NO: 1081066 - DNA, 15 bp, Homo sapiens
accggatccggaagt

SEQ ID NO: 1081067 - DNA, 15 bp, Homo sapiens
gaccggatccggaag

SEQ ID NO: 1081068 - DNA, 15 bp, Homo sapiens
tgaccggatccggaa

SEQ ID NO: 1081069 - DNA, 15 bp, Homo sapiens
ctgaccggatccgga

SEQ ID NO: 1081070 - DNA, 15 bp, Homo sapiens
gctgaccggatccgg

SEQ ID NO: 1081071 - DNA, 15 bp, Homo sapiens
ggctgaccggatccg

SEQ ID NO: 1081072 - DNA, 15 bp, Homo sapiens
aggctgaccggatcc

SEQ ID NO: 1081073 - DNA, 15 bp, Homo sapiens
caggctgaccggatc

SEQ ID NO: 1081074 - DNA, 15 bp, Homo sapiens
ccaggctgaccggat

SEQ ID NO: 1081075 - DNA, 15 bp, Homo sapiens
accaggctgaccgga

SEQ ID NO: 1081076 - DNA, 15 bp, Homo sapiens
aaccaggctgaccgg

SEQ ID NO: 1081077 - DNA, 15 bp, Homo sapiens
caaccaggctgaccg

SEQ ID NO: 1081078 - DNA, 15 bp, Homo sapiens
tcaaccaggctgacc

SEQ ID NO: 1081079 - DNA, 15 bp, Homo sapiens
ctcaaccaggctgac

SEQ ID NO: 1081080 - DNA, 15 bp, Homo sapiens
cctcaaccaggctga

SEQ ID NO: 1081081 - DNA, 15 bp, Homo sapiens
ccctcaaccaggctg

SEQ ID NO: 1081082 - DNA, 15 bp, Homo sapiens
accctcaaccaggct

SEQ ID NO: 1081083 - DNA, 15 bp, Homo sapiens
aaccctcaaccaggc

SEQ ID NO: 1081084 - DNA, 15 bp, Homo sapiens
gaaccctcaaccagg

SEQ ID NO: 1081085 - DNA, 15 bp, Homo sapiens
agaaccctcaaccag

SEQ ID NO: 1081086 - DNA, 15 bp, Homo sapiens
gagaaccctcaacca

SEQ ID NO: 1081087 - DNA, 15 bp, Homo sapiens
tgagaaccctcaacc

SEQ ID NO: 1081088 - DNA, 15 bp, Homo sapiens
atgagaaccctcaac

SEQ ID NO: 1081089 - DNA, 15 bp, Homo sapiens
tatgagaaccctcaa

SEQ ID NO: 1081090 - DNA, 15 bp, Homo sapiens
gtatgagaaccctca

SEQ ID NO: 1081091 - DNA, 15 bp, Homo sapiens
agtatgagaaccctc

SEQ ID NO: 1081092 - DNA, 15 bp, Homo sapiens
gagtatgagaaccct

SEQ ID NO: 1081093 - DNA, 15 bp, Homo sapiens
ggagtatgagaaccc

SEQ ID NO: 1081094 - DNA, 15 bp, Homo sapiens
cggagtatgagaacc

SEQ ID NO: 1081095 - DNA, 15 bp, Homo sapiens
ccggagtatgagaac

SEQ ID NO: 1081096 - DNA, 15 bp, Homo sapiens
tccggagtatgagaa

SEQ ID NO: 1081097 - DNA, 15 bp, Homo sapiens
atccggagtatgaga

SEQ ID NO: 1081098 - DNA, 15 bp, Homo sapiens
catccggagtatgag

SEQ ID NO: 1081099 - DNA, 15 bp, Homo sapiens
gcatccggagtatga

SEQ ID NO: 1081100 - DNA, 15 bp, Homo sapiens
tgcatccggagtatg

SEQ ID NO: 1081101 - DNA, 15 bp, Homo sapiens
ctgcatccggagtat

SEQ ID NO: 1081102 - DNA, 15 bp, Homo sapiens
tctgcatccggagta

SEQ ID NO: 1081103 - DNA, 15 bp, Homo sapiens
ttctgcatccggagt

SEQ ID NO: 1081104 - DNA, 15 bp, Homo sapiens
tttctgcatccggag

SEQ ID NO: 1081105 - DNA, 15 bp, Homo sapiens
atttctgcatccgga

SEQ ID NO: 1081106 - DNA, 15 bp, Homo sapiens
catttctgcatccgg

SEQ ID NO: 1081107 - DNA, 15 bp, Homo sapiens
acatttctgcatccg

SEQ ID NO: 1081108 - DNA, 15 bp, Homo sapiens
cacatttctgcatcc

SEQ ID NO: 1081109 - DNA, 15 bp, Homo sapiens
tcacatttctgcatc

SEQ ID NO: 1081110 - DNA, 15 bp, Homo sapiens
ctcacatttctgcat

SEQ ID NO: 1081111 - DNA, 15 bp, Homo sapiens
gctcacatttctgca

SEQ ID NO: 1081112 - DNA, 15 bp, Homo sapiens
ggctcacatttctgc

SEQ ID NO: 1081113 - DNA, 15 bp, Homo sapiens
gggctcacatttctg

SEQ ID NO: 1081114 - DNA, 15 bp, Homo sapiens
cgggctcacatttct

SEQ ID NO: 1081115 - DNA, 15 bp, Homo sapiens
ccgggctcacatttc

SEQ ID NO: 1081116 - DNA, 15 bp, Homo sapiens
tccgggctcacattt

SEQ ID NO: 1081117 - DNA, 15 bp, Homo sapiens
ttccgggctcacatt

SEQ ID NO: 1081118 - DNA, 15 bp, Homo sapiens
cttccgggctcacat

SEQ ID NO: 1081119 - DNA, 15 bp, Homo sapiens
acttccgggctcaca

SEQ ID NO: 1081120 - DNA, 15 bp, Homo sapiens
tacttccgggctcac

SEQ ID NO: 1081121 - DNA, 15 bp, Homo sapiens
gtacttccgggctca

SEQ ID NO: 1081122 - DNA, 15 bp, Homo sapiens
tgtacttccgggctc

SEQ ID NO: 1081123 - DNA, 15 bp, Homo sapiens
ttgtacttccgggct

SEQ ID NO: 1081124 - DNA, 15 bp, Homo sapiens
attgtacttccgggc

SEQ ID NO: 1081125 - DNA, 15 bp, Homo sapiens
cattgtacttccggg

SEQ ID NO: 1081126 - DNA, 15 bp, Homo sapiens
gcattgtacttccgg

SEQ ID NO: 1081127 - DNA, 15 bp, Homo sapiens
tgcattgtacttccg

SEQ ID NO: 1081128 - DNA, 15 bp, Homo sapiens
ctgcattgtacttcc

SEQ ID NO: 1081129 - DNA, 15 bp, Homo sapiens
gctgcattgtacttc

SEQ ID NO: 1081130 - DNA, 15 bp, Homo sapiens
cgctgcattgtactt

SEQ ID NO: 1081131 - DNA, 15 bp, Homo sapiens
tcgctgcattgtact

SEQ ID NO: 1081132 - DNA, 15 bp, Homo sapiens
ctcgctgcattgtac

SEQ ID NO: 1081133 - DNA, 15 bp, Homo sapiens
cctcgctgcattgta

SEQ ID NO: 1081134 - DNA, 15 bp, Homo sapiens
ccctcgctgcattgt

SEQ ID NO: 1081135 - DNA, 15 bp, Homo sapiens
cccctcgctgcattg

SEQ ID NO: 1081136 - DNA, 15 bp, Homo sapiens
gcccctcgctgcatt

SEQ ID NO: 1081137 - DNA, 15 bp, Homo sapiens
cgcccctcgctgcat

SEQ ID NO: 1081138 - DNA, 15 bp, Homo sapiens
ccgcccctcgctgca

SEQ ID NO: 1081139 - DNA, 15 bp, Homo sapiens
cccgcccctcgctgc

SEQ ID NO: 1081140 - DNA, 15 bp, Homo sapiens
tcccgcccctcgctg

SEQ ID NO: 1081141 - DNA, 15 bp, Homo sapiens
atcccgcccctcgct

SEQ ID NO: 1081142 - DNA, 15 bp, Homo sapiens
catcccgcccctcgc

SEQ ID NO: 1081143 - DNA, 15 bp, Homo sapiens
gcatcccgcccctcg

SEQ ID NO: 1081144 - DNA, 15 bp, Homo sapiens
ggcatcccgcccctc

SEQ ID NO: 1081145 - DNA, 15 bp, Homo sapiens
tggcatcccgcccct

SEQ ID NO: 1081146 - DNA, 15 bp, Homo sapiens
gtggcatcccgcccc

SEQ ID NO: 1081147 - DNA, 15 bp, Homo sapiens
cgtggcatcccgccc

SEQ ID NO: 1081148 - DNA, 15 bp, Homo sapiens
gcgtggcatcccgcc

SEQ ID NO: 1081149 - DNA, 15 bp, Homo sapiens
ggcgtggcatcccgc

SEQ ID NO: 1081150 - DNA, 15 bp, Homo sapiens
aggcgtggcatcccg

SEQ ID NO: 1081151 - DNA, 15 bp, Homo sapiens
gaggcgtggcatccc

SEQ ID NO: 1081152 - DNA, 15 bp, Homo sapiens
cgaggcgtggcatcc

SEQ ID NO: 1081153 - DNA, 15 bp, Homo sapiens
gcgaggcgtggcatc

SEQ ID NO: 1081154 - DNA, 15 bp, Homo sapiens
cgcgaggcgtggcat

SEQ ID NO: 1081155 - DNA, 15 bp, Homo sapiens
acgcgaggcgtggca

SEQ ID NO: 1081156 - DNA, 15 bp, Homo sapiens
tacgcgaggcgtggc

SEQ ID NO: 1081157 - DNA, 15 bp, Homo sapiens
ttacgcgaggcgtgg

SEQ ID NO: 1081158 - DNA, 15 bp, Homo sapiens
cttacgcgaggcgtg

SEQ ID NO: 1081159 - DNA, 15 bp, Homo sapiens
gcttacgcgaggcgt

SEQ ID NO: 1081160 - DNA, 15 bp, Homo sapiens
agcttacgcgaggcg

SEQ ID NO: 1081161 - DNA, 15 bp, Homo sapiens
aagcttacgcgaggc

SEQ ID NO: 1081162 - DNA, 15 bp, Homo sapiens
caagcttacgcgagg

SEQ ID NO: 1081163 - DNA, 15 bp, Homo sapiens
ccaagcttacgcgag

SEQ ID NO: 1081164 - DNA, 15 bp, Homo sapiens
gccaagcttacgcga

SEQ ID NO: 1081165 - DNA, 15 bp, Homo sapiens
ggccaagcttacgcg

SEQ ID NO: 1081166 - DNA, 15 bp, Homo sapiens
gggccaagcttacgc

SEQ ID NO: 1081167 - DNA, 15 bp, Homo sapiens
ggggccaagcttacg

SEQ ID NO: 1081168 - DNA, 15 bp, Homo sapiens
aggggccaagcttac

SEQ ID NO: 1081169 - DNA, 15 bp, Homo sapiens
gaggggccaagctta

SEQ ID NO: 1081170 - DNA, 15 bp, Homo sapiens
ggaggggccaagctt

SEQ ID NO: 1081171 - DNA, 15 bp, Homo sapiens
gggaggggccaagct

SEQ ID NO: 1081172 - DNA, 15 bp, Homo sapiens
agggaggggccaagc

SEQ ID NO: 1081173 - DNA, 15 bp, Homo sapiens
cagggaggggccaag

SEQ ID NO: 1081174 - DNA, 15 bp, Homo sapiens
gcagggaggggccaa

SEQ ID NO: 1081175 - DNA, 15 bp, Homo sapiens
agcagggaggggcca

SEQ ID NO: 1081176 - DNA, 15 bp, Homo sapiens
gagcagggaggggcc

SEQ ID NO: 1081177 - DNA, 15 bp, Homo sapiens
cgagcagggaggggc

SEQ ID NO: 1081178 - DNA, 15 bp, Homo sapiens
gcgagcagggagggg

SEQ ID NO: 1081179 - DNA, 15 bp, Homo sapiens
ggcgagcagggaggg

SEQ ID NO: 1081180 - DNA, 15 bp, Homo sapiens
tggcgagcagggagg

SEQ ID NO: 1081181 - DNA, 15 bp, Homo sapiens
ctggcgagcagggag

SEQ ID NO: 1081182 - DNA, 15 bp, Homo sapiens
cctggcgagcaggga

SEQ ID NO: 1081183 - DNA, 15 bp, Homo sapiens
acctggcgagcaggg

SEQ ID NO: 1081184 - DNA, 15 bp, Homo sapiens
cacctggcgagcagg

SEQ ID NO: 1081185 - DNA, 15 bp, Homo sapiens
ccacctggcgagcag

SEQ ID NO: 1081186 - DNA, 15 bp, Homo sapiens
tccacctggcgagca

SEQ ID NO: 1081187 - DNA, 15 bp, Homo sapiens
ctccacctggcgagc

SEQ ID NO: 1081188 - DNA, 15 bp, Homo sapiens
actccacctggcgag

SEQ ID NO: 1081189 - DNA, 15 bp, Homo sapiens
gactccacctggcga

SEQ ID NO: 1081190 - DNA, 15 bp, Homo sapiens
cgactccacctggcg

SEQ ID NO: 1081191 - DNA, 15 bp, Homo sapiens
ccgactccacctggc

SEQ ID NO: 1081192 - DNA, 15 bp, Homo sapiens
cccgactccacctgg

SEQ ID NO: 1081193 - DNA, 15 bp, Homo sapiens
gcccgactccacctg

SEQ ID NO: 1081194 - DNA, 15 bp, Homo sapiens
cgcccgactccacct

SEQ ID NO: 1081195 - DNA, 15 bp, Homo sapiens
gcgcccgactccacc

SEQ ID NO: 1081196 - DNA, 15 bp, Homo sapiens
cgcgcccgactccac

SEQ ID NO: 1081197 - DNA, 15 bp, Homo sapiens
gcgcgcccgactcca

SEQ ID NO: 1081198 - DNA, 15 bp, Homo sapiens
cgcgcgcccgactcc

SEQ ID NO: 1081199 - DNA, 15 bp, Homo sapiens
ccgcgcgcccgactc

SEQ ID NO: 1081200 - DNA, 15 bp, Homo sapiens
gccgcgcgcccgact

SEQ ID NO: 1081201 - DNA, 15 bp, Homo sapiens
cgccgcgcgcccgac

SEQ ID NO: 1081202 - DNA, 15 bp, Homo sapiens
ccgccgcgcgcccga

SEQ ID NO: 1081203 - DNA, 15 bp, Homo sapiens
cccgccgcgcgcccg

SEQ ID NO: 1081204 - DNA, 15 bp, Homo sapiens
tcccgccgcgcgccc

SEQ ID NO: 1081205 - DNA, 15 bp, Homo sapiens
atcccgccgcgcgcc

SEQ ID NO: 1081206 - DNA, 15 bp, Homo sapiens
tatcccgccgcgcgc

SEQ ID NO: 1081207 - DNA, 15 bp, Homo sapiens
gtatcccgccgcgcg

SEQ ID NO: 1081208 - DNA, 15 bp, Homo sapiens
ggtatcccgccgcgc

SEQ ID NO: 1081209 - DNA, 15 bp, Homo sapiens
cggtatcccgccgcg

SEQ ID NO: 1081210 - DNA, 15 bp, Homo sapiens
acggtatcccgccgc

SEQ ID NO: 1081211 - DNA, 15 bp, Homo sapiens
tacggtatcccgccg

SEQ ID NO: 1081212 - DNA, 15 bp, Homo sapiens
gtacggtatcccgcc

SEQ ID NO: 1081213 - DNA, 15 bp, Homo sapiens
agtacggtatcccgc

SEQ ID NO: 1081214 - DNA, 15 bp, Homo sapiens
cagtacggtatcccg

SEQ ID NO: 1081215 - DNA, 15 bp, Homo sapiens
acagtacggtatccc

SEQ ID NO: 1081216 - DNA, 15 bp, Homo sapiens
gacagtacggtatcc

SEQ ID NO: 1081217 - DNA, 15 bp, Homo sapiens
agacagtacggtatc

SEQ ID NO: 1081218 - DNA, 15 bp, Homo sapiens
aagacagtacggtat

SEQ ID NO: 1081219 - DNA, 15 bp, Homo sapiens
caagacagtacggta

SEQ ID NO: 1081220 - DNA, 15 bp, Homo sapiens
acaagacagtacggt

SEQ ID NO: 1081221 - DNA, 15 bp, Homo sapiens
cacaagacagtacgg

SEQ ID NO: 1081222 - DNA, 15 bp, Homo sapiens
gcacaagacagtacg

SEQ ID NO: 1081223 - DNA, 15 bp, Homo sapiens
agcacaagacagtac

SEQ ID NO: 1081224 - DNA, 15 bp, Homo sapiens
cagcacaagacagta

SEQ ID NO: 1081225 - DNA, 15 bp, Homo sapiens
ccagcacaagacagt

SEQ ID NO: 1081226 - DNA, 15 bp, Homo sapiens
cccagcacaagacag

SEQ ID NO: 1081227 - DNA, 15 bp, Homo sapiens
acccagcacaagaca

SEQ ID NO: 1081228 - DNA, 15 bp, Homo sapiens
cacccagcacaagac

SEQ ID NO: 1081229 - DNA, 15 bp, Homo sapiens
ccacccagcacaaga

SEQ ID NO: 1081230 - DNA, 15 bp, Homo sapiens
accacccagcacaag

SEQ ID NO: 1081231 - DNA, 15 bp, Homo sapiens
caccacccagcacaa

SEQ ID NO: 1081232 - DNA, 15 bp, Homo sapiens
gcaccacccagcaca

SEQ ID NO: 1081233 - DNA, 15 bp, Homo sapiens
agcaccacccagcac

SEQ ID NO: 1081234 - DNA, 15 bp, Homo sapiens
cagcaccacccagca

SEQ ID NO: 1081235 - DNA, 15 bp, Homo sapiens
ccagcaccacccagc

SEQ ID NO: 1081236 - DNA, 15 bp, Homo sapiens
cccagcaccacccag

SEQ ID NO: 1081237 - DNA, 15 bp, Homo sapiens
gcccagcaccaccca

SEQ ID NO: 1081238 - DNA, 15 bp, Homo sapiens
ggcccagcaccaccc

SEQ ID NO: 1081239 - DNA, 15 bp, Homo sapiens
aggcccagcaccacc

SEQ ID NO: 1081240 - DNA, 15 bp, Homo sapiens
gaggcccagcaccac

SEQ ID NO: 1081241 - DNA, 15 bp, Homo sapiens
ggaggcccagcacca

SEQ ID NO: 1081242 - DNA, 15 bp, Homo sapiens
gggaggcccagcacc

SEQ ID NO: 1081243 - DNA, 15 bp, Homo sapiens
tgggaggcccagcac

SEQ ID NO: 1081244 - DNA, 15 bp, Homo sapiens
gtgggaggcccagca

SEQ ID NO: 1081245 - DNA, 15 bp, Homo sapiens
tgtgggaggcccagc

SEQ ID NO: 1081246 - DNA, 15 bp, Homo sapiens
ctgtgggaggcccag

SEQ ID NO: 1081247 - DNA, 15 bp, Homo sapiens
gctgtgggaggccca

SEQ ID NO: 1081248 - DNA, 15 bp, Homo sapiens
cgctgtgggaggccc

SEQ ID NO: 1081249 - DNA, 15 bp, Homo sapiens
ccgctgtgggaggcc

SEQ ID NO: 1081250 - DNA, 15 bp, Homo sapiens
gccgctgtgggaggc

SEQ ID NO: 1081251 - DNA, 15 bp, Homo sapiens
ggccgctgtgggagg

SEQ ID NO: 1081252 - DNA, 15 bp, Homo sapiens
aggccgctgtgggag

SEQ ID NO: 1081253 - DNA, 15 bp, Homo sapiens
caggccgctgtggga

SEQ ID NO: 1081254 - DNA, 15 bp, Homo sapiens
tcaggccgctgtggg

SEQ ID NO: 1081255 - DNA, 15 bp, Homo sapiens
ttcaggccgctgtgg

SEQ ID NO: 1081256 - DNA, 15 bp, Homo sapiens
gttcaggccgctgtg

SEQ ID NO: 1081257 - DNA, 15 bp, Homo sapiens
ggttcaggccgctgt

SEQ ID NO: 1081258 - DNA, 15 bp, Homo sapiens
gggttcaggccgctg

SEQ ID NO: 1081259 - DNA, 15 bp, Homo sapiens
agggttcaggccgct

SEQ ID NO: 1081260 - DNA, 15 bp, Homo sapiens
aagggttcaggccgc

SEQ ID NO: 1081261 - DNA, 15 bp, Homo sapiens
gaagggttcaggccg

SEQ ID NO: 1081262 - DNA, 15 bp, Homo sapiens
agaagggttcaggcc

SEQ ID NO: 1081263 - DNA, 15 bp, Homo sapiens
aagaagggttcaggc

SEQ ID NO: 1081264 - DNA, 15 bp, Homo sapiens
aaagaagggttcagg

SEQ ID NO: 1081265 - DNA, 15 bp, Homo sapiens
aaaagaagggttcag

SEQ ID NO: 1081266 - DNA, 15 bp, Homo sapiens
aaaaagaagggttca

SEQ ID NO: 1081267 - DNA, 15 bp, Homo sapiens
aaaaaagaagggttc

SEQ ID NO: 1081268 - DNA, 15 bp, Homo sapiens
aaaaaaagaagggtt

SEQ ID NO: 1081269 - DNA, 15 bp, Homo sapiens
aaaaaaaagaagggt

SEQ ID NO: 1081270 - DNA, 15 bp, Homo sapiens
aaaaaaaaagaaggg

SEQ ID NO: 1081271 - DNA, 15 bp, Homo sapiens
aaaagaaagaaaaga

SEQ ID NO: 1081272 - DNA, 15 bp, Homo sapiens
taaaaaaagaaagaa

SEQ ID NO: 1081273 - DNA, 15 bp, Homo sapiens
ttaaaaaaagaaaga

SEQ ID NO: 1081274 - DNA, 15 bp, Homo sapiens
tttaaaaaaagaaag

SEQ ID NO: 1081275 - DNA, 15 bp, Homo sapiens
ctttaaaaaaagaaa

SEQ ID NO: 1081276 - DNA, 15 bp, Homo sapiens
actttaaaaaaagaa

SEQ ID NO: 1081277 - DNA, 15 bp, Homo sapiens
tactttaaaaaaaga

SEQ ID NO: 1081278 - DNA, 15 bp, Homo sapiens
ttactttaaaaaaag

SEQ ID NO: 1081279 - DNA, 15 bp, Homo sapiens
cttactttaaaaaaa

SEQ ID NO: 1081280 - DNA, 15 bp, Homo sapiens
gcttactttaaaaaa

SEQ ID NO: 1081281 - DNA, 15 bp, Homo sapiens
tgcttactttaaaaa

SEQ ID NO: 1081282 - DNA, 15 bp, Homo sapiens
atgcttactttaaaa

SEQ ID NO: 1081283 - DNA, 15 bp, Homo sapiens
aatgcttactttaaa

SEQ ID NO: 1081284 - DNA, 15 bp, Homo sapiens
aaatgcttactttaa

SEQ ID NO: 1081285 - DNA, 15 bp, Homo sapiens
aaaatgcttacttta

SEQ ID NO: 1081286 - DNA, 15 bp, Homo sapiens
aaaaatgcttacttt

SEQ ID NO: 1081287 - DNA, 15 bp, Homo sapiens
aaaaaatgcttactt

SEQ ID NO: 1081288 - DNA, 15 bp, Homo sapiens
aaaaaaatgcttact

SEQ ID NO: 1081289 - DNA, 15 bp, Homo sapiens
aaaaaaaatgcttac

SEQ ID NO: 1081290 - DNA, 15 bp, Homo sapiens
taaaaaaaatgctta

SEQ ID NO: 1081291 - DNA, 15 bp, Homo sapiens
ataaaaaaaatgctt

SEQ ID NO: 1081292 - DNA, 15 bp, Homo sapiens
aataaaaaaaatgct

SEQ ID NO: 1081293 - DNA, 15 bp, Homo sapiens
taataaaaaaaatgc

SEQ ID NO: 1081294 - DNA, 15 bp, Homo sapiens
ataataaaaaaaatg

SEQ ID NO: 1081295 - DNA, 15 bp, Homo sapiens
aataataaaaaaaat

SEQ ID NO: 1081296 - DNA, 15 bp, Homo sapiens
taataataaaaaaaa

SEQ ID NO: 1081297 - DNA, 15 bp, Homo sapiens
ataataataaaaaaa

SEQ ID NO: 1081298 - DNA, 15 bp, Homo sapiens
tataataataaaaaa

SEQ ID NO: 1081299 - DNA, 15 bp, Homo sapiens
gtataataataaaaa

SEQ ID NO: 1081300 - DNA, 15 bp, Homo sapiens
agtataataataaaa

SEQ ID NO: 1081301 - DNA, 15 bp, Homo sapiens
aagtataataataaa

SEQ ID NO: 1081302 - DNA, 15 bp, Homo sapiens
aaagtataataataa

SEQ ID NO: 1081303 - DNA, 15 bp, Homo sapiens
taaagtataataata

SEQ ID NO: 1081304 - DNA, 15 bp, Homo sapiens
ttaaagtataataat

SEQ ID NO: 1081305 - DNA, 15 bp, Homo sapiens
cttaaagtataataa

SEQ ID NO: 1081306 - DNA, 15 bp, Homo sapiens
acttaaagtataata

SEQ ID NO: 1081307 - DNA, 15 bp, Homo sapiens
aacttaaagtataat

SEQ ID NO: 1081308 - DNA, 15 bp, Homo sapiens
aaacttaaagtataa

SEQ ID NO: 1081309 - DNA, 15 bp, Homo sapiens
aaaacttaaagtata

SEQ ID NO: 1081310 - DNA, 15 bp, Homo sapiens
taaaacttaaagtat

SEQ ID NO: 1081311 - DNA, 15 bp, Homo sapiens
ctaaaacttaaagta

SEQ ID NO: 1081312 - DNA, 15 bp, Homo sapiens
cctaaaacttaaagt

SEQ ID NO: 1081313 - DNA, 15 bp, Homo sapiens
ccctaaaacttaaag

SEQ ID NO: 1081314 - DNA, 15 bp, Homo sapiens
gttgtgcacatgtac

SEQ ID NO: 1081315 - DNA, 15 bp, Homo sapiens
cgttgtgcacatgta

SEQ ID NO: 1081316 - DNA, 15 bp, Homo sapiens
acgttgtgcacatgt

SEQ ID NO: 1081317 - DNA, 15 bp, Homo sapiens
cacgttgtgcacatg

SEQ ID NO: 1081318 - DNA, 15 bp, Homo sapiens
gcacgttgtgcacat

SEQ ID NO: 1081319 - DNA, 15 bp, Homo sapiens
tgcacgttgtgcaca

SEQ ID NO: 1081320 - DNA, 15 bp, Homo sapiens
ctgcacgttgtgcac

SEQ ID NO: 1081321 - DNA, 15 bp, Homo sapiens
cctgcacgttgtgca

SEQ ID NO: 1081322 - DNA, 15 bp, Homo sapiens
acctgcacgttgtgc

SEQ ID NO: 1081323 - DNA, 15 bp, Homo sapiens
aacctgcacgttgtg

SEQ ID NO: 1081324 - DNA, 15 bp, Homo sapiens
aaacctgcacgttgt

SEQ ID NO: 1081325 - DNA, 15 bp, Homo sapiens
caaacctgcacgttg

SEQ ID NO: 1081326 - DNA, 15 bp, Homo sapiens
atatgtaacaaacct

SEQ ID NO: 1081327 - DNA, 15 bp, Homo sapiens
catatgtaacaaacc

SEQ ID NO: 1081328 - DNA, 15 bp, Homo sapiens
acatatgtaacaaac

SEQ ID NO: 1081329 - DNA, 15 bp, Homo sapiens
tacatatgtaacaaa

SEQ ID NO: 1081330 - DNA, 15 bp, Homo sapiens
atacatatgtaacaa

SEQ ID NO: 1081331 - DNA, 15 bp, Homo sapiens
tatacatatgtaaca

SEQ ID NO: 1081332 - DNA, 15 bp, Homo sapiens
atgtatacatatgta

SEQ ID NO: 1081333 - DNA, 15 bp, Homo sapiens
catgtatacatatgt

SEQ ID NO: 1081334 - DNA, 15 bp, Homo sapiens
acatgtatacatatg

SEQ ID NO: 1081335 - DNA, 15 bp, Homo sapiens
cacatgtatacatat

SEQ ID NO: 1081336 - DNA, 15 bp, Homo sapiens
gcacatgtatacata

SEQ ID NO: 1081337 - DNA, 15 bp, Homo sapiens
ggcacatgtatacat

SEQ ID NO: 1081338 - DNA, 15 bp, Homo sapiens
tggcacatgtataca

SEQ ID NO: 1081339 - DNA, 15 bp, Homo sapiens
atggcacatgtatac

SEQ ID NO: 1081340 - DNA, 15 bp, Homo sapiens
catggcacatgtata

SEQ ID NO: 1081341 - DNA, 15 bp, Homo sapiens
acatggcacatgtat

SEQ ID NO: 1081342 - DNA, 15 bp, Homo sapiens
aacatggcacatgta

SEQ ID NO: 1081343 - DNA, 15 bp, Homo sapiens
caacatggcacatgt

SEQ ID NO: 1081344 - DNA, 15 bp, Homo sapiens
ccaacatggcacatg

SEQ ID NO: 1081345 - DNA, 15 bp, Homo sapiens
accaacatggcacat

SEQ ID NO: 1081346 - DNA, 15 bp, Homo sapiens
caccaacatggcaca

SEQ ID NO: 1081347 - DNA, 15 bp, Homo sapiens
acaccaacatggcac

SEQ ID NO: 1081348 - DNA, 15 bp, Homo sapiens
cacaccaacatggca

SEQ ID NO: 1081349 - DNA, 15 bp, Homo sapiens
gcacaccaacatggc

SEQ ID NO: 1081350 - DNA, 15 bp, Homo sapiens
agcacaccaacatgg

SEQ ID NO: 1081351 - DNA, 15 bp, Homo sapiens
cagcacaccaacatg

SEQ ID NO: 1081352 - DNA, 15 bp, Homo sapiens
gcagcacaccaacat

SEQ ID NO: 1081353 - DNA, 15 bp, Homo sapiens
tgcagcacaccaaca

SEQ ID NO: 1081354 - DNA, 15 bp, Homo sapiens
gtgcagcacaccaac

SEQ ID NO: 1081355 - DNA, 15 bp, Homo sapiens
ggtgcagcacaccaa

SEQ ID NO: 1081356 - DNA, 15 bp, Homo sapiens
gggtgcagcacacca

SEQ ID NO: 1081357 - DNA, 15 bp, Homo sapiens
tgggtgcagcacacc

SEQ ID NO: 1081358 - DNA, 15 bp, Homo sapiens
atgggtgcagcacac

SEQ ID NO: 1081359 - DNA, 15 bp, Homo sapiens
aatgggtgcagcaca

SEQ ID NO: 1081360 - DNA, 15 bp, Homo sapiens
taatgggtgcagcac

SEQ ID NO: 1081361 - DNA, 15 bp, Homo sapiens
ttaatgggtgcagca

SEQ ID NO: 1081362 - DNA, 15 bp, Homo sapiens
gttaatgggtgcagc

SEQ ID NO: 1081363 - DNA, 15 bp, Homo sapiens
agttaatgggtgcag

SEQ ID NO: 1081364 - DNA, 15 bp, Homo sapiens
gagttaatgggtgca

SEQ ID NO: 1081365 - DNA, 15 bp, Homo sapiens
cgagttaatgggtgc

SEQ ID NO: 1081366 - DNA, 15 bp, Homo sapiens
acgagttaatgggtg

SEQ ID NO: 1081367 - DNA, 15 bp, Homo sapiens
gacgagttaatgggt

SEQ ID NO: 1081368 - DNA, 15 bp, Homo sapiens
tgacgagttaatggg

SEQ ID NO: 1081369 - DNA, 15 bp, Homo sapiens
atgacgagttaatgg

SEQ ID NO: 1081370 - DNA, 15 bp, Homo sapiens
aatgacgagttaatg

SEQ ID NO: 1081371 - DNA, 15 bp, Homo sapiens
aaatgacgagttaat

SEQ ID NO: 1081372 - DNA, 15 bp, Homo sapiens
taaatgacgagttaa

SEQ ID NO: 1081373 - DNA, 15 bp, Homo sapiens
ctaaatgacgagtta

SEQ ID NO: 1081374 - DNA, 15 bp, Homo sapiens
gctaaatgacgagtt

SEQ ID NO: 1081375 - DNA, 15 bp, Homo sapiens
tgctaaatgacgagt

SEQ ID NO: 1081376 - DNA, 15 bp, Homo sapiens
atgctaaatgacgag

SEQ ID NO: 1081377 - DNA, 15 bp, Homo sapiens
aatgctaaatgacga

SEQ ID NO: 1081378 - DNA, 15 bp, Homo sapiens
taatgctaaatgacg

SEQ ID NO: 1081379 - DNA, 15 bp, Homo sapiens
ttaatgctaaatgac

SEQ ID NO: 1081380 - DNA, 15 bp, Homo sapiens
cttaatgctaaatga

SEQ ID NO: 1081381 - DNA, 15 bp, Homo sapiens
acttaatgctaaatg

SEQ ID NO: 1081382 - DNA, 15 bp, Homo sapiens
tacttaatgctaaat

SEQ ID NO: 1081383 - DNA, 15 bp, Homo sapiens
atacttaatgctaaa

SEQ ID NO: 1081384 - DNA, 15 bp, Homo sapiens
tatacttaatgctaa

SEQ ID NO: 1081385 - DNA, 15 bp, Homo sapiens
atatacttaatgcta

SEQ ID NO: 1081386 - DNA, 15 bp, Homo sapiens
gatatacttaatgct

SEQ ID NO: 1081387 - DNA, 15 bp, Homo sapiens
agatatacttaatgc

SEQ ID NO: 1081388 - DNA, 15 bp, Homo sapiens
gagatatacttaatg

SEQ ID NO: 1081389 - DNA, 15 bp, Homo sapiens
ggagatatacttaat

SEQ ID NO: 1081390 - DNA, 15 bp, Homo sapiens
aggagatatacttaa

SEQ ID NO: 1081391 - DNA, 15 bp, Homo sapiens
taggagatatactta

SEQ ID NO: 1081392 - DNA, 15 bp, Homo sapiens
ttaggagatatactt

SEQ ID NO: 1081393 - DNA, 15 bp, Homo sapiens
attaggagatatact

SEQ ID NO: 1081394 - DNA, 15 bp, Homo sapiens
cattaggagatatac

SEQ ID NO: 1081395 - DNA, 15 bp, Homo sapiens
gcattaggagatata

SEQ ID NO: 1081396 - DNA, 15 bp, Homo sapiens
agcattaggagatat

SEQ ID NO: 1081397 - DNA, 15 bp, Homo sapiens
tagcattaggagata

SEQ ID NO: 1081398 - DNA, 15 bp, Homo sapiens
atagcattaggagat

SEQ ID NO: 1081399 - DNA, 15 bp, Homo sapiens
gatagcattaggaga

SEQ ID NO: 1081400 - DNA, 15 bp, Homo sapiens
ggatagcattaggag

SEQ ID NO: 1081401 - DNA, 15 bp, Homo sapiens
gggatagcattagga

SEQ ID NO: 1081402 - DNA, 15 bp, Homo sapiens
agggatagcattagg

SEQ ID NO: 1081403 - DNA, 15 bp, Homo sapiens
gagggatagcattag

SEQ ID NO: 1081404 - DNA, 15 bp, Homo sapiens
gggggagggatagca

SEQ ID NO: 1081405 - DNA, 15 bp, Homo sapiens
cggggactgttgtgg

SEQ ID NO: 1081406 - DNA, 15 bp, Homo sapiens
ccggggactgttgtg

SEQ ID NO: 1081407 - DNA, 15 bp, Homo sapiens
accggggactgttgt

SEQ ID NO: 1081408 - DNA, 15 bp, Homo sapiens
caccggggactgttg

SEQ ID NO: 1081409 - DNA, 15 bp, Homo sapiens
acaccggggactgtt

SEQ ID NO: 1081410 - DNA, 15 bp, Homo sapiens
cacaccggggactgt

SEQ ID NO: 1081411 - DNA, 15 bp, Homo sapiens
acacaccggggactg

SEQ ID NO: 1081412 - DNA, 15 bp, Homo sapiens
cacacaccggggact

SEQ ID NO: 1081413 - DNA, 15 bp, Homo sapiens
tcacacaccggggac

SEQ ID NO: 1081414 - DNA, 15 bp, Homo sapiens
atcacacaccgggga

SEQ ID NO: 1081415 - DNA, 15 bp, Homo sapiens
catcacacaccgggg

SEQ ID NO: 1081416 - DNA, 15 bp, Homo sapiens
acatcacacaccggg

SEQ ID NO: 1081417 - DNA, 15 bp, Homo sapiens
aacatcacacaccgg

SEQ ID NO: 1081418 - DNA, 15 bp, Homo sapiens
gaacatcacacaccg

SEQ ID NO: 1081419 - DNA, 15 bp, Homo sapiens
cgaacatcacacacc

SEQ ID NO: 1081420 - DNA, 15 bp, Homo sapiens
gcgaacatcacacac

SEQ ID NO: 1081421 - DNA, 15 bp, Homo sapiens
ggcgaacatcacaca

SEQ ID NO: 1081422 - DNA, 15 bp, Homo sapiens
aggcgaacatcacac

SEQ ID NO: 1081423 - DNA, 15 bp, Homo sapiens
aaggcgaacatcaca

SEQ ID NO: 1081424 - DNA, 15 bp, Homo sapiens
gaaggcgaacatcac

SEQ ID NO: 1081425 - DNA, 15 bp, Homo sapiens
ggaaggcgaacatca

SEQ ID NO: 1081426 - DNA, 15 bp, Homo sapiens
aggaaggcgaacatc

SEQ ID NO: 1081427 - DNA, 15 bp, Homo sapiens
caggaaggcgaacat

SEQ ID NO: 1081428 - DNA, 15 bp, Homo sapiens
acaggaaggcgaaca

SEQ ID NO: 1081429 - DNA, 15 bp, Homo sapiens
cacaggaaggcgaac

SEQ ID NO: 1081430 - DNA, 15 bp, Homo sapiens
acacaggaaggcgaa

SEQ ID NO: 1081431 - DNA, 15 bp, Homo sapiens
gacacaggaaggcga

SEQ ID NO: 1081432 - DNA, 15 bp, Homo sapiens
ggacacaggaaggcg

SEQ ID NO: 1081433 - DNA, 15 bp, Homo sapiens
tggacacaggaaggc

SEQ ID NO: 1081434 - DNA, 15 bp, Homo sapiens
aagaacacatggaca

SEQ ID NO: 1081435 - DNA, 15 bp, Homo sapiens
taagaacacatggac

SEQ ID NO: 1081436 - DNA, 15 bp, Homo sapiens
ataagaacacatgga

SEQ ID NO: 1081437 - DNA, 15 bp, Homo sapiens
aataagaacacatgg

SEQ ID NO: 1081438 - DNA, 15 bp, Homo sapiens
caataagaacacatg

SEQ ID NO: 1081439 - DNA, 15 bp, Homo sapiens
acaataagaacacat

SEQ ID NO: 1081440 - DNA, 15 bp, Homo sapiens
aacaataagaacaca

SEQ ID NO: 1081441 - DNA, 15 bp, Homo sapiens
gaacaataagaacac

SEQ ID NO: 1081442 - DNA, 15 bp, Homo sapiens
tgaacaataagaaca

SEQ ID NO: 1081443 - DNA, 15 bp, Homo sapiens
ttgaacaataagaac

SEQ ID NO: 1081444 - DNA, 15 bp, Homo sapiens
attgaacaataagaa

SEQ ID NO: 1081445 - DNA, 15 bp, Homo sapiens
aattgaacaataaga

SEQ ID NO: 1081446 - DNA, 15 bp, Homo sapiens
gaattgaacaataag

SEQ ID NO: 1081447 - DNA, 15 bp, Homo sapiens
ggaattgaacaataa

SEQ ID NO: 1081448 - DNA, 15 bp, Homo sapiens
gggaattgaacaata

SEQ ID NO: 1081449 - DNA, 15 bp, Homo sapiens
tgggaattgaacaat

SEQ ID NO: 1081450 - DNA, 15 bp, Homo sapiens
gtgggaattgaacaa

SEQ ID NO: 1081451 - DNA, 15 bp, Homo sapiens
ggtgggaattgaaca

SEQ ID NO: 1081452 - DNA, 15 bp, Homo sapiens
aggtgggaattgaac

SEQ ID NO: 1081453 - DNA, 15 bp, Homo sapiens
taggtgggaattgaa

SEQ ID NO: 1081454 - DNA, 15 bp, Homo sapiens
ataggtgggaattga

SEQ ID NO: 1081455 - DNA, 15 bp, Homo sapiens
cataggtgggaattg

SEQ ID NO: 1081456 - DNA, 15 bp, Homo sapiens
tcataggtgggaatt

SEQ ID NO: 1081457 - DNA, 15 bp, Homo sapiens
ctcataggtgggaat

SEQ ID NO: 1081458 - DNA, 15 bp, Homo sapiens
actcataggtgggaa

SEQ ID NO: 1081459 - DNA, 15 bp, Homo sapiens
cactcataggtggga

SEQ ID NO: 1081460 - DNA, 15 bp, Homo sapiens
tcactcataggtggg

SEQ ID NO: 1081461 - DNA, 15 bp, Homo sapiens
ctcactcataggtgg

SEQ ID NO: 1081462 - DNA, 15 bp, Homo sapiens
tctcactcataggtg

SEQ ID NO: 1081463 - DNA, 15 bp, Homo sapiens
ttctcactcataggt

SEQ ID NO: 1081464 - DNA, 15 bp, Homo sapiens
gttctcactcatagg

SEQ ID NO: 1081465 - DNA, 15 bp, Homo sapiens
tgttctcactcatag

SEQ ID NO: 1081466 - DNA, 15 bp, Homo sapiens
atgttctcactcata

SEQ ID NO: 1081467 - DNA, 15 bp, Homo sapiens
catgttctcactcat

SEQ ID NO: 1081468 - DNA, 15 bp, Homo sapiens
gcatgttctcactca

SEQ ID NO: 1081469 - DNA, 15 bp, Homo sapiens
cgcatgttctcactc

SEQ ID NO: 1081470 - DNA, 15 bp, Homo sapiens
ccgcatgttctcact

SEQ ID NO: 1081471 - DNA, 15 bp, Homo sapiens
accgcatgttctcac

SEQ ID NO: 1081472 - DNA, 15 bp, Homo sapiens
caccgcatgttctca

SEQ ID NO: 1081473 - DNA, 15 bp, Homo sapiens
acaccgcatgttctc

SEQ ID NO: 1081474 - DNA, 15 bp, Homo sapiens
aacaccgcatgttct

SEQ ID NO: 1081475 - DNA, 15 bp, Homo sapiens
aaacaccgcatgttc

SEQ ID NO: 1081476 - DNA, 15 bp, Homo sapiens
caaacaccgcatgtt

SEQ ID NO: 1081477 - DNA, 15 bp, Homo sapiens
ccaaacaccgcatgt

SEQ ID NO: 1081478 - DNA, 15 bp, Homo sapiens
accaaacaccgcatg

SEQ ID NO: 1081479 - DNA, 15 bp, Homo sapiens
aaccaaacaccgcat

SEQ ID NO: 1081480 - DNA, 15 bp, Homo sapiens
aaaccaaacaccgca

SEQ ID NO: 1081481 - DNA, 15 bp, Homo sapiens
aaaaccaaacaccgc

SEQ ID NO: 1081482 - DNA, 15 bp, Homo sapiens
aaaaaccaaacaccg

SEQ ID NO: 1081483 - DNA, 15 bp, Homo sapiens
aaaaaaccaaacacc

SEQ ID NO: 1081484 - DNA, 15 bp, Homo sapiens
caaaaaaccaaacac

SEQ ID NO: 1081485 - DNA, 15 bp, Homo sapiens
acaaaaaaccaaaca

SEQ ID NO: 1081486 - DNA, 15 bp, Homo sapiens
gacaaaaaaccaaac

SEQ ID NO: 1081487 - DNA, 15 bp, Homo sapiens
ggacaaaaaaccaaa

SEQ ID NO: 1081488 - DNA, 15 bp, Homo sapiens
aggacaaaaaaccaa

SEQ ID NO: 1081489 - DNA, 15 bp, Homo sapiens
aaggacaaaaaacca

SEQ ID NO: 1081490 - DNA, 15 bp, Homo sapiens
caaggacaaaaaacc

SEQ ID NO: 1081491 - DNA, 15 bp, Homo sapiens
gcaaggacaaaaaac

SEQ ID NO: 1081492 - DNA, 15 bp, Homo sapiens
tgcaaggacaaaaaa

SEQ ID NO: 1081493 - DNA, 15 bp, Homo sapiens
ttgcaaggacaaaaa

SEQ ID NO: 1081494 - DNA, 15 bp, Homo sapiens
attgcaaggacaaaa

SEQ ID NO: 1081495 - DNA, 15 bp, Homo sapiens
tattgcaaggacaaa

SEQ ID NO: 1081496 - DNA, 15 bp, Homo sapiens
ctattgcaaggacaa

SEQ ID NO: 1081497 - DNA, 15 bp, Homo sapiens
actattgcaaggaca

SEQ ID NO: 1081498 - DNA, 15 bp, Homo sapiens
aactattgcaaggac

SEQ ID NO: 1081499 - DNA, 15 bp, Homo sapiens
aaactattgcaagga

SEQ ID NO: 1081500 - DNA, 15 bp, Homo sapiens
caaactattgcaagg

SEQ ID NO: 1081501 - DNA, 15 bp, Homo sapiens
gcaaactattgcaag

SEQ ID NO: 1081502 - DNA, 15 bp, Homo sapiens
agcaaactattgcaa

SEQ ID NO: 1081503 - DNA, 15 bp, Homo sapiens
cagcaaactattgca

SEQ ID NO: 1081504 - DNA, 15 bp, Homo sapiens
tcagcaaactattgc

SEQ ID NO: 1081505 - DNA, 15 bp, Homo sapiens
ctcagcaaactattg

SEQ ID NO: 1081506 - DNA, 15 bp, Homo sapiens
tctcagcaaactatt

SEQ ID NO: 1081507 - DNA, 15 bp, Homo sapiens
ttctcagcaaactat

SEQ ID NO: 1081508 - DNA, 15 bp, Homo sapiens
attctcagcaaacta

SEQ ID NO: 1081509 - DNA, 15 bp, Homo sapiens
cattctcagcaaact

SEQ ID NO: 1081510 - DNA, 15 bp, Homo sapiens
tcattctcagcaaac

SEQ ID NO: 1081511 - DNA, 15 bp, Homo sapiens
atcattctcagcaaa

SEQ ID NO: 1081512 - DNA, 15 bp, Homo sapiens
catcattctcagcaa

SEQ ID NO: 1081513 - DNA, 15 bp, Homo sapiens
ccatcattctcagca

SEQ ID NO: 1081514 - DNA, 15 bp, Homo sapiens
accatcattctcagc

SEQ ID NO: 1081515 - DNA, 15 bp, Homo sapiens
aaccatcattctcag

SEQ ID NO: 1081516 - DNA, 15 bp, Homo sapiens
aaaccatcattctca

SEQ ID NO: 1081517 - DNA, 15 bp, Homo sapiens
gaaaccatcattctc

SEQ ID NO: 1081518 - DNA, 15 bp, Homo sapiens
ggaaaccatcattct

SEQ ID NO: 1081519 - DNA, 15 bp, Homo sapiens
tggaaaccatcattc

SEQ ID NO: 1081520 - DNA, 15 bp, Homo sapiens
atgaagctggaaacc

SEQ ID NO: 1081521 - DNA, 15 bp, Homo sapiens
gatgaagctggaaac

SEQ ID NO: 1081522 - DNA, 15 bp, Homo sapiens
ggatgaagctggaaa

SEQ ID NO: 1081523 - DNA, 15 bp, Homo sapiens
tggatgaagctggaa

SEQ ID NO: 1081524 - DNA, 15 bp, Homo sapiens
atggatgaagctgga

SEQ ID NO: 1081525 - DNA, 15 bp, Homo sapiens
catggatgaagctgg

SEQ ID NO: 1081526 - DNA, 15 bp, Homo sapiens
acatggatgaagctg

SEQ ID NO: 1081527 - DNA, 15 bp, Homo sapiens
gacatggatgaagct

SEQ ID NO: 1081528 - DNA, 15 bp, Homo sapiens
ggacatggatgaagc

SEQ ID NO: 1081529 - DNA, 15 bp, Homo sapiens
gggacatggatgaag

SEQ ID NO: 1081530 - DNA, 15 bp, Homo sapiens
agggacatggatgaa

SEQ ID NO: 1081531 - DNA, 15 bp, Homo sapiens
tagggacatggatga

SEQ ID NO: 1081532 - DNA, 15 bp, Homo sapiens
gtagggacatggatg

SEQ ID NO: 1081533 - DNA, 15 bp, Homo sapiens
tgtagggacatggat

SEQ ID NO: 1081534 - DNA, 15 bp, Homo sapiens
ttgtagggacatgga

SEQ ID NO: 1081535 - DNA, 15 bp, Homo sapiens
tttgtagggacatgg

SEQ ID NO: 1081536 - DNA, 15 bp, Homo sapiens
ctttgtagggacatg

SEQ ID NO: 1081537 - DNA, 15 bp, Homo sapiens
cctttgtagggacat

SEQ ID NO: 1081538 - DNA, 15 bp, Homo sapiens
tcctttgtagggaca

SEQ ID NO: 1081539 - DNA, 15 bp, Homo sapiens
gtcctttgtagggac

SEQ ID NO: 1081540 - DNA, 15 bp, Homo sapiens
tgtcctttgtaggga

SEQ ID NO: 1081541 - DNA, 15 bp, Homo sapiens
atgtcctttgtaggg

SEQ ID NO: 1081542 - DNA, 15 bp, Homo sapiens
catgtcctttgtagg

SEQ ID NO: 1081543 - DNA, 15 bp, Homo sapiens
tcatgtcctttgtag

SEQ ID NO: 1081544 - DNA, 15 bp, Homo sapiens
ttcatgtcctttgta

SEQ ID NO: 1081545 - DNA, 15 bp, Homo sapiens
gttcatgtcctttgt

SEQ ID NO: 1081546 - DNA, 15 bp, Homo sapiens
agttcatgtcctttg

SEQ ID NO: 1081547 - DNA, 15 bp, Homo sapiens
gagttcatgtccttt

SEQ ID NO: 1081548 - DNA, 15 bp, Homo sapiens
tgagttcatgtcctt

SEQ ID NO: 1081549 - DNA, 15 bp, Homo sapiens
atgagttcatgtcct

SEQ ID NO: 1081550 - DNA, 15 bp, Homo sapiens
gatgagttcatgtcc

SEQ ID NO: 1081551 - DNA, 15 bp, Homo sapiens
tgatgagttcatgtc

SEQ ID NO: 1081552 - DNA, 15 bp, Homo sapiens
atgatgagttcatgt

SEQ ID NO: 1081553 - DNA, 15 bp, Homo sapiens
aatgatgagttcatg

SEQ ID NO: 1081554 - DNA, 15 bp, Homo sapiens
aaatgatgagttcat

SEQ ID NO: 1081555 - DNA, 15 bp, Homo sapiens
aaaatgatgagttca

SEQ ID NO: 1081556 - DNA, 15 bp, Homo sapiens
aaaaatgatgagttc

SEQ ID NO: 1081557 - DNA, 15 bp, Homo sapiens
aaaaaatgatgagtt

SEQ ID NO: 1081558 - DNA, 15 bp, Homo sapiens
taaaaaatgatgagt

SEQ ID NO: 1081559 - DNA, 15 bp, Homo sapiens
ataaaaaatgatgag

SEQ ID NO: 1081560 - DNA, 15 bp, Homo sapiens
cataaaaaatgatga

SEQ ID NO: 1081561 - DNA, 15 bp, Homo sapiens
ccataaaaaatgatg

SEQ ID NO: 1081562 - DNA, 15 bp, Homo sapiens
gccataaaaaatgat

SEQ ID NO: 1081563 - DNA, 15 bp, Homo sapiens
agccataaaaaatga

SEQ ID NO: 1081564 - DNA, 15 bp, Homo sapiens
cagccataaaaaatg

SEQ ID NO: 1081565 - DNA, 15 bp, Homo sapiens
gcagccataaaaaat

SEQ ID NO: 1081566 - DNA, 15 bp, Homo sapiens
tgcagccataaaaaa

SEQ ID NO: 1081567 - DNA, 15 bp, Homo sapiens
atgcagccataaaaa

SEQ ID NO: 1081568 - DNA, 15 bp, Homo sapiens
tatgcagccataaaa

SEQ ID NO: 1081569 - DNA, 15 bp, Homo sapiens
ctatgcagccataaa

SEQ ID NO: 1081570 - DNA, 15 bp, Homo sapiens
actatgcagccataa

SEQ ID NO: 1081571 - DNA, 15 bp, Homo sapiens
tactatgcagccata

SEQ ID NO: 1081572 - DNA, 15 bp, Homo sapiens
accatggaatactat

SEQ ID NO: 1081573 - DNA, 15 bp, Homo sapiens
caccatggaatacta

SEQ ID NO: 1081574 - DNA, 15 bp, Homo sapiens
acaccatggaatact

SEQ ID NO: 1081575 - DNA, 15 bp, Homo sapiens
tacaccatggaatac

SEQ ID NO: 1081576 - DNA, 15 bp, Homo sapiens
atacaccatggaata

SEQ ID NO: 1081577 - DNA, 15 bp, Homo sapiens
tatacaccatggaat

SEQ ID NO: 1081578 - DNA, 15 bp, Homo sapiens
atatacaccatggaa

SEQ ID NO: 1081579 - DNA, 15 bp, Homo sapiens
catatacaccatgga

SEQ ID NO: 1081580 - DNA, 15 bp, Homo sapiens
acatatacaccatgg

SEQ ID NO: 1081581 - DNA, 15 bp, Homo sapiens
cacatatacaccatg

SEQ ID NO: 1081582 - DNA, 15 bp, Homo sapiens
gcacatatacaccat

SEQ ID NO: 1081583 - DNA, 15 bp, Homo sapiens
ggcacatatacacca

SEQ ID NO: 1081584 - DNA, 15 bp, Homo sapiens
tggcacatatacacc

SEQ ID NO: 1081585 - DNA, 15 bp, Homo sapiens
gtggcacatatacac

SEQ ID NO: 1081586 - DNA, 15 bp, Homo sapiens
tgtggcacatataca

SEQ ID NO: 1081587 - DNA, 15 bp, Homo sapiens
atgtggcacatatac

SEQ ID NO: 1081588 - DNA, 15 bp, Homo sapiens
aatgtggcacatata

SEQ ID NO: 1081589 - DNA, 15 bp, Homo sapiens
aaatgtggcacatat

SEQ ID NO: 1081590 - DNA, 15 bp, Homo sapiens
aaaatgtggcacata

SEQ ID NO: 1081591 - DNA, 15 bp, Homo sapiens
taaaatgtggcacat

SEQ ID NO: 1081592 - DNA, 15 bp, Homo sapiens
ctaaaatgtggcaca

SEQ ID NO: 1081593 - DNA, 15 bp, Homo sapiens
cctaaaatgtggcac

SEQ ID NO: 1081594 - DNA, 15 bp, Homo sapiens
tcctaaaatgtggca

SEQ ID NO: 1081595 - DNA, 15 bp, Homo sapiens
ctcctaaaatgtggc

SEQ ID NO: 1081596 - DNA, 15 bp, Homo sapiens
cctcctaaaatgtgg

SEQ ID NO: 1081597 - DNA, 15 bp, Homo sapiens
tcctcctaaaatgtg

SEQ ID NO: 1081598 - DNA, 15 bp, Homo sapiens
ctcctcctaaaatgt

SEQ ID NO: 1081599 - DNA, 15 bp, Homo sapiens
gctcctcctaaaatg

SEQ ID NO: 1081600 - DNA, 15 bp, Homo sapiens
agctcctcctaaaat

SEQ ID NO: 1081601 - DNA, 15 bp, Homo sapiens
aagctcctcctaaaa

SEQ ID NO: 1081602 - DNA, 15 bp, Homo sapiens
caagctcctcctaaa

SEQ ID NO: 1081603 - DNA, 15 bp, Homo sapiens
acaagctcctcctaa

SEQ ID NO: 1081604 - DNA, 15 bp, Homo sapiens
tacaagctcctccta

SEQ ID NO: 1081605 - DNA, 15 bp, Homo sapiens
gtacaagctcctcct

SEQ ID NO: 1081606 - DNA, 15 bp, Homo sapiens
ggtacaagctcctcc

SEQ ID NO: 1081607 - DNA, 15 bp, Homo sapiens
tggtacaagctcctc

SEQ ID NO: 1081608 - DNA, 15 bp, Homo sapiens
atggtacaagctcct

SEQ ID NO: 1081609 - DNA, 15 bp, Homo sapiens
aatggtacaagctcc

SEQ ID NO: 1081610 - DNA, 15 bp, Homo sapiens
gaatggtacaagctc

SEQ ID NO: 1081611 - DNA, 15 bp, Homo sapiens
ggaatggtacaagct

SEQ ID NO: 1081612 - DNA, 15 bp, Homo sapiens
aggaatggtacaagc

SEQ ID NO: 1081613 - DNA, 15 bp, Homo sapiens
aaggaatggtacaag

SEQ ID NO: 1081614 - DNA, 15 bp, Homo sapiens
gaaggaatggtacaa

SEQ ID NO: 1081615 - DNA, 15 bp, Homo sapiens
agaaggaatggtaca

SEQ ID NO: 1081616 - DNA, 15 bp, Homo sapiens
cagaaggaatggtac

SEQ ID NO: 1081617 - DNA, 15 bp, Homo sapiens
tcagaaggaatggta

SEQ ID NO: 1081618 - DNA, 15 bp, Homo sapiens
ttcagaaggaatggt

SEQ ID NO: 1081619 - DNA, 15 bp, Homo sapiens
tttcagaaggaatgg

SEQ ID NO: 1081620 - DNA, 15 bp, Homo sapiens
gtttcagaaggaatg

SEQ ID NO: 1081621 - DNA, 15 bp, Homo sapiens
agtttcagaaggaat

SEQ ID NO: 1081622 - DNA, 15 bp, Homo sapiens
tagtttcagaaggaa

SEQ ID NO: 1081623 - DNA, 15 bp, Homo sapiens
atagtttcagaagga

SEQ ID NO: 1081624 - DNA, 15 bp, Homo sapiens
aatagtttcagaagg

SEQ ID NO: 1081625 - DNA, 15 bp, Homo sapiens
gaatagtttcagaag

SEQ ID NO: 1081626 - DNA, 15 bp, Homo sapiens
ggaatagtttcagaa

SEQ ID NO: 1081627 - DNA, 15 bp, Homo sapiens
tggaatagtttcaga

SEQ ID NO: 1081628 - DNA, 15 bp, Homo sapiens
ttggaatagtttcag

SEQ ID NO: 1081629 - DNA, 15 bp, Homo sapiens
attggaatagtttca

SEQ ID NO: 1081630 - DNA, 15 bp, Homo sapiens
gattggaatagtttc

SEQ ID NO: 1081631 - DNA, 15 bp, Homo sapiens
tgattggaatagttt

SEQ ID NO: 1081632 - DNA, 15 bp, Homo sapiens
ttgattggaatagtt

SEQ ID NO: 1081633 - DNA, 15 bp, Homo sapiens
tttgattggaatagt

SEQ ID NO: 1081634 - DNA, 15 bp, Homo sapiens
ttttgattggaatag

SEQ ID NO: 1081635 - DNA, 15 bp, Homo sapiens
cttttgattggaata

SEQ ID NO: 1081636 - DNA, 15 bp, Homo sapiens
tcttttgattggaat

SEQ ID NO: 1081637 - DNA, 15 bp, Homo sapiens
ttcttttgattggaa

SEQ ID NO: 1081638 - DNA, 15 bp, Homo sapiens
tttcttttgattgga

SEQ ID NO: 1081639 - DNA, 15 bp, Homo sapiens
ttttcttttgattgg

SEQ ID NO: 1081640 - DNA, 15 bp, Homo sapiens
tttttcttttgattg

SEQ ID NO: 1081641 - DNA, 15 bp, Homo sapiens
ctttttcttttgatt

SEQ ID NO: 1081642 - DNA, 15 bp, Homo sapiens
tctttttcttttgat

SEQ ID NO: 1081643 - DNA, 15 bp, Homo sapiens
ctctttttcttttga

SEQ ID NO: 1081644 - DNA, 15 bp, Homo sapiens
tctctttttcttttg

SEQ ID NO: 1081645 - DNA, 15 bp, Homo sapiens
ttctctctttttctt

SEQ ID NO: 1081646 - DNA, 15 bp, Homo sapiens
attctctctttttct

SEQ ID NO: 1081647 - DNA, 15 bp, Homo sapiens
gattctctctttttc

SEQ ID NO: 1081648 - DNA, 15 bp, Homo sapiens
ggattctctcttttt

SEQ ID NO: 1081649 - DNA, 15 bp, Homo sapiens
aggattctctctttt

SEQ ID NO: 1081650 - DNA, 15 bp, Homo sapiens
gaggattctctcttt

SEQ ID NO: 1081651 - DNA, 15 bp, Homo sapiens
ggaggattctctctt

SEQ ID NO: 1081652 - DNA, 15 bp, Homo sapiens
gggaggattctctct

SEQ ID NO: 1081653 - DNA, 15 bp, Homo sapiens
agggaggattctctc

SEQ ID NO: 1081654 - DNA, 15 bp, Homo sapiens
tagggaggattctct

SEQ ID NO: 1081655 - DNA, 15 bp, Homo sapiens
ttagggaggattctc

SEQ ID NO: 1081656 - DNA, 15 bp, Homo sapiens
gttagggaggattct

SEQ ID NO: 1081657 - DNA, 15 bp, Homo sapiens
agttagggaggattc

SEQ ID NO: 1081658 - DNA, 15 bp, Homo sapiens
gagttagggaggatt

SEQ ID NO: 1081659 - DNA, 15 bp, Homo sapiens
tgagttagggaggat

SEQ ID NO: 1081660 - DNA, 15 bp, Homo sapiens
atgagttagggagga

SEQ ID NO: 1081661 - DNA, 15 bp, Homo sapiens
aatgagttagggagg

SEQ ID NO: 1081662 - DNA, 15 bp, Homo sapiens
aaatgagttagggag

SEQ ID NO: 1081663 - DNA, 15 bp, Homo sapiens
aaaatgagttaggga

SEQ ID NO: 1081664 - DNA, 15 bp, Homo sapiens
taaaatgagttaggg

SEQ ID NO: 1081665 - DNA, 15 bp, Homo sapiens
ataaaatgagttagg

SEQ ID NO: 1081666 - DNA, 15 bp, Homo sapiens
cataaaatgagttag

SEQ ID NO: 1081667 - DNA, 15 bp, Homo sapiens
tcataaaatgagtta

SEQ ID NO: 1081668 - DNA, 15 bp, Homo sapiens
ctcataaaatgagtt

SEQ ID NO: 1081669 - DNA, 15 bp, Homo sapiens
cctcataaaatgagt

SEQ ID NO: 1081670 - DNA, 15 bp, Homo sapiens
gcctcataaaatgag

SEQ ID NO: 1081671 - DNA, 15 bp, Homo sapiens
ggcctcataaaatga

SEQ ID NO: 1081672 - DNA, 15 bp, Homo sapiens
tggcctcataaaatg

SEQ ID NO: 1081673 - DNA, 15 bp, Homo sapiens
ctggcctcataaaat

SEQ ID NO: 1081674 - DNA, 15 bp, Homo sapiens
gctggcctcataaaa

SEQ ID NO: 1081675 - DNA, 15 bp, Homo sapiens
tgctggcctcataaa

SEQ ID NO: 1081676 - DNA, 15 bp, Homo sapiens
atgctggcctcataa

SEQ ID NO: 1081677 - DNA, 15 bp, Homo sapiens
gatgctggcctcata

SEQ ID NO: 1081678 - DNA, 15 bp, Homo sapiens
tgatgctggcctcat

SEQ ID NO: 1081679 - DNA, 15 bp, Homo sapiens
atgatgctggcctca

SEQ ID NO: 1081680 - DNA, 15 bp, Homo sapiens
gatgatgctggcctc

SEQ ID NO: 1081681 - DNA, 15 bp, Homo sapiens
ggatgatgctggcct

SEQ ID NO: 1081682 - DNA, 15 bp, Homo sapiens
aggatgatgctggcc

SEQ ID NO: 1081683 - DNA, 15 bp, Homo sapiens
caggatgatgctggc

SEQ ID NO: 1081684 - DNA, 15 bp, Homo sapiens
tcaggatgatgctgg

SEQ ID NO: 1081685 - DNA, 15 bp, Homo sapiens
atcaggatgatgctg

SEQ ID NO: 1081686 - DNA, 15 bp, Homo sapiens
tatcaggatgatgct

SEQ ID NO: 1081687 - DNA, 15 bp, Homo sapiens
gtatcaggatgatgc

SEQ ID NO: 1081688 - DNA, 15 bp, Homo sapiens
ggtatcaggatgatg

SEQ ID NO: 1081689 - DNA, 15 bp, Homo sapiens
tggtatcaggatgat

SEQ ID NO: 1081690 - DNA, 15 bp, Homo sapiens
ttggtatcaggatga

SEQ ID NO: 1081691 - DNA, 15 bp, Homo sapiens
tttggtatcaggatg

SEQ ID NO: 1081692 - DNA, 15 bp, Homo sapiens
ctttggtatcaggat

SEQ ID NO: 1081693 - DNA, 15 bp, Homo sapiens
cctttggtatcagga

SEQ ID NO: 1081694 - DNA, 15 bp, Homo sapiens
ccctttggtatcagg

SEQ ID NO: 1081695 - DNA, 15 bp, Homo sapiens
accctttggtatcag

SEQ ID NO: 1081696 - DNA, 15 bp, Homo sapiens
caccctttggtatca

SEQ ID NO: 1081697 - DNA, 15 bp, Homo sapiens
ccaccctttggtatc

SEQ ID NO: 1081698 - DNA, 15 bp, Homo sapiens
gccaccctttggtat

SEQ ID NO: 1081699 - DNA, 15 bp, Homo sapiens
tgccaccctttggta

SEQ ID NO: 1081700 - DNA, 15 bp, Homo sapiens
ctgccaccctttggt

SEQ ID NO: 1081701 - DNA, 15 bp, Homo sapiens
tctgccaccctttgg

SEQ ID NO: 1081702 - DNA, 15 bp, Homo sapiens
ctctgccaccctttg

SEQ ID NO: 1081703 - DNA, 15 bp, Homo sapiens
tctctgccacccttt

SEQ ID NO: 1081704 - DNA, 15 bp, Homo sapiens
ctctctgccaccctt

SEQ ID NO: 1081705 - DNA, 15 bp, Homo sapiens
tctctctgccaccct

SEQ ID NO: 1081706 - DNA, 15 bp, Homo sapiens
ctctctctgccaccc

SEQ ID NO: 1081707 - DNA, 15 bp, Homo sapiens
tctctctctgccacc

SEQ ID NO: 1081708 - DNA, 15 bp, Homo sapiens
gtctctctctgccac

SEQ ID NO: 1081709 - DNA, 15 bp, Homo sapiens
tgtctctctctgcca

SEQ ID NO: 1081710 - DNA, 15 bp, Homo sapiens
gtgtctctctctgcc

SEQ ID NO: 1081711 - DNA, 15 bp, Homo sapiens
tgtgtctctctctgc

SEQ ID NO: 1081712 - DNA, 15 bp, Homo sapiens
ttgtgtctctctctg

SEQ ID NO: 1081713 - DNA, 15 bp, Homo sapiens
gttgtgtctctctct

SEQ ID NO: 1081714 - DNA, 15 bp, Homo sapiens
tgttgtgtctctctc

SEQ ID NO: 1081715 - DNA, 15 bp, Homo sapiens
ttgttgtgtctctct

SEQ ID NO: 1081716 - DNA, 15 bp, Homo sapiens
tttgttgtgtctctc

SEQ ID NO: 1081717 - DNA, 15 bp, Homo sapiens
ttttgttgtgtctct

SEQ ID NO: 1081718 - DNA, 15 bp, Homo sapiens
tttttgttgtgtctc

SEQ ID NO: 1081719 - DNA, 15 bp, Homo sapiens
ttttttgttgtgtct

SEQ ID NO: 1081720 - DNA, 15 bp, Homo sapiens
tttttttgttgtgtc

SEQ ID NO: 1081721 - DNA, 15 bp, Homo sapiens
ctttttttgttgtgt

SEQ ID NO: 1081722 - DNA, 15 bp, Homo sapiens
tctttttttgttgtg

SEQ ID NO: 1081723 - DNA, 15 bp, Homo sapiens
ttctttttttgttgt

SEQ ID NO: 1081724 - DNA, 15 bp, Homo sapiens
attctttttttgttg

SEQ ID NO: 1081725 - DNA, 15 bp, Homo sapiens
aattctttttttgtt

SEQ ID NO: 1081726 - DNA, 15 bp, Homo sapiens
aaattctttttttgt

SEQ ID NO: 1081727 - DNA, 15 bp, Homo sapiens
aaaattctttttttg

SEQ ID NO: 1081728 - DNA, 15 bp, Homo sapiens
tctaaaattcttttt

SEQ ID NO: 1081729 - DNA, 15 bp, Homo sapiens
gtctaaaattctttt

SEQ ID NO: 1081730 - DNA, 15 bp, Homo sapiens
ggtctaaaattcttt

SEQ ID NO: 1081731 - DNA, 15 bp, Homo sapiens
tggtctaaaattctt

SEQ ID NO: 1081732 - DNA, 15 bp, Homo sapiens
ttggtctaaaattct

SEQ ID NO: 1081733 - DNA, 15 bp, Homo sapiens
attggtctaaaattc

SEQ ID NO: 1081734 - DNA, 15 bp, Homo sapiens
tattggtctaaaatt

SEQ ID NO: 1081735 - DNA, 15 bp, Homo sapiens
atattggtctaaaat

SEQ ID NO: 1081736 - DNA, 15 bp, Homo sapiens
gatattggtctaaaa

SEQ ID NO: 1081737 - DNA, 15 bp, Homo sapiens
ggatattggtctaaa

SEQ ID NO: 1081738 - DNA, 15 bp, Homo sapiens
aggatattggtctaa

SEQ ID NO: 1081739 - DNA, 15 bp, Homo sapiens
aaggatattggtcta

SEQ ID NO: 1081740 - DNA, 15 bp, Homo sapiens
caaggatattggtct

SEQ ID NO: 1081741 - DNA, 15 bp, Homo sapiens
tcaaggatattggtc

SEQ ID NO: 1081742 - DNA, 15 bp, Homo sapiens
atcaaggatattggt

SEQ ID NO: 1081743 - DNA, 15 bp, Homo sapiens
catcaaggatattgg

SEQ ID NO: 1081744 - DNA, 15 bp, Homo sapiens
tcatcaaggatattg

SEQ ID NO: 1081745 - DNA, 15 bp, Homo sapiens
ttcatcaaggatatt

SEQ ID NO: 1081746 - DNA, 15 bp, Homo sapiens
gttcatcaaggatat

SEQ ID NO: 1081747 - DNA, 15 bp, Homo sapiens
tgttcatcaaggata

SEQ ID NO: 1081748 - DNA, 15 bp, Homo sapiens
atgttcatcaaggat

SEQ ID NO: 1081749 - DNA, 15 bp, Homo sapiens
aatgttcatcaagga

SEQ ID NO: 1081750 - DNA, 15 bp, Homo sapiens
caatgttcatcaagg

SEQ ID NO: 1081751 - DNA, 15 bp, Homo sapiens
tcaatgttcatcaag

SEQ ID NO: 1081752 - DNA, 15 bp, Homo sapiens
ttcaatgttcatcaa

SEQ ID NO: 1081753 - DNA, 15 bp, Homo sapiens
cttcaatgttcatca

SEQ ID NO: 1081754 - DNA, 15 bp, Homo sapiens
gcttcaatgttcatc

SEQ ID NO: 1081755 - DNA, 15 bp, Homo sapiens
tgcttcaatgttcat

SEQ ID NO: 1081756 - DNA, 15 bp, Homo sapiens
ttgcttcaatgttca

SEQ ID NO: 1081757 - DNA, 15 bp, Homo sapiens
tttgcttcaatgttc

SEQ ID NO: 1081758 - DNA, 15 bp, Homo sapiens
ttttgcttcaatgtt

SEQ ID NO: 1081759 - DNA, 15 bp, Homo sapiens
tttttgcttcaatgt

SEQ ID NO: 1081760 - DNA, 15 bp, Homo sapiens
atttttgcttcaatg

SEQ ID NO: 1081761 - DNA, 15 bp, Homo sapiens
gatttttgcttcaat

SEQ ID NO: 1081762 - DNA, 15 bp, Homo sapiens
ggatttttgcttcaa

SEQ ID NO: 1081763 - DNA, 15 bp, Homo sapiens
aggatttttgcttca

SEQ ID NO: 1081764 - DNA, 15 bp, Homo sapiens
gaggatttttgcttc

SEQ ID NO: 1081765 - DNA, 15 bp, Homo sapiens
tgaggatttttgctt

SEQ ID NO: 1081766 - DNA, 15 bp, Homo sapiens
ctgaggatttttgct

SEQ ID NO: 1081767 - DNA, 15 bp, Homo sapiens
actgaggatttttgc

SEQ ID NO: 1081768 - DNA, 15 bp, Homo sapiens
tactgaggatttttg

SEQ ID NO: 1081769 - DNA, 15 bp, Homo sapiens
ttactgaggattttt

SEQ ID NO: 1081770 - DNA, 15 bp, Homo sapiens
tttactgaggatttt

SEQ ID NO: 1081771 - DNA, 15 bp, Homo sapiens
ttttactgaggattt

SEQ ID NO: 1081772 - DNA, 15 bp, Homo sapiens
attttactgaggatt

SEQ ID NO: 1081773 - DNA, 15 bp, Homo sapiens
tattttactgaggat

SEQ ID NO: 1081774 - DNA, 15 bp, Homo sapiens
gtattttactgagga

SEQ ID NO: 1081775 - DNA, 15 bp, Homo sapiens
agtattttactgagg

SEQ ID NO: 1081776 - DNA, 15 bp, Homo sapiens
cagtattttactgag

SEQ ID NO: 1081777 - DNA, 15 bp, Homo sapiens
ccagtattttactga

SEQ ID NO: 1081778 - DNA, 15 bp, Homo sapiens
gccagtattttactg

SEQ ID NO: 1081779 - DNA, 15 bp, Homo sapiens
tgccagtattttact

SEQ ID NO: 1081780 - DNA, 15 bp, Homo sapiens
ttgccagtattttac

SEQ ID NO: 1081781 - DNA, 15 bp, Homo sapiens
tttgccagtatttta

SEQ ID NO: 1081782 - DNA, 15 bp, Homo sapiens
gtttgccagtatttt

SEQ ID NO: 1081783 - DNA, 15 bp, Homo sapiens
ggtttgccagtattt

SEQ ID NO: 1081784 - DNA, 15 bp, Homo sapiens
cggtttgccagtatt

SEQ ID NO: 1081785 - DNA, 15 bp, Homo sapiens
tcggtttgccagtat

SEQ ID NO: 1081786 - DNA, 15 bp, Homo sapiens
ttcggtttgccagta

SEQ ID NO: 1081787 - DNA, 15 bp, Homo sapiens
attcggtttgccagt

SEQ ID NO: 1081788 - DNA, 15 bp, Homo sapiens
gattcggtttgccag

SEQ ID NO: 1081789 - DNA, 15 bp, Homo sapiens
ggattcggtttgcca

SEQ ID NO: 1081790 - DNA, 15 bp, Homo sapiens
tggattcggtttgcc

SEQ ID NO: 1081791 - DNA, 15 bp, Homo sapiens
ctggattcggtttgc

SEQ ID NO: 1081792 - DNA, 15 bp, Homo sapiens
gctggattcggtttg

SEQ ID NO: 1081793 - DNA, 15 bp, Homo sapiens
tgctggattcggttt

SEQ ID NO: 1081794 - DNA, 15 bp, Homo sapiens
ttgctggattcggtt

SEQ ID NO: 1081795 - DNA, 15 bp, Homo sapiens
gttgctggattcggt

SEQ ID NO: 1081796 - DNA, 15 bp, Homo sapiens
tgttgctggattcgg

SEQ ID NO: 1081797 - DNA, 15 bp, Homo sapiens
gtgttgctggattcg

SEQ ID NO: 1081798 - DNA, 15 bp, Homo sapiens
tgtgttgctggattc

SEQ ID NO: 1081799 - DNA, 15 bp, Homo sapiens
atgtgttgctggatt

SEQ ID NO: 1081800 - DNA, 15 bp, Homo sapiens
gatgtgttgctggat

SEQ ID NO: 1081801 - DNA, 15 bp, Homo sapiens
tgatgtgttgctgga

SEQ ID NO: 1081802 - DNA, 15 bp, Homo sapiens
ttgatgtgttgctgg

SEQ ID NO: 1081803 - DNA, 15 bp, Homo sapiens
tttgatgtgttgctg

SEQ ID NO: 1081804 - DNA, 15 bp, Homo sapiens
ttttgatgtgttgct

SEQ ID NO: 1081805 - DNA, 15 bp, Homo sapiens
tttttgatgtgttgc

SEQ ID NO: 1081806 - DNA, 15 bp, Homo sapiens
ctttttgatgtgttg

SEQ ID NO: 1081807 - DNA, 15 bp, Homo sapiens
gctttttgatgtgtt

SEQ ID NO: 1081808 - DNA, 15 bp, Homo sapiens
agctttttgatgtgt

SEQ ID NO: 1081809 - DNA, 15 bp, Homo sapiens
aagctttttgatgtg

SEQ ID NO: 1081810 - DNA, 15 bp, Homo sapiens
taagctttttgatgt

SEQ ID NO: 1081811 - DNA, 15 bp, Homo sapiens
ataagctttttgatg

SEQ ID NO: 1081812 - DNA, 15 bp, Homo sapiens
gataagctttttgat

SEQ ID NO: 1081813 - DNA, 15 bp, Homo sapiens
ggataagctttttga

SEQ ID NO: 1081814 - DNA, 15 bp, Homo sapiens
tggataagctttttg

SEQ ID NO: 1081815 - DNA, 15 bp, Homo sapiens
gtggataagcttttt

SEQ ID NO: 1081816 - DNA, 15 bp, Homo sapiens
ggtggataagctttt

SEQ ID NO: 1081817 - DNA, 15 bp, Homo sapiens
tggtggataagcttt

SEQ ID NO: 1081818 - DNA, 15 bp, Homo sapiens
atggtggataagctt

SEQ ID NO: 1081819 - DNA, 15 bp, Homo sapiens
catggtggataagct

SEQ ID NO: 1081820 - DNA, 15 bp, Homo sapiens
tcatggtggataagc

SEQ ID NO: 1081821 - DNA, 15 bp, Homo sapiens
atcatggtggataag

SEQ ID NO: 1081822 - DNA, 15 bp, Homo sapiens
gatcatggtggataa

SEQ ID NO: 1081823 - DNA, 15 bp, Homo sapiens
tgatcatggtggata

SEQ ID NO: 1081824 - DNA, 15 bp, Homo sapiens
ttgatcatggtggat

SEQ ID NO: 1081825 - DNA, 15 bp, Homo sapiens
cttgatcatggtgga

SEQ ID NO: 1081826 - DNA, 15 bp, Homo sapiens
acttgatcatggtgg

SEQ ID NO: 1081827 - DNA, 15 bp, Homo sapiens
cacttgatcatggtg

SEQ ID NO: 1081828 - DNA, 15 bp, Homo sapiens
ccacttgatcatggt

SEQ ID NO: 1081829 - DNA, 15 bp, Homo sapiens
cccacttgatcatgg

SEQ ID NO: 1081830 - DNA, 15 bp, Homo sapiens
gcccacttgatcatg

SEQ ID NO: 1081831 - DNA, 15 bp, Homo sapiens
agcccacttgatcat

SEQ ID NO: 1081832 - DNA, 15 bp, Homo sapiens
aagcccacttgatca

SEQ ID NO: 1081833 - DNA, 15 bp, Homo sapiens
gaagcccacttgatc

SEQ ID NO: 1081834 - DNA, 15 bp, Homo sapiens
tgaagcccacttgat

SEQ ID NO: 1081835 - DNA, 15 bp, Homo sapiens
atgaagcccacttga

SEQ ID NO: 1081836 - DNA, 15 bp, Homo sapiens
gatgaagcccacttg

SEQ ID NO: 1081837 - DNA, 15 bp, Homo sapiens
ggatgaagcccactt

SEQ ID NO: 1081838 - DNA, 15 bp, Homo sapiens
gggatgaagcccact

SEQ ID NO: 1081839 - DNA, 15 bp, Homo sapiens
agggatgaagcccac

SEQ ID NO: 1081840 - DNA, 15 bp, Homo sapiens
cagggatgaagccca

SEQ ID NO: 1081841 - DNA, 15 bp, Homo sapiens
ccagggatgaagccc

SEQ ID NO: 1081842 - DNA, 15 bp, Homo sapiens
cccagggatgaagcc

SEQ ID NO: 1081843 - DNA, 15 bp, Homo sapiens
tcccagggatgaagc

SEQ ID NO: 1081844 - DNA, 15 bp, Homo sapiens
atcccagggatgaag

SEQ ID NO: 1081845 - DNA, 15 bp, Homo sapiens
catcccagggatgaa

SEQ ID NO: 1081846 - DNA, 15 bp, Homo sapiens
gcatcccagggatga

SEQ ID NO: 1081847 - DNA, 15 bp, Homo sapiens
tgcatcccagggatg

SEQ ID NO: 1081848 - DNA, 15 bp, Homo sapiens
ttgcatcccagggat

SEQ ID NO: 1081849 - DNA, 15 bp, Homo sapiens
cttgcatcccaggga

SEQ ID NO: 1081850 - DNA, 15 bp, Homo sapiens
ccttgcatcccaggg

SEQ ID NO: 1081851 - DNA, 15 bp, Homo sapiens
gccttgcatcccagg

SEQ ID NO: 1081852 - DNA, 15 bp, Homo sapiens
agccttgcatcccag

SEQ ID NO: 1081853 - DNA, 15 bp, Homo sapiens
cagccttgcatccca

SEQ ID NO: 1081854 - DNA, 15 bp, Homo sapiens
ccagccttgcatccc

SEQ ID NO: 1081855 - DNA, 15 bp, Homo sapiens
accagccttgcatcc

SEQ ID NO: 1081856 - DNA, 15 bp, Homo sapiens
aaccagccttgcatc

SEQ ID NO: 1081857 - DNA, 15 bp, Homo sapiens
gaaccagccttgcat

SEQ ID NO: 1081858 - DNA, 15 bp, Homo sapiens
tgaaccagccttgca

SEQ ID NO: 1081859 - DNA, 15 bp, Homo sapiens
ttgaaccagccttgc

SEQ ID NO: 1081860 - DNA, 15 bp, Homo sapiens
gttgaaccagccttg

SEQ ID NO: 1081861 - DNA, 15 bp, Homo sapiens
tgttgaaccagcctt

SEQ ID NO: 1081862 - DNA, 15 bp, Homo sapiens
atgttgaaccagcct

SEQ ID NO: 1081863 - DNA, 15 bp, Homo sapiens
tatgttgaaccagcc

SEQ ID NO: 1081864 - DNA, 15 bp, Homo sapiens
gtatgttgaaccagc

SEQ ID NO: 1081865 - DNA, 15 bp, Homo sapiens
cgtatgttgaaccag

SEQ ID NO: 1081866 - DNA, 15 bp, Homo sapiens
tcgtatgttgaacca

SEQ ID NO: 1081867 - DNA, 15 bp, Homo sapiens
ttcgtatgttgaacc

SEQ ID NO: 1081868 - DNA, 15 bp, Homo sapiens
tttcgtatgttgaac

SEQ ID NO: 1081869 - DNA, 15 bp, Homo sapiens
ttttcgtatgttgaa

SEQ ID NO: 1081870 - DNA, 15 bp, Homo sapiens
attttcgtatgttga

SEQ ID NO: 1081871 - DNA, 15 bp, Homo sapiens
gattttcgtatgttg

SEQ ID NO: 1081872 - DNA, 15 bp, Homo sapiens
tgattttcgtatgtt

SEQ ID NO: 1081873 - DNA, 15 bp, Homo sapiens
ctgattttcgtatgt

SEQ ID NO: 1081874 - DNA, 15 bp, Homo sapiens
actgattttcgtatg

SEQ ID NO: 1081875 - DNA, 15 bp, Homo sapiens
tactgattttcgtat

SEQ ID NO: 1081876 - DNA, 15 bp, Homo sapiens
ttactgattttcgta

SEQ ID NO: 1081877 - DNA, 15 bp, Homo sapiens
tttactgattttcgt

SEQ ID NO: 1081878 - DNA, 15 bp, Homo sapiens
gtttactgattttcg

SEQ ID NO: 1081879 - DNA, 15 bp, Homo sapiens
cgtttactgattttc

SEQ ID NO: 1081880 - DNA, 15 bp, Homo sapiens
acgtttactgatttt

SEQ ID NO: 1081881 - DNA, 15 bp, Homo sapiens
tacgtttactgattt

SEQ ID NO: 1081882 - DNA, 15 bp, Homo sapiens
ttacgtttactgatt

SEQ ID NO: 1081883 - DNA, 15 bp, Homo sapiens
attacgtttactgat

SEQ ID NO: 1081884 - DNA, 15 bp, Homo sapiens
gattacgtttactga

SEQ ID NO: 1081885 - DNA, 15 bp, Homo sapiens
ggattacgtttactg

SEQ ID NO: 1081886 - DNA, 15 bp, Homo sapiens
tggattacgtttact

SEQ ID NO: 1081887 - DNA, 15 bp, Homo sapiens
ctggattacgtttac

SEQ ID NO: 1081888 - DNA, 15 bp, Homo sapiens
gctggattacgttta

SEQ ID NO: 1081889 - DNA, 15 bp, Homo sapiens
tgctggattacgttt

SEQ ID NO: 1081890 - DNA, 15 bp, Homo sapiens
atgctggattacgtt

SEQ ID NO: 1081891 - DNA, 15 bp, Homo sapiens
tatgctggattacgt

SEQ ID NO: 1081892 - DNA, 15 bp, Homo sapiens
atatgctggattacg

SEQ ID NO: 1081893 - DNA, 15 bp, Homo sapiens
tatatgctggattac

SEQ ID NO: 1081894 - DNA, 15 bp, Homo sapiens
ttatatgctggatta

SEQ ID NO: 1081895 - DNA, 15 bp, Homo sapiens
tttatatgctggatt

SEQ ID NO: 1081896 - DNA, 15 bp, Homo sapiens
gtttatatgctggat

SEQ ID NO: 1081897 - DNA, 15 bp, Homo sapiens
tgtttatatgctgga

SEQ ID NO: 1081898 - DNA, 15 bp, Homo sapiens
ctgtttatatgctgg

SEQ ID NO: 1081899 - DNA, 15 bp, Homo sapiens
tctgtttatatgctg

SEQ ID NO: 1081900 - DNA, 15 bp, Homo sapiens
ttctgtttatatgct

SEQ ID NO: 1081901 - DNA, 15 bp, Homo sapiens
gttctgtttatatgc

SEQ ID NO: 1081902 - DNA, 15 bp, Homo sapiens
ggttctgtttatatg

SEQ ID NO: 1081903 - DNA, 15 bp, Homo sapiens
tggttctgtttatat

SEQ ID NO: 1081904 - DNA, 15 bp, Homo sapiens
ttggttctgtttata

SEQ ID NO: 1081905 - DNA, 15 bp, Homo sapiens
tttggttctgtttat

SEQ ID NO: 1081906 - DNA, 15 bp, Homo sapiens
ctttggttctgttta

SEQ ID NO: 1081907 - DNA, 15 bp, Homo sapiens
tctttggttctgttt

SEQ ID NO: 1081908 - DNA, 15 bp, Homo sapiens
gtctttggttctgtt

SEQ ID NO: 1081909 - DNA, 15 bp, Homo sapiens
tgtctttggttctgt

SEQ ID NO: 1081910 - DNA, 15 bp, Homo sapiens
ttgtctttggttctg

SEQ ID NO: 1081911 - DNA, 15 bp, Homo sapiens
tttgtctttggttct

SEQ ID NO: 1081912 - DNA, 15 bp, Homo sapiens
ttttgtctttggttc

SEQ ID NO: 1081913 - DNA, 15 bp, Homo sapiens
gtttttgtctttggt

SEQ ID NO: 1081914 - DNA, 15 bp, Homo sapiens
ggtttttgtctttgg

SEQ ID NO: 1081915 - DNA, 15 bp, Homo sapiens
tggtttttgtctttg

SEQ ID NO: 1081916 - DNA, 15 bp, Homo sapiens
gtggtttttgtcttt

SEQ ID NO: 1081917 - DNA, 15 bp, Homo sapiens
tgtggtttttgtctt

SEQ ID NO: 1081918 - DNA, 15 bp, Homo sapiens
atgtggtttttgtct

SEQ ID NO: 1081919 - DNA, 15 bp, Homo sapiens
catgtggtttttgtc

SEQ ID NO: 1081920 - DNA, 15 bp, Homo sapiens
tcatgtggtttttgt

SEQ ID NO: 1081921 - DNA, 15 bp, Homo sapiens
atcatgtggtttttg

SEQ ID NO: 1081922 - DNA, 15 bp, Homo sapiens
aatcatgtggttttt

SEQ ID NO: 1081923 - DNA, 15 bp, Homo sapiens
taatcatgtggtttt

SEQ ID NO: 1081924 - DNA, 15 bp, Homo sapiens
ataatcatgtggttt

SEQ ID NO: 1081925 - DNA, 15 bp, Homo sapiens
gataatcatgtggtt

SEQ ID NO: 1081926 - DNA, 15 bp, Homo sapiens
agataatcatgtggt

SEQ ID NO: 1081927 - DNA, 15 bp, Homo sapiens
gagataatcatgtgg

SEQ ID NO: 1081928 - DNA, 15 bp, Homo sapiens
tgagataatcatgtg

SEQ ID NO: 1081929 - DNA, 15 bp, Homo sapiens
ttgagataatcatgt

SEQ ID NO: 1081930 - DNA, 15 bp, Homo sapiens
attgagataatcatg

SEQ ID NO: 1081931 - DNA, 15 bp, Homo sapiens
tattgagataatcat

SEQ ID NO: 1081932 - DNA, 15 bp, Homo sapiens
ctattgagataatca

SEQ ID NO: 1081933 - DNA, 15 bp, Homo sapiens
tctattgagataatc

SEQ ID NO: 1081934 - DNA, 15 bp, Homo sapiens
atctattgagataat

SEQ ID NO: 1081935 - DNA, 15 bp, Homo sapiens
catctattgagataa

SEQ ID NO: 1081936 - DNA, 15 bp, Homo sapiens
gcatctattgagata

SEQ ID NO: 1081937 - DNA, 15 bp, Homo sapiens
tgcatctattgagat

SEQ ID NO: 1081938 - DNA, 15 bp, Homo sapiens
ctgcatctattgaga

SEQ ID NO: 1081939 - DNA, 15 bp, Homo sapiens
tctgcatctattgag

SEQ ID NO: 1081940 - DNA, 15 bp, Homo sapiens
ttctgcatctattga

SEQ ID NO: 1081941 - DNA, 15 bp, Homo sapiens
tttctgcatctattg

SEQ ID NO: 1081942 - DNA, 15 bp, Homo sapiens
ttttctgcatctatt

SEQ ID NO: 1081943 - DNA, 15 bp, Homo sapiens
cttttctgcatctat

SEQ ID NO: 1081944 - DNA, 15 bp, Homo sapiens
ccttttctgcatcta

SEQ ID NO: 1081945 - DNA, 15 bp, Homo sapiens
gccttttctgcatct

SEQ ID NO: 1081946 - DNA, 15 bp, Homo sapiens
ggccttttctgcatc

SEQ ID NO: 1081947 - DNA, 15 bp, Homo sapiens
aggccttttctgcat

SEQ ID NO: 1081948 - DNA, 15 bp, Homo sapiens
aaggccttttctgca

SEQ ID NO: 1081949 - DNA, 15 bp, Homo sapiens
aaaggccttttctgc

SEQ ID NO: 1081950 - DNA, 15 bp, Homo sapiens
caaaggccttttctg

SEQ ID NO: 1081951 - DNA, 15 bp, Homo sapiens
tcaaaggccttttct

SEQ ID NO: 1081952 - DNA, 15 bp, Homo sapiens
gtcaaaggccttttc

SEQ ID NO: 1081953 - DNA, 15 bp, Homo sapiens
tgtcaaaggcctttt

SEQ ID NO: 1081954 - DNA, 15 bp, Homo sapiens
ttgtcaaaggccttt

SEQ ID NO: 1081955 - DNA, 15 bp, Homo sapiens
tttgtcaaaggcctt

SEQ ID NO: 1081956 - DNA, 15 bp, Homo sapiens
ttttgtcaaaggcct

SEQ ID NO: 1081957 - DNA, 15 bp, Homo sapiens
attttgtcaaaggcc

SEQ ID NO: 1081958 - DNA, 15 bp, Homo sapiens
aattttgtcaaaggc

SEQ ID NO: 1081959 - DNA, 15 bp, Homo sapiens
gaattttgtcaaagg

SEQ ID NO: 1081960 - DNA, 15 bp, Homo sapiens
tgaattttgtcaaag

SEQ ID NO: 1081961 - DNA, 15 bp, Homo sapiens
ttgaattttgtcaaa

SEQ ID NO: 1081962 - DNA, 15 bp, Homo sapiens
gttgaattttgtcaa

SEQ ID NO: 1081963 - DNA, 15 bp, Homo sapiens
tgttgaattttgtca

SEQ ID NO: 1081964 - DNA, 15 bp, Homo sapiens
ttgttgaattttgtc

SEQ ID NO: 1081965 - DNA, 15 bp, Homo sapiens
gttgttgaattttgt

SEQ ID NO: 1081966 - DNA, 15 bp, Homo sapiens
ggttgttgaattttg

SEQ ID NO: 1081967 - DNA, 15 bp, Homo sapiens
gggttgttgaatttt

SEQ ID NO: 1081968 - DNA, 15 bp, Homo sapiens
agggttgttgaattt

SEQ ID NO: 1081969 - DNA, 15 bp, Homo sapiens
gagggttgttgaatt

SEQ ID NO: 1081970 - DNA, 15 bp, Homo sapiens
tgagggttgttgaat

SEQ ID NO: 1081971 - DNA, 15 bp, Homo sapiens
atgagggttgttgaa

SEQ ID NO: 1081972 - DNA, 15 bp, Homo sapiens
catgagggttgttga

SEQ ID NO: 1081973 - DNA, 15 bp, Homo sapiens
gcatgagggttgttg

SEQ ID NO: 1081974 - DNA, 15 bp, Homo sapiens
agcatgagggttgtt

SEQ ID NO: 1081975 - DNA, 15 bp, Homo sapiens
tagcatgagggttgt

SEQ ID NO: 1081976 - DNA, 15 bp, Homo sapiens
ttagcatgagggttg

SEQ ID NO: 1081977 - DNA, 15 bp, Homo sapiens
tttagcatgagggtt

SEQ ID NO: 1081978 - DNA, 15 bp, Homo sapiens
ttttagcatgagggt

SEQ ID NO: 1081979 - DNA, 15 bp, Homo sapiens
tttttagcatgaggg

SEQ ID NO: 1081980 - DNA, 15 bp, Homo sapiens
gtttttagcatgagg

SEQ ID NO: 1081981 - DNA, 15 bp, Homo sapiens
agtttttagcatgag

SEQ ID NO: 1081982 - DNA, 15 bp, Homo sapiens
gagtttttagcatga

SEQ ID NO: 1081983 - DNA, 15 bp, Homo sapiens
agagtttttagcatg

SEQ ID NO: 1081984 - DNA, 15 bp, Homo sapiens
gagagtttttagcat

SEQ ID NO: 1081985 - DNA, 15 bp, Homo sapiens
tgagagtttttagca

SEQ ID NO: 1081986 - DNA, 15 bp, Homo sapiens
ttgagagtttttagc

SEQ ID NO: 1081987 - DNA, 15 bp, Homo sapiens
attgagagtttttag

SEQ ID NO: 1081988 - DNA, 15 bp, Homo sapiens
tattgagagttttta

SEQ ID NO: 1081989 - DNA, 15 bp, Homo sapiens
ttattgagagttttt

SEQ ID NO: 1081990 - DNA, 15 bp, Homo sapiens
tttattgagagtttt

SEQ ID NO: 1081991 - DNA, 15 bp, Homo sapiens
atttattgagagttt

SEQ ID NO: 1081992 - DNA, 15 bp, Homo sapiens
aatttattgagagtt

SEQ ID NO: 1081993 - DNA, 15 bp, Homo sapiens
taatttattgagagt

SEQ ID NO: 1081994 - DNA, 15 bp, Homo sapiens
ctaatttattgagag

SEQ ID NO: 1081995 - DNA, 15 bp, Homo sapiens
cctaatttattgaga

SEQ ID NO: 1081996 - DNA, 15 bp, Homo sapiens
acctaatttattgag

SEQ ID NO: 1081997 - DNA, 15 bp, Homo sapiens
tacctaatttattga

SEQ ID NO: 1081998 - DNA, 15 bp, Homo sapiens
atacctaatttattg

SEQ ID NO: 1081999 - DNA, 15 bp, Homo sapiens
aatacctaatttatt

SEQ ID NO: 1082000 - DNA, 15 bp, Homo sapiens
caatacctaatttat

SEQ ID NO: 1082001 - DNA, 15 bp, Homo sapiens
tcaatacctaattta

SEQ ID NO: 1082002 - DNA, 15 bp, Homo sapiens
atcaatacctaattt

SEQ ID NO: 1082003 - DNA, 15 bp, Homo sapiens
catcaatacctaatt

SEQ ID NO: 1082004 - DNA, 15 bp, Homo sapiens
ccatcaatacctaat

SEQ ID NO: 1082005 - DNA, 15 bp, Homo sapiens
cccatcaatacctaa

SEQ ID NO: 1082006 - DNA, 15 bp, Homo sapiens
tcccatcaataccta

SEQ ID NO: 1082007 - DNA, 15 bp, Homo sapiens
gtcccatcaatacct

SEQ ID NO: 1082008 - DNA, 15 bp, Homo sapiens
cgtcccatcaatacc

SEQ ID NO: 1082009 - DNA, 15 bp, Homo sapiens
acgtcccatcaatac

SEQ ID NO: 1082010 - DNA, 15 bp, Homo sapiens
tacgtcccatcaata

SEQ ID NO: 1082011 - DNA, 15 bp, Homo sapiens
atacgtcccatcaat

SEQ ID NO: 1082012 - DNA, 15 bp, Homo sapiens
gatacgtcccatcaa

SEQ ID NO: 1082013 - DNA, 15 bp, Homo sapiens
agatacgtcccatca

SEQ ID NO: 1082014 - DNA, 15 bp, Homo sapiens
gagatacgtcccatc

SEQ ID NO: 1082015 - DNA, 15 bp, Homo sapiens
tgagatacgtcccat

SEQ ID NO: 1082016 - DNA, 15 bp, Homo sapiens
ttgagatacgtccca

SEQ ID NO: 1082017 - DNA, 15 bp, Homo sapiens
tttgagatacgtccc

SEQ ID NO: 1082018 - DNA, 15 bp, Homo sapiens
ttttgagatacgtcc

SEQ ID NO: 1082019 - DNA, 15 bp, Homo sapiens
attttgagatacgtc

SEQ ID NO: 1082020 - DNA, 15 bp, Homo sapiens
tattttgagatacgt

SEQ ID NO: 1082021 - DNA, 15 bp, Homo sapiens
ttattttgagatacg

SEQ ID NO: 1082022 - DNA, 15 bp, Homo sapiens
attattttgagatac

SEQ ID NO: 1082023 - DNA, 15 bp, Homo sapiens
tattattttgagata

SEQ ID NO: 1082024 - DNA, 15 bp, Homo sapiens
cttattattttgaga

SEQ ID NO: 1082025 - DNA, 15 bp, Homo sapiens
tcttattattttgag

SEQ ID NO: 1082026 - DNA, 15 bp, Homo sapiens
ctcttattattttga

SEQ ID NO: 1082027 - DNA, 15 bp, Homo sapiens
gctcttattattttg

SEQ ID NO: 1082028 - DNA, 15 bp, Homo sapiens
agctcttattatttt

SEQ ID NO: 1082029 - DNA, 15 bp, Homo sapiens
tagctcttattattt

SEQ ID NO: 1082030 - DNA, 15 bp, Homo sapiens
atagctcttattatt

SEQ ID NO: 1082031 - DNA, 15 bp, Homo sapiens
gatagctcttattat

SEQ ID NO: 1082032 - DNA, 15 bp, Homo sapiens
agatagctcttatta

SEQ ID NO: 1082033 - DNA, 15 bp, Homo sapiens
tagatagctcttatt

SEQ ID NO: 1082034 - DNA, 15 bp, Homo sapiens
atagatagctcttat

SEQ ID NO: 1082035 - DNA, 15 bp, Homo sapiens
catagatagctctta

SEQ ID NO: 1082036 - DNA, 15 bp, Homo sapiens
tcatagatagctctt

SEQ ID NO: 1082037 - DNA, 15 bp, Homo sapiens
gtcatagatagctct

SEQ ID NO: 1082038 - DNA, 15 bp, Homo sapiens
tgtcatagatagctc

SEQ ID NO: 1082039 - DNA, 15 bp, Homo sapiens
ttgtcatagatagct

SEQ ID NO: 1082040 - DNA, 15 bp, Homo sapiens
tttgtcatagatagc

SEQ ID NO: 1082041 - DNA, 15 bp, Homo sapiens
gtttgtcatagatag

SEQ ID NO: 1082042 - DNA, 15 bp, Homo sapiens
ggtttgtcatagata

SEQ ID NO: 1082043 - DNA, 15 bp, Homo sapiens
gggtttgtcatagat

SEQ ID NO: 1082044 - DNA, 15 bp, Homo sapiens
tgggtttgtcataga

SEQ ID NO: 1082045 - DNA, 15 bp, Homo sapiens
gtgggtttgtcatag

SEQ ID NO: 1082046 - DNA, 15 bp, Homo sapiens
tgtgggtttgtcata

SEQ ID NO: 1082047 - DNA, 15 bp, Homo sapiens
ctgtgggtttgtcat

SEQ ID NO: 1082048 - DNA, 15 bp, Homo sapiens
gctgtgggtttgtca

SEQ ID NO: 1082049 - DNA, 15 bp, Homo sapiens
ggctgtgggtttgtc

SEQ ID NO: 1082050 - DNA, 15 bp, Homo sapiens
tggctgtgggtttgt

SEQ ID NO: 1082051 - DNA, 15 bp, Homo sapiens
ttggctgtgggtttg

SEQ ID NO: 1082052 - DNA, 15 bp, Homo sapiens
attggctgtgggttt

SEQ ID NO: 1082053 - DNA, 15 bp, Homo sapiens
tattggctgtgggtt

SEQ ID NO: 1082054 - DNA, 15 bp, Homo sapiens
atattggctgtgggt

SEQ ID NO: 1082055 - DNA, 15 bp, Homo sapiens
gatattggctgtggg

SEQ ID NO: 1082056 - DNA, 15 bp, Homo sapiens
tgatattggctgtgg

SEQ ID NO: 1082057 - DNA, 15 bp, Homo sapiens
atgatattggctgtg

SEQ ID NO: 1082058 - DNA, 15 bp, Homo sapiens
tatgatattggctgt

SEQ ID NO: 1082059 - DNA, 15 bp, Homo sapiens
gtatgatattggctg

SEQ ID NO: 1082060 - DNA, 15 bp, Homo sapiens
agtatgatattggct

SEQ ID NO: 1082061 - DNA, 15 bp, Homo sapiens
cagtatgatattggc

SEQ ID NO: 1082062 - DNA, 15 bp, Homo sapiens
tcagtatgatattgg

SEQ ID NO: 1082063 - DNA, 15 bp, Homo sapiens
ttcagtatgatattg

SEQ ID NO: 1082064 - DNA, 15 bp, Homo sapiens
attcagtatgatatt

SEQ ID NO: 1082065 - DNA, 15 bp, Homo sapiens
cattcagtatgatat

SEQ ID NO: 1082066 - DNA, 15 bp, Homo sapiens
ccattcagtatgata

SEQ ID NO: 1082067 - DNA, 15 bp, Homo sapiens
tccattcagtatgat

SEQ ID NO: 1082068 - DNA, 15 bp, Homo sapiens
gtccattcagtatga

SEQ ID NO: 1082069 - DNA, 15 bp, Homo sapiens
tgtccattcagtatg

SEQ ID NO: 1082070 - DNA, 15 bp, Homo sapiens
ttgtccattcagtat

SEQ ID NO: 1082071 - DNA, 15 bp, Homo sapiens
tttgtccattcagta

SEQ ID NO: 1082072 - DNA, 15 bp, Homo sapiens
ttttgtccattcagt

SEQ ID NO: 1082073 - DNA, 15 bp, Homo sapiens
tttttgtccattcag

SEQ ID NO: 1082074 - DNA, 15 bp, Homo sapiens
gtttttgtccattca

SEQ ID NO: 1082075 - DNA, 15 bp, Homo sapiens
agtttttgtccattc

SEQ ID NO: 1082076 - DNA, 15 bp, Homo sapiens
cagtttttgtccatt

SEQ ID NO: 1082077 - DNA, 15 bp, Homo sapiens
ccagtttttgtccat

SEQ ID NO: 1082078 - DNA, 15 bp, Homo sapiens
tccagtttttgtcca

SEQ ID NO: 1082079 - DNA, 15 bp, Homo sapiens
ttccagtttttgtcc

SEQ ID NO: 1082080 - DNA, 15 bp, Homo sapiens
cttccagtttttgtc

SEQ ID NO: 1082081 - DNA, 15 bp, Homo sapiens
gcttccagtttttgt

SEQ ID NO: 1082082 - DNA, 15 bp, Homo sapiens
tgcttccagtttttg

SEQ ID NO: 1082083 - DNA, 15 bp, Homo sapiens
atgcttccagttttt

SEQ ID NO: 1082084 - DNA, 15 bp, Homo sapiens
aatgcttccagtttt

SEQ ID NO: 1082085 - DNA, 15 bp, Homo sapiens
gaatgcttccagttt

SEQ ID NO: 1082086 - DNA, 15 bp, Homo sapiens
ggaatgcttccagtt

SEQ ID NO: 1082087 - DNA, 15 bp, Homo sapiens
gggaatgcttccagt

SEQ ID NO: 1082088 - DNA, 15 bp, Homo sapiens
agggaatgcttccag

SEQ ID NO: 1082089 - DNA, 15 bp, Homo sapiens
aagggaatgcttcca

SEQ ID NO: 1082090 - DNA, 15 bp, Homo sapiens
aaagggaatgcttcc

SEQ ID NO: 1082091 - DNA, 15 bp, Homo sapiens
caaagggaatgcttc

SEQ ID NO: 1082092 - DNA, 15 bp, Homo sapiens
tcaaagggaatgctt

SEQ ID NO: 1082093 - DNA, 15 bp, Homo sapiens
ttcaaagggaatgct

SEQ ID NO: 1082094 - DNA, 15 bp, Homo sapiens
tttcaaagggaatgc

SEQ ID NO: 1082095 - DNA, 15 bp, Homo sapiens
ttttcaaagggaatg

SEQ ID NO: 1082096 - DNA, 15 bp, Homo sapiens
gttttcaaagggaat

SEQ ID NO: 1082097 - DNA, 15 bp, Homo sapiens
agttttcaaagggaa

SEQ ID NO: 1082098 - DNA, 15 bp, Homo sapiens
cagttttcaaaggga

SEQ ID NO: 1082099 - DNA, 15 bp, Homo sapiens
ccagttttcaaaggg

SEQ ID NO: 1082100 - DNA, 15 bp, Homo sapiens
gccagttttcaaagg

SEQ ID NO: 1082101 - DNA, 15 bp, Homo sapiens
tgccagttttcaaag

SEQ ID NO: 1082102 - DNA, 15 bp, Homo sapiens
gtgccagttttcaaa

SEQ ID NO: 1082103 - DNA, 15 bp, Homo sapiens
tgtgccagttttcaa

SEQ ID NO: 1082104 - DNA, 15 bp, Homo sapiens
ttgtgccagttttca

SEQ ID NO: 1082105 - DNA, 15 bp, Homo sapiens
cttgtgccagttttc

SEQ ID NO: 1082106 - DNA, 15 bp, Homo sapiens
tcttgtgccagtttt

SEQ ID NO: 1082107 - DNA, 15 bp, Homo sapiens
gtcttgtgccagttt

SEQ ID NO: 1082108 - DNA, 15 bp, Homo sapiens
agtcttgtgccagtt

SEQ ID NO: 1082109 - DNA, 15 bp, Homo sapiens
cagtcttgtgccagt

SEQ ID NO: 1082110 - DNA, 15 bp, Homo sapiens
ccagtcttgtgccag

SEQ ID NO: 1082111 - DNA, 15 bp, Homo sapiens
cccagtcttgtgcca

SEQ ID NO: 1082112 - DNA, 15 bp, Homo sapiens
tcccagtcttgtgcc

SEQ ID NO: 1082113 - DNA, 15 bp, Homo sapiens
atcccagtcttgtgc

SEQ ID NO: 1082114 - DNA, 15 bp, Homo sapiens
catcccagtcttgtg

SEQ ID NO: 1082115 - DNA, 15 bp, Homo sapiens
gcatcccagtcttgt

SEQ ID NO: 1082116 - DNA, 15 bp, Homo sapiens
ggcatcccagtcttg

SEQ ID NO: 1082117 - DNA, 15 bp, Homo sapiens
gggcatcccagtctt

SEQ ID NO: 1082118 - DNA, 15 bp, Homo sapiens
agggcatcccagtct

SEQ ID NO: 1082119 - DNA, 15 bp, Homo sapiens
gagggcatcccagtc

SEQ ID NO: 1082120 - DNA, 15 bp, Homo sapiens
agagggcatcccagt

SEQ ID NO: 1082121 - DNA, 15 bp, Homo sapiens
gagagggcatcccag

SEQ ID NO: 1082122 - DNA, 15 bp, Homo sapiens
agagagggcatccca

SEQ ID NO: 1082123 - DNA, 15 bp, Homo sapiens
gagagagggcatccc

SEQ ID NO: 1082124 - DNA, 15 bp, Homo sapiens
tgagagagggcatcc

SEQ ID NO: 1082125 - DNA, 15 bp, Homo sapiens
gtgagagagggcatc

SEQ ID NO: 1082126 - DNA, 15 bp, Homo sapiens
ggtgagagagggcat

SEQ ID NO: 1082127 - DNA, 15 bp, Homo sapiens
tggtgagagagggca

SEQ ID NO: 1082128 - DNA, 15 bp, Homo sapiens
gtggtgagagagggc

SEQ ID NO: 1082129 - DNA, 15 bp, Homo sapiens
agtggtgagagaggg

SEQ ID NO: 1082130 - DNA, 15 bp, Homo sapiens
gagtggtgagagagg

SEQ ID NO: 1082131 - DNA, 15 bp, Homo sapiens
ggagtggtgagagag

SEQ ID NO: 1082132 - DNA, 15 bp, Homo sapiens
aggagtggtgagaga

SEQ ID NO: 1082133 - DNA, 15 bp, Homo sapiens
aaggagtggtgagag

SEQ ID NO: 1082134 - DNA, 15 bp, Homo sapiens
aaaggagtggtgaga

SEQ ID NO: 1082135 - DNA, 15 bp, Homo sapiens
aaaaggagtggtgag

SEQ ID NO: 1082136 - DNA, 15 bp, Homo sapiens
gaaaaggagtggtga

SEQ ID NO: 1082137 - DNA, 15 bp, Homo sapiens
tgaaaaggagtggtg

SEQ ID NO: 1082138 - DNA, 15 bp, Homo sapiens
ttgaaaaggagtggt

SEQ ID NO: 1082139 - DNA, 15 bp, Homo sapiens
gttgaaaaggagtgg

SEQ ID NO: 1082140 - DNA, 15 bp, Homo sapiens
tgttgaaaaggagtg

SEQ ID NO: 1082141 - DNA, 15 bp, Homo sapiens
atgttgaaaaggagt

SEQ ID NO: 1082142 - DNA, 15 bp, Homo sapiens
tatgttgaaaaggag

SEQ ID NO: 1082143 - DNA, 15 bp, Homo sapiens
ctatgttgaaaagga

SEQ ID NO: 1082144 - DNA, 15 bp, Homo sapiens
actatgttgaaaagg

SEQ ID NO: 1082145 - DNA, 15 bp, Homo sapiens
cactatgttgaaaag

SEQ ID NO: 1082146 - DNA, 15 bp, Homo sapiens
acactatgttgaaaa

SEQ ID NO: 1082147 - DNA, 15 bp, Homo sapiens
aacactatgttgaaa

SEQ ID NO: 1082148 - DNA, 15 bp, Homo sapiens
caacactatgttgaa

SEQ ID NO: 1082149 - DNA, 15 bp, Homo sapiens
ccaacactatgttga

SEQ ID NO: 1082150 - DNA, 15 bp, Homo sapiens
tccaacactatgttg

SEQ ID NO: 1082151 - DNA, 15 bp, Homo sapiens
ttccaacactatgtt

SEQ ID NO: 1082152 - DNA, 15 bp, Homo sapiens
cttccaacactatgt

SEQ ID NO: 1082153 - DNA, 15 bp, Homo sapiens
acttccaacactatg

SEQ ID NO: 1082154 - DNA, 15 bp, Homo sapiens
aacttccaacactat

SEQ ID NO: 1082155 - DNA, 15 bp, Homo sapiens
gaacttccaacacta

SEQ ID NO: 1082156 - DNA, 15 bp, Homo sapiens
agaacttccaacact

SEQ ID NO: 1082157 - DNA, 15 bp, Homo sapiens
cagaacttccaacac

SEQ ID NO: 1082158 - DNA, 15 bp, Homo sapiens
ccagaacttccaaca

SEQ ID NO: 1082159 - DNA, 15 bp, Homo sapiens
gccagaacttccaac

SEQ ID NO: 1082160 - DNA, 15 bp, Homo sapiens
ggccagaacttccaa

SEQ ID NO: 1082161 - DNA, 15 bp, Homo sapiens
tggccagaacttcca

SEQ ID NO: 1082162 - DNA, 15 bp, Homo sapiens
ctggccagaacttcc

SEQ ID NO: 1082163 - DNA, 15 bp, Homo sapiens
cctggccagaacttc

SEQ ID NO: 1082164 - DNA, 15 bp, Homo sapiens
ccctggccagaactt

SEQ ID NO: 1082165 - DNA, 15 bp, Homo sapiens
gccctggccagaact

SEQ ID NO: 1082166 - DNA, 15 bp, Homo sapiens
tgccctggccagaac

SEQ ID NO: 1082167 - DNA, 15 bp, Homo sapiens
ttgccctggccagaa

SEQ ID NO: 1082168 - DNA, 15 bp, Homo sapiens
attgccctggccaga

SEQ ID NO: 1082169 - DNA, 15 bp, Homo sapiens
gattgccctggccag

SEQ ID NO: 1082170 - DNA, 15 bp, Homo sapiens
tgattgccctggcca

SEQ ID NO: 1082171 - DNA, 15 bp, Homo sapiens
ctgattgccctggcc

SEQ ID NO: 1082172 - DNA, 15 bp, Homo sapiens
cctgattgccctggc

SEQ ID NO: 1082173 - DNA, 15 bp, Homo sapiens
acctgattgccctgg

SEQ ID NO: 1082174 - DNA, 15 bp, Homo sapiens
tacctgattgccctg

SEQ ID NO: 1082175 - DNA, 15 bp, Homo sapiens
ctacctgattgccct

SEQ ID NO: 1082176 - DNA, 15 bp, Homo sapiens
cctacctgattgccc

SEQ ID NO: 1082177 - DNA, 15 bp, Homo sapiens
tcctacctgattgcc

SEQ ID NO: 1082178 - DNA, 15 bp, Homo sapiens
ctcctacctgattgc

SEQ ID NO: 1082179 - DNA, 15 bp, Homo sapiens
tctcctacctgattg

SEQ ID NO: 1082180 - DNA, 15 bp, Homo sapiens
ttctcctacctgatt

SEQ ID NO: 1082181 - DNA, 15 bp, Homo sapiens
cttctcctacctgat

SEQ ID NO: 1082182 - DNA, 15 bp, Homo sapiens
ccttctcctacctga

SEQ ID NO: 1082183 - DNA, 15 bp, Homo sapiens
tccttctcctacctg

SEQ ID NO: 1082184 - DNA, 15 bp, Homo sapiens
ttccttctcctacct

SEQ ID NO: 1082185 - DNA, 15 bp, Homo sapiens
tttccttctcctacc

SEQ ID NO: 1082186 - DNA, 15 bp, Homo sapiens
atttccttctcctac

SEQ ID NO: 1082187 - DNA, 15 bp, Homo sapiens
tatttccttctccta

SEQ ID NO: 1082188 - DNA, 15 bp, Homo sapiens
ttatttccttctcct

SEQ ID NO: 1082189 - DNA, 15 bp, Homo sapiens
tttatttccttctcc

SEQ ID NO: 1082190 - DNA, 15 bp, Homo sapiens
ctttatttccttctc

SEQ ID NO: 1082191 - DNA, 15 bp, Homo sapiens
cctttatttccttct

SEQ ID NO: 1082192 - DNA, 15 bp, Homo sapiens
ccctttatttccttc

SEQ ID NO: 1082193 - DNA, 15 bp, Homo sapiens
accctttatttcctt

SEQ ID NO: 1082194 - DNA, 15 bp, Homo sapiens
taccctttatttcct

SEQ ID NO: 1082195 - DNA, 15 bp, Homo sapiens
ataccctttatttcc

SEQ ID NO: 1082196 - DNA, 15 bp, Homo sapiens
aataccctttatttc

SEQ ID NO: 1082197 - DNA, 15 bp, Homo sapiens
gaataccctttattt

SEQ ID NO: 1082198 - DNA, 15 bp, Homo sapiens
tgaataccctttatt

SEQ ID NO: 1082199 - DNA, 15 bp, Homo sapiens
ttgaataccctttat

SEQ ID NO: 1082200 - DNA, 15 bp, Homo sapiens
attgaatacccttta

SEQ ID NO: 1082201 - DNA, 15 bp, Homo sapiens
aattgaatacccttt

SEQ ID NO: 1082202 - DNA, 15 bp, Homo sapiens
taattgaataccctt

SEQ ID NO: 1082203 - DNA, 15 bp, Homo sapiens
ttaattgaataccct

SEQ ID NO: 1082204 - DNA, 15 bp, Homo sapiens
cttaattgaataccc

SEQ ID NO: 1082205 - DNA, 15 bp, Homo sapiens
tcttaattgaatacc

SEQ ID NO: 1082206 - DNA, 15 bp, Homo sapiens
ttcttaattgaatac

SEQ ID NO: 1082207 - DNA, 15 bp, Homo sapiens
tttcttaattgaata

SEQ ID NO: 1082208 - DNA, 15 bp, Homo sapiens
ttttcttaattgaat

SEQ ID NO: 1082209 - DNA, 15 bp, Homo sapiens
cttttcttaattgaa

SEQ ID NO: 1082210 - DNA, 15 bp, Homo sapiens
tcttttcttaattga

SEQ ID NO: 1082211 - DNA, 15 bp, Homo sapiens
ctcttttcttaattg

SEQ ID NO: 1082212 - DNA, 15 bp, Homo sapiens
cctcttttcttaatt

SEQ ID NO: 1082213 - DNA, 15 bp, Homo sapiens
tcctcttttcttaat

SEQ ID NO: 1082214 - DNA, 15 bp, Homo sapiens
ttcctcttttcttaa

SEQ ID NO: 1082215 - DNA, 15 bp, Homo sapiens
cttcctcttttctta

SEQ ID NO: 1082216 - DNA, 15 bp, Homo sapiens
acttcctcttttctt

SEQ ID NO: 1082217 - DNA, 15 bp, Homo sapiens
gacttcctcttttct

SEQ ID NO: 1082218 - DNA, 15 bp, Homo sapiens
tgacttcctcttttc

SEQ ID NO: 1082219 - DNA, 15 bp, Homo sapiens
ttgacttcctctttt

SEQ ID NO: 1082220 - DNA, 15 bp, Homo sapiens
tttgacttcctcttt

SEQ ID NO: 1082221 - DNA, 15 bp, Homo sapiens
atttgacttcctctt

SEQ ID NO: 1082222 - DNA, 15 bp, Homo sapiens
aatttgacttcctct

SEQ ID NO: 1082223 - DNA, 15 bp, Homo sapiens
caatttgacttcctc

SEQ ID NO: 1082224 - DNA, 15 bp, Homo sapiens
acaatttgacttcct

SEQ ID NO: 1082225 - DNA, 15 bp, Homo sapiens
gacaatttgacttcc

SEQ ID NO: 1082226 - DNA, 15 bp, Homo sapiens
ggacaatttgacttc

SEQ ID NO: 1082227 - DNA, 15 bp, Homo sapiens
gggacaatttgactt

SEQ ID NO: 1082228 - DNA, 15 bp, Homo sapiens
agggacaatttgact

SEQ ID NO: 1082229 - DNA, 15 bp, Homo sapiens
cagggacaatttgac

SEQ ID NO: 1082230 - DNA, 15 bp, Homo sapiens
acagggacaatttga

SEQ ID NO: 1082231 - DNA, 15 bp, Homo sapiens
aacagggacaatttg

SEQ ID NO: 1082232 - DNA, 15 bp, Homo sapiens
aaacagggacaattt

SEQ ID NO: 1082233 - DNA, 15 bp, Homo sapiens
caaacagggacaatt

SEQ ID NO: 1082234 - DNA, 15 bp, Homo sapiens
gcaaacagggacaat

SEQ ID NO: 1082235 - DNA, 15 bp, Homo sapiens
tgcaaacagggacaa

SEQ ID NO: 1082236 - DNA, 15 bp, Homo sapiens
ctgcaaacagggaca

SEQ ID NO: 1082237 - DNA, 15 bp, Homo sapiens
tctgcaaacagggac

SEQ ID NO: 1082238 - DNA, 15 bp, Homo sapiens
atctgcaaacaggga

SEQ ID NO: 1082239 - DNA, 15 bp, Homo sapiens
catctgcaaacaggg

SEQ ID NO: 1082240 - DNA, 15 bp, Homo sapiens
tcatctgcaaacagg

SEQ ID NO: 1082241 - DNA, 15 bp, Homo sapiens
gtcatctgcaaacag

SEQ ID NO: 1082242 - DNA, 15 bp, Homo sapiens
tgtcatctgcaaaca

SEQ ID NO: 1082243 - DNA, 15 bp, Homo sapiens
atgtcatctgcaaac

SEQ ID NO: 1082244 - DNA, 15 bp, Homo sapiens
catgtcatctgcaaa

SEQ ID NO: 1082245 - DNA, 15 bp, Homo sapiens
tcatgtcatctgcaa

SEQ ID NO: 1082246 - DNA, 15 bp, Homo sapiens
atcatgtcatctgca

SEQ ID NO: 1082247 - DNA, 15 bp, Homo sapiens
aatcatgtcatctgc

SEQ ID NO: 1082248 - DNA, 15 bp, Homo sapiens
caatcatgtcatctg

SEQ ID NO: 1082249 - DNA, 15 bp, Homo sapiens
acaatcatgtcatct

SEQ ID NO: 1082250 - DNA, 15 bp, Homo sapiens
tacaatcatgtcatc

SEQ ID NO: 1082251 - DNA, 15 bp, Homo sapiens
atacaatcatgtcat

SEQ ID NO: 1082252 - DNA, 15 bp, Homo sapiens
tatacaatcatgtca

SEQ ID NO: 1082253 - DNA, 15 bp, Homo sapiens
atatacaatcatgtc

SEQ ID NO: 1082254 - DNA, 15 bp, Homo sapiens
gatatacaatcatgt

SEQ ID NO: 1082255 - DNA, 15 bp, Homo sapiens
agatatacaatcatg

SEQ ID NO: 1082256 - DNA, 15 bp, Homo sapiens
tagatatacaatcat

SEQ ID NO: 1082257 - DNA, 15 bp, Homo sapiens
ctagatatacaatca

SEQ ID NO: 1082258 - DNA, 15 bp, Homo sapiens
tctagatatacaatc

SEQ ID NO: 1082259 - DNA, 15 bp, Homo sapiens
ttctagatatacaat

SEQ ID NO: 1082260 - DNA, 15 bp, Homo sapiens
tttctagatatacaa

SEQ ID NO: 1082261 - DNA, 15 bp, Homo sapiens
ttttctagatataca

SEQ ID NO: 1082262 - DNA, 15 bp, Homo sapiens
gttttctagatatac

SEQ ID NO: 1082263 - DNA, 15 bp, Homo sapiens
ggttttctagatata

SEQ ID NO: 1082264 - DNA, 15 bp, Homo sapiens
gggttttctagatat

SEQ ID NO: 1082265 - DNA, 15 bp, Homo sapiens
ggggttttctagata

SEQ ID NO: 1082266 - DNA, 15 bp, Homo sapiens
tggggttttctagat

SEQ ID NO: 1082267 - DNA, 15 bp, Homo sapiens
atggggttttctaga

SEQ ID NO: 1082268 - DNA, 15 bp, Homo sapiens
gatggggttttctag

SEQ ID NO: 1082269 - DNA, 15 bp, Homo sapiens
cgatggggttttcta

SEQ ID NO: 1082270 - DNA, 15 bp, Homo sapiens
acgatggggttttct

SEQ ID NO: 1082271 - DNA, 15 bp, Homo sapiens
gacgatggggttttc

SEQ ID NO: 1082272 - DNA, 15 bp, Homo sapiens
agacgatggggtttt

SEQ ID NO: 1082273 - DNA, 15 bp, Homo sapiens
gagacgatggggttt

SEQ ID NO: 1082274 - DNA, 15 bp, Homo sapiens
tgagacgatggggtt

SEQ ID NO: 1082275 - DNA, 15 bp, Homo sapiens
ctgagacgatggggt

SEQ ID NO: 1082276 - DNA, 15 bp, Homo sapiens
gctgagacgatgggg

SEQ ID NO: 1082277 - DNA, 15 bp, Homo sapiens
ggctgagacgatggg

SEQ ID NO: 1082278 - DNA, 15 bp, Homo sapiens
gggctgagacgatgg

SEQ ID NO: 1082279 - DNA, 15 bp, Homo sapiens
tgggctgagacgatg

SEQ ID NO: 1082280 - DNA, 15 bp, Homo sapiens
ttgggctgagacgat

SEQ ID NO: 1082281 - DNA, 15 bp, Homo sapiens
tttgggctgagacga

SEQ ID NO: 1082282 - DNA, 15 bp, Homo sapiens
ttttgggctgagacg

SEQ ID NO: 1082283 - DNA, 15 bp, Homo sapiens
attttgggctgagac

SEQ ID NO: 1082284 - DNA, 15 bp, Homo sapiens
gattttgggctgaga

SEQ ID NO: 1082285 - DNA, 15 bp, Homo sapiens
agattttgggctgag

SEQ ID NO: 1082286 - DNA, 15 bp, Homo sapiens
gagattttgggctga

SEQ ID NO: 1082287 - DNA, 15 bp, Homo sapiens
ggagattttgggctg

SEQ ID NO: 1082288 - DNA, 15 bp, Homo sapiens
aggagattttgggct

SEQ ID NO: 1082289 - DNA, 15 bp, Homo sapiens
aaggagattttgggc

SEQ ID NO: 1082290 - DNA, 15 bp, Homo sapiens
taaggagattttggg

SEQ ID NO: 1082291 - DNA, 15 bp, Homo sapiens
ttaaggagattttgg

SEQ ID NO: 1082292 - DNA, 15 bp, Homo sapiens
cttaaggagattttg

SEQ ID NO: 1082293 - DNA, 15 bp, Homo sapiens
gcttaaggagatttt

SEQ ID NO: 1082294 - DNA, 15 bp, Homo sapiens
agcttaaggagattt

SEQ ID NO: 1082295 - DNA, 15 bp, Homo sapiens
cagcttaaggagatt

SEQ ID NO: 1082296 - DNA, 15 bp, Homo sapiens
tcagcttaaggagat

SEQ ID NO: 1082297 - DNA, 15 bp, Homo sapiens
atcagcttaaggaga

SEQ ID NO: 1082298 - DNA, 15 bp, Homo sapiens
tatcagcttaaggag

SEQ ID NO: 1082299 - DNA, 15 bp, Homo sapiens
ttatcagcttaagga

SEQ ID NO: 1082300 - DNA, 15 bp, Homo sapiens
cttatcagcttaagg

SEQ ID NO: 1082301 - DNA, 15 bp, Homo sapiens
gcttatcagcttaag

SEQ ID NO: 1082302 - DNA, 15 bp, Homo sapiens
tgcttatcagcttaa

SEQ ID NO: 1082303 - DNA, 15 bp, Homo sapiens
gttgcttatcagctt

SEQ ID NO: 1082304 - DNA, 15 bp, Homo sapiens
agttgcttatcagct

SEQ ID NO: 1082305 - DNA, 15 bp, Homo sapiens
aagttgcttatcagc

SEQ ID NO: 1082306 - DNA, 15 bp, Homo sapiens
gaagttgcttatcag

SEQ ID NO: 1082307 - DNA, 15 bp, Homo sapiens
tgaagttgcttatca

SEQ ID NO: 1082308 - DNA, 15 bp, Homo sapiens
ctgaagttgcttatc

SEQ ID NO: 1082309 - DNA, 15 bp, Homo sapiens
gctgaagttgcttat

SEQ ID NO: 1082310 - DNA, 15 bp, Homo sapiens
tgctgaagttgctta

SEQ ID NO: 1082311 - DNA, 15 bp, Homo sapiens
ttgctgaagttgctt

SEQ ID NO: 1082312 - DNA, 15 bp, Homo sapiens
tttgctgaagttgct

SEQ ID NO: 1082313 - DNA, 15 bp, Homo sapiens
ctttgctgaagttgc

SEQ ID NO: 1082314 - DNA, 15 bp, Homo sapiens
actttgctgaagttg

SEQ ID NO: 1082315 - DNA, 15 bp, Homo sapiens
gactttgctgaagtt

SEQ ID NO: 1082316 - DNA, 15 bp, Homo sapiens
agactttgctgaagt

SEQ ID NO: 1082317 - DNA, 15 bp, Homo sapiens
gagactttgctgaag

SEQ ID NO: 1082318 - DNA, 15 bp, Homo sapiens
tgagactttgctgaa

SEQ ID NO: 1082319 - DNA, 15 bp, Homo sapiens
ctgagactttgctga

SEQ ID NO: 1082320 - DNA, 15 bp, Homo sapiens
cctgagactttgctg

SEQ ID NO: 1082321 - DNA, 15 bp, Homo sapiens
tcctgagactttgct

SEQ ID NO: 1082322 - DNA, 15 bp, Homo sapiens
atcctgagactttgc

SEQ ID NO: 1082323 - DNA, 15 bp, Homo sapiens
tatcctgagactttg

SEQ ID NO: 1082324 - DNA, 15 bp, Homo sapiens
gtatcctgagacttt

SEQ ID NO: 1082325 - DNA, 15 bp, Homo sapiens
tgtatcctgagactt

SEQ ID NO: 1082326 - DNA, 15 bp, Homo sapiens
ttgtatcctgagact

SEQ ID NO: 1082327 - DNA, 15 bp, Homo sapiens
tttgtatcctgagac

SEQ ID NO: 1082328 - DNA, 15 bp, Homo sapiens
ttttgtatcctgaga

SEQ ID NO: 1082329 - DNA, 15 bp, Homo sapiens
attttgtatcctgag

SEQ ID NO: 1082330 - DNA, 15 bp, Homo sapiens
gattttgtatcctga

SEQ ID NO: 1082331 - DNA, 15 bp, Homo sapiens
tgattttgtatcctg

SEQ ID NO: 1082332 - DNA, 15 bp, Homo sapiens
ttgattttgtatcct

SEQ ID NO: 1082333 - DNA, 15 bp, Homo sapiens
attgattttgtatcc

SEQ ID NO: 1082334 - DNA, 15 bp, Homo sapiens
cattgattttgtatc

SEQ ID NO: 1082335 - DNA, 15 bp, Homo sapiens
acattgattttgtat

SEQ ID NO: 1082336 - DNA, 15 bp, Homo sapiens
cacattgattttgta

SEQ ID NO: 1082337 - DNA, 15 bp, Homo sapiens
gcacattgattttgt

SEQ ID NO: 1082338 - DNA, 15 bp, Homo sapiens
tgcacattgattttg

SEQ ID NO: 1082339 - DNA, 15 bp, Homo sapiens
ttgcacattgatttt

SEQ ID NO: 1082340 - DNA, 15 bp, Homo sapiens
tttgcacattgattt

SEQ ID NO: 1082341 - DNA, 15 bp, Homo sapiens
ttttgcacattgatt

SEQ ID NO: 1082342 - DNA, 15 bp, Homo sapiens
tttttgcacattgat

SEQ ID NO: 1082343 - DNA, 15 bp, Homo sapiens
atttttgcacattga

SEQ ID NO: 1082344 - DNA, 15 bp, Homo sapiens
gatttttgcacattg

SEQ ID NO: 1082345 - DNA, 15 bp, Homo sapiens
tgatttttgcacatt

SEQ ID NO: 1082346 - DNA, 15 bp, Homo sapiens
gtgatttttgcacat

SEQ ID NO: 1082347 - DNA, 15 bp, Homo sapiens
tgtgatttttgcaca

SEQ ID NO: 1082348 - DNA, 15 bp, Homo sapiens
ttgtgatttttgcac

SEQ ID NO: 1082349 - DNA, 15 bp, Homo sapiens
cttgtgatttttgca

SEQ ID NO: 1082350 - DNA, 15 bp, Homo sapiens
gcttgtgatttttgc

SEQ ID NO: 1082351 - DNA, 15 bp, Homo sapiens
tgcttgtgatttttg

SEQ ID NO: 1082352 - DNA, 15 bp, Homo sapiens
ctgcttgtgattttt

SEQ ID NO: 1082353 - DNA, 15 bp, Homo sapiens
actgcttgtgatttt

SEQ ID NO: 1082354 - DNA, 15 bp, Homo sapiens
gactgcttgtgattt

SEQ ID NO: 1082355 - DNA, 15 bp, Homo sapiens
agactgcttgtgatt

SEQ ID NO: 1082356 - DNA, 15 bp, Homo sapiens
aagactgcttgtgat

SEQ ID NO: 1082357 - DNA, 15 bp, Homo sapiens
taagactgcttgtga

SEQ ID NO: 1082358 - DNA, 15 bp, Homo sapiens
ataagactgcttgtg

SEQ ID NO: 1082359 - DNA, 15 bp, Homo sapiens
tataagactgcttgt

SEQ ID NO: 1082360 - DNA, 15 bp, Homo sapiens
gtataagactgcttg

SEQ ID NO: 1082361 - DNA, 15 bp, Homo sapiens
tgtataagactgctt

SEQ ID NO: 1082362 - DNA, 15 bp, Homo sapiens
gtgtataagactgct

SEQ ID NO: 1082363 - DNA, 15 bp, Homo sapiens
ggtgtataagactgc

SEQ ID NO: 1082364 - DNA, 15 bp, Homo sapiens
tggtgtataagactg

SEQ ID NO: 1082365 - DNA, 15 bp, Homo sapiens
ttggtgtataagact

SEQ ID NO: 1082366 - DNA, 15 bp, Homo sapiens
attggtgtataagac

SEQ ID NO: 1082367 - DNA, 15 bp, Homo sapiens
tattggtgtataaga

SEQ ID NO: 1082368 - DNA, 15 bp, Homo sapiens
ttattggtgtataag

SEQ ID NO: 1082369 - DNA, 15 bp, Homo sapiens
gttattggtgtataa

SEQ ID NO: 1082370 - DNA, 15 bp, Homo sapiens
tgttattggtgtata

SEQ ID NO: 1082371 - DNA, 15 bp, Homo sapiens
ctgttattggtgtat

SEQ ID NO: 1082372 - DNA, 15 bp, Homo sapiens
tctgttattggtgta

SEQ ID NO: 1082373 - DNA, 15 bp, Homo sapiens
gtctgttattggtgt

SEQ ID NO: 1082374 - DNA, 15 bp, Homo sapiens
tgtctgttattggtg

SEQ ID NO: 1082375 - DNA, 15 bp, Homo sapiens
ctgtctgttattggt

SEQ ID NO: 1082376 - DNA, 15 bp, Homo sapiens
tctgtctgttattgg

SEQ ID NO: 1082377 - DNA, 15 bp, Homo sapiens
ctctgtctgttattg

SEQ ID NO: 1082378 - DNA, 15 bp, Homo sapiens
tctctgtctgttatt

SEQ ID NO: 1082379 - DNA, 15 bp, Homo sapiens
ctctctgtctgttat

SEQ ID NO: 1082380 - DNA, 15 bp, Homo sapiens
gctctctgtctgtta

SEQ ID NO: 1082381 - DNA, 15 bp, Homo sapiens
ggctctctgtctgtt

SEQ ID NO: 1082382 - DNA, 15 bp, Homo sapiens
tggctctctgtctgt

SEQ ID NO: 1082383 - DNA, 15 bp, Homo sapiens
ttggctctctgtctg

SEQ ID NO: 1082384 - DNA, 15 bp, Homo sapiens
tttggctctctgtct

SEQ ID NO: 1082385 - DNA, 15 bp, Homo sapiens
atttggctctctgtc

SEQ ID NO: 1082386 - DNA, 15 bp, Homo sapiens
gatttggctctctgt

SEQ ID NO: 1082387 - DNA, 15 bp, Homo sapiens
tgatttggctctctg

SEQ ID NO: 1082388 - DNA, 15 bp, Homo sapiens
atgatttggctctct

SEQ ID NO: 1082389 - DNA, 15 bp, Homo sapiens
catgatttggctctc

SEQ ID NO: 1082390 - DNA, 15 bp, Homo sapiens
tcatgatttggctct

SEQ ID NO: 1082391 - DNA, 15 bp, Homo sapiens
ctcatgatttggctc

SEQ ID NO: 1082392 - DNA, 15 bp, Homo sapiens
actcatgatttggct

SEQ ID NO: 1082393 - DNA, 15 bp, Homo sapiens
cactcatgatttggc

SEQ ID NO: 1082394 - DNA, 15 bp, Homo sapiens
tcactcatgatttgg

SEQ ID NO: 1082395 - DNA, 15 bp, Homo sapiens
ttcactcatgatttg

SEQ ID NO: 1082396 - DNA, 15 bp, Homo sapiens
gttcactcatgattt

SEQ ID NO: 1082397 - DNA, 15 bp, Homo sapiens
agttcactcatgatt

SEQ ID NO: 1082398 - DNA, 15 bp, Homo sapiens
gagttcactcatgat

SEQ ID NO: 1082399 - DNA, 15 bp, Homo sapiens
ggagttcactcatga

SEQ ID NO: 1082400 - DNA, 15 bp, Homo sapiens
gggagttcactcatg

SEQ ID NO: 1082401 - DNA, 15 bp, Homo sapiens
tgggagttcactcat

SEQ ID NO: 1082402 - DNA, 15 bp, Homo sapiens
atgggagttcactca

SEQ ID NO: 1082403 - DNA, 15 bp, Homo sapiens
aatgggagttcactc

SEQ ID NO: 1082404 - DNA, 15 bp, Homo sapiens
gaatgggagttcact

SEQ ID NO: 1082405 - DNA, 15 bp, Homo sapiens
tgaatgggagttcac

SEQ ID NO: 1082406 - DNA, 15 bp, Homo sapiens
gtgaatgggagttca

SEQ ID NO: 1082407 - DNA, 15 bp, Homo sapiens
tgtgaatgggagttc

SEQ ID NO: 1082408 - DNA, 15 bp, Homo sapiens
ttgtgaatgggagtt

SEQ ID NO: 1082409 - DNA, 15 bp, Homo sapiens
attgtgaatgggagt

SEQ ID NO: 1082410 - DNA, 15 bp, Homo sapiens
aattgtgaatgggag

SEQ ID NO: 1082411 - DNA, 15 bp, Homo sapiens
caattgtgaatggga

SEQ ID NO: 1082412 - DNA, 15 bp, Homo sapiens
gcaattgtgaatggg

SEQ ID NO: 1082413 - DNA, 15 bp, Homo sapiens
agcaattgtgaatgg

SEQ ID NO: 1082414 - DNA, 15 bp, Homo sapiens
aagcaattgtgaatg

SEQ ID NO: 1082415 - DNA, 15 bp, Homo sapiens
gaagcaattgtgaat

SEQ ID NO: 1082416 - DNA, 15 bp, Homo sapiens
tgaagcaattgtgaa

SEQ ID NO: 1082417 - DNA, 15 bp, Homo sapiens
ttgaagcaattgtga

SEQ ID NO: 1082418 - DNA, 15 bp, Homo sapiens
tttgaagcaattgtg

SEQ ID NO: 1082419 - DNA, 15 bp, Homo sapiens
ctttgaagcaattgt

SEQ ID NO: 1082420 - DNA, 15 bp, Homo sapiens
tctttgaagcaattg

SEQ ID NO: 1082421 - DNA, 15 bp, Homo sapiens
ctctttgaagcaatt

SEQ ID NO: 1082422 - DNA, 15 bp, Homo sapiens
tctctttgaagcaat

SEQ ID NO: 1082423 - DNA, 15 bp, Homo sapiens
ttctctttgaagcaa

SEQ ID NO: 1082424 - DNA, 15 bp, Homo sapiens
attctctttgaagca

SEQ ID NO: 1082425 - DNA, 15 bp, Homo sapiens
tattctctttgaagc

SEQ ID NO: 1082426 - DNA, 15 bp, Homo sapiens
ttattctctttgaag

SEQ ID NO: 1082427 - DNA, 15 bp, Homo sapiens
tttattctctttgaa

SEQ ID NO: 1082428 - DNA, 15 bp, Homo sapiens
ttttattctctttga

SEQ ID NO: 1082429 - DNA, 15 bp, Homo sapiens
attttattctctttg

SEQ ID NO: 1082430 - DNA, 15 bp, Homo sapiens
tattttattctcttt

SEQ ID NO: 1082431 - DNA, 15 bp, Homo sapiens
gtattttattctctt

SEQ ID NO: 1082432 - DNA, 15 bp, Homo sapiens
ggtattttattctct

SEQ ID NO: 1082433 - DNA, 15 bp, Homo sapiens
aggtattttattctc

SEQ ID NO: 1082434 - DNA, 15 bp, Homo sapiens
taggtattttattct

SEQ ID NO: 1082435 - DNA, 15 bp, Homo sapiens
ctaggtattttattc

SEQ ID NO: 1082436 - DNA, 15 bp, Homo sapiens
cctaggtattttatt

SEQ ID NO: 1082437 - DNA, 15 bp, Homo sapiens
tcctaggtattttat

SEQ ID NO: 1082438 - DNA, 15 bp, Homo sapiens
ttcctaggtatttta

SEQ ID NO: 1082439 - DNA, 15 bp, Homo sapiens
attcctaggtatttt

SEQ ID NO: 1082440 - DNA, 15 bp, Homo sapiens
gattcctaggtattt

SEQ ID NO: 1082441 - DNA, 15 bp, Homo sapiens
ggattcctaggtatt

SEQ ID NO: 1082442 - DNA, 15 bp, Homo sapiens
tggattcctaggtat

SEQ ID NO: 1082443 - DNA, 15 bp, Homo sapiens
ttggattcctaggta

SEQ ID NO: 1082444 - DNA, 15 bp, Homo sapiens
gttggattcctaggt

SEQ ID NO: 1082445 - DNA, 15 bp, Homo sapiens
agttggattcctagg

SEQ ID NO: 1082446 - DNA, 15 bp, Homo sapiens
aagttggattcctag

SEQ ID NO: 1082447 - DNA, 15 bp, Homo sapiens
taagttggattccta

SEQ ID NO: 1082448 - DNA, 15 bp, Homo sapiens
gtaagttggattcct

SEQ ID NO: 1082449 - DNA, 15 bp, Homo sapiens
tgtaagttggattcc

SEQ ID NO: 1082450 - DNA, 15 bp, Homo sapiens
ttgtaagttggattc

SEQ ID NO: 1082451 - DNA, 15 bp, Homo sapiens
cttgtaagttggatt

SEQ ID NO: 1082452 - DNA, 15 bp, Homo sapiens
ccttgtaagttggat

SEQ ID NO: 1082453 - DNA, 15 bp, Homo sapiens
cccttgtaagttgga

SEQ ID NO: 1082454 - DNA, 15 bp, Homo sapiens
tcccttgtaagttgg

SEQ ID NO: 1082455 - DNA, 15 bp, Homo sapiens
atcccttgtaagttg

SEQ ID NO: 1082456 - DNA, 15 bp, Homo sapiens
catcccttgtaagtt

SEQ ID NO: 1082457 - DNA, 15 bp, Homo sapiens
acatcccttgtaagt

SEQ ID NO: 1082458 - DNA, 15 bp, Homo sapiens
cacatcccttgtaag

SEQ ID NO: 1082459 - DNA, 15 bp, Homo sapiens
tcacatcccttgtaa

SEQ ID NO: 1082460 - DNA, 15 bp, Homo sapiens
ttcacatcccttgta

SEQ ID NO: 1082461 - DNA, 15 bp, Homo sapiens
cttcacatcccttgt

SEQ ID NO: 1082462 - DNA, 15 bp, Homo sapiens
ccttcacatcccttg

SEQ ID NO: 1082463 - DNA, 15 bp, Homo sapiens
tccttcacatccctt

SEQ ID NO: 1082464 - DNA, 15 bp, Homo sapiens
gtccttcacatccct

SEQ ID NO: 1082465 - DNA, 15 bp, Homo sapiens
ggtccttcacatccc

SEQ ID NO: 1082466 - DNA, 15 bp, Homo sapiens
aggtccttcacatcc

SEQ ID NO: 1082467 - DNA, 15 bp, Homo sapiens
gaggtccttcacatc

SEQ ID NO: 1082468 - DNA, 15 bp, Homo sapiens
agaggtccttcacat

SEQ ID NO: 1082469 - DNA, 15 bp, Homo sapiens
aagaggtccttcaca

SEQ ID NO: 1082470 - DNA, 15 bp, Homo sapiens
gaagaggtccttcac

SEQ ID NO: 1082471 - DNA, 15 bp, Homo sapiens
tgaagaggtccttca

SEQ ID NO: 1082472 - DNA, 15 bp, Homo sapiens
ttgaagaggtccttc

SEQ ID NO: 1082473 - DNA, 15 bp, Homo sapiens
cttgaagaggtcctt

SEQ ID NO: 1082474 - DNA, 15 bp, Homo sapiens
ccttgaagaggtcct

SEQ ID NO: 1082475 - DNA, 15 bp, Homo sapiens
tccttgaagaggtcc

SEQ ID NO: 1082476 - DNA, 15 bp, Homo sapiens
ctccttgaagaggtc

SEQ ID NO: 1082477 - DNA, 15 bp, Homo sapiens
tctccttgaagaggt

SEQ ID NO: 1082478 - DNA, 15 bp, Homo sapiens
ttctccttgaagagg

SEQ ID NO: 1082479 - DNA, 15 bp, Homo sapiens
gttctccttgaagag

SEQ ID NO: 1082480 - DNA, 15 bp, Homo sapiens
agttctccttgaaga

SEQ ID NO: 1082481 - DNA, 15 bp, Homo sapiens
tagttctccttgaag

SEQ ID NO: 1082482 - DNA, 15 bp, Homo sapiens
gtagttctccttgaa

SEQ ID NO: 1082483 - DNA, 15 bp, Homo sapiens
tgtagttctccttga

SEQ ID NO: 1082484 - DNA, 15 bp, Homo sapiens
ttgtagttctccttg

SEQ ID NO: 1082485 - DNA, 15 bp, Homo sapiens
tttgtagttctcctt

SEQ ID NO: 1082486 - DNA, 15 bp, Homo sapiens
gtttgtagttctcct

SEQ ID NO: 1082487 - DNA, 15 bp, Homo sapiens
cgtttgtagttctcc

SEQ ID NO: 1082488 - DNA, 15 bp, Homo sapiens
tcgtttgtagttctc

SEQ ID NO: 1082489 - DNA, 15 bp, Homo sapiens
gtcgtttgtagttct

SEQ ID NO: 1082490 - DNA, 15 bp, Homo sapiens
agtcgtttgtagttc

SEQ ID NO: 1082491 - DNA, 15 bp, Homo sapiens
cagtcgtttgtagtt

SEQ ID NO: 1082492 - DNA, 15 bp, Homo sapiens
gcagtcgtttgtagt

SEQ ID NO: 1082493 - DNA, 15 bp, Homo sapiens
agcagtcgtttgtag

SEQ ID NO: 1082494 - DNA, 15 bp, Homo sapiens
gagcagtcgtttgta

SEQ ID NO: 1082495 - DNA, 15 bp, Homo sapiens
tgagcagtcgtttgt

SEQ ID NO: 1082496 - DNA, 15 bp, Homo sapiens
ttgagcagtcgtttg

SEQ ID NO: 1082497 - DNA, 15 bp, Homo sapiens
attgagcagtcgttt

SEQ ID NO: 1082498 - DNA, 15 bp, Homo sapiens
cattgagcagtcgtt

SEQ ID NO: 1082499 - DNA, 15 bp, Homo sapiens
tcattgagcagtcgt

SEQ ID NO: 1082500 - DNA, 15 bp, Homo sapiens
ttcattgagcagtcg

SEQ ID NO: 1082501 - DNA, 15 bp, Homo sapiens
tttcattgagcagtc

SEQ ID NO: 1082502 - DNA, 15 bp, Homo sapiens
atttcattgagcagt

SEQ ID NO: 1082503 - DNA, 15 bp, Homo sapiens
tatttcattgagcag

SEQ ID NO: 1082504 - DNA, 15 bp, Homo sapiens
ttatttcattgagca

SEQ ID NO: 1082505 - DNA, 15 bp, Homo sapiens
tttatttcattgagc

SEQ ID NO: 1082506 - DNA, 15 bp, Homo sapiens
ttttatttcattgag

SEQ ID NO: 1082507 - DNA, 15 bp, Homo sapiens
cttttatttcattga

SEQ ID NO: 1082508 - DNA, 15 bp, Homo sapiens
tcttttatttcattg

SEQ ID NO: 1082509 - DNA, 15 bp, Homo sapiens
ctcttttatttcatt

SEQ ID NO: 1082510 - DNA, 15 bp, Homo sapiens
cctcttttatttcat

SEQ ID NO: 1082511 - DNA, 15 bp, Homo sapiens
tcctcttttatttca

SEQ ID NO: 1082512 - DNA, 15 bp, Homo sapiens
atcctcttttatttc

SEQ ID NO: 1082513 - DNA, 15 bp, Homo sapiens
tatcctcttttattt

SEQ ID NO: 1082514 - DNA, 15 bp, Homo sapiens
gtatcctcttttatt

SEQ ID NO: 1082515 - DNA, 15 bp, Homo sapiens
tgtatcctcttttat

SEQ ID NO: 1082516 - DNA, 15 bp, Homo sapiens
ttgtatcctctttta

SEQ ID NO: 1082517 - DNA, 15 bp, Homo sapiens
tttgtatcctctttt

SEQ ID NO: 1082518 - DNA, 15 bp, Homo sapiens
gtttgtatcctcttt

SEQ ID NO: 1082519 - DNA, 15 bp, Homo sapiens
tgtttgtatcctctt

SEQ ID NO: 1082520 - DNA, 15 bp, Homo sapiens
ttgtttgtatcctct

SEQ ID NO: 1082521 - DNA, 15 bp, Homo sapiens
tttgtttgtatcctc

SEQ ID NO: 1082522 - DNA, 15 bp, Homo sapiens
atttgtttgtatcct

SEQ ID NO: 1082523 - DNA, 15 bp, Homo sapiens
catttgtttgtatcc

SEQ ID NO: 1082524 - DNA, 15 bp, Homo sapiens
ccatttgtttgtatc

SEQ ID NO: 1082525 - DNA, 15 bp, Homo sapiens
tccatttgtttgtat

SEQ ID NO: 1082526 - DNA, 15 bp, Homo sapiens
ttccatttgtttgta

SEQ ID NO: 1082527 - DNA, 15 bp, Homo sapiens
cttccatttgtttgt

SEQ ID NO: 1082528 - DNA, 15 bp, Homo sapiens
tcttccatttgtttg

SEQ ID NO: 1082529 - DNA, 15 bp, Homo sapiens
ttcttccatttgttt

SEQ ID NO: 1082530 - DNA, 15 bp, Homo sapiens
gttcttccatttgtt

SEQ ID NO: 1082531 - DNA, 15 bp, Homo sapiens
tgttcttccatttgt

SEQ ID NO: 1082532 - DNA, 15 bp, Homo sapiens
atgttcttccatttg

SEQ ID NO: 1082533 - DNA, 15 bp, Homo sapiens
aatgttcttccattt

SEQ ID NO: 1082534 - DNA, 15 bp, Homo sapiens
gaatgttcttccatt

SEQ ID NO: 1082535 - DNA, 15 bp, Homo sapiens
ggaatgttcttccat

SEQ ID NO: 1082536 - DNA, 15 bp, Homo sapiens
tggaatgttcttcca

SEQ ID NO: 1082537 - DNA, 15 bp, Homo sapiens
atggaatgttcttcc

SEQ ID NO: 1082538 - DNA, 15 bp, Homo sapiens
catggaatgttcttc

SEQ ID NO: 1082539 - DNA, 15 bp, Homo sapiens
gcatggaatgttctt

SEQ ID NO: 1082540 - DNA, 15 bp, Homo sapiens
agcatggaatgttct

SEQ ID NO: 1082541 - DNA, 15 bp, Homo sapiens
gagcatggaatgttc

SEQ ID NO: 1082542 - DNA, 15 bp, Homo sapiens
tgagcatggaatgtt

SEQ ID NO: 1082543 - DNA, 15 bp, Homo sapiens
atgagcatggaatgt

SEQ ID NO: 1082544 - DNA, 15 bp, Homo sapiens
catgagcatggaatg

SEQ ID NO: 1082545 - DNA, 15 bp, Homo sapiens
ccatgagcatggaat

SEQ ID NO: 1082546 - DNA, 15 bp, Homo sapiens
cccatgagcatggaa

SEQ ID NO: 1082547 - DNA, 15 bp, Homo sapiens
acccatgagcatgga

SEQ ID NO: 1082548 - DNA, 15 bp, Homo sapiens
tacccatgagcatgg

SEQ ID NO: 1082549 - DNA, 15 bp, Homo sapiens
ctacccatgagcatg

SEQ ID NO: 1082550 - DNA, 15 bp, Homo sapiens
cctacccatgagcat

SEQ ID NO: 1082551 - DNA, 15 bp, Homo sapiens
tcctacccatgagca

SEQ ID NO: 1082552 - DNA, 15 bp, Homo sapiens
ttcctacccatgagc

SEQ ID NO: 1082553 - DNA, 15 bp, Homo sapiens
cttcctacccatgag

SEQ ID NO: 1082554 - DNA, 15 bp, Homo sapiens
tcttcctacccatga

SEQ ID NO: 1082555 - DNA, 15 bp, Homo sapiens
ttcttcctacccatg

SEQ ID NO: 1082556 - DNA, 15 bp, Homo sapiens
attcttcctacccat

SEQ ID NO: 1082557 - DNA, 15 bp, Homo sapiens
gattcttcctaccca

SEQ ID NO: 1082558 - DNA, 15 bp, Homo sapiens
tgattcttcctaccc

SEQ ID NO: 1082559 - DNA, 15 bp, Homo sapiens
ctgattcttcctacc

SEQ ID NO: 1082560 - DNA, 15 bp, Homo sapiens
actgattcttcctac

SEQ ID NO: 1082561 - DNA, 15 bp, Homo sapiens
tactgattcttccta

SEQ ID NO: 1082562 - DNA, 15 bp, Homo sapiens
atactgattcttcct

SEQ ID NO: 1082563 - DNA, 15 bp, Homo sapiens
gatactgattcttcc

SEQ ID NO: 1082564 - DNA, 15 bp, Homo sapiens
cgatactgattcttc

SEQ ID NO: 1082565 - DNA, 15 bp, Homo sapiens
acgatactgattctt

SEQ ID NO: 1082566 - DNA, 15 bp, Homo sapiens
cacgatactgattct

SEQ ID NO: 1082567 - DNA, 15 bp, Homo sapiens
tcacgatactgattc

SEQ ID NO: 1082568 - DNA, 15 bp, Homo sapiens
ttcacgatactgatt

SEQ ID NO: 1082569 - DNA, 15 bp, Homo sapiens
tttcacgatactgat

SEQ ID NO: 1082570 - DNA, 15 bp, Homo sapiens
ttttcacgatactga

SEQ ID NO: 1082571 - DNA, 15 bp, Homo sapiens
attttcacgatactg

SEQ ID NO: 1082572 - DNA, 15 bp, Homo sapiens
cattttcacgatact

SEQ ID NO: 1082573 - DNA, 15 bp, Homo sapiens
ccattttcacgatac

SEQ ID NO: 1082574 - DNA, 15 bp, Homo sapiens
gccattttcacgata

SEQ ID NO: 1082575 - DNA, 15 bp, Homo sapiens
ggccattttcacgat

SEQ ID NO: 1082576 - DNA, 15 bp, Homo sapiens
tggccattttcacga

SEQ ID NO: 1082577 - DNA, 15 bp, Homo sapiens
atggccattttcacg

SEQ ID NO: 1082578 - DNA, 15 bp, Homo sapiens
tatggccattttcac

SEQ ID NO: 1082579 - DNA, 15 bp, Homo sapiens
gtatggccattttca

SEQ ID NO: 1082580 - DNA, 15 bp, Homo sapiens
agtatggccattttc

SEQ ID NO: 1082581 - DNA, 15 bp, Homo sapiens
cagtatggccatttt

SEQ ID NO: 1082582 - DNA, 15 bp, Homo sapiens
gcagtatggccattt

SEQ ID NO: 1082583 - DNA, 15 bp, Homo sapiens
ggcagtatggccatt

SEQ ID NO: 1082584 - DNA, 15 bp, Homo sapiens
gggcagtatggccat

SEQ ID NO: 1082585 - DNA, 15 bp, Homo sapiens
tgggcagtatggcca

SEQ ID NO: 1082586 - DNA, 15 bp, Homo sapiens
ttgggcagtatggcc

SEQ ID NO: 1082587 - DNA, 15 bp, Homo sapiens
cttgggcagtatggc

SEQ ID NO: 1082588 - DNA, 15 bp, Homo sapiens
ccttgggcagtatgg

SEQ ID NO: 1082589 - DNA, 15 bp, Homo sapiens
accttgggcagtatg

SEQ ID NO: 1082590 - DNA, 15 bp, Homo sapiens
taccttgggcagtat

SEQ ID NO: 1082591 - DNA, 15 bp, Homo sapiens
ttaccttgggcagta

SEQ ID NO: 1082592 - DNA, 15 bp, Homo sapiens
attaccttgggcagt

SEQ ID NO: 1082593 - DNA, 15 bp, Homo sapiens
aattaccttgggcag

SEQ ID NO: 1082594 - DNA, 15 bp, Homo sapiens
aaattaccttgggca

SEQ ID NO: 1082595 - DNA, 15 bp, Homo sapiens
taaattaccttgggc

SEQ ID NO: 1082596 - DNA, 15 bp, Homo sapiens
ataaattaccttggg

SEQ ID NO: 1082597 - DNA, 15 bp, Homo sapiens
tataaattaccttgg

SEQ ID NO: 1082598 - DNA, 15 bp, Homo sapiens
ctataaattaccttg

SEQ ID NO: 1082599 - DNA, 15 bp, Homo sapiens
tctataaattacctt

SEQ ID NO: 1082600 - DNA, 15 bp, Homo sapiens
atctataaattacct

SEQ ID NO: 1082601 - DNA, 15 bp, Homo sapiens
aatctataaattacc

SEQ ID NO: 1082602 - DNA, 15 bp, Homo sapiens
gaatctataaattac

SEQ ID NO: 1082603 - DNA, 15 bp, Homo sapiens
tgaatctataaatta

SEQ ID NO: 1082604 - DNA, 15 bp, Homo sapiens
ttgaatctataaatt

SEQ ID NO: 1082605 - DNA, 15 bp, Homo sapiens
attgaatctataaat

SEQ ID NO: 1082606 - DNA, 15 bp, Homo sapiens
cattgaatctataaa

SEQ ID NO: 1082607 - DNA, 15 bp, Homo sapiens
gcattgaatctataa

SEQ ID NO: 1082608 - DNA, 15 bp, Homo sapiens
ggcattgaatctata

SEQ ID NO: 1082609 - DNA, 15 bp, Homo sapiens
tggcattgaatctat

SEQ ID NO: 1082610 - DNA, 15 bp, Homo sapiens
atggcattgaatcta

SEQ ID NO: 1082611 - DNA, 15 bp, Homo sapiens
gatggcattgaatct

SEQ ID NO: 1082612 - DNA, 15 bp, Homo sapiens
ggatggcattgaatc

SEQ ID NO: 1082613 - DNA, 15 bp, Homo sapiens
gggatggcattgaat

SEQ ID NO: 1082614 - DNA, 15 bp, Homo sapiens
agggatggcattgaa

SEQ ID NO: 1082615 - DNA, 15 bp, Homo sapiens
tagggatggcattga

SEQ ID NO: 1082616 - DNA, 15 bp, Homo sapiens
atagggatggcattg

SEQ ID NO: 1082617 - DNA, 15 bp, Homo sapiens
gatagggatggcatt

SEQ ID NO: 1082618 - DNA, 15 bp, Homo sapiens
tgatagggatggcat

SEQ ID NO: 1082619 - DNA, 15 bp, Homo sapiens
ttgatagggatggca

SEQ ID NO: 1082620 - DNA, 15 bp, Homo sapiens
cttgatagggatggc

SEQ ID NO: 1082621 - DNA, 15 bp, Homo sapiens
gcttgatagggatgg

SEQ ID NO: 1082622 - DNA, 15 bp, Homo sapiens
agcttgatagggatg

SEQ ID NO: 1082623 - DNA, 15 bp, Homo sapiens
tagcttgatagggat

SEQ ID NO: 1082624 - DNA, 15 bp, Homo sapiens
gtagcttgataggga

SEQ ID NO: 1082625 - DNA, 15 bp, Homo sapiens
ggtagcttgataggg

SEQ ID NO: 1082626 - DNA, 15 bp, Homo sapiens
tggtagcttgatagg

SEQ ID NO: 1082627 - DNA, 15 bp, Homo sapiens
ttggtagcttgatag

SEQ ID NO: 1082628 - DNA, 15 bp, Homo sapiens
attggtagcttgata

SEQ ID NO: 1082629 - DNA, 15 bp, Homo sapiens
cattggtagcttgat

SEQ ID NO: 1082630 - DNA, 15 bp, Homo sapiens
tcattggtagcttga

SEQ ID NO: 1082631 - DNA, 15 bp, Homo sapiens
gtcattggtagcttg

SEQ ID NO: 1082632 - DNA, 15 bp, Homo sapiens
agtcattggtagctt

SEQ ID NO: 1082633 - DNA, 15 bp, Homo sapiens
aagtcattggtagct

SEQ ID NO: 1082634 - DNA, 15 bp, Homo sapiens
aaagtcattggtagc

SEQ ID NO: 1082635 - DNA, 15 bp, Homo sapiens
gaaagtcattggtag

SEQ ID NO: 1082636 - DNA, 15 bp, Homo sapiens
agaaagtcattggta

SEQ ID NO: 1082637 - DNA, 15 bp, Homo sapiens
aagaaagtcattggt

SEQ ID NO: 1082638 - DNA, 15 bp, Homo sapiens
gaagaaagtcattgg

SEQ ID NO: 1082639 - DNA, 15 bp, Homo sapiens
tgaagaaagtcattg

SEQ ID NO: 1082640 - DNA, 15 bp, Homo sapiens
gtgaagaaagtcatt

SEQ ID NO: 1082641 - DNA, 15 bp, Homo sapiens
tgtgaagaaagtcat

SEQ ID NO: 1082642 - DNA, 15 bp, Homo sapiens
ctgtgaagaaagtca

SEQ ID NO: 1082643 - DNA, 15 bp, Homo sapiens
tctgtgaagaaagtc

SEQ ID NO: 1082644 - DNA, 15 bp, Homo sapiens
ttctgtgaagaaagt

SEQ ID NO: 1082645 - DNA, 15 bp, Homo sapiens
attctgtgaagaaag

SEQ ID NO: 1082646 - DNA, 15 bp, Homo sapiens
aattctgtgaagaaa

SEQ ID NO: 1082647 - DNA, 15 bp, Homo sapiens
caattctgtgaagaa

SEQ ID NO: 1082648 - DNA, 15 bp, Homo sapiens
ccaattctgtgaaga

SEQ ID NO: 1082649 - DNA, 15 bp, Homo sapiens
tccaattctgtgaag

SEQ ID NO: 1082650 - DNA, 15 bp, Homo sapiens
ttccaattctgtgaa

SEQ ID NO: 1082651 - DNA, 15 bp, Homo sapiens
tttccaattctgtga

SEQ ID NO: 1082652 - DNA, 15 bp, Homo sapiens
ttttccaattctgtg

SEQ ID NO: 1082653 - DNA, 15 bp, Homo sapiens
tttttccaattctgt

SEQ ID NO: 1082654 - DNA, 15 bp, Homo sapiens
ttttttccaattctg

SEQ ID NO: 1082655 - DNA, 15 bp, Homo sapiens
gttttttccaattct

SEQ ID NO: 1082656 - DNA, 15 bp, Homo sapiens
agttttttccaattc

SEQ ID NO: 1082657 - DNA, 15 bp, Homo sapiens
tagttttttccaatt

SEQ ID NO: 1082658 - DNA, 15 bp, Homo sapiens
ttagttttttccaat

SEQ ID NO: 1082659 - DNA, 15 bp, Homo sapiens
tttagttttttccaa

SEQ ID NO: 1082660 - DNA, 15 bp, Homo sapiens
ctttagttttttcca

SEQ ID NO: 1082661 - DNA, 15 bp, Homo sapiens
actttagttttttcc

SEQ ID NO: 1082662 - DNA, 15 bp, Homo sapiens
aactttagttttttc

SEQ ID NO: 1082663 - DNA, 15 bp, Homo sapiens
gaactttagtttttt

SEQ ID NO: 1082664 - DNA, 15 bp, Homo sapiens
tgaactttagttttt

SEQ ID NO: 1082665 - DNA, 15 bp, Homo sapiens
atgaactttagtttt

SEQ ID NO: 1082666 - DNA, 15 bp, Homo sapiens
tatgaactttagttt

SEQ ID NO: 1082667 - DNA, 15 bp, Homo sapiens
atatgaactttagtt

SEQ ID NO: 1082668 - DNA, 15 bp, Homo sapiens
catatgaactttagt

SEQ ID NO: 1082669 - DNA, 15 bp, Homo sapiens
ccatatgaactttag

SEQ ID NO: 1082670 - DNA, 15 bp, Homo sapiens
tccatatgaacttta

SEQ ID NO: 1082671 - DNA, 15 bp, Homo sapiens
ttccatatgaacttt

SEQ ID NO: 1082672 - DNA, 15 bp, Homo sapiens
gttccatatgaactt

SEQ ID NO: 1082673 - DNA, 15 bp, Homo sapiens
ggttccatatgaact

SEQ ID NO: 1082674 - DNA, 15 bp, Homo sapiens
tggttccatatgaac

SEQ ID NO: 1082675 - DNA, 15 bp, Homo sapiens
ttggttccatatgaa

SEQ ID NO: 1082676 - DNA, 15 bp, Homo sapiens
tttggttccatatga

SEQ ID NO: 1082677 - DNA, 15 bp, Homo sapiens
ttttggttccatatg

SEQ ID NO: 1082678 - DNA, 15 bp, Homo sapiens
tttttggttccatat

SEQ ID NO: 1082679 - DNA, 15 bp, Homo sapiens
ttttttggttccata

SEQ ID NO: 1082680 - DNA, 15 bp, Homo sapiens
cttttttggttccat

SEQ ID NO: 1082681 - DNA, 15 bp, Homo sapiens
tcttttttggttcca

SEQ ID NO: 1082682 - DNA, 15 bp, Homo sapiens
ctcttttttggttcc

SEQ ID NO: 1082683 - DNA, 15 bp, Homo sapiens
gctcttttttggttc

SEQ ID NO: 1082684 - DNA, 15 bp, Homo sapiens
ggctcttttttggtt

SEQ ID NO: 1082685 - DNA, 15 bp, Homo sapiens
gggctcttttttggt

SEQ ID NO: 1082686 - DNA, 15 bp, Homo sapiens
cgggctcttttttgg

SEQ ID NO: 1082687 - DNA, 15 bp, Homo sapiens
gcgggctcttttttg

SEQ ID NO: 1082688 - DNA, 15 bp, Homo sapiens
tgcgggctctttttt

SEQ ID NO: 1082689 - DNA, 15 bp, Homo sapiens
atgcgggctcttttt

SEQ ID NO: 1082690 - DNA, 15 bp, Homo sapiens
aatgcgggctctttt

SEQ ID NO: 1082691 - DNA, 15 bp, Homo sapiens
caatgcgggctcttt

SEQ ID NO: 1082692 - DNA, 15 bp, Homo sapiens
gcaatgcgggctctt

SEQ ID NO: 1082693 - DNA, 15 bp, Homo sapiens
ggcaatgcgggctct

SEQ ID NO: 1082694 - DNA, 15 bp, Homo sapiens
tggcaatgcgggctc

SEQ ID NO: 1082695 - DNA, 15 bp, Homo sapiens
ttggcaatgcgggct

SEQ ID NO: 1082696 - DNA, 15 bp, Homo sapiens
cttggcaatgcgggc

SEQ ID NO: 1082697 - DNA, 15 bp, Homo sapiens
acttggcaatgcggg

SEQ ID NO: 1082698 - DNA, 15 bp, Homo sapiens
gacttggcaatgcgg

SEQ ID NO: 1082699 - DNA, 15 bp, Homo sapiens
tgacttggcaatgcg

SEQ ID NO: 1082700 - DNA, 15 bp, Homo sapiens
ttgacttggcaatgc

SEQ ID NO: 1082701 - DNA, 15 bp, Homo sapiens
attgacttggcaatg

SEQ ID NO: 1082702 - DNA, 15 bp, Homo sapiens
gattgacttggcaat

SEQ ID NO: 1082703 - DNA, 15 bp, Homo sapiens
ggattgacttggcaa

SEQ ID NO: 1082704 - DNA, 15 bp, Homo sapiens
aggattgacttggca

SEQ ID NO: 1082705 - DNA, 15 bp, Homo sapiens
taggattgacttggc

SEQ ID NO: 1082706 - DNA, 15 bp, Homo sapiens
ttaggattgacttgg

SEQ ID NO: 1082707 - DNA, 15 bp, Homo sapiens
cttaggattgacttg

SEQ ID NO: 1082708 - DNA, 15 bp, Homo sapiens
gcttaggattgactt

SEQ ID NO: 1082709 - DNA, 15 bp, Homo sapiens
ggcttaggattgact

SEQ ID NO: 1082710 - DNA, 15 bp, Homo sapiens
tggcttaggattgac

SEQ ID NO: 1082711 - DNA, 15 bp, Homo sapiens
ttggcttaggattga

SEQ ID NO: 1082712 - DNA, 15 bp, Homo sapiens
tttggcttaggattg

SEQ ID NO: 1082713 - DNA, 15 bp, Homo sapiens
ttttggcttaggatt

SEQ ID NO: 1082714 - DNA, 15 bp, Homo sapiens
cttttggcttaggat

SEQ ID NO: 1082715 - DNA, 15 bp, Homo sapiens
tcttttggcttagga

SEQ ID NO: 1082716 - DNA, 15 bp, Homo sapiens
ttcttttggcttagg

SEQ ID NO: 1082717 - DNA, 15 bp, Homo sapiens
gttcttttggcttag

SEQ ID NO: 1082718 - DNA, 15 bp, Homo sapiens
tgttcttttggctta

SEQ ID NO: 1082719 - DNA, 15 bp, Homo sapiens
ttgttcttttggctt

SEQ ID NO: 1082720 - DNA, 15 bp, Homo sapiens
tttgttcttttggct

SEQ ID NO: 1082721 - DNA, 15 bp, Homo sapiens
ctttgttcttttggc

SEQ ID NO: 1082722 - DNA, 15 bp, Homo sapiens
gctttgttcttttgg

SEQ ID NO: 1082723 - DNA, 15 bp, Homo sapiens
agctttgttcttttg

SEQ ID NO: 1082724 - DNA, 15 bp, Homo sapiens
cagctttgttctttt

SEQ ID NO: 1082725 - DNA, 15 bp, Homo sapiens
ccagctttgttcttt

SEQ ID NO: 1082726 - DNA, 15 bp, Homo sapiens
tccagctttgttctt

SEQ ID NO: 1082727 - DNA, 15 bp, Homo sapiens
ctccagctttgttct

SEQ ID NO: 1082728 - DNA, 15 bp, Homo sapiens
cctccagctttgttc

SEQ ID NO: 1082729 - DNA, 15 bp, Homo sapiens
gcctccagctttgtt

SEQ ID NO: 1082730 - DNA, 15 bp, Homo sapiens
tgcctccagctttgt

SEQ ID NO: 1082731 - DNA, 15 bp, Homo sapiens
atgcctccagctttg

SEQ ID NO: 1082732 - DNA, 15 bp, Homo sapiens
gatgcctccagcttt

SEQ ID NO: 1082733 - DNA, 15 bp, Homo sapiens
tgatgcctccagctt

SEQ ID NO: 1082734 - DNA, 15 bp, Homo sapiens
gtgatgcctccagct

SEQ ID NO: 1082735 - DNA, 15 bp, Homo sapiens
tgtgatgcctccagc

SEQ ID NO: 1082736 - DNA, 15 bp, Homo sapiens
gtgtgatgcctccag

SEQ ID NO: 1082737 - DNA, 15 bp, Homo sapiens
agtgtgatgcctcca

SEQ ID NO: 1082738 - DNA, 15 bp, Homo sapiens
tagtgtgatgcctcc

SEQ ID NO: 1082739 - DNA, 15 bp, Homo sapiens
gtagtgtgatgcctc

SEQ ID NO: 1082740 - DNA, 15 bp, Homo sapiens
ggtagtgtgatgcct

SEQ ID NO: 1082741 - DNA, 15 bp, Homo sapiens
aggtagtgtgatgcc

SEQ ID NO: 1082742 - DNA, 15 bp, Homo sapiens
caggtagtgtgatgc

SEQ ID NO: 1082743 - DNA, 15 bp, Homo sapiens
tcaggtagtgtgatg

SEQ ID NO: 1082744 - DNA, 15 bp, Homo sapiens
gtcaggtagtgtgat

SEQ ID NO: 1082745 - DNA, 15 bp, Homo sapiens
agtcaggtagtgtga

SEQ ID NO: 1082746 - DNA, 15 bp, Homo sapiens
aagtcaggtagtgtg

SEQ ID NO: 1082747 - DNA, 15 bp, Homo sapiens
gaagtcaggtagtgt

SEQ ID NO: 1082748 - DNA, 15 bp, Homo sapiens
agaagtcaggtagtg

SEQ ID NO: 1082749 - DNA, 15 bp, Homo sapiens
tagaagtcaggtagt

SEQ ID NO: 1082750 - DNA, 15 bp, Homo sapiens
ttagaagtcaggtag

SEQ ID NO: 1082751 - DNA, 15 bp, Homo sapiens
gttagaagtcaggta

SEQ ID NO: 1082752 - DNA, 15 bp, Homo sapiens
agttagaagtcaggt

SEQ ID NO: 1082753 - DNA, 15 bp, Homo sapiens
tagttagaagtcagg

SEQ ID NO: 1082754 - DNA, 15 bp, Homo sapiens
atagttagaagtcag

SEQ ID NO: 1082755 - DNA, 15 bp, Homo sapiens
tatagttagaagtca

SEQ ID NO: 1082756 - DNA, 15 bp, Homo sapiens
gtatagttagaagtc

SEQ ID NO: 1082757 - DNA, 15 bp, Homo sapiens
agtatagttagaagt

SEQ ID NO: 1082758 - DNA, 15 bp, Homo sapiens
tagtatagttagaag

SEQ ID NO: 1082759 - DNA, 15 bp, Homo sapiens
gtagtatagttagaa

SEQ ID NO: 1082760 - DNA, 15 bp, Homo sapiens
tgtagtatagttaga

SEQ ID NO: 1082761 - DNA, 15 bp, Homo sapiens
ttgtagtatagttag

SEQ ID NO: 1082762 - DNA, 15 bp, Homo sapiens
cttgtagtatagtta

SEQ ID NO: 1082763 - DNA, 15 bp, Homo sapiens
ccttgtagtatagtt

SEQ ID NO: 1082764 - DNA, 15 bp, Homo sapiens
gccttgtagtatagt

SEQ ID NO: 1082765 - DNA, 15 bp, Homo sapiens
agccttgtagtatag

SEQ ID NO: 1082766 - DNA, 15 bp, Homo sapiens
tagccttgtagtata

SEQ ID NO: 1082767 - DNA, 15 bp, Homo sapiens
gtagccttgtagtat

SEQ ID NO: 1082768 - DNA, 15 bp, Homo sapiens
tgtagccttgtagta

SEQ ID NO: 1082769 - DNA, 15 bp, Homo sapiens
ctgtagccttgtagt

SEQ ID NO: 1082770 - DNA, 15 bp, Homo sapiens
actgtagccttgtag

SEQ ID NO: 1082771 - DNA, 15 bp, Homo sapiens
tactgtagccttgta

SEQ ID NO: 1082772 - DNA, 15 bp, Homo sapiens
ttactgtagccttgt

SEQ ID NO: 1082773 - DNA, 15 bp, Homo sapiens
gttactgtagccttg

SEQ ID NO: 1082774 - DNA, 15 bp, Homo sapiens
ggttactgtagcctt

SEQ ID NO: 1082775 - DNA, 15 bp, Homo sapiens
tggttactgtagcct

SEQ ID NO: 1082776 - DNA, 15 bp, Homo sapiens
ttggttactgtagcc

SEQ ID NO: 1082777 - DNA, 15 bp, Homo sapiens
tttggttactgtagc

SEQ ID NO: 1082778 - DNA, 15 bp, Homo sapiens
ttttggttactgtag

SEQ ID NO: 1082779 - DNA, 15 bp, Homo sapiens
gttttggttactgta

SEQ ID NO: 1082780 - DNA, 15 bp, Homo sapiens
tgttttggttactgt

SEQ ID NO: 1082781 - DNA, 15 bp, Homo sapiens
ctgttttggttactg

SEQ ID NO: 1082782 - DNA, 15 bp, Homo sapiens
gctgttttggttact

SEQ ID NO: 1082783 - DNA, 15 bp, Homo sapiens
tgctgttttggttac

SEQ ID NO: 1082784 - DNA, 15 bp, Homo sapiens
atgctgttttggtta

SEQ ID NO: 1082785 - DNA, 15 bp, Homo sapiens
catgctgttttggtt

SEQ ID NO: 1082786 - DNA, 15 bp, Homo sapiens
gcatgctgttttggt

SEQ ID NO: 1082787 - DNA, 15 bp, Homo sapiens
agcatgctgttttgg

SEQ ID NO: 1082788 - DNA, 15 bp, Homo sapiens
tagcatgctgttttg

SEQ ID NO: 1082789 - DNA, 15 bp, Homo sapiens
gtagcatgctgtttt

SEQ ID NO: 1082790 - DNA, 15 bp, Homo sapiens
agtagcatgctgttt

SEQ ID NO: 1082791 - DNA, 15 bp, Homo sapiens
cagtagcatgctgtt

SEQ ID NO: 1082792 - DNA, 15 bp, Homo sapiens
ccagtagcatgctgt

SEQ ID NO: 1082793 - DNA, 15 bp, Homo sapiens
accagtagcatgctg

SEQ ID NO: 1082794 - DNA, 15 bp, Homo sapiens
taccagtagcatgct

SEQ ID NO: 1082795 - DNA, 15 bp, Homo sapiens
gtaccagtagcatgc

SEQ ID NO: 1082796 - DNA, 15 bp, Homo sapiens
ggtaccagtagcatg

SEQ ID NO: 1082797 - DNA, 15 bp, Homo sapiens
tggtaccagtagcat

SEQ ID NO: 1082798 - DNA, 15 bp, Homo sapiens
ttggtaccagtagca

SEQ ID NO: 1082799 - DNA, 15 bp, Homo sapiens
tttggtaccagtagc

SEQ ID NO: 1082800 - DNA, 15 bp, Homo sapiens
ttttggtaccagtag

SEQ ID NO: 1082801 - DNA, 15 bp, Homo sapiens
gttttggtaccagta

SEQ ID NO: 1082802 - DNA, 15 bp, Homo sapiens
tgttttggtaccagt

SEQ ID NO: 1082803 - DNA, 15 bp, Homo sapiens
ctgttttggtaccag

SEQ ID NO: 1082804 - DNA, 15 bp, Homo sapiens
tctgttttggtacca

SEQ ID NO: 1082805 - DNA, 15 bp, Homo sapiens
ctctgttttggtacc

SEQ ID NO: 1082806 - DNA, 15 bp, Homo sapiens
tctctgttttggtac

SEQ ID NO: 1082807 - DNA, 15 bp, Homo sapiens
atctctgttttggta

SEQ ID NO: 1082808 - DNA, 15 bp, Homo sapiens
tatctctgttttggt

SEQ ID NO: 1082809 - DNA, 15 bp, Homo sapiens
atatctctgttttgg

SEQ ID NO: 1082810 - DNA, 15 bp, Homo sapiens
tatatctctgttttg

SEQ ID NO: 1082811 - DNA, 15 bp, Homo sapiens
ctatatctctgtttt

SEQ ID NO: 1082812 - DNA, 15 bp, Homo sapiens
tctatatctctgttt

SEQ ID NO: 1082813 - DNA, 15 bp, Homo sapiens
ctctatatctctgtt

SEQ ID NO: 1082814 - DNA, 15 bp, Homo sapiens
gctctatatctctgt

SEQ ID NO: 1082815 - DNA, 15 bp, Homo sapiens
tgctctatatctctg

SEQ ID NO: 1082816 - DNA, 15 bp, Homo sapiens
ttgctctatatctct

SEQ ID NO: 1082817 - DNA, 15 bp, Homo sapiens
attgctctatatctc

SEQ ID NO: 1082818 - DNA, 15 bp, Homo sapiens
cattgctctatatct

SEQ ID NO: 1082819 - DNA, 15 bp, Homo sapiens
ccattgctctatatc

SEQ ID NO: 1082820 - DNA, 15 bp, Homo sapiens
tccattgctctatat

SEQ ID NO: 1082821 - DNA, 15 bp, Homo sapiens
ttccattgctctata

SEQ ID NO: 1082822 - DNA, 15 bp, Homo sapiens
gttccattgctctat

SEQ ID NO: 1082823 - DNA, 15 bp, Homo sapiens
tgttccattgctcta

SEQ ID NO: 1082824 - DNA, 15 bp, Homo sapiens
ctgttccattgctct

SEQ ID NO: 1082825 - DNA, 15 bp, Homo sapiens
tctgttccattgctc

SEQ ID NO: 1082826 - DNA, 15 bp, Homo sapiens
ttctgttccattgct

SEQ ID NO: 1082827 - DNA, 15 bp, Homo sapiens
gttctgttccattgc

SEQ ID NO: 1082828 - DNA, 15 bp, Homo sapiens
ctctgttctgttcca

SEQ ID NO: 1082829 - DNA, 15 bp, Homo sapiens
gctctgttctgttcc

SEQ ID NO: 1082830 - DNA, 15 bp, Homo sapiens
ggctctgttctgttc

SEQ ID NO: 1082831 - DNA, 15 bp, Homo sapiens
gggctctgttctgtt

SEQ ID NO: 1082832 - DNA, 15 bp, Homo sapiens
agggctctgttctgt

SEQ ID NO: 1082833 - DNA, 15 bp, Homo sapiens
gagggctctgttctg

SEQ ID NO: 1082834 - DNA, 15 bp, Homo sapiens
tgagggctctgttct

SEQ ID NO: 1082835 - DNA, 15 bp, Homo sapiens
ctgagggctctgttc

SEQ ID NO: 1082836 - DNA, 15 bp, Homo sapiens
tctgagggctctgtt

SEQ ID NO: 1082837 - DNA, 15 bp, Homo sapiens
ttctgagggctctgt

SEQ ID NO: 1082838 - DNA, 15 bp, Homo sapiens
tttctgagggctctg

SEQ ID NO: 1082839 - DNA, 15 bp, Homo sapiens
atttctgagggctct

SEQ ID NO: 1082840 - DNA, 15 bp, Homo sapiens
tatttctgagggctc

SEQ ID NO: 1082841 - DNA, 15 bp, Homo sapiens
ttatttctgagggct

SEQ ID NO: 1082842 - DNA, 15 bp, Homo sapiens
attatttctgagggc

SEQ ID NO: 1082843 - DNA, 15 bp, Homo sapiens
cattatttctgaggg

SEQ ID NO: 1082844 - DNA, 15 bp, Homo sapiens
gcattatttctgagg

SEQ ID NO: 1082845 - DNA, 15 bp, Homo sapiens
ggcattatttctgag

SEQ ID NO: 1082846 - DNA, 15 bp, Homo sapiens
cggcattatttctga

SEQ ID NO: 1082847 - DNA, 15 bp, Homo sapiens
gcggcattatttctg

SEQ ID NO: 1082848 - DNA, 15 bp, Homo sapiens
tgcggcattatttct

SEQ ID NO: 1082849 - DNA, 15 bp, Homo sapiens
atgcggcattatttc

SEQ ID NO: 1082850 - DNA, 15 bp, Homo sapiens
tatgcggcattattt

SEQ ID NO: 1082851 - DNA, 15 bp, Homo sapiens
atatgcggcattatt

SEQ ID NO: 1082852 - DNA, 15 bp, Homo sapiens
gatatgcggcattat

SEQ ID NO: 1082853 - DNA, 15 bp, Homo sapiens
agatatgcggcatta

SEQ ID NO: 1082854 - DNA, 15 bp, Homo sapiens
tagatatgcggcatt

SEQ ID NO: 1082855 - DNA, 15 bp, Homo sapiens
gtagatatgcggcat

SEQ ID NO: 1082856 - DNA, 15 bp, Homo sapiens
tgtagatatgcggca

SEQ ID NO: 1082857 - DNA, 15 bp, Homo sapiens
ttgtagatatgcggc

SEQ ID NO: 1082858 - DNA, 15 bp, Homo sapiens
cttgtagatatgcgg

SEQ ID NO: 1082859 - DNA, 15 bp, Homo sapiens
gcttgtagatatgcg

SEQ ID NO: 1082860 - DNA, 15 bp, Homo sapiens
tgcttgtagatatgc

SEQ ID NO: 1082861 - DNA, 15 bp, Homo sapiens
atgcttgtagatatg

SEQ ID NO: 1082862 - DNA, 15 bp, Homo sapiens
gatgcttgtagatat

SEQ ID NO: 1082863 - DNA, 15 bp, Homo sapiens
agatgcttgtagata

SEQ ID NO: 1082864 - DNA, 15 bp, Homo sapiens
cagatgcttgtagat

SEQ ID NO: 1082865 - DNA, 15 bp, Homo sapiens
tcagatgcttgtaga

SEQ ID NO: 1082866 - DNA, 15 bp, Homo sapiens
atcagatgcttgtag

SEQ ID NO: 1082867 - DNA, 15 bp, Homo sapiens
gatcagatgcttgta

SEQ ID NO: 1082868 - DNA, 15 bp, Homo sapiens
agatcagatgcttgt

SEQ ID NO: 1082869 - DNA, 15 bp, Homo sapiens
aagatcagatgcttg

SEQ ID NO: 1082870 - DNA, 15 bp, Homo sapiens
aaagatcagatgctt

SEQ ID NO: 1082871 - DNA, 15 bp, Homo sapiens
caaagatcagatgct

SEQ ID NO: 1082872 - DNA, 15 bp, Homo sapiens
tcaaagatcagatgc

SEQ ID NO: 1082873 - DNA, 15 bp, Homo sapiens
gtcaaagatcagatg

SEQ ID NO: 1082874 - DNA, 15 bp, Homo sapiens
tttgtcaaagatcag

SEQ ID NO: 1082875 - DNA, 15 bp, Homo sapiens
gtttgtcaaagatca

SEQ ID NO: 1082876 - DNA, 15 bp, Homo sapiens
ggtttgtcaaagatc

SEQ ID NO: 1082877 - DNA, 15 bp, Homo sapiens
aggtttgtcaaagat

SEQ ID NO: 1082878 - DNA, 15 bp, Homo sapiens
caggtttgtcaaaga

SEQ ID NO: 1082879 - DNA, 15 bp, Homo sapiens
tcaggtttgtcaaag

SEQ ID NO: 1082880 - DNA, 15 bp, Homo sapiens
gtcaggtttgtcaaa

SEQ ID NO: 1082881 - DNA, 15 bp, Homo sapiens
tgtcaggtttgtcaa

SEQ ID NO: 1082882 - DNA, 15 bp, Homo sapiens
ttgtcaggtttgtca

SEQ ID NO: 1082883 - DNA, 15 bp, Homo sapiens
tttgtcaggtttgtc

SEQ ID NO: 1082884 - DNA, 15 bp, Homo sapiens
ttttgtcaggtttgt

SEQ ID NO: 1082885 - DNA, 15 bp, Homo sapiens
tttttgtcaggtttg

SEQ ID NO: 1082886 - DNA, 15 bp, Homo sapiens
gtttttgtcaggttt

SEQ ID NO: 1082887 - DNA, 15 bp, Homo sapiens
tgtttttgtcaggtt

SEQ ID NO: 1082888 - DNA, 15 bp, Homo sapiens
ttgtttttgtcaggt

SEQ ID NO: 1082889 - DNA, 15 bp, Homo sapiens
cttgtttttgtcagg

SEQ ID NO: 1082890 - DNA, 15 bp, Homo sapiens
gcttgtttttgtcag

SEQ ID NO: 1082891 - DNA, 15 bp, Homo sapiens
tgcttgtttttgtca

SEQ ID NO: 1082892 - DNA, 15 bp, Homo sapiens
ttgcttgtttttgtc

SEQ ID NO: 1082893 - DNA, 15 bp, Homo sapiens
attgcttgtttttgt

SEQ ID NO: 1082894 - DNA, 15 bp, Homo sapiens
cattgcttgtttttg

SEQ ID NO: 1082895 - DNA, 15 bp, Homo sapiens
ccattgcttgttttt

SEQ ID NO: 1082896 - DNA, 15 bp, Homo sapiens
cccattgcttgtttt

SEQ ID NO: 1082897 - DNA, 15 bp, Homo sapiens
ccccattgcttgttt

SEQ ID NO: 1082898 - DNA, 15 bp, Homo sapiens
tccccattgcttgtt

SEQ ID NO: 1082899 - DNA, 15 bp, Homo sapiens
ttccccattgcttgt

SEQ ID NO: 1082900 - DNA, 15 bp, Homo sapiens
tttccccattgcttg

SEQ ID NO: 1082901 - DNA, 15 bp, Homo sapiens
ctttccccattgctt

SEQ ID NO: 1082902 - DNA, 15 bp, Homo sapiens
cctttccccattgct

SEQ ID NO: 1082903 - DNA, 15 bp, Homo sapiens
tcctttccccattgc

SEQ ID NO: 1082904 - DNA, 15 bp, Homo sapiens
atcctttccccattg

SEQ ID NO: 1082905 - DNA, 15 bp, Homo sapiens
aatcctttccccatt

SEQ ID NO: 1082906 - DNA, 15 bp, Homo sapiens
gaatcctttccccat

SEQ ID NO: 1082907 - DNA, 15 bp, Homo sapiens
ggaatcctttcccca

SEQ ID NO: 1082908 - DNA, 15 bp, Homo sapiens
gggaatcctttcccc

SEQ ID NO: 1082909 - DNA, 15 bp, Homo sapiens
agggaatcctttccc

SEQ ID NO: 1082910 - DNA, 15 bp, Homo sapiens
tagggaatcctttcc

SEQ ID NO: 1082911 - DNA, 15 bp, Homo sapiens
atagggaatcctttc

SEQ ID NO: 1082912 - DNA, 15 bp, Homo sapiens
aatagggaatccttt

SEQ ID NO: 1082913 - DNA, 15 bp, Homo sapiens
aaatagggaatcctt

SEQ ID NO: 1082914 - DNA, 15 bp, Homo sapiens
taaatagggaatcct

SEQ ID NO: 1082915 - DNA, 15 bp, Homo sapiens
ttaaatagggaatcc

SEQ ID NO: 1082916 - DNA, 15 bp, Homo sapiens
attaaatagggaatc

SEQ ID NO: 1082917 - DNA, 15 bp, Homo sapiens
tattaaatagggaat

SEQ ID NO: 1082918 - DNA, 15 bp, Homo sapiens
ttattaaatagggaa

SEQ ID NO: 1082919 - DNA, 15 bp, Homo sapiens
tttattaaataggga

SEQ ID NO: 1082920 - DNA, 15 bp, Homo sapiens
atttattaaataggg

SEQ ID NO: 1082921 - DNA, 15 bp, Homo sapiens
catttattaaatagg

SEQ ID NO: 1082922 - DNA, 15 bp, Homo sapiens
ccatttattaaatag

SEQ ID NO: 1082923 - DNA, 15 bp, Homo sapiens
accatttattaaata

SEQ ID NO: 1082924 - DNA, 15 bp, Homo sapiens
caccatttattaaat

SEQ ID NO: 1082925 - DNA, 15 bp, Homo sapiens
gcaccatttattaaa

SEQ ID NO: 1082926 - DNA, 15 bp, Homo sapiens
agcaccatttattaa

SEQ ID NO: 1082927 - DNA, 15 bp, Homo sapiens
cagcaccatttatta

SEQ ID NO: 1082928 - DNA, 15 bp, Homo sapiens
ccagcaccatttatt

SEQ ID NO: 1082929 - DNA, 15 bp, Homo sapiens
cccagcaccatttat

SEQ ID NO: 1082930 - DNA, 15 bp, Homo sapiens
tcccagcaccattta

SEQ ID NO: 1082931 - DNA, 15 bp, Homo sapiens
ttcccagcaccattt

SEQ ID NO: 1082932 - DNA, 15 bp, Homo sapiens
tttcccagcaccatt

SEQ ID NO: 1082933 - DNA, 15 bp, Homo sapiens
ttttcccagcaccat

SEQ ID NO: 1082934 - DNA, 15 bp, Homo sapiens
gttttcccagcacca

SEQ ID NO: 1082935 - DNA, 15 bp, Homo sapiens
agttttcccagcacc

SEQ ID NO: 1082936 - DNA, 15 bp, Homo sapiens
cagttttcccagcac

SEQ ID NO: 1082937 - DNA, 15 bp, Homo sapiens
ccagttttcccagca

SEQ ID NO: 1082938 - DNA, 15 bp, Homo sapiens
gccagttttcccagc

SEQ ID NO: 1082939 - DNA, 15 bp, Homo sapiens
agccagttttcccag

SEQ ID NO: 1082940 - DNA, 15 bp, Homo sapiens
tagccagttttccca

SEQ ID NO: 1082941 - DNA, 15 bp, Homo sapiens
ctagccagttttccc

SEQ ID NO: 1082942 - DNA, 15 bp, Homo sapiens
gctagccagttttcc

SEQ ID NO: 1082943 - DNA, 15 bp, Homo sapiens
ggctagccagttttc

SEQ ID NO: 1082944 - DNA, 15 bp, Homo sapiens
tggctagccagtttt

SEQ ID NO: 1082945 - DNA, 15 bp, Homo sapiens
atggctagccagttt

SEQ ID NO: 1082946 - DNA, 15 bp, Homo sapiens
tatggctagccagtt

SEQ ID NO: 1082947 - DNA, 15 bp, Homo sapiens
atatggctagccagt

SEQ ID NO: 1082948 - DNA, 15 bp, Homo sapiens
catatggctagccag

SEQ ID NO: 1082949 - DNA, 15 bp, Homo sapiens
acatatggctagcca

SEQ ID NO: 1082950 - DNA, 15 bp, Homo sapiens
tacatatggctagcc

SEQ ID NO: 1082951 - DNA, 15 bp, Homo sapiens
ctacatatggctagc

SEQ ID NO: 1082952 - DNA, 15 bp, Homo sapiens
tctacatatggctag

SEQ ID NO: 1082953 - DNA, 15 bp, Homo sapiens
ttctacatatggcta

SEQ ID NO: 1082954 - DNA, 15 bp, Homo sapiens
tttctacatatggct

SEQ ID NO: 1082955 - DNA, 15 bp, Homo sapiens
ctttctacatatggc

SEQ ID NO: 1082956 - DNA, 15 bp, Homo sapiens
gctttctacatatgg

SEQ ID NO: 1082957 - DNA, 15 bp, Homo sapiens
agctttctacatatg

SEQ ID NO: 1082958 - DNA, 15 bp, Homo sapiens
cagctttctacatat

SEQ ID NO: 1082959 - DNA, 15 bp, Homo sapiens
tcagctttctacata

SEQ ID NO: 1082960 - DNA, 15 bp, Homo sapiens
ttcagctttctacat

SEQ ID NO: 1082961 - DNA, 15 bp, Homo sapiens
tttcagctttctaca

SEQ ID NO: 1082962 - DNA, 15 bp, Homo sapiens
gtttcagctttctac

SEQ ID NO: 1082963 - DNA, 15 bp, Homo sapiens
agtttcagctttcta

SEQ ID NO: 1082964 - DNA, 15 bp, Homo sapiens
cagtttcagctttct

SEQ ID NO: 1082965 - DNA, 15 bp, Homo sapiens
ccagtttcagctttc

SEQ ID NO: 1082966 - DNA, 15 bp, Homo sapiens
tccagtttcagcttt

SEQ ID NO: 1082967 - DNA, 15 bp, Homo sapiens
atccagtttcagctt

SEQ ID NO: 1082968 - DNA, 15 bp, Homo sapiens
gatccagtttcagct

SEQ ID NO: 1082969 - DNA, 15 bp, Homo sapiens
ggatccagtttcagc

SEQ ID NO: 1082970 - DNA, 15 bp, Homo sapiens
gggatccagtttcag

SEQ ID NO: 1082971 - DNA, 15 bp, Homo sapiens
agggatccagtttca

SEQ ID NO: 1082972 - DNA, 15 bp, Homo sapiens
aagggatccagtttc

SEQ ID NO: 1082973 - DNA, 15 bp, Homo sapiens
gaagggatccagttt

SEQ ID NO: 1082974 - DNA, 15 bp, Homo sapiens
ggaagggatccagtt

SEQ ID NO: 1082975 - DNA, 15 bp, Homo sapiens
taaggtgtaaggaag

SEQ ID NO: 1082976 - DNA, 15 bp, Homo sapiens
ataaggtgtaaggaa

SEQ ID NO: 1082977 - DNA, 15 bp, Homo sapiens
tataaggtgtaagga

SEQ ID NO: 1082978 - DNA, 15 bp, Homo sapiens
gtataaggtgtaagg

SEQ ID NO: 1082979 - DNA, 15 bp, Homo sapiens
tgtataaggtgtaag

SEQ ID NO: 1082980 - DNA, 15 bp, Homo sapiens
ttgtataaggtgtaa

SEQ ID NO: 1082981 - DNA, 15 bp, Homo sapiens
tttgtataaggtgta

SEQ ID NO: 1082982 - DNA, 15 bp, Homo sapiens
ttttgtataaggtgt

SEQ ID NO: 1082983 - DNA, 15 bp, Homo sapiens
tttttgtataaggtg

SEQ ID NO: 1082984 - DNA, 15 bp, Homo sapiens
atttttgtataaggt

SEQ ID NO: 1082985 - DNA, 15 bp, Homo sapiens
aatttttgtataagg

SEQ ID NO: 1082986 - DNA, 15 bp, Homo sapiens
taatttttgtataag

SEQ ID NO: 1082987 - DNA, 15 bp, Homo sapiens
ttaatttttgtataa

SEQ ID NO: 1082988 - DNA, 15 bp, Homo sapiens
attaatttttgtata

SEQ ID NO: 1082989 - DNA, 15 bp, Homo sapiens
aattaatttttgtat

SEQ ID NO: 1082990 - DNA, 15 bp, Homo sapiens
gtaagtctttaatcc

SEQ ID NO: 1082991 - DNA, 15 bp, Homo sapiens
tgtaagtctttaatc

SEQ ID NO: 1082992 - DNA, 15 bp, Homo sapiens
atgtaagtctttaat

SEQ ID NO: 1082993 - DNA, 15 bp, Homo sapiens
catgtaagtctttaa

SEQ ID NO: 1082994 - DNA, 15 bp, Homo sapiens
acatgtaagtcttta

SEQ ID NO: 1082995 - DNA, 15 bp, Homo sapiens
aacatgtaagtcttt

SEQ ID NO: 1082996 - DNA, 15 bp, Homo sapiens
taacatgtaagtctt

SEQ ID NO: 1082997 - DNA, 15 bp, Homo sapiens
ctaacatgtaagtct

SEQ ID NO: 1082998 - DNA, 15 bp, Homo sapiens
tctaacatgtaagtc

SEQ ID NO: 1082999 - DNA, 15 bp, Homo sapiens
gtctaacatgtaagt

SEQ ID NO: 1083000 - DNA, 15 bp, Homo sapiens
ggtctaacatgtaag

SEQ ID NO: 1083001 - DNA, 15 bp, Homo sapiens
aggtctaacatgtaa

SEQ ID NO: 1083002 - DNA, 15 bp, Homo sapiens
taggtctaacatgta

SEQ ID NO: 1083003 - DNA, 15 bp, Homo sapiens
ttaggtctaacatgt

SEQ ID NO: 1083004 - DNA, 15 bp, Homo sapiens
tttaggtctaacatg

SEQ ID NO: 1083005 - DNA, 15 bp, Homo sapiens
tatgtcctgaatggt

SEQ ID NO: 1083006 - DNA, 15 bp, Homo sapiens
ctatgtcctgaatgg

SEQ ID NO: 1083007 - DNA, 15 bp, Homo sapiens
cctatgtcctgaatg

SEQ ID NO: 1083008 - DNA, 15 bp, Homo sapiens
gcctatgtcctgaat

SEQ ID NO: 1083009 - DNA, 15 bp, Homo sapiens
tgcctatgtcctgaa

SEQ ID NO: 1083010 - DNA, 15 bp, Homo sapiens
atgcctatgtcctga

SEQ ID NO: 1083011 - DNA, 15 bp, Homo sapiens
catgcctatgtcctg

SEQ ID NO: 1083012 - DNA, 15 bp, Homo sapiens
ccatgcctatgtcct

SEQ ID NO: 1083013 - DNA, 15 bp, Homo sapiens
cccatgcctatgtcc

SEQ ID NO: 1083014 - DNA, 15 bp, Homo sapiens
gcccatgcctatgtc

SEQ ID NO: 1083015 - DNA, 15 bp, Homo sapiens
tgcccatgcctatgt

SEQ ID NO: 1083016 - DNA, 15 bp, Homo sapiens
ttgcccatgcctatg

SEQ ID NO: 1083017 - DNA, 15 bp, Homo sapiens
cttgcccatgcctat

SEQ ID NO: 1083018 - DNA, 15 bp, Homo sapiens
ccttgcccatgccta

SEQ ID NO: 1083019 - DNA, 15 bp, Homo sapiens
tccttgcccatgcct

SEQ ID NO: 1083020 - DNA, 15 bp, Homo sapiens
acatgaagtccttgc

SEQ ID NO: 1083021 - DNA, 15 bp, Homo sapiens
gacatgaagtccttg

SEQ ID NO: 1083022 - DNA, 15 bp, Homo sapiens
agacatgaagtcctt

SEQ ID NO: 1083023 - DNA, 15 bp, Homo sapiens
tagacatgaagtcct

SEQ ID NO: 1083024 - DNA, 15 bp, Homo sapiens
ttagacatgaagtcc

SEQ ID NO: 1083025 - DNA, 15 bp, Homo sapiens
tttagacatgaagtc

SEQ ID NO: 1083026 - DNA, 15 bp, Homo sapiens
ttttagacatgaagt

SEQ ID NO: 1083027 - DNA, 15 bp, Homo sapiens
gttttagacatgaag

SEQ ID NO: 1083028 - DNA, 15 bp, Homo sapiens
tgttttagacatgaa

SEQ ID NO: 1083029 - DNA, 15 bp, Homo sapiens
gtgttttagacatga

SEQ ID NO: 1083030 - DNA, 15 bp, Homo sapiens
ggtgttttagacatg

SEQ ID NO: 1083031 - DNA, 15 bp, Homo sapiens
tggtgttttagacat

SEQ ID NO: 1083032 - DNA, 15 bp, Homo sapiens
ttggtgttttagaca

SEQ ID NO: 1083033 - DNA, 15 bp, Homo sapiens
tttggtgttttagac

SEQ ID NO: 1083034 - DNA, 15 bp, Homo sapiens
ttttggtgttttaga

SEQ ID NO: 1083035 - DNA, 15 bp, Homo sapiens
cattgcttttggtgt

SEQ ID NO: 1083036 - DNA, 15 bp, Homo sapiens
ccattgcttttggtg

SEQ ID NO: 1083037 - DNA, 15 bp, Homo sapiens
gccattgcttttggt

SEQ ID NO: 1083038 - DNA, 15 bp, Homo sapiens
tgccattgcttttgg

SEQ ID NO: 1083039 - DNA, 15 bp, Homo sapiens
ttgccattgcttttg

SEQ ID NO: 1083040 - DNA, 15 bp, Homo sapiens
gttgccattgctttt

SEQ ID NO: 1083041 - DNA, 15 bp, Homo sapiens
tgttgccattgcttt

SEQ ID NO: 1083042 - DNA, 15 bp, Homo sapiens
ttgttgccattgctt

SEQ ID NO: 1083043 - DNA, 15 bp, Homo sapiens
tttgttgccattgct

SEQ ID NO: 1083044 - DNA, 15 bp, Homo sapiens
ttttgttgccattgc

SEQ ID NO: 1083045 - DNA, 15 bp, Homo sapiens
cttttgttgccattg

SEQ ID NO: 1083046 - DNA, 15 bp, Homo sapiens
gcttttgttgccatt

SEQ ID NO: 1083047 - DNA, 15 bp, Homo sapiens
ggcttttgttgccat

SEQ ID NO: 1083048 - DNA, 15 bp, Homo sapiens
tggcttttgttgcca

SEQ ID NO: 1083049 - DNA, 15 bp, Homo sapiens
ttggcttttgttgcc

SEQ ID NO: 1083050 - DNA, 15 bp, Homo sapiens
tgtgcagaagctctt

SEQ ID NO: 1083051 - DNA, 15 bp, Homo sapiens
ctgtgcagaagctct

SEQ ID NO: 1083052 - DNA, 15 bp, Homo sapiens
gctgtgcagaagctc

SEQ ID NO: 1083053 - DNA, 15 bp, Homo sapiens
tgctgtgcagaagct

SEQ ID NO: 1083054 - DNA, 15 bp, Homo sapiens
ttgctgtgcagaagc

SEQ ID NO: 1083055 - DNA, 15 bp, Homo sapiens
tttgctgtgcagaag

SEQ ID NO: 1083056 - DNA, 15 bp, Homo sapiens
ttttgctgtgcagaa

SEQ ID NO: 1083057 - DNA, 15 bp, Homo sapiens
cttttgctgtgcaga

SEQ ID NO: 1083058 - DNA, 15 bp, Homo sapiens
tcttttgctgtgcag

SEQ ID NO: 1083059 - DNA, 15 bp, Homo sapiens
ttcttttgctgtgca

SEQ ID NO: 1083060 - DNA, 15 bp, Homo sapiens
tttcttttgctgtgc

SEQ ID NO: 1083061 - DNA, 15 bp, Homo sapiens
gtttcttttgctgtg

SEQ ID NO: 1083062 - DNA, 15 bp, Homo sapiens
ggtagtttcttttgc

SEQ ID NO: 1083063 - DNA, 15 bp, Homo sapiens
tggtagtttcttttg

SEQ ID NO: 1083064 - DNA, 15 bp, Homo sapiens
atggtagtttctttt

SEQ ID NO: 1083065 - DNA, 15 bp, Homo sapiens
gatggtagtttcttt

SEQ ID NO: 1083066 - DNA, 15 bp, Homo sapiens
tgatggtagtttctt

SEQ ID NO: 1083067 - DNA, 15 bp, Homo sapiens
ctgatggtagtttct

SEQ ID NO: 1083068 - DNA, 15 bp, Homo sapiens
tctgatggtagtttc

SEQ ID NO: 1083069 - DNA, 15 bp, Homo sapiens
ctctgatggtagttt

SEQ ID NO: 1083070 - DNA, 15 bp, Homo sapiens
actctgatggtagtt

SEQ ID NO: 1083071 - DNA, 15 bp, Homo sapiens
cactctgatggtagt

SEQ ID NO: 1083072 - DNA, 15 bp, Homo sapiens
tcactctgatggtag

SEQ ID NO: 1083073 - DNA, 15 bp, Homo sapiens
ttcactctgatggta

SEQ ID NO: 1083074 - DNA, 15 bp, Homo sapiens
gttcactctgatggt

SEQ ID NO: 1083075 - DNA, 15 bp, Homo sapiens
tgttcactctgatgg

SEQ ID NO: 1083076 - DNA, 15 bp, Homo sapiens
ctgttcactctgatg

SEQ ID NO: 1083077 - DNA, 15 bp, Homo sapiens
ccattctgtaggttg

SEQ ID NO: 1083078 - DNA, 15 bp, Homo sapiens
cccattctgtaggtt

SEQ ID NO: 1083079 - DNA, 15 bp, Homo sapiens
ttttctcccattctg

SEQ ID NO: 1083080 - DNA, 15 bp, Homo sapiens
attttctcccattct

SEQ ID NO: 1083081 - DNA, 15 bp, Homo sapiens
aattttctcccattc

SEQ ID NO: 1083082 - DNA, 15 bp, Homo sapiens
aaattttctcccatt

SEQ ID NO: 1083083 - DNA, 15 bp, Homo sapiens
aaaattttctcccat

SEQ ID NO: 1083084 - DNA, 15 bp, Homo sapiens
aaaaattttctccca

SEQ ID NO: 1083085 - DNA, 15 bp, Homo sapiens
caaaaattttctccc

SEQ ID NO: 1083086 - DNA, 15 bp, Homo sapiens
gcaaaaattttctcc

SEQ ID NO: 1083087 - DNA, 15 bp, Homo sapiens
tgcaaaaattttctc

SEQ ID NO: 1083088 - DNA, 15 bp, Homo sapiens
ttgcaaaaattttct

SEQ ID NO: 1083089 - DNA, 15 bp, Homo sapiens
gttgcaaaaattttc

SEQ ID NO: 1083090 - DNA, 15 bp, Homo sapiens
ggttgcaaaaatttt

SEQ ID NO: 1083091 - DNA, 15 bp, Homo sapiens
aggttgcaaaaattt

SEQ ID NO: 1083092 - DNA, 15 bp, Homo sapiens
taggttgcaaaaatt

SEQ ID NO: 1083093 - DNA, 15 bp, Homo sapiens
gtaggttgcaaaaat

SEQ ID NO: 1083094 - DNA, 15 bp, Homo sapiens
agtaggttgcaaaaa

SEQ ID NO: 1083095 - DNA, 15 bp, Homo sapiens
gagtaggttgcaaaa

SEQ ID NO: 1083096 - DNA, 15 bp, Homo sapiens
tgagtaggttgcaaa

SEQ ID NO: 1083097 - DNA, 15 bp, Homo sapiens
atgagtaggttgcaa

SEQ ID NO: 1083098 - DNA, 15 bp, Homo sapiens
gatgagtaggttgca

SEQ ID NO: 1083099 - DNA, 15 bp, Homo sapiens
agatgagtaggttgc

SEQ ID NO: 1083100 - DNA, 15 bp, Homo sapiens
cagatgagtaggttg

SEQ ID NO: 1083101 - DNA, 15 bp, Homo sapiens
tcagatgagtaggtt

SEQ ID NO: 1083102 - DNA, 15 bp, Homo sapiens
gtcagatgagtaggt

SEQ ID NO: 1083103 - DNA, 15 bp, Homo sapiens
tgtcagatgagtagg

SEQ ID NO: 1083104 - DNA, 15 bp, Homo sapiens
ttgtcagatgagtag

SEQ ID NO: 1083105 - DNA, 15 bp, Homo sapiens
tttgtcagatgagta

SEQ ID NO: 1083106 - DNA, 15 bp, Homo sapiens
ctttgtcagatgagt

SEQ ID NO: 1083107 - DNA, 15 bp, Homo sapiens
cctttgtcagatgag

SEQ ID NO: 1083108 - DNA, 15 bp, Homo sapiens
ccctttgtcagatga

SEQ ID NO: 1083109 - DNA, 15 bp, Homo sapiens
ttgtagattctggat

SEQ ID NO: 1083110 - DNA, 15 bp, Homo sapiens
attgtagattctgga

SEQ ID NO: 1083111 - DNA, 15 bp, Homo sapiens
cattgtagattctgg

SEQ ID NO: 1083112 - DNA, 15 bp, Homo sapiens
tcattgtagattctg

SEQ ID NO: 1083113 - DNA, 15 bp, Homo sapiens
ttcattgtagattct

SEQ ID NO: 1083114 - DNA, 15 bp, Homo sapiens
gttcattgtagattc

SEQ ID NO: 1083115 - DNA, 15 bp, Homo sapiens
agttcattgtagatt

SEQ ID NO: 1083116 - DNA, 15 bp, Homo sapiens
gagttcattgtagat

SEQ ID NO: 1083117 - DNA, 15 bp, Homo sapiens
tgagttcattgtaga

SEQ ID NO: 1083118 - DNA, 15 bp, Homo sapiens
ttgagttcattgtag

SEQ ID NO: 1083119 - DNA, 15 bp, Homo sapiens
tttgagttcattgta

SEQ ID NO: 1083120 - DNA, 15 bp, Homo sapiens
gtttgagttcattgt

SEQ ID NO: 1083121 - DNA, 15 bp, Homo sapiens
tgtttgagttcattg

SEQ ID NO: 1083122 - DNA, 15 bp, Homo sapiens
ttgtttgagttcatt

SEQ ID NO: 1083123 - DNA, 15 bp, Homo sapiens
tttgtttgagttcat

SEQ ID NO: 1083124 - DNA, 15 bp, Homo sapiens
atttgtttgagttca

SEQ ID NO: 1083125 - DNA, 15 bp, Homo sapiens
tttttttcttgtaaa

SEQ ID NO: 1083126 - DNA, 15 bp, Homo sapiens
gtttttttcttgtaa

SEQ ID NO: 1083127 - DNA, 15 bp, Homo sapiens
tgtttttttcttgta

SEQ ID NO: 1083128 - DNA, 15 bp, Homo sapiens
ttgtttttttcttgt

SEQ ID NO: 1083129 - DNA, 15 bp, Homo sapiens
tttgtttttttcttg

SEQ ID NO: 1083130 - DNA, 15 bp, Homo sapiens
gtttgtttttttctt

SEQ ID NO: 1083131 - DNA, 15 bp, Homo sapiens
tgtttgtttttttct

SEQ ID NO: 1083132 - DNA, 15 bp, Homo sapiens
ttgtttgtttttttc

SEQ ID NO: 1083133 - DNA, 15 bp, Homo sapiens
gttgtttgttttttt

SEQ ID NO: 1083134 - DNA, 15 bp, Homo sapiens
ggttgtttgtttttt

SEQ ID NO: 1083135 - DNA, 15 bp, Homo sapiens
gggttgtttgttttt

SEQ ID NO: 1083136 - DNA, 15 bp, Homo sapiens
ggggttgtttgtttt

SEQ ID NO: 1083137 - DNA, 15 bp, Homo sapiens
tggggttgtttgttt

SEQ ID NO: 1083138 - DNA, 15 bp, Homo sapiens
atggggttgtttgtt

SEQ ID NO: 1083139 - DNA, 15 bp, Homo sapiens
gatggggttgtttgt

SEQ ID NO: 1083140 - DNA, 15 bp, Homo sapiens
tgatggggttgtttg

SEQ ID NO: 1083141 - DNA, 15 bp, Homo sapiens
ttgatggggttgttt

SEQ ID NO: 1083142 - DNA, 15 bp, Homo sapiens
gttgatggggttgtt

SEQ ID NO: 1083143 - DNA, 15 bp, Homo sapiens
tgttgatggggttgt

SEQ ID NO: 1083144 - DNA, 15 bp, Homo sapiens
ttgttgatggggttg

SEQ ID NO: 1083145 - DNA, 15 bp, Homo sapiens
tttgttgatggggtt

SEQ ID NO: 1083146 - DNA, 15 bp, Homo sapiens
atttgttgatggggt

SEQ ID NO: 1083147 - DNA, 15 bp, Homo sapiens
catttgttgatgggg

SEQ ID NO: 1083148 - DNA, 15 bp, Homo sapiens
ccatttgttgatggg

SEQ ID NO: 1083149 - DNA, 15 bp, Homo sapiens
cccatttgttgatgg

SEQ ID NO: 1083150 - DNA, 15 bp, Homo sapiens
gcccatttgttgatg

SEQ ID NO: 1083151 - DNA, 15 bp, Homo sapiens
cgcccatttgttgat

SEQ ID NO: 1083152 - DNA, 15 bp, Homo sapiens
tcgcccatttgttga

SEQ ID NO: 1083153 - DNA, 15 bp, Homo sapiens
ttcgcccatttgttg

SEQ ID NO: 1083154 - DNA, 15 bp, Homo sapiens
cttcgcccatttgtt

SEQ ID NO: 1083155 - DNA, 15 bp, Homo sapiens
ccttcgcccatttgt

SEQ ID NO: 1083156 - DNA, 15 bp, Homo sapiens
tccttcgcccatttg

SEQ ID NO: 1083157 - DNA, 15 bp, Homo sapiens
atccttcgcccattt

SEQ ID NO: 1083158 - DNA, 15 bp, Homo sapiens
tatccttcgcccatt

SEQ ID NO: 1083159 - DNA, 15 bp, Homo sapiens
atatccttcgcccat

SEQ ID NO: 1083160 - DNA, 15 bp, Homo sapiens
catatccttcgccca

SEQ ID NO: 1083161 - DNA, 15 bp, Homo sapiens
tcatatccttcgccc

SEQ ID NO: 1083162 - DNA, 15 bp, Homo sapiens
ttcatatccttcgcc

SEQ ID NO: 1083163 - DNA, 15 bp, Homo sapiens
gttcatatccttcgc

SEQ ID NO: 1083164 - DNA, 15 bp, Homo sapiens
tgttcatatccttcg

SEQ ID NO: 1083165 - DNA, 15 bp, Homo sapiens
ctgttcatatccttc

SEQ ID NO: 1083166 - DNA, 15 bp, Homo sapiens
tctgttcatatcctt

SEQ ID NO: 1083167 - DNA, 15 bp, Homo sapiens
gtctgttcatatcct

SEQ ID NO: 1083168 - DNA, 15 bp, Homo sapiens
tgtctgttcatatcc

SEQ ID NO: 1083169 - DNA, 15 bp, Homo sapiens
acataaatgtcttct

SEQ ID NO: 1083170 - DNA, 15 bp, Homo sapiens
tacataaatgtcttc

SEQ ID NO: 1083171 - DNA, 15 bp, Homo sapiens
ctacataaatgtctt

SEQ ID NO: 1083172 - DNA, 15 bp, Homo sapiens
gctacataaatgtct

SEQ ID NO: 1083173 - DNA, 15 bp, Homo sapiens
ggctacataaatgtc

SEQ ID NO: 1083174 - DNA, 15 bp, Homo sapiens
tggctacataaatgt

SEQ ID NO: 1083175 - DNA, 15 bp, Homo sapiens
ttggctacataaatg

SEQ ID NO: 1083176 - DNA, 15 bp, Homo sapiens
tttggctacataaat

SEQ ID NO: 1083177 - DNA, 15 bp, Homo sapiens
ttttggctacataaa

SEQ ID NO: 1083178 - DNA, 15 bp, Homo sapiens
tttttggctacataa

SEQ ID NO: 1083179 - DNA, 15 bp, Homo sapiens
ttttttggctacata

SEQ ID NO: 1083180 - DNA, 15 bp, Homo sapiens
gttttttggctacat

SEQ ID NO: 1083181 - DNA, 15 bp, Homo sapiens
tgttttttggctaca

SEQ ID NO: 1083182 - DNA, 15 bp, Homo sapiens
gtgttttttggctac

SEQ ID NO: 1083183 - DNA, 15 bp, Homo sapiens
tgtgttttttggcta

SEQ ID NO: 1083184 - DNA, 15 bp, Homo sapiens
atgtgttttttggct

SEQ ID NO: 1083185 - DNA, 15 bp, Homo sapiens
catgtgttttttggc

SEQ ID NO: 1083186 - DNA, 15 bp, Homo sapiens
tcatgtgttttttgg

SEQ ID NO: 1083187 - DNA, 15 bp, Homo sapiens
ttcatgtgttttttg

SEQ ID NO: 1083188 - DNA, 15 bp, Homo sapiens
tttcatgtgtttttt

SEQ ID NO: 1083189 - DNA, 15 bp, Homo sapiens
ttttcatgtgttttt

SEQ ID NO: 1083190 - DNA, 15 bp, Homo sapiens
tttttcatgtgtttt

SEQ ID NO: 1083191 - DNA, 15 bp, Homo sapiens
ttttttcatgtgttt

SEQ ID NO: 1083192 - DNA, 15 bp, Homo sapiens
attttttcatgtgtt

SEQ ID NO: 1083193 - DNA, 15 bp, Homo sapiens
gatttgcatttctct

SEQ ID NO: 1083194 - DNA, 15 bp, Homo sapiens
tgatttgcatttctc

SEQ ID NO: 1083195 - DNA, 15 bp, Homo sapiens
ttgatttgcatttct

SEQ ID NO: 1083196 - DNA, 15 bp, Homo sapiens
tttgatttgcatttc

SEQ ID NO: 1083197 - DNA, 15 bp, Homo sapiens
ttttgatttgcattt

SEQ ID NO: 1083198 - DNA, 15 bp, Homo sapiens
gttttgatttgcatt

SEQ ID NO: 1083199 - DNA, 15 bp, Homo sapiens
ggttttgatttgcat

SEQ ID NO: 1083200 - DNA, 15 bp, Homo sapiens
tggttttgatttgca

SEQ ID NO: 1083201 - DNA, 15 bp, Homo sapiens
gtggttttgatttgc

SEQ ID NO: 1083202 - DNA, 15 bp, Homo sapiens
tgtggttttgatttg

SEQ ID NO: 1083203 - DNA, 15 bp, Homo sapiens
ttgtggttttgattt

SEQ ID NO: 1083204 - DNA, 15 bp, Homo sapiens
attgtggttttgatt

SEQ ID NO: 1083205 - DNA, 15 bp, Homo sapiens
cattgtggttttgat

SEQ ID NO: 1083206 - DNA, 15 bp, Homo sapiens
tcattgtggttttga

SEQ ID NO: 1083207 - DNA, 15 bp, Homo sapiens
ctcattgtggttttg

SEQ ID NO: 1083208 - DNA, 15 bp, Homo sapiens
tctcattgtggtttt

SEQ ID NO: 1083209 - DNA, 15 bp, Homo sapiens
atctcattgtggttt

SEQ ID NO: 1083210 - DNA, 15 bp, Homo sapiens
tatctcattgtggtt

SEQ ID NO: 1083211 - DNA, 15 bp, Homo sapiens
gtatctcattgtggt

SEQ ID NO: 1083212 - DNA, 15 bp, Homo sapiens
ggtatctcattgtgg

SEQ ID NO: 1083213 - DNA, 15 bp, Homo sapiens
tggtatctcattgtg

SEQ ID NO: 1083214 - DNA, 15 bp, Homo sapiens
atggtatctcattgt

SEQ ID NO: 1083215 - DNA, 15 bp, Homo sapiens
gatggtatctcattg

SEQ ID NO: 1083216 - DNA, 15 bp, Homo sapiens
agatggtatctcatt

SEQ ID NO: 1083217 - DNA, 15 bp, Homo sapiens
gagatggtatctcat

SEQ ID NO: 1083218 - DNA, 15 bp, Homo sapiens
tgagatggtatctca

SEQ ID NO: 1083219 - DNA, 15 bp, Homo sapiens
gtgagatggtatctc

SEQ ID NO: 1083220 - DNA, 15 bp, Homo sapiens
tgtgagatggtatct

SEQ ID NO: 1083221 - DNA, 15 bp, Homo sapiens
gtgtgagatggtatc

SEQ ID NO: 1083222 - DNA, 15 bp, Homo sapiens
accattctaactggt

SEQ ID NO: 1083223 - DNA, 15 bp, Homo sapiens
caccattctaactgg

SEQ ID NO: 1083224 - DNA, 15 bp, Homo sapiens
tcaccattctaactg

SEQ ID NO: 1083225 - DNA, 15 bp, Homo sapiens
atcaccattctaact

SEQ ID NO: 1083226 - DNA, 15 bp, Homo sapiens
gatcaccattctaac

SEQ ID NO: 1083227 - DNA, 15 bp, Homo sapiens
tgatcaccattctaa

SEQ ID NO: 1083228 - DNA, 15 bp, Homo sapiens
atgatcaccattcta

SEQ ID NO: 1083229 - DNA, 15 bp, Homo sapiens
aatgatcaccattct

SEQ ID NO: 1083230 - DNA, 15 bp, Homo sapiens
taatgatcaccattc

SEQ ID NO: 1083231 - DNA, 15 bp, Homo sapiens
ttaatgatcaccatt

SEQ ID NO: 1083232 - DNA, 15 bp, Homo sapiens
tttaatgatcaccat

SEQ ID NO: 1083233 - DNA, 15 bp, Homo sapiens
ttttaatgatcacca

SEQ ID NO: 1083234 - DNA, 15 bp, Homo sapiens
tttttaatgatcacc

SEQ ID NO: 1083235 - DNA, 15 bp, Homo sapiens
ctttttaatgatcac

SEQ ID NO: 1083236 - DNA, 15 bp, Homo sapiens
actttttaatgatca

SEQ ID NO: 1083237 - DNA, 15 bp, Homo sapiens
cctgttgtttcctga

SEQ ID NO: 1083238 - DNA, 15 bp, Homo sapiens
acctgttgtttcctg

SEQ ID NO: 1083239 - DNA, 15 bp, Homo sapiens
cacctgttgtttcct

SEQ ID NO: 1083240 - DNA, 15 bp, Homo sapiens
gcacctgttgtttcc

SEQ ID NO: 1083241 - DNA, 15 bp, Homo sapiens
agcacctgttgtttc

SEQ ID NO: 1083242 - DNA, 15 bp, Homo sapiens
cagcacctgttgttt

SEQ ID NO: 1083243 - DNA, 15 bp, Homo sapiens
ccagcacctgttgtt

SEQ ID NO: 1083244 - DNA, 15 bp, Homo sapiens
tccagcacctgttgt

SEQ ID NO: 1083245 - DNA, 15 bp, Homo sapiens
ctccagcacctgttg

SEQ ID NO: 1083246 - DNA, 15 bp, Homo sapiens
tctccagcacctgtt

SEQ ID NO: 1083247 - DNA, 15 bp, Homo sapiens
ctctccagcacctgt

SEQ ID NO: 1083248 - DNA, 15 bp, Homo sapiens
cctctccagcacctg

SEQ ID NO: 1083249 - DNA, 15 bp, Homo sapiens
tcctctccagcacct

SEQ ID NO: 1083250 - DNA, 15 bp, Homo sapiens
atcctctccagcacc

SEQ ID NO: 1083251 - DNA, 15 bp, Homo sapiens
catcctctccagcac

SEQ ID NO: 1083252 - DNA, 15 bp, Homo sapiens
ccacatcctctccag

SEQ ID NO: 1083253 - DNA, 15 bp, Homo sapiens
tccacatcctctcca

SEQ ID NO: 1083254 - DNA, 15 bp, Homo sapiens
ctccacatcctctcc

SEQ ID NO: 1083255 - DNA, 15 bp, Homo sapiens
tctccacatcctctc

SEQ ID NO: 1083256 - DNA, 15 bp, Homo sapiens
ttctccacatcctct

SEQ ID NO: 1083257 - DNA, 15 bp, Homo sapiens
tttctccacatcctc

SEQ ID NO: 1083258 - DNA, 15 bp, Homo sapiens
atttctccacatcct

SEQ ID NO: 1083259 - DNA, 15 bp, Homo sapiens
tatttctccacatcc

SEQ ID NO: 1083260 - DNA, 15 bp, Homo sapiens
ctatttctccacatc

SEQ ID NO: 1083261 - DNA, 15 bp, Homo sapiens
cctatttctccacat

SEQ ID NO: 1083262 - DNA, 15 bp, Homo sapiens
tcctatttctccaca

SEQ ID NO: 1083263 - DNA, 15 bp, Homo sapiens
ttcctatttctccac

SEQ ID NO: 1083264 - DNA, 15 bp, Homo sapiens
gttcctatttctcca

SEQ ID NO: 1083265 - DNA, 15 bp, Homo sapiens
tgttcctatttctcc

SEQ ID NO: 1083266 - DNA, 15 bp, Homo sapiens
gtgttcctatttctc

SEQ ID NO: 1083267 - DNA, 15 bp, Homo sapiens
gaacagtgtaaaagt

SEQ ID NO: 1083268 - DNA, 15 bp, Homo sapiens
cgaacagtgtaaaag

SEQ ID NO: 1083269 - DNA, 15 bp, Homo sapiens
acgaacagtgtaaaa

SEQ ID NO: 1083270 - DNA, 15 bp, Homo sapiens
cacgaacagtgtaaa

SEQ ID NO: 1083271 - DNA, 15 bp, Homo sapiens
ccacgaacagtgtaa

SEQ ID NO: 1083272 - DNA, 15 bp, Homo sapiens
cccacgaacagtgta

SEQ ID NO: 1083273 - DNA, 15 bp, Homo sapiens
tcccacgaacagtgt

SEQ ID NO: 1083274 - DNA, 15 bp, Homo sapiens
gtcccacgaacagtg

SEQ ID NO: 1083275 - DNA, 15 bp, Homo sapiens
agtcccacgaacagt

SEQ ID NO: 1083276 - DNA, 15 bp, Homo sapiens
cagtcccacgaacag

SEQ ID NO: 1083277 - DNA, 15 bp, Homo sapiens
acagtcccacgaaca

SEQ ID NO: 1083278 - DNA, 15 bp, Homo sapiens
tacagtcccacgaac

SEQ ID NO: 1083279 - DNA, 15 bp, Homo sapiens
ttacagtcccacgaa

SEQ ID NO: 1083280 - DNA, 15 bp, Homo sapiens
tttacagtcccacga

SEQ ID NO: 1083281 - DNA, 15 bp, Homo sapiens
gtttacagtcccacg

SEQ ID NO: 1083282 - DNA, 15 bp, Homo sapiens
ggttgaactagttta

SEQ ID NO: 1083283 - DNA, 15 bp, Homo sapiens
tggttgaactagttt

SEQ ID NO: 1083284 - DNA, 15 bp, Homo sapiens
atggttgaactagtt

SEQ ID NO: 1083285 - DNA, 15 bp, Homo sapiens
aatggttgaactagt

SEQ ID NO: 1083286 - DNA, 15 bp, Homo sapiens
caatggttgaactag

SEQ ID NO: 1083287 - DNA, 15 bp, Homo sapiens
acaatggttgaacta

SEQ ID NO: 1083288 - DNA, 15 bp, Homo sapiens
cacaatggttgaact

SEQ ID NO: 1083289 - DNA, 15 bp, Homo sapiens
ccacaatggttgaac

SEQ ID NO: 1083290 - DNA, 15 bp, Homo sapiens
tccacaatggttgaa

SEQ ID NO: 1083291 - DNA, 15 bp, Homo sapiens
ttccacaatggttga

SEQ ID NO: 1083292 - DNA, 15 bp, Homo sapiens
cttccacaatggttg

SEQ ID NO: 1083293 - DNA, 15 bp, Homo sapiens
acttccacaatggtt

SEQ ID NO: 1083294 - DNA, 15 bp, Homo sapiens
gacttccacaatggt

SEQ ID NO: 1083295 - DNA, 15 bp, Homo sapiens
tgacttccacaatgg

SEQ ID NO: 1083296 - DNA, 15 bp, Homo sapiens
ctgacttccacaatg

SEQ ID NO: 1083297 - DNA, 15 bp, Homo sapiens
actgacttccacaat

SEQ ID NO: 1083298 - DNA, 15 bp, Homo sapiens
cactgacttccacaa

SEQ ID NO: 1083299 - DNA, 15 bp, Homo sapiens
acactgacttccaca

SEQ ID NO: 1083300 - DNA, 15 bp, Homo sapiens
cacactgacttccac

SEQ ID NO: 1083301 - DNA, 15 bp, Homo sapiens
ccacactgacttcca

SEQ ID NO: 1083302 - DNA, 15 bp, Homo sapiens
gccacactgacttcc

SEQ ID NO: 1083303 - DNA, 15 bp, Homo sapiens
cgccacactgacttc

SEQ ID NO: 1083304 - DNA, 15 bp, Homo sapiens
tcgccacactgactt

SEQ ID NO: 1083305 - DNA, 15 bp, Homo sapiens
atcgccacactgact

SEQ ID NO: 1083306 - DNA, 15 bp, Homo sapiens
aatcgccacactgac

SEQ ID NO: 1083307 - DNA, 15 bp, Homo sapiens
gaatcgccacactga

SEQ ID NO: 1083308 - DNA, 15 bp, Homo sapiens
ctgaggaatcgccac

SEQ ID NO: 1083309 - DNA, 15 bp, Homo sapiens
cctgaggaatcgcca

SEQ ID NO: 1083310 - DNA, 15 bp, Homo sapiens
ccctgaggaatcgcc

SEQ ID NO: 1083311 - DNA, 15 bp, Homo sapiens
tccctgaggaatcgc

SEQ ID NO: 1083312 - DNA, 15 bp, Homo sapiens
atccctgaggaatcg

SEQ ID NO: 1083313 - DNA, 15 bp, Homo sapiens
gatccctgaggaatc

SEQ ID NO: 1083314 - DNA, 15 bp, Homo sapiens
agatccctgaggaat

SEQ ID NO: 1083315 - DNA, 15 bp, Homo sapiens
tagatccctgaggaa

SEQ ID NO: 1083316 - DNA, 15 bp, Homo sapiens
ctagatccctgagga

SEQ ID NO: 1083317 - DNA, 15 bp, Homo sapiens
tctagatccctgagg

SEQ ID NO: 1083318 - DNA, 15 bp, Homo sapiens
ttctagatccctgag

SEQ ID NO: 1083319 - DNA, 15 bp, Homo sapiens
gttctagatccctga

SEQ ID NO: 1083320 - DNA, 15 bp, Homo sapiens
agttctagatccctg

SEQ ID NO: 1083321 - DNA, 15 bp, Homo sapiens
cagttctagatccct

SEQ ID NO: 1083322 - DNA, 15 bp, Homo sapiens
ccagttctagatccc

SEQ ID NO: 1083323 - DNA, 15 bp, Homo sapiens
tccagttctagatcc

SEQ ID NO: 1083324 - DNA, 15 bp, Homo sapiens
ttccagttctagatc

SEQ ID NO: 1083325 - DNA, 15 bp, Homo sapiens
tttccagttctagat

SEQ ID NO: 1083326 - DNA, 15 bp, Homo sapiens
atttccagttctaga

SEQ ID NO: 1083327 - DNA, 15 bp, Homo sapiens
tatttccagttctag

SEQ ID NO: 1083328 - DNA, 15 bp, Homo sapiens
gtatttccagttcta

SEQ ID NO: 1083329 - DNA, 15 bp, Homo sapiens
ggtatttccagttct

SEQ ID NO: 1083330 - DNA, 15 bp, Homo sapiens
tggtatttccagttc

SEQ ID NO: 1083331 - DNA, 15 bp, Homo sapiens
atggtatttccagtt

SEQ ID NO: 1083332 - DNA, 15 bp, Homo sapiens
aatggtatttccagt

SEQ ID NO: 1083333 - DNA, 15 bp, Homo sapiens
aaatggtatttccag

SEQ ID NO: 1083334 - DNA, 15 bp, Homo sapiens
caaatggtatttcca

SEQ ID NO: 1083335 - DNA, 15 bp, Homo sapiens
tcaaatggtatttcc

SEQ ID NO: 1083336 - DNA, 15 bp, Homo sapiens
gtcaaatggtatttc

SEQ ID NO: 1083337 - DNA, 15 bp, Homo sapiens
ggtcaaatggtattt

SEQ ID NO: 1083338 - DNA, 15 bp, Homo sapiens
gggtcaaatggtatt

SEQ ID NO: 1083339 - DNA, 15 bp, Homo sapiens
tgggtcaaatggtat

SEQ ID NO: 1083340 - DNA, 15 bp, Homo sapiens
ctgggtcaaatggta

SEQ ID NO: 1083341 - DNA, 15 bp, Homo sapiens
gctgggtcaaatggt

SEQ ID NO: 1083342 - DNA, 15 bp, Homo sapiens
ggctgggtcaaatgg

SEQ ID NO: 1083343 - DNA, 15 bp, Homo sapiens
ggatggctgggtcaa

SEQ ID NO: 1083344 - DNA, 15 bp, Homo sapiens
gggatggctgggtca

SEQ ID NO: 1083345 - DNA, 15 bp, Homo sapiens
tgggatggctgggtc

SEQ ID NO: 1083346 - DNA, 15 bp, Homo sapiens
atgggatggctgggt

SEQ ID NO: 1083347 - DNA, 15 bp, Homo sapiens
aatgggatggctggg

SEQ ID NO: 1083348 - DNA, 15 bp, Homo sapiens
taatgggatggctgg

SEQ ID NO: 1083349 - DNA, 15 bp, Homo sapiens
gtaatgggatggctg

SEQ ID NO: 1083350 - DNA, 15 bp, Homo sapiens
agtaatgggatggct

SEQ ID NO: 1083351 - DNA, 15 bp, Homo sapiens
tagtaatgggatggc

SEQ ID NO: 1083352 - DNA, 15 bp, Homo sapiens
ctagtaatgggatgg

SEQ ID NO: 1083353 - DNA, 15 bp, Homo sapiens
cctagtaatgggatg

SEQ ID NO: 1083354 - DNA, 15 bp, Homo sapiens
acctagtaatgggat

SEQ ID NO: 1083355 - DNA, 15 bp, Homo sapiens
tacctagtaatggga

SEQ ID NO: 1083356 - DNA, 15 bp, Homo sapiens
atacctagtaatggg

SEQ ID NO: 1083357 - DNA, 15 bp, Homo sapiens
tatacctagtaatgg

SEQ ID NO: 1083358 - DNA, 15 bp, Homo sapiens
atatacctagtaatg

SEQ ID NO: 1083359 - DNA, 15 bp, Homo sapiens
tatatacctagtaat

SEQ ID NO: 1083360 - DNA, 15 bp, Homo sapiens
gtatatacctagtaa

SEQ ID NO: 1083361 - DNA, 15 bp, Homo sapiens
ggtatatacctagta

SEQ ID NO: 1083362 - DNA, 15 bp, Homo sapiens
gggtatatacctagt

SEQ ID NO: 1083363 - DNA, 15 bp, Homo sapiens
tgggtatatacctag

SEQ ID NO: 1083364 - DNA, 15 bp, Homo sapiens
ttgggtatataccta

SEQ ID NO: 1083365 - DNA, 15 bp, Homo sapiens
tttgggtatatacct

SEQ ID NO: 1083366 - DNA, 15 bp, Homo sapiens
cttatagcagcatga

SEQ ID NO: 1083367 - DNA, 15 bp, Homo sapiens
ccttatagcagcatg

SEQ ID NO: 1083368 - DNA, 15 bp, Homo sapiens
tccttatagcagcat

SEQ ID NO: 1083369 - DNA, 15 bp, Homo sapiens
gtccttatagcagca

SEQ ID NO: 1083370 - DNA, 15 bp, Homo sapiens
tgtccttatagcagc

SEQ ID NO: 1083371 - DNA, 15 bp, Homo sapiens
gtgtccttatagcag

SEQ ID NO: 1083372 - DNA, 15 bp, Homo sapiens
tgtgtccttatagca

SEQ ID NO: 1083373 - DNA, 15 bp, Homo sapiens
atgtgtccttatagc

SEQ ID NO: 1083374 - DNA, 15 bp, Homo sapiens
catgtgtccttatag

SEQ ID NO: 1083375 - DNA, 15 bp, Homo sapiens
gcatgtgtccttata

SEQ ID NO: 1083376 - DNA, 15 bp, Homo sapiens
tgcatgtgtccttat

SEQ ID NO: 1083377 - DNA, 15 bp, Homo sapiens
gtgcatgtgtcctta

SEQ ID NO: 1083378 - DNA, 15 bp, Homo sapiens
tgtgcatgtgtcctt

SEQ ID NO: 1083379 - DNA, 15 bp, Homo sapiens
gtgtgcatgtgtcct

SEQ ID NO: 1083380 - DNA, 15 bp, Homo sapiens
cgtgtgcatgtgtcc

SEQ ID NO: 1083381 - DNA, 15 bp, Homo sapiens
cagtgccacaataaa

SEQ ID NO: 1083382 - DNA, 15 bp, Homo sapiens
acagtgccacaataa

SEQ ID NO: 1083383 - DNA, 15 bp, Homo sapiens
aacagtgccacaata

SEQ ID NO: 1083384 - DNA, 15 bp, Homo sapiens
gaacagtgccacaat

SEQ ID NO: 1083385 - DNA, 15 bp, Homo sapiens
tgaacagtgccacaa

SEQ ID NO: 1083386 - DNA, 15 bp, Homo sapiens
gtgaacagtgccaca

SEQ ID NO: 1083387 - DNA, 15 bp, Homo sapiens
tgtgaacagtgccac

SEQ ID NO: 1083388 - DNA, 15 bp, Homo sapiens
ttgtgaacagtgcca

SEQ ID NO: 1083389 - DNA, 15 bp, Homo sapiens
attgtgaacagtgcc

SEQ ID NO: 1083390 - DNA, 15 bp, Homo sapiens
tattgtgaacagtgc

SEQ ID NO: 1083391 - DNA, 15 bp, Homo sapiens
ctattgtgaacagtg

SEQ ID NO: 1083392 - DNA, 15 bp, Homo sapiens
gctattgtgaacagt

SEQ ID NO: 1083393 - DNA, 15 bp, Homo sapiens
tgctattgtgaacag

SEQ ID NO: 1083394 - DNA, 15 bp, Homo sapiens
ttgctattgtgaaca

SEQ ID NO: 1083395 - DNA, 15 bp, Homo sapiens
tttgctattgtgaac

SEQ ID NO: 1083396 - DNA, 15 bp, Homo sapiens
gttccaagtctttgc

SEQ ID NO: 1083397 - DNA, 15 bp, Homo sapiens
ggttccaagtctttg

SEQ ID NO: 1083398 - DNA, 15 bp, Homo sapiens
tggttccaagtcttt

SEQ ID NO: 1083399 - DNA, 15 bp, Homo sapiens
ttggttccaagtctt

SEQ ID NO: 1083400 - DNA, 15 bp, Homo sapiens
gttggttccaagtct

SEQ ID NO: 1083401 - DNA, 15 bp, Homo sapiens
ggttggttccaagtc

SEQ ID NO: 1083402 - DNA, 15 bp, Homo sapiens
gggttggttccaagt

SEQ ID NO: 1083403 - DNA, 15 bp, Homo sapiens
tgggttggttccaag

SEQ ID NO: 1083404 - DNA, 15 bp, Homo sapiens
ttgggttggttccaa

SEQ ID NO: 1083405 - DNA, 15 bp, Homo sapiens
tttgggttggttcca

SEQ ID NO: 1083406 - DNA, 15 bp, Homo sapiens
atttgggttggttcc

SEQ ID NO: 1083407 - DNA, 15 bp, Homo sapiens
catttgggttggttc

SEQ ID NO: 1083408 - DNA, 15 bp, Homo sapiens
tcatttgggttggtt

SEQ ID NO: 1083409 - DNA, 15 bp, Homo sapiens
ttcatttgggttggt

SEQ ID NO: 1083410 - DNA, 15 bp, Homo sapiens
gttcatttgggttgg

SEQ ID NO: 1083411 - DNA, 15 bp, Homo sapiens
ggttcatttgggttg

SEQ ID NO: 1083412 - DNA, 15 bp, Homo sapiens
gggttcatttgggtt

SEQ ID NO: 1083413 - DNA, 15 bp, Homo sapiens
agggttcatttgggt

SEQ ID NO: 1083414 - DNA, 15 bp, Homo sapiens
aagggttcatttggg

SEQ ID NO: 1083415 - DNA, 15 bp, Homo sapiens
gaagggttcatttgg

SEQ ID NO: 1083416 - DNA, 15 bp, Homo sapiens
agaagggttcatttg

SEQ ID NO: 1083417 - DNA, 15 bp, Homo sapiens
aagaagggttcattt

SEQ ID NO: 1083418 - DNA, 15 bp, Homo sapiens
aaagaagggttcatt

SEQ ID NO: 1083419 - DNA, 15 bp, Homo sapiens
aaaagaagggttcat

SEQ ID NO: 1083420 - DNA, 15 bp, Homo sapiens
caaaaagaagggttc

SEQ ID NO: 1083421 - DNA, 15 bp, Homo sapiens
gcaaaaagaagggtt

SEQ ID NO: 1083422 - DNA, 15 bp, Homo sapiens
agcaaaaagaagggt

SEQ ID NO: 1083423 - DNA, 15 bp, Homo sapiens
aagcaaaaagaaggg

SEQ ID NO: 1083424 - DNA, 15 bp, Homo sapiens
caagcaaaaagaagg

SEQ ID NO: 1083425 - DNA, 15 bp, Homo sapiens
gcaagcaaaaagaag

SEQ ID NO: 1083426 - DNA, 15 bp, Homo sapiens
cgcaagcaaaaagaa

SEQ ID NO: 1083427 - DNA, 15 bp, Homo sapiens
acgcaagcaaaaaga

SEQ ID NO: 1083428 - DNA, 15 bp, Homo sapiens
aacgcaagcaaaaag

SEQ ID NO: 1083429 - DNA, 15 bp, Homo sapiens
caacgcaagcaaaaa

SEQ ID NO: 1083430 - DNA, 15 bp, Homo sapiens
acaacgcaagcaaaa

SEQ ID NO: 1083431 - DNA, 15 bp, Homo sapiens
aacaacgcaagcaaa

SEQ ID NO: 1083432 - DNA, 15 bp, Homo sapiens
caacaacgcaagcaa

SEQ ID NO: 1083433 - DNA, 15 bp, Homo sapiens
tcaacaacgcaagca

SEQ ID NO: 1083434 - DNA, 15 bp, Homo sapiens
ttcaacaacgcaagc

SEQ ID NO: 1083435 - DNA, 15 bp, Homo sapiens
tttcaacaacgcaag

SEQ ID NO: 1083436 - DNA, 15 bp, Homo sapiens
ctttcaacaacgcaa

SEQ ID NO: 1083437 - DNA, 15 bp, Homo sapiens
tctttcaacaacgca

SEQ ID NO: 1083438 - DNA, 15 bp, Homo sapiens
ttctttcaacaacgc

SEQ ID NO: 1083439 - DNA, 15 bp, Homo sapiens
cttctttcaacaacg

SEQ ID NO: 1083440 - DNA, 15 bp, Homo sapiens
ccttctttcaacaac

SEQ ID NO: 1083441 - DNA, 15 bp, Homo sapiens
gccttctttcaacaa

SEQ ID NO: 1083442 - DNA, 15 bp, Homo sapiens
tgccttctttcaaca

SEQ ID NO: 1083443 - DNA, 15 bp, Homo sapiens
ttgccttctttcaac

SEQ ID NO: 1083444 - DNA, 15 bp, Homo sapiens
cttgccttctttcaa

SEQ ID NO: 1083445 - DNA, 15 bp, Homo sapiens
acttgccttctttca

SEQ ID NO: 1083446 - DNA, 15 bp, Homo sapiens
gacttgccttctttc

SEQ ID NO: 1083447 - DNA, 15 bp, Homo sapiens
agacttgccttcttt

SEQ ID NO: 1083448 - DNA, 15 bp, Homo sapiens
tagacttgccttctt

SEQ ID NO: 1083449 - DNA, 15 bp, Homo sapiens
atagacttgccttct

SEQ ID NO: 1083450 - DNA, 15 bp, Homo sapiens
catagacttgccttc

SEQ ID NO: 1083451 - DNA, 15 bp, Homo sapiens
ccatagacttgcctt

SEQ ID NO: 1083452 - DNA, 15 bp, Homo sapiens
tccatagacttgcct

SEQ ID NO: 1083453 - DNA, 15 bp, Homo sapiens
atccatagacttgcc

SEQ ID NO: 1083454 - DNA, 15 bp, Homo sapiens
tatccatagacttgc

SEQ ID NO: 1083455 - DNA, 15 bp, Homo sapiens
ctatccatagacttg

SEQ ID NO: 1083456 - DNA, 15 bp, Homo sapiens
cctatccatagactt

SEQ ID NO: 1083457 - DNA, 15 bp, Homo sapiens
tcctatccatagact

SEQ ID NO: 1083458 - DNA, 15 bp, Homo sapiens
ttcctatccatagac

SEQ ID NO: 1083459 - DNA, 15 bp, Homo sapiens
attcctatccataga

SEQ ID NO: 1083460 - DNA, 15 bp, Homo sapiens
cattcctatccatag

SEQ ID NO: 1083461 - DNA, 15 bp, Homo sapiens
tcattcctatccata

SEQ ID NO: 1083462 - DNA, 15 bp, Homo sapiens
ctcattcctatccat

SEQ ID NO: 1083463 - DNA, 15 bp, Homo sapiens
actcattcctatcca

SEQ ID NO: 1083464 - DNA, 15 bp, Homo sapiens
cactcattcctatcc

SEQ ID NO: 1083465 - DNA, 15 bp, Homo sapiens
tcactcattcctatc

SEQ ID NO: 1083466 - DNA, 15 bp, Homo sapiens
ctcactcattcctat

SEQ ID NO: 1083467 - DNA, 15 bp, Homo sapiens
cctcactcattccta

SEQ ID NO: 1083468 - DNA, 15 bp, Homo sapiens
gcctcactcattcct

SEQ ID NO: 1083469 - DNA, 15 bp, Homo sapiens
tgcctcactcattcc

SEQ ID NO: 1083470 - DNA, 15 bp, Homo sapiens
gtgcctcactcattc

SEQ ID NO: 1083471 - DNA, 15 bp, Homo sapiens
tgtgcctcactcatt

SEQ ID NO: 1083472 - DNA, 15 bp, Homo sapiens
ctgtgcctcactcat

SEQ ID NO: 1083473 - DNA, 15 bp, Homo sapiens
gctgtgcctcactca

SEQ ID NO: 1083474 - DNA, 15 bp, Homo sapiens
agctgtgcctcactc

SEQ ID NO: 1083475 - DNA, 15 bp, Homo sapiens
gagctgtgcctcact

SEQ ID NO: 1083476 - DNA, 15 bp, Homo sapiens
ggagctgtgcctcac

SEQ ID NO: 1083477 - DNA, 15 bp, Homo sapiens
gggagctgtgcctca

SEQ ID NO: 1083478 - DNA, 15 bp, Homo sapiens
agggagctgtgcctc

SEQ ID NO: 1083479 - DNA, 15 bp, Homo sapiens
cagggagctgtgcct

SEQ ID NO: 1083480 - DNA, 15 bp, Homo sapiens
tcagggagctgtgcc

SEQ ID NO: 1083481 - DNA, 15 bp, Homo sapiens
ctcagggagctgtgc

SEQ ID NO: 1083482 - DNA, 15 bp, Homo sapiens
cctcagggagctgtg

SEQ ID NO: 1083483 - DNA, 15 bp, Homo sapiens
tcctcagggagctgt

SEQ ID NO: 1083484 - DNA, 15 bp, Homo sapiens
atcctcagggagctg

SEQ ID NO: 1083485 - DNA, 15 bp, Homo sapiens
catcctcagggagct

SEQ ID NO: 1083486 - DNA, 15 bp, Homo sapiens
gcatcctcagggagc

SEQ ID NO: 1083487 - DNA, 15 bp, Homo sapiens
ggcatcctcagggag

SEQ ID NO: 1083488 - DNA, 15 bp, Homo sapiens
tggcatcctcaggga

SEQ ID NO: 1083489 - DNA, 15 bp, Homo sapiens
atggcatcctcaggg

SEQ ID NO: 1083490 - DNA, 15 bp, Homo sapiens
tatggcatcctcagg

SEQ ID NO: 1083491 - DNA, 15 bp, Homo sapiens
atatggcatcctcag

SEQ ID NO: 1083492 - DNA, 15 bp, Homo sapiens
gatatggcatcctca

SEQ ID NO: 1083493 - DNA, 15 bp, Homo sapiens
agatatggcatcctc

SEQ ID NO: 1083494 - DNA, 15 bp, Homo sapiens
aagatatggcatcct

SEQ ID NO: 1083495 - DNA, 15 bp, Homo sapiens
caagatatggcatcc

SEQ ID NO: 1083496 - DNA, 15 bp, Homo sapiens
gcaagatatggcatc

SEQ ID NO: 1083497 - DNA, 15 bp, Homo sapiens
ggcaagatatggcat

SEQ ID NO: 1083498 - DNA, 15 bp, Homo sapiens
gggcaagatatggca

SEQ ID NO: 1083499 - DNA, 15 bp, Homo sapiens
cgggcaagatatggc

SEQ ID NO: 1083500 - DNA, 15 bp, Homo sapiens
acgggcaagatatgg

SEQ ID NO: 1083501 - DNA, 15 bp, Homo sapiens
aacgggcaagatatg

SEQ ID NO: 1083502 - DNA, 15 bp, Homo sapiens
aaacgggcaagatat

SEQ ID NO: 1083503 - DNA, 15 bp, Homo sapiens
gaaacgggcaagata

SEQ ID NO: 1083504 - DNA, 15 bp, Homo sapiens
agaaacgggcaagat

SEQ ID NO: 1083505 - DNA, 15 bp, Homo sapiens
aagaaacgggcaaga

SEQ ID NO: 1083506 - DNA, 15 bp, Homo sapiens
caagaaacgggcaag

SEQ ID NO: 1083507 - DNA, 15 bp, Homo sapiens
acaagaaacgggcaa

SEQ ID NO: 1083508 - DNA, 15 bp, Homo sapiens
cacaagaaacgggca

SEQ ID NO: 1083509 - DNA, 15 bp, Homo sapiens
acacaagaaacgggc

SEQ ID NO: 1083510 - DNA, 15 bp, Homo sapiens
tacacaagaaacggg

SEQ ID NO: 1083511 - DNA, 15 bp, Homo sapiens
atacacaagaaacgg

SEQ ID NO: 1083512 - DNA, 15 bp, Homo sapiens
aatacacaagaaacg

SEQ ID NO: 1083513 - DNA, 15 bp, Homo sapiens
taatacacaagaaac

SEQ ID NO: 1083514 - DNA, 15 bp, Homo sapiens
ttaatacacaagaaa

SEQ ID NO: 1083515 - DNA, 15 bp, Homo sapiens
cttaatacacaagaa

SEQ ID NO: 1083516 - DNA, 15 bp, Homo sapiens
acttaatacacaaga

SEQ ID NO: 1083517 - DNA, 15 bp, Homo sapiens
cacttaatacacaag

SEQ ID NO: 1083518 - DNA, 15 bp, Homo sapiens
tcacttaatacacaa

SEQ ID NO: 1083519 - DNA, 15 bp, Homo sapiens
gtcacttaatacaca

SEQ ID NO: 1083520 - DNA, 15 bp, Homo sapiens
tgtcacttaatacac

SEQ ID NO: 1083521 - DNA, 15 bp, Homo sapiens
atgtcacttaataca

SEQ ID NO: 1083522 - DNA, 15 bp, Homo sapiens
gatgtcacttaatac

SEQ ID NO: 1083523 - DNA, 15 bp, Homo sapiens
tgatgtcacttaata

SEQ ID NO: 1083524 - DNA, 15 bp, Homo sapiens
gtgatgtcacttaat

SEQ ID NO: 1083525 - DNA, 15 bp, Homo sapiens
cgtgatgtcacttaa

SEQ ID NO: 1083526 - DNA, 15 bp, Homo sapiens
acgtgatgtcactta

SEQ ID NO: 1083527 - DNA, 15 bp, Homo sapiens
cacgtgatgtcactt

SEQ ID NO: 1083528 - DNA, 15 bp, Homo sapiens
acacgtgatgtcact

SEQ ID NO: 1083529 - DNA, 15 bp, Homo sapiens
aacacgtgatgtcac

SEQ ID NO: 1083530 - DNA, 15 bp, Homo sapiens
taacacgtgatgtca

SEQ ID NO: 1083531 - DNA, 15 bp, Homo sapiens
gtaacacgtgatgtc

SEQ ID NO: 1083532 - DNA, 15 bp, Homo sapiens
ggtaacacgtgatgt

SEQ ID NO: 1083533 - DNA, 15 bp, Homo sapiens
tggtaacacgtgatg

SEQ ID NO: 1083534 - DNA, 15 bp, Homo sapiens
ttggtaacacgtgat

SEQ ID NO: 1083535 - DNA, 15 bp, Homo sapiens
tttggtaacacgtga

SEQ ID NO: 1083536 - DNA, 15 bp, Homo sapiens
gtttggtaacacgtg

SEQ ID NO: 1083537 - DNA, 15 bp, Homo sapiens
agtttggtaacacgt

SEQ ID NO: 1083538 - DNA, 15 bp, Homo sapiens
tagtttggtaacacg

SEQ ID NO: 1083539 - DNA, 15 bp, Homo sapiens
ttagtttggtaacac

SEQ ID NO: 1083540 - DNA, 15 bp, Homo sapiens
tttagtttggtaaca

SEQ ID NO: 1083541 - DNA, 15 bp, Homo sapiens
gtttagtttggtaac

SEQ ID NO: 1083542 - DNA, 15 bp, Homo sapiens
ggtttagtttggtaa

SEQ ID NO: 1083543 - DNA, 15 bp, Homo sapiens
cggtttagtttggta

SEQ ID NO: 1083544 - DNA, 15 bp, Homo sapiens
ccggtttagtttggt

SEQ ID NO: 1083545 - DNA, 15 bp, Homo sapiens
gccggtttagtttgg

SEQ ID NO: 1083546 - DNA, 15 bp, Homo sapiens
agccggtttagtttg

SEQ ID NO: 1083547 - DNA, 15 bp, Homo sapiens
cagccggtttagttt

SEQ ID NO: 1083548 - DNA, 15 bp, Homo sapiens
gcagccggtttagtt

SEQ ID NO: 1083549 - DNA, 15 bp, Homo sapiens
tgcagccggtttagt

SEQ ID NO: 1083550 - DNA, 15 bp, Homo sapiens
atgcagccggtttag

SEQ ID NO: 1083551 - DNA, 15 bp, Homo sapiens
aatgcagccggttta

SEQ ID NO: 1083552 - DNA, 15 bp, Homo sapiens
aaatgcagccggttt

SEQ ID NO: 1083553 - DNA, 15 bp, Homo sapiens
caaatgcagccggtt

SEQ ID NO: 1083554 - DNA, 15 bp, Homo sapiens
gcaaatgcagccggt

SEQ ID NO: 1083555 - DNA, 15 bp, Homo sapiens
ggcaaatgcagccgg

SEQ ID NO: 1083556 - DNA, 15 bp, Homo sapiens
aggcaaatgcagccg

SEQ ID NO: 1083557 - DNA, 15 bp, Homo sapiens
caggcaaatgcagcc

SEQ ID NO: 1083558 - DNA, 15 bp, Homo sapiens
gcaggcaaatgcagc

SEQ ID NO: 1083559 - DNA, 15 bp, Homo sapiens
cgcaggcaaatgcag

SEQ ID NO: 1083560 - DNA, 15 bp, Homo sapiens
gcgcaggcaaatgca

SEQ ID NO: 1083561 - DNA, 15 bp, Homo sapiens
tgcgcaggcaaatgc

SEQ ID NO: 1083562 - DNA, 15 bp, Homo sapiens
gtgcgcaggcaaatg

SEQ ID NO: 1083563 - DNA, 15 bp, Homo sapiens
tgtgcgcaggcaaat

SEQ ID NO: 1083564 - DNA, 15 bp, Homo sapiens
ttgtgcgcaggcaaa

SEQ ID NO: 1083565 - DNA, 15 bp, Homo sapiens
gttgtgcgcaggcaa

SEQ ID NO: 1083566 - DNA, 15 bp, Homo sapiens
tgttgtgcgcaggca

SEQ ID NO: 1083567 - DNA, 15 bp, Homo sapiens
atgttgtgcgcaggc

SEQ ID NO: 1083568 - DNA, 15 bp, Homo sapiens
tatgttgtgcgcagg

SEQ ID NO: 1083569 - DNA, 15 bp, Homo sapiens
ttatgttgtgcgcag

SEQ ID NO: 1083570 - DNA, 15 bp, Homo sapiens
tttatgttgtgcgca

SEQ ID NO: 1083571 - DNA, 15 bp, Homo sapiens
ttttatgttgtgcgc

SEQ ID NO: 1083572 - DNA, 15 bp, Homo sapiens
gttttatgttgtgcg

SEQ ID NO: 1083573 - DNA, 15 bp, Homo sapiens
ggttttatgttgtgc

SEQ ID NO: 1083574 - DNA, 15 bp, Homo sapiens
tggttttatgttgtg

SEQ ID NO: 1083575 - DNA, 15 bp, Homo sapiens
ttggttttatgttgt

SEQ ID NO: 1083576 - DNA, 15 bp, Homo sapiens
tttggttttatgttg

SEQ ID NO: 1083577 - DNA, 15 bp, Homo sapiens
gtttggttttatgtt

SEQ ID NO: 1083578 - DNA, 15 bp, Homo sapiens
tgtttggttttatgt

SEQ ID NO: 1083579 - DNA, 15 bp, Homo sapiens
gtgtttggttttatg

SEQ ID NO: 1083580 - DNA, 15 bp, Homo sapiens
ggtgtttggttttat

SEQ ID NO: 1083581 - DNA, 15 bp, Homo sapiens
gggtgtttggtttta

SEQ ID NO: 1083582 - DNA, 15 bp, Homo sapiens
tgggtgtttggtttt

SEQ ID NO: 1083583 - DNA, 15 bp, Homo sapiens
ttgggtgtttggttt

SEQ ID NO: 1083584 - DNA, 15 bp, Homo sapiens
cttgggtgtttggtt

SEQ ID NO: 1083585 - DNA, 15 bp, Homo sapiens
gcttgggtgtttggt

SEQ ID NO: 1083586 - DNA, 15 bp, Homo sapiens
tgcttgggtgtttgg

SEQ ID NO: 1083587 - DNA, 15 bp, Homo sapiens
atgcttgggtgtttg

SEQ ID NO: 1083588 - DNA, 15 bp, Homo sapiens
aatgcttgggtgttt

SEQ ID NO: 1083589 - DNA, 15 bp, Homo sapiens
caatgcttgggtgtt

SEQ ID NO: 1083590 - DNA, 15 bp, Homo sapiens
ccaatgcttgggtgt

SEQ ID NO: 1083591 - DNA, 15 bp, Homo sapiens
tccaatgcttgggtg

SEQ ID NO: 1083592 - DNA, 15 bp, Homo sapiens
atccaatgcttgggt

SEQ ID NO: 1083593 - DNA, 15 bp, Homo sapiens
aatccaatgcttggg

SEQ ID NO: 1083594 - DNA, 15 bp, Homo sapiens
aaatccaatgcttgg

SEQ ID NO: 1083595 - DNA, 15 bp, Homo sapiens
aaaatccaatgcttg

SEQ ID NO: 1083596 - DNA, 15 bp, Homo sapiens
aaaaatccaatgctt

SEQ ID NO: 1083597 - DNA, 15 bp, Homo sapiens
caaaaatccaatgct

SEQ ID NO: 1083598 - DNA, 15 bp, Homo sapiens
acaaaaatccaatgc

SEQ ID NO: 1083599 - DNA, 15 bp, Homo sapiens
tacaaaaatccaatg

SEQ ID NO: 1083600 - DNA, 15 bp, Homo sapiens
ctacaaaaatccaat

SEQ ID NO: 1083601 - DNA, 15 bp, Homo sapiens
gctacaaaaatccaa

SEQ ID NO: 1083602 - DNA, 15 bp, Homo sapiens
tgctacaaaaatcca

SEQ ID NO: 1083603 - DNA, 15 bp, Homo sapiens
ttgctacaaaaatcc

SEQ ID NO: 1083604 - DNA, 15 bp, Homo sapiens
cttgctacaaaaatc

SEQ ID NO: 1083605 - DNA, 15 bp, Homo sapiens
tcttgctacaaaaat

SEQ ID NO: 1083606 - DNA, 15 bp, Homo sapiens
ttcttgctacaaaaa

SEQ ID NO: 1083607 - DNA, 15 bp, Homo sapiens
tttcttgctacaaaa

SEQ ID NO: 1083608 - DNA, 15 bp, Homo sapiens
ctttcttgctacaaa

SEQ ID NO: 1083609 - DNA, 15 bp, Homo sapiens
tctttcttgctacaa

SEQ ID NO: 1083610 - DNA, 15 bp, Homo sapiens
atctttcttgctaca

SEQ ID NO: 1083611 - DNA, 15 bp, Homo sapiens
catctttcttgctac

SEQ ID NO: 1083612 - DNA, 15 bp, Homo sapiens
acatctttcttgcta

SEQ ID NO: 1083613 - DNA, 15 bp, Homo sapiens
tacatctttcttgct

SEQ ID NO: 1083614 - DNA, 15 bp, Homo sapiens
atacatctttcttgc

SEQ ID NO: 1083615 - DNA, 15 bp, Homo sapiens
aatacatctttcttg

SEQ ID NO: 1083616 - DNA, 15 bp, Homo sapiens
caatacatctttctt

SEQ ID NO: 1083617 - DNA, 15 bp, Homo sapiens
gcaatacatctttct

SEQ ID NO: 1083618 - DNA, 15 bp, Homo sapiens
ggcaatacatctttc

SEQ ID NO: 1083619 - DNA, 15 bp, Homo sapiens
tggcaatacatcttt

SEQ ID NO: 1083620 - DNA, 15 bp, Homo sapiens
ttggcaatacatctt

SEQ ID NO: 1083621 - DNA, 15 bp, Homo sapiens
cttggcaatacatct

SEQ ID NO: 1083622 - DNA, 15 bp, Homo sapiens
gcttggcaatacatc

SEQ ID NO: 1083623 - DNA, 15 bp, Homo sapiens
tgcttggcaatacat

SEQ ID NO: 1083624 - DNA, 15 bp, Homo sapiens
ctgcttggcaataca

SEQ ID NO: 1083625 - DNA, 15 bp, Homo sapiens
gctgcttggcaatac

SEQ ID NO: 1083626 - DNA, 15 bp, Homo sapiens
ggctgcttggcaata

SEQ ID NO: 1083627 - DNA, 15 bp, Homo sapiens
aggctgcttggcaat

SEQ ID NO: 1083628 - DNA, 15 bp, Homo sapiens
aaggctgcttggcaa

SEQ ID NO: 1083629 - DNA, 15 bp, Homo sapiens
caaggctgcttggca

SEQ ID NO: 1083630 - DNA, 15 bp, Homo sapiens
gcaaggctgcttggc

SEQ ID NO: 1083631 - DNA, 15 bp, Homo sapiens
tgcaaggctgcttgg

SEQ ID NO: 1083632 - DNA, 15 bp, Homo sapiens
ttgcaaggctgcttg

SEQ ID NO: 1083633 - DNA, 15 bp, Homo sapiens
cttgcaaggctgctt

SEQ ID NO: 1083634 - DNA, 15 bp, Homo sapiens
ccttgcaaggctgct

SEQ ID NO: 1083635 - DNA, 15 bp, Homo sapiens
cccttgcaaggctgc

SEQ ID NO: 1083636 - DNA, 15 bp, Homo sapiens
ccccttgcaaggctg

SEQ ID NO: 1083637 - DNA, 15 bp, Homo sapiens
tccccttgcaaggct

SEQ ID NO: 1083638 - DNA, 15 bp, Homo sapiens
gtccccttgcaaggc

SEQ ID NO: 1083639 - DNA, 15 bp, Homo sapiens
tgtccccttgcaagg

SEQ ID NO: 1083640 - DNA, 15 bp, Homo sapiens
ctgtccccttgcaag

SEQ ID NO: 1083641 - DNA, 15 bp, Homo sapiens
tctgtccccttgcaa

SEQ ID NO: 1083642 - DNA, 15 bp, Homo sapiens
ttctgtccccttgca

SEQ ID NO: 1083643 - DNA, 15 bp, Homo sapiens
cttctgtccccttgc

SEQ ID NO: 1083644 - DNA, 15 bp, Homo sapiens
tcttctgtccccttg

SEQ ID NO: 1083645 - DNA, 15 bp, Homo sapiens
gtcttctgtcccctt

SEQ ID NO: 1083646 - DNA, 15 bp, Homo sapiens
cgtcttctgtcccct

SEQ ID NO: 1083647 - DNA, 15 bp, Homo sapiens
ccgtcttctgtcccc

SEQ ID NO: 1083648 - DNA, 15 bp, Homo sapiens
cccgtcttctgtccc

SEQ ID NO: 1083649 - DNA, 15 bp, Homo sapiens
gcccgtcttctgtcc

SEQ ID NO: 1083650 - DNA, 15 bp, Homo sapiens
agcccgtcttctgtc

SEQ ID NO: 1083651 - DNA, 15 bp, Homo sapiens
gagcccgtcttctgt

SEQ ID NO: 1083652 - DNA, 15 bp, Homo sapiens
tgagcccgtcttctg

SEQ ID NO: 1083653 - DNA, 15 bp, Homo sapiens
ttgagcccgtcttct

SEQ ID NO: 1083654 - DNA, 15 bp, Homo sapiens
tttgagcccgtcttc

SEQ ID NO: 1083655 - DNA, 15 bp, Homo sapiens
atttgagcccgtctt

SEQ ID NO: 1083656 - DNA, 15 bp, Homo sapiens
gatttgagcccgtct

SEQ ID NO: 1083657 - DNA, 15 bp, Homo sapiens
agatttgagcccgtc

SEQ ID NO: 1083658 - DNA, 15 bp, Homo sapiens
cagatttgagcccgt

SEQ ID NO: 1083659 - DNA, 15 bp, Homo sapiens
acagatttgagcccg

SEQ ID NO: 1083660 - DNA, 15 bp, Homo sapiens
gacagatttgagccc

SEQ ID NO: 1083661 - DNA, 15 bp, Homo sapiens
agacagatttgagcc

SEQ ID NO: 1083662 - DNA, 15 bp, Homo sapiens
gagacagatttgagc

SEQ ID NO: 1083663 - DNA, 15 bp, Homo sapiens
ggagacagatttgag

SEQ ID NO: 1083664 - DNA, 15 bp, Homo sapiens
gggagacagatttga

SEQ ID NO: 1083665 - DNA, 15 bp, Homo sapiens
tgggagacagatttg

SEQ ID NO: 1083666 - DNA, 15 bp, Homo sapiens
ttgggagacagattt

SEQ ID NO: 1083667 - DNA, 15 bp, Homo sapiens
attgggagacagatt

SEQ ID NO: 1083668 - DNA, 15 bp, Homo sapiens
tattgggagacagat

SEQ ID NO: 1083669 - DNA, 15 bp, Homo sapiens
gtattgggagacaga

SEQ ID NO: 1083670 - DNA, 15 bp, Homo sapiens
agtattgggagacag

SEQ ID NO: 1083671 - DNA, 15 bp, Homo sapiens
aagtattgggagaca

SEQ ID NO: 1083672 - DNA, 15 bp, Homo sapiens
caagtattgggagac

SEQ ID NO: 1083673 - DNA, 15 bp, Homo sapiens
gcaagtattgggaga

SEQ ID NO: 1083674 - DNA, 15 bp, Homo sapiens
agcaagtattgggag

SEQ ID NO: 1083675 - DNA, 15 bp, Homo sapiens
aagcaagtattggga

SEQ ID NO: 1083676 - DNA, 15 bp, Homo sapiens
gaagcaagtattggg

SEQ ID NO: 1083677 - DNA, 15 bp, Homo sapiens
cgaagcaagtattgg

SEQ ID NO: 1083678 - DNA, 15 bp, Homo sapiens
gcgaagcaagtattg

SEQ ID NO: 1083679 - DNA, 15 bp, Homo sapiens
tgcgaagcaagtatt

SEQ ID NO: 1083680 - DNA, 15 bp, Homo sapiens
ctgcgaagcaagtat

SEQ ID NO: 1083681 - DNA, 15 bp, Homo sapiens
gctgcgaagcaagta

SEQ ID NO: 1083682 - DNA, 15 bp, Homo sapiens
tgctgcgaagcaagt

SEQ ID NO: 1083683 - DNA, 15 bp, Homo sapiens
ctgctgcgaagcaag

SEQ ID NO: 1083684 - DNA, 15 bp, Homo sapiens
actgctgcgaagcaa

SEQ ID NO: 1083685 - DNA, 15 bp, Homo sapiens
tactgctgcgaagca

SEQ ID NO: 1083686 - DNA, 15 bp, Homo sapiens
ctactgctgcgaagc

SEQ ID NO: 1083687 - DNA, 15 bp, Homo sapiens
tctactgctgcgaag

SEQ ID NO: 1083688 - DNA, 15 bp, Homo sapiens
atctactgctgcgaa

SEQ ID NO: 1083689 - DNA, 15 bp, Homo sapiens
aatctactgctgcga

SEQ ID NO: 1083690 - DNA, 15 bp, Homo sapiens
aaatctactgctgcg

SEQ ID NO: 1083691 - DNA, 15 bp, Homo sapiens
taaatctactgctgc

SEQ ID NO: 1083692 - DNA, 15 bp, Homo sapiens
ttaaatctactgctg

SEQ ID NO: 1083693 - DNA, 15 bp, Homo sapiens
cttaaatctactgct

SEQ ID NO: 1083694 - DNA, 15 bp, Homo sapiens
ccttaaatctactgc

SEQ ID NO: 1083695 - DNA, 15 bp, Homo sapiens
cccttaaatctactg

SEQ ID NO: 1083696 - DNA, 15 bp, Homo sapiens
tcccttaaatctact

SEQ ID NO: 1083697 - DNA, 15 bp, Homo sapiens
ctcccttaaatctac

SEQ ID NO: 1083698 - DNA, 15 bp, Homo sapiens
tctcccttaaatcta

SEQ ID NO: 1083699 - DNA, 15 bp, Homo sapiens
ctctcccttaaatct

SEQ ID NO: 1083700 - DNA, 15 bp, Homo sapiens
tctctcccttaaatc

SEQ ID NO: 1083701 - DNA, 15 bp, Homo sapiens
atctctcccttaaat

SEQ ID NO: 1083702 - DNA, 15 bp, Homo sapiens
aatctctcccttaaa

SEQ ID NO: 1083703 - DNA, 15 bp, Homo sapiens
aaatctctcccttaa

SEQ ID NO: 1083704 - DNA, 15 bp, Homo sapiens
aaaatctctccctta

SEQ ID NO: 1083705 - DNA, 15 bp, Homo sapiens
caaaatctctccctt

SEQ ID NO: 1083706 - DNA, 15 bp, Homo sapiens
ccaaaatctctccct

SEQ ID NO: 1083707 - DNA, 15 bp, Homo sapiens
tccaaaatctctccc

SEQ ID NO: 1083708 - DNA, 15 bp, Homo sapiens
ttccaaaatctctcc

SEQ ID NO: 1083709 - DNA, 15 bp, Homo sapiens
cttccaaaatctctc

SEQ ID NO: 1083710 - DNA, 15 bp, Homo sapiens
acttccaaaatctct

SEQ ID NO: 1083711 - DNA, 15 bp, Homo sapiens
cacttccaaaatctc

SEQ ID NO: 1083712 - DNA, 15 bp, Homo sapiens
ccacttccaaaatct

SEQ ID NO: 1083713 - DNA, 15 bp, Homo sapiens
tccacttccaaaatc

SEQ ID NO: 1083714 - DNA, 15 bp, Homo sapiens
ctccacttccaaaat

SEQ ID NO: 1083715 - DNA, 15 bp, Homo sapiens
actccacttccaaaa

SEQ ID NO: 1083716 - DNA, 15 bp, Homo sapiens
aactccacttccaaa

SEQ ID NO: 1083717 - DNA, 15 bp, Homo sapiens
aaactccacttccaa

SEQ ID NO: 1083718 - DNA, 15 bp, Homo sapiens
gaaactccacttcca

SEQ ID NO: 1083719 - DNA, 15 bp, Homo sapiens
cgaaactccacttcc

SEQ ID NO: 1083720 - DNA, 15 bp, Homo sapiens
ccgaaactccacttc

SEQ ID NO: 1083721 - DNA, 15 bp, Homo sapiens
cccgaaactccactt

SEQ ID NO: 1083722 - DNA, 15 bp, Homo sapiens
gcccgaaactccact

SEQ ID NO: 1083723 - DNA, 15 bp, Homo sapiens
agcccgaaactccac

SEQ ID NO: 1083724 - DNA, 15 bp, Homo sapiens
cagcccgaaactcca

SEQ ID NO: 1083725 - DNA, 15 bp, Homo sapiens
ccagcccgaaactcc

SEQ ID NO: 1083726 - DNA, 15 bp, Homo sapiens
tccagcccgaaactc

SEQ ID NO: 1083727 - DNA, 15 bp, Homo sapiens
gtccagcccgaaact

SEQ ID NO: 1083728 - DNA, 15 bp, Homo sapiens
cgtccagcccgaaac

SEQ ID NO: 1083729 - DNA, 15 bp, Homo sapiens
ccgtccagcccgaaa

SEQ ID NO: 1083730 - DNA, 15 bp, Homo sapiens
accgtccagcccgaa

SEQ ID NO: 1083731 - DNA, 15 bp, Homo sapiens
caccgtccagcccga

SEQ ID NO: 1083732 - DNA, 15 bp, Homo sapiens
tcaccgtccagcccg

SEQ ID NO: 1083733 - DNA, 15 bp, Homo sapiens
atcaccgtccagccc

SEQ ID NO: 1083734 - DNA, 15 bp, Homo sapiens
aatcaccgtccagcc

SEQ ID NO: 1083735 - DNA, 15 bp, Homo sapiens
caatcaccgtccagc

SEQ ID NO: 1083736 - DNA, 15 bp, Homo sapiens
ccaatcaccgtccag

SEQ ID NO: 1083737 - DNA, 15 bp, Homo sapiens
gccaatcaccgtcca

SEQ ID NO: 1083738 - DNA, 15 bp, Homo sapiens
agccaatcaccgtcc

SEQ ID NO: 1083739 - DNA, 15 bp, Homo sapiens
cagccaatcaccgtc

SEQ ID NO: 1083740 - DNA, 15 bp, Homo sapiens
tcagccaatcaccgt

SEQ ID NO: 1083741 - DNA, 15 bp, Homo sapiens
ttcagccaatcaccg

SEQ ID NO: 1083742 - DNA, 15 bp, Homo sapiens
tttcagccaatcacc

SEQ ID NO: 1083743 - DNA, 15 bp, Homo sapiens
gtttcagccaatcac

SEQ ID NO: 1083744 - DNA, 15 bp, Homo sapiens
cgtttcagccaatca

SEQ ID NO: 1083745 - DNA, 15 bp, Homo sapiens
tcgtttcagccaatc

SEQ ID NO: 1083746 - DNA, 15 bp, Homo sapiens
ttcgtttcagccaat

SEQ ID NO: 1083747 - DNA, 15 bp, Homo sapiens
cttcgtttcagccaa

SEQ ID NO: 1083748 - DNA, 15 bp, Homo sapiens
tcttcgtttcagcca

SEQ ID NO: 1083749 - DNA, 15 bp, Homo sapiens
ttcttcgtttcagcc

SEQ ID NO: 1083750 - DNA, 15 bp, Homo sapiens
cttcttcgtttcagc

SEQ ID NO: 1083751 - DNA, 15 bp, Homo sapiens
acttcttcgtttcag

SEQ ID NO: 1083752 - DNA, 15 bp, Homo sapiens
cacttcttcgtttca

SEQ ID NO: 1083753 - DNA, 15 bp, Homo sapiens
acacttcttcgtttc

SEQ ID NO: 1083754 - DNA, 15 bp, Homo sapiens
aacacttcttcgttt

SEQ ID NO: 1083755 - DNA, 15 bp, Homo sapiens
aaacacttcttcgtt

SEQ ID NO: 1083756 - DNA, 15 bp, Homo sapiens
taaacacttcttcgt

SEQ ID NO: 1083757 - DNA, 15 bp, Homo sapiens
ctaaacacttcttcg

SEQ ID NO: 1083758 - DNA, 15 bp, Homo sapiens
tctaaacacttcttc

SEQ ID NO: 1083759 - DNA, 15 bp, Homo sapiens
ttctaaacacttctt

SEQ ID NO: 1083760 - DNA, 15 bp, Homo sapiens
tttctaaacacttct

SEQ ID NO: 1083761 - DNA, 15 bp, Homo sapiens
ttttctaaacacttc

SEQ ID NO: 1083762 - DNA, 15 bp, Homo sapiens
attttctaaacactt

SEQ ID NO: 1083763 - DNA, 15 bp, Homo sapiens
gattttctaaacact

SEQ ID NO: 1083764 - DNA, 15 bp, Homo sapiens
agattttctaaacac

SEQ ID NO: 1083765 - DNA, 15 bp, Homo sapiens
gagattttctaaaca

SEQ ID NO: 1083766 - DNA, 15 bp, Homo sapiens
agagattttctaaac

SEQ ID NO: 1083767 - DNA, 15 bp, Homo sapiens
aagagattttctaaa

SEQ ID NO: 1083768 - DNA, 15 bp, Homo sapiens
caagagattttctaa

SEQ ID NO: 1083769 - DNA, 15 bp, Homo sapiens
ccaagagattttcta

SEQ ID NO: 1083770 - DNA, 15 bp, Homo sapiens
accaagagattttct

SEQ ID NO: 1083771 - DNA, 15 bp, Homo sapiens
gaccaagagattttc

SEQ ID NO: 1083772 - DNA, 15 bp, Homo sapiens
tgaccaagagatttt

SEQ ID NO: 1083773 - DNA, 15 bp, Homo sapiens
atgaccaagagattt

SEQ ID NO: 1083774 - DNA, 15 bp, Homo sapiens
catgaccaagagatt

SEQ ID NO: 1083775 - DNA, 15 bp, Homo sapiens
tcatgaccaagagat

SEQ ID NO: 1083776 - DNA, 15 bp, Homo sapiens
ctcatgaccaagaga

SEQ ID NO: 1083777 - DNA, 15 bp, Homo sapiens
gctcatgaccaagag

SEQ ID NO: 1083778 - DNA, 15 bp, Homo sapiens
agctcatgaccaaga

SEQ ID NO: 1083779 - DNA, 15 bp, Homo sapiens
cagctcatgaccaag

SEQ ID NO: 1083780 - DNA, 15 bp, Homo sapiens
acagctcatgaccaa

SEQ ID NO: 1083781 - DNA, 15 bp, Homo sapiens
aacagctcatgacca

SEQ ID NO: 1083782 - DNA, 15 bp, Homo sapiens
caacagctcatgacc

SEQ ID NO: 1083783 - DNA, 15 bp, Homo sapiens
gcaacagctcatgac

SEQ ID NO: 1083784 - DNA, 15 bp, Homo sapiens
agcaacagctcatga

SEQ ID NO: 1083785 - DNA, 15 bp, Homo sapiens
aagcaacagctcatg

SEQ ID NO: 1083786 - DNA, 15 bp, Homo sapiens
gaagcaacagctcat

SEQ ID NO: 1083787 - DNA, 15 bp, Homo sapiens
agaagcaacagctca

SEQ ID NO: 1083788 - DNA, 15 bp, Homo sapiens
aagaagcaacagctc

SEQ ID NO: 1083789 - DNA, 15 bp, Homo sapiens
gaagaagcaacagct

SEQ ID NO: 1083790 - DNA, 15 bp, Homo sapiens
tgaagaagcaacagc

SEQ ID NO: 1083791 - DNA, 15 bp, Homo sapiens
atgaagaagcaacag

SEQ ID NO: 1083792 - DNA, 15 bp, Homo sapiens
catgaagaagcaaca

SEQ ID NO: 1083793 - DNA, 15 bp, Homo sapiens
gcatgaagaagcaac

SEQ ID NO: 1083794 - DNA, 15 bp, Homo sapiens
agcatgaagaagcaa

SEQ ID NO: 1083795 - DNA, 15 bp, Homo sapiens
cagcatgaagaagca

SEQ ID NO: 1083796 - DNA, 15 bp, Homo sapiens
gcagcatgaagaagc

SEQ ID NO: 1083797 - DNA, 15 bp, Homo sapiens
agcagcatgaagaag

SEQ ID NO: 1083798 - DNA, 15 bp, Homo sapiens
aagcagcatgaagaa

SEQ ID NO: 1083799 - DNA, 15 bp, Homo sapiens
gaagcagcatgaaga

SEQ ID NO: 1083800 - DNA, 15 bp, Homo sapiens
tgaagcagcatgaag

SEQ ID NO: 1083801 - DNA, 15 bp, Homo sapiens
ttgaagcagcatgaa

SEQ ID NO: 1083802 - DNA, 15 bp, Homo sapiens
cttgaagcagcatga

SEQ ID NO: 1083803 - DNA, 15 bp, Homo sapiens
ccttgaagcagcatg

SEQ ID NO: 1083804 - DNA, 15 bp, Homo sapiens
cccttgaagcagcat

SEQ ID NO: 1083805 - DNA, 15 bp, Homo sapiens
acccttgaagcagca

SEQ ID NO: 1083806 - DNA, 15 bp, Homo sapiens
gacccttgaagcagc

SEQ ID NO: 1083807 - DNA, 15 bp, Homo sapiens
tgacccttgaagcag

SEQ ID NO: 1083808 - DNA, 15 bp, Homo sapiens
gtgacccttgaagca

SEQ ID NO: 1083809 - DNA, 15 bp, Homo sapiens
tgtgacccttgaagc

SEQ ID NO: 1083810 - DNA, 15 bp, Homo sapiens
atgtgacccttgaag

SEQ ID NO: 1083811 - DNA, 15 bp, Homo sapiens
catgtgacccttgaa

SEQ ID NO: 1083812 - DNA, 15 bp, Homo sapiens
gcatgtgacccttga

SEQ ID NO: 1083813 - DNA, 15 bp, Homo sapiens
tgcatgtgacccttg

SEQ ID NO: 1083814 - DNA, 15 bp, Homo sapiens
ctgcatgtgaccctt

SEQ ID NO: 1083815 - DNA, 15 bp, Homo sapiens
tctgcatgtgaccct

SEQ ID NO: 1083816 - DNA, 15 bp, Homo sapiens
atctgcatgtgaccc

SEQ ID NO: 1083817 - DNA, 15 bp, Homo sapiens
aatctgcatgtgacc

SEQ ID NO: 1083818 - DNA, 15 bp, Homo sapiens
gaatctgcatgtgac

SEQ ID NO: 1083819 - DNA, 15 bp, Homo sapiens
tgaatctgcatgtga

SEQ ID NO: 1083820 - DNA, 15 bp, Homo sapiens
ctgaatctgcatgtg

SEQ ID NO: 1083821 - DNA, 15 bp, Homo sapiens
cctgaatctgcatgt

SEQ ID NO: 1083822 - DNA, 15 bp, Homo sapiens
tcctgaatctgcatg

SEQ ID NO: 1083823 - DNA, 15 bp, Homo sapiens
ctcctgaatctgcat

SEQ ID NO: 1083824 - DNA, 15 bp, Homo sapiens
cctcctgaatctgca

SEQ ID NO: 1083825 - DNA, 15 bp, Homo sapiens
acctcctgaatctgc

SEQ ID NO: 1083826 - DNA, 15 bp, Homo sapiens
cacctcctgaatctg

SEQ ID NO: 1083827 - DNA, 15 bp, Homo sapiens
ccacctcctgaatct

SEQ ID NO: 1083828 - DNA, 15 bp, Homo sapiens
accacctcctgaatc

SEQ ID NO: 1083829 - DNA, 15 bp, Homo sapiens
taccacctcctgaat

SEQ ID NO: 1083830 - DNA, 15 bp, Homo sapiens
ataccacctcctgaa

SEQ ID NO: 1083831 - DNA, 15 bp, Homo sapiens
tataccacctcctga

SEQ ID NO: 1083832 - DNA, 15 bp, Homo sapiens
ttataccacctcctg

SEQ ID NO: 1083833 - DNA, 15 bp, Homo sapiens
tttataccacctcct

SEQ ID NO: 1083834 - DNA, 15 bp, Homo sapiens
ttttataccacctcc

SEQ ID NO: 1083835 - DNA, 15 bp, Homo sapiens
gttttataccacctc

SEQ ID NO: 1083836 - DNA, 15 bp, Homo sapiens
tgttttataccacct

SEQ ID NO: 1083837 - DNA, 15 bp, Homo sapiens
ttgttttataccacc

SEQ ID NO: 1083838 - DNA, 15 bp, Homo sapiens
cttgttttataccac

SEQ ID NO: 1083839 - DNA, 15 bp, Homo sapiens
gcttgttttatacca

SEQ ID NO: 1083840 - DNA, 15 bp, Homo sapiens
agcttgttttatacc

SEQ ID NO: 1083841 - DNA, 15 bp, Homo sapiens
cagcttgttttatac

SEQ ID NO: 1083842 - DNA, 15 bp, Homo sapiens
acagcttgttttata

SEQ ID NO: 1083843 - DNA, 15 bp, Homo sapiens
cacagcttgttttat

SEQ ID NO: 1083844 - DNA, 15 bp, Homo sapiens
ccacagcttgtttta

SEQ ID NO: 1083845 - DNA, 15 bp, Homo sapiens
cccacagcttgtttt

SEQ ID NO: 1083846 - DNA, 15 bp, Homo sapiens
tcccacagcttgttt

SEQ ID NO: 1083847 - DNA, 15 bp, Homo sapiens
ttcccacagcttgtt

SEQ ID NO: 1083848 - DNA, 15 bp, Homo sapiens
attcccacagcttgt

SEQ ID NO: 1083849 - DNA, 15 bp, Homo sapiens
aattcccacagcttg

SEQ ID NO: 1083850 - DNA, 15 bp, Homo sapiens
aaattcccacagctt

SEQ ID NO: 1083851 - DNA, 15 bp, Homo sapiens
caaattcccacagct

SEQ ID NO: 1083852 - DNA, 15 bp, Homo sapiens
ccaaattcccacagc

SEQ ID NO: 1083853 - DNA, 15 bp, Homo sapiens
cccaaattcccacag

SEQ ID NO: 1083854 - DNA, 15 bp, Homo sapiens
gcccaaattcccaca

SEQ ID NO: 1083855 - DNA, 15 bp, Homo sapiens
agcccaaattcccac

SEQ ID NO: 1083856 - DNA, 15 bp, Homo sapiens
cagcccaaattccca

SEQ ID NO: 1083857 - DNA, 15 bp, Homo sapiens
acagcccaaattccc

SEQ ID NO: 1083858 - DNA, 15 bp, Homo sapiens
cacagcccaaattcc

SEQ ID NO: 1083859 - DNA, 15 bp, Homo sapiens
tcacagcccaaattc

SEQ ID NO: 1083860 - DNA, 15 bp, Homo sapiens
gtcacagcccaaatt

SEQ ID NO: 1083861 - DNA, 15 bp, Homo sapiens
tgtcacagcccaaat

SEQ ID NO: 1083862 - DNA, 15 bp, Homo sapiens
atgtcacagcccaaa

SEQ ID NO: 1083863 - DNA, 15 bp, Homo sapiens
gatgtcacagcccaa

SEQ ID NO: 1083864 - DNA, 15 bp, Homo sapiens
tgatgtcacagccca

SEQ ID NO: 1083865 - DNA, 15 bp, Homo sapiens
ttgatgtcacagccc

SEQ ID NO: 1083866 - DNA, 15 bp, Homo sapiens
tttgatgtcacagcc

SEQ ID NO: 1083867 - DNA, 15 bp, Homo sapiens
ctttgatgtcacagc

SEQ ID NO: 1083868 - DNA, 15 bp, Homo sapiens
cctttgatgtcacag

SEQ ID NO: 1083869 - DNA, 15 bp, Homo sapiens
ccctttgatgtcaca

SEQ ID NO: 1083870 - DNA, 15 bp, Homo sapiens
gccctttgatgtcac

SEQ ID NO: 1083871 - DNA, 15 bp, Homo sapiens
ggccctttgatgtca

SEQ ID NO: 1083872 - DNA, 15 bp, Homo sapiens
cggccctttgatgtc

SEQ ID NO: 1083873 - DNA, 15 bp, Homo sapiens
gcggccctttgatgt

SEQ ID NO: 1083874 - DNA, 15 bp, Homo sapiens
agcggccctttgatg

SEQ ID NO: 1083875 - DNA, 15 bp, Homo sapiens
gagcggccctttgat

SEQ ID NO: 1083876 - DNA, 15 bp, Homo sapiens
ggagcggccctttga

SEQ ID NO: 1083877 - DNA, 15 bp, Homo sapiens
aggagcggccctttg

SEQ ID NO: 1083878 - DNA, 15 bp, Homo sapiens
gaggagcggcccttt

SEQ ID NO: 1083879 - DNA, 15 bp, Homo sapiens
cgaggagcggccctt

SEQ ID NO: 1083880 - DNA, 15 bp, Homo sapiens
ccgaggagcggccct

SEQ ID NO: 1083881 - DNA, 15 bp, Homo sapiens
cccgaggagcggccc

SEQ ID NO: 1083882 - DNA, 15 bp, Homo sapiens
gcccgaggagcggcc

SEQ ID NO: 1083883 - DNA, 15 bp, Homo sapiens
agcccgaggagcggc

SEQ ID NO: 1083884 - DNA, 15 bp, Homo sapiens
tagcccgaggagcgg

SEQ ID NO: 1083885 - DNA, 15 bp, Homo sapiens
ctagcccgaggagcg

SEQ ID NO: 1083886 - DNA, 15 bp, Homo sapiens
actagcccgaggagc

SEQ ID NO: 1083887 - DNA, 15 bp, Homo sapiens
tactagcccgaggag

SEQ ID NO: 1083888 - DNA, 15 bp, Homo sapiens
ttactagcccgagga

SEQ ID NO: 1083889 - DNA, 15 bp, Homo sapiens
cttactagcccgagg

SEQ ID NO: 1083890 - DNA, 15 bp, Homo sapiens
acttactagcccgag

SEQ ID NO: 1083891 - DNA, 15 bp, Homo sapiens
gacttactagcccga

SEQ ID NO: 1083892 - DNA, 15 bp, Homo sapiens
agacttactagcccg

SEQ ID NO: 1083893 - DNA, 15 bp, Homo sapiens
tagacttactagccc

SEQ ID NO: 1083894 - DNA, 15 bp, Homo sapiens
atagacttactagcc

SEQ ID NO: 1083895 - DNA, 15 bp, Homo sapiens
aatagacttactagc

SEQ ID NO: 1083896 - DNA, 15 bp, Homo sapiens
aaatagacttactag

SEQ ID NO: 1083897 - DNA, 15 bp, Homo sapiens
aaaatagacttacta

SEQ ID NO: 1083898 - DNA, 15 bp, Homo sapiens
caaaatagacttact

SEQ ID NO: 1083899 - DNA, 15 bp, Homo sapiens
gcaaaatagacttac

SEQ ID NO: 1083900 - DNA, 15 bp, Homo sapiens
tgcaaaatagactta

SEQ ID NO: 1083901 - DNA, 15 bp, Homo sapiens
gtgcaaaatagactt

SEQ ID NO: 1083902 - DNA, 15 bp, Homo sapiens
tgtgcaaaatagact

SEQ ID NO: 1083903 - DNA, 15 bp, Homo sapiens
ctgtgcaaaatagac

SEQ ID NO: 1083904 - DNA, 15 bp, Homo sapiens
cctgtgcaaaataga

SEQ ID NO: 1083905 - DNA, 15 bp, Homo sapiens
gcctgtgcaaaatag

SEQ ID NO: 1083906 - DNA, 15 bp, Homo sapiens
agcctgtgcaaaata

SEQ ID NO: 1083907 - DNA, 15 bp, Homo sapiens
gagcctgtgcaaaat

SEQ ID NO: 1083908 - DNA, 15 bp, Homo sapiens
ggagcctgtgcaaaa

SEQ ID NO: 1083909 - DNA, 15 bp, Homo sapiens
tggagcctgtgcaaa

SEQ ID NO: 1083910 - DNA, 15 bp, Homo sapiens
ctggagcctgtgcaa

SEQ ID NO: 1083911 - DNA, 15 bp, Homo sapiens
actggagcctgtgca

SEQ ID NO: 1083912 - DNA, 15 bp, Homo sapiens
gactggagcctgtgc

SEQ ID NO: 1083913 - DNA, 15 bp, Homo sapiens
tgactggagcctgtg

SEQ ID NO: 1083914 - DNA, 15 bp, Homo sapiens
ctgactggagcctgt

SEQ ID NO: 1083915 - DNA, 15 bp, Homo sapiens
gctgactggagcctg

SEQ ID NO: 1083916 - DNA, 15 bp, Homo sapiens
ggctgactggagcct

SEQ ID NO: 1083917 - DNA, 15 bp, Homo sapiens
tggctgactggagcc

SEQ ID NO: 1083918 - DNA, 15 bp, Homo sapiens
atggctgactggagc

SEQ ID NO: 1083919 - DNA, 15 bp, Homo sapiens
tatggctgactggag

SEQ ID NO: 1083920 - DNA, 15 bp, Homo sapiens
atatggctgactgga

SEQ ID NO: 1083921 - DNA, 15 bp, Homo sapiens
aatatggctgactgg

SEQ ID NO: 1083922 - DNA, 15 bp, Homo sapiens
caatatggctgactg

SEQ ID NO: 1083923 - DNA, 15 bp, Homo sapiens
ccaatatggctgact

SEQ ID NO: 1083924 - DNA, 15 bp, Homo sapiens
accaatatggctgac

SEQ ID NO: 1083925 - DNA, 15 bp, Homo sapiens
aaccaatatggctga

SEQ ID NO: 1083926 - DNA, 15 bp, Homo sapiens
gaaccaatatggctg

SEQ ID NO: 1083927 - DNA, 15 bp, Homo sapiens
ggaaccaatatggct

SEQ ID NO: 1083928 - DNA, 15 bp, Homo sapiens
tggaaccaatatggc

SEQ ID NO: 1083929 - DNA, 15 bp, Homo sapiens
ttggaaccaatatgg

SEQ ID NO: 1083930 - DNA, 15 bp, Homo sapiens
gttggaaccaatatg

SEQ ID NO: 1083931 - DNA, 15 bp, Homo sapiens
ggttggaaccaatat

SEQ ID NO: 1083932 - DNA, 15 bp, Homo sapiens
aggttggaaccaata

SEQ ID NO: 1083933 - DNA, 15 bp, Homo sapiens
caggttggaaccaat

SEQ ID NO: 1083934 - DNA, 15 bp, Homo sapiens
acaggttggaaccaa

SEQ ID NO: 1083935 - DNA, 15 bp, Homo sapiens
aacaggttggaacca

SEQ ID NO: 1083936 - DNA, 15 bp, Homo sapiens
gaacaggttggaacc

SEQ ID NO: 1083937 - DNA, 15 bp, Homo sapiens
ggaacaggttggaac

SEQ ID NO: 1083938 - DNA, 15 bp, Homo sapiens
tggaacaggttggaa

SEQ ID NO: 1083939 - DNA, 15 bp, Homo sapiens
ctggaacaggttgga

SEQ ID NO: 1083940 - DNA, 15 bp, Homo sapiens
gctggaacaggttgg

SEQ ID NO: 1083941 - DNA, 15 bp, Homo sapiens
tgctggaacaggttg

SEQ ID NO: 1083942 - DNA, 15 bp, Homo sapiens
ttgctggaacaggtt

SEQ ID NO: 1083943 - DNA, 15 bp, Homo sapiens
cttgctggaacaggt

SEQ ID NO: 1083944 - DNA, 15 bp, Homo sapiens
acttgctggaacagg

SEQ ID NO: 1083945 - DNA, 15 bp, Homo sapiens
aacttgctggaacag

SEQ ID NO: 1083946 - DNA, 15 bp, Homo sapiens
caacttgctggaaca

SEQ ID NO: 1083947 - DNA, 15 bp, Homo sapiens
acaacttgctggaac

SEQ ID NO: 1083948 - DNA, 15 bp, Homo sapiens
tacaacttgctggaa

SEQ ID NO: 1083949 - DNA, 15 bp, Homo sapiens
atacaacttgctgga

SEQ ID NO: 1083950 - DNA, 15 bp, Homo sapiens
gcttatacaacttgc

SEQ ID NO: 1083951 - DNA, 15 bp, Homo sapiens
tgcttatacaacttg

SEQ ID NO: 1083952 - DNA, 15 bp, Homo sapiens
ctgcttatacaactt

SEQ ID NO: 1083953 - DNA, 15 bp, Homo sapiens
tctgcttatacaact

SEQ ID NO: 1083954 - DNA, 15 bp, Homo sapiens
ctctgcttatacaac

SEQ ID NO: 1083955 - DNA, 15 bp, Homo sapiens
cctctgcttatacaa

SEQ ID NO: 1083956 - DNA, 15 bp, Homo sapiens
ccctctgcttataca

SEQ ID NO: 1083957 - DNA, 15 bp, Homo sapiens
cccctctgcttatac

SEQ ID NO: 1083958 - DNA, 15 bp, Homo sapiens
tcccctctgcttata

SEQ ID NO: 1083959 - DNA, 15 bp, Homo sapiens
atcccctctgcttat

SEQ ID NO: 1083960 - DNA, 15 bp, Homo sapiens
aatcccctctgctta

SEQ ID NO: 1083961 - DNA, 15 bp, Homo sapiens
taatcccctctgctt

SEQ ID NO: 1083962 - DNA, 15 bp, Homo sapiens
ataatcccctctgct

SEQ ID NO: 1083963 - DNA, 15 bp, Homo sapiens
tataatcccctctgc

SEQ ID NO: 1083964 - DNA, 15 bp, Homo sapiens
ctataatcccctctg

SEQ ID NO: 1083965 - DNA, 15 bp, Homo sapiens
gctataatcccctct

SEQ ID NO: 1083966 - DNA, 15 bp, Homo sapiens
tgctataatcccctc

SEQ ID NO: 1083967 - DNA, 15 bp, Homo sapiens
ttgctataatcccct

SEQ ID NO: 1083968 - DNA, 15 bp, Homo sapiens
tttgctataatcccc

SEQ ID NO: 1083969 - DNA, 15 bp, Homo sapiens
gtttgctataatccc

SEQ ID NO: 1083970 - DNA, 15 bp, Homo sapiens
agtttgctataatcc

SEQ ID NO: 1083971 - DNA, 15 bp, Homo sapiens
cagtttgctataatc

SEQ ID NO: 1083972 - DNA, 15 bp, Homo sapiens
acagtttgctataat

SEQ ID NO: 1083973 - DNA, 15 bp, Homo sapiens
aacagtttgctataa

SEQ ID NO: 1083974 - DNA, 15 bp, Homo sapiens
aaacagtttgctata

SEQ ID NO: 1083975 - DNA, 15 bp, Homo sapiens
gaaacagtttgctat

SEQ ID NO: 1083976 - DNA, 15 bp, Homo sapiens
ggaaacagtttgcta

SEQ ID NO: 1083977 - DNA, 15 bp, Homo sapiens
aggaaacagtttgct

SEQ ID NO: 1083978 - DNA, 15 bp, Homo sapiens
aaggaaacagtttgc

SEQ ID NO: 1083979 - DNA, 15 bp, Homo sapiens
taaggaaacagtttg

SEQ ID NO: 1083980 - DNA, 15 bp, Homo sapiens
ataaggaaacagttt

SEQ ID NO: 1083981 - DNA, 15 bp, Homo sapiens
gataaggaaacagtt

SEQ ID NO: 1083982 - DNA, 15 bp, Homo sapiens
cgataaggaaacagt

SEQ ID NO: 1083983 - DNA, 15 bp, Homo sapiens
ccgataaggaaacag

SEQ ID NO: 1083984 - DNA, 15 bp, Homo sapiens
gccgataaggaaaca

SEQ ID NO: 1083985 - DNA, 15 bp, Homo sapiens
agccgataaggaaac

SEQ ID NO: 1083986 - DNA, 15 bp, Homo sapiens
cagccgataaggaaa

SEQ ID NO: 1083987 - DNA, 15 bp, Homo sapiens
gcagccgataaggaa

SEQ ID NO: 1083988 - DNA, 15 bp, Homo sapiens
ggcagccgataagga

SEQ ID NO: 1083989 - DNA, 15 bp, Homo sapiens
gggcagccgataagg

SEQ ID NO: 1083990 - DNA, 15 bp, Homo sapiens
agggcagccgataag

SEQ ID NO: 1083991 - DNA, 15 bp, Homo sapiens
cagggcagccgataa

SEQ ID NO: 1083992 - DNA, 15 bp, Homo sapiens
gcagggcagccgata

SEQ ID NO: 1083993 - DNA, 15 bp, Homo sapiens
tgcagggcagccgat

SEQ ID NO: 1083994 - DNA, 15 bp, Homo sapiens
ttgcagggcagccga

SEQ ID NO: 1083995 - DNA, 15 bp, Homo sapiens
cttgcagggcagccg

SEQ ID NO: 1083996 - DNA, 15 bp, Homo sapiens
tcttgcagggcagcc

SEQ ID NO: 1083997 - DNA, 15 bp, Homo sapiens
gtcttgcagggcagc

SEQ ID NO: 1083998 - DNA, 15 bp, Homo sapiens
tgtcttgcagggcag

SEQ ID NO: 1083999 - DNA, 15 bp, Homo sapiens
ttgtcttgcagggca

SEQ ID NO: 1084000 - DNA, 15 bp, Homo sapiens
cttgtcttgcagggc

SEQ ID NO: 1084001 - DNA, 15 bp, Homo sapiens
gcttgtcttgcaggg

SEQ ID NO: 1084002 - DNA, 15 bp, Homo sapiens
agcttgtcttgcagg

SEQ ID NO: 1084003 - DNA, 15 bp, Homo sapiens
gagcttgtcttgcag

SEQ ID NO: 1084004 - DNA, 15 bp, Homo sapiens
tgagcttgtcttgca

SEQ ID NO: 1084005 - DNA, 15 bp, Homo sapiens
ttgagcttgtcttgc

SEQ ID NO: 1084006 - DNA, 15 bp, Homo sapiens
cttgagcttgtcttg

SEQ ID NO: 1084007 - DNA, 15 bp, Homo sapiens
tcttgagcttgtctt

SEQ ID NO: 1084008 - DNA, 15 bp, Homo sapiens
atcttgagcttgtct

SEQ ID NO: 1084009 - DNA, 15 bp, Homo sapiens
aatcttgagcttgtc

SEQ ID NO: 1084010 - DNA, 15 bp, Homo sapiens
aaatcttgagcttgt

SEQ ID NO: 1084011 - DNA, 15 bp, Homo sapiens
gaaatcttgagcttg

SEQ ID NO: 1084012 - DNA, 15 bp, Homo sapiens
agaaatcttgagctt

SEQ ID NO: 1084013 - DNA, 15 bp, Homo sapiens
cagaaatcttgagct

SEQ ID NO: 1084014 - DNA, 15 bp, Homo sapiens
acagaaatcttgagc

SEQ ID NO: 1084015 - DNA, 15 bp, Homo sapiens
aacagaaatcttgag

SEQ ID NO: 1084016 - DNA, 15 bp, Homo sapiens
taacagaaatcttga

SEQ ID NO: 1084017 - DNA, 15 bp, Homo sapiens
ctaacagaaatcttg

SEQ ID NO: 1084018 - DNA, 15 bp, Homo sapiens
actaacagaaatctt

SEQ ID NO: 1084019 - DNA, 15 bp, Homo sapiens
aactaacagaaatct

SEQ ID NO: 1084020 - DNA, 15 bp, Homo sapiens
taactaacagaaatc

SEQ ID NO: 1084021 - DNA, 15 bp, Homo sapiens
gtaactaacagaaat

SEQ ID NO: 1084022 - DNA, 15 bp, Homo sapiens
ggtaactaacagaaa

SEQ ID NO: 1084023 - DNA, 15 bp, Homo sapiens
tggtaactaacagaa

SEQ ID NO: 1084024 - DNA, 15 bp, Homo sapiens
ctggtaactaacaga

SEQ ID NO: 1084025 - DNA, 15 bp, Homo sapiens
actggtaactaacag

SEQ ID NO: 1084026 - DNA, 15 bp, Homo sapiens
aactggtaactaaca

SEQ ID NO: 1084027 - DNA, 15 bp, Homo sapiens
aaactggtaactaac

SEQ ID NO: 1084028 - DNA, 15 bp, Homo sapiens
gaaactggtaactaa

SEQ ID NO: 1084029 - DNA, 15 bp, Homo sapiens
agaaactggtaacta

SEQ ID NO: 1084030 - DNA, 15 bp, Homo sapiens
aagaaactggtaact

SEQ ID NO: 1084031 - DNA, 15 bp, Homo sapiens
aaagaaactggtaac

SEQ ID NO: 1084032 - DNA, 15 bp, Homo sapiens
taaagaaactggtaa

SEQ ID NO: 1084033 - DNA, 15 bp, Homo sapiens
ttaaagaaactggta

SEQ ID NO: 1084034 - DNA, 15 bp, Homo sapiens
gttaaagaaactggt

SEQ ID NO: 1084035 - DNA, 15 bp, Homo sapiens
ggttaaagaaactgg

SEQ ID NO: 1084036 - DNA, 15 bp, Homo sapiens
gggttaaagaaactg

SEQ ID NO: 1084037 - DNA, 15 bp, Homo sapiens
agggttaaagaaact

SEQ ID NO: 1084038 - DNA, 15 bp, Homo sapiens
cagggttaaagaaac

SEQ ID NO: 1084039 - DNA, 15 bp, Homo sapiens
acagggttaaagaaa

SEQ ID NO: 1084040 - DNA, 15 bp, Homo sapiens
gacagggttaaagaa

SEQ ID NO: 1084041 - DNA, 15 bp, Homo sapiens
cgacagggttaaaga

SEQ ID NO: 1084042 - DNA, 15 bp, Homo sapiens
ccgacagggttaaag

SEQ ID NO: 1084043 - DNA, 15 bp, Homo sapiens
cccgacagggttaaa

SEQ ID NO: 1084044 - DNA, 15 bp, Homo sapiens
gcccgacagggttaa

SEQ ID NO: 1084045 - DNA, 15 bp, Homo sapiens
tgcccgacagggtta

SEQ ID NO: 1084046 - DNA, 15 bp, Homo sapiens
gtgcccgacagggtt

SEQ ID NO: 1084047 - DNA, 15 bp, Homo sapiens
tgtgcccgacagggt

SEQ ID NO: 1084048 - DNA, 15 bp, Homo sapiens
ctgtgcccgacaggg

SEQ ID NO: 1084049 - DNA, 15 bp, Homo sapiens
actgtgcccgacagg

SEQ ID NO: 1084050 - DNA, 15 bp, Homo sapiens
aactgtgcccgacag

SEQ ID NO: 1084051 - DNA, 15 bp, Homo sapiens
aaactgtgcccgaca

SEQ ID NO: 1084052 - DNA, 15 bp, Homo sapiens
gaaactgtgcccgac

SEQ ID NO: 1084053 - DNA, 15 bp, Homo sapiens
tgaaactgtgcccga

SEQ ID NO: 1084054 - DNA, 15 bp, Homo sapiens
gtgaaactgtgcccg

SEQ ID NO: 1084055 - DNA, 15 bp, Homo sapiens
tgtgaaactgtgccc

SEQ ID NO: 1084056 - DNA, 15 bp, Homo sapiens
atgtgaaactgtgcc

SEQ ID NO: 1084057 - DNA, 15 bp, Homo sapiens
catgtgaaactgtgc

SEQ ID NO: 1084058 - DNA, 15 bp, Homo sapiens
acatgtgaaactgtg

SEQ ID NO: 1084059 - DNA, 15 bp, Homo sapiens
tacatgtgaaactgt

SEQ ID NO: 1084060 - DNA, 15 bp, Homo sapiens
ttacatgtgaaactg

SEQ ID NO: 1084061 - DNA, 15 bp, Homo sapiens
attacatgtgaaact

SEQ ID NO: 1084062 - DNA, 15 bp, Homo sapiens
gattacatgtgaaac

SEQ ID NO: 1084063 - DNA, 15 bp, Homo sapiens
tgattacatgtgaaa

SEQ ID NO: 1084064 - DNA, 15 bp, Homo sapiens
ctgattacatgtgaa

SEQ ID NO: 1084065 - DNA, 15 bp, Homo sapiens
tctgattacatgtga

SEQ ID NO: 1084066 - DNA, 15 bp, Homo sapiens
ttctgattacatgtg

SEQ ID NO: 1084067 - DNA, 15 bp, Homo sapiens
tttctgattacatgt

SEQ ID NO: 1084068 - DNA, 15 bp, Homo sapiens
ctttctgattacatg

SEQ ID NO: 1084069 - DNA, 15 bp, Homo sapiens
cctttctgattacat

SEQ ID NO: 1084070 - DNA, 15 bp, Homo sapiens
tcctttctgattaca

SEQ ID NO: 1084071 - DNA, 15 bp, Homo sapiens
ttcctttctgattac

SEQ ID NO: 1084072 - DNA, 15 bp, Homo sapiens
gttcctttctgatta

SEQ ID NO: 1084073 - DNA, 15 bp, Homo sapiens
agttcctttctgatt

SEQ ID NO: 1084074 - DNA, 15 bp, Homo sapiens
aagttcctttctgat

SEQ ID NO: 1084075 - DNA, 15 bp, Homo sapiens
caagttcctttctga

SEQ ID NO: 1084076 - DNA, 15 bp, Homo sapiens
gcaagttcctttctg

SEQ ID NO: 1084077 - DNA, 15 bp, Homo sapiens
tgcaagttcctttct

SEQ ID NO: 1084078 - DNA, 15 bp, Homo sapiens
ttgcaagttcctttc

SEQ ID NO: 1084079 - DNA, 15 bp, Homo sapiens
cttgcaagttccttt

SEQ ID NO: 1084080 - DNA, 15 bp, Homo sapiens
tcttgcaagttcctt

SEQ ID NO: 1084081 - DNA, 15 bp, Homo sapiens
gtcttgcaagttcct

SEQ ID NO: 1084082 - DNA, 15 bp, Homo sapiens
tgtcttgcaagttcc

SEQ ID NO: 1084083 - DNA, 15 bp, Homo sapiens
gtgtcttgcaagttc

SEQ ID NO: 1084084 - DNA, 15 bp, Homo sapiens
tgtgtcttgcaagtt

SEQ ID NO: 1084085 - DNA, 15 bp, Homo sapiens
atgtgtcttgcaagt

SEQ ID NO: 1084086 - DNA, 15 bp, Homo sapiens
tatgtgtcttgcaag

SEQ ID NO: 1084087 - DNA, 15 bp, Homo sapiens
gtatgtgtcttgcaa

SEQ ID NO: 1084088 - DNA, 15 bp, Homo sapiens
tgtatgtgtcttgca

SEQ ID NO: 1084089 - DNA, 15 bp, Homo sapiens
ttgtatgtgtcttgc

SEQ ID NO: 1084090 - DNA, 15 bp, Homo sapiens
gttgtatgtgtcttg

SEQ ID NO: 1084091 - DNA, 15 bp, Homo sapiens
agttgtatgtgtctt

SEQ ID NO: 1084092 - DNA, 15 bp, Homo sapiens
cagttgtatgtgtct

SEQ ID NO: 1084093 - DNA, 15 bp, Homo sapiens
tcagttgtatgtgtc

SEQ ID NO: 1084094 - DNA, 15 bp, Homo sapiens
ttcagttgtatgtgt

SEQ ID NO: 1084095 - DNA, 15 bp, Homo sapiens
tttcagttgtatgtg

SEQ ID NO: 1084096 - DNA, 15 bp, Homo sapiens
ctttcagttgtatgt

SEQ ID NO: 1084097 - DNA, 15 bp, Homo sapiens
tctttcagttgtatg

SEQ ID NO: 1084098 - DNA, 15 bp, Homo sapiens
ttctttcagttgtat

SEQ ID NO: 1084099 - DNA, 15 bp, Homo sapiens
tttctttcagttgta

SEQ ID NO: 1084100 - DNA, 15 bp, Homo sapiens
gtttctttcagttgt

SEQ ID NO: 1084101 - DNA, 15 bp, Homo sapiens
agtttctttcagttg

SEQ ID NO: 1084102 - DNA, 15 bp, Homo sapiens
aagtttctttcagtt

SEQ ID NO: 1084103 - DNA, 15 bp, Homo sapiens
caagtttctttcagt

SEQ ID NO: 1084104 - DNA, 15 bp, Homo sapiens
ccaagtttctttcag

SEQ ID NO: 1084105 - DNA, 15 bp, Homo sapiens
accaagtttctttca

SEQ ID NO: 1084106 - DNA, 15 bp, Homo sapiens
gaccaagtttctttc

SEQ ID NO: 1084107 - DNA, 15 bp, Homo sapiens
agaccaagtttcttt

SEQ ID NO: 1084108 - DNA, 15 bp, Homo sapiens
aagaccaagtttctt

SEQ ID NO: 1084109 - DNA, 15 bp, Homo sapiens
aaagaccaagtttct

SEQ ID NO: 1084110 - DNA, 15 bp, Homo sapiens
caaagaccaagtttc

SEQ ID NO: 1084111 - DNA, 15 bp, Homo sapiens
ccaaagaccaagttt

SEQ ID NO: 1084112 - DNA, 15 bp, Homo sapiens
tccaaagaccaagtt

SEQ ID NO: 1084113 - DNA, 15 bp, Homo sapiens
ttccaaagaccaagt

SEQ ID NO: 1084114 - DNA, 15 bp, Homo sapiens
cttccaaagaccaag

SEQ ID NO: 1084115 - DNA, 15 bp, Homo sapiens
acttccaaagaccaa

SEQ ID NO: 1084116 - DNA, 15 bp, Homo sapiens
aacttccaaagacca

SEQ ID NO: 1084117 - DNA, 15 bp, Homo sapiens
caacttccaaagacc

SEQ ID NO: 1084118 - DNA, 15 bp, Homo sapiens
acaacttccaaagac

SEQ ID NO: 1084119 - DNA, 15 bp, Homo sapiens
gacaacttccaaaga

SEQ ID NO: 1084120 - DNA, 15 bp, Homo sapiens
tgacaacttccaaag

SEQ ID NO: 1084121 - DNA, 15 bp, Homo sapiens
ctgacaacttccaaa

SEQ ID NO: 1084122 - DNA, 15 bp, Homo sapiens
actgacaacttccaa

SEQ ID NO: 1084123 - DNA, 15 bp, Homo sapiens
tactgacaacttcca

SEQ ID NO: 1084124 - DNA, 15 bp, Homo sapiens
ttactgacaacttcc

SEQ ID NO: 1084125 - DNA, 15 bp, Homo sapiens
cttactgacaacttc

SEQ ID NO: 1084126 - DNA, 15 bp, Homo sapiens
ccttactgacaactt

SEQ ID NO: 1084127 - DNA, 15 bp, Homo sapiens
accttactgacaact

SEQ ID NO: 1084128 - DNA, 15 bp, Homo sapiens
gaccttactgacaac

SEQ ID NO: 1084129 - DNA, 15 bp, Homo sapiens
tgaccttactgacaa

SEQ ID NO: 1084130 - DNA, 15 bp, Homo sapiens
gtgaccttactgaca

SEQ ID NO: 1084131 - DNA, 15 bp, Homo sapiens
tgtgaccttactgac

SEQ ID NO: 1084132 - DNA, 15 bp, Homo sapiens
ttgtgaccttactga

SEQ ID NO: 1084133 - DNA, 15 bp, Homo sapiens
tttgtgaccttactg

SEQ ID NO: 1084134 - DNA, 15 bp, Homo sapiens
ctttgtgaccttact

SEQ ID NO: 1084135 - DNA, 15 bp, Homo sapiens
actttgtgaccttac

SEQ ID NO: 1084136 - DNA, 15 bp, Homo sapiens
aactttgtgacctta

SEQ ID NO: 1084137 - DNA, 15 bp, Homo sapiens
caactttgtgacctt

SEQ ID NO: 1084138 - DNA, 15 bp, Homo sapiens
acaactttgtgacct

SEQ ID NO: 1084139 - DNA, 15 bp, Homo sapiens
cacaactttgtgacc

SEQ ID NO: 1084140 - DNA, 15 bp, Homo sapiens
tcacaactttgtgac

SEQ ID NO: 1084141 - DNA, 15 bp, Homo sapiens
atcacaactttgtga

SEQ ID NO: 1084142 - DNA, 15 bp, Homo sapiens
catcacaactttgtg

SEQ ID NO: 1084143 - DNA, 15 bp, Homo sapiens
gcatcacaactttgt

SEQ ID NO: 1084144 - DNA, 15 bp, Homo sapiens
agcatcacaactttg

SEQ ID NO: 1084145 - DNA, 15 bp, Homo sapiens
tagcatcacaacttt

SEQ ID NO: 1084146 - DNA, 15 bp, Homo sapiens
ctagcatcacaactt

SEQ ID NO: 1084147 - DNA, 15 bp, Homo sapiens
tctagcatcacaact

SEQ ID NO: 1084148 - DNA, 15 bp, Homo sapiens
ttctagcatcacaac

SEQ ID NO: 1084149 - DNA, 15 bp, Homo sapiens
cttctagcatcacaa

SEQ ID NO: 1084150 - DNA, 15 bp, Homo sapiens
gcttctagcatcaca

SEQ ID NO: 1084151 - DNA, 15 bp, Homo sapiens
tgcttctagcatcac

SEQ ID NO: 1084152 - DNA, 15 bp, Homo sapiens
ctgcttctagcatca

SEQ ID NO: 1084153 - DNA, 15 bp, Homo sapiens
gctgcttctagcatc

SEQ ID NO: 1084154 - DNA, 15 bp, Homo sapiens
ggctgcttctagcat

SEQ ID NO: 1084155 - DNA, 15 bp, Homo sapiens
cggctgcttctagca

SEQ ID NO: 1084156 - DNA, 15 bp, Homo sapiens
acggctgcttctagc

SEQ ID NO: 1084157 - DNA, 15 bp, Homo sapiens
tacggctgcttctag

SEQ ID NO: 1084158 - DNA, 15 bp, Homo sapiens
atacggctgcttcta

SEQ ID NO: 1084159 - DNA, 15 bp, Homo sapiens
gatacggctgcttct

SEQ ID NO: 1084160 - DNA, 15 bp, Homo sapiens
agatacggctgcttc

SEQ ID NO: 1084161 - DNA, 15 bp, Homo sapiens
cagatacggctgctt

SEQ ID NO: 1084162 - DNA, 15 bp, Homo sapiens
tcagatacggctgct

SEQ ID NO: 1084163 - DNA, 15 bp, Homo sapiens
ctcagatacggctgc

SEQ ID NO: 1084164 - DNA, 15 bp, Homo sapiens
tctcagatacggctg

SEQ ID NO: 1084165 - DNA, 15 bp, Homo sapiens
atctcagatacggct

SEQ ID NO: 1084166 - DNA, 15 bp, Homo sapiens
aatctcagatacggc

SEQ ID NO: 1084167 - DNA, 15 bp, Homo sapiens
taatctcagatacgg

SEQ ID NO: 1084168 - DNA, 15 bp, Homo sapiens
ataatctcagatacg

SEQ ID NO: 1084169 - DNA, 15 bp, Homo sapiens
cataatctcagatac

SEQ ID NO: 1084170 - DNA, 15 bp, Homo sapiens
ccataatctcagata

SEQ ID NO: 1084171 - DNA, 15 bp, Homo sapiens
cccataatctcagat

SEQ ID NO: 1084172 - DNA, 15 bp, Homo sapiens
tcccataatctcaga

SEQ ID NO: 1084173 - DNA, 15 bp, Homo sapiens
ttcccataatctcag

SEQ ID NO: 1084174 - DNA, 15 bp, Homo sapiens
tttcccataatctca

SEQ ID NO: 1084175 - DNA, 15 bp, Homo sapiens
ctttcccataatctc

SEQ ID NO: 1084176 - DNA, 15 bp, Homo sapiens
tctttcccataatct

SEQ ID NO: 1084177 - DNA, 15 bp, Homo sapiens
ctctttcccataatc

SEQ ID NO: 1084178 - DNA, 15 bp, Homo sapiens
tctctttcccataat

SEQ ID NO: 1084179 - DNA, 15 bp, Homo sapiens
atctctttcccataa

SEQ ID NO: 1084180 - DNA, 15 bp, Homo sapiens
catctctttcccata

SEQ ID NO: 1084181 - DNA, 15 bp, Homo sapiens
tcatctctttcccat

SEQ ID NO: 1084182 - DNA, 15 bp, Homo sapiens
atcatctctttccca

SEQ ID NO: 1084183 - DNA, 15 bp, Homo sapiens
tatcatctctttccc

SEQ ID NO: 1084184 - DNA, 15 bp, Homo sapiens
atatcatctctttcc

SEQ ID NO: 1084185 - DNA, 15 bp, Homo sapiens
tatatcatctctttc

SEQ ID NO: 1084186 - DNA, 15 bp, Homo sapiens
atatatcatctcttt

SEQ ID NO: 1084187 - DNA, 15 bp, Homo sapiens
aatatatcatctctt

SEQ ID NO: 1084188 - DNA, 15 bp, Homo sapiens
caatatatcatctct

SEQ ID NO: 1084189 - DNA, 15 bp, Homo sapiens
ccaatatatcatctc

SEQ ID NO: 1084190 - DNA, 15 bp, Homo sapiens
tccaatatatcatct

SEQ ID NO: 1084191 - DNA, 15 bp, Homo sapiens
ttccaatatatcatc

SEQ ID NO: 1084192 - DNA, 15 bp, Homo sapiens
tttccaatatatcat

SEQ ID NO: 1084193 - DNA, 15 bp, Homo sapiens
ttttccaatatatca

SEQ ID NO: 1084194 - DNA, 15 bp, Homo sapiens
tttttccaatatatc

SEQ ID NO: 1084195 - DNA, 15 bp, Homo sapiens
gtttttccaatatat

SEQ ID NO: 1084196 - DNA, 15 bp, Homo sapiens
tgtttttccaatata

SEQ ID NO: 1084197 - DNA, 15 bp, Homo sapiens
ttgtttttccaatat

SEQ ID NO: 1084198 - DNA, 15 bp, Homo sapiens
gttgtttttccaata

SEQ ID NO: 1084199 - DNA, 15 bp, Homo sapiens
tgttgtttttccaat

SEQ ID NO: 1084200 - DNA, 15 bp, Homo sapiens
ctgttgtttttccaa

SEQ ID NO: 1084201 - DNA, 15 bp, Homo sapiens
gctgttgtttttcca

SEQ ID NO: 1084202 - DNA, 15 bp, Homo sapiens
tgctgttgtttttcc

SEQ ID NO: 1084203 - DNA, 15 bp, Homo sapiens
atgctgttgtttttc

SEQ ID NO: 1084204 - DNA, 15 bp, Homo sapiens
gatgctgttgttttt

SEQ ID NO: 1084205 - DNA, 15 bp, Homo sapiens
tgatgctgttgtttt

SEQ ID NO: 1084206 - DNA, 15 bp, Homo sapiens
gtgatgctgttgttt

SEQ ID NO: 1084207 - DNA, 15 bp, Homo sapiens
agtgatgctgttgtt

SEQ ID NO: 1084208 - DNA, 15 bp, Homo sapiens
aagtgatgctgttgt

SEQ ID NO: 1084209 - DNA, 15 bp, Homo sapiens
aaagtgatgctgttg

SEQ ID NO: 1084210 - DNA, 15 bp, Homo sapiens
taaagtgatgctgtt

SEQ ID NO: 1084211 - DNA, 15 bp, Homo sapiens
ttaaagtgatgctgt

SEQ ID NO: 1084212 - DNA, 15 bp, Homo sapiens
tttaaagtgatgctg

SEQ ID NO: 1084213 - DNA, 15 bp, Homo sapiens
gtttaaagtgatgct

SEQ ID NO: 1084214 - DNA, 15 bp, Homo sapiens
tgtttaaagtgatgc

SEQ ID NO: 1084215 - DNA, 15 bp, Homo sapiens
atgtttaaagtgatg

SEQ ID NO: 1084216 - DNA, 15 bp, Homo sapiens
aatgtttaaagtgat

SEQ ID NO: 1084217 - DNA, 15 bp, Homo sapiens
taatgtttaaagtga

SEQ ID NO: 1084218 - DNA, 15 bp, Homo sapiens
gtaatgtttaaagtg

SEQ ID NO: 1084219 - DNA, 15 bp, Homo sapiens
agtaatgtttaaagt

SEQ ID NO: 1084220 - DNA, 15 bp, Homo sapiens
gagtaatgtttaaag

SEQ ID NO: 1084221 - DNA, 15 bp, Homo sapiens
agagtaatgtttaaa

SEQ ID NO: 1084222 - DNA, 15 bp, Homo sapiens
tagagtaatgtttaa

SEQ ID NO: 1084223 - DNA, 15 bp, Homo sapiens
ttagagtaatgttta

SEQ ID NO: 1084224 - DNA, 15 bp, Homo sapiens
tttagagtaatgttt

SEQ ID NO: 1084225 - DNA, 15 bp, Homo sapiens
atttagagtaatgtt

SEQ ID NO: 1084226 - DNA, 15 bp, Homo sapiens
gatttagagtaatgt

SEQ ID NO: 1084227 - DNA, 15 bp, Homo sapiens
tgatttagagtaatg

SEQ ID NO: 1084228 - DNA, 15 bp, Homo sapiens
ttgatttagagtaat

SEQ ID NO: 1084229 - DNA, 15 bp, Homo sapiens
cttgatttagagtaa

SEQ ID NO: 1084230 - DNA, 15 bp, Homo sapiens
ccttgatttagagta

SEQ ID NO: 1084231 - DNA, 15 bp, Homo sapiens
accttgatttagagt

SEQ ID NO: 1084232 - DNA, 15 bp, Homo sapiens
aaccttgatttagag

SEQ ID NO: 1084233 - DNA, 15 bp, Homo sapiens
aaaccttgatttaga

SEQ ID NO: 1084234 - DNA, 15 bp, Homo sapiens
gaaaccttgatttag

SEQ ID NO: 1084235 - DNA, 15 bp, Homo sapiens
agaaaccttgattta

SEQ ID NO: 1084236 - DNA, 15 bp, Homo sapiens
gagaaaccttgattt

SEQ ID NO: 1084237 - DNA, 15 bp, Homo sapiens
tgagaaaccttgatt

SEQ ID NO: 1084238 - DNA, 15 bp, Homo sapiens
ttgagaaaccttgat

SEQ ID NO: 1084239 - DNA, 15 bp, Homo sapiens
gttgagaaaccttga

SEQ ID NO: 1084240 - DNA, 15 bp, Homo sapiens
ggttgagaaaccttg

SEQ ID NO: 1084241 - DNA, 15 bp, Homo sapiens
aggttgagaaacctt

SEQ ID NO: 1084242 - DNA, 15 bp, Homo sapiens
aaggttgagaaacct

SEQ ID NO: 1084243 - DNA, 15 bp, Homo sapiens
caaggttgagaaacc

SEQ ID NO: 1084244 - DNA, 15 bp, Homo sapiens
ccaaggttgagaaac

SEQ ID NO: 1084245 - DNA, 15 bp, Homo sapiens
gccaaggttgagaaa

SEQ ID NO: 1084246 - DNA, 15 bp, Homo sapiens
tgccaaggttgagaa

SEQ ID NO: 1084247 - DNA, 15 bp, Homo sapiens
gtgccaaggttgaga

SEQ ID NO: 1084248 - DNA, 15 bp, Homo sapiens
agtgccaaggttgag

SEQ ID NO: 1084249 - DNA, 15 bp, Homo sapiens
tagtgccaaggttga

SEQ ID NO: 1084250 - DNA, 15 bp, Homo sapiens
atagtgccaaggttg

SEQ ID NO: 1084251 - DNA, 15 bp, Homo sapiens
aatagtgccaaggtt

SEQ ID NO: 1084252 - DNA, 15 bp, Homo sapiens
caatagtgccaaggt

SEQ ID NO: 1084253 - DNA, 15 bp, Homo sapiens
tcaatagtgccaagg

SEQ ID NO: 1084254 - DNA, 15 bp, Homo sapiens
gtcaatagtgccaag

SEQ ID NO: 1084255 - DNA, 15 bp, Homo sapiens
tgtcaatagtgccaa

SEQ ID NO: 1084256 - DNA, 15 bp, Homo sapiens
atgtcaatagtgcca

SEQ ID NO: 1084257 - DNA, 15 bp, Homo sapiens
aatgtcaatagtgcc

SEQ ID NO: 1084258 - DNA, 15 bp, Homo sapiens
aaatgtcaatagtgc

SEQ ID NO: 1084259 - DNA, 15 bp, Homo sapiens
aaaatgtcaatagtg

SEQ ID NO: 1084260 - DNA, 15 bp, Homo sapiens
caaaatgtcaatagt

SEQ ID NO: 1084261 - DNA, 15 bp, Homo sapiens
ccaaaatgtcaatag

SEQ ID NO: 1084262 - DNA, 15 bp, Homo sapiens
cccaaaatgtcaata

SEQ ID NO: 1084263 - DNA, 15 bp, Homo sapiens
acccaaaatgtcaat

SEQ ID NO: 1084264 - DNA, 15 bp, Homo sapiens
aacccaaaatgtcaa

SEQ ID NO: 1084265 - DNA, 15 bp, Homo sapiens
taacccaaaatgtca

SEQ ID NO: 1084266 - DNA, 15 bp, Homo sapiens
ctaacccaaaatgtc

SEQ ID NO: 1084267 - DNA, 15 bp, Homo sapiens
tctaacccaaaatgt

SEQ ID NO: 1084268 - DNA, 15 bp, Homo sapiens
atctaacccaaaatg

SEQ ID NO: 1084269 - DNA, 15 bp, Homo sapiens
tatctaacccaaaat

SEQ ID NO: 1084270 - DNA, 15 bp, Homo sapiens
ctatctaacccaaaa

SEQ ID NO: 1084271 - DNA, 15 bp, Homo sapiens
actatctaacccaaa

SEQ ID NO: 1084272 - DNA, 15 bp, Homo sapiens
aactatctaacccaa

SEQ ID NO: 1084273 - DNA, 15 bp, Homo sapiens
gaactatctaaccca

SEQ ID NO: 1084274 - DNA, 15 bp, Homo sapiens
agaactatctaaccc

SEQ ID NO: 1084275 - DNA, 15 bp, Homo sapiens
aagaactatctaacc

SEQ ID NO: 1084276 - DNA, 15 bp, Homo sapiens
aaagaactatctaac

SEQ ID NO: 1084277 - DNA, 15 bp, Homo sapiens
gaaagaactatctaa

SEQ ID NO: 1084278 - DNA, 15 bp, Homo sapiens
agaaagaactatcta

SEQ ID NO: 1084279 - DNA, 15 bp, Homo sapiens
aagaaagaactatct

SEQ ID NO: 1084280 - DNA, 15 bp, Homo sapiens
caagaaagaactatc

SEQ ID NO: 1084281 - DNA, 15 bp, Homo sapiens
acaagaaagaactat

SEQ ID NO: 1084282 - DNA, 15 bp, Homo sapiens
aacaagaaagaacta

SEQ ID NO: 1084283 - DNA, 15 bp, Homo sapiens
caacaagaaagaact

SEQ ID NO: 1084284 - DNA, 15 bp, Homo sapiens
cccaacaagaaagaa

SEQ ID NO: 1084285 - DNA, 15 bp, Homo sapiens
tcccaacaagaaaga

SEQ ID NO: 1084286 - DNA, 15 bp, Homo sapiens
ctcccaacaagaaag

SEQ ID NO: 1084287 - DNA, 15 bp, Homo sapiens
tctcccaacaagaaa

SEQ ID NO: 1084288 - DNA, 15 bp, Homo sapiens
gtctcccaacaagaa

SEQ ID NO: 1084289 - DNA, 15 bp, Homo sapiens
agtctcccaacaaga

SEQ ID NO: 1084290 - DNA, 15 bp, Homo sapiens
cagtctcccaacaag

SEQ ID NO: 1084291 - DNA, 15 bp, Homo sapiens
gcagtctcccaacaa

SEQ ID NO: 1084292 - DNA, 15 bp, Homo sapiens
ggcagtctcccaaca

SEQ ID NO: 1084293 - DNA, 15 bp, Homo sapiens
gggcagtctcccaac

SEQ ID NO: 1084294 - DNA, 15 bp, Homo sapiens
agggcagtctcccaa

SEQ ID NO: 1084295 - DNA, 15 bp, Homo sapiens
cagggcagtctccca

SEQ ID NO: 1084296 - DNA, 15 bp, Homo sapiens
acagggcagtctccc

SEQ ID NO: 1084297 - DNA, 15 bp, Homo sapiens
tacagggcagtctcc

SEQ ID NO: 1084298 - DNA, 15 bp, Homo sapiens
gtacagggcagtctc

SEQ ID NO: 1084299 - DNA, 15 bp, Homo sapiens
tgtacagggcagtct

SEQ ID NO: 1084300 - DNA, 15 bp, Homo sapiens
atgtacagggcagtc

SEQ ID NO: 1084301 - DNA, 15 bp, Homo sapiens
aatgtacagggcagt

SEQ ID NO: 1084302 - DNA, 15 bp, Homo sapiens
caatgtacagggcag

SEQ ID NO: 1084303 - DNA, 15 bp, Homo sapiens
acaatgtacagggca

SEQ ID NO: 1084304 - DNA, 15 bp, Homo sapiens
cacaatgtacagggc

SEQ ID NO: 1084305 - DNA, 15 bp, Homo sapiens
acacaatgtacaggg

SEQ ID NO: 1084306 - DNA, 15 bp, Homo sapiens
tacacaatgtacagg

SEQ ID NO: 1084307 - DNA, 15 bp, Homo sapiens
ctacacaatgtacag

SEQ ID NO: 1084308 - DNA, 15 bp, Homo sapiens
cctacacaatgtaca

SEQ ID NO: 1084309 - DNA, 15 bp, Homo sapiens
gcctacacaatgtac

SEQ ID NO: 1084310 - DNA, 15 bp, Homo sapiens
tgcctacacaatgta

SEQ ID NO: 1084311 - DNA, 15 bp, Homo sapiens
ctgcctacacaatgt

SEQ ID NO: 1084312 - DNA, 15 bp, Homo sapiens
gctgcctacacaatg

SEQ ID NO: 1084313 - DNA, 15 bp, Homo sapiens
tgctgcctacacaat

SEQ ID NO: 1084314 - DNA, 15 bp, Homo sapiens
atgctgcctacacaa

SEQ ID NO: 1084315 - DNA, 15 bp, Homo sapiens
gatgctgcctacaca

SEQ ID NO: 1084316 - DNA, 15 bp, Homo sapiens
agatgctgcctacac

SEQ ID NO: 1084317 - DNA, 15 bp, Homo sapiens
gagatgctgcctaca

SEQ ID NO: 1084318 - DNA, 15 bp, Homo sapiens
tgagatgctgcctac

SEQ ID NO: 1084319 - DNA, 15 bp, Homo sapiens
ctgagatgctgccta

SEQ ID NO: 1084320 - DNA, 15 bp, Homo sapiens
cctgagatgctgcct

SEQ ID NO: 1084321 - DNA, 15 bp, Homo sapiens
gcctgagatgctgcc

SEQ ID NO: 1084322 - DNA, 15 bp, Homo sapiens
ggcctgagatgctgc

SEQ ID NO: 1084323 - DNA, 15 bp, Homo sapiens
aggcctgagatgctg

SEQ ID NO: 1084324 - DNA, 15 bp, Homo sapiens
aaggcctgagatgct

SEQ ID NO: 1084325 - DNA, 15 bp, Homo sapiens
aaaggcctgagatgc

SEQ ID NO: 1084326 - DNA, 15 bp, Homo sapiens
caaaggcctgagatg

SEQ ID NO: 1084327 - DNA, 15 bp, Homo sapiens
acaaaggcctgagat

SEQ ID NO: 1084328 - DNA, 15 bp, Homo sapiens
tacaaaggcctgaga

SEQ ID NO: 1084329 - DNA, 15 bp, Homo sapiens
ctacaaaggcctgag

SEQ ID NO: 1084330 - DNA, 15 bp, Homo sapiens
tctacaaaggcctga

SEQ ID NO: 1084331 - DNA, 15 bp, Homo sapiens
ttctacaaaggcctg

SEQ ID NO: 1084332 - DNA, 15 bp, Homo sapiens
tttctacaaaggcct

SEQ ID NO: 1084333 - DNA, 15 bp, Homo sapiens
atttctacaaaggcc

SEQ ID NO: 1084334 - DNA, 15 bp, Homo sapiens
catttctacaaaggc

SEQ ID NO: 1084335 - DNA, 15 bp, Homo sapiens
acatttctacaaagg

SEQ ID NO: 1084336 - DNA, 15 bp, Homo sapiens
gacatttctacaaag

SEQ ID NO: 1084337 - DNA, 15 bp, Homo sapiens
tgacatttctacaaa

SEQ ID NO: 1084338 - DNA, 15 bp, Homo sapiens
ctgacatttctacaa

SEQ ID NO: 1084339 - DNA, 15 bp, Homo sapiens
actgacatttctaca

SEQ ID NO: 1084340 - DNA, 15 bp, Homo sapiens
tactgacatttctac

SEQ ID NO: 1084341 - DNA, 15 bp, Homo sapiens
gtactgacatttcta

SEQ ID NO: 1084342 - DNA, 15 bp, Homo sapiens
ggtactgacatttct

SEQ ID NO: 1084343 - DNA, 15 bp, Homo sapiens
tggtactgacatttc

SEQ ID NO: 1084344 - DNA, 15 bp, Homo sapiens
ttggtactgacattt

SEQ ID NO: 1084345 - DNA, 15 bp, Homo sapiens
gttggtactgacatt

SEQ ID NO: 1084346 - DNA, 15 bp, Homo sapiens
ggttggtactgacat

SEQ ID NO: 1084347 - DNA, 15 bp, Homo sapiens
gggttggtactgaca

SEQ ID NO: 1084348 - DNA, 15 bp, Homo sapiens
tgggttggtactgac

SEQ ID NO: 1084349 - DNA, 15 bp, Homo sapiens
gtgggttggtactga

SEQ ID NO: 1084350 - DNA, 15 bp, Homo sapiens
ggtgggttggtactg

SEQ ID NO: 1084351 - DNA, 15 bp, Homo sapiens
gggtgggttggtact

SEQ ID NO: 1084352 - DNA, 15 bp, Homo sapiens
ggggtgggttggtac

SEQ ID NO: 1084353 - DNA, 15 bp, Homo sapiens
gggggtgggttggta

SEQ ID NO: 1084354 - DNA, 15 bp, Homo sapiens
agggggtgggttggt

SEQ ID NO: 1084355 - DNA, 15 bp, Homo sapiens
gagggggtgggttgg

SEQ ID NO: 1084356 - DNA, 15 bp, Homo sapiens
ggagggggtgggttg

SEQ ID NO: 1084357 - DNA, 15 bp, Homo sapiens
gggagggggtgggtt

SEQ ID NO: 1084358 - DNA, 15 bp, Homo sapiens
ggggagggggtgggt

SEQ ID NO: 1084359 - DNA, 15 bp, Homo sapiens
tggggagggggtggg

SEQ ID NO: 1084360 - DNA, 15 bp, Homo sapiens
gtggggagggggtgg

SEQ ID NO: 1084361 - DNA, 15 bp, Homo sapiens
agtggggagggggtg

SEQ ID NO: 1084362 - DNA, 15 bp, Homo sapiens
cagtggggagggggt

SEQ ID NO: 1084363 - DNA, 15 bp, Homo sapiens
tgcagtggggagggg

SEQ ID NO: 1084364 - DNA, 15 bp, Homo sapiens
gtgcagtggggaggg

SEQ ID NO: 1084365 - DNA, 15 bp, Homo sapiens
tgtgcagtggggagg

SEQ ID NO: 1084366 - DNA, 15 bp, Homo sapiens
ttgtgcagtggggag

SEQ ID NO: 1084367 - DNA, 15 bp, Homo sapiens
attgtgcagtgggga

SEQ ID NO: 1084368 - DNA, 15 bp, Homo sapiens
gattgtgcagtgggg

SEQ ID NO: 1084369 - DNA, 15 bp, Homo sapiens
tgattgtgcagtggg

SEQ ID NO: 1084370 - DNA, 15 bp, Homo sapiens
ttgattgtgcagtgg

SEQ ID NO: 1084371 - DNA, 15 bp, Homo sapiens
tttgattgtgcagtg

SEQ ID NO: 1084372 - DNA, 15 bp, Homo sapiens
ttttgattgtgcagt

SEQ ID NO: 1084373 - DNA, 15 bp, Homo sapiens
tttttgattgtgcag

SEQ ID NO: 1084374 - DNA, 15 bp, Homo sapiens
gtttttgattgtgca

SEQ ID NO: 1084375 - DNA, 15 bp, Homo sapiens
cgtttttgattgtgc

SEQ ID NO: 1084376 - DNA, 15 bp, Homo sapiens
acgtttttgattgtg

SEQ ID NO: 1084377 - DNA, 15 bp, Homo sapiens
gacgtttttgattgt

SEQ ID NO: 1084378 - DNA, 15 bp, Homo sapiens
tgacgtttttgattg

SEQ ID NO: 1084379 - DNA, 15 bp, Homo sapiens
ttgacgtttttgatt

SEQ ID NO: 1084380 - DNA, 15 bp, Homo sapiens
tttgacgtttttgat

SEQ ID NO: 1084381 - DNA, 15 bp, Homo sapiens
ttttgacgtttttga

SEQ ID NO: 1084382 - DNA, 15 bp, Homo sapiens
attttgacgtttttg

SEQ ID NO: 1084383 - DNA, 15 bp, Homo sapiens
cattttgacgttttt

SEQ ID NO: 1084384 - DNA, 15 bp, Homo sapiens
acattttgacgtttt

SEQ ID NO: 1084385 - DNA, 15 bp, Homo sapiens
gacattttgacgttt

SEQ ID NO: 1084386 - DNA, 15 bp, Homo sapiens
ggacattttgacgtt

SEQ ID NO: 1084387 - DNA, 15 bp, Homo sapiens
aggacattttgacgt

SEQ ID NO: 1084388 - DNA, 15 bp, Homo sapiens
aaggacattttgacg

SEQ ID NO: 1084389 - DNA, 15 bp, Homo sapiens
aaaggacattttgac

SEQ ID NO: 1084390 - DNA, 15 bp, Homo sapiens
caaaggacattttga

SEQ ID NO: 1084391 - DNA, 15 bp, Homo sapiens
ccaaaggacattttg

SEQ ID NO: 1084392 - DNA, 15 bp, Homo sapiens
cccaaaggacatttt

SEQ ID NO: 1084393 - DNA, 15 bp, Homo sapiens
tcccaaaggacattt

SEQ ID NO: 1084394 - DNA, 15 bp, Homo sapiens
ctcccaaaggacatt

SEQ ID NO: 1084395 - DNA, 15 bp, Homo sapiens
gctcccaaaggacat

SEQ ID NO: 1084396 - DNA, 15 bp, Homo sapiens
tgctcccaaaggaca

SEQ ID NO: 1084397 - DNA, 15 bp, Homo sapiens
ctgctcccaaaggac

SEQ ID NO: 1084398 - DNA, 15 bp, Homo sapiens
actgctcccaaagga

SEQ ID NO: 1084399 - DNA, 15 bp, Homo sapiens
tactgctcccaaagg

SEQ ID NO: 1084400 - DNA, 15 bp, Homo sapiens
ctactgctcccaaag

SEQ ID NO: 1084401 - DNA, 15 bp, Homo sapiens
actactgctcccaaa

SEQ ID NO: 1084402 - DNA, 15 bp, Homo sapiens
aactactgctcccaa

SEQ ID NO: 1084403 - DNA, 15 bp, Homo sapiens
aaactactgctccca

SEQ ID NO: 1084404 - DNA, 15 bp, Homo sapiens
aaaactactgctccc

SEQ ID NO: 1084405 - DNA, 15 bp, Homo sapiens
caaaactactgctcc

SEQ ID NO: 1084406 - DNA, 15 bp, Homo sapiens
tcaaaactactgctc

SEQ ID NO: 1084407 - DNA, 15 bp, Homo sapiens
ctcaaaactactgct

SEQ ID NO: 1084408 - DNA, 15 bp, Homo sapiens
tctcaaaactactgc

SEQ ID NO: 1084409 - DNA, 15 bp, Homo sapiens
ttctcaaaactactg

SEQ ID NO: 1084410 - DNA, 15 bp, Homo sapiens
tttctcaaaactact

SEQ ID NO: 1084411 - DNA, 15 bp, Homo sapiens
gtttctcaaaactac

SEQ ID NO: 1084412 - DNA, 15 bp, Homo sapiens
tgtttctcaaaacta

SEQ ID NO: 1084413 - DNA, 15 bp, Homo sapiens
atgtttctcaaaact

SEQ ID NO: 1084414 - DNA, 15 bp, Homo sapiens
aatgtttctcaaaac

SEQ ID NO: 1084415 - DNA, 15 bp, Homo sapiens
caatgtttctcaaaa

SEQ ID NO: 1084416 - DNA, 15 bp, Homo sapiens
gcaatgtttctcaaa

SEQ ID NO: 1084417 - DNA, 15 bp, Homo sapiens
agcaatgtttctcaa

SEQ ID NO: 1084418 - DNA, 15 bp, Homo sapiens
aagcaatgtttctca

SEQ ID NO: 1084419 - DNA, 15 bp, Homo sapiens
aaagcaatgtttctc

SEQ ID NO: 1084420 - DNA, 15 bp, Homo sapiens
caaagcaatgtttct

SEQ ID NO: 1084421 - DNA, 15 bp, Homo sapiens
gcaaagcaatgtttc

SEQ ID NO: 1084422 - DNA, 15 bp, Homo sapiens
tgcaaagcaatgttt

SEQ ID NO: 1084423 - DNA, 15 bp, Homo sapiens
ctgcaaagcaatgtt

SEQ ID NO: 1084424 - DNA, 15 bp, Homo sapiens
tctgcaaagcaatgt

SEQ ID NO: 1084425 - DNA, 15 bp, Homo sapiens
atctgcaaagcaatg

SEQ ID NO: 1084426 - DNA, 15 bp, Homo sapiens
tatctgcaaagcaat

SEQ ID NO: 1084427 - DNA, 15 bp, Homo sapiens
atatctgcaaagcaa

SEQ ID NO: 1084428 - DNA, 15 bp, Homo sapiens
tatatctgcaaagca

SEQ ID NO: 1084429 - DNA, 15 bp, Homo sapiens
atatatctgcaaagc

SEQ ID NO: 1084430 - DNA, 15 bp, Homo sapiens
tatatatctgcaaag

SEQ ID NO: 1084431 - DNA, 15 bp, Homo sapiens
atatatatctgcaaa

SEQ ID NO: 1084432 - DNA, 15 bp, Homo sapiens
catatatatctgcaa

SEQ ID NO: 1084433 - DNA, 15 bp, Homo sapiens
acatatatatctgca

SEQ ID NO: 1084434 - DNA, 15 bp, Homo sapiens
aacatatatatctgc

SEQ ID NO: 1084435 - DNA, 15 bp, Homo sapiens
aaacatatatatctg

SEQ ID NO: 1084436 - DNA, 15 bp, Homo sapiens
caaacatatatatct

SEQ ID NO: 1084437 - DNA, 15 bp, Homo sapiens
acaaacatatatatc

SEQ ID NO: 1084438 - DNA, 15 bp, Homo sapiens
aacaaacatatatat

SEQ ID NO: 1084439 - DNA, 15 bp, Homo sapiens
aaacaaacatatata

SEQ ID NO: 1084440 - DNA, 15 bp, Homo sapiens
caaacaaacatatat

SEQ ID NO: 1084441 - DNA, 15 bp, Homo sapiens
acaaacaaacatata

SEQ ID NO: 1084442 - DNA, 15 bp, Homo sapiens
aacaaacaaacatat

SEQ ID NO: 1084443 - DNA, 15 bp, Homo sapiens
aaacaaacaaacata

SEQ ID NO: 1084444 - DNA, 15 bp, Homo sapiens
caaacaaacaaacat

SEQ ID NO: 1084445 - DNA, 15 bp, Homo sapiens
gcaaaacaaacaaac

SEQ ID NO: 1084446 - DNA, 15 bp, Homo sapiens
agcaaaacaaacaaa

SEQ ID NO: 1084447 - DNA, 15 bp, Homo sapiens
aagcaaaacaaacaa

SEQ ID NO: 1084448 - DNA, 15 bp, Homo sapiens
aaagcaaaacaaaca

SEQ ID NO: 1084449 - DNA, 15 bp, Homo sapiens
caaagcaaaacaaac

SEQ ID NO: 1084450 - DNA, 15 bp, Homo sapiens
acaaagcaaaacaaa

SEQ ID NO: 1084451 - DNA, 15 bp, Homo sapiens
cacaaagcaaaacaa

SEQ ID NO: 1084452 - DNA, 15 bp, Homo sapiens
tcacaaagcaaaaca

SEQ ID NO: 1084453 - DNA, 15 bp, Homo sapiens
gtcacaaagcaaaac

SEQ ID NO: 1084454 - DNA, 15 bp, Homo sapiens
tgtcacaaagcaaaa

SEQ ID NO: 1084455 - DNA, 15 bp, Homo sapiens
ctgtcacaaagcaaa

SEQ ID NO: 1084456 - DNA, 15 bp, Homo sapiens
cctgtcacaaagcaa

SEQ ID NO: 1084457 - DNA, 15 bp, Homo sapiens
ccctgtcacaaagca

SEQ ID NO: 1084458 - DNA, 15 bp, Homo sapiens
accctgtcacaaagc

SEQ ID NO: 1084459 - DNA, 15 bp, Homo sapiens
gaccctgtcacaaag

SEQ ID NO: 1084460 - DNA, 15 bp, Homo sapiens
agaccctgtcacaaa

SEQ ID NO: 1084461 - DNA, 15 bp, Homo sapiens
aagaccctgtcacaa

SEQ ID NO: 1084462 - DNA, 15 bp, Homo sapiens
taagaccctgtcaca

SEQ ID NO: 1084463 - DNA, 15 bp, Homo sapiens
gtaagaccctgtcac

SEQ ID NO: 1084464 - DNA, 15 bp, Homo sapiens
agtaagaccctgtca

SEQ ID NO: 1084465 - DNA, 15 bp, Homo sapiens
gagtaagaccctgtc

SEQ ID NO: 1084466 - DNA, 15 bp, Homo sapiens
agagtaagaccctgt

SEQ ID NO: 1084467 - DNA, 15 bp, Homo sapiens
cagagtaagaccctg

SEQ ID NO: 1084468 - DNA, 15 bp, Homo sapiens
acagagtaagaccct

SEQ ID NO: 1084469 - DNA, 15 bp, Homo sapiens
aacagagtaagaccc

SEQ ID NO: 1084470 - DNA, 15 bp, Homo sapiens
caacagagtaagacc

SEQ ID NO: 1084471 - DNA, 15 bp, Homo sapiens
tgcctgggcaacaga

SEQ ID NO: 1084472 - DNA, 15 bp, Homo sapiens
ctgcctgggcaacag

SEQ ID NO: 1084473 - DNA, 15 bp, Homo sapiens
tctgcctgggcaaca

SEQ ID NO: 1084474 - DNA, 15 bp, Homo sapiens
ttctgcctgggcaac

SEQ ID NO: 1084475 - DNA, 15 bp, Homo sapiens
cttctgcctgggcaa

SEQ ID NO: 1084476 - DNA, 15 bp, Homo sapiens
acttctgcctgggca

SEQ ID NO: 1084477 - DNA, 15 bp, Homo sapiens
cacttctgcctgggc

SEQ ID NO: 1084478 - DNA, 15 bp, Homo sapiens
gcacttctgcctggg

SEQ ID NO: 1084479 - DNA, 15 bp, Homo sapiens
tgcacttctgcctgg

SEQ ID NO: 1084480 - DNA, 15 bp, Homo sapiens
ttgcacttctgcctg

SEQ ID NO: 1084481 - DNA, 15 bp, Homo sapiens
attgcacttctgcct

SEQ ID NO: 1084482 - DNA, 15 bp, Homo sapiens
cattgcacttctgcc

SEQ ID NO: 1084483 - DNA, 15 bp, Homo sapiens
ccattgcacttctgc

SEQ ID NO: 1084484 - DNA, 15 bp, Homo sapiens
accattgcacttctg

SEQ ID NO: 1084485 - DNA, 15 bp, Homo sapiens
caccattgcacttct

SEQ ID NO: 1084486 - DNA, 15 bp, Homo sapiens
acaccattgcacttc

SEQ ID NO: 1084487 - DNA, 15 bp, Homo sapiens
cacaccattgcactt

SEQ ID NO: 1084488 - DNA, 15 bp, Homo sapiens
ggatcacaccattgc

SEQ ID NO: 1084489 - DNA, 15 bp, Homo sapiens
gggatcacaccattg

SEQ ID NO: 1084490 - DNA, 15 bp, Homo sapiens
tgggatcacaccatt

SEQ ID NO: 1084491 - DNA, 15 bp, Homo sapiens
gtgggatcacaccat

SEQ ID NO: 1084492 - DNA, 15 bp, Homo sapiens
agtgggatcacacca

SEQ ID NO: 1084493 - DNA, 15 bp, Homo sapiens
gagtgggatcacacc

SEQ ID NO: 1084494 - DNA, 15 bp, Homo sapiens
tgagtgggatcacac

SEQ ID NO: 1084495 - DNA, 15 bp, Homo sapiens
gtgagtgggatcaca

SEQ ID NO: 1084496 - DNA, 15 bp, Homo sapiens
agtgagtgggatcac

SEQ ID NO: 1084497 - DNA, 15 bp, Homo sapiens
cagtgagtgggatca

SEQ ID NO: 1084498 - DNA, 15 bp, Homo sapiens
gcagtgagtgggatc

SEQ ID NO: 1084499 - DNA, 15 bp, Homo sapiens
tgcagtgagtgggat

SEQ ID NO: 1084500 - DNA, 15 bp, Homo sapiens
ttgcagtgagtggga

SEQ ID NO: 1084501 - DNA, 15 bp, Homo sapiens
gttgcagtgagtggg

SEQ ID NO: 1084502 - DNA, 15 bp, Homo sapiens
ggttgcagtgagtgg

SEQ ID NO: 1084503 - DNA, 15 bp, Homo sapiens
aggttgcagtgagtg

SEQ ID NO: 1084504 - DNA, 15 bp, Homo sapiens
ctgaggcatgagaat

SEQ ID NO: 1084505 - DNA, 15 bp, Homo sapiens
gctgaggcatgagaa

SEQ ID NO: 1084506 - DNA, 15 bp, Homo sapiens
ggctgaggcatgaga

SEQ ID NO: 1084507 - DNA, 15 bp, Homo sapiens
aggctgaggcatgag

SEQ ID NO: 1084508 - DNA, 15 bp, Homo sapiens
gaggctgaggcatga

SEQ ID NO: 1084509 - DNA, 15 bp, Homo sapiens
atgcattcctgtaat

SEQ ID NO: 1084510 - DNA, 15 bp, Homo sapiens
gatgcattcctgtaa

SEQ ID NO: 1084511 - DNA, 15 bp, Homo sapiens
ggatgcattcctgta

SEQ ID NO: 1084512 - DNA, 15 bp, Homo sapiens
tggatgcattcctgt

SEQ ID NO: 1084513 - DNA, 15 bp, Homo sapiens
atggatgcattcctg

SEQ ID NO: 1084514 - DNA, 15 bp, Homo sapiens
tatggatgcattcct

SEQ ID NO: 1084515 - DNA, 15 bp, Homo sapiens
gtatggatgcattcc

SEQ ID NO: 1084516 - DNA, 15 bp, Homo sapiens
tgtatggatgcattc

SEQ ID NO: 1084517 - DNA, 15 bp, Homo sapiens
gtgtatggatgcatt

SEQ ID NO: 1084518 - DNA, 15 bp, Homo sapiens
cgtgtatggatgcat

SEQ ID NO: 1084519 - DNA, 15 bp, Homo sapiens
gcgtgtatggatgca

SEQ ID NO: 1084520 - DNA, 15 bp, Homo sapiens
cgcgtgtatggatgc

SEQ ID NO: 1084521 - DNA, 15 bp, Homo sapiens
ccgcgtgtatggatg

SEQ ID NO: 1084522 - DNA, 15 bp, Homo sapiens
gccgcgtgtatggat

SEQ ID NO: 1084523 - DNA, 15 bp, Homo sapiens
agccgcgtgtatgga

SEQ ID NO: 1084524 - DNA, 15 bp, Homo sapiens
tagccgcgtgtatgg

SEQ ID NO: 1084525 - DNA, 15 bp, Homo sapiens
ttagccgcgtgtatg

SEQ ID NO: 1084526 - DNA, 15 bp, Homo sapiens
attagccgcgtgtat

SEQ ID NO: 1084527 - DNA, 15 bp, Homo sapiens
aattagccgcgtgta

SEQ ID NO: 1084528 - DNA, 15 bp, Homo sapiens
aaattagccgcgtgt

SEQ ID NO: 1084529 - DNA, 15 bp, Homo sapiens
aaaattagccgcgtg

SEQ ID NO: 1084530 - DNA, 15 bp, Homo sapiens
aaaaattagccgcgt

SEQ ID NO: 1084531 - DNA, 15 bp, Homo sapiens
caaaaattagccgcg

SEQ ID NO: 1084532 - DNA, 15 bp, Homo sapiens
acaaaaattagccgc

SEQ ID NO: 1084533 - DNA, 15 bp, Homo sapiens
atctctattaaaaat

SEQ ID NO: 1084534 - DNA, 15 bp, Homo sapiens
catctctattaaaaa

SEQ ID NO: 1084535 - DNA, 15 bp, Homo sapiens
ccatctctattaaaa

SEQ ID NO: 1084536 - DNA, 15 bp, Homo sapiens
cccatctctattaaa

SEQ ID NO: 1084537 - DNA, 15 bp, Homo sapiens
tcccatctctattaa

SEQ ID NO: 1084538 - DNA, 15 bp, Homo sapiens
atcccatctctatta

SEQ ID NO: 1084539 - DNA, 15 bp, Homo sapiens
aatcccatctctatt

SEQ ID NO: 1084540 - DNA, 15 bp, Homo sapiens
aaatcccatctctat

SEQ ID NO: 1084541 - DNA, 15 bp, Homo sapiens
ccaggagtttcagac

SEQ ID NO: 1084542 - DNA, 15 bp, Homo sapiens
gccaggagtttcaga

SEQ ID NO: 1084543 - DNA, 15 bp, Homo sapiens
ggccaggagtttcag

SEQ ID NO: 1084544 - DNA, 15 bp, Homo sapiens
aggccaggagtttca

SEQ ID NO: 1084545 - DNA, 15 bp, Homo sapiens
gaggccaggagtttc

SEQ ID NO: 1084546 - DNA, 15 bp, Homo sapiens
atgaggccaggagtt

SEQ ID NO: 1084547 - DNA, 15 bp, Homo sapiens
catgaggccaggagt

SEQ ID NO: 1084548 - DNA, 15 bp, Homo sapiens
acatgaggccaggag

SEQ ID NO: 1084549 - DNA, 15 bp, Homo sapiens
cacatgaggccagga

SEQ ID NO: 1084550 - DNA, 15 bp, Homo sapiens
tcacatgaggccagg

SEQ ID NO: 1084551 - DNA, 15 bp, Homo sapiens
atcacatgaggccag

SEQ ID NO: 1084552 - DNA, 15 bp, Homo sapiens
gatcacatgaggcca

SEQ ID NO: 1084553 - DNA, 15 bp, Homo sapiens
ggatcacatgaggcc

SEQ ID NO: 1084554 - DNA, 15 bp, Homo sapiens
tggatcacatgaggc

SEQ ID NO: 1084555 - DNA, 15 bp, Homo sapiens
gtggatcacatgagg

SEQ ID NO: 1084556 - DNA, 15 bp, Homo sapiens
ggtggatcacatgag

SEQ ID NO: 1084557 - DNA, 15 bp, Homo sapiens
gggtggatcacatga

SEQ ID NO: 1084558 - DNA, 15 bp, Homo sapiens
tgggtggatcacatg

SEQ ID NO: 1084559 - DNA, 15 bp, Homo sapiens
gtgggtggatcacat

SEQ ID NO: 1084560 - DNA, 15 bp, Homo sapiens
ggtgggtggatcaca

SEQ ID NO: 1084561 - DNA, 15 bp, Homo sapiens
tcgaggtgggtggat

SEQ ID NO: 1084562 - DNA, 15 bp, Homo sapiens
gtcgaggtgggtgga

SEQ ID NO: 1084563 - DNA, 15 bp, Homo sapiens
ggtcgaggtgggtgg

SEQ ID NO: 1084564 - DNA, 15 bp, Homo sapiens
aggtcgaggtgggtg

SEQ ID NO: 1084565 - DNA, 15 bp, Homo sapiens
gaggtcgaggtgggt

SEQ ID NO: 1084566 - DNA, 15 bp, Homo sapiens
ggaggtcgaggtggg

SEQ ID NO: 1084567 - DNA, 15 bp, Homo sapiens
gggaggtcgaggtgg

SEQ ID NO: 1084568 - DNA, 15 bp, Homo sapiens
tgggaggtcgaggtg

SEQ ID NO: 1084569 - DNA, 15 bp, Homo sapiens
ttgggaggtcgaggt

SEQ ID NO: 1084570 - DNA, 15 bp, Homo sapiens
tttgggaggtcgagg

SEQ ID NO: 1084571 - DNA, 15 bp, Homo sapiens
atttgggaggtcgag

SEQ ID NO: 1084572 - DNA, 15 bp, Homo sapiens
aatttgggaggtcga

SEQ ID NO: 1084573 - DNA, 15 bp, Homo sapiens
caatttgggaggtcg

SEQ ID NO: 1084574 - DNA, 15 bp, Homo sapiens
gcaatttgggaggtc

SEQ ID NO: 1084575 - DNA, 15 bp, Homo sapiens
agcaatttgggaggt

SEQ ID NO: 1084576 - DNA, 15 bp, Homo sapiens
cagcaatttgggagg

SEQ ID NO: 1084577 - DNA, 15 bp, Homo sapiens
ccagcaatttgggag

SEQ ID NO: 1084578 - DNA, 15 bp, Homo sapiens
cccagcaatttggga

SEQ ID NO: 1084579 - DNA, 15 bp, Homo sapiens
tcccagcaatttggg

SEQ ID NO: 1084580 - DNA, 15 bp, Homo sapiens
atcccagcaatttgg

SEQ ID NO: 1084581 - DNA, 15 bp, Homo sapiens
aatcccagcaatttg

SEQ ID NO: 1084582 - DNA, 15 bp, Homo sapiens
taatcccagcaattt

SEQ ID NO: 1084583 - DNA, 15 bp, Homo sapiens
gtaatcccagcaatt

SEQ ID NO: 1084584 - DNA, 15 bp, Homo sapiens
tgtaatcccagcaat

SEQ ID NO: 1084585 - DNA, 15 bp, Homo sapiens
ttgtaatcccagcaa

SEQ ID NO: 1084586 - DNA, 15 bp, Homo sapiens
agcttgtaatcccag

SEQ ID NO: 1084587 - DNA, 15 bp, Homo sapiens
aagcttgtaatccca

SEQ ID NO: 1084588 - DNA, 15 bp, Homo sapiens
taagcttgtaatccc

SEQ ID NO: 1084589 - DNA, 15 bp, Homo sapiens
ttaagcttgtaatcc

SEQ ID NO: 1084590 - DNA, 15 bp, Homo sapiens
cttaagcttgtaatc

SEQ ID NO: 1084591 - DNA, 15 bp, Homo sapiens
gcttaagcttgtaat

SEQ ID NO: 1084592 - DNA, 15 bp, Homo sapiens
ggcttaagcttgtaa

SEQ ID NO: 1084593 - DNA, 15 bp, Homo sapiens
tggcttaagcttgta

SEQ ID NO: 1084594 - DNA, 15 bp, Homo sapiens
gtggcttaagcttgt

SEQ ID NO: 1084595 - DNA, 15 bp, Homo sapiens
agtggcttaagcttg

SEQ ID NO: 1084596 - DNA, 15 bp, Homo sapiens
cagtggcttaagctt

SEQ ID NO: 1084597 - DNA, 15 bp, Homo sapiens
gcagtggcttaagct

SEQ ID NO: 1084598 - DNA, 15 bp, Homo sapiens
cgcagtggcttaagc

SEQ ID NO: 1084599 - DNA, 15 bp, Homo sapiens
gcgcagtggcttaag

SEQ ID NO: 1084600 - DNA, 15 bp, Homo sapiens
ggcgcagtggcttaa

SEQ ID NO: 1084601 - DNA, 15 bp, Homo sapiens
tgggcgcagtggctt

SEQ ID NO: 1084602 - DNA, 15 bp, Homo sapiens
agctgggcgcagtgg

SEQ ID NO: 1084603 - DNA, 15 bp, Homo sapiens
cagctgggcgcagtg

SEQ ID NO: 1084604 - DNA, 15 bp, Homo sapiens
tcagctgggcgcagt

SEQ ID NO: 1084605 - DNA, 15 bp, Homo sapiens
ctcagctgggcgcag

SEQ ID NO: 1084606 - DNA, 15 bp, Homo sapiens
tctcagctgggcgca

SEQ ID NO: 1084607 - DNA, 15 bp, Homo sapiens
ttctcagctgggcgc

SEQ ID NO: 1084608 - DNA, 15 bp, Homo sapiens
tttctcagctgggcg

SEQ ID NO: 1084609 - DNA, 15 bp, Homo sapiens
gtttctcagctgggc

SEQ ID NO: 1084610 - DNA, 15 bp, Homo sapiens
tgtttctcagctggg

SEQ ID NO: 1084611 - DNA, 15 bp, Homo sapiens
atgtttctcagctgg

SEQ ID NO: 1084612 - DNA, 15 bp, Homo sapiens
aatgtttctcagctg

SEQ ID NO: 1084613 - DNA, 15 bp, Homo sapiens
caatgtttctcagct

SEQ ID NO: 1084614 - DNA, 15 bp, Homo sapiens
gcaatgtttctcagc

SEQ ID NO: 1084615 - DNA, 15 bp, Homo sapiens
agcaatgtttctcag

SEQ ID NO: 1084616 - DNA, 15 bp, Homo sapiens
taaagcaatgtttct

SEQ ID NO: 1084617 - DNA, 15 bp, Homo sapiens
ttaaagcaatgtttc

SEQ ID NO: 1084618 - DNA, 15 bp, Homo sapiens
tttaaagcaatgttt

SEQ ID NO: 1084619 - DNA, 15 bp, Homo sapiens
atttaaagcaatgtt

SEQ ID NO: 1084620 - DNA, 15 bp, Homo sapiens
tatttaaagcaatgt

SEQ ID NO: 1084621 - DNA, 15 bp, Homo sapiens
ttatttaaagcaatg

SEQ ID NO: 1084622 - DNA, 15 bp, Homo sapiens
attatttaaagcaat

SEQ ID NO: 1084623 - DNA, 15 bp, Homo sapiens
gattatttaaagcaa

SEQ ID NO: 1084624 - DNA, 15 bp, Homo sapiens
agattatttaaagca

SEQ ID NO: 1084625 - DNA, 15 bp, Homo sapiens
cagattatttaaagc

SEQ ID NO: 1084626 - DNA, 15 bp, Homo sapiens
acagattatttaaag

SEQ ID NO: 1084627 - DNA, 15 bp, Homo sapiens
cacagattatttaaa

SEQ ID NO: 1084628 - DNA, 15 bp, Homo sapiens
ccacagattatttaa

SEQ ID NO: 1084629 - DNA, 15 bp, Homo sapiens
accacagattattta

SEQ ID NO: 1084630 - DNA, 15 bp, Homo sapiens
caccacagattattt

SEQ ID NO: 1084631 - DNA, 15 bp, Homo sapiens
tcaccacagattatt

SEQ ID NO: 1084632 - DNA, 15 bp, Homo sapiens
ttcaccacagattat

SEQ ID NO: 1084633 - DNA, 15 bp, Homo sapiens
tttcaccacagatta

SEQ ID NO: 1084634 - DNA, 15 bp, Homo sapiens
ctttcaccacagatt

SEQ ID NO: 1084635 - DNA, 15 bp, Homo sapiens
cctttcaccacagat

SEQ ID NO: 1084636 - DNA, 15 bp, Homo sapiens
tcctttcaccacaga

SEQ ID NO: 1084637 - DNA, 15 bp, Homo sapiens
ttcctttcaccacag

SEQ ID NO: 1084638 - DNA, 15 bp, Homo sapiens
cttcctttcaccaca

SEQ ID NO: 1084639 - DNA, 15 bp, Homo sapiens
acttcctttcaccac

SEQ ID NO: 1084640 - DNA, 15 bp, Homo sapiens
aacttcctttcacca

SEQ ID NO: 1084641 - DNA, 15 bp, Homo sapiens
gaacttcctttcacc

SEQ ID NO: 1084642 - DNA, 15 bp, Homo sapiens
ggaacttcctttcac

SEQ ID NO: 1084643 - DNA, 15 bp, Homo sapiens
gggaacttcctttca

SEQ ID NO: 1084644 - DNA, 15 bp, Homo sapiens
tgggaacttcctttc

SEQ ID NO: 1084645 - DNA, 15 bp, Homo sapiens
gtgggaacttccttt

SEQ ID NO: 1084646 - DNA, 15 bp, Homo sapiens
ggtgggaacttcctt

SEQ ID NO: 1084647 - DNA, 15 bp, Homo sapiens
tggtgggaacttcct

SEQ ID NO: 1084648 - DNA, 15 bp, Homo sapiens
gtggtgggaacttcc

SEQ ID NO: 1084649 - DNA, 15 bp, Homo sapiens
ggtggtgggaacttc

SEQ ID NO: 1084650 - DNA, 15 bp, Homo sapiens
aggtggtgggaactt

SEQ ID NO: 1084651 - DNA, 15 bp, Homo sapiens
caggtggtgggaact

SEQ ID NO: 1084652 - DNA, 15 bp, Homo sapiens
gcaggtggtgggaac

SEQ ID NO: 1084653 - DNA, 15 bp, Homo sapiens
ggcaggtggtgggaa

SEQ ID NO: 1084654 - DNA, 15 bp, Homo sapiens
gggcaggtggtggga

SEQ ID NO: 1084655 - DNA, 15 bp, Homo sapiens
tgggcaggtggtggg

SEQ ID NO: 1084656 - DNA, 15 bp, Homo sapiens
gtgggcaggtggtgg

SEQ ID NO: 1084657 - DNA, 15 bp, Homo sapiens
agtgggcaggtggtg

SEQ ID NO: 1084658 - DNA, 15 bp, Homo sapiens
gagtgggcaggtggt

SEQ ID NO: 1084659 - DNA, 15 bp, Homo sapiens
tgagtgggcaggtgg

SEQ ID NO: 1084660 - DNA, 15 bp, Homo sapiens
gtgagtgggcaggtg

SEQ ID NO: 1084661 - DNA, 15 bp, Homo sapiens
agtgagtgggcaggt

SEQ ID NO: 1084662 - DNA, 15 bp, Homo sapiens
gagtgagtgggcagg

SEQ ID NO: 1084663 - DNA, 15 bp, Homo sapiens
tgagtgagtgggcag

SEQ ID NO: 1084664 - DNA, 15 bp, Homo sapiens
ctgagtgagtgggca

SEQ ID NO: 1084665 - DNA, 15 bp, Homo sapiens
actgagtgagtgggc

SEQ ID NO: 1084666 - DNA, 15 bp, Homo sapiens
tactgagtgagtggg

SEQ ID NO: 1084667 - DNA, 15 bp, Homo sapiens
gtactgagtgagtgg

SEQ ID NO: 1084668 - DNA, 15 bp, Homo sapiens
ggtactgagtgagtg

SEQ ID NO: 1084669 - DNA, 15 bp, Homo sapiens
aggtactgagtgagt

SEQ ID NO: 1084670 - DNA, 15 bp, Homo sapiens
gaggtactgagtgag

SEQ ID NO: 1084671 - DNA, 15 bp, Homo sapiens
agaggtactgagtga

SEQ ID NO: 1084672 - DNA, 15 bp, Homo sapiens
cagaggtactgagtg

SEQ ID NO: 1084673 - DNA, 15 bp, Homo sapiens
acagaggtactgagt

SEQ ID NO: 1084674 - DNA, 15 bp, Homo sapiens
gacagaggtactgag

SEQ ID NO: 1084675 - DNA, 15 bp, Homo sapiens
tgacagaggtactga

SEQ ID NO: 1084676 - DNA, 15 bp, Homo sapiens
gtgacagaggtactg

SEQ ID NO: 1084677 - DNA, 15 bp, Homo sapiens
ggtgacagaggtact

SEQ ID NO: 1084678 - DNA, 15 bp, Homo sapiens
tggtgacagaggtac

SEQ ID NO: 1084679 - DNA, 15 bp, Homo sapiens
ttggtgacagaggta

SEQ ID NO: 1084680 - DNA, 15 bp, Homo sapiens
gttggtgacagaggt

SEQ ID NO: 1084681 - DNA, 15 bp, Homo sapiens
ggttggtgacagagg

SEQ ID NO: 1084682 - DNA, 15 bp, Homo sapiens
gggttggtgacagag

SEQ ID NO: 1084683 - DNA, 15 bp, Homo sapiens
agggttggtgacaga

SEQ ID NO: 1084684 - DNA, 15 bp, Homo sapiens
gagggttggtgacag

SEQ ID NO: 1084685 - DNA, 15 bp, Homo sapiens
agagggttggtgaca

SEQ ID NO: 1084686 - DNA, 15 bp, Homo sapiens
aagagggttggtgac

SEQ ID NO: 1084687 - DNA, 15 bp, Homo sapiens
gaagagggttggtga

SEQ ID NO: 1084688 - DNA, 15 bp, Homo sapiens
ggaagagggttggtg

SEQ ID NO: 1084689 - DNA, 15 bp, Homo sapiens
gggaagagggttggt

SEQ ID NO: 1084690 - DNA, 15 bp, Homo sapiens
agggaagagggttgg

SEQ ID NO: 1084691 - DNA, 15 bp, Homo sapiens
cagggaagagggttg

SEQ ID NO: 1084692 - DNA, 15 bp, Homo sapiens
ccagggaagagggtt

SEQ ID NO: 1084693 - DNA, 15 bp, Homo sapiens
cccagggaagagggt

SEQ ID NO: 1084694 - DNA, 15 bp, Homo sapiens
acccagggaagaggg

SEQ ID NO: 1084695 - DNA, 15 bp, Homo sapiens
cacccagggaagagg

SEQ ID NO: 1084696 - DNA, 15 bp, Homo sapiens
acacccagggaagag

SEQ ID NO: 1084697 - DNA, 15 bp, Homo sapiens
aacacccagggaaga

SEQ ID NO: 1084698 - DNA, 15 bp, Homo sapiens
aaacacccagggaag

SEQ ID NO: 1084699 - DNA, 15 bp, Homo sapiens
gaaacacccagggaa

SEQ ID NO: 1084700 - DNA, 15 bp, Homo sapiens
ggaaacacccaggga

SEQ ID NO: 1084701 - DNA, 15 bp, Homo sapiens
tggaaacacccaggg

SEQ ID NO: 1084702 - DNA, 15 bp, Homo sapiens
ttggaaacacccagg

SEQ ID NO: 1084703 - DNA, 15 bp, Homo sapiens
cttggaaacacccag

SEQ ID NO: 1084704 - DNA, 15 bp, Homo sapiens
acttggaaacaccca

SEQ ID NO: 1084705 - DNA, 15 bp, Homo sapiens
tacttggaaacaccc

SEQ ID NO: 1084706 - DNA, 15 bp, Homo sapiens
gtacttggaaacacc

SEQ ID NO: 1084707 - DNA, 15 bp, Homo sapiens
tgtacttggaaacac

SEQ ID NO: 1084708 - DNA, 15 bp, Homo sapiens
ctgtacttggaaaca

SEQ ID NO: 1084709 - DNA, 15 bp, Homo sapiens
tctgtacttggaaac

SEQ ID NO: 1084710 - DNA, 15 bp, Homo sapiens
ctctgtacttggaaa

SEQ ID NO: 1084711 - DNA, 15 bp, Homo sapiens
cctctgtacttggaa

SEQ ID NO: 1084712 - DNA, 15 bp, Homo sapiens
ccctctgtacttgga

SEQ ID NO: 1084713 - DNA, 15 bp, Homo sapiens
accctctgtacttgg

SEQ ID NO: 1084714 - DNA, 15 bp, Homo sapiens
caccctctgtacttg

SEQ ID NO: 1084715 - DNA, 15 bp, Homo sapiens
ccaccctctgtactt

SEQ ID NO: 1084716 - DNA, 15 bp, Homo sapiens
tccaccctctgtact

SEQ ID NO: 1084717 - DNA, 15 bp, Homo sapiens
ttccaccctctgtac

SEQ ID NO: 1084718 - DNA, 15 bp, Homo sapiens
tttccaccctctgta

SEQ ID NO: 1084719 - DNA, 15 bp, Homo sapiens
ctttccaccctctgt

SEQ ID NO: 1084720 - DNA, 15 bp, Homo sapiens
cctttccaccctctg

SEQ ID NO: 1084721 - DNA, 15 bp, Homo sapiens
ccctttccaccctct

SEQ ID NO: 1084722 - DNA, 15 bp, Homo sapiens
gccctttccaccctc

SEQ ID NO: 1084723 - DNA, 15 bp, Homo sapiens
aagccctttccaccc

SEQ ID NO: 1084724 - DNA, 15 bp, Homo sapiens
aaagccctttccacc

SEQ ID NO: 1084725 - DNA, 15 bp, Homo sapiens
aaaagccctttccac

SEQ ID NO: 1084726 - DNA, 15 bp, Homo sapiens
gaaaagccctttcca

SEQ ID NO: 1084727 - DNA, 15 bp, Homo sapiens
ggaaaagccctttcc

SEQ ID NO: 1084728 - DNA, 15 bp, Homo sapiens
tggaaaagccctttc

SEQ ID NO: 1084729 - DNA, 15 bp, Homo sapiens
gtggaaaagcccttt

SEQ ID NO: 1084730 - DNA, 15 bp, Homo sapiens
tgtggaaaagccctt

SEQ ID NO: 1084731 - DNA, 15 bp, Homo sapiens
atgtggaaaagccct

SEQ ID NO: 1084732 - DNA, 15 bp, Homo sapiens
aatgtggaaaagccc

SEQ ID NO: 1084733 - DNA, 15 bp, Homo sapiens
aaatgtggaaaagcc

SEQ ID NO: 1084734 - DNA, 15 bp, Homo sapiens
gaaatgtggaaaagc

SEQ ID NO: 1084735 - DNA, 15 bp, Homo sapiens
ggaaatgtggaaaag

SEQ ID NO: 1084736 - DNA, 15 bp, Homo sapiens
gggaaatgtggaaaa

SEQ ID NO: 1084737 - DNA, 15 bp, Homo sapiens
ggggaaatgtggaaa

SEQ ID NO: 1084738 - DNA, 15 bp, Homo sapiens
aggggaaatgtggaa

SEQ ID NO: 1084739 - DNA, 15 bp, Homo sapiens
caggggaaatgtgga

SEQ ID NO: 1084740 - DNA, 15 bp, Homo sapiens
acaggggaaatgtgg

SEQ ID NO: 1084741 - DNA, 15 bp, Homo sapiens
aacaggggaaatgtg

SEQ ID NO: 1084742 - DNA, 15 bp, Homo sapiens
aaacaggggaaatgt

SEQ ID NO: 1084743 - DNA, 15 bp, Homo sapiens
aaaacaggggaaatg

SEQ ID NO: 1084744 - DNA, 15 bp, Homo sapiens
caaaacaggggaaat

SEQ ID NO: 1084745 - DNA, 15 bp, Homo sapiens
ccaaaacaggggaaa

SEQ ID NO: 1084746 - DNA, 15 bp, Homo sapiens
accaaaacaggggaa

SEQ ID NO: 1084747 - DNA, 15 bp, Homo sapiens
taccaaaacagggga

SEQ ID NO: 1084748 - DNA, 15 bp, Homo sapiens
ctaccaaaacagggg

SEQ ID NO: 1084749 - DNA, 15 bp, Homo sapiens
actaccaaaacaggg

SEQ ID NO: 1084750 - DNA, 15 bp, Homo sapiens
tactaccaaaacagg

SEQ ID NO: 1084751 - DNA, 15 bp, Homo sapiens
ttactaccaaaacag

SEQ ID NO: 1084752 - DNA, 15 bp, Homo sapiens
tttactaccaaaaca

SEQ ID NO: 1084753 - DNA, 15 bp, Homo sapiens
gtttactaccaaaac

SEQ ID NO: 1084754 - DNA, 15 bp, Homo sapiens
tgtttactaccaaaa

SEQ ID NO: 1084755 - DNA, 15 bp, Homo sapiens
atgtttactaccaaa

SEQ ID NO: 1084756 - DNA, 15 bp, Homo sapiens
aatgtttactaccaa

SEQ ID NO: 1084757 - DNA, 15 bp, Homo sapiens
taatgtttactacca

SEQ ID NO: 1084758 - DNA, 15 bp, Homo sapiens
ctaatgtttactacc

SEQ ID NO: 1084759 - DNA, 15 bp, Homo sapiens
cctaatgtttactac

SEQ ID NO: 1084760 - DNA, 15 bp, Homo sapiens
tcctaatgtttacta

SEQ ID NO: 1084761 - DNA, 15 bp, Homo sapiens
ttcctaatgtttact

SEQ ID NO: 1084762 - DNA, 15 bp, Homo sapiens
gttcctaatgtttac

SEQ ID NO: 1084763 - DNA, 15 bp, Homo sapiens
tgttcctaatgttta

SEQ ID NO: 1084764 - DNA, 15 bp, Homo sapiens
ctgttcctaatgttt

SEQ ID NO: 1084765 - DNA, 15 bp, Homo sapiens
gctgttcctaatgtt

SEQ ID NO: 1084766 - DNA, 15 bp, Homo sapiens
ggctgttcctaatgt

SEQ ID NO: 1084767 - DNA, 15 bp, Homo sapiens
tggctgttcctaatg

SEQ ID NO: 1084768 - DNA, 15 bp, Homo sapiens
atggctgttcctaat

SEQ ID NO: 1084769 - DNA, 15 bp, Homo sapiens
aatggctgttcctaa

SEQ ID NO: 1084770 - DNA, 15 bp, Homo sapiens
caatggctgttccta

SEQ ID NO: 1084771 - DNA, 15 bp, Homo sapiens
ccaatggctgttcct

SEQ ID NO: 1084772 - DNA, 15 bp, Homo sapiens
gccaatggctgttcc

SEQ ID NO: 1084773 - DNA, 15 bp, Homo sapiens
ggccaatggctgttc

SEQ ID NO: 1084774 - DNA, 15 bp, Homo sapiens
cggccaatggctgtt

SEQ ID NO: 1084775 - DNA, 15 bp, Homo sapiens
acggccaatggctgt

SEQ ID NO: 1084776 - DNA, 15 bp, Homo sapiens
cacggccaatggctg

SEQ ID NO: 1084777 - DNA, 15 bp, Homo sapiens
ccacggccaatggct

SEQ ID NO: 1084778 - DNA, 15 bp, Homo sapiens
gccacggccaatggc

SEQ ID NO: 1084779 - DNA, 15 bp, Homo sapiens
agccacggccaatgg

SEQ ID NO: 1084780 - DNA, 15 bp, Homo sapiens
tagccacggccaatg

SEQ ID NO: 1084781 - DNA, 15 bp, Homo sapiens
ctagccacggccaat

SEQ ID NO: 1084782 - DNA, 15 bp, Homo sapiens
cctagccacggccaa

SEQ ID NO: 1084783 - DNA, 15 bp, Homo sapiens
gcctagccacggcca

SEQ ID NO: 1084784 - DNA, 15 bp, Homo sapiens
agcctagccacggcc

SEQ ID NO: 1084785 - DNA, 15 bp, Homo sapiens
gagcctagccacggc

SEQ ID NO: 1084786 - DNA, 15 bp, Homo sapiens
tgagcctagccacgg

SEQ ID NO: 1084787 - DNA, 15 bp, Homo sapiens
ctgagcctagccacg

SEQ ID NO: 1084788 - DNA, 15 bp, Homo sapiens
gctgagcctagccac

SEQ ID NO: 1084789 - DNA, 15 bp, Homo sapiens
ggctgagcctagcca

SEQ ID NO: 1084790 - DNA, 15 bp, Homo sapiens
tggctgagcctagcc

SEQ ID NO: 1084791 - DNA, 15 bp, Homo sapiens
gtggctgagcctagc

SEQ ID NO: 1084792 - DNA, 15 bp, Homo sapiens
ggtggctgagcctag

SEQ ID NO: 1084793 - DNA, 15 bp, Homo sapiens
gggtggctgagccta

SEQ ID NO: 1084794 - DNA, 15 bp, Homo sapiens
tgggtggctgagcct

SEQ ID NO: 1084795 - DNA, 15 bp, Homo sapiens
gtgggtggctgagcc

SEQ ID NO: 1084796 - DNA, 15 bp, Homo sapiens
tgtgggtggctgagc

SEQ ID NO: 1084797 - DNA, 15 bp, Homo sapiens
ctgtgggtggctgag

SEQ ID NO: 1084798 - DNA, 15 bp, Homo sapiens
tctgtgggtggctga

SEQ ID NO: 1084799 - DNA, 15 bp, Homo sapiens
atctgtgggtggctg

SEQ ID NO: 1084800 - DNA, 15 bp, Homo sapiens
tatctgtgggtggct

SEQ ID NO: 1084801 - DNA, 15 bp, Homo sapiens
atatctgtgggtggc

SEQ ID NO: 1084802 - DNA, 15 bp, Homo sapiens
catatctgtgggtgg

SEQ ID NO: 1084803 - DNA, 15 bp, Homo sapiens
ccatatctgtgggtg

SEQ ID NO: 1084804 - DNA, 15 bp, Homo sapiens
tccatatctgtgggt

SEQ ID NO: 1084805 - DNA, 15 bp, Homo sapiens
gtccatatctgtggg

SEQ ID NO: 1084806 - DNA, 15 bp, Homo sapiens
tgtccatatctgtgg

SEQ ID NO: 1084807 - DNA, 15 bp, Homo sapiens
gtgtccatatctgtg

SEQ ID NO: 1084808 - DNA, 15 bp, Homo sapiens
tgtgtccatatctgt

SEQ ID NO: 1084809 - DNA, 15 bp, Homo sapiens
ctgtgtccatatctg

SEQ ID NO: 1084810 - DNA, 15 bp, Homo sapiens
actgtgtccatatct

SEQ ID NO: 1084811 - DNA, 15 bp, Homo sapiens
tactgtgtccatatc

SEQ ID NO: 1084812 - DNA, 15 bp, Homo sapiens
ctactgtgtccatat

SEQ ID NO: 1084813 - DNA, 15 bp, Homo sapiens
actactgtgtccata

SEQ ID NO: 1084814 - DNA, 15 bp, Homo sapiens
gactactgtgtccat

SEQ ID NO: 1084815 - DNA, 15 bp, Homo sapiens
agactactgtgtcca

SEQ ID NO: 1084816 - DNA, 15 bp, Homo sapiens
cagactactgtgtcc

SEQ ID NO: 1084817 - DNA, 15 bp, Homo sapiens
tcagactactgtgtc

SEQ ID NO: 1084818 - DNA, 15 bp, Homo sapiens
gtcagactactgtgt

SEQ ID NO: 1084819 - DNA, 15 bp, Homo sapiens
tgtcagactactgtg

SEQ ID NO: 1084820 - DNA, 15 bp, Homo sapiens
ttgtcagactactgt

SEQ ID NO: 1084821 - DNA, 15 bp, Homo sapiens
cttgtcagactactg

SEQ ID NO: 1084822 - DNA, 15 bp, Homo sapiens
gcttgtcagactact

SEQ ID NO: 1084823 - DNA, 15 bp, Homo sapiens
agcttgtcagactac

SEQ ID NO: 1084824 - DNA, 15 bp, Homo sapiens
cagcttgtcagacta

SEQ ID NO: 1084825 - DNA, 15 bp, Homo sapiens
ccagcttgtcagact

SEQ ID NO: 1084826 - DNA, 15 bp, Homo sapiens
cccagcttgtcagac

SEQ ID NO: 1084827 - DNA, 15 bp, Homo sapiens
acccagcttgtcaga

SEQ ID NO: 1084828 - DNA, 15 bp, Homo sapiens
aacccagcttgtcag

SEQ ID NO: 1084829 - DNA, 15 bp, Homo sapiens
caacccagcttgtca

SEQ ID NO: 1084830 - DNA, 15 bp, Homo sapiens
gcaacccagcttgtc

SEQ ID NO: 1084831 - DNA, 15 bp, Homo sapiens
agcaacccagcttgt

SEQ ID NO: 1084832 - DNA, 15 bp, Homo sapiens
cagcaacccagcttg

SEQ ID NO: 1084833 - DNA, 15 bp, Homo sapiens
ccagcaacccagctt

SEQ ID NO: 1084834 - DNA, 15 bp, Homo sapiens
cccagcaacccagct

SEQ ID NO: 1084835 - DNA, 15 bp, Homo sapiens
acccagcaacccagc

SEQ ID NO: 1084836 - DNA, 15 bp, Homo sapiens
cacccagcaacccag

SEQ ID NO: 1084837 - DNA, 15 bp, Homo sapiens
gcacccagcaaccca

SEQ ID NO: 1084838 - DNA, 15 bp, Homo sapiens
agcacccagcaaccc

SEQ ID NO: 1084839 - DNA, 15 bp, Homo sapiens
tagcacccagcaacc

SEQ ID NO: 1084840 - DNA, 15 bp, Homo sapiens
atagcacccagcaac

SEQ ID NO: 1084841 - DNA, 15 bp, Homo sapiens
gatagcacccagcaa

SEQ ID NO: 1084842 - DNA, 15 bp, Homo sapiens
tgatagcacccagca

SEQ ID NO: 1084843 - DNA, 15 bp, Homo sapiens
ctgatagcacccagc

SEQ ID NO: 1084844 - DNA, 15 bp, Homo sapiens
actgatagcacccag

SEQ ID NO: 1084845 - DNA, 15 bp, Homo sapiens
gactgatagcaccca

SEQ ID NO: 1084846 - DNA, 15 bp, Homo sapiens
ggactgatagcaccc

SEQ ID NO: 1084847 - DNA, 15 bp, Homo sapiens
tggactgatagcacc

SEQ ID NO: 1084848 - DNA, 15 bp, Homo sapiens
ctggactgatagcac

SEQ ID NO: 1084849 - DNA, 15 bp, Homo sapiens
cctggactgatagca

SEQ ID NO: 1084850 - DNA, 15 bp, Homo sapiens
gcctggactgatagc

SEQ ID NO: 1084851 - DNA, 15 bp, Homo sapiens
agcctggactgatag

SEQ ID NO: 1084852 - DNA, 15 bp, Homo sapiens
gagcctggactgata

SEQ ID NO: 1084853 - DNA, 15 bp, Homo sapiens
tgagcctggactgat

SEQ ID NO: 1084854 - DNA, 15 bp, Homo sapiens
ttgagcctggactga

SEQ ID NO: 1084855 - DNA, 15 bp, Homo sapiens
gttgagcctggactg

SEQ ID NO: 1084856 - DNA, 15 bp, Homo sapiens
agttgagcctggact

SEQ ID NO: 1084857 - DNA, 15 bp, Homo sapiens
cagttgagcctggac

SEQ ID NO: 1084858 - DNA, 15 bp, Homo sapiens
gcagttgagcctgga

SEQ ID NO: 1084859 - DNA, 15 bp, Homo sapiens
agcagttgagcctgg

SEQ ID NO: 1084860 - DNA, 15 bp, Homo sapiens
aagcagttgagcctg

SEQ ID NO: 1084861 - DNA, 15 bp, Homo sapiens
caagcagttgagcct

SEQ ID NO: 1084862 - DNA, 15 bp, Homo sapiens
gcaagcagttgagcc

SEQ ID NO: 1084863 - DNA, 15 bp, Homo sapiens
tgcaagcagttgagc

SEQ ID NO: 1084864 - DNA, 15 bp, Homo sapiens
gtgcaagcagttgag

SEQ ID NO: 1084865 - DNA, 15 bp, Homo sapiens
agtgcaagcagttga

SEQ ID NO: 1084866 - DNA, 15 bp, Homo sapiens
cagtgcaagcagttg

SEQ ID NO: 1084867 - DNA, 15 bp, Homo sapiens
tcagtgcaagcagtt

SEQ ID NO: 1084868 - DNA, 15 bp, Homo sapiens
gtcagtgcaagcagt

SEQ ID NO: 1084869 - DNA, 15 bp, Homo sapiens
tgtcagtgcaagcag

SEQ ID NO: 1084870 - DNA, 15 bp, Homo sapiens
gtgtcagtgcaagca

SEQ ID NO: 1084871 - DNA, 15 bp, Homo sapiens
ggtgtcagtgcaagc

SEQ ID NO: 1084872 - DNA, 15 bp, Homo sapiens
tggtgtcagtgcaag

SEQ ID NO: 1084873 - DNA, 15 bp, Homo sapiens
atggtgtcagtgcaa

SEQ ID NO: 1084874 - DNA, 15 bp, Homo sapiens
aatggtgtcagtgca

SEQ ID NO: 1084875 - DNA, 15 bp, Homo sapiens
aaatggtgtcagtgc

SEQ ID NO: 1084876 - DNA, 15 bp, Homo sapiens
gaaatggtgtcagtg

SEQ ID NO: 1084877 - DNA, 15 bp, Homo sapiens
ggaaatggtgtcagt

SEQ ID NO: 1084878 - DNA, 15 bp, Homo sapiens
gggaaatggtgtcag

SEQ ID NO: 1084879 - DNA, 15 bp, Homo sapiens
agggaaatggtgtca

SEQ ID NO: 1084880 - DNA, 15 bp, Homo sapiens
tagggaaatggtgtc

SEQ ID NO: 1084881 - DNA, 15 bp, Homo sapiens
atagggaaatggtgt

SEQ ID NO: 1084882 - DNA, 15 bp, Homo sapiens
tatagggaaatggtg

SEQ ID NO: 1084883 - DNA, 15 bp, Homo sapiens
ctatagggaaatggt

SEQ ID NO: 1084884 - DNA, 15 bp, Homo sapiens
cctatagggaaatgg

SEQ ID NO: 1084885 - DNA, 15 bp, Homo sapiens
tcctatagggaaatg

SEQ ID NO: 1084886 - DNA, 15 bp, Homo sapiens
ctcctatagggaaat

SEQ ID NO: 1084887 - DNA, 15 bp, Homo sapiens
cctcctatagggaaa

SEQ ID NO: 1084888 - DNA, 15 bp, Homo sapiens
gcctcctatagggaa

SEQ ID NO: 1084889 - DNA, 15 bp, Homo sapiens
tgcctcctataggga

SEQ ID NO: 1084890 - DNA, 15 bp, Homo sapiens
ctgcctcctataggg

SEQ ID NO: 1084891 - DNA, 15 bp, Homo sapiens
cctgcctcctatagg

SEQ ID NO: 1084892 - DNA, 15 bp, Homo sapiens
acctgcctcctatag

SEQ ID NO: 1084893 - DNA, 15 bp, Homo sapiens
cacctgcctcctata

SEQ ID NO: 1084894 - DNA, 15 bp, Homo sapiens
tcacctgcctcctat

SEQ ID NO: 1084895 - DNA, 15 bp, Homo sapiens
ctcacctgcctccta

SEQ ID NO: 1084896 - DNA, 15 bp, Homo sapiens
tctcacctgcctcct

SEQ ID NO: 1084897 - DNA, 15 bp, Homo sapiens
ctctcacctgcctcc

SEQ ID NO: 1084898 - DNA, 15 bp, Homo sapiens
gctctcacctgcctc

SEQ ID NO: 1084899 - DNA, 15 bp, Homo sapiens
ggctctcacctgcct

SEQ ID NO: 1084900 - DNA, 15 bp, Homo sapiens
tggctctcacctgcc

SEQ ID NO: 1084901 - DNA, 15 bp, Homo sapiens
atggctctcacctgc

SEQ ID NO: 1084902 - DNA, 15 bp, Homo sapiens
aatggctctcacctg

SEQ ID NO: 1084903 - DNA, 15 bp, Homo sapiens
aaatggctctcacct

SEQ ID NO: 1084904 - DNA, 15 bp, Homo sapiens
gaaatggctctcacc

SEQ ID NO: 1084905 - DNA, 15 bp, Homo sapiens
agaaatggctctcac

SEQ ID NO: 1084906 - DNA, 15 bp, Homo sapiens
cagaaatggctctca

SEQ ID NO: 1084907 - DNA, 15 bp, Homo sapiens
tcagaaatggctctc

SEQ ID NO: 1084908 - DNA, 15 bp, Homo sapiens
ctcagaaatggctct

SEQ ID NO: 1084909 - DNA, 15 bp, Homo sapiens
cctcagaaatggctc

SEQ ID NO: 1084910 - DNA, 15 bp, Homo sapiens
tcctcagaaatggct

SEQ ID NO: 1084911 - DNA, 15 bp, Homo sapiens
ttcctcagaaatggc

SEQ ID NO: 1084912 - DNA, 15 bp, Homo sapiens
tttcctcagaaatgg

SEQ ID NO: 1084913 - DNA, 15 bp, Homo sapiens
ctttcctcagaaatg

SEQ ID NO: 1084914 - DNA, 15 bp, Homo sapiens
actttcctcagaaat

SEQ ID NO: 1084915 - DNA, 15 bp, Homo sapiens
gactttcctcagaaa

SEQ ID NO: 1084916 - DNA, 15 bp, Homo sapiens
agactttcctcagaa

SEQ ID NO: 1084917 - DNA, 15 bp, Homo sapiens
gagactttcctcaga

SEQ ID NO: 1084918 - DNA, 15 bp, Homo sapiens
agagactttcctcag

SEQ ID NO: 1084919 - DNA, 15 bp, Homo sapiens
cagagactttcctca

SEQ ID NO: 1084920 - DNA, 15 bp, Homo sapiens
ccagagactttcctc

SEQ ID NO: 1084921 - DNA, 15 bp, Homo sapiens
tccagagactttcct

SEQ ID NO: 1084922 - DNA, 15 bp, Homo sapiens
ctccagagactttcc

SEQ ID NO: 1084923 - DNA, 15 bp, Homo sapiens
gctccagagactttc

SEQ ID NO: 1084924 - DNA, 15 bp, Homo sapiens
ggctccagagacttt

SEQ ID NO: 1084925 - DNA, 15 bp, Homo sapiens
gggctccagagactt

SEQ ID NO: 1084926 - DNA, 15 bp, Homo sapiens
ggggctccagagact

SEQ ID NO: 1084927 - DNA, 15 bp, Homo sapiens
aggggctccagagac

SEQ ID NO: 1084928 - DNA, 15 bp, Homo sapiens
gaggggctccagaga

SEQ ID NO: 1084929 - DNA, 15 bp, Homo sapiens
agaggggctccagag

SEQ ID NO: 1084930 - DNA, 15 bp, Homo sapiens
aagaggggctccaga

SEQ ID NO: 1084931 - DNA, 15 bp, Homo sapiens
gaagaggggctccag

SEQ ID NO: 1084932 - DNA, 15 bp, Homo sapiens
ggaagaggggctcca

SEQ ID NO: 1084933 - DNA, 15 bp, Homo sapiens
aggaagaggggctcc

SEQ ID NO: 1084934 - DNA, 15 bp, Homo sapiens
aaggaagaggggctc

SEQ ID NO: 1084935 - DNA, 15 bp, Homo sapiens
gaaggaagaggggct

SEQ ID NO: 1084936 - DNA, 15 bp, Homo sapiens
ggaaggaagaggggc

SEQ ID NO: 1084937 - DNA, 15 bp, Homo sapiens
tggaaggaagagggg

SEQ ID NO: 1084938 - DNA, 15 bp, Homo sapiens
gtggaaggaagaggg

SEQ ID NO: 1084939 - DNA, 15 bp, Homo sapiens
agtggaaggaagagg

SEQ ID NO: 1084940 - DNA, 15 bp, Homo sapiens
cagtggaaggaagag

SEQ ID NO: 1084941 - DNA, 15 bp, Homo sapiens
tcagtggaaggaaga

SEQ ID NO: 1084942 - DNA, 15 bp, Homo sapiens
ttcagtggaaggaag

SEQ ID NO: 1084943 - DNA, 15 bp, Homo sapiens
tttcagtggaaggaa

SEQ ID NO: 1084944 - DNA, 15 bp, Homo sapiens
ctttcagtggaagga

SEQ ID NO: 1084945 - DNA, 15 bp, Homo sapiens
actttcagtggaagg

SEQ ID NO: 1084946 - DNA, 15 bp, Homo sapiens
aactttcagtggaag

SEQ ID NO: 1084947 - DNA, 15 bp, Homo sapiens
caactttcagtggaa

SEQ ID NO: 1084948 - DNA, 15 bp, Homo sapiens
acaactttcagtgga

SEQ ID NO: 1084949 - DNA, 15 bp, Homo sapiens
cacaactttcagtgg

SEQ ID NO: 1084950 - DNA, 15 bp, Homo sapiens
gcacaactttcagtg

SEQ ID NO: 1084951 - DNA, 15 bp, Homo sapiens
tgcacaactttcagt

SEQ ID NO: 1084952 - DNA, 15 bp, Homo sapiens
ttgcacaactttcag

SEQ ID NO: 1084953 - DNA, 15 bp, Homo sapiens
tttgcacaactttca

SEQ ID NO: 1084954 - DNA, 15 bp, Homo sapiens
ttttgcacaactttc

SEQ ID NO: 1084955 - DNA, 15 bp, Homo sapiens
tttttgcacaacttt

SEQ ID NO: 1084956 - DNA, 15 bp, Homo sapiens
ctttttgcacaactt

SEQ ID NO: 1084957 - DNA, 15 bp, Homo sapiens
tctttttgcacaact

SEQ ID NO: 1084958 - DNA, 15 bp, Homo sapiens
atctttttgcacaac

SEQ ID NO: 1084959 - DNA, 15 bp, Homo sapiens
gatctttttgcacaa

SEQ ID NO: 1084960 - DNA, 15 bp, Homo sapiens
tgatctttttgcaca

SEQ ID NO: 1084961 - DNA, 15 bp, Homo sapiens
ctgatctttttgcac

SEQ ID NO: 1084962 - DNA, 15 bp, Homo sapiens
cctgatctttttgca

SEQ ID NO: 1084963 - DNA, 15 bp, Homo sapiens
tcctgatctttttgc

SEQ ID NO: 1084964 - DNA, 15 bp, Homo sapiens
ttcctgatctttttg

SEQ ID NO: 1084965 - DNA, 15 bp, Homo sapiens
cttcctgatcttttt

SEQ ID NO: 1084966 - DNA, 15 bp, Homo sapiens
tcttcctgatctttt

SEQ ID NO: 1084967 - DNA, 15 bp, Homo sapiens
gtcttcctgatcttt

SEQ ID NO: 1084968 - DNA, 15 bp, Homo sapiens
tgtcttcctgatctt

SEQ ID NO: 1084969 - DNA, 15 bp, Homo sapiens
ctgtcttcctgatct

SEQ ID NO: 1084970 - DNA, 15 bp, Homo sapiens
gctgtcttcctgatc

SEQ ID NO: 1084971 - DNA, 15 bp, Homo sapiens
cgctgtcttcctgat

SEQ ID NO: 1084972 - DNA, 15 bp, Homo sapiens
gcgctgtcttcctga

SEQ ID NO: 1084973 - DNA, 15 bp, Homo sapiens
agcgctgtcttcctg

SEQ ID NO: 1084974 - DNA, 15 bp, Homo sapiens
aagcgctgtcttcct

SEQ ID NO: 1084975 - DNA, 15 bp, Homo sapiens
caagcgctgtcttcc

SEQ ID NO: 1084976 - DNA, 15 bp, Homo sapiens
ccaagcgctgtcttc

SEQ ID NO: 1084977 - DNA, 15 bp, Homo sapiens
tccaagcgctgtctt

SEQ ID NO: 1084978 - DNA, 15 bp, Homo sapiens
atccaagcgctgtct

SEQ ID NO: 1084979 - DNA, 15 bp, Homo sapiens
catccaagcgctgtc

SEQ ID NO: 1084980 - DNA, 15 bp, Homo sapiens
ccatccaagcgctgt

SEQ ID NO: 1084981 - DNA, 15 bp, Homo sapiens
tccatccaagcgctg

SEQ ID NO: 1084982 - DNA, 15 bp, Homo sapiens
ttccatccaagcgct

SEQ ID NO: 1084983 - DNA, 15 bp, Homo sapiens
attccatccaagcgc

SEQ ID NO: 1084984 - DNA, 15 bp, Homo sapiens
tattccatccaagcg

SEQ ID NO: 1084985 - DNA, 15 bp, Homo sapiens
ttattccatccaagc

SEQ ID NO: 1084986 - DNA, 15 bp, Homo sapiens
tttattccatccaag

SEQ ID NO: 1084987 - DNA, 15 bp, Homo sapiens
atttattccatccaa

SEQ ID NO: 1084988 - DNA, 15 bp, Homo sapiens
aatttattccatcca

SEQ ID NO: 1084989 - DNA, 15 bp, Homo sapiens
aaatttattccatcc

SEQ ID NO: 1084990 - DNA, 15 bp, Homo sapiens
gaaatttattccatc

SEQ ID NO: 1084991 - DNA, 15 bp, Homo sapiens
tgaaatttattccat

SEQ ID NO: 1084992 - DNA, 15 bp, Homo sapiens
ctgaaatttattcca

SEQ ID NO: 1084993 - DNA, 15 bp, Homo sapiens
actgaaatttattcc

SEQ ID NO: 1084994 - DNA, 15 bp, Homo sapiens
cactgaaatttattc

SEQ ID NO: 1084995 - DNA, 15 bp, Homo sapiens
acactgaaatttatt

SEQ ID NO: 1084996 - DNA, 15 bp, Homo sapiens
tacactgaaatttat

SEQ ID NO: 1084997 - DNA, 15 bp, Homo sapiens
atacactgaaattta

SEQ ID NO: 1084998 - DNA, 15 bp, Homo sapiens
gatacactgaaattt

SEQ ID NO: 1084999 - DNA, 15 bp, Homo sapiens
ggatacactgaaatt

SEQ ID NO: 1085000 - DNA, 15 bp, Homo sapiens
tggatacactgaaat

SEQ ID NO: 1085001 - DNA, 15 bp, Homo sapiens
gtggatacactgaaa

SEQ ID NO: 1085002 - DNA, 15 bp, Homo sapiens
agtggatacactgaa

SEQ ID NO: 1085003 - DNA, 15 bp, Homo sapiens
aagtggatacactga

SEQ ID NO: 1085004 - DNA, 15 bp, Homo sapiens
caagtggatacactg

SEQ ID NO: 1085005 - DNA, 15 bp, Homo sapiens
tcaagtggatacact

SEQ ID NO: 1085006 - DNA, 15 bp, Homo sapiens
gtcaagtggatacac

SEQ ID NO: 1085007 - DNA, 15 bp, Homo sapiens
tgtcaagtggataca

SEQ ID NO: 1085008 - DNA, 15 bp, Homo sapiens
gtgtcaagtggatac

SEQ ID NO: 1085009 - DNA, 15 bp, Homo sapiens
tgtgtcaagtggata

SEQ ID NO: 1085010 - DNA, 15 bp, Homo sapiens
atgtgtcaagtggat

SEQ ID NO: 1085011 - DNA, 15 bp, Homo sapiens
aatgtgtcaagtgga

SEQ ID NO: 1085012 - DNA, 15 bp, Homo sapiens
taatgtgtcaagtgg

SEQ ID NO: 1085013 - DNA, 15 bp, Homo sapiens
ataatgtgtcaagtg

SEQ ID NO: 1085014 - DNA, 15 bp, Homo sapiens
tataatgtgtcaagt

SEQ ID NO: 1085015 - DNA, 15 bp, Homo sapiens
ctataatgtgtcaag

SEQ ID NO: 1085016 - DNA, 15 bp, Homo sapiens
actataatgtgtcaa

SEQ ID NO: 1085017 - DNA, 15 bp, Homo sapiens
cactataatgtgtca

SEQ ID NO: 1085018 - DNA, 15 bp, Homo sapiens
ccactataatgtgtc

SEQ ID NO: 1085019 - DNA, 15 bp, Homo sapiens
gccactataatgtgt

SEQ ID NO: 1085020 - DNA, 15 bp, Homo sapiens
agccactataatgtg

SEQ ID NO: 1085021 - DNA, 15 bp, Homo sapiens
cagccactataatgt

SEQ ID NO: 1085022 - DNA, 15 bp, Homo sapiens
acagccactataatg

SEQ ID NO: 1085023 - DNA, 15 bp, Homo sapiens
gacagccactataat

SEQ ID NO: 1085024 - DNA, 15 bp, Homo sapiens
ggacagccactataa

SEQ ID NO: 1085025 - DNA, 15 bp, Homo sapiens
gggacagccactata

SEQ ID NO: 1085026 - DNA, 15 bp, Homo sapiens
tgggacagccactat

SEQ ID NO: 1085027 - DNA, 15 bp, Homo sapiens
ttgggacagccacta

SEQ ID NO: 1085028 - DNA, 15 bp, Homo sapiens
tttgggacagccact

SEQ ID NO: 1085029 - DNA, 15 bp, Homo sapiens
ctttgggacagccac

SEQ ID NO: 1085030 - DNA, 15 bp, Homo sapiens
actttgggacagcca

SEQ ID NO: 1085031 - DNA, 15 bp, Homo sapiens
aactttgggacagcc

SEQ ID NO: 1085032 - DNA, 15 bp, Homo sapiens
aaactttgggacagc

SEQ ID NO: 1085033 - DNA, 15 bp, Homo sapiens
taaactttgggacag

SEQ ID NO: 1085034 - DNA, 15 bp, Homo sapiens
gtaaactttgggaca

SEQ ID NO: 1085035 - DNA, 15 bp, Homo sapiens
ggtaaactttgggac

SEQ ID NO: 1085036 - DNA, 15 bp, Homo sapiens
aggtaaactttggga

SEQ ID NO: 1085037 - DNA, 15 bp, Homo sapiens
aaggtaaactttggg

SEQ ID NO: 1085038 - DNA, 15 bp, Homo sapiens
taaggtaaactttgg

SEQ ID NO: 1085039 - DNA, 15 bp, Homo sapiens
ataaggtaaactttg

SEQ ID NO: 1085040 - DNA, 15 bp, Homo sapiens
cataaggtaaacttt

SEQ ID NO: 1085041 - DNA, 15 bp, Homo sapiens
gcataaggtaaactt

SEQ ID NO: 1085042 - DNA, 15 bp, Homo sapiens
ggcataaggtaaact

SEQ ID NO: 1085043 - DNA, 15 bp, Homo sapiens
tggcataaggtaaac

SEQ ID NO: 1085044 - DNA, 15 bp, Homo sapiens
ttggcataaggtaaa

SEQ ID NO: 1085045 - DNA, 15 bp, Homo sapiens
cttggcataaggtaa

SEQ ID NO: 1085046 - DNA, 15 bp, Homo sapiens
acttggcataaggta

SEQ ID NO: 1085047 - DNA, 15 bp, Homo sapiens
tacttggcataaggt

SEQ ID NO: 1085048 - DNA, 15 bp, Homo sapiens
gtacttggcataagg

SEQ ID NO: 1085049 - DNA, 15 bp, Homo sapiens
agtacttggcataag

SEQ ID NO: 1085050 - DNA, 15 bp, Homo sapiens
aagtacttggcataa

SEQ ID NO: 1085051 - DNA, 15 bp, Homo sapiens
aaagtacttggcata

SEQ ID NO: 1085052 - DNA, 15 bp, Homo sapiens
gaaagtacttggcat

SEQ ID NO: 1085053 - DNA, 15 bp, Homo sapiens
ggaaagtacttggca

SEQ ID NO: 1085054 - DNA, 15 bp, Homo sapiens
tggaaagtacttggc

SEQ ID NO: 1085055 - DNA, 15 bp, Homo sapiens
atggaaagtacttgg

SEQ ID NO: 1085056 - DNA, 15 bp, Homo sapiens
catggaaagtacttg

SEQ ID NO: 1085057 - DNA, 15 bp, Homo sapiens
acatggaaagtactt

SEQ ID NO: 1085058 - DNA, 15 bp, Homo sapiens
cacatggaaagtact

SEQ ID NO: 1085059 - DNA, 15 bp, Homo sapiens
gcacatggaaagtac

SEQ ID NO: 1085060 - DNA, 15 bp, Homo sapiens
ggcacatggaaagta

SEQ ID NO: 1085061 - DNA, 15 bp, Homo sapiens
tggcacatggaaagt

SEQ ID NO: 1085062 - DNA, 15 bp, Homo sapiens
gtggcacatggaaag

SEQ ID NO: 1085063 - DNA, 15 bp, Homo sapiens
tgtggcacatggaaa

SEQ ID NO: 1085064 - DNA, 15 bp, Homo sapiens
atgtggcacatggaa

SEQ ID NO: 1085065 - DNA, 15 bp, Homo sapiens
gatgtggcacatgga

SEQ ID NO: 1085066 - DNA, 15 bp, Homo sapiens
tgatgtggcacatgg

SEQ ID NO: 1085067 - DNA, 15 bp, Homo sapiens
atgatgtggcacatg

SEQ ID NO: 1085068 - DNA, 15 bp, Homo sapiens
aatgatgtggcacat

SEQ ID NO: 1085069 - DNA, 15 bp, Homo sapiens
aaatgatgtggcaca

SEQ ID NO: 1085070 - DNA, 15 bp, Homo sapiens
taaatgatgtggcac

SEQ ID NO: 1085071 - DNA, 15 bp, Homo sapiens
ttaaatgatgtggca

SEQ ID NO: 1085072 - DNA, 15 bp, Homo sapiens
attaaatgatgtggc

SEQ ID NO: 1085073 - DNA, 15 bp, Homo sapiens
gattaaatgatgtgg

SEQ ID NO: 1085074 - DNA, 15 bp, Homo sapiens
ggattaaatgatgtg

SEQ ID NO: 1085075 - DNA, 15 bp, Homo sapiens
aggattaaatgatgt

SEQ ID NO: 1085076 - DNA, 15 bp, Homo sapiens
gaggattaaatgatg

SEQ ID NO: 1085077 - DNA, 15 bp, Homo sapiens
tgaggattaaatgat

SEQ ID NO: 1085078 - DNA, 15 bp, Homo sapiens
tgtgaggattaaatg

SEQ ID NO: 1085079 - DNA, 15 bp, Homo sapiens
ttgtgaggattaaat

SEQ ID NO: 1085080 - DNA, 15 bp, Homo sapiens
tttgtgaggattaaa

SEQ ID NO: 1085081 - DNA, 15 bp, Homo sapiens
ttttgtgaggattaa

SEQ ID NO: 1085082 - DNA, 15 bp, Homo sapiens
tttttgtgaggatta

SEQ ID NO: 1085083 - DNA, 15 bp, Homo sapiens
gtttttgtgaggatt

SEQ ID NO: 1085084 - DNA, 15 bp, Homo sapiens
tgtttttgtgaggat

SEQ ID NO: 1085085 - DNA, 15 bp, Homo sapiens
ctgtttttgtgagga

SEQ ID NO: 1085086 - DNA, 15 bp, Homo sapiens
cctgtttttgtgagg

SEQ ID NO: 1085087 - DNA, 15 bp, Homo sapiens
ccctgtttttgtgag

SEQ ID NO: 1085088 - DNA, 15 bp, Homo sapiens
cccctgtttttgtga

SEQ ID NO: 1085089 - DNA, 15 bp, Homo sapiens
tcccctgtttttgtg

SEQ ID NO: 1085090 - DNA, 15 bp, Homo sapiens
ttcccctgtttttgt

SEQ ID NO: 1085091 - DNA, 15 bp, Homo sapiens
tttcccctgtttttg

SEQ ID NO: 1085092 - DNA, 15 bp, Homo sapiens
ttttcccctgttttt

SEQ ID NO: 1085093 - DNA, 15 bp, Homo sapiens
attttcccctgtttt

SEQ ID NO: 1085094 - DNA, 15 bp, Homo sapiens
tattttcccctgttt

SEQ ID NO: 1085095 - DNA, 15 bp, Homo sapiens
atattttcccctgtt

SEQ ID NO: 1085096 - DNA, 15 bp, Homo sapiens
aatattttcccctgt

SEQ ID NO: 1085097 - DNA, 15 bp, Homo sapiens
taatattttcccctg

SEQ ID NO: 1085098 - DNA, 15 bp, Homo sapiens
ataatattttcccct

SEQ ID NO: 1085099 - DNA, 15 bp, Homo sapiens
aataatattttcccc

SEQ ID NO: 1085100 - DNA, 15 bp, Homo sapiens
caataatattttccc

SEQ ID NO: 1085101 - DNA, 15 bp, Homo sapiens
gcaataatattttcc

SEQ ID NO: 1085102 - DNA, 15 bp, Homo sapiens
ggcaataatattttc

SEQ ID NO: 1085103 - DNA, 15 bp, Homo sapiens
tggcaataatatttt

SEQ ID NO: 1085104 - DNA, 15 bp, Homo sapiens
gtggcaataatattt

SEQ ID NO: 1085105 - DNA, 15 bp, Homo sapiens
ggtggcaataatatt

SEQ ID NO: 1085106 - DNA, 15 bp, Homo sapiens
gggtggcaataatat

SEQ ID NO: 1085107 - DNA, 15 bp, Homo sapiens
agggtggcaataata

SEQ ID NO: 1085108 - DNA, 15 bp, Homo sapiens
tagggtggcaataat

SEQ ID NO: 1085109 - DNA, 15 bp, Homo sapiens
gtagggtggcaataa

SEQ ID NO: 1085110 - DNA, 15 bp, Homo sapiens
tgtagggtggcaata

SEQ ID NO: 1085111 - DNA, 15 bp, Homo sapiens
ctgtagggtggcaat

SEQ ID NO: 1085112 - DNA, 15 bp, Homo sapiens
tctgtagggtggcaa

SEQ ID NO: 1085113 - DNA, 15 bp, Homo sapiens
gtctgtagggtggca

SEQ ID NO: 1085114 - DNA, 15 bp, Homo sapiens
tgtctgtagggtggc

SEQ ID NO: 1085115 - DNA, 15 bp, Homo sapiens
atgtctgtagggtgg

SEQ ID NO: 1085116 - DNA, 15 bp, Homo sapiens
tatgtctgtagggtg

SEQ ID NO: 1085117 - DNA, 15 bp, Homo sapiens
ctatgtctgtagggt

SEQ ID NO: 1085118 - DNA, 15 bp, Homo sapiens
tctatgtctgtaggg

SEQ ID NO: 1085119 - DNA, 15 bp, Homo sapiens
ctctatgtctgtagg

SEQ ID NO: 1085120 - DNA, 15 bp, Homo sapiens
tctctatgtctgtag

SEQ ID NO: 1085121 - DNA, 15 bp, Homo sapiens
gtctctatgtctgta

SEQ ID NO: 1085122 - DNA, 15 bp, Homo sapiens
agtctctatgtctgt

SEQ ID NO: 1085123 - DNA, 15 bp, Homo sapiens
cagtctctatgtctg

SEQ ID NO: 1085124 - DNA, 15 bp, Homo sapiens
tcagtctctatgtct

SEQ ID NO: 1085125 - DNA, 15 bp, Homo sapiens
ctcagtctctatgtc

SEQ ID NO: 1085126 - DNA, 15 bp, Homo sapiens
tctcagtctctatgt

SEQ ID NO: 1085127 - DNA, 15 bp, Homo sapiens
atctcagtctctatg

SEQ ID NO: 1085128 - DNA, 15 bp, Homo sapiens
aatctcagtctctat

SEQ ID NO: 1085129 - DNA, 15 bp, Homo sapiens
gaatctcagtctcta

SEQ ID NO: 1085130 - DNA, 15 bp, Homo sapiens
tgaatctcagtctct

SEQ ID NO: 1085131 - DNA, 15 bp, Homo sapiens
ttgaatctcagtctc

SEQ ID NO: 1085132 - DNA, 15 bp, Homo sapiens
attgaatctcagtct

SEQ ID NO: 1085133 - DNA, 15 bp, Homo sapiens
aattgaatctcagtc

SEQ ID NO: 1085134 - DNA, 15 bp, Homo sapiens
aaattgaatctcagt

SEQ ID NO: 1085135 - DNA, 15 bp, Homo sapiens
taaattgaatctcag

SEQ ID NO: 1085136 - DNA, 15 bp, Homo sapiens
ttaaattgaatctca

SEQ ID NO: 1085137 - DNA, 15 bp, Homo sapiens
cttaaattgaatctc

SEQ ID NO: 1085138 - DNA, 15 bp, Homo sapiens
ccttaaattgaatct

SEQ ID NO: 1085139 - DNA, 15 bp, Homo sapiens
tccttaaattgaatc

SEQ ID NO: 1085140 - DNA, 15 bp, Homo sapiens
ctccttaaattgaat

SEQ ID NO: 1085141 - DNA, 15 bp, Homo sapiens
tctccttaaattgaa

SEQ ID NO: 1085142 - DNA, 15 bp, Homo sapiens
atctccttaaattga

SEQ ID NO: 1085143 - DNA, 15 bp, Homo sapiens
catctccttaaattg

SEQ ID NO: 1085144 - DNA, 15 bp, Homo sapiens
ccatctccttaaatt

SEQ ID NO: 1085145 - DNA, 15 bp, Homo sapiens
accatctccttaaat

SEQ ID NO: 1085146 - DNA, 15 bp, Homo sapiens
aaccatctccttaaa

SEQ ID NO: 1085147 - DNA, 15 bp, Homo sapiens
caaccatctccttaa

SEQ ID NO: 1085148 - DNA, 15 bp, Homo sapiens
ccaaccatctcctta

SEQ ID NO: 1085149 - DNA, 15 bp, Homo sapiens
accaaccatctcctt

SEQ ID NO: 1085150 - DNA, 15 bp, Homo sapiens
taccaaccatctcct

SEQ ID NO: 1085151 - DNA, 15 bp, Homo sapiens
ttaccaaccatctcc

SEQ ID NO: 1085152 - DNA, 15 bp, Homo sapiens
cttaccaaccatctc

SEQ ID NO: 1085153 - DNA, 15 bp, Homo sapiens
ccttaccaaccatct

SEQ ID NO: 1085154 - DNA, 15 bp, Homo sapiens
cccttaccaaccatc

SEQ ID NO: 1085155 - DNA, 15 bp, Homo sapiens
tcccttaccaaccat

SEQ ID NO: 1085156 - DNA, 15 bp, Homo sapiens
gtcccttaccaacca

SEQ ID NO: 1085157 - DNA, 15 bp, Homo sapiens
tgtcccttaccaacc

SEQ ID NO: 1085158 - DNA, 15 bp, Homo sapiens
ctgtcccttaccaac

SEQ ID NO: 1085159 - DNA, 15 bp, Homo sapiens
tctgtcccttaccaa

SEQ ID NO: 1085160 - DNA, 15 bp, Homo sapiens
ctctgtcccttacca

SEQ ID NO: 1085161 - DNA, 15 bp, Homo sapiens
actctgtcccttacc

SEQ ID NO: 1085162 - DNA, 15 bp, Homo sapiens
aactctgtcccttac

SEQ ID NO: 1085163 - DNA, 15 bp, Homo sapiens
caactctgtccctta

SEQ ID NO: 1085164 - DNA, 15 bp, Homo sapiens
ccaactctgtccctt

SEQ ID NO: 1085165 - DNA, 15 bp, Homo sapiens
cccaactctgtccct

SEQ ID NO: 1085166 - DNA, 15 bp, Homo sapiens
ccccaactctgtccc

SEQ ID NO: 1085167 - DNA, 15 bp, Homo sapiens
accccaactctgtcc

SEQ ID NO: 1085168 - DNA, 15 bp, Homo sapiens
aaccccaactctgtc

SEQ ID NO: 1085169 - DNA, 15 bp, Homo sapiens
gaaccccaactctgt

SEQ ID NO: 1085170 - DNA, 15 bp, Homo sapiens
tgaaccccaactctg

SEQ ID NO: 1085171 - DNA, 15 bp, Homo sapiens
ctgaaccccaactct

SEQ ID NO: 1085172 - DNA, 15 bp, Homo sapiens
tctgaaccccaactc

SEQ ID NO: 1085173 - DNA, 15 bp, Homo sapiens
atctgaaccccaact

SEQ ID NO: 1085174 - DNA, 15 bp, Homo sapiens
catctgaaccccaac

SEQ ID NO: 1085175 - DNA, 15 bp, Homo sapiens
acatctgaaccccaa

SEQ ID NO: 1085176 - DNA, 15 bp, Homo sapiens
gacatctgaacccca

SEQ ID NO: 1085177 - DNA, 15 bp, Homo sapiens
tgacatctgaacccc

SEQ ID NO: 1085178 - DNA, 15 bp, Homo sapiens
ttgacatctgaaccc

SEQ ID NO: 1085179 - DNA, 15 bp, Homo sapiens
gttgacatctgaacc

SEQ ID NO: 1085180 - DNA, 15 bp, Homo sapiens
tgttgacatctgaac

SEQ ID NO: 1085181 - DNA, 15 bp, Homo sapiens
ctgttgacatctgaa

SEQ ID NO: 1085182 - DNA, 15 bp, Homo sapiens
actgttgacatctga

SEQ ID NO: 1085183 - DNA, 15 bp, Homo sapiens
cactgttgacatctg

SEQ ID NO: 1085184 - DNA, 15 bp, Homo sapiens
tcactgttgacatct

SEQ ID NO: 1085185 - DNA, 15 bp, Homo sapiens
ttcactgttgacatc

SEQ ID NO: 1085186 - DNA, 15 bp, Homo sapiens
tttcactgttgacat

SEQ ID NO: 1085187 - DNA, 15 bp, Homo sapiens
atttcactgttgaca

SEQ ID NO: 1085188 - DNA, 15 bp, Homo sapiens
catttcactgttgac

SEQ ID NO: 1085189 - DNA, 15 bp, Homo sapiens
gcatttcactgttga

SEQ ID NO: 1085190 - DNA, 15 bp, Homo sapiens
agcatttcactgttg

SEQ ID NO: 1085191 - DNA, 15 bp, Homo sapiens
aagcatttcactgtt

SEQ ID NO: 1085192 - DNA, 15 bp, Homo sapiens
taagcatttcactgt

SEQ ID NO: 1085193 - DNA, 15 bp, Homo sapiens
ttaagcatttcactg

SEQ ID NO: 1085194 - DNA, 15 bp, Homo sapiens
gttaagcatttcact

SEQ ID NO: 1085195 - DNA, 15 bp, Homo sapiens
tgttaagcatttcac

SEQ ID NO: 1085196 - DNA, 15 bp, Homo sapiens
ttgttaagcatttca

SEQ ID NO: 1085197 - DNA, 15 bp, Homo sapiens
tttgttaagcatttc

SEQ ID NO: 1085198 - DNA, 15 bp, Homo sapiens
gtttgttaagcattt

SEQ ID NO: 1085199 - DNA, 15 bp, Homo sapiens
agtttgttaagcatt

SEQ ID NO: 1085200 - DNA, 15 bp, Homo sapiens
cagtttgttaagcat

SEQ ID NO: 1085201 - DNA, 15 bp, Homo sapiens
acagtttgttaagca

SEQ ID NO: 1085202 - DNA, 15 bp, Homo sapiens
gacagtttgttaagc

SEQ ID NO: 1085203 - DNA, 15 bp, Homo sapiens
tgacagtttgttaag

SEQ ID NO: 1085204 - DNA, 15 bp, Homo sapiens
atgacagtttgttaa

SEQ ID NO: 1085205 - DNA, 15 bp, Homo sapiens
catgacagtttgtta

SEQ ID NO: 1085206 - DNA, 15 bp, Homo sapiens
gcatgacagtttgtt

SEQ ID NO: 1085207 - DNA, 15 bp, Homo sapiens
tgcatgacagtttgt

SEQ ID NO: 1085208 - DNA, 15 bp, Homo sapiens
ctgcatgacagtttg

SEQ ID NO: 1085209 - DNA, 15 bp, Homo sapiens
gctgcatgacagttt

SEQ ID NO: 1085210 - DNA, 15 bp, Homo sapiens
ggctgcatgacagtt

SEQ ID NO: 1085211 - DNA, 15 bp, Homo sapiens
gggctgcatgacagt

SEQ ID NO: 1085212 - DNA, 15 bp, Homo sapiens
tgggctgcatgacag

SEQ ID NO: 1085213 - DNA, 15 bp, Homo sapiens
gtgggctgcatgaca

SEQ ID NO: 1085214 - DNA, 15 bp, Homo sapiens
agtgggctgcatgac

SEQ ID NO: 1085215 - DNA, 15 bp, Homo sapiens
gagtgggctgcatga

SEQ ID NO: 1085216 - DNA, 15 bp, Homo sapiens
ggagtgggctgcatg

SEQ ID NO: 1085217 - DNA, 15 bp, Homo sapiens
aggagtgggctgcat

SEQ ID NO: 1085218 - DNA, 15 bp, Homo sapiens
caggagtgggctgca

SEQ ID NO: 1085219 - DNA, 15 bp, Homo sapiens
ccaggagtgggctgc

SEQ ID NO: 1085220 - DNA, 15 bp, Homo sapiens
gccaggagtgggctg

SEQ ID NO: 1085221 - DNA, 15 bp, Homo sapiens
tgccaggagtgggct

SEQ ID NO: 1085222 - DNA, 15 bp, Homo sapiens
ttgccaggagtgggc

SEQ ID NO: 1085223 - DNA, 15 bp, Homo sapiens
gttgccaggagtggg

SEQ ID NO: 1085224 - DNA, 15 bp, Homo sapiens
agttgccaggagtgg

SEQ ID NO: 1085225 - DNA, 15 bp, Homo sapiens
gagttgccaggagtg

SEQ ID NO: 1085226 - DNA, 15 bp, Homo sapiens
agagttgccaggagt

SEQ ID NO: 1085227 - DNA, 15 bp, Homo sapiens
aagagttgccaggag

SEQ ID NO: 1085228 - DNA, 15 bp, Homo sapiens
gaagagttgccagga

SEQ ID NO: 1085229 - DNA, 15 bp, Homo sapiens
ggaagagttgccagg

SEQ ID NO: 1085230 - DNA, 15 bp, Homo sapiens
aggaagagttgccag

SEQ ID NO: 1085231 - DNA, 15 bp, Homo sapiens
caggaagagttgcca

SEQ ID NO: 1085232 - DNA, 15 bp, Homo sapiens
gcaggaagagttgcc

SEQ ID NO: 1085233 - DNA, 15 bp, Homo sapiens
agcaggaagagttgc

SEQ ID NO: 1085234 - DNA, 15 bp, Homo sapiens
gagcaggaagagttg

SEQ ID NO: 1085235 - DNA, 15 bp, Homo sapiens
ggagcaggaagagtt

SEQ ID NO: 1085236 - DNA, 15 bp, Homo sapiens
aggagcaggaagagt

SEQ ID NO: 1085237 - DNA, 15 bp, Homo sapiens
gaggagcaggaagag

SEQ ID NO: 1085238 - DNA, 15 bp, Homo sapiens
agaggagcaggaaga

SEQ ID NO: 1085239 - DNA, 15 bp, Homo sapiens
gagaggagcaggaag

SEQ ID NO: 1085240 - DNA, 15 bp, Homo sapiens
agagaggagcaggaa

SEQ ID NO: 1085241 - DNA, 15 bp, Homo sapiens
cagagaggagcagga

SEQ ID NO: 1085242 - DNA, 15 bp, Homo sapiens
ccagagaggagcagg

SEQ ID NO: 1085243 - DNA, 15 bp, Homo sapiens
gccagagaggagcag

SEQ ID NO: 1085244 - DNA, 15 bp, Homo sapiens
ggccagagaggagca

SEQ ID NO: 1085245 - DNA, 15 bp, Homo sapiens
aggccagagaggagc

SEQ ID NO: 1085246 - DNA, 15 bp, Homo sapiens
gaggccagagaggag

SEQ ID NO: 1085247 - DNA, 15 bp, Homo sapiens
tgaggccagagagga

SEQ ID NO: 1085248 - DNA, 15 bp, Homo sapiens
gtgaggccagagagg

SEQ ID NO: 1085249 - DNA, 15 bp, Homo sapiens
agtgaggccagagag

SEQ ID NO: 1085250 - DNA, 15 bp, Homo sapiens
gagtgaggccagaga

SEQ ID NO: 1085251 - DNA, 15 bp, Homo sapiens
tgagtgaggccagag

SEQ ID NO: 1085252 - DNA, 15 bp, Homo sapiens
ctgagtgaggccaga

SEQ ID NO: 1085253 - DNA, 15 bp, Homo sapiens
gctgagtgaggccag

SEQ ID NO: 1085254 - DNA, 15 bp, Homo sapiens
ggctgagtgaggcca

SEQ ID NO: 1085255 - DNA, 15 bp, Homo sapiens
aggctgagtgaggcc

SEQ ID NO: 1085256 - DNA, 15 bp, Homo sapiens
gaggctgagtgaggc

SEQ ID NO: 1085257 - DNA, 15 bp, Homo sapiens
agaggctgagtgagg

SEQ ID NO: 1085258 - DNA, 15 bp, Homo sapiens
tagaggctgagtgag

SEQ ID NO: 1085259 - DNA, 15 bp, Homo sapiens
gtagaggctgagtga

SEQ ID NO: 1085260 - DNA, 15 bp, Homo sapiens
agtagaggctgagtg

SEQ ID NO: 1085261 - DNA, 15 bp, Homo sapiens
cagtagaggctgagt

SEQ ID NO: 1085262 - DNA, 15 bp, Homo sapiens
acagtagaggctgag

SEQ ID NO: 1085263 - DNA, 15 bp, Homo sapiens
aacagtagaggctga

SEQ ID NO: 1085264 - DNA, 15 bp, Homo sapiens
gaacagtagaggctg

SEQ ID NO: 1085265 - DNA, 15 bp, Homo sapiens
ggaacagtagaggct

SEQ ID NO: 1085266 - DNA, 15 bp, Homo sapiens
tggaacagtagaggc

SEQ ID NO: 1085267 - DNA, 15 bp, Homo sapiens
ctggaacagtagagg

SEQ ID NO: 1085268 - DNA, 15 bp, Homo sapiens
cctggaacagtagag

SEQ ID NO: 1085269 - DNA, 15 bp, Homo sapiens
tcctggaacagtaga

SEQ ID NO: 1085270 - DNA, 15 bp, Homo sapiens
ttcctggaacagtag

SEQ ID NO: 1085271 - DNA, 15 bp, Homo sapiens
cttcctggaacagta

SEQ ID NO: 1085272 - DNA, 15 bp, Homo sapiens
gcttcctggaacagt

SEQ ID NO: 1085273 - DNA, 15 bp, Homo sapiens
ggcttcctggaacag

SEQ ID NO: 1085274 - DNA, 15 bp, Homo sapiens
aggcttcctggaaca

SEQ ID NO: 1085275 - DNA, 15 bp, Homo sapiens
gaggcttcctggaac

SEQ ID NO: 1085276 - DNA, 15 bp, Homo sapiens
tgaggcttcctggaa

SEQ ID NO: 1085277 - DNA, 15 bp, Homo sapiens
atgaggcttcctgga

SEQ ID NO: 1085278 - DNA, 15 bp, Homo sapiens
aatgaggcttcctgg

SEQ ID NO: 1085279 - DNA, 15 bp, Homo sapiens
gaatgaggcttcctg

SEQ ID NO: 1085280 - DNA, 15 bp, Homo sapiens
tgaatgaggcttcct

SEQ ID NO: 1085281 - DNA, 15 bp, Homo sapiens
atgaatgaggcttcc

SEQ ID NO: 1085282 - DNA, 15 bp, Homo sapiens
tatgaatgaggcttc

SEQ ID NO: 1085283 - DNA, 15 bp, Homo sapiens
ctatgaatgaggctt

SEQ ID NO: 1085284 - DNA, 15 bp, Homo sapiens
actatgaatgaggct

SEQ ID NO: 1085285 - DNA, 15 bp, Homo sapiens
gactatgaatgaggc

SEQ ID NO: 1085286 - DNA, 15 bp, Homo sapiens
tgactatgaatgagg

SEQ ID NO: 1085287 - DNA, 15 bp, Homo sapiens
atgactatgaatgag

SEQ ID NO: 1085288 - DNA, 15 bp, Homo sapiens
catgactatgaatga

SEQ ID NO: 1085289 - DNA, 15 bp, Homo sapiens
acatgactatgaatg

SEQ ID NO: 1085290 - DNA, 15 bp, Homo sapiens
cacatgactatgaat

SEQ ID NO: 1085291 - DNA, 15 bp, Homo sapiens
ccacatgactatgaa

SEQ ID NO: 1085292 - DNA, 15 bp, Homo sapiens
accacatgactatga

SEQ ID NO: 1085293 - DNA, 15 bp, Homo sapiens
aaccacatgactatg

SEQ ID NO: 1085294 - DNA, 15 bp, Homo sapiens
caaccacatgactat

SEQ ID NO: 1085295 - DNA, 15 bp, Homo sapiens
gcaaccacatgacta

SEQ ID NO: 1085296 - DNA, 15 bp, Homo sapiens
tgcaaccacatgact

SEQ ID NO: 1085297 - DNA, 15 bp, Homo sapiens
ctgcaaccacatgac

SEQ ID NO: 1085298 - DNA, 15 bp, Homo sapiens
tctgcaaccacatga

SEQ ID NO: 1085299 - DNA, 15 bp, Homo sapiens
gtctgcaaccacatg

SEQ ID NO: 1085300 - DNA, 15 bp, Homo sapiens
agtctgcaaccacat

SEQ ID NO: 1085301 - DNA, 15 bp, Homo sapiens
aagtctgcaaccaca

SEQ ID NO: 1085302 - DNA, 15 bp, Homo sapiens
gaagtctgcaaccac

SEQ ID NO: 1085303 - DNA, 15 bp, Homo sapiens
ggaagtctgcaacca

SEQ ID NO: 1085304 - DNA, 15 bp, Homo sapiens
gggaagtctgcaacc

SEQ ID NO: 1085305 - DNA, 15 bp, Homo sapiens
tgggaagtctgcaac

SEQ ID NO: 1085306 - DNA, 15 bp, Homo sapiens
ttgggaagtctgcaa

SEQ ID NO: 1085307 - DNA, 15 bp, Homo sapiens
cttgggaagtctgca

SEQ ID NO: 1085308 - DNA, 15 bp, Homo sapiens
gcttgggaagtctgc

SEQ ID NO: 1085309 - DNA, 15 bp, Homo sapiens
agcttgggaagtctg

SEQ ID NO: 1085310 - DNA, 15 bp, Homo sapiens
gagcttgggaagtct

SEQ ID NO: 1085311 - DNA, 15 bp, Homo sapiens
tgagcttgggaagtc

SEQ ID NO: 1085312 - DNA, 15 bp, Homo sapiens
gtgagcttgggaagt

SEQ ID NO: 1085313 - DNA, 15 bp, Homo sapiens
agtgagcttgggaag

SEQ ID NO: 1085314 - DNA, 15 bp, Homo sapiens
cagtgagcttgggaa

SEQ ID NO: 1085315 - DNA, 15 bp, Homo sapiens
acagtgagcttggga

SEQ ID NO: 1085316 - DNA, 15 bp, Homo sapiens
acacagtgagcttgg

SEQ ID NO: 1085317 - DNA, 15 bp, Homo sapiens
aacacagtgagcttg

SEQ ID NO: 1085318 - DNA, 15 bp, Homo sapiens
taacacagtgagctt

SEQ ID NO: 1085319 - DNA, 15 bp, Homo sapiens
gtaacacagtgagct

SEQ ID NO: 1085320 - DNA, 15 bp, Homo sapiens
ggtaacacagtgagc

SEQ ID NO: 1085321 - DNA, 15 bp, Homo sapiens
tggtaacacagtgag

SEQ ID NO: 1085322 - DNA, 15 bp, Homo sapiens
ttggtaacacagtga

SEQ ID NO: 1085323 - DNA, 15 bp, Homo sapiens
tttggtaacacagtg

SEQ ID NO: 1085324 - DNA, 15 bp, Homo sapiens
ttttggtaacacagt

SEQ ID NO: 1085325 - DNA, 15 bp, Homo sapiens
tttttggtaacacag

SEQ ID NO: 1085326 - DNA, 15 bp, Homo sapiens
ctttttggtaacaca

SEQ ID NO: 1085327 - DNA, 15 bp, Homo sapiens
gctttttggtaacac

SEQ ID NO: 1085328 - DNA, 15 bp, Homo sapiens
tgctttttggtaaca

SEQ ID NO: 1085329 - DNA, 15 bp, Homo sapiens
ttgctttttggtaac

SEQ ID NO: 1085330 - DNA, 15 bp, Homo sapiens
cttgctttttggtaa

SEQ ID NO: 1085331 - DNA, 15 bp, Homo sapiens
tcttgctttttggta

SEQ ID NO: 1085332 - DNA, 15 bp, Homo sapiens
gtcttgctttttggt

SEQ ID NO: 1085333 - DNA, 15 bp, Homo sapiens
ggtcttgctttttgg

SEQ ID NO: 1085334 - DNA, 15 bp, Homo sapiens
aggtcttgctttttg

SEQ ID NO: 1085335 - DNA, 15 bp, Homo sapiens
caggtcttgcttttt

SEQ ID NO: 1085336 - DNA, 15 bp, Homo sapiens
gcaggtcttgctttt

SEQ ID NO: 1085337 - DNA, 15 bp, Homo sapiens
ggcaggtcttgcttt

SEQ ID NO: 1085338 - DNA, 15 bp, Homo sapiens
aggcaggtcttgctt

SEQ ID NO: 1085339 - DNA, 15 bp, Homo sapiens
aaggcaggtcttgct

SEQ ID NO: 1085340 - DNA, 15 bp, Homo sapiens
gaaggcaggtcttgc

SEQ ID NO: 1085341 - DNA, 15 bp, Homo sapiens
agaaggcaggtcttg

SEQ ID NO: 1085342 - DNA, 15 bp, Homo sapiens
cagaaggcaggtctt

SEQ ID NO: 1085343 - DNA, 15 bp, Homo sapiens
gcagaaggcaggtct

SEQ ID NO: 1085344 - DNA, 15 bp, Homo sapiens
agcagaaggcaggtc

SEQ ID NO: 1085345 - DNA, 15 bp, Homo sapiens
cagcagaaggcaggt

SEQ ID NO: 1085346 - DNA, 15 bp, Homo sapiens
gcagcagaaggcagg

SEQ ID NO: 1085347 - DNA, 15 bp, Homo sapiens
tgcagcagaaggcag

SEQ ID NO: 1085348 - DNA, 15 bp, Homo sapiens
atgcagcagaaggca

SEQ ID NO: 1085349 - DNA, 15 bp, Homo sapiens
gatgcagcagaaggc

SEQ ID NO: 1085350 - DNA, 15 bp, Homo sapiens
cgatgcagcagaagg

SEQ ID NO: 1085351 - DNA, 15 bp, Homo sapiens
gcgatgcagcagaag

SEQ ID NO: 1085352 - DNA, 15 bp, Homo sapiens
ggcgatgcagcagaa

SEQ ID NO: 1085353 - DNA, 15 bp, Homo sapiens
gggcgatgcagcaga

SEQ ID NO: 1085354 - DNA, 15 bp, Homo sapiens
ggggcgatgcagcag

SEQ ID NO: 1085355 - DNA, 15 bp, Homo sapiens
tggggcgatgcagca

SEQ ID NO: 1085356 - DNA, 15 bp, Homo sapiens
ctggggcgatgcagc

SEQ ID NO: 1085357 - DNA, 15 bp, Homo sapiens
gctggggcgatgcag

SEQ ID NO: 1085358 - DNA, 15 bp, Homo sapiens
agctggggcgatgca

SEQ ID NO: 1085359 - DNA, 15 bp, Homo sapiens
cagctggggcgatgc

SEQ ID NO: 1085360 - DNA, 15 bp, Homo sapiens
acagctggggcgatg

SEQ ID NO: 1085361 - DNA, 15 bp, Homo sapiens
gacagctggggcgat

SEQ ID NO: 1085362 - DNA, 15 bp, Homo sapiens
tgacagctggggcga

SEQ ID NO: 1085363 - DNA, 15 bp, Homo sapiens
gtgacagctggggcg

SEQ ID NO: 1085364 - DNA, 15 bp, Homo sapiens
ggtgacagctggggc

SEQ ID NO: 1085365 - DNA, 15 bp, Homo sapiens
gggtgacagctgggg

SEQ ID NO: 1085366 - DNA, 15 bp, Homo sapiens
tgggtgacagctggg

SEQ ID NO: 1085367 - DNA, 15 bp, Homo sapiens
ttgggtgacagctgg

SEQ ID NO: 1085368 - DNA, 15 bp, Homo sapiens
gttgggtgacagctg

SEQ ID NO: 1085369 - DNA, 15 bp, Homo sapiens
agttgggtgacagct

SEQ ID NO: 1085370 - DNA, 15 bp, Homo sapiens
aagttgggtgacagc

SEQ ID NO: 1085371 - DNA, 15 bp, Homo sapiens
caagttgggtgacag

SEQ ID NO: 1085372 - DNA, 15 bp, Homo sapiens
ccaagttgggtgaca

SEQ ID NO: 1085373 - DNA, 15 bp, Homo sapiens
tccaagttgggtgac

SEQ ID NO: 1085374 - DNA, 15 bp, Homo sapiens
atccaagttgggtga

SEQ ID NO: 1085375 - DNA, 15 bp, Homo sapiens
aatccaagttgggtg

SEQ ID NO: 1085376 - DNA, 15 bp, Homo sapiens
gaatccaagttgggt

SEQ ID NO: 1085377 - DNA, 15 bp, Homo sapiens
tgaatccaagttggg

SEQ ID NO: 1085378 - DNA, 15 bp, Homo sapiens
ctgaatccaagttgg

SEQ ID NO: 1085379 - DNA, 15 bp, Homo sapiens
actgaatccaagttg

SEQ ID NO: 1085380 - DNA, 15 bp, Homo sapiens
gactgaatccaagtt

SEQ ID NO: 1085381 - DNA, 15 bp, Homo sapiens
ggactgaatccaagt

SEQ ID NO: 1085382 - DNA, 15 bp, Homo sapiens
gggactgaatccaag

SEQ ID NO: 1085383 - DNA, 15 bp, Homo sapiens
tgggactgaatccaa

SEQ ID NO: 1085384 - DNA, 15 bp, Homo sapiens
ctgggactgaatcca

SEQ ID NO: 1085385 - DNA, 15 bp, Homo sapiens
gctgggactgaatcc

SEQ ID NO: 1085386 - DNA, 15 bp, Homo sapiens
tgctgggactgaatc

SEQ ID NO: 1085387 - DNA, 15 bp, Homo sapiens
gtgctgggactgaat

SEQ ID NO: 1085388 - DNA, 15 bp, Homo sapiens
agtgctgggactgaa

SEQ ID NO: 1085389 - DNA, 15 bp, Homo sapiens
cagtgctgggactga

SEQ ID NO: 1085390 - DNA, 15 bp, Homo sapiens
tcagtgctgggactg

SEQ ID NO: 1085391 - DNA, 15 bp, Homo sapiens
gtcagtgctgggact

SEQ ID NO: 1085392 - DNA, 15 bp, Homo sapiens
tgtcagtgctgggac

SEQ ID NO: 1085393 - DNA, 15 bp, Homo sapiens
gtgtcagtgctggga

SEQ ID NO: 1085394 - DNA, 15 bp, Homo sapiens
tgtgtcagtgctggg

SEQ ID NO: 1085395 - DNA, 15 bp, Homo sapiens
atgtgtcagtgctgg

SEQ ID NO: 1085396 - DNA, 15 bp, Homo sapiens
gatgtgtcagtgctg

SEQ ID NO: 1085397 - DNA, 15 bp, Homo sapiens
tgatgtgtcagtgct

SEQ ID NO: 1085398 - DNA, 15 bp, Homo sapiens
gtgatgtgtcagtgc

SEQ ID NO: 1085399 - DNA, 15 bp, Homo sapiens
tgtgatgtgtcagtg

SEQ ID NO: 1085400 - DNA, 15 bp, Homo sapiens
ttgtgatgtgtcagt

SEQ ID NO: 1085401 - DNA, 15 bp, Homo sapiens
tttgtgatgtgtcag

SEQ ID NO: 1085402 - DNA, 15 bp, Homo sapiens
ttttgtgatgtgtca

SEQ ID NO: 1085403 - DNA, 15 bp, Homo sapiens
attttgtgatgtgtc

SEQ ID NO: 1085404 - DNA, 15 bp, Homo sapiens
gattttgtgatgtgt

SEQ ID NO: 1085405 - DNA, 15 bp, Homo sapiens
tgattttgtgatgtg

SEQ ID NO: 1085406 - DNA, 15 bp, Homo sapiens
gtgattttgtgatgt

SEQ ID NO: 1085407 - DNA, 15 bp, Homo sapiens
tgtgattttgtgatg

SEQ ID NO: 1085408 - DNA, 15 bp, Homo sapiens
ttgtgattttgtgat

SEQ ID NO: 1085409 - DNA, 15 bp, Homo sapiens
tttgtgattttgtga

SEQ ID NO: 1085410 - DNA, 15 bp, Homo sapiens
ttttgtgattttgtg

SEQ ID NO: 1085411 - DNA, 15 bp, Homo sapiens
cttttgtgattttgt

SEQ ID NO: 1085412 - DNA, 15 bp, Homo sapiens
acttttgtgattttg

SEQ ID NO: 1085413 - DNA, 15 bp, Homo sapiens
cacttttgtgatttt

SEQ ID NO: 1085414 - DNA, 15 bp, Homo sapiens
tcacttttgtgattt

SEQ ID NO: 1085415 - DNA, 15 bp, Homo sapiens
ctcacttttgtgatt

SEQ ID NO: 1085416 - DNA, 15 bp, Homo sapiens
gctcacttttgtgat

SEQ ID NO: 1085417 - DNA, 15 bp, Homo sapiens
tgctcacttttgtga

SEQ ID NO: 1085418 - DNA, 15 bp, Homo sapiens
ttgctcacttttgtg

SEQ ID NO: 1085419 - DNA, 15 bp, Homo sapiens
tttgctcacttttgt

SEQ ID NO: 1085420 - DNA, 15 bp, Homo sapiens
gtttgctcacttttg

SEQ ID NO: 1085421 - DNA, 15 bp, Homo sapiens
ggtttgctcactttt

SEQ ID NO: 1085422 - DNA, 15 bp, Homo sapiens
tggtttgctcacttt

SEQ ID NO: 1085423 - DNA, 15 bp, Homo sapiens
atggtttgctcactt

SEQ ID NO: 1085424 - DNA, 15 bp, Homo sapiens
aatggtttgctcact

SEQ ID NO: 1085425 - DNA, 15 bp, Homo sapiens
taatggtttgctcac

SEQ ID NO: 1085426 - DNA, 15 bp, Homo sapiens
gtaatggtttgctca

SEQ ID NO: 1085427 - DNA, 15 bp, Homo sapiens
ggtaatggtttgctc

SEQ ID NO: 1085428 - DNA, 15 bp, Homo sapiens
aggtaatggtttgct

SEQ ID NO: 1085429 - DNA, 15 bp, Homo sapiens
gaggtaatggtttgc

SEQ ID NO: 1085430 - DNA, 15 bp, Homo sapiens
ggaggtaatggtttg

SEQ ID NO: 1085431 - DNA, 15 bp, Homo sapiens
gggaggtaatggttt

SEQ ID NO: 1085432 - DNA, 15 bp, Homo sapiens
agggaggtaatggtt

SEQ ID NO: 1085433 - DNA, 15 bp, Homo sapiens
cagggaggtaatggt

SEQ ID NO: 1085434 - DNA, 15 bp, Homo sapiens
tcagggaggtaatgg

SEQ ID NO: 1085435 - DNA, 15 bp, Homo sapiens
ctcagggaggtaatg

SEQ ID NO: 1085436 - DNA, 15 bp, Homo sapiens
actcagggaggtaat

SEQ ID NO: 1085437 - DNA, 15 bp, Homo sapiens
gactcagggaggtaa

SEQ ID NO: 1085438 - DNA, 15 bp, Homo sapiens
agactcagggaggta

SEQ ID NO: 1085439 - DNA, 15 bp, Homo sapiens
gagactcagggaggt

SEQ ID NO: 1085440 - DNA, 15 bp, Homo sapiens
ggagactcagggagg

SEQ ID NO: 1085441 - DNA, 15 bp, Homo sapiens
aggagactcagggag

SEQ ID NO: 1085442 - DNA, 15 bp, Homo sapiens
aaggagactcaggga

SEQ ID NO: 1085443 - DNA, 15 bp, Homo sapiens
aaaggagactcaggg

SEQ ID NO: 1085444 - DNA, 15 bp, Homo sapiens
aaaaggagactcagg

SEQ ID NO: 1085445 - DNA, 15 bp, Homo sapiens
caaaaggagactcag

SEQ ID NO: 1085446 - DNA, 15 bp, Homo sapiens
acaaaaggagactca

SEQ ID NO: 1085447 - DNA, 15 bp, Homo sapiens
aacaaaaggagactc

SEQ ID NO: 1085448 - DNA, 15 bp, Homo sapiens
aaacaaaaggagact

SEQ ID NO: 1085449 - DNA, 15 bp, Homo sapiens
aaaacaaaaggagac

SEQ ID NO: 1085450 - DNA, 15 bp, Homo sapiens
aaaaacaaaaggaga

SEQ ID NO: 1085451 - DNA, 15 bp, Homo sapiens
taaaaacaaaaggag

SEQ ID NO: 1085452 - DNA, 15 bp, Homo sapiens
ataaaaacaaaagga

SEQ ID NO: 1085453 - DNA, 15 bp, Homo sapiens
gataaaaacaaaagg

SEQ ID NO: 1085454 - DNA, 15 bp, Homo sapiens
agataaaaacaaaag

SEQ ID NO: 1085455 - DNA, 15 bp, Homo sapiens
tagataaaaacaaaa

SEQ ID NO: 1085456 - DNA, 15 bp, Homo sapiens
atagataaaaacaaa

SEQ ID NO: 1085457 - DNA, 15 bp, Homo sapiens
tatagataaaaacaa

SEQ ID NO: 1085458 - DNA, 15 bp, Homo sapiens
ttatagataaaaaca

SEQ ID NO: 1085459 - DNA, 15 bp, Homo sapiens
tttatagataaaaac

SEQ ID NO: 1085460 - DNA, 15 bp, Homo sapiens
ttttatagataaaaa

SEQ ID NO: 1085461 - DNA, 15 bp, Homo sapiens
gttttatagataaaa

SEQ ID NO: 1085462 - DNA, 15 bp, Homo sapiens
agttttatagataaa

SEQ ID NO: 1085463 - DNA, 15 bp, Homo sapiens
tagttttatagataa

SEQ ID NO: 1085464 - DNA, 15 bp, Homo sapiens
ctagttttatagata

SEQ ID NO: 1085465 - DNA, 15 bp, Homo sapiens
tctagttttatagat

SEQ ID NO: 1085466 - DNA, 15 bp, Homo sapiens
ttctagttttataga

SEQ ID NO: 1085467 - DNA, 15 bp, Homo sapiens
tttctagttttatag

SEQ ID NO: 1085468 - DNA, 15 bp, Homo sapiens
ttttctagttttata

SEQ ID NO: 1085469 - DNA, 15 bp, Homo sapiens
tttttctagttttat

SEQ ID NO: 1085470 - DNA, 15 bp, Homo sapiens
atttttctagtttta

SEQ ID NO: 1085471 - DNA, 15 bp, Homo sapiens
tatttttctagtttt

SEQ ID NO: 1085472 - DNA, 15 bp, Homo sapiens
atatttttctagttt

SEQ ID NO: 1085473 - DNA, 15 bp, Homo sapiens
aatatttttctagtt

SEQ ID NO: 1085474 - DNA, 15 bp, Homo sapiens
gaatatttttctagt

SEQ ID NO: 1085475 - DNA, 15 bp, Homo sapiens
agaatatttttctag

SEQ ID NO: 1085476 - DNA, 15 bp, Homo sapiens
aagaatatttttcta

SEQ ID NO: 1085477 - DNA, 15 bp, Homo sapiens
aaagaatatttttct

SEQ ID NO: 1085478 - DNA, 15 bp, Homo sapiens
gaaagaatatttttc

SEQ ID NO: 1085479 - DNA, 15 bp, Homo sapiens
ggaaagaatattttt

SEQ ID NO: 1085480 - DNA, 15 bp, Homo sapiens
tggaaagaatatttt

SEQ ID NO: 1085481 - DNA, 15 bp, Homo sapiens
atggaaagaatattt

SEQ ID NO: 1085482 - DNA, 15 bp, Homo sapiens
tatggaaagaatatt

SEQ ID NO: 1085483 - DNA, 15 bp, Homo sapiens
ctatggaaagaatat

SEQ ID NO: 1085484 - DNA, 15 bp, Homo sapiens
cctatggaaagaata

SEQ ID NO: 1085485 - DNA, 15 bp, Homo sapiens
tcctatggaaagaat

SEQ ID NO: 1085486 - DNA, 15 bp, Homo sapiens
ttcctatggaaagaa

SEQ ID NO: 1085487 - DNA, 15 bp, Homo sapiens
attcctatggaaaga

SEQ ID NO: 1085488 - DNA, 15 bp, Homo sapiens
cattcctatggaaag

SEQ ID NO: 1085489 - DNA, 15 bp, Homo sapiens
acattcctatggaaa

SEQ ID NO: 1085490 - DNA, 15 bp, Homo sapiens
aacattcctatggaa

SEQ ID NO: 1085491 - DNA, 15 bp, Homo sapiens
caacattcctatgga

SEQ ID NO: 1085492 - DNA, 15 bp, Homo sapiens
acaacattcctatgg

SEQ ID NO: 1085493 - DNA, 15 bp, Homo sapiens
aacaacattcctatg

SEQ ID NO: 1085494 - DNA, 15 bp, Homo sapiens
caacaacattcctat

SEQ ID NO: 1085495 - DNA, 15 bp, Homo sapiens
ccaacaacattccta

SEQ ID NO: 1085496 - DNA, 15 bp, Homo sapiens
tccaacaacattcct

SEQ ID NO: 1085497 - DNA, 15 bp, Homo sapiens
ttccaacaacattcc

SEQ ID NO: 1085498 - DNA, 15 bp, Homo sapiens
tttccaacaacattc

SEQ ID NO: 1085499 - DNA, 15 bp, Homo sapiens
atttccaacaacatt

SEQ ID NO: 1085500 - DNA, 15 bp, Homo sapiens
tatttccaacaacat

SEQ ID NO: 1085501 - DNA, 15 bp, Homo sapiens
ttatttccaacaaca

SEQ ID NO: 1085502 - DNA, 15 bp, Homo sapiens
attatttccaacaac

SEQ ID NO: 1085503 - DNA, 15 bp, Homo sapiens
tattatttccaacaa

SEQ ID NO: 1085504 - DNA, 15 bp, Homo sapiens
ttattatttccaaca

SEQ ID NO: 1085505 - DNA, 15 bp, Homo sapiens
tttattatttccaac

SEQ ID NO: 1085506 - DNA, 15 bp, Homo sapiens
ttttattatttccaa

SEQ ID NO: 1085507 - DNA, 15 bp, Homo sapiens
gttttattatttcca

SEQ ID NO: 1085508 - DNA, 15 bp, Homo sapiens
tgttttattatttcc

SEQ ID NO: 1085509 - DNA, 15 bp, Homo sapiens
atgttttattatttc

SEQ ID NO: 1085510 - DNA, 15 bp, Homo sapiens
aatgttttattattt

SEQ ID NO: 1085511 - DNA, 15 bp, Homo sapiens
taatgttttattatt

SEQ ID NO: 1085512 - DNA, 15 bp, Homo sapiens
ataatgttttattat

SEQ ID NO: 1085513 - DNA, 15 bp, Homo sapiens
tataatgttttatta

SEQ ID NO: 1085514 - DNA, 15 bp, Homo sapiens
atataatgttttatt

SEQ ID NO: 1085515 - DNA, 15 bp, Homo sapiens
aatataatgttttat

SEQ ID NO: 1085516 - DNA, 15 bp, Homo sapiens
taatataatgtttta

SEQ ID NO: 1085517 - DNA, 15 bp, Homo sapiens
gtaatataatgtttt

SEQ ID NO: 1085518 - DNA, 15 bp, Homo sapiens
tgtaatataatgttt

SEQ ID NO: 1085519 - DNA, 15 bp, Homo sapiens
ttgtaatataatgtt

SEQ ID NO: 1085520 - DNA, 15 bp, Homo sapiens
cttgtaatataatgt

SEQ ID NO: 1085521 - DNA, 15 bp, Homo sapiens
gcttgtaatataatg

SEQ ID NO: 1085522 - DNA, 15 bp, Homo sapiens
agcttgtaatataat

SEQ ID NO: 1085523 - DNA, 15 bp, Homo sapiens
gagcttgtaatataa

SEQ ID NO: 1085524 - DNA, 15 bp, Homo sapiens
agagcttgtaatata

SEQ ID NO: 1085525 - DNA, 15 bp, Homo sapiens
tagagcttgtaatat

SEQ ID NO: 1085526 - DNA, 15 bp, Homo sapiens
ctagagcttgtaata

SEQ ID NO: 1085527 - DNA, 15 bp, Homo sapiens
actagagcttgtaat

SEQ ID NO: 1085528 - DNA, 15 bp, Homo sapiens
gactagagcttgtaa

SEQ ID NO: 1085529 - DNA, 15 bp, Homo sapiens
tgactagagcttgta

SEQ ID NO: 1085530 - DNA, 15 bp, Homo sapiens
atgactagagcttgt

SEQ ID NO: 1085531 - DNA, 15 bp, Homo sapiens
aatgactagagcttg

SEQ ID NO: 1085532 - DNA, 15 bp, Homo sapiens
caatgactagagctt

SEQ ID NO: 1085533 - DNA, 15 bp, Homo sapiens
acaatgactagagct

SEQ ID NO: 1085534 - DNA, 15 bp, Homo sapiens
aacaatgactagagc

SEQ ID NO: 1085535 - DNA, 15 bp, Homo sapiens
caacaatgactagag

SEQ ID NO: 1085536 - DNA, 15 bp, Homo sapiens
tcaacaatgactaga

SEQ ID NO: 1085537 - DNA, 15 bp, Homo sapiens
atcaacaatgactag

SEQ ID NO: 1085538 - DNA, 15 bp, Homo sapiens
catcaacaatgacta

SEQ ID NO: 1085539 - DNA, 15 bp, Homo sapiens
acatcaacaatgact

SEQ ID NO: 1085540 - DNA, 15 bp, Homo sapiens
aacatcaacaatgac

SEQ ID NO: 1085541 - DNA, 15 bp, Homo sapiens
aaacatcaacaatga

SEQ ID NO: 1085542 - DNA, 15 bp, Homo sapiens
taaacatcaacaatg

SEQ ID NO: 1085543 - DNA, 15 bp, Homo sapiens
ttaaacatcaacaat

SEQ ID NO: 1085544 - DNA, 15 bp, Homo sapiens
gttaaacatcaacaa

SEQ ID NO: 1085545 - DNA, 15 bp, Homo sapiens
tgttaaacatcaaca

SEQ ID NO: 1085546 - DNA, 15 bp, Homo sapiens
ctgttaaacatcaac

SEQ ID NO: 1085547 - DNA, 15 bp, Homo sapiens
cctgttaaacatcaa

SEQ ID NO: 1085548 - DNA, 15 bp, Homo sapiens
acctgttaaacatca

SEQ ID NO: 1085549 - DNA, 15 bp, Homo sapiens
tacctgttaaacatc

SEQ ID NO: 1085550 - DNA, 15 bp, Homo sapiens
ttacctgttaaacat

SEQ ID NO: 1085551 - DNA, 15 bp, Homo sapiens
gttacctgttaaaca

SEQ ID NO: 1085552 - DNA, 15 bp, Homo sapiens
tgttacctgttaaac

SEQ ID NO: 1085553 - DNA, 15 bp, Homo sapiens
ctgttacctgttaaa

SEQ ID NO: 1085554 - DNA, 15 bp, Homo sapiens
actgttacctgttaa

SEQ ID NO: 1085555 - DNA, 15 bp, Homo sapiens
cactgttacctgtta

SEQ ID NO: 1085556 - DNA, 15 bp, Homo sapiens
tcactgttacctgtt

SEQ ID NO: 1085557 - DNA, 15 bp, Homo sapiens
atcactgttacctgt

SEQ ID NO: 1085558 - DNA, 15 bp, Homo sapiens
tatcactgttacctg

SEQ ID NO: 1085559 - DNA, 15 bp, Homo sapiens
ttatcactgttacct

SEQ ID NO: 1085560 - DNA, 15 bp, Homo sapiens
attatcactgttacc

SEQ ID NO: 1085561 - DNA, 15 bp, Homo sapiens
aattatcactgttac

SEQ ID NO: 1085562 - DNA, 15 bp, Homo sapiens
taattatcactgtta

SEQ ID NO: 1085563 - DNA, 15 bp, Homo sapiens
ataattatcactgtt

SEQ ID NO: 1085564 - DNA, 15 bp, Homo sapiens
aataattatcactgt

SEQ ID NO: 1085565 - DNA, 15 bp, Homo sapiens
aaataattatcactg

SEQ ID NO: 1085566 - DNA, 15 bp, Homo sapiens
caaataattatcact

SEQ ID NO: 1085567 - DNA, 15 bp, Homo sapiens
acaaataattatcac

SEQ ID NO: 1085568 - DNA, 15 bp, Homo sapiens
gacaaataattatca

SEQ ID NO: 1085569 - DNA, 15 bp, Homo sapiens
agacaaataattatc

SEQ ID NO: 1085570 - DNA, 15 bp, Homo sapiens
aagacaaataattat

SEQ ID NO: 1085571 - DNA, 15 bp, Homo sapiens
gaagacaaataatta

SEQ ID NO: 1085572 - DNA, 15 bp, Homo sapiens
agaagacaaataatt

SEQ ID NO: 1085573 - DNA, 15 bp, Homo sapiens
gagaagacaaataat

SEQ ID NO: 1085574 - DNA, 15 bp, Homo sapiens
tgagaagacaaataa

SEQ ID NO: 1085575 - DNA, 15 bp, Homo sapiens
atgagaagacaaata

SEQ ID NO: 1085576 - DNA, 15 bp, Homo sapiens
aatgagaagacaaat

SEQ ID NO: 1085577 - DNA, 15 bp, Homo sapiens
taatgagaagacaaa

SEQ ID NO: 1085578 - DNA, 15 bp, Homo sapiens
ttaatgagaagacaa

SEQ ID NO: 1085579 - DNA, 15 bp, Homo sapiens
attaatgagaagaca

SEQ ID NO: 1085580 - DNA, 15 bp, Homo sapiens
cattaatgagaagac

SEQ ID NO: 1085581 - DNA, 15 bp, Homo sapiens
tcattaatgagaaga

SEQ ID NO: 1085582 - DNA, 15 bp, Homo sapiens
ttcattaatgagaag

SEQ ID NO: 1085583 - DNA, 15 bp, Homo sapiens
cttcattaatgagaa

SEQ ID NO: 1085584 - DNA, 15 bp, Homo sapiens
tcttcattaatgaga

SEQ ID NO: 1085585 - DNA, 15 bp, Homo sapiens
ttcttcattaatgag

SEQ ID NO: 1085586 - DNA, 15 bp, Homo sapiens
tttcttcattaatga

SEQ ID NO: 1085587 - DNA, 15 bp, Homo sapiens
ttttcttcattaatg

SEQ ID NO: 1085588 - DNA, 15 bp, Homo sapiens
cttttcttcattaat

SEQ ID NO: 1085589 - DNA, 15 bp, Homo sapiens
ccttttcttcattaa

SEQ ID NO: 1085590 - DNA, 15 bp, Homo sapiens
tccttttcttcatta

SEQ ID NO: 1085591 - DNA, 15 bp, Homo sapiens
atccttttcttcatt

SEQ ID NO: 1085592 - DNA, 15 bp, Homo sapiens
aatccttttcttcat

SEQ ID NO: 1085593 - DNA, 15 bp, Homo sapiens
taatccttttcttca

SEQ ID NO: 1085594 - DNA, 15 bp, Homo sapiens
ataatccttttcttc

SEQ ID NO: 1085595 - DNA, 15 bp, Homo sapiens
aataatccttttctt

SEQ ID NO: 1085596 - DNA, 15 bp, Homo sapiens
taataatccttttct

SEQ ID NO: 1085597 - DNA, 15 bp, Homo sapiens
ttaataatccttttc

SEQ ID NO: 1085598 - DNA, 15 bp, Homo sapiens
attaataatcctttt

SEQ ID NO: 1085599 - DNA, 15 bp, Homo sapiens
gattaataatccttt

SEQ ID NO: 1085600 - DNA, 15 bp, Homo sapiens
tgattaataatcctt

SEQ ID NO: 1085601 - DNA, 15 bp, Homo sapiens
atgattaataatcct

SEQ ID NO: 1085602 - DNA, 15 bp, Homo sapiens
tatgattaataatcc

SEQ ID NO: 1085603 - DNA, 15 bp, Homo sapiens
ctatgattaataatc

SEQ ID NO: 1085604 - DNA, 15 bp, Homo sapiens
tctatgattaataat

SEQ ID NO: 1085605 - DNA, 15 bp, Homo sapiens
ctctatgattaataa

SEQ ID NO: 1085606 - DNA, 15 bp, Homo sapiens
cctctatgattaata

SEQ ID NO: 1085607 - DNA, 15 bp, Homo sapiens
ccctctatgattaat

SEQ ID NO: 1085608 - DNA, 15 bp, Homo sapiens
accctctatgattaa

SEQ ID NO: 1085609 - DNA, 15 bp, Homo sapiens
caccctctatgatta

SEQ ID NO: 1085610 - DNA, 15 bp, Homo sapiens
ccaccctctatgatt

SEQ ID NO: 1085611 - DNA, 15 bp, Homo sapiens
tccaccctctatgat

SEQ ID NO: 1085612 - DNA, 15 bp, Homo sapiens
ttccaccctctatga

SEQ ID NO: 1085613 - DNA, 15 bp, Homo sapiens
cttccaccctctatg

SEQ ID NO: 1085614 - DNA, 15 bp, Homo sapiens
ccttccaccctctat

SEQ ID NO: 1085615 - DNA, 15 bp, Homo sapiens
gccttccaccctcta

SEQ ID NO: 1085616 - DNA, 15 bp, Homo sapiens
tgccttccaccctct

SEQ ID NO: 1085617 - DNA, 15 bp, Homo sapiens
atgccttccaccctc

SEQ ID NO: 1085618 - DNA, 15 bp, Homo sapiens
gatgccttccaccct

SEQ ID NO: 1085619 - DNA, 15 bp, Homo sapiens
agatgccttccaccc

SEQ ID NO: 1085620 - DNA, 15 bp, Homo sapiens
tagatgccttccacc

SEQ ID NO: 1085621 - DNA, 15 bp, Homo sapiens
atagatgccttccac

SEQ ID NO: 1085622 - DNA, 15 bp, Homo sapiens
catagatgccttcca

SEQ ID NO: 1085623 - DNA, 15 bp, Homo sapiens
ccatagatgccttcc

SEQ ID NO: 1085624 - DNA, 15 bp, Homo sapiens
cccatagatgccttc

SEQ ID NO: 1085625 - DNA, 15 bp, Homo sapiens
tcccatagatgcctt

SEQ ID NO: 1085626 - DNA, 15 bp, Homo sapiens
ttcccatagatgcct

SEQ ID NO: 1085627 - DNA, 15 bp, Homo sapiens
cttcccatagatgcc

SEQ ID NO: 1085628 - DNA, 15 bp, Homo sapiens
acttcccatagatgc

SEQ ID NO: 1085629 - DNA, 15 bp, Homo sapiens
tacttcccatagatg

SEQ ID NO: 1085630 - DNA, 15 bp, Homo sapiens
ctacttcccatagat

SEQ ID NO: 1085631 - DNA, 15 bp, Homo sapiens
tctacttcccataga

SEQ ID NO: 1085632 - DNA, 15 bp, Homo sapiens
ctctacttcccatag

SEQ ID NO: 1085633 - DNA, 15 bp, Homo sapiens
tctctacttcccata

SEQ ID NO: 1085634 - DNA, 15 bp, Homo sapiens
atctctacttcccat

SEQ ID NO: 1085635 - DNA, 15 bp, Homo sapiens
aatctctacttccca

SEQ ID NO: 1085636 - DNA, 15 bp, Homo sapiens
aaatctctacttccc

SEQ ID NO: 1085637 - DNA, 15 bp, Homo sapiens
caaatctctacttcc

SEQ ID NO: 1085638 - DNA, 15 bp, Homo sapiens
tcaaatctctacttc

SEQ ID NO: 1085639 - DNA, 15 bp, Homo sapiens
ttcaaatctctactt

SEQ ID NO: 1085640 - DNA, 15 bp, Homo sapiens
cttcaaatctctact

SEQ ID NO: 1085641 - DNA, 15 bp, Homo sapiens
tcttcaaatctctac

SEQ ID NO: 1085642 - DNA, 15 bp, Homo sapiens
atcttcaaatctcta

SEQ ID NO: 1085643 - DNA, 15 bp, Homo sapiens
tatcttcaaatctct

SEQ ID NO: 1085644 - DNA, 15 bp, Homo sapiens
ctatcttcaaatctc

SEQ ID NO: 1085645 - DNA, 15 bp, Homo sapiens
cctatcttcaaatct

SEQ ID NO: 1085646 - DNA, 15 bp, Homo sapiens
gcctatcttcaaatc

SEQ ID NO: 1085647 - DNA, 15 bp, Homo sapiens
agcctatcttcaaat

SEQ ID NO: 1085648 - DNA, 15 bp, Homo sapiens
tagcctatcttcaaa

SEQ ID NO: 1085649 - DNA, 15 bp, Homo sapiens
ttagcctatcttcaa

SEQ ID NO: 1085650 - DNA, 15 bp, Homo sapiens
tttagcctatcttca

SEQ ID NO: 1085651 - DNA, 15 bp, Homo sapiens
ttttagcctatcttc

SEQ ID NO: 1085652 - DNA, 15 bp, Homo sapiens
gttttagcctatctt

SEQ ID NO: 1085653 - DNA, 15 bp, Homo sapiens
ggttttagcctatct

SEQ ID NO: 1085654 - DNA, 15 bp, Homo sapiens
gggttttagcctatc

SEQ ID NO: 1085655 - DNA, 15 bp, Homo sapiens
tgggttttagcctat

SEQ ID NO: 1085656 - DNA, 15 bp, Homo sapiens
ttgggttttagccta

SEQ ID NO: 1085657 - DNA, 15 bp, Homo sapiens
cttgggttttagcct

SEQ ID NO: 1085658 - DNA, 15 bp, Homo sapiens
acttgggttttagcc

SEQ ID NO: 1085659 - DNA, 15 bp, Homo sapiens
tacttgggttttagc

SEQ ID NO: 1085660 - DNA, 15 bp, Homo sapiens
ttacttgggttttag

SEQ ID NO: 1085661 - DNA, 15 bp, Homo sapiens
cttacttgggtttta

SEQ ID NO: 1085662 - DNA, 15 bp, Homo sapiens
ccttacttgggtttt

SEQ ID NO: 1085663 - DNA, 15 bp, Homo sapiens
gccttacttgggttt

SEQ ID NO: 1085664 - DNA, 15 bp, Homo sapiens
ggccttacttgggtt

SEQ ID NO: 1085665 - DNA, 15 bp, Homo sapiens
aggccttacttgggt

SEQ ID NO: 1085666 - DNA, 15 bp, Homo sapiens
gaggccttacttggg

SEQ ID NO: 1085667 - DNA, 15 bp, Homo sapiens
agaggccttacttgg

SEQ ID NO: 1085668 - DNA, 15 bp, Homo sapiens
tagaggccttacttg

SEQ ID NO: 1085669 - DNA, 15 bp, Homo sapiens
ctagaggccttactt

SEQ ID NO: 1085670 - DNA, 15 bp, Homo sapiens
tctagaggccttact

SEQ ID NO: 1085671 - DNA, 15 bp, Homo sapiens
atctagaggccttac

SEQ ID NO: 1085672 - DNA, 15 bp, Homo sapiens
aatctagaggcctta

SEQ ID NO: 1085673 - DNA, 15 bp, Homo sapiens
taatctagaggcctt

SEQ ID NO: 1085674 - DNA, 15 bp, Homo sapiens
ctaatctagaggcct

SEQ ID NO: 1085675 - DNA, 15 bp, Homo sapiens
tctaatctagaggcc

SEQ ID NO: 1085676 - DNA, 15 bp, Homo sapiens
atctaatctagaggc

SEQ ID NO: 1085677 - DNA, 15 bp, Homo sapiens
tatctaatctagagg

SEQ ID NO: 1085678 - DNA, 15 bp, Homo sapiens
ttatctaatctagag

SEQ ID NO: 1085679 - DNA, 15 bp, Homo sapiens
attatctaatctaga

SEQ ID NO: 1085680 - DNA, 15 bp, Homo sapiens
tattatctaatctag

SEQ ID NO: 1085681 - DNA, 15 bp, Homo sapiens
ctattatctaatcta

SEQ ID NO: 1085682 - DNA, 15 bp, Homo sapiens
actattatctaatct

SEQ ID NO: 1085683 - DNA, 15 bp, Homo sapiens
tactattatctaatc

SEQ ID NO: 1085684 - DNA, 15 bp, Homo sapiens
atactattatctaat

SEQ ID NO: 1085685 - DNA, 15 bp, Homo sapiens
aatactattatctaa

SEQ ID NO: 1085686 - DNA, 15 bp, Homo sapiens
caatactattatcta

SEQ ID NO: 1085687 - DNA, 15 bp, Homo sapiens
acaatactattatct

SEQ ID NO: 1085688 - DNA, 15 bp, Homo sapiens
tacaatactattatc

SEQ ID NO: 1085689 - DNA, 15 bp, Homo sapiens
atacaatactattat

SEQ ID NO: 1085690 - DNA, 15 bp, Homo sapiens
gatacaatactatta

SEQ ID NO: 1085691 - DNA, 15 bp, Homo sapiens
agatacaatactatt

SEQ ID NO: 1085692 - DNA, 15 bp, Homo sapiens
tagatacaatactat

SEQ ID NO: 1085693 - DNA, 15 bp, Homo sapiens
atagatacaatacta

SEQ ID NO: 1085694 - DNA, 15 bp, Homo sapiens
aatagatacaatact

SEQ ID NO: 1085695 - DNA, 15 bp, Homo sapiens
aaatagatacaatac

SEQ ID NO: 1085696 - DNA, 15 bp, Homo sapiens
aaaatagatacaata

SEQ ID NO: 1085697 - DNA, 15 bp, Homo sapiens
taaaatagatacaat

SEQ ID NO: 1085698 - DNA, 15 bp, Homo sapiens
ttaaaatagatacaa

SEQ ID NO: 1085699 - DNA, 15 bp, Homo sapiens
attaaaatagataca

SEQ ID NO: 1085700 - DNA, 15 bp, Homo sapiens
aattaaaatagatac

SEQ ID NO: 1085701 - DNA, 15 bp, Homo sapiens
aaattaaaatagata

SEQ ID NO: 1085702 - DNA, 15 bp, Homo sapiens
gaaattaaaatagat

SEQ ID NO: 1085703 - DNA, 15 bp, Homo sapiens
ggaaattaaaataga

SEQ ID NO: 1085704 - DNA, 15 bp, Homo sapiens
aggaaattaaaatag

SEQ ID NO: 1085705 - DNA, 15 bp, Homo sapiens
caggaaattaaaata

SEQ ID NO: 1085706 - DNA, 15 bp, Homo sapiens
gcaggaaattaaaat

SEQ ID NO: 1085707 - DNA, 15 bp, Homo sapiens
agcaggaaattaaaa

SEQ ID NO: 1085708 - DNA, 15 bp, Homo sapiens
aagcaggaaattaaa

SEQ ID NO: 1085709 - DNA, 15 bp, Homo sapiens
aaagcaggaaattaa

SEQ ID NO: 1085710 - DNA, 15 bp, Homo sapiens
gaaagcaggaaatta

SEQ ID NO: 1085711 - DNA, 15 bp, Homo sapiens
ggaaagcaggaaatt

SEQ ID NO: 1085712 - DNA, 15 bp, Homo sapiens
tggaaagcaggaaat

SEQ ID NO: 1085713 - DNA, 15 bp, Homo sapiens
atggaaagcaggaaa

SEQ ID NO: 1085714 - DNA, 15 bp, Homo sapiens
gatggaaagcaggaa

SEQ ID NO: 1085715 - DNA, 15 bp, Homo sapiens
tgatggaaagcagga

SEQ ID NO: 1085716 - DNA, 15 bp, Homo sapiens
gtgatggaaagcagg

SEQ ID NO: 1085717 - DNA, 15 bp, Homo sapiens
agtgatggaaagcag

SEQ ID NO: 1085718 - DNA, 15 bp, Homo sapiens
cagtgatggaaagca

SEQ ID NO: 1085719 - DNA, 15 bp, Homo sapiens
acagtgatggaaagc

SEQ ID NO: 1085720 - DNA, 15 bp, Homo sapiens
cacagtgatggaaag

SEQ ID NO: 1085721 - DNA, 15 bp, Homo sapiens
gcacagtgatggaaa

SEQ ID NO: 1085722 - DNA, 15 bp, Homo sapiens
ggcacagtgatggaa

SEQ ID NO: 1085723 - DNA, 15 bp, Homo sapiens
tggcacagtgatgga

SEQ ID NO: 1085724 - DNA, 15 bp, Homo sapiens
atggcacagtgatgg

SEQ ID NO: 1085725 - DNA, 15 bp, Homo sapiens
catggcacagtgatg

SEQ ID NO: 1085726 - DNA, 15 bp, Homo sapiens
ccatggcacagtgat

SEQ ID NO: 1085727 - DNA, 15 bp, Homo sapiens
accatggcacagtga

SEQ ID NO: 1085728 - DNA, 15 bp, Homo sapiens
aaccatggcacagtg

SEQ ID NO: 1085729 - DNA, 15 bp, Homo sapiens
taaccatggcacagt

SEQ ID NO: 1085730 - DNA, 15 bp, Homo sapiens
ataaccatggcacag

SEQ ID NO: 1085731 - DNA, 15 bp, Homo sapiens
tataaccatggcaca

SEQ ID NO: 1085732 - DNA, 15 bp, Homo sapiens
atataaccatggcac

SEQ ID NO: 1085733 - DNA, 15 bp, Homo sapiens
tatataaccatggca

SEQ ID NO: 1085734 - DNA, 15 bp, Homo sapiens
ttatataaccatggc

SEQ ID NO: 1085735 - DNA, 15 bp, Homo sapiens
cttatataaccatgg

SEQ ID NO: 1085736 - DNA, 15 bp, Homo sapiens
tcttatataaccatg

SEQ ID NO: 1085737 - DNA, 15 bp, Homo sapiens
ctcttatataaccat

SEQ ID NO: 1085738 - DNA, 15 bp, Homo sapiens
tctcttatataacca

SEQ ID NO: 1085739 - DNA, 15 bp, Homo sapiens
ttctcttatataacc

SEQ ID NO: 1085740 - DNA, 15 bp, Homo sapiens
cttctcttatataac

SEQ ID NO: 1085741 - DNA, 15 bp, Homo sapiens
acttctcttatataa

SEQ ID NO: 1085742 - DNA, 15 bp, Homo sapiens
gacttctcttatata

SEQ ID NO: 1085743 - DNA, 15 bp, Homo sapiens
agacttctcttatat

SEQ ID NO: 1085744 - DNA, 15 bp, Homo sapiens
aagacttctcttata

SEQ ID NO: 1085745 - DNA, 15 bp, Homo sapiens
aaagacttctcttat

SEQ ID NO: 1085746 - DNA, 15 bp, Homo sapiens
caaagacttctctta

SEQ ID NO: 1085747 - DNA, 15 bp, Homo sapiens
acaaagacttctctt

SEQ ID NO: 1085748 - DNA, 15 bp, Homo sapiens
aacaaagacttctct

SEQ ID NO: 1085749 - DNA, 15 bp, Homo sapiens
aaacaaagacttctc

SEQ ID NO: 1085750 - DNA, 15 bp, Homo sapiens
taaacaaagacttct

SEQ ID NO: 1085751 - DNA, 15 bp, Homo sapiens
ataaacaaagacttc

SEQ ID NO: 1085752 - DNA, 15 bp, Homo sapiens
tataaacaaagactt

SEQ ID NO: 1085753 - DNA, 15 bp, Homo sapiens
ctataaacaaagact

SEQ ID NO: 1085754 - DNA, 15 bp, Homo sapiens
cctataaacaaagac

SEQ ID NO: 1085755 - DNA, 15 bp, Homo sapiens
tcctataaacaaaga

SEQ ID NO: 1085756 - DNA, 15 bp, Homo sapiens
ttcctataaacaaag

SEQ ID NO: 1085757 - DNA, 15 bp, Homo sapiens
tttcctataaacaaa

SEQ ID NO: 1085758 - DNA, 15 bp, Homo sapiens
atttcctataaacaa

SEQ ID NO: 1085759 - DNA, 15 bp, Homo sapiens
tatttcctataaaca

SEQ ID NO: 1085760 - DNA, 15 bp, Homo sapiens
atatttcctataaac

SEQ ID NO: 1085761 - DNA, 15 bp, Homo sapiens
tatatttcctataaa

SEQ ID NO: 1085762 - DNA, 15 bp, Homo sapiens
gtatatttcctataa

SEQ ID NO: 1085763 - DNA, 15 bp, Homo sapiens
tgtatatttcctata

SEQ ID NO: 1085764 - DNA, 15 bp, Homo sapiens
gtgtatatttcctat

SEQ ID NO: 1085765 - DNA, 15 bp, Homo sapiens
tgtgtatatttccta

SEQ ID NO: 1085766 - DNA, 15 bp, Homo sapiens
ttgtgtatatttcct

SEQ ID NO: 1085767 - DNA, 15 bp, Homo sapiens
cttgtgtatatttcc

SEQ ID NO: 1085768 - DNA, 15 bp, Homo sapiens
tcttgtgtatatttc

SEQ ID NO: 1085769 - DNA, 15 bp, Homo sapiens
ttcttgtgtatattt

SEQ ID NO: 1085770 - DNA, 15 bp, Homo sapiens
attcttgtgtatatt

SEQ ID NO: 1085771 - DNA, 15 bp, Homo sapiens
aattcttgtgtatat

SEQ ID NO: 1085772 - DNA, 15 bp, Homo sapiens
aaattcttgtgtata

SEQ ID NO: 1085773 - DNA, 15 bp, Homo sapiens
taaattcttgtgtat

SEQ ID NO: 1085774 - DNA, 15 bp, Homo sapiens
ctaaattcttgtgta

SEQ ID NO: 1085775 - DNA, 15 bp, Homo sapiens
tctaaattcttgtgt

SEQ ID NO: 1085776 - DNA, 15 bp, Homo sapiens
ttctaaattcttgtg

SEQ ID NO: 1085777 - DNA, 15 bp, Homo sapiens
cttctaaattcttgt

SEQ ID NO: 1085778 - DNA, 15 bp, Homo sapiens
acttctaaattcttg

SEQ ID NO: 1085779 - DNA, 15 bp, Homo sapiens
tacttctaaattctt

SEQ ID NO: 1085780 - DNA, 15 bp, Homo sapiens
ttacttctaaattct

SEQ ID NO: 1085781 - DNA, 15 bp, Homo sapiens
tttacttctaaattc

SEQ ID NO: 1085782 - DNA, 15 bp, Homo sapiens
ctttacttctaaatt

SEQ ID NO: 1085783 - DNA, 15 bp, Homo sapiens
cctttacttctaaat

SEQ ID NO: 1085784 - DNA, 15 bp, Homo sapiens
ccctttacttctaaa

SEQ ID NO: 1085785 - DNA, 15 bp, Homo sapiens
tccctttacttctaa

SEQ ID NO: 1085786 - DNA, 15 bp, Homo sapiens
gtccctttacttcta

SEQ ID NO: 1085787 - DNA, 15 bp, Homo sapiens
tgtccctttacttct

SEQ ID NO: 1085788 - DNA, 15 bp, Homo sapiens
atgtccctttacttc

SEQ ID NO: 1085789 - DNA, 15 bp, Homo sapiens
aatgtccctttactt

SEQ ID NO: 1085790 - DNA, 15 bp, Homo sapiens
caatgtccctttact

SEQ ID NO: 1085791 - DNA, 15 bp, Homo sapiens
acaatgtccctttac

SEQ ID NO: 1085792 - DNA, 15 bp, Homo sapiens
cacaatgtcccttta

SEQ ID NO: 1085793 - DNA, 15 bp, Homo sapiens
acacaatgtcccttt

SEQ ID NO: 1085794 - DNA, 15 bp, Homo sapiens
gacacaatgtccctt

SEQ ID NO: 1085795 - DNA, 15 bp, Homo sapiens
agacacaatgtccct

SEQ ID NO: 1085796 - DNA, 15 bp, Homo sapiens
cagacacaatgtccc

SEQ ID NO: 1085797 - DNA, 15 bp, Homo sapiens
gcagacacaatgtcc

SEQ ID NO: 1085798 - DNA, 15 bp, Homo sapiens
tgcagacacaatgtc

SEQ ID NO: 1085799 - DNA, 15 bp, Homo sapiens
ttgcagacacaatgt

SEQ ID NO: 1085800 - DNA, 15 bp, Homo sapiens
gttgcagacacaatg

SEQ ID NO: 1085801 - DNA, 15 bp, Homo sapiens
agttgcagacacaat

SEQ ID NO: 1085802 - DNA, 15 bp, Homo sapiens
aagttgcagacacaa

SEQ ID NO: 1085803 - DNA, 15 bp, Homo sapiens
taagttgcagacaca

SEQ ID NO: 1085804 - DNA, 15 bp, Homo sapiens
gtaagttgcagacac

SEQ ID NO: 1085805 - DNA, 15 bp, Homo sapiens
agtaagttgcagaca

SEQ ID NO: 1085806 - DNA, 15 bp, Homo sapiens
gagtaagttgcagac

SEQ ID NO: 1085807 - DNA, 15 bp, Homo sapiens
agagtaagttgcaga

SEQ ID NO: 1085808 - DNA, 15 bp, Homo sapiens
aagagtaagttgcag

SEQ ID NO: 1085809 - DNA, 15 bp, Homo sapiens
taagagtaagttgca

SEQ ID NO: 1085810 - DNA, 15 bp, Homo sapiens
gtaagagtaagttgc

SEQ ID NO: 1085811 - DNA, 15 bp, Homo sapiens
tgtaagagtaagttg

SEQ ID NO: 1085812 - DNA, 15 bp, Homo sapiens
ctgtaagagtaagtt

SEQ ID NO: 1085813 - DNA, 15 bp, Homo sapiens
cctgtaagagtaagt

SEQ ID NO: 1085814 - DNA, 15 bp, Homo sapiens
ccctgtaagagtaag

SEQ ID NO: 1085815 - DNA, 15 bp, Homo sapiens
accctgtaagagtaa

SEQ ID NO: 1085816 - DNA, 15 bp, Homo sapiens
caccctgtaagagta

SEQ ID NO: 1085817 - DNA, 15 bp, Homo sapiens
acaccctgtaagagt

SEQ ID NO: 1085818 - DNA, 15 bp, Homo sapiens
cacaccctgtaagag

SEQ ID NO: 1085819 - DNA, 15 bp, Homo sapiens
acacaccctgtaaga

SEQ ID NO: 1085820 - DNA, 15 bp, Homo sapiens
cacacaccctgtaag

SEQ ID NO: 1085821 - DNA, 15 bp, Homo sapiens
acacacaccctgtaa

SEQ ID NO: 1085822 - DNA, 15 bp, Homo sapiens
cacacacaccctgta

SEQ ID NO: 1085823 - DNA, 15 bp, Homo sapiens
acacacacaccctgt

SEQ ID NO: 1085824 - DNA, 15 bp, Homo sapiens
cacacacacaccctg

SEQ ID NO: 1085825 - DNA, 15 bp, Homo sapiens
acacacacacaccct

SEQ ID NO: 1085826 - DNA, 15 bp, Homo sapiens
ctgtctctctctctc

SEQ ID NO: 1085827 - DNA, 15 bp, Homo sapiens
tctgtctctctctct

SEQ ID NO: 1085828 - DNA, 15 bp, Homo sapiens
ctctgtctctctctc

SEQ ID NO: 1085829 - DNA, 15 bp, Homo sapiens
tctctgtctctctct

SEQ ID NO: 1085830 - DNA, 15 bp, Homo sapiens
ctctctgtctctctc

SEQ ID NO: 1085831 - DNA, 15 bp, Homo sapiens
tctctctgtctctct

SEQ ID NO: 1085832 - DNA, 15 bp, Homo sapiens
ctctctctgtctctc

SEQ ID NO: 1085833 - DNA, 15 bp, Homo sapiens
tctctctctgtctct

SEQ ID NO: 1085834 - DNA, 15 bp, Homo sapiens
ctctctctctgtctc

SEQ ID NO: 1085835 - DNA, 15 bp, Homo sapiens
tctctctctctgtct

SEQ ID NO: 1085836 - DNA, 15 bp, Homo sapiens
ctctctctctctgtc

SEQ ID NO: 1085837 - DNA, 15 bp, Homo sapiens
tctctctctctctgt

SEQ ID NO: 1085838 - DNA, 15 bp, Homo sapiens
ttctctctgtctctc

SEQ ID NO: 1085839 - DNA, 15 bp, Homo sapiens
tttctctctgtctct

SEQ ID NO: 1085840 - DNA, 15 bp, Homo sapiens
ctttctctctgtctc

SEQ ID NO: 1085841 - DNA, 15 bp, Homo sapiens
tctttctctctgtct

SEQ ID NO: 1085842 - DNA, 15 bp, Homo sapiens
ctctttctctctgtc

SEQ ID NO: 1085843 - DNA, 15 bp, Homo sapiens
tctctttctctctgt

SEQ ID NO: 1085844 - DNA, 15 bp, Homo sapiens
ttctctttctctctg

SEQ ID NO: 1085845 - DNA, 15 bp, Homo sapiens
attctctttctctct

SEQ ID NO: 1085846 - DNA, 15 bp, Homo sapiens
cattctctttctctc

SEQ ID NO: 1085847 - DNA, 15 bp, Homo sapiens
tcattctctttctct

SEQ ID NO: 1085848 - DNA, 15 bp, Homo sapiens
atcattctctttctc

SEQ ID NO: 1085849 - DNA, 15 bp, Homo sapiens
tatcattctctttct

SEQ ID NO: 1085850 - DNA, 15 bp, Homo sapiens
ttatcattctctttc

SEQ ID NO: 1085851 - DNA, 15 bp, Homo sapiens
tttatcattctcttt

SEQ ID NO: 1085852 - DNA, 15 bp, Homo sapiens
ctttatcattctctt

SEQ ID NO: 1085853 - DNA, 15 bp, Homo sapiens
gctttatcattctct

SEQ ID NO: 1085854 - DNA, 15 bp, Homo sapiens
tgctttatcattctc

SEQ ID NO: 1085855 - DNA, 15 bp, Homo sapiens
ttgctttatcattct

SEQ ID NO: 1085856 - DNA, 15 bp, Homo sapiens
tttgctttatcattc

SEQ ID NO: 1085857 - DNA, 15 bp, Homo sapiens
atttgctttatcatt

SEQ ID NO: 1085858 - DNA, 15 bp, Homo sapiens
tatttgctttatcat

SEQ ID NO: 1085859 - DNA, 15 bp, Homo sapiens
gtatttgctttatca

SEQ ID NO: 1085860 - DNA, 15 bp, Homo sapiens
tgtatttgctttatc

SEQ ID NO: 1085861 - DNA, 15 bp, Homo sapiens
ctgtatttgctttat

SEQ ID NO: 1085862 - DNA, 15 bp, Homo sapiens
cctgtatttgcttta

SEQ ID NO: 1085863 - DNA, 15 bp, Homo sapiens
tcctgtatttgcttt

SEQ ID NO: 1085864 - DNA, 15 bp, Homo sapiens
ttcctgtatttgctt

SEQ ID NO: 1085865 - DNA, 15 bp, Homo sapiens
attcctgtatttgct

SEQ ID NO: 1085866 - DNA, 15 bp, Homo sapiens
gattcctgtatttgc

SEQ ID NO: 1085867 - DNA, 15 bp, Homo sapiens
tgattcctgtatttg

SEQ ID NO: 1085868 - DNA, 15 bp, Homo sapiens
ctgattcctgtattt

SEQ ID NO: 1085869 - DNA, 15 bp, Homo sapiens
cctgattcctgtatt

SEQ ID NO: 1085870 - DNA, 15 bp, Homo sapiens
tcctgattcctgtat

SEQ ID NO: 1085871 - DNA, 15 bp, Homo sapiens
atcctgattcctgta

SEQ ID NO: 1085872 - DNA, 15 bp, Homo sapiens
catcctgattcctgt

SEQ ID NO: 1085873 - DNA, 15 bp, Homo sapiens
tcatcctgattcctg

SEQ ID NO: 1085874 - DNA, 15 bp, Homo sapiens
ttcatcctgattcct

SEQ ID NO: 1085875 - DNA, 15 bp, Homo sapiens
cttcatcctgattcc

SEQ ID NO: 1085876 - DNA, 15 bp, Homo sapiens
gcttcatcctgattc

SEQ ID NO: 1085877 - DNA, 15 bp, Homo sapiens
cgcttcatcctgatt

SEQ ID NO: 1085878 - DNA, 15 bp, Homo sapiens
acgcttcatcctgat

SEQ ID NO: 1085879 - DNA, 15 bp, Homo sapiens
tacgcttcatcctga

SEQ ID NO: 1085880 - DNA, 15 bp, Homo sapiens
atacgcttcatcctg

SEQ ID NO: 1085881 - DNA, 15 bp, Homo sapiens
gatacgcttcatcct

SEQ ID NO: 1085882 - DNA, 15 bp, Homo sapiens
agatacgcttcatcc

SEQ ID NO: 1085883 - DNA, 15 bp, Homo sapiens
cagatacgcttcatc

SEQ ID NO: 1085884 - DNA, 15 bp, Homo sapiens
acagatacgcttcat

SEQ ID NO: 1085885 - DNA, 15 bp, Homo sapiens
aacagatacgcttca

SEQ ID NO: 1085886 - DNA, 15 bp, Homo sapiens
aaacagatacgcttc

SEQ ID NO: 1085887 - DNA, 15 bp, Homo sapiens
caaacagatacgctt

SEQ ID NO: 1085888 - DNA, 15 bp, Homo sapiens
acaaacagatacgct

SEQ ID NO: 1085889 - DNA, 15 bp, Homo sapiens
aacaaacagatacgc

SEQ ID NO: 1085890 - DNA, 15 bp, Homo sapiens
aaacaaacagatacg

SEQ ID NO: 1085891 - DNA, 15 bp, Homo sapiens
caaacaaacagatac

SEQ ID NO: 1085892 - DNA, 15 bp, Homo sapiens
acaaacaaacagata

SEQ ID NO: 1085893 - DNA, 15 bp, Homo sapiens
aacaaacaaacagat

SEQ ID NO: 1085894 - DNA, 15 bp, Homo sapiens
atcacaaagcaaaac

SEQ ID NO: 1085895 - DNA, 15 bp, Homo sapiens
tatcacaaagcaaaa

SEQ ID NO: 1085896 - DNA, 15 bp, Homo sapiens
ctatcacaaagcaaa

SEQ ID NO: 1085897 - DNA, 15 bp, Homo sapiens
cctatcacaaagcaa

SEQ ID NO: 1085898 - DNA, 15 bp, Homo sapiens
ccctatcacaaagca

SEQ ID NO: 1085899 - DNA, 15 bp, Homo sapiens
accctatcacaaagc

SEQ ID NO: 1085900 - DNA, 15 bp, Homo sapiens
gaccctatcacaaag

SEQ ID NO: 1085901 - DNA, 15 bp, Homo sapiens
agaccctatcacaaa

SEQ ID NO: 1085902 - DNA, 15 bp, Homo sapiens
aagaccctatcacaa

SEQ ID NO: 1085903 - DNA, 15 bp, Homo sapiens
caagaccctatcaca

SEQ ID NO: 1085904 - DNA, 15 bp, Homo sapiens
gcaagaccctatcac

SEQ ID NO: 1085905 - DNA, 15 bp, Homo sapiens
agcaagaccctatca

SEQ ID NO: 1085906 - DNA, 15 bp, Homo sapiens
gagcaagaccctatc

SEQ ID NO: 1085907 - DNA, 15 bp, Homo sapiens
agagcaagaccctat

SEQ ID NO: 1085908 - DNA, 15 bp, Homo sapiens
cagagcaagacccta

SEQ ID NO: 1085909 - DNA, 15 bp, Homo sapiens
cctgcctgggcaaca

SEQ ID NO: 1085910 - DNA, 15 bp, Homo sapiens
tcctgcctgggcaac

SEQ ID NO: 1085911 - DNA, 15 bp, Homo sapiens
ctcctgcctgggcaa

SEQ ID NO: 1085912 - DNA, 15 bp, Homo sapiens
actcctgcctgggca

SEQ ID NO: 1085913 - DNA, 15 bp, Homo sapiens
cactcctgcctgggc

SEQ ID NO: 1085914 - DNA, 15 bp, Homo sapiens
ttgcactcctgcctg

SEQ ID NO: 1085915 - DNA, 15 bp, Homo sapiens
attgcactcctgcct

SEQ ID NO: 1085916 - DNA, 15 bp, Homo sapiens
cattgcactcctgcc

SEQ ID NO: 1085917 - DNA, 15 bp, Homo sapiens
ccattgcactcctgc

SEQ ID NO: 1085918 - DNA, 15 bp, Homo sapiens
accattgcactcctg

SEQ ID NO: 1085919 - DNA, 15 bp, Homo sapiens
caccattgcactcct

SEQ ID NO: 1085920 - DNA, 15 bp, Homo sapiens
cgggatcacaccatt

SEQ ID NO: 1085921 - DNA, 15 bp, Homo sapiens
gcgggatcacaccat

SEQ ID NO: 1085922 - DNA, 15 bp, Homo sapiens
agcgggatcacacca

SEQ ID NO: 1085923 - DNA, 15 bp, Homo sapiens
gagcgggatcacacc

SEQ ID NO: 1085924 - DNA, 15 bp, Homo sapiens
tgagcgggatcacac

SEQ ID NO: 1085925 - DNA, 15 bp, Homo sapiens
gtgagcgggatcaca

SEQ ID NO: 1085926 - DNA, 15 bp, Homo sapiens
agtgagcgggatcac

SEQ ID NO: 1085927 - DNA, 15 bp, Homo sapiens
cagtgagcgggatca

SEQ ID NO: 1085928 - DNA, 15 bp, Homo sapiens
gcagtgagcgggatc

SEQ ID NO: 1085929 - DNA, 15 bp, Homo sapiens
tgcagtgagcgggat

SEQ ID NO: 1085930 - DNA, 15 bp, Homo sapiens
ttgcagtgagcggga

SEQ ID NO: 1085931 - DNA, 15 bp, Homo sapiens
gttgcagtgagcggg

SEQ ID NO: 1085932 - DNA, 15 bp, Homo sapiens
aggttgcagtgagcg

SEQ ID NO: 1085933 - DNA, 15 bp, Homo sapiens
agcatgagaatcgct

SEQ ID NO: 1085934 - DNA, 15 bp, Homo sapiens
aagcatgagaatcgc

SEQ ID NO: 1085935 - DNA, 15 bp, Homo sapiens
caagcatgagaatcg

SEQ ID NO: 1085936 - DNA, 15 bp, Homo sapiens
acaagcatgagaatc

SEQ ID NO: 1085937 - DNA, 15 bp, Homo sapiens
tacaagcatgagaat

SEQ ID NO: 1085938 - DNA, 15 bp, Homo sapiens
atacaagcatgagaa

SEQ ID NO: 1085939 - DNA, 15 bp, Homo sapiens
aatacaagcatgaga

SEQ ID NO: 1085940 - DNA, 15 bp, Homo sapiens
caatacaagcatgag

SEQ ID NO: 1085941 - DNA, 15 bp, Homo sapiens
acaatacaagcatga

SEQ ID NO: 1085942 - DNA, 15 bp, Homo sapiens
aacaatacaagcatg

SEQ ID NO: 1085943 - DNA, 15 bp, Homo sapiens
gaacaatacaagcat

SEQ ID NO: 1085944 - DNA, 15 bp, Homo sapiens
agaacaatacaagca

SEQ ID NO: 1085945 - DNA, 15 bp, Homo sapiens
aagaacaatacaagc

SEQ ID NO: 1085946 - DNA, 15 bp, Homo sapiens
caagaacaatacaag

SEQ ID NO: 1085947 - DNA, 15 bp, Homo sapiens
gcaagaacaatacaa

SEQ ID NO: 1085948 - DNA, 15 bp, Homo sapiens
tgcaagaacaataca

SEQ ID NO: 1085949 - DNA, 15 bp, Homo sapiens
gtgcaagaacaatac

SEQ ID NO: 1085950 - DNA, 15 bp, Homo sapiens
ggtgcaagaacaata

SEQ ID NO: 1085951 - DNA, 15 bp, Homo sapiens
aggtgcaagaacaat

SEQ ID NO: 1085952 - DNA, 15 bp, Homo sapiens
caggtgcaagaacaa

SEQ ID NO: 1085953 - DNA, 15 bp, Homo sapiens
acaggtgcaagaaca

SEQ ID NO: 1085954 - DNA, 15 bp, Homo sapiens
aacaggtgcaagaac

SEQ ID NO: 1085955 - DNA, 15 bp, Homo sapiens
gaacaggtgcaagaa

SEQ ID NO: 1085956 - DNA, 15 bp, Homo sapiens
agaacaggtgcaaga

SEQ ID NO: 1085957 - DNA, 15 bp, Homo sapiens
cagaacaggtgcaag

SEQ ID NO: 1085958 - DNA, 15 bp, Homo sapiens
gcagaacaggtgcaa

SEQ ID NO: 1085959 - DNA, 15 bp, Homo sapiens
tgcagaacaggtgca

SEQ ID NO: 1085960 - DNA, 15 bp, Homo sapiens
ttgcagaacaggtgc

SEQ ID NO: 1085961 - DNA, 15 bp, Homo sapiens
cttgcagaacaggtg

SEQ ID NO: 1085962 - DNA, 15 bp, Homo sapiens
acttgcagaacaggt

SEQ ID NO: 1085963 - DNA, 15 bp, Homo sapiens
tacttgcagaacagg

SEQ ID NO: 1085964 - DNA, 15 bp, Homo sapiens
gtacttgcagaacag

SEQ ID NO: 1085965 - DNA, 15 bp, Homo sapiens
tgtacttgcagaaca

SEQ ID NO: 1085966 - DNA, 15 bp, Homo sapiens
ttgtacttgcagaac

SEQ ID NO: 1085967 - DNA, 15 bp, Homo sapiens
gttgtacttgcagaa

SEQ ID NO: 1085968 - DNA, 15 bp, Homo sapiens
tgttgtacttgcaga

SEQ ID NO: 1085969 - DNA, 15 bp, Homo sapiens
atgttgtacttgcag

SEQ ID NO: 1085970 - DNA, 15 bp, Homo sapiens
aatgttgtacttgca

SEQ ID NO: 1085971 - DNA, 15 bp, Homo sapiens
caatgttgtacttgc

SEQ ID NO: 1085972 - DNA, 15 bp, Homo sapiens
acaatgttgtacttg

SEQ ID NO: 1085973 - DNA, 15 bp, Homo sapiens
cacaatgttgtactt

SEQ ID NO: 1085974 - DNA, 15 bp, Homo sapiens
ccacaatgttgtact

SEQ ID NO: 1085975 - DNA, 15 bp, Homo sapiens
cccacaatgttgtac

SEQ ID NO: 1085976 - DNA, 15 bp, Homo sapiens
tcccacaatgttgta

SEQ ID NO: 1085977 - DNA, 15 bp, Homo sapiens
ttcccacaatgttgt

SEQ ID NO: 1085978 - DNA, 15 bp, Homo sapiens
attcccacaatgttg

SEQ ID NO: 1085979 - DNA, 15 bp, Homo sapiens
cattcccacaatgtt

SEQ ID NO: 1085980 - DNA, 15 bp, Homo sapiens
ccattcccacaatgt

SEQ ID NO: 1085981 - DNA, 15 bp, Homo sapiens
tccattcccacaatg

SEQ ID NO: 1085982 - DNA, 15 bp, Homo sapiens
ttccattcccacaat

SEQ ID NO: 1085983 - DNA, 15 bp, Homo sapiens
tttccattcccacaa

SEQ ID NO: 1085984 - DNA, 15 bp, Homo sapiens
ttttccattcccaca

SEQ ID NO: 1085985 - DNA, 15 bp, Homo sapiens
attttccattcccac

SEQ ID NO: 1085986 - DNA, 15 bp, Homo sapiens
cattttccattccca

SEQ ID NO: 1085987 - DNA, 15 bp, Homo sapiens
gcattttccattccc

SEQ ID NO: 1085988 - DNA, 15 bp, Homo sapiens
tgcattttccattcc

SEQ ID NO: 1085989 - DNA, 15 bp, Homo sapiens
ctgcattttccattc

SEQ ID NO: 1085990 - DNA, 15 bp, Homo sapiens
cctgcattttccatt

SEQ ID NO: 1085991 - DNA, 15 bp, Homo sapiens
tcctgcattttccat

SEQ ID NO: 1085992 - DNA, 15 bp, Homo sapiens
ttcctgcattttcca

SEQ ID NO: 1085993 - DNA, 15 bp, Homo sapiens
tttcctgcattttcc

SEQ ID NO: 1085994 - DNA, 15 bp, Homo sapiens
atttcctgcattttc

SEQ ID NO: 1085995 - DNA, 15 bp, Homo sapiens
catttcctgcatttt

SEQ ID NO: 1085996 - DNA, 15 bp, Homo sapiens
ccatttcctgcattt

SEQ ID NO: 1085997 - DNA, 15 bp, Homo sapiens
cccatttcctgcatt

SEQ ID NO: 1085998 - DNA, 15 bp, Homo sapiens
gcccatttcctgcat

SEQ ID NO: 1085999 - DNA, 15 bp, Homo sapiens
tgcccatttcctgca

SEQ ID NO: 1086000 - DNA, 15 bp, Homo sapiens
ctgcccatttcctgc

SEQ ID NO: 1086001 - DNA, 15 bp, Homo sapiens
actgcccatttcctg

SEQ ID NO: 1086002 - DNA, 15 bp, Homo sapiens
tactgcccatttcct

SEQ ID NO: 1086003 - DNA, 15 bp, Homo sapiens
ttactgcccatttcc

SEQ ID NO: 1086004 - DNA, 15 bp, Homo sapiens
cttactgcccatttc

SEQ ID NO: 1086005 - DNA, 15 bp, Homo sapiens
ccttactgcccattt

SEQ ID NO: 1086006 - DNA, 15 bp, Homo sapiens
gccttactgcccatt

SEQ ID NO: 1086007 - DNA, 15 bp, Homo sapiens
agccttactgcccat

SEQ ID NO: 1086008 - DNA, 15 bp, Homo sapiens
tagccttactgccca

SEQ ID NO: 1086009 - DNA, 15 bp, Homo sapiens
atagccttactgccc

SEQ ID NO: 1086010 - DNA, 15 bp, Homo sapiens
catagccttactgcc

SEQ ID NO: 1086011 - DNA, 15 bp, Homo sapiens
tcatagccttactgc

SEQ ID NO: 1086012 - DNA, 15 bp, Homo sapiens
ttcatagccttactg

SEQ ID NO: 1086013 - DNA, 15 bp, Homo sapiens
gttcatagccttact

SEQ ID NO: 1086014 - DNA, 15 bp, Homo sapiens
cgttcatagccttac

SEQ ID NO: 1086015 - DNA, 15 bp, Homo sapiens
tcgttcatagcctta

SEQ ID NO: 1086016 - DNA, 15 bp, Homo sapiens
ttcgttcatagcctt

SEQ ID NO: 1086017 - DNA, 15 bp, Homo sapiens
cttcgttcatagcct

SEQ ID NO: 1086018 - DNA, 15 bp, Homo sapiens
gcttcgttcatagcc

SEQ ID NO: 1086019 - DNA, 15 bp, Homo sapiens
ggcttcgttcatagc

SEQ ID NO: 1086020 - DNA, 15 bp, Homo sapiens
gggcttcgttcatag

SEQ ID NO: 1086021 - DNA, 15 bp, Homo sapiens
cgggcttcgttcata

SEQ ID NO: 1086022 - DNA, 15 bp, Homo sapiens
gcgggcttcgttcat

SEQ ID NO: 1086023 - DNA, 15 bp, Homo sapiens
tgcgggcttcgttca

SEQ ID NO: 1086024 - DNA, 15 bp, Homo sapiens
gtgcgggcttcgttc

SEQ ID NO: 1086025 - DNA, 15 bp, Homo sapiens
tgtgcgggcttcgtt

SEQ ID NO: 1086026 - DNA, 15 bp, Homo sapiens
ctgtgcgggcttcgt

SEQ ID NO: 1086027 - DNA, 15 bp, Homo sapiens
cctgtgcgggcttcg

SEQ ID NO: 1086028 - DNA, 15 bp, Homo sapiens
tcctgtgcgggcttc

SEQ ID NO: 1086029 - DNA, 15 bp, Homo sapiens
ctcctgtgcgggctt

SEQ ID NO: 1086030 - DNA, 15 bp, Homo sapiens
actcctgtgcgggct

SEQ ID NO: 1086031 - DNA, 15 bp, Homo sapiens
cactcctgtgcgggc

SEQ ID NO: 1086032 - DNA, 15 bp, Homo sapiens
acactcctgtgcggg

SEQ ID NO: 1086033 - DNA, 15 bp, Homo sapiens
cacactcctgtgcgg

SEQ ID NO: 1086034 - DNA, 15 bp, Homo sapiens
ccacactcctgtgcg

SEQ ID NO: 1086035 - DNA, 15 bp, Homo sapiens
cccacactcctgtgc

SEQ ID NO: 1086036 - DNA, 15 bp, Homo sapiens
acccacactcctgtg

SEQ ID NO: 1086037 - DNA, 15 bp, Homo sapiens
tacccacactcctgt

SEQ ID NO: 1086038 - DNA, 15 bp, Homo sapiens
ctacccacactcctg

SEQ ID NO: 1086039 - DNA, 15 bp, Homo sapiens
gctacccacactcct

SEQ ID NO: 1086040 - DNA, 15 bp, Homo sapiens
tgctacccacactcc

SEQ ID NO: 1086041 - DNA, 15 bp, Homo sapiens
ctgctacccacactc

SEQ ID NO: 1086042 - DNA, 15 bp, Homo sapiens
tctgctacccacact

SEQ ID NO: 1086043 - DNA, 15 bp, Homo sapiens
ctctgctacccacac

SEQ ID NO: 1086044 - DNA, 15 bp, Homo sapiens
actctgctacccaca

SEQ ID NO: 1086045 - DNA, 15 bp, Homo sapiens
aactctgctacccac

SEQ ID NO: 1086046 - DNA, 15 bp, Homo sapiens
gaactctgctaccca

SEQ ID NO: 1086047 - DNA, 15 bp, Homo sapiens
agaactctgctaccc

SEQ ID NO: 1086048 - DNA, 15 bp, Homo sapiens
gagaactctgctacc

SEQ ID NO: 1086049 - DNA, 15 bp, Homo sapiens
agagaactctgctac

SEQ ID NO: 1086050 - DNA, 15 bp, Homo sapiens
tagagaactctgcta

SEQ ID NO: 1086051 - DNA, 15 bp, Homo sapiens
ctagagaactctgct

SEQ ID NO: 1086052 - DNA, 15 bp, Homo sapiens
actagagaactctgc

SEQ ID NO: 1086053 - DNA, 15 bp, Homo sapiens
gactagagaactctg

SEQ ID NO: 1086054 - DNA, 15 bp, Homo sapiens
ggactagagaactct

SEQ ID NO: 1086055 - DNA, 15 bp, Homo sapiens
tggactagagaactc

SEQ ID NO: 1086056 - DNA, 15 bp, Homo sapiens
ctggactagagaact

SEQ ID NO: 1086057 - DNA, 15 bp, Homo sapiens
cctggactagagaac

SEQ ID NO: 1086058 - DNA, 15 bp, Homo sapiens
gcctggactagagaa

SEQ ID NO: 1086059 - DNA, 15 bp, Homo sapiens
agcctggactagaga

SEQ ID NO: 1086060 - DNA, 15 bp, Homo sapiens
gagcctggactagag

SEQ ID NO: 1086061 - DNA, 15 bp, Homo sapiens
ggagcctggactaga

SEQ ID NO: 1086062 - DNA, 15 bp, Homo sapiens
gggagcctggactag

SEQ ID NO: 1086063 - DNA, 15 bp, Homo sapiens
tgggagcctggacta

SEQ ID NO: 1086064 - DNA, 15 bp, Homo sapiens
gtgggagcctggact

SEQ ID NO: 1086065 - DNA, 15 bp, Homo sapiens
ggtgggagcctggac

SEQ ID NO: 1086066 - DNA, 15 bp, Homo sapiens
aggtgggagcctgga

SEQ ID NO: 1086067 - DNA, 15 bp, Homo sapiens
caggtgggagcctgg

SEQ ID NO: 1086068 - DNA, 15 bp, Homo sapiens
tcaggtgggagcctg

SEQ ID NO: 1086069 - DNA, 15 bp, Homo sapiens
ctcaggtgggagcct

SEQ ID NO: 1086070 - DNA, 15 bp, Homo sapiens
cctcaggtgggagcc

SEQ ID NO: 1086071 - DNA, 15 bp, Homo sapiens
acctcaggtgggagc

SEQ ID NO: 1086072 - DNA, 15 bp, Homo sapiens
cacctcaggtgggag

SEQ ID NO: 1086073 - DNA, 15 bp, Homo sapiens
gcacctcaggtggga

SEQ ID NO: 1086074 - DNA, 15 bp, Homo sapiens
agcacctcaggtggg

SEQ ID NO: 1086075 - DNA, 15 bp, Homo sapiens
cagcacctcaggtgg

SEQ ID NO: 1086076 - DNA, 15 bp, Homo sapiens
ccagcacctcaggtg

SEQ ID NO: 1086077 - DNA, 15 bp, Homo sapiens
cccagcacctcaggt

SEQ ID NO: 1086078 - DNA, 15 bp, Homo sapiens
tcccagcacctcagg

SEQ ID NO: 1086079 - DNA, 15 bp, Homo sapiens
gtcccagcacctcag

SEQ ID NO: 1086080 - DNA, 15 bp, Homo sapiens
ggtcccagcacctca

SEQ ID NO: 1086081 - DNA, 15 bp, Homo sapiens
aggtcccagcacctc

SEQ ID NO: 1086082 - DNA, 15 bp, Homo sapiens
taggtcccagcacct

SEQ ID NO: 1086083 - DNA, 15 bp, Homo sapiens
ctaggtcccagcacc

SEQ ID NO: 1086084 - DNA, 15 bp, Homo sapiens
tctaggtcccagcac

SEQ ID NO: 1086085 - DNA, 15 bp, Homo sapiens
ttctaggtcccagca

SEQ ID NO: 1086086 - DNA, 15 bp, Homo sapiens
cttctaggtcccagc

SEQ ID NO: 1086087 - DNA, 15 bp, Homo sapiens
tcttctaggtcccag

SEQ ID NO: 1086088 - DNA, 15 bp, Homo sapiens
ttcttctaggtccca

SEQ ID NO: 1086089 - DNA, 15 bp, Homo sapiens
tttcttctaggtccc

SEQ ID NO: 1086090 - DNA, 15 bp, Homo sapiens
ttttcttctaggtcc

SEQ ID NO: 1086091 - DNA, 15 bp, Homo sapiens
cttttcttctaggtc

SEQ ID NO: 1086092 - DNA, 15 bp, Homo sapiens
gcttttcttctaggt

SEQ ID NO: 1086093 - DNA, 15 bp, Homo sapiens
ggcttttcttctagg

SEQ ID NO: 1086094 - DNA, 15 bp, Homo sapiens
aggcttttcttctag

SEQ ID NO: 1086095 - DNA, 15 bp, Homo sapiens
gaggcttttcttcta

SEQ ID NO: 1086096 - DNA, 15 bp, Homo sapiens
agaggcttttcttct

SEQ ID NO: 1086097 - DNA, 15 bp, Homo sapiens
gagaggcttttcttc

SEQ ID NO: 1086098 - DNA, 15 bp, Homo sapiens
agagaggcttttctt

SEQ ID NO: 1086099 - DNA, 15 bp, Homo sapiens
cagagaggcttttct

SEQ ID NO: 1086100 - DNA, 15 bp, Homo sapiens
gcagagaggcttttc

SEQ ID NO: 1086101 - DNA, 15 bp, Homo sapiens
tgcagagaggctttt

SEQ ID NO: 1086102 - DNA, 15 bp, Homo sapiens
ctgcagagaggcttt

SEQ ID NO: 1086103 - DNA, 15 bp, Homo sapiens
tctgcagagaggctt

SEQ ID NO: 1086104 - DNA, 15 bp, Homo sapiens
gtctgcagagaggct

SEQ ID NO: 1086105 - DNA, 15 bp, Homo sapiens
tgtctgcagagaggc

SEQ ID NO: 1086106 - DNA, 15 bp, Homo sapiens
ctgtctgcagagagg

SEQ ID NO: 1086107 - DNA, 15 bp, Homo sapiens
tctgtctgcagagag

SEQ ID NO: 1086108 - DNA, 15 bp, Homo sapiens
ttctgtctgcagaga

SEQ ID NO: 1086109 - DNA, 15 bp, Homo sapiens
gttctgtctgcagag

SEQ ID NO: 1086110 - DNA, 15 bp, Homo sapiens
agttctgtctgcaga

SEQ ID NO: 1086111 - DNA, 15 bp, Homo sapiens
cagttctgtctgcag

SEQ ID NO: 1086112 - DNA, 15 bp, Homo sapiens
ccagttctgtctgca

SEQ ID NO: 1086113 - DNA, 15 bp, Homo sapiens
tccagttctgtctgc

SEQ ID NO: 1086114 - DNA, 15 bp, Homo sapiens
ctccagttctgtctg

SEQ ID NO: 1086115 - DNA, 15 bp, Homo sapiens
actccagttctgtct

SEQ ID NO: 1086116 - DNA, 15 bp, Homo sapiens
aactccagttctgtc

SEQ ID NO: 1086117 - DNA, 15 bp, Homo sapiens
taactccagttctgt

SEQ ID NO: 1086118 - DNA, 15 bp, Homo sapiens
ttaactccagttctg

SEQ ID NO: 1086119 - DNA, 15 bp, Homo sapiens
gttaactccagttct

SEQ ID NO: 1086120 - DNA, 15 bp, Homo sapiens
atatactatgatatc

SEQ ID NO: 1086121 - DNA, 15 bp, Homo sapiens
aatatactatgatat

SEQ ID NO: 1086122 - DNA, 15 bp, Homo sapiens
aaatatactatgata

SEQ ID NO: 1086123 - DNA, 15 bp, Homo sapiens
taaatatactatgat

SEQ ID NO: 1086124 - DNA, 15 bp, Homo sapiens
ttaaatatactatga

SEQ ID NO: 1086125 - DNA, 15 bp, Homo sapiens
gttaaatatactatg

SEQ ID NO: 1086126 - DNA, 15 bp, Homo sapiens
tgttaaatatactat

SEQ ID NO: 1086127 - DNA, 15 bp, Homo sapiens
ctgttaaatatacta

SEQ ID NO: 1086128 - DNA, 15 bp, Homo sapiens
tctgttaaatatact

SEQ ID NO: 1086129 - DNA, 15 bp, Homo sapiens
gtctgttaaatatac

SEQ ID NO: 1086130 - DNA, 15 bp, Homo sapiens
tgtctgttaaatata

SEQ ID NO: 1086131 - DNA, 15 bp, Homo sapiens
ttgtctgttaaatat

SEQ ID NO: 1086132 - DNA, 15 bp, Homo sapiens
tttgtctgttaaata

SEQ ID NO: 1086133 - DNA, 15 bp, Homo sapiens
ctttgtctgttaaat

SEQ ID NO: 1086134 - DNA, 15 bp, Homo sapiens
cctttgtctgttaaa

SEQ ID NO: 1086135 - DNA, 15 bp, Homo sapiens
tcctttgtctgttaa

SEQ ID NO: 1086136 - DNA, 15 bp, Homo sapiens
atcctttgtctgtta

SEQ ID NO: 1086137 - DNA, 15 bp, Homo sapiens
aatcctttgtctgtt

SEQ ID NO: 1086138 - DNA, 15 bp, Homo sapiens
taatcctttgtctgt

SEQ ID NO: 1086139 - DNA, 15 bp, Homo sapiens
ttaatcctttgtctg

SEQ ID NO: 1086140 - DNA, 15 bp, Homo sapiens
attaatcctttgtct

SEQ ID NO: 1086141 - DNA, 15 bp, Homo sapiens
tattaatcctttgtc

SEQ ID NO: 1086142 - DNA, 15 bp, Homo sapiens
ctattaatcctttgt

SEQ ID NO: 1086143 - DNA, 15 bp, Homo sapiens
tctattaatcctttg

SEQ ID NO: 1086144 - DNA, 15 bp, Homo sapiens
atctattaatccttt

SEQ ID NO: 1086145 - DNA, 15 bp, Homo sapiens
tatctattaatcctt

SEQ ID NO: 1086146 - DNA, 15 bp, Homo sapiens
gtatctattaatcct

SEQ ID NO: 1086147 - DNA, 15 bp, Homo sapiens
agtatctattaatcc

SEQ ID NO: 1086148 - DNA, 15 bp, Homo sapiens
tagtatctattaatc

SEQ ID NO: 1086149 - DNA, 15 bp, Homo sapiens
gtagtatctattaat

SEQ ID NO: 1086150 - DNA, 15 bp, Homo sapiens
tgtagtatctattaa

SEQ ID NO: 1086151 - DNA, 15 bp, Homo sapiens
ctgtagtatctatta

SEQ ID NO: 1086152 - DNA, 15 bp, Homo sapiens
tctgtagtatctatt

SEQ ID NO: 1086153 - DNA, 15 bp, Homo sapiens
atctgtagtatctat

SEQ ID NO: 1086154 - DNA, 15 bp, Homo sapiens
catctgtagtatcta

SEQ ID NO: 1086155 - DNA, 15 bp, Homo sapiens
tcatctgtagtatct

SEQ ID NO: 1086156 - DNA, 15 bp, Homo sapiens
ttcatctgtagtatc

SEQ ID NO: 1086157 - DNA, 15 bp, Homo sapiens
tttcatctgtagtat

SEQ ID NO: 1086158 - DNA, 15 bp, Homo sapiens
atttcatctgtagta

SEQ ID NO: 1086159 - DNA, 15 bp, Homo sapiens
tatttcatctgtagt

SEQ ID NO: 1086160 - DNA, 15 bp, Homo sapiens
atatttcatctgtag

SEQ ID NO: 1086161 - DNA, 15 bp, Homo sapiens
tatatttcatctgta

SEQ ID NO: 1086162 - DNA, 15 bp, Homo sapiens
ttatatttcatctgt

SEQ ID NO: 1086163 - DNA, 15 bp, Homo sapiens
tttatatttcatctg

SEQ ID NO: 1086164 - DNA, 15 bp, Homo sapiens
ttttatatttcatct

SEQ ID NO: 1086165 - DNA, 15 bp, Homo sapiens
attttatatttcatc

SEQ ID NO: 1086166 - DNA, 15 bp, Homo sapiens
tattttatatttcat

SEQ ID NO: 1086167 - DNA, 15 bp, Homo sapiens
ctattttatatttca

SEQ ID NO: 1086168 - DNA, 15 bp, Homo sapiens
actattttatatttc

SEQ ID NO: 1086169 - DNA, 15 bp, Homo sapiens
aactattttatattt

SEQ ID NO: 1086170 - DNA, 15 bp, Homo sapiens
aaactattttatatt

SEQ ID NO: 1086171 - DNA, 15 bp, Homo sapiens
gaaactattttatat

SEQ ID NO: 1086172 - DNA, 15 bp, Homo sapiens
agaaactattttata

SEQ ID NO: 1086173 - DNA, 15 bp, Homo sapiens
gagaaactattttat

SEQ ID NO: 1086174 - DNA, 15 bp, Homo sapiens
ggagaaactatttta

SEQ ID NO: 1086175 - DNA, 15 bp, Homo sapiens
tggagaaactatttt

SEQ ID NO: 1086176 - DNA, 15 bp, Homo sapiens
ttggagaaactattt

SEQ ID NO: 1086177 - DNA, 15 bp, Homo sapiens
cttggagaaactatt

SEQ ID NO: 1086178 - DNA, 15 bp, Homo sapiens
acttggagaaactat

SEQ ID NO: 1086179 - DNA, 15 bp, Homo sapiens
gacttggagaaacta

SEQ ID NO: 1086180 - DNA, 15 bp, Homo sapiens
ggacttggagaaact

SEQ ID NO: 1086181 - DNA, 15 bp, Homo sapiens
tggacttggagaaac

SEQ ID NO: 1086182 - DNA, 15 bp, Homo sapiens
atggacttggagaaa

SEQ ID NO: 1086183 - DNA, 15 bp, Homo sapiens
tatggacttggagaa

SEQ ID NO: 1086184 - DNA, 15 bp, Homo sapiens
ctatggacttggaga

SEQ ID NO: 1086185 - DNA, 15 bp, Homo sapiens
cctatggacttggag

SEQ ID NO: 1086186 - DNA, 15 bp, Homo sapiens
gcctatggacttgga

SEQ ID NO: 1086187 - DNA, 15 bp, Homo sapiens
tgcctatggacttgg

SEQ ID NO: 1086188 - DNA, 15 bp, Homo sapiens
ctgcctatggacttg

SEQ ID NO: 1086189 - DNA, 15 bp, Homo sapiens
tctgcctatggactt

SEQ ID NO: 1086190 - DNA, 15 bp, Homo sapiens
ttctgcctatggact

SEQ ID NO: 1086191 - DNA, 15 bp, Homo sapiens
cttctgcctatggac

SEQ ID NO: 1086192 - DNA, 15 bp, Homo sapiens
tcttctgcctatgga

SEQ ID NO: 1086193 - DNA, 15 bp, Homo sapiens
atcttctgcctatgg

SEQ ID NO: 1086194 - DNA, 15 bp, Homo sapiens
tatcttctgcctatg

SEQ ID NO: 1086195 - DNA, 15 bp, Homo sapiens
ttatcttctgcctat

SEQ ID NO: 1086196 - DNA, 15 bp, Homo sapiens
attatcttctgccta

SEQ ID NO: 1086197 - DNA, 15 bp, Homo sapiens
gattatcttctgcct

SEQ ID NO: 1086198 - DNA, 15 bp, Homo sapiens
ggattatcttctgcc

SEQ ID NO: 1086199 - DNA, 15 bp, Homo sapiens
tggattatcttctgc

SEQ ID NO: 1086200 - DNA, 15 bp, Homo sapiens
ttggattatcttctg

SEQ ID NO: 1086201 - DNA, 15 bp, Homo sapiens
attggattatcttct

SEQ ID NO: 1086202 - DNA, 15 bp, Homo sapiens
tattggattatcttc

SEQ ID NO: 1086203 - DNA, 15 bp, Homo sapiens
ctattggattatctt

SEQ ID NO: 1086204 - DNA, 15 bp, Homo sapiens
gctattggattatct

SEQ ID NO: 1086205 - DNA, 15 bp, Homo sapiens
tgctattggattatc

SEQ ID NO: 1086206 - DNA, 15 bp, Homo sapiens
ttgctattggattat

SEQ ID NO: 1086207 - DNA, 15 bp, Homo sapiens
gttgctattggatta

SEQ ID NO: 1086208 - DNA, 15 bp, Homo sapiens
tgttgctattggatt

SEQ ID NO: 1086209 - DNA, 15 bp, Homo sapiens
atgttgctattggat

SEQ ID NO: 1086210 - DNA, 15 bp, Homo sapiens
tatgttgctattgga

SEQ ID NO: 1086211 - DNA, 15 bp, Homo sapiens
ctatgttgctattgg

SEQ ID NO: 1086212 - DNA, 15 bp, Homo sapiens
actatgttgctattg

SEQ ID NO: 1086213 - DNA, 15 bp, Homo sapiens
aactatgttgctatt

SEQ ID NO: 1086214 - DNA, 15 bp, Homo sapiens
taactatgttgctat

SEQ ID NO: 1086215 - DNA, 15 bp, Homo sapiens
ttaactatgttgcta

SEQ ID NO: 1086216 - DNA, 15 bp, Homo sapiens
cttaactatgttgct

SEQ ID NO: 1086217 - DNA, 15 bp, Homo sapiens
acttaactatgttgc

SEQ ID NO: 1086218 - DNA, 15 bp, Homo sapiens
tacttaactatgttg

SEQ ID NO: 1086219 - DNA, 15 bp, Homo sapiens
ttacttaactatgtt

SEQ ID NO: 1086220 - DNA, 15 bp, Homo sapiens
attacttaactatgt

SEQ ID NO: 1086221 - DNA, 15 bp, Homo sapiens
cattacttaactatg

SEQ ID NO: 1086222 - DNA, 15 bp, Homo sapiens
acattacttaactat

SEQ ID NO: 1086223 - DNA, 15 bp, Homo sapiens
tacattacttaacta

SEQ ID NO: 1086224 - DNA, 15 bp, Homo sapiens
ttacattacttaact

SEQ ID NO: 1086225 - DNA, 15 bp, Homo sapiens
tttacattacttaac

SEQ ID NO: 1086226 - DNA, 15 bp, Homo sapiens
gtttacattacttaa

SEQ ID NO: 1086227 - DNA, 15 bp, Homo sapiens
tgtttacattactta

SEQ ID NO: 1086228 - DNA, 15 bp, Homo sapiens
ttgtttacattactt

SEQ ID NO: 1086229 - DNA, 15 bp, Homo sapiens
tttgtttacattact

SEQ ID NO: 1086230 - DNA, 15 bp, Homo sapiens
atttgtttacattac

SEQ ID NO: 1086231 - DNA, 15 bp, Homo sapiens
gatttgtttacatta

SEQ ID NO: 1086232 - DNA, 15 bp, Homo sapiens
tgatttgtttacatt

SEQ ID NO: 1086233 - DNA, 15 bp, Homo sapiens
atgatttgtttacat

SEQ ID NO: 1086234 - DNA, 15 bp, Homo sapiens
gatgatttgtttaca

SEQ ID NO: 1086235 - DNA, 15 bp, Homo sapiens
ggatgatttgtttac

SEQ ID NO: 1086236 - DNA, 15 bp, Homo sapiens
aggatgatttgttta

SEQ ID NO: 1086237 - DNA, 15 bp, Homo sapiens
aaggatgatttgttt

SEQ ID NO: 1086238 - DNA, 15 bp, Homo sapiens
taaggatgatttgtt

SEQ ID NO: 1086239 - DNA, 15 bp, Homo sapiens
ctaaggatgatttgt

SEQ ID NO: 1086240 - DNA, 15 bp, Homo sapiens
tctaaggatgatttg

SEQ ID NO: 1086241 - DNA, 15 bp, Homo sapiens
ttctaaggatgattt

SEQ ID NO: 1086242 - DNA, 15 bp, Homo sapiens
cttctaaggatgatt

SEQ ID NO: 1086243 - DNA, 15 bp, Homo sapiens
tcttctaaggatgat

SEQ ID NO: 1086244 - DNA, 15 bp, Homo sapiens
ttcttctaaggatga

SEQ ID NO: 1086245 - DNA, 15 bp, Homo sapiens
cttcttctaaggatg

SEQ ID NO: 1086246 - DNA, 15 bp, Homo sapiens
tcttcttctaaggat

SEQ ID NO: 1086247 - DNA, 15 bp, Homo sapiens
ttcttcttctaagga

SEQ ID NO: 1086248 - DNA, 15 bp, Homo sapiens
tttcttcttctaagg

SEQ ID NO: 1086249 - DNA, 15 bp, Homo sapiens
atttcttcttctaag

SEQ ID NO: 1086250 - DNA, 15 bp, Homo sapiens
catttcttcttctaa

SEQ ID NO: 1086251 - DNA, 15 bp, Homo sapiens
gcatttcttcttcta

SEQ ID NO: 1086252 - DNA, 15 bp, Homo sapiens
tgcatttcttcttct

SEQ ID NO: 1086253 - DNA, 15 bp, Homo sapiens
ttgcatttcttcttc

SEQ ID NO: 1086254 - DNA, 15 bp, Homo sapiens
attgcatttcttctt

SEQ ID NO: 1086255 - DNA, 15 bp, Homo sapiens
gattgcatttcttct

SEQ ID NO: 1086256 - DNA, 15 bp, Homo sapiens
tgattgcatttcttc

SEQ ID NO: 1086257 - DNA, 15 bp, Homo sapiens
gtgattgcatttctt

SEQ ID NO: 1086258 - DNA, 15 bp, Homo sapiens
ggtgattgcatttct

SEQ ID NO: 1086259 - DNA, 15 bp, Homo sapiens
tggtgattgcatttc

SEQ ID NO: 1086260 - DNA, 15 bp, Homo sapiens
ttggtgattgcattt

SEQ ID NO: 1086261 - DNA, 15 bp, Homo sapiens
cttggtgattgcatt

SEQ ID NO: 1086262 - DNA, 15 bp, Homo sapiens
tcttggtgattgcat

SEQ ID NO: 1086263 - DNA, 15 bp, Homo sapiens
ttcttggtgattgca

SEQ ID NO: 1086264 - DNA, 15 bp, Homo sapiens
tttcttggtgattgc

SEQ ID NO: 1086265 - DNA, 15 bp, Homo sapiens
gtttcttggtgattg

SEQ ID NO: 1086266 - DNA, 15 bp, Homo sapiens
tgtttcttggtgatt

SEQ ID NO: 1086267 - DNA, 15 bp, Homo sapiens
gtgtttcttggtgat

SEQ ID NO: 1086268 - DNA, 15 bp, Homo sapiens
tgtgtttcttggtga

SEQ ID NO: 1086269 - DNA, 15 bp, Homo sapiens
atgtgtttcttggtg

SEQ ID NO: 1086270 - DNA, 15 bp, Homo sapiens
catgtgtttcttggt

SEQ ID NO: 1086271 - DNA, 15 bp, Homo sapiens
tcatgtgtttcttgg

SEQ ID NO: 1086272 - DNA, 15 bp, Homo sapiens
ttcatgtgtttcttg

SEQ ID NO: 1086273 - DNA, 15 bp, Homo sapiens
tttcatgtgtttctt

SEQ ID NO: 1086274 - DNA, 15 bp, Homo sapiens
ttttcatgtgtttct

SEQ ID NO: 1086275 - DNA, 15 bp, Homo sapiens
cttttcatgtgtttc

SEQ ID NO: 1086276 - DNA, 15 bp, Homo sapiens
ccttttcatgtgttt

SEQ ID NO: 1086277 - DNA, 15 bp, Homo sapiens
accttttcatgtgtt

SEQ ID NO: 1086278 - DNA, 15 bp, Homo sapiens
caccttttcatgtgt

SEQ ID NO: 1086279 - DNA, 15 bp, Homo sapiens
acaccttttcatgtg

SEQ ID NO: 1086280 - DNA, 15 bp, Homo sapiens
gacaccttttcatgt

SEQ ID NO: 1086281 - DNA, 15 bp, Homo sapiens
ggacaccttttcatg

SEQ ID NO: 1086282 - DNA, 15 bp, Homo sapiens
tggacaccttttcat

SEQ ID NO: 1086283 - DNA, 15 bp, Homo sapiens
ctggacaccttttca

SEQ ID NO: 1086284 - DNA, 15 bp, Homo sapiens
gctggacaccttttc

SEQ ID NO: 1086285 - DNA, 15 bp, Homo sapiens
tgctggacacctttt

SEQ ID NO: 1086286 - DNA, 15 bp, Homo sapiens
atgctggacaccttt

SEQ ID NO: 1086287 - DNA, 15 bp, Homo sapiens
aatgctggacacctt

SEQ ID NO: 1086288 - DNA, 15 bp, Homo sapiens
aaatgctggacacct

SEQ ID NO: 1086289 - DNA, 15 bp, Homo sapiens
aaaatgctggacacc

SEQ ID NO: 1086290 - DNA, 15 bp, Homo sapiens
caaaatgctggacac

SEQ ID NO: 1086291 - DNA, 15 bp, Homo sapiens
gcaaaatgctggaca

SEQ ID NO: 1086292 - DNA, 15 bp, Homo sapiens
tgcaaaatgctggac

SEQ ID NO: 1086293 - DNA, 15 bp, Homo sapiens
ttgcaaaatgctgga

SEQ ID NO: 1086294 - DNA, 15 bp, Homo sapiens
attgcaaaatgctgg

SEQ ID NO: 1086295 - DNA, 15 bp, Homo sapiens
aattgcaaaatgctg

SEQ ID NO: 1086296 - DNA, 15 bp, Homo sapiens
gaattgcaaaatgct

SEQ ID NO: 1086297 - DNA, 15 bp, Homo sapiens
tgaattgcaaaatgc

SEQ ID NO: 1086298 - DNA, 15 bp, Homo sapiens
ttgaattgcaaaatg

SEQ ID NO: 1086299 - DNA, 15 bp, Homo sapiens
cttgaattgcaaaat

SEQ ID NO: 1086300 - DNA, 15 bp, Homo sapiens
gcttgaattgcaaaa

SEQ ID NO: 1086301 - DNA, 15 bp, Homo sapiens
tgcttgaattgcaaa

SEQ ID NO: 1086302 - DNA, 15 bp, Homo sapiens
ttgcttgaattgcaa

SEQ ID NO: 1086303 - DNA, 15 bp, Homo sapiens
gttgcttgaattgca

SEQ ID NO: 1086304 - DNA, 15 bp, Homo sapiens
tgttgcttgaattgc

SEQ ID NO: 1086305 - DNA, 15 bp, Homo sapiens
ttgttgcttgaattg

SEQ ID NO: 1086306 - DNA, 15 bp, Homo sapiens
attgttgcttgaatt

SEQ ID NO: 1086307 - DNA, 15 bp, Homo sapiens
cattgttgcttgaat

SEQ ID NO: 1086308 - DNA, 15 bp, Homo sapiens
tcattgttgcttgaa

SEQ ID NO: 1086309 - DNA, 15 bp, Homo sapiens
ctcattgttgcttga

SEQ ID NO: 1086310 - DNA, 15 bp, Homo sapiens
cctcattgttgcttg

SEQ ID NO: 1086311 - DNA, 15 bp, Homo sapiens
acctcattgttgctt

SEQ ID NO: 1086312 - DNA, 15 bp, Homo sapiens
cacctcattgttgct

SEQ ID NO: 1086313 - DNA, 15 bp, Homo sapiens
tcacctcattgttgc

SEQ ID NO: 1086314 - DNA, 15 bp, Homo sapiens
gtcacctcattgttg

SEQ ID NO: 1086315 - DNA, 15 bp, Homo sapiens
tgtcacctcattgtt

SEQ ID NO: 1086316 - DNA, 15 bp, Homo sapiens
ctgtcacctcattgt

SEQ ID NO: 1086317 - DNA, 15 bp, Homo sapiens
tctgtcacctcattg

SEQ ID NO: 1086318 - DNA, 15 bp, Homo sapiens
atctgtcacctcatt

SEQ ID NO: 1086319 - DNA, 15 bp, Homo sapiens
gatctgtcacctcat

SEQ ID NO: 1086320 - DNA, 15 bp, Homo sapiens
cgatctgtcacctca

SEQ ID NO: 1086321 - DNA, 15 bp, Homo sapiens
ccgatctgtcacctc

SEQ ID NO: 1086322 - DNA, 15 bp, Homo sapiens
gccgatctgtcacct

SEQ ID NO: 1086323 - DNA, 15 bp, Homo sapiens
tgccgatctgtcacc

SEQ ID NO: 1086324 - DNA, 15 bp, Homo sapiens
ttgccgatctgtcac

SEQ ID NO: 1086325 - DNA, 15 bp, Homo sapiens
tttgccgatctgtca

SEQ ID NO: 1086326 - DNA, 15 bp, Homo sapiens
ttttgccgatctgtc

SEQ ID NO: 1086327 - DNA, 15 bp, Homo sapiens
tttttgccgatctgt

SEQ ID NO: 1086328 - DNA, 15 bp, Homo sapiens
ttttttgccgatctg

SEQ ID NO: 1086329 - DNA, 15 bp, Homo sapiens
gttttttgccgatct

SEQ ID NO: 1086330 - DNA, 15 bp, Homo sapiens
agttttttgccgatc

SEQ ID NO: 1086331 - DNA, 15 bp, Homo sapiens
gagttttttgccgat

SEQ ID NO: 1086332 - DNA, 15 bp, Homo sapiens
tgagttttttgccga

SEQ ID NO: 1086333 - DNA, 15 bp, Homo sapiens
atgagttttttgccg

SEQ ID NO: 1086334 - DNA, 15 bp, Homo sapiens
tatgagttttttgcc

SEQ ID NO: 1086335 - DNA, 15 bp, Homo sapiens
ttatgagttttttgc

SEQ ID NO: 1086336 - DNA, 15 bp, Homo sapiens
tttatgagttttttg

SEQ ID NO: 1086337 - DNA, 15 bp, Homo sapiens
ctttatgagtttttt

SEQ ID NO: 1086338 - DNA, 15 bp, Homo sapiens
tctttatgagttttt

SEQ ID NO: 1086339 - DNA, 15 bp, Homo sapiens
atctttatgagtttt

SEQ ID NO: 1086340 - DNA, 15 bp, Homo sapiens
aatctttatgagttt

SEQ ID NO: 1086341 - DNA, 15 bp, Homo sapiens
aaatctttatgagtt

SEQ ID NO: 1086342 - DNA, 15 bp, Homo sapiens
taaatctttatgagt

SEQ ID NO: 1086343 - DNA, 15 bp, Homo sapiens
ataaatctttatgag

SEQ ID NO: 1086344 - DNA, 15 bp, Homo sapiens
gataaatctttatga

SEQ ID NO: 1086345 - DNA, 15 bp, Homo sapiens
tgataaatctttatg

SEQ ID NO: 1086346 - DNA, 15 bp, Homo sapiens
atgataaatctttat

SEQ ID NO: 1086347 - DNA, 15 bp, Homo sapiens
gatgataaatcttta

SEQ ID NO: 1086348 - DNA, 15 bp, Homo sapiens
agatgataaatcttt

SEQ ID NO: 1086349 - DNA, 15 bp, Homo sapiens
cagatgataaatctt

SEQ ID NO: 1086350 - DNA, 15 bp, Homo sapiens
tcagatgataaatct

SEQ ID NO: 1086351 - DNA, 15 bp, Homo sapiens
ttcagatgataaatc

SEQ ID NO: 1086352 - DNA, 15 bp, Homo sapiens
cttcagatgataaat

SEQ ID NO: 1086353 - DNA, 15 bp, Homo sapiens
ccttcagatgataaa

SEQ ID NO: 1086354 - DNA, 15 bp, Homo sapiens
tccttcagatgataa

SEQ ID NO: 1086355 - DNA, 15 bp, Homo sapiens
atccttcagatgata

SEQ ID NO: 1086356 - DNA, 15 bp, Homo sapiens
aatccttcagatgat

SEQ ID NO: 1086357 - DNA, 15 bp, Homo sapiens
caatccttcagatga

SEQ ID NO: 1086358 - DNA, 15 bp, Homo sapiens
ccaatccttcagatg

SEQ ID NO: 1086359 - DNA, 15 bp, Homo sapiens
gccaatccttcagat

SEQ ID NO: 1086360 - DNA, 15 bp, Homo sapiens
ggccaatccttcaga

SEQ ID NO: 1086361 - DNA, 15 bp, Homo sapiens
tggccaatccttcag

SEQ ID NO: 1086362 - DNA, 15 bp, Homo sapiens
ttggccaatccttca

SEQ ID NO: 1086363 - DNA, 15 bp, Homo sapiens
cttggccaatccttc

SEQ ID NO: 1086364 - DNA, 15 bp, Homo sapiens
tcttggccaatcctt

SEQ ID NO: 1086365 - DNA, 15 bp, Homo sapiens
atcttggccaatcct

SEQ ID NO: 1086366 - DNA, 15 bp, Homo sapiens
tatcttggccaatcc

SEQ ID NO: 1086367 - DNA, 15 bp, Homo sapiens
ttatcttggccaatc

SEQ ID NO: 1086368 - DNA, 15 bp, Homo sapiens
tttatcttggccaat

SEQ ID NO: 1086369 - DNA, 15 bp, Homo sapiens
ctttatcttggccaa

SEQ ID NO: 1086370 - DNA, 15 bp, Homo sapiens
gctttatcttggcca

SEQ ID NO: 1086371 - DNA, 15 bp, Homo sapiens
ggctttatcttggcc

SEQ ID NO: 1086372 - DNA, 15 bp, Homo sapiens
tggctttatcttggc

SEQ ID NO: 1086373 - DNA, 15 bp, Homo sapiens
ttggctttatcttgg

SEQ ID NO: 1086374 - DNA, 15 bp, Homo sapiens
tttggctttatcttg

SEQ ID NO: 1086375 - DNA, 15 bp, Homo sapiens
gtttggctttatctt

SEQ ID NO: 1086376 - DNA, 15 bp, Homo sapiens
agtttggctttatct

SEQ ID NO: 1086377 - DNA, 15 bp, Homo sapiens
aagtttggctttatc

SEQ ID NO: 1086378 - DNA, 15 bp, Homo sapiens
gaagtttggctttat

SEQ ID NO: 1086379 - DNA, 15 bp, Homo sapiens
agaagtttggcttta

SEQ ID NO: 1086380 - DNA, 15 bp, Homo sapiens
gagaagtttggcttt

SEQ ID NO: 1086381 - DNA, 15 bp, Homo sapiens
cgagaagtttggctt

SEQ ID NO: 1086382 - DNA, 15 bp, Homo sapiens
acgagaagtttggct

SEQ ID NO: 1086383 - DNA, 15 bp, Homo sapiens
cacgagaagtttggc

SEQ ID NO: 1086384 - DNA, 15 bp, Homo sapiens
acacgagaagtttgg

SEQ ID NO: 1086385 - DNA, 15 bp, Homo sapiens
aacacgagaagtttg

SEQ ID NO: 1086386 - DNA, 15 bp, Homo sapiens
caacacgagaagttt

SEQ ID NO: 1086387 - DNA, 15 bp, Homo sapiens
ccaacacgagaagtt

SEQ ID NO: 1086388 - DNA, 15 bp, Homo sapiens
gccaacacgagaagt

SEQ ID NO: 1086389 - DNA, 15 bp, Homo sapiens
tgccaacacgagaag

SEQ ID NO: 1086390 - DNA, 15 bp, Homo sapiens
ctgccaacacgagaa

SEQ ID NO: 1086391 - DNA, 15 bp, Homo sapiens
tctgccaacacgaga

SEQ ID NO: 1086392 - DNA, 15 bp, Homo sapiens
ttctgccaacacgag

SEQ ID NO: 1086393 - DNA, 15 bp, Homo sapiens
cttctgccaacacga

SEQ ID NO: 1086394 - DNA, 15 bp, Homo sapiens
tcttctgccaacacg

SEQ ID NO: 1086395 - DNA, 15 bp, Homo sapiens
ttcttctgccaacac

SEQ ID NO: 1086396 - DNA, 15 bp, Homo sapiens
tttcttctgccaaca

SEQ ID NO: 1086397 - DNA, 15 bp, Homo sapiens
gtttcttctgccaac

SEQ ID NO: 1086398 - DNA, 15 bp, Homo sapiens
agtttcttctgccaa

SEQ ID NO: 1086399 - DNA, 15 bp, Homo sapiens
cagtttcttctgcca

SEQ ID NO: 1086400 - DNA, 15 bp, Homo sapiens
ccagtttcttctgcc

SEQ ID NO: 1086401 - DNA, 15 bp, Homo sapiens
accagtttcttctgc

SEQ ID NO: 1086402 - DNA, 15 bp, Homo sapiens
caccagtttcttctg

SEQ ID NO: 1086403 - DNA, 15 bp, Homo sapiens
tcaccagtttcttct

SEQ ID NO: 1086404 - DNA, 15 bp, Homo sapiens
ttcaccagtttcttc

SEQ ID NO: 1086405 - DNA, 15 bp, Homo sapiens
cttcaccagtttctt

SEQ ID NO: 1086406 - DNA, 15 bp, Homo sapiens
gcttcaccagtttct

SEQ ID NO: 1086407 - DNA, 15 bp, Homo sapiens
ggcttcaccagtttc

SEQ ID NO: 1086408 - DNA, 15 bp, Homo sapiens
tggcttcaccagttt

SEQ ID NO: 1086409 - DNA, 15 bp, Homo sapiens
atggcttcaccagtt

SEQ ID NO: 1086410 - DNA, 15 bp, Homo sapiens
catggcttcaccagt

SEQ ID NO: 1086411 - DNA, 15 bp, Homo sapiens
acatggcttcaccag

SEQ ID NO: 1086412 - DNA, 15 bp, Homo sapiens
cacatggcttcacca

SEQ ID NO: 1086413 - DNA, 15 bp, Homo sapiens
tcacatggcttcacc

SEQ ID NO: 1086414 - DNA, 15 bp, Homo sapiens
ttcacatggcttcac

SEQ ID NO: 1086415 - DNA, 15 bp, Homo sapiens
cttcacatggcttca

SEQ ID NO: 1086416 - DNA, 15 bp, Homo sapiens
tcttcacatggcttc

SEQ ID NO: 1086417 - DNA, 15 bp, Homo sapiens
ctcttcacatggctt

SEQ ID NO: 1086418 - DNA, 15 bp, Homo sapiens
cctcttcacatggct

SEQ ID NO: 1086419 - DNA, 15 bp, Homo sapiens
gcctcttcacatggc

SEQ ID NO: 1086420 - DNA, 15 bp, Homo sapiens
ggcctcttcacatgg

SEQ ID NO: 1086421 - DNA, 15 bp, Homo sapiens
tggcctcttcacatg

SEQ ID NO: 1086422 - DNA, 15 bp, Homo sapiens
gtggcctcttcacat

SEQ ID NO: 1086423 - DNA, 15 bp, Homo sapiens
cgtggcctcttcaca

SEQ ID NO: 1086424 - DNA, 15 bp, Homo sapiens
acgtggcctcttcac

SEQ ID NO: 1086425 - DNA, 15 bp, Homo sapiens
cacgtggcctcttca

SEQ ID NO: 1086426 - DNA, 15 bp, Homo sapiens
ccacgtggcctcttc

SEQ ID NO: 1086427 - DNA, 15 bp, Homo sapiens
accacgtggcctctt

SEQ ID NO: 1086428 - DNA, 15 bp, Homo sapiens
gaccacgtggcctct

SEQ ID NO: 1086429 - DNA, 15 bp, Homo sapiens
ggaccacgtggcctc

SEQ ID NO: 1086430 - DNA, 15 bp, Homo sapiens
aggaccacgtggcct

SEQ ID NO: 1086431 - DNA, 15 bp, Homo sapiens
caggaccacgtggcc

SEQ ID NO: 1086432 - DNA, 15 bp, Homo sapiens
gcaggaccacgtggc

SEQ ID NO: 1086433 - DNA, 15 bp, Homo sapiens
ggcaggaccacgtgg

SEQ ID NO: 1086434 - DNA, 15 bp, Homo sapiens
aggcaggaccacgtg

SEQ ID NO: 1086435 - DNA, 15 bp, Homo sapiens
taggcaggaccacgt

SEQ ID NO: 1086436 - DNA, 15 bp, Homo sapiens
gtaggcaggaccacg

SEQ ID NO: 1086437 - DNA, 15 bp, Homo sapiens
ggtaggcaggaccac

SEQ ID NO: 1086438 - DNA, 15 bp, Homo sapiens
tggtaggcaggacca

SEQ ID NO: 1086439 - DNA, 15 bp, Homo sapiens
ttggtaggcaggacc

SEQ ID NO: 1086440 - DNA, 15 bp, Homo sapiens
cttggtaggcaggac

SEQ ID NO: 1086441 - DNA, 15 bp, Homo sapiens
tcttggtaggcagga

SEQ ID NO: 1086442 - DNA, 15 bp, Homo sapiens
atcttggtaggcagg

SEQ ID NO: 1086443 - DNA, 15 bp, Homo sapiens
catcttggtaggcag

SEQ ID NO: 1086444 - DNA, 15 bp, Homo sapiens
acatcttggtaggca

SEQ ID NO: 1086445 - DNA, 15 bp, Homo sapiens
tacatcttggtaggc

SEQ ID NO: 1086446 - DNA, 15 bp, Homo sapiens
ttacatcttggtagg

SEQ ID NO: 1086447 - DNA, 15 bp, Homo sapiens
tttacatcttggtag

SEQ ID NO: 1086448 - DNA, 15 bp, Homo sapiens
ttttacatcttggta

SEQ ID NO: 1086449 - DNA, 15 bp, Homo sapiens
attttacatcttggt

SEQ ID NO: 1086450 - DNA, 15 bp, Homo sapiens
cattttacatcttgg

SEQ ID NO: 1086451 - DNA, 15 bp, Homo sapiens
acattttacatcttg

SEQ ID NO: 1086452 - DNA, 15 bp, Homo sapiens
cacattttacatctt

SEQ ID NO: 1086453 - DNA, 15 bp, Homo sapiens
acacattttacatct

SEQ ID NO: 1086454 - DNA, 15 bp, Homo sapiens
tacacattttacatc

SEQ ID NO: 1086455 - DNA, 15 bp, Homo sapiens
gtacacattttacat

SEQ ID NO: 1086456 - DNA, 15 bp, Homo sapiens
tgtacacattttaca

SEQ ID NO: 1086457 - DNA, 15 bp, Homo sapiens
ctgtacacattttac

SEQ ID NO: 1086458 - DNA, 15 bp, Homo sapiens
gctgtacacatttta

SEQ ID NO: 1086459 - DNA, 15 bp, Homo sapiens
tgctgtacacatttt

SEQ ID NO: 1086460 - DNA, 15 bp, Homo sapiens
aatgctgtacacatt

SEQ ID NO: 1086461 - DNA, 15 bp, Homo sapiens
aaatgctgtacacat

SEQ ID NO: 1086462 - DNA, 15 bp, Homo sapiens
caaatgctgtacaca

SEQ ID NO: 1086463 - DNA, 15 bp, Homo sapiens
tcaaatgctgtacac

SEQ ID NO: 1086464 - DNA, 15 bp, Homo sapiens
ttcaaatgctgtaca

SEQ ID NO: 1086465 - DNA, 15 bp, Homo sapiens
gttcaaatgctgtac

SEQ ID NO: 1086466 - DNA, 15 bp, Homo sapiens
agttcaaatgctgta

SEQ ID NO: 1086467 - DNA, 15 bp, Homo sapiens
tagttcaaatgctgt

SEQ ID NO: 1086468 - DNA, 15 bp, Homo sapiens
ctagttcaaatgctg

SEQ ID NO: 1086469 - DNA, 15 bp, Homo sapiens
gctagttcaaatgct

SEQ ID NO: 1086470 - DNA, 15 bp, Homo sapiens
tgctagttcaaatgc

SEQ ID NO: 1086471 - DNA, 15 bp, Homo sapiens
ttgctagttcaaatg

SEQ ID NO: 1086472 - DNA, 15 bp, Homo sapiens
attgctagttcaaat

SEQ ID NO: 1086473 - DNA, 15 bp, Homo sapiens
aattgctagttcaaa

SEQ ID NO: 1086474 - DNA, 15 bp, Homo sapiens
gaattgctagttcaa

SEQ ID NO: 1086475 - DNA, 15 bp, Homo sapiens
tgaattgctagttca

SEQ ID NO: 1086476 - DNA, 15 bp, Homo sapiens
ctgaattgctagttc

SEQ ID NO: 1086477 - DNA, 15 bp, Homo sapiens
gctgaattgctagtt

SEQ ID NO: 1086478 - DNA, 15 bp, Homo sapiens
ggctgaattgctagt

SEQ ID NO: 1086479 - DNA, 15 bp, Homo sapiens
aggctgaattgctag

SEQ ID NO: 1086480 - DNA, 15 bp, Homo sapiens
gaggctgaattgcta

SEQ ID NO: 1086481 - DNA, 15 bp, Homo sapiens
ggaggctgaattgct

SEQ ID NO: 1086482 - DNA, 15 bp, Homo sapiens
tggaggctgaattgc

SEQ ID NO: 1086483 - DNA, 15 bp, Homo sapiens
ctggaggctgaattg

SEQ ID NO: 1086484 - DNA, 15 bp, Homo sapiens
cctggaggctgaatt

SEQ ID NO: 1086485 - DNA, 15 bp, Homo sapiens
tcctggaggctgaat

SEQ ID NO: 1086486 - DNA, 15 bp, Homo sapiens
ctcctggaggctgaa

SEQ ID NO: 1086487 - DNA, 15 bp, Homo sapiens
gctcctggaggctga

SEQ ID NO: 1086488 - DNA, 15 bp, Homo sapiens
ggctcctggaggctg

SEQ ID NO: 1086489 - DNA, 15 bp, Homo sapiens
tggctcctggaggct

SEQ ID NO: 1086490 - DNA, 15 bp, Homo sapiens
atggctcctggaggc

SEQ ID NO: 1086491 - DNA, 15 bp, Homo sapiens
gatggctcctggagg

SEQ ID NO: 1086492 - DNA, 15 bp, Homo sapiens
ggatggctcctggag

SEQ ID NO: 1086493 - DNA, 15 bp, Homo sapiens
tggatggctcctgga

SEQ ID NO: 1086494 - DNA, 15 bp, Homo sapiens
ctggatggctcctgg

SEQ ID NO: 1086495 - DNA, 15 bp, Homo sapiens
tctggatggctcctg

SEQ ID NO: 1086496 - DNA, 15 bp, Homo sapiens
ttctggatggctcct

SEQ ID NO: 1086497 - DNA, 15 bp, Homo sapiens
cttctggatggctcc

SEQ ID NO: 1086498 - DNA, 15 bp, Homo sapiens
tcttctggatggctc

SEQ ID NO: 1086499 - DNA, 15 bp, Homo sapiens
ttcttctggatggct

SEQ ID NO: 1086500 - DNA, 15 bp, Homo sapiens
tttcttctggatggc

SEQ ID NO: 1086501 - DNA, 15 bp, Homo sapiens
gtttcttctggatgg

SEQ ID NO: 1086502 - DNA, 15 bp, Homo sapiens
tgtttcttctggatg

SEQ ID NO: 1086503 - DNA, 15 bp, Homo sapiens
gtgtttcttctggat

SEQ ID NO: 1086504 - DNA, 15 bp, Homo sapiens
agtgtttcttctgga

SEQ ID NO: 1086505 - DNA, 15 bp, Homo sapiens
cagtgtttcttctgg

SEQ ID NO: 1086506 - DNA, 15 bp, Homo sapiens
tcagtgtttcttctg

SEQ ID NO: 1086507 - DNA, 15 bp, Homo sapiens
gtcagtgtttcttct

SEQ ID NO: 1086508 - DNA, 15 bp, Homo sapiens
tgtcagtgtttcttc

SEQ ID NO: 1086509 - DNA, 15 bp, Homo sapiens
gtgtcagtgtttctt

SEQ ID NO: 1086510 - DNA, 15 bp, Homo sapiens
tgtgtcagtgtttct

SEQ ID NO: 1086511 - DNA, 15 bp, Homo sapiens
gtgtgtcagtgtttc

SEQ ID NO: 1086512 - DNA, 15 bp, Homo sapiens
tgtgtgtcagtgttt

SEQ ID NO: 1086513 - DNA, 15 bp, Homo sapiens
gtgtgtgtcagtgtt

SEQ ID NO: 1086514 - DNA, 15 bp, Homo sapiens
agtgtgtgtcagtgt

SEQ ID NO: 1086515 - DNA, 15 bp, Homo sapiens
aagtgtgtgtcagtg

SEQ ID NO: 1086516 - DNA, 15 bp, Homo sapiens
taagtgtgtgtcagt

SEQ ID NO: 1086517 - DNA, 15 bp, Homo sapiens
ctaagtgtgtgtcag

SEQ ID NO: 1086518 - DNA, 15 bp, Homo sapiens
tctaagtgtgtgtca

SEQ ID NO: 1086519 - DNA, 15 bp, Homo sapiens
gtctaagtgtgtgtc

SEQ ID NO: 1086520 - DNA, 15 bp, Homo sapiens
agtctaagtgtgtgt

SEQ ID NO: 1086521 - DNA, 15 bp, Homo sapiens
gagtctaagtgtgtg

SEQ ID NO: 1086522 - DNA, 15 bp, Homo sapiens
ggagtctaagtgtgt

SEQ ID NO: 1086523 - DNA, 15 bp, Homo sapiens
cggagtctaagtgtg

SEQ ID NO: 1086524 - DNA, 15 bp, Homo sapiens
ccggagtctaagtgt

SEQ ID NO: 1086525 - DNA, 15 bp, Homo sapiens
accggagtctaagtg

SEQ ID NO: 1086526 - DNA, 15 bp, Homo sapiens
caccggagtctaagt

SEQ ID NO: 1086527 - DNA, 15 bp, Homo sapiens
tcaccggagtctaag

SEQ ID NO: 1086528 - DNA, 15 bp, Homo sapiens
ttcaccggagtctaa

SEQ ID NO: 1086529 - DNA, 15 bp, Homo sapiens
tttcaccggagtcta

SEQ ID NO: 1086530 - DNA, 15 bp, Homo sapiens
atttcaccggagtct

SEQ ID NO: 1086531 - DNA, 15 bp, Homo sapiens
aatttcaccggagtc

SEQ ID NO: 1086532 - DNA, 15 bp, Homo sapiens
gaatttcaccggagt

SEQ ID NO: 1086533 - DNA, 15 bp, Homo sapiens
tgaatttcaccggag

SEQ ID NO: 1086534 - DNA, 15 bp, Homo sapiens
ttgaatttcaccgga

SEQ ID NO: 1086535 - DNA, 15 bp, Homo sapiens
cttgaatttcaccgg

SEQ ID NO: 1086536 - DNA, 15 bp, Homo sapiens
ccttgaatttcaccg

SEQ ID NO: 1086537 - DNA, 15 bp, Homo sapiens
tccttgaatttcacc

SEQ ID NO: 1086538 - DNA, 15 bp, Homo sapiens
gtccttgaatttcac

SEQ ID NO: 1086539 - DNA, 15 bp, Homo sapiens
agtccttgaatttca

SEQ ID NO: 1086540 - DNA, 15 bp, Homo sapiens
aagtccttgaatttc

SEQ ID NO: 1086541 - DNA, 15 bp, Homo sapiens
gaagtccttgaattt

SEQ ID NO: 1086542 - DNA, 15 bp, Homo sapiens
agaagtccttgaatt

SEQ ID NO: 1086543 - DNA, 15 bp, Homo sapiens
cagaagtccttgaat

SEQ ID NO: 1086544 - DNA, 15 bp, Homo sapiens
gcagaagtccttgaa

SEQ ID NO: 1086545 - DNA, 15 bp, Homo sapiens
ggcagaagtccttga

SEQ ID NO: 1086546 - DNA, 15 bp, Homo sapiens
tggcagaagtccttg

SEQ ID NO: 1086547 - DNA, 15 bp, Homo sapiens
gtggcagaagtcctt

SEQ ID NO: 1086548 - DNA, 15 bp, Homo sapiens
tgtggcagaagtcct

SEQ ID NO: 1086549 - DNA, 15 bp, Homo sapiens
ctgtggcagaagtcc

SEQ ID NO: 1086550 - DNA, 15 bp, Homo sapiens
gctgtggcagaagtc

SEQ ID NO: 1086551 - DNA, 15 bp, Homo sapiens
ggctgtggcagaagt

SEQ ID NO: 1086552 - DNA, 15 bp, Homo sapiens
aggctgtggcagaag

SEQ ID NO: 1086553 - DNA, 15 bp, Homo sapiens
caggctgtggcagaa

SEQ ID NO: 1086554 - DNA, 15 bp, Homo sapiens
gcaggctgtggcaga

SEQ ID NO: 1086555 - DNA, 15 bp, Homo sapiens
agcaggctgtggcag

SEQ ID NO: 1086556 - DNA, 15 bp, Homo sapiens
aagcaggctgtggca

SEQ ID NO: 1086557 - DNA, 15 bp, Homo sapiens
gaagcaggctgtggc

SEQ ID NO: 1086558 - DNA, 15 bp, Homo sapiens
cgaagcaggctgtgg

SEQ ID NO: 1086559 - DNA, 15 bp, Homo sapiens
acgaagcaggctgtg

SEQ ID NO: 1086560 - DNA, 15 bp, Homo sapiens
tacgaagcaggctgt

SEQ ID NO: 1086561 - DNA, 15 bp, Homo sapiens
ttacgaagcaggctg

SEQ ID NO: 1086562 - DNA, 15 bp, Homo sapiens
attacgaagcaggct

SEQ ID NO: 1086563 - DNA, 15 bp, Homo sapiens
tattacgaagcaggc

SEQ ID NO: 1086564 - DNA, 15 bp, Homo sapiens
ctattacgaagcagg

SEQ ID NO: 1086565 - DNA, 15 bp, Homo sapiens
actattacgaagcag

SEQ ID NO: 1086566 - DNA, 15 bp, Homo sapiens
cactattacgaagca

SEQ ID NO: 1086567 - DNA, 15 bp, Homo sapiens
tcactattacgaagc

SEQ ID NO: 1086568 - DNA, 15 bp, Homo sapiens
ttcactattacgaag

SEQ ID NO: 1086569 - DNA, 15 bp, Homo sapiens
tttcactattacgaa

SEQ ID NO: 1086570 - DNA, 15 bp, Homo sapiens
ttttcactattacga

SEQ ID NO: 1086571 - DNA, 15 bp, Homo sapiens
attttcactattacg

SEQ ID NO: 1086572 - DNA, 15 bp, Homo sapiens
gattttcactattac

SEQ ID NO: 1086573 - DNA, 15 bp, Homo sapiens
agattttcactatta

SEQ ID NO: 1086574 - DNA, 15 bp, Homo sapiens
cagattttcactatt

SEQ ID NO: 1086575 - DNA, 15 bp, Homo sapiens
tcagattttcactat

SEQ ID NO: 1086576 - DNA, 15 bp, Homo sapiens
ttcagattttcacta

SEQ ID NO: 1086577 - DNA, 15 bp, Homo sapiens
tttcagattttcact

SEQ ID NO: 1086578 - DNA, 15 bp, Homo sapiens
gtttcagattttcac

SEQ ID NO: 1086579 - DNA, 15 bp, Homo sapiens
agtttcagattttca

SEQ ID NO: 1086580 - DNA, 15 bp, Homo sapiens
cagtttcagattttc

SEQ ID NO: 1086581 - DNA, 15 bp, Homo sapiens
gcagtttcagatttt

SEQ ID NO: 1086582 - DNA, 15 bp, Homo sapiens
ggcagtttcagattt

SEQ ID NO: 1086583 - DNA, 15 bp, Homo sapiens
aggcagtttcagatt

SEQ ID NO: 1086584 - DNA, 15 bp, Homo sapiens
gaggcagtttcagat

SEQ ID NO: 1086585 - DNA, 15 bp, Homo sapiens
tgaggcagtttcaga

SEQ ID NO: 1086586 - DNA, 15 bp, Homo sapiens
ttgaggcagtttcag

SEQ ID NO: 1086587 - DNA, 15 bp, Homo sapiens
attgaggcagtttca

SEQ ID NO: 1086588 - DNA, 15 bp, Homo sapiens
cattgaggcagtttc

SEQ ID NO: 1086589 - DNA, 15 bp, Homo sapiens
tcattgaggcagttt

SEQ ID NO: 1086590 - DNA, 15 bp, Homo sapiens
gtcattgaggcagtt

SEQ ID NO: 1086591 - DNA, 15 bp, Homo sapiens
ggtcattgaggcagt

SEQ ID NO: 1086592 - DNA, 15 bp, Homo sapiens
cggtcattgaggcag

SEQ ID NO: 1086593 - DNA, 15 bp, Homo sapiens
acggtcattgaggca

SEQ ID NO: 1086594 - DNA, 15 bp, Homo sapiens
gacggtcattgaggc

SEQ ID NO: 1086595 - DNA, 15 bp, Homo sapiens
tgacggtcattgagg

SEQ ID NO: 1086596 - DNA, 15 bp, Homo sapiens
ttgacggtcattgag

SEQ ID NO: 1086597 - DNA, 15 bp, Homo sapiens
attgacggtcattga

SEQ ID NO: 1086598 - DNA, 15 bp, Homo sapiens
tattgacggtcattg

SEQ ID NO: 1086599 - DNA, 15 bp, Homo sapiens
ctattgacggtcatt

SEQ ID NO: 1086600 - DNA, 15 bp, Homo sapiens
cctattgacggtcat

SEQ ID NO: 1086601 - DNA, 15 bp, Homo sapiens
tcctattgacggtca

SEQ ID NO: 1086602 - DNA, 15 bp, Homo sapiens
ttcctattgacggtc

SEQ ID NO: 1086603 - DNA, 15 bp, Homo sapiens
cttcctattgacggt

SEQ ID NO: 1086604 - DNA, 15 bp, Homo sapiens
acttcctattgacgg

SEQ ID NO: 1086605 - DNA, 15 bp, Homo sapiens
aacttcctattgacg

SEQ ID NO: 1086606 - DNA, 15 bp, Homo sapiens
caacttcctattgac

SEQ ID NO: 1086607 - DNA, 15 bp, Homo sapiens
tcaacttcctattga

SEQ ID NO: 1086608 - DNA, 15 bp, Homo sapiens
atcaacttcctattg

SEQ ID NO: 1086609 - DNA, 15 bp, Homo sapiens
aatcaacttcctatt

SEQ ID NO: 1086610 - DNA, 15 bp, Homo sapiens
aaatcaacttcctat

SEQ ID NO: 1086611 - DNA, 15 bp, Homo sapiens
aaaatcaacttccta

SEQ ID NO: 1086612 - DNA, 15 bp, Homo sapiens
taaaatcaacttcct

SEQ ID NO: 1086613 - DNA, 15 bp, Homo sapiens
ttaaaatcaacttcc

SEQ ID NO: 1086614 - DNA, 15 bp, Homo sapiens
tttaaaatcaacttc

SEQ ID NO: 1086615 - DNA, 15 bp, Homo sapiens
ctttaaaatcaactt

SEQ ID NO: 1086616 - DNA, 15 bp, Homo sapiens
actttaaaatcaact

SEQ ID NO: 1086617 - DNA, 15 bp, Homo sapiens
cactttaaaatcaac

SEQ ID NO: 1086618 - DNA, 15 bp, Homo sapiens
acactttaaaatcaa

SEQ ID NO: 1086619 - DNA, 15 bp, Homo sapiens
aacactttaaaatca

SEQ ID NO: 1086620 - DNA, 15 bp, Homo sapiens
taacactttaaaatc

SEQ ID NO: 1086621 - DNA, 15 bp, Homo sapiens
gtaacactttaaaat

SEQ ID NO: 1086622 - DNA, 15 bp, Homo sapiens
tgtaacactttaaaa

SEQ ID NO: 1086623 - DNA, 15 bp, Homo sapiens
ctgtaacactttaaa

SEQ ID NO: 1086624 - DNA, 15 bp, Homo sapiens
gctgtaacactttaa

SEQ ID NO: 1086625 - DNA, 15 bp, Homo sapiens
tgctgtaacacttta

SEQ ID NO: 1086626 - DNA, 15 bp, Homo sapiens
gtgctgtaacacttt

SEQ ID NO: 1086627 - DNA, 15 bp, Homo sapiens
tgtgctgtaacactt

SEQ ID NO: 1086628 - DNA, 15 bp, Homo sapiens
atgtgctgtaacact

SEQ ID NO: 1086629 - DNA, 15 bp, Homo sapiens
gatgtgctgtaacac

SEQ ID NO: 1086630 - DNA, 15 bp, Homo sapiens
agatgtgctgtaaca

SEQ ID NO: 1086631 - DNA, 15 bp, Homo sapiens
cagatgtgctgtaac

SEQ ID NO: 1086632 - DNA, 15 bp, Homo sapiens
acagatgtgctgtaa

SEQ ID NO: 1086633 - DNA, 15 bp, Homo sapiens
gacagatgtgctgta

SEQ ID NO: 1086634 - DNA, 15 bp, Homo sapiens
agacagatgtgctgt

SEQ ID NO: 1086635 - DNA, 15 bp, Homo sapiens
cagacagatgtgctg

SEQ ID NO: 1086636 - DNA, 15 bp, Homo sapiens
ccagacagatgtgct

SEQ ID NO: 1086637 - DNA, 15 bp, Homo sapiens
tccagacagatgtgc

SEQ ID NO: 1086638 - DNA, 15 bp, Homo sapiens
ctccagacagatgtg

SEQ ID NO: 1086639 - DNA, 15 bp, Homo sapiens
tctccagacagatgt

SEQ ID NO: 1086640 - DNA, 15 bp, Homo sapiens
ctctccagacagatg

SEQ ID NO: 1086641 - DNA, 15 bp, Homo sapiens
tctctccagacagat

SEQ ID NO: 1086642 - DNA, 15 bp, Homo sapiens
atctctccagacaga

SEQ ID NO: 1086643 - DNA, 15 bp, Homo sapiens
gatctctccagacag

SEQ ID NO: 1086644 - DNA, 15 bp, Homo sapiens
cgatctctccagaca

SEQ ID NO: 1086645 - DNA, 15 bp, Homo sapiens
gcgatctctccagac

SEQ ID NO: 1086646 - DNA, 15 bp, Homo sapiens
tgcgatctctccaga

SEQ ID NO: 1086647 - DNA, 15 bp, Homo sapiens
gtgcgatctctccag

SEQ ID NO: 1086648 - DNA, 15 bp, Homo sapiens
agtgcgatctctcca

SEQ ID NO: 1086649 - DNA, 15 bp, Homo sapiens
cagtgcgatctctcc

SEQ ID NO: 1086650 - DNA, 15 bp, Homo sapiens
ccagtgcgatctctc

SEQ ID NO: 1086651 - DNA, 15 bp, Homo sapiens
gccagtgcgatctct

SEQ ID NO: 1086652 - DNA, 15 bp, Homo sapiens
ggccagtgcgatctc

SEQ ID NO: 1086653 - DNA, 15 bp, Homo sapiens
tggccagtgcgatct

SEQ ID NO: 1086654 - DNA, 15 bp, Homo sapiens
gtggccagtgcgatc

SEQ ID NO: 1086655 - DNA, 15 bp, Homo sapiens
agtggccagtgcgat

SEQ ID NO: 1086656 - DNA, 15 bp, Homo sapiens
gagtggccagtgcga

SEQ ID NO: 1086657 - DNA, 15 bp, Homo sapiens
ggagtggccagtgcg

SEQ ID NO: 1086658 - DNA, 15 bp, Homo sapiens
aggagtggccagtgc

SEQ ID NO: 1086659 - DNA, 15 bp, Homo sapiens
gaggagtggccagtg

SEQ ID NO: 1086660 - DNA, 15 bp, Homo sapiens
ggaggagtggccagt

SEQ ID NO: 1086661 - DNA, 15 bp, Homo sapiens
aggaggagtggccag

SEQ ID NO: 1086662 - DNA, 15 bp, Homo sapiens
gaggaggagtggcca

SEQ ID NO: 1086663 - DNA, 15 bp, Homo sapiens
tgaggaggagtggcc

SEQ ID NO: 1086664 - DNA, 15 bp, Homo sapiens
gtgaggaggagtggc

SEQ ID NO: 1086665 - DNA, 15 bp, Homo sapiens
ggtgaggaggagtgg

SEQ ID NO: 1086666 - DNA, 15 bp, Homo sapiens
gggtgaggaggagtg

SEQ ID NO: 1086667 - DNA, 15 bp, Homo sapiens
ggggtgaggaggagt

SEQ ID NO: 1086668 - DNA, 15 bp, Homo sapiens
gggggtgaggaggag

SEQ ID NO: 1086669 - DNA, 15 bp, Homo sapiens
agggggtgaggagga

SEQ ID NO: 1086670 - DNA, 15 bp, Homo sapiens
gagggggtgaggagg

SEQ ID NO: 1086671 - DNA, 15 bp, Homo sapiens
agagggggtgaggag

SEQ ID NO: 1086672 - DNA, 15 bp, Homo sapiens
cagagggggtgagga

SEQ ID NO: 1086673 - DNA, 15 bp, Homo sapiens
gcagagggggtgagg

SEQ ID NO: 1086674 - DNA, 15 bp, Homo sapiens
agcagagggggtgag

SEQ ID NO: 1086675 - DNA, 15 bp, Homo sapiens
cagcagagggggtga

SEQ ID NO: 1086676 - DNA, 15 bp, Homo sapiens
ccagcagagggggtg

SEQ ID NO: 1086677 - DNA, 15 bp, Homo sapiens
tccagcagagggggt

SEQ ID NO: 1086678 - DNA, 15 bp, Homo sapiens
gtccagcagaggggg

SEQ ID NO: 1086679 - DNA, 15 bp, Homo sapiens
ggtccagcagagggg

SEQ ID NO: 1086680 - DNA, 15 bp, Homo sapiens
aggtccagcagaggg

SEQ ID NO: 1086681 - DNA, 15 bp, Homo sapiens
gaggtccagcagagg

SEQ ID NO: 1086682 - DNA, 15 bp, Homo sapiens
agaggtccagcagag

SEQ ID NO: 1086683 - DNA, 15 bp, Homo sapiens
cagaggtccagcaga

SEQ ID NO: 1086684 - DNA, 15 bp, Homo sapiens
tcagaggtccagcag

SEQ ID NO: 1086685 - DNA, 15 bp, Homo sapiens
ctcagaggtccagca

SEQ ID NO: 1086686 - DNA, 15 bp, Homo sapiens
gctcagaggtccagc

SEQ ID NO: 1086687 - DNA, 15 bp, Homo sapiens
cgctcagaggtccag

SEQ ID NO: 1086688 - DNA, 15 bp, Homo sapiens
acgctcagaggtcca

SEQ ID NO: 1086689 - DNA, 15 bp, Homo sapiens
tacgctcagaggtcc

SEQ ID NO: 1086690 - DNA, 15 bp, Homo sapiens
ctacgctcagaggtc

SEQ ID NO: 1086691 - DNA, 15 bp, Homo sapiens
cctacgctcagaggt

SEQ ID NO: 1086692 - DNA, 15 bp, Homo sapiens
acctacgctcagagg

SEQ ID NO: 1086693 - DNA, 15 bp, Homo sapiens
cacctacgctcagag

SEQ ID NO: 1086694 - DNA, 15 bp, Homo sapiens
ccacctacgctcaga

SEQ ID NO: 1086695 - DNA, 15 bp, Homo sapiens
gccacctacgctcag

SEQ ID NO: 1086696 - DNA, 15 bp, Homo sapiens
ggccacctacgctca

SEQ ID NO: 1086697 - DNA, 15 bp, Homo sapiens
aggccacctacgctc

SEQ ID NO: 1086698 - DNA, 15 bp, Homo sapiens
caggccacctacgct

SEQ ID NO: 1086699 - DNA, 15 bp, Homo sapiens
ccaggccacctacgc

SEQ ID NO: 1086700 - DNA, 15 bp, Homo sapiens
tccaggccacctacg

SEQ ID NO: 1086701 - DNA, 15 bp, Homo sapiens
ctccaggccacctac

SEQ ID NO: 1086702 - DNA, 15 bp, Homo sapiens
gctccaggccaccta

SEQ ID NO: 1086703 - DNA, 15 bp, Homo sapiens
agctccaggccacct

SEQ ID NO: 1086704 - DNA, 15 bp, Homo sapiens
cagctccaggccacc

SEQ ID NO: 1086705 - DNA, 15 bp, Homo sapiens
ccagctccaggccac

SEQ ID NO: 1086706 - DNA, 15 bp, Homo sapiens
cccagctccaggcca

SEQ ID NO: 1086707 - DNA, 15 bp, Homo sapiens
acccagctccaggcc

SEQ ID NO: 1086708 - DNA, 15 bp, Homo sapiens
gacccagctccaggc

SEQ ID NO: 1086709 - DNA, 15 bp, Homo sapiens
ggacccagctccagg

SEQ ID NO: 1086710 - DNA, 15 bp, Homo sapiens
aggacccagctccag

SEQ ID NO: 1086711 - DNA, 15 bp, Homo sapiens
caggacccagctcca

SEQ ID NO: 1086712 - DNA, 15 bp, Homo sapiens
tcaggacccagctcc

SEQ ID NO: 1086713 - DNA, 15 bp, Homo sapiens
ctcaggacccagctc

SEQ ID NO: 1086714 - DNA, 15 bp, Homo sapiens
gctcaggacccagct

SEQ ID NO: 1086715 - DNA, 15 bp, Homo sapiens
ggctcaggacccagc

SEQ ID NO: 1086716 - DNA, 15 bp, Homo sapiens
gggctcaggacccag

SEQ ID NO: 1086717 - DNA, 15 bp, Homo sapiens
agggctcaggaccca

SEQ ID NO: 1086718 - DNA, 15 bp, Homo sapiens
gagggctcaggaccc

SEQ ID NO: 1086719 - DNA, 15 bp, Homo sapiens
agagggctcaggacc

SEQ ID NO: 1086720 - DNA, 15 bp, Homo sapiens
aagagggctcaggac

SEQ ID NO: 1086721 - DNA, 15 bp, Homo sapiens
aaagagggctcagga

SEQ ID NO: 1086722 - DNA, 15 bp, Homo sapiens
caaagagggctcagg

SEQ ID NO: 1086723 - DNA, 15 bp, Homo sapiens
ccaaagagggctcag

SEQ ID NO: 1086724 - DNA, 15 bp, Homo sapiens
accaaagagggctca

SEQ ID NO: 1086725 - DNA, 15 bp, Homo sapiens
gaccaaagagggctc

SEQ ID NO: 1086726 - DNA, 15 bp, Homo sapiens
agaccaaagagggct

SEQ ID NO: 1086727 - DNA, 15 bp, Homo sapiens
tagaccaaagagggc

SEQ ID NO: 1086728 - DNA, 15 bp, Homo sapiens
atagaccaaagaggg

SEQ ID NO: 1086729 - DNA, 15 bp, Homo sapiens
tatagaccaaagagg

SEQ ID NO: 1086730 - DNA, 15 bp, Homo sapiens
gtatagaccaaagag

SEQ ID NO: 1086731 - DNA, 15 bp, Homo sapiens
ggtatagaccaaaga

SEQ ID NO: 1086732 - DNA, 15 bp, Homo sapiens
cggtatagaccaaag

SEQ ID NO: 1086733 - DNA, 15 bp, Homo sapiens
tcggtatagaccaaa

SEQ ID NO: 1086734 - DNA, 15 bp, Homo sapiens
gtcggtatagaccaa

SEQ ID NO: 1086735 - DNA, 15 bp, Homo sapiens
tgtcggtatagacca

SEQ ID NO: 1086736 - DNA, 15 bp, Homo sapiens
gtgtcggtatagacc

SEQ ID NO: 1086737 - DNA, 15 bp, Homo sapiens
agtgtcggtatagac

SEQ ID NO: 1086738 - DNA, 15 bp, Homo sapiens
tagtgtcggtataga

SEQ ID NO: 1086739 - DNA, 15 bp, Homo sapiens
gtagtgtcggtatag

SEQ ID NO: 1086740 - DNA, 15 bp, Homo sapiens
ggtagtgtcggtata

SEQ ID NO: 1086741 - DNA, 15 bp, Homo sapiens
gggtagtgtcggtat

SEQ ID NO: 1086742 - DNA, 15 bp, Homo sapiens
tgggtagtgtcggta

SEQ ID NO: 1086743 - DNA, 15 bp, Homo sapiens
ttgggtagtgtcggt

SEQ ID NO: 1086744 - DNA, 15 bp, Homo sapiens
attgggtagtgtcgg

SEQ ID NO: 1086745 - DNA, 15 bp, Homo sapiens
tattgggtagtgtcg

SEQ ID NO: 1086746 - DNA, 15 bp, Homo sapiens
atattgggtagtgtc

SEQ ID NO: 1086747 - DNA, 15 bp, Homo sapiens
catattgggtagtgt

SEQ ID NO: 1086748 - DNA, 15 bp, Homo sapiens
ccatattgggtagtg

SEQ ID NO: 1086749 - DNA, 15 bp, Homo sapiens
accatattgggtagt

SEQ ID NO: 1086750 - DNA, 15 bp, Homo sapiens
taccatattgggtag

SEQ ID NO: 1086751 - DNA, 15 bp, Homo sapiens
ctaccatattgggta

SEQ ID NO: 1086752 - DNA, 15 bp, Homo sapiens
gctaccatattgggt

SEQ ID NO: 1086753 - DNA, 15 bp, Homo sapiens
ggctaccatattggg

SEQ ID NO: 1086754 - DNA, 15 bp, Homo sapiens
tggctaccatattgg

SEQ ID NO: 1086755 - DNA, 15 bp, Homo sapiens
ggtggctaccatatt

SEQ ID NO: 1086756 - DNA, 15 bp, Homo sapiens
tggtggctaccatat

SEQ ID NO: 1086757 - DNA, 15 bp, Homo sapiens
ctggtggctaccata

SEQ ID NO: 1086758 - DNA, 15 bp, Homo sapiens
actggtggctaccat

SEQ ID NO: 1086759 - DNA, 15 bp, Homo sapiens
gactggtggctacca

SEQ ID NO: 1086760 - DNA, 15 bp, Homo sapiens
tgactggtggctacc

SEQ ID NO: 1086761 - DNA, 15 bp, Homo sapiens
gtgactggtggctac

SEQ ID NO: 1086762 - DNA, 15 bp, Homo sapiens
cgtgactggtggcta

SEQ ID NO: 1086763 - DNA, 15 bp, Homo sapiens
gcgtgactggtggct

SEQ ID NO: 1086764 - DNA, 15 bp, Homo sapiens
agcgtgactggtggc

SEQ ID NO: 1086765 - DNA, 15 bp, Homo sapiens
cagcgtgactggtgg

SEQ ID NO: 1086766 - DNA, 15 bp, Homo sapiens
ccagcgtgactggtg

SEQ ID NO: 1086767 - DNA, 15 bp, Homo sapiens
tccagcgtgactggt

SEQ ID NO: 1086768 - DNA, 15 bp, Homo sapiens
gtccagcgtgactgg

SEQ ID NO: 1086769 - DNA, 15 bp, Homo sapiens
tgtccagcgtgactg

SEQ ID NO: 1086770 - DNA, 15 bp, Homo sapiens
gtgtccagcgtgact

SEQ ID NO: 1086771 - DNA, 15 bp, Homo sapiens
agtgtccagcgtgac

SEQ ID NO: 1086772 - DNA, 15 bp, Homo sapiens
aagtgtccagcgtga

SEQ ID NO: 1086773 - DNA, 15 bp, Homo sapiens
caagtgtccagcgtg

SEQ ID NO: 1086774 - DNA, 15 bp, Homo sapiens
tcaagtgtccagcgt

SEQ ID NO: 1086775 - DNA, 15 bp, Homo sapiens
ttcaagtgtccagcg

SEQ ID NO: 1086776 - DNA, 15 bp, Homo sapiens
tttcaagtgtccagc

SEQ ID NO: 1086777 - DNA, 15 bp, Homo sapiens
ttttcaagtgtccag

SEQ ID NO: 1086778 - DNA, 15 bp, Homo sapiens
cttttcaagtgtcca

SEQ ID NO: 1086779 - DNA, 15 bp, Homo sapiens
acttttcaagtgtcc

SEQ ID NO: 1086780 - DNA, 15 bp, Homo sapiens
cacttttcaagtgtc

SEQ ID NO: 1086781 - DNA, 15 bp, Homo sapiens
ccacttttcaagtgt

SEQ ID NO: 1086782 - DNA, 15 bp, Homo sapiens
gccacttttcaagtg

SEQ ID NO: 1086783 - DNA, 15 bp, Homo sapiens
ggccacttttcaagt

SEQ ID NO: 1086784 - DNA, 15 bp, Homo sapiens
cggccacttttcaag

SEQ ID NO: 1086785 - DNA, 15 bp, Homo sapiens
tcggccacttttcaa

SEQ ID NO: 1086786 - DNA, 15 bp, Homo sapiens
atcggccacttttca

SEQ ID NO: 1086787 - DNA, 15 bp, Homo sapiens
gatcggccacttttc

SEQ ID NO: 1086788 - DNA, 15 bp, Homo sapiens
ggatcggccactttt

SEQ ID NO: 1086789 - DNA, 15 bp, Homo sapiens
aggatcggccacttt

SEQ ID NO: 1086790 - DNA, 15 bp, Homo sapiens
caggatcggccactt

SEQ ID NO: 1086791 - DNA, 15 bp, Homo sapiens
tcaggatcggccact

SEQ ID NO: 1086792 - DNA, 15 bp, Homo sapiens
gtcaggatcggccac

SEQ ID NO: 1086793 - DNA, 15 bp, Homo sapiens
agtcaggatcggcca

SEQ ID NO: 1086794 - DNA, 15 bp, Homo sapiens
cagtcaggatcggcc

SEQ ID NO: 1086795 - DNA, 15 bp, Homo sapiens
tcagtcaggatcggc

SEQ ID NO: 1086796 - DNA, 15 bp, Homo sapiens
ctcagtcaggatcgg

SEQ ID NO: 1086797 - DNA, 15 bp, Homo sapiens
tctcagtcaggatcg

SEQ ID NO: 1086798 - DNA, 15 bp, Homo sapiens
ttctcagtcaggatc

SEQ ID NO: 1086799 - DNA, 15 bp, Homo sapiens
cttctcagtcaggat

SEQ ID NO: 1086800 - DNA, 15 bp, Homo sapiens
ccttctcagtcagga

SEQ ID NO: 1086801 - DNA, 15 bp, Homo sapiens
cccttctcagtcagg

SEQ ID NO: 1086802 - DNA, 15 bp, Homo sapiens
gcccttctcagtcag

SEQ ID NO: 1086803 - DNA, 15 bp, Homo sapiens
ggcccttctcagtca

SEQ ID NO: 1086804 - DNA, 15 bp, Homo sapiens
tggcccttctcagtc

SEQ ID NO: 1086805 - DNA, 15 bp, Homo sapiens
gtggcccttctcagt

SEQ ID NO: 1086806 - DNA, 15 bp, Homo sapiens
cgtggcccttctcag

SEQ ID NO: 1086807 - DNA, 15 bp, Homo sapiens
tcgtggcccttctca

SEQ ID NO: 1086808 - DNA, 15 bp, Homo sapiens
ctcgtggcccttctc

SEQ ID NO: 1086809 - DNA, 15 bp, Homo sapiens
actcgtggcccttct

SEQ ID NO: 1086810 - DNA, 15 bp, Homo sapiens
cactcgtggcccttc

SEQ ID NO: 1086811 - DNA, 15 bp, Homo sapiens
ccactcgtggccctt

SEQ ID NO: 1086812 - DNA, 15 bp, Homo sapiens
cccactcgtggccct

SEQ ID NO: 1086813 - DNA, 15 bp, Homo sapiens
tcccactcgtggccc

SEQ ID NO: 1086814 - DNA, 15 bp, Homo sapiens
ttcccactcgtggcc

SEQ ID NO: 1086815 - DNA, 15 bp, Homo sapiens
tttcccactcgtggc

SEQ ID NO: 1086816 - DNA, 15 bp, Homo sapiens
ttttcccactcgtgg

SEQ ID NO: 1086817 - DNA, 15 bp, Homo sapiens
tttttcccactcgtg

SEQ ID NO: 1086818 - DNA, 15 bp, Homo sapiens
gtttttcccactcgt

SEQ ID NO: 1086819 - DNA, 15 bp, Homo sapiens
tgtttttcccactcg

SEQ ID NO: 1086820 - DNA, 15 bp, Homo sapiens
gtgtttttcccactc

SEQ ID NO: 1086821 - DNA, 15 bp, Homo sapiens
tgtgtttttcccact

SEQ ID NO: 1086822 - DNA, 15 bp, Homo sapiens
gtgtgtttttcccac

SEQ ID NO: 1086823 - DNA, 15 bp, Homo sapiens
ggtgtgtttttccca

SEQ ID NO: 1086824 - DNA, 15 bp, Homo sapiens
tggtgtgtttttccc

SEQ ID NO: 1086825 - DNA, 15 bp, Homo sapiens
ctggtgtgtttttcc

SEQ ID NO: 1086826 - DNA, 15 bp, Homo sapiens
tctggtgtgtttttc

SEQ ID NO: 1086827 - DNA, 15 bp, Homo sapiens
gtctggtgtgttttt

SEQ ID NO: 1086828 - DNA, 15 bp, Homo sapiens
ggtctggtgtgtttt

SEQ ID NO: 1086829 - DNA, 15 bp, Homo sapiens
aggtctggtgtgttt

SEQ ID NO: 1086830 - DNA, 15 bp, Homo sapiens
gaggtctggtgtgtt

SEQ ID NO: 1086831 - DNA, 15 bp, Homo sapiens
tgaggtctggtgtgt

SEQ ID NO: 1086832 - DNA, 15 bp, Homo sapiens
ctgaggtctggtgtg

SEQ ID NO: 1086833 - DNA, 15 bp, Homo sapiens
actgaggtctggtgt

SEQ ID NO: 1086834 - DNA, 15 bp, Homo sapiens
cactgaggtctggtg

SEQ ID NO: 1086835 - DNA, 15 bp, Homo sapiens
tcactgaggtctggt

SEQ ID NO: 1086836 - DNA, 15 bp, Homo sapiens
gtcactgaggtctgg

SEQ ID NO: 1086837 - DNA, 15 bp, Homo sapiens
agtcactgaggtctg

SEQ ID NO: 1086838 - DNA, 15 bp, Homo sapiens
aagtcactgaggtct

SEQ ID NO: 1086839 - DNA, 15 bp, Homo sapiens
taagtcactgaggtc

SEQ ID NO: 1086840 - DNA, 15 bp, Homo sapiens
ctaagtcactgaggt

SEQ ID NO: 1086841 - DNA, 15 bp, Homo sapiens
cctaagtcactgagg

SEQ ID NO: 1086842 - DNA, 15 bp, Homo sapiens
gcctaagtcactgag

SEQ ID NO: 1086843 - DNA, 15 bp, Homo sapiens
tgcctaagtcactga

SEQ ID NO: 1086844 - DNA, 15 bp, Homo sapiens
ctgcctaagtcactg

SEQ ID NO: 1086845 - DNA, 15 bp, Homo sapiens
tctgcctaagtcact

SEQ ID NO: 1086846 - DNA, 15 bp, Homo sapiens
ttctgcctaagtcac

SEQ ID NO: 1086847 - DNA, 15 bp, Homo sapiens
cttctgcctaagtca

SEQ ID NO: 1086848 - DNA, 15 bp, Homo sapiens
acttctgcctaagtc

SEQ ID NO: 1086849 - DNA, 15 bp, Homo sapiens
tacttctgcctaagt

SEQ ID NO: 1086850 - DNA, 15 bp, Homo sapiens
atacttctgcctaag

SEQ ID NO: 1086851 - DNA, 15 bp, Homo sapiens
catacttctgcctaa

SEQ ID NO: 1086852 - DNA, 15 bp, Homo sapiens
acatacttctgccta

SEQ ID NO: 1086853 - DNA, 15 bp, Homo sapiens
aacatacttctgcct

SEQ ID NO: 1086854 - DNA, 15 bp, Homo sapiens
aaacatacttctgcc

SEQ ID NO: 1086855 - DNA, 15 bp, Homo sapiens
aaaacatacttctgc

SEQ ID NO: 1086856 - DNA, 15 bp, Homo sapiens
caaaacatacttctg

SEQ ID NO: 1086857 - DNA, 15 bp, Homo sapiens
acaaaacatacttct

SEQ ID NO: 1086858 - DNA, 15 bp, Homo sapiens
aacaaaacatacttc

SEQ ID NO: 1086859 - DNA, 15 bp, Homo sapiens
gaacaaaacatactt

SEQ ID NO: 1086860 - DNA, 15 bp, Homo sapiens
ggaacaaaacatact

SEQ ID NO: 1086861 - DNA, 15 bp, Homo sapiens
tggaacaaaacatac

SEQ ID NO: 1086862 - DNA, 15 bp, Homo sapiens
ctggaacaaaacata

SEQ ID NO: 1086863 - DNA, 15 bp, Homo sapiens
tctggaacaaaacat

SEQ ID NO: 1086864 - DNA, 15 bp, Homo sapiens
gtctggaacaaaaca

SEQ ID NO: 1086865 - DNA, 15 bp, Homo sapiens
agtctggaacaaaac

SEQ ID NO: 1086866 - DNA, 15 bp, Homo sapiens
tagtctggaacaaaa

SEQ ID NO: 1086867 - DNA, 15 bp, Homo sapiens
atagtctggaacaaa

SEQ ID NO: 1086868 - DNA, 15 bp, Homo sapiens
aatagtctggaacaa

SEQ ID NO: 1086869 - DNA, 15 bp, Homo sapiens
caatagtctggaaca

SEQ ID NO: 1086870 - DNA, 15 bp, Homo sapiens
tcaatagtctggaac

SEQ ID NO: 1086871 - DNA, 15 bp, Homo sapiens
gtcaatagtctggaa

SEQ ID NO: 1086872 - DNA, 15 bp, Homo sapiens
agtcaatagtctgga

SEQ ID NO: 1086873 - DNA, 15 bp, Homo sapiens
cagtcaatagtctgg

SEQ ID NO: 1086874 - DNA, 15 bp, Homo sapiens
tcagtcaatagtctg

SEQ ID NO: 1086875 - DNA, 15 bp, Homo sapiens
ctcagtcaatagtct

SEQ ID NO: 1086876 - DNA, 15 bp, Homo sapiens
gctcagtcaatagtc

SEQ ID NO: 1086877 - DNA, 15 bp, Homo sapiens
ggctcagtcaatagt

SEQ ID NO: 1086878 - DNA, 15 bp, Homo sapiens
gggctcagtcaatag

SEQ ID NO: 1086879 - DNA, 15 bp, Homo sapiens
cgggctcagtcaata

SEQ ID NO: 1086880 - DNA, 15 bp, Homo sapiens
gcgggctcagtcaat

SEQ ID NO: 1086881 - DNA, 15 bp, Homo sapiens
tgcgggctcagtcaa

SEQ ID NO: 1086882 - DNA, 15 bp, Homo sapiens
ctgcgggctcagtca

SEQ ID NO: 1086883 - DNA, 15 bp, Homo sapiens
gctgcgggctcagtc

SEQ ID NO: 1086884 - DNA, 15 bp, Homo sapiens
agctgcgggctcagt

SEQ ID NO: 1086885 - DNA, 15 bp, Homo sapiens
cagctgcgggctcag

SEQ ID NO: 1086886 - DNA, 15 bp, Homo sapiens
tcagctgcgggctca

SEQ ID NO: 1086887 - DNA, 15 bp, Homo sapiens
ctcagctgcgggctc

SEQ ID NO: 1086888 - DNA, 15 bp, Homo sapiens
actcagctgcgggct

SEQ ID NO: 1086889 - DNA, 15 bp, Homo sapiens
aactcagctgcgggc

SEQ ID NO: 1086890 - DNA, 15 bp, Homo sapiens
caactcagctgcggg

SEQ ID NO: 1086891 - DNA, 15 bp, Homo sapiens
ccaactcagctgcgg

SEQ ID NO: 1086892 - DNA, 15 bp, Homo sapiens
gccaactcagctgcg

SEQ ID NO: 1086893 - DNA, 15 bp, Homo sapiens
agccaactcagctgc

SEQ ID NO: 1086894 - DNA, 15 bp, Homo sapiens
gagccaactcagctg

SEQ ID NO: 1086895 - DNA, 15 bp, Homo sapiens
ggagccaactcagct

SEQ ID NO: 1086896 - DNA, 15 bp, Homo sapiens
tggagccaactcagc

SEQ ID NO: 1086897 - DNA, 15 bp, Homo sapiens
ctggagccaactcag

SEQ ID NO: 1086898 - DNA, 15 bp, Homo sapiens
gctggagccaactca

SEQ ID NO: 1086899 - DNA, 15 bp, Homo sapiens
tgctggagccaactc

SEQ ID NO: 1086900 - DNA, 15 bp, Homo sapiens
gtgctggagccaact

SEQ ID NO: 1086901 - DNA, 15 bp, Homo sapiens
ggtgctggagccaac

SEQ ID NO: 1086902 - DNA, 15 bp, Homo sapiens
gggtgctggagccaa

SEQ ID NO: 1086903 - DNA, 15 bp, Homo sapiens
agggtgctggagcca

SEQ ID NO: 1086904 - DNA, 15 bp, Homo sapiens
cagggtgctggagcc

SEQ ID NO: 1086905 - DNA, 15 bp, Homo sapiens
ccagggtgctggagc

SEQ ID NO: 1086906 - DNA, 15 bp, Homo sapiens
gccagggtgctggag

SEQ ID NO: 1086907 - DNA, 15 bp, Homo sapiens
ggccagggtgctgga

SEQ ID NO: 1086908 - DNA, 15 bp, Homo sapiens
gggccagggtgctgg

SEQ ID NO: 1086909 - DNA, 15 bp, Homo sapiens
ggggccagggtgctg

SEQ ID NO: 1086910 - DNA, 15 bp, Homo sapiens
gggggccagggtgct

SEQ ID NO: 1086911 - DNA, 15 bp, Homo sapiens
agggggccagggtgc

SEQ ID NO: 1086912 - DNA, 15 bp, Homo sapiens
cagggggccagggtg

SEQ ID NO: 1086913 - DNA, 15 bp, Homo sapiens
gcagggggccagggt

SEQ ID NO: 1086914 - DNA, 15 bp, Homo sapiens
agcagggggccaggg

SEQ ID NO: 1086915 - DNA, 15 bp, Homo sapiens
gagcagggggccagg

SEQ ID NO: 1086916 - DNA, 15 bp, Homo sapiens
ggagcagggggccag

SEQ ID NO: 1086917 - DNA, 15 bp, Homo sapiens
tggagcagggggcca

SEQ ID NO: 1086918 - DNA, 15 bp, Homo sapiens
atggagcagggggcc

SEQ ID NO: 1086919 - DNA, 15 bp, Homo sapiens
gatggagcagggggc

SEQ ID NO: 1086920 - DNA, 15 bp, Homo sapiens
ggatggagcaggggg

SEQ ID NO: 1086921 - DNA, 15 bp, Homo sapiens
tggatggagcagggg

SEQ ID NO: 1086922 - DNA, 15 bp, Homo sapiens
gtggatggagcaggg

SEQ ID NO: 1086923 - DNA, 15 bp, Homo sapiens
agtggatggagcagg

SEQ ID NO: 1086924 - DNA, 15 bp, Homo sapiens
gagtggatggagcag

SEQ ID NO: 1086925 - DNA, 15 bp, Homo sapiens
tgagtggatggagca

SEQ ID NO: 1086926 - DNA, 15 bp, Homo sapiens
gtgagtggatggagc

SEQ ID NO: 1086927 - DNA, 15 bp, Homo sapiens
agtgagtggatggag

SEQ ID NO: 1086928 - DNA, 15 bp, Homo sapiens
cagtgagtggatgga

SEQ ID NO: 1086929 - DNA, 15 bp, Homo sapiens
ccagtgagtggatgg

SEQ ID NO: 1086930 - DNA, 15 bp, Homo sapiens
cccagtgagtggatg

SEQ ID NO: 1086931 - DNA, 15 bp, Homo sapiens
tcccagtgagtggat

SEQ ID NO: 1086932 - DNA, 15 bp, Homo sapiens
gtcccagtgagtgga

SEQ ID NO: 1086933 - DNA, 15 bp, Homo sapiens
agtcccagtgagtgg

SEQ ID NO: 1086934 - DNA, 15 bp, Homo sapiens
gagtcccagtgagtg

SEQ ID NO: 1086935 - DNA, 15 bp, Homo sapiens
ggagtcccagtgagt

SEQ ID NO: 1086936 - DNA, 15 bp, Homo sapiens
gggagtcccagtgag

SEQ ID NO: 1086937 - DNA, 15 bp, Homo sapiens
ggggagtcccagtga

SEQ ID NO: 1086938 - DNA, 15 bp, Homo sapiens
tggggagtcccagtg

SEQ ID NO: 1086939 - DNA, 15 bp, Homo sapiens
gtggggagtcccagt

SEQ ID NO: 1086940 - DNA, 15 bp, Homo sapiens
agtggggagtcccag

SEQ ID NO: 1086941 - DNA, 15 bp, Homo sapiens
cagtggggagtccca

SEQ ID NO: 1086942 - DNA, 15 bp, Homo sapiens
gcagtggggagtccc

SEQ ID NO: 1086943 - DNA, 15 bp, Homo sapiens
tgcagtggggagtcc

SEQ ID NO: 1086944 - DNA, 15 bp, Homo sapiens
gtgcagtggggagtc

SEQ ID NO: 1086945 - DNA, 15 bp, Homo sapiens
tgtgcagtggggagt

SEQ ID NO: 1086946 - DNA, 15 bp, Homo sapiens
ctgtgcagtggggag

SEQ ID NO: 1086947 - DNA, 15 bp, Homo sapiens
cctgtgcagtgggga

SEQ ID NO: 1086948 - DNA, 15 bp, Homo sapiens
ccctgtgcagtgggg

SEQ ID NO: 1086949 - DNA, 15 bp, Homo sapiens
gccctgtgcagtggg

SEQ ID NO: 1086950 - DNA, 15 bp, Homo sapiens
tgccctgtgcagtgg

SEQ ID NO: 1086951 - DNA, 15 bp, Homo sapiens
ttgccctgtgcagtg

SEQ ID NO: 1086952 - DNA, 15 bp, Homo sapiens
gttgccctgtgcagt

SEQ ID NO: 1086953 - DNA, 15 bp, Homo sapiens
ggttgccctgtgcag

SEQ ID NO: 1086954 - DNA, 15 bp, Homo sapiens
aggttgccctgtgca

SEQ ID NO: 1086955 - DNA, 15 bp, Homo sapiens
gaggttgccctgtgc

SEQ ID NO: 1086956 - DNA, 15 bp, Homo sapiens
agaggttgccctgtg

SEQ ID NO: 1086957 - DNA, 15 bp, Homo sapiens
gagaggttgccctgt

SEQ ID NO: 1086958 - DNA, 15 bp, Homo sapiens
ggagaggttgccctg

SEQ ID NO: 1086959 - DNA, 15 bp, Homo sapiens
tggagaggttgccct

SEQ ID NO: 1086960 - DNA, 15 bp, Homo sapiens
ctggagaggttgccc

SEQ ID NO: 1086961 - DNA, 15 bp, Homo sapiens
cctggagaggttgcc

SEQ ID NO: 1086962 - DNA, 15 bp, Homo sapiens
ccctggagaggttgc

SEQ ID NO: 1086963 - DNA, 15 bp, Homo sapiens
cccctggagaggttg

SEQ ID NO: 1086964 - DNA, 15 bp, Homo sapiens
gcccctggagaggtt

SEQ ID NO: 1086965 - DNA, 15 bp, Homo sapiens
tgcccctggagaggt

SEQ ID NO: 1086966 - DNA, 15 bp, Homo sapiens
gtgcccctggagagg

SEQ ID NO: 1086967 - DNA, 15 bp, Homo sapiens
agtgcccctggagag

SEQ ID NO: 1086968 - DNA, 15 bp, Homo sapiens
aagtgcccctggaga

SEQ ID NO: 1086969 - DNA, 15 bp, Homo sapiens
caagtgcccctggag

SEQ ID NO: 1086970 - DNA, 15 bp, Homo sapiens
ccaagtgcccctgga

SEQ ID NO: 1086971 - DNA, 15 bp, Homo sapiens
cccaagtgcccctgg

SEQ ID NO: 1086972 - DNA, 15 bp, Homo sapiens
gcccaagtgcccctg

SEQ ID NO: 1086973 - DNA, 15 bp, Homo sapiens
agcccaagtgcccct

SEQ ID NO: 1086974 - DNA, 15 bp, Homo sapiens
cagcccaagtgcccc

SEQ ID NO: 1086975 - DNA, 15 bp, Homo sapiens
gcagcccaagtgccc

SEQ ID NO: 1086976 - DNA, 15 bp, Homo sapiens
cgcagcccaagtgcc

SEQ ID NO: 1086977 - DNA, 15 bp, Homo sapiens
tcgcagcccaagtgc

SEQ ID NO: 1086978 - DNA, 15 bp, Homo sapiens
ttcgcagcccaagtg

SEQ ID NO: 1086979 - DNA, 15 bp, Homo sapiens
cttcgcagcccaagt

SEQ ID NO: 1086980 - DNA, 15 bp, Homo sapiens
ccttcgcagcccaag

SEQ ID NO: 1086981 - DNA, 15 bp, Homo sapiens
cccttcgcagcccaa

SEQ ID NO: 1086982 - DNA, 15 bp, Homo sapiens
ccccttcgcagccca

SEQ ID NO: 1086983 - DNA, 15 bp, Homo sapiens
tccccttcgcagccc

SEQ ID NO: 1086984 - DNA, 15 bp, Homo sapiens
ctccccttcgcagcc

SEQ ID NO: 1086985 - DNA, 15 bp, Homo sapiens
tctccccttcgcagc

SEQ ID NO: 1086986 - DNA, 15 bp, Homo sapiens
ctctccccttcgcag

SEQ ID NO: 1086987 - DNA, 15 bp, Homo sapiens
actctccccttcgca

SEQ ID NO: 1086988 - DNA, 15 bp, Homo sapiens
cactctccccttcgc

SEQ ID NO: 1086989 - DNA, 15 bp, Homo sapiens
ccactctccccttcg

SEQ ID NO: 1086990 - DNA, 15 bp, Homo sapiens
cccactctccccttc

SEQ ID NO: 1086991 - DNA, 15 bp, Homo sapiens
acccactctcccctt

SEQ ID NO: 1086992 - DNA, 15 bp, Homo sapiens
cacccactctcccct

SEQ ID NO: 1086993 - DNA, 15 bp, Homo sapiens
ccacccactctcccc

SEQ ID NO: 1086994 - DNA, 15 bp, Homo sapiens
gccacccactctccc

SEQ ID NO: 1086995 - DNA, 15 bp, Homo sapiens
tgccacccactctcc

SEQ ID NO: 1086996 - DNA, 15 bp, Homo sapiens
atgccacccactctc

SEQ ID NO: 1086997 - DNA, 15 bp, Homo sapiens
gatgccacccactct

SEQ ID NO: 1086998 - DNA, 15 bp, Homo sapiens
ggatgccacccactc

SEQ ID NO: 1086999 - DNA, 15 bp, Homo sapiens
gggatgccacccact

SEQ ID NO: 1087000 - DNA, 15 bp, Homo sapiens
tgggatgccacccac

SEQ ID NO: 1087001 - DNA, 15 bp, Homo sapiens
ctgggatgccaccca

SEQ ID NO: 1087002 - DNA, 15 bp, Homo sapiens
cctgggatgccaccc

SEQ ID NO: 1087003 - DNA, 15 bp, Homo sapiens
gcctgggatgccacc

SEQ ID NO: 1087004 - DNA, 15 bp, Homo sapiens
agcctgggatgccac

SEQ ID NO: 1087005 - DNA, 15 bp, Homo sapiens
cagcctgggatgcca

SEQ ID NO: 1087006 - DNA, 15 bp, Homo sapiens
tcagcctgggatgcc

SEQ ID NO: 1087007 - DNA, 15 bp, Homo sapiens
ttcagcctgggatgc

SEQ ID NO: 1087008 - DNA, 15 bp, Homo sapiens
cttcagcctgggatg

SEQ ID NO: 1087009 - DNA, 15 bp, Homo sapiens
gcttcagcctgggat

SEQ ID NO: 1087010 - DNA, 15 bp, Homo sapiens
agcttcagcctggga

SEQ ID NO: 1087011 - DNA, 15 bp, Homo sapiens
aagcttcagcctggg

SEQ ID NO: 1087012 - DNA, 15 bp, Homo sapiens
gaagcttcagcctgg

SEQ ID NO: 1087013 - DNA, 15 bp, Homo sapiens
ggaagcttcagcctg

SEQ ID NO: 1087014 - DNA, 15 bp, Homo sapiens
aggaagcttcagcct

SEQ ID NO: 1087015 - DNA, 15 bp, Homo sapiens
caggaagcttcagcc

SEQ ID NO: 1087016 - DNA, 15 bp, Homo sapiens
tcaggaagcttcagc

SEQ ID NO: 1087017 - DNA, 15 bp, Homo sapiens
ctcaggaagcttcag

SEQ ID NO: 1087018 - DNA, 15 bp, Homo sapiens
gctcaggaagcttca

SEQ ID NO: 1087019 - DNA, 15 bp, Homo sapiens
tgctcaggaagcttc

SEQ ID NO: 1087020 - DNA, 15 bp, Homo sapiens
ctgctcaggaagctt

SEQ ID NO: 1087021 - DNA, 15 bp, Homo sapiens
cctgctcaggaagct

SEQ ID NO: 1087022 - DNA, 15 bp, Homo sapiens
ccctgctcaggaagc

SEQ ID NO: 1087023 - DNA, 15 bp, Homo sapiens
gccctgctcaggaag

SEQ ID NO: 1087024 - DNA, 15 bp, Homo sapiens
ggccctgctcaggaa

SEQ ID NO: 1087025 - DNA, 15 bp, Homo sapiens
tggccctgctcagga

SEQ ID NO: 1087026 - DNA, 15 bp, Homo sapiens
ctggccctgctcagg

SEQ ID NO: 1087027 - DNA, 15 bp, Homo sapiens
tctggccctgctcag

SEQ ID NO: 1087028 - DNA, 15 bp, Homo sapiens
ctctggccctgctca

SEQ ID NO: 1087029 - DNA, 15 bp, Homo sapiens
cctctggccctgctc

SEQ ID NO: 1087030 - DNA, 15 bp, Homo sapiens
tcctctggccctgct

SEQ ID NO: 1087031 - DNA, 15 bp, Homo sapiens
ctcctctggccctgc

SEQ ID NO: 1087032 - DNA, 15 bp, Homo sapiens
cctcctctggccctg

SEQ ID NO: 1087033 - DNA, 15 bp, Homo sapiens
tcctcctctggccct

SEQ ID NO: 1087034 - DNA, 15 bp, Homo sapiens
ctcctcctctggccc

SEQ ID NO: 1087035 - DNA, 15 bp, Homo sapiens
gctcctcctctggcc

SEQ ID NO: 1087036 - DNA, 15 bp, Homo sapiens
ggctcctcctctggc

SEQ ID NO: 1087037 - DNA, 15 bp, Homo sapiens
tggctcctcctctgg

SEQ ID NO: 1087038 - DNA, 15 bp, Homo sapiens
ctggctcctcctctg

SEQ ID NO: 1087039 - DNA, 15 bp, Homo sapiens
actggctcctcctct

SEQ ID NO: 1087040 - DNA, 15 bp, Homo sapiens
gactggctcctcctc

SEQ ID NO: 1087041 - DNA, 15 bp, Homo sapiens
ggactggctcctcct

SEQ ID NO: 1087042 - DNA, 15 bp, Homo sapiens
gggactggctcctcc

SEQ ID NO: 1087043 - DNA, 15 bp, Homo sapiens
agggactggctcctc

SEQ ID NO: 1087044 - DNA, 15 bp, Homo sapiens
cagggactggctcct

SEQ ID NO: 1087045 - DNA, 15 bp, Homo sapiens
acagggactggctcc

SEQ ID NO: 1087046 - DNA, 15 bp, Homo sapiens
cacagggactggctc

SEQ ID NO: 1087047 - DNA, 15 bp, Homo sapiens
ccacagggactggct

SEQ ID NO: 1087048 - DNA, 15 bp, Homo sapiens
cccacagggactggc

SEQ ID NO: 1087049 - DNA, 15 bp, Homo sapiens
gcccacagggactgg

SEQ ID NO: 1087050 - DNA, 15 bp, Homo sapiens
ggcccacagggactg

SEQ ID NO: 1087051 - DNA, 15 bp, Homo sapiens
aggcccacagggact

SEQ ID NO: 1087052 - DNA, 15 bp, Homo sapiens
gaggcccacagggac

SEQ ID NO: 1087053 - DNA, 15 bp, Homo sapiens
agaggcccacaggga

SEQ ID NO: 1087054 - DNA, 15 bp, Homo sapiens
cagaggcccacaggg

SEQ ID NO: 1087055 - DNA, 15 bp, Homo sapiens
acagaggcccacagg

SEQ ID NO: 1087056 - DNA, 15 bp, Homo sapiens
aacagaggcccacag

SEQ ID NO: 1087057 - DNA, 15 bp, Homo sapiens
gaacagaggcccaca

SEQ ID NO: 1087058 - DNA, 15 bp, Homo sapiens
agaacagaggcccac

SEQ ID NO: 1087059 - DNA, 15 bp, Homo sapiens
cagaacagaggccca

SEQ ID NO: 1087060 - DNA, 15 bp, Homo sapiens
tcagaacagaggccc

SEQ ID NO: 1087061 - DNA, 15 bp, Homo sapiens
gtcagaacagaggcc

SEQ ID NO: 1087062 - DNA, 15 bp, Homo sapiens
tgtcagaacagaggc

SEQ ID NO: 1087063 - DNA, 15 bp, Homo sapiens
ctgtcagaacagagg

SEQ ID NO: 1087064 - DNA, 15 bp, Homo sapiens
actgtcagaacagag

SEQ ID NO: 1087065 - DNA, 15 bp, Homo sapiens
cactgtcagaacaga

SEQ ID NO: 1087066 - DNA, 15 bp, Homo sapiens
acactgtcagaacag

SEQ ID NO: 1087067 - DNA, 15 bp, Homo sapiens
gacactgtcagaaca

SEQ ID NO: 1087068 - DNA, 15 bp, Homo sapiens
tgacactgtcagaac

SEQ ID NO: 1087069 - DNA, 15 bp, Homo sapiens
ttgacactgtcagaa

SEQ ID NO: 1087070 - DNA, 15 bp, Homo sapiens
gttgacactgtcaga

SEQ ID NO: 1087071 - DNA, 15 bp, Homo sapiens
ggttgacactgtcag

SEQ ID NO: 1087072 - DNA, 15 bp, Homo sapiens
aggttgacactgtca

SEQ ID NO: 1087073 - DNA, 15 bp, Homo sapiens
gaggttgacactgtc

SEQ ID NO: 1087074 - DNA, 15 bp, Homo sapiens
tgaggttgacactgt

SEQ ID NO: 1087075 - DNA, 15 bp, Homo sapiens
ctgaggttgacactg

SEQ ID NO: 1087076 - DNA, 15 bp, Homo sapiens
gctgaggttgacact

SEQ ID NO: 1087077 - DNA, 15 bp, Homo sapiens
ggctgaggttgacac

SEQ ID NO: 1087078 - DNA, 15 bp, Homo sapiens
tggctgaggttgaca

SEQ ID NO: 1087079 - DNA, 15 bp, Homo sapiens
ctggctgaggttgac

SEQ ID NO: 1087080 - DNA, 15 bp, Homo sapiens
cctggctgaggttga

SEQ ID NO: 1087081 - DNA, 15 bp, Homo sapiens
gcctggctgaggttg

SEQ ID NO: 1087082 - DNA, 15 bp, Homo sapiens
agcctggctgaggtt

SEQ ID NO: 1087083 - DNA, 15 bp, Homo sapiens
aagcctggctgaggt

SEQ ID NO: 1087084 - DNA, 15 bp, Homo sapiens
caagcctggctgagg

SEQ ID NO: 1087085 - DNA, 15 bp, Homo sapiens
acaagcctggctgag

SEQ ID NO: 1087086 - DNA, 15 bp, Homo sapiens
cacaagcctggctga

SEQ ID NO: 1087087 - DNA, 15 bp, Homo sapiens
acacaagcctggctg

SEQ ID NO: 1087088 - DNA, 15 bp, Homo sapiens
cacacaagcctggct

SEQ ID NO: 1087089 - DNA, 15 bp, Homo sapiens
ccacacaagcctggc

SEQ ID NO: 1087090 - DNA, 15 bp, Homo sapiens
cccacacaagcctgg

SEQ ID NO: 1087091 - DNA, 15 bp, Homo sapiens
gcccacacaagcctg

SEQ ID NO: 1087092 - DNA, 15 bp, Homo sapiens
ggcccacacaagcct

SEQ ID NO: 1087093 - DNA, 15 bp, Homo sapiens
tggcccacacaagcc

SEQ ID NO: 1087094 - DNA, 15 bp, Homo sapiens
ctggcccacacaagc

SEQ ID NO: 1087095 - DNA, 15 bp, Homo sapiens
cctggcccacacaag

SEQ ID NO: 1087096 - DNA, 15 bp, Homo sapiens
acctggcccacacaa

SEQ ID NO: 1087097 - DNA, 15 bp, Homo sapiens
cacctggcccacaca

SEQ ID NO: 1087098 - DNA, 15 bp, Homo sapiens
acacctggcccacac

SEQ ID NO: 1087099 - DNA, 15 bp, Homo sapiens
tacacctggcccaca

SEQ ID NO: 1087100 - DNA, 15 bp, Homo sapiens
gtacacctggcccac

SEQ ID NO: 1087101 - DNA, 15 bp, Homo sapiens
agtacacctggccca

SEQ ID NO: 1087102 - DNA, 15 bp, Homo sapiens
cagtacacctggccc

SEQ ID NO: 1087103 - DNA, 15 bp, Homo sapiens
acagtacacctggcc

SEQ ID NO: 1087104 - DNA, 15 bp, Homo sapiens
aacagtacacctggc

SEQ ID NO: 1087105 - DNA, 15 bp, Homo sapiens
gaacagtacacctgg

SEQ ID NO: 1087106 - DNA, 15 bp, Homo sapiens
agaacagtacacctg

SEQ ID NO: 1087107 - DNA, 15 bp, Homo sapiens
cagaacagtacacct

SEQ ID NO: 1087108 - DNA, 15 bp, Homo sapiens
ccagaacagtacacc

SEQ ID NO: 1087109 - DNA, 15 bp, Homo sapiens
accagaacagtacac

SEQ ID NO: 1087110 - DNA, 15 bp, Homo sapiens
aaccagaacagtaca

SEQ ID NO: 1087111 - DNA, 15 bp, Homo sapiens
gaaccagaacagtac

SEQ ID NO: 1087112 - DNA, 15 bp, Homo sapiens
tgaaccagaacagta

SEQ ID NO: 1087113 - DNA, 15 bp, Homo sapiens
ctgaaccagaacagt

SEQ ID NO: 1087114 - DNA, 15 bp, Homo sapiens
tctgaaccagaacag

SEQ ID NO: 1087115 - DNA, 15 bp, Homo sapiens
atctgaaccagaaca

SEQ ID NO: 1087116 - DNA, 15 bp, Homo sapiens
aatctgaaccagaac

SEQ ID NO: 1087117 - DNA, 15 bp, Homo sapiens
aaatctgaaccagaa

SEQ ID NO: 1087118 - DNA, 15 bp, Homo sapiens
gaaatctgaaccaga

SEQ ID NO: 1087119 - DNA, 15 bp, Homo sapiens
tgaaatctgaaccag

SEQ ID NO: 1087120 - DNA, 15 bp, Homo sapiens
ttgaaatctgaacca

SEQ ID NO: 1087121 - DNA, 15 bp, Homo sapiens
cttgaaatctgaacc

SEQ ID NO: 1087122 - DNA, 15 bp, Homo sapiens
ccttgaaatctgaac

SEQ ID NO: 1087123 - DNA, 15 bp, Homo sapiens
tccttgaaatctgaa

SEQ ID NO: 1087124 - DNA, 15 bp, Homo sapiens
ctccttgaaatctga

SEQ ID NO: 1087125 - DNA, 15 bp, Homo sapiens
tctccttgaaatctg

SEQ ID NO: 1087126 - DNA, 15 bp, Homo sapiens
atctccttgaaatct

SEQ ID NO: 1087127 - DNA, 15 bp, Homo sapiens
tatctccttgaaatc

SEQ ID NO: 1087128 - DNA, 15 bp, Homo sapiens
ctatctccttgaaat

SEQ ID NO: 1087129 - DNA, 15 bp, Homo sapiens
actatctccttgaaa

SEQ ID NO: 1087130 - DNA, 15 bp, Homo sapiens
gactatctccttgaa

SEQ ID NO: 1087131 - DNA, 15 bp, Homo sapiens
tgactatctccttga

SEQ ID NO: 1087132 - DNA, 15 bp, Homo sapiens
ctgactatctccttg

SEQ ID NO: 1087133 - DNA, 15 bp, Homo sapiens
cctgactatctcctt

SEQ ID NO: 1087134 - DNA, 15 bp, Homo sapiens
ccctgactatctcct

SEQ ID NO: 1087135 - DNA, 15 bp, Homo sapiens
gccctgactatctcc

SEQ ID NO: 1087136 - DNA, 15 bp, Homo sapiens
tgccctgactatctc

SEQ ID NO: 1087137 - DNA, 15 bp, Homo sapiens
ctgccctgactatct

SEQ ID NO: 1087138 - DNA, 15 bp, Homo sapiens
cctgccctgactatc

SEQ ID NO: 1087139 - DNA, 15 bp, Homo sapiens
gcctgccctgactat

SEQ ID NO: 1087140 - DNA, 15 bp, Homo sapiens
ggcctgccctgacta

SEQ ID NO: 1087141 - DNA, 15 bp, Homo sapiens
cggcctgccctgact

SEQ ID NO: 1087142 - DNA, 15 bp, Homo sapiens
gcggcctgccctgac

SEQ ID NO: 1087143 - DNA, 15 bp, Homo sapiens
cgcggcctgccctga

SEQ ID NO: 1087144 - DNA, 15 bp, Homo sapiens
gcgcggcctgccctg

SEQ ID NO: 1087145 - DNA, 15 bp, Homo sapiens
ggcgcggcctgccct

SEQ ID NO: 1087146 - DNA, 15 bp, Homo sapiens
tggcgcggcctgccc

SEQ ID NO: 1087147 - DNA, 15 bp, Homo sapiens
ttggcgcggcctgcc

SEQ ID NO: 1087148 - DNA, 15 bp, Homo sapiens
tttggcgcggcctgc

SEQ ID NO: 1087149 - DNA, 15 bp, Homo sapiens
ctttggcgcggcctg

SEQ ID NO: 1087150 - DNA, 15 bp, Homo sapiens
gctttggcgcggcct

SEQ ID NO: 1087151 - DNA, 15 bp, Homo sapiens
ggctttggcgcggcc

SEQ ID NO: 1087152 - DNA, 15 bp, Homo sapiens
gggctttggcgcggc

SEQ ID NO: 1087153 - DNA, 15 bp, Homo sapiens
agggctttggcgcgg

SEQ ID NO: 1087154 - DNA, 15 bp, Homo sapiens
gagggctttggcgcg

SEQ ID NO: 1087155 - DNA, 15 bp, Homo sapiens
ggagggctttggcgc

SEQ ID NO: 1087156 - DNA, 15 bp, Homo sapiens
cggagggctttggcg

SEQ ID NO: 1087157 - DNA, 15 bp, Homo sapiens
tcggagggctttggc

SEQ ID NO: 1087158 - DNA, 15 bp, Homo sapiens
atcggagggctttgg

SEQ ID NO: 1087159 - DNA, 15 bp, Homo sapiens
catcggagggctttg

SEQ ID NO: 1087160 - DNA, 15 bp, Homo sapiens
ccatcggagggcttt

SEQ ID NO: 1087161 - DNA, 15 bp, Homo sapiens
cccatcggagggctt

SEQ ID NO: 1087162 - DNA, 15 bp, Homo sapiens
gcccatcggagggct

SEQ ID NO: 1087163 - DNA, 15 bp, Homo sapiens
agcccatcggagggc

SEQ ID NO: 1087164 - DNA, 15 bp, Homo sapiens
gagcccatcggaggg

SEQ ID NO: 1087165 - DNA, 15 bp, Homo sapiens
ggagcccatcggagg

SEQ ID NO: 1087166 - DNA, 15 bp, Homo sapiens
gggagcccatcggag

SEQ ID NO: 1087167 - DNA, 15 bp, Homo sapiens
ggggagcccatcgga

SEQ ID NO: 1087168 - DNA, 15 bp, Homo sapiens
aggggagcccatcgg

SEQ ID NO: 1087169 - DNA, 15 bp, Homo sapiens
taggggagcccatcg

SEQ ID NO: 1087170 - DNA, 15 bp, Homo sapiens
gtaggggagcccatc

SEQ ID NO: 1087171 - DNA, 15 bp, Homo sapiens
agtaggggagcccat

SEQ ID NO: 1087172 - DNA, 15 bp, Homo sapiens
cagtaggggagccca

SEQ ID NO: 1087173 - DNA, 15 bp, Homo sapiens
gcagtaggggagccc

SEQ ID NO: 1087174 - DNA, 15 bp, Homo sapiens
ggcagtaggggagcc

SEQ ID NO: 1087175 - DNA, 15 bp, Homo sapiens
aggcagtaggggagc

SEQ ID NO: 1087176 - DNA, 15 bp, Homo sapiens
caggcagtaggggag

SEQ ID NO: 1087177 - DNA, 15 bp, Homo sapiens
ccaggcagtagggga

SEQ ID NO: 1087178 - DNA, 15 bp, Homo sapiens
gccaggcagtagggg

SEQ ID NO: 1087179 - DNA, 15 bp, Homo sapiens
tgccaggcagtaggg

SEQ ID NO: 1087180 - DNA, 15 bp, Homo sapiens
ctgccaggcagtagg

SEQ ID NO: 1087181 - DNA, 15 bp, Homo sapiens
tctgccaggcagtag

SEQ ID NO: 1087182 - DNA, 15 bp, Homo sapiens
gtctgccaggcagta

SEQ ID NO: 1087183 - DNA, 15 bp, Homo sapiens
ggtctgccaggcagt

SEQ ID NO: 1087184 - DNA, 15 bp, Homo sapiens
aggtctgccaggcag

SEQ ID NO: 1087185 - DNA, 15 bp, Homo sapiens
caggtctgccaggca

SEQ ID NO: 1087186 - DNA, 15 bp, Homo sapiens
acaggtctgccaggc

SEQ ID NO: 1087187 - DNA, 15 bp, Homo sapiens
gacaggtctgccagg

SEQ ID NO: 1087188 - DNA, 15 bp, Homo sapiens
ggacaggtctgccag

SEQ ID NO: 1087189 - DNA, 15 bp, Homo sapiens
tggacaggtctgcca

SEQ ID NO: 1087190 - DNA, 15 bp, Homo sapiens
ctggacaggtctgcc

SEQ ID NO: 1087191 - DNA, 15 bp, Homo sapiens
gctggacaggtctgc

SEQ ID NO: 1087192 - DNA, 15 bp, Homo sapiens
agctggacaggtctg

SEQ ID NO: 1087193 - DNA, 15 bp, Homo sapiens
aagctggacaggtct

SEQ ID NO: 1087194 - DNA, 15 bp, Homo sapiens
aaagctggacaggtc

SEQ ID NO: 1087195 - DNA, 15 bp, Homo sapiens
caaagctggacaggt

SEQ ID NO: 1087196 - DNA, 15 bp, Homo sapiens
ccaaagctggacagg

SEQ ID NO: 1087197 - DNA, 15 bp, Homo sapiens
tccaaagctggacag

SEQ ID NO: 1087198 - DNA, 15 bp, Homo sapiens
gtccaaagctggaca

SEQ ID NO: 1087199 - DNA, 15 bp, Homo sapiens
agtccaaagctggac

SEQ ID NO: 1087200 - DNA, 15 bp, Homo sapiens
gagtccaaagctgga

SEQ ID NO: 1087201 - DNA, 15 bp, Homo sapiens
agagtccaaagctgg

SEQ ID NO: 1087202 - DNA, 15 bp, Homo sapiens
cagagtccaaagctg

SEQ ID NO: 1087203 - DNA, 15 bp, Homo sapiens
ccagagtccaaagct

SEQ ID NO: 1087204 - DNA, 15 bp, Homo sapiens
gccagagtccaaagc

SEQ ID NO: 1087205 - DNA, 15 bp, Homo sapiens
ggccagagtccaaag

SEQ ID NO: 1087206 - DNA, 15 bp, Homo sapiens
gggccagagtccaaa

SEQ ID NO: 1087207 - DNA, 15 bp, Homo sapiens
agggccagagtccaa

SEQ ID NO: 1087208 - DNA, 15 bp, Homo sapiens
cagggccagagtcca

SEQ ID NO: 1087209 - DNA, 15 bp, Homo sapiens
gcagggccagagtcc

SEQ ID NO: 1087210 - DNA, 15 bp, Homo sapiens
cgcagggccagagtc

SEQ ID NO: 1087211 - DNA, 15 bp, Homo sapiens
tcgcagggccagagt

SEQ ID NO: 1087212 - DNA, 15 bp, Homo sapiens
gtcgcagggccagag

SEQ ID NO: 1087213 - DNA, 15 bp, Homo sapiens
ggtcgcagggccaga

SEQ ID NO: 1087214 - DNA, 15 bp, Homo sapiens
aggtcgcagggccag

SEQ ID NO: 1087215 - DNA, 15 bp, Homo sapiens
caggtcgcagggcca

SEQ ID NO: 1087216 - DNA, 15 bp, Homo sapiens
ccaggtcgcagggcc

SEQ ID NO: 1087217 - DNA, 15 bp, Homo sapiens
tccaggtcgcagggc

SEQ ID NO: 1087218 - DNA, 15 bp, Homo sapiens
ttccaggtcgcaggg

SEQ ID NO: 1087219 - DNA, 15 bp, Homo sapiens
cttccaggtcgcagg

SEQ ID NO: 1087220 - DNA, 15 bp, Homo sapiens
acttccaggtcgcag

SEQ ID NO: 1087221 - DNA, 15 bp, Homo sapiens
gacttccaggtcgca

SEQ ID NO: 1087222 - DNA, 15 bp, Homo sapiens
tgacttccaggtcgc

SEQ ID NO: 1087223 - DNA, 15 bp, Homo sapiens
ctgacttccaggtcg

SEQ ID NO: 1087224 - DNA, 15 bp, Homo sapiens
cctgacttccaggtc

SEQ ID NO: 1087225 - DNA, 15 bp, Homo sapiens
gcctgacttccaggt

SEQ ID NO: 1087226 - DNA, 15 bp, Homo sapiens
agcctgacttccagg

SEQ ID NO: 1087227 - DNA, 15 bp, Homo sapiens
cagcctgacttccag

SEQ ID NO: 1087228 - DNA, 15 bp, Homo sapiens
gcagcctgacttcca

SEQ ID NO: 1087229 - DNA, 15 bp, Homo sapiens
ggcagcctgacttcc

SEQ ID NO: 1087230 - DNA, 15 bp, Homo sapiens
tggcagcctgacttc

SEQ ID NO: 1087231 - DNA, 15 bp, Homo sapiens
ttggcagcctgactt

SEQ ID NO: 1087232 - DNA, 15 bp, Homo sapiens
cttggcagcctgact

SEQ ID NO: 1087233 - DNA, 15 bp, Homo sapiens
tcttggcagcctgac

SEQ ID NO: 1087234 - DNA, 15 bp, Homo sapiens
ctcttggcagcctga

SEQ ID NO: 1087235 - DNA, 15 bp, Homo sapiens
cctcttggcagcctg

SEQ ID NO: 1087236 - DNA, 15 bp, Homo sapiens
acctcttggcagcct

SEQ ID NO: 1087237 - DNA, 15 bp, Homo sapiens
gacctcttggcagcc

SEQ ID NO: 1087238 - DNA, 15 bp, Homo sapiens
ggacctcttggcagc

SEQ ID NO: 1087239 - DNA, 15 bp, Homo sapiens
tggacctcttggcag

SEQ ID NO: 1087240 - DNA, 15 bp, Homo sapiens
ctggacctcttggca

SEQ ID NO: 1087241 - DNA, 15 bp, Homo sapiens
cctggacctcttggc

SEQ ID NO: 1087242 - DNA, 15 bp, Homo sapiens
gcctggacctcttgg

SEQ ID NO: 1087243 - DNA, 15 bp, Homo sapiens
tgcctggacctcttg

SEQ ID NO: 1087244 - DNA, 15 bp, Homo sapiens
ctgcctggacctctt

SEQ ID NO: 1087245 - DNA, 15 bp, Homo sapiens
actgcctggacctct

SEQ ID NO: 1087246 - DNA, 15 bp, Homo sapiens
cactgcctggacctc

SEQ ID NO: 1087247 - DNA, 15 bp, Homo sapiens
ccactgcctggacct

SEQ ID NO: 1087248 - DNA, 15 bp, Homo sapiens
gccactgcctggacc

SEQ ID NO: 1087249 - DNA, 15 bp, Homo sapiens
ggccactgcctggac

SEQ ID NO: 1087250 - DNA, 15 bp, Homo sapiens
aggccactgcctgga

SEQ ID NO: 1087251 - DNA, 15 bp, Homo sapiens
gaggccactgcctgg

SEQ ID NO: 1087252 - DNA, 15 bp, Homo sapiens
ggaggccactgcctg

SEQ ID NO: 1087253 - DNA, 15 bp, Homo sapiens
tggaggccactgcct

SEQ ID NO: 1087254 - DNA, 15 bp, Homo sapiens
gtggaggccactgcc

SEQ ID NO: 1087255 - DNA, 15 bp, Homo sapiens
agtggaggccactgc

SEQ ID NO: 1087256 - DNA, 15 bp, Homo sapiens
cagtggaggccactg

SEQ ID NO: 1087257 - DNA, 15 bp, Homo sapiens
acagtggaggccact

SEQ ID NO: 1087258 - DNA, 15 bp, Homo sapiens
cacagtggaggccac

SEQ ID NO: 1087259 - DNA, 15 bp, Homo sapiens
ccacagtggaggcca

SEQ ID NO: 1087260 - DNA, 15 bp, Homo sapiens
tccacagtggaggcc

SEQ ID NO: 1087261 - DNA, 15 bp, Homo sapiens
ctccacagtggaggc

SEQ ID NO: 1087262 - DNA, 15 bp, Homo sapiens
cctccacagtggagg

SEQ ID NO: 1087263 - DNA, 15 bp, Homo sapiens
ccctccacagtggag

SEQ ID NO: 1087264 - DNA, 15 bp, Homo sapiens
accctccacagtgga

SEQ ID NO: 1087265 - DNA, 15 bp, Homo sapiens
gaccctccacagtgg

SEQ ID NO: 1087266 - DNA, 15 bp, Homo sapiens
agaccctccacagtg

SEQ ID NO: 1087267 - DNA, 15 bp, Homo sapiens
gagaccctccacagt

SEQ ID NO: 1087268 - DNA, 15 bp, Homo sapiens
agagaccctccacag

SEQ ID NO: 1087269 - DNA, 15 bp, Homo sapiens
cagagaccctccaca

SEQ ID NO: 1087270 - DNA, 15 bp, Homo sapiens
ccagagaccctccac

SEQ ID NO: 1087271 - DNA, 15 bp, Homo sapiens
tccagagaccctcca

SEQ ID NO: 1087272 - DNA, 15 bp, Homo sapiens
ctccagagaccctcc

SEQ ID NO: 1087273 - DNA, 15 bp, Homo sapiens
tctccagagaccctc

SEQ ID NO: 1087274 - DNA, 15 bp, Homo sapiens
ctctccagagaccct

SEQ ID NO: 1087275 - DNA, 15 bp, Homo sapiens
actctccagagaccc

SEQ ID NO: 1087276 - DNA, 15 bp, Homo sapiens
aactctccagagacc

SEQ ID NO: 1087277 - DNA, 15 bp, Homo sapiens
aaactctccagagac

SEQ ID NO: 1087278 - DNA, 15 bp, Homo sapiens
taaactctccagaga

SEQ ID NO: 1087279 - DNA, 15 bp, Homo sapiens
gtaaactctccagag

SEQ ID NO: 1087280 - DNA, 15 bp, Homo sapiens
tgtaaactctccaga

SEQ ID NO: 1087281 - DNA, 15 bp, Homo sapiens
ctgtaaactctccag

SEQ ID NO: 1087282 - DNA, 15 bp, Homo sapiens
gctgtaaactctcca

SEQ ID NO: 1087283 - DNA, 15 bp, Homo sapiens
ggctgtaaactctcc

SEQ ID NO: 1087284 - DNA, 15 bp, Homo sapiens
gggctgtaaactctc

SEQ ID NO: 1087285 - DNA, 15 bp, Homo sapiens
agggctgtaaactct

SEQ ID NO: 1087286 - DNA, 15 bp, Homo sapiens
tagggctgtaaactc

SEQ ID NO: 1087287 - DNA, 15 bp, Homo sapiens
ctagggctgtaaact

SEQ ID NO: 1087288 - DNA, 15 bp, Homo sapiens
tctagggctgtaaac

SEQ ID NO: 1087289 - DNA, 15 bp, Homo sapiens
atctagggctgtaaa

SEQ ID NO: 1087290 - DNA, 15 bp, Homo sapiens
tatctagggctgtaa

SEQ ID NO: 1087291 - DNA, 15 bp, Homo sapiens
ctatctagggctgta

SEQ ID NO: 1087292 - DNA, 15 bp, Homo sapiens
cctatctagggctgt

SEQ ID NO: 1087293 - DNA, 15 bp, Homo sapiens
ccctatctagggctg

SEQ ID NO: 1087294 - DNA, 15 bp, Homo sapiens
cccctatctagggct

SEQ ID NO: 1087295 - DNA, 15 bp, Homo sapiens
ccccctatctagggc

SEQ ID NO: 1087296 - DNA, 15 bp, Homo sapiens
cccccctatctaggg

SEQ ID NO: 1087297 - DNA, 15 bp, Homo sapiens
acccccctatctagg

SEQ ID NO: 1087298 - DNA, 15 bp, Homo sapiens
aacccccctatctag

SEQ ID NO: 1087299 - DNA, 15 bp, Homo sapiens
taacccccctatcta

SEQ ID NO: 1087300 - DNA, 15 bp, Homo sapiens
ctaacccccctatct

SEQ ID NO: 1087301 - DNA, 15 bp, Homo sapiens
cctaacccccctatc

SEQ ID NO: 1087302 - DNA, 15 bp, Homo sapiens
ccctaacccccctat

SEQ ID NO: 1087303 - DNA, 15 bp, Homo sapiens
tccctaaccccccta

SEQ ID NO: 1087304 - DNA, 15 bp, Homo sapiens
atccctaacccccct

SEQ ID NO: 1087305 - DNA, 15 bp, Homo sapiens
catccctaacccccc

SEQ ID NO: 1087306 - DNA, 15 bp, Homo sapiens
acatccctaaccccc

SEQ ID NO: 1087307 - DNA, 15 bp, Homo sapiens
cacatccctaacccc

SEQ ID NO: 1087308 - DNA, 15 bp, Homo sapiens
tcacatccctaaccc

SEQ ID NO: 1087309 - DNA, 15 bp, Homo sapiens
ctcacatccctaacc

SEQ ID NO: 1087310 - DNA, 15 bp, Homo sapiens
tctcacatccctaac

SEQ ID NO: 1087311 - DNA, 15 bp, Homo sapiens
atctcacatccctaa

SEQ ID NO: 1087312 - DNA, 15 bp, Homo sapiens
catctcacatcccta

SEQ ID NO: 1087313 - DNA, 15 bp, Homo sapiens
ccatctcacatccct

SEQ ID NO: 1087314 - DNA, 15 bp, Homo sapiens
accatctcacatccc

SEQ ID NO: 1087315 - DNA, 15 bp, Homo sapiens
gaccatctcacatcc

SEQ ID NO: 1087316 - DNA, 15 bp, Homo sapiens
ggaccatctcacatc

SEQ ID NO: 1087317 - DNA, 15 bp, Homo sapiens
gggaccatctcacat

SEQ ID NO: 1087318 - DNA, 15 bp, Homo sapiens
tgggaccatctcaca

SEQ ID NO: 1087319 - DNA, 15 bp, Homo sapiens
ctgggaccatctcac

SEQ ID NO: 1087320 - DNA, 15 bp, Homo sapiens
cctgggaccatctca

SEQ ID NO: 1087321 - DNA, 15 bp, Homo sapiens
ccctgggaccatctc

SEQ ID NO: 1087322 - DNA, 15 bp, Homo sapiens
cccctgggaccatct

SEQ ID NO: 1087323 - DNA, 15 bp, Homo sapiens
gcccctgggaccatc

SEQ ID NO: 1087324 - DNA, 15 bp, Homo sapiens
ggcccctgggaccat

SEQ ID NO: 1087325 - DNA, 15 bp, Homo sapiens
aggcccctgggacca

SEQ ID NO: 1087326 - DNA, 15 bp, Homo sapiens
caggcccctgggacc

SEQ ID NO: 1087327 - DNA, 15 bp, Homo sapiens
gcaggcccctgggac

SEQ ID NO: 1087328 - DNA, 15 bp, Homo sapiens
agcaggcccctggga

SEQ ID NO: 1087329 - DNA, 15 bp, Homo sapiens
gagcaggcccctggg

SEQ ID NO: 1087330 - DNA, 15 bp, Homo sapiens
ggagcaggcccctgg

SEQ ID NO: 1087331 - DNA, 15 bp, Homo sapiens
aggagcaggcccctg

SEQ ID NO: 1087332 - DNA, 15 bp, Homo sapiens
caggagcaggcccct

SEQ ID NO: 1087333 - DNA, 15 bp, Homo sapiens
tcaggagcaggcccc

SEQ ID NO: 1087334 - DNA, 15 bp, Homo sapiens
ctcaggagcaggccc

SEQ ID NO: 1087335 - DNA, 15 bp, Homo sapiens
gctcaggagcaggcc

SEQ ID NO: 1087336 - DNA, 15 bp, Homo sapiens
ggctcaggagcaggc

SEQ ID NO: 1087337 - DNA, 15 bp, Homo sapiens
tggctcaggagcagg

SEQ ID NO: 1087338 - DNA, 15 bp, Homo sapiens
gtggctcaggagcag

SEQ ID NO: 1087339 - DNA, 15 bp, Homo sapiens
cgtggctcaggagca

SEQ ID NO: 1087340 - DNA, 15 bp, Homo sapiens
gcgtggctcaggagc

SEQ ID NO: 1087341 - DNA, 15 bp, Homo sapiens
ggcgtggctcaggag

SEQ ID NO: 1087342 - DNA, 15 bp, Homo sapiens
tggcgtggctcagga

SEQ ID NO: 1087343 - DNA, 15 bp, Homo sapiens
ttggcgtggctcagg

SEQ ID NO: 1087344 - DNA, 15 bp, Homo sapiens
cttggcgtggctcag

SEQ ID NO: 1087345 - DNA, 15 bp, Homo sapiens
gcttggcgtggctca

SEQ ID NO: 1087346 - DNA, 15 bp, Homo sapiens
agcttggcgtggctc

SEQ ID NO: 1087347 - DNA, 15 bp, Homo sapiens
cagcttggcgtggct

SEQ ID NO: 1087348 - DNA, 15 bp, Homo sapiens
gcagcttggcgtggc

SEQ ID NO: 1087349 - DNA, 15 bp, Homo sapiens
ggcagcttggcgtgg

SEQ ID NO: 1087350 - DNA, 15 bp, Homo sapiens
aggcagcttggcgtg

SEQ ID NO: 1087351 - DNA, 15 bp, Homo sapiens
caggcagcttggcgt

SEQ ID NO: 1087352 - DNA, 15 bp, Homo sapiens
gcaggcagcttggcg

SEQ ID NO: 1087353 - DNA, 15 bp, Homo sapiens
agcaggcagcttggc

SEQ ID NO: 1087354 - DNA, 15 bp, Homo sapiens
gagcaggcagcttgg

SEQ ID NO: 1087355 - DNA, 15 bp, Homo sapiens
ggagcaggcagcttg

SEQ ID NO: 1087356 - DNA, 15 bp, Homo sapiens
gggagcaggcagctt

SEQ ID NO: 1087357 - DNA, 15 bp, Homo sapiens
agggagcaggcagct

SEQ ID NO: 1087358 - DNA, 15 bp, Homo sapiens
aagggagcaggcagc

SEQ ID NO: 1087359 - DNA, 15 bp, Homo sapiens
aaagggagcaggcag

SEQ ID NO: 1087360 - DNA, 15 bp, Homo sapiens
gaaagggagcaggca

SEQ ID NO: 1087361 - DNA, 15 bp, Homo sapiens
ggaaagggagcaggc

SEQ ID NO: 1087362 - DNA, 15 bp, Homo sapiens
aggaaagggagcagg

SEQ ID NO: 1087363 - DNA, 15 bp, Homo sapiens
gaggaaagggagcag

SEQ ID NO: 1087364 - DNA, 15 bp, Homo sapiens
agaggaaagggagca

SEQ ID NO: 1087365 - DNA, 15 bp, Homo sapiens
cagaggaaagggagc

SEQ ID NO: 1087366 - DNA, 15 bp, Homo sapiens
gcagaggaaagggag

SEQ ID NO: 1087367 - DNA, 15 bp, Homo sapiens
agcagaggaaaggga

SEQ ID NO: 1087368 - DNA, 15 bp, Homo sapiens
aagcagaggaaaggg

SEQ ID NO: 1087369 - DNA, 15 bp, Homo sapiens
gaagcagaggaaagg

SEQ ID NO: 1087370 - DNA, 15 bp, Homo sapiens
ggaagcagaggaaag

SEQ ID NO: 1087371 - DNA, 15 bp, Homo sapiens
tggaagcagaggaaa

SEQ ID NO: 1087372 - DNA, 15 bp, Homo sapiens
ctggaagcagaggaa

SEQ ID NO: 1087373 - DNA, 15 bp, Homo sapiens
tctggaagcagagga

SEQ ID NO: 1087374 - DNA, 15 bp, Homo sapiens
gtctggaagcagagg

SEQ ID NO: 1087375 - DNA, 15 bp, Homo sapiens
agtctggaagcagag

SEQ ID NO: 1087376 - DNA, 15 bp, Homo sapiens
gagtctggaagcaga

SEQ ID NO: 1087377 - DNA, 15 bp, Homo sapiens
tgagtctggaagcag

SEQ ID NO: 1087378 - DNA, 15 bp, Homo sapiens
gtgagtctggaagca

SEQ ID NO: 1087379 - DNA, 15 bp, Homo sapiens
cgtgagtctggaagc

SEQ ID NO: 1087380 - DNA, 15 bp, Homo sapiens
ccgtgagtctggaag

SEQ ID NO: 1087381 - DNA, 15 bp, Homo sapiens
cccgtgagtctggaa

SEQ ID NO: 1087382 - DNA, 15 bp, Homo sapiens
tcccgtgagtctgga

SEQ ID NO: 1087383 - DNA, 15 bp, Homo sapiens
atcccgtgagtctgg

SEQ ID NO: 1087384 - DNA, 15 bp, Homo sapiens
gatcccgtgagtctg

SEQ ID NO: 1087385 - DNA, 15 bp, Homo sapiens
ggatcccgtgagtct

SEQ ID NO: 1087386 - DNA, 15 bp, Homo sapiens
aggatcccgtgagtc

SEQ ID NO: 1087387 - DNA, 15 bp, Homo sapiens
gaggatcccgtgagt

SEQ ID NO: 1087388 - DNA, 15 bp, Homo sapiens
agaggatcccgtgag

SEQ ID NO: 1087389 - DNA, 15 bp, Homo sapiens
cagaggatcccgtga

SEQ ID NO: 1087390 - DNA, 15 bp, Homo sapiens
gcagaggatcccgtg

SEQ ID NO: 1087391 - DNA, 15 bp, Homo sapiens
agcagaggatcccgt

SEQ ID NO: 1087392 - DNA, 15 bp, Homo sapiens
gagcagaggatcccg

SEQ ID NO: 1087393 - DNA, 15 bp, Homo sapiens
tgagcagaggatccc

SEQ ID NO: 1087394 - DNA, 15 bp, Homo sapiens
atgagcagaggatcc

SEQ ID NO: 1087395 - DNA, 15 bp, Homo sapiens
gatgagcagaggatc

SEQ ID NO: 1087396 - DNA, 15 bp, Homo sapiens
tgatgagcagaggat

SEQ ID NO: 1087397 - DNA, 15 bp, Homo sapiens
ctgatgagcagagga

SEQ ID NO: 1087398 - DNA, 15 bp, Homo sapiens
tctgatgagcagagg

SEQ ID NO: 1087399 - DNA, 15 bp, Homo sapiens
ttctgatgagcagag

SEQ ID NO: 1087400 - DNA, 15 bp, Homo sapiens
gttctgatgagcaga

SEQ ID NO: 1087401 - DNA, 15 bp, Homo sapiens
tgttctgatgagcag

SEQ ID NO: 1087402 - DNA, 15 bp, Homo sapiens
ctgttctgatgagca

SEQ ID NO: 1087403 - DNA, 15 bp, Homo sapiens
cctgttctgatgagc

SEQ ID NO: 1087404 - DNA, 15 bp, Homo sapiens
tcctgttctgatgag

SEQ ID NO: 1087405 - DNA, 15 bp, Homo sapiens
ctcctgttctgatga

SEQ ID NO: 1087406 - DNA, 15 bp, Homo sapiens
actcctgttctgatg

SEQ ID NO: 1087407 - DNA, 15 bp, Homo sapiens
cactcctgttctgat

SEQ ID NO: 1087408 - DNA, 15 bp, Homo sapiens
acactcctgttctga

SEQ ID NO: 1087409 - DNA, 15 bp, Homo sapiens
cacactcctgttctg

SEQ ID NO: 1087410 - DNA, 15 bp, Homo sapiens
ccacactcctgttct

SEQ ID NO: 1087411 - DNA, 15 bp, Homo sapiens
cccacactcctgttc

SEQ ID NO: 1087412 - DNA, 15 bp, Homo sapiens
tcccacactcctgtt

SEQ ID NO: 1087413 - DNA, 15 bp, Homo sapiens
ctcccacactcctgt

SEQ ID NO: 1087414 - DNA, 15 bp, Homo sapiens
tctcccacactcctg

SEQ ID NO: 1087415 - DNA, 15 bp, Homo sapiens
gtctcccacactcct

SEQ ID NO: 1087416 - DNA, 15 bp, Homo sapiens
ggtctcccacactcc

SEQ ID NO: 1087417 - DNA, 15 bp, Homo sapiens
gggtctcccacactc

SEQ ID NO: 1087418 - DNA, 15 bp, Homo sapiens
agggtctcccacact

SEQ ID NO: 1087419 - DNA, 15 bp, Homo sapiens
cagggtctcccacac

SEQ ID NO: 1087420 - DNA, 15 bp, Homo sapiens
tcagggtctcccaca

SEQ ID NO: 1087421 - DNA, 15 bp, Homo sapiens
ctcagggtctcccac

SEQ ID NO: 1087422 - DNA, 15 bp, Homo sapiens
tctcagggtctccca

SEQ ID NO: 1087423 - DNA, 15 bp, Homo sapiens
gtctcagggtctccc

SEQ ID NO: 1087424 - DNA, 15 bp, Homo sapiens
tgtctcagggtctcc

SEQ ID NO: 1087425 - DNA, 15 bp, Homo sapiens
gtgtctcagggtctc

SEQ ID NO: 1087426 - DNA, 15 bp, Homo sapiens
agtgtctcagggtct

SEQ ID NO: 1087427 - DNA, 15 bp, Homo sapiens
cagtgtctcagggtc

SEQ ID NO: 1087428 - DNA, 15 bp, Homo sapiens
gcagtgtctcagggt

SEQ ID NO: 1087429 - DNA, 15 bp, Homo sapiens
ggcagtgtctcaggg

SEQ ID NO: 1087430 - DNA, 15 bp, Homo sapiens
gggcagtgtctcagg

SEQ ID NO: 1087431 - DNA, 15 bp, Homo sapiens
ggggcagtgtctcag

SEQ ID NO: 1087432 - DNA, 15 bp, Homo sapiens
tggggcagtgtctca

SEQ ID NO: 1087433 - DNA, 15 bp, Homo sapiens
ctggggcagtgtctc

SEQ ID NO: 1087434 - DNA, 15 bp, Homo sapiens
cctggggcagtgtct

SEQ ID NO: 1087435 - DNA, 15 bp, Homo sapiens
tcctggggcagtgtc

SEQ ID NO: 1087436 - DNA, 15 bp, Homo sapiens
atcctggggcagtgt

SEQ ID NO: 1087437 - DNA, 15 bp, Homo sapiens
gatcctggggcagtg

SEQ ID NO: 1087438 - DNA, 15 bp, Homo sapiens
agatcctggggcagt

SEQ ID NO: 1087439 - DNA, 15 bp, Homo sapiens
cagatcctggggcag

SEQ ID NO: 1087440 - DNA, 15 bp, Homo sapiens
tcagatcctggggca

SEQ ID NO: 1087441 - DNA, 15 bp, Homo sapiens
ttcagatcctggggc

SEQ ID NO: 1087442 - DNA, 15 bp, Homo sapiens
gttcagatcctgggg

SEQ ID NO: 1087443 - DNA, 15 bp, Homo sapiens
tgttcagatcctggg

SEQ ID NO: 1087444 - DNA, 15 bp, Homo sapiens
ctgttcagatcctgg

SEQ ID NO: 1087445 - DNA, 15 bp, Homo sapiens
cctgttcagatcctg

SEQ ID NO: 1087446 - DNA, 15 bp, Homo sapiens
acctgttcagatcct

SEQ ID NO: 1087447 - DNA, 15 bp, Homo sapiens
cacctgttcagatcc

SEQ ID NO: 1087448 - DNA, 15 bp, Homo sapiens
ccacctgttcagatc

SEQ ID NO: 1087449 - DNA, 15 bp, Homo sapiens
gccacctgttcagat

SEQ ID NO: 1087450 - DNA, 15 bp, Homo sapiens
tgccacctgttcaga

SEQ ID NO: 1087451 - DNA, 15 bp, Homo sapiens
ttgccacctgttcag

SEQ ID NO: 1087452 - DNA, 15 bp, Homo sapiens
tttgccacctgttca

SEQ ID NO: 1087453 - DNA, 15 bp, Homo sapiens
ctttgccacctgttc

SEQ ID NO: 1087454 - DNA, 15 bp, Homo sapiens
cctttgccacctgtt

SEQ ID NO: 1087455 - DNA, 15 bp, Homo sapiens
gcctttgccacctgt

SEQ ID NO: 1087456 - DNA, 15 bp, Homo sapiens
agcctttgccacctg

SEQ ID NO: 1087457 - DNA, 15 bp, Homo sapiens
aagcctttgccacct

SEQ ID NO: 1087458 - DNA, 15 bp, Homo sapiens
taagcctttgccacc

SEQ ID NO: 1087459 - DNA, 15 bp, Homo sapiens
ttaagcctttgccac

SEQ ID NO: 1087460 - DNA, 15 bp, Homo sapiens
gttaagcctttgcca

SEQ ID NO: 1087461 - DNA, 15 bp, Homo sapiens
tgttaagcctttgcc

SEQ ID NO: 1087462 - DNA, 15 bp, Homo sapiens
ctgttaagcctttgc

SEQ ID NO: 1087463 - DNA, 15 bp, Homo sapiens
cctgttaagcctttg

SEQ ID NO: 1087464 - DNA, 15 bp, Homo sapiens
gcctgttaagccttt

SEQ ID NO: 1087465 - DNA, 15 bp, Homo sapiens
agcctgttaagcctt

SEQ ID NO: 1087466 - DNA, 15 bp, Homo sapiens
tagcctgttaagcct

SEQ ID NO: 1087467 - DNA, 15 bp, Homo sapiens
ctagcctgttaagcc

SEQ ID NO: 1087468 - DNA, 15 bp, Homo sapiens
gctagcctgttaagc

SEQ ID NO: 1087469 - DNA, 15 bp, Homo sapiens
cgctagcctgttaag

SEQ ID NO: 1087470 - DNA, 15 bp, Homo sapiens
ccgctagcctgttaa

SEQ ID NO: 1087471 - DNA, 15 bp, Homo sapiens
accgctagcctgtta

SEQ ID NO: 1087472 - DNA, 15 bp, Homo sapiens
gaccgctagcctgtt

SEQ ID NO: 1087473 - DNA, 15 bp, Homo sapiens
tgaccgctagcctgt

SEQ ID NO: 1087474 - DNA, 15 bp, Homo sapiens
gtgaccgctagcctg

SEQ ID NO: 1087475 - DNA, 15 bp, Homo sapiens
agtgaccgctagcct

SEQ ID NO: 1087476 - DNA, 15 bp, Homo sapiens
cagtgaccgctagcc

SEQ ID NO: 1087477 - DNA, 15 bp, Homo sapiens
acagtgaccgctagc

SEQ ID NO: 1087478 - DNA, 15 bp, Homo sapiens
tacagtgaccgctag

SEQ ID NO: 1087479 - DNA, 15 bp, Homo sapiens
ctacagtgaccgcta

SEQ ID NO: 1087480 - DNA, 15 bp, Homo sapiens
actacagtgaccgct

SEQ ID NO: 1087481 - DNA, 15 bp, Homo sapiens
cactacagtgaccgc

SEQ ID NO: 1087482 - DNA, 15 bp, Homo sapiens
tcactacagtgaccg

SEQ ID NO: 1087483 - DNA, 15 bp, Homo sapiens
gtcactacagtgacc

SEQ ID NO: 1087484 - DNA, 15 bp, Homo sapiens
tgtcactacagtgac

SEQ ID NO: 1087485 - DNA, 15 bp, Homo sapiens
ttgtcactacagtga

SEQ ID NO: 1087486 - DNA, 15 bp, Homo sapiens
cttgtcactacagtg

SEQ ID NO: 1087487 - DNA, 15 bp, Homo sapiens
ccttgtcactacagt

SEQ ID NO: 1087488 - DNA, 15 bp, Homo sapiens
gccttgtcactacag

SEQ ID NO: 1087489 - DNA, 15 bp, Homo sapiens
cgccttgtcactaca

SEQ ID NO: 1087490 - DNA, 15 bp, Homo sapiens
tcgccttgtcactac

SEQ ID NO: 1087491 - DNA, 15 bp, Homo sapiens
atcgccttgtcacta

SEQ ID NO: 1087492 - DNA, 15 bp, Homo sapiens
aatcgccttgtcact

SEQ ID NO: 1087493 - DNA, 15 bp, Homo sapiens
caatcgccttgtcac

SEQ ID NO: 1087494 - DNA, 15 bp, Homo sapiens
tcaatcgccttgtca

SEQ ID NO: 1087495 - DNA, 15 bp, Homo sapiens
ctcaatcgccttgtc

SEQ ID NO: 1087496 - DNA, 15 bp, Homo sapiens
actcaatcgccttgt

SEQ ID NO: 1087497 - DNA, 15 bp, Homo sapiens
cactcaatcgccttg

SEQ ID NO: 1087498 - DNA, 15 bp, Homo sapiens
ccactcaatcgcctt

SEQ ID NO: 1087499 - DNA, 15 bp, Homo sapiens
accactcaatcgcct

SEQ ID NO: 1087500 - DNA, 15 bp, Homo sapiens
gaccactcaatcgcc

SEQ ID NO: 1087501 - DNA, 15 bp, Homo sapiens
tgaccactcaatcgc

SEQ ID NO: 1087502 - DNA, 15 bp, Homo sapiens
gtgaccactcaatcg

SEQ ID NO: 1087503 - DNA, 15 bp, Homo sapiens
ggtgaccactcaatc

SEQ ID NO: 1087504 - DNA, 15 bp, Homo sapiens
tggtgaccactcaat

SEQ ID NO: 1087505 - DNA, 15 bp, Homo sapiens
atggtgaccactcaa

SEQ ID NO: 1087506 - DNA, 15 bp, Homo sapiens
catggtgaccactca

SEQ ID NO: 1087507 - DNA, 15 bp, Homo sapiens
ccatggtgaccactc

SEQ ID NO: 1087508 - DNA, 15 bp, Homo sapiens
accatggtgaccact

SEQ ID NO: 1087509 - DNA, 15 bp, Homo sapiens
caccatggtgaccac

SEQ ID NO: 1087510 - DNA, 15 bp, Homo sapiens
tcaccatggtgacca

SEQ ID NO: 1087511 - DNA, 15 bp, Homo sapiens
atcaccatggtgacc

SEQ ID NO: 1087512 - DNA, 15 bp, Homo sapiens
catcaccatggtgac

SEQ ID NO: 1087513 - DNA, 15 bp, Homo sapiens
ccatcaccatggtga

SEQ ID NO: 1087514 - DNA, 15 bp, Homo sapiens
cccatcaccatggtg

SEQ ID NO: 1087515 - DNA, 15 bp, Homo sapiens
ccccatcaccatggt

SEQ ID NO: 1087516 - DNA, 15 bp, Homo sapiens
tccccatcaccatgg

SEQ ID NO: 1087517 - DNA, 15 bp, Homo sapiens
atccccatcaccatg

SEQ ID NO: 1087518 - DNA, 15 bp, Homo sapiens
catccccatcaccat

SEQ ID NO: 1087519 - DNA, 15 bp, Homo sapiens
ccatccccatcacca

SEQ ID NO: 1087520 - DNA, 15 bp, Homo sapiens
tccatccccatcacc

SEQ ID NO: 1087521 - DNA, 15 bp, Homo sapiens
ctccatccccatcac

SEQ ID NO: 1087522 - DNA, 15 bp, Homo sapiens
cctccatccccatca

SEQ ID NO: 1087523 - DNA, 15 bp, Homo sapiens
gcctccatccccatc

SEQ ID NO: 1087524 - DNA, 15 bp, Homo sapiens
agcctccatccccat

SEQ ID NO: 1087525 - DNA, 15 bp, Homo sapiens
gagcctccatcccca

SEQ ID NO: 1087526 - DNA, 15 bp, Homo sapiens
agagcctccatcccc

SEQ ID NO: 1087527 - DNA, 15 bp, Homo sapiens
aagagcctccatccc

SEQ ID NO: 1087528 - DNA, 15 bp, Homo sapiens
aaagagcctccatcc

SEQ ID NO: 1087529 - DNA, 15 bp, Homo sapiens
caaagagcctccatc

SEQ ID NO: 1087530 - DNA, 15 bp, Homo sapiens
gcaaagagcctccat

SEQ ID NO: 1087531 - DNA, 15 bp, Homo sapiens
ggcaaagagcctcca

SEQ ID NO: 1087532 - DNA, 15 bp, Homo sapiens
tggcaaagagcctcc

SEQ ID NO: 1087533 - DNA, 15 bp, Homo sapiens
gtggcaaagagcctc

SEQ ID NO: 1087534 - DNA, 15 bp, Homo sapiens
ggtggcaaagagcct

SEQ ID NO: 1087535 - DNA, 15 bp, Homo sapiens
tggtggcaaagagcc

SEQ ID NO: 1087536 - DNA, 15 bp, Homo sapiens
ctggtggcaaagagc

SEQ ID NO: 1087537 - DNA, 15 bp, Homo sapiens
actggtggcaaagag

SEQ ID NO: 1087538 - DNA, 15 bp, Homo sapiens
gactggtggcaaaga

SEQ ID NO: 1087539 - DNA, 15 bp, Homo sapiens
ggactggtggcaaag

SEQ ID NO: 1087540 - DNA, 15 bp, Homo sapiens
gggactggtggcaaa

SEQ ID NO: 1087541 - DNA, 15 bp, Homo sapiens
tgggactggtggcaa

SEQ ID NO: 1087542 - DNA, 15 bp, Homo sapiens
ctgggactggtggca

SEQ ID NO: 1087543 - DNA, 15 bp, Homo sapiens
actgggactggtggc

SEQ ID NO: 1087544 - DNA, 15 bp, Homo sapiens
aactgggactggtgg

SEQ ID NO: 1087545 - DNA, 15 bp, Homo sapiens
aaactgggactggtg

SEQ ID NO: 1087546 - DNA, 15 bp, Homo sapiens
aaaactgggactggt

SEQ ID NO: 1087547 - DNA, 15 bp, Homo sapiens
taaaactgggactgg

SEQ ID NO: 1087548 - DNA, 15 bp, Homo sapiens
ataaaactgggactg

SEQ ID NO: 1087549 - DNA, 15 bp, Homo sapiens
cataaaactgggact

SEQ ID NO: 1087550 - DNA, 15 bp, Homo sapiens
gcataaaactgggac

SEQ ID NO: 1087551 - DNA, 15 bp, Homo sapiens
tgcataaaactggga

SEQ ID NO: 1087552 - DNA, 15 bp, Homo sapiens
atgcataaaactggg

SEQ ID NO: 1087553 - DNA, 15 bp, Homo sapiens
catgcataaaactgg

SEQ ID NO: 1087554 - DNA, 15 bp, Homo sapiens
ccatgcataaaactg

SEQ ID NO: 1087555 - DNA, 15 bp, Homo sapiens
gccatgcataaaact

SEQ ID NO: 1087556 - DNA, 15 bp, Homo sapiens
tgccatgcataaaac

SEQ ID NO: 1087557 - DNA, 15 bp, Homo sapiens
ctgccatgcataaaa

SEQ ID NO: 1087558 - DNA, 15 bp, Homo sapiens
gctgccatgcataaa

SEQ ID NO: 1087559 - DNA, 15 bp, Homo sapiens
agctgccatgcataa

SEQ ID NO: 1087560 - DNA, 15 bp, Homo sapiens
gagctgccatgcata

SEQ ID NO: 1087561 - DNA, 15 bp, Homo sapiens
agagctgccatgcat

SEQ ID NO: 1087562 - DNA, 15 bp, Homo sapiens
tagagctgccatgca

SEQ ID NO: 1087563 - DNA, 15 bp, Homo sapiens
ttagagctgccatgc

SEQ ID NO: 1087564 - DNA, 15 bp, Homo sapiens
attagagctgccatg

SEQ ID NO: 1087565 - DNA, 15 bp, Homo sapiens
cattagagctgccat

SEQ ID NO: 1087566 - DNA, 15 bp, Homo sapiens
tcattagagctgcca

SEQ ID NO: 1087567 - DNA, 15 bp, Homo sapiens
gtcattagagctgcc

SEQ ID NO: 1087568 - DNA, 15 bp, Homo sapiens
tgtcattagagctgc

SEQ ID NO: 1087569 - DNA, 15 bp, Homo sapiens
ctgtcattagagctg

SEQ ID NO: 1087570 - DNA, 15 bp, Homo sapiens
cctgtcattagagct

SEQ ID NO: 1087571 - DNA, 15 bp, Homo sapiens
tcctgtcattagagc

SEQ ID NO: 1087572 - DNA, 15 bp, Homo sapiens
atcctgtcattagag

SEQ ID NO: 1087573 - DNA, 15 bp, Homo sapiens
catcctgtcattaga

SEQ ID NO: 1087574 - DNA, 15 bp, Homo sapiens
ccatcctgtcattag

SEQ ID NO: 1087575 - DNA, 15 bp, Homo sapiens
accatcctgtcatta

SEQ ID NO: 1087576 - DNA, 15 bp, Homo sapiens
gaccatcctgtcatt

SEQ ID NO: 1087577 - DNA, 15 bp, Homo sapiens
tgaccatcctgtcat

SEQ ID NO: 1087578 - DNA, 15 bp, Homo sapiens
ctgaccatcctgtca

SEQ ID NO: 1087579 - DNA, 15 bp, Homo sapiens
gctgaccatcctgtc

SEQ ID NO: 1087580 - DNA, 15 bp, Homo sapiens
ggctgaccatcctgt

SEQ ID NO: 1087581 - DNA, 15 bp, Homo sapiens
gggctgaccatcctg

SEQ ID NO: 1087582 - DNA, 15 bp, Homo sapiens
agggctgaccatcct

SEQ ID NO: 1087583 - DNA, 15 bp, Homo sapiens
cagggctgaccatcc

SEQ ID NO: 1087584 - DNA, 15 bp, Homo sapiens
gcagggctgaccatc

SEQ ID NO: 1087585 - DNA, 15 bp, Homo sapiens
agcagggctgaccat

SEQ ID NO: 1087586 - DNA, 15 bp, Homo sapiens
cagcagggctgacca

SEQ ID NO: 1087587 - DNA, 15 bp, Homo sapiens
tcagcagggctgacc

SEQ ID NO: 1087588 - DNA, 15 bp, Homo sapiens
ctcagcagggctgac

SEQ ID NO: 1087589 - DNA, 15 bp, Homo sapiens
cctcagcagggctga

SEQ ID NO: 1087590 - DNA, 15 bp, Homo sapiens
gcctcagcagggctg

SEQ ID NO: 1087591 - DNA, 15 bp, Homo sapiens
ggcctcagcagggct

SEQ ID NO: 1087592 - DNA, 15 bp, Homo sapiens
tggcctcagcagggc

SEQ ID NO: 1087593 - DNA, 15 bp, Homo sapiens
gtggcctcagcaggg

SEQ ID NO: 1087594 - DNA, 15 bp, Homo sapiens
agtggcctcagcagg

SEQ ID NO: 1087595 - DNA, 15 bp, Homo sapiens
gagtggcctcagcag

SEQ ID NO: 1087596 - DNA, 15 bp, Homo sapiens
ggagtggcctcagca

SEQ ID NO: 1087597 - DNA, 15 bp, Homo sapiens
aggagtggcctcagc

SEQ ID NO: 1087598 - DNA, 15 bp, Homo sapiens
caggagtggcctcag

SEQ ID NO: 1087599 - DNA, 15 bp, Homo sapiens
ccaggagtggcctca

SEQ ID NO: 1087600 - DNA, 15 bp, Homo sapiens
accaggagtggcctc

SEQ ID NO: 1087601 - DNA, 15 bp, Homo sapiens
gaccaggagtggcct

SEQ ID NO: 1087602 - DNA, 15 bp, Homo sapiens
tgaccaggagtggcc

SEQ ID NO: 1087603 - DNA, 15 bp, Homo sapiens
gtgaccaggagtggc

SEQ ID NO: 1087604 - DNA, 15 bp, Homo sapiens
ggtgaccaggagtgg

SEQ ID NO: 1087605 - DNA, 15 bp, Homo sapiens
tggtgaccaggagtg

SEQ ID NO: 1087606 - DNA, 15 bp, Homo sapiens
atggtgaccaggagt

SEQ ID NO: 1087607 - DNA, 15 bp, Homo sapiens
catggtgaccaggag

SEQ ID NO: 1087608 - DNA, 15 bp, Homo sapiens
tcatggtgaccagga

SEQ ID NO: 1087609 - DNA, 15 bp, Homo sapiens
gtcatggtgaccagg

SEQ ID NO: 1087610 - DNA, 15 bp, Homo sapiens
tgtcatggtgaccag

SEQ ID NO: 1087611 - DNA, 15 bp, Homo sapiens
ttgtcatggtgacca

SEQ ID NO: 1087612 - DNA, 15 bp, Homo sapiens
gttgtcatggtgacc

SEQ ID NO: 1087613 - DNA, 15 bp, Homo sapiens
ggttgtcatggtgac

SEQ ID NO: 1087614 - DNA, 15 bp, Homo sapiens
tggttgtcatggtga

SEQ ID NO: 1087615 - DNA, 15 bp, Homo sapiens
gtggttgtcatggtg

SEQ ID NO: 1087616 - DNA, 15 bp, Homo sapiens
tgtggttgtcatggt

SEQ ID NO: 1087617 - DNA, 15 bp, Homo sapiens
ctgtggttgtcatgg

SEQ ID NO: 1087618 - DNA, 15 bp, Homo sapiens
cctgtggttgtcatg

SEQ ID NO: 1087619 - DNA, 15 bp, Homo sapiens
gcctgtggttgtcat

SEQ ID NO: 1087620 - DNA, 15 bp, Homo sapiens
ggcctgtggttgtca

SEQ ID NO: 1087621 - DNA, 15 bp, Homo sapiens
gggcctgtggttgtc

SEQ ID NO: 1087622 - DNA, 15 bp, Homo sapiens
agggcctgtggttgt

SEQ ID NO: 1087623 - DNA, 15 bp, Homo sapiens
gagggcctgtggttg

SEQ ID NO: 1087624 - DNA, 15 bp, Homo sapiens
agagggcctgtggtt

SEQ ID NO: 1087625 - DNA, 15 bp, Homo sapiens
gagagggcctgtggt

SEQ ID NO: 1087626 - DNA, 15 bp, Homo sapiens
tgagagggcctgtgg

SEQ ID NO: 1087627 - DNA, 15 bp, Homo sapiens
ctgagagggcctgtg

SEQ ID NO: 1087628 - DNA, 15 bp, Homo sapiens
cctgagagggcctgt

SEQ ID NO: 1087629 - DNA, 15 bp, Homo sapiens
tcctgagagggcctg

SEQ ID NO: 1087630 - DNA, 15 bp, Homo sapiens
ctcctgagagggcct

SEQ ID NO: 1087631 - DNA, 15 bp, Homo sapiens
gctcctgagagggcc

SEQ ID NO: 1087632 - DNA, 15 bp, Homo sapiens
tgctcctgagagggc

SEQ ID NO: 1087633 - DNA, 15 bp, Homo sapiens
gtgctcctgagaggg

SEQ ID NO: 1087634 - DNA, 15 bp, Homo sapiens
tgtgctcctgagagg

SEQ ID NO: 1087635 - DNA, 15 bp, Homo sapiens
ctgtgctcctgagag

SEQ ID NO: 1087636 - DNA, 15 bp, Homo sapiens
actgtgctcctgaga

SEQ ID NO: 1087637 - DNA, 15 bp, Homo sapiens
tactgtgctcctgag

SEQ ID NO: 1087638 - DNA, 15 bp, Homo sapiens
ttactgtgctcctga

SEQ ID NO: 1087639 - DNA, 15 bp, Homo sapiens
cttactgtgctcctg

SEQ ID NO: 1087640 - DNA, 15 bp, Homo sapiens
gcttactgtgctcct

SEQ ID NO: 1087641 - DNA, 15 bp, Homo sapiens
ggcttactgtgctcc

SEQ ID NO: 1087642 - DNA, 15 bp, Homo sapiens
gggcttactgtgctc

SEQ ID NO: 1087643 - DNA, 15 bp, Homo sapiens
agggcttactgtgct

SEQ ID NO: 1087644 - DNA, 15 bp, Homo sapiens
cagggcttactgtgc

SEQ ID NO: 1087645 - DNA, 15 bp, Homo sapiens
ccagggcttactgtg

SEQ ID NO: 1087646 - DNA, 15 bp, Homo sapiens
gccagggcttactgt

SEQ ID NO: 1087647 - DNA, 15 bp, Homo sapiens
tgccagggcttactg

SEQ ID NO: 1087648 - DNA, 15 bp, Homo sapiens
ctgccagggcttact

SEQ ID NO: 1087649 - DNA, 15 bp, Homo sapiens
cctgccagggcttac

SEQ ID NO: 1087650 - DNA, 15 bp, Homo sapiens
tcctgccagggctta

SEQ ID NO: 1087651 - DNA, 15 bp, Homo sapiens
ctcctgccagggctt

SEQ ID NO: 1087652 - DNA, 15 bp, Homo sapiens
ttctcctgccagggc

SEQ ID NO: 1087653 - DNA, 15 bp, Homo sapiens
attctcctgccaggg

SEQ ID NO: 1087654 - DNA, 15 bp, Homo sapiens
gattctcctgccagg

SEQ ID NO: 1087655 - DNA, 15 bp, Homo sapiens
ggattctcctgccag

SEQ ID NO: 1087656 - DNA, 15 bp, Homo sapiens
gggattctcctgcca

SEQ ID NO: 1087657 - DNA, 15 bp, Homo sapiens
ggggattctcctgcc

SEQ ID NO: 1087658 - DNA, 15 bp, Homo sapiens
gggggattctcctgc

SEQ ID NO: 1087659 - DNA, 15 bp, Homo sapiens
tgggggattctcctg

SEQ ID NO: 1087660 - DNA, 15 bp, Homo sapiens
gtgggggattctcct

SEQ ID NO: 1087661 - DNA, 15 bp, Homo sapiens
agtgggggattctcc

SEQ ID NO: 1087662 - DNA, 15 bp, Homo sapiens
gagtgggggattctc

SEQ ID NO: 1087663 - DNA, 15 bp, Homo sapiens
ggagtgggggattct

SEQ ID NO: 1087664 - DNA, 15 bp, Homo sapiens
tggagtgggggattc

SEQ ID NO: 1087665 - DNA, 15 bp, Homo sapiens
gtggagtgggggatt

SEQ ID NO: 1087666 - DNA, 15 bp, Homo sapiens
tgtggagtgggggat

SEQ ID NO: 1087667 - DNA, 15 bp, Homo sapiens
gtgtggagtggggga

SEQ ID NO: 1087668 - DNA, 15 bp, Homo sapiens
ggtgtggagtggggg

SEQ ID NO: 1087669 - DNA, 15 bp, Homo sapiens
aggtgtggagtgggg

SEQ ID NO: 1087670 - DNA, 15 bp, Homo sapiens
caggtgtggagtggg

SEQ ID NO: 1087671 - DNA, 15 bp, Homo sapiens
ccaggtgtggagtgg

SEQ ID NO: 1087672 - DNA, 15 bp, Homo sapiens
gccaggtgtggagtg

SEQ ID NO: 1087673 - DNA, 15 bp, Homo sapiens
agccaggtgtggagt

SEQ ID NO: 1087674 - DNA, 15 bp, Homo sapiens
cagccaggtgtggag

SEQ ID NO: 1087675 - DNA, 15 bp, Homo sapiens
ccagccaggtgtgga

SEQ ID NO: 1087676 - DNA, 15 bp, Homo sapiens
tccagccaggtgtgg

SEQ ID NO: 1087677 - DNA, 15 bp, Homo sapiens
ctccagccaggtgtg

SEQ ID NO: 1087678 - DNA, 15 bp, Homo sapiens
gctccagccaggtgt

SEQ ID NO: 1087679 - DNA, 15 bp, Homo sapiens
tgctccagccaggtg

SEQ ID NO: 1087680 - DNA, 15 bp, Homo sapiens
ctgctccagccaggt

SEQ ID NO: 1087681 - DNA, 15 bp, Homo sapiens
cctgctccagccagg

SEQ ID NO: 1087682 - DNA, 15 bp, Homo sapiens
tcctgctccagccag

SEQ ID NO: 1087683 - DNA, 15 bp, Homo sapiens
ttcctgctccagcca

SEQ ID NO: 1087684 - DNA, 15 bp, Homo sapiens
tttcctgctccagcc

SEQ ID NO: 1087685 - DNA, 15 bp, Homo sapiens
atttcctgctccagc

SEQ ID NO: 1087686 - DNA, 15 bp, Homo sapiens
catttcctgctccag

SEQ ID NO: 1087687 - DNA, 15 bp, Homo sapiens
gcatttcctgctcca

SEQ ID NO: 1087688 - DNA, 15 bp, Homo sapiens
ggcatttcctgctcc

SEQ ID NO: 1087689 - DNA, 15 bp, Homo sapiens
cggcatttcctgctc

SEQ ID NO: 1087690 - DNA, 15 bp, Homo sapiens
tcggcatttcctgct

SEQ ID NO: 1087691 - DNA, 15 bp, Homo sapiens
ctcggcatttcctgc

SEQ ID NO: 1087692 - DNA, 15 bp, Homo sapiens
gctcggcatttcctg

SEQ ID NO: 1087693 - DNA, 15 bp, Homo sapiens
cgctcggcatttcct

SEQ ID NO: 1087694 - DNA, 15 bp, Homo sapiens
ccgctcggcatttcc

SEQ ID NO: 1087695 - DNA, 15 bp, Homo sapiens
gccgctcggcatttc

SEQ ID NO: 1087696 - DNA, 15 bp, Homo sapiens
cgccgctcggcattt

SEQ ID NO: 1087697 - DNA, 15 bp, Homo sapiens
gcgccgctcggcatt

SEQ ID NO: 1087698 - DNA, 15 bp, Homo sapiens
ggcgccgctcggcat

SEQ ID NO: 1087699 - DNA, 15 bp, Homo sapiens
aggcgccgctcggca

SEQ ID NO: 1087700 - DNA, 15 bp, Homo sapiens
caggcgccgctcggc

SEQ ID NO: 1087701 - DNA, 15 bp, Homo sapiens
tcaggcgccgctcgg

SEQ ID NO: 1087702 - DNA, 15 bp, Homo sapiens
ctcaggcgccgctcg

SEQ ID NO: 1087703 - DNA, 15 bp, Homo sapiens
gctcaggcgccgctc

SEQ ID NO: 1087704 - DNA, 15 bp, Homo sapiens
ggctcaggcgccgct

SEQ ID NO: 1087705 - DNA, 15 bp, Homo sapiens
gggctcaggcgccgc

SEQ ID NO: 1087706 - DNA, 15 bp, Homo sapiens
ggggctcaggcgccg

SEQ ID NO: 1087707 - DNA, 15 bp, Homo sapiens
tggggctcaggcgcc

SEQ ID NO: 1087708 - DNA, 15 bp, Homo sapiens
ctggggctcaggcgc

SEQ ID NO: 1087709 - DNA, 15 bp, Homo sapiens
cctggggctcaggcg

SEQ ID NO: 1087710 - DNA, 15 bp, Homo sapiens
ccctggggctcaggc

SEQ ID NO: 1087711 - DNA, 15 bp, Homo sapiens
tccctggggctcagg

SEQ ID NO: 1087712 - DNA, 15 bp, Homo sapiens
ttccctggggctcag

SEQ ID NO: 1087713 - DNA, 15 bp, Homo sapiens
cttccctggggctca

SEQ ID NO: 1087714 - DNA, 15 bp, Homo sapiens
gcttccctggggctc

SEQ ID NO: 1087715 - DNA, 15 bp, Homo sapiens
tgcttccctggggct

SEQ ID NO: 1087716 - DNA, 15 bp, Homo sapiens
ctgcttccctggggc

SEQ ID NO: 1087717 - DNA, 15 bp, Homo sapiens
cctgcttccctgggg

SEQ ID NO: 1087718 - DNA, 15 bp, Homo sapiens
gcctgcttccctggg

SEQ ID NO: 1087719 - DNA, 15 bp, Homo sapiens
agcctgcttccctgg

SEQ ID NO: 1087720 - DNA, 15 bp, Homo sapiens
tagcctgcttccctg

SEQ ID NO: 1087721 - DNA, 15 bp, Homo sapiens
ctagcctgcttccct

SEQ ID NO: 1087722 - DNA, 15 bp, Homo sapiens
cctagcctgcttccc

SEQ ID NO: 1087723 - DNA, 15 bp, Homo sapiens
tcctagcctgcttcc

SEQ ID NO: 1087724 - DNA, 15 bp, Homo sapiens
atcctagcctgcttc

SEQ ID NO: 1087725 - DNA, 15 bp, Homo sapiens
catcctagcctgctt

SEQ ID NO: 1087726 - DNA, 15 bp, Homo sapiens
acatcctagcctgct

SEQ ID NO: 1087727 - DNA, 15 bp, Homo sapiens
cacatcctagcctgc

SEQ ID NO: 1087728 - DNA, 15 bp, Homo sapiens
tcacatcctagcctg

SEQ ID NO: 1087729 - DNA, 15 bp, Homo sapiens
ctcacatcctagcct

SEQ ID NO: 1087730 - DNA, 15 bp, Homo sapiens
tctcacatcctagcc

SEQ ID NO: 1087731 - DNA, 15 bp, Homo sapiens
ctctcacatcctagc

SEQ ID NO: 1087732 - DNA, 15 bp, Homo sapiens
tctctcacatcctag

SEQ ID NO: 1087733 - DNA, 15 bp, Homo sapiens
gtctctcacatccta

SEQ ID NO: 1087734 - DNA, 15 bp, Homo sapiens
tgtctctcacatcct

SEQ ID NO: 1087735 - DNA, 15 bp, Homo sapiens
gtgtctctcacatcc

SEQ ID NO: 1087736 - DNA, 15 bp, Homo sapiens
tgtgtctctcacatc

SEQ ID NO: 1087737 - DNA, 15 bp, Homo sapiens
ctgtgtctctcacat

SEQ ID NO: 1087738 - DNA, 15 bp, Homo sapiens
actgtgtctctcaca

SEQ ID NO: 1087739 - DNA, 15 bp, Homo sapiens
gactgtgtctctcac

SEQ ID NO: 1087740 - DNA, 15 bp, Homo sapiens
tgactgtgtctctca

SEQ ID NO: 1087741 - DNA, 15 bp, Homo sapiens
gtgactgtgtctctc

SEQ ID NO: 1087742 - DNA, 15 bp, Homo sapiens
ggtgactgtgtctct

SEQ ID NO: 1087743 - DNA, 15 bp, Homo sapiens
aggtgactgtgtctc

SEQ ID NO: 1087744 - DNA, 15 bp, Homo sapiens
caggtgactgtgtct

SEQ ID NO: 1087745 - DNA, 15 bp, Homo sapiens
gcaggtgactgtgtc

SEQ ID NO: 1087746 - DNA, 15 bp, Homo sapiens
tgcaggtgactgtgt

SEQ ID NO: 1087747 - DNA, 15 bp, Homo sapiens
ctgcaggtgactgtg

SEQ ID NO: 1087748 - DNA, 15 bp, Homo sapiens
gctgcaggtgactgt

SEQ ID NO: 1087749 - DNA, 15 bp, Homo sapiens
ggctgcaggtgactg

SEQ ID NO: 1087750 - DNA, 15 bp, Homo sapiens
aggctgcaggtgact

SEQ ID NO: 1087751 - DNA, 15 bp, Homo sapiens
taggctgcaggtgac

SEQ ID NO: 1087752 - DNA, 15 bp, Homo sapiens
ttaggctgcaggtga

SEQ ID NO: 1087753 - DNA, 15 bp, Homo sapiens
attaggctgcaggtg

SEQ ID NO: 1087754 - DNA, 15 bp, Homo sapiens
aattaggctgcaggt

SEQ ID NO: 1087755 - DNA, 15 bp, Homo sapiens
taattaggctgcagg

SEQ ID NO: 1087756 - DNA, 15 bp, Homo sapiens
gtaattaggctgcag

SEQ ID NO: 1087757 - DNA, 15 bp, Homo sapiens
agtaattaggctgca

SEQ ID NO: 1087758 - DNA, 15 bp, Homo sapiens
gagtaattaggctgc

SEQ ID NO: 1087759 - DNA, 15 bp, Homo sapiens
tgagtaattaggctg

SEQ ID NO: 1087760 - DNA, 15 bp, Homo sapiens
ttgagtaattaggct

SEQ ID NO: 1087761 - DNA, 15 bp, Homo sapiens
tttgagtaattaggc

SEQ ID NO: 1087762 - DNA, 15 bp, Homo sapiens
ttttgagtaattagg

SEQ ID NO: 1087763 - DNA, 15 bp, Homo sapiens
cttttgagtaattag

SEQ ID NO: 1087764 - DNA, 15 bp, Homo sapiens
gcttttgagtaatta

SEQ ID NO: 1087765 - DNA, 15 bp, Homo sapiens
agcttttgagtaatt

SEQ ID NO: 1087766 - DNA, 15 bp, Homo sapiens
cagcttttgagtaat

SEQ ID NO: 1087767 - DNA, 15 bp, Homo sapiens
acagcttttgagtaa

SEQ ID NO: 1087768 - DNA, 15 bp, Homo sapiens
gacagcttttgagta

SEQ ID NO: 1087769 - DNA, 15 bp, Homo sapiens
ggacagcttttgagt

SEQ ID NO: 1087770 - DNA, 15 bp, Homo sapiens
gggacagcttttgag

SEQ ID NO: 1087771 - DNA, 15 bp, Homo sapiens
ggggacagcttttga

SEQ ID NO: 1087772 - DNA, 15 bp, Homo sapiens
tggggacagcttttg

SEQ ID NO: 1087773 - DNA, 15 bp, Homo sapiens
ctggggacagctttt

SEQ ID NO: 1087774 - DNA, 15 bp, Homo sapiens
cctggggacagcttt

SEQ ID NO: 1087775 - DNA, 15 bp, Homo sapiens
acctggggacagctt

SEQ ID NO: 1087776 - DNA, 15 bp, Homo sapiens
gacctggggacagct

SEQ ID NO: 1087777 - DNA, 15 bp, Homo sapiens
tgacctggggacagc

SEQ ID NO: 1087778 - DNA, 15 bp, Homo sapiens
gtgacctggggacag

SEQ ID NO: 1087779 - DNA, 15 bp, Homo sapiens
tgtgacctggggaca

SEQ ID NO: 1087780 - DNA, 15 bp, Homo sapiens
ctgtgacctggggac

SEQ ID NO: 1087781 - DNA, 15 bp, Homo sapiens
tctgtgacctgggga

SEQ ID NO: 1087782 - DNA, 15 bp, Homo sapiens
ttctgtgacctgggg

SEQ ID NO: 1087783 - DNA, 15 bp, Homo sapiens
cttctgtgacctggg

SEQ ID NO: 1087784 - DNA, 15 bp, Homo sapiens
ccttctgtgacctgg

SEQ ID NO: 1087785 - DNA, 15 bp, Homo sapiens
cccttctgtgacctg

SEQ ID NO: 1087786 - DNA, 15 bp, Homo sapiens
tcccttctgtgacct

SEQ ID NO: 1087787 - DNA, 15 bp, Homo sapiens
ctcccttctgtgacc

SEQ ID NO: 1087788 - DNA, 15 bp, Homo sapiens
tctcccttctgtgac

SEQ ID NO: 1087789 - DNA, 15 bp, Homo sapiens
ctctcccttctgtga

SEQ ID NO: 1087790 - DNA, 15 bp, Homo sapiens
cctctcccttctgtg

SEQ ID NO: 1087791 - DNA, 15 bp, Homo sapiens
gtcctctcccttctg

SEQ ID NO: 1087792 - DNA, 15 bp, Homo sapiens
tgtcctctcccttct

SEQ ID NO: 1087793 - DNA, 15 bp, Homo sapiens
atgtcctctcccttc

SEQ ID NO: 1087794 - DNA, 15 bp, Homo sapiens
aatgtcctctccctt

SEQ ID NO: 1087795 - DNA, 15 bp, Homo sapiens
aaatgtcctctccct

SEQ ID NO: 1087796 - DNA, 15 bp, Homo sapiens
gaaatgtcctctccc

SEQ ID NO: 1087797 - DNA, 15 bp, Homo sapiens
ggaaatgtcctctcc

SEQ ID NO: 1087798 - DNA, 15 bp, Homo sapiens
gggaaatgtcctctc

SEQ ID NO: 1087799 - DNA, 15 bp, Homo sapiens
tgggaaatgtcctct

SEQ ID NO: 1087800 - DNA, 15 bp, Homo sapiens
gtgggaaatgtcctc

SEQ ID NO: 1087801 - DNA, 15 bp, Homo sapiens
agtgggaaatgtcct

SEQ ID NO: 1087802 - DNA, 15 bp, Homo sapiens
cagtgggaaatgtcc

SEQ ID NO: 1087803 - DNA, 15 bp, Homo sapiens
tcagtgggaaatgtc

SEQ ID NO: 1087804 - DNA, 15 bp, Homo sapiens
ttcagtgggaaatgt

SEQ ID NO: 1087805 - DNA, 15 bp, Homo sapiens
attcagtgggaaatg

SEQ ID NO: 1087806 - DNA, 15 bp, Homo sapiens
gattcagtgggaaat

SEQ ID NO: 1087807 - DNA, 15 bp, Homo sapiens
agattcagtgggaaa

SEQ ID NO: 1087808 - DNA, 15 bp, Homo sapiens
cagattcagtgggaa

SEQ ID NO: 1087809 - DNA, 15 bp, Homo sapiens
acagattcagtggga

SEQ ID NO: 1087810 - DNA, 15 bp, Homo sapiens
gacagattcagtggg

SEQ ID NO: 1087811 - DNA, 15 bp, Homo sapiens
agacagattcagtgg

SEQ ID NO: 1087812 - DNA, 15 bp, Homo sapiens
cagacagattcagtg

SEQ ID NO: 1087813 - DNA, 15 bp, Homo sapiens
tcagacagattcagt

SEQ ID NO: 1087814 - DNA, 15 bp, Homo sapiens
cttcagacagattca

SEQ ID NO: 1087815 - DNA, 15 bp, Homo sapiens
ccttcagacagattc

SEQ ID NO: 1087816 - DNA, 15 bp, Homo sapiens
tccttcagacagatt

SEQ ID NO: 1087817 - DNA, 15 bp, Homo sapiens
gtccttcagacagat

SEQ ID NO: 1087818 - DNA, 15 bp, Homo sapiens
tgtccttcagacaga

SEQ ID NO: 1087819 - DNA, 15 bp, Homo sapiens
gtgtccttcagacag

SEQ ID NO: 1087820 - DNA, 15 bp, Homo sapiens
agtgtccttcagaca

SEQ ID NO: 1087821 - DNA, 15 bp, Homo sapiens
tagtgtccttcagac

SEQ ID NO: 1087822 - DNA, 15 bp, Homo sapiens
ttagtgtccttcaga

SEQ ID NO: 1087823 - DNA, 15 bp, Homo sapiens
cttagtgtccttcag

SEQ ID NO: 1087824 - DNA, 15 bp, Homo sapiens
gcttagtgtccttca

SEQ ID NO: 1087825 - DNA, 15 bp, Homo sapiens
ggcttagtgtccttc

SEQ ID NO: 1087826 - DNA, 15 bp, Homo sapiens
gggcttagtgtcctt

SEQ ID NO: 1087827 - DNA, 15 bp, Homo sapiens
ggggcttagtgtcct

SEQ ID NO: 1087828 - DNA, 15 bp, Homo sapiens
tggggcttagtgtcc

SEQ ID NO: 1087829 - DNA, 15 bp, Homo sapiens
gtggggcttagtgtc

SEQ ID NO: 1087830 - DNA, 15 bp, Homo sapiens
tgtggggcttagtgt

SEQ ID NO: 1087831 - DNA, 15 bp, Homo sapiens
ctgtggggcttagtg

SEQ ID NO: 1087832 - DNA, 15 bp, Homo sapiens
gctgtggggcttagt

SEQ ID NO: 1087833 - DNA, 15 bp, Homo sapiens
agctgtggggcttag

SEQ ID NO: 1087834 - DNA, 15 bp, Homo sapiens
gagctgtggggctta

SEQ ID NO: 1087835 - DNA, 15 bp, Homo sapiens
tgagctgtggggctt

SEQ ID NO: 1087836 - DNA, 15 bp, Homo sapiens
ttgagctgtggggct

SEQ ID NO: 1087837 - DNA, 15 bp, Homo sapiens
gttgagctgtggggc

SEQ ID NO: 1087838 - DNA, 15 bp, Homo sapiens
tgttgagctgtgggg

SEQ ID NO: 1087839 - DNA, 15 bp, Homo sapiens
gtgttgagctgtggg

SEQ ID NO: 1087840 - DNA, 15 bp, Homo sapiens
tgtgttgagctgtgg

SEQ ID NO: 1087841 - DNA, 15 bp, Homo sapiens
ttgtgttgagctgtg

SEQ ID NO: 1087842 - DNA, 15 bp, Homo sapiens
gttgtgttgagctgt

SEQ ID NO: 1087843 - DNA, 15 bp, Homo sapiens
ggttgtgttgagctg

SEQ ID NO: 1087844 - DNA, 15 bp, Homo sapiens
tggttgtgttgagct

SEQ ID NO: 1087845 - DNA, 15 bp, Homo sapiens
ctggttgtgttgagc

SEQ ID NO: 1087846 - DNA, 15 bp, Homo sapiens
cctggttgtgttgag

SEQ ID NO: 1087847 - DNA, 15 bp, Homo sapiens
tcctggttgtgttga

SEQ ID NO: 1087848 - DNA, 15 bp, Homo sapiens
ctcctggttgtgttg

SEQ ID NO: 1087849 - DNA, 15 bp, Homo sapiens
tctcctggttgtgtt

SEQ ID NO: 1087850 - DNA, 15 bp, Homo sapiens
ctctcctggttgtgt

SEQ ID NO: 1087851 - DNA, 15 bp, Homo sapiens
tctctcctggttgtg

SEQ ID NO: 1087852 - DNA, 15 bp, Homo sapiens
ttctctcctggttgt

SEQ ID NO: 1087853 - DNA, 15 bp, Homo sapiens
tttctctcctggttg

SEQ ID NO: 1087854 - DNA, 15 bp, Homo sapiens
ctttctctcctggtt

SEQ ID NO: 1087855 - DNA, 15 bp, Homo sapiens
gctttctctcctggt

SEQ ID NO: 1087856 - DNA, 15 bp, Homo sapiens
cgctttctctcctgg

SEQ ID NO: 1087857 - DNA, 15 bp, Homo sapiens
gcgctttctctcctg

SEQ ID NO: 1087858 - DNA, 15 bp, Homo sapiens
agcgctttctctcct

SEQ ID NO: 1087859 - DNA, 15 bp, Homo sapiens
cagcgctttctctcc

SEQ ID NO: 1087860 - DNA, 15 bp, Homo sapiens
tcagcgctttctctc

SEQ ID NO: 1087861 - DNA, 15 bp, Homo sapiens
ctcagcgctttctct

SEQ ID NO: 1087862 - DNA, 15 bp, Homo sapiens
cctcagcgctttctc

SEQ ID NO: 1087863 - DNA, 15 bp, Homo sapiens
tcctcagcgctttct

SEQ ID NO: 1087864 - DNA, 15 bp, Homo sapiens
gtcctcagcgctttc

SEQ ID NO: 1087865 - DNA, 15 bp, Homo sapiens
cgtcctcagcgcttt

SEQ ID NO: 1087866 - DNA, 15 bp, Homo sapiens
gcgtcctcagcgctt

SEQ ID NO: 1087867 - DNA, 15 bp, Homo sapiens
ggcgtcctcagcgct

SEQ ID NO: 1087868 - DNA, 15 bp, Homo sapiens
tggcgtcctcagcgc

SEQ ID NO: 1087869 - DNA, 15 bp, Homo sapiens
gtggcgtcctcagcg

SEQ ID NO: 1087870 - DNA, 15 bp, Homo sapiens
ggtggcgtcctcagc

SEQ ID NO: 1087871 - DNA, 15 bp, Homo sapiens
gggtggcgtcctcag

SEQ ID NO: 1087872 - DNA, 15 bp, Homo sapiens
tgggtggcgtcctca

SEQ ID NO: 1087873 - DNA, 15 bp, Homo sapiens
ttgggtggcgtcctc

SEQ ID NO: 1087874 - DNA, 15 bp, Homo sapiens
cttgggtggcgtcct

SEQ ID NO: 1087875 - DNA, 15 bp, Homo sapiens
gcttgggtggcgtcc

SEQ ID NO: 1087876 - DNA, 15 bp, Homo sapiens
cgcttgggtggcgtc

SEQ ID NO: 1087877 - DNA, 15 bp, Homo sapiens
gcgcttgggtggcgt

SEQ ID NO: 1087878 - DNA, 15 bp, Homo sapiens
ggcgcttgggtggcg

SEQ ID NO: 1087879 - DNA, 15 bp, Homo sapiens
gggcgcttgggtggc

SEQ ID NO: 1087880 - DNA, 15 bp, Homo sapiens
tgggcgcttgggtgg

SEQ ID NO: 1087881 - DNA, 15 bp, Homo sapiens
ctgggcgcttgggtg

SEQ ID NO: 1087882 - DNA, 15 bp, Homo sapiens
gctgggcgcttgggt

SEQ ID NO: 1087883 - DNA, 15 bp, Homo sapiens
tgctgggcgcttggg

SEQ ID NO: 1087884 - DNA, 15 bp, Homo sapiens
ttgctgggcgcttgg

SEQ ID NO: 1087885 - DNA, 15 bp, Homo sapiens
attgctgggcgcttg

SEQ ID NO: 1087886 - DNA, 15 bp, Homo sapiens
cattgctgggcgctt

SEQ ID NO: 1087887 - DNA, 15 bp, Homo sapiens
ccattgctgggcgct

SEQ ID NO: 1087888 - DNA, 15 bp, Homo sapiens
gccattgctgggcgc

SEQ ID NO: 1087889 - DNA, 15 bp, Homo sapiens
ggccattgctgggcg

SEQ ID NO: 1087890 - DNA, 15 bp, Homo sapiens
gggccattgctgggc

SEQ ID NO: 1087891 - DNA, 15 bp, Homo sapiens
agggccattgctggg

SEQ ID NO: 1087892 - DNA, 15 bp, Homo sapiens
cagggccattgctgg

SEQ ID NO: 1087893 - DNA, 15 bp, Homo sapiens
gcagggccattgctg

SEQ ID NO: 1087894 - DNA, 15 bp, Homo sapiens
ggcagggccattgct

SEQ ID NO: 1087895 - DNA, 15 bp, Homo sapiens
aggcagggccattgc

SEQ ID NO: 1087896 - DNA, 15 bp, Homo sapiens
caggcagggccattg

SEQ ID NO: 1087897 - DNA, 15 bp, Homo sapiens
ccaggcagggccatt

SEQ ID NO: 1087898 - DNA, 15 bp, Homo sapiens
tccaggcagggccat

SEQ ID NO: 1087899 - DNA, 15 bp, Homo sapiens
ctccaggcagggcca

SEQ ID NO: 1087900 - DNA, 15 bp, Homo sapiens
tctccaggcagggcc

SEQ ID NO: 1087901 - DNA, 15 bp, Homo sapiens
ttctccaggcagggc

SEQ ID NO: 1087902 - DNA, 15 bp, Homo sapiens
gttctccaggcaggg

SEQ ID NO: 1087903 - DNA, 15 bp, Homo sapiens
tgttctccaggcagg

SEQ ID NO: 1087904 - DNA, 15 bp, Homo sapiens
atgttctccaggcag

SEQ ID NO: 1087905 - DNA, 15 bp, Homo sapiens
gatgttctccaggca

SEQ ID NO: 1087906 - DNA, 15 bp, Homo sapiens
ggatgttctccaggc

SEQ ID NO: 1087907 - DNA, 15 bp, Homo sapiens
tggatgttctccagg

SEQ ID NO: 1087908 - DNA, 15 bp, Homo sapiens
ctggatgttctccag

SEQ ID NO: 1087909 - DNA, 15 bp, Homo sapiens
cctggatgttctcca

SEQ ID NO: 1087910 - DNA, 15 bp, Homo sapiens
gcctggatgttctcc

SEQ ID NO: 1087911 - DNA, 15 bp, Homo sapiens
agcctggatgttctc

SEQ ID NO: 1087912 - DNA, 15 bp, Homo sapiens
gagcctggatgttct

SEQ ID NO: 1087913 - DNA, 15 bp, Homo sapiens
tgagcctggatgttc

SEQ ID NO: 1087914 - DNA, 15 bp, Homo sapiens
ctgagcctggatgtt

SEQ ID NO: 1087915 - DNA, 15 bp, Homo sapiens
actgagcctggatgt

SEQ ID NO: 1087916 - DNA, 15 bp, Homo sapiens
cactgagcctggatg

SEQ ID NO: 1087917 - DNA, 15 bp, Homo sapiens
tcactgagcctggat

SEQ ID NO: 1087918 - DNA, 15 bp, Homo sapiens
ctcactgagcctgga

SEQ ID NO: 1087919 - DNA, 15 bp, Homo sapiens
cctcactgagcctgg

SEQ ID NO: 1087920 - DNA, 15 bp, Homo sapiens
tcctcactgagcctg

SEQ ID NO: 1087921 - DNA, 15 bp, Homo sapiens
ttcctcactgagcct

SEQ ID NO: 1087922 - DNA, 15 bp, Homo sapiens
cttcctcactgagcc

SEQ ID NO: 1087923 - DNA, 15 bp, Homo sapiens
ccttcctcactgagc

SEQ ID NO: 1087924 - DNA, 15 bp, Homo sapiens
cccttcctcactgag

SEQ ID NO: 1087925 - DNA, 15 bp, Homo sapiens
acccttcctcactga

SEQ ID NO: 1087926 - DNA, 15 bp, Homo sapiens
gacccttcctcactg

SEQ ID NO: 1087927 - DNA, 15 bp, Homo sapiens
ggacccttcctcact

SEQ ID NO: 1087928 - DNA, 15 bp, Homo sapiens
tggacccttcctcac

SEQ ID NO: 1087929 - DNA, 15 bp, Homo sapiens
ctggacccttcctca

SEQ ID NO: 1087930 - DNA, 15 bp, Homo sapiens
tctggacccttcctc

SEQ ID NO: 1087931 - DNA, 15 bp, Homo sapiens
ttctggacccttcct

SEQ ID NO: 1087932 - DNA, 15 bp, Homo sapiens
cttctggacccttcc

SEQ ID NO: 1087933 - DNA, 15 bp, Homo sapiens
ccttctggacccttc

SEQ ID NO: 1087934 - DNA, 15 bp, Homo sapiens
cccttctggaccctt

SEQ ID NO: 1087935 - DNA, 15 bp, Homo sapiens
tcccttctggaccct

SEQ ID NO: 1087936 - DNA, 15 bp, Homo sapiens
ttcccttctggaccc

SEQ ID NO: 1087937 - DNA, 15 bp, Homo sapiens
attcccttctggacc

SEQ ID NO: 1087938 - DNA, 15 bp, Homo sapiens
cattcccttctggac

SEQ ID NO: 1087939 - DNA, 15 bp, Homo sapiens
gcattcccttctgga

SEQ ID NO: 1087940 - DNA, 15 bp, Homo sapiens
agcattcccttctgg

SEQ ID NO: 1087941 - DNA, 15 bp, Homo sapiens
aagcattcccttctg

SEQ ID NO: 1087942 - DNA, 15 bp, Homo sapiens
caagcattcccttct

SEQ ID NO: 1087943 - DNA, 15 bp, Homo sapiens
gcaagcattcccttc

SEQ ID NO: 1087944 - DNA, 15 bp, Homo sapiens
ggcaagcattccctt

SEQ ID NO: 1087945 - DNA, 15 bp, Homo sapiens
cggcaagcattccct

SEQ ID NO: 1087946 - DNA, 15 bp, Homo sapiens
tcggcaagcattccc

SEQ ID NO: 1087947 - DNA, 15 bp, Homo sapiens
gtcggcaagcattcc

SEQ ID NO: 1087948 - DNA, 15 bp, Homo sapiens
agtcggcaagcattc

SEQ ID NO: 1087949 - DNA, 15 bp, Homo sapiens
gagtcggcaagcatt

SEQ ID NO: 1087950 - DNA, 15 bp, Homo sapiens
cgagtcggcaagcat

SEQ ID NO: 1087951 - DNA, 15 bp, Homo sapiens
acgagtcggcaagca

SEQ ID NO: 1087952 - DNA, 15 bp, Homo sapiens
aacgagtcggcaagc

SEQ ID NO: 1087953 - DNA, 15 bp, Homo sapiens
caacgagtcggcaag

SEQ ID NO: 1087954 - DNA, 15 bp, Homo sapiens
ccaacgagtcggcaa

SEQ ID NO: 1087955 - DNA, 15 bp, Homo sapiens
tccaacgagtcggca

SEQ ID NO: 1087956 - DNA, 15 bp, Homo sapiens
ctccaacgagtcggc

SEQ ID NO: 1087957 - DNA, 15 bp, Homo sapiens
tctccaacgagtcgg

SEQ ID NO: 1087958 - DNA, 15 bp, Homo sapiens
ttctccaacgagtcg

SEQ ID NO: 1087959 - DNA, 15 bp, Homo sapiens
gttctccaacgagtc

SEQ ID NO: 1087960 - DNA, 15 bp, Homo sapiens
tgttctccaacgagt

SEQ ID NO: 1087961 - DNA, 15 bp, Homo sapiens
ttgttctccaacgag

SEQ ID NO: 1087962 - DNA, 15 bp, Homo sapiens
attgttctccaacga

SEQ ID NO: 1087963 - DNA, 15 bp, Homo sapiens
cattgttctccaacg

SEQ ID NO: 1087964 - DNA, 15 bp, Homo sapiens
tcattgttctccaac

SEQ ID NO: 1087965 - DNA, 15 bp, Homo sapiens
ttcattgttctccaa

SEQ ID NO: 1087966 - DNA, 15 bp, Homo sapiens
tttcattgttctcca

SEQ ID NO: 1087967 - DNA, 15 bp, Homo sapiens
ttttcattgttctcc

SEQ ID NO: 1087968 - DNA, 15 bp, Homo sapiens
cttttcattgttctc

SEQ ID NO: 1087969 - DNA, 15 bp, Homo sapiens
ccttttcattgttct

SEQ ID NO: 1087970 - DNA, 15 bp, Homo sapiens
tccttttcattgttc

SEQ ID NO: 1087971 - DNA, 15 bp, Homo sapiens
ctccttttcattgtt

SEQ ID NO: 1087972 - DNA, 15 bp, Homo sapiens
cctccttttcattgt

SEQ ID NO: 1087973 - DNA, 15 bp, Homo sapiens
tcctccttttcattg

SEQ ID NO: 1087974 - DNA, 15 bp, Homo sapiens
ttcctccttttcatt

SEQ ID NO: 1087975 - DNA, 15 bp, Homo sapiens
tttcctccttttcat

SEQ ID NO: 1087976 - DNA, 15 bp, Homo sapiens
gtttcctccttttca

SEQ ID NO: 1087977 - DNA, 15 bp, Homo sapiens
agtttcctccttttc

SEQ ID NO: 1087978 - DNA, 15 bp, Homo sapiens
cagtttcctcctttt

SEQ ID NO: 1087979 - DNA, 15 bp, Homo sapiens
acagtttcctccttt

SEQ ID NO: 1087980 - DNA, 15 bp, Homo sapiens
cacagtttcctcctt

SEQ ID NO: 1087981 - DNA, 15 bp, Homo sapiens
tcacagtttcctcct

SEQ ID NO: 1087982 - DNA, 15 bp, Homo sapiens
gtcacagtttcctcc

SEQ ID NO: 1087983 - DNA, 15 bp, Homo sapiens
agtcacagtttcctc

SEQ ID NO: 1087984 - DNA, 15 bp, Homo sapiens
cagtcacagtttcct

SEQ ID NO: 1087985 - DNA, 15 bp, Homo sapiens
tcagtcacagtttcc

SEQ ID NO: 1087986 - DNA, 15 bp, Homo sapiens
ttcagtcacagtttc

SEQ ID NO: 1087987 - DNA, 15 bp, Homo sapiens
gttcagtcacagttt

SEQ ID NO: 1087988 - DNA, 15 bp, Homo sapiens
ggttcagtcacagtt

SEQ ID NO: 1087989 - DNA, 15 bp, Homo sapiens
aggttcagtcacagt

SEQ ID NO: 1087990 - DNA, 15 bp, Homo sapiens
gaggttcagtcacag

SEQ ID NO: 1087991 - DNA, 15 bp, Homo sapiens
tgaggttcagtcaca

SEQ ID NO: 1087992 - DNA, 15 bp, Homo sapiens
ttgaggttcagtcac

SEQ ID NO: 1087993 - DNA, 15 bp, Homo sapiens
tttgaggttcagtca

SEQ ID NO: 1087994 - DNA, 15 bp, Homo sapiens
gtttgaggttcagtc

SEQ ID NO: 1087995 - DNA, 15 bp, Homo sapiens
ggtttgaggttcagt

SEQ ID NO: 1087996 - DNA, 15 bp, Homo sapiens
gggtttgaggttcag

SEQ ID NO: 1087997 - DNA, 15 bp, Homo sapiens
ggggtttgaggttca

SEQ ID NO: 1087998 - DNA, 15 bp, Homo sapiens
tggggtttgaggttc

SEQ ID NO: 1087999 - DNA, 15 bp, Homo sapiens
ttggggtttgaggtt

SEQ ID NO: 1088000 - DNA, 15 bp, Homo sapiens
tttggggtttgaggt

SEQ ID NO: 1088001 - DNA, 15 bp, Homo sapiens
gtttggggtttgagg

SEQ ID NO: 1088002 - DNA, 15 bp, Homo sapiens
ggtttggggtttgag

SEQ ID NO: 1088003 - DNA, 15 bp, Homo sapiens
tggtttggggtttga

SEQ ID NO: 1088004 - DNA, 15 bp, Homo sapiens
ctggtttggggtttg

SEQ ID NO: 1088005 - DNA, 15 bp, Homo sapiens
gctggtttggggttt

SEQ ID NO: 1088006 - DNA, 15 bp, Homo sapiens
ggctggtttggggtt

SEQ ID NO: 1088007 - DNA, 15 bp, Homo sapiens
gggctggtttggggt

SEQ ID NO: 1088008 - DNA, 15 bp, Homo sapiens
cgggctggtttgggg

SEQ ID NO: 1088009 - DNA, 15 bp, Homo sapiens
tcgggctggtttggg

SEQ ID NO: 1088010 - DNA, 15 bp, Homo sapiens
ctcgggctggtttgg

SEQ ID NO: 1088011 - DNA, 15 bp, Homo sapiens
cctcgggctggtttg

SEQ ID NO: 1088012 - DNA, 15 bp, Homo sapiens
tcctcgggctggttt

SEQ ID NO: 1088013 - DNA, 15 bp, Homo sapiens
ctcctcgggctggtt

SEQ ID NO: 1088014 - DNA, 15 bp, Homo sapiens
tctcctcgggctggt

SEQ ID NO: 1088015 - DNA, 15 bp, Homo sapiens
ttctcctcgggctgg

SEQ ID NO: 1088016 - DNA, 15 bp, Homo sapiens
gttctcctcgggctg

SEQ ID NO: 1088017 - DNA, 15 bp, Homo sapiens
ggttctcctcgggct

SEQ ID NO: 1088018 - DNA, 15 bp, Homo sapiens
tggttctcctcgggc

SEQ ID NO: 1088019 - DNA, 15 bp, Homo sapiens
gtggttctcctcggg

SEQ ID NO: 1088020 - DNA, 15 bp, Homo sapiens
tgtggttctcctcgg

SEQ ID NO: 1088021 - DNA, 15 bp, Homo sapiens
atgtggttctcctcg

SEQ ID NO: 1088022 - DNA, 15 bp, Homo sapiens
aatgtggttctcctc

SEQ ID NO: 1088023 - DNA, 15 bp, Homo sapiens
gaatgtggttctcct

SEQ ID NO: 1088024 - DNA, 15 bp, Homo sapiens
agaatgtggttctcc

SEQ ID NO: 1088025 - DNA, 15 bp, Homo sapiens
gagaatgtggttctc

SEQ ID NO: 1088026 - DNA, 15 bp, Homo sapiens
ggagaatgtggttct

SEQ ID NO: 1088027 - DNA, 15 bp, Homo sapiens
gggagaatgtggttc

SEQ ID NO: 1088028 - DNA, 15 bp, Homo sapiens
tgggagaatgtggtt

SEQ ID NO: 1088029 - DNA, 15 bp, Homo sapiens
ctgggagaatgtggt

SEQ ID NO: 1088030 - DNA, 15 bp, Homo sapiens
cctgggagaatgtgg

SEQ ID NO: 1088031 - DNA, 15 bp, Homo sapiens
ccctgggagaatgtg

SEQ ID NO: 1088032 - DNA, 15 bp, Homo sapiens
tccctgggagaatgt

SEQ ID NO: 1088033 - DNA, 15 bp, Homo sapiens
gtccctgggagaatg

SEQ ID NO: 1088034 - DNA, 15 bp, Homo sapiens
ggtccctgggagaat

SEQ ID NO: 1088035 - DNA, 15 bp, Homo sapiens
gggtccctgggagaa

SEQ ID NO: 1088036 - DNA, 15 bp, Homo sapiens
tgggtccctgggaga

SEQ ID NO: 1088037 - DNA, 15 bp, Homo sapiens
ctgggtccctgggag

SEQ ID NO: 1088038 - DNA, 15 bp, Homo sapiens
cctgggtccctggga

SEQ ID NO: 1088039 - DNA, 15 bp, Homo sapiens
ccctgggtccctggg

SEQ ID NO: 1088040 - DNA, 15 bp, Homo sapiens
gccctgggtccctgg

SEQ ID NO: 1088041 - DNA, 15 bp, Homo sapiens
cgccctgggtccctg

SEQ ID NO: 1088042 - DNA, 15 bp, Homo sapiens
ccgccctgggtccct

SEQ ID NO: 1088043 - DNA, 15 bp, Homo sapiens
cccgccctgggtccc

SEQ ID NO: 1088044 - DNA, 15 bp, Homo sapiens
gcccgccctgggtcc

SEQ ID NO: 1088045 - DNA, 15 bp, Homo sapiens
ggcccgccctgggtc

SEQ ID NO: 1088046 - DNA, 15 bp, Homo sapiens
cggcccgccctgggt

SEQ ID NO: 1088047 - DNA, 15 bp, Homo sapiens
acggcccgccctggg

SEQ ID NO: 1088048 - DNA, 15 bp, Homo sapiens
cacggcccgccctgg

SEQ ID NO: 1088049 - DNA, 15 bp, Homo sapiens
tcacggcccgccctg

SEQ ID NO: 1088050 - DNA, 15 bp, Homo sapiens
gtcacggcccgccct

SEQ ID NO: 1088051 - DNA, 15 bp, Homo sapiens
ggtcacggcccgccc

SEQ ID NO: 1088052 - DNA, 15 bp, Homo sapiens
gggtcacggcccgcc

SEQ ID NO: 1088053 - DNA, 15 bp, Homo sapiens
ggggtcacggcccgc

SEQ ID NO: 1088054 - DNA, 15 bp, Homo sapiens
aggggtcacggcccg

SEQ ID NO: 1088055 - DNA, 15 bp, Homo sapiens
caggggtcacggccc

SEQ ID NO: 1088056 - DNA, 15 bp, Homo sapiens
gcaggggtcacggcc

SEQ ID NO: 1088057 - DNA, 15 bp, Homo sapiens
cgcaggggtcacggc

SEQ ID NO: 1088058 - DNA, 15 bp, Homo sapiens
ccgcaggggtcacgg

SEQ ID NO: 1088059 - DNA, 15 bp, Homo sapiens
gccgcaggggtcacg

SEQ ID NO: 1088060 - DNA, 15 bp, Homo sapiens
cgccgcaggggtcac

SEQ ID NO: 1088061 - DNA, 15 bp, Homo sapiens
ccgccgcaggggtca

SEQ ID NO: 1088062 - DNA, 15 bp, Homo sapiens
tccgccgcaggggtc

SEQ ID NO: 1088063 - DNA, 15 bp, Homo sapiens
ctccgccgcaggggt

SEQ ID NO: 1088064 - DNA, 15 bp, Homo sapiens
tctccgccgcagggg

SEQ ID NO: 1088065 - DNA, 15 bp, Homo sapiens
ttctccgccgcaggg

SEQ ID NO: 1088066 - DNA, 15 bp, Homo sapiens
cttctccgccgcagg

SEQ ID NO: 1088067 - DNA, 15 bp, Homo sapiens
gcttctccgccgcag

SEQ ID NO: 1088068 - DNA, 15 bp, Homo sapiens
ggcttctccgccgca

SEQ ID NO: 1088069 - DNA, 15 bp, Homo sapiens
aggcttctccgccgc

SEQ ID NO: 1088070 - DNA, 15 bp, Homo sapiens
aaggcttctccgccg

SEQ ID NO: 1088071 - DNA, 15 bp, Homo sapiens
caaggcttctccgcc

SEQ ID NO: 1088072 - DNA, 15 bp, Homo sapiens
ccaaggcttctccgc

SEQ ID NO: 1088073 - DNA, 15 bp, Homo sapiens
tccaaggcttctccg

SEQ ID NO: 1088074 - DNA, 15 bp, Homo sapiens
atccaaggcttctcc

SEQ ID NO: 1088075 - DNA, 15 bp, Homo sapiens
tatccaaggcttctc

SEQ ID NO: 1088076 - DNA, 15 bp, Homo sapiens
atatccaaggcttct

SEQ ID NO: 1088077 - DNA, 15 bp, Homo sapiens
aatatccaaggcttc

SEQ ID NO: 1088078 - DNA, 15 bp, Homo sapiens
aaatatccaaggctt

SEQ ID NO: 1088079 - DNA, 15 bp, Homo sapiens
gaaatatccaaggct

SEQ ID NO: 1088080 - DNA, 15 bp, Homo sapiens
ggaaatatccaaggc

SEQ ID NO: 1088081 - DNA, 15 bp, Homo sapiens
tggaaatatccaagg

SEQ ID NO: 1088082 - DNA, 15 bp, Homo sapiens
gtggaaatatccaag

SEQ ID NO: 1088083 - DNA, 15 bp, Homo sapiens
agtggaaatatccaa

SEQ ID NO: 1088084 - DNA, 15 bp, Homo sapiens
aagtggaaatatcca

SEQ ID NO: 1088085 - DNA, 15 bp, Homo sapiens
gaagtggaaatatcc

SEQ ID NO: 1088086 - DNA, 15 bp, Homo sapiens
tgaagtggaaatatc

SEQ ID NO: 1088087 - DNA, 15 bp, Homo sapiens
ctgaagtggaaatat

SEQ ID NO: 1088088 - DNA, 15 bp, Homo sapiens
tctgaagtggaaata

SEQ ID NO: 1088089 - DNA, 15 bp, Homo sapiens
ttctgaagtggaaat

SEQ ID NO: 1088090 - DNA, 15 bp, Homo sapiens
cttctgaagtggaaa

SEQ ID NO: 1088091 - DNA, 15 bp, Homo sapiens
gcttctgaagtggaa

SEQ ID NO: 1088092 - DNA, 15 bp, Homo sapiens
ggcttctgaagtgga

SEQ ID NO: 1088093 - DNA, 15 bp, Homo sapiens
aggcttctgaagtgg

SEQ ID NO: 1088094 - DNA, 15 bp, Homo sapiens
taggcttctgaagtg

SEQ ID NO: 1088095 - DNA, 15 bp, Homo sapiens
gtaggcttctgaagt

SEQ ID NO: 1088096 - DNA, 15 bp, Homo sapiens
agtaggcttctgaag

SEQ ID NO: 1088097 - DNA, 15 bp, Homo sapiens
cagtaggcttctgaa

SEQ ID NO: 1088098 - DNA, 15 bp, Homo sapiens
ccagtaggcttctga

SEQ ID NO: 1088099 - DNA, 15 bp, Homo sapiens
cccagtaggcttctg

SEQ ID NO: 1088100 - DNA, 15 bp, Homo sapiens
ccccagtaggcttct

SEQ ID NO: 1088101 - DNA, 15 bp, Homo sapiens
tccccagtaggcttc

SEQ ID NO: 1088102 - DNA, 15 bp, Homo sapiens
ttccccagtaggctt

SEQ ID NO: 1088103 - DNA, 15 bp, Homo sapiens
cttccccagtaggct

SEQ ID NO: 1088104 - DNA, 15 bp, Homo sapiens
ccttccccagtaggc

SEQ ID NO: 1088105 - DNA, 15 bp, Homo sapiens
gccttccccagtagg

SEQ ID NO: 1088106 - DNA, 15 bp, Homo sapiens
agccttccccagtag

SEQ ID NO: 1088107 - DNA, 15 bp, Homo sapiens
cagccttccccagta

SEQ ID NO: 1088108 - DNA, 15 bp, Homo sapiens
tcagccttccccagt

SEQ ID NO: 1088109 - DNA, 15 bp, Homo sapiens
ctcagccttccccag

SEQ ID NO: 1088110 - DNA, 15 bp, Homo sapiens
cctcagccttcccca

SEQ ID NO: 1088111 - DNA, 15 bp, Homo sapiens
ccctcagccttcccc

SEQ ID NO: 1088112 - DNA, 15 bp, Homo sapiens
cccctcagccttccc

SEQ ID NO: 1088113 - DNA, 15 bp, Homo sapiens
acccctcagccttcc

SEQ ID NO: 1088114 - DNA, 15 bp, Homo sapiens
gacccctcagccttc

SEQ ID NO: 1088115 - DNA, 15 bp, Homo sapiens
ggacccctcagcctt

SEQ ID NO: 1088116 - DNA, 15 bp, Homo sapiens
gggacccctcagcct

SEQ ID NO: 1088117 - DNA, 15 bp, Homo sapiens
tgggacccctcagcc

SEQ ID NO: 1088118 - DNA, 15 bp, Homo sapiens
ctgggacccctcagc

SEQ ID NO: 1088119 - DNA, 15 bp, Homo sapiens
gctgggacccctcag

SEQ ID NO: 1088120 - DNA, 15 bp, Homo sapiens
agctgggacccctca

SEQ ID NO: 1088121 - DNA, 15 bp, Homo sapiens
gagctgggacccctc

SEQ ID NO: 1088122 - DNA, 15 bp, Homo sapiens
ggagctgggacccct

SEQ ID NO: 1088123 - DNA, 15 bp, Homo sapiens
gggagctgggacccc

SEQ ID NO: 1088124 - DNA, 15 bp, Homo sapiens
ggggagctgggaccc

SEQ ID NO: 1088125 - DNA, 15 bp, Homo sapiens
tggggagctgggacc

SEQ ID NO: 1088126 - DNA, 15 bp, Homo sapiens
gtggggagctgggac

SEQ ID NO: 1088127 - DNA, 15 bp, Homo sapiens
cgtggggagctggga

SEQ ID NO: 1088128 - DNA, 15 bp, Homo sapiens
gcgtggggagctggg

SEQ ID NO: 1088129 - DNA, 15 bp, Homo sapiens
agcgtggggagctgg

SEQ ID NO: 1088130 - DNA, 15 bp, Homo sapiens
cagcgtggggagctg

SEQ ID NO: 1088131 - DNA, 15 bp, Homo sapiens
ccagcgtggggagct

SEQ ID NO: 1088132 - DNA, 15 bp, Homo sapiens
gccagcgtggggagc

SEQ ID NO: 1088133 - DNA, 15 bp, Homo sapiens
agccagcgtggggag

SEQ ID NO: 1088134 - DNA, 15 bp, Homo sapiens
cagccagcgtgggga

SEQ ID NO: 1088135 - DNA, 15 bp, Homo sapiens
gcagccagcgtgggg

SEQ ID NO: 1088136 - DNA, 15 bp, Homo sapiens
agcagccagcgtggg

SEQ ID NO: 1088137 - DNA, 15 bp, Homo sapiens
cagcagccagcgtgg

SEQ ID NO: 1088138 - DNA, 15 bp, Homo sapiens
acagcagccagcgtg

SEQ ID NO: 1088139 - DNA, 15 bp, Homo sapiens
cacagcagccagcgt

SEQ ID NO: 1088140 - DNA, 15 bp, Homo sapiens
gcacagcagccagcg

SEQ ID NO: 1088141 - DNA, 15 bp, Homo sapiens
tgcacagcagccagc

SEQ ID NO: 1088142 - DNA, 15 bp, Homo sapiens
ctgcacagcagccag

SEQ ID NO: 1088143 - DNA, 15 bp, Homo sapiens
tctgcacagcagcca

SEQ ID NO: 1088144 - DNA, 15 bp, Homo sapiens
atctgcacagcagcc

SEQ ID NO: 1088145 - DNA, 15 bp, Homo sapiens
catctgcacagcagc

SEQ ID NO: 1088146 - DNA, 15 bp, Homo sapiens
gcatctgcacagcag

SEQ ID NO: 1088147 - DNA, 15 bp, Homo sapiens
agcatctgcacagca

SEQ ID NO: 1088148 - DNA, 15 bp, Homo sapiens
cagcatctgcacagc

SEQ ID NO: 1088149 - DNA, 15 bp, Homo sapiens
ccagcatctgcacag

SEQ ID NO: 1088150 - DNA, 15 bp, Homo sapiens
tccagcatctgcaca

SEQ ID NO: 1088151 - DNA, 15 bp, Homo sapiens
gtccagcatctgcac

SEQ ID NO: 1088152 - DNA, 15 bp, Homo sapiens
cgtccagcatctgca

SEQ ID NO: 1088153 - DNA, 15 bp, Homo sapiens
tcgtccagcatctgc

SEQ ID NO: 1088154 - DNA, 15 bp, Homo sapiens
gtcgtccagcatctg

SEQ ID NO: 1088155 - DNA, 15 bp, Homo sapiens
tgtcgtccagcatct

SEQ ID NO: 1088156 - DNA, 15 bp, Homo sapiens
ctgtcgtccagcatc

SEQ ID NO: 1088157 - DNA, 15 bp, Homo sapiens
tctgtcgtccagcat

SEQ ID NO: 1088158 - DNA, 15 bp, Homo sapiens
ctctgtcgtccagca

SEQ ID NO: 1088159 - DNA, 15 bp, Homo sapiens
gctctgtcgtccagc

SEQ ID NO: 1088160 - DNA, 15 bp, Homo sapiens
ggctctgtcgtccag

SEQ ID NO: 1088161 - DNA, 15 bp, Homo sapiens
tggctctgtcgtcca

SEQ ID NO: 1088162 - DNA, 15 bp, Homo sapiens
ctggctctgtcgtcc

SEQ ID NO: 1088163 - DNA, 15 bp, Homo sapiens
cctggctctgtcgtc

SEQ ID NO: 1088164 - DNA, 15 bp, Homo sapiens
tcctggctctgtcgt

SEQ ID NO: 1088165 - DNA, 15 bp, Homo sapiens
atcctggctctgtcg

SEQ ID NO: 1088166 - DNA, 15 bp, Homo sapiens
catcctggctctgtc

SEQ ID NO: 1088167 - DNA, 15 bp, Homo sapiens
ccatcctggctctgt

SEQ ID NO: 1088168 - DNA, 15 bp, Homo sapiens
tccatcctggctctg

SEQ ID NO: 1088169 - DNA, 15 bp, Homo sapiens
ctccatcctggctct

SEQ ID NO: 1088170 - DNA, 15 bp, Homo sapiens
cctccatcctggctc

SEQ ID NO: 1088171 - DNA, 15 bp, Homo sapiens
gcctccatcctggct

SEQ ID NO: 1088172 - DNA, 15 bp, Homo sapiens
ggcctccatcctggc

SEQ ID NO: 1088173 - DNA, 15 bp, Homo sapiens
cggcctccatcctgg

SEQ ID NO: 1088174 - DNA, 15 bp, Homo sapiens
gcggcctccatcctg

SEQ ID NO: 1088175 - DNA, 15 bp, Homo sapiens
ggcggcctccatcct

SEQ ID NO: 1088176 - DNA, 15 bp, Homo sapiens
tggcggcctccatcc

SEQ ID NO: 1088177 - DNA, 15 bp, Homo sapiens
ttggcggcctccatc

SEQ ID NO: 1088178 - DNA, 15 bp, Homo sapiens
cttggcggcctccat

SEQ ID NO: 1088179 - DNA, 15 bp, Homo sapiens
tcttggcggcctcca

SEQ ID NO: 1088180 - DNA, 15 bp, Homo sapiens
ttcttggcggcctcc

SEQ ID NO: 1088181 - DNA, 15 bp, Homo sapiens
cttcttggcggcctc

SEQ ID NO: 1088182 - DNA, 15 bp, Homo sapiens
ccttcttggcggcct

SEQ ID NO: 1088183 - DNA, 15 bp, Homo sapiens
tccttcttggcggcc

SEQ ID NO: 1088184 - DNA, 15 bp, Homo sapiens
ctccttcttggcggc

SEQ ID NO: 1088185 - DNA, 15 bp, Homo sapiens
tctccttcttggcgg

SEQ ID NO: 1088186 - DNA, 15 bp, Homo sapiens
ttctccttcttggcg

SEQ ID NO: 1088187 - DNA, 15 bp, Homo sapiens
cttctccttcttggc

SEQ ID NO: 1088188 - DNA, 15 bp, Homo sapiens
ccttctccttcttgg

SEQ ID NO: 1088189 - DNA, 15 bp, Homo sapiens
accttctccttcttg

SEQ ID NO: 1088190 - DNA, 15 bp, Homo sapiens
taccttctccttctt

SEQ ID NO: 1088191 - DNA, 15 bp, Homo sapiens
ataccttctccttct

SEQ ID NO: 1088192 - DNA, 15 bp, Homo sapiens
gataccttctccttc

SEQ ID NO: 1088193 - DNA, 15 bp, Homo sapiens
agataccttctcctt

SEQ ID NO: 1088194 - DNA, 15 bp, Homo sapiens
gagataccttctcct

SEQ ID NO: 1088195 - DNA, 15 bp, Homo sapiens
cgagataccttctcc

SEQ ID NO: 1088196 - DNA, 15 bp, Homo sapiens
gcgagataccttctc

SEQ ID NO: 1088197 - DNA, 15 bp, Homo sapiens
ggcgagataccttct

SEQ ID NO: 1088198 - DNA, 15 bp, Homo sapiens
gggcgagataccttc

SEQ ID NO: 1088199 - DNA, 15 bp, Homo sapiens
agggcgagatacctt

SEQ ID NO: 1088200 - DNA, 15 bp, Homo sapiens
gagggcgagatacct

SEQ ID NO: 1088201 - DNA, 15 bp, Homo sapiens
ggagggcgagatacc

SEQ ID NO: 1088202 - DNA, 15 bp, Homo sapiens
tggagggcgagatac

SEQ ID NO: 1088203 - DNA, 15 bp, Homo sapiens
atggagggcgagata

SEQ ID NO: 1088204 - DNA, 15 bp, Homo sapiens
aatggagggcgagat

SEQ ID NO: 1088205 - DNA, 15 bp, Homo sapiens
caatggagggcgaga

SEQ ID NO: 1088206 - DNA, 15 bp, Homo sapiens
ccaatggagggcgag

SEQ ID NO: 1088207 - DNA, 15 bp, Homo sapiens
cccaatggagggcga

SEQ ID NO: 1088208 - DNA, 15 bp, Homo sapiens
gcccaatggagggcg

SEQ ID NO: 1088209 - DNA, 15 bp, Homo sapiens
tgcccaatggagggc

SEQ ID NO: 1088210 - DNA, 15 bp, Homo sapiens
atgcccaatggaggg

SEQ ID NO: 1088211 - DNA, 15 bp, Homo sapiens
aatgcccaatggagg

SEQ ID NO: 1088212 - DNA, 15 bp, Homo sapiens
gaatgcccaatggag

SEQ ID NO: 1088213 - DNA, 15 bp, Homo sapiens
agaatgcccaatgga

SEQ ID NO: 1088214 - DNA, 15 bp, Homo sapiens
cagaatgcccaatgg

SEQ ID NO: 1088215 - DNA, 15 bp, Homo sapiens
ccagaatgcccaatg

SEQ ID NO: 1088216 - DNA, 15 bp, Homo sapiens
cccagaatgcccaat

SEQ ID NO: 1088217 - DNA, 15 bp, Homo sapiens
tcccagaatgcccaa

SEQ ID NO: 1088218 - DNA, 15 bp, Homo sapiens
ctcccagaatgccca

SEQ ID NO: 1088219 - DNA, 15 bp, Homo sapiens
actcccagaatgccc

SEQ ID NO: 1088220 - DNA, 15 bp, Homo sapiens
cactcccagaatgcc

SEQ ID NO: 1088221 - DNA, 15 bp, Homo sapiens
acactcccagaatgc

SEQ ID NO: 1088222 - DNA, 15 bp, Homo sapiens
aacactcccagaatg

SEQ ID NO: 1088223 - DNA, 15 bp, Homo sapiens
aaacactcccagaat

SEQ ID NO: 1088224 - DNA, 15 bp, Homo sapiens
caaacactcccagaa

SEQ ID NO: 1088225 - DNA, 15 bp, Homo sapiens
gcaaacactcccaga

SEQ ID NO: 1088226 - DNA, 15 bp, Homo sapiens
agcaaacactcccag

SEQ ID NO: 1088227 - DNA, 15 bp, Homo sapiens
aagcaaacactccca

SEQ ID NO: 1088228 - DNA, 15 bp, Homo sapiens
caagcaaacactccc

SEQ ID NO: 1088229 - DNA, 15 bp, Homo sapiens
gcaagcaaacactcc

SEQ ID NO: 1088230 - DNA, 15 bp, Homo sapiens
ggcaagcaaacactc

SEQ ID NO: 1088231 - DNA, 15 bp, Homo sapiens
aggcaagcaaacact

SEQ ID NO: 1088232 - DNA, 15 bp, Homo sapiens
caggcaagcaaacac

SEQ ID NO: 1088233 - DNA, 15 bp, Homo sapiens
acaggcaagcaaaca

SEQ ID NO: 1088234 - DNA, 15 bp, Homo sapiens
gacaggcaagcaaac

SEQ ID NO: 1088235 - DNA, 15 bp, Homo sapiens
ggacaggcaagcaaa

SEQ ID NO: 1088236 - DNA, 15 bp, Homo sapiens
gggacaggcaagcaa

SEQ ID NO: 1088237 - DNA, 15 bp, Homo sapiens
ggggacaggcaagca

SEQ ID NO: 1088238 - DNA, 15 bp, Homo sapiens
tggggacaggcaagc

SEQ ID NO: 1088239 - DNA, 15 bp, Homo sapiens
ttggggacaggcaag

SEQ ID NO: 1088240 - DNA, 15 bp, Homo sapiens
gttggggacaggcaa

SEQ ID NO: 1088241 - DNA, 15 bp, Homo sapiens
tgttggggacaggca

SEQ ID NO: 1088242 - DNA, 15 bp, Homo sapiens
atgttggggacaggc

SEQ ID NO: 1088243 - DNA, 15 bp, Homo sapiens
aatgttggggacagg

SEQ ID NO: 1088244 - DNA, 15 bp, Homo sapiens
gaatgttggggacag

SEQ ID NO: 1088245 - DNA, 15 bp, Homo sapiens
ggaatgttggggaca

SEQ ID NO: 1088246 - DNA, 15 bp, Homo sapiens
tggaatgttggggac

SEQ ID NO: 1088247 - DNA, 15 bp, Homo sapiens
atggaatgttgggga

SEQ ID NO: 1088248 - DNA, 15 bp, Homo sapiens
catggaatgttgggg

SEQ ID NO: 1088249 - DNA, 15 bp, Homo sapiens
ccatggaatgttggg

SEQ ID NO: 1088250 - DNA, 15 bp, Homo sapiens
accatggaatgttgg

SEQ ID NO: 1088251 - DNA, 15 bp, Homo sapiens
aaccatggaatgttg

SEQ ID NO: 1088252 - DNA, 15 bp, Homo sapiens
aaaccatggaatgtt

SEQ ID NO: 1088253 - DNA, 15 bp, Homo sapiens
caaaccatggaatgt

SEQ ID NO: 1088254 - DNA, 15 bp, Homo sapiens
acaaaccatggaatg

SEQ ID NO: 1088255 - DNA, 15 bp, Homo sapiens
aacaaaccatggaat

SEQ ID NO: 1088256 - DNA, 15 bp, Homo sapiens
aaacaaaccatggaa

SEQ ID NO: 1088257 - DNA, 15 bp, Homo sapiens
caaacaaaccatgga

SEQ ID NO: 1088258 - DNA, 15 bp, Homo sapiens
tcaaacaaaccatgg

SEQ ID NO: 1088259 - DNA, 15 bp, Homo sapiens
ctcaaacaaaccatg

SEQ ID NO: 1088260 - DNA, 15 bp, Homo sapiens
gctcaaacaaaccat

SEQ ID NO: 1088261 - DNA, 15 bp, Homo sapiens
ggctcaaacaaacca

SEQ ID NO: 1088262 - DNA, 15 bp, Homo sapiens
aggctcaaacaaacc

SEQ ID NO: 1088263 - DNA, 15 bp, Homo sapiens
gaggctcaaacaaac

SEQ ID NO: 1088264 - DNA, 15 bp, Homo sapiens
tgaggctcaaacaaa

SEQ ID NO: 1088265 - DNA, 15 bp, Homo sapiens
ctgaggctcaaacaa

SEQ ID NO: 1088266 - DNA, 15 bp, Homo sapiens
tctgaggctcaaaca

SEQ ID NO: 1088267 - DNA, 15 bp, Homo sapiens
ttctgaggctcaaac

SEQ ID NO: 1088268 - DNA, 15 bp, Homo sapiens
attctgaggctcaaa

SEQ ID NO: 1088269 - DNA, 15 bp, Homo sapiens
gattctgaggctcaa

SEQ ID NO: 1088270 - DNA, 15 bp, Homo sapiens
agattctgaggctca

SEQ ID NO: 1088271 - DNA, 15 bp, Homo sapiens
cagattctgaggctc

SEQ ID NO: 1088272 - DNA, 15 bp, Homo sapiens
tcagattctgaggct

SEQ ID NO: 1088273 - DNA, 15 bp, Homo sapiens
atcagattctgaggc

SEQ ID NO: 1088274 - DNA, 15 bp, Homo sapiens
aatcagattctgagg

SEQ ID NO: 1088275 - DNA, 15 bp, Homo sapiens
aaatcagattctgag

SEQ ID NO: 1088276 - DNA, 15 bp, Homo sapiens
aaaatcagattctga

SEQ ID NO: 1088277 - DNA, 15 bp, Homo sapiens
taaaatcagattctg

SEQ ID NO: 1088278 - DNA, 15 bp, Homo sapiens
ataaaatcagattct

SEQ ID NO: 1088279 - DNA, 15 bp, Homo sapiens
cataaaatcagattc

SEQ ID NO: 1088280 - DNA, 15 bp, Homo sapiens
gcataaaatcagatt

SEQ ID NO: 1088281 - DNA, 15 bp, Homo sapiens
tgcataaaatcagat

SEQ ID NO: 1088282 - DNA, 15 bp, Homo sapiens
gtgcataaaatcaga

SEQ ID NO: 1088283 - DNA, 15 bp, Homo sapiens
tgtgcataaaatcag

SEQ ID NO: 1088284 - DNA, 15 bp, Homo sapiens
ctgtgcataaaatca

SEQ ID NO: 1088285 - DNA, 15 bp, Homo sapiens
cctgtgcataaaatc

SEQ ID NO: 1088286 - DNA, 15 bp, Homo sapiens
gcctgtgcataaaat

SEQ ID NO: 1088287 - DNA, 15 bp, Homo sapiens
agcctgtgcataaaa

SEQ ID NO: 1088288 - DNA, 15 bp, Homo sapiens
gagcctgtgcataaa

SEQ ID NO: 1088289 - DNA, 15 bp, Homo sapiens
agagcctgtgcataa

SEQ ID NO: 1088290 - DNA, 15 bp, Homo sapiens
aagagcctgtgcata

SEQ ID NO: 1088291 - DNA, 15 bp, Homo sapiens
aaagagcctgtgcat

SEQ ID NO: 1088292 - DNA, 15 bp, Homo sapiens
caaagagcctgtgca

SEQ ID NO: 1088293 - DNA, 15 bp, Homo sapiens
tcaaagagcctgtgc

SEQ ID NO: 1088294 - DNA, 15 bp, Homo sapiens
ctcaaagagcctgtg

SEQ ID NO: 1088295 - DNA, 15 bp, Homo sapiens
tctcaaagagcctgt

SEQ ID NO: 1088296 - DNA, 15 bp, Homo sapiens
ttctcaaagagcctg

SEQ ID NO: 1088297 - DNA, 15 bp, Homo sapiens
cttctcaaagagcct

SEQ ID NO: 1088298 - DNA, 15 bp, Homo sapiens
ccttctcaaagagcc

SEQ ID NO: 1088299 - DNA, 15 bp, Homo sapiens
cccttctcaaagagc

SEQ ID NO: 1088300 - DNA, 15 bp, Homo sapiens
acccttctcaaagag

SEQ ID NO: 1088301 - DNA, 15 bp, Homo sapiens
gacccttctcaaaga

SEQ ID NO: 1088302 - DNA, 15 bp, Homo sapiens
agacccttctcaaag

SEQ ID NO: 1088303 - DNA, 15 bp, Homo sapiens
aagacccttctcaaa

SEQ ID NO: 1088304 - DNA, 15 bp, Homo sapiens
caagacccttctcaa

SEQ ID NO: 1088305 - DNA, 15 bp, Homo sapiens
gcaagacccttctca

SEQ ID NO: 1088306 - DNA, 15 bp, Homo sapiens
ggcaagacccttctc

SEQ ID NO: 1088307 - DNA, 15 bp, Homo sapiens
tggcaagacccttct

SEQ ID NO: 1088308 - DNA, 15 bp, Homo sapiens
ctggcaagacccttc

SEQ ID NO: 1088309 - DNA, 15 bp, Homo sapiens
cctggcaagaccctt

SEQ ID NO: 1088310 - DNA, 15 bp, Homo sapiens
ccctggcaagaccct

SEQ ID NO: 1088311 - DNA, 15 bp, Homo sapiens
cccctggcaagaccc

SEQ ID NO: 1088312 - DNA, 15 bp, Homo sapiens
acccctggcaagacc

SEQ ID NO: 1088313 - DNA, 15 bp, Homo sapiens
cacccctggcaagac

SEQ ID NO: 1088314 - DNA, 15 bp, Homo sapiens
gcacccctggcaaga

SEQ ID NO: 1088315 - DNA, 15 bp, Homo sapiens
ggcacccctggcaag

SEQ ID NO: 1088316 - DNA, 15 bp, Homo sapiens
aggcacccctggcaa

SEQ ID NO: 1088317 - DNA, 15 bp, Homo sapiens
aaggcacccctggca

SEQ ID NO: 1088318 - DNA, 15 bp, Homo sapiens
gaaggcacccctggc

SEQ ID NO: 1088319 - DNA, 15 bp, Homo sapiens
agaaggcacccctgg

SEQ ID NO: 1088320 - DNA, 15 bp, Homo sapiens
cagaaggcacccctg

SEQ ID NO: 1088321 - DNA, 15 bp, Homo sapiens
ccagaaggcacccct

SEQ ID NO: 1088322 - DNA, 15 bp, Homo sapiens
cccagaaggcacccc

SEQ ID NO: 1088323 - DNA, 15 bp, Homo sapiens
ccccagaaggcaccc

SEQ ID NO: 1088324 - DNA, 15 bp, Homo sapiens
gccccagaaggcacc

SEQ ID NO: 1088325 - DNA, 15 bp, Homo sapiens
tgccccagaaggcac

SEQ ID NO: 1088326 - DNA, 15 bp, Homo sapiens
ctgccccagaaggca

SEQ ID NO: 1088327 - DNA, 15 bp, Homo sapiens
cctgccccagaaggc

SEQ ID NO: 1088328 - DNA, 15 bp, Homo sapiens
tcctgccccagaagg

SEQ ID NO: 1088329 - DNA, 15 bp, Homo sapiens
ttcctgccccagaag

SEQ ID NO: 1088330 - DNA, 15 bp, Homo sapiens
cttcctgccccagaa

SEQ ID NO: 1088331 - DNA, 15 bp, Homo sapiens
ccttcctgccccaga

SEQ ID NO: 1088332 - DNA, 15 bp, Homo sapiens
gccttcctgccccag

SEQ ID NO: 1088333 - DNA, 15 bp, Homo sapiens
ggccttcctgcccca

SEQ ID NO: 1088334 - DNA, 15 bp, Homo sapiens
gggccttcctgcccc

SEQ ID NO: 1088335 - DNA, 15 bp, Homo sapiens
ggggccttcctgccc

SEQ ID NO: 1088336 - DNA, 15 bp, Homo sapiens
aggggccttcctgcc

SEQ ID NO: 1088337 - DNA, 15 bp, Homo sapiens
taggggccttcctgc

SEQ ID NO: 1088338 - DNA, 15 bp, Homo sapiens
gtaggggccttcctg

SEQ ID NO: 1088339 - DNA, 15 bp, Homo sapiens
agtaggggccttcct

SEQ ID NO: 1088340 - DNA, 15 bp, Homo sapiens
cagtaggggccttcc

SEQ ID NO: 1088341 - DNA, 15 bp, Homo sapiens
gcagtaggggccttc

SEQ ID NO: 1088342 - DNA, 15 bp, Homo sapiens
ggcagtaggggcctt

SEQ ID NO: 1088343 - DNA, 15 bp, Homo sapiens
aggcagtaggggcct

SEQ ID NO: 1088344 - DNA, 15 bp, Homo sapiens
caggcagtaggggcc

SEQ ID NO: 1088345 - DNA, 15 bp, Homo sapiens
ccaggcagtaggggc

SEQ ID NO: 1088346 - DNA, 15 bp, Homo sapiens
gggtctgccaggcag

SEQ ID NO: 1088347 - DNA, 15 bp, Homo sapiens
tgggtctgccaggca

SEQ ID NO: 1088348 - DNA, 15 bp, Homo sapiens
atgggtctgccaggc

SEQ ID NO: 1088349 - DNA, 15 bp, Homo sapiens
gatgggtctgccagg

SEQ ID NO: 1088350 - DNA, 15 bp, Homo sapiens
ggatgggtctgccag

SEQ ID NO: 1088351 - DNA, 15 bp, Homo sapiens
tggatgggtctgcca

SEQ ID NO: 1088352 - DNA, 15 bp, Homo sapiens
ctggatgggtctgcc

SEQ ID NO: 1088353 - DNA, 15 bp, Homo sapiens
gctggatgggtctgc

SEQ ID NO: 1088354 - DNA, 15 bp, Homo sapiens
agctggatgggtctg

SEQ ID NO: 1088355 - DNA, 15 bp, Homo sapiens
aagctggatgggtct

SEQ ID NO: 1088356 - DNA, 15 bp, Homo sapiens
aaagctggatgggtc

SEQ ID NO: 1088357 - DNA, 15 bp, Homo sapiens
caaagctggatgggt

SEQ ID NO: 1088358 - DNA, 15 bp, Homo sapiens
ccaaagctggatggg

SEQ ID NO: 1088359 - DNA, 15 bp, Homo sapiens
tccaaagctggatgg

SEQ ID NO: 1088360 - DNA, 15 bp, Homo sapiens
gtccaaagctggatg

SEQ ID NO: 1088361 - DNA, 15 bp, Homo sapiens
agtccaaagctggat

SEQ ID NO: 1088362 - DNA, 15 bp, Homo sapiens
accagagtccaaagc

SEQ ID NO: 1088363 - DNA, 15 bp, Homo sapiens
gaccagagtccaaag

SEQ ID NO: 1088364 - DNA, 15 bp, Homo sapiens
ggaccagagtccaaa

SEQ ID NO: 1088365 - DNA, 15 bp, Homo sapiens
aggaccagagtccaa

SEQ ID NO: 1088366 - DNA, 15 bp, Homo sapiens
caggaccagagtcca

SEQ ID NO: 1088367 - DNA, 15 bp, Homo sapiens
gcaggaccagagtcc

SEQ ID NO: 1088368 - DNA, 15 bp, Homo sapiens
cgcaggaccagagtc

SEQ ID NO: 1088369 - DNA, 15 bp, Homo sapiens
tcgcaggaccagagt

SEQ ID NO: 1088370 - DNA, 15 bp, Homo sapiens
gtcgcaggaccagag

SEQ ID NO: 1088371 - DNA, 15 bp, Homo sapiens
ggtcgcaggaccaga

SEQ ID NO: 1088372 - DNA, 15 bp, Homo sapiens
gggtcgcaggaccag

SEQ ID NO: 1088373 - DNA, 15 bp, Homo sapiens
cgggtcgcaggacca

SEQ ID NO: 1088374 - DNA, 15 bp, Homo sapiens
ccgggtcgcaggacc

SEQ ID NO: 1088375 - DNA, 15 bp, Homo sapiens
tccgggtcgcaggac

SEQ ID NO: 1088376 - DNA, 15 bp, Homo sapiens
ttccgggtcgcagga

SEQ ID NO: 1088377 - DNA, 15 bp, Homo sapiens
cttccgggtcgcagg

SEQ ID NO: 1088378 - DNA, 15 bp, Homo sapiens
acttccgggtcgcag

SEQ ID NO: 1088379 - DNA, 15 bp, Homo sapiens
gacttccgggtcgca

SEQ ID NO: 1088380 - DNA, 15 bp, Homo sapiens
tgacttccgggtcgc

SEQ ID NO: 1088381 - DNA, 15 bp, Homo sapiens
ctgacttccgggtcg

SEQ ID NO: 1088382 - DNA, 15 bp, Homo sapiens
cctgacttccgggtc

SEQ ID NO: 1088383 - DNA, 15 bp, Homo sapiens
gcctgacttccgggt

SEQ ID NO: 1088384 - DNA, 15 bp, Homo sapiens
agcctgacttccggg

SEQ ID NO: 1088385 - DNA, 15 bp, Homo sapiens
cagcctgacttccgg

SEQ ID NO: 1088386 - DNA, 15 bp, Homo sapiens
gcagcctgacttccg

SEQ ID NO: 1088387 - DNA, 15 bp, Homo sapiens
ccagtggaggccact

SEQ ID NO: 1088388 - DNA, 15 bp, Homo sapiens
cccagtggaggccac

SEQ ID NO: 1088389 - DNA, 15 bp, Homo sapiens
ccccagtggaggcca

SEQ ID NO: 1088390 - DNA, 15 bp, Homo sapiens
tccccagtggaggcc

SEQ ID NO: 1088391 - DNA, 15 bp, Homo sapiens
ctccccagtggaggc

SEQ ID NO: 1088392 - DNA, 15 bp, Homo sapiens
cctccccagtggagg

SEQ ID NO: 1088393 - DNA, 15 bp, Homo sapiens
ccctccccagtggag

SEQ ID NO: 1088394 - DNA, 15 bp, Homo sapiens
cccctccccagtgga

SEQ ID NO: 1088395 - DNA, 15 bp, Homo sapiens
gcccctccccagtgg

SEQ ID NO: 1088396 - DNA, 15 bp, Homo sapiens
agcccctccccagtg

SEQ ID NO: 1088397 - DNA, 15 bp, Homo sapiens
gagcccctccccagt

SEQ ID NO: 1088398 - DNA, 15 bp, Homo sapiens
agagcccctccccag

SEQ ID NO: 1088399 - DNA, 15 bp, Homo sapiens
cagagcccctcccca

SEQ ID NO: 1088400 - DNA, 15 bp, Homo sapiens
ccagagcccctcccc

SEQ ID NO: 1088401 - DNA, 15 bp, Homo sapiens
tccagagcccctccc

SEQ ID NO: 1088402 - DNA, 15 bp, Homo sapiens
ctccagagcccctcc

SEQ ID NO: 1088403 - DNA, 15 bp, Homo sapiens
tctccagagcccctc

SEQ ID NO: 1088404 - DNA, 15 bp, Homo sapiens
ctctccagagcccct

SEQ ID NO: 1088405 - DNA, 15 bp, Homo sapiens
actctccagagcccc

SEQ ID NO: 1088406 - DNA, 15 bp, Homo sapiens
aactctccagagccc

SEQ ID NO: 1088407 - DNA, 15 bp, Homo sapiens
aaactctccagagcc

SEQ ID NO: 1088408 - DNA, 15 bp, Homo sapiens
taaactctccagagc

SEQ ID NO: 1088409 - DNA, 15 bp, Homo sapiens
ctaaactctccagag

SEQ ID NO: 1088410 - DNA, 15 bp, Homo sapiens
tctaaactctccaga

SEQ ID NO: 1088411 - DNA, 15 bp, Homo sapiens
ctctaaactctccag

SEQ ID NO: 1088412 - DNA, 15 bp, Homo sapiens
gctctaaactctcca

SEQ ID NO: 1088413 - DNA, 15 bp, Homo sapiens
ggctctaaactctcc

SEQ ID NO: 1088414 - DNA, 15 bp, Homo sapiens
gggctctaaactctc

SEQ ID NO: 1088415 - DNA, 15 bp, Homo sapiens
agggctctaaactct

SEQ ID NO: 1088416 - DNA, 15 bp, Homo sapiens
tagggctctaaactc

SEQ ID NO: 1088417 - DNA, 15 bp, Homo sapiens
ctagggctctaaact

SEQ ID NO: 1088418 - DNA, 15 bp, Homo sapiens
tctagggctctaaac

SEQ ID NO: 1088419 - DNA, 15 bp, Homo sapiens
atctagggctctaaa

SEQ ID NO: 1088420 - DNA, 15 bp, Homo sapiens
catctagggctctaa

SEQ ID NO: 1088421 - DNA, 15 bp, Homo sapiens
acatctagggctcta

SEQ ID NO: 1088422 - DNA, 15 bp, Homo sapiens
cacatctagggctct

SEQ ID NO: 1088423 - DNA, 15 bp, Homo sapiens
ccacatctagggctc

SEQ ID NO: 1088424 - DNA, 15 bp, Homo sapiens
cccacatctagggct

SEQ ID NO: 1088425 - DNA, 15 bp, Homo sapiens
ccccacatctagggc

SEQ ID NO: 1088426 - DNA, 15 bp, Homo sapiens
cccccacatctaggg

SEQ ID NO: 1088427 - DNA, 15 bp, Homo sapiens
acccccacatctagg

SEQ ID NO: 1088428 - DNA, 15 bp, Homo sapiens
aacccccacatctag

SEQ ID NO: 1088429 - DNA, 15 bp, Homo sapiens
taacccccacatcta

SEQ ID NO: 1088430 - DNA, 15 bp, Homo sapiens
ctaacccccacatct

SEQ ID NO: 1088431 - DNA, 15 bp, Homo sapiens
cctaacccccacatc

SEQ ID NO: 1088432 - DNA, 15 bp, Homo sapiens
ccctaacccccacat

SEQ ID NO: 1088433 - DNA, 15 bp, Homo sapiens
tccctaacccccaca

SEQ ID NO: 1088434 - DNA, 15 bp, Homo sapiens
gtccctaacccccac

SEQ ID NO: 1088435 - DNA, 15 bp, Homo sapiens
tgtccctaaccccca

SEQ ID NO: 1088436 - DNA, 15 bp, Homo sapiens
atgtccctaaccccc

SEQ ID NO: 1088437 - DNA, 15 bp, Homo sapiens
catgtccctaacccc

SEQ ID NO: 1088438 - DNA, 15 bp, Homo sapiens
tcatgtccctaaccc

SEQ ID NO: 1088439 - DNA, 15 bp, Homo sapiens
ctcatgtccctaacc

SEQ ID NO: 1088440 - DNA, 15 bp, Homo sapiens
cctcatgtccctaac

SEQ ID NO: 1088441 - DNA, 15 bp, Homo sapiens
acctcatgtccctaa

SEQ ID NO: 1088442 - DNA, 15 bp, Homo sapiens
gacctcatgtcccta

SEQ ID NO: 1088443 - DNA, 15 bp, Homo sapiens
agacctcatgtccct

SEQ ID NO: 1088444 - DNA, 15 bp, Homo sapiens
aagacctcatgtccc

SEQ ID NO: 1088445 - DNA, 15 bp, Homo sapiens
caagacctcatgtcc

SEQ ID NO: 1088446 - DNA, 15 bp, Homo sapiens
acaagacctcatgtc

SEQ ID NO: 1088447 - DNA, 15 bp, Homo sapiens
cacaagacctcatgt

SEQ ID NO: 1088448 - DNA, 15 bp, Homo sapiens
ccacaagacctcatg

SEQ ID NO: 1088449 - DNA, 15 bp, Homo sapiens
tccacaagacctcat

SEQ ID NO: 1088450 - DNA, 15 bp, Homo sapiens
gtccacaagacctca

SEQ ID NO: 1088451 - DNA, 15 bp, Homo sapiens
tgtccacaagacctc

SEQ ID NO: 1088452 - DNA, 15 bp, Homo sapiens
ttgtccacaagacct

SEQ ID NO: 1088453 - DNA, 15 bp, Homo sapiens
tttgtccacaagacc

SEQ ID NO: 1088454 - DNA, 15 bp, Homo sapiens
ctttgtccacaagac

SEQ ID NO: 1088455 - DNA, 15 bp, Homo sapiens
gctttgtccacaaga

SEQ ID NO: 1088456 - DNA, 15 bp, Homo sapiens
ggctttgtccacaag

SEQ ID NO: 1088457 - DNA, 15 bp, Homo sapiens
gggctttgtccacaa

SEQ ID NO: 1088458 - DNA, 15 bp, Homo sapiens
tgggctttgtccaca

SEQ ID NO: 1088459 - DNA, 15 bp, Homo sapiens
gtgggctttgtccac

SEQ ID NO: 1088460 - DNA, 15 bp, Homo sapiens
agtgggctttgtcca

SEQ ID NO: 1088461 - DNA, 15 bp, Homo sapiens
tagtgggctttgtcc

SEQ ID NO: 1088462 - DNA, 15 bp, Homo sapiens
gtagtgggctttgtc

SEQ ID NO: 1088463 - DNA, 15 bp, Homo sapiens
ggtagtgggctttgt

SEQ ID NO: 1088464 - DNA, 15 bp, Homo sapiens
aggtagtgggctttg

SEQ ID NO: 1088465 - DNA, 15 bp, Homo sapiens
caggtagtgggcttt

SEQ ID NO: 1088466 - DNA, 15 bp, Homo sapiens
tcaggtagtgggctt

SEQ ID NO: 1088467 - DNA, 15 bp, Homo sapiens
atcaggtagtgggct

SEQ ID NO: 1088468 - DNA, 15 bp, Homo sapiens
aatcaggtagtgggc

SEQ ID NO: 1088469 - DNA, 15 bp, Homo sapiens
aaatcaggtagtggg

SEQ ID NO: 1088470 - DNA, 15 bp, Homo sapiens
aaaatcaggtagtgg

SEQ ID NO: 1088471 - DNA, 15 bp, Homo sapiens
caaaatcaggtagtg

SEQ ID NO: 1088472 - DNA, 15 bp, Homo sapiens
tcaaaatcaggtagt

SEQ ID NO: 1088473 - DNA, 15 bp, Homo sapiens
ctcaaaatcaggtag

SEQ ID NO: 1088474 - DNA, 15 bp, Homo sapiens
tctcaaaatcaggta

SEQ ID NO: 1088475 - DNA, 15 bp, Homo sapiens
gtctcaaaatcaggt

SEQ ID NO: 1088476 - DNA, 15 bp, Homo sapiens
tgtctcaaaatcagg

SEQ ID NO: 1088477 - DNA, 15 bp, Homo sapiens
ttgtctcaaaatcag

SEQ ID NO: 1088478 - DNA, 15 bp, Homo sapiens
gttgtctcaaaatca

SEQ ID NO: 1088479 - DNA, 15 bp, Homo sapiens
tgttgtctcaaaatc

SEQ ID NO: 1088480 - DNA, 15 bp, Homo sapiens
gtgttgtctcaaaat

SEQ ID NO: 1088481 - DNA, 15 bp, Homo sapiens
agtgttgtctcaaaa

SEQ ID NO: 1088482 - DNA, 15 bp, Homo sapiens
gagtgttgtctcaaa

SEQ ID NO: 1088483 - DNA, 15 bp, Homo sapiens
tgagtgttgtctcaa

SEQ ID NO: 1088484 - DNA, 15 bp, Homo sapiens
gtgagtgttgtctca

SEQ ID NO: 1088485 - DNA, 15 bp, Homo sapiens
agtgagtgttgtctc

SEQ ID NO: 1088486 - DNA, 15 bp, Homo sapiens
tagtgagtgttgtct

SEQ ID NO: 1088487 - DNA, 15 bp, Homo sapiens
ctagtgagtgttgtc

SEQ ID NO: 1088488 - DNA, 15 bp, Homo sapiens
tctagtgagtgttgt

SEQ ID NO: 1088489 - DNA, 15 bp, Homo sapiens
gtctagtgagtgttg

SEQ ID NO: 1088490 - DNA, 15 bp, Homo sapiens
tgtctagtgagtgtt

SEQ ID NO: 1088491 - DNA, 15 bp, Homo sapiens
atgtctagtgagtgt

SEQ ID NO: 1088492 - DNA, 15 bp, Homo sapiens
catgtctagtgagtg

SEQ ID NO: 1088493 - DNA, 15 bp, Homo sapiens
ccatgtctagtgagt

SEQ ID NO: 1088494 - DNA, 15 bp, Homo sapiens
accatgtctagtgag

SEQ ID NO: 1088495 - DNA, 15 bp, Homo sapiens
caccatgtctagtga

SEQ ID NO: 1088496 - DNA, 15 bp, Homo sapiens
tcaccatgtctagtg

SEQ ID NO: 1088497 - DNA, 15 bp, Homo sapiens
gtcaccatgtctagt

SEQ ID NO: 1088498 - DNA, 15 bp, Homo sapiens
tgtcaccatgtctag

SEQ ID NO: 1088499 - DNA, 15 bp, Homo sapiens
ttgtcaccatgtcta

SEQ ID NO: 1088500 - DNA, 15 bp, Homo sapiens
cttgtcaccatgtct

SEQ ID NO: 1088501 - DNA, 15 bp, Homo sapiens
acttgtcaccatgtc

SEQ ID NO: 1088502 - DNA, 15 bp, Homo sapiens
gacttgtcaccatgt

SEQ ID NO: 1088503 - DNA, 15 bp, Homo sapiens
tgacttgtcaccatg

SEQ ID NO: 1088504 - DNA, 15 bp, Homo sapiens
ttgacttgtcaccat

SEQ ID NO: 1088505 - DNA, 15 bp, Homo sapiens
tttgacttgtcacca

SEQ ID NO: 1088506 - DNA, 15 bp, Homo sapiens
ctttgacttgtcacc

SEQ ID NO: 1088507 - DNA, 15 bp, Homo sapiens
tctttgacttgtcac

SEQ ID NO: 1088508 - DNA, 15 bp, Homo sapiens
atctttgacttgtca

SEQ ID NO: 1088509 - DNA, 15 bp, Homo sapiens
catctttgacttgtc

SEQ ID NO: 1088510 - DNA, 15 bp, Homo sapiens
gcatctttgacttgt

SEQ ID NO: 1088511 - DNA, 15 bp, Homo sapiens
ggcatctttgacttg

SEQ ID NO: 1088512 - DNA, 15 bp, Homo sapiens
aggcatctttgactt

SEQ ID NO: 1088513 - DNA, 15 bp, Homo sapiens
aaggcatctttgact

SEQ ID NO: 1088514 - DNA, 15 bp, Homo sapiens
caaggcatctttgac

SEQ ID NO: 1088515 - DNA, 15 bp, Homo sapiens
gcaaggcatctttga

SEQ ID NO: 1088516 - DNA, 15 bp, Homo sapiens
ggcaaggcatctttg

SEQ ID NO: 1088517 - DNA, 15 bp, Homo sapiens
aggcaaggcatcttt

SEQ ID NO: 1088518 - DNA, 15 bp, Homo sapiens
gaggcaaggcatctt

SEQ ID NO: 1088519 - DNA, 15 bp, Homo sapiens
ggaggcaaggcatct

SEQ ID NO: 1088520 - DNA, 15 bp, Homo sapiens
aggaggcaaggcatc

SEQ ID NO: 1088521 - DNA, 15 bp, Homo sapiens
taggaggcaaggcat

SEQ ID NO: 1088522 - DNA, 15 bp, Homo sapiens
gtaggaggcaaggca

SEQ ID NO: 1088523 - DNA, 15 bp, Homo sapiens
ggtaggaggcaaggc

SEQ ID NO: 1088524 - DNA, 15 bp, Homo sapiens
tggtaggaggcaagg

SEQ ID NO: 1088525 - DNA, 15 bp, Homo sapiens
ctggtaggaggcaag

SEQ ID NO: 1088526 - DNA, 15 bp, Homo sapiens
cctggtaggaggcaa

SEQ ID NO: 1088527 - DNA, 15 bp, Homo sapiens
tcctggtaggaggca

SEQ ID NO: 1088528 - DNA, 15 bp, Homo sapiens
ttcctggtaggaggc

SEQ ID NO: 1088529 - DNA, 15 bp, Homo sapiens
attcctggtaggagg

SEQ ID NO: 1088530 - DNA, 15 bp, Homo sapiens
gattcctggtaggag

SEQ ID NO: 1088531 - DNA, 15 bp, Homo sapiens
tgattcctggtagga

SEQ ID NO: 1088532 - DNA, 15 bp, Homo sapiens
gtgattcctggtagg

SEQ ID NO: 1088533 - DNA, 15 bp, Homo sapiens
agtgattcctggtag

SEQ ID NO: 1088534 - DNA, 15 bp, Homo sapiens
aagtgattcctggta

SEQ ID NO: 1088535 - DNA, 15 bp, Homo sapiens
gaagtgattcctggt

SEQ ID NO: 1088536 - DNA, 15 bp, Homo sapiens
cgaagtgattcctgg

SEQ ID NO: 1088537 - DNA, 15 bp, Homo sapiens
gcgaagtgattcctg

SEQ ID NO: 1088538 - DNA, 15 bp, Homo sapiens
tgcgaagtgattcct

SEQ ID NO: 1088539 - DNA, 15 bp, Homo sapiens
ctgcgaagtgattcc

SEQ ID NO: 1088540 - DNA, 15 bp, Homo sapiens
cctgcgaagtgattc

SEQ ID NO: 1088541 - DNA, 15 bp, Homo sapiens
ccctgcgaagtgatt

SEQ ID NO: 1088542 - DNA, 15 bp, Homo sapiens
tccctgcgaagtgat

SEQ ID NO: 1088543 - DNA, 15 bp, Homo sapiens
ctccctgcgaagtga

SEQ ID NO: 1088544 - DNA, 15 bp, Homo sapiens
gctccctgcgaagtg

SEQ ID NO: 1088545 - DNA, 15 bp, Homo sapiens
ggctccctgcgaagt

SEQ ID NO: 1088546 - DNA, 15 bp, Homo sapiens
gggctccctgcgaag

SEQ ID NO: 1088547 - DNA, 15 bp, Homo sapiens
cgggctccctgcgaa

SEQ ID NO: 1088548 - DNA, 15 bp, Homo sapiens
tcgggctccctgcga

SEQ ID NO: 1088549 - DNA, 15 bp, Homo sapiens
ctcgggctccctgcg

SEQ ID NO: 1088550 - DNA, 15 bp, Homo sapiens
cctcgggctccctgc

SEQ ID NO: 1088551 - DNA, 15 bp, Homo sapiens
ccctcgggctccctg

SEQ ID NO: 1088552 - DNA, 15 bp, Homo sapiens
gccctcgggctccct

SEQ ID NO: 1088553 - DNA, 15 bp, Homo sapiens
agccctcgggctccc

SEQ ID NO: 1088554 - DNA, 15 bp, Homo sapiens
cagccctcgggctcc

SEQ ID NO: 1088555 - DNA, 15 bp, Homo sapiens
gcagccctcgggctc

SEQ ID NO: 1088556 - DNA, 15 bp, Homo sapiens
agcagccctcgggct

SEQ ID NO: 1088557 - DNA, 15 bp, Homo sapiens
cagcagccctcgggc

SEQ ID NO: 1088558 - DNA, 15 bp, Homo sapiens
acagcagccctcggg

SEQ ID NO: 1088559 - DNA, 15 bp, Homo sapiens
cacagcagccctcgg

SEQ ID NO: 1088560 - DNA, 15 bp, Homo sapiens
ccacagcagccctcg

SEQ ID NO: 1088561 - DNA, 15 bp, Homo sapiens
gccacagcagccctc

SEQ ID NO: 1088562 - DNA, 15 bp, Homo sapiens
ggccacagcagccct

SEQ ID NO: 1088563 - DNA, 15 bp, Homo sapiens
aggccacagcagccc

SEQ ID NO: 1088564 - DNA, 15 bp, Homo sapiens
caggccacagcagcc

SEQ ID NO: 1088565 - DNA, 15 bp, Homo sapiens
gcaggccacagcagc

SEQ ID NO: 1088566 - DNA, 15 bp, Homo sapiens
agcaggccacagcag

SEQ ID NO: 1088567 - DNA, 15 bp, Homo sapiens
cagcaggccacagca

SEQ ID NO: 1088568 - DNA, 15 bp, Homo sapiens
tcagcaggccacagc

SEQ ID NO: 1088569 - DNA, 15 bp, Homo sapiens
ctcagcaggccacag

SEQ ID NO: 1088570 - DNA, 15 bp, Homo sapiens
cctcagcaggccaca

SEQ ID NO: 1088571 - DNA, 15 bp, Homo sapiens
tcctcagcaggccac

SEQ ID NO: 1088572 - DNA, 15 bp, Homo sapiens
ctcctcagcaggcca

SEQ ID NO: 1088573 - DNA, 15 bp, Homo sapiens
actcctcagcaggcc

SEQ ID NO: 1088574 - DNA, 15 bp, Homo sapiens
cactcctcagcaggc

SEQ ID NO: 1088575 - DNA, 15 bp, Homo sapiens
gcactcctcagcagg

SEQ ID NO: 1088576 - DNA, 15 bp, Homo sapiens
tgcactcctcagcag

SEQ ID NO: 1088577 - DNA, 15 bp, Homo sapiens
ctgcactcctcagca

SEQ ID NO: 1088578 - DNA, 15 bp, Homo sapiens
cctgcactcctcagc

SEQ ID NO: 1088579 - DNA, 15 bp, Homo sapiens
ccctgcactcctcag

SEQ ID NO: 1088580 - DNA, 15 bp, Homo sapiens
gccctgcactcctca

SEQ ID NO: 1088581 - DNA, 15 bp, Homo sapiens
tgccctgcactcctc

SEQ ID NO: 1088582 - DNA, 15 bp, Homo sapiens
ctgccctgcactcct

SEQ ID NO: 1088583 - DNA, 15 bp, Homo sapiens
actgccctgcactcc

SEQ ID NO: 1088584 - DNA, 15 bp, Homo sapiens
aactgccctgcactc

SEQ ID NO: 1088585 - DNA, 15 bp, Homo sapiens
taactgccctgcact

SEQ ID NO: 1088586 - DNA, 15 bp, Homo sapiens
gtaactgccctgcac

SEQ ID NO: 1088587 - DNA, 15 bp, Homo sapiens
agtaactgccctgca

SEQ ID NO: 1088588 - DNA, 15 bp, Homo sapiens
aagtaactgccctgc

SEQ ID NO: 1088589 - DNA, 15 bp, Homo sapiens
aaagtaactgccctg

SEQ ID NO: 1088590 - DNA, 15 bp, Homo sapiens
aaaagtaactgccct

SEQ ID NO: 1088591 - DNA, 15 bp, Homo sapiens
aaaaagtaactgccc

SEQ ID NO: 1088592 - DNA, 15 bp, Homo sapiens
gaaaaagtaactgcc

SEQ ID NO: 1088593 - DNA, 15 bp, Homo sapiens
ggaaaaagtaactgc

SEQ ID NO: 1088594 - DNA, 15 bp, Homo sapiens
tggaaaaagtaactg

SEQ ID NO: 1088595 - DNA, 15 bp, Homo sapiens
ttggaaaaagtaact

SEQ ID NO: 1088596 - DNA, 15 bp, Homo sapiens
tttggaaaaagtaac

SEQ ID NO: 1088597 - DNA, 15 bp, Homo sapiens
ttttggaaaaagtaa

SEQ ID NO: 1088598 - DNA, 15 bp, Homo sapiens
tttttggaaaaagta

SEQ ID NO: 1088599 - DNA, 15 bp, Homo sapiens
gtttttggaaaaagt

SEQ ID NO: 1088600 - DNA, 15 bp, Homo sapiens
tgtttttggaaaaag

SEQ ID NO: 1088601 - DNA, 15 bp, Homo sapiens
ttgtttttggaaaaa

SEQ ID NO: 1088602 - DNA, 15 bp, Homo sapiens
tttgtttttggaaaa

SEQ ID NO: 1088603 - DNA, 15 bp, Homo sapiens
ctttgtttttggaaa

SEQ ID NO: 1088604 - DNA, 15 bp, Homo sapiens
tctttgtttttggaa

SEQ ID NO: 1088605 - DNA, 15 bp, Homo sapiens
ctctttgtttttgga

SEQ ID NO: 1088606 - DNA, 15 bp, Homo sapiens
tctctttgtttttgg

SEQ ID NO: 1088607 - DNA, 15 bp, Homo sapiens
ttctctttgtttttg

SEQ ID NO: 1088608 - DNA, 15 bp, Homo sapiens
tttctctttgttttt

SEQ ID NO: 1088609 - DNA, 15 bp, Homo sapiens
atttctctttgtttt

SEQ ID NO: 1088610 - DNA, 15 bp, Homo sapiens
gatttctctttgttt

SEQ ID NO: 1088611 - DNA, 15 bp, Homo sapiens
ctggatttctctttg

SEQ ID NO: 1088612 - DNA, 15 bp, Homo sapiens
cctggatttctcttt

SEQ ID NO: 1088613 - DNA, 15 bp, Homo sapiens
gcctggatttctctt

SEQ ID NO: 1088614 - DNA, 15 bp, Homo sapiens
tgcctggatttctct

SEQ ID NO: 1088615 - DNA, 15 bp, Homo sapiens
atgcctggatttctc

SEQ ID NO: 1088616 - DNA, 15 bp, Homo sapiens
catgcctggatttct

SEQ ID NO: 1088617 - DNA, 15 bp, Homo sapiens
gcatgcctggatttc

SEQ ID NO: 1088618 - DNA, 15 bp, Homo sapiens
agcatgcctggattt

SEQ ID NO: 1088619 - DNA, 15 bp, Homo sapiens
gagcatgcctggatt

SEQ ID NO: 1088620 - DNA, 15 bp, Homo sapiens
agagcatgcctggat

SEQ ID NO: 1088621 - DNA, 15 bp, Homo sapiens
cagagcatgcctgga

SEQ ID NO: 1088622 - DNA, 15 bp, Homo sapiens
tcagagcatgcctgg

SEQ ID NO: 1088623 - DNA, 15 bp, Homo sapiens
ctcagagcatgcctg

SEQ ID NO: 1088624 - DNA, 15 bp, Homo sapiens
gctcagagcatgcct

SEQ ID NO: 1088625 - DNA, 15 bp, Homo sapiens
ggctcagagcatgcc

SEQ ID NO: 1088626 - DNA, 15 bp, Homo sapiens
tggctcagagcatgc

SEQ ID NO: 1088627 - DNA, 15 bp, Homo sapiens
ctggctcagagcatg

SEQ ID NO: 1088628 - DNA, 15 bp, Homo sapiens
gctggctcagagcat

SEQ ID NO: 1088629 - DNA, 15 bp, Homo sapiens
ggctggctcagagca

SEQ ID NO: 1088630 - DNA, 15 bp, Homo sapiens
gggctggctcagagc

SEQ ID NO: 1088631 - DNA, 15 bp, Homo sapiens
tcagggctggctcag

SEQ ID NO: 1088632 - DNA, 15 bp, Homo sapiens
ctcagggctggctca

SEQ ID NO: 1088633 - DNA, 15 bp, Homo sapiens
gctcagggctggctc

SEQ ID NO: 1088634 - DNA, 15 bp, Homo sapiens
ggctcagggctggct

SEQ ID NO: 1088635 - DNA, 15 bp, Homo sapiens
gggctcagggctggc

SEQ ID NO: 1088636 - DNA, 15 bp, Homo sapiens
tgggctcagggctgg

SEQ ID NO: 1088637 - DNA, 15 bp, Homo sapiens
ctgggctcagggctg

SEQ ID NO: 1088638 - DNA, 15 bp, Homo sapiens
gctgggctcagggct

SEQ ID NO: 1088639 - DNA, 15 bp, Homo sapiens
tgctgggctcagggc

SEQ ID NO: 1088640 - DNA, 15 bp, Homo sapiens
ctgctgggctcaggg

SEQ ID NO: 1088641 - DNA, 15 bp, Homo sapiens
actgctgggctcagg

SEQ ID NO: 1088642 - DNA, 15 bp, Homo sapiens
cactgctgggctcag

SEQ ID NO: 1088643 - DNA, 15 bp, Homo sapiens
tcactgctgggctca

SEQ ID NO: 1088644 - DNA, 15 bp, Homo sapiens
ctcactgctgggctc

SEQ ID NO: 1088645 - DNA, 15 bp, Homo sapiens
gctcactgctgggct

SEQ ID NO: 1088646 - DNA, 15 bp, Homo sapiens
tgctcactgctgggc

SEQ ID NO: 1088647 - DNA, 15 bp, Homo sapiens
ttgctcactgctggg

SEQ ID NO: 1088648 - DNA, 15 bp, Homo sapiens
cttgctcactgctgg

SEQ ID NO: 1088649 - DNA, 15 bp, Homo sapiens
ccttgctcactgctg

SEQ ID NO: 1088650 - DNA, 15 bp, Homo sapiens
tccttgctcactgct

SEQ ID NO: 1088651 - DNA, 15 bp, Homo sapiens
ctccttgctcactgc

SEQ ID NO: 1088652 - DNA, 15 bp, Homo sapiens
tctccttgctcactg

SEQ ID NO: 1088653 - DNA, 15 bp, Homo sapiens
ctctccttgctcact

SEQ ID NO: 1088654 - DNA, 15 bp, Homo sapiens
tctctccttgctcac

SEQ ID NO: 1088655 - DNA, 15 bp, Homo sapiens
ctctctccttgctca

SEQ ID NO: 1088656 - DNA, 15 bp, Homo sapiens
gctctctccttgctc

SEQ ID NO: 1088657 - DNA, 15 bp, Homo sapiens
agctctctccttgct

SEQ ID NO: 1088658 - DNA, 15 bp, Homo sapiens
cagctctctccttgc

SEQ ID NO: 1088659 - DNA, 15 bp, Homo sapiens
ccagctctctccttg

SEQ ID NO: 1088660 - DNA, 15 bp, Homo sapiens
tccagctctctcctt

SEQ ID NO: 1088661 - DNA, 15 bp, Homo sapiens
ctccagctctctcct

SEQ ID NO: 1088662 - DNA, 15 bp, Homo sapiens
tctccagctctctcc

SEQ ID NO: 1088663 - DNA, 15 bp, Homo sapiens
gtctccagctctctc

SEQ ID NO: 1088664 - DNA, 15 bp, Homo sapiens
tgtctccagctctct

SEQ ID NO: 1088665 - DNA, 15 bp, Homo sapiens
ctgtctccagctctc

SEQ ID NO: 1088666 - DNA, 15 bp, Homo sapiens
cctgtctccagctct

SEQ ID NO: 1088667 - DNA, 15 bp, Homo sapiens
ccctgtctccagctc

SEQ ID NO: 1088668 - DNA, 15 bp, Homo sapiens
cccctgtctccagct

SEQ ID NO: 1088669 - DNA, 15 bp, Homo sapiens
tcccctgtctccagc

SEQ ID NO: 1088670 - DNA, 15 bp, Homo sapiens
gtcccctgtctccag

SEQ ID NO: 1088671 - DNA, 15 bp, Homo sapiens
agtcccctgtctcca

SEQ ID NO: 1088672 - DNA, 15 bp, Homo sapiens
aagtcccctgtctcc

SEQ ID NO: 1088673 - DNA, 15 bp, Homo sapiens
aaagtcccctgtctc

SEQ ID NO: 1088674 - DNA, 15 bp, Homo sapiens
caaagtcccctgtct

SEQ ID NO: 1088675 - DNA, 15 bp, Homo sapiens
gcaaagtcccctgtc

SEQ ID NO: 1088676 - DNA, 15 bp, Homo sapiens
agcaaagtcccctgt

SEQ ID NO: 1088677 - DNA, 15 bp, Homo sapiens
cagcaaagtcccctg

SEQ ID NO: 1088678 - DNA, 15 bp, Homo sapiens
acagcaaagtcccct

SEQ ID NO: 1088679 - DNA, 15 bp, Homo sapiens
cacagcaaagtcccc

SEQ ID NO: 1088680 - DNA, 15 bp, Homo sapiens
tcacagcaaagtccc

SEQ ID NO: 1088681 - DNA, 15 bp, Homo sapiens
ttcacagcaaagtcc

SEQ ID NO: 1088682 - DNA, 15 bp, Homo sapiens
tttcacagcaaagtc

SEQ ID NO: 1088683 - DNA, 15 bp, Homo sapiens
gtttcacagcaaagt

SEQ ID NO: 1088684 - DNA, 15 bp, Homo sapiens
tgtttcacagcaaag

SEQ ID NO: 1088685 - DNA, 15 bp, Homo sapiens
gtgtttcacagcaaa

SEQ ID NO: 1088686 - DNA, 15 bp, Homo sapiens
agtgtttcacagcaa

SEQ ID NO: 1088687 - DNA, 15 bp, Homo sapiens
cagtgtttcacagca

SEQ ID NO: 1088688 - DNA, 15 bp, Homo sapiens
ccagtgtttcacagc

SEQ ID NO: 1088689 - DNA, 15 bp, Homo sapiens
cccagtgtttcacag

SEQ ID NO: 1088690 - DNA, 15 bp, Homo sapiens
ccccagtgtttcaca

SEQ ID NO: 1088691 - DNA, 15 bp, Homo sapiens
cccccagtgtttcac

SEQ ID NO: 1088692 - DNA, 15 bp, Homo sapiens
ccccccagtgtttca

SEQ ID NO: 1088693 - DNA, 15 bp, Homo sapiens
tccccccagtgtttc

SEQ ID NO: 1088694 - DNA, 15 bp, Homo sapiens
ttccccccagtgttt

SEQ ID NO: 1088695 - DNA, 15 bp, Homo sapiens
attccccccagtgtt

SEQ ID NO: 1088696 - DNA, 15 bp, Homo sapiens
cattccccccagtgt

SEQ ID NO: 1088697 - DNA, 15 bp, Homo sapiens
acattccccccagtg

SEQ ID NO: 1088698 - DNA, 15 bp, Homo sapiens
cacattccccccagt

SEQ ID NO: 1088699 - DNA, 15 bp, Homo sapiens
gcacattccccccag

SEQ ID NO: 1088700 - DNA, 15 bp, Homo sapiens
ggcacattcccccca

SEQ ID NO: 1088701 - DNA, 15 bp, Homo sapiens
aggcacattcccccc

SEQ ID NO: 1088702 - DNA, 15 bp, Homo sapiens
caggcacattccccc

SEQ ID NO: 1088703 - DNA, 15 bp, Homo sapiens
gcaggcacattcccc

SEQ ID NO: 1088704 - DNA, 15 bp, Homo sapiens
tgcaggcacattccc

SEQ ID NO: 1088705 - DNA, 15 bp, Homo sapiens
atgcaggcacattcc

SEQ ID NO: 1088706 - DNA, 15 bp, Homo sapiens
gatgcaggcacattc

SEQ ID NO: 1088707 - DNA, 15 bp, Homo sapiens
tgatgcaggcacatt

SEQ ID NO: 1088708 - DNA, 15 bp, Homo sapiens
gtgatgcaggcacat

SEQ ID NO: 1088709 - DNA, 15 bp, Homo sapiens
ggtgatgcaggcaca

SEQ ID NO: 1088710 - DNA, 15 bp, Homo sapiens
gggtgatgcaggcac

SEQ ID NO: 1088711 - DNA, 15 bp, Homo sapiens
ggggtgatgcaggca

SEQ ID NO: 1088712 - DNA, 15 bp, Homo sapiens
tggggtgatgcaggc

SEQ ID NO: 1088713 - DNA, 15 bp, Homo sapiens
ctggggtgatgcagg

SEQ ID NO: 1088714 - DNA, 15 bp, Homo sapiens
gctggggtgatgcag

SEQ ID NO: 1088715 - DNA, 15 bp, Homo sapiens
agctggggtgatgca

SEQ ID NO: 1088716 - DNA, 15 bp, Homo sapiens
cagctggggtgatgc

SEQ ID NO: 1088717 - DNA, 15 bp, Homo sapiens
ccagctggggtgatg

SEQ ID NO: 1088718 - DNA, 15 bp, Homo sapiens
cccagctggggtgat

SEQ ID NO: 1088719 - DNA, 15 bp, Homo sapiens
ccccagctggggtga

SEQ ID NO: 1088720 - DNA, 15 bp, Homo sapiens
cccccagctggggtg

SEQ ID NO: 1088721 - DNA, 15 bp, Homo sapiens
gcccccagctggggt

SEQ ID NO: 1088722 - DNA, 15 bp, Homo sapiens
ggcccccagctgggg

SEQ ID NO: 1088723 - DNA, 15 bp, Homo sapiens
gggcccccagctggg

SEQ ID NO: 1088724 - DNA, 15 bp, Homo sapiens
tgggcccccagctgg

SEQ ID NO: 1088725 - DNA, 15 bp, Homo sapiens
ctgggcccccagctg

SEQ ID NO: 1088726 - DNA, 15 bp, Homo sapiens
cctgggcccccagct

SEQ ID NO: 1088727 - DNA, 15 bp, Homo sapiens
gcctgggcccccagc

SEQ ID NO: 1088728 - DNA, 15 bp, Homo sapiens
tgcctgggcccccag

SEQ ID NO: 1088729 - DNA, 15 bp, Homo sapiens
ctgcctgggccccca

SEQ ID NO: 1088730 - DNA, 15 bp, Homo sapiens
tctgcctgggccccc

SEQ ID NO: 1088731 - DNA, 15 bp, Homo sapiens
ctctgcctgggcccc

SEQ ID NO: 1088732 - DNA, 15 bp, Homo sapiens
actctgcctgggccc

SEQ ID NO: 1088733 - DNA, 15 bp, Homo sapiens
cactctgcctgggcc

SEQ ID NO: 1088734 - DNA, 15 bp, Homo sapiens
ccactctgcctgggc

SEQ ID NO: 1088735 - DNA, 15 bp, Homo sapiens
cccactctgcctggg

SEQ ID NO: 1088736 - DNA, 15 bp, Homo sapiens
ccccactctgcctgg

SEQ ID NO: 1088737 - DNA, 15 bp, Homo sapiens
cccccactctgcctg

SEQ ID NO: 1088738 - DNA, 15 bp, Homo sapiens
tcccccactctgcct

SEQ ID NO: 1088739 - DNA, 15 bp, Homo sapiens
ctcccccactctgcc

SEQ ID NO: 1088740 - DNA, 15 bp, Homo sapiens
tctcccccactctgc

SEQ ID NO: 1088741 - DNA, 15 bp, Homo sapiens
ttctcccccactctg

SEQ ID NO: 1088742 - DNA, 15 bp, Homo sapiens
cttctcccccactct

SEQ ID NO: 1088743 - DNA, 15 bp, Homo sapiens
ccttctcccccactc

SEQ ID NO: 1088744 - DNA, 15 bp, Homo sapiens
cccttctcccccact

SEQ ID NO: 1088745 - DNA, 15 bp, Homo sapiens
ccccttctcccccac

SEQ ID NO: 1088746 - DNA, 15 bp, Homo sapiens
accccttctccccca

SEQ ID NO: 1088747 - DNA, 15 bp, Homo sapiens
taccccttctccccc

SEQ ID NO: 1088748 - DNA, 15 bp, Homo sapiens
cttaccccttctccc

SEQ ID NO: 1088749 - DNA, 15 bp, Homo sapiens
acttaccccttctcc

SEQ ID NO: 1088750 - DNA, 15 bp, Homo sapiens
cacttaccccttctc

SEQ ID NO: 1088751 - DNA, 15 bp, Homo sapiens
ccacttaccccttct

SEQ ID NO: 1088752 - DNA, 15 bp, Homo sapiens
cccacttaccccttc

SEQ ID NO: 1088753 - DNA, 15 bp, Homo sapiens
gcccacttacccctt

SEQ ID NO: 1088754 - DNA, 15 bp, Homo sapiens
tgcccacttacccct

SEQ ID NO: 1088755 - DNA, 15 bp, Homo sapiens
ctgcccacttacccc

SEQ ID NO: 1088756 - DNA, 15 bp, Homo sapiens
tctgcccacttaccc

SEQ ID NO: 1088757 - DNA, 15 bp, Homo sapiens
ctctgcccacttacc

SEQ ID NO: 1088758 - DNA, 15 bp, Homo sapiens
gctctgcccacttac

SEQ ID NO: 1088759 - DNA, 15 bp, Homo sapiens
ggctctgcccactta

SEQ ID NO: 1088760 - DNA, 15 bp, Homo sapiens
tggctctgcccactt

SEQ ID NO: 1088761 - DNA, 15 bp, Homo sapiens
ctggctctgcccact

SEQ ID NO: 1088762 - DNA, 15 bp, Homo sapiens
actggctctgcccac

SEQ ID NO: 1088763 - DNA, 15 bp, Homo sapiens
gactggctctgccca

SEQ ID NO: 1088764 - DNA, 15 bp, Homo sapiens
tgactggctctgccc

SEQ ID NO: 1088765 - DNA, 15 bp, Homo sapiens
gtgactggctctgcc

SEQ ID NO: 1088766 - DNA, 15 bp, Homo sapiens
agtgactggctctgc

SEQ ID NO: 1088767 - DNA, 15 bp, Homo sapiens
aagtgactggctctg

SEQ ID NO: 1088768 - DNA, 15 bp, Homo sapiens
aaagtgactggctct

SEQ ID NO: 1088769 - DNA, 15 bp, Homo sapiens
caaagtgactggctc

SEQ ID NO: 1088770 - DNA, 15 bp, Homo sapiens
ccaaagtgactggct

SEQ ID NO: 1088771 - DNA, 15 bp, Homo sapiens
cccaaagtgactggc

SEQ ID NO: 1088772 - DNA, 15 bp, Homo sapiens
gcccaaagtgactgg

SEQ ID NO: 1088773 - DNA, 15 bp, Homo sapiens
tgcccaaagtgactg

SEQ ID NO: 1088774 - DNA, 15 bp, Homo sapiens
atgcccaaagtgact

SEQ ID NO: 1088775 - DNA, 15 bp, Homo sapiens
catgcccaaagtgac

SEQ ID NO: 1088776 - DNA, 15 bp, Homo sapiens
gcatgcccaaagtga

SEQ ID NO: 1088777 - DNA, 15 bp, Homo sapiens
agcatgcccaaagtg

SEQ ID NO: 1088778 - DNA, 15 bp, Homo sapiens
aagcatgcccaaagt

SEQ ID NO: 1088779 - DNA, 15 bp, Homo sapiens
gaagcatgcccaaag

SEQ ID NO: 1088780 - DNA, 15 bp, Homo sapiens
ggaagcatgcccaaa

SEQ ID NO: 1088781 - DNA, 15 bp, Homo sapiens
gggaagcatgcccaa

SEQ ID NO: 1088782 - DNA, 15 bp, Homo sapiens
agggaagcatgccca

SEQ ID NO: 1088783 - DNA, 15 bp, Homo sapiens
gagggaagcatgccc

SEQ ID NO: 1088784 - DNA, 15 bp, Homo sapiens
agagggaagcatgcc

SEQ ID NO: 1088785 - DNA, 15 bp, Homo sapiens
gagagggaagcatgc

SEQ ID NO: 1088786 - DNA, 15 bp, Homo sapiens
cgagagggaagcatg

SEQ ID NO: 1088787 - DNA, 15 bp, Homo sapiens
gcgagagggaagcat

SEQ ID NO: 1088788 - DNA, 15 bp, Homo sapiens
ggcgagagggaagca

SEQ ID NO: 1088789 - DNA, 15 bp, Homo sapiens
aggcgagagggaagc

SEQ ID NO: 1088790 - DNA, 15 bp, Homo sapiens
gaggcgagagggaag

SEQ ID NO: 1088791 - DNA, 15 bp, Homo sapiens
agaggcgagagggaa

SEQ ID NO: 1088792 - DNA, 15 bp, Homo sapiens
cagaggcgagaggga

SEQ ID NO: 1088793 - DNA, 15 bp, Homo sapiens
acagaggcgagaggg

SEQ ID NO: 1088794 - DNA, 15 bp, Homo sapiens
cacagaggcgagagg

SEQ ID NO: 1088795 - DNA, 15 bp, Homo sapiens
acacagaggcgagag

SEQ ID NO: 1088796 - DNA, 15 bp, Homo sapiens
cacacagaggcgaga

SEQ ID NO: 1088797 - DNA, 15 bp, Homo sapiens
tcacacagaggcgag

SEQ ID NO: 1088798 - DNA, 15 bp, Homo sapiens
ttcacacagaggcga

SEQ ID NO: 1088799 - DNA, 15 bp, Homo sapiens
tttcacacagaggcg

SEQ ID NO: 1088800 - DNA, 15 bp, Homo sapiens
atttcacacagaggc

SEQ ID NO: 1088801 - DNA, 15 bp, Homo sapiens
catttcacacagagg

SEQ ID NO: 1088802 - DNA, 15 bp, Homo sapiens
tcatttcacacagag

SEQ ID NO: 1088803 - DNA, 15 bp, Homo sapiens
gtcatttcacacaga

SEQ ID NO: 1088804 - DNA, 15 bp, Homo sapiens
ggtcatttcacacag

SEQ ID NO: 1088805 - DNA, 15 bp, Homo sapiens
tggtcatttcacaca

SEQ ID NO: 1088806 - DNA, 15 bp, Homo sapiens
ctggtcatttcacac

SEQ ID NO: 1088807 - DNA, 15 bp, Homo sapiens
cctggtcatttcaca

SEQ ID NO: 1088808 - DNA, 15 bp, Homo sapiens
acctggtcatttcac

SEQ ID NO: 1088809 - DNA, 15 bp, Homo sapiens
gacctggtcatttca

SEQ ID NO: 1088810 - DNA, 15 bp, Homo sapiens
tgacctggtcatttc

SEQ ID NO: 1088811 - DNA, 15 bp, Homo sapiens
ctgacctggtcattt

SEQ ID NO: 1088812 - DNA, 15 bp, Homo sapiens
gctgacctggtcatt

SEQ ID NO: 1088813 - DNA, 15 bp, Homo sapiens
tgctgacctggtcat

SEQ ID NO: 1088814 - DNA, 15 bp, Homo sapiens
atgctgacctggtca

SEQ ID NO: 1088815 - DNA, 15 bp, Homo sapiens
tatgctgacctggtc

SEQ ID NO: 1088816 - DNA, 15 bp, Homo sapiens
ttatgctgacctggt

SEQ ID NO: 1088817 - DNA, 15 bp, Homo sapiens
tttatgctgacctgg

SEQ ID NO: 1088818 - DNA, 15 bp, Homo sapiens
gtttatgctgacctg

SEQ ID NO: 1088819 - DNA, 15 bp, Homo sapiens
ggtttatgctgacct

SEQ ID NO: 1088820 - DNA, 15 bp, Homo sapiens
gggtttatgctgacc

SEQ ID NO: 1088821 - DNA, 15 bp, Homo sapiens
ggggtttatgctgac

SEQ ID NO: 1088822 - DNA, 15 bp, Homo sapiens
cggggtttatgctga

SEQ ID NO: 1088823 - DNA, 15 bp, Homo sapiens
ccggggtttatgctg

SEQ ID NO: 1088824 - DNA, 15 bp, Homo sapiens
cccggggtttatgct

SEQ ID NO: 1088825 - DNA, 15 bp, Homo sapiens
gcccggggtttatgc

SEQ ID NO: 1088826 - DNA, 15 bp, Homo sapiens
agcccggggtttatg

SEQ ID NO: 1088827 - DNA, 15 bp, Homo sapiens
cagcccggggtttat

SEQ ID NO: 1088828 - DNA, 15 bp, Homo sapiens
ccagcccggggttta

SEQ ID NO: 1088829 - DNA, 15 bp, Homo sapiens
gccagcccggggttt

SEQ ID NO: 1088830 - DNA, 15 bp, Homo sapiens
agccagcccggggtt

SEQ ID NO: 1088831 - DNA, 15 bp, Homo sapiens
cagccagcccggggt

SEQ ID NO: 1088832 - DNA, 15 bp, Homo sapiens
acagccagcccgggg

SEQ ID NO: 1088833 - DNA, 15 bp, Homo sapiens
cacagccagcccggg

SEQ ID NO: 1088834 - DNA, 15 bp, Homo sapiens
gcacagccagcccgg

SEQ ID NO: 1088835 - DNA, 15 bp, Homo sapiens
agcacagccagcccg

SEQ ID NO: 1088836 - DNA, 15 bp, Homo sapiens
aagcacagccagccc

SEQ ID NO: 1088837 - DNA, 15 bp, Homo sapiens
gaagcacagccagcc

SEQ ID NO: 1088838 - DNA, 15 bp, Homo sapiens
agaagcacagccagc

SEQ ID NO: 1088839 - DNA, 15 bp, Homo sapiens
cagaagcacagccag

SEQ ID NO: 1088840 - DNA, 15 bp, Homo sapiens
ccagaagcacagcca

SEQ ID NO: 1088841 - DNA, 15 bp, Homo sapiens
gccagaagcacagcc

SEQ ID NO: 1088842 - DNA, 15 bp, Homo sapiens
tgccagaagcacagc

SEQ ID NO: 1088843 - DNA, 15 bp, Homo sapiens
ctgccagaagcacag

SEQ ID NO: 1088844 - DNA, 15 bp, Homo sapiens
tctgccagaagcaca

SEQ ID NO: 1088845 - DNA, 15 bp, Homo sapiens
ctctgccagaagcac

SEQ ID NO: 1088846 - DNA, 15 bp, Homo sapiens
gctctgccagaagca

SEQ ID NO: 1088847 - DNA, 15 bp, Homo sapiens
agctctgccagaagc

SEQ ID NO: 1088848 - DNA, 15 bp, Homo sapiens
tagctctgccagaag

SEQ ID NO: 1088849 - DNA, 15 bp, Homo sapiens
ttagctctgccagaa

SEQ ID NO: 1088850 - DNA, 15 bp, Homo sapiens
attagctctgccaga

SEQ ID NO: 1088851 - DNA, 15 bp, Homo sapiens
cattagctctgccag

SEQ ID NO: 1088852 - DNA, 15 bp, Homo sapiens
tcattagctctgcca

SEQ ID NO: 1088853 - DNA, 15 bp, Homo sapiens
atcattagctctgcc

SEQ ID NO: 1088854 - DNA, 15 bp, Homo sapiens
catcattagctctgc

SEQ ID NO: 1088855 - DNA, 15 bp, Homo sapiens
acatcattagctctg

SEQ ID NO: 1088856 - DNA, 15 bp, Homo sapiens
aacatcattagctct

SEQ ID NO: 1088857 - DNA, 15 bp, Homo sapiens
taacatcattagctc

SEQ ID NO: 1088858 - DNA, 15 bp, Homo sapiens
ctaacatcattagct

SEQ ID NO: 1088859 - DNA, 15 bp, Homo sapiens
cctaacatcattagc

SEQ ID NO: 1088860 - DNA, 15 bp, Homo sapiens
tcctaacatcattag

SEQ ID NO: 1088861 - DNA, 15 bp, Homo sapiens
ctcctaacatcatta

SEQ ID NO: 1088862 - DNA, 15 bp, Homo sapiens
cctcctaacatcatt

SEQ ID NO: 1088863 - DNA, 15 bp, Homo sapiens
tcctcctaacatcat

SEQ ID NO: 1088864 - DNA, 15 bp, Homo sapiens
ttcctcctaacatca

SEQ ID NO: 1088865 - DNA, 15 bp, Homo sapiens
tttcctcctaacatc

SEQ ID NO: 1088866 - DNA, 15 bp, Homo sapiens
ttttcctcctaacat

SEQ ID NO: 1088867 - DNA, 15 bp, Homo sapiens
gttttcctcctaaca

SEQ ID NO: 1088868 - DNA, 15 bp, Homo sapiens
tgttttcctcctaac

SEQ ID NO: 1088869 - DNA, 15 bp, Homo sapiens
ttgttttcctcctaa

SEQ ID NO: 1088870 - DNA, 15 bp, Homo sapiens
gttgttttcctccta

SEQ ID NO: 1088871 - DNA, 15 bp, Homo sapiens
ggttgttttcctcct

SEQ ID NO: 1088872 - DNA, 15 bp, Homo sapiens
tggttgttttcctcc

SEQ ID NO: 1088873 - DNA, 15 bp, Homo sapiens
ttggttgttttcctc

SEQ ID NO: 1088874 - DNA, 15 bp, Homo sapiens
gttggttgttttcct

SEQ ID NO: 1088875 - DNA, 15 bp, Homo sapiens
ggttggttgttttcc

SEQ ID NO: 1088876 - DNA, 15 bp, Homo sapiens
gggttggttgttttc

SEQ ID NO: 1088877 - DNA, 15 bp, Homo sapiens
tgggttggttgtttt

SEQ ID NO: 1088878 - DNA, 15 bp, Homo sapiens
ttgggttggttgttt

SEQ ID NO: 1088879 - DNA, 15 bp, Homo sapiens
cttgggttggttgtt

SEQ ID NO: 1088880 - DNA, 15 bp, Homo sapiens
acttgggttggttgt

SEQ ID NO: 1088881 - DNA, 15 bp, Homo sapiens
cacttgggttggttg

SEQ ID NO: 1088882 - DNA, 15 bp, Homo sapiens
tcacttgggttggtt

SEQ ID NO: 1088883 - DNA, 15 bp, Homo sapiens
ctcacttgggttggt

SEQ ID NO: 1088884 - DNA, 15 bp, Homo sapiens
tctcacttgggttgg

SEQ ID NO: 1088885 - DNA, 15 bp, Homo sapiens
ctctcacttgggttg

SEQ ID NO: 1088886 - DNA, 15 bp, Homo sapiens
cctctcacttgggtt

SEQ ID NO: 1088887 - DNA, 15 bp, Homo sapiens
ccctctcacttgggt

SEQ ID NO: 1088888 - DNA, 15 bp, Homo sapiens
accctctcacttggg

SEQ ID NO: 1088889 - DNA, 15 bp, Homo sapiens
caccctctcacttgg

SEQ ID NO: 1088890 - DNA, 15 bp, Homo sapiens
gcaccctctcacttg

SEQ ID NO: 1088891 - DNA, 15 bp, Homo sapiens
cgcaccctctcactt

SEQ ID NO: 1088892 - DNA, 15 bp, Homo sapiens
gcgcaccctctcact

SEQ ID NO: 1088893 - DNA, 15 bp, Homo sapiens
tgcgcaccctctcac

SEQ ID NO: 1088894 - DNA, 15 bp, Homo sapiens
ctgcgcaccctctca

SEQ ID NO: 1088895 - DNA, 15 bp, Homo sapiens
gctgcgcaccctctc

SEQ ID NO: 1088896 - DNA, 15 bp, Homo sapiens
ggctgcgcaccctct

SEQ ID NO: 1088897 - DNA, 15 bp, Homo sapiens
tggctgcgcaccctc

SEQ ID NO: 1088898 - DNA, 15 bp, Homo sapiens
ctggctgcgcaccct

SEQ ID NO: 1088899 - DNA, 15 bp, Homo sapiens
tctggctgcgcaccc

SEQ ID NO: 1088900 - DNA, 15 bp, Homo sapiens
gtctggctgcgcacc

SEQ ID NO: 1088901 - DNA, 15 bp, Homo sapiens
tgtctggctgcgcac

SEQ ID NO: 1088902 - DNA, 15 bp, Homo sapiens
ctgtctggctgcgca

SEQ ID NO: 1088903 - DNA, 15 bp, Homo sapiens
gctgtctggctgcgc

SEQ ID NO: 1088904 - DNA, 15 bp, Homo sapiens
agctgtctggctgcg

SEQ ID NO: 1088905 - DNA, 15 bp, Homo sapiens
cagctgtctggctgc

SEQ ID NO: 1088906 - DNA, 15 bp, Homo sapiens
ccagctgtctggctg

SEQ ID NO: 1088907 - DNA, 15 bp, Homo sapiens
tccagctgtctggct

SEQ ID NO: 1088908 - DNA, 15 bp, Homo sapiens
gtccagctgtctggc

SEQ ID NO: 1088909 - DNA, 15 bp, Homo sapiens
ggtccagctgtctgg

SEQ ID NO: 1088910 - DNA, 15 bp, Homo sapiens
cggtccagctgtctg

SEQ ID NO: 1088911 - DNA, 15 bp, Homo sapiens
ccggtccagctgtct

SEQ ID NO: 1088912 - DNA, 15 bp, Homo sapiens
gccggtccagctgtc

SEQ ID NO: 1088913 - DNA, 15 bp, Homo sapiens
ggccggtccagctgt

SEQ ID NO: 1088914 - DNA, 15 bp, Homo sapiens
cggccggtccagctg

SEQ ID NO: 1088915 - DNA, 15 bp, Homo sapiens
tcggccggtccagct

SEQ ID NO: 1088916 - DNA, 15 bp, Homo sapiens
ctcggccggtccagc

SEQ ID NO: 1088917 - DNA, 15 bp, Homo sapiens
cctcggccggtccag

SEQ ID NO: 1088918 - DNA, 15 bp, Homo sapiens
gcctcggccggtcca

SEQ ID NO: 1088919 - DNA, 15 bp, Homo sapiens
ggcctcggccggtcc

SEQ ID NO: 1088920 - DNA, 15 bp, Homo sapiens
gggcctcggccggtc

SEQ ID NO: 1088921 - DNA, 15 bp, Homo sapiens
ggggcctcggccggt

SEQ ID NO: 1088922 - DNA, 15 bp, Homo sapiens
tggggcctcggccgg

SEQ ID NO: 1088923 - DNA, 15 bp, Homo sapiens
ttggggcctcggccg

SEQ ID NO: 1088924 - DNA, 15 bp, Homo sapiens
gttggggcctcggcc

SEQ ID NO: 1088925 - DNA, 15 bp, Homo sapiens
ggttggggcctcggc

SEQ ID NO: 1088926 - DNA, 15 bp, Homo sapiens
tggttggggcctcgg

SEQ ID NO: 1088927 - DNA, 15 bp, Homo sapiens
ttggttggggcctcg

SEQ ID NO: 1088928 - DNA, 15 bp, Homo sapiens
cttggttggggcctc

SEQ ID NO: 1088929 - DNA, 15 bp, Homo sapiens
acttggttggggcct

SEQ ID NO: 1088930 - DNA, 15 bp, Homo sapiens
gacttggttggggcc

SEQ ID NO: 1088931 - DNA, 15 bp, Homo sapiens
ggacttggttggggc

SEQ ID NO: 1088932 - DNA, 15 bp, Homo sapiens
gggacttggttgggg

SEQ ID NO: 1088933 - DNA, 15 bp, Homo sapiens
tgggacttggttggg

SEQ ID NO: 1088934 - DNA, 15 bp, Homo sapiens
ctgggacttggttgg

SEQ ID NO: 1088935 - DNA, 15 bp, Homo sapiens
tctgggacttggttg

SEQ ID NO: 1088936 - DNA, 15 bp, Homo sapiens
atctgggacttggtt

SEQ ID NO: 1088937 - DNA, 15 bp, Homo sapiens
gatctgggacttggt

SEQ ID NO: 1088938 - DNA, 15 bp, Homo sapiens
agatctgggacttgg

SEQ ID NO: 1088939 - DNA, 15 bp, Homo sapiens
cagatctgggacttg

SEQ ID NO: 1088940 - DNA, 15 bp, Homo sapiens
gcagatctgggactt

SEQ ID NO: 1088941 - DNA, 15 bp, Homo sapiens
ggcagatctgggact

SEQ ID NO: 1088942 - DNA, 15 bp, Homo sapiens
aggcagatctgggac

SEQ ID NO: 1088943 - DNA, 15 bp, Homo sapiens
caggcagatctggga

SEQ ID NO: 1088944 - DNA, 15 bp, Homo sapiens
acaggcagatctggg

SEQ ID NO: 1088945 - DNA, 15 bp, Homo sapiens
gacaggcagatctgg

SEQ ID NO: 1088946 - DNA, 15 bp, Homo sapiens
tgacaggcagatctg

SEQ ID NO: 1088947 - DNA, 15 bp, Homo sapiens
gtgacaggcagatct

SEQ ID NO: 1088948 - DNA, 15 bp, Homo sapiens
agtgacaggcagatc

SEQ ID NO: 1088949 - DNA, 15 bp, Homo sapiens
cagtgacaggcagat

SEQ ID NO: 1088950 - DNA, 15 bp, Homo sapiens
ccagtgacaggcaga

SEQ ID NO: 1088951 - DNA, 15 bp, Homo sapiens
accagtgacaggcag

SEQ ID NO: 1088952 - DNA, 15 bp, Homo sapiens
caccagtgacaggca

SEQ ID NO: 1088953 - DNA, 15 bp, Homo sapiens
gcaccagtgacaggc

SEQ ID NO: 1088954 - DNA, 15 bp, Homo sapiens
agcaccagtgacagg

SEQ ID NO: 1088955 - DNA, 15 bp, Homo sapiens
tagcaccagtgacag

SEQ ID NO: 1088956 - DNA, 15 bp, Homo sapiens
atagcaccagtgaca

SEQ ID NO: 1088957 - DNA, 15 bp, Homo sapiens
catagcaccagtgac

SEQ ID NO: 1088958 - DNA, 15 bp, Homo sapiens
ccatagcaccagtga

SEQ ID NO: 1088959 - DNA, 15 bp, Homo sapiens
gccatagcaccagtg

SEQ ID NO: 1088960 - DNA, 15 bp, Homo sapiens
tgccatagcaccagt

SEQ ID NO: 1088961 - DNA, 15 bp, Homo sapiens
ctgccatagcaccag

SEQ ID NO: 1088962 - DNA, 15 bp, Homo sapiens
gctgccatagcacca

SEQ ID NO: 1088963 - DNA, 15 bp, Homo sapiens
tgctgccatagcacc

SEQ ID NO: 1088964 - DNA, 15 bp, Homo sapiens
ttgctgccatagcac

SEQ ID NO: 1088965 - DNA, 15 bp, Homo sapiens
attgctgccatagca

SEQ ID NO: 1088966 - DNA, 15 bp, Homo sapiens
aattgctgccatagc

SEQ ID NO: 1088967 - DNA, 15 bp, Homo sapiens
aaattgctgccatag

SEQ ID NO: 1088968 - DNA, 15 bp, Homo sapiens
caaattgctgccata

SEQ ID NO: 1088969 - DNA, 15 bp, Homo sapiens
ccaaattgctgccat

SEQ ID NO: 1088970 - DNA, 15 bp, Homo sapiens
tccaaattgctgcca

SEQ ID NO: 1088971 - DNA, 15 bp, Homo sapiens
atccaaattgctgcc

SEQ ID NO: 1088972 - DNA, 15 bp, Homo sapiens
catccaaattgctgc

SEQ ID NO: 1088973 - DNA, 15 bp, Homo sapiens
tcatccaaattgctg

SEQ ID NO: 1088974 - DNA, 15 bp, Homo sapiens
ctcatccaaattgct

SEQ ID NO: 1088975 - DNA, 15 bp, Homo sapiens
tctcatccaaattgc

SEQ ID NO: 1088976 - DNA, 15 bp, Homo sapiens
ttctcatccaaattg

SEQ ID NO: 1088977 - DNA, 15 bp, Homo sapiens
tttctcatccaaatt

SEQ ID NO: 1088978 - DNA, 15 bp, Homo sapiens
atttctcatccaaat

SEQ ID NO: 1088979 - DNA, 15 bp, Homo sapiens
gatttctcatccaaa

SEQ ID NO: 1088980 - DNA, 15 bp, Homo sapiens
ggatttctcatccaa

SEQ ID NO: 1088981 - DNA, 15 bp, Homo sapiens
aggatttctcatcca

SEQ ID NO: 1088982 - DNA, 15 bp, Homo sapiens
caggatttctcatcc

SEQ ID NO: 1088983 - DNA, 15 bp, Homo sapiens
gcaggatttctcatc

SEQ ID NO: 1088984 - DNA, 15 bp, Homo sapiens
ggcaggatttctcat

SEQ ID NO: 1088985 - DNA, 15 bp, Homo sapiens
gggcaggatttctca

SEQ ID NO: 1088986 - DNA, 15 bp, Homo sapiens
tgggcaggatttctc

SEQ ID NO: 1088987 - DNA, 15 bp, Homo sapiens
ttgggcaggatttct

SEQ ID NO: 1088988 - DNA, 15 bp, Homo sapiens
tttgggcaggatttc

SEQ ID NO: 1088989 - DNA, 15 bp, Homo sapiens
ctttgggcaggattt

SEQ ID NO: 1088990 - DNA, 15 bp, Homo sapiens
cctttgggcaggatt

SEQ ID NO: 1088991 - DNA, 15 bp, Homo sapiens
ccctttgggcaggat

SEQ ID NO: 1088992 - DNA, 15 bp, Homo sapiens
gccctttgggcagga

SEQ ID NO: 1088993 - DNA, 15 bp, Homo sapiens
ggccctttgggcagg

SEQ ID NO: 1088994 - DNA, 15 bp, Homo sapiens
gggccctttgggcag

SEQ ID NO: 1088995 - DNA, 15 bp, Homo sapiens
ggggccctttgggca

SEQ ID NO: 1088996 - DNA, 15 bp, Homo sapiens
aggggccctttgggc

SEQ ID NO: 1088997 - DNA, 15 bp, Homo sapiens
aaggggccctttggg

SEQ ID NO: 1088998 - DNA, 15 bp, Homo sapiens
gaaggggccctttgg

SEQ ID NO: 1088999 - DNA, 15 bp, Homo sapiens
tgaaggggccctttg

SEQ ID NO: 1089000 - DNA, 15 bp, Homo sapiens
ctgaaggggcccttt

SEQ ID NO: 1089001 - DNA, 15 bp, Homo sapiens
cctgaaggggccctt

SEQ ID NO: 1089002 - DNA, 15 bp, Homo sapiens
gcctgaaggggccct

SEQ ID NO: 1089003 - DNA, 15 bp, Homo sapiens
ggcctgaaggggccc

SEQ ID NO: 1089004 - DNA, 15 bp, Homo sapiens
tggcctgaaggggcc

SEQ ID NO: 1089005 - DNA, 15 bp, Homo sapiens
gtggcctgaaggggc

SEQ ID NO: 1089006 - DNA, 15 bp, Homo sapiens
ggtggcctgaagggg

SEQ ID NO: 1089007 - DNA, 15 bp, Homo sapiens
gggtggcctgaaggg

SEQ ID NO: 1089008 - DNA, 15 bp, Homo sapiens
cgggtggcctgaagg

SEQ ID NO: 1089009 - DNA, 15 bp, Homo sapiens
ccgggtggcctgaag

SEQ ID NO: 1089010 - DNA, 15 bp, Homo sapiens
cccgggtggcctgaa

SEQ ID NO: 1089011 - DNA, 15 bp, Homo sapiens
ccccgggtggcctga

SEQ ID NO: 1089012 - DNA, 15 bp, Homo sapiens
tccccgggtggcctg

SEQ ID NO: 1089013 - DNA, 15 bp, Homo sapiens
ctccccgggtggcct

SEQ ID NO: 1089014 - DNA, 15 bp, Homo sapiens
tctccccgggtggcc

SEQ ID NO: 1089015 - DNA, 15 bp, Homo sapiens
ttctccccgggtggc

SEQ ID NO: 1089016 - DNA, 15 bp, Homo sapiens
cttctccccgggtgg

SEQ ID NO: 1089017 - DNA, 15 bp, Homo sapiens
ccttctccccgggtg

SEQ ID NO: 1089018 - DNA, 15 bp, Homo sapiens
tccttctccccgggt

SEQ ID NO: 1089019 - DNA, 15 bp, Homo sapiens
ttccttctccccggg

SEQ ID NO: 1089020 - DNA, 15 bp, Homo sapiens
cttccttctccccgg

SEQ ID NO: 1089021 - DNA, 15 bp, Homo sapiens
gcttccttctccccg

SEQ ID NO: 1089022 - DNA, 15 bp, Homo sapiens
cgcttccttctcccc

SEQ ID NO: 1089023 - DNA, 15 bp, Homo sapiens
ccgcttccttctccc

SEQ ID NO: 1089024 - DNA, 15 bp, Homo sapiens
gccgcttccttctcc

SEQ ID NO: 1089025 - DNA, 15 bp, Homo sapiens
agccgcttccttctc

SEQ ID NO: 1089026 - DNA, 15 bp, Homo sapiens
cagccgcttccttct

SEQ ID NO: 1089027 - DNA, 15 bp, Homo sapiens
acagccgcttccttc

SEQ ID NO: 1089028 - DNA, 15 bp, Homo sapiens
gacagccgcttcctt

SEQ ID NO: 1089029 - DNA, 15 bp, Homo sapiens
agacagccgcttcct

SEQ ID NO: 1089030 - DNA, 15 bp, Homo sapiens
aagacagccgcttcc

SEQ ID NO: 1089031 - DNA, 15 bp, Homo sapiens
aaagacagccgcttc

SEQ ID NO: 1089032 - DNA, 15 bp, Homo sapiens
caaagacagccgctt

SEQ ID NO: 1089033 - DNA, 15 bp, Homo sapiens
ccaaagacagccgct

SEQ ID NO: 1089034 - DNA, 15 bp, Homo sapiens
gccaaagacagccgc

SEQ ID NO: 1089035 - DNA, 15 bp, Homo sapiens
tgccaaagacagccg

SEQ ID NO: 1089036 - DNA, 15 bp, Homo sapiens
atgccaaagacagcc

SEQ ID NO: 1089037 - DNA, 15 bp, Homo sapiens
catgccaaagacagc

SEQ ID NO: 1089038 - DNA, 15 bp, Homo sapiens
tcatgccaaagacag

SEQ ID NO: 1089039 - DNA, 15 bp, Homo sapiens
gtcatgccaaagaca

SEQ ID NO: 1089040 - DNA, 15 bp, Homo sapiens
ggtcatgccaaagac

SEQ ID NO: 1089041 - DNA, 15 bp, Homo sapiens
tggtcatgccaaaga

SEQ ID NO: 1089042 - DNA, 15 bp, Homo sapiens
ctggtcatgccaaag

SEQ ID NO: 1089043 - DNA, 15 bp, Homo sapiens
tctggtcatgccaaa

SEQ ID NO: 1089044 - DNA, 15 bp, Homo sapiens
ttctggtcatgccaa

SEQ ID NO: 1089045 - DNA, 15 bp, Homo sapiens
tttctggtcatgcca

SEQ ID NO: 1089046 - DNA, 15 bp, Homo sapiens
ctttctggtcatgcc

SEQ ID NO: 1089047 - DNA, 15 bp, Homo sapiens
tctttctggtcatgc

SEQ ID NO: 1089048 - DNA, 15 bp, Homo sapiens
atctttctggtcatg

SEQ ID NO: 1089049 - DNA, 15 bp, Homo sapiens
catctttctggtcat

SEQ ID NO: 1089050 - DNA, 15 bp, Homo sapiens
ccatctttctggtca

SEQ ID NO: 1089051 - DNA, 15 bp, Homo sapiens
gccatctttctggtc

SEQ ID NO: 1089052 - DNA, 15 bp, Homo sapiens
agccatctttctggt

SEQ ID NO: 1089053 - DNA, 15 bp, Homo sapiens
gagccatctttctgg

SEQ ID NO: 1089054 - DNA, 15 bp, Homo sapiens
cgagccatctttctg

SEQ ID NO: 1089055 - DNA, 15 bp, Homo sapiens
ccgagccatctttct

SEQ ID NO: 1089056 - DNA, 15 bp, Homo sapiens
tccgagccatctttc

SEQ ID NO: 1089057 - DNA, 15 bp, Homo sapiens
ctccgagccatcttt

SEQ ID NO: 1089058 - DNA, 15 bp, Homo sapiens
gctccgagccatctt

SEQ ID NO: 1089059 - DNA, 15 bp, Homo sapiens
agctccgagccatct

SEQ ID NO: 1089060 - DNA, 15 bp, Homo sapiens
tagctccgagccatc

SEQ ID NO: 1089061 - DNA, 15 bp, Homo sapiens
ctagctccgagccat

SEQ ID NO: 1089062 - DNA, 15 bp, Homo sapiens
cctagctccgagcca

SEQ ID NO: 1089063 - DNA, 15 bp, Homo sapiens
ccctagctccgagcc

SEQ ID NO: 1089064 - DNA, 15 bp, Homo sapiens
tccctagctccgagc

SEQ ID NO: 1089065 - DNA, 15 bp, Homo sapiens
ctccctagctccgag

SEQ ID NO: 1089066 - DNA, 15 bp, Homo sapiens
tctccctagctccga

SEQ ID NO: 1089067 - DNA, 15 bp, Homo sapiens
ctctccctagctccg

SEQ ID NO: 1089068 - DNA, 15 bp, Homo sapiens
cctctccctagctcc

SEQ ID NO: 1089069 - DNA, 15 bp, Homo sapiens
acctctccctagctc

SEQ ID NO: 1089070 - DNA, 15 bp, Homo sapiens
cacctctccctagct

SEQ ID NO: 1089071 - DNA, 15 bp, Homo sapiens
ccacctctccctagc

SEQ ID NO: 1089072 - DNA, 15 bp, Homo sapiens
tccacctctccctag

SEQ ID NO: 1089073 - DNA, 15 bp, Homo sapiens
gtccacctctcccta

SEQ ID NO: 1089074 - DNA, 15 bp, Homo sapiens
tgtccacctctccct

SEQ ID NO: 1089075 - DNA, 15 bp, Homo sapiens
atgtccacctctccc

SEQ ID NO: 1089076 - DNA, 15 bp, Homo sapiens
catgtccacctctcc

SEQ ID NO: 1089077 - DNA, 15 bp, Homo sapiens
acatgtccacctctc

SEQ ID NO: 1089078 - DNA, 15 bp, Homo sapiens
cacatgtccacctct

SEQ ID NO: 1089079 - DNA, 15 bp, Homo sapiens
ccacatgtccacctc

SEQ ID NO: 1089080 - DNA, 15 bp, Homo sapiens
cccacatgtccacct

SEQ ID NO: 1089081 - DNA, 15 bp, Homo sapiens
gcccacatgtccacc

SEQ ID NO: 1089082 - DNA, 15 bp, Homo sapiens
agcccacatgtccac

SEQ ID NO: 1089083 - DNA, 15 bp, Homo sapiens
cagcccacatgtcca

SEQ ID NO: 1089084 - DNA, 15 bp, Homo sapiens
acagcccacatgtcc

SEQ ID NO: 1089085 - DNA, 15 bp, Homo sapiens
cacagcccacatgtc

SEQ ID NO: 1089086 - DNA, 15 bp, Homo sapiens
ccacagcccacatgt

SEQ ID NO: 1089087 - DNA, 15 bp, Homo sapiens
tccacagcccacatg

SEQ ID NO: 1089088 - DNA, 15 bp, Homo sapiens
ctccacagcccacat

SEQ ID NO: 1089089 - DNA, 15 bp, Homo sapiens
tctccacagcccaca

SEQ ID NO: 1089090 - DNA, 15 bp, Homo sapiens
atctccacagcccac

SEQ ID NO: 1089091 - DNA, 15 bp, Homo sapiens
gatctccacagccca

SEQ ID NO: 1089092 - DNA, 15 bp, Homo sapiens
agatctccacagccc

SEQ ID NO: 1089093 - DNA, 15 bp, Homo sapiens
cagatctccacagcc

SEQ ID NO: 1089094 - DNA, 15 bp, Homo sapiens
ccagatctccacagc

SEQ ID NO: 1089095 - DNA, 15 bp, Homo sapiens
gccagatctccacag

SEQ ID NO: 1089096 - DNA, 15 bp, Homo sapiens
tgccagatctccaca

SEQ ID NO: 1089097 - DNA, 15 bp, Homo sapiens
gtgccagatctccac

SEQ ID NO: 1089098 - DNA, 15 bp, Homo sapiens
agtgccagatctcca

SEQ ID NO: 1089099 - DNA, 15 bp, Homo sapiens
aagtgccagatctcc

SEQ ID NO: 1089100 - DNA, 15 bp, Homo sapiens
aaagtgccagatctc

SEQ ID NO: 1089101 - DNA, 15 bp, Homo sapiens
gaaagtgccagatct

SEQ ID NO: 1089102 - DNA, 15 bp, Homo sapiens
ggaaagtgccagatc

SEQ ID NO: 1089103 - DNA, 15 bp, Homo sapiens
gggaaagtgccagat

SEQ ID NO: 1089104 - DNA, 15 bp, Homo sapiens
ggggaaagtgccaga

SEQ ID NO: 1089105 - DNA, 15 bp, Homo sapiens
tggggaaagtgccag

SEQ ID NO: 1089106 - DNA, 15 bp, Homo sapiens
ttggggaaagtgcca

SEQ ID NO: 1089107 - DNA, 15 bp, Homo sapiens
tttggggaaagtgcc

SEQ ID NO: 1089108 - DNA, 15 bp, Homo sapiens
gtttggggaaagtgc

SEQ ID NO: 1089109 - DNA, 15 bp, Homo sapiens
tgtttggggaaagtg

SEQ ID NO: 1089110 - DNA, 15 bp, Homo sapiens
ttgtttggggaaagt

SEQ ID NO: 1089111 - DNA, 15 bp, Homo sapiens
cttgtttggggaaag

SEQ ID NO: 1089112 - DNA, 15 bp, Homo sapiens
ccttgtttggggaaa

SEQ ID NO: 1089113 - DNA, 15 bp, Homo sapiens
tccttgtttggggaa

SEQ ID NO: 1089114 - DNA, 15 bp, Homo sapiens
ctccttgtttgggga

SEQ ID NO: 1089115 - DNA, 15 bp, Homo sapiens
tctccttgtttgggg

SEQ ID NO: 1089116 - DNA, 15 bp, Homo sapiens
ctctccttgtttggg

SEQ ID NO: 1089117 - DNA, 15 bp, Homo sapiens
tctctccttgtttgg

SEQ ID NO: 1089118 - DNA, 15 bp, Homo sapiens
ttctctccttgtttg

SEQ ID NO: 1089119 - DNA, 15 bp, Homo sapiens
tttctctccttgttt

SEQ ID NO: 1089120 - DNA, 15 bp, Homo sapiens
ctttctctccttgtt

SEQ ID NO: 1089121 - DNA, 15 bp, Homo sapiens
gctttctctccttgt

SEQ ID NO: 1089122 - DNA, 15 bp, Homo sapiens
tgctttctctccttg

SEQ ID NO: 1089123 - DNA, 15 bp, Homo sapiens
atgctttctctcctt

SEQ ID NO: 1089124 - DNA, 15 bp, Homo sapiens
tatgctttctctcct

SEQ ID NO: 1089125 - DNA, 15 bp, Homo sapiens
ctatgctttctctcc

SEQ ID NO: 1089126 - DNA, 15 bp, Homo sapiens
actatgctttctctc

SEQ ID NO: 1089127 - DNA, 15 bp, Homo sapiens
cactatgctttctct

SEQ ID NO: 1089128 - DNA, 15 bp, Homo sapiens
acactatgctttctc

SEQ ID NO: 1089129 - DNA, 15 bp, Homo sapiens
cacactatgctttct

SEQ ID NO: 1089130 - DNA, 15 bp, Homo sapiens
gcacactatgctttc

SEQ ID NO: 1089131 - DNA, 15 bp, Homo sapiens
ggcacactatgcttt

SEQ ID NO: 1089132 - DNA, 15 bp, Homo sapiens
aggcacactatgctt

SEQ ID NO: 1089133 - DNA, 15 bp, Homo sapiens
taggcacactatgct

SEQ ID NO: 1089134 - DNA, 15 bp, Homo sapiens
ataggcacactatgc

SEQ ID NO: 1089135 - DNA, 15 bp, Homo sapiens
cataggcacactatg

SEQ ID NO: 1089136 - DNA, 15 bp, Homo sapiens
acataggcacactat

SEQ ID NO: 1089137 - DNA, 15 bp, Homo sapiens
cacataggcacacta

SEQ ID NO: 1089138 - DNA, 15 bp, Homo sapiens
acacataggcacact

SEQ ID NO: 1089139 - DNA, 15 bp, Homo sapiens
cacacataggcacac

SEQ ID NO: 1089140 - DNA, 15 bp, Homo sapiens
tcacacataggcaca

SEQ ID NO: 1089141 - DNA, 15 bp, Homo sapiens
ttcacacataggcac

SEQ ID NO: 1089142 - DNA, 15 bp, Homo sapiens
attcacacataggca

SEQ ID NO: 1089143 - DNA, 15 bp, Homo sapiens
cattcacacataggc

SEQ ID NO: 1089144 - DNA, 15 bp, Homo sapiens
acattcacacatagg

SEQ ID NO: 1089145 - DNA, 15 bp, Homo sapiens
cacattcacacatag

SEQ ID NO: 1089146 - DNA, 15 bp, Homo sapiens
gcacattcacacata

SEQ ID NO: 1089147 - DNA, 15 bp, Homo sapiens
agcacattcacacat

SEQ ID NO: 1089148 - DNA, 15 bp, Homo sapiens
tagcacattcacaca

SEQ ID NO: 1089149 - DNA, 15 bp, Homo sapiens
atagcacattcacac

SEQ ID NO: 1089150 - DNA, 15 bp, Homo sapiens
catagcacattcaca

SEQ ID NO: 1089151 - DNA, 15 bp, Homo sapiens
acatagcacattcac

SEQ ID NO: 1089152 - DNA, 15 bp, Homo sapiens
cacatagcacattca

SEQ ID NO: 1089153 - DNA, 15 bp, Homo sapiens
acacatagcacattc

SEQ ID NO: 1089154 - DNA, 15 bp, Homo sapiens
cacacatagcacatt

SEQ ID NO: 1089155 - DNA, 15 bp, Homo sapiens
gcacacatagcacat

SEQ ID NO: 1089156 - DNA, 15 bp, Homo sapiens
tgcacacatagcaca

SEQ ID NO: 1089157 - DNA, 15 bp, Homo sapiens
atgcacacatagcac

SEQ ID NO: 1089158 - DNA, 15 bp, Homo sapiens
catgcacacatagca

SEQ ID NO: 1089159 - DNA, 15 bp, Homo sapiens
acatgcacacatagc

SEQ ID NO: 1089160 - DNA, 15 bp, Homo sapiens
aacatgcacacatag

SEQ ID NO: 1089161 - DNA, 15 bp, Homo sapiens
aaacatgcacacata

SEQ ID NO: 1089162 - DNA, 15 bp, Homo sapiens
caaacatgcacacat

SEQ ID NO: 1089163 - DNA, 15 bp, Homo sapiens
acaaacatgcacaca

SEQ ID NO: 1089164 - DNA, 15 bp, Homo sapiens
cacaaacatgcacac

SEQ ID NO: 1089165 - DNA, 15 bp, Homo sapiens
gcacaaacatgcaca

SEQ ID NO: 1089166 - DNA, 15 bp, Homo sapiens
ggcacaaacatgcac

SEQ ID NO: 1089167 - DNA, 15 bp, Homo sapiens
aggcacaaacatgca

SEQ ID NO: 1089168 - DNA, 15 bp, Homo sapiens
caggcacaaacatgc

SEQ ID NO: 1089169 - DNA, 15 bp, Homo sapiens
acaggcacaaacatg

SEQ ID NO: 1089170 - DNA, 15 bp, Homo sapiens
cacaggcacaaacat

SEQ ID NO: 1089171 - DNA, 15 bp, Homo sapiens
gcacaggcacaaaca

SEQ ID NO: 1089172 - DNA, 15 bp, Homo sapiens
tgcacaggcacaaac

SEQ ID NO: 1089173 - DNA, 15 bp, Homo sapiens
atgcacaggcacaaa

SEQ ID NO: 1089174 - DNA, 15 bp, Homo sapiens
tatgcacaggcacaa

SEQ ID NO: 1089175 - DNA, 15 bp, Homo sapiens
gtatgcacaggcaca

SEQ ID NO: 1089176 - DNA, 15 bp, Homo sapiens
ggtatgcacaggcac

SEQ ID NO: 1089177 - DNA, 15 bp, Homo sapiens
aggtatgcacaggca

SEQ ID NO: 1089178 - DNA, 15 bp, Homo sapiens
caggtatgcacaggc

SEQ ID NO: 1089179 - DNA, 15 bp, Homo sapiens
gcaggtatgcacagg

SEQ ID NO: 1089180 - DNA, 15 bp, Homo sapiens
tgcaggtatgcacag

SEQ ID NO: 1089181 - DNA, 15 bp, Homo sapiens
atgcaggtatgcaca

SEQ ID NO: 1089182 - DNA, 15 bp, Homo sapiens
catgcaggtatgcac

SEQ ID NO: 1089183 - DNA, 15 bp, Homo sapiens
acatgcaggtatgca

SEQ ID NO: 1089184 - DNA, 15 bp, Homo sapiens
cacatgcaggtatgc

SEQ ID NO: 1089185 - DNA, 15 bp, Homo sapiens
acacatgcaggtatg

SEQ ID NO: 1089186 - DNA, 15 bp, Homo sapiens
tacacatgcaggtat

SEQ ID NO: 1089187 - DNA, 15 bp, Homo sapiens
gtacacatgcaggta

SEQ ID NO: 1089188 - DNA, 15 bp, Homo sapiens
tgtacacatgcaggt

SEQ ID NO: 1089189 - DNA, 15 bp, Homo sapiens
atgtacacatgcagg

SEQ ID NO: 1089190 - DNA, 15 bp, Homo sapiens
catgtacacatgcag

SEQ ID NO: 1089191 - DNA, 15 bp, Homo sapiens
gcatgtacacatgca

SEQ ID NO: 1089192 - DNA, 15 bp, Homo sapiens
tgcatgtacacatgc

SEQ ID NO: 1089193 - DNA, 15 bp, Homo sapiens
atgcatgtacacatg

SEQ ID NO: 1089194 - DNA, 15 bp, Homo sapiens
catgcatgtacacat

SEQ ID NO: 1089195 - DNA, 15 bp, Homo sapiens
acatgcatgtacaca

SEQ ID NO: 1089196 - DNA, 15 bp, Homo sapiens
cacatgcatgtacac

SEQ ID NO: 1089197 - DNA, 15 bp, Homo sapiens
gcacatgcatgtaca

SEQ ID NO: 1089198 - DNA, 15 bp, Homo sapiens
tgcacatgcatgtac

SEQ ID NO: 1089199 - DNA, 15 bp, Homo sapiens
gtgcacatgcatgta

SEQ ID NO: 1089200 - DNA, 15 bp, Homo sapiens
tgtgcacatgcatgt

SEQ ID NO: 1089201 - DNA, 15 bp, Homo sapiens
atgtgcacatgcatg

SEQ ID NO: 1089202 - DNA, 15 bp, Homo sapiens
tatgtgcacatgcat

SEQ ID NO: 1089203 - DNA, 15 bp, Homo sapiens
atatgtgcacatgca

SEQ ID NO: 1089204 - DNA, 15 bp, Homo sapiens
catatgtgcacatgc

SEQ ID NO: 1089205 - DNA, 15 bp, Homo sapiens
acatatgtgcacatg

SEQ ID NO: 1089206 - DNA, 15 bp, Homo sapiens
cacatatgtgcacat

SEQ ID NO: 1089207 - DNA, 15 bp, Homo sapiens
acacatatgtgcaca

SEQ ID NO: 1089208 - DNA, 15 bp, Homo sapiens
cacacatatgtgcac

SEQ ID NO: 1089209 - DNA, 15 bp, Homo sapiens
gcacacatatgtgca

SEQ ID NO: 1089210 - DNA, 15 bp, Homo sapiens
tgcacacatatgtgc

SEQ ID NO: 1089211 - DNA, 15 bp, Homo sapiens
gtgcacacatatgtg

SEQ ID NO: 1089212 - DNA, 15 bp, Homo sapiens
tgtgcacacatatgt

SEQ ID NO: 1089213 - DNA, 15 bp, Homo sapiens
ctgtgcacacatatg

SEQ ID NO: 1089214 - DNA, 15 bp, Homo sapiens
cctgtgcacacatat

SEQ ID NO: 1089215 - DNA, 15 bp, Homo sapiens
ccctgtgcacacata

SEQ ID NO: 1089216 - DNA, 15 bp, Homo sapiens
tccctgtgcacacat

SEQ ID NO: 1089217 - DNA, 15 bp, Homo sapiens
ttccctgtgcacaca

SEQ ID NO: 1089218 - DNA, 15 bp, Homo sapiens
attccctgtgcacac

SEQ ID NO: 1089219 - DNA, 15 bp, Homo sapiens
gattccctgtgcaca

SEQ ID NO: 1089220 - DNA, 15 bp, Homo sapiens
tgattccctgtgcac

SEQ ID NO: 1089221 - DNA, 15 bp, Homo sapiens
gtgattccctgtgca

SEQ ID NO: 1089222 - DNA, 15 bp, Homo sapiens
agtgattccctgtgc

SEQ ID NO: 1089223 - DNA, 15 bp, Homo sapiens
aagtgattccctgtg

SEQ ID NO: 1089224 - DNA, 15 bp, Homo sapiens
aaagtgattccctgt

SEQ ID NO: 1089225 - DNA, 15 bp, Homo sapiens
ttaaagtgattccct

SEQ ID NO: 1089226 - DNA, 15 bp, Homo sapiens
attaaagtgattccc

SEQ ID NO: 1089227 - DNA, 15 bp, Homo sapiens
tattaaagtgattcc

SEQ ID NO: 1089228 - DNA, 15 bp, Homo sapiens
ttattaaagtgattc

SEQ ID NO: 1089229 - DNA, 15 bp, Homo sapiens
tttattaaagtgatt

SEQ ID NO: 1089230 - DNA, 15 bp, Homo sapiens
ctttattaaagtgat

SEQ ID NO: 1089231 - DNA, 15 bp, Homo sapiens
cctttattaaagtga

SEQ ID NO: 1089232 - DNA, 15 bp, Homo sapiens
gcctttattaaagtg

SEQ ID NO: 1089233 - DNA, 15 bp, Homo sapiens
ggcctttattaaagt

SEQ ID NO: 1089234 - DNA, 15 bp, Homo sapiens
tggcctttattaaag

SEQ ID NO: 1089235 - DNA, 15 bp, Homo sapiens
gtggcctttattaaa

SEQ ID NO: 1089236 - DNA, 15 bp, Homo sapiens
tgtggcctttattaa

SEQ ID NO: 1089237 - DNA, 15 bp, Homo sapiens
ctgtggcctttatta

SEQ ID NO: 1089238 - DNA, 15 bp, Homo sapiens
gctgtggcctttatt

SEQ ID NO: 1089239 - DNA, 15 bp, Homo sapiens
tgctgtggcctttat

SEQ ID NO: 1089240 - DNA, 15 bp, Homo sapiens
ctgctgtggccttta

SEQ ID NO: 1089241 - DNA, 15 bp, Homo sapiens
tctgctgtggccttt

SEQ ID NO: 1089242 - DNA, 15 bp, Homo sapiens
ctctgctgtggcctt

SEQ ID NO: 1089243 - DNA, 15 bp, Homo sapiens
acagctctgctgtgg

SEQ ID NO: 1089244 - DNA, 15 bp, Homo sapiens
gacagctctgctgtg

SEQ ID NO: 1089245 - DNA, 15 bp, Homo sapiens
ggacagctctgctgt

SEQ ID NO: 1089246 - DNA, 15 bp, Homo sapiens
gggacagctctgctg

SEQ ID NO: 1089247 - DNA, 15 bp, Homo sapiens
agggacagctctgct

SEQ ID NO: 1089248 - DNA, 15 bp, Homo sapiens
cagggacagctctgc

SEQ ID NO: 1089249 - DNA, 15 bp, Homo sapiens
tcagggacagctctg

SEQ ID NO: 1089250 - DNA, 15 bp, Homo sapiens
ctcagggacagctct

SEQ ID NO: 1089251 - DNA, 15 bp, Homo sapiens
gctcagggacagctc

SEQ ID NO: 1089252 - DNA, 15 bp, Homo sapiens
ggctcagggacagct

SEQ ID NO: 1089253 - DNA, 15 bp, Homo sapiens
gggctcagggacagc

SEQ ID NO: 1089254 - DNA, 15 bp, Homo sapiens
ggggctcagggacag

SEQ ID NO: 1089255 - DNA, 15 bp, Homo sapiens
aggggctcagggaca

SEQ ID NO: 1089256 - DNA, 15 bp, Homo sapiens
aaggggctcagggac

SEQ ID NO: 1089257 - DNA, 15 bp, Homo sapiens
caaggggctcaggga

SEQ ID NO: 1089258 - DNA, 15 bp, Homo sapiens
gcaaggggctcaggg

SEQ ID NO: 1089259 - DNA, 15 bp, Homo sapiens
tgcaaggggctcagg

SEQ ID NO: 1089260 - DNA, 15 bp, Homo sapiens
atgcaaggggctcag

SEQ ID NO: 1089261 - DNA, 15 bp, Homo sapiens
aatgcaaggggctca

SEQ ID NO: 1089262 - DNA, 15 bp, Homo sapiens
gaatgcaaggggctc

SEQ ID NO: 1089263 - DNA, 15 bp, Homo sapiens
tgaatgcaaggggct

SEQ ID NO: 1089264 - DNA, 15 bp, Homo sapiens
gtgaatgcaaggggc

SEQ ID NO: 1089265 - DNA, 15 bp, Homo sapiens
tgtgaatgcaagggg

SEQ ID NO: 1089266 - DNA, 15 bp, Homo sapiens
ctgtgaatgcaaggg

SEQ ID NO: 1089267 - DNA, 15 bp, Homo sapiens
actgtgaatgcaagg

SEQ ID NO: 1089268 - DNA, 15 bp, Homo sapiens
cactgtgaatgcaag

SEQ ID NO: 1089269 - DNA, 15 bp, Homo sapiens
ccactgtgaatgcaa

SEQ ID NO: 1089270 - DNA, 15 bp, Homo sapiens
gccactgtgaatgca

SEQ ID NO: 1089271 - DNA, 15 bp, Homo sapiens
tgccactgtgaatgc

SEQ ID NO: 1089272 - DNA, 15 bp, Homo sapiens
atgccactgtgaatg

SEQ ID NO: 1089273 - DNA, 15 bp, Homo sapiens
catgccactgtgaat

SEQ ID NO: 1089274 - DNA, 15 bp, Homo sapiens
acatgccactgtgaa

SEQ ID NO: 1089275 - DNA, 15 bp, Homo sapiens
cacatgccactgtga

SEQ ID NO: 1089276 - DNA, 15 bp, Homo sapiens
tcacatgccactgtg

SEQ ID NO: 1089277 - DNA, 15 bp, Homo sapiens
ctcacatgccactgt

SEQ ID NO: 1089278 - DNA, 15 bp, Homo sapiens
actcacatgccactg

SEQ ID NO: 1089279 - DNA, 15 bp, Homo sapiens
cactcacatgccact

SEQ ID NO: 1089280 - DNA, 15 bp, Homo sapiens
tcactcacatgccac

SEQ ID NO: 1089281 - DNA, 15 bp, Homo sapiens
ttcactcacatgcca

SEQ ID NO: 1089282 - DNA, 15 bp, Homo sapiens
gttcactcacatgcc

SEQ ID NO: 1089283 - DNA, 15 bp, Homo sapiens
ggttcactcacatgc

SEQ ID NO: 1089284 - DNA, 15 bp, Homo sapiens
tggttcactcacatg

SEQ ID NO: 1089285 - DNA, 15 bp, Homo sapiens
gtggttcactcacat

SEQ ID NO: 1089286 - DNA, 15 bp, Homo sapiens
ggtggttcactcaca

SEQ ID NO: 1089287 - DNA, 15 bp, Homo sapiens
aggtggttcactcac

SEQ ID NO: 1089288 - DNA, 15 bp, Homo sapiens
aaggtggttcactca

SEQ ID NO: 1089289 - DNA, 15 bp, Homo sapiens
gaaggtggttcactc

SEQ ID NO: 1089290 - DNA, 15 bp, Homo sapiens
agaaggtggttcact

SEQ ID NO: 1089291 - DNA, 15 bp, Homo sapiens
aagaaggtggttcac

SEQ ID NO: 1089292 - DNA, 15 bp, Homo sapiens
taagaaggtggttca

SEQ ID NO: 1089293 - DNA, 15 bp, Homo sapiens
ctaagaaggtggttc

SEQ ID NO: 1089294 - DNA, 15 bp, Homo sapiens
cctaagaaggtggtt

SEQ ID NO: 1089295 - DNA, 15 bp, Homo sapiens
gcctaagaaggtggt

SEQ ID NO: 1089296 - DNA, 15 bp, Homo sapiens
agcctaagaaggtgg

SEQ ID NO: 1089297 - DNA, 15 bp, Homo sapiens
cagcctaagaaggtg

SEQ ID NO: 1089298 - DNA, 15 bp, Homo sapiens
ccagcctaagaaggt

SEQ ID NO: 1089299 - DNA, 15 bp, Homo sapiens
cccagcctaagaagg

SEQ ID NO: 1089300 - DNA, 15 bp, Homo sapiens
gcccagcctaagaag

SEQ ID NO: 1089301 - DNA, 15 bp, Homo sapiens
tgcccagcctaagaa

SEQ ID NO: 1089302 - DNA, 15 bp, Homo sapiens
atgcccagcctaaga

SEQ ID NO: 1089303 - DNA, 15 bp, Homo sapiens
gatgcccagcctaag

SEQ ID NO: 1089304 - DNA, 15 bp, Homo sapiens
ggatgcccagcctaa

SEQ ID NO: 1089305 - DNA, 15 bp, Homo sapiens
tggatgcccagccta

SEQ ID NO: 1089306 - DNA, 15 bp, Homo sapiens
ctggatgcccagcct

SEQ ID NO: 1089307 - DNA, 15 bp, Homo sapiens
actggatgcccagcc

SEQ ID NO: 1089308 - DNA, 15 bp, Homo sapiens
gactggatgcccagc

SEQ ID NO: 1089309 - DNA, 15 bp, Homo sapiens
agactggatgcccag

SEQ ID NO: 1089310 - DNA, 15 bp, Homo sapiens
gagactggatgccca

SEQ ID NO: 1089311 - DNA, 15 bp, Homo sapiens
tgagactggatgccc

SEQ ID NO: 1089312 - DNA, 15 bp, Homo sapiens
ctgagactggatgcc

SEQ ID NO: 1089313 - DNA, 15 bp, Homo sapiens
tctgagactggatgc

SEQ ID NO: 1089314 - DNA, 15 bp, Homo sapiens
gtctgagactggatg

SEQ ID NO: 1089315 - DNA, 15 bp, Homo sapiens
agtctgagactggat

SEQ ID NO: 1089316 - DNA, 15 bp, Homo sapiens
gagtctgagactgga

SEQ ID NO: 1089317 - DNA, 15 bp, Homo sapiens
agagtctgagactgg

SEQ ID NO: 1089318 - DNA, 15 bp, Homo sapiens
cagagtctgagactg

SEQ ID NO: 1089319 - DNA, 15 bp, Homo sapiens
ccagagtctgagact

SEQ ID NO: 1089320 - DNA, 15 bp, Homo sapiens
cccagagtctgagac

SEQ ID NO: 1089321 - DNA, 15 bp, Homo sapiens
ccccagagtctgaga

SEQ ID NO: 1089322 - DNA, 15 bp, Homo sapiens
gccccagagtctgag

SEQ ID NO: 1089323 - DNA, 15 bp, Homo sapiens
agccccagagtctga

SEQ ID NO: 1089324 - DNA, 15 bp, Homo sapiens
cagccccagagtctg

SEQ ID NO: 1089325 - DNA, 15 bp, Homo sapiens
gcagccccagagtct

SEQ ID NO: 1089326 - DNA, 15 bp, Homo sapiens
ggcagccccagagtc

SEQ ID NO: 1089327 - DNA, 15 bp, Homo sapiens
gggcagccccagagt

SEQ ID NO: 1089328 - DNA, 15 bp, Homo sapiens
tgggcagccccagag

SEQ ID NO: 1089329 - DNA, 15 bp, Homo sapiens
atgggcagccccaga

SEQ ID NO: 1089330 - DNA, 15 bp, Homo sapiens
catgggcagccccag

SEQ ID NO: 1089331 - DNA, 15 bp, Homo sapiens
gcatgggcagcccca

SEQ ID NO: 1089332 - DNA, 15 bp, Homo sapiens
ggcatgggcagcccc

SEQ ID NO: 1089333 - DNA, 15 bp, Homo sapiens
gggcatgggcagccc

SEQ ID NO: 1089334 - DNA, 15 bp, Homo sapiens
ggggcatgggcagcc

SEQ ID NO: 1089335 - DNA, 15 bp, Homo sapiens
tggggcatgggcagc

SEQ ID NO: 1089336 - DNA, 15 bp, Homo sapiens
atggggcatgggcag

SEQ ID NO: 1089337 - DNA, 15 bp, Homo sapiens
gatggggcatgggca

SEQ ID NO: 1089338 - DNA, 15 bp, Homo sapiens
ggatggggcatgggc

SEQ ID NO: 1089339 - DNA, 15 bp, Homo sapiens
aggatggggcatggg

SEQ ID NO: 1089340 - DNA, 15 bp, Homo sapiens
aaggatggggcatgg

SEQ ID NO: 1089341 - DNA, 15 bp, Homo sapiens
aaaggatggggcatg

SEQ ID NO: 1089342 - DNA, 15 bp, Homo sapiens
taaaggatggggcat

SEQ ID NO: 1089343 - DNA, 15 bp, Homo sapiens
ataaaggatggggca

SEQ ID NO: 1089344 - DNA, 15 bp, Homo sapiens
gataaaggatggggc

SEQ ID NO: 1089345 - DNA, 15 bp, Homo sapiens
agataaaggatgggg

SEQ ID NO: 1089346 - DNA, 15 bp, Homo sapiens
cagataaaggatggg

SEQ ID NO: 1089347 - DNA, 15 bp, Homo sapiens
gcagataaaggatgg

SEQ ID NO: 1089348 - DNA, 15 bp, Homo sapiens
agcagataaaggatg

SEQ ID NO: 1089349 - DNA, 15 bp, Homo sapiens
gagcagataaaggat

SEQ ID NO: 1089350 - DNA, 15 bp, Homo sapiens
ggagcagataaagga

SEQ ID NO: 1089351 - DNA, 15 bp, Homo sapiens
tggagcagataaagg

SEQ ID NO: 1089352 - DNA, 15 bp, Homo sapiens
gtggagcagataaag

SEQ ID NO: 1089353 - DNA, 15 bp, Homo sapiens
cgtggagcagataaa

SEQ ID NO: 1089354 - DNA, 15 bp, Homo sapiens
acacgtggagcagat

SEQ ID NO: 1089355 - DNA, 15 bp, Homo sapiens
cacacgtggagcaga

SEQ ID NO: 1089356 - DNA, 15 bp, Homo sapiens
tcacacgtggagcag

SEQ ID NO: 1089357 - DNA, 15 bp, Homo sapiens
ctcacacgtggagca

SEQ ID NO: 1089358 - DNA, 15 bp, Homo sapiens
cctcacacgtggagc

SEQ ID NO: 1089359 - DNA, 15 bp, Homo sapiens
ccctcacacgtggag

SEQ ID NO: 1089360 - DNA, 15 bp, Homo sapiens
cccctcacacgtgga

SEQ ID NO: 1089361 - DNA, 15 bp, Homo sapiens
acccctcacacgtgg

SEQ ID NO: 1089362 - DNA, 15 bp, Homo sapiens
aacccctcacacgtg

SEQ ID NO: 1089363 - DNA, 15 bp, Homo sapiens
caacccctcacacgt

SEQ ID NO: 1089364 - DNA, 15 bp, Homo sapiens
gcaacccctcacacg

SEQ ID NO: 1089365 - DNA, 15 bp, Homo sapiens
agcaacccctcacac

SEQ ID NO: 1089366 - DNA, 15 bp, Homo sapiens
cagcaacccctcaca

SEQ ID NO: 1089367 - DNA, 15 bp, Homo sapiens
ccagcaacccctcac

SEQ ID NO: 1089368 - DNA, 15 bp, Homo sapiens
accagcaacccctca

SEQ ID NO: 1089369 - DNA, 15 bp, Homo sapiens
gaccagcaacccctc

SEQ ID NO: 1089370 - DNA, 15 bp, Homo sapiens
ggaccagcaacccct

SEQ ID NO: 1089371 - DNA, 15 bp, Homo sapiens
aggaccagcaacccc

SEQ ID NO: 1089372 - DNA, 15 bp, Homo sapiens
caggaccagcaaccc

SEQ ID NO: 1089373 - DNA, 15 bp, Homo sapiens
tcaggaccagcaacc

SEQ ID NO: 1089374 - DNA, 15 bp, Homo sapiens
gtcaggaccagcaac

SEQ ID NO: 1089375 - DNA, 15 bp, Homo sapiens
ggtcaggaccagcaa

SEQ ID NO: 1089376 - DNA, 15 bp, Homo sapiens
tggtcaggaccagca

SEQ ID NO: 1089377 - DNA, 15 bp, Homo sapiens
ctggtcaggaccagc

SEQ ID NO: 1089378 - DNA, 15 bp, Homo sapiens
cctggtcaggaccag

SEQ ID NO: 1089379 - DNA, 15 bp, Homo sapiens
ccctggtcaggacca

SEQ ID NO: 1089380 - DNA, 15 bp, Homo sapiens
gccctggtcaggacc

SEQ ID NO: 1089381 - DNA, 15 bp, Homo sapiens
ggccctggtcaggac

SEQ ID NO: 1089382 - DNA, 15 bp, Homo sapiens
tggccctggtcagga

SEQ ID NO: 1089383 - DNA, 15 bp, Homo sapiens
ctggccctggtcagg

SEQ ID NO: 1089384 - DNA, 15 bp, Homo sapiens
gctggccctggtcag

SEQ ID NO: 1089385 - DNA, 15 bp, Homo sapiens
agctggccctggtca

SEQ ID NO: 1089386 - DNA, 15 bp, Homo sapiens
cagctggccctggtc

SEQ ID NO: 1089387 - DNA, 15 bp, Homo sapiens
acagctggccctggt

SEQ ID NO: 1089388 - DNA, 15 bp, Homo sapiens
cacagctggccctgg

SEQ ID NO: 1089389 - DNA, 15 bp, Homo sapiens
tcacagctggccctg

SEQ ID NO: 1089390 - DNA, 15 bp, Homo sapiens
ttcacagctggccct

SEQ ID NO: 1089391 - DNA, 15 bp, Homo sapiens
gttcacagctggccc

SEQ ID NO: 1089392 - DNA, 15 bp, Homo sapiens
ggttcacagctggcc

SEQ ID NO: 1089393 - DNA, 15 bp, Homo sapiens
gggttcacagctggc

SEQ ID NO: 1089394 - DNA, 15 bp, Homo sapiens
ggggttcacagctgg

SEQ ID NO: 1089395 - DNA, 15 bp, Homo sapiens
tggggttcacagctg

SEQ ID NO: 1089396 - DNA, 15 bp, Homo sapiens
ctggggttcacagct

SEQ ID NO: 1089397 - DNA, 15 bp, Homo sapiens
tctggggttcacagc

SEQ ID NO: 1089398 - DNA, 15 bp, Homo sapiens
ttctggggttcacag

SEQ ID NO: 1089399 - DNA, 15 bp, Homo sapiens
attctggggttcaca

SEQ ID NO: 1089400 - DNA, 15 bp, Homo sapiens
gattctggggttcac

SEQ ID NO: 1089401 - DNA, 15 bp, Homo sapiens
ggattctggggttca

SEQ ID NO: 1089402 - DNA, 15 bp, Homo sapiens
aggattctggggttc

SEQ ID NO: 1089403 - DNA, 15 bp, Homo sapiens
caggattctggggtt

SEQ ID NO: 1089404 - DNA, 15 bp, Homo sapiens
ccaggattctggggt

SEQ ID NO: 1089405 - DNA, 15 bp, Homo sapiens
cccaggattctgggg

SEQ ID NO: 1089406 - DNA, 15 bp, Homo sapiens
tcccaggattctggg

SEQ ID NO: 1089407 - DNA, 15 bp, Homo sapiens
ttcccaggattctgg

SEQ ID NO: 1089408 - DNA, 15 bp, Homo sapiens
cttcccaggattctg

SEQ ID NO: 1089409 - DNA, 15 bp, Homo sapiens
acttcccaggattct

SEQ ID NO: 1089410 - DNA, 15 bp, Homo sapiens
gacttcccaggattc

SEQ ID NO: 1089411 - DNA, 15 bp, Homo sapiens
tgacttcccaggatt

SEQ ID NO: 1089412 - DNA, 15 bp, Homo sapiens
gtgacttcccaggat

SEQ ID NO: 1089413 - DNA, 15 bp, Homo sapiens
agtgacttcccagga

SEQ ID NO: 1089414 - DNA, 15 bp, Homo sapiens
cagtgacttcccagg

SEQ ID NO: 1089415 - DNA, 15 bp, Homo sapiens
tcagtgacttcccag

SEQ ID NO: 1089416 - DNA, 15 bp, Homo sapiens
gtcagtgacttccca

SEQ ID NO: 1089417 - DNA, 15 bp, Homo sapiens
tgtcagtgacttccc

SEQ ID NO: 1089418 - DNA, 15 bp, Homo sapiens
atgtcagtgacttcc

SEQ ID NO: 1089419 - DNA, 15 bp, Homo sapiens
aatgtcagtgacttc

SEQ ID NO: 1089420 - DNA, 15 bp, Homo sapiens
gaatgtcagtgactt

SEQ ID NO: 1089421 - DNA, 15 bp, Homo sapiens
agaatgtcagtgact

SEQ ID NO: 1089422 - DNA, 15 bp, Homo sapiens
aagaatgtcagtgac

SEQ ID NO: 1089423 - DNA, 15 bp, Homo sapiens
caagaatgtcagtga

SEQ ID NO: 1089424 - DNA, 15 bp, Homo sapiens
acaagaatgtcagtg

SEQ ID NO: 1089425 - DNA, 15 bp, Homo sapiens
gacaagaatgtcagt

SEQ ID NO: 1089426 - DNA, 15 bp, Homo sapiens
tgacaagaatgtcag

SEQ ID NO: 1089427 - DNA, 15 bp, Homo sapiens
ctgacaagaatgtca

SEQ ID NO: 1089428 - DNA, 15 bp, Homo sapiens
cctgacaagaatgtc

SEQ ID NO: 1089429 - DNA, 15 bp, Homo sapiens
ccctgacaagaatgt

SEQ ID NO: 1089430 - DNA, 15 bp, Homo sapiens
gccctgacaagaatg

SEQ ID NO: 1089431 - DNA, 15 bp, Homo sapiens
ggccctgacaagaat

SEQ ID NO: 1089432 - DNA, 15 bp, Homo sapiens
tggccctgacaagaa

SEQ ID NO: 1089433 - DNA, 15 bp, Homo sapiens
ttggccctgacaaga

SEQ ID NO: 1089434 - DNA, 15 bp, Homo sapiens
cttggccctgacaag

SEQ ID NO: 1089435 - DNA, 15 bp, Homo sapiens
tcttggccctgacaa

SEQ ID NO: 1089436 - DNA, 15 bp, Homo sapiens
ctcttggccctgaca

SEQ ID NO: 1089437 - DNA, 15 bp, Homo sapiens
actcttggccctgac

SEQ ID NO: 1089438 - DNA, 15 bp, Homo sapiens
cactcttggccctga

SEQ ID NO: 1089439 - DNA, 15 bp, Homo sapiens
ccactcttggccctg

SEQ ID NO: 1089440 - DNA, 15 bp, Homo sapiens
tccactcttggccct

SEQ ID NO: 1089441 - DNA, 15 bp, Homo sapiens
ctccactcttggccc

SEQ ID NO: 1089442 - DNA, 15 bp, Homo sapiens
gctccactcttggcc

SEQ ID NO: 1089443 - DNA, 15 bp, Homo sapiens
tgctccactcttggc

SEQ ID NO: 1089444 - DNA, 15 bp, Homo sapiens
ttgctccactcttgg

SEQ ID NO: 1089445 - DNA, 15 bp, Homo sapiens
cttgctccactcttg

SEQ ID NO: 1089446 - DNA, 15 bp, Homo sapiens
ccttgctccactctt

SEQ ID NO: 1089447 - DNA, 15 bp, Homo sapiens
gccttgctccactct

SEQ ID NO: 1089448 - DNA, 15 bp, Homo sapiens
tgccttgctccactc

SEQ ID NO: 1089449 - DNA, 15 bp, Homo sapiens
ttgccttgctccact

SEQ ID NO: 1089450 - DNA, 15 bp, Homo sapiens
attgccttgctccac

SEQ ID NO: 1089451 - DNA, 15 bp, Homo sapiens
cattgccttgctcca

SEQ ID NO: 1089452 - DNA, 15 bp, Homo sapiens
gcattgccttgctcc

SEQ ID NO: 1089453 - DNA, 15 bp, Homo sapiens
ggcattgccttgctc

SEQ ID NO: 1089454 - DNA, 15 bp, Homo sapiens
aggcattgccttgct

SEQ ID NO: 1089455 - DNA, 15 bp, Homo sapiens
gaggcattgccttgc

SEQ ID NO: 1089456 - DNA, 15 bp, Homo sapiens
cgaggcattgccttg

SEQ ID NO: 1089457 - DNA, 15 bp, Homo sapiens
ccgaggcattgcctt

SEQ ID NO: 1089458 - DNA, 15 bp, Homo sapiens
cccgaggcattgcct

SEQ ID NO: 1089459 - DNA, 15 bp, Homo sapiens
gcccgaggcattgcc

SEQ ID NO: 1089460 - DNA, 15 bp, Homo sapiens
tgcccgaggcattgc

SEQ ID NO: 1089461 - DNA, 15 bp, Homo sapiens
gtgcccgaggcattg

SEQ ID NO: 1089462 - DNA, 15 bp, Homo sapiens
tgtgcccgaggcatt

SEQ ID NO: 1089463 - DNA, 15 bp, Homo sapiens
ttgtgcccgaggcat

SEQ ID NO: 1089464 - DNA, 15 bp, Homo sapiens
tttgtgcccgaggca

SEQ ID NO: 1089465 - DNA, 15 bp, Homo sapiens
gtttgtgcccgaggc

SEQ ID NO: 1089466 - DNA, 15 bp, Homo sapiens
agtttgtgcccgagg

SEQ ID NO: 1089467 - DNA, 15 bp, Homo sapiens
aagtttgtgcccgag

SEQ ID NO: 1089468 - DNA, 15 bp, Homo sapiens
aaagtttgtgcccga

SEQ ID NO: 1089469 - DNA, 15 bp, Homo sapiens
taaagtttgtgcccg

SEQ ID NO: 1089470 - DNA, 15 bp, Homo sapiens
ttaaagtttgtgccc
